(19) United States
(12) Patent Application Publication
(10) Pub. No.: US 2025/0327125 A1
(43) Pub. Date: Oct. 23, 2025

(54) SYSTEMS AND METHODS FOR ANALYSIS OF SAMPLES ASSOCIATED WITH NONALCOHOLIC FATTY LIVER DISEASE

(71) Applicant: THE REGENTS OF THE UNIVERSITY OF MICHIGAN, Ann Arbor, MI (US)

(72) Inventor: Elizabeth Speliotes, Ann Arbor, MI (US)

(21) Appl. No.: 18/870,228

(22) PCT Filed: Jun. 1, 2023
(86) PCT No.: PCT/US2023/067770

§ 371 Date: Nov. 27, 2024

Related U.S. Application Data
(60) Provisional application No. 63/347,799, filed on Jun. 1, 2022.
(60) Provisional application No. 63/377,471, filed on Sep. 28, 2022.

(51) Int. Cl. C12Q 1/6883

(52) U.S. Cl. CPC C12Q 1/6883; C12Q 2600/156; C12Q 2600/158

(57) ABSTRACT

Provided herein are systems and methods for analysis of biological samples to identify biomarkers associated with non-alcoholic fatty liver disease. For example, provided herein are molecular signatures that find use in characterizing samples to facilitate research, drug discovery, and treatment associated with nonalcoholic fatty liver disease.

### CROSS-REFERENCE TO RELATED APPLICATIONS

[0001] This application claims the benefit of U.S. Provisional Application Nos. 63/347,799, filed Jun. 1, 2022, and 63/377,471, filed Sep. 28, 2022, the contents of which are herein incorporated by reference in their entirety.

### STATEMENT REGARDING FEDERALLY SPONSORED RESEARCH OR DEVELOPMENT

[0002] This invention was made with government support under DK107904 awarded by the National Institutes of Health. The government has certain rights in the invention.

### SEQUENCE LISTING STATEMENT

[0003] The contents of the electronic sequence listing titled UM-39791-601.xml (Size: 27,011,446 bytes; and Date of Creation: May 31, 2023) is herein incorporated by reference in its entirety.

### FIELD

[0004] Provided herein are systems and methods for analysis of biological samples to identify biomarkers associated with nonalcoholic fatty liver disease. For example, provided herein are molecular signatures that find use in characterizing samples to facilitate research, drug discovery, and treatment associated with nonalcoholic fatty liver disease.

### BACKGROUND

[0005] Nonalcoholic fatty liver disease (NAFLD) is the most common liver disease worldwide and has no effective treatments. NAFLD is heritable.

[0006] With rising obesity rates, the prevalence of nonalcoholic fatty liver disease (NAFLD) has increased to epidemic proportions. NAFLD is caused by the deposition of excess fat in the liver (not due to alcohol), and can lead to advanced liver diseases including inflammation, fibrosis/cirrhosis (scarring), and hepatocellular carcinoma (HCC; liver cancer). NAFLD is also associated with metabolic diseases including dyslipidemia, hypertension, cardiovascular disease, and diabetes, though causal relationships have yet to be established. More than 90% of severely obese individuals suffer from advanced NAFLD, which is associated with a shorter lifespan. The disease imposes an annual direct medical cost of about $103 billion in the United States and will soon become the leading indication for liver transplantation in this country. The causes of NAFLD are poorly understood, and there are presently no effective treatments, making NAFLD treatment a large unmet medical need.

[0007] NAFLD is heritable and has identified variants associated with disease. However, these variants explain only about 20% of the heritability. What is needed are systems and methods to better analyze the disease to facilitate drug discovery and disease prevention and treatment.

### SUMMARY

[0008] Provided herein are systems and methods for analysis of biological samples to identify biomarkers associated with nonalcoholic fatty liver disease (NAFLD). For example, provided herein are molecular signatures that find use in characterizing samples to facilitate research, drug discovery, and treatment associated with nonalcoholic fatty liver disease.

[0009] In experiments conducted during the development of the invention, the largest genome-wide association meta-analysis of imaging and diagnostic code measured NAFLD to date was carried out. We identified a number of genome-wide significant NAFLD associated variants, a significant NAFLD associated gene, and confirmed ten additional, previously published liver function test (LFT) and NAFLD associated variants. These variants, and the genes and pathways they highlight, provide new insights into the pathogenesis of NAFLD, identify subtypes of disease, and create new genetic marker panels that can identify individuals at higher genetic risk of advanced liver disease and that facilitate research, drug discovery, and treatment of patients suffering from NAFLD.

[0010] For example, new NAFLD associated variants at TOR1B (Torsin Family 1 Member B), FTO (FTO Alpha-Ketoglutarate Dependent Dioxygenase), COBLL1 (Cordon-Bleu WH2 Repeat Protein Like 1)/GRB14 (Growth Factor Receptor Bound Protein 14), INSR (Insulin Receptor), SREBF1 (Sterol regulatory element-binding transcription factor 1), and PNPLA2 (Patatin Like Phospholipase Domain Containing 2), as well as reproducible NAFLD associated variants at APOE (Apolipoprotein E), MARC1 (Mitochondrial Amidoxime Reducing Component 1), GCKR (Glucokinase Regulator), TM6SF2 (Transmembrane 6 Superfamily Member 2), PNPLA3 (Patatin Like Phospholipase Domain Containing 3), GPAM (Glycerol-3-Phosphate Acyltransferase, Mitochondrial), TRIB1 (Tribbles Pseudokinase 1), MTTP (Microsomal Triglyceride Transfer Protein), ADH1B (Alcohol Dehydrogenase 1B (Class I), Beta Polypeptide), PTPRD (Protein Tyrosine Phosphatase Receptor Type D), andTMC4 (Transmembrane Channel Like 4)/MBOAT7 (Membrane Bound O-Acyltransferase Domain Containing 7), were identified.

[0011] Genes implicated by these variants play a role in mitochondrial, very-low-density lipoprotein (VLDL), cholesterol, and de novo lipogenesis processes. PheWAS analyses reveal at least seven subtypes of NAFLD. Genetic predisposition to NAFLD causally predisposes to cirrhosis and genetic predisposition to higher body mass index and waist circumference causally predisposes to NAFLD. Individuals at the top 10% and 1% of genetic risk have 3- to 6-fold increased risk of NAFLD, cirrhosis, and hepatocellular carcinoma. These genetic variants identify subtypes of disease, improve estimates of disease risk, and guide development of targeted therapeutics as well as identifying subject for appropriate interventions and preventative strategies.

[0012] For example, in some embodiments compositions, kits, systems, and methods are provided for analyzing the one or more variants. Variants are detected directly or indirectly. In some embodiments, direct methods comprise use of a molecular assay such as a hybridization assay (e.g., using one or more allele-specific primers or probes), a sequencing assay, a microarray, a cleavage assay, or the like. In some embodiments, indirect methods comprising detection of variants in linkage equilibrium with a variant, detections of altered gene expression relative to wild-type, or the like.

[0013] In some embodiments, the methods comprise analyzing a biological sample from a subject for one or more variants. In some embodiments, one or more (e.g., 1, 2, 3, 4, 5, 6, 7, 8, 9, 10, 11, 12, 13, 14, 15, 16, all) of the variants rs738408, rs58542926, rs429358, rs1260326, rs28601761, rs4918722, rs2807834, rs7661964, rs1229984, rs7029757, rs17817449, rs79953491, rs112630404, rs626283, rs4561528, rs10756038, rs140201358 and mutations in MTTP are detected. In some embodiments, one or more of these variants is detected in combination with one or more other variants. In some such embodiments, the total number of variants detected or analyzed is less than 500, less than 200, less than 100, less than 50, or less than 25. In some embodiments, at least 10 of the listed variants are analyzed. In some embodiments, at least fifteen of the variants listed are analyzed. In some embodiments, at least 20 of the variants listed are analyzed. In some embodiments, only variants from the listed variants are analyzed. In other embodiments, additional variants not listed are analyzed in combination with one or more of the listed variants.

[0014] Any suitable sample may be used that contains nucleic acid amenable to analysis. In some embodiments, the biological sample is selected from the group consisting of blood, serum, plasma, saliva, tissue, hair, semen, and urine. In some embodiments, a biological sample is obtained from a subject suspected of having nonalcoholic fatty liver disease. Such suspicion may arise from any of any number of factors including, but not limited to, family history, obesity, signs or symptoms of disease, and a positive imaging or diagnostic test suggesting disease.

[0015] Also provided herein are methods of managing nonalcoholic fatty liver disease, comprising: analyzing a biological sample from a subject for one or more of the variants from the list of rs738408, rs58542926, rs429358, rs 1260326, rs28601761, rs4918722, rs2807834, rs7661964, rs1229984, rs7029757, rs17817449, rs79953491, rs112630404, rs626283, rs4561528, rs10756038, rs140201358, or a variant or marker in linkage disequilibrium therewith, and mutations in MTTP; generating a fatty liver disease risk score based on the presence or absence of said variants; and treating the subject with a nonalcoholic fatty liver disease intervention if said risk score indicates a predisposition to or presence of nonalcoholic fatty liver disease. In some embodiments, the risk score is calculated using an algorithm that accounts for each of the analyzed variants. In some embodiments, the risk score further is based on one or more of blood count, liver enzyme test data, liver function test data, hepatitis A test data, hepatitis C test data, celiac disease screening test data, fasting blood sugar, hemoglobin AIC data, and lipid profile data. In some embodiments, the risk score further is based on one or more of; age, gender, and/or body composition. In some embodiments, the risk score further is based on one or more of abdominal ultrasound data, computerized tomography (CT) scanning data, magnetic resonance imaging (MRI) data, transient elastography data, and magnetic resonance elastography data. In some embodiments, the treating comprises applying a weight loss regime. In some embodiments, the treating comprises liver transplantation. In some embodiments, the treating comprises administration of a pharmaceutical agent. In some embodiments, the pharmaceutical agent is one or more of: an essential phospholipid (e.g., polyenylphosphatidylcholine); an anti-diabetic agent (e.g., insulin, metformin, pioglitazone, glucagon-like peptide-1 (GLP-1) agonists, sodium-glucose cotransporter-2 (SGLT-2) inhibitors, thiazolidinediones (TZD), obeticholic acid, ursodeoxycholic acid, RG-125); a dietary supplement (e.g., vitamin E, silymarin, S-adenosyl-L-methionine (SAMe), glutathione, glycyrrhizic acid); an antifibrotic agent (e.g., RAS blockers such as angiotensin-converting enzyme inhibitors (ACEIs) and angiotensin II receptor blockers (ARBs), pentoxifylline, larsucosterol, galectin-3 inhibitors, cenicriviroc); and an anti-obesity agent (e.g., sibutramine).

[0016] Further provided herein are systems (e.g., kits, reactions mixtures, etc.) comprising: a set or reagents that specifically detect one or more variants from the list of rs738408, rs58542926, rs429358, rs1260326, rs28601761, rs4918722, rs2807834, rs7661964, rs1229984, rs7029757, rs17817449, rs79953491, rs112630404, rs626283, rs4561528, rs10756038, rs140201358, or a variant or marker in linkage disequilibrium therewith, and mutations in MTTP. In some embodiments, the system detects a total of less than 500, less than 200, less than 100, less than 50, or less than 25 variants. In some embodiments, the reagents comprise one or more primers or probe specific for the variants (e.g., primers or probes useful in allele-specific PCR or similar assays). In some embodiments, the reagents comprising nucleic acid sequence reagents. In some embodiments, the reagents comprise a microarray (e.g., a hybridization based microarray).

[0017] Also provided herein is a non-transitory computer-readable storage medium comprising an instruction, wherein when the instruction is run by at least one computer processor, wherein the at least one processor performs operations comprising one or more or each of the steps: a) receiving data identifying the presence or absence of a variant in a biological sample from at least one of rs738408, rs58542926, rs429358, rs 1260326, rs28601761, rs4918722, rs2807834, rs7661964, rs1229984, rs7029757, rs17817449, rs79953491, rs112630404, rs626283, rs4561528, rs10756038, rs140201358, or a variant or marker in linkage disequilibrium therewith, and mutations in MTTP; b) generating a nonalcoholic fatty acid liver disease risk score from the data; and c) displaying or reporting said risk score. The displaying may comprise generating a written or electronic report for use by a physician, a researcher, a patients, or any other desired format.

[0018] Further provided herein are methods of diagnosing fatty liver disease or predisposition to fatty liver disease comprising: analyzing a biological sample from a subject for one or more variant from the list of rs738408, rs58542926, rs429358, rs1260326, rs28601761, rs4918722, rs2807834, rs7661964, rs1229984, rs7029757, rs17817449, rs79953491, rs112630404, rs626283, rs4561528, rs10756038, rs140201358, or a variant or marker in linkage disequilibrium therewith, and mutations in MTTP

### BRIEF DESCRIPTION OF FIGURES

[0019] FIG. 1 shows the characteristics of a subset of GOLDPlus genome-wide significant variants in GOLD ancestry-based cohorts. For each variant the characteristics are shown for the GOLD ancestry-based analysis including: associated gene, NAFLD increasing effect allele (EA), effect allele frequency (EAF), effect/beta and 95% confidence interval, Cochran's Q heterogeneity 12 metric and heterogeneity p-value, EA p-value (P), and sample size (N). Results are for meta-analysis of GOLD European ancestry (red), African ancestry (blue), Hispanic ancestry (green), Chinese ancestry (purple), and all ancestries pooled (black).

[0020] FIG. 2 shows the effects of NAFLD associated variants on other human diseases and traits. Associations between NAFLD associated variants and diseases are shown as Z-scores in the heatmap. White horizontal bars between the groups in the heatmaps were used to separate each k-means cluster. Red indicates that the NAFLD-increasing allele has increased association with the disease/trait, blue indicates decreased association, and white indicates no significant association. A horizontal bar atop the heatmap corresponds to overall groupings of the disease/traits in the key. Gray boxes on the vertical axis indicate the overall protein localization of the genes in each cluster.

[0021] FIGS. 3A-3C show the associations between NAFLD polygenic risk score with NAFLD, cirrhosis, and HCC in an independent cohort. Association between percentile of GOLDPlus NAFLD polygenic risk score on the independent MGI cohort on NAFLD (FIG. 3A), cirrhosis (FIG. 3B), or HCC (FIG. 3C). All results are depicted as odds ratios for NAFLD, cirrhosis, or HCC relative to individuals in the 0-10th percentile of polygenic risk score, adjusted for sex, age, age², and PCs 1-10. Error bars represent 95% confidence intervals.

[0022] FIG. 4 shows GOLDPlus NAFLD measures meta-analysis study design.

[0023] FIGS. 5A-5Q are LocusZoom plots of index GOLDPlus Significant Variants. Index variant is labeled in purple and when applicable exonic variant in LD with index variant is labeled in red and 1000G EUR ancestry linkage disequilibrium structure utilized is used. (FIG. 5A) rs738408-PNPLA3, (FIG. 5B) rs58542926-TM6SF2, (FIG. 5C) rs429358-APOE, (FIG. 5D) rs1260326-GCKR, (FIG. 5E) rs28601761-TRIB1, (FIG. 5F) rs4918722-GPAM, (FIG. 5G) rs2807834-MARC1, (FIG. 5H) rs7661964-MTTP, (FIG. 5I) rs7029757-TOR1B, (FIG. 5J) rs1229984-ADH1B, (FIG. 5K) rs17817449-FTO, (FIG. 5L) rs79953491-COBLL1, (FIG. 5M) rs112630404-INSR, (FIG. 5N) rs626283-TMC4/MBOAT7, (FIG. 50) rs4561528-SREBF1, (FIG. 5P) rs10756038-PTPRD, and (FIG. 5Q) rs140201358-PNPLA2.

[0024] FIG. 6 shows European GOLDPlus NAFLD measures meta-analysis schematic.

[0025] FIG. 7 shows characteristics of GOLDPlus genome-wide significant variants in GOLD ancestry-based cohorts. For each variant the characteristics are shown for the GOLD ancestry-based analysis including: associated gene, NAFLD increasing effect allele (EA), effect allele frequency (EAF), effect/beta and 95% confidence interval, Cochran's Q heterogeneity 12 metric and heterogeneity p-value, EA p-value (P), and sample size (N). Results are for meta-analysis of GOLD European ancestry (red), African ancestry (blue), Hispanic ancestry (green), Chinese ancestry (purple), and all ancestries pooled (black).

[0026] FIG. 8 shows characteristics of GOLDPlus genome-wide significant variants in GOLD sex-specific cohorts. For each variant the characteristics are shown for the GOLD sex-specific analysis including: associated gene, NAFLD increasing effect allele (EA), effect allele frequency (EAF), effect/beta and 95% confidence interval, Cochran's Q heterogeneity 12 metric and heterogeneity p-value, EA p-value (P), and sample size (N). Results are for meta-analysis of GOLD cohort males (blue), females (red), and pooled sexes (black).

[0027] FIG. 9 shows DEPICT analysis of biological enrichment of NAFLD associated variants. Physiological system, cell, and tissue enrichment of NAFLD associated genetic variants. Height of the bar represents-log₁₀p-value. Orange shading represents statistical significance at false discovery rate (FDR)<0.05.

[0028] FIG. 10 show K-Means clustering of PheWAS results for NAFLD associated variants. Grid shows variant cluster assignment for K-means clusters of k=4, k=5, k=6, and k=7. Variants assigned to each cluster are shown in the color-coded legends.

[0029] FIGS. 11A-11D shows two-sample Mendelian randomization analysis for casual associations between NAFLD and fibrosis/cirrhosis and esophageal varices. Effect size is shown by a red point and 95% confidence interval by a red line for MR EGGER and inverse variance weighted methods for (FIG. 11A) NAFLD exposure (GOLD cohort, N=10 instruments) and K74: fibrosis/cirrhosis outcome (UKBB) and (FIG. 11B) NAFLD exposure (GOLD cohort, N=10 instruments) and 185: esophageal varices outcome (UKBB). The crosshairs on the plots in FIGS. 11C and 11D represent the 95% confidence intervals for each SNP-NAFLD or SNP-outcome association for (FIG. 11C) NAFLD exposure (GOLD cohort, N=10 instruments) and K74: fibrosis/cirrhosis outcome (UKBB) and (FIG. 11D) NAFLD exposure (GOLD cohort, N=10 instruments) and 185: esophageal varices outcome (UKBB).

[0030] FIGS. 12A-12D show two-sample Mendelian randomization analysis for casual associations between BMI, waist circumference, and NAFLD. Effect size is shown by a red point and 95% confidence interval by a red line for MR EGGER and inverse variance weighted methods for (FIG. 12A) waist circumference GWAS (UKBB, N=302 instruments (independent SNPs p-value <5E-08)) and GOLD cohort outcome (FIG. 12B) BMI GWAS (UKBB, N=315 instruments (SNPs p-value <5E-08)) and GOLD cohort outcome. The crosshairs on the plots in FIGS. 12C and 12D represent the 95% confidence intervals for each SNP-NAFLD or SNP-outcome association for (FIG. 12C) waist circumference GWAS (UKBB, N=211 instruments) and GOLD cohort outcome and (FIG. 12D) BMI GWAS (UKBB, N=283 instruments) and GOLD cohort outcome.

[0031] FIGS. 13A and 13B show convolutional neural network schematic for UKBB MRI liver imaging (PCC values). Scatter plot of predicted UKBB MRI-PDFF values versus “true” UKBB MRI-PDFF values (as determined by Perspectum Diagnostics). Pearson correlation coefficients are shown for (FIG. 13A) gradient echo image protocol and (FIG. 13B) IDEAL image protocol.

[0032] FIG. 14 is a chart showing the effects of NAFLD associated variants in individual GOLDPlus meta-analysis datasets.

[0033] FIG. 15 is a table outlining the association of the identified biomarkers for 7 metabolic groups.

[0034] FIG. 16 is a schematic showing treatments for various indications of NAFLD.

[0035] FIGS. 17A-17F show the genetic and environmental factors associated with progression to cirrhosis in Michigan Genomics Initiative. Models were run as Fine-Gray competing risk analyses. Diabetes status (FIG. 17A), obesity status (FIG. 17B), and alanine aminotransferase (ALT) (FIG. 17C), with upper limited of normal (ULN) defined as 19 U/L in women and 30 U/L in men. PNPLA3-rs738409 genotype (FIG. 17D), TRIB1-rs28601761 genotype (FIG. 17E) and cirrhosis polygenic risk score (FIG. 17F), divided into quartiles (Q), with Q1 indicating the lowest quartile.

[0036] FIGS. 18A and 18B show PNPLA3 genotype and diabetes status identify a subgroup of patients with low FIB4 with cirrhosis incidence comparable to that of patients with high FIB4 in the Michigan Genomics Initiative (FIG. 18A) and the UK Biobank (FIG. 18B). Models were run as a Fine-Gray competing risk analysis. Patients were divided into three groups: high FIB4, low FIB4 with diabetes [(+) DM] and PNPLA3-rs738409-GG genotype [(+) PNPLA3], and low FIB4 with diabetes and PNPLA3-rs738409-CC or-CG genotype [(−) PNPLA3]. High FIB4 was defined as >=2.67 while low was defined as <2.67. Hazard ratios (HRs) and p values are shown at the top left of each graph and represent effects of each group after adjustment for age, sex, and principal components 1-10.

### DETAILED DESCRIPTION

[0037] Disclosed herein are a number of loci that include several genes not previously known to be associated with nonalcoholic fatty liver disease (NAFLD). The effect of these variants on NAFLD was congruent across study, ancestry, sex, and alcohol intake. However, some of the associated variants have EAF differences across ancestries which are consistent with differences in population burden of NAFLD. An additional gene, MTTP, was associated with NAFLD via gene-based analysis. Tissue and pathways enrichment analyses of these associations identified liver, lipid, cholesterol, steroid, alcohol, and monocarboxylic acid processes as being enriched. PheWAS analysis resulted in at least seven subtypes/clusters of NAFLD associated variants and implicated genes from these analyses that play a role in mitochondrial, VLDL, cholesterol, and de novo lipogenesis processes. A risk score of the NAFLD-associated genetic variants improved risk predictions when added to age, sex, and clinical factors in identifying people with elevated risk of NAFLD, cirrhosis, and hepatocellular carcinoma (HCC).

[0038] Carrying out the analysis across imaging, ICD-based, and NLP-based diagnosis of NAFLD provided substantial advantages over traditional histology-or single modality-based GWAS. These measures are less expensive, less invasive, and more ethically applicable to asymptomatic individuals in the general population than liver biopsy. The inclusion of non-histology-measured NAFLD increased power and decreased ascertainment bias. Furthermore, by assessing heterogeneous effects of variants across multiple modalities, a variant associated with other types of liver disease, such as glycogen storage disease, that can be misdiagnosed as NAFLD can be identified and removed from the analysis. Also disclosed are machine learning methods to predict MRI-PDFF from abdominal MRI images which can be used to facilitate future studies incorporating imaging analysis for NAFLD and other imaging endpoints.

[0039] In addition to identifying novel variants associated with NAFLD, the combined effect of the single variants using MR, pathway analysis, and PRS. MR analysis suggested that obesity, as measured by high BMI or waist circumference, is causally related to development of NAFLD, but not the reverse. However, MR showed hepatic steatosis is causally related to fibrosis/cirrhosis.

[0040] Taken together, the genetic variants can identify individuals at higher risk of having NAFLD, cirrhosis and HCC. In an independent cohort, the risk score identified individuals at high risk of NAFLD, cirrhosis, and HCC in the top 5% of the risk score. The risk score added predictive ability when combined with other clinical risk factors, showing that it finds use to identify high-risk individuals who might benefit from more intense management of NAFLD risk factors.

[0041] Section headings as used in this section and the entire disclosure herein are merely for organizational purposes and are not intended to be limiting.

### Definitions

[0042] The terms “comprise(s),” “include(s),” “having,” “has,” “can,” “contain(s),” and variants thereof, as used herein, are intended to be open-ended transitional phrases, terms, or words that do not preclude the possibility of additional acts or structures. The singular forms “a,” “and” and “the” include plural references unless the context clearly dictates otherwise. The present disclosure also contemplates other embodiments “comprising,” “consisting of,” and “consisting essentially of,” the embodiments or elements presented herein, whether explicitly set forth or not.

[0043] For the recitation of numeric ranges herein, each intervening number there between with the same degree of precision is explicitly contemplated. For example, for the range of 6-9, the numbers 7 and 8 are contemplated in addition to 6 and 9, and for the range 6.0-7.0, the number 6.0, 6.1, 6.2, 6.3, 6.4, 6.5, 6.6, 6.7, 6.8, 6.9, and 7.0 are explicitly contemplated.

[0044] Unless otherwise defined herein, scientific, and technical terms used in connection with the present disclosure shall have the meanings that are commonly understood by those of ordinary skill in the art. The meaning and scope of the terms should be clear; in the event, however of any latent ambiguity, definitions provided herein take precedent over any dictionary or extrinsic definition. Further, unless otherwise required by context, singular terms shall include pluralities and plural terms shall include the singular.

[0045] As used herein, “nucleic acid” or “nucleic acid sequence” refers to a polymer or oligomer of pyrimidine and/or purine bases, preferably cytosine, thymine, and uracil, and adenine and guanine, respectively (See Albert L. Lehninger, Principles of Biochemistry, at 793-800 (Worth Pub. 1982)). The present technology contemplates any deoxyribonucleotide, ribonucleotide, or peptide nucleic acid component, and any chemical variants thereof, such as methylated, hydroxymethylated, or glycosylated forms of these bases, and the like. The polymers or oligomers may be heterogenous or homogenous in composition and may be isolated from naturally occurring sources or may be artificially or synthetically produced. In addition, the nucleic acids may be DNA or RNA, or a mixture thereof, and may exist permanently or transitionally in single-stranded or double-stranded form, including homoduplex, heteroduplex, and hybrid states. In some embodiments, a nucleic acid or nucleic acid sequence comprises other kinds of nucleic acid structures such as, for instance, a DNA/RNA helix, peptide nucleic acid (PNA), morpholino nucleic acid (see, e.g., Braasch and Corey, Biochemistry, 41 (14): 4503-4510 (2002)) and U.S. Pat. No. 5,034,506), locked nucleic acid (LNA; see Wahlestedt et al., Proc. Natl. Acad. Sci. U.S.A., 97:5633-5638 (2000)), cyclohexenyl nucleic acids (see Wang, J. Am. Chem. Soc., 122:8595-8602 (2000)), and/or a ribozyme. Hence, the term “nucleic acid” or “nucleic acid sequence” may also encompass a chain comprising non-natural nucleotides, modified nucleotides, and/or non-nucleotide building blocks that can exhibit the same function as natural nucleotides (e.g., “nucleotide analogs”); further, the term “nucleic acid sequence” as used herein refers to an oligonucleotide, nucleotide or polynucleotide, and fragments or portions thereof, and to DNA or RNA of genomic or synthetic origin, which may be single or double-stranded, and represent the sense or antisense strand. The terms “nucleic acid,” “polynucleotide,” “nucleotide sequence,” and “oligonucleotide” are used interchangeably. They refer to a polymeric form of nucleotides of any length, either deoxyribonucleotides or ribonucleotides, or analogs thereof.

[0046] The terms “complementary” and “complementarity” refer to the ability of a nucleic acid to form hydrogen bond(s) with another nucleic acid sequence by either traditional Watson-Crick base-paring or other non-traditional types of pairing. The degree of complementarity between two nucleic acid sequences can be indicated by the percentage of nucleotides in a nucleic acid sequence which can form hydrogen bonds (e.g., Watson-Crick base pairing) with a second nucleic acid sequence (e.g., 50%, 60%, 70%, 80%, 90%, and 100% complementary). Two nucleic acid sequences are “perfectly complementary” if all the contiguous nucleotides of a nucleic acid sequence will hydrogen bond with the same number of contiguous nucleotides in a second nucleic acid sequence. Two nucleic acid sequences are “substantially complementary” if the degree of complementarity between the two nucleic acid sequences is at least 60% (e.g., 65%, 70%, 75%, 80%, 85%, 90%, 95%, 97%, 98%, 99%, or 100%) over a region of at least 8 nucleotides (e.g., 9, 10, 11, 12, 13, 14, 15, 16, 17, 18, 19, 20, 21, 22, 23, 24, 25, 30, 35, 40, 45, 50, or more nucleotides), or if the two nucleic acid sequences hybridize under at least moderate, preferably high, stringency conditions. Exemplary moderate stringency conditions include overnight incubation at 37° C. in a solution comprising 20% formamide, 5×SSC (150 mM NaCl, 15 mM trisodium citrate), 50 mM sodium phosphate (pH 7.6), 5×Denhardt's solution, 10% dextran sulfate, and 20 mg/ml denatured sheared salmon sperm DNA, followed by washing the filters in 1×SSC at about 37-50° C., or substantially similar conditions, e.g., the moderately stringent conditions described in Sambrook et al., infra. High stringency conditions are conditions that use, for example (1) low ionic strength and high temperature for washing, such as 0.015 M sodium chloride/0.0015 M sodium citrate/0.1% sodium dodecyl sulfate (SDS) at 50° C., (2) employ a denaturing agent during hybridization, such as formamide, for example, 50% (v/v) formamide with 0.1% bovine serum albumin (BSA)/0.1% Ficoll/0.1% polyvinylpyrrolidone (PVP)/50 mM sodium phosphate buffer at pH 6.5 with 750 mM sodium chloride and 75 mM sodium citrate at 42° C., or (3) employ 50% formamide, 5xSSC (0.75 M NaCl, 0.075 M sodium citrate), 50 mM sodium phosphate (pH 6.8), 0.1% sodium pyrophosphate, 5×Denhardt's solution, sonicated salmon sperm DNA (50 μg/ml), 0.1% SDS, and 10% dextran sulfate at 42° C., with washes at (i) 42° C. in 0.2×SSC, (ii) 55° C. in 50% formamide, and (iii) 55° C. in 0.1×SSC (preferably in combination with EDTA). Additional details and an explanation of stringency of hybridization reactions are provided in, e.g., Sambrook et al., Molecular Cloning: A Laboratory Manual, 3rd ed., Cold Spring Harbor Press, Cold Spring Harbor, N.Y. (2001); and Ausubel et al., Current Protocols in Molecular Biology, Greene Publishing Associates and John Wiley & Sons, New York (1994).

[0047] As used herein, the term “hybridization” is used in reference to the pairing of complementary nucleic acids. Hybridization and the strength of hybridization (i.e., the strength of the association between the nucleic acids) is influenced by such factors as the degree of complementary between the nucleic acids, stringency of the conditions involved, and the Tₘ of the formed hybrid. Hybridization methods involve the annealing of one nucleic acid to another, complementary nucleic acid, e.g., a nucleic acid having a complementary nucleotide sequence. The ability of two polymers of nucleic acid containing complementary sequences to find each other and “anneal” or “hybridize” through base pairing interaction is a well-recognized phenomenon. The initial observations of the “hybridization” process by Marmur and Lane, Proc. Natl. Acad. Sci. USA, 46:453 (1960) and Doty et al., Proc. Natl. Acad. Sci. USA, 46:461 (1960), have been followed by the refinement of this process into an essential tool of modern biology. For example, hybridization and washing conditions are now well known and exemplified in Sambrook et al., supra. The conditions of temperature and ionic strength determine the “stringency” of the hybridization.

[0048] “Hybridization probes” are nucleic acids capable of binding in a base-specific manner to a complementary strand of nucleic acid. Such probes include nucleic acids and peptide nucleic acids. Hybridization is usually performed under stringent conditions which are

[0049] The term “primer” refers to a single-stranded oligonucleotide capable of acting as a point of initiation of template-directed DNA synthesis under appropriate conditions, in an appropriate buffer and at a suitable temperature. The appropriate length of a primer depends on the intended use of the primer, but typically ranges from 15 to 30 nucleotides. A primer sequence need not be exactly complementary to a template, but must be sufficiently complementary to hybridize with a template. The term “primer site” refers to the area of the target DNA to which a primer hybridizes. The term “primer pair” means a set of primers including a 5′ upstream primer, which hybridizes to the 5′ end of the DNA sequence to be amplified and a 3′ downstream primer, which hybridizes to the complement of the 3′ end of the sequence to be amplified.

[0050] The nucleic acids, including any primers, probes and/or oligonucleotides can be synthesized using a variety of techniques currently available, such as by chemical or biochemical synthesis, and by in vitro or in vivo expression from recombinant nucleic acid molecules, e.g., bacterial or retroviral vectors. For example, DNA can be synthesized using conventional nucleotide phosphoramidite chemistry or other methodologies well known in the art. In addition, the nucleic acids can comprise uncommon and/or modified nucleotide residues or non-nucleotide residues, such as those known in the art.

[0051] The terms “polymorphism” or “variant” refers to the occurrence of two or more genetically determined alternative sequences or alleles in a population. Each divergent sequence is termed an allele, and can be part of a gene or located within an intergenic or non-genic sequence. A diallelic polymorphism has two alleles, and a triallelic polymorphism has three alleles. Diploid organisms can contain two alleles and may be homozygous or heterozygous for allelic forms. The first identified allelic form is arbitrarily designated the reference form or allele; other allelic forms are designated as alternative or variant alleles. The most frequently occurring allelic form in a selected population is typically referred to as the wild-type form.

[0052] As used herein, “treat,” “treating,” and the like means a slowing, stopping, or reversing of progression of a disease or disorder. The term also means a reversing of the progression of such a disease or disorder. As such, “treating” means an application or administration of methods to a subject, where the subject has a disease or a symptom of a disease, where the purpose is to cure, heal, alleviate, relieve, alter, remedy, ameliorate, improve, or affect the disease or symptoms of the disease.

[0053] Preferred methods and materials are described below, although methods and materials similar or equivalent to those described herein can be used in practice or testing of the present disclosure. All publications, patent applications, patents and other references mentioned herein are incorporated by reference in their entirety. The materials, methods, and examples disclosed herein are illustrative only and not intended to be limiting.

### Analyzing Polymorphisms

[0054] Provided herein are methods comprising analyzing a biological sample from a subject for one or more of rs738408, rs58542926, rs429358, rs1260326, rs28601761, rs4918722, rs2807834, rs7661964, rs1229984, rs7029757, rs17817449, rs79953491, rs112630404, rs626283, rs4561528, rs10756038, rs140201358, and mutations in MTTP.

[0055] The analysis described herein identified several genome-wide significant variants associated with hepatic steatosis and NAFLD, including rs738408-PNPLA3, rs58542926-TM6SF2, rs429358-APOE, rs1260326-GCKR, rs28601761-TRIB1, rs4918722-GPAM, rs2807834-MARC1, rs7661964-MTTP, rs7029757-TOR1B, rs1229984-ADH1B, rs17817449-FTO, rs79953491-COBLL1, rs112630404-INSR, rs626283-TMC4/MBOAT7, rs4561528-SREBF1, rs10756038-PTPRD, and rs140201358-PNPLA2.

[0056] The analyzed polymorphisms may be selected to include at least one polymorphism from each of the seven distinct clusters. In some embodiments, polymorphisms may contain at least one polymorphism from each of the significant variants and extended variants as shown in Table 1. In some embodiments, the polymorphisms may comprise at least two or all of the significant variants as shown in Table 1.

[0057] Presently the PRS is a composite of multiple SNPs weighted by the Beta of effect in the GOLD consortium as below with allele 1 being the effect allele and the beta being the weight. This is multiplied by the number of alleles (per individual) and summed to get the PRS per individual.

[0058] The gene-based analyses identified multiple variants in MTTP that promote NAFLD. MTTP is a well-known gene that transfers phospholipids and triacylglycerols to nascent apoB for the assembly of lipoproteins. The absence of MTTP is known to cause the Mendelian disease abetalipoproteinemia which causes malabsorption of in the digestive track resulting in fatty liver and other health issues. The mutations in MTTP may include, but are not limited to, G661S, Q244E, E98D, and N166S.

[0059] The present invention provides a method for diagnosing fatty liver disease or predisposition to fatty liver disease or related diseases or conditions. The presence of such a polymorphisms or mutations can be regarded as indicative of an individual's risk (increased or decreased) for the disease, especially in individuals who lack other predisposing or protective polymorphisms for the same disease. Even in cases where the predictive contribution of a given polymorphism is relatively minor by itself, overall assessment of the polymorphisms allows diagnosis with a much higher degree of certainty and reliability.

[0060] The present invention further provides a method of managing nonalcoholic fatty liver disease. Nonalcoholic fatty liver disease (NAFLD) is an umbrella term for a range of liver conditions affecting people who drink little to no alcohol. Some individuals with NAFLD can develop nonalcoholic steatohepatitis (NASH), an aggressive form of fatty liver disease, which is marked by liver inflammation and may progress to advanced scarring (cirrhosis), liver failure, or some forms of liver cancer. This damage is similar to the damage caused by heavy alcohol use. The methods disclosed herein may comprise managing the progression of nonalcoholic fatty liver disease to prevent a more aggressive form of liver disease. By extension, the methods disclosed herein may further act as an indication or prognosis of the risk of liver inflammation, liver scarring (cirrhosis), liver failure, or some forms of liver cancer.

[0061] The risk score may be calculated using an algorithm that accounts for one or more or each of the analyzed polymorphisms. The risk score may be calculated using non-weighted or weighted sums of risk polymorphisms using effect sizes from genome-wide association studies as their weights or effects of the particular polymorphism on the score. For example, those polymorphisms with inherently higher risk are weighted differently than those polymorphisms with lower individual risk.

[0062] The risk score may be based on other factors outside of the genetic polymorphisms described herein. Other factors may include the general health of the subject, previously identified disease in close family members, or other related identified disease or disorders. For example, risk factors may include high cholesterol, high levels of triglycerides in the blood, obesity, polycystic ovary syndrome, sleep apnea, diabetes, hypothyroidism, hypopituitarism, age, and concentration or abundance of abdominal body fat.

[0063] In some embodiments, risk score further is based on one or more of blood count, liver enzyme test data, liver function test data, hepatitis A test data, hepatitis C test data, celiac disease screening test data, fasting blood sugar, hemoglobin A1C data, and lipid profile data. In some embodiments, the risk score further is based on one or more of abdominal ultrasound data, computerized tomography (CT) scanning data, magnetic resonance imaging (MRI) data, transient elastography data, and magnetic resonance elastography data.

[0064] The risk score may be a measure of an individual risk of nonalcoholic fatty liver disease or related diseases in comparison to an average individual of a population or subset of population. For example, the score may be in comparison to any other individual or an individual with a similar ethnic background, age, sex, or prior health condition.

[0065] The risk score may be used to align a subject's level of disease with appropriate treatments. For examples, subjects with a specific disease phenotype may be linked to specific treatments for that subtype which results in the best management of the disease or lacks unwanted side effects or long-term complications.

[0066] The risk score may be output or displayed in any number of formats, including reports with bins, a color or grayscale gradient, a thermometer, a gauge, a histogram, or a bar graph. The risk score may provide a numerical output which is associated with low, medium, or high risk of NAFLD. Alternatively, or in addition, the risk score may be output as a rank score in a populations, such as a percentile of risk within a certain population. The risk score may be output with any proposed treatment recommendations or follow-up procedures to further assess risk. The risk score may be used to classify an individual into disease subtypes based on the at least seven subtypes/clusters of NAFLD associated variants and implicated genes from the analysis disclosed herein.

[0067] The risk score may further indicate the need or the type of treatment for an individual suspected to have or at risk of developing nonalcoholic fatty liver disease. Treatments for nonalcoholic fatty liver disease include those known in the art to reduce risk and include lifestyle changes, surgery, or medicament regimes. In some embodiments, the treatments include adoption of a healthy diet and exercise program, optionally as part of a weight loss regime, control of blood sugar, cholesterol lowering medications, and abstaining from alcoholic drinks. In some embodiments, treating includes liver transplantation. In some embodiment, treating comprises administration of one or more active agents. In some embodiments, the active agent is selected from: an essential phospholipid (e.g., polyenylphosphatidylcholine); an anti-diabetic agent (e.g., insulin, metformin, pioglitazone, glucagon-like peptide-1 (GLP-1) agonists, sodium-glucose cotransporter-2 (SGLT-2) inhibitors, thiazolidinediones (TZD), obeticholic acid, ursodeoxycholic acid, RG-125); a dietary supplement (e.g., vitamin E, silymarin, S-adenosyl-L-methionine (SAMe), glutathione, glycyrrhizic acid); an antifibrotic agent (e.g., RAS blockers such as angiotensin-converting enzyme inhibitors (ACEIs) and angiotensin II receptor blockers (ARBs), pentoxifylline, larsucosterol, galectin-3 inhibitors, cenicriviroc); an anti-obesity agent (e.g., sibutramine); or any combination thereof.

[0068] In some embodiments, the treating includes PNPLA3 siRNA, vitamin E administration, diet control, and Thyroid B agonists, for example when the patient is suspected to have or is at risk of low lipoprotein output. In some embodiments, the treating inhibitors of an acetyl-CoA carboxylase (ACC), Acyl-coenzyme A: diacylglycerol acyltransferase (DGAT), fatty acid synthase (FASN), or inhibitors of SCD1 (e.g., synthetic fatty-acid/bile-acid conjugate (FABAC), e.g., Aramchol) for example when the patient is suspected to have or is at risk of diversion of TG and phospholipids to lipid droplets or excess glucose conversion to fatty acids. In some embodiments, the treating includes ISIS-ANGPTL3, an antisense inhibitor to angiopoietin-like 3, vitamin E administration, diet control, and Thyroid B agonists, for example when the patient is suspected to have or is a risk of high or normal lipoprotein output. In some embodiments, the treating includes agonists of SGLT2-I (Sodium/glucose cotransporter-2), FGF21 (Fibroblast growth factor 21), glucagon-like peptide 1 (GLP1), anti-CB1/PPAR agonists (e.g., cannabinoid CB1 receptor antagonists and/or peroxisome proliferator-activated receptor agonists), inhibitors of microsomal triglyceride transfer protein (MTP or MTTP) (e.g., lomitapide), for example when the patient is suspected to have or is at risk of diabetes, insulin resistance, increases in fatty acids, or de novo lipogenesis (DNL). See, for example, FIG. 16.

[0069] In some embodiments, the treatments include modulating transcription, and thereby expression, of one or more target genes. For example, the treatments may include activation or repression of transcription of one or more target genes as listed in Table 7. In some embodiments, the treatments include knocking out one or more target genes. For example, the treatments may include knocking out one or more target genes as listed in Table 7.

[0070] In some embodiments, transcription of the target gene is modulated by administering a clustered regularly interspaced short palindromic repeats (CRISPR)/CRISPR associated (Cas) protein system for use in CRISPR interference (CRISPRi) or CRISPR activation (CRISPRa) (see, e.g., Konermann et al. Nature. 2014 Dec. 10. doi: 10.1038/nature14136; Qi, L. S., et al. (2013). Cell. 152 (5): 1173-83; Gilbert, L. A., et al., (2013). Cell. 154 (2): 442-51; and Maeder et al. Nat Methods 10 (10): 977-979 (2013)).

[0071] Cas proteins binding of specific DNA sequences through guide RNA can naturally result in a transcription block, a process termed CRISPR interference (CRISPRi). For use in mammalian cells, CRISPRi is even more effective when transcriptional repressor domains are tethered to the Cas protein. Transcriptional repressors may inhibit transcription via: recruitment of other transcription factor proteins; modification of target DNA such as methylation; recruitment of a DNA modifier; modulation of histones associated with target DNA; recruitment of a histone modifier such as those that modify acetylation and/or methylation of histones; or a combination thereof. For example, transcriptional repressors such as the Kriippel associated box (KRAB or SKD); KOX1 repression domain; the Mad mSIN3 interaction domain (SID); the ERF repressor domain (ERD); histone lysine methyltransferases such as Pr-SET7/8, SUV4-20H1, RIZ1, and the like; histone lysine demethylases such as JM JD2 A/JHDM3 A, JMJD2B, JMJD2C/GASCI, JMJD2D, JARID 1 A/RBP2, JARIDIB/PLU-1, JARIDIC/SMCX, JARIDID/SMCY; histone lysine deacetylases such as HDAC1, HDAC2, HDAC3, HDAC8, HDAC4, HD AC 5, HDAC7, HDAC9, SIRT1, SIRT2, HDAC11; DNA methylases such as Hhal DNA m5c-methyltransferase (M.Hhal), DNA methyltransferase 1 (DNMT1), DNA methyltransferase 3a (DNMT3a), DNA methyltransferase 3b (DNMT3b), MET1, ZMET2, CMT1; periphery recruitment elements such as Lamin A and Lamin B; and functional domains thereof.

[0072] CRISPR/Cas systems can also be used to activate gene expression, in an approach termed CRISPR activation (CRISPRa). CRISPRa constructs generally utilize a Cas protein to recruit more than one transcription activation domain with a single gRNA. The activation domains may promote transcription via: recruitment of other transcription factor proteins; modification of target DNA such as demethylation; recruitment of a DNA modifier; modulation of histones associated with target DNA; recruitment of a histone modifier such as those that modify acetylation and/or methylation of histones; or a combination thereof. For example, VP 16; VP64; VP48; VP 160; p65 subdomain (e.g., from NFkB); an activation domain of EDLL; TAL activation domain; histone lysine methyltransferases such as SETIA, SETIB, MLLI to 5, ASHI, SYMD2, NSD1; histone lysine demethylases such as JHDM2a/b, UTX, JMJD3; histone acetyltransferases such as GCN5, PCAF, CBP, p300, TAF1, TIP60/PLIP, MOZ/MYST3, MORF/MYST4, SRC1, ACTR, PI 60, CLOCK; DNA demethylases such as Ten-Eleven Translocation (TET) dioxygenase 1 (TET1CD), TET1, DME, DML1, DML2, and ROS1; and functional domains thereof.

[0073] The Cas protein can recruit repressor or activation domains using direct fusions or protein linkers (e.g., SunTag). Alternatively, activation domains can be recruited using nucleic acid approaches, a guide RNA having binding motifs (e.g., MS2) recruits effector domains fused to RNA-motif binding proteins.

[0074] Any Cas protein that employs gRNA specific binding to bind to a specific target sequence can be utilized with the systems for CRISPRa and CRISPRi. Usually, a nuclease deficient version of a Cas protein is utilized, for example dCas9, a nuclease-dead Cas9 protein, but other Cas proteins can also be utilized in the methods herein, such as Cas3 and Cas12a.

[0075] In some embodiments, transcription of the target gene is knocked out by administering a CRISPR/nuclease protein system, e.g., CRISPR/Cas9, referred to as CRISPR-KO. An insertion or deletion induced by a single guide RNA (gRNA) is often used to generate knock-out cells. For example, a guide RNA targets Cas9 to a target gene, where it creates a double-stranded break (DSB). Cells can survive a DSB when an error-prone repair mechanism like nonhomologous end joining (NHEJ) results in insertion or deletion of one or more base pairs, precluding further binding of the gRNA. Such repairs can result in frameshift mutations and thereby disrupt gene function, oftentimes resulting in functional knockouts.

[0076] The CRISPR/Cas systems comprise a guide RNA specific to a target gene to be modulated. The target gene may be any of those listed in Table 7, and the CRISPR/Cas system may comprise any of those gRNAs for CRISPRa, CRISPRi, and CRISPR-KO as indicated in Table 7.

[0077] The CRISPR/Cas systems, including Cas proteins and gRNAs, or polynucleotides encoding thereof, may be delivered by any suitable means. Methods of delivering polypeptides and polynucleotides to cells are well known in the art and may include DNA or RNA electroporation, transfection reagents such as liposomes or nanoparticles to delivery DNA or RNA; delivery of DNA, RNA, or protein by mechanical deformation (see, e.g., Sharei et al. Proc. Natl. Acad. Sci. USA (2013) 110 (6): 2082-2087, incorporated herein by reference); or viral transduction. Nucleic acids can be delivered as part of a larger construct, such as a plasmid or viral vector, or directly, e.g., by electroporation, lipid vesicles, viral transporters, microinjection, and biolistics (high-speed particle bombardment). Similarly, polynucleotides can be delivered by any method appropriate for introducing nucleic acids into a cell. In some embodiments, the polynucleotide is a DNA molecule. In some embodiments, the CRISPR/Cas system is provided in a DNA vector. In some embodiments, the CRISPR/Cas system is provided as an RNA molecule.

[0078] Additionally, delivery vehicles such as nanoparticle- and lipid-based polynucleotide or protein delivery systems can be used. Further examples of delivery vehicles include lentiviral vectors, ribonucleoprotein (RNP) complexes, lipid-based delivery system, gene gun, hydrodynamic, electroporation or nucleofection microinjection, and biolistics. Various gene delivery methods are discussed in detail by Nayerossadat et al. (Adv Biomed Res. 2012; 1:27) and Ibraheem et al. (Int J Pharm. 2014 Jan. 1;459 (1-2): 70-83), incorporated herein by reference.

[0079] The risk score may also be used for selection (e.g., inclusion or exclusion) for a clinical trial. For example, subjects with a specific risk score may be included for a clinical trial to specifically study those individuals at an increased risk for nonalcoholic fatty acid liver disease, e.g., a genetic enrichment trial. Alternatively, subjects with a specific risk score may be excluded for a clinical trial to avoid potential interference with clinical trial analysis.

[0080] In some embodiments, the presence of such a polymorphisms or mutations can be regarded as indicative of an individual's risk (increased or decreased) for other diseases and conditions. As shown in FIG. 2, many of the polymorphisms or mutations had effects on metabolic and anthropometric traits such as lipid concentrations, cardiovascular disease, body mass index, waist/hip circumference, and liver enzyme levels.

[0081] In some embodiments, select polymorphisms or mutations are associated with higher low-density lipoprotein (LDL) and triglycerides (TG), increased risk of cardiovascular, lower high-density lipoprotein (HDL), and lower body mass index (BMI) and waist/hip circumference. In some embodiments, select polymorphisms or mutations are associated with higher LDL and TG and higher HDL. In some embodiments, select polymorphisms or mutations are associated with lower LDL, strongly increased risk of liver fibrosis/cirrhosis, and lower or no difference in alkaline phosphatase. In some embodiments, select polymorphisms or mutations are associated with decreased LDL and TG.

[0082] In some embodiments, rs28601761 and rs1260326 may be indicative of a decreased level of risk for cholelithiasis and/or cholecystitis. In some embodiments, rs1260326 may be associated with lower insulin-like growth factor 1 (IGF1) and sex hormone binding globulin (SHBG) levels. In some embodiments, rs429358 may be indicative of a decreased level of risk for familial Alzheimer's disease and LDL cholesterol.

[0083] The biological sample for analysis in the disclosed methods may be obtained from any suitable biological source, such as, a swab or brush, a physiological fluid including, but not limited to, whole blood, serum, plasma, interstitial fluid, saliva, ocular lens fluid, cerebral spinal fluid, sweat, urine, milk, ascites fluid, mucous, synovial fluid, peritoneal fluid, vaginal fluid, menses, amniotic fluid, semen, feces, and the like, or a tissue or cell sample including, but not limited to, hair, skin, blood, biopsies of the kidney, or liver or other organs or tissues, or sources such as saliva, cheek scrapings, urine, amniotic fluid or CVS samples. In some embodiments, the biological sample is selected from the group consisting of blood, serum, plasma, saliva, tissue, hair, semen, and urine.

[0084] The sample can be obtained from a subject using routine techniques known to those skilled in the art, and the sample may be used directly as obtained from the biological source or following a pretreatment to modify the character of the sample. Such pretreatment may include, for example, preparing plasma from blood, diluting viscous fluids, filtration, precipitation, dilution, distillation, mixing, concentration, inactivation of interfering components, the addition of reagents, lysing, and the like.

[0085] A “subject” or “patient” may be human or non-human and may include, for example, animal strains or species used as “model systems” for research purposes, such a mouse model as described herein. Likewise, patient may include either adults or juveniles (e.g., children). Moreover, patient may mean any living organism, preferably a mammal (e.g., human or non-human). Examples of mammals include, but are not limited to, any member of the Mammalian class: humans, non-human primates such as chimpanzees, and other apes and monkey species; farm animals such as cattle, horses, sheep, goats, swine; domestic animals such as rabbits, dogs, and cats; laboratory animals including rodents, such as rats, mice and guinea pigs, and the like. Examples of non-mammals include, but are not limited to, birds, fish, and the like. In one embodiment of the methods and compositions provided herein, the mammal is a human. In some embodiments, the subject is suspected of having nonalcoholic fatty liver disease.

[0086] A polymorphism as described herein may be detected directly or indirectly. Direct detection methods may include inspecting a data set indicative of genetic characteristics derived from analysis of the individual's genome. A data set of genetic characteristics of the individual may include, for example, a listing of single nucleotide polymorphisms in the individual's genome or a complete or partial sequence of the individual's genomic DNA. Inspection of the data set including all or part of the individual's genome may optimally be performed by computer inspection. Screening may further comprise the step of producing a report identifying the individual and the identity of alleles at the site of at least one or more polymorphisms. Alternatively, the methods include obtaining and analyzing a nucleic acid sample (e.g., DNA or RNA) from an individual to determine whether the DNA contains informative polymorphisms, such as by combining a nucleic acid sample from the subject with one or more polynucleotide probes capable of hybridizing selectively to a nucleic acid carrying the polymorphism or sequencing the region of the DNA containing the polymorphisms. One skilled in the art will recognize that any one of the commonly available hybridization, amplification and array assay formats can readily be adapted to detect the polymorphisms disclosed herein.

[0087] In some embodiments, the polymorphisms are detected by a sequencing assay. The sequence assay may be conducted by any means known in the art, such as the dideoxy chain termination method. In some embodiments, the sequencing assay is performed using high-throughput sequence methods. Following sequencing, the data may be aligned or other analyzed for the presence of the polymorphisms. Methods of alignment of sequences for comparison purposes are well known in the art.

[0088] In some embodiments, the polymorphisms may be detected by an amplification-based assay in which a polymorphism-specific primer hybridizes to a region on a target nucleic acid molecule that overlaps the polymorphism and only primes amplification of that form to which the primer exhibits perfect complementarity. This primer is used in conjunction with a second primer that hybridizes at a distal site. Amplification proceeds from the two primers, producing a detectable product that indicates the polymorphism is present in the test sample. A control is usually performed with a second pair of primers, one of which shows one or more mismatches at the polymorphic site and the other of which exhibits perfect complementarity to a distal site. The mismatches prevent amplification or substantially reduce amplification efficiency, so that either no detectable product is formed or it is formed in lower amounts or at a slower pace. Amplification assays are well-known in the art including polymerase chain reaction, ligase chain reactions, strand displacement assays, and the like.

[0089] In a hybridization-based assay, probes can be designed that hybridize to a segment of target DNA from one individual but do not hybridize to the corresponding segment from another individual due to the presence of different polymorphic forms in the respective DNA segments. Hybridization conditions should be sufficiently stringent that there is a significant detectable difference in hybridization intensity, and preferably an essentially binary response, whereby a probe hybridizes to only one of the loci or significantly more strongly to one loci. A probe may be designed to hybridize to a target sequence that contains a polymorphism anywhere along the sequence of the probe. However, the probe is preferably designed to hybridize to a segment of the target sequence such that the polymorphism aligns with a central position of the probe (e.g., a position within the probe that is at least three nucleotides from either end of the probe). This design of probe generally achieves good discrimination in hybridization between different allelic forms.

[0090] Indirect detection refers to determining the presence or absence of a specific polymorphism identified in the genetic profile by detecting a surrogate or proxy polymorphism that is in linkage disequilibrium with the SNP in the individual's genetic profile. Detection of a proxy polymorphism is indicative of a polymorphism of interest and is increasingly informative to the extent that the polymorphisms are in linkage disequilibrium, e.g., at least 50%, 60%, 70%, 80%, 90%, 95%, 98%, or about 100% LD. Another indirect method involves detecting allelic variants of proteins accessible in a sample from an individual that are consequent of a risk-associated or protection-associated allele in DNA that alters a codon.

[0091] Based on the polymorphisms and associated sequence information disclosed herein, detection reagents can be developed and used to assay any polymorphism of the present invention individually or in combination, and such detection reagents can be readily incorporated into a kit or system. The terms “kits” and “systems,” as used herein in the context of polymorphism detection reagents, are intended to refer to such things as combinations of multiple polymorphism detection reagents, or one or more polymorphism detection reagents in combination with one or more other types of elements or components (e.g., other types of biochemical reagents, containers, packages, substrates, electronic hardware components, etc.). Accordingly, the present invention further provides polymorphism detection kits and systems, including but not limited to, packaged probe and primer, arrays/microarrays of nucleic acid molecules, and beads that contain one or more probes, primers, or other detection reagents for detecting one or more polymorphisms of the present invention. The kits/systems can optionally include various electronic hardware components; for example, arrays (“DNA chips”) and microfluidic systems (“lab-on-a-chip” systems) provided by various manufacturers typically comprise hardware components.

[0092] In some embodiments, a polymorphism detection kit typically contains one or more detection reagents and other components (e.g., a buffer, enzymes such as DNA polymerases or ligases, chain extension nucleotides such as deoxynucleotide triphosphates, and in the case of Sanger-type DNA sequencing reactions, chain terminating nucleotides, positive control sequences, negative control sequences, and the like) necessary to carry out an assay or reaction, such as amplification and/or detection of a polymorphism-containing nucleic acid molecule. A kit may further contain means for determining the amount of a target nucleic acid, and means for comparing the amount with a standard, and can comprise instructions for using the kit to detect the polymorphism-containing nucleic acid molecule of interest. In one embodiment of the present invention, kits are provided which contain the necessary reagents to carry out one or more assays to detect one or more polymorphisms disclosed herein. In a preferred embodiment of the present invention, polymorphism detection kits/systems are in the form of nucleic acid arrays, or compartmentalized kits, including microfluidic/lab-on-a-chip systems.

[0093] Polymorphism detection kits or systems may contain, for example, one or more probes, or pairs of probes, that hybridize to a nucleic acid molecule at or near each target position. Multiple pairs of allele-specific probes may be included in the kit/system to simultaneously assay large numbers of polymorphisms, at least one of which is a polymorphism of the present invention. In some kits/systems, the allele-specific probes are immobilized to a substrate such as an array or bead. For example, the same substrate can comprise allele-specific probes for detecting any or all of the polymorphisms described herein.

[0094] A polymorphism detection kit or system of the present invention may include components that are used to prepare nucleic acids from a test sample for the subsequent amplification and/or detection of a polymorphism-containing nucleic acid molecule. Such sample preparation components can be used to produce nucleic acid extracts (including DNA and/or RNA), proteins or membrane extracts from any biological sample, as described herein.

[0095] The terms “arrays,” “microarrays,” and “DNA chips” are used herein interchangeably to refer to an array of distinct polynucleotides affixed to a substrate, such as glass, plastic, paper, nylon or other type of membrane, filter, chip, or any other suitable solid support. The polynucleotides can be synthesized directly on the substrate, or synthesized separate from the substrate and then affixed to the substrate by methods known in the art. Any number of probes, such as allele-specific probes, may be implemented in an array, and each probe or pair of probes can hybridize to a different polymorphism position. In the case of polynucleotide probes, they can be synthesized at designated areas (or synthesized separately and then affixed to designated areas) on a substrate using a chemical process. Each DNA chip can contain, for example, thousands to millions of individual synthetic polynucleotide probes arranged in a grid-like pattern and miniaturized (e.g., to the size of a dime). Preferably, probes are attached to a solid support in an ordered, addressable array.

[0096] Another form of kit contemplated by the present invention is a compartmentalized kit. A compartmentalized kit includes any kit in which reagents are contained in separate containers. Such containers include, for example, small glass containers, plastic containers, strips of plastic, glass or paper, or arraying material such as silica. Such containers allow one to efficiently transfer reagents from one compartment to another compartment such that the test samples and reagents are not cross-contaminated, or from one container to another vessel not included in the kit, and the agents or solutions of each container can be added in a quantitative fashion from one compartment to another or to another vessel. Such containers may include, for example, one or more containers which will accept the test sample, one or more containers which contain at least one probe or other polymorphism detection reagent for detecting one or more polymorphisms of the present invention, one or more containers which contain wash reagents (such as phosphate buffered saline, Tris-buffers, etc.), and one or more containers which contain the reagents used to reveal the presence of the bound probe or other polymorphism detection reagents. The kit can optionally further comprise compartments and/or reagents for, for example, nucleic acid amplification or other enzymatic reactions such as primer extension reactions, hybridization, ligation, electrophoresis (preferably capillary electrophoresis), mass spectrometry, and/or laser-induced fluorescent detection. The kit may also include instructions for using the kit. Exemplary compartmentalized kits include microfluidic devices known in the art. In such microfluidic devices, the containers may be referred to as, for example, microfluidic “compartments,” “chambers,” or “channels.”

[0097] Microfluidic devices and systems miniaturize and compartmentalize processes such as probe/target hybridization, nucleic acid amplification, and capillary electrophoresis reactions in a single functional device. Such microfluidic devices typically utilize detection reagents in at least one aspect of the system, and such detection reagents may be used to detect one or more polymorphisms of the present invention. Exemplary microfluidic systems comprise a pattern of microchannels designed onto a glass, silicon, quartz, or plastic wafer included on a microchip. The movements of the samples may be controlled by electric, electroosmotic, or hydrostatic forces applied across different areas of the microchip to create functional microscopic valves and pumps with no moving parts. Varying the voltage can be used as a means to control the liquid flow at intersections between the micro-machined channels and to change the liquid flow rate for pumping across different sections of the microchip.

[0098] For genotyping polymorphisms, an exemplary microfluidic system may integrate, for example, nucleic acid amplification, primer extension, capillary electrophoresis, and a detection method such as laser induced fluorescence detection. In a first step of an exemplary process for using such an exemplary system, nucleic acid samples are amplified, preferably by PCR. Then, the amplification products are subjected to automated primer extension reactions using ddNTPs (specific fluorescence for each ddNTP) and the appropriate oligonucleotide primers to carry out primer extension reactions which hybridize just upstream of the targeted polymorphism. Once the extension at the 3′ end is completed, the primers are separated from the unincorporated fluorescent ddNTPs by capillary electrophoresis. The separation medium used in capillary electrophoresis can be, for example, polyacrylamide, polyethyleneglycol or dextran. The incorporated ddNTPs in the single nucleotide primer extension products are identified by laser-induced fluorescence detection.

[0099] The present disclosure also provides non-transitory computer-readable media. The non-transitory computer-readable media stores instructions that when executed by one or more processors performs some or all of the operations described in the disclosed methods. In some embodiments, the one or more processors perform operations comprising receiving data identifying the presence or absence of a polymorphism in a biological sample, generating a nonalcoholic fatty acid liver disease risk score from said data, and displaying or reporting said risk score.

[0100] The methods described herein can be implemented by one or more processors and a computer-readable medium storing instructions executable by the one or more processors to perform operations, as described above. An at least one computer system may comprise the one or more processors and/or the computer-readable media. The computer system may further comprise one or more local servers or databases connected to or integrated with the at least one computer system. The one or more processors may be configured to communicate via wired or wireless communications with each other or other processors. The one or more processors may be configured to operate on one or more processor-controlled devices that can be similar or different devices.

[0101] The readable media described herein may protect the confidentiality and security of protected health information (PHI) in compliance with various privacy standards (e.g., Health Insurance Portability and Accountability Act (HIPAA)). Thus, the readable media may be considered HIPAA-compliant. The readable media and/or the one or more processors may provide or allow one or all of: means of access control, mechanisms to authenticate electronic PHI, functionalities for encryption/decryption, and mechanisms to log activity and implement audits. Data may be communicated using known encryption/decryption and security techniques. For example, DICOM imaging standards support encryption. The system and methods may anonymize any protected subject data.

### EXAMPLES

### Materials and Methods

[0102] Analyses were carried out in cohorts from the Genetics of Obesity-related Liver Disease (GOLD) Consortium, United Kingdom Biobank (UKBB), FinnGen, Electronic Medical Record and Genomics (eMERGE) Consortium, and Michigan Genomics Initiative (MGI) (FIG. 1).

[0103] GOLD Consortium—The multiethnic GOLD Consortium includes nine multiethnic cohorts with CT-measured steatosis (N=23,521): AGES¹¹, COPDGene¹², FamHS¹³, FHS¹⁴, GENOA¹⁵, IRASFS¹⁶, JHS¹⁷, MESA¹⁸, and OOA¹⁹.

[0104] UKBB—The UKBB cohort was previously described.²⁰ Participants in the NAFLD analyses were included regardless of ethnicity and excluded if they or their relatives had abdominal MRI images. NAFLD cases were identified by ICD-9 571.8 or ICD-10 K76.0 codes. The UKBB NAFLD dataset included 1,827 NAFLD cases and 436,262 controls. A second UKBB NAFLD European only dataset was assembled as stated above and included 1,706 cases and 412,151 controls.

[0105] Convolutional neural network (CNN) model for UKBB liver MRI imaging—A CNN model was applied to determine liver proton density fat fraction (PDFF) from MRI in UKBB. UKBB uses two imaging protocols: gradient echo (GRE) (N=10,093) and IDEAL (N=35,779), which includes N=1,491 individuals that had undergone both protocols. To determine the MRI proton density fat fraction (PDFF) for all participants, a standard 2D U-Net was applied to segment the GRE and IDEAL liver data. ITK-SNAP software was used to manually annotate the liver in 98 randomly chosen images from the GRE protocol. Next, the segmented GRE images were split into training (N=64), validation (N=16), and test (N=18) sets. The result showed that liver segmentation achieved Dice scores over 94%. Similarly, the liver was manually annotated in 95 randomly chosen images from the IDEAL protocol. Next, the segmented IDEAL images were split into training (N=64), validation (N=16), and test (N=15) sets. The overall performance of the liver segmentation is also about 94% on Dice scores. After the liver has been identified by 2D U-net model on each slice for all of two imaging protocols, a 2D CNN Residual Neural Network (2D-CNN-ResNet) model using two steps was applied on the segmented liver. From the 4,616 individuals with true PDFF values, quantified by Perspectum Diagnostics from gradient echo imaging, 4,569 individuals with a full set of ten standard liver segmentation images were selected and split into training, validation, and test datasets. The 2D-CNN-ResNet model was trained and validated on 3,500 participants and tested on the remaining 1,069 participants. For the remaining 5,477 individuals from the gradient echo protocol, the CNN model developed here was used to predict PDFF. This 2D-CNN-ResNet model was then applied to estimate the PDFF value of participants from the IDEAL protocol. Based on these overlapping samples (N=1,491) with true PDFF value derived from the first step, 2D-CNN-ResNet model was trained (N=952), validated (N=238), and tested (N=301). PDFF for the remaining 34,351 participants with only IDEAL imaging were then inferred using this CNN model. Inferred PDFF had a Pearson correlation coefficient of 0.976 and 0.984 in the validation and testing datasets. True PDFF values were also measured (FIG. 13). This will be called the UKBB MRI-PDFF dataset, which after accounting for genetic missingness (N=1,151) totaled N=43,293. A second UKBB MRI-PDFF dataset included only European participants and totaled N=41,834.

[0106] eMERGE—The eMERGE NAFLD cohort (N=1,106 cases; 8,571 controls) was previously described and summary statistics are available at ebi.ac.uk/gwas/studies/GCST008468. Effect allele frequencies were not available and were estimated using UK Biobank Europeans.

[0107] FinnGen—FinnGen data freeze 4 summary statistics from finngen.fi/fi (N=651 NAFLD cases, 176,248 controls) was used for the analysis described herein.

[0108] MGI—MGI is a hospital-based cohort of patients seen at Michigan Medicine (Ann Arbor, MI). The MGI cohort was previously described.²³ NAFLD cases were identified by ICD-9 571.8, or ICD-10 K76.0, and HCC by ICD-9 155.0 or ICD-10 C22.0. Cirrhosis was defined by ICD-9 571.2 or 571.5 or 571.6, or ICD-10 K70.2-4 or K74.x or K71.7 or NLP (which has been previously described).23

[0109] Genome-wide association study (GWAS) and meta-analysis—GWAS of autosomal variants was carried out assuming additive effects in each of the nine GOLD cohorts separately. The analyses were corrected for age, age², sex, alcoholic drinks, and principal components (PCs) or admixture. Sensitivity analyses by sex, study, and ancestry did not show significant heterogeneity allowing us to combine the data across cohorts for all individuals with genetic data (N=23,521). The GOLD Consortium meta-analysis was performed using the inverse variance approach in METAL (08/28/2018 release).

[0110] GWAS of autosomal variants were carried out independently in UKBB using linear mixed modeling using SAIGE (version 0.29) with binary NAFLD or inverse normally-transformed MRI-PDFF as the dependent variable using an additive genetic model. A SNP imputation quality cutoff of 0.85 was used. The model was controlled for sex, age, age², and PCs 1-10.

[0111] Summary statistics from FinnGen and eMERGE studies were combined with the UKBB NAFLD, UKBB MRI-PDFF, and GOLD CT steatosis analyses using a sample size and direction of effect meta-analysis implemented in METAL (FIG. 1) in an analysis referred to herein as GOLDPlus. Multi-allelic variants, indels, variants with minor allele frequency<0.001, and variants with minor allele count<400 were excluded. Variants with HetP-value<0.05 and opposing directionality were also excluded across studies. A p-value<5.0×10⁻³ was considered genome-wide significant. Given the multiethnic nature of the analysis, independent loci were identified using a 500Kb flanking criteria from the lowest p-value associated variant. To ascertain independent signals, a direct conditional analysis was also performed for all top hits using the UKBB multiethnic cohort. To perform conditional analysis, the genetic dosage of the loci was added to the other covariates (age, age², sex, PCs 1-10) of SAIGE step 1 and the GWAS was rerun.

[0112] Ancestry-specific and sex-specific analyses in the GOLD Consortium—In order to assess ancestry-specific differences, a meta-analysis was conducted in the GOLD Consortium for each ancestry (European, African, Hispanic, and Chinese) separately and all ancestries together using METAL. Additionally, separate GWAS in men and women in the GOLD Consortium were conducted and meta-analyzed the GWAS using METAL. Sex-specific GWAS analyses were controlled for age, age², and PCs 1-10. Cochran's Q was used to assess the observed heterogeneity and the I² metric was used for quantification. A Cochran's Q p-value<2.0×10⁻⁴ was considered significant.

[0113] GWAS analysis stratified by alcohol use—Using the UKBB MRI-PDFF data alcohol-specific GWAS of heavy and light drinkers was performed. Heavy drinkers were identified as ≥14 drinks consumed per week for males or ≥7 drinks a week for females (N=21,396) and light drinkers as ≤1 drinks consumed per week for males and females (N=9,888). The UKBB MRI-PDFF GWAS were carried out as described above. A meta-analysis of the heavy and light drinkers was performed using METAL in order to assess the heterogeneity.

[0114] Previously published NAFLD/Steatosis variants—The effects of previously reported NAFLD/Steatosis variants were evaluated in GOLDPlus. A literature search was conducted for NAFLD and steatosis GWAS in PubMed and genome-wide significant variants were identified. Variants that were independent of the GOLDPlus genome-wide significant variants (500Kb flanking criteria from the lowest p-value associated variant) were assessed.

[0115] Phenome-wide association study (PheWAS)—Publicly available UKBB GWAS data from the Neale lab was utilized to perform a PheWAS of the NAFLD increasing alleles with related phenotypes. Associations were considered significant with a p-value<0.05.

[0116] PheWAS clustering—The PheWAS data was clustered by Z-score for the respective phenotype/variant combinations. Clustering was performed using R version 4.0.2. Optimal clusters were determined using the ‘NbClust’ package version 3.0. The ‘stats’ package was used for K-means clustering and the ‘dendextend’ version 1.13.4 and ‘dendogram’ packages were used for hierarchical clustering.

[0117] Mendelian randomization—A two-sample Mendelian randomization (MR) was performed, implemented in R version 3.6.0 using ‘TwoSampleMR’ version 0.5.5. For the analysis, the variant-NAFLD effect estimates from the GOLD Consortium (betas are required for MR and the GOLD Consortium data had the highest quality measures of hepatic steatosis in the population-based cohorts) were used. Only those variants with an F-statistic>10 were included in the MR analysis. 43 MR was performed using the resulting variants as the exposure and related publicly available and UKBB GWAS (K74 fibrosis and cirrhosis of liver and 185 oesophageal varices, a complication of cirrhosis) as outcomes. The reverse analysis was also performed where independent genome-wide significant (p-value<5.0×10⁻⁸) variants from the aforementioned GWAS were used as exposure and the GOLD Consortium phenotype as the outcome. Inverse-variance weighted, penalized weighted median, weighted median, weighted mode, and MR-Egger methods were also applied. Tests for heterogeneity and horizontal pleiotropy were also performed.

[0118] Data-driven expression prioritization integration for complex traits (DEPICT)—DEPICT provides details regarding GWAS-prioritized tissues, genes, and pathways across cells and tissues.⁴⁴ Enrichment was considered statistically significant at a false discovery rate (FDR) p-value<0.05.

[0119] Polygenic risk scores (PRS) and NAFLD risk factors—A PRS was created using the liver fat increasing variants (N=17) from the GOLDPlus meta-analysis. The PRS was based on a weighted sum of dosage of the NAFLD associated single variants. The beta value of each allele (from GOLD Consortium) was used to weigh the PRS. The predictive power of the PRS was assessed on NAFLD, cirrhosis, and HCC cohorts in MGI European ancestry samples. PRS were defined as inverse-normally transformed rank units or as percentiles. Analyses were adjusted for age, age², sex, and PCs 1-10. The predictive power of the PRS was assessed in comparison to other NAFLD risk factors using univariate and multivariate linear models. NAFLD risk factors were the median outpatient values for the MGI cohort. Linear models were generated using the ‘glm’ function in R. The C-statistic was calculated using the ‘DecsTools’ package in R.

### Example 1

GOLDPlus meta-analysis

[0120] A meta-analysis of CT measured liver fat (GOLD) was carried out with UKBB MRI liver PDFF, UKBB NAFLD, eMERGE NAFLD, and FinnGen NAFLD in the largest meta-analysis to date of NAFLD (FIG. 4). In all cases the top associated variants for all datasets were at PNPLA3 verifying congruency across the phenotypes. Eleven independent genome-wide significant variants were identified (p-value<5.0×10⁻⁸) (Table1; FIG. 5). These variants are referred to as the GOLDPlus Significant Variants. Genes for annotation were prioritized if the index variant was a missense variant in the gene, in high LD (r²>0.7) with an exonic variant in the gene, and/or was an eQTL for the gene in liver. Genes that were within 1 Mb of the index variant and predominantly expressed in the liver, prioritized by DEPICT analysis, and/or nearest to the index variant were also prioritized for annotation.

[0121] One region contained possible two independent loci within close proximity of each other: one at ADH1B—rs1229984 which is within 500 kb of MTTP-rs7661964. To confirm that these two signals were independent of each other conditional analyses were carried out in the UKBB multiethnic dataset. ADH1B in the UKBB multiethnic cohort had a p-value=5.09E-06 and a p-value=1.03E-05 before and after conditioning on MTTP. MTTP had a p-value=2.01E-07 and a p-value=4.09E-07 before and after conditioning on ADH1B. Novel variants were defined as those more than 1 MB away from genome-wide significant variants (p-value<5.0×10⁻⁸) from previously published NAFLD and hepatic steatosis GWAS. Novel associations were identified in or near TOR1B, FTO, COBLL1/GRB14, INSR, SREBF1, and PNPLA2 (Table1; FIG. 5). Previously identified NAFLD associations were confirmed in or near PNPLA3, TM6SF2, APOE, GCKR, TRIB1, GPAM, MARC1, MTTP, ADH1B, TMC4/MBOAT7, and PTPRD. One genome-wide significant variant LOC157273/PPPIR3B (rs4841132; p-value=4.21λ10⁻¹³; HetP-value=7.44×10⁻¹⁹) was removed from downstream analysis due to phenotype heterogeneity (see Methods). rs4841132 is known to promote liver damage by increasing glycogen, which is a distinct pathology from NAFLD.

[0122] The index variants at several loci are missense variants: TM6SF2, APOE, GCKR, ADH1B, and PNPLA2. The index variants in PNPLA3, GPAM, MARC1, MTTP, and TMC4/MBOAT7 are in LD (r²>0.99 across all ethnicities) with missense variants PNPLA3 (1148M; rs738409), GPAM (V43I; rs2792751), MARC1 (T493A; rs2807834), MTTP (145T; rs3816873), and TMC4/MBOAT7 (TMC4 G17E; rs641738) respectively. The index variants associated with TRIB1 and SREBF1 are intergenic, while the variants in TOR1B, FTO, COBLL1/GRB14, INSR, and PTPRD are intronic. rs7029757 is an eQTL for TOR1B (FDR p-value=5.00E-04), which is expressed in the liver. TRIB1, MTTP, TOR1B, INSR and PTPRD are the genes nearest to the respective non-coding index variants. SREBF1 is within 1 MB of the index variant and is highly expressed in the liver. rs79953491 is an intronic variant in COBLL1 which is expressed in the liver. Additionally, GRB14, which is highly expressed in the liver, is within 1 MB of rs79953491. Literature review suggests that rs56094641 at FTO may exert its effects on BMI by affecting IRX3/6 expression in adipose tissue.

[0123] A second meta-analysis was performed using the same datasets but included only European ancestry participants (FIG. 6). Seventeen independent genome-wide significant variants were also identified (p-value<5.0×10⁻⁸) (PNPLA3, TM6SF2, APOE, GCKR, TRIB1, GPAM, MARC1, MTTP, ADH1B, TOR1B, TMC4/MBOAT7, COBLL1/GRB14, SREBF1, INSR, FTO, PNPLA2 and TAMM41/SYN2) (Table 2). The European meta-analysis differs only at one locus from the multiethnic analysis: TAMM41/SYN2 is genome wide significant in the European analysis whereas PTPRD is significant in the multiethnic analysis. The overlapping genome-wide significant variants shared across the two analyses have a less significant p value of association in the European data due to the smaller sample size in this dataset.

### Example 2

### Effects of Identified Variants by Study, Ancestry, Sex, and Alcohol Intake

[0124] The heterogeneity of effect of the NAFLD associated variants across the studies was assessed in GOLDPlus. After Bonferroni correction, only s58542926 at TM6SF2 and rs429358 at APOE showed statistically significant heterogeneity of effect. However, its direction of effect across studies was congruent. For completeness, the effects of the loci overall are shown and stratified by cohort (Table 1 and FIG. 14, respectively).

[0125] The effects of the NAFLD associated variants across ancestries were assessed (FIGS. 1 and 7) (European (EUR), N=15,880; African (AFR), N=5,607; Hispanic (HIS), N=1,674; and Chinese (CHN), N=360) and sex (males, N=11,006; females, N=12,515) (FIG. 8). For these analyses, the GOLD Consortium data was utilized, which had the highest quality measures of hepatic steatosis in population-based cohorts across ancestries and sex. PNPLA3 (B=0.24 EUR, B=0.27 AFR, B=0.24 HIS, B=0.17 CHN, HetP-value=5.69×10⁻⁶) exhibited significant heterogeneity of effect across ancestries. However, a limited sample size in the Chinese ancestry cohort likely caused unstable estimate of betas, influencing the estimates of heterogeneity. After removal of the Chinese cohort from the meta-analysis the heterogeneity P-value was non-significant after Bonferroni correction (PNPLA3, HetP-value=0.69). No other loci showed significant heterogeneity of effect by ancestry or sex.

[0126] Greater than a 10% absolute difference in effect allele frequencies (EAF) was found for index variants in PNPLA3 (rs738408-T), GCKR (rs1260326-T), TRIB1 (rs28601761-C), GPAM (rs2792735-G), MARC1 (rs2642438-G), ADH1B (rs1229984-C), FTO (rs62033399-T), PTPRD (rs10756038-G), TMC4/MBOAT7 (rs641738-T), MAST3 (rs273507-C), ERLIN1 (rs17729876-G), OSGIN1 (rs4782568-C), COBLL1 (rs6712203-C), ITPR2 (rs10842708-G), SDCBP (rs113895159-C), and SUOX (rs705699-G) across ancestries (FIGS. 1 and 7). Variants in six genes, PNPLA3, GCKR, GPAM, PTPRD, COBLL1/GRB14, and INSR, had a relative decreased frequency of the NAFLD increasing allele while those in TRIB1, MARC1, and SREBF1 had an increased frequency in the African ancestry cohort as compared to the European ancestry cohort. In the Hispanic cohort, as compared to the European cohort, the frequency of the NAFLD increasing allele was lower in variants in GCKR and FTO and higher in PNPLA3, TRIB1, MARC1, COBBL1/GRB14, and SREBF1. In the Chinese cohort, as compared to the European cohort, the frequency of the NAFLD increasing allele was lower in variants in ADH1B, FTO, INSR, and TMC4/MBOAT7 and higher in PNPLA3, GCKR, TRIB1, MARC1, MTTP, COBLL1/GRB14, and SREBF1. PNPLA2 is a rare variant and was not well imputed in GOLD Consortium datasets and thus QC′d out.

[0127] The starkest contrasts in allele frequencies across ancestries existed in ADH1B. In the Chinese ancestry cohort ADH1B (rs1229984-C) had an EAF of 0.26, while it had >65% EAF in the European, African, and Hispanic ancestry cohorts. The variance explained across the ancestries paralleled the allele frequencies more than the effect sizes, which were similar across ancestries. The highest variances explained were 2.79% in the Hispanic cohort for PNPLA3, 2.42% in the Chinese cohort for GCKR, and 2.04% in the European cohort for PNPLA3. Taken together, these findings suggest EAF, more than effect size, accounts for the differences in genetic disease burden across ancestries. To assess the effects of alcohol the largest population based cohort, UKBB MRI-PDFF, was used to perform a GWAS analysis stratified by alcohol use. After Bonferroni correction, only ADH1B exhibited significant heterogeneity of effect (HetP-value=6.16E-04) between heavy (>14 drinks per week for males or >7 drinks a week for females; N=21,396) and light (≤1 drinks per week for males and females; N=9,888) drinkers for the NAFLD associated variants. ADH1B had a significantly greater effect (B=0.20) in heavy drinkers as compared to light drinkers (B=0.03).

### Example 3

### Tissue, Gene-Set, and Pathway Analyses

[0128] To further understand the biology underlying NAFLD associations, DEPICT was used to identify enriched tissues and cell types (FDR p-value<0.05).44 Input into DEPICT included the 17 NAFLD associated single variants. Liver and adipose tissue were the most enriched tissue types (FIG. 9). Epithelial cells (hepatocytes) were the most enriched cell type (FIG. 9). Using mSigDB significant gene functional overlaps were computed. Enrichment was found (FDR p-value<0.01) in the following biological functions: lipid homeostasis, lipid metabolic processes, monocarboxylic acid metabolic processes, alcohol metabolic processes, lipid biosynthesis, regulation of cholesterol biosynthesis, and steroid biosynthesis.

### Example 4

Association of NAFLD Variants with Other Phenotypes

[0129] Publicly available GWAS data was utilized to perform a PheWAS of NAFLD-risk increasing alleles with ICD-based diseases; alcohol intake; cardiovascular and body composition measures; and lipid, metabolic, and liver function test blood values (FIG. 2). Clustering of the PheWAS results revealed six distinct groups with differing biological effects (FIG. 10). The NAFLD-risk increasing allele of the variants broadly separated into two groups: one showing significant associations with increased serum low density lipoprotein cholesterol (LDL) and increased alanine aminotransferase (ALT) (TRIB1, GCKR, COBLL1/GRB14, INSR, PNPLA2, SREBF1, MTTP, GPAM, MARC1, TMC4/MBOAT7, TOR1B, and ADH1B associations) and the other group exhibiting decreased associations with LDL and increased associations with ALT (FTO, PTPRD, PNPLA3, TM6SF2, and APOE). Further separations showed NAFLD associating variants at TRIB1, GCKR, COBLL1/GRB14, INSR, PNPLA2, and SREBF1 were distinguished from TOR1B, MARC1, GPAM, TMC4/MBOAT7, and ADH1B associations by being associated with high serum triglycerides and low high-density lipoprotein (HDL) cholesterol. NAFLD associated variants at TRIB1 and GCKR were distinguished from COBLL1/GRB14, INSR, PNPLA2, SREBF1, and MTTP, SREBF1 by being associated with low risk of cholelithiasis and cholecystitis; GCKR had particularly strong association with lower insulin-like growth factor 1 (IGF1) and sex hormone binding globulin (SHBG) levels. NAFLD increasing associations at PTPRD, and FTO all associated with increased serum triglycerides whereas those at PNPLA3, TM6SF2, and APOE associated with decreased serum triglycerides. FTO clustered alone, and differed from other loci in having very strong association with increased body mass index (BMI). Likewise, APOE clustered alone and differed from PNPLA3, and TM6SF2 associations in having an increased association with body composition measures and decreased association with familial Alzheimer's disease.

### Example 5

### Mendelian Randomization

[0130] To determine whether NAFLD causally influences liver and metabolic diseases and traits two-sample Mendelian randomization was performed. NAFLD associated variants with an F-statistic>10 were used as a combined instrumental variable for steatosis (N=12; combined F-statistic=158.2). Using the GOLD Consortium effects as the exposure, NAFLD increased risk of liver fibrosis and cirrhosis (ICD K74; OR=1.002, 95% CI=1.001-1.003, MR-Egger p-value=1.69E-03) and esophageal varices (ICD 185; OR=1.003, 95% CI=1.002-1.004, MR-Egger p-value=1.75E-04) (FIG. 11). The MR Egger heterogeneity p-values were non-significant for fibrosis (p-value=0.21) and esophageal varices (p-value=0.08). The MR Egger pleiotropy p-values were non-significant for fibrosis (p-value=0.19) but were significant for esophageal varices (p-value=0.02), indicating horizontal pleiotropy may be driving the results of the esophageal varices Mendelian randomization. Sensitivity analyses are shown in FIGS. 11C-11D.

[0131] The causal effects of metabolic disorders, body composition measures and advanced liver disease were assessed on NAFLD. The GOLD Consortium was used as outcome and independent genome-wide significant variants (p-value<5E-08) from previously published GWAS (ebi.ac.uk/gwas/) as exposure. Increased BMI (OR=1.29, 95% CI=1.05-1.59, MR-Egger p-value=0.02) and waist circumference (OR=1.36, 95% CI=1.02-1.82, MR-Egger p-value=3.6E-02) increased risk of NAFLD (FIG. 12). The MR-Egger heterogeneity p-values were non-significant for BMI (p-value=0.051) and waist circumference (p-value=0.095). The MR-Egger pleiotropy p-values were non-significant for BMI (p-value=0.46) and waist circumference (p-value=0.296). The respective sensitivity analyses are shown in FIGS. 12C-12D.

### Example 6

### Effects on Liver Outcomes: NAFLD, Cirrhosis, Hepatocellular Carcinoma

[0132] In order to assess the cumulative effects of NAFLD increasing variants on disease a PRS was constructed based on a weighted sum of dosage (multiethnic ancestry) of the NAFLD associated single variants (N=17) and its effect was assessed in an independent cohort: MGI (Table 3). Higher NAFLD PRS was strongly associated with an increased odds-ratio for NAFLD in MGI (FIG. 3A). Compared to those in the bottom decile of the PRS, individuals in the top 10%, 5%, and 1% had OR=2.83 (95% CI=2.39-3.34), 3.40 (95% CI=2.83-4.09), and 4.66 (95% CI=3.53-6.14) for NAFLD, respectively. Higher NAFLD PRS was also associated with increased odds of both MGI cirrhosis (top 10% OR 2.47 (95% CI=1.95-3.12), 5% 3.39 (95% CI=2.64-4.36), and 1% 4.87 (95% CI=3.39-7.00)) and MGI HCC (top 10% OR 2.91 (95% CI=1.77-4.78), 5% 4.35 (95% CI=2.59-7.31), and 1% 6.34 (95% CI=3.14-12.78)) (FIGS. 3B-3C).

### Example 7

### Pnpla3 and Diabetes in NAFLD Progression

[0133] NAFLD was defined based on ALT elevation and cirrhosis based on ICD codes in both cohorts. A Michigan Medicine cohort the ALT criterion has 88.6% specificity for NAFLD. In UKBB, the ALT definition of NAFLD was validated among the subset of participants who underwent liver magnetic resonance imaging with proton density fat fraction measurement and found that specificity of ALT elevations was 93.0% (3,272/3,515) for liver fat fraction >5.5%. ICD codes for cirrhosis demonstrated a positive predictive value of 86% in a Michigan Medicine cohort. A Michigan Medicine cohort was evaluated for sensitivity for ICD-10 codes for cirrhosis by evaluating patients with NAFLD (defined by ALT as above) who had imaging evidence of cirrhosis. It was found that 973/1251 (77.8%) of these patients had an ICD code for cirrhosis within 12 months of the date of the imaging study showing cirrhosis, implying that ICD codes have acceptable sensitivity for cirrhosis. ICD codes for cirrhosis were unable to be directly validated sensitivity in UK Biobank due to lack of access to a “gold standard” metric of cirrhosis.

[0134] The MGI cohort included 7,893 participants with NAFLD, among whom median age 52 years and approximately half were female. As expected in a NAFLD cobort, there was a high prevalence of diabetes (36%) and obesity (58%). Incident cirrhosis developed in 590 (6.8%) of MGI participants during a median follow-up of 72.5 months (IQR 45.9-100.5 months), yielding an incidence rate of 4.01 per 1,000 PY overall and 3.58 per 1,000 PY among those who did not have baseline advanced fibrosis (FIB4<2.67).

[0135] Univariate analysis showed that Fibrosis-4 (FIB4) score was strongly predictive of incident cirrhosis. Other risk factors included diabetes (hazard ratio [HR] 2.14 [95% confidence interval (CI) 1.60-2.85, p=3.0×10⁻⁷]), higher body mass index (HR 1.83 [95% CI 1.26-2.64, p=0.0014] for obese vs. lean/overweight), and elevated ALT (HR 2.00 [95% CI 1.48-2.69], p=5.2×10⁻⁶ for ≥ vs. <2x ULN) (FIG. 17). There was no significant association between hypertension or dyslipidemia and incident cirrhosis (p>0.05 for both comparisons).

[0136] Genetic variants previously associated with steatosis/cirrhosis were systematically evaluated. In MGI, only two of these individual variants were associated with increased rate of progression to cirrhosis: PNPLA3-rs738409-GG (vs.-CC) with HR 3.48 (95% CI 2.32-5.22, p=1.7×10⁻⁹) and TRIB1-rs28601761-CC (vs. GG) with HR 2.15 (95% CI 1.30-3.53, p=0.0026) (Table 4, FIG. 17). A previously-reported polygenic risk score for cirrhosis was associated with incident cirrhosis, but an effect was only observed at the highest risk quartile: HR 2.30 (1.53-3.46, p=6.3×10⁻⁵) vs. lowest quartile. Variants in TM6SF2, HSD17B13, and other previously reported risk loci were not significantly associated with incident cirrhosis. A sensitivity analysis including only patients without baseline advanced fibrosis (FIB4<2.67) yielded the same overall findings for the association with cirrhosis and genetic and non-genetic predictors as in the overall cohort.

[0137] A multivariable model for incident cirrhosis was generated including the most consistent predictors of incident cirrhosis in both cohorts, namely PNPLA3-rs738409-G, TRIB1-rs28601761-C, diabetes, obesity (categorized as obesity vs. lean/overweight), ALT level (categorized as ≥ vs. <2x ULN) and all remained significantly associated with incident cirrhosis with similar hazard ratios compared to the univariable analysis (Table 4). A sensitivity analysis in patients without baseline advanced fibrosis showed similar finding.

[0138] The remainder of the MGI analyses focused on patients without advanced fibrosis (FIB4<2.67) to determine whether genetic and/or environmental risk factors can identify a subgroup with more rapid disease progression.

[0139] PNPLA3 status was associated with increased risk of progression in the overall cohort of patients without advanced fibrosis (8.89 vs. 3.15 cases per 1,000 PY with PNPLA3-rs738409-GG vs.-CC/-CG genotype, respectively, p<0.0001) (Table 5). This association between PNPLA3 genotype and cirrhosis risk was even more notable when stratified by diabetes status, obesity status, and ALT level (Table 5). For example, among patients with diabetes, the cumulative incidence of cirrhosis was 3.2-fold higher in patients with PNPLA3-rs738409-GG vs.-CC/-CG genotype (16.4 vs. 5.1/1000 PY, respectively) (Table 5). A clinical risk score was generated based on diabetes, obesity, and ALT ≥2x ULN where each patient received 2 points if she had diabetes and 1 point each for obesity and ALT >2x ULN. Patients were divided in low, intermediate, and high risk (0-1, 2-3, and 4 points, respectively); these cutoffs were chosen because cumulative incidence of cirrhosis was similar in patients with 0 vs. 1, or 2 vs. 3 points. PNPLA3-rs738409-GG genotype was again associated with much higher cumulative incidence in the low-risk (6.3 vs. 2.3/1000 PY) and intermediate-risk groups (8.9 vs. 4.0/1000 PY; p<0.05 for both), with a trend toward higher cumulative incidence in the high-risk group as well (22.9 vs. 9.1/1000 PY, p=0.14) (Table 5). TRIB1-rs28601761-CC genotype was associated with higher risk of cirrhosis than-GG or-GC genotypes (4.6 vs. 3.0/1000 PY overall, p=0.0072). This association was also significant in patients without diabetes, with obesity, or with ALT ≥ 2x ULN. In models including gene-environment interaction terms (e.g., PNPLA3-rs738409-G dosage*diabetes status), the interaction terms were not significant for either PNPLA3 or TRIB1 genotype and any of the environmental predictors (p >0.05 for all).

[0140] Patients with low baseline FIB4 scores, but with diabetes and PNPLA3-rs738409-GG, had an incidence of cirrhosis similar to that of patients with high baseline FIB4 (HR=0.90 [95% CI 0.39-2.08], p=0.81), and markedly higher than those with low FIB4 score, diabetes, and PNPLA3-rs738409-CC or-CG genotypes (HR 3.03 [95% CI 1.44-6.67], p=0.0035; both comparisons were after adjustment for age, sex, and principal components 1-10) (FIG. 18). Thus, persons with low FIB4 but PNPLA3-rs738409-GG genotype and diabetes had a rate of progression indistinguishable from those with high FIB4 scores.

[0141] The findings from MGI in patients with NAFLD in patients from an independent cohort were validated with UKBB. Unlike MGI, UKBB is a population-based cohort and as expected had a lower prevalence of comorbidities such as diabetes and obesity, and lower FIB4 scores. The UKBB cohort included 46,880 patients. In a median follow-up of 155.2 months (IQR 147.2-163.1 months), 191 (0.40%) developed incident cirrhosis, yielding an incident rate of 0.60 per 1000 PY overall and 0.39 per 1000 PY among those without baseline advanced fibrosis.

[0142] On univariable analysis, diabetes, obesity, elevated ALT, PNPLA3-rs738409-GG genotype were associated with incident cirrhosis, as was the case in MGI. The association between the TRIB1-rs28601761-G allele was not statistically significant. In UKBB unlike in MGI, TM6SF2-rs58542926-T associated with incident cirrhosis while the cirrhosis polygenic risk score did not. On multivariable analysis, the association between obesity and incident cirrhosis was no longer statistically significant (p=0.09) but there were otherwise no meaningful changes in the results. On sensitivity analysis including only those without advanced fibrosis at baseline, the overall findings were similar compared to the overall UKBB cohort.

[0143] Next, the combined effects on cirrhosis incidence of PNPLA3-rs738409 or TRIB1-rs28601761 genotype and the environmental factors of DM, obesity, or ALT elevations, were evaluated in UKBB in patients without baseline advanced fibrosis (e.g., FIB4<2.67). The associations between PNPLA3 genotype, metabolic risk factors, and incident cirrhosis were similar to the findings in MGI. PNPLA3-rs738409-GG genotype was associated with higher overall cumulative incidence of cirrhosis than-CC or-CG genotype (0.61 vs. 0.37/1000 PY, p=0.042) (Table 5). These differences were even greater among patients with diabetes or obesity: UKBB participants with diabetes or obesity and PNPLA3-rs738409-GG genotype had a >3-fold higher cumulative incidence of cirrhosis than did those with the-CC or-CG genotype (3.4 vs. 1.0 events/1000 PY for diabetes and 1.27 vs. 0.42 events/1000 PY for obesity; p<0.001 for both). Similarly, compared to PNPLA3-rs738409-CG or-CC genotype, the GG genotype was strongly associated with higher cumulative incidence of cirrhosis among patients with clinical risk score in the intermediate (1.31 vs. 0.53/1000 PY) or high range (5.78 vs. 1.78/1000 PY; p <0.05 for both). PNPLA3-rs738409 genotype was not significantly associated with incident cirrhosis among patients with low clinical risk score due to very small number of non-obese patients with incident cirrhosis and PNPLA3-rs738409-GG genotype (n=2) or among people without diabetes, obesity, or ALT≥2x ULN. TRIB1-rs28601761 genotype was not significantly associated with increased cumulative incidence of cirrhosis overall or in any subgroup in UKBB. As in MGI, gene-environment interaction terms were not significant between PNPLA3 or TRIB1 genotype and any of the above predictors (p>0.05 for all).

[0144] As with MGI, patients with low baseline FIB4 score and diabetes who carried the PNPLA3-rs738409-GG genotype had a cumulative incidence of cirrhosis similar to that of the patients with high baseline FIB4 (HR=0.57 [95% CI 0.29-1.14], p=0.11) and much greater than those with PNPLA3-rs738409-CC or-CG genotypes (HR=3.33 [95% CI 1.61-7.14], p=0.0013; both comparisons adjusted for age, sex, and principal components 1-10) (FIG. 18).

TABLE 1
Variants associated with NAFLD measures in GOLDPlus meta-analysis

| SNP ID | CHR:POS | EA | OA | EAF | Z-score | P-value | Gene Annotation |
|---|---|---|---|---|---|---|---|
| rs738408 | 22:44324730 | T | C | 0.22 | 35.21 | 1.53E−271 | PNPLA3 (D, E, L, N); SAMM50 (D) |
| rs58542926 | 19:19379549 | T | C | 0.07 | 22.76 | 1.19E−114 | TM6SF2 (D, B*, L, N); NCAN (D); SUGP1 |
| | | | | | | | (D); MAU2 (D) |
| rs429358 | 19:45411941 | T | C | 0.85 | 12.18 | 4.24E−34 | APOE (D, E*, L); APOC1 (D, L); TOMM40 |
| | | | | | | | (D); PVRL2 (D) |
| rs1260326 | 2:27730940 | T | C | 0.38 | 11.62 | 3.10E−31 | GCKR (D, E*, L, Q); SNX17 (D); C2orf16 (Q) |
| rs28601761 | 8:126500031 | C | G | 0.59 | 9.69 | 3.50E−22 | TRIB1 (D, L, N) |
| rs4918722 | 10:113947040 | C | T | 0.27 | 9.27 | 1.94E−20 | GPAM (D, E, L, N) |
| rs2807834 | 1:220970593 | G | T | 0.70 | 7.79 | 6.68E−15 | MARC1 (D, E*, L, N) |
| rs7661964 | 4:100505326 | A | T | 0.74 | 7.00 | 2.58E−12 | MTTP (D, E, L, N); C4orf17 (D) |
| rs7029757 | 9:132566666 | G | A | 0.91 | 6.68 | 2.38E−11 | TOR1B (N, Q); TOR1A (D) |
| rs1229984 | 4:100239319 | C | T | 0.95 | 6.56 | 5.57E−11 | ADH1B (D, E*, L, N); ADH4 (L); ADH1A (L) |
| rs17817449 | 16:53813367 | G | T | 0.39 | 6.15 | 7.56E−10 | FTO (N); RPGRIP1L (D) |
| rs79953491 | 2:165555539 | A | G | 0.88 | 5.95 | 2.71E−09 | COBLL1 (D, N, E); GRB14 (L) |
| rs112630404 | 19:7218635 | A | T | 0.18 | 5.85 | 4.88E−09 | INSR (D, N) |
| rs626283 | 19:54677001 | C | G | 0.43 | 5.75 | 8.99E−09 | TMC4 (E*, Q, N); MBOAT7 (Q); LENG1 (D) |
| rs4561528 | 17:17979099 | T | C | 0.35 | 5.57 | 2.52E−08 | SREBF1 (D, L); MYO15A (D, Q, E); DRG2 |
| | | | | | | | (D, N); DRC3 (D, Q, E); ATPAF2 (D, Q); |
| | | | | | | | TOM1L2 (D, Q); LLGL1 (Q); G1D4 (E); |
| rs10756038 | 9:10462423 | G | A | 0.72 | 5.47 | 4.58E−08 | PTPRD (D, N) |
| rs140201358 | 11:823586 | G | C | 0.01 | 5.50 | 3.81E−08 | PNPLA2 (D, E*, N) |
| rs738408 | 22:44324730 | T | C | 0.22 | 35.21 | 1.53E−271 | PNPLA3 (D, E, L, N); SAMM50 (D) |

CHR:POS, chromosome:position; EA, effect allele; OA, other allele; EAF, effect allele frequency.
Gene annotation tag: Gene prioritized by Depict analyses (D); Index variant is exonic (E*); Index variant is in strong LD (r2 > 0.85) with an exonic variant in the indicated gene (E); Index variant is within 1 MB of a variant in the indicated gene that is highly expressed in the liver using Gtex (L); Gene nearest to the index SNP (N); Index variant is in eQTL (FDR p < 0.05) with the indicated gene (Q).

TABLE 2
Independent GOLDPlus European meta-analysis NAFLD variants

| Gene | CHRBP | rsID | EA | OA | EAF | Zscore | P. value | HetPVal |
|---|---|---|---|---|---|---|---|---|
| PNPLA3 | 22:44324730 | rs738408 | t | c | 0.22 | 32.72 | 7.93E−235 | 3.49E−02 |
| TM6SF2 | 19:19388500 | rs8107974 | t | a | 0.08 | 22.86 | 1.19E−115 | 1.35E−07 |
| APOE | 19:45411941 | rs429358 | t | c | 0.85 | 12.37 | 3.61E−35 | 2.07E−02 |
| GCKR | 2:27598097 | rs4665972 | t | c | 0.40 | 10.68 | 1.25E−26 | 8.75E−02 |
| TRIB1 | 8:126506694 | rs112875651 | g | a | 0.60 | 9.34 | 9.32E−21 | 8.43E−03 |
| GPAM | 10:113949664 | rs10787429 | t | c | 0.28 | 8.66 | 4.87E−18 | 7.75E−01 |
| MARC1 | 1:220973563 | rs2642442 | t | c | 0.69 | 7.93 | 2.20E−15 | 1.17E−01 |
| MTTP | 4:100480915 | rs138764179 | t | c | 0.74 | 6.62 | 3.71E−11 | 9.74E−01 |
| ADH1B | 4:100239319 | rs1229984 | c | t | 0.97 | 6.54 | 6.22E−11 | 6.79E−01 |
| TOR1B | 9:132566666 | rs7029757 | g | a | 0.91 | 6.41 | 1.46E−10 | 5.44E−01 |
| TMC4/ | 19:54677001 | rs626283 | c | g | 0.43 | 6.15 | 7.76E−10 | 7.13E−01 |
| MBOAT7 | | | | | | | | |
| COBLL1/ | 2:165555539 | rs79953491 | a | g | 0.88 | 5.89 | 3.76E−09 | 2.19E−01 |
| GRB14 | | | | | | | | |
| SREBF1 | 17:17977355 | rs9303144 | c | t | 0.31 | 5.68 | 1.39E−08 | 8.64E−01 |
| INSR | 19:7202759 | rs8113542 | g | a | 0.26 | 5.53 | 3.19E−08 | 6.90E−02 |
| FTO | 16:53811788 | rs62033400 | g | a | 0.40 | 5.49 | 3.95E−08 | 8.27E−01 |
| PNPLA2 | 11:823586 | rs140201358 | g | c | 0.01 | 5.48 | 4.25E−08 | 4.69E−01 |
| TAMM41/ | 3:11916108 | rs559803897 | c | t | 0.99 | 5.47 | 4.50E−08 | 9.61E−01 |
| SYN2 | | | | | | | | |

TABLE 3
Independent GOLDPlus European meta-analysis NAFLD variants

| Multiethnic cohort | | |
|---|---|---|
| Covariates | N | Value in UKBB |
| mean age (SD) years | 43,293 | 64.2 (7.7) |
| % female | 43,293 | 51.5 |
| Diseases | N | Value in UKBB |
| mean PDFF (SD) | 43,293 | 3.9 (4.3) |
| European cohort | | |
| Covariates | N | Value in UKBB |
| mean age (SD) years | 41,834 | 64.3 (7.7) |
| % female | 41,834 | 51.7 |
| Diseases | N | Value in UKBB |
| mean PDFF (SD) | 41,834 | 3.9 (4.3) |

Each row gives number of UKBB participants for which a measurement is available/characteristic is known (N); and, the value, as either mean with standard deviation (SD), or N for cases and controls.

TABLE 4
Univariable and multivariable predictors of incident
cirrhosis in the Michigan Genomics Initiative cohort

| | Univariable | | Multivariable | |
|---|---|---|---|---|
| | Hazard ratio (95% | | Hazard ratio (95% | |
| Predictor | confidence interval) | P value | confidence interval) | P value |
| Diabetes | 2.14 (1.60-2.85) | 3.00E−07 | 2.01 (1.43-2.83) | 5.70E−05 |

Body mass index

| | | | | |
|---|---|---|---|---|
| Lean/overweight | (Referent) | | (Referent) | |
| Obese | 1.83 (1.26-2.64) | 0.0014 | 1.50 (1.04-2.18) | 0.031 |

Alanine aminotransferase

| | | | | |
|---|---|---|---|---|
| <2x ULN | (Referent) | | (Referent) | |
| >=2x ULN | 2.00 (1.48-2.69) | 5.2e−06 | 1.49 (1.06-2.10) | 0.024 |

PNPLA3-rs738409 genotype

| | | | | |
|---|---|---|---|---|
| CC | (Referent) | | (Referent) | |
| CG | 1.45 (1.06-1.98) | 0.02 | 1.43 (1.00-2.06) | 0.052 |
| GG | 3.48 (2.32-5.22) | 1.70E−09 | 3.24 (2.01-5.23) | 1.50E−06 |

TRIB1-rs28601761 genotype

| | | | | |
|---|---|---|---|---|
| GG | (Referent) | | (Referent) | |
| GC | 1.44 (0.87-2.38) | 0.15 | 1.20 (0.69-2.11) | 0.52 |
| CC | 2.15 (1.30-3.53) | 0.0026 | 1.91 (1.10-3.32) | 0.022 |

Models were run as Fine-Gray competing risk analyses. Results are shown as hazard ratio (95% confidence interval). In univariable models, effect of each specific predictor is shown after adjustment for age, sex, and genetic principal components 1-10 to account for ethnic variation. Multivariable results indicate hazard ratios for each predictor additionally adjusted for all of the other predictors shown in this table. ULN, upper limit of normal, defined as 19 U/L for women and 30 U/L for men.

TABLE 5
Cumulative incidence of cirrhosis stratified by PNPLA3
genotype, in patients without baseline advanced fibrosis,
in the Michigan Genomics Initiative and UK Biobank

| | PNPLA3-rs738409 genotype | | |
|---|---|---|---|
| Cohort | CC (lowest risk) or CG | GG (highest risk) | P value |

UK Biobank

| | | | |
|---|---|---|---|
| All | 0.37 (0.31-0.44) | 0.61 (0.36-0.97) | 0.042 |
| Diabetes | 1.00 (0.69-1.41) | 3.40 (1.55-6.45) | 0.00061 |
| Obesity | 0.42 (0.32-0.53) | 1.27 (0.74-2.03) | <0.0001 |
| ALT >= 2x ULN | 0.58 (0.46-0.73) | 0.82 (0.41-1.47) | 0.29 |
| Clinical risk score | | | |
| Low | 0.27 (0.21-0.34) | 0.15 (0.03-0.43) | 0.28 |
| Intermediate | 0.53 (0.38-0.72) | 1.31 (0.63-2.40) | 0.0091 |
| High | 1.78 (1.00-2.94) | 5.78 (1.88-13.50) | 0.017 |

Michigan Genomics Initiative

| | | | |
|---|---|---|---|
| All | 3.15 (2.59-3.80) | 8.89 (5.75-13.12) | <0.0001 |
| Diabetes | 5.09 (3.70-6.83) | 16.43 (8.20-29.40) | <0.0001 |
| Obesity | 3.70 (2.80-4.80) | 9.21 (4.76-16.09) | 0.0022 |
| ALT >= 2x ULN | 4.16 (3.00-5.62) | 13.85 (8.07-22.17) | <0.0001 |
| Clinical risk score | | | |
| Low | 2.27 (1.62-3.08) | 6.32 (2.73-12.45) | 0.0059 |
| Intermediate | 3.96 (2.74-5.53) | 8.89 (3.57-18.31) | 0.035 |
| High | 9.09 (4.54-16.26) | 22.89 (4.72-66.90) | 0.14 |

Cumulative incidence is shown as per 1,000 person-years (95% confidence interval), in the overall cohort and among patients with/without diabetes, obesity, or elevated alanine aminotransferase (ALT), and across the range of clinical risk score. Clinical risk score: low risk includes patients with no diabetes and no more than one of ALT >= 2x ULN or obesity; high risk includes those with diabetes, obesity, and ALT >= 2x ULN; and intermediate risk indicates all other patients. P value is for the association between PNPLA3 genotype (defined as rs738409-CC or -CG vs. -GG) and cumulative incidence of cirrhosis within each subgroup group. ULN, upper limit of normal, defined as 19 U/L for women or 30 U/L for men. Absence of baseline advanced fibrosis was defined as baseline Fibrosis-4 score <2.67.

TABLE 6
Top NAFLD SNPs

| Chromosome | Position | EA | OA | SNPID | Nearest Gene |
|---|---|---|---|---|---|
| 1 | 66554145 | T | C | rs11208797 | PDE4B |
| 1 | 110650174 | A | G | rs4839136 | LINC01397 |
| 1 | 172354992 | C | T | rs10752943 | DNM3 |
| 1 | 219448378 | C | T | rs12137855 | LYPLAL1 |
| 1 | 220970028 | G | A | rs2642438 | MTARC1 |
| 1 | 235327523 | G | A | rs112879517 | ARID4B |
| 2 | 21383514 | G | A | rs1712246 | TDRD15 |
| 2 | 25623603 | G | A | rs114018216 | DTNB |
| 2 | 27169393 | G | A | rs149219797 | DPYSL5 |
| 2 | 27730940 | T | C | rs1260326 | GCKR |
| 2 | 99738961 | A | G | rs6741772 | MRPL30 |
| 2 | 106914285 | C | T | rs34071542 | LOC402096 |
| 2 | 113841030 | A | G | rs6734238 | IL1RN |
| 2 | 137655519 | T | C | rs12999325 | THSD7B |
| 2 | 165528876 | C | T | rs13389219 | GRB14 |
| 3 | 5727851 | A | G | rs1840069 | MIR4790 |
| 3 | 12329783 | C | T | rs17036160 | PPARG |
| 3 | 50208406 | C | G | rs3774750 | SEMA3F |
| 4 | 17880416 | C | A | rs7700107 | LCORL |
| 4 | 77173739 | T | C | rs75132248 | FAM47E, FAM47E-STBD1 |
| 4 | 88230100 | T | G | rs10433937 | HSD17B13 |
| 4 | 92929643 | A | C | rs116160256 | LNCPRESS2 |
| 4 | 100239319 | C | T | rs1229984 | ADH1B |
| 4 | 100505326 | A | T | rs7661964 | MTTP |
| 4 | 103710930 | G | A | rs223454 | LOC102723704 |
| 5 | 22988560 | A | C | rs72750636 | CDH12 |
| 5 | 148342399 | T | C | rs2400785 | SH3TC2 |
| 6 | 25818755 | G | A | rs9461218 | SLC17A1 |
| 6 | 31587870 | T | A | rs2857694 | PRRC2A |
| 6 | 119484820 | C | G | rs601575 | MAN1A1 |
| 7 | 127383860 | T | A | rs1936811 | RSPO3 |
| 7 | 10521339 | T | C | rs58074807 | MGC4859 |
| 7 | 84532205 | C | G | rs782894 | SEMA3D |
| 7 | 98980659 | T | G | rs11973460 | ARPC1B |
| 8 | 6577140 | T | G | rs2911980 | AGPAT5 |
| 8 | 9183596 | A | G | rs4841132 | LOC157273 |
| 8 | 19824492 | T | C | rs13702 | LPL |
| 8 | 126482077 | A | G | rs2954021 | TRIB1, LINC00861 |
| 9 | 10462423 | G | A | rs10756038 | PTPRD |
| 9 | 15194625 | C | T | rs613981 | TTC39B |
| 9 | 16792621 | A | G | rs12553314 | BNC2 |
| 9 | 33109149 | A | C | rs13296330 | MIR12117 |
| 9 | 132566666 | G | A | rs7029757 | TOR1B |
| 10 | 36070931 | C | T | rs7073191 | PCAT5 |
| 10 | 78726447 | G | C | rs118028160 | KCNMA1-AS1 |
| 10 | 101912064 | T | C | rs2862954 | ERLIN1 |
| 10 | 113949664 | I | C | rs10787429 | GPAM, TECTB |
| 10 | 135378544 | T | C | rs9630002 | SYCE1 |
| 11 | 823586 | G | C | rs140201358 | PNPLA2 |
| 11 | 122013169 | C | T | rs531897 | MIR100HG |
| 12 | 19149829 | T | C | rs10505835 | PLEKHA5 |
| 12 | 21499248 | T | C | rs75208026 | SLCO1A2 |
| 12 | 82554772 | A | G | rs75159697 | LINC02426 |
| 12 | 85105077 | C | T | rs10862921 | SLC6A15 |
| 12 | 97557708 | G | T | rs7307068 | NEDD1 |
| 12 | 121424861 | A | G | rs7310409 | HNF1A |
| 12 | 124506631 | T | C | rs10773049 | ZNF664-RFLNA |
| 13 | 51106522 | T | A | rs1239948 | DLEU1 |
| 13 | 111019462 | A | C | rs4773169 | COL4A2 |
| 14 | 30067638 | A | G | rs7146602 | PRKD1 |
| 14 | 94844947 | T | C | rs28929474 | SERPINA1 |
| 15 | 73645403 | G | A | rs11630240 | HCN4 |
| 16 | 53806453 | G | A | rs56094641 | FTO |
| 16 | 68644795 | A | G | rs11643361 | CDH3 |
| 17 | 17979099 | T | C | rs4561528 | MYO15A |
| 17 | 64210580 | C | A | rs1801689 | APOH |
| 19 | 7218635 | A | T | rs112630404 | INSR |
| 19 | 18229208 | T | G | rs56252442 | MAST3 |
| 19 | 19379549 | T | C | rs58542926 | TM6SF2 |
| 19 | 33889593 | A | G | rs7256564 | PEPD |
| 19 | 45411941 | T | C | rs429358 | APOE |
| 19 | 54677001 | C | G | rs626283 | TMC4/MBOAT7 |
| 20 | 62336258 | T | C | rs6062497 | ARFRP1 |
| 22 | 17649774 | C | T | rs5748926 | IL17RA |
| 22 | 44324727 | G | C | rs738409 | PNPLA3 |

TABLE 7
CRISPRa and CRISPRi gRNAs

| Gene Target | gRNA SEQ ID NOs | | | | CRISPRa | CRISPRi | CRISPR-KO |
|---|---|---|---|---|---|---|---|
| CEBPA | 31-45 | 10177-10191 | 20358-20372 | ACSL3 | 1-15 | 10147-10161 | 20328-20342 |
| DGAT2 | 46-60 | 10192-10206 | 20373-20387 | SCAP | 16-30 | 10162-10176 | 20343-20357 |
| NUDT10 | 61-75 | 10207-10221 | 20388-20402 | FBXL14 | 661-675 | 10807-10821 | 20988-21002 |
| USP22 | 76-90 | 10222-10236 | 20403-20417 | CD27 | 676-690 | 10822-10836 | 21003-21017 |
| FAM47E | 91-105 | 10237-10251 | 20418-20432 | C5AR1 | 691-705 | 10837-10851 | 21018-21032 |
| HRC | 106-120 | 10252-10266 | 20433-20447 | INTS6 | 706-720 | 10852-10866 | 21033-21047 |
| PRADC1 | 121-135 | 10267-10281 | 20448-20462 | LYZL2 | 721-735 | 10867-10881 | 21048-21062 |
| IP6K1 | 136-150 | 10282-10296 | 20463-20477 | MAD2L1BP | 736-750 | 10882-10896 | 21063-21077 |
| DCAF8L1 | 151-165 | 10297-10311 | 20478-20492 | TAF2 | 751-765 | 10897-10911 | 21078-21092 |
| TTLL12 | 166-180 | 10312-10326 | 20493-20507 | SLC10A3 | 766-780 | 10912-10926 | 21093-21107 |
| PCGF1 | 181-195 | 10327-10341 | 20508-20522 | SEC31A | 781-768 | 10927-10941 | 21108-21122 |
| GAGE1 | 196-210 | 10342-10356 | 20523-20537 | NTPCR | 769-810 | 10942-10956 | 21123-21137 |
| PLEKHF2 | 211-225 | 10357-10371 | 20538-20552 | SCD | 811-825 | 10957-10971 | 21138-21152 |
| CHP1 | 226-240 | 10372-10386 | 20553-20567 | CCDC146 | 826-840 | 10972-10986 | 21153-21167 |
| HILPDA | 241-255 | 10387-10401 | 20568-20582 | PAX8 | 841-855 | 10987-11001 | 21168-21182 |
| GRIK5 | 256-270 | 10402-10416 | 20583-20597 | TMEM11 | 856-870 | 11002-11016 | 21183-21197 |
| PRR7 | 271-285 | 10417-10431 | 20598-20612 | SSTR5 | 871-885 | 11017-11031 | 21198-21212 |
| B3GNT6 | 286-300 | 10432-10446 | 20613-20627 | GRPR | 886-900 | 11032-11046 | 21213-21227 |
| PITPNA | 301-315 | 10447-10461 | 20628-20642 | GSN | 901-915 | 11047-11061 | 21228-21242 |
| JPH2 | 316-330 | 10462-10476 | 20643-20657 | ATXN2L | 916-930 | 11062-11076 | 21243-21257 |
| MAZ | 331-345 | 10477-10491 | 20658-20672 | HDAC4 | 931-945 | 11077-11091 | 21258-21272 |
| SLC4A2 | 346-360 | 10492-10506 | 20673-20687 | ZNF831 | 946-960 | 11092-11106 | 21273-21287 |
| CALHM2 | 361-375 | 10507-10521 | 20688-20702 | PREB | 961-975 | 11107-11121 | 21288-21302 |
| XAGE1A | 376-390 | 10522-10536 | 20703-20717 | OR6C75 | 976-990 | 11122-11134 | 21303-21317 |
| JUP | 391-405 | 10537-10551 | 20718-20732 | ACACA | 991-1005 | 11135-11149 | 21318-21332 |
| PRR5- | 406-420 | 10552-10566 | 20733-20747 | PSME3IP1 | 1006-1020 | 11150-11164 | 21333-21347 |
| ARHGAP8 | | | | ST8SIA5 | 1021-1035 | 11165-11179 | 21348-21362 |
| RTCB | 421-435 | 10567-10581 | 20748-20762 | GPAT4 | 1036-1050 | 11180-11194 | 21363-21377 |
| PHKG2 | 436-450 | 10582-10596 | 20763-20777 | HOXD9 | 1051-1065 | 11195-11209 | 21378-21392 |
| UPK1A | 451-465 | 10597-10611 | 20778-20792 | HNF4A | 1066-1080 | 11210-11224 | 21393-21407 |
| INPP5K | 466-480 | 10612-10626 | 20793-20807 | PCDHGA7 | 1081-1095 | 11225-11239 | 21408-21422 |
| GAMT | 481-495 | 10627-10641 | 20808-20822 | MIR6738 | 1096-1110 | 11240-11254 | 21423-21432 |
| MID1IP1 | 496-510 | 10642-10656 | 20823-20837 | OR2A5 | 1111-1125 | 11255-11269 | 21433-21447 |
| APOA4 | 511-525 | 10657-10671 | 20838-20852 | NPB | 1126-1140 | 11270-11284 | 21448-21462 |
| POU2AF3 | 526-540 | 10672-10686 | 20853-20867 | KRTAP1-5 | 1141-1154 | 11285-11299 | 21463-21477 |
| TMEM134 | 541-555 | 10687-10701 | 20868-20882 | KCNG2 | 1155-1169 | 11300-11314 | 21478-21492 |
| AIFM3 | 556-570 | 10702-10716 | 20883-20897 | ATIC | 1170-1184 | 11315-11329 | 21493-21507 |
| CD24 | 571-585 | 10717-10731 | 20898-20912 | MLLT1 | 1185-1199 | 11330-11344 | 21508-21322 |
| DHH | 586-600 | 10732-10746 | 20913-20927 | PRKAR1B | 1200-1214 | 11345-11359 | 21523-21537 |
| FEM1B | 601-615 | 10747-10761 | 20928-20942 | MIR6765 | 1215-1229 | 11360-11374 | 21538-21552 |
| SETDB1 | 616-630 | 10762-10776 | 20943-20957 | STK11 | 1230-1244 | 11375-11389 | 21553-21567 |
| FCER1G | 631-645 | 10777-10791 | 20958-20972 | JTB | 1245-1259 | 11390-11404 | 21568-21582 |
| KLK4 | 646-660 | 10792-10806 | 20973-20987 | ADCY9 | 1260-1274 | 11405-11419 | 21583-21597 |
| TAF7 | 1305-1319 | 11450-11464 | 21628-21642 | ZNF688 | 1275-1289 | 11420-11434 | 21598-21612 |
| CXXC1 | 1320-1334 | 11465-11479 | 21643-21657 | JAG1 | 1290-1304 | 11435-11449 | 21613-21627 |
| MIR6893 | 1335-1349 | 11480-11494 | 21658-21672 | MYOM2 | 1950-1964 | 12095-12109 | 22269-22283 |
| VEGFD | 1350-1364 | 11495-11509 | 21673-21687 | LRRC71 | 1965-1979 | 12110-12124 | 22284-22298 |
| SETD1A | 1365-1379 | 11510-11524 | 21688-21702 | BMPER | 1980-1994 | 12125-12139 | 22299-22313 |
| PMAIP1 | 1380-1394 | 11525-11539 | 21703-21717 | P4HTM | 1995-2009 | 12140-12154 | 22314-22328 |
| USP46 | 1395-1409 | 11540-11554 | 21718-21732 | TXNL1 | 2010-2024 | 12155-12169 | 22329-22343 |
| MIR1471 | 1410-1424 | 11555-11569 | 21733-21743 | B9D2 | 2025-2039 | 12170-12184 | 22344-22358 |
| FGFBP2 | 1425-1439 | 11570-11584 | 21744-21758 | AHRR | 2040-2054 | 12185-12199 | 22359-22373 |
| CHAD | 1440-1454 | 11585-11599 | 21759-21773 | OR6A2 | 2055-2069 | 12200-12214 | 22374-22388 |
| KCNC3 | 1455-1469 | 11600-11614 | 21774-21788 | HOXA13 | 2070-2084 | 12215-12229 | 22389-22403 |
| SCX | 1470-1484 | 11615-11629 | 21789-21803 | USP39 | 2085-2099 | 12230-12244 | 22404-22418 |
| SOX17 | 1485-1499 | 11630-11644 | 21804-21818 | FKBP1B | 2100-2114 | 12245-12259 | 22419-22433 |
| RALGAPA1 | 1500-1514 | 11645-11659 | 21819-21833 | SBSPON | 2115-2129 | 12260-12274 | 22434-22448 |
| NKX2-3 | 1515-1529 | 11660-11674 | 21834-21848 | RPIA | 2130-2144 | 12275-12289 | 22449-22463 |
| OR2C3 | 1530-1544 | 11675-11689 | 21849-21863 | PRDM13 | 2145-2159 | 12290-12304 | 22464-22478 |
| KMT2D | 1545-1559 | 11690-11704 | 21864-21878 | ENO2 | 2160-2174 | 12305-12319 | 22479-22493 |
| FRMD8 | 1560-1574 | 11705-11719 | 21879-21893 | ANGPT1 | 2175-2189 | 12320-12334 | 22494-22508 |
| IFNA8 | 1575-1589 | 11720-11734 | 21894-21908 | BNIP1 | 2190-2204 | 12335-12349 | 22509-22523 |
| CDYL2 | 1590-1604 | 11735-11749 | 21909-21923 | B3GNT4 | 2205-2219 | 12350-12364 | 22524-22538 |
| COL7A1 | 1605-1619 | 11750-11764 | 21924-21938 | HLA-F | 2220-2234 | 12365-12379 | 22539-22553 |
| CLDN1 | 1620-1634 | 11765-11779 | 21939-21953 | GSE1 | 2235-2249 | 12380-12394 | 22554-22568 |
| SSX2 | 1635-1649 | 11780-11794 | 21954-21968 | RASGEF1B | 2250-2264 | 12395-12409 | 22569-22583 |
| KLHL20 | 1650-1664 | 11795-11809 | 21969-21983 | PCSK1N | 2265-2279 | 12410-12424 | 22584-22598 |
| ATP13A1 | 1665-1679 | 11810-11824 | 21984-21998 | RAB11FIP1 | 2280-2294 | 12425-12439 | 22599-22613 |
| EGLN3 | 1680-1694 | 11825-11839 | 21999-22013 | POLDIP3 | 2295-2309 | 12440-12454 | 22614-22628 |
| CREBZF | 1695-1709 | 11840-11854 | 22014-22028 | MIR190A | 2310-2324 | 12455-12469 | 22629-22362 |
| RBM10 | 1710-1724 | 11855-11869 | 22029-22043 | TPSD1 | 2325-2339 | 12470-12484 | 22633-22647 |
| COMP | 1725-1739 | 11870-11884 | 22044-22058 | RHBDF1 | 2340-2354 | 12485-12499 | 22648-22662 |
| PTCHD4 | 1740-1754 | 11885-11899 | 22059-22073 | CHD7 | 2355-2369 | 12500-12514 | 22663-22677 |
| RIT2 | 1755-1769 | 11900-11915 | 22074-22088 | KLF9 | 2370-2381 | 12515-12529 | 22678-22692 |
| ALX4 | 1770-1784 | 11915-11929 | 22089-22103 | METTL22 | 2382-2396 | 12530-12544 | 22693-22707 |
| IL17D | 1785-1799 | 11930-11944 | 22104-22118 | AURKB | 2397-2411 | 12545-12559 | 22708-22722 |
| AMN1 | 1800-1814 | 11945-11959 | 22119-22133 | TSHZ1 | 2412-2426 | 12560-12574 | 22723-22737 |
| MIR378J | 1815-1829 | 11960-11974 | 22134-22148 | FLT3 | 2427-2441 | 12575-12589 | 22738-22752 |
| NF2 | 1830-1844 | 11975-11989 | 22149-22163 | HNF1A | 2442-2456 | 12590-12604 | 22753-22767 |
| INF2 | 1845-1859 | 11990-12004 | 22164-22178 | DISP2 | 2457-2471 | 12605-12619 | 22768-22782 |
| SLC26A10P | 1860-1874 | 12005-12019 | 22179-22193 | OTUD7B | 2472-2486 | 12620-12634 | 22783-22797 |
| FBXO5 | 1875-1889 | 12020-12034 | 22194-22208 | SLC7A4 | 2487-2501 | 12635-12649 | 22798-22812 |
| FBXO11 | 1890-1904 | 12035-12049 | 22209-22223 | POLR2F | 2502-2516 | 12650-12664 | 22813-22827 |
| ZNF395 | 1905-1919 | 12050-12064 | 22224-22238 | USF1 | 2517-2531 | 12665-12679 | 22828-22842 |
| EEF2K | 1920-1934 | 12065-12079 | 22239-22253 | LRP10 | 2532-2546 | 12680-12694 | 22843-22857 |
| NMRK2 | 1935-1949 | 12080-12094 | 22254-22268 | KLF1 | 2547-2561 | 12695-12709 | 22858-22872 |
| HAPSTR1 | 2592-2606 | 12740-12754 | 22903-22917 | REPIN1 | 2562-2576 | 12710-12724 | 22873-22887 |
| MIR6803 | 2607-2621 | 12755-12769 | 22918-22932 | VSTM2A | 2577-2591 | 12725-12739 | 22888-22902 |
| ELFN2 | 2622-2636 | 12770-12784 | 22933-22947 | FAM25C | 3236-3250 | 13385-13399 | 23548-23562 |
| MBTPS1 | 2637-2651 | 12785-12799 | 22948-22962 | COX6A2 | 3251-3265 | 13400-13414 | 23563-23577 |
| ALPK1 | 2652-2666 | 12800-12814 | 22963-22977 | HUWE1 | 3266-3280 | 13415-13429 | 23578-23592 |
| RBP5 | 2667-2681 | 12815-12829 | 22978-22992 | MIR6857 | 3281-3295 | 13430-13444 | 23593-23607 |
| CARD6 | 2682-2696 | 12830-12844 | 22993-23007 | CRHR2 | 3296-3310 | 13445-13459 | 23608-23622 |
| BRAT1 | 2697-2711 | 12845-12859 | 23008-23022 | UHRF1 | 3311-3325 | 13460-13474 | 23623-23637 |
| TRIM10 | 2712-2726 | 12860-12874 | 23023-23037 | SPSB4 | 3326-3340 | 13475-13489 | 23638-26352 |
| SH3BP5L | 2727-2741 | 12875-12889 | 23038-23052 | NOTCH1 | 3341-3355 | 13490-13504 | 23653-23667 |
| SUDS3 | 2742-2756 | 12890-12904 | 23053-23067 | NRL | 3356-3370 | 13505-13519 | 23668-23682 |
| THOC6 | 2757-2771 | 12905-12919 | 23068-20382 | SSTR1 | 3371-3385 | 13520-13534 | 23683-23697 |
| PCDHA12 | 2772-2785 | 12920-12934 | 23083-23097 | GTF3C1 | 3386-3400 | 13535-13549 | 23698-23712 |
| AREG | 2786-2800 | 12935-12949 | 23098-23112 | ITLN1 | 3401-3415 | 13550-13564 | 23713-23727 |
| GSC | 2801-2815 | 12950-12964 | 23113-23127 | KCNIP3 | 3416-3430 | 13565-13579 | 23728-23742 |
| TEX264 | 2816-2830 | 12965-12979 | 23128-23142 | ZSWIM8 | 3431-3445 | 13580-13594 | 23743-23757 |
| KDM4D | 2831-2845 | 12980-12994 | 23143-23157 | CPEB1 | 3446-3460 | 13595-13609 | 23758-23772 |
| OTUD7A | 2846-2860 | 12995-13009 | 23158-23172 | OR52B4 | 3461-3473 | 13610-13624 | 23773-23787 |
| ENTPD1 | 2861-2875 | 13010-13024 | 23173-23187 | KCNV1 | 3474-3488 | 13625-13639 | 23788-23802 |
| ARMC5 | 2876-2890 | 13025-13039 | 23188-23202 | SLC35C2 | 3489-3503 | 13640-13654 | 23803-23817 |
| IL27 | 2891-2905 | 13040-13054 | 23203-23217 | KRTAP19-7 | 3504-3516 | 13655-13669 | 23818-23832 |
| SLC16A9 | 2906-2920 | 13055-10369 | 23218-23232 | SERPINC1 | 3517-3531 | 13670-13684 | 23833-23847 |
| CYP7A1 | 2921-2935 | 13070-13084 | 23233-23247 | SLC4A8 | 3532-3546 | 13685-13699 | 23848-23862 |
| TBC1D10B | 2936-2950 | 13085-13099 | 23248-23262 | FMNL1 | 3547-3561 | 13700-13714 | 23863-23877 |
| TUBA3C | 2951-2965 | 13100-13114 | 23263-23277 | ZMYND19 | 3562-3576 | 13715-13729 | 23878-23892 |
| MED30 | 2966-2980 | 13115-13129 | 23278-23292 | PCNX3 | 3577-3591 | 13730-13744 | 23893-23907 |
| ALDH2 | 2981-2995 | 13130-13144 | 23293-23307 | RBM47 | 3592-3606 | 13745-13759 | 23908-23922 |
| CCR9 | 2996-3010 | 13145-13159 | 23308-23322 | AKR1C3 | 3607-3621 | 13760-13774 | 23923-23937 |
| MTDH | 3011-3025 | 13160-13174 | 23323-23337 | CD22 | 3622-3636 | 13775-13789 | 23938-23952 |
| CNN2 | 3026-3040 | 13175-13189 | 23338-23352 | ADRA2C | 3637-3651 | 13790-13804 | 23953-23967 |
| CEACAM4 | 3041-3055 | 13190-13204 | 23353-23367 | SERPINE1 | 3652-3666 | 13805-13819 | 23968-23982 |
| CLEC19A | 3056-3070 | 13205-13219 | 23368-23382 | POU3F2 | 3667-3681 | 13820-13834 | 23983-23997 |
| TRPS1 | 3071-3085 | 13220-13234 | 23383-23397 | CEACAM1 | 3682-3696 | 13835-13849 | 23998-24012 |
| ZNF784 | 3086-3100 | 13235-13249 | 23398-23412 | TCEA1 | 3697-3711 | 13850-13864 | 24013-24027 |
| NMUR1 | 3101-3115 | 13250-13264 | 23413-23427 | SPPL3 | 3712-3726 | 13865-13879 | 24028-24042 |
| MTFR1 | 3116-3130 | 13265-13279 | 23428-23442 | RAI14 | 3727-3741 | 13880-13894 | 24043-24057 |
| DOCK10 | 3131-3145 | 13280-13294 | 23443-23457 | NR2E1 | 3742-3756 | 13895-13909 | 24058-24072 |
| GPR135 | 3146-3160 | 13295-13309 | 23458-23472 | GLYR1 | 3757-3771 | 13910-13924 | 24073-24087 |
| MROH8 | 3161-3175 | 13310-13324 | 23473-23487 | B3GNTL1 | 3772-3786 | 13925-13939 | 24088-24102 |
| PLPPR3 | 3176-3190 | 13325-13339 | 23488-23502 | ZBTB20 | 3787-3801 | 13940-13954 | 24103-24117 |
| NRM | 3191-3205 | 13340-13354 | 23503-23517 | BICDL2 | 3802-3816 | 13955-13969 | 24118-24132 |
| TNIP2 | 3206-3220 | 13355-13369 | 23518-23532 | ITGB1 | 3817-3831 | 13970-13984 | 24133-24147 |
| WFDC10A | 3221-3235 | 13370-13384 | 23533-23547 | LTBP1 | 3832-3846 | 13985-13999 | 24148-24162 |
| HEATR9 | 3877-3891 | 14030-14044 | 24193-24207 | THBS4 | 3847-3861 | 14000-14014 | 24163-24177 |
| ZNE511 | 3892-3906 | 14045-14059 | 24208-24222 | TBC1D25 | 3862-3876 | 14015-14029 | 24178-24192 |
| MED16 | 3907-3921 | 14060-14074 | 24223-24237 | G6PC3 | 4520-4534 | 14675-14689 | 24838-24852 |
| PCDHGA9 | 3922-3935 | 14075-14089 | 24238-24252 | RBBP8NL | 4535-4549 | 14690-14704 | 24853-24867 |
| PRR15 | 3936-3950 | 14090-14104 | 24253-24267 | DTYMK | 4550-4564 | 14705-14719 | 24868-24882 |
| MIR6752 | 3951-3965 | 14105-14119 | 24268-24282 | HCLS1 | 4565-4579 | 14720-14734 | 24883-24897 |
| ZNF837 | 3966-3980 | 14120-14134 | 24283-24297 | MRPS26 | 4580-4594 | 14735-14749 | 24898-24912 |
| PARP4 | 3981-3995 | 14135-14149 | 24298-24312 | CYCS | 4595-4609 | 14750-14764 | 24913-24927 |
| HSPBP1 | 3996-4010 | 14150-14164 | 24313-24327 | BLCAP | 4610-4624 | 14765-14779 | 24928-24942 |
| TRIM56 | 4011-4025 | 14165-14179 | 24328-24342 | BRDT | 4625-4639 | 14780-14794 | 24943-24957 |
| LYZL1 | 4026-4040 | 14180-14194 | 24343-24357 | DDX60 | 4640-4654 | 14795-14809 | 24958-24972 |
| CREB3L2 | 4041-4055 | 14195-14209 | 24358-24372 | CNN1 | 4655-4669 | 14810-14824 | 24973-24987 |
| GJB6 | 4056-4070 | 14210-14224 | 24373-24387 | TNNC1 | 4670-4684 | 14825-14839 | 24988-25002 |
| FSCN2 | 4071-4085 | 14225-14239 | 24388-24402 | EQTN | 4685-4699 | 14840-14854 | 25003-25017 |
| PDIK1L | 4086-4100 | 14240-14254 | 24403-24417 | HPS6 | 4700-4714 | 14855-14869 | 25018-25032 |
| MIR7109 | 4101-4115 | 14255-14269 | 24418-24432 | RNASEH2A | 4715-4729 | 14870-14884 | 25033-25047 |
| ACKR2 | 4116-4129 | 14270-14284 | 24433-24447 | NRDC | 4730-4744 | 14885-14899 | 25048-25062 |
| TMIE | 4130-4144 | 14285-14299 | 24448-24462 | SSH1 | 4745-4759 | 14900-14914 | 25063-20577 |
| KIF1A | 4145-4159 | 14300-14314 | 24463-24477 | ADGRG4 | 4760 | — | 25078-25092 |
| IRF8 | 4160-4174 | 14315-14329 | 24478-24492 | CSMD2 | 4761-4775 | 14915-14928 | 25093-25107 |
| NLRP11 | 4175-4189 | 14330-14344 | 24493-24507 | ABHD5 | 4776-4790 | 14930-14944 | 25108-25122 |
| ATP8A1 | 4190-4204 | 14345-14359 | 24508-24522 | DNASE1L3 | 4791-4805 | 14945-14959 | 25123-25137 |
| DDT | 4205-4219 | 14360-14374 | 24523-24537 | PUM1 | 4806-4820 | 14960-14974 | 25138-25152 |
| CKMT2 | 4220-4234 | 14375-14389 | 24538-24552 | PPP2R2C | 4821-4835 | 14975-14989 | 25153-25167 |
| ACSM3 | 4235-4249 | 14390-14404 | 24553-24567 | VPS72 | 4836-4850 | 14990-15004 | 25168-25182 |
| STRAP | 4250-4264 | 14405-14419 | 24568-24582 | CGNL1 | 4851-4865 | 15005-15019 | 25183-25197 |
| MIR6850 | 4265-4279 | 14420-14434 | 24583-24597 | ACAD9 | 4866-4880 | 15020-15034 | 25198-25212 |
| CEBPE | 4280-4294 | 14435-14449 | 24598-24612 | ASNS | 4881-4895 | 15035-15049 | 25213-25227 |
| PRPF4B | 4295-4309 | 14450-14464 | 24613-24627 | NAT14 | 4896-4910 | 15050-15064 | 25228-25242 |
| GSDME | 4310-4324 | 14465-14479 | 24628-24642 | MRGBP | 4911-4925 | 15065-15079 | 25243-25257 |
| UBQLN3 | 4325-4339 | 14480-14494 | 24643-24657 | MRPS18A | 4926-4940 | 15080-15094 | 25258-25272 |
| IQCF2 | 4340-4354 | 14495-14509 | 24658-24672 | PRR20A | 4941-4955 | 15095-15109 | 25273-24287 |
| UBE2J2 | 4355-4369 | 14510-14524 | 24673-24687 | MYCBPAP | 4956-4970 | 15110-15124 | 25288-25302 |
| INSL3 | 4370-4384 | 14525-14539 | 24688-24702 | SAC3D1 | 4971-4985 | 15125-15139 | 25303-25317 |
| RILPL2 | 4385-4399 | 14540-14554 | 24703-24717 | SRSF10 | 4986-5000 | 15140-15154 | 25318-25332 |
| HDAC3 | 4400-4414 | 14555-14569 | 24718-24732 | MIR6878 | 5001-5013 | 15155-15169 | 25333-25339 |
| PMPCA | 4415-4429 | 14570-14584 | 24733-24747 | FLCN | 5014-5028 | 15170-15184 | 25340-25354 |
| RFC2 | 4430-4444 | 14585-14599 | 24748-24762 | MYBPHL | 5029-5043 | 15185-15199 | 25355-25369 |
| HID1 | 4445-4459 | 14600-14614 | 24763-24777 | ZNG1A | 5044-5058 | 15200-15214 | 25370-25384 |
| RETREG3 | 4460-4474 | 14615-14629 | 24778-24792 | OR5AR1 | 5059-5072 | 15215-15229 | 25385-25399 |
| GRSF1 | 4475-4489 | 14630-14644 | 24793-24807 | HUS1 | 5073-5087 | 15230-15244 | 25400-25414 |
| HADHB | 4490-4504 | 14645-14659 | 24808-24822 | COL6A1 | 5088-5102 | 15245-15259 | 25415-25429 |
| NDUFA6 | 4505-4519 | 14660-14674 | 24823-24837 | SASS6 | 5103-5117 | 15260-15274 | 25430-25444 |
| ELSPBP1 | 5148-5162 | 15305-15319 | 25474-25488 | MIR6129 | 5118-5132 | 15275-15289 | 25445-25458 |
| GCGR | 5163-5177 | 15320-15334 | 25489-25503 | PELO | 5133-5147 | 15290-15304 | 25459-25473 |
| RAB4B | 5178-5192 | 15335-15349 | 25504-25518 | ZZZ3 | 5808-5822 | 15965-15979 | 26132-26146 |
| SLC13A2 | 5193-5207 | 15350-15364 | 25519-25533 | SUMO4 | 5823-5837 | 15980-15994 | 26147-26161 |
| MIR6825 | 5208-5222 | 15365-15379 | 25534-25548 | HSF1 | 5838-5852 | 15995-16009 | 26162-26176 |
| NEK9 | 5223-5237 | 15380-15394 | 25549-25563 | SHOX2 | 5853-5867 | 16010-16024 | 26177-26191 |
| CYB5D1 | 5238-5252 | 15395-15409 | 25564-25578 | PSME3 | 5868-5882 | 16025-16039 | 26192-26206 |
| MAP1LC3B | 5253-5267 | 15410-15424 | 25579-25593 | TOR1A | 5883-5897 | 16040-16054 | 26207-26221 |
| ZNF829 | 5268-5282 | 15425-15439 | 25594-25608 | MKLN1 | 5898-5912 | 16055-16069 | 26222-26236 |
| INSIG1 | 5283-5297 | 15440-15454 | 25609-25623 | MROH2B | 5913-5927 | 16070-16084 | 26237-26251 |
| BLOC1S6 | 5298-5312 | 15455-15469 | 25624-25638 | MRPL18 | 5928-5942 | 16085-16099 | 26252-26266 |
| NAA38 | 5313-5327 | 15470-15484 | 25639-25653 | SP6 | 5943-5957 | 16100-16114 | 26267-26281 |
| TMX1 | 5328-5342 | 15485-15499 | 25654-25668 | FUCA1 | 5958-5972 | 16115-16129 | 26282-26296 |
| GIMAP8 | 5343-5257 | 15500-15514 | 25669-25683 | DNAAF10 | 5973-5987 | 16130-16144 | 26297-26311 |
| TARS2 | 5358-5372 | 15515-15529 | 25684-25698 | WDR44 | 5988-6002 | 16145-16159 | 26312-26326 |
| PTPRR | 5373-5287 | 15530-15544 | 25699-25713 | TBCD | 6003-6017 | 16160-16174 | 26327-26341 |
| ZNF654 | 5388-5402 | 15545-15559 | 25714-25728 | SAYSD1 | 6018-6032 | 16175-16189 | 26342-26356 |
| DNAH11 | 5403-5417 | 15560-15574 | 25729-25743 | ATG3 | 6033-6047 | 16190-16204 | 26357-26371 |
| CFAP36 | 5418-5432 | 15575-15589 | 25744-25758 | CC2D1B | 6048-6062 | 16205-16219 | 26372-26386 |
| EIF4B | 5433-5447 | 15590-15604 | 25759-25773 | ZMPSTE24 | 6063-6077 | 16220-16234 | 26387-26401 |
| EMC9 | 5448-5462 | 15605-15619 | 25774-25788 | KLK9 | 6078-6092 | 16235-16249 | 26402-26416 |
| HIGD1A | 5463-5477 | 15620-15634 | 25789-25803 | NBPF4 | 6093-6107 | 16250-16264 | 26417-26431 |
| KMT2B | 5478-5492 | 15635-15649 | 25804-25818 | CCZ1B | 6108-6122 | 16265-16279 | 26432-26446 |
| SPTBN5 | 5493-5507 | 15650-15664 | 25819-25833 | ODAD4 | 6123-6137 | 16280-16294 | 26447-26461 |
| SCYL1 | 5508-5522 | 15665-15679 | 25834-25848 | SYT13 | 6138-6152 | 16295-16309 | 26462-26476 |
| TMEM199 | 5523-5537 | 15680-15694 | 25849-25863 | ZFR | 6153-6167 | 16310-16324 | 26477-26491 |
| PNPT1 | 5538-5552 | 15695-15709 | 25864-25878 | STK40 | 6168-6182 | 16325-16339 | 26492-26506 |
| RBBP4 | 5553-5567 | 15710-15724 | 25879-25893 | RASGEF1C | 6183-6197 | 16340-16354 | 26507-26521 |
| TBX21 | 5568-5582 | 15725-15739 | 25894-25908 | NPRL2 | 6198-6212 | 16355-16369 | 26522-26536 |
| ZRSR2 | 5583-5597 | 15740-15754 | 25909-25923 | CTAGE4 | 6213-6227 | 16370-16384 | 26537-26551 |
| LHX9 | 5598-5612 | 15755-15769 | 25924-25938 | NAA10 | 6228-6242 | 16385-16399 | 26552-26566 |
| HPCA | 5613-5642 | 15770-15799 | 25939-25968 | CSTF2 | 6243-6257 | 16400-16414 | 26567-26581 |
| ORC5 | 5643-5657 | 15800-15814 | 25969-25983 | NDUFAF3 | 6258-6272 | 16415-16429 | 26582-26596 |
| CCDC172 | 5658-5672 | 15815-15829 | 25984-25998 | RASL10B | 6273-6287 | 16430-16444 | 26597-26611 |
| CDC14A | 5673-5687 | 15830-15844 | 25999-26013 | UNC13C | 6288-6302 | 16445-16459 | 26612-26626 |
| ANGPTL6 | 5688-5702 | 15845-15859 | 26014-26028 | WASHC1 | 6303-6317 | 16460-16474 | 26627-26641 |
| RFC5 | 5703-5717 | 15860-15874 | 26029-26043 | C16orf87 | 6318-6332 | 16475-16489 | 26642-26656 |
| NSUN2 | 5718-5732 | 15875-15889 | 26044-26058 | TVP23B | 6333-6347 | 16490-16504 | 26657-26671 |
| SLC25A12 | 5733-5747 | 15890-15904 | 26059-26073 | TM4SF5 | 6348-6362 | 16505-16519 | 26672-26686 |
| MIR6760 | 5748-5762 | 15905-15919 | 26074-26086 | LSM11 | 6363-6377 | 16520-16534 | 26687-26701 |
| RPS28 | 5763-5777 | 15920-15934 | 26087-26101 | ATP11A | 6378-6392 | 16535-16549 | 26702-26716 |
| TMEM9B | 5778-5792 | 15935-15949 | 26102-26116 | CIDEB | 6393-6407 | 16550-16564 | 26717-26731 |
| NAA25 | 5793-5807 | 15950-15964 | 26117-26131 | VPS18 | 6408-6422 | 16565-16579 | 26732-26746 |
| H2AC16 | 6453-6467 | 16610-16624 | 26777-26791 | FAM120A | 6423-6437 | 16580-16594 | 26747-26761 |
| NEDD8 | 6468-6482 | 16625-16639 | 26792-26806 | PIGN | 6438-6452 | 16595-16609 | 26762-26776 |
| CFLAR | 6483-6492 | 16640-16654 | 26807-26821 | SYDE2 | 7090-7104 | 17254-17268 | 27422-27436 |
| LRRC2 | 6493-6507 | 16655-16669 | 26822-26836 | ASCL3 | 7105-7119 | 17269-17283 | 27437-27451 |
| CCND1 | 6508-6522 | 16670-16684 | 26837-26851 | SPATA21 | 7120-7134 | 17284-17298 | 27452-27466 |
| MTMR2 | 6523-6537 | 16685-16699 | 26852-26866 | PNPLA2 | 7135-7149 | 17299-17313 | 27467-27481 |
| CTPS1 | 6538-6552 | 16700-16714 | 26867-26881 | SULT1A4 | 7150-7164 | 17314-17328 | 27482-27496 |
| RPLPO | 6553-6567 | 16715-16729 | 26882-26896 | FOXF1 | 7165-7179 | 17329-17343 | 27497-27511 |
| NKAIN4 | 6568-6582 | 16730-16744 | 26897-26911 | ADSS2 | 7180-7194 | 17344-17358 | 27512-27526 |
| NOL10 | 6583-6597 | 16745-16759 | 26912-26926 | ALYREF | 7195-7209 | 17359-17373 | 27527-27541 |
| MT1G | 6598-6612 | 16760-16774 | 26927-26941 | FDFT1 | 7210-7224 | 17374-17388 | 27542-27556 |
| DUSP7 | 6613-6627 | 16775-16789 | 26942-26956 | GABRB3 | 7225-7239 | 17389-17403 | 27557-27571 |
| TRIR | 6628-6642 | 16790-16804 | 26957-26971 | MRGPRX3 | 7240-7254 | 17404-17418 | 27572-27586 |
| HINT1 | 6643-6657 | 16805-16819 | 26972-26986 | UNC45A | 7255-7269 | 17419-17433 | 27587-27601 |
| AGMO | 6658-6672 | 16820-16834 | 26987-27001 | HABP4 | 7270-7284 | 17434-17448 | 27602-27616 |
| DAGLA | 6673-6687 | 16835-16849 | 27002-27016 | IRAG1 | 7285-7299 | 17449-17463 | 27617-27631 |
| LRRC39 | 6688-6699 | 16850-16864 | 27017-27031 | USP10 | 7300-7314 | 17464-17478 | 27632-27646 |
| TRIM47 | 6700-6914 | 16865-16879 | 27032-27046 | SPACA9 | 7315-7329 | 17479-17493 | 27647-27662 |
| CATSPER3 | 6715-6729 | 16880-16894 | 27047-27061 | VCAM1 | 7330-7344 | 17494-17508 | 27662-27676 |
| CD151 | 6730-6744 | 16895-16909 | 27062-27076 | ECM2 | 7345-7359 | 17509-17519 | 27677-27691 |
| PSD4 | 6745-6759 | 16910-16924 | 27077-27091 | GINS3 | 7360-7374 | 17520-17534 | 27692-27706 |
| RNF17 | 6760-6774 | 16925-16939 | 27092-27106 | ILK | 7375-7389 | 17535-17549 | 27707-27721 |
| IST1 | 6775-6789 | 16940-16954 | 27107-27121 | COG4 | 7390-7404 | 17550-17564 | 27722-27736 |
| TMPPE | 6790-6804 | 16955-16969 | 27122-27136 | KLHL1 | 7405-7419 | 17565-17579 | 27737-27751 |
| FBXL3 | 6805-6819 | 16970-16984 | 27137-27151 | HECW1 | 7420-7434 | 17580-17594 | 27752-27766 |
| CD3G | 6820-6834 | 16985-16999 | 27152-27166 | GPR171 | 7435-7443 | 17595-17609 | 27767-27781 |
| ZNF420 | 6835-6849 | 17000-17014 | 27167-27181 | MTRNR2L1 | 7444-7458 | 17610-17624 | 30530-30531 |
| LHFPL1 | 6850-6864 | 17015-17029 | 27182-27196 | IFNW1 | 7459-7473 | 17625-17639 | 27782-27796 |
| SOX9 | 6865-6879 | 17030-17044 | 27197-27211 | MIR590 | 7474-7488 | 17640-17654 | 27797-27799 |
| RSRC2 | 6880-6894 | 17045-17059 | 27212-27226 | SSU72 | 7489-7503 | 17655-17669 | 27800-27814 |
| CAMK1 | 6895-6909 | 17060-17074 | 27227-27241 | MST1L | 7504-7518 | 17670-17684 | 27815-27829 |
| C2CD2L | 6910-6924 | 17075-17089 | 27242-27256 | TNFRSF13C | 7519-7533 | 17685-17699 | 27830-27844 |
| PHF2 | 6925-6939 | 17090-17104 | 27257-27271 | MIR1243 | 7534-7546 | 17700-17714 | 27845-27851 |
| CPSF3 | 6940-6954 | 17105-17119 | 27272-27286 | SYNCRIP | 7547-7561 | 17715-17729 | 27852-27866 |
| MYH4 | 6955-6969 | 17120-17133 | 27287-27301 | OR4C46 | 7562-7573 | 17730-17744 | 27867-27881 |
| KLHDC4 | 6970-6984 | 17134-17148 | 27302-27316 | NLRP13 | 7574-7583 | 17745-17759 | 27882-27896 |
| DXO | 6985-6999 | 17149-17163 | 27317-27331 | SEC62 | 7584-7598 | 17760-17774 | 27897-27911 |
| FCHO2 | 7000-7014 | 17164-17178 | 27332-27346 | H4C11 | 7599-7613 | 17775-17789 | 27912-27926 |
| RHOA | 7015-7029 | 17179-17193 | 27347-27361 | HTR3A | 7614-7628 | 17790-17804 | 27927-27941 |
| MIR1199 | 7030-7044 | 17194-17208 | 27362-27376 | PAFAH1B2 | 7629-7643 | 17805-17819 | 27942-27956 |
| FBXO10 | 7045-7059 | 17209-17223 | 27377-27391 | DTNA | 7644-7658 | 17820-17834 | 27957-27971 |
| PROCA1 | 7060-7074 | 17224-17238 | 27392-27406 | CTNNBL1 | 7659-7673 | 17835-17849 | 27972-27986 |
| IGSF5 | 7075-7089 | 17239-17253 | 27407-27421 | TGIF1 | 7674-7688 | 17850-17864 | 27987-28001 |
| ZMYND8 | 7719-7733 | 17895-17909 | 28032-28046 | RPN1 | 7689-7703 | 17865-17879 | 28002-28016 |
| MEF2B | 7734-7748 | 17910-17924 | 28047-28061 | RBP2 | 7704-7718 | 17880-17894 | 28017-28031 |
| CYBSD2 | 7749-7763 | 17925-17939 | 28062-28076 | NAALADL1 | 8337-8351 | 18531-18545 | 28669-28683 |
| GPR141 | 7764-7778 | 17940-17954 | 28077-28091 | IFT43 | 8352-8366 | 18546-18560 | 28684-28698 |
| RCN3 | 7779-7793 | 17955-17969 | 28092-28106 | EMC6 | 8367-8381 | 18561-18575 | 28699-28713 |
| TCF19 | 7794-7808 | 17970-17984 | 28107-28121 | ZACN | 8382-8396 | 18576-18590 | 28714-28728 |
| TMEM217 | 7809-7823 | 17985-17999 | 28122-28136 | DHX34 | 8397-8411 | 18591-18605 | 28729-28743 |
| RAD9A | 7824-7838 | 18000-18014 | 28137-28151 | TARP | 8412-8426 | 18606-18620 | 28744-28758 |
| KANSL1 | 7839-7853 | 18015-18029 | 28152-28166 | FRAT2 | 8427-8441 | 18621-18635 | 28759-28773 |
| OR4F16 | 7854-7868 | 18030-18044 | 28167-28181 | FIBIN | 8442-8456 | 18636-18650 | 28774-28788 |
| DHFR | 7869-7883 | 18045-18059 | 28182-28196 | DLX5 | 8457-8471 | 18651-18665 | 28789-28803 |
| ZNF510 | 7884-7898 | 18060-18074 | 28197-28211 | TRMT112 | 8472-8486 | 18666-18680 | 28804-28818 |
| TMEM14EP | 7899-7901 | 18075-18089 | 28212-28226 | MRPS6 | 8487-8501 | 18681-18695 | 28819-28833 |
| TICAM1 | 7902-7916 | 18090-18104 | 28227-28241 | GPR85 | 8502-8516 | 18696-18710 | 28834-28848 |
| CACNB2 | 7917-7931 | 18105-18119 | 28242-28256 | GRAMD4 | 8517-8531 | 18711-18725 | 28849-28863 |
| TMEM233 | 7932-7946 | 18120-18134 | 28257-28271 | PSMD9 | 8532-8546 | 18726-18740 | 28864-28878 |
| PRELID3B | 7947-7961 | 18135-18149 | 28272-28286 | NUDT8 | 8547-8561 | 18741-18755 | 28879-28893 |
| DIDO1 | 7962-7976 | 18150-18164 | 28287-28301 | POTEJ | 8562-8576 | 18756-18770 | 28894-28908 |
| SPG21 | 7977-7991 | 18165-18179 | 28302-28316 | ADAM19 | 8577-8591 | 18771-18785 | 28909-28923 |
| MIR6721 | 7992-8006 | 18180-18194 | 28317-28331 | SLC9A8 | 8592-8606 | 18786-18800 | 28924-28938 |
| MAJIN | 8007-8021 | 18195-18209 | 28332-28346 | RPL9 | 8607-8621 | 18801-18815 | 28939-28953 |
| GRM5 | 8022-8036 | 18210-18224 | 28347-28361 | GUCA2B | 8622-8636 | 18816-18830 | 28954-28968 |
| OR5A2 | 8037-8051 | 18225-18239 | 28362-28376 | PDE4B | 8637-8651 | 18831-18845 | 28969-28983 |
| SEMA6B | 8052-8066 | 18240-18254 | 28377-28391 | LINC01397 | 8652-8666 | 18846-18860 | 28984-28998 |
| FHDC1 | 8067-8081 | 18255-18269 | 28392-28406 | LINC00626 | 8667-8681 | 18861-18875 | 28999-29013 |
| SLC6A20 | 8082-8096 | 18270-18284 | 28407-28421 | DNM3 | 8682-8697 | 18876-18890 | 29014-29028 |
| FAM169A | 8097-8111 | 18285-18299 | 28422-28436 | ZBTB41 | 8697-8712 | 18891-18905 | 29029-29043 |
| CFAP77 | 8112-8126 | 18300-18314 | 28437-28451 | MTARC1 | 8712-8726 | 18906-18920 | 29044-20958 |
| ARF1 | 8127-8141 | 18315-18329 | 28452-28466 | ARID4B | 8727-8741 | 18921-18935 | 29059-20973 |
| HTN1 | 8142-8156 | 18330-18335 | 28467-28473 | TDRD15 | 8742-8756 | 18936-18950 | 29074-29088 |
| MIR6785 | 8157-8171 | 18336-18350 | 28474-28488 | DTNB | 8757-8771 | 18951-18965 | 29089-29103 |
| TESMIN | 8172-8186 | 18351-18365 | 28489-28503 | DPYSL5 | 8772-8786 | 18966-18980 | 29104-29118 |
| SCNN1D | — | 18366-18380 | 28504-28518 | GCKR | 8787-8801 | 18981-18995 | 29119-29133 |
| C11orf86 | 8187-8201 | 18381-18395 | 28519-28533 | MRPL30 | 8802-8816 | 18996-19010 | 29134-29148 |
| DDI2 | 8202-8216 | 18396-18410 | 28534-28548 | THSD7B | 8817-8831 | 19011-19025 | 29149-29163 |
| ZNF568 | 8217-8231 | 18411-18425 | 28549-28563 | COBLL1 | 8832-8846 | 19026-19040 | 29164-29178 |
| ADGRE3 | 8232-8246 | 18426-18440 | 28564-28578 | MIR4790 | 8847-8861 | 19041-19047 | 29179-29180 |
| PRPF38B | 8247-8261 | 18441-18455 | 28579-28593 | SEMA3F | 8862-8876 | 19048-19062 | 29181-29195 |
| SFMBT1 | 8262-8276 | 18456-18470 | 28594-28608 | CPZ | 8877-8891 | 19063-19077 | 29196-29210 |
| CAPZB | 8277-8291 | 18471-18485 | 28609-28623 | LINC02494 | 8892-8901 | 19078-19092 | 29211-29225 |
| LIN28B | 8292-8306 | 18486-18500 | 28624-28638 | LNCPRESS2 | 8902-8916 | 19093-19107 | 29226-29240 |
| CNEP1R1 | 8307-8321 | 18501-18515 | 28639-28653 | UNC5C | 8917-8931 | 19108-19122 | 29241-29255 |
| LDAH | 8322-8336 | 18516-18530 | 28654-28668 | ADH1B | 8932-8946 | 19123-19133 | 29256-29270 |
| CDH12 | 8977-8991 | 19164-19178 | 29301-29315 | MTTP | 8947-8961 | 19134-19148 | 29271-29285 |
| SH3TC2 | 8992-9006 | 19179-19193 | 29316-29330 | TRIM2 | 8962-8976 | 19149-19163 | 29286-29300 |
| SLC17A1 | 9007-9021 | 19194-19208 | 29331-29345 | C17orf113 | 9607-9621 | 19788-19802 | 29922-29936 |
| HCG15 | 9022-9036 | 19209-19223 | 29346-29360 | APOH | 9622-9636 | 19803-19817 | 29937-29951 |
| TRIM26 | 9037-9051 | 19224-19238 | 29361-29375 | INSR | 9637-9651 | 19818-19832 | 29952-29966 |
| PRRC2A | 9052-9066 | 19239-19253 | 29376-29390 | JUND | 9652-9666 | 19833-19847 | 29967-29981 |
| HLA-DOA | 9067-9081 | 19254-19268 | 29391-29405 | TM6SF2 | 9667-9681 | 19848-19862 | 29982-29996 |
| MAN1A1 | 9082-9096 | 19269-19283 | 29406-29420 | APOE | 9682-9696 | 19863-19877 | 29997-30011 |
| RSPO3 | 9097-9111 | 19284-19298 | 29421-29435 | TMC4 | 9697-9711 | 19878-19892 | 30012-30026 |
| MGC4859 | 9112-9126 | 19299-19313 | 29436-29450 | PYGB | 9712-9726 | 19893-19907 | 30027-30041 |
| AUTS2 | 9127-9141 | 19314-19328 | 29451-29465 | CDH4 | 9727-9741 | 19908-19922 | 30042-30056 |
| SEMA3D | 9142-9156 | 19329-19343 | 29466-29480 | ARFRP1 | 9742-9756 | 19923-19937 | 30057-30071 |
| ARPC1B | 9157-9171 | 19344-19358 | 29481-29495 | MAP3K7CL | 9757-9771 | 19938-19952 | 30072-30086 |
| LINC02237 | 9172-9186 | 19359-19374 | 29496-29510 | PNPLA3 | 9772-9786 | 19953-19967 | 30087-30101 |
| TRIBI | 9187-9201 | 19374-19388 | 29511-29525 | ADIPOQ | 9787-9801 | 19968-19982 | 30102-30116 |
| PTPRD | 9202-9216 | 19389-19403 | 29526-29540 | LIPE | 9802-9816 | 19983-19997 | 30117-30131 |
| TTC39B | 9217-9231 | 19404-19418 | 29541-29555 | UCP1 | 9817-9831 | 19998-20012 | 30132-30146 |
| BNC2 | 9232-9246 | 19419-91433 | 29556-29570 | HSD17B13 | 9832-9846 | 20013-20027 | 30147-30161 |
| MIR12117 | 9247-9261 | 19434-19448 | 29571-29576 | MTARC2 | 9847-9861 | 20028-20042 | 30162-30176 |
| GABBR2 | 9262-9276 | 19449-19463 | 29577-29591 | MLXIP | 9862-9876 | 20043-20057 | 30177-30191 |
| TOR1B | 9277-9291 | 19464-19478 | 29592-29606 | LYPLAL1 | 9877-9891 | 20058-20072 | 30192-30206 |
| ABO | 9292-9306 | 19479-19493 | 29607-29621 | TOR1AIP1 | 9892-9906 | 20073-20087 | 30207-30221 |
| PCAT5 | 9307-9321 | 19494-19508 | 29622-29636 | MLXIPL | 9907-9921 | 20088-20102 | 30222-30236 |
| ZNF487 | 9322-9336 | 19509-19523 | 29637-29651 | CPT2 | 9922-9936 | 20103-20117 | 30237-30251 |
| KCNMA1-AS1 | 9337-9351 | 19524-19538 | 29652-29666 | PPARG | 9937-6651 | 20118-20132 | 30252-30266 |
| CWF19L1 | 9352-9366 | 19539-19553 | 29667-29681 | TOR1AIP2 | 9952-9966 | 20133-20147 | 30267-30281 |
| GPAM | 9367-9381 | 19554-19568 | 29682-29696 | CPT1A | 9967-9981 | 20148-20162 | 30282-30296 |
| SYCE1 | 9382-9396 | 19569-19583 | 29697-29711 | LMNA | 9982-9996 | 20163-20177 | 30297-30311 |
| MIR100HG | 9397-9411 | 19584-19598 | 29712-29726 | ACAA2 | 9997-10011 | 20178-20192 | 30312-30326 |
| PLEKHA5 | 9412-9426 | 19599-19613 | 29727-29741 | SUN1 | 10012-10026 | 20193-20207 | 30327-30341 |
| SLCO1A2 | 9427-9441 | 19614-19622 | 29742-29756 | GRB14 | 10027-10041 | 20208-20222 | 30342-30356 |
| LINC02426 | 9442-9456 | 19623-19637 | 29757-29771 | TMPO | 10042-10056 | 20223-20237 | 30357-30371 |
| SLC6A15 | 9457-9471 | 19638-19652 | 29772-29786 | HSD17B11 | 10057-10071 | 20238-20252 | 30372-30386 |
| LINC02392 | 9472-9486 | 19653-19667 | 29787-29801 | ERLIN1 | 10072-10086 | 20253-20267 | 30387-30401 |
| NEDD1 | 9487-9501 | 19668-19682 | 29802-29816 | PRKAA1 | 10087-10101 | 20268-20282 | 30402-30416 |
| ZNF664- | 9502-9516 | 19683-19698 | 29817-29831 | FASN | 10102-10116 | 20283-20297 | 30417-30431 |
| RFLNA | | | | SERPINA1 | 10117-10131 | 20298-20312 | 30432-30446 |
| DLEU1 | 9517-9531 | 19698-19712 | 29832-29846 | APOB | 10132-10146 | 20313-20327 | 30447-30461 |
| ARGLU1 | 9532-9546 | 19713-19727 | 29847-29861 | MIR4792 | — | — | 30462-30465 |
| PRKD1 | 9547-9561 | 19728-19742 | 29862-29876 | MIR4264 | — | — | 30466-30469 |
| HCN4 | 9562-9576 | 19743-19757 | 29877-29891 | LOC100289187 | — | — | 30470-30472 |
| FTO | 9577-9591 | 19758-19772 | 29892-29906 | MIR5093 | — | — | 30473-30476 |
| MYO15A | 9592-9606 | 19773-19787 | 29907-29921 | MIR3180-1 | — | — | 30477-30480 |
| MIR34c | — | — | 30489-30492 | MIR5000 | — | — | 30481-30484 |
| LOC100287534 | — | — | 30493-30495 | MIR193b | — | — | 30485-30488 |
| MIR3678 | — | — | 30496-30499 | MIR4461 | — | — | 30514-30517 |
| MIR3159 | — | — | 30500-30503 | MIR5701-1 | — | — | 30518-30521 |
| MIR4673 | — | — | 30504-30507 | MIR4787 | — | — | 30522-30525 |
| LOC283403 | — | — | 30508-30510 | MIR1224 | — | — | 30526-30529 |
| LOC100287399 | — | — | 30511-30513 | MIR4728 | — | — | 30532-30535 |
| | | | | MIR101-1 | — | — | 30536-30539 |

### REFERENCES

[0145] 1. Lazo M, Hernaez R, Eberhardt M S, et al. Prevalence of nonalcoholic fatty liver disease in the United States: the Third National Health and Nutrition Examination Survey, 1988-1994. Am J Epidemiol 2013; 178:38-45.
[0146] 2. Portillo Sanchez P, Bril F, Maximos M, et al. High Prevalence of Nonalcoholic Fatty Liver Disease in Patients with Type 2 Diabetes Mellitus and Normal Plasma Aminotransferase Levels. J Clin Endocrinol Metab 2014; 100.
[0147] 3. Crespo J, Fernandez-Gil P, Hernandez-Guerra M, et al. Are there predictive factors of severe liver fibrosis in morbidly obese patients with non-alcoholic steatohepatitis? Obes Surg 2001; 11:254-7.
[0148] 4. Younossi Z M, Blissett D, Blissett R, et al. The economic and clinical burden of nonalcoholic fatty liver disease in the United States and Europe. Hepatology 2016; 64:1577-1586.
[0149] 5. Romeo S, Kozlitina J, Xing C, et al. Genetic variation in PNPLA3 confers susceptibility to nonalcoholic fatty liver disease. Nat Genet 2008; 40:1461-5.
[0150] 6. Speliotes E K, Yerges-Armstrong L M, Wu J, et al. Genome-wide association analysis identifies variants associated with nonalcoholic fatty liver disease that have distinct effects on metabolic traits. PLOS Genet 2011; 7: e1001324.
[0151] 7. Luukkonen P K, Juuti A, Sammalkorpi H, et al. MARC1 variant rs2642438 increases hepatic phosphatidylcholines and decreases severity of non-alcoholic fatty liver disease in humans. J Hepatol 2020; 73:725-726.
[0152] 8. Parisinos C A, Wilman H R, Thomas E L, et al. Genome-wide and Mendelian randomisation studies of liver MRI yield insights into the pathogenesis of steatohepatitis. J Hepatol 2020; 73:241-251.
[0153] 9. Middleton M S, Heba E R, Hooker C A, et al. Agreement Between Magnetic Resonance Imaging Proton Density Fat Fraction Measurements and Pathologist-Assigned Steatosis Grades of Liver Biopsies From Adults With Nonalcoholic Steatohepatitis. Gastroenterology 2017; 153:753-761.
[0154] 10. Saadeh S, Younossi Z M, Remer E M, et al. The utility of radiological imaging in nonalcoholic fatty liver disease. Gastroenterology 2002; 123:745-50.
[0155] 11. Harris T B, Launer L J, Eiriksdottir G, et al. Age, Gene/Environment Susceptibility-Reykjavik Study: multidisciplinary applied phenomics. Am J Epidemiol 2007; 165:1076-87.
[0156] 12. Regan E A, Hokanson J E, Murphy J R, et al. Genetic epidemiology of COPD (COPDGene) study design. COPD 2010; 7:32-43.
[0157] 13. Carr J J, Nelson J C, Wong N D, et al. Calcified coronary artery plaque measurement with cardiac C T in population-based studies: standardized protocol of Multi-Ethnic Study of

[0158] Atherosclerosis (MESA) and Coronary Artery Risk Development in Young Adults (CARDIA) study. Radiology 2005; 234:35-43.
[0159] 14. Speliotes E K, Massaro J M, Hoffmann U, et al. Liver fat is reproducibly measured using computed tomography in the Framingham Heart Study. J Gastroenterol Hepatol 2008; 23:894-9.
[0160] 15. Daniels P R, Kardia S L, Hanis C L, et al. Familial aggregation of hypertension treatment and control in the Genetic Epidemiology Network of Arteriopathy (GENOA) study. Am J Med 2004; 116:676-81.
[0161] 16. Palmer N D, Goodarzi M O, Langefeld C D, et al. Genetic Variants Associated With Quantitative Glucose Homeostasis Traits Translate to Type 2 Diabetes in Mexican Americans; The GUARDIAN (Genetics Underlying Diabetes in Hispanics) Consortium. Diabetes 2015; 64:1853-66.
[0162] 17. Liu J, Musani S K, Bidulescu A, et al. Fatty liver, abdominal adipose tissue and atherosclerotic calcification in African Americans: the Jackson Heart Study. Atherosclerosis 2012; 224:521-5.
[0163] 18. Kramer H, Han C, Post W, et al. Racial/ethnic differences in hypertension and hypertension treatment and control in the multi-ethnic study of atherosclerosis (MESA). Am J Hypertens 2004; 17:963-70.
[0164] 19. Rampersaud E, Bielak L F, Parsa A, et al. The association of coronary artery calcification and carotid artery intima-media thickness with distinct, traditional coronary artery disease risk factors in asymptomatic adults. Am J Epidemiol 2008; 168:1016-23.
[0165] 20. Canela-Xandri O, Rawlik K, Tenesa A. An atlas of genetic associations in UK Biobank. Nature Genetics 2018; 50:1593-1599.
[0166] 21. K. He X Z, S. Ren and J. Sun. Deep Residual Learning for Image Recognition. 2016 IEEE Conference on Computer Vision and Pattern Recognition (CVPR), Las Vegas, NV 2016:770-778.
[0167] 22. Namjou B, Lingren T, Huang Y, et al. GWAS and enrichment analyses of non-alcoholic fatty liver disease identify new trait-associated genes and pathways across eMERGE Network. BMC Med 2019; 17:135.
[0168] 23. Chen V L, Chen Y, Du X, et al. Genetic variants that associate with cirrhosis have pleiotropic effects on human traits. Liver Int 2020; 40:405-415.
[0169] 24. Willer C J, Li Y, Abecasis G R. METAL: fast and efficient meta-analysis of genomewide association scans. Bioinformatics 2010; 26:2190-2191.
[0170] 25. Zhou W, Nielsen J B, Fritsche L G, et al. Efficiently controlling for case-control imbalance and sample relatedness in large-scale genetic association studies. Nat Genet 2018; 50:1335-1341.
[0171] 26. Dongiovanni P, Valenti L, Rametta R, et al. Genetic variants regulating insulin receptor signalling are associated with the severity of liver damage in patients with non-alcoholic fatty liver disease. Gut 2010; 59:267-73.
[0172] 27. Feitosa M F, Wojczynski M K, North K E, et al. The ERLIN1-CHUK-CWF19L1 gene cluster influences liver fat deposition and hepatic inflammation in the NHLBI Family Heart Study. Atherosclerosis 2013; 228:175-80.
[0173] 28. Chalasani N, Guo X, Loomba R, et al. Genome-wide association study identifies variants associated with histologic features of nonalcoholic Fatty liver disease. Gastroenterology 2010; 139:1567-76, 1576 e1-6.
[0174] 29. Eslam M, Hashem A M, Leung R, et al. Interferon-lambda rs12979860 genotype and liver fibrosis in viral and non-viral chronic liver disease. Nat Commun 2015; 6:6422.
[0175] 30. Wiedmann S, Fischer M, Kochler M, et al. Genetic variants within the LPIN1 gene, encoding lipin, are influencing phenotypes of the metabolic syndrome in humans. Diabetes 2008; 57:209-17.
[0176] 31. Shang X R, Song J Y, Liu P H, et al. GWAS-Identified Common Variants With Nonalcoholic Fatty Liver Disease in Chinese Children. J Pediatr Gastroenterol Nutr 2015; 60:669-74.
[0177] 32. Petta S, Grimaudo S, Camma C, et al. IL28B and PNPLA3 polymorphisms affect histological liver damage in patients with non-alcoholic fatty liver disease. J Hepatol 2012:56:1356-62.
[0178] 33. Kitamoto T, Kitamoto A, Yoneda M, et al. Genome-wide scan revealed that polymorphisms in the PNPLA3, SAMM50, and PARVB genes are associated with development and progression of nonalcoholic fatty liver disease in Japan. Hum Genet 2013; 132:783-92.
[0179] 34. Anstee Q M, Darlay R, Cockell S, et al. Genome-wide association study of non-alcoholic fatty liver and steatohepatitis in a histologically characterised cohort ( ) J Hepatol 2020; 73:505-515.
[0180] 35. Mancina R M, Dongiovanni P, Petta S, et al. The MBOAT7-TMC4 Variant rs641738 Increases Risk of Nonalcoholic Fatty Liver Disease in Individuals of European Descent. Gastroenterology 2016; 150:1219-1230 e6.
[0181] 36. Ma Y, Belyaeva O V, Brown P M, et al. 17-Beta Hydroxysteroid Dehydrogenase 13 Is a Hepatic Retinol Dehydrogenase Associated With Histological Features of Nonalcoholic Fatty Liver Disease. Hepatology 2019; 69:1504-1519.
[0182] 37. Park S L, Li Y, Sheng X, et al. Genome-Wide Association Study of Liver Fat: The Multiethnic Cohort Adiposity Phenotype Study. Hepatol Commun 2020; 4:1112-1123.
[0183] 38. Chen V L, Du X, Chen Y, et al. Genome-wide association study of serum liver enzymes implicates diverse metabolic and liver pathology. Nat Commun 2021; 12:816.
[0184] 39. Neale B. http://www.nealelab.is/uk-biobank/.
[0185] 40. Charrad M, Ghazzali N, Boiteau V, et al. NbClust: An R Package for Determining the Relevant Number of Clusters in a Data Set. Journal of Statistical Software 2014; 61:1-36.
[0186] 41. Galili T. dendextend: an R package for visualizing, adjusting and comparing trees of hierarchical clustering. Bioinformatics 2015; 31:3718-20.
[0187] 42. Hemani G, Zheng J, Elsworth B, et al. The MR-Base platform supports systematic causal inference across the human phenome. Elife 2018; 7.
[0188] 43. Lawlor D A, Harbord R M, Sterne J A, et al. Mendelian randomization: using genes as instruments for making causal inferences in epidemiology. Stat Med 2008; 27:1133-63.
[0189] 44. Pers T H, Karjalainen J M, Chan Y, et al. Biological interpretation of genome-wide association studies using predicted gene functions. Nat Commun 2015; 6:5890.
[0190] 45. Andri S. DescTools: Tools for Descriptive Statistics. R package version 0.99.40, 2021.
[0191] 46. Lumley T, Brody J, Dupuis J, et al. Meta-analysis of a rare-variant association test. Stat Tech, University of Auckland 2012.
[0192] 47. Lee S, Emond M J, Bamshad M J, et al. Optimal unified approach for rare-variant association testing with application to small-sample case-control whole-exome sequencing studies. Am J Hum Genet 2012; 91:224-37.
[0193] 48. Yates A D, Achuthan P, Akanni W, et al. Ensembl 2020. Nucleic Acids Res 2020; 48: D682-D688.
[0194] 49. Zhou W, Zhao Z, Nielsen J B, et al. Scalable generalized linear mixed model for region-based association tests in large biobanks and cohorts. Nat Genet 2020; 52:634-639.
[0195] 50. Kahali B, Chen Y, Feitosa M F, et al. A Noncoding Variant Near PPP1R3B Promotes Liver Glycogen Storage and MetS, but Protects Against Myocardial Infarction. J Clin Endocrinol Metab 2021; 106:372-387.
[0196] 51. Landgraf K, Scholz M, Kovacs P, et al. FTO Obesity Risk Variants Are Linked to Adipocyte IRX3 Expression and BMI of Children-Relevance of FTO Variants to Defend Body Weight in Lean Children? PLOS One 2016; 11: e0161739.
[0197] 52. Liberzon A, Subramanian A, Pinchback R, et al. Molecular signatures database (MSigDB) 3.0. Bioinformatics 2011; 27:1739-40.
[0198] 53. Consortium G T. The GTEx Consortium atlas of genetic regulatory effects across human tissues. Science 2020; 369:1318-1330.
[0199] 54. Polimanti R, Gelernter J. ADH1B: From alcoholism, natural selection, and cancer to the human phenome. Am J Med Genet B Neuropsychiatr Genet 2018; 177:113-125.
[0200] 55. Muenter M D, Perry H O, Ludwig J. Chronic vitamin A intoxication in adults. Hepatic, neurologic and dermatologic complications. Am J Med 1971; 50:129-36.
[0201] 56. Shin J Y, Hernandez-Ono A, Fedotova T, et al. Nuclear envelope-localized torsinA-LAP1 complex regulates hepatic VLDL secretion and steatosis. J Clin Invest 2019; 129:4885-4900.
[0202] 57. Innes H, Buch S, Hutchinson S, et al. Genome-Wide Association Study for Alcohol-Related Cirrhosis Identifies Risk Loci in MARC1 and HNRNPUL1. Gastroenterology 2020; 159:1276-1289 e7.
[0203] 58. Xia M, Chandrasekaran P, Rong S, et al. Hepatic Deletion of Mboat7 (Lpiat1) Causes Activation of SREBP-Ic and Fatty Liver. J Lipid Res 2020.
[0204] 59. Chen Y, Chen C, Ke X, et al. Analysis of circulating cholesterol levels as a mediator of an association between ABO blood group and coronary heart disease. Circ Cardiovasc Genet 2014; 7:43-8.
[0205] 60. Wolpin B M, Kraft P, Xu M, et al. Variant ABO blood group alleles, secretor status, and risk of pancreatic cancer: results from the pancreatic cancer cohort consortium. Cancer Epidemiol Biomarkers Prev 2010; 19:3140-9.
[0206] 61. Zhong G C, Liu S, Wu Y L, et al. ABO blood group and risk of newly diagnosed nonalcoholic fatty liver disease: A case-control study in Han Chinese population. PLOS One 2019; 14: e0225792.
[0207] 62. Chambers J C, Zhang W, Sehmi J, et al. Genome-wide association study identifies loci influencing concentrations of liver enzymes in plasma. Nat Genet 2011; 43:1131-8.
[0208] 63. Kathiresan S, Melander O, Guiducci C, et al. Six new loci associated with blood low-density lipoprotein cholesterol, high-density lipoprotein cholesterol or triglycerides in humans. Nat Genet 2008; 40:189-97.
[0209] 64. Beer N L, Tribble N D, McCulloch L J, et al. The P446L variant in GCKR associated with fasting plasma glucose and triglyceride levels exerts its effect through increased glucokinase activity in liver. Hum Mol Genet 2009; 18:4081-8.
[0210] 65. Ishizuka Y, Nakayama K, Ogawa A, et al. TRIB1 downregulates hepatic lipogenesis and glycogenesis via multiple molecular interactions. J Mol Endocrinol 2014; 52:145-58.
[0211] 66. Bauer R C, Sasaki M, Cohen D M, et al. Tribbles-1 regulates hepatic lipogenesis through posttranscriptional regulation of C/EBPalpha. J Clin Invest 2015; 125:3809-18.
[0212] 67. Agius L. Hormonal and Metabolite Regulation of Hepatic Glucokinase. Annu Rev Nutr 2016; 36:389-415.
[0213] 68. Nakajima S, Tanaka H, Sawada K, et al. Polymorphism of receptor-type tyrosine-protein phosphatase delta gene in the development of non-alcoholic fatty liver disease. J Gastroenterol Hepatol 2018; 33:283-290.
[0214] 69. Kozlitina J, Smagris E, Stender S, et al. Exome-wide association study identifies a TM6SF2 variant that confers susceptibility to nonalcoholic fatty liver disease. Nat Genet 2014; 46:352-6.
[0215] 70. Wang Y, Kory N, BasuRay S, et al. PNPLA3, CGI-58, and Inhibition of Hepatic Triglyceride Hydrolysis in Mice. Hepatology 2019; 69:2427-2441.
[0216] 71. Palmer N, Kahali B, Kuppa A, et al. Allele Specific Variation at APOE Increases Non-alcoholic Fatty Liver Disease and Obesity but Decreases Risk of Alzheimer's Disease and Myocardial Infarction. 2021.
[0217] 72. Hannah V C, Ou J, Luong A, et al. Unsaturated fatty acids down-regulate srebp isoforms 1a and 1 by two mechanisms in HEK-293 cells. J Biol Chem 2001; 276:4365-72.
[0218] 73. Abul-Husn N S, Cheng X, Li A H, et al. A Protein-Truncating HSD17B13 Variant and Protection from Chronic Liver Disease. N Engl J Med 2018; 378:1096-1106.
[0219] 74. Fox C S, Liu Y, White C C, et al. Genome-wide association for abdominal subcutaneous and visceral adipose reveals a novel locus for visceral fat in women. PLoS Genet 2012; 8: e1002695.
[0220] 75. Sirwi A, Hussain M M. Lipid transfer proteins in the assembly of apoB-containing lipoproteins. J Lipid Res 2018; 59:1094-1102.
[0221] 76. Burnett J R, Hooper A J, Hegele R A. Abetalipoproteinemia. In: Adam M P, Ardinger H H, Pagon R A, Wallace S E, Bean LJH, Mirzaa G, Amemiya A, eds. GeneReviews ((R)). Seattle (WA), 1993.

1. A method comprising: analyzing a biological sample from a subject for ten to one hundred variants, wherein at least ten of the variants are from the list of rs738408, rs58542926, rs429358, rs1260326, rs28601761, rs4918722, rs2807834, rs7661964, rs1229984, rs7029757, rs17817449, rs79953491, rs112630404, rs626283, rs4561528, rs10756038, rs140201358, and mutations in MTTP.

2. The method of claim 1, wherein said at least ten of the variants comprises at least fifteen of the variants from the list of rs738408, rs58542926, rs429358, rs1260326, rs28601761, rs4918722, rs2807834, rs7661964, rs1229984, rs7029757, rs17817449, rs79953491, rs112630404, rs626283, rs4561528, rs10756038, rs140201358, and mutations in MTTP.

3. The method of claim 1, wherein said at least ten of the variants comprises each of the variants from the list rs738408, rs58542926, rs429358, rs1260326, rs28601761, rs4918722, rs2807834, rs7661964, rs1229984, rs7029757, rs17817449, rs79953491, rs112630404, rs626283, rs4561528, rs10756038, rs140201358, and mutations in MTTP.

4. The method of claim 1, wherein said at least ten of the variants consists of only the variants from the list of rs738408, rs58542926, rs429358, rs1260326, rs28601761, rs4918722, rs2807834, rs7661964, rs1229984, rs7029757, rs17817449, rs79953491, rs112630404, rs626283, rs4561528, rs10756038, rs140201358, and mutations in MTTP.

5. The method of claim 1, wherein said at least ten of the variants consists of rs738408, rs58542926, rs429358, rs1260326, rs28601761, rs4918722, rs2807834, rs7661964, rs1229984, rs7029757, rs17817449, rs79953491, rs112630404, rs626283, rs4561528, rs10756038, rs140201358, and mutations in MTTP.

6. The method of any of claims 1-5, wherein said biological sample is obtained from a subject suspected of having nonalcoholic fatty liver disease.

7. The method of any of claims 1-6, wherein said biological sample is selected from the group consisting of blood, serum, plasma, saliva, tissue, hair, semen, and urine.

8. The method of any of claims 1-7, wherein said analyzing comprises directly detecting said variants using a molecule assay.

9. The method of claim 8, wherein the molecule assay is a hybridization assay or a sequencing assay.

10. The method of any of claims 1-9, wherein said analyzing comprises indirectly detecting said variants.

11. The method of claim 10, wherein said indirectly detecting comprises assessing gene expression or detecting a mutation in linkage disequilibrium with a variant.

12. A method of managing nonalcoholic fatty liver disease, comprising:
a) analyzing a biological sample from a subject for at least ten of the variants from the list of rs738408, rs58542926, rs429358, rs1260326, rs28601761, rs4918722, rs2807834, rs7661964, rs1229984, rs7029757, rs17817449, rs79953491, rs112630404, rs626283, rs4561528, rs10756038, rs140201358, and mutations in MTTP;
b) generating a fatty liver disease risk score based on the presence or absence of said variants; and
c) treating the subject with a nonalcoholic fatty liver disease intervention if said risk score indicates a predisposition to nonalcoholic fatty liver disease.

13. The method of claim 12, wherein said risk score is calculated using an algorithm that accounts for each of the analyzed variants.

14. The method of claim 12 or 13, wherein said risk score further is based on one or more of blood count, liver enzyme test data, liver function test data, hepatitis A test data, hepatitis C test data, celiac disease screening test data, fasting blood sugar, hemoglobin A1C data, and lipid profile data.

15. The method of any of claims 12-14, wherein said risk score further is based on one or more of abdominal ultrasound data, computerized tomography (CT) scanning data, magnetic resonance imaging (MRI) data, transient elastography data, and magnetic resonance elastography data.

16. The method of any of claims 12-15, wherein said treating comprises applying a weight loss regime.

17. The method of any of claims 12-16, wherein said treating comprises liver transplantation.

18. The method of any of claims 12-17, wherein said treating comprises administration of one or more active agents selected from the group consisting of an essential phospholipid; anti-diabetic agent; a dietary supplement; an antifibrotic agent; an anti-obesity agent; and any combination thereof.

19. A system comprising: a set or reagents that specifically detect ten to one hundred variants, wherein at least ten of the variants are from the list of rs738408, rs58542926, rs429358, rs 1260326, rs28601761, rs4918722, rs2807834, rs7661964, rs1229984, rs7029757, rs17817449, rs79953491, rs112630404, rs626283, rs4561528, rs10756038, rs140201358, or a variant of marker in linkage disequilibrium therewith, and mutations in MTTP.

20. The system of claim 19, wherein said reagents comprises one or more primers or probe specific for said variants.

21. The system of claim 19 or 20, wherein said reagents comprising sequence reagents.

22. The system of any of claims 19-21, wherein said reagents comprises a microarray.

23. A non-transitory computer-readable storage medium comprising an instruction, wherein when the instruction is run by at least one computer processor, wherein the at least one processor performs operations comprising: a) receiving data identifying the presence or absence of a variant in a biological sample from at least ten of from the list of rs738408, rs58542926, rs429358, rs1260326, rs28601761, rs4918722, rs2807834, rs7661964, rs1229984, rs7029757, rs17817449, rs79953491, rs112630404, rs626283, rs4561528, rs10756038, rs140201358, or a variant or marker in linkage disequilibrium therewith, and mutations in MTTP; b) generating a nonalcoholic fatty acid liver disease risk score from said data; and c) displaying or reporting said risk score.

25. A method of diagnosing fatty liver disease or predisposition to fatty liver disease comprising: analyzing a biological sample from a subject for at least ten variants from the list of rs738408, rs58542926, rs429358, rs1260326, rs28601761, rs4918722, rs2807834, rs7661964, rs1229984, rs7029757, rs17817449, rs79953491, rs112630404, rs626283, rs4561528, rs10756038, rs140201358, or a variant or marker in linkage disequilibrium therewith, and mutations in MTTP.

The application's sequence listing, which the Patent Office published only in electronic form, follows.

SEQUENCE LISTING (30539 sequences)

SEQ ID NO: 1 - DNA, 20 bp, synthetic construct
  source 1..20: mol_type = other DNA
ggttactacgggtcattccg

SEQ ID NO: 2 - DNA, 20 bp, synthetic construct
  source 1..20: mol_type = other DNA
cagccaggtccggtccgcgg

SEQ ID NO: 3 - DNA, 20 bp, synthetic construct
  source 1..20: mol_type = other DNA
aggcaacgagtgccggccgg

SEQ ID NO: 4 - DNA, 20 bp, synthetic construct
  source 1..20: mol_type = other DNA
taggcaacgagtgccggccg

SEQ ID NO: 5 - DNA, 20 bp, synthetic construct
  source 1..20: mol_type = other DNA
cactcgttgcctatgcagag

SEQ ID NO: 6 - DNA, 20 bp, synthetic construct
  source 1..20: mol_type = other DNA
gccacccattggcccgcgag

SEQ ID NO: 7 - DNA, 20 bp, synthetic construct
  source 1..20: mol_type = other DNA
acccattggcccgcgagcgg

SEQ ID NO: 8 - DNA, 20 bp, synthetic construct
  source 1..20: mol_type = other DNA
tgggcctatcgaattcgggc

SEQ ID NO: 9 - DNA, 20 bp, synthetic construct
  source 1..20: mol_type = other DNA
tagtaacctcgccccgcccc

SEQ ID NO: 10 - DNA, 20 bp, synthetic construct
  source 1..20: mol_type = other DNA
gtagtaacctcgccccgccc

SEQ ID NO: 11 - DNA, 20 bp, synthetic construct
  source 1..20: mol_type = other DNA
cccgcacgcgccaccgctcg

SEQ ID NO: 12 - DNA, 20 bp, synthetic construct
  source 1..20: mol_type = other DNA
cccgcgagcggtggcgcgtg

SEQ ID NO: 13 - DNA, 20 bp, synthetic construct
  source 1..20: mol_type = other DNA
agcgcggcgctggcggcccg

SEQ ID NO: 14 - DNA, 20 bp, synthetic construct
  source 1..20: mol_type = other DNA
cgcgagcggtggcgcgtgcg

SEQ ID NO: 15 - DNA, 20 bp, synthetic construct
  source 1..20: mol_type = other DNA
gccggggagcgcggcgctgg

SEQ ID NO: 16 - DNA, 20 bp, synthetic construct
  source 1..20: mol_type = other DNA
acaccggagggaagtatgga

SEQ ID NO: 17 - DNA, 20 bp, synthetic construct
  source 1..20: mol_type = other DNA
gccggtgggcccaaacccgg

SEQ ID NO: 18 - DNA, 20 bp, synthetic construct
  source 1..20: mol_type = other DNA
ttccctccggtgtccaccag

SEQ ID NO: 19 - DNA, 20 bp, synthetic construct
  source 1..20: mol_type = other DNA
tccctccggtgtccaccaga

SEQ ID NO: 20 - DNA, 20 bp, synthetic construct
  source 1..20: mol_type = other DNA
cggccgtccatacttccctc

SEQ ID NO: 21 - DNA, 20 bp, synthetic construct
  source 1..20: mol_type = other DNA
gttcgccctctggtggacac

SEQ ID NO: 22 - DNA, 20 bp, synthetic construct
  source 1..20: mol_type = other DNA
cgccctctggtggacaccgg

SEQ ID NO: 23 - DNA, 20 bp, synthetic construct
  source 1..20: mol_type = other DNA
cacgccgctgggcgcacgtg

SEQ ID NO: 24 - DNA, 20 bp, synthetic construct
  source 1..20: mol_type = other DNA
ggtgtccaccagagggcgaa

SEQ ID NO: 25 - DNA, 20 bp, synthetic construct
  source 1..20: mol_type = other DNA
gccctctggtggacaccgga

SEQ ID NO: 26 - DNA, 20 bp, synthetic construct
  source 1..20: mol_type = other DNA
ccgctgggcgcacgtgcgga

SEQ ID NO: 27 - DNA, 20 bp, synthetic construct
  source 1..20: mol_type = other DNA
actacgcatgcgcacgccgc

SEQ ID NO: 28 - DNA, 20 bp, synthetic construct
  source 1..20: mol_type = other DNA
gtgtccaccagagggcgaac

SEQ ID NO: 29 - DNA, 20 bp, synthetic construct
  source 1..20: mol_type = other DNA
gtctcccgttcgccctctgg

SEQ ID NO: 30 - DNA, 20 bp, synthetic construct
  source 1..20: mol_type = other DNA
gtggacaccggagggaagta

SEQ ID NO: 31 - DNA, 20 bp, synthetic construct
  source 1..20: mol_type = other DNA
tcgccccctagagtccgagg

SEQ ID NO: 32 - DNA, 20 bp, synthetic construct
  source 1..20: mol_type = other DNA
catggggcggcgaaccagcg

SEQ ID NO: 33 - DNA, 20 bp, synthetic construct
  source 1..20: mol_type = other DNA
gcgtcgccccctagagtccg

SEQ ID NO: 34 - DNA, 20 bp, synthetic construct
  source 1..20: mol_type = other DNA
gcctgctgggtcctagcgcg

SEQ ID NO: 35 - DNA, 20 bp, synthetic construct
  source 1..20: mol_type = other DNA
cctagcgcgcggccggcatg

SEQ ID NO: 36 - DNA, 20 bp, synthetic construct
  source 1..20: mol_type = other DNA
ggctctgctgggcgcgctgg

SEQ ID NO: 37 - DNA, 20 bp, synthetic construct
  source 1..20: mol_type = other DNA
gctggttcgccgccccatgc

SEQ ID NO: 38 - DNA, 20 bp, synthetic construct
  source 1..20: mol_type = other DNA
gttgcgccgcggcctgcctg

SEQ ID NO: 39 - DNA, 20 bp, synthetic construct
  source 1..20: mol_type = other DNA
aggccgcctcggactctagg

SEQ ID NO: 40 - DNA, 20 bp, synthetic construct
  source 1..20: mol_type = other DNA
aggcggtgggcgttgcgccg

SEQ ID NO: 41 - DNA, 20 bp, synthetic construct
  source 1..20: mol_type = other DNA
ccgaggcggcctctgtcccc

SEQ ID NO: 42 - DNA, 20 bp, synthetic construct
  source 1..20: mol_type = other DNA
cctctgtccccgggctgcgg

SEQ ID NO: 43 - DNA, 20 bp, synthetic construct
  source 1..20: mol_type = other DNA
agcgcgcggccggcatgggg

SEQ ID NO: 44 - DNA, 20 bp, synthetic construct
  source 1..20: mol_type = other DNA
cgccgcgccgccgcagcccg

SEQ ID NO: 45 - DNA, 20 bp, synthetic construct
  source 1..20: mol_type = other DNA
gccgcgcgctaggacccagc

SEQ ID NO: 46 - DNA, 20 bp, synthetic construct
  source 1..20: mol_type = other DNA
acgcattccccggatccgcg

SEQ ID NO: 47 - DNA, 20 bp, synthetic construct
  source 1..20: mol_type = other DNA
gcctgctccgcgcggatccg

SEQ ID NO: 48 - DNA, 20 bp, synthetic construct
  source 1..20: mol_type = other DNA
ggatccggggaatgcgtgag

SEQ ID NO: 49 - DNA, 20 bp, synthetic construct
  source 1..20: mol_type = other DNA
gcggttcccccacaagcaag

SEQ ID NO: 50 - DNA, 20 bp, synthetic construct
  source 1..20: mol_type = other DNA
tcccccacaagcaagtggcg

SEQ ID NO: 51 - DNA, 20 bp, synthetic construct
  source 1..20: mol_type = other DNA
accgcacctgaggctctgct

SEQ ID NO: 52 - DNA, 20 bp, synthetic construct
  source 1..20: mol_type = other DNA
cccgcgccacttgcttgtgg

SEQ ID NO: 53 - DNA, 20 bp, synthetic construct
  source 1..20: mol_type = other DNA
ccacaagcaagtggcgcggg

SEQ ID NO: 54 - DNA, 20 bp, synthetic construct
  source 1..20: mol_type = other DNA
gccaagcagagcctcaggtg

SEQ ID NO: 55 - DNA, 20 bp, synthetic construct
  source 1..20: mol_type = other DNA
cctgaggctctgcttggcgc

SEQ ID NO: 56 - DNA, 20 bp, synthetic construct
  source 1..20: mol_type = other DNA
cccccacaagcaagtggcgc

SEQ ID NO: 57 - DNA, 20 bp, synthetic construct
  source 1..20: mol_type = other DNA
cccgcgccaagcagagcctc

SEQ ID NO: 58 - DNA, 20 bp, synthetic construct
  source 1..20: mol_type = other DNA
acctgaggctctgcttggcg

SEQ ID NO: 59 - DNA, 20 bp, synthetic construct
  source 1..20: mol_type = other DNA
gcccgcgccacttgcttgtg

SEQ ID NO: 60 - DNA, 20 bp, synthetic construct
  source 1..20: mol_type = other DNA
ttgtgggggaaccgcacctg

SEQ ID NO: 61 - DNA, 20 bp, synthetic construct
  source 1..20: mol_type = other DNA
cagtccgccagtccgatggg

SEQ ID NO: 62 - DNA, 20 bp, synthetic construct
  source 1..20: mol_type = other DNA
agagcccacccgcttctgcg

SEQ ID NO: 63 - DNA, 20 bp, synthetic construct
  source 1..20: mol_type = other DNA
ccggccgcccatcggactgg

SEQ ID NO: 64 - DNA, 20 bp, synthetic construct
  source 1..20: mol_type = other DNA
ttcacctcgcagaagcgggt

SEQ ID NO: 65 - DNA, 20 bp, synthetic construct
  source 1..20: mol_type = other DNA
gcagaagcgggtgggctctg

SEQ ID NO: 66 - DNA, 20 bp, synthetic construct
  source 1..20: mol_type = other DNA
gtgggctctgtggagagtcg

SEQ ID NO: 67 - DNA, 20 bp, synthetic construct
  source 1..20: mol_type = other DNA
cagccagtccgccagtccga

SEQ ID NO: 68 - DNA, 20 bp, synthetic construct
  source 1..20: mol_type = other DNA
tgcgcttcacctcgcagaag

SEQ ID NO: 69 - DNA, 20 bp, synthetic construct
  source 1..20: mol_type = other DNA
cagcgcctcctccactccgg

SEQ ID NO: 70 - DNA, 20 bp, synthetic construct
  source 1..20: mol_type = other DNA
cttcacctcgcagaagcggg

SEQ ID NO: 71 - DNA, 20 bp, synthetic construct
  source 1..20: mol_type = other DNA
gtggagagtcgcgggctcgc

SEQ ID NO: 72 - DNA, 20 bp, synthetic construct
  source 1..20: mol_type = other DNA
tgtggagagtcgcgggctcg

SEQ ID NO: 73 - DNA, 20 bp, synthetic construct
  source 1..20: mol_type = other DNA
gatgaagctgggcggggcac

SEQ ID NO: 74 - DNA, 20 bp, synthetic construct
  source 1..20: mol_type = other DNA
cagcagcgcctcctccactc

SEQ ID NO: 75 - DNA, 20 bp, synthetic construct
  source 1..20: mol_type = other DNA
acccgggcccgccggagtgg

SEQ ID NO: 76 - DNA, 20 bp, synthetic construct
  source 1..20: mol_type = other DNA
ggtgacgtaatctccgtccg

SEQ ID NO: 77 - DNA, 20 bp, synthetic construct
  source 1..20: mol_type = other DNA
gcgctctcgcggttcgcgga

SEQ ID NO: 78 - DNA, 20 bp, synthetic construct
  source 1..20: mol_type = other DNA
cctaacgggcgcgcgagtgt

SEQ ID NO: 79 - DNA, 20 bp, synthetic construct
  source 1..20: mol_type = other DNA
gggctggagactgcgcagtg

SEQ ID NO: 80 - DNA, 20 bp, synthetic construct
  source 1..20: mol_type = other DNA
tgcgctctcgcggttcgcgg

SEQ ID NO: 81 - DNA, 20 bp, synthetic construct
  source 1..20: mol_type = other DNA
gcggttcgcggagggtgtcg

SEQ ID NO: 82 - DNA, 20 bp, synthetic construct
  source 1..20: mol_type = other DNA
gagactgcgcagtgcggtgc

SEQ ID NO: 83 - DNA, 20 bp, synthetic construct
  source 1..20: mol_type = other DNA
gaaccgcgagagcgcagcgc

SEQ ID NO: 84 - DNA, 20 bp, synthetic construct
  source 1..20: mol_type = other DNA
ccgcgagagcgcagcgcagg

SEQ ID NO: 85 - DNA, 20 bp, synthetic construct
  source 1..20: mol_type = other DNA
ctaacgggcgcgcgagtgtg

SEQ ID NO: 86 - DNA, 20 bp, synthetic construct
  source 1..20: mol_type = other DNA
ggttcgcggagggtgtcgcg

SEQ ID NO: 87 - DNA, 20 bp, synthetic construct
  source 1..20: mol_type = other DNA
gtaatctccgtccgcggccg

SEQ ID NO: 88 - DNA, 20 bp, synthetic construct
  source 1..20: mol_type = other DNA
taacgggcgcgcgagtgtgg

SEQ ID NO: 89 - DNA, 20 bp, synthetic construct
  source 1..20: mol_type = other DNA
cccccgagctgcggctgctg

SEQ ID NO: 90 - DNA, 20 bp, synthetic construct
  source 1..20: mol_type = other DNA
gcagtgcggtgccggccggg

SEQ ID NO: 91 - DNA, 20 bp, synthetic construct
  source 1..20: mol_type = other DNA
agtaaaacgtgattacacca

SEQ ID NO: 92 - DNA, 20 bp, synthetic construct
  source 1..20: mol_type = other DNA
aggtccacgtccccaggcgt

SEQ ID NO: 93 - DNA, 20 bp, synthetic construct
  source 1..20: mol_type = other DNA
aacgtgattacaccaaggac

SEQ ID NO: 94 - DNA, 20 bp, synthetic construct
  source 1..20: mol_type = other DNA
ccgctgccggtatttgcccc

SEQ ID NO: 95 - DNA, 20 bp, synthetic construct
  source 1..20: mol_type = other DNA
gtccccaggcgtcggagaag

SEQ ID NO: 96 - DNA, 20 bp, synthetic construct
  source 1..20: mol_type = other DNA
accgctgccggtatttgccc

SEQ ID NO: 97 - DNA, 20 bp, synthetic construct
  source 1..20: mol_type = other DNA
aaccccttctccgacgcctg

SEQ ID NO: 98 - DNA, 20 bp, synthetic construct
  source 1..20: mol_type = other DNA
tcagagttgccaggcgcccg

SEQ ID NO: 99 - DNA, 20 bp, synthetic construct
  source 1..20: mol_type = other DNA
tcggccaggtccacgtcccc

SEQ ID NO: 100 - DNA, 20 bp, synthetic construct
  source 1..20: mol_type = other DNA
aggggttggaccgcgcagcg

SEQ ID NO: 101 - DNA, 20 bp, synthetic construct
  source 1..20: mol_type = other DNA
aactctgacgccccgctgcg

SEQ ID NO: 102 - DNA, 20 bp, synthetic construct
  source 1..20: mol_type = other DNA
acgtccccaggcgtcggaga

SEQ ID NO: 103 - DNA, 20 bp, synthetic construct
  source 1..20: mol_type = other DNA
ccaggcgtcggagaaggggt

SEQ ID NO: 104 - DNA, 20 bp, synthetic construct
  source 1..20: mol_type = other DNA
gaaggggttggaccgcgcag

SEQ ID NO: 105 - DNA, 20 bp, synthetic construct
  source 1..20: mol_type = other DNA
gtcagagttgccaggcgccc

SEQ ID NO: 106 - DNA, 20 bp, synthetic construct
  source 1..20: mol_type = other DNA
gggaaggaccctattggctg

SEQ ID NO: 107 - DNA, 20 bp, synthetic construct
  source 1..20: mol_type = other DNA
ggactgacccagaataactc

SEQ ID NO: 108 - DNA, 20 bp, synthetic construct
  source 1..20: mol_type = other DNA
agctggggaggggaccagtg

SEQ ID NO: 109 - DNA, 20 bp, synthetic construct
  source 1..20: mol_type = other DNA
ggggaaggaccctattggct

SEQ ID NO: 110 - DNA, 20 bp, synthetic construct
  source 1..20: mol_type = other DNA
tggtcccctccccagctggg

SEQ ID NO: 111 - DNA, 20 bp, synthetic construct
  source 1..20: mol_type = other DNA
gagtaaatttagctggagag

SEQ ID NO: 112 - DNA, 20 bp, synthetic construct
  source 1..20: mol_type = other DNA
ggagggagggccccagaggg

SEQ ID NO: 113 - DNA, 20 bp, synthetic construct
  source 1..20: mol_type = other DNA
gtaaatttagctggagagag

SEQ ID NO: 114 - DNA, 20 bp, synthetic construct
  source 1..20: mol_type = other DNA
agccccctgacccccctctg

SEQ ID NO: 115 - DNA, 20 bp, synthetic construct
  source 1..20: mol_type = other DNA
gactgacccagaataactca

SEQ ID NO: 116 - DNA, 20 bp, synthetic construct
  source 1..20: mol_type = other DNA
gctcctcctcctcccagctg

SEQ ID NO: 117 - DNA, 20 bp, synthetic construct
  source 1..20: mol_type = other DNA
gagcaggaggcaggcaggcg

SEQ ID NO: 118 - DNA, 20 bp, synthetic construct
  source 1..20: mol_type = other DNA
aatttagctggagagagggg

SEQ ID NO: 119 - DNA, 20 bp, synthetic construct
  source 1..20: mol_type = other DNA
aggagcaggaggcaggcagg

SEQ ID NO: 120 - DNA, 20 bp, synthetic construct
  source 1..20: mol_type = other DNA
tttagctggagagaggggag

SEQ ID NO: 121 - DNA, 20 bp, synthetic construct
  source 1..20: mol_type = other DNA
ggaagtaggctaaggcgcag

SEQ ID NO: 122 - DNA, 20 bp, synthetic construct
  source 1..20: mol_type = other DNA
gacgacgggaacgaggctca

SEQ ID NO: 123 - DNA, 20 bp, synthetic construct
  source 1..20: mol_type = other DNA
gaccaataggaagtaggcta

SEQ ID NO: 124 - DNA, 20 bp, synthetic construct
  source 1..20: mol_type = other DNA
agtttaagccaatcagcccc

SEQ ID NO: 125 - DNA, 20 bp, synthetic construct
  source 1..20: mol_type = other DNA
ccacatacccgctctcgccg

SEQ ID NO: 126 - DNA, 20 bp, synthetic construct
  source 1..20: mol_type = other DNA
cacatacccgctctcgccgc

SEQ ID NO: 127 - DNA, 20 bp, synthetic construct
  source 1..20: mol_type = other DNA
gaaagtgtggctacatgagc

SEQ ID NO: 128 - DNA, 20 bp, synthetic construct
  source 1..20: mol_type = other DNA
cgttcccgtcgtccagcccg

SEQ ID NO: 129 - DNA, 20 bp, synthetic construct
  source 1..20: mol_type = other DNA
cgggctggacgacgggaacg

SEQ ID NO: 130 - DNA, 20 bp, synthetic construct
  source 1..20: mol_type = other DNA
ttggtcgagagaagtggagc

SEQ ID NO: 131 - DNA, 20 bp, synthetic construct
  source 1..20: mol_type = other DNA
ttcctattggtcgagagaag

SEQ ID NO: 132 - DNA, 20 bp, synthetic construct
  source 1..20: mol_type = other DNA
agtaggctaaggcgcagagg

SEQ ID NO: 133 - DNA, 20 bp, synthetic construct
  source 1..20: mol_type = other DNA
aggcgcagaggcggaaagtg

SEQ ID NO: 134 - DNA, 20 bp, synthetic construct
  source 1..20: mol_type = other DNA
gtcgagagaagtggagccgg

SEQ ID NO: 135 - DNA, 20 bp, synthetic construct
  source 1..20: mol_type = other DNA
gtccagcccgcggcgagagc

SEQ ID NO: 136 - DNA, 20 bp, synthetic construct
  source 1..20: mol_type = other DNA
gcaaagaacccgcccccgag

SEQ ID NO: 137 - DNA, 20 bp, synthetic construct
  source 1..20: mol_type = other DNA
gcacgtgactgtgacggcat

SEQ ID NO: 138 - DNA, 20 bp, synthetic construct
  source 1..20: mol_type = other DNA
caaagaacccgcccccgagg

SEQ ID NO: 139 - DNA, 20 bp, synthetic construct
  source 1..20: mol_type = other DNA
agggcctctgccgaaagcgt

SEQ ID NO: 140 - DNA, 20 bp, synthetic construct
  source 1..20: mol_type = other DNA
gggcctctgccgaaagcgtg

SEQ ID NO: 141 - DNA, 20 bp, synthetic construct
  source 1..20: mol_type = other DNA
tggggatagcaccccctcgg

SEQ ID NO: 142 - DNA, 20 bp, synthetic construct
  source 1..20: mol_type = other DNA
ggccgggcgtcatagtaacc

SEQ ID NO: 143 - DNA, 20 bp, synthetic construct
  source 1..20: mol_type = other DNA
cagggcctctgccgaaagcg

SEQ ID NO: 144 - DNA, 20 bp, synthetic construct
  source 1..20: mol_type = other DNA
ttggggatagcaccccctcg

SEQ ID NO: 145 - DNA, 20 bp, synthetic construct
  source 1..20: mol_type = other DNA
ctttcggcagaggccctgag

SEQ ID NO: 146 - DNA, 20 bp, synthetic construct
  source 1..20: mol_type = other DNA
tgcaaagaacccgcccccga

SEQ ID NO: 147 - DNA, 20 bp, synthetic construct
  source 1..20: mol_type = other DNA
tcagcaggaagcacttcccc

SEQ ID NO: 148 - DNA, 20 bp, synthetic construct
  source 1..20: mol_type = other DNA
acgtgagctgacctgtcagc

SEQ ID NO: 149 - DNA, 20 bp, synthetic construct
  source 1..20: mol_type = other DNA
ctgcaaagaacccgcccccg

SEQ ID NO: 150 - DNA, 20 bp, synthetic construct
  source 1..20: mol_type = other DNA
cgtggggcacgtgactgtga

SEQ ID NO: 151 - DNA, 20 bp, synthetic construct
  source 1..20: mol_type = other DNA
acagtgtaagatgcccgtgg

SEQ ID NO: 152 - DNA, 20 bp, synthetic construct
  source 1..20: mol_type = other DNA
ttagagcagtcgacactgag

SEQ ID NO: 153 - DNA, 20 bp, synthetic construct
  source 1..20: mol_type = other DNA
cacagtgtaagatgcccgtg

SEQ ID NO: 154 - DNA, 20 bp, synthetic construct
  source 1..20: mol_type = other DNA
tcccatactgacgtcagcat

SEQ ID NO: 155 - DNA, 20 bp, synthetic construct
  source 1..20: mol_type = other DNA
ctcacagtgtaagatgcccg

SEQ ID NO: 156 - DNA, 20 bp, synthetic construct
  source 1..20: mol_type = other DNA
accaatgctgacgtcagtat

SEQ ID NO: 157 - DNA, 20 bp, synthetic construct
  source 1..20: mol_type = other DNA
tcacagtgtaagatgcccgt

SEQ ID NO: 158 - DNA, 20 bp, synthetic construct
  source 1..20: mol_type = other DNA
gagcagtcgacactgagagg

SEQ ID NO: 159 - DNA, 20 bp, synthetic construct
  source 1..20: mol_type = other DNA
ccaatccgattggctgaagg

SEQ ID NO: 160 - DNA, 20 bp, synthetic construct
  source 1..20: mol_type = other DNA
cgtcagtatgggagccagtg

SEQ ID NO: 161 - DNA, 20 bp, synthetic construct
  source 1..20: mol_type = other DNA
caaagagacaccaatccgat

SEQ ID NO: 162 - DNA, 20 bp, synthetic construct
  source 1..20: mol_type = other DNA
accaatccgattggctgaag

SEQ ID NO: 163 - DNA, 20 bp, synthetic construct
  source 1..20: mol_type = other DNA
gcccagagccacacccccac

SEQ ID NO: 164 - DNA, 20 bp, synthetic construct
  source 1..20: mol_type = other DNA
ggcccagagccacaccccca

SEQ ID NO: 165 - DNA, 20 bp, synthetic construct
  source 1..20: mol_type = other DNA
tcttacactgtgagtagctg

SEQ ID NO: 166 - DNA, 20 bp, synthetic construct
  source 1..20: mol_type = other DNA
gaggacggggcggtgggcgg

SEQ ID NO: 167 - DNA, 20 bp, synthetic construct
  source 1..20: mol_type = other DNA
gacggggcgggggtgctggg

SEQ ID NO: 168 - DNA, 20 bp, synthetic construct
  source 1..20: mol_type = other DNA
aggacggggcggtgggcggg

SEQ ID NO: 169 - DNA, 20 bp, synthetic construct
  source 1..20: mol_type = other DNA
ggggggctgggaggaggacg

SEQ ID NO: 170 - DNA, 20 bp, synthetic construct
  source 1..20: mol_type = other DNA
ggggtgctgggaggcgggcg

SEQ ID NO: 171 - DNA, 20 bp, synthetic construct
  source 1..20: mol_type = other DNA
ggggggcgctgggaggaggg

SEQ ID NO: 172 - DNA, 20 bp, synthetic construct
  source 1..20: mol_type = other DNA
cggaggcggggggggctggg

SEQ ID NO: 173 - DNA, 20 bp, synthetic construct
  source 1..20: mol_type = other DNA
tgggaggagggcggggcggg

SEQ ID NO: 174 - DNA, 20 bp, synthetic construct
  source 1..20: mol_type = other DNA
aggcggggggggctgggagg

SEQ ID NO: 175 - DNA, 20 bp, synthetic construct
  source 1..20: mol_type = other DNA
gctgggaggagggcggggcg

SEQ ID NO: 176 - DNA, 20 bp, synthetic construct
  source 1..20: mol_type = other DNA
gggcggaggcggggggggct

SEQ ID NO: 177 - DNA, 20 bp, synthetic construct
  source 1..20: mol_type = other DNA
ggctgggaggagggcggggc

SEQ ID NO: 178 - DNA, 20 bp, synthetic construct
  source 1..20: mol_type = other DNA
gggcggggcgggggggggct

SEQ ID NO: 179 - DNA, 20 bp, synthetic construct
  source 1..20: mol_type = other DNA
gcggggcggggggcggaggc

SEQ ID NO: 180 - DNA, 20 bp, synthetic construct
  source 1..20: mol_type = other DNA
ggggcggaggcggggggggc

SEQ ID NO: 181 - DNA, 20 bp, synthetic construct
  source 1..20: mol_type = other DNA
ggattcgctcaccctctgta

SEQ ID NO: 182 - DNA, 20 bp, synthetic construct
  source 1..20: mol_type = other DNA
agacctagaacctcgttgct

SEQ ID NO: 183 - DNA, 20 bp, synthetic construct
  source 1..20: mol_type = other DNA
cttaattacggattgagcag

SEQ ID NO: 184 - DNA, 20 bp, synthetic construct
  source 1..20: mol_type = other DNA
cgtgggcggggccttacaga

SEQ ID NO: 185 - DNA, 20 bp, synthetic construct
  source 1..20: mol_type = other DNA
acgtgggcggggccttacag

SEQ ID NO: 186 - DNA, 20 bp, synthetic construct
  source 1..20: mol_type = other DNA
aattacggattgagcagggg

SEQ ID NO: 187 - DNA, 20 bp, synthetic construct
  source 1..20: mol_type = other DNA
ggtgagcacacagggagaaa

SEQ ID NO: 188 - DNA, 20 bp, synthetic construct
  source 1..20: mol_type = other DNA
ggggctcaggtgagcacaca

SEQ ID NO: 189 - DNA, 20 bp, synthetic construct
  source 1..20: mol_type = other DNA
cagggagaaagggacgtggg

SEQ ID NO: 190 - DNA, 20 bp, synthetic construct
  source 1..20: mol_type = other DNA
acacagggagaaagggacgt

SEQ ID NO: 191 - DNA, 20 bp, synthetic construct
  source 1..20: mol_type = other DNA
ttacggattgagcaggggag

SEQ ID NO: 192 - DNA, 20 bp, synthetic construct
  source 1..20: mol_type = other DNA
cacacagggagaaagggacg

SEQ ID NO: 193 - DNA, 20 bp, synthetic construct
  source 1..20: mol_type = other DNA
tggggctcaggtgagcacac

SEQ ID NO: 194 - DNA, 20 bp, synthetic construct
  source 1..20: mol_type = other DNA
attacggattgagcagggga

SEQ ID NO: 195 - DNA, 20 bp, synthetic construct
  source 1..20: mol_type = other DNA
gagcaggggaggggccggtg

SEQ ID NO: 196 - DNA, 20 bp, synthetic construct
  source 1..20: mol_type = other DNA
aaggaccactgtgactggct

SEQ ID NO: 197 - DNA, 20 bp, synthetic construct
  source 1..20: mol_type = other DNA
cttgccccggacccaccatg

SEQ ID NO: 198 - DNA, 20 bp, synthetic construct
  source 1..20: mol_type = other DNA
ggattcccttatcctcaatg

SEQ ID NO: 199 - DNA, 20 bp, synthetic construct
  source 1..20: mol_type = other DNA
gtggggttcagttgaagatg

SEQ ID NO: 200 - DNA, 20 bp, synthetic construct
  source 1..20: mol_type = other DNA
ttgtccccatggtgggtccg

SEQ ID NO: 201 - DNA, 20 bp, synthetic construct
  source 1..20: mol_type = other DNA
gggagcccagggagcatgcg

SEQ ID NO: 202 - DNA, 20 bp, synthetic construct
  source 1..20: mol_type = other DNA
gtcttcccagccagtcacag

SEQ ID NO: 203 - DNA, 20 bp, synthetic construct
  source 1..20: mol_type = other DNA
cagggagcatgcgcggctgt

SEQ ID NO: 204 - DNA, 20 bp, synthetic construct
  source 1..20: mol_type = other DNA
gggacaaggaccactgtgac

SEQ ID NO: 205 - DNA, 20 bp, synthetic construct
  source 1..20: mol_type = other DNA
ccacagccgcgcatgctccc

SEQ ID NO: 206 - DNA, 20 bp, synthetic construct
  source 1..20: mol_type = other DNA
ctccatgcccatcctcattg

SEQ ID NO: 207 - DNA, 20 bp, synthetic construct
  source 1..20: mol_type = other DNA
tcttgccccggacccaccat

SEQ ID NO: 208 - DNA, 20 bp, synthetic construct
  source 1..20: mol_type = other DNA
ggtgggtccggggcaagaga

SEQ ID NO: 209 - DNA, 20 bp, synthetic construct
  source 1..20: mol_type = other DNA
gcatgcgcggctgtgggctg

SEQ ID NO: 210 - DNA, 20 bp, synthetic construct
  source 1..20: mol_type = other DNA
cccttatcctcaatgaggat

SEQ ID NO: 211 - DNA, 20 bp, synthetic construct
  source 1..20: mol_type = other DNA
acatggacaagctccgcccg

SEQ ID NO: 212 - DNA, 20 bp, synthetic construct
  source 1..20: mol_type = other DNA
cccctagagcgcgtcgcgag

SEQ ID NO: 213 - DNA, 20 bp, synthetic construct
  source 1..20: mol_type = other DNA
gggaactggcaagaaagggc

SEQ ID NO: 214 - DNA, 20 bp, synthetic construct
  source 1..20: mol_type = other DNA
gcccctagagcgcgtcgcga

SEQ ID NO: 215 - DNA, 20 bp, synthetic construct
  source 1..20: mol_type = other DNA
cgcgcccggagtgtggacgg

SEQ ID NO: 216 - DNA, 20 bp, synthetic construct
  source 1..20: mol_type = other DNA
gaggccacacccactcaggc

SEQ ID NO: 217 - DNA, 20 bp, synthetic construct
  source 1..20: mol_type = other DNA
ggcggaggccacacccactc

SEQ ID NO: 218 - DNA, 20 bp, synthetic construct
  source 1..20: mol_type = other DNA
cgcccgcggccggcctgagt

SEQ ID NO: 219 - DNA, 20 bp, synthetic construct
  source 1..20: mol_type = other DNA
ggaactggcaagaaagggcg

SEQ ID NO: 220 - DNA, 20 bp, synthetic construct
  source 1..20: mol_type = other DNA
ctcgcgacgcgctctagggg

SEQ ID NO: 221 - DNA, 20 bp, synthetic construct
  source 1..20: mol_type = other DNA
agggaactggcaagaaaggg

SEQ ID NO: 222 - DNA, 20 bp, synthetic construct
  source 1..20: mol_type = other DNA
cccctcgcgacgcgctctag

SEQ ID NO: 223 - DNA, 20 bp, synthetic construct
  source 1..20: mol_type = other DNA
cgcccctagagcgcgtcgcg

SEQ ID NO: 224 - DNA, 20 bp, synthetic construct
  source 1..20: mol_type = other DNA
gcgcgtcgcgaggggcgcga

SEQ ID NO: 225 - DNA, 20 bp, synthetic construct
  source 1..20: mol_type = other DNA
aagaaagggcggggagcgag

SEQ ID NO: 226 - DNA, 20 bp, synthetic construct
  source 1..20: mol_type = other DNA
tggaactcgaacgctgacgt

SEQ ID NO: 227 - DNA, 20 bp, synthetic construct
  source 1..20: mol_type = other DNA
gagctgggctgattcattcg

SEQ ID NO: 228 - DNA, 20 bp, synthetic construct
  source 1..20: mol_type = other DNA
gctgcctcgcgcctgattgg

SEQ ID NO: 229 - DNA, 20 bp, synthetic construct
  source 1..20: mol_type = other DNA
agctgccaccggccttaaag

SEQ ID NO: 230 - DNA, 20 bp, synthetic construct
  source 1..20: mol_type = other DNA
aacccaggggtggtgcgctg

SEQ ID NO: 231 - DNA, 20 bp, synthetic construct
  source 1..20: mol_type = other DNA
ggtggcagctgcggttccgg

SEQ ID NO: 232 - DNA, 20 bp, synthetic construct
  source 1..20: mol_type = other DNA
ctgaagacggaccccgcccc

SEQ ID NO: 233 - DNA, 20 bp, synthetic construct
  source 1..20: mol_type = other DNA
ggacccgccaatcaggcgcg

SEQ ID NO: 234 - DNA, 20 bp, synthetic construct
  source 1..20: mol_type = other DNA
gctgacgttggctcctgagc

SEQ ID NO: 235 - DNA, 20 bp, synthetic construct
  source 1..20: mol_type = other DNA
gcctgattggcgggtcctcg

SEQ ID NO: 236 - DNA, 20 bp, synthetic construct
  source 1..20: mol_type = other DNA
cggtggcagctgcggttccg

SEQ ID NO: 237 - DNA, 20 bp, synthetic construct
  source 1..20: mol_type = other DNA
cccggaaccgcagctgccac

SEQ ID NO: 238 - DNA, 20 bp, synthetic construct
  source 1..20: mol_type = other DNA
tggcatcgcccctttaaggc

SEQ ID NO: 239 - DNA, 20 bp, synthetic construct
  source 1..20: mol_type = other DNA
gcaggacttgggctggagct

SEQ ID NO: 240 - DNA, 20 bp, synthetic construct
  source 1..20: mol_type = other DNA
gtcttcagcaggacttgggc

SEQ ID NO: 241 - DNA, 20 bp, synthetic construct
  source 1..20: mol_type = other DNA
gtgctcgcggctataagggg

SEQ ID NO: 242 - DNA, 20 bp, synthetic construct
  source 1..20: mol_type = other DNA
tccccaaaccccgttgcccg

SEQ ID NO: 243 - DNA, 20 bp, synthetic construct
  source 1..20: mol_type = other DNA
ggcgtgctcgcggctataag

SEQ ID NO: 244 - DNA, 20 bp, synthetic construct
  source 1..20: mol_type = other DNA
cgcgtgcgcgtaccctcctg

SEQ ID NO: 245 - DNA, 20 bp, synthetic construct
  source 1..20: mol_type = other DNA
gccgcgagcacgccccagga

SEQ ID NO: 246 - DNA, 20 bp, synthetic construct
  source 1..20: mol_type = other DNA
gtgcgtcccgggcgtgcgtg

SEQ ID NO: 247 - DNA, 20 bp, synthetic construct
  source 1..20: mol_type = other DNA
acggggtttggggattgtcc

SEQ ID NO: 248 - DNA, 20 bp, synthetic construct
  source 1..20: mol_type = other DNA
cacgacgtggcgcacgtccg

SEQ ID NO: 249 - DNA, 20 bp, synthetic construct
  source 1..20: mol_type = other DNA
cgcccgggacgcacacgacg

SEQ ID NO: 250 - DNA, 20 bp, synthetic construct
  source 1..20: mol_type = other DNA
tggaggccgcacgcacgccc

SEQ ID NO: 251 - DNA, 20 bp, synthetic construct
  source 1..20: mol_type = other DNA
gccccaccccgcgggcaacg

SEQ ID NO: 252 - DNA, 20 bp, synthetic construct
  source 1..20: mol_type = other DNA
gcgccacgtcgtgtgcgtcc

SEQ ID NO: 253 - DNA, 20 bp, synthetic construct
  source 1..20: mol_type = other DNA
cccaaaccccgttgcccgcg

SEQ ID NO: 254 - DNA, 20 bp, synthetic construct
  source 1..20: mol_type = other DNA
acgtccgcggccccaccccg

SEQ ID NO: 255 - DNA, 20 bp, synthetic construct
  source 1..20: mol_type = other DNA
cgtccgcggccccaccccgc

SEQ ID NO: 256 - DNA, 20 bp, synthetic construct
  source 1..20: mol_type = other DNA
catcagcattctcctcgcgg

SEQ ID NO: 257 - DNA, 20 bp, synthetic construct
  source 1..20: mol_type = other DNA
gagagtagggaggtgagtcg

SEQ ID NO: 258 - DNA, 20 bp, synthetic construct
  source 1..20: mol_type = other DNA
atcagcattctcctcgcggg

SEQ ID NO: 259 - DNA, 20 bp, synthetic construct
  source 1..20: mol_type = other DNA
aaggagctgcattggatgga

SEQ ID NO: 260 - DNA, 20 bp, synthetic construct
  source 1..20: mol_type = other DNA
tcatcagcattctcctcgcg

SEQ ID NO: 261 - DNA, 20 bp, synthetic construct
  source 1..20: mol_type = other DNA
gaggcaggcaaagagagagt

SEQ ID NO: 262 - DNA, 20 bp, synthetic construct
  source 1..20: mol_type = other DNA
agagtagggaggtgagtcgg

SEQ ID NO: 263 - DNA, 20 bp, synthetic construct
  source 1..20: mol_type = other DNA
gaagaaggagctgcattgga

SEQ ID NO: 264 - DNA, 20 bp, synthetic construct
  source 1..20: mol_type = other DNA
atgagaagaaggagctgcat

SEQ ID NO: 265 - DNA, 20 bp, synthetic construct
  source 1..20: mol_type = other DNA
caggcaaagagagagtaggg

SEQ ID NO: 266 - DNA, 20 bp, synthetic construct
  source 1..20: mol_type = other DNA
gggcgggcaggaggaaggga

SEQ ID NO: 267 - DNA, 20 bp, synthetic construct
  source 1..20: mol_type = other DNA
gagagagtagggaggtgagt

SEQ ID NO: 268 - DNA, 20 bp, synthetic construct
  source 1..20: mol_type = other DNA
aggcaggcaaagagagagta

SEQ ID NO: 269 - DNA, 20 bp, synthetic construct
  source 1..20: mol_type = other DNA
ggagaatgctgatgagaaga

SEQ ID NO: 270 - DNA, 20 bp, synthetic construct
  source 1..20: mol_type = other DNA
aggagggcgggcaggaggaa

SEQ ID NO: 271 - DNA, 20 bp, synthetic construct
  source 1..20: mol_type = other DNA
gcgcacgggcgcgtacacgg

SEQ ID NO: 272 - DNA, 20 bp, synthetic construct
  source 1..20: mol_type = other DNA
cgccgggctcacacccgcca

SEQ ID NO: 273 - DNA, 20 bp, synthetic construct
  source 1..20: mol_type = other DNA
ggaggacggtcacccacctg

SEQ ID NO: 274 - DNA, 20 bp, synthetic construct
  source 1..20: mol_type = other DNA
cccagccacacgccgcgagg

SEQ ID NO: 275 - DNA, 20 bp, synthetic construct
  source 1..20: mol_type = other DNA
ggcagcctcctcgcggcgtg

SEQ ID NO: 276 - DNA, 20 bp, synthetic construct
  source 1..20: mol_type = other DNA
gcgaggaggctgcccccgga

SEQ ID NO: 277 - DNA, 20 bp, synthetic construct
  source 1..20: mol_type = other DNA
acccccagccacacgccgcg

SEQ ID NO: 278 - DNA, 20 bp, synthetic construct
  source 1..20: mol_type = other DNA
tcctcgcggcgtgtggctgg

SEQ ID NO: 279 - DNA, 20 bp, synthetic construct
  source 1..20: mol_type = other DNA
ctccgggggcagcctcctcg

SEQ ID NO: 280 - DNA, 20 bp, synthetic construct
  source 1..20: mol_type = other DNA
cgcgaggaggctgcccccgg

SEQ ID NO: 281 - DNA, 20 bp, synthetic construct
  source 1..20: mol_type = other DNA
ctcctcgcggcgtgtggctg

SEQ ID NO: 282 - DNA, 20 bp, synthetic construct
  source 1..20: mol_type = other DNA
ctccccctccttccctccgg

SEQ ID NO: 283 - DNA, 20 bp, synthetic construct
  source 1..20: mol_type = other DNA
cgcgcgcggcagccggcaga

SEQ ID NO: 284 - DNA, 20 bp, synthetic construct
  source 1..20: mol_type = other DNA
gctgcccccggagggaagga

SEQ ID NO: 285 - DNA, 20 bp, synthetic construct
  source 1..20: mol_type = other DNA
cctccccctccttccctccg

SEQ ID NO: 286 - DNA, 20 bp, synthetic construct
  source 1..20: mol_type = other DNA
ttagtagagaatctcctcca

SEQ ID NO: 287 - DNA, 20 bp, synthetic construct
  source 1..20: mol_type = other DNA
tcttcaccttacccctaagg

SEQ ID NO: 288 - DNA, 20 bp, synthetic construct
  source 1..20: mol_type = other DNA
aggaagcaggcagtcactgg

SEQ ID NO: 289 - DNA, 20 bp, synthetic construct
  source 1..20: mol_type = other DNA
tcaccttacccctaaggagg

SEQ ID NO: 290 - DNA, 20 bp, synthetic construct
  source 1..20: mol_type = other DNA
accttacccctaaggaggag

SEQ ID NO: 291 - DNA, 20 bp, synthetic construct
  source 1..20: mol_type = other DNA
ttaggggtaaggtgaagagg

SEQ ID NO: 292 - DNA, 20 bp, synthetic construct
  source 1..20: mol_type = other DNA
gctcaaatgtccttagagtg

SEQ ID NO: 293 - DNA, 20 bp, synthetic construct
  source 1..20: mol_type = other DNA
ggtccagtgaatatccttgg

SEQ ID NO: 294 - DNA, 20 bp, synthetic construct
  source 1..20: mol_type = other DNA
ggaggggtgatgtcatggat

SEQ ID NO: 295 - DNA, 20 bp, synthetic construct
  source 1..20: mol_type = other DNA
aaggaggaggggtgatgtca

SEQ ID NO: 296 - DNA, 20 bp, synthetic construct
  source 1..20: mol_type = other DNA
cttaggggtaaggtgaagag

SEQ ID NO: 297 - DNA, 20 bp, synthetic construct
  source 1..20: mol_type = other DNA
aagaggaagcaggcagtcac

SEQ ID NO: 298 - DNA, 20 bp, synthetic construct
  source 1..20: mol_type = other DNA
caccttacccctaaggagga

SEQ ID NO: 299 - DNA, 20 bp, synthetic construct
  source 1..20: mol_type = other DNA
acatcacccctcctccttag

SEQ ID NO: 300 - DNA, 20 bp, synthetic construct
  source 1..20: mol_type = other DNA
tttgagcttaaagaggaagc

SEQ ID NO: 301 - DNA, 20 bp, synthetic construct
  source 1..20: mol_type = other DNA
gtggcggttcacaccgagga

SEQ ID NO: 302 - DNA, 20 bp, synthetic construct
  source 1..20: mol_type = other DNA
gggccagacccggcagaagg

SEQ ID NO: 303 - DNA, 20 bp, synthetic construct
  source 1..20: mol_type = other DNA
gcggcccacttaaggacggg

SEQ ID NO: 304 - DNA, 20 bp, synthetic construct
  source 1..20: mol_type = other DNA
cgccgcggcccacttaagga

SEQ ID NO: 305 - DNA, 20 bp, synthetic construct
  source 1..20: mol_type = other DNA
gccgcggcccacttaaggac

SEQ ID NO: 306 - DNA, 20 bp, synthetic construct
  source 1..20: mol_type = other DNA
cggcccacttaaggacggga

SEQ ID NO: 307 - DNA, 20 bp, synthetic construct
  source 1..20: mol_type = other DNA
gcgctgtcggttccgaggtg

SEQ ID NO: 308 - DNA, 20 bp, synthetic construct
  source 1..20: mol_type = other DNA
cggaaccgacagcgccgccg

SEQ ID NO: 309 - DNA, 20 bp, synthetic construct
  source 1..20: mol_type = other DNA
cggcggcgctgtcggttccg

SEQ ID NO: 310 - DNA, 20 bp, synthetic construct
  source 1..20: mol_type = other DNA
cgtccttaagtgggccgcgg

SEQ ID NO: 311 - DNA, 20 bp, synthetic construct
  source 1..20: mol_type = other DNA
cggcgctgtcggttccgagg

SEQ ID NO: 312 - DNA, 20 bp, synthetic construct
  source 1..20: mol_type = other DNA
cgggtctggccccagccgcg

SEQ ID NO: 313 - DNA, 20 bp, synthetic construct
  source 1..20: mol_type = other DNA
ggttccgaggtggggccccg

SEQ ID NO: 314 - DNA, 20 bp, synthetic construct
  source 1..20: mol_type = other DNA
gtgggccgcggcggcgctgt

SEQ ID NO: 315 - DNA, 20 bp, synthetic construct
  source 1..20: mol_type = other DNA
acgggagggcgggcctggga

SEQ ID NO: 316 - DNA, 20 bp, synthetic construct
  source 1..20: mol_type = other DNA
gacctttccgtcccagaagg

SEQ ID NO: 317 - DNA, 20 bp, synthetic construct
  source 1..20: mol_type = other DNA
aggtcagtgttgccctaaca

SEQ ID NO: 318 - DNA, 20 bp, synthetic construct
  source 1..20: mol_type = other DNA
acctttccgtcccagaagga

SEQ ID NO: 319 - DNA, 20 bp, synthetic construct
  source 1..20: mol_type = other DNA
atcctgccctccttctggga

SEQ ID NO: 320 - DNA, 20 bp, synthetic construct
  source 1..20: mol_type = other DNA
gagcagcttctgagatccaa

SEQ ID NO: 321 - DNA, 20 bp, synthetic construct
  source 1..20: mol_type = other DNA
tcgcgcccgtgccgcagacc

SEQ ID NO: 322 - DNA, 20 bp, synthetic construct
  source 1..20: mol_type = other DNA
cgtgccgcagacccgggcag

SEQ ID NO: 323 - DNA, 20 bp, synthetic construct
  source 1..20: mol_type = other DNA
cagacccgggcagtggctgg

SEQ ID NO: 324 - DNA, 20 bp, synthetic construct
  source 1..20: mol_type = other DNA
actgcccgggtctgcggcac

SEQ ID NO: 325 - DNA, 20 bp, synthetic construct
  source 1..20: mol_type = other DNA
ggagggcaggattggagaag

SEQ ID NO: 326 - DNA, 20 bp, synthetic construct
  source 1..20: mol_type = other DNA
gagggcaggattggagaagg

SEQ ID NO: 327 - DNA, 20 bp, synthetic construct
  source 1..20: mol_type = other DNA
ttcttcaaagcgggaaggag

SEQ ID NO: 328 - DNA, 20 bp, synthetic construct
  source 1..20: mol_type = other DNA
catgcctccagccactgccc

SEQ ID NO: 329 - DNA, 20 bp, synthetic construct
  source 1..20: mol_type = other DNA
aagaaggctgggctggctgg

SEQ ID NO: 330 - DNA, 20 bp, synthetic construct
  source 1..20: mol_type = other DNA
cagcccagccttcttcaaag

SEQ ID NO: 331 - DNA, 20 bp, synthetic construct
  source 1..20: mol_type = other DNA
gcggcggttggagcctggcg

SEQ ID NO: 332 - DNA, 20 bp, synthetic construct
  source 1..20: mol_type = other DNA
gaggaaaagagggcgccttg

SEQ ID NO: 333 - DNA, 20 bp, synthetic construct
  source 1..20: mol_type = other DNA
cggcgacgccccctgggtgg

SEQ ID NO: 334 - DNA, 20 bp, synthetic construct
  source 1..20: mol_type = other DNA
gcggagcgccgcggcgacgg

SEQ ID NO: 335 - DNA, 20 bp, synthetic construct
  source 1..20: mol_type = other DNA
cggcggcggttggagcctgg

SEQ ID NO: 336 - DNA, 20 bp, synthetic construct
  source 1..20: mol_type = other DNA
gcccagccggcgcctcgggg

SEQ ID NO: 337 - DNA, 20 bp, synthetic construct
  source 1..20: mol_type = other DNA
ttgcgggccgcggagcgccg

SEQ ID NO: 338 - DNA, 20 bp, synthetic construct
  source 1..20: mol_type = other DNA
gccgtcgccgcggcgctccg

SEQ ID NO: 339 - DNA, 20 bp, synthetic construct
  source 1..20: mol_type = other DNA
gcggcgacgccccctgggtg

SEQ ID NO: 340 - DNA, 20 bp, synthetic construct
  source 1..20: mol_type = other DNA
gccctcccccgccctccccg

SEQ ID NO: 341 - DNA, 20 bp, synthetic construct
  source 1..20: mol_type = other DNA
ccggctgggcgcgcgcgcgg

SEQ ID NO: 342 - DNA, 20 bp, synthetic construct
  source 1..20: mol_type = other DNA
gcctcccgcccccacccagg

SEQ ID NO: 343 - DNA, 20 bp, synthetic construct
  source 1..20: mol_type = other DNA
gagcgccgcggcgacggcgg

SEQ ID NO: 344 - DNA, 20 bp, synthetic construct
  source 1..20: mol_type = other DNA
ggcctcccgcccccacccag

SEQ ID NO: 345 - DNA, 20 bp, synthetic construct
  source 1..20: mol_type = other DNA
cccccggccccggccccgcg

SEQ ID NO: 346 - DNA, 20 bp, synthetic construct
  source 1..20: mol_type = other DNA
aggtgccgtaatggagccaa

SEQ ID NO: 347 - DNA, 20 bp, synthetic construct
  source 1..20: mol_type = other DNA
gccaagggacggcatcctcg

SEQ ID NO: 348 - DNA, 20 bp, synthetic construct
  source 1..20: mol_type = other DNA
gccccaagcttctccactcg

SEQ ID NO: 349 - DNA, 20 bp, synthetic construct
  source 1..20: mol_type = other DNA
cgcctccccacccgcgaagg

SEQ ID NO: 350 - DNA, 20 bp, synthetic construct
  source 1..20: mol_type = other DNA
caggcacagcccggcaccag

SEQ ID NO: 351 - DNA, 20 bp, synthetic construct
  source 1..20: mol_type = other DNA
ccaggcacagcccggcacca

SEQ ID NO: 352 - DNA, 20 bp, synthetic construct
  source 1..20: mol_type = other DNA
gtggagaagcttggggcaga

SEQ ID NO: 353 - DNA, 20 bp, synthetic construct
  source 1..20: mol_type = other DNA
tccaggcacagcccggcacc

SEQ ID NO: 354 - DNA, 20 bp, synthetic construct
  source 1..20: mol_type = other DNA
gagccccgagtggagaagct

SEQ ID NO: 355 - DNA, 20 bp, synthetic construct
  source 1..20: mol_type = other DNA
agaagcttggggcagaggga

SEQ ID NO: 356 - DNA, 20 bp, synthetic construct
  source 1..20: mol_type = other DNA
gccccgagtggagaagcttg

SEQ ID NO: 357 - DNA, 20 bp, synthetic construct
  source 1..20: mol_type = other DNA
gcttggggcagagggacggc

SEQ ID NO: 358 - DNA, 20 bp, synthetic construct
  source 1..20: mol_type = other DNA
ttggggcagagggacggcgg

SEQ ID NO: 359 - DNA, 20 bp, synthetic construct
  source 1..20: mol_type = other DNA
agcttggggcagagggacgg

SEQ ID NO: 360 - DNA, 20 bp, synthetic construct
  source 1..20: mol_type = other DNA
cttggggcagagggacggcg

SEQ ID NO: 361 - DNA, 20 bp, synthetic construct
  source 1..20: mol_type = other DNA
cccgactggtcccattggtg

SEQ ID NO: 362 - DNA, 20 bp, synthetic construct
  source 1..20: mol_type = other DNA
acggcgagcagcgggtcggt

SEQ ID NO: 363 - DNA, 20 bp, synthetic construct
  source 1..20: mol_type = other DNA
agggacggcgagcagcgggt

SEQ ID NO: 364 - DNA, 20 bp, synthetic construct
  source 1..20: mol_type = other DNA
ggcccagggacggcgagcag

SEQ ID NO: 365 - DNA, 20 bp, synthetic construct
  source 1..20: mol_type = other DNA
tgtggagcatggcccggtcc

SEQ ID NO: 366 - DNA, 20 bp, synthetic construct
  source 1..20: mol_type = other DNA
gccctcccgactggtcccat

SEQ ID NO: 367 - DNA, 20 bp, synthetic construct
  source 1..20: mol_type = other DNA
cgggccatgctccacaccaa

SEQ ID NO: 368 - DNA, 20 bp, synthetic construct
  source 1..20: mol_type = other DNA
gcccagggacggcgagcagc

SEQ ID NO: 369 - DNA, 20 bp, synthetic construct
  source 1..20: mol_type = other DNA
cctcggcccagacccggacc

SEQ ID NO: 370 - DNA, 20 bp, synthetic construct
  source 1..20: mol_type = other DNA
cattggtgtggagcatggcc

SEQ ID NO: 371 - DNA, 20 bp, synthetic construct
  source 1..20: mol_type = other DNA
ccggcgccaccaggcagagg

SEQ ID NO: 372 - DNA, 20 bp, synthetic construct
  source 1..20: mol_type = other DNA
gtccgggtctgggccgaggg

SEQ ID NO: 373 - DNA, 20 bp, synthetic construct
  source 1..20: mol_type = other DNA
gcccgccctcctctgcctgg

SEQ ID NO: 374 - DNA, 20 bp, synthetic construct
  source 1..20: mol_type = other DNA
ctcccggcgccaccaggcag

SEQ ID NO: 375 - DNA, 20 bp, synthetic construct
  source 1..20: mol_type = other DNA
gacggcgagcagcgggtcgg

SEQ ID NO: 376 - DNA, 20 bp, synthetic construct
  source 1..20: mol_type = other DNA
ccacagcccttaaggcacga

SEQ ID NO: 377 - DNA, 20 bp, synthetic construct
  source 1..20: mol_type = other DNA
gggcaaggcgggataaggag

SEQ ID NO: 378 - DNA, 20 bp, synthetic construct
  source 1..20: mol_type = other DNA
accacagcccttaaggcacg

SEQ ID NO: 379 - DNA, 20 bp, synthetic construct
  source 1..20: mol_type = other DNA
ggattccaaagtcgttaatg

SEQ ID NO: 380 - DNA, 20 bp, synthetic construct
  source 1..20: mol_type = other DNA
ctgggaaggagcataggaca

SEQ ID NO: 381 - DNA, 20 bp, synthetic construct
  source 1..20: mol_type = other DNA
aaagtcgttaatggggacct

SEQ ID NO: 382 - DNA, 20 bp, synthetic construct
  source 1..20: mol_type = other DNA
gaacccacacacagagagga

SEQ ID NO: 383 - DNA, 20 bp, synthetic construct
  source 1..20: mol_type = other DNA
ggtatttgagtcctggtggg

SEQ ID NO: 384 - DNA, 20 bp, synthetic construct
  source 1..20: mol_type = other DNA
gggggaacccacacacagag

SEQ ID NO: 385 - DNA, 20 bp, synthetic construct
  source 1..20: mol_type = other DNA
ggggacctgggaaggagcat

SEQ ID NO: 386 - DNA, 20 bp, synthetic construct
  source 1..20: mol_type = other DNA
agggcaaggcgggataagga

SEQ ID NO: 387 - DNA, 20 bp, synthetic construct
  source 1..20: mol_type = other DNA
gagcataggacagggcaagg

SEQ ID NO: 388 - DNA, 20 bp, synthetic construct
  source 1..20: mol_type = other DNA
aaggagcataggacagggca

SEQ ID NO: 389 - DNA, 20 bp, synthetic construct
  source 1..20: mol_type = other DNA
cctgtcctatgctccttccc

SEQ ID NO: 390 - DNA, 20 bp, synthetic construct
  source 1..20: mol_type = other DNA
tcgttaatggggacctggga

SEQ ID NO: 391 - DNA, 20 bp, synthetic construct
  source 1..20: mol_type = other DNA
agtgagctcgcaccagaggg

SEQ ID NO: 392 - DNA, 20 bp, synthetic construct
  source 1..20: mol_type = other DNA
aatggcaagcggataaacag

SEQ ID NO: 393 - DNA, 20 bp, synthetic construct
  source 1..20: mol_type = other DNA
gccagtgagctcgcaccaga

SEQ ID NO: 394 - DNA, 20 bp, synthetic construct
  source 1..20: mol_type = other DNA
gcggagcttcgaggtggcga

SEQ ID NO: 395 - DNA, 20 bp, synthetic construct
  source 1..20: mol_type = other DNA
ggcaagcggataaacagagg

SEQ ID NO: 396 - DNA, 20 bp, synthetic construct
  source 1..20: mol_type = other DNA
tatctcgcctgactgtcccg

SEQ ID NO: 397 - DNA, 20 bp, synthetic construct
  source 1..20: mol_type = other DNA
agccagtgagctcgcaccag

SEQ ID NO: 398 - DNA, 20 bp, synthetic construct
  source 1..20: mol_type = other DNA
gtgagctcgcaccagagggt

SEQ ID NO: 399 - DNA, 20 bp, synthetic construct
  source 1..20: mol_type = other DNA
accctctggtgcgagctcac

SEQ ID NO: 400 - DNA, 20 bp, synthetic construct
  source 1..20: mol_type = other DNA
cgcctgactgtcccgtggag

SEQ ID NO: 401 - DNA, 20 bp, synthetic construct
  source 1..20: mol_type = other DNA
ctcgcctgactgtcccgtgg

SEQ ID NO: 402 - DNA, 20 bp, synthetic construct
  source 1..20: mol_type = other DNA
tcgcctgactgtcccgtgga

SEQ ID NO: 403 - DNA, 20 bp, synthetic construct
  source 1..20: mol_type = other DNA
ctgactgtcccgtggagggg

SEQ ID NO: 404 - DNA, 20 bp, synthetic construct
  source 1..20: mol_type = other DNA
gtggaagaggactggaggcg

SEQ ID NO: 405 - DNA, 20 bp, synthetic construct
  source 1..20: mol_type = other DNA
gcgaggctccgcccctccac

SEQ ID NO: 406 - DNA, 20 bp, synthetic construct
  source 1..20: mol_type = other DNA
cacagacccggcgcaaacgg

SEQ ID NO: 407 - DNA, 20 bp, synthetic construct
  source 1..20: mol_type = other DNA
tgcacacgccccctcgcctg

SEQ ID NO: 408 - DNA, 20 bp, synthetic construct
  source 1..20: mol_type = other DNA
gcgaggcgtcgtggcagctg

SEQ ID NO: 409 - DNA, 20 bp, synthetic construct
  source 1..20: mol_type = other DNA
agggtgagcacgtcctcaga

SEQ ID NO: 410 - DNA, 20 bp, synthetic construct
  source 1..20: mol_type = other DNA
gagggtgagcacgtcctcag

SEQ ID NO: 411 - DNA, 20 bp, synthetic construct
  source 1..20: mol_type = other DNA
ctcagagggcagacccagcg

SEQ ID NO: 412 - DNA, 20 bp, synthetic construct
  source 1..20: mol_type = other DNA
gcagacccagcgaggcgtcg

SEQ ID NO: 413 - DNA, 20 bp, synthetic construct
  source 1..20: mol_type = other DNA
gggcggggcctcaggcgagg

SEQ ID NO: 414 - DNA, 20 bp, synthetic construct
  source 1..20: mol_type = other DNA
gcgtgtgcaagaggcggagc

SEQ ID NO: 415 - DNA, 20 bp, synthetic construct
  source 1..20: mol_type = other DNA
ggcgagggggcgtgtgcaag

SEQ ID NO: 416 - DNA, 20 bp, synthetic construct
  source 1..20: mol_type = other DNA
gagggggcgtgtgcaagagg

SEQ ID NO: 417 - DNA, 20 bp, synthetic construct
  source 1..20: mol_type = other DNA
ggggcggggcctcaggcgag

SEQ ID NO: 418 - DNA, 20 bp, synthetic construct
  source 1..20: mol_type = other DNA
gcgggtctcggcgccccggg

SEQ ID NO: 419 - DNA, 20 bp, synthetic construct
  source 1..20: mol_type = other DNA
ggcgggtctcggcgccccgg

SEQ ID NO: 420 - DNA, 20 bp, synthetic construct
  source 1..20: mol_type = other DNA
ctcgctgggtctgccctctg

SEQ ID NO: 421 - DNA, 20 bp, synthetic construct
  source 1..20: mol_type = other DNA
ggacagtacaacttaaccag

SEQ ID NO: 422 - DNA, 20 bp, synthetic construct
  source 1..20: mol_type = other DNA
gcgccgcagcagatgagcaa

SEQ ID NO: 423 - DNA, 20 bp, synthetic construct
  source 1..20: mol_type = other DNA
ttgccgttgctcatctgctg

SEQ ID NO: 424 - DNA, 20 bp, synthetic construct
  source 1..20: mol_type = other DNA
ccgaacctgacccagactca

SEQ ID NO: 425 - DNA, 20 bp, synthetic construct
  source 1..20: mol_type = other DNA
tcaggccaatgtctttcctc

SEQ ID NO: 426 - DNA, 20 bp, synthetic construct
  source 1..20: mol_type = other DNA
tatgaaaacaccttgagtct

SEQ ID NO: 427 - DNA, 20 bp, synthetic construct
  source 1..20: mol_type = other DNA
atcctaaagttatacactac

SEQ ID NO: 428 - DNA, 20 bp, synthetic construct
  source 1..20: mol_type = other DNA
ttgctcatctgctgcggcgc

SEQ ID NO: 429 - DNA, 20 bp, synthetic construct
  source 1..20: mol_type = other DNA
ccttccaagaaccaaagcgc

SEQ ID NO: 430 - DNA, 20 bp, synthetic construct
  source 1..20: mol_type = other DNA
atgagcaacggcaagcgccg

SEQ ID NO: 431 - DNA, 20 bp, synthetic construct
  source 1..20: mol_type = other DNA
ttatgaaaacaccttgagtc

SEQ ID NO: 432 - DNA, 20 bp, synthetic construct
  source 1..20: mol_type = other DNA
cttaaccagaggaaagacat

SEQ ID NO: 433 - DNA, 20 bp, synthetic construct
  source 1..20: mol_type = other DNA
gtcctgtagtgtataacttt

SEQ ID NO: 434 - DNA, 20 bp, synthetic construct
  source 1..20: mol_type = other DNA
ttcgcttagctgtagtttag

SEQ ID NO: 435 - DNA, 20 bp, synthetic construct
  source 1..20: mol_type = other DNA
gccgaggctcaaaattcttc

SEQ ID NO: 436 - DNA, 20 bp, synthetic construct
  source 1..20: mol_type = other DNA
ggaaaccggccgcccaattg

SEQ ID NO: 437 - DNA, 20 bp, synthetic construct
  source 1..20: mol_type = other DNA
tcagcgccgcccgaagactg

SEQ ID NO: 438 - DNA, 20 bp, synthetic construct
  source 1..20: mol_type = other DNA
tctgagcctcagtcttcggg

SEQ ID NO: 439 - DNA, 20 bp, synthetic construct
  source 1..20: mol_type = other DNA
cggcggcgggcgacaaccca

SEQ ID NO: 440 - DNA, 20 bp, synthetic construct
  source 1..20: mol_type = other DNA
gcggccggtttccaattgga

SEQ ID NO: 441 - DNA, 20 bp, synthetic construct
  source 1..20: mol_type = other DNA
aagcccttccaattggaaac

SEQ ID NO: 442 - DNA, 20 bp, synthetic construct
  source 1..20: mol_type = other DNA
gcctccatcctgcccgccaa

SEQ ID NO: 443 - DNA, 20 bp, synthetic construct
  source 1..20: mol_type = other DNA
cgggcggcgctgaccattgg

SEQ ID NO: 444 - DNA, 20 bp, synthetic construct
  source 1..20: mol_type = other DNA
aaggctgcaacgcgacgccg

SEQ ID NO: 445 - DNA, 20 bp, synthetic construct
  source 1..20: mol_type = other DNA
accattggcgggcaggatgg

SEQ ID NO: 446 - DNA, 20 bp, synthetic construct
  source 1..20: mol_type = other DNA
ccggggcgcggcttcagacg

SEQ ID NO: 447 - DNA, 20 bp, synthetic construct
  source 1..20: mol_type = other DNA
acgccccagccccaattggg

SEQ ID NO: 448 - DNA, 20 bp, synthetic construct
  source 1..20: mol_type = other DNA
ctaaggctgcaacgcgacgc

SEQ ID NO: 449 - DNA, 20 bp, synthetic construct
  source 1..20: mol_type = other DNA
gggcggcgctgaccattggc

SEQ ID NO: 450 - DNA, 20 bp, synthetic construct
  source 1..20: mol_type = other DNA
attggggctggggcgtgagt

SEQ ID NO: 451 - DNA, 20 bp, synthetic construct
  source 1..20: mol_type = other DNA
gtggctccctatatacgccc

SEQ ID NO: 452 - DNA, 20 bp, synthetic construct
  source 1..20: mol_type = other DNA
cttcctgggagactagccca

SEQ ID NO: 453 - DNA, 20 bp, synthetic construct
  source 1..20: mol_type = other DNA
gctgagccggcagaccaggc

SEQ ID NO: 454 - DNA, 20 bp, synthetic construct
  source 1..20: mol_type = other DNA
ttcaggtctataaatcatgg

SEQ ID NO: 455 - DNA, 20 bp, synthetic construct
  source 1..20: mol_type = other DNA
gggtggacaagaggctgagc

SEQ ID NO: 456 - DNA, 20 bp, synthetic construct
  source 1..20: mol_type = other DNA
tgggagactagcccaaggag

SEQ ID NO: 457 - DNA, 20 bp, synthetic construct
  source 1..20: mol_type = other DNA
tttcaggtctataaatcatg

SEQ ID NO: 458 - DNA, 20 bp, synthetic construct
  source 1..20: mol_type = other DNA
cttgggctagtctcccagga

SEQ ID NO: 459 - DNA, 20 bp, synthetic construct
  source 1..20: mol_type = other DNA
ggctagtctcccaggaagga

SEQ ID NO: 460 - DNA, 20 bp, synthetic construct
  source 1..20: mol_type = other DNA
agaggctgagccggcagacc

SEQ ID NO: 461 - DNA, 20 bp, synthetic construct
  source 1..20: mol_type = other DNA
acggcagtggggtggacaag

SEQ ID NO: 462 - DNA, 20 bp, synthetic construct
  source 1..20: mol_type = other DNA
gggctagtctcccaggaagg

SEQ ID NO: 463 - DNA, 20 bp, synthetic construct
  source 1..20: mol_type = other DNA
ctgggagactagcccaagga

SEQ ID NO: 464 - DNA, 20 bp, synthetic construct
  source 1..20: mol_type = other DNA
tagtctcccaggaaggaggg

SEQ ID NO: 465 - DNA, 20 bp, synthetic construct
  source 1..20: mol_type = other DNA
tttggggcacggcagtgggg

SEQ ID NO: 466 - DNA, 20 bp, synthetic construct
  source 1..20: mol_type = other DNA
gtggtgcggttcgcagaagg

SEQ ID NO: 467 - DNA, 20 bp, synthetic construct
  source 1..20: mol_type = other DNA
accgcaccacccagatcccg

SEQ ID NO: 468 - DNA, 20 bp, synthetic construct
  source 1..20: mol_type = other DNA
gctgagcgaagacgggttcg

SEQ ID NO: 469 - DNA, 20 bp, synthetic construct
  source 1..20: mol_type = other DNA
cgggttcgcggacgtaagag

SEQ ID NO: 470 - DNA, 20 bp, synthetic construct
  source 1..20: mol_type = other DNA
aaccgcaccacccagatccc

SEQ ID NO: 471 - DNA, 20 bp, synthetic construct
  source 1..20: mol_type = other DNA
gacgggttcgcggacgtaag

SEQ ID NO: 472 - DNA, 20 bp, synthetic construct
  source 1..20: mol_type = other DNA
cacgagcgcaaagctgcgag

SEQ ID NO: 473 - DNA, 20 bp, synthetic construct
  source 1..20: mol_type = other DNA
gaaccgcaccacccagatcc

SEQ ID NO: 474 - DNA, 20 bp, synthetic construct
  source 1..20: mol_type = other DNA
tgggtggtgcggttcgcaga

SEQ ID NO: 475 - DNA, 20 bp, synthetic construct
  source 1..20: mol_type = other DNA
cagatcccggggtgcgcgga

SEQ ID NO: 476 - DNA, 20 bp, synthetic construct
  source 1..20: mol_type = other DNA
cgcgcaccccgggatctggg

SEQ ID NO: 477 - DNA, 20 bp, synthetic construct
  source 1..20: mol_type = other DNA
gcgagaggctgagcgaagac

SEQ ID NO: 478 - DNA, 20 bp, synthetic construct
  source 1..20: mol_type = other DNA
gtgcggttcgcagaaggagg

SEQ ID NO: 479 - DNA, 20 bp, synthetic construct
  source 1..20: mol_type = other DNA
tgcgagaggctgagcgaaga

SEQ ID NO: 480 - DNA, 20 bp, synthetic construct
  source 1..20: mol_type = other DNA
accccgggatctgggtggtg

SEQ ID NO: 481 - DNA, 20 bp, synthetic construct
  source 1..20: mol_type = other DNA
cactcccgccacctctcgcg

SEQ ID NO: 482 - DNA, 20 bp, synthetic construct
  source 1..20: mol_type = other DNA
cggtgcccgctccgcagagg

SEQ ID NO: 483 - DNA, 20 bp, synthetic construct
  source 1..20: mol_type = other DNA
gcggccacgcgagaggtggc

SEQ ID NO: 484 - DNA, 20 bp, synthetic construct
  source 1..20: mol_type = other DNA
ggcaccgaggctccttgggg

SEQ ID NO: 485 - DNA, 20 bp, synthetic construct
  source 1..20: mol_type = other DNA
ccgggagcggcctctagcgg

SEQ ID NO: 486 - DNA, 20 bp, synthetic construct
  source 1..20: mol_type = other DNA
gcctgcaggttcgcgtcccc

SEQ ID NO: 487 - DNA, 20 bp, synthetic construct
  source 1..20: mol_type = other DNA
ggcgggtccaacaggcccgg

SEQ ID NO: 488 - DNA, 20 bp, synthetic construct
  source 1..20: mol_type = other DNA
tctagcggcggccacgcgag

SEQ ID NO: 489 - DNA, 20 bp, synthetic construct
  source 1..20: mol_type = other DNA
agcggcggccacgcgagagg

SEQ ID NO: 490 - DNA, 20 bp, synthetic construct
  source 1..20: mol_type = other DNA
gcggtgcccgctccgcagag

SEQ ID NO: 491 - DNA, 20 bp, synthetic construct
  source 1..20: mol_type = other DNA
gagcctcggtgccccctctg

SEQ ID NO: 492 - DNA, 20 bp, synthetic construct
  source 1..20: mol_type = other DNA
gctccgggagcggcctctag

SEQ ID NO: 493 - DNA, 20 bp, synthetic construct
  source 1..20: mol_type = other DNA
ggcggccacgcgagaggtgg

SEQ ID NO: 494 - DNA, 20 bp, synthetic construct
  source 1..20: mol_type = other DNA
ccccggccgccccctcccca

SEQ ID NO: 495 - DNA, 20 bp, synthetic construct
  source 1..20: mol_type = other DNA
gcaccgaggctccttgggga

SEQ ID NO: 496 - DNA, 20 bp, synthetic construct
  source 1..20: mol_type = other DNA
ggtgaaagaggacgctgcgt

SEQ ID NO: 497 - DNA, 20 bp, synthetic construct
  source 1..20: mol_type = other DNA
gtgaaagaggacgctgcgtg

SEQ ID NO: 498 - DNA, 20 bp, synthetic construct
  source 1..20: mol_type = other DNA
acgcggcagccagcttggcg

SEQ ID NO: 499 - DNA, 20 bp, synthetic construct
  source 1..20: mol_type = other DNA
agggctccgcggcttctgac

SEQ ID NO: 500 - DNA, 20 bp, synthetic construct
  source 1..20: mol_type = other DNA
tgaaagaggacgctgcgtgg

SEQ ID NO: 501 - DNA, 20 bp, synthetic construct
  source 1..20: mol_type = other DNA
gggtgaaagaggacgctgcg

SEQ ID NO: 502 - DNA, 20 bp, synthetic construct
  source 1..20: mol_type = other DNA
gcggtggtggggtgattcca

SEQ ID NO: 503 - DNA, 20 bp, synthetic construct
  source 1..20: mol_type = other DNA
ctgattggctgaagccagag

SEQ ID NO: 504 - DNA, 20 bp, synthetic construct
  source 1..20: mol_type = other DNA
cgcgccggttgccagggacg

SEQ ID NO: 505 - DNA, 20 bp, synthetic construct
  source 1..20: mol_type = other DNA
ggacgcggcagccagcttgg

SEQ ID NO: 506 - DNA, 20 bp, synthetic construct
  source 1..20: mol_type = other DNA
ctccagccagtcagaagccg

SEQ ID NO: 507 - DNA, 20 bp, synthetic construct
  source 1..20: mol_type = other DNA
tctgattggctgaagccaga

SEQ ID NO: 508 - DNA, 20 bp, synthetic construct
  source 1..20: mol_type = other DNA
gctgccgcgtccctggcaac

SEQ ID NO: 509 - DNA, 20 bp, synthetic construct
  source 1..20: mol_type = other DNA
attggctgaagccagagggg

SEQ ID NO: 510 - DNA, 20 bp, synthetic construct
  source 1..20: mol_type = other DNA
ctgcgtgggggagggctccg

SEQ ID NO: 511 - DNA, 20 bp, synthetic construct
  source 1..20: mol_type = other DNA
caggcgatagttagaagtgg

SEQ ID NO: 512 - DNA, 20 bp, synthetic construct
  source 1..20: mol_type = other DNA
tcctcagtgtgactccacgc

SEQ ID NO: 513 - DNA, 20 bp, synthetic construct
  source 1..20: mol_type = other DNA
gaatgtgtcaccttccagcg

SEQ ID NO: 514 - DNA, 20 bp, synthetic construct
  source 1..20: mol_type = other DNA
tccagcgtggagtcacactg

SEQ ID NO: 515 - DNA, 20 bp, synthetic construct
  source 1..20: mol_type = other DNA
gaaggtgacacattcccaag

SEQ ID NO: 516 - DNA, 20 bp, synthetic construct
  source 1..20: mol_type = other DNA
tcagcttccacgtagtctca

SEQ ID NO: 517 - DNA, 20 bp, synthetic construct
  source 1..20: mol_type = other DNA
tggaagctgacagcagatca

SEQ ID NO: 518 - DNA, 20 bp, synthetic construct
  source 1..20: mol_type = other DNA
gctcaggcgatagttagaag

SEQ ID NO: 519 - DNA, 20 bp, synthetic construct
  source 1..20: mol_type = other DNA
gcgtggagtcacactgagga

SEQ ID NO: 520 - DNA, 20 bp, synthetic construct
  source 1..20: mol_type = other DNA
tggagtcacactgaggaagg

SEQ ID NO: 521 - DNA, 20 bp, synthetic construct
  source 1..20: mol_type = other DNA
tttgtgaccctgagactacg

SEQ ID NO: 522 - DNA, 20 bp, synthetic construct
  source 1..20: mol_type = other DNA
gtggaagctgacagcagatc

SEQ ID NO: 523 - DNA, 20 bp, synthetic construct
  source 1..20: mol_type = other DNA
ctgacagcagatcagggctc

SEQ ID NO: 524 - DNA, 20 bp, synthetic construct
  source 1..20: mol_type = other DNA
agtcacactgaggaaggagg

SEQ ID NO: 525 - DNA, 20 bp, synthetic construct
  source 1..20: mol_type = other DNA
cagggtcacaaaagtccaag

SEQ ID NO: 526 - DNA, 20 bp, synthetic construct
  source 1..20: mol_type = other DNA
aaactcaaacctatacccga

SEQ ID NO: 527 - DNA, 20 bp, synthetic construct
  source 1..20: mol_type = other DNA
tctgtttgtctcctgttcca

SEQ ID NO: 528 - DNA, 20 bp, synthetic construct
  source 1..20: mol_type = other DNA
ggctggatgctgcagcagca

SEQ ID NO: 529 - DNA, 20 bp, synthetic construct
  source 1..20: mol_type = other DNA
agcgcctgggagggctcctg

SEQ ID NO: 530 - DNA, 20 bp, synthetic construct
  source 1..20: mol_type = other DNA
gcagggactcagcgcctggg

SEQ ID NO: 531 - DNA, 20 bp, synthetic construct
  source 1..20: mol_type = other DNA
tccggctgcacccaggtccc

SEQ ID NO: 532 - DNA, 20 bp, synthetic construct
  source 1..20: mol_type = other DNA
ttaaaatttcacaaagcatc

SEQ ID NO: 533 - DNA, 20 bp, synthetic construct
  source 1..20: mol_type = other DNA
tgcacccaggtccctggaac

SEQ ID NO: 534 - DNA, 20 bp, synthetic construct
  source 1..20: mol_type = other DNA
gtctcctgttccagggacct

SEQ ID NO: 535 - DNA, 20 bp, synthetic construct
  source 1..20: mol_type = other DNA
tctgcttctctccctgcccc

SEQ ID NO: 536 - DNA, 20 bp, synthetic construct
  source 1..20: mol_type = other DNA
caaagcatccggctgcaccc

SEQ ID NO: 537 - DNA, 20 bp, synthetic construct
  source 1..20: mol_type = other DNA
tgtctcctgttccagggacc

SEQ ID NO: 538 - DNA, 20 bp, synthetic construct
  source 1..20: mol_type = other DNA
cagggactcagcgcctggga

SEQ ID NO: 539 - DNA, 20 bp, synthetic construct
  source 1..20: mol_type = other DNA
cctgccccaggagccctccc

SEQ ID NO: 540 - DNA, 20 bp, synthetic construct
  source 1..20: mol_type = other DNA
ctgggagggctcctggggca

SEQ ID NO: 541 - DNA, 20 bp, synthetic construct
  source 1..20: mol_type = other DNA
tggcaagcgacagcccgtgc

SEQ ID NO: 542 - DNA, 20 bp, synthetic construct
  source 1..20: mol_type = other DNA
cccacccatcagcccgctca

SEQ ID NO: 543 - DNA, 20 bp, synthetic construct
  source 1..20: mol_type = other DNA
ttgccatggcggccactgag

SEQ ID NO: 544 - DNA, 20 bp, synthetic construct
  source 1..20: mol_type = other DNA
agagttgccgagccctgagc

SEQ ID NO: 545 - DNA, 20 bp, synthetic construct
  source 1..20: mol_type = other DNA
gcacgggctgtcgcttgcca

SEQ ID NO: 546 - DNA, 20 bp, synthetic construct
  source 1..20: mol_type = other DNA
ggcctgcttagggcggacgg

SEQ ID NO: 547 - DNA, 20 bp, synthetic construct
  source 1..20: mol_type = other DNA
cgggctgtcgcttgccatgg

SEQ ID NO: 548 - DNA, 20 bp, synthetic construct
  source 1..20: mol_type = other DNA
ggccactgagtggcgtcacg

SEQ ID NO: 549 - DNA, 20 bp, synthetic construct
  source 1..20: mol_type = other DNA
cagagttgccgagccctgag

SEQ ID NO: 550 - DNA, 20 bp, synthetic construct
  source 1..20: mol_type = other DNA
ccctgagcgggctgatgggt

SEQ ID NO: 551 - DNA, 20 bp, synthetic construct
  source 1..20: mol_type = other DNA
gccctgagcgggctgatggg

SEQ ID NO: 552 - DNA, 20 bp, synthetic construct
  source 1..20: mol_type = other DNA
gggcgcgctccgtctggaag

SEQ ID NO: 553 - DNA, 20 bp, synthetic construct
  source 1..20: mol_type = other DNA
tcccacccatcagcccgctc

SEQ ID NO: 554 - DNA, 20 bp, synthetic construct
  source 1..20: mol_type = other DNA
gggtgggagcctcttccaga

SEQ ID NO: 555 - DNA, 20 bp, synthetic construct
  source 1..20: mol_type = other DNA
caactctggcctgcttaggg

SEQ ID NO: 556 - DNA, 20 bp, synthetic construct
  source 1..20: mol_type = other DNA
ctgtggtgaacagaagtggg

SEQ ID NO: 557 - DNA, 20 bp, synthetic construct
  source 1..20: mol_type = other DNA
cctcctcccagctcaagctg

SEQ ID NO: 558 - DNA, 20 bp, synthetic construct
  source 1..20: mol_type = other DNA
tggccacagcttgagctggg

SEQ ID NO: 559 - DNA, 20 bp, synthetic construct
  source 1..20: mol_type = other DNA
cccagggaaaccctgctctg

SEQ ID NO: 560 - DNA, 20 bp, synthetic construct
  source 1..20: mol_type = other DNA
cacagagcagggtttccctg

SEQ ID NO: 561 - DNA, 20 bp, synthetic construct
  source 1..20: mol_type = other DNA
tcctggccacagcttgagct

SEQ ID NO: 562 - DNA, 20 bp, synthetic construct
  source 1..20: mol_type = other DNA
ggccagtccactggtcccca

SEQ ID NO: 563 - DNA, 20 bp, synthetic construct
  source 1..20: mol_type = other DNA
cggccagcccgggcctgatg

SEQ ID NO: 564 - DNA, 20 bp, synthetic construct
  source 1..20: mol_type = other DNA
agctcaagctgtggccagga

SEQ ID NO: 565 - DNA, 20 bp, synthetic construct
  source 1..20: mol_type = other DNA
gctctgtggtgaacagaagt

SEQ ID NO: 566 - DNA, 20 bp, synthetic construct
  source 1..20: mol_type = other DNA
cttggaaggccgggcaggga

SEQ ID NO: 567 - DNA, 20 bp, synthetic construct
  source 1..20: mol_type = other DNA
ctgtggccaggaggggctgg

SEQ ID NO: 568 - DNA, 20 bp, synthetic construct
  source 1..20: mol_type = other DNA
gctcaagctgtggccaggag

SEQ ID NO: 569 - DNA, 20 bp, synthetic construct
  source 1..20: mol_type = other DNA
cttctgttcaccacagagca

SEQ ID NO: 570 - DNA, 20 bp, synthetic construct
  source 1..20: mol_type = other DNA
acttctgttcaccacagagc

SEQ ID NO: 571 - DNA, 20 bp, synthetic construct
  source 1..20: mol_type = other DNA
aagccacaatagccgtgacg

SEQ ID NO: 572 - DNA, 20 bp, synthetic construct
  source 1..20: mol_type = other DNA
gcgccacgtcacggctattg

SEQ ID NO: 573 - DNA, 20 bp, synthetic construct
  source 1..20: mol_type = other DNA
accagccgggtaccagcagc

SEQ ID NO: 574 - DNA, 20 bp, synthetic construct
  source 1..20: mol_type = other DNA
gggcgggcgccgctgcaggt

SEQ ID NO: 575 - DNA, 20 bp, synthetic construct
  source 1..20: mol_type = other DNA
cctggtatataaggtctcgc

SEQ ID NO: 576 - DNA, 20 bp, synthetic construct
  source 1..20: mol_type = other DNA
gggcgggcggcgccacgtca

SEQ ID NO: 577 - DNA, 20 bp, synthetic construct
  source 1..20: mol_type = other DNA
ccggcgagaccttatatacc

SEQ ID NO: 578 - DNA, 20 bp, synthetic construct
  source 1..20: mol_type = other DNA
cggcgcccgcccacctgcag

SEQ ID NO: 579 - DNA, 20 bp, synthetic construct
  source 1..20: mol_type = other DNA
ctgcagcggcgcccgcccgg

SEQ ID NO: 580 - DNA, 20 bp, synthetic construct
  source 1..20: mol_type = other DNA
gccggctgctggtacccggc

SEQ ID NO: 581 - DNA, 20 bp, synthetic construct
  source 1..20: mol_type = other DNA
cctgcagcggcgcccgcccg

SEQ ID NO: 582 - DNA, 20 bp, synthetic construct
  source 1..20: mol_type = other DNA
cggagcggcggtggcagtgg

SEQ ID NO: 583 - DNA, 20 bp, synthetic construct
  source 1..20: mol_type = other DNA
ggagcggggcggggaaggcg

SEQ ID NO: 584 - DNA, 20 bp, synthetic construct
  source 1..20: mol_type = other DNA
gcccgcgagggccggagcgg

SEQ ID NO: 585 - DNA, 20 bp, synthetic construct
  source 1..20: mol_type = other DNA
cgcgagggccggagcggcgg

SEQ ID NO: 586 - DNA, 20 bp, synthetic construct
  source 1..20: mol_type = other DNA
gggatctagccggtcactgc

SEQ ID NO: 587 - DNA, 20 bp, synthetic construct
  source 1..20: mol_type = other DNA
taaagctacaagtatttcct

SEQ ID NO: 588 - DNA, 20 bp, synthetic construct
  source 1..20: mol_type = other DNA
gggccaggggccacttaagg

SEQ ID NO: 589 - DNA, 20 bp, synthetic construct
  source 1..20: mol_type = other DNA
actccgccttaagtggcccc

SEQ ID NO: 590 - DNA, 20 bp, synthetic construct
  source 1..20: mol_type = other DNA
tctacctccaagcttaaact

SEQ ID NO: 591 - DNA, 20 bp, synthetic construct
  source 1..20: mol_type = other DNA
ggacggtcttgggagaaggg

SEQ ID NO: 592 - DNA, 20 bp, synthetic construct
  source 1..20: mol_type = other DNA
gctagatcccccgcccgggt

SEQ ID NO: 593 - DNA, 20 bp, synthetic construct
  source 1..20: mol_type = other DNA
accggctagatcccccgccc

SEQ ID NO: 594 - DNA, 20 bp, synthetic construct
  source 1..20: mol_type = other DNA
cccaccccctcccacccggg

SEQ ID NO: 595 - DNA, 20 bp, synthetic construct
  source 1..20: mol_type = other DNA
ggtgggacggtcttgggaga

SEQ ID NO: 596 - DNA, 20 bp, synthetic construct
  source 1..20: mol_type = other DNA
ccgtcccaccccctcccacc

SEQ ID NO: 597 - DNA, 20 bp, synthetic construct
  source 1..20: mol_type = other DNA
tgtgtcccatcctggaaacc

SEQ ID NO: 598 - DNA, 20 bp, synthetic construct
  source 1..20: mol_type = other DNA
cgtcccaccccctcccaccc

SEQ ID NO: 599 - DNA, 20 bp, synthetic construct
  source 1..20: mol_type = other DNA
ggtcttgggagaagggcgga

SEQ ID NO: 600 - DNA, 20 bp, synthetic construct
  source 1..20: mol_type = other DNA
caaaatggaccagcagtgac

SEQ ID NO: 601 - DNA, 20 bp, synthetic construct
  source 1..20: mol_type = other DNA
gtgtctccgcctaagccgac

SEQ ID NO: 602 - DNA, 20 bp, synthetic construct
  source 1..20: mol_type = other DNA
gtgtgcccgccggtcggctt

SEQ ID NO: 603 - DNA, 20 bp, synthetic construct
  source 1..20: mol_type = other DNA
agccgaccggcgggcacacg

SEQ ID NO: 604 - DNA, 20 bp, synthetic construct
  source 1..20: mol_type = other DNA
tgcccgccggtcggcttagg

SEQ ID NO: 605 - DNA, 20 bp, synthetic construct
  source 1..20: mol_type = other DNA
gccctgagggtctccagcca

SEQ ID NO: 606 - DNA, 20 bp, synthetic construct
  source 1..20: mol_type = other DNA
tccaggagtcaaggacattg

SEQ ID NO: 607 - DNA, 20 bp, synthetic construct
  source 1..20: mol_type = other DNA
acatccaggcccaaacggga

SEQ ID NO: 608 - DNA, 20 bp, synthetic construct
  source 1..20: mol_type = other DNA
gccgaccggcgggcacacgc

SEQ ID NO: 609 - DNA, 20 bp, synthetic construct
  source 1..20: mol_type = other DNA
ggtctccagccagggagtgg

SEQ ID NO: 610 - DNA, 20 bp, synthetic construct
  source 1..20: mol_type = other DNA
tggcccctaaacggccctga

SEQ ID NO: 611 - DNA, 20 bp, synthetic construct
  source 1..20: mol_type = other DNA
cacgcgggcccggtagagaa

SEQ ID NO: 612 - DNA, 20 bp, synthetic construct
  source 1..20: mol_type = other DNA
ctcactccgcccccactccc

SEQ ID NO: 613 - DNA, 20 bp, synthetic construct
  source 1..20: mol_type = other DNA
tgactcctggaacctcctcc

SEQ ID NO: 614 - DNA, 20 bp, synthetic construct
  source 1..20: mol_type = other DNA
gccgtttaggggccaggagg

SEQ ID NO: 615 - DNA, 20 bp, synthetic construct
  source 1..20: mol_type = other DNA
ggaggaggttccaggagtca

SEQ ID NO: 616 - DNA, 20 bp, synthetic construct
  source 1..20: mol_type = other DNA
tgccgttccggtcaccgcga

SEQ ID NO: 617 - DNA, 20 bp, synthetic construct
  source 1..20: mol_type = other DNA
gttaaggcagagccttccag

SEQ ID NO: 618 - DNA, 20 bp, synthetic construct
  source 1..20: mol_type = other DNA
accgcgacggtagcctgacg

SEQ ID NO: 619 - DNA, 20 bp, synthetic construct
  source 1..20: mol_type = other DNA
ggggtcaaatccaaagccgc

SEQ ID NO: 620 - DNA, 20 bp, synthetic construct
  source 1..20: mol_type = other DNA
accccgtcaggctaccgtcg

SEQ ID NO: 621 - DNA, 20 bp, synthetic construct
  source 1..20: mol_type = other DNA
cacgtgagaagagactggca

SEQ ID NO: 622 - DNA, 20 bp, synthetic construct
  source 1..20: mol_type = other DNA
tcaccgcgacggtagcctga

SEQ ID NO: 623 - DNA, 20 bp, synthetic construct
  source 1..20: mol_type = other DNA
gggtcaaatccaaagccgcg

SEQ ID NO: 624 - DNA, 20 bp, synthetic construct
  source 1..20: mol_type = other DNA
gcggagactcggtaatatac

SEQ ID NO: 625 - DNA, 20 bp, synthetic construct
  source 1..20: mol_type = other DNA
agagactggcagggcagagt

SEQ ID NO: 626 - DNA, 20 bp, synthetic construct
  source 1..20: mol_type = other DNA
ctggcagggcagagtaggcg

SEQ ID NO: 627 - DNA, 20 bp, synthetic construct
  source 1..20: mol_type = other DNA
ctcagaggcgacgaaaacta

SEQ ID NO: 628 - DNA, 20 bp, synthetic construct
  source 1..20: mol_type = other DNA
cggggtcaaatccaaagccg

SEQ ID NO: 629 - DNA, 20 bp, synthetic construct
  source 1..20: mol_type = other DNA
cgttaaggcagagccttcca

SEQ ID NO: 630 - DNA, 20 bp, synthetic construct
  source 1..20: mol_type = other DNA
agccgcggggcgcccctcag

SEQ ID NO: 631 - DNA, 20 bp, synthetic construct
  source 1..20: mol_type = other DNA
gcccggtctcttgtgcagga

SEQ ID NO: 632 - DNA, 20 bp, synthetic construct
  source 1..20: mol_type = other DNA
cccttcctgcacaagagacc

SEQ ID NO: 633 - DNA, 20 bp, synthetic construct
  source 1..20: mol_type = other DNA
gttaggagttggtcattgaa

SEQ ID NO: 634 - DNA, 20 bp, synthetic construct
  source 1..20: mol_type = other DNA
ccggtctcttgtgcaggaag

SEQ ID NO: 635 - DNA, 20 bp, synthetic construct
  source 1..20: mol_type = other DNA
gaagggccaactaagggagt

SEQ ID NO: 636 - DNA, 20 bp, synthetic construct
  source 1..20: mol_type = other DNA
gctcccggaagggccaacta

SEQ ID NO: 637 - DNA, 20 bp, synthetic construct
  source 1..20: mol_type = other DNA
gggaaggggccaaagcatgg

SEQ ID NO: 638 - DNA, 20 bp, synthetic construct
  source 1..20: mol_type = other DNA
gagaccgggcggctcccgga

SEQ ID NO: 639 - DNA, 20 bp, synthetic construct
  source 1..20: mol_type = other DNA
tcattctgtgggttaggagt

SEQ ID NO: 640 - DNA, 20 bp, synthetic construct
  source 1..20: mol_type = other DNA
gcaggaagagggggactctg

SEQ ID NO: 641 - DNA, 20 bp, synthetic construct
  source 1..20: mol_type = other DNA
gggaaggcgtggcaggaaga

SEQ ID NO: 642 - DNA, 20 bp, synthetic construct
  source 1..20: mol_type = other DNA
acaagagaccgggcggctcc

SEQ ID NO: 643 - DNA, 20 bp, synthetic construct
  source 1..20: mol_type = other DNA
aggggaaggggccaaagcat

SEQ ID NO: 644 - DNA, 20 bp, synthetic construct
  source 1..20: mol_type = other DNA
ttcctgcacaagagaccggg

SEQ ID NO: 645 - DNA, 20 bp, synthetic construct
  source 1..20: mol_type = other DNA
ggggaaggggccaaagcatg

SEQ ID NO: 646 - DNA, 20 bp, synthetic construct
  source 1..20: mol_type = other DNA
agtttgcagcacctgacccc

SEQ ID NO: 647 - DNA, 20 bp, synthetic construct
  source 1..20: mol_type = other DNA
cctcaactctgaccaggcag

SEQ ID NO: 648 - DNA, 20 bp, synthetic construct
  source 1..20: mol_type = other DNA
aggctgcctcaactctgacc

SEQ ID NO: 649 - DNA, 20 bp, synthetic construct
  source 1..20: mol_type = other DNA
gtggagtctaggatctgggc

SEQ ID NO: 650 - DNA, 20 bp, synthetic construct
  source 1..20: mol_type = other DNA
ccctggaacacatcccctgg

SEQ ID NO: 651 - DNA, 20 bp, synthetic construct
  source 1..20: mol_type = other DNA
tctgaccaggcagtggttgg

SEQ ID NO: 652 - DNA, 20 bp, synthetic construct
  source 1..20: mol_type = other DNA
ggagtctaggatctgggcag

SEQ ID NO: 653 - DNA, 20 bp, synthetic construct
  source 1..20: mol_type = other DNA
acccctggaacacatcccct

SEQ ID NO: 654 - DNA, 20 bp, synthetic construct
  source 1..20: mol_type = other DNA
gcagcctgagagagttgagc

SEQ ID NO: 655 - DNA, 20 bp, synthetic construct
  source 1..20: mol_type = other DNA
cttataagcatcctcagcct

SEQ ID NO: 656 - DNA, 20 bp, synthetic construct
  source 1..20: mol_type = other DNA
cagcagggtctagggaccca

SEQ ID NO: 657 - DNA, 20 bp, synthetic construct
  source 1..20: mol_type = other DNA
actctgaccaggcagtggtt

SEQ ID NO: 658 - DNA, 20 bp, synthetic construct
  source 1..20: mol_type = other DNA
aactctgaccaggcagtggt

SEQ ID NO: 659 - DNA, 20 bp, synthetic construct
  source 1..20: mol_type = other DNA
ccactgcctggtcagagttg

SEQ ID NO: 660 - DNA, 20 bp, synthetic construct
  source 1..20: mol_type = other DNA
agtggttgggggcccagaag

SEQ ID NO: 661 - DNA, 20 bp, synthetic construct
  source 1..20: mol_type = other DNA
cccccgcaccaaggacgccg

SEQ ID NO: 662 - DNA, 20 bp, synthetic construct
  source 1..20: mol_type = other DNA
gccgcggcgtccttggtgcg

SEQ ID NO: 663 - DNA, 20 bp, synthetic construct
  source 1..20: mol_type = other DNA
agctgccggcccccgcacca

SEQ ID NO: 664 - DNA, 20 bp, synthetic construct
  source 1..20: mol_type = other DNA
accaggaggccaatcccggc

SEQ ID NO: 665 - DNA, 20 bp, synthetic construct
  source 1..20: mol_type = other DNA
ggagaaggaacgcacgccgc

SEQ ID NO: 666 - DNA, 20 bp, synthetic construct
  source 1..20: mol_type = other DNA
tccttctcccccgccgtccg

SEQ ID NO: 667 - DNA, 20 bp, synthetic construct
  source 1..20: mol_type = other DNA
acggcccgcctgctcgcccg

SEQ ID NO: 668 - DNA, 20 bp, synthetic construct
  source 1..20: mol_type = other DNA
tcccaagtggccgcggacgg

SEQ ID NO: 669 - DNA, 20 bp, synthetic construct
  source 1..20: mol_type = other DNA
agctcccaagtggccgcgga

SEQ ID NO: 670 - DNA, 20 bp, synthetic construct
  source 1..20: mol_type = other DNA
ggccgcggcgtccttggtgc

SEQ ID NO: 671 - DNA, 20 bp, synthetic construct
  source 1..20: mol_type = other DNA
ccgcggcgtccttggtgcgg

SEQ ID NO: 672 - DNA, 20 bp, synthetic construct
  source 1..20: mol_type = other DNA
caagtggccgcggacggcgg

SEQ ID NO: 673 - DNA, 20 bp, synthetic construct
  source 1..20: mol_type = other DNA
ccaagtggccgcggacggcg

SEQ ID NO: 674 - DNA, 20 bp, synthetic construct
  source 1..20: mol_type = other DNA
cggcagctcccaagtggccg

SEQ ID NO: 675 - DNA, 20 bp, synthetic construct
  source 1..20: mol_type = other DNA
cggccgcggcgtccttggtg

SEQ ID NO: 676 - DNA, 20 bp, synthetic construct
  source 1..20: mol_type = other DNA
tactctccccagcacacgga

SEQ ID NO: 677 - DNA, 20 bp, synthetic construct
  source 1..20: mol_type = other DNA
actaaggaaggctcatgtgt

SEQ ID NO: 678 - DNA, 20 bp, synthetic construct
  source 1..20: mol_type = other DNA
cacaagtgcatgaataggag

SEQ ID NO: 679 - DNA, 20 bp, synthetic construct
  source 1..20: mol_type = other DNA
tgcttcatgagcaggagagg

SEQ ID NO: 680 - DNA, 20 bp, synthetic construct
  source 1..20: mol_type = other DNA
ggagaggcggaaactaagga

SEQ ID NO: 681 - DNA, 20 bp, synthetic construct
  source 1..20: mol_type = other DNA
ccccagcacacggaagggga

SEQ ID NO: 682 - DNA, 20 bp, synthetic construct
  source 1..20: mol_type = other DNA
aaggaaggctcatgtgttgg

SEQ ID NO: 683 - DNA, 20 bp, synthetic construct
  source 1..20: mol_type = other DNA
tcaaagaagcaggagtcagt

SEQ ID NO: 684 - DNA, 20 bp, synthetic construct
  source 1..20: mol_type = other DNA
ccttccccttccgtgtgctg

SEQ ID NO: 685 - DNA, 20 bp, synthetic construct
  source 1..20: mol_type = other DNA
agcaggagaggcggaaacta

SEQ ID NO: 686 - DNA, 20 bp, synthetic construct
  source 1..20: mol_type = other DNA
ttaatactctccccagcaca

SEQ ID NO: 687 - DNA, 20 bp, synthetic construct
  source 1..20: mol_type = other DNA
acgtgcttcatgagcaggag

SEQ ID NO: 688 - DNA, 20 bp, synthetic construct
  source 1..20: mol_type = other DNA
ctctccccagcacacggaag

SEQ ID NO: 689 - DNA, 20 bp, synthetic construct
  source 1..20: mol_type = other DNA
cagcacacggaaggggaagg

SEQ ID NO: 690 - DNA, 20 bp, synthetic construct
  source 1..20: mol_type = other DNA
actctccccagcacacggaa

SEQ ID NO: 691 - DNA, 20 bp, synthetic construct
  source 1..20: mol_type = other DNA
ggccggcgctcggaaaaccg

SEQ ID NO: 692 - DNA, 20 bp, synthetic construct
  source 1..20: mol_type = other DNA
aagccccaagggaagatgca

SEQ ID NO: 693 - DNA, 20 bp, synthetic construct
  source 1..20: mol_type = other DNA
ctgggtgtgtgccccgcaga

SEQ ID NO: 694 - DNA, 20 bp, synthetic construct
  source 1..20: mol_type = other DNA
ggtctgcacactgggcactg

SEQ ID NO: 695 - DNA, 20 bp, synthetic construct
  source 1..20: mol_type = other DNA
aggaggtggttagagtcccc

SEQ ID NO: 696 - DNA, 20 bp, synthetic construct
  source 1..20: mol_type = other DNA
aggccagagctccctctgcg

SEQ ID NO: 697 - DNA, 20 bp, synthetic construct
  source 1..20: mol_type = other DNA
gactctaaccacctcctccc

SEQ ID NO: 698 - DNA, 20 bp, synthetic construct
  source 1..20: mol_type = other DNA
ctctgcggggcacacaccca

SEQ ID NO: 699 - DNA, 20 bp, synthetic construct
  source 1..20: mol_type = other DNA
cctcctcccaggcagagaag

SEQ ID NO: 700 - DNA, 20 bp, synthetic construct
  source 1..20: mol_type = other DNA
tctgcggggcacacacccag

SEQ ID NO: 701 - DNA, 20 bp, synthetic construct
  source 1..20: mol_type = other DNA
tgaggccagagctccctctg

SEQ ID NO: 702 - DNA, 20 bp, synthetic construct
  source 1..20: mol_type = other DNA
ggaggtggttagagtcccct

SEQ ID NO: 703 - DNA, 20 bp, synthetic construct
  source 1..20: mol_type = other DNA
cctgggtgtgtgccccgcag

SEQ ID NO: 704 - DNA, 20 bp, synthetic construct
  source 1..20: mol_type = other DNA
gctctcattggtctgcacac

SEQ ID NO: 705 - DNA, 20 bp, synthetic construct
  source 1..20: mol_type = other DNA
cctctgcggggcacacaccc

SEQ ID NO: 706 - DNA, 20 bp, synthetic construct
  source 1..20: mol_type = other DNA
atagggcctgaccagtagaa

SEQ ID NO: 707 - DNA, 20 bp, synthetic construct
  source 1..20: mol_type = other DNA
agcatatttaaacagctcag

SEQ ID NO: 708 - DNA, 20 bp, synthetic construct
  source 1..20: mol_type = other DNA
gcggtgtatcacgtggctcg

SEQ ID NO: 709 - DNA, 20 bp, synthetic construct
  source 1..20: mol_type = other DNA
tgaccagtagaacggcgagg

SEQ ID NO: 710 - DNA, 20 bp, synthetic construct
  source 1..20: mol_type = other DNA
gcctgaccagtagaacggcg

SEQ ID NO: 711 - DNA, 20 bp, synthetic construct
  source 1..20: mol_type = other DNA
aatatgctaatgaaaggata

SEQ ID NO: 712 - DNA, 20 bp, synthetic construct
  source 1..20: mol_type = other DNA
ttattgagcacgcgcagagg

SEQ ID NO: 713 - DNA, 20 bp, synthetic construct
  source 1..20: mol_type = other DNA
atatttaaacagctcagggg

SEQ ID NO: 714 - DNA, 20 bp, synthetic construct
  source 1..20: mol_type = other DNA
gtggctcggggacgtgtcag

SEQ ID NO: 715 - DNA, 20 bp, synthetic construct
  source 1..20: mol_type = other DNA
gcgtgctcaataactgtccc

SEQ ID NO: 716 - DNA, 20 bp, synthetic construct
  source 1..20: mol_type = other DNA
tcaataactgtccccggagc

SEQ ID NO: 717 - DNA, 20 bp, synthetic construct
  source 1..20: mol_type = other DNA
aaatatgctaatgaaaggat

SEQ ID NO: 718 - DNA, 20 bp, synthetic construct
  source 1..20: mol_type = other DNA
tttaaacagctcaggggcgg

SEQ ID NO: 719 - DNA, 20 bp, synthetic construct
  source 1..20: mol_type = other DNA
cagttattgagcacgcgcag

SEQ ID NO: 720 - DNA, 20 bp, synthetic construct
  source 1..20: mol_type = other DNA
cggcgaggcggtgtatcacg

SEQ ID NO: 721 - DNA, 20 bp, synthetic construct
  source 1..20: mol_type = other DNA
tagtgaggacagttgttgag

SEQ ID NO: 722 - DNA, 20 bp, synthetic construct
  source 1..20: mol_type = other DNA
cctggccaagttgtgtagtg

SEQ ID NO: 723 - DNA, 20 bp, synthetic construct
  source 1..20: mol_type = other DNA
actgtcctcactacacaact

SEQ ID NO: 724 - DNA, 20 bp, synthetic construct
  source 1..20: mol_type = other DNA
gagaagagctctcacttgga

SEQ ID NO: 725 - DNA, 20 bp, synthetic construct
  source 1..20: mol_type = other DNA
gcttcagaacacaagcgtgc

SEQ ID NO: 726 - DNA, 20 bp, synthetic construct
  source 1..20: mol_type = other DNA
agagctctcacttggacggg

SEQ ID NO: 727 - DNA, 20 bp, synthetic construct
  source 1..20: mol_type = other DNA
aggaaaagagaaaaaacgag

SEQ ID NO: 728 - DNA, 20 bp, synthetic construct
  source 1..20: mol_type = other DNA
ctcactacacaacttggcca

SEQ ID NO: 729 - DNA, 20 bp, synthetic construct
  source 1..20: mol_type = other DNA
caagtgagagctcttctcta

SEQ ID NO: 730 - DNA, 20 bp, synthetic construct
  source 1..20: mol_type = other DNA
gcaggtgctaactctcttct

SEQ ID NO: 731 - DNA, 20 bp, synthetic construct
  source 1..20: mol_type = other DNA
agaattctagcatctctagg

SEQ ID NO: 732 - DNA, 20 bp, synthetic construct
  source 1..20: mol_type = other DNA
agcaggtgctaactctcttc

SEQ ID NO: 733 - DNA, 20 bp, synthetic construct
  source 1..20: mol_type = other DNA
gcacgcttgtgttctgaagc

SEQ ID NO: 734 - DNA, 20 bp, synthetic construct
  source 1..20: mol_type = other DNA
agaagagctctcacttggac

SEQ ID NO: 735 - DNA, 20 bp, synthetic construct
  source 1..20: mol_type = other DNA
gatgctagaattctacttct

SEQ ID NO: 736 - DNA, 20 bp, synthetic construct
  source 1..20: mol_type = other DNA
acttaacctcccccacactg

SEQ ID NO: 737 - DNA, 20 bp, synthetic construct
  source 1..20: mol_type = other DNA
ggtgttaaaggaggaacgca

SEQ ID NO: 738 - DNA, 20 bp, synthetic construct
  source 1..20: mol_type = other DNA
gggtgttaaaggaggaacgc

SEQ ID NO: 739 - DNA, 20 bp, synthetic construct
  source 1..20: mol_type = other DNA
gcgcggcgtcgccgcagtgt

SEQ ID NO: 740 - DNA, 20 bp, synthetic construct
  source 1..20: mol_type = other DNA
atttgccagggtgttaaagg

SEQ ID NO: 741 - DNA, 20 bp, synthetic construct
  source 1..20: mol_type = other DNA
ggttaggcgtacatttgcca

SEQ ID NO: 742 - DNA, 20 bp, synthetic construct
  source 1..20: mol_type = other DNA
gttgggtcggaaaaaaggcg

SEQ ID NO: 743 - DNA, 20 bp, synthetic construct
  source 1..20: mol_type = other DNA
gggggaggttaagtggagct

SEQ ID NO: 744 - DNA, 20 bp, synthetic construct
  source 1..20: mol_type = other DNA
cgcggcgtcgccgcagtgtg

SEQ ID NO: 745 - DNA, 20 bp, synthetic construct
  source 1..20: mol_type = other DNA
gcgttcctcctttaacaccc

SEQ ID NO: 746 - DNA, 20 bp, synthetic construct
  source 1..20: mol_type = other DNA
cccaactgagccggaagtgg

SEQ ID NO: 747 - DNA, 20 bp, synthetic construct
  source 1..20: mol_type = other DNA
gcggcgtcgccgcagtgtgg

SEQ ID NO: 748 - DNA, 20 bp, synthetic construct
  source 1..20: mol_type = other DNA
cgacccaactgagccggaag

SEQ ID NO: 749 - DNA, 20 bp, synthetic construct
  source 1..20: mol_type = other DNA
ctgggttccctgctgggcaa

SEQ ID NO: 750 - DNA, 20 bp, synthetic construct
  source 1..20: mol_type = other DNA
gcagtgtgggggaggttaag

SEQ ID NO: 751 - DNA, 20 bp, synthetic construct
  source 1..20: mol_type = other DNA
aagcatattgagaagaatgg

SEQ ID NO: 752 - DNA, 20 bp, synthetic construct
  source 1..20: mol_type = other DNA
gagccaggtataaataggct

SEQ ID NO: 753 - DNA, 20 bp, synthetic construct
  source 1..20: mol_type = other DNA
atggatgaagcgagaacagc

SEQ ID NO: 754 - DNA, 20 bp, synthetic construct
  source 1..20: mol_type = other DNA
agccaggtataaataggctg

SEQ ID NO: 755 - DNA, 20 bp, synthetic construct
  source 1..20: mol_type = other DNA
gcgaagagccaggtataaat

SEQ ID NO: 756 - DNA, 20 bp, synthetic construct
  source 1..20: mol_type = other DNA
gaacagcaggaagaaaagga

SEQ ID NO: 757 - DNA, 20 bp, synthetic construct
  source 1..20: mol_type = other DNA
agaacagcaggaagaaaagg

SEQ ID NO: 758 - DNA, 20 bp, synthetic construct
  source 1..20: mol_type = other DNA
tacaagcatattgagaagaa

SEQ ID NO: 759 - DNA, 20 bp, synthetic construct
  source 1..20: mol_type = other DNA
cgtcagcggaagtggaacgg

SEQ ID NO: 760 - DNA, 20 bp, synthetic construct
  source 1..20: mol_type = other DNA
cctctgacctccgacgtcag

SEQ ID NO: 761 - DNA, 20 bp, synthetic construct
  source 1..20: mol_type = other DNA
aggaagtcttgtcaatgggc

SEQ ID NO: 762 - DNA, 20 bp, synthetic construct
  source 1..20: mol_type = other DNA
cggaagtggaacggcggcgg

SEQ ID NO: 763 - DNA, 20 bp, synthetic construct
  source 1..20: mol_type = other DNA
acggcggcgggggtagaacc

SEQ ID NO: 764 - DNA, 20 bp, synthetic construct
  source 1..20: mol_type = other DNA
cagcggaagtggaacggcgg

SEQ ID NO: 765 - DNA, 20 bp, synthetic construct
  source 1..20: mol_type = other DNA
gcggaagtggaacggcggcg

SEQ ID NO: 766 - DNA, 20 bp, synthetic construct
  source 1..20: mol_type = other DNA
ggagttgagctggacgctga

SEQ ID NO: 767 - DNA, 20 bp, synthetic construct
  source 1..20: mol_type = other DNA
ctcagcgtccagctcaactc

SEQ ID NO: 768 - DNA, 20 bp, synthetic construct
  source 1..20: mol_type = other DNA
ggaagggaggggcttcggtg

SEQ ID NO: 769 - DNA, 20 bp, synthetic construct
  source 1..20: mol_type = other DNA
cgcggtgcgggtgagctggt

SEQ ID NO: 770 - DNA, 20 bp, synthetic construct
  source 1..20: mol_type = other DNA
cccgcgagctcggcctgtca

SEQ ID NO: 771 - DNA, 20 bp, synthetic construct
  source 1..20: mol_type = other DNA
cggagttgagctggacgctg

SEQ ID NO: 772 - DNA, 20 bp, synthetic construct
  source 1..20: mol_type = other DNA
gagttgagctggacgctgag

SEQ ID NO: 773 - DNA, 20 bp, synthetic construct
  source 1..20: mol_type = other DNA
gttgagctggacgctgaggg

SEQ ID NO: 774 - DNA, 20 bp, synthetic construct
  source 1..20: mol_type = other DNA
agttgagctggacgctgagg

SEQ ID NO: 775 - DNA, 20 bp, synthetic construct
  source 1..20: mol_type = other DNA
gtcggagcccagcgagcagc

SEQ ID NO: 776 - DNA, 20 bp, synthetic construct
  source 1..20: mol_type = other DNA
gcgagcagccggagttgagc

SEQ ID NO: 777 - DNA, 20 bp, synthetic construct
  source 1..20: mol_type = other DNA
ttgagctggacgctgagggg

SEQ ID NO: 778 - DNA, 20 bp, synthetic construct
  source 1..20: mol_type = other DNA
gggcggggccctgacgcgcg

SEQ ID NO: 779 - DNA, 20 bp, synthetic construct
  source 1..20: mol_type = other DNA
gctgctcgctgggctccgac

SEQ ID NO: 780 - DNA, 20 bp, synthetic construct
  source 1..20: mol_type = other DNA
ggggcggggccctgacgcgc

SEQ ID NO: 781 - DNA, 20 bp, synthetic construct
  source 1..20: mol_type = other DNA
cgcagagcgccaccaaccag

SEQ ID NO: 782 - DNA, 20 bp, synthetic construct
  source 1..20: mol_type = other DNA
ctccacgttccgttccaacg

SEQ ID NO: 783 - DNA, 20 bp, synthetic construct
  source 1..20: mol_type = other DNA
gcggggaaagatgtcgctcc

SEQ ID NO: 784 - DNA, 20 bp, synthetic construct
  source 1..20: mol_type = other DNA
acccgacgcacagcccgcca

SEQ ID NO: 785 - DNA, 20 bp, synthetic construct
  source 1..20: mol_type = other DNA
tggcgggctgtgcgtcgggt

SEQ ID NO: 786 - DNA, 20 bp, synthetic construct
  source 1..20: mol_type = other DNA
gatgtcgctcccggaagtgt

SEQ ID NO: 787 - DNA, 20 bp, synthetic construct
  source 1..20: mol_type = other DNA
atgtcgctcccggaagtgtt

SEQ ID NO: 788 - DNA, 20 bp, synthetic construct
  source 1..20: mol_type = other DNA
tcccaggctaccgccggtcc

SEQ ID NO: 789 - DNA, 20 bp, synthetic construct
  source 1..20: mol_type = other DNA
cgccggtcccggaagtgccg

SEQ ID NO: 790 - DNA, 20 bp, synthetic construct
  source 1..20: mol_type = other DNA
tgccgtggcgggctgtgcgt

SEQ ID NO: 791 - DNA, 20 bp, synthetic construct
  source 1..20: mol_type = other DNA
cggtcccggaagtgccgtgg

SEQ ID NO: 792 - DNA, 20 bp, synthetic construct
  source 1..20: mol_type = other DNA
gtggcgggctgtgcgtcggg

SEQ ID NO: 793 - DNA, 20 bp, synthetic construct
  source 1..20: mol_type = other DNA
gccgtggcgggctgtgcgtc

SEQ ID NO: 794 - DNA, 20 bp, synthetic construct
  source 1..20: mol_type = other DNA
ggtcccggaagtgccgtggc

SEQ ID NO: 795 - DNA, 20 bp, synthetic construct
  source 1..20: mol_type = other DNA
tcccggaagtgttgggcgca

SEQ ID NO: 796 - DNA, 20 bp, synthetic construct
  source 1..20: mol_type = other DNA
ggcacaggcgccaatgccga

SEQ ID NO: 797 - DNA, 20 bp, synthetic construct
  source 1..20: mol_type = other DNA
gccgcggcagttcctatagg

SEQ ID NO: 798 - DNA, 20 bp, synthetic construct
  source 1..20: mol_type = other DNA
tccggtcaaagcaccgcttg

SEQ ID NO: 799 - DNA, 20 bp, synthetic construct
  source 1..20: mol_type = other DNA
gcagttcctataggcggagc

SEQ ID NO: 800 - DNA, 20 bp, synthetic construct
  source 1..20: mol_type = other DNA
ccggtcaaagcaccgcttgg

SEQ ID NO: 801 - DNA, 20 bp, synthetic construct
  source 1..20: mol_type = other DNA
atgccgagggctgaatgcgc

SEQ ID NO: 802 - DNA, 20 bp, synthetic construct
  source 1..20: mol_type = other DNA
gcgcattcagccctcggcat

SEQ ID NO: 803 - DNA, 20 bp, synthetic construct
  source 1..20: mol_type = other DNA
tataggaactgccgcggcac

SEQ ID NO: 804 - DNA, 20 bp, synthetic construct
  source 1..20: mol_type = other DNA
tccgcctataggaactgccg

SEQ ID NO: 805 - DNA, 20 bp, synthetic construct
  source 1..20: mol_type = other DNA
cggcattggcgcctgtgccg

SEQ ID NO: 806 - DNA, 20 bp, synthetic construct
  source 1..20: mol_type = other DNA
gaatgcgcaggcgcggaccg

SEQ ID NO: 807 - DNA, 20 bp, synthetic construct
  source 1..20: mol_type = other DNA
tgaatgcgcaggcgcggacc

SEQ ID NO: 808 - DNA, 20 bp, synthetic construct
  source 1..20: mol_type = other DNA
gagggctgaatgcgcaggcg

SEQ ID NO: 809 - DNA, 20 bp, synthetic construct
  source 1..20: mol_type = other DNA
cggcacaggcgccaatgccg

SEQ ID NO: 810 - DNA, 20 bp, synthetic construct
  source 1..20: mol_type = other DNA
tgcgccttctcccgagtccc

SEQ ID NO: 811 - DNA, 20 bp, synthetic construct
  source 1..20: mol_type = other DNA
aatgaggcttctgtaaactc

SEQ ID NO: 812 - DNA, 20 bp, synthetic construct
  source 1..20: mol_type = other DNA
tcccgcgtggaggtaagggc

SEQ ID NO: 813 - DNA, 20 bp, synthetic construct
  source 1..20: mol_type = other DNA
cctcattagcatttccccag

SEQ ID NO: 814 - DNA, 20 bp, synthetic construct
  source 1..20: mol_type = other DNA
cctctggggaaatgctaatg

SEQ ID NO: 815 - DNA, 20 bp, synthetic construct
  source 1..20: mol_type = other DNA
gtcccgcgtggaggtaaggg

SEQ ID NO: 816 - DNA, 20 bp, synthetic construct
  source 1..20: mol_type = other DNA
gcggtcccgcgtggaggtaa

SEQ ID NO: 817 - DNA, 20 bp, synthetic construct
  source 1..20: mol_type = other DNA
tgcccctgcccctgcctctg

SEQ ID NO: 818 - DNA, 20 bp, synthetic construct
  source 1..20: mol_type = other DNA
tagcatttccccagaggcag

SEQ ID NO: 819 - DNA, 20 bp, synthetic construct
  source 1..20: mol_type = other DNA
ttagcatttccccagaggca

SEQ ID NO: 820 - DNA, 20 bp, synthetic construct
  source 1..20: mol_type = other DNA
gggtggtgtggtgtcggtgt

SEQ ID NO: 821 - DNA, 20 bp, synthetic construct
  source 1..20: mol_type = other DNA
gggcaggggcagaggccggg

SEQ ID NO: 822 - DNA, 20 bp, synthetic construct
  source 1..20: mol_type = other DNA
gcatccccggcgccctgctg

SEQ ID NO: 823 - DNA, 20 bp, synthetic construct
  source 1..20: mol_type = other DNA
gtcggtgtcggcagcatccc

SEQ ID NO: 824 - DNA, 20 bp, synthetic construct
  source 1..20: mol_type = other DNA
gaggccgggtggtgtggtgt

SEQ ID NO: 825 - DNA, 20 bp, synthetic construct
  source 1..20: mol_type = other DNA
gacaccgacaccacaccacc

SEQ ID NO: 826 - DNA, 20 bp, synthetic construct
  source 1..20: mol_type = other DNA
gatatgtggtttctaagagg

SEQ ID NO: 827 - DNA, 20 bp, synthetic construct
  source 1..20: mol_type = other DNA
ttggaggggcggtacatggg

SEQ ID NO: 828 - DNA, 20 bp, synthetic construct
  source 1..20: mol_type = other DNA
tcttagaaaccacatatccc

SEQ ID NO: 829 - DNA, 20 bp, synthetic construct
  source 1..20: mol_type = other DNA
tagaaaccacatatcccagg

SEQ ID NO: 830 - DNA, 20 bp, synthetic construct
  source 1..20: mol_type = other DNA
agcacggaagggggcaacga

SEQ ID NO: 831 - DNA, 20 bp, synthetic construct
  source 1..20: mol_type = other DNA
tgggatatgtggtttctaag

SEQ ID NO: 832 - DNA, 20 bp, synthetic construct
  source 1..20: mol_type = other DNA
gggagcacgggtaagagggc

SEQ ID NO: 833 - DNA, 20 bp, synthetic construct
  source 1..20: mol_type = other DNA
accgcccctccaatagccaa

SEQ ID NO: 834 - DNA, 20 bp, synthetic construct
  source 1..20: mol_type = other DNA
caagaccattggctattgga

SEQ ID NO: 835 - DNA, 20 bp, synthetic construct
  source 1..20: mol_type = other DNA
aagaccattggctattggag

SEQ ID NO: 836 - DNA, 20 bp, synthetic construct
  source 1..20: mol_type = other DNA
tgttagaatcgctggaaagg

SEQ ID NO: 837 - DNA, 20 bp, synthetic construct
  source 1..20: mol_type = other DNA
gcaggggagcacgggtaaga

SEQ ID NO: 838 - DNA, 20 bp, synthetic construct
  source 1..20: mol_type = other DNA
accattggctattggagggg

SEQ ID NO: 839 - DNA, 20 bp, synthetic construct
  source 1..20: mol_type = other DNA
gttagaatcgctggaaaggc

SEQ ID NO: 840 - DNA, 20 bp, synthetic construct
  source 1..20: mol_type = other DNA
aggtgttagaatcgctggaa

SEQ ID NO: 841 - DNA, 20 bp, synthetic construct
  source 1..20: mol_type = other DNA
ctcgccagacccatctccca

SEQ ID NO: 842 - DNA, 20 bp, synthetic construct
  source 1..20: mol_type = other DNA
aggagttagaaacattcgct

SEQ ID NO: 843 - DNA, 20 bp, synthetic construct
  source 1..20: mol_type = other DNA
caggagttagaaacattcgc

SEQ ID NO: 844 - DNA, 20 bp, synthetic construct
  source 1..20: mol_type = other DNA
cctcgccagacccatctccc

SEQ ID NO: 845 - DNA, 20 bp, synthetic construct
  source 1..20: mol_type = other DNA
ctggcgaggctcgtaggccg

SEQ ID NO: 846 - DNA, 20 bp, synthetic construct
  source 1..20: mol_type = other DNA
ctgggagcttctgtttccag

SEQ ID NO: 847 - DNA, 20 bp, synthetic construct
  source 1..20: mol_type = other DNA
gcaagggggacatggctgag

SEQ ID NO: 848 - DNA, 20 bp, synthetic construct
  source 1..20: mol_type = other DNA
gaggctcgtaggccgcggat

SEQ ID NO: 849 - DNA, 20 bp, synthetic construct
  source 1..20: mol_type = other DNA
gcacccagccagccaatccg

SEQ ID NO: 850 - DNA, 20 bp, synthetic construct
  source 1..20: mol_type = other DNA
cctgggagatgggtctggcg

SEQ ID NO: 851 - DNA, 20 bp, synthetic construct
  source 1..20: mol_type = other DNA
gagcttctgtttccagcgga

SEQ ID NO: 852 - DNA, 20 bp, synthetic construct
  source 1..20: mol_type = other DNA
gaggccctgggagatgggtc

SEQ ID NO: 853 - DNA, 20 bp, synthetic construct
  source 1..20: mol_type = other DNA
ggacatggctgagtggactc

SEQ ID NO: 854 - DNA, 20 bp, synthetic construct
  source 1..20: mol_type = other DNA
ttggctggctgggtgcaggg

SEQ ID NO: 855 - DNA, 20 bp, synthetic construct
  source 1..20: mol_type = other DNA
attggctggctgggtgcagg

SEQ ID NO: 856 - DNA, 20 bp, synthetic construct
  source 1..20: mol_type = other DNA
ggcccgtagtccttctgcga

SEQ ID NO: 857 - DNA, 20 bp, synthetic construct
  source 1..20: mol_type = other DNA
gggcccgtagtccttctgcg

SEQ ID NO: 858 - DNA, 20 bp, synthetic construct
  source 1..20: mol_type = other DNA
agtcctcgcgccctcgcaga

SEQ ID NO: 859 - DNA, 20 bp, synthetic construct
  source 1..20: mol_type = other DNA
cggcaggcggaagccagacc

SEQ ID NO: 860 - DNA, 20 bp, synthetic construct
  source 1..20: mol_type = other DNA
gggaagtgtagtccggcctg

SEQ ID NO: 861 - DNA, 20 bp, synthetic construct
  source 1..20: mol_type = other DNA
gcgccctcgcagaaggacta

SEQ ID NO: 862 - DNA, 20 bp, synthetic construct
  source 1..20: mol_type = other DNA
tctggcttccgcctgccgag

SEQ ID NO: 863 - DNA, 20 bp, synthetic construct
  source 1..20: mol_type = other DNA
caggcggaagccagacccgg

SEQ ID NO: 864 - DNA, 20 bp, synthetic construct
  source 1..20: mol_type = other DNA
gcggaactaccgtgcccaca

SEQ ID NO: 865 - DNA, 20 bp, synthetic construct
  source 1..20: mol_type = other DNA
gtagtccggcctgcggtccg

SEQ ID NO: 866 - DNA, 20 bp, synthetic construct
  source 1..20: mol_type = other DNA
gccgagcggccccggaccgc

SEQ ID NO: 867 - DNA, 20 bp, synthetic construct
  source 1..20: mol_type = other DNA
tgtgggcacggtagttccgc

SEQ ID NO: 868 - DNA, 20 bp, synthetic construct
  source 1..20: mol_type = other DNA
gtgtagtccggcctgcggtc

SEQ ID NO: 869 - DNA, 20 bp, synthetic construct
  source 1..20: mol_type = other DNA
gtccggggccgctcggcagg

SEQ ID NO: 870 - DNA, 20 bp, synthetic construct
  source 1..20: mol_type = other DNA
gtgcccacaaggcagcgcgc

SEQ ID NO: 871 - DNA, 20 bp, synthetic construct
  source 1..20: mol_type = other DNA
agctggggtctaccacagag

SEQ ID NO: 872 - DNA, 20 bp, synthetic construct
  source 1..20: mol_type = other DNA
ggttcccggaggccagacgt

SEQ ID NO: 873 - DNA, 20 bp, synthetic construct
  source 1..20: mol_type = other DNA
gccagtgggaccagggctgt

SEQ ID NO: 874 - DNA, 20 bp, synthetic construct
  source 1..20: mol_type = other DNA
gagtgcgccagggttcccgg

SEQ ID NO: 875 - DNA, 20 bp, synthetic construct
  source 1..20: mol_type = other DNA
ggctgtgggcgagtgcgcca

SEQ ID NO: 876 - DNA, 20 bp, synthetic construct
  source 1..20: mol_type = other DNA
ggaggccagacgtgggaccc

SEQ ID NO: 877 - DNA, 20 bp, synthetic construct
  source 1..20: mol_type = other DNA
gggtcactgccagtgggacc

SEQ ID NO: 878 - DNA, 20 bp, synthetic construct
  source 1..20: mol_type = other DNA
ggtcactgccagtgggacca

SEQ ID NO: 879 - DNA, 20 bp, synthetic construct
  source 1..20: mol_type = other DNA
gggttcccggaggccagacg

SEQ ID NO: 880 - DNA, 20 bp, synthetic construct
  source 1..20: mol_type = other DNA
cggaggccagacgtgggacc

SEQ ID NO: 881 - DNA, 20 bp, synthetic construct
  source 1..20: mol_type = other DNA
cgtctggcctccgggaaccc

SEQ ID NO: 882 - DNA, 20 bp, synthetic construct
  source 1..20: mol_type = other DNA
gcccacagccctggtcccac

SEQ ID NO: 883 - DNA, 20 bp, synthetic construct
  source 1..20: mol_type = other DNA
ggcgcactcgcccacagccc

SEQ ID NO: 884 - DNA, 20 bp, synthetic construct
  source 1..20: mol_type = other DNA
atcatggggtcactgccagt

SEQ ID NO: 885 - DNA, 20 bp, synthetic construct
  source 1..20: mol_type = other DNA
gatcatggggtcactgccag

SEQ ID NO: 886 - DNA, 20 bp, synthetic construct
  source 1..20: mol_type = other DNA
aatcctcaaatcctataggc

SEQ ID NO: 887 - DNA, 20 bp, synthetic construct
  source 1..20: mol_type = other DNA
agtgattgaagtgtccagca

SEQ ID NO: 888 - DNA, 20 bp, synthetic construct
  source 1..20: mol_type = other DNA
aggtaggaactgcagtcggc

SEQ ID NO: 889 - DNA, 20 bp, synthetic construct
  source 1..20: mol_type = other DNA
agctaggtaggaactgcagt

SEQ ID NO: 890 - DNA, 20 bp, synthetic construct
  source 1..20: mol_type = other DNA
tgattgaagtgtccagcagg

SEQ ID NO: 891 - DNA, 20 bp, synthetic construct
  source 1..20: mol_type = other DNA
gctgagctgaggctctgaag

SEQ ID NO: 892 - DNA, 20 bp, synthetic construct
  source 1..20: mol_type = other DNA
caggatgctttgcacgtcac

SEQ ID NO: 893 - DNA, 20 bp, synthetic construct
  source 1..20: mol_type = other DNA
tcttcagagcctcagctcag

SEQ ID NO: 894 - DNA, 20 bp, synthetic construct
  source 1..20: mol_type = other DNA
tcacgggcttcaccagcaaa

SEQ ID NO: 895 - DNA, 20 bp, synthetic construct
  source 1..20: mol_type = other DNA
agaatctggaggtttaaagt

SEQ ID NO: 896 - DNA, 20 bp, synthetic construct
  source 1..20: mol_type = other DNA
acggcagctccgctgagctg

SEQ ID NO: 897 - DNA, 20 bp, synthetic construct
  source 1..20: mol_type = other DNA
gtgattgaagtgtccagcag

SEQ ID NO: 898 - DNA, 20 bp, synthetic construct
  source 1..20: mol_type = other DNA
tagaatctggaggtttaaag

SEQ ID NO: 899 - DNA, 20 bp, synthetic construct
  source 1..20: mol_type = other DNA
agagaatgccagccccctgc

SEQ ID NO: 900 - DNA, 20 bp, synthetic construct
  source 1..20: mol_type = other DNA
tctggagaaagcaggcaact

SEQ ID NO: 901 - DNA, 20 bp, synthetic construct
  source 1..20: mol_type = other DNA
ttcctgcgaggtgaagcgag

SEQ ID NO: 902 - DNA, 20 bp, synthetic construct
  source 1..20: mol_type = other DNA
cgaggggtccccctggacga

SEQ ID NO: 903 - DNA, 20 bp, synthetic construct
  source 1..20: mol_type = other DNA
cccgcccagcagccgacggg

SEQ ID NO: 904 - DNA, 20 bp, synthetic construct
  source 1..20: mol_type = other DNA
gccacccgcccagcagccga

SEQ ID NO: 905 - DNA, 20 bp, synthetic construct
  source 1..20: mol_type = other DNA
tccaagctcgccttcgtcca

SEQ ID NO: 906 - DNA, 20 bp, synthetic construct
  source 1..20: mol_type = other DNA
ccttcctgcgaggtgaagcg

SEQ ID NO: 907 - DNA, 20 bp, synthetic construct
  source 1..20: mol_type = other DNA
cctcgcttcacctcgcagga

SEQ ID NO: 908 - DNA, 20 bp, synthetic construct
  source 1..20: mol_type = other DNA
ccaagctcgccttcgtccag

SEQ ID NO: 909 - DNA, 20 bp, synthetic construct
  source 1..20: mol_type = other DNA
ggtgaagcgaggggtccccc

SEQ ID NO: 910 - DNA, 20 bp, synthetic construct
  source 1..20: mol_type = other DNA
tggtttggtgccttcctgcg

SEQ ID NO: 911 - DNA, 20 bp, synthetic construct
  source 1..20: mol_type = other DNA
ccctcccgtcggctgctggg

SEQ ID NO: 912 - DNA, 20 bp, synthetic construct
  source 1..20: mol_type = other DNA
cttcctgcgaggtgaagcga

SEQ ID NO: 913 - DNA, 20 bp, synthetic construct
  source 1..20: mol_type = other DNA
caagctcgccttcgtccagg

SEQ ID NO: 914 - DNA, 20 bp, synthetic construct
  source 1..20: mol_type = other DNA
gcccggccgccccgccccga

SEQ ID NO: 915 - DNA, 20 bp, synthetic construct
  source 1..20: mol_type = other DNA
ccgcccagcagccgacggga

SEQ ID NO: 916 - DNA, 20 bp, synthetic construct
  source 1..20: mol_type = other DNA
aacctcgcacccctagccct

SEQ ID NO: 917 - DNA, 20 bp, synthetic construct
  source 1..20: mol_type = other DNA
gccgctccttacccactccc

SEQ ID NO: 918 - DNA, 20 bp, synthetic construct
  source 1..20: mol_type = other DNA
ccgccgggagctaaccgcgc

SEQ ID NO: 919 - DNA, 20 bp, synthetic construct
  source 1..20: mol_type = other DNA
aggtgccgcgcacaccggcg

SEQ ID NO: 920 - DNA, 20 bp, synthetic construct
  source 1..20: mol_type = other DNA
gaacctcgcacccctagccc

SEQ ID NO: 921 - DNA, 20 bp, synthetic construct
  source 1..20: mol_type = other DNA
ccggcgcggttagctcccgg

SEQ ID NO: 922 - DNA, 20 bp, synthetic construct
  source 1..20: mol_type = other DNA
cttacccactcccagggcta

SEQ ID NO: 923 - DNA, 20 bp, synthetic construct
  source 1..20: mol_type = other DNA
ggagtgggtaaggagcggcg

SEQ ID NO: 924 - DNA, 20 bp, synthetic construct
  source 1..20: mol_type = other DNA
caggagcgagcagtggcgcg

SEQ ID NO: 925 - DNA, 20 bp, synthetic construct
  source 1..20: mol_type = other DNA
gctaaccgcgccggtgtgcg

SEQ ID NO: 926 - DNA, 20 bp, synthetic construct
  source 1..20: mol_type = other DNA
acaccggcgcggttagctcc

SEQ ID NO: 927 - DNA, 20 bp, synthetic construct
  source 1..20: mol_type = other DNA
ttagctcccggcgggaaagt

SEQ ID NO: 928 - DNA, 20 bp, synthetic construct
  source 1..20: mol_type = other DNA
cggcgcggttagctcccggc

SEQ ID NO: 929 - DNA, 20 bp, synthetic construct
  source 1..20: mol_type = other DNA
aaagtgggagagaatcaagt

SEQ ID NO: 930 - DNA, 20 bp, synthetic construct
  source 1..20: mol_type = other DNA
ggggggccaggagcgagcag

SEQ ID NO: 931 - DNA, 20 bp, synthetic construct
  source 1..20: mol_type = other DNA
aggctgccgcagccaatggt

SEQ ID NO: 932 - DNA, 20 bp, synthetic construct
  source 1..20: mol_type = other DNA
ggctcgccaaccattggctg

SEQ ID NO: 933 - DNA, 20 bp, synthetic construct
  source 1..20: mol_type = other DNA
gccaatggttggcgagccgc

SEQ ID NO: 934 - DNA, 20 bp, synthetic construct
  source 1..20: mol_type = other DNA
ccgcaaggggaggtgacgca

SEQ ID NO: 935 - DNA, 20 bp, synthetic construct
  source 1..20: mol_type = other DNA
gccggcggctcgccaaccat

SEQ ID NO: 936 - DNA, 20 bp, synthetic construct
  source 1..20: mol_type = other DNA
ggccccgcccagccagccgg

SEQ ID NO: 937 - DNA, 20 bp, synthetic construct
  source 1..20: mol_type = other DNA
gggagggcggggcccgcaag

SEQ ID NO: 938 - DNA, 20 bp, synthetic construct
  source 1..20: mol_type = other DNA
cgcaaggctgccgcagccaa

SEQ ID NO: 939 - DNA, 20 bp, synthetic construct
  source 1..20: mol_type = other DNA
agagctcgtcaattacggct

SEQ ID NO: 940 - DNA, 20 bp, synthetic construct
  source 1..20: mol_type = other DNA
atggttggcgagccgccggc

SEQ ID NO: 941 - DNA, 20 bp, synthetic construct
  source 1..20: mol_type = other DNA
cgagctcttcattagaaacc

SEQ ID NO: 942 - DNA, 20 bp, synthetic construct
  source 1..20: mol_type = other DNA
ttcattagaaaccaggcggg

SEQ ID NO: 943 - DNA, 20 bp, synthetic construct
  source 1..20: mol_type = other DNA
gctcttcattagaaaccagg

SEQ ID NO: 944 - DNA, 20 bp, synthetic construct
  source 1..20: mol_type = other DNA
tcattagaaaccaggcggga

SEQ ID NO: 945 - DNA, 20 bp, synthetic construct
  source 1..20: mol_type = other DNA
ttagaaaccaggcgggaggg

SEQ ID NO: 946 - DNA, 20 bp, synthetic construct
  source 1..20: mol_type = other DNA
agggttgctaccgtgacgtt

SEQ ID NO: 947 - DNA, 20 bp, synthetic construct
  source 1..20: mol_type = other DNA
ctatacattacctaacgtca

SEQ ID NO: 948 - DNA, 20 bp, synthetic construct
  source 1..20: mol_type = other DNA
agcttgctgcccagaaatgt

SEQ ID NO: 949 - DNA, 20 bp, synthetic construct
  source 1..20: mol_type = other DNA
cgtgacgttaggtaatgtat

SEQ ID NO: 950 - DNA, 20 bp, synthetic construct
  source 1..20: mol_type = other DNA
aaaacattgcattagagatg

SEQ ID NO: 951 - DNA, 20 bp, synthetic construct
  source 1..20: mol_type = other DNA
ctgggcagcaagctctttat

SEQ ID NO: 952 - DNA, 20 bp, synthetic construct
  source 1..20: mol_type = other DNA
gagatgaggttgttctgtgc

SEQ ID NO: 953 - DNA, 20 bp, synthetic construct
  source 1..20: mol_type = other DNA
attactaaagagctgagcgg

SEQ ID NO: 954 - DNA, 20 bp, synthetic construct
  source 1..20: mol_type = other DNA
caagctctttataggttgtt

SEQ ID NO: 955 - DNA, 20 bp, synthetic construct
  source 1..20: mol_type = other DNA
acttggtatggcccagaaat

SEQ ID NO: 956 - DNA, 20 bp, synthetic construct
  source 1..20: mol_type = other DNA
ggtagcaacccttagaaaac

SEQ ID NO: 957 - DNA, 20 bp, synthetic construct
  source 1..20: mol_type = other DNA
acaattactaaagagctgag

SEQ ID NO: 958 - DNA, 20 bp, synthetic construct
  source 1..20: mol_type = other DNA
aagtttaagaattagagcct

SEQ ID NO: 959 - DNA, 20 bp, synthetic construct
  source 1..20: mol_type = other DNA
ataatttacttcctatttct

SEQ ID NO: 960 - DNA, 20 bp, synthetic construct
  source 1..20: mol_type = other DNA
aataatttacttcctatttc

SEQ ID NO: 961 - DNA, 20 bp, synthetic construct
  source 1..20: mol_type = other DNA
gcgtcagcactagccggccg

SEQ ID NO: 962 - DNA, 20 bp, synthetic construct
  source 1..20: mol_type = other DNA
gtcagcactagccggccgcg

SEQ ID NO: 963 - DNA, 20 bp, synthetic construct
  source 1..20: mol_type = other DNA
cggctagtgctgacgcgtgt

SEQ ID NO: 964 - DNA, 20 bp, synthetic construct
  source 1..20: mol_type = other DNA
aagccccgccccgggaaacg

SEQ ID NO: 965 - DNA, 20 bp, synthetic construct
  source 1..20: mol_type = other DNA
ggaggaggtggagccaatgg

SEQ ID NO: 966 - DNA, 20 bp, synthetic construct
  source 1..20: mol_type = other DNA
aaaatggcgaagtcggtgct

SEQ ID NO: 967 - DNA, 20 bp, synthetic construct
  source 1..20: mol_type = other DNA
gttctccacccctggcgcgg

SEQ ID NO: 968 - DNA, 20 bp, synthetic construct
  source 1..20: mol_type = other DNA
ccccgggaaacgcggccccg

SEQ ID NO: 969 - DNA, 20 bp, synthetic construct
  source 1..20: mol_type = other DNA
ccgcggggccgcgtttcccg

SEQ ID NO: 970 - DNA, 20 bp, synthetic construct
  source 1..20: mol_type = other DNA
gcgactctgcctccgcgcca

SEQ ID NO: 971 - DNA, 20 bp, synthetic construct
  source 1..20: mol_type = other DNA
cgactctgcctccgcgccag

SEQ ID NO: 972 - DNA, 20 bp, synthetic construct
  source 1..20: mol_type = other DNA
gagaaccgaagccccgcccc

SEQ ID NO: 973 - DNA, 20 bp, synthetic construct
  source 1..20: mol_type = other DNA
tcggttctccacccctggcg

SEQ ID NO: 974 - DNA, 20 bp, synthetic construct
  source 1..20: mol_type = other DNA
ggagaaccgaagccccgccc

SEQ ID NO: 975 - DNA, 20 bp, synthetic construct
  source 1..20: mol_type = other DNA
ggcggaggaggtggagccaa

SEQ ID NO: 976 - DNA, 20 bp, synthetic construct
  source 1..20: mol_type = other DNA
agtggctttccgagcttgat

SEQ ID NO: 977 - DNA, 20 bp, synthetic construct
  source 1..20: mol_type = other DNA
tgtatttacaatggactcag

SEQ ID NO: 978 - DNA, 20 bp, synthetic construct
  source 1..20: mol_type = other DNA
catgagaacgccaatcttca

SEQ ID NO: 979 - DNA, 20 bp, synthetic construct
  source 1..20: mol_type = other DNA
gtatttacaatggactcagg

SEQ ID NO: 980 - DNA, 20 bp, synthetic construct
  source 1..20: mol_type = other DNA
actgtatttacaatggactc

SEQ ID NO: 981 - DNA, 20 bp, synthetic construct
  source 1..20: mol_type = other DNA
ataaaaggtaccatgaagat

SEQ ID NO: 982 - DNA, 20 bp, synthetic construct
  source 1..20: mol_type = other DNA
aaatacagtagataaaatca

SEQ ID NO: 983 - DNA, 20 bp, synthetic construct
  source 1..20: mol_type = other DNA
caatttggactattatttag

SEQ ID NO: 984 - DNA, 20 bp, synthetic construct
  source 1..20: mol_type = other DNA
gtgcagaagcaatgttattc

SEQ ID NO: 985 - DNA, 20 bp, synthetic construct
  source 1..20: mol_type = other DNA
ctgtatttacaatggactca

SEQ ID NO: 986 - DNA, 20 bp, synthetic construct
  source 1..20: mol_type = other DNA
cactaaataatagtccaaat

SEQ ID NO: 987 - DNA, 20 bp, synthetic construct
  source 1..20: mol_type = other DNA
ttggactattatttagtggt

SEQ ID NO: 988 - DNA, 20 bp, synthetic construct
  source 1..20: mol_type = other DNA
tttatctactgtatttacaa

SEQ ID NO: 989 - DNA, 20 bp, synthetic construct
  source 1..20: mol_type = other DNA
ttccaaattgtataccaatt

SEQ ID NO: 990 - DNA, 20 bp, synthetic construct
  source 1..20: mol_type = other DNA
gtccaaattggtatacaatt

SEQ ID NO: 991 - DNA, 20 bp, synthetic construct
  source 1..20: mol_type = other DNA
aatccgcgccaaagagccgc

SEQ ID NO: 992 - DNA, 20 bp, synthetic construct
  source 1..20: mol_type = other DNA
cggattagggggtctcggcg

SEQ ID NO: 993 - DNA, 20 bp, synthetic construct
  source 1..20: mol_type = other DNA
gctctttggcgcggattagg

SEQ ID NO: 994 - DNA, 20 bp, synthetic construct
  source 1..20: mol_type = other DNA
cggagcgcgagcccctctag

SEQ ID NO: 995 - DNA, 20 bp, synthetic construct
  source 1..20: mol_type = other DNA
cttctccctagtcccgctag

SEQ ID NO: 996 - DNA, 20 bp, synthetic construct
  source 1..20: mol_type = other DNA
agcgggactagggagaagcg

SEQ ID NO: 997 - DNA, 20 bp, synthetic construct
  source 1..20: mol_type = other DNA
cgaccggcggctctttggcg

SEQ ID NO: 998 - DNA, 20 bp, synthetic construct
  source 1..20: mol_type = other DNA
ctagcgggactagggagaag

SEQ ID NO: 999 - DNA, 20 bp, synthetic construct
  source 1..20: mol_type = other DNA
ggtgaggcgccaggcagcgc

SEQ ID NO: 1000 - DNA, 20 bp, synthetic construct
  source 1..20: mol_type = other DNA
tagcgggactagggagaagc

SEQ ID NO: 1001 - DNA, 20 bp, synthetic construct
  source 1..20: mol_type = other DNA
ccggaggcgcgcgcgaccgg

SEQ ID NO: 1002 - DNA, 20 bp, synthetic construct
  source 1..20: mol_type = other DNA
tagggggtctcggcgaggtg

SEQ ID NO: 1003 - DNA, 20 bp, synthetic construct
  source 1..20: mol_type = other DNA
gtgaggcgccaggcagcgct

SEQ ID NO: 1004 - DNA, 20 bp, synthetic construct
  source 1..20: mol_type = other DNA
aggcgccaggcagcgctggg

SEQ ID NO: 1005 - DNA, 20 bp, synthetic construct
  source 1..20: mol_type = other DNA
ggcgccaggcagcgctgggc

SEQ ID NO: 1006 - DNA, 20 bp, synthetic construct
  source 1..20: mol_type = other DNA
cggcgacgtaacccaatccg

SEQ ID NO: 1007 - DNA, 20 bp, synthetic construct
  source 1..20: mol_type = other DNA
aaggagagggcttgccaccg

SEQ ID NO: 1008 - DNA, 20 bp, synthetic construct
  source 1..20: mol_type = other DNA
gccattcacgcctcaggatg

SEQ ID NO: 1009 - DNA, 20 bp, synthetic construct
  source 1..20: mol_type = other DNA
ccggtaccctgaaaacgagc

SEQ ID NO: 1010 - DNA, 20 bp, synthetic construct
  source 1..20: mol_type = other DNA
gattgggccattcacgcctc

SEQ ID NO: 1011 - DNA, 20 bp, synthetic construct
  source 1..20: mol_type = other DNA
aaatcgtgtcacgtgatcag

SEQ ID NO: 1012 - DNA, 20 bp, synthetic construct
  source 1..20: mol_type = other DNA
actggccagtcctcatcctg

SEQ ID NO: 1013 - DNA, 20 bp, synthetic construct
  source 1..20: mol_type = other DNA
gagggcttgccaccgaggaa

SEQ ID NO: 1014 - DNA, 20 bp, synthetic construct
  source 1..20: mol_type = other DNA
aggaaacgccccttcctcgg

SEQ ID NO: 1015 - DNA, 20 bp, synthetic construct
  source 1..20: mol_type = other DNA
tcacgcctcaggatgaggac

SEQ ID NO: 1016 - DNA, 20 bp, synthetic construct
  source 1..20: mol_type = other DNA
actggccagtctgcgcctgg

SEQ ID NO: 1017 - DNA, 20 bp, synthetic construct
  source 1..20: mol_type = other DNA
ctggccagtctgcgcctgga

SEQ ID NO: 1018 - DNA, 20 bp, synthetic construct
  source 1..20: mol_type = other DNA
cccggggaggaagagctccg

SEQ ID NO: 1019 - DNA, 20 bp, synthetic construct
  source 1..20: mol_type = other DNA
gccagtctgcgcctggaggg

SEQ ID NO: 1020 - DNA, 20 bp, synthetic construct
  source 1..20: mol_type = other DNA
ggatttccatcgggctcccg

SEQ ID NO: 1021 - DNA, 20 bp, synthetic construct
  source 1..20: mol_type = other DNA
tatcattagccagactgcgc

SEQ ID NO: 1022 - DNA, 20 bp, synthetic construct
  source 1..20: mol_type = other DNA
ctaatgataggcgggccgtg

SEQ ID NO: 1023 - DNA, 20 bp, synthetic construct
  source 1..20: mol_type = other DNA
gcagtctggctaatgatagg

SEQ ID NO: 1024 - DNA, 20 bp, synthetic construct
  source 1..20: mol_type = other DNA
gctaatgataggcgggccgt

SEQ ID NO: 1025 - DNA, 20 bp, synthetic construct
  source 1..20: mol_type = other DNA
gaatcttggaattaaaaaga

SEQ ID NO: 1026 - DNA, 20 bp, synthetic construct
  source 1..20: mol_type = other DNA
cggttctgccgatagggacg

SEQ ID NO: 1027 - DNA, 20 bp, synthetic construct
  source 1..20: mol_type = other DNA
gttctgccgatagggacggg

SEQ ID NO: 1028 - DNA, 20 bp, synthetic construct
  source 1..20: mol_type = other DNA
ctatcattagccagactgcg

SEQ ID NO: 1029 - DNA, 20 bp, synthetic construct
  source 1..20: mol_type = other DNA
cgcgcagtctggctaatgat

SEQ ID NO: 1030 - DNA, 20 bp, synthetic construct
  source 1..20: mol_type = other DNA
ggggcggagcgcaaaacgcc

SEQ ID NO: 1031 - DNA, 20 bp, synthetic construct
  source 1..20: mol_type = other DNA
tgaatcttggaattaaaaag

SEQ ID NO: 1032 - DNA, 20 bp, synthetic construct
  source 1..20: mol_type = other DNA
aggggcggagcgcaaaacgc

SEQ ID NO: 1033 - DNA, 20 bp, synthetic construct
  source 1..20: mol_type = other DNA
tggaattaaaaagagggcag

SEQ ID NO: 1034 - DNA, 20 bp, synthetic construct
  source 1..20: mol_type = other DNA
tccgcccctccccctcccca

SEQ ID NO: 1035 - DNA, 20 bp, synthetic construct
  source 1..20: mol_type = other DNA
ttaattccaagattcaaacc

SEQ ID NO: 1036 - DNA, 20 bp, synthetic construct
  source 1..20: mol_type = other DNA
agtgccccctagtccgccag

SEQ ID NO: 1037 - DNA, 20 bp, synthetic construct
  source 1..20: mol_type = other DNA
caacccgcgaccggtccacg

SEQ ID NO: 1038 - DNA, 20 bp, synthetic construct
  source 1..20: mol_type = other DNA
acgttgggcggcgcagacaa

SEQ ID NO: 1039 - DNA, 20 bp, synthetic construct
  source 1..20: mol_type = other DNA
ggtgccgcgtggaccggtcg

SEQ ID NO: 1040 - DNA, 20 bp, synthetic construct
  source 1..20: mol_type = other DNA
tcgccctctggcggactagg

SEQ ID NO: 1041 - DNA, 20 bp, synthetic construct
  source 1..20: mol_type = other DNA
ggtgggcgcagggtcacgtt

SEQ ID NO: 1042 - DNA, 20 bp, synthetic construct
  source 1..20: mol_type = other DNA
gtgccccctagtccgccaga

SEQ ID NO: 1043 - DNA, 20 bp, synthetic construct
  source 1..20: mol_type = other DNA
gggcgcagggtcacgttggg

SEQ ID NO: 1044 - DNA, 20 bp, synthetic construct
  source 1..20: mol_type = other DNA
tccgccagagggcgactccg

SEQ ID NO: 1045 - DNA, 20 bp, synthetic construct
  source 1..20: mol_type = other DNA
gtcgccctctggcggactag

SEQ ID NO: 1046 - DNA, 20 bp, synthetic construct
  source 1..20: mol_type = other DNA
accgccccgcacgctcccgt

SEQ ID NO: 1047 - DNA, 20 bp, synthetic construct
  source 1..20: mol_type = other DNA
cggtgggcgcagggtcacgt

SEQ ID NO: 1048 - DNA, 20 bp, synthetic construct
  source 1..20: mol_type = other DNA
cggactagggggcactgccg

SEQ ID NO: 1049 - DNA, 20 bp, synthetic construct
  source 1..20: mol_type = other DNA
gtgccgcgtggaccggtcgc

SEQ ID NO: 1050 - DNA, 20 bp, synthetic construct
  source 1..20: mol_type = other DNA
agggagaggcgggtgccgcg

SEQ ID NO: 1051 - DNA, 20 bp, synthetic construct
  source 1..20: mol_type = other DNA
taaatcagtccgctaaactg

SEQ ID NO: 1052 - DNA, 20 bp, synthetic construct
  source 1..20: mol_type = other DNA
aaatcagtccgctaaactgg

SEQ ID NO: 1053 - DNA, 20 bp, synthetic construct
  source 1..20: mol_type = other DNA
ttagcggactgatttactcc

SEQ ID NO: 1054 - DNA, 20 bp, synthetic construct
  source 1..20: mol_type = other DNA
attggtaaatatgatcacgt

SEQ ID NO: 1055 - DNA, 20 bp, synthetic construct
  source 1..20: mol_type = other DNA
gggcctgcgggctctaattg

SEQ ID NO: 1056 - DNA, 20 bp, synthetic construct
  source 1..20: mol_type = other DNA
cgagccgggcacatggacct

SEQ ID NO: 1057 - DNA, 20 bp, synthetic construct
  source 1..20: mol_type = other DNA
tgatcatatttaccaatacc

SEQ ID NO: 1058 - DNA, 20 bp, synthetic construct
  source 1..20: mol_type = other DNA
tattggtaaatatgatcacg

SEQ ID NO: 1059 - DNA, 20 bp, synthetic construct
  source 1..20: mol_type = other DNA
cacgtgggccgcgcgaccaa

SEQ ID NO: 1060 - DNA, 20 bp, synthetic construct
  source 1..20: mol_type = other DNA
gcgccgcaattagagcccgc

SEQ ID NO: 1061 - DNA, 20 bp, synthetic construct
  source 1..20: mol_type = other DNA
caattagagcccgcaggccc

SEQ ID NO: 1062 - DNA, 20 bp, synthetic construct
  source 1..20: mol_type = other DNA
acctggcctggcccgcccag

SEQ ID NO: 1063 - DNA, 20 bp, synthetic construct
  source 1..20: mol_type = other DNA
gtgggccgcgcgaccaatgg

SEQ ID NO: 1064 - DNA, 20 bp, synthetic construct
  source 1..20: mol_type = other DNA
agcctccaccattggtcgcg

SEQ ID NO: 1065 - DNA, 20 bp, synthetic construct
  source 1..20: mol_type = other DNA
tggtcctggcagccgctggg

SEQ ID NO: 1066 - DNA, 20 bp, synthetic construct
  source 1..20: mol_type = other DNA
ccagtcacttagggaacccg

SEQ ID NO: 1067 - DNA, 20 bp, synthetic construct
  source 1..20: mol_type = other DNA
cagcaacagtccccagccgc

SEQ ID NO: 1068 - DNA, 20 bp, synthetic construct
  source 1..20: mol_type = other DNA
acagcaacagtccccagccg

SEQ ID NO: 1069 - DNA, 20 bp, synthetic construct
  source 1..20: mol_type = other DNA
attcttctaatcacccaagg

SEQ ID NO: 1070 - DNA, 20 bp, synthetic construct
  source 1..20: mol_type = other DNA
gtgcaggactaggacccgag

SEQ ID NO: 1071 - DNA, 20 bp, synthetic construct
  source 1..20: mol_type = other DNA
ttcttctaatcacccaaggt

SEQ ID NO: 1072 - DNA, 20 bp, synthetic construct
  source 1..20: mol_type = other DNA
acttagggaacccgcggctg

SEQ ID NO: 1073 - DNA, 20 bp, synthetic construct
  source 1..20: mol_type = other DNA
tggcgacctggccagacctg

SEQ ID NO: 1074 - DNA, 20 bp, synthetic construct
  source 1..20: mol_type = other DNA
tgttgctgtctccatggcaa

SEQ ID NO: 1075 - DNA, 20 bp, synthetic construct
  source 1..20: mol_type = other DNA
ttaacgtatccacccacctt

SEQ ID NO: 1076 - DNA, 20 bp, synthetic construct
  source 1..20: mol_type = other DNA
tggccaggtcgccattgcca

SEQ ID NO: 1077 - DNA, 20 bp, synthetic construct
  source 1..20: mol_type = other DNA
acccgagtggacctcaggtc

SEQ ID NO: 1078 - DNA, 20 bp, synthetic construct
  source 1..20: mol_type = other DNA
ttctaatcacccaaggtggg

SEQ ID NO: 1079 - DNA, 20 bp, synthetic construct
  source 1..20: mol_type = other DNA
ggtcctagtcctgcactctg

SEQ ID NO: 1080 - DNA, 20 bp, synthetic construct
  source 1..20: mol_type = other DNA
tgtccccatacacctggctc

SEQ ID NO: 1081 - DNA, 20 bp, synthetic construct
  source 1..20: mol_type = other DNA
gtgtattgtgtgcatcaatg

SEQ ID NO: 1082 - DNA, 20 bp, synthetic construct
  source 1..20: mol_type = other DNA
ctctgtgctgtaaaactcgg

SEQ ID NO: 1083 - DNA, 20 bp, synthetic construct
  source 1..20: mol_type = other DNA
tagagcaaagaaatctaaca

SEQ ID NO: 1084 - DNA, 20 bp, synthetic construct
  source 1..20: mol_type = other DNA
tgtggtgcagtaacttagta

SEQ ID NO: 1085 - DNA, 20 bp, synthetic construct
  source 1..20: mol_type = other DNA
gcgccgctgttcaccaacca

SEQ ID NO: 1086 - DNA, 20 bp, synthetic construct
  source 1..20: mol_type = other DNA
gtaaaactcggtggtttctg

SEQ ID NO: 1087 - DNA, 20 bp, synthetic construct
  source 1..20: mol_type = other DNA
tttccctggttggtgaacag

SEQ ID NO: 1088 - DNA, 20 bp, synthetic construct
  source 1..20: mol_type = other DNA
gttcaccaaccagggaaaaa

SEQ ID NO: 1089 - DNA, 20 bp, synthetic construct
  source 1..20: mol_type = other DNA
atgcaacagtgttcatggac

SEQ ID NO: 1090 - DNA, 20 bp, synthetic construct
  source 1..20: mol_type = other DNA
agcgccgctgttcaccaacc

SEQ ID NO: 1091 - DNA, 20 bp, synthetic construct
  source 1..20: mol_type = other DNA
taaaactcggtggtttctgt

SEQ ID NO: 1092 - DNA, 20 bp, synthetic construct
  source 1..20: mol_type = other DNA
attaattcagtgtcttaaaa

SEQ ID NO: 1093 - DNA, 20 bp, synthetic construct
  source 1..20: mol_type = other DNA
aattaatgcaacagtgttca

SEQ ID NO: 1094 - DNA, 20 bp, synthetic construct
  source 1..20: mol_type = other DNA
tttctctgtgctgtaaaact

SEQ ID NO: 1095 - DNA, 20 bp, synthetic construct
  source 1..20: mol_type = other DNA
ctagagcaaagaaatctaac

SEQ ID NO: 1096 - DNA, 20 bp, synthetic construct
  source 1..20: mol_type = other DNA
gcctacaggtcagtaggaca

SEQ ID NO: 1097 - DNA, 20 bp, synthetic construct
  source 1..20: mol_type = other DNA
cctacaggtcagtaggacaa

SEQ ID NO: 1098 - DNA, 20 bp, synthetic construct
  source 1..20: mol_type = other DNA
gctcctggagagcttggatt

SEQ ID NO: 1099 - DNA, 20 bp, synthetic construct
  source 1..20: mol_type = other DNA
gtaggacaagggcttgaatg

SEQ ID NO: 1100 - DNA, 20 bp, synthetic construct
  source 1..20: mol_type = other DNA
ctggagagcttggattggga

SEQ ID NO: 1101 - DNA, 20 bp, synthetic construct
  source 1..20: mol_type = other DNA
aatctctatggacttctaca

SEQ ID NO: 1102 - DNA, 20 bp, synthetic construct
  source 1..20: mol_type = other DNA
tagagatgcctgtttaggtg

SEQ ID NO: 1103 - DNA, 20 bp, synthetic construct
  source 1..20: mol_type = other DNA
cccttgtcctactgacctgt

SEQ ID NO: 1104 - DNA, 20 bp, synthetic construct
  source 1..20: mol_type = other DNA
aatcgctgtaacgcctcctg

SEQ ID NO: 1105 - DNA, 20 bp, synthetic construct
  source 1..20: mol_type = other DNA
ccaccctgtctgtcctcagg

SEQ ID NO: 1106 - DNA, 20 bp, synthetic construct
  source 1..20: mol_type = other DNA
ctagagatgcctgtttaggt

SEQ ID NO: 1107 - DNA, 20 bp, synthetic construct
  source 1..20: mol_type = other DNA
agtaggacaagggcttgaat

SEQ ID NO: 1108 - DNA, 20 bp, synthetic construct
  source 1..20: mol_type = other DNA
tacatggcctacaggtcagt

SEQ ID NO: 1109 - DNA, 20 bp, synthetic construct
  source 1..20: mol_type = other DNA
gacaagggcttgaatgggga

SEQ ID NO: 1110 - DNA, 20 bp, synthetic construct
  source 1..20: mol_type = other DNA
acaagggcttgaatggggaa

SEQ ID NO: 1111 - DNA, 20 bp, synthetic construct
  source 1..20: mol_type = other DNA
acaatccgtgaaggcttgag

SEQ ID NO: 1112 - DNA, 20 bp, synthetic construct
  source 1..20: mol_type = other DNA
gtgatggcttaataaccagc

SEQ ID NO: 1113 - DNA, 20 bp, synthetic construct
  source 1..20: mol_type = other DNA
tctgggaacaccagcagtat

SEQ ID NO: 1114 - DNA, 20 bp, synthetic construct
  source 1..20: mol_type = other DNA
tgctggtgttcccagagagc

SEQ ID NO: 1115 - DNA, 20 bp, synthetic construct
  source 1..20: mol_type = other DNA
tttctgaatgcccatcccca

SEQ ID NO: 1116 - DNA, 20 bp, synthetic construct
  source 1..20: mol_type = other DNA
tcctcagggacaatccgtga

SEQ ID NO: 1117 - DNA, 20 bp, synthetic construct
  source 1..20: mol_type = other DNA
aggacaaggtagagtcccta

SEQ ID NO: 1118 - DNA, 20 bp, synthetic construct
  source 1..20: mol_type = other DNA
acggattgtccctgaggaca

SEQ ID NO: 1119 - DNA, 20 bp, synthetic construct
  source 1..20: mol_type = other DNA
cccagagaaatggagacagg

SEQ ID NO: 1120 - DNA, 20 bp, synthetic construct
  source 1..20: mol_type = other DNA
agggactctaccttgtcctc

SEQ ID NO: 1121 - DNA, 20 bp, synthetic construct
  source 1..20: mol_type = other DNA
gccttcacggattgtccctg

SEQ ID NO: 1122 - DNA, 20 bp, synthetic construct
  source 1..20: mol_type = other DNA
ggacaaggtagagtccctaa

SEQ ID NO: 1123 - DNA, 20 bp, synthetic construct
  source 1..20: mol_type = other DNA
gtagagtccctaagggaaac

SEQ ID NO: 1124 - DNA, 20 bp, synthetic construct
  source 1..20: mol_type = other DNA
tttatgtgtagagatccagc

SEQ ID NO: 1125 - DNA, 20 bp, synthetic construct
  source 1..20: mol_type = other DNA
gggactctaccttgtcctca

SEQ ID NO: 1126 - DNA, 20 bp, synthetic construct
  source 1..20: mol_type = other DNA
ccctcgccgcagatataagg

SEQ ID NO: 1127 - DNA, 20 bp, synthetic construct
  source 1..20: mol_type = other DNA
gtcgcacctccgcatcccaa

SEQ ID NO: 1128 - DNA, 20 bp, synthetic construct
  source 1..20: mol_type = other DNA
cctgggccgccttatatctg

SEQ ID NO: 1129 - DNA, 20 bp, synthetic construct
  source 1..20: mol_type = other DNA
gctggaggcgcgcaaggatc

SEQ ID NO: 1130 - DNA, 20 bp, synthetic construct
  source 1..20: mol_type = other DNA
gcaaggatctggcgcttggt

SEQ ID NO: 1131 - DNA, 20 bp, synthetic construct
  source 1..20: mol_type = other DNA
tcccaaaggaaccagccgcg

SEQ ID NO: 1132 - DNA, 20 bp, synthetic construct
  source 1..20: mol_type = other DNA
cccaaaggaaccagccgcgc

SEQ ID NO: 1133 - DNA, 20 bp, synthetic construct
  source 1..20: mol_type = other DNA
ctggttcctttgggatgcgg

SEQ ID NO: 1134 - DNA, 20 bp, synthetic construct
  source 1..20: mol_type = other DNA
gccgccttatatctgcggcg

SEQ ID NO: 1135 - DNA, 20 bp, synthetic construct
  source 1..20: mol_type = other DNA
gcctccagcgctcgcccgcg

SEQ ID NO: 1136 - DNA, 20 bp, synthetic construct
  source 1..20: mol_type = other DNA
tttgggatgcggaggtgcga

SEQ ID NO: 1137 - DNA, 20 bp, synthetic construct
  source 1..20: mol_type = other DNA
gccgcgcgggcgagcgctgg

SEQ ID NO: 1138 - DNA, 20 bp, synthetic construct
  source 1..20: mol_type = other DNA
gggcgggccgaggctgcgga

SEQ ID NO: 1139 - DNA, 20 bp, synthetic construct
  source 1..20: mol_type = other DNA
ccagccgcgcgggcgagcgc

SEQ ID NO: 1140 - DNA, 20 bp, synthetic construct
  source 1..20: mol_type = other DNA
ggtgcagcgggcgcgcgcgg

SEQ ID NO: 1141 - DNA, 20 bp, synthetic construct
  source 1..20: mol_type = other DNA
ataagccaatcagagatcca

SEQ ID NO: 1142 - DNA, 20 bp, synthetic construct
  source 1..20: mol_type = other DNA
aaacatattccaaagagcaa

SEQ ID NO: 1143 - DNA, 20 bp, synthetic construct
  source 1..20: mol_type = other DNA
gatatataaaaggaccaacg

SEQ ID NO: 1144 - DNA, 20 bp, synthetic construct
  source 1..20: mol_type = other DNA
tttggtggtgacttccacgt

SEQ ID NO: 1145 - DNA, 20 bp, synthetic construct
  source 1..20: mol_type = other DNA
tgtttaaatttgttactccg

SEQ ID NO: 1146 - DNA, 20 bp, synthetic construct
  source 1..20: mol_type = other DNA
gtaaaatgagagcattcatt

SEQ ID NO: 1147 - DNA, 20 bp, synthetic construct
  source 1..20: mol_type = other DNA
atggaagtactctttgaaca

SEQ ID NO: 1148 - DNA, 20 bp, synthetic construct
  source 1..20: mol_type = other DNA
aagagcaaaggactgatatg

SEQ ID NO: 1149 - DNA, 20 bp, synthetic construct
  source 1..20: mol_type = other DNA
tggaagtactctttgaacat

SEQ ID NO: 1150 - DNA, 20 bp, synthetic construct
  source 1..20: mol_type = other DNA
agctggttcagatatataaa

SEQ ID NO: 1151 - DNA, 20 bp, synthetic construct
  source 1..20: mol_type = other DNA
ttactccgtggatctctgat

SEQ ID NO: 1152 - DNA, 20 bp, synthetic construct
  source 1..20: mol_type = other DNA
catatcagtcctttgctctt

SEQ ID NO: 1153 - DNA, 20 bp, synthetic construct
  source 1..20: mol_type = other DNA
agcattcatttggactaaaa

SEQ ID NO: 1154 - DNA, 20 bp, synthetic construct
  source 1..20: mol_type = other DNA
tgctctttggaatatgtttg

SEQ ID NO: 1155 - DNA, 20 bp, synthetic construct
  source 1..20: mol_type = other DNA
ggacccgcggatgtcgcgag

SEQ ID NO: 1156 - DNA, 20 bp, synthetic construct
  source 1..20: mol_type = other DNA
gcgccccctcgcgacatccg

SEQ ID NO: 1157 - DNA, 20 bp, synthetic construct
  source 1..20: mol_type = other DNA
ccggggccaagtccactcgg

SEQ ID NO: 1158 - DNA, 20 bp, synthetic construct
  source 1..20: mol_type = other DNA
gggacccgcggatgtcgcga

SEQ ID NO: 1159 - DNA, 20 bp, synthetic construct
  source 1..20: mol_type = other DNA
gacccgcggatgtcgcgagg

SEQ ID NO: 1160 - DNA, 20 bp, synthetic construct
  source 1..20: mol_type = other DNA
cctccgagtggacttggccc

SEQ ID NO: 1161 - DNA, 20 bp, synthetic construct
  source 1..20: mol_type = other DNA
cgagggtcggctcgctcctg

SEQ ID NO: 1162 - DNA, 20 bp, synthetic construct
  source 1..20: mol_type = other DNA
cggggccaagtccactcgga

SEQ ID NO: 1163 - DNA, 20 bp, synthetic construct
  source 1..20: mol_type = other DNA
ggggacccgcggatgtcgcg

SEQ ID NO: 1164 - DNA, 20 bp, synthetic construct
  source 1..20: mol_type = other DNA
gccgagggtcggctcgctcc

SEQ ID NO: 1165 - DNA, 20 bp, synthetic construct
  source 1..20: mol_type = other DNA
ctccaaacccagccgagggt

SEQ ID NO: 1166 - DNA, 20 bp, synthetic construct
  source 1..20: mol_type = other DNA
ccggctccaaacccagccga

SEQ ID NO: 1167 - DNA, 20 bp, synthetic construct
  source 1..20: mol_type = other DNA
cccggctccaaacccagccg

SEQ ID NO: 1168 - DNA, 20 bp, synthetic construct
  source 1..20: mol_type = other DNA
ggctcgctcctggggacccg

SEQ ID NO: 1169 - DNA, 20 bp, synthetic construct
  source 1..20: mol_type = other DNA
ggctccgtgctccctccgag

SEQ ID NO: 1170 - DNA, 20 bp, synthetic construct
  source 1..20: mol_type = other DNA
gatgcaagatccgcgccccg

SEQ ID NO: 1171 - DNA, 20 bp, synthetic construct
  source 1..20: mol_type = other DNA
cagatgcaagatccgcgccc

SEQ ID NO: 1172 - DNA, 20 bp, synthetic construct
  source 1..20: mol_type = other DNA
ccagcccaagcactccgccc

SEQ ID NO: 1173 - DNA, 20 bp, synthetic construct
  source 1..20: mol_type = other DNA
ccggggctgaagggaacggc

SEQ ID NO: 1174 - DNA, 20 bp, synthetic construct
  source 1..20: mol_type = other DNA
cgccgttcccttcagccccg

SEQ ID NO: 1175 - DNA, 20 bp, synthetic construct
  source 1..20: mol_type = other DNA
cccggggctgaagggaacgg

SEQ ID NO: 1176 - DNA, 20 bp, synthetic construct
  source 1..20: mol_type = other DNA
cccgccgttcccttcagccc

SEQ ID NO: 1177 - DNA, 20 bp, synthetic construct
  source 1..20: mol_type = other DNA
agggaacggcgggatggggt

SEQ ID NO: 1178 - DNA, 20 bp, synthetic construct
  source 1..20: mol_type = other DNA
atctgaaactgagcagagca

SEQ ID NO: 1179 - DNA, 20 bp, synthetic construct
  source 1..20: mol_type = other DNA
ctgtttccgggcttatcacg

SEQ ID NO: 1180 - DNA, 20 bp, synthetic construct
  source 1..20: mol_type = other DNA
cctgggcggagtgcttgggc

SEQ ID NO: 1181 - DNA, 20 bp, synthetic construct
  source 1..20: mol_type = other DNA
ccgccgttcccttcagcccc

SEQ ID NO: 1182 - DNA, 20 bp, synthetic construct
  source 1..20: mol_type = other DNA
aactgagcagagcagggcgc

SEQ ID NO: 1183 - DNA, 20 bp, synthetic construct
  source 1..20: mol_type = other DNA
actgagcagagcagggcgcc

SEQ ID NO: 1184 - DNA, 20 bp, synthetic construct
  source 1..20: mol_type = other DNA
gcagagcagggcgccgggca

SEQ ID NO: 1185 - DNA, 20 bp, synthetic construct
  source 1..20: mol_type = other DNA
tccgcgccgtcgattggccc

SEQ ID NO: 1186 - DNA, 20 bp, synthetic construct
  source 1..20: mol_type = other DNA
caggtggctgtcagtcgatg

SEQ ID NO: 1187 - DNA, 20 bp, synthetic construct
  source 1..20: mol_type = other DNA
acggcgcggacggccgcttg

SEQ ID NO: 1188 - DNA, 20 bp, synthetic construct
  source 1..20: mol_type = other DNA
gtggctgtcagtcgatgcgg

SEQ ID NO: 1189 - DNA, 20 bp, synthetic construct
  source 1..20: mol_type = other DNA
gcatcgactgacagccacct

SEQ ID NO: 1190 - DNA, 20 bp, synthetic construct
  source 1..20: mol_type = other DNA
aggaagtcccgcgccacaag

SEQ ID NO: 1191 - DNA, 20 bp, synthetic construct
  source 1..20: mol_type = other DNA
gcgccgtcgattggcccagg

SEQ ID NO: 1192 - DNA, 20 bp, synthetic construct
  source 1..20: mol_type = other DNA
gcggacggccgcttgtggcg

SEQ ID NO: 1193 - DNA, 20 bp, synthetic construct
  source 1..20: mol_type = other DNA
cagccacctgggccaatcga

SEQ ID NO: 1194 - DNA, 20 bp, synthetic construct
  source 1..20: mol_type = other DNA
tcgatgcggcgggccctagt

SEQ ID NO: 1195 - DNA, 20 bp, synthetic construct
  source 1..20: mol_type = other DNA
acctgggccaatcgacggcg

SEQ ID NO: 1196 - DNA, 20 bp, synthetic construct
  source 1..20: mol_type = other DNA
cgaagcccgcagccaatggg

SEQ ID NO: 1197 - DNA, 20 bp, synthetic construct
  source 1..20: mol_type = other DNA
cgggacttcctgcctggcgg

SEQ ID NO: 1198 - DNA, 20 bp, synthetic construct
  source 1..20: mol_type = other DNA
gcgcgggacttcctgcctgg

SEQ ID NO: 1199 - DNA, 20 bp, synthetic construct
  source 1..20: mol_type = other DNA
gcgggacttcctgcctggcg

SEQ ID NO: 1200 - DNA, 20 bp, synthetic construct
  source 1..20: mol_type = other DNA
ggcccctctcacaacccccg

SEQ ID NO: 1201 - DNA, 20 bp, synthetic construct
  source 1..20: mol_type = other DNA
gccacgcccggtgagcaccc

SEQ ID NO: 1202 - DNA, 20 bp, synthetic construct
  source 1..20: mol_type = other DNA
cgagccgcgggggttgtgag

SEQ ID NO: 1203 - DNA, 20 bp, synthetic construct
  source 1..20: mol_type = other DNA
gtgggggaagcggcgcatgg

SEQ ID NO: 1204 - DNA, 20 bp, synthetic construct
  source 1..20: mol_type = other DNA
ggttgtgagaggggccgcgg

SEQ ID NO: 1205 - DNA, 20 bp, synthetic construct
  source 1..20: mol_type = other DNA
tggggggtccgggatgttgg

SEQ ID NO: 1206 - DNA, 20 bp, synthetic construct
  source 1..20: mol_type = other DNA
tgagagtgtggggtggcgtg

SEQ ID NO: 1207 - DNA, 20 bp, synthetic construct
  source 1..20: mol_type = other DNA
gcccgcaccccccaacatcc

SEQ ID NO: 1208 - DNA, 20 bp, synthetic construct
  source 1..20: mol_type = other DNA
tgggggaagcggcgcatggg

SEQ ID NO: 1209 - DNA, 20 bp, synthetic construct
  source 1..20: mol_type = other DNA
ggggggtccgggatgttggg

SEQ ID NO: 1210 - DNA, 20 bp, synthetic construct
  source 1..20: mol_type = other DNA
ggaggtgggggtgagagtgt

SEQ ID NO: 1211 - DNA, 20 bp, synthetic construct
  source 1..20: mol_type = other DNA
gggccgcggaggtggaggtg

SEQ ID NO: 1212 - DNA, 20 bp, synthetic construct
  source 1..20: mol_type = other DNA
gctttggggcaggcgggtgg

SEQ ID NO: 1213 - DNA, 20 bp, synthetic construct
  source 1..20: mol_type = other DNA
gtgggggtgagagtgtgggg

SEQ ID NO: 1214 - DNA, 20 bp, synthetic construct
  source 1..20: mol_type = other DNA
ggggcggggccgagccgcgg

SEQ ID NO: 1215 - DNA, 20 bp, synthetic construct
  source 1..20: mol_type = other DNA
ccagacgtcaacgactgtcg

SEQ ID NO: 1216 - DNA, 20 bp, synthetic construct
  source 1..20: mol_type = other DNA
cgacagtcgttgacgtctgg

SEQ ID NO: 1217 - DNA, 20 bp, synthetic construct
  source 1..20: mol_type = other DNA
tattactgtgattgcatccc

SEQ ID NO: 1218 - DNA, 20 bp, synthetic construct
  source 1..20: mol_type = other DNA
gcgggtgggccgaggcacat

SEQ ID NO: 1219 - DNA, 20 bp, synthetic construct
  source 1..20: mol_type = other DNA
gcgacagtcgttgacgtctg

SEQ ID NO: 1220 - DNA, 20 bp, synthetic construct
  source 1..20: mol_type = other DNA
cagacgtcaacgactgtcgc

SEQ ID NO: 1221 - DNA, 20 bp, synthetic construct
  source 1..20: mol_type = other DNA
gccatatcagtcagtatggg

SEQ ID NO: 1222 - DNA, 20 bp, synthetic construct
  source 1..20: mol_type = other DNA
tcttgcaaaaacctgattgg

SEQ ID NO: 1223 - DNA, 20 bp, synthetic construct
  source 1..20: mol_type = other DNA
actgccatatcagtcagtat

SEQ ID NO: 1224 - DNA, 20 bp, synthetic construct
  source 1..20: mol_type = other DNA
ggcgggtgggccgaggcaca

SEQ ID NO: 1225 - DNA, 20 bp, synthetic construct
  source 1..20: mol_type = other DNA
ctgccatatcagtcagtatg

SEQ ID NO: 1226 - DNA, 20 bp, synthetic construct
  source 1..20: mol_type = other DNA
accccccatactgactgata

SEQ ID NO: 1227 - DNA, 20 bp, synthetic construct
  source 1..20: mol_type = other DNA
atgtgcctcggcccacccgc

SEQ ID NO: 1228 - DNA, 20 bp, synthetic construct
  source 1..20: mol_type = other DNA
tgccatatcagtcagtatgg

SEQ ID NO: 1229 - DNA, 20 bp, synthetic construct
  source 1..20: mol_type = other DNA
tgattgcatcccgggctgga

SEQ ID NO: 1230 - DNA, 20 bp, synthetic construct
  source 1..20: mol_type = other DNA
tggcaggttcaaccaacggg

SEQ ID NO: 1231 - DNA, 20 bp, synthetic construct
  source 1..20: mol_type = other DNA
ggcaggttcaaccaacgggt

SEQ ID NO: 1232 - DNA, 20 bp, synthetic construct
  source 1..20: mol_type = other DNA
gtgggcacgtcgtcctcgcg

SEQ ID NO: 1233 - DNA, 20 bp, synthetic construct
  source 1..20: mol_type = other DNA
aggacgacgtgcccacccgt

SEQ ID NO: 1234 - DNA, 20 bp, synthetic construct
  source 1..20: mol_type = other DNA
ccaaacgctccaatcgtcag

SEQ ID NO: 1235 - DNA, 20 bp, synthetic construct
  source 1..20: mol_type = other DNA
ggcacgtcgtcctcgcgagg

SEQ ID NO: 1236 - DNA, 20 bp, synthetic construct
  source 1..20: mol_type = other DNA
gggatggcaggttcaaccaa

SEQ ID NO: 1237 - DNA, 20 bp, synthetic construct
  source 1..20: mol_type = other DNA
gcgcgctgtatccacccctc

SEQ ID NO: 1238 - DNA, 20 bp, synthetic construct
  source 1..20: mol_type = other DNA
acgattggagcgtttggacc

SEQ ID NO: 1239 - DNA, 20 bp, synthetic construct
  source 1..20: mol_type = other DNA
cgctgtatccacccctcggg

SEQ ID NO: 1240 - DNA, 20 bp, synthetic construct
  source 1..20: mol_type = other DNA
tcgcgaggaggcgtgccctg

SEQ ID NO: 1241 - DNA, 20 bp, synthetic construct
  source 1..20: mol_type = other DNA
aacgctccaatcgtcagcgg

SEQ ID NO: 1242 - DNA, 20 bp, synthetic construct
  source 1..20: mol_type = other DNA
tccaatcgtcagcggcggcg

SEQ ID NO: 1243 - DNA, 20 bp, synthetic construct
  source 1..20: mol_type = other DNA
gcgcccgagcggcgattggt

SEQ ID NO: 1244 - DNA, 20 bp, synthetic construct
  source 1..20: mol_type = other DNA
ttggttgaacctgccatccc

SEQ ID NO: 1245 - DNA, 20 bp, synthetic construct
  source 1..20: mol_type = other DNA
accaagaccacaatgcaacg

SEQ ID NO: 1246 - DNA, 20 bp, synthetic construct
  source 1..20: mol_type = other DNA
aagcttgacggtgaatcctc

SEQ ID NO: 1247 - DNA, 20 bp, synthetic construct
  source 1..20: mol_type = other DNA
gaagcttgacggtgaatcct

SEQ ID NO: 1248 - DNA, 20 bp, synthetic construct
  source 1..20: mol_type = other DNA
tttgcgagaacggcaaatgg

SEQ ID NO: 1249 - DNA, 20 bp, synthetic construct
  source 1..20: mol_type = other DNA
tgctctctccttaaaacccg

SEQ ID NO: 1250 - DNA, 20 bp, synthetic construct
  source 1..20: mol_type = other DNA
ctaccaagaccacaatgcaa

SEQ ID NO: 1251 - DNA, 20 bp, synthetic construct
  source 1..20: mol_type = other DNA
ggagagagcaaagtcctgag

SEQ ID NO: 1252 - DNA, 20 bp, synthetic construct
  source 1..20: mol_type = other DNA
acggcaaatggcggttgcag

SEQ ID NO: 1253 - DNA, 20 bp, synthetic construct
  source 1..20: mol_type = other DNA
gaacaaacacgcgccagcca

SEQ ID NO: 1254 - DNA, 20 bp, synthetic construct
  source 1..20: mol_type = other DNA
cagaggctcgtccgaattct

SEQ ID NO: 1255 - DNA, 20 bp, synthetic construct
  source 1..20: mol_type = other DNA
ggagcagcgagccgagaatt

SEQ ID NO: 1256 - DNA, 20 bp, synthetic construct
  source 1..20: mol_type = other DNA
gagagagcaaagtcctgaga

SEQ ID NO: 1257 - DNA, 20 bp, synthetic construct
  source 1..20: mol_type = other DNA
attctcggctcgctgctccc

SEQ ID NO: 1258 - DNA, 20 bp, synthetic construct
  source 1..20: mol_type = other DNA
ttcccagtgagcagcaggcg

SEQ ID NO: 1259 - DNA, 20 bp, synthetic construct
  source 1..20: mol_type = other DNA
cattctgggctaggtgagca

SEQ ID NO: 1260 - DNA, 20 bp, synthetic construct
  source 1..20: mol_type = other DNA
cctagaagcggcgccgcccg

SEQ ID NO: 1261 - DNA, 20 bp, synthetic construct
  source 1..20: mol_type = other DNA
gcccagcgcgcgcaccaagg

SEQ ID NO: 1262 - DNA, 20 bp, synthetic construct
  source 1..20: mol_type = other DNA
ccagcccagcgcgcgcacca

SEQ ID NO: 1263 - DNA, 20 bp, synthetic construct
  source 1..20: mol_type = other DNA
ccagcgcgcgcaccaaggcg

SEQ ID NO: 1264 - DNA, 20 bp, synthetic construct
  source 1..20: mol_type = other DNA
gcggcccgtgcgcgtgtccg

SEQ ID NO: 1265 - DNA, 20 bp, synthetic construct
  source 1..20: mol_type = other DNA
ttggtgcgcgcgctgggctg

SEQ ID NO: 1266 - DNA, 20 bp, synthetic construct
  source 1..20: mol_type = other DNA
tgcgcgtgtccggggccagg

SEQ ID NO: 1267 - DNA, 20 bp, synthetic construct
  source 1..20: mol_type = other DNA
ctggccccggacacgcgcac

SEQ ID NO: 1268 - DNA, 20 bp, synthetic construct
  source 1..20: mol_type = other DNA
gcgcgcgcaccaaggcgggg

SEQ ID NO: 1269 - DNA, 20 bp, synthetic construct
  source 1..20: mol_type = other DNA
gcgtgtccggggccaggagg

SEQ ID NO: 1270 - DNA, 20 bp, synthetic construct
  source 1..20: mol_type = other DNA
cctggccccggacacgcgca

SEQ ID NO: 1271 - DNA, 20 bp, synthetic construct
  source 1..20: mol_type = other DNA
ccagccgcagcgcgcacgcg

SEQ ID NO: 1272 - DNA, 20 bp, synthetic construct
  source 1..20: mol_type = other DNA
gcgcgctgcggctgggcgag

SEQ ID NO: 1273 - DNA, 20 bp, synthetic construct
  source 1..20: mol_type = other DNA
tgcgcgctgcggctgggcga

SEQ ID NO: 1274 - DNA, 20 bp, synthetic construct
  source 1..20: mol_type = other DNA
cgcgctgggctggggctgcg

SEQ ID NO: 1275 - DNA, 20 bp, synthetic construct
  source 1..20: mol_type = other DNA
ccttccgggtcccttaaccc

SEQ ID NO: 1276 - DNA, 20 bp, synthetic construct
  source 1..20: mol_type = other DNA
gccgcttggacatagacacc

SEQ ID NO: 1277 - DNA, 20 bp, synthetic construct
  source 1..20: mol_type = other DNA
accttccgggtcccttaacc

SEQ ID NO: 1278 - DNA, 20 bp, synthetic construct
  source 1..20: mol_type = other DNA
cccgggtgtctatgtccaag

SEQ ID NO: 1279 - DNA, 20 bp, synthetic construct
  source 1..20: mol_type = other DNA
gacacccgggttaagggacc

SEQ ID NO: 1280 - DNA, 20 bp, synthetic construct
  source 1..20: mol_type = other DNA
gaccacccttcaattgtcac

SEQ ID NO: 1281 - DNA, 20 bp, synthetic construct
  source 1..20: mol_type = other DNA
agcctgtgacaattgaaggg

SEQ ID NO: 1282 - DNA, 20 bp, synthetic construct
  source 1..20: mol_type = other DNA
gtggcgtccgaacgcagccg

SEQ ID NO: 1283 - DNA, 20 bp, synthetic construct
  source 1..20: mol_type = other DNA
gtagcagggactggctgcta

SEQ ID NO: 1284 - DNA, 20 bp, synthetic construct
  source 1..20: mol_type = other DNA
catgaagtgaataaacactg

SEQ ID NO: 1285 - DNA, 20 bp, synthetic construct
  source 1..20: mol_type = other DNA
ccgaggcaaccgaagtagca

SEQ ID NO: 1286 - DNA, 20 bp, synthetic construct
  source 1..20: mol_type = other DNA
gcaaccgaagtagcagggac

SEQ ID NO: 1287 - DNA, 20 bp, synthetic construct
  source 1..20: mol_type = other DNA
tcggctgcgttcggacgcca

SEQ ID NO: 1288 - DNA, 20 bp, synthetic construct
  source 1..20: mol_type = other DNA
ccgcttggacatagacaccc

SEQ ID NO: 1289 - DNA, 20 bp, synthetic construct
  source 1..20: mol_type = other DNA
gactggctgctagggattcg

SEQ ID NO: 1290 - DNA, 20 bp, synthetic construct
  source 1..20: mol_type = other DNA
ccctccccagcaacgtgaag

SEQ ID NO: 1291 - DNA, 20 bp, synthetic construct
  source 1..20: mol_type = other DNA
atgagagggcgtgctcaccc

SEQ ID NO: 1292 - DNA, 20 bp, synthetic construct
  source 1..20: mol_type = other DNA
ccctccccttcacgttgctg

SEQ ID NO: 1293 - DNA, 20 bp, synthetic construct
  source 1..20: mol_type = other DNA
agtgcgaggaggaacttgga

SEQ ID NO: 1294 - DNA, 20 bp, synthetic construct
  source 1..20: mol_type = other DNA
tgcgaggaggaacttggaag

SEQ ID NO: 1295 - DNA, 20 bp, synthetic construct
  source 1..20: mol_type = other DNA
cccctccccagcaacgtgaa

SEQ ID NO: 1296 - DNA, 20 bp, synthetic construct
  source 1..20: mol_type = other DNA
tgagagggcgtgctcaccct

SEQ ID NO: 1297 - DNA, 20 bp, synthetic construct
  source 1..20: mol_type = other DNA
ccccctccccagcaacgtga

SEQ ID NO: 1298 - DNA, 20 bp, synthetic construct
  source 1..20: mol_type = other DNA
gtgcgaggaggaacttggaa

SEQ ID NO: 1299 - DNA, 20 bp, synthetic construct
  source 1..20: mol_type = other DNA
tccccagcaacgtgaagggg

SEQ ID NO: 1300 - DNA, 20 bp, synthetic construct
  source 1..20: mol_type = other DNA
gggtagtgcgaggaggaact

SEQ ID NO: 1301 - DNA, 20 bp, synthetic construct
  source 1..20: mol_type = other DNA
ccccagcaacgtgaagggga

SEQ ID NO: 1302 - DNA, 20 bp, synthetic construct
  source 1..20: mol_type = other DNA
ggggagggggtagtgcgagg

SEQ ID NO: 1303 - DNA, 20 bp, synthetic construct
  source 1..20: mol_type = other DNA
gaaggggaggggcgtgccca

SEQ ID NO: 1304 - DNA, 20 bp, synthetic construct
  source 1..20: mol_type = other DNA
ccttcacgttgctggggagg

SEQ ID NO: 1305 - DNA, 20 bp, synthetic construct
  source 1..20: mol_type = other DNA
ggaagtgctacgtcgcgacg

SEQ ID NO: 1306 - DNA, 20 bp, synthetic construct
  source 1..20: mol_type = other DNA
aagtgctacgtcgcgacgcg

SEQ ID NO: 1307 - DNA, 20 bp, synthetic construct
  source 1..20: mol_type = other DNA
gaagtgctacgtcgcgacgc

SEQ ID NO: 1308 - DNA, 20 bp, synthetic construct
  source 1..20: mol_type = other DNA
taaaagtgctggcttagcgg

SEQ ID NO: 1309 - DNA, 20 bp, synthetic construct
  source 1..20: mol_type = other DNA
tattgcgcctgcgctagctg

SEQ ID NO: 1310 - DNA, 20 bp, synthetic construct
  source 1..20: mol_type = other DNA
gaaaagatgagtttcacgct

SEQ ID NO: 1311 - DNA, 20 bp, synthetic construct
  source 1..20: mol_type = other DNA
tgagtgacagcccctccggg

SEQ ID NO: 1312 - DNA, 20 bp, synthetic construct
  source 1..20: mol_type = other DNA
ggcggagccccagctagcgc

SEQ ID NO: 1313 - DNA, 20 bp, synthetic construct
  source 1..20: mol_type = other DNA
aaacactgtcatttccatcc

SEQ ID NO: 1314 - DNA, 20 bp, synthetic construct
  source 1..20: mol_type = other DNA
ctccgcccttccgcccggag

SEQ ID NO: 1315 - DNA, 20 bp, synthetic construct
  source 1..20: mol_type = other DNA
ggctccgcccttccgcccgg

SEQ ID NO: 1316 - DNA, 20 bp, synthetic construct
  source 1..20: mol_type = other DNA
tgacagcccctccgggcgga

SEQ ID NO: 1317 - DNA, 20 bp, synthetic construct
  source 1..20: mol_type = other DNA
ctgtgagtgacagcccctcc

SEQ ID NO: 1318 - DNA, 20 bp, synthetic construct
  source 1..20: mol_type = other DNA
gctccgcccttccgcccgga

SEQ ID NO: 1319 - DNA, 20 bp, synthetic construct
  source 1..20: mol_type = other DNA
gctgtgagtgacagcccctc

SEQ ID NO: 1320 - DNA, 20 bp, synthetic construct
  source 1..20: mol_type = other DNA
aacatggccgcgctctaatg

SEQ ID NO: 1321 - DNA, 20 bp, synthetic construct
  source 1..20: mol_type = other DNA
gcagcgtactcctattgcgc

SEQ ID NO: 1322 - DNA, 20 bp, synthetic construct
  source 1..20: mol_type = other DNA
ggatacgataagcaagatgg

SEQ ID NO: 1323 - DNA, 20 bp, synthetic construct
  source 1..20: mol_type = other DNA
gctctaatgtggctttcccg

SEQ ID NO: 1324 - DNA, 20 bp, synthetic construct
  source 1..20: mol_type = other DNA
gggaaagccacattagagcg

SEQ ID NO: 1325 - DNA, 20 bp, synthetic construct
  source 1..20: mol_type = other DNA
ggccacctactggtttgcag

SEQ ID NO: 1326 - DNA, 20 bp, synthetic construct
  source 1..20: mol_type = other DNA
tcccggcgaacatatggatt

SEQ ID NO: 1327 - DNA, 20 bp, synthetic construct
  source 1..20: mol_type = other DNA
tgcttatcgtatccgtatgg

SEQ ID NO: 1328 - DNA, 20 bp, synthetic construct
  source 1..20: mol_type = other DNA
tagagcccccaagacccctc

SEQ ID NO: 1329 - DNA, 20 bp, synthetic construct
  source 1..20: mol_type = other DNA
tacggatacgataagcaaga

SEQ ID NO: 1330 - DNA, 20 bp, synthetic construct
  source 1..20: mol_type = other DNA
ctccgctgcaaaccagtagg

SEQ ID NO: 1331 - DNA, 20 bp, synthetic construct
  source 1..20: mol_type = other DNA
gcaagatggcggcgcctgag

SEQ ID NO: 1332 - DNA, 20 bp, synthetic construct
  source 1..20: mol_type = other DNA
gcggcgcctgaggggtcttg

SEQ ID NO: 1333 - DNA, 20 bp, synthetic construct
  source 1..20: mol_type = other DNA
gctgcaaaccagtaggtggc

SEQ ID NO: 1334 - DNA, 20 bp, synthetic construct
  source 1..20: mol_type = other DNA
agcaagatggcggcgcctga

SEQ ID NO: 1335 - DNA, 20 bp, synthetic construct
  source 1..20: mol_type = other DNA
gcagtgcgccagttaacgca

SEQ ID NO: 1336 - DNA, 20 bp, synthetic construct
  source 1..20: mol_type = other DNA
caggtctgcatacccaccaa

SEQ ID NO: 1337 - DNA, 20 bp, synthetic construct
  source 1..20: mol_type = other DNA
gcggcaggccagcccttggt

SEQ ID NO: 1338 - DNA, 20 bp, synthetic construct
  source 1..20: mol_type = other DNA
tgcagtgcgccagttaacgc

SEQ ID NO: 1339 - DNA, 20 bp, synthetic construct
  source 1..20: mol_type = other DNA
cagggtctcagagcccagtg

SEQ ID NO: 1340 - DNA, 20 bp, synthetic construct
  source 1..20: mol_type = other DNA
ccaggtctgcatacccacca

SEQ ID NO: 1341 - DNA, 20 bp, synthetic construct
  source 1..20: mol_type = other DNA
tctgcatacccaccaagggc

SEQ ID NO: 1342 - DNA, 20 bp, synthetic construct
  source 1..20: mol_type = other DNA
ccttggtgggtatgcagacc

SEQ ID NO: 1343 - DNA, 20 bp, synthetic construct
  source 1..20: mol_type = other DNA
aactctgcatgcaggtcagg

SEQ ID NO: 1344 - DNA, 20 bp, synthetic construct
  source 1..20: mol_type = other DNA
agcctggcttcagaacctcc

SEQ ID NO: 1345 - DNA, 20 bp, synthetic construct
  source 1..20: mol_type = other DNA
actgggctctgagaccctgg

SEQ ID NO: 1346 - DNA, 20 bp, synthetic construct
  source 1..20: mol_type = other DNA
gcctggcttcagaacctcca

SEQ ID NO: 1347 - DNA, 20 bp, synthetic construct
  source 1..20: mol_type = other DNA
cccactgggctctgagaccc

SEQ ID NO: 1348 - DNA, 20 bp, synthetic construct
  source 1..20: mol_type = other DNA
cactgggctctgagaccctg

SEQ ID NO: 1349 - DNA, 20 bp, synthetic construct
  source 1..20: mol_type = other DNA
ggggtgctggggctccctgg

SEQ ID NO: 1350 - DNA, 20 bp, synthetic construct
  source 1..20: mol_type = other DNA
ttgcgtccctaccaatagca

SEQ ID NO: 1351 - DNA, 20 bp, synthetic construct
  source 1..20: mol_type = other DNA
aaggtcaaagctatgtgctg

SEQ ID NO: 1352 - DNA, 20 bp, synthetic construct
  source 1..20: mol_type = other DNA
caaaggtcaaagctatgtgc

SEQ ID NO: 1353 - DNA, 20 bp, synthetic construct
  source 1..20: mol_type = other DNA
tcagtgggattgcttaagaa

SEQ ID NO: 1354 - DNA, 20 bp, synthetic construct
  source 1..20: mol_type = other DNA
aaaggtcaaagctatgtgct

SEQ ID NO: 1355 - DNA, 20 bp, synthetic construct
  source 1..20: mol_type = other DNA
aaactgccctgctattggta

SEQ ID NO: 1356 - DNA, 20 bp, synthetic construct
  source 1..20: mol_type = other DNA
tcttaaaactgccctgctat

SEQ ID NO: 1357 - DNA, 20 bp, synthetic construct
  source 1..20: mol_type = other DNA
ctcagtgggattgcttaaga

SEQ ID NO: 1358 - DNA, 20 bp, synthetic construct
  source 1..20: mol_type = other DNA
agaactgactcaaatgttca

SEQ ID NO: 1359 - DNA, 20 bp, synthetic construct
  source 1..20: mol_type = other DNA
gctattggtagggacgcaac

SEQ ID NO: 1360 - DNA, 20 bp, synthetic construct
  source 1..20: mol_type = other DNA
aaaactgccctgctattggt

SEQ ID NO: 1361 - DNA, 20 bp, synthetic construct
  source 1..20: mol_type = other DNA
aagaactgactcaaatgttc

SEQ ID NO: 1362 - DNA, 20 bp, synthetic construct
  source 1..20: mol_type = other DNA
gcaatcccactgagatacaa

SEQ ID NO: 1363 - DNA, 20 bp, synthetic construct
  source 1..20: mol_type = other DNA
ggttatctgctttaaaataa

SEQ ID NO: 1364 - DNA, 20 bp, synthetic construct
  source 1..20: mol_type = other DNA
gtgctggggtttcatgttac

SEQ ID NO: 1365 - DNA, 20 bp, synthetic construct
  source 1..20: mol_type = other DNA
cagacgcagattcaccgggc

SEQ ID NO: 1366 - DNA, 20 bp, synthetic construct
  source 1..20: mol_type = other DNA
cagcgctggggaaccttcag

SEQ ID NO: 1367 - DNA, 20 bp, synthetic construct
  source 1..20: mol_type = other DNA
aaagctgcgactagtccctg

SEQ ID NO: 1368 - DNA, 20 bp, synthetic construct
  source 1..20: mol_type = other DNA
tctgcagaacgcgccactga

SEQ ID NO: 1369 - DNA, 20 bp, synthetic construct
  source 1..20: mol_type = other DNA
tctgcagacgcagattcacc

SEQ ID NO: 1370 - DNA, 20 bp, synthetic construct
  source 1..20: mol_type = other DNA
gcagacgcagattcaccggg

SEQ ID NO: 1371 - DNA, 20 bp, synthetic construct
  source 1..20: mol_type = other DNA
gggaggaggccagccagcgc

SEQ ID NO: 1372 - DNA, 20 bp, synthetic construct
  source 1..20: mol_type = other DNA
ttgcactgccaaattctgag

SEQ ID NO: 1373 - DNA, 20 bp, synthetic construct
  source 1..20: mol_type = other DNA
ggaggaggccagccagcgct

SEQ ID NO: 1374 - DNA, 20 bp, synthetic construct
  source 1..20: mol_type = other DNA
gactagtccctgaggaaaag

SEQ ID NO: 1375 - DNA, 20 bp, synthetic construct
  source 1..20: mol_type = other DNA
cactgaaggttccccagcgc

SEQ ID NO: 1376 - DNA, 20 bp, synthetic construct
  source 1..20: mol_type = other DNA
gaggaggccagccagcgctg

SEQ ID NO: 1377 - DNA, 20 bp, synthetic construct
  source 1..20: mol_type = other DNA
ggcagtgcaaggaagggacg

SEQ ID NO: 1378 - DNA, 20 bp, synthetic construct
  source 1..20: mol_type = other DNA
ttggcagtgcaaggaaggga

SEQ ID NO: 1379 - DNA, 20 bp, synthetic construct
  source 1..20: mol_type = other DNA
tagtccctgaggaaaagggg

SEQ ID NO: 1380 - DNA, 20 bp, synthetic construct
  source 1..20: mol_type = other DNA
cgggcaggtcgcgctcagcg

SEQ ID NO: 1381 - DNA, 20 bp, synthetic construct
  source 1..20: mol_type = other DNA
ccggacacgctcccgacccg

SEQ ID NO: 1382 - DNA, 20 bp, synthetic construct
  source 1..20: mol_type = other DNA
gttctcactggacaaaagcg

SEQ ID NO: 1383 - DNA, 20 bp, synthetic construct
  source 1..20: mol_type = other DNA
gagaacttccctggtgacgt

SEQ ID NO: 1384 - DNA, 20 bp, synthetic construct
  source 1..20: mol_type = other DNA
ctcccataacgccgtctgcg

SEQ ID NO: 1385 - DNA, 20 bp, synthetic construct
  source 1..20: mol_type = other DNA
gtcaccagggaagttctcac

SEQ ID NO: 1386 - DNA, 20 bp, synthetic construct
  source 1..20: mol_type = other DNA
ctagtttccctacgtcacca

SEQ ID NO: 1387 - DNA, 20 bp, synthetic construct
  source 1..20: mol_type = other DNA
cgctcccataacgccgtctg

SEQ ID NO: 1388 - DNA, 20 bp, synthetic construct
  source 1..20: mol_type = other DNA
gctcccataacgccgtctgc

SEQ ID NO: 1389 - DNA, 20 bp, synthetic construct
  source 1..20: mol_type = other DNA
tgggagcggacgcgggacgc

SEQ ID NO: 1390 - DNA, 20 bp, synthetic construct
  source 1..20: mol_type = other DNA
ggcgttatgggagcggacgc

SEQ ID NO: 1391 - DNA, 20 bp, synthetic construct
  source 1..20: mol_type = other DNA
ccataacgccgtctgcgggg

SEQ ID NO: 1392 - DNA, 20 bp, synthetic construct
  source 1..20: mol_type = other DNA
ccctgtccccgccccgcaga

SEQ ID NO: 1393 - DNA, 20 bp, synthetic construct
  source 1..20: mol_type = other DNA
cgcagacggcgttatgggag

SEQ ID NO: 1394 - DNA, 20 bp, synthetic construct
  source 1..20: mol_type = other DNA
gagcggacgcgggacgcggg

SEQ ID NO: 1395 - DNA, 20 bp, synthetic construct
  source 1..20: mol_type = other DNA
gcggccggctcggactcacg

SEQ ID NO: 1396 - DNA, 20 bp, synthetic construct
  source 1..20: mol_type = other DNA
attccagtccgaatagaaag

SEQ ID NO: 1397 - DNA, 20 bp, synthetic construct
  source 1..20: mol_type = other DNA
agtccgaatagaaagaggca

SEQ ID NO: 1398 - DNA, 20 bp, synthetic construct
  source 1..20: mol_type = other DNA
ccagcctggagcgctctgag

SEQ ID NO: 1399 - DNA, 20 bp, synthetic construct
  source 1..20: mol_type = other DNA
agggaatcaaatggaaaagc

SEQ ID NO: 1400 - DNA, 20 bp, synthetic construct
  source 1..20: mol_type = other DNA
cgcgccgcgtgagtccgagc

SEQ ID NO: 1401 - DNA, 20 bp, synthetic construct
  source 1..20: mol_type = other DNA
gcccctcctccccgcgccgc

SEQ ID NO: 1402 - DNA, 20 bp, synthetic construct
  source 1..20: mol_type = other DNA
ggcggggagtggcggagcga

SEQ ID NO: 1403 - DNA, 20 bp, synthetic construct
  source 1..20: mol_type = other DNA
gggcgggcgagctgggaagg

SEQ ID NO: 1404 - DNA, 20 bp, synthetic construct
  source 1..20: mol_type = other DNA
ctgggaaggaggcggcgcgg

SEQ ID NO: 1405 - DNA, 20 bp, synthetic construct
  source 1..20: mol_type = other DNA
gagggagcctgggccgcggc

SEQ ID NO: 1406 - DNA, 20 bp, synthetic construct
  source 1..20: mol_type = other DNA
gagctgggaaggaggcggcg

SEQ ID NO: 1407 - DNA, 20 bp, synthetic construct
  source 1..20: mol_type = other DNA
agcaggaggccaggcctggg

SEQ ID NO: 1408 - DNA, 20 bp, synthetic construct
  source 1..20: mol_type = other DNA
agggcggggagggagcgcgg

SEQ ID NO: 1409 - DNA, 20 bp, synthetic construct
  source 1..20: mol_type = other DNA
gcaggaggccaggcctgggc

SEQ ID NO: 1410 - DNA, 20 bp, synthetic construct
  source 1..20: mol_type = other DNA
ttcccggctcatctctcacg

SEQ ID NO: 1411 - DNA, 20 bp, synthetic construct
  source 1..20: mol_type = other DNA
gtaaccatgagactagagga

SEQ ID NO: 1412 - DNA, 20 bp, synthetic construct
  source 1..20: mol_type = other DNA
ggaaatgcaagtccctcgcc

SEQ ID NO: 1413 - DNA, 20 bp, synthetic construct
  source 1..20: mol_type = other DNA
cgtccgcgtgagagatgagc

SEQ ID NO: 1414 - DNA, 20 bp, synthetic construct
  source 1..20: mol_type = other DNA
gcaagtccctcgccaggtag

SEQ ID NO: 1415 - DNA, 20 bp, synthetic construct
  source 1..20: mol_type = other DNA
aaaaccatcccagaacccac

SEQ ID NO: 1416 - DNA, 20 bp, synthetic construct
  source 1..20: mol_type = other DNA
cttcagcctctacctggcga

SEQ ID NO: 1417 - DNA, 20 bp, synthetic construct
  source 1..20: mol_type = other DNA
ggaagtaaccatgagactag

SEQ ID NO: 1418 - DNA, 20 bp, synthetic construct
  source 1..20: mol_type = other DNA
gagggacttgcatttcctgt

SEQ ID NO: 1419 - DNA, 20 bp, synthetic construct
  source 1..20: mol_type = other DNA
acttcagcctctacctggcg

SEQ ID NO: 1420 - DNA, 20 bp, synthetic construct
  source 1..20: mol_type = other DNA
ttctctgaagtactgaacta

SEQ ID NO: 1421 - DNA, 20 bp, synthetic construct
  source 1..20: mol_type = other DNA
gtacttcagagaaatcctca

SEQ ID NO: 1422 - DNA, 20 bp, synthetic construct
  source 1..20: mol_type = other DNA
atttcctgtgggttctggga

SEQ ID NO: 1423 - DNA, 20 bp, synthetic construct
  source 1..20: mol_type = other DNA
ttcctacttcagcctctacc

SEQ ID NO: 1424 - DNA, 20 bp, synthetic construct
  source 1..20: mol_type = other DNA
cgccaggtagaggctgaagt

SEQ ID NO: 1425 - DNA, 20 bp, synthetic construct
  source 1..20: mol_type = other DNA
gttacgtgtctaaggtctgt

SEQ ID NO: 1426 - DNA, 20 bp, synthetic construct
  source 1..20: mol_type = other DNA
tagacacgtaacacttggca

SEQ ID NO: 1427 - DNA, 20 bp, synthetic construct
  source 1..20: mol_type = other DNA
agacacgtaacacttggcaa

SEQ ID NO: 1428 - DNA, 20 bp, synthetic construct
  source 1..20: mol_type = other DNA
tgttacgtgtctaaggtctg

SEQ ID NO: 1429 - DNA, 20 bp, synthetic construct
  source 1..20: mol_type = other DNA
gggccgcccaccacaagcaa

SEQ ID NO: 1430 - DNA, 20 bp, synthetic construct
  source 1..20: mol_type = other DNA
gaccttagacacgtaacact

SEQ ID NO: 1431 - DNA, 20 bp, synthetic construct
  source 1..20: mol_type = other DNA
cccaccacaagcaaagggaa

SEQ ID NO: 1432 - DNA, 20 bp, synthetic construct
  source 1..20: mol_type = other DNA
ggccgcccaccacaagcaaa

SEQ ID NO: 1433 - DNA, 20 bp, synthetic construct
  source 1..20: mol_type = other DNA
ctcagccccaaagctgtgtg

SEQ ID NO: 1434 - DNA, 20 bp, synthetic construct
  source 1..20: mol_type = other DNA
aagggcagagcagccaccag

SEQ ID NO: 1435 - DNA, 20 bp, synthetic construct
  source 1..20: mol_type = other DNA
cagatctctctgaggcactc

SEQ ID NO: 1436 - DNA, 20 bp, synthetic construct
  source 1..20: mol_type = other DNA
ggctggggcagatctctctg

SEQ ID NO: 1437 - DNA, 20 bp, synthetic construct
  source 1..20: mol_type = other DNA
ttgtggtgggcggcccctgg

SEQ ID NO: 1438 - DNA, 20 bp, synthetic construct
  source 1..20: mol_type = other DNA
caagggcagagcagccacca

SEQ ID NO: 1439 - DNA, 20 bp, synthetic construct
  source 1..20: mol_type = other DNA
gcaagggcagagcagccacc

SEQ ID NO: 1440 - DNA, 20 bp, synthetic construct
  source 1..20: mol_type = other DNA
gtggcctcgatgctccacgt

SEQ ID NO: 1441 - DNA, 20 bp, synthetic construct
  source 1..20: mol_type = other DNA
agccggctaccgtgcatgag

SEQ ID NO: 1442 - DNA, 20 bp, synthetic construct
  source 1..20: mol_type = other DNA
catgcacggtagccggctgg

SEQ ID NO: 1443 - DNA, 20 bp, synthetic construct
  source 1..20: mol_type = other DNA
gccggctaccgtgcatgagg

SEQ ID NO: 1444 - DNA, 20 bp, synthetic construct
  source 1..20: mol_type = other DNA
agctcctacgtggagcatcg

SEQ ID NO: 1445 - DNA, 20 bp, synthetic construct
  source 1..20: mol_type = other DNA
acgtggagcatcgaggccac

SEQ ID NO: 1446 - DNA, 20 bp, synthetic construct
  source 1..20: mol_type = other DNA
cgtggagcatcgaggccact

SEQ ID NO: 1447 - DNA, 20 bp, synthetic construct
  source 1..20: mol_type = other DNA
cccgcccccttccccgtgga

SEQ ID NO: 1448 - DNA, 20 bp, synthetic construct
  source 1..20: mol_type = other DNA
atgcgcccccgccctccacg

SEQ ID NO: 1449 - DNA, 20 bp, synthetic construct
  source 1..20: mol_type = other DNA
cccttccccgtggagggcgg

SEQ ID NO: 1450 - DNA, 20 bp, synthetic construct
  source 1..20: mol_type = other DNA
ccccgcccccttccccgtgg

SEQ ID NO: 1451 - DNA, 20 bp, synthetic construct
  source 1..20: mol_type = other DNA
gatgcgcccccgccctccac

SEQ ID NO: 1452 - DNA, 20 bp, synthetic construct
  source 1..20: mol_type = other DNA
cggccccgcccccttccccg

SEQ ID NO: 1453 - DNA, 20 bp, synthetic construct
  source 1..20: mol_type = other DNA
cgcgagcgagttaagcccag

SEQ ID NO: 1454 - DNA, 20 bp, synthetic construct
  source 1..20: mol_type = other DNA
gcccccgccctccacgggga

SEQ ID NO: 1455 - DNA, 20 bp, synthetic construct
  source 1..20: mol_type = other DNA
caggacggcctctctcatgg

SEQ ID NO: 1456 - DNA, 20 bp, synthetic construct
  source 1..20: mol_type = other DNA
aagacgcccgactggcctgg

SEQ ID NO: 1457 - DNA, 20 bp, synthetic construct
  source 1..20: mol_type = other DNA
gggcggggccaccatgagag

SEQ ID NO: 1458 - DNA, 20 bp, synthetic construct
  source 1..20: mol_type = other DNA
tcggcagcactggtagccag

SEQ ID NO: 1459 - DNA, 20 bp, synthetic construct
  source 1..20: mol_type = other DNA
tactgaactgaaaaaagtgc

SEQ ID NO: 1460 - DNA, 20 bp, synthetic construct
  source 1..20: mol_type = other DNA
aatcaggacggcctctctca

SEQ ID NO: 1461 - DNA, 20 bp, synthetic construct
  source 1..20: mol_type = other DNA
ttactgaactgaaaaaagtg

SEQ ID NO: 1462 - DNA, 20 bp, synthetic construct
  source 1..20: mol_type = other DNA
gacgcccgactggcctggag

SEQ ID NO: 1463 - DNA, 20 bp, synthetic construct
  source 1..20: mol_type = other DNA
tgattgggctgagaaagggg

SEQ ID NO: 1464 - DNA, 20 bp, synthetic construct
  source 1..20: mol_type = other DNA
tcctgattgggctgagaaag

SEQ ID NO: 1465 - DNA, 20 bp, synthetic construct
  source 1..20: mol_type = other DNA
tatctagccccgccttcccc

SEQ ID NO: 1466 - DNA, 20 bp, synthetic construct
  source 1..20: mol_type = other DNA
tgaactgaaaaaagtgcggg

SEQ ID NO: 1467 - DNA, 20 bp, synthetic construct
  source 1..20: mol_type = other DNA
gaactgaaaaaagtgcgggc

SEQ ID NO: 1468 - DNA, 20 bp, synthetic construct
  source 1..20: mol_type = other DNA
agtgcgggcggggtagaggg

SEQ ID NO: 1469 - DNA, 20 bp, synthetic construct
  source 1..20: mol_type = other DNA
gggcggggtagagggaggag

SEQ ID NO: 1470 - DNA, 20 bp, synthetic construct
  source 1..20: mol_type = other DNA
tctgtggccacgctttggcg

SEQ ID NO: 1471 - DNA, 20 bp, synthetic construct
  source 1..20: mol_type = other DNA
cccccacccccgccaaagcg

SEQ ID NO: 1472 - DNA, 20 bp, synthetic construct
  source 1..20: mol_type = other DNA
cccgagctgcgcctttatag

SEQ ID NO: 1473 - DNA, 20 bp, synthetic construct
  source 1..20: mol_type = other DNA
ctgtggccacgctttggcgg

SEQ ID NO: 1474 - DNA, 20 bp, synthetic construct
  source 1..20: mol_type = other DNA
gcgtggccacagaaggccga

SEQ ID NO: 1475 - DNA, 20 bp, synthetic construct
  source 1..20: mol_type = other DNA
ggggatgcggaggaactggg

SEQ ID NO: 1476 - DNA, 20 bp, synthetic construct
  source 1..20: mol_type = other DNA
agcgtggccacagaaggccg

SEQ ID NO: 1477 - DNA, 20 bp, synthetic construct
  source 1..20: mol_type = other DNA
aggagcctccgggctgagag

SEQ ID NO: 1478 - DNA, 20 bp, synthetic construct
  source 1..20: mol_type = other DNA
ggggcggggctggtctttgg

SEQ ID NO: 1479 - DNA, 20 bp, synthetic construct
  source 1..20: mol_type = other DNA
gaggagcctccgggctgaga

SEQ ID NO: 1480 - DNA, 20 bp, synthetic construct
  source 1..20: mol_type = other DNA
agaaggccgagggacgcggc

SEQ ID NO: 1481 - DNA, 20 bp, synthetic construct
  source 1..20: mol_type = other DNA
ccccgcccctctcagcccgg

SEQ ID NO: 1482 - DNA, 20 bp, synthetic construct
  source 1..20: mol_type = other DNA
gcgctgctcgaggagcctcc

SEQ ID NO: 1483 - DNA, 20 bp, synthetic construct
  source 1..20: mol_type = other DNA
cagaaggccgagggacgcgg

SEQ ID NO: 1484 - DNA, 20 bp, synthetic construct
  source 1..20: mol_type = other DNA
ccacagaaggccgagggacg

SEQ ID NO: 1485 - DNA, 20 bp, synthetic construct
  source 1..20: mol_type = other DNA
gggcgtgggcctaacgacgc

SEQ ID NO: 1486 - DNA, 20 bp, synthetic construct
  source 1..20: mol_type = other DNA
gcgtcgttaggcccacgccc

SEQ ID NO: 1487 - DNA, 20 bp, synthetic construct
  source 1..20: mol_type = other DNA
tcggaccacggcctgggcgt

SEQ ID NO: 1488 - DNA, 20 bp, synthetic construct
  source 1..20: mol_type = other DNA
gggacgtgggactcggacca

SEQ ID NO: 1489 - DNA, 20 bp, synthetic construct
  source 1..20: mol_type = other DNA
cccaaggctacacctgcccc

SEQ ID NO: 1490 - DNA, 20 bp, synthetic construct
  source 1..20: mol_type = other DNA
gtggggttggactgggacgt

SEQ ID NO: 1491 - DNA, 20 bp, synthetic construct
  source 1..20: mol_type = other DNA
gcggcgccagagcccagctc

SEQ ID NO: 1492 - DNA, 20 bp, synthetic construct
  source 1..20: mol_type = other DNA
tgtggccaatggagcggcga

SEQ ID NO: 1493 - DNA, 20 bp, synthetic construct
  source 1..20: mol_type = other DNA
cacagatgtggccaatggag

SEQ ID NO: 1494 - DNA, 20 bp, synthetic construct
  source 1..20: mol_type = other DNA
ttctgcacagatgtggccaa

SEQ ID NO: 1495 - DNA, 20 bp, synthetic construct
  source 1..20: mol_type = other DNA
ggcaggtgtagccttgggcg

SEQ ID NO: 1496 - DNA, 20 bp, synthetic construct
  source 1..20: mol_type = other DNA
tgggcgtgggcctaacgacg

SEQ ID NO: 1497 - DNA, 20 bp, synthetic construct
  source 1..20: mol_type = other DNA
ttaggcccacgcccaggccg

SEQ ID NO: 1498 - DNA, 20 bp, synthetic construct
  source 1..20: mol_type = other DNA
cgtggggttggactgggacg

SEQ ID NO: 1499 - DNA, 20 bp, synthetic construct
  source 1..20: mol_type = other DNA
cccgccccttgcccctcccc

SEQ ID NO: 1500 - DNA, 20 bp, synthetic construct
  source 1..20: mol_type = other DNA
tgccagcatgagatcacccg

SEQ ID NO: 1501 - DNA, 20 bp, synthetic construct
  source 1..20: mol_type = other DNA
cggacaccgttcgccaccga

SEQ ID NO: 1502 - DNA, 20 bp, synthetic construct
  source 1..20: mol_type = other DNA
tcggtggcgaacggtgtccg

SEQ ID NO: 1503 - DNA, 20 bp, synthetic construct
  source 1..20: mol_type = other DNA
tttcacgactctgccgtcgg

SEQ ID NO: 1504 - DNA, 20 bp, synthetic construct
  source 1..20: mol_type = other DNA
gctgcttacacaggaaacca

SEQ ID NO: 1505 - DNA, 20 bp, synthetic construct
  source 1..20: mol_type = other DNA
tgccacgggtgatctcatgc

SEQ ID NO: 1506 - DNA, 20 bp, synthetic construct
  source 1..20: mol_type = other DNA
actctgccgtcggtggcgaa

SEQ ID NO: 1507 - DNA, 20 bp, synthetic construct
  source 1..20: mol_type = other DNA
ggagaatctcaagaaaggca

SEQ ID NO: 1508 - DNA, 20 bp, synthetic construct
  source 1..20: mol_type = other DNA
ttacacaggaaaccaaggcg

SEQ ID NO: 1509 - DNA, 20 bp, synthetic construct
  source 1..20: mol_type = other DNA
gggtttcacgactctgccgt

SEQ ID NO: 1510 - DNA, 20 bp, synthetic construct
  source 1..20: mol_type = other DNA
gcttacacaggaaaccaagg

SEQ ID NO: 1511 - DNA, 20 bp, synthetic construct
  source 1..20: mol_type = other DNA
tttcctgtgtaagcagccaa

SEQ ID NO: 1512 - DNA, 20 bp, synthetic construct
  source 1..20: mol_type = other DNA
gaactcttgacgtcagaagg

SEQ ID NO: 1513 - DNA, 20 bp, synthetic construct
  source 1..20: mol_type = other DNA
accaaggcggggagtgccac

SEQ ID NO: 1514 - DNA, 20 bp, synthetic construct
  source 1..20: mol_type = other DNA
aaccaaggcggggagtgcca

SEQ ID NO: 1515 - DNA, 20 bp, synthetic construct
  source 1..20: mol_type = other DNA
ggagatttgcgtcacgttgg

SEQ ID NO: 1516 - DNA, 20 bp, synthetic construct
  source 1..20: mol_type = other DNA
gacgcaaatctcccggacag

SEQ ID NO: 1517 - DNA, 20 bp, synthetic construct
  source 1..20: mol_type = other DNA
acatcccactcgcagagagc

SEQ ID NO: 1518 - DNA, 20 bp, synthetic construct
  source 1..20: mol_type = other DNA
tgagccagaacctataggga

SEQ ID NO: 1519 - DNA, 20 bp, synthetic construct
  source 1..20: mol_type = other DNA
ccaacgtgacgcaaatctcc

SEQ ID NO: 1520 - DNA, 20 bp, synthetic construct
  source 1..20: mol_type = other DNA
ggctctaccagaaatagaca

SEQ ID NO: 1521 - DNA, 20 bp, synthetic construct
  source 1..20: mol_type = other DNA
gccccctgctctctgcgagt

SEQ ID NO: 1522 - DNA, 20 bp, synthetic construct
  source 1..20: mol_type = other DNA
gggctcctaagcctctgtcc

SEQ ID NO: 1523 - DNA, 20 bp, synthetic construct
  source 1..20: mol_type = other DNA
aatctcccggacagaggctt

SEQ ID NO: 1524 - DNA, 20 bp, synthetic construct
  source 1..20: mol_type = other DNA
atgagccagaacctataggg

SEQ ID NO: 1525 - DNA, 20 bp, synthetic construct
  source 1..20: mol_type = other DNA
tcccactcgcagagagcagg

SEQ ID NO: 1526 - DNA, 20 bp, synthetic construct
  source 1..20: mol_type = other DNA
gccagaacctatagggaggg

SEQ ID NO: 1527 - DNA, 20 bp, synthetic construct
  source 1..20: mol_type = other DNA
atcccactcgcagagagcag

SEQ ID NO: 1528 - DNA, 20 bp, synthetic construct
  source 1..20: mol_type = other DNA
ctataggttctggctcatgt

SEQ ID NO: 1529 - DNA, 20 bp, synthetic construct
  source 1..20: mol_type = other DNA
catcccactcgcagagagca

SEQ ID NO: 1530 - DNA, 20 bp, synthetic construct
  source 1..20: mol_type = other DNA
aagacattgattgtaacccc

SEQ ID NO: 1531 - DNA, 20 bp, synthetic construct
  source 1..20: mol_type = other DNA
agggtgatggcatatatcag

SEQ ID NO: 1532 - DNA, 20 bp, synthetic construct
  source 1..20: mol_type = other DNA
aacccctggagccttcagga

SEQ ID NO: 1533 - DNA, 20 bp, synthetic construct
  source 1..20: mol_type = other DNA
tgatatatgccatcaccctc

SEQ ID NO: 1534 - DNA, 20 bp, synthetic construct
  source 1..20: mol_type = other DNA
gagggtgatggcatatatca

SEQ ID NO: 1535 - DNA, 20 bp, synthetic construct
  source 1..20: mol_type = other DNA
aggagggagcctgagggtga

SEQ ID NO: 1536 - DNA, 20 bp, synthetic construct
  source 1..20: mol_type = other DNA
atatatcaggggagtaaaag

SEQ ID NO: 1537 - DNA, 20 bp, synthetic construct
  source 1..20: mol_type = other DNA
atcaggggagtaaaagtgga

SEQ ID NO: 1538 - DNA, 20 bp, synthetic construct
  source 1..20: mol_type = other DNA
aaaggagtgagaatggctca

SEQ ID NO: 1539 - DNA, 20 bp, synthetic construct
  source 1..20: mol_type = other DNA
gctccctcctgaaggctcca

SEQ ID NO: 1540 - DNA, 20 bp, synthetic construct
  source 1..20: mol_type = other DNA
taacccctggagccttcagg

SEQ ID NO: 1541 - DNA, 20 bp, synthetic construct
  source 1..20: mol_type = other DNA
tatcaggggagtaaaagtgg

SEQ ID NO: 1542 - DNA, 20 bp, synthetic construct
  source 1..20: mol_type = other DNA
gccttcaggagggagcctga

SEQ ID NO: 1543 - DNA, 20 bp, synthetic construct
  source 1..20: mol_type = other DNA
accctcaggctccctcctga

SEQ ID NO: 1544 - DNA, 20 bp, synthetic construct
  source 1..20: mol_type = other DNA
ctccctcctgaaggctccag

SEQ ID NO: 1545 - DNA, 20 bp, synthetic construct
  source 1..20: mol_type = other DNA
aggccgcgaaactaggactc

SEQ ID NO: 1546 - DNA, 20 bp, synthetic construct
  source 1..20: mol_type = other DNA
agccgcctcatttaccgccc

SEQ ID NO: 1547 - DNA, 20 bp, synthetic construct
  source 1..20: mol_type = other DNA
cggcagcagggcagacacgt

SEQ ID NO: 1548 - DNA, 20 bp, synthetic construct
  source 1..20: mol_type = other DNA
ccggcagcagggcagacacg

SEQ ID NO: 1549 - DNA, 20 bp, synthetic construct
  source 1..20: mol_type = other DNA
cgcggcctgggcggtaaatg

SEQ ID NO: 1550 - DNA, 20 bp, synthetic construct
  source 1..20: mol_type = other DNA
cggtaaatgaggcggctcca

SEQ ID NO: 1551 - DNA, 20 bp, synthetic construct
  source 1..20: mol_type = other DNA
agcccccctcctctccgccg

SEQ ID NO: 1552 - DNA, 20 bp, synthetic construct
  source 1..20: mol_type = other DNA
accgcgccgggccggcagca

SEQ ID NO: 1553 - DNA, 20 bp, synthetic construct
  source 1..20: mol_type = other DNA
ccagggccgcggcggagagg

SEQ ID NO: 1554 - DNA, 20 bp, synthetic construct
  source 1..20: mol_type = other DNA
agggccgcggcggagaggag

SEQ ID NO: 1555 - DNA, 20 bp, synthetic construct
  source 1..20: mol_type = other DNA
gctccagggccgcggcggag

SEQ ID NO: 1556 - DNA, 20 bp, synthetic construct
  source 1..20: mol_type = other DNA
ggccgcggcggagaggaggg

SEQ ID NO: 1557 - DNA, 20 bp, synthetic construct
  source 1..20: mol_type = other DNA
gccctgctgccggcccggcg

SEQ ID NO: 1558 - DNA, 20 bp, synthetic construct
  source 1..20: mol_type = other DNA
taaccccgaccgcgccgggc

SEQ ID NO: 1559 - DNA, 20 bp, synthetic construct
  source 1..20: mol_type = other DNA
gggccgcggcggagaggagg

SEQ ID NO: 1560 - DNA, 20 bp, synthetic construct
  source 1..20: mol_type = other DNA
cgtgtctcatcacgcccgtg

SEQ ID NO: 1561 - DNA, 20 bp, synthetic construct
  source 1..20: mol_type = other DNA
tacgtgacgcggccacccca

SEQ ID NO: 1562 - DNA, 20 bp, synthetic construct
  source 1..20: mol_type = other DNA
cgggcgtgatgagacacgcg

SEQ ID NO: 1563 - DNA, 20 bp, synthetic construct
  source 1..20: mol_type = other DNA
tgtgaagggaaactcgctct

SEQ ID NO: 1564 - DNA, 20 bp, synthetic construct
  source 1..20: mol_type = other DNA
gccccgcccccttcgacccg

SEQ ID NO: 1565 - DNA, 20 bp, synthetic construct
  source 1..20: mol_type = other DNA
cgcgtgtctcatcacgcccg

SEQ ID NO: 1566 - DNA, 20 bp, synthetic construct
  source 1..20: mol_type = other DNA
gtctcatcacgcccgtgggg

SEQ ID NO: 1567 - DNA, 20 bp, synthetic construct
  source 1..20: mol_type = other DNA
gctctgggtcactctggtgg

SEQ ID NO: 1568 - DNA, 20 bp, synthetic construct
  source 1..20: mol_type = other DNA
acgtgacgcggccaccccac

SEQ ID NO: 1569 - DNA, 20 bp, synthetic construct
  source 1..20: mol_type = other DNA
aggccccgcccccttcgacc

SEQ ID NO: 1570 - DNA, 20 bp, synthetic construct
  source 1..20: mol_type = other DNA
tggctcccccgggtcgaagg

SEQ ID NO: 1571 - DNA, 20 bp, synthetic construct
  source 1..20: mol_type = other DNA
ggctggcgtccgggcatgcg

SEQ ID NO: 1572 - DNA, 20 bp, synthetic construct
  source 1..20: mol_type = other DNA
gacacgcgaggctggcgtcc

SEQ ID NO: 1573 - DNA, 20 bp, synthetic construct
  source 1..20: mol_type = other DNA
gctggcgtccgggcatgcgc

SEQ ID NO: 1574 - DNA, 20 bp, synthetic construct
  source 1..20: mol_type = other DNA
gggcatgcgcgggccgcgcg

SEQ ID NO: 1575 - DNA, 20 bp, synthetic construct
  source 1..20: mol_type = other DNA
aatatgttccctatataagg

SEQ ID NO: 1576 - DNA, 20 bp, synthetic construct
  source 1..20: mol_type = other DNA
attatcaaacaggactctgg

SEQ ID NO: 1577 - DNA, 20 bp, synthetic construct
  source 1..20: mol_type = other DNA
tgttattaaattatcaggag

SEQ ID NO: 1578 - DNA, 20 bp, synthetic construct
  source 1..20: mol_type = other DNA
tgtactctctacatgggctt

SEQ ID NO: 1579 - DNA, 20 bp, synthetic construct
  source 1..20: mol_type = other DNA
tgtgttattaaattatcagg

SEQ ID NO: 1580 - DNA, 20 bp, synthetic construct
  source 1..20: mol_type = other DNA
gtgttattaaattatcagga

SEQ ID NO: 1581 - DNA, 20 bp, synthetic construct
  source 1..20: mol_type = other DNA
ggactctggaggttgagaaa

SEQ ID NO: 1582 - DNA, 20 bp, synthetic construct
  source 1..20: mol_type = other DNA
aaaattatcaaacaggactc

SEQ ID NO: 1583 - DNA, 20 bp, synthetic construct
  source 1..20: mol_type = other DNA
tttgtacaccgccttatata

SEQ ID NO: 1584 - DNA, 20 bp, synthetic construct
  source 1..20: mol_type = other DNA
cctttatgtactctctacat

SEQ ID NO: 1585 - DNA, 20 bp, synthetic construct
  source 1..20: mol_type = other DNA
tgcagtaatgaaaagaaaac

SEQ ID NO: 1586 - DNA, 20 bp, synthetic construct
  source 1..20: mol_type = other DNA
gtttgtacaccgccttatat

SEQ ID NO: 1587 - DNA, 20 bp, synthetic construct
  source 1..20: mol_type = other DNA
tcctttatgtactctctaca

SEQ ID NO: 1588 - DNA, 20 bp, synthetic construct
  source 1..20: mol_type = other DNA
cccatgtagagagtacataa

SEQ ID NO: 1589 - DNA, 20 bp, synthetic construct
  source 1..20: mol_type = other DNA
atgcagtagcattcagaaaa

SEQ ID NO: 1590 - DNA, 20 bp, synthetic construct
  source 1..20: mol_type = other DNA
tcccagagtcgactagcgct

SEQ ID NO: 1591 - DNA, 20 bp, synthetic construct
  source 1..20: mol_type = other DNA
cccagatcgggcgcacccgg

SEQ ID NO: 1592 - DNA, 20 bp, synthetic construct
  source 1..20: mol_type = other DNA
cgccgggtgcgcccgatctg

SEQ ID NO: 1593 - DNA, 20 bp, synthetic construct
  source 1..20: mol_type = other DNA
gcgctagtcgactctgggac

SEQ ID NO: 1594 - DNA, 20 bp, synthetic construct
  source 1..20: mol_type = other DNA
ctgctcccgaagccggcccg

SEQ ID NO: 1595 - DNA, 20 bp, synthetic construct
  source 1..20: mol_type = other DNA
actctgggaccggtcccccg

SEQ ID NO: 1596 - DNA, 20 bp, synthetic construct
  source 1..20: mol_type = other DNA
gactctgggaccggtccccc

SEQ ID NO: 1597 - DNA, 20 bp, synthetic construct
  source 1..20: mol_type = other DNA
ccggcttcgggagcagctgg

SEQ ID NO: 1598 - DNA, 20 bp, synthetic construct
  source 1..20: mol_type = other DNA
acctggcccgccgccccccg

SEQ ID NO: 1599 - DNA, 20 bp, synthetic construct
  source 1..20: mol_type = other DNA
gcagctggcggggcccccgg

SEQ ID NO: 1600 - DNA, 20 bp, synthetic construct
  source 1..20: mol_type = other DNA
cccccgcctccccgccccgg

SEQ ID NO: 1601 - DNA, 20 bp, synthetic construct
  source 1..20: mol_type = other DNA
gctgcccggccgcgccccgg

SEQ ID NO: 1602 - DNA, 20 bp, synthetic construct
  source 1..20: mol_type = other DNA
gcacctggcccgccgccccc

SEQ ID NO: 1603 - DNA, 20 bp, synthetic construct
  source 1..20: mol_type = other DNA
gcccccgcctccccgccccg

SEQ ID NO: 1604 - DNA, 20 bp, synthetic construct
  source 1..20: mol_type = other DNA
ggcttcgggagcagctggcg

SEQ ID NO: 1605 - DNA, 20 bp, synthetic construct
  source 1..20: mol_type = other DNA
ggaaattcccagaagccacg

SEQ ID NO: 1606 - DNA, 20 bp, synthetic construct
  source 1..20: mol_type = other DNA
ccctcacccatatccctgag

SEQ ID NO: 1607 - DNA, 20 bp, synthetic construct
  source 1..20: mol_type = other DNA
tgcgtcatatcgtttgtctg

SEQ ID NO: 1608 - DNA, 20 bp, synthetic construct
  source 1..20: mol_type = other DNA
tctgcatgggcagatgctga

SEQ ID NO: 1609 - DNA, 20 bp, synthetic construct
  source 1..20: mol_type = other DNA
gcgtcatatcgtttgtctgg

SEQ ID NO: 1610 - DNA, 20 bp, synthetic construct
  source 1..20: mol_type = other DNA
aaattcccagaagccacggg

SEQ ID NO: 1611 - DNA, 20 bp, synthetic construct
  source 1..20: mol_type = other DNA
tgtgaccttagatggagtta

SEQ ID NO: 1612 - DNA, 20 bp, synthetic construct
  source 1..20: mol_type = other DNA
tttcccagaaggttctgcat

SEQ ID NO: 1613 - DNA, 20 bp, synthetic construct
  source 1..20: mol_type = other DNA
gggaaattcccagaagccac

SEQ ID NO: 1614 - DNA, 20 bp, synthetic construct
  source 1..20: mol_type = other DNA
ggagcggcaggcgggaaccc

SEQ ID NO: 1615 - DNA, 20 bp, synthetic construct
  source 1..20: mol_type = other DNA
gtgaccttagatggagttag

SEQ ID NO: 1616 - DNA, 20 bp, synthetic construct
  source 1..20: mol_type = other DNA
ataaaccccccgaccccccg

SEQ ID NO: 1617 - DNA, 20 bp, synthetic construct
  source 1..20: mol_type = other DNA
tcagggatatgggtgagggc

SEQ ID NO: 1618 - DNA, 20 bp, synthetic construct
  source 1..20: mol_type = other DNA
acctctcagggatatgggtg

SEQ ID NO: 1619 - DNA, 20 bp, synthetic construct
  source 1..20: mol_type = other DNA
gaaattcccagaagccacgg

SEQ ID NO: 1620 - DNA, 20 bp, synthetic construct
  source 1..20: mol_type = other DNA
tccacgagagaaagcgagca

SEQ ID NO: 1621 - DNA, 20 bp, synthetic construct
  source 1..20: mol_type = other DNA
gagccgccctgaaaccgcca

SEQ ID NO: 1622 - DNA, 20 bp, synthetic construct
  source 1..20: mol_type = other DNA
gccccctggcggtttcaggg

SEQ ID NO: 1623 - DNA, 20 bp, synthetic construct
  source 1..20: mol_type = other DNA
gccgccctgaaaccgccagg

SEQ ID NO: 1624 - DNA, 20 bp, synthetic construct
  source 1..20: mol_type = other DNA
ttcagggcggctcaccgaga

SEQ ID NO: 1625 - DNA, 20 bp, synthetic construct
  source 1..20: mol_type = other DNA
agcgagcagggacgcagctc

SEQ ID NO: 1626 - DNA, 20 bp, synthetic construct
  source 1..20: mol_type = other DNA
atccacgagagaaagcgagc

SEQ ID NO: 1627 - DNA, 20 bp, synthetic construct
  source 1..20: mol_type = other DNA
gcgcccggttggggaacgcg

SEQ ID NO: 1628 - DNA, 20 bp, synthetic construct
  source 1..20: mol_type = other DNA
tttcagggcggctcaccgag

SEQ ID NO: 1629 - DNA, 20 bp, synthetic construct
  source 1..20: mol_type = other DNA
cagccgcgcgttccccaacc

SEQ ID NO: 1630 - DNA, 20 bp, synthetic construct
  source 1..20: mol_type = other DNA
tgagccgccctgaaaccgcc

SEQ ID NO: 1631 - DNA, 20 bp, synthetic construct
  source 1..20: mol_type = other DNA
gttggggaacgcgcggctgg

SEQ ID NO: 1632 - DNA, 20 bp, synthetic construct
  source 1..20: mol_type = other DNA
gcggctcaccgagagggcgc

SEQ ID NO: 1633 - DNA, 20 bp, synthetic construct
  source 1..20: mol_type = other DNA
ctggcggcgtggggaccacc

SEQ ID NO: 1634 - DNA, 20 bp, synthetic construct
  source 1..20: mol_type = other DNA
aacgcgcggctggcggcgtg

SEQ ID NO: 1635 - DNA, 20 bp, synthetic construct
  source 1..20: mol_type = other DNA
gacggaaccttctcaaagtg

SEQ ID NO: 1636 - DNA, 20 bp, synthetic construct
  source 1..20: mol_type = other DNA
acggaaccttctcaaagtgg

SEQ ID NO: 1637 - DNA, 20 bp, synthetic construct
  source 1..20: mol_type = other DNA
cttaaagtagccaatcccag

SEQ ID NO: 1638 - DNA, 20 bp, synthetic construct
  source 1..20: mol_type = other DNA
agtaggcggaacaagcgaag

SEQ ID NO: 1639 - DNA, 20 bp, synthetic construct
  source 1..20: mol_type = other DNA
acttaaagtagccaatccca

SEQ ID NO: 1640 - DNA, 20 bp, synthetic construct
  source 1..20: mol_type = other DNA
ggacggaaccttctcaaagt

SEQ ID NO: 1641 - DNA, 20 bp, synthetic construct
  source 1..20: mol_type = other DNA
atcagtcccggctccaggga

SEQ ID NO: 1642 - DNA, 20 bp, synthetic construct
  source 1..20: mol_type = other DNA
gggacggaaccttctcaaag

SEQ ID NO: 1643 - DNA, 20 bp, synthetic construct
  source 1..20: mol_type = other DNA
gatgtggcttctatcagtcc

SEQ ID NO: 1644 - DNA, 20 bp, synthetic construct
  source 1..20: mol_type = other DNA
ctttgagaaggttccgtccc

SEQ ID NO: 1645 - DNA, 20 bp, synthetic construct
  source 1..20: mol_type = other DNA
cggaacaagcgaagcggatg

SEQ ID NO: 1646 - DNA, 20 bp, synthetic construct
  source 1..20: mol_type = other DNA
gaaggttccgtccctggagc

SEQ ID NO: 1647 - DNA, 20 bp, synthetic construct
  source 1..20: mol_type = other DNA
ttctatcagtcccggctcca

SEQ ID NO: 1648 - DNA, 20 bp, synthetic construct
  source 1..20: mol_type = other DNA
aaggttccgtccctggagcc

SEQ ID NO: 1649 - DNA, 20 bp, synthetic construct
  source 1..20: mol_type = other DNA
cttctatcagtcccggctcc

SEQ ID NO: 1650 - DNA, 20 bp, synthetic construct
  source 1..20: mol_type = other DNA
agtagtcgtgccctttgctg

SEQ ID NO: 1651 - DNA, 20 bp, synthetic construct
  source 1..20: mol_type = other DNA
ggaacccacataatccgcca

SEQ ID NO: 1652 - DNA, 20 bp, synthetic construct
  source 1..20: mol_type = other DNA
tattcttaaatcgttcccgc

SEQ ID NO: 1653 - DNA, 20 bp, synthetic construct
  source 1..20: mol_type = other DNA
ttacctgaatgccccagcaa

SEQ ID NO: 1654 - DNA, 20 bp, synthetic construct
  source 1..20: mol_type = other DNA
gccgcaccggaaccccttgg

SEQ ID NO: 1655 - DNA, 20 bp, synthetic construct
  source 1..20: mol_type = other DNA
gcggattatgtgggttcctg

SEQ ID NO: 1656 - DNA, 20 bp, synthetic construct
  source 1..20: mol_type = other DNA
aagtagtcgtgccctttgct

SEQ ID NO: 1657 - DNA, 20 bp, synthetic construct
  source 1..20: mol_type = other DNA
gaacccacataatccgccaa

SEQ ID NO: 1658 - DNA, 20 bp, synthetic construct
  source 1..20: mol_type = other DNA
aacccacataatccgccaag

SEQ ID NO: 1659 - DNA, 20 bp, synthetic construct
  source 1..20: mol_type = other DNA
gactacttccggagccgcac

SEQ ID NO: 1660 - DNA, 20 bp, synthetic construct
  source 1..20: mol_type = other DNA
tccgccaaggggttccggtg

SEQ ID NO: 1661 - DNA, 20 bp, synthetic construct
  source 1..20: mol_type = other DNA
aaccccttggcggattatgt

SEQ ID NO: 1662 - DNA, 20 bp, synthetic construct
  source 1..20: mol_type = other DNA
ggagccgcaccggaacccct

SEQ ID NO: 1663 - DNA, 20 bp, synthetic construct
  source 1..20: mol_type = other DNA
cggattatgtgggttcctgc

SEQ ID NO: 1664 - DNA, 20 bp, synthetic construct
  source 1..20: mol_type = other DNA
aaggggttccggtgcggctc

SEQ ID NO: 1665 - DNA, 20 bp, synthetic construct
  source 1..20: mol_type = other DNA
gggcgtcgccatgacagaga

SEQ ID NO: 1666 - DNA, 20 bp, synthetic construct
  source 1..20: mol_type = other DNA
gcctggactaggaagagcca

SEQ ID NO: 1667 - DNA, 20 bp, synthetic construct
  source 1..20: mol_type = other DNA
acccgaagtagtccctgccg

SEQ ID NO: 1668 - DNA, 20 bp, synthetic construct
  source 1..20: mol_type = other DNA
ccggccacagcctgtcatgg

SEQ ID NO: 1669 - DNA, 20 bp, synthetic construct
  source 1..20: mol_type = other DNA
gcttaccggaagtaaaactt

SEQ ID NO: 1670 - DNA, 20 bp, synthetic construct
  source 1..20: mol_type = other DNA
gcacccgaagtagtccctgc

SEQ ID NO: 1671 - DNA, 20 bp, synthetic construct
  source 1..20: mol_type = other DNA
tgggcgtcgccatgacagag

SEQ ID NO: 1672 - DNA, 20 bp, synthetic construct
  source 1..20: mol_type = other DNA
cctagtccaggctgccatgg

SEQ ID NO: 1673 - DNA, 20 bp, synthetic construct
  source 1..20: mol_type = other DNA
gcaacagaacaggctggccc

SEQ ID NO: 1674 - DNA, 20 bp, synthetic construct
  source 1..20: mol_type = other DNA
tcgccatgacagagagggac

SEQ ID NO: 1675 - DNA, 20 bp, synthetic construct
  source 1..20: mol_type = other DNA
gaagtaaaacttcggaagtg

SEQ ID NO: 1676 - DNA, 20 bp, synthetic construct
  source 1..20: mol_type = other DNA
gccagggcaacagaacaggc

SEQ ID NO: 1677 - DNA, 20 bp, synthetic construct
  source 1..20: mol_type = other DNA
agaacaggctggccccggca

SEQ ID NO: 1678 - DNA, 20 bp, synthetic construct
  source 1..20: mol_type = other DNA
gccctggctcttcctagtcc

SEQ ID NO: 1679 - DNA, 20 bp, synthetic construct
  source 1..20: mol_type = other DNA
acttcgggtgccgccatgac

SEQ ID NO: 1680 - DNA, 20 bp, synthetic construct
  source 1..20: mol_type = other DNA
gggctctctgggatccttcg

SEQ ID NO: 1681 - DNA, 20 bp, synthetic construct
  source 1..20: mol_type = other DNA
tggtcacaaacaactaaggt

SEQ ID NO: 1682 - DNA, 20 bp, synthetic construct
  source 1..20: mol_type = other DNA
caaacaactaaggttggcgc

SEQ ID NO: 1683 - DNA, 20 bp, synthetic construct
  source 1..20: mol_type = other DNA
ctctctgggatccttcgcgg

SEQ ID NO: 1684 - DNA, 20 bp, synthetic construct
  source 1..20: mol_type = other DNA
gagcccgtgacgcgcggagt

SEQ ID NO: 1685 - DNA, 20 bp, synthetic construct
  source 1..20: mol_type = other DNA
ctctgggatccttcgcggag

SEQ ID NO: 1686 - DNA, 20 bp, synthetic construct
  source 1..20: mol_type = other DNA
cctgctctgcccctccgcga

SEQ ID NO: 1687 - DNA, 20 bp, synthetic construct
  source 1..20: mol_type = other DNA
gcggaggggcagagcaggcg

SEQ ID NO: 1688 - DNA, 20 bp, synthetic construct
  source 1..20: mol_type = other DNA
ggaaagggcggtcccggagg

SEQ ID NO: 1689 - DNA, 20 bp, synthetic construct
  source 1..20: mol_type = other DNA
cggaggggcagagcaggcgg

SEQ ID NO: 1690 - DNA, 20 bp, synthetic construct
  source 1..20: mol_type = other DNA
tcgcggaggggcagagcagg

SEQ ID NO: 1691 - DNA, 20 bp, synthetic construct
  source 1..20: mol_type = other DNA
cagcggggcgggggaaaggg

SEQ ID NO: 1692 - DNA, 20 bp, synthetic construct
  source 1..20: mol_type = other DNA
ccttcgcggaggggcagagc

SEQ ID NO: 1693 - DNA, 20 bp, synthetic construct
  source 1..20: mol_type = other DNA
ggcgggggtgactggcagcg

SEQ ID NO: 1694 - DNA, 20 bp, synthetic construct
  source 1..20: mol_type = other DNA
cgcggaggggcagagcaggc

SEQ ID NO: 1695 - DNA, 20 bp, synthetic construct
  source 1..20: mol_type = other DNA
ggtggcgcgcgaaacgcggt

SEQ ID NO: 1696 - DNA, 20 bp, synthetic construct
  source 1..20: mol_type = other DNA
gcctggtggcgcgcgaaacg

SEQ ID NO: 1697 - DNA, 20 bp, synthetic construct
  source 1..20: mol_type = other DNA
aatctcgcgacactacggcc

SEQ ID NO: 1698 - DNA, 20 bp, synthetic construct
  source 1..20: mol_type = other DNA
ggcgcgcgaaacgcggtggg

SEQ ID NO: 1699 - DNA, 20 bp, synthetic construct
  source 1..20: mol_type = other DNA
tagtgatgtcataataacag

SEQ ID NO: 1700 - DNA, 20 bp, synthetic construct
  source 1..20: mol_type = other DNA
tgtgttgaactgttgagtct

SEQ ID NO: 1701 - DNA, 20 bp, synthetic construct
  source 1..20: mol_type = other DNA
gatttcagggtgctttagag

SEQ ID NO: 1702 - DNA, 20 bp, synthetic construct
  source 1..20: mol_type = other DNA
tgttgagtctgggtattggg

SEQ ID NO: 1703 - DNA, 20 bp, synthetic construct
  source 1..20: mol_type = other DNA
atttcagggtgctttagagt

SEQ ID NO: 1704 - DNA, 20 bp, synthetic construct
  source 1..20: mol_type = other DNA
ccgtagtgtcgcgagatttc

SEQ ID NO: 1705 - DNA, 20 bp, synthetic construct
  source 1..20: mol_type = other DNA
ctcgcgacactacggcctgg

SEQ ID NO: 1706 - DNA, 20 bp, synthetic construct
  source 1..20: mol_type = other DNA
cctgaaatctcgcgacacta

SEQ ID NO: 1707 - DNA, 20 bp, synthetic construct
  source 1..20: mol_type = other DNA
ttatgacatcactagaaagc

SEQ ID NO: 1708 - DNA, 20 bp, synthetic construct
  source 1..20: mol_type = other DNA
tgggtggtattgaattaggg

SEQ ID NO: 1709 - DNA, 20 bp, synthetic construct
  source 1..20: mol_type = other DNA
tggtggcgcgcgaaacgcgg

SEQ ID NO: 1710 - DNA, 20 bp, synthetic construct
  source 1..20: mol_type = other DNA
gattggtcaccgcccgctag

SEQ ID NO: 1711 - DNA, 20 bp, synthetic construct
  source 1..20: mol_type = other DNA
actaggggagcgttcgcaag

SEQ ID NO: 1712 - DNA, 20 bp, synthetic construct
  source 1..20: mol_type = other DNA
cactaggggagcgttcgcaa

SEQ ID NO: 1713 - DNA, 20 bp, synthetic construct
  source 1..20: mol_type = other DNA
gagcgttcgcaaggggtgtg

SEQ ID NO: 1714 - DNA, 20 bp, synthetic construct
  source 1..20: mol_type = other DNA
cgggcggtgaccaatcgccg

SEQ ID NO: 1715 - DNA, 20 bp, synthetic construct
  source 1..20: mol_type = other DNA
agcgggcggtgaccaatcgc

SEQ ID NO: 1716 - DNA, 20 bp, synthetic construct
  source 1..20: mol_type = other DNA
ctttgaagatgaaagactag

SEQ ID NO: 1717 - DNA, 20 bp, synthetic construct
  source 1..20: mol_type = other DNA
cagggctgtcccctagcggg

SEQ ID NO: 1718 - DNA, 20 bp, synthetic construct
  source 1..20: mol_type = other DNA
cagcgcttgccaatcagagg

SEQ ID NO: 1719 - DNA, 20 bp, synthetic construct
  source 1..20: mol_type = other DNA
gaaatcaagcttctaaaaag

SEQ ID NO: 1720 - DNA, 20 bp, synthetic construct
  source 1..20: mol_type = other DNA
ggagcgttcgcaaggggtgt

SEQ ID NO: 1721 - DNA, 20 bp, synthetic construct
  source 1..20: mol_type = other DNA
ggccagcgcttgccaatcag

SEQ ID NO: 1722 - DNA, 20 bp, synthetic construct
  source 1..20: mol_type = other DNA
cgttcgcaaggggtgtgggg

SEQ ID NO: 1723 - DNA, 20 bp, synthetic construct
  source 1..20: mol_type = other DNA
ttgccaatcagaggaggcca

SEQ ID NO: 1724 - DNA, 20 bp, synthetic construct
  source 1..20: mol_type = other DNA
aggccagggctgtcccctag

SEQ ID NO: 1725 - DNA, 20 bp, synthetic construct
  source 1..20: mol_type = other DNA
gggcggggacttgaacgcag

SEQ ID NO: 1726 - DNA, 20 bp, synthetic construct
  source 1..20: mol_type = other DNA
gcggctgaatccgacatggt

SEQ ID NO: 1727 - DNA, 20 bp, synthetic construct
  source 1..20: mol_type = other DNA
atgccccgcgaagtcgcccg

SEQ ID NO: 1728 - DNA, 20 bp, synthetic construct
  source 1..20: mol_type = other DNA
gcggggcctatttatcccca

SEQ ID NO: 1729 - DNA, 20 bp, synthetic construct
  source 1..20: mol_type = other DNA
gcccgcggctgaatccgaca

SEQ ID NO: 1730 - DNA, 20 bp, synthetic construct
  source 1..20: mol_type = other DNA
cagctctctccacagacccc

SEQ ID NO: 1731 - DNA, 20 bp, synthetic construct
  source 1..20: mol_type = other DNA
gctgtggtgggccgtccctg

SEQ ID NO: 1732 - DNA, 20 bp, synthetic construct
  source 1..20: mol_type = other DNA
tcaaggtaaacagatggcgc

SEQ ID NO: 1733 - DNA, 20 bp, synthetic construct
  source 1..20: mol_type = other DNA
accatgtcggattcagccgc

SEQ ID NO: 1734 - DNA, 20 bp, synthetic construct
  source 1..20: mol_type = other DNA
cggctgaatccgacatggtg

SEQ ID NO: 1735 - DNA, 20 bp, synthetic construct
  source 1..20: mol_type = other DNA
ccagcctcaaggtaaacaga

SEQ ID NO: 1736 - DNA, 20 bp, synthetic construct
  source 1..20: mol_type = other DNA
acttcgcggggcattccggg

SEQ ID NO: 1737 - DNA, 20 bp, synthetic construct
  source 1..20: mol_type = other DNA
tttaccttgaggctggacgt

SEQ ID NO: 1738 - DNA, 20 bp, synthetic construct
  source 1..20: mol_type = other DNA
ttgaggctggacgttgggca

SEQ ID NO: 1739 - DNA, 20 bp, synthetic construct
  source 1..20: mol_type = other DNA
cagccgcgggcgacttcgcg

SEQ ID NO: 1740 - DNA, 20 bp, synthetic construct
  source 1..20: mol_type = other DNA
aaatacccaggtattggcaa

SEQ ID NO: 1741 - DNA, 20 bp, synthetic construct
  source 1..20: mol_type = other DNA
atggtgaaatacccaggtat

SEQ ID NO: 1742 - DNA, 20 bp, synthetic construct
  source 1..20: mol_type = other DNA
cccatgaccacagcattcac

SEQ ID NO: 1743 - DNA, 20 bp, synthetic construct
  source 1..20: mol_type = other DNA
gtgaatgctgtggtcatggg

SEQ ID NO: 1744 - DNA, 20 bp, synthetic construct
  source 1..20: mol_type = other DNA
ccagtgaatgctgtggtcat

SEQ ID NO: 1745 - DNA, 20 bp, synthetic construct
  source 1..20: mol_type = other DNA
caaaagatggtgaaataccc

SEQ ID NO: 1746 - DNA, 20 bp, synthetic construct
  source 1..20: mol_type = other DNA
ctggattccagtgaatgctg

SEQ ID NO: 1747 - DNA, 20 bp, synthetic construct
  source 1..20: mol_type = other DNA
tgaagggaaccagcaaaaga

SEQ ID NO: 1748 - DNA, 20 bp, synthetic construct
  source 1..20: mol_type = other DNA
cctctcagcctgagaaaaca

SEQ ID NO: 1749 - DNA, 20 bp, synthetic construct
  source 1..20: mol_type = other DNA
ttcttcctttgccaatacct

SEQ ID NO: 1750 - DNA, 20 bp, synthetic construct
  source 1..20: mol_type = other DNA
atatcacttgtgatttcaac

SEQ ID NO: 1751 - DNA, 20 bp, synthetic construct
  source 1..20: mol_type = other DNA
gagaggatgttctttgttac

SEQ ID NO: 1752 - DNA, 20 bp, synthetic construct
  source 1..20: mol_type = other DNA
cagcctgagaaaacaaggag

SEQ ID NO: 1753 - DNA, 20 bp, synthetic construct
  source 1..20: mol_type = other DNA
tttcttcctttgccaatacc

SEQ ID NO: 1754 - DNA, 20 bp, synthetic construct
  source 1..20: mol_type = other DNA
tccagtgaatgctgtggtca

SEQ ID NO: 1755 - DNA, 20 bp, synthetic construct
  source 1..20: mol_type = other DNA
tgacaactgtgactgtgcag

SEQ ID NO: 1756 - DNA, 20 bp, synthetic construct
  source 1..20: mol_type = other DNA
tgaaagagtgaaggatcgga

SEQ ID NO: 1757 - DNA, 20 bp, synthetic construct
  source 1..20: mol_type = other DNA
aatggagaaagaatcaaatg

SEQ ID NO: 1758 - DNA, 20 bp, synthetic construct
  source 1..20: mol_type = other DNA
aaaggagagaaacagacagt

SEQ ID NO: 1759 - DNA, 20 bp, synthetic construct
  source 1..20: mol_type = other DNA
atggagaaagaatcaaatga

SEQ ID NO: 1760 - DNA, 20 bp, synthetic construct
  source 1..20: mol_type = other DNA
gacaactgtgactgtgcagg

SEQ ID NO: 1761 - DNA, 20 bp, synthetic construct
  source 1..20: mol_type = other DNA
agagtgaaggatcggaagga

SEQ ID NO: 1762 - DNA, 20 bp, synthetic construct
  source 1..20: mol_type = other DNA
aaggagagaaacagacagtg

SEQ ID NO: 1763 - DNA, 20 bp, synthetic construct
  source 1..20: mol_type = other DNA
gaaggatcggaaggaagggt

SEQ ID NO: 1764 - DNA, 20 bp, synthetic construct
  source 1..20: mol_type = other DNA
gagtgaaggatcggaaggaa

SEQ ID NO: 1765 - DNA, 20 bp, synthetic construct
  source 1..20: mol_type = other DNA
gaaaggagagaaacagacag

SEQ ID NO: 1766 - DNA, 20 bp, synthetic construct
  source 1..20: mol_type = other DNA
gagaaagaatcaaatgaggg

SEQ ID NO: 1767 - DNA, 20 bp, synthetic construct
  source 1..20: mol_type = other DNA
gacgtgaaagagtgaaggat

SEQ ID NO: 1768 - DNA, 20 bp, synthetic construct
  source 1..20: mol_type = other DNA
actgtgactgtgcagggggt

SEQ ID NO: 1769 - DNA, 20 bp, synthetic construct
  source 1..20: mol_type = other DNA
aggatcggaaggaagggtgg

SEQ ID NO: 1770 - DNA, 20 bp, synthetic construct
  source 1..20: mol_type = other DNA
ccctccccacagctagccga

SEQ ID NO: 1771 - DNA, 20 bp, synthetic construct
  source 1..20: mol_type = other DNA
ctagccgagggaaagaacgg

SEQ ID NO: 1772 - DNA, 20 bp, synthetic construct
  source 1..20: mol_type = other DNA
tagccgagggaaagaacgga

SEQ ID NO: 1773 - DNA, 20 bp, synthetic construct
  source 1..20: mol_type = other DNA
tccctccccacagctagccg

SEQ ID NO: 1774 - DNA, 20 bp, synthetic construct
  source 1..20: mol_type = other DNA
tctttccctcggctagctgt

SEQ ID NO: 1775 - DNA, 20 bp, synthetic construct
  source 1..20: mol_type = other DNA
ctccctcctcccctccacgc

SEQ ID NO: 1776 - DNA, 20 bp, synthetic construct
  source 1..20: mol_type = other DNA
agagagagaggccggcgtgg

SEQ ID NO: 1777 - DNA, 20 bp, synthetic construct
  source 1..20: mol_type = other DNA
ctttccctcggctagctgtg

SEQ ID NO: 1778 - DNA, 20 bp, synthetic construct
  source 1..20: mol_type = other DNA
agagagaggccggcgtggag

SEQ ID NO: 1779 - DNA, 20 bp, synthetic construct
  source 1..20: mol_type = other DNA
agagacagagaaagaagagg

SEQ ID NO: 1780 - DNA, 20 bp, synthetic construct
  source 1..20: mol_type = other DNA
ccttggctgggagtttgggg

SEQ ID NO: 1781 - DNA, 20 bp, synthetic construct
  source 1..20: mol_type = other DNA
gagagagagagaggccggcg

SEQ ID NO: 1782 - DNA, 20 bp, synthetic construct
  source 1..20: mol_type = other DNA
tccctcggctagctgtgggg

SEQ ID NO: 1783 - DNA, 20 bp, synthetic construct
  source 1..20: mol_type = other DNA
aggagggagagcgagcaggc

SEQ ID NO: 1784 - DNA, 20 bp, synthetic construct
  source 1..20: mol_type = other DNA
gggagtttggggaggcgagg

SEQ ID NO: 1785 - DNA, 20 bp, synthetic construct
  source 1..20: mol_type = other DNA
gggcggatgacgaggcgcag

SEQ ID NO: 1786 - DNA, 20 bp, synthetic construct
  source 1..20: mol_type = other DNA
cgggcggatgacgaggcgca

SEQ ID NO: 1787 - DNA, 20 bp, synthetic construct
  source 1..20: mol_type = other DNA
tcacaagcactcgcagcccg

SEQ ID NO: 1788 - DNA, 20 bp, synthetic construct
  source 1..20: mol_type = other DNA
ggggcaagggtgggtctgcg

SEQ ID NO: 1789 - DNA, 20 bp, synthetic construct
  source 1..20: mol_type = other DNA
agcagggatggcgcgcccgg

SEQ ID NO: 1790 - DNA, 20 bp, synthetic construct
  source 1..20: mol_type = other DNA
ggtccgggcgtcttaggctc

SEQ ID NO: 1791 - DNA, 20 bp, synthetic construct
  source 1..20: mol_type = other DNA
gagcagggatggcgcgcccg

SEQ ID NO: 1792 - DNA, 20 bp, synthetic construct
  source 1..20: mol_type = other DNA
tccgggcgtcttaggctccg

SEQ ID NO: 1793 - DNA, 20 bp, synthetic construct
  source 1..20: mol_type = other DNA
acccgccgcaccctcacccc

SEQ ID NO: 1794 - DNA, 20 bp, synthetic construct
  source 1..20: mol_type = other DNA
ccctgctccgccgccagcga

SEQ ID NO: 1795 - DNA, 20 bp, synthetic construct
  source 1..20: mol_type = other DNA
ctccggggctccctcgctgg

SEQ ID NO: 1796 - DNA, 20 bp, synthetic construct
  source 1..20: mol_type = other DNA
tccctgctccgccgccagcg

SEQ ID NO: 1797 - DNA, 20 bp, synthetic construct
  source 1..20: mol_type = other DNA
gcaagggtgggtctgcgagg

SEQ ID NO: 1798 - DNA, 20 bp, synthetic construct
  source 1..20: mol_type = other DNA
gccccggagcctaagacgcc

SEQ ID NO: 1799 - DNA, 20 bp, synthetic construct
  source 1..20: mol_type = other DNA
agggtgggtctgcgaggcgg

SEQ ID NO: 1800 - DNA, 20 bp, synthetic construct
  source 1..20: mol_type = other DNA
acaaaaacctacgcgtcgcg

SEQ ID NO: 1801 - DNA, 20 bp, synthetic construct
  source 1..20: mol_type = other DNA
tccttgtggagtccgaagcg

SEQ ID NO: 1802 - DNA, 20 bp, synthetic construct
  source 1..20: mol_type = other DNA
gaagagagccccctttgggg

SEQ ID NO: 1803 - DNA, 20 bp, synthetic construct
  source 1..20: mol_type = other DNA
ccgcccaccgcgcgacgcgt

SEQ ID NO: 1804 - DNA, 20 bp, synthetic construct
  source 1..20: mol_type = other DNA
gggcctccagaacccagcca

SEQ ID NO: 1805 - DNA, 20 bp, synthetic construct
  source 1..20: mol_type = other DNA
cagtggctccgccccaaagg

SEQ ID NO: 1806 - DNA, 20 bp, synthetic construct
  source 1..20: mol_type = other DNA
tcagtggctccgccccaaag

SEQ ID NO: 1807 - DNA, 20 bp, synthetic construct
  source 1..20: mol_type = other DNA
gccacgcttcggactccaca

SEQ ID NO: 1808 - DNA, 20 bp, synthetic construct
  source 1..20: mol_type = other DNA
agggctgcgcggaagaggct

SEQ ID NO: 1809 - DNA, 20 bp, synthetic construct
  source 1..20: mol_type = other DNA
aaacctacgcgtcgcgcggt

SEQ ID NO: 1810 - DNA, 20 bp, synthetic construct
  source 1..20: mol_type = other DNA
tccgaagcgtggccacgccc

SEQ ID NO: 1811 - DNA, 20 bp, synthetic construct
  source 1..20: mol_type = other DNA
ggtccctggctgggttctgg

SEQ ID NO: 1812 - DNA, 20 bp, synthetic construct
  source 1..20: mol_type = other DNA
ctttggggcggagccactga

SEQ ID NO: 1813 - DNA, 20 bp, synthetic construct
  source 1..20: mol_type = other DNA
ctcttccgcgcagccctcag

SEQ ID NO: 1814 - DNA, 20 bp, synthetic construct
  source 1..20: mol_type = other DNA
aaaacctacgcgtcgcgcgg

SEQ ID NO: 1815 - DNA, 20 bp, synthetic construct
  source 1..20: mol_type = other DNA
gctgagcctataggcatggg

SEQ ID NO: 1816 - DNA, 20 bp, synthetic construct
  source 1..20: mol_type = other DNA
agtttgtgatgcctgaagtg

SEQ ID NO: 1817 - DNA, 20 bp, synthetic construct
  source 1..20: mol_type = other DNA
gtagctcaatggggaagttg

SEQ ID NO: 1818 - DNA, 20 bp, synthetic construct
  source 1..20: mol_type = other DNA
gtgaggtccactaggcagca

SEQ ID NO: 1819 - DNA, 20 bp, synthetic construct
  source 1..20: mol_type = other DNA
ctgagcctataggcatgggt

SEQ ID NO: 1820 - DNA, 20 bp, synthetic construct
  source 1..20: mol_type = other DNA
tgagctgagcctataggcat

SEQ ID NO: 1821 - DNA, 20 bp, synthetic construct
  source 1..20: mol_type = other DNA
aggaaacatctatagcatag

SEQ ID NO: 1822 - DNA, 20 bp, synthetic construct
  source 1..20: mol_type = other DNA
gcatagaggtaagccagagt

SEQ ID NO: 1823 - DNA, 20 bp, synthetic construct
  source 1..20: mol_type = other DNA
gacccatcatgatccaactc

SEQ ID NO: 1824 - DNA, 20 bp, synthetic construct
  source 1..20: mol_type = other DNA
aggcatgggtgggatcatta

SEQ ID NO: 1825 - DNA, 20 bp, synthetic construct
  source 1..20: mol_type = other DNA
ttctgtgctgatcgctctta

SEQ ID NO: 1826 - DNA, 20 bp, synthetic construct
  source 1..20: mol_type = other DNA
ttcaggtttgtagctcaatg

SEQ ID NO: 1827 - DNA, 20 bp, synthetic construct
  source 1..20: mol_type = other DNA
atgagctgagcctataggca

SEQ ID NO: 1828 - DNA, 20 bp, synthetic construct
  source 1..20: mol_type = other DNA
gaaatatgagctgagcctat

SEQ ID NO: 1829 - DNA, 20 bp, synthetic construct
  source 1..20: mol_type = other DNA
tgcctgaagtgaggtccact

SEQ ID NO: 1830 - DNA, 20 bp, synthetic construct
  source 1..20: mol_type = other DNA
tagtggtctgggcgacctga

SEQ ID NO: 1831 - DNA, 20 bp, synthetic construct
  source 1..20: mol_type = other DNA
agcatctatgcgtcagcctc

SEQ ID NO: 1832 - DNA, 20 bp, synthetic construct
  source 1..20: mol_type = other DNA
gcgcagcgcaaccgaaccgg

SEQ ID NO: 1833 - DNA, 20 bp, synthetic construct
  source 1..20: mol_type = other DNA
catagatgctgcgattggct

SEQ ID NO: 1834 - DNA, 20 bp, synthetic construct
  source 1..20: mol_type = other DNA
tgacgcatagatgctgcgat

SEQ ID NO: 1835 - DNA, 20 bp, synthetic construct
  source 1..20: mol_type = other DNA
tggggagggtgcgcttcccg

SEQ ID NO: 1836 - DNA, 20 bp, synthetic construct
  source 1..20: mol_type = other DNA
ctatgcgtcagcctccggtt

SEQ ID NO: 1837 - DNA, 20 bp, synthetic construct
  source 1..20: mol_type = other DNA
gtagtggtctgggcgacctg

SEQ ID NO: 1838 - DNA, 20 bp, synthetic construct
  source 1..20: mol_type = other DNA
tggtctgggcgacctgaggg

SEQ ID NO: 1839 - DNA, 20 bp, synthetic construct
  source 1..20: mol_type = other DNA
cgcaccctccccacagcccg

SEQ ID NO: 1840 - DNA, 20 bp, synthetic construct
  source 1..20: mol_type = other DNA
ggagcaggccccgggctgtg

SEQ ID NO: 1841 - DNA, 20 bp, synthetic construct
  source 1..20: mol_type = other DNA
gggagcaggccccgggctgt

SEQ ID NO: 1842 - DNA, 20 bp, synthetic construct
  source 1..20: mol_type = other DNA
ggtctgggcgacctgagggc

SEQ ID NO: 1843 - DNA, 20 bp, synthetic construct
  source 1..20: mol_type = other DNA
gcgcaccctccccacagccc

SEQ ID NO: 1844 - DNA, 20 bp, synthetic construct
  source 1..20: mol_type = other DNA
gcaggccccgggctgtgggg

SEQ ID NO: 1845 - DNA, 20 bp, synthetic construct
  source 1..20: mol_type = other DNA
cccacgtggccgctgacggg

SEQ ID NO: 1846 - DNA, 20 bp, synthetic construct
  source 1..20: mol_type = other DNA
ccctcagggaccggccacag

SEQ ID NO: 1847 - DNA, 20 bp, synthetic construct
  source 1..20: mol_type = other DNA
gccacgtggggagcgagcgc

SEQ ID NO: 1848 - DNA, 20 bp, synthetic construct
  source 1..20: mol_type = other DNA
ggggcggccaggttattcac

SEQ ID NO: 1849 - DNA, 20 bp, synthetic construct
  source 1..20: mol_type = other DNA
ccactgtggccggtccctga

SEQ ID NO: 1850 - DNA, 20 bp, synthetic construct
  source 1..20: mol_type = other DNA
cccactgtggccggtccctg

SEQ ID NO: 1851 - DNA, 20 bp, synthetic construct
  source 1..20: mol_type = other DNA
ccccactcccgtgaataacc

SEQ ID NO: 1852 - DNA, 20 bp, synthetic construct
  source 1..20: mol_type = other DNA
ggtgccgccccgcccgtcag

SEQ ID NO: 1853 - DNA, 20 bp, synthetic construct
  source 1..20: mol_type = other DNA
agaccccttaaagcgccctc

SEQ ID NO: 1854 - DNA, 20 bp, synthetic construct
  source 1..20: mol_type = other DNA
cagggaccggccacagtggg

SEQ ID NO: 1855 - DNA, 20 bp, synthetic construct
  source 1..20: mol_type = other DNA
gtccctgagggcgctttaag

SEQ ID NO: 1856 - DNA, 20 bp, synthetic construct
  source 1..20: mol_type = other DNA
cctcagggaccggccacagt

SEQ ID NO: 1857 - DNA, 20 bp, synthetic construct
  source 1..20: mol_type = other DNA
agggaccggccacagtgggc

SEQ ID NO: 1858 - DNA, 20 bp, synthetic construct
  source 1..20: mol_type = other DNA
agccacccacctcccccccc

SEQ ID NO: 1859 - DNA, 20 bp, synthetic construct
  source 1..20: mol_type = other DNA
ggggagcgagcgcgggccgg

SEQ ID NO: 1860 - DNA, 20 bp, synthetic construct
  source 1..20: mol_type = other DNA
cccgagaaggtcctcaagcg

SEQ ID NO: 1861 - DNA, 20 bp, synthetic construct
  source 1..20: mol_type = other DNA
gggactcagggcttagcggg

SEQ ID NO: 1862 - DNA, 20 bp, synthetic construct
  source 1..20: mol_type = other DNA
ccgagaaggtcctcaagcga

SEQ ID NO: 1863 - DNA, 20 bp, synthetic construct
  source 1..20: mol_type = other DNA
cttgaggaccttctcgggtc

SEQ ID NO: 1864 - DNA, 20 bp, synthetic construct
  source 1..20: mol_type = other DNA
ccagagccagcgatcagatc

SEQ ID NO: 1865 - DNA, 20 bp, synthetic construct
  source 1..20: mol_type = other DNA
cgagagccgcggcttggaga

SEQ ID NO: 1866 - DNA, 20 bp, synthetic construct
  source 1..20: mol_type = other DNA
ccggattggaccctgcttcg

SEQ ID NO: 1867 - DNA, 20 bp, synthetic construct
  source 1..20: mol_type = other DNA
gtcccgcctcccacgaagca

SEQ ID NO: 1868 - DNA, 20 bp, synthetic construct
  source 1..20: mol_type = other DNA
ggcgtttctgcagacatcct

SEQ ID NO: 1869 - DNA, 20 bp, synthetic construct
  source 1..20: mol_type = other DNA
gactctccctctccaagccg

SEQ ID NO: 1870 - DNA, 20 bp, synthetic construct
  source 1..20: mol_type = other DNA
gcgagagccgcggcttggag

SEQ ID NO: 1871 - DNA, 20 bp, synthetic construct
  source 1..20: mol_type = other DNA
ggctctcgccagacccgaga

SEQ ID NO: 1872 - DNA, 20 bp, synthetic construct
  source 1..20: mol_type = other DNA
cctgaggtcaccctcgcttg

SEQ ID NO: 1873 - DNA, 20 bp, synthetic construct
  source 1..20: mol_type = other DNA
agcgagggtgacctcagggc

SEQ ID NO: 1874 - DNA, 20 bp, synthetic construct
  source 1..20: mol_type = other DNA
ctcaagcgagggtgacctca

SEQ ID NO: 1875 - DNA, 20 bp, synthetic construct
  source 1..20: mol_type = other DNA
gcatgcgcgcaccaatagga

SEQ ID NO: 1876 - DNA, 20 bp, synthetic construct
  source 1..20: mol_type = other DNA
atttggtgcctaaatccgcg

SEQ ID NO: 1877 - DNA, 20 bp, synthetic construct
  source 1..20: mol_type = other DNA
ctccaattgggcgcggacga

SEQ ID NO: 1878 - DNA, 20 bp, synthetic construct
  source 1..20: mol_type = other DNA
tgcatgcgcgcaccaatagg

SEQ ID NO: 1879 - DNA, 20 bp, synthetic construct
  source 1..20: mol_type = other DNA
gcgcaccaataggagggcag

SEQ ID NO: 1880 - DNA, 20 bp, synthetic construct
  source 1..20: mol_type = other DNA
cctcgtccgcgcccaattgg

SEQ ID NO: 1881 - DNA, 20 bp, synthetic construct
  source 1..20: mol_type = other DNA
gggagccggtaagctggaag

SEQ ID NO: 1882 - DNA, 20 bp, synthetic construct
  source 1..20: mol_type = other DNA
ggagccggtaagctggaagg

SEQ ID NO: 1883 - DNA, 20 bp, synthetic construct
  source 1..20: mol_type = other DNA
aattggaggctgccgaggcg

SEQ ID NO: 1884 - DNA, 20 bp, synthetic construct
  source 1..20: mol_type = other DNA
cggcagcctccaattgggcg

SEQ ID NO: 1885 - DNA, 20 bp, synthetic construct
  source 1..20: mol_type = other DNA
accaataggagggcagtggg

SEQ ID NO: 1886 - DNA, 20 bp, synthetic construct
  source 1..20: mol_type = other DNA
tctttccggacgtggggagc

SEQ ID NO: 1887 - DNA, 20 bp, synthetic construct
  source 1..20: mol_type = other DNA
ccaattggaggctgccgagg

SEQ ID NO: 1888 - DNA, 20 bp, synthetic construct
  source 1..20: mol_type = other DNA
ccaataggagggcagtgggt

SEQ ID NO: 1889 - DNA, 20 bp, synthetic construct
  source 1..20: mol_type = other DNA
tggggagccggtaagctgga

SEQ ID NO: 1890 - DNA, 20 bp, synthetic construct
  source 1..20: mol_type = other DNA
ggacttcgcgataagagcgg

SEQ ID NO: 1891 - DNA, 20 bp, synthetic construct
  source 1..20: mol_type = other DNA
aagggacttcgcgataagag

SEQ ID NO: 1892 - DNA, 20 bp, synthetic construct
  source 1..20: mol_type = other DNA
gcggcggggagggaccgact

SEQ ID NO: 1893 - DNA, 20 bp, synthetic construct
  source 1..20: mol_type = other DNA
ggaaacccgagagaggaaac

SEQ ID NO: 1894 - DNA, 20 bp, synthetic construct
  source 1..20: mol_type = other DNA
ggagcctccactcgcccagt

SEQ ID NO: 1895 - DNA, 20 bp, synthetic construct
  source 1..20: mol_type = other DNA
gaaacccgagagaggaaaca

SEQ ID NO: 1896 - DNA, 20 bp, synthetic construct
  source 1..20: mol_type = other DNA
gtacaaccttccggccaatg

SEQ ID NO: 1897 - DNA, 20 bp, synthetic construct
  source 1..20: mol_type = other DNA
ccttagattggccgcctgga

SEQ ID NO: 1898 - DNA, 20 bp, synthetic construct
  source 1..20: mol_type = other DNA
ggagggaggaaacccgagag

SEQ ID NO: 1899 - DNA, 20 bp, synthetic construct
  source 1..20: mol_type = other DNA
cattggccggaaggttgtac

SEQ ID NO: 1900 - DNA, 20 bp, synthetic construct
  source 1..20: mol_type = other DNA
agaggaaacagggcgttgaa

SEQ ID NO: 1901 - DNA, 20 bp, synthetic construct
  source 1..20: mol_type = other DNA
gataagagcggaggccccat

SEQ ID NO: 1902 - DNA, 20 bp, synthetic construct
  source 1..20: mol_type = other DNA
cccctccccccgccgccccg

SEQ ID NO: 1903 - DNA, 20 bp, synthetic construct
  source 1..20: mol_type = other DNA
cccgccgcggggctggccgg

SEQ ID NO: 1904 - DNA, 20 bp, synthetic construct
  source 1..20: mol_type = other DNA
tgggtgggcggggaaaggag

SEQ ID NO: 1905 - DNA, 20 bp, synthetic construct
  source 1..20: mol_type = other DNA
agctgccggttccgatcgag

SEQ ID NO: 1906 - DNA, 20 bp, synthetic construct
  source 1..20: mol_type = other DNA
gggacaggctcctccgagag

SEQ ID NO: 1907 - DNA, 20 bp, synthetic construct
  source 1..20: mol_type = other DNA
gcagctgccggttccgatcg

SEQ ID NO: 1908 - DNA, 20 bp, synthetic construct
  source 1..20: mol_type = other DNA
cagctgccggttccgatcga

SEQ ID NO: 1909 - DNA, 20 bp, synthetic construct
  source 1..20: mol_type = other DNA
ccggagccaaacttgaggct

SEQ ID NO: 1910 - DNA, 20 bp, synthetic construct
  source 1..20: mol_type = other DNA
gcagcccggagccaaacttg

SEQ ID NO: 1911 - DNA, 20 bp, synthetic construct
  source 1..20: mol_type = other DNA
cagcgagagaaactttggct

SEQ ID NO: 1912 - DNA, 20 bp, synthetic construct
  source 1..20: mol_type = other DNA
ctcggaggagcctgtcccag

SEQ ID NO: 1913 - DNA, 20 bp, synthetic construct
  source 1..20: mol_type = other DNA
ctgggacaggctcctccgag

SEQ ID NO: 1914 - DNA, 20 bp, synthetic construct
  source 1..20: mol_type = other DNA
tgggacaggctcctccgaga

SEQ ID NO: 1915 - DNA, 20 bp, synthetic construct
  source 1..20: mol_type = other DNA
gaggagcctgtcccagaggc

SEQ ID NO: 1916 - DNA, 20 bp, synthetic construct
  source 1..20: mol_type = other DNA
tgccggttccgatcgagggg

SEQ ID NO: 1917 - DNA, 20 bp, synthetic construct
  source 1..20: mol_type = other DNA
tcgagcccggcccctctcgg

SEQ ID NO: 1918 - DNA, 20 bp, synthetic construct
  source 1..20: mol_type = other DNA
ggccgggctcgacccagggc

SEQ ID NO: 1919 - DNA, 20 bp, synthetic construct
  source 1..20: mol_type = other DNA
ccggttccgatcgaggggcg

SEQ ID NO: 1920 - DNA, 20 bp, synthetic construct
  source 1..20: mol_type = other DNA
ggacactgtgtactcagcag

SEQ ID NO: 1921 - DNA, 20 bp, synthetic construct
  source 1..20: mol_type = other DNA
cgcacggcgtggcgctcacg

SEQ ID NO: 1922 - DNA, 20 bp, synthetic construct
  source 1..20: mol_type = other DNA
ggcgctgtgatggccacctg

SEQ ID NO: 1923 - DNA, 20 bp, synthetic construct
  source 1..20: mol_type = other DNA
agcgctaaccattgcacctg

SEQ ID NO: 1924 - DNA, 20 bp, synthetic construct
  source 1..20: mol_type = other DNA
gagccaggaggcccgctagg

SEQ ID NO: 1925 - DNA, 20 bp, synthetic construct
  source 1..20: mol_type = other DNA
gacactgtgtactcagcagg

SEQ ID NO: 1926 - DNA, 20 bp, synthetic construct
  source 1..20: mol_type = other DNA
ttagcgctaaccattgcacc

SEQ ID NO: 1927 - DNA, 20 bp, synthetic construct
  source 1..20: mol_type = other DNA
tagcgctaaccattgcacct

SEQ ID NO: 1928 - DNA, 20 bp, synthetic construct
  source 1..20: mol_type = other DNA
cagcgcctgcagccgcctag

SEQ ID NO: 1929 - DNA, 20 bp, synthetic construct
  source 1..20: mol_type = other DNA
gagccagcgccggagccagg

SEQ ID NO: 1930 - DNA, 20 bp, synthetic construct
  source 1..20: mol_type = other DNA
ccggagccaggaggcccgct

SEQ ID NO: 1931 - DNA, 20 bp, synthetic construct
  source 1..20: mol_type = other DNA
gaggcccgctaggcggctgc

SEQ ID NO: 1932 - DNA, 20 bp, synthetic construct
  source 1..20: mol_type = other DNA
cctagcgggcctcctggctc

SEQ ID NO: 1933 - DNA, 20 bp, synthetic construct
  source 1..20: mol_type = other DNA
ctggggctgggagccagcgc

SEQ ID NO: 1934 - DNA, 20 bp, synthetic construct
  source 1..20: mol_type = other DNA
ggcggctgcaggcgctgtga

SEQ ID NO: 1935 - DNA, 20 bp, synthetic construct
  source 1..20: mol_type = other DNA
aggatctcagcgtgacacca

SEQ ID NO: 1936 - DNA, 20 bp, synthetic construct
  source 1..20: mol_type = other DNA
gggtggagtcatttgactgg

SEQ ID NO: 1937 - DNA, 20 bp, synthetic construct
  source 1..20: mol_type = other DNA
tcccgtgcctgccttgtggg

SEQ ID NO: 1938 - DNA, 20 bp, synthetic construct
  source 1..20: mol_type = other DNA
gtcaaatgactccacccaca

SEQ ID NO: 1939 - DNA, 20 bp, synthetic construct
  source 1..20: mol_type = other DNA
ttcatcccgtgcctgccttg

SEQ ID NO: 1940 - DNA, 20 bp, synthetic construct
  source 1..20: mol_type = other DNA
aatgactccacccacaaggc

SEQ ID NO: 1941 - DNA, 20 bp, synthetic construct
  source 1..20: mol_type = other DNA
tccacccacaaggcaggcac

SEQ ID NO: 1942 - DNA, 20 bp, synthetic construct
  source 1..20: mol_type = other DNA
ggcacgggatgaatggtccc

SEQ ID NO: 1943 - DNA, 20 bp, synthetic construct
  source 1..20: mol_type = other DNA
tgggtggagtcatttgactg

SEQ ID NO: 1944 - DNA, 20 bp, synthetic construct
  source 1..20: mol_type = other DNA
caggatctcagcgtgacacc

SEQ ID NO: 1945 - DNA, 20 bp, synthetic construct
  source 1..20: mol_type = other DNA
ggtgtcacgctgagatcctg

SEQ ID NO: 1946 - DNA, 20 bp, synthetic construct
  source 1..20: mol_type = other DNA
gtcatttgactgggggccgg

SEQ ID NO: 1947 - DNA, 20 bp, synthetic construct
  source 1..20: mol_type = other DNA
agatcctgtggctgggcccc

SEQ ID NO: 1948 - DNA, 20 bp, synthetic construct
  source 1..20: mol_type = other DNA
gcggggagggggtaatgggg

SEQ ID NO: 1949 - DNA, 20 bp, synthetic construct
  source 1..20: mol_type = other DNA
ttaccccctccccgccccgc

SEQ ID NO: 1950 - DNA, 20 bp, synthetic construct
  source 1..20: mol_type = other DNA
caggctggtgatttacgatg

SEQ ID NO: 1951 - DNA, 20 bp, synthetic construct
  source 1..20: mol_type = other DNA
tccctcccgtttaaggtctg

SEQ ID NO: 1952 - DNA, 20 bp, synthetic construct
  source 1..20: mol_type = other DNA
aggctggtgatttacgatgt

SEQ ID NO: 1953 - DNA, 20 bp, synthetic construct
  source 1..20: mol_type = other DNA
aaagcttcttgttcaaactg

SEQ ID NO: 1954 - DNA, 20 bp, synthetic construct
  source 1..20: mol_type = other DNA
ttacgatgtgggtattgatg

SEQ ID NO: 1955 - DNA, 20 bp, synthetic construct
  source 1..20: mol_type = other DNA
tcagaccttaaacgggaggg

SEQ ID NO: 1956 - DNA, 20 bp, synthetic construct
  source 1..20: mol_type = other DNA
acgatgtgggtattgatgtg

SEQ ID NO: 1957 - DNA, 20 bp, synthetic construct
  source 1..20: mol_type = other DNA
taaatcaccagcctgacctc

SEQ ID NO: 1958 - DNA, 20 bp, synthetic construct
  source 1..20: mol_type = other DNA
gctactatatatagacgcct

SEQ ID NO: 1959 - DNA, 20 bp, synthetic construct
  source 1..20: mol_type = other DNA
agtgtcacacccggtttcct

SEQ ID NO: 1960 - DNA, 20 bp, synthetic construct
  source 1..20: mol_type = other DNA
atcaccagcctgacctcagg

SEQ ID NO: 1961 - DNA, 20 bp, synthetic construct
  source 1..20: mol_type = other DNA
cttgttcaaactgagggcgg

SEQ ID NO: 1962 - DNA, 20 bp, synthetic construct
  source 1..20: mol_type = other DNA
tacgatgtgggtattgatgt

SEQ ID NO: 1963 - DNA, 20 bp, synthetic construct
  source 1..20: mol_type = other DNA
gggggctgaagtgtcacacc

SEQ ID NO: 1964 - DNA, 20 bp, synthetic construct
  source 1..20: mol_type = other DNA
gtgggtattgatgtggggag

SEQ ID NO: 1965 - DNA, 20 bp, synthetic construct
  source 1..20: mol_type = other DNA
gagcacgcggggccgacagg

SEQ ID NO: 1966 - DNA, 20 bp, synthetic construct
  source 1..20: mol_type = other DNA
gtggcggagccagaacccga

SEQ ID NO: 1967 - DNA, 20 bp, synthetic construct
  source 1..20: mol_type = other DNA
tcggccccgcgtgctctctg

SEQ ID NO: 1968 - DNA, 20 bp, synthetic construct
  source 1..20: mol_type = other DNA
ggcaaccgcagagagcacgc

SEQ ID NO: 1969 - DNA, 20 bp, synthetic construct
  source 1..20: mol_type = other DNA
ggtggcggagccagaacccg

SEQ ID NO: 1970 - DNA, 20 bp, synthetic construct
  source 1..20: mol_type = other DNA
tggcggagccagaacccgag

SEQ ID NO: 1971 - DNA, 20 bp, synthetic construct
  source 1..20: mol_type = other DNA
cgcagggcagagcaaggcga

SEQ ID NO: 1972 - DNA, 20 bp, synthetic construct
  source 1..20: mol_type = other DNA
gcagggcagagcaaggcgag

SEQ ID NO: 1973 - DNA, 20 bp, synthetic construct
  source 1..20: mol_type = other DNA
gggcgccgcagggcagagca

SEQ ID NO: 1974 - DNA, 20 bp, synthetic construct
  source 1..20: mol_type = other DNA
ccgcagggcagagcaaggcg

SEQ ID NO: 1975 - DNA, 20 bp, synthetic construct
  source 1..20: mol_type = other DNA
ggagagcccacgagggcggg

SEQ ID NO: 1976 - DNA, 20 bp, synthetic construct
  source 1..20: mol_type = other DNA
ggcgaggggagagcccacga

SEQ ID NO: 1977 - DNA, 20 bp, synthetic construct
  source 1..20: mol_type = other DNA
gaggggagagcccacgaggg

SEQ ID NO: 1978 - DNA, 20 bp, synthetic construct
  source 1..20: mol_type = other DNA
gctccgccacccgccctcgt

SEQ ID NO: 1979 - DNA, 20 bp, synthetic construct
  source 1..20: mol_type = other DNA
gaggggcgggccaggcccgg

SEQ ID NO: 1980 - DNA, 20 bp, synthetic construct
  source 1..20: mol_type = other DNA
gcggccaggctcctccgatg

SEQ ID NO: 1981 - DNA, 20 bp, synthetic construct
  source 1..20: mol_type = other DNA
tgtcgggagaccgtccgcga

SEQ ID NO: 1982 - DNA, 20 bp, synthetic construct
  source 1..20: mol_type = other DNA
gggagaccgtccgcgaagga

SEQ ID NO: 1983 - DNA, 20 bp, synthetic construct
  source 1..20: mol_type = other DNA
ggggagagaccaaggtgtgg

SEQ ID NO: 1984 - DNA, 20 bp, synthetic construct
  source 1..20: mol_type = other DNA
cgggagaccgtccgcgaagg

SEQ ID NO: 1985 - DNA, 20 bp, synthetic construct
  source 1..20: mol_type = other DNA
ggggggagagaccaaggtgt

SEQ ID NO: 1986 - DNA, 20 bp, synthetic construct
  source 1..20: mol_type = other DNA
gggggagagaccaaggtgtg

SEQ ID NO: 1987 - DNA, 20 bp, synthetic construct
  source 1..20: mol_type = other DNA
gccgcaggacccctcctccc

SEQ ID NO: 1988 - DNA, 20 bp, synthetic construct
  source 1..20: mol_type = other DNA
ccgcaggacccctcctcccc

SEQ ID NO: 1989 - DNA, 20 bp, synthetic construct
  source 1..20: mol_type = other DNA
ccaaggtgtgggggcgcccg

SEQ ID NO: 1990 - DNA, 20 bp, synthetic construct
  source 1..20: mol_type = other DNA
gagggcggggggagagacca

SEQ ID NO: 1991 - DNA, 20 bp, synthetic construct
  source 1..20: mol_type = other DNA
cccggggaggaggggtcctg

SEQ ID NO: 1992 - DNA, 20 bp, synthetic construct
  source 1..20: mol_type = other DNA
catcggaggagcctggccgc

SEQ ID NO: 1993 - DNA, 20 bp, synthetic construct
  source 1..20: mol_type = other DNA
cggggggagagaccaaggtg

SEQ ID NO: 1994 - DNA, 20 bp, synthetic construct
  source 1..20: mol_type = other DNA
ccgagagctggggggcgggg

SEQ ID NO: 1995 - DNA, 20 bp, synthetic construct
  source 1..20: mol_type = other DNA
ctgcgcagtcgcccggacaa

SEQ ID NO: 1996 - DNA, 20 bp, synthetic construct
  source 1..20: mol_type = other DNA
gcgcagcgcgggcacccccg

SEQ ID NO: 1997 - DNA, 20 bp, synthetic construct
  source 1..20: mol_type = other DNA
gtccgggcgactgcgcagcg

SEQ ID NO: 1998 - DNA, 20 bp, synthetic construct
  source 1..20: mol_type = other DNA
tccgggcgactgcgcagcgc

SEQ ID NO: 1999 - DNA, 20 bp, synthetic construct
  source 1..20: mol_type = other DNA
gcgccgcggtcactaggaga

SEQ ID NO: 2000 - DNA, 20 bp, synthetic construct
  source 1..20: mol_type = other DNA
gggaagagaagccccagcgt

SEQ ID NO: 2001 - DNA, 20 bp, synthetic construct
  source 1..20: mol_type = other DNA
tgggaagagaagccccagcg

SEQ ID NO: 2002 - DNA, 20 bp, synthetic construct
  source 1..20: mol_type = other DNA
cgggcgggctcagcaccccc

SEQ ID NO: 2003 - DNA, 20 bp, synthetic construct
  source 1..20: mol_type = other DNA
gagcccggcgcggacgcagg

SEQ ID NO: 2004 - DNA, 20 bp, synthetic construct
  source 1..20: mol_type = other DNA
cgccaggcccgcgagcgccg

SEQ ID NO: 2005 - DNA, 20 bp, synthetic construct
  source 1..20: mol_type = other DNA
caggaaggccgagcccggcg

SEQ ID NO: 2006 - DNA, 20 bp, synthetic construct
  source 1..20: mol_type = other DNA
ggacgcaggcggctccgggc

SEQ ID NO: 2007 - DNA, 20 bp, synthetic construct
  source 1..20: mol_type = other DNA
ggagccgcctgcgtccgcgc

SEQ ID NO: 2008 - DNA, 20 bp, synthetic construct
  source 1..20: mol_type = other DNA
gccgagcccggcgcggacgc

SEQ ID NO: 2009 - DNA, 20 bp, synthetic construct
  source 1..20: mol_type = other DNA
gcgcggacgcaggcggctcc

SEQ ID NO: 2010 - DNA, 20 bp, synthetic construct
  source 1..20: mol_type = other DNA
gaaggccaaaccggacgacg

SEQ ID NO: 2011 - DNA, 20 bp, synthetic construct
  source 1..20: mol_type = other DNA
gcgcgaggctactcagtcga

SEQ ID NO: 2012 - DNA, 20 bp, synthetic construct
  source 1..20: mol_type = other DNA
cgaggctactcagtcgaggg

SEQ ID NO: 2013 - DNA, 20 bp, synthetic construct
  source 1..20: mol_type = other DNA
agcgcgaggctactcagtcg

SEQ ID NO: 2014 - DNA, 20 bp, synthetic construct
  source 1..20: mol_type = other DNA
acgcggaaatgacgtcacgc

SEQ ID NO: 2015 - DNA, 20 bp, synthetic construct
  source 1..20: mol_type = other DNA
ggcacccagcagccaccgcg

SEQ ID NO: 2016 - DNA, 20 bp, synthetic construct
  source 1..20: mol_type = other DNA
cggaaatgacgtcacgccgg

SEQ ID NO: 2017 - DNA, 20 bp, synthetic construct
  source 1..20: mol_type = other DNA
gaggctactcagtcgagggt

SEQ ID NO: 2018 - DNA, 20 bp, synthetic construct
  source 1..20: mol_type = other DNA
gcggaaatgacgtcacgccg

SEQ ID NO: 2019 - DNA, 20 bp, synthetic construct
  source 1..20: mol_type = other DNA
cagggagcggagcggccgag

SEQ ID NO: 2020 - DNA, 20 bp, synthetic construct
  source 1..20: mol_type = other DNA
ccagggagcggagcggccga

SEQ ID NO: 2021 - DNA, 20 bp, synthetic construct
  source 1..20: mol_type = other DNA
ccagcagccaccgcgcggca

SEQ ID NO: 2022 - DNA, 20 bp, synthetic construct
  source 1..20: mol_type = other DNA
acgccgggggccctgccgcg

SEQ ID NO: 2023 - DNA, 20 bp, synthetic construct
  source 1..20: mol_type = other DNA
ccgggggccctgccgcgcgg

SEQ ID NO: 2024 - DNA, 20 bp, synthetic construct
  source 1..20: mol_type = other DNA
gaggaggatgggaaggcgtg

SEQ ID NO: 2025 - DNA, 20 bp, synthetic construct
  source 1..20: mol_type = other DNA
gcagagcgagtacaaagcta

SEQ ID NO: 2026 - DNA, 20 bp, synthetic construct
  source 1..20: mol_type = other DNA
taattggtgctagccgtctg

SEQ ID NO: 2027 - DNA, 20 bp, synthetic construct
  source 1..20: mol_type = other DNA
cagagcgagtacaaagctag

SEQ ID NO: 2028 - DNA, 20 bp, synthetic construct
  source 1..20: mol_type = other DNA
ttggtgctagccgtctgcgg

SEQ ID NO: 2029 - DNA, 20 bp, synthetic construct
  source 1..20: mol_type = other DNA
agcgagtacaaagctagggg

SEQ ID NO: 2030 - DNA, 20 bp, synthetic construct
  source 1..20: mol_type = other DNA
attggtgctagccgtctgcg

SEQ ID NO: 2031 - DNA, 20 bp, synthetic construct
  source 1..20: mol_type = other DNA
aattggtgctagccgtctgc

SEQ ID NO: 2032 - DNA, 20 bp, synthetic construct
  source 1..20: mol_type = other DNA
gtctctccagctacggcaaa

SEQ ID NO: 2033 - DNA, 20 bp, synthetic construct
  source 1..20: mol_type = other DNA
cctagccacgcccaaaatgg

SEQ ID NO: 2034 - DNA, 20 bp, synthetic construct
  source 1..20: mol_type = other DNA
tggtgctagccgtctgcggg

SEQ ID NO: 2035 - DNA, 20 bp, synthetic construct
  source 1..20: mol_type = other DNA
gcggaaccctttgccgtagc

SEQ ID NO: 2036 - DNA, 20 bp, synthetic construct
  source 1..20: mol_type = other DNA
ggaagctgccatgttgagtg

SEQ ID NO: 2037 - DNA, 20 bp, synthetic construct
  source 1..20: mol_type = other DNA
ttcaccccgccccccgcaga

SEQ ID NO: 2038 - DNA, 20 bp, synthetic construct
  source 1..20: mol_type = other DNA
ggggcggggtgaagctgtga

SEQ ID NO: 2039 - DNA, 20 bp, synthetic construct
  source 1..20: mol_type = other DNA
ttcctcagccacactcaaca

SEQ ID NO: 2040 - DNA, 20 bp, synthetic construct
  source 1..20: mol_type = other DNA
ggggatcactgggacgcgaa

SEQ ID NO: 2041 - DNA, 20 bp, synthetic construct
  source 1..20: mol_type = other DNA
acccgagacagccggacccg

SEQ ID NO: 2042 - DNA, 20 bp, synthetic construct
  source 1..20: mol_type = other DNA
gacgccatccggttcccctg

SEQ ID NO: 2043 - DNA, 20 bp, synthetic construct
  source 1..20: mol_type = other DNA
tcccggccctggatgctgcg

SEQ ID NO: 2044 - DNA, 20 bp, synthetic construct
  source 1..20: mol_type = other DNA
cccgagacagccggacccgc

SEQ ID NO: 2045 - DNA, 20 bp, synthetic construct
  source 1..20: mol_type = other DNA
ttcgcgtcccagtgatcccc

SEQ ID NO: 2046 - DNA, 20 bp, synthetic construct
  source 1..20: mol_type = other DNA
gggtccggctgtctcgggtc

SEQ ID NO: 2047 - DNA, 20 bp, synthetic construct
  source 1..20: mol_type = other DNA
gggggatcactgggacgcga

SEQ ID NO: 2048 - DNA, 20 bp, synthetic construct
  source 1..20: mol_type = other DNA
ccggttcgccagggcagctg

SEQ ID NO: 2049 - DNA, 20 bp, synthetic construct
  source 1..20: mol_type = other DNA
tcggggcacggagactccgg

SEQ ID NO: 2050 - DNA, 20 bp, synthetic construct
  source 1..20: mol_type = other DNA
ccgcagcatccagggccggg

SEQ ID NO: 2051 - DNA, 20 bp, synthetic construct
  source 1..20: mol_type = other DNA
gggacgcgaagggcgcaggg

SEQ ID NO: 2052 - DNA, 20 bp, synthetic construct
  source 1..20: mol_type = other DNA
gcagccggacccgagacagc

SEQ ID NO: 2053 - DNA, 20 bp, synthetic construct
  source 1..20: mol_type = other DNA
cagggccgggaggcggcaga

SEQ ID NO: 2054 - DNA, 20 bp, synthetic construct
  source 1..20: mol_type = other DNA
gaggcggcagagggcgcccg

SEQ ID NO: 2055 - DNA, 20 bp, synthetic construct
  source 1..20: mol_type = other DNA
agggaagtatgagttcgtag

SEQ ID NO: 2056 - DNA, 20 bp, synthetic construct
  source 1..20: mol_type = other DNA
catctcaaagcatcagaagg

SEQ ID NO: 2057 - DNA, 20 bp, synthetic construct
  source 1..20: mol_type = other DNA
gatgctttgagatgtctctg

SEQ ID NO: 2058 - DNA, 20 bp, synthetic construct
  source 1..20: mol_type = other DNA
gagggaagtatgagttcgta

SEQ ID NO: 2059 - DNA, 20 bp, synthetic construct
  source 1..20: mol_type = other DNA
aacttcctgacaaaacccta

SEQ ID NO: 2060 - DNA, 20 bp, synthetic construct
  source 1..20: mol_type = other DNA
agacatctcaaagcatcaga

SEQ ID NO: 2061 - DNA, 20 bp, synthetic construct
  source 1..20: mol_type = other DNA
tcaaagcatcagaaggagga

SEQ ID NO: 2062 - DNA, 20 bp, synthetic construct
  source 1..20: mol_type = other DNA
ggggaatgtttggaaagctc

SEQ ID NO: 2063 - DNA, 20 bp, synthetic construct
  source 1..20: mol_type = other DNA
agagggaagtatgagttcgt

SEQ ID NO: 2064 - DNA, 20 bp, synthetic construct
  source 1..20: mol_type = other DNA
agaaggaggagggaaaaatg

SEQ ID NO: 2065 - DNA, 20 bp, synthetic construct
  source 1..20: mol_type = other DNA
aaaggctggggcagaggaca

SEQ ID NO: 2066 - DNA, 20 bp, synthetic construct
  source 1..20: mol_type = other DNA
ctcaaagcatcagaaggagg

SEQ ID NO: 2067 - DNA, 20 bp, synthetic construct
  source 1..20: mol_type = other DNA
gctggggcagaggacaggga

SEQ ID NO: 2068 - DNA, 20 bp, synthetic construct
  source 1..20: mol_type = other DNA
aaatggggactgagggattg

SEQ ID NO: 2069 - DNA, 20 bp, synthetic construct
  source 1..20: mol_type = other DNA
tggggcagaggacagggaag

SEQ ID NO: 2070 - DNA, 20 bp, synthetic construct
  source 1..20: mol_type = other DNA
gcgcgctcttcacttcttgg

SEQ ID NO: 2071 - DNA, 20 bp, synthetic construct
  source 1..20: mol_type = other DNA
gcccgctttgcatacgccgt

SEQ ID NO: 2072 - DNA, 20 bp, synthetic construct
  source 1..20: mol_type = other DNA
gcaccgtgcagagctggagt

SEQ ID NO: 2073 - DNA, 20 bp, synthetic construct
  source 1..20: mol_type = other DNA
cgcccacggcgtatgcaaag

SEQ ID NO: 2074 - DNA, 20 bp, synthetic construct
  source 1..20: mol_type = other DNA
gctccgactccagctctgca

SEQ ID NO: 2075 - DNA, 20 bp, synthetic construct
  source 1..20: mol_type = other DNA
cccaagaagtgaagagcgcg

SEQ ID NO: 2076 - DNA, 20 bp, synthetic construct
  source 1..20: mol_type = other DNA
cacggcgtatgcaaagcggg

SEQ ID NO: 2077 - DNA, 20 bp, synthetic construct
  source 1..20: mol_type = other DNA
tgcatacgccgtgggcggag

SEQ ID NO: 2078 - DNA, 20 bp, synthetic construct
  source 1..20: mol_type = other DNA
gcgatccgcccccctcgctc

SEQ ID NO: 2079 - DNA, 20 bp, synthetic construct
  source 1..20: mol_type = other DNA
cgcccgctttgcatacgccg

SEQ ID NO: 2080 - DNA, 20 bp, synthetic construct
  source 1..20: mol_type = other DNA
gaagtgaagagcgcgcggcg

SEQ ID NO: 2081 - DNA, 20 bp, synthetic construct
  source 1..20: mol_type = other DNA
atacgccgtgggcggagcgg

SEQ ID NO: 2082 - DNA, 20 bp, synthetic construct
  source 1..20: mol_type = other DNA
gggccggggcccgagcgagg

SEQ ID NO: 2083 - DNA, 20 bp, synthetic construct
  source 1..20: mol_type = other DNA
tacgccgtgggcggagcggg

SEQ ID NO: 2084 - DNA, 20 bp, synthetic construct
  source 1..20: mol_type = other DNA
cggcccccccgctccgccca

SEQ ID NO: 2085 - DNA, 20 bp, synthetic construct
  source 1..20: mol_type = other DNA
ggcgactcgtagagagttcg

SEQ ID NO: 2086 - DNA, 20 bp, synthetic construct
  source 1..20: mol_type = other DNA
aactctctacgagtcgccac

SEQ ID NO: 2087 - DNA, 20 bp, synthetic construct
  source 1..20: mol_type = other DNA
gcagcgtgatttgtccccag

SEQ ID NO: 2088 - DNA, 20 bp, synthetic construct
  source 1..20: mol_type = other DNA
ggcccacagaaggttctaag

SEQ ID NO: 2089 - DNA, 20 bp, synthetic construct
  source 1..20: mol_type = other DNA
ctctctacgagtcgccactg

SEQ ID NO: 2090 - DNA, 20 bp, synthetic construct
  source 1..20: mol_type = other DNA
agtaaactgtaaacgacagt

SEQ ID NO: 2091 - DNA, 20 bp, synthetic construct
  source 1..20: mol_type = other DNA
cacaaggccaatcaggagag

SEQ ID NO: 2092 - DNA, 20 bp, synthetic construct
  source 1..20: mol_type = other DNA
cgctgcagaaaatttgtggg

SEQ ID NO: 2093 - DNA, 20 bp, synthetic construct
  source 1..20: mol_type = other DNA
gccaagcacgctcgagcgcg

SEQ ID NO: 2094 - DNA, 20 bp, synthetic construct
  source 1..20: mol_type = other DNA
aacgacagtaggcccacaga

SEQ ID NO: 2095 - DNA, 20 bp, synthetic construct
  source 1..20: mol_type = other DNA
acgctcgagcgcgcggcaca

SEQ ID NO: 2096 - DNA, 20 bp, synthetic construct
  source 1..20: mol_type = other DNA
aggggagaggaagccagtgc

SEQ ID NO: 2097 - DNA, 20 bp, synthetic construct
  source 1..20: mol_type = other DNA
ggcacaaggccaatcaggag

SEQ ID NO: 2098 - DNA, 20 bp, synthetic construct
  source 1..20: mol_type = other DNA
gcacaaggccaatcaggaga

SEQ ID NO: 2099 - DNA, 20 bp, synthetic construct
  source 1..20: mol_type = other DNA
acagaaggttctaaggggag

SEQ ID NO: 2100 - DNA, 20 bp, synthetic construct
  source 1..20: mol_type = other DNA
acgacattaacccactgacc

SEQ ID NO: 2101 - DNA, 20 bp, synthetic construct
  source 1..20: mol_type = other DNA
gggaggggccactggcaagg

SEQ ID NO: 2102 - DNA, 20 bp, synthetic construct
  source 1..20: mol_type = other DNA
ttaccacgctccctggtcag

SEQ ID NO: 2103 - DNA, 20 bp, synthetic construct
  source 1..20: mol_type = other DNA
gccgaccccacctttccgcg

SEQ ID NO: 2104 - DNA, 20 bp, synthetic construct
  source 1..20: mol_type = other DNA
tgggttaatgtcgtcaggcg

SEQ ID NO: 2105 - DNA, 20 bp, synthetic construct
  source 1..20: mol_type = other DNA
cgacattaacccactgacca

SEQ ID NO: 2106 - DNA, 20 bp, synthetic construct
  source 1..20: mol_type = other DNA
cggagccgcgcggaaaggtg

SEQ ID NO: 2107 - DNA, 20 bp, synthetic construct
  source 1..20: mol_type = other DNA
caggctcgctaacagccggg

SEQ ID NO: 2108 - DNA, 20 bp, synthetic construct
  source 1..20: mol_type = other DNA
gggccaggctcgctaacagc

SEQ ID NO: 2109 - DNA, 20 bp, synthetic construct
  source 1..20: mol_type = other DNA
agtgggttaatgtcgtcagg

SEQ ID NO: 2110 - DNA, 20 bp, synthetic construct
  source 1..20: mol_type = other DNA
ctggagtcgggacctgcgcg

SEQ ID NO: 2111 - DNA, 20 bp, synthetic construct
  source 1..20: mol_type = other DNA
gcggagccgcgcggaaaggt

SEQ ID NO: 2112 - DNA, 20 bp, synthetic construct
  source 1..20: mol_type = other DNA
ggcggagccgcgcggaaagg

SEQ ID NO: 2113 - DNA, 20 bp, synthetic construct
  source 1..20: mol_type = other DNA
cgggcggggtcccttccccc

SEQ ID NO: 2114 - DNA, 20 bp, synthetic construct
  source 1..20: mol_type = other DNA
gccgcgcggaaaggtggggt

SEQ ID NO: 2115 - DNA, 20 bp, synthetic construct
  source 1..20: mol_type = other DNA
ggcgcccggaccgtcgattg

SEQ ID NO: 2116 - DNA, 20 bp, synthetic construct
  source 1..20: mol_type = other DNA
cgggacgggcccgcaatcga

SEQ ID NO: 2117 - DNA, 20 bp, synthetic construct
  source 1..20: mol_type = other DNA
ggggctgccctgcccaggtg

SEQ ID NO: 2118 - DNA, 20 bp, synthetic construct
  source 1..20: mol_type = other DNA
gggcccgcaatcgacggtcc

SEQ ID NO: 2119 - DNA, 20 bp, synthetic construct
  source 1..20: mol_type = other DNA
aggtccccgggctggagctg

SEQ ID NO: 2120 - DNA, 20 bp, synthetic construct
  source 1..20: mol_type = other DNA
gcgagctggcagcggggagt

SEQ ID NO: 2121 - DNA, 20 bp, synthetic construct
  source 1..20: mol_type = other DNA
tggggcgcgagctggcagcg

SEQ ID NO: 2122 - DNA, 20 bp, synthetic construct
  source 1..20: mol_type = other DNA
gctggggcgcgagctggcag

SEQ ID NO: 2123 - DNA, 20 bp, synthetic construct
  source 1..20: mol_type = other DNA
ccctggcggcgcgcccgtcg

SEQ ID NO: 2124 - DNA, 20 bp, synthetic construct
  source 1..20: mol_type = other DNA
gggcgctgcagttcccggga

SEQ ID NO: 2125 - DNA, 20 bp, synthetic construct
  source 1..20: mol_type = other DNA
actgcagcgccctccccacc

SEQ ID NO: 2126 - DNA, 20 bp, synthetic construct
  source 1..20: mol_type = other DNA
cgggcgcgccgccagggctg

SEQ ID NO: 2127 - DNA, 20 bp, synthetic construct
  source 1..20: mol_type = other DNA
gcgccctccccacctgggca

SEQ ID NO: 2128 - DNA, 20 bp, synthetic construct
  source 1..20: mol_type = other DNA
cgcgccccagctccagcccg

SEQ ID NO: 2129 - DNA, 20 bp, synthetic construct
  source 1..20: mol_type = other DNA
gctgccctgcccaggtgggg

SEQ ID NO: 2130 - DNA, 20 bp, synthetic construct
  source 1..20: mol_type = other DNA
gtaagcgaccagatttccgg

SEQ ID NO: 2131 - DNA, 20 bp, synthetic construct
  source 1..20: mol_type = other DNA
ccagcaagacccgcgcagca

SEQ ID NO: 2132 - DNA, 20 bp, synthetic construct
  source 1..20: mol_type = other DNA
cgtaagcgaccagatttccg

SEQ ID NO: 2133 - DNA, 20 bp, synthetic construct
  source 1..20: mol_type = other DNA
ggcgattgcgcattccgtcg

SEQ ID NO: 2134 - DNA, 20 bp, synthetic construct
  source 1..20: mol_type = other DNA
gggattggtagtccagactg

SEQ ID NO: 2135 - DNA, 20 bp, synthetic construct
  source 1..20: mol_type = other DNA
tacttcacagagcgaagtgc

SEQ ID NO: 2136 - DNA, 20 bp, synthetic construct
  source 1..20: mol_type = other DNA
tcccataatgctctccgcga

SEQ ID NO: 2137 - DNA, 20 bp, synthetic construct
  source 1..20: mol_type = other DNA
ccagactgaggcgcagatag

SEQ ID NO: 2138 - DNA, 20 bp, synthetic construct
  source 1..20: mol_type = other DNA
gcgacggaatgcgcaatcgc

SEQ ID NO: 2139 - DNA, 20 bp, synthetic construct
  source 1..20: mol_type = other DNA
gaagtgccggagcccgtcgc

SEQ ID NO: 2140 - DNA, 20 bp, synthetic construct
  source 1..20: mol_type = other DNA
aatgtagttctgtggcttcg

SEQ ID NO: 2141 - DNA, 20 bp, synthetic construct
  source 1..20: mol_type = other DNA
agtctgcgtgccctgctgcg

SEQ ID NO: 2142 - DNA, 20 bp, synthetic construct
  source 1..20: mol_type = other DNA
tccagactgaggcgcagata

SEQ ID NO: 2143 - DNA, 20 bp, synthetic construct
  source 1..20: mol_type = other DNA
tgctgggaaatgtagttctg

SEQ ID NO: 2144 - DNA, 20 bp, synthetic construct
  source 1..20: mol_type = other DNA
cgcggagagcattatgggat

SEQ ID NO: 2145 - DNA, 20 bp, synthetic construct
  source 1..20: mol_type = other DNA
cagcggcctcgattatgcag

SEQ ID NO: 2146 - DNA, 20 bp, synthetic construct
  source 1..20: mol_type = other DNA
tcagcggcctcgattatgca

SEQ ID NO: 2147 - DNA, 20 bp, synthetic construct
  source 1..20: mol_type = other DNA
gctgcagagtcccacccgag

SEQ ID NO: 2148 - DNA, 20 bp, synthetic construct
  source 1..20: mol_type = other DNA
attgtgtgctagccattcag

SEQ ID NO: 2149 - DNA, 20 bp, synthetic construct
  source 1..20: mol_type = other DNA
ctgcagagtcccacccgaga

SEQ ID NO: 2150 - DNA, 20 bp, synthetic construct
  source 1..20: mol_type = other DNA
gcataatcgaggccgctgaa

SEQ ID NO: 2151 - DNA, 20 bp, synthetic construct
  source 1..20: mol_type = other DNA
tccatgtgaccctctcgggt

SEQ ID NO: 2152 - DNA, 20 bp, synthetic construct
  source 1..20: mol_type = other DNA
ctgaggattaatggtcccgc

SEQ ID NO: 2153 - DNA, 20 bp, synthetic construct
  source 1..20: mol_type = other DNA
ctcagccccctgcataatcg

SEQ ID NO: 2154 - DNA, 20 bp, synthetic construct
  source 1..20: mol_type = other DNA
gcactggtgaatcaaaggtc

SEQ ID NO: 2155 - DNA, 20 bp, synthetic construct
  source 1..20: mol_type = other DNA
gctgaatggctagcacacaa

SEQ ID NO: 2156 - DNA, 20 bp, synthetic construct
  source 1..20: mol_type = other DNA
aaaaggcactggtgaatcaa

SEQ ID NO: 2157 - DNA, 20 bp, synthetic construct
  source 1..20: mol_type = other DNA
ctggtgaatcaaaggtccgg

SEQ ID NO: 2158 - DNA, 20 bp, synthetic construct
  source 1..20: mol_type = other DNA
agcggcctcgattatgcagg

SEQ ID NO: 2159 - DNA, 20 bp, synthetic construct
  source 1..20: mol_type = other DNA
tggctagcacacaatggtcc

SEQ ID NO: 2160 - DNA, 20 bp, synthetic construct
  source 1..20: mol_type = other DNA
cggcagctcctgactcatcg

SEQ ID NO: 2161 - DNA, 20 bp, synthetic construct
  source 1..20: mol_type = other DNA
ggcagctcctgactcatcgg

SEQ ID NO: 2162 - DNA, 20 bp, synthetic construct
  source 1..20: mol_type = other DNA
gtgcgctggggccaggtcgt

SEQ ID NO: 2163 - DNA, 20 bp, synthetic construct
  source 1..20: mol_type = other DNA
cggaggcgcacgtacgagcg

SEQ ID NO: 2164 - DNA, 20 bp, synthetic construct
  source 1..20: mol_type = other DNA
ccgcgcgggcgcatgtgacc

SEQ ID NO: 2165 - DNA, 20 bp, synthetic construct
  source 1..20: mol_type = other DNA
ggaccgacgagggtggagtg

SEQ ID NO: 2166 - DNA, 20 bp, synthetic construct
  source 1..20: mol_type = other DNA
gctcgtacgtgcgcctccgc

SEQ ID NO: 2167 - DNA, 20 bp, synthetic construct
  source 1..20: mol_type = other DNA
ggaggcgcacgtacgagcgc

SEQ ID NO: 2168 - DNA, 20 bp, synthetic construct
  source 1..20: mol_type = other DNA
gaggcgcctatagggccgcg

SEQ ID NO: 2169 - DNA, 20 bp, synthetic construct
  source 1..20: mol_type = other DNA
gatgagtcaggagctgccgg

SEQ ID NO: 2170 - DNA, 20 bp, synthetic construct
  source 1..20: mol_type = other DNA
gagtcaggagctgccggcgg

SEQ ID NO: 2171 - DNA, 20 bp, synthetic construct
  source 1..20: mol_type = other DNA
cggcggctgcggctcccggg

SEQ ID NO: 2172 - DNA, 20 bp, synthetic construct
  source 1..20: mol_type = other DNA
cccgatgagtcaggagctgc

SEQ ID NO: 2173 - DNA, 20 bp, synthetic construct
  source 1..20: mol_type = other DNA
gcacgtacgagcgcgggtgg

SEQ ID NO: 2174 - DNA, 20 bp, synthetic construct
  source 1..20: mol_type = other DNA
gcgcgggtgggggaccgacg

SEQ ID NO: 2175 - DNA, 20 bp, synthetic construct
  source 1..20: mol_type = other DNA
gggagggccatacatgatcg

SEQ ID NO: 2176 - DNA, 20 bp, synthetic construct
  source 1..20: mol_type = other DNA
atgagtgtgcccctatacta

SEQ ID NO: 2177 - DNA, 20 bp, synthetic construct
  source 1..20: mol_type = other DNA
atcagcaatccttagtatag

SEQ ID NO: 2178 - DNA, 20 bp, synthetic construct
  source 1..20: mol_type = other DNA
aaccttaataaaactcactg

SEQ ID NO: 2179 - DNA, 20 bp, synthetic construct
  source 1..20: mol_type = other DNA
aggctcaaggcaattgtctg

SEQ ID NO: 2180 - DNA, 20 bp, synthetic construct
  source 1..20: mol_type = other DNA
ttgctgatggcttagggcgg

SEQ ID NO: 2181 - DNA, 20 bp, synthetic construct
  source 1..20: mol_type = other DNA
aggcaattgtctgtggaaag

SEQ ID NO: 2182 - DNA, 20 bp, synthetic construct
  source 1..20: mol_type = other DNA
taaggattgctgatggctta

SEQ ID NO: 2183 - DNA, 20 bp, synthetic construct
  source 1..20: mol_type = other DNA
ccatcagcaatccttagtat

SEQ ID NO: 2184 - DNA, 20 bp, synthetic construct
  source 1..20: mol_type = other DNA
ggattgctgatggcttaggg

SEQ ID NO: 2185 - DNA, 20 bp, synthetic construct
  source 1..20: mol_type = other DNA
atccaagccaagctggaagc

SEQ ID NO: 2186 - DNA, 20 bp, synthetic construct
  source 1..20: mol_type = other DNA
catcagcaatccttagtata

SEQ ID NO: 2187 - DNA, 20 bp, synthetic construct
  source 1..20: mol_type = other DNA
ctaaggattgctgatggctt

SEQ ID NO: 2188 - DNA, 20 bp, synthetic construct
  source 1..20: mol_type = other DNA
cctatactaaggattgctga

SEQ ID NO: 2189 - DNA, 20 bp, synthetic construct
  source 1..20: mol_type = other DNA
ctttcacaagatgacttgac

SEQ ID NO: 2190 - DNA, 20 bp, synthetic construct
  source 1..20: mol_type = other DNA
atatcaagaacgcttcacag

SEQ ID NO: 2191 - DNA, 20 bp, synthetic construct
  source 1..20: mol_type = other DNA
atggccctaataacatggag

SEQ ID NO: 2192 - DNA, 20 bp, synthetic construct
  source 1..20: mol_type = other DNA
ccggcgaaaatggcaagcga

SEQ ID NO: 2193 - DNA, 20 bp, synthetic construct
  source 1..20: mol_type = other DNA
ttggtatggccctaataaca

SEQ ID NO: 2194 - DNA, 20 bp, synthetic construct
  source 1..20: mol_type = other DNA
gcgctgccccgagactgggt

SEQ ID NO: 2195 - DNA, 20 bp, synthetic construct
  source 1..20: mol_type = other DNA
gttattagggccataccaag

SEQ ID NO: 2196 - DNA, 20 bp, synthetic construct
  source 1..20: mol_type = other DNA
gactttccctgacacgtgta

SEQ ID NO: 2197 - DNA, 20 bp, synthetic construct
  source 1..20: mol_type = other DNA
tagggccataccaagaggag

SEQ ID NO: 2198 - DNA, 20 bp, synthetic construct
  source 1..20: mol_type = other DNA
aatgcctgacagaaggaaga

SEQ ID NO: 2199 - DNA, 20 bp, synthetic construct
  source 1..20: mol_type = other DNA
tccctccccacccagtctcg

SEQ ID NO: 2200 - DNA, 20 bp, synthetic construct
  source 1..20: mol_type = other DNA
ggcgctgccccgagactggg

SEQ ID NO: 2201 - DNA, 20 bp, synthetic construct
  source 1..20: mol_type = other DNA
accggcgaaaatggcaagcg

SEQ ID NO: 2202 - DNA, 20 bp, synthetic construct
  source 1..20: mol_type = other DNA
gagggtcactgcgcagagtt

SEQ ID NO: 2203 - DNA, 20 bp, synthetic construct
  source 1..20: mol_type = other DNA
cgagggtcactgcgcagagt

SEQ ID NO: 2204 - DNA, 20 bp, synthetic construct
  source 1..20: mol_type = other DNA
gccccgagactgggtgggga

SEQ ID NO: 2205 - DNA, 20 bp, synthetic construct
  source 1..20: mol_type = other DNA
tctgcccgacccggctcgtg

SEQ ID NO: 2206 - DNA, 20 bp, synthetic construct
  source 1..20: mol_type = other DNA
gcgtccagcctccggcgctg

SEQ ID NO: 2207 - DNA, 20 bp, synthetic construct
  source 1..20: mol_type = other DNA
gcctccccggacccagccgc

SEQ ID NO: 2208 - DNA, 20 bp, synthetic construct
  source 1..20: mol_type = other DNA
gctcgtgcggaccccaggac

SEQ ID NO: 2209 - DNA, 20 bp, synthetic construct
  source 1..20: mol_type = other DNA
gcgtcccgcgcccggtcctg

SEQ ID NO: 2210 - DNA, 20 bp, synthetic construct
  source 1..20: mol_type = other DNA
acccggctcgtgcggacccc

SEQ ID NO: 2211 - DNA, 20 bp, synthetic construct
  source 1..20: mol_type = other DNA
ggtgtggcgccggcgtcctg

SEQ ID NO: 2212 - DNA, 20 bp, synthetic construct
  source 1..20: mol_type = other DNA
ggggtccgcacgagccgggt

SEQ ID NO: 2213 - DNA, 20 bp, synthetic construct
  source 1..20: mol_type = other DNA
tccggcgctgcggagacccg

SEQ ID NO: 2214 - DNA, 20 bp, synthetic construct
  source 1..20: mol_type = other DNA
ggcctccccggacccagccg

SEQ ID NO: 2215 - DNA, 20 bp, synthetic construct
  source 1..20: mol_type = other DNA
gcgggtctccgcagcgccgg

SEQ ID NO: 2216 - DNA, 20 bp, synthetic construct
  source 1..20: mol_type = other DNA
ggagcagcctctgcccgacc

SEQ ID NO: 2217 - DNA, 20 bp, synthetic construct
  source 1..20: mol_type = other DNA
gtggcgccggcgtcctgggg

SEQ ID NO: 2218 - DNA, 20 bp, synthetic construct
  source 1..20: mol_type = other DNA
agaggctgctcctcctcccc

SEQ ID NO: 2219 - DNA, 20 bp, synthetic construct
  source 1..20: mol_type = other DNA
ctcgtgcggaccccaggacc

SEQ ID NO: 2220 - DNA, 20 bp, synthetic construct
  source 1..20: mol_type = other DNA
cttcctggatactcataacg

SEQ ID NO: 2221 - DNA, 20 bp, synthetic construct
  source 1..20: mol_type = other DNA
tgcgtgggactttagaacct

SEQ ID NO: 2222 - DNA, 20 bp, synthetic construct
  source 1..20: mol_type = other DNA
actttagaacctgggaactg

SEQ ID NO: 2223 - DNA, 20 bp, synthetic construct
  source 1..20: mol_type = other DNA
caggaagaaggacctgacac

SEQ ID NO: 2224 - DNA, 20 bp, synthetic construct
  source 1..20: mol_type = other DNA
gggagagaaagagaaactct

SEQ ID NO: 2225 - DNA, 20 bp, synthetic construct
  source 1..20: mol_type = other DNA
tcagtgtcgccgcagttccc

SEQ ID NO: 2226 - DNA, 20 bp, synthetic construct
  source 1..20: mol_type = other DNA
aagaaggacctgacacgggt

SEQ ID NO: 2227 - DNA, 20 bp, synthetic construct
  source 1..20: mol_type = other DNA
agagaaactctggggagatg

SEQ ID NO: 2228 - DNA, 20 bp, synthetic construct
  source 1..20: mol_type = other DNA
ggagagaaagagaaactctg

SEQ ID NO: 2229 - DNA, 20 bp, synthetic construct
  source 1..20: mol_type = other DNA
gggccgcgttatgagtatcc

SEQ ID NO: 2230 - DNA, 20 bp, synthetic construct
  source 1..20: mol_type = other DNA
cccaatgggagtgagaaatg

SEQ ID NO: 2231 - DNA, 20 bp, synthetic construct
  source 1..20: mol_type = other DNA
gttatgagtatccaggaaga

SEQ ID NO: 2232 - DNA, 20 bp, synthetic construct
  source 1..20: mol_type = other DNA
tgggagagaaagagaaactc

SEQ ID NO: 2233 - DNA, 20 bp, synthetic construct
  source 1..20: mol_type = other DNA
ccaggaagaaggacctgaca

SEQ ID NO: 2234 - DNA, 20 bp, synthetic construct
  source 1..20: mol_type = other DNA
agaaggacctgacacgggtt

SEQ ID NO: 2235 - DNA, 20 bp, synthetic construct
  source 1..20: mol_type = other DNA
cggaagctccacctccccag

SEQ ID NO: 2236 - DNA, 20 bp, synthetic construct
  source 1..20: mol_type = other DNA
tgaaacccgacacctcccgc

SEQ ID NO: 2237 - DNA, 20 bp, synthetic construct
  source 1..20: mol_type = other DNA
gcgtttgggtgtgtcctcgg

SEQ ID NO: 2238 - DNA, 20 bp, synthetic construct
  source 1..20: mol_type = other DNA
ccgacacctcccgctggctg

SEQ ID NO: 2239 - DNA, 20 bp, synthetic construct
  source 1..20: mol_type = other DNA
cgggagcgagccagtggccc

SEQ ID NO: 2240 - DNA, 20 bp, synthetic construct
  source 1..20: mol_type = other DNA
ccctgacctcagccagcggg

SEQ ID NO: 2241 - DNA, 20 bp, synthetic construct
  source 1..20: mol_type = other DNA
gggagccgggagcgagccag

SEQ ID NO: 2242 - DNA, 20 bp, synthetic construct
  source 1..20: mol_type = other DNA
gttgcgtttgggtgtgtcct

SEQ ID NO: 2243 - DNA, 20 bp, synthetic construct
  source 1..20: mol_type = other DNA
ggctccctgacctcagccag

SEQ ID NO: 2244 - DNA, 20 bp, synthetic construct
  source 1..20: mol_type = other DNA
acgcaacgccgcccactccc

SEQ ID NO: 2245 - DNA, 20 bp, synthetic construct
  source 1..20: mol_type = other DNA
gcggcagctcgggcccgctg

SEQ ID NO: 2246 - DNA, 20 bp, synthetic construct
  source 1..20: mol_type = other DNA
cacccggggctgctcggcgg

SEQ ID NO: 2247 - DNA, 20 bp, synthetic construct
  source 1..20: mol_type = other DNA
gccagtggcccgggagtggg

SEQ ID NO: 2248 - DNA, 20 bp, synthetic construct
  source 1..20: mol_type = other DNA
gcagctcgggcccgctgggg

SEQ ID NO: 2249 - DNA, 20 bp, synthetic construct
  source 1..20: mol_type = other DNA
acctgctgctgtcgccgccg

SEQ ID NO: 2250 - DNA, 20 bp, synthetic construct
  source 1..20: mol_type = other DNA
agcctgggtgccctcccacg

SEQ ID NO: 2251 - DNA, 20 bp, synthetic construct
  source 1..20: mol_type = other DNA
ggcaggcgcctgagccaagg

SEQ ID NO: 2252 - DNA, 20 bp, synthetic construct
  source 1..20: mol_type = other DNA
gcccggcaggcaagtcccag

SEQ ID NO: 2253 - DNA, 20 bp, synthetic construct
  source 1..20: mol_type = other DNA
gcaggcgcctgagccaaggg

SEQ ID NO: 2254 - DNA, 20 bp, synthetic construct
  source 1..20: mol_type = other DNA
cccggcaggcaagtcccagt

SEQ ID NO: 2255 - DNA, 20 bp, synthetic construct
  source 1..20: mol_type = other DNA
aggcaggcgcctgagccaag

SEQ ID NO: 2256 - DNA, 20 bp, synthetic construct
  source 1..20: mol_type = other DNA
gcgcacgccccccttggctc

SEQ ID NO: 2257 - DNA, 20 bp, synthetic construct
  source 1..20: mol_type = other DNA
tgacgcgctgcgggagtctg

SEQ ID NO: 2258 - DNA, 20 bp, synthetic construct
  source 1..20: mol_type = other DNA
gaggcaggcgcctgagccaa

SEQ ID NO: 2259 - DNA, 20 bp, synthetic construct
  source 1..20: mol_type = other DNA
tccgcgggcctctgccgcgt

SEQ ID NO: 2260 - DNA, 20 bp, synthetic construct
  source 1..20: mol_type = other DNA
tgattggcccgcgcctgccg

SEQ ID NO: 2261 - DNA, 20 bp, synthetic construct
  source 1..20: mol_type = other DNA
ggtgccctcccacgcggcag

SEQ ID NO: 2262 - DNA, 20 bp, synthetic construct
  source 1..20: mol_type = other DNA
ggaggcaggcgcctgagcca

SEQ ID NO: 2263 - DNA, 20 bp, synthetic construct
  source 1..20: mol_type = other DNA
gacttgcctgccgggccggg

SEQ ID NO: 2264 - DNA, 20 bp, synthetic construct
  source 1..20: mol_type = other DNA
ggcgtgggcggtgagctgcg

SEQ ID NO: 2265 - DNA, 20 bp, synthetic construct
  source 1..20: mol_type = other DNA
tggcgacgggaggtctggtg

SEQ ID NO: 2266 - DNA, 20 bp, synthetic construct
  source 1..20: mol_type = other DNA
cagtcggagggcagttgctg

SEQ ID NO: 2267 - DNA, 20 bp, synthetic construct
  source 1..20: mol_type = other DNA
caccagacctcccgtcgcca

SEQ ID NO: 2268 - DNA, 20 bp, synthetic construct
  source 1..20: mol_type = other DNA
atggcgacgggaggtctggt

SEQ ID NO: 2269 - DNA, 20 bp, synthetic construct
  source 1..20: mol_type = other DNA
gtcgccatggagatgcccaa

SEQ ID NO: 2270 - DNA, 20 bp, synthetic construct
  source 1..20: mol_type = other DNA
gagatgcccaaagggcaagg

SEQ ID NO: 2271 - DNA, 20 bp, synthetic construct
  source 1..20: mol_type = other DNA
tactaaggtaacagtaaggt

SEQ ID NO: 2272 - DNA, 20 bp, synthetic construct
  source 1..20: mol_type = other DNA
agggcaaggtggagagctgg

SEQ ID NO: 2273 - DNA, 20 bp, synthetic construct
  source 1..20: mol_type = other DNA
tcgccatggagatgcccaaa

SEQ ID NO: 2274 - DNA, 20 bp, synthetic construct
  source 1..20: mol_type = other DNA
atggagatgcccaaagggca

SEQ ID NO: 2275 - DNA, 20 bp, synthetic construct
  source 1..20: mol_type = other DNA
accgacgcaggcgcagcctg

SEQ ID NO: 2276 - DNA, 20 bp, synthetic construct
  source 1..20: mol_type = other DNA
ggcatctccatggcgacggg

SEQ ID NO: 2277 - DNA, 20 bp, synthetic construct
  source 1..20: mol_type = other DNA
catggcgacgggaggtctgg

SEQ ID NO: 2278 - DNA, 20 bp, synthetic construct
  source 1..20: mol_type = other DNA
tttgggcatctccatggcga

SEQ ID NO: 2279 - DNA, 20 bp, synthetic construct
  source 1..20: mol_type = other DNA
caaagggcaaggtggagagc

SEQ ID NO: 2280 - DNA, 20 bp, synthetic construct
  source 1..20: mol_type = other DNA
ggcgtggccttggccatgag

SEQ ID NO: 2281 - DNA, 20 bp, synthetic construct
  source 1..20: mol_type = other DNA
tgtggccggaagccttaaag

SEQ ID NO: 2282 - DNA, 20 bp, synthetic construct
  source 1..20: mol_type = other DNA
tggagcaggcggctcgggca

SEQ ID NO: 2283 - DNA, 20 bp, synthetic construct
  source 1..20: mol_type = other DNA
gcaggtggagcaggcggctc

SEQ ID NO: 2284 - DNA, 20 bp, synthetic construct
  source 1..20: mol_type = other DNA
cccgccggcctcagcagcgc

SEQ ID NO: 2285 - DNA, 20 bp, synthetic construct
  source 1..20: mol_type = other DNA
ccgcgctgctgaggccggcg

SEQ ID NO: 2286 - DNA, 20 bp, synthetic construct
  source 1..20: mol_type = other DNA
cggagctgcccgcgctgctg

SEQ ID NO: 2287 - DNA, 20 bp, synthetic construct
  source 1..20: mol_type = other DNA
ggcgcagcaggtggagcagg

SEQ ID NO: 2288 - DNA, 20 bp, synthetic construct
  source 1..20: mol_type = other DNA
tccgggcacccgggcgccgg

SEQ ID NO: 2289 - DNA, 20 bp, synthetic construct
  source 1..20: mol_type = other DNA
gcccgcgctgctgaggccgg

SEQ ID NO: 2290 - DNA, 20 bp, synthetic construct
  source 1..20: mol_type = other DNA
ggagcaggcggctcgggcag

SEQ ID NO: 2291 - DNA, 20 bp, synthetic construct
  source 1..20: mol_type = other DNA
gcgggcagctccgggcaccc

SEQ ID NO: 2292 - DNA, 20 bp, synthetic construct
  source 1..20: mol_type = other DNA
gcggggcgcggcgcagcagg

SEQ ID NO: 2293 - DNA, 20 bp, synthetic construct
  source 1..20: mol_type = other DNA
tcagcagcgcgggcagctcc

SEQ ID NO: 2294 - DNA, 20 bp, synthetic construct
  source 1..20: mol_type = other DNA
cgcggcgcagcaggtggagc

SEQ ID NO: 2295 - DNA, 20 bp, synthetic construct
  source 1..20: mol_type = other DNA
agtagttcgtcgctccctag

SEQ ID NO: 2296 - DNA, 20 bp, synthetic construct
  source 1..20: mol_type = other DNA
tcgctccctagcggccgaag

SEQ ID NO: 2297 - DNA, 20 bp, synthetic construct
  source 1..20: mol_type = other DNA
ctgtcgcgagagttggtccg

SEQ ID NO: 2298 - DNA, 20 bp, synthetic construct
  source 1..20: mol_type = other DNA
cagcaccgcgaaggctcacg

SEQ ID NO: 2299 - DNA, 20 bp, synthetic construct
  source 1..20: mol_type = other DNA
gccgaaggggcgggctcgcg

SEQ ID NO: 2300 - DNA, 20 bp, synthetic construct
  source 1..20: mol_type = other DNA
atgagcagccagcaccgcga

SEQ ID NO: 2301 - DNA, 20 bp, synthetic construct
  source 1..20: mol_type = other DNA
gagagttggtccgcggacgc

SEQ ID NO: 2302 - DNA, 20 bp, synthetic construct
  source 1..20: mol_type = other DNA
cgaactacttccggcgtccg

SEQ ID NO: 2303 - DNA, 20 bp, synthetic construct
  source 1..20: mol_type = other DNA
cgcgacagccagctcaaagc

SEQ ID NO: 2304 - DNA, 20 bp, synthetic construct
  source 1..20: mol_type = other DNA
ggttcttgcctgctttgagc

SEQ ID NO: 2305 - DNA, 20 bp, synthetic construct
  source 1..20: mol_type = other DNA
aagcaggcaagaaccggaag

SEQ ID NO: 2306 - DNA, 20 bp, synthetic construct
  source 1..20: mol_type = other DNA
caaagcaggcaagaaccgga

SEQ ID NO: 2307 - DNA, 20 bp, synthetic construct
  source 1..20: mol_type = other DNA
aaagcaggcaagaaccggaa

SEQ ID NO: 2308 - DNA, 20 bp, synthetic construct
  source 1..20: mol_type = other DNA
acgttccccgtgagccttcg

SEQ ID NO: 2309 - DNA, 20 bp, synthetic construct
  source 1..20: mol_type = other DNA
gagctggctgtcgcgagagt

SEQ ID NO: 2310 - DNA, 20 bp, synthetic construct
  source 1..20: mol_type = other DNA
gtctcgagctcagtcaaacc

SEQ ID NO: 2311 - DNA, 20 bp, synthetic construct
  source 1..20: mol_type = other DNA
gtttgactgagctcgagact

SEQ ID NO: 2312 - DNA, 20 bp, synthetic construct
  source 1..20: mol_type = other DNA
agattcaacggtgcatgtct

SEQ ID NO: 2313 - DNA, 20 bp, synthetic construct
  source 1..20: mol_type = other DNA
actgacattctcatctcccc

SEQ ID NO: 2314 - DNA, 20 bp, synthetic construct
  source 1..20: mol_type = other DNA
ttgaaggttacggctgcagg

SEQ ID NO: 2315 - DNA, 20 bp, synthetic construct
  source 1..20: mol_type = other DNA
gtgcatgtctgggagatccc

SEQ ID NO: 2316 - DNA, 20 bp, synthetic construct
  source 1..20: mol_type = other DNA
ggcctgcagaaaaggcatcc

SEQ ID NO: 2317 - DNA, 20 bp, synthetic construct
  source 1..20: mol_type = other DNA
gttgaatctgctgttcacct

SEQ ID NO: 2318 - DNA, 20 bp, synthetic construct
  source 1..20: mol_type = other DNA
aggcacagtattgaaggtta

SEQ ID NO: 2319 - DNA, 20 bp, synthetic construct
  source 1..20: mol_type = other DNA
atgagaatgtcagtgagcgc

SEQ ID NO: 2320 - DNA, 20 bp, synthetic construct
  source 1..20: mol_type = other DNA
caggtgaacagcagattcaa

SEQ ID NO: 2321 - DNA, 20 bp, synthetic construct
  source 1..20: mol_type = other DNA
gagactaggcacagtattga

SEQ ID NO: 2322 - DNA, 20 bp, synthetic construct
  source 1..20: mol_type = other DNA
attgaaggttacggctgcag

SEQ ID NO: 2323 - DNA, 20 bp, synthetic construct
  source 1..20: mol_type = other DNA
ttgaatctgctgttcacctg

SEQ ID NO: 2324 - DNA, 20 bp, synthetic construct
  source 1..20: mol_type = other DNA
tctgcctgcagatgtggaaa

SEQ ID NO: 2325 - DNA, 20 bp, synthetic construct
  source 1..20: mol_type = other DNA
tgccaggcaggccccgccga

SEQ ID NO: 2326 - DNA, 20 bp, synthetic construct
  source 1..20: mol_type = other DNA
ctgatctggaagcataaatg

SEQ ID NO: 2327 - DNA, 20 bp, synthetic construct
  source 1..20: mol_type = other DNA
gcgggggcatgtgttacacg

SEQ ID NO: 2328 - DNA, 20 bp, synthetic construct
  source 1..20: mol_type = other DNA
ccagtgctcagccctcggcg

SEQ ID NO: 2329 - DNA, 20 bp, synthetic construct
  source 1..20: mol_type = other DNA
cgggggcatgtgttacacgg

SEQ ID NO: 2330 - DNA, 20 bp, synthetic construct
  source 1..20: mol_type = other DNA
cccacacacagagggcatcg

SEQ ID NO: 2331 - DNA, 20 bp, synthetic construct
  source 1..20: mol_type = other DNA
gaagtggatgactcagaccc

SEQ ID NO: 2332 - DNA, 20 bp, synthetic construct
  source 1..20: mol_type = other DNA
gtcctcccatccagactcgg

SEQ ID NO: 2333 - DNA, 20 bp, synthetic construct
  source 1..20: mol_type = other DNA
acacacagagggcatcgggg

SEQ ID NO: 2334 - DNA, 20 bp, synthetic construct
  source 1..20: mol_type = other DNA
aagtggatgactcagaccca

SEQ ID NO: 2335 - DNA, 20 bp, synthetic construct
  source 1..20: mol_type = other DNA
tgggtcctcccatccagact

SEQ ID NO: 2336 - DNA, 20 bp, synthetic construct
  source 1..20: mol_type = other DNA
gccccacacacagagggcat

SEQ ID NO: 2337 - DNA, 20 bp, synthetic construct
  source 1..20: mol_type = other DNA
ttcctccgagtctggatggg

SEQ ID NO: 2338 - DNA, 20 bp, synthetic construct
  source 1..20: mol_type = other DNA
ccatccagactcggaggaag

SEQ ID NO: 2339 - DNA, 20 bp, synthetic construct
  source 1..20: mol_type = other DNA
agagggcatcggggtggcgg

SEQ ID NO: 2340 - DNA, 20 bp, synthetic construct
  source 1..20: mol_type = other DNA
gccccaggtgtccccgcagg

SEQ ID NO: 2341 - DNA, 20 bp, synthetic construct
  source 1..20: mol_type = other DNA
ccagcgcctcggcccgacgg

SEQ ID NO: 2342 - DNA, 20 bp, synthetic construct
  source 1..20: mol_type = other DNA
gctcccaccaggtcctccgt

SEQ ID NO: 2343 - DNA, 20 bp, synthetic construct
  source 1..20: mol_type = other DNA
ccaagtcacctcctcccgga

SEQ ID NO: 2344 - DNA, 20 bp, synthetic construct
  source 1..20: mol_type = other DNA
tccgcctgcggggacacctg

SEQ ID NO: 2345 - DNA, 20 bp, synthetic construct
  source 1..20: mol_type = other DNA
gtcgcgctgactcagagctc

SEQ ID NO: 2346 - DNA, 20 bp, synthetic construct
  source 1..20: mol_type = other DNA
gtccccgcaggcggaccctg

SEQ ID NO: 2347 - DNA, 20 bp, synthetic construct
  source 1..20: mol_type = other DNA
gagcccggcggccttccggg

SEQ ID NO: 2348 - DNA, 20 bp, synthetic construct
  source 1..20: mol_type = other DNA
acctcctcccggaaggccgc

SEQ ID NO: 2349 - DNA, 20 bp, synthetic construct
  source 1..20: mol_type = other DNA
ggtgacttgggccgggcagg

SEQ ID NO: 2350 - DNA, 20 bp, synthetic construct
  source 1..20: mol_type = other DNA
acttgggccgggcaggcggg

SEQ ID NO: 2351 - DNA, 20 bp, synthetic construct
  source 1..20: mol_type = other DNA
ctggggagaagggagcccgg

SEQ ID NO: 2352 - DNA, 20 bp, synthetic construct
  source 1..20: mol_type = other DNA
gccgggctcccttctcccca

SEQ ID NO: 2353 - DNA, 20 bp, synthetic construct
  source 1..20: mol_type = other DNA
cggcccaagtcacctcctcc

SEQ ID NO: 2354 - DNA, 20 bp, synthetic construct
  source 1..20: mol_type = other DNA
gcaggcggaccctggggaga

SEQ ID NO: 2355 - DNA, 20 bp, synthetic construct
  source 1..20: mol_type = other DNA
gccgcgcgcacccgaagccg

SEQ ID NO: 2356 - DNA, 20 bp, synthetic construct
  source 1..20: mol_type = other DNA
caggcgcgcctgacgtcagg

SEQ ID NO: 2357 - DNA, 20 bp, synthetic construct
  source 1..20: mol_type = other DNA
tttatgcaagaattcggccg

SEQ ID NO: 2358 - DNA, 20 bp, synthetic construct
  source 1..20: mol_type = other DNA
tgccaggcgcgcctgacgtc

SEQ ID NO: 2359 - DNA, 20 bp, synthetic construct
  source 1..20: mol_type = other DNA
gcgcgcctgacgtcaggtgg

SEQ ID NO: 2360 - DNA, 20 bp, synthetic construct
  source 1..20: mol_type = other DNA
gcgcgccgccacctgacgtc

SEQ ID NO: 2361 - DNA, 20 bp, synthetic construct
  source 1..20: mol_type = other DNA
cgcgcgcacccgaagccgcg

SEQ ID NO: 2362 - DNA, 20 bp, synthetic construct
  source 1..20: mol_type = other DNA
gcccgccgccagctccctcc

SEQ ID NO: 2363 - DNA, 20 bp, synthetic construct
  source 1..20: mol_type = other DNA
agaggccgagagaaaagggg

SEQ ID NO: 2364 - DNA, 20 bp, synthetic construct
  source 1..20: mol_type = other DNA
gacgtcaggtggcggcgcgc

SEQ ID NO: 2365 - DNA, 20 bp, synthetic construct
  source 1..20: mol_type = other DNA
gccggggtggcggaggccga

SEQ ID NO: 2366 - DNA, 20 bp, synthetic construct
  source 1..20: mol_type = other DNA
cgcggcccggagggagctgg

SEQ ID NO: 2367 - DNA, 20 bp, synthetic construct
  source 1..20: mol_type = other DNA
gggagaggccgagagaaaag

SEQ ID NO: 2368 - DNA, 20 bp, synthetic construct
  source 1..20: mol_type = other DNA
tccctcggcctccgccaccc

SEQ ID NO: 2369 - DNA, 20 bp, synthetic construct
  source 1..20: mol_type = other DNA
gcccggagggagctggcggc

SEQ ID NO: 2370 - DNA, 20 bp, synthetic construct
  source 1..20: mol_type = other DNA
tgtttcaatggaagaatctc

SEQ ID NO: 2371 - DNA, 20 bp, synthetic construct
  source 1..20: mol_type = other DNA
aaattgcaccagagaagtag

SEQ ID NO: 2372 - DNA, 20 bp, synthetic construct
  source 1..20: mol_type = other DNA
gcaaagatgggatgtttcaa

SEQ ID NO: 2373 - DNA, 20 bp, synthetic construct
  source 1..20: mol_type = other DNA
gagatatgacaagcaaagat

SEQ ID NO: 2374 - DNA, 20 bp, synthetic construct
  source 1..20: mol_type = other DNA
agagatatgacaagcaaaga

SEQ ID NO: 2375 - DNA, 20 bp, synthetic construct
  source 1..20: mol_type = other DNA
attggtcatagttaatgtat

SEQ ID NO: 2376 - DNA, 20 bp, synthetic construct
  source 1..20: mol_type = other DNA
tcttaattcctctacttctc

SEQ ID NO: 2377 - DNA, 20 bp, synthetic construct
  source 1..20: mol_type = other DNA
gtcatagttaatgtattgga

SEQ ID NO: 2378 - DNA, 20 bp, synthetic construct
  source 1..20: mol_type = other DNA
aagaatctcaggcagtaaaa

SEQ ID NO: 2379 - DNA, 20 bp, synthetic construct
  source 1..20: mol_type = other DNA
tttggatgcagcatactttg

SEQ ID NO: 2380 - DNA, 20 bp, synthetic construct
  source 1..20: mol_type = other DNA
tgcagtgctaacaaaagttc

SEQ ID NO: 2381 - DNA, 20 bp, synthetic construct
  source 1..20: mol_type = other DNA
ttaacccactttcagaaaaa

SEQ ID NO: 2382 - DNA, 20 bp, synthetic construct
  source 1..20: mol_type = other DNA
ggcacctgtagccttcgctc

SEQ ID NO: 2383 - DNA, 20 bp, synthetic construct
  source 1..20: mol_type = other DNA
ggcagtcggatggtcgcacg

SEQ ID NO: 2384 - DNA, 20 bp, synthetic construct
  source 1..20: mol_type = other DNA
gcagtcggatggtcgcacgc

SEQ ID NO: 2385 - DNA, 20 bp, synthetic construct
  source 1..20: mol_type = other DNA
aggtaggtggagccacggtg

SEQ ID NO: 2386 - DNA, 20 bp, synthetic construct
  source 1..20: mol_type = other DNA
atgcgtccgagggttgccgg

SEQ ID NO: 2387 - DNA, 20 bp, synthetic construct
  source 1..20: mol_type = other DNA
gcaaccctcggacgcatgcg

SEQ ID NO: 2388 - DNA, 20 bp, synthetic construct
  source 1..20: mol_type = other DNA
tgtagccttcgctctggtcg

SEQ ID NO: 2389 - DNA, 20 bp, synthetic construct
  source 1..20: mol_type = other DNA
cgggcgaggcgtgtttgctg

SEQ ID NO: 2390 - DNA, 20 bp, synthetic construct
  source 1..20: mol_type = other DNA
gcgaccagagcgaaggctac

SEQ ID NO: 2391 - DNA, 20 bp, synthetic construct
  source 1..20: mol_type = other DNA
ggcgaggcgtgtttgctggg

SEQ ID NO: 2392 - DNA, 20 bp, synthetic construct
  source 1..20: mol_type = other DNA
ctcgcccgcgaccagagcga

SEQ ID NO: 2393 - DNA, 20 bp, synthetic construct
  source 1..20: mol_type = other DNA
gtagccttcgctctggtcgc

SEQ ID NO: 2394 - DNA, 20 bp, synthetic construct
  source 1..20: mol_type = other DNA
gggcgaggcgtgtttgctgg

SEQ ID NO: 2395 - DNA, 20 bp, synthetic construct
  source 1..20: mol_type = other DNA
cgaaggctacaggtgcccgc

SEQ ID NO: 2396 - DNA, 20 bp, synthetic construct
  source 1..20: mol_type = other DNA
tgcgtccgagggttgccggc

SEQ ID NO: 2397 - DNA, 20 bp, synthetic construct
  source 1..20: mol_type = other DNA
agccaatgggaactaggcat

SEQ ID NO: 2398 - DNA, 20 bp, synthetic construct
  source 1..20: mol_type = other DNA
tgggaacccaatggaagagg

SEQ ID NO: 2399 - DNA, 20 bp, synthetic construct
  source 1..20: mol_type = other DNA
atgtcctgtgacgtaagtca

SEQ ID NO: 2400 - DNA, 20 bp, synthetic construct
  source 1..20: mol_type = other DNA
gaatgagaagggctcacgct

SEQ ID NO: 2401 - DNA, 20 bp, synthetic construct
  source 1..20: mol_type = other DNA
aaaagcaagataattcactg

SEQ ID NO: 2402 - DNA, 20 bp, synthetic construct
  source 1..20: mol_type = other DNA
tcatgggaacccaatggaag

SEQ ID NO: 2403 - DNA, 20 bp, synthetic construct
  source 1..20: mol_type = other DNA
gttcccatgacttacgtcac

SEQ ID NO: 2404 - DNA, 20 bp, synthetic construct
  source 1..20: mol_type = other DNA
cgtaagtcatgggaacccaa

SEQ ID NO: 2405 - DNA, 20 bp, synthetic construct
  source 1..20: mol_type = other DNA
tgggcgacgagcttgcccaa

SEQ ID NO: 2406 - DNA, 20 bp, synthetic construct
  source 1..20: mol_type = other DNA
aaagcaagataattcactgg

SEQ ID NO: 2407 - DNA, 20 bp, synthetic construct
  source 1..20: mol_type = other DNA
acatcgagccaatgggaact

SEQ ID NO: 2408 - DNA, 20 bp, synthetic construct
  source 1..20: mol_type = other DNA
gtcacaggacatcgagccaa

SEQ ID NO: 2409 - DNA, 20 bp, synthetic construct
  source 1..20: mol_type = other DNA
atggaagaggcggaatgaga

SEQ ID NO: 2410 - DNA, 20 bp, synthetic construct
  source 1..20: mol_type = other DNA
tggaagaggcggaatgagaa

SEQ ID NO: 2411 - DNA, 20 bp, synthetic construct
  source 1..20: mol_type = other DNA
gagccaatgggaactaggca

SEQ ID NO: 2412 - DNA, 20 bp, synthetic construct
  source 1..20: mol_type = other DNA
gtaacccactggctgatacc

SEQ ID NO: 2413 - DNA, 20 bp, synthetic construct
  source 1..20: mol_type = other DNA
tgtaattgtcagggtgacgt

SEQ ID NO: 2414 - DNA, 20 bp, synthetic construct
  source 1..20: mol_type = other DNA
tttacccggtatcagccagt

SEQ ID NO: 2415 - DNA, 20 bp, synthetic construct
  source 1..20: mol_type = other DNA
gtgttgttattgtaacccac

SEQ ID NO: 2416 - DNA, 20 bp, synthetic construct
  source 1..20: mol_type = other DNA
cataaaagattgtacattgg

SEQ ID NO: 2417 - DNA, 20 bp, synthetic construct
  source 1..20: mol_type = other DNA
taacataaaagattgtacat

SEQ ID NO: 2418 - DNA, 20 bp, synthetic construct
  source 1..20: mol_type = other DNA
gtcagggtgacgttggcgag

SEQ ID NO: 2419 - DNA, 20 bp, synthetic construct
  source 1..20: mol_type = other DNA
agacctatttgtaattgtca

SEQ ID NO: 2420 - DNA, 20 bp, synthetic construct
  source 1..20: mol_type = other DNA
agggtgacgttggcgagagg

SEQ ID NO: 2421 - DNA, 20 bp, synthetic construct
  source 1..20: mol_type = other DNA
ggaggagtaaaaactgaagc

SEQ ID NO: 2422 - DNA, 20 bp, synthetic construct
  source 1..20: mol_type = other DNA
gtgacgttggcgagaggagg

SEQ ID NO: 2423 - DNA, 20 bp, synthetic construct
  source 1..20: mol_type = other DNA
gagacctatttgtaattgtc

SEQ ID NO: 2424 - DNA, 20 bp, synthetic construct
  source 1..20: mol_type = other DNA
aagcaattaaaaagattgac

SEQ ID NO: 2425 - DNA, 20 bp, synthetic construct
  source 1..20: mol_type = other DNA
attaaaaagattgacaggta

SEQ ID NO: 2426 - DNA, 20 bp, synthetic construct
  source 1..20: mol_type = other DNA
tcaccctgacaattacaaat

SEQ ID NO: 2427 - DNA, 20 bp, synthetic construct
  source 1..20: mol_type = other DNA
tccactttgcaccagtccga

SEQ ID NO: 2428 - DNA, 20 bp, synthetic construct
  source 1..20: mol_type = other DNA
gcggaccgcggcgggcacgt

SEQ ID NO: 2429 - DNA, 20 bp, synthetic construct
  source 1..20: mol_type = other DNA
agtccgagggaatttgcggt

SEQ ID NO: 2430 - DNA, 20 bp, synthetic construct
  source 1..20: mol_type = other DNA
gaccgcaaattccctcggac

SEQ ID NO: 2431 - DNA, 20 bp, synthetic construct
  source 1..20: mol_type = other DNA
gggaggaaccctctccccag

SEQ ID NO: 2432 - DNA, 20 bp, synthetic construct
  source 1..20: mol_type = other DNA
tcggactggtgcaaagtgga

SEQ ID NO: 2433 - DNA, 20 bp, synthetic construct
  source 1..20: mol_type = other DNA
actggtgcaaagtggaaggg

SEQ ID NO: 2434 - DNA, 20 bp, synthetic construct
  source 1..20: mol_type = other DNA
gaggcgggagcggagaggtt

SEQ ID NO: 2435 - DNA, 20 bp, synthetic construct
  source 1..20: mol_type = other DNA
gaaccctctccccagaggca

SEQ ID NO: 2436 - DNA, 20 bp, synthetic construct
  source 1..20: mol_type = other DNA
gactggtgcaaagtggaagg

SEQ ID NO: 2437 - DNA, 20 bp, synthetic construct
  source 1..20: mol_type = other DNA
cccagaggcagggaccgagg

SEQ ID NO: 2438 - DNA, 20 bp, synthetic construct
  source 1..20: mol_type = other DNA
gttgggcagagccgagcagc

SEQ ID NO: 2439 - DNA, 20 bp, synthetic construct
  source 1..20: mol_type = other DNA
ggaccgaggcgggagcggag

SEQ ID NO: 2440 - DNA, 20 bp, synthetic construct
  source 1..20: mol_type = other DNA
cgcctcggtccctgcctctg

SEQ ID NO: 2441 - DNA, 20 bp, synthetic construct
  source 1..20: mol_type = other DNA
ccagaggcagggaccgaggc

SEQ ID NO: 2442 - DNA, 20 bp, synthetic construct
  source 1..20: mol_type = other DNA
tgtccctctccgctgccatg

SEQ ID NO: 2443 - DNA, 20 bp, synthetic construct
  source 1..20: mol_type = other DNA
aagtgcaggcctcatggcag

SEQ ID NO: 2444 - DNA, 20 bp, synthetic construct
  source 1..20: mol_type = other DNA
agggagctatggcctgcgat

SEQ ID NO: 2445 - DNA, 20 bp, synthetic construct
  source 1..20: mol_type = other DNA
aggcctcatggcagcggaga

SEQ ID NO: 2446 - DNA, 20 bp, synthetic construct
  source 1..20: mol_type = other DNA
catggcagcggagagggaca

SEQ ID NO: 2447 - DNA, 20 bp, synthetic construct
  source 1..20: mol_type = other DNA
ctatggcctgcgatgggagt

SEQ ID NO: 2448 - DNA, 20 bp, synthetic construct
  source 1..20: mol_type = other DNA
cagggagctatggcctgcga

SEQ ID NO: 2449 - DNA, 20 bp, synthetic construct
  source 1..20: mol_type = other DNA
caggcctcatggcagcggag

SEQ ID NO: 2450 - DNA, 20 bp, synthetic construct
  source 1..20: mol_type = other DNA
tgcgatgggagtgggcagag

SEQ ID NO: 2451 - DNA, 20 bp, synthetic construct
  source 1..20: mol_type = other DNA
gctatggcctgcgatgggag

SEQ ID NO: 2452 - DNA, 20 bp, synthetic construct
  source 1..20: mol_type = other DNA
cctctgcccactcccatcgc

SEQ ID NO: 2453 - DNA, 20 bp, synthetic construct
  source 1..20: mol_type = other DNA
gatgggagtgggcagagggg

SEQ ID NO: 2454 - DNA, 20 bp, synthetic construct
  source 1..20: mol_type = other DNA
tcatggcagcggagagggac

SEQ ID NO: 2455 - DNA, 20 bp, synthetic construct
  source 1..20: mol_type = other DNA
cctgcgatgggagtgggcag

SEQ ID NO: 2456 - DNA, 20 bp, synthetic construct
  source 1..20: mol_type = other DNA
cggagagggacagggagcta

SEQ ID NO: 2457 - DNA, 20 bp, synthetic construct
  source 1..20: mol_type = other DNA
cacggccggactcctaacag

SEQ ID NO: 2458 - DNA, 20 bp, synthetic construct
  source 1..20: mol_type = other DNA
agagacagagcgctccgctc

SEQ ID NO: 2459 - DNA, 20 bp, synthetic construct
  source 1..20: mol_type = other DNA
ggccgtgcaacccttcctag

SEQ ID NO: 2460 - DNA, 20 bp, synthetic construct
  source 1..20: mol_type = other DNA
aaggccgaggccgctaggaa

SEQ ID NO: 2461 - DNA, 20 bp, synthetic construct
  source 1..20: mol_type = other DNA
gctctgtctctaagatcccg

SEQ ID NO: 2462 - DNA, 20 bp, synthetic construct
  source 1..20: mol_type = other DNA
ggttccttacgggaaggccg

SEQ ID NO: 2463 - DNA, 20 bp, synthetic construct
  source 1..20: mol_type = other DNA
gcgctcacatccgcagcccc

SEQ ID NO: 2464 - DNA, 20 bp, synthetic construct
  source 1..20: mol_type = other DNA
gcgctctgtctctaagatcc

SEQ ID NO: 2465 - DNA, 20 bp, synthetic construct
  source 1..20: mol_type = other DNA
ctctctggttccttacggga

SEQ ID NO: 2466 - DNA, 20 bp, synthetic construct
  source 1..20: mol_type = other DNA
ctggcctggcgggagcagag

SEQ ID NO: 2467 - DNA, 20 bp, synthetic construct
  source 1..20: mol_type = other DNA
gctaggaagggttgcacggc

SEQ ID NO: 2468 - DNA, 20 bp, synthetic construct
  source 1..20: mol_type = other DNA
tgagcgggccggtcgctggg

SEQ ID NO: 2469 - DNA, 20 bp, synthetic construct
  source 1..20: mol_type = other DNA
gcgcggcgccgctgccggag

SEQ ID NO: 2470 - DNA, 20 bp, synthetic construct
  source 1..20: mol_type = other DNA
tctggcctggcgggagcaga

SEQ ID NO: 2471 - DNA, 20 bp, synthetic construct
  source 1..20: mol_type = other DNA
acagcggctctctggcctgg

SEQ ID NO: 2472 - DNA, 20 bp, synthetic construct
  source 1..20: mol_type = other DNA
ggggagcggcgctaaaggcg

SEQ ID NO: 2473 - DNA, 20 bp, synthetic construct
  source 1..20: mol_type = other DNA
gcgggttggtggtgacaccc

SEQ ID NO: 2474 - DNA, 20 bp, synthetic construct
  source 1..20: mol_type = other DNA
ggaaaacacggggtcacgcg

SEQ ID NO: 2475 - DNA, 20 bp, synthetic construct
  source 1..20: mol_type = other DNA
gactcgggtcgggaaaacac

SEQ ID NO: 2476 - DNA, 20 bp, synthetic construct
  source 1..20: mol_type = other DNA
gaaaacacggggtcacgcgc

SEQ ID NO: 2477 - DNA, 20 bp, synthetic construct
  source 1..20: mol_type = other DNA
aaaacacggggtcacgcgcg

SEQ ID NO: 2478 - DNA, 20 bp, synthetic construct
  source 1..20: mol_type = other DNA
actcgggtcgggaaaacacg

SEQ ID NO: 2479 - DNA, 20 bp, synthetic construct
  source 1..20: mol_type = other DNA
gccaaactggccgcagcctg

SEQ ID NO: 2480 - DNA, 20 bp, synthetic construct
  source 1..20: mol_type = other DNA
ctaaaggcggggctgcgacg

SEQ ID NO: 2481 - DNA, 20 bp, synthetic construct
  source 1..20: mol_type = other DNA
tggggagcggcgctaaaggc

SEQ ID NO: 2482 - DNA, 20 bp, synthetic construct
  source 1..20: mol_type = other DNA
ctggggagcggcgctaaagg

SEQ ID NO: 2483 - DNA, 20 bp, synthetic construct
  source 1..20: mol_type = other DNA
tagcgccgctccccaggctg

SEQ ID NO: 2484 - DNA, 20 bp, synthetic construct
  source 1..20: mol_type = other DNA
gcggagcgggaggaggcccg

SEQ ID NO: 2485 - DNA, 20 bp, synthetic construct
  source 1..20: mol_type = other DNA
cggagcgggaggaggcccgg

SEQ ID NO: 2486 - DNA, 20 bp, synthetic construct
  source 1..20: mol_type = other DNA
aaggcggggctgcgacgggg

SEQ ID NO: 2487 - DNA, 20 bp, synthetic construct
  source 1..20: mol_type = other DNA
gctccggtaacgaccttgcg

SEQ ID NO: 2488 - DNA, 20 bp, synthetic construct
  source 1..20: mol_type = other DNA
gtcgttaccggagctcaccg

SEQ ID NO: 2489 - DNA, 20 bp, synthetic construct
  source 1..20: mol_type = other DNA
ccctagaccccggtgagctc

SEQ ID NO: 2490 - DNA, 20 bp, synthetic construct
  source 1..20: mol_type = other DNA
ggtaacgaccttgcgaggtc

SEQ ID NO: 2491 - DNA, 20 bp, synthetic construct
  source 1..20: mol_type = other DNA
aggtcgttaccggagctcac

SEQ ID NO: 2492 - DNA, 20 bp, synthetic construct
  source 1..20: mol_type = other DNA
cttgcgaggtcgggcagagt

SEQ ID NO: 2493 - DNA, 20 bp, synthetic construct
  source 1..20: mol_type = other DNA
gactcagtcacagatggaga

SEQ ID NO: 2494 - DNA, 20 bp, synthetic construct
  source 1..20: mol_type = other DNA
cccatcccaggccccccgcg

SEQ ID NO: 2495 - DNA, 20 bp, synthetic construct
  source 1..20: mol_type = other DNA
gactgtgactcagtcacaga

SEQ ID NO: 2496 - DNA, 20 bp, synthetic construct
  source 1..20: mol_type = other DNA
tctgggtgtgtggcagcggg

SEQ ID NO: 2497 - DNA, 20 bp, synthetic construct
  source 1..20: mol_type = other DNA
gggtgaaatatctgggtgtg

SEQ ID NO: 2498 - DNA, 20 bp, synthetic construct
  source 1..20: mol_type = other DNA
cacagggcttccctagaccc

SEQ ID NO: 2499 - DNA, 20 bp, synthetic construct
  source 1..20: mol_type = other DNA
gaggtcgggcagagtgggca

SEQ ID NO: 2500 - DNA, 20 bp, synthetic construct
  source 1..20: mol_type = other DNA
atatctgggtgtgtggcagc

SEQ ID NO: 2501 - DNA, 20 bp, synthetic construct
  source 1..20: mol_type = other DNA
ctgggtgtgtggcagcgggt

SEQ ID NO: 2502 - DNA, 20 bp, synthetic construct
  source 1..20: mol_type = other DNA
gatcgcgcagtatttctgcg

SEQ ID NO: 2503 - DNA, 20 bp, synthetic construct
  source 1..20: mol_type = other DNA
gcccacttctatgtggagag

SEQ ID NO: 2504 - DNA, 20 bp, synthetic construct
  source 1..20: mol_type = other DNA
acatagaagtgggctcccgg

SEQ ID NO: 2505 - DNA, 20 bp, synthetic construct
  source 1..20: mol_type = other DNA
gcgtggcaccggtgcggatg

SEQ ID NO: 2506 - DNA, 20 bp, synthetic construct
  source 1..20: mol_type = other DNA
tccgggagcccacttctatg

SEQ ID NO: 2507 - DNA, 20 bp, synthetic construct
  source 1..20: mol_type = other DNA
ctttacagccgcatccgcac

SEQ ID NO: 2508 - DNA, 20 bp, synthetic construct
  source 1..20: mol_type = other DNA
gcagtatttctgcgtggcac

SEQ ID NO: 2509 - DNA, 20 bp, synthetic construct
  source 1..20: mol_type = other DNA
atttctgcgtggcaccggtg

SEQ ID NO: 2510 - DNA, 20 bp, synthetic construct
  source 1..20: mol_type = other DNA
cagaggaaatcacttccggg

SEQ ID NO: 2511 - DNA, 20 bp, synthetic construct
  source 1..20: mol_type = other DNA
cggatgcggctgtaaagcag

SEQ ID NO: 2512 - DNA, 20 bp, synthetic construct
  source 1..20: mol_type = other DNA
aagcagtggtcaccgcctcc

SEQ ID NO: 2513 - DNA, 20 bp, synthetic construct
  source 1..20: mol_type = other DNA
ccgggaggcaggacagagcg

SEQ ID NO: 2514 - DNA, 20 bp, synthetic construct
  source 1..20: mol_type = other DNA
cgcgtttctatagtagcgag

SEQ ID NO: 2515 - DNA, 20 bp, synthetic construct
  source 1..20: mol_type = other DNA
tccgggaggcaggacagagc

SEQ ID NO: 2516 - DNA, 20 bp, synthetic construct
  source 1..20: mol_type = other DNA
ttccgggaggcaggacagag

SEQ ID NO: 2517 - DNA, 20 bp, synthetic construct
  source 1..20: mol_type = other DNA
tgagtttgagtttatgggcg

SEQ ID NO: 2518 - DNA, 20 bp, synthetic construct
  source 1..20: mol_type = other DNA
cagctacattctccaggaca

SEQ ID NO: 2519 - DNA, 20 bp, synthetic construct
  source 1..20: mol_type = other DNA
agagaatccagctgagatca

SEQ ID NO: 2520 - DNA, 20 bp, synthetic construct
  source 1..20: mol_type = other DNA
taatatcttagtgcttggca

SEQ ID NO: 2521 - DNA, 20 bp, synthetic construct
  source 1..20: mol_type = other DNA
tgtactaatatcttagtgct

SEQ ID NO: 2522 - DNA, 20 bp, synthetic construct
  source 1..20: mol_type = other DNA
agatggagtgagcggaagtg

SEQ ID NO: 2523 - DNA, 20 bp, synthetic construct
  source 1..20: mol_type = other DNA
ggccttcagctacattctcc

SEQ ID NO: 2524 - DNA, 20 bp, synthetic construct
  source 1..20: mol_type = other DNA
gagaatccagctgagatcaa

SEQ ID NO: 2525 - DNA, 20 bp, synthetic construct
  source 1..20: mol_type = other DNA
ggagaatgtagctgaaggcc

SEQ ID NO: 2526 - DNA, 20 bp, synthetic construct
  source 1..20: mol_type = other DNA
tctgagtttgagtttatggg

SEQ ID NO: 2527 - DNA, 20 bp, synthetic construct
  source 1..20: mol_type = other DNA
gtcctggagaatgtagctga

SEQ ID NO: 2528 - DNA, 20 bp, synthetic construct
  source 1..20: mol_type = other DNA
gccggaaagaagccgtgtcc

SEQ ID NO: 2529 - DNA, 20 bp, synthetic construct
  source 1..20: mol_type = other DNA
aagatggagtgagcggaagt

SEQ ID NO: 2530 - DNA, 20 bp, synthetic construct
  source 1..20: mol_type = other DNA
aacaccaactctcatcaaga

SEQ ID NO: 2531 - DNA, 20 bp, synthetic construct
  source 1..20: mol_type = other DNA
caagatggagtgagcggaag

SEQ ID NO: 2532 - DNA, 20 bp, synthetic construct
  source 1..20: mol_type = other DNA
aggggttaaggcgagcaagt

SEQ ID NO: 2533 - DNA, 20 bp, synthetic construct
  source 1..20: mol_type = other DNA
aagggcccgtctgacaagtc

SEQ ID NO: 2534 - DNA, 20 bp, synthetic construct
  source 1..20: mol_type = other DNA
acccctgccaatcaacgcac

SEQ ID NO: 2535 - DNA, 20 bp, synthetic construct
  source 1..20: mol_type = other DNA
cccgtctgacaagtccggca

SEQ ID NO: 2536 - DNA, 20 bp, synthetic construct
  source 1..20: mol_type = other DNA
cccaaggattaaacaaagca

SEQ ID NO: 2537 - DNA, 20 bp, synthetic construct
  source 1..20: mol_type = other DNA
gaagctgaagctgcaagtca

SEQ ID NO: 2538 - DNA, 20 bp, synthetic construct
  source 1..20: mol_type = other DNA
aaacaaagcagggttaaatg

SEQ ID NO: 2539 - DNA, 20 bp, synthetic construct
  source 1..20: mol_type = other DNA
gccctgccggacttgtcaga

SEQ ID NO: 2540 - DNA, 20 bp, synthetic construct
  source 1..20: mol_type = other DNA
aaggggttaaggcgagcaag

SEQ ID NO: 2541 - DNA, 20 bp, synthetic construct
  source 1..20: mol_type = other DNA
ggcccgtgcgttgattggca

SEQ ID NO: 2542 - DNA, 20 bp, synthetic construct
  source 1..20: mol_type = other DNA
gcccgtgcgttgattggcag

SEQ ID NO: 2543 - DNA, 20 bp, synthetic construct
  source 1..20: mol_type = other DNA
aagctgaagctgcaagtcaa

SEQ ID NO: 2544 - DNA, 20 bp, synthetic construct
  source 1..20: mol_type = other DNA
cgtgcgttgattggcagggg

SEQ ID NO: 2545 - DNA, 20 bp, synthetic construct
  source 1..20: mol_type = other DNA
gacaaacgtgttacacccca

SEQ ID NO: 2546 - DNA, 20 bp, synthetic construct
  source 1..20: mol_type = other DNA
tgattggcaggggtgggacc

SEQ ID NO: 2547 - DNA, 20 bp, synthetic construct
  source 1..20: mol_type = other DNA
ctggggcacaaacttcacgt

SEQ ID NO: 2548 - DNA, 20 bp, synthetic construct
  source 1..20: mol_type = other DNA
acttcacgttggcctgtctg

SEQ ID NO: 2549 - DNA, 20 bp, synthetic construct
  source 1..20: mol_type = other DNA
gccttgctttgccttatcag

SEQ ID NO: 2550 - DNA, 20 bp, synthetic construct
  source 1..20: mol_type = other DNA
tgataaggcaaagcaaggca

SEQ ID NO: 2551 - DNA, 20 bp, synthetic construct
  source 1..20: mol_type = other DNA
gcctctgataaggcaaagca

SEQ ID NO: 2552 - DNA, 20 bp, synthetic construct
  source 1..20: mol_type = other DNA
ccaatcagctaaggacagag

SEQ ID NO: 2553 - DNA, 20 bp, synthetic construct
  source 1..20: mol_type = other DNA
aaagccaagtcaaatatcaa

SEQ ID NO: 2554 - DNA, 20 bp, synthetic construct
  source 1..20: mol_type = other DNA
gtcaaatatcaagggttggg

SEQ ID NO: 2555 - DNA, 20 bp, synthetic construct
  source 1..20: mol_type = other DNA
attggctgcagcctctgata

SEQ ID NO: 2556 - DNA, 20 bp, synthetic construct
  source 1..20: mol_type = other DNA
aggctgcagccaatcagcta

SEQ ID NO: 2557 - DNA, 20 bp, synthetic construct
  source 1..20: mol_type = other DNA
taaggcaaagcaaggcaagg

SEQ ID NO: 2558 - DNA, 20 bp, synthetic construct
  source 1..20: mol_type = other DNA
ggcaaagcaaggcaaggcgg

SEQ ID NO: 2559 - DNA, 20 bp, synthetic construct
  source 1..20: mol_type = other DNA
aaagcaaggcaaggcggcgg

SEQ ID NO: 2560 - DNA, 20 bp, synthetic construct
  source 1..20: mol_type = other DNA
agcaaggcaaggcggcgggg

SEQ ID NO: 2561 - DNA, 20 bp, synthetic construct
  source 1..20: mol_type = other DNA
aagcaaggcaaggcggcggg

SEQ ID NO: 2562 - DNA, 20 bp, synthetic construct
  source 1..20: mol_type = other DNA
acccggcccgctcttggcgg

SEQ ID NO: 2563 - DNA, 20 bp, synthetic construct
  source 1..20: mol_type = other DNA
gtgactacaggagctgccga

SEQ ID NO: 2564 - DNA, 20 bp, synthetic construct
  source 1..20: mol_type = other DNA
gggagccggcgactgaccct

SEQ ID NO: 2565 - DNA, 20 bp, synthetic construct
  source 1..20: mol_type = other DNA
tcctgtagtcacgtggcgct

SEQ ID NO: 2566 - DNA, 20 bp, synthetic construct
  source 1..20: mol_type = other DNA
gtgacccggcccgctcttgg

SEQ ID NO: 2567 - DNA, 20 bp, synthetic construct
  source 1..20: mol_type = other DNA
caacggagtccgaccctccg

SEQ ID NO: 2568 - DNA, 20 bp, synthetic construct
  source 1..20: mol_type = other DNA
cggcagctcctgtagtcacg

SEQ ID NO: 2569 - DNA, 20 bp, synthetic construct
  source 1..20: mol_type = other DNA
gacccggcccgctcttggcg

SEQ ID NO: 2570 - DNA, 20 bp, synthetic construct
  source 1..20: mol_type = other DNA
cggcagtggcttgagtgacc

SEQ ID NO: 2571 - DNA, 20 bp, synthetic construct
  source 1..20: mol_type = other DNA
ggcggcaggcctcggagggt

SEQ ID NO: 2572 - DNA, 20 bp, synthetic construct
  source 1..20: mol_type = other DNA
cgggcgcccccgccaagagc

SEQ ID NO: 2573 - DNA, 20 bp, synthetic construct
  source 1..20: mol_type = other DNA
tgagtgacccggcccgctct

SEQ ID NO: 2574 - DNA, 20 bp, synthetic construct
  source 1..20: mol_type = other DNA
gggtcagtcgccggctcccg

SEQ ID NO: 2575 - DNA, 20 bp, synthetic construct
  source 1..20: mol_type = other DNA
ctcccgcggccgcggcctgg

SEQ ID NO: 2576 - DNA, 20 bp, synthetic construct
  source 1..20: mol_type = other DNA
ggggcggggagggactgccg

SEQ ID NO: 2577 - DNA, 20 bp, synthetic construct
  source 1..20: mol_type = other DNA
gccagaaagacacccgatgg

SEQ ID NO: 2578 - DNA, 20 bp, synthetic construct
  source 1..20: mol_type = other DNA
cgagccagaaagacacccga

SEQ ID NO: 2579 - DNA, 20 bp, synthetic construct
  source 1..20: mol_type = other DNA
agccagaaagacacccgatg

SEQ ID NO: 2580 - DNA, 20 bp, synthetic construct
  source 1..20: mol_type = other DNA
gccattagagggaaaagttg

SEQ ID NO: 2581 - DNA, 20 bp, synthetic construct
  source 1..20: mol_type = other DNA
gagccagaaagacacccgat

SEQ ID NO: 2582 - DNA, 20 bp, synthetic construct
  source 1..20: mol_type = other DNA
gcggagggcgcagggctcgt

SEQ ID NO: 2583 - DNA, 20 bp, synthetic construct
  source 1..20: mol_type = other DNA
gacgtccctgctctccagaa

SEQ ID NO: 2584 - DNA, 20 bp, synthetic construct
  source 1..20: mol_type = other DNA
gcatcatcgcagccattaga

SEQ ID NO: 2585 - DNA, 20 bp, synthetic construct
  source 1..20: mol_type = other DNA
tgaggacttcgccgggctcg

SEQ ID NO: 2586 - DNA, 20 bp, synthetic construct
  source 1..20: mol_type = other DNA
gacgagccctgcgccctccg

SEQ ID NO: 2587 - DNA, 20 bp, synthetic construct
  source 1..20: mol_type = other DNA
agggctcgtcggcgccgctg

SEQ ID NO: 2588 - DNA, 20 bp, synthetic construct
  source 1..20: mol_type = other DNA
gcccggcgcgagctcccggg

SEQ ID NO: 2589 - DNA, 20 bp, synthetic construct
  source 1..20: mol_type = other DNA
ggtctcccttctggagagca

SEQ ID NO: 2590 - DNA, 20 bp, synthetic construct
  source 1..20: mol_type = other DNA
ctccagaagggagaccccag

SEQ ID NO: 2591 - DNA, 20 bp, synthetic construct
  source 1..20: mol_type = other DNA
cttctggagagcagggacgt

SEQ ID NO: 2592 - DNA, 20 bp, synthetic construct
  source 1..20: mol_type = other DNA
agccgcagagccgtcctcgg

SEQ ID NO: 2593 - DNA, 20 bp, synthetic construct
  source 1..20: mol_type = other DNA
ggagcggccacgcctcaacc

SEQ ID NO: 2594 - DNA, 20 bp, synthetic construct
  source 1..20: mol_type = other DNA
gggcccctattagtcggatc

SEQ ID NO: 2595 - DNA, 20 bp, synthetic construct
  source 1..20: mol_type = other DNA
cagaagccgccacgcggaac

SEQ ID NO: 2596 - DNA, 20 bp, synthetic construct
  source 1..20: mol_type = other DNA
cggccggatccgactaatag

SEQ ID NO: 2597 - DNA, 20 bp, synthetic construct
  source 1..20: mol_type = other DNA
tgtgctcagaagccgccacg

SEQ ID NO: 2598 - DNA, 20 bp, synthetic construct
  source 1..20: mol_type = other DNA
caagctaccctgcccggttg

SEQ ID NO: 2599 - DNA, 20 bp, synthetic construct
  source 1..20: mol_type = other DNA
actaataggggcccttggag

SEQ ID NO: 2600 - DNA, 20 bp, synthetic construct
  source 1..20: mol_type = other DNA
ggccacgcctcaaccgggca

SEQ ID NO: 2601 - DNA, 20 bp, synthetic construct
  source 1..20: mol_type = other DNA
taccctgcccggttgaggcg

SEQ ID NO: 2602 - DNA, 20 bp, synthetic construct
  source 1..20: mol_type = other DNA
caggagaagcaccgcccact

SEQ ID NO: 2603 - DNA, 20 bp, synthetic construct
  source 1..20: mol_type = other DNA
gcagggtagcttgggcccag

SEQ ID NO: 2604 - DNA, 20 bp, synthetic construct
  source 1..20: mol_type = other DNA
ggtagcttgggcccagtggg

SEQ ID NO: 2605 - DNA, 20 bp, synthetic construct
  source 1..20: mol_type = other DNA
gttgaggcgtggccgctcca

SEQ ID NO: 2606 - DNA, 20 bp, synthetic construct
  source 1..20: mol_type = other DNA
acaggagaagcaccgcccac

SEQ ID NO: 2607 - DNA, 20 bp, synthetic construct
  source 1..20: mol_type = other DNA
cagctgaggccgctccacac

SEQ ID NO: 2608 - DNA, 20 bp, synthetic construct
  source 1..20: mol_type = other DNA
acaacatcctgcctcagctg

SEQ ID NO: 2609 - DNA, 20 bp, synthetic construct
  source 1..20: mol_type = other DNA
gaagaaaggacacgagctgg

SEQ ID NO: 2610 - DNA, 20 bp, synthetic construct
  source 1..20: mol_type = other DNA
gcgcagcaggaggtccatga

SEQ ID NO: 2611 - DNA, 20 bp, synthetic construct
  source 1..20: mol_type = other DNA
tcggaagaaggatgacttcg

SEQ ID NO: 2612 - DNA, 20 bp, synthetic construct
  source 1..20: mol_type = other DNA
gacctgctgctgcagcacat

SEQ ID NO: 2613 - DNA, 20 bp, synthetic construct
  source 1..20: mol_type = other DNA
gctgcgcctgctcacctgtg

SEQ ID NO: 2614 - DNA, 20 bp, synthetic construct
  source 1..20: mol_type = other DNA
gacacgagctgggggcacac

SEQ ID NO: 2615 - DNA, 20 bp, synthetic construct
  source 1..20: mol_type = other DNA
gctgcagcacattggcacct

SEQ ID NO: 2616 - DNA, 20 bp, synthetic construct
  source 1..20: mol_type = other DNA
aggtgagcaggcgcagcagg

SEQ ID NO: 2617 - DNA, 20 bp, synthetic construct
  source 1..20: mol_type = other DNA
tccgaagaaaggacacgagc

SEQ ID NO: 2618 - DNA, 20 bp, synthetic construct
  source 1..20: mol_type = other DNA
acacgggctgcgtcatgcac

SEQ ID NO: 2619 - DNA, 20 bp, synthetic construct
  source 1..20: mol_type = other DNA
gtgtggagcggcctcagctg

SEQ ID NO: 2620 - DNA, 20 bp, synthetic construct
  source 1..20: mol_type = other DNA
cgaagaaaggacacgagctg

SEQ ID NO: 2621 - DNA, 20 bp, synthetic construct
  source 1..20: mol_type = other DNA
caggaggtccatgatggccg

SEQ ID NO: 2622 - DNA, 20 bp, synthetic construct
  source 1..20: mol_type = other DNA
ggctggcggacggacagacg

SEQ ID NO: 2623 - DNA, 20 bp, synthetic construct
  source 1..20: mol_type = other DNA
cagacggacacagcctgccg

SEQ ID NO: 2624 - DNA, 20 bp, synthetic construct
  source 1..20: mol_type = other DNA
gctgcggaaaggcctgcgga

SEQ ID NO: 2625 - DNA, 20 bp, synthetic construct
  source 1..20: mol_type = other DNA
tgctgcggaaaggcctgcgg

SEQ ID NO: 2626 - DNA, 20 bp, synthetic construct
  source 1..20: mol_type = other DNA
cgccctccccgccgaggcag

SEQ ID NO: 2627 - DNA, 20 bp, synthetic construct
  source 1..20: mol_type = other DNA
gacagacggggacggacaga

SEQ ID NO: 2628 - DNA, 20 bp, synthetic construct
  source 1..20: mol_type = other DNA
gcttgctgcggaaaggcctg

SEQ ID NO: 2629 - DNA, 20 bp, synthetic construct
  source 1..20: mol_type = other DNA
gcggcgcgcgtcagggaccg

SEQ ID NO: 2630 - DNA, 20 bp, synthetic construct
  source 1..20: mol_type = other DNA
gaaaggcctgcggagggcac

SEQ ID NO: 2631 - DNA, 20 bp, synthetic construct
  source 1..20: mol_type = other DNA
ggagcgtgcggccggctcgg

SEQ ID NO: 2632 - DNA, 20 bp, synthetic construct
  source 1..20: mol_type = other DNA
tggagcgtgcggccggctcg

SEQ ID NO: 2633 - DNA, 20 bp, synthetic construct
  source 1..20: mol_type = other DNA
tccgccagcccgcccgctcc

SEQ ID NO: 2634 - DNA, 20 bp, synthetic construct
  source 1..20: mol_type = other DNA
ggcggacggacagacgggga

SEQ ID NO: 2635 - DNA, 20 bp, synthetic construct
  source 1..20: mol_type = other DNA
ggagcgggcgggctggcgga

SEQ ID NO: 2636 - DNA, 20 bp, synthetic construct
  source 1..20: mol_type = other DNA
ggagggcaccgggagcgggc

SEQ ID NO: 2637 - DNA, 20 bp, synthetic construct
  source 1..20: mol_type = other DNA
ggatccccgaaaaggagcac

SEQ ID NO: 2638 - DNA, 20 bp, synthetic construct
  source 1..20: mol_type = other DNA
tcctagagcgacgcgcagag

SEQ ID NO: 2639 - DNA, 20 bp, synthetic construct
  source 1..20: mol_type = other DNA
gtggccagcgagctgccagg

SEQ ID NO: 2640 - DNA, 20 bp, synthetic construct
  source 1..20: mol_type = other DNA
gagaccttcgtccatcctcc

SEQ ID NO: 2641 - DNA, 20 bp, synthetic construct
  source 1..20: mol_type = other DNA
caggcggcgagaacgcgctg

SEQ ID NO: 2642 - DNA, 20 bp, synthetic construct
  source 1..20: mol_type = other DNA
aggcggcgagaacgcgctgg

SEQ ID NO: 2643 - DNA, 20 bp, synthetic construct
  source 1..20: mol_type = other DNA
gcgacgcgcagagcggacca

SEQ ID NO: 2644 - DNA, 20 bp, synthetic construct
  source 1..20: mol_type = other DNA
cgacgcgcagagcggaccaa

SEQ ID NO: 2645 - DNA, 20 bp, synthetic construct
  source 1..20: mol_type = other DNA
ctccgcttccaccctgccac

SEQ ID NO: 2646 - DNA, 20 bp, synthetic construct
  source 1..20: mol_type = other DNA
ccaggcggcgagaacgcgct

SEQ ID NO: 2647 - DNA, 20 bp, synthetic construct
  source 1..20: mol_type = other DNA
cggtggcagggtggaagcgg

SEQ ID NO: 2648 - DNA, 20 bp, synthetic construct
  source 1..20: mol_type = other DNA
ggtggcagggtggaagcgga

SEQ ID NO: 2649 - DNA, 20 bp, synthetic construct
  source 1..20: mol_type = other DNA
gtggcagggtggaagcggag

SEQ ID NO: 2650 - DNA, 20 bp, synthetic construct
  source 1..20: mol_type = other DNA
ggccggtggcagggtggaag

SEQ ID NO: 2651 - DNA, 20 bp, synthetic construct
  source 1..20: mol_type = other DNA
gccaggcggcgagaacgcgc

SEQ ID NO: 2652 - DNA, 20 bp, synthetic construct
  source 1..20: mol_type = other DNA
tgcaagattgctgaaagtcc

SEQ ID NO: 2653 - DNA, 20 bp, synthetic construct
  source 1..20: mol_type = other DNA
ttaggaattgcttcggtgaa

SEQ ID NO: 2654 - DNA, 20 bp, synthetic construct
  source 1..20: mol_type = other DNA
cctgtgactgtctcagaata

SEQ ID NO: 2655 - DNA, 20 bp, synthetic construct
  source 1..20: mol_type = other DNA
atggttgtgtaattcaattc

SEQ ID NO: 2656 - DNA, 20 bp, synthetic construct
  source 1..20: mol_type = other DNA
caccgaagcaattcctaaag

SEQ ID NO: 2657 - DNA, 20 bp, synthetic construct
  source 1..20: mol_type = other DNA
tcaccgaagcaattcctaaa

SEQ ID NO: 2658 - DNA, 20 bp, synthetic construct
  source 1..20: mol_type = other DNA
cacccctttaggaattgctt

SEQ ID NO: 2659 - DNA, 20 bp, synthetic construct
  source 1..20: mol_type = other DNA
tggttgtgtaattcaattcc

SEQ ID NO: 2660 - DNA, 20 bp, synthetic construct
  source 1..20: mol_type = other DNA
ttcaccgaagcaattcctaa

SEQ ID NO: 2661 - DNA, 20 bp, synthetic construct
  source 1..20: mol_type = other DNA
tgcttcggtgaaaggtattc

SEQ ID NO: 2662 - DNA, 20 bp, synthetic construct
  source 1..20: mol_type = other DNA
ccatattctgagacagtcac

SEQ ID NO: 2663 - DNA, 20 bp, synthetic construct
  source 1..20: mol_type = other DNA
cttgcactttcattaggaga

SEQ ID NO: 2664 - DNA, 20 bp, synthetic construct
  source 1..20: mol_type = other DNA
ttctgagacagtcacaggat

SEQ ID NO: 2665 - DNA, 20 bp, synthetic construct
  source 1..20: mol_type = other DNA
tcctaaaggggtgtgtctta

SEQ ID NO: 2666 - DNA, 20 bp, synthetic construct
  source 1..20: mol_type = other DNA
accataagacacaccccttt

SEQ ID NO: 2667 - DNA, 20 bp, synthetic construct
  source 1..20: mol_type = other DNA
ctggagcaggatccttcctg

SEQ ID NO: 2668 - DNA, 20 bp, synthetic construct
  source 1..20: mol_type = other DNA
ggtgtctccagcctgaagga

SEQ ID NO: 2669 - DNA, 20 bp, synthetic construct
  source 1..20: mol_type = other DNA
tagggactcttattgcaaca

SEQ ID NO: 2670 - DNA, 20 bp, synthetic construct
  source 1..20: mol_type = other DNA
gggagggaagaagtctggta

SEQ ID NO: 2671 - DNA, 20 bp, synthetic construct
  source 1..20: mol_type = other DNA
acccccaaactcaccatgcg

SEQ ID NO: 2672 - DNA, 20 bp, synthetic construct
  source 1..20: mol_type = other DNA
tccaggttccttcctcagga

SEQ ID NO: 2673 - DNA, 20 bp, synthetic construct
  source 1..20: mol_type = other DNA
gtgtctccagcctgaaggag

SEQ ID NO: 2674 - DNA, 20 bp, synthetic construct
  source 1..20: mol_type = other DNA
ccacccccaaactcaccatg

SEQ ID NO: 2675 - DNA, 20 bp, synthetic construct
  source 1..20: mol_type = other DNA
tccccgcatggtgagtttgg

SEQ ID NO: 2676 - DNA, 20 bp, synthetic construct
  source 1..20: mol_type = other DNA
gggtggtgtctccagcctga

SEQ ID NO: 2677 - DNA, 20 bp, synthetic construct
  source 1..20: mol_type = other DNA
atgcggggagggaagaagtc

SEQ ID NO: 2678 - DNA, 20 bp, synthetic construct
  source 1..20: mol_type = other DNA
tccttcctcaggaaaagcca

SEQ ID NO: 2679 - DNA, 20 bp, synthetic construct
  source 1..20: mol_type = other DNA
tggtgtctccagcctgaagg

SEQ ID NO: 2680 - DNA, 20 bp, synthetic construct
  source 1..20: mol_type = other DNA
agacttcttccctccccgca

SEQ ID NO: 2681 - DNA, 20 bp, synthetic construct
  source 1..20: mol_type = other DNA
tccctgcccctccttcaggc

SEQ ID NO: 2682 - DNA, 20 bp, synthetic construct
  source 1..20: mol_type = other DNA
taaataatccacaaggaccc

SEQ ID NO: 2683 - DNA, 20 bp, synthetic construct
  source 1..20: mol_type = other DNA
gagcagataaataatccaca

SEQ ID NO: 2684 - DNA, 20 bp, synthetic construct
  source 1..20: mol_type = other DNA
gtgcagatacaagcacagtg

SEQ ID NO: 2685 - DNA, 20 bp, synthetic construct
  source 1..20: mol_type = other DNA
ctcaccatgactcagaccca

SEQ ID NO: 2686 - DNA, 20 bp, synthetic construct
  source 1..20: mol_type = other DNA
tcggagcactctctgatccg

SEQ ID NO: 2687 - DNA, 20 bp, synthetic construct
  source 1..20: mol_type = other DNA
atgtcaatgatgcctagtgt

SEQ ID NO: 2688 - DNA, 20 bp, synthetic construct
  source 1..20: mol_type = other DNA
atcagagagtgctccgagct

SEQ ID NO: 2689 - DNA, 20 bp, synthetic construct
  source 1..20: mol_type = other DNA
agtgcagatacaagcacagt

SEQ ID NO: 2690 - DNA, 20 bp, synthetic construct
  source 1..20: mol_type = other DNA
gtgaccctgggtctgagtca

SEQ ID NO: 2691 - DNA, 20 bp, synthetic construct
  source 1..20: mol_type = other DNA
tatctgcactctccaacact

SEQ ID NO: 2692 - DNA, 20 bp, synthetic construct
  source 1..20: mol_type = other DNA
gagtgcagatacaagcacag

SEQ ID NO: 2693 - DNA, 20 bp, synthetic construct
  source 1..20: mol_type = other DNA
gatcagagagtgctccgagc

SEQ ID NO: 2694 - DNA, 20 bp, synthetic construct
  source 1..20: mol_type = other DNA
ttcttggaggaggtgaccct

SEQ ID NO: 2695 - DNA, 20 bp, synthetic construct
  source 1..20: mol_type = other DNA
cacagtggggcaacccagct

SEQ ID NO: 2696 - DNA, 20 bp, synthetic construct
  source 1..20: mol_type = other DNA
tgacaaagaacaattctatt

SEQ ID NO: 2697 - DNA, 20 bp, synthetic construct
  source 1..20: mol_type = other DNA
gagggcccagacttgaagga

SEQ ID NO: 2698 - DNA, 20 bp, synthetic construct
  source 1..20: mol_type = other DNA
gaaggagttcaagctgagag

SEQ ID NO: 2699 - DNA, 20 bp, synthetic construct
  source 1..20: mol_type = other DNA
aactgagactgcacccctgg

SEQ ID NO: 2700 - DNA, 20 bp, synthetic construct
  source 1..20: mol_type = other DNA
tccgacagatcacccccgcc

SEQ ID NO: 2701 - DNA, 20 bp, synthetic construct
  source 1..20: mol_type = other DNA
ggaaggagttcaagctgaga

SEQ ID NO: 2702 - DNA, 20 bp, synthetic construct
  source 1..20: mol_type = other DNA
gggaactgagactgcacccc

SEQ ID NO: 2703 - DNA, 20 bp, synthetic construct
  source 1..20: mol_type = other DNA
aggaaggagttcaagctgag

SEQ ID NO: 2704 - DNA, 20 bp, synthetic construct
  source 1..20: mol_type = other DNA
gggacaggcaggcgccaagc

SEQ ID NO: 2705 - DNA, 20 bp, synthetic construct
  source 1..20: mol_type = other DNA
aggccgctctggaagcctcg

SEQ ID NO: 2706 - DNA, 20 bp, synthetic construct
  source 1..20: mol_type = other DNA
gcttccagagcggcctccag

SEQ ID NO: 2707 - DNA, 20 bp, synthetic construct
  source 1..20: mol_type = other DNA
ggccctcgaggcttccagag

SEQ ID NO: 2708 - DNA, 20 bp, synthetic construct
  source 1..20: mol_type = other DNA
ggccgctctggaagcctcga

SEQ ID NO: 2709 - DNA, 20 bp, synthetic construct
  source 1..20: mol_type = other DNA
aaccactaggcgcctggcgg

SEQ ID NO: 2710 - DNA, 20 bp, synthetic construct
  source 1..20: mol_type = other DNA
gtgccacctgccaggcccgg

SEQ ID NO: 2711 - DNA, 20 bp, synthetic construct
  source 1..20: mol_type = other DNA
tgcacccctggaggccgctc

SEQ ID NO: 2712 - DNA, 20 bp, synthetic construct
  source 1..20: mol_type = other DNA
gctgtctccaaagagattgg

SEQ ID NO: 2713 - DNA, 20 bp, synthetic construct
  source 1..20: mol_type = other DNA
agagtgtgggggctcagata

SEQ ID NO: 2714 - DNA, 20 bp, synthetic construct
  source 1..20: mol_type = other DNA
tcagataaggtccttgtgcc

SEQ ID NO: 2715 - DNA, 20 bp, synthetic construct
  source 1..20: mol_type = other DNA
tggaggtatcagccagccca

SEQ ID NO: 2716 - DNA, 20 bp, synthetic construct
  source 1..20: mol_type = other DNA
gcagtgtacaccctggcaca

SEQ ID NO: 2717 - DNA, 20 bp, synthetic construct
  source 1..20: mol_type = other DNA
atcagcaagcaggagagtgt

SEQ ID NO: 2718 - DNA, 20 bp, synthetic construct
  source 1..20: mol_type = other DNA
tcagcaagcaggagagtgtg

SEQ ID NO: 2719 - DNA, 20 bp, synthetic construct
  source 1..20: mol_type = other DNA
tgctggtgcagtgtacaccc

SEQ ID NO: 2720 - DNA, 20 bp, synthetic construct
  source 1..20: mol_type = other DNA
ttggaggtatcagccagccc

SEQ ID NO: 2721 - DNA, 20 bp, synthetic construct
  source 1..20: mol_type = other DNA
catcagcaagcaggagagtg

SEQ ID NO: 2722 - DNA, 20 bp, synthetic construct
  source 1..20: mol_type = other DNA
atatggcagaaaggctggaa

SEQ ID NO: 2723 - DNA, 20 bp, synthetic construct
  source 1..20: mol_type = other DNA
cagcaagcaggagagtgtgg

SEQ ID NO: 2724 - DNA, 20 bp, synthetic construct
  source 1..20: mol_type = other DNA
cttgctgatgggcaagccct

SEQ ID NO: 2725 - DNA, 20 bp, synthetic construct
  source 1..20: mol_type = other DNA
acactctcctgcttgctgat

SEQ ID NO: 2726 - DNA, 20 bp, synthetic construct
  source 1..20: mol_type = other DNA
ctgatgggcaagccctgggc

SEQ ID NO: 2727 - DNA, 20 bp, synthetic construct
  source 1..20: mol_type = other DNA
cccggcttgagagagagcgt

SEQ ID NO: 2728 - DNA, 20 bp, synthetic construct
  source 1..20: mol_type = other DNA
gagtgtgaggcctcccgagg

SEQ ID NO: 2729 - DNA, 20 bp, synthetic construct
  source 1..20: mol_type = other DNA
tttgtacggaaactgaaggc

SEQ ID NO: 2730 - DNA, 20 bp, synthetic construct
  source 1..20: mol_type = other DNA
cagaagcggaaatacatcat

SEQ ID NO: 2731 - DNA, 20 bp, synthetic construct
  source 1..20: mol_type = other DNA
tcaagccgggcctcctcggg

SEQ ID NO: 2732 - DNA, 20 bp, synthetic construct
  source 1..20: mol_type = other DNA
gcttgagagagagcgtggga

SEQ ID NO: 2733 - DNA, 20 bp, synthetic construct
  source 1..20: mol_type = other DNA
ttgtacggaaactgaaggca

SEQ ID NO: 2734 - DNA, 20 bp, synthetic construct
  source 1..20: mol_type = other DNA
acgttgctcaggctagccgt

SEQ ID NO: 2735 - DNA, 20 bp, synthetic construct
  source 1..20: mol_type = other DNA
gcccggcttgagagagagcg

SEQ ID NO: 2736 - DNA, 20 bp, synthetic construct
  source 1..20: mol_type = other DNA
ggggagtgtgaggcctcccg

SEQ ID NO: 2737 - DNA, 20 bp, synthetic construct
  source 1..20: mol_type = other DNA
ggaaactgaaggcagggcgg

SEQ ID NO: 2738 - DNA, 20 bp, synthetic construct
  source 1..20: mol_type = other DNA
ctccagaccatactccacca

SEQ ID NO: 2739 - DNA, 20 bp, synthetic construct
  source 1..20: mol_type = other DNA
acggctagcctgagcaacgt

SEQ ID NO: 2740 - DNA, 20 bp, synthetic construct
  source 1..20: mol_type = other DNA
tacggaaactgaaggcaggg

SEQ ID NO: 2741 - DNA, 20 bp, synthetic construct
  source 1..20: mol_type = other DNA
aatggtgccccacgttgctc

SEQ ID NO: 2742 - DNA, 20 bp, synthetic construct
  source 1..20: mol_type = other DNA
ttgtcgggcagctctcgacc

SEQ ID NO: 2743 - DNA, 20 bp, synthetic construct
  source 1..20: mol_type = other DNA
ctcgacccggaagtcgctcg

SEQ ID NO: 2744 - DNA, 20 bp, synthetic construct
  source 1..20: mol_type = other DNA
gcgcccgcgctcggcaacgg

SEQ ID NO: 2745 - DNA, 20 bp, synthetic construct
  source 1..20: mol_type = other DNA
ggtcgagagctgcccgacaa

SEQ ID NO: 2746 - DNA, 20 bp, synthetic construct
  source 1..20: mol_type = other DNA
gcggcatctccactccccca

SEQ ID NO: 2747 - DNA, 20 bp, synthetic construct
  source 1..20: mol_type = other DNA
ctccactcccccaaggatgg

SEQ ID NO: 2748 - DNA, 20 bp, synthetic construct
  source 1..20: mol_type = other DNA
catctccactcccccaagga

SEQ ID NO: 2749 - DNA, 20 bp, synthetic construct
  source 1..20: mol_type = other DNA
cctgattccgccatccttgg

SEQ ID NO: 2750 - DNA, 20 bp, synthetic construct
  source 1..20: mol_type = other DNA
tggcggaatcaggccgttgt

SEQ ID NO: 2751 - DNA, 20 bp, synthetic construct
  source 1..20: mol_type = other DNA
gcctgattccgccatccttg

SEQ ID NO: 2752 - DNA, 20 bp, synthetic construct
  source 1..20: mol_type = other DNA
gggctgaggttgtggcgacg

SEQ ID NO: 2753 - DNA, 20 bp, synthetic construct
  source 1..20: mol_type = other DNA
ggctgaggttgtggcgacgg

SEQ ID NO: 2754 - DNA, 20 bp, synthetic construct
  source 1..20: mol_type = other DNA
tgggggagtggagatgccgc

SEQ ID NO: 2755 - DNA, 20 bp, synthetic construct
  source 1..20: mol_type = other DNA
aagggctgaggttgtggcga

SEQ ID NO: 2756 - DNA, 20 bp, synthetic construct
  source 1..20: mol_type = other DNA
gtggcgacgggggcgtccag

SEQ ID NO: 2757 - DNA, 20 bp, synthetic construct
  source 1..20: mol_type = other DNA
cctggacgccaggtgcgtgt

SEQ ID NO: 2758 - DNA, 20 bp, synthetic construct
  source 1..20: mol_type = other DNA
tggacgccaggtgcgtgtag

SEQ ID NO: 2759 - DNA, 20 bp, synthetic construct
  source 1..20: mol_type = other DNA
cctggtcccctacacgcacc

SEQ ID NO: 2760 - DNA, 20 bp, synthetic construct
  source 1..20: mol_type = other DNA
caggccccaagtcaccccca

SEQ ID NO: 2761 - DNA, 20 bp, synthetic construct
  source 1..20: mol_type = other DNA
gccccaagtcacccccaagg

SEQ ID NO: 2762 - DNA, 20 bp, synthetic construct
  source 1..20: mol_type = other DNA
ctgcagcagcccttgcagcg

SEQ ID NO: 2763 - DNA, 20 bp, synthetic construct
  source 1..20: mol_type = other DNA
ctggacgccaggtgcgtgta

SEQ ID NO: 2764 - DNA, 20 bp, synthetic construct
  source 1..20: mol_type = other DNA
ttgcagcgaggcccccaggg

SEQ ID NO: 2765 - DNA, 20 bp, synthetic construct
  source 1..20: mol_type = other DNA
ggcgctgggcccctccctgg

SEQ ID NO: 2766 - DNA, 20 bp, synthetic construct
  source 1..20: mol_type = other DNA
tgcagcgaggcccccaggga

SEQ ID NO: 2767 - DNA, 20 bp, synthetic construct
  source 1..20: mol_type = other DNA
gcagcgaggcccccagggag

SEQ ID NO: 2768 - DNA, 20 bp, synthetic construct
  source 1..20: mol_type = other DNA
cccttgcagcgaggccccca

SEQ ID NO: 2769 - DNA, 20 bp, synthetic construct
  source 1..20: mol_type = other DNA
aggcgctgggcccctccctg

SEQ ID NO: 2770 - DNA, 20 bp, synthetic construct
  source 1..20: mol_type = other DNA
gtcgcccagatcccacccgc

SEQ ID NO: 2771 - DNA, 20 bp, synthetic construct
  source 1..20: mol_type = other DNA
cccccaaggcggcccgcggg

SEQ ID NO: 2772 - DNA, 20 bp, synthetic construct
  source 1..20: mol_type = other DNA
gatgtcgctctacactcaga

SEQ ID NO: 2773 - DNA, 20 bp, synthetic construct
  source 1..20: mol_type = other DNA
tcacggatcatttataaatg

SEQ ID NO: 2774 - DNA, 20 bp, synthetic construct
  source 1..20: mol_type = other DNA
cacggatcatttataaatgc

SEQ ID NO: 2775 - DNA, 20 bp, synthetic construct
  source 1..20: mol_type = other DNA
taagtacaagaaagatcctg

SEQ ID NO: 2776 - DNA, 20 bp, synthetic construct
  source 1..20: mol_type = other DNA
agaaatctttcaaatacagt

SEQ ID NO: 2777 - DNA, 20 bp, synthetic construct
  source 1..20: mol_type = other DNA
gctaaaccgaaaagaacctc

SEQ ID NO: 2778 - DNA, 20 bp, synthetic construct
  source 1..20: mol_type = other DNA
attagaattaagagtgaccc

SEQ ID NO: 2779 - DNA, 20 bp, synthetic construct
  source 1..20: mol_type = other DNA
aattctaatgtttcgacttt

SEQ ID NO: 2780 - DNA, 20 bp, synthetic construct
  source 1..20: mol_type = other DNA
gaatgattggaatgtgggtg

SEQ ID NO: 2781 - DNA, 20 bp, synthetic construct
  source 1..20: mol_type = other DNA
attaagagtgacccaggaag

SEQ ID NO: 2782 - DNA, 20 bp, synthetic construct
  source 1..20: mol_type = other DNA
ccatgataaagtgtaggttc

SEQ ID NO: 2783 - DNA, 20 bp, synthetic construct
  source 1..20: mol_type = other DNA
taattctaatgtttcgactt

SEQ ID NO: 2784 - DNA, 20 bp, synthetic construct
  source 1..20: mol_type = other DNA
tttcggtttagccacttcct

SEQ ID NO: 2785 - DNA, 20 bp, synthetic construct
  source 1..20: mol_type = other DNA
ctacactcagaaggtgaaac

SEQ ID NO: 2786 - DNA, 20 bp, synthetic construct
  source 1..20: mol_type = other DNA
tcagcgaatccttacgcacg

SEQ ID NO: 2787 - DNA, 20 bp, synthetic construct
  source 1..20: mol_type = other DNA
tacccgaaaaccacgcgcgg

SEQ ID NO: 2788 - DNA, 20 bp, synthetic construct
  source 1..20: mol_type = other DNA
cgaatccttacgcacgaggg

SEQ ID NO: 2789 - DNA, 20 bp, synthetic construct
  source 1..20: mol_type = other DNA
cagcgaatccttacgcacga

SEQ ID NO: 2790 - DNA, 20 bp, synthetic construct
  source 1..20: mol_type = other DNA
tgctacccgaaaaccacgcg

SEQ ID NO: 2791 - DNA, 20 bp, synthetic construct
  source 1..20: mol_type = other DNA
atccttacgcacgagggagg

SEQ ID NO: 2792 - DNA, 20 bp, synthetic construct
  source 1..20: mol_type = other DNA
gggcgtgtgtcctccgcgcg

SEQ ID NO: 2793 - DNA, 20 bp, synthetic construct
  source 1..20: mol_type = other DNA
tgacgtcaaggcccggccgt

SEQ ID NO: 2794 - DNA, 20 bp, synthetic construct
  source 1..20: mol_type = other DNA
gaggcaggcggcgccccaga

SEQ ID NO: 2795 - DNA, 20 bp, synthetic construct
  source 1..20: mol_type = other DNA
gcgccgcctgcctccaccca

SEQ ID NO: 2796 - DNA, 20 bp, synthetic construct
  source 1..20: mol_type = other DNA
ccttacgcacgagggaggcg

SEQ ID NO: 2797 - DNA, 20 bp, synthetic construct
  source 1..20: mol_type = other DNA
caaggcccggccgtgggtgg

SEQ ID NO: 2798 - DNA, 20 bp, synthetic construct
  source 1..20: mol_type = other DNA
cgtcaaggcccggccgtggg

SEQ ID NO: 2799 - DNA, 20 bp, synthetic construct
  source 1..20: mol_type = other DNA
gcccggccgtgggtggaggc

SEQ ID NO: 2800 - DNA, 20 bp, synthetic construct
  source 1..20: mol_type = other DNA
cggccgtgggtggaggcagg

SEQ ID NO: 2801 - DNA, 20 bp, synthetic construct
  source 1..20: mol_type = other DNA
tctgagctccgtcctacccg

SEQ ID NO: 2802 - DNA, 20 bp, synthetic construct
  source 1..20: mol_type = other DNA
cgttcgctgaactcaacccg

SEQ ID NO: 2803 - DNA, 20 bp, synthetic construct
  source 1..20: mol_type = other DNA
gctgaactcaacccgcgggt

SEQ ID NO: 2804 - DNA, 20 bp, synthetic construct
  source 1..20: mol_type = other DNA
tattaccaggaactaaatcc

SEQ ID NO: 2805 - DNA, 20 bp, synthetic construct
  source 1..20: mol_type = other DNA
atactgagtcgacgtcatcc

SEQ ID NO: 2806 - DNA, 20 bp, synthetic construct
  source 1..20: mol_type = other DNA
gttcgctgaactcaacccgc

SEQ ID NO: 2807 - DNA, 20 bp, synthetic construct
  source 1..20: mol_type = other DNA
gcgaacgctgcggctagggg

SEQ ID NO: 2808 - DNA, 20 bp, synthetic construct
  source 1..20: mol_type = other DNA
tcagcgaacgctgcggctag

SEQ ID NO: 2809 - DNA, 20 bp, synthetic construct
  source 1..20: mol_type = other DNA
gttgagttcagcgaacgctg

SEQ ID NO: 2810 - DNA, 20 bp, synthetic construct
  source 1..20: mol_type = other DNA
ctgagctccgtcctacccgc

SEQ ID NO: 2811 - DNA, 20 bp, synthetic construct
  source 1..20: mol_type = other DNA
ggagggagagcggacgcagg

SEQ ID NO: 2812 - DNA, 20 bp, synthetic construct
  source 1..20: mol_type = other DNA
gaggagggagagcggacgca

SEQ ID NO: 2813 - DNA, 20 bp, synthetic construct
  source 1..20: mol_type = other DNA
cgaacgctgcggctagggga

SEQ ID NO: 2814 - DNA, 20 bp, synthetic construct
  source 1..20: mol_type = other DNA
gttcagcgaacgctgcggct

SEQ ID NO: 2815 - DNA, 20 bp, synthetic construct
  source 1..20: mol_type = other DNA
ctcagtataaaaccaacaag

SEQ ID NO: 2816 - DNA, 20 bp, synthetic construct
  source 1..20: mol_type = other DNA
gaggcgggaaggtacgccgt

SEQ ID NO: 2817 - DNA, 20 bp, synthetic construct
  source 1..20: mol_type = other DNA
gctggctgcggcggaaccca

SEQ ID NO: 2818 - DNA, 20 bp, synthetic construct
  source 1..20: mol_type = other DNA
ttccgccgcagccagcgctg

SEQ ID NO: 2819 - DNA, 20 bp, synthetic construct
  source 1..20: mol_type = other DNA
cctagccccagcgctggctg

SEQ ID NO: 2820 - DNA, 20 bp, synthetic construct
  source 1..20: mol_type = other DNA
ggaggcgggaaggtacgccg

SEQ ID NO: 2821 - DNA, 20 bp, synthetic construct
  source 1..20: mol_type = other DNA
cgtgtgcctagccccagcgc

SEQ ID NO: 2822 - DNA, 20 bp, synthetic construct
  source 1..20: mol_type = other DNA
taggcacacgcccgttgcca

SEQ ID NO: 2823 - DNA, 20 bp, synthetic construct
  source 1..20: mol_type = other DNA
gcgtgcgcgcgggacccgga

SEQ ID NO: 2824 - DNA, 20 bp, synthetic construct
  source 1..20: mol_type = other DNA
cgggacatggccgtggccgt

SEQ ID NO: 2825 - DNA, 20 bp, synthetic construct
  source 1..20: mol_type = other DNA
cacgcccgttgccatggaga

SEQ ID NO: 2826 - DNA, 20 bp, synthetic construct
  source 1..20: mol_type = other DNA
cgcgcacgcgcccacggcca

SEQ ID NO: 2827 - DNA, 20 bp, synthetic construct
  source 1..20: mol_type = other DNA
gtcccgcgcgcacgcgccca

SEQ ID NO: 2828 - DNA, 20 bp, synthetic construct
  source 1..20: mol_type = other DNA
cgcgtgcgcgcgggacccgg

SEQ ID NO: 2829 - DNA, 20 bp, synthetic construct
  source 1..20: mol_type = other DNA
gcgcgggacccggagggcgg

SEQ ID NO: 2830 - DNA, 20 bp, synthetic construct
  source 1..20: mol_type = other DNA
ggccgtgggcgcgtgcgcgc

SEQ ID NO: 2831 - DNA, 20 bp, synthetic construct
  source 1..20: mol_type = other DNA
aatggcgtctgtatgatctt

SEQ ID NO: 2832 - DNA, 20 bp, synthetic construct
  source 1..20: mol_type = other DNA
tggccgaggtccgatgcagc

SEQ ID NO: 2833 - DNA, 20 bp, synthetic construct
  source 1..20: mol_type = other DNA
gcagtggccgaagtggaagt

SEQ ID NO: 2834 - DNA, 20 bp, synthetic construct
  source 1..20: mol_type = other DNA
aagtcggcgtaacggcacta

SEQ ID NO: 2835 - DNA, 20 bp, synthetic construct
  source 1..20: mol_type = other DNA
ccaatccgcagtggccgaag

SEQ ID NO: 2836 - DNA, 20 bp, synthetic construct
  source 1..20: mol_type = other DNA
cagagctagcgcctacgacc

SEQ ID NO: 2837 - DNA, 20 bp, synthetic construct
  source 1..20: mol_type = other DNA
gtcggcgtaacggcactaag

SEQ ID NO: 2838 - DNA, 20 bp, synthetic construct
  source 1..20: mol_type = other DNA
aagcaacgaccaatccgcag

SEQ ID NO: 2839 - DNA, 20 bp, synthetic construct
  source 1..20: mol_type = other DNA
agtcggcgtaacggcactaa

SEQ ID NO: 2840 - DNA, 20 bp, synthetic construct
  source 1..20: mol_type = other DNA
gacttccacttcggccactg

SEQ ID NO: 2841 - DNA, 20 bp, synthetic construct
  source 1..20: mol_type = other DNA
ggcgtaacggcactaagggg

SEQ ID NO: 2842 - DNA, 20 bp, synthetic construct
  source 1..20: mol_type = other DNA
gggtcgtaggcgctagctct

SEQ ID NO: 2843 - DNA, 20 bp, synthetic construct
  source 1..20: mol_type = other DNA
gcaaaatccaagcgcttcgg

SEQ ID NO: 2844 - DNA, 20 bp, synthetic construct
  source 1..20: mol_type = other DNA
ggcgctagctctgggcgcag

SEQ ID NO: 2845 - DNA, 20 bp, synthetic construct
  source 1..20: mol_type = other DNA
cgggtcgtaggcgctagctc

SEQ ID NO: 2846 - DNA, 20 bp, synthetic construct
  source 1..20: mol_type = other DNA
cgaccggtgacgtcagagga

SEQ ID NO: 2847 - DNA, 20 bp, synthetic construct
  source 1..20: mol_type = other DNA
cgggaggcgggcgttgtgcg

SEQ ID NO: 2848 - DNA, 20 bp, synthetic construct
  source 1..20: mol_type = other DNA
gcgaccggtgacgtcagagg

SEQ ID NO: 2849 - DNA, 20 bp, synthetic construct
  source 1..20: mol_type = other DNA
ggcgcgcgcccggaggcagc

SEQ ID NO: 2850 - DNA, 20 bp, synthetic construct
  source 1..20: mol_type = other DNA
aacgcgaccggtgacgtcag

SEQ ID NO: 2851 - DNA, 20 bp, synthetic construct
  source 1..20: mol_type = other DNA
gcgccctcctctgacgtcac

SEQ ID NO: 2852 - DNA, 20 bp, synthetic construct
  source 1..20: mol_type = other DNA
gcgttgtgcgcggccgcggg

SEQ ID NO: 2853 - DNA, 20 bp, synthetic construct
  source 1..20: mol_type = other DNA
aggcagcaggcggagccggg

SEQ ID NO: 2854 - DNA, 20 bp, synthetic construct
  source 1..20: mol_type = other DNA
gcgcgcccggaggcagcagg

SEQ ID NO: 2855 - DNA, 20 bp, synthetic construct
  source 1..20: mol_type = other DNA
agaggagggcgcgcgcccgg

SEQ ID NO: 2856 - DNA, 20 bp, synthetic construct
  source 1..20: mol_type = other DNA
ccggaggcagcaggcggagc

SEQ ID NO: 2857 - DNA, 20 bp, synthetic construct
  source 1..20: mol_type = other DNA
gcggagcggaggggcgcgag

SEQ ID NO: 2858 - DNA, 20 bp, synthetic construct
  source 1..20: mol_type = other DNA
ctctccgtgcccggccccgg

SEQ ID NO: 2859 - DNA, 20 bp, synthetic construct
  source 1..20: mol_type = other DNA
gccccgcccccgcccctccg

SEQ ID NO: 2860 - DNA, 20 bp, synthetic construct
  source 1..20: mol_type = other DNA
cagcaggcggagccgggagg

SEQ ID NO: 2861 - DNA, 20 bp, synthetic construct
  source 1..20: mol_type = other DNA
tagaaaggacagattgactg

SEQ ID NO: 2862 - DNA, 20 bp, synthetic construct
  source 1..20: mol_type = other DNA
acagagatataacagaccct

SEQ ID NO: 2863 - DNA, 20 bp, synthetic construct
  source 1..20: mol_type = other DNA
ttgaggttccttccgaaacg

SEQ ID NO: 2864 - DNA, 20 bp, synthetic construct
  source 1..20: mol_type = other DNA
ttagccggccccgtttcgga

SEQ ID NO: 2865 - DNA, 20 bp, synthetic construct
  source 1..20: mol_type = other DNA
ggatgcaaaaaattacaacc

SEQ ID NO: 2866 - DNA, 20 bp, synthetic construct
  source 1..20: mol_type = other DNA
cagacccttgggctcgtggg

SEQ ID NO: 2867 - DNA, 20 bp, synthetic construct
  source 1..20: mol_type = other DNA
ttccttgaggacctctctca

SEQ ID NO: 2868 - DNA, 20 bp, synthetic construct
  source 1..20: mol_type = other DNA
tctagtcaatgaaaaagaca

SEQ ID NO: 2869 - DNA, 20 bp, synthetic construct
  source 1..20: mol_type = other DNA
tagcccctcccacgagccca

SEQ ID NO: 2870 - DNA, 20 bp, synthetic construct
  source 1..20: mol_type = other DNA
taaattagccggccccgttt

SEQ ID NO: 2871 - DNA, 20 bp, synthetic construct
  source 1..20: mol_type = other DNA
agcccctcccacgagcccaa

SEQ ID NO: 2872 - DNA, 20 bp, synthetic construct
  source 1..20: mol_type = other DNA
aatgaaaaagacagggtttg

SEQ ID NO: 2873 - DNA, 20 bp, synthetic construct
  source 1..20: mol_type = other DNA
cagagatataacagaccctt

SEQ ID NO: 2874 - DNA, 20 bp, synthetic construct
  source 1..20: mol_type = other DNA
ggttccttccgaaacggggc

SEQ ID NO: 2875 - DNA, 20 bp, synthetic construct
  source 1..20: mol_type = other DNA
gtttgaggttccttccgaaa

SEQ ID NO: 2876 - DNA, 20 bp, synthetic construct
  source 1..20: mol_type = other DNA
tgtgcaaggacagacttccg

SEQ ID NO: 2877 - DNA, 20 bp, synthetic construct
  source 1..20: mol_type = other DNA
acttccgacttgcatcactg

SEQ ID NO: 2878 - DNA, 20 bp, synthetic construct
  source 1..20: mol_type = other DNA
gctaaacagcgtcagcgagg

SEQ ID NO: 2879 - DNA, 20 bp, synthetic construct
  source 1..20: mol_type = other DNA
ggcgctaaacagcgtcagcg

SEQ ID NO: 2880 - DNA, 20 bp, synthetic construct
  source 1..20: mol_type = other DNA
ctgtccttgcacacgaggcg

SEQ ID NO: 2881 - DNA, 20 bp, synthetic construct
  source 1..20: mol_type = other DNA
gaagtctgtccttgcacacg

SEQ ID NO: 2882 - DNA, 20 bp, synthetic construct
  source 1..20: mol_type = other DNA
gacgtgcgggcggtgcatga

SEQ ID NO: 2883 - DNA, 20 bp, synthetic construct
  source 1..20: mol_type = other DNA
tccgacttgcatcactgcgg

SEQ ID NO: 2884 - DNA, 20 bp, synthetic construct
  source 1..20: mol_type = other DNA
gcagcgcatcctgggacgtg

SEQ ID NO: 2885 - DNA, 20 bp, synthetic construct
  source 1..20: mol_type = other DNA
tggaagacagggaaatcgtc

SEQ ID NO: 2886 - DNA, 20 bp, synthetic construct
  source 1..20: mol_type = other DNA
gggagcggaactggaagaca

SEQ ID NO: 2887 - DNA, 20 bp, synthetic construct
  source 1..20: mol_type = other DNA
gccaccgcagtgatgcaagt

SEQ ID NO: 2888 - DNA, 20 bp, synthetic construct
  source 1..20: mol_type = other DNA
cgcatcctgggacgtgcggg

SEQ ID NO: 2889 - DNA, 20 bp, synthetic construct
  source 1..20: mol_type = other DNA
gaagttgtagttctcgaccc

SEQ ID NO: 2890 - DNA, 20 bp, synthetic construct
  source 1..20: mol_type = other DNA
actgccgcgcctcgtgtgca

SEQ ID NO: 2891 - DNA, 20 bp, synthetic construct
  source 1..20: mol_type = other DNA
gtagggggggtcttatactg

SEQ ID NO: 2892 - DNA, 20 bp, synthetic construct
  source 1..20: mol_type = other DNA
tagggggggtcttatactgg

SEQ ID NO: 2893 - DNA, 20 bp, synthetic construct
  source 1..20: mol_type = other DNA
gcaggacggaaagtgaaacc

SEQ ID NO: 2894 - DNA, 20 bp, synthetic construct
  source 1..20: mol_type = other DNA
cgccaccccttgctaaaatg

SEQ ID NO: 2895 - DNA, 20 bp, synthetic construct
  source 1..20: mol_type = other DNA
ggggtgggaggtatgatggg

SEQ ID NO: 2896 - DNA, 20 bp, synthetic construct
  source 1..20: mol_type = other DNA
acaaagctgaaagtacaagc

SEQ ID NO: 2897 - DNA, 20 bp, synthetic construct
  source 1..20: mol_type = other DNA
aatgtaatttcccttcccgg

SEQ ID NO: 2898 - DNA, 20 bp, synthetic construct
  source 1..20: mol_type = other DNA
agctgaaagtacaagcagga

SEQ ID NO: 2899 - DNA, 20 bp, synthetic construct
  source 1..20: mol_type = other DNA
atcatacctcccaccccctc

SEQ ID NO: 2900 - DNA, 20 bp, synthetic construct
  source 1..20: mol_type = other DNA
tcatacctcccaccccctcc

SEQ ID NO: 2901 - DNA, 20 bp, synthetic construct
  source 1..20: mol_type = other DNA
agggggtgggaggtatgatg

SEQ ID NO: 2902 - DNA, 20 bp, synthetic construct
  source 1..20: mol_type = other DNA
gtaatttcccttcccggagg

SEQ ID NO: 2903 - DNA, 20 bp, synthetic construct
  source 1..20: mol_type = other DNA
tggggggtgacgggaagctg

SEQ ID NO: 2904 - DNA, 20 bp, synthetic construct
  source 1..20: mol_type = other DNA
acctcccaccccctccggga

SEQ ID NO: 2905 - DNA, 20 bp, synthetic construct
  source 1..20: mol_type = other DNA
gggggtgggaggtatgatgg

SEQ ID NO: 2906 - DNA, 20 bp, synthetic construct
  source 1..20: mol_type = other DNA
agccaccaaagccacgagag

SEQ ID NO: 2907 - DNA, 20 bp, synthetic construct
  source 1..20: mol_type = other DNA
tgaaccggttgtgactgcgc

SEQ ID NO: 2908 - DNA, 20 bp, synthetic construct
  source 1..20: mol_type = other DNA
ctgaaccggttgtgactgcg

SEQ ID NO: 2909 - DNA, 20 bp, synthetic construct
  source 1..20: mol_type = other DNA
accaaagccacgagagaggt

SEQ ID NO: 2910 - DNA, 20 bp, synthetic construct
  source 1..20: mol_type = other DNA
caccaaagccacgagagagg

SEQ ID NO: 2911 - DNA, 20 bp, synthetic construct
  source 1..20: mol_type = other DNA
ggcccggccaggagtaggga

SEQ ID NO: 2912 - DNA, 20 bp, synthetic construct
  source 1..20: mol_type = other DNA
acgagagaggtgggcgccgt

SEQ ID NO: 2913 - DNA, 20 bp, synthetic construct
  source 1..20: mol_type = other DNA
gacggcgcccacctctctcg

SEQ ID NO: 2914 - DNA, 20 bp, synthetic construct
  source 1..20: mol_type = other DNA
ggagatggaggcggaaaagc

SEQ ID NO: 2915 - DNA, 20 bp, synthetic construct
  source 1..20: mol_type = other DNA
gatggaggcggaaaagcggg

SEQ ID NO: 2916 - DNA, 20 bp, synthetic construct
  source 1..20: mol_type = other DNA
aggagatggaggcggaaaag

SEQ ID NO: 2917 - DNA, 20 bp, synthetic construct
  source 1..20: mol_type = other DNA
cggcccggccaggagtaggg

SEQ ID NO: 2918 - DNA, 20 bp, synthetic construct
  source 1..20: mol_type = other DNA
gtgactgcgcgggtggttgg

SEQ ID NO: 2919 - DNA, 20 bp, synthetic construct
  source 1..20: mol_type = other DNA
gcgcctgctcccgctgctcc

SEQ ID NO: 2920 - DNA, 20 bp, synthetic construct
  source 1..20: mol_type = other DNA
ttggtggctccaggcctggt

SEQ ID NO: 2921 - DNA, 20 bp, synthetic construct
  source 1..20: mol_type = other DNA
ggaaccacttctgatacctg

SEQ ID NO: 2922 - DNA, 20 bp, synthetic construct
  source 1..20: mol_type = other DNA
gttgacttaacattcggacc

SEQ ID NO: 2923 - DNA, 20 bp, synthetic construct
  source 1..20: mol_type = other DNA
caagctcaagttaatggatc

SEQ ID NO: 2924 - DNA, 20 bp, synthetic construct
  source 1..20: mol_type = other DNA
aagtccacaggtatcagaag

SEQ ID NO: 2925 - DNA, 20 bp, synthetic construct
  source 1..20: mol_type = other DNA
cagatccattaacttgagct

SEQ ID NO: 2926 - DNA, 20 bp, synthetic construct
  source 1..20: mol_type = other DNA
tggccttgaactaagtccac

SEQ ID NO: 2927 - DNA, 20 bp, synthetic construct
  source 1..20: mol_type = other DNA
tgacttaacattcggacctg

SEQ ID NO: 2928 - DNA, 20 bp, synthetic construct
  source 1..20: mol_type = other DNA
actgaaaagagactcaagct

SEQ ID NO: 2929 - DNA, 20 bp, synthetic construct
  source 1..20: mol_type = other DNA
taatattagctgttgtcccc

SEQ ID NO: 2930 - DNA, 20 bp, synthetic construct
  source 1..20: mol_type = other DNA
ttcaacttatcaagtattgc

SEQ ID NO: 2931 - DNA, 20 bp, synthetic construct
  source 1..20: mol_type = other DNA
tgcaatacttgataagttga

SEQ ID NO: 2932 - DNA, 20 bp, synthetic construct
  source 1..20: mol_type = other DNA
atacctgtggacttagttca

SEQ ID NO: 2933 - DNA, 20 bp, synthetic construct
  source 1..20: mol_type = other DNA
gtcaaccaagctcaagttaa

SEQ ID NO: 2934 - DNA, 20 bp, synthetic construct
  source 1..20: mol_type = other DNA
aaaaaaaaagtggtagtaac

SEQ ID NO: 2935 - DNA, 20 bp, synthetic construct
  source 1..20: mol_type = other DNA
tttctaatagaatgaacaaa

SEQ ID NO: 2936 - DNA, 20 bp, synthetic construct
  source 1..20: mol_type = other DNA
tctgccaatcgttggaatcg

SEQ ID NO: 2937 - DNA, 20 bp, synthetic construct
  source 1..20: mol_type = other DNA
actgggcttctgccaatcgt

SEQ ID NO: 2938 - DNA, 20 bp, synthetic construct
  source 1..20: mol_type = other DNA
ccaatcgttggaatcgtggg

SEQ ID NO: 2939 - DNA, 20 bp, synthetic construct
  source 1..20: mol_type = other DNA
cgatgagccagtccgcgcgc

SEQ ID NO: 2940 - DNA, 20 bp, synthetic construct
  source 1..20: mol_type = other DNA
ttcgtccaaatcctctgact

SEQ ID NO: 2941 - DNA, 20 bp, synthetic construct
  source 1..20: mol_type = other DNA
agaggatttggacgaatagt

SEQ ID NO: 2942 - DNA, 20 bp, synthetic construct
  source 1..20: mol_type = other DNA
agggctgtaagaccaatcag

SEQ ID NO: 2943 - DNA, 20 bp, synthetic construct
  source 1..20: mol_type = other DNA
cggcgttccacgcctgcgcg

SEQ ID NO: 2944 - DNA, 20 bp, synthetic construct
  source 1..20: mol_type = other DNA
gtaagaccaatcagaggacg

SEQ ID NO: 2945 - DNA, 20 bp, synthetic construct
  source 1..20: mol_type = other DNA
cggggctggaggcgaaaaag

SEQ ID NO: 2946 - DNA, 20 bp, synthetic construct
  source 1..20: mol_type = other DNA
agaggaaacggagaaagcta

SEQ ID NO: 2947 - DNA, 20 bp, synthetic construct
  source 1..20: mol_type = other DNA
aatagtgggagagagagaac

SEQ ID NO: 2948 - DNA, 20 bp, synthetic construct
  source 1..20: mol_type = other DNA
gctggaggcgaaaaaggggt

SEQ ID NO: 2949 - DNA, 20 bp, synthetic construct
  source 1..20: mol_type = other DNA
ggggtgggtcatctggaaag

SEQ ID NO: 2950 - DNA, 20 bp, synthetic construct
  source 1..20: mol_type = other DNA
ggaatcgtgggcggggctgg

SEQ ID NO: 2951 - DNA, 20 bp, synthetic construct
  source 1..20: mol_type = other DNA
caggacgtccggaccaatgg

SEQ ID NO: 2952 - DNA, 20 bp, synthetic construct
  source 1..20: mol_type = other DNA
tcccaggacgtccggaccaa

SEQ ID NO: 2953 - DNA, 20 bp, synthetic construct
  source 1..20: mol_type = other DNA
attggtccggacgtcctggg

SEQ ID NO: 2954 - DNA, 20 bp, synthetic construct
  source 1..20: mol_type = other DNA
gttgtgcaaaccacgtagtg

SEQ ID NO: 2955 - DNA, 20 bp, synthetic construct
  source 1..20: mol_type = other DNA
ccagtcctgcatccagtcag

SEQ ID NO: 2956 - DNA, 20 bp, synthetic construct
  source 1..20: mol_type = other DNA
ccaatcctgcatccaatcag

SEQ ID NO: 2957 - DNA, 20 bp, synthetic construct
  source 1..20: mol_type = other DNA
gtgccaggccaccattggtc

SEQ ID NO: 2958 - DNA, 20 bp, synthetic construct
  source 1..20: mol_type = other DNA
ccactacgtggtttgcacaa

SEQ ID NO: 2959 - DNA, 20 bp, synthetic construct
  source 1..20: mol_type = other DNA
cagagggcgtccccactacg

SEQ ID NO: 2960 - DNA, 20 bp, synthetic construct
  source 1..20: mol_type = other DNA
accattggtccggacgtcct

SEQ ID NO: 2961 - DNA, 20 bp, synthetic construct
  source 1..20: mol_type = other DNA
ggaaggcagcaggctcagag

SEQ ID NO: 2962 - DNA, 20 bp, synthetic construct
  source 1..20: mol_type = other DNA
cagtcctgcatccagtcaga

SEQ ID NO: 2963 - DNA, 20 bp, synthetic construct
  source 1..20: mol_type = other DNA
caatcctgcatccaatcaga

SEQ ID NO: 2964 - DNA, 20 bp, synthetic construct
  source 1..20: mol_type = other DNA
ccgttgtgcaaaccacgtag

SEQ ID NO: 2965 - DNA, 20 bp, synthetic construct
  source 1..20: mol_type = other DNA
gacgccctctgattggatgc

SEQ ID NO: 2966 - DNA, 20 bp, synthetic construct
  source 1..20: mol_type = other DNA
gctggattggattggacccc

SEQ ID NO: 2967 - DNA, 20 bp, synthetic construct
  source 1..20: mol_type = other DNA
ccagaggggcgatgttcttg

SEQ ID NO: 2968 - DNA, 20 bp, synthetic construct
  source 1..20: mol_type = other DNA
accaattgcgctccagccag

SEQ ID NO: 2969 - DNA, 20 bp, synthetic construct
  source 1..20: mol_type = other DNA
aagactgggaaacgaactct

SEQ ID NO: 2970 - DNA, 20 bp, synthetic construct
  source 1..20: mol_type = other DNA
tctaacgctgagccaagact

SEQ ID NO: 2971 - DNA, 20 bp, synthetic construct
  source 1..20: mol_type = other DNA
gagacagttcgccgagtggg

SEQ ID NO: 2972 - DNA, 20 bp, synthetic construct
  source 1..20: mol_type = other DNA
ggagccgggctggattggat

SEQ ID NO: 2973 - DNA, 20 bp, synthetic construct
  source 1..20: mol_type = other DNA
gctggagcgcaattggtgat

SEQ ID NO: 2974 - DNA, 20 bp, synthetic construct
  source 1..20: mol_type = other DNA
gattggattggacccctggg

SEQ ID NO: 2975 - DNA, 20 bp, synthetic construct
  source 1..20: mol_type = other DNA
cgtccgtcctttcccgccca

SEQ ID NO: 2976 - DNA, 20 bp, synthetic construct
  source 1..20: mol_type = other DNA
gtccgtcctttcccgcccag

SEQ ID NO: 2977 - DNA, 20 bp, synthetic construct
  source 1..20: mol_type = other DNA
caattgcgctccagccagag

SEQ ID NO: 2978 - DNA, 20 bp, synthetic construct
  source 1..20: mol_type = other DNA
attggattggacccctgggc

SEQ ID NO: 2979 - DNA, 20 bp, synthetic construct
  source 1..20: mol_type = other DNA
gacccctgggcgggaaagga

SEQ ID NO: 2980 - DNA, 20 bp, synthetic construct
  source 1..20: mol_type = other DNA
cctgggcgggaaaggacgga

SEQ ID NO: 2981 - DNA, 20 bp, synthetic construct
  source 1..20: mol_type = other DNA
cccatcccgaggaatggtag

SEQ ID NO: 2982 - DNA, 20 bp, synthetic construct
  source 1..20: mol_type = other DNA
cgctaggtacccccggcccg

SEQ ID NO: 2983 - DNA, 20 bp, synthetic construct
  source 1..20: mol_type = other DNA
gctgatgcaagcgaagcggg

SEQ ID NO: 2984 - DNA, 20 bp, synthetic construct
  source 1..20: mol_type = other DNA
gcgcgccccatcccgaggaa

SEQ ID NO: 2985 - DNA, 20 bp, synthetic construct
  source 1..20: mol_type = other DNA
gaggcgtcgcgcgagccagg

SEQ ID NO: 2986 - DNA, 20 bp, synthetic construct
  source 1..20: mol_type = other DNA
cctctaccattcctcgggat

SEQ ID NO: 2987 - DNA, 20 bp, synthetic construct
  source 1..20: mol_type = other DNA
cgggtggcgctaggtacccc

SEQ ID NO: 2988 - DNA, 20 bp, synthetic construct
  source 1..20: mol_type = other DNA
cctttccattggctgccgcg

SEQ ID NO: 2989 - DNA, 20 bp, synthetic construct
  source 1..20: mol_type = other DNA
gcctctaccattcctcggga

SEQ ID NO: 2990 - DNA, 20 bp, synthetic construct
  source 1..20: mol_type = other DNA
gcagctgatgcaagcgaagc

SEQ ID NO: 2991 - DNA, 20 bp, synthetic construct
  source 1..20: mol_type = other DNA
cagctgcgcgccccatcccg

SEQ ID NO: 2992 - DNA, 20 bp, synthetic construct
  source 1..20: mol_type = other DNA
cggcagccaatggaaaggcg

SEQ ID NO: 2993 - DNA, 20 bp, synthetic construct
  source 1..20: mol_type = other DNA
ggctgcctctaccattcctc

SEQ ID NO: 2994 - DNA, 20 bp, synthetic construct
  source 1..20: mol_type = other DNA
caagcgaagcgggtggcgct

SEQ ID NO: 2995 - DNA, 20 bp, synthetic construct
  source 1..20: mol_type = other DNA
agggggcagccacgggccgg

SEQ ID NO: 2996 - DNA, 20 bp, synthetic construct
  source 1..20: mol_type = other DNA
acccgataacaacacgagaa

SEQ ID NO: 2997 - DNA, 20 bp, synthetic construct
  source 1..20: mol_type = other DNA
actggtggggtagcccaaga

SEQ ID NO: 2998 - DNA, 20 bp, synthetic construct
  source 1..20: mol_type = other DNA
ctgattgctggaagctacac

SEQ ID NO: 2999 - DNA, 20 bp, synthetic construct
  source 1..20: mol_type = other DNA
tgcctgtgttgtcactggtg

SEQ ID NO: 3000 - DNA, 20 bp, synthetic construct
  source 1..20: mol_type = other DNA
caccagtgacaacacaggca

SEQ ID NO: 3001 - DNA, 20 bp, synthetic construct
  source 1..20: mol_type = other DNA
gtggggtagcccaagagggt

SEQ ID NO: 3002 - DNA, 20 bp, synthetic construct
  source 1..20: mol_type = other DNA
gtgtagcttccagcaatcag

SEQ ID NO: 3003 - DNA, 20 bp, synthetic construct
  source 1..20: mol_type = other DNA
taccccaccagtgacaacac

SEQ ID NO: 3004 - DNA, 20 bp, synthetic construct
  source 1..20: mol_type = other DNA
acccctgcctgtgttgtcac

SEQ ID NO: 3005 - DNA, 20 bp, synthetic construct
  source 1..20: mol_type = other DNA
cctgcctgtgttgtcactgg

SEQ ID NO: 3006 - DNA, 20 bp, synthetic construct
  source 1..20: mol_type = other DNA
tgattgactccgctgattgc

SEQ ID NO: 3007 - DNA, 20 bp, synthetic construct
  source 1..20: mol_type = other DNA
agtgacaacacaggcagggg

SEQ ID NO: 3008 - DNA, 20 bp, synthetic construct
  source 1..20: mol_type = other DNA
accagtgacaacacaggcag

SEQ ID NO: 3009 - DNA, 20 bp, synthetic construct
  source 1..20: mol_type = other DNA
aggctttgtgggttctgagc

SEQ ID NO: 3010 - DNA, 20 bp, synthetic construct
  source 1..20: mol_type = other DNA
ggtggggtagcccaagaggg

SEQ ID NO: 3011 - DNA, 20 bp, synthetic construct
  source 1..20: mol_type = other DNA
gttcgggcctggttaagacg

SEQ ID NO: 3012 - DNA, 20 bp, synthetic construct
  source 1..20: mol_type = other DNA
gttactgtagaccagaagct

SEQ ID NO: 3013 - DNA, 20 bp, synthetic construct
  source 1..20: mol_type = other DNA
ccgcgcgcggggacgaccgt

SEQ ID NO: 3014 - DNA, 20 bp, synthetic construct
  source 1..20: mol_type = other DNA
actggcgcccacgtgaccca

SEQ ID NO: 3015 - DNA, 20 bp, synthetic construct
  source 1..20: mol_type = other DNA
gcctggttaagacgcggcgt

SEQ ID NO: 3016 - DNA, 20 bp, synthetic construct
  source 1..20: mol_type = other DNA
ctggttaagacgcggcgttg

SEQ ID NO: 3017 - DNA, 20 bp, synthetic construct
  source 1..20: mol_type = other DNA
gcggggcgtgggcgtcacgt

SEQ ID NO: 3018 - DNA, 20 bp, synthetic construct
  source 1..20: mol_type = other DNA
ggtggggcaaaggcgtgtca

SEQ ID NO: 3019 - DNA, 20 bp, synthetic construct
  source 1..20: mol_type = other DNA
gtgtcagggaaggttggcgg

SEQ ID NO: 3020 - DNA, 20 bp, synthetic construct
  source 1..20: mol_type = other DNA
cgttactgtagaccagaagc

SEQ ID NO: 3021 - DNA, 20 bp, synthetic construct
  source 1..20: mol_type = other DNA
gggcaaaggcgtgtcaggga

SEQ ID NO: 3022 - DNA, 20 bp, synthetic construct
  source 1..20: mol_type = other DNA
ggcgtgtcagggaaggttgg

SEQ ID NO: 3023 - DNA, 20 bp, synthetic construct
  source 1..20: mol_type = other DNA
ggggcgtgggcgtcacgtgg

SEQ ID NO: 3024 - DNA, 20 bp, synthetic construct
  source 1..20: mol_type = other DNA
cggggcgtgggcgtcacgtg

SEQ ID NO: 3025 - DNA, 20 bp, synthetic construct
  source 1..20: mol_type = other DNA
aaaggcgtgtcagggaaggt

SEQ ID NO: 3026 - DNA, 20 bp, synthetic construct
  source 1..20: mol_type = other DNA
ctggaggcgccgaattcctg

SEQ ID NO: 3027 - DNA, 20 bp, synthetic construct
  source 1..20: mol_type = other DNA
aatgtccttataaggcctgg

SEQ ID NO: 3028 - DNA, 20 bp, synthetic construct
  source 1..20: mol_type = other DNA
cacagcacccccgtcaccag

SEQ ID NO: 3029 - DNA, 20 bp, synthetic construct
  source 1..20: mol_type = other DNA
ctccaggcctctggtgacgg

SEQ ID NO: 3030 - DNA, 20 bp, synthetic construct
  source 1..20: mol_type = other DNA
gcaaatgtccttataaggcc

SEQ ID NO: 3031 - DNA, 20 bp, synthetic construct
  source 1..20: mol_type = other DNA
cacccccgtcaccagaggcc

SEQ ID NO: 3032 - DNA, 20 bp, synthetic construct
  source 1..20: mol_type = other DNA
gagggggctcaggaagtccg

SEQ ID NO: 3033 - DNA, 20 bp, synthetic construct
  source 1..20: mol_type = other DNA
cctccaggcctctggtgacg

SEQ ID NO: 3034 - DNA, 20 bp, synthetic construct
  source 1..20: mol_type = other DNA
ttgcgctccgggccaatcag

SEQ ID NO: 3035 - DNA, 20 bp, synthetic construct
  source 1..20: mol_type = other DNA
gtgacgggggtgctgtgccc

SEQ ID NO: 3036 - DNA, 20 bp, synthetic construct
  source 1..20: mol_type = other DNA
ccccgtcaccagaggcctgg

SEQ ID NO: 3037 - DNA, 20 bp, synthetic construct
  source 1..20: mol_type = other DNA
tgagccccctcggtcgcccc

SEQ ID NO: 3038 - DNA, 20 bp, synthetic construct
  source 1..20: mol_type = other DNA
gggtccgggggcgaccgagg

SEQ ID NO: 3039 - DNA, 20 bp, synthetic construct
  source 1..20: mol_type = other DNA
ccgtcaccagaggcctggag

SEQ ID NO: 3040 - DNA, 20 bp, synthetic construct
  source 1..20: mol_type = other DNA
ggggtgctgtgcccaggcgg

SEQ ID NO: 3041 - DNA, 20 bp, synthetic construct
  source 1..20: mol_type = other DNA
gtgacaagtcaccctctctg

SEQ ID NO: 3042 - DNA, 20 bp, synthetic construct
  source 1..20: mol_type = other DNA
actttgagaagcagggttgg

SEQ ID NO: 3043 - DNA, 20 bp, synthetic construct
  source 1..20: mol_type = other DNA
cacactttgagaagcagggt

SEQ ID NO: 3044 - DNA, 20 bp, synthetic construct
  source 1..20: mol_type = other DNA
gagtcccctgtccccagaga

SEQ ID NO: 3045 - DNA, 20 bp, synthetic construct
  source 1..20: mol_type = other DNA
gtaatgtacacagaagagaa

SEQ ID NO: 3046 - DNA, 20 bp, synthetic construct
  source 1..20: mol_type = other DNA
gcagaggcggggctcttccc

SEQ ID NO: 3047 - DNA, 20 bp, synthetic construct
  source 1..20: mol_type = other DNA
ggagtcccctgtccccagag

SEQ ID NO: 3048 - DNA, 20 bp, synthetic construct
  source 1..20: mol_type = other DNA
aatgtacacagaagagaaag

SEQ ID NO: 3049 - DNA, 20 bp, synthetic construct
  source 1..20: mol_type = other DNA
cagggccaggggcagaggcg

SEQ ID NO: 3050 - DNA, 20 bp, synthetic construct
  source 1..20: mol_type = other DNA
tacacagaagagaaagggga

SEQ ID NO: 3051 - DNA, 20 bp, synthetic construct
  source 1..20: mol_type = other DNA
aagagccccgcctctgcccc

SEQ ID NO: 3052 - DNA, 20 bp, synthetic construct
  source 1..20: mol_type = other DNA
caaccctgcttctcaaagtg

SEQ ID NO: 3053 - DNA, 20 bp, synthetic construct
  source 1..20: mol_type = other DNA
acaaaaaaggcagaaatgag

SEQ ID NO: 3054 - DNA, 20 bp, synthetic construct
  source 1..20: mol_type = other DNA
aaaggcagaaatgagagggg

SEQ ID NO: 3055 - DNA, 20 bp, synthetic construct
  source 1..20: mol_type = other DNA
aggggaaggagggacaaaaa

SEQ ID NO: 3056 - DNA, 20 bp, synthetic construct
  source 1..20: mol_type = other DNA
ctgtctccaacagtgtgaag

SEQ ID NO: 3057 - DNA, 20 bp, synthetic construct
  source 1..20: mol_type = other DNA
cttgtctctgagtcacgctg

SEQ ID NO: 3058 - DNA, 20 bp, synthetic construct
  source 1..20: mol_type = other DNA
cttggttcagaggcaagctt

SEQ ID NO: 3059 - DNA, 20 bp, synthetic construct
  source 1..20: mol_type = other DNA
ctccaacagtgtgaagagga

SEQ ID NO: 3060 - DNA, 20 bp, synthetic construct
  source 1..20: mol_type = other DNA
ttgggagctaaaatgtctct

SEQ ID NO: 3061 - DNA, 20 bp, synthetic construct
  source 1..20: mol_type = other DNA
caacagtgtgaagaggaggg

SEQ ID NO: 3062 - DNA, 20 bp, synthetic construct
  source 1..20: mol_type = other DNA
tgtctcttggttctttgagg

SEQ ID NO: 3063 - DNA, 20 bp, synthetic construct
  source 1..20: mol_type = other DNA
tcttggttcagaggcaagct

SEQ ID NO: 3064 - DNA, 20 bp, synthetic construct
  source 1..20: mol_type = other DNA
ctcagagaagtgcacaccca

SEQ ID NO: 3065 - DNA, 20 bp, synthetic construct
  source 1..20: mol_type = other DNA
gtctcttggttctttgaggg

SEQ ID NO: 3066 - DNA, 20 bp, synthetic construct
  source 1..20: mol_type = other DNA
atgtctcttggttctttgag

SEQ ID NO: 3067 - DNA, 20 bp, synthetic construct
  source 1..20: mol_type = other DNA
agctgaaagcaaagcagcct

SEQ ID NO: 3068 - DNA, 20 bp, synthetic construct
  source 1..20: mol_type = other DNA
aatgtctcttggttctttga

SEQ ID NO: 3069 - DNA, 20 bp, synthetic construct
  source 1..20: mol_type = other DNA
aaatgtctcttggttctttg

SEQ ID NO: 3070 - DNA, 20 bp, synthetic construct
  source 1..20: mol_type = other DNA
tctttgaggggggctggcct

SEQ ID NO: 3071 - DNA, 20 bp, synthetic construct
  source 1..20: mol_type = other DNA
tatcaaaggagccttcgcgg

SEQ ID NO: 3072 - DNA, 20 bp, synthetic construct
  source 1..20: mol_type = other DNA
cggagcgccgcaaatgagag

SEQ ID NO: 3073 - DNA, 20 bp, synthetic construct
  source 1..20: mol_type = other DNA
taatatcaaaggagccttcg

SEQ ID NO: 3074 - DNA, 20 bp, synthetic construct
  source 1..20: mol_type = other DNA
catttgcggcgctccgactc

SEQ ID NO: 3075 - DNA, 20 bp, synthetic construct
  source 1..20: mol_type = other DNA
ggtggcgctttcctccgcga

SEQ ID NO: 3076 - DNA, 20 bp, synthetic construct
  source 1..20: mol_type = other DNA
aatgagagcggcgcggtgca

SEQ ID NO: 3077 - DNA, 20 bp, synthetic construct
  source 1..20: mol_type = other DNA
taagggagctcggtctgggg

SEQ ID NO: 3078 - DNA, 20 bp, synthetic construct
  source 1..20: mol_type = other DNA
ctcgcgcagccggctcgccg

SEQ ID NO: 3079 - DNA, 20 bp, synthetic construct
  source 1..20: mol_type = other DNA
cggcggcgggtgctcggagc

SEQ ID NO: 3080 - DNA, 20 bp, synthetic construct
  source 1..20: mol_type = other DNA
ggcgggtgctcggagccggg

SEQ ID NO: 3081 - DNA, 20 bp, synthetic construct
  source 1..20: mol_type = other DNA
cgggtgctcggagccgggcg

SEQ ID NO: 3082 - DNA, 20 bp, synthetic construct
  source 1..20: mol_type = other DNA
gtgctcggagccgggcgggg

SEQ ID NO: 3083 - DNA, 20 bp, synthetic construct
  source 1..20: mol_type = other DNA
ccggggccggtcccggcggg

SEQ ID NO: 3084 - DNA, 20 bp, synthetic construct
  source 1..20: mol_type = other DNA
gcgggtgctcggagccgggc

SEQ ID NO: 3085 - DNA, 20 bp, synthetic construct
  source 1..20: mol_type = other DNA
ccggtcccggcgggcggcgg

SEQ ID NO: 3086 - DNA, 20 bp, synthetic construct
  source 1..20: mol_type = other DNA
tggcgtaagagctactgcgc

SEQ ID NO: 3087 - DNA, 20 bp, synthetic construct
  source 1..20: mol_type = other DNA
cacacagagcgtaccctcgg

SEQ ID NO: 3088 - DNA, 20 bp, synthetic construct
  source 1..20: mol_type = other DNA
ccaatgttcgctctgaaagg

SEQ ID NO: 3089 - DNA, 20 bp, synthetic construct
  source 1..20: mol_type = other DNA
acacagagcgtaccctcgga

SEQ ID NO: 3090 - DNA, 20 bp, synthetic construct
  source 1..20: mol_type = other DNA
ttacctgtctgtccctccga

SEQ ID NO: 3091 - DNA, 20 bp, synthetic construct
  source 1..20: mol_type = other DNA
ggacagacaggtaattagag

SEQ ID NO: 3092 - DNA, 20 bp, synthetic construct
  source 1..20: mol_type = other DNA
ggaacaactcacattctccc

SEQ ID NO: 3093 - DNA, 20 bp, synthetic construct
  source 1..20: mol_type = other DNA
cgcagtgcggggctgcgagg

SEQ ID NO: 3094 - DNA, 20 bp, synthetic construct
  source 1..20: mol_type = other DNA
gcgcagtgcggggctgcgag

SEQ ID NO: 3095 - DNA, 20 bp, synthetic construct
  source 1..20: mol_type = other DNA
tactgcgcaggcgcagtgcg

SEQ ID NO: 3096 - DNA, 20 bp, synthetic construct
  source 1..20: mol_type = other DNA
gagggggcgtggtgcagcag

SEQ ID NO: 3097 - DNA, 20 bp, synthetic construct
  source 1..20: mol_type = other DNA
ggggcgtggcggctgagccc

SEQ ID NO: 3098 - DNA, 20 bp, synthetic construct
  source 1..20: mol_type = other DNA
agggggcgtggtgcagcagg

SEQ ID NO: 3099 - DNA, 20 bp, synthetic construct
  source 1..20: mol_type = other DNA
gctactgcgcaggcgcagtg

SEQ ID NO: 3100 - DNA, 20 bp, synthetic construct
  source 1..20: mol_type = other DNA
cgagggggcgtggtgcagca

SEQ ID NO: 3101 - DNA, 20 bp, synthetic construct
  source 1..20: mol_type = other DNA
cacctccacaagcagcgtgg

SEQ ID NO: 3102 - DNA, 20 bp, synthetic construct
  source 1..20: mol_type = other DNA
cgacacctccacaagcagcg

SEQ ID NO: 3103 - DNA, 20 bp, synthetic construct
  source 1..20: mol_type = other DNA
gccgcgtcctccgccagtgc

SEQ ID NO: 3104 - DNA, 20 bp, synthetic construct
  source 1..20: mol_type = other DNA
ggcgccccctcccgcactgg

SEQ ID NO: 3105 - DNA, 20 bp, synthetic construct
  source 1..20: mol_type = other DNA
tgtcgcctccacgctgcttg

SEQ ID NO: 3106 - DNA, 20 bp, synthetic construct
  source 1..20: mol_type = other DNA
gcggaggacgcggccgttgg

SEQ ID NO: 3107 - DNA, 20 bp, synthetic construct
  source 1..20: mol_type = other DNA
gccccctcccgcactggcgg

SEQ ID NO: 3108 - DNA, 20 bp, synthetic construct
  source 1..20: mol_type = other DNA
tcccgcactggcggaggacg

SEQ ID NO: 3109 - DNA, 20 bp, synthetic construct
  source 1..20: mol_type = other DNA
cgtcctccgccagtgcggga

SEQ ID NO: 3110 - DNA, 20 bp, synthetic construct
  source 1..20: mol_type = other DNA
gcgtcctccgccagtgcggg

SEQ ID NO: 3111 - DNA, 20 bp, synthetic construct
  source 1..20: mol_type = other DNA
ggccgcgtcctccgccagtg

SEQ ID NO: 3112 - DNA, 20 bp, synthetic construct
  source 1..20: mol_type = other DNA
cagtgcagtccccgcagccc

SEQ ID NO: 3113 - DNA, 20 bp, synthetic construct
  source 1..20: mol_type = other DNA
tgcagtccccgcagcccggg

SEQ ID NO: 3114 - DNA, 20 bp, synthetic construct
  source 1..20: mol_type = other DNA
cgcctccacgctgcttgtgg

SEQ ID NO: 3115 - DNA, 20 bp, synthetic construct
  source 1..20: mol_type = other DNA
ggcggcgccccctcccgcac

SEQ ID NO: 3116 - DNA, 20 bp, synthetic construct
  source 1..20: mol_type = other DNA
tgtttcctcaggctcggagg

SEQ ID NO: 3117 - DNA, 20 bp, synthetic construct
  source 1..20: mol_type = other DNA
ctgattgatcagcctggctc

SEQ ID NO: 3118 - DNA, 20 bp, synthetic construct
  source 1..20: mol_type = other DNA
cggctgctgagagtcacagt

SEQ ID NO: 3119 - DNA, 20 bp, synthetic construct
  source 1..20: mol_type = other DNA
cacgcgcggagctctgagag

SEQ ID NO: 3120 - DNA, 20 bp, synthetic construct
  source 1..20: mol_type = other DNA
gactctcagcagccggcttg

SEQ ID NO: 3121 - DNA, 20 bp, synthetic construct
  source 1..20: mol_type = other DNA
ggaggcgggcacaagaagct

SEQ ID NO: 3122 - DNA, 20 bp, synthetic construct
  source 1..20: mol_type = other DNA
gggcacaagaagctcggcag

SEQ ID NO: 3123 - DNA, 20 bp, synthetic construct
  source 1..20: mol_type = other DNA
agctgtttcctcaggctcgg

SEQ ID NO: 3124 - DNA, 20 bp, synthetic construct
  source 1..20: mol_type = other DNA
acagtcggtgtgcgcacgcg

SEQ ID NO: 3125 - DNA, 20 bp, synthetic construct
  source 1..20: mol_type = other DNA
gcacgcgcggagctctgaga

SEQ ID NO: 3126 - DNA, 20 bp, synthetic construct
  source 1..20: mol_type = other DNA
tcagcagccggcttgcggag

SEQ ID NO: 3127 - DNA, 20 bp, synthetic construct
  source 1..20: mol_type = other DNA
aagaagctcggcagaggacg

SEQ ID NO: 3128 - DNA, 20 bp, synthetic construct
  source 1..20: mol_type = other DNA
cgcacgcgcggagctctgag

SEQ ID NO: 3129 - DNA, 20 bp, synthetic construct
  source 1..20: mol_type = other DNA
tgtgcccgcctccgagcctg

SEQ ID NO: 3130 - DNA, 20 bp, synthetic construct
  source 1..20: mol_type = other DNA
gcctggctcaggcttggggc

SEQ ID NO: 3131 - DNA, 20 bp, synthetic construct
  source 1..20: mol_type = other DNA
tccaaactctgcgctccccc

SEQ ID NO: 3132 - DNA, 20 bp, synthetic construct
  source 1..20: mol_type = other DNA
ttcctcgctcaactcgcaag

SEQ ID NO: 3133 - DNA, 20 bp, synthetic construct
  source 1..20: mol_type = other DNA
aagtcttcgagaagcttcag

SEQ ID NO: 3134 - DNA, 20 bp, synthetic construct
  source 1..20: mol_type = other DNA
ctcgctcaactcgcaagagg

SEQ ID NO: 3135 - DNA, 20 bp, synthetic construct
  source 1..20: mol_type = other DNA
tcttcgagaagcttcagagg

SEQ ID NO: 3136 - DNA, 20 bp, synthetic construct
  source 1..20: mol_type = other DNA
cgcctcttgcgagttgagcg

SEQ ID NO: 3137 - DNA, 20 bp, synthetic construct
  source 1..20: mol_type = other DNA
tcgctcaactcgcaagaggc

SEQ ID NO: 3138 - DNA, 20 bp, synthetic construct
  source 1..20: mol_type = other DNA
tgcagcggcgcatctggagc

SEQ ID NO: 3139 - DNA, 20 bp, synthetic construct
  source 1..20: mol_type = other DNA
gagaagcttcagaggaggga

SEQ ID NO: 3140 - DNA, 20 bp, synthetic construct
  source 1..20: mol_type = other DNA
cttcgagaagcttcagagga

SEQ ID NO: 3141 - DNA, 20 bp, synthetic construct
  source 1..20: mol_type = other DNA
agaagcttcagaggagggaa

SEQ ID NO: 3142 - DNA, 20 bp, synthetic construct
  source 1..20: mol_type = other DNA
agttggccgcgcgcgcccgg

SEQ ID NO: 3143 - DNA, 20 bp, synthetic construct
  source 1..20: mol_type = other DNA
gagttggccgcgcgcgcccg

SEQ ID NO: 3144 - DNA, 20 bp, synthetic construct
  source 1..20: mol_type = other DNA
gaagcttcagaggagggaag

SEQ ID NO: 3145 - DNA, 20 bp, synthetic construct
  source 1..20: mol_type = other DNA
aagcttcagaggagggaagg

SEQ ID NO: 3146 - DNA, 20 bp, synthetic construct
  source 1..20: mol_type = other DNA
gtcgcgggtcggctttgcag

SEQ ID NO: 3147 - DNA, 20 bp, synthetic construct
  source 1..20: mol_type = other DNA
cgtgtttacgcaggagcgcg

SEQ ID NO: 3148 - DNA, 20 bp, synthetic construct
  source 1..20: mol_type = other DNA
cgcgctcctgcgtaaacacg

SEQ ID NO: 3149 - DNA, 20 bp, synthetic construct
  source 1..20: mol_type = other DNA
gacccgcgacaccgccactc

SEQ ID NO: 3150 - DNA, 20 bp, synthetic construct
  source 1..20: mol_type = other DNA
ccgcgacaccgccactccgg

SEQ ID NO: 3151 - DNA, 20 bp, synthetic construct
  source 1..20: mol_type = other DNA
gtgccaggtcgacctcctga

SEQ ID NO: 3152 - DNA, 20 bp, synthetic construct
  source 1..20: mol_type = other DNA
acacccgggccggtaacctc

SEQ ID NO: 3153 - DNA, 20 bp, synthetic construct
  source 1..20: mol_type = other DNA
cgcgtgtttacgcaggagcg

SEQ ID NO: 3154 - DNA, 20 bp, synthetic construct
  source 1..20: mol_type = other DNA
cgggccggtaacctccggag

SEQ ID NO: 3155 - DNA, 20 bp, synthetic construct
  source 1..20: mol_type = other DNA
ccggacattggtccctcagg

SEQ ID NO: 3156 - DNA, 20 bp, synthetic construct
  source 1..20: mol_type = other DNA
ggtccctcaggaggtcgacc

SEQ ID NO: 3157 - DNA, 20 bp, synthetic construct
  source 1..20: mol_type = other DNA
agggaaccgcgtgtttacgc

SEQ ID NO: 3158 - DNA, 20 bp, synthetic construct
  source 1..20: mol_type = other DNA
gccggtaacctccggagtgg

SEQ ID NO: 3159 - DNA, 20 bp, synthetic construct
  source 1..20: mol_type = other DNA
ggagtggcggtgtcgcgggt

SEQ ID NO: 3160 - DNA, 20 bp, synthetic construct
  source 1..20: mol_type = other DNA
ggaaacccgaacacccgggc

SEQ ID NO: 3161 - DNA, 20 bp, synthetic construct
  source 1..20: mol_type = other DNA
aaaacctcacacggagtaag

SEQ ID NO: 3162 - DNA, 20 bp, synthetic construct
  source 1..20: mol_type = other DNA
aaatgaatgaggccagacct

SEQ ID NO: 3163 - DNA, 20 bp, synthetic construct
  source 1..20: mol_type = other DNA
gctgccccttactccgtgtg

SEQ ID NO: 3164 - DNA, 20 bp, synthetic construct
  source 1..20: mol_type = other DNA
acctaggctaagcgcgtccg

SEQ ID NO: 3165 - DNA, 20 bp, synthetic construct
  source 1..20: mol_type = other DNA
aatctgcccaaaacctcaca

SEQ ID NO: 3166 - DNA, 20 bp, synthetic construct
  source 1..20: mol_type = other DNA
tcgccccgaggctcagccgt

SEQ ID NO: 3167 - DNA, 20 bp, synthetic construct
  source 1..20: mol_type = other DNA
ccgcgcgagtgaaatgaatg

SEQ ID NO: 3168 - DNA, 20 bp, synthetic construct
  source 1..20: mol_type = other DNA
gtccccacggctgagcctcg

SEQ ID NO: 3169 - DNA, 20 bp, synthetic construct
  source 1..20: mol_type = other DNA
agcgccgggaccagaacctt

SEQ ID NO: 3170 - DNA, 20 bp, synthetic construct
  source 1..20: mol_type = other DNA
aagcgcgtccgcggtcccca

SEQ ID NO: 3171 - DNA, 20 bp, synthetic construct
  source 1..20: mol_type = other DNA
gtcgccccgaggctcagccg

SEQ ID NO: 3172 - DNA, 20 bp, synthetic construct
  source 1..20: mol_type = other DNA
ggacgcgcttagcctaggtc

SEQ ID NO: 3173 - DNA, 20 bp, synthetic construct
  source 1..20: mol_type = other DNA
gcggcctaaggttctggtcc

SEQ ID NO: 3174 - DNA, 20 bp, synthetic construct
  source 1..20: mol_type = other DNA
gcgcgggcttctgggccagg

SEQ ID NO: 3175 - DNA, 20 bp, synthetic construct
  source 1..20: mol_type = other DNA
aggctcagccgtggggaccg

SEQ ID NO: 3176 - DNA, 20 bp, synthetic construct
  source 1..20: mol_type = other DNA
gagacccccgagacccccgg

SEQ ID NO: 3177 - DNA, 20 bp, synthetic construct
  source 1..20: mol_type = other DNA
agcccagacgccgcagccag

SEQ ID NO: 3178 - DNA, 20 bp, synthetic construct
  source 1..20: mol_type = other DNA
cctgagacccccgagacccc

SEQ ID NO: 3179 - DNA, 20 bp, synthetic construct
  source 1..20: mol_type = other DNA
agacaaagagcccccgcccc

SEQ ID NO: 3180 - DNA, 20 bp, synthetic construct
  source 1..20: mol_type = other DNA
cagcccagacgccgcagcca

SEQ ID NO: 3181 - DNA, 20 bp, synthetic construct
  source 1..20: mol_type = other DNA
ccagacgccgcagccagggg

SEQ ID NO: 3182 - DNA, 20 bp, synthetic construct
  source 1..20: mol_type = other DNA
gcgccgcctcccaccgccgg

SEQ ID NO: 3183 - DNA, 20 bp, synthetic construct
  source 1..20: mol_type = other DNA
ccgagacccccggcggtggg

SEQ ID NO: 3184 - DNA, 20 bp, synthetic construct
  source 1..20: mol_type = other DNA
agagcccccgcccctggctg

SEQ ID NO: 3185 - DNA, 20 bp, synthetic construct
  source 1..20: mol_type = other DNA
ggcgccgcctcccaccgccg

SEQ ID NO: 3186 - DNA, 20 bp, synthetic construct
  source 1..20: mol_type = other DNA
cccaccgccgggggtctcgg

SEQ ID NO: 3187 - DNA, 20 bp, synthetic construct
  source 1..20: mol_type = other DNA
cagacgccgcagccaggggc

SEQ ID NO: 3188 - DNA, 20 bp, synthetic construct
  source 1..20: mol_type = other DNA
ggtgggaggcggcgccaggg

SEQ ID NO: 3189 - DNA, 20 bp, synthetic construct
  source 1..20: mol_type = other DNA
acggtgcgcggggcctgcgg

SEQ ID NO: 3190 - DNA, 20 bp, synthetic construct
  source 1..20: mol_type = other DNA
tggctgcggcgtctgggctg

SEQ ID NO: 3191 - DNA, 20 bp, synthetic construct
  source 1..20: mol_type = other DNA
gacggatccacagctggatg

SEQ ID NO: 3192 - DNA, 20 bp, synthetic construct
  source 1..20: mol_type = other DNA
aggacggatccacagctgga

SEQ ID NO: 3193 - DNA, 20 bp, synthetic construct
  source 1..20: mol_type = other DNA
tcctgggctggattcagccg

SEQ ID NO: 3194 - DNA, 20 bp, synthetic construct
  source 1..20: mol_type = other DNA
gtgacggagagacagcaggc

SEQ ID NO: 3195 - DNA, 20 bp, synthetic construct
  source 1..20: mol_type = other DNA
cggctgaatccagcccagga

SEQ ID NO: 3196 - DNA, 20 bp, synthetic construct
  source 1..20: mol_type = other DNA
ccgggacacgcatcccagga

SEQ ID NO: 3197 - DNA, 20 bp, synthetic construct
  source 1..20: mol_type = other DNA
caggccgggacacgcatccc

SEQ ID NO: 3198 - DNA, 20 bp, synthetic construct
  source 1..20: mol_type = other DNA
ccggctgaatccagcccagg

SEQ ID NO: 3199 - DNA, 20 bp, synthetic construct
  source 1..20: mol_type = other DNA
ctgaatccagcccaggaggg

SEQ ID NO: 3200 - DNA, 20 bp, synthetic construct
  source 1..20: mol_type = other DNA
ttctgtgacggagagacagc

SEQ ID NO: 3201 - DNA, 20 bp, synthetic construct
  source 1..20: mol_type = other DNA
gtcgggattcccgctgccac

SEQ ID NO: 3202 - DNA, 20 bp, synthetic construct
  source 1..20: mol_type = other DNA
caggcgggccggaagcctgg

SEQ ID NO: 3203 - DNA, 20 bp, synthetic construct
  source 1..20: mol_type = other DNA
cagccttccccatccagctg

SEQ ID NO: 3204 - DNA, 20 bp, synthetic construct
  source 1..20: mol_type = other DNA
atggggaaggctgcgccagg

SEQ ID NO: 3205 - DNA, 20 bp, synthetic construct
  source 1..20: mol_type = other DNA
gatccacagctggatgggga

SEQ ID NO: 3206 - DNA, 20 bp, synthetic construct
  source 1..20: mol_type = other DNA
ggggccgggctgttgtgggt

SEQ ID NO: 3207 - DNA, 20 bp, synthetic construct
  source 1..20: mol_type = other DNA
caccggggaaagttccggga

SEQ ID NO: 3208 - DNA, 20 bp, synthetic construct
  source 1..20: mol_type = other DNA
cggggccgggctgttgtggg

SEQ ID NO: 3209 - DNA, 20 bp, synthetic construct
  source 1..20: mol_type = other DNA
gcccttcccggaactttccc

SEQ ID NO: 3210 - DNA, 20 bp, synthetic construct
  source 1..20: mol_type = other DNA
ctgggcgggctgccgtcggg

SEQ ID NO: 3211 - DNA, 20 bp, synthetic construct
  source 1..20: mol_type = other DNA
ggggccgggctgtaggcggt

SEQ ID NO: 3212 - DNA, 20 bp, synthetic construct
  source 1..20: mol_type = other DNA
ggggaaagttccgggaaggg

SEQ ID NO: 3213 - DNA, 20 bp, synthetic construct
  source 1..20: mol_type = other DNA
accggggaaagttccgggaa

SEQ ID NO: 3214 - DNA, 20 bp, synthetic construct
  source 1..20: mol_type = other DNA
gggtggggccgggcgagaag

SEQ ID NO: 3215 - DNA, 20 bp, synthetic construct
  source 1..20: mol_type = other DNA
ccccgcgcagccccgcccga

SEQ ID NO: 3216 - DNA, 20 bp, synthetic construct
  source 1..20: mol_type = other DNA
gggcggggccgggctgtagg

SEQ ID NO: 3217 - DNA, 20 bp, synthetic construct
  source 1..20: mol_type = other DNA
ccgtcgggcggggctgcgcg

SEQ ID NO: 3218 - DNA, 20 bp, synthetic construct
  source 1..20: mol_type = other DNA
ggaagggcggggctgcgcgg

SEQ ID NO: 3219 - DNA, 20 bp, synthetic construct
  source 1..20: mol_type = other DNA
gccgggctgtaggcggtggg

SEQ ID NO: 3220 - DNA, 20 bp, synthetic construct
  source 1..20: mol_type = other DNA
gggcggggccgggctgttgt

SEQ ID NO: 3221 - DNA, 20 bp, synthetic construct
  source 1..20: mol_type = other DNA
atgacgaacgacaaggccag

SEQ ID NO: 3222 - DNA, 20 bp, synthetic construct
  source 1..20: mol_type = other DNA
catgacgaacgacaaggcca

SEQ ID NO: 3223 - DNA, 20 bp, synthetic construct
  source 1..20: mol_type = other DNA
tatcggcaagaacacaagac

SEQ ID NO: 3224 - DNA, 20 bp, synthetic construct
  source 1..20: mol_type = other DNA
atcccacatgacgaacgaca

SEQ ID NO: 3225 - DNA, 20 bp, synthetic construct
  source 1..20: mol_type = other DNA
gagctgtctacggagagtga

SEQ ID NO: 3226 - DNA, 20 bp, synthetic construct
  source 1..20: mol_type = other DNA
aggggcaagcaaaaagagga

SEQ ID NO: 3227 - DNA, 20 bp, synthetic construct
  source 1..20: mol_type = other DNA
aagactggttatgtgaaagg

SEQ ID NO: 3228 - DNA, 20 bp, synthetic construct
  source 1..20: mol_type = other DNA
gtcgttcgtcatgtgggata

SEQ ID NO: 3229 - DNA, 20 bp, synthetic construct
  source 1..20: mol_type = other DNA
actgcctctactggccaagt

SEQ ID NO: 3230 - DNA, 20 bp, synthetic construct
  source 1..20: mol_type = other DNA
atgtgggatagggcttccgc

SEQ ID NO: 3231 - DNA, 20 bp, synthetic construct
  source 1..20: mol_type = other DNA
tgctccgacttggccagtag

SEQ ID NO: 3232 - DNA, 20 bp, synthetic construct
  source 1..20: mol_type = other DNA
aggaggaggcgtcattcctg

SEQ ID NO: 3233 - DNA, 20 bp, synthetic construct
  source 1..20: mol_type = other DNA
ggccaggggcaagcaaaaag

SEQ ID NO: 3234 - DNA, 20 bp, synthetic construct
  source 1..20: mol_type = other DNA
cttggccagtagaggcagtg

SEQ ID NO: 3235 - DNA, 20 bp, synthetic construct
  source 1..20: mol_type = other DNA
actggttatgtgaaaggagg

SEQ ID NO: 3236 - DNA, 20 bp, synthetic construct
  source 1..20: mol_type = other DNA
agagcctagacagacaccag

SEQ ID NO: 3237 - DNA, 20 bp, synthetic construct
  source 1..20: mol_type = other DNA
gcggagccaccctggaacta

SEQ ID NO: 3238 - DNA, 20 bp, synthetic construct
  source 1..20: mol_type = other DNA
tggtgtctgtctaggctctg

SEQ ID NO: 3239 - DNA, 20 bp, synthetic construct
  source 1..20: mol_type = other DNA
gagccaccctggaactaggg

SEQ ID NO: 3240 - DNA, 20 bp, synthetic construct
  source 1..20: mol_type = other DNA
ctggacaggtgagtcagtga

SEQ ID NO: 3241 - DNA, 20 bp, synthetic construct
  source 1..20: mol_type = other DNA
cctcaccccagcccagtagg

SEQ ID NO: 3242 - DNA, 20 bp, synthetic construct
  source 1..20: mol_type = other DNA
gacaggtgagtcagtgaggg

SEQ ID NO: 3243 - DNA, 20 bp, synthetic construct
  source 1..20: mol_type = other DNA
cagtgagggcggcagcagga

SEQ ID NO: 3244 - DNA, 20 bp, synthetic construct
  source 1..20: mol_type = other DNA
agccctcaccccagcccagt

SEQ ID NO: 3245 - DNA, 20 bp, synthetic construct
  source 1..20: mol_type = other DNA
gctggacaggtgagtcagtg

SEQ ID NO: 3246 - DNA, 20 bp, synthetic construct
  source 1..20: mol_type = other DNA
agtgagggcggcagcaggaa

SEQ ID NO: 3247 - DNA, 20 bp, synthetic construct
  source 1..20: mol_type = other DNA
gagtcagtgagggcggcagc

SEQ ID NO: 3248 - DNA, 20 bp, synthetic construct
  source 1..20: mol_type = other DNA
gtgagggcggcagcaggaag

SEQ ID NO: 3249 - DNA, 20 bp, synthetic construct
  source 1..20: mol_type = other DNA
ggcagcaggaaggggctggg

SEQ ID NO: 3250 - DNA, 20 bp, synthetic construct
  source 1..20: mol_type = other DNA
accccagcccagtaggaggc

SEQ ID NO: 3251 - DNA, 20 bp, synthetic construct
  source 1..20: mol_type = other DNA
gcactggcggctattcttag

SEQ ID NO: 3252 - DNA, 20 bp, synthetic construct
  source 1..20: mol_type = other DNA
gttccctattctatgcctgg

SEQ ID NO: 3253 - DNA, 20 bp, synthetic construct
  source 1..20: mol_type = other DNA
cttgccaaaataagaggcac

SEQ ID NO: 3254 - DNA, 20 bp, synthetic construct
  source 1..20: mol_type = other DNA
ggcacaggacaacagctgtc

SEQ ID NO: 3255 - DNA, 20 bp, synthetic construct
  source 1..20: mol_type = other DNA
caggtgattggcccagagag

SEQ ID NO: 3256 - DNA, 20 bp, synthetic construct
  source 1..20: mol_type = other DNA
acaggtgattggcccagaga

SEQ ID NO: 3257 - DNA, 20 bp, synthetic construct
  source 1..20: mol_type = other DNA
tgcctccttgccaaaataag

SEQ ID NO: 3258 - DNA, 20 bp, synthetic construct
  source 1..20: mol_type = other DNA
tgtcctcgctccctttcctg

SEQ ID NO: 3259 - DNA, 20 bp, synthetic construct
  source 1..20: mol_type = other DNA
aacaggtgattggcccagag

SEQ ID NO: 3260 - DNA, 20 bp, synthetic construct
  source 1..20: mol_type = other DNA
gtgattggcccagagagggg

SEQ ID NO: 3261 - DNA, 20 bp, synthetic construct
  source 1..20: mol_type = other DNA
acctgttgagtctggagcac

SEQ ID NO: 3262 - DNA, 20 bp, synthetic construct
  source 1..20: mol_type = other DNA
tgttgagtctggagcactgg

SEQ ID NO: 3263 - DNA, 20 bp, synthetic construct
  source 1..20: mol_type = other DNA
tgaccccaggccccaggaaa

SEQ ID NO: 3264 - DNA, 20 bp, synthetic construct
  source 1..20: mol_type = other DNA
aatggggcctgactggcttg

SEQ ID NO: 3265 - DNA, 20 bp, synthetic construct
  source 1..20: mol_type = other DNA
gtgaccccaggccccaggaa

SEQ ID NO: 3266 - DNA, 20 bp, synthetic construct
  source 1..20: mol_type = other DNA
ggacccgacttcaccgcgga

SEQ ID NO: 3267 - DNA, 20 bp, synthetic construct
  source 1..20: mol_type = other DNA
tgaagtcgggtcccttgcag

SEQ ID NO: 3268 - DNA, 20 bp, synthetic construct
  source 1..20: mol_type = other DNA
gtgaagtcgggtcccttgca

SEQ ID NO: 3269 - DNA, 20 bp, synthetic construct
  source 1..20: mol_type = other DNA
caagggacccgacttcaccg

SEQ ID NO: 3270 - DNA, 20 bp, synthetic construct
  source 1..20: mol_type = other DNA
gaccgcgcctgagctaccca

SEQ ID NO: 3271 - DNA, 20 bp, synthetic construct
  source 1..20: mol_type = other DNA
gggacccgacttcaccgcgg

SEQ ID NO: 3272 - DNA, 20 bp, synthetic construct
  source 1..20: mol_type = other DNA
agcgaccctatcatcctcta

SEQ ID NO: 3273 - DNA, 20 bp, synthetic construct
  source 1..20: mol_type = other DNA
tcaggcgcggtcccctgcaa

SEQ ID NO: 3274 - DNA, 20 bp, synthetic construct
  source 1..20: mol_type = other DNA
ggcggggcttcgcttgcggt

SEQ ID NO: 3275 - DNA, 20 bp, synthetic construct
  source 1..20: mol_type = other DNA
tgcaaccatagaggatgata

SEQ ID NO: 3276 - DNA, 20 bp, synthetic construct
  source 1..20: mol_type = other DNA
ggccttgggtagctcaggcg

SEQ ID NO: 3277 - DNA, 20 bp, synthetic construct
  source 1..20: mol_type = other DNA
tactgggccttgggtagctc

SEQ ID NO: 3278 - DNA, 20 bp, synthetic construct
  source 1..20: mol_type = other DNA
gggcggggcttcgcttgcgg

SEQ ID NO: 3279 - DNA, 20 bp, synthetic construct
  source 1..20: mol_type = other DNA
caggggcggggcttcgcttg

SEQ ID NO: 3280 - DNA, 20 bp, synthetic construct
  source 1..20: mol_type = other DNA
cccgcccctgcccctcggga

SEQ ID NO: 3281 - DNA, 20 bp, synthetic construct
  source 1..20: mol_type = other DNA
agtatatcaaggagcagcgt

SEQ ID NO: 3282 - DNA, 20 bp, synthetic construct
  source 1..20: mol_type = other DNA
tgggctggcataggtcaatg

SEQ ID NO: 3283 - DNA, 20 bp, synthetic construct
  source 1..20: mol_type = other DNA
gtatatcaaggagcagcgtg

SEQ ID NO: 3284 - DNA, 20 bp, synthetic construct
  source 1..20: mol_type = other DNA
tgatatactgaatacagtcc

SEQ ID NO: 3285 - DNA, 20 bp, synthetic construct
  source 1..20: mol_type = other DNA
cttgcctcttgactacctgg

SEQ ID NO: 3286 - DNA, 20 bp, synthetic construct
  source 1..20: mol_type = other DNA
gtatcagattgctgtaacca

SEQ ID NO: 3287 - DNA, 20 bp, synthetic construct
  source 1..20: mol_type = other DNA
ggactgtattcagtatatca

SEQ ID NO: 3288 - DNA, 20 bp, synthetic construct
  source 1..20: mol_type = other DNA
cagtatatcaaggagcagcg

SEQ ID NO: 3289 - DNA, 20 bp, synthetic construct
  source 1..20: mol_type = other DNA
gaacatggatgccattattg

SEQ ID NO: 3290 - DNA, 20 bp, synthetic construct
  source 1..20: mol_type = other DNA
gcggccgtactgagtaaagt

SEQ ID NO: 3291 - DNA, 20 bp, synthetic construct
  source 1..20: mol_type = other DNA
attgtggactcggagaagac

SEQ ID NO: 3292 - DNA, 20 bp, synthetic construct
  source 1..20: mol_type = other DNA
caggtagtcaagaggcaaga

SEQ ID NO: 3293 - DNA, 20 bp, synthetic construct
  source 1..20: mol_type = other DNA
gctggcataggtcaatgagg

SEQ ID NO: 3294 - DNA, 20 bp, synthetic construct
  source 1..20: mol_type = other DNA
ggactcggagaagacaggcc

SEQ ID NO: 3295 - DNA, 20 bp, synthetic construct
  source 1..20: mol_type = other DNA
tggactcggagaagacaggc

SEQ ID NO: 3296 - DNA, 20 bp, synthetic construct
  source 1..20: mol_type = other DNA
tcgcggcgtccagaggaggg

SEQ ID NO: 3297 - DNA, 20 bp, synthetic construct
  source 1..20: mol_type = other DNA
cctcctctggacgccgcgag

SEQ ID NO: 3298 - DNA, 20 bp, synthetic construct
  source 1..20: mol_type = other DNA
ccactcgcggcgtccagagg

SEQ ID NO: 3299 - DNA, 20 bp, synthetic construct
  source 1..20: mol_type = other DNA
tcgcagctctcttccactcg

SEQ ID NO: 3300 - DNA, 20 bp, synthetic construct
  source 1..20: mol_type = other DNA
ccgcagctccgtgcactcgg

SEQ ID NO: 3301 - DNA, 20 bp, synthetic construct
  source 1..20: mol_type = other DNA
cactcgcggcgtccagagga

SEQ ID NO: 3302 - DNA, 20 bp, synthetic construct
  source 1..20: mol_type = other DNA
ggagactgagcccctccgag

SEQ ID NO: 3303 - DNA, 20 bp, synthetic construct
  source 1..20: mol_type = other DNA
ccgggcggctcctctcggag

SEQ ID NO: 3304 - DNA, 20 bp, synthetic construct
  source 1..20: mol_type = other DNA
gagaagccgtactttgggca

SEQ ID NO: 3305 - DNA, 20 bp, synthetic construct
  source 1..20: mol_type = other DNA
tgagaagccgtactttgggc

SEQ ID NO: 3306 - DNA, 20 bp, synthetic construct
  source 1..20: mol_type = other DNA
gccgggcggctcctctcgga

SEQ ID NO: 3307 - DNA, 20 bp, synthetic construct
  source 1..20: mol_type = other DNA
cctccaccctgcccaaagta

SEQ ID NO: 3308 - DNA, 20 bp, synthetic construct
  source 1..20: mol_type = other DNA
ggccgggcggctcctctcgg

SEQ ID NO: 3309 - DNA, 20 bp, synthetic construct
  source 1..20: mol_type = other DNA
gggcagggtggagggcccgg

SEQ ID NO: 3310 - DNA, 20 bp, synthetic construct
  source 1..20: mol_type = other DNA
aagccgtactttgggcaggg

SEQ ID NO: 3311 - DNA, 20 bp, synthetic construct
  source 1..20: mol_type = other DNA
cactgcgtcggccaatcagg

SEQ ID NO: 3312 - DNA, 20 bp, synthetic construct
  source 1..20: mol_type = other DNA
ggcggaggcgccgtggacag

SEQ ID NO: 3313 - DNA, 20 bp, synthetic construct
  source 1..20: mol_type = other DNA
tgattggccgacgcagtggc

SEQ ID NO: 3314 - DNA, 20 bp, synthetic construct
  source 1..20: mol_type = other DNA
gtggcgggaagcgagaaaga

SEQ ID NO: 3315 - DNA, 20 bp, synthetic construct
  source 1..20: mol_type = other DNA
ctcctgattggccgacgcag

SEQ ID NO: 3316 - DNA, 20 bp, synthetic construct
  source 1..20: mol_type = other DNA
aggcgccgtggacagaggcg

SEQ ID NO: 3317 - DNA, 20 bp, synthetic construct
  source 1..20: mol_type = other DNA
cgggaagcgagaaagagggt

SEQ ID NO: 3318 - DNA, 20 bp, synthetic construct
  source 1..20: mol_type = other DNA
ggcgccgtggacagaggcgg

SEQ ID NO: 3319 - DNA, 20 bp, synthetic construct
  source 1..20: mol_type = other DNA
cccactaggcggaggcgccg

SEQ ID NO: 3320 - DNA, 20 bp, synthetic construct
  source 1..20: mol_type = other DNA
agtggcgggaagcgagaaag

SEQ ID NO: 3321 - DNA, 20 bp, synthetic construct
  source 1..20: mol_type = other DNA
gcgtcggccaatcaggaggc

SEQ ID NO: 3322 - DNA, 20 bp, synthetic construct
  source 1..20: mol_type = other DNA
ggcgcccccgcctctgtcca

SEQ ID NO: 3323 - DNA, 20 bp, synthetic construct
  source 1..20: mol_type = other DNA
ggaggcgccgtggacagagg

SEQ ID NO: 3324 - DNA, 20 bp, synthetic construct
  source 1..20: mol_type = other DNA
ctgattggccgacgcagtgg

SEQ ID NO: 3325 - DNA, 20 bp, synthetic construct
  source 1..20: mol_type = other DNA
gcgggaagcgagaaagaggg

SEQ ID NO: 3326 - DNA, 20 bp, synthetic construct
  source 1..20: mol_type = other DNA
actaatccaatagccgcgga

SEQ ID NO: 3327 - DNA, 20 bp, synthetic construct
  source 1..20: mol_type = other DNA
ggccactaatccaatagccg

SEQ ID NO: 3328 - DNA, 20 bp, synthetic construct
  source 1..20: mol_type = other DNA
tggtggcctcgagaaggtgg

SEQ ID NO: 3329 - DNA, 20 bp, synthetic construct
  source 1..20: mol_type = other DNA
agctggtggcctcgagaagg

SEQ ID NO: 3330 - DNA, 20 bp, synthetic construct
  source 1..20: mol_type = other DNA
gccagctggtggcctcgaga

SEQ ID NO: 3331 - DNA, 20 bp, synthetic construct
  source 1..20: mol_type = other DNA
accttctcgaggccaccagc

SEQ ID NO: 3332 - DNA, 20 bp, synthetic construct
  source 1..20: mol_type = other DNA
ccggcgccgccaccttctcg

SEQ ID NO: 3333 - DNA, 20 bp, synthetic construct
  source 1..20: mol_type = other DNA
ggcagcggcccgagctggga

SEQ ID NO: 3334 - DNA, 20 bp, synthetic construct
  source 1..20: mol_type = other DNA
tcccccaccatcccgcgccc

SEQ ID NO: 3335 - DNA, 20 bp, synthetic construct
  source 1..20: mol_type = other DNA
ttccctctcccgccagctgg

SEQ ID NO: 3336 - DNA, 20 bp, synthetic construct
  source 1..20: mol_type = other DNA
ttctcgaggccaccagctgg

SEQ ID NO: 3337 - DNA, 20 bp, synthetic construct
  source 1..20: mol_type = other DNA
cctcgagaaggtggcggcgc

SEQ ID NO: 3338 - DNA, 20 bp, synthetic construct
  source 1..20: mol_type = other DNA
gccggggcgcgggatggtgg

SEQ ID NO: 3339 - DNA, 20 bp, synthetic construct
  source 1..20: mol_type = other DNA
gtcccagctcgggccgctgc

SEQ ID NO: 3340 - DNA, 20 bp, synthetic construct
  source 1..20: mol_type = other DNA
gaaggtggcggcgccggcag

SEQ ID NO: 3341 - DNA, 20 bp, synthetic construct
  source 1..20: mol_type = other DNA
gggacgcgcggctcagctcg

SEQ ID NO: 3342 - DNA, 20 bp, synthetic construct
  source 1..20: mol_type = other DNA
tcccgagcccagcctctccg

SEQ ID NO: 3343 - DNA, 20 bp, synthetic construct
  source 1..20: mol_type = other DNA
cgggacgcgcggctcagctc

SEQ ID NO: 3344 - DNA, 20 bp, synthetic construct
  source 1..20: mol_type = other DNA
agctcggggaggcgcaaagg

SEQ ID NO: 3345 - DNA, 20 bp, synthetic construct
  source 1..20: mol_type = other DNA
gggaggcgcaaaggcggacg

SEQ ID NO: 3346 - DNA, 20 bp, synthetic construct
  source 1..20: mol_type = other DNA
gaggctgggctcgggacgcg

SEQ ID NO: 3347 - DNA, 20 bp, synthetic construct
  source 1..20: mol_type = other DNA
cccgacccacgccgcgccgc

SEQ ID NO: 3348 - DNA, 20 bp, synthetic construct
  source 1..20: mol_type = other DNA
acgcgcggctcagctcgggg

SEQ ID NO: 3349 - DNA, 20 bp, synthetic construct
  source 1..20: mol_type = other DNA
gggacccggcggcgcggcgt

SEQ ID NO: 3350 - DNA, 20 bp, synthetic construct
  source 1..20: mol_type = other DNA
cgggtccctcctccccggag

SEQ ID NO: 3351 - DNA, 20 bp, synthetic construct
  source 1..20: mol_type = other DNA
gcaaaggcggacggggcgtg

SEQ ID NO: 3352 - DNA, 20 bp, synthetic construct
  source 1..20: mol_type = other DNA
tccccggagaggctgggctc

SEQ ID NO: 3353 - DNA, 20 bp, synthetic construct
  source 1..20: mol_type = other DNA
cggtccccccgccccctccg

SEQ ID NO: 3354 - DNA, 20 bp, synthetic construct
  source 1..20: mol_type = other DNA
ggaggaggtggccgcggagg

SEQ ID NO: 3355 - DNA, 20 bp, synthetic construct
  source 1..20: mol_type = other DNA
caaaggcggacggggcgtgc

SEQ ID NO: 3356 - DNA, 20 bp, synthetic construct
  source 1..20: mol_type = other DNA
cctcatggcgtacacacccc

SEQ ID NO: 3357 - DNA, 20 bp, synthetic construct
  source 1..20: mol_type = other DNA
atcagagcgcccccttacaa

SEQ ID NO: 3358 - DNA, 20 bp, synthetic construct
  source 1..20: mol_type = other DNA
acacccccggcgcaccacgt

SEQ ID NO: 3359 - DNA, 20 bp, synthetic construct
  source 1..20: mol_type = other DNA
ggggtgtgtacgccatgagg

SEQ ID NO: 3360 - DNA, 20 bp, synthetic construct
  source 1..20: mol_type = other DNA
ctgattggtcgataaggtgg

SEQ ID NO: 3361 - DNA, 20 bp, synthetic construct
  source 1..20: mol_type = other DNA
tctgattggtcgataaggtg

SEQ ID NO: 3362 - DNA, 20 bp, synthetic construct
  source 1..20: mol_type = other DNA
gggggtgtgtacgccatgag

SEQ ID NO: 3363 - DNA, 20 bp, synthetic construct
  source 1..20: mol_type = other DNA
gagcgcccccttacaaaggc

SEQ ID NO: 3364 - DNA, 20 bp, synthetic construct
  source 1..20: mol_type = other DNA
tgctgccggcctttgtaagg

SEQ ID NO: 3365 - DNA, 20 bp, synthetic construct
  source 1..20: mol_type = other DNA
cacacccccggcgcaccacg

SEQ ID NO: 3366 - DNA, 20 bp, synthetic construct
  source 1..20: mol_type = other DNA
actgctgccggcctttgtaa

SEQ ID NO: 3367 - DNA, 20 bp, synthetic construct
  source 1..20: mol_type = other DNA
caccacgtgggcgtgaggcg

SEQ ID NO: 3368 - DNA, 20 bp, synthetic construct
  source 1..20: mol_type = other DNA
ggcgtgaggcgaggaaggag

SEQ ID NO: 3369 - DNA, 20 bp, synthetic construct
  source 1..20: mol_type = other DNA
acgtgggcgtgaggcgagga

SEQ ID NO: 3370 - DNA, 20 bp, synthetic construct
  source 1..20: mol_type = other DNA
tgggcgtgaggcgaggaagg

SEQ ID NO: 3371 - DNA, 20 bp, synthetic construct
  source 1..20: mol_type = other DNA
taagaatggtggtaagtccc

SEQ ID NO: 3372 - DNA, 20 bp, synthetic construct
  source 1..20: mol_type = other DNA
ccattaggagatatcaatgt

SEQ ID NO: 3373 - DNA, 20 bp, synthetic construct
  source 1..20: mol_type = other DNA
ttaccaccattcttactcta

SEQ ID NO: 3374 - DNA, 20 bp, synthetic construct
  source 1..20: mol_type = other DNA
aagaatggtggtaagtccca

SEQ ID NO: 3375 - DNA, 20 bp, synthetic construct
  source 1..20: mol_type = other DNA
agaccctagagtaagaatgg

SEQ ID NO: 3376 - DNA, 20 bp, synthetic construct
  source 1..20: mol_type = other DNA
agaatgtatgttccgttatc

SEQ ID NO: 3377 - DNA, 20 bp, synthetic construct
  source 1..20: mol_type = other DNA
aagagaccctagagtaagaa

SEQ ID NO: 3378 - DNA, 20 bp, synthetic construct
  source 1..20: mol_type = other DNA
aaaggaacagggaagttgca

SEQ ID NO: 3379 - DNA, 20 bp, synthetic construct
  source 1..20: mol_type = other DNA
aacgtttatgaaaaggaaca

SEQ ID NO: 3380 - DNA, 20 bp, synthetic construct
  source 1..20: mol_type = other DNA
ttcgtttaaaatcctgataa

SEQ ID NO: 3381 - DNA, 20 bp, synthetic construct
  source 1..20: mol_type = other DNA
tggctttccaactgttcctg

SEQ ID NO: 3382 - DNA, 20 bp, synthetic construct
  source 1..20: mol_type = other DNA
agtgtgattcttccttccac

SEQ ID NO: 3383 - DNA, 20 bp, synthetic construct
  source 1..20: mol_type = other DNA
ggaacatacattctttctta

SEQ ID NO: 3384 - DNA, 20 bp, synthetic construct
  source 1..20: mol_type = other DNA
acttcatttaagaatcaaaa

SEQ ID NO: 3385 - DNA, 20 bp, synthetic construct
  source 1..20: mol_type = other DNA
gaacatacattctttcttac

SEQ ID NO: 3386 - DNA, 20 bp, synthetic construct
  source 1..20: mol_type = other DNA
ggcatgacgtcactccccgg

SEQ ID NO: 3387 - DNA, 20 bp, synthetic construct
  source 1..20: mol_type = other DNA
gaggaggagttccagcgcgc

SEQ ID NO: 3388 - DNA, 20 bp, synthetic construct
  source 1..20: mol_type = other DNA
ggggaggtgggtcagaccca

SEQ ID NO: 3389 - DNA, 20 bp, synthetic construct
  source 1..20: mol_type = other DNA
ggaactcctcctccgaaccc

SEQ ID NO: 3390 - DNA, 20 bp, synthetic construct
  source 1..20: mol_type = other DNA
cggcatgacgtcactccccg

SEQ ID NO: 3391 - DNA, 20 bp, synthetic construct
  source 1..20: mol_type = other DNA
cccggggagtgacgtcatgc

SEQ ID NO: 3392 - DNA, 20 bp, synthetic construct
  source 1..20: mol_type = other DNA
acttactgagcccgcccccg

SEQ ID NO: 3393 - DNA, 20 bp, synthetic construct
  source 1..20: mol_type = other DNA
ccggcatgacgtcactcccc

SEQ ID NO: 3394 - DNA, 20 bp, synthetic construct
  source 1..20: mol_type = other DNA
gtgacgtcatgccggcgcgc

SEQ ID NO: 3395 - DNA, 20 bp, synthetic construct
  source 1..20: mol_type = other DNA
gggtcagacccagggttcgg

SEQ ID NO: 3396 - DNA, 20 bp, synthetic construct
  source 1..20: mol_type = other DNA
tcagacccagggttcggagg

SEQ ID NO: 3397 - DNA, 20 bp, synthetic construct
  source 1..20: mol_type = other DNA
gccggcatgacgtcactccc

SEQ ID NO: 3398 - DNA, 20 bp, synthetic construct
  source 1..20: mol_type = other DNA
ccacttactgagcccgcccc

SEQ ID NO: 3399 - DNA, 20 bp, synthetic construct
  source 1..20: mol_type = other DNA
gaactcctcctccgaaccct

SEQ ID NO: 3400 - DNA, 20 bp, synthetic construct
  source 1..20: mol_type = other DNA
cacttactgagcccgccccc

SEQ ID NO: 3401 - DNA, 20 bp, synthetic construct
  source 1..20: mol_type = other DNA
ggcttctggttatctcgggg

SEQ ID NO: 3402 - DNA, 20 bp, synthetic construct
  source 1..20: mol_type = other DNA
tccatgaaacccccagatcc

SEQ ID NO: 3403 - DNA, 20 bp, synthetic construct
  source 1..20: mol_type = other DNA
tggcacaatgcccagtgcag

SEQ ID NO: 3404 - DNA, 20 bp, synthetic construct
  source 1..20: mol_type = other DNA
tttatggaggaagcccagtg

SEQ ID NO: 3405 - DNA, 20 bp, synthetic construct
  source 1..20: mol_type = other DNA
ggaggcttctggttatctcg

SEQ ID NO: 3406 - DNA, 20 bp, synthetic construct
  source 1..20: mol_type = other DNA
gctttatggaggaagcccag

SEQ ID NO: 3407 - DNA, 20 bp, synthetic construct
  source 1..20: mol_type = other DNA
tagcgttgttcctggatctg

SEQ ID NO: 3408 - DNA, 20 bp, synthetic construct
  source 1..20: mol_type = other DNA
ctggcacaatgcccagtgca

SEQ ID NO: 3409 - DNA, 20 bp, synthetic construct
  source 1..20: mol_type = other DNA
agcgttgttcctggatctgg

SEQ ID NO: 3410 - DNA, 20 bp, synthetic construct
  source 1..20: mol_type = other DNA
tgcactgggcattgtgccag

SEQ ID NO: 3411 - DNA, 20 bp, synthetic construct
  source 1..20: mol_type = other DNA
accagaagcctcccctgcac

SEQ ID NO: 3412 - DNA, 20 bp, synthetic construct
  source 1..20: mol_type = other DNA
ccagaagcctcccctgcact

SEQ ID NO: 3413 - DNA, 20 bp, synthetic construct
  source 1..20: mol_type = other DNA
cctggcacaatgcccagtgc

SEQ ID NO: 3414 - DNA, 20 bp, synthetic construct
  source 1..20: mol_type = other DNA
cggggaggttatttatacag

SEQ ID NO: 3415 - DNA, 20 bp, synthetic construct
  source 1..20: mol_type = other DNA
cacaatgcccagtgcagggg

SEQ ID NO: 3416 - DNA, 20 bp, synthetic construct
  source 1..20: mol_type = other DNA
ccagacgtaattgtcaacgg

SEQ ID NO: 3417 - DNA, 20 bp, synthetic construct
  source 1..20: mol_type = other DNA
aggccaggagagccagacag

SEQ ID NO: 3418 - DNA, 20 bp, synthetic construct
  source 1..20: mol_type = other DNA
agcgatagaagccggcaggg

SEQ ID NO: 3419 - DNA, 20 bp, synthetic construct
  source 1..20: mol_type = other DNA
gtggagcgatagaagccggc

SEQ ID NO: 3420 - DNA, 20 bp, synthetic construct
  source 1..20: mol_type = other DNA
aggggtggagcgatagaagc

SEQ ID NO: 3421 - DNA, 20 bp, synthetic construct
  source 1..20: mol_type = other DNA
tggagcgatagaagccggca

SEQ ID NO: 3422 - DNA, 20 bp, synthetic construct
  source 1..20: mol_type = other DNA
ggagggagcgaggaggcaga

SEQ ID NO: 3423 - DNA, 20 bp, synthetic construct
  source 1..20: mol_type = other DNA
tagaagccggcagggaggaa

SEQ ID NO: 3424 - DNA, 20 bp, synthetic construct
  source 1..20: mol_type = other DNA
gagggagcgaggaggcagag

SEQ ID NO: 3425 - DNA, 20 bp, synthetic construct
  source 1..20: mol_type = other DNA
agaagccggcagggaggaag

SEQ ID NO: 3426 - DNA, 20 bp, synthetic construct
  source 1..20: mol_type = other DNA
ggctctgagagaccaggatt

SEQ ID NO: 3427 - DNA, 20 bp, synthetic construct
  source 1..20: mol_type = other DNA
ggagcgaggaggcagagggg

SEQ ID NO: 3428 - DNA, 20 bp, synthetic construct
  source 1..20: mol_type = other DNA
gcccaccccttcctccctgc

SEQ ID NO: 3429 - DNA, 20 bp, synthetic construct
  source 1..20: mol_type = other DNA
gccggcagggaggaaggggt

SEQ ID NO: 3430 - DNA, 20 bp, synthetic construct
  source 1..20: mol_type = other DNA
atagaagccggcagggagga

SEQ ID NO: 3431 - DNA, 20 bp, synthetic construct
  source 1..20: mol_type = other DNA
gtagttgcttcgtataacgt

SEQ ID NO: 3432 - DNA, 20 bp, synthetic construct
  source 1..20: mol_type = other DNA
ccaccctcagacatcataag

SEQ ID NO: 3433 - DNA, 20 bp, synthetic construct
  source 1..20: mol_type = other DNA
ggatccggatcgggtacggg

SEQ ID NO: 3434 - DNA, 20 bp, synthetic construct
  source 1..20: mol_type = other DNA
gcttcctcttatgatgtctg

SEQ ID NO: 3435 - DNA, 20 bp, synthetic construct
  source 1..20: mol_type = other DNA
tcgggtacgggcggatgtag

SEQ ID NO: 3436 - DNA, 20 bp, synthetic construct
  source 1..20: mol_type = other DNA
tccggatcccgagcgcgcga

SEQ ID NO: 3437 - DNA, 20 bp, synthetic construct
  source 1..20: mol_type = other DNA
ctcttatgatgtctgagggt

SEQ ID NO: 3438 - DNA, 20 bp, synthetic construct
  source 1..20: mol_type = other DNA
gatcgggtacgggcggatgt

SEQ ID NO: 3439 - DNA, 20 bp, synthetic construct
  source 1..20: mol_type = other DNA
atcgggtacgggcggatgta

SEQ ID NO: 3440 - DNA, 20 bp, synthetic construct
  source 1..20: mol_type = other DNA
atgtctgagggtgggctcga

SEQ ID NO: 3441 - DNA, 20 bp, synthetic construct
  source 1..20: mol_type = other DNA
gcgcgcgagggcggaagtgg

SEQ ID NO: 3442 - DNA, 20 bp, synthetic construct
  source 1..20: mol_type = other DNA
ggaagtggtggtggcccgcg

SEQ ID NO: 3443 - DNA, 20 bp, synthetic construct
  source 1..20: mol_type = other DNA
gatctggacttccggccgcg

SEQ ID NO: 3444 - DNA, 20 bp, synthetic construct
  source 1..20: mol_type = other DNA
ggatcccgagcgcgcgaggg

SEQ ID NO: 3445 - DNA, 20 bp, synthetic construct
  source 1..20: mol_type = other DNA
atccggatcccgagcgcgcg

SEQ ID NO: 3446 - DNA, 20 bp, synthetic construct
  source 1..20: mol_type = other DNA
gtgctaaagagacccgcagg

SEQ ID NO: 3447 - DNA, 20 bp, synthetic construct
  source 1..20: mol_type = other DNA
ggtgctaaagagacccgcag

SEQ ID NO: 3448 - DNA, 20 bp, synthetic construct
  source 1..20: mol_type = other DNA
gggtgctaaagagacccgca

SEQ ID NO: 3449 - DNA, 20 bp, synthetic construct
  source 1..20: mol_type = other DNA
ttagcacccggcgcgcggtg

SEQ ID NO: 3450 - DNA, 20 bp, synthetic construct
  source 1..20: mol_type = other DNA
ctggaagctcacgccccctg

SEQ ID NO: 3451 - DNA, 20 bp, synthetic construct
  source 1..20: mol_type = other DNA
cccgtctggacagacgctcg

SEQ ID NO: 3452 - DNA, 20 bp, synthetic construct
  source 1..20: mol_type = other DNA
gaccggacataaaggagcac

SEQ ID NO: 3453 - DNA, 20 bp, synthetic construct
  source 1..20: mol_type = other DNA
tggaagctcacgccccctgc

SEQ ID NO: 3454 - DNA, 20 bp, synthetic construct
  source 1..20: mol_type = other DNA
cgggtgctaaagagacccgc

SEQ ID NO: 3455 - DNA, 20 bp, synthetic construct
  source 1..20: mol_type = other DNA
cacgggagacccgaagccgc

SEQ ID NO: 3456 - DNA, 20 bp, synthetic construct
  source 1..20: mol_type = other DNA
gcgtgagcttccagcgccag

SEQ ID NO: 3457 - DNA, 20 bp, synthetic construct
  source 1..20: mol_type = other DNA
ttctcacactgccgtcgcac

SEQ ID NO: 3458 - DNA, 20 bp, synthetic construct
  source 1..20: mol_type = other DNA
agacccgaagccgctggcgc

SEQ ID NO: 3459 - DNA, 20 bp, synthetic construct
  source 1..20: mol_type = other DNA
gtgtgagaaagaaacgttcc

SEQ ID NO: 3460 - DNA, 20 bp, synthetic construct
  source 1..20: mol_type = other DNA
agtgtgagaaagaaacgttc

SEQ ID NO: 3461 - DNA, 20 bp, synthetic construct
  source 1..20: mol_type = other DNA
gattacttggagatattgtc

SEQ ID NO: 3462 - DNA, 20 bp, synthetic construct
  source 1..20: mol_type = other DNA
ggaggattatgaatatacag

SEQ ID NO: 3463 - DNA, 20 bp, synthetic construct
  source 1..20: mol_type = other DNA
aacaaacatgcaaatatgaa

SEQ ID NO: 3464 - DNA, 20 bp, synthetic construct
  source 1..20: mol_type = other DNA
aaacatgcaaatatgaaagg

SEQ ID NO: 3465 - DNA, 20 bp, synthetic construct
  source 1..20: mol_type = other DNA
tgtctcttattctgattact

SEQ ID NO: 3466 - DNA, 20 bp, synthetic construct
  source 1..20: mol_type = other DNA
aaagaaagtagcataagaaa

SEQ ID NO: 3467 - DNA, 20 bp, synthetic construct
  source 1..20: mol_type = other DNA
gtatgcgctttaattatgaa

SEQ ID NO: 3468 - DNA, 20 bp, synthetic construct
  source 1..20: mol_type = other DNA
ggaaattattatttctgtgt

SEQ ID NO: 3469 - DNA, 20 bp, synthetic construct
  source 1..20: mol_type = other DNA
catgcaaatatgaaaggtgg

SEQ ID NO: 3470 - DNA, 20 bp, synthetic construct
  source 1..20: mol_type = other DNA
tgcgctttaattatgaatgg

SEQ ID NO: 3471 - DNA, 20 bp, synthetic construct
  source 1..20: mol_type = other DNA
aggaaattattatttctgtg

SEQ ID NO: 3472 - DNA, 20 bp, synthetic construct
  source 1..20: mol_type = other DNA
ctgtgtgggaaagctgaata

SEQ ID NO: 3473 - DNA, 20 bp, synthetic construct
  source 1..20: mol_type = other DNA
ttcaaagaagacgaagatta

SEQ ID NO: 3474 - DNA, 20 bp, synthetic construct
  source 1..20: mol_type = other DNA
gacacgcttagcgtaagcgc

SEQ ID NO: 3475 - DNA, 20 bp, synthetic construct
  source 1..20: mol_type = other DNA
ggagtggcaggatctaaggg

SEQ ID NO: 3476 - DNA, 20 bp, synthetic construct
  source 1..20: mol_type = other DNA
cacgcttagcgtaagcgcag

SEQ ID NO: 3477 - DNA, 20 bp, synthetic construct
  source 1..20: mol_type = other DNA
gagtggcaggatctaaggga

SEQ ID NO: 3478 - DNA, 20 bp, synthetic construct
  source 1..20: mol_type = other DNA
atgtaatattgagtgtcacc

SEQ ID NO: 3479 - DNA, 20 bp, synthetic construct
  source 1..20: mol_type = other DNA
tgcttccagcaccagcagag

SEQ ID NO: 3480 - DNA, 20 bp, synthetic construct
  source 1..20: mol_type = other DNA
gtgcttccagcaccagcaga

SEQ ID NO: 3481 - DNA, 20 bp, synthetic construct
  source 1..20: mol_type = other DNA
agtgcttccagcaccagcag

SEQ ID NO: 3482 - DNA, 20 bp, synthetic construct
  source 1..20: mol_type = other DNA
tctgctggtgctggaagcac

SEQ ID NO: 3483 - DNA, 20 bp, synthetic construct
  source 1..20: mol_type = other DNA
tgctggaagcactgggcgag

SEQ ID NO: 3484 - DNA, 20 bp, synthetic construct
  source 1..20: mol_type = other DNA
gaggggagtggcaggatcta

SEQ ID NO: 3485 - DNA, 20 bp, synthetic construct
  source 1..20: mol_type = other DNA
atcctgccactcccctctgc

SEQ ID NO: 3486 - DNA, 20 bp, synthetic construct
  source 1..20: mol_type = other DNA
ccagcaccagcagaggggag

SEQ ID NO: 3487 - DNA, 20 bp, synthetic construct
  source 1..20: mol_type = other DNA
tggcaggatctaagggaggg

SEQ ID NO: 3488 - DNA, 20 bp, synthetic construct
  source 1..20: mol_type = other DNA
agtggctctcagagctagag

SEQ ID NO: 3489 - DNA, 20 bp, synthetic construct
  source 1..20: mol_type = other DNA
gagcctgagggacttcgcgg

SEQ ID NO: 3490 - DNA, 20 bp, synthetic construct
  source 1..20: mol_type = other DNA
tctgagcctgagggacttcg

SEQ ID NO: 3491 - DNA, 20 bp, synthetic construct
  source 1..20: mol_type = other DNA
ttccgccggaagctacccag

SEQ ID NO: 3492 - DNA, 20 bp, synthetic construct
  source 1..20: mol_type = other DNA
gttgtggtcgggttctgagg

SEQ ID NO: 3493 - DNA, 20 bp, synthetic construct
  source 1..20: mol_type = other DNA
acggctgtgctctgagcctg

SEQ ID NO: 3494 - DNA, 20 bp, synthetic construct
  source 1..20: mol_type = other DNA
tgtcctccgcgaagtccctc

SEQ ID NO: 3495 - DNA, 20 bp, synthetic construct
  source 1..20: mol_type = other DNA
tctgttgtggtcgggttctg

SEQ ID NO: 3496 - DNA, 20 bp, synthetic construct
  source 1..20: mol_type = other DNA
ggagccggggcgaaaaggcg

SEQ ID NO: 3497 - DNA, 20 bp, synthetic construct
  source 1..20: mol_type = other DNA
ggcggggcggggcagcacgg

SEQ ID NO: 3498 - DNA, 20 bp, synthetic construct
  source 1..20: mol_type = other DNA
ggcggggcgtctgttgtggt

SEQ ID NO: 3499 - DNA, 20 bp, synthetic construct
  source 1..20: mol_type = other DNA
gcggagccggggcgaaaagg

SEQ ID NO: 3500 - DNA, 20 bp, synthetic construct
  source 1..20: mol_type = other DNA
cgggggcggggcgtctgttg

SEQ ID NO: 3501 - DNA, 20 bp, synthetic construct
  source 1..20: mol_type = other DNA
gaggtggtctggtctttctg

SEQ ID NO: 3502 - DNA, 20 bp, synthetic construct
  source 1..20: mol_type = other DNA
aggcggggcggggcagcacg

SEQ ID NO: 3503 - DNA, 20 bp, synthetic construct
  source 1..20: mol_type = other DNA
aaggcggggcggggcagcac

SEQ ID NO: 3504 - DNA, 20 bp, synthetic construct
  source 1..20: mol_type = other DNA
tatatatactctgatgcatg

SEQ ID NO: 3505 - DNA, 20 bp, synthetic construct
  source 1..20: mol_type = other DNA
ttagctgttgtaggtcagtt

SEQ ID NO: 3506 - DNA, 20 bp, synthetic construct
  source 1..20: mol_type = other DNA
tcataaacaaggaagagagt

SEQ ID NO: 3507 - DNA, 20 bp, synthetic construct
  source 1..20: mol_type = other DNA
aataactagcttcataaaca

SEQ ID NO: 3508 - DNA, 20 bp, synthetic construct
  source 1..20: mol_type = other DNA
agggatgacatttaaaggtg

SEQ ID NO: 3509 - DNA, 20 bp, synthetic construct
  source 1..20: mol_type = other DNA
gtgttacaaaacaagatagt

SEQ ID NO: 3510 - DNA, 20 bp, synthetic construct
  source 1..20: mol_type = other DNA
gtcagtttggtgactgtgac

SEQ ID NO: 3511 - DNA, 20 bp, synthetic construct
  source 1..20: mol_type = other DNA
tttggtgactgtgactggac

SEQ ID NO: 3512 - DNA, 20 bp, synthetic construct
  source 1..20: mol_type = other DNA
ttctaagggatgacatttaa

SEQ ID NO: 3513 - DNA, 20 bp, synthetic construct
  source 1..20: mol_type = other DNA
aaacaaggaagagagtggga

SEQ ID NO: 3514 - DNA, 20 bp, synthetic construct
  source 1..20: mol_type = other DNA
aacaaggaagagagtgggat

SEQ ID NO: 3515 - DNA, 20 bp, synthetic construct
  source 1..20: mol_type = other DNA
ttcataaacaaggaagagag

SEQ ID NO: 3516 - DNA, 20 bp, synthetic construct
  source 1..20: mol_type = other DNA
tttcaggtaacacgttctaa

SEQ ID NO: 3517 - DNA, 20 bp, synthetic construct
  source 1..20: mol_type = other DNA
tctacactttgcttaaccct

SEQ ID NO: 3518 - DNA, 20 bp, synthetic construct
  source 1..20: mol_type = other DNA
aggctgatgaccagttccca

SEQ ID NO: 3519 - DNA, 20 bp, synthetic construct
  source 1..20: mol_type = other DNA
ttaaagttcaatcaggccca

SEQ ID NO: 3520 - DNA, 20 bp, synthetic construct
  source 1..20: mol_type = other DNA
ggcagagagctggtcaggag

SEQ ID NO: 3521 - DNA, 20 bp, synthetic construct
  source 1..20: mol_type = other DNA
gaggttccagaggacagggt

SEQ ID NO: 3522 - DNA, 20 bp, synthetic construct
  source 1..20: mol_type = other DNA
aaatctcgcagaggttccag

SEQ ID NO: 3523 - DNA, 20 bp, synthetic construct
  source 1..20: mol_type = other DNA
gtgggcaagagaggtggctc

SEQ ID NO: 3524 - DNA, 20 bp, synthetic construct
  source 1..20: mol_type = other DNA
aaggctgatgaccagttccc

SEQ ID NO: 3525 - DNA, 20 bp, synthetic construct
  source 1..20: mol_type = other DNA
agaggttccagaggacaggg

SEQ ID NO: 3526 - DNA, 20 bp, synthetic construct
  source 1..20: mol_type = other DNA
gggagtgtgggcaagagagg

SEQ ID NO: 3527 - DNA, 20 bp, synthetic construct
  source 1..20: mol_type = other DNA
cgcagaggttccagaggaca

SEQ ID NO: 3528 - DNA, 20 bp, synthetic construct
  source 1..20: mol_type = other DNA
gcagagagctggtcaggagg

SEQ ID NO: 3529 - DNA, 20 bp, synthetic construct
  source 1..20: mol_type = other DNA
ggggcagagagctggtcagg

SEQ ID NO: 3530 - DNA, 20 bp, synthetic construct
  source 1..20: mol_type = other DNA
ggagggggaactgaggtcaa

SEQ ID NO: 3531 - DNA, 20 bp, synthetic construct
  source 1..20: mol_type = other DNA
ctttgcttaaccctgggaac

SEQ ID NO: 3532 - DNA, 20 bp, synthetic construct
  source 1..20: mol_type = other DNA
cggtaccctgggctaccgcg

SEQ ID NO: 3533 - DNA, 20 bp, synthetic construct
  source 1..20: mol_type = other DNA
ccaatcagggcgcggagcac

SEQ ID NO: 3534 - DNA, 20 bp, synthetic construct
  source 1..20: mol_type = other DNA
acgctgtccggcggtaccct

SEQ ID NO: 3535 - DNA, 20 bp, synthetic construct
  source 1..20: mol_type = other DNA
cccctccccgcggtagccca

SEQ ID NO: 3536 - DNA, 20 bp, synthetic construct
  source 1..20: mol_type = other DNA
ggcggtaccctgggctaccg

SEQ ID NO: 3537 - DNA, 20 bp, synthetic construct
  source 1..20: mol_type = other DNA
gcccagaggcccctgaaggg

SEQ ID NO: 3538 - DNA, 20 bp, synthetic construct
  source 1..20: mol_type = other DNA
cacgggaggacgctgtccgg

SEQ ID NO: 3539 - DNA, 20 bp, synthetic construct
  source 1..20: mol_type = other DNA
gacgctgtccggcggtaccc

SEQ ID NO: 3540 - DNA, 20 bp, synthetic construct
  source 1..20: mol_type = other DNA
atcagggcgcggagcacggg

SEQ ID NO: 3541 - DNA, 20 bp, synthetic construct
  source 1..20: mol_type = other DNA
agggagggaggcggtttcca

SEQ ID NO: 3542 - DNA, 20 bp, synthetic construct
  source 1..20: mol_type = other DNA
cgccgcaaccaatcagcgag

SEQ ID NO: 3543 - DNA, 20 bp, synthetic construct
  source 1..20: mol_type = other DNA
gaggcctgcgcagccaatca

SEQ ID NO: 3544 - DNA, 20 bp, synthetic construct
  source 1..20: mol_type = other DNA
ccggctcctccccctccccg

SEQ ID NO: 3545 - DNA, 20 bp, synthetic construct
  source 1..20: mol_type = other DNA
taccctgggctaccgcgggg

SEQ ID NO: 3546 - DNA, 20 bp, synthetic construct
  source 1..20: mol_type = other DNA
caaccgggcccgggagcggt

SEQ ID NO: 3547 - DNA, 20 bp, synthetic construct
  source 1..20: mol_type = other DNA
ccctccagcccgcccccctg

SEQ ID NO: 3548 - DNA, 20 bp, synthetic construct
  source 1..20: mol_type = other DNA
gccgggcacccagccccagg

SEQ ID NO: 3549 - DNA, 20 bp, synthetic construct
  source 1..20: mol_type = other DNA
ccctggggctgggtgcccgg

SEQ ID NO: 3550 - DNA, 20 bp, synthetic construct
  source 1..20: mol_type = other DNA
cccgcccgccatggttgcgg

SEQ ID NO: 3551 - DNA, 20 bp, synthetic construct
  source 1..20: mol_type = other DNA
cgccgggcacccagccccag

SEQ ID NO: 3552 - DNA, 20 bp, synthetic construct
  source 1..20: mol_type = other DNA
ccccgcccgccatggttgcg

SEQ ID NO: 3553 - DNA, 20 bp, synthetic construct
  source 1..20: mol_type = other DNA
gccgccgggcacccagcccc

SEQ ID NO: 3554 - DNA, 20 bp, synthetic construct
  source 1..20: mol_type = other DNA
agttcgaaaatcgccgaggg

SEQ ID NO: 3555 - DNA, 20 bp, synthetic construct
  source 1..20: mol_type = other DNA
gaagttcgaaaatcgccgag

SEQ ID NO: 3556 - DNA, 20 bp, synthetic construct
  source 1..20: mol_type = other DNA
aagttcgaaaatcgccgagg

SEQ ID NO: 3557 - DNA, 20 bp, synthetic construct
  source 1..20: mol_type = other DNA
cagaagttcgaaaatcgccg

SEQ ID NO: 3558 - DNA, 20 bp, synthetic construct
  source 1..20: mol_type = other DNA
ccgggcacccagccccaggg

SEQ ID NO: 3559 - DNA, 20 bp, synthetic construct
  source 1..20: mol_type = other DNA
agaagttcgaaaatcgccga

SEQ ID NO: 3560 - DNA, 20 bp, synthetic construct
  source 1..20: mol_type = other DNA
gcggcggcggcggcgaactg

SEQ ID NO: 3561 - DNA, 20 bp, synthetic construct
  source 1..20: mol_type = other DNA
aactgcggtttgcgcgcacg

SEQ ID NO: 3562 - DNA, 20 bp, synthetic construct
  source 1..20: mol_type = other DNA
cctagccattggccgagcgg

SEQ ID NO: 3563 - DNA, 20 bp, synthetic construct
  source 1..20: mol_type = other DNA
tcctcctattggttgttgcg

SEQ ID NO: 3564 - DNA, 20 bp, synthetic construct
  source 1..20: mol_type = other DNA
gcttcccgcgaaactgacgt

SEQ ID NO: 3565 - DNA, 20 bp, synthetic construct
  source 1..20: mol_type = other DNA
ccgcaacaaccaataggagg

SEQ ID NO: 3566 - DNA, 20 bp, synthetic construct
  source 1..20: mol_type = other DNA
gccccgcaacaaccaatagg

SEQ ID NO: 3567 - DNA, 20 bp, synthetic construct
  source 1..20: mol_type = other DNA
tcctattggttgttgcgggg

SEQ ID NO: 3568 - DNA, 20 bp, synthetic construct
  source 1..20: mol_type = other DNA
ggccaatggctaggcgcgca

SEQ ID NO: 3569 - DNA, 20 bp, synthetic construct
  source 1..20: mol_type = other DNA
cgcaacaaccaataggagga

SEQ ID NO: 3570 - DNA, 20 bp, synthetic construct
  source 1..20: mol_type = other DNA
gcgcctagccattggccgag

SEQ ID NO: 3571 - DNA, 20 bp, synthetic construct
  source 1..20: mol_type = other DNA
gcagccccggacacaccccc

SEQ ID NO: 3572 - DNA, 20 bp, synthetic construct
  source 1..20: mol_type = other DNA
gccattggccgagcggcggc

SEQ ID NO: 3573 - DNA, 20 bp, synthetic construct
  source 1..20: mol_type = other DNA
taggaggagggcgagtgcgc

SEQ ID NO: 3574 - DNA, 20 bp, synthetic construct
  source 1..20: mol_type = other DNA
agccattggccgagcggcgg

SEQ ID NO: 3575 - DNA, 20 bp, synthetic construct
  source 1..20: mol_type = other DNA
gcgagtgcgccggcgctctg

SEQ ID NO: 3576 - DNA, 20 bp, synthetic construct
  source 1..20: mol_type = other DNA
cgccccgctccccagagcgc

SEQ ID NO: 3577 - DNA, 20 bp, synthetic construct
  source 1..20: mol_type = other DNA
ttgggcgcatgcgtagaccc

SEQ ID NO: 3578 - DNA, 20 bp, synthetic construct
  source 1..20: mol_type = other DNA
acccaggcgttgccaaccca

SEQ ID NO: 3579 - DNA, 20 bp, synthetic construct
  source 1..20: mol_type = other DNA
tccgcccagtcgtctaccct

SEQ ID NO: 3580 - DNA, 20 bp, synthetic construct
  source 1..20: mol_type = other DNA
gccaacccagggtagacgac

SEQ ID NO: 3581 - DNA, 20 bp, synthetic construct
  source 1..20: mol_type = other DNA
ccaacccagggtagacgact

SEQ ID NO: 3582 - DNA, 20 bp, synthetic construct
  source 1..20: mol_type = other DNA
agcgcagaaaggtgatggcg

SEQ ID NO: 3583 - DNA, 20 bp, synthetic construct
  source 1..20: mol_type = other DNA
atggcgcggtaggacgcgag

SEQ ID NO: 3584 - DNA, 20 bp, synthetic construct
  source 1..20: mol_type = other DNA
cagaaaggtgatggcgcggt

SEQ ID NO: 3585 - DNA, 20 bp, synthetic construct
  source 1..20: mol_type = other DNA
gacccaggcgttgccaaccc

SEQ ID NO: 3586 - DNA, 20 bp, synthetic construct
  source 1..20: mol_type = other DNA
tgatggcgcggtaggacgcg

SEQ ID NO: 3587 - DNA, 20 bp, synthetic construct
  source 1..20: mol_type = other DNA
gatggcgcggtaggacgcga

SEQ ID NO: 3588 - DNA, 20 bp, synthetic construct
  source 1..20: mol_type = other DNA
ttccgcccagtcgtctaccc

SEQ ID NO: 3589 - DNA, 20 bp, synthetic construct
  source 1..20: mol_type = other DNA
gcgcaagcgcagaaaggtga

SEQ ID NO: 3590 - DNA, 20 bp, synthetic construct
  source 1..20: mol_type = other DNA
atgaatgcgcaagcgcagaa

SEQ ID NO: 3591 - DNA, 20 bp, synthetic construct
  source 1..20: mol_type = other DNA
tttgggcgtgcgcagactcc

SEQ ID NO: 3592 - DNA, 20 bp, synthetic construct
  source 1..20: mol_type = other DNA
gagacaaccttgctactgtg

SEQ ID NO: 3593 - DNA, 20 bp, synthetic construct
  source 1..20: mol_type = other DNA
acaaccttgctactgtgagg

SEQ ID NO: 3594 - DNA, 20 bp, synthetic construct
  source 1..20: mol_type = other DNA
cctaaaaaacaacaggaatg

SEQ ID NO: 3595 - DNA, 20 bp, synthetic construct
  source 1..20: mol_type = other DNA
tgaggcggatggcctcggca

SEQ ID NO: 3596 - DNA, 20 bp, synthetic construct
  source 1..20: mol_type = other DNA
tggcactggcctttagccag

SEQ ID NO: 3597 - DNA, 20 bp, synthetic construct
  source 1..20: mol_type = other DNA
aggcggatggcctcggcagg

SEQ ID NO: 3598 - DNA, 20 bp, synthetic construct
  source 1..20: mol_type = other DNA
ccttgctactgtgaggcgga

SEQ ID NO: 3599 - DNA, 20 bp, synthetic construct
  source 1..20: mol_type = other DNA
cactggcctttagccagggg

SEQ ID NO: 3600 - DNA, 20 bp, synthetic construct
  source 1..20: mol_type = other DNA
gtttggtgagtttaagggaa

SEQ ID NO: 3601 - DNA, 20 bp, synthetic construct
  source 1..20: mol_type = other DNA
ccgccgcccgccccctgccg

SEQ ID NO: 3602 - DNA, 20 bp, synthetic construct
  source 1..20: mol_type = other DNA
ggtttggtgagtttaaggga

SEQ ID NO: 3603 - DNA, 20 bp, synthetic construct
  source 1..20: mol_type = other DNA
cctgctggctgagcctcccc

SEQ ID NO: 3604 - DNA, 20 bp, synthetic construct
  source 1..20: mol_type = other DNA
gcgggcggcgggaggagaga

SEQ ID NO: 3605 - DNA, 20 bp, synthetic construct
  source 1..20: mol_type = other DNA
ccatccgcctcacagtagca

SEQ ID NO: 3606 - DNA, 20 bp, synthetic construct
  source 1..20: mol_type = other DNA
gaggcggatggcctcggcag

SEQ ID NO: 3607 - DNA, 20 bp, synthetic construct
  source 1..20: mol_type = other DNA
aggcagtcttatatggtctg

SEQ ID NO: 3608 - DNA, 20 bp, synthetic construct
  source 1..20: mol_type = other DNA
gcatgtaggaggaggtacat

SEQ ID NO: 3609 - DNA, 20 bp, synthetic construct
  source 1..20: mol_type = other DNA
cacccctgcaaactgactga

SEQ ID NO: 3610 - DNA, 20 bp, synthetic construct
  source 1..20: mol_type = other DNA
ggtacataggcagtcttata

SEQ ID NO: 3611 - DNA, 20 bp, synthetic construct
  source 1..20: mol_type = other DNA
actgactgatggttaaccaa

SEQ ID NO: 3612 - DNA, 20 bp, synthetic construct
  source 1..20: mol_type = other DNA
aaccatcagtcagtttgcag

SEQ ID NO: 3613 - DNA, 20 bp, synthetic construct
  source 1..20: mol_type = other DNA
taaccatcagtcagtttgca

SEQ ID NO: 3614 - DNA, 20 bp, synthetic construct
  source 1..20: mol_type = other DNA
ctcagagattacaaaaacaa

SEQ ID NO: 3615 - DNA, 20 bp, synthetic construct
  source 1..20: mol_type = other DNA
aaccaatggcatgtaggagg

SEQ ID NO: 3616 - DNA, 20 bp, synthetic construct
  source 1..20: mol_type = other DNA
gttaaccaatggcatgtagg

SEQ ID NO: 3617 - DNA, 20 bp, synthetic construct
  source 1..20: mol_type = other DNA
tcagagattacaaaaacaat

SEQ ID NO: 3618 - DNA, 20 bp, synthetic construct
  source 1..20: mol_type = other DNA
ttaaccatcagtcagtttgc

SEQ ID NO: 3619 - DNA, 20 bp, synthetic construct
  source 1..20: mol_type = other DNA
atggttaaccaatggcatgt

SEQ ID NO: 3620 - DNA, 20 bp, synthetic construct
  source 1..20: mol_type = other DNA
tacctcctcctacatgccat

SEQ ID NO: 3621 - DNA, 20 bp, synthetic construct
  source 1..20: mol_type = other DNA
agattacaaaaacaatgggc

SEQ ID NO: 3622 - DNA, 20 bp, synthetic construct
  source 1..20: mol_type = other DNA
tggaagactcgaatacgtat

SEQ ID NO: 3623 - DNA, 20 bp, synthetic construct
  source 1..20: mol_type = other DNA
ccaagcagcaccgtgatctg

SEQ ID NO: 3624 - DNA, 20 bp, synthetic construct
  source 1..20: mol_type = other DNA
tgatattgcaaacccataca

SEQ ID NO: 3625 - DNA, 20 bp, synthetic construct
  source 1..20: mol_type = other DNA
tgcttctctatggctctgag

SEQ ID NO: 3626 - DNA, 20 bp, synthetic construct
  source 1..20: mol_type = other DNA
gcaccgtgatctggggagtg

SEQ ID NO: 3627 - DNA, 20 bp, synthetic construct
  source 1..20: mol_type = other DNA
tcagagccatagagaagcag

SEQ ID NO: 3628 - DNA, 20 bp, synthetic construct
  source 1..20: mol_type = other DNA
cagagccatagagaagcagg

SEQ ID NO: 3629 - DNA, 20 bp, synthetic construct
  source 1..20: mol_type = other DNA
ctcagagccatagagaagca

SEQ ID NO: 3630 - DNA, 20 bp, synthetic construct
  source 1..20: mol_type = other DNA
accaagcagcaccgtgatct

SEQ ID NO: 3631 - DNA, 20 bp, synthetic construct
  source 1..20: mol_type = other DNA
agtaaagtctctggtgacag

SEQ ID NO: 3632 - DNA, 20 bp, synthetic construct
  source 1..20: mol_type = other DNA
gcttctctatggctctgagg

SEQ ID NO: 3633 - DNA, 20 bp, synthetic construct
  source 1..20: mol_type = other DNA
tttccccactccccagatca

SEQ ID NO: 3634 - DNA, 20 bp, synthetic construct
  source 1..20: mol_type = other DNA
cagggggtgtggccatggag

SEQ ID NO: 3635 - DNA, 20 bp, synthetic construct
  source 1..20: mol_type = other DNA
gcagggggtgtggccatgga

SEQ ID NO: 3636 - DNA, 20 bp, synthetic construct
  source 1..20: mol_type = other DNA
agcagggggtgtggccatgg

SEQ ID NO: 3637 - DNA, 20 bp, synthetic construct
  source 1..20: mol_type = other DNA
gcgtcgagcccacggcgacg

SEQ ID NO: 3638 - DNA, 20 bp, synthetic construct
  source 1..20: mol_type = other DNA
ctcgggcgccgcgtcgccgt

SEQ ID NO: 3639 - DNA, 20 bp, synthetic construct
  source 1..20: mol_type = other DNA
tcgccgtgggctcgacgccg

SEQ ID NO: 3640 - DNA, 20 bp, synthetic construct
  source 1..20: mol_type = other DNA
gccggggcgcaggcgacagg

SEQ ID NO: 3641 - DNA, 20 bp, synthetic construct
  source 1..20: mol_type = other DNA
gcgccccggcgtcgagccca

SEQ ID NO: 3642 - DNA, 20 bp, synthetic construct
  source 1..20: mol_type = other DNA
cccgagcgggcgtgcctgag

SEQ ID NO: 3643 - DNA, 20 bp, synthetic construct
  source 1..20: mol_type = other DNA
ccgctcaggcacgcccgctc

SEQ ID NO: 3644 - DNA, 20 bp, synthetic construct
  source 1..20: mol_type = other DNA
cgtcgccgtgggctcgacgc

SEQ ID NO: 3645 - DNA, 20 bp, synthetic construct
  source 1..20: mol_type = other DNA
gcccggagcgagcggcgacg

SEQ ID NO: 3646 - DNA, 20 bp, synthetic construct
  source 1..20: mol_type = other DNA
gctcgggcgccgcgtcgccg

SEQ ID NO: 3647 - DNA, 20 bp, synthetic construct
  source 1..20: mol_type = other DNA
ccggctcacggggagcgccc

SEQ ID NO: 3648 - DNA, 20 bp, synthetic construct
  source 1..20: mol_type = other DNA
ctccccgtgagccgggccga

SEQ ID NO: 3649 - DNA, 20 bp, synthetic construct
  source 1..20: mol_type = other DNA
acggcgacgcggcgcccgag

SEQ ID NO: 3650 - DNA, 20 bp, synthetic construct
  source 1..20: mol_type = other DNA
cgccctcggcccggctcacg

SEQ ID NO: 3651 - DNA, 20 bp, synthetic construct
  source 1..20: mol_type = other DNA
cccgtgagccgggccgaggg

SEQ ID NO: 3652 - DNA, 20 bp, synthetic construct
  source 1..20: mol_type = other DNA
cagagagggaggtgtcgagg

SEQ ID NO: 3653 - DNA, 20 bp, synthetic construct
  source 1..20: mol_type = other DNA
gcctcagcaagtcccagaga

SEQ ID NO: 3654 - DNA, 20 bp, synthetic construct
  source 1..20: mol_type = other DNA
gactcccagagccagtgagt

SEQ ID NO: 3655 - DNA, 20 bp, synthetic construct
  source 1..20: mol_type = other DNA
tgcctcagcaagtcccagag

SEQ ID NO: 3656 - DNA, 20 bp, synthetic construct
  source 1..20: mol_type = other DNA
agtccgtctgaacagccagc

SEQ ID NO: 3657 - DNA, 20 bp, synthetic construct
  source 1..20: mol_type = other DNA
ggactcccagagccagtgag

SEQ ID NO: 3658 - DNA, 20 bp, synthetic construct
  source 1..20: mol_type = other DNA
tccctctctgggacttgctg

SEQ ID NO: 3659 - DNA, 20 bp, synthetic construct
  source 1..20: mol_type = other DNA
ggacccgctggctgttcaga

SEQ ID NO: 3660 - DNA, 20 bp, synthetic construct
  source 1..20: mol_type = other DNA
ccagagagggaggtgtcgag

SEQ ID NO: 3661 - DNA, 20 bp, synthetic construct
  source 1..20: mol_type = other DNA
tcagcaagtcccagagaggg

SEQ ID NO: 3662 - DNA, 20 bp, synthetic construct
  source 1..20: mol_type = other DNA
ttccagccccacccactcac

SEQ ID NO: 3663 - DNA, 20 bp, synthetic construct
  source 1..20: mol_type = other DNA
gagtccgtctgaacagccag

SEQ ID NO: 3664 - DNA, 20 bp, synthetic construct
  source 1..20: mol_type = other DNA
cccagagccagtgagtgggt

SEQ ID NO: 3665 - DNA, 20 bp, synthetic construct
  source 1..20: mol_type = other DNA
tcccagagccagtgagtggg

SEQ ID NO: 3666 - DNA, 20 bp, synthetic construct
  source 1..20: mol_type = other DNA
tcccagagagggaggtgtcg

SEQ ID NO: 3667 - DNA, 20 bp, synthetic construct
  source 1..20: mol_type = other DNA
gataccgctagcaacctccc

SEQ ID NO: 3668 - DNA, 20 bp, synthetic construct
  source 1..20: mol_type = other DNA
gcggtatccacgtaaatcaa

SEQ ID NO: 3669 - DNA, 20 bp, synthetic construct
  source 1..20: mol_type = other DNA
ttggcagcgccggctcgcag

SEQ ID NO: 3670 - DNA, 20 bp, synthetic construct
  source 1..20: mol_type = other DNA
agtagctctgcgccaatcag

SEQ ID NO: 3671 - DNA, 20 bp, synthetic construct
  source 1..20: mol_type = other DNA
tccgcgccctttgatttacg

SEQ ID NO: 3672 - DNA, 20 bp, synthetic construct
  source 1..20: mol_type = other DNA
taggaggactccgagcccgg

SEQ ID NO: 3673 - DNA, 20 bp, synthetic construct
  source 1..20: mol_type = other DNA
ccggcctgggaggttgctag

SEQ ID NO: 3674 - DNA, 20 bp, synthetic construct
  source 1..20: mol_type = other DNA
tccacgtaaatcaaagggcg

SEQ ID NO: 3675 - DNA, 20 bp, synthetic construct
  source 1..20: mol_type = other DNA
ctaggaggactccgagcccg

SEQ ID NO: 3676 - DNA, 20 bp, synthetic construct
  source 1..20: mol_type = other DNA
aagggcgcggagccaatggg

SEQ ID NO: 3677 - DNA, 20 bp, synthetic construct
  source 1..20: mol_type = other DNA
aggcgcgtgccgctgcgagc

SEQ ID NO: 3678 - DNA, 20 bp, synthetic construct
  source 1..20: mol_type = other DNA
agggcgcggagccaatggga

SEQ ID NO: 3679 - DNA, 20 bp, synthetic construct
  source 1..20: mol_type = other DNA
atcagtggcgccggcctggg

SEQ ID NO: 3680 - DNA, 20 bp, synthetic construct
  source 1..20: mol_type = other DNA
gctactccctccccctcccc

SEQ ID NO: 3681 - DNA, 20 bp, synthetic construct
  source 1..20: mol_type = other DNA
gaatcgggaggcgaagggga

SEQ ID NO: 3682 - DNA, 20 bp, synthetic construct
  source 1..20: mol_type = other DNA
ccatagccaggacacaatag

SEQ ID NO: 3683 - DNA, 20 bp, synthetic construct
  source 1..20: mol_type = other DNA
ttgtctgatcatgtgtgctg

SEQ ID NO: 3684 - DNA, 20 bp, synthetic construct
  source 1..20: mol_type = other DNA
gagacctctgtccccatcag

SEQ ID NO: 3685 - DNA, 20 bp, synthetic construct
  source 1..20: mol_type = other DNA
gggatcctcctcccctgatg

SEQ ID NO: 3686 - DNA, 20 bp, synthetic construct
  source 1..20: mol_type = other DNA
gacacaatagaggtcagtgc

SEQ ID NO: 3687 - DNA, 20 bp, synthetic construct
  source 1..20: mol_type = other DNA
tgagacctctgtccccatca

SEQ ID NO: 3688 - DNA, 20 bp, synthetic construct
  source 1..20: mol_type = other DNA
tgtgctgagcctcctccctg

SEQ ID NO: 3689 - DNA, 20 bp, synthetic construct
  source 1..20: mol_type = other DNA
aggacaaaggtaggaatgag

SEQ ID NO: 3690 - DNA, 20 bp, synthetic construct
  source 1..20: mol_type = other DNA
aaaggtaggaatgagaggag

SEQ ID NO: 3691 - DNA, 20 bp, synthetic construct
  source 1..20: mol_type = other DNA
acctctgtccccatcagggg

SEQ ID NO: 3692 - DNA, 20 bp, synthetic construct
  source 1..20: mol_type = other DNA
gaaagagaaagtaaggacaa

SEQ ID NO: 3693 - DNA, 20 bp, synthetic construct
  source 1..20: mol_type = other DNA
cagccttgattctcaaagtg

SEQ ID NO: 3694 - DNA, 20 bp, synthetic construct
  source 1..20: mol_type = other DNA
gagaaagtaaggacaaaggt

SEQ ID NO: 3695 - DNA, 20 bp, synthetic construct
  source 1..20: mol_type = other DNA
tgctggggcggggtttgtcc

SEQ ID NO: 3696 - DNA, 20 bp, synthetic construct
  source 1..20: mol_type = other DNA
agaccacactttgagaatca

SEQ ID NO: 3697 - DNA, 20 bp, synthetic construct
  source 1..20: mol_type = other DNA
ggcccaagtatctcgaaacg

SEQ ID NO: 3698 - DNA, 20 bp, synthetic construct
  source 1..20: mol_type = other DNA
ccgaaaacccgccccgtgag

SEQ ID NO: 3699 - DNA, 20 bp, synthetic construct
  source 1..20: mol_type = other DNA
ggatgtcccgatgcaatagg

SEQ ID NO: 3700 - DNA, 20 bp, synthetic construct
  source 1..20: mol_type = other DNA
ggtgaacgcgcagcaaaacc

SEQ ID NO: 3701 - DNA, 20 bp, synthetic construct
  source 1..20: mol_type = other DNA
gggatgtcccgatgcaatag

SEQ ID NO: 3702 - DNA, 20 bp, synthetic construct
  source 1..20: mol_type = other DNA
taacctaacttagaggacac

SEQ ID NO: 3703 - DNA, 20 bp, synthetic construct
  source 1..20: mol_type = other DNA
tccgcgagttctaaaactcc

SEQ ID NO: 3704 - DNA, 20 bp, synthetic construct
  source 1..20: mol_type = other DNA
aactccgtaacctaacttag

SEQ ID NO: 3705 - DNA, 20 bp, synthetic construct
  source 1..20: mol_type = other DNA
gcccaagtatctcgaaacgg

SEQ ID NO: 3706 - DNA, 20 bp, synthetic construct
  source 1..20: mol_type = other DNA
cgaaaacccgccccgtgagg

SEQ ID NO: 3707 - DNA, 20 bp, synthetic construct
  source 1..20: mol_type = other DNA
tccggtcccgccccctcacg

SEQ ID NO: 3708 - DNA, 20 bp, synthetic construct
  source 1..20: mol_type = other DNA
acctgccaaagttccatgct

SEQ ID NO: 3709 - DNA, 20 bp, synthetic construct
  source 1..20: mol_type = other DNA
ccgtgagggggcgggaccgg

SEQ ID NO: 3710 - DNA, 20 bp, synthetic construct
  source 1..20: mol_type = other DNA
acgggggcagattccgagca

SEQ ID NO: 3711 - DNA, 20 bp, synthetic construct
  source 1..20: mol_type = other DNA
ggtcccgccccctcacgggg

SEQ ID NO: 3712 - DNA, 20 bp, synthetic construct
  source 1..20: mol_type = other DNA
gcagcagccgcctagaaccc

SEQ ID NO: 3713 - DNA, 20 bp, synthetic construct
  source 1..20: mol_type = other DNA
ccgaggcgacatctccgcgt

SEQ ID NO: 3714 - DNA, 20 bp, synthetic construct
  source 1..20: mol_type = other DNA
cgaggcgacatctccgcgtg

SEQ ID NO: 3715 - DNA, 20 bp, synthetic construct
  source 1..20: mol_type = other DNA
ggggcggaagagggtacccg

SEQ ID NO: 3716 - DNA, 20 bp, synthetic construct
  source 1..20: mol_type = other DNA
gtgcagcagcccctcggaga

SEQ ID NO: 3717 - DNA, 20 bp, synthetic construct
  source 1..20: mol_type = other DNA
gtcggctcctgggttctagg

SEQ ID NO: 3718 - DNA, 20 bp, synthetic construct
  source 1..20: mol_type = other DNA
cccgaggcgacatctccgcg

SEQ ID NO: 3719 - DNA, 20 bp, synthetic construct
  source 1..20: mol_type = other DNA
gcgcatgggcccggctcgag

SEQ ID NO: 3720 - DNA, 20 bp, synthetic construct
  source 1..20: mol_type = other DNA
ccacgcggagatgtcgcctc

SEQ ID NO: 3721 - DNA, 20 bp, synthetic construct
  source 1..20: mol_type = other DNA
gggaggcggcccaactgctc

SEQ ID NO: 3722 - DNA, 20 bp, synthetic construct
  source 1..20: mol_type = other DNA
ttgggcacgtgacccgcgcg

SEQ ID NO: 3723 - DNA, 20 bp, synthetic construct
  source 1..20: mol_type = other DNA
gggcggcaccaggcagcggg

SEQ ID NO: 3724 - DNA, 20 bp, synthetic construct
  source 1..20: mol_type = other DNA
gtgccgcccccctccccacg

SEQ ID NO: 3725 - DNA, 20 bp, synthetic construct
  source 1..20: mol_type = other DNA
ggcgagccttggccccgcgc

SEQ ID NO: 3726 - DNA, 20 bp, synthetic construct
  source 1..20: mol_type = other DNA
acatctccgcgtggggaggg

SEQ ID NO: 3727 - DNA, 20 bp, synthetic construct
  source 1..20: mol_type = other DNA
gagtcaggtgacccggcccc

SEQ ID NO: 3728 - DNA, 20 bp, synthetic construct
  source 1..20: mol_type = other DNA
ggctctggccgggacctgcg

SEQ ID NO: 3729 - DNA, 20 bp, synthetic construct
  source 1..20: mol_type = other DNA
cactggatccaggtcggcgg

SEQ ID NO: 3730 - DNA, 20 bp, synthetic construct
  source 1..20: mol_type = other DNA
tcccactggatccaggtcgg

SEQ ID NO: 3731 - DNA, 20 bp, synthetic construct
  source 1..20: mol_type = other DNA
cgctcccactggatccaggt

SEQ ID NO: 3732 - DNA, 20 bp, synthetic construct
  source 1..20: mol_type = other DNA
gacctggatccagtgggagc

SEQ ID NO: 3733 - DNA, 20 bp, synthetic construct
  source 1..20: mol_type = other DNA
ttcccgctcccactggatcc

SEQ ID NO: 3734 - DNA, 20 bp, synthetic construct
  source 1..20: mol_type = other DNA
ccccgccgacctggatccag

SEQ ID NO: 3735 - DNA, 20 bp, synthetic construct
  source 1..20: mol_type = other DNA
gcggaatttggggccgcgag

SEQ ID NO: 3736 - DNA, 20 bp, synthetic construct
  source 1..20: mol_type = other DNA
cccgccgacctggatccagt

SEQ ID NO: 3737 - DNA, 20 bp, synthetic construct
  source 1..20: mol_type = other DNA
gcctcccttcccgctcccac

SEQ ID NO: 3738 - DNA, 20 bp, synthetic construct
  source 1..20: mol_type = other DNA
tccagtgggagcgggaaggg

SEQ ID NO: 3739 - DNA, 20 bp, synthetic construct
  source 1..20: mol_type = other DNA
tggatccagtgggagcggga

SEQ ID NO: 3740 - DNA, 20 bp, synthetic construct
  source 1..20: mol_type = other DNA
ccactggatccaggtcggcg

SEQ ID NO: 3741 - DNA, 20 bp, synthetic construct
  source 1..20: mol_type = other DNA
gccgcgaggggtggaatggg

SEQ ID NO: 3742 - DNA, 20 bp, synthetic construct
  source 1..20: mol_type = other DNA
ggtctgacgtcagccatgtg

SEQ ID NO: 3743 - DNA, 20 bp, synthetic construct
  source 1..20: mol_type = other DNA
tctgacgtcagccatgtgcg

SEQ ID NO: 3744 - DNA, 20 bp, synthetic construct
  source 1..20: mol_type = other DNA
gatattaatgaacctccaag

SEQ ID NO: 3745 - DNA, 20 bp, synthetic construct
  source 1..20: mol_type = other DNA
gcggctcccaaagaaaatgc

SEQ ID NO: 3746 - DNA, 20 bp, synthetic construct
  source 1..20: mol_type = other DNA
tcagaccccgccaggagttg

SEQ ID NO: 3747 - DNA, 20 bp, synthetic construct
  source 1..20: mol_type = other DNA
gtctgacgtcagccatgtgc

SEQ ID NO: 3748 - DNA, 20 bp, synthetic construct
  source 1..20: mol_type = other DNA
cagaccccgccaggagttgg

SEQ ID NO: 3749 - DNA, 20 bp, synthetic construct
  source 1..20: mol_type = other DNA
gggaaaagctaagtgggcca

SEQ ID NO: 3750 - DNA, 20 bp, synthetic construct
  source 1..20: mol_type = other DNA
gtggctctgtgcgtgcgtga

SEQ ID NO: 3751 - DNA, 20 bp, synthetic construct
  source 1..20: mol_type = other DNA
gcgtgatggtgaggacggtg

SEQ ID NO: 3752 - DNA, 20 bp, synthetic construct
  source 1..20: mol_type = other DNA
gacgtcagccatgtgcgggg

SEQ ID NO: 3753 - DNA, 20 bp, synthetic construct
  source 1..20: mol_type = other DNA
tcccatcccctccccgcaca

SEQ ID NO: 3754 - DNA, 20 bp, synthetic construct
  source 1..20: mol_type = other DNA
cgtcagaccccgccaggagt

SEQ ID NO: 3755 - DNA, 20 bp, synthetic construct
  source 1..20: mol_type = other DNA
aaagtgtgaatatgggagtg

SEQ ID NO: 3756 - DNA, 20 bp, synthetic construct
  source 1..20: mol_type = other DNA
gccatgtgcggggaggggat

SEQ ID NO: 3757 - DNA, 20 bp, synthetic construct
  source 1..20: mol_type = other DNA
ggtcgaccaatgatccccgg

SEQ ID NO: 3758 - DNA, 20 bp, synthetic construct
  source 1..20: mol_type = other DNA
ctcggtcgaccaatgatccc

SEQ ID NO: 3759 - DNA, 20 bp, synthetic construct
  source 1..20: mol_type = other DNA
gggatcattggtcgaccgag

SEQ ID NO: 3760 - DNA, 20 bp, synthetic construct
  source 1..20: mol_type = other DNA
gtgacgtcagagtagcggcg

SEQ ID NO: 3761 - DNA, 20 bp, synthetic construct
  source 1..20: mol_type = other DNA
gacagccggcccccgtcacg

SEQ ID NO: 3762 - DNA, 20 bp, synthetic construct
  source 1..20: mol_type = other DNA
gagtgggcccgaccacgtga

SEQ ID NO: 3763 - DNA, 20 bp, synthetic construct
  source 1..20: mol_type = other DNA
gcgcggtgacgtcagagtag

SEQ ID NO: 3764 - DNA, 20 bp, synthetic construct
  source 1..20: mol_type = other DNA
cggggatcattggtcgaccg

SEQ ID NO: 3765 - DNA, 20 bp, synthetic construct
  source 1..20: mol_type = other DNA
gtcgaccaatgatccccggc

SEQ ID NO: 3766 - DNA, 20 bp, synthetic construct
  source 1..20: mol_type = other DNA
gtcgggcccactccaatggg

SEQ ID NO: 3767 - DNA, 20 bp, synthetic construct
  source 1..20: mol_type = other DNA
ggggatcattggtcgaccga

SEQ ID NO: 3768 - DNA, 20 bp, synthetic construct
  source 1..20: mol_type = other DNA
gcggcgtggccagtgacagc

SEQ ID NO: 3769 - DNA, 20 bp, synthetic construct
  source 1..20: mol_type = other DNA
tctgacgtcaccgcgcccgc

SEQ ID NO: 3770 - DNA, 20 bp, synthetic construct
  source 1..20: mol_type = other DNA
tgacgtcaccgcgcccgccg

SEQ ID NO: 3771 - DNA, 20 bp, synthetic construct
  source 1..20: mol_type = other DNA
cgctcgcgtcacgtgcccct

SEQ ID NO: 3772 - DNA, 20 bp, synthetic construct
  source 1..20: mol_type = other DNA
gtgcagagcggcgtccatag

SEQ ID NO: 3773 - DNA, 20 bp, synthetic construct
  source 1..20: mol_type = other DNA
gaggccaggcaatctccgat

SEQ ID NO: 3774 - DNA, 20 bp, synthetic construct
  source 1..20: mol_type = other DNA
agagcggcgtccataggggt

SEQ ID NO: 3775 - DNA, 20 bp, synthetic construct
  source 1..20: mol_type = other DNA
aatctccgattggtgcagag

SEQ ID NO: 3776 - DNA, 20 bp, synthetic construct
  source 1..20: mol_type = other DNA
gcaggcgccgtaggccgaag

SEQ ID NO: 3777 - DNA, 20 bp, synthetic construct
  source 1..20: mol_type = other DNA
cagagcggcgtccatagggg

SEQ ID NO: 3778 - DNA, 20 bp, synthetic construct
  source 1..20: mol_type = other DNA
gcgccgtaggccgaagcggc

SEQ ID NO: 3779 - DNA, 20 bp, synthetic construct
  source 1..20: mol_type = other DNA
ggcgccgtaggccgaagcgg

SEQ ID NO: 3780 - DNA, 20 bp, synthetic construct
  source 1..20: mol_type = other DNA
tggcccagggcggaagactg

SEQ ID NO: 3781 - DNA, 20 bp, synthetic construct
  source 1..20: mol_type = other DNA
ataggggtgggcctcccgga

SEQ ID NO: 3782 - DNA, 20 bp, synthetic construct
  source 1..20: mol_type = other DNA
taggggtgggcctcccggag

SEQ ID NO: 3783 - DNA, 20 bp, synthetic construct
  source 1..20: mol_type = other DNA
cataggggtgggcctcccgg

SEQ ID NO: 3784 - DNA, 20 bp, synthetic construct
  source 1..20: mol_type = other DNA
gcctcccggaggggcgtgga

SEQ ID NO: 3785 - DNA, 20 bp, synthetic construct
  source 1..20: mol_type = other DNA
ggcaccaggaggcgggtctg

SEQ ID NO: 3786 - DNA, 20 bp, synthetic construct
  source 1..20: mol_type = other DNA
cccttccacgcccctccggg

SEQ ID NO: 3787 - DNA, 20 bp, synthetic construct
  source 1..20: mol_type = other DNA
gtgagagctatcctatagcg

SEQ ID NO: 3788 - DNA, 20 bp, synthetic construct
  source 1..20: mol_type = other DNA
agaatgggacgcccctcgtg

SEQ ID NO: 3789 - DNA, 20 bp, synthetic construct
  source 1..20: mol_type = other DNA
gcgaagtttccgcgtcccaa

SEQ ID NO: 3790 - DNA, 20 bp, synthetic construct
  source 1..20: mol_type = other DNA
gcggagtgaagcgtccaatg

SEQ ID NO: 3791 - DNA, 20 bp, synthetic construct
  source 1..20: mol_type = other DNA
atgggcggcaacctcacgag

SEQ ID NO: 3792 - DNA, 20 bp, synthetic construct
  source 1..20: mol_type = other DNA
accttcgattgggctaaaag

SEQ ID NO: 3793 - DNA, 20 bp, synthetic construct
  source 1..20: mol_type = other DNA
gcgtgagagctatcctatag

SEQ ID NO: 3794 - DNA, 20 bp, synthetic construct
  source 1..20: mol_type = other DNA
tatgggcggcaacctcacga

SEQ ID NO: 3795 - DNA, 20 bp, synthetic construct
  source 1..20: mol_type = other DNA
ggggagagatagagggttcg

SEQ ID NO: 3796 - DNA, 20 bp, synthetic construct
  source 1..20: mol_type = other DNA
aatcgaaggtgacagagatg

SEQ ID NO: 3797 - DNA, 20 bp, synthetic construct
  source 1..20: mol_type = other DNA
tggctcactgaagccaagat

SEQ ID NO: 3798 - DNA, 20 bp, synthetic construct
  source 1..20: mol_type = other DNA
ttatgggcggcaacctcacg

SEQ ID NO: 3799 - DNA, 20 bp, synthetic construct
  source 1..20: mol_type = other DNA
ggtgacagagatgagggaag

SEQ ID NO: 3800 - DNA, 20 bp, synthetic construct
  source 1..20: mol_type = other DNA
ctatagcggggagagataga

SEQ ID NO: 3801 - DNA, 20 bp, synthetic construct
  source 1..20: mol_type = other DNA
atcgaaggtgacagagatga

SEQ ID NO: 3802 - DNA, 20 bp, synthetic construct
  source 1..20: mol_type = other DNA
tgtgcggccaacacaggtga

SEQ ID NO: 3803 - DNA, 20 bp, synthetic construct
  source 1..20: mol_type = other DNA
tccaggtgtgcggccaacac

SEQ ID NO: 3804 - DNA, 20 bp, synthetic construct
  source 1..20: mol_type = other DNA
gtgcggccaacacaggtgaa

SEQ ID NO: 3805 - DNA, 20 bp, synthetic construct
  source 1..20: mol_type = other DNA
tgcggccaacacaggtgaag

SEQ ID NO: 3806 - DNA, 20 bp, synthetic construct
  source 1..20: mol_type = other DNA
gagtcgcttccacctgggtg

SEQ ID NO: 3807 - DNA, 20 bp, synthetic construct
  source 1..20: mol_type = other DNA
ggccaacacaggtgaagggg

SEQ ID NO: 3808 - DNA, 20 bp, synthetic construct
  source 1..20: mol_type = other DNA
agagtcgcttccacctgggt

SEQ ID NO: 3809 - DNA, 20 bp, synthetic construct
  source 1..20: mol_type = other DNA
gccagtgccccccacccagg

SEQ ID NO: 3810 - DNA, 20 bp, synthetic construct
  source 1..20: mol_type = other DNA
ggcactggcccaacctgctg

SEQ ID NO: 3811 - DNA, 20 bp, synthetic construct
  source 1..20: mol_type = other DNA
tagatgctcagttaactggc

SEQ ID NO: 3812 - DNA, 20 bp, synthetic construct
  source 1..20: mol_type = other DNA
cccggccattcaggcagcca

SEQ ID NO: 3813 - DNA, 20 bp, synthetic construct
  source 1..20: mol_type = other DNA
gtcgcttccacctgggtggg

SEQ ID NO: 3814 - DNA, 20 bp, synthetic construct
  source 1..20: mol_type = other DNA
tggctgcctgaatggccggg

SEQ ID NO: 3815 - DNA, 20 bp, synthetic construct
  source 1..20: mol_type = other DNA
gagcgccccggcccctcccg

SEQ ID NO: 3816 - DNA, 20 bp, synthetic construct
  source 1..20: mol_type = other DNA
gaatggccgggcggggtcga

SEQ ID NO: 3817 - DNA, 20 bp, synthetic construct
  source 1..20: mol_type = other DNA
cgggatcagacgcgcagagg

SEQ ID NO: 3818 - DNA, 20 bp, synthetic construct
  source 1..20: mol_type = other DNA
gagcgggatcagacgcgcag

SEQ ID NO: 3819 - DNA, 20 bp, synthetic construct
  source 1..20: mol_type = other DNA
ggagaggaatgcgtttccgg

SEQ ID NO: 3820 - DNA, 20 bp, synthetic construct
  source 1..20: mol_type = other DNA
cgcgtctgatcccgctcccg

SEQ ID NO: 3821 - DNA, 20 bp, synthetic construct
  source 1..20: mol_type = other DNA
gagaggaatgcgtttccgga

SEQ ID NO: 3822 - DNA, 20 bp, synthetic construct
  source 1..20: mol_type = other DNA
gcggctggtttcctgccggg

SEQ ID NO: 3823 - DNA, 20 bp, synthetic construct
  source 1..20: mol_type = other DNA
gatcagacgcgcagaggagg

SEQ ID NO: 3824 - DNA, 20 bp, synthetic construct
  source 1..20: mol_type = other DNA
cgcggctggtttcctgccgg

SEQ ID NO: 3825 - DNA, 20 bp, synthetic construct
  source 1..20: mol_type = other DNA
aatgcgtttccggagggaga

SEQ ID NO: 3826 - DNA, 20 bp, synthetic construct
  source 1..20: mol_type = other DNA
cccgggccgggctgacgcgg

SEQ ID NO: 3827 - DNA, 20 bp, synthetic construct
  source 1..20: mol_type = other DNA
tcagacgcgcagaggaggcg

SEQ ID NO: 3828 - DNA, 20 bp, synthetic construct
  source 1..20: mol_type = other DNA
ccctcctcccgcccctgagg

SEQ ID NO: 3829 - DNA, 20 bp, synthetic construct
  source 1..20: mol_type = other DNA
atcagacgcgcagaggaggc

SEQ ID NO: 3830 - DNA, 20 bp, synthetic construct
  source 1..20: mol_type = other DNA
gcgtttccggagggagaggg

SEQ ID NO: 3831 - DNA, 20 bp, synthetic construct
  source 1..20: mol_type = other DNA
gtcccctcctcccgcccctg

SEQ ID NO: 3832 - DNA, 20 bp, synthetic construct
  source 1..20: mol_type = other DNA
tccgcctcggcgacccacgg

SEQ ID NO: 3833 - DNA, 20 bp, synthetic construct
  source 1..20: mol_type = other DNA
caggcggcagatcctaattg

SEQ ID NO: 3834 - DNA, 20 bp, synthetic construct
  source 1..20: mol_type = other DNA
gcaaccccagtggatgtgga

SEQ ID NO: 3835 - DNA, 20 bp, synthetic construct
  source 1..20: mol_type = other DNA
gccaccctccacatccactg

SEQ ID NO: 3836 - DNA, 20 bp, synthetic construct
  source 1..20: mol_type = other DNA
ggcaaccccagtggatgtgg

SEQ ID NO: 3837 - DNA, 20 bp, synthetic construct
  source 1..20: mol_type = other DNA
ctgctcaggtctgacactcg

SEQ ID NO: 3838 - DNA, 20 bp, synthetic construct
  source 1..20: mol_type = other DNA
gctgctcaggtctgacactc

SEQ ID NO: 3839 - DNA, 20 bp, synthetic construct
  source 1..20: mol_type = other DNA
agacctgagcagccaatctc

SEQ ID NO: 3840 - DNA, 20 bp, synthetic construct
  source 1..20: mol_type = other DNA
ccggcagacgtgacgtcagg

SEQ ID NO: 3841 - DNA, 20 bp, synthetic construct
  source 1..20: mol_type = other DNA
ctccgcctcggcgacccacg

SEQ ID NO: 3842 - DNA, 20 bp, synthetic construct
  source 1..20: mol_type = other DNA
acctccgcctcggcgaccca

SEQ ID NO: 3843 - DNA, 20 bp, synthetic construct
  source 1..20: mol_type = other DNA
cggcagatcctaattgggga

SEQ ID NO: 3844 - DNA, 20 bp, synthetic construct
  source 1..20: mol_type = other DNA
aaggcgtgcgaggagcccga

SEQ ID NO: 3845 - DNA, 20 bp, synthetic construct
  source 1..20: mol_type = other DNA
ctaattggggaaggcgtgcg

SEQ ID NO: 3846 - DNA, 20 bp, synthetic construct
  source 1..20: mol_type = other DNA
ccagtggatgtggagggtgg

SEQ ID NO: 3847 - DNA, 20 bp, synthetic construct
  source 1..20: mol_type = other DNA
aggacaggggatcccgccaa

SEQ ID NO: 3848 - DNA, 20 bp, synthetic construct
  source 1..20: mol_type = other DNA
ggacaggggatcccgccaag

SEQ ID NO: 3849 - DNA, 20 bp, synthetic construct
  source 1..20: mol_type = other DNA
cccagctcttcccaggacag

SEQ ID NO: 3850 - DNA, 20 bp, synthetic construct
  source 1..20: mol_type = other DNA
gcagctggagcagcgagccg

SEQ ID NO: 3851 - DNA, 20 bp, synthetic construct
  source 1..20: mol_type = other DNA
gggccgcagggagaaaggcg

SEQ ID NO: 3852 - DNA, 20 bp, synthetic construct
  source 1..20: mol_type = other DNA
gggcagctggagcagcgagc

SEQ ID NO: 3853 - DNA, 20 bp, synthetic construct
  source 1..20: mol_type = other DNA
ggccgcagggagaaaggcgc

SEQ ID NO: 3854 - DNA, 20 bp, synthetic construct
  source 1..20: mol_type = other DNA
gcccagctcttcccaggaca

SEQ ID NO: 3855 - DNA, 20 bp, synthetic construct
  source 1..20: mol_type = other DNA
caggacaggggatcccgcca

SEQ ID NO: 3856 - DNA, 20 bp, synthetic construct
  source 1..20: mol_type = other DNA
ccagctgcccagctcttccc

SEQ ID NO: 3857 - DNA, 20 bp, synthetic construct
  source 1..20: mol_type = other DNA
cccctgtcctgggaagagct

SEQ ID NO: 3858 - DNA, 20 bp, synthetic construct
  source 1..20: mol_type = other DNA
tgcccagctcttcccaggac

SEQ ID NO: 3859 - DNA, 20 bp, synthetic construct
  source 1..20: mol_type = other DNA
agcagcgagccggggccgca

SEQ ID NO: 3860 - DNA, 20 bp, synthetic construct
  source 1..20: mol_type = other DNA
gagcagcgagccggggccgc

SEQ ID NO: 3861 - DNA, 20 bp, synthetic construct
  source 1..20: mol_type = other DNA
agccggggccgcagggagaa

SEQ ID NO: 3862 - DNA, 20 bp, synthetic construct
  source 1..20: mol_type = other DNA
tagcgtgcagacgcctactg

SEQ ID NO: 3863 - DNA, 20 bp, synthetic construct
  source 1..20: mol_type = other DNA
ggcaacagcactctaggcgc

SEQ ID NO: 3864 - DNA, 20 bp, synthetic construct
  source 1..20: mol_type = other DNA
gcatacttccggattcacgg

SEQ ID NO: 3865 - DNA, 20 bp, synthetic construct
  source 1..20: mol_type = other DNA
gcagaggcgacctccaggca

SEQ ID NO: 3866 - DNA, 20 bp, synthetic construct
  source 1..20: mol_type = other DNA
gagccccgcccccaaaagtc

SEQ ID NO: 3867 - DNA, 20 bp, synthetic construct
  source 1..20: mol_type = other DNA
caggcgcagaggcgacctcc

SEQ ID NO: 3868 - DNA, 20 bp, synthetic construct
  source 1..20: mol_type = other DNA
gcagggccaggtgggaggga

SEQ ID NO: 3869 - DNA, 20 bp, synthetic construct
  source 1..20: mol_type = other DNA
cactctaggcgcaggcgcag

SEQ ID NO: 3870 - DNA, 20 bp, synthetic construct
  source 1..20: mol_type = other DNA
ccccgcctcccccagccccg

SEQ ID NO: 3871 - DNA, 20 bp, synthetic construct
  source 1..20: mol_type = other DNA
ccaggtgggagggacggtgg

SEQ ID NO: 3872 - DNA, 20 bp, synthetic construct
  source 1..20: mol_type = other DNA
gggccaggtgggagggacgg

SEQ ID NO: 3873 - DNA, 20 bp, synthetic construct
  source 1..20: mol_type = other DNA
tcccacctggccctgcctgg

SEQ ID NO: 3874 - DNA, 20 bp, synthetic construct
  source 1..20: mol_type = other DNA
gccaggtgggagggacggtg

SEQ ID NO: 3875 - DNA, 20 bp, synthetic construct
  source 1..20: mol_type = other DNA
ccaggcagggccaggtggga

SEQ ID NO: 3876 - DNA, 20 bp, synthetic construct
  source 1..20: mol_type = other DNA
gggggaggcggggcctcagt

SEQ ID NO: 3877 - DNA, 20 bp, synthetic construct
  source 1..20: mol_type = other DNA
acaggtcttgatcctaacat

SEQ ID NO: 3878 - DNA, 20 bp, synthetic construct
  source 1..20: mol_type = other DNA
agtttgctcactggacgagt

SEQ ID NO: 3879 - DNA, 20 bp, synthetic construct
  source 1..20: mol_type = other DNA
ttcctgtctggcttaactag

SEQ ID NO: 3880 - DNA, 20 bp, synthetic construct
  source 1..20: mol_type = other DNA
tggcttaactagagggcctg

SEQ ID NO: 3881 - DNA, 20 bp, synthetic construct
  source 1..20: mol_type = other DNA
gagcttgacagttcaccaga

SEQ ID NO: 3882 - DNA, 20 bp, synthetic construct
  source 1..20: mol_type = other DNA
taactagagggcctgtggtg

SEQ ID NO: 3883 - DNA, 20 bp, synthetic construct
  source 1..20: mol_type = other DNA
tccagtttatgcctcaccac

SEQ ID NO: 3884 - DNA, 20 bp, synthetic construct
  source 1..20: mol_type = other DNA
gtaggaaagtcattcctgtc

SEQ ID NO: 3885 - DNA, 20 bp, synthetic construct
  source 1..20: mol_type = other DNA
gccagtagataccacagctg

SEQ ID NO: 3886 - DNA, 20 bp, synthetic construct
  source 1..20: mol_type = other DNA
gccctctagttaagccagac

SEQ ID NO: 3887 - DNA, 20 bp, synthetic construct
  source 1..20: mol_type = other DNA
aaagtgactagctcaagtcc

SEQ ID NO: 3888 - DNA, 20 bp, synthetic construct
  source 1..20: mol_type = other DNA
ctttggtaaatagaacactc

SEQ ID NO: 3889 - DNA, 20 bp, synthetic construct
  source 1..20: mol_type = other DNA
tcacttctgagccccagctg

SEQ ID NO: 3890 - DNA, 20 bp, synthetic construct
  source 1..20: mol_type = other DNA
ggccagtagataccacagct

SEQ ID NO: 3891 - DNA, 20 bp, synthetic construct
  source 1..20: mol_type = other DNA
taacctggtcgcttagcact

SEQ ID NO: 3892 - DNA, 20 bp, synthetic construct
  source 1..20: mol_type = other DNA
ggtgagtcctggccgaacgc

SEQ ID NO: 3893 - DNA, 20 bp, synthetic construct
  source 1..20: mol_type = other DNA
cggtgagtcctggccgaacg

SEQ ID NO: 3894 - DNA, 20 bp, synthetic construct
  source 1..20: mol_type = other DNA
ccccgcgcagcccccgacgg

SEQ ID NO: 3895 - DNA, 20 bp, synthetic construct
  source 1..20: mol_type = other DNA
gcgggcgcgggcgtgatgag

SEQ ID NO: 3896 - DNA, 20 bp, synthetic construct
  source 1..20: mol_type = other DNA
ggggggcccacgaggcgacg

SEQ ID NO: 3897 - DNA, 20 bp, synthetic construct
  source 1..20: mol_type = other DNA
gccaggactcaccgcagtcc

SEQ ID NO: 3898 - DNA, 20 bp, synthetic construct
  source 1..20: mol_type = other DNA
tcctggccgaacgcgggcgc

SEQ ID NO: 3899 - DNA, 20 bp, synthetic construct
  source 1..20: mol_type = other DNA
acgctcacttccgccgccgt

SEQ ID NO: 3900 - DNA, 20 bp, synthetic construct
  source 1..20: mol_type = other DNA
agcccccgcgcagcccccga

SEQ ID NO: 3901 - DNA, 20 bp, synthetic construct
  source 1..20: mol_type = other DNA
cgggcgcgggcgtgatgagg

SEQ ID NO: 3902 - DNA, 20 bp, synthetic construct
  source 1..20: mol_type = other DNA
ctcacttccgccgccgtcgg

SEQ ID NO: 3903 - DNA, 20 bp, synthetic construct
  source 1..20: mol_type = other DNA
gctcacttccgccgccgtcg

SEQ ID NO: 3904 - DNA, 20 bp, synthetic construct
  source 1..20: mol_type = other DNA
gggctgtggctccgggactg

SEQ ID NO: 3905 - DNA, 20 bp, synthetic construct
  source 1..20: mol_type = other DNA
acgcgggcgcgggcgtgatg

SEQ ID NO: 3906 - DNA, 20 bp, synthetic construct
  source 1..20: mol_type = other DNA
cgccgtcgggggctgcgcgg

SEQ ID NO: 3907 - DNA, 20 bp, synthetic construct
  source 1..20: mol_type = other DNA
tggtcgtatgcaaatagccc

SEQ ID NO: 3908 - DNA, 20 bp, synthetic construct
  source 1..20: mol_type = other DNA
tcgtatgcaaatagccccgg

SEQ ID NO: 3909 - DNA, 20 bp, synthetic construct
  source 1..20: mol_type = other DNA
tctaccaaatatagctacgg

SEQ ID NO: 3910 - DNA, 20 bp, synthetic construct
  source 1..20: mol_type = other DNA
tgttctaccaaatatagcta

SEQ ID NO: 3911 - DNA, 20 bp, synthetic construct
  source 1..20: mol_type = other DNA
gaacaaatgtctgtacacat

SEQ ID NO: 3912 - DNA, 20 bp, synthetic construct
  source 1..20: mol_type = other DNA
gcctcccaaagacttctggg

SEQ ID NO: 3913 - DNA, 20 bp, synthetic construct
  source 1..20: mol_type = other DNA
tatgcaaatagccccggagg

SEQ ID NO: 3914 - DNA, 20 bp, synthetic construct
  source 1..20: mol_type = other DNA
cattgggctaatataaatag

SEQ ID NO: 3915 - DNA, 20 bp, synthetic construct
  source 1..20: mol_type = other DNA
tgcaaatagccccggaggcg

SEQ ID NO: 3916 - DNA, 20 bp, synthetic construct
  source 1..20: mol_type = other DNA
cctcccaaagacttctggga

SEQ ID NO: 3917 - DNA, 20 bp, synthetic construct
  source 1..20: mol_type = other DNA
aaccagtcgcctgaggcgtg

SEQ ID NO: 3918 - DNA, 20 bp, synthetic construct
  source 1..20: mol_type = other DNA
acaaccagtcgcctgaggcg

SEQ ID NO: 3919 - DNA, 20 bp, synthetic construct
  source 1..20: mol_type = other DNA
ccctcccagaagtctttggg

SEQ ID NO: 3920 - DNA, 20 bp, synthetic construct
  source 1..20: mol_type = other DNA
caggctctgccccgcctccg

SEQ ID NO: 3921 - DNA, 20 bp, synthetic construct
  source 1..20: mol_type = other DNA
atatagctacggtggctgct

SEQ ID NO: 3922 - DNA, 20 bp, synthetic construct
  source 1..20: mol_type = other DNA
tagccgcagaactggaaatc

SEQ ID NO: 3923 - DNA, 20 bp, synthetic construct
  source 1..20: mol_type = other DNA
cgcttagagttgatcaacag

SEQ ID NO: 3924 - DNA, 20 bp, synthetic construct
  source 1..20: mol_type = other DNA
gatataatgttacacatcag

SEQ ID NO: 3925 - DNA, 20 bp, synthetic construct
  source 1..20: mol_type = other DNA
agtgggtgtagtaacggctt

SEQ ID NO: 3926 - DNA, 20 bp, synthetic construct
  source 1..20: mol_type = other DNA
cacatcagtgggtgtagtaa

SEQ ID NO: 3927 - DNA, 20 bp, synthetic construct
  source 1..20: mol_type = other DNA
atcaactctaagcgaaaatc

SEQ ID NO: 3928 - DNA, 20 bp, synthetic construct
  source 1..20: mol_type = other DNA
gcgaaaatcaggactccatc

SEQ ID NO: 3929 - DNA, 20 bp, synthetic construct
  source 1..20: mol_type = other DNA
tatctgagttgtaaataaag

SEQ ID NO: 3930 - DNA, 20 bp, synthetic construct
  source 1..20: mol_type = other DNA
cgcagaactggaaatccgga

SEQ ID NO: 3931 - DNA, 20 bp, synthetic construct
  source 1..20: mol_type = other DNA
atataatgttacacatcagt

SEQ ID NO: 3932 - DNA, 20 bp, synthetic construct
  source 1..20: mol_type = other DNA
atacaaatgcaagaaacaat

SEQ ID NO: 3933 - DNA, 20 bp, synthetic construct
  source 1..20: mol_type = other DNA
atgtgtaacattatatcaga

SEQ ID NO: 3934 - DNA, 20 bp, synthetic construct
  source 1..20: mol_type = other DNA
aataaattaatattaagcaa

SEQ ID NO: 3935 - DNA, 20 bp, synthetic construct
  source 1..20: mol_type = other DNA
tattaatttattcttattct

SEQ ID NO: 3936 - DNA, 20 bp, synthetic construct
  source 1..20: mol_type = other DNA
aacggcggagacctgagacc

SEQ ID NO: 3937 - DNA, 20 bp, synthetic construct
  source 1..20: mol_type = other DNA
ggcggagacctgagacccgg

SEQ ID NO: 3938 - DNA, 20 bp, synthetic construct
  source 1..20: mol_type = other DNA
gacctgagacccggaggctg

SEQ ID NO: 3939 - DNA, 20 bp, synthetic construct
  source 1..20: mol_type = other DNA
gactccttgagaagaaacgg

SEQ ID NO: 3940 - DNA, 20 bp, synthetic construct
  source 1..20: mol_type = other DNA
tggatcaggcgccagccttg

SEQ ID NO: 3941 - DNA, 20 bp, synthetic construct
  source 1..20: mol_type = other DNA
tcttctcaaggagtcggtcg

SEQ ID NO: 3942 - DNA, 20 bp, synthetic construct
  source 1..20: mol_type = other DNA
ccaatcagacacctcaaggc

SEQ ID NO: 3943 - DNA, 20 bp, synthetic construct
  source 1..20: mol_type = other DNA
cggaggctgaggctgtaggt

SEQ ID NO: 3944 - DNA, 20 bp, synthetic construct
  source 1..20: mol_type = other DNA
ttcgcgttcccaccctccag

SEQ ID NO: 3945 - DNA, 20 bp, synthetic construct
  source 1..20: mol_type = other DNA
gaagttcctacctgcacctg

SEQ ID NO: 3946 - DNA, 20 bp, synthetic construct
  source 1..20: mol_type = other DNA
atccaatctcctcccctgga

SEQ ID NO: 3947 - DNA, 20 bp, synthetic construct
  source 1..20: mol_type = other DNA
gtcaccgctgccacaggtgc

SEQ ID NO: 3948 - DNA, 20 bp, synthetic construct
  source 1..20: mol_type = other DNA
gccgtttcttctcaaggagt

SEQ ID NO: 3949 - DNA, 20 bp, synthetic construct
  source 1..20: mol_type = other DNA
gcgttcccaccctccagggg

SEQ ID NO: 3950 - DNA, 20 bp, synthetic construct
  source 1..20: mol_type = other DNA
accgactccttgagaagaaa

SEQ ID NO: 3951 - DNA, 20 bp, synthetic construct
  source 1..20: mol_type = other DNA
gcaaccggttgtaccgcgag

SEQ ID NO: 3952 - DNA, 20 bp, synthetic construct
  source 1..20: mol_type = other DNA
gggcaaccggttgtaccgcg

SEQ ID NO: 3953 - DNA, 20 bp, synthetic construct
  source 1..20: mol_type = other DNA
ggcaaccggttgtaccgcga

SEQ ID NO: 3954 - DNA, 20 bp, synthetic construct
  source 1..20: mol_type = other DNA
gtaccgcgaggggcatgtga

SEQ ID NO: 3955 - DNA, 20 bp, synthetic construct
  source 1..20: mol_type = other DNA
agtgccacttatccaccagg

SEQ ID NO: 3956 - DNA, 20 bp, synthetic construct
  source 1..20: mol_type = other DNA
ggccatgacagacgaagaga

SEQ ID NO: 3957 - DNA, 20 bp, synthetic construct
  source 1..20: mol_type = other DNA
gagccctggcacgtaccagc

SEQ ID NO: 3958 - DNA, 20 bp, synthetic construct
  source 1..20: mol_type = other DNA
acaaccggttgccctcctgg

SEQ ID NO: 3959 - DNA, 20 bp, synthetic construct
  source 1..20: mol_type = other DNA
gcacgtaccagcaggaccca

SEQ ID NO: 3960 - DNA, 20 bp, synthetic construct
  source 1..20: mol_type = other DNA
cctccttcacatgcccctcg

SEQ ID NO: 3961 - DNA, 20 bp, synthetic construct
  source 1..20: mol_type = other DNA
ggcagtgccacttatccacc

SEQ ID NO: 3962 - DNA, 20 bp, synthetic construct
  source 1..20: mol_type = other DNA
ccgcgaggggcatgtgaagg

SEQ ID NO: 3963 - DNA, 20 bp, synthetic construct
  source 1..20: mol_type = other DNA
gacagacgaagagaaggcaa

SEQ ID NO: 3964 - DNA, 20 bp, synthetic construct
  source 1..20: mol_type = other DNA
gtgccacttatccaccagga

SEQ ID NO: 3965 - DNA, 20 bp, synthetic construct
  source 1..20: mol_type = other DNA
ttgccctcctggtggataag

SEQ ID NO: 3966 - DNA, 20 bp, synthetic construct
  source 1..20: mol_type = other DNA
ggccggctacacctaaaagg

SEQ ID NO: 3967 - DNA, 20 bp, synthetic construct
  source 1..20: mol_type = other DNA
ccggctacacctaaaaggcg

SEQ ID NO: 3968 - DNA, 20 bp, synthetic construct
  source 1..20: mol_type = other DNA
ttcggttatcatagaaacag

SEQ ID NO: 3969 - DNA, 20 bp, synthetic construct
  source 1..20: mol_type = other DNA
gggccacagcaagcgcaggc

SEQ ID NO: 3970 - DNA, 20 bp, synthetic construct
  source 1..20: mol_type = other DNA
gcgtcaaagcgggacatgac

SEQ ID NO: 3971 - DNA, 20 bp, synthetic construct
  source 1..20: mol_type = other DNA
gctgcggagaaagcggtgta

SEQ ID NO: 3972 - DNA, 20 bp, synthetic construct
  source 1..20: mol_type = other DNA
gccggctacacctaaaaggc

SEQ ID NO: 3973 - DNA, 20 bp, synthetic construct
  source 1..20: mol_type = other DNA
cgggccacagcaagcgcagg

SEQ ID NO: 3974 - DNA, 20 bp, synthetic construct
  source 1..20: mol_type = other DNA
ggagaaagcggtgtagggag

SEQ ID NO: 3975 - DNA, 20 bp, synthetic construct
  source 1..20: mol_type = other DNA
ctttgacgctgcggagaaag

SEQ ID NO: 3976 - DNA, 20 bp, synthetic construct
  source 1..20: mol_type = other DNA
agcgtcaaagcgggacatga

SEQ ID NO: 3977 - DNA, 20 bp, synthetic construct
  source 1..20: mol_type = other DNA
gttatcatagaaacagaggc

SEQ ID NO: 3978 - DNA, 20 bp, synthetic construct
  source 1..20: mol_type = other DNA
gtagggagaggcttgggctt

SEQ ID NO: 3979 - DNA, 20 bp, synthetic construct
  source 1..20: mol_type = other DNA
catgtcccgctttgacgctg

SEQ ID NO: 3980 - DNA, 20 bp, synthetic construct
  source 1..20: mol_type = other DNA
aagcggtgtagggagaggct

SEQ ID NO: 3981 - DNA, 20 bp, synthetic construct
  source 1..20: mol_type = other DNA
tggaagagaaaccccgccag

SEQ ID NO: 3982 - DNA, 20 bp, synthetic construct
  source 1..20: mol_type = other DNA
ggaatcgggtccgccaggtg

SEQ ID NO: 3983 - DNA, 20 bp, synthetic construct
  source 1..20: mol_type = other DNA
gacgctgcgcccgcctggtg

SEQ ID NO: 3984 - DNA, 20 bp, synthetic construct
  source 1..20: mol_type = other DNA
cgggcgcagcgtcccaagca

SEQ ID NO: 3985 - DNA, 20 bp, synthetic construct
  source 1..20: mol_type = other DNA
gggacccgctccccacctgg

SEQ ID NO: 3986 - DNA, 20 bp, synthetic construct
  source 1..20: mol_type = other DNA
tccggctatcgtccctgctt

SEQ ID NO: 3987 - DNA, 20 bp, synthetic construct
  source 1..20: mol_type = other DNA
ccggaatcgggtccgccagg

SEQ ID NO: 3988 - DNA, 20 bp, synthetic construct
  source 1..20: mol_type = other DNA
gaaccccgccccgcaccagg

SEQ ID NO: 3989 - DNA, 20 bp, synthetic construct
  source 1..20: mol_type = other DNA
ccggaaccccgccccgcacc

SEQ ID NO: 3990 - DNA, 20 bp, synthetic construct
  source 1..20: mol_type = other DNA
cgggtccccggcctctggcg

SEQ ID NO: 3991 - DNA, 20 bp, synthetic construct
  source 1..20: mol_type = other DNA
actgaaagccctgaaccctc

SEQ ID NO: 3992 - DNA, 20 bp, synthetic construct
  source 1..20: mol_type = other DNA
agagaaaccccgccagaggc

SEQ ID NO: 3993 - DNA, 20 bp, synthetic construct
  source 1..20: mol_type = other DNA
ggggcggggttccggcgcag

SEQ ID NO: 3994 - DNA, 20 bp, synthetic construct
  source 1..20: mol_type = other DNA
agaaaccccgccagaggccg

SEQ ID NO: 3995 - DNA, 20 bp, synthetic construct
  source 1..20: mol_type = other DNA
agcgggtccccggcctctgg

SEQ ID NO: 3996 - DNA, 20 bp, synthetic construct
  source 1..20: mol_type = other DNA
accacggcacgaagttgggt

SEQ ID NO: 3997 - DNA, 20 bp, synthetic construct
  source 1..20: mol_type = other DNA
ccagctacttgagcgtgaag

SEQ ID NO: 3998 - DNA, 20 bp, synthetic construct
  source 1..20: mol_type = other DNA
agctgggacgccccttcgtg

SEQ ID NO: 3999 - DNA, 20 bp, synthetic construct
  source 1..20: mol_type = other DNA
agcagcttcagccgcaacca

SEQ ID NO: 4000 - DNA, 20 bp, synthetic construct
  source 1..20: mol_type = other DNA
gtatcccgccaggtgagaag

SEQ ID NO: 4001 - DNA, 20 bp, synthetic construct
  source 1..20: mol_type = other DNA
ggggcggcgcccgcacgaag

SEQ ID NO: 4002 - DNA, 20 bp, synthetic construct
  source 1..20: mol_type = other DNA
gctacttgagcgtgaagggg

SEQ ID NO: 4003 - DNA, 20 bp, synthetic construct
  source 1..20: mol_type = other DNA
ggggcgtcccagcttggagg

SEQ ID NO: 4004 - DNA, 20 bp, synthetic construct
  source 1..20: mol_type = other DNA
gaccagctacttgagcgtga

SEQ ID NO: 4005 - DNA, 20 bp, synthetic construct
  source 1..20: mol_type = other DNA
actcttatccccttctcacc

SEQ ID NO: 4006 - DNA, 20 bp, synthetic construct
  source 1..20: mol_type = other DNA
agtatcccgccaggtgagaa

SEQ ID NO: 4007 - DNA, 20 bp, synthetic construct
  source 1..20: mol_type = other DNA
gccgagtgcagtatcccgcc

SEQ ID NO: 4008 - DNA, 20 bp, synthetic construct
  source 1..20: mol_type = other DNA
cttatccccttctcacctgg

SEQ ID NO: 4009 - DNA, 20 bp, synthetic construct
  source 1..20: mol_type = other DNA
ggtgagaaggggataagagt

SEQ ID NO: 4010 - DNA, 20 bp, synthetic construct
  source 1..20: mol_type = other DNA
gtgagaaggggataagagtc

SEQ ID NO: 4011 - DNA, 20 bp, synthetic construct
  source 1..20: mol_type = other DNA
gaggcgagtcggtgtgtccc

SEQ ID NO: 4012 - DNA, 20 bp, synthetic construct
  source 1..20: mol_type = other DNA
gctggactgacaggccgacc

SEQ ID NO: 4013 - DNA, 20 bp, synthetic construct
  source 1..20: mol_type = other DNA
catacacacacttagccctg

SEQ ID NO: 4014 - DNA, 20 bp, synthetic construct
  source 1..20: mol_type = other DNA
tgcaacttccgtcccagcca

SEQ ID NO: 4015 - DNA, 20 bp, synthetic construct
  source 1..20: mol_type = other DNA
tgacaggccgacctggctgg

SEQ ID NO: 4016 - DNA, 20 bp, synthetic construct
  source 1..20: mol_type = other DNA
ctggagtccaccagccaggt

SEQ ID NO: 4017 - DNA, 20 bp, synthetic construct
  source 1..20: mol_type = other DNA
ggcaggcagctggcaggctt

SEQ ID NO: 4018 - DNA, 20 bp, synthetic construct
  source 1..20: mol_type = other DNA
gcggggcctgaggctgtgcg

SEQ ID NO: 4019 - DNA, 20 bp, synthetic construct
  source 1..20: mol_type = other DNA
agcctgccagctgcctgccg

SEQ ID NO: 4020 - DNA, 20 bp, synthetic construct
  source 1..20: mol_type = other DNA
gccaaggcccccaccccggc

SEQ ID NO: 4021 - DNA, 20 bp, synthetic construct
  source 1..20: mol_type = other DNA
tcccgccaaggcccccaccc

SEQ ID NO: 4022 - DNA, 20 bp, synthetic construct
  source 1..20: mol_type = other DNA
ggcagctggcaggcttgggc

SEQ ID NO: 4023 - DNA, 20 bp, synthetic construct
  source 1..20: mol_type = other DNA
ggccccgtcctctcccgcca

SEQ ID NO: 4024 - DNA, 20 bp, synthetic construct
  source 1..20: mol_type = other DNA
gccccgccttcctccccacc

SEQ ID NO: 4025 - DNA, 20 bp, synthetic construct
  source 1..20: mol_type = other DNA
gccgggtggggaggaaggcg

SEQ ID NO: 4026 - DNA, 20 bp, synthetic construct
  source 1..20: mol_type = other DNA
caggtgataactgtcttctg

SEQ ID NO: 4027 - DNA, 20 bp, synthetic construct
  source 1..20: mol_type = other DNA
gccaagttgtgtaatgagga

SEQ ID NO: 4028 - DNA, 20 bp, synthetic construct
  source 1..20: mol_type = other DNA
gcctcagaacacaagcatgc

SEQ ID NO: 4029 - DNA, 20 bp, synthetic construct
  source 1..20: mol_type = other DNA
caagtgagagctcttctctg

SEQ ID NO: 4030 - DNA, 20 bp, synthetic construct
  source 1..20: mol_type = other DNA
taatgaggagggttgttgag

SEQ ID NO: 4031 - DNA, 20 bp, synthetic construct
  source 1..20: mol_type = other DNA
ggccaagttgtgtaatgagg

SEQ ID NO: 4032 - DNA, 20 bp, synthetic construct
  source 1..20: mol_type = other DNA
cctggccaagttgtgtaatg

SEQ ID NO: 4033 - DNA, 20 bp, synthetic construct
  source 1..20: mol_type = other DNA
tcctgcatgcttgtgttctg

SEQ ID NO: 4034 - DNA, 20 bp, synthetic construct
  source 1..20: mol_type = other DNA
agagctctcacttggacagg

SEQ ID NO: 4035 - DNA, 20 bp, synthetic construct
  source 1..20: mol_type = other DNA
tgtaatgaggagggttgttg

SEQ ID NO: 4036 - DNA, 20 bp, synthetic construct
  source 1..20: mol_type = other DNA
gcatgcttgtgttctgaggc

SEQ ID NO: 4037 - DNA, 20 bp, synthetic construct
  source 1..20: mol_type = other DNA
gtaatgaggagggttgttga

SEQ ID NO: 4038 - DNA, 20 bp, synthetic construct
  source 1..20: mol_type = other DNA
ctcattacacaacttggcca

SEQ ID NO: 4039 - DNA, 20 bp, synthetic construct
  source 1..20: mol_type = other DNA
ggcaggtgataactgtcttc

SEQ ID NO: 4040 - DNA, 20 bp, synthetic construct
  source 1..20: mol_type = other DNA
gcaggtgataactgtcttct

SEQ ID NO: 4041 - DNA, 20 bp, synthetic construct
  source 1..20: mol_type = other DNA
cccggctacattccaaggcg

SEQ ID NO: 4042 - DNA, 20 bp, synthetic construct
  source 1..20: mol_type = other DNA
gagtgtctgtgacgtcaccg

SEQ ID NO: 4043 - DNA, 20 bp, synthetic construct
  source 1..20: mol_type = other DNA
cacgccttggaatgtagccg

SEQ ID NO: 4044 - DNA, 20 bp, synthetic construct
  source 1..20: mol_type = other DNA
gtgacgtcacagacactccc

SEQ ID NO: 4045 - DNA, 20 bp, synthetic construct
  source 1..20: mol_type = other DNA
ccggctacattccaaggcgt

SEQ ID NO: 4046 - DNA, 20 bp, synthetic construct
  source 1..20: mol_type = other DNA
gctacattccaaggcgtggg

SEQ ID NO: 4047 - DNA, 20 bp, synthetic construct
  source 1..20: mol_type = other DNA
ccaattggtcaagccttgga

SEQ ID NO: 4048 - DNA, 20 bp, synthetic construct
  source 1..20: mol_type = other DNA
gcgggccgcgctcaagcagg

SEQ ID NO: 4049 - DNA, 20 bp, synthetic construct
  source 1..20: mol_type = other DNA
tgtcccgcccccaaaggcag

SEQ ID NO: 4050 - DNA, 20 bp, synthetic construct
  source 1..20: mol_type = other DNA
cactccccggctacattcca

SEQ ID NO: 4051 - DNA, 20 bp, synthetic construct
  source 1..20: mol_type = other DNA
attgggtctgctaggcaagg

SEQ ID NO: 4052 - DNA, 20 bp, synthetic construct
  source 1..20: mol_type = other DNA
attggtcaagccttggaggg

SEQ ID NO: 4053 - DNA, 20 bp, synthetic construct
  source 1..20: mol_type = other DNA
cccccaaaggcagaggccgc

SEQ ID NO: 4054 - DNA, 20 bp, synthetic construct
  source 1..20: mol_type = other DNA
gcgtgggcggagacttcccg

SEQ ID NO: 4055 - DNA, 20 bp, synthetic construct
  source 1..20: mol_type = other DNA
cccgcggcctctgcctttgg

SEQ ID NO: 4056 - DNA, 20 bp, synthetic construct
  source 1..20: mol_type = other DNA
cccagcggctagtgcgcccc

SEQ ID NO: 4057 - DNA, 20 bp, synthetic construct
  source 1..20: mol_type = other DNA
gagcaaggagtgcaggaccg

SEQ ID NO: 4058 - DNA, 20 bp, synthetic construct
  source 1..20: mol_type = other DNA
cccccgcccccacctacccg

SEQ ID NO: 4059 - DNA, 20 bp, synthetic construct
  source 1..20: mol_type = other DNA
ggagcaaggagtgcaggacc

SEQ ID NO: 4060 - DNA, 20 bp, synthetic construct
  source 1..20: mol_type = other DNA
gggggacggtccgcgcccag

SEQ ID NO: 4061 - DNA, 20 bp, synthetic construct
  source 1..20: mol_type = other DNA
gaccgtccccctgaggagca

SEQ ID NO: 4062 - DNA, 20 bp, synthetic construct
  source 1..20: mol_type = other DNA
cccgagccgcgtcagggcag

SEQ ID NO: 4063 - DNA, 20 bp, synthetic construct
  source 1..20: mol_type = other DNA
tagtgcgccccgggtaggtg

SEQ ID NO: 4064 - DNA, 20 bp, synthetic construct
  source 1..20: mol_type = other DNA
tctgcgcatccggccccgga

SEQ ID NO: 4065 - DNA, 20 bp, synthetic construct
  source 1..20: mol_type = other DNA
gggcgcggaccgtccccctg

SEQ ID NO: 4066 - DNA, 20 bp, synthetic construct
  source 1..20: mol_type = other DNA
acccggggcgcactagccgc

SEQ ID NO: 4067 - DNA, 20 bp, synthetic construct
  source 1..20: mol_type = other DNA
cccggggcgcactagccgct

SEQ ID NO: 4068 - DNA, 20 bp, synthetic construct
  source 1..20: mol_type = other DNA
gcccagcggctagtgcgccc

SEQ ID NO: 4069 - DNA, 20 bp, synthetic construct
  source 1..20: mol_type = other DNA
gcggctagtgcgccccgggt

SEQ ID NO: 4070 - DNA, 20 bp, synthetic construct
  source 1..20: mol_type = other DNA
agtgcgccccgggtaggtgg

SEQ ID NO: 4071 - DNA, 20 bp, synthetic construct
  source 1..20: mol_type = other DNA
agtggctgaaatccaagctg

SEQ ID NO: 4072 - DNA, 20 bp, synthetic construct
  source 1..20: mol_type = other DNA
tgcacagagcccagagcccg

SEQ ID NO: 4073 - DNA, 20 bp, synthetic construct
  source 1..20: mol_type = other DNA
gtggctgaaatccaagctga

SEQ ID NO: 4074 - DNA, 20 bp, synthetic construct
  source 1..20: mol_type = other DNA
gcacagagcccagagcccga

SEQ ID NO: 4075 - DNA, 20 bp, synthetic construct
  source 1..20: mol_type = other DNA
ggctctgtgcaatccgggag

SEQ ID NO: 4076 - DNA, 20 bp, synthetic construct
  source 1..20: mol_type = other DNA
gagggcccgcgggcagcaga

SEQ ID NO: 4077 - DNA, 20 bp, synthetic construct
  source 1..20: mol_type = other DNA
agagggcccgcgggcagcag

SEQ ID NO: 4078 - DNA, 20 bp, synthetic construct
  source 1..20: mol_type = other DNA
cgagggcctgagggcctacg

SEQ ID NO: 4079 - DNA, 20 bp, synthetic construct
  source 1..20: mol_type = other DNA
tgagggcctacggggctgga

SEQ ID NO: 4080 - DNA, 20 bp, synthetic construct
  source 1..20: mol_type = other DNA
gcccagagcccgagggcctg

SEQ ID NO: 4081 - DNA, 20 bp, synthetic construct
  source 1..20: mol_type = other DNA
tccaagctgagggtaatgaa

SEQ ID NO: 4082 - DNA, 20 bp, synthetic construct
  source 1..20: mol_type = other DNA
gcccgccctctgctgcccgc

SEQ ID NO: 4083 - DNA, 20 bp, synthetic construct
  source 1..20: mol_type = other DNA
gcccgcgggcagcagagggc

SEQ ID NO: 4084 - DNA, 20 bp, synthetic construct
  source 1..20: mol_type = other DNA
accctgccctccagccccgt

SEQ ID NO: 4085 - DNA, 20 bp, synthetic construct
  source 1..20: mol_type = other DNA
ctgagggcctacggggctgg

SEQ ID NO: 4086 - DNA, 20 bp, synthetic construct
  source 1..20: mol_type = other DNA
gacacacccccttacgccga

SEQ ID NO: 4087 - DNA, 20 bp, synthetic construct
  source 1..20: mol_type = other DNA
gcagagccgggagtcgtcgg

SEQ ID NO: 4088 - DNA, 20 bp, synthetic construct
  source 1..20: mol_type = other DNA
gcggggccgtcggcgtaagg

SEQ ID NO: 4089 - DNA, 20 bp, synthetic construct
  source 1..20: mol_type = other DNA
gggtgtgtccgcgcgcacca

SEQ ID NO: 4090 - DNA, 20 bp, synthetic construct
  source 1..20: mol_type = other DNA
gcgctacggaaagccggagg

SEQ ID NO: 4091 - DNA, 20 bp, synthetic construct
  source 1..20: mol_type = other DNA
ccggccgcgcgcctcgtcgg

SEQ ID NO: 4092 - DNA, 20 bp, synthetic construct
  source 1..20: mol_type = other DNA
gacgttccgcgccaccgacg

SEQ ID NO: 4093 - DNA, 20 bp, synthetic construct
  source 1..20: mol_type = other DNA
ctcgcctcctccctctctcg

SEQ ID NO: 4094 - DNA, 20 bp, synthetic construct
  source 1..20: mol_type = other DNA
tgcaaatcctcgagagaggg

SEQ ID NO: 4095 - DNA, 20 bp, synthetic construct
  source 1..20: mol_type = other DNA
gtcggtggcgcggaacgtcc

SEQ ID NO: 4096 - DNA, 20 bp, synthetic construct
  source 1..20: mol_type = other DNA
gaacgtcccggctcgcgcta

SEQ ID NO: 4097 - DNA, 20 bp, synthetic construct
  source 1..20: mol_type = other DNA
gctctgcaaatcctcgagag

SEQ ID NO: 4098 - DNA, 20 bp, synthetic construct
  source 1..20: mol_type = other DNA
ggaggaggcgagcggagcgc

SEQ ID NO: 4099 - DNA, 20 bp, synthetic construct
  source 1..20: mol_type = other DNA
aaatcctcgagagagggagg

SEQ ID NO: 4100 - DNA, 20 bp, synthetic construct
  source 1..20: mol_type = other DNA
cgagagagggaggaggcgag

SEQ ID NO: 4101 - DNA, 20 bp, synthetic construct
  source 1..20: mol_type = other DNA
tgtctgtggcctgcacagcg

SEQ ID NO: 4102 - DNA, 20 bp, synthetic construct
  source 1..20: mol_type = other DNA
gtctccagcgtatctggaag

SEQ ID NO: 4103 - DNA, 20 bp, synthetic construct
  source 1..20: mol_type = other DNA
cctgcggcttcagcttgcgc

SEQ ID NO: 4104 - DNA, 20 bp, synthetic construct
  source 1..20: mol_type = other DNA
agatacgctggagaccaggg

SEQ ID NO: 4105 - DNA, 20 bp, synthetic construct
  source 1..20: mol_type = other DNA
cagatacgctggagaccagg

SEQ ID NO: 4106 - DNA, 20 bp, synthetic construct
  source 1..20: mol_type = other DNA
tggtctccagcgtatctgga

SEQ ID NO: 4107 - DNA, 20 bp, synthetic construct
  source 1..20: mol_type = other DNA
ccagatacgctggagaccag

SEQ ID NO: 4108 - DNA, 20 bp, synthetic construct
  source 1..20: mol_type = other DNA
tccagatacgctggagacca

SEQ ID NO: 4109 - DNA, 20 bp, synthetic construct
  source 1..20: mol_type = other DNA
ggaagaactcgctgaggttg

SEQ ID NO: 4110 - DNA, 20 bp, synthetic construct
  source 1..20: mol_type = other DNA
gtggcctgcacagcgtggtg

SEQ ID NO: 4111 - DNA, 20 bp, synthetic construct
  source 1..20: mol_type = other DNA
acgctgtgcaggccacagac

SEQ ID NO: 4112 - DNA, 20 bp, synthetic construct
  source 1..20: mol_type = other DNA
tgtgcaggccacagacaggc

SEQ ID NO: 4113 - DNA, 20 bp, synthetic construct
  source 1..20: mol_type = other DNA
ccgcaggcccggcctgtctg

SEQ ID NO: 4114 - DNA, 20 bp, synthetic construct
  source 1..20: mol_type = other DNA
aaagtcctgtttcctgcagg

SEQ ID NO: 4115 - DNA, 20 bp, synthetic construct
  source 1..20: mol_type = other DNA
gtgcaggccacagacaggcc

SEQ ID NO: 4116 - DNA, 20 bp, synthetic construct
  source 1..20: mol_type = other DNA
gaaatgtgattggacaacaa

SEQ ID NO: 4117 - DNA, 20 bp, synthetic construct
  source 1..20: mol_type = other DNA
ctttgatcaataggaggctg

SEQ ID NO: 4118 - DNA, 20 bp, synthetic construct
  source 1..20: mol_type = other DNA
caacaaaggatatgagctaa

SEQ ID NO: 4119 - DNA, 20 bp, synthetic construct
  source 1..20: mol_type = other DNA
gtaaaactttgatcaatagg

SEQ ID NO: 4120 - DNA, 20 bp, synthetic construct
  source 1..20: mol_type = other DNA
cagtcgtgtagaaatgtgat

SEQ ID NO: 4121 - DNA, 20 bp, synthetic construct
  source 1..20: mol_type = other DNA
atgcttaggtttgatgaaac

SEQ ID NO: 4122 - DNA, 20 bp, synthetic construct
  source 1..20: mol_type = other DNA
ctgaacagacaggtcttgct

SEQ ID NO: 4123 - DNA, 20 bp, synthetic construct
  source 1..20: mol_type = other DNA
gttcaagaatctgaacagac

SEQ ID NO: 4124 - DNA, 20 bp, synthetic construct
  source 1..20: mol_type = other DNA
gagtgaagacccaaagatac

SEQ ID NO: 4125 - DNA, 20 bp, synthetic construct
  source 1..20: mol_type = other DNA
gacagagtcacctgtatctt

SEQ ID NO: 4126 - DNA, 20 bp, synthetic construct
  source 1..20: mol_type = other DNA
tgcttaggtttgatgaaaca

SEQ ID NO: 4127 - DNA, 20 bp, synthetic construct
  source 1..20: mol_type = other DNA
ctctgtctcattatatgctt

SEQ ID NO: 4128 - DNA, 20 bp, synthetic construct
  source 1..20: mol_type = other DNA
acagagtcacctgtatcttt

SEQ ID NO: 4129 - DNA, 20 bp, synthetic construct
  source 1..20: mol_type = other DNA
catgtaaaactttgatcaat

SEQ ID NO: 4130 - DNA, 20 bp, synthetic construct
  source 1..20: mol_type = other DNA
gcccgcccccgccatcgctg

SEQ ID NO: 4131 - DNA, 20 bp, synthetic construct
  source 1..20: mol_type = other DNA
ggcgcgggaacctgacaccg

SEQ ID NO: 4132 - DNA, 20 bp, synthetic construct
  source 1..20: mol_type = other DNA
agtgtccctggggatgcgga

SEQ ID NO: 4133 - DNA, 20 bp, synthetic construct
  source 1..20: mol_type = other DNA
ccccaccttccgcatcccca

SEQ ID NO: 4134 - DNA, 20 bp, synthetic construct
  source 1..20: mol_type = other DNA
cgggccctccaccgcagcga

SEQ ID NO: 4135 - DNA, 20 bp, synthetic construct
  source 1..20: mol_type = other DNA
ctccaccgcagcgatggcgg

SEQ ID NO: 4136 - DNA, 20 bp, synthetic construct
  source 1..20: mol_type = other DNA
gcccgatctcccgggaagga

SEQ ID NO: 4137 - DNA, 20 bp, synthetic construct
  source 1..20: mol_type = other DNA
tgcggcccgatctcccggga

SEQ ID NO: 4138 - DNA, 20 bp, synthetic construct
  source 1..20: mol_type = other DNA
catccccagggacactgagg

SEQ ID NO: 4139 - DNA, 20 bp, synthetic construct
  source 1..20: mol_type = other DNA
tccctggggatgcggaaggt

SEQ ID NO: 4140 - DNA, 20 bp, synthetic construct
  source 1..20: mol_type = other DNA
ccgatctcccgggaaggagg

SEQ ID NO: 4141 - DNA, 20 bp, synthetic construct
  source 1..20: mol_type = other DNA
cgcccccgccatcgctgcgg

SEQ ID NO: 4142 - DNA, 20 bp, synthetic construct
  source 1..20: mol_type = other DNA
cctggggatgcggaaggtgg

SEQ ID NO: 4143 - DNA, 20 bp, synthetic construct
  source 1..20: mol_type = other DNA
agcctgcggcccgatctccc

SEQ ID NO: 4144 - DNA, 20 bp, synthetic construct
  source 1..20: mol_type = other DNA
cccgatctcccgggaaggag

SEQ ID NO: 4145 - DNA, 20 bp, synthetic construct
  source 1..20: mol_type = other DNA
gccagctggtttgtcgcgcg

SEQ ID NO: 4146 - DNA, 20 bp, synthetic construct
  source 1..20: mol_type = other DNA
agccaaccagcgcctcggga

SEQ ID NO: 4147 - DNA, 20 bp, synthetic construct
  source 1..20: mol_type = other DNA
gccaaccagcgcctcgggag

SEQ ID NO: 4148 - DNA, 20 bp, synthetic construct
  source 1..20: mol_type = other DNA
gcgacaaaccagctggcgac

SEQ ID NO: 4149 - DNA, 20 bp, synthetic construct
  source 1..20: mol_type = other DNA
gcgcagccaaccagcgcctc

SEQ ID NO: 4150 - DNA, 20 bp, synthetic construct
  source 1..20: mol_type = other DNA
tccccgcgcgacaaaccagc

SEQ ID NO: 4151 - DNA, 20 bp, synthetic construct
  source 1..20: mol_type = other DNA
cagccaaccagcgcctcggg

SEQ ID NO: 4152 - DNA, 20 bp, synthetic construct
  source 1..20: mol_type = other DNA
ccccagccccatccccgcgg

SEQ ID NO: 4153 - DNA, 20 bp, synthetic construct
  source 1..20: mol_type = other DNA
gtgacgtcacagcccggccc

SEQ ID NO: 4154 - DNA, 20 bp, synthetic construct
  source 1..20: mol_type = other DNA
aggcgctggttggctgcgcg

SEQ ID NO: 4155 - DNA, 20 bp, synthetic construct
  source 1..20: mol_type = other DNA
ttgtcgcgcggggagaggga

SEQ ID NO: 4156 - DNA, 20 bp, synthetic construct
  source 1..20: mol_type = other DNA
ggggagagggacgggcgacg

SEQ ID NO: 4157 - DNA, 20 bp, synthetic construct
  source 1..20: mol_type = other DNA
gacgggcgacgcggccgccg

SEQ ID NO: 4158 - DNA, 20 bp, synthetic construct
  source 1..20: mol_type = other DNA
accagctggcgactggagct

SEQ ID NO: 4159 - DNA, 20 bp, synthetic construct
  source 1..20: mol_type = other DNA
cgggcgacgcggccgccgcg

SEQ ID NO: 4160 - DNA, 20 bp, synthetic construct
  source 1..20: mol_type = other DNA
gctgacgctattggtcggtg

SEQ ID NO: 4161 - DNA, 20 bp, synthetic construct
  source 1..20: mol_type = other DNA
gcagagcacttcgaagaagg

SEQ ID NO: 4162 - DNA, 20 bp, synthetic construct
  source 1..20: mol_type = other DNA
gccaagctgacgctattggt

SEQ ID NO: 4163 - DNA, 20 bp, synthetic construct
  source 1..20: mol_type = other DNA
agaaatcactttcccgcccc

SEQ ID NO: 4164 - DNA, 20 bp, synthetic construct
  source 1..20: mol_type = other DNA
tcggccagcggctccagaag

SEQ ID NO: 4165 - DNA, 20 bp, synthetic construct
  source 1..20: mol_type = other DNA
ccccggcagccacggcagtg

SEQ ID NO: 4166 - DNA, 20 bp, synthetic construct
  source 1..20: mol_type = other DNA
aaagcagagcacttcgaaga

SEQ ID NO: 4167 - DNA, 20 bp, synthetic construct
  source 1..20: mol_type = other DNA
aggcccggaccccactgccg

SEQ ID NO: 4168 - DNA, 20 bp, synthetic construct
  source 1..20: mol_type = other DNA
gccttaaaaagggtcgtggg

SEQ ID NO: 4169 - DNA, 20 bp, synthetic construct
  source 1..20: mol_type = other DNA
acgggcggtgcgcagagcga

SEQ ID NO: 4170 - DNA, 20 bp, synthetic construct
  source 1..20: mol_type = other DNA
tagcgtcagcttggctcgcg

SEQ ID NO: 4171 - DNA, 20 bp, synthetic construct
  source 1..20: mol_type = other DNA
cccactgccgtggctgccgg

SEQ ID NO: 4172 - DNA, 20 bp, synthetic construct
  source 1..20: mol_type = other DNA
cagcggctccagaagaggcc

SEQ ID NO: 4173 - DNA, 20 bp, synthetic construct
  source 1..20: mol_type = other DNA
cagagcacttcgaagaaggc

SEQ ID NO: 4174 - DNA, 20 bp, synthetic construct
  source 1..20: mol_type = other DNA
gcccccggcagccacggcag

SEQ ID NO: 4175 - DNA, 20 bp, synthetic construct
  source 1..20: mol_type = other DNA
gttcttgatgaccttcgcga

SEQ ID NO: 4176 - DNA, 20 bp, synthetic construct
  source 1..20: mol_type = other DNA
aggtcatcaagaacccacct

SEQ ID NO: 4177 - DNA, 20 bp, synthetic construct
  source 1..20: mol_type = other DNA
agggtctgctgattaggaga

SEQ ID NO: 4178 - DNA, 20 bp, synthetic construct
  source 1..20: mol_type = other DNA
tcttcacccaggactaaaca

SEQ ID NO: 4179 - DNA, 20 bp, synthetic construct
  source 1..20: mol_type = other DNA
gcatctgggcagaaacacgc

SEQ ID NO: 4180 - DNA, 20 bp, synthetic construct
  source 1..20: mol_type = other DNA
ttgatgaccttcgcgatgga

SEQ ID NO: 4181 - DNA, 20 bp, synthetic construct
  source 1..20: mol_type = other DNA
ggagtcagctggctaatcac

SEQ ID NO: 4182 - DNA, 20 bp, synthetic construct
  source 1..20: mol_type = other DNA
tgatgaccttcgcgatggag

SEQ ID NO: 4183 - DNA, 20 bp, synthetic construct
  source 1..20: mol_type = other DNA
ccaattgtctttcttcaccc

SEQ ID NO: 4184 - DNA, 20 bp, synthetic construct
  source 1..20: mol_type = other DNA
gagtcagctggctaatcacc

SEQ ID NO: 4185 - DNA, 20 bp, synthetic construct
  source 1..20: mol_type = other DNA
cagctggctaatcaccgggc

SEQ ID NO: 4186 - DNA, 20 bp, synthetic construct
  source 1..20: mol_type = other DNA
ccaccttggccaatcaagag

SEQ ID NO: 4187 - DNA, 20 bp, synthetic construct
  source 1..20: mol_type = other DNA
gtatttcccctccatcgcga

SEQ ID NO: 4188 - DNA, 20 bp, synthetic construct
  source 1..20: mol_type = other DNA
tgggtgaagaaagacaattg

SEQ ID NO: 4189 - DNA, 20 bp, synthetic construct
  source 1..20: mol_type = other DNA
aggcagcgggaagaaaaagg

SEQ ID NO: 4190 - DNA, 20 bp, synthetic construct
  source 1..20: mol_type = other DNA
accgtatcacgactcaaagg

SEQ ID NO: 4191 - DNA, 20 bp, synthetic construct
  source 1..20: mol_type = other DNA
tcgtgatacggtccgaagcg

SEQ ID NO: 4192 - DNA, 20 bp, synthetic construct
  source 1..20: mol_type = other DNA
ccgtatcacgactcaaaggg

SEQ ID NO: 4193 - DNA, 20 bp, synthetic construct
  source 1..20: mol_type = other DNA
agtcgtgatacggtccgaag

SEQ ID NO: 4194 - DNA, 20 bp, synthetic construct
  source 1..20: mol_type = other DNA
cacccgccttccttgctgag

SEQ ID NO: 4195 - DNA, 20 bp, synthetic construct
  source 1..20: mol_type = other DNA
ccgcggccgctcagcaagga

SEQ ID NO: 4196 - DNA, 20 bp, synthetic construct
  source 1..20: mol_type = other DNA
ggctcgcgctccccctcccg

SEQ ID NO: 4197 - DNA, 20 bp, synthetic construct
  source 1..20: mol_type = other DNA
cagcaaggaaggcgggtgag

SEQ ID NO: 4198 - DNA, 20 bp, synthetic construct
  source 1..20: mol_type = other DNA
tcagcaaggaaggcgggtga

SEQ ID NO: 4199 - DNA, 20 bp, synthetic construct
  source 1..20: mol_type = other DNA
cggccgctcagcaaggaagg

SEQ ID NO: 4200 - DNA, 20 bp, synthetic construct
  source 1..20: mol_type = other DNA
gaggggcggggagagccagg

SEQ ID NO: 4201 - DNA, 20 bp, synthetic construct
  source 1..20: mol_type = other DNA
cttgctgagcggccgcggga

SEQ ID NO: 4202 - DNA, 20 bp, synthetic construct
  source 1..20: mol_type = other DNA
ccttgctgagcggccgcggg

SEQ ID NO: 4203 - DNA, 20 bp, synthetic construct
  source 1..20: mol_type = other DNA
tgaggggcggggagagccag

SEQ ID NO: 4204 - DNA, 20 bp, synthetic construct
  source 1..20: mol_type = other DNA
gtgaggggcggggagagcca

SEQ ID NO: 4205 - DNA, 20 bp, synthetic construct
  source 1..20: mol_type = other DNA
tagtgggtggggctacacgt

SEQ ID NO: 4206 - DNA, 20 bp, synthetic construct
  source 1..20: mol_type = other DNA
gcagaagcgggaggtaccct

SEQ ID NO: 4207 - DNA, 20 bp, synthetic construct
  source 1..20: mol_type = other DNA
tacccaaggctcgcggacca

SEQ ID NO: 4208 - DNA, 20 bp, synthetic construct
  source 1..20: mol_type = other DNA
aatgagaagccaggttgctg

SEQ ID NO: 4209 - DNA, 20 bp, synthetic construct
  source 1..20: mol_type = other DNA
tcattggctggacagagact

SEQ ID NO: 4210 - DNA, 20 bp, synthetic construct
  source 1..20: mol_type = other DNA
gctccccgattggctgccta

SEQ ID NO: 4211 - DNA, 20 bp, synthetic construct
  source 1..20: mol_type = other DNA
agtgggtggggctacacgta

SEQ ID NO: 4212 - DNA, 20 bp, synthetic construct
  source 1..20: mol_type = other DNA
ccaaggctcgcggaccaggg

SEQ ID NO: 4213 - DNA, 20 bp, synthetic construct
  source 1..20: mol_type = other DNA
gtaccctaggcagccaatcg

SEQ ID NO: 4214 - DNA, 20 bp, synthetic construct
  source 1..20: mol_type = other DNA
gtacccaaggctcgcggacc

SEQ ID NO: 4215 - DNA, 20 bp, synthetic construct
  source 1..20: mol_type = other DNA
gggtggggctacacgtaggg

SEQ ID NO: 4216 - DNA, 20 bp, synthetic construct
  source 1..20: mol_type = other DNA
ggcgaggcgccacagcaacc

SEQ ID NO: 4217 - DNA, 20 bp, synthetic construct
  source 1..20: mol_type = other DNA
gctcgcggaccagggaggag

SEQ ID NO: 4218 - DNA, 20 bp, synthetic construct
  source 1..20: mol_type = other DNA
ctgggggtacccaaggctcg

SEQ ID NO: 4219 - DNA, 20 bp, synthetic construct
  source 1..20: mol_type = other DNA
tgtccagccaatgagaagcc

SEQ ID NO: 4220 - DNA, 20 bp, synthetic construct
  source 1..20: mol_type = other DNA
ggtctacgctgggattggtg

SEQ ID NO: 4221 - DNA, 20 bp, synthetic construct
  source 1..20: mol_type = other DNA
ccaatcccagcgtagacctc

SEQ ID NO: 4222 - DNA, 20 bp, synthetic construct
  source 1..20: mol_type = other DNA
tgcgcccggaggtctacgct

SEQ ID NO: 4223 - DNA, 20 bp, synthetic construct
  source 1..20: mol_type = other DNA
gtgcgcccggaggtctacgc

SEQ ID NO: 4224 - DNA, 20 bp, synthetic construct
  source 1..20: mol_type = other DNA
caatcccagcgtagacctcc

SEQ ID NO: 4225 - DNA, 20 bp, synthetic construct
  source 1..20: mol_type = other DNA
cctggaaatcctccctggcg

SEQ ID NO: 4226 - DNA, 20 bp, synthetic construct
  source 1..20: mol_type = other DNA
acccttgaaggcaggcccgt

SEQ ID NO: 4227 - DNA, 20 bp, synthetic construct
  source 1..20: mol_type = other DNA
gcgtagacctccgggcgcac

SEQ ID NO: 4228 - DNA, 20 bp, synthetic construct
  source 1..20: mol_type = other DNA
acagctgtacccttgaaggc

SEQ ID NO: 4229 - DNA, 20 bp, synthetic construct
  source 1..20: mol_type = other DNA
tgccttcaagggtacagctg

SEQ ID NO: 4230 - DNA, 20 bp, synthetic construct
  source 1..20: mol_type = other DNA
gccttcaagggtacagctgt

SEQ ID NO: 4231 - DNA, 20 bp, synthetic construct
  source 1..20: mol_type = other DNA
tacccttgaaggcaggcccg

SEQ ID NO: 4232 - DNA, 20 bp, synthetic construct
  source 1..20: mol_type = other DNA
cttcaagggtacagctgtgg

SEQ ID NO: 4233 - DNA, 20 bp, synthetic construct
  source 1..20: mol_type = other DNA
ccttcaagggtacagctgtg

SEQ ID NO: 4234 - DNA, 20 bp, synthetic construct
  source 1..20: mol_type = other DNA
ataaagggcccagcgcccac

SEQ ID NO: 4235 - DNA, 20 bp, synthetic construct
  source 1..20: mol_type = other DNA
aagtggttagttctgtaaag

SEQ ID NO: 4236 - DNA, 20 bp, synthetic construct
  source 1..20: mol_type = other DNA
ggagcagtctgacaatccgg

SEQ ID NO: 4237 - DNA, 20 bp, synthetic construct
  source 1..20: mol_type = other DNA
ttacctgtaagaggaaccgc

SEQ ID NO: 4238 - DNA, 20 bp, synthetic construct
  source 1..20: mol_type = other DNA
gtaaactttagcccagagct

SEQ ID NO: 4239 - DNA, 20 bp, synthetic construct
  source 1..20: mol_type = other DNA
tggcagtctaaagaagaggg

SEQ ID NO: 4240 - DNA, 20 bp, synthetic construct
  source 1..20: mol_type = other DNA
aaagtttacaggactcccag

SEQ ID NO: 4241 - DNA, 20 bp, synthetic construct
  source 1..20: mol_type = other DNA
tgtaaatcattacctgtaag

SEQ ID NO: 4242 - DNA, 20 bp, synthetic construct
  source 1..20: mol_type = other DNA
gattggtggagacattctgg

SEQ ID NO: 4243 - DNA, 20 bp, synthetic construct
  source 1..20: mol_type = other DNA
ctggaggaggagccaagctc

SEQ ID NO: 4244 - DNA, 20 bp, synthetic construct
  source 1..20: mol_type = other DNA
tggaggaggagccaagctct

SEQ ID NO: 4245 - DNA, 20 bp, synthetic construct
  source 1..20: mol_type = other DNA
agctctgggctaaagtttac

SEQ ID NO: 4246 - DNA, 20 bp, synthetic construct
  source 1..20: mol_type = other DNA
tgtccaaggagttgccgaag

SEQ ID NO: 4247 - DNA, 20 bp, synthetic construct
  source 1..20: mol_type = other DNA
tacctgtaagaggaaccgct

SEQ ID NO: 4248 - DNA, 20 bp, synthetic construct
  source 1..20: mol_type = other DNA
tggtggagacattctggagg

SEQ ID NO: 4249 - DNA, 20 bp, synthetic construct
  source 1..20: mol_type = other DNA
aacaagaaggaaagtgtcca

SEQ ID NO: 4250 - DNA, 20 bp, synthetic construct
  source 1..20: mol_type = other DNA
aacaactttcaactcggccg

SEQ ID NO: 4251 - DNA, 20 bp, synthetic construct
  source 1..20: mol_type = other DNA
gcgctagttcagtgctcgtg

SEQ ID NO: 4252 - DNA, 20 bp, synthetic construct
  source 1..20: mol_type = other DNA
gcgctggcccacgccgacta

SEQ ID NO: 4253 - DNA, 20 bp, synthetic construct
  source 1..20: mol_type = other DNA
gctcgtgaggtaactggcgc

SEQ ID NO: 4254 - DNA, 20 bp, synthetic construct
  source 1..20: mol_type = other DNA
cagaacgccttcctggtccg

SEQ ID NO: 4255 - DNA, 20 bp, synthetic construct
  source 1..20: mol_type = other DNA
acgctctaggcaccgggatg

SEQ ID NO: 4256 - DNA, 20 bp, synthetic construct
  source 1..20: mol_type = other DNA
tccctgtccccgagctctag

SEQ ID NO: 4257 - DNA, 20 bp, synthetic construct
  source 1..20: mol_type = other DNA
ttctgacccgctagagctcg

SEQ ID NO: 4258 - DNA, 20 bp, synthetic construct
  source 1..20: mol_type = other DNA
aaagagcgagaagtatagaa

SEQ ID NO: 4259 - DNA, 20 bp, synthetic construct
  source 1..20: mol_type = other DNA
gttctgacccgctagagctc

SEQ ID NO: 4260 - DNA, 20 bp, synthetic construct
  source 1..20: mol_type = other DNA
cgttctgacccgctagagct

SEQ ID NO: 4261 - DNA, 20 bp, synthetic construct
  source 1..20: mol_type = other DNA
gaaagagcgagaagtataga

SEQ ID NO: 4262 - DNA, 20 bp, synthetic construct
  source 1..20: mol_type = other DNA
cgagaagtatagaagggcgc

SEQ ID NO: 4263 - DNA, 20 bp, synthetic construct
  source 1..20: mol_type = other DNA
ccgccggaaatgacgattgg

SEQ ID NO: 4264 - DNA, 20 bp, synthetic construct
  source 1..20: mol_type = other DNA
ggaaatgacgattggcggga

SEQ ID NO: 4265 - DNA, 20 bp, synthetic construct
  source 1..20: mol_type = other DNA
ggggcgactcacgattagcg

SEQ ID NO: 4266 - DNA, 20 bp, synthetic construct
  source 1..20: mol_type = other DNA
gccgtgtgatccgtggacag

SEQ ID NO: 4267 - DNA, 20 bp, synthetic construct
  source 1..20: mol_type = other DNA
gtgcgcgcggaacacagacc

SEQ ID NO: 4268 - DNA, 20 bp, synthetic construct
  source 1..20: mol_type = other DNA
gcgcacgtgaagcaccgtaa

SEQ ID NO: 4269 - DNA, 20 bp, synthetic construct
  source 1..20: mol_type = other DNA
gccatgggccgtgtgatccg

SEQ ID NO: 4270 - DNA, 20 bp, synthetic construct
  source 1..20: mol_type = other DNA
gatcacacggcccatggcga

SEQ ID NO: 4271 - DNA, 20 bp, synthetic construct
  source 1..20: mol_type = other DNA
tccacggatcacacggccca

SEQ ID NO: 4272 - DNA, 20 bp, synthetic construct
  source 1..20: mol_type = other DNA
cccatggcgacgggtcctgg

SEQ ID NO: 4273 - DNA, 20 bp, synthetic construct
  source 1..20: mol_type = other DNA
tcctctgtccacggatcaca

SEQ ID NO: 4274 - DNA, 20 bp, synthetic construct
  source 1..20: mol_type = other DNA
gcccatggcgacgggtcctg

SEQ ID NO: 4275 - DNA, 20 bp, synthetic construct
  source 1..20: mol_type = other DNA
tacggtgcttcacgtgcgcg

SEQ ID NO: 4276 - DNA, 20 bp, synthetic construct
  source 1..20: mol_type = other DNA
gcccccaggacccgtcgcca

SEQ ID NO: 4277 - DNA, 20 bp, synthetic construct
  source 1..20: mol_type = other DNA
tgtgatccgtggacagagga

SEQ ID NO: 4278 - DNA, 20 bp, synthetic construct
  source 1..20: mol_type = other DNA
gtgatccgtggacagaggaa

SEQ ID NO: 4279 - DNA, 20 bp, synthetic construct
  source 1..20: mol_type = other DNA
cgtggacagaggaagggcgc

SEQ ID NO: 4280 - DNA, 20 bp, synthetic construct
  source 1..20: mol_type = other DNA
aagagaggcattgactacag

SEQ ID NO: 4281 - DNA, 20 bp, synthetic construct
  source 1..20: mol_type = other DNA
ttggggacactccttggtca

SEQ ID NO: 4282 - DNA, 20 bp, synthetic construct
  source 1..20: mol_type = other DNA
cctggcttggtccctgacca

SEQ ID NO: 4283 - DNA, 20 bp, synthetic construct
  source 1..20: mol_type = other DNA
gaggcattgactacagagga

SEQ ID NO: 4284 - DNA, 20 bp, synthetic construct
  source 1..20: mol_type = other DNA
aggggcaggacacaccccag

SEQ ID NO: 4285 - DNA, 20 bp, synthetic construct
  source 1..20: mol_type = other DNA
gagatgtaagccttagagaa

SEQ ID NO: 4286 - DNA, 20 bp, synthetic construct
  source 1..20: mol_type = other DNA
cctccctgagtcaccccaag

SEQ ID NO: 4287 - DNA, 20 bp, synthetic construct
  source 1..20: mol_type = other DNA
ggggcaggacacaccccaga

SEQ ID NO: 4288 - DNA, 20 bp, synthetic construct
  source 1..20: mol_type = other DNA
aaggcttacatctctccctc

SEQ ID NO: 4289 - DNA, 20 bp, synthetic construct
  source 1..20: mol_type = other DNA
ggcttacatctctccctctg

SEQ ID NO: 4290 - DNA, 20 bp, synthetic construct
  source 1..20: mol_type = other DNA
ccctccctgagtcaccccaa

SEQ ID NO: 4291 - DNA, 20 bp, synthetic construct
  source 1..20: mol_type = other DNA
gtcaccccaaggggagagag

SEQ ID NO: 4292 - DNA, 20 bp, synthetic construct
  source 1..20: mol_type = other DNA
cccctccctgagtcacccca

SEQ ID NO: 4293 - DNA, 20 bp, synthetic construct
  source 1..20: mol_type = other DNA
cccttggggtgactcaggga

SEQ ID NO: 4294 - DNA, 20 bp, synthetic construct
  source 1..20: mol_type = other DNA
ccttggggtgactcagggag

SEQ ID NO: 4295 - DNA, 20 bp, synthetic construct
  source 1..20: mol_type = other DNA
tattgaatcccgctaacgag

SEQ ID NO: 4296 - DNA, 20 bp, synthetic construct
  source 1..20: mol_type = other DNA
ttattgaatcccgctaacga

SEQ ID NO: 4297 - DNA, 20 bp, synthetic construct
  source 1..20: mol_type = other DNA
gttattgaatcccgctaacg

SEQ ID NO: 4298 - DNA, 20 bp, synthetic construct
  source 1..20: mol_type = other DNA
cgaggggagccaacaagaga

SEQ ID NO: 4299 - DNA, 20 bp, synthetic construct
  source 1..20: mol_type = other DNA
cacgtcccgggactagcgca

SEQ ID NO: 4300 - DNA, 20 bp, synthetic construct
  source 1..20: mol_type = other DNA
acgaggggagccaacaagag

SEQ ID NO: 4301 - DNA, 20 bp, synthetic construct
  source 1..20: mol_type = other DNA
agccaacaagagagggatgt

SEQ ID NO: 4302 - DNA, 20 bp, synthetic construct
  source 1..20: mol_type = other DNA
actacgccctgcgctagtcc

SEQ ID NO: 4303 - DNA, 20 bp, synthetic construct
  source 1..20: mol_type = other DNA
ttgttggctcccctcgttag

SEQ ID NO: 4304 - DNA, 20 bp, synthetic construct
  source 1..20: mol_type = other DNA
tgcgctagtcccgggacgtg

SEQ ID NO: 4305 - DNA, 20 bp, synthetic construct
  source 1..20: mol_type = other DNA
gcagcttccgggagcatggt

SEQ ID NO: 4306 - DNA, 20 bp, synthetic construct
  source 1..20: mol_type = other DNA
agcaccgcccaccatgctcc

SEQ ID NO: 4307 - DNA, 20 bp, synthetic construct
  source 1..20: mol_type = other DNA
gcttccgggagcatggtggg

SEQ ID NO: 4308 - DNA, 20 bp, synthetic construct
  source 1..20: mol_type = other DNA
ggcggtgctgctaaggattg

SEQ ID NO: 4309 - DNA, 20 bp, synthetic construct
  source 1..20: mol_type = other DNA
cgcagcttccgggagcatgg

SEQ ID NO: 4310 - DNA, 20 bp, synthetic construct
  source 1..20: mol_type = other DNA
gctcccagagagtcacacga

SEQ ID NO: 4311 - DNA, 20 bp, synthetic construct
  source 1..20: mol_type = other DNA
cccagagagtcacacgaagg

SEQ ID NO: 4312 - DNA, 20 bp, synthetic construct
  source 1..20: mol_type = other DNA
ggggcgcccggaccgagcaa

SEQ ID NO: 4313 - DNA, 20 bp, synthetic construct
  source 1..20: mol_type = other DNA
gcctccggcggccagtcccg

SEQ ID NO: 4314 - DNA, 20 bp, synthetic construct
  source 1..20: mol_type = other DNA
aggggaagcggctctctctg

SEQ ID NO: 4315 - DNA, 20 bp, synthetic construct
  source 1..20: mol_type = other DNA
gactggccgccggaggctgc

SEQ ID NO: 4316 - DNA, 20 bp, synthetic construct
  source 1..20: mol_type = other DNA
tccgggcgccccagagccgc

SEQ ID NO: 4317 - DNA, 20 bp, synthetic construct
  source 1..20: mol_type = other DNA
gccgcgggactggccgccgg

SEQ ID NO: 4318 - DNA, 20 bp, synthetic construct
  source 1..20: mol_type = other DNA
agagccgcgggactggccgc

SEQ ID NO: 4319 - DNA, 20 bp, synthetic construct
  source 1..20: mol_type = other DNA
cggccagtcccgcggctctg

SEQ ID NO: 4320 - DNA, 20 bp, synthetic construct
  source 1..20: mol_type = other DNA
ggactggccgccggaggctg

SEQ ID NO: 4321 - DNA, 20 bp, synthetic construct
  source 1..20: mol_type = other DNA
gtccgggcgccccagagccg

SEQ ID NO: 4322 - DNA, 20 bp, synthetic construct
  source 1..20: mol_type = other DNA
ctctctctggggcttctggg

SEQ ID NO: 4323 - DNA, 20 bp, synthetic construct
  source 1..20: mol_type = other DNA
tggccgccggaggctgcggg

SEQ ID NO: 4324 - DNA, 20 bp, synthetic construct
  source 1..20: mol_type = other DNA
ggccgccggaggctgcggga

SEQ ID NO: 4325 - DNA, 20 bp, synthetic construct
  source 1..20: mol_type = other DNA
gcctccacagaagtctccac

SEQ ID NO: 4326 - DNA, 20 bp, synthetic construct
  source 1..20: mol_type = other DNA
tcagcactgaggtcacagaa

SEQ ID NO: 4327 - DNA, 20 bp, synthetic construct
  source 1..20: mol_type = other DNA
ccacaggaaggcacttgagg

SEQ ID NO: 4328 - DNA, 20 bp, synthetic construct
  source 1..20: mol_type = other DNA
ccacctcaagtgccttcctg

SEQ ID NO: 4329 - DNA, 20 bp, synthetic construct
  source 1..20: mol_type = other DNA
tcctgtggagacttctgtgg

SEQ ID NO: 4330 - DNA, 20 bp, synthetic construct
  source 1..20: mol_type = other DNA
gtggaggctcagactgggat

SEQ ID NO: 4331 - DNA, 20 bp, synthetic construct
  source 1..20: mol_type = other DNA
tgggagagcaagagttccca

SEQ ID NO: 4332 - DNA, 20 bp, synthetic construct
  source 1..20: mol_type = other DNA
ccacagaagtctccacagga

SEQ ID NO: 4333 - DNA, 20 bp, synthetic construct
  source 1..20: mol_type = other DNA
aggctgtgacgtcagcactg

SEQ ID NO: 4334 - DNA, 20 bp, synthetic construct
  source 1..20: mol_type = other DNA
gaagtagaagtggtaaaaga

SEQ ID NO: 4335 - DNA, 20 bp, synthetic construct
  source 1..20: mol_type = other DNA
atgggagagcaagagttccc

SEQ ID NO: 4336 - DNA, 20 bp, synthetic construct
  source 1..20: mol_type = other DNA
tgaggtggaggaagtagaag

SEQ ID NO: 4337 - DNA, 20 bp, synthetic construct
  source 1..20: mol_type = other DNA
caggaaggcacttgaggtgg

SEQ ID NO: 4338 - DNA, 20 bp, synthetic construct
  source 1..20: mol_type = other DNA
agattcttgagacttctcta

SEQ ID NO: 4339 - DNA, 20 bp, synthetic construct
  source 1..20: mol_type = other DNA
ctaaggagctcgggatccct

SEQ ID NO: 4340 - DNA, 20 bp, synthetic construct
  source 1..20: mol_type = other DNA
tgctacagtacaagttcccc

SEQ ID NO: 4341 - DNA, 20 bp, synthetic construct
  source 1..20: mol_type = other DNA
tggcatgagtaacgtgagtg

SEQ ID NO: 4342 - DNA, 20 bp, synthetic construct
  source 1..20: mol_type = other DNA
tcggttcttgagatgcaagt

SEQ ID NO: 4343 - DNA, 20 bp, synthetic construct
  source 1..20: mol_type = other DNA
tctgtcagaaacaaactcca

SEQ ID NO: 4344 - DNA, 20 bp, synthetic construct
  source 1..20: mol_type = other DNA
ctgacagagacacatctctg

SEQ ID NO: 4345 - DNA, 20 bp, synthetic construct
  source 1..20: mol_type = other DNA
aggaagaggctttattcccc

SEQ ID NO: 4346 - DNA, 20 bp, synthetic construct
  source 1..20: mol_type = other DNA
aagtcggccaatgctcccgg

SEQ ID NO: 4347 - DNA, 20 bp, synthetic construct
  source 1..20: mol_type = other DNA
caagtcggccaatgctcccg

SEQ ID NO: 4348 - DNA, 20 bp, synthetic construct
  source 1..20: mol_type = other DNA
ctctgtcagaaacaaactcc

SEQ ID NO: 4349 - DNA, 20 bp, synthetic construct
  source 1..20: mol_type = other DNA
ggaagaggctttattccccc

SEQ ID NO: 4350 - DNA, 20 bp, synthetic construct
  source 1..20: mol_type = other DNA
ctgtcagaaacaaactccag

SEQ ID NO: 4351 - DNA, 20 bp, synthetic construct
  source 1..20: mol_type = other DNA
tgcattatgacatagggatt

SEQ ID NO: 4352 - DNA, 20 bp, synthetic construct
  source 1..20: mol_type = other DNA
ctttattcccccgggagcat

SEQ ID NO: 4353 - DNA, 20 bp, synthetic construct
  source 1..20: mol_type = other DNA
gcaagtcggccaatgctccc

SEQ ID NO: 4354 - DNA, 20 bp, synthetic construct
  source 1..20: mol_type = other DNA
aggggaacttgtactgtagc

SEQ ID NO: 4355 - DNA, 20 bp, synthetic construct
  source 1..20: mol_type = other DNA
tcgacggcgacagagagtcg

SEQ ID NO: 4356 - DNA, 20 bp, synthetic construct
  source 1..20: mol_type = other DNA
cgacggcgacagagagtcgt

SEQ ID NO: 4357 - DNA, 20 bp, synthetic construct
  source 1..20: mol_type = other DNA
ctctgtcgccgtcgaccccg

SEQ ID NO: 4358 - DNA, 20 bp, synthetic construct
  source 1..20: mol_type = other DNA
ggccgctctaggcagactgg

SEQ ID NO: 4359 - DNA, 20 bp, synthetic construct
  source 1..20: mol_type = other DNA
gtccgccagtctgcctagag

SEQ ID NO: 4360 - DNA, 20 bp, synthetic construct
  source 1..20: mol_type = other DNA
gcggctccgggcaccgttag

SEQ ID NO: 4361 - DNA, 20 bp, synthetic construct
  source 1..20: mol_type = other DNA
tgcttccggtgcgcggtccg

SEQ ID NO: 4362 - DNA, 20 bp, synthetic construct
  source 1..20: mol_type = other DNA
gggcggcgcttgcgcactgg

SEQ ID NO: 4363 - DNA, 20 bp, synthetic construct
  source 1..20: mol_type = other DNA
ggcgcttgcgcactggcggg

SEQ ID NO: 4364 - DNA, 20 bp, synthetic construct
  source 1..20: mol_type = other DNA
ttccggtgcgcggtccgggg

SEQ ID NO: 4365 - DNA, 20 bp, synthetic construct
  source 1..20: mol_type = other DNA
ccgccccatcccccaccccg

SEQ ID NO: 4366 - DNA, 20 bp, synthetic construct
  source 1..20: mol_type = other DNA
tgtcgccgtcgaccccgggg

SEQ ID NO: 4367 - DNA, 20 bp, synthetic construct
  source 1..20: mol_type = other DNA
gcggggcggcgcttgcgcac

SEQ ID NO: 4368 - DNA, 20 bp, synthetic construct
  source 1..20: mol_type = other DNA
gtccggggcggtgaggaggg

SEQ ID NO: 4369 - DNA, 20 bp, synthetic construct
  source 1..20: mol_type = other DNA
cccgccccatcccccacccc

SEQ ID NO: 4370 - DNA, 20 bp, synthetic construct
  source 1..20: mol_type = other DNA
cggcccaggcgcctataaag

SEQ ID NO: 4371 - DNA, 20 bp, synthetic construct
  source 1..20: mol_type = other DNA
ttggatgtacttctcccaga

SEQ ID NO: 4372 - DNA, 20 bp, synthetic construct
  source 1..20: mol_type = other DNA
aatgttctgtcccttctcca

SEQ ID NO: 4373 - DNA, 20 bp, synthetic construct
  source 1..20: mol_type = other DNA
ccgcccaggaaaaaggtcaa

SEQ ID NO: 4374 - DNA, 20 bp, synthetic construct
  source 1..20: mol_type = other DNA
cccaggaaaaaggtcaaggg

SEQ ID NO: 4375 - DNA, 20 bp, synthetic construct
  source 1..20: mol_type = other DNA
ccaggaaaaaggtcaagggt

SEQ ID NO: 4376 - DNA, 20 bp, synthetic construct
  source 1..20: mol_type = other DNA
accgcccaggaaaaaggtca

SEQ ID NO: 4377 - DNA, 20 bp, synthetic construct
  source 1..20: mol_type = other DNA
tggccctgggagaaaggctc

SEQ ID NO: 4378 - DNA, 20 bp, synthetic construct
  source 1..20: mol_type = other DNA
agtgccagagcctttctccc

SEQ ID NO: 4379 - DNA, 20 bp, synthetic construct
  source 1..20: mol_type = other DNA
gtgccagagcctttctccca

SEQ ID NO: 4380 - DNA, 20 bp, synthetic construct
  source 1..20: mol_type = other DNA
gagaagtacatccaaggccc

SEQ ID NO: 4381 - DNA, 20 bp, synthetic construct
  source 1..20: mol_type = other DNA
tacatccaaggccctggccc

SEQ ID NO: 4382 - DNA, 20 bp, synthetic construct
  source 1..20: mol_type = other DNA
caggaaaaaggtcaagggtg

SEQ ID NO: 4383 - DNA, 20 bp, synthetic construct
  source 1..20: mol_type = other DNA
aacattcttcaggaccgccc

SEQ ID NO: 4384 - DNA, 20 bp, synthetic construct
  source 1..20: mol_type = other DNA
gagcctttctcccagggcca

SEQ ID NO: 4385 - DNA, 20 bp, synthetic construct
  source 1..20: mol_type = other DNA
ggaaacgcacctcctggcag

SEQ ID NO: 4386 - DNA, 20 bp, synthetic construct
  source 1..20: mol_type = other DNA
ccaccgtgcaatccagagcg

SEQ ID NO: 4387 - DNA, 20 bp, synthetic construct
  source 1..20: mol_type = other DNA
tgggaacagttgcagccccg

SEQ ID NO: 4388 - DNA, 20 bp, synthetic construct
  source 1..20: mol_type = other DNA
ccccgctctggattgcacgg

SEQ ID NO: 4389 - DNA, 20 bp, synthetic construct
  source 1..20: mol_type = other DNA
agaggaacggggaagttcag

SEQ ID NO: 4390 - DNA, 20 bp, synthetic construct
  source 1..20: mol_type = other DNA
ctccacggaaacgcacctcc

SEQ ID NO: 4391 - DNA, 20 bp, synthetic construct
  source 1..20: mol_type = other DNA
gaggtgcgtttccgtggaga

SEQ ID NO: 4392 - DNA, 20 bp, synthetic construct
  source 1..20: mol_type = other DNA
tgccaggaggtgcgtttccg

SEQ ID NO: 4393 - DNA, 20 bp, synthetic construct
  source 1..20: mol_type = other DNA
ccctggcgaccgctgccagg

SEQ ID NO: 4394 - DNA, 20 bp, synthetic construct
  source 1..20: mol_type = other DNA
ctcctggcagcggtcgccag

SEQ ID NO: 4395 - DNA, 20 bp, synthetic construct
  source 1..20: mol_type = other DNA
ctcagggcggctcctccccg

SEQ ID NO: 4396 - DNA, 20 bp, synthetic construct
  source 1..20: mol_type = other DNA
gaacagttgcagccccgggg

SEQ ID NO: 4397 - DNA, 20 bp, synthetic construct
  source 1..20: mol_type = other DNA
gccaggggcggggctcaggg

SEQ ID NO: 4398 - DNA, 20 bp, synthetic construct
  source 1..20: mol_type = other DNA
ctggcagcggtcgccagggg

SEQ ID NO: 4399 - DNA, 20 bp, synthetic construct
  source 1..20: mol_type = other DNA
gccgccctgagccccgcccc

SEQ ID NO: 4400 - DNA, 20 bp, synthetic construct
  source 1..20: mol_type = other DNA
gcatagctcctaggatgcga

SEQ ID NO: 4401 - DNA, 20 bp, synthetic construct
  source 1..20: mol_type = other DNA
gccagttccctgcccaaccc

SEQ ID NO: 4402 - DNA, 20 bp, synthetic construct
  source 1..20: mol_type = other DNA
agcatagctcctaggatgcg

SEQ ID NO: 4403 - DNA, 20 bp, synthetic construct
  source 1..20: mol_type = other DNA
gaactggcagcatagctcct

SEQ ID NO: 4404 - DNA, 20 bp, synthetic construct
  source 1..20: mol_type = other DNA
tgagcgtcccgggttgggca

SEQ ID NO: 4405 - DNA, 20 bp, synthetic construct
  source 1..20: mol_type = other DNA
ctcagctctcccggtatctg

SEQ ID NO: 4406 - DNA, 20 bp, synthetic construct
  source 1..20: mol_type = other DNA
ccccgcctccatccacaccc

SEQ ID NO: 4407 - DNA, 20 bp, synthetic construct
  source 1..20: mol_type = other DNA
gggagagctgagccgggcga

SEQ ID NO: 4408 - DNA, 20 bp, synthetic construct
  source 1..20: mol_type = other DNA
gaggggcggagctcccctgg

SEQ ID NO: 4409 - DNA, 20 bp, synthetic construct
  source 1..20: mol_type = other DNA
cgaggggcggagctcccctg

SEQ ID NO: 4410 - DNA, 20 bp, synthetic construct
  source 1..20: mol_type = other DNA
agataccgggagagctgagc

SEQ ID NO: 4411 - DNA, 20 bp, synthetic construct
  source 1..20: mol_type = other DNA
ggagagctgagccgggcgag

SEQ ID NO: 4412 - DNA, 20 bp, synthetic construct
  source 1..20: mol_type = other DNA
acacccaggccacgccccca

SEQ ID NO: 4413 - DNA, 20 bp, synthetic construct
  source 1..20: mol_type = other DNA
cacccaggccacgcccccag

SEQ ID NO: 4414 - DNA, 20 bp, synthetic construct
  source 1..20: mol_type = other DNA
gcgaggggcggagctcccct

SEQ ID NO: 4415 - DNA, 20 bp, synthetic construct
  source 1..20: mol_type = other DNA
ggtgctcggagcggaagcag

SEQ ID NO: 4416 - DNA, 20 bp, synthetic construct
  source 1..20: mol_type = other DNA
agcagcggcgagaggctcgg

SEQ ID NO: 4417 - DNA, 20 bp, synthetic construct
  source 1..20: mol_type = other DNA
ggaagcagcggcgagaggct

SEQ ID NO: 4418 - DNA, 20 bp, synthetic construct
  source 1..20: mol_type = other DNA
gacgcgggccgcggcacggg

SEQ ID NO: 4419 - DNA, 20 bp, synthetic construct
  source 1..20: mol_type = other DNA
gcgagaggctcggaggcgcg

SEQ ID NO: 4420 - DNA, 20 bp, synthetic construct
  source 1..20: mol_type = other DNA
ggagcggaagcagcggcgag

SEQ ID NO: 4421 - DNA, 20 bp, synthetic construct
  source 1..20: mol_type = other DNA
ggcgagaggctcggaggcgc

SEQ ID NO: 4422 - DNA, 20 bp, synthetic construct
  source 1..20: mol_type = other DNA
cgagaggctcggaggcgcgg

SEQ ID NO: 4423 - DNA, 20 bp, synthetic construct
  source 1..20: mol_type = other DNA
ccccggctccgcccgtgccg

SEQ ID NO: 4424 - DNA, 20 bp, synthetic construct
  source 1..20: mol_type = other DNA
ggccgagcggcgggcgacgg

SEQ ID NO: 4425 - DNA, 20 bp, synthetic construct
  source 1..20: mol_type = other DNA
ggcgacgcgggccgcggcac

SEQ ID NO: 4426 - DNA, 20 bp, synthetic construct
  source 1..20: mol_type = other DNA
tccccctcgccgacggccca

SEQ ID NO: 4427 - DNA, 20 bp, synthetic construct
  source 1..20: mol_type = other DNA
gcctgaacgccttgggccgt

SEQ ID NO: 4428 - DNA, 20 bp, synthetic construct
  source 1..20: mol_type = other DNA
gccttgggccgtcggcgagg

SEQ ID NO: 4429 - DNA, 20 bp, synthetic construct
  source 1..20: mol_type = other DNA
gtcacttccgcttccgccca

SEQ ID NO: 4430 - DNA, 20 bp, synthetic construct
  source 1..20: mol_type = other DNA
caggtctcccatagcaaccg

SEQ ID NO: 4431 - DNA, 20 bp, synthetic construct
  source 1..20: mol_type = other DNA
gccctggcggccatcgctgg

SEQ ID NO: 4432 - DNA, 20 bp, synthetic construct
  source 1..20: mol_type = other DNA
gcctctctgtgcctgcgaag

SEQ ID NO: 4433 - DNA, 20 bp, synthetic construct
  source 1..20: mol_type = other DNA
gcaaccgcggcctccagcga

SEQ ID NO: 4434 - DNA, 20 bp, synthetic construct
  source 1..20: mol_type = other DNA
accaccggaaccctcttcgc

SEQ ID NO: 4435 - DNA, 20 bp, synthetic construct
  source 1..20: mol_type = other DNA
gcctgcgaagagggttccgg

SEQ ID NO: 4436 - DNA, 20 bp, synthetic construct
  source 1..20: mol_type = other DNA
ccctcttcgcaggcacagag

SEQ ID NO: 4437 - DNA, 20 bp, synthetic construct
  source 1..20: mol_type = other DNA
tcgcaggcacagagaggcgc

SEQ ID NO: 4438 - DNA, 20 bp, synthetic construct
  source 1..20: mol_type = other DNA
gcttgcgtggcggcgtcaag

SEQ ID NO: 4439 - DNA, 20 bp, synthetic construct
  source 1..20: mol_type = other DNA
tgtgcctgcgaagagggttc

SEQ ID NO: 4440 - DNA, 20 bp, synthetic construct
  source 1..20: mol_type = other DNA
ttcgcaggcacagagaggcg

SEQ ID NO: 4441 - DNA, 20 bp, synthetic construct
  source 1..20: mol_type = other DNA
gatggccgccagggcaccac

SEQ ID NO: 4442 - DNA, 20 bp, synthetic construct
  source 1..20: mol_type = other DNA
gcctccagcgatggccgcca

SEQ ID NO: 4443 - DNA, 20 bp, synthetic construct
  source 1..20: mol_type = other DNA
agagggttccggtggtgccc

SEQ ID NO: 4444 - DNA, 20 bp, synthetic construct
  source 1..20: mol_type = other DNA
gggttccggtggtgccctgg

SEQ ID NO: 4445 - DNA, 20 bp, synthetic construct
  source 1..20: mol_type = other DNA
gtgggacctgagaaggcacc

SEQ ID NO: 4446 - DNA, 20 bp, synthetic construct
  source 1..20: mol_type = other DNA
agagcgtcgaggctccgggt

SEQ ID NO: 4447 - DNA, 20 bp, synthetic construct
  source 1..20: mol_type = other DNA
ctgagaaggcacccggcgtg

SEQ ID NO: 4448 - DNA, 20 bp, synthetic construct
  source 1..20: mol_type = other DNA
ccgaagacccgcggagtcgg

SEQ ID NO: 4449 - DNA, 20 bp, synthetic construct
  source 1..20: mol_type = other DNA
gtacaatgctccgacgcaga

SEQ ID NO: 4450 - DNA, 20 bp, synthetic construct
  source 1..20: mol_type = other DNA
aaggaagagcgtcgaggctc

SEQ ID NO: 4451 - DNA, 20 bp, synthetic construct
  source 1..20: mol_type = other DNA
cgcccgccgccgaagacccg

SEQ ID NO: 4452 - DNA, 20 bp, synthetic construct
  source 1..20: mol_type = other DNA
ccgactccgcgggtcttcgg

SEQ ID NO: 4453 - DNA, 20 bp, synthetic construct
  source 1..20: mol_type = other DNA
aggaagagcgtcgaggctcc

SEQ ID NO: 4454 - DNA, 20 bp, synthetic construct
  source 1..20: mol_type = other DNA
ggttggaaccgccgactccg

SEQ ID NO: 4455 - DNA, 20 bp, synthetic construct
  source 1..20: mol_type = other DNA
agaaggcacccggcgtgcgg

SEQ ID NO: 4456 - DNA, 20 bp, synthetic construct
  source 1..20: mol_type = other DNA
gcaggaggcggagccacgcg

SEQ ID NO: 4457 - DNA, 20 bp, synthetic construct
  source 1..20: mol_type = other DNA
aacccagcgccgccgcacgc

SEQ ID NO: 4458 - DNA, 20 bp, synthetic construct
  source 1..20: mol_type = other DNA
ccgccgaagacccgcggagt

SEQ ID NO: 4459 - DNA, 20 bp, synthetic construct
  source 1..20: mol_type = other DNA
actccgcgggtcttcggcgg

SEQ ID NO: 4460 - DNA, 20 bp, synthetic construct
  source 1..20: mol_type = other DNA
ccggctccgcgcctcagtga

SEQ ID NO: 4461 - DNA, 20 bp, synthetic construct
  source 1..20: mol_type = other DNA
gccgtaccccgccctcactg

SEQ ID NO: 4462 - DNA, 20 bp, synthetic construct
  source 1..20: mol_type = other DNA
gctccgcgcctcagtgaggg

SEQ ID NO: 4463 - DNA, 20 bp, synthetic construct
  source 1..20: mol_type = other DNA
accccgccctcactgaggcg

SEQ ID NO: 4464 - DNA, 20 bp, synthetic construct
  source 1..20: mol_type = other DNA
tccggctccgcgcctcagtg

SEQ ID NO: 4465 - DNA, 20 bp, synthetic construct
  source 1..20: mol_type = other DNA
aggcgcggagccggatccgg

SEQ ID NO: 4466 - DNA, 20 bp, synthetic construct
  source 1..20: mol_type = other DNA
ctgaggcgcggagccggatc

SEQ ID NO: 4467 - DNA, 20 bp, synthetic construct
  source 1..20: mol_type = other DNA
gtcctccctcccctctgggt

SEQ ID NO: 4468 - DNA, 20 bp, synthetic construct
  source 1..20: mol_type = other DNA
caagcaggcgcccacccaga

SEQ ID NO: 4469 - DNA, 20 bp, synthetic construct
  source 1..20: mol_type = other DNA
aagcaggcgcccacccagag

SEQ ID NO: 4470 - DNA, 20 bp, synthetic construct
  source 1..20: mol_type = other DNA
cgtcctccctcccctctggg

SEQ ID NO: 4471 - DNA, 20 bp, synthetic construct
  source 1..20: mol_type = other DNA
caggcgcccacccagagggg

SEQ ID NO: 4472 - DNA, 20 bp, synthetic construct
  source 1..20: mol_type = other DNA
ccaagcaggcgcccacccag

SEQ ID NO: 4473 - DNA, 20 bp, synthetic construct
  source 1..20: mol_type = other DNA
tccgcgcctcagtgagggcg

SEQ ID NO: 4474 - DNA, 20 bp, synthetic construct
  source 1..20: mol_type = other DNA
aggcgcccacccagagggga

SEQ ID NO: 4475 - DNA, 20 bp, synthetic construct
  source 1..20: mol_type = other DNA
ggccccccacccagtgcccg

SEQ ID NO: 4476 - DNA, 20 bp, synthetic construct
  source 1..20: mol_type = other DNA
tgtgcctggcacatgcgccg

SEQ ID NO: 4477 - DNA, 20 bp, synthetic construct
  source 1..20: mol_type = other DNA
gcccagtctccgcccttggg

SEQ ID NO: 4478 - DNA, 20 bp, synthetic construct
  source 1..20: mol_type = other DNA
gcccaagggcggagactggg

SEQ ID NO: 4479 - DNA, 20 bp, synthetic construct
  source 1..20: mol_type = other DNA
catgcgccgcgggcactggg

SEQ ID NO: 4480 - DNA, 20 bp, synthetic construct
  source 1..20: mol_type = other DNA
gggggcctccgagagtcgga

SEQ ID NO: 4481 - DNA, 20 bp, synthetic construct
  source 1..20: mol_type = other DNA
cgagagtcggaaggaggtgg

SEQ ID NO: 4482 - DNA, 20 bp, synthetic construct
  source 1..20: mol_type = other DNA
atgcgccgcgggcactgggt

SEQ ID NO: 4483 - DNA, 20 bp, synthetic construct
  source 1..20: mol_type = other DNA
cacctccttccgactctcgg

SEQ ID NO: 4484 - DNA, 20 bp, synthetic construct
  source 1..20: mol_type = other DNA
ggcctccgagagtcggaagg

SEQ ID NO: 4485 - DNA, 20 bp, synthetic construct
  source 1..20: mol_type = other DNA
ggcagccccgcccaaaccat

SEQ ID NO: 4486 - DNA, 20 bp, synthetic construct
  source 1..20: mol_type = other DNA
gggcagccccgcccaaacca

SEQ ID NO: 4487 - DNA, 20 bp, synthetic construct
  source 1..20: mol_type = other DNA
ccagtctccgcccttgggcg

SEQ ID NO: 4488 - DNA, 20 bp, synthetic construct
  source 1..20: mol_type = other DNA
ctccgagagtcggaaggagg

SEQ ID NO: 4489 - DNA, 20 bp, synthetic construct
  source 1..20: mol_type = other DNA
ggggctgcccatggtttggg

SEQ ID NO: 4490 - DNA, 20 bp, synthetic construct
  source 1..20: mol_type = other DNA
cgaaaggtcgtattctccgg

SEQ ID NO: 4491 - DNA, 20 bp, synthetic construct
  source 1..20: mol_type = other DNA
ccgaaaggtcgtattctccg

SEQ ID NO: 4492 - DNA, 20 bp, synthetic construct
  source 1..20: mol_type = other DNA
tcctggctaacatggccgaa

SEQ ID NO: 4493 - DNA, 20 bp, synthetic construct
  source 1..20: mol_type = other DNA
gccatgttagccaggagcga

SEQ ID NO: 4494 - DNA, 20 bp, synthetic construct
  source 1..20: mol_type = other DNA
ggccgcctgactggaaaacc

SEQ ID NO: 4495 - DNA, 20 bp, synthetic construct
  source 1..20: mol_type = other DNA
agaaagggcccctcaccccg

SEQ ID NO: 4496 - DNA, 20 bp, synthetic construct
  source 1..20: mol_type = other DNA
tttccagtcaggcggccgga

SEQ ID NO: 4497 - DNA, 20 bp, synthetic construct
  source 1..20: mol_type = other DNA
ccatgttagccaggagcgag

SEQ ID NO: 4498 - DNA, 20 bp, synthetic construct
  source 1..20: mol_type = other DNA
tattctccgggggaggacgg

SEQ ID NO: 4499 - DNA, 20 bp, synthetic construct
  source 1..20: mol_type = other DNA
gaacggccctgaccgcccgc

SEQ ID NO: 4500 - DNA, 20 bp, synthetic construct
  source 1..20: mol_type = other DNA
agggcccctcaccccgcggg

SEQ ID NO: 4501 - DNA, 20 bp, synthetic construct
  source 1..20: mol_type = other DNA
gaaagggcccctcaccccgc

SEQ ID NO: 4502 - DNA, 20 bp, synthetic construct
  source 1..20: mol_type = other DNA
aacggccctgaccgcccgcg

SEQ ID NO: 4503 - DNA, 20 bp, synthetic construct
  source 1..20: mol_type = other DNA
tccgggcccccgtcctcccc

SEQ ID NO: 4504 - DNA, 20 bp, synthetic construct
  source 1..20: mol_type = other DNA
cggagggcagccctcaagaa

SEQ ID NO: 4505 - DNA, 20 bp, synthetic construct
  source 1..20: mol_type = other DNA
ggtgtagtccaaaggccaag

SEQ ID NO: 4506 - DNA, 20 bp, synthetic construct
  source 1..20: mol_type = other DNA
tgggaaaagacattcgcccg

SEQ ID NO: 4507 - DNA, 20 bp, synthetic construct
  source 1..20: mol_type = other DNA
gcccacccagcatacaggcg

SEQ ID NO: 4508 - DNA, 20 bp, synthetic construct
  source 1..20: mol_type = other DNA
tgggcgggaggatgactctg

SEQ ID NO: 4509 - DNA, 20 bp, synthetic construct
  source 1..20: mol_type = other DNA
ctctctggctgagcgaacgg

SEQ ID NO: 4510 - DNA, 20 bp, synthetic construct
  source 1..20: mol_type = other DNA
ccgttcgctcagccagagag

SEQ ID NO: 4511 - DNA, 20 bp, synthetic construct
  source 1..20: mol_type = other DNA
ccgcccacccagcatacagg

SEQ ID NO: 4512 - DNA, 20 bp, synthetic construct
  source 1..20: mol_type = other DNA
tcatctacagaaacgccgct

SEQ ID NO: 4513 - DNA, 20 bp, synthetic construct
  source 1..20: mol_type = other DNA
tgactctgaggctctcggat

SEQ ID NO: 4514 - DNA, 20 bp, synthetic construct
  source 1..20: mol_type = other DNA
ctgaggctctcggattggct

SEQ ID NO: 4515 - DNA, 20 bp, synthetic construct
  source 1..20: mol_type = other DNA
aagcagcgcgtgcggaccgc

SEQ ID NO: 4516 - DNA, 20 bp, synthetic construct
  source 1..20: mol_type = other DNA
caagcagcgcgtgcggaccg

SEQ ID NO: 4517 - DNA, 20 bp, synthetic construct
  source 1..20: mol_type = other DNA
gccccgcctgtatgctgggt

SEQ ID NO: 4518 - DNA, 20 bp, synthetic construct
  source 1..20: mol_type = other DNA
gaggatgactctgaggctct

SEQ ID NO: 4519 - DNA, 20 bp, synthetic construct
  source 1..20: mol_type = other DNA
cgcccacccagcatacaggc

SEQ ID NO: 4520 - DNA, 20 bp, synthetic construct
  source 1..20: mol_type = other DNA
cgtgggcagccggctagcgg

SEQ ID NO: 4521 - DNA, 20 bp, synthetic construct
  source 1..20: mol_type = other DNA
tcaggggactgactagccgg

SEQ ID NO: 4522 - DNA, 20 bp, synthetic construct
  source 1..20: mol_type = other DNA
tatatccgccttcgcatcag

SEQ ID NO: 4523 - DNA, 20 bp, synthetic construct
  source 1..20: mol_type = other DNA
ccagtgcggttccgggtcag

SEQ ID NO: 4524 - DNA, 20 bp, synthetic construct
  source 1..20: mol_type = other DNA
aggcggatatataatctcca

SEQ ID NO: 4525 - DNA, 20 bp, synthetic construct
  source 1..20: mol_type = other DNA
gcacgtgggcagccggctag

SEQ ID NO: 4526 - DNA, 20 bp, synthetic construct
  source 1..20: mol_type = other DNA
gccttcgcatcagcggagca

SEQ ID NO: 4527 - DNA, 20 bp, synthetic construct
  source 1..20: mol_type = other DNA
tccctgctccgctgatgcga

SEQ ID NO: 4528 - DNA, 20 bp, synthetic construct
  source 1..20: mol_type = other DNA
aaggcggatatataatctcc

SEQ ID NO: 4529 - DNA, 20 bp, synthetic construct
  source 1..20: mol_type = other DNA
tggccactgttgcaggcacg

SEQ ID NO: 4530 - DNA, 20 bp, synthetic construct
  source 1..20: mol_type = other DNA
cccctgacccggaaccgcac

SEQ ID NO: 4531 - DNA, 20 bp, synthetic construct
  source 1..20: mol_type = other DNA
ggctagcggcggcaccagtg

SEQ ID NO: 4532 - DNA, 20 bp, synthetic construct
  source 1..20: mol_type = other DNA
ggctagtcagtcccctgacc

SEQ ID NO: 4533 - DNA, 20 bp, synthetic construct
  source 1..20: mol_type = other DNA
caggggactgactagccggc

SEQ ID NO: 4534 - DNA, 20 bp, synthetic construct
  source 1..20: mol_type = other DNA
agggacgctgggagcgcgcg

SEQ ID NO: 4535 - DNA, 20 bp, synthetic construct
  source 1..20: mol_type = other DNA
agatggcagaacccgcctgg

SEQ ID NO: 4536 - DNA, 20 bp, synthetic construct
  source 1..20: mol_type = other DNA
agaatcgaaaacctgtcaag

SEQ ID NO: 4537 - DNA, 20 bp, synthetic construct
  source 1..20: mol_type = other DNA
cccagccaggagcagaaagg

SEQ ID NO: 4538 - DNA, 20 bp, synthetic construct
  source 1..20: mol_type = other DNA
agaaagtggccggacaggtt

SEQ ID NO: 4539 - DNA, 20 bp, synthetic construct
  source 1..20: mol_type = other DNA
ggtctgaagccacatagagt

SEQ ID NO: 4540 - DNA, 20 bp, synthetic construct
  source 1..20: mol_type = other DNA
gaaacaatcccaactctatg

SEQ ID NO: 4541 - DNA, 20 bp, synthetic construct
  source 1..20: mol_type = other DNA
gcgagatggcagaacccgcc

SEQ ID NO: 4542 - DNA, 20 bp, synthetic construct
  source 1..20: mol_type = other DNA
acctgcacaggcaacaagac

SEQ ID NO: 4543 - DNA, 20 bp, synthetic construct
  source 1..20: mol_type = other DNA
gaatcgaaaacctgtcaagc

SEQ ID NO: 4544 - DNA, 20 bp, synthetic construct
  source 1..20: mol_type = other DNA
ccagcctcacagtgattatg

SEQ ID NO: 4545 - DNA, 20 bp, synthetic construct
  source 1..20: mol_type = other DNA
gccatctcgcagaaagtggc

SEQ ID NO: 4546 - DNA, 20 bp, synthetic construct
  source 1..20: mol_type = other DNA
tccggccactttctgcgaga

SEQ ID NO: 4547 - DNA, 20 bp, synthetic construct
  source 1..20: mol_type = other DNA
gactgccctgagccgccagg

SEQ ID NO: 4548 - DNA, 20 bp, synthetic construct
  source 1..20: mol_type = other DNA
agagactgccctgagccgcc

SEQ ID NO: 4549 - DNA, 20 bp, synthetic construct
  source 1..20: mol_type = other DNA
agaacccgcctggcggctca

SEQ ID NO: 4550 - DNA, 20 bp, synthetic construct
  source 1..20: mol_type = other DNA
ccaggacacggctccagtgg

SEQ ID NO: 4551 - DNA, 20 bp, synthetic construct
  source 1..20: mol_type = other DNA
agcccaggacacggctccag

SEQ ID NO: 4552 - DNA, 20 bp, synthetic construct
  source 1..20: mol_type = other DNA
gggcgaggacgacgcgcggt

SEQ ID NO: 4553 - DNA, 20 bp, synthetic construct
  source 1..20: mol_type = other DNA
cgggaaatactagctaatca

SEQ ID NO: 4554 - DNA, 20 bp, synthetic construct
  source 1..20: mol_type = other DNA
accgcgcgtcgtcctcgccc

SEQ ID NO: 4555 - DNA, 20 bp, synthetic construct
  source 1..20: mol_type = other DNA
tccagtggcggcgcggccca

SEQ ID NO: 4556 - DNA, 20 bp, synthetic construct
  source 1..20: mol_type = other DNA
acggcgcgcgctgttgacgc

SEQ ID NO: 4557 - DNA, 20 bp, synthetic construct
  source 1..20: mol_type = other DNA
agtttccgccccggaagccc

SEQ ID NO: 4558 - DNA, 20 bp, synthetic construct
  source 1..20: mol_type = other DNA
acacggctccagtggcggcg

SEQ ID NO: 4559 - DNA, 20 bp, synthetic construct
  source 1..20: mol_type = other DNA
aaattcgaagggattggccg

SEQ ID NO: 4560 - DNA, 20 bp, synthetic construct
  source 1..20: mol_type = other DNA
cagggcgcaggcgcgggtgt

SEQ ID NO: 4561 - DNA, 20 bp, synthetic construct
  source 1..20: mol_type = other DNA
cgtcgtcctcgccccggccc

SEQ ID NO: 4562 - DNA, 20 bp, synthetic construct
  source 1..20: mol_type = other DNA
cgacacccgcgcctgcgccc

SEQ ID NO: 4563 - DNA, 20 bp, synthetic construct
  source 1..20: mol_type = other DNA
gccggggcgaggacgacgcg

SEQ ID NO: 4564 - DNA, 20 bp, synthetic construct
  source 1..20: mol_type = other DNA
gcggcccagggcgcaggcgc

SEQ ID NO: 4565 - DNA, 20 bp, synthetic construct
  source 1..20: mol_type = other DNA
gcattgtgtcctaaataggg

SEQ ID NO: 4566 - DNA, 20 bp, synthetic construct
  source 1..20: mol_type = other DNA
tcaaaaccttgcaaaagacc

SEQ ID NO: 4567 - DNA, 20 bp, synthetic construct
  source 1..20: mol_type = other DNA
acagcattgtgtcctaaata

SEQ ID NO: 4568 - DNA, 20 bp, synthetic construct
  source 1..20: mol_type = other DNA
caggaagtagctgtgaggat

SEQ ID NO: 4569 - DNA, 20 bp, synthetic construct
  source 1..20: mol_type = other DNA
gctgcttcagttccgtattc

SEQ ID NO: 4570 - DNA, 20 bp, synthetic construct
  source 1..20: mol_type = other DNA
aggaagtagctgtgaggatg

SEQ ID NO: 4571 - DNA, 20 bp, synthetic construct
  source 1..20: mol_type = other DNA
aatttcaggaagtagctgtg

SEQ ID NO: 4572 - DNA, 20 bp, synthetic construct
  source 1..20: mol_type = other DNA
atttaagtgtctaaagcaga

SEQ ID NO: 4573 - DNA, 20 bp, synthetic construct
  source 1..20: mol_type = other DNA
aaatgacgaaaacctgaata

SEQ ID NO: 4574 - DNA, 20 bp, synthetic construct
  source 1..20: mol_type = other DNA
aagtagctgtgaggatgggg

SEQ ID NO: 4575 - DNA, 20 bp, synthetic construct
  source 1..20: mol_type = other DNA
aaggaactgactcaaatttc

SEQ ID NO: 4576 - DNA, 20 bp, synthetic construct
  source 1..20: mol_type = other DNA
tcaggaagtagctgtgagga

SEQ ID NO: 4577 - DNA, 20 bp, synthetic construct
  source 1..20: mol_type = other DNA
ggattaaatgtttctgtgcc

SEQ ID NO: 4578 - DNA, 20 bp, synthetic construct
  source 1..20: mol_type = other DNA
agctgtgaggatggggtggc

SEQ ID NO: 4579 - DNA, 20 bp, synthetic construct
  source 1..20: mol_type = other DNA
tgaatgtttgtttctctcac

SEQ ID NO: 4580 - DNA, 20 bp, synthetic construct
  source 1..20: mol_type = other DNA
gcgggatgcggacgtccgca

SEQ ID NO: 4581 - DNA, 20 bp, synthetic construct
  source 1..20: mol_type = other DNA
gaaccgaagcggcgaccctg

SEQ ID NO: 4582 - DNA, 20 bp, synthetic construct
  source 1..20: mol_type = other DNA
ggtcgccgcttcggttccag

SEQ ID NO: 4583 - DNA, 20 bp, synthetic construct
  source 1..20: mol_type = other DNA
gggcgggagtaactaaggga

SEQ ID NO: 4584 - DNA, 20 bp, synthetic construct
  source 1..20: mol_type = other DNA
ggttccagaggccacacggc

SEQ ID NO: 4585 - DNA, 20 bp, synthetic construct
  source 1..20: mol_type = other DNA
tgtggcctctggaaccgaag

SEQ ID NO: 4586 - DNA, 20 bp, synthetic construct
  source 1..20: mol_type = other DNA
gccgggacgccaccgtgccc

SEQ ID NO: 4587 - DNA, 20 bp, synthetic construct
  source 1..20: mol_type = other DNA
agtaactaagggatggcccc

SEQ ID NO: 4588 - DNA, 20 bp, synthetic construct
  source 1..20: mol_type = other DNA
gagtaactaagggatggccc

SEQ ID NO: 4589 - DNA, 20 bp, synthetic construct
  source 1..20: mol_type = other DNA
ggggcgtgagggacagcccg

SEQ ID NO: 4590 - DNA, 20 bp, synthetic construct
  source 1..20: mol_type = other DNA
acgccaccgtgccccggaag

SEQ ID NO: 4591 - DNA, 20 bp, synthetic construct
  source 1..20: mol_type = other DNA
cttcggttccagaggccaca

SEQ ID NO: 4592 - DNA, 20 bp, synthetic construct
  source 1..20: mol_type = other DNA
ccagaggccacacggccggg

SEQ ID NO: 4593 - DNA, 20 bp, synthetic construct
  source 1..20: mol_type = other DNA
gacgtccgcatcccgccccc

SEQ ID NO: 4594 - DNA, 20 bp, synthetic construct
  source 1..20: mol_type = other DNA
gctgtccctcacgccccgcc

SEQ ID NO: 4595 - DNA, 20 bp, synthetic construct
  source 1..20: mol_type = other DNA
cttacaccggtacttaagcg

SEQ ID NO: 4596 - DNA, 20 bp, synthetic construct
  source 1..20: mol_type = other DNA
gccagctcggccgcacgtca

SEQ ID NO: 4597 - DNA, 20 bp, synthetic construct
  source 1..20: mol_type = other DNA
gccggtccgcgcttaagtac

SEQ ID NO: 4598 - DNA, 20 bp, synthetic construct
  source 1..20: mol_type = other DNA
accggtacttaagcgcggac

SEQ ID NO: 4599 - DNA, 20 bp, synthetic construct
  source 1..20: mol_type = other DNA
gtccccactctctaagtcca

SEQ ID NO: 4600 - DNA, 20 bp, synthetic construct
  source 1..20: mol_type = other DNA
gagtttggttgcacttacac

SEQ ID NO: 4601 - DNA, 20 bp, synthetic construct
  source 1..20: mol_type = other DNA
cagtcccaatgcctgcgcca

SEQ ID NO: 4602 - DNA, 20 bp, synthetic construct
  source 1..20: mol_type = other DNA
cgctcccgcgccctgacgtg

SEQ ID NO: 4603 - DNA, 20 bp, synthetic construct
  source 1..20: mol_type = other DNA
ggactggagccaatgaggtg

SEQ ID NO: 4604 - DNA, 20 bp, synthetic construct
  source 1..20: mol_type = other DNA
tcggccgcacgtcagggcgc

SEQ ID NO: 4605 - DNA, 20 bp, synthetic construct
  source 1..20: mol_type = other DNA
aaggacctgcgcgcgcatgc

SEQ ID NO: 4606 - DNA, 20 bp, synthetic construct
  source 1..20: mol_type = other DNA
cgcgcgcaggtccttggcgc

SEQ ID NO: 4607 - DNA, 20 bp, synthetic construct
  source 1..20: mol_type = other DNA
ctgacgtgcggccgagctgg

SEQ ID NO: 4608 - DNA, 20 bp, synthetic construct
  source 1..20: mol_type = other DNA
ttactgcgtagccgccagct

SEQ ID NO: 4609 - DNA, 20 bp, synthetic construct
  source 1..20: mol_type = other DNA
cattgggactggagccaatg

SEQ ID NO: 4610 - DNA, 20 bp, synthetic construct
  source 1..20: mol_type = other DNA
agtgcatacaaagtcctcaa

SEQ ID NO: 4611 - DNA, 20 bp, synthetic construct
  source 1..20: mol_type = other DNA
attcgggcttgaagatctcg

SEQ ID NO: 4612 - DNA, 20 bp, synthetic construct
  source 1..20: mol_type = other DNA
ggctcgactagaagactaag

SEQ ID NO: 4613 - DNA, 20 bp, synthetic construct
  source 1..20: mol_type = other DNA
agacagcccgatcccaggat

SEQ ID NO: 4614 - DNA, 20 bp, synthetic construct
  source 1..20: mol_type = other DNA
gcatacaaagtcctcaaagg

SEQ ID NO: 4615 - DNA, 20 bp, synthetic construct
  source 1..20: mol_type = other DNA
gctgatatttacgggaaatg

SEQ ID NO: 4616 - DNA, 20 bp, synthetic construct
  source 1..20: mol_type = other DNA
ccggctcgactagaagacta

SEQ ID NO: 4617 - DNA, 20 bp, synthetic construct
  source 1..20: mol_type = other DNA
tagacagcccgatcccagga

SEQ ID NO: 4618 - DNA, 20 bp, synthetic construct
  source 1..20: mol_type = other DNA
tgatcacaaggtccgaagtg

SEQ ID NO: 4619 - DNA, 20 bp, synthetic construct
  source 1..20: mol_type = other DNA
gatcacaaggtccgaagtgg

SEQ ID NO: 4620 - DNA, 20 bp, synthetic construct
  source 1..20: mol_type = other DNA
gcggtagacagcccgatccc

SEQ ID NO: 4621 - DNA, 20 bp, synthetic construct
  source 1..20: mol_type = other DNA
aagtcctcaaaggtggtctg

SEQ ID NO: 4622 - DNA, 20 bp, synthetic construct
  source 1..20: mol_type = other DNA
cgaggacccatcctgggatc

SEQ ID NO: 4623 - DNA, 20 bp, synthetic construct
  source 1..20: mol_type = other DNA
tcttctagtcgagccggccg

SEQ ID NO: 4624 - DNA, 20 bp, synthetic construct
  source 1..20: mol_type = other DNA
gcgaggatgagcccccactt

SEQ ID NO: 4625 - DNA, 20 bp, synthetic construct
  source 1..20: mol_type = other DNA
gggcggtgcaaaaaaggtgt

SEQ ID NO: 4626 - DNA, 20 bp, synthetic construct
  source 1..20: mol_type = other DNA
gtgattgccgtgtagagagc

SEQ ID NO: 4627 - DNA, 20 bp, synthetic construct
  source 1..20: mol_type = other DNA
attgccgtgtagagagccgg

SEQ ID NO: 4628 - DNA, 20 bp, synthetic construct
  source 1..20: mol_type = other DNA
gattgccgtgtagagagccg

SEQ ID NO: 4629 - DNA, 20 bp, synthetic construct
  source 1..20: mol_type = other DNA
acgtgaccacacccagcccc

SEQ ID NO: 4630 - DNA, 20 bp, synthetic construct
  source 1..20: mol_type = other DNA
acgtgacaggttcagaccaa

SEQ ID NO: 4631 - DNA, 20 bp, synthetic construct
  source 1..20: mol_type = other DNA
cagctcaggcctgttagggc

SEQ ID NO: 4632 - DNA, 20 bp, synthetic construct
  source 1..20: mol_type = other DNA
ctaacccccggctctctaca

SEQ ID NO: 4633 - DNA, 20 bp, synthetic construct
  source 1..20: mol_type = other DNA
tatagaagaccccccgcggg

SEQ ID NO: 4634 - DNA, 20 bp, synthetic construct
  source 1..20: mol_type = other DNA
acaggttcagaccaatgggc

SEQ ID NO: 4635 - DNA, 20 bp, synthetic construct
  source 1..20: mol_type = other DNA
accaatgggcaggccgcccg

SEQ ID NO: 4636 - DNA, 20 bp, synthetic construct
  source 1..20: mol_type = other DNA
tgaccacacccagccccggg

SEQ ID NO: 4637 - DNA, 20 bp, synthetic construct
  source 1..20: mol_type = other DNA
cacgtgaccacacccagccc

SEQ ID NO: 4638 - DNA, 20 bp, synthetic construct
  source 1..20: mol_type = other DNA
gcgctcctactcctaacccc

SEQ ID NO: 4639 - DNA, 20 bp, synthetic construct
  source 1..20: mol_type = other DNA
aaaggtgtaggagtctgagc

SEQ ID NO: 4640 - DNA, 20 bp, synthetic construct
  source 1..20: mol_type = other DNA
ccttcagcacgaattaggcg

SEQ ID NO: 4641 - DNA, 20 bp, synthetic construct
  source 1..20: mol_type = other DNA
gaaacctaagtgcttctgag

SEQ ID NO: 4642 - DNA, 20 bp, synthetic construct
  source 1..20: mol_type = other DNA
gcataaaagactggctgcgg

SEQ ID NO: 4643 - DNA, 20 bp, synthetic construct
  source 1..20: mol_type = other DNA
aattaggcgaggcactttcg

SEQ ID NO: 4644 - DNA, 20 bp, synthetic construct
  source 1..20: mol_type = other DNA
gtttcccttcagcacgaatt

SEQ ID NO: 4645 - DNA, 20 bp, synthetic construct
  source 1..20: mol_type = other DNA
aaggaaaccgaaactcccgc

SEQ ID NO: 4646 - DNA, 20 bp, synthetic construct
  source 1..20: mol_type = other DNA
tagctaggaagaaccagttc

SEQ ID NO: 4647 - DNA, 20 bp, synthetic construct
  source 1..20: mol_type = other DNA
gcagaatagaataccagaac

SEQ ID NO: 4648 - DNA, 20 bp, synthetic construct
  source 1..20: mol_type = other DNA
tcaatcagaatcttaagaag

SEQ ID NO: 4649 - DNA, 20 bp, synthetic construct
  source 1..20: mol_type = other DNA
taagattctgattgaaggga

SEQ ID NO: 4650 - DNA, 20 bp, synthetic construct
  source 1..20: mol_type = other DNA
aagtgcttctgagaggagaa

SEQ ID NO: 4651 - DNA, 20 bp, synthetic construct
  source 1..20: mol_type = other DNA
gatgcataaaagactggctg

SEQ ID NO: 4652 - DNA, 20 bp, synthetic construct
  source 1..20: mol_type = other DNA
gaatcttaagaaggggagca

SEQ ID NO: 4653 - DNA, 20 bp, synthetic construct
  source 1..20: mol_type = other DNA
ccgccggatgcataaaagac

SEQ ID NO: 4654 - DNA, 20 bp, synthetic construct
  source 1..20: mol_type = other DNA
ggtatgaagttacaatagct

SEQ ID NO: 4655 - DNA, 20 bp, synthetic construct
  source 1..20: mol_type = other DNA
ggctgtaggggcctgccaag

SEQ ID NO: 4656 - DNA, 20 bp, synthetic construct
  source 1..20: mol_type = other DNA
caagggcctgacatcacaag

SEQ ID NO: 4657 - DNA, 20 bp, synthetic construct
  source 1..20: mol_type = other DNA
tggcaggcccctacagccaa

SEQ ID NO: 4658 - DNA, 20 bp, synthetic construct
  source 1..20: mol_type = other DNA
caatcagctcccaataccaa

SEQ ID NO: 4659 - DNA, 20 bp, synthetic construct
  source 1..20: mol_type = other DNA
aacggccctggaagagaccc

SEQ ID NO: 4660 - DNA, 20 bp, synthetic construct
  source 1..20: mol_type = other DNA
gaaggcagctgaggttgtgg

SEQ ID NO: 4661 - DNA, 20 bp, synthetic construct
  source 1..20: mol_type = other DNA
gggcctgacatcacaagggg

SEQ ID NO: 4662 - DNA, 20 bp, synthetic construct
  source 1..20: mol_type = other DNA
tgtaggggcctgccaagggg

SEQ ID NO: 4663 - DNA, 20 bp, synthetic construct
  source 1..20: mol_type = other DNA
aaggcagctgaggttgtggg

SEQ ID NO: 4664 - DNA, 20 bp, synthetic construct
  source 1..20: mol_type = other DNA
ggaaggcagctgaggttgtg

SEQ ID NO: 4665 - DNA, 20 bp, synthetic construct
  source 1..20: mol_type = other DNA
gcctgacatcacaaggggag

SEQ ID NO: 4666 - DNA, 20 bp, synthetic construct
  source 1..20: mol_type = other DNA
ccaagggcctgacatcacaa

SEQ ID NO: 4667 - DNA, 20 bp, synthetic construct
  source 1..20: mol_type = other DNA
aggggaggggaaggcagctg

SEQ ID NO: 4668 - DNA, 20 bp, synthetic construct
  source 1..20: mol_type = other DNA
ggcctgacatcacaagggga

SEQ ID NO: 4669 - DNA, 20 bp, synthetic construct
  source 1..20: mol_type = other DNA
gacatcacaaggggagggga

SEQ ID NO: 4670 - DNA, 20 bp, synthetic construct
  source 1..20: mol_type = other DNA
ggctggaggatactacacgc

SEQ ID NO: 4671 - DNA, 20 bp, synthetic construct
  source 1..20: mol_type = other DNA
gctggaggatactacacgca

SEQ ID NO: 4672 - DNA, 20 bp, synthetic construct
  source 1..20: mol_type = other DNA
aggatactacacgcaggggt

SEQ ID NO: 4673 - DNA, 20 bp, synthetic construct
  source 1..20: mol_type = other DNA
ctggaggatactacacgcag

SEQ ID NO: 4674 - DNA, 20 bp, synthetic construct
  source 1..20: mol_type = other DNA
gaggatactacacgcagggg

SEQ ID NO: 4675 - DNA, 20 bp, synthetic construct
  source 1..20: mol_type = other DNA
agatcactgggaccagagga

SEQ ID NO: 4676 - DNA, 20 bp, synthetic construct
  source 1..20: mol_type = other DNA
gagatcactgggaccagagg

SEQ ID NO: 4677 - DNA, 20 bp, synthetic construct
  source 1..20: mol_type = other DNA
cctctggtcccagtgatctc

SEQ ID NO: 4678 - DNA, 20 bp, synthetic construct
  source 1..20: mol_type = other DNA
tgccctgggcagaggacgtg

SEQ ID NO: 4679 - DNA, 20 bp, synthetic construct
  source 1..20: mol_type = other DNA
cctgagatcactgggaccag

SEQ ID NO: 4680 - DNA, 20 bp, synthetic construct
  source 1..20: mol_type = other DNA
tggtcccagtgatctcaggc

SEQ ID NO: 4681 - DNA, 20 bp, synthetic construct
  source 1..20: mol_type = other DNA
gatcactgggaccagaggag

SEQ ID NO: 4682 - DNA, 20 bp, synthetic construct
  source 1..20: mol_type = other DNA
ggcagaggacgtggggactc

SEQ ID NO: 4683 - DNA, 20 bp, synthetic construct
  source 1..20: mol_type = other DNA
gtatcctccagcccctcctc

SEQ ID NO: 4684 - DNA, 20 bp, synthetic construct
  source 1..20: mol_type = other DNA
gggaccagaggaggggctgg

SEQ ID NO: 4685 - DNA, 20 bp, synthetic construct
  source 1..20: mol_type = other DNA
ttgtagagcactcgattctg

SEQ ID NO: 4686 - DNA, 20 bp, synthetic construct
  source 1..20: mol_type = other DNA
tcagatgggcatcagaatgt

SEQ ID NO: 4687 - DNA, 20 bp, synthetic construct
  source 1..20: mol_type = other DNA
tgggcatcagaatgttggtg

SEQ ID NO: 4688 - DNA, 20 bp, synthetic construct
  source 1..20: mol_type = other DNA
gggcatcagaatgttggtgg

SEQ ID NO: 4689 - DNA, 20 bp, synthetic construct
  source 1..20: mol_type = other DNA
gatgggcatcagaatgttgg

SEQ ID NO: 4690 - DNA, 20 bp, synthetic construct
  source 1..20: mol_type = other DNA
gaatgttaattactcggctc

SEQ ID NO: 4691 - DNA, 20 bp, synthetic construct
  source 1..20: mol_type = other DNA
atgggcatcagaatgttggt

SEQ ID NO: 4692 - DNA, 20 bp, synthetic construct
  source 1..20: mol_type = other DNA
ctttatctcaggtactataa

SEQ ID NO: 4693 - DNA, 20 bp, synthetic construct
  source 1..20: mol_type = other DNA
gactgagtcacaaagctgtt

SEQ ID NO: 4694 - DNA, 20 bp, synthetic construct
  source 1..20: mol_type = other DNA
agactgagtcacaaagctgt

SEQ ID NO: 4695 - DNA, 20 bp, synthetic construct
  source 1..20: mol_type = other DNA
tctgaagactgctttatctc

SEQ ID NO: 4696 - DNA, 20 bp, synthetic construct
  source 1..20: mol_type = other DNA
atcagaatgttggtgggggt

SEQ ID NO: 4697 - DNA, 20 bp, synthetic construct
  source 1..20: mol_type = other DNA
tcagaatgttggtgggggtg

SEQ ID NO: 4698 - DNA, 20 bp, synthetic construct
  source 1..20: mol_type = other DNA
tttcaaagaaaatcttgtaa

SEQ ID NO: 4699 - DNA, 20 bp, synthetic construct
  source 1..20: mol_type = other DNA
ataaaagaatgttaattact

SEQ ID NO: 4700 - DNA, 20 bp, synthetic construct
  source 1..20: mol_type = other DNA
agtgtcggcccagcgactgc

SEQ ID NO: 4701 - DNA, 20 bp, synthetic construct
  source 1..20: mol_type = other DNA
ccgacactacacgcccgccg

SEQ ID NO: 4702 - DNA, 20 bp, synthetic construct
  source 1..20: mol_type = other DNA
cgacactacacgcccgccgg

SEQ ID NO: 4703 - DNA, 20 bp, synthetic construct
  source 1..20: mol_type = other DNA
ggccactgggcggcgtcctg

SEQ ID NO: 4704 - DNA, 20 bp, synthetic construct
  source 1..20: mol_type = other DNA
tagtgtcggcccagcgactg

SEQ ID NO: 4705 - DNA, 20 bp, synthetic construct
  source 1..20: mol_type = other DNA
cgggcacgctctcggcgcag

SEQ ID NO: 4706 - DNA, 20 bp, synthetic construct
  source 1..20: mol_type = other DNA
cctgcgccgagagcgtgccc

SEQ ID NO: 4707 - DNA, 20 bp, synthetic construct
  source 1..20: mol_type = other DNA
ggagccacgggagcgcccca

SEQ ID NO: 4708 - DNA, 20 bp, synthetic construct
  source 1..20: mol_type = other DNA
tcccgtggctcctcccccgg

SEQ ID NO: 4709 - DNA, 20 bp, synthetic construct
  source 1..20: mol_type = other DNA
cgcctggaccgcgcccgccc

SEQ ID NO: 4710 - DNA, 20 bp, synthetic construct
  source 1..20: mol_type = other DNA
gagccacgggagcgccccag

SEQ ID NO: 4711 - DNA, 20 bp, synthetic construct
  source 1..20: mol_type = other DNA
cccgccgggggaggagccac

SEQ ID NO: 4712 - DNA, 20 bp, synthetic construct
  source 1..20: mol_type = other DNA
gcgccgagagcgtgcccggg

SEQ ID NO: 4713 - DNA, 20 bp, synthetic construct
  source 1..20: mol_type = other DNA
gtccaggcgctgagcccctg

SEQ ID NO: 4714 - DNA, 20 bp, synthetic construct
  source 1..20: mol_type = other DNA
cgctcccgtggctcctcccc

SEQ ID NO: 4715 - DNA, 20 bp, synthetic construct
  source 1..20: mol_type = other DNA
ggctgcgtaagcgtccacgg

SEQ ID NO: 4716 - DNA, 20 bp, synthetic construct
  source 1..20: mol_type = other DNA
tgcgtaagcgtccacggcgg

SEQ ID NO: 4717 - DNA, 20 bp, synthetic construct
  source 1..20: mol_type = other DNA
agggcgcacggcagcgacgt

SEQ ID NO: 4718 - DNA, 20 bp, synthetic construct
  source 1..20: mol_type = other DNA
tatggccgaacactcagctt

SEQ ID NO: 4719 - DNA, 20 bp, synthetic construct
  source 1..20: mol_type = other DNA
actcagcttggggaattcgg

SEQ ID NO: 4720 - DNA, 20 bp, synthetic construct
  source 1..20: mol_type = other DNA
ccgcgggcagaacacgcccc

SEQ ID NO: 4721 - DNA, 20 bp, synthetic construct
  source 1..20: mol_type = other DNA
atggccgaacactcagcttg

SEQ ID NO: 4722 - DNA, 20 bp, synthetic construct
  source 1..20: mol_type = other DNA
ctatggccgaacactcagct

SEQ ID NO: 4723 - DNA, 20 bp, synthetic construct
  source 1..20: mol_type = other DNA
cgggactacaattcccagga

SEQ ID NO: 4724 - DNA, 20 bp, synthetic construct
  source 1..20: mol_type = other DNA
attgtagtcccgaagggcta

SEQ ID NO: 4725 - DNA, 20 bp, synthetic construct
  source 1..20: mol_type = other DNA
tcgggactacaattcccagg

SEQ ID NO: 4726 - DNA, 20 bp, synthetic construct
  source 1..20: mol_type = other DNA
acaattcccaggagggcgca

SEQ ID NO: 4727 - DNA, 20 bp, synthetic construct
  source 1..20: mol_type = other DNA
ctgggaattgtagtcccgaa

SEQ ID NO: 4728 - DNA, 20 bp, synthetic construct
  source 1..20: mol_type = other DNA
cctgggaattgtagtcccga

SEQ ID NO: 4729 - DNA, 20 bp, synthetic construct
  source 1..20: mol_type = other DNA
ccttcgggactacaattccc

SEQ ID NO: 4730 - DNA, 20 bp, synthetic construct
  source 1..20: mol_type = other DNA
gaaatcagtagcgtcatcgg

SEQ ID NO: 4731 - DNA, 20 bp, synthetic construct
  source 1..20: mol_type = other DNA
gctgttccgagaatcagtcc

SEQ ID NO: 4732 - DNA, 20 bp, synthetic construct
  source 1..20: mol_type = other DNA
gcaaccaatcagaacaggaa

SEQ ID NO: 4733 - DNA, 20 bp, synthetic construct
  source 1..20: mol_type = other DNA
agaatcagtccgggtcacgt

SEQ ID NO: 4734 - DNA, 20 bp, synthetic construct
  source 1..20: mol_type = other DNA
actgatttcagccaatcatg

SEQ ID NO: 4735 - DNA, 20 bp, synthetic construct
  source 1..20: mol_type = other DNA
gacgagggaagtcggcgaga

SEQ ID NO: 4736 - DNA, 20 bp, synthetic construct
  source 1..20: mol_type = other DNA
ggagaggcaccaacgtgacc

SEQ ID NO: 4737 - DNA, 20 bp, synthetic construct
  source 1..20: mol_type = other DNA
caatcagaacaggaaaggag

SEQ ID NO: 4738 - DNA, 20 bp, synthetic construct
  source 1..20: mol_type = other DNA
ggacgagggaagtcggcgag

SEQ ID NO: 4739 - DNA, 20 bp, synthetic construct
  source 1..20: mol_type = other DNA
tagcgtcatcggcggccggg

SEQ ID NO: 4740 - DNA, 20 bp, synthetic construct
  source 1..20: mol_type = other DNA
ccgggagggcggagggacga

SEQ ID NO: 4741 - DNA, 20 bp, synthetic construct
  source 1..20: mol_type = other DNA
ggcggagggacgagggaagt

SEQ ID NO: 4742 - DNA, 20 bp, synthetic construct
  source 1..20: mol_type = other DNA
agcgtcatcggcggccggga

SEQ ID NO: 4743 - DNA, 20 bp, synthetic construct
  source 1..20: mol_type = other DNA
gtcatcggcggccgggaggg

SEQ ID NO: 4744 - DNA, 20 bp, synthetic construct
  source 1..20: mol_type = other DNA
tcggcggccgggagggcgga

SEQ ID NO: 4745 - DNA, 20 bp, synthetic construct
  source 1..20: mol_type = other DNA
cccgcccactccgcgcactg

SEQ ID NO: 4746 - DNA, 20 bp, synthetic construct
  source 1..20: mol_type = other DNA
caggcctcagtgcgcggagt

SEQ ID NO: 4747 - DNA, 20 bp, synthetic construct
  source 1..20: mol_type = other DNA
gatcgaccagccgaggcctc

SEQ ID NO: 4748 - DNA, 20 bp, synthetic construct
  source 1..20: mol_type = other DNA
cgcgcgcaggcctcagtgcg

SEQ ID NO: 4749 - DNA, 20 bp, synthetic construct
  source 1..20: mol_type = other DNA
gcaggcctcagtgcgcggag

SEQ ID NO: 4750 - DNA, 20 bp, synthetic construct
  source 1..20: mol_type = other DNA
cgcgtgtgtcgggcgcgcga

SEQ ID NO: 4751 - DNA, 20 bp, synthetic construct
  source 1..20: mol_type = other DNA
gggacgtgatcgaccagccg

SEQ ID NO: 4752 - DNA, 20 bp, synthetic construct
  source 1..20: mol_type = other DNA
gcctcagtgcgcggagtggg

SEQ ID NO: 4753 - DNA, 20 bp, synthetic construct
  source 1..20: mol_type = other DNA
gggcggtggcgacgccgagg

SEQ ID NO: 4754 - DNA, 20 bp, synthetic construct
  source 1..20: mol_type = other DNA
gcactgaggcctgcgcgcgc

SEQ ID NO: 4755 - DNA, 20 bp, synthetic construct
  source 1..20: mol_type = other DNA
acgaggaggcgcgcgtgcgc

SEQ ID NO: 4756 - DNA, 20 bp, synthetic construct
  source 1..20: mol_type = other DNA
ccagctcccgcctcccgcgc

SEQ ID NO: 4757 - DNA, 20 bp, synthetic construct
  source 1..20: mol_type = other DNA
gcgggcagggcgggacgagg

SEQ ID NO: 4758 - DNA, 20 bp, synthetic construct
  source 1..20: mol_type = other DNA
gcgcgggaggcgggagctgg

SEQ ID NO: 4759 - DNA, 20 bp, synthetic construct
  source 1..20: mol_type = other DNA
gaggaggcgcgcgtgcgcgg

SEQ ID NO: 4760 - DNA, 20 bp, synthetic construct
  source 1..20: mol_type = other DNA
taatgtaaataacgaggtaa

SEQ ID NO: 4761 - DNA, 20 bp, synthetic construct
  source 1..20: mol_type = other DNA
gctccggagtgattaatccg

SEQ ID NO: 4762 - DNA, 20 bp, synthetic construct
  source 1..20: mol_type = other DNA
tccgccgctccaaatgctgg

SEQ ID NO: 4763 - DNA, 20 bp, synthetic construct
  source 1..20: mol_type = other DNA
tatccccggattaatcactc

SEQ ID NO: 4764 - DNA, 20 bp, synthetic construct
  source 1..20: mol_type = other DNA
ccggcgcgaaccccgcgaag

SEQ ID NO: 4765 - DNA, 20 bp, synthetic construct
  source 1..20: mol_type = other DNA
catttggagcggcggagaag

SEQ ID NO: 4766 - DNA, 20 bp, synthetic construct
  source 1..20: mol_type = other DNA
acccccagcatttggagcgg

SEQ ID NO: 4767 - DNA, 20 bp, synthetic construct
  source 1..20: mol_type = other DNA
ctccgccgctccaaatgctg

SEQ ID NO: 4768 - DNA, 20 bp, synthetic construct
  source 1..20: mol_type = other DNA
gggagggggtgaattatccc

SEQ ID NO: 4769 - DNA, 20 bp, synthetic construct
  source 1..20: mol_type = other DNA
tgggggtggaggcgcagcta

SEQ ID NO: 4770 - DNA, 20 bp, synthetic construct
  source 1..20: mol_type = other DNA
ttcgcggggttcgcgccggg

SEQ ID NO: 4771 - DNA, 20 bp, synthetic construct
  source 1..20: mol_type = other DNA
attcaccccctcccgccccc

SEQ ID NO: 4772 - DNA, 20 bp, synthetic construct
  source 1..20: mol_type = other DNA
tccacccccagcatttggag

SEQ ID NO: 4773 - DNA, 20 bp, synthetic construct
  source 1..20: mol_type = other DNA
gctaaggataaaatattggg

SEQ ID NO: 4774 - DNA, 20 bp, synthetic construct
  source 1..20: mol_type = other DNA
agctaaggataaaatattgg

SEQ ID NO: 4775 - DNA, 20 bp, synthetic construct
  source 1..20: mol_type = other DNA
gcttcgcggggttcgcgccg

SEQ ID NO: 4776 - DNA, 20 bp, synthetic construct
  source 1..20: mol_type = other DNA
gcgggagaactagtgcatgc

SEQ ID NO: 4777 - DNA, 20 bp, synthetic construct
  source 1..20: mol_type = other DNA
gacgctcccgggtgtaagcg

SEQ ID NO: 4778 - DNA, 20 bp, synthetic construct
  source 1..20: mol_type = other DNA
cgctcccgggtgtaagcgcg

SEQ ID NO: 4779 - DNA, 20 bp, synthetic construct
  source 1..20: mol_type = other DNA
cgccgggccgtgctagtgcg

SEQ ID NO: 4780 - DNA, 20 bp, synthetic construct
  source 1..20: mol_type = other DNA
gaactagtgcatgctggctg

SEQ ID NO: 4781 - DNA, 20 bp, synthetic construct
  source 1..20: mol_type = other DNA
gcggaagacgcatgcgctgg

SEQ ID NO: 4782 - DNA, 20 bp, synthetic construct
  source 1..20: mol_type = other DNA
ggctggcgcggcacttaagg

SEQ ID NO: 4783 - DNA, 20 bp, synthetic construct
  source 1..20: mol_type = other DNA
aggccgcgcacgcgcaaacg

SEQ ID NO: 4784 - DNA, 20 bp, synthetic construct
  source 1..20: mol_type = other DNA
cccgccccgcgcttacaccc

SEQ ID NO: 4785 - DNA, 20 bp, synthetic construct
  source 1..20: mol_type = other DNA
gcgcttacacccgggagcgt

SEQ ID NO: 4786 - DNA, 20 bp, synthetic construct
  source 1..20: mol_type = other DNA
gatggcggacgcaaagccgg

SEQ ID NO: 4787 - DNA, 20 bp, synthetic construct
  source 1..20: mol_type = other DNA
ggggatggcggacgcaaagc

SEQ ID NO: 4788 - DNA, 20 bp, synthetic construct
  source 1..20: mol_type = other DNA
cggacgcaaagccggaggca

SEQ ID NO: 4789 - DNA, 20 bp, synthetic construct
  source 1..20: mol_type = other DNA
cgcgcactagcacggcccgg

SEQ ID NO: 4790 - DNA, 20 bp, synthetic construct
  source 1..20: mol_type = other DNA
ggccgcgcacgcgcaaacgc

SEQ ID NO: 4791 - DNA, 20 bp, synthetic construct
  source 1..20: mol_type = other DNA
tggaggatggcgcctaaatg

SEQ ID NO: 4792 - DNA, 20 bp, synthetic construct
  source 1..20: mol_type = other DNA
ggatatgagtgactttgtgg

SEQ ID NO: 4793 - DNA, 20 bp, synthetic construct
  source 1..20: mol_type = other DNA
aagtcactcatatcccaacc

SEQ ID NO: 4794 - DNA, 20 bp, synthetic construct
  source 1..20: mol_type = other DNA
agcccttatgttcgtcaccc

SEQ ID NO: 4795 - DNA, 20 bp, synthetic construct
  source 1..20: mol_type = other DNA
ttataagtcagtggagcctg

SEQ ID NO: 4796 - DNA, 20 bp, synthetic construct
  source 1..20: mol_type = other DNA
gcatgccaatttctgcacca

SEQ ID NO: 4797 - DNA, 20 bp, synthetic construct
  source 1..20: mol_type = other DNA
ctgcaggctttataagtcag

SEQ ID NO: 4798 - DNA, 20 bp, synthetic construct
  source 1..20: mol_type = other DNA
tcagagaactgaaagttgca

SEQ ID NO: 4799 - DNA, 20 bp, synthetic construct
  source 1..20: mol_type = other DNA
tctgaggaactgaagatcat

SEQ ID NO: 4800 - DNA, 20 bp, synthetic construct
  source 1..20: mol_type = other DNA
caaggaaatacagatacatt

SEQ ID NO: 4801 - DNA, 20 bp, synthetic construct
  source 1..20: mol_type = other DNA
tgtcagagctggctcccggt

SEQ ID NO: 4802 - DNA, 20 bp, synthetic construct
  source 1..20: mol_type = other DNA
tagatgtcagagctggctcc

SEQ ID NO: 4803 - DNA, 20 bp, synthetic construct
  source 1..20: mol_type = other DNA
atgagtgactttgtggagga

SEQ ID NO: 4804 - DNA, 20 bp, synthetic construct
  source 1..20: mol_type = other DNA
gtcagtggagcctgcggaag

SEQ ID NO: 4805 - DNA, 20 bp, synthetic construct
  source 1..20: mol_type = other DNA
cgatgactagatgtcagagc

SEQ ID NO: 4806 - DNA, 20 bp, synthetic construct
  source 1..20: mol_type = other DNA
gtgcatcctgggataggctc

SEQ ID NO: 4807 - DNA, 20 bp, synthetic construct
  source 1..20: mol_type = other DNA
ctggttgccatgccaaccca

SEQ ID NO: 4808 - DNA, 20 bp, synthetic construct
  source 1..20: mol_type = other DNA
tgtgaactcgggaaactcgc

SEQ ID NO: 4809 - DNA, 20 bp, synthetic construct
  source 1..20: mol_type = other DNA
ggcggtggcagcggcatgtg

SEQ ID NO: 4810 - DNA, 20 bp, synthetic construct
  source 1..20: mol_type = other DNA
agttcacacaggccctgggt

SEQ ID NO: 4811 - DNA, 20 bp, synthetic construct
  source 1..20: mol_type = other DNA
ggcagcggcatgtgcggaga

SEQ ID NO: 4812 - DNA, 20 bp, synthetic construct
  source 1..20: mol_type = other DNA
gcacatgccgctgccaccgc

SEQ ID NO: 4813 - DNA, 20 bp, synthetic construct
  source 1..20: mol_type = other DNA
cccagggcctgtgtgaactc

SEQ ID NO: 4814 - DNA, 20 bp, synthetic construct
  source 1..20: mol_type = other DNA
gcggcatgtgcggagaaggc

SEQ ID NO: 4815 - DNA, 20 bp, synthetic construct
  source 1..20: mol_type = other DNA
cgagtttcccgagttcacac

SEQ ID NO: 4816 - DNA, 20 bp, synthetic construct
  source 1..20: mol_type = other DNA
acacaggccctgggttggca

SEQ ID NO: 4817 - DNA, 20 bp, synthetic construct
  source 1..20: mol_type = other DNA
tcccgagttcacacaggccc

SEQ ID NO: 4818 - DNA, 20 bp, synthetic construct
  source 1..20: mol_type = other DNA
gcatgtgcggagaaggctgg

SEQ ID NO: 4819 - DNA, 20 bp, synthetic construct
  source 1..20: mol_type = other DNA
cctggttgccatgccaaccc

SEQ ID NO: 4820 - DNA, 20 bp, synthetic construct
  source 1..20: mol_type = other DNA
cccgagttcacacaggccct

SEQ ID NO: 4821 - DNA, 20 bp, synthetic construct
  source 1..20: mol_type = other DNA
ccgcgagggcccgagcacgg

SEQ ID NO: 4822 - DNA, 20 bp, synthetic construct
  source 1..20: mol_type = other DNA
caccaaggtgcccaccgcga

SEQ ID NO: 4823 - DNA, 20 bp, synthetic construct
  source 1..20: mol_type = other DNA
tggagccggcgcccaagccg

SEQ ID NO: 4824 - DNA, 20 bp, synthetic construct
  source 1..20: mol_type = other DNA
cgtgctcgggccctcgcggt

SEQ ID NO: 4825 - DNA, 20 bp, synthetic construct
  source 1..20: mol_type = other DNA
gcaccaaggtgcccaccgcg

SEQ ID NO: 4826 - DNA, 20 bp, synthetic construct
  source 1..20: mol_type = other DNA
gcggtgggcaccttggtgct

SEQ ID NO: 4827 - DNA, 20 bp, synthetic construct
  source 1..20: mol_type = other DNA
ccaccgcgagggcccgagca

SEQ ID NO: 4828 - DNA, 20 bp, synthetic construct
  source 1..20: mol_type = other DNA
ccgtggcgcacccagcacca

SEQ ID NO: 4829 - DNA, 20 bp, synthetic construct
  source 1..20: mol_type = other DNA
ccgtgctcgggccctcgcgg

SEQ ID NO: 4830 - DNA, 20 bp, synthetic construct
  source 1..20: mol_type = other DNA
ccgccgtgctcgggccctcg

SEQ ID NO: 4831 - DNA, 20 bp, synthetic construct
  source 1..20: mol_type = other DNA
cggcggtgcagcctcggctt

SEQ ID NO: 4832 - DNA, 20 bp, synthetic construct
  source 1..20: mol_type = other DNA
acggcggtgcagcctcggct

SEQ ID NO: 4833 - DNA, 20 bp, synthetic construct
  source 1..20: mol_type = other DNA
gaggctgcaccgccgtgctc

SEQ ID NO: 4834 - DNA, 20 bp, synthetic construct
  source 1..20: mol_type = other DNA
cgcccccgcggccctgcagg

SEQ ID NO: 4835 - DNA, 20 bp, synthetic construct
  source 1..20: mol_type = other DNA
gggcgccggctccacctgca

SEQ ID NO: 4836 - DNA, 20 bp, synthetic construct
  source 1..20: mol_type = other DNA
acgctcgacatcactacctg

SEQ ID NO: 4837 - DNA, 20 bp, synthetic construct
  source 1..20: mol_type = other DNA
gcggcctagagcatccgcgc

SEQ ID NO: 4838 - DNA, 20 bp, synthetic construct
  source 1..20: mol_type = other DNA
tagagcatccgcgcaggagt

SEQ ID NO: 4839 - DNA, 20 bp, synthetic construct
  source 1..20: mol_type = other DNA
caagtggactcattgagcaa

SEQ ID NO: 4840 - DNA, 20 bp, synthetic construct
  source 1..20: mol_type = other DNA
gagaggctgaagagtaaaga

SEQ ID NO: 4841 - DNA, 20 bp, synthetic construct
  source 1..20: mol_type = other DNA
catccgcgcaggagtaggag

SEQ ID NO: 4842 - DNA, 20 bp, synthetic construct
  source 1..20: mol_type = other DNA
tcgctgggtactagagcaag

SEQ ID NO: 4843 - DNA, 20 bp, synthetic construct
  source 1..20: mol_type = other DNA
tgctcaatgagtccacttgg

SEQ ID NO: 4844 - DNA, 20 bp, synthetic construct
  source 1..20: mol_type = other DNA
cagcctctcctactcctgcg

SEQ ID NO: 4845 - DNA, 20 bp, synthetic construct
  source 1..20: mol_type = other DNA
ggggtcttcgtaccaccaag

SEQ ID NO: 4846 - DNA, 20 bp, synthetic construct
  source 1..20: mol_type = other DNA
gaagagtaaagagggtttag

SEQ ID NO: 4847 - DNA, 20 bp, synthetic construct
  source 1..20: mol_type = other DNA
attgagcaagggagatcgct

SEQ ID NO: 4848 - DNA, 20 bp, synthetic construct
  source 1..20: mol_type = other DNA
gtaaagagggtttagagggt

SEQ ID NO: 4849 - DNA, 20 bp, synthetic construct
  source 1..20: mol_type = other DNA
ggagaggctgaagagtaaag

SEQ ID NO: 4850 - DNA, 20 bp, synthetic construct
  source 1..20: mol_type = other DNA
cattgagcaagggagatcgc

SEQ ID NO: 4851 - DNA, 20 bp, synthetic construct
  source 1..20: mol_type = other DNA
ccgtcgggacgaacctaccc

SEQ ID NO: 4852 - DNA, 20 bp, synthetic construct
  source 1..20: mol_type = other DNA
ccctcccttcaatccgcccg

SEQ ID NO: 4853 - DNA, 20 bp, synthetic construct
  source 1..20: mol_type = other DNA
tcgccgcccgccctcctggg

SEQ ID NO: 4854 - DNA, 20 bp, synthetic construct
  source 1..20: mol_type = other DNA
gccgcgggcggattgaaggg

SEQ ID NO: 4855 - DNA, 20 bp, synthetic construct
  source 1..20: mol_type = other DNA
tcaatccgcccgcggcccgt

SEQ ID NO: 4856 - DNA, 20 bp, synthetic construct
  source 1..20: mol_type = other DNA
ctgggtaggttcgtcccgac

SEQ ID NO: 4857 - DNA, 20 bp, synthetic construct
  source 1..20: mol_type = other DNA
ccgcgggcggattgaaggga

SEQ ID NO: 4858 - DNA, 20 bp, synthetic construct
  source 1..20: mol_type = other DNA
cccgggcccagcggagccga

SEQ ID NO: 4859 - DNA, 20 bp, synthetic construct
  source 1..20: mol_type = other DNA
ccctgcccctcctcccagga

SEQ ID NO: 4860 - DNA, 20 bp, synthetic construct
  source 1..20: mol_type = other DNA
agccgagggcgggtggtgcg

SEQ ID NO: 4861 - DNA, 20 bp, synthetic construct
  source 1..20: mol_type = other DNA
acccccgcaccacccgccct

SEQ ID NO: 4862 - DNA, 20 bp, synthetic construct
  source 1..20: mol_type = other DNA
ggacccgccggggctgccgg

SEQ ID NO: 4863 - DNA, 20 bp, synthetic construct
  source 1..20: mol_type = other DNA
gcccgccctcctgggaggag

SEQ ID NO: 4864 - DNA, 20 bp, synthetic construct
  source 1..20: mol_type = other DNA
gaggggcaggggctggccgg

SEQ ID NO: 4865 - DNA, 20 bp, synthetic construct
  source 1..20: mol_type = other DNA
gaagggagggttgggcccgc

SEQ ID NO: 4866 - DNA, 20 bp, synthetic construct
  source 1..20: mol_type = other DNA
cgtgactaaggccttgggcg

SEQ ID NO: 4867 - DNA, 20 bp, synthetic construct
  source 1..20: mol_type = other DNA
gtggggccggcgggaagcgt

SEQ ID NO: 4868 - DNA, 20 bp, synthetic construct
  source 1..20: mol_type = other DNA
gctaccacctgccgcgccca

SEQ ID NO: 4869 - DNA, 20 bp, synthetic construct
  source 1..20: mol_type = other DNA
gtgacgtcatcaggcggcgc

SEQ ID NO: 4870 - DNA, 20 bp, synthetic construct
  source 1..20: mol_type = other DNA
ggatggagaggccagaaggg

SEQ ID NO: 4871 - DNA, 20 bp, synthetic construct
  source 1..20: mol_type = other DNA
aggccttagtcacgtgcacc

SEQ ID NO: 4872 - DNA, 20 bp, synthetic construct
  source 1..20: mol_type = other DNA
aggcgtgtgacgtcatcagg

SEQ ID NO: 4873 - DNA, 20 bp, synthetic construct
  source 1..20: mol_type = other DNA
gtgcacgtgactaaggcctt

SEQ ID NO: 4874 - DNA, 20 bp, synthetic construct
  source 1..20: mol_type = other DNA
ggtgcacgtgactaaggcct

SEQ ID NO: 4875 - DNA, 20 bp, synthetic construct
  source 1..20: mol_type = other DNA
tgtgacgtcatcaggcggcg

SEQ ID NO: 4876 - DNA, 20 bp, synthetic construct
  source 1..20: mol_type = other DNA
gatggagaggccagaagggc

SEQ ID NO: 4877 - DNA, 20 bp, synthetic construct
  source 1..20: mol_type = other DNA
gagaggccagaagggcggga

SEQ ID NO: 4878 - DNA, 20 bp, synthetic construct
  source 1..20: mol_type = other DNA
aggggatggagaggccagaa

SEQ ID NO: 4879 - DNA, 20 bp, synthetic construct
  source 1..20: mol_type = other DNA
aaggccttgggcgcggcagg

SEQ ID NO: 4880 - DNA, 20 bp, synthetic construct
  source 1..20: mol_type = other DNA
caggggatggagaggccaga

SEQ ID NO: 4881 - DNA, 20 bp, synthetic construct
  source 1..20: mol_type = other DNA
gctccgccccggacaccccg

SEQ ID NO: 4882 - DNA, 20 bp, synthetic construct
  source 1..20: mol_type = other DNA
ggaccaaccagcgcgcacag

SEQ ID NO: 4883 - DNA, 20 bp, synthetic construct
  source 1..20: mol_type = other DNA
gggcggagcaggactaagtg

SEQ ID NO: 4884 - DNA, 20 bp, synthetic construct
  source 1..20: mol_type = other DNA
cgctggcgcttataccgacc

SEQ ID NO: 4885 - DNA, 20 bp, synthetic construct
  source 1..20: mol_type = other DNA
cctggctcctgtaacgcgtg

SEQ ID NO: 4886 - DNA, 20 bp, synthetic construct
  source 1..20: mol_type = other DNA
gaggaccaaccagcgcgcac

SEQ ID NO: 4887 - DNA, 20 bp, synthetic construct
  source 1..20: mol_type = other DNA
acgcgttacaggagccaggt

SEQ ID NO: 4888 - DNA, 20 bp, synthetic construct
  source 1..20: mol_type = other DNA
ccaaccagcgcgcacagggg

SEQ ID NO: 4889 - DNA, 20 bp, synthetic construct
  source 1..20: mol_type = other DNA
cacttagtcctgctccgccc

SEQ ID NO: 4890 - DNA, 20 bp, synthetic construct
  source 1..20: mol_type = other DNA
ggggcggagcaggactaagt

SEQ ID NO: 4891 - DNA, 20 bp, synthetic construct
  source 1..20: mol_type = other DNA
aggaccaaccagcgcgcaca

SEQ ID NO: 4892 - DNA, 20 bp, synthetic construct
  source 1..20: mol_type = other DNA
cggggcggagcaggactaag

SEQ ID NO: 4893 - DNA, 20 bp, synthetic construct
  source 1..20: mol_type = other DNA
cggagcaggactaagtgggg

SEQ ID NO: 4894 - DNA, 20 bp, synthetic construct
  source 1..20: mol_type = other DNA
gcggggccgcggggtgtccg

SEQ ID NO: 4895 - DNA, 20 bp, synthetic construct
  source 1..20: mol_type = other DNA
ggccccgcccctgtgcgcgc

SEQ ID NO: 4896 - DNA, 20 bp, synthetic construct
  source 1..20: mol_type = other DNA
accgttgctaagctccccgg

SEQ ID NO: 4897 - DNA, 20 bp, synthetic construct
  source 1..20: mol_type = other DNA
tccctagagaaggagcaacg

SEQ ID NO: 4898 - DNA, 20 bp, synthetic construct
  source 1..20: mol_type = other DNA
tagcaacggttgctacggcc

SEQ ID NO: 4899 - DNA, 20 bp, synthetic construct
  source 1..20: mol_type = other DNA
acctctcctatccctagaga

SEQ ID NO: 4900 - DNA, 20 bp, synthetic construct
  source 1..20: mol_type = other DNA
gcaaccgttgctaagctccc

SEQ ID NO: 4901 - DNA, 20 bp, synthetic construct
  source 1..20: mol_type = other DNA
ggaaccgagctgtgaccctg

SEQ ID NO: 4902 - DNA, 20 bp, synthetic construct
  source 1..20: mol_type = other DNA
gttgctccttctctagggat

SEQ ID NO: 4903 - DNA, 20 bp, synthetic construct
  source 1..20: mol_type = other DNA
tccttctctagggataggag

SEQ ID NO: 4904 - DNA, 20 bp, synthetic construct
  source 1..20: mol_type = other DNA
accgagctgtgaccctgcgg

SEQ ID NO: 4905 - DNA, 20 bp, synthetic construct
  source 1..20: mol_type = other DNA
tatccctagagaaggagcaa

SEQ ID NO: 4906 - DNA, 20 bp, synthetic construct
  source 1..20: mol_type = other DNA
tgctaagctccccggagggc

SEQ ID NO: 4907 - DNA, 20 bp, synthetic construct
  source 1..20: mol_type = other DNA
ccgagctgtgaccctgcgga

SEQ ID NO: 4908 - DNA, 20 bp, synthetic construct
  source 1..20: mol_type = other DNA
tccccgttgctccttctcta

SEQ ID NO: 4909 - DNA, 20 bp, synthetic construct
  source 1..20: mol_type = other DNA
tcgcttcccggccctccgca

SEQ ID NO: 4910 - DNA, 20 bp, synthetic construct
  source 1..20: mol_type = other DNA
gttcctcccagcccgccctc

SEQ ID NO: 4911 - DNA, 20 bp, synthetic construct
  source 1..20: mol_type = other DNA
cgtgagcccgagcgcgtacc

SEQ ID NO: 4912 - DNA, 20 bp, synthetic construct
  source 1..20: mol_type = other DNA
tcgggctcacgcgccggcgt

SEQ ID NO: 4913 - DNA, 20 bp, synthetic construct
  source 1..20: mol_type = other DNA
gagcccgagcgcgtacccgg

SEQ ID NO: 4914 - DNA, 20 bp, synthetic construct
  source 1..20: mol_type = other DNA
acgcgctcgggctcacgcgc

SEQ ID NO: 4915 - DNA, 20 bp, synthetic construct
  source 1..20: mol_type = other DNA
ctccgcgcaggcgcactcgg

SEQ ID NO: 4916 - DNA, 20 bp, synthetic construct
  source 1..20: mol_type = other DNA
cgggaagggacccgagacct

SEQ ID NO: 4917 - DNA, 20 bp, synthetic construct
  source 1..20: mol_type = other DNA
ggtctcgggtcccttcccgc

SEQ ID NO: 4918 - DNA, 20 bp, synthetic construct
  source 1..20: mol_type = other DNA
gctccgccgggtacgcgctc

SEQ ID NO: 4919 - DNA, 20 bp, synthetic construct
  source 1..20: mol_type = other DNA
gagcagggcggagtccccgg

SEQ ID NO: 4920 - DNA, 20 bp, synthetic construct
  source 1..20: mol_type = other DNA
ggctgcgcctgcgccgacgc

SEQ ID NO: 4921 - DNA, 20 bp, synthetic construct
  source 1..20: mol_type = other DNA
ccctgctccgccccgcgcgg

SEQ ID NO: 4922 - DNA, 20 bp, synthetic construct
  source 1..20: mol_type = other DNA
gcggagcagggcggagtccc

SEQ ID NO: 4923 - DNA, 20 bp, synthetic construct
  source 1..20: mol_type = other DNA
ccgcgcggggcggagcaggg

SEQ ID NO: 4924 - DNA, 20 bp, synthetic construct
  source 1..20: mol_type = other DNA
gccctgctccgccccgcgcg

SEQ ID NO: 4925 - DNA, 20 bp, synthetic construct
  source 1..20: mol_type = other DNA
agcagggcggagtccccggc

SEQ ID NO: 4926 - DNA, 20 bp, synthetic construct
  source 1..20: mol_type = other DNA
atttcgtgttaaggatctag

SEQ ID NO: 4927 - DNA, 20 bp, synthetic construct
  source 1..20: mol_type = other DNA
cggaagcggaaatggacgag

SEQ ID NO: 4928 - DNA, 20 bp, synthetic construct
  source 1..20: mol_type = other DNA
cctctcttcgtatcccaaag

SEQ ID NO: 4929 - DNA, 20 bp, synthetic construct
  source 1..20: mol_type = other DNA
cggaaatggacgagaggtca

SEQ ID NO: 4930 - DNA, 20 bp, synthetic construct
  source 1..20: mol_type = other DNA
ccgctttgggatacgaagag

SEQ ID NO: 4931 - DNA, 20 bp, synthetic construct
  source 1..20: mol_type = other DNA
ttcctgccccaccactgcgg

SEQ ID NO: 4932 - DNA, 20 bp, synthetic construct
  source 1..20: mol_type = other DNA
tcgtgttaaggatctagggg

SEQ ID NO: 4933 - DNA, 20 bp, synthetic construct
  source 1..20: mol_type = other DNA
cgtagcgcccgccgccgcag

SEQ ID NO: 4934 - DNA, 20 bp, synthetic construct
  source 1..20: mol_type = other DNA
ccgttcctgccccaccactg

SEQ ID NO: 4935 - DNA, 20 bp, synthetic construct
  source 1..20: mol_type = other DNA
cgcccgccgccgcagtggtg

SEQ ID NO: 4936 - DNA, 20 bp, synthetic construct
  source 1..20: mol_type = other DNA
agcgcccgccgccgcagtgg

SEQ ID NO: 4937 - DNA, 20 bp, synthetic construct
  source 1..20: mol_type = other DNA
ggtgagagaaatgatgtgac

SEQ ID NO: 4938 - DNA, 20 bp, synthetic construct
  source 1..20: mol_type = other DNA
agtggtggggcaggaacggc

SEQ ID NO: 4939 - DNA, 20 bp, synthetic construct
  source 1..20: mol_type = other DNA
gtggtggggcaggaacggcg

SEQ ID NO: 4940 - DNA, 20 bp, synthetic construct
  source 1..20: mol_type = other DNA
cagtggtggggcaggaacgg

SEQ ID NO: 4941 - DNA, 20 bp, synthetic construct
  source 1..20: mol_type = other DNA
ccacggacgtctagaaatgg

SEQ ID NO: 4942 - DNA, 20 bp, synthetic construct
  source 1..20: mol_type = other DNA
ccgccatttctagacgtccg

SEQ ID NO: 4943 - DNA, 20 bp, synthetic construct
  source 1..20: mol_type = other DNA
agggacaggcgtcgtcagag

SEQ ID NO: 4944 - DNA, 20 bp, synthetic construct
  source 1..20: mol_type = other DNA
ttagattaatcaatcaacca

SEQ ID NO: 4945 - DNA, 20 bp, synthetic construct
  source 1..20: mol_type = other DNA
aagggacaggcgtcgtcaga

SEQ ID NO: 4946 - DNA, 20 bp, synthetic construct
  source 1..20: mol_type = other DNA
gtcccctgccagtcaaatgg

SEQ ID NO: 4947 - DNA, 20 bp, synthetic construct
  source 1..20: mol_type = other DNA
agtcccctgccagtcaaatg

SEQ ID NO: 4948 - DNA, 20 bp, synthetic construct
  source 1..20: mol_type = other DNA
cagaagggcccccatttgac

SEQ ID NO: 4949 - DNA, 20 bp, synthetic construct
  source 1..20: mol_type = other DNA
attgattaatctaatcatcg

SEQ ID NO: 4950 - DNA, 20 bp, synthetic construct
  source 1..20: mol_type = other DNA
gaaatggcggcatctcagaa

SEQ ID NO: 4951 - DNA, 20 bp, synthetic construct
  source 1..20: mol_type = other DNA
ggacaggcgtcgtcagaggg

SEQ ID NO: 4952 - DNA, 20 bp, synthetic construct
  source 1..20: mol_type = other DNA
ggcccccatttgactggcag

SEQ ID NO: 4953 - DNA, 20 bp, synthetic construct
  source 1..20: mol_type = other DNA
gggacaggcgtcgtcagagg

SEQ ID NO: 4954 - DNA, 20 bp, synthetic construct
  source 1..20: mol_type = other DNA
taagggacaggcgtcgtcag

SEQ ID NO: 4955 - DNA, 20 bp, synthetic construct
  source 1..20: mol_type = other DNA
cgggcctggctgggcttgcg

SEQ ID NO: 4956 - DNA, 20 bp, synthetic construct
  source 1..20: mol_type = other DNA
ggtgacgtcacggcgctcgt

SEQ ID NO: 4957 - DNA, 20 bp, synthetic construct
  source 1..20: mol_type = other DNA
tcggctcccgcaactcgcgg

SEQ ID NO: 4958 - DNA, 20 bp, synthetic construct
  source 1..20: mol_type = other DNA
ctcggctcccgcaactcgcg

SEQ ID NO: 4959 - DNA, 20 bp, synthetic construct
  source 1..20: mol_type = other DNA
ccctcggctcccgcaactcg

SEQ ID NO: 4960 - DNA, 20 bp, synthetic construct
  source 1..20: mol_type = other DNA
gccctgctgctaggccacgg

SEQ ID NO: 4961 - DNA, 20 bp, synthetic construct
  source 1..20: mol_type = other DNA
ccgtgacgtcaccagccggg

SEQ ID NO: 4962 - DNA, 20 bp, synthetic construct
  source 1..20: mol_type = other DNA
cccgtggcctagcagcaggg

SEQ ID NO: 4963 - DNA, 20 bp, synthetic construct
  source 1..20: mol_type = other DNA
ccccccgtggcctagcagca

SEQ ID NO: 4964 - DNA, 20 bp, synthetic construct
  source 1..20: mol_type = other DNA
tgggagtggctggctggtag

SEQ ID NO: 4965 - DNA, 20 bp, synthetic construct
  source 1..20: mol_type = other DNA
agccactcccacccagccct

SEQ ID NO: 4966 - DNA, 20 bp, synthetic construct
  source 1..20: mol_type = other DNA
gcgctcgtcggcgccgcctg

SEQ ID NO: 4967 - DNA, 20 bp, synthetic construct
  source 1..20: mol_type = other DNA
ccgcgagttgcgggagccga

SEQ ID NO: 4968 - DNA, 20 bp, synthetic construct
  source 1..20: mol_type = other DNA
cgtgacgtcaccagccgggc

SEQ ID NO: 4969 - DNA, 20 bp, synthetic construct
  source 1..20: mol_type = other DNA
gcgggagccgagggctgggt

SEQ ID NO: 4970 - DNA, 20 bp, synthetic construct
  source 1..20: mol_type = other DNA
tgcgggagccgagggctggg

SEQ ID NO: 4971 - DNA, 20 bp, synthetic construct
  source 1..20: mol_type = other DNA
gctgaacttggcgctcgatg

SEQ ID NO: 4972 - DNA, 20 bp, synthetic construct
  source 1..20: mol_type = other DNA
acaacgcagtgcatctcggg

SEQ ID NO: 4973 - DNA, 20 bp, synthetic construct
  source 1..20: mol_type = other DNA
gttagccgccctagagcgcg

SEQ ID NO: 4974 - DNA, 20 bp, synthetic construct
  source 1..20: mol_type = other DNA
ctgaacttggcgctcgatgg

SEQ ID NO: 4975 - DNA, 20 bp, synthetic construct
  source 1..20: mol_type = other DNA
cgaaggccggggatcatggc

SEQ ID NO: 4976 - DNA, 20 bp, synthetic construct
  source 1..20: mol_type = other DNA
actcgactggactgggtgag

SEQ ID NO: 4977 - DNA, 20 bp, synthetic construct
  source 1..20: mol_type = other DNA
gaggacagaggtggctcgat

SEQ ID NO: 4978 - DNA, 20 bp, synthetic construct
  source 1..20: mol_type = other DNA
tggactgggtgagaggacag

SEQ ID NO: 4979 - DNA, 20 bp, synthetic construct
  source 1..20: mol_type = other DNA
gacagaggtggctcgatggg

SEQ ID NO: 4980 - DNA, 20 bp, synthetic construct
  source 1..20: mol_type = other DNA
agaggacagaggtggctcga

SEQ ID NO: 4981 - DNA, 20 bp, synthetic construct
  source 1..20: mol_type = other DNA
ccgaaggccggggatcatgg

SEQ ID NO: 4982 - DNA, 20 bp, synthetic construct
  source 1..20: mol_type = other DNA
gtagtccagctacgcctctg

SEQ ID NO: 4983 - DNA, 20 bp, synthetic construct
  source 1..20: mol_type = other DNA
tggctcgatgggcggcccga

SEQ ID NO: 4984 - DNA, 20 bp, synthetic construct
  source 1..20: mol_type = other DNA
actgggtgagaggacagagg

SEQ ID NO: 4985 - DNA, 20 bp, synthetic construct
  source 1..20: mol_type = other DNA
actacaacgcagtgcatctc

SEQ ID NO: 4986 - DNA, 20 bp, synthetic construct
  source 1..20: mol_type = other DNA
tggcgcacgcgcctcagcgt

SEQ ID NO: 4987 - DNA, 20 bp, synthetic construct
  source 1..20: mol_type = other DNA
aacgaatgacaccgacgctg

SEQ ID NO: 4988 - DNA, 20 bp, synthetic construct
  source 1..20: mol_type = other DNA
ccgttgcgcccgactttgcg

SEQ ID NO: 4989 - DNA, 20 bp, synthetic construct
  source 1..20: mol_type = other DNA
acagctagagggctctgcta

SEQ ID NO: 4990 - DNA, 20 bp, synthetic construct
  source 1..20: mol_type = other DNA
ttgcgcccgactttgcgcgg

SEQ ID NO: 4991 - DNA, 20 bp, synthetic construct
  source 1..20: mol_type = other DNA
tcagcgtcggtgtcattcgt

SEQ ID NO: 4992 - DNA, 20 bp, synthetic construct
  source 1..20: mol_type = other DNA
tcctacctccgcgcaaagtc

SEQ ID NO: 4993 - DNA, 20 bp, synthetic construct
  source 1..20: mol_type = other DNA
cgccagccctccgcatgcgc

SEQ ID NO: 4994 - DNA, 20 bp, synthetic construct
  source 1..20: mol_type = other DNA
gcggacgcctggtgttctcg

SEQ ID NO: 4995 - DNA, 20 bp, synthetic construct
  source 1..20: mol_type = other DNA
ctttgcgcggaggtaggagg

SEQ ID NO: 4996 - DNA, 20 bp, synthetic construct
  source 1..20: mol_type = other DNA
gcgtccgcctgcgcatgcgg

SEQ ID NO: 4997 - DNA, 20 bp, synthetic construct
  source 1..20: mol_type = other DNA
actttgcgcggaggtaggag

SEQ ID NO: 4998 - DNA, 20 bp, synthetic construct
  source 1..20: mol_type = other DNA
caggcgtccgcctgcgcatg

SEQ ID NO: 4999 - DNA, 20 bp, synthetic construct
  source 1..20: mol_type = other DNA
cagccctccgcatgcgcagg

SEQ ID NO: 5000 - DNA, 20 bp, synthetic construct
  source 1..20: mol_type = other DNA
cgtccgcctgcgcatgcgga

SEQ ID NO: 5001 - DNA, 20 bp, synthetic construct
  source 1..20: mol_type = other DNA
ggaactgtcctactgagaga

SEQ ID NO: 5002 - DNA, 20 bp, synthetic construct
  source 1..20: mol_type = other DNA
tggtctttagctgacagaag

SEQ ID NO: 5003 - DNA, 20 bp, synthetic construct
  source 1..20: mol_type = other DNA
gtcctactgagagagggcaa

SEQ ID NO: 5004 - DNA, 20 bp, synthetic construct
  source 1..20: mol_type = other DNA
gcagataaaaatcaattccc

SEQ ID NO: 5005 - DNA, 20 bp, synthetic construct
  source 1..20: mol_type = other DNA
gacagaagaggtgaagagaa

SEQ ID NO: 5006 - DNA, 20 bp, synthetic construct
  source 1..20: mol_type = other DNA
aggaactgtcctactgagag

SEQ ID NO: 5007 - DNA, 20 bp, synthetic construct
  source 1..20: mol_type = other DNA
aattccctggcagggcgcgg

SEQ ID NO: 5008 - DNA, 20 bp, synthetic construct
  source 1..20: mol_type = other DNA
tgccattgccctctctcagt

SEQ ID NO: 5009 - DNA, 20 bp, synthetic construct
  source 1..20: mol_type = other DNA
tcactgcatctctgcctccc

SEQ ID NO: 5010 - DNA, 20 bp, synthetic construct
  source 1..20: mol_type = other DNA
taaaaatcaattccctggca

SEQ ID NO: 5011 - DNA, 20 bp, synthetic construct
  source 1..20: mol_type = other DNA
atcaattccctggcagggcg

SEQ ID NO: 5012 - DNA, 20 bp, synthetic construct
  source 1..20: mol_type = other DNA
ataaaaatcaattccctggc

SEQ ID NO: 5013 - DNA, 20 bp, synthetic construct
  source 1..20: mol_type = other DNA
ctcactgcatctctgcctcc

SEQ ID NO: 5014 - DNA, 20 bp, synthetic construct
  source 1..20: mol_type = other DNA
accaccacccaacactgcgg

SEQ ID NO: 5015 - DNA, 20 bp, synthetic construct
  source 1..20: mol_type = other DNA
tccctagctctcgcaagccc

SEQ ID NO: 5016 - DNA, 20 bp, synthetic construct
  source 1..20: mol_type = other DNA
cgtaccaccacccaacactg

SEQ ID NO: 5017 - DNA, 20 bp, synthetic construct
  source 1..20: mol_type = other DNA
caccacccaacactgcggtg

SEQ ID NO: 5018 - DNA, 20 bp, synthetic construct
  source 1..20: mol_type = other DNA
gtccgagtcctacaactccg

SEQ ID NO: 5019 - DNA, 20 bp, synthetic construct
  source 1..20: mol_type = other DNA
ccaccacccaacactgcggt

SEQ ID NO: 5020 - DNA, 20 bp, synthetic construct
  source 1..20: mol_type = other DNA
ttgggtggtggtacggctca

SEQ ID NO: 5021 - DNA, 20 bp, synthetic construct
  source 1..20: mol_type = other DNA
tcctgggcttgcgagagcta

SEQ ID NO: 5022 - DNA, 20 bp, synthetic construct
  source 1..20: mol_type = other DNA
tacaactccgaggtctgact

SEQ ID NO: 5023 - DNA, 20 bp, synthetic construct
  source 1..20: mol_type = other DNA
gaggtctgactgggaagcag

SEQ ID NO: 5024 - DNA, 20 bp, synthetic construct
  source 1..20: mol_type = other DNA
gacctcggagttgtaggact

SEQ ID NO: 5025 - DNA, 20 bp, synthetic construct
  source 1..20: mol_type = other DNA
cgagcgcgtcctgcaccgcg

SEQ ID NO: 5026 - DNA, 20 bp, synthetic construct
  source 1..20: mol_type = other DNA
tgggcttgcgagagctaggg

SEQ ID NO: 5027 - DNA, 20 bp, synthetic construct
  source 1..20: mol_type = other DNA
aggactcggactgtgttcct

SEQ ID NO: 5028 - DNA, 20 bp, synthetic construct
  source 1..20: mol_type = other DNA
gggaggcccggctctcctcg

SEQ ID NO: 5029 - DNA, 20 bp, synthetic construct
  source 1..20: mol_type = other DNA
agttacgtaaccctgtggct

SEQ ID NO: 5030 - DNA, 20 bp, synthetic construct
  source 1..20: mol_type = other DNA
agcccagttacgtaaccctg

SEQ ID NO: 5031 - DNA, 20 bp, synthetic construct
  source 1..20: mol_type = other DNA
gaatagccccaggaggactg

SEQ ID NO: 5032 - DNA, 20 bp, synthetic construct
  source 1..20: mol_type = other DNA
cagttacgtaaccctgtggc

SEQ ID NO: 5033 - DNA, 20 bp, synthetic construct
  source 1..20: mol_type = other DNA
ccagcagaaaggctgaagta

SEQ ID NO: 5034 - DNA, 20 bp, synthetic construct
  source 1..20: mol_type = other DNA
tctgctgggcgtagctgagt

SEQ ID NO: 5035 - DNA, 20 bp, synthetic construct
  source 1..20: mol_type = other DNA
cagcagaaaggctgaagtag

SEQ ID NO: 5036 - DNA, 20 bp, synthetic construct
  source 1..20: mol_type = other DNA
agaaaggctgaagtaggggt

SEQ ID NO: 5037 - DNA, 20 bp, synthetic construct
  source 1..20: mol_type = other DNA
tgggcgtagctgagtgggga

SEQ ID NO: 5038 - DNA, 20 bp, synthetic construct
  source 1..20: mol_type = other DNA
gcctcccgggtcccagccac

SEQ ID NO: 5039 - DNA, 20 bp, synthetic construct
  source 1..20: mol_type = other DNA
acagggttacgtaactgggc

SEQ ID NO: 5040 - DNA, 20 bp, synthetic construct
  source 1..20: mol_type = other DNA
ctgctgggcgtagctgagtg

SEQ ID NO: 5041 - DNA, 20 bp, synthetic construct
  source 1..20: mol_type = other DNA
taaccctgtggctgggaccc

SEQ ID NO: 5042 - DNA, 20 bp, synthetic construct
  source 1..20: mol_type = other DNA
ctgggcgtagctgagtgggg

SEQ ID NO: 5043 - DNA, 20 bp, synthetic construct
  source 1..20: mol_type = other DNA
gtaaccctgtggctgggacc

SEQ ID NO: 5044 - DNA, 20 bp, synthetic construct
  source 1..20: mol_type = other DNA
tgtgaacctgagcgacgctg

SEQ ID NO: 5045 - DNA, 20 bp, synthetic construct
  source 1..20: mol_type = other DNA
gacgctgcggagagtcccta

SEQ ID NO: 5046 - DNA, 20 bp, synthetic construct
  source 1..20: mol_type = other DNA
aggttcacagaacacgccca

SEQ ID NO: 5047 - DNA, 20 bp, synthetic construct
  source 1..20: mol_type = other DNA
ggcgtgtccagctgtcgtcg

SEQ ID NO: 5048 - DNA, 20 bp, synthetic construct
  source 1..20: mol_type = other DNA
ggttcacagaacacgcccag

SEQ ID NO: 5049 - DNA, 20 bp, synthetic construct
  source 1..20: mol_type = other DNA
caggttcacagaacacgccc

SEQ ID NO: 5050 - DNA, 20 bp, synthetic construct
  source 1..20: mol_type = other DNA
acgacagctggacacgcccc

SEQ ID NO: 5051 - DNA, 20 bp, synthetic construct
  source 1..20: mol_type = other DNA
gggagagcccacctccccgg

SEQ ID NO: 5052 - DNA, 20 bp, synthetic construct
  source 1..20: mol_type = other DNA
ggggcgtgtccagctgtcgt

SEQ ID NO: 5053 - DNA, 20 bp, synthetic construct
  source 1..20: mol_type = other DNA
ccccttagccacaccccccg

SEQ ID NO: 5054 - DNA, 20 bp, synthetic construct
  source 1..20: mol_type = other DNA
gccccttagccacacccccc

SEQ ID NO: 5055 - DNA, 20 bp, synthetic construct
  source 1..20: mol_type = other DNA
ggagagcccacctccccggg

SEQ ID NO: 5056 - DNA, 20 bp, synthetic construct
  source 1..20: mol_type = other DNA
gccacaccccccggggaggt

SEQ ID NO: 5057 - DNA, 20 bp, synthetic construct
  source 1..20: mol_type = other DNA
cttagccacaccccccgggg

SEQ ID NO: 5058 - DNA, 20 bp, synthetic construct
  source 1..20: mol_type = other DNA
cgccccttagccacaccccc

SEQ ID NO: 5059 - DNA, 20 bp, synthetic construct
  source 1..20: mol_type = other DNA
tatgtatattgcaatatctc

SEQ ID NO: 5060 - DNA, 20 bp, synthetic construct
  source 1..20: mol_type = other DNA
tatagttctacagtaaatga

SEQ ID NO: 5061 - DNA, 20 bp, synthetic construct
  source 1..20: mol_type = other DNA
atgtgcccactgacagcatg

SEQ ID NO: 5062 - DNA, 20 bp, synthetic construct
  source 1..20: mol_type = other DNA
ctgtcagtgggcacatggag

SEQ ID NO: 5063 - DNA, 20 bp, synthetic construct
  source 1..20: mol_type = other DNA
tccatcaaaaaactaaatcc

SEQ ID NO: 5064 - DNA, 20 bp, synthetic construct
  source 1..20: mol_type = other DNA
tggtcatagaatctaattac

SEQ ID NO: 5065 - DNA, 20 bp, synthetic construct
  source 1..20: mol_type = other DNA
tcatgctgtcagtgggcaca

SEQ ID NO: 5066 - DNA, 20 bp, synthetic construct
  source 1..20: mol_type = other DNA
acacctcctcatgctgtcag

SEQ ID NO: 5067 - DNA, 20 bp, synthetic construct
  source 1..20: mol_type = other DNA
cacacatacacttgaagcaa

SEQ ID NO: 5068 - DNA, 20 bp, synthetic construct
  source 1..20: mol_type = other DNA
gcttcaagtgtatgtgtgcc

SEQ ID NO: 5069 - DNA, 20 bp, synthetic construct
  source 1..20: mol_type = other DNA
cacctcctcatgctgtcagt

SEQ ID NO: 5070 - DNA, 20 bp, synthetic construct
  source 1..20: mol_type = other DNA
aagcatttgagttattctat

SEQ ID NO: 5071 - DNA, 20 bp, synthetic construct
  source 1..20: mol_type = other DNA
agtaaatgaaggctttgttt

SEQ ID NO: 5072 - DNA, 20 bp, synthetic construct
  source 1..20: mol_type = other DNA
actcaaatgctttgttaaaa

SEQ ID NO: 5073 - DNA, 20 bp, synthetic construct
  source 1..20: mol_type = other DNA
gggctacgcgactcttacca

SEQ ID NO: 5074 - DNA, 20 bp, synthetic construct
  source 1..20: mol_type = other DNA
aagtagatcccaccattacc

SEQ ID NO: 5075 - DNA, 20 bp, synthetic construct
  source 1..20: mol_type = other DNA
gatcacaggtcacgccccgg

SEQ ID NO: 5076 - DNA, 20 bp, synthetic construct
  source 1..20: mol_type = other DNA
gtcacgccctagaggaggtg

SEQ ID NO: 5077 - DNA, 20 bp, synthetic construct
  source 1..20: mol_type = other DNA
ggtcacgccctagaggaggt

SEQ ID NO: 5078 - DNA, 20 bp, synthetic construct
  source 1..20: mol_type = other DNA
ccgtgaccccacctcctcta

SEQ ID NO: 5079 - DNA, 20 bp, synthetic construct
  source 1..20: mol_type = other DNA
tgggacccccacctcccccg

SEQ ID NO: 5080 - DNA, 20 bp, synthetic construct
  source 1..20: mol_type = other DNA
aggatcacaggtcacgcccc

SEQ ID NO: 5081 - DNA, 20 bp, synthetic construct
  source 1..20: mol_type = other DNA
aaggatcacaggtcacgccc

SEQ ID NO: 5082 - DNA, 20 bp, synthetic construct
  source 1..20: mol_type = other DNA
agggggtcacgccctagagg

SEQ ID NO: 5083 - DNA, 20 bp, synthetic construct
  source 1..20: mol_type = other DNA
ggatcacaggtcacgccccg

SEQ ID NO: 5084 - DNA, 20 bp, synthetic construct
  source 1..20: mol_type = other DNA
gggtcacgccctagaggagg

SEQ ID NO: 5085 - DNA, 20 bp, synthetic construct
  source 1..20: mol_type = other DNA
ctgggacccccacctccccc

SEQ ID NO: 5086 - DNA, 20 bp, synthetic construct
  source 1..20: mol_type = other DNA
ggtcacgggtcaaggatcac

SEQ ID NO: 5087 - DNA, 20 bp, synthetic construct
  source 1..20: mol_type = other DNA
actgggacccccacctcccc

SEQ ID NO: 5088 - DNA, 20 bp, synthetic construct
  source 1..20: mol_type = other DNA
agggagagaccccagcaagg

SEQ ID NO: 5089 - DNA, 20 bp, synthetic construct
  source 1..20: mol_type = other DNA
gagtcaccacctccttgctg

SEQ ID NO: 5090 - DNA, 20 bp, synthetic construct
  source 1..20: mol_type = other DNA
gagctgctgccggttctgga

SEQ ID NO: 5091 - DNA, 20 bp, synthetic construct
  source 1..20: mol_type = other DNA
ccagccagagtgagagcgga

SEQ ID NO: 5092 - DNA, 20 bp, synthetic construct
  source 1..20: mol_type = other DNA
gagagaccccagcaaggagg

SEQ ID NO: 5093 - DNA, 20 bp, synthetic construct
  source 1..20: mol_type = other DNA
gctcccagccagagtgagag

SEQ ID NO: 5094 - DNA, 20 bp, synthetic construct
  source 1..20: mol_type = other DNA
cccagccagagtgagagcgg

SEQ ID NO: 5095 - DNA, 20 bp, synthetic construct
  source 1..20: mol_type = other DNA
ggggtctctccctccagaac

SEQ ID NO: 5096 - DNA, 20 bp, synthetic construct
  source 1..20: mol_type = other DNA
agcaaggaggtggtgactca

SEQ ID NO: 5097 - DNA, 20 bp, synthetic construct
  source 1..20: mol_type = other DNA
ggagctgctgccggttctgg

SEQ ID NO: 5098 - DNA, 20 bp, synthetic construct
  source 1..20: mol_type = other DNA
tgagtcaccacctccttgct

SEQ ID NO: 5099 - DNA, 20 bp, synthetic construct
  source 1..20: mol_type = other DNA
gtgagagcggagggcaagga

SEQ ID NO: 5100 - DNA, 20 bp, synthetic construct
  source 1..20: mol_type = other DNA
tgagagcggagggcaaggag

SEQ ID NO: 5101 - DNA, 20 bp, synthetic construct
  source 1..20: mol_type = other DNA
agtgagagcggagggcaagg

SEQ ID NO: 5102 - DNA, 20 bp, synthetic construct
  source 1..20: mol_type = other DNA
ggggcggggcgggaggagag

SEQ ID NO: 5103 - DNA, 20 bp, synthetic construct
  source 1..20: mol_type = other DNA
gaaccggaagaatccgatgg

SEQ ID NO: 5104 - DNA, 20 bp, synthetic construct
  source 1..20: mol_type = other DNA
gcagaaccggaagaatccga

SEQ ID NO: 5105 - DNA, 20 bp, synthetic construct
  source 1..20: mol_type = other DNA
gcgccacacaggttaatacc

SEQ ID NO: 5106 - DNA, 20 bp, synthetic construct
  source 1..20: mol_type = other DNA
gggtattaacctgtgtggcg

SEQ ID NO: 5107 - DNA, 20 bp, synthetic construct
  source 1..20: mol_type = other DNA
gtattaacctgtgtggcgcg

SEQ ID NO: 5108 - DNA, 20 bp, synthetic construct
  source 1..20: mol_type = other DNA
ggattcttccggttctgcgg

SEQ ID NO: 5109 - DNA, 20 bp, synthetic construct
  source 1..20: mol_type = other DNA
gttaagggaaggagacccga

SEQ ID NO: 5110 - DNA, 20 bp, synthetic construct
  source 1..20: mol_type = other DNA
ggataaagggaagacggttg

SEQ ID NO: 5111 - DNA, 20 bp, synthetic construct
  source 1..20: mol_type = other DNA
tggccctcgccagccaccat

SEQ ID NO: 5112 - DNA, 20 bp, synthetic construct
  source 1..20: mol_type = other DNA
tattaacctgtgtggcgcgg

SEQ ID NO: 5113 - DNA, 20 bp, synthetic construct
  source 1..20: mol_type = other DNA
aatccgatggtggctggcga

SEQ ID NO: 5114 - DNA, 20 bp, synthetic construct
  source 1..20: mol_type = other DNA
gttccgggtattaacctgtg

SEQ ID NO: 5115 - DNA, 20 bp, synthetic construct
  source 1..20: mol_type = other DNA
cctcagcccccgcgccacac

SEQ ID NO: 5116 - DNA, 20 bp, synthetic construct
  source 1..20: mol_type = other DNA
gaatccgatggtggctggcg

SEQ ID NO: 5117 - DNA, 20 bp, synthetic construct
  source 1..20: mol_type = other DNA
tgcggaggataaagggaaga

SEQ ID NO: 5118 - DNA, 20 bp, synthetic construct
  source 1..20: mol_type = other DNA
attagatgcctaatacgtgc

SEQ ID NO: 5119 - DNA, 20 bp, synthetic construct
  source 1..20: mol_type = other DNA
gactacagtcacagctctga

SEQ ID NO: 5120 - DNA, 20 bp, synthetic construct
  source 1..20: mol_type = other DNA
tgatcttatataatgtcagg

SEQ ID NO: 5121 - DNA, 20 bp, synthetic construct
  source 1..20: mol_type = other DNA
ggtttctccactagaaagca

SEQ ID NO: 5122 - DNA, 20 bp, synthetic construct
  source 1..20: mol_type = other DNA
tatataatgtcaggtggtgt

SEQ ID NO: 5123 - DNA, 20 bp, synthetic construct
  source 1..20: mol_type = other DNA
tgactacagtcacagctctg

SEQ ID NO: 5124 - DNA, 20 bp, synthetic construct
  source 1..20: mol_type = other DNA
ggacattgatctggccactg

SEQ ID NO: 5125 - DNA, 20 bp, synthetic construct
  source 1..20: mol_type = other DNA
tgatgatcttatataatgtc

SEQ ID NO: 5126 - DNA, 20 bp, synthetic construct
  source 1..20: mol_type = other DNA
gagctgtgactgtagtcagc

SEQ ID NO: 5127 - DNA, 20 bp, synthetic construct
  source 1..20: mol_type = other DNA
ttagaaggaacaaaatcagg

SEQ ID NO: 5128 - DNA, 20 bp, synthetic construct
  source 1..20: mol_type = other DNA
agggcaagcttcacagtata

SEQ ID NO: 5129 - DNA, 20 bp, synthetic construct
  source 1..20: mol_type = other DNA
gggcaagcttcacagtataa

SEQ ID NO: 5130 - DNA, 20 bp, synthetic construct
  source 1..20: mol_type = other DNA
tcacagaccctgctttctag

SEQ ID NO: 5131 - DNA, 20 bp, synthetic construct
  source 1..20: mol_type = other DNA
atacgtgctggacattgatc

SEQ ID NO: 5132 - DNA, 20 bp, synthetic construct
  source 1..20: mol_type = other DNA
aatcaggtggcttatgggct

SEQ ID NO: 5133 - DNA, 20 bp, synthetic construct
  source 1..20: mol_type = other DNA
tccctctgcgcaatggaccc

SEQ ID NO: 5134 - DNA, 20 bp, synthetic construct
  source 1..20: mol_type = other DNA
gcctgggcgcccttaacggg

SEQ ID NO: 5135 - DNA, 20 bp, synthetic construct
  source 1..20: mol_type = other DNA
aggccgtctgtgaaaatgcg

SEQ ID NO: 5136 - DNA, 20 bp, synthetic construct
  source 1..20: mol_type = other DNA
atccctctgcgcaatggacc

SEQ ID NO: 5137 - DNA, 20 bp, synthetic construct
  source 1..20: mol_type = other DNA
tcccgggtccattgcgcaga

SEQ ID NO: 5138 - DNA, 20 bp, synthetic construct
  source 1..20: mol_type = other DNA
atccccccttccatcccctg

SEQ ID NO: 5139 - DNA, 20 bp, synthetic construct
  source 1..20: mol_type = other DNA
ggtgtgaaggcggagccact

SEQ ID NO: 5140 - DNA, 20 bp, synthetic construct
  source 1..20: mol_type = other DNA
taacgggaggcagctttccc

SEQ ID NO: 5141 - DNA, 20 bp, synthetic construct
  source 1..20: mol_type = other DNA
gtgtccgcaggggatggaag

SEQ ID NO: 5142 - DNA, 20 bp, synthetic construct
  source 1..20: mol_type = other DNA
tctgtgaaaatgcgaggatc

SEQ ID NO: 5143 - DNA, 20 bp, synthetic construct
  source 1..20: mol_type = other DNA
agaagtaaggggtgtgaagg

SEQ ID NO: 5144 - DNA, 20 bp, synthetic construct
  source 1..20: mol_type = other DNA
ggcctaatccctctgcgcaa

SEQ ID NO: 5145 - DNA, 20 bp, synthetic construct
  source 1..20: mol_type = other DNA
gggagaagtaaggggtgtga

SEQ ID NO: 5146 - DNA, 20 bp, synthetic construct
  source 1..20: mol_type = other DNA
tcaaagcgccctccctgccc

SEQ ID NO: 5147 - DNA, 20 bp, synthetic construct
  source 1..20: mol_type = other DNA
ttcccgggtccattgcgcag

SEQ ID NO: 5148 - DNA, 20 bp, synthetic construct
  source 1..20: mol_type = other DNA
tgggcctcgtggatatgcat

SEQ ID NO: 5149 - DNA, 20 bp, synthetic construct
  source 1..20: mol_type = other DNA
agtctggatgagatcagctg

SEQ ID NO: 5150 - DNA, 20 bp, synthetic construct
  source 1..20: mol_type = other DNA
taagcccatgcatatccacg

SEQ ID NO: 5151 - DNA, 20 bp, synthetic construct
  source 1..20: mol_type = other DNA
acacagaaggggccttgcgg

SEQ ID NO: 5152 - DNA, 20 bp, synthetic construct
  source 1..20: mol_type = other DNA
acaagaatatcaatgaacag

SEQ ID NO: 5153 - DNA, 20 bp, synthetic construct
  source 1..20: mol_type = other DNA
tcagtcaagtgtacacagaa

SEQ ID NO: 5154 - DNA, 20 bp, synthetic construct
  source 1..20: mol_type = other DNA
gaatatcaatgaacagagga

SEQ ID NO: 5155 - DNA, 20 bp, synthetic construct
  source 1..20: mol_type = other DNA
agaatatcaatgaacagagg

SEQ ID NO: 5156 - DNA, 20 bp, synthetic construct
  source 1..20: mol_type = other DNA
atgggcctcgtggatatgca

SEQ ID NO: 5157 - DNA, 20 bp, synthetic construct
  source 1..20: mol_type = other DNA
cagtcaagtgtacacagaag

SEQ ID NO: 5158 - DNA, 20 bp, synthetic construct
  source 1..20: mol_type = other DNA
tacacagaaggggccttgcg

SEQ ID NO: 5159 - DNA, 20 bp, synthetic construct
  source 1..20: mol_type = other DNA
ttcagtcaagtgtacacaga

SEQ ID NO: 5160 - DNA, 20 bp, synthetic construct
  source 1..20: mol_type = other DNA
ccctgaccccagcccccgca

SEQ ID NO: 5161 - DNA, 20 bp, synthetic construct
  source 1..20: mol_type = other DNA
tcagctatgaggagctggag

SEQ ID NO: 5162 - DNA, 20 bp, synthetic construct
  source 1..20: mol_type = other DNA
tgtacacagaaggggccttg

SEQ ID NO: 5163 - DNA, 20 bp, synthetic construct
  source 1..20: mol_type = other DNA
gccgagtctgcgtatggccg

SEQ ID NO: 5164 - DNA, 20 bp, synthetic construct
  source 1..20: mol_type = other DNA
aggcgctccctgcgcagggt

SEQ ID NO: 5165 - DNA, 20 bp, synthetic construct
  source 1..20: mol_type = other DNA
ccctcgccctgcgtcgccgc

SEQ ID NO: 5166 - DNA, 20 bp, synthetic construct
  source 1..20: mol_type = other DNA
tacgaggcgctccctgcgca

SEQ ID NO: 5167 - DNA, 20 bp, synthetic construct
  source 1..20: mol_type = other DNA
caggaccgaagctcgccggg

SEQ ID NO: 5168 - DNA, 20 bp, synthetic construct
  source 1..20: mol_type = other DNA
gcagggagcgcctcgtaccc

SEQ ID NO: 5169 - DNA, 20 bp, synthetic construct
  source 1..20: mol_type = other DNA
gaggcgctccctgcgcaggg

SEQ ID NO: 5170 - DNA, 20 bp, synthetic construct
  source 1..20: mol_type = other DNA
ggggtgggagcggcagccga

SEQ ID NO: 5171 - DNA, 20 bp, synthetic construct
  source 1..20: mol_type = other DNA
tcgccgggaggctgcgcgga

SEQ ID NO: 5172 - DNA, 20 bp, synthetic construct
  source 1..20: mol_type = other DNA
tgggcaggaccgaagctcgc

SEQ ID NO: 5173 - DNA, 20 bp, synthetic construct
  source 1..20: mol_type = other DNA
ggctgccgctcccacccccg

SEQ ID NO: 5174 - DNA, 20 bp, synthetic construct
  source 1..20: mol_type = other DNA
ctcgccgggaggctgcgcgg

SEQ ID NO: 5175 - DNA, 20 bp, synthetic construct
  source 1..20: mol_type = other DNA
aagctcgccgggaggctgcg

SEQ ID NO: 5176 - DNA, 20 bp, synthetic construct
  source 1..20: mol_type = other DNA
ctgccgctcccacccccgcg

SEQ ID NO: 5177 - DNA, 20 bp, synthetic construct
  source 1..20: mol_type = other DNA
gctgccgctcccacccccgc

SEQ ID NO: 5178 - DNA, 20 bp, synthetic construct
  source 1..20: mol_type = other DNA
ggacaagaggcgcggattgg

SEQ ID NO: 5179 - DNA, 20 bp, synthetic construct
  source 1..20: mol_type = other DNA
gagaaggaccaagcccaaag

SEQ ID NO: 5180 - DNA, 20 bp, synthetic construct
  source 1..20: mol_type = other DNA
accaggcgacgctttccgaa

SEQ ID NO: 5181 - DNA, 20 bp, synthetic construct
  source 1..20: mol_type = other DNA
gtcgcctggtatccagctgc

SEQ ID NO: 5182 - DNA, 20 bp, synthetic construct
  source 1..20: mol_type = other DNA
gtgagaaggaccaagcccaa

SEQ ID NO: 5183 - DNA, 20 bp, synthetic construct
  source 1..20: mol_type = other DNA
cagcgattggctgagcaagt

SEQ ID NO: 5184 - DNA, 20 bp, synthetic construct
  source 1..20: mol_type = other DNA
ggcgacgctttccgaagggc

SEQ ID NO: 5185 - DNA, 20 bp, synthetic construct
  source 1..20: mol_type = other DNA
aggcgacgctttccgaaggg

SEQ ID NO: 5186 - DNA, 20 bp, synthetic construct
  source 1..20: mol_type = other DNA
ccagcgattggctgagcaag

SEQ ID NO: 5187 - DNA, 20 bp, synthetic construct
  source 1..20: mol_type = other DNA
gcgggacaagaggcgcggat

SEQ ID NO: 5188 - DNA, 20 bp, synthetic construct
  source 1..20: mol_type = other DNA
gattggctgagcaagtggga

SEQ ID NO: 5189 - DNA, 20 bp, synthetic construct
  source 1..20: mol_type = other DNA
taccaggcgacgctttccga

SEQ ID NO: 5190 - DNA, 20 bp, synthetic construct
  source 1..20: mol_type = other DNA
gggcgggattggcggactcg

SEQ ID NO: 5191 - DNA, 20 bp, synthetic construct
  source 1..20: mol_type = other DNA
ttggcggactcgcgggcagg

SEQ ID NO: 5192 - DNA, 20 bp, synthetic construct
  source 1..20: mol_type = other DNA
agggggcgggacaagaggcg

SEQ ID NO: 5193 - DNA, 20 bp, synthetic construct
  source 1..20: mol_type = other DNA
gaacagaaggagttaacgct

SEQ ID NO: 5194 - DNA, 20 bp, synthetic construct
  source 1..20: mol_type = other DNA
aggcggagtaaagatcagga

SEQ ID NO: 5195 - DNA, 20 bp, synthetic construct
  source 1..20: mol_type = other DNA
ccacaggcggagtaaagatc

SEQ ID NO: 5196 - DNA, 20 bp, synthetic construct
  source 1..20: mol_type = other DNA
agaacagaaggagttaacgc

SEQ ID NO: 5197 - DNA, 20 bp, synthetic construct
  source 1..20: mol_type = other DNA
ttaactccttctgttcttgg

SEQ ID NO: 5198 - DNA, 20 bp, synthetic construct
  source 1..20: mol_type = other DNA
aaggaggagggacccacagg

SEQ ID NO: 5199 - DNA, 20 bp, synthetic construct
  source 1..20: mol_type = other DNA
aacactctgattgccagact

SEQ ID NO: 5200 - DNA, 20 bp, synthetic construct
  source 1..20: mol_type = other DNA
ggaggtgagagtaaggagga

SEQ ID NO: 5201 - DNA, 20 bp, synthetic construct
  source 1..20: mol_type = other DNA
ttggggaggtgagagtaagg

SEQ ID NO: 5202 - DNA, 20 bp, synthetic construct
  source 1..20: mol_type = other DNA
tgattgccagactgggtcaa

SEQ ID NO: 5203 - DNA, 20 bp, synthetic construct
  source 1..20: mol_type = other DNA
agtaaggaggagggacccac

SEQ ID NO: 5204 - DNA, 20 bp, synthetic construct
  source 1..20: mol_type = other DNA
ggcggagtaaagatcaggaa

SEQ ID NO: 5205 - DNA, 20 bp, synthetic construct
  source 1..20: mol_type = other DNA
gggaggtgagagtaaggagg

SEQ ID NO: 5206 - DNA, 20 bp, synthetic construct
  source 1..20: mol_type = other DNA
gtaaagatcaggaagggaga

SEQ ID NO: 5207 - DNA, 20 bp, synthetic construct
  source 1..20: mol_type = other DNA
agtaaagatcaggaagggag

SEQ ID NO: 5208 - DNA, 20 bp, synthetic construct
  source 1..20: mol_type = other DNA
gctgtgcttcgacatcatcg

SEQ ID NO: 5209 - DNA, 20 bp, synthetic construct
  source 1..20: mol_type = other DNA
gcactgctcaacctactgca

SEQ ID NO: 5210 - DNA, 20 bp, synthetic construct
  source 1..20: mol_type = other DNA
gcagggtgtctgcctcgtgg

SEQ ID NO: 5211 - DNA, 20 bp, synthetic construct
  source 1..20: mol_type = other DNA
cccacgaggcagacaccctg

SEQ ID NO: 5212 - DNA, 20 bp, synthetic construct
  source 1..20: mol_type = other DNA
cactgctcaacctactgcag

SEQ ID NO: 5213 - DNA, 20 bp, synthetic construct
  source 1..20: mol_type = other DNA
aggagcttctacgtgtatgc

SEQ ID NO: 5214 - DNA, 20 bp, synthetic construct
  source 1..20: mol_type = other DNA
tgtgcttcgacatcatcgag

SEQ ID NO: 5215 - DNA, 20 bp, synthetic construct
  source 1..20: mol_type = other DNA
ggcactgctcaacctactgc

SEQ ID NO: 5216 - DNA, 20 bp, synthetic construct
  source 1..20: mol_type = other DNA
gtagaagctcctccgagctg

SEQ ID NO: 5217 - DNA, 20 bp, synthetic construct
  source 1..20: mol_type = other DNA
ccacttcccatgcccccacg

SEQ ID NO: 5218 - DNA, 20 bp, synthetic construct
  source 1..20: mol_type = other DNA
atcgaggggctctggtgcgt

SEQ ID NO: 5219 - DNA, 20 bp, synthetic construct
  source 1..20: mol_type = other DNA
tagaagctcctccgagctgg

SEQ ID NO: 5220 - DNA, 20 bp, synthetic construct
  source 1..20: mol_type = other DNA
cgaggggctctggtgcgtgg

SEQ ID NO: 5221 - DNA, 20 bp, synthetic construct
  source 1..20: mol_type = other DNA
gcagtaggttgagcagtgcc

SEQ ID NO: 5222 - DNA, 20 bp, synthetic construct
  source 1..20: mol_type = other DNA
cactccccagcccctgcagt

SEQ ID NO: 5223 - DNA, 20 bp, synthetic construct
  source 1..20: mol_type = other DNA
tggccgctagactagccaag

SEQ ID NO: 5224 - DNA, 20 bp, synthetic construct
  source 1..20: mol_type = other DNA
agtgatgcccttgttcccgt

SEQ ID NO: 5225 - DNA, 20 bp, synthetic construct
  source 1..20: mol_type = other DNA
aagggctcccacgggaacaa

SEQ ID NO: 5226 - DNA, 20 bp, synthetic construct
  source 1..20: mol_type = other DNA
ggccgctagactagccaaga

SEQ ID NO: 5227 - DNA, 20 bp, synthetic construct
  source 1..20: mol_type = other DNA
gggagcccttcggttccacg

SEQ ID NO: 5228 - DNA, 20 bp, synthetic construct
  source 1..20: mol_type = other DNA
taccctcttggctagtctag

SEQ ID NO: 5229 - DNA, 20 bp, synthetic construct
  source 1..20: mol_type = other DNA
gggaaccgcgtggaaccgaa

SEQ ID NO: 5230 - DNA, 20 bp, synthetic construct
  source 1..20: mol_type = other DNA
ctagccaagagggtaagcaa

SEQ ID NO: 5231 - DNA, 20 bp, synthetic construct
  source 1..20: mol_type = other DNA
tgggaaccgcgtggaaccga

SEQ ID NO: 5232 - DNA, 20 bp, synthetic construct
  source 1..20: mol_type = other DNA
gaagggctcccacgggaaca

SEQ ID NO: 5233 - DNA, 20 bp, synthetic construct
  source 1..20: mol_type = other DNA
cgcccgccaaccctagcccg

SEQ ID NO: 5234 - DNA, 20 bp, synthetic construct
  source 1..20: mol_type = other DNA
cggggaaggcctgcaaagtg

SEQ ID NO: 5235 - DNA, 20 bp, synthetic construct
  source 1..20: mol_type = other DNA
gccaagagggtaagcaaagg

SEQ ID NO: 5236 - DNA, 20 bp, synthetic construct
  source 1..20: mol_type = other DNA
tgcaggccttccccgaaagc

SEQ ID NO: 5237 - DNA, 20 bp, synthetic construct
  source 1..20: mol_type = other DNA
gtgaggcctcgggctagggt

SEQ ID NO: 5238 - DNA, 20 bp, synthetic construct
  source 1..20: mol_type = other DNA
cgtagtatgagtcccgcgtg

SEQ ID NO: 5239 - DNA, 20 bp, synthetic construct
  source 1..20: mol_type = other DNA
gatccttatatgccccacgc

SEQ ID NO: 5240 - DNA, 20 bp, synthetic construct
  source 1..20: mol_type = other DNA
tccactgagataaatatcag

SEQ ID NO: 5241 - DNA, 20 bp, synthetic construct
  source 1..20: mol_type = other DNA
tgatccttatatgccccacg

SEQ ID NO: 5242 - DNA, 20 bp, synthetic construct
  source 1..20: mol_type = other DNA
actgagataaatatcagggg

SEQ ID NO: 5243 - DNA, 20 bp, synthetic construct
  source 1..20: mol_type = other DNA
aacgtagtatgagtcccgcg

SEQ ID NO: 5244 - DNA, 20 bp, synthetic construct
  source 1..20: mol_type = other DNA
acgtagtatgagtcccgcgt

SEQ ID NO: 5245 - DNA, 20 bp, synthetic construct
  source 1..20: mol_type = other DNA
atatttatctcagtggacgg

SEQ ID NO: 5246 - DNA, 20 bp, synthetic construct
  source 1..20: mol_type = other DNA
gcccctgatatttatctcag

SEQ ID NO: 5247 - DNA, 20 bp, synthetic construct
  source 1..20: mol_type = other DNA
caccccgcaactcctgaaag

SEQ ID NO: 5248 - DNA, 20 bp, synthetic construct
  source 1..20: mol_type = other DNA
cggtggccggaaaaggacaa

SEQ ID NO: 5249 - DNA, 20 bp, synthetic construct
  source 1..20: mol_type = other DNA
ctgatatttatctcagtgga

SEQ ID NO: 5250 - DNA, 20 bp, synthetic construct
  source 1..20: mol_type = other DNA
cgccgctttcaggagttgcg

SEQ ID NO: 5251 - DNA, 20 bp, synthetic construct
  source 1..20: mol_type = other DNA
ctctctgagacagaaaaaca

SEQ ID NO: 5252 - DNA, 20 bp, synthetic construct
  source 1..20: mol_type = other DNA
ctgagacagaaaaacaaggg

SEQ ID NO: 5253 - DNA, 20 bp, synthetic construct
  source 1..20: mol_type = other DNA
actcgcgacgcgtcaccgag

SEQ ID NO: 5254 - DNA, 20 bp, synthetic construct
  source 1..20: mol_type = other DNA
gactcgcgacgcgtcaccga

SEQ ID NO: 5255 - DNA, 20 bp, synthetic construct
  source 1..20: mol_type = other DNA
gcgtcgcgagtcacctgacc

SEQ ID NO: 5256 - DNA, 20 bp, synthetic construct
  source 1..20: mol_type = other DNA
tgactcgcgacgcgtcaccg

SEQ ID NO: 5257 - DNA, 20 bp, synthetic construct
  source 1..20: mol_type = other DNA
cagcagcggcacgcagcgtg

SEQ ID NO: 5258 - DNA, 20 bp, synthetic construct
  source 1..20: mol_type = other DNA
cgagtcacctgaccaggctg

SEQ ID NO: 5259 - DNA, 20 bp, synthetic construct
  source 1..20: mol_type = other DNA
ttccgccacgcccgtcatgg

SEQ ID NO: 5260 - DNA, 20 bp, synthetic construct
  source 1..20: mol_type = other DNA
agcagcggcacgcagcgtgg

SEQ ID NO: 5261 - DNA, 20 bp, synthetic construct
  source 1..20: mol_type = other DNA
ggcgtggcggaacccagcag

SEQ ID NO: 5262 - DNA, 20 bp, synthetic construct
  source 1..20: mol_type = other DNA
gggttccgccacgcccgtca

SEQ ID NO: 5263 - DNA, 20 bp, synthetic construct
  source 1..20: mol_type = other DNA
ccagcagcggcacgcagcgt

SEQ ID NO: 5264 - DNA, 20 bp, synthetic construct
  source 1..20: mol_type = other DNA
cgccgccatgacgggcgtgg

SEQ ID NO: 5265 - DNA, 20 bp, synthetic construct
  source 1..20: mol_type = other DNA
cgccacgcccgtcatggcgg

SEQ ID NO: 5266 - DNA, 20 bp, synthetic construct
  source 1..20: mol_type = other DNA
cccagcagcggcacgcagcg

SEQ ID NO: 5267 - DNA, 20 bp, synthetic construct
  source 1..20: mol_type = other DNA
ccgaggggcggggccagagc

SEQ ID NO: 5268 - DNA, 20 bp, synthetic construct
  source 1..20: mol_type = other DNA
gcatctcagaaactgcgcgc

SEQ ID NO: 5269 - DNA, 20 bp, synthetic construct
  source 1..20: mol_type = other DNA
tctgtcacagacctatctgc

SEQ ID NO: 5270 - DNA, 20 bp, synthetic construct
  source 1..20: mol_type = other DNA
gttgtcctcggaaacgtcgc

SEQ ID NO: 5271 - DNA, 20 bp, synthetic construct
  source 1..20: mol_type = other DNA
ggtgaaggcgacccgcagat

SEQ ID NO: 5272 - DNA, 20 bp, synthetic construct
  source 1..20: mol_type = other DNA
gtctgtcacagacctatctg

SEQ ID NO: 5273 - DNA, 20 bp, synthetic construct
  source 1..20: mol_type = other DNA
tgccgagtccccgcagcagg

SEQ ID NO: 5274 - DNA, 20 bp, synthetic construct
  source 1..20: mol_type = other DNA
gtttctgagatgctgggtga

SEQ ID NO: 5275 - DNA, 20 bp, synthetic construct
  source 1..20: mol_type = other DNA
cttgctcgccccctgctgcg

SEQ ID NO: 5276 - DNA, 20 bp, synthetic construct
  source 1..20: mol_type = other DNA
gctgccgagtccccgcagca

SEQ ID NO: 5277 - DNA, 20 bp, synthetic construct
  source 1..20: mol_type = other DNA
cggaaacgtcgctggcgcgg

SEQ ID NO: 5278 - DNA, 20 bp, synthetic construct
  source 1..20: mol_type = other DNA
ctgccgagtccccgcagcag

SEQ ID NO: 5279 - DNA, 20 bp, synthetic construct
  source 1..20: mol_type = other DNA
agcatctcagaaactgcgcg

SEQ ID NO: 5280 - DNA, 20 bp, synthetic construct
  source 1..20: mol_type = other DNA
ggaaacgtcgctggcgcgga

SEQ ID NO: 5281 - DNA, 20 bp, synthetic construct
  source 1..20: mol_type = other DNA
gctggcgcggagggatggtt

SEQ ID NO: 5282 - DNA, 20 bp, synthetic construct
  source 1..20: mol_type = other DNA
cctcggaaacgtcgctggcg

SEQ ID NO: 5283 - DNA, 20 bp, synthetic construct
  source 1..20: mol_type = other DNA
ctcacgtgatgcgggccccg

SEQ ID NO: 5284 - DNA, 20 bp, synthetic construct
  source 1..20: mol_type = other DNA
ccgcctcaccagaccgcgtg

SEQ ID NO: 5285 - DNA, 20 bp, synthetic construct
  source 1..20: mol_type = other DNA
gggcgcgcgggtttatatgg

SEQ ID NO: 5286 - DNA, 20 bp, synthetic construct
  source 1..20: mol_type = other DNA
cgtccgcacgcggtctggtg

SEQ ID NO: 5287 - DNA, 20 bp, synthetic construct
  source 1..20: mol_type = other DNA
ggtttatatggcgggccgcg

SEQ ID NO: 5288 - DNA, 20 bp, synthetic construct
  source 1..20: mol_type = other DNA
cccgcgagcccgtccgcacg

SEQ ID NO: 5289 - DNA, 20 bp, synthetic construct
  source 1..20: mol_type = other DNA
tcaccagaccgcgtgcggac

SEQ ID NO: 5290 - DNA, 20 bp, synthetic construct
  source 1..20: mol_type = other DNA
cgtgcggacgggctcgcggg

SEQ ID NO: 5291 - DNA, 20 bp, synthetic construct
  source 1..20: mol_type = other DNA
cgcccgcgcgcaccgcccag

SEQ ID NO: 5292 - DNA, 20 bp, synthetic construct
  source 1..20: mol_type = other DNA
gctcaggccacgcccctggg

SEQ ID NO: 5293 - DNA, 20 bp, synthetic construct
  source 1..20: mol_type = other DNA
ccgcccgcgcgcaccgccca

SEQ ID NO: 5294 - DNA, 20 bp, synthetic construct
  source 1..20: mol_type = other DNA
accgcgtgcggacgggctcg

SEQ ID NO: 5295 - DNA, 20 bp, synthetic construct
  source 1..20: mol_type = other DNA
gcaagctcaggccacgcccc

SEQ ID NO: 5296 - DNA, 20 bp, synthetic construct
  source 1..20: mol_type = other DNA
accgcccgcgcgcaccgccc

SEQ ID NO: 5297 - DNA, 20 bp, synthetic construct
  source 1..20: mol_type = other DNA
ccctgggcggtgcgcgcggg

SEQ ID NO: 5298 - DNA, 20 bp, synthetic construct
  source 1..20: mol_type = other DNA
cagacgacgatatcagcgcg

SEQ ID NO: 5299 - DNA, 20 bp, synthetic construct
  source 1..20: mol_type = other DNA
gtccgctgacactgcgtccg

SEQ ID NO: 5300 - DNA, 20 bp, synthetic construct
  source 1..20: mol_type = other DNA
acagaagagattgtcgcacc

SEQ ID NO: 5301 - DNA, 20 bp, synthetic construct
  source 1..20: mol_type = other DNA
ccagacgacgatatcagcgc

SEQ ID NO: 5302 - DNA, 20 bp, synthetic construct
  source 1..20: mol_type = other DNA
ggccccggacgcagtgtcag

SEQ ID NO: 5303 - DNA, 20 bp, synthetic construct
  source 1..20: mol_type = other DNA
tcagcggactcagcagtgtg

SEQ ID NO: 5304 - DNA, 20 bp, synthetic construct
  source 1..20: mol_type = other DNA
tcgatcacgcgctcgagagt

SEQ ID NO: 5305 - DNA, 20 bp, synthetic construct
  source 1..20: mol_type = other DNA
tgtcagcggactcagcagtg

SEQ ID NO: 5306 - DNA, 20 bp, synthetic construct
  source 1..20: mol_type = other DNA
gccagacgacgatatcagcg

SEQ ID NO: 5307 - DNA, 20 bp, synthetic construct
  source 1..20: mol_type = other DNA
cgagagttggctctgcccca

SEQ ID NO: 5308 - DNA, 20 bp, synthetic construct
  source 1..20: mol_type = other DNA
ggggtccccacaacgccatg

SEQ ID NO: 5309 - DNA, 20 bp, synthetic construct
  source 1..20: mol_type = other DNA
gagtccgctgacactgcgtc

SEQ ID NO: 5310 - DNA, 20 bp, synthetic construct
  source 1..20: mol_type = other DNA
tgacgggggcgaaaaaactg

SEQ ID NO: 5311 - DNA, 20 bp, synthetic construct
  source 1..20: mol_type = other DNA
gcggggtccccacaacgcca

SEQ ID NO: 5312 - DNA, 20 bp, synthetic construct
  source 1..20: mol_type = other DNA
ctgatatcgtcgtctggccc

SEQ ID NO: 5313 - DNA, 20 bp, synthetic construct
  source 1..20: mol_type = other DNA
ttgccgaggagactaggagg

SEQ ID NO: 5314 - DNA, 20 bp, synthetic construct
  source 1..20: mol_type = other DNA
cgagatctgtgccgttgccg

SEQ ID NO: 5315 - DNA, 20 bp, synthetic construct
  source 1..20: mol_type = other DNA
gttgccgaggagactaggag

SEQ ID NO: 5316 - DNA, 20 bp, synthetic construct
  source 1..20: mol_type = other DNA
ccgttgccgaggagactagg

SEQ ID NO: 5317 - DNA, 20 bp, synthetic construct
  source 1..20: mol_type = other DNA
cctcctagtctcctcggcaa

SEQ ID NO: 5318 - DNA, 20 bp, synthetic construct
  source 1..20: mol_type = other DNA
ctcactgaagcgtactacgc

SEQ ID NO: 5319 - DNA, 20 bp, synthetic construct
  source 1..20: mol_type = other DNA
agccacagcgctagagaagt

SEQ ID NO: 5320 - DNA, 20 bp, synthetic construct
  source 1..20: mol_type = other DNA
aggagaggggatctcgcgaa

SEQ ID NO: 5321 - DNA, 20 bp, synthetic construct
  source 1..20: mol_type = other DNA
cgttgccgaggagactagga

SEQ ID NO: 5322 - DNA, 20 bp, synthetic construct
  source 1..20: mol_type = other DNA
aaggatgtgtaagaaaccag

SEQ ID NO: 5323 - DNA, 20 bp, synthetic construct
  source 1..20: mol_type = other DNA
tcgcgatatcttaagacatc

SEQ ID NO: 5324 - DNA, 20 bp, synthetic construct
  source 1..20: mol_type = other DNA
tatcgcgagacctttacctc

SEQ ID NO: 5325 - DNA, 20 bp, synthetic construct
  source 1..20: mol_type = other DNA
ctcctacttctctagcgctg

SEQ ID NO: 5326 - DNA, 20 bp, synthetic construct
  source 1..20: mol_type = other DNA
gtgtaagaaaccagaggtaa

SEQ ID NO: 5327 - DNA, 20 bp, synthetic construct
  source 1..20: mol_type = other DNA
agacagaaaaacaagggagg

SEQ ID NO: 5328 - DNA, 20 bp, synthetic construct
  source 1..20: mol_type = other DNA
aagcgcactacggtgctgcg

SEQ ID NO: 5329 - DNA, 20 bp, synthetic construct
  source 1..20: mol_type = other DNA
actctcaatgcgcatgacag

SEQ ID NO: 5330 - DNA, 20 bp, synthetic construct
  source 1..20: mol_type = other DNA
caatattgggacaccctagg

SEQ ID NO: 5331 - DNA, 20 bp, synthetic construct
  source 1..20: mol_type = other DNA
agggtgtcccaatattgtgg

SEQ ID NO: 5332 - DNA, 20 bp, synthetic construct
  source 1..20: mol_type = other DNA
tgctcagcgcaagcgcacta

SEQ ID NO: 5333 - DNA, 20 bp, synthetic construct
  source 1..20: mol_type = other DNA
gactctcaatgcgcatgaca

SEQ ID NO: 5334 - DNA, 20 bp, synthetic construct
  source 1..20: mol_type = other DNA
agtggtgaagtcgggaaaga

SEQ ID NO: 5335 - DNA, 20 bp, synthetic construct
  source 1..20: mol_type = other DNA
aggggtctgatcccagtgag

SEQ ID NO: 5336 - DNA, 20 bp, synthetic construct
  source 1..20: mol_type = other DNA
caatgcgcatgacagaaaag

SEQ ID NO: 5337 - DNA, 20 bp, synthetic construct
  source 1..20: mol_type = other DNA
gcggctgcttctaccgccta

SEQ ID NO: 5338 - DNA, 20 bp, synthetic construct
  source 1..20: mol_type = other DNA
gcattgagagtcctctagac

SEQ ID NO: 5339 - DNA, 20 bp, synthetic construct
  source 1..20: mol_type = other DNA
tgcgaggagcgcctgtctag

SEQ ID NO: 5340 - DNA, 20 bp, synthetic construct
  source 1..20: mol_type = other DNA
ccacaatattgggacaccct

SEQ ID NO: 5341 - DNA, 20 bp, synthetic construct
  source 1..20: mol_type = other DNA
tcccgacttcaccactcact

SEQ ID NO: 5342 - DNA, 20 bp, synthetic construct
  source 1..20: mol_type = other DNA
gagtggtgaagtcgggaaag

SEQ ID NO: 5343 - DNA, 20 bp, synthetic construct
  source 1..20: mol_type = other DNA
tccctaaaacccacaacccg

SEQ ID NO: 5344 - DNA, 20 bp, synthetic construct
  source 1..20: mol_type = other DNA
ttccctaaaacccacaaccc

SEQ ID NO: 5345 - DNA, 20 bp, synthetic construct
  source 1..20: mol_type = other DNA
agcgaggaaggacttgtgag

SEQ ID NO: 5346 - DNA, 20 bp, synthetic construct
  source 1..20: mol_type = other DNA
ggccacttaagggcacacag

SEQ ID NO: 5347 - DNA, 20 bp, synthetic construct
  source 1..20: mol_type = other DNA
ttccttatgaagtagagacc

SEQ ID NO: 5348 - DNA, 20 bp, synthetic construct
  source 1..20: mol_type = other DNA
gcttggagttccccgggttg

SEQ ID NO: 5349 - DNA, 20 bp, synthetic construct
  source 1..20: mol_type = other DNA
tgtcaggcttggagttcccc

SEQ ID NO: 5350 - DNA, 20 bp, synthetic construct
  source 1..20: mol_type = other DNA
gctctgagcaaagccagctc

SEQ ID NO: 5351 - DNA, 20 bp, synthetic construct
  source 1..20: mol_type = other DNA
cagaccaacgctgcttctca

SEQ ID NO: 5352 - DNA, 20 bp, synthetic construct
  source 1..20: mol_type = other DNA
cttccctaaaacccacaacc

SEQ ID NO: 5353 - DNA, 20 bp, synthetic construct
  source 1..20: mol_type = other DNA
cttggagttccccgggttgt

SEQ ID NO: 5354 - DNA, 20 bp, synthetic construct
  source 1..20: mol_type = other DNA
cattccctgagaagcagcgt

SEQ ID NO: 5355 - DNA, 20 bp, synthetic construct
  source 1..20: mol_type = other DNA
agaagcagcgttggtctgtc

SEQ ID NO: 5356 - DNA, 20 bp, synthetic construct
  source 1..20: mol_type = other DNA
acagaccaacgctgcttctc

SEQ ID NO: 5357 - DNA, 20 bp, synthetic construct
  source 1..20: mol_type = other DNA
ctgtcaggcttggagttccc

SEQ ID NO: 5358 - DNA, 20 bp, synthetic construct
  source 1..20: mol_type = other DNA
gaagccaatgaagaattacg

SEQ ID NO: 5359 - DNA, 20 bp, synthetic construct
  source 1..20: mol_type = other DNA
gccaatgaagaattacgtgg

SEQ ID NO: 5360 - DNA, 20 bp, synthetic construct
  source 1..20: mol_type = other DNA
ctgaaacgccacgggtctgg

SEQ ID NO: 5361 - DNA, 20 bp, synthetic construct
  source 1..20: mol_type = other DNA
cacctccaggaactccgaag

SEQ ID NO: 5362 - DNA, 20 bp, synthetic construct
  source 1..20: mol_type = other DNA
ggaaccactcacaccgctgc

SEQ ID NO: 5363 - DNA, 20 bp, synthetic construct
  source 1..20: mol_type = other DNA
tacctcttcggagttcctgg

SEQ ID NO: 5364 - DNA, 20 bp, synthetic construct
  source 1..20: mol_type = other DNA
cgggtctgggggaatagcga

SEQ ID NO: 5365 - DNA, 20 bp, synthetic construct
  source 1..20: mol_type = other DNA
gctgtagtaaccaatagaca

SEQ ID NO: 5366 - DNA, 20 bp, synthetic construct
  source 1..20: mol_type = other DNA
agcaccagcagcggtgtgag

SEQ ID NO: 5367 - DNA, 20 bp, synthetic construct
  source 1..20: mol_type = other DNA
gaggtggtgccagactagag

SEQ ID NO: 5368 - DNA, 20 bp, synthetic construct
  source 1..20: mol_type = other DNA
accctacacagcaccagcag

SEQ ID NO: 5369 - DNA, 20 bp, synthetic construct
  source 1..20: mol_type = other DNA
tctagtctggcaccacctcc

SEQ ID NO: 5370 - DNA, 20 bp, synthetic construct
  source 1..20: mol_type = other DNA
acgggtctgggggaatagcg

SEQ ID NO: 5371 - DNA, 20 bp, synthetic construct
  source 1..20: mol_type = other DNA
accgctgctggtgctgtgta

SEQ ID NO: 5372 - DNA, 20 bp, synthetic construct
  source 1..20: mol_type = other DNA
ctcttcggagttcctggagg

SEQ ID NO: 5373 - DNA, 20 bp, synthetic construct
  source 1..20: mol_type = other DNA
cccaaccaccaccccagcga

SEQ ID NO: 5374 - DNA, 20 bp, synthetic construct
  source 1..20: mol_type = other DNA
agcgtccatcacaaatccga

SEQ ID NO: 5375 - DNA, 20 bp, synthetic construct
  source 1..20: mol_type = other DNA
tccaagccgccgctaagacc

SEQ ID NO: 5376 - DNA, 20 bp, synthetic construct
  source 1..20: mol_type = other DNA
cagagtaggctccatcgctg

SEQ ID NO: 5377 - DNA, 20 bp, synthetic construct
  source 1..20: mol_type = other DNA
gcttctccgggtcttagcgg

SEQ ID NO: 5378 - DNA, 20 bp, synthetic construct
  source 1..20: mol_type = other DNA
ccatcacaaatccgaaggtg

SEQ ID NO: 5379 - DNA, 20 bp, synthetic construct
  source 1..20: mol_type = other DNA
gcagagtaggctccatcgct

SEQ ID NO: 5380 - DNA, 20 bp, synthetic construct
  source 1..20: mol_type = other DNA
tcggatttgtgatggacgct

SEQ ID NO: 5381 - DNA, 20 bp, synthetic construct
  source 1..20: mol_type = other DNA
tccatcacaaatccgaaggt

SEQ ID NO: 5382 - DNA, 20 bp, synthetic construct
  source 1..20: mol_type = other DNA
gtccatcacaaatccgaagg

SEQ ID NO: 5383 - DNA, 20 bp, synthetic construct
  source 1..20: mol_type = other DNA
gacacttgctgtggttacta

SEQ ID NO: 5384 - DNA, 20 bp, synthetic construct
  source 1..20: mol_type = other DNA
agtaggctccatcgctgggg

SEQ ID NO: 5385 - DNA, 20 bp, synthetic construct
  source 1..20: mol_type = other DNA
gcggcggcttggagcagagt

SEQ ID NO: 5386 - DNA, 20 bp, synthetic construct
  source 1..20: mol_type = other DNA
tggggaagggggaagtgcgg

SEQ ID NO: 5387 - DNA, 20 bp, synthetic construct
  source 1..20: mol_type = other DNA
atcgctggggtggtggttgg

SEQ ID NO: 5388 - DNA, 20 bp, synthetic construct
  source 1..20: mol_type = other DNA
ccgcctatggcagagcccgt

SEQ ID NO: 5389 - DNA, 20 bp, synthetic construct
  source 1..20: mol_type = other DNA
cctcctccctagccggacag

SEQ ID NO: 5390 - DNA, 20 bp, synthetic construct
  source 1..20: mol_type = other DNA
tgttggtcaatgctgctcgg

SEQ ID NO: 5391 - DNA, 20 bp, synthetic construct
  source 1..20: mol_type = other DNA
gcgtcttccaataaaaactg

SEQ ID NO: 5392 - DNA, 20 bp, synthetic construct
  source 1..20: mol_type = other DNA
gagcagcattgaccaacaga

SEQ ID NO: 5393 - DNA, 20 bp, synthetic construct
  source 1..20: mol_type = other DNA
ccctcctccctagccggaca

SEQ ID NO: 5394 - DNA, 20 bp, synthetic construct
  source 1..20: mol_type = other DNA
accaatagtagtggaaaggc

SEQ ID NO: 5395 - DNA, 20 bp, synthetic construct
  source 1..20: mol_type = other DNA
aaggcgggcatgaacatgat

SEQ ID NO: 5396 - DNA, 20 bp, synthetic construct
  source 1..20: mol_type = other DNA
agcattgaccaacagacggc

SEQ ID NO: 5397 - DNA, 20 bp, synthetic construct
  source 1..20: mol_type = other DNA
gagaggcccctgtccggcta

SEQ ID NO: 5398 - DNA, 20 bp, synthetic construct
  source 1..20: mol_type = other DNA
ggaagtagagcccagccgag

SEQ ID NO: 5399 - DNA, 20 bp, synthetic construct
  source 1..20: mol_type = other DNA
cgtcttccaataaaaactgg

SEQ ID NO: 5400 - DNA, 20 bp, synthetic construct
  source 1..20: mol_type = other DNA
ccggctagggaggagggaag

SEQ ID NO: 5401 - DNA, 20 bp, synthetic construct
  source 1..20: mol_type = other DNA
gtccggctagggaggaggga

SEQ ID NO: 5402 - DNA, 20 bp, synthetic construct
  source 1..20: mol_type = other DNA
cgagaggcccctgtccggct

SEQ ID NO: 5403 - DNA, 20 bp, synthetic construct
  source 1..20: mol_type = other DNA
gccgagaagccgcgtgtccg

SEQ ID NO: 5404 - DNA, 20 bp, synthetic construct
  source 1..20: mol_type = other DNA
ccaccgcccagtatacgcca

SEQ ID NO: 5405 - DNA, 20 bp, synthetic construct
  source 1..20: mol_type = other DNA
tggccttggcgtatactggg

SEQ ID NO: 5406 - DNA, 20 bp, synthetic construct
  source 1..20: mol_type = other DNA
tcagacccaccccggacacg

SEQ ID NO: 5407 - DNA, 20 bp, synthetic construct
  source 1..20: mol_type = other DNA
tgttcgggacctagagcccg

SEQ ID NO: 5408 - DNA, 20 bp, synthetic construct
  source 1..20: mol_type = other DNA
ccttggcgtatactgggcgg

SEQ ID NO: 5409 - DNA, 20 bp, synthetic construct
  source 1..20: mol_type = other DNA
gagaagccgcgtgtccgggg

SEQ ID NO: 5410 - DNA, 20 bp, synthetic construct
  source 1..20: mol_type = other DNA
cgggctctaggtcccgaaca

SEQ ID NO: 5411 - DNA, 20 bp, synthetic construct
  source 1..20: mol_type = other DNA
cccagtatacgccaaggcca

SEQ ID NO: 5412 - DNA, 20 bp, synthetic construct
  source 1..20: mol_type = other DNA
acgccaaggccaaggccgag

SEQ ID NO: 5413 - DNA, 20 bp, synthetic construct
  source 1..20: mol_type = other DNA
gttcgggacctagagcccga

SEQ ID NO: 5414 - DNA, 20 bp, synthetic construct
  source 1..20: mol_type = other DNA
cagtggagcgagcgcactgg

SEQ ID NO: 5415 - DNA, 20 bp, synthetic construct
  source 1..20: mol_type = other DNA
gggcagtggagcgagcgcac

SEQ ID NO: 5416 - DNA, 20 bp, synthetic construct
  source 1..20: mol_type = other DNA
tacgccaaggccaaggccga

SEQ ID NO: 5417 - DNA, 20 bp, synthetic construct
  source 1..20: mol_type = other DNA
atacgccaaggccaaggccg

SEQ ID NO: 5418 - DNA, 20 bp, synthetic construct
  source 1..20: mol_type = other DNA
ggttggtagcttctatcctg

SEQ ID NO: 5419 - DNA, 20 bp, synthetic construct
  source 1..20: mol_type = other DNA
aaagaagtgtagctattggc

SEQ ID NO: 5420 - DNA, 20 bp, synthetic construct
  source 1..20: mol_type = other DNA
gattggttaaaaaagaacag

SEQ ID NO: 5421 - DNA, 20 bp, synthetic construct
  source 1..20: mol_type = other DNA
taaaaaagaacagtggacga

SEQ ID NO: 5422 - DNA, 20 bp, synthetic construct
  source 1..20: mol_type = other DNA
gccctccccgctaagtgcgc

SEQ ID NO: 5423 - DNA, 20 bp, synthetic construct
  source 1..20: mol_type = other DNA
gttggtagcttctatcctgg

SEQ ID NO: 5424 - DNA, 20 bp, synthetic construct
  source 1..20: mol_type = other DNA
agcctgcgcacttagcgggg

SEQ ID NO: 5425 - DNA, 20 bp, synthetic construct
  source 1..20: mol_type = other DNA
gcctgcgcacttagcgggga

SEQ ID NO: 5426 - DNA, 20 bp, synthetic construct
  source 1..20: mol_type = other DNA
cacgtagccgccctagaccg

SEQ ID NO: 5427 - DNA, 20 bp, synthetic construct
  source 1..20: mol_type = other DNA
ttccgggccgcggtctaggg

SEQ ID NO: 5428 - DNA, 20 bp, synthetic construct
  source 1..20: mol_type = other DNA
aggagcctgcgcacttagcg

SEQ ID NO: 5429 - DNA, 20 bp, synthetic construct
  source 1..20: mol_type = other DNA
tcctgggggctgagcgactg

SEQ ID NO: 5430 - DNA, 20 bp, synthetic construct
  source 1..20: mol_type = other DNA
ctggttggtagcttctatcc

SEQ ID NO: 5431 - DNA, 20 bp, synthetic construct
  source 1..20: mol_type = other DNA
cccgcagtcgctcagccccc

SEQ ID NO: 5432 - DNA, 20 bp, synthetic construct
  source 1..20: mol_type = other DNA
ttaatgcaaaatggtcgcta

SEQ ID NO: 5433 - DNA, 20 bp, synthetic construct
  source 1..20: mol_type = other DNA
tctaggttcgtaaagctgcg

SEQ ID NO: 5434 - DNA, 20 bp, synthetic construct
  source 1..20: mol_type = other DNA
gaggtggcacgccgtccgac

SEQ ID NO: 5435 - DNA, 20 bp, synthetic construct
  source 1..20: mol_type = other DNA
tgtcgcgcatgtcttcccgt

SEQ ID NO: 5436 - DNA, 20 bp, synthetic construct
  source 1..20: mol_type = other DNA
tgcgcgacatgtggccaaag

SEQ ID NO: 5437 - DNA, 20 bp, synthetic construct
  source 1..20: mol_type = other DNA
gaggggtttcgcgacaaccc

SEQ ID NO: 5438 - DNA, 20 bp, synthetic construct
  source 1..20: mol_type = other DNA
gggaagacatgcgcgacatg

SEQ ID NO: 5439 - DNA, 20 bp, synthetic construct
  source 1..20: mol_type = other DNA
tatagcgggcgcgtcgagct

SEQ ID NO: 5440 - DNA, 20 bp, synthetic construct
  source 1..20: mol_type = other DNA
gaggtgaggacggagacagg

SEQ ID NO: 5441 - DNA, 20 bp, synthetic construct
  source 1..20: mol_type = other DNA
catgcgcgacatgtggccaa

SEQ ID NO: 5442 - DNA, 20 bp, synthetic construct
  source 1..20: mol_type = other DNA
aggcaatcacgtgattatag

SEQ ID NO: 5443 - DNA, 20 bp, synthetic construct
  source 1..20: mol_type = other DNA
gaggacggagacaggaggcg

SEQ ID NO: 5444 - DNA, 20 bp, synthetic construct
  source 1..20: mol_type = other DNA
tgaggacggagacaggaggc

SEQ ID NO: 5445 - DNA, 20 bp, synthetic construct
  source 1..20: mol_type = other DNA
cgtaaagctgcgcggcgagg

SEQ ID NO: 5446 - DNA, 20 bp, synthetic construct
  source 1..20: mol_type = other DNA
gtgaggacggagacaggagg

SEQ ID NO: 5447 - DNA, 20 bp, synthetic construct
  source 1..20: mol_type = other DNA
gacggagacaggaggcgggg

SEQ ID NO: 5448 - DNA, 20 bp, synthetic construct
  source 1..20: mol_type = other DNA
atcaaggagcaccacgtggg

SEQ ID NO: 5449 - DNA, 20 bp, synthetic construct
  source 1..20: mol_type = other DNA
ccctatcaaggagcaccacg

SEQ ID NO: 5450 - DNA, 20 bp, synthetic construct
  source 1..20: mol_type = other DNA
cctatcaaggagcaccacgt

SEQ ID NO: 5451 - DNA, 20 bp, synthetic construct
  source 1..20: mol_type = other DNA
ctccaggagccagttctgca

SEQ ID NO: 5452 - DNA, 20 bp, synthetic construct
  source 1..20: mol_type = other DNA
agacaaaggcggggcaacgt

SEQ ID NO: 5453 - DNA, 20 bp, synthetic construct
  source 1..20: mol_type = other DNA
cagtccgctggagacaaagg

SEQ ID NO: 5454 - DNA, 20 bp, synthetic construct
  source 1..20: mol_type = other DNA
gaacctagccaataagagtg

SEQ ID NO: 5455 - DNA, 20 bp, synthetic construct
  source 1..20: mol_type = other DNA
aacctagccaataagagtgc

SEQ ID NO: 5456 - DNA, 20 bp, synthetic construct
  source 1..20: mol_type = other DNA
ttccagtccgctggagacaa

SEQ ID NO: 5457 - DNA, 20 bp, synthetic construct
  source 1..20: mol_type = other DNA
gtccgctggagacaaaggcg

SEQ ID NO: 5458 - DNA, 20 bp, synthetic construct
  source 1..20: mol_type = other DNA
ctcctggagtcccgcccacg

SEQ ID NO: 5459 - DNA, 20 bp, synthetic construct
  source 1..20: mol_type = other DNA
tgccccgcctttgtctccag

SEQ ID NO: 5460 - DNA, 20 bp, synthetic construct
  source 1..20: mol_type = other DNA
tcaaggagcaccacgtgggc

SEQ ID NO: 5461 - DNA, 20 bp, synthetic construct
  source 1..20: mol_type = other DNA
acaaaggcggggcaacgttg

SEQ ID NO: 5462 - DNA, 20 bp, synthetic construct
  source 1..20: mol_type = other DNA
ctttcaatttgtccaatcag

SEQ ID NO: 5463 - DNA, 20 bp, synthetic construct
  source 1..20: mol_type = other DNA
ccccggctctagcgtactgg

SEQ ID NO: 5464 - DNA, 20 bp, synthetic construct
  source 1..20: mol_type = other DNA
ccgccagtacgctagagccg

SEQ ID NO: 5465 - DNA, 20 bp, synthetic construct
  source 1..20: mol_type = other DNA
tgagtgctggcccactaccc

SEQ ID NO: 5466 - DNA, 20 bp, synthetic construct
  source 1..20: mol_type = other DNA
acgtgagagctcggcgcctg

SEQ ID NO: 5467 - DNA, 20 bp, synthetic construct
  source 1..20: mol_type = other DNA
tccgccagtacgctagagcc

SEQ ID NO: 5468 - DNA, 20 bp, synthetic construct
  source 1..20: mol_type = other DNA
ctaccccggctctagcgtac

SEQ ID NO: 5469 - DNA, 20 bp, synthetic construct
  source 1..20: mol_type = other DNA
cggagacagacgtgagagct

SEQ ID NO: 5470 - DNA, 20 bp, synthetic construct
  source 1..20: mol_type = other DNA
ggtagtgggccagcactcac

SEQ ID NO: 5471 - DNA, 20 bp, synthetic construct
  source 1..20: mol_type = other DNA
gagcgggtcctggattggct

SEQ ID NO: 5472 - DNA, 20 bp, synthetic construct
  source 1..20: mol_type = other DNA
ttggctgggccggtgagtgc

SEQ ID NO: 5473 - DNA, 20 bp, synthetic construct
  source 1..20: mol_type = other DNA
tggctgggacggctgtgggt

SEQ ID NO: 5474 - DNA, 20 bp, synthetic construct
  source 1..20: mol_type = other DNA
ggacgcgtgcgtgtgcgcgg

SEQ ID NO: 5475 - DNA, 20 bp, synthetic construct
  source 1..20: mol_type = other DNA
aaaggacgcgtgcgtgtgcg

SEQ ID NO: 5476 - DNA, 20 bp, synthetic construct
  source 1..20: mol_type = other DNA
gcgggtggggcagtgcagag

SEQ ID NO: 5477 - DNA, 20 bp, synthetic construct
  source 1..20: mol_type = other DNA
cgggtggggcagtgcagagc

SEQ ID NO: 5478 - DNA, 20 bp, synthetic construct
  source 1..20: mol_type = other DNA
gcgccgccgcgggagaccgg

SEQ ID NO: 5479 - DNA, 20 bp, synthetic construct
  source 1..20: mol_type = other DNA
acaacaaccagcgccgccgc

SEQ ID NO: 5480 - DNA, 20 bp, synthetic construct
  source 1..20: mol_type = other DNA
gccgcggactccctctcccg

SEQ ID NO: 5481 - DNA, 20 bp, synthetic construct
  source 1..20: mol_type = other DNA
gcgccctcggaccgcacctg

SEQ ID NO: 5482 - DNA, 20 bp, synthetic construct
  source 1..20: mol_type = other DNA
ctggttgttgtcgtgcgccg

SEQ ID NO: 5483 - DNA, 20 bp, synthetic construct
  source 1..20: mol_type = other DNA
gacaacaaccagcgccgccg

SEQ ID NO: 5484 - DNA, 20 bp, synthetic construct
  source 1..20: mol_type = other DNA
gggtctgtgctccccaggtg

SEQ ID NO: 5485 - DNA, 20 bp, synthetic construct
  source 1..20: mol_type = other DNA
ggccacgcgcagggcaccac

SEQ ID NO: 5486 - DNA, 20 bp, synthetic construct
  source 1..20: mol_type = other DNA
gcgcagggcaccacgggaga

SEQ ID NO: 5487 - DNA, 20 bp, synthetic construct
  source 1..20: mol_type = other DNA
accacgggagagggagtccg

SEQ ID NO: 5488 - DNA, 20 bp, synthetic construct
  source 1..20: mol_type = other DNA
cggccacgcgcagggcacca

SEQ ID NO: 5489 - DNA, 20 bp, synthetic construct
  source 1..20: mol_type = other DNA
gcccggcccccggtctcccg

SEQ ID NO: 5490 - DNA, 20 bp, synthetic construct
  source 1..20: mol_type = other DNA
agcgccgccgcgggagaccg

SEQ ID NO: 5491 - DNA, 20 bp, synthetic construct
  source 1..20: mol_type = other DNA
ctcccgtggtgccctgcgcg

SEQ ID NO: 5492 - DNA, 20 bp, synthetic construct
  source 1..20: mol_type = other DNA
cggcccccggtctcccgcgg

SEQ ID NO: 5493 - DNA, 20 bp, synthetic construct
  source 1..20: mol_type = other DNA
ggtggttcaggaatgctcca

SEQ ID NO: 5494 - DNA, 20 bp, synthetic construct
  source 1..20: mol_type = other DNA
ttgtcctcccacctgccaca

SEQ ID NO: 5495 - DNA, 20 bp, synthetic construct
  source 1..20: mol_type = other DNA
gcaacttctccaactccagg

SEQ ID NO: 5496 - DNA, 20 bp, synthetic construct
  source 1..20: mol_type = other DNA
ggagttggagaagttgctgg

SEQ ID NO: 5497 - DNA, 20 bp, synthetic construct
  source 1..20: mol_type = other DNA
caacttctccaactccaggt

SEQ ID NO: 5498 - DNA, 20 bp, synthetic construct
  source 1..20: mol_type = other DNA
acatcatctggcaatggccc

SEQ ID NO: 5499 - DNA, 20 bp, synthetic construct
  source 1..20: mol_type = other DNA
agttggagaagttgctggcg

SEQ ID NO: 5500 - DNA, 20 bp, synthetic construct
  source 1..20: mol_type = other DNA
acttctccaactccaggtgg

SEQ ID NO: 5501 - DNA, 20 bp, synthetic construct
  source 1..20: mol_type = other DNA
gggtggttcaggaatgctcc

SEQ ID NO: 5502 - DNA, 20 bp, synthetic construct
  source 1..20: mol_type = other DNA
ggaagggaggatgatgaagg

SEQ ID NO: 5503 - DNA, 20 bp, synthetic construct
  source 1..20: mol_type = other DNA
aggaggacatcatctggcaa

SEQ ID NO: 5504 - DNA, 20 bp, synthetic construct
  source 1..20: mol_type = other DNA
ccaggacccccacctggagt

SEQ ID NO: 5505 - DNA, 20 bp, synthetic construct
  source 1..20: mol_type = other DNA
aacttctccaactccaggtg

SEQ ID NO: 5506 - DNA, 20 bp, synthetic construct
  source 1..20: mol_type = other DNA
ccagcaacttctccaactcc

SEQ ID NO: 5507 - DNA, 20 bp, synthetic construct
  source 1..20: mol_type = other DNA
cggggaagggaggatgatga

SEQ ID NO: 5508 - DNA, 20 bp, synthetic construct
  source 1..20: mol_type = other DNA
gtcctgctccgccccgacgt

SEQ ID NO: 5509 - DNA, 20 bp, synthetic construct
  source 1..20: mol_type = other DNA
gtggggcagaacctgagttg

SEQ ID NO: 5510 - DNA, 20 bp, synthetic construct
  source 1..20: mol_type = other DNA
gcggagcaggacgtgaattg

SEQ ID NO: 5511 - DNA, 20 bp, synthetic construct
  source 1..20: mol_type = other DNA
gcggggcctgcgtcagacgg

SEQ ID NO: 5512 - DNA, 20 bp, synthetic construct
  source 1..20: mol_type = other DNA
gagcaggacgtgaattgggg

SEQ ID NO: 5513 - DNA, 20 bp, synthetic construct
  source 1..20: mol_type = other DNA
gcaggacgtgaattggggcg

SEQ ID NO: 5514 - DNA, 20 bp, synthetic construct
  source 1..20: mol_type = other DNA
gccccttcccgccccaactc

SEQ ID NO: 5515 - DNA, 20 bp, synthetic construct
  source 1..20: mol_type = other DNA
ggcagaacctgagttggggc

SEQ ID NO: 5516 - DNA, 20 bp, synthetic construct
  source 1..20: mol_type = other DNA
ggtggggcagaacctgagtt

SEQ ID NO: 5517 - DNA, 20 bp, synthetic construct
  source 1..20: mol_type = other DNA
ccagggcggggcctacgtcg

SEQ ID NO: 5518 - DNA, 20 bp, synthetic construct
  source 1..20: mol_type = other DNA
ggccagggcggggcctacgt

SEQ ID NO: 5519 - DNA, 20 bp, synthetic construct
  source 1..20: mol_type = other DNA
ggcggggcctgcgtcagacg

SEQ ID NO: 5520 - DNA, 20 bp, synthetic construct
  source 1..20: mol_type = other DNA
gggtggggcagaacctgagt

SEQ ID NO: 5521 - DNA, 20 bp, synthetic construct
  source 1..20: mol_type = other DNA
ggaaggggcggggacaaggg

SEQ ID NO: 5522 - DNA, 20 bp, synthetic construct
  source 1..20: mol_type = other DNA
gaaggggcggggacaaggga

SEQ ID NO: 5523 - DNA, 20 bp, synthetic construct
  source 1..20: mol_type = other DNA
gctctgtgtcagcagccggg

SEQ ID NO: 5524 - DNA, 20 bp, synthetic construct
  source 1..20: mol_type = other DNA
ctgacacagagcccgacccg

SEQ ID NO: 5525 - DNA, 20 bp, synthetic construct
  source 1..20: mol_type = other DNA
ggaagttgctctgagctccg

SEQ ID NO: 5526 - DNA, 20 bp, synthetic construct
  source 1..20: mol_type = other DNA
ggaagtaacgctaagcgcac

SEQ ID NO: 5527 - DNA, 20 bp, synthetic construct
  source 1..20: mol_type = other DNA
cagtcccacactgccccgcg

SEQ ID NO: 5528 - DNA, 20 bp, synthetic construct
  source 1..20: mol_type = other DNA
gacgccgcgcggggcagtgt

SEQ ID NO: 5529 - DNA, 20 bp, synthetic construct
  source 1..20: mol_type = other DNA
gttgctctgagctccggggt

SEQ ID NO: 5530 - DNA, 20 bp, synthetic construct
  source 1..20: mol_type = other DNA
agttgctctgagctccgggg

SEQ ID NO: 5531 - DNA, 20 bp, synthetic construct
  source 1..20: mol_type = other DNA
gagggccgggacgccgcgcg

SEQ ID NO: 5532 - DNA, 20 bp, synthetic construct
  source 1..20: mol_type = other DNA
aagagggccgggacgccgcg

SEQ ID NO: 5533 - DNA, 20 bp, synthetic construct
  source 1..20: mol_type = other DNA
gcgcggggcagtgtgggact

SEQ ID NO: 5534 - DNA, 20 bp, synthetic construct
  source 1..20: mol_type = other DNA
agagggccgggacgccgcgc

SEQ ID NO: 5535 - DNA, 20 bp, synthetic construct
  source 1..20: mol_type = other DNA
tggcccgcctggtcccaccc

SEQ ID NO: 5536 - DNA, 20 bp, synthetic construct
  source 1..20: mol_type = other DNA
ggggcagtgtgggactgggg

SEQ ID NO: 5537 - DNA, 20 bp, synthetic construct
  source 1..20: mol_type = other DNA
accaggcgggccaagagggc

SEQ ID NO: 5538 - DNA, 20 bp, synthetic construct
  source 1..20: mol_type = other DNA
ggctcactccgcagaccgtg

SEQ ID NO: 5539 - DNA, 20 bp, synthetic construct
  source 1..20: mol_type = other DNA
ttggctcactccgcagaccg

SEQ ID NO: 5540 - DNA, 20 bp, synthetic construct
  source 1..20: mol_type = other DNA
ccgttaccccggcgtccctc

SEQ ID NO: 5541 - DNA, 20 bp, synthetic construct
  source 1..20: mol_type = other DNA
tggctcactccgcagaccgt

SEQ ID NO: 5542 - DNA, 20 bp, synthetic construct
  source 1..20: mol_type = other DNA
ggccaaggtttccgttaccc

SEQ ID NO: 5543 - DNA, 20 bp, synthetic construct
  source 1..20: mol_type = other DNA
ccttctacgaagactagaga

SEQ ID NO: 5544 - DNA, 20 bp, synthetic construct
  source 1..20: mol_type = other DNA
tccgttaccccggcgtccct

SEQ ID NO: 5545 - DNA, 20 bp, synthetic construct
  source 1..20: mol_type = other DNA
tctgcggagtgagccaatca

SEQ ID NO: 5546 - DNA, 20 bp, synthetic construct
  source 1..20: mol_type = other DNA
cgccggggtaacggaaacct

SEQ ID NO: 5547 - DNA, 20 bp, synthetic construct
  source 1..20: mol_type = other DNA
accttctacgaagactagag

SEQ ID NO: 5548 - DNA, 20 bp, synthetic construct
  source 1..20: mol_type = other DNA
ccggcgtccctcgggcaccg

SEQ ID NO: 5549 - DNA, 20 bp, synthetic construct
  source 1..20: mol_type = other DNA
ctgatggagtttcgtttccg

SEQ ID NO: 5550 - DNA, 20 bp, synthetic construct
  source 1..20: mol_type = other DNA
tcactccgcagaccgtgggg

SEQ ID NO: 5551 - DNA, 20 bp, synthetic construct
  source 1..20: mol_type = other DNA
gcggtgcccgagggacgccg

SEQ ID NO: 5552 - DNA, 20 bp, synthetic construct
  source 1..20: mol_type = other DNA
gaccgtggggcggagcctga

SEQ ID NO: 5553 - DNA, 20 bp, synthetic construct
  source 1..20: mol_type = other DNA
tcgcgaccaatccagacgcg

SEQ ID NO: 5554 - DNA, 20 bp, synthetic construct
  source 1..20: mol_type = other DNA
aatgggagcgctcctaatgg

SEQ ID NO: 5555 - DNA, 20 bp, synthetic construct
  source 1..20: mol_type = other DNA
gcgcggagtagctttccgcg

SEQ ID NO: 5556 - DNA, 20 bp, synthetic construct
  source 1..20: mol_type = other DNA
gctactccgcgcgtctggat

SEQ ID NO: 5557 - DNA, 20 bp, synthetic construct
  source 1..20: mol_type = other DNA
acgcgcggagtagctttccg

SEQ ID NO: 5558 - DNA, 20 bp, synthetic construct
  source 1..20: mol_type = other DNA
atgggagcgctcctaatggc

SEQ ID NO: 5559 - DNA, 20 bp, synthetic construct
  source 1..20: mol_type = other DNA
attggctgatgttggcgcga

SEQ ID NO: 5560 - DNA, 20 bp, synthetic construct
  source 1..20: mol_type = other DNA
caatcgctggaagtcggctc

SEQ ID NO: 5561 - DNA, 20 bp, synthetic construct
  source 1..20: mol_type = other DNA
gtctggattggtcgcgaacg

SEQ ID NO: 5562 - DNA, 20 bp, synthetic construct
  source 1..20: mol_type = other DNA
gcaatcgctggaagtcggct

SEQ ID NO: 5563 - DNA, 20 bp, synthetic construct
  source 1..20: mol_type = other DNA
ttcgcgccaacatcagccaa

SEQ ID NO: 5564 - DNA, 20 bp, synthetic construct
  source 1..20: mol_type = other DNA
gccattaggagcgctcccat

SEQ ID NO: 5565 - DNA, 20 bp, synthetic construct
  source 1..20: mol_type = other DNA
agcgcgcgcctcggtccccg

SEQ ID NO: 5566 - DNA, 20 bp, synthetic construct
  source 1..20: mol_type = other DNA
gtagctttccgcggggaccg

SEQ ID NO: 5567 - DNA, 20 bp, synthetic construct
  source 1..20: mol_type = other DNA
gctcctaatggcgggatggg

SEQ ID NO: 5568 - DNA, 20 bp, synthetic construct
  source 1..20: mol_type = other DNA
gcctagtattagccacgaga

SEQ ID NO: 5569 - DNA, 20 bp, synthetic construct
  source 1..20: mol_type = other DNA
tcgaactacagggtgcgcgc

SEQ ID NO: 5570 - DNA, 20 bp, synthetic construct
  source 1..20: mol_type = other DNA
agtattagccacgagagggc

SEQ ID NO: 5571 - DNA, 20 bp, synthetic construct
  source 1..20: mol_type = other DNA
gagtactgcagggcccccca

SEQ ID NO: 5572 - DNA, 20 bp, synthetic construct
  source 1..20: mol_type = other DNA
agcaagatcttcgaactaca

SEQ ID NO: 5573 - DNA, 20 bp, synthetic construct
  source 1..20: mol_type = other DNA
tactgcagggccccccatgg

SEQ ID NO: 5574 - DNA, 20 bp, synthetic construct
  source 1..20: mol_type = other DNA
tgcctagtattagccacgag

SEQ ID NO: 5575 - DNA, 20 bp, synthetic construct
  source 1..20: mol_type = other DNA
gctctcgcttctctccacca

SEQ ID NO: 5576 - DNA, 20 bp, synthetic construct
  source 1..20: mol_type = other DNA
cgctcttggcgagtactgca

SEQ ID NO: 5577 - DNA, 20 bp, synthetic construct
  source 1..20: mol_type = other DNA
tagtattagccacgagaggg

SEQ ID NO: 5578 - DNA, 20 bp, synthetic construct
  source 1..20: mol_type = other DNA
ctcgcttctctccaccatgg

SEQ ID NO: 5579 - DNA, 20 bp, synthetic construct
  source 1..20: mol_type = other DNA
gccctctcgtggctaatact

SEQ ID NO: 5580 - DNA, 20 bp, synthetic construct
  source 1..20: mol_type = other DNA
cgccccaccccgccctctcg

SEQ ID NO: 5581 - DNA, 20 bp, synthetic construct
  source 1..20: mol_type = other DNA
ttagccacgagagggcgggg

SEQ ID NO: 5582 - DNA, 20 bp, synthetic construct
  source 1..20: mol_type = other DNA
gtattagccacgagagggcg

SEQ ID NO: 5583 - DNA, 20 bp, synthetic construct
  source 1..20: mol_type = other DNA
gacttgaaacggaaagccgg

SEQ ID NO: 5584 - DNA, 20 bp, synthetic construct
  source 1..20: mol_type = other DNA
gagccgccgaagggtacctc

SEQ ID NO: 5585 - DNA, 20 bp, synthetic construct
  source 1..20: mol_type = other DNA
ttcaagtcccacgctggtgg

SEQ ID NO: 5586 - DNA, 20 bp, synthetic construct
  source 1..20: mol_type = other DNA
ccgagcaacctccaccagcg

SEQ ID NO: 5587 - DNA, 20 bp, synthetic construct
  source 1..20: mol_type = other DNA
tgggacttgaaacggaaagc

SEQ ID NO: 5588 - DNA, 20 bp, synthetic construct
  source 1..20: mol_type = other DNA
cgtttcaagtcccacgctgg

SEQ ID NO: 5589 - DNA, 20 bp, synthetic construct
  source 1..20: mol_type = other DNA
ctggaagacgagccgccgaa

SEQ ID NO: 5590 - DNA, 20 bp, synthetic construct
  source 1..20: mol_type = other DNA
cttccagcaaaaatactctg

SEQ ID NO: 5591 - DNA, 20 bp, synthetic construct
  source 1..20: mol_type = other DNA
ggaaagccggaggtaccctt

SEQ ID NO: 5592 - DNA, 20 bp, synthetic construct
  source 1..20: mol_type = other DNA
tctggaagacgagccgccga

SEQ ID NO: 5593 - DNA, 20 bp, synthetic construct
  source 1..20: mol_type = other DNA
cgagcaacctccaccagcgt

SEQ ID NO: 5594 - DNA, 20 bp, synthetic construct
  source 1..20: mol_type = other DNA
ggcgggcctaagagtcgaga

SEQ ID NO: 5595 - DNA, 20 bp, synthetic construct
  source 1..20: mol_type = other DNA
aggaggtatttatttgagca

SEQ ID NO: 5596 - DNA, 20 bp, synthetic construct
  source 1..20: mol_type = other DNA
caggtctggcaggaaagggc

SEQ ID NO: 5597 - DNA, 20 bp, synthetic construct
  source 1..20: mol_type = other DNA
ccaggtctggcaggaaaggg

SEQ ID NO: 5598 - DNA, 20 bp, synthetic construct
  source 1..20: mol_type = other DNA
gttgtctgaataaaaatccg

SEQ ID NO: 5599 - DNA, 20 bp, synthetic construct
  source 1..20: mol_type = other DNA
tcctgcttgcccatcaccag

SEQ ID NO: 5600 - DNA, 20 bp, synthetic construct
  source 1..20: mol_type = other DNA
gcaggacaaacattacaaag

SEQ ID NO: 5601 - DNA, 20 bp, synthetic construct
  source 1..20: mol_type = other DNA
ggggttgagaggagtatgac

SEQ ID NO: 5602 - DNA, 20 bp, synthetic construct
  source 1..20: mol_type = other DNA
aaaaatccgtggcagctccg

SEQ ID NO: 5603 - DNA, 20 bp, synthetic construct
  source 1..20: mol_type = other DNA
agtaggaggagttctctccc

SEQ ID NO: 5604 - DNA, 20 bp, synthetic construct
  source 1..20: mol_type = other DNA
tcatactcctctcaaccccc

SEQ ID NO: 5605 - DNA, 20 bp, synthetic construct
  source 1..20: mol_type = other DNA
cctgcttgcccatcaccagg

SEQ ID NO: 5606 - DNA, 20 bp, synthetic construct
  source 1..20: mol_type = other DNA
aagcaggacaaacattacaa

SEQ ID NO: 5607 - DNA, 20 bp, synthetic construct
  source 1..20: mol_type = other DNA
gtcctgcttgcccatcacca

SEQ ID NO: 5608 - DNA, 20 bp, synthetic construct
  source 1..20: mol_type = other DNA
tcctctcaaccccctggtga

SEQ ID NO: 5609 - DNA, 20 bp, synthetic construct
  source 1..20: mol_type = other DNA
cccatcaccagggggttgag

SEQ ID NO: 5610 - DNA, 20 bp, synthetic construct
  source 1..20: mol_type = other DNA
ggacaaacattacaaagggg

SEQ ID NO: 5611 - DNA, 20 bp, synthetic construct
  source 1..20: mol_type = other DNA
tgtcctgcttgcccatcacc

SEQ ID NO: 5612 - DNA, 20 bp, synthetic construct
  source 1..20: mol_type = other DNA
ttctctccccggagctgcca

SEQ ID NO: 5613 - DNA, 20 bp, synthetic construct
  source 1..20: mol_type = other DNA
ggggctccgggtgagcgctg

SEQ ID NO: 5614 - DNA, 20 bp, synthetic construct
  source 1..20: mol_type = other DNA
ggctccgggtgagcgctgcg

SEQ ID NO: 5615 - DNA, 20 bp, synthetic construct
  source 1..20: mol_type = other DNA
agggcgtccccttctctccg

SEQ ID NO: 5616 - DNA, 20 bp, synthetic construct
  source 1..20: mol_type = other DNA
acccccgccccggagagaag

SEQ ID NO: 5617 - DNA, 20 bp, synthetic construct
  source 1..20: mol_type = other DNA
tgagggcgtccccttctctc

SEQ ID NO: 5618 - DNA, 20 bp, synthetic construct
  source 1..20: mol_type = other DNA
acccggagcccctcccctgg

SEQ ID NO: 5619 - DNA, 20 bp, synthetic construct
  source 1..20: mol_type = other DNA
gacgccccgcagcgctcacc

SEQ ID NO: 5620 - DNA, 20 bp, synthetic construct
  source 1..20: mol_type = other DNA
gagggggaccggggaactga

SEQ ID NO: 5621 - DNA, 20 bp, synthetic construct
  source 1..20: mol_type = other DNA
cacccggagcccctcccctg

SEQ ID NO: 5622 - DNA, 20 bp, synthetic construct
  source 1..20: mol_type = other DNA
gcggggacccccccagggga

SEQ ID NO: 5623 - DNA, 20 bp, synthetic construct
  source 1..20: mol_type = other DNA
tcacccggagcccctcccct

SEQ ID NO: 5624 - DNA, 20 bp, synthetic construct
  source 1..20: mol_type = other DNA
ggggtccccgccagccctgg

SEQ ID NO: 5625 - DNA, 20 bp, synthetic construct
  source 1..20: mol_type = other DNA
gcgccgctccccagccccca

SEQ ID NO: 5626 - DNA, 20 bp, synthetic construct
  source 1..20: mol_type = other DNA
cccggagcccctcccctggg

SEQ ID NO: 5627 - DNA, 20 bp, synthetic construct
  source 1..20: mol_type = other DNA
ccggagcccctcccctgggg

SEQ ID NO: 5628 - DNA, 20 bp, synthetic construct
  source 1..20: mol_type = other DNA
ctgcgcagtcgcccggacaa

SEQ ID NO: 5629 - DNA, 20 bp, synthetic construct
  source 1..20: mol_type = other DNA
gcgcagcgcgggcacccccg

SEQ ID NO: 5630 - DNA, 20 bp, synthetic construct
  source 1..20: mol_type = other DNA
gtccgggcgactgcgcagcg

SEQ ID NO: 5631 - DNA, 20 bp, synthetic construct
  source 1..20: mol_type = other DNA
tccgggcgactgcgcagcgc

SEQ ID NO: 5632 - DNA, 20 bp, synthetic construct
  source 1..20: mol_type = other DNA
gcgccgcggtcactaggaga

SEQ ID NO: 5633 - DNA, 20 bp, synthetic construct
  source 1..20: mol_type = other DNA
gggaagagaagccccagcgt

SEQ ID NO: 5634 - DNA, 20 bp, synthetic construct
  source 1..20: mol_type = other DNA
tgggaagagaagccccagcg

SEQ ID NO: 5635 - DNA, 20 bp, synthetic construct
  source 1..20: mol_type = other DNA
cgggcgggctcagcaccccc

SEQ ID NO: 5636 - DNA, 20 bp, synthetic construct
  source 1..20: mol_type = other DNA
gagcccggcgcggacgcagg

SEQ ID NO: 5637 - DNA, 20 bp, synthetic construct
  source 1..20: mol_type = other DNA
cgccaggcccgcgagcgccg

SEQ ID NO: 5638 - DNA, 20 bp, synthetic construct
  source 1..20: mol_type = other DNA
caggaaggccgagcccggcg

SEQ ID NO: 5639 - DNA, 20 bp, synthetic construct
  source 1..20: mol_type = other DNA
ggacgcaggcggctccgggc

SEQ ID NO: 5640 - DNA, 20 bp, synthetic construct
  source 1..20: mol_type = other DNA
ggagccgcctgcgtccgcgc

SEQ ID NO: 5641 - DNA, 20 bp, synthetic construct
  source 1..20: mol_type = other DNA
gccgagcccggcgcggacgc

SEQ ID NO: 5642 - DNA, 20 bp, synthetic construct
  source 1..20: mol_type = other DNA
gcgcggacgcaggcggctcc

SEQ ID NO: 5643 - DNA, 20 bp, synthetic construct
  source 1..20: mol_type = other DNA
cggacccgcagcgtcgtggg

SEQ ID NO: 5644 - DNA, 20 bp, synthetic construct
  source 1..20: mol_type = other DNA
cggccctgagactagagcgg

SEQ ID NO: 5645 - DNA, 20 bp, synthetic construct
  source 1..20: mol_type = other DNA
ggagatgggcgaatagggaa

SEQ ID NO: 5646 - DNA, 20 bp, synthetic construct
  source 1..20: mol_type = other DNA
cgcacaggaccagcgagaag

SEQ ID NO: 5647 - DNA, 20 bp, synthetic construct
  source 1..20: mol_type = other DNA
gacatggagatgggcgaata

SEQ ID NO: 5648 - DNA, 20 bp, synthetic construct
  source 1..20: mol_type = other DNA
aaaccggacccgcagcgtcg

SEQ ID NO: 5649 - DNA, 20 bp, synthetic construct
  source 1..20: mol_type = other DNA
tcgccgccgctctagtctca

SEQ ID NO: 5650 - DNA, 20 bp, synthetic construct
  source 1..20: mol_type = other DNA
ttccggccctgagactagag

SEQ ID NO: 5651 - DNA, 20 bp, synthetic construct
  source 1..20: mol_type = other DNA
aggctcctcccacgacgctg

SEQ ID NO: 5652 - DNA, 20 bp, synthetic construct
  source 1..20: mol_type = other DNA
ggctcctcccacgacgctgc

SEQ ID NO: 5653 - DNA, 20 bp, synthetic construct
  source 1..20: mol_type = other DNA
cgccgctctagtctcagggc

SEQ ID NO: 5654 - DNA, 20 bp, synthetic construct
  source 1..20: mol_type = other DNA
caggaccagcgagaagagga

SEQ ID NO: 5655 - DNA, 20 bp, synthetic construct
  source 1..20: mol_type = other DNA
tccccaccaagcccaagaat

SEQ ID NO: 5656 - DNA, 20 bp, synthetic construct
  source 1..20: mol_type = other DNA
gctgccgggctgcggcgtga

SEQ ID NO: 5657 - DNA, 20 bp, synthetic construct
  source 1..20: mol_type = other DNA
cgctggtcctgtgcgcgccg

SEQ ID NO: 5658 - DNA, 20 bp, synthetic construct
  source 1..20: mol_type = other DNA
gtagggttgcccggtatcca

SEQ ID NO: 5659 - DNA, 20 bp, synthetic construct
  source 1..20: mol_type = other DNA
gctcattgggaccatcctgt

SEQ ID NO: 5660 - DNA, 20 bp, synthetic construct
  source 1..20: mol_type = other DNA
gcctgtgagaacttaaacta

SEQ ID NO: 5661 - DNA, 20 bp, synthetic construct
  source 1..20: mol_type = other DNA
ggctcattgggaccatcctg

SEQ ID NO: 5662 - DNA, 20 bp, synthetic construct
  source 1..20: mol_type = other DNA
cattgggaccatcctgtggg

SEQ ID NO: 5663 - DNA, 20 bp, synthetic construct
  source 1..20: mol_type = other DNA
gccgtagtttaagttctcac

SEQ ID NO: 5664 - DNA, 20 bp, synthetic construct
  source 1..20: mol_type = other DNA
tcttaggcccagttggagta

SEQ ID NO: 5665 - DNA, 20 bp, synthetic construct
  source 1..20: mol_type = other DNA
tgtgagaacttaaactacgg

SEQ ID NO: 5666 - DNA, 20 bp, synthetic construct
  source 1..20: mol_type = other DNA
caaacctgccccccacagga

SEQ ID NO: 5667 - DNA, 20 bp, synthetic construct
  source 1..20: mol_type = other DNA
ctcattgggaccatcctgtg

SEQ ID NO: 5668 - DNA, 20 bp, synthetic construct
  source 1..20: mol_type = other DNA
tcattgggaccatcctgtgg

SEQ ID NO: 5669 - DNA, 20 bp, synthetic construct
  source 1..20: mol_type = other DNA
cctgggcatgtgaaccccaa

SEQ ID NO: 5670 - DNA, 20 bp, synthetic construct
  source 1..20: mol_type = other DNA
ctttggggttcacatgccca

SEQ ID NO: 5671 - DNA, 20 bp, synthetic construct
  source 1..20: mol_type = other DNA
gtcttaggcccagttggagt

SEQ ID NO: 5672 - DNA, 20 bp, synthetic construct
  source 1..20: mol_type = other DNA
ccagttggagtagggttgcc

SEQ ID NO: 5673 - DNA, 20 bp, synthetic construct
  source 1..20: mol_type = other DNA
cgcggggcgcctggtaactg

SEQ ID NO: 5674 - DNA, 20 bp, synthetic construct
  source 1..20: mol_type = other DNA
gaagagtaactgctgaaagg

SEQ ID NO: 5675 - DNA, 20 bp, synthetic construct
  source 1..20: mol_type = other DNA
aaccggctcctagtgacccg

SEQ ID NO: 5676 - DNA, 20 bp, synthetic construct
  source 1..20: mol_type = other DNA
ccgcggagtcgtgaaagtgg

SEQ ID NO: 5677 - DNA, 20 bp, synthetic construct
  source 1..20: mol_type = other DNA
gcggagtcgtgaaagtggag

SEQ ID NO: 5678 - DNA, 20 bp, synthetic construct
  source 1..20: mol_type = other DNA
tggccgcggagtcgtgaaag

SEQ ID NO: 5679 - DNA, 20 bp, synthetic construct
  source 1..20: mol_type = other DNA
cccagttaccaggcgccccg

SEQ ID NO: 5680 - DNA, 20 bp, synthetic construct
  source 1..20: mol_type = other DNA
cggagtcgtgaaagtggagg

SEQ ID NO: 5681 - DNA, 20 bp, synthetic construct
  source 1..20: mol_type = other DNA
cctccactttcacgactccg

SEQ ID NO: 5682 - DNA, 20 bp, synthetic construct
  source 1..20: mol_type = other DNA
gtccctttaagggatggccg

SEQ ID NO: 5683 - DNA, 20 bp, synthetic construct
  source 1..20: mol_type = other DNA
ctgctgcggagaaaggagcg

SEQ ID NO: 5684 - DNA, 20 bp, synthetic construct
  source 1..20: mol_type = other DNA
ggctgctgcggagaaaggag

SEQ ID NO: 5685 - DNA, 20 bp, synthetic construct
  source 1..20: mol_type = other DNA
ggggctgtccctttaaggga

SEQ ID NO: 5686 - DNA, 20 bp, synthetic construct
  source 1..20: mol_type = other DNA
gctgctgcggagaaaggagc

SEQ ID NO: 5687 - DNA, 20 bp, synthetic construct
  source 1..20: mol_type = other DNA
aagtggagggggctgaggga

SEQ ID NO: 5688 - DNA, 20 bp, synthetic construct
  source 1..20: mol_type = other DNA
tgacctgtgttatcaggctc

SEQ ID NO: 5689 - DNA, 20 bp, synthetic construct
  source 1..20: mol_type = other DNA
cctgtgttatcaggctctgg

SEQ ID NO: 5690 - DNA, 20 bp, synthetic construct
  source 1..20: mol_type = other DNA
ccaccagagcctgataacac

SEQ ID NO: 5691 - DNA, 20 bp, synthetic construct
  source 1..20: mol_type = other DNA
gataacacaggtcagtgtcc

SEQ ID NO: 5692 - DNA, 20 bp, synthetic construct
  source 1..20: mol_type = other DNA
gctccactcccaggctctgg

SEQ ID NO: 5693 - DNA, 20 bp, synthetic construct
  source 1..20: mol_type = other DNA
agcatcccagctccactccc

SEQ ID NO: 5694 - DNA, 20 bp, synthetic construct
  source 1..20: mol_type = other DNA
attgccagacccccctgccc

SEQ ID NO: 5695 - DNA, 20 bp, synthetic construct
  source 1..20: mol_type = other DNA
cagagcctgggagtggagct

SEQ ID NO: 5696 - DNA, 20 bp, synthetic construct
  source 1..20: mol_type = other DNA
ggggaaagggagggatgtcc

SEQ ID NO: 5697 - DNA, 20 bp, synthetic construct
  source 1..20: mol_type = other DNA
ggagctgggatgctgggccc

SEQ ID NO: 5698 - DNA, 20 bp, synthetic construct
  source 1..20: mol_type = other DNA
ccagctccactcccaggctc

SEQ ID NO: 5699 - DNA, 20 bp, synthetic construct
  source 1..20: mol_type = other DNA
ctctggtggcctgggcaggg

SEQ ID NO: 5700 - DNA, 20 bp, synthetic construct
  source 1..20: mol_type = other DNA
agctccactcccaggctctg

SEQ ID NO: 5701 - DNA, 20 bp, synthetic construct
  source 1..20: mol_type = other DNA
ccagagcctgggagtggagc

SEQ ID NO: 5702 - DNA, 20 bp, synthetic construct
  source 1..20: mol_type = other DNA
ggctctggtggcctgggcag

SEQ ID NO: 5703 - DNA, 20 bp, synthetic construct
  source 1..20: mol_type = other DNA
ccgacgccctagcaacgcga

SEQ ID NO: 5704 - DNA, 20 bp, synthetic construct
  source 1..20: mol_type = other DNA
tgctaggttaccggaggcgc

SEQ ID NO: 5705 - DNA, 20 bp, synthetic construct
  source 1..20: mol_type = other DNA
ggagcttggagggacgctgg

SEQ ID NO: 5706 - DNA, 20 bp, synthetic construct
  source 1..20: mol_type = other DNA
gtcggttgctaggttaccgg

SEQ ID NO: 5707 - DNA, 20 bp, synthetic construct
  source 1..20: mol_type = other DNA
ggtatctgagagttcagagc

SEQ ID NO: 5708 - DNA, 20 bp, synthetic construct
  source 1..20: mol_type = other DNA
ttgctaggttaccggaggcg

SEQ ID NO: 5709 - DNA, 20 bp, synthetic construct
  source 1..20: mol_type = other DNA
ctctgaactctcagataccc

SEQ ID NO: 5710 - DNA, 20 bp, synthetic construct
  source 1..20: mol_type = other DNA
gagagttcagagcaggctgg

SEQ ID NO: 5711 - DNA, 20 bp, synthetic construct
  source 1..20: mol_type = other DNA
gagttcagagcaggctggag

SEQ ID NO: 5712 - DNA, 20 bp, synthetic construct
  source 1..20: mol_type = other DNA
tctgagagttcagagcaggc

SEQ ID NO: 5713 - DNA, 20 bp, synthetic construct
  source 1..20: mol_type = other DNA
ggcggagcttggagggacgc

SEQ ID NO: 5714 - DNA, 20 bp, synthetic construct
  source 1..20: mol_type = other DNA
agagttcagagcaggctgga

SEQ ID NO: 5715 - DNA, 20 bp, synthetic construct
  source 1..20: mol_type = other DNA
gctggaggggcggagcttgg

SEQ ID NO: 5716 - DNA, 20 bp, synthetic construct
  source 1..20: mol_type = other DNA
ctggaggggcggagcttgga

SEQ ID NO: 5717 - DNA, 20 bp, synthetic construct
  source 1..20: mol_type = other DNA
ttcagagcaggctggagggg

SEQ ID NO: 5718 - DNA, 20 bp, synthetic construct
  source 1..20: mol_type = other DNA
aggaccaggcccggacacgt

SEQ ID NO: 5719 - DNA, 20 bp, synthetic construct
  source 1..20: mol_type = other DNA
ggaccaggcccggacacgtg

SEQ ID NO: 5720 - DNA, 20 bp, synthetic construct
  source 1..20: mol_type = other DNA
aactctagccctacacctcc

SEQ ID NO: 5721 - DNA, 20 bp, synthetic construct
  source 1..20: mol_type = other DNA
tattcctggacggtccccaa

SEQ ID NO: 5722 - DNA, 20 bp, synthetic construct
  source 1..20: mol_type = other DNA
ttccggccggaagtcccggg

SEQ ID NO: 5723 - DNA, 20 bp, synthetic construct
  source 1..20: mol_type = other DNA
aaggaccaggcccggacacg

SEQ ID NO: 5724 - DNA, 20 bp, synthetic construct
  source 1..20: mol_type = other DNA
gtccgggcctggtcctttcg

SEQ ID NO: 5725 - DNA, 20 bp, synthetic construct
  source 1..20: mol_type = other DNA
actctagccctacacctccc

SEQ ID NO: 5726 - DNA, 20 bp, synthetic construct
  source 1..20: mol_type = other DNA
caaaggtccccgaaaggacc

SEQ ID NO: 5727 - DNA, 20 bp, synthetic construct
  source 1..20: mol_type = other DNA
aaacagcgaacagctctaag

SEQ ID NO: 5728 - DNA, 20 bp, synthetic construct
  source 1..20: mol_type = other DNA
ggaaacctgggcgcttcgcg

SEQ ID NO: 5729 - DNA, 20 bp, synthetic construct
  source 1..20: mol_type = other DNA
gctttgggcttattcctgga

SEQ ID NO: 5730 - DNA, 20 bp, synthetic construct
  source 1..20: mol_type = other DNA
caacccgtctttcagaaaag

SEQ ID NO: 5731 - DNA, 20 bp, synthetic construct
  source 1..20: mol_type = other DNA
gctccaggaagcagccacaa

SEQ ID NO: 5732 - DNA, 20 bp, synthetic construct
  source 1..20: mol_type = other DNA
taaggggaaaaaaatgctcc

SEQ ID NO: 5733 - DNA, 20 bp, synthetic construct
  source 1..20: mol_type = other DNA
tccctatgcaaatgaactcg

SEQ ID NO: 5734 - DNA, 20 bp, synthetic construct
  source 1..20: mol_type = other DNA
acctagctgtggcaaccacg

SEQ ID NO: 5735 - DNA, 20 bp, synthetic construct
  source 1..20: mol_type = other DNA
gtccctatgcaaatgaactc

SEQ ID NO: 5736 - DNA, 20 bp, synthetic construct
  source 1..20: mol_type = other DNA
catttgcatagggacgcgcg

SEQ ID NO: 5737 - DNA, 20 bp, synthetic construct
  source 1..20: mol_type = other DNA
gccgggcccctttccgcacg

SEQ ID NO: 5738 - DNA, 20 bp, synthetic construct
  source 1..20: mol_type = other DNA
gcccggcgtcccggccagaa

SEQ ID NO: 5739 - DNA, 20 bp, synthetic construct
  source 1..20: mol_type = other DNA
ccagaaaggcagctggtcca

SEQ ID NO: 5740 - DNA, 20 bp, synthetic construct
  source 1..20: mol_type = other DNA
aactcggggcgcgccgcgtg

SEQ ID NO: 5741 - DNA, 20 bp, synthetic construct
  source 1..20: mol_type = other DNA
gtcccggccagaaaggcagc

SEQ ID NO: 5742 - DNA, 20 bp, synthetic construct
  source 1..20: mol_type = other DNA
agggggacgcgcctcccacg

SEQ ID NO: 5743 - DNA, 20 bp, synthetic construct
  source 1..20: mol_type = other DNA
ggcgcgccgcgtgcggaaag

SEQ ID NO: 5744 - DNA, 20 bp, synthetic construct
  source 1..20: mol_type = other DNA
cgcgcgcggcgccggcgaga

SEQ ID NO: 5745 - DNA, 20 bp, synthetic construct
  source 1..20: mol_type = other DNA
cgcggcgccggcgagaggga

SEQ ID NO: 5746 - DNA, 20 bp, synthetic construct
  source 1..20: mol_type = other DNA
gcgcccgccctccctctcgc

SEQ ID NO: 5747 - DNA, 20 bp, synthetic construct
  source 1..20: mol_type = other DNA
gcgcggcgccggcgagaggg

SEQ ID NO: 5748 - DNA, 20 bp, synthetic construct
  source 1..20: mol_type = other DNA
ggaggttctgggttctcgtg

SEQ ID NO: 5749 - DNA, 20 bp, synthetic construct
  source 1..20: mol_type = other DNA
acaagaaatagcagcctctg

SEQ ID NO: 5750 - DNA, 20 bp, synthetic construct
  source 1..20: mol_type = other DNA
ggggttactcctgagctgag

SEQ ID NO: 5751 - DNA, 20 bp, synthetic construct
  source 1..20: mol_type = other DNA
gaggaggttctgggttctcg

SEQ ID NO: 5752 - DNA, 20 bp, synthetic construct
  source 1..20: mol_type = other DNA
gaagaaatgcccctctgagg

SEQ ID NO: 5753 - DNA, 20 bp, synthetic construct
  source 1..20: mol_type = other DNA
tgactggtcttcatagctcc

SEQ ID NO: 5754 - DNA, 20 bp, synthetic construct
  source 1..20: mol_type = other DNA
aacccagaacctcctcagag

SEQ ID NO: 5755 - DNA, 20 bp, synthetic construct
  source 1..20: mol_type = other DNA
cctagtcccggaccctgtcc

SEQ ID NO: 5756 - DNA, 20 bp, synthetic construct
  source 1..20: mol_type = other DNA
aggaggttctgggttctcgt

SEQ ID NO: 5757 - DNA, 20 bp, synthetic construct
  source 1..20: mol_type = other DNA
ccagtcacagagccctgtct

SEQ ID NO: 5758 - DNA, 20 bp, synthetic construct
  source 1..20: mol_type = other DNA
cagctcaggagtaaccccag

SEQ ID NO: 5759 - DNA, 20 bp, synthetic construct
  source 1..20: mol_type = other DNA
tcttcctgtcctctcagctc

SEQ ID NO: 5760 - DNA, 20 bp, synthetic construct
  source 1..20: mol_type = other DNA
tcttgtccccagcccagaca

SEQ ID NO: 5761 - DNA, 20 bp, synthetic construct
  source 1..20: mol_type = other DNA
acagagccctgtctgggctg

SEQ ID NO: 5762 - DNA, 20 bp, synthetic construct
  source 1..20: mol_type = other DNA
ggacaagaaatagcagcctc

SEQ ID NO: 5763 - DNA, 20 bp, synthetic construct
  source 1..20: mol_type = other DNA
tcagtatcgcggacggaaga

SEQ ID NO: 5764 - DNA, 20 bp, synthetic construct
  source 1..20: mol_type = other DNA
gctgcggaactgggcgtccg

SEQ ID NO: 5765 - DNA, 20 bp, synthetic construct
  source 1..20: mol_type = other DNA
acgcccagttccgcagccgc

SEQ ID NO: 5766 - DNA, 20 bp, synthetic construct
  source 1..20: mol_type = other DNA
tccgcagccgctggatgaga

SEQ ID NO: 5767 - DNA, 20 bp, synthetic construct
  source 1..20: mol_type = other DNA
gcgcccttcagtatcgcgga

SEQ ID NO: 5768 - DNA, 20 bp, synthetic construct
  source 1..20: mol_type = other DNA
cctgtccgccccgcgcaccc

SEQ ID NO: 5769 - DNA, 20 bp, synthetic construct
  source 1..20: mol_type = other DNA
tggggctgctgggaaagacg

SEQ ID NO: 5770 - DNA, 20 bp, synthetic construct
  source 1..20: mol_type = other DNA
actgggcgtccggggtgcgc

SEQ ID NO: 5771 - DNA, 20 bp, synthetic construct
  source 1..20: mol_type = other DNA
tttcccagcagccccagcgg

SEQ ID NO: 5772 - DNA, 20 bp, synthetic construct
  source 1..20: mol_type = other DNA
tcttccgtccgcgatactga

SEQ ID NO: 5773 - DNA, 20 bp, synthetic construct
  source 1..20: mol_type = other DNA
ctgggcgtccggggtgcgcg

SEQ ID NO: 5774 - DNA, 20 bp, synthetic construct
  source 1..20: mol_type = other DNA
ctgctgggaaagacgcggcg

SEQ ID NO: 5775 - DNA, 20 bp, synthetic construct
  source 1..20: mol_type = other DNA
gcgatactgaagggcgcagc

SEQ ID NO: 5776 - DNA, 20 bp, synthetic construct
  source 1..20: mol_type = other DNA
gtctttcccagcagccccag

SEQ ID NO: 5777 - DNA, 20 bp, synthetic construct
  source 1..20: mol_type = other DNA
cttccgtccgcgatactgaa

SEQ ID NO: 5778 - DNA, 20 bp, synthetic construct
  source 1..20: mol_type = other DNA
ggaaccggttaccagtgcga

SEQ ID NO: 5779 - DNA, 20 bp, synthetic construct
  source 1..20: mol_type = other DNA
agcctcccggcccttcgcac

SEQ ID NO: 5780 - DNA, 20 bp, synthetic construct
  source 1..20: mol_type = other DNA
gatgcaaaaagcatccgccc

SEQ ID NO: 5781 - DNA, 20 bp, synthetic construct
  source 1..20: mol_type = other DNA
cgcactggtaaccggttccg

SEQ ID NO: 5782 - DNA, 20 bp, synthetic construct
  source 1..20: mol_type = other DNA
tgcccgccttggcctagccc

SEQ ID NO: 5783 - DNA, 20 bp, synthetic construct
  source 1..20: mol_type = other DNA
taccagtgcgaagggccggg

SEQ ID NO: 5784 - DNA, 20 bp, synthetic construct
  source 1..20: mol_type = other DNA
ccagaggcccccttccgtcc

SEQ ID NO: 5785 - DNA, 20 bp, synthetic construct
  source 1..20: mol_type = other DNA
agaggcccccttccgtcccg

SEQ ID NO: 5786 - DNA, 20 bp, synthetic construct
  source 1..20: mol_type = other DNA
gggccggggctaggccaagg

SEQ ID NO: 5787 - DNA, 20 bp, synthetic construct
  source 1..20: mol_type = other DNA
gcctagccccggccccggga

SEQ ID NO: 5788 - DNA, 20 bp, synthetic construct
  source 1..20: mol_type = other DNA
ggcccaggctgccaccccag

SEQ ID NO: 5789 - DNA, 20 bp, synthetic construct
  source 1..20: mol_type = other DNA
gccgggaggctgggcagtcc

SEQ ID NO: 5790 - DNA, 20 bp, synthetic construct
  source 1..20: mol_type = other DNA
ccggggccggggctaggcca

SEQ ID NO: 5791 - DNA, 20 bp, synthetic construct
  source 1..20: mol_type = other DNA
acggaagggggcctctgggg

SEQ ID NO: 5792 - DNA, 20 bp, synthetic construct
  source 1..20: mol_type = other DNA
ccttggcctagccccggccc

SEQ ID NO: 5793 - DNA, 20 bp, synthetic construct
  source 1..20: mol_type = other DNA
cttgtctatcacgatagtcg

SEQ ID NO: 5794 - DNA, 20 bp, synthetic construct
  source 1..20: mol_type = other DNA
tagacaagcgagatcgacgc

SEQ ID NO: 5795 - DNA, 20 bp, synthetic construct
  source 1..20: mol_type = other DNA
tgatcccacctgctaagtga

SEQ ID NO: 5796 - DNA, 20 bp, synthetic construct
  source 1..20: mol_type = other DNA
gggatcaagctggcaagagg

SEQ ID NO: 5797 - DNA, 20 bp, synthetic construct
  source 1..20: mol_type = other DNA
taaagaggtggcaatcggca

SEQ ID NO: 5798 - DNA, 20 bp, synthetic construct
  source 1..20: mol_type = other DNA
cctttaatagccctttcccg

SEQ ID NO: 5799 - DNA, 20 bp, synthetic construct
  source 1..20: mol_type = other DNA
tgttccttcacttagcaggt

SEQ ID NO: 5800 - DNA, 20 bp, synthetic construct
  source 1..20: mol_type = other DNA
ggtgggatcaagctggcaag

SEQ ID NO: 5801 - DNA, 20 bp, synthetic construct
  source 1..20: mol_type = other DNA
gaggtggcaatcggcaaggg

SEQ ID NO: 5802 - DNA, 20 bp, synthetic construct
  source 1..20: mol_type = other DNA
aggaacagcgtttaaagagg

SEQ ID NO: 5803 - DNA, 20 bp, synthetic construct
  source 1..20: mol_type = other DNA
aaagaggtggcaatcggcaa

SEQ ID NO: 5804 - DNA, 20 bp, synthetic construct
  source 1..20: mol_type = other DNA
agaaccacagtgcgcacgcg

SEQ ID NO: 5805 - DNA, 20 bp, synthetic construct
  source 1..20: mol_type = other DNA
tgcgactgaacgcgcctgcg

SEQ ID NO: 5806 - DNA, 20 bp, synthetic construct
  source 1..20: mol_type = other DNA
tgaaggaacagcgtttaaag

SEQ ID NO: 5807 - DNA, 20 bp, synthetic construct
  source 1..20: mol_type = other DNA
gcacgcgcggggcaggaccc

SEQ ID NO: 5808 - DNA, 20 bp, synthetic construct
  source 1..20: mol_type = other DNA
agtataatcgtggtaatcgg

SEQ ID NO: 5809 - DNA, 20 bp, synthetic construct
  source 1..20: mol_type = other DNA
agcttccactagacccaaca

SEQ ID NO: 5810 - DNA, 20 bp, synthetic construct
  source 1..20: mol_type = other DNA
ctgtttatgtagtataatcg

SEQ ID NO: 5811 - DNA, 20 bp, synthetic construct
  source 1..20: mol_type = other DNA
gcgagatctctcgattctcg

SEQ ID NO: 5812 - DNA, 20 bp, synthetic construct
  source 1..20: mol_type = other DNA
taccgccatgttgggtctag

SEQ ID NO: 5813 - DNA, 20 bp, synthetic construct
  source 1..20: mol_type = other DNA
ggaagctcgcgagatgcgag

SEQ ID NO: 5814 - DNA, 20 bp, synthetic construct
  source 1..20: mol_type = other DNA
ttccactagacccaacatgg

SEQ ID NO: 5815 - DNA, 20 bp, synthetic construct
  source 1..20: mol_type = other DNA
gaagctcgcgagatgcgagt

SEQ ID NO: 5816 - DNA, 20 bp, synthetic construct
  source 1..20: mol_type = other DNA
cgagatctctcgattctcgc

SEQ ID NO: 5817 - DNA, 20 bp, synthetic construct
  source 1..20: mol_type = other DNA
cttaaaaagcacttcactaa

SEQ ID NO: 5818 - DNA, 20 bp, synthetic construct
  source 1..20: mol_type = other DNA
tgtagtataatcgtggtaat

SEQ ID NO: 5819 - DNA, 20 bp, synthetic construct
  source 1..20: mol_type = other DNA
cgattctcgcgggacctcgt

SEQ ID NO: 5820 - DNA, 20 bp, synthetic construct
  source 1..20: mol_type = other DNA
atttaaaacactgagacagt

SEQ ID NO: 5821 - DNA, 20 bp, synthetic construct
  source 1..20: mol_type = other DNA
tttctgtacaaggggaaagg

SEQ ID NO: 5822 - DNA, 20 bp, synthetic construct
  source 1..20: mol_type = other DNA
acagaaaaaaatcagtattt

SEQ ID NO: 5823 - DNA, 20 bp, synthetic construct
  source 1..20: mol_type = other DNA
gaggccccaacagctcgtgc

SEQ ID NO: 5824 - DNA, 20 bp, synthetic construct
  source 1..20: mol_type = other DNA
ttcatacaactccttgtgag

SEQ ID NO: 5825 - DNA, 20 bp, synthetic construct
  source 1..20: mol_type = other DNA
tgcgccagcacgagctgttg

SEQ ID NO: 5826 - DNA, 20 bp, synthetic construct
  source 1..20: mol_type = other DNA
gattaaactcaccactcaca

SEQ ID NO: 5827 - DNA, 20 bp, synthetic construct
  source 1..20: mol_type = other DNA
aaggtaattactaataagtg

SEQ ID NO: 5828 - DNA, 20 bp, synthetic construct
  source 1..20: mol_type = other DNA
caggatctggcagcagccaa

SEQ ID NO: 5829 - DNA, 20 bp, synthetic construct
  source 1..20: mol_type = other DNA
gtgctggcgcacacagcggg

SEQ ID NO: 5830 - DNA, 20 bp, synthetic construct
  source 1..20: mol_type = other DNA
tgtgcgccagcacgagctgt

SEQ ID NO: 5831 - DNA, 20 bp, synthetic construct
  source 1..20: mol_type = other DNA
gctcgtgctggcgcacacag

SEQ ID NO: 5832 - DNA, 20 bp, synthetic construct
  source 1..20: mol_type = other DNA
caagacaataagaggaaaag

SEQ ID NO: 5833 - DNA, 20 bp, synthetic construct
  source 1..20: mol_type = other DNA
atctggcagcagccaatggg

SEQ ID NO: 5834 - DNA, 20 bp, synthetic construct
  source 1..20: mol_type = other DNA
tcgaataacaagacaataag

SEQ ID NO: 5835 - DNA, 20 bp, synthetic construct
  source 1..20: mol_type = other DNA
gctggcgcacacagcgggag

SEQ ID NO: 5836 - DNA, 20 bp, synthetic construct
  source 1..20: mol_type = other DNA
tgctggcgcacacagcggga

SEQ ID NO: 5837 - DNA, 20 bp, synthetic construct
  source 1..20: mol_type = other DNA
gcgcacacagcgggagggga

SEQ ID NO: 5838 - DNA, 20 bp, synthetic construct
  source 1..20: mol_type = other DNA
ggcccggtcgctgtcggaag

SEQ ID NO: 5839 - DNA, 20 bp, synthetic construct
  source 1..20: mol_type = other DNA
gcacgcggcccggtcgctgt

SEQ ID NO: 5840 - DNA, 20 bp, synthetic construct
  source 1..20: mol_type = other DNA
agccgcttccgacagcgacc

SEQ ID NO: 5841 - DNA, 20 bp, synthetic construct
  source 1..20: mol_type = other DNA
gaccaacacgcgcaggcgcg

SEQ ID NO: 5842 - DNA, 20 bp, synthetic construct
  source 1..20: mol_type = other DNA
ggggtgggaccaacacgcgc

SEQ ID NO: 5843 - DNA, 20 bp, synthetic construct
  source 1..20: mol_type = other DNA
ttccctccacccgccaatcg

SEQ ID NO: 5844 - DNA, 20 bp, synthetic construct
  source 1..20: mol_type = other DNA
cacccccggcgcgagcacgc

SEQ ID NO: 5845 - DNA, 20 bp, synthetic construct
  source 1..20: mol_type = other DNA
ggcgcgtcctcctgcgcacg

SEQ ID NO: 5846 - DNA, 20 bp, synthetic construct
  source 1..20: mol_type = other DNA
ccgccctcccgcgtcacccc

SEQ ID NO: 5847 - DNA, 20 bp, synthetic construct
  source 1..20: mol_type = other DNA
gaccgggccgcgtgcgcagg

SEQ ID NO: 5848 - DNA, 20 bp, synthetic construct
  source 1..20: mol_type = other DNA
ggcctgcgtgctcgcgccgg

SEQ ID NO: 5849 - DNA, 20 bp, synthetic construct
  source 1..20: mol_type = other DNA
gcccggccccgattggcggg

SEQ ID NO: 5850 - DNA, 20 bp, synthetic construct
  source 1..20: mol_type = other DNA
gcaggcgcgcggctgggccg

SEQ ID NO: 5851 - DNA, 20 bp, synthetic construct
  source 1..20: mol_type = other DNA
cgcaggccccgaccccgccc

SEQ ID NO: 5852 - DNA, 20 bp, synthetic construct
  source 1..20: mol_type = other DNA
gattggcgggtggagggaag

SEQ ID NO: 5853 - DNA, 20 bp, synthetic construct
  source 1..20: mol_type = other DNA
tagcagtcgcgcctctaccg

SEQ ID NO: 5854 - DNA, 20 bp, synthetic construct
  source 1..20: mol_type = other DNA
agcagtcgcgcctctaccgg

SEQ ID NO: 5855 - DNA, 20 bp, synthetic construct
  source 1..20: mol_type = other DNA
ggctcactccgagttgcgag

SEQ ID NO: 5856 - DNA, 20 bp, synthetic construct
  source 1..20: mol_type = other DNA
ctatttatacttcctaacgg

SEQ ID NO: 5857 - DNA, 20 bp, synthetic construct
  source 1..20: mol_type = other DNA
gggctcactccgagttgcga

SEQ ID NO: 5858 - DNA, 20 bp, synthetic construct
  source 1..20: mol_type = other DNA
tagaggcgcgactgctaccc

SEQ ID NO: 5859 - DNA, 20 bp, synthetic construct
  source 1..20: mol_type = other DNA
ggggctcactccgagttgcg

SEQ ID NO: 5860 - DNA, 20 bp, synthetic construct
  source 1..20: mol_type = other DNA
cgcgactgctacccgggaag

SEQ ID NO: 5861 - DNA, 20 bp, synthetic construct
  source 1..20: mol_type = other DNA
gcgcgactgctacccgggaa

SEQ ID NO: 5862 - DNA, 20 bp, synthetic construct
  source 1..20: mol_type = other DNA
ggcgcgactgctacccggga

SEQ ID NO: 5863 - DNA, 20 bp, synthetic construct
  source 1..20: mol_type = other DNA
gtagaggcgcgactgctacc

SEQ ID NO: 5864 - DNA, 20 bp, synthetic construct
  source 1..20: mol_type = other DNA
gcgactgctacccgggaagg

SEQ ID NO: 5865 - DNA, 20 bp, synthetic construct
  source 1..20: mol_type = other DNA
tcactccgagttgcgagggg

SEQ ID NO: 5866 - DNA, 20 bp, synthetic construct
  source 1..20: mol_type = other DNA
ccctccccaacccccggtag

SEQ ID NO: 5867 - DNA, 20 bp, synthetic construct
  source 1..20: mol_type = other DNA
tcggagtgagcccccttccc

SEQ ID NO: 5868 - DNA, 20 bp, synthetic construct
  source 1..20: mol_type = other DNA
ccctacccgacacttgaccc

SEQ ID NO: 5869 - DNA, 20 bp, synthetic construct
  source 1..20: mol_type = other DNA
tccaaagccatgcctcatcg

SEQ ID NO: 5870 - DNA, 20 bp, synthetic construct
  source 1..20: mol_type = other DNA
accgtttccgagtctctcgg

SEQ ID NO: 5871 - DNA, 20 bp, synthetic construct
  source 1..20: mol_type = other DNA
caatcgccgagactcctgcg

SEQ ID NO: 5872 - DNA, 20 bp, synthetic construct
  source 1..20: mol_type = other DNA
tgcgcagccgcgatgaggca

SEQ ID NO: 5873 - DNA, 20 bp, synthetic construct
  source 1..20: mol_type = other DNA
ccggcagtgtgaaccccgct

SEQ ID NO: 5874 - DNA, 20 bp, synthetic construct
  source 1..20: mol_type = other DNA
aaagtaaaaaggagagctgt

SEQ ID NO: 5875 - DNA, 20 bp, synthetic construct
  source 1..20: mol_type = other DNA
cagcggggttcacactgccg

SEQ ID NO: 5876 - DNA, 20 bp, synthetic construct
  source 1..20: mol_type = other DNA
ggctttggacgctcccagcg

SEQ ID NO: 5877 - DNA, 20 bp, synthetic construct
  source 1..20: mol_type = other DNA
ccggggtcaagtgtcgggta

SEQ ID NO: 5878 - DNA, 20 bp, synthetic construct
  source 1..20: mol_type = other DNA
atggctttggacgctcccag

SEQ ID NO: 5879 - DNA, 20 bp, synthetic construct
  source 1..20: mol_type = other DNA
taaagtaaaaaggagagctg

SEQ ID NO: 5880 - DNA, 20 bp, synthetic construct
  source 1..20: mol_type = other DNA
gccggggtcaagtgtcgggt

SEQ ID NO: 5881 - DNA, 20 bp, synthetic construct
  source 1..20: mol_type = other DNA
aagtaaaaaggagagctgtg

SEQ ID NO: 5882 - DNA, 20 bp, synthetic construct
  source 1..20: mol_type = other DNA
acactgccggggtcaagtgt

SEQ ID NO: 5883 - DNA, 20 bp, synthetic construct
  source 1..20: mol_type = other DNA
aagatggcctccgcgagagg

SEQ ID NO: 5884 - DNA, 20 bp, synthetic construct
  source 1..20: mol_type = other DNA
gagtttccggaagcaaaaca

SEQ ID NO: 5885 - DNA, 20 bp, synthetic construct
  source 1..20: mol_type = other DNA
tttgtaccgaacaaagatgg

SEQ ID NO: 5886 - DNA, 20 bp, synthetic construct
  source 1..20: mol_type = other DNA
tccggttcctcctctcgcgg

SEQ ID NO: 5887 - DNA, 20 bp, synthetic construct
  source 1..20: mol_type = other DNA
caaaaacacgtggccaacag

SEQ ID NO: 5888 - DNA, 20 bp, synthetic construct
  source 1..20: mol_type = other DNA
cgtccataaacaaaaacacg

SEQ ID NO: 5889 - DNA, 20 bp, synthetic construct
  source 1..20: mol_type = other DNA
agggctgccctgaagaaaga

SEQ ID NO: 5890 - DNA, 20 bp, synthetic construct
  source 1..20: mol_type = other DNA
agaaagatggcctccgcgag

SEQ ID NO: 5891 - DNA, 20 bp, synthetic construct
  source 1..20: mol_type = other DNA
agccctcctcccgacgccgg

SEQ ID NO: 5892 - DNA, 20 bp, synthetic construct
  source 1..20: mol_type = other DNA
aaacacgtggccaacagggg

SEQ ID NO: 5893 - DNA, 20 bp, synthetic construct
  source 1..20: mol_type = other DNA
ggcagccctcctcccgacgc

SEQ ID NO: 5894 - DNA, 20 bp, synthetic construct
  source 1..20: mol_type = other DNA
gcttccggttcctcctctcg

SEQ ID NO: 5895 - DNA, 20 bp, synthetic construct
  source 1..20: mol_type = other DNA
aagatggcggccgccggcgt

SEQ ID NO: 5896 - DNA, 20 bp, synthetic construct
  source 1..20: mol_type = other DNA
gcctccgcgagaggaggaac

SEQ ID NO: 5897 - DNA, 20 bp, synthetic construct
  source 1..20: mol_type = other DNA
ggccgccggcgtcgggagga

SEQ ID NO: 5898 - DNA, 20 bp, synthetic construct
  source 1..20: mol_type = other DNA
ccgtcaaggagcgagcgacg

SEQ ID NO: 5899 - DNA, 20 bp, synthetic construct
  source 1..20: mol_type = other DNA
ttacacctcagacccagtgt

SEQ ID NO: 5900 - DNA, 20 bp, synthetic construct
  source 1..20: mol_type = other DNA
gaaaccctgagataggacat

SEQ ID NO: 5901 - DNA, 20 bp, synthetic construct
  source 1..20: mol_type = other DNA
cgtcaaggagcgagcgacgt

SEQ ID NO: 5902 - DNA, 20 bp, synthetic construct
  source 1..20: mol_type = other DNA
cctgagataggacattggcc

SEQ ID NO: 5903 - DNA, 20 bp, synthetic construct
  source 1..20: mol_type = other DNA
gctgaccgacactgggtctg

SEQ ID NO: 5904 - DNA, 20 bp, synthetic construct
  source 1..20: mol_type = other DNA
tcgttacccgagcccagcgc

SEQ ID NO: 5905 - DNA, 20 bp, synthetic construct
  source 1..20: mol_type = other DNA
cttgacggctgaccgacact

SEQ ID NO: 5906 - DNA, 20 bp, synthetic construct
  source 1..20: mol_type = other DNA
cgggccaatgtcctatctca

SEQ ID NO: 5907 - DNA, 20 bp, synthetic construct
  source 1..20: mol_type = other DNA
gacgtgggaaaccctgagat

SEQ ID NO: 5908 - DNA, 20 bp, synthetic construct
  source 1..20: mol_type = other DNA
gctgggctcgggtaacgatg

SEQ ID NO: 5909 - DNA, 20 bp, synthetic construct
  source 1..20: mol_type = other DNA
cgttacccgagcccagcgcc

SEQ ID NO: 5910 - DNA, 20 bp, synthetic construct
  source 1..20: mol_type = other DNA
tgggctcgggtaacgatgcg

SEQ ID NO: 5911 - DNA, 20 bp, synthetic construct
  source 1..20: mol_type = other DNA
ctgggctcgggtaacgatgc

SEQ ID NO: 5912 - DNA, 20 bp, synthetic construct
  source 1..20: mol_type = other DNA
gctcgggtaacgatgcgggg

SEQ ID NO: 5913 - DNA, 20 bp, synthetic construct
  source 1..20: mol_type = other DNA
tggactggaatgcacttcag

SEQ ID NO: 5914 - DNA, 20 bp, synthetic construct
  source 1..20: mol_type = other DNA
cctctccattaattcctccc

SEQ ID NO: 5915 - DNA, 20 bp, synthetic construct
  source 1..20: mol_type = other DNA
cagggaggaattaatggaga

SEQ ID NO: 5916 - DNA, 20 bp, synthetic construct
  source 1..20: mol_type = other DNA
caggatcttggcctcactcc

SEQ ID NO: 5917 - DNA, 20 bp, synthetic construct
  source 1..20: mol_type = other DNA
gccaagatcctgaacatgcc

SEQ ID NO: 5918 - DNA, 20 bp, synthetic construct
  source 1..20: mol_type = other DNA
ccagggaggaattaatggag

SEQ ID NO: 5919 - DNA, 20 bp, synthetic construct
  source 1..20: mol_type = other DNA
ccaagatcctgaacatgcca

SEQ ID NO: 5920 - DNA, 20 bp, synthetic construct
  source 1..20: mol_type = other DNA
ggaggaattaatggagaggg

SEQ ID NO: 5921 - DNA, 20 bp, synthetic construct
  source 1..20: mol_type = other DNA
gcacttcaggggcagttgga

SEQ ID NO: 5922 - DNA, 20 bp, synthetic construct
  source 1..20: mol_type = other DNA
agatcctgaacatgccaggg

SEQ ID NO: 5923 - DNA, 20 bp, synthetic construct
  source 1..20: mol_type = other DNA
cttggcctcactccaggctc

SEQ ID NO: 5924 - DNA, 20 bp, synthetic construct
  source 1..20: mol_type = other DNA
tatgaactgagcatgctcag

SEQ ID NO: 5925 - DNA, 20 bp, synthetic construct
  source 1..20: mol_type = other DNA
acagagaaaaagcctgagcc

SEQ ID NO: 5926 - DNA, 20 bp, synthetic construct
  source 1..20: mol_type = other DNA
aaaagcctgagcctggagtg

SEQ ID NO: 5927 - DNA, 20 bp, synthetic construct
  source 1..20: mol_type = other DNA
taatggagagggaggtagag

SEQ ID NO: 5928 - DNA, 20 bp, synthetic construct
  source 1..20: mol_type = other DNA
tggtcttgggcgtagctacg

SEQ ID NO: 5929 - DNA, 20 bp, synthetic construct
  source 1..20: mol_type = other DNA
ccggacttaagcaacaagcg

SEQ ID NO: 5930 - DNA, 20 bp, synthetic construct
  source 1..20: mol_type = other DNA
gccaatcatcgctcacgtcg

SEQ ID NO: 5931 - DNA, 20 bp, synthetic construct
  source 1..20: mol_type = other DNA
caatcatcgctcacgtcgag

SEQ ID NO: 5932 - DNA, 20 bp, synthetic construct
  source 1..20: mol_type = other DNA
gggcgtagctacgaggtggt

SEQ ID NO: 5933 - DNA, 20 bp, synthetic construct
  source 1..20: mol_type = other DNA
gcaagtcccctgccactgag

SEQ ID NO: 5934 - DNA, 20 bp, synthetic construct
  source 1..20: mol_type = other DNA
ccaatcatcgctcacgtcga

SEQ ID NO: 5935 - DNA, 20 bp, synthetic construct
  source 1..20: mol_type = other DNA
tgagcgatgattggcgatga

SEQ ID NO: 5936 - DNA, 20 bp, synthetic construct
  source 1..20: mol_type = other DNA
gtagctacgaggtggttggt

SEQ ID NO: 5937 - DNA, 20 bp, synthetic construct
  source 1..20: mol_type = other DNA
tcgccttctcggccactcag

SEQ ID NO: 5938 - DNA, 20 bp, synthetic construct
  source 1..20: mol_type = other DNA
tcttgggcgtagctacgagg

SEQ ID NO: 5939 - DNA, 20 bp, synthetic construct
  source 1..20: mol_type = other DNA
acgcttgttgcttaagtccg

SEQ ID NO: 5940 - DNA, 20 bp, synthetic construct
  source 1..20: mol_type = other DNA
gcaggggacttgctacttcc

SEQ ID NO: 5941 - DNA, 20 bp, synthetic construct
  source 1..20: mol_type = other DNA
gaggtggttggtgggctcca

SEQ ID NO: 5942 - DNA, 20 bp, synthetic construct
  source 1..20: mol_type = other DNA
gctcacgtcgaggggcacgc

SEQ ID NO: 5943 - DNA, 20 bp, synthetic construct
  source 1..20: mol_type = other DNA
gagccctcaagggttaaagg

SEQ ID NO: 5944 - DNA, 20 bp, synthetic construct
  source 1..20: mol_type = other DNA
gttaaaggcggccgcaggtg

SEQ ID NO: 5945 - DNA, 20 bp, synthetic construct
  source 1..20: mol_type = other DNA
tgggggaggaaagataacta

SEQ ID NO: 5946 - DNA, 20 bp, synthetic construct
  source 1..20: mol_type = other DNA
cggtccagccgagccctcaa

SEQ ID NO: 5947 - DNA, 20 bp, synthetic construct
  source 1..20: mol_type = other DNA
caagggttaaaggcggccgc

SEQ ID NO: 5948 - DNA, 20 bp, synthetic construct
  source 1..20: mol_type = other DNA
aaggcggccgcaggtgaggt

SEQ ID NO: 5949 - DNA, 20 bp, synthetic construct
  source 1..20: mol_type = other DNA
aggggaccagggaggagcga

SEQ ID NO: 5950 - DNA, 20 bp, synthetic construct
  source 1..20: mol_type = other DNA
gctggaccggagcccagcca

SEQ ID NO: 5951 - DNA, 20 bp, synthetic construct
  source 1..20: mol_type = other DNA
tcccgcccaccccctcctcg

SEQ ID NO: 5952 - DNA, 20 bp, synthetic construct
  source 1..20: mol_type = other DNA
gcccagccagggccgcgagg

SEQ ID NO: 5953 - DNA, 20 bp, synthetic construct
  source 1..20: mol_type = other DNA
cagccagggccgcgaggagg

SEQ ID NO: 5954 - DNA, 20 bp, synthetic construct
  source 1..20: mol_type = other DNA
ggccccgcccacctcacctg

SEQ ID NO: 5955 - DNA, 20 bp, synthetic construct
  source 1..20: mol_type = other DNA
ggagcccagccagggccgcg

SEQ ID NO: 5956 - DNA, 20 bp, synthetic construct
  source 1..20: mol_type = other DNA
ccagccagggccgcgaggag

SEQ ID NO: 5957 - DNA, 20 bp, synthetic construct
  source 1..20: mol_type = other DNA
ccagggaggagcgagggagc

SEQ ID NO: 5958 - DNA, 20 bp, synthetic construct
  source 1..20: mol_type = other DNA
actctgactaacgattggcc

SEQ ID NO: 5959 - DNA, 20 bp, synthetic construct
  source 1..20: mol_type = other DNA
gcggcccactcttaacgcgc

SEQ ID NO: 5960 - DNA, 20 bp, synthetic construct
  source 1..20: mol_type = other DNA
tgactaacgattggcccgga

SEQ ID NO: 5961 - DNA, 20 bp, synthetic construct
  source 1..20: mol_type = other DNA
ggccaatcgttagtcagagt

SEQ ID NO: 5962 - DNA, 20 bp, synthetic construct
  source 1..20: mol_type = other DNA
gctcaagaagggaaagacgc

SEQ ID NO: 5963 - DNA, 20 bp, synthetic construct
  source 1..20: mol_type = other DNA
gtgggacaacctggacaggt

SEQ ID NO: 5964 - DNA, 20 bp, synthetic construct
  source 1..20: mol_type = other DNA
gagtcgcttcctcctcgggt

SEQ ID NO: 5965 - DNA, 20 bp, synthetic construct
  source 1..20: mol_type = other DNA
attggcccggaaggaaaaag

SEQ ID NO: 5966 - DNA, 20 bp, synthetic construct
  source 1..20: mol_type = other DNA
acccgaggaggaagcgactc

SEQ ID NO: 5967 - DNA, 20 bp, synthetic construct
  source 1..20: mol_type = other DNA
gacccgaggaggaagcgact

SEQ ID NO: 5968 - DNA, 20 bp, synthetic construct
  source 1..20: mol_type = other DNA
ggcgctcctccgacccgagg

SEQ ID NO: 5969 - DNA, 20 bp, synthetic construct
  source 1..20: mol_type = other DNA
gagggcgctcctccgacccg

SEQ ID NO: 5970 - DNA, 20 bp, synthetic construct
  source 1..20: mol_type = other DNA
gcccggaaggaaaaaggggt

SEQ ID NO: 5971 - DNA, 20 bp, synthetic construct
  source 1..20: mol_type = other DNA
tcgcttcctcctcgggtcgg

SEQ ID NO: 5972 - DNA, 20 bp, synthetic construct
  source 1..20: mol_type = other DNA
cgactcgggccaacctgtcc

SEQ ID NO: 5973 - DNA, 20 bp, synthetic construct
  source 1..20: mol_type = other DNA
gcagaatacggaaagcggga

SEQ ID NO: 5974 - DNA, 20 bp, synthetic construct
  source 1..20: mol_type = other DNA
taactacagccaacatgcca

SEQ ID NO: 5975 - DNA, 20 bp, synthetic construct
  source 1..20: mol_type = other DNA
tggggcagaatacggaaagc

SEQ ID NO: 5976 - DNA, 20 bp, synthetic construct
  source 1..20: mol_type = other DNA
ataactacagccaacatgcc

SEQ ID NO: 5977 - DNA, 20 bp, synthetic construct
  source 1..20: mol_type = other DNA
agcgcatctggcattatccg

SEQ ID NO: 5978 - DNA, 20 bp, synthetic construct
  source 1..20: mol_type = other DNA
gtattctgccccagatgccc

SEQ ID NO: 5979 - DNA, 20 bp, synthetic construct
  source 1..20: mol_type = other DNA
ccaacatgccagggcatctg

SEQ ID NO: 5980 - DNA, 20 bp, synthetic construct
  source 1..20: mol_type = other DNA
ccccagatgccctggcatgt

SEQ ID NO: 5981 - DNA, 20 bp, synthetic construct
  source 1..20: mol_type = other DNA
atgttggctgtagttatccc

SEQ ID NO: 5982 - DNA, 20 bp, synthetic construct
  source 1..20: mol_type = other DNA
ggaacattctgtgcgatcgc

SEQ ID NO: 5983 - DNA, 20 bp, synthetic construct
  source 1..20: mol_type = other DNA
gattacaaaatacttgggct

SEQ ID NO: 5984 - DNA, 20 bp, synthetic construct
  source 1..20: mol_type = other DNA
tgtatgtgtgcgaaaggcag

SEQ ID NO: 5985 - DNA, 20 bp, synthetic construct
  source 1..20: mol_type = other DNA
tacttgggctgggagttgcg

SEQ ID NO: 5986 - DNA, 20 bp, synthetic construct
  source 1..20: mol_type = other DNA
gtgcgaaaggcagtgggtaa

SEQ ID NO: 5987 - DNA, 20 bp, synthetic construct
  source 1..20: mol_type = other DNA
gtatgtgtgcgaaaggcagt

SEQ ID NO: 5988 - DNA, 20 bp, synthetic construct
  source 1..20: mol_type = other DNA
tcggaggggcggtaatacgt

SEQ ID NO: 5989 - DNA, 20 bp, synthetic construct
  source 1..20: mol_type = other DNA
accctcgcgagatttcggag

SEQ ID NO: 5990 - DNA, 20 bp, synthetic construct
  source 1..20: mol_type = other DNA
gaggggcggtaatacgtggg

SEQ ID NO: 5991 - DNA, 20 bp, synthetic construct
  source 1..20: mol_type = other DNA
ttcggaggggcggtaatacg

SEQ ID NO: 5992 - DNA, 20 bp, synthetic construct
  source 1..20: mol_type = other DNA
gggccggaagtagccgagaa

SEQ ID NO: 5993 - DNA, 20 bp, synthetic construct
  source 1..20: mol_type = other DNA
taccctcgcgagatttcgga

SEQ ID NO: 5994 - DNA, 20 bp, synthetic construct
  source 1..20: mol_type = other DNA
ggggtgagcctcccgaaggg

SEQ ID NO: 5995 - DNA, 20 bp, synthetic construct
  source 1..20: mol_type = other DNA
tgagggcgttcggtgagggc

SEQ ID NO: 5996 - DNA, 20 bp, synthetic construct
  source 1..20: mol_type = other DNA
tggcgggggcggttccagag

SEQ ID NO: 5997 - DNA, 20 bp, synthetic construct
  source 1..20: mol_type = other DNA
ccggaagtagccgagaaggg

SEQ ID NO: 5998 - DNA, 20 bp, synthetic construct
  source 1..20: mol_type = other DNA
cctagactcctcccttcggg

SEQ ID NO: 5999 - DNA, 20 bp, synthetic construct
  source 1..20: mol_type = other DNA
ggagggggtgagcctcccga

SEQ ID NO: 6000 - DNA, 20 bp, synthetic construct
  source 1..20: mol_type = other DNA
aggtcctagactcctccctt

SEQ ID NO: 6001 - DNA, 20 bp, synthetic construct
  source 1..20: mol_type = other DNA
ctaccctcgcgagatttcgg

SEQ ID NO: 6002 - DNA, 20 bp, synthetic construct
  source 1..20: mol_type = other DNA
aaaacggcgcaagcgcgttg

SEQ ID NO: 6003 - DNA, 20 bp, synthetic construct
  source 1..20: mol_type = other DNA
ggcctcgctacggaacgcgt

SEQ ID NO: 6004 - DNA, 20 bp, synthetic construct
  source 1..20: mol_type = other DNA
ggagccgggaccgctcagcg

SEQ ID NO: 6005 - DNA, 20 bp, synthetic construct
  source 1..20: mol_type = other DNA
cgtgcacttgaggacgcgag

SEQ ID NO: 6006 - DNA, 20 bp, synthetic construct
  source 1..20: mol_type = other DNA
ggctccgctcgcgccctgtg

SEQ ID NO: 6007 - DNA, 20 bp, synthetic construct
  source 1..20: mol_type = other DNA
ggcacgggtcccaaaggctc

SEQ ID NO: 6008 - DNA, 20 bp, synthetic construct
  source 1..20: mol_type = other DNA
tggaccccacagggcgcgag

SEQ ID NO: 6009 - DNA, 20 bp, synthetic construct
  source 1..20: mol_type = other DNA
gtgcacttgaggacgcgagc

SEQ ID NO: 6010 - DNA, 20 bp, synthetic construct
  source 1..20: mol_type = other DNA
gcggagccgggaccgctcag

SEQ ID NO: 6011 - DNA, 20 bp, synthetic construct
  source 1..20: mol_type = other DNA
gagcgcgccgtggaccccac

SEQ ID NO: 6012 - DNA, 20 bp, synthetic construct
  source 1..20: mol_type = other DNA
ccgtagcgaggccggcgagt

SEQ ID NO: 6013 - DNA, 20 bp, synthetic construct
  source 1..20: mol_type = other DNA
ggctctggaagagcgcgccg

SEQ ID NO: 6014 - DNA, 20 bp, synthetic construct
  source 1..20: mol_type = other DNA
cgagcgggcacgggtcccaa

SEQ ID NO: 6015 - DNA, 20 bp, synthetic construct
  source 1..20: mol_type = other DNA
gccgccaaaataccgcgcgc

SEQ ID NO: 6016 - DNA, 20 bp, synthetic construct
  source 1..20: mol_type = other DNA
ttgaggacgcgagcgggcac

SEQ ID NO: 6017 - DNA, 20 bp, synthetic construct
  source 1..20: mol_type = other DNA
agcgcgccgtggaccccaca

SEQ ID NO: 6018 - DNA, 20 bp, synthetic construct
  source 1..20: mol_type = other DNA
agatcccgaatacaggacgc

SEQ ID NO: 6019 - DNA, 20 bp, synthetic construct
  source 1..20: mol_type = other DNA
aatacaggacgctggatcag

SEQ ID NO: 6020 - DNA, 20 bp, synthetic construct
  source 1..20: mol_type = other DNA
ccgccagacttcacaaacgg

SEQ ID NO: 6021 - DNA, 20 bp, synthetic construct
  source 1..20: mol_type = other DNA
ccagtgcgcatgctcagcag

SEQ ID NO: 6022 - DNA, 20 bp, synthetic construct
  source 1..20: mol_type = other DNA
cccttaagtgagatgcagca

SEQ ID NO: 6023 - DNA, 20 bp, synthetic construct
  source 1..20: mol_type = other DNA
gctttagacttggcttgagg

SEQ ID NO: 6024 - DNA, 20 bp, synthetic construct
  source 1..20: mol_type = other DNA
tcaagccaagtctaaagcac

SEQ ID NO: 6025 - DNA, 20 bp, synthetic construct
  source 1..20: mol_type = other DNA
gttctctcttcacaggcacg

SEQ ID NO: 6026 - DNA, 20 bp, synthetic construct
  source 1..20: mol_type = other DNA
caagccaagtctaaagcaca

SEQ ID NO: 6027 - DNA, 20 bp, synthetic construct
  source 1..20: mol_type = other DNA
tgagatgcagcaaggcagag

SEQ ID NO: 6028 - DNA, 20 bp, synthetic construct
  source 1..20: mol_type = other DNA
gcagagcggcctttgggaga

SEQ ID NO: 6029 - DNA, 20 bp, synthetic construct
  source 1..20: mol_type = other DNA
gccccattgccctctcccaa

SEQ ID NO: 6030 - DNA, 20 bp, synthetic construct
  source 1..20: mol_type = other DNA
gcctttgggagagggcaatg

SEQ ID NO: 6031 - DNA, 20 bp, synthetic construct
  source 1..20: mol_type = other DNA
cccctgctgagcatgcgcac

SEQ ID NO: 6032 - DNA, 20 bp, synthetic construct
  source 1..20: mol_type = other DNA
acgtgcctgtgaagagagaa

SEQ ID NO: 6033 - DNA, 20 bp, synthetic construct
  source 1..20: mol_type = other DNA
atacgtggagaagctacagt

SEQ ID NO: 6034 - DNA, 20 bp, synthetic construct
  source 1..20: mol_type = other DNA
aggctactgctgctactacg

SEQ ID NO: 6035 - DNA, 20 bp, synthetic construct
  source 1..20: mol_type = other DNA
gcaataggcggcttagaggg

SEQ ID NO: 6036 - DNA, 20 bp, synthetic construct
  source 1..20: mol_type = other DNA
ggagaagctacagtaggtat

SEQ ID NO: 6037 - DNA, 20 bp, synthetic construct
  source 1..20: mol_type = other DNA
caataggcggcttagaggga

SEQ ID NO: 6038 - DNA, 20 bp, synthetic construct
  source 1..20: mol_type = other DNA
tcccaatccggacgtaatcg

SEQ ID NO: 6039 - DNA, 20 bp, synthetic construct
  source 1..20: mol_type = other DNA
aataggcggcttagagggag

SEQ ID NO: 6040 - DNA, 20 bp, synthetic construct
  source 1..20: mol_type = other DNA
ttcagtgttacgcttccgga

SEQ ID NO: 6041 - DNA, 20 bp, synthetic construct
  source 1..20: mol_type = other DNA
cggcacgtgacgtgagaaag

SEQ ID NO: 6042 - DNA, 20 bp, synthetic construct
  source 1..20: mol_type = other DNA
ggacccgacacccattgcgc

SEQ ID NO: 6043 - DNA, 20 bp, synthetic construct
  source 1..20: mol_type = other DNA
agtgttacgcttccggaagg

SEQ ID NO: 6044 - DNA, 20 bp, synthetic construct
  source 1..20: mol_type = other DNA
cactgaacgtgcctgcgcaa

SEQ ID NO: 6045 - DNA, 20 bp, synthetic construct
  source 1..20: mol_type = other DNA
tgttacgcttccggaaggag

SEQ ID NO: 6046 - DNA, 20 bp, synthetic construct
  source 1..20: mol_type = other DNA
gtgttacgcttccggaagga

SEQ ID NO: 6047 - DNA, 20 bp, synthetic construct
  source 1..20: mol_type = other DNA
acgtccggattgggaaaaag

SEQ ID NO: 6048 - DNA, 20 bp, synthetic construct
  source 1..20: mol_type = other DNA
ggctccaacaggtgacaccg

SEQ ID NO: 6049 - DNA, 20 bp, synthetic construct
  source 1..20: mol_type = other DNA
catgtgcacggctacgcggg

SEQ ID NO: 6050 - DNA, 20 bp, synthetic construct
  source 1..20: mol_type = other DNA
gcgcgcaggcgcgttcgggt

SEQ ID NO: 6051 - DNA, 20 bp, synthetic construct
  source 1..20: mol_type = other DNA
tccaccggccggctccaatg

SEQ ID NO: 6052 - DNA, 20 bp, synthetic construct
  source 1..20: mol_type = other DNA
ggggctccaacaggtgacac

SEQ ID NO: 6053 - DNA, 20 bp, synthetic construct
  source 1..20: mol_type = other DNA
gcgcatgtgcacggctacgc

SEQ ID NO: 6054 - DNA, 20 bp, synthetic construct
  source 1..20: mol_type = other DNA
gcgacctcattggagccggc

SEQ ID NO: 6055 - DNA, 20 bp, synthetic construct
  source 1..20: mol_type = other DNA
gggctccaacaggtgacacc

SEQ ID NO: 6056 - DNA, 20 bp, synthetic construct
  source 1..20: mol_type = other DNA
aactctgggcggttccgccg

SEQ ID NO: 6057 - DNA, 20 bp, synthetic construct
  source 1..20: mol_type = other DNA
gtagcgcaggacaggaactc

SEQ ID NO: 6058 - DNA, 20 bp, synthetic construct
  source 1..20: mol_type = other DNA
tagcgcaggacaggaactct

SEQ ID NO: 6059 - DNA, 20 bp, synthetic construct
  source 1..20: mol_type = other DNA
gggcggggttcgcagcgcgc

SEQ ID NO: 6060 - DNA, 20 bp, synthetic construct
  source 1..20: mol_type = other DNA
acctcattggagccggccgg

SEQ ID NO: 6061 - DNA, 20 bp, synthetic construct
  source 1..20: mol_type = other DNA
cgcaggacaggaactctggg

SEQ ID NO: 6062 - DNA, 20 bp, synthetic construct
  source 1..20: mol_type = other DNA
gagccggccggtggacgccc

SEQ ID NO: 6063 - DNA, 20 bp, synthetic construct
  source 1..20: mol_type = other DNA
gtcccttcagagcgtccccg

SEQ ID NO: 6064 - DNA, 20 bp, synthetic construct
  source 1..20: mol_type = other DNA
ggatattgctgtgacaccgc

SEQ ID NO: 6065 - DNA, 20 bp, synthetic construct
  source 1..20: mol_type = other DNA
gatattgctgtgacaccgcg

SEQ ID NO: 6066 - DNA, 20 bp, synthetic construct
  source 1..20: mol_type = other DNA
gtagaaactaggagggacta

SEQ ID NO: 6067 - DNA, 20 bp, synthetic construct
  source 1..20: mol_type = other DNA
gactagggagagtctgcaag

SEQ ID NO: 6068 - DNA, 20 bp, synthetic construct
  source 1..20: mol_type = other DNA
gggactagggagagtctgca

SEQ ID NO: 6069 - DNA, 20 bp, synthetic construct
  source 1..20: mol_type = other DNA
gtaggggccctcggaaagaa

SEQ ID NO: 6070 - DNA, 20 bp, synthetic construct
  source 1..20: mol_type = other DNA
ggactagggagagtctgcaa

SEQ ID NO: 6071 - DNA, 20 bp, synthetic construct
  source 1..20: mol_type = other DNA
gcagcgcgcagagggaggga

SEQ ID NO: 6072 - DNA, 20 bp, synthetic construct
  source 1..20: mol_type = other DNA
gccagcagcgcgcagaggga

SEQ ID NO: 6073 - DNA, 20 bp, synthetic construct
  source 1..20: mol_type = other DNA
acactgccagcagcgcgcag

SEQ ID NO: 6074 - DNA, 20 bp, synthetic construct
  source 1..20: mol_type = other DNA
agcgcgcagagggagggatg

SEQ ID NO: 6075 - DNA, 20 bp, synthetic construct
  source 1..20: mol_type = other DNA
gcgcgcagagggagggatgg

SEQ ID NO: 6076 - DNA, 20 bp, synthetic construct
  source 1..20: mol_type = other DNA
tgccagcagcgcgcagaggg

SEQ ID NO: 6077 - DNA, 20 bp, synthetic construct
  source 1..20: mol_type = other DNA
tccctccctctgcgcgctgc

SEQ ID NO: 6078 - DNA, 20 bp, synthetic construct
  source 1..20: mol_type = other DNA
tgcacttacctcctctccca

SEQ ID NO: 6079 - DNA, 20 bp, synthetic construct
  source 1..20: mol_type = other DNA
ggagaggaggtaagtgcagg

SEQ ID NO: 6080 - DNA, 20 bp, synthetic construct
  source 1..20: mol_type = other DNA
ggggttgggaaatgtacctg

SEQ ID NO: 6081 - DNA, 20 bp, synthetic construct
  source 1..20: mol_type = other DNA
aggcccctgtcacagcccca

SEQ ID NO: 6082 - DNA, 20 bp, synthetic construct
  source 1..20: mol_type = other DNA
tgggagaggaggtaagtgca

SEQ ID NO: 6083 - DNA, 20 bp, synthetic construct
  source 1..20: mol_type = other DNA
gggagaggaggtaagtgcag

SEQ ID NO: 6084 - DNA, 20 bp, synthetic construct
  source 1..20: mol_type = other DNA
aagccctggggctgtgacag

SEQ ID NO: 6085 - DNA, 20 bp, synthetic construct
  source 1..20: mol_type = other DNA
gggttgggaaatgtacctgg

SEQ ID NO: 6086 - DNA, 20 bp, synthetic construct
  source 1..20: mol_type = other DNA
aaggcccctgtcacagcccc

SEQ ID NO: 6087 - DNA, 20 bp, synthetic construct
  source 1..20: mol_type = other DNA
tgtgacaggggccttgggag

SEQ ID NO: 6088 - DNA, 20 bp, synthetic construct
  source 1..20: mol_type = other DNA
ttgggagaggaggtaagtgc

SEQ ID NO: 6089 - DNA, 20 bp, synthetic construct
  source 1..20: mol_type = other DNA
gacaggggccttgggagagg

SEQ ID NO: 6090 - DNA, 20 bp, synthetic construct
  source 1..20: mol_type = other DNA
gaagccctggggctgtgaca

SEQ ID NO: 6091 - DNA, 20 bp, synthetic construct
  source 1..20: mol_type = other DNA
ccagggcttccccctccccc

SEQ ID NO: 6092 - DNA, 20 bp, synthetic construct
  source 1..20: mol_type = other DNA
tgggggagggggaagccctg

SEQ ID NO: 6093 - DNA, 20 bp, synthetic construct
  source 1..20: mol_type = other DNA
cacacaagagatgaacaatg

SEQ ID NO: 6094 - DNA, 20 bp, synthetic construct
  source 1..20: mol_type = other DNA
ggcctgtagcattgtcacaa

SEQ ID NO: 6095 - DNA, 20 bp, synthetic construct
  source 1..20: mol_type = other DNA
tgaccctcaggtgagaccag

SEQ ID NO: 6096 - DNA, 20 bp, synthetic construct
  source 1..20: mol_type = other DNA
tatatgtattgagaaagagg

SEQ ID NO: 6097 - DNA, 20 bp, synthetic construct
  source 1..20: mol_type = other DNA
tcacctgagggtcactgatg

SEQ ID NO: 6098 - DNA, 20 bp, synthetic construct
  source 1..20: mol_type = other DNA
gggcctgtagcattgtcaca

SEQ ID NO: 6099 - DNA, 20 bp, synthetic construct
  source 1..20: mol_type = other DNA
gaccctcaggtgagaccagg

SEQ ID NO: 6100 - DNA, 20 bp, synthetic construct
  source 1..20: mol_type = other DNA
atatgtattgagaaagaggt

SEQ ID NO: 6101 - DNA, 20 bp, synthetic construct
  source 1..20: mol_type = other DNA
gcttatatgtattgagaaag

SEQ ID NO: 6102 - DNA, 20 bp, synthetic construct
  source 1..20: mol_type = other DNA
gtgaccctcaggtgagacca

SEQ ID NO: 6103 - DNA, 20 bp, synthetic construct
  source 1..20: mol_type = other DNA
ggtccccatcagtgaccctc

SEQ ID NO: 6104 - DNA, 20 bp, synthetic construct
  source 1..20: mol_type = other DNA
tgctgaaacactaggccccc

SEQ ID NO: 6105 - DNA, 20 bp, synthetic construct
  source 1..20: mol_type = other DNA
agtgaccctcaggtgagacc

SEQ ID NO: 6106 - DNA, 20 bp, synthetic construct
  source 1..20: mol_type = other DNA
aggccccctggtctcacctg

SEQ ID NO: 6107 - DNA, 20 bp, synthetic construct
  source 1..20: mol_type = other DNA
ggccccctggtctcacctga

SEQ ID NO: 6108 - DNA, 20 bp, synthetic construct
  source 1..20: mol_type = other DNA
acagacaacaaggccacccg

SEQ ID NO: 6109 - DNA, 20 bp, synthetic construct
  source 1..20: mol_type = other DNA
cagacaacaaggccacccgg

SEQ ID NO: 6110 - DNA, 20 bp, synthetic construct
  source 1..20: mol_type = other DNA
gccccggaagcactcgccgc

SEQ ID NO: 6111 - DNA, 20 bp, synthetic construct
  source 1..20: mol_type = other DNA
tgcggcgagtgcttccgggg

SEQ ID NO: 6112 - DNA, 20 bp, synthetic construct
  source 1..20: mol_type = other DNA
aacagacaacaaggccaccc

SEQ ID NO: 6113 - DNA, 20 bp, synthetic construct
  source 1..20: mol_type = other DNA
aaacagacaacaaggccacc

SEQ ID NO: 6114 - DNA, 20 bp, synthetic construct
  source 1..20: mol_type = other DNA
cggccaggaaacagacaaca

SEQ ID NO: 6115 - DNA, 20 bp, synthetic construct
  source 1..20: mol_type = other DNA
cgtcctcttcaggcaccccc

SEQ ID NO: 6116 - DNA, 20 bp, synthetic construct
  source 1..20: mol_type = other DNA
gagccagcaaaacacaaact

SEQ ID NO: 6117 - DNA, 20 bp, synthetic construct
  source 1..20: mol_type = other DNA
gcgtttcaggaaaaaccgag

SEQ ID NO: 6118 - DNA, 20 bp, synthetic construct
  source 1..20: mol_type = other DNA
tgcctgaagaggacgctgcg

SEQ ID NO: 6119 - DNA, 20 bp, synthetic construct
  source 1..20: mol_type = other DNA
gcgtcctcttcaggcacccc

SEQ ID NO: 6120 - DNA, 20 bp, synthetic construct
  source 1..20: mol_type = other DNA
ctgaagaggacgctgcgagg

SEQ ID NO: 6121 - DNA, 20 bp, synthetic construct
  source 1..20: mol_type = other DNA
ccacccgggggtgcctgaag

SEQ ID NO: 6122 - DNA, 20 bp, synthetic construct
  source 1..20: mol_type = other DNA
cgtttcaggaaaaaccgagc

SEQ ID NO: 6123 - DNA, 20 bp, synthetic construct
  source 1..20: mol_type = other DNA
gccagggagtgatgattgcg

SEQ ID NO: 6124 - DNA, 20 bp, synthetic construct
  source 1..20: mol_type = other DNA
gccacgcaatcatcactccc

SEQ ID NO: 6125 - DNA, 20 bp, synthetic construct
  source 1..20: mol_type = other DNA
agtgatgattgcgtggctga

SEQ ID NO: 6126 - DNA, 20 bp, synthetic construct
  source 1..20: mol_type = other DNA
tcactccctggcccagtgcg

SEQ ID NO: 6127 - DNA, 20 bp, synthetic construct
  source 1..20: mol_type = other DNA
tgattgcgtggctgacggct

SEQ ID NO: 6128 - DNA, 20 bp, synthetic construct
  source 1..20: mol_type = other DNA
caaagttccgaatagggatg

SEQ ID NO: 6129 - DNA, 20 bp, synthetic construct
  source 1..20: mol_type = other DNA
gaaaacaggaagagggttgg

SEQ ID NO: 6130 - DNA, 20 bp, synthetic construct
  source 1..20: mol_type = other DNA
acagccaagaaaacaggaag

SEQ ID NO: 6131 - DNA, 20 bp, synthetic construct
  source 1..20: mol_type = other DNA
tccgggcccttgccagacgg

SEQ ID NO: 6132 - DNA, 20 bp, synthetic construct
  source 1..20: mol_type = other DNA
cagccaagaaaacaggaaga

SEQ ID NO: 6133 - DNA, 20 bp, synthetic construct
  source 1..20: mol_type = other DNA
caagaaaacaggaagagggt

SEQ ID NO: 6134 - DNA, 20 bp, synthetic construct
  source 1..20: mol_type = other DNA
gttccgcccccgtctggcaa

SEQ ID NO: 6135 - DNA, 20 bp, synthetic construct
  source 1..20: mol_type = other DNA
ggattctgggtacaacctgc

SEQ ID NO: 6136 - DNA, 20 bp, synthetic construct
  source 1..20: mol_type = other DNA
gcaggttgtacccagaatcc

SEQ ID NO: 6137 - DNA, 20 bp, synthetic construct
  source 1..20: mol_type = other DNA
gaactggcgcaagcgcacgc

SEQ ID NO: 6138 - DNA, 20 bp, synthetic construct
  source 1..20: mol_type = other DNA
taatgctttgtgtacaacag

SEQ ID NO: 6139 - DNA, 20 bp, synthetic construct
  source 1..20: mol_type = other DNA
aggagccggagccttccagg

SEQ ID NO: 6140 - DNA, 20 bp, synthetic construct
  source 1..20: mol_type = other DNA
ggtccggtcacgtgttggcg

SEQ ID NO: 6141 - DNA, 20 bp, synthetic construct
  source 1..20: mol_type = other DNA
aatggcctgaaacaacccca

SEQ ID NO: 6142 - DNA, 20 bp, synthetic construct
  source 1..20: mol_type = other DNA
accccaaggctccttccacc

SEQ ID NO: 6143 - DNA, 20 bp, synthetic construct
  source 1..20: mol_type = other DNA
gaaggctccggctcctgttg

SEQ ID NO: 6144 - DNA, 20 bp, synthetic construct
  source 1..20: mol_type = other DNA
gtgtacaacaggggacaact

SEQ ID NO: 6145 - DNA, 20 bp, synthetic construct
  source 1..20: mol_type = other DNA
gctccggctcctgttggggt

SEQ ID NO: 6146 - DNA, 20 bp, synthetic construct
  source 1..20: mol_type = other DNA
gcgaggacgtcagaggaggc

SEQ ID NO: 6147 - DNA, 20 bp, synthetic construct
  source 1..20: mol_type = other DNA
gtgggggtccggtcacgtgt

SEQ ID NO: 6148 - DNA, 20 bp, synthetic construct
  source 1..20: mol_type = other DNA
caaggctccttccacctgga

SEQ ID NO: 6149 - DNA, 20 bp, synthetic construct
  source 1..20: mol_type = other DNA
acccccaccccaacaggagc

SEQ ID NO: 6150 - DNA, 20 bp, synthetic construct
  source 1..20: mol_type = other DNA
tccaggtggaaggagccttg

SEQ ID NO: 6151 - DNA, 20 bp, synthetic construct
  source 1..20: mol_type = other DNA
gccggagccttccaggtgga

SEQ ID NO: 6152 - DNA, 20 bp, synthetic construct
  source 1..20: mol_type = other DNA
ggctccggctcctgttgggg

SEQ ID NO: 6153 - DNA, 20 bp, synthetic construct
  source 1..20: mol_type = other DNA
cctggccttctccgaagtgg

SEQ ID NO: 6154 - DNA, 20 bp, synthetic construct
  source 1..20: mol_type = other DNA
cgtcaccaccacttcggaga

SEQ ID NO: 6155 - DNA, 20 bp, synthetic construct
  source 1..20: mol_type = other DNA
gggcctggccttctccgaag

SEQ ID NO: 6156 - DNA, 20 bp, synthetic construct
  source 1..20: mol_type = other DNA
ggggagccgcgaagacggcg

SEQ ID NO: 6157 - DNA, 20 bp, synthetic construct
  source 1..20: mol_type = other DNA
tgtagtccccgccgtcttcg

SEQ ID NO: 6158 - DNA, 20 bp, synthetic construct
  source 1..20: mol_type = other DNA
gcgcggcgtcaccaccactt

SEQ ID NO: 6159 - DNA, 20 bp, synthetic construct
  source 1..20: mol_type = other DNA
gctcccaggatgccgagcac

SEQ ID NO: 6160 - DNA, 20 bp, synthetic construct
  source 1..20: mol_type = other DNA
gaagtggtggtgacgccgcg

SEQ ID NO: 6161 - DNA, 20 bp, synthetic construct
  source 1..20: mol_type = other DNA
gccaggcccctcttcccccg

SEQ ID NO: 6162 - DNA, 20 bp, synthetic construct
  source 1..20: mol_type = other DNA
gaggccccggcacgcgcccg

SEQ ID NO: 6163 - DNA, 20 bp, synthetic construct
  source 1..20: mol_type = other DNA
tccccgcgcccgcaccgccg

SEQ ID NO: 6164 - DNA, 20 bp, synthetic construct
  source 1..20: mol_type = other DNA
aggccccggcacgcgcccgg

SEQ ID NO: 6165 - DNA, 20 bp, synthetic construct
  source 1..20: mol_type = other DNA
ggcgcgtgccggggcctcgg

SEQ ID NO: 6166 - DNA, 20 bp, synthetic construct
  source 1..20: mol_type = other DNA
ccaggcccctcttcccccgc

SEQ ID NO: 6167 - DNA, 20 bp, synthetic construct
  source 1..20: mol_type = other DNA
gcctcggcggtgcgggcgcg

SEQ ID NO: 6168 - DNA, 20 bp, synthetic construct
  source 1..20: mol_type = other DNA
gccccaatccgaaagccgtg

SEQ ID NO: 6169 - DNA, 20 bp, synthetic construct
  source 1..20: mol_type = other DNA
gaaacctgttacacgattgg

SEQ ID NO: 6170 - DNA, 20 bp, synthetic construct
  source 1..20: mol_type = other DNA
attgaggattggttcagggt

SEQ ID NO: 6171 - DNA, 20 bp, synthetic construct
  source 1..20: mol_type = other DNA
ctcctccccagccttagccg

SEQ ID NO: 6172 - DNA, 20 bp, synthetic construct
  source 1..20: mol_type = other DNA
accaatcctcaatcggactc

SEQ ID NO: 6173 - DNA, 20 bp, synthetic construct
  source 1..20: mol_type = other DNA
gcgccccaatccgaaagccg

SEQ ID NO: 6174 - DNA, 20 bp, synthetic construct
  source 1..20: mol_type = other DNA
ggcggaagacttcaggcaag

SEQ ID NO: 6175 - DNA, 20 bp, synthetic construct
  source 1..20: mol_type = other DNA
gattgaggattggttcaggg

SEQ ID NO: 6176 - DNA, 20 bp, synthetic construct
  source 1..20: mol_type = other DNA
ttggggcgccatcttgacga

SEQ ID NO: 6177 - DNA, 20 bp, synthetic construct
  source 1..20: mol_type = other DNA
aagaggccagagtccgattg

SEQ ID NO: 6178 - DNA, 20 bp, synthetic construct
  source 1..20: mol_type = other DNA
ggcgccatcttgacgatggg

SEQ ID NO: 6179 - DNA, 20 bp, synthetic construct
  source 1..20: mol_type = other DNA
gcggggccgcggctaaggct

SEQ ID NO: 6180 - DNA, 20 bp, synthetic construct
  source 1..20: mol_type = other DNA
tggggcgccatcttgacgat

SEQ ID NO: 6181 - DNA, 20 bp, synthetic construct
  source 1..20: mol_type = other DNA
tagccgcggccccgcccccc

SEQ ID NO: 6182 - DNA, 20 bp, synthetic construct
  source 1..20: mol_type = other DNA
cggggccgcggctaaggctg

SEQ ID NO: 6183 - DNA, 20 bp, synthetic construct
  source 1..20: mol_type = other DNA
gcagcgtctgacggcccgag

SEQ ID NO: 6184 - DNA, 20 bp, synthetic construct
  source 1..20: mol_type = other DNA
gccctgcgttcaggcctccg

SEQ ID NO: 6185 - DNA, 20 bp, synthetic construct
  source 1..20: mol_type = other DNA
gcgggcggcgctgcacacca

SEQ ID NO: 6186 - DNA, 20 bp, synthetic construct
  source 1..20: mol_type = other DNA
gccgcggaggcctgaacgca

SEQ ID NO: 6187 - DNA, 20 bp, synthetic construct
  source 1..20: mol_type = other DNA
cgccgcggaggcctgaacgc

SEQ ID NO: 6188 - DNA, 20 bp, synthetic construct
  source 1..20: mol_type = other DNA
gcggaggcctgaacgcaggg

SEQ ID NO: 6189 - DNA, 20 bp, synthetic construct
  source 1..20: mol_type = other DNA
ggcactcaggcagcgcggag

SEQ ID NO: 6190 - DNA, 20 bp, synthetic construct
  source 1..20: mol_type = other DNA
ctgcgttcaggcctccgcgg

SEQ ID NO: 6191 - DNA, 20 bp, synthetic construct
  source 1..20: mol_type = other DNA
gagcgggtggtcctggcgcg

SEQ ID NO: 6192 - DNA, 20 bp, synthetic construct
  source 1..20: mol_type = other DNA
cagcgtctgacggcccgagc

SEQ ID NO: 6193 - DNA, 20 bp, synthetic construct
  source 1..20: mol_type = other DNA
cgcgccaggaccacccgctc

SEQ ID NO: 6194 - DNA, 20 bp, synthetic construct
  source 1..20: mol_type = other DNA
ctggtgtgcagcgccgcccg

SEQ ID NO: 6195 - DNA, 20 bp, synthetic construct
  source 1..20: mol_type = other DNA
gggcgggacgcttggctccg

SEQ ID NO: 6196 - DNA, 20 bp, synthetic construct
  source 1..20: mol_type = other DNA
cggaggcctgaacgcagggc

SEQ ID NO: 6197 - DNA, 20 bp, synthetic construct
  source 1..20: mol_type = other DNA
caccagggccctccgtgccc

SEQ ID NO: 6198 - DNA, 20 bp, synthetic construct
  source 1..20: mol_type = other DNA
gaagtaaagcggctccgtga

SEQ ID NO: 6199 - DNA, 20 bp, synthetic construct
  source 1..20: mol_type = other DNA
gcagcgcagatctgatgcgg

SEQ ID NO: 6200 - DNA, 20 bp, synthetic construct
  source 1..20: mol_type = other DNA
accgcatcagatctgcgctg

SEQ ID NO: 6201 - DNA, 20 bp, synthetic construct
  source 1..20: mol_type = other DNA
gccgcagcgcagatctgatg

SEQ ID NO: 6202 - DNA, 20 bp, synthetic construct
  source 1..20: mol_type = other DNA
cgcgcaccgccgctccgtca

SEQ ID NO: 6203 - DNA, 20 bp, synthetic construct
  source 1..20: mol_type = other DNA
tcagatctgcgctgcggcag

SEQ ID NO: 6204 - DNA, 20 bp, synthetic construct
  source 1..20: mol_type = other DNA
gcggctccgtgacggagcgg

SEQ ID NO: 6205 - DNA, 20 bp, synthetic construct
  source 1..20: mol_type = other DNA
cgtcgcacccggaagtaaag

SEQ ID NO: 6206 - DNA, 20 bp, synthetic construct
  source 1..20: mol_type = other DNA
tgacggagcggcggtgcgcg

SEQ ID NO: 6207 - DNA, 20 bp, synthetic construct
  source 1..20: mol_type = other DNA
aaagcggctccgtgacggag

SEQ ID NO: 6208 - DNA, 20 bp, synthetic construct
  source 1..20: mol_type = other DNA
gggtgggtagacgtcgcacc

SEQ ID NO: 6209 - DNA, 20 bp, synthetic construct
  source 1..20: mol_type = other DNA
ggtgcgacgtctacccaccc

SEQ ID NO: 6210 - DNA, 20 bp, synthetic construct
  source 1..20: mol_type = other DNA
gtggtttcctccaaagaaag

SEQ ID NO: 6211 - DNA, 20 bp, synthetic construct
  source 1..20: mol_type = other DNA
gcctgcgcagcgcgactcag

SEQ ID NO: 6212 - DNA, 20 bp, synthetic construct
  source 1..20: mol_type = other DNA
ggctcgtcccaggaagtcct

SEQ ID NO: 6213 - DNA, 20 bp, synthetic construct
  source 1..20: mol_type = other DNA
ggatgtgaagtgtaacaaga

SEQ ID NO: 6214 - DNA, 20 bp, synthetic construct
  source 1..20: mol_type = other DNA
ccccgcagcccgctccacag

SEQ ID NO: 6215 - DNA, 20 bp, synthetic construct
  source 1..20: mol_type = other DNA
ggagcggaccactgtggagc

SEQ ID NO: 6216 - DNA, 20 bp, synthetic construct
  source 1..20: mol_type = other DNA
ggggacaacatgggcctgtg

SEQ ID NO: 6217 - DNA, 20 bp, synthetic construct
  source 1..20: mol_type = other DNA
ttgttacacttcacatcctg

SEQ ID NO: 6218 - DNA, 20 bp, synthetic construct
  source 1..20: mol_type = other DNA
cggagcggaccactgtggag

SEQ ID NO: 6219 - DNA, 20 bp, synthetic construct
  source 1..20: mol_type = other DNA
gaagtgtaacaagagggcca

SEQ ID NO: 6220 - DNA, 20 bp, synthetic construct
  source 1..20: mol_type = other DNA
cacgtgacaaccaaccggag

SEQ ID NO: 6221 - DNA, 20 bp, synthetic construct
  source 1..20: mol_type = other DNA
gaggtggtgggggacaacat

SEQ ID NO: 6222 - DNA, 20 bp, synthetic construct
  source 1..20: mol_type = other DNA
gctcagaccagcgctgcctc

SEQ ID NO: 6223 - DNA, 20 bp, synthetic construct
  source 1..20: mol_type = other DNA
actgtggagcgggctgcggg

SEQ ID NO: 6224 - DNA, 20 bp, synthetic construct
  source 1..20: mol_type = other DNA
aagtgtaacaagagggccag

SEQ ID NO: 6225 - DNA, 20 bp, synthetic construct
  source 1..20: mol_type = other DNA
cactgtggagcgggctgcgg

SEQ ID NO: 6226 - DNA, 20 bp, synthetic construct
  source 1..20: mol_type = other DNA
ccactgtggagcgggctgcg

SEQ ID NO: 6227 - DNA, 20 bp, synthetic construct
  source 1..20: mol_type = other DNA
ggaggtggtgggggacaaca

SEQ ID NO: 6228 - DNA, 20 bp, synthetic construct
  source 1..20: mol_type = other DNA
ccggccgcttggccaatgcg

SEQ ID NO: 6229 - DNA, 20 bp, synthetic construct
  source 1..20: mol_type = other DNA
tgtcccgcgcattggccaag

SEQ ID NO: 6230 - DNA, 20 bp, synthetic construct
  source 1..20: mol_type = other DNA
gcgggacaggccagcgcacg

SEQ ID NO: 6231 - DNA, 20 bp, synthetic construct
  source 1..20: mol_type = other DNA
ggccaccggccggaagtgca

SEQ ID NO: 6232 - DNA, 20 bp, synthetic construct
  source 1..20: mol_type = other DNA
gcacggggcgggccaatgcg

SEQ ID NO: 6233 - DNA, 20 bp, synthetic construct
  source 1..20: mol_type = other DNA
atgcgcggagccggtcagcg

SEQ ID NO: 6234 - DNA, 20 bp, synthetic construct
  source 1..20: mol_type = other DNA
gcattggccaagcggccggg

SEQ ID NO: 6235 - DNA, 20 bp, synthetic construct
  source 1..20: mol_type = other DNA
gcgtctgtgggctcgcggga

SEQ ID NO: 6236 - DNA, 20 bp, synthetic construct
  source 1..20: mol_type = other DNA
tgcgcggagccggtcagcgc

SEQ ID NO: 6237 - DNA, 20 bp, synthetic construct
  source 1..20: mol_type = other DNA
gaggggggctgtcgcgccga

SEQ ID NO: 6238 - DNA, 20 bp, synthetic construct
  source 1..20: mol_type = other DNA
ggacaggccagcgcacgggg

SEQ ID NO: 6239 - DNA, 20 bp, synthetic construct
  source 1..20: mol_type = other DNA
cgcgggacaggccagcgcac

SEQ ID NO: 6240 - DNA, 20 bp, synthetic construct
  source 1..20: mol_type = other DNA
tcagcgcggggcgggcctgg

SEQ ID NO: 6241 - DNA, 20 bp, synthetic construct
  source 1..20: mol_type = other DNA
gcagcgcccgccccgccccc

SEQ ID NO: 6242 - DNA, 20 bp, synthetic construct
  source 1..20: mol_type = other DNA
gcgcggagccggtcagcgcg

SEQ ID NO: 6243 - DNA, 20 bp, synthetic construct
  source 1..20: mol_type = other DNA
gtgagaatatagccctccgg

SEQ ID NO: 6244 - DNA, 20 bp, synthetic construct
  source 1..20: mol_type = other DNA
ggagacattctgttagccgc

SEQ ID NO: 6245 - DNA, 20 bp, synthetic construct
  source 1..20: mol_type = other DNA
ggagtgagaatatagccctc

SEQ ID NO: 6246 - DNA, 20 bp, synthetic construct
  source 1..20: mol_type = other DNA
gcgcgagttgcgtccaccgg

SEQ ID NO: 6247 - DNA, 20 bp, synthetic construct
  source 1..20: mol_type = other DNA
gcgctgagcacgcttccgta

SEQ ID NO: 6248 - DNA, 20 bp, synthetic construct
  source 1..20: mol_type = other DNA
ggctaacagaatgtctccag

SEQ ID NO: 6249 - DNA, 20 bp, synthetic construct
  source 1..20: mol_type = other DNA
gtggacgcaactcgcgcctg

SEQ ID NO: 6250 - DNA, 20 bp, synthetic construct
  source 1..20: mol_type = other DNA
gcggctaacagaatgtctcc

SEQ ID NO: 6251 - DNA, 20 bp, synthetic construct
  source 1..20: mol_type = other DNA
cgcgagttgcgtccaccgga

SEQ ID NO: 6252 - DNA, 20 bp, synthetic construct
  source 1..20: mol_type = other DNA
caggcgcgagttgcgtccac

SEQ ID NO: 6253 - DNA, 20 bp, synthetic construct
  source 1..20: mol_type = other DNA
gctctgcgtccgttccgccc

SEQ ID NO: 6254 - DNA, 20 bp, synthetic construct
  source 1..20: mol_type = other DNA
gtgagccggaagggcctggg

SEQ ID NO: 6255 - DNA, 20 bp, synthetic construct
  source 1..20: mol_type = other DNA
taacagaatgtctccagggg

SEQ ID NO: 6256 - DNA, 20 bp, synthetic construct
  source 1..20: mol_type = other DNA
acagaatgtctccaggggag

SEQ ID NO: 6257 - DNA, 20 bp, synthetic construct
  source 1..20: mol_type = other DNA
cggacgcagagcccctcccc

SEQ ID NO: 6258 - DNA, 20 bp, synthetic construct
  source 1..20: mol_type = other DNA
cgcagggccctcccaacccg

SEQ ID NO: 6259 - DNA, 20 bp, synthetic construct
  source 1..20: mol_type = other DNA
tgacactggagctgcgccgg

SEQ ID NO: 6260 - DNA, 20 bp, synthetic construct
  source 1..20: mol_type = other DNA
cgagtgtcctcagtcttagg

SEQ ID NO: 6261 - DNA, 20 bp, synthetic construct
  source 1..20: mol_type = other DNA
gctgggccggtcgagctgtg

SEQ ID NO: 6262 - DNA, 20 bp, synthetic construct
  source 1..20: mol_type = other DNA
tgctgacactggagctgcgc

SEQ ID NO: 6263 - DNA, 20 bp, synthetic construct
  source 1..20: mol_type = other DNA
ctgcggagcctgacccagcg

SEQ ID NO: 6264 - DNA, 20 bp, synthetic construct
  source 1..20: mol_type = other DNA
cgttagtccccgggttggga

SEQ ID NO: 6265 - DNA, 20 bp, synthetic construct
  source 1..20: mol_type = other DNA
acgctgggtcaggctccgca

SEQ ID NO: 6266 - DNA, 20 bp, synthetic construct
  source 1..20: mol_type = other DNA
ggtgccctccgggacgcagg

SEQ ID NO: 6267 - DNA, 20 bp, synthetic construct
  source 1..20: mol_type = other DNA
agcgccccctgcgtcccgga

SEQ ID NO: 6268 - DNA, 20 bp, synthetic construct
  source 1..20: mol_type = other DNA
aactcggcctcctaagactg

SEQ ID NO: 6269 - DNA, 20 bp, synthetic construct
  source 1..20: mol_type = other DNA
cggtgccctccgggacgcag

SEQ ID NO: 6270 - DNA, 20 bp, synthetic construct
  source 1..20: mol_type = other DNA
gcggtgccctccgggacgca

SEQ ID NO: 6271 - DNA, 20 bp, synthetic construct
  source 1..20: mol_type = other DNA
ctgcagcgccccctgcgtcc

SEQ ID NO: 6272 - DNA, 20 bp, synthetic construct
  source 1..20: mol_type = other DNA
cagcgccccctgcgtcccgg

SEQ ID NO: 6273 - DNA, 20 bp, synthetic construct
  source 1..20: mol_type = other DNA
gttacagctaaattcccgca

SEQ ID NO: 6274 - DNA, 20 bp, synthetic construct
  source 1..20: mol_type = other DNA
gggattaaagaattcgtcca

SEQ ID NO: 6275 - DNA, 20 bp, synthetic construct
  source 1..20: mol_type = other DNA
agttacagctaaattcccgc

SEQ ID NO: 6276 - DNA, 20 bp, synthetic construct
  source 1..20: mol_type = other DNA
gaggagctgaagaaaggcat

SEQ ID NO: 6277 - DNA, 20 bp, synthetic construct
  source 1..20: mol_type = other DNA
aagcgaatatgtcaggctca

SEQ ID NO: 6278 - DNA, 20 bp, synthetic construct
  source 1..20: mol_type = other DNA
gccgcccaagcgaatatgtc

SEQ ID NO: 6279 - DNA, 20 bp, synthetic construct
  source 1..20: mol_type = other DNA
acccctccagactctccctg

SEQ ID NO: 6280 - DNA, 20 bp, synthetic construct
  source 1..20: mol_type = other DNA
ggaatttagctgtaacttgg

SEQ ID NO: 6281 - DNA, 20 bp, synthetic construct
  source 1..20: mol_type = other DNA
tggacgaattctttaatccc

SEQ ID NO: 6282 - DNA, 20 bp, synthetic construct
  source 1..20: mol_type = other DNA
tcccgcagggagagtctgga

SEQ ID NO: 6283 - DNA, 20 bp, synthetic construct
  source 1..20: mol_type = other DNA
gagagtctggaggggtgcga

SEQ ID NO: 6284 - DNA, 20 bp, synthetic construct
  source 1..20: mol_type = other DNA
gggtgcgaaggtcgaggcca

SEQ ID NO: 6285 - DNA, 20 bp, synthetic construct
  source 1..20: mol_type = other DNA
ttcccgcagggagagtctgg

SEQ ID NO: 6286 - DNA, 20 bp, synthetic construct
  source 1..20: mol_type = other DNA
agggattaaagaattcgtcc

SEQ ID NO: 6287 - DNA, 20 bp, synthetic construct
  source 1..20: mol_type = other DNA
cccctccagactctccctgc

SEQ ID NO: 6288 - DNA, 20 bp, synthetic construct
  source 1..20: mol_type = other DNA
agcacggcgtagctccgaga

SEQ ID NO: 6289 - DNA, 20 bp, synthetic construct
  source 1..20: mol_type = other DNA
tagcacggcgtagctccgag

SEQ ID NO: 6290 - DNA, 20 bp, synthetic construct
  source 1..20: mol_type = other DNA
ggagctacgccgtgctacgg

SEQ ID NO: 6291 - DNA, 20 bp, synthetic construct
  source 1..20: mol_type = other DNA
gcactgacaactaactgtgt

SEQ ID NO: 6292 - DNA, 20 bp, synthetic construct
  source 1..20: mol_type = other DNA
acagttagttgtcagtgcgg

SEQ ID NO: 6293 - DNA, 20 bp, synthetic construct
  source 1..20: mol_type = other DNA
ctcggagctacgccgtgcta

SEQ ID NO: 6294 - DNA, 20 bp, synthetic construct
  source 1..20: mol_type = other DNA
gggagcccgggcgctctcgg

SEQ ID NO: 6295 - DNA, 20 bp, synthetic construct
  source 1..20: mol_type = other DNA
gcggtggtgaaggccacacc

SEQ ID NO: 6296 - DNA, 20 bp, synthetic construct
  source 1..20: mol_type = other DNA
gtgggacacagcttcatcgc

SEQ ID NO: 6297 - DNA, 20 bp, synthetic construct
  source 1..20: mol_type = other DNA
tgggacacagcttcatcgct

SEQ ID NO: 6298 - DNA, 20 bp, synthetic construct
  source 1..20: mol_type = other DNA
cacacagttagttgtcagtg

SEQ ID NO: 6299 - DNA, 20 bp, synthetic construct
  source 1..20: mol_type = other DNA
gtgaaggccacacctggcag

SEQ ID NO: 6300 - DNA, 20 bp, synthetic construct
  source 1..20: mol_type = other DNA
ctcctccaccgagagcgccc

SEQ ID NO: 6301 - DNA, 20 bp, synthetic construct
  source 1..20: mol_type = other DNA
actgtagccactgccaggtg

SEQ ID NO: 6302 - DNA, 20 bp, synthetic construct
  source 1..20: mol_type = other DNA
cgtgctacggcggcaggaga

SEQ ID NO: 6303 - DNA, 20 bp, synthetic construct
  source 1..20: mol_type = other DNA
gggaactaagcagatcacaa

SEQ ID NO: 6304 - DNA, 20 bp, synthetic construct
  source 1..20: mol_type = other DNA
tctattgaattcttaaaggg

SEQ ID NO: 6305 - DNA, 20 bp, synthetic construct
  source 1..20: mol_type = other DNA
ggaaagcgggtcaaggcgta

SEQ ID NO: 6306 - DNA, 20 bp, synthetic construct
  source 1..20: mol_type = other DNA
aggaaagcgggtcaaggcgt

SEQ ID NO: 6307 - DNA, 20 bp, synthetic construct
  source 1..20: mol_type = other DNA
aggtaaagacaaggtcaggt

SEQ ID NO: 6308 - DNA, 20 bp, synthetic construct
  source 1..20: mol_type = other DNA
ggacccccagcccacgccca

SEQ ID NO: 6309 - DNA, 20 bp, synthetic construct
  source 1..20: mol_type = other DNA
aggacccccagcccacgccc

SEQ ID NO: 6310 - DNA, 20 bp, synthetic construct
  source 1..20: mol_type = other DNA
agcgggtcaaggcgtagggc

SEQ ID NO: 6311 - DNA, 20 bp, synthetic construct
  source 1..20: mol_type = other DNA
gccaagctgtccgccaacct

SEQ ID NO: 6312 - DNA, 20 bp, synthetic construct
  source 1..20: mol_type = other DNA
cccggaggagccgaggttgg

SEQ ID NO: 6313 - DNA, 20 bp, synthetic construct
  source 1..20: mol_type = other DNA
ctccgggcagccctcgcccg

SEQ ID NO: 6314 - DNA, 20 bp, synthetic construct
  source 1..20: mol_type = other DNA
caggggcgggccctgggcgt

SEQ ID NO: 6315 - DNA, 20 bp, synthetic construct
  source 1..20: mol_type = other DNA
cctccgggcagccctcgccc

SEQ ID NO: 6316 - DNA, 20 bp, synthetic construct
  source 1..20: mol_type = other DNA
ggtcaaggcgtagggctgga

SEQ ID NO: 6317 - DNA, 20 bp, synthetic construct
  source 1..20: mol_type = other DNA
gggtcaaggcgtagggctgg

SEQ ID NO: 6318 - DNA, 20 bp, synthetic construct
  source 1..20: mol_type = other DNA
cgcgacacgcgctcccacgg

SEQ ID NO: 6319 - DNA, 20 bp, synthetic construct
  source 1..20: mol_type = other DNA
tgtgggtcgcgagccgccgt

SEQ ID NO: 6320 - DNA, 20 bp, synthetic construct
  source 1..20: mol_type = other DNA
gcgggcctcaaacaagcctc

SEQ ID NO: 6321 - DNA, 20 bp, synthetic construct
  source 1..20: mol_type = other DNA
gcgggacctgggcgccaagg

SEQ ID NO: 6322 - DNA, 20 bp, synthetic construct
  source 1..20: mol_type = other DNA
ggcctcaaacaagcctctgg

SEQ ID NO: 6323 - DNA, 20 bp, synthetic construct
  source 1..20: mol_type = other DNA
aggcttgtttgaggcccgcg

SEQ ID NO: 6324 - DNA, 20 bp, synthetic construct
  source 1..20: mol_type = other DNA
cgccgtgggagcgcgtgtcg

SEQ ID NO: 6325 - DNA, 20 bp, synthetic construct
  source 1..20: mol_type = other DNA
agaggcttgtttgaggcccg

SEQ ID NO: 6326 - DNA, 20 bp, synthetic construct
  source 1..20: mol_type = other DNA
gcgtcggccggcggctcctg

SEQ ID NO: 6327 - DNA, 20 bp, synthetic construct
  source 1..20: mol_type = other DNA
cgcgcgcgcgcacccgccag

SEQ ID NO: 6328 - DNA, 20 bp, synthetic construct
  source 1..20: mol_type = other DNA
gcgcgggacctgggcgccaa

SEQ ID NO: 6329 - DNA, 20 bp, synthetic construct
  source 1..20: mol_type = other DNA
tccgcccgcccagtccccgc

SEQ ID NO: 6330 - DNA, 20 bp, synthetic construct
  source 1..20: mol_type = other DNA
ctgtgggtcgcgagccgccg

SEQ ID NO: 6331 - DNA, 20 bp, synthetic construct
  source 1..20: mol_type = other DNA
cgcgggacctgggcgccaag

SEQ ID NO: 6332 - DNA, 20 bp, synthetic construct
  source 1..20: mol_type = other DNA
tcgcggtccccaggagccgc

SEQ ID NO: 6333 - DNA, 20 bp, synthetic construct
  source 1..20: mol_type = other DNA
gagcggcccggacacggcgg

SEQ ID NO: 6334 - DNA, 20 bp, synthetic construct
  source 1..20: mol_type = other DNA
tttccacttagagcccactg

SEQ ID NO: 6335 - DNA, 20 bp, synthetic construct
  source 1..20: mol_type = other DNA
gggccacagtgggctctaag

SEQ ID NO: 6336 - DNA, 20 bp, synthetic construct
  source 1..20: mol_type = other DNA
gaaaggtattggggccacag

SEQ ID NO: 6337 - DNA, 20 bp, synthetic construct
  source 1..20: mol_type = other DNA
agcgaaagggaaaggtattg

SEQ ID NO: 6338 - DNA, 20 bp, synthetic construct
  source 1..20: mol_type = other DNA
ggagcgaaagggaaaggtat

SEQ ID NO: 6339 - DNA, 20 bp, synthetic construct
  source 1..20: mol_type = other DNA
ggcgagcggcccggacacgg

SEQ ID NO: 6340 - DNA, 20 bp, synthetic construct
  source 1..20: mol_type = other DNA
ctggatttgctccctcaaag

SEQ ID NO: 6341 - DNA, 20 bp, synthetic construct
  source 1..20: mol_type = other DNA
gctttgagggagcaaatcca

SEQ ID NO: 6342 - DNA, 20 bp, synthetic construct
  source 1..20: mol_type = other DNA
ggagcaggagcgaaagggaa

SEQ ID NO: 6343 - DNA, 20 bp, synthetic construct
  source 1..20: mol_type = other DNA
gctccgcctccgccgtgtcc

SEQ ID NO: 6344 - DNA, 20 bp, synthetic construct
  source 1..20: mol_type = other DNA
gagcctggagcaggagcgaa

SEQ ID NO: 6345 - DNA, 20 bp, synthetic construct
  source 1..20: mol_type = other DNA
gcggaggcggagcctggagc

SEQ ID NO: 6346 - DNA, 20 bp, synthetic construct
  source 1..20: mol_type = other DNA
cggcccggacacggcggagg

SEQ ID NO: 6347 - DNA, 20 bp, synthetic construct
  source 1..20: mol_type = other DNA
agcctggagcaggagcgaaa

SEQ ID NO: 6348 - DNA, 20 bp, synthetic construct
  source 1..20: mol_type = other DNA
gcaaagttcagacagaggcg

SEQ ID NO: 6349 - DNA, 20 bp, synthetic construct
  source 1..20: mol_type = other DNA
gatgtggtgctggacaaggt

SEQ ID NO: 6350 - DNA, 20 bp, synthetic construct
  source 1..20: mol_type = other DNA
tgtggtgctggacaaggtgg

SEQ ID NO: 6351 - DNA, 20 bp, synthetic construct
  source 1..20: mol_type = other DNA
atgataagggagagaggcac

SEQ ID NO: 6352 - DNA, 20 bp, synthetic construct
  source 1..20: mol_type = other DNA
gaggcgtggcagaaactggc

SEQ ID NO: 6353 - DNA, 20 bp, synthetic construct
  source 1..20: mol_type = other DNA
acggagcaaagttcagacag

SEQ ID NO: 6354 - DNA, 20 bp, synthetic construct
  source 1..20: mol_type = other DNA
gagctgcagccctgaggtga

SEQ ID NO: 6355 - DNA, 20 bp, synthetic construct
  source 1..20: mol_type = other DNA
agctgcagccctgaggtgaa

SEQ ID NO: 6356 - DNA, 20 bp, synthetic construct
  source 1..20: mol_type = other DNA
tgcagccctgaggtgaaggg

SEQ ID NO: 6357 - DNA, 20 bp, synthetic construct
  source 1..20: mol_type = other DNA
acaggatgtgggccctgagg

SEQ ID NO: 6358 - DNA, 20 bp, synthetic construct
  source 1..20: mol_type = other DNA
gggagagaggcacaggatgt

SEQ ID NO: 6359 - DNA, 20 bp, synthetic construct
  source 1..20: mol_type = other DNA
atcagaatgataagggagag

SEQ ID NO: 6360 - DNA, 20 bp, synthetic construct
  source 1..20: mol_type = other DNA
tggcaggatcagaatgataa

SEQ ID NO: 6361 - DNA, 20 bp, synthetic construct
  source 1..20: mol_type = other DNA
gggccctgaggaggcagagg

SEQ ID NO: 6362 - DNA, 20 bp, synthetic construct
  source 1..20: mol_type = other DNA
tgtgggccctgaggaggcag

SEQ ID NO: 6363 - DNA, 20 bp, synthetic construct
  source 1..20: mol_type = other DNA
gttaacctgtcagctatggg

SEQ ID NO: 6364 - DNA, 20 bp, synthetic construct
  source 1..20: mol_type = other DNA
cgcagtgcaaccccgcgccg

SEQ ID NO: 6365 - DNA, 20 bp, synthetic construct
  source 1..20: mol_type = other DNA
cacctgtcctcgttccaccc

SEQ ID NO: 6366 - DNA, 20 bp, synthetic construct
  source 1..20: mol_type = other DNA
tcctcgttccacccgggccg

SEQ ID NO: 6367 - DNA, 20 bp, synthetic construct
  source 1..20: mol_type = other DNA
gcacctgtcctcgttccacc

SEQ ID NO: 6368 - DNA, 20 bp, synthetic construct
  source 1..20: mol_type = other DNA
gagccgcgtaccacgccccc

SEQ ID NO: 6369 - DNA, 20 bp, synthetic construct
  source 1..20: mol_type = other DNA
ggacaggtgctgccctcccg

SEQ ID NO: 6370 - DNA, 20 bp, synthetic construct
  source 1..20: mol_type = other DNA
cccccggcccgggtggaacg

SEQ ID NO: 6371 - DNA, 20 bp, synthetic construct
  source 1..20: mol_type = other DNA
cgtaccacgccccccggccc

SEQ ID NO: 6372 - DNA, 20 bp, synthetic construct
  source 1..20: mol_type = other DNA
ctcgttccacccgggccggg

SEQ ID NO: 6373 - DNA, 20 bp, synthetic construct
  source 1..20: mol_type = other DNA
gaggaggcggtgcgaggcgc

SEQ ID NO: 6374 - DNA, 20 bp, synthetic construct
  source 1..20: mol_type = other DNA
ctgtcagctatgggaggagg

SEQ ID NO: 6375 - DNA, 20 bp, synthetic construct
  source 1..20: mol_type = other DNA
accacgccccccggcccggg

SEQ ID NO: 6376 - DNA, 20 bp, synthetic construct
  source 1..20: mol_type = other DNA
ctatgggaggaggcggtgcg

SEQ ID NO: 6377 - DNA, 20 bp, synthetic construct
  source 1..20: mol_type = other DNA
ggaggaggcggtgcgaggcg

SEQ ID NO: 6378 - DNA, 20 bp, synthetic construct
  source 1..20: mol_type = other DNA
cctgttgcttccgcctcccg

SEQ ID NO: 6379 - DNA, 20 bp, synthetic construct
  source 1..20: mol_type = other DNA
gggaggcggaagcaacaggg

SEQ ID NO: 6380 - DNA, 20 bp, synthetic construct
  source 1..20: mol_type = other DNA
gcaagtgagcatgcgccccg

SEQ ID NO: 6381 - DNA, 20 bp, synthetic construct
  source 1..20: mol_type = other DNA
gggcagaggtcagaggccgc

SEQ ID NO: 6382 - DNA, 20 bp, synthetic construct
  source 1..20: mol_type = other DNA
ggcagaggtcagaggccgcg

SEQ ID NO: 6383 - DNA, 20 bp, synthetic construct
  source 1..20: mol_type = other DNA
cgggaggcggaagcaacagg

SEQ ID NO: 6384 - DNA, 20 bp, synthetic construct
  source 1..20: mol_type = other DNA
gacgtgcgcgcccggagcag

SEQ ID NO: 6385 - DNA, 20 bp, synthetic construct
  source 1..20: mol_type = other DNA
ccgggaggcggaagcaacag

SEQ ID NO: 6386 - DNA, 20 bp, synthetic construct
  source 1..20: mol_type = other DNA
gcccgggccccagaccctgg

SEQ ID NO: 6387 - DNA, 20 bp, synthetic construct
  source 1..20: mol_type = other DNA
gggcgcatgctcacttgcgc

SEQ ID NO: 6388 - DNA, 20 bp, synthetic construct
  source 1..20: mol_type = other DNA
gcgggtgcgagcgcgggtgt

SEQ ID NO: 6389 - DNA, 20 bp, synthetic construct
  source 1..20: mol_type = other DNA
gctccgggcgcgcacgtcac

SEQ ID NO: 6390 - DNA, 20 bp, synthetic construct
  source 1..20: mol_type = other DNA
gcccgggcggaggcgcgagg

SEQ ID NO: 6391 - DNA, 20 bp, synthetic construct
  source 1..20: mol_type = other DNA
cgcccgggccccagaccctg

SEQ ID NO: 6392 - DNA, 20 bp, synthetic construct
  source 1..20: mol_type = other DNA
gccccctcgcgcctccgccc

SEQ ID NO: 6393 - DNA, 20 bp, synthetic construct
  source 1..20: mol_type = other DNA
ggtgatgacatgtgttgtga

SEQ ID NO: 6394 - DNA, 20 bp, synthetic construct
  source 1..20: mol_type = other DNA
gacacacatacaagctccaa

SEQ ID NO: 6395 - DNA, 20 bp, synthetic construct
  source 1..20: mol_type = other DNA
taagaagggcaaagtccaag

SEQ ID NO: 6396 - DNA, 20 bp, synthetic construct
  source 1..20: mol_type = other DNA
gtagatgggaaccatgtaaa

SEQ ID NO: 6397 - DNA, 20 bp, synthetic construct
  source 1..20: mol_type = other DNA
agtaagaagggcaaagtcca

SEQ ID NO: 6398 - DNA, 20 bp, synthetic construct
  source 1..20: mol_type = other DNA
ttctatggagggaatttctg

SEQ ID NO: 6399 - DNA, 20 bp, synthetic construct
  source 1..20: mol_type = other DNA
tggtgatgacatgtgttgtg

SEQ ID NO: 6400 - DNA, 20 bp, synthetic construct
  source 1..20: mol_type = other DNA
ccttcttactggccaggcag

SEQ ID NO: 6401 - DNA, 20 bp, synthetic construct
  source 1..20: mol_type = other DNA
gaagggcaaagtccaagggg

SEQ ID NO: 6402 - DNA, 20 bp, synthetic construct
  source 1..20: mol_type = other DNA
aatgagtcaagcctggactc

SEQ ID NO: 6403 - DNA, 20 bp, synthetic construct
  source 1..20: mol_type = other DNA
gtaagaagggcaaagtccaa

SEQ ID NO: 6404 - DNA, 20 bp, synthetic construct
  source 1..20: mol_type = other DNA
aagggcaaagtccaagggga

SEQ ID NO: 6405 - DNA, 20 bp, synthetic construct
  source 1..20: mol_type = other DNA
gatgagggaggggccagatg

SEQ ID NO: 6406 - DNA, 20 bp, synthetic construct
  source 1..20: mol_type = other DNA
tccaaggggagggatgaggg

SEQ ID NO: 6407 - DNA, 20 bp, synthetic construct
  source 1..20: mol_type = other DNA
aggcaggggggccagagtcc

SEQ ID NO: 6408 - DNA, 20 bp, synthetic construct
  source 1..20: mol_type = other DNA
gttgtgcgccagcgtacgcg

SEQ ID NO: 6409 - DNA, 20 bp, synthetic construct
  source 1..20: mol_type = other DNA
tgggcacgaaagccaaaact

SEQ ID NO: 6410 - DNA, 20 bp, synthetic construct
  source 1..20: mol_type = other DNA
ggaactgcagcaggatcctg

SEQ ID NO: 6411 - DNA, 20 bp, synthetic construct
  source 1..20: mol_type = other DNA
gcacgaaagccaaaactggg

SEQ ID NO: 6412 - DNA, 20 bp, synthetic construct
  source 1..20: mol_type = other DNA
gaactgcagcaggatcctgg

SEQ ID NO: 6413 - DNA, 20 bp, synthetic construct
  source 1..20: mol_type = other DNA
ggaaggccggctgagaaagc

SEQ ID NO: 6414 - DNA, 20 bp, synthetic construct
  source 1..20: mol_type = other DNA
ttgacaccaggaggcaatcc

SEQ ID NO: 6415 - DNA, 20 bp, synthetic construct
  source 1..20: mol_type = other DNA
agaaagccgggattgcctcc

SEQ ID NO: 6416 - DNA, 20 bp, synthetic construct
  source 1..20: mol_type = other DNA
gactcccgcccccgtgacgc

SEQ ID NO: 6417 - DNA, 20 bp, synthetic construct
  source 1..20: mol_type = other DNA
cagttccgagctttgacacc

SEQ ID NO: 6418 - DNA, 20 bp, synthetic construct
  source 1..20: mol_type = other DNA
tgactcccgcccccgtgacg

SEQ ID NO: 6419 - DNA, 20 bp, synthetic construct
  source 1..20: mol_type = other DNA
tgaacacaagccccgccccc

SEQ ID NO: 6420 - DNA, 20 bp, synthetic construct
  source 1..20: mol_type = other DNA
tcgccgggccagccagcaga

SEQ ID NO: 6421 - DNA, 20 bp, synthetic construct
  source 1..20: mol_type = other DNA
tacgcggggctctgagaacc

SEQ ID NO: 6422 - DNA, 20 bp, synthetic construct
  source 1..20: mol_type = other DNA
ttccgagctttgacaccagg

SEQ ID NO: 6423 - DNA, 20 bp, synthetic construct
  source 1..20: mol_type = other DNA
gggccgggacgggatccggg

SEQ ID NO: 6424 - DNA, 20 bp, synthetic construct
  source 1..20: mol_type = other DNA
aagcctcccggatcccgtcc

SEQ ID NO: 6425 - DNA, 20 bp, synthetic construct
  source 1..20: mol_type = other DNA
caggcccgccggctagcagg

SEQ ID NO: 6426 - DNA, 20 bp, synthetic construct
  source 1..20: mol_type = other DNA
ctcggggctcccggaggcgg

SEQ ID NO: 6427 - DNA, 20 bp, synthetic construct
  source 1..20: mol_type = other DNA
gctccggctcagaagcctcc

SEQ ID NO: 6428 - DNA, 20 bp, synthetic construct
  source 1..20: mol_type = other DNA
ctcttccgcctgctagccgg

SEQ ID NO: 6429 - DNA, 20 bp, synthetic construct
  source 1..20: mol_type = other DNA
ggcgggcggcgctgacgtag

SEQ ID NO: 6430 - DNA, 20 bp, synthetic construct
  source 1..20: mol_type = other DNA
agccccgagccgcgtcccgc

SEQ ID NO: 6431 - DNA, 20 bp, synthetic construct
  source 1..20: mol_type = other DNA
cggctagcaggcggaagagg

SEQ ID NO: 6432 - DNA, 20 bp, synthetic construct
  source 1..20: mol_type = other DNA
tgctagccggcgggcctggg

SEQ ID NO: 6433 - DNA, 20 bp, synthetic construct
  source 1..20: mol_type = other DNA
cggacgccgcccaggcccgc

SEQ ID NO: 6434 - DNA, 20 bp, synthetic construct
  source 1..20: mol_type = other DNA
acgcggctcggggctcccgg

SEQ ID NO: 6435 - DNA, 20 bp, synthetic construct
  source 1..20: mol_type = other DNA
gcaggcggaagaggcggcgc

SEQ ID NO: 6436 - DNA, 20 bp, synthetic construct
  source 1..20: mol_type = other DNA
cgccggctagcaggcggaag

SEQ ID NO: 6437 - DNA, 20 bp, synthetic construct
  source 1..20: mol_type = other DNA
gcggaagaggcggcgccggc

SEQ ID NO: 6438 - DNA, 20 bp, synthetic construct
  source 1..20: mol_type = other DNA
ccttctctgaccaatcatgg

SEQ ID NO: 6439 - DNA, 20 bp, synthetic construct
  source 1..20: mol_type = other DNA
accaatcatggaggagtcgt

SEQ ID NO: 6440 - DNA, 20 bp, synthetic construct
  source 1..20: mol_type = other DNA
ttctcgcgagactggagacc

SEQ ID NO: 6441 - DNA, 20 bp, synthetic construct
  source 1..20: mol_type = other DNA
catgattggtcagagaagga

SEQ ID NO: 6442 - DNA, 20 bp, synthetic construct
  source 1..20: mol_type = other DNA
gaccaatcatggaggagtcg

SEQ ID NO: 6443 - DNA, 20 bp, synthetic construct
  source 1..20: mol_type = other DNA
ggcggagctgaagtgggctg

SEQ ID NO: 6444 - DNA, 20 bp, synthetic construct
  source 1..20: mol_type = other DNA
aatcatggaggagtcgtggg

SEQ ID NO: 6445 - DNA, 20 bp, synthetic construct
  source 1..20: mol_type = other DNA
gctggggcggggctagatcg

SEQ ID NO: 6446 - DNA, 20 bp, synthetic construct
  source 1..20: mol_type = other DNA
gaaggcgtggagcggactga

SEQ ID NO: 6447 - DNA, 20 bp, synthetic construct
  source 1..20: mol_type = other DNA
ttggtcagagaaggaaggcg

SEQ ID NO: 6448 - DNA, 20 bp, synthetic construct
  source 1..20: mol_type = other DNA
gcggggctagatcggggaga

SEQ ID NO: 6449 - DNA, 20 bp, synthetic construct
  source 1..20: mol_type = other DNA
gggaatgggcggagctgaag

SEQ ID NO: 6450 - DNA, 20 bp, synthetic construct
  source 1..20: mol_type = other DNA
ggaatgggcggagctgaagt

SEQ ID NO: 6451 - DNA, 20 bp, synthetic construct
  source 1..20: mol_type = other DNA
tatctggcgctgggaatggg

SEQ ID NO: 6452 - DNA, 20 bp, synthetic construct
  source 1..20: mol_type = other DNA
cagagaaggaaggcgtggag

SEQ ID NO: 6453 - DNA, 20 bp, synthetic construct
  source 1..20: mol_type = other DNA
gactataagtagtggagctc

SEQ ID NO: 6454 - DNA, 20 bp, synthetic construct
  source 1..20: mol_type = other DNA
ccactacttatagtcaatac

SEQ ID NO: 6455 - DNA, 20 bp, synthetic construct
  source 1..20: mol_type = other DNA
aaaatagtgtgtaggactgg

SEQ ID NO: 6456 - DNA, 20 bp, synthetic construct
  source 1..20: mol_type = other DNA
ttgcataagaattcgtgaac

SEQ ID NO: 6457 - DNA, 20 bp, synthetic construct
  source 1..20: mol_type = other DNA
ccagtattgactataagtag

SEQ ID NO: 6458 - DNA, 20 bp, synthetic construct
  source 1..20: mol_type = other DNA
aataaaatagtgtgtaggac

SEQ ID NO: 6459 - DNA, 20 bp, synthetic construct
  source 1..20: mol_type = other DNA
tgattaataaaatagtgtgt

SEQ ID NO: 6460 - DNA, 20 bp, synthetic construct
  source 1..20: mol_type = other DNA
cactacttatagtcaatact

SEQ ID NO: 6461 - DNA, 20 bp, synthetic construct
  source 1..20: mol_type = other DNA
aaaactgtaatttgagccaa

SEQ ID NO: 6462 - DNA, 20 bp, synthetic construct
  source 1..20: mol_type = other DNA
cgaaaataaagctgtgccat

SEQ ID NO: 6463 - DNA, 20 bp, synthetic construct
  source 1..20: mol_type = other DNA
gagctctggtgaacttctct

SEQ ID NO: 6464 - DNA, 20 bp, synthetic construct
  source 1..20: mol_type = other DNA
tttcataacagcgattccat

SEQ ID NO: 6465 - DNA, 20 bp, synthetic construct
  source 1..20: mol_type = other DNA
tgttatgaaacatgcttctt

SEQ ID NO: 6466 - DNA, 20 bp, synthetic construct
  source 1..20: mol_type = other DNA
tgaaacatgcttctttggat

SEQ ID NO: 6467 - DNA, 20 bp, synthetic construct
  source 1..20: mol_type = other DNA
cacgaattcttatgcaaatg

SEQ ID NO: 6468 - DNA, 20 bp, synthetic construct
  source 1..20: mol_type = other DNA
gacgtcactgaaccgaaacg

SEQ ID NO: 6469 - DNA, 20 bp, synthetic construct
  source 1..20: mol_type = other DNA
cccgggctagcgaaaagtgg

SEQ ID NO: 6470 - DNA, 20 bp, synthetic construct
  source 1..20: mol_type = other DNA
acgtcactgaaccgaaacgc

SEQ ID NO: 6471 - DNA, 20 bp, synthetic construct
  source 1..20: mol_type = other DNA
gcctttccggaacccagtgg

SEQ ID NO: 6472 - DNA, 20 bp, synthetic construct
  source 1..20: mol_type = other DNA
tgacgtcgtaaattggaatg

SEQ ID NO: 6473 - DNA, 20 bp, synthetic construct
  source 1..20: mol_type = other DNA
actgggttccggaaaggctc

SEQ ID NO: 6474 - DNA, 20 bp, synthetic construct
  source 1..20: mol_type = other DNA
gagcccgggctagcgaaaag

SEQ ID NO: 6475 - DNA, 20 bp, synthetic construct
  source 1..20: mol_type = other DNA
ctgggttccggaaaggctca

SEQ ID NO: 6476 - DNA, 20 bp, synthetic construct
  source 1..20: mol_type = other DNA
agcctttccggaacccagtg

SEQ ID NO: 6477 - DNA, 20 bp, synthetic construct
  source 1..20: mol_type = other DNA
tgagagtccctggcgagccc

SEQ ID NO: 6478 - DNA, 20 bp, synthetic construct
  source 1..20: mol_type = other DNA
cctttccggaacccagtggg

SEQ ID NO: 6479 - DNA, 20 bp, synthetic construct
  source 1..20: mol_type = other DNA
gcccgggctagcgaaaagtg

SEQ ID NO: 6480 - DNA, 20 bp, synthetic construct
  source 1..20: mol_type = other DNA
tcgctagcccgggctcgcca

SEQ ID NO: 6481 - DNA, 20 bp, synthetic construct
  source 1..20: mol_type = other DNA
ctttccggaacccagtgggg

SEQ ID NO: 6482 - DNA, 20 bp, synthetic construct
  source 1..20: mol_type = other DNA
tgagcctttccggaacccag

SEQ ID NO: 6483 - DNA, 20 bp, synthetic construct
  source 1..20: mol_type = other DNA
actgagtatgcagtaaccgg

SEQ ID NO: 6484 - DNA, 20 bp, synthetic construct
  source 1..20: mol_type = other DNA
cagtgtttactcctaacgcg

SEQ ID NO: 6485 - DNA, 20 bp, synthetic construct
  source 1..20: mol_type = other DNA
gactgagtatgcagtaaccg

SEQ ID NO: 6486 - DNA, 20 bp, synthetic construct
  source 1..20: mol_type = other DNA
cttgtgtcgacatccacccc

SEQ ID NO: 6487 - DNA, 20 bp, synthetic construct
  source 1..20: mol_type = other DNA
tgactgagtatgcagtaacc

SEQ ID NO: 6488 - DNA, 20 bp, synthetic construct
  source 1..20: mol_type = other DNA
gtgactgagtatgcagtaac

SEQ ID NO: 6489 - DNA, 20 bp, synthetic construct
  source 1..20: mol_type = other DNA
cgacacaagttccacgcgtt

SEQ ID NO: 6490 - DNA, 20 bp, synthetic construct
  source 1..20: mol_type = other DNA
gagtatgcagtaaccggggg

SEQ ID NO: 6491 - DNA, 20 bp, synthetic construct
  source 1..20: mol_type = other DNA
ggtttcactgttggccagaa

SEQ ID NO: 6492 - DNA, 20 bp, synthetic construct
  source 1..20: mol_type = other DNA
ctctactaaacacaaaaatt

SEQ ID NO: 6493 - DNA, 20 bp, synthetic construct
  source 1..20: mol_type = other DNA
aggcggataatatgatctgg

SEQ ID NO: 6494 - DNA, 20 bp, synthetic construct
  source 1..20: mol_type = other DNA
tgtaggcggataatatgatc

SEQ ID NO: 6495 - DNA, 20 bp, synthetic construct
  source 1..20: mol_type = other DNA
agacaaaacagacttcgtag

SEQ ID NO: 6496 - DNA, 20 bp, synthetic construct
  source 1..20: mol_type = other DNA
aaaacagacttcgtagggga

SEQ ID NO: 6497 - DNA, 20 bp, synthetic construct
  source 1..20: mol_type = other DNA
aggaggctgcagatagtccc

SEQ ID NO: 6498 - DNA, 20 bp, synthetic construct
  source 1..20: mol_type = other DNA
tgagacaaaacagacttcgt

SEQ ID NO: 6499 - DNA, 20 bp, synthetic construct
  source 1..20: mol_type = other DNA
taacaggctatatttgtagg

SEQ ID NO: 6500 - DNA, 20 bp, synthetic construct
  source 1..20: mol_type = other DNA
ggaggctgcagatagtccct

SEQ ID NO: 6501 - DNA, 20 bp, synthetic construct
  source 1..20: mol_type = other DNA
ccagcgcgagccccggccca

SEQ ID NO: 6502 - DNA, 20 bp, synthetic construct
  source 1..20: mol_type = other DNA
gctgcagatagtccctgggc

SEQ ID NO: 6503 - DNA, 20 bp, synthetic construct
  source 1..20: mol_type = other DNA
tgcagatagtccctgggccg

SEQ ID NO: 6504 - DNA, 20 bp, synthetic construct
  source 1..20: mol_type = other DNA
aatgtctggccctgggtagg

SEQ ID NO: 6505 - DNA, 20 bp, synthetic construct
  source 1..20: mol_type = other DNA
gctggccggctgcagcgcgc

SEQ ID NO: 6506 - DNA, 20 bp, synthetic construct
  source 1..20: mol_type = other DNA
ccctgggccggggctcgcgc

SEQ ID NO: 6507 - DNA, 20 bp, synthetic construct
  source 1..20: mol_type = other DNA
ctggccggctgcagcgcgca

SEQ ID NO: 6508 - DNA, 20 bp, synthetic construct
  source 1..20: mol_type = other DNA
taacgtcacacggactacag

SEQ ID NO: 6509 - DNA, 20 bp, synthetic construct
  source 1..20: mol_type = other DNA
gagcccaaaagccatccctg

SEQ ID NO: 6510 - DNA, 20 bp, synthetic construct
  source 1..20: mol_type = other DNA
ctatgaaaaccggactacag

SEQ ID NO: 6511 - DNA, 20 bp, synthetic construct
  source 1..20: mol_type = other DNA
gtaacgtcacacggactaca

SEQ ID NO: 6512 - DNA, 20 bp, synthetic construct
  source 1..20: mol_type = other DNA
gttaagcaaagatcaaagcc

SEQ ID NO: 6513 - DNA, 20 bp, synthetic construct
  source 1..20: mol_type = other DNA
gccaaacgccgggagcagcg

SEQ ID NO: 6514 - DNA, 20 bp, synthetic construct
  source 1..20: mol_type = other DNA
ccaaacgccgggagcagcga

SEQ ID NO: 6515 - DNA, 20 bp, synthetic construct
  source 1..20: mol_type = other DNA
gcccggcagagaatgggagc

SEQ ID NO: 6516 - DNA, 20 bp, synthetic construct
  source 1..20: mol_type = other DNA
caaacgccgggagcagcgag

SEQ ID NO: 6517 - DNA, 20 bp, synthetic construct
  source 1..20: mol_type = other DNA
agggcaggcgcggcgcctca

SEQ ID NO: 6518 - DNA, 20 bp, synthetic construct
  source 1..20: mol_type = other DNA
caggcgcggcgcctcaggga

SEQ ID NO: 6519 - DNA, 20 bp, synthetic construct
  source 1..20: mol_type = other DNA
agcccggcagagaatgggag

SEQ ID NO: 6520 - DNA, 20 bp, synthetic construct
  source 1..20: mol_type = other DNA
cggcagagaatgggagcggg

SEQ ID NO: 6521 - DNA, 20 bp, synthetic construct
  source 1..20: mol_type = other DNA
actccgccgcagggcaggcg

SEQ ID NO: 6522 - DNA, 20 bp, synthetic construct
  source 1..20: mol_type = other DNA
ggcagagaatgggagcggga

SEQ ID NO: 6523 - DNA, 20 bp, synthetic construct
  source 1..20: mol_type = other DNA
ccagcacggagagtcgatgc

SEQ ID NO: 6524 - DNA, 20 bp, synthetic construct
  source 1..20: mol_type = other DNA
aaggaccagacccttatgga

SEQ ID NO: 6525 - DNA, 20 bp, synthetic construct
  source 1..20: mol_type = other DNA
ccccaagaccagatgtcgcg

SEQ ID NO: 6526 - DNA, 20 bp, synthetic construct
  source 1..20: mol_type = other DNA
ccggcatcgactctccgtgc

SEQ ID NO: 6527 - DNA, 20 bp, synthetic construct
  source 1..20: mol_type = other DNA
ccactgcgcagctcagacgc

SEQ ID NO: 6528 - DNA, 20 bp, synthetic construct
  source 1..20: mol_type = other DNA
gaccagacccttatggaagg

SEQ ID NO: 6529 - DNA, 20 bp, synthetic construct
  source 1..20: mol_type = other DNA
aagaccagatgtcgcgcggc

SEQ ID NO: 6530 - DNA, 20 bp, synthetic construct
  source 1..20: mol_type = other DNA
ttcaccagaccccctcaccc

SEQ ID NO: 6531 - DNA, 20 bp, synthetic construct
  source 1..20: mol_type = other DNA
tggcggctcccagggtgagg

SEQ ID NO: 6532 - DNA, 20 bp, synthetic construct
  source 1..20: mol_type = other DNA
tcaccagaccccctcaccct

SEQ ID NO: 6533 - DNA, 20 bp, synthetic construct
  source 1..20: mol_type = other DNA
ggtggcggctcccagggtga

SEQ ID NO: 6534 - DNA, 20 bp, synthetic construct
  source 1..20: mol_type = other DNA
aggtggcggctcccagggtg

SEQ ID NO: 6535 - DNA, 20 bp, synthetic construct
  source 1..20: mol_type = other DNA
gtggcggctcccagggtgag

SEQ ID NO: 6536 - DNA, 20 bp, synthetic construct
  source 1..20: mol_type = other DNA
tggtcttggggaaagggagg

SEQ ID NO: 6537 - DNA, 20 bp, synthetic construct
  source 1..20: mol_type = other DNA
aagggaggtggcggctccca

SEQ ID NO: 6538 - DNA, 20 bp, synthetic construct
  source 1..20: mol_type = other DNA
acggcggcacagttcagcgg

SEQ ID NO: 6539 - DNA, 20 bp, synthetic construct
  source 1..20: mol_type = other DNA
ccgctgaactgtgccgccgt

SEQ ID NO: 6540 - DNA, 20 bp, synthetic construct
  source 1..20: mol_type = other DNA
cctacggcggcacagttcag

SEQ ID NO: 6541 - DNA, 20 bp, synthetic construct
  source 1..20: mol_type = other DNA
agagagtaagcttgggccac

SEQ ID NO: 6542 - DNA, 20 bp, synthetic construct
  source 1..20: mol_type = other DNA
gcggcacagttcagcggagg

SEQ ID NO: 6543 - DNA, 20 bp, synthetic construct
  source 1..20: mol_type = other DNA
gcccggcctcgaacctacgg

SEQ ID NO: 6544 - DNA, 20 bp, synthetic construct
  source 1..20: mol_type = other DNA
gccgtaggttcgaggccggg

SEQ ID NO: 6545 - DNA, 20 bp, synthetic construct
  source 1..20: mol_type = other DNA
actgtgccgccgtaggttcg

SEQ ID NO: 6546 - DNA, 20 bp, synthetic construct
  source 1..20: mol_type = other DNA
caggctgggacggaagcaga

SEQ ID NO: 6547 - DNA, 20 bp, synthetic construct
  source 1..20: mol_type = other DNA
gttcagcggaggcggcccag

SEQ ID NO: 6548 - DNA, 20 bp, synthetic construct
  source 1..20: mol_type = other DNA
cagacacgccaccacccgcc

SEQ ID NO: 6549 - DNA, 20 bp, synthetic construct
  source 1..20: mol_type = other DNA
aggcgcgggacaggaccgct

SEQ ID NO: 6550 - DNA, 20 bp, synthetic construct
  source 1..20: mol_type = other DNA
ccgtaggttcgaggccgggc

SEQ ID NO: 6551 - DNA, 20 bp, synthetic construct
  source 1..20: mol_type = other DNA
caggcgcgggacaggaccgc

SEQ ID NO: 6552 - DNA, 20 bp, synthetic construct
  source 1..20: mol_type = other DNA
taggttcgaggccgggcggg

SEQ ID NO: 6553 - DNA, 20 bp, synthetic construct
  source 1..20: mol_type = other DNA
atagacaggagcgctatccg

SEQ ID NO: 6554 - DNA, 20 bp, synthetic construct
  source 1..20: mol_type = other DNA
ttcgcgaccctacttaaagg

SEQ ID NO: 6555 - DNA, 20 bp, synthetic construct
  source 1..20: mol_type = other DNA
gcattataaaaggcacgcgc

SEQ ID NO: 6556 - DNA, 20 bp, synthetic construct
  source 1..20: mol_type = other DNA
aagtagccaatcagaaaccg

SEQ ID NO: 6557 - DNA, 20 bp, synthetic construct
  source 1..20: mol_type = other DNA
aggaaggcgctgcctcgcgt

SEQ ID NO: 6558 - DNA, 20 bp, synthetic construct
  source 1..20: mol_type = other DNA
gagcaagctcctccaacgcg

SEQ ID NO: 6559 - DNA, 20 bp, synthetic construct
  source 1..20: mol_type = other DNA
cgcattataaaaggcacgcg

SEQ ID NO: 6560 - DNA, 20 bp, synthetic construct
  source 1..20: mol_type = other DNA
acttaaaggcggctttccgt

SEQ ID NO: 6561 - DNA, 20 bp, synthetic construct
  source 1..20: mol_type = other DNA
gaacgaatacaggcaaccat

SEQ ID NO: 6562 - DNA, 20 bp, synthetic construct
  source 1..20: mol_type = other DNA
atcgctgccactccagccaa

SEQ ID NO: 6563 - DNA, 20 bp, synthetic construct
  source 1..20: mol_type = other DNA
ttaagtagggtcgcgaagga

SEQ ID NO: 6564 - DNA, 20 bp, synthetic construct
  source 1..20: mol_type = other DNA
tccagctccagcccagcagg

SEQ ID NO: 6565 - DNA, 20 bp, synthetic construct
  source 1..20: mol_type = other DNA
gtggcagcgatattatccaa

SEQ ID NO: 6566 - DNA, 20 bp, synthetic construct
  source 1..20: mol_type = other DNA
cagctttgtctgacgggcga

SEQ ID NO: 6567 - DNA, 20 bp, synthetic construct
  source 1..20: mol_type = other DNA
aaggcgctgcctcgcgttgg

SEQ ID NO: 6568 - DNA, 20 bp, synthetic construct
  source 1..20: mol_type = other DNA
cgcagcgcagctgttacccg

SEQ ID NO: 6569 - DNA, 20 bp, synthetic construct
  source 1..20: mol_type = other DNA
gccgcccctcgctacccgag

SEQ ID NO: 6570 - DNA, 20 bp, synthetic construct
  source 1..20: mol_type = other DNA
acgcagcgcagctgttaccc

SEQ ID NO: 6571 - DNA, 20 bp, synthetic construct
  source 1..20: mol_type = other DNA
ggccggcgcgaagcccccag

SEQ ID NO: 6572 - DNA, 20 bp, synthetic construct
  source 1..20: mol_type = other DNA
ggcccctgggggcttcgcgc

SEQ ID NO: 6573 - DNA, 20 bp, synthetic construct
  source 1..20: mol_type = other DNA
ggtccaggctgcggcgcgtg

SEQ ID NO: 6574 - DNA, 20 bp, synthetic construct
  source 1..20: mol_type = other DNA
gggtccaggctgcggcgcgt

SEQ ID NO: 6575 - DNA, 20 bp, synthetic construct
  source 1..20: mol_type = other DNA
tcccctcccacccccgcctg

SEQ ID NO: 6576 - DNA, 20 bp, synthetic construct
  source 1..20: mol_type = other DNA
gcgaagcccccaggggccgc

SEQ ID NO: 6577 - DNA, 20 bp, synthetic construct
  source 1..20: mol_type = other DNA
acccccgcctgcggcccctg

SEQ ID NO: 6578 - DNA, 20 bp, synthetic construct
  source 1..20: mol_type = other DNA
gtggggagcgggcggagcgg

SEQ ID NO: 6579 - DNA, 20 bp, synthetic construct
  source 1..20: mol_type = other DNA
cccccgcctgcggcccctgg

SEQ ID NO: 6580 - DNA, 20 bp, synthetic construct
  source 1..20: mol_type = other DNA
cccctcctccccgcaacccc

SEQ ID NO: 6581 - DNA, 20 bp, synthetic construct
  source 1..20: mol_type = other DNA
ccccggcccagccccagccc

SEQ ID NO: 6582 - DNA, 20 bp, synthetic construct
  source 1..20: mol_type = other DNA
cccggcccagccccagcccc

SEQ ID NO: 6583 - DNA, 20 bp, synthetic construct
  source 1..20: mol_type = other DNA
gaggctctgacaacccggcg

SEQ ID NO: 6584 - DNA, 20 bp, synthetic construct
  source 1..20: mol_type = other DNA
tgacaacccggcgtggctgt

SEQ ID NO: 6585 - DNA, 20 bp, synthetic construct
  source 1..20: mol_type = other DNA
ctagtgaggctctgacaacc

SEQ ID NO: 6586 - DNA, 20 bp, synthetic construct
  source 1..20: mol_type = other DNA
gctgaatccgggaagagcgg

SEQ ID NO: 6587 - DNA, 20 bp, synthetic construct
  source 1..20: mol_type = other DNA
gtggctgaatccgggaagag

SEQ ID NO: 6588 - DNA, 20 bp, synthetic construct
  source 1..20: mol_type = other DNA
ggcaagactagacacaagcc

SEQ ID NO: 6589 - DNA, 20 bp, synthetic construct
  source 1..20: mol_type = other DNA
gcaagttcccggaagaggga

SEQ ID NO: 6590 - DNA, 20 bp, synthetic construct
  source 1..20: mol_type = other DNA
agttcccggaagagggaagg

SEQ ID NO: 6591 - DNA, 20 bp, synthetic construct
  source 1..20: mol_type = other DNA
ttcctggagccggaacacgc

SEQ ID NO: 6592 - DNA, 20 bp, synthetic construct
  source 1..20: mol_type = other DNA
ggccgggagaaaaactagtg

SEQ ID NO: 6593 - DNA, 20 bp, synthetic construct
  source 1..20: mol_type = other DNA
gactagacacaagccgggcg

SEQ ID NO: 6594 - DNA, 20 bp, synthetic construct
  source 1..20: mol_type = other DNA
gcgggcaagttcccggaaga

SEQ ID NO: 6595 - DNA, 20 bp, synthetic construct
  source 1..20: mol_type = other DNA
gatgacgcacttcctggagc

SEQ ID NO: 6596 - DNA, 20 bp, synthetic construct
  source 1..20: mol_type = other DNA
aatccgggaagagcggcggc

SEQ ID NO: 6597 - DNA, 20 bp, synthetic construct
  source 1..20: mol_type = other DNA
cttcctggagccggaacacg

SEQ ID NO: 6598 - DNA, 20 bp, synthetic construct
  source 1..20: mol_type = other DNA
caggagatgggccaagtgca

SEQ ID NO: 6599 - DNA, 20 bp, synthetic construct
  source 1..20: mol_type = other DNA
caggacggcccctttcgcac

SEQ ID NO: 6600 - DNA, 20 bp, synthetic construct
  source 1..20: mol_type = other DNA
gtgcgaaaggggccgtcctg

SEQ ID NO: 6601 - DNA, 20 bp, synthetic construct
  source 1..20: mol_type = other DNA
ctcgcgagccggtgcgaaag

SEQ ID NO: 6602 - DNA, 20 bp, synthetic construct
  source 1..20: mol_type = other DNA
aaggtcccttgagcgcagct

SEQ ID NO: 6603 - DNA, 20 bp, synthetic construct
  source 1..20: mol_type = other DNA
acagcgcctccctcgcgagc

SEQ ID NO: 6604 - DNA, 20 bp, synthetic construct
  source 1..20: mol_type = other DNA
cgctgagtccgcaccgcccg

SEQ ID NO: 6605 - DNA, 20 bp, synthetic construct
  source 1..20: mol_type = other DNA
tcccggcctgggctgtgcgc

SEQ ID NO: 6606 - DNA, 20 bp, synthetic construct
  source 1..20: mol_type = other DNA
ccatctcctgcgcacagccc

SEQ ID NO: 6607 - DNA, 20 bp, synthetic construct
  source 1..20: mol_type = other DNA
cgcagctgggcgcacaccgc

SEQ ID NO: 6608 - DNA, 20 bp, synthetic construct
  source 1..20: mol_type = other DNA
gcccaggccgggaccgcggg

SEQ ID NO: 6609 - DNA, 20 bp, synthetic construct
  source 1..20: mol_type = other DNA
cacagcccaggccgggaccg

SEQ ID NO: 6610 - DNA, 20 bp, synthetic construct
  source 1..20: mol_type = other DNA
acagcccaggccgggaccgc

SEQ ID NO: 6611 - DNA, 20 bp, synthetic construct
  source 1..20: mol_type = other DNA
cgcgggcggtgcggactcag

SEQ ID NO: 6612 - DNA, 20 bp, synthetic construct
  source 1..20: mol_type = other DNA
gcgggcggtgcggactcagc

SEQ ID NO: 6613 - DNA, 20 bp, synthetic construct
  source 1..20: mol_type = other DNA
gcgcgcccgcataccccgtg

SEQ ID NO: 6614 - DNA, 20 bp, synthetic construct
  source 1..20: mol_type = other DNA
tcagctccgagctagtccag

SEQ ID NO: 6615 - DNA, 20 bp, synthetic construct
  source 1..20: mol_type = other DNA
gagcgcgcccgcataccccg

SEQ ID NO: 6616 - DNA, 20 bp, synthetic construct
  source 1..20: mol_type = other DNA
gtcagctccgagctagtcca

SEQ ID NO: 6617 - DNA, 20 bp, synthetic construct
  source 1..20: mol_type = other DNA
agcgcgcccgcataccccgt

SEQ ID NO: 6618 - DNA, 20 bp, synthetic construct
  source 1..20: mol_type = other DNA
cagctccgagctagtccagg

SEQ ID NO: 6619 - DNA, 20 bp, synthetic construct
  source 1..20: mol_type = other DNA
cgcgccgaggcgttctccgg

SEQ ID NO: 6620 - DNA, 20 bp, synthetic construct
  source 1..20: mol_type = other DNA
acccgagcccgggagaccag

SEQ ID NO: 6621 - DNA, 20 bp, synthetic construct
  source 1..20: mol_type = other DNA
gcccgcataccccgtgggga

SEQ ID NO: 6622 - DNA, 20 bp, synthetic construct
  source 1..20: mol_type = other DNA
agcccgggagaccagcggcg

SEQ ID NO: 6623 - DNA, 20 bp, synthetic construct
  source 1..20: mol_type = other DNA
gagcccgggagaccagcggc

SEQ ID NO: 6624 - DNA, 20 bp, synthetic construct
  source 1..20: mol_type = other DNA
ctccaccgcccctccccacg

SEQ ID NO: 6625 - DNA, 20 bp, synthetic construct
  source 1..20: mol_type = other DNA
cgagcccgggagaccagcgg

SEQ ID NO: 6626 - DNA, 20 bp, synthetic construct
  source 1..20: mol_type = other DNA
gcctccaccgcccctcccca

SEQ ID NO: 6627 - DNA, 20 bp, synthetic construct
  source 1..20: mol_type = other DNA
cctccaccgcccctccccac

SEQ ID NO: 6628 - DNA, 20 bp, synthetic construct
  source 1..20: mol_type = other DNA
ttgttcgggacgaggcgagt

SEQ ID NO: 6629 - DNA, 20 bp, synthetic construct
  source 1..20: mol_type = other DNA
gaatgagggaaccaacccga

SEQ ID NO: 6630 - DNA, 20 bp, synthetic construct
  source 1..20: mol_type = other DNA
aatgagggaaccaacccgaa

SEQ ID NO: 6631 - DNA, 20 bp, synthetic construct
  source 1..20: mol_type = other DNA
atgagggaaccaacccgaag

SEQ ID NO: 6632 - DNA, 20 bp, synthetic construct
  source 1..20: mol_type = other DNA
tcgtcccgaacaatgcatgc

SEQ ID NO: 6633 - DNA, 20 bp, synthetic construct
  source 1..20: mol_type = other DNA
cgtcccgaacaatgcatgcc

SEQ ID NO: 6634 - DNA, 20 bp, synthetic construct
  source 1..20: mol_type = other DNA
acaatgcatgccgggaagag

SEQ ID NO: 6635 - DNA, 20 bp, synthetic construct
  source 1..20: mol_type = other DNA
ggcgagtcgggcgccaagcg

SEQ ID NO: 6636 - DNA, 20 bp, synthetic construct
  source 1..20: mol_type = other DNA
ccctccagcgcccgcagcgg

SEQ ID NO: 6637 - DNA, 20 bp, synthetic construct
  source 1..20: mol_type = other DNA
agggaaccaacccgaagggg

SEQ ID NO: 6638 - DNA, 20 bp, synthetic construct
  source 1..20: mol_type = other DNA
gccctccagcgcccgcagcg

SEQ ID NO: 6639 - DNA, 20 bp, synthetic construct
  source 1..20: mol_type = other DNA
aggccctccagcgcccgcag

SEQ ID NO: 6640 - DNA, 20 bp, synthetic construct
  source 1..20: mol_type = other DNA
gcatgccgggaagagcggtc

SEQ ID NO: 6641 - DNA, 20 bp, synthetic construct
  source 1..20: mol_type = other DNA
cattcgccccgcccccgctg

SEQ ID NO: 6642 - DNA, 20 bp, synthetic construct
  source 1..20: mol_type = other DNA
ctagccccgccccttcgggt

SEQ ID NO: 6643 - DNA, 20 bp, synthetic construct
  source 1..20: mol_type = other DNA
cgcacgcgcaagattaggtg

SEQ ID NO: 6644 - DNA, 20 bp, synthetic construct
  source 1..20: mol_type = other DNA
ggaggatagaaaaacgactt

SEQ ID NO: 6645 - DNA, 20 bp, synthetic construct
  source 1..20: mol_type = other DNA
cagcgcgctagagcgcctca

SEQ ID NO: 6646 - DNA, 20 bp, synthetic construct
  source 1..20: mol_type = other DNA
tagagcgcctcagggacctc

SEQ ID NO: 6647 - DNA, 20 bp, synthetic construct
  source 1..20: mol_type = other DNA
caggaacttccccaagccgg

SEQ ID NO: 6648 - DNA, 20 bp, synthetic construct
  source 1..20: mol_type = other DNA
aaacgacttaggaatctcct

SEQ ID NO: 6649 - DNA, 20 bp, synthetic construct
  source 1..20: mol_type = other DNA
gcgcacgcgcaagattaggt

SEQ ID NO: 6650 - DNA, 20 bp, synthetic construct
  source 1..20: mol_type = other DNA
ggcgacctgggctgcgagtg

SEQ ID NO: 6651 - DNA, 20 bp, synthetic construct
  source 1..20: mol_type = other DNA
ccccaagccggaggtccctg

SEQ ID NO: 6652 - DNA, 20 bp, synthetic construct
  source 1..20: mol_type = other DNA
gaccaggaacttccccaagc

SEQ ID NO: 6653 - DNA, 20 bp, synthetic construct
  source 1..20: mol_type = other DNA
cctcagggacctccggcttg

SEQ ID NO: 6654 - DNA, 20 bp, synthetic construct
  source 1..20: mol_type = other DNA
taggtggggcgccagagccg

SEQ ID NO: 6655 - DNA, 20 bp, synthetic construct
  source 1..20: mol_type = other DNA
ctaatcttgcgcgtgcgcac

SEQ ID NO: 6656 - DNA, 20 bp, synthetic construct
  source 1..20: mol_type = other DNA
cctgaggcgctctagcgcgc

SEQ ID NO: 6657 - DNA, 20 bp, synthetic construct
  source 1..20: mol_type = other DNA
cagagccggggcacctgcgc

SEQ ID NO: 6658 - DNA, 20 bp, synthetic construct
  source 1..20: mol_type = other DNA
agaacaagtacagagttcag

SEQ ID NO: 6659 - DNA, 20 bp, synthetic construct
  source 1..20: mol_type = other DNA
ggccagaaacagggcatgtg

SEQ ID NO: 6660 - DNA, 20 bp, synthetic construct
  source 1..20: mol_type = other DNA
atacagtgcagtttgactgt

SEQ ID NO: 6661 - DNA, 20 bp, synthetic construct
  source 1..20: mol_type = other DNA
gaacaagtacagagttcagt

SEQ ID NO: 6662 - DNA, 20 bp, synthetic construct
  source 1..20: mol_type = other DNA
aaagaaaaaagtgataacgc

SEQ ID NO: 6663 - DNA, 20 bp, synthetic construct
  source 1..20: mol_type = other DNA
tgggcgctgggccagaaaca

SEQ ID NO: 6664 - DNA, 20 bp, synthetic construct
  source 1..20: mol_type = other DNA
gccagaaacagggcatgtgg

SEQ ID NO: 6665 - DNA, 20 bp, synthetic construct
  source 1..20: mol_type = other DNA
gggccagaaacagggcatgt

SEQ ID NO: 6666 - DNA, 20 bp, synthetic construct
  source 1..20: mol_type = other DNA
tgggccagaaacagggcatg

SEQ ID NO: 6667 - DNA, 20 bp, synthetic construct
  source 1..20: mol_type = other DNA
cagtgcagtttgactgtagg

SEQ ID NO: 6668 - DNA, 20 bp, synthetic construct
  source 1..20: mol_type = other DNA
tgcactgtatgactttgatt

SEQ ID NO: 6669 - DNA, 20 bp, synthetic construct
  source 1..20: mol_type = other DNA
tagagagacaggaaaataca

SEQ ID NO: 6670 - DNA, 20 bp, synthetic construct
  source 1..20: mol_type = other DNA
gtacagagttcagtgggcgc

SEQ ID NO: 6671 - DNA, 20 bp, synthetic construct
  source 1..20: mol_type = other DNA
gcactgtatgactttgattt

SEQ ID NO: 6672 - DNA, 20 bp, synthetic construct
  source 1..20: mol_type = other DNA
gcatgtgggggagggaaaag

SEQ ID NO: 6673 - DNA, 20 bp, synthetic construct
  source 1..20: mol_type = other DNA
accgtcgccatggtcaccgc

SEQ ID NO: 6674 - DNA, 20 bp, synthetic construct
  source 1..20: mol_type = other DNA
tgaccatggcgacggtcgtg

SEQ ID NO: 6675 - DNA, 20 bp, synthetic construct
  source 1..20: mol_type = other DNA
ggtgaccatggcgacggtcg

SEQ ID NO: 6676 - DNA, 20 bp, synthetic construct
  source 1..20: mol_type = other DNA
tccgccgccagcggtgacca

SEQ ID NO: 6677 - DNA, 20 bp, synthetic construct
  source 1..20: mol_type = other DNA
gtcgccatggtcaccgctgg

SEQ ID NO: 6678 - DNA, 20 bp, synthetic construct
  source 1..20: mol_type = other DNA
agggagagccgagtcttccg

SEQ ID NO: 6679 - DNA, 20 bp, synthetic construct
  source 1..20: mol_type = other DNA
gcggaagactcggctctccc

SEQ ID NO: 6680 - DNA, 20 bp, synthetic construct
  source 1..20: mol_type = other DNA
cgggcgccggccctgcgcgt

SEQ ID NO: 6681 - DNA, 20 bp, synthetic construct
  source 1..20: mol_type = other DNA
gccagcggtgaccatggcga

SEQ ID NO: 6682 - DNA, 20 bp, synthetic construct
  source 1..20: mol_type = other DNA
ggggagcggcgtcgaggcca

SEQ ID NO: 6683 - DNA, 20 bp, synthetic construct
  source 1..20: mol_type = other DNA
ccatggcgacggtcgtgggg

SEQ ID NO: 6684 - DNA, 20 bp, synthetic construct
  source 1..20: mol_type = other DNA
gccggcgcccgcggaagact

SEQ ID NO: 6685 - DNA, 20 bp, synthetic construct
  source 1..20: mol_type = other DNA
cagggaggggagcggcgtcg

SEQ ID NO: 6686 - DNA, 20 bp, synthetic construct
  source 1..20: mol_type = other DNA
ctcccctccctggcgccagg

SEQ ID NO: 6687 - DNA, 20 bp, synthetic construct
  source 1..20: mol_type = other DNA
gctcccctccctggcgccag

SEQ ID NO: 6688 - DNA, 20 bp, synthetic construct
  source 1..20: mol_type = other DNA
catgaactaaaattagaact

SEQ ID NO: 6689 - DNA, 20 bp, synthetic construct
  source 1..20: mol_type = other DNA
attaagctgtgaaaagtaga

SEQ ID NO: 6690 - DNA, 20 bp, synthetic construct
  source 1..20: mol_type = other DNA
atgtatgtgagtgcgttctg

SEQ ID NO: 6691 - DNA, 20 bp, synthetic construct
  source 1..20: mol_type = other DNA
cacatgaggcttctttgcga

SEQ ID NO: 6692 - DNA, 20 bp, synthetic construct
  source 1..20: mol_type = other DNA
tccatccaagcagagaaact

SEQ ID NO: 6693 - DNA, 20 bp, synthetic construct
  source 1..20: mol_type = other DNA
agaatagaaagaatcacatg

SEQ ID NO: 6694 - DNA, 20 bp, synthetic construct
  source 1..20: mol_type = other DNA
atattccaagtttctctgct

SEQ ID NO: 6695 - DNA, 20 bp, synthetic construct
  source 1..20: mol_type = other DNA
aaagtagaaggactttgaat

SEQ ID NO: 6696 - DNA, 20 bp, synthetic construct
  source 1..20: mol_type = other DNA
acagacattataaaactatc

SEQ ID NO: 6697 - DNA, 20 bp, synthetic construct
  source 1..20: mol_type = other DNA
tccaagtttctctgcttgga

SEQ ID NO: 6698 - DNA, 20 bp, synthetic construct
  source 1..20: mol_type = other DNA
ttgcagatccatggtttact

SEQ ID NO: 6699 - DNA, 20 bp, synthetic construct
  source 1..20: mol_type = other DNA
tttgcagatccatggtttac

SEQ ID NO: 6700 - DNA, 20 bp, synthetic construct
  source 1..20: mol_type = other DNA
ggaccacgcggactcccctg

SEQ ID NO: 6701 - DNA, 20 bp, synthetic construct
  source 1..20: mol_type = other DNA
agtccccgcccagacaacgc

SEQ ID NO: 6702 - DNA, 20 bp, synthetic construct
  source 1..20: mol_type = other DNA
agccctggcctaggtcccag

SEQ ID NO: 6703 - DNA, 20 bp, synthetic construct
  source 1..20: mol_type = other DNA
gtccccgcccagacaacgca

SEQ ID NO: 6704 - DNA, 20 bp, synthetic construct
  source 1..20: mol_type = other DNA
cccgcagcaccgcccgcctg

SEQ ID NO: 6705 - DNA, 20 bp, synthetic construct
  source 1..20: mol_type = other DNA
gacccccaggggagtccgcg

SEQ ID NO: 6706 - DNA, 20 bp, synthetic construct
  source 1..20: mol_type = other DNA
ggcggggactgggagtccgc

SEQ ID NO: 6707 - DNA, 20 bp, synthetic construct
  source 1..20: mol_type = other DNA
gcctccctgcgttgtctggg

SEQ ID NO: 6708 - DNA, 20 bp, synthetic construct
  source 1..20: mol_type = other DNA
ggagtccgcgggcccgcagg

SEQ ID NO: 6709 - DNA, 20 bp, synthetic construct
  source 1..20: mol_type = other DNA
cgcaggcgggcggtgctgcg

SEQ ID NO: 6710 - DNA, 20 bp, synthetic construct
  source 1..20: mol_type = other DNA
tccgcgggcccgcaggcggg

SEQ ID NO: 6711 - DNA, 20 bp, synthetic construct
  source 1..20: mol_type = other DNA
gggcggggactgggagtccg

SEQ ID NO: 6712 - DNA, 20 bp, synthetic construct
  source 1..20: mol_type = other DNA
gagtccgcgggcccgcaggc

SEQ ID NO: 6713 - DNA, 20 bp, synthetic construct
  source 1..20: mol_type = other DNA
tgcggggcgggccgagctgg

SEQ ID NO: 6714 - DNA, 20 bp, synthetic construct
  source 1..20: mol_type = other DNA
cccgcaggcgggcggtgctg

SEQ ID NO: 6715 - DNA, 20 bp, synthetic construct
  source 1..20: mol_type = other DNA
cacttcaggggcctacacac

SEQ ID NO: 6716 - DNA, 20 bp, synthetic construct
  source 1..20: mol_type = other DNA
gtgtgtaggcccctgaagtg

SEQ ID NO: 6717 - DNA, 20 bp, synthetic construct
  source 1..20: mol_type = other DNA
agtgtgtaggcccctgaagt

SEQ ID NO: 6718 - DNA, 20 bp, synthetic construct
  source 1..20: mol_type = other DNA
atgggcacccagcaatcatg

SEQ ID NO: 6719 - DNA, 20 bp, synthetic construct
  source 1..20: mol_type = other DNA
ttgggagctccccacttcag

SEQ ID NO: 6720 - DNA, 20 bp, synthetic construct
  source 1..20: mol_type = other DNA
gaatccatgatagacccact

SEQ ID NO: 6721 - DNA, 20 bp, synthetic construct
  source 1..20: mol_type = other DNA
acccagcaatcatgaggctc

SEQ ID NO: 6722 - DNA, 20 bp, synthetic construct
  source 1..20: mol_type = other DNA
ctgttgcattaccagtgtgt

SEQ ID NO: 6723 - DNA, 20 bp, synthetic construct
  source 1..20: mol_type = other DNA
aatccatgatagacccactt

SEQ ID NO: 6724 - DNA, 20 bp, synthetic construct
  source 1..20: mol_type = other DNA
aagagtgacctcataaagca

SEQ ID NO: 6725 - DNA, 20 bp, synthetic construct
  source 1..20: mol_type = other DNA
cagtgtgtaggcccctgaag

SEQ ID NO: 6726 - DNA, 20 bp, synthetic construct
  source 1..20: mol_type = other DNA
tcatggattctctcttccca

SEQ ID NO: 6727 - DNA, 20 bp, synthetic construct
  source 1..20: mol_type = other DNA
tgaagtggggagctcccaag

SEQ ID NO: 6728 - DNA, 20 bp, synthetic construct
  source 1..20: mol_type = other DNA
gaagtggggagctcccaagt

SEQ ID NO: 6729 - DNA, 20 bp, synthetic construct
  source 1..20: mol_type = other DNA
agcagagaaggggccacgaa

SEQ ID NO: 6730 - DNA, 20 bp, synthetic construct
  source 1..20: mol_type = other DNA
gcctcaagcccctcccgcgg

SEQ ID NO: 6731 - DNA, 20 bp, synthetic construct
  source 1..20: mol_type = other DNA
tcggcaggtctgaacccgcg

SEQ ID NO: 6732 - DNA, 20 bp, synthetic construct
  source 1..20: mol_type = other DNA
gtctgaacccgcgtgggtgt

SEQ ID NO: 6733 - DNA, 20 bp, synthetic construct
  source 1..20: mol_type = other DNA
ccgggcgagctgcagccctg

SEQ ID NO: 6734 - DNA, 20 bp, synthetic construct
  source 1..20: mol_type = other DNA
cgcgtgggtgtaggcgctgg

SEQ ID NO: 6735 - DNA, 20 bp, synthetic construct
  source 1..20: mol_type = other DNA
gggtcgacctggcactgcgg

SEQ ID NO: 6736 - DNA, 20 bp, synthetic construct
  source 1..20: mol_type = other DNA
gtaggcgctgggggtcgacc

SEQ ID NO: 6737 - DNA, 20 bp, synthetic construct
  source 1..20: mol_type = other DNA
ccccagcgcctacacccacg

SEQ ID NO: 6738 - DNA, 20 bp, synthetic construct
  source 1..20: mol_type = other DNA
cccagcgcctacacccacgc

SEQ ID NO: 6739 - DNA, 20 bp, synthetic construct
  source 1..20: mol_type = other DNA
tgggggtcgacctggcactg

SEQ ID NO: 6740 - DNA, 20 bp, synthetic construct
  source 1..20: mol_type = other DNA
ccgcgtgggtgtaggcgctg

SEQ ID NO: 6741 - DNA, 20 bp, synthetic construct
  source 1..20: mol_type = other DNA
tcaagcccctcccgcggcgg

SEQ ID NO: 6742 - DNA, 20 bp, synthetic construct
  source 1..20: mol_type = other DNA
tgccgagcgcccgccgccgc

SEQ ID NO: 6743 - DNA, 20 bp, synthetic construct
  source 1..20: mol_type = other DNA
acccgcgtgggtgtaggcgc

SEQ ID NO: 6744 - DNA, 20 bp, synthetic construct
  source 1..20: mol_type = other DNA
cggcaggtctgaacccgcgt

SEQ ID NO: 6745 - DNA, 20 bp, synthetic construct
  source 1..20: mol_type = other DNA
gttgagcagctagggaaccc

SEQ ID NO: 6746 - DNA, 20 bp, synthetic construct
  source 1..20: mol_type = other DNA
gaagagaggctcttatcttg

SEQ ID NO: 6747 - DNA, 20 bp, synthetic construct
  source 1..20: mol_type = other DNA
tgagcagctagggaaccctg

SEQ ID NO: 6748 - DNA, 20 bp, synthetic construct
  source 1..20: mol_type = other DNA
tgtgaggtgttgagcagcta

SEQ ID NO: 6749 - DNA, 20 bp, synthetic construct
  source 1..20: mol_type = other DNA
tgggggcctccaaggagcag

SEQ ID NO: 6750 - DNA, 20 bp, synthetic construct
  source 1..20: mol_type = other DNA
gaggctcttatcttgtgggc

SEQ ID NO: 6751 - DNA, 20 bp, synthetic construct
  source 1..20: mol_type = other DNA
gcagctagggaaccctgggg

SEQ ID NO: 6752 - DNA, 20 bp, synthetic construct
  source 1..20: mol_type = other DNA
ggcgctgggcctaggaagag

SEQ ID NO: 6753 - DNA, 20 bp, synthetic construct
  source 1..20: mol_type = other DNA
tcttgtgggcaggaagtgtg

SEQ ID NO: 6754 - DNA, 20 bp, synthetic construct
  source 1..20: mol_type = other DNA
tgctccccgccgcctcccca

SEQ ID NO: 6755 - DNA, 20 bp, synthetic construct
  source 1..20: mol_type = other DNA
ttgagcagctagggaaccct

SEQ ID NO: 6756 - DNA, 20 bp, synthetic construct
  source 1..20: mol_type = other DNA
tgtgttgtggtgaggaggag

SEQ ID NO: 6757 - DNA, 20 bp, synthetic construct
  source 1..20: mol_type = other DNA
cccatgcccctgctccttgg

SEQ ID NO: 6758 - DNA, 20 bp, synthetic construct
  source 1..20: mol_type = other DNA
gtgtgaggtgttgagcagct

SEQ ID NO: 6759 - DNA, 20 bp, synthetic construct
  source 1..20: mol_type = other DNA
ggaaaggggctgcaggcgct

SEQ ID NO: 6760 - DNA, 20 bp, synthetic construct
  source 1..20: mol_type = other DNA
ggaggtaccactcctagaag

SEQ ID NO: 6761 - DNA, 20 bp, synthetic construct
  source 1..20: mol_type = other DNA
cccatcaggagcgagcttgg

SEQ ID NO: 6762 - DNA, 20 bp, synthetic construct
  source 1..20: mol_type = other DNA
cggcagcgaccaatcattgg

SEQ ID NO: 6763 - DNA, 20 bp, synthetic construct
  source 1..20: mol_type = other DNA
tgggaggtaccactcctaga

SEQ ID NO: 6764 - DNA, 20 bp, synthetic construct
  source 1..20: mol_type = other DNA
cctgcagatagccaaacagt

SEQ ID NO: 6765 - DNA, 20 bp, synthetic construct
  source 1..20: mol_type = other DNA
aggggctggcctccaatgat

SEQ ID NO: 6766 - DNA, 20 bp, synthetic construct
  source 1..20: mol_type = other DNA
ccctgcagatagccaaacag

SEQ ID NO: 6767 - DNA, 20 bp, synthetic construct
  source 1..20: mol_type = other DNA
cactgtttggctatctgcag

SEQ ID NO: 6768 - DNA, 20 bp, synthetic construct
  source 1..20: mol_type = other DNA
caaggcgccccttctaggag

SEQ ID NO: 6769 - DNA, 20 bp, synthetic construct
  source 1..20: mol_type = other DNA
gggtagaacgtaaaaacgaa

SEQ ID NO: 6770 - DNA, 20 bp, synthetic construct
  source 1..20: mol_type = other DNA
gggaggtaccactcctagaa

SEQ ID NO: 6771 - DNA, 20 bp, synthetic construct
  source 1..20: mol_type = other DNA
taaaaacgaacggtcctcaa

SEQ ID NO: 6772 - DNA, 20 bp, synthetic construct
  source 1..20: mol_type = other DNA
ttctaggagtggtacctccc

SEQ ID NO: 6773 - DNA, 20 bp, synthetic construct
  source 1..20: mol_type = other DNA
ccccaagctcgctcctgatg

SEQ ID NO: 6774 - DNA, 20 bp, synthetic construct
  source 1..20: mol_type = other DNA
agtggtacctcccaggataa

SEQ ID NO: 6775 - DNA, 20 bp, synthetic construct
  source 1..20: mol_type = other DNA
gggacccacgcgctgactcg

SEQ ID NO: 6776 - DNA, 20 bp, synthetic construct
  source 1..20: mol_type = other DNA
ggtgccccgagtcagcgcgt

SEQ ID NO: 6777 - DNA, 20 bp, synthetic construct
  source 1..20: mol_type = other DNA
cggcctcagcacaacaagcg

SEQ ID NO: 6778 - DNA, 20 bp, synthetic construct
  source 1..20: mol_type = other DNA
ccgactccaaaggaaaccga

SEQ ID NO: 6779 - DNA, 20 bp, synthetic construct
  source 1..20: mol_type = other DNA
ctcagcacaacaagcgcggg

SEQ ID NO: 6780 - DNA, 20 bp, synthetic construct
  source 1..20: mol_type = other DNA
ggcctcagcacaacaagcgc

SEQ ID NO: 6781 - DNA, 20 bp, synthetic construct
  source 1..20: mol_type = other DNA
gcgtggctatatcggccccg

SEQ ID NO: 6782 - DNA, 20 bp, synthetic construct
  source 1..20: mol_type = other DNA
ggtttcctttggagtcggcg

SEQ ID NO: 6783 - DNA, 20 bp, synthetic construct
  source 1..20: mol_type = other DNA
gggtgccccgagtcagcgcg

SEQ ID NO: 6784 - DNA, 20 bp, synthetic construct
  source 1..20: mol_type = other DNA
gcgatcgcgcagccaatccc

SEQ ID NO: 6785 - DNA, 20 bp, synthetic construct
  source 1..20: mol_type = other DNA
gccgactccaaaggaaaccg

SEQ ID NO: 6786 - DNA, 20 bp, synthetic construct
  source 1..20: mol_type = other DNA
tagccacgccctcctttcca

SEQ ID NO: 6787 - DNA, 20 bp, synthetic construct
  source 1..20: mol_type = other DNA
ctccaaaggaaaccgaggga

SEQ ID NO: 6788 - DNA, 20 bp, synthetic construct
  source 1..20: mol_type = other DNA
ccgagtcagcgcgtgggtcc

SEQ ID NO: 6789 - DNA, 20 bp, synthetic construct
  source 1..20: mol_type = other DNA
cagcgcgtgggtcccggcag

SEQ ID NO: 6790 - DNA, 20 bp, synthetic construct
  source 1..20: mol_type = other DNA
agtactatcctggagtcacg

SEQ ID NO: 6791 - DNA, 20 bp, synthetic construct
  source 1..20: mol_type = other DNA
aaacccagatagtactatcc

SEQ ID NO: 6792 - DNA, 20 bp, synthetic construct
  source 1..20: mol_type = other DNA
actatcctggagtcacgcgg

SEQ ID NO: 6793 - DNA, 20 bp, synthetic construct
  source 1..20: mol_type = other DNA
gctggctgctgggccgacga

SEQ ID NO: 6794 - DNA, 20 bp, synthetic construct
  source 1..20: mol_type = other DNA
ctggctgctgggccgacgag

SEQ ID NO: 6795 - DNA, 20 bp, synthetic construct
  source 1..20: mol_type = other DNA
gcaggcgtcttccctgggaa

SEQ ID NO: 6796 - DNA, 20 bp, synthetic construct
  source 1..20: mol_type = other DNA
ttccaaagggtcccttccca

SEQ ID NO: 6797 - DNA, 20 bp, synthetic construct
  source 1..20: mol_type = other DNA
gctgctgggccgacgagggg

SEQ ID NO: 6798 - DNA, 20 bp, synthetic construct
  source 1..20: mol_type = other DNA
cccgcccggctcggccacag

SEQ ID NO: 6799 - DNA, 20 bp, synthetic construct
  source 1..20: mol_type = other DNA
ggctggctgctgggccgacg

SEQ ID NO: 6800 - DNA, 20 bp, synthetic construct
  source 1..20: mol_type = other DNA
ggcctggcaccgcccctcgt

SEQ ID NO: 6801 - DNA, 20 bp, synthetic construct
  source 1..20: mol_type = other DNA
tgtggccgagccgggcgggt

SEQ ID NO: 6802 - DNA, 20 bp, synthetic construct
  source 1..20: mol_type = other DNA
cccgctgtggccgagccggg

SEQ ID NO: 6803 - DNA, 20 bp, synthetic construct
  source 1..20: mol_type = other DNA
cgcccggctcggccacagcg

SEQ ID NO: 6804 - DNA, 20 bp, synthetic construct
  source 1..20: mol_type = other DNA
ccccgcgccccgccccgctg

SEQ ID NO: 6805 - DNA, 20 bp, synthetic construct
  source 1..20: mol_type = other DNA
gatgtgactcccgcttgaag

SEQ ID NO: 6806 - DNA, 20 bp, synthetic construct
  source 1..20: mol_type = other DNA
cagaggctcgtcccacagca

SEQ ID NO: 6807 - DNA, 20 bp, synthetic construct
  source 1..20: mol_type = other DNA
ctggcgcgtccccgcccaag

SEQ ID NO: 6808 - DNA, 20 bp, synthetic construct
  source 1..20: mol_type = other DNA
gtcccacagcaaggagactg

SEQ ID NO: 6809 - DNA, 20 bp, synthetic construct
  source 1..20: mol_type = other DNA
tcaagcgggagtcacatctc

SEQ ID NO: 6810 - DNA, 20 bp, synthetic construct
  source 1..20: mol_type = other DNA
gcgggagtcacatctctggc

SEQ ID NO: 6811 - DNA, 20 bp, synthetic construct
  source 1..20: mol_type = other DNA
ccgccccagtctccttgctg

SEQ ID NO: 6812 - DNA, 20 bp, synthetic construct
  source 1..20: mol_type = other DNA
ccacagcaaggagactgggg

SEQ ID NO: 6813 - DNA, 20 bp, synthetic construct
  source 1..20: mol_type = other DNA
ccttgggcggggacgcgcca

SEQ ID NO: 6814 - DNA, 20 bp, synthetic construct
  source 1..20: mol_type = other DNA
ggacgcgccagggaagcgcg

SEQ ID NO: 6815 - DNA, 20 bp, synthetic construct
  source 1..20: mol_type = other DNA
cgccccagtctccttgctgt

SEQ ID NO: 6816 - DNA, 20 bp, synthetic construct
  source 1..20: mol_type = other DNA
ccaagcgggagcgcgcgctg

SEQ ID NO: 6817 - DNA, 20 bp, synthetic construct
  source 1..20: mol_type = other DNA
ccttcccgcccccttgggcg

SEQ ID NO: 6818 - DNA, 20 bp, synthetic construct
  source 1..20: mol_type = other DNA
catctctggcaggaaggcag

SEQ ID NO: 6819 - DNA, 20 bp, synthetic construct
  source 1..20: mol_type = other DNA
ggagtagggccgcgcccaag

SEQ ID NO: 6820 - DNA, 20 bp, synthetic construct
  source 1..20: mol_type = other DNA
tcttgcacagggaaccgcaa

SEQ ID NO: 6821 - DNA, 20 bp, synthetic construct
  source 1..20: mol_type = other DNA
ccagccccaacagtgatggg

SEQ ID NO: 6822 - DNA, 20 bp, synthetic construct
  source 1..20: mol_type = other DNA
tgcaagatgagtctctgagt

SEQ ID NO: 6823 - DNA, 20 bp, synthetic construct
  source 1..20: mol_type = other DNA
gagcagcaggggcctcagca

SEQ ID NO: 6824 - DNA, 20 bp, synthetic construct
  source 1..20: mol_type = other DNA
gtgcaagatgagtctctgag

SEQ ID NO: 6825 - DNA, 20 bp, synthetic construct
  source 1..20: mol_type = other DNA
ctcacacttgcagcagaggg

SEQ ID NO: 6826 - DNA, 20 bp, synthetic construct
  source 1..20: mol_type = other DNA
gaagaagagggagagagtgc

SEQ ID NO: 6827 - DNA, 20 bp, synthetic construct
  source 1..20: mol_type = other DNA
acacttgcagcagagggtgg

SEQ ID NO: 6828 - DNA, 20 bp, synthetic construct
  source 1..20: mol_type = other DNA
gaaggtggtggggaagaaga

SEQ ID NO: 6829 - DNA, 20 bp, synthetic construct
  source 1..20: mol_type = other DNA
tccgttaaggagggtgaagg

SEQ ID NO: 6830 - DNA, 20 bp, synthetic construct
  source 1..20: mol_type = other DNA
ctgcacctgcagccctgctg

SEQ ID NO: 6831 - DNA, 20 bp, synthetic construct
  source 1..20: mol_type = other DNA
gcagcagagggtggaggctc

SEQ ID NO: 6832 - DNA, 20 bp, synthetic construct
  source 1..20: mol_type = other DNA
gttaaggagggtgaaggtgg

SEQ ID NO: 6833 - DNA, 20 bp, synthetic construct
  source 1..20: mol_type = other DNA
taaggagggtgaaggtggtg

SEQ ID NO: 6834 - DNA, 20 bp, synthetic construct
  source 1..20: mol_type = other DNA
gggctggggcctttgagaga

SEQ ID NO: 6835 - DNA, 20 bp, synthetic construct
  source 1..20: mol_type = other DNA
cgggccgctcacccctcgag

SEQ ID NO: 6836 - DNA, 20 bp, synthetic construct
  source 1..20: mol_type = other DNA
acggaaatgaagctacgctc

SEQ ID NO: 6837 - DNA, 20 bp, synthetic construct
  source 1..20: mol_type = other DNA
gagcccacgagcccctcgag

SEQ ID NO: 6838 - DNA, 20 bp, synthetic construct
  source 1..20: mol_type = other DNA
gggaaatgtagtccagcgct

SEQ ID NO: 6839 - DNA, 20 bp, synthetic construct
  source 1..20: mol_type = other DNA
tagccggccagaacgccagg

SEQ ID NO: 6840 - DNA, 20 bp, synthetic construct
  source 1..20: mol_type = other DNA
ggaaatgtagtccagcgctc

SEQ ID NO: 6841 - DNA, 20 bp, synthetic construct
  source 1..20: mol_type = other DNA
gcgggacaagcaggttccac

SEQ ID NO: 6842 - DNA, 20 bp, synthetic construct
  source 1..20: mol_type = other DNA
ctggccggctagccaagcgc

SEQ ID NO: 6843 - DNA, 20 bp, synthetic construct
  source 1..20: mol_type = other DNA
cggaaatgaagctacgctcc

SEQ ID NO: 6844 - DNA, 20 bp, synthetic construct
  source 1..20: mol_type = other DNA
gactacatttcccagaggca

SEQ ID NO: 6845 - DNA, 20 bp, synthetic construct
  source 1..20: mol_type = other DNA
gccagaacgccaggaggccc

SEQ ID NO: 6846 - DNA, 20 bp, synthetic construct
  source 1..20: mol_type = other DNA
cgagcccacgagcccctcga

SEQ ID NO: 6847 - DNA, 20 bp, synthetic construct
  source 1..20: mol_type = other DNA
ccgagcccacgagcccctcg

SEQ ID NO: 6848 - DNA, 20 bp, synthetic construct
  source 1..20: mol_type = other DNA
aacctccggggcgctgcagg

SEQ ID NO: 6849 - DNA, 20 bp, synthetic construct
  source 1..20: mol_type = other DNA
cccgggccgctcacccctcg

SEQ ID NO: 6850 - DNA, 20 bp, synthetic construct
  source 1..20: mol_type = other DNA
gggattaactccaaacacgc

SEQ ID NO: 6851 - DNA, 20 bp, synthetic construct
  source 1..20: mol_type = other DNA
attaactccaaacacgctgg

SEQ ID NO: 6852 - DNA, 20 bp, synthetic construct
  source 1..20: mol_type = other DNA
gggcggagtccaacctaatg

SEQ ID NO: 6853 - DNA, 20 bp, synthetic construct
  source 1..20: mol_type = other DNA
ccaaacctccaacctcacag

SEQ ID NO: 6854 - DNA, 20 bp, synthetic construct
  source 1..20: mol_type = other DNA
ggagttaatccccattaggt

SEQ ID NO: 6855 - DNA, 20 bp, synthetic construct
  source 1..20: mol_type = other DNA
gagctgctttgtccgctgtg

SEQ ID NO: 6856 - DNA, 20 bp, synthetic construct
  source 1..20: mol_type = other DNA
tttctcccaaaggtaaagca

SEQ ID NO: 6857 - DNA, 20 bp, synthetic construct
  source 1..20: mol_type = other DNA
ttcaagtgcctgtatgtctg

SEQ ID NO: 6858 - DNA, 20 bp, synthetic construct
  source 1..20: mol_type = other DNA
ttacctttgggagaaagggg

SEQ ID NO: 6859 - DNA, 20 bp, synthetic construct
  source 1..20: mol_type = other DNA
gctttacctttgggagaaag

SEQ ID NO: 6860 - DNA, 20 bp, synthetic construct
  source 1..20: mol_type = other DNA
tttgtccgctgtgaggttgg

SEQ ID NO: 6861 - DNA, 20 bp, synthetic construct
  source 1..20: mol_type = other DNA
gtgcctgtatgtctgaggct

SEQ ID NO: 6862 - DNA, 20 bp, synthetic construct
  source 1..20: mol_type = other DNA
aaacccagcctcagacatac

SEQ ID NO: 6863 - DNA, 20 bp, synthetic construct
  source 1..20: mol_type = other DNA
tttgaagcctccagcgtgtt

SEQ ID NO: 6864 - DNA, 20 bp, synthetic construct
  source 1..20: mol_type = other DNA
gaaatagaaagtagcttagt

SEQ ID NO: 6865 - DNA, 20 bp, synthetic construct
  source 1..20: mol_type = other DNA
tggcgggtggctctaaggtg

SEQ ID NO: 6866 - DNA, 20 bp, synthetic construct
  source 1..20: mol_type = other DNA
cgggtggctctaaggtgagg

SEQ ID NO: 6867 - DNA, 20 bp, synthetic construct
  source 1..20: mol_type = other DNA
atcacagcacagcagtccca

SEQ ID NO: 6868 - DNA, 20 bp, synthetic construct
  source 1..20: mol_type = other DNA
aggggatcgcagccaaaggg

SEQ ID NO: 6869 - DNA, 20 bp, synthetic construct
  source 1..20: mol_type = other DNA
ggggaggggatcgcagccaa

SEQ ID NO: 6870 - DNA, 20 bp, synthetic construct
  source 1..20: mol_type = other DNA
gggaggggatcgcagccaaa

SEQ ID NO: 6871 - DNA, 20 bp, synthetic construct
  source 1..20: mol_type = other DNA
aatcagctgcctgccaaccc

SEQ ID NO: 6872 - DNA, 20 bp, synthetic construct
  source 1..20: mol_type = other DNA
atcagctgcctgccaaccct

SEQ ID NO: 6873 - DNA, 20 bp, synthetic construct
  source 1..20: mol_type = other DNA
gggaggaggattgtggcact

SEQ ID NO: 6874 - DNA, 20 bp, synthetic construct
  source 1..20: mol_type = other DNA
gatcgcagccaaagggcgga

SEQ ID NO: 6875 - DNA, 20 bp, synthetic construct
  source 1..20: mol_type = other DNA
cagcacagcagtcccagggt

SEQ ID NO: 6876 - DNA, 20 bp, synthetic construct
  source 1..20: mol_type = other DNA
tggcactgggctgggtgacg

SEQ ID NO: 6877 - DNA, 20 bp, synthetic construct
  source 1..20: mol_type = other DNA
aatcacagcacagcagtccc

SEQ ID NO: 6878 - DNA, 20 bp, synthetic construct
  source 1..20: mol_type = other DNA
cactgggctgggtgacgagg

SEQ ID NO: 6879 - DNA, 20 bp, synthetic construct
  source 1..20: mol_type = other DNA
ttggggagggaggaggattg

SEQ ID NO: 6880 - DNA, 20 bp, synthetic construct
  source 1..20: mol_type = other DNA
tataacaacgcaattcgagg

SEQ ID NO: 6881 - DNA, 20 bp, synthetic construct
  source 1..20: mol_type = other DNA
ggagtgtaaagaccgtgaag

SEQ ID NO: 6882 - DNA, 20 bp, synthetic construct
  source 1..20: mol_type = other DNA
ctcccgactgcgcattccgg

SEQ ID NO: 6883 - DNA, 20 bp, synthetic construct
  source 1..20: mol_type = other DNA
cggatggcacaaaggcgagg

SEQ ID NO: 6884 - DNA, 20 bp, synthetic construct
  source 1..20: mol_type = other DNA
gaacggaatgggcggaactc

SEQ ID NO: 6885 - DNA, 20 bp, synthetic construct
  source 1..20: mol_type = other DNA
cggggccaagaatacacccc

SEQ ID NO: 6886 - DNA, 20 bp, synthetic construct
  source 1..20: mol_type = other DNA
gagtgtaaagaccgtgaaga

SEQ ID NO: 6887 - DNA, 20 bp, synthetic construct
  source 1..20: mol_type = other DNA
gagagacccggatggcacaa

SEQ ID NO: 6888 - DNA, 20 bp, synthetic construct
  source 1..20: mol_type = other DNA
gctcgcgcgagagacccgga

SEQ ID NO: 6889 - DNA, 20 bp, synthetic construct
  source 1..20: mol_type = other DNA
aatcgctcgcgcgagagacc

SEQ ID NO: 6890 - DNA, 20 bp, synthetic construct
  source 1..20: mol_type = other DNA
gattgggtgttctttcatag

SEQ ID NO: 6891 - DNA, 20 bp, synthetic construct
  source 1..20: mol_type = other DNA
acccggatggcacaaaggcg

SEQ ID NO: 6892 - DNA, 20 bp, synthetic construct
  source 1..20: mol_type = other DNA
cagcttgctgggagaaaaag

SEQ ID NO: 6893 - DNA, 20 bp, synthetic construct
  source 1..20: mol_type = other DNA
tgtaaagaccgtgaagaggg

SEQ ID NO: 6894 - DNA, 20 bp, synthetic construct
  source 1..20: mol_type = other DNA
cttgctgggagaaaaagggg

SEQ ID NO: 6895 - DNA, 20 bp, synthetic construct
  source 1..20: mol_type = other DNA
gagatctctgaccagaagca

SEQ ID NO: 6896 - DNA, 20 bp, synthetic construct
  source 1..20: mol_type = other DNA
gaggcaccgctccaaggctg

SEQ ID NO: 6897 - DNA, 20 bp, synthetic construct
  source 1..20: mol_type = other DNA
tggaccccgcttaagaccaa

SEQ ID NO: 6898 - DNA, 20 bp, synthetic construct
  source 1..20: mol_type = other DNA
atggaccccgcttaagacca

SEQ ID NO: 6899 - DNA, 20 bp, synthetic construct
  source 1..20: mol_type = other DNA
tccactgacatcagagccgc

SEQ ID NO: 6900 - DNA, 20 bp, synthetic construct
  source 1..20: mol_type = other DNA
tctggtcagagatctcctgc

SEQ ID NO: 6901 - DNA, 20 bp, synthetic construct
  source 1..20: mol_type = other DNA
ggaggcgaggcaccgctcca

SEQ ID NO: 6902 - DNA, 20 bp, synthetic construct
  source 1..20: mol_type = other DNA
ggagatctctgaccagaagc

SEQ ID NO: 6903 - DNA, 20 bp, synthetic construct
  source 1..20: mol_type = other DNA
gtgcctcgcctcccaatccc

SEQ ID NO: 6904 - DNA, 20 bp, synthetic construct
  source 1..20: mol_type = other DNA
ccccttccccagccttggag

SEQ ID NO: 6905 - DNA, 20 bp, synthetic construct
  source 1..20: mol_type = other DNA
tctgaccagaagcagggaga

SEQ ID NO: 6906 - DNA, 20 bp, synthetic construct
  source 1..20: mol_type = other DNA
cggagggacccgggattggg

SEQ ID NO: 6907 - DNA, 20 bp, synthetic construct
  source 1..20: mol_type = other DNA
accgctccaaggctggggaa

SEQ ID NO: 6908 - DNA, 20 bp, synthetic construct
  source 1..20: mol_type = other DNA
agcctgcggcggagggaccc

SEQ ID NO: 6909 - DNA, 20 bp, synthetic construct
  source 1..20: mol_type = other DNA
ggacccgggattgggaggcg

SEQ ID NO: 6910 - DNA, 20 bp, synthetic construct
  source 1..20: mol_type = other DNA
agcaccgcgattgcaagatg

SEQ ID NO: 6911 - DNA, 20 bp, synthetic construct
  source 1..20: mol_type = other DNA
ctcgccccatcttgcaatcg

SEQ ID NO: 6912 - DNA, 20 bp, synthetic construct
  source 1..20: mol_type = other DNA
gcgggagggctagcagcgag

SEQ ID NO: 6913 - DNA, 20 bp, synthetic construct
  source 1..20: mol_type = other DNA
ggagcaccgcgattgcaaga

SEQ ID NO: 6914 - DNA, 20 bp, synthetic construct
  source 1..20: mol_type = other DNA
tcttgccttgagctgagtgt

SEQ ID NO: 6915 - DNA, 20 bp, synthetic construct
  source 1..20: mol_type = other DNA
gaggttccggggttgaaaat

SEQ ID NO: 6916 - DNA, 20 bp, synthetic construct
  source 1..20: mol_type = other DNA
ctcccgccctcctccagcga

SEQ ID NO: 6917 - DNA, 20 bp, synthetic construct
  source 1..20: mol_type = other DNA
ggagggctagcagcgagcgg

SEQ ID NO: 6918 - DNA, 20 bp, synthetic construct
  source 1..20: mol_type = other DNA
gcctggcgctccctcgctgg

SEQ ID NO: 6919 - DNA, 20 bp, synthetic construct
  source 1..20: mol_type = other DNA
ggcgctccctcgctggagga

SEQ ID NO: 6920 - DNA, 20 bp, synthetic construct
  source 1..20: mol_type = other DNA
agcgagcggaggaggttccg

SEQ ID NO: 6921 - DNA, 20 bp, synthetic construct
  source 1..20: mol_type = other DNA
gggctagcagcgagcggagg

SEQ ID NO: 6922 - DNA, 20 bp, synthetic construct
  source 1..20: mol_type = other DNA
tggcgctccctcgctggagg

SEQ ID NO: 6923 - DNA, 20 bp, synthetic construct
  source 1..20: mol_type = other DNA
cctcccgccctcctccagcg

SEQ ID NO: 6924 - DNA, 20 bp, synthetic construct
  source 1..20: mol_type = other DNA
gctccctcgctggaggaggg

SEQ ID NO: 6925 - DNA, 20 bp, synthetic construct
  source 1..20: mol_type = other DNA
ctgacgtagaggccgctcgg

SEQ ID NO: 6926 - DNA, 20 bp, synthetic construct
  source 1..20: mol_type = other DNA
ctctacgtcagcgccccggg

SEQ ID NO: 6927 - DNA, 20 bp, synthetic construct
  source 1..20: mol_type = other DNA
cactagcgccctgagccccg

SEQ ID NO: 6928 - DNA, 20 bp, synthetic construct
  source 1..20: mol_type = other DNA
caaaagggaatggacgcgcg

SEQ ID NO: 6929 - DNA, 20 bp, synthetic construct
  source 1..20: mol_type = other DNA
ggagccgcggccccaccgaa

SEQ ID NO: 6930 - DNA, 20 bp, synthetic construct
  source 1..20: mol_type = other DNA
acaaaagggaatggacgcgc

SEQ ID NO: 6931 - DNA, 20 bp, synthetic construct
  source 1..20: mol_type = other DNA
tcagggcgctagtgtgcgcg

SEQ ID NO: 6932 - DNA, 20 bp, synthetic construct
  source 1..20: mol_type = other DNA
gcgcgggacacaaaagggaa

SEQ ID NO: 6933 - DNA, 20 bp, synthetic construct
  source 1..20: mol_type = other DNA
gcgctgacgtagaggccgct

SEQ ID NO: 6934 - DNA, 20 bp, synthetic construct
  source 1..20: mol_type = other DNA
gggagccgcggccccaccga

SEQ ID NO: 6935 - DNA, 20 bp, synthetic construct
  source 1..20: mol_type = other DNA
ggccgggggtcccttcggtg

SEQ ID NO: 6936 - DNA, 20 bp, synthetic construct
  source 1..20: mol_type = other DNA
cacaaaagggaatggacgcg

SEQ ID NO: 6937 - DNA, 20 bp, synthetic construct
  source 1..20: mol_type = other DNA
aaaagggaatggacgcgcgg

SEQ ID NO: 6938 - DNA, 20 bp, synthetic construct
  source 1..20: mol_type = other DNA
gctcagggcgctagtgtgcg

SEQ ID NO: 6939 - DNA, 20 bp, synthetic construct
  source 1..20: mol_type = other DNA
cagggcgctagtgtgcgcgg

SEQ ID NO: 6940 - DNA, 20 bp, synthetic construct
  source 1..20: mol_type = other DNA
cagtcctgacgtcctacccc

SEQ ID NO: 6941 - DNA, 20 bp, synthetic construct
  source 1..20: mol_type = other DNA
tcccccgaccggaagtcgag

SEQ ID NO: 6942 - DNA, 20 bp, synthetic construct
  source 1..20: mol_type = other DNA
gtggtgggaagcctcgcgag

SEQ ID NO: 6943 - DNA, 20 bp, synthetic construct
  source 1..20: mol_type = other DNA
gttccaagaccccaagtggt

SEQ ID NO: 6944 - DNA, 20 bp, synthetic construct
  source 1..20: mol_type = other DNA
gcgcctccaagactatgcgc

SEQ ID NO: 6945 - DNA, 20 bp, synthetic construct
  source 1..20: mol_type = other DNA
cccggttccaagaccccaag

SEQ ID NO: 6946 - DNA, 20 bp, synthetic construct
  source 1..20: mol_type = other DNA
ggttccaagaccccaagtgg

SEQ ID NO: 6947 - DNA, 20 bp, synthetic construct
  source 1..20: mol_type = other DNA
gcgaggcttcccaccacttg

SEQ ID NO: 6948 - DNA, 20 bp, synthetic construct
  source 1..20: mol_type = other DNA
acttggggtcttggaaccgg

SEQ ID NO: 6949 - DNA, 20 bp, synthetic construct
  source 1..20: mol_type = other DNA
gcgcctgcgcatagtcttgg

SEQ ID NO: 6950 - DNA, 20 bp, synthetic construct
  source 1..20: mol_type = other DNA
aggcgcggcccggcggacgt

SEQ ID NO: 6951 - DNA, 20 bp, synthetic construct
  source 1..20: mol_type = other DNA
accacttggggtcttggaac

SEQ ID NO: 6952 - DNA, 20 bp, synthetic construct
  source 1..20: mol_type = other DNA
cacttggggtcttggaaccg

SEQ ID NO: 6953 - DNA, 20 bp, synthetic construct
  source 1..20: mol_type = other DNA
gtcttggaggcgcggcccgg

SEQ ID NO: 6954 - DNA, 20 bp, synthetic construct
  source 1..20: mol_type = other DNA
tgcgcatagtcttggaggcg

SEQ ID NO: 6955 - DNA, 20 bp, synthetic construct
  source 1..20: mol_type = other DNA
atttaacagaggatgatcta

SEQ ID NO: 6956 - DNA, 20 bp, synthetic construct
  source 1..20: mol_type = other DNA
tgcacaatattcactgactg

SEQ ID NO: 6957 - DNA, 20 bp, synthetic construct
  source 1..20: mol_type = other DNA
tctttataggcatttgatag

SEQ ID NO: 6958 - DNA, 20 bp, synthetic construct
  source 1..20: mol_type = other DNA
gtcctagctgggaacctact

SEQ ID NO: 6959 - DNA, 20 bp, synthetic construct
  source 1..20: mol_type = other DNA
acccataaataatttaacag

SEQ ID NO: 6960 - DNA, 20 bp, synthetic construct
  source 1..20: mol_type = other DNA
gttcccagctaggacagctg

SEQ ID NO: 6961 - DNA, 20 bp, synthetic construct
  source 1..20: mol_type = other DNA
taggcatttgataggggatg

SEQ ID NO: 6962 - DNA, 20 bp, synthetic construct
  source 1..20: mol_type = other DNA
cccagctaggacagctgagg

SEQ ID NO: 6963 - DNA, 20 bp, synthetic construct
  source 1..20: mol_type = other DNA
tgccaagtaggttcccagct

SEQ ID NO: 6964 - DNA, 20 bp, synthetic construct
  source 1..20: mol_type = other DNA
aatttaacagaggatgatct

SEQ ID NO: 6965 - DNA, 20 bp, synthetic construct
  source 1..20: mol_type = other DNA
cagaatggtctctataaaag

SEQ ID NO: 6966 - DNA, 20 bp, synthetic construct
  source 1..20: mol_type = other DNA
tggctgctgtgtttgcagaa

SEQ ID NO: 6967 - DNA, 20 bp, synthetic construct
  source 1..20: mol_type = other DNA
tcactgactgtggctgtgaa

SEQ ID NO: 6968 - DNA, 20 bp, synthetic construct
  source 1..20: mol_type = other DNA
atcctctgttaaattattta

SEQ ID NO: 6969 - DNA, 20 bp, synthetic construct
  source 1..20: mol_type = other DNA
tgcaaagagattgccaaaaa

SEQ ID NO: 6970 - DNA, 20 bp, synthetic construct
  source 1..20: mol_type = other DNA
tggagctccgtcttcggcag

SEQ ID NO: 6971 - DNA, 20 bp, synthetic construct
  source 1..20: mol_type = other DNA
ggggccttatgcagagtccg

SEQ ID NO: 6972 - DNA, 20 bp, synthetic construct
  source 1..20: mol_type = other DNA
tcggactctgcataaggccc

SEQ ID NO: 6973 - DNA, 20 bp, synthetic construct
  source 1..20: mol_type = other DNA
tccaagaccgaacctcgtaa

SEQ ID NO: 6974 - DNA, 20 bp, synthetic construct
  source 1..20: mol_type = other DNA
cccgagcccgctgccgaaga

SEQ ID NO: 6975 - DNA, 20 bp, synthetic construct
  source 1..20: mol_type = other DNA
aaggccccggaaaagatgac

SEQ ID NO: 6976 - DNA, 20 bp, synthetic construct
  source 1..20: mol_type = other DNA
cggaaaagatgaccggcccc

SEQ ID NO: 6977 - DNA, 20 bp, synthetic construct
  source 1..20: mol_type = other DNA
gtcttcggcagcgggctcgg

SEQ ID NO: 6978 - DNA, 20 bp, synthetic construct
  source 1..20: mol_type = other DNA
caaggcctcccaaagctcca

SEQ ID NO: 6979 - DNA, 20 bp, synthetic construct
  source 1..20: mol_type = other DNA
gtgcggctgggccctttacg

SEQ ID NO: 6980 - DNA, 20 bp, synthetic construct
  source 1..20: mol_type = other DNA
tgtaaccctggagctttggg

SEQ ID NO: 6981 - DNA, 20 bp, synthetic construct
  source 1..20: mol_type = other DNA
ccggaagcggctcgaactcg

SEQ ID NO: 6982 - DNA, 20 bp, synthetic construct
  source 1..20: mol_type = other DNA
gccgcacctctacccggaag

SEQ ID NO: 6983 - DNA, 20 bp, synthetic construct
  source 1..20: mol_type = other DNA
gccgcttccgggtagaggtg

SEQ ID NO: 6984 - DNA, 20 bp, synthetic construct
  source 1..20: mol_type = other DNA
ggcccagccgcacctctacc

SEQ ID NO: 6985 - DNA, 20 bp, synthetic construct
  source 1..20: mol_type = other DNA
tggtctaggagggacgcccg

SEQ ID NO: 6986 - DNA, 20 bp, synthetic construct
  source 1..20: mol_type = other DNA
cagtgacgtacggtctcccc

SEQ ID NO: 6987 - DNA, 20 bp, synthetic construct
  source 1..20: mol_type = other DNA
gcagtgacgtacggtctccc

SEQ ID NO: 6988 - DNA, 20 bp, synthetic construct
  source 1..20: mol_type = other DNA
ccgggcgtccctcctagacc

SEQ ID NO: 6989 - DNA, 20 bp, synthetic construct
  source 1..20: mol_type = other DNA
tcgtcatcacctggtctagg

SEQ ID NO: 6990 - DNA, 20 bp, synthetic construct
  source 1..20: mol_type = other DNA
cgtacgtcactgctctgcgc

SEQ ID NO: 6991 - DNA, 20 bp, synthetic construct
  source 1..20: mol_type = other DNA
ccttggagggagccaatccg

SEQ ID NO: 6992 - DNA, 20 bp, synthetic construct
  source 1..20: mol_type = other DNA
tcaggcccgtcagtgctggg

SEQ ID NO: 6993 - DNA, 20 bp, synthetic construct
  source 1..20: mol_type = other DNA
acgctcctttcgtcatcacc

SEQ ID NO: 6994 - DNA, 20 bp, synthetic construct
  source 1..20: mol_type = other DNA
cgtcatcacctggtctagga

SEQ ID NO: 6995 - DNA, 20 bp, synthetic construct
  source 1..20: mol_type = other DNA
gccaatccgcggccggcgtg

SEQ ID NO: 6996 - DNA, 20 bp, synthetic construct
  source 1..20: mol_type = other DNA
tcccagcactgacgggcctg

SEQ ID NO: 6997 - DNA, 20 bp, synthetic construct
  source 1..20: mol_type = other DNA
tccctcaggcccgtcagtgc

SEQ ID NO: 6998 - DNA, 20 bp, synthetic construct
  source 1..20: mol_type = other DNA
caggcccgtcagtgctggga

SEQ ID NO: 6999 - DNA, 20 bp, synthetic construct
  source 1..20: mol_type = other DNA
aggcccgtcagtgctgggag

SEQ ID NO: 7000 - DNA, 20 bp, synthetic construct
  source 1..20: mol_type = other DNA
tctaagtgctcgcccagctg

SEQ ID NO: 7001 - DNA, 20 bp, synthetic construct
  source 1..20: mol_type = other DNA
gcacttagacgccacggcca

SEQ ID NO: 7002 - DNA, 20 bp, synthetic construct
  source 1..20: mol_type = other DNA
gggcgagcacttagacgcca

SEQ ID NO: 7003 - DNA, 20 bp, synthetic construct
  source 1..20: mol_type = other DNA
tctaccaacacccgagaatg

SEQ ID NO: 7004 - DNA, 20 bp, synthetic construct
  source 1..20: mol_type = other DNA
gatctaccaacacccgagaa

SEQ ID NO: 7005 - DNA, 20 bp, synthetic construct
  source 1..20: mol_type = other DNA
cagggcgcatgcgcacaccg

SEQ ID NO: 7006 - DNA, 20 bp, synthetic construct
  source 1..20: mol_type = other DNA
aacacccgagaatggggaca

SEQ ID NO: 7007 - DNA, 20 bp, synthetic construct
  source 1..20: mol_type = other DNA
ggtagatctctctgcatccc

SEQ ID NO: 7008 - DNA, 20 bp, synthetic construct
  source 1..20: mol_type = other DNA
cactcaacccagccgcgccc

SEQ ID NO: 7009 - DNA, 20 bp, synthetic construct
  source 1..20: mol_type = other DNA
agggcgcatgcgccacctag

SEQ ID NO: 7010 - DNA, 20 bp, synthetic construct
  source 1..20: mol_type = other DNA
ggtggcgcatgcgccctgga

SEQ ID NO: 7011 - DNA, 20 bp, synthetic construct
  source 1..20: mol_type = other DNA
cagctgcggcagccgctagg

SEQ ID NO: 7012 - DNA, 20 bp, synthetic construct
  source 1..20: mol_type = other DNA
gcatgcgcacaccgtggccg

SEQ ID NO: 7013 - DNA, 20 bp, synthetic construct
  source 1..20: mol_type = other DNA
gctaggtggcgcatgcgccc

SEQ ID NO: 7014 - DNA, 20 bp, synthetic construct
  source 1..20: mol_type = other DNA
gcccagctgcggcagccgct

SEQ ID NO: 7015 - DNA, 20 bp, synthetic construct
  source 1..20: mol_type = other DNA
gacgggctcctgagcaatag

SEQ ID NO: 7016 - DNA, 20 bp, synthetic construct
  source 1..20: mol_type = other DNA
cagcgggctcgagccggcac

SEQ ID NO: 7017 - DNA, 20 bp, synthetic construct
  source 1..20: mol_type = other DNA
cagctcatccactattgctc

SEQ ID NO: 7018 - DNA, 20 bp, synthetic construct
  source 1..20: mol_type = other DNA
gctcgagccggcacaggtcg

SEQ ID NO: 7019 - DNA, 20 bp, synthetic construct
  source 1..20: mol_type = other DNA
tagcgcgagagagcgagggc

SEQ ID NO: 7020 - DNA, 20 bp, synthetic construct
  source 1..20: mol_type = other DNA
gcgcgcctccgagtgcccag

SEQ ID NO: 7021 - DNA, 20 bp, synthetic construct
  source 1..20: mol_type = other DNA
gtagcgcgagagagcgaggg

SEQ ID NO: 7022 - DNA, 20 bp, synthetic construct
  source 1..20: mol_type = other DNA
tgtgagtgcgcgcgcgtgcg

SEQ ID NO: 7023 - DNA, 20 bp, synthetic construct
  source 1..20: mol_type = other DNA
cgagcccgctgggcactcgg

SEQ ID NO: 7024 - DNA, 20 bp, synthetic construct
  source 1..20: mol_type = other DNA
ccaatcattgcagccgcgtg

SEQ ID NO: 7025 - DNA, 20 bp, synthetic construct
  source 1..20: mol_type = other DNA
agtgcccagcgggctcgagc

SEQ ID NO: 7026 - DNA, 20 bp, synthetic construct
  source 1..20: mol_type = other DNA
ggggcatcacgggaactccg

SEQ ID NO: 7027 - DNA, 20 bp, synthetic construct
  source 1..20: mol_type = other DNA
aaccaatcattgcagccgcg

SEQ ID NO: 7028 - DNA, 20 bp, synthetic construct
  source 1..20: mol_type = other DNA
agttcccgtgatgccccacg

SEQ ID NO: 7029 - DNA, 20 bp, synthetic construct
  source 1..20: mol_type = other DNA
gtggggcatcacgggaactc

SEQ ID NO: 7030 - DNA, 20 bp, synthetic construct
  source 1..20: mol_type = other DNA
ggcacggcggaaaacgcagg

SEQ ID NO: 7031 - DNA, 20 bp, synthetic construct
  source 1..20: mol_type = other DNA
cggggcacggcggaaaacgc

SEQ ID NO: 7032 - DNA, 20 bp, synthetic construct
  source 1..20: mol_type = other DNA
gcacggcggaaaacgcaggt

SEQ ID NO: 7033 - DNA, 20 bp, synthetic construct
  source 1..20: mol_type = other DNA
ggcttccgagcctgacctgg

SEQ ID NO: 7034 - DNA, 20 bp, synthetic construct
  source 1..20: mol_type = other DNA
cacggcggaaaacgcaggtg

SEQ ID NO: 7035 - DNA, 20 bp, synthetic construct
  source 1..20: mol_type = other DNA
ggggacgctggggagcctcg

SEQ ID NO: 7036 - DNA, 20 bp, synthetic construct
  source 1..20: mol_type = other DNA
ttccgagcctgacctggagg

SEQ ID NO: 7037 - DNA, 20 bp, synthetic construct
  source 1..20: mol_type = other DNA
tggggagcctcggggcacgg

SEQ ID NO: 7038 - DNA, 20 bp, synthetic construct
  source 1..20: mol_type = other DNA
aagacctcctcctccaggtc

SEQ ID NO: 7039 - DNA, 20 bp, synthetic construct
  source 1..20: mol_type = other DNA
cggcggaaaacgcaggtggg

SEQ ID NO: 7040 - DNA, 20 bp, synthetic construct
  source 1..20: mol_type = other DNA
cgagcctgacctggaggagg

SEQ ID NO: 7041 - DNA, 20 bp, synthetic construct
  source 1..20: mol_type = other DNA
acggcggaaaacgcaggtgg

SEQ ID NO: 7042 - DNA, 20 bp, synthetic construct
  source 1..20: mol_type = other DNA
gaggaggaggtcttagggcc

SEQ ID NO: 7043 - DNA, 20 bp, synthetic construct
  source 1..20: mol_type = other DNA
gaggaggtcttagggcctgg

SEQ ID NO: 7044 - DNA, 20 bp, synthetic construct
  source 1..20: mol_type = other DNA
gccctaagacctcctcctcc

SEQ ID NO: 7045 - DNA, 20 bp, synthetic construct
  source 1..20: mol_type = other DNA
gtactgcaaaggcgagcttg

SEQ ID NO: 7046 - DNA, 20 bp, synthetic construct
  source 1..20: mol_type = other DNA
aaaagctgtatctgcaggag

SEQ ID NO: 7047 - DNA, 20 bp, synthetic construct
  source 1..20: mol_type = other DNA
taaaagctgtatctgcagga

SEQ ID NO: 7048 - DNA, 20 bp, synthetic construct
  source 1..20: mol_type = other DNA
gtatctgcaggaggggcacc

SEQ ID NO: 7049 - DNA, 20 bp, synthetic construct
  source 1..20: mol_type = other DNA
aggcgggaggaaggcagacg

SEQ ID NO: 7050 - DNA, 20 bp, synthetic construct
  source 1..20: mol_type = other DNA
tctgcaggaggggcaccggg

SEQ ID NO: 7051 - DNA, 20 bp, synthetic construct
  source 1..20: mol_type = other DNA
gggaggaaggcagacgagga

SEQ ID NO: 7052 - DNA, 20 bp, synthetic construct
  source 1..20: mol_type = other DNA
gaggaaggcagacgaggagg

SEQ ID NO: 7053 - DNA, 20 bp, synthetic construct
  source 1..20: mol_type = other DNA
gaggggcaccgggaggcggg

SEQ ID NO: 7054 - DNA, 20 bp, synthetic construct
  source 1..20: mol_type = other DNA
ggaggaaggcagacgaggag

SEQ ID NO: 7055 - DNA, 20 bp, synthetic construct
  source 1..20: mol_type = other DNA
tctgccttcctcccgcctcc

SEQ ID NO: 7056 - DNA, 20 bp, synthetic construct
  source 1..20: mol_type = other DNA
cagacgaggagggggcgcgt

SEQ ID NO: 7057 - DNA, 20 bp, synthetic construct
  source 1..20: mol_type = other DNA
cgggaggaaggcagacgagg

SEQ ID NO: 7058 - DNA, 20 bp, synthetic construct
  source 1..20: mol_type = other DNA
tgtatctgcaggaggggcac

SEQ ID NO: 7059 - DNA, 20 bp, synthetic construct
  source 1..20: mol_type = other DNA
ggcaccgggaggcgggagga

SEQ ID NO: 7060 - DNA, 20 bp, synthetic construct
  source 1..20: mol_type = other DNA
ggaggcagggtgaaaatctg

SEQ ID NO: 7061 - DNA, 20 bp, synthetic construct
  source 1..20: mol_type = other DNA
gaattggggctacgatctgg

SEQ ID NO: 7062 - DNA, 20 bp, synthetic construct
  source 1..20: mol_type = other DNA
taagaattggggctacgatc

SEQ ID NO: 7063 - DNA, 20 bp, synthetic construct
  source 1..20: mol_type = other DNA
gttaaggtctgagataaaga

SEQ ID NO: 7064 - DNA, 20 bp, synthetic construct
  source 1..20: mol_type = other DNA
ttaaggtctgagataaagag

SEQ ID NO: 7065 - DNA, 20 bp, synthetic construct
  source 1..20: mol_type = other DNA
aagctggaaccagagatggg

SEQ ID NO: 7066 - DNA, 20 bp, synthetic construct
  source 1..20: mol_type = other DNA
tgcggtttagagaatggccg

SEQ ID NO: 7067 - DNA, 20 bp, synthetic construct
  source 1..20: mol_type = other DNA
ctggggtttggactgcaagc

SEQ ID NO: 7068 - DNA, 20 bp, synthetic construct
  source 1..20: mol_type = other DNA
ggggctacgatctggaggca

SEQ ID NO: 7069 - DNA, 20 bp, synthetic construct
  source 1..20: mol_type = other DNA
gtgcggtttagagaatggcc

SEQ ID NO: 7070 - DNA, 20 bp, synthetic construct
  source 1..20: mol_type = other DNA
ggtttagagaatggccgggg

SEQ ID NO: 7071 - DNA, 20 bp, synthetic construct
  source 1..20: mol_type = other DNA
ggttaaggtctgagataaag

SEQ ID NO: 7072 - DNA, 20 bp, synthetic construct
  source 1..20: mol_type = other DNA
cagctctcaccacccatctc

SEQ ID NO: 7073 - DNA, 20 bp, synthetic construct
  source 1..20: mol_type = other DNA
ccccattcttagccccgccc

SEQ ID NO: 7074 - DNA, 20 bp, synthetic construct
  source 1..20: mol_type = other DNA
tgcaagctggaaccagagat

SEQ ID NO: 7075 - DNA, 20 bp, synthetic construct
  source 1..20: mol_type = other DNA
tatgggtttcaaatttaccc

SEQ ID NO: 7076 - DNA, 20 bp, synthetic construct
  source 1..20: mol_type = other DNA
gaggcaggttcttggcctca

SEQ ID NO: 7077 - DNA, 20 bp, synthetic construct
  source 1..20: mol_type = other DNA
ggcgtagcccgaaagcactg

SEQ ID NO: 7078 - DNA, 20 bp, synthetic construct
  source 1..20: mol_type = other DNA
ggaaggctatgggttgtcag

SEQ ID NO: 7079 - DNA, 20 bp, synthetic construct
  source 1..20: mol_type = other DNA
gagacagagaggcaggttct

SEQ ID NO: 7080 - DNA, 20 bp, synthetic construct
  source 1..20: mol_type = other DNA
tatttacactgacaacaaag

SEQ ID NO: 7081 - DNA, 20 bp, synthetic construct
  source 1..20: mol_type = other DNA
tgacttccttggaatccgtg

SEQ ID NO: 7082 - DNA, 20 bp, synthetic construct
  source 1..20: mol_type = other DNA
cactgacaacaaagtggcat

SEQ ID NO: 7083 - DNA, 20 bp, synthetic construct
  source 1..20: mol_type = other DNA
tttgttgtcagtgtaaataa

SEQ ID NO: 7084 - DNA, 20 bp, synthetic construct
  source 1..20: mol_type = other DNA
agatcttcaattatcaatta

SEQ ID NO: 7085 - DNA, 20 bp, synthetic construct
  source 1..20: mol_type = other DNA
aagtggcattggagtgttat

SEQ ID NO: 7086 - DNA, 20 bp, synthetic construct
  source 1..20: mol_type = other DNA
tcttggcctcacggattcca

SEQ ID NO: 7087 - DNA, 20 bp, synthetic construct
  source 1..20: mol_type = other DNA
ctttgttgtcagtgtaaata

SEQ ID NO: 7088 - DNA, 20 bp, synthetic construct
  source 1..20: mol_type = other DNA
ccctattcctttaaaagcca

SEQ ID NO: 7089 - DNA, 20 bp, synthetic construct
  source 1..20: mol_type = other DNA
gccctattcctttaaaagcc

SEQ ID NO: 7090 - DNA, 20 bp, synthetic construct
  source 1..20: mol_type = other DNA
tactacgaaaacctgcccgg

SEQ ID NO: 7091 - DNA, 20 bp, synthetic construct
  source 1..20: mol_type = other DNA
gcagcctgcctgtctccagg

SEQ ID NO: 7092 - DNA, 20 bp, synthetic construct
  source 1..20: mol_type = other DNA
agggaggagcccgccgctgg

SEQ ID NO: 7093 - DNA, 20 bp, synthetic construct
  source 1..20: mol_type = other DNA
agtctgcgcccgagcctgag

SEQ ID NO: 7094 - DNA, 20 bp, synthetic construct
  source 1..20: mol_type = other DNA
agcggcgggctcctccctgg

SEQ ID NO: 7095 - DNA, 20 bp, synthetic construct
  source 1..20: mol_type = other DNA
gtctgcgcccgagcctgagg

SEQ ID NO: 7096 - DNA, 20 bp, synthetic construct
  source 1..20: mol_type = other DNA
gcagtctgcgcccgagcctg

SEQ ID NO: 7097 - DNA, 20 bp, synthetic construct
  source 1..20: mol_type = other DNA
tccgcagcctgcctgtctcc

SEQ ID NO: 7098 - DNA, 20 bp, synthetic construct
  source 1..20: mol_type = other DNA
cccagggaggagcccgccgc

SEQ ID NO: 7099 - DNA, 20 bp, synthetic construct
  source 1..20: mol_type = other DNA
cagcggcgggctcctccctg

SEQ ID NO: 7100 - DNA, 20 bp, synthetic construct
  source 1..20: mol_type = other DNA
tcccccgcctcccccagcgg

SEQ ID NO: 7101 - DNA, 20 bp, synthetic construct
  source 1..20: mol_type = other DNA
gcctggagacaggcaggctg

SEQ ID NO: 7102 - DNA, 20 bp, synthetic construct
  source 1..20: mol_type = other DNA
gccgccctccgcccccaggg

SEQ ID NO: 7103 - DNA, 20 bp, synthetic construct
  source 1..20: mol_type = other DNA
gcgtcccccgcctcccccag

SEQ ID NO: 7104 - DNA, 20 bp, synthetic construct
  source 1..20: mol_type = other DNA
gcctccgccccctcaggctc

SEQ ID NO: 7105 - DNA, 20 bp, synthetic construct
  source 1..20: mol_type = other DNA
ctgttgtcatatctacacat

SEQ ID NO: 7106 - DNA, 20 bp, synthetic construct
  source 1..20: mol_type = other DNA
tatcatataacccagaagaa

SEQ ID NO: 7107 - DNA, 20 bp, synthetic construct
  source 1..20: mol_type = other DNA
catataacccagaagaatgg

SEQ ID NO: 7108 - DNA, 20 bp, synthetic construct
  source 1..20: mol_type = other DNA
taaacagaactgctcagttc

SEQ ID NO: 7109 - DNA, 20 bp, synthetic construct
  source 1..20: mol_type = other DNA
gaaaggcgtgcttacaaaac

SEQ ID NO: 7110 - DNA, 20 bp, synthetic construct
  source 1..20: mol_type = other DNA
atcatataacccagaagaat

SEQ ID NO: 7111 - DNA, 20 bp, synthetic construct
  source 1..20: mol_type = other DNA
taaatgatcacctataaatc

SEQ ID NO: 7112 - DNA, 20 bp, synthetic construct
  source 1..20: mol_type = other DNA
gtcatatctacacattggat

SEQ ID NO: 7113 - DNA, 20 bp, synthetic construct
  source 1..20: mol_type = other DNA
tcatataacccagaagaatg

SEQ ID NO: 7114 - DNA, 20 bp, synthetic construct
  source 1..20: mol_type = other DNA
gcacgcctttctatttagta

SEQ ID NO: 7115 - DNA, 20 bp, synthetic construct
  source 1..20: mol_type = other DNA
ttggacttaacctgatttat

SEQ ID NO: 7116 - DNA, 20 bp, synthetic construct
  source 1..20: mol_type = other DNA
gataaccatactaaatagaa

SEQ ID NO: 7117 - DNA, 20 bp, synthetic construct
  source 1..20: mol_type = other DNA
agaactgctcagttctggtt

SEQ ID NO: 7118 - DNA, 20 bp, synthetic construct
  source 1..20: mol_type = other DNA
aagaatgtcccccattcttc

SEQ ID NO: 7119 - DNA, 20 bp, synthetic construct
  source 1..20: mol_type = other DNA
agaatgtcccccattcttct

SEQ ID NO: 7120 - DNA, 20 bp, synthetic construct
  source 1..20: mol_type = other DNA
ctggcccaataatcactgtg

SEQ ID NO: 7121 - DNA, 20 bp, synthetic construct
  source 1..20: mol_type = other DNA
ctgactctccccagactgtg

SEQ ID NO: 7122 - DNA, 20 bp, synthetic construct
  source 1..20: mol_type = other DNA
ttatcttcattgtgtaatgg

SEQ ID NO: 7123 - DNA, 20 bp, synthetic construct
  source 1..20: mol_type = other DNA
tcacagtgattattgggcca

SEQ ID NO: 7124 - DNA, 20 bp, synthetic construct
  source 1..20: mol_type = other DNA
agctccaggatggtaggagc

SEQ ID NO: 7125 - DNA, 20 bp, synthetic construct
  source 1..20: mol_type = other DNA
aagaaaccccacacagtctg

SEQ ID NO: 7126 - DNA, 20 bp, synthetic construct
  source 1..20: mol_type = other DNA
caggatggtaggagctggat

SEQ ID NO: 7127 - DNA, 20 bp, synthetic construct
  source 1..20: mol_type = other DNA
gactctccccagactgtgtg

SEQ ID NO: 7128 - DNA, 20 bp, synthetic construct
  source 1..20: mol_type = other DNA
ctttctgggagagagtaccc

SEQ ID NO: 7129 - DNA, 20 bp, synthetic construct
  source 1..20: mol_type = other DNA
gtaatgaagcaaattcacag

SEQ ID NO: 7130 - DNA, 20 bp, synthetic construct
  source 1..20: mol_type = other DNA
tgactctccccagactgtgt

SEQ ID NO: 7131 - DNA, 20 bp, synthetic construct
  source 1..20: mol_type = other DNA
taatcactgtgaggttggca

SEQ ID NO: 7132 - DNA, 20 bp, synthetic construct
  source 1..20: mol_type = other DNA
acacagtctggggagagtca

SEQ ID NO: 7133 - DNA, 20 bp, synthetic construct
  source 1..20: mol_type = other DNA
acagagagaaaagcagtcat

SEQ ID NO: 7134 - DNA, 20 bp, synthetic construct
  source 1..20: mol_type = other DNA
cattggcaaagcagaatgaa

SEQ ID NO: 7135 - DNA, 20 bp, synthetic construct
  source 1..20: mol_type = other DNA
gctcccgataattgccccag

SEQ ID NO: 7136 - DNA, 20 bp, synthetic construct
  source 1..20: mol_type = other DNA
ggcaattatcgggagcaggg

SEQ ID NO: 7137 - DNA, 20 bp, synthetic construct
  source 1..20: mol_type = other DNA
acagggcttggagtagatcc

SEQ ID NO: 7138 - DNA, 20 bp, synthetic construct
  source 1..20: mol_type = other DNA
ccaggattgctccacctctg

SEQ ID NO: 7139 - DNA, 20 bp, synthetic construct
  source 1..20: mol_type = other DNA
cctggtcagtggagcaaaca

SEQ ID NO: 7140 - DNA, 20 bp, synthetic construct
  source 1..20: mol_type = other DNA
ccctgtttgctccactgacc

SEQ ID NO: 7141 - DNA, 20 bp, synthetic construct
  source 1..20: mol_type = other DNA
gtgaaagggtgacatcaccc

SEQ ID NO: 7142 - DNA, 20 bp, synthetic construct
  source 1..20: mol_type = other DNA
cactgaccaggagaaaaatg

SEQ ID NO: 7143 - DNA, 20 bp, synthetic construct
  source 1..20: mol_type = other DNA
cccgataattgccccagagg

SEQ ID NO: 7144 - DNA, 20 bp, synthetic construct
  source 1..20: mol_type = other DNA
ggtggggtgaggttcaggga

SEQ ID NO: 7145 - DNA, 20 bp, synthetic construct
  source 1..20: mol_type = other DNA
tcaccccacccccaaacgag

SEQ ID NO: 7146 - DNA, 20 bp, synthetic construct
  source 1..20: mol_type = other DNA
gggtggggtgaggttcaggg

SEQ ID NO: 7147 - DNA, 20 bp, synthetic construct
  source 1..20: mol_type = other DNA
aggagaaaaatgcggaaaag

SEQ ID NO: 7148 - DNA, 20 bp, synthetic construct
  source 1..20: mol_type = other DNA
gaggctttctcaggttgggg

SEQ ID NO: 7149 - DNA, 20 bp, synthetic construct
  source 1..20: mol_type = other DNA
tcagtggagcaaacagggct

SEQ ID NO: 7150 - DNA, 20 bp, synthetic construct
  source 1..20: mol_type = other DNA
gtgggagggatctaaagtca

SEQ ID NO: 7151 - DNA, 20 bp, synthetic construct
  source 1..20: mol_type = other DNA
agggatctaaagtcagggct

SEQ ID NO: 7152 - DNA, 20 bp, synthetic construct
  source 1..20: mol_type = other DNA
cagggctgggaactccagga

SEQ ID NO: 7153 - DNA, 20 bp, synthetic construct
  source 1..20: mol_type = other DNA
tttgaaggtccagtgtggga

SEQ ID NO: 7154 - DNA, 20 bp, synthetic construct
  source 1..20: mol_type = other DNA
gctgggaactccaggaagga

SEQ ID NO: 7155 - DNA, 20 bp, synthetic construct
  source 1..20: mol_type = other DNA
tgtgggagggatctaaagtc

SEQ ID NO: 7156 - DNA, 20 bp, synthetic construct
  source 1..20: mol_type = other DNA
tggagctgtggtggtaagga

SEQ ID NO: 7157 - DNA, 20 bp, synthetic construct
  source 1..20: mol_type = other DNA
aagcttggctggagctgtgg

SEQ ID NO: 7158 - DNA, 20 bp, synthetic construct
  source 1..20: mol_type = other DNA
gagggatctaaagtcagggc

SEQ ID NO: 7159 - DNA, 20 bp, synthetic construct
  source 1..20: mol_type = other DNA
tttgcagatcactccaagct

SEQ ID NO: 7160 - DNA, 20 bp, synthetic construct
  source 1..20: mol_type = other DNA
tgggaactccaggaaggaag

SEQ ID NO: 7161 - DNA, 20 bp, synthetic construct
  source 1..20: mol_type = other DNA
ctggagctgtggtggtaagg

SEQ ID NO: 7162 - DNA, 20 bp, synthetic construct
  source 1..20: mol_type = other DNA
accacagctccagccaagct

SEQ ID NO: 7163 - DNA, 20 bp, synthetic construct
  source 1..20: mol_type = other DNA
tccaagcttggctggagctg

SEQ ID NO: 7164 - DNA, 20 bp, synthetic construct
  source 1..20: mol_type = other DNA
ctgggaactccaggaaggaa

SEQ ID NO: 7165 - DNA, 20 bp, synthetic construct
  source 1..20: mol_type = other DNA
gcggatccagcagctcctcg

SEQ ID NO: 7166 - DNA, 20 bp, synthetic construct
  source 1..20: mol_type = other DNA
ggagaagtggccgccgatga

SEQ ID NO: 7167 - DNA, 20 bp, synthetic construct
  source 1..20: mol_type = other DNA
ggctctgagccaaccgccgg

SEQ ID NO: 7168 - DNA, 20 bp, synthetic construct
  source 1..20: mol_type = other DNA
tgcacctctgccgtcatcgg

SEQ ID NO: 7169 - DNA, 20 bp, synthetic construct
  source 1..20: mol_type = other DNA
cacttctcccgagcgagccg

SEQ ID NO: 7170 - DNA, 20 bp, synthetic construct
  source 1..20: mol_type = other DNA
ggagctgctggatccgccgg

SEQ ID NO: 7171 - DNA, 20 bp, synthetic construct
  source 1..20: mol_type = other DNA
cgcggctcgctcgggagaag

SEQ ID NO: 7172 - DNA, 20 bp, synthetic construct
  source 1..20: mol_type = other DNA
gaggaggaagaggacgacgg

SEQ ID NO: 7173 - DNA, 20 bp, synthetic construct
  source 1..20: mol_type = other DNA
gtggccgccgatgacggcag

SEQ ID NO: 7174 - DNA, 20 bp, synthetic construct
  source 1..20: mol_type = other DNA
gctcccgcccgccctccccg

SEQ ID NO: 7175 - DNA, 20 bp, synthetic construct
  source 1..20: mol_type = other DNA
aggaggaagaggacgacggg

SEQ ID NO: 7176 - DNA, 20 bp, synthetic construct
  source 1..20: mol_type = other DNA
atccagcagctcctcgggga

SEQ ID NO: 7177 - DNA, 20 bp, synthetic construct
  source 1..20: mol_type = other DNA
cgaggagctgctggatccgc

SEQ ID NO: 7178 - DNA, 20 bp, synthetic construct
  source 1..20: mol_type = other DNA
gatccagcagctcctcgggg

SEQ ID NO: 7179 - DNA, 20 bp, synthetic construct
  source 1..20: mol_type = other DNA
ggaggaagaggacgacgggg

SEQ ID NO: 7180 - DNA, 20 bp, synthetic construct
  source 1..20: mol_type = other DNA
agtcatggtacccccttgag

SEQ ID NO: 7181 - DNA, 20 bp, synthetic construct
  source 1..20: mol_type = other DNA
ccgccacagcccgctcaagg

SEQ ID NO: 7182 - DNA, 20 bp, synthetic construct
  source 1..20: mol_type = other DNA
gtcatggtacccccttgagc

SEQ ID NO: 7183 - DNA, 20 bp, synthetic construct
  source 1..20: mol_type = other DNA
gcagcaccgcccgcaggaag

SEQ ID NO: 7184 - DNA, 20 bp, synthetic construct
  source 1..20: mol_type = other DNA
tccgccacagcccgctcaag

SEQ ID NO: 7185 - DNA, 20 bp, synthetic construct
  source 1..20: mol_type = other DNA
ccagggcctcttcctgcggg

SEQ ID NO: 7186 - DNA, 20 bp, synthetic construct
  source 1..20: mol_type = other DNA
ggcgtggcctcggtccgggg

SEQ ID NO: 7187 - DNA, 20 bp, synthetic construct
  source 1..20: mol_type = other DNA
gtaccatgactgccccgcgc

SEQ ID NO: 7188 - DNA, 20 bp, synthetic construct
  source 1..20: mol_type = other DNA
acggccgccaccccggaccg

SEQ ID NO: 7189 - DNA, 20 bp, synthetic construct
  source 1..20: mol_type = other DNA
tgccgaggccggcctgcgcg

SEQ ID NO: 7190 - DNA, 20 bp, synthetic construct
  source 1..20: mol_type = other DNA
tcctgcgggcggtgctgccg

SEQ ID NO: 7191 - DNA, 20 bp, synthetic construct
  source 1..20: mol_type = other DNA
ggcgcgccaggccgcggaag

SEQ ID NO: 7192 - DNA, 20 bp, synthetic construct
  source 1..20: mol_type = other DNA
gcctcggcagcaccgcccgc

SEQ ID NO: 7193 - DNA, 20 bp, synthetic construct
  source 1..20: mol_type = other DNA
gcgggctgtggcggagagcg

SEQ ID NO: 7194 - DNA, 20 bp, synthetic construct
  source 1..20: mol_type = other DNA
gccaccagggcctcttcctg

SEQ ID NO: 7195 - DNA, 20 bp, synthetic construct
  source 1..20: mol_type = other DNA
tataaaaacgaccacagtcg

SEQ ID NO: 7196 - DNA, 20 bp, synthetic construct
  source 1..20: mol_type = other DNA
agggagtcgggccgcgactg

SEQ ID NO: 7197 - DNA, 20 bp, synthetic construct
  source 1..20: mol_type = other DNA
actggcgtgcgagactcggc

SEQ ID NO: 7198 - DNA, 20 bp, synthetic construct
  source 1..20: mol_type = other DNA
ccggtgccacggcctcggag

SEQ ID NO: 7199 - DNA, 20 bp, synthetic construct
  source 1..20: mol_type = other DNA
gcgggcgctgttgagggagt

SEQ ID NO: 7200 - DNA, 20 bp, synthetic construct
  source 1..20: mol_type = other DNA
gccaatcagcagccgctccg

SEQ ID NO: 7201 - DNA, 20 bp, synthetic construct
  source 1..20: mol_type = other DNA
tggcaccggaaggcctcacg

SEQ ID NO: 7202 - DNA, 20 bp, synthetic construct
  source 1..20: mol_type = other DNA
tccgaggccgtggcaccgga

SEQ ID NO: 7203 - DNA, 20 bp, synthetic construct
  source 1..20: mol_type = other DNA
gctgattggccgctggcgga

SEQ ID NO: 7204 - DNA, 20 bp, synthetic construct
  source 1..20: mol_type = other DNA
gcggggaggcgcgtgcgcac

SEQ ID NO: 7205 - DNA, 20 bp, synthetic construct
  source 1..20: mol_type = other DNA
cgcgcgcagccgtccgccag

SEQ ID NO: 7206 - DNA, 20 bp, synthetic construct
  source 1..20: mol_type = other DNA
ggctgctgattggccgctgg

SEQ ID NO: 7207 - DNA, 20 bp, synthetic construct
  source 1..20: mol_type = other DNA
tggcggacggctgcgcgcgc

SEQ ID NO: 7208 - DNA, 20 bp, synthetic construct
  source 1..20: mol_type = other DNA
acggctgcgcgcgcgggacg

SEQ ID NO: 7209 - DNA, 20 bp, synthetic construct
  source 1..20: mol_type = other DNA
agcggctgctgattggccgc

SEQ ID NO: 7210 - DNA, 20 bp, synthetic construct
  source 1..20: mol_type = other DNA
agaccccggccaatcagtcg

SEQ ID NO: 7211 - DNA, 20 bp, synthetic construct
  source 1..20: mol_type = other DNA
cccggccaatcagtcgcgga

SEQ ID NO: 7212 - DNA, 20 bp, synthetic construct
  source 1..20: mol_type = other DNA
gccgcagctagccccgctgg

SEQ ID NO: 7213 - DNA, 20 bp, synthetic construct
  source 1..20: mol_type = other DNA
gcggccgaggccggttgaag

SEQ ID NO: 7214 - DNA, 20 bp, synthetic construct
  source 1..20: mol_type = other DNA
cgctcacactaggaagaccc

SEQ ID NO: 7215 - DNA, 20 bp, synthetic construct
  source 1..20: mol_type = other DNA
gccgccagcggggctagctg

SEQ ID NO: 7216 - DNA, 20 bp, synthetic construct
  source 1..20: mol_type = other DNA
gcccgtcagcccaccccacg

SEQ ID NO: 7217 - DNA, 20 bp, synthetic construct
  source 1..20: mol_type = other DNA
tggccagggccgctcacact

SEQ ID NO: 7218 - DNA, 20 bp, synthetic construct
  source 1..20: mol_type = other DNA
gaggccgcagctagccccgc

SEQ ID NO: 7219 - DNA, 20 bp, synthetic construct
  source 1..20: mol_type = other DNA
gggctagctgcggcctcgtg

SEQ ID NO: 7220 - DNA, 20 bp, synthetic construct
  source 1..20: mol_type = other DNA
cggggtcttcctagtgtgag

SEQ ID NO: 7221 - DNA, 20 bp, synthetic construct
  source 1..20: mol_type = other DNA
tagctgcggcctcgtggggt

SEQ ID NO: 7222 - DNA, 20 bp, synthetic construct
  source 1..20: mol_type = other DNA
tgacgggcgctgattggcca

SEQ ID NO: 7223 - DNA, 20 bp, synthetic construct
  source 1..20: mol_type = other DNA
accggcctcggccgccagcg

SEQ ID NO: 7224 - DNA, 20 bp, synthetic construct
  source 1..20: mol_type = other DNA
caaccggcctcggccgccag

SEQ ID NO: 7225 - DNA, 20 bp, synthetic construct
  source 1..20: mol_type = other DNA
ccagaggtccgagtcccgtg

SEQ ID NO: 7226 - DNA, 20 bp, synthetic construct
  source 1..20: mol_type = other DNA
cccgcactccgcggtcccag

SEQ ID NO: 7227 - DNA, 20 bp, synthetic construct
  source 1..20: mol_type = other DNA
cctcgggccgaggcgagcgt

SEQ ID NO: 7228 - DNA, 20 bp, synthetic construct
  source 1..20: mol_type = other DNA
ctcgggccgaggcgagcgtg

SEQ ID NO: 7229 - DNA, 20 bp, synthetic construct
  source 1..20: mol_type = other DNA
cccacgctcgcctcggcccg

SEQ ID NO: 7230 - DNA, 20 bp, synthetic construct
  source 1..20: mol_type = other DNA
ggaggccggagagtcggagg

SEQ ID NO: 7231 - DNA, 20 bp, synthetic construct
  source 1..20: mol_type = other DNA
tcgggccgaggcgagcgtgg

SEQ ID NO: 7232 - DNA, 20 bp, synthetic construct
  source 1..20: mol_type = other DNA
aggcgggaggggagcgccca

SEQ ID NO: 7233 - DNA, 20 bp, synthetic construct
  source 1..20: mol_type = other DNA
tgggagaggaaggaggagcg

SEQ ID NO: 7234 - DNA, 20 bp, synthetic construct
  source 1..20: mol_type = other DNA
ggggagggaggagcgcgcgc

SEQ ID NO: 7235 - DNA, 20 bp, synthetic construct
  source 1..20: mol_type = other DNA
gggcagggtgcgcggcgcgg

SEQ ID NO: 7236 - DNA, 20 bp, synthetic construct
  source 1..20: mol_type = other DNA
cgggcgctgggagaggaagg

SEQ ID NO: 7237 - DNA, 20 bp, synthetic construct
  source 1..20: mol_type = other DNA
gccgaggcgagcgtggggga

SEQ ID NO: 7238 - DNA, 20 bp, synthetic construct
  source 1..20: mol_type = other DNA
ggagggcagggtgcgcggcg

SEQ ID NO: 7239 - DNA, 20 bp, synthetic construct
  source 1..20: mol_type = other DNA
ggaggaggccggagagtcgg

SEQ ID NO: 7240 - DNA, 20 bp, synthetic construct
  source 1..20: mol_type = other DNA
aagatgggacgtgataggag

SEQ ID NO: 7241 - DNA, 20 bp, synthetic construct
  source 1..20: mol_type = other DNA
gaggactatgggcaaatcag

SEQ ID NO: 7242 - DNA, 20 bp, synthetic construct
  source 1..20: mol_type = other DNA
atgggcaaatcagaggccag

SEQ ID NO: 7243 - DNA, 20 bp, synthetic construct
  source 1..20: mol_type = other DNA
ttacaggaagttgaacaaga

SEQ ID NO: 7244 - DNA, 20 bp, synthetic construct
  source 1..20: mol_type = other DNA
tgaacaagatgggacgtgat

SEQ ID NO: 7245 - DNA, 20 bp, synthetic construct
  source 1..20: mol_type = other DNA
atgtactggatatgggacag

SEQ ID NO: 7246 - DNA, 20 bp, synthetic construct
  source 1..20: mol_type = other DNA
ggcttaaatgtactggatat

SEQ ID NO: 7247 - DNA, 20 bp, synthetic construct
  source 1..20: mol_type = other DNA
aggcttaaatgtactggata

SEQ ID NO: 7248 - DNA, 20 bp, synthetic construct
  source 1..20: mol_type = other DNA
taggagaggcttaaatgtac

SEQ ID NO: 7249 - DNA, 20 bp, synthetic construct
  source 1..20: mol_type = other DNA
tacaggaagttgaacaagat

SEQ ID NO: 7250 - DNA, 20 bp, synthetic construct
  source 1..20: mol_type = other DNA
atttcctgtatgaggactat

SEQ ID NO: 7251 - DNA, 20 bp, synthetic construct
  source 1..20: mol_type = other DNA
atttgtgtctcaaatacctc

SEQ ID NO: 7252 - DNA, 20 bp, synthetic construct
  source 1..20: mol_type = other DNA
tatttcctgtatgaggacta

SEQ ID NO: 7253 - DNA, 20 bp, synthetic construct
  source 1..20: mol_type = other DNA
ggccaagaatcatctcagtt

SEQ ID NO: 7254 - DNA, 20 bp, synthetic construct
  source 1..20: mol_type = other DNA
atcctaactgagatgattct

SEQ ID NO: 7255 - DNA, 20 bp, synthetic construct
  source 1..20: mol_type = other DNA
ccacctccgacgcaagagtg

SEQ ID NO: 7256 - DNA, 20 bp, synthetic construct
  source 1..20: mol_type = other DNA
cccacctccgacgcaagagt

SEQ ID NO: 7257 - DNA, 20 bp, synthetic construct
  source 1..20: mol_type = other DNA
gtctgggttcgggacgccac

SEQ ID NO: 7258 - DNA, 20 bp, synthetic construct
  source 1..20: mol_type = other DNA
ccccacctccgacgcaagag

SEQ ID NO: 7259 - DNA, 20 bp, synthetic construct
  source 1..20: mol_type = other DNA
gctccctgcaggtctctgcg

SEQ ID NO: 7260 - DNA, 20 bp, synthetic construct
  source 1..20: mol_type = other DNA
agagacctgcagggagctcg

SEQ ID NO: 7261 - DNA, 20 bp, synthetic construct
  source 1..20: mol_type = other DNA
gccccgccccactcttgcgt

SEQ ID NO: 7262 - DNA, 20 bp, synthetic construct
  source 1..20: mol_type = other DNA
tggctctggatcgcaggtgc

SEQ ID NO: 7263 - DNA, 20 bp, synthetic construct
  source 1..20: mol_type = other DNA
aggggcggggcgcttggctc

SEQ ID NO: 7264 - DNA, 20 bp, synthetic construct
  source 1..20: mol_type = other DNA
gagaggggcagggctaagga

SEQ ID NO: 7265 - DNA, 20 bp, synthetic construct
  source 1..20: mol_type = other DNA
gctaaggagggagcgcgccc

SEQ ID NO: 7266 - DNA, 20 bp, synthetic construct
  source 1..20: mol_type = other DNA
gagggagcgcgcccgggcag

SEQ ID NO: 7267 - DNA, 20 bp, synthetic construct
  source 1..20: mol_type = other DNA
caagcgccccgcccctgccc

SEQ ID NO: 7268 - DNA, 20 bp, synthetic construct
  source 1..20: mol_type = other DNA
agagaggggcagggctaagg

SEQ ID NO: 7269 - DNA, 20 bp, synthetic construct
  source 1..20: mol_type = other DNA
gtcagagaggggcagggcta

SEQ ID NO: 7270 - DNA, 20 bp, synthetic construct
  source 1..20: mol_type = other DNA
gtgacgtgacagcagccggt

SEQ ID NO: 7271 - DNA, 20 bp, synthetic construct
  source 1..20: mol_type = other DNA
ccctccctgctgagcgaacg

SEQ ID NO: 7272 - DNA, 20 bp, synthetic construct
  source 1..20: mol_type = other DNA
ggtgcgccccctttccgaca

SEQ ID NO: 7273 - DNA, 20 bp, synthetic construct
  source 1..20: mol_type = other DNA
caggcgcgccgtgtcggaaa

SEQ ID NO: 7274 - DNA, 20 bp, synthetic construct
  source 1..20: mol_type = other DNA
ggcgcgccgtgtcggaaagg

SEQ ID NO: 7275 - DNA, 20 bp, synthetic construct
  source 1..20: mol_type = other DNA
ctggagacccaatcaccgac

SEQ ID NO: 7276 - DNA, 20 bp, synthetic construct
  source 1..20: mol_type = other DNA
gacagccagtcagcgcgcgc

SEQ ID NO: 7277 - DNA, 20 bp, synthetic construct
  source 1..20: mol_type = other DNA
cccgccccgttcgctcagca

SEQ ID NO: 7278 - DNA, 20 bp, synthetic construct
  source 1..20: mol_type = other DNA
gccccgttcgctcagcaggg

SEQ ID NO: 7279 - DNA, 20 bp, synthetic construct
  source 1..20: mol_type = other DNA
actggctgtctggcgcagcg

SEQ ID NO: 7280 - DNA, 20 bp, synthetic construct
  source 1..20: mol_type = other DNA
tccctgctgagcgaacgggg

SEQ ID NO: 7281 - DNA, 20 bp, synthetic construct
  source 1..20: mol_type = other DNA
cccgttcgctcagcagggag

SEQ ID NO: 7282 - DNA, 20 bp, synthetic construct
  source 1..20: mol_type = other DNA
ggtctccaggcgcgccgtgt

SEQ ID NO: 7283 - DNA, 20 bp, synthetic construct
  source 1..20: mol_type = other DNA
agacagccagtcagcgcgcg

SEQ ID NO: 7284 - DNA, 20 bp, synthetic construct
  source 1..20: mol_type = other DNA
tgactggctgtctggcgcag

SEQ ID NO: 7285 - DNA, 20 bp, synthetic construct
  source 1..20: mol_type = other DNA
tgtgtggatacccatcggag

SEQ ID NO: 7286 - DNA, 20 bp, synthetic construct
  source 1..20: mol_type = other DNA
gctgtgtggatacccatcgg

SEQ ID NO: 7287 - DNA, 20 bp, synthetic construct
  source 1..20: mol_type = other DNA
tcctggccggacgggaacaa

SEQ ID NO: 7288 - DNA, 20 bp, synthetic construct
  source 1..20: mol_type = other DNA
tctgctgtgtggatacccat

SEQ ID NO: 7289 - DNA, 20 bp, synthetic construct
  source 1..20: mol_type = other DNA
cagtggcacgagttgccatg

SEQ ID NO: 7290 - DNA, 20 bp, synthetic construct
  source 1..20: mol_type = other DNA
ccagtggcacgagttgccat

SEQ ID NO: 7291 - DNA, 20 bp, synthetic construct
  source 1..20: mol_type = other DNA
cgtgccactggacactgtcc

SEQ ID NO: 7292 - DNA, 20 bp, synthetic construct
  source 1..20: mol_type = other DNA
ctgtgtggatacccatcgga

SEQ ID NO: 7293 - DNA, 20 bp, synthetic construct
  source 1..20: mol_type = other DNA
ggcgggtggggagatctgca

SEQ ID NO: 7294 - DNA, 20 bp, synthetic construct
  source 1..20: mol_type = other DNA
atgggtatccacacagcaga

SEQ ID NO: 7295 - DNA, 20 bp, synthetic construct
  source 1..20: mol_type = other DNA
acagcagatggcagtcccca

SEQ ID NO: 7296 - DNA, 20 bp, synthetic construct
  source 1..20: mol_type = other DNA
ggggactgccatctgctgtg

SEQ ID NO: 7297 - DNA, 20 bp, synthetic construct
  source 1..20: mol_type = other DNA
ccactggacactgtcctggc

SEQ ID NO: 7298 - DNA, 20 bp, synthetic construct
  source 1..20: mol_type = other DNA
tcaccctgggcccctccgat

SEQ ID NO: 7299 - DNA, 20 bp, synthetic construct
  source 1..20: mol_type = other DNA
ccggccaggacagtgtccag

SEQ ID NO: 7300 - DNA, 20 bp, synthetic construct
  source 1..20: mol_type = other DNA
gcaggcgcacgcccacctgt

SEQ ID NO: 7301 - DNA, 20 bp, synthetic construct
  source 1..20: mol_type = other DNA
gcttccgcccgagggtcgcg

SEQ ID NO: 7302 - DNA, 20 bp, synthetic construct
  source 1..20: mol_type = other DNA
agagtccggcaggctccagg

SEQ ID NO: 7303 - DNA, 20 bp, synthetic construct
  source 1..20: mol_type = other DNA
gcgcctgcgcggccgacagg

SEQ ID NO: 7304 - DNA, 20 bp, synthetic construct
  source 1..20: mol_type = other DNA
tgagccccgcgaccctcggg

SEQ ID NO: 7305 - DNA, 20 bp, synthetic construct
  source 1..20: mol_type = other DNA
tgcacaccaggagcccgccg

SEQ ID NO: 7306 - DNA, 20 bp, synthetic construct
  source 1..20: mol_type = other DNA
cgcctgcgcggccgacaggt

SEQ ID NO: 7307 - DNA, 20 bp, synthetic construct
  source 1..20: mol_type = other DNA
ggcggggcaggggatgtccg

SEQ ID NO: 7308 - DNA, 20 bp, synthetic construct
  source 1..20: mol_type = other DNA
gggtcgcggggctcagagtc

SEQ ID NO: 7309 - DNA, 20 bp, synthetic construct
  source 1..20: mol_type = other DNA
agtccggcaggctccaggcg

SEQ ID NO: 7310 - DNA, 20 bp, synthetic construct
  source 1..20: mol_type = other DNA
cgcactggccgcgcgccgcg

SEQ ID NO: 7311 - DNA, 20 bp, synthetic construct
  source 1..20: mol_type = other DNA
actctgagccccgcgaccct

SEQ ID NO: 7312 - DNA, 20 bp, synthetic construct
  source 1..20: mol_type = other DNA
gcccggccgcttccgcccga

SEQ ID NO: 7313 - DNA, 20 bp, synthetic construct
  source 1..20: mol_type = other DNA
ctcagagtccggcaggctcc

SEQ ID NO: 7314 - DNA, 20 bp, synthetic construct
  source 1..20: mol_type = other DNA
gagtccggcaggctccaggc

SEQ ID NO: 7315 - DNA, 20 bp, synthetic construct
  source 1..20: mol_type = other DNA
tgacccgattgctatggcac

SEQ ID NO: 7316 - DNA, 20 bp, synthetic construct
  source 1..20: mol_type = other DNA
gcgggcgtgattgttaccgc

SEQ ID NO: 7317 - DNA, 20 bp, synthetic construct
  source 1..20: mol_type = other DNA
gagctgggaggggtctaccg

SEQ ID NO: 7318 - DNA, 20 bp, synthetic construct
  source 1..20: mol_type = other DNA
ggcggtaacaatcacgcccg

SEQ ID NO: 7319 - DNA, 20 bp, synthetic construct
  source 1..20: mol_type = other DNA
caactcctagagtcgagccc

SEQ ID NO: 7320 - DNA, 20 bp, synthetic construct
  source 1..20: mol_type = other DNA
gggaggggcgtccatgagat

SEQ ID NO: 7321 - DNA, 20 bp, synthetic construct
  source 1..20: mol_type = other DNA
gccaagtgacccgattgcta

SEQ ID NO: 7322 - DNA, 20 bp, synthetic construct
  source 1..20: mol_type = other DNA
atagcaatcgggtcacttgg

SEQ ID NO: 7323 - DNA, 20 bp, synthetic construct
  source 1..20: mol_type = other DNA
ccggaggttcgaggatcggg

SEQ ID NO: 7324 - DNA, 20 bp, synthetic construct
  source 1..20: mol_type = other DNA
ggggctcgactctaggagtt

SEQ ID NO: 7325 - DNA, 20 bp, synthetic construct
  source 1..20: mol_type = other DNA
tggcggcttggccagagccg

SEQ ID NO: 7326 - DNA, 20 bp, synthetic construct
  source 1..20: mol_type = other DNA
cggggctcgactctaggagt

SEQ ID NO: 7327 - DNA, 20 bp, synthetic construct
  source 1..20: mol_type = other DNA
gccagagccggggagctggg

SEQ ID NO: 7328 - DNA, 20 bp, synthetic construct
  source 1..20: mol_type = other DNA
gtagacccctcccagctccc

SEQ ID NO: 7329 - DNA, 20 bp, synthetic construct
  source 1..20: mol_type = other DNA
ccagagccggggagctggga

SEQ ID NO: 7330 - DNA, 20 bp, synthetic construct
  source 1..20: mol_type = other DNA
agactttctatttcactccg

SEQ ID NO: 7331 - DNA, 20 bp, synthetic construct
  source 1..20: mol_type = other DNA
aaggggttaatagtggaact

SEQ ID NO: 7332 - DNA, 20 bp, synthetic construct
  source 1..20: mol_type = other DNA
tcagcagtgagagcaactga

SEQ ID NO: 7333 - DNA, 20 bp, synthetic construct
  source 1..20: mol_type = other DNA
gcaactgaaggggttaatag

SEQ ID NO: 7334 - DNA, 20 bp, synthetic construct
  source 1..20: mol_type = other DNA
cagcagtgagagcaactgaa

SEQ ID NO: 7335 - DNA, 20 bp, synthetic construct
  source 1..20: mol_type = other DNA
aaagggtcttgttgcagagg

SEQ ID NO: 7336 - DNA, 20 bp, synthetic construct
  source 1..20: mol_type = other DNA
tataaagggtcttgttgcag

SEQ ID NO: 7337 - DNA, 20 bp, synthetic construct
  source 1..20: mol_type = other DNA
cggagggaaatcccttcaag

SEQ ID NO: 7338 - DNA, 20 bp, synthetic construct
  source 1..20: mol_type = other DNA
ggtcttgttgcagaggcgga

SEQ ID NO: 7339 - DNA, 20 bp, synthetic construct
  source 1..20: mol_type = other DNA
gttaatagtggaacttggct

SEQ ID NO: 7340 - DNA, 20 bp, synthetic construct
  source 1..20: mol_type = other DNA
ggaaacccagggcagagcca

SEQ ID NO: 7341 - DNA, 20 bp, synthetic construct
  source 1..20: mol_type = other DNA
agcagtgagagcaactgaag

SEQ ID NO: 7342 - DNA, 20 bp, synthetic construct
  source 1..20: mol_type = other DNA
tcccttcaaggggaaaccca

SEQ ID NO: 7343 - DNA, 20 bp, synthetic construct
  source 1..20: mol_type = other DNA
atcccttcaaggggaaaccc

SEQ ID NO: 7344 - DNA, 20 bp, synthetic construct
  source 1..20: mol_type = other DNA
tgaagctcctctctctgtcc

SEQ ID NO: 7345 - DNA, 20 bp, synthetic construct
  source 1..20: mol_type = other DNA
aaggcatttatccccaaggg

SEQ ID NO: 7346 - DNA, 20 bp, synthetic construct
  source 1..20: mol_type = other DNA
accagggaaaatggttacca

SEQ ID NO: 7347 - DNA, 20 bp, synthetic construct
  source 1..20: mol_type = other DNA
taaaataactgcctcccttg

SEQ ID NO: 7348 - DNA, 20 bp, synthetic construct
  source 1..20: mol_type = other DNA
gaaaagtagaaaacagcagt

SEQ ID NO: 7349 - DNA, 20 bp, synthetic construct
  source 1..20: mol_type = other DNA
aatcagccaagaaagtaacc

SEQ ID NO: 7350 - DNA, 20 bp, synthetic construct
  source 1..20: mol_type = other DNA
atcagccaagaaagtaacca

SEQ ID NO: 7351 - DNA, 20 bp, synthetic construct
  source 1..20: mol_type = other DNA
tagaaaacagcagtgggtgt

SEQ ID NO: 7352 - DNA, 20 bp, synthetic construct
  source 1..20: mol_type = other DNA
ccagggaaaatggttaccaa

SEQ ID NO: 7353 - DNA, 20 bp, synthetic construct
  source 1..20: mol_type = other DNA
aaaacaaagaaaggacagaa

SEQ ID NO: 7354 - DNA, 20 bp, synthetic construct
  source 1..20: mol_type = other DNA
gaaaacagcagtgggtgtgg

SEQ ID NO: 7355 - DNA, 20 bp, synthetic construct
  source 1..20: mol_type = other DNA
agaaaacagcagtgggtgtg

SEQ ID NO: 7356 - DNA, 20 bp, synthetic construct
  source 1..20: mol_type = other DNA
ctaaaataactgcctccctt

SEQ ID NO: 7357 - DNA, 20 bp, synthetic construct
  source 1..20: mol_type = other DNA
tctaaaataactgcctccct

SEQ ID NO: 7358 - DNA, 20 bp, synthetic construct
  source 1..20: mol_type = other DNA
tgaaaggcatttatccccaa

SEQ ID NO: 7359 - DNA, 20 bp, synthetic construct
  source 1..20: mol_type = other DNA
ctgaaaggcatttatcccca

SEQ ID NO: 7360 - DNA, 20 bp, synthetic construct
  source 1..20: mol_type = other DNA
ccacaccgtgcagcaagcgg

SEQ ID NO: 7361 - DNA, 20 bp, synthetic construct
  source 1..20: mol_type = other DNA
tgggaacgttacgaagaagc

SEQ ID NO: 7362 - DNA, 20 bp, synthetic construct
  source 1..20: mol_type = other DNA
cacaccgtgcagcaagcgga

SEQ ID NO: 7363 - DNA, 20 bp, synthetic construct
  source 1..20: mol_type = other DNA
ctccgcttgctgcacggtgt

SEQ ID NO: 7364 - DNA, 20 bp, synthetic construct
  source 1..20: mol_type = other DNA
agagcagcgggacacggctg

SEQ ID NO: 7365 - DNA, 20 bp, synthetic construct
  source 1..20: mol_type = other DNA
agatttagagcagcgggaca

SEQ ID NO: 7366 - DNA, 20 bp, synthetic construct
  source 1..20: mol_type = other DNA
ttcccacaccgtgcagcaag

SEQ ID NO: 7367 - DNA, 20 bp, synthetic construct
  source 1..20: mol_type = other DNA
ttgatcgattgcttctgcct

SEQ ID NO: 7368 - DNA, 20 bp, synthetic construct
  source 1..20: mol_type = other DNA
acaggagcagtcaattcggg

SEQ ID NO: 7369 - DNA, 20 bp, synthetic construct
  source 1..20: mol_type = other DNA
agtctgcagatttagagcag

SEQ ID NO: 7370 - DNA, 20 bp, synthetic construct
  source 1..20: mol_type = other DNA
ggacacggctggggagcggt

SEQ ID NO: 7371 - DNA, 20 bp, synthetic construct
  source 1..20: mol_type = other DNA
tcttccctccgcttgctgca

SEQ ID NO: 7372 - DNA, 20 bp, synthetic construct
  source 1..20: mol_type = other DNA
tagagcagcgggacacggct

SEQ ID NO: 7373 - DNA, 20 bp, synthetic construct
  source 1..20: mol_type = other DNA
ggctggggagcggtaggtgg

SEQ ID NO: 7374 - DNA, 20 bp, synthetic construct
  source 1..20: mol_type = other DNA
ttagagcagcgggacacggc

SEQ ID NO: 7375 - DNA, 20 bp, synthetic construct
  source 1..20: mol_type = other DNA
cagacctgccagaaccgacc

SEQ ID NO: 7376 - DNA, 20 bp, synthetic construct
  source 1..20: mol_type = other DNA
gcgctgcccaagagcgccac

SEQ ID NO: 7377 - DNA, 20 bp, synthetic construct
  source 1..20: mol_type = other DNA
ccggccgctctagcaacccc

SEQ ID NO: 7378 - DNA, 20 bp, synthetic construct
  source 1..20: mol_type = other DNA
ccatcgagtttagccaggcg

SEQ ID NO: 7379 - DNA, 20 bp, synthetic construct
  source 1..20: mol_type = other DNA
acagccaggggttgctagag

SEQ ID NO: 7380 - DNA, 20 bp, synthetic construct
  source 1..20: mol_type = other DNA
aaaccaaagcgtgacagcca

SEQ ID NO: 7381 - DNA, 20 bp, synthetic construct
  source 1..20: mol_type = other DNA
gcgcggctagaagggcaggg

SEQ ID NO: 7382 - DNA, 20 bp, synthetic construct
  source 1..20: mol_type = other DNA
aaccaaagcgtgacagccag

SEQ ID NO: 7383 - DNA, 20 bp, synthetic construct
  source 1..20: mol_type = other DNA
ggttgctagagcggccggcg

SEQ ID NO: 7384 - DNA, 20 bp, synthetic construct
  source 1..20: mol_type = other DNA
caggcgcggctagaagggca

SEQ ID NO: 7385 - DNA, 20 bp, synthetic construct
  source 1..20: mol_type = other DNA
cgtggcgctcttgggcagcg

SEQ ID NO: 7386 - DNA, 20 bp, synthetic construct
  source 1..20: mol_type = other DNA
tagaagggcagggaggcggt

SEQ ID NO: 7387 - DNA, 20 bp, synthetic construct
  source 1..20: mol_type = other DNA
gatggttcgctgcgccgcgc

SEQ ID NO: 7388 - DNA, 20 bp, synthetic construct
  source 1..20: mol_type = other DNA
cgcgctgcccaagagcgcca

SEQ ID NO: 7389 - DNA, 20 bp, synthetic construct
  source 1..20: mol_type = other DNA
ctagaagggcagggaggcgg

SEQ ID NO: 7390 - DNA, 20 bp, synthetic construct
  source 1..20: mol_type = other DNA
gcttccgtcttgcttccaca

SEQ ID NO: 7391 - DNA, 20 bp, synthetic construct
  source 1..20: mol_type = other DNA
ccaaataggcgccaacgaag

SEQ ID NO: 7392 - DNA, 20 bp, synthetic construct
  source 1..20: mol_type = other DNA
aataggcgccaacgaagagg

SEQ ID NO: 7393 - DNA, 20 bp, synthetic construct
  source 1..20: mol_type = other DNA
agttcattgggcacttctgt

SEQ ID NO: 7394 - DNA, 20 bp, synthetic construct
  source 1..20: mol_type = other DNA
aaataatttgtaatgccgtg

SEQ ID NO: 7395 - DNA, 20 bp, synthetic construct
  source 1..20: mol_type = other DNA
gacattctggtggcgcgcgg

SEQ ID NO: 7396 - DNA, 20 bp, synthetic construct
  source 1..20: mol_type = other DNA
aagtgcccaatgaactctaa

SEQ ID NO: 7397 - DNA, 20 bp, synthetic construct
  source 1..20: mol_type = other DNA
agggacattctggtggcgcg

SEQ ID NO: 7398 - DNA, 20 bp, synthetic construct
  source 1..20: mol_type = other DNA
aaataggcgccaacgaagag

SEQ ID NO: 7399 - DNA, 20 bp, synthetic construct
  source 1..20: mol_type = other DNA
tcttcgttggcgcctatttg

SEQ ID NO: 7400 - DNA, 20 bp, synthetic construct
  source 1..20: mol_type = other DNA
tcggcacttccggtcccgcg

SEQ ID NO: 7401 - DNA, 20 bp, synthetic construct
  source 1..20: mol_type = other DNA
aatgccgtgtggaagcaaga

SEQ ID NO: 7402 - DNA, 20 bp, synthetic construct
  source 1..20: mol_type = other DNA
gagttcattgggcacttctg

SEQ ID NO: 7403 - DNA, 20 bp, synthetic construct
  source 1..20: mol_type = other DNA
aaaaaccattagagttcatt

SEQ ID NO: 7404 - DNA, 20 bp, synthetic construct
  source 1..20: mol_type = other DNA
aaaaaaccattagagttcat

SEQ ID NO: 7405 - DNA, 20 bp, synthetic construct
  source 1..20: mol_type = other DNA
aggtgacaagacccacgcaa

SEQ ID NO: 7406 - DNA, 20 bp, synthetic construct
  source 1..20: mol_type = other DNA
aaggtgacaagacccacgca

SEQ ID NO: 7407 - DNA, 20 bp, synthetic construct
  source 1..20: mol_type = other DNA
agtgacgcagatgtgcactg

SEQ ID NO: 7408 - DNA, 20 bp, synthetic construct
  source 1..20: mol_type = other DNA
ggcctatacggagagatgga

SEQ ID NO: 7409 - DNA, 20 bp, synthetic construct
  source 1..20: mol_type = other DNA
ggtgacaagacccacgcaag

SEQ ID NO: 7410 - DNA, 20 bp, synthetic construct
  source 1..20: mol_type = other DNA
ctggggcctatacggagaga

SEQ ID NO: 7411 - DNA, 20 bp, synthetic construct
  source 1..20: mol_type = other DNA
taagtgacgcagatgtgcac

SEQ ID NO: 7412 - DNA, 20 bp, synthetic construct
  source 1..20: mol_type = other DNA
atctgcgtcacttacagggg

SEQ ID NO: 7413 - DNA, 20 bp, synthetic construct
  source 1..20: mol_type = other DNA
cagtaatgtagcgaggaagg

SEQ ID NO: 7414 - DNA, 20 bp, synthetic construct
  source 1..20: mol_type = other DNA
gggcctatacggagagatgg

SEQ ID NO: 7415 - DNA, 20 bp, synthetic construct
  source 1..20: mol_type = other DNA
cacatctgcgtcacttacag

SEQ ID NO: 7416 - DNA, 20 bp, synthetic construct
  source 1..20: mol_type = other DNA
ctcttattgtccccttgcgt

SEQ ID NO: 7417 - DNA, 20 bp, synthetic construct
  source 1..20: mol_type = other DNA
agtaatgtagcgaggaagga

SEQ ID NO: 7418 - DNA, 20 bp, synthetic construct
  source 1..20: mol_type = other DNA
ctatacggagagatggaggg

SEQ ID NO: 7419 - DNA, 20 bp, synthetic construct
  source 1..20: mol_type = other DNA
gctcttattgtccccttgcg

SEQ ID NO: 7420 - DNA, 20 bp, synthetic construct
  source 1..20: mol_type = other DNA
tcgatatatatttaccgcgg

SEQ ID NO: 7421 - DNA, 20 bp, synthetic construct
  source 1..20: mol_type = other DNA
ctggagtctggtacccacag

SEQ ID NO: 7422 - DNA, 20 bp, synthetic construct
  source 1..20: mol_type = other DNA
atcgatatatatttaccgcg

SEQ ID NO: 7423 - DNA, 20 bp, synthetic construct
  source 1..20: mol_type = other DNA
gagcaagcccggcttgtggt

SEQ ID NO: 7424 - DNA, 20 bp, synthetic construct
  source 1..20: mol_type = other DNA
atatcgattcttgttaccgc

SEQ ID NO: 7425 - DNA, 20 bp, synthetic construct
  source 1..20: mol_type = other DNA
gaatcgatatatatttaccg

SEQ ID NO: 7426 - DNA, 20 bp, synthetic construct
  source 1..20: mol_type = other DNA
tacccacagaggagcaggca

SEQ ID NO: 7427 - DNA, 20 bp, synthetic construct
  source 1..20: mol_type = other DNA
ggtgcgcggaggctgcaggg

SEQ ID NO: 7428 - DNA, 20 bp, synthetic construct
  source 1..20: mol_type = other DNA
aatcgatatatatttaccgc

SEQ ID NO: 7429 - DNA, 20 bp, synthetic construct
  source 1..20: mol_type = other DNA
tctggtacccacagaggagc

SEQ ID NO: 7430 - DNA, 20 bp, synthetic construct
  source 1..20: mol_type = other DNA
atgagagcaagcccggcttg

SEQ ID NO: 7431 - DNA, 20 bp, synthetic construct
  source 1..20: mol_type = other DNA
tgttggaaggatggggccgg

SEQ ID NO: 7432 - DNA, 20 bp, synthetic construct
  source 1..20: mol_type = other DNA
gtacccacagaggagcaggc

SEQ ID NO: 7433 - DNA, 20 bp, synthetic construct
  source 1..20: mol_type = other DNA
cacccccacccccgcccccg

SEQ ID NO: 7434 - DNA, 20 bp, synthetic construct
  source 1..20: mol_type = other DNA
gcgggggtgggggtgcgcgg

SEQ ID NO: 7435 - DNA, 20 bp, synthetic construct
  source 1..20: mol_type = other DNA
ttaattattaatccccatca

SEQ ID NO: 7436 - DNA, 20 bp, synthetic construct
  source 1..20: mol_type = other DNA
ttatgacacaaaacatacct

SEQ ID NO: 7437 - DNA, 20 bp, synthetic construct
  source 1..20: mol_type = other DNA
tcactcttcatgccttgatg

SEQ ID NO: 7438 - DNA, 20 bp, synthetic construct
  source 1..20: mol_type = other DNA
atcactcttcatgccttgat

SEQ ID NO: 7439 - DNA, 20 bp, synthetic construct
  source 1..20: mol_type = other DNA
tattgacgtagatgaaactg

SEQ ID NO: 7440 - DNA, 20 bp, synthetic construct
  source 1..20: mol_type = other DNA
tatcactcttcatgccttga

SEQ ID NO: 7441 - DNA, 20 bp, synthetic construct
  source 1..20: mol_type = other DNA
taaaaccacacaaaaaggaa

SEQ ID NO: 7442 - DNA, 20 bp, synthetic construct
  source 1..20: mol_type = other DNA
gattaataattaaagatata

SEQ ID NO: 7443 - DNA, 20 bp, synthetic construct
  source 1..20: mol_type = other DNA
tacattaaaaaaacttcttt

SEQ ID NO: 7444 - DNA, 20 bp, synthetic construct
  source 1..20: mol_type = other DNA
caatagacataataccgcga

SEQ ID NO: 7445 - DNA, 20 bp, synthetic construct
  source 1..20: mol_type = other DNA
taaccaagcataaagtagca

SEQ ID NO: 7446 - DNA, 20 bp, synthetic construct
  source 1..20: mol_type = other DNA
aggcgatagaaatgatatct

SEQ ID NO: 7447 - DNA, 20 bp, synthetic construct
  source 1..20: mol_type = other DNA
tcattatgcagaaggtatag

SEQ ID NO: 7448 - DNA, 20 bp, synthetic construct
  source 1..20: mol_type = other DNA
gtgggaagattcataggtag

SEQ ID NO: 7449 - DNA, 20 bp, synthetic construct
  source 1..20: mol_type = other DNA
gtagtagaattagttgggtt

SEQ ID NO: 7450 - DNA, 20 bp, synthetic construct
  source 1..20: mol_type = other DNA
aaaatagtgggaagattcat

SEQ ID NO: 7451 - DNA, 20 bp, synthetic construct
  source 1..20: mol_type = other DNA
attcattatgcagaaggtat

SEQ ID NO: 7452 - DNA, 20 bp, synthetic construct
  source 1..20: mol_type = other DNA
tgtccttgctactttatgct

SEQ ID NO: 7453 - DNA, 20 bp, synthetic construct
  source 1..20: mol_type = other DNA
ggtttcgggggtcttggctt

SEQ ID NO: 7454 - DNA, 20 bp, synthetic construct
  source 1..20: mol_type = other DNA
catttacccaaataaagtat

SEQ ID NO: 7455 - DNA, 20 bp, synthetic construct
  source 1..20: mol_type = other DNA
tcgtctggtttcgggggtct

SEQ ID NO: 7456 - DNA, 20 bp, synthetic construct
  source 1..20: mol_type = other DNA
tagttaattcattatgcaga

SEQ ID NO: 7457 - DNA, 20 bp, synthetic construct
  source 1..20: mol_type = other DNA
ctgttcttaggtagctcgtc

SEQ ID NO: 7458 - DNA, 20 bp, synthetic construct
  source 1..20: mol_type = other DNA
tctatcgcctatactttatt

SEQ ID NO: 7459 - DNA, 20 bp, synthetic construct
  source 1..20: mol_type = other DNA
taaaaatggaggctagaata

SEQ ID NO: 7460 - DNA, 20 bp, synthetic construct
  source 1..20: mol_type = other DNA
cttcctacataaagtaagga

SEQ ID NO: 7461 - DNA, 20 bp, synthetic construct
  source 1..20: mol_type = other DNA
acttcctacataaagtaagg

SEQ ID NO: 7462 - DNA, 20 bp, synthetic construct
  source 1..20: mol_type = other DNA
cttactttatgtaggaagtc

SEQ ID NO: 7463 - DNA, 20 bp, synthetic construct
  source 1..20: mol_type = other DNA
taatcaaatgaaaaacgtct

SEQ ID NO: 7464 - DNA, 20 bp, synthetic construct
  source 1..20: mol_type = other DNA
aaaaatggaggctagaataa

SEQ ID NO: 7465 - DNA, 20 bp, synthetic construct
  source 1..20: mol_type = other DNA
agtaaggagggtaaaaatgg

SEQ ID NO: 7466 - DNA, 20 bp, synthetic construct
  source 1..20: mol_type = other DNA
tgtaggaagtcaggccctat

SEQ ID NO: 7467 - DNA, 20 bp, synthetic construct
  source 1..20: mol_type = other DNA
aagcaaatatagaaacctat

SEQ ID NO: 7468 - DNA, 20 bp, synthetic construct
  source 1..20: mol_type = other DNA
ctgacttcctacataaagta

SEQ ID NO: 7469 - DNA, 20 bp, synthetic construct
  source 1..20: mol_type = other DNA
ttaccctccttactttatgt

SEQ ID NO: 7470 - DNA, 20 bp, synthetic construct
  source 1..20: mol_type = other DNA
ttaatcaaatgaaaaacgtc

SEQ ID NO: 7471 - DNA, 20 bp, synthetic construct
  source 1..20: mol_type = other DNA
agcaaatatagaaacctata

SEQ ID NO: 7472 - DNA, 20 bp, synthetic construct
  source 1..20: mol_type = other DNA
taggtttctatatttgcttc

SEQ ID NO: 7473 - DNA, 20 bp, synthetic construct
  source 1..20: mol_type = other DNA
taaagtaaggagggtaaaaa

SEQ ID NO: 7474 - DNA, 20 bp, synthetic construct
  source 1..20: mol_type = other DNA
actcacccactactttacac

SEQ ID NO: 7475 - DNA, 20 bp, synthetic construct
  source 1..20: mol_type = other DNA
cagttgtaacccagaaaggt

SEQ ID NO: 7476 - DNA, 20 bp, synthetic construct
  source 1..20: mol_type = other DNA
gacagcacatcccaagtttg

SEQ ID NO: 7477 - DNA, 20 bp, synthetic construct
  source 1..20: mol_type = other DNA
acttcagttgtaacccagaa

SEQ ID NO: 7478 - DNA, 20 bp, synthetic construct
  source 1..20: mol_type = other DNA
taagaactatattattcaac

SEQ ID NO: 7479 - DNA, 20 bp, synthetic construct
  source 1..20: mol_type = other DNA
acaaaaccggtgtaaagtag

SEQ ID NO: 7480 - DNA, 20 bp, synthetic construct
  source 1..20: mol_type = other DNA
gtaaagtagtgggtgagtat

SEQ ID NO: 7481 - DNA, 20 bp, synthetic construct
  source 1..20: mol_type = other DNA
acagcacatcccaagtttgc

SEQ ID NO: 7482 - DNA, 20 bp, synthetic construct
  source 1..20: mol_type = other DNA
aagtagtgggtgagtatggg

SEQ ID NO: 7483 - DNA, 20 bp, synthetic construct
  source 1..20: mol_type = other DNA
agtagtgggtgagtatggga

SEQ ID NO: 7484 - DNA, 20 bp, synthetic construct
  source 1..20: mol_type = other DNA
tgtaaagtagtgggtgagta

SEQ ID NO: 7485 - DNA, 20 bp, synthetic construct
  source 1..20: mol_type = other DNA
caaaaccggtgtaaagtagt

SEQ ID NO: 7486 - DNA, 20 bp, synthetic construct
  source 1..20: mol_type = other DNA
tgggtgagtatgggagggac

SEQ ID NO: 7487 - DNA, 20 bp, synthetic construct
  source 1..20: mol_type = other DNA
tccccccatcaaaacaaaac

SEQ ID NO: 7488 - DNA, 20 bp, synthetic construct
  source 1..20: mol_type = other DNA
aaactcagctttggctgaac

SEQ ID NO: 7489 - DNA, 20 bp, synthetic construct
  source 1..20: mol_type = other DNA
agtgaagcgcgacgactctg

SEQ ID NO: 7490 - DNA, 20 bp, synthetic construct
  source 1..20: mol_type = other DNA
ctgagcgtcacggcgccaag

SEQ ID NO: 7491 - DNA, 20 bp, synthetic construct
  source 1..20: mol_type = other DNA
cgtcgcgtcacactaggcgc

SEQ ID NO: 7492 - DNA, 20 bp, synthetic construct
  source 1..20: mol_type = other DNA
agcgtcacggcgccaagcgg

SEQ ID NO: 7493 - DNA, 20 bp, synthetic construct
  source 1..20: mol_type = other DNA
gcacgtcgtcgcgtcacact

SEQ ID NO: 7494 - DNA, 20 bp, synthetic construct
  source 1..20: mol_type = other DNA
tagcattgagggcccttccg

SEQ ID NO: 7495 - DNA, 20 bp, synthetic construct
  source 1..20: mol_type = other DNA
aatgctatctccggcaagcg

SEQ ID NO: 7496 - DNA, 20 bp, synthetic construct
  source 1..20: mol_type = other DNA
gcttgccggagatagcattg

SEQ ID NO: 7497 - DNA, 20 bp, synthetic construct
  source 1..20: mol_type = other DNA
gcgtttcgcatcgctcccaa

SEQ ID NO: 7498 - DNA, 20 bp, synthetic construct
  source 1..20: mol_type = other DNA
tttcgcatcgctcccaaagg

SEQ ID NO: 7499 - DNA, 20 bp, synthetic construct
  source 1..20: mol_type = other DNA
cgcatcgctcccaaaggcgg

SEQ ID NO: 7500 - DNA, 20 bp, synthetic construct
  source 1..20: mol_type = other DNA
ctgacatcagcaccccgcgc

SEQ ID NO: 7501 - DNA, 20 bp, synthetic construct
  source 1..20: mol_type = other DNA
gtcacactaggcgccggcgc

SEQ ID NO: 7502 - DNA, 20 bp, synthetic construct
  source 1..20: mol_type = other DNA
cgtcacactaggcgccggcg

SEQ ID NO: 7503 - DNA, 20 bp, synthetic construct
  source 1..20: mol_type = other DNA
tcacactaggcgccggcgcg

SEQ ID NO: 7504 - DNA, 20 bp, synthetic construct
  source 1..20: mol_type = other DNA
aggaggctggtgctgacaga

SEQ ID NO: 7505 - DNA, 20 bp, synthetic construct
  source 1..20: mol_type = other DNA
ccggggaacaagtcagacag

SEQ ID NO: 7506 - DNA, 20 bp, synthetic construct
  source 1..20: mol_type = other DNA
taggaggctggtgctgacag

SEQ ID NO: 7507 - DNA, 20 bp, synthetic construct
  source 1..20: mol_type = other DNA
gagctcaggcaatccatgct

SEQ ID NO: 7508 - DNA, 20 bp, synthetic construct
  source 1..20: mol_type = other DNA
gccggggaacaagtcagaca

SEQ ID NO: 7509 - DNA, 20 bp, synthetic construct
  source 1..20: mol_type = other DNA
ggccggggaacaagtcagac

SEQ ID NO: 7510 - DNA, 20 bp, synthetic construct
  source 1..20: mol_type = other DNA
aagtcagacaggctcagctg

SEQ ID NO: 7511 - DNA, 20 bp, synthetic construct
  source 1..20: mol_type = other DNA
agtcagacaggctcagctgt

SEQ ID NO: 7512 - DNA, 20 bp, synthetic construct
  source 1..20: mol_type = other DNA
cccctgtctgacttgttccc

SEQ ID NO: 7513 - DNA, 20 bp, synthetic construct
  source 1..20: mol_type = other DNA
agacaggggataagtcagac

SEQ ID NO: 7514 - DNA, 20 bp, synthetic construct
  source 1..20: mol_type = other DNA
gcctctttggggagcaggag

SEQ ID NO: 7515 - DNA, 20 bp, synthetic construct
  source 1..20: mol_type = other DNA
tgacagagggcatgcagctc

SEQ ID NO: 7516 - DNA, 20 bp, synthetic construct
  source 1..20: mol_type = other DNA
gtgtggccccaagaagaggc

SEQ ID NO: 7517 - DNA, 20 bp, synthetic construct
  source 1..20: mol_type = other DNA
tcccctcctgctccccaaag

SEQ ID NO: 7518 - DNA, 20 bp, synthetic construct
  source 1..20: mol_type = other DNA
ggggagcaggaggggagctc

SEQ ID NO: 7519 - DNA, 20 bp, synthetic construct
  source 1..20: mol_type = other DNA
ggtgggaccgagctcgcctg

SEQ ID NO: 7520 - DNA, 20 bp, synthetic construct
  source 1..20: mol_type = other DNA
tcggtcccacccagcaggcg

SEQ ID NO: 7521 - DNA, 20 bp, synthetic construct
  source 1..20: mol_type = other DNA
cggtcccacccagcaggcgg

SEQ ID NO: 7522 - DNA, 20 bp, synthetic construct
  source 1..20: mol_type = other DNA
gcggggactgaggctgagct

SEQ ID NO: 7523 - DNA, 20 bp, synthetic construct
  source 1..20: mol_type = other DNA
tgaggctgagctgggctccg

SEQ ID NO: 7524 - DNA, 20 bp, synthetic construct
  source 1..20: mol_type = other DNA
gccccccgcttcctccccga

SEQ ID NO: 7525 - DNA, 20 bp, synthetic construct
  source 1..20: mol_type = other DNA
gctcggtcccacccagcagg

SEQ ID NO: 7526 - DNA, 20 bp, synthetic construct
  source 1..20: mol_type = other DNA
actgaggctgagctgggctc

SEQ ID NO: 7527 - DNA, 20 bp, synthetic construct
  source 1..20: mol_type = other DNA
gggtgggaccgagctcgcct

SEQ ID NO: 7528 - DNA, 20 bp, synthetic construct
  source 1..20: mol_type = other DNA
ggccctcggggaggaagcgg

SEQ ID NO: 7529 - DNA, 20 bp, synthetic construct
  source 1..20: mol_type = other DNA
gccctcggggaggaagcggg

SEQ ID NO: 7530 - DNA, 20 bp, synthetic construct
  source 1..20: mol_type = other DNA
cgccccccgcttcctccccg

SEQ ID NO: 7531 - DNA, 20 bp, synthetic construct
  source 1..20: mol_type = other DNA
aggggggccccaggcgagct

SEQ ID NO: 7532 - DNA, 20 bp, synthetic construct
  source 1..20: mol_type = other DNA
gctgggctccggggccctcg

SEQ ID NO: 7533 - DNA, 20 bp, synthetic construct
  source 1..20: mol_type = other DNA
gggctccggggccctcgggg

SEQ ID NO: 7534 - DNA, 20 bp, synthetic construct
  source 1..20: mol_type = other DNA
aacacatacaaccacacggt

SEQ ID NO: 7535 - DNA, 20 bp, synthetic construct
  source 1..20: mol_type = other DNA
taactgtagttcctaccgtg

SEQ ID NO: 7536 - DNA, 20 bp, synthetic construct
  source 1..20: mol_type = other DNA
tccttaatgctgacaccgca

SEQ ID NO: 7537 - DNA, 20 bp, synthetic construct
  source 1..20: mol_type = other DNA
aagaggaacttctataactt

SEQ ID NO: 7538 - DNA, 20 bp, synthetic construct
  source 1..20: mol_type = other DNA
gcagaaactggcccagttac

SEQ ID NO: 7539 - DNA, 20 bp, synthetic construct
  source 1..20: mol_type = other DNA
taacaacacatacaaccaca

SEQ ID NO: 7540 - DNA, 20 bp, synthetic construct
  source 1..20: mol_type = other DNA
gaagaggaacttctataact

SEQ ID NO: 7541 - DNA, 20 bp, synthetic construct
  source 1..20: mol_type = other DNA
ggtgtgccaagctgacagat

SEQ ID NO: 7542 - DNA, 20 bp, synthetic construct
  source 1..20: mol_type = other DNA
agtcaaccaatctgtcagct

SEQ ID NO: 7543 - DNA, 20 bp, synthetic construct
  source 1..20: mol_type = other DNA
tacaattgaagacaaaatcc

SEQ ID NO: 7544 - DNA, 20 bp, synthetic construct
  source 1..20: mol_type = other DNA
tgaagacaaaatccaggaag

SEQ ID NO: 7545 - DNA, 20 bp, synthetic construct
  source 1..20: mol_type = other DNA
gttatagaagttcctcttcc

SEQ ID NO: 7546 - DNA, 20 bp, synthetic construct
  source 1..20: mol_type = other DNA
atctttctcactcattagat

SEQ ID NO: 7547 - DNA, 20 bp, synthetic construct
  source 1..20: mol_type = other DNA
tgagtgaagcggacgcgcga

SEQ ID NO: 7548 - DNA, 20 bp, synthetic construct
  source 1..20: mol_type = other DNA
gaggcgagtggaactggatc

SEQ ID NO: 7549 - DNA, 20 bp, synthetic construct
  source 1..20: mol_type = other DNA
gtgagtgaagcggacgcgcg

SEQ ID NO: 7550 - DNA, 20 bp, synthetic construct
  source 1..20: mol_type = other DNA
gggaagggggggtcacgcgg

SEQ ID NO: 7551 - DNA, 20 bp, synthetic construct
  source 1..20: mol_type = other DNA
ggaggcgagtggaactggat

SEQ ID NO: 7552 - DNA, 20 bp, synthetic construct
  source 1..20: mol_type = other DNA
cgcaccgggagcgcgctcgg

SEQ ID NO: 7553 - DNA, 20 bp, synthetic construct
  source 1..20: mol_type = other DNA
tggatcgggtttgctgccag

SEQ ID NO: 7554 - DNA, 20 bp, synthetic construct
  source 1..20: mol_type = other DNA
ggctgagggagtgagtgaag

SEQ ID NO: 7555 - DNA, 20 bp, synthetic construct
  source 1..20: mol_type = other DNA
gctgccagcggcgtgagctt

SEQ ID NO: 7556 - DNA, 20 bp, synthetic construct
  source 1..20: mol_type = other DNA
gtgaagcggacgcgcgaggg

SEQ ID NO: 7557 - DNA, 20 bp, synthetic construct
  source 1..20: mol_type = other DNA
gagaaggaggagctggagga

SEQ ID NO: 7558 - DNA, 20 bp, synthetic construct
  source 1..20: mol_type = other DNA
tgaagcggacgcgcgaggga

SEQ ID NO: 7559 - DNA, 20 bp, synthetic construct
  source 1..20: mol_type = other DNA
ggagcgcgctcggaggcgag

SEQ ID NO: 7560 - DNA, 20 bp, synthetic construct
  source 1..20: mol_type = other DNA
gaggagctggaggagggcag

SEQ ID NO: 7561 - DNA, 20 bp, synthetic construct
  source 1..20: mol_type = other DNA
tggaggagggcaggggctga

SEQ ID NO: 7562 - DNA, 20 bp, synthetic construct
  source 1..20: mol_type = other DNA
taatcatcatgagaaataca

SEQ ID NO: 7563 - DNA, 20 bp, synthetic construct
  source 1..20: mol_type = other DNA
gaagtagtagattggataca

SEQ ID NO: 7564 - DNA, 20 bp, synthetic construct
  source 1..20: mol_type = other DNA
tgtgtgtatactcaatcatc

SEQ ID NO: 7565 - DNA, 20 bp, synthetic construct
  source 1..20: mol_type = other DNA
tgtatactcaatcatctggg

SEQ ID NO: 7566 - DNA, 20 bp, synthetic construct
  source 1..20: mol_type = other DNA
ttaaactgtaaattcctata

SEQ ID NO: 7567 - DNA, 20 bp, synthetic construct
  source 1..20: mol_type = other DNA
catctcaagaaaaaccttat

SEQ ID NO: 7568 - DNA, 20 bp, synthetic construct
  source 1..20: mol_type = other DNA
gtgtgtatactcaatcatct

SEQ ID NO: 7569 - DNA, 20 bp, synthetic construct
  source 1..20: mol_type = other DNA
aaactcttgtgaacaaagtc

SEQ ID NO: 7570 - DNA, 20 bp, synthetic construct
  source 1..20: mol_type = other DNA
ctacttcaaattgagctctt

SEQ ID NO: 7571 - DNA, 20 bp, synthetic construct
  source 1..20: mol_type = other DNA
ctcaatttgaagtagtagat

SEQ ID NO: 7572 - DNA, 20 bp, synthetic construct
  source 1..20: mol_type = other DNA
ctcagttcttgaagattact

SEQ ID NO: 7573 - DNA, 20 bp, synthetic construct
  source 1..20: mol_type = other DNA
tcaagcatttattattaaaa

SEQ ID NO: 7574 - DNA, 20 bp, synthetic construct
  source 1..20: mol_type = other DNA
caaaggactcctatatccac

SEQ ID NO: 7575 - DNA, 20 bp, synthetic construct
  source 1..20: mol_type = other DNA
gtaggcaagacagtgagagg

SEQ ID NO: 7576 - DNA, 20 bp, synthetic construct
  source 1..20: mol_type = other DNA
tgtgtaggcaagacagtgag

SEQ ID NO: 7577 - DNA, 20 bp, synthetic construct
  source 1..20: mol_type = other DNA
agtgtactaacacaagtagc

SEQ ID NO: 7578 - DNA, 20 bp, synthetic construct
  source 1..20: mol_type = other DNA
gcgaaaatactcaaatgtgt

SEQ ID NO: 7579 - DNA, 20 bp, synthetic construct
  source 1..20: mol_type = other DNA
tgcaggtcacaagtgtcctg

SEQ ID NO: 7580 - DNA, 20 bp, synthetic construct
  source 1..20: mol_type = other DNA
gcagtttctcacttcagcaa

SEQ ID NO: 7581 - DNA, 20 bp, synthetic construct
  source 1..20: mol_type = other DNA
acacttgtgacctgcagaaa

SEQ ID NO: 7582 - DNA, 20 bp, synthetic construct
  source 1..20: mol_type = other DNA
gtgagaggaggtgatattta

SEQ ID NO: 7583 - DNA, 20 bp, synthetic construct
  source 1..20: mol_type = other DNA
cacaagtgtcctgtggatat

SEQ ID NO: 7584 - DNA, 20 bp, synthetic construct
  source 1..20: mol_type = other DNA
ggccgacctccccattccag

SEQ ID NO: 7585 - DNA, 20 bp, synthetic construct
  source 1..20: mol_type = other DNA
tcccgcacagcaggagcgga

SEQ ID NO: 7586 - DNA, 20 bp, synthetic construct
  source 1..20: mol_type = other DNA
actggagaatcgttaggacg

SEQ ID NO: 7587 - DNA, 20 bp, synthetic construct
  source 1..20: mol_type = other DNA
cggctggcgcccctggaatg

SEQ ID NO: 7588 - DNA, 20 bp, synthetic construct
  source 1..20: mol_type = other DNA
gcgggaactggagaatcgtt

SEQ ID NO: 7589 - DNA, 20 bp, synthetic construct
  source 1..20: mol_type = other DNA
aaggcaccgctaaggaccgc

SEQ ID NO: 7590 - DNA, 20 bp, synthetic construct
  source 1..20: mol_type = other DNA
tggggaggtcggccgcctgg

SEQ ID NO: 7591 - DNA, 20 bp, synthetic construct
  source 1..20: mol_type = other DNA
aggcccgttatgtaatccgc

SEQ ID NO: 7592 - DNA, 20 bp, synthetic construct
  source 1..20: mol_type = other DNA
cggccgacctccccattcca

SEQ ID NO: 7593 - DNA, 20 bp, synthetic construct
  source 1..20: mol_type = other DNA
ggaccgctggccccgccagg

SEQ ID NO: 7594 - DNA, 20 bp, synthetic construct
  source 1..20: mol_type = other DNA
ggggagagaaggcaccgcta

SEQ ID NO: 7595 - DNA, 20 bp, synthetic construct
  source 1..20: mol_type = other DNA
ctggcgcccctggaatgggg

SEQ ID NO: 7596 - DNA, 20 bp, synthetic construct
  source 1..20: mol_type = other DNA
gggaggtcggccgcctggcg

SEQ ID NO: 7597 - DNA, 20 bp, synthetic construct
  source 1..20: mol_type = other DNA
ccgttatgtaatccgccggc

SEQ ID NO: 7598 - DNA, 20 bp, synthetic construct
  source 1..20: mol_type = other DNA
attccaggggcgccagccgg

SEQ ID NO: 7599 - DNA, 20 bp, synthetic construct
  source 1..20: mol_type = other DNA
agggccaaaccgaaataggg

SEQ ID NO: 7600 - DNA, 20 bp, synthetic construct
  source 1..20: mol_type = other DNA
aaggcgctgcctcaggccag

SEQ ID NO: 7601 - DNA, 20 bp, synthetic construct
  source 1..20: mol_type = other DNA
tttgtgaggcctctggcctg

SEQ ID NO: 7602 - DNA, 20 bp, synthetic construct
  source 1..20: mol_type = other DNA
gaagatatacatcaatactg

SEQ ID NO: 7603 - DNA, 20 bp, synthetic construct
  source 1..20: mol_type = other DNA
aaagggccaaaccgaaatag

SEQ ID NO: 7604 - DNA, 20 bp, synthetic construct
  source 1..20: mol_type = other DNA
aagggccaaaccgaaatagg

SEQ ID NO: 7605 - DNA, 20 bp, synthetic construct
  source 1..20: mol_type = other DNA
gagaacctgaaagaagtcgg

SEQ ID NO: 7606 - DNA, 20 bp, synthetic construct
  source 1..20: mol_type = other DNA
agaacctgaaagaagtcggc

SEQ ID NO: 7607 - DNA, 20 bp, synthetic construct
  source 1..20: mol_type = other DNA
actgagaacctgaaagaagt

SEQ ID NO: 7608 - DNA, 20 bp, synthetic construct
  source 1..20: mol_type = other DNA
agatttcccctcccccaccg

SEQ ID NO: 7609 - DNA, 20 bp, synthetic construct
  source 1..20: mol_type = other DNA
acattacaaaattcagaaca

SEQ ID NO: 7610 - DNA, 20 bp, synthetic construct
  source 1..20: mol_type = other DNA
gggaagtcccgccccggtgg

SEQ ID NO: 7611 - DNA, 20 bp, synthetic construct
  source 1..20: mol_type = other DNA
cgggaagtcccgccccggtg

SEQ ID NO: 7612 - DNA, 20 bp, synthetic construct
  source 1..20: mol_type = other DNA
ttagatttcccctcccccac

SEQ ID NO: 7613 - DNA, 20 bp, synthetic construct
  source 1..20: mol_type = other DNA
tagatttcccctcccccacc

SEQ ID NO: 7614 - DNA, 20 bp, synthetic construct
  source 1..20: mol_type = other DNA
cccaaggagtaacttaggtg

SEQ ID NO: 7615 - DNA, 20 bp, synthetic construct
  source 1..20: mol_type = other DNA
tcagtccacccattcagcca

SEQ ID NO: 7616 - DNA, 20 bp, synthetic construct
  source 1..20: mol_type = other DNA
ccacagcatgacatcagcta

SEQ ID NO: 7617 - DNA, 20 bp, synthetic construct
  source 1..20: mol_type = other DNA
agtccacccattcagccagg

SEQ ID NO: 7618 - DNA, 20 bp, synthetic construct
  source 1..20: mol_type = other DNA
ggaaacatggccaagccccc

SEQ ID NO: 7619 - DNA, 20 bp, synthetic construct
  source 1..20: mol_type = other DNA
cccacagcatgacatcagct

SEQ ID NO: 7620 - DNA, 20 bp, synthetic construct
  source 1..20: mol_type = other DNA
gcagcgtggtgcacctccca

SEQ ID NO: 7621 - DNA, 20 bp, synthetic construct
  source 1..20: mol_type = other DNA
aagccccctggctgaatggg

SEQ ID NO: 7622 - DNA, 20 bp, synthetic construct
  source 1..20: mol_type = other DNA
tccccaaggagtaacttagg

SEQ ID NO: 7623 - DNA, 20 bp, synthetic construct
  source 1..20: mol_type = other DNA
cagtccacccattcagccag

SEQ ID NO: 7624 - DNA, 20 bp, synthetic construct
  source 1..20: mol_type = other DNA
caagggtgcagcctgacccc

SEQ ID NO: 7625 - DNA, 20 bp, synthetic construct
  source 1..20: mol_type = other DNA
gagtaacttaggtggggaca

SEQ ID NO: 7626 - DNA, 20 bp, synthetic construct
  source 1..20: mol_type = other DNA
agttactccttggggaaaca

SEQ ID NO: 7627 - DNA, 20 bp, synthetic construct
  source 1..20: mol_type = other DNA
ggcttggccatgtttcccca

SEQ ID NO: 7628 - DNA, 20 bp, synthetic construct
  source 1..20: mol_type = other DNA
agtaacttaggtggggacag

SEQ ID NO: 7629 - DNA, 20 bp, synthetic construct
  source 1..20: mol_type = other DNA
acaaagcagggtacccaacg

SEQ ID NO: 7630 - DNA, 20 bp, synthetic construct
  source 1..20: mol_type = other DNA
gggagagaggaaccacgctg

SEQ ID NO: 7631 - DNA, 20 bp, synthetic construct
  source 1..20: mol_type = other DNA
gtaaccgcgagaacaaagca

SEQ ID NO: 7632 - DNA, 20 bp, synthetic construct
  source 1..20: mol_type = other DNA
ctcagacgccacacaaaatg

SEQ ID NO: 7633 - DNA, 20 bp, synthetic construct
  source 1..20: mol_type = other DNA
tcagacgccacacaaaatgg

SEQ ID NO: 7634 - DNA, 20 bp, synthetic construct
  source 1..20: mol_type = other DNA
gggtacccaacggggtgtgg

SEQ ID NO: 7635 - DNA, 20 bp, synthetic construct
  source 1..20: mol_type = other DNA
gccagcgcccgggagagcga

SEQ ID NO: 7636 - DNA, 20 bp, synthetic construct
  source 1..20: mol_type = other DNA
gcgcccgggagagcgaaggc

SEQ ID NO: 7637 - DNA, 20 bp, synthetic construct
  source 1..20: mol_type = other DNA
gtgtcccgccacaccccgtt

SEQ ID NO: 7638 - DNA, 20 bp, synthetic construct
  source 1..20: mol_type = other DNA
agcgcccgggagagcgaagg

SEQ ID NO: 7639 - DNA, 20 bp, synthetic construct
  source 1..20: mol_type = other DNA
ggtgtcccgccacaccccgt

SEQ ID NO: 7640 - DNA, 20 bp, synthetic construct
  source 1..20: mol_type = other DNA
ttcgctctcccgggcgctgg

SEQ ID NO: 7641 - DNA, 20 bp, synthetic construct
  source 1..20: mol_type = other DNA
gccttcgctctcccgggcgc

SEQ ID NO: 7642 - DNA, 20 bp, synthetic construct
  source 1..20: mol_type = other DNA
gaacaaagcagggtacccaa

SEQ ID NO: 7643 - DNA, 20 bp, synthetic construct
  source 1..20: mol_type = other DNA
cgcccgggagagcgaaggcg

SEQ ID NO: 7644 - DNA, 20 bp, synthetic construct
  source 1..20: mol_type = other DNA
tggtaacggaccacatgatg

SEQ ID NO: 7645 - DNA, 20 bp, synthetic construct
  source 1..20: mol_type = other DNA
catcatgtggtccgttacca

SEQ ID NO: 7646 - DNA, 20 bp, synthetic construct
  source 1..20: mol_type = other DNA
atctaatacacctcatcatg

SEQ ID NO: 7647 - DNA, 20 bp, synthetic construct
  source 1..20: mol_type = other DNA
agctggattcattgctacca

SEQ ID NO: 7648 - DNA, 20 bp, synthetic construct
  source 1..20: mol_type = other DNA
ttgctgtgtgttgagcacaa

SEQ ID NO: 7649 - DNA, 20 bp, synthetic construct
  source 1..20: mol_type = other DNA
aaatctgactttgtcagggt

SEQ ID NO: 7650 - DNA, 20 bp, synthetic construct
  source 1..20: mol_type = other DNA
attcattgctaccatggtaa

SEQ ID NO: 7651 - DNA, 20 bp, synthetic construct
  source 1..20: mol_type = other DNA
aaaaaaatctgactttgtca

SEQ ID NO: 7652 - DNA, 20 bp, synthetic construct
  source 1..20: mol_type = other DNA
attgctgtgtgttgagcaca

SEQ ID NO: 7653 - DNA, 20 bp, synthetic construct
  source 1..20: mol_type = other DNA
aaaaaaaatctgactttgtc

SEQ ID NO: 7654 - DNA, 20 bp, synthetic construct
  source 1..20: mol_type = other DNA
ctttgtcagggtgggtggag

SEQ ID NO: 7655 - DNA, 20 bp, synthetic construct
  source 1..20: mol_type = other DNA
aaaatctgactttgtcaggg

SEQ ID NO: 7656 - DNA, 20 bp, synthetic construct
  source 1..20: mol_type = other DNA
actttgtcagggtgggtgga

SEQ ID NO: 7657 - DNA, 20 bp, synthetic construct
  source 1..20: mol_type = other DNA
tctgactttgtcagggtggg

SEQ ID NO: 7658 - DNA, 20 bp, synthetic construct
  source 1..20: mol_type = other DNA
gactttgtcagggtgggtgg

SEQ ID NO: 7659 - DNA, 20 bp, synthetic construct
  source 1..20: mol_type = other DNA
aaatgcagcgcgctttacgg

SEQ ID NO: 7660 - DNA, 20 bp, synthetic construct
  source 1..20: mol_type = other DNA
gagagcgcacacgaaacacc

SEQ ID NO: 7661 - DNA, 20 bp, synthetic construct
  source 1..20: mol_type = other DNA
caagcgagccggccacaccg

SEQ ID NO: 7662 - DNA, 20 bp, synthetic construct
  source 1..20: mol_type = other DNA
ctgccgtaaagtgcggcgag

SEQ ID NO: 7663 - DNA, 20 bp, synthetic construct
  source 1..20: mol_type = other DNA
ggaacagggttgcttccgcc

SEQ ID NO: 7664 - DNA, 20 bp, synthetic construct
  source 1..20: mol_type = other DNA
ccgccccctcaggctccagg

SEQ ID NO: 7665 - DNA, 20 bp, synthetic construct
  source 1..20: mol_type = other DNA
gggggcggagacttagagga

SEQ ID NO: 7666 - DNA, 20 bp, synthetic construct
  source 1..20: mol_type = other DNA
ggggcggagacttagaggag

SEQ ID NO: 7667 - DNA, 20 bp, synthetic construct
  source 1..20: mol_type = other DNA
agtgcgagcgacaagcgagc

SEQ ID NO: 7668 - DNA, 20 bp, synthetic construct
  source 1..20: mol_type = other DNA
agggggcggagacttagagg

SEQ ID NO: 7669 - DNA, 20 bp, synthetic construct
  source 1..20: mol_type = other DNA
gcttccgcctggagcctgag

SEQ ID NO: 7670 - DNA, 20 bp, synthetic construct
  source 1..20: mol_type = other DNA
cttccgcctggagcctgagg

SEQ ID NO: 7671 - DNA, 20 bp, synthetic construct
  source 1..20: mol_type = other DNA
tccccgccccctcaggctcc

SEQ ID NO: 7672 - DNA, 20 bp, synthetic construct
  source 1..20: mol_type = other DNA
gcggagacttagaggagggg

SEQ ID NO: 7673 - DNA, 20 bp, synthetic construct
  source 1..20: mol_type = other DNA
agcgcgctgcatttggaaca

SEQ ID NO: 7674 - DNA, 20 bp, synthetic construct
  source 1..20: mol_type = other DNA
ccccgagggacgagtgacag

SEQ ID NO: 7675 - DNA, 20 bp, synthetic construct
  source 1..20: mol_type = other DNA
ccgctgtcactcgtccctcg

SEQ ID NO: 7676 - DNA, 20 bp, synthetic construct
  source 1..20: mol_type = other DNA
cgctgtcactcgtccctcgg

SEQ ID NO: 7677 - DNA, 20 bp, synthetic construct
  source 1..20: mol_type = other DNA
gcgaggagggaaggtacagg

SEQ ID NO: 7678 - DNA, 20 bp, synthetic construct
  source 1..20: mol_type = other DNA
cgggaagactggaccgagcg

SEQ ID NO: 7679 - DNA, 20 bp, synthetic construct
  source 1..20: mol_type = other DNA
aaggatcgtgtttctggacc

SEQ ID NO: 7680 - DNA, 20 bp, synthetic construct
  source 1..20: mol_type = other DNA
ttcccggctggaaggtgcgg

SEQ ID NO: 7681 - DNA, 20 bp, synthetic construct
  source 1..20: mol_type = other DNA
cttcccggctggaaggtgcg

SEQ ID NO: 7682 - DNA, 20 bp, synthetic construct
  source 1..20: mol_type = other DNA
gtgacagcggccgccgcgct

SEQ ID NO: 7683 - DNA, 20 bp, synthetic construct
  source 1..20: mol_type = other DNA
gtcttcccggctggaaggtg

SEQ ID NO: 7684 - DNA, 20 bp, synthetic construct
  source 1..20: mol_type = other DNA
gtccagtcttcccggctgga

SEQ ID NO: 7685 - DNA, 20 bp, synthetic construct
  source 1..20: mol_type = other DNA
gaagactggaccgagcgcgg

SEQ ID NO: 7686 - DNA, 20 bp, synthetic construct
  source 1..20: mol_type = other DNA
tcttcccggctggaaggtgc

SEQ ID NO: 7687 - DNA, 20 bp, synthetic construct
  source 1..20: mol_type = other DNA
ggaggggcggaggagcggcg

SEQ ID NO: 7688 - DNA, 20 bp, synthetic construct
  source 1..20: mol_type = other DNA
ggggaggggcggaggagcgg

SEQ ID NO: 7689 - DNA, 20 bp, synthetic construct
  source 1..20: mol_type = other DNA
cccaatgaacggctgctcag

SEQ ID NO: 7690 - DNA, 20 bp, synthetic construct
  source 1..20: mol_type = other DNA
ttagcaatcaggcgccgggt

SEQ ID NO: 7691 - DNA, 20 bp, synthetic construct
  source 1..20: mol_type = other DNA
gggcaaccgggaagccgacc

SEQ ID NO: 7692 - DNA, 20 bp, synthetic construct
  source 1..20: mol_type = other DNA
atggcggcgccgaacaagga

SEQ ID NO: 7693 - DNA, 20 bp, synthetic construct
  source 1..20: mol_type = other DNA
aaggaaggaccctgtctccg

SEQ ID NO: 7694 - DNA, 20 bp, synthetic construct
  source 1..20: mol_type = other DNA
aatgaacggctgctcagtgg

SEQ ID NO: 7695 - DNA, 20 bp, synthetic construct
  source 1..20: mol_type = other DNA
acactcgcactacgaacaga

SEQ ID NO: 7696 - DNA, 20 bp, synthetic construct
  source 1..20: mol_type = other DNA
accagcccttgcccaatgaa

SEQ ID NO: 7697 - DNA, 20 bp, synthetic construct
  source 1..20: mol_type = other DNA
caagatggcggcgccgaaca

SEQ ID NO: 7698 - DNA, 20 bp, synthetic construct
  source 1..20: mol_type = other DNA
tcccggttgccccggagaca

SEQ ID NO: 7699 - DNA, 20 bp, synthetic construct
  source 1..20: mol_type = other DNA
gggctggtgacacaagatgg

SEQ ID NO: 7700 - DNA, 20 bp, synthetic construct
  source 1..20: mol_type = other DNA
ggtcggcttcccggttgccc

SEQ ID NO: 7701 - DNA, 20 bp, synthetic construct
  source 1..20: mol_type = other DNA
accctgtctccggggcaacc

SEQ ID NO: 7702 - DNA, 20 bp, synthetic construct
  source 1..20: mol_type = other DNA
caagggctggtgacacaaga

SEQ ID NO: 7703 - DNA, 20 bp, synthetic construct
  source 1..20: mol_type = other DNA
caaggaaggaccctgtctcc

SEQ ID NO: 7704 - DNA, 20 bp, synthetic construct
  source 1..20: mol_type = other DNA
agtgtcctgcaccataagca

SEQ ID NO: 7705 - DNA, 20 bp, synthetic construct
  source 1..20: mol_type = other DNA
gtaacccacgaacaaagtcc

SEQ ID NO: 7706 - DNA, 20 bp, synthetic construct
  source 1..20: mol_type = other DNA
tatcttcagagtcacaaacc

SEQ ID NO: 7707 - DNA, 20 bp, synthetic construct
  source 1..20: mol_type = other DNA
aatgttctgtgtgggacaag

SEQ ID NO: 7708 - DNA, 20 bp, synthetic construct
  source 1..20: mol_type = other DNA
gtaaagttcagcgagactat

SEQ ID NO: 7709 - DNA, 20 bp, synthetic construct
  source 1..20: mol_type = other DNA
cataccaggactttgttcgt

SEQ ID NO: 7710 - DNA, 20 bp, synthetic construct
  source 1..20: mol_type = other DNA
tgtgggacaaggggcccatg

SEQ ID NO: 7711 - DNA, 20 bp, synthetic construct
  source 1..20: mol_type = other DNA
tagggccctgcttatggtgc

SEQ ID NO: 7712 - DNA, 20 bp, synthetic construct
  source 1..20: mol_type = other DNA
tctgaagataagaggttcaa

SEQ ID NO: 7713 - DNA, 20 bp, synthetic construct
  source 1..20: mol_type = other DNA
tttgtgactctgaagataag

SEQ ID NO: 7714 - DNA, 20 bp, synthetic construct
  source 1..20: mol_type = other DNA
aggctgcagggagaatacac

SEQ ID NO: 7715 - DNA, 20 bp, synthetic construct
  source 1..20: mol_type = other DNA
gaaatgttctgtgtgggaca

SEQ ID NO: 7716 - DNA, 20 bp, synthetic construct
  source 1..20: mol_type = other DNA
gtcctggtatggccaggcgt

SEQ ID NO: 7717 - DNA, 20 bp, synthetic construct
  source 1..20: mol_type = other DNA
tgtgtgggacaaggggccca

SEQ ID NO: 7718 - DNA, 20 bp, synthetic construct
  source 1..20: mol_type = other DNA
ctgaagataagaggttcaaa

SEQ ID NO: 7719 - DNA, 20 bp, synthetic construct
  source 1..20: mol_type = other DNA
ctttacactccgatttgccg

SEQ ID NO: 7720 - DNA, 20 bp, synthetic construct
  source 1..20: mol_type = other DNA
agtgtaaagccgccccggat

SEQ ID NO: 7721 - DNA, 20 bp, synthetic construct
  source 1..20: mol_type = other DNA
cctcacaaagataatcgctc

SEQ ID NO: 7722 - DNA, 20 bp, synthetic construct
  source 1..20: mol_type = other DNA
aataaaagctcatccccgat

SEQ ID NO: 7723 - DNA, 20 bp, synthetic construct
  source 1..20: mol_type = other DNA
atcggagtgtaaagccgccc

SEQ ID NO: 7724 - DNA, 20 bp, synthetic construct
  source 1..20: mol_type = other DNA
cctgagcgattatctttgtg

SEQ ID NO: 7725 - DNA, 20 bp, synthetic construct
  source 1..20: mol_type = other DNA
gctttacactccgatttgcc

SEQ ID NO: 7726 - DNA, 20 bp, synthetic construct
  source 1..20: mol_type = other DNA
gaagtgtttcagccaatccg

SEQ ID NO: 7727 - DNA, 20 bp, synthetic construct
  source 1..20: mol_type = other DNA
gattggctgccccggcaaat

SEQ ID NO: 7728 - DNA, 20 bp, synthetic construct
  source 1..20: mol_type = other DNA
tcaatacttataaaacatgg

SEQ ID NO: 7729 - DNA, 20 bp, synthetic construct
  source 1..20: mol_type = other DNA
gtgtttcagccaatccgggg

SEQ ID NO: 7730 - DNA, 20 bp, synthetic construct
  source 1..20: mol_type = other DNA
tttgccggggcagccaatcg

SEQ ID NO: 7731 - DNA, 20 bp, synthetic construct
  source 1..20: mol_type = other DNA
gcaagaaaaacttgggaaag

SEQ ID NO: 7732 - DNA, 20 bp, synthetic construct
  source 1..20: mol_type = other DNA
agaaaaagacaggctaagct

SEQ ID NO: 7733 - DNA, 20 bp, synthetic construct
  source 1..20: mol_type = other DNA
tcatccccgattggctgccc

SEQ ID NO: 7734 - DNA, 20 bp, synthetic construct
  source 1..20: mol_type = other DNA
gcctgggactcagacgcgaa

SEQ ID NO: 7735 - DNA, 20 bp, synthetic construct
  source 1..20: mol_type = other DNA
tcagacgcgaaaggatgctg

SEQ ID NO: 7736 - DNA, 20 bp, synthetic construct
  source 1..20: mol_type = other DNA
tcccaggcccatgaactccc

SEQ ID NO: 7737 - DNA, 20 bp, synthetic construct
  source 1..20: mol_type = other DNA
gcccccgggagctgattggg

SEQ ID NO: 7738 - DNA, 20 bp, synthetic construct
  source 1..20: mol_type = other DNA
ttgcatacagggcgtcaccc

SEQ ID NO: 7739 - DNA, 20 bp, synthetic construct
  source 1..20: mol_type = other DNA
cccgcccaatcagctcccgg

SEQ ID NO: 7740 - DNA, 20 bp, synthetic construct
  source 1..20: mol_type = other DNA
aggcccatgaactcccgggt

SEQ ID NO: 7741 - DNA, 20 bp, synthetic construct
  source 1..20: mol_type = other DNA
catacagggcgtcaccctgg

SEQ ID NO: 7742 - DNA, 20 bp, synthetic construct
  source 1..20: mol_type = other DNA
gcccatgaactcccgggtcg

SEQ ID NO: 7743 - DNA, 20 bp, synthetic construct
  source 1..20: mol_type = other DNA
cacgcccatcgccgcctcca

SEQ ID NO: 7744 - DNA, 20 bp, synthetic construct
  source 1..20: mol_type = other DNA
gatgggcgtgcacttgggcg

SEQ ID NO: 7745 - DNA, 20 bp, synthetic construct
  source 1..20: mol_type = other DNA
acttgggcgtggccccgacc

SEQ ID NO: 7746 - DNA, 20 bp, synthetic construct
  source 1..20: mol_type = other DNA
acagggcgtcaccctggagg

SEQ ID NO: 7747 - DNA, 20 bp, synthetic construct
  source 1..20: mol_type = other DNA
cgtcaccctggaggcggcga

SEQ ID NO: 7748 - DNA, 20 bp, synthetic construct
  source 1..20: mol_type = other DNA
cttgggcgtggccccgaccc

SEQ ID NO: 7749 - DNA, 20 bp, synthetic construct
  source 1..20: mol_type = other DNA
ggcgccgtcacgtagatagg

SEQ ID NO: 7750 - DNA, 20 bp, synthetic construct
  source 1..20: mol_type = other DNA
caaggttgcaccctttgagg

SEQ ID NO: 7751 - DNA, 20 bp, synthetic construct
  source 1..20: mol_type = other DNA
tagctgtcgtgagttggtag

SEQ ID NO: 7752 - DNA, 20 bp, synthetic construct
  source 1..20: mol_type = other DNA
caactcacgacagctaggcg

SEQ ID NO: 7753 - DNA, 20 bp, synthetic construct
  source 1..20: mol_type = other DNA
gaggccgcctatctacgtga

SEQ ID NO: 7754 - DNA, 20 bp, synthetic construct
  source 1..20: mol_type = other DNA
gtgcaaccttgatttcccag

SEQ ID NO: 7755 - DNA, 20 bp, synthetic construct
  source 1..20: mol_type = other DNA
caggaagccggaagccgcag

SEQ ID NO: 7756 - DNA, 20 bp, synthetic construct
  source 1..20: mol_type = other DNA
accaactcacgacagctagg

SEQ ID NO: 7757 - DNA, 20 bp, synthetic construct
  source 1..20: mol_type = other DNA
gccaggaagccggaagccgc

SEQ ID NO: 7758 - DNA, 20 bp, synthetic construct
  source 1..20: mol_type = other DNA
cccgcctagctgtcgtgagt

SEQ ID NO: 7759 - DNA, 20 bp, synthetic construct
  source 1..20: mol_type = other DNA
tgacggcgcctttgcgacag

SEQ ID NO: 7760 - DNA, 20 bp, synthetic construct
  source 1..20: mol_type = other DNA
ccaggaagccggaagccgca

SEQ ID NO: 7761 - DNA, 20 bp, synthetic construct
  source 1..20: mol_type = other DNA
tctaccaactcacgacagct

SEQ ID NO: 7762 - DNA, 20 bp, synthetic construct
  source 1..20: mol_type = other DNA
agcgacgaccgctgtcgcaa

SEQ ID NO: 7763 - DNA, 20 bp, synthetic construct
  source 1..20: mol_type = other DNA
actgagacagactcgtcctc

SEQ ID NO: 7764 - DNA, 20 bp, synthetic construct
  source 1..20: mol_type = other DNA
tatggtctgttgacattctg

SEQ ID NO: 7765 - DNA, 20 bp, synthetic construct
  source 1..20: mol_type = other DNA
ccaggttgcaaactacagag

SEQ ID NO: 7766 - DNA, 20 bp, synthetic construct
  source 1..20: mol_type = other DNA
cctctctgtagtttgcaacc

SEQ ID NO: 7767 - DNA, 20 bp, synthetic construct
  source 1..20: mol_type = other DNA
gtgtattgttcttctggtga

SEQ ID NO: 7768 - DNA, 20 bp, synthetic construct
  source 1..20: mol_type = other DNA
taaactgtgtattgttcttc

SEQ ID NO: 7769 - DNA, 20 bp, synthetic construct
  source 1..20: mol_type = other DNA
tggacagctcaccaagcaaa

SEQ ID NO: 7770 - DNA, 20 bp, synthetic construct
  source 1..20: mol_type = other DNA
actactcatgtttaagagct

SEQ ID NO: 7771 - DNA, 20 bp, synthetic construct
  source 1..20: mol_type = other DNA
ttatcaaaaacaaaaaggga

SEQ ID NO: 7772 - DNA, 20 bp, synthetic construct
  source 1..20: mol_type = other DNA
gtagagaatggggaacaaag

SEQ ID NO: 7773 - DNA, 20 bp, synthetic construct
  source 1..20: mol_type = other DNA
caagactattgtgtttcaaa

SEQ ID NO: 7774 - DNA, 20 bp, synthetic construct
  source 1..20: mol_type = other DNA
ctcttaaacatgagtagtcc

SEQ ID NO: 7775 - DNA, 20 bp, synthetic construct
  source 1..20: mol_type = other DNA
cataaatatttcttgacaat

SEQ ID NO: 7776 - DNA, 20 bp, synthetic construct
  source 1..20: mol_type = other DNA
ggtattatcaaaaacaaaaa

SEQ ID NO: 7777 - DNA, 20 bp, synthetic construct
  source 1..20: mol_type = other DNA
ttgtcaagaaatatttatga

SEQ ID NO: 7778 - DNA, 20 bp, synthetic construct
  source 1..20: mol_type = other DNA
tggtattatcaaaaacaaaa

SEQ ID NO: 7779 - DNA, 20 bp, synthetic construct
  source 1..20: mol_type = other DNA
tgggcgacaccgcagtgacg

SEQ ID NO: 7780 - DNA, 20 bp, synthetic construct
  source 1..20: mol_type = other DNA
actcctcgccacgtccacaa

SEQ ID NO: 7781 - DNA, 20 bp, synthetic construct
  source 1..20: mol_type = other DNA
gctcgtgcgagctcattggg

SEQ ID NO: 7782 - DNA, 20 bp, synthetic construct
  source 1..20: mol_type = other DNA
gcggggccaatgagtgcacg

SEQ ID NO: 7783 - DNA, 20 bp, synthetic construct
  source 1..20: mol_type = other DNA
aggaaaccgcggcctgcccg

SEQ ID NO: 7784 - DNA, 20 bp, synthetic construct
  source 1..20: mol_type = other DNA
gacgtggcgaggagtgcccg

SEQ ID NO: 7785 - DNA, 20 bp, synthetic construct
  source 1..20: mol_type = other DNA
tcgtgcgagctcattgggcg

SEQ ID NO: 7786 - DNA, 20 bp, synthetic construct
  source 1..20: mol_type = other DNA
cacgtccacaaaggaaaccg

SEQ ID NO: 7787 - DNA, 20 bp, synthetic construct
  source 1..20: mol_type = other DNA
atgagtgcacggggtgccgc

SEQ ID NO: 7788 - DNA, 20 bp, synthetic construct
  source 1..20: mol_type = other DNA
ggcggggccaatgagtgcac

SEQ ID NO: 7789 - DNA, 20 bp, synthetic construct
  source 1..20: mol_type = other DNA
gcggcctgcccggggaagaa

SEQ ID NO: 7790 - DNA, 20 bp, synthetic construct
  source 1..20: mol_type = other DNA
gcggggctctgcgctgccag

SEQ ID NO: 7791 - DNA, 20 bp, synthetic construct
  source 1..20: mol_type = other DNA
cctgcccggggaagaagggt

SEQ ID NO: 7792 - DNA, 20 bp, synthetic construct
  source 1..20: mol_type = other DNA
cgtgcgagctcattgggcgg

SEQ ID NO: 7793 - DNA, 20 bp, synthetic construct
  source 1..20: mol_type = other DNA
gggcggggccaatgagtgca

SEQ ID NO: 7794 - DNA, 20 bp, synthetic construct
  source 1..20: mol_type = other DNA
gcccgggaattccgaaggag

SEQ ID NO: 7795 - DNA, 20 bp, synthetic construct
  source 1..20: mol_type = other DNA
gggcccgggaattccgaagg

SEQ ID NO: 7796 - DNA, 20 bp, synthetic construct
  source 1..20: mol_type = other DNA
ggcccgggaattccgaagga

SEQ ID NO: 7797 - DNA, 20 bp, synthetic construct
  source 1..20: mol_type = other DNA
gggaattccgaaggaggggt

SEQ ID NO: 7798 - DNA, 20 bp, synthetic construct
  source 1..20: mol_type = other DNA
ttcgggcccgggaattccga

SEQ ID NO: 7799 - DNA, 20 bp, synthetic construct
  source 1..20: mol_type = other DNA
gccaatcgggaacggcacgg

SEQ ID NO: 7800 - DNA, 20 bp, synthetic construct
  source 1..20: mol_type = other DNA
aactaatcagaaaaagtgga

SEQ ID NO: 7801 - DNA, 20 bp, synthetic construct
  source 1..20: mol_type = other DNA
gatcttggggcgctgtccaa

SEQ ID NO: 7802 - DNA, 20 bp, synthetic construct
  source 1..20: mol_type = other DNA
atgagctggccaatcgggaa

SEQ ID NO: 7803 - DNA, 20 bp, synthetic construct
  source 1..20: mol_type = other DNA
tggccaatcgggaacggcac

SEQ ID NO: 7804 - DNA, 20 bp, synthetic construct
  source 1..20: mol_type = other DNA
ggccaatcgggaacggcacg

SEQ ID NO: 7805 - DNA, 20 bp, synthetic construct
  source 1..20: mol_type = other DNA
gcggaagagaacacatgagc

SEQ ID NO: 7806 - DNA, 20 bp, synthetic construct
  source 1..20: mol_type = other DNA
tggggcgctgtccaatggcg

SEQ ID NO: 7807 - DNA, 20 bp, synthetic construct
  source 1..20: mol_type = other DNA
gtggaaggcgggagatcttg

SEQ ID NO: 7808 - DNA, 20 bp, synthetic construct
  source 1..20: mol_type = other DNA
tgtgaactaatcagaaaaag

SEQ ID NO: 7809 - DNA, 20 bp, synthetic construct
  source 1..20: mol_type = other DNA
ctggatgtgggtgtagaccg

SEQ ID NO: 7810 - DNA, 20 bp, synthetic construct
  source 1..20: mol_type = other DNA
gggaggaacttccgagacca

SEQ ID NO: 7811 - DNA, 20 bp, synthetic construct
  source 1..20: mol_type = other DNA
gagggagtcctaattagagt

SEQ ID NO: 7812 - DNA, 20 bp, synthetic construct
  source 1..20: mol_type = other DNA
gctggatgtgggtgtagacc

SEQ ID NO: 7813 - DNA, 20 bp, synthetic construct
  source 1..20: mol_type = other DNA
gttgggtgaatagtcagtgt

SEQ ID NO: 7814 - DNA, 20 bp, synthetic construct
  source 1..20: mol_type = other DNA
agagggagtcctaattagag

SEQ ID NO: 7815 - DNA, 20 bp, synthetic construct
  source 1..20: mol_type = other DNA
taattaggactccctctcag

SEQ ID NO: 7816 - DNA, 20 bp, synthetic construct
  source 1..20: mol_type = other DNA
tgaatagtcagtgtcggccc

SEQ ID NO: 7817 - DNA, 20 bp, synthetic construct
  source 1..20: mol_type = other DNA
ggggaggaacttccgagacc

SEQ ID NO: 7818 - DNA, 20 bp, synthetic construct
  source 1..20: mol_type = other DNA
ttagagtgggaagcagctct

SEQ ID NO: 7819 - DNA, 20 bp, synthetic construct
  source 1..20: mol_type = other DNA
cgtggtggagacccctgaga

SEQ ID NO: 7820 - DNA, 20 bp, synthetic construct
  source 1..20: mol_type = other DNA
gaggggtgacctcagcggga

SEQ ID NO: 7821 - DNA, 20 bp, synthetic construct
  source 1..20: mol_type = other DNA
gccgaagattgggcgtaaag

SEQ ID NO: 7822 - DNA, 20 bp, synthetic construct
  source 1..20: mol_type = other DNA
aaacctccgcccccagaccc

SEQ ID NO: 7823 - DNA, 20 bp, synthetic construct
  source 1..20: mol_type = other DNA
gggtgtagaccggggtctgg

SEQ ID NO: 7824 - DNA, 20 bp, synthetic construct
  source 1..20: mol_type = other DNA
gtgacggcgcacgttgtccg

SEQ ID NO: 7825 - DNA, 20 bp, synthetic construct
  source 1..20: mol_type = other DNA
tccccggtcacgtgacaccc

SEQ ID NO: 7826 - DNA, 20 bp, synthetic construct
  source 1..20: mol_type = other DNA
ggaaggccgaggcgtgccgg

SEQ ID NO: 7827 - DNA, 20 bp, synthetic construct
  source 1..20: mol_type = other DNA
cgcctgcacgtggaccaatg

SEQ ID NO: 7828 - DNA, 20 bp, synthetic construct
  source 1..20: mol_type = other DNA
caggctctgccgtcacgtga

SEQ ID NO: 7829 - DNA, 20 bp, synthetic construct
  source 1..20: mol_type = other DNA
gtgacggaggcgcctgcacg

SEQ ID NO: 7830 - DNA, 20 bp, synthetic construct
  source 1..20: mol_type = other DNA
caacgtgcgccgtcacgtga

SEQ ID NO: 7831 - DNA, 20 bp, synthetic construct
  source 1..20: mol_type = other DNA
cacgtgaccggggaggcccg

SEQ ID NO: 7832 - DNA, 20 bp, synthetic construct
  source 1..20: mol_type = other DNA
ctgcacgtggaccaatgggg

SEQ ID NO: 7833 - DNA, 20 bp, synthetic construct
  source 1..20: mol_type = other DNA
ggcgcctgcacgtggaccaa

SEQ ID NO: 7834 - DNA, 20 bp, synthetic construct
  source 1..20: mol_type = other DNA
cggaaggccgaggcgtgccg

SEQ ID NO: 7835 - DNA, 20 bp, synthetic construct
  source 1..20: mol_type = other DNA
ggggtgtcacgtgaccgggg

SEQ ID NO: 7836 - DNA, 20 bp, synthetic construct
  source 1..20: mol_type = other DNA
tccggggtgtcacgtgaccg

SEQ ID NO: 7837 - DNA, 20 bp, synthetic construct
  source 1..20: mol_type = other DNA
ccgggggagccaggagcagc

SEQ ID NO: 7838 - DNA, 20 bp, synthetic construct
  source 1..20: mol_type = other DNA
cgtggaccaatggggaggcg

SEQ ID NO: 7839 - DNA, 20 bp, synthetic construct
  source 1..20: mol_type = other DNA
tcagtcatggctcctcgccg

SEQ ID NO: 7840 - DNA, 20 bp, synthetic construct
  source 1..20: mol_type = other DNA
caaaaacatcggccacggcg

SEQ ID NO: 7841 - DNA, 20 bp, synthetic construct
  source 1..20: mol_type = other DNA
agatggaggtacaaaaacat

SEQ ID NO: 7842 - DNA, 20 bp, synthetic construct
  source 1..20: mol_type = other DNA
gcgaggagccatgactgagg

SEQ ID NO: 7843 - DNA, 20 bp, synthetic construct
  source 1..20: mol_type = other DNA
acggcgaggagccatgactg

SEQ ID NO: 7844 - DNA, 20 bp, synthetic construct
  source 1..20: mol_type = other DNA
aggtacaaaaacatcggcca

SEQ ID NO: 7845 - DNA, 20 bp, synthetic construct
  source 1..20: mol_type = other DNA
ggcgaagggccgctccaccc

SEQ ID NO: 7846 - DNA, 20 bp, synthetic construct
  source 1..20: mol_type = other DNA
gagcaagcgggcgagcgccg

SEQ ID NO: 7847 - DNA, 20 bp, synthetic construct
  source 1..20: mol_type = other DNA
aggagccatgactgaggcgg

SEQ ID NO: 7848 - DNA, 20 bp, synthetic construct
  source 1..20: mol_type = other DNA
ccaccccggcgcgccgccag

SEQ ID NO: 7849 - DNA, 20 bp, synthetic construct
  source 1..20: mol_type = other DNA
gcggcggccgcgcctcctgg

SEQ ID NO: 7850 - DNA, 20 bp, synthetic construct
  source 1..20: mol_type = other DNA
tccgccggctgcggctgcgg

SEQ ID NO: 7851 - DNA, 20 bp, synthetic construct
  source 1..20: mol_type = other DNA
cgcccccgcgggccgccagg

SEQ ID NO: 7852 - DNA, 20 bp, synthetic construct
  source 1..20: mol_type = other DNA
cgcctcctggcggcccgcgg

SEQ ID NO: 7853 - DNA, 20 bp, synthetic construct
  source 1..20: mol_type = other DNA
gcgcggcgggcgccccctgg

SEQ ID NO: 7854 - DNA, 20 bp, synthetic construct
  source 1..20: mol_type = other DNA
acactgaaagtattgatgat

SEQ ID NO: 7855 - DNA, 20 bp, synthetic construct
  source 1..20: mol_type = other DNA
attgatgatgggtttaaatc

SEQ ID NO: 7856 - DNA, 20 bp, synthetic construct
  source 1..20: mol_type = other DNA
tgagaactaagaaaatgggg

SEQ ID NO: 7857 - DNA, 20 bp, synthetic construct
  source 1..20: mol_type = other DNA
atccattggtccagccaact

SEQ ID NO: 7858 - DNA, 20 bp, synthetic construct
  source 1..20: mol_type = other DNA
tggtccagccaactgggctg

SEQ ID NO: 7859 - DNA, 20 bp, synthetic construct
  source 1..20: mol_type = other DNA
gatgaatttcatggatagtc

SEQ ID NO: 7860 - DNA, 20 bp, synthetic construct
  source 1..20: mol_type = other DNA
ttagccacagcccagttggc

SEQ ID NO: 7861 - DNA, 20 bp, synthetic construct
  source 1..20: mol_type = other DNA
ttatgagaactaagaaaatg

SEQ ID NO: 7862 - DNA, 20 bp, synthetic construct
  source 1..20: mol_type = other DNA
agcccagttggctggaccaa

SEQ ID NO: 7863 - DNA, 20 bp, synthetic construct
  source 1..20: mol_type = other DNA
catccattggtccagccaac

SEQ ID NO: 7864 - DNA, 20 bp, synthetic construct
  source 1..20: mol_type = other DNA
tacactgaaagtattgatga

SEQ ID NO: 7865 - DNA, 20 bp, synthetic construct
  source 1..20: mol_type = other DNA
taaacacctgatgaatttca

SEQ ID NO: 7866 - DNA, 20 bp, synthetic construct
  source 1..20: mol_type = other DNA
tgatctaaaattaacagatt

SEQ ID NO: 7867 - DNA, 20 bp, synthetic construct
  source 1..20: mol_type = other DNA
gactatccatgaaattcatc

SEQ ID NO: 7868 - DNA, 20 bp, synthetic construct
  source 1..20: mol_type = other DNA
attatgagaactaagaaaat

SEQ ID NO: 7869 - DNA, 20 bp, synthetic construct
  source 1..20: mol_type = other DNA
cctccagccctatcatcggg

SEQ ID NO: 7870 - DNA, 20 bp, synthetic construct
  source 1..20: mol_type = other DNA
acaaattgggtgaagcgctg

SEQ ID NO: 7871 - DNA, 20 bp, synthetic construct
  source 1..20: mol_type = other DNA
ggaccctccgcccgatgata

SEQ ID NO: 7872 - DNA, 20 bp, synthetic construct
  source 1..20: mol_type = other DNA
aggtgggaagagcccagccg

SEQ ID NO: 7873 - DNA, 20 bp, synthetic construct
  source 1..20: mol_type = other DNA
gagataggcaaaggttatgc

SEQ ID NO: 7874 - DNA, 20 bp, synthetic construct
  source 1..20: mol_type = other DNA
cctccgcccgatgatagggc

SEQ ID NO: 7875 - DNA, 20 bp, synthetic construct
  source 1..20: mol_type = other DNA
cccgatgatagggctggagg

SEQ ID NO: 7876 - DNA, 20 bp, synthetic construct
  source 1..20: mol_type = other DNA
ggaaggggcgggctgaagaa

SEQ ID NO: 7877 - DNA, 20 bp, synthetic construct
  source 1..20: mol_type = other DNA
gggcttgtgggtaaggcggg

SEQ ID NO: 7878 - DNA, 20 bp, synthetic construct
  source 1..20: mol_type = other DNA
gaaggggcgggctgaagaag

SEQ ID NO: 7879 - DNA, 20 bp, synthetic construct
  source 1..20: mol_type = other DNA
gggcgggctgaagaagggga

SEQ ID NO: 7880 - DNA, 20 bp, synthetic construct
  source 1..20: mol_type = other DNA
gggtaaggcgggcggaggcg

SEQ ID NO: 7881 - DNA, 20 bp, synthetic construct
  source 1..20: mol_type = other DNA
gggctgaagaaggggaaggt

SEQ ID NO: 7882 - DNA, 20 bp, synthetic construct
  source 1..20: mol_type = other DNA
atgatagggctggaggagga

SEQ ID NO: 7883 - DNA, 20 bp, synthetic construct
  source 1..20: mol_type = other DNA
tgatagggctggaggaggaa

SEQ ID NO: 7884 - DNA, 20 bp, synthetic construct
  source 1..20: mol_type = other DNA
caagtctaacccacaacctc

SEQ ID NO: 7885 - DNA, 20 bp, synthetic construct
  source 1..20: mol_type = other DNA
tattacgccataaatcttgg

SEQ ID NO: 7886 - DNA, 20 bp, synthetic construct
  source 1..20: mol_type = other DNA
agatttatggcgtaataaca

SEQ ID NO: 7887 - DNA, 20 bp, synthetic construct
  source 1..20: mol_type = other DNA
agtctaacccacaacctctg

SEQ ID NO: 7888 - DNA, 20 bp, synthetic construct
  source 1..20: mol_type = other DNA
ctggggctctgacagaaccc

SEQ ID NO: 7889 - DNA, 20 bp, synthetic construct
  source 1..20: mol_type = other DNA
tctggggctctgacagaacc

SEQ ID NO: 7890 - DNA, 20 bp, synthetic construct
  source 1..20: mol_type = other DNA
ataacagcaaatgcagcgtg

SEQ ID NO: 7891 - DNA, 20 bp, synthetic construct
  source 1..20: mol_type = other DNA
ttattacgccataaatcttg

SEQ ID NO: 7892 - DNA, 20 bp, synthetic construct
  source 1..20: mol_type = other DNA
gttattacgccataaatctt

SEQ ID NO: 7893 - DNA, 20 bp, synthetic construct
  source 1..20: mol_type = other DNA
tccgttcccagcatgctgcg

SEQ ID NO: 7894 - DNA, 20 bp, synthetic construct
  source 1..20: mol_type = other DNA
cgtcctgataactggagccc

SEQ ID NO: 7895 - DNA, 20 bp, synthetic construct
  source 1..20: mol_type = other DNA
ccgggctccagttatcagga

SEQ ID NO: 7896 - DNA, 20 bp, synthetic construct
  source 1..20: mol_type = other DNA
gtcagagccccagaggttgt

SEQ ID NO: 7897 - DNA, 20 bp, synthetic construct
  source 1..20: mol_type = other DNA
accgcgcagcatgctgggaa

SEQ ID NO: 7898 - DNA, 20 bp, synthetic construct
  source 1..20: mol_type = other DNA
tgtcagagccccagaggttg

SEQ ID NO: 7899 - DNA, 20 bp, synthetic construct
  source 1..20: mol_type = other DNA
gtggcacagtctcaagctag

SEQ ID NO: 7900 - DNA, 20 bp, synthetic construct
  source 1..20: mol_type = other DNA
agttatactttgaagtctag

SEQ ID NO: 7901 - DNA, 20 bp, synthetic construct
  source 1..20: mol_type = other DNA
gttatactttgaagtctaga

SEQ ID NO: 7902 - DNA, 20 bp, synthetic construct
  source 1..20: mol_type = other DNA
gcagcaccgggaaagtcccc

SEQ ID NO: 7903 - DNA, 20 bp, synthetic construct
  source 1..20: mol_type = other DNA
gggactttcccggtgctgcg

SEQ ID NO: 7904 - DNA, 20 bp, synthetic construct
  source 1..20: mol_type = other DNA
cttgctgaacgtgaccgcaa

SEQ ID NO: 7905 - DNA, 20 bp, synthetic construct
  source 1..20: mol_type = other DNA
gggttgggaagagagcgcat

SEQ ID NO: 7906 - DNA, 20 bp, synthetic construct
  source 1..20: mol_type = other DNA
gggtgtgggacgtgaggtca

SEQ ID NO: 7907 - DNA, 20 bp, synthetic construct
  source 1..20: mol_type = other DNA
agggttgggaagagagcgca

SEQ ID NO: 7908 - DNA, 20 bp, synthetic construct
  source 1..20: mol_type = other DNA
tgagcacctactgtctgcag

SEQ ID NO: 7909 - DNA, 20 bp, synthetic construct
  source 1..20: mol_type = other DNA
ctgaacgtgaccgcaagggt

SEQ ID NO: 7910 - DNA, 20 bp, synthetic construct
  source 1..20: mol_type = other DNA
gaagagagcgcatgggtgcg

SEQ ID NO: 7911 - DNA, 20 bp, synthetic construct
  source 1..20: mol_type = other DNA
tccgcgtcccgggtgggtgt

SEQ ID NO: 7912 - DNA, 20 bp, synthetic construct
  source 1..20: mol_type = other DNA
tctggccccctgcagacagt

SEQ ID NO: 7913 - DNA, 20 bp, synthetic construct
  source 1..20: mol_type = other DNA
gggaagagagcgcatgggtg

SEQ ID NO: 7914 - DNA, 20 bp, synthetic construct
  source 1..20: mol_type = other DNA
gagtcctgccccgcagcacc

SEQ ID NO: 7915 - DNA, 20 bp, synthetic construct
  source 1..20: mol_type = other DNA
ggaagagagcgcatgggtgc

SEQ ID NO: 7916 - DNA, 20 bp, synthetic construct
  source 1..20: mol_type = other DNA
catgggtgcggggcgacccg

SEQ ID NO: 7917 - DNA, 20 bp, synthetic construct
  source 1..20: mol_type = other DNA
gccgaaaagttcctcgcggg

SEQ ID NO: 7918 - DNA, 20 bp, synthetic construct
  source 1..20: mol_type = other DNA
gcgacgcgcagcggctgagt

SEQ ID NO: 7919 - DNA, 20 bp, synthetic construct
  source 1..20: mol_type = other DNA
acaagccgaaaagttcctcg

SEQ ID NO: 7920 - DNA, 20 bp, synthetic construct
  source 1..20: mol_type = other DNA
cggctgagtcggagcccacg

SEQ ID NO: 7921 - DNA, 20 bp, synthetic construct
  source 1..20: mol_type = other DNA
caagccgaaaagttcctcgc

SEQ ID NO: 7922 - DNA, 20 bp, synthetic construct
  source 1..20: mol_type = other DNA
tgcgcgtcgccgtggcacac

SEQ ID NO: 7923 - DNA, 20 bp, synthetic construct
  source 1..20: mol_type = other DNA
gggaaaggtcctcgccagga

SEQ ID NO: 7924 - DNA, 20 bp, synthetic construct
  source 1..20: mol_type = other DNA
cgggaaaggtcctcgccagg

SEQ ID NO: 7925 - DNA, 20 bp, synthetic construct
  source 1..20: mol_type = other DNA
tcagccgctgcgcgtcgccg

SEQ ID NO: 7926 - DNA, 20 bp, synthetic construct
  source 1..20: mol_type = other DNA
tgtgccacggcgacgcgcag

SEQ ID NO: 7927 - DNA, 20 bp, synthetic construct
  source 1..20: mol_type = other DNA
ctccgggagcgcgagccagg

SEQ ID NO: 7928 - DNA, 20 bp, synthetic construct
  source 1..20: mol_type = other DNA
ctttccgacgcgcctccccc

SEQ ID NO: 7929 - DNA, 20 bp, synthetic construct
  source 1..20: mol_type = other DNA
agttccctcccctcctggcg

SEQ ID NO: 7930 - DNA, 20 bp, synthetic construct
  source 1..20: mol_type = other DNA
gcgggaggcgcgcgccgcgt

SEQ ID NO: 7931 - DNA, 20 bp, synthetic construct
  source 1..20: mol_type = other DNA
cgcggcgcgcgcctcccgcg

SEQ ID NO: 7932 - DNA, 20 bp, synthetic construct
  source 1..20: mol_type = other DNA
ccaagagcctccccacaagg

SEQ ID NO: 7933 - DNA, 20 bp, synthetic construct
  source 1..20: mol_type = other DNA
gagcgtcagcctgaggaaca

SEQ ID NO: 7934 - DNA, 20 bp, synthetic construct
  source 1..20: mol_type = other DNA
tctgaaaagccagcggctcg

SEQ ID NO: 7935 - DNA, 20 bp, synthetic construct
  source 1..20: mol_type = other DNA
gctggcagaggacgcagaag

SEQ ID NO: 7936 - DNA, 20 bp, synthetic construct
  source 1..20: mol_type = other DNA
tgtggggaggctcttggcca

SEQ ID NO: 7937 - DNA, 20 bp, synthetic construct
  source 1..20: mol_type = other DNA
tggccaagagcctccccaca

SEQ ID NO: 7938 - DNA, 20 bp, synthetic construct
  source 1..20: mol_type = other DNA
tccctcccttcctccttgtg

SEQ ID NO: 7939 - DNA, 20 bp, synthetic construct
  source 1..20: mol_type = other DNA
agcctccccacaaggaggaa

SEQ ID NO: 7940 - DNA, 20 bp, synthetic construct
  source 1..20: mol_type = other DNA
ctccccacaaggaggaaggg

SEQ ID NO: 7941 - DNA, 20 bp, synthetic construct
  source 1..20: mol_type = other DNA
tccccacaaggaggaaggga

SEQ ID NO: 7942 - DNA, 20 bp, synthetic construct
  source 1..20: mol_type = other DNA
tcctctgccagcacccgccc

SEQ ID NO: 7943 - DNA, 20 bp, synthetic construct
  source 1..20: mol_type = other DNA
ggagggagaaaaggagtgag

SEQ ID NO: 7944 - DNA, 20 bp, synthetic construct
  source 1..20: mol_type = other DNA
cagggtccctgagcccgggc

SEQ ID NO: 7945 - DNA, 20 bp, synthetic construct
  source 1..20: mol_type = other DNA
gggagaaaaggagtgagggg

SEQ ID NO: 7946 - DNA, 20 bp, synthetic construct
  source 1..20: mol_type = other DNA
gagcctccccacaaggagga

SEQ ID NO: 7947 - DNA, 20 bp, synthetic construct
  source 1..20: mol_type = other DNA
gcccccagcaccccagccgg

SEQ ID NO: 7948 - DNA, 20 bp, synthetic construct
  source 1..20: mol_type = other DNA
gaaaccccgcctcttagcgc

SEQ ID NO: 7949 - DNA, 20 bp, synthetic construct
  source 1..20: mol_type = other DNA
gccgccggctggggtgctgg

SEQ ID NO: 7950 - DNA, 20 bp, synthetic construct
  source 1..20: mol_type = other DNA
cccgcccccagcaccccagc

SEQ ID NO: 7951 - DNA, 20 bp, synthetic construct
  source 1..20: mol_type = other DNA
cgtctggacgtccctcgcgt

SEQ ID NO: 7952 - DNA, 20 bp, synthetic construct
  source 1..20: mol_type = other DNA
gcgatgcgcccggcgctaag

SEQ ID NO: 7953 - DNA, 20 bp, synthetic construct
  source 1..20: mol_type = other DNA
gcgagggacgtccagacgcg

SEQ ID NO: 7954 - DNA, 20 bp, synthetic construct
  source 1..20: mol_type = other DNA
atgcgcccggcgctaagagg

SEQ ID NO: 7955 - DNA, 20 bp, synthetic construct
  source 1..20: mol_type = other DNA
gcccctccagctgccgtcgg

SEQ ID NO: 7956 - DNA, 20 bp, synthetic construct
  source 1..20: mol_type = other DNA
tagcgccgggcgcatcgcgc

SEQ ID NO: 7957 - DNA, 20 bp, synthetic construct
  source 1..20: mol_type = other DNA
gcaaggctggggcaaaaccc

SEQ ID NO: 7958 - DNA, 20 bp, synthetic construct
  source 1..20: mol_type = other DNA
cccgggccgggatagggcgt

SEQ ID NO: 7959 - DNA, 20 bp, synthetic construct
  source 1..20: mol_type = other DNA
gcgcccggcgctaagaggcg

SEQ ID NO: 7960 - DNA, 20 bp, synthetic construct
  source 1..20: mol_type = other DNA
cccacgccctatcccggccc

SEQ ID NO: 7961 - DNA, 20 bp, synthetic construct
  source 1..20: mol_type = other DNA
ccgggccgggatagggcgtg

SEQ ID NO: 7962 - DNA, 20 bp, synthetic construct
  source 1..20: mol_type = other DNA
gactccaagagtgaaagctg

SEQ ID NO: 7963 - DNA, 20 bp, synthetic construct
  source 1..20: mol_type = other DNA
gggaaataaggtgtccacaa

SEQ ID NO: 7964 - DNA, 20 bp, synthetic construct
  source 1..20: mol_type = other DNA
attgtcagtgcagacccgaa

SEQ ID NO: 7965 - DNA, 20 bp, synthetic construct
  source 1..20: mol_type = other DNA
ggacggccaccgagatggcg

SEQ ID NO: 7966 - DNA, 20 bp, synthetic construct
  source 1..20: mol_type = other DNA
ggagtgcaggtatgaaagac

SEQ ID NO: 7967 - DNA, 20 bp, synthetic construct
  source 1..20: mol_type = other DNA
cgtctttcatacctgcactc

SEQ ID NO: 7968 - DNA, 20 bp, synthetic construct
  source 1..20: mol_type = other DNA
ccgactccaagagtgaaagc

SEQ ID NO: 7969 - DNA, 20 bp, synthetic construct
  source 1..20: mol_type = other DNA
gggcgcatgcgcgcagtccg

SEQ ID NO: 7970 - DNA, 20 bp, synthetic construct
  source 1..20: mol_type = other DNA
gttccgagggatccccgcaa

SEQ ID NO: 7971 - DNA, 20 bp, synthetic construct
  source 1..20: mol_type = other DNA
gacggccaccgagatggcgc

SEQ ID NO: 7972 - DNA, 20 bp, synthetic construct
  source 1..20: mol_type = other DNA
gaagggcgcgtccggagtgc

SEQ ID NO: 7973 - DNA, 20 bp, synthetic construct
  source 1..20: mol_type = other DNA
gctagagcggcgcccccgcg

SEQ ID NO: 7974 - DNA, 20 bp, synthetic construct
  source 1..20: mol_type = other DNA
agagcggcgcccccgcgcgg

SEQ ID NO: 7975 - DNA, 20 bp, synthetic construct
  source 1..20: mol_type = other DNA
gtcctccgcccgccgcgcgg

SEQ ID NO: 7976 - DNA, 20 bp, synthetic construct
  source 1..20: mol_type = other DNA
cgtcctccgcccgccgcgcg

SEQ ID NO: 7977 - DNA, 20 bp, synthetic construct
  source 1..20: mol_type = other DNA
aggtacgtagggcagaacta

SEQ ID NO: 7978 - DNA, 20 bp, synthetic construct
  source 1..20: mol_type = other DNA
ttctgccctacgtacctagg

SEQ ID NO: 7979 - DNA, 20 bp, synthetic construct
  source 1..20: mol_type = other DNA
tgccctacgtacctaggagg

SEQ ID NO: 7980 - DNA, 20 bp, synthetic construct
  source 1..20: mol_type = other DNA
gagagggctgagttacgtct

SEQ ID NO: 7981 - DNA, 20 bp, synthetic construct
  source 1..20: mol_type = other DNA
agccgcagccaagcatccca

SEQ ID NO: 7982 - DNA, 20 bp, synthetic construct
  source 1..20: mol_type = other DNA
accgccccttcctcgcgacg

SEQ ID NO: 7983 - DNA, 20 bp, synthetic construct
  source 1..20: mol_type = other DNA
tccccccgcgcccgtcgccg

SEQ ID NO: 7984 - DNA, 20 bp, synthetic construct
  source 1..20: mol_type = other DNA
ctgcggctggcgtgaggaga

SEQ ID NO: 7985 - DNA, 20 bp, synthetic construct
  source 1..20: mol_type = other DNA
gctgcggctggcgtgaggag

SEQ ID NO: 7986 - DNA, 20 bp, synthetic construct
  source 1..20: mol_type = other DNA
ctccgtgggatgcttggctg

SEQ ID NO: 7987 - DNA, 20 bp, synthetic construct
  source 1..20: mol_type = other DNA
cccggcggtcgccacggcga

SEQ ID NO: 7988 - DNA, 20 bp, synthetic construct
  source 1..20: mol_type = other DNA
gcttggctgcggctggcgtg

SEQ ID NO: 7989 - DNA, 20 bp, synthetic construct
  source 1..20: mol_type = other DNA
gccacggcgacgggcgcggg

SEQ ID NO: 7990 - DNA, 20 bp, synthetic construct
  source 1..20: mol_type = other DNA
cgccacggcgacgggcgcgg

SEQ ID NO: 7991 - DNA, 20 bp, synthetic construct
  source 1..20: mol_type = other DNA
gggaggctccgtgggatgct

SEQ ID NO: 7992 - DNA, 20 bp, synthetic construct
  source 1..20: mol_type = other DNA
tccatgctgcccttcaaacg

SEQ ID NO: 7993 - DNA, 20 bp, synthetic construct
  source 1..20: mol_type = other DNA
gagggaacgagaaaccacaa

SEQ ID NO: 7994 - DNA, 20 bp, synthetic construct
  source 1..20: mol_type = other DNA
ggcctgcactgcaagatgga

SEQ ID NO: 7995 - DNA, 20 bp, synthetic construct
  source 1..20: mol_type = other DNA
tggaaggcgccacgtttgaa

SEQ ID NO: 7996 - DNA, 20 bp, synthetic construct
  source 1..20: mol_type = other DNA
gaaacacccagaccctcacc

SEQ ID NO: 7997 - DNA, 20 bp, synthetic construct
  source 1..20: mol_type = other DNA
aacgaagagcagtagtcacc

SEQ ID NO: 7998 - DNA, 20 bp, synthetic construct
  source 1..20: mol_type = other DNA
aacacccagaccctcacctg

SEQ ID NO: 7999 - DNA, 20 bp, synthetic construct
  source 1..20: mol_type = other DNA
aaacacccagaccctcacct

SEQ ID NO: 8000 - DNA, 20 bp, synthetic construct
  source 1..20: mol_type = other DNA
acacccagaccctcacctgg

SEQ ID NO: 8001 - DNA, 20 bp, synthetic construct
  source 1..20: mol_type = other DNA
agggtctgggtgtttcctga

SEQ ID NO: 8002 - DNA, 20 bp, synthetic construct
  source 1..20: mol_type = other DNA
gagggtctgggtgtttcctg

SEQ ID NO: 8003 - DNA, 20 bp, synthetic construct
  source 1..20: mol_type = other DNA
agggcagcatggagccattg

SEQ ID NO: 8004 - DNA, 20 bp, synthetic construct
  source 1..20: mol_type = other DNA
cctctttctcccccaggtga

SEQ ID NO: 8005 - DNA, 20 bp, synthetic construct
  source 1..20: mol_type = other DNA
tttgaccctctttctccccc

SEQ ID NO: 8006 - DNA, 20 bp, synthetic construct
  source 1..20: mol_type = other DNA
gccacgtttgaagggcagca

SEQ ID NO: 8007 - DNA, 20 bp, synthetic construct
  source 1..20: mol_type = other DNA
ttcctcggcgatatgctctg

SEQ ID NO: 8008 - DNA, 20 bp, synthetic construct
  source 1..20: mol_type = other DNA
tgtgtgctaggcgttatgca

SEQ ID NO: 8009 - DNA, 20 bp, synthetic construct
  source 1..20: mol_type = other DNA
cgacgacaccacgctaaagc

SEQ ID NO: 8010 - DNA, 20 bp, synthetic construct
  source 1..20: mol_type = other DNA
gcagctccaaggcctggccg

SEQ ID NO: 8011 - DNA, 20 bp, synthetic construct
  source 1..20: mol_type = other DNA
aacaatgggctggtaaatcc

SEQ ID NO: 8012 - DNA, 20 bp, synthetic construct
  source 1..20: mol_type = other DNA
atgggctggtaaatccagga

SEQ ID NO: 8013 - DNA, 20 bp, synthetic construct
  source 1..20: mol_type = other DNA
tgccgcagagcatatcgccg

SEQ ID NO: 8014 - DNA, 20 bp, synthetic construct
  source 1..20: mol_type = other DNA
agcaggcgcgaaataaacaa

SEQ ID NO: 8015 - DNA, 20 bp, synthetic construct
  source 1..20: mol_type = other DNA
taaatccaggagggacctga

SEQ ID NO: 8016 - DNA, 20 bp, synthetic construct
  source 1..20: mol_type = other DNA
aatgggctggtaaatccagg

SEQ ID NO: 8017 - DNA, 20 bp, synthetic construct
  source 1..20: mol_type = other DNA
atttcgcgcctgctttagcg

SEQ ID NO: 8018 - DNA, 20 bp, synthetic construct
  source 1..20: mol_type = other DNA
aaatgcgcacgcgcagaccg

SEQ ID NO: 8019 - DNA, 20 bp, synthetic construct
  source 1..20: mol_type = other DNA
gcgcgaaataaacaatgggc

SEQ ID NO: 8020 - DNA, 20 bp, synthetic construct
  source 1..20: mol_type = other DNA
ataacgcctagcacacagta

SEQ ID NO: 8021 - DNA, 20 bp, synthetic construct
  source 1..20: mol_type = other DNA
ggagggacctgaaggcgcca

SEQ ID NO: 8022 - DNA, 20 bp, synthetic construct
  source 1..20: mol_type = other DNA
gcttatactcccgcagcgcg

SEQ ID NO: 8023 - DNA, 20 bp, synthetic construct
  source 1..20: mol_type = other DNA
tggctcccagagggaacgtg

SEQ ID NO: 8024 - DNA, 20 bp, synthetic construct
  source 1..20: mol_type = other DNA
tatactcccgcagcgcgcgg

SEQ ID NO: 8025 - DNA, 20 bp, synthetic construct
  source 1..20: mol_type = other DNA
ccagagggaacgtgaggagc

SEQ ID NO: 8026 - DNA, 20 bp, synthetic construct
  source 1..20: mol_type = other DNA
gcctgaaccccgaaacgacg

SEQ ID NO: 8027 - DNA, 20 bp, synthetic construct
  source 1..20: mol_type = other DNA
ccaacccccgccgcgcgctg

SEQ ID NO: 8028 - DNA, 20 bp, synthetic construct
  source 1..20: mol_type = other DNA
gtcgtttcggggttcaggcg

SEQ ID NO: 8029 - DNA, 20 bp, synthetic construct
  source 1..20: mol_type = other DNA
tactcccgcagcgcgcggcg

SEQ ID NO: 8030 - DNA, 20 bp, synthetic construct
  source 1..20: mol_type = other DNA
tcgtttcggggttcaggcga

SEQ ID NO: 8031 - DNA, 20 bp, synthetic construct
  source 1..20: mol_type = other DNA
ggccagggcatagactcagt

SEQ ID NO: 8032 - DNA, 20 bp, synthetic construct
  source 1..20: mol_type = other DNA
ggaggaggaaagctgtgcgg

SEQ ID NO: 8033 - DNA, 20 bp, synthetic construct
  source 1..20: mol_type = other DNA
cacccactgagtctatgccc

SEQ ID NO: 8034 - DNA, 20 bp, synthetic construct
  source 1..20: mol_type = other DNA
cggccagggcatagactcag

SEQ ID NO: 8035 - DNA, 20 bp, synthetic construct
  source 1..20: mol_type = other DNA
ctcctcccatggctcccaga

SEQ ID NO: 8036 - DNA, 20 bp, synthetic construct
  source 1..20: mol_type = other DNA
tagactcagtgggtgaataa

SEQ ID NO: 8037 - DNA, 20 bp, synthetic construct
  source 1..20: mol_type = other DNA
aaagaggctcccgtgatgag

SEQ ID NO: 8038 - DNA, 20 bp, synthetic construct
  source 1..20: mol_type = other DNA
aagagccaaccgctcatcac

SEQ ID NO: 8039 - DNA, 20 bp, synthetic construct
  source 1..20: mol_type = other DNA
accctggagtgagtggcaga

SEQ ID NO: 8040 - DNA, 20 bp, synthetic construct
  source 1..20: mol_type = other DNA
gccctctgccactcactcca

SEQ ID NO: 8041 - DNA, 20 bp, synthetic construct
  source 1..20: mol_type = other DNA
tctgagcactaattgttccc

SEQ ID NO: 8042 - DNA, 20 bp, synthetic construct
  source 1..20: mol_type = other DNA
aaagagccaaccgctcatca

SEQ ID NO: 8043 - DNA, 20 bp, synthetic construct
  source 1..20: mol_type = other DNA
aagctcagagaagaataggt

SEQ ID NO: 8044 - DNA, 20 bp, synthetic construct
  source 1..20: mol_type = other DNA
tgccctctgccactcactcc

SEQ ID NO: 8045 - DNA, 20 bp, synthetic construct
  source 1..20: mol_type = other DNA
gcactaattgttccctggag

SEQ ID NO: 8046 - DNA, 20 bp, synthetic construct
  source 1..20: mol_type = other DNA
gaccctggagtgagtggcag

SEQ ID NO: 8047 - DNA, 20 bp, synthetic construct
  source 1..20: mol_type = other DNA
aggctcccgtgatgagcggt

SEQ ID NO: 8048 - DNA, 20 bp, synthetic construct
  source 1..20: mol_type = other DNA
atgttggaccctggagtgag

SEQ ID NO: 8049 - DNA, 20 bp, synthetic construct
  source 1..20: mol_type = other DNA
ctcagagaagaataggtagg

SEQ ID NO: 8050 - DNA, 20 bp, synthetic construct
  source 1..20: mol_type = other DNA
tggcagagggcagcctcttg

SEQ ID NO: 8051 - DNA, 20 bp, synthetic construct
  source 1..20: mol_type = other DNA
ctaattgttccctggagtgg

SEQ ID NO: 8052 - DNA, 20 bp, synthetic construct
  source 1..20: mol_type = other DNA
aagtccagccgcgctatgcg

SEQ ID NO: 8053 - DNA, 20 bp, synthetic construct
  source 1..20: mol_type = other DNA
caggaagacctcgcatagcg

SEQ ID NO: 8054 - DNA, 20 bp, synthetic construct
  source 1..20: mol_type = other DNA
attcgcgacaatcggccctg

SEQ ID NO: 8055 - DNA, 20 bp, synthetic construct
  source 1..20: mol_type = other DNA
ggaagctcagggtcgtgaag

SEQ ID NO: 8056 - DNA, 20 bp, synthetic construct
  source 1..20: mol_type = other DNA
tttgtgactcagcgaacacc

SEQ ID NO: 8057 - DNA, 20 bp, synthetic construct
  source 1..20: mol_type = other DNA
gattcgcgacaatcggccct

SEQ ID NO: 8058 - DNA, 20 bp, synthetic construct
  source 1..20: mol_type = other DNA
ggccgtgccctgaacacacg

SEQ ID NO: 8059 - DNA, 20 bp, synthetic construct
  source 1..20: mol_type = other DNA
tgattcgcgacaatcggccc

SEQ ID NO: 8060 - DNA, 20 bp, synthetic construct
  source 1..20: mol_type = other DNA
cctgaacacacgtggaatcc

SEQ ID NO: 8061 - DNA, 20 bp, synthetic construct
  source 1..20: mol_type = other DNA
aggaaattctgaaggaaaca

SEQ ID NO: 8062 - DNA, 20 bp, synthetic construct
  source 1..20: mol_type = other DNA
gttcgctgagtcacaaatcc

SEQ ID NO: 8063 - DNA, 20 bp, synthetic construct
  source 1..20: mol_type = other DNA
gtcacaaatcctggaagctc

SEQ ID NO: 8064 - DNA, 20 bp, synthetic construct
  source 1..20: mol_type = other DNA
gtagagcaggggaggagcca

SEQ ID NO: 8065 - DNA, 20 bp, synthetic construct
  source 1..20: mol_type = other DNA
tcacaaatcctggaagctca

SEQ ID NO: 8066 - DNA, 20 bp, synthetic construct
  source 1..20: mol_type = other DNA
tggagggggcaggcacccca

SEQ ID NO: 8067 - DNA, 20 bp, synthetic construct
  source 1..20: mol_type = other DNA
agccaaccctgagcgcgagg

SEQ ID NO: 8068 - DNA, 20 bp, synthetic construct
  source 1..20: mol_type = other DNA
cagccaaccctgagcgcgag

SEQ ID NO: 8069 - DNA, 20 bp, synthetic construct
  source 1..20: mol_type = other DNA
cgcaggtgaaggtgagcgcg

SEQ ID NO: 8070 - DNA, 20 bp, synthetic construct
  source 1..20: mol_type = other DNA
cgcgctcaccttcacctgcg

SEQ ID NO: 8071 - DNA, 20 bp, synthetic construct
  source 1..20: mol_type = other DNA
aggtgaaggtgagcgcgtgg

SEQ ID NO: 8072 - DNA, 20 bp, synthetic construct
  source 1..20: mol_type = other DNA
ccggccggccaggagcagcg

SEQ ID NO: 8073 - DNA, 20 bp, synthetic construct
  source 1..20: mol_type = other DNA
agcctcaggtaacaaagctg

SEQ ID NO: 8074 - DNA, 20 bp, synthetic construct
  source 1..20: mol_type = other DNA
tggcgcgcgtagggtggaag

SEQ ID NO: 8075 - DNA, 20 bp, synthetic construct
  source 1..20: mol_type = other DNA
aggtgagcgcgtggcggtga

SEQ ID NO: 8076 - DNA, 20 bp, synthetic construct
  source 1..20: mol_type = other DNA
tgagcgcgtggcggtgacgg

SEQ ID NO: 8077 - DNA, 20 bp, synthetic construct
  source 1..20: mol_type = other DNA
gcggtgacggtggcgcgcgt

SEQ ID NO: 8078 - DNA, 20 bp, synthetic construct
  source 1..20: mol_type = other DNA
cgctcaccttcacctgcgcg

SEQ ID NO: 8079 - DNA, 20 bp, synthetic construct
  source 1..20: mol_type = other DNA
ggccgcagctttgttacctg

SEQ ID NO: 8080 - DNA, 20 bp, synthetic construct
  source 1..20: mol_type = other DNA
gggaggggcggagcaggaaa

SEQ ID NO: 8081 - DNA, 20 bp, synthetic construct
  source 1..20: mol_type = other DNA
tagggtggaaggggaggcga

SEQ ID NO: 8082 - DNA, 20 bp, synthetic construct
  source 1..20: mol_type = other DNA
cccaccccgcccgatcgtcg

SEQ ID NO: 8083 - DNA, 20 bp, synthetic construct
  source 1..20: mol_type = other DNA
taacggcgcgcccgtccgag

SEQ ID NO: 8084 - DNA, 20 bp, synthetic construct
  source 1..20: mol_type = other DNA
tcccggccgcgacgatcggg

SEQ ID NO: 8085 - DNA, 20 bp, synthetic construct
  source 1..20: mol_type = other DNA
gaaggcacccgagattgcag

SEQ ID NO: 8086 - DNA, 20 bp, synthetic construct
  source 1..20: mol_type = other DNA
cgaggctggtaaatggatga

SEQ ID NO: 8087 - DNA, 20 bp, synthetic construct
  source 1..20: mol_type = other DNA
ggacagggcggagtcccctg

SEQ ID NO: 8088 - DNA, 20 bp, synthetic construct
  source 1..20: mol_type = other DNA
acccgagattgcagaggaca

SEQ ID NO: 8089 - DNA, 20 bp, synthetic construct
  source 1..20: mol_type = other DNA
taccagcctcgcctctcgga

SEQ ID NO: 8090 - DNA, 20 bp, synthetic construct
  source 1..20: mol_type = other DNA
gccgagccggaggaccccag

SEQ ID NO: 8091 - DNA, 20 bp, synthetic construct
  source 1..20: mol_type = other DNA
cgccgagccggaggacccca

SEQ ID NO: 8092 - DNA, 20 bp, synthetic construct
  source 1..20: mol_type = other DNA
gcgcgcccgtccgagaggcg

SEQ ID NO: 8093 - DNA, 20 bp, synthetic construct
  source 1..20: mol_type = other DNA
tggggtcctccggctcggcg

SEQ ID NO: 8094 - DNA, 20 bp, synthetic construct
  source 1..20: mol_type = other DNA
cgagattgcagaggacaggg

SEQ ID NO: 8095 - DNA, 20 bp, synthetic construct
  source 1..20: mol_type = other DNA
gaaaggccccgccgagccgg

SEQ ID NO: 8096 - DNA, 20 bp, synthetic construct
  source 1..20: mol_type = other DNA
gaagaaaggccccgccgagc

SEQ ID NO: 8097 - DNA, 20 bp, synthetic construct
  source 1..20: mol_type = other DNA
cggcgtcccaggctccgagg

SEQ ID NO: 8098 - DNA, 20 bp, synthetic construct
  source 1..20: mol_type = other DNA
ggcgtcccaggctccgagga

SEQ ID NO: 8099 - DNA, 20 bp, synthetic construct
  source 1..20: mol_type = other DNA
gtcgcgctgccgggtgacgg

SEQ ID NO: 8100 - DNA, 20 bp, synthetic construct
  source 1..20: mol_type = other DNA
ggcgtcgcgctgccgggtga

SEQ ID NO: 8101 - DNA, 20 bp, synthetic construct
  source 1..20: mol_type = other DNA
gggccggcgcctgaaagccg

SEQ ID NO: 8102 - DNA, 20 bp, synthetic construct
  source 1..20: mol_type = other DNA
gcgtcccaggctccgaggag

SEQ ID NO: 8103 - DNA, 20 bp, synthetic construct
  source 1..20: mol_type = other DNA
cgggcgcggagcggaagcga

SEQ ID NO: 8104 - DNA, 20 bp, synthetic construct
  source 1..20: mol_type = other DNA
gggcggcgtcccaggctccg

SEQ ID NO: 8105 - DNA, 20 bp, synthetic construct
  source 1..20: mol_type = other DNA
tgaaagccggggctggaggg

SEQ ID NO: 8106 - DNA, 20 bp, synthetic construct
  source 1..20: mol_type = other DNA
gtgcgggcttggccagcccg

SEQ ID NO: 8107 - DNA, 20 bp, synthetic construct
  source 1..20: mol_type = other DNA
gaggggccgctccgcgctgg

SEQ ID NO: 8108 - DNA, 20 bp, synthetic construct
  source 1..20: mol_type = other DNA
aatccccccgcccgccagcg

SEQ ID NO: 8109 - DNA, 20 bp, synthetic construct
  source 1..20: mol_type = other DNA
tgcgggcttggccagcccgg

SEQ ID NO: 8110 - DNA, 20 bp, synthetic construct
  source 1..20: mol_type = other DNA
gaggaggggccgctccgcgc

SEQ ID NO: 8111 - DNA, 20 bp, synthetic construct
  source 1..20: mol_type = other DNA
gccctgcctccctccagccc

SEQ ID NO: 8112 - DNA, 20 bp, synthetic construct
  source 1..20: mol_type = other DNA
gacgccctgaggatcccgcg

SEQ ID NO: 8113 - DNA, 20 bp, synthetic construct
  source 1..20: mol_type = other DNA
tcctctcccagtctgcaacg

SEQ ID NO: 8114 - DNA, 20 bp, synthetic construct
  source 1..20: mol_type = other DNA
cgcaccaccgggatcctgag

SEQ ID NO: 8115 - DNA, 20 bp, synthetic construct
  source 1..20: mol_type = other DNA
ctctcccagtctgcaacgcg

SEQ ID NO: 8116 - DNA, 20 bp, synthetic construct
  source 1..20: mol_type = other DNA
gccgcaccaccgggatcctg

SEQ ID NO: 8117 - DNA, 20 bp, synthetic construct
  source 1..20: mol_type = other DNA
aaagagccccggagcaatgc

SEQ ID NO: 8118 - DNA, 20 bp, synthetic construct
  source 1..20: mol_type = other DNA
cccctcatcgcaaagagccc

SEQ ID NO: 8119 - DNA, 20 bp, synthetic construct
  source 1..20: mol_type = other DNA
gcaccaccgggatcctgagg

SEQ ID NO: 8120 - DNA, 20 bp, synthetic construct
  source 1..20: mol_type = other DNA
ccggggctctttgcgatgag

SEQ ID NO: 8121 - DNA, 20 bp, synthetic construct
  source 1..20: mol_type = other DNA
ctcagatgccaggacccctc

SEQ ID NO: 8122 - DNA, 20 bp, synthetic construct
  source 1..20: mol_type = other DNA
gagcaatgcaggagccccgc

SEQ ID NO: 8123 - DNA, 20 bp, synthetic construct
  source 1..20: mol_type = other DNA
gctccgaagggcctgccggg

SEQ ID NO: 8124 - DNA, 20 bp, synthetic construct
  source 1..20: mol_type = other DNA
ggagcaatgcaggagccccg

SEQ ID NO: 8125 - DNA, 20 bp, synthetic construct
  source 1..20: mol_type = other DNA
gggcgcgcctggctccggag

SEQ ID NO: 8126 - DNA, 20 bp, synthetic construct
  source 1..20: mol_type = other DNA
atgaggggccggcgcgagcg

SEQ ID NO: 8127 - DNA, 20 bp, synthetic construct
  source 1..20: mol_type = other DNA
gtgcgcgcgagctaagaccg

SEQ ID NO: 8128 - DNA, 20 bp, synthetic construct
  source 1..20: mol_type = other DNA
tcttccgcgaagacagcctg

SEQ ID NO: 8129 - DNA, 20 bp, synthetic construct
  source 1..20: mol_type = other DNA
caagatggcggctctgacgg

SEQ ID NO: 8130 - DNA, 20 bp, synthetic construct
  source 1..20: mol_type = other DNA
ttagctcgcgcgcaccctag

SEQ ID NO: 8131 - DNA, 20 bp, synthetic construct
  source 1..20: mol_type = other DNA
gcaggcgcgctggctccggt

SEQ ID NO: 8132 - DNA, 20 bp, synthetic construct
  source 1..20: mol_type = other DNA
caggcgcgctggctccggta

SEQ ID NO: 8133 - DNA, 20 bp, synthetic construct
  source 1..20: mol_type = other DNA
ggctccggtagggctgcagg

SEQ ID NO: 8134 - DNA, 20 bp, synthetic construct
  source 1..20: mol_type = other DNA
tggctccggtagggctgcag

SEQ ID NO: 8135 - DNA, 20 bp, synthetic construct
  source 1..20: mol_type = other DNA
cgacgcaggcgcgctggctc

SEQ ID NO: 8136 - DNA, 20 bp, synthetic construct
  source 1..20: mol_type = other DNA
cgagctaagaccgcggcccg

SEQ ID NO: 8137 - DNA, 20 bp, synthetic construct
  source 1..20: mol_type = other DNA
gagccagcgcgcctgcgtcg

SEQ ID NO: 8138 - DNA, 20 bp, synthetic construct
  source 1..20: mol_type = other DNA
cctgcgtcgcgggcgcacgg

SEQ ID NO: 8139 - DNA, 20 bp, synthetic construct
  source 1..20: mol_type = other DNA
ggggcacgccgggtaagggg

SEQ ID NO: 8140 - DNA, 20 bp, synthetic construct
  source 1..20: mol_type = other DNA
ccggcgtgccccgcgcccgg

SEQ ID NO: 8141 - DNA, 20 bp, synthetic construct
  source 1..20: mol_type = other DNA
tcacaggcgcaggcgcagac

SEQ ID NO: 8142 - DNA, 20 bp, synthetic construct
  source 1..20: mol_type = other DNA
aggagatcatatgattgaga

SEQ ID NO: 8143 - DNA, 20 bp, synthetic construct
  source 1..20: mol_type = other DNA
cagacaacggaaaagcacgc

SEQ ID NO: 8144 - DNA, 20 bp, synthetic construct
  source 1..20: mol_type = other DNA
atacatcagccatatagaaa

SEQ ID NO: 8145 - DNA, 20 bp, synthetic construct
  source 1..20: mol_type = other DNA
tgatctattgtaaaatcacc

SEQ ID NO: 8146 - DNA, 20 bp, synthetic construct
  source 1..20: mol_type = other DNA
actcagggctagactaacac

SEQ ID NO: 8147 - DNA, 20 bp, synthetic construct
  source 1..20: mol_type = other DNA
caaagcaaccggaaagcgaa

SEQ ID NO: 8148 - DNA, 20 bp, synthetic construct
  source 1..20: mol_type = other DNA
tccgttgtctgactcactca

SEQ ID NO: 8149 - DNA, 20 bp, synthetic construct
  source 1..20: mol_type = other DNA
gccctgagtgagtcagacaa

SEQ ID NO: 8150 - DNA, 20 bp, synthetic construct
  source 1..20: mol_type = other DNA
cattgtgaagacaaagcaac

SEQ ID NO: 8151 - DNA, 20 bp, synthetic construct
  source 1..20: mol_type = other DNA
acactgggattagcatgtga

SEQ ID NO: 8152 - DNA, 20 bp, synthetic construct
  source 1..20: mol_type = other DNA
cactgggattagcatgtgat

SEQ ID NO: 8153 - DNA, 20 bp, synthetic construct
  source 1..20: mol_type = other DNA
ctcagggctagactaacact

SEQ ID NO: 8154 - DNA, 20 bp, synthetic construct
  source 1..20: mol_type = other DNA
ttccgttgtctgactcactc

SEQ ID NO: 8155 - DNA, 20 bp, synthetic construct
  source 1..20: mol_type = other DNA
ttctaaaaataaacttaacc

SEQ ID NO: 8156 - DNA, 20 bp, synthetic construct
  source 1..20: mol_type = other DNA
tgatgggtccattcgctttc

SEQ ID NO: 8157 - DNA, 20 bp, synthetic construct
  source 1..20: mol_type = other DNA
gctgtcggctcagaagctca

SEQ ID NO: 8158 - DNA, 20 bp, synthetic construct
  source 1..20: mol_type = other DNA
tcgtcgttgctgccaaagtg

SEQ ID NO: 8159 - DNA, 20 bp, synthetic construct
  source 1..20: mol_type = other DNA
attggcaaagtcctcaaacc

SEQ ID NO: 8160 - DNA, 20 bp, synthetic construct
  source 1..20: mol_type = other DNA
ctgagccgacagcagtccat

SEQ ID NO: 8161 - DNA, 20 bp, synthetic construct
  source 1..20: mol_type = other DNA
ctttggcagcaacgacgaca

SEQ ID NO: 8162 - DNA, 20 bp, synthetic construct
  source 1..20: mol_type = other DNA
caccccagcctacctccctg

SEQ ID NO: 8163 - DNA, 20 bp, synthetic construct
  source 1..20: mol_type = other DNA
acctccctgcggccctagag

SEQ ID NO: 8164 - DNA, 20 bp, synthetic construct
  source 1..20: mol_type = other DNA
agggaggaagcctcgaggcg

SEQ ID NO: 8165 - DNA, 20 bp, synthetic construct
  source 1..20: mol_type = other DNA
gttgctgccaaagtgaggca

SEQ ID NO: 8166 - DNA, 20 bp, synthetic construct
  source 1..20: mol_type = other DNA
gctgagcccatgcctcactt

SEQ ID NO: 8167 - DNA, 20 bp, synthetic construct
  source 1..20: mol_type = other DNA
ttgctgccaaagtgaggcat

SEQ ID NO: 8168 - DNA, 20 bp, synthetic construct
  source 1..20: mol_type = other DNA
gcccctctagggccgcaggg

SEQ ID NO: 8169 - DNA, 20 bp, synthetic construct
  source 1..20: mol_type = other DNA
tcagcccctctagggccgca

SEQ ID NO: 8170 - DNA, 20 bp, synthetic construct
  source 1..20: mol_type = other DNA
gcaaagtcctcaaaccaggc

SEQ ID NO: 8171 - DNA, 20 bp, synthetic construct
  source 1..20: mol_type = other DNA
ctctagggccgcagggaggt

SEQ ID NO: 8172 - DNA, 20 bp, synthetic construct
  source 1..20: mol_type = other DNA
ctgacccgctctggcaacag

SEQ ID NO: 8173 - DNA, 20 bp, synthetic construct
  source 1..20: mol_type = other DNA
cgggaggagacagagtcgcg

SEQ ID NO: 8174 - DNA, 20 bp, synthetic construct
  source 1..20: mol_type = other DNA
ggggcggggaggtaaaggcg

SEQ ID NO: 8175 - DNA, 20 bp, synthetic construct
  source 1..20: mol_type = other DNA
ggtgtggtgggcgtggtctg

SEQ ID NO: 8176 - DNA, 20 bp, synthetic construct
  source 1..20: mol_type = other DNA
gggaggagacagagtcgcga

SEQ ID NO: 8177 - DNA, 20 bp, synthetic construct
  source 1..20: mol_type = other DNA
tcggggcggggaggtaaagg

SEQ ID NO: 8178 - DNA, 20 bp, synthetic construct
  source 1..20: mol_type = other DNA
ccacgcccaccacacctccc

SEQ ID NO: 8179 - DNA, 20 bp, synthetic construct
  source 1..20: mol_type = other DNA
gtggggcggagtcgaggtcg

SEQ ID NO: 8180 - DNA, 20 bp, synthetic construct
  source 1..20: mol_type = other DNA
gggcggagtcgaggtcgggg

SEQ ID NO: 8181 - DNA, 20 bp, synthetic construct
  source 1..20: mol_type = other DNA
ggaggagacagagtcgcgag

SEQ ID NO: 8182 - DNA, 20 bp, synthetic construct
  source 1..20: mol_type = other DNA
gtggtgggcgtggtctgggg

SEQ ID NO: 8183 - DNA, 20 bp, synthetic construct
  source 1..20: mol_type = other DNA
gagtcgaggtcggggcgggg

SEQ ID NO: 8184 - DNA, 20 bp, synthetic construct
  source 1..20: mol_type = other DNA
aaggcggggccagggaggtg

SEQ ID NO: 8185 - DNA, 20 bp, synthetic construct
  source 1..20: mol_type = other DNA
cggggccagggaggtgtggt

SEQ ID NO: 8186 - DNA, 20 bp, synthetic construct
  source 1..20: mol_type = other DNA
gcggggccagggaggtgtgg

SEQ ID NO: 8187 - DNA, 20 bp, synthetic construct
  source 1..20: mol_type = other DNA
atctgacaagagatcactgg

SEQ ID NO: 8188 - DNA, 20 bp, synthetic construct
  source 1..20: mol_type = other DNA
ggcagtggtgaggtgactca

SEQ ID NO: 8189 - DNA, 20 bp, synthetic construct
  source 1..20: mol_type = other DNA
actccttgacccagaaggtg

SEQ ID NO: 8190 - DNA, 20 bp, synthetic construct
  source 1..20: mol_type = other DNA
catctgacaagagatcactg

SEQ ID NO: 8191 - DNA, 20 bp, synthetic construct
  source 1..20: mol_type = other DNA
aaaggttggtgctgccaagg

SEQ ID NO: 8192 - DNA, 20 bp, synthetic construct
  source 1..20: mol_type = other DNA
ggggaaggataggtgaagga

SEQ ID NO: 8193 - DNA, 20 bp, synthetic construct
  source 1..20: mol_type = other DNA
cccatctgacaagagatcac

SEQ ID NO: 8194 - DNA, 20 bp, synthetic construct
  source 1..20: mol_type = other DNA
gggtcaaggagtgaaggcca

SEQ ID NO: 8195 - DNA, 20 bp, synthetic construct
  source 1..20: mol_type = other DNA
gctttcataaatcaaagggc

SEQ ID NO: 8196 - DNA, 20 bp, synthetic construct
  source 1..20: mol_type = other DNA
tgaggtgactcagggatgct

SEQ ID NO: 8197 - DNA, 20 bp, synthetic construct
  source 1..20: mol_type = other DNA
tcactccttgacccagaagg

SEQ ID NO: 8198 - DNA, 20 bp, synthetic construct
  source 1..20: mol_type = other DNA
taaatcaaagggcaggccac

SEQ ID NO: 8199 - DNA, 20 bp, synthetic construct
  source 1..20: mol_type = other DNA
cactccttgacccagaaggt

SEQ ID NO: 8200 - DNA, 20 bp, synthetic construct
  source 1..20: mol_type = other DNA
ccttgacccagaaggtgggg

SEQ ID NO: 8201 - DNA, 20 bp, synthetic construct
  source 1..20: mol_type = other DNA
aaggtggggaggcagtggtg

SEQ ID NO: 8202 - DNA, 20 bp, synthetic construct
  source 1..20: mol_type = other DNA
tccccgccttcgcaacgcag

SEQ ID NO: 8203 - DNA, 20 bp, synthetic construct
  source 1..20: mol_type = other DNA
ttacggcagccgcgttgcgg

SEQ ID NO: 8204 - DNA, 20 bp, synthetic construct
  source 1..20: mol_type = other DNA
cgccttcgcaacgcagcggg

SEQ ID NO: 8205 - DNA, 20 bp, synthetic construct
  source 1..20: mol_type = other DNA
ggaggaagccaggagaggat

SEQ ID NO: 8206 - DNA, 20 bp, synthetic construct
  source 1..20: mol_type = other DNA
aagccaggagaggataggag

SEQ ID NO: 8207 - DNA, 20 bp, synthetic construct
  source 1..20: mol_type = other DNA
gctttacggcagccgcgttg

SEQ ID NO: 8208 - DNA, 20 bp, synthetic construct
  source 1..20: mol_type = other DNA
cccgctgcgttgcgaaggcg

SEQ ID NO: 8209 - DNA, 20 bp, synthetic construct
  source 1..20: mol_type = other DNA
acggctgccgccaagcgcgc

SEQ ID NO: 8210 - DNA, 20 bp, synthetic construct
  source 1..20: mol_type = other DNA
cccgccttcgcaacgcagcg

SEQ ID NO: 8211 - DNA, 20 bp, synthetic construct
  source 1..20: mol_type = other DNA
tacggcagccgcgttgcggc

SEQ ID NO: 8212 - DNA, 20 bp, synthetic construct
  source 1..20: mol_type = other DNA
cgccccgccccgccgcaacg

SEQ ID NO: 8213 - DNA, 20 bp, synthetic construct
  source 1..20: mol_type = other DNA
ccgccttcgcaacgcagcgg

SEQ ID NO: 8214 - DNA, 20 bp, synthetic construct
  source 1..20: mol_type = other DNA
ttgcgaaggcggggaaggcg

SEQ ID NO: 8215 - DNA, 20 bp, synthetic construct
  source 1..20: mol_type = other DNA
ggggcggggccgggaagagg

SEQ ID NO: 8216 - DNA, 20 bp, synthetic construct
  source 1..20: mol_type = other DNA
gcggggccgggaagaggagg

SEQ ID NO: 8217 - DNA, 20 bp, synthetic construct
  source 1..20: mol_type = other DNA
gtcgccgtagcgctgcgcaa

SEQ ID NO: 8218 - DNA, 20 bp, synthetic construct
  source 1..20: mol_type = other DNA
tacggcgacccgcaactccg

SEQ ID NO: 8219 - DNA, 20 bp, synthetic construct
  source 1..20: mol_type = other DNA
caatggagatgagcctcccg

SEQ ID NO: 8220 - DNA, 20 bp, synthetic construct
  source 1..20: mol_type = other DNA
ttctggccggaagttgagtg

SEQ ID NO: 8221 - DNA, 20 bp, synthetic construct
  source 1..20: mol_type = other DNA
cccaagcctcaccctcacac

SEQ ID NO: 8222 - DNA, 20 bp, synthetic construct
  source 1..20: mol_type = other DNA
agggagcagccgtttcgggt

SEQ ID NO: 8223 - DNA, 20 bp, synthetic construct
  source 1..20: mol_type = other DNA
gttctggccggaagttgagt

SEQ ID NO: 8224 - DNA, 20 bp, synthetic construct
  source 1..20: mol_type = other DNA
tgttctggccggaagttgag

SEQ ID NO: 8225 - DNA, 20 bp, synthetic construct
  source 1..20: mol_type = other DNA
acatctgctttcctgtgtga

SEQ ID NO: 8226 - DNA, 20 bp, synthetic construct
  source 1..20: mol_type = other DNA
gagggagcagccgtttcggg

SEQ ID NO: 8227 - DNA, 20 bp, synthetic construct
  source 1..20: mol_type = other DNA
cgacccgcaactccgaggct

SEQ ID NO: 8228 - DNA, 20 bp, synthetic construct
  source 1..20: mol_type = other DNA
cttgggccgggttccccggg

SEQ ID NO: 8229 - DNA, 20 bp, synthetic construct
  source 1..20: mol_type = other DNA
gatgagcctcccggggaacc

SEQ ID NO: 8230 - DNA, 20 bp, synthetic construct
  source 1..20: mol_type = other DNA
tgtgagggtgaggcttgggc

SEQ ID NO: 8231 - DNA, 20 bp, synthetic construct
  source 1..20: mol_type = other DNA
gcaatggagatgagcctccc

SEQ ID NO: 8232 - DNA, 20 bp, synthetic construct
  source 1..20: mol_type = other DNA
tgagttggtaaaccctaacg

SEQ ID NO: 8233 - DNA, 20 bp, synthetic construct
  source 1..20: mol_type = other DNA
aaaggtgatcaacaatagct

SEQ ID NO: 8234 - DNA, 20 bp, synthetic construct
  source 1..20: mol_type = other DNA
catgagtctgatggcgaaag

SEQ ID NO: 8235 - DNA, 20 bp, synthetic construct
  source 1..20: mol_type = other DNA
tgagtctgatggcgaaagag

SEQ ID NO: 8236 - DNA, 20 bp, synthetic construct
  source 1..20: mol_type = other DNA
aagcagaaccatgagtctga

SEQ ID NO: 8237 - DNA, 20 bp, synthetic construct
  source 1..20: mol_type = other DNA
aagttacatcacattgtctg

SEQ ID NO: 8238 - DNA, 20 bp, synthetic construct
  source 1..20: mol_type = other DNA
atgagtctgatggcgaaaga

SEQ ID NO: 8239 - DNA, 20 bp, synthetic construct
  source 1..20: mol_type = other DNA
ttcagggcatttcctcgtta

SEQ ID NO: 8240 - DNA, 20 bp, synthetic construct
  source 1..20: mol_type = other DNA
caacaatagctaggcagaaa

SEQ ID NO: 8241 - DNA, 20 bp, synthetic construct
  source 1..20: mol_type = other DNA
ctctttcgccatcagactca

SEQ ID NO: 8242 - DNA, 20 bp, synthetic construct
  source 1..20: mol_type = other DNA
tagctattgttgatcacctt

SEQ ID NO: 8243 - DNA, 20 bp, synthetic construct
  source 1..20: mol_type = other DNA
taccaactcaatcatcccaa

SEQ ID NO: 8244 - DNA, 20 bp, synthetic construct
  source 1..20: mol_type = other DNA
cacctttgggatgattgagt

SEQ ID NO: 8245 - DNA, 20 bp, synthetic construct
  source 1..20: mol_type = other DNA
agaattgaagtatgtatctt

SEQ ID NO: 8246 - DNA, 20 bp, synthetic construct
  source 1..20: mol_type = other DNA
tttcagggcatttcctcgtt

SEQ ID NO: 8247 - DNA, 20 bp, synthetic construct
  source 1..20: mol_type = other DNA
aatcccctaagagtcaggta

SEQ ID NO: 8248 - DNA, 20 bp, synthetic construct
  source 1..20: mol_type = other DNA
cagctcagcttggaacgctg

SEQ ID NO: 8249 - DNA, 20 bp, synthetic construct
  source 1..20: mol_type = other DNA
cccctaagagtcaggtacgg

SEQ ID NO: 8250 - DNA, 20 bp, synthetic construct
  source 1..20: mol_type = other DNA
ttcagcgtgcagagaacgcg

SEQ ID NO: 8251 - DNA, 20 bp, synthetic construct
  source 1..20: mol_type = other DNA
acttcagcgtgcagagaacg

SEQ ID NO: 8252 - DNA, 20 bp, synthetic construct
  source 1..20: mol_type = other DNA
cttcagcgtgcagagaacgc

SEQ ID NO: 8253 - DNA, 20 bp, synthetic construct
  source 1..20: mol_type = other DNA
ggagaaatcccctaagagtc

SEQ ID NO: 8254 - DNA, 20 bp, synthetic construct
  source 1..20: mol_type = other DNA
gccagctcagcttggaacgc

SEQ ID NO: 8255 - DNA, 20 bp, synthetic construct
  source 1..20: mol_type = other DNA
gattggccgccagctcagct

SEQ ID NO: 8256 - DNA, 20 bp, synthetic construct
  source 1..20: mol_type = other DNA
gatttctcctgagaatttgg

SEQ ID NO: 8257 - DNA, 20 bp, synthetic construct
  source 1..20: mol_type = other DNA
aggcctacaaccctctcccc

SEQ ID NO: 8258 - DNA, 20 bp, synthetic construct
  source 1..20: mol_type = other DNA
tgcagagaacgcggggacct

SEQ ID NO: 8259 - DNA, 20 bp, synthetic construct
  source 1..20: mol_type = other DNA
agcgttccaagctgagctgg

SEQ ID NO: 8260 - DNA, 20 bp, synthetic construct
  source 1..20: mol_type = other DNA
gaacgcggggacctaggaag

SEQ ID NO: 8261 - DNA, 20 bp, synthetic construct
  source 1..20: mol_type = other DNA
gcttggaacgctggggtgcg

SEQ ID NO: 8262 - DNA, 20 bp, synthetic construct
  source 1..20: mol_type = other DNA
acccccggcacaccagcccg

SEQ ID NO: 8263 - DNA, 20 bp, synthetic construct
  source 1..20: mol_type = other DNA
cggagtccttgcctcccgcg

SEQ ID NO: 8264 - DNA, 20 bp, synthetic construct
  source 1..20: mol_type = other DNA
tccgcgggctggtgtgccgg

SEQ ID NO: 8265 - DNA, 20 bp, synthetic construct
  source 1..20: mol_type = other DNA
gcaggctgcctggaggaccg

SEQ ID NO: 8266 - DNA, 20 bp, synthetic construct
  source 1..20: mol_type = other DNA
cctggaggaccgcggagctg

SEQ ID NO: 8267 - DNA, 20 bp, synthetic construct
  source 1..20: mol_type = other DNA
gcgggaggcaaggactccgc

SEQ ID NO: 8268 - DNA, 20 bp, synthetic construct
  source 1..20: mol_type = other DNA
cgcgggaggcaaggactccg

SEQ ID NO: 8269 - DNA, 20 bp, synthetic construct
  source 1..20: mol_type = other DNA
cccgcgcggccccagccagg

SEQ ID NO: 8270 - DNA, 20 bp, synthetic construct
  source 1..20: mol_type = other DNA
gcggccccagccaggaggga

SEQ ID NO: 8271 - DNA, 20 bp, synthetic construct
  source 1..20: mol_type = other DNA
ccgcgcggccccagccagga

SEQ ID NO: 8272 - DNA, 20 bp, synthetic construct
  source 1..20: mol_type = other DNA
ctccacgggcgcggcgcgag

SEQ ID NO: 8273 - DNA, 20 bp, synthetic construct
  source 1..20: mol_type = other DNA
agccaggagggatggcgctg

SEQ ID NO: 8274 - DNA, 20 bp, synthetic construct
  source 1..20: mol_type = other DNA
agcgccatccctcctggctg

SEQ ID NO: 8275 - DNA, 20 bp, synthetic construct
  source 1..20: mol_type = other DNA
agccgggcccgggagctcca

SEQ ID NO: 8276 - DNA, 20 bp, synthetic construct
  source 1..20: mol_type = other DNA
gccgggcccgggagctccac

SEQ ID NO: 8277 - DNA, 20 bp, synthetic construct
  source 1..20: mol_type = other DNA
gctcattggccgcgagctgg

SEQ ID NO: 8278 - DNA, 20 bp, synthetic construct
  source 1..20: mol_type = other DNA
agtatggagagcggcgcgag

SEQ ID NO: 8279 - DNA, 20 bp, synthetic construct
  source 1..20: mol_type = other DNA
cgatcgccaagtatggagag

SEQ ID NO: 8280 - DNA, 20 bp, synthetic construct
  source 1..20: mol_type = other DNA
gcgagaggcgggcgccgacg

SEQ ID NO: 8281 - DNA, 20 bp, synthetic construct
  source 1..20: mol_type = other DNA
gccccgcccccgcaccccgt

SEQ ID NO: 8282 - DNA, 20 bp, synthetic construct
  source 1..20: mol_type = other DNA
ccccccacgccgccagctcg

SEQ ID NO: 8283 - DNA, 20 bp, synthetic construct
  source 1..20: mol_type = other DNA
gcgcggctgccgggagtccc

SEQ ID NO: 8284 - DNA, 20 bp, synthetic construct
  source 1..20: mol_type = other DNA
atggagagcggcgcgagagg

SEQ ID NO: 8285 - DNA, 20 bp, synthetic construct
  source 1..20: mol_type = other DNA
tcgcggccaatgagcgcgcg

SEQ ID NO: 8286 - DNA, 20 bp, synthetic construct
  source 1..20: mol_type = other DNA
gctcgcggccaatgagcgcg

SEQ ID NO: 8287 - DNA, 20 bp, synthetic construct
  source 1..20: mol_type = other DNA
gcacccccctccccccgcgc

SEQ ID NO: 8288 - DNA, 20 bp, synthetic construct
  source 1..20: mol_type = other DNA
gccaccttccttccccgccc

SEQ ID NO: 8289 - DNA, 20 bp, synthetic construct
  source 1..20: mol_type = other DNA
ggggcggggaaggaaggtgg

SEQ ID NO: 8290 - DNA, 20 bp, synthetic construct
  source 1..20: mol_type = other DNA
gccggggcggggaaggaagg

SEQ ID NO: 8291 - DNA, 20 bp, synthetic construct
  source 1..20: mol_type = other DNA
ttggccgcgagctggcggcg

SEQ ID NO: 8292 - DNA, 20 bp, synthetic construct
  source 1..20: mol_type = other DNA
gccagccccttaaggatacg

SEQ ID NO: 8293 - DNA, 20 bp, synthetic construct
  source 1..20: mol_type = other DNA
acaaagtcacgtgtgctcag

SEQ ID NO: 8294 - DNA, 20 bp, synthetic construct
  source 1..20: mol_type = other DNA
caaagtcacgtgtgctcagg

SEQ ID NO: 8295 - DNA, 20 bp, synthetic construct
  source 1..20: mol_type = other DNA
agcatagatgaaatggcgat

SEQ ID NO: 8296 - DNA, 20 bp, synthetic construct
  source 1..20: mol_type = other DNA
tgacaaagtcacgtgtgctc

SEQ ID NO: 8297 - DNA, 20 bp, synthetic construct
  source 1..20: mol_type = other DNA
aatttcacctcgtatcctta

SEQ ID NO: 8298 - DNA, 20 bp, synthetic construct
  source 1..20: mol_type = other DNA
tttcacctcgtatccttaag

SEQ ID NO: 8299 - DNA, 20 bp, synthetic construct
  source 1..20: mol_type = other DNA
ttcctcttgccagcccctta

SEQ ID NO: 8300 - DNA, 20 bp, synthetic construct
  source 1..20: mol_type = other DNA
gggggccagaaactggagag

SEQ ID NO: 8301 - DNA, 20 bp, synthetic construct
  source 1..20: mol_type = other DNA
tgatgtcagcatagatgaaa

SEQ ID NO: 8302 - DNA, 20 bp, synthetic construct
  source 1..20: mol_type = other DNA
atttcacctcgtatccttaa

SEQ ID NO: 8303 - DNA, 20 bp, synthetic construct
  source 1..20: mol_type = other DNA
acctcgtatccttaaggggc

SEQ ID NO: 8304 - DNA, 20 bp, synthetic construct
  source 1..20: mol_type = other DNA
gtgctcagggggccagaaac

SEQ ID NO: 8305 - DNA, 20 bp, synthetic construct
  source 1..20: mol_type = other DNA
gacaaagtcacgtgtgctca

SEQ ID NO: 8306 - DNA, 20 bp, synthetic construct
  source 1..20: mol_type = other DNA
atccttaaggggctggcaag

SEQ ID NO: 8307 - DNA, 20 bp, synthetic construct
  source 1..20: mol_type = other DNA
gcgtagcgggtctaggcaag

SEQ ID NO: 8308 - DNA, 20 bp, synthetic construct
  source 1..20: mol_type = other DNA
ccggctgaccgtccaacgct

SEQ ID NO: 8309 - DNA, 20 bp, synthetic construct
  source 1..20: mol_type = other DNA
gcgttggacggtcagccgga

SEQ ID NO: 8310 - DNA, 20 bp, synthetic construct
  source 1..20: mol_type = other DNA
agcgttggacggtcagccgg

SEQ ID NO: 8311 - DNA, 20 bp, synthetic construct
  source 1..20: mol_type = other DNA
gaggaatccaatgagcgtag

SEQ ID NO: 8312 - DNA, 20 bp, synthetic construct
  source 1..20: mol_type = other DNA
gagggaccaagaactgccgg

SEQ ID NO: 8313 - DNA, 20 bp, synthetic construct
  source 1..20: mol_type = other DNA
agcgtagcgggtctaggcaa

SEQ ID NO: 8314 - DNA, 20 bp, synthetic construct
  source 1..20: mol_type = other DNA
ccggcctcggcgcctagcgt

SEQ ID NO: 8315 - DNA, 20 bp, synthetic construct
  source 1..20: mol_type = other DNA
gagcgtagcgggtctaggca

SEQ ID NO: 8316 - DNA, 20 bp, synthetic construct
  source 1..20: mol_type = other DNA
tagaaagctgtcttagttgg

SEQ ID NO: 8317 - DNA, 20 bp, synthetic construct
  source 1..20: mol_type = other DNA
cttagttggaggtctagtag

SEQ ID NO: 8318 - DNA, 20 bp, synthetic construct
  source 1..20: mol_type = other DNA
ctattggctgtctcttgcac

SEQ ID NO: 8319 - DNA, 20 bp, synthetic construct
  source 1..20: mol_type = other DNA
ccgtccaacgctaggcgccg

SEQ ID NO: 8320 - DNA, 20 bp, synthetic construct
  source 1..20: mol_type = other DNA
cctcggcgcctagcgttgga

SEQ ID NO: 8321 - DNA, 20 bp, synthetic construct
  source 1..20: mol_type = other DNA
ccaacgctaggcgccgaggc

SEQ ID NO: 8322 - DNA, 20 bp, synthetic construct
  source 1..20: mol_type = other DNA
ggatgacagaaaataaaagg

SEQ ID NO: 8323 - DNA, 20 bp, synthetic construct
  source 1..20: mol_type = other DNA
gtgacgtcacagtaccgcgc

SEQ ID NO: 8324 - DNA, 20 bp, synthetic construct
  source 1..20: mol_type = other DNA
agatcagagagacctcttgg

SEQ ID NO: 8325 - DNA, 20 bp, synthetic construct
  source 1..20: mol_type = other DNA
taccgcgccggagctgatcc

SEQ ID NO: 8326 - DNA, 20 bp, synthetic construct
  source 1..20: mol_type = other DNA
gccgcgcgccaggctgacat

SEQ ID NO: 8327 - DNA, 20 bp, synthetic construct
  source 1..20: mol_type = other DNA
gtctctctgatctggaccac

SEQ ID NO: 8328 - DNA, 20 bp, synthetic construct
  source 1..20: mol_type = other DNA
gccgatgtcagcctggcgcg

SEQ ID NO: 8329 - DNA, 20 bp, synthetic construct
  source 1..20: mol_type = other DNA
aaaccccgacaccctccaag

SEQ ID NO: 8330 - DNA, 20 bp, synthetic construct
  source 1..20: mol_type = other DNA
tcttactggcttggagccgg

SEQ ID NO: 8331 - DNA, 20 bp, synthetic construct
  source 1..20: mol_type = other DNA
ttcccggatcagctccggcg

SEQ ID NO: 8332 - DNA, 20 bp, synthetic construct
  source 1..20: mol_type = other DNA
agacctcttggagggtgtcg

SEQ ID NO: 8333 - DNA, 20 bp, synthetic construct
  source 1..20: mol_type = other DNA
gatcagagagacctcttgga

SEQ ID NO: 8334 - DNA, 20 bp, synthetic construct
  source 1..20: mol_type = other DNA
atttcttactggcttggagc

SEQ ID NO: 8335 - DNA, 20 bp, synthetic construct
  source 1..20: mol_type = other DNA
tcggcttcccggatcagctc

SEQ ID NO: 8336 - DNA, 20 bp, synthetic construct
  source 1..20: mol_type = other DNA
agagacctcttggagggtgt

SEQ ID NO: 8337 - DNA, 20 bp, synthetic construct
  source 1..20: mol_type = other DNA
aagggcagcaaggtcaccca

SEQ ID NO: 8338 - DNA, 20 bp, synthetic construct
  source 1..20: mol_type = other DNA
gttaaacattaccccatggg

SEQ ID NO: 8339 - DNA, 20 bp, synthetic construct
  source 1..20: mol_type = other DNA
tgcctggaatggctctccaa

SEQ ID NO: 8340 - DNA, 20 bp, synthetic construct
  source 1..20: mol_type = other DNA
ccatggggtaatgtttaacc

SEQ ID NO: 8341 - DNA, 20 bp, synthetic construct
  source 1..20: mol_type = other DNA
gcaaatggtgcaggatgtgg

SEQ ID NO: 8342 - DNA, 20 bp, synthetic construct
  source 1..20: mol_type = other DNA
atggctcctggctctcactg

SEQ ID NO: 8343 - DNA, 20 bp, synthetic construct
  source 1..20: mol_type = other DNA
ggtgcaggatgtggtggatg

SEQ ID NO: 8344 - DNA, 20 bp, synthetic construct
  source 1..20: mol_type = other DNA
actgccctttgacccccagc

SEQ ID NO: 8345 - DNA, 20 bp, synthetic construct
  source 1..20: mol_type = other DNA
tggctcctggctctcactgc

SEQ ID NO: 8346 - DNA, 20 bp, synthetic construct
  source 1..20: mol_type = other DNA
ctcactctccctgccagctg

SEQ ID NO: 8347 - DNA, 20 bp, synthetic construct
  source 1..20: mol_type = other DNA
tcactctccctgccagctgg

SEQ ID NO: 8348 - DNA, 20 bp, synthetic construct
  source 1..20: mol_type = other DNA
caggcaaatggtgcaggatg

SEQ ID NO: 8349 - DNA, 20 bp, synthetic construct
  source 1..20: mol_type = other DNA
ccagctggcagggagagtga

SEQ ID NO: 8350 - DNA, 20 bp, synthetic construct
  source 1..20: mol_type = other DNA
caggatgtggtggatgtgga

SEQ ID NO: 8351 - DNA, 20 bp, synthetic construct
  source 1..20: mol_type = other DNA
tggtggatgtggatggctcc

SEQ ID NO: 8352 - DNA, 20 bp, synthetic construct
  source 1..20: mol_type = other DNA
ttgcttccagatgtcaagca

SEQ ID NO: 8353 - DNA, 20 bp, synthetic construct
  source 1..20: mol_type = other DNA
agattcggtagtttggagga

SEQ ID NO: 8354 - DNA, 20 bp, synthetic construct
  source 1..20: mol_type = other DNA
tgacatctggaagcaacctc

SEQ ID NO: 8355 - DNA, 20 bp, synthetic construct
  source 1..20: mol_type = other DNA
aggcagatttaagaaagatt

SEQ ID NO: 8356 - DNA, 20 bp, synthetic construct
  source 1..20: mol_type = other DNA
agggtacgcagcatggttcc

SEQ ID NO: 8357 - DNA, 20 bp, synthetic construct
  source 1..20: mol_type = other DNA
gtaccctttaaaaattgggg

SEQ ID NO: 8358 - DNA, 20 bp, synthetic construct
  source 1..20: mol_type = other DNA
ccaacgctgctcctgcgaga

SEQ ID NO: 8359 - DNA, 20 bp, synthetic construct
  source 1..20: mol_type = other DNA
agggacgcgtctgggccagt

SEQ ID NO: 8360 - DNA, 20 bp, synthetic construct
  source 1..20: mol_type = other DNA
gaggatggcacacagaatcc

SEQ ID NO: 8361 - DNA, 20 bp, synthetic construct
  source 1..20: mol_type = other DNA
gaggggcggggctgttagca

SEQ ID NO: 8362 - DNA, 20 bp, synthetic construct
  source 1..20: mol_type = other DNA
aatctgccttgcttgacatc

SEQ ID NO: 8363 - DNA, 20 bp, synthetic construct
  source 1..20: mol_type = other DNA
tgcgtaccctttaaaaattg

SEQ ID NO: 8364 - DNA, 20 bp, synthetic construct
  source 1..20: mol_type = other DNA
ttaagaaagattcggtagtt

SEQ ID NO: 8365 - DNA, 20 bp, synthetic construct
  source 1..20: mol_type = other DNA
ggaggggcggggctgttagc

SEQ ID NO: 8366 - DNA, 20 bp, synthetic construct
  source 1..20: mol_type = other DNA
agaaagattcggtagtttgg

SEQ ID NO: 8367 - DNA, 20 bp, synthetic construct
  source 1..20: mol_type = other DNA
cagagggcggagcgtgtccg

SEQ ID NO: 8368 - DNA, 20 bp, synthetic construct
  source 1..20: mol_type = other DNA
agggacttccgaaagcggag

SEQ ID NO: 8369 - DNA, 20 bp, synthetic construct
  source 1..20: mol_type = other DNA
acaaacctccagccaatcac

SEQ ID NO: 8370 - DNA, 20 bp, synthetic construct
  source 1..20: mol_type = other DNA
gagcgtgtccggggcgccca

SEQ ID NO: 8371 - DNA, 20 bp, synthetic construct
  source 1..20: mol_type = other DNA
tgcgcagaaaagcgggcaga

SEQ ID NO: 8372 - DNA, 20 bp, synthetic construct
  source 1..20: mol_type = other DNA
cctgcgcgtgcgcagaaaag

SEQ ID NO: 8373 - DNA, 20 bp, synthetic construct
  source 1..20: mol_type = other DNA
gcagaaaagcgggcagaggg

SEQ ID NO: 8374 - DNA, 20 bp, synthetic construct
  source 1..20: mol_type = other DNA
ggtttgttaactattcatga

SEQ ID NO: 8375 - DNA, 20 bp, synthetic construct
  source 1..20: mol_type = other DNA
cgcgcagggacttccgaaag

SEQ ID NO: 8376 - DNA, 20 bp, synthetic construct
  source 1..20: mol_type = other DNA
acctccagccaatcactggc

SEQ ID NO: 8377 - DNA, 20 bp, synthetic construct
  source 1..20: mol_type = other DNA
gcagagggcggagcgtgtcc

SEQ ID NO: 8378 - DNA, 20 bp, synthetic construct
  source 1..20: mol_type = other DNA
gccctccgcgcctgcgccgt

SEQ ID NO: 8379 - DNA, 20 bp, synthetic construct
  source 1..20: mol_type = other DNA
tttgttaactattcatgagg

SEQ ID NO: 8380 - DNA, 20 bp, synthetic construct
  source 1..20: mol_type = other DNA
gtgcgcagaaaagcgggcag

SEQ ID NO: 8381 - DNA, 20 bp, synthetic construct
  source 1..20: mol_type = other DNA
gcccacggcgcaggcgcgga

SEQ ID NO: 8382 - DNA, 20 bp, synthetic construct
  source 1..20: mol_type = other DNA
aacgctcaaagataaagccc

SEQ ID NO: 8383 - DNA, 20 bp, synthetic construct
  source 1..20: mol_type = other DNA
acaccaaggcaggtgcagtg

SEQ ID NO: 8384 - DNA, 20 bp, synthetic construct
  source 1..20: mol_type = other DNA
tttgagcgtttgcggaactg

SEQ ID NO: 8385 - DNA, 20 bp, synthetic construct
  source 1..20: mol_type = other DNA
tgctctgggcaaggactctg

SEQ ID NO: 8386 - DNA, 20 bp, synthetic construct
  source 1..20: mol_type = other DNA
caccaaggcaggtgcagtgt

SEQ ID NO: 8387 - DNA, 20 bp, synthetic construct
  source 1..20: mol_type = other DNA
gacgctcaatgcctgcccag

SEQ ID NO: 8388 - DNA, 20 bp, synthetic construct
  source 1..20: mol_type = other DNA
tacacctgccaggtccccct

SEQ ID NO: 8389 - DNA, 20 bp, synthetic construct
  source 1..20: mol_type = other DNA
ggagcgggacagggacacca

SEQ ID NO: 8390 - DNA, 20 bp, synthetic construct
  source 1..20: mol_type = other DNA
acgctcaatgcctgcccagg

SEQ ID NO: 8391 - DNA, 20 bp, synthetic construct
  source 1..20: mol_type = other DNA
ccaggtggtggaaatggagc

SEQ ID NO: 8392 - DNA, 20 bp, synthetic construct
  source 1..20: mol_type = other DNA
ggtggaaatggagcgggaca

SEQ ID NO: 8393 - DNA, 20 bp, synthetic construct
  source 1..20: mol_type = other DNA
aggcaggtgcagtgtgggcg

SEQ ID NO: 8394 - DNA, 20 bp, synthetic construct
  source 1..20: mol_type = other DNA
aaggcaggtgcagtgtgggc

SEQ ID NO: 8395 - DNA, 20 bp, synthetic construct
  source 1..20: mol_type = other DNA
tccaggtggtggaaatggag

SEQ ID NO: 8396 - DNA, 20 bp, synthetic construct
  source 1..20: mol_type = other DNA
caaggcaggtgcagtgtggg

SEQ ID NO: 8397 - DNA, 20 bp, synthetic construct
  source 1..20: mol_type = other DNA
ctagagggcgcaatcactcg

SEQ ID NO: 8398 - DNA, 20 bp, synthetic construct
  source 1..20: mol_type = other DNA
aggctccgccccaagcgagg

SEQ ID NO: 8399 - DNA, 20 bp, synthetic construct
  source 1..20: mol_type = other DNA
agaggccagtagaggcattg

SEQ ID NO: 8400 - DNA, 20 bp, synthetic construct
  source 1..20: mol_type = other DNA
gcttccgattggctcttctg

SEQ ID NO: 8401 - DNA, 20 bp, synthetic construct
  source 1..20: mol_type = other DNA
cgagtgattgcgccctctag

SEQ ID NO: 8402 - DNA, 20 bp, synthetic construct
  source 1..20: mol_type = other DNA
tgcctctactggcctctaga

SEQ ID NO: 8403 - DNA, 20 bp, synthetic construct
  source 1..20: mol_type = other DNA
tccgattggctcttctgtgg

SEQ ID NO: 8404 - DNA, 20 bp, synthetic construct
  source 1..20: mol_type = other DNA
gctgtgcacaggcgcaagat

SEQ ID NO: 8405 - DNA, 20 bp, synthetic construct
  source 1..20: mol_type = other DNA
ggcggaagcgtgctgtgcac

SEQ ID NO: 8406 - DNA, 20 bp, synthetic construct
  source 1..20: mol_type = other DNA
gctccgccccaagcgaggcg

SEQ ID NO: 8407 - DNA, 20 bp, synthetic construct
  source 1..20: mol_type = other DNA
tcgaggctccgccccaagcg

SEQ ID NO: 8408 - DNA, 20 bp, synthetic construct
  source 1..20: mol_type = other DNA
gaagagccaatcggaagctc

SEQ ID NO: 8409 - DNA, 20 bp, synthetic construct
  source 1..20: mol_type = other DNA
cgccctctagaggccagtag

SEQ ID NO: 8410 - DNA, 20 bp, synthetic construct
  source 1..20: mol_type = other DNA
cttccgccccgcctcgcttg

SEQ ID NO: 8411 - DNA, 20 bp, synthetic construct
  source 1..20: mol_type = other DNA
aagagccaatcggaagctct

SEQ ID NO: 8412 - DNA, 20 bp, synthetic construct
  source 1..20: mol_type = other DNA
agagaagcgttagacctctg

SEQ ID NO: 8413 - DNA, 20 bp, synthetic construct
  source 1..20: mol_type = other DNA
aggtggccgtctaaactatg

SEQ ID NO: 8414 - DNA, 20 bp, synthetic construct
  source 1..20: mol_type = other DNA
accgctttacaacgatgcag

SEQ ID NO: 8415 - DNA, 20 bp, synthetic construct
  source 1..20: mol_type = other DNA
agactggaagtgctaacagg

SEQ ID NO: 8416 - DNA, 20 bp, synthetic construct
  source 1..20: mol_type = other DNA
cccatgtcaccctcacccat

SEQ ID NO: 8417 - DNA, 20 bp, synthetic construct
  source 1..20: mol_type = other DNA
aaactatgtggtctgatctc

SEQ ID NO: 8418 - DNA, 20 bp, synthetic construct
  source 1..20: mol_type = other DNA
ccgctttacaacgatgcagg

SEQ ID NO: 8419 - DNA, 20 bp, synthetic construct
  source 1..20: mol_type = other DNA
agaggtctaacgcttctctg

SEQ ID NO: 8420 - DNA, 20 bp, synthetic construct
  source 1..20: mol_type = other DNA
tgtgtgaagacagtcctgca

SEQ ID NO: 8421 - DNA, 20 bp, synthetic construct
  source 1..20: mol_type = other DNA
ccaccaagtcaaacttccca

SEQ ID NO: 8422 - DNA, 20 bp, synthetic construct
  source 1..20: mol_type = other DNA
gtcaaacttcccatgggtga

SEQ ID NO: 8423 - DNA, 20 bp, synthetic construct
  source 1..20: mol_type = other DNA
caccaagtcaaacttcccat

SEQ ID NO: 8424 - DNA, 20 bp, synthetic construct
  source 1..20: mol_type = other DNA
ccatgggtgagggtgacatg

SEQ ID NO: 8425 - DNA, 20 bp, synthetic construct
  source 1..20: mol_type = other DNA
ccccatgtcaccctcaccca

SEQ ID NO: 8426 - DNA, 20 bp, synthetic construct
  source 1..20: mol_type = other DNA
ggaagtgctaacaggtggtg

SEQ ID NO: 8427 - DNA, 20 bp, synthetic construct
  source 1..20: mol_type = other DNA
tgttcgttgtccctccagga

SEQ ID NO: 8428 - DNA, 20 bp, synthetic construct
  source 1..20: mol_type = other DNA
gggacaacgaacacaggcgc

SEQ ID NO: 8429 - DNA, 20 bp, synthetic construct
  source 1..20: mol_type = other DNA
gtgttcgttgtccctccagg

SEQ ID NO: 8430 - DNA, 20 bp, synthetic construct
  source 1..20: mol_type = other DNA
cctggagggacaacgaacac

SEQ ID NO: 8431 - DNA, 20 bp, synthetic construct
  source 1..20: mol_type = other DNA
gttcgttgtccctccaggag

SEQ ID NO: 8432 - DNA, 20 bp, synthetic construct
  source 1..20: mol_type = other DNA
agggacaacgaacacaggcg

SEQ ID NO: 8433 - DNA, 20 bp, synthetic construct
  source 1..20: mol_type = other DNA
caacgaacacaggcgcggga

SEQ ID NO: 8434 - DNA, 20 bp, synthetic construct
  source 1..20: mol_type = other DNA
cctgtgttcgttgtccctcc

SEQ ID NO: 8435 - DNA, 20 bp, synthetic construct
  source 1..20: mol_type = other DNA
ggaaatcagtccccacgccc

SEQ ID NO: 8436 - DNA, 20 bp, synthetic construct
  source 1..20: mol_type = other DNA
gccccggaccccctcctgga

SEQ ID NO: 8437 - DNA, 20 bp, synthetic construct
  source 1..20: mol_type = other DNA
gtgacgcgcgagcaggcacg

SEQ ID NO: 8438 - DNA, 20 bp, synthetic construct
  source 1..20: mol_type = other DNA
tgacgcgcgagcaggcacgg

SEQ ID NO: 8439 - DNA, 20 bp, synthetic construct
  source 1..20: mol_type = other DNA
ggtgacgcgcgagcaggcac

SEQ ID NO: 8440 - DNA, 20 bp, synthetic construct
  source 1..20: mol_type = other DNA
acacaggcgcgggacggctt

SEQ ID NO: 8441 - DNA, 20 bp, synthetic construct
  source 1..20: mol_type = other DNA
gcaggcacgggggcaaaggg

SEQ ID NO: 8442 - DNA, 20 bp, synthetic construct
  source 1..20: mol_type = other DNA
aatatgtcaataacaaacca

SEQ ID NO: 8443 - DNA, 20 bp, synthetic construct
  source 1..20: mol_type = other DNA
ttggaaaagaacctctcacc

SEQ ID NO: 8444 - DNA, 20 bp, synthetic construct
  source 1..20: mol_type = other DNA
ctttggctaaagatatcctg

SEQ ID NO: 8445 - DNA, 20 bp, synthetic construct
  source 1..20: mol_type = other DNA
gtctccactattaaaggtac

SEQ ID NO: 8446 - DNA, 20 bp, synthetic construct
  source 1..20: mol_type = other DNA
aatttccaccacaaaaaccc

SEQ ID NO: 8447 - DNA, 20 bp, synthetic construct
  source 1..20: mol_type = other DNA
ttacagctggtttcgtcact

SEQ ID NO: 8448 - DNA, 20 bp, synthetic construct
  source 1..20: mol_type = other DNA
cgaccctgtacctttaatag

SEQ ID NO: 8449 - DNA, 20 bp, synthetic construct
  source 1..20: mol_type = other DNA
tacctttaatagtggagacc

SEQ ID NO: 8450 - DNA, 20 bp, synthetic construct
  source 1..20: mol_type = other DNA
aatagtggagacctggtgag

SEQ ID NO: 8451 - DNA, 20 bp, synthetic construct
  source 1..20: mol_type = other DNA
ctctgctctcaaattacagc

SEQ ID NO: 8452 - DNA, 20 bp, synthetic construct
  source 1..20: mol_type = other DNA
gtttcgtcacttggaagcca

SEQ ID NO: 8453 - DNA, 20 bp, synthetic construct
  source 1..20: mol_type = other DNA
caatatgtcaataacaaacc

SEQ ID NO: 8454 - DNA, 20 bp, synthetic construct
  source 1..20: mol_type = other DNA
ggtttcgtcacttggaagcc

SEQ ID NO: 8455 - DNA, 20 bp, synthetic construct
  source 1..20: mol_type = other DNA
tggaagccagggaacaagtt

SEQ ID NO: 8456 - DNA, 20 bp, synthetic construct
  source 1..20: mol_type = other DNA
caccaggtctccactattaa

SEQ ID NO: 8457 - DNA, 20 bp, synthetic construct
  source 1..20: mol_type = other DNA
aaaaacacacacaagcgcgc

SEQ ID NO: 8458 - DNA, 20 bp, synthetic construct
  source 1..20: mol_type = other DNA
gggtgttactgttgctcccg

SEQ ID NO: 8459 - DNA, 20 bp, synthetic construct
  source 1..20: mol_type = other DNA
caaaaacacacacaagcgcg

SEQ ID NO: 8460 - DNA, 20 bp, synthetic construct
  source 1..20: mol_type = other DNA
acaaagcattgcttaaaaag

SEQ ID NO: 8461 - DNA, 20 bp, synthetic construct
  source 1..20: mol_type = other DNA
ttgcgcgcttacgcacagcg

SEQ ID NO: 8462 - DNA, 20 bp, synthetic construct
  source 1..20: mol_type = other DNA
aaaactagttggacgagtta

SEQ ID NO: 8463 - DNA, 20 bp, synthetic construct
  source 1..20: mol_type = other DNA
ggatctggttctattggcca

SEQ ID NO: 8464 - DNA, 20 bp, synthetic construct
  source 1..20: mol_type = other DNA
caaagcattgcttaaaaagg

SEQ ID NO: 8465 - DNA, 20 bp, synthetic construct
  source 1..20: mol_type = other DNA
tggatctggttctattggcc

SEQ ID NO: 8466 - DNA, 20 bp, synthetic construct
  source 1..20: mol_type = other DNA
taaaactagttggacgagtt

SEQ ID NO: 8467 - DNA, 20 bp, synthetic construct
  source 1..20: mol_type = other DNA
gggggtggggggtactgagg

SEQ ID NO: 8468 - DNA, 20 bp, synthetic construct
  source 1..20: mol_type = other DNA
gttctattggccagggcctc

SEQ ID NO: 8469 - DNA, 20 bp, synthetic construct
  source 1..20: mol_type = other DNA
agggggtggggggtactgag

SEQ ID NO: 8470 - DNA, 20 bp, synthetic construct
  source 1..20: mol_type = other DNA
tactgttgctcccgaggccc

SEQ ID NO: 8471 - DNA, 20 bp, synthetic construct
  source 1..20: mol_type = other DNA
aacaaagcattgcttaaaaa

SEQ ID NO: 8472 - DNA, 20 bp, synthetic construct
  source 1..20: mol_type = other DNA
ggctatccaatagcatcgag

SEQ ID NO: 8473 - DNA, 20 bp, synthetic construct
  source 1..20: mol_type = other DNA
taggtaggtgaaagacctgt

SEQ ID NO: 8474 - DNA, 20 bp, synthetic construct
  source 1..20: mol_type = other DNA
atagccaggagaaccggaag

SEQ ID NO: 8475 - DNA, 20 bp, synthetic construct
  source 1..20: mol_type = other DNA
aggtaggtgaaagacctgtc

SEQ ID NO: 8476 - DNA, 20 bp, synthetic construct
  source 1..20: mol_type = other DNA
gaggagcatccccggaagtg

SEQ ID NO: 8477 - DNA, 20 bp, synthetic construct
  source 1..20: mol_type = other DNA
agcatcgagaggagcatccc

SEQ ID NO: 8478 - DNA, 20 bp, synthetic construct
  source 1..20: mol_type = other DNA
gtagcggcgcgtgacccgac

SEQ ID NO: 8479 - DNA, 20 bp, synthetic construct
  source 1..20: mol_type = other DNA
tattggatagccaggagaac

SEQ ID NO: 8480 - DNA, 20 bp, synthetic construct
  source 1..20: mol_type = other DNA
ccccggaagtgaggcagcgg

SEQ ID NO: 8481 - DNA, 20 bp, synthetic construct
  source 1..20: mol_type = other DNA
cctccgctgcctcacttccg

SEQ ID NO: 8482 - DNA, 20 bp, synthetic construct
  source 1..20: mol_type = other DNA
ctggaacttctcgtgtttgt

SEQ ID NO: 8483 - DNA, 20 bp, synthetic construct
  source 1..20: mol_type = other DNA
gtgtttgtgggagctgaggt

SEQ ID NO: 8484 - DNA, 20 bp, synthetic construct
  source 1..20: mol_type = other DNA
gtctcagcaggaggttccta

SEQ ID NO: 8485 - DNA, 20 bp, synthetic construct
  source 1..20: mol_type = other DNA
catccccggaagtgaggcag

SEQ ID NO: 8486 - DNA, 20 bp, synthetic construct
  source 1..20: mol_type = other DNA
ttgtgggagctgaggtaggt

SEQ ID NO: 8487 - DNA, 20 bp, synthetic construct
  source 1..20: mol_type = other DNA
taggggcggtgctgcagacg

SEQ ID NO: 8488 - DNA, 20 bp, synthetic construct
  source 1..20: mol_type = other DNA
tgcagcaccgcccctagccg

SEQ ID NO: 8489 - DNA, 20 bp, synthetic construct
  source 1..20: mol_type = other DNA
gagcccgggcttaaaggcgc

SEQ ID NO: 8490 - DNA, 20 bp, synthetic construct
  source 1..20: mol_type = other DNA
gctgcagacgcggcccagag

SEQ ID NO: 8491 - DNA, 20 bp, synthetic construct
  source 1..20: mol_type = other DNA
cggcccagagcggctcgcgg

SEQ ID NO: 8492 - DNA, 20 bp, synthetic construct
  source 1..20: mol_type = other DNA
acgcggcccagagcggctcg

SEQ ID NO: 8493 - DNA, 20 bp, synthetic construct
  source 1..20: mol_type = other DNA
cggtccgagagcgcgagccc

SEQ ID NO: 8494 - DNA, 20 bp, synthetic construct
  source 1..20: mol_type = other DNA
gcaccgcccctagccgcggc

SEQ ID NO: 8495 - DNA, 20 bp, synthetic construct
  source 1..20: mol_type = other DNA
ggggcggcggcaaggcgcgc

SEQ ID NO: 8496 - DNA, 20 bp, synthetic construct
  source 1..20: mol_type = other DNA
gccccctctccgcccgcggg

SEQ ID NO: 8497 - DNA, 20 bp, synthetic construct
  source 1..20: mol_type = other DNA
ccgaccccagcccagcccgc

SEQ ID NO: 8498 - DNA, 20 bp, synthetic construct
  source 1..20: mol_type = other DNA
gcgggtgcggggctgcggag

SEQ ID NO: 8499 - DNA, 20 bp, synthetic construct
  source 1..20: mol_type = other DNA
gccgcccgcgggcggagagg

SEQ ID NO: 8500 - DNA, 20 bp, synthetic construct
  source 1..20: mol_type = other DNA
cccgccccctctccgcccgc

SEQ ID NO: 8501 - DNA, 20 bp, synthetic construct
  source 1..20: mol_type = other DNA
ccccgccccctctccgcccg

SEQ ID NO: 8502 - DNA, 20 bp, synthetic construct
  source 1..20: mol_type = other DNA
tatataaaagaagcctccgg

SEQ ID NO: 8503 - DNA, 20 bp, synthetic construct
  source 1..20: mol_type = other DNA
aaatatataaaagaagcctc

SEQ ID NO: 8504 - DNA, 20 bp, synthetic construct
  source 1..20: mol_type = other DNA
agggtggtccaaaccaccgg

SEQ ID NO: 8505 - DNA, 20 bp, synthetic construct
  source 1..20: mol_type = other DNA
gggaagaaagtgtctgggga

SEQ ID NO: 8506 - DNA, 20 bp, synthetic construct
  source 1..20: mol_type = other DNA
aaaagggaagaaagtgtctg

SEQ ID NO: 8507 - DNA, 20 bp, synthetic construct
  source 1..20: mol_type = other DNA
tttagggtggtccaaaccac

SEQ ID NO: 8508 - DNA, 20 bp, synthetic construct
  source 1..20: mol_type = other DNA
ttggaccaccctaaaagaaa

SEQ ID NO: 8509 - DNA, 20 bp, synthetic construct
  source 1..20: mol_type = other DNA
gttagggttccgggaagctg

SEQ ID NO: 8510 - DNA, 20 bp, synthetic construct
  source 1..20: mol_type = other DNA
ttagggttccgggaagctga

SEQ ID NO: 8511 - DNA, 20 bp, synthetic construct
  source 1..20: mol_type = other DNA
gggttccgggaagctgaggg

SEQ ID NO: 8512 - DNA, 20 bp, synthetic construct
  source 1..20: mol_type = other DNA
cagctaacctgcaaatttaa

SEQ ID NO: 8513 - DNA, 20 bp, synthetic construct
  source 1..20: mol_type = other DNA
ggttccgggaagctgaggga

SEQ ID NO: 8514 - DNA, 20 bp, synthetic construct
  source 1..20: mol_type = other DNA
aaaagaagcctccggtggtt

SEQ ID NO: 8515 - DNA, 20 bp, synthetic construct
  source 1..20: mol_type = other DNA
gaaaagggaagaaagtgtct

SEQ ID NO: 8516 - DNA, 20 bp, synthetic construct
  source 1..20: mol_type = other DNA
ctgcaaatttaaaggttagc

SEQ ID NO: 8517 - DNA, 20 bp, synthetic construct
  source 1..20: mol_type = other DNA
aggatcccccaggctcaggg

SEQ ID NO: 8518 - DNA, 20 bp, synthetic construct
  source 1..20: mol_type = other DNA
tgggagaacctggacagccg

SEQ ID NO: 8519 - DNA, 20 bp, synthetic construct
  source 1..20: mol_type = other DNA
cagggcagcagggctcacca

SEQ ID NO: 8520 - DNA, 20 bp, synthetic construct
  source 1..20: mol_type = other DNA
acggctgtccaggttctccc

SEQ ID NO: 8521 - DNA, 20 bp, synthetic construct
  source 1..20: mol_type = other DNA
attccgtcctgcttgcagag

SEQ ID NO: 8522 - DNA, 20 bp, synthetic construct
  source 1..20: mol_type = other DNA
aggttctcccaggatccccc

SEQ ID NO: 8523 - DNA, 20 bp, synthetic construct
  source 1..20: mol_type = other DNA
tccaggccctctctgcaagc

SEQ ID NO: 8524 - DNA, 20 bp, synthetic construct
  source 1..20: mol_type = other DNA
ggccctctctgcaagcagga

SEQ ID NO: 8525 - DNA, 20 bp, synthetic construct
  source 1..20: mol_type = other DNA
gggcgccgccctgagcctgg

SEQ ID NO: 8526 - DNA, 20 bp, synthetic construct
  source 1..20: mol_type = other DNA
tcccaggatcccccaggctc

SEQ ID NO: 8527 - DNA, 20 bp, synthetic construct
  source 1..20: mol_type = other DNA
agggctcaccacggctgtcc

SEQ ID NO: 8528 - DNA, 20 bp, synthetic construct
  source 1..20: mol_type = other DNA
cgggcgccgccctgagcctg

SEQ ID NO: 8529 - DNA, 20 bp, synthetic construct
  source 1..20: mol_type = other DNA
tgtgtccagaagcaattcag

SEQ ID NO: 8530 - DNA, 20 bp, synthetic construct
  source 1..20: mol_type = other DNA
aattgcttctggacacacaa

SEQ ID NO: 8531 - DNA, 20 bp, synthetic construct
  source 1..20: mol_type = other DNA
cccaggatcccccaggctca

SEQ ID NO: 8532 - DNA, 20 bp, synthetic construct
  source 1..20: mol_type = other DNA
gcgagatcatcccctagcgt

SEQ ID NO: 8533 - DNA, 20 bp, synthetic construct
  source 1..20: mol_type = other DNA
gcaattgcacaccaacgcta

SEQ ID NO: 8534 - DNA, 20 bp, synthetic construct
  source 1..20: mol_type = other DNA
caattgcacaccaacgctag

SEQ ID NO: 8535 - DNA, 20 bp, synthetic construct
  source 1..20: mol_type = other DNA
gcgaacgcgagaacagtcaa

SEQ ID NO: 8536 - DNA, 20 bp, synthetic construct
  source 1..20: mol_type = other DNA
tactcctgccgggtcaccac

SEQ ID NO: 8537 - DNA, 20 bp, synthetic construct
  source 1..20: mol_type = other DNA
tgccggaacacgtgcgcctg

SEQ ID NO: 8538 - DNA, 20 bp, synthetic construct
  source 1..20: mol_type = other DNA
tgacccggcaggagtagcgt

SEQ ID NO: 8539 - DNA, 20 bp, synthetic construct
  source 1..20: mol_type = other DNA
cgttggtgtgcaattgcgtg

SEQ ID NO: 8540 - DNA, 20 bp, synthetic construct
  source 1..20: mol_type = other DNA
actgttctcgcgttcgcgga

SEQ ID NO: 8541 - DNA, 20 bp, synthetic construct
  source 1..20: mol_type = other DNA
cgaacgcgagaacagtcaag

SEQ ID NO: 8542 - DNA, 20 bp, synthetic construct
  source 1..20: mol_type = other DNA
caggcgcacgtgttccggca

SEQ ID NO: 8543 - DNA, 20 bp, synthetic construct
  source 1..20: mol_type = other DNA
acaggcgcacgtgttccggc

SEQ ID NO: 8544 - DNA, 20 bp, synthetic construct
  source 1..20: mol_type = other DNA
cacgtgcgcctgtggtgacc

SEQ ID NO: 8545 - DNA, 20 bp, synthetic construct
  source 1..20: mol_type = other DNA
ttagggcggagctgggtcac

SEQ ID NO: 8546 - DNA, 20 bp, synthetic construct
  source 1..20: mol_type = other DNA
gcttgggatggggcttaggg

SEQ ID NO: 8547 - DNA, 20 bp, synthetic construct
  source 1..20: mol_type = other DNA
ggggtgggtctgttcgtggg

SEQ ID NO: 8548 - DNA, 20 bp, synthetic construct
  source 1..20: mol_type = other DNA
ggtccctccgaaagctgaga

SEQ ID NO: 8549 - DNA, 20 bp, synthetic construct
  source 1..20: mol_type = other DNA
gggtccctccgaaagctgag

SEQ ID NO: 8550 - DNA, 20 bp, synthetic construct
  source 1..20: mol_type = other DNA
cgcgcgacgcgtcccgcctg

SEQ ID NO: 8551 - DNA, 20 bp, synthetic construct
  source 1..20: mol_type = other DNA
cgaaagctgagagggagaag

SEQ ID NO: 8552 - DNA, 20 bp, synthetic construct
  source 1..20: mol_type = other DNA
cgcgacgcgtcccgcctggg

SEQ ID NO: 8553 - DNA, 20 bp, synthetic construct
  source 1..20: mol_type = other DNA
ccaggcgggacgcgtcgcgc

SEQ ID NO: 8554 - DNA, 20 bp, synthetic construct
  source 1..20: mol_type = other DNA
gcgcgacgcgtcccgcctgg

SEQ ID NO: 8555 - DNA, 20 bp, synthetic construct
  source 1..20: mol_type = other DNA
gcagagcggcagcggcgtcg

SEQ ID NO: 8556 - DNA, 20 bp, synthetic construct
  source 1..20: mol_type = other DNA
ccgctctgcagccccccagg

SEQ ID NO: 8557 - DNA, 20 bp, synthetic construct
  source 1..20: mol_type = other DNA
agagcggcagcggcgtcggg

SEQ ID NO: 8558 - DNA, 20 bp, synthetic construct
  source 1..20: mol_type = other DNA
cccaggcgggacgcgtcgcg

SEQ ID NO: 8559 - DNA, 20 bp, synthetic construct
  source 1..20: mol_type = other DNA
ccgcctggggggctgcagag

SEQ ID NO: 8560 - DNA, 20 bp, synthetic construct
  source 1..20: mol_type = other DNA
cagagcggcagcggcgtcgg

SEQ ID NO: 8561 - DNA, 20 bp, synthetic construct
  source 1..20: mol_type = other DNA
tccgaaagctgagagggaga

SEQ ID NO: 8562 - DNA, 20 bp, synthetic construct
  source 1..20: mol_type = other DNA
agagaggaaacgccaatcca

SEQ ID NO: 8563 - DNA, 20 bp, synthetic construct
  source 1..20: mol_type = other DNA
gaaaaggtcaagcctagcaa

SEQ ID NO: 8564 - DNA, 20 bp, synthetic construct
  source 1..20: mol_type = other DNA
gaggaaacgccaatccaagg

SEQ ID NO: 8565 - DNA, 20 bp, synthetic construct
  source 1..20: mol_type = other DNA
agcccacgcccacccgagga

SEQ ID NO: 8566 - DNA, 20 bp, synthetic construct
  source 1..20: mol_type = other DNA
ggaaagcccacgcccacccg

SEQ ID NO: 8567 - DNA, 20 bp, synthetic construct
  source 1..20: mol_type = other DNA
tgggttgggcttacctgctg

SEQ ID NO: 8568 - DNA, 20 bp, synthetic construct
  source 1..20: mol_type = other DNA
agaaaaggtcaagcctagca

SEQ ID NO: 8569 - DNA, 20 bp, synthetic construct
  source 1..20: mol_type = other DNA
ggtgggttgggcttacctgc

SEQ ID NO: 8570 - DNA, 20 bp, synthetic construct
  source 1..20: mol_type = other DNA
agcccaacccaccccaccca

SEQ ID NO: 8571 - DNA, 20 bp, synthetic construct
  source 1..20: mol_type = other DNA
gggttggcccttcctcgggt

SEQ ID NO: 8572 - DNA, 20 bp, synthetic construct
  source 1..20: mol_type = other DNA
gcccacgcccacccgaggaa

SEQ ID NO: 8573 - DNA, 20 bp, synthetic construct
  source 1..20: mol_type = other DNA
ttgggcttacctgctggggt

SEQ ID NO: 8574 - DNA, 20 bp, synthetic construct
  source 1..20: mol_type = other DNA
aagcccaacccaccccaccc

SEQ ID NO: 8575 - DNA, 20 bp, synthetic construct
  source 1..20: mol_type = other DNA
gaaaacacccagcccaccca

SEQ ID NO: 8576 - DNA, 20 bp, synthetic construct
  source 1..20: mol_type = other DNA
aaaacacccagcccacccaa

SEQ ID NO: 8577 - DNA, 20 bp, synthetic construct
  source 1..20: mol_type = other DNA
ggaggagctggcgagactcg

SEQ ID NO: 8578 - DNA, 20 bp, synthetic construct
  source 1..20: mol_type = other DNA
ctcggattctcccttccccg

SEQ ID NO: 8579 - DNA, 20 bp, synthetic construct
  source 1..20: mol_type = other DNA
ctcaggtgagggagaccgcg

SEQ ID NO: 8580 - DNA, 20 bp, synthetic construct
  source 1..20: mol_type = other DNA
tcccctcctccatcccctgg

SEQ ID NO: 8581 - DNA, 20 bp, synthetic construct
  source 1..20: mol_type = other DNA
ggggaggctccagcccggag

SEQ ID NO: 8582 - DNA, 20 bp, synthetic construct
  source 1..20: mol_type = other DNA
tcccctggcggaggcccgcg

SEQ ID NO: 8583 - DNA, 20 bp, synthetic construct
  source 1..20: mol_type = other DNA
gccccgcgggcctccgccag

SEQ ID NO: 8584 - DNA, 20 bp, synthetic construct
  source 1..20: mol_type = other DNA
gagtctcgccagctcctccc

SEQ ID NO: 8585 - DNA, 20 bp, synthetic construct
  source 1..20: mol_type = other DNA
gaggggaggctccagcccgg

SEQ ID NO: 8586 - DNA, 20 bp, synthetic construct
  source 1..20: mol_type = other DNA
gggcctccgccaggggatgg

SEQ ID NO: 8587 - DNA, 20 bp, synthetic construct
  source 1..20: mol_type = other DNA
aggggaggctccagcccgga

SEQ ID NO: 8588 - DNA, 20 bp, synthetic construct
  source 1..20: mol_type = other DNA
cctcctccatcccctggcgg

SEQ ID NO: 8589 - DNA, 20 bp, synthetic construct
  source 1..20: mol_type = other DNA
cgcgggcctccgccagggga

SEQ ID NO: 8590 - DNA, 20 bp, synthetic construct
  source 1..20: mol_type = other DNA
gcctcccctcctccatcccc

SEQ ID NO: 8591 - DNA, 20 bp, synthetic construct
  source 1..20: mol_type = other DNA
gggaggctccagcccggagg

SEQ ID NO: 8592 - DNA, 20 bp, synthetic construct
  source 1..20: mol_type = other DNA
ggtcactgtgactcaccctg

SEQ ID NO: 8593 - DNA, 20 bp, synthetic construct
  source 1..20: mol_type = other DNA
ttgcttcttagtctctcccg

SEQ ID NO: 8594 - DNA, 20 bp, synthetic construct
  source 1..20: mol_type = other DNA
gacaagcgtcccgaaagccc

SEQ ID NO: 8595 - DNA, 20 bp, synthetic construct
  source 1..20: mol_type = other DNA
attgcttcttagtctctccc

SEQ ID NO: 8596 - DNA, 20 bp, synthetic construct
  source 1..20: mol_type = other DNA
cctgggccacatgaccacct

SEQ ID NO: 8597 - DNA, 20 bp, synthetic construct
  source 1..20: mol_type = other DNA
gagggtgggagaaagcgcgt

SEQ ID NO: 8598 - DNA, 20 bp, synthetic construct
  source 1..20: mol_type = other DNA
gtcactgtgactcaccctga

SEQ ID NO: 8599 - DNA, 20 bp, synthetic construct
  source 1..20: mol_type = other DNA
aacgtccccgccctgtgatg

SEQ ID NO: 8600 - DNA, 20 bp, synthetic construct
  source 1..20: mol_type = other DNA
ccaccctcgggccactgaga

SEQ ID NO: 8601 - DNA, 20 bp, synthetic construct
  source 1..20: mol_type = other DNA
cggaatctctcggtcccagg

SEQ ID NO: 8602 - DNA, 20 bp, synthetic construct
  source 1..20: mol_type = other DNA
acaagcgtcccgaaagcccc

SEQ ID NO: 8603 - DNA, 20 bp, synthetic construct
  source 1..20: mol_type = other DNA
ctcggtcccaggtggtcatg

SEQ ID NO: 8604 - DNA, 20 bp, synthetic construct
  source 1..20: mol_type = other DNA
cgagggtgggagaaagcgcg

SEQ ID NO: 8605 - DNA, 20 bp, synthetic construct
  source 1..20: mol_type = other DNA
acgcgctttctcccaccctc

SEQ ID NO: 8606 - DNA, 20 bp, synthetic construct
  source 1..20: mol_type = other DNA
ggtgggagaaagcgcgtggg

SEQ ID NO: 8607 - DNA, 20 bp, synthetic construct
  source 1..20: mol_type = other DNA
ggaaatgtctctacgctgcg

SEQ ID NO: 8608 - DNA, 20 bp, synthetic construct
  source 1..20: mol_type = other DNA
ttcgccccgccgctcacccg

SEQ ID NO: 8609 - DNA, 20 bp, synthetic construct
  source 1..20: mol_type = other DNA
gaggaaatgtctctacgctg

SEQ ID NO: 8610 - DNA, 20 bp, synthetic construct
  source 1..20: mol_type = other DNA
gcactgcgctagtcctaaag

SEQ ID NO: 8611 - DNA, 20 bp, synthetic construct
  source 1..20: mol_type = other DNA
gggatgcagcccgcaccctg

SEQ ID NO: 8612 - DNA, 20 bp, synthetic construct
  source 1..20: mol_type = other DNA
gcactcatgacgcaatacgc

SEQ ID NO: 8613 - DNA, 20 bp, synthetic construct
  source 1..20: mol_type = other DNA
gttgagggatcgctaactcc

SEQ ID NO: 8614 - DNA, 20 bp, synthetic construct
  source 1..20: mol_type = other DNA
aaggctaaagcagccaatcg

SEQ ID NO: 8615 - DNA, 20 bp, synthetic construct
  source 1..20: mol_type = other DNA
gctaactcccgggaaaggac

SEQ ID NO: 8616 - DNA, 20 bp, synthetic construct
  source 1..20: mol_type = other DNA
ttaggactagcgcagtgcag

SEQ ID NO: 8617 - DNA, 20 bp, synthetic construct
  source 1..20: mol_type = other DNA
tttaggactagcgcagtgca

SEQ ID NO: 8618 - DNA, 20 bp, synthetic construct
  source 1..20: mol_type = other DNA
acgtacttgtatcgcgtaag

SEQ ID NO: 8619 - DNA, 20 bp, synthetic construct
  source 1..20: mol_type = other DNA
ggatcgctaactcccgggaa

SEQ ID NO: 8620 - DNA, 20 bp, synthetic construct
  source 1..20: mol_type = other DNA
atttcgacctgtcctttccc

SEQ ID NO: 8621 - DNA, 20 bp, synthetic construct
  source 1..20: mol_type = other DNA
ttgagggatcgctaactccc

SEQ ID NO: 8622 - DNA, 20 bp, synthetic construct
  source 1..20: mol_type = other DNA
cctgagcctgacctataagg

SEQ ID NO: 8623 - DNA, 20 bp, synthetic construct
  source 1..20: mol_type = other DNA
gtgaatgatggtgtgctcca

SEQ ID NO: 8624 - DNA, 20 bp, synthetic construct
  source 1..20: mol_type = other DNA
tggccagttaatgagtgacc

SEQ ID NO: 8625 - DNA, 20 bp, synthetic construct
  source 1..20: mol_type = other DNA
ctagcacctccttataggtc

SEQ ID NO: 8626 - DNA, 20 bp, synthetic construct
  source 1..20: mol_type = other DNA
actgtgttcccatagactct

SEQ ID NO: 8627 - DNA, 20 bp, synthetic construct
  source 1..20: mol_type = other DNA
gctggctctctgacaagccg

SEQ ID NO: 8628 - DNA, 20 bp, synthetic construct
  source 1..20: mol_type = other DNA
cccttcctaggaaccagccc

SEQ ID NO: 8629 - DNA, 20 bp, synthetic construct
  source 1..20: mol_type = other DNA
actcattaactggccagctg

SEQ ID NO: 8630 - DNA, 20 bp, synthetic construct
  source 1..20: mol_type = other DNA
ggggctggttcctaggaagg

SEQ ID NO: 8631 - DNA, 20 bp, synthetic construct
  source 1..20: mol_type = other DNA
attaactggccagctggggt

SEQ ID NO: 8632 - DNA, 20 bp, synthetic construct
  source 1..20: mol_type = other DNA
cggggctggttcctaggaag

SEQ ID NO: 8633 - DNA, 20 bp, synthetic construct
  source 1..20: mol_type = other DNA
ttaactggccagctggggtg

SEQ ID NO: 8634 - DNA, 20 bp, synthetic construct
  source 1..20: mol_type = other DNA
gttcctaggaagggggttgg

SEQ ID NO: 8635 - DNA, 20 bp, synthetic construct
  source 1..20: mol_type = other DNA
gctctctgacaagccggggc

SEQ ID NO: 8636 - DNA, 20 bp, synthetic construct
  source 1..20: mol_type = other DNA
taggtcaggctcaggagtcc

SEQ ID NO: 8637 - DNA, 20 bp, synthetic construct
  source 1..20: mol_type = other DNA
aacaatgtgaccgtatcgca

SEQ ID NO: 8638 - DNA, 20 bp, synthetic construct
  source 1..20: mol_type = other DNA
gtagtaggttgtaactgctg

SEQ ID NO: 8639 - DNA, 20 bp, synthetic construct
  source 1..20: mol_type = other DNA
tgcaccctagaattgacagg

SEQ ID NO: 8640 - DNA, 20 bp, synthetic construct
  source 1..20: mol_type = other DNA
acattgttattccccgcacc

SEQ ID NO: 8641 - DNA, 20 bp, synthetic construct
  source 1..20: mol_type = other DNA
cgcggcagaccaagtggcac

SEQ ID NO: 8642 - DNA, 20 bp, synthetic construct
  source 1..20: mol_type = other DNA
agcatctcgtccgtgcgata

SEQ ID NO: 8643 - DNA, 20 bp, synthetic construct
  source 1..20: mol_type = other DNA
accctagaattgacaggtgg

SEQ ID NO: 8644 - DNA, 20 bp, synthetic construct
  source 1..20: mol_type = other DNA
gcgagctgtctctcttccgg

SEQ ID NO: 8645 - DNA, 20 bp, synthetic construct
  source 1..20: mol_type = other DNA
cgagctgtctctcttccggg

SEQ ID NO: 8646 - DNA, 20 bp, synthetic construct
  source 1..20: mol_type = other DNA
ccggaagagagacagctcgc

SEQ ID NO: 8647 - DNA, 20 bp, synthetic construct
  source 1..20: mol_type = other DNA
cccggctgaggagcgcagcg

SEQ ID NO: 8648 - DNA, 20 bp, synthetic construct
  source 1..20: mol_type = other DNA
ggcgagctgtctctcttccg

SEQ ID NO: 8649 - DNA, 20 bp, synthetic construct
  source 1..20: mol_type = other DNA
gcgcagcgcggcagaccaag

SEQ ID NO: 8650 - DNA, 20 bp, synthetic construct
  source 1..20: mol_type = other DNA
tactgtccacccccgccccc

SEQ ID NO: 8651 - DNA, 20 bp, synthetic construct
  source 1..20: mol_type = other DNA
ttattccccgcacccggctg

SEQ ID NO: 8652 - DNA, 20 bp, synthetic construct
  source 1..20: mol_type = other DNA
acagagcaagactatggtgc

SEQ ID NO: 8653 - DNA, 20 bp, synthetic construct
  source 1..20: mol_type = other DNA
gagcaagactatggtgctgg

SEQ ID NO: 8654 - DNA, 20 bp, synthetic construct
  source 1..20: mol_type = other DNA
agaggcagatcttcccagga

SEQ ID NO: 8655 - DNA, 20 bp, synthetic construct
  source 1..20: mol_type = other DNA
gtgctggtggtgtcattaca

SEQ ID NO: 8656 - DNA, 20 bp, synthetic construct
  source 1..20: mol_type = other DNA
tcttcttccggctctcacag

SEQ ID NO: 8657 - DNA, 20 bp, synthetic construct
  source 1..20: mol_type = other DNA
aagaagaggcagatcttccc

SEQ ID NO: 8658 - DNA, 20 bp, synthetic construct
  source 1..20: mol_type = other DNA
ttggcctggtaaattaaggg

SEQ ID NO: 8659 - DNA, 20 bp, synthetic construct
  source 1..20: mol_type = other DNA
tggcctggtaaattaaggga

SEQ ID NO: 8660 - DNA, 20 bp, synthetic construct
  source 1..20: mol_type = other DNA
ggaaggcagcaaaggccagt

SEQ ID NO: 8661 - DNA, 20 bp, synthetic construct
  source 1..20: mol_type = other DNA
taatttaccaggccaagtga

SEQ ID NO: 8662 - DNA, 20 bp, synthetic construct
  source 1..20: mol_type = other DNA
acatccaccctcacttggcc

SEQ ID NO: 8663 - DNA, 20 bp, synthetic construct
  source 1..20: mol_type = other DNA
tcttcccaggaaggcagcaa

SEQ ID NO: 8664 - DNA, 20 bp, synthetic construct
  source 1..20: mol_type = other DNA
aggaaggcagcaaaggccag

SEQ ID NO: 8665 - DNA, 20 bp, synthetic construct
  source 1..20: mol_type = other DNA
tttaccaggccaagtgaggg

SEQ ID NO: 8666 - DNA, 20 bp, synthetic construct
  source 1..20: mol_type = other DNA
ttaatttaccaggccaagtg

SEQ ID NO: 8667 - DNA, 20 bp, synthetic construct
  source 1..20: mol_type = other DNA
cgtgattggcacaccaactg

SEQ ID NO: 8668 - DNA, 20 bp, synthetic construct
  source 1..20: mol_type = other DNA
gaaagatgaattaccccagt

SEQ ID NO: 8669 - DNA, 20 bp, synthetic construct
  source 1..20: mol_type = other DNA
tggagggaaagtctactgct

SEQ ID NO: 8670 - DNA, 20 bp, synthetic construct
  source 1..20: mol_type = other DNA
ctggagggaaagtctactgc

SEQ ID NO: 8671 - DNA, 20 bp, synthetic construct
  source 1..20: mol_type = other DNA
acgtgattggcacaccaact

SEQ ID NO: 8672 - DNA, 20 bp, synthetic construct
  source 1..20: mol_type = other DNA
gctaatagaatctgctacaa

SEQ ID NO: 8673 - DNA, 20 bp, synthetic construct
  source 1..20: mol_type = other DNA
ccccttctgcccaatgacac

SEQ ID NO: 8674 - DNA, 20 bp, synthetic construct
  source 1..20: mol_type = other DNA
gggaaagtctactgctgggt

SEQ ID NO: 8675 - DNA, 20 bp, synthetic construct
  source 1..20: mol_type = other DNA
taagagagaacccctctccc

SEQ ID NO: 8676 - DNA, 20 bp, synthetic construct
  source 1..20: mol_type = other DNA
cttctgcccaatgacactgg

SEQ ID NO: 8677 - DNA, 20 bp, synthetic construct
  source 1..20: mol_type = other DNA
ggaaagtctactgctgggta

SEQ ID NO: 8678 - DNA, 20 bp, synthetic construct
  source 1..20: mol_type = other DNA
ttctattagcttcaggtaac

SEQ ID NO: 8679 - DNA, 20 bp, synthetic construct
  source 1..20: mol_type = other DNA
gtctactgctgggtaggggt

SEQ ID NO: 8680 - DNA, 20 bp, synthetic construct
  source 1..20: mol_type = other DNA
acgttcacttcctgggagag

SEQ ID NO: 8681 - DNA, 20 bp, synthetic construct
  source 1..20: mol_type = other DNA
cacgttcacttcctgggaga

SEQ ID NO: 8682 - DNA, 20 bp, synthetic construct
  source 1..20: mol_type = other DNA
gccttggccacagaacgcag

SEQ ID NO: 8683 - DNA, 20 bp, synthetic construct
  source 1..20: mol_type = other DNA
tggcatgaaatcagcagcag

SEQ ID NO: 8684 - DNA, 20 bp, synthetic construct
  source 1..20: mol_type = other DNA
gcctggcctggtggtccgat

SEQ ID NO: 8685 - DNA, 20 bp, synthetic construct
  source 1..20: mol_type = other DNA
gccacagaacgcagaggccg

SEQ ID NO: 8686 - DNA, 20 bp, synthetic construct
  source 1..20: mol_type = other DNA
gtggtccgatgggaagcccg

SEQ ID NO: 8687 - DNA, 20 bp, synthetic construct
  source 1..20: mol_type = other DNA
ccagctgcggccagatgcca

SEQ ID NO: 8688 - DNA, 20 bp, synthetic construct
  source 1..20: mol_type = other DNA
cagaggccaagttacagcgc

SEQ ID NO: 8689 - DNA, 20 bp, synthetic construct
  source 1..20: mol_type = other DNA
gttctgtggccaaggctcag

SEQ ID NO: 8690 - DNA, 20 bp, synthetic construct
  source 1..20: mol_type = other DNA
gccacggcctctgcgttctg

SEQ ID NO: 8691 - DNA, 20 bp, synthetic construct
  source 1..20: mol_type = other DNA
cacgcactgcagcccagctg

SEQ ID NO: 8692 - DNA, 20 bp, synthetic construct
  source 1..20: mol_type = other DNA
tgcgtgcgcgcctggcctgg

SEQ ID NO: 8693 - DNA, 20 bp, synthetic construct
  source 1..20: mol_type = other DNA
gacccgcagcgcgcctgcgc

SEQ ID NO: 8694 - DNA, 20 bp, synthetic construct
  source 1..20: mol_type = other DNA
gcccggggcggggcagccgc

SEQ ID NO: 8695 - DNA, 20 bp, synthetic construct
  source 1..20: mol_type = other DNA
gacgccccgcccccgccccg

SEQ ID NO: 8696 - DNA, 20 bp, synthetic construct
  source 1..20: mol_type = other DNA
ccccgcggctgccccgcccc

SEQ ID NO: 8697 - DNA, 20 bp, synthetic construct
  source 1..20: mol_type = other DNA
gttgacgtgttcgttggctg

SEQ ID NO: 8698 - DNA, 20 bp, synthetic construct
  source 1..20: mol_type = other DNA
gcgcgccggtctctctcagg

SEQ ID NO: 8699 - DNA, 20 bp, synthetic construct
  source 1..20: mol_type = other DNA
catgcgcactcgttcgcgca

SEQ ID NO: 8700 - DNA, 20 bp, synthetic construct
  source 1..20: mol_type = other DNA
cttaaggagcatgcgtaaag

SEQ ID NO: 8701 - DNA, 20 bp, synthetic construct
  source 1..20: mol_type = other DNA
cgagcggttgacgtgttcgt

SEQ ID NO: 8702 - DNA, 20 bp, synthetic construct
  source 1..20: mol_type = other DNA
gggcttggaggctgcgcgag

SEQ ID NO: 8703 - DNA, 20 bp, synthetic construct
  source 1..20: mol_type = other DNA
cgcgccggtctctctcagga

SEQ ID NO: 8704 - DNA, 20 bp, synthetic construct
  source 1..20: mol_type = other DNA
ggaggcggcggagctctggg

SEQ ID NO: 8705 - DNA, 20 bp, synthetic construct
  source 1..20: mol_type = other DNA
gaggcggcggagctctggga

SEQ ID NO: 8706 - DNA, 20 bp, synthetic construct
  source 1..20: mol_type = other DNA
ttcgttggctgcggaggcgg

SEQ ID NO: 8707 - DNA, 20 bp, synthetic construct
  source 1..20: mol_type = other DNA
aggcggcggagctctgggag

SEQ ID NO: 8708 - DNA, 20 bp, synthetic construct
  source 1..20: mol_type = other DNA
gtgttcgttggctgcggagg

SEQ ID NO: 8709 - DNA, 20 bp, synthetic construct
  source 1..20: mol_type = other DNA
tgcggaggcggcggagctct

SEQ ID NO: 8710 - DNA, 20 bp, synthetic construct
  source 1..20: mol_type = other DNA
gacgtgttcgttggctgcgg

SEQ ID NO: 8711 - DNA, 20 bp, synthetic construct
  source 1..20: mol_type = other DNA
tctgggaggggaaggagcgg

SEQ ID NO: 8712 - DNA, 20 bp, synthetic construct
  source 1..20: mol_type = other DNA
caggcgacggaaggttgcag

SEQ ID NO: 8713 - DNA, 20 bp, synthetic construct
  source 1..20: mol_type = other DNA
gagcagtgcgtccttctggg

SEQ ID NO: 8714 - DNA, 20 bp, synthetic construct
  source 1..20: mol_type = other DNA
agagcagtgcgtccttctgg

SEQ ID NO: 8715 - DNA, 20 bp, synthetic construct
  source 1..20: mol_type = other DNA
gcagtggggcgccgaccaag

SEQ ID NO: 8716 - DNA, 20 bp, synthetic construct
  source 1..20: mol_type = other DNA
cagagcagtgcgtccttctg

SEQ ID NO: 8717 - DNA, 20 bp, synthetic construct
  source 1..20: mol_type = other DNA
ggaaggttgcagaggcagtg

SEQ ID NO: 8718 - DNA, 20 bp, synthetic construct
  source 1..20: mol_type = other DNA
tggctcagcttccacttggt

SEQ ID NO: 8719 - DNA, 20 bp, synthetic construct
  source 1..20: mol_type = other DNA
cggaaggttgcagaggcagt

SEQ ID NO: 8720 - DNA, 20 bp, synthetic construct
  source 1..20: mol_type = other DNA
tggccccgagcccaaaggct

SEQ ID NO: 8721 - DNA, 20 bp, synthetic construct
  source 1..20: mol_type = other DNA
gcctttggccccgagcccaa

SEQ ID NO: 8722 - DNA, 20 bp, synthetic construct
  source 1..20: mol_type = other DNA
cctgcagcgcaggcgacgga

SEQ ID NO: 8723 - DNA, 20 bp, synthetic construct
  source 1..20: mol_type = other DNA
acggaaggttgcagaggcag

SEQ ID NO: 8724 - DNA, 20 bp, synthetic construct
  source 1..20: mol_type = other DNA
actgctctgattggcccgga

SEQ ID NO: 8725 - DNA, 20 bp, synthetic construct
  source 1..20: mol_type = other DNA
tccccgcgccgccccccaga

SEQ ID NO: 8726 - DNA, 20 bp, synthetic construct
  source 1..20: mol_type = other DNA
acgcactgctctgattggcc

SEQ ID NO: 8727 - DNA, 20 bp, synthetic construct
  source 1..20: mol_type = other DNA
gccatccgggaaagaggtag

SEQ ID NO: 8728 - DNA, 20 bp, synthetic construct
  source 1..20: mol_type = other DNA
gatggcctcttagacgacct

SEQ ID NO: 8729 - DNA, 20 bp, synthetic construct
  source 1..20: mol_type = other DNA
aggccatccgggaaagaggt

SEQ ID NO: 8730 - DNA, 20 bp, synthetic construct
  source 1..20: mol_type = other DNA
gggaaaaaaaatctagggga

SEQ ID NO: 8731 - DNA, 20 bp, synthetic construct
  source 1..20: mol_type = other DNA
atccgggaaagaggtagggg

SEQ ID NO: 8732 - DNA, 20 bp, synthetic construct
  source 1..20: mol_type = other DNA
aataggaacagtgtataggc

SEQ ID NO: 8733 - DNA, 20 bp, synthetic construct
  source 1..20: mol_type = other DNA
aaagaactttaaccaatcca

SEQ ID NO: 8734 - DNA, 20 bp, synthetic construct
  source 1..20: mol_type = other DNA
ccaatccaaggtcgtctaag

SEQ ID NO: 8735 - DNA, 20 bp, synthetic construct
  source 1..20: mol_type = other DNA
tctgtttccatagaactggt

SEQ ID NO: 8736 - DNA, 20 bp, synthetic construct
  source 1..20: mol_type = other DNA
gaccaataggaacagtgtat

SEQ ID NO: 8737 - DNA, 20 bp, synthetic construct
  source 1..20: mol_type = other DNA
taagaggccatccgggaaag

SEQ ID NO: 8738 - DNA, 20 bp, synthetic construct
  source 1..20: mol_type = other DNA
caataggaacagtgtatagg

SEQ ID NO: 8739 - DNA, 20 bp, synthetic construct
  source 1..20: mol_type = other DNA
acactgttcctattggtccc

SEQ ID NO: 8740 - DNA, 20 bp, synthetic construct
  source 1..20: mol_type = other DNA
tcccctacctctttcccgga

SEQ ID NO: 8741 - DNA, 20 bp, synthetic construct
  source 1..20: mol_type = other DNA
ggtcgtctaagaggccatcc

SEQ ID NO: 8742 - DNA, 20 bp, synthetic construct
  source 1..20: mol_type = other DNA
accccctcgtaatcccgcag

SEQ ID NO: 8743 - DNA, 20 bp, synthetic construct
  source 1..20: mol_type = other DNA
gcgggcttgaaggccgaatg

SEQ ID NO: 8744 - DNA, 20 bp, synthetic construct
  source 1..20: mol_type = other DNA
cagcttcaagaactcccagt

SEQ ID NO: 8745 - DNA, 20 bp, synthetic construct
  source 1..20: mol_type = other DNA
ccagcttcaagaactcccag

SEQ ID NO: 8746 - DNA, 20 bp, synthetic construct
  source 1..20: mol_type = other DNA
tcaagcccgcacatgctccc

SEQ ID NO: 8747 - DNA, 20 bp, synthetic construct
  source 1..20: mol_type = other DNA
aagcccgcacatgctccctg

SEQ ID NO: 8748 - DNA, 20 bp, synthetic construct
  source 1..20: mol_type = other DNA
ccaccccctcgtaatcccgc

SEQ ID NO: 8749 - DNA, 20 bp, synthetic construct
  source 1..20: mol_type = other DNA
ttgaaggccgaatgcggcgg

SEQ ID NO: 8750 - DNA, 20 bp, synthetic construct
  source 1..20: mol_type = other DNA
tgtccctggcttcctgaggg

SEQ ID NO: 8751 - DNA, 20 bp, synthetic construct
  source 1..20: mol_type = other DNA
ctgagggcggaagctgtgtg

SEQ ID NO: 8752 - DNA, 20 bp, synthetic construct
  source 1..20: mol_type = other DNA
gcgctgtccctggcttcctg

SEQ ID NO: 8753 - DNA, 20 bp, synthetic construct
  source 1..20: mol_type = other DNA
cttccgccctcaggaagcca

SEQ ID NO: 8754 - DNA, 20 bp, synthetic construct
  source 1..20: mol_type = other DNA
aagccagggacagcgccagg

SEQ ID NO: 8755 - DNA, 20 bp, synthetic construct
  source 1..20: mol_type = other DNA
cgctgtccctggcttcctga

SEQ ID NO: 8756 - DNA, 20 bp, synthetic construct
  source 1..20: mol_type = other DNA
gtcccgcctggcgctgtccc

SEQ ID NO: 8757 - DNA, 20 bp, synthetic construct
  source 1..20: mol_type = other DNA
cctgcggatggaaagacacc

SEQ ID NO: 8758 - DNA, 20 bp, synthetic construct
  source 1..20: mol_type = other DNA
ggaacccgccggcgaccggt

SEQ ID NO: 8759 - DNA, 20 bp, synthetic construct
  source 1..20: mol_type = other DNA
cgccgacggatacctgcgga

SEQ ID NO: 8760 - DNA, 20 bp, synthetic construct
  source 1..20: mol_type = other DNA
gcgggaagctggctccatcc

SEQ ID NO: 8761 - DNA, 20 bp, synthetic construct
  source 1..20: mol_type = other DNA
cggaacccgccggcgaccgg

SEQ ID NO: 8762 - DNA, 20 bp, synthetic construct
  source 1..20: mol_type = other DNA
cccgcctgcccggaacccgc

SEQ ID NO: 8763 - DNA, 20 bp, synthetic construct
  source 1..20: mol_type = other DNA
cccggcccgacgccagcgag

SEQ ID NO: 8764 - DNA, 20 bp, synthetic construct
  source 1..20: mol_type = other DNA
ccccgcccaccggtcgccgg

SEQ ID NO: 8765 - DNA, 20 bp, synthetic construct
  source 1..20: mol_type = other DNA
gagggcggagggcggatggg

SEQ ID NO: 8766 - DNA, 20 bp, synthetic construct
  source 1..20: mol_type = other DNA
cagcgcgagcgcgcggccgg

SEQ ID NO: 8767 - DNA, 20 bp, synthetic construct
  source 1..20: mol_type = other DNA
gcgcgcggaagccacgcccc

SEQ ID NO: 8768 - DNA, 20 bp, synthetic construct
  source 1..20: mol_type = other DNA
tcccgccccctccccgcgcg

SEQ ID NO: 8769 - DNA, 20 bp, synthetic construct
  source 1..20: mol_type = other DNA
ccccctccaccccgcccccg

SEQ ID NO: 8770 - DNA, 20 bp, synthetic construct
  source 1..20: mol_type = other DNA
gtcgccggcgggttccgggc

SEQ ID NO: 8771 - DNA, 20 bp, synthetic construct
  source 1..20: mol_type = other DNA
gcgcgagggcggagggcgga

SEQ ID NO: 8772 - DNA, 20 bp, synthetic construct
  source 1..20: mol_type = other DNA
tcagctagcaggttaagggg

SEQ ID NO: 8773 - DNA, 20 bp, synthetic construct
  source 1..20: mol_type = other DNA
tccccttaacctgctagctg

SEQ ID NO: 8774 - DNA, 20 bp, synthetic construct
  source 1..20: mol_type = other DNA
gagttgtagtccccaggcgg

SEQ ID NO: 8775 - DNA, 20 bp, synthetic construct
  source 1..20: mol_type = other DNA
ttaacctgctagctgaggtg

SEQ ID NO: 8776 - DNA, 20 bp, synthetic construct
  source 1..20: mol_type = other DNA
ccagcgcgggagtccagagt

SEQ ID NO: 8777 - DNA, 20 bp, synthetic construct
  source 1..20: mol_type = other DNA
ggcctccgccaatcaccgcg

SEQ ID NO: 8778 - DNA, 20 bp, synthetic construct
  source 1..20: mol_type = other DNA
cgggagttgtagtccccagg

SEQ ID NO: 8779 - DNA, 20 bp, synthetic construct
  source 1..20: mol_type = other DNA
acctcagctagcaggttaag

SEQ ID NO: 8780 - DNA, 20 bp, synthetic construct
  source 1..20: mol_type = other DNA
gagtccagagtggggagcgg

SEQ ID NO: 8781 - DNA, 20 bp, synthetic construct
  source 1..20: mol_type = other DNA
ttgtagtccccaggcggcgg

SEQ ID NO: 8782 - DNA, 20 bp, synthetic construct
  source 1..20: mol_type = other DNA
ggcgcgcggcgccaaggatg

SEQ ID NO: 8783 - DNA, 20 bp, synthetic construct
  source 1..20: mol_type = other DNA
tccgccaatcaccgcgcggc

SEQ ID NO: 8784 - DNA, 20 bp, synthetic construct
  source 1..20: mol_type = other DNA
gccggccgcgcggtgattgg

SEQ ID NO: 8785 - DNA, 20 bp, synthetic construct
  source 1..20: mol_type = other DNA
tagcaggttaaggggaggcg

SEQ ID NO: 8786 - DNA, 20 bp, synthetic construct
  source 1..20: mol_type = other DNA
ctagctgaggtggggagcgg

SEQ ID NO: 8787 - DNA, 20 bp, synthetic construct
  source 1..20: mol_type = other DNA
tgcttgcaaagaggaagccc

SEQ ID NO: 8788 - DNA, 20 bp, synthetic construct
  source 1..20: mol_type = other DNA
agtttccctggggttaccag

SEQ ID NO: 8789 - DNA, 20 bp, synthetic construct
  source 1..20: mol_type = other DNA
gcctagtgaccaggaaaggg

SEQ ID NO: 8790 - DNA, 20 bp, synthetic construct
  source 1..20: mol_type = other DNA
gtttccctggggttaccaga

SEQ ID NO: 8791 - DNA, 20 bp, synthetic construct
  source 1..20: mol_type = other DNA
cccagccctctggtaacccc

SEQ ID NO: 8792 - DNA, 20 bp, synthetic construct
  source 1..20: mol_type = other DNA
ggaagcccaggagtttccct

SEQ ID NO: 8793 - DNA, 20 bp, synthetic construct
  source 1..20: mol_type = other DNA
ccagccctctggtaacccca

SEQ ID NO: 8794 - DNA, 20 bp, synthetic construct
  source 1..20: mol_type = other DNA
ggggcctagtgaccaggaaa

SEQ ID NO: 8795 - DNA, 20 bp, synthetic construct
  source 1..20: mol_type = other DNA
ggtaaccccagggaaactcc

SEQ ID NO: 8796 - DNA, 20 bp, synthetic construct
  source 1..20: mol_type = other DNA
gagtcagggtgcttgcaaag

SEQ ID NO: 8797 - DNA, 20 bp, synthetic construct
  source 1..20: mol_type = other DNA
gaagcccaggagtttccctg

SEQ ID NO: 8798 - DNA, 20 bp, synthetic construct
  source 1..20: mol_type = other DNA
gtaaccccagggaaactcct

SEQ ID NO: 8799 - DNA, 20 bp, synthetic construct
  source 1..20: mol_type = other DNA
ctggggttaccagagggctg

SEQ ID NO: 8800 - DNA, 20 bp, synthetic construct
  source 1..20: mol_type = other DNA
tggggttaccagagggctgg

SEQ ID NO: 8801 - DNA, 20 bp, synthetic construct
  source 1..20: mol_type = other DNA
tcactaggcccccagccctc

SEQ ID NO: 8802 - DNA, 20 bp, synthetic construct
  source 1..20: mol_type = other DNA
ccagaattatggcgaagtcc

SEQ ID NO: 8803 - DNA, 20 bp, synthetic construct
  source 1..20: mol_type = other DNA
gttctcctccgcctcaaccc

SEQ ID NO: 8804 - DNA, 20 bp, synthetic construct
  source 1..20: mol_type = other DNA
tgagcgcgacctccaaactg

SEQ ID NO: 8805 - DNA, 20 bp, synthetic construct
  source 1..20: mol_type = other DNA
gaagtggtcatgtgataccc

SEQ ID NO: 8806 - DNA, 20 bp, synthetic construct
  source 1..20: mol_type = other DNA
ttatggcgaagtccgggctg

SEQ ID NO: 8807 - DNA, 20 bp, synthetic construct
  source 1..20: mol_type = other DNA
ggaggtcgcgctcactgcga

SEQ ID NO: 8808 - DNA, 20 bp, synthetic construct
  source 1..20: mol_type = other DNA
agacccgctcaacttcatcc

SEQ ID NO: 8809 - DNA, 20 bp, synthetic construct
  source 1..20: mol_type = other DNA
gacccgctcaacttcatcct

SEQ ID NO: 8810 - DNA, 20 bp, synthetic construct
  source 1..20: mol_type = other DNA
aacttcatcctgggttgagg

SEQ ID NO: 8811 - DNA, 20 bp, synthetic construct
  source 1..20: mol_type = other DNA
ttcatcctgggttgaggcgg

SEQ ID NO: 8812 - DNA, 20 bp, synthetic construct
  source 1..20: mol_type = other DNA
agggactttcctgagtggga

SEQ ID NO: 8813 - DNA, 20 bp, synthetic construct
  source 1..20: mol_type = other DNA
agtccctagaaagagagcgc

SEQ ID NO: 8814 - DNA, 20 bp, synthetic construct
  source 1..20: mol_type = other DNA
ctgagtgggagggatttcgc

SEQ ID NO: 8815 - DNA, 20 bp, synthetic construct
  source 1..20: mol_type = other DNA
aacccaggatgaagttgagc

SEQ ID NO: 8816 - DNA, 20 bp, synthetic construct
  source 1..20: mol_type = other DNA
tctgctgcgcttccgggaag

SEQ ID NO: 8817 - DNA, 20 bp, synthetic construct
  source 1..20: mol_type = other DNA
accttgcgcctcgcctaccc

SEQ ID NO: 8818 - DNA, 20 bp, synthetic construct
  source 1..20: mol_type = other DNA
tggtgcgtccgagagccgcg

SEQ ID NO: 8819 - DNA, 20 bp, synthetic construct
  source 1..20: mol_type = other DNA
cggacgcaccaggcagccaa

SEQ ID NO: 8820 - DNA, 20 bp, synthetic construct
  source 1..20: mol_type = other DNA
cctggtgcgtccgagagccg

SEQ ID NO: 8821 - DNA, 20 bp, synthetic construct
  source 1..20: mol_type = other DNA
ccgcggctctcggacgcacc

SEQ ID NO: 8822 - DNA, 20 bp, synthetic construct
  source 1..20: mol_type = other DNA
ggggtaggcgaggcgcaagg

SEQ ID NO: 8823 - DNA, 20 bp, synthetic construct
  source 1..20: mol_type = other DNA
gcggtggggaacagctgccg

SEQ ID NO: 8824 - DNA, 20 bp, synthetic construct
  source 1..20: mol_type = other DNA
aggcgcaaggtggctccccg

SEQ ID NO: 8825 - DNA, 20 bp, synthetic construct
  source 1..20: mol_type = other DNA
ctggtgcgtccgagagccgc

SEQ ID NO: 8826 - DNA, 20 bp, synthetic construct
  source 1..20: mol_type = other DNA
tggggaacagctgccggggt

SEQ ID NO: 8827 - DNA, 20 bp, synthetic construct
  source 1..20: mol_type = other DNA
aacagctgccggggtaggcg

SEQ ID NO: 8828 - DNA, 20 bp, synthetic construct
  source 1..20: mol_type = other DNA
gccggggtaggcgaggcgca

SEQ ID NO: 8829 - DNA, 20 bp, synthetic construct
  source 1..20: mol_type = other DNA
gcgcagaggtgtacagcaga

SEQ ID NO: 8830 - DNA, 20 bp, synthetic construct
  source 1..20: mol_type = other DNA
gtacacctctgcgcagccat

SEQ ID NO: 8831 - DNA, 20 bp, synthetic construct
  source 1..20: mol_type = other DNA
tccgagagccgcggggcgcg

SEQ ID NO: 8832 - DNA, 20 bp, synthetic construct
  source 1..20: mol_type = other DNA
agcacggccgcacataagtg

SEQ ID NO: 8833 - DNA, 20 bp, synthetic construct
  source 1..20: mol_type = other DNA
ggactccgggcagggaaatg

SEQ ID NO: 8834 - DNA, 20 bp, synthetic construct
  source 1..20: mol_type = other DNA
agctggtccccacttatgtg

SEQ ID NO: 8835 - DNA, 20 bp, synthetic construct
  source 1..20: mol_type = other DNA
gcagcacggccgcacataag

SEQ ID NO: 8836 - DNA, 20 bp, synthetic construct
  source 1..20: mol_type = other DNA
tatgtgcggccgtgctgcag

SEQ ID NO: 8837 - DNA, 20 bp, synthetic construct
  source 1..20: mol_type = other DNA
tgagagagcgggctccagcg

SEQ ID NO: 8838 - DNA, 20 bp, synthetic construct
  source 1..20: mol_type = other DNA
gcggcgagctcccggactcc

SEQ ID NO: 8839 - DNA, 20 bp, synthetic construct
  source 1..20: mol_type = other DNA
ctgcgaggctcagcccagcg

SEQ ID NO: 8840 - DNA, 20 bp, synthetic construct
  source 1..20: mol_type = other DNA
tcagcacctcccctgtcccg

SEQ ID NO: 8841 - DNA, 20 bp, synthetic construct
  source 1..20: mol_type = other DNA
tgcgaggctcagcccagcgc

SEQ ID NO: 8842 - DNA, 20 bp, synthetic construct
  source 1..20: mol_type = other DNA
gagtcggccctgcccgcgct

SEQ ID NO: 8843 - DNA, 20 bp, synthetic construct
  source 1..20: mol_type = other DNA
gtgcggccgtgctgcagagg

SEQ ID NO: 8844 - DNA, 20 bp, synthetic construct
  source 1..20: mol_type = other DNA
ggcagggtgagtgagagagc

SEQ ID NO: 8845 - DNA, 20 bp, synthetic construct
  source 1..20: mol_type = other DNA
gggcgctggctgggcgctgg

SEQ ID NO: 8846 - DNA, 20 bp, synthetic construct
  source 1..20: mol_type = other DNA
gggcagggtgagtgagagag

SEQ ID NO: 8847 - DNA, 20 bp, synthetic construct
  source 1..20: mol_type = other DNA
aattgattgaatggcggagt

SEQ ID NO: 8848 - DNA, 20 bp, synthetic construct
  source 1..20: mol_type = other DNA
gatgagaaatatcggccagt

SEQ ID NO: 8849 - DNA, 20 bp, synthetic construct
  source 1..20: mol_type = other DNA
cccaagctcaaatgggcagc

SEQ ID NO: 8850 - DNA, 20 bp, synthetic construct
  source 1..20: mol_type = other DNA
ctcttctcccaagctcaaat

SEQ ID NO: 8851 - DNA, 20 bp, synthetic construct
  source 1..20: mol_type = other DNA
tgagcttgggagaagaggca

SEQ ID NO: 8852 - DNA, 20 bp, synthetic construct
  source 1..20: mol_type = other DNA
tgtctggggatgagaaatat

SEQ ID NO: 8853 - DNA, 20 bp, synthetic construct
  source 1..20: mol_type = other DNA
cctgctgcccatttgagctt

SEQ ID NO: 8854 - DNA, 20 bp, synthetic construct
  source 1..20: mol_type = other DNA
ccatttgagcttgggagaag

SEQ ID NO: 8855 - DNA, 20 bp, synthetic construct
  source 1..20: mol_type = other DNA
cgaaatctgtaatttgaaca

SEQ ID NO: 8856 - DNA, 20 bp, synthetic construct
  source 1..20: mol_type = other DNA
gagcttgggagaagaggcag

SEQ ID NO: 8857 - DNA, 20 bp, synthetic construct
  source 1..20: mol_type = other DNA
ttgagcttgggagaagaggc

SEQ ID NO: 8858 - DNA, 20 bp, synthetic construct
  source 1..20: mol_type = other DNA
gagaagaggcaggggtgtct

SEQ ID NO: 8859 - DNA, 20 bp, synthetic construct
  source 1..20: mol_type = other DNA
agaagaggcaggggtgtctg

SEQ ID NO: 8860 - DNA, 20 bp, synthetic construct
  source 1..20: mol_type = other DNA
aaaaattaactgcagccaac

SEQ ID NO: 8861 - DNA, 20 bp, synthetic construct
  source 1..20: mol_type = other DNA
ggagaagaggcaggggtgtc

SEQ ID NO: 8862 - DNA, 20 bp, synthetic construct
  source 1..20: mol_type = other DNA
agggcgcattccccagcgcg

SEQ ID NO: 8863 - DNA, 20 bp, synthetic construct
  source 1..20: mol_type = other DNA
aggaaccgtgcagcccagcg

SEQ ID NO: 8864 - DNA, 20 bp, synthetic construct
  source 1..20: mol_type = other DNA
ctgggctgcacggttcctcg

SEQ ID NO: 8865 - DNA, 20 bp, synthetic construct
  source 1..20: mol_type = other DNA
caggacctgggtacgccgcg

SEQ ID NO: 8866 - DNA, 20 bp, synthetic construct
  source 1..20: mol_type = other DNA
ccgagcgcagcgcaggacct

SEQ ID NO: 8867 - DNA, 20 bp, synthetic construct
  source 1..20: mol_type = other DNA
caggtcctgcgctgcgctcg

SEQ ID NO: 8868 - DNA, 20 bp, synthetic construct
  source 1..20: mol_type = other DNA
gagggcgcattccccagcgc

SEQ ID NO: 8869 - DNA, 20 bp, synthetic construct
  source 1..20: mol_type = other DNA
gccctcggcgcgccggccag

SEQ ID NO: 8870 - DNA, 20 bp, synthetic construct
  source 1..20: mol_type = other DNA
cgagggcgcattccccagcg

SEQ ID NO: 8871 - DNA, 20 bp, synthetic construct
  source 1..20: mol_type = other DNA
gagagccccgagcgcagcgc

SEQ ID NO: 8872 - DNA, 20 bp, synthetic construct
  source 1..20: mol_type = other DNA
ggaatgcgccctcggcgcgc

SEQ ID NO: 8873 - DNA, 20 bp, synthetic construct
  source 1..20: mol_type = other DNA
ccctcggcgcgccggccagg

SEQ ID NO: 8874 - DNA, 20 bp, synthetic construct
  source 1..20: mol_type = other DNA
cccgagcgcagcgcaggacc

SEQ ID NO: 8875 - DNA, 20 bp, synthetic construct
  source 1..20: mol_type = other DNA
ccccctggccggcgcgccga

SEQ ID NO: 8876 - DNA, 20 bp, synthetic construct
  source 1..20: mol_type = other DNA
gctgctggacccgggccggg

SEQ ID NO: 8877 - DNA, 20 bp, synthetic construct
  source 1..20: mol_type = other DNA
tgccggagtcgggttacagt

SEQ ID NO: 8878 - DNA, 20 bp, synthetic construct
  source 1..20: mol_type = other DNA
agctagagagaggatgccgc

SEQ ID NO: 8879 - DNA, 20 bp, synthetic construct
  source 1..20: mol_type = other DNA
tagagagaggatgccgctgg

SEQ ID NO: 8880 - DNA, 20 bp, synthetic construct
  source 1..20: mol_type = other DNA
tgcccactgtaacccgactc

SEQ ID NO: 8881 - DNA, 20 bp, synthetic construct
  source 1..20: mol_type = other DNA
agtgccccgccccgtccaag

SEQ ID NO: 8882 - DNA, 20 bp, synthetic construct
  source 1..20: mol_type = other DNA
ggcgccccaaacgcaaatgc

SEQ ID NO: 8883 - DNA, 20 bp, synthetic construct
  source 1..20: mol_type = other DNA
atgccggagtcgggttacag

SEQ ID NO: 8884 - DNA, 20 bp, synthetic construct
  source 1..20: mol_type = other DNA
gctagagagaggatgccgct

SEQ ID NO: 8885 - DNA, 20 bp, synthetic construct
  source 1..20: mol_type = other DNA
ggagtgccccgccccgtcca

SEQ ID NO: 8886 - DNA, 20 bp, synthetic construct
  source 1..20: mol_type = other DNA
ggggcgccctccctgcgccg

SEQ ID NO: 8887 - DNA, 20 bp, synthetic construct
  source 1..20: mol_type = other DNA
cagcgccagaagctagagag

SEQ ID NO: 8888 - DNA, 20 bp, synthetic construct
  source 1..20: mol_type = other DNA
gagtgccccgccccgtccaa

SEQ ID NO: 8889 - DNA, 20 bp, synthetic construct
  source 1..20: mol_type = other DNA
ataaaggcccctgcctgccc

SEQ ID NO: 8890 - DNA, 20 bp, synthetic construct
  source 1..20: mol_type = other DNA
tgcccctcctcctcccccag

SEQ ID NO: 8891 - DNA, 20 bp, synthetic construct
  source 1..20: mol_type = other DNA
ctagagagaggatgccgctg

SEQ ID NO: 8892 - DNA, 20 bp, synthetic construct
  source 1..20: mol_type = other DNA
gtaatagctcttgactaagc

SEQ ID NO: 8893 - DNA, 20 bp, synthetic construct
  source 1..20: mol_type = other DNA
gcaggggagatgaaaagtgt

SEQ ID NO: 8894 - DNA, 20 bp, synthetic construct
  source 1..20: mol_type = other DNA
taatagctcttgactaagca

SEQ ID NO: 8895 - DNA, 20 bp, synthetic construct
  source 1..20: mol_type = other DNA
taagatttggtgttccagca

SEQ ID NO: 8896 - DNA, 20 bp, synthetic construct
  source 1..20: mol_type = other DNA
ataacaattaatgtctccct

SEQ ID NO: 8897 - DNA, 20 bp, synthetic construct
  source 1..20: mol_type = other DNA
tattggagagcaggcaaata

SEQ ID NO: 8898 - DNA, 20 bp, synthetic construct
  source 1..20: mol_type = other DNA
catttcaatggaaataagac

SEQ ID NO: 8899 - DNA, 20 bp, synthetic construct
  source 1..20: mol_type = other DNA
ttaagatttggtgttccagc

SEQ ID NO: 8900 - DNA, 20 bp, synthetic construct
  source 1..20: mol_type = other DNA
aagatttggtgttccagcag

SEQ ID NO: 8901 - DNA, 20 bp, synthetic construct
  source 1..20: mol_type = other DNA
agacattaattgttattaat

SEQ ID NO: 8902 - DNA, 20 bp, synthetic construct
  source 1..20: mol_type = other DNA
tggacacaaaactccagcgc

SEQ ID NO: 8903 - DNA, 20 bp, synthetic construct
  source 1..20: mol_type = other DNA
ggtctgacacccttgaaagg

SEQ ID NO: 8904 - DNA, 20 bp, synthetic construct
  source 1..20: mol_type = other DNA
ccaaggcaggcattcctgcg

SEQ ID NO: 8905 - DNA, 20 bp, synthetic construct
  source 1..20: mol_type = other DNA
aattgaaattaagagaaggg

SEQ ID NO: 8906 - DNA, 20 bp, synthetic construct
  source 1..20: mol_type = other DNA
gtctgacacccttgaaaggt

SEQ ID NO: 8907 - DNA, 20 bp, synthetic construct
  source 1..20: mol_type = other DNA
gcgccggtcacagactggga

SEQ ID NO: 8908 - DNA, 20 bp, synthetic construct
  source 1..20: mol_type = other DNA
attgaaattaagagaaggga

SEQ ID NO: 8909 - DNA, 20 bp, synthetic construct
  source 1..20: mol_type = other DNA
ctcccaaaaaagcagagaag

SEQ ID NO: 8910 - DNA, 20 bp, synthetic construct
  source 1..20: mol_type = other DNA
attatacacccacctttcaa

SEQ ID NO: 8911 - DNA, 20 bp, synthetic construct
  source 1..20: mol_type = other DNA
tcaagggtgtcagaccacgc

SEQ ID NO: 8912 - DNA, 20 bp, synthetic construct
  source 1..20: mol_type = other DNA
ctctcccaaaaaagcagaga

SEQ ID NO: 8913 - DNA, 20 bp, synthetic construct
  source 1..20: mol_type = other DNA
cgtggtctgacacccttgaa

SEQ ID NO: 8914 - DNA, 20 bp, synthetic construct
  source 1..20: mol_type = other DNA
ctccagcgccggtcacagac

SEQ ID NO: 8915 - DNA, 20 bp, synthetic construct
  source 1..20: mol_type = other DNA
ccacgcaggaatgcctgcct

SEQ ID NO: 8916 - DNA, 20 bp, synthetic construct
  source 1..20: mol_type = other DNA
gattatacacccacctttca

SEQ ID NO: 8917 - DNA, 20 bp, synthetic construct
  source 1..20: mol_type = other DNA
gcccccacttgggaagtcca

SEQ ID NO: 8918 - DNA, 20 bp, synthetic construct
  source 1..20: mol_type = other DNA
gcctccctggacttcccaag

SEQ ID NO: 8919 - DNA, 20 bp, synthetic construct
  source 1..20: mol_type = other DNA
cccacttgggaagtccaggg

SEQ ID NO: 8920 - DNA, 20 bp, synthetic construct
  source 1..20: mol_type = other DNA
cggctgctcctgctgctggg

SEQ ID NO: 8921 - DNA, 20 bp, synthetic construct
  source 1..20: mol_type = other DNA
tccctggacttcccaagtgg

SEQ ID NO: 8922 - DNA, 20 bp, synthetic construct
  source 1..20: mol_type = other DNA
caaaggcaggggccaaaagg

SEQ ID NO: 8923 - DNA, 20 bp, synthetic construct
  source 1..20: mol_type = other DNA
aagtccagggaggcgcaagg

SEQ ID NO: 8924 - DNA, 20 bp, synthetic construct
  source 1..20: mol_type = other DNA
ctccctggacttcccaagtg

SEQ ID NO: 8925 - DNA, 20 bp, synthetic construct
  source 1..20: mol_type = other DNA
gggaagtccagggaggcgca

SEQ ID NO: 8926 - DNA, 20 bp, synthetic construct
  source 1..20: mol_type = other DNA
tccactttctccaaaggcag

SEQ ID NO: 8927 - DNA, 20 bp, synthetic construct
  source 1..20: mol_type = other DNA
gttagaaggcattgggaaag

SEQ ID NO: 8928 - DNA, 20 bp, synthetic construct
  source 1..20: mol_type = other DNA
gggaccttcaaactcctcct

SEQ ID NO: 8929 - DNA, 20 bp, synthetic construct
  source 1..20: mol_type = other DNA
gggggcagagcagtcgctcg

SEQ ID NO: 8930 - DNA, 20 bp, synthetic construct
  source 1..20: mol_type = other DNA
ttagaaggcattgggaaaga

SEQ ID NO: 8931 - DNA, 20 bp, synthetic construct
  source 1..20: mol_type = other DNA
gcggctgctcctgctgctgg

SEQ ID NO: 8932 - DNA, 20 bp, synthetic construct
  source 1..20: mol_type = other DNA
acaaggcagaacgacctatg

SEQ ID NO: 8933 - DNA, 20 bp, synthetic construct
  source 1..20: mol_type = other DNA
agagaaacaaggaattccag

SEQ ID NO: 8934 - DNA, 20 bp, synthetic construct
  source 1..20: mol_type = other DNA
caaggcagaacgacctatgt

SEQ ID NO: 8935 - DNA, 20 bp, synthetic construct
  source 1..20: mol_type = other DNA
acagtctgggaataatccag

SEQ ID NO: 8936 - DNA, 20 bp, synthetic construct
  source 1..20: mol_type = other DNA
ttaaagacatagatcacgtg

SEQ ID NO: 8937 - DNA, 20 bp, synthetic construct
  source 1..20: mol_type = other DNA
cagtctgggaataatccagt

SEQ ID NO: 8938 - DNA, 20 bp, synthetic construct
  source 1..20: mol_type = other DNA
acatagatcacgtgtggaat

SEQ ID NO: 8939 - DNA, 20 bp, synthetic construct
  source 1..20: mol_type = other DNA
aaggaattccagaggccggg

SEQ ID NO: 8940 - DNA, 20 bp, synthetic construct
  source 1..20: mol_type = other DNA
agactgtcaaaacagataaa

SEQ ID NO: 8941 - DNA, 20 bp, synthetic construct
  source 1..20: mol_type = other DNA
caaggaattccagaggccgg

SEQ ID NO: 8942 - DNA, 20 bp, synthetic construct
  source 1..20: mol_type = other DNA
tgtctttaagccacacccac

SEQ ID NO: 8943 - DNA, 20 bp, synthetic construct
  source 1..20: mol_type = other DNA
gactgtcaaaacagataaaa

SEQ ID NO: 8944 - DNA, 20 bp, synthetic construct
  source 1..20: mol_type = other DNA
acaaaatcttatctagaatt

SEQ ID NO: 8945 - DNA, 20 bp, synthetic construct
  source 1..20: mol_type = other DNA
tgggaataatccagtgggtg

SEQ ID NO: 8946 - DNA, 20 bp, synthetic construct
  source 1..20: mol_type = other DNA
atcacgtgtggaattggaat

SEQ ID NO: 8947 - DNA, 20 bp, synthetic construct
  source 1..20: mol_type = other DNA
tcaggacctaagttcactga

SEQ ID NO: 8948 - DNA, 20 bp, synthetic construct
  source 1..20: mol_type = other DNA
tataggatggtagactggtt

SEQ ID NO: 8949 - DNA, 20 bp, synthetic construct
  source 1..20: mol_type = other DNA
caggacctaagttcactgaa

SEQ ID NO: 8950 - DNA, 20 bp, synthetic construct
  source 1..20: mol_type = other DNA
gtacttctgcatttatagga

SEQ ID NO: 8951 - DNA, 20 bp, synthetic construct
  source 1..20: mol_type = other DNA
ctataaatgcagaagtactg

SEQ ID NO: 8952 - DNA, 20 bp, synthetic construct
  source 1..20: mol_type = other DNA
attaatgattaaacgtaggt

SEQ ID NO: 8953 - DNA, 20 bp, synthetic construct
  source 1..20: mol_type = other DNA
attgttgcaggttctgaaga

SEQ ID NO: 8954 - DNA, 20 bp, synthetic construct
  source 1..20: mol_type = other DNA
cactattaatgattaaacgt

SEQ ID NO: 8955 - DNA, 20 bp, synthetic construct
  source 1..20: mol_type = other DNA
ataaatgcagaagtactgag

SEQ ID NO: 8956 - DNA, 20 bp, synthetic construct
  source 1..20: mol_type = other DNA
gtgaacttaggtcctgattt

SEQ ID NO: 8957 - DNA, 20 bp, synthetic construct
  source 1..20: mol_type = other DNA
gtgagcccttcagtgaactt

SEQ ID NO: 8958 - DNA, 20 bp, synthetic construct
  source 1..20: mol_type = other DNA
gattgttgcaggttctgaag

SEQ ID NO: 8959 - DNA, 20 bp, synthetic construct
  source 1..20: mol_type = other DNA
gcaacaatcatgtttatctt

SEQ ID NO: 8960 - DNA, 20 bp, synthetic construct
  source 1..20: mol_type = other DNA
tataaatgcagaagtactga

SEQ ID NO: 8961 - DNA, 20 bp, synthetic construct
  source 1..20: mol_type = other DNA
tattaatgattaaacgtagg

SEQ ID NO: 8962 - DNA, 20 bp, synthetic construct
  source 1..20: mol_type = other DNA
caagctgccgagttaaaggg

SEQ ID NO: 8963 - DNA, 20 bp, synthetic construct
  source 1..20: mol_type = other DNA
agctagtcagcacaagccaa

SEQ ID NO: 8964 - DNA, 20 bp, synthetic construct
  source 1..20: mol_type = other DNA
tgtgtttcattccgaagtag

SEQ ID NO: 8965 - DNA, 20 bp, synthetic construct
  source 1..20: mol_type = other DNA
taagcaaacagagcccaaag

SEQ ID NO: 8966 - DNA, 20 bp, synthetic construct
  source 1..20: mol_type = other DNA
tgagaaacactgaagagtaa

SEQ ID NO: 8967 - DNA, 20 bp, synthetic construct
  source 1..20: mol_type = other DNA
attgtgtttcattccgaagt

SEQ ID NO: 8968 - DNA, 20 bp, synthetic construct
  source 1..20: mol_type = other DNA
ctagtcagcacaagccaaag

SEQ ID NO: 8969 - DNA, 20 bp, synthetic construct
  source 1..20: mol_type = other DNA
gggcggggctacagtatcag

SEQ ID NO: 8970 - DNA, 20 bp, synthetic construct
  source 1..20: mol_type = other DNA
ggggcggggctacagtatca

SEQ ID NO: 8971 - DNA, 20 bp, synthetic construct
  source 1..20: mol_type = other DNA
ttgtgtttcattccgaagta

SEQ ID NO: 8972 - DNA, 20 bp, synthetic construct
  source 1..20: mol_type = other DNA
agcccaaagaggctgatcat

SEQ ID NO: 8973 - DNA, 20 bp, synthetic construct
  source 1..20: mol_type = other DNA
gtcagcacaagccaaagggg

SEQ ID NO: 8974 - DNA, 20 bp, synthetic construct
  source 1..20: mol_type = other DNA
tcatctttacagcccccagt

SEQ ID NO: 8975 - DNA, 20 bp, synthetic construct
  source 1..20: mol_type = other DNA
gagccaatgatcagcctctt

SEQ ID NO: 8976 - DNA, 20 bp, synthetic construct
  source 1..20: mol_type = other DNA
tcattccgaagtaggggaga

SEQ ID NO: 8977 - DNA, 20 bp, synthetic construct
  source 1..20: mol_type = other DNA
gcattctacaatgaacgcta

SEQ ID NO: 8978 - DNA, 20 bp, synthetic construct
  source 1..20: mol_type = other DNA
aatgagtcttctgagagcta

SEQ ID NO: 8979 - DNA, 20 bp, synthetic construct
  source 1..20: mol_type = other DNA
cattctacaatgaacgctag

SEQ ID NO: 8980 - DNA, 20 bp, synthetic construct
  source 1..20: mol_type = other DNA
gatcaataatgctctcggag

SEQ ID NO: 8981 - DNA, 20 bp, synthetic construct
  source 1..20: mol_type = other DNA
actactcaatgatgtgtcaa

SEQ ID NO: 8982 - DNA, 20 bp, synthetic construct
  source 1..20: mol_type = other DNA
gaatgctttgaatgaatccg

SEQ ID NO: 8983 - DNA, 20 bp, synthetic construct
  source 1..20: mol_type = other DNA
cggctggagctcaactgcag

SEQ ID NO: 8984 - DNA, 20 bp, synthetic construct
  source 1..20: mol_type = other DNA
ggcgagcggcgagccaatgg

SEQ ID NO: 8985 - DNA, 20 bp, synthetic construct
  source 1..20: mol_type = other DNA
ttctacaatgaacgctaggg

SEQ ID NO: 8986 - DNA, 20 bp, synthetic construct
  source 1..20: mol_type = other DNA
tctgagagctaaggagtcct

SEQ ID NO: 8987 - DNA, 20 bp, synthetic construct
  source 1..20: mol_type = other DNA
agctcaactgcagcggcgag

SEQ ID NO: 8988 - DNA, 20 bp, synthetic construct
  source 1..20: mol_type = other DNA
agggcggggagatgacagga

SEQ ID NO: 8989 - DNA, 20 bp, synthetic construct
  source 1..20: mol_type = other DNA
agcggcgagcggcgagccaa

SEQ ID NO: 8990 - DNA, 20 bp, synthetic construct
  source 1..20: mol_type = other DNA
gagggcggggagatgacagg

SEQ ID NO: 8991 - DNA, 20 bp, synthetic construct
  source 1..20: mol_type = other DNA
acaaaatacatttcaaatat

SEQ ID NO: 8992 - DNA, 20 bp, synthetic construct
  source 1..20: mol_type = other DNA
tgctgtagccgggatatcaa

SEQ ID NO: 8993 - DNA, 20 bp, synthetic construct
  source 1..20: mol_type = other DNA
gatatcccggctacagcagg

SEQ ID NO: 8994 - DNA, 20 bp, synthetic construct
  source 1..20: mol_type = other DNA
ggaggagggacaccgttggg

SEQ ID NO: 8995 - DNA, 20 bp, synthetic construct
  source 1..20: mol_type = other DNA
ggcgggaggagggacaccgt

SEQ ID NO: 8996 - DNA, 20 bp, synthetic construct
  source 1..20: mol_type = other DNA
cctcggtccctcgtgtgcca

SEQ ID NO: 8997 - DNA, 20 bp, synthetic construct
  source 1..20: mol_type = other DNA
ccctggcacacgagggaccg

SEQ ID NO: 8998 - DNA, 20 bp, synthetic construct
  source 1..20: mol_type = other DNA
gcctcctccctggcacacga

SEQ ID NO: 8999 - DNA, 20 bp, synthetic construct
  source 1..20: mol_type = other DNA
cctgacagtgcaggagctgt

SEQ ID NO: 9000 - DNA, 20 bp, synthetic construct
  source 1..20: mol_type = other DNA
ttccccaggcctgacagtgc

SEQ ID NO: 9001 - DNA, 20 bp, synthetic construct
  source 1..20: mol_type = other DNA
tacagcaggaggcccaggga

SEQ ID NO: 9002 - DNA, 20 bp, synthetic construct
  source 1..20: mol_type = other DNA
tgcaagggacagcctcccaa

SEQ ID NO: 9003 - DNA, 20 bp, synthetic construct
  source 1..20: mol_type = other DNA
gcctgacagtgcaggagctg

SEQ ID NO: 9004 - DNA, 20 bp, synthetic construct
  source 1..20: mol_type = other DNA
gcaggaggcccagggagggt

SEQ ID NO: 9005 - DNA, 20 bp, synthetic construct
  source 1..20: mol_type = other DNA
cggctacagcaggaggccca

SEQ ID NO: 9006 - DNA, 20 bp, synthetic construct
  source 1..20: mol_type = other DNA
ctacagcaggaggcccaggg

SEQ ID NO: 9007 - DNA, 20 bp, synthetic construct
  source 1..20: mol_type = other DNA
tgtgggtcaaaatcatccag

SEQ ID NO: 9008 - DNA, 20 bp, synthetic construct
  source 1..20: mol_type = other DNA
ggaatctgccagtaatttca

SEQ ID NO: 9009 - DNA, 20 bp, synthetic construct
  source 1..20: mol_type = other DNA
atgatttatggggctaaact

SEQ ID NO: 9010 - DNA, 20 bp, synthetic construct
  source 1..20: mol_type = other DNA
caagctctacctcctgggca

SEQ ID NO: 9011 - DNA, 20 bp, synthetic construct
  source 1..20: mol_type = other DNA
catccagtggaccagaaact

SEQ ID NO: 9012 - DNA, 20 bp, synthetic construct
  source 1..20: mol_type = other DNA
cttagtctctctccctgccc

SEQ ID NO: 9013 - DNA, 20 bp, synthetic construct
  source 1..20: mol_type = other DNA
tgggcagggagagagactaa

SEQ ID NO: 9014 - DNA, 20 bp, synthetic construct
  source 1..20: mol_type = other DNA
gatttggtgaatgatttatg

SEQ ID NO: 9015 - DNA, 20 bp, synthetic construct
  source 1..20: mol_type = other DNA
agtctctctccctgcccagg

SEQ ID NO: 9016 - DNA, 20 bp, synthetic construct
  source 1..20: mol_type = other DNA
aagcttcagggaaggtgtgt

SEQ ID NO: 9017 - DNA, 20 bp, synthetic construct
  source 1..20: mol_type = other DNA
ctgggcagggagagagacta

SEQ ID NO: 9018 - DNA, 20 bp, synthetic construct
  source 1..20: mol_type = other DNA
aaagcttcagggaaggtgtg

SEQ ID NO: 9019 - DNA, 20 bp, synthetic construct
  source 1..20: mol_type = other DNA
tccctgaagctttaaggaaa

SEQ ID NO: 9020 - DNA, 20 bp, synthetic construct
  source 1..20: mol_type = other DNA
tttccttaaagcttcaggga

SEQ ID NO: 9021 - DNA, 20 bp, synthetic construct
  source 1..20: mol_type = other DNA
acaccttccctgaagcttta

SEQ ID NO: 9022 - DNA, 20 bp, synthetic construct
  source 1..20: mol_type = other DNA
tactagcaagtccctcgcca

SEQ ID NO: 9023 - DNA, 20 bp, synthetic construct
  source 1..20: mol_type = other DNA
gttctctctaggaatcgagg

SEQ ID NO: 9024 - DNA, 20 bp, synthetic construct
  source 1..20: mol_type = other DNA
agtatcctctatccaactgc

SEQ ID NO: 9025 - DNA, 20 bp, synthetic construct
  source 1..20: mol_type = other DNA
gaacacattcagccagcagt

SEQ ID NO: 9026 - DNA, 20 bp, synthetic construct
  source 1..20: mol_type = other DNA
accggttggactgaagctgt

SEQ ID NO: 9027 - DNA, 20 bp, synthetic construct
  source 1..20: mol_type = other DNA
aaccggttggactgaagctg

SEQ ID NO: 9028 - DNA, 20 bp, synthetic construct
  source 1..20: mol_type = other DNA
tgaaatagaaccagcgagaa

SEQ ID NO: 9029 - DNA, 20 bp, synthetic construct
  source 1..20: mol_type = other DNA
atactagcaagtccctcgcc

SEQ ID NO: 9030 - DNA, 20 bp, synthetic construct
  source 1..20: mol_type = other DNA
tagcaagtccctcgccaggg

SEQ ID NO: 9031 - DNA, 20 bp, synthetic construct
  source 1..20: mol_type = other DNA
tgtgttctctctaggaatcg

SEQ ID NO: 9032 - DNA, 20 bp, synthetic construct
  source 1..20: mol_type = other DNA
ctgggcatgagagtgagatt

SEQ ID NO: 9033 - DNA, 20 bp, synthetic construct
  source 1..20: mol_type = other DNA
ttggactgaagctgtgggat

SEQ ID NO: 9034 - DNA, 20 bp, synthetic construct
  source 1..20: mol_type = other DNA
ctgctcccccgccctggcga

SEQ ID NO: 9035 - DNA, 20 bp, synthetic construct
  source 1..20: mol_type = other DNA
tctgctcccccgccctggcg

SEQ ID NO: 9036 - DNA, 20 bp, synthetic construct
  source 1..20: mol_type = other DNA
gtgtctctgctcccccgccc

SEQ ID NO: 9037 - DNA, 20 bp, synthetic construct
  source 1..20: mol_type = other DNA
aaagagactaaggttcccat

SEQ ID NO: 9038 - DNA, 20 bp, synthetic construct
  source 1..20: mol_type = other DNA
aatggaaactgaaatcaggc

SEQ ID NO: 9039 - DNA, 20 bp, synthetic construct
  source 1..20: mol_type = other DNA
cagtgacgtaaaagagacta

SEQ ID NO: 9040 - DNA, 20 bp, synthetic construct
  source 1..20: mol_type = other DNA
agtttccatttcgctgcccc

SEQ ID NO: 9041 - DNA, 20 bp, synthetic construct
  source 1..20: mol_type = other DNA
ccctggtgccccaccgcccg

SEQ ID NO: 9042 - DNA, 20 bp, synthetic construct
  source 1..20: mol_type = other DNA
agactaaggttcccattgga

SEQ ID NO: 9043 - DNA, 20 bp, synthetic construct
  source 1..20: mol_type = other DNA
ttcggcaggagccaatcccg

SEQ ID NO: 9044 - DNA, 20 bp, synthetic construct
  source 1..20: mol_type = other DNA
gcaaatccccagacagccgc

SEQ ID NO: 9045 - DNA, 20 bp, synthetic construct
  source 1..20: mol_type = other DNA
ggcaaatccccagacagccg

SEQ ID NO: 9046 - DNA, 20 bp, synthetic construct
  source 1..20: mol_type = other DNA
gatttctcccggaccagccc

SEQ ID NO: 9047 - DNA, 20 bp, synthetic construct
  source 1..20: mol_type = other DNA
ccaccgcccgcggctgtctg

SEQ ID NO: 9048 - DNA, 20 bp, synthetic construct
  source 1..20: mol_type = other DNA
attggatggcgaagttcggc

SEQ ID NO: 9049 - DNA, 20 bp, synthetic construct
  source 1..20: mol_type = other DNA
gttcggcaggagccaatccc

SEQ ID NO: 9050 - DNA, 20 bp, synthetic construct
  source 1..20: mol_type = other DNA
aatccccagacagccgcggg

SEQ ID NO: 9051 - DNA, 20 bp, synthetic construct
  source 1..20: mol_type = other DNA
tccgggagaaatctcggcga

SEQ ID NO: 9052 - DNA, 20 bp, synthetic construct
  source 1..20: mol_type = other DNA
aggaccccgattggctaagg

SEQ ID NO: 9053 - DNA, 20 bp, synthetic construct
  source 1..20: mol_type = other DNA
accctaaccctctacttcca

SEQ ID NO: 9054 - DNA, 20 bp, synthetic construct
  source 1..20: mol_type = other DNA
ttaaggggcgtgtctaggcg

SEQ ID NO: 9055 - DNA, 20 bp, synthetic construct
  source 1..20: mol_type = other DNA
actaggaccccgattggcta

SEQ ID NO: 9056 - DNA, 20 bp, synthetic construct
  source 1..20: mol_type = other DNA
cccgcctccttagccaatcg

SEQ ID NO: 9057 - DNA, 20 bp, synthetic construct
  source 1..20: mol_type = other DNA
aaagacagccctggaagtag

SEQ ID NO: 9058 - DNA, 20 bp, synthetic construct
  source 1..20: mol_type = other DNA
aagacagccctggaagtaga

SEQ ID NO: 9059 - DNA, 20 bp, synthetic construct
  source 1..20: mol_type = other DNA
ggggcgtgtctaggcgcgga

SEQ ID NO: 9060 - DNA, 20 bp, synthetic construct
  source 1..20: mol_type = other DNA
cgggcgcgcggagcatgcgg

SEQ ID NO: 9061 - DNA, 20 bp, synthetic construct
  source 1..20: mol_type = other DNA
ggccgggcgcgcggagcatg

SEQ ID NO: 9062 - DNA, 20 bp, synthetic construct
  source 1..20: mol_type = other DNA
gtctaggcgcggagggaggt

SEQ ID NO: 9063 - DNA, 20 bp, synthetic construct
  source 1..20: mol_type = other DNA
aggggcgtgtctaggcgcgg

SEQ ID NO: 9064 - DNA, 20 bp, synthetic construct
  source 1..20: mol_type = other DNA
gcgtgtctaggcgcggaggg

SEQ ID NO: 9065 - DNA, 20 bp, synthetic construct
  source 1..20: mol_type = other DNA
tccgggcaaccgccgccccc

SEQ ID NO: 9066 - DNA, 20 bp, synthetic construct
  source 1..20: mol_type = other DNA
gtgggagggggtgctcccgg

SEQ ID NO: 9067 - DNA, 20 bp, synthetic construct
  source 1..20: mol_type = other DNA
agaagaagaaaacagattcg

SEQ ID NO: 9068 - DNA, 20 bp, synthetic construct
  source 1..20: mol_type = other DNA
tgattggctgaagacagcag

SEQ ID NO: 9069 - DNA, 20 bp, synthetic construct
  source 1..20: mol_type = other DNA
gagtgaatgtatctgttgct

SEQ ID NO: 9070 - DNA, 20 bp, synthetic construct
  source 1..20: mol_type = other DNA
agaaggtggaaggattcact

SEQ ID NO: 9071 - DNA, 20 bp, synthetic construct
  source 1..20: mol_type = other DNA
agaaaacagattcgaggatg

SEQ ID NO: 9072 - DNA, 20 bp, synthetic construct
  source 1..20: mol_type = other DNA
ggtaaagagggaaagagccg

SEQ ID NO: 9073 - DNA, 20 bp, synthetic construct
  source 1..20: mol_type = other DNA
gaaggattcactgggccccc

SEQ ID NO: 9074 - DNA, 20 bp, synthetic construct
  source 1..20: mol_type = other DNA
tgggtaaagagggaaagagc

SEQ ID NO: 9075 - DNA, 20 bp, synthetic construct
  source 1..20: mol_type = other DNA
gaagaaaacagattcgagga

SEQ ID NO: 9076 - DNA, 20 bp, synthetic construct
  source 1..20: mol_type = other DNA
gaaaacagattcgaggatgg

SEQ ID NO: 9077 - DNA, 20 bp, synthetic construct
  source 1..20: mol_type = other DNA
tatctgttgctgggtaaaga

SEQ ID NO: 9078 - DNA, 20 bp, synthetic construct
  source 1..20: mol_type = other DNA
gtgattggctgaagacagca

SEQ ID NO: 9079 - DNA, 20 bp, synthetic construct
  source 1..20: mol_type = other DNA
aaagagccggggtgagaagg

SEQ ID NO: 9080 - DNA, 20 bp, synthetic construct
  source 1..20: mol_type = other DNA
atccttccaccttctcaccc

SEQ ID NO: 9081 - DNA, 20 bp, synthetic construct
  source 1..20: mol_type = other DNA
agccggggtgagaaggtgga

SEQ ID NO: 9082 - DNA, 20 bp, synthetic construct
  source 1..20: mol_type = other DNA
gcgacgcggccggagagtga

SEQ ID NO: 9083 - DNA, 20 bp, synthetic construct
  source 1..20: mol_type = other DNA
ggccaatcacgcgccgccca

SEQ ID NO: 9084 - DNA, 20 bp, synthetic construct
  source 1..20: mol_type = other DNA
cgggaagcgcagcctcggcg

SEQ ID NO: 9085 - DNA, 20 bp, synthetic construct
  source 1..20: mol_type = other DNA
gcggccggagagtgacggcg

SEQ ID NO: 9086 - DNA, 20 bp, synthetic construct
  source 1..20: mol_type = other DNA
tacgggaagcgcagcctcgg

SEQ ID NO: 9087 - DNA, 20 bp, synthetic construct
  source 1..20: mol_type = other DNA
cttggggcggtggaaagcga

SEQ ID NO: 9088 - DNA, 20 bp, synthetic construct
  source 1..20: mol_type = other DNA
gtttacgggaagcgcagcct

SEQ ID NO: 9089 - DNA, 20 bp, synthetic construct
  source 1..20: mol_type = other DNA
cgccgcccagggtcccgcgg

SEQ ID NO: 9090 - DNA, 20 bp, synthetic construct
  source 1..20: mol_type = other DNA
acgcgccgcccagggtcccg

SEQ ID NO: 9091 - DNA, 20 bp, synthetic construct
  source 1..20: mol_type = other DNA
ggcgaggagggggatgcgcg

SEQ ID NO: 9092 - DNA, 20 bp, synthetic construct
  source 1..20: mol_type = other DNA
tcttggggcggtggaaagcg

SEQ ID NO: 9093 - DNA, 20 bp, synthetic construct
  source 1..20: mol_type = other DNA
ggaaagcgagggaggcgacg

SEQ ID NO: 9094 - DNA, 20 bp, synthetic construct
  source 1..20: mol_type = other DNA
ccccgcgacctccccgccgc

SEQ ID NO: 9095 - DNA, 20 bp, synthetic construct
  source 1..20: mol_type = other DNA
gcgccgcccagggtcccgcg

SEQ ID NO: 9096 - DNA, 20 bp, synthetic construct
  source 1..20: mol_type = other DNA
tcgcctcggccccgcccccg

SEQ ID NO: 9097 - DNA, 20 bp, synthetic construct
  source 1..20: mol_type = other DNA
ctcccgggagcaccacatag

SEQ ID NO: 9098 - DNA, 20 bp, synthetic construct
  source 1..20: mol_type = other DNA
ccgggagcaccacatagggg

SEQ ID NO: 9099 - DNA, 20 bp, synthetic construct
  source 1..20: mol_type = other DNA
ggctcccgggagcaccacat

SEQ ID NO: 9100 - DNA, 20 bp, synthetic construct
  source 1..20: mol_type = other DNA
ccgggagcccagcccaacac

SEQ ID NO: 9101 - DNA, 20 bp, synthetic construct
  source 1..20: mol_type = other DNA
cctcctcctcctcccctatg

SEQ ID NO: 9102 - DNA, 20 bp, synthetic construct
  source 1..20: mol_type = other DNA
ggagcaccacataggggagg

SEQ ID NO: 9103 - DNA, 20 bp, synthetic construct
  source 1..20: mol_type = other DNA
aaagttattgaggtcgctca

SEQ ID NO: 9104 - DNA, 20 bp, synthetic construct
  source 1..20: mol_type = other DNA
ggggcggggaaggaaactgc

SEQ ID NO: 9105 - DNA, 20 bp, synthetic construct
  source 1..20: mol_type = other DNA
tcaatttcaagagggaaaga

SEQ ID NO: 9106 - DNA, 20 bp, synthetic construct
  source 1..20: mol_type = other DNA
agagggagctggaaaagtac

SEQ ID NO: 9107 - DNA, 20 bp, synthetic construct
  source 1..20: mol_type = other DNA
ggaggggggatggctgtggg

SEQ ID NO: 9108 - DNA, 20 bp, synthetic construct
  source 1..20: mol_type = other DNA
gaggaggggggatggctgtg

SEQ ID NO: 9109 - DNA, 20 bp, synthetic construct
  source 1..20: mol_type = other DNA
agaggaggggggatggctgt

SEQ ID NO: 9110 - DNA, 20 bp, synthetic construct
  source 1..20: mol_type = other DNA
aggaggggggatggctgtgg

SEQ ID NO: 9111 - DNA, 20 bp, synthetic construct
  source 1..20: mol_type = other DNA
gttgcgctttggcagaggga

SEQ ID NO: 9112 - DNA, 20 bp, synthetic construct
  source 1..20: mol_type = other DNA
ggactgcgcggcgctggatg

SEQ ID NO: 9113 - DNA, 20 bp, synthetic construct
  source 1..20: mol_type = other DNA
ggccgacgggaagacgccca

SEQ ID NO: 9114 - DNA, 20 bp, synthetic construct
  source 1..20: mol_type = other DNA
gaggtcggtgcctgctctgt

SEQ ID NO: 9115 - DNA, 20 bp, synthetic construct
  source 1..20: mol_type = other DNA
agagcgaggagggtcgagga

SEQ ID NO: 9116 - DNA, 20 bp, synthetic construct
  source 1..20: mol_type = other DNA
tagagcgaggagggtcgagg

SEQ ID NO: 9117 - DNA, 20 bp, synthetic construct
  source 1..20: mol_type = other DNA
ggcagaggactgcgcggcgc

SEQ ID NO: 9118 - DNA, 20 bp, synthetic construct
  source 1..20: mol_type = other DNA
ggagagggcagaggactgcg

SEQ ID NO: 9119 - DNA, 20 bp, synthetic construct
  source 1..20: mol_type = other DNA
ctggatggggtagagcgagg

SEQ ID NO: 9120 - DNA, 20 bp, synthetic construct
  source 1..20: mol_type = other DNA
gcgctggatggggtagagcg

SEQ ID NO: 9121 - DNA, 20 bp, synthetic construct
  source 1..20: mol_type = other DNA
gagcgaggagggtcgaggag

SEQ ID NO: 9122 - DNA, 20 bp, synthetic construct
  source 1..20: mol_type = other DNA
gggaacctgggagagggcag

SEQ ID NO: 9123 - DNA, 20 bp, synthetic construct
  source 1..20: mol_type = other DNA
gcagtcctctgccctctccc

SEQ ID NO: 9124 - DNA, 20 bp, synthetic construct
  source 1..20: mol_type = other DNA
ttcagtgggaacctgggaga

SEQ ID NO: 9125 - DNA, 20 bp, synthetic construct
  source 1..20: mol_type = other DNA
tggatggggtagagcgagga

SEQ ID NO: 9126 - DNA, 20 bp, synthetic construct
  source 1..20: mol_type = other DNA
aaagtcttcagtgggaacct

SEQ ID NO: 9127 - DNA, 20 bp, synthetic construct
  source 1..20: mol_type = other DNA
agccgtccacgtgatcccgc

SEQ ID NO: 9128 - DNA, 20 bp, synthetic construct
  source 1..20: mol_type = other DNA
ccccggccggcgggatcacg

SEQ ID NO: 9129 - DNA, 20 bp, synthetic construct
  source 1..20: mol_type = other DNA
gcgggagcgcgcgccgagag

SEQ ID NO: 9130 - DNA, 20 bp, synthetic construct
  source 1..20: mol_type = other DNA
ccacgtgatcccgccggccg

SEQ ID NO: 9131 - DNA, 20 bp, synthetic construct
  source 1..20: mol_type = other DNA
cgggagctgcgcgaggcagg

SEQ ID NO: 9132 - DNA, 20 bp, synthetic construct
  source 1..20: mol_type = other DNA
agcgcgcgccgagagaggcg

SEQ ID NO: 9133 - DNA, 20 bp, synthetic construct
  source 1..20: mol_type = other DNA
aggcgggcgggcggaggatg

SEQ ID NO: 9134 - DNA, 20 bp, synthetic construct
  source 1..20: mol_type = other DNA
ggaggagcgggagctgcgcg

SEQ ID NO: 9135 - DNA, 20 bp, synthetic construct
  source 1..20: mol_type = other DNA
agctgcgcgaggcaggcggg

SEQ ID NO: 9136 - DNA, 20 bp, synthetic construct
  source 1..20: mol_type = other DNA
ctcccgctcctccccctccg

SEQ ID NO: 9137 - DNA, 20 bp, synthetic construct
  source 1..20: mol_type = other DNA
gagcgagcgagcgagcgagc

SEQ ID NO: 9138 - DNA, 20 bp, synthetic construct
  source 1..20: mol_type = other DNA
tcccgccggccggggccgcg

SEQ ID NO: 9139 - DNA, 20 bp, synthetic construct
  source 1..20: mol_type = other DNA
gagcgagcgagcgagcgggc

SEQ ID NO: 9140 - DNA, 20 bp, synthetic construct
  source 1..20: mol_type = other DNA
cgagcgagcgagcgagcggg

SEQ ID NO: 9141 - DNA, 20 bp, synthetic construct
  source 1..20: mol_type = other DNA
cgagcgagcgagcgagcgag

SEQ ID NO: 9142 - DNA, 20 bp, synthetic construct
  source 1..20: mol_type = other DNA
gggagttctggcgtgcgcag

SEQ ID NO: 9143 - DNA, 20 bp, synthetic construct
  source 1..20: mol_type = other DNA
tacctctaaatccacgctgc

SEQ ID NO: 9144 - DNA, 20 bp, synthetic construct
  source 1..20: mol_type = other DNA
catccgtcagcgcttggcca

SEQ ID NO: 9145 - DNA, 20 bp, synthetic construct
  source 1..20: mol_type = other DNA
gataaacatccgtcagcgct

SEQ ID NO: 9146 - DNA, 20 bp, synthetic construct
  source 1..20: mol_type = other DNA
gttctggcgtgcgcagtgga

SEQ ID NO: 9147 - DNA, 20 bp, synthetic construct
  source 1..20: mol_type = other DNA
agttcatccctgctgcgcgg

SEQ ID NO: 9148 - DNA, 20 bp, synthetic construct
  source 1..20: mol_type = other DNA
gacggatgtttatcaggaca

SEQ ID NO: 9149 - DNA, 20 bp, synthetic construct
  source 1..20: mol_type = other DNA
tagccctggccaagcgctga

SEQ ID NO: 9150 - DNA, 20 bp, synthetic construct
  source 1..20: mol_type = other DNA
cgtggatttagaggtagccc

SEQ ID NO: 9151 - DNA, 20 bp, synthetic construct
  source 1..20: mol_type = other DNA
gcgtgcgcagtggaaggagg

SEQ ID NO: 9152 - DNA, 20 bp, synthetic construct
  source 1..20: mol_type = other DNA
agaagttcatccctgctgcg

SEQ ID NO: 9153 - DNA, 20 bp, synthetic construct
  source 1..20: mol_type = other DNA
cgcggaggctgccagcagcg

SEQ ID NO: 9154 - DNA, 20 bp, synthetic construct
  source 1..20: mol_type = other DNA
ggaaggggaaaggtaatccc

SEQ ID NO: 9155 - DNA, 20 bp, synthetic construct
  source 1..20: mol_type = other DNA
ctggcagcctccgcgcagca

SEQ ID NO: 9156 - DNA, 20 bp, synthetic construct
  source 1..20: mol_type = other DNA
ctggcgtgcgcagtggaagg

SEQ ID NO: 9157 - DNA, 20 bp, synthetic construct
  source 1..20: mol_type = other DNA
gccggtacccgcgcagacgt

SEQ ID NO: 9158 - DNA, 20 bp, synthetic construct
  source 1..20: mol_type = other DNA
gagcagcagccacttcctcg

SEQ ID NO: 9159 - DNA, 20 bp, synthetic construct
  source 1..20: mol_type = other DNA
gcattgacggtggttgcgga

SEQ ID NO: 9160 - DNA, 20 bp, synthetic construct
  source 1..20: mol_type = other DNA
gatctcgcgaccgctgcccc

SEQ ID NO: 9161 - DNA, 20 bp, synthetic construct
  source 1..20: mol_type = other DNA
cggcagcacccccaccccga

SEQ ID NO: 9162 - DNA, 20 bp, synthetic construct
  source 1..20: mol_type = other DNA
gggcagcggtcgcgagatcc

SEQ ID NO: 9163 - DNA, 20 bp, synthetic construct
  source 1..20: mol_type = other DNA
gtcccgccctcccttcgggg

SEQ ID NO: 9164 - DNA, 20 bp, synthetic construct
  source 1..20: mol_type = other DNA
gcacccccaccccgaaggga

SEQ ID NO: 9165 - DNA, 20 bp, synthetic construct
  source 1..20: mol_type = other DNA
agcacccccaccccgaaggg

SEQ ID NO: 9166 - DNA, 20 bp, synthetic construct
  source 1..20: mol_type = other DNA
ggcagcacccccaccccgaa

SEQ ID NO: 9167 - DNA, 20 bp, synthetic construct
  source 1..20: mol_type = other DNA
caggtcccgccctcccttcg

SEQ ID NO: 9168 - DNA, 20 bp, synthetic construct
  source 1..20: mol_type = other DNA
tcccgccctcccttcggggt

SEQ ID NO: 9169 - DNA, 20 bp, synthetic construct
  source 1..20: mol_type = other DNA
tgccccaggtccccgccccc

SEQ ID NO: 9170 - DNA, 20 bp, synthetic construct
  source 1..20: mol_type = other DNA
ctcagcccggtagggcccgg

SEQ ID NO: 9171 - DNA, 20 bp, synthetic construct
  source 1..20: mol_type = other DNA
cctcagcccggtagggcccg

SEQ ID NO: 9172 - DNA, 20 bp, synthetic construct
  source 1..20: mol_type = other DNA
gagtgatattgctgtaggaa

SEQ ID NO: 9173 - DNA, 20 bp, synthetic construct
  source 1..20: mol_type = other DNA
atgtgagtatagaagcccag

SEQ ID NO: 9174 - DNA, 20 bp, synthetic construct
  source 1..20: mol_type = other DNA
catgagaaaggtcaagggct

SEQ ID NO: 9175 - DNA, 20 bp, synthetic construct
  source 1..20: mol_type = other DNA
gttctcatgagaaaggtcaa

SEQ ID NO: 9176 - DNA, 20 bp, synthetic construct
  source 1..20: mol_type = other DNA
tattcagagtagaaagaacc

SEQ ID NO: 9177 - DNA, 20 bp, synthetic construct
  source 1..20: mol_type = other DNA
ttgctggtgcaggagtggga

SEQ ID NO: 9178 - DNA, 20 bp, synthetic construct
  source 1..20: mol_type = other DNA
aaggagagtgatattgctgt

SEQ ID NO: 9179 - DNA, 20 bp, synthetic construct
  source 1..20: mol_type = other DNA
tgagaactcagtgagatctt

SEQ ID NO: 9180 - DNA, 20 bp, synthetic construct
  source 1..20: mol_type = other DNA
agttctcatgagaaaggtca

SEQ ID NO: 9181 - DNA, 20 bp, synthetic construct
  source 1..20: mol_type = other DNA
ttctcttgctggtgcaggag

SEQ ID NO: 9182 - DNA, 20 bp, synthetic construct
  source 1..20: mol_type = other DNA
actagatcacatttggcctt

SEQ ID NO: 9183 - DNA, 20 bp, synthetic construct
  source 1..20: mol_type = other DNA
aggaatttgtacaaagttga

SEQ ID NO: 9184 - DNA, 20 bp, synthetic construct
  source 1..20: mol_type = other DNA
aaagcttctcttgctggtgc

SEQ ID NO: 9185 - DNA, 20 bp, synthetic construct
  source 1..20: mol_type = other DNA
tcatgagaaaggtcaagggc

SEQ ID NO: 9186 - DNA, 20 bp, synthetic construct
  source 1..20: mol_type = other DNA
tcactgagttctcatgagaa

SEQ ID NO: 9187 - DNA, 20 bp, synthetic construct
  source 1..20: mol_type = other DNA
cagcgtgagtcaccaggagg

SEQ ID NO: 9188 - DNA, 20 bp, synthetic construct
  source 1..20: mol_type = other DNA
tgtatacagcgtgagtcacc

SEQ ID NO: 9189 - DNA, 20 bp, synthetic construct
  source 1..20: mol_type = other DNA
ggaagccgggttgtgcaatg

SEQ ID NO: 9190 - DNA, 20 bp, synthetic construct
  source 1..20: mol_type = other DNA
agccgggttgtgcaatgagg

SEQ ID NO: 9191 - DNA, 20 bp, synthetic construct
  source 1..20: mol_type = other DNA
atacagcgtgagtcaccagg

SEQ ID NO: 9192 - DNA, 20 bp, synthetic construct
  source 1..20: mol_type = other DNA
tccggagactgctcgctggg

SEQ ID NO: 9193 - DNA, 20 bp, synthetic construct
  source 1..20: mol_type = other DNA
ccagcgagcagtctccggag

SEQ ID NO: 9194 - DNA, 20 bp, synthetic construct
  source 1..20: mol_type = other DNA
tgaggtggctgcgacgactc

SEQ ID NO: 9195 - DNA, 20 bp, synthetic construct
  source 1..20: mol_type = other DNA
aaggagaaggaggagtgcac

SEQ ID NO: 9196 - DNA, 20 bp, synthetic construct
  source 1..20: mol_type = other DNA
ggagactgctcgctgggcgg

SEQ ID NO: 9197 - DNA, 20 bp, synthetic construct
  source 1..20: mol_type = other DNA
gcgagcagtctccggagcgg

SEQ ID NO: 9198 - DNA, 20 bp, synthetic construct
  source 1..20: mol_type = other DNA
cgagcagtctccggagcgga

SEQ ID NO: 9199 - DNA, 20 bp, synthetic construct
  source 1..20: mol_type = other DNA
gcagtctccggagcggaggg

SEQ ID NO: 9200 - DNA, 20 bp, synthetic construct
  source 1..20: mol_type = other DNA
tacacacacactcacaggcc

SEQ ID NO: 9201 - DNA, 20 bp, synthetic construct
  source 1..20: mol_type = other DNA
agccacctcattgcacaacc

SEQ ID NO: 9202 - DNA, 20 bp, synthetic construct
  source 1..20: mol_type = other DNA
gtggctcgttaaggaaatgc

SEQ ID NO: 9203 - DNA, 20 bp, synthetic construct
  source 1..20: mol_type = other DNA
gatgctccgagcgcccgctg

SEQ ID NO: 9204 - DNA, 20 bp, synthetic construct
  source 1..20: mol_type = other DNA
ggtgagtgcgtgaggccgag

SEQ ID NO: 9205 - DNA, 20 bp, synthetic construct
  source 1..20: mol_type = other DNA
agccacttgatggctgccag

SEQ ID NO: 9206 - DNA, 20 bp, synthetic construct
  source 1..20: mol_type = other DNA
ttgatggctgccagcggcgt

SEQ ID NO: 9207 - DNA, 20 bp, synthetic construct
  source 1..20: mol_type = other DNA
cgccgctggcagccatcaag

SEQ ID NO: 9208 - DNA, 20 bp, synthetic construct
  source 1..20: mol_type = other DNA
gaaatgcaggtgagtgcgtg

SEQ ID NO: 9209 - DNA, 20 bp, synthetic construct
  source 1..20: mol_type = other DNA
cttgatggctgccagcggcg

SEQ ID NO: 9210 - DNA, 20 bp, synthetic construct
  source 1..20: mol_type = other DNA
cccgctggggagagaagcgg

SEQ ID NO: 9211 - DNA, 20 bp, synthetic construct
  source 1..20: mol_type = other DNA
gccgccgcttctctccccag

SEQ ID NO: 9212 - DNA, 20 bp, synthetic construct
  source 1..20: mol_type = other DNA
gcgcccgctggggagagaag

SEQ ID NO: 9213 - DNA, 20 bp, synthetic construct
  source 1..20: mol_type = other DNA
cggagcggggcccacgccgc

SEQ ID NO: 9214 - DNA, 20 bp, synthetic construct
  source 1..20: mol_type = other DNA
gggccggggcggggagaacg

SEQ ID NO: 9215 - DNA, 20 bp, synthetic construct
  source 1..20: mol_type = other DNA
gcgccgcgttctccccgccc

SEQ ID NO: 9216 - DNA, 20 bp, synthetic construct
  source 1..20: mol_type = other DNA
ggcgtgggccccgctccggc

SEQ ID NO: 9217 - DNA, 20 bp, synthetic construct
  source 1..20: mol_type = other DNA
gaaatcgagtagctgcactc

SEQ ID NO: 9218 - DNA, 20 bp, synthetic construct
  source 1..20: mol_type = other DNA
cacagcatccatttcctccc

SEQ ID NO: 9219 - DNA, 20 bp, synthetic construct
  source 1..20: mol_type = other DNA
tgactccacccacttgggcg

SEQ ID NO: 9220 - DNA, 20 bp, synthetic construct
  source 1..20: mol_type = other DNA
accgggaaactttatctggg

SEQ ID NO: 9221 - DNA, 20 bp, synthetic construct
  source 1..20: mol_type = other DNA
ggaggtgactccacccactt

SEQ ID NO: 9222 - DNA, 20 bp, synthetic construct
  source 1..20: mol_type = other DNA
ggcagccccgcccaagtggg

SEQ ID NO: 9223 - DNA, 20 bp, synthetic construct
  source 1..20: mol_type = other DNA
gccacttgcccggcccccag

SEQ ID NO: 9224 - DNA, 20 bp, synthetic construct
  source 1..20: mol_type = other DNA
ctactcgatttccccgcccc

SEQ ID NO: 9225 - DNA, 20 bp, synthetic construct
  source 1..20: mol_type = other DNA
tgctggcctgccggctccgg

SEQ ID NO: 9226 - DNA, 20 bp, synthetic construct
  source 1..20: mol_type = other DNA
ggaggaaatggatgctgtgc

SEQ ID NO: 9227 - DNA, 20 bp, synthetic construct
  source 1..20: mol_type = other DNA
aagtggcccggccagcggcg

SEQ ID NO: 9228 - DNA, 20 bp, synthetic construct
  source 1..20: mol_type = other DNA
gtgctggcctgccggctccg

SEQ ID NO: 9229 - DNA, 20 bp, synthetic construct
  source 1..20: mol_type = other DNA
ggccagcggcgcggcgtccg

SEQ ID NO: 9230 - DNA, 20 bp, synthetic construct
  source 1..20: mol_type = other DNA
cagcggcgcggcgtccgggg

SEQ ID NO: 9231 - DNA, 20 bp, synthetic construct
  source 1..20: mol_type = other DNA
gatttccccgcccccggagc

SEQ ID NO: 9232 - DNA, 20 bp, synthetic construct
  source 1..20: mol_type = other DNA
aatcagtcacctgagcgcag

SEQ ID NO: 9233 - DNA, 20 bp, synthetic construct
  source 1..20: mol_type = other DNA
tcagtcacctgagcgcagag

SEQ ID NO: 9234 - DNA, 20 bp, synthetic construct
  source 1..20: mol_type = other DNA
gaggcccggaggaactcgga

SEQ ID NO: 9235 - DNA, 20 bp, synthetic construct
  source 1..20: mol_type = other DNA
ggcccggaggaactcggagg

SEQ ID NO: 9236 - DNA, 20 bp, synthetic construct
  source 1..20: mol_type = other DNA
gtccaggcgcggccgctaag

SEQ ID NO: 9237 - DNA, 20 bp, synthetic construct
  source 1..20: mol_type = other DNA
ggaggcccggaggaactcgg

SEQ ID NO: 9238 - DNA, 20 bp, synthetic construct
  source 1..20: mol_type = other DNA
gccgctggctccctccgtct

SEQ ID NO: 9239 - DNA, 20 bp, synthetic construct
  source 1..20: mol_type = other DNA
agcggaggcccggaggaact

SEQ ID NO: 9240 - DNA, 20 bp, synthetic construct
  source 1..20: mol_type = other DNA
gcctcttggtctcctcttag

SEQ ID NO: 9241 - DNA, 20 bp, synthetic construct
  source 1..20: mol_type = other DNA
aggcccggaggaactcggag

SEQ ID NO: 9242 - DNA, 20 bp, synthetic construct
  source 1..20: mol_type = other DNA
gccgcggcccctctgcgctc

SEQ ID NO: 9243 - DNA, 20 bp, synthetic construct
  source 1..20: mol_type = other DNA
cggcgagagcggaggcccgg

SEQ ID NO: 9244 - DNA, 20 bp, synthetic construct
  source 1..20: mol_type = other DNA
gcgcagaggggccgcggcga

SEQ ID NO: 9245 - DNA, 20 bp, synthetic construct
  source 1..20: mol_type = other DNA
ggcggaggcggcgagagcgg

SEQ ID NO: 9246 - DNA, 20 bp, synthetic construct
  source 1..20: mol_type = other DNA
gagggagagaaaggccgaga

SEQ ID NO: 9247 - DNA, 20 bp, synthetic construct
  source 1..20: mol_type = other DNA
tgttagtgtgtaggcatgtg

SEQ ID NO: 9248 - DNA, 20 bp, synthetic construct
  source 1..20: mol_type = other DNA
agctgacatatgcctatgag

SEQ ID NO: 9249 - DNA, 20 bp, synthetic construct
  source 1..20: mol_type = other DNA
ggtcacagaataagaggcag

SEQ ID NO: 9250 - DNA, 20 bp, synthetic construct
  source 1..20: mol_type = other DNA
gctcatggtcacagaataag

SEQ ID NO: 9251 - DNA, 20 bp, synthetic construct
  source 1..20: mol_type = other DNA
caggtattctgacctctcat

SEQ ID NO: 9252 - DNA, 20 bp, synthetic construct
  source 1..20: mol_type = other DNA
tgttatgcatgttagtgtgt

SEQ ID NO: 9253 - DNA, 20 bp, synthetic construct
  source 1..20: mol_type = other DNA
aggcatgtgtggaggtgtgt

SEQ ID NO: 9254 - DNA, 20 bp, synthetic construct
  source 1..20: mol_type = other DNA
ggtggatgcgtgcgtctggg

SEQ ID NO: 9255 - DNA, 20 bp, synthetic construct
  source 1..20: mol_type = other DNA
gtgggtggatgcgtgcgtct

SEQ ID NO: 9256 - DNA, 20 bp, synthetic construct
  source 1..20: mol_type = other DNA
tagtgtgtaggcatgtgtgg

SEQ ID NO: 9257 - DNA, 20 bp, synthetic construct
  source 1..20: mol_type = other DNA
gtgaccatgagcaaatgact

SEQ ID NO: 9258 - DNA, 20 bp, synthetic construct
  source 1..20: mol_type = other DNA
catgtgtggaggtgtgtggg

SEQ ID NO: 9259 - DNA, 20 bp, synthetic construct
  source 1..20: mol_type = other DNA
taggcatgtgtggaggtgtg

SEQ ID NO: 9260 - DNA, 20 bp, synthetic construct
  source 1..20: mol_type = other DNA
acagaataagaggcagtggc

SEQ ID NO: 9261 - DNA, 20 bp, synthetic construct
  source 1..20: mol_type = other DNA
cagtggcaggatttgaatcc

SEQ ID NO: 9262 - DNA, 20 bp, synthetic construct
  source 1..20: mol_type = other DNA
gcggttcagagcgcgcacgg

SEQ ID NO: 9263 - DNA, 20 bp, synthetic construct
  source 1..20: mol_type = other DNA
gcgcgcgcctctctccagcg

SEQ ID NO: 9264 - DNA, 20 bp, synthetic construct
  source 1..20: mol_type = other DNA
gagcggttcagagcgcgcac

SEQ ID NO: 9265 - DNA, 20 bp, synthetic construct
  source 1..20: mol_type = other DNA
ggggagcaagcgagcaaacg

SEQ ID NO: 9266 - DNA, 20 bp, synthetic construct
  source 1..20: mol_type = other DNA
agcgagcaaacgcggagagg

SEQ ID NO: 9267 - DNA, 20 bp, synthetic construct
  source 1..20: mol_type = other DNA
tcccgccgggagctgctagg

SEQ ID NO: 9268 - DNA, 20 bp, synthetic construct
  source 1..20: mol_type = other DNA
aagcgagcaaacgcggagag

SEQ ID NO: 9269 - DNA, 20 bp, synthetic construct
  source 1..20: mol_type = other DNA
gcaagcgagcaaacgcggag

SEQ ID NO: 9270 - DNA, 20 bp, synthetic construct
  source 1..20: mol_type = other DNA
gccgcctagcagctcccggc

SEQ ID NO: 9271 - DNA, 20 bp, synthetic construct
  source 1..20: mol_type = other DNA
tgccgcctagcagctcccgg

SEQ ID NO: 9272 - DNA, 20 bp, synthetic construct
  source 1..20: mol_type = other DNA
ggggcggccgcgctggagag

SEQ ID NO: 9273 - DNA, 20 bp, synthetic construct
  source 1..20: mol_type = other DNA
agagcggttcagagcgcgca

SEQ ID NO: 9274 - DNA, 20 bp, synthetic construct
  source 1..20: mol_type = other DNA
gcgctggagagaggcgcgcg

SEQ ID NO: 9275 - DNA, 20 bp, synthetic construct
  source 1..20: mol_type = other DNA
agcggttcagagcgcgcacg

SEQ ID NO: 9276 - DNA, 20 bp, synthetic construct
  source 1..20: mol_type = other DNA
ggaggcggcccggtgcgggg

SEQ ID NO: 9277 - DNA, 20 bp, synthetic construct
  source 1..20: mol_type = other DNA
cggaccactcccaagaacga

SEQ ID NO: 9278 - DNA, 20 bp, synthetic construct
  source 1..20: mol_type = other DNA
cagacccgcccactcccttg

SEQ ID NO: 9279 - DNA, 20 bp, synthetic construct
  source 1..20: mol_type = other DNA
atggccgcccccaagggagt

SEQ ID NO: 9280 - DNA, 20 bp, synthetic construct
  source 1..20: mol_type = other DNA
ggtgccatcgttcttgggag

SEQ ID NO: 9281 - DNA, 20 bp, synthetic construct
  source 1..20: mol_type = other DNA
cgttcttgggagtggtccga

SEQ ID NO: 9282 - DNA, 20 bp, synthetic construct
  source 1..20: mol_type = other DNA
agacccgcccactcccttgg

SEQ ID NO: 9283 - DNA, 20 bp, synthetic construct
  source 1..20: mol_type = other DNA
accaacatggccgcccccaa

SEQ ID NO: 9284 - DNA, 20 bp, synthetic construct
  source 1..20: mol_type = other DNA
gcagacccgcccactccctt

SEQ ID NO: 9285 - DNA, 20 bp, synthetic construct
  source 1..20: mol_type = other DNA
gccgcccccaagggagtggg

SEQ ID NO: 9286 - DNA, 20 bp, synthetic construct
  source 1..20: mol_type = other DNA
gtgaggggcggagaggaggg

SEQ ID NO: 9287 - DNA, 20 bp, synthetic construct
  source 1..20: mol_type = other DNA
ggggcggccatgttggtgag

SEQ ID NO: 9288 - DNA, 20 bp, synthetic construct
  source 1..20: mol_type = other DNA
gttggtgaggggcggagagg

SEQ ID NO: 9289 - DNA, 20 bp, synthetic construct
  source 1..20: mol_type = other DNA
catgttggtgaggggcggag

SEQ ID NO: 9290 - DNA, 20 bp, synthetic construct
  source 1..20: mol_type = other DNA
gcggccatgttggtgagggg

SEQ ID NO: 9291 - DNA, 20 bp, synthetic construct
  source 1..20: mol_type = other DNA
ttggtgaggggcggagagga

SEQ ID NO: 9292 - DNA, 20 bp, synthetic construct
  source 1..20: mol_type = other DNA
gacttcccgaggccgaacac

SEQ ID NO: 9293 - DNA, 20 bp, synthetic construct
  source 1..20: mol_type = other DNA
tgttcggcctcgggaagtcg

SEQ ID NO: 9294 - DNA, 20 bp, synthetic construct
  source 1..20: mol_type = other DNA
ttcccgaggccgaacacggg

SEQ ID NO: 9295 - DNA, 20 bp, synthetic construct
  source 1..20: mol_type = other DNA
tcccgaggccgaacacggga

SEQ ID NO: 9296 - DNA, 20 bp, synthetic construct
  source 1..20: mol_type = other DNA
tcggcctcgggaagtcgggg

SEQ ID NO: 9297 - DNA, 20 bp, synthetic construct
  source 1..20: mol_type = other DNA
cgtgttcggcctcgggaagt

SEQ ID NO: 9298 - DNA, 20 bp, synthetic construct
  source 1..20: mol_type = other DNA
cccgaggccgaacacgggag

SEQ ID NO: 9299 - DNA, 20 bp, synthetic construct
  source 1..20: mol_type = other DNA
cccgccgccccgacttcccg

SEQ ID NO: 9300 - DNA, 20 bp, synthetic construct
  source 1..20: mol_type = other DNA
gaggcggccgcgggtcccca

SEQ ID NO: 9301 - DNA, 20 bp, synthetic construct
  source 1..20: mol_type = other DNA
ccgaacacgggaggggacag

SEQ ID NO: 9302 - DNA, 20 bp, synthetic construct
  source 1..20: mol_type = other DNA
cttcctagcaggggtccctg

SEQ ID NO: 9303 - DNA, 20 bp, synthetic construct
  source 1..20: mol_type = other DNA
cgaacacgggaggggacaga

SEQ ID NO: 9304 - DNA, 20 bp, synthetic construct
  source 1..20: mol_type = other DNA
gggaggggacagaggggcgc

SEQ ID NO: 9305 - DNA, 20 bp, synthetic construct
  source 1..20: mol_type = other DNA
aggggacagaggggcgcggg

SEQ ID NO: 9306 - DNA, 20 bp, synthetic construct
  source 1..20: mol_type = other DNA
gaacacgggaggggacagag

SEQ ID NO: 9307 - DNA, 20 bp, synthetic construct
  source 1..20: mol_type = other DNA
gccacagtgaaggtaaccag

SEQ ID NO: 9308 - DNA, 20 bp, synthetic construct
  source 1..20: mol_type = other DNA
aaacagcccagcttatacac

SEQ ID NO: 9309 - DNA, 20 bp, synthetic construct
  source 1..20: mol_type = other DNA
cccactggttaccttcactg

SEQ ID NO: 9310 - DNA, 20 bp, synthetic construct
  source 1..20: mol_type = other DNA
aaagcttcaggacggaatca

SEQ ID NO: 9311 - DNA, 20 bp, synthetic construct
  source 1..20: mol_type = other DNA
ctgtggccagtgtataagct

SEQ ID NO: 9312 - DNA, 20 bp, synthetic construct
  source 1..20: mol_type = other DNA
ttatacactggccacagtga

SEQ ID NO: 9313 - DNA, 20 bp, synthetic construct
  source 1..20: mol_type = other DNA
ccacagtgaaggtaaccagt

SEQ ID NO: 9314 - DNA, 20 bp, synthetic construct
  source 1..20: mol_type = other DNA
acagtgaaggtaaccagtgg

SEQ ID NO: 9315 - DNA, 20 bp, synthetic construct
  source 1..20: mol_type = other DNA
tggtataacccagtttgtga

SEQ ID NO: 9316 - DNA, 20 bp, synthetic construct
  source 1..20: mol_type = other DNA
attgggccaaagcttcagga

SEQ ID NO: 9317 - DNA, 20 bp, synthetic construct
  source 1..20: mol_type = other DNA
tgcctctgaagaaagagtgg

SEQ ID NO: 9318 - DNA, 20 bp, synthetic construct
  source 1..20: mol_type = other DNA
acgtactctcattcccccac

SEQ ID NO: 9319 - DNA, 20 bp, synthetic construct
  source 1..20: mol_type = other DNA
actgtggccagtgtataagc

SEQ ID NO: 9320 - DNA, 20 bp, synthetic construct
  source 1..20: mol_type = other DNA
cacagtgaaggtaaccagtg

SEQ ID NO: 9321 - DNA, 20 bp, synthetic construct
  source 1..20: mol_type = other DNA
agatgcctctgaagaaagag

SEQ ID NO: 9322 - DNA, 20 bp, synthetic construct
  source 1..20: mol_type = other DNA
gcaaggcttccggaagcgca

SEQ ID NO: 9323 - DNA, 20 bp, synthetic construct
  source 1..20: mol_type = other DNA
ggggctcggccctatgccac

SEQ ID NO: 9324 - DNA, 20 bp, synthetic construct
  source 1..20: mol_type = other DNA
tgctcccgcgtgcctagcgg

SEQ ID NO: 9325 - DNA, 20 bp, synthetic construct
  source 1..20: mol_type = other DNA
tgtcttcctgaagaaggctg

SEQ ID NO: 9326 - DNA, 20 bp, synthetic construct
  source 1..20: mol_type = other DNA
ctaggcacgcgggagcagca

SEQ ID NO: 9327 - DNA, 20 bp, synthetic construct
  source 1..20: mol_type = other DNA
ccgagcccccgctaggcacg

SEQ ID NO: 9328 - DNA, 20 bp, synthetic construct
  source 1..20: mol_type = other DNA
tggggtaagagtccggccag

SEQ ID NO: 9329 - DNA, 20 bp, synthetic construct
  source 1..20: mol_type = other DNA
gtgtcttcctgaagaaggct

SEQ ID NO: 9330 - DNA, 20 bp, synthetic construct
  source 1..20: mol_type = other DNA
ggtgggatgcccgtggcata

SEQ ID NO: 9331 - DNA, 20 bp, synthetic construct
  source 1..20: mol_type = other DNA
cagccttcttcaggaagaca

SEQ ID NO: 9332 - DNA, 20 bp, synthetic construct
  source 1..20: mol_type = other DNA
gagggcagctggtagcaggg

SEQ ID NO: 9333 - DNA, 20 bp, synthetic construct
  source 1..20: mol_type = other DNA
ccagcggacaagagggcagc

SEQ ID NO: 9334 - DNA, 20 bp, synthetic construct
  source 1..20: mol_type = other DNA
agggcagctggtagcagggt

SEQ ID NO: 9335 - DNA, 20 bp, synthetic construct
  source 1..20: mol_type = other DNA
gtagcagggtgggatgcccg

SEQ ID NO: 9336 - DNA, 20 bp, synthetic construct
  source 1..20: mol_type = other DNA
catagggccgagcccccgct

SEQ ID NO: 9337 - DNA, 20 bp, synthetic construct
  source 1..20: mol_type = other DNA
taaagagcgagaatagtcta

SEQ ID NO: 9338 - DNA, 20 bp, synthetic construct
  source 1..20: mol_type = other DNA
tcaagtagcccaaccgcaag

SEQ ID NO: 9339 - DNA, 20 bp, synthetic construct
  source 1..20: mol_type = other DNA
tctaaggagacactctgtca

SEQ ID NO: 9340 - DNA, 20 bp, synthetic construct
  source 1..20: mol_type = other DNA
agtagtgctgataagtaggc

SEQ ID NO: 9341 - DNA, 20 bp, synthetic construct
  source 1..20: mol_type = other DNA
ttcatgaaacctcttgcggt

SEQ ID NO: 9342 - DNA, 20 bp, synthetic construct
  source 1..20: mol_type = other DNA
agatcttgtgatgtatatct

SEQ ID NO: 9343 - DNA, 20 bp, synthetic construct
  source 1..20: mol_type = other DNA
tcatgaaacctcttgcggtt

SEQ ID NO: 9344 - DNA, 20 bp, synthetic construct
  source 1..20: mol_type = other DNA
acaaagtagtgctgataagt

SEQ ID NO: 9345 - DNA, 20 bp, synthetic construct
  source 1..20: mol_type = other DNA
tacatgtacctttctataca

SEQ ID NO: 9346 - DNA, 20 bp, synthetic construct
  source 1..20: mol_type = other DNA
gactttgaccttgtatagaa

SEQ ID NO: 9347 - DNA, 20 bp, synthetic construct
  source 1..20: mol_type = other DNA
aagatcttgtgatgtatatc

SEQ ID NO: 9348 - DNA, 20 bp, synthetic construct
  source 1..20: mol_type = other DNA
gtttcttagattcttccatg

SEQ ID NO: 9349 - DNA, 20 bp, synthetic construct
  source 1..20: mol_type = other DNA
ggaatttggaattcaccaca

SEQ ID NO: 9350 - DNA, 20 bp, synthetic construct
  source 1..20: mol_type = other DNA
tggtgagagaatttggaatt

SEQ ID NO: 9351 - DNA, 20 bp, synthetic construct
  source 1..20: mol_type = other DNA
tctactttggtgagagaatt

SEQ ID NO: 9352 - DNA, 20 bp, synthetic construct
  source 1..20: mol_type = other DNA
gctgacgtctgattgttgcg

SEQ ID NO: 9353 - DNA, 20 bp, synthetic construct
  source 1..20: mol_type = other DNA
ttacttacggagaccgccga

SEQ ID NO: 9354 - DNA, 20 bp, synthetic construct
  source 1..20: mol_type = other DNA
gcctcaaggaagaatcaaga

SEQ ID NO: 9355 - DNA, 20 bp, synthetic construct
  source 1..20: mol_type = other DNA
gaggcgcaaacacctgagag

SEQ ID NO: 9356 - DNA, 20 bp, synthetic construct
  source 1..20: mol_type = other DNA
gagaggcttctgtccctcgg

SEQ ID NO: 9357 - DNA, 20 bp, synthetic construct
  source 1..20: mol_type = other DNA
agagggaaagggaggaacga

SEQ ID NO: 9358 - DNA, 20 bp, synthetic construct
  source 1..20: mol_type = other DNA
cttacttacggagaccgccg

SEQ ID NO: 9359 - DNA, 20 bp, synthetic construct
  source 1..20: mol_type = other DNA
agaaagagaaagtgaccgaa

SEQ ID NO: 9360 - DNA, 20 bp, synthetic construct
  source 1..20: mol_type = other DNA
agtgaaccgttattggctgg

SEQ ID NO: 9361 - DNA, 20 bp, synthetic construct
  source 1..20: mol_type = other DNA
aaggaagaatcaagagggaa

SEQ ID NO: 9362 - DNA, 20 bp, synthetic construct
  source 1..20: mol_type = other DNA
aagaatcaagagggaaaggg

SEQ ID NO: 9363 - DNA, 20 bp, synthetic construct
  source 1..20: mol_type = other DNA
aggaagaatcaagagggaaa

SEQ ID NO: 9364 - DNA, 20 bp, synthetic construct
  source 1..20: mol_type = other DNA
cgcctcaaggaagaatcaag

SEQ ID NO: 9365 - DNA, 20 bp, synthetic construct
  source 1..20: mol_type = other DNA
tccctcttgattcttccttg

SEQ ID NO: 9366 - DNA, 20 bp, synthetic construct
  source 1..20: mol_type = other DNA
tgagagaggcttctgtccct

SEQ ID NO: 9367 - DNA, 20 bp, synthetic construct
  source 1..20: mol_type = other DNA
accggcgcgtggcattgacg

SEQ ID NO: 9368 - DNA, 20 bp, synthetic construct
  source 1..20: mol_type = other DNA
gggagcgtgagcggatccga

SEQ ID NO: 9369 - DNA, 20 bp, synthetic construct
  source 1..20: mol_type = other DNA
gagtacacacattacaccct

SEQ ID NO: 9370 - DNA, 20 bp, synthetic construct
  source 1..20: mol_type = other DNA
tgtgtgagcgcctggacaga

SEQ ID NO: 9371 - DNA, 20 bp, synthetic construct
  source 1..20: mol_type = other DNA
acacacgcatggcctaggca

SEQ ID NO: 9372 - DNA, 20 bp, synthetic construct
  source 1..20: mol_type = other DNA
ccggcgcgtggcattgacgc

SEQ ID NO: 9373 - DNA, 20 bp, synthetic construct
  source 1..20: mol_type = other DNA
cggcgcgtggcattgacgcg

SEQ ID NO: 9374 - DNA, 20 bp, synthetic construct
  source 1..20: mol_type = other DNA
agggagcgtgagcggatccg

SEQ ID NO: 9375 - DNA, 20 bp, synthetic construct
  source 1..20: mol_type = other DNA
cactatctttagccacacac

SEQ ID NO: 9376 - DNA, 20 bp, synthetic construct
  source 1..20: mol_type = other DNA
ggatccgctcacgctccctg

SEQ ID NO: 9377 - DNA, 20 bp, synthetic construct
  source 1..20: mol_type = other DNA
ccccggcgctggctagccgg

SEQ ID NO: 9378 - DNA, 20 bp, synthetic construct
  source 1..20: mol_type = other DNA
cgccggctagccagcgccgg

SEQ ID NO: 9379 - DNA, 20 bp, synthetic construct
  source 1..20: mol_type = other DNA
ggccgccggctagccagcgc

SEQ ID NO: 9380 - DNA, 20 bp, synthetic construct
  source 1..20: mol_type = other DNA
ccgccggctagccagcgccg

SEQ ID NO: 9381 - DNA, 20 bp, synthetic construct
  source 1..20: mol_type = other DNA
cgagcctcagggagcgtgag

SEQ ID NO: 9382 - DNA, 20 bp, synthetic construct
  source 1..20: mol_type = other DNA
aggcgcgagggctacaaacg

SEQ ID NO: 9383 - DNA, 20 bp, synthetic construct
  source 1..20: mol_type = other DNA
catgtgcgctggcttccgag

SEQ ID NO: 9384 - DNA, 20 bp, synthetic construct
  source 1..20: mol_type = other DNA
gcgagggctacaaacgcggc

SEQ ID NO: 9385 - DNA, 20 bp, synthetic construct
  source 1..20: mol_type = other DNA
gcgcatgcgtaaaggcgcga

SEQ ID NO: 9386 - DNA, 20 bp, synthetic construct
  source 1..20: mol_type = other DNA
catgcgcactagtgccacgc

SEQ ID NO: 9387 - DNA, 20 bp, synthetic construct
  source 1..20: mol_type = other DNA
caagcctggacggccgcacg

SEQ ID NO: 9388 - DNA, 20 bp, synthetic construct
  source 1..20: mol_type = other DNA
tgcgcgcgcctggagatgtg

SEQ ID NO: 9389 - DNA, 20 bp, synthetic construct
  source 1..20: mol_type = other DNA
cgcgagggctacaaacgcgg

SEQ ID NO: 9390 - DNA, 20 bp, synthetic construct
  source 1..20: mol_type = other DNA
aattctccggcaggcctgcg

SEQ ID NO: 9391 - DNA, 20 bp, synthetic construct
  source 1..20: mol_type = other DNA
cgcgcaggagtgcattgcgc

SEQ ID NO: 9392 - DNA, 20 bp, synthetic construct
  source 1..20: mol_type = other DNA
atgtgaggtaattctccggc

SEQ ID NO: 9393 - DNA, 20 bp, synthetic construct
  source 1..20: mol_type = other DNA
tcacatctccaggcgcgcgc

SEQ ID NO: 9394 - DNA, 20 bp, synthetic construct
  source 1..20: mol_type = other DNA
ggagatgtgaggtaattctc

SEQ ID NO: 9395 - DNA, 20 bp, synthetic construct
  source 1..20: mol_type = other DNA
acggccgcacgtggccctgg

SEQ ID NO: 9396 - DNA, 20 bp, synthetic construct
  source 1..20: mol_type = other DNA
aagcccgccagggccacgtg

SEQ ID NO: 9397 - DNA, 20 bp, synthetic construct
  source 1..20: mol_type = other DNA
tgggcgaggtgtttcaatag

SEQ ID NO: 9398 - DNA, 20 bp, synthetic construct
  source 1..20: mol_type = other DNA
tcaatagaggacggagaacg

SEQ ID NO: 9399 - DNA, 20 bp, synthetic construct
  source 1..20: mol_type = other DNA
caatagaggacggagaacgg

SEQ ID NO: 9400 - DNA, 20 bp, synthetic construct
  source 1..20: mol_type = other DNA
cgaggtgtttcaatagagga

SEQ ID NO: 9401 - DNA, 20 bp, synthetic construct
  source 1..20: mol_type = other DNA
agaaaaaagggcagttgggt

SEQ ID NO: 9402 - DNA, 20 bp, synthetic construct
  source 1..20: mol_type = other DNA
gagaaaaaagggcagttggg

SEQ ID NO: 9403 - DNA, 20 bp, synthetic construct
  source 1..20: mol_type = other DNA
gggcagttgggtgggagtgg

SEQ ID NO: 9404 - DNA, 20 bp, synthetic construct
  source 1..20: mol_type = other DNA
agagttacagtctcgagatt

SEQ ID NO: 9405 - DNA, 20 bp, synthetic construct
  source 1..20: mol_type = other DNA
tcagtgcgctaggctgggcg

SEQ ID NO: 9406 - DNA, 20 bp, synthetic construct
  source 1..20: mol_type = other DNA
cgagagaaaaaagggcagtt

SEQ ID NO: 9407 - DNA, 20 bp, synthetic construct
  source 1..20: mol_type = other DNA
tgctttgacgagagaaaaaa

SEQ ID NO: 9408 - DNA, 20 bp, synthetic construct
  source 1..20: mol_type = other DNA
aaagggcagttgggtgggag

SEQ ID NO: 9409 - DNA, 20 bp, synthetic construct
  source 1..20: mol_type = other DNA
agttgggtgggagtggaggg

SEQ ID NO: 9410 - DNA, 20 bp, synthetic construct
  source 1..20: mol_type = other DNA
acgagagaaaaaagggcagt

SEQ ID NO: 9411 - DNA, 20 bp, synthetic construct
  source 1..20: mol_type = other DNA
atgctttgacgagagaaaaa

SEQ ID NO: 9412 - DNA, 20 bp, synthetic construct
  source 1..20: mol_type = other DNA
tcgatcccggaaccttcgcg

SEQ ID NO: 9413 - DNA, 20 bp, synthetic construct
  source 1..20: mol_type = other DNA
atcccggaaccttcgcgcgg

SEQ ID NO: 9414 - DNA, 20 bp, synthetic construct
  source 1..20: mol_type = other DNA
gcggccgccgggatgcggag

SEQ ID NO: 9415 - DNA, 20 bp, synthetic construct
  source 1..20: mol_type = other DNA
cccatcccccgagcgcgcgg

SEQ ID NO: 9416 - DNA, 20 bp, synthetic construct
  source 1..20: mol_type = other DNA
gccgcccctccgcatcccgg

SEQ ID NO: 9417 - DNA, 20 bp, synthetic construct
  source 1..20: mol_type = other DNA
acccctccctcgggcccctg

SEQ ID NO: 9418 - DNA, 20 bp, synthetic construct
  source 1..20: mol_type = other DNA
gtcgccgcccctccgcatcc

SEQ ID NO: 9419 - DNA, 20 bp, synthetic construct
  source 1..20: mol_type = other DNA
ttgcccatcccccgagcgcg

SEQ ID NO: 9420 - DNA, 20 bp, synthetic construct
  source 1..20: mol_type = other DNA
gcgcgccctaccccctcggg

SEQ ID NO: 9421 - DNA, 20 bp, synthetic construct
  source 1..20: mol_type = other DNA
ggcggccgccgggatgcgga

SEQ ID NO: 9422 - DNA, 20 bp, synthetic construct
  source 1..20: mol_type = other DNA
ccggaaccttcgcgcggcgg

SEQ ID NO: 9423 - DNA, 20 bp, synthetic construct
  source 1..20: mol_type = other DNA
cggcggccgccgggatgcgg

SEQ ID NO: 9424 - DNA, 20 bp, synthetic construct
  source 1..20: mol_type = other DNA
atgcggaggggcggcgacgg

SEQ ID NO: 9425 - DNA, 20 bp, synthetic construct
  source 1..20: mol_type = other DNA
catcccccgagcgcgcggcg

SEQ ID NO: 9426 - DNA, 20 bp, synthetic construct
  source 1..20: mol_type = other DNA
ccgccccgccgcgcgctcgg

SEQ ID NO: 9427 - DNA, 20 bp, synthetic construct
  source 1..20: mol_type = other DNA
ctgcttcactaaccctacca

SEQ ID NO: 9428 - DNA, 20 bp, synthetic construct
  source 1..20: mol_type = other DNA
cttgcaaaataatggtcaca

SEQ ID NO: 9429 - DNA, 20 bp, synthetic construct
  source 1..20: mol_type = other DNA
cttggtagggttagtgaagc

SEQ ID NO: 9430 - DNA, 20 bp, synthetic construct
  source 1..20: mol_type = other DNA
gtttcccttcctgagactct

SEQ ID NO: 9431 - DNA, 20 bp, synthetic construct
  source 1..20: mol_type = other DNA
ctgagactctagggaagcct

SEQ ID NO: 9432 - DNA, 20 bp, synthetic construct
  source 1..20: mol_type = other DNA
cttccctagagtctcaggaa

SEQ ID NO: 9433 - DNA, 20 bp, synthetic construct
  source 1..20: mol_type = other DNA
caaggcttccctagagtctc

SEQ ID NO: 9434 - DNA, 20 bp, synthetic construct
  source 1..20: mol_type = other DNA
aataacttgaaaagagagcc

SEQ ID NO: 9435 - DNA, 20 bp, synthetic construct
  source 1..20: mol_type = other DNA
gcttccctagagtctcagga

SEQ ID NO: 9436 - DNA, 20 bp, synthetic construct
  source 1..20: mol_type = other DNA
aggaagggaaacactttctg

SEQ ID NO: 9437 - DNA, 20 bp, synthetic construct
  source 1..20: mol_type = other DNA
gttatgatcttgcaaaataa

SEQ ID NO: 9438 - DNA, 20 bp, synthetic construct
  source 1..20: mol_type = other DNA
tcaggaagggaaacactttc

SEQ ID NO: 9439 - DNA, 20 bp, synthetic construct
  source 1..20: mol_type = other DNA
tttcccttcctgagactcta

SEQ ID NO: 9440 - DNA, 20 bp, synthetic construct
  source 1..20: mol_type = other DNA
ttcaagttatttgcattcca

SEQ ID NO: 9441 - DNA, 20 bp, synthetic construct
  source 1..20: mol_type = other DNA
caggaagggaaacactttct

SEQ ID NO: 9442 - DNA, 20 bp, synthetic construct
  source 1..20: mol_type = other DNA
gattcaccatgagtcatcaa

SEQ ID NO: 9443 - DNA, 20 bp, synthetic construct
  source 1..20: mol_type = other DNA
gggacacgacttgctggcat

SEQ ID NO: 9444 - DNA, 20 bp, synthetic construct
  source 1..20: mol_type = other DNA
tgatgactcatggtgaatct

SEQ ID NO: 9445 - DNA, 20 bp, synthetic construct
  source 1..20: mol_type = other DNA
aaagtcacaagttgcacaga

SEQ ID NO: 9446 - DNA, 20 bp, synthetic construct
  source 1..20: mol_type = other DNA
ttaagtcccttgatgactca

SEQ ID NO: 9447 - DNA, 20 bp, synthetic construct
  source 1..20: mol_type = other DNA
gacccagactgatgaaggag

SEQ ID NO: 9448 - DNA, 20 bp, synthetic construct
  source 1..20: mol_type = other DNA
ttctcatcaactgtgctagc

SEQ ID NO: 9449 - DNA, 20 bp, synthetic construct
  source 1..20: mol_type = other DNA
cctcagacccagactgatga

SEQ ID NO: 9450 - DNA, 20 bp, synthetic construct
  source 1..20: mol_type = other DNA
agattcaccatgagtcatca

SEQ ID NO: 9451 - DNA, 20 bp, synthetic construct
  source 1..20: mol_type = other DNA
acccagactgatgaaggagt

SEQ ID NO: 9452 - DNA, 20 bp, synthetic construct
  source 1..20: mol_type = other DNA
cattggttcttggaattata

SEQ ID NO: 9453 - DNA, 20 bp, synthetic construct
  source 1..20: mol_type = other DNA
gacttgctggcattggttct

SEQ ID NO: 9454 - DNA, 20 bp, synthetic construct
  source 1..20: mol_type = other DNA
gattcagggacacgacttgc

SEQ ID NO: 9455 - DNA, 20 bp, synthetic construct
  source 1..20: mol_type = other DNA
cagtctttctctggggctgg

SEQ ID NO: 9456 - DNA, 20 bp, synthetic construct
  source 1..20: mol_type = other DNA
gacttaaagacagacgtatc

SEQ ID NO: 9457 - DNA, 20 bp, synthetic construct
  source 1..20: mol_type = other DNA
ccggtaggcggccgtaacac

SEQ ID NO: 9458 - DNA, 20 bp, synthetic construct
  source 1..20: mol_type = other DNA
gtaggcggccgtaacacggg

SEQ ID NO: 9459 - DNA, 20 bp, synthetic construct
  source 1..20: mol_type = other DNA
cacgggcgggccgagcacgt

SEQ ID NO: 9460 - DNA, 20 bp, synthetic construct
  source 1..20: mol_type = other DNA
cagaggagaagggtaggctg

SEQ ID NO: 9461 - DNA, 20 bp, synthetic construct
  source 1..20: mol_type = other DNA
agaggagaagggtaggctgt

SEQ ID NO: 9462 - DNA, 20 bp, synthetic construct
  source 1..20: mol_type = other DNA
ggaggggtagccaggagcgc

SEQ ID NO: 9463 - DNA, 20 bp, synthetic construct
  source 1..20: mol_type = other DNA
cccaaaacccattgatgcag

SEQ ID NO: 9464 - DNA, 20 bp, synthetic construct
  source 1..20: mol_type = other DNA
gacggaggcgcccacgtgct

SEQ ID NO: 9465 - DNA, 20 bp, synthetic construct
  source 1..20: mol_type = other DNA
ccttctcctctgcagccggt

SEQ ID NO: 9466 - DNA, 20 bp, synthetic construct
  source 1..20: mol_type = other DNA
taggcggccgtaacacgggc

SEQ ID NO: 9467 - DNA, 20 bp, synthetic construct
  source 1..20: mol_type = other DNA
cggctgcagaggagaagggt

SEQ ID NO: 9468 - DNA, 20 bp, synthetic construct
  source 1..20: mol_type = other DNA
cctaccggctgcagaggaga

SEQ ID NO: 9469 - DNA, 20 bp, synthetic construct
  source 1..20: mol_type = other DNA
ggagaagggtaggctgtggg

SEQ ID NO: 9470 - DNA, 20 bp, synthetic construct
  source 1..20: mol_type = other DNA
ctaccggctgcagaggagaa

SEQ ID NO: 9471 - DNA, 20 bp, synthetic construct
  source 1..20: mol_type = other DNA
gtaggctgtgggcggcggcg

SEQ ID NO: 9472 - DNA, 20 bp, synthetic construct
  source 1..20: mol_type = other DNA
gtgggagagactcctgtggg

SEQ ID NO: 9473 - DNA, 20 bp, synthetic construct
  source 1..20: mol_type = other DNA
gtggtgggagagactcctgt

SEQ ID NO: 9474 - DNA, 20 bp, synthetic construct
  source 1..20: mol_type = other DNA
tgtggtgggagagactcctg

SEQ ID NO: 9475 - DNA, 20 bp, synthetic construct
  source 1..20: mol_type = other DNA
tcacccagtctgtgagccag

SEQ ID NO: 9476 - DNA, 20 bp, synthetic construct
  source 1..20: mol_type = other DNA
gagtctctcccaccacatgt

SEQ ID NO: 9477 - DNA, 20 bp, synthetic construct
  source 1..20: mol_type = other DNA
agaacccaaagagacctact

SEQ ID NO: 9478 - DNA, 20 bp, synthetic construct
  source 1..20: mol_type = other DNA
aaagagacctacttggcacc

SEQ ID NO: 9479 - DNA, 20 bp, synthetic construct
  source 1..20: mol_type = other DNA
cacatctaggaatactcctc

SEQ ID NO: 9480 - DNA, 20 bp, synthetic construct
  source 1..20: mol_type = other DNA
gaatgagagccaagtgaagg

SEQ ID NO: 9481 - DNA, 20 bp, synthetic construct
  source 1..20: mol_type = other DNA
ggagtctctcccaccacatg

SEQ ID NO: 9482 - DNA, 20 bp, synthetic construct
  source 1..20: mol_type = other DNA
gcaatagaagatgcatgata

SEQ ID NO: 9483 - DNA, 20 bp, synthetic construct
  source 1..20: mol_type = other DNA
tctattgcaagaacaaagcc

SEQ ID NO: 9484 - DNA, 20 bp, synthetic construct
  source 1..20: mol_type = other DNA
aacaaagcctggtgccaagt

SEQ ID NO: 9485 - DNA, 20 bp, synthetic construct
  source 1..20: mol_type = other DNA
ggtgccaagtaggtctcttt

SEQ ID NO: 9486 - DNA, 20 bp, synthetic construct
  source 1..20: mol_type = other DNA
tggtgccaagtaggtctctt

SEQ ID NO: 9487 - DNA, 20 bp, synthetic construct
  source 1..20: mol_type = other DNA
cactgggataacttcccccg

SEQ ID NO: 9488 - DNA, 20 bp, synthetic construct
  source 1..20: mol_type = other DNA
gggtacagagggtctggtca

SEQ ID NO: 9489 - DNA, 20 bp, synthetic construct
  source 1..20: mol_type = other DNA
tacagagggtctggtcaggg

SEQ ID NO: 9490 - DNA, 20 bp, synthetic construct
  source 1..20: mol_type = other DNA
tctgtaccccgacttctgtc

SEQ ID NO: 9491 - DNA, 20 bp, synthetic construct
  source 1..20: mol_type = other DNA
agttatcccagtgtcagggc

SEQ ID NO: 9492 - DNA, 20 bp, synthetic construct
  source 1..20: mol_type = other DNA
ttctggccggacagaagtcg

SEQ ID NO: 9493 - DNA, 20 bp, synthetic construct
  source 1..20: mol_type = other DNA
gcagttcccgccctgacact

SEQ ID NO: 9494 - DNA, 20 bp, synthetic construct
  source 1..20: mol_type = other DNA
cctggactgttaaacttcgg

SEQ ID NO: 9495 - DNA, 20 bp, synthetic construct
  source 1..20: mol_type = other DNA
tcgccccgtgacgtcactcg

SEQ ID NO: 9496 - DNA, 20 bp, synthetic construct
  source 1..20: mol_type = other DNA
ggacagaagtcggggtacag

SEQ ID NO: 9497 - DNA, 20 bp, synthetic construct
  source 1..20: mol_type = other DNA
gcttctggccggacagaagt

SEQ ID NO: 9498 - DNA, 20 bp, synthetic construct
  source 1..20: mol_type = other DNA
gggaagttatcccagtgtca

SEQ ID NO: 9499 - DNA, 20 bp, synthetic construct
  source 1..20: mol_type = other DNA
gacagaagtcggggtacaga

SEQ ID NO: 9500 - DNA, 20 bp, synthetic construct
  source 1..20: mol_type = other DNA
gtgcggctgtggcttctggc

SEQ ID NO: 9501 - DNA, 20 bp, synthetic construct
  source 1..20: mol_type = other DNA
acggggcgaggcgctgcgtg

SEQ ID NO: 9502 - DNA, 20 bp, synthetic construct
  source 1..20: mol_type = other DNA
acgaggccggggaagccccg

SEQ ID NO: 9503 - DNA, 20 bp, synthetic construct
  source 1..20: mol_type = other DNA
gtgcggcccccgctcccccg

SEQ ID NO: 9504 - DNA, 20 bp, synthetic construct
  source 1..20: mol_type = other DNA
cgggtggccgcgcatgcgtg

SEQ ID NO: 9505 - DNA, 20 bp, synthetic construct
  source 1..20: mol_type = other DNA
cgtgcgcacgcacgaggccg

SEQ ID NO: 9506 - DNA, 20 bp, synthetic construct
  source 1..20: mol_type = other DNA
tacccagggcaaccgcagtg

SEQ ID NO: 9507 - DNA, 20 bp, synthetic construct
  source 1..20: mol_type = other DNA
gcgggggccgcacgcatgcg

SEQ ID NO: 9508 - DNA, 20 bp, synthetic construct
  source 1..20: mol_type = other DNA
cacgaggccggggaagcccc

SEQ ID NO: 9509 - DNA, 20 bp, synthetic construct
  source 1..20: mol_type = other DNA
gggaagccccgggggagcgg

SEQ ID NO: 9510 - DNA, 20 bp, synthetic construct
  source 1..20: mol_type = other DNA
gcacgaggccggggaagccc

SEQ ID NO: 9511 - DNA, 20 bp, synthetic construct
  source 1..20: mol_type = other DNA
cgtgcggcccccgctccccc

SEQ ID NO: 9512 - DNA, 20 bp, synthetic construct
  source 1..20: mol_type = other DNA
gtaacgcggcccgagggagg

SEQ ID NO: 9513 - DNA, 20 bp, synthetic construct
  source 1..20: mol_type = other DNA
ccatcccccaccccagcgcc

SEQ ID NO: 9514 - DNA, 20 bp, synthetic construct
  source 1..20: mol_type = other DNA
ccgaccgggccggggctggg

SEQ ID NO: 9515 - DNA, 20 bp, synthetic construct
  source 1..20: mol_type = other DNA
ggaggagcgagggaggcgag

SEQ ID NO: 9516 - DNA, 20 bp, synthetic construct
  source 1..20: mol_type = other DNA
gaggagcgagggaggcgagc

SEQ ID NO: 9517 - DNA, 20 bp, synthetic construct
  source 1..20: mol_type = other DNA
gcacatgcgcagaatcatcg

SEQ ID NO: 9518 - DNA, 20 bp, synthetic construct
  source 1..20: mol_type = other DNA
aatgtcgggaaagcaagaga

SEQ ID NO: 9519 - DNA, 20 bp, synthetic construct
  source 1..20: mol_type = other DNA
ggcggtattgacagctgtgg

SEQ ID NO: 9520 - DNA, 20 bp, synthetic construct
  source 1..20: mol_type = other DNA
gattctgcgcatgtgcctgg

SEQ ID NO: 9521 - DNA, 20 bp, synthetic construct
  source 1..20: mol_type = other DNA
gatgattctgcgcatgtgcc

SEQ ID NO: 9522 - DNA, 20 bp, synthetic construct
  source 1..20: mol_type = other DNA
tcgggaaagcaagagaaggg

SEQ ID NO: 9523 - DNA, 20 bp, synthetic construct
  source 1..20: mol_type = other DNA
cgcagaatcatcgtggtgca

SEQ ID NO: 9524 - DNA, 20 bp, synthetic construct
  source 1..20: mol_type = other DNA
gagccaaccccgccgcccca

SEQ ID NO: 9525 - DNA, 20 bp, synthetic construct
  source 1..20: mol_type = other DNA
tgtcgggaaagcaagagaag

SEQ ID NO: 9526 - DNA, 20 bp, synthetic construct
  source 1..20: mol_type = other DNA
ctgcgcatgtgcctggcggg

SEQ ID NO: 9527 - DNA, 20 bp, synthetic construct
  source 1..20: mol_type = other DNA
gttcccggcattccctgggg

SEQ ID NO: 9528 - DNA, 20 bp, synthetic construct
  source 1..20: mol_type = other DNA
agaggcggtattgacagctg

SEQ ID NO: 9529 - DNA, 20 bp, synthetic construct
  source 1..20: mol_type = other DNA
agagaaggggggttaagagg

SEQ ID NO: 9530 - DNA, 20 bp, synthetic construct
  source 1..20: mol_type = other DNA
gtcgggaaagcaagagaagg

SEQ ID NO: 9531 - DNA, 20 bp, synthetic construct
  source 1..20: mol_type = other DNA
atgtcgggaaagcaagagaa

SEQ ID NO: 9532 - DNA, 20 bp, synthetic construct
  source 1..20: mol_type = other DNA
ggcaggcgagcgcttcggag

SEQ ID NO: 9533 - DNA, 20 bp, synthetic construct
  source 1..20: mol_type = other DNA
cttcggcaaaaatcgtcagg

SEQ ID NO: 9534 - DNA, 20 bp, synthetic construct
  source 1..20: mol_type = other DNA
caggcgttggcatcttacca

SEQ ID NO: 9535 - DNA, 20 bp, synthetic construct
  source 1..20: mol_type = other DNA
gcgcgaaacgtgccgaagcg

SEQ ID NO: 9536 - DNA, 20 bp, synthetic construct
  source 1..20: mol_type = other DNA
cgcgaaacgtgccgaagcgt

SEQ ID NO: 9537 - DNA, 20 bp, synthetic construct
  source 1..20: mol_type = other DNA
ccgaaggcaggcgagcgctt

SEQ ID NO: 9538 - DNA, 20 bp, synthetic construct
  source 1..20: mol_type = other DNA
gcttcggcacgtttcgcgca

SEQ ID NO: 9539 - DNA, 20 bp, synthetic construct
  source 1..20: mol_type = other DNA
caggcttccgccaagactgg

SEQ ID NO: 9540 - DNA, 20 bp, synthetic construct
  source 1..20: mol_type = other DNA
ccgaagcgctcgcctgcctt

SEQ ID NO: 9541 - DNA, 20 bp, synthetic construct
  source 1..20: mol_type = other DNA
gcgttggcatcttaccaggg

SEQ ID NO: 9542 - DNA, 20 bp, synthetic construct
  source 1..20: mol_type = other DNA
gcagggcattgtgggaaggg

SEQ ID NO: 9543 - DNA, 20 bp, synthetic construct
  source 1..20: mol_type = other DNA
acaggcgttggcatcttacc

SEQ ID NO: 9544 - DNA, 20 bp, synthetic construct
  source 1..20: mol_type = other DNA
aaaaaaaaaagagtacgcca

SEQ ID NO: 9545 - DNA, 20 bp, synthetic construct
  source 1..20: mol_type = other DNA
tcgcgcagggcattgtggga

SEQ ID NO: 9546 - DNA, 20 bp, synthetic construct
  source 1..20: mol_type = other DNA
aggaggcggggcccacgctt

SEQ ID NO: 9547 - DNA, 20 bp, synthetic construct
  source 1..20: mol_type = other DNA
actggggagccaccacccgg

SEQ ID NO: 9548 - DNA, 20 bp, synthetic construct
  source 1..20: mol_type = other DNA
ggtcctatcccggctcgcgg

SEQ ID NO: 9549 - DNA, 20 bp, synthetic construct
  source 1..20: mol_type = other DNA
ggctcaggccccgggaactg

SEQ ID NO: 9550 - DNA, 20 bp, synthetic construct
  source 1..20: mol_type = other DNA
ggcggcgaccgggcaccctg

SEQ ID NO: 9551 - DNA, 20 bp, synthetic construct
  source 1..20: mol_type = other DNA
ggcactggggagccaccacc

SEQ ID NO: 9552 - DNA, 20 bp, synthetic construct
  source 1..20: mol_type = other DNA
ctcggtcctatcccggctcg

SEQ ID NO: 9553 - DNA, 20 bp, synthetic construct
  source 1..20: mol_type = other DNA
cgggcaccctgcggccactg

SEQ ID NO: 9554 - DNA, 20 bp, synthetic construct
  source 1..20: mol_type = other DNA
ccctccgcccgcagttcccg

SEQ ID NO: 9555 - DNA, 20 bp, synthetic construct
  source 1..20: mol_type = other DNA
ctggggagccaccacccggc

SEQ ID NO: 9556 - DNA, 20 bp, synthetic construct
  source 1..20: mol_type = other DNA
cgcgggagtcgcaggagcag

SEQ ID NO: 9557 - DNA, 20 bp, synthetic construct
  source 1..20: mol_type = other DNA
caggccccgggaactgcggg

SEQ ID NO: 9558 - DNA, 20 bp, synthetic construct
  source 1..20: mol_type = other DNA
cctgcgactcccgcgcccgc

SEQ ID NO: 9559 - DNA, 20 bp, synthetic construct
  source 1..20: mol_type = other DNA
ggagctgggggcgggcactg

SEQ ID NO: 9560 - DNA, 20 bp, synthetic construct
  source 1..20: mol_type = other DNA
cgcaggagcagcggccgcag

SEQ ID NO: 9561 - DNA, 20 bp, synthetic construct
  source 1..20: mol_type = other DNA
cgactcccgcgcccgccggg

SEQ ID NO: 9562 - DNA, 20 bp, synthetic construct
  source 1..20: mol_type = other DNA
ccggccccgaaggtctagcg

SEQ ID NO: 9563 - DNA, 20 bp, synthetic construct
  source 1..20: mol_type = other DNA
agaccctcgctagaccttcg

SEQ ID NO: 9564 - DNA, 20 bp, synthetic construct
  source 1..20: mol_type = other DNA
gtctagcgagggtctaacct

SEQ ID NO: 9565 - DNA, 20 bp, synthetic construct
  source 1..20: mol_type = other DNA
gcgcactcccagcttagccc

SEQ ID NO: 9566 - DNA, 20 bp, synthetic construct
  source 1..20: mol_type = other DNA
ggtctagcgagggtctaacc

SEQ ID NO: 9567 - DNA, 20 bp, synthetic construct
  source 1..20: mol_type = other DNA
gatttaagggcgcagcagtg

SEQ ID NO: 9568 - DNA, 20 bp, synthetic construct
  source 1..20: mol_type = other DNA
cggccccgaaggtctagcga

SEQ ID NO: 9569 - DNA, 20 bp, synthetic construct
  source 1..20: mol_type = other DNA
gcgccccaagtctgaagctc

SEQ ID NO: 9570 - DNA, 20 bp, synthetic construct
  source 1..20: mol_type = other DNA
aagccggagcttcagacttg

SEQ ID NO: 9571 - DNA, 20 bp, synthetic construct
  source 1..20: mol_type = other DNA
cctacctgggcttcttaaag

SEQ ID NO: 9572 - DNA, 20 bp, synthetic construct
  source 1..20: mol_type = other DNA
ttagaccctcgctagacctt

SEQ ID NO: 9573 - DNA, 20 bp, synthetic construct
  source 1..20: mol_type = other DNA
acctctcaccccggccccga

SEQ ID NO: 9574 - DNA, 20 bp, synthetic construct
  source 1..20: mol_type = other DNA
agtgtggatacctctcaccc

SEQ ID NO: 9575 - DNA, 20 bp, synthetic construct
  source 1..20: mol_type = other DNA
tgggcttcttaaaggggcag

SEQ ID NO: 9576 - DNA, 20 bp, synthetic construct
  source 1..20: mol_type = other DNA
ccccgcccctttccagcccc

SEQ ID NO: 9577 - DNA, 20 bp, synthetic construct
  source 1..20: mol_type = other DNA
ctgagagaactacatgcagg

SEQ ID NO: 9578 - DNA, 20 bp, synthetic construct
  source 1..20: mol_type = other DNA
gctaaatcccgtggcgctcg

SEQ ID NO: 9579 - DNA, 20 bp, synthetic construct
  source 1..20: mol_type = other DNA
agagggagaatagctccaga

SEQ ID NO: 9580 - DNA, 20 bp, synthetic construct
  source 1..20: mol_type = other DNA
agcgccacgggatttagcac

SEQ ID NO: 9581 - DNA, 20 bp, synthetic construct
  source 1..20: mol_type = other DNA
ggcgacacccgcgagcgcca

SEQ ID NO: 9582 - DNA, 20 bp, synthetic construct
  source 1..20: mol_type = other DNA
ttctcctgtgctaaatcccg

SEQ ID NO: 9583 - DNA, 20 bp, synthetic construct
  source 1..20: mol_type = other DNA
acgctgagagaactacatgc

SEQ ID NO: 9584 - DNA, 20 bp, synthetic construct
  source 1..20: mol_type = other DNA
acaactcccaggatgcaccg

SEQ ID NO: 9585 - DNA, 20 bp, synthetic construct
  source 1..20: mol_type = other DNA
gcgacacccgcgagcgccac

SEQ ID NO: 9586 - DNA, 20 bp, synthetic construct
  source 1..20: mol_type = other DNA
ggcgctcgcgggtgtcgccg

SEQ ID NO: 9587 - DNA, 20 bp, synthetic construct
  source 1..20: mol_type = other DNA
agaactacatgcaggaggcg

SEQ ID NO: 9588 - DNA, 20 bp, synthetic construct
  source 1..20: mol_type = other DNA
gagaactacatgcaggaggc

SEQ ID NO: 9589 - DNA, 20 bp, synthetic construct
  source 1..20: mol_type = other DNA
ttagcacaggagaatttccc

SEQ ID NO: 9590 - DNA, 20 bp, synthetic construct
  source 1..20: mol_type = other DNA
gactacgctcttccagctgt

SEQ ID NO: 9591 - DNA, 20 bp, synthetic construct
  source 1..20: mol_type = other DNA
tagaaaaaactacaactccc

SEQ ID NO: 9592 - DNA, 20 bp, synthetic construct
  source 1..20: mol_type = other DNA
cagagcagctcagtgttatg

SEQ ID NO: 9593 - DNA, 20 bp, synthetic construct
  source 1..20: mol_type = other DNA
gcctgctccacactccagcg

SEQ ID NO: 9594 - DNA, 20 bp, synthetic construct
  source 1..20: mol_type = other DNA
aaggagtgagcagctgacag

SEQ ID NO: 9595 - DNA, 20 bp, synthetic construct
  source 1..20: mol_type = other DNA
gaaaggagtgagcagctgac

SEQ ID NO: 9596 - DNA, 20 bp, synthetic construct
  source 1..20: mol_type = other DNA
gcagctcagtgttatgggga

SEQ ID NO: 9597 - DNA, 20 bp, synthetic construct
  source 1..20: mol_type = other DNA
ccccaggcggtcggcgtggt

SEQ ID NO: 9598 - DNA, 20 bp, synthetic construct
  source 1..20: mol_type = other DNA
aatatacatagggccccagg

SEQ ID NO: 9599 - DNA, 20 bp, synthetic construct
  source 1..20: mol_type = other DNA
ttaaatatacatagggcccc

SEQ ID NO: 9600 - DNA, 20 bp, synthetic construct
  source 1..20: mol_type = other DNA
acagcctggagagctgagca

SEQ ID NO: 9601 - DNA, 20 bp, synthetic construct
  source 1..20: mol_type = other DNA
tcagctctccaggctgttcg

SEQ ID NO: 9602 - DNA, 20 bp, synthetic construct
  source 1..20: mol_type = other DNA
tacatagggccccaggcggt

SEQ ID NO: 9603 - DNA, 20 bp, synthetic construct
  source 1..20: mol_type = other DNA
cctcgggccccgctggagtg

SEQ ID NO: 9604 - DNA, 20 bp, synthetic construct
  source 1..20: mol_type = other DNA
gggcctgctccacactccag

SEQ ID NO: 9605 - DNA, 20 bp, synthetic construct
  source 1..20: mol_type = other DNA
ccacactccagcggggcccg

SEQ ID NO: 9606 - DNA, 20 bp, synthetic construct
  source 1..20: mol_type = other DNA
aaaggagtgagcagctgaca

SEQ ID NO: 9607 - DNA, 20 bp, synthetic construct
  source 1..20: mol_type = other DNA
gcagccactagcggcaacgg

SEQ ID NO: 9608 - DNA, 20 bp, synthetic construct
  source 1..20: mol_type = other DNA
agcagccactagcggcaacg

SEQ ID NO: 9609 - DNA, 20 bp, synthetic construct
  source 1..20: mol_type = other DNA
gcgcggccaggtgagccccg

SEQ ID NO: 9610 - DNA, 20 bp, synthetic construct
  source 1..20: mol_type = other DNA
ggagcgacagcagccactag

SEQ ID NO: 9611 - DNA, 20 bp, synthetic construct
  source 1..20: mol_type = other DNA
ggctcctgctgccgcgcgtg

SEQ ID NO: 9612 - DNA, 20 bp, synthetic construct
  source 1..20: mol_type = other DNA
acagcagccactagcggcaa

SEQ ID NO: 9613 - DNA, 20 bp, synthetic construct
  source 1..20: mol_type = other DNA
agcccctgccgccccacgcg

SEQ ID NO: 9614 - DNA, 20 bp, synthetic construct
  source 1..20: mol_type = other DNA
gaggcgccagcagccagcgc

SEQ ID NO: 9615 - DNA, 20 bp, synthetic construct
  source 1..20: mol_type = other DNA
ggcgcggccaggtgagcccc

SEQ ID NO: 9616 - DNA, 20 bp, synthetic construct
  source 1..20: mol_type = other DNA
cacctggccgcgcccacctg

SEQ ID NO: 9617 - DNA, 20 bp, synthetic construct
  source 1..20: mol_type = other DNA
gggcgggaggcgccgcaggt

SEQ ID NO: 9618 - DNA, 20 bp, synthetic construct
  source 1..20: mol_type = other DNA
ccagcagccagcgccggcca

SEQ ID NO: 9619 - DNA, 20 bp, synthetic construct
  source 1..20: mol_type = other DNA
ggccagggtcccgggcaggg

SEQ ID NO: 9620 - DNA, 20 bp, synthetic construct
  source 1..20: mol_type = other DNA
gccgggctgagcgcgctggg

SEQ ID NO: 9621 - DNA, 20 bp, synthetic construct
  source 1..20: mol_type = other DNA
gggcgcggccaggtgagccc

SEQ ID NO: 9622 - DNA, 20 bp, synthetic construct
  source 1..20: mol_type = other DNA
tcataacagagccacataag

SEQ ID NO: 9623 - DNA, 20 bp, synthetic construct
  source 1..20: mol_type = other DNA
acagaaacttgttgtttccg

SEQ ID NO: 9624 - DNA, 20 bp, synthetic construct
  source 1..20: mol_type = other DNA
agatggagaatgagaagtcc

SEQ ID NO: 9625 - DNA, 20 bp, synthetic construct
  source 1..20: mol_type = other DNA
tcatttactttccacttatg

SEQ ID NO: 9626 - DNA, 20 bp, synthetic construct
  source 1..20: mol_type = other DNA
aacatacacaaaacaaaaga

SEQ ID NO: 9627 - DNA, 20 bp, synthetic construct
  source 1..20: mol_type = other DNA
tgtttaagcgctttcatatt

SEQ ID NO: 9628 - DNA, 20 bp, synthetic construct
  source 1..20: mol_type = other DNA
agtaaatgattaaagaatgt

SEQ ID NO: 9629 - DNA, 20 bp, synthetic construct
  source 1..20: mol_type = other DNA
atgagaagtccaggcaaccc

SEQ ID NO: 9630 - DNA, 20 bp, synthetic construct
  source 1..20: mol_type = other DNA
tggctctgttatgaaatctt

SEQ ID NO: 9631 - DNA, 20 bp, synthetic construct
  source 1..20: mol_type = other DNA
aagtaaatgattaaagaatg

SEQ ID NO: 9632 - DNA, 20 bp, synthetic construct
  source 1..20: mol_type = other DNA
gttatgaaatctttgggaga

SEQ ID NO: 9633 - DNA, 20 bp, synthetic construct
  source 1..20: mol_type = other DNA
tgacagaaacttgttgtttc

SEQ ID NO: 9634 - DNA, 20 bp, synthetic construct
  source 1..20: mol_type = other DNA
ggctctgttatgaaatcttt

SEQ ID NO: 9635 - DNA, 20 bp, synthetic construct
  source 1..20: mol_type = other DNA
gataaaagtacaccagaaaa

SEQ ID NO: 9636 - DNA, 20 bp, synthetic construct
  source 1..20: mol_type = other DNA
ataaagtatcatgatttgaa

SEQ ID NO: 9637 - DNA, 20 bp, synthetic construct
  source 1..20: mol_type = other DNA
ctgtagggcgcgcggatctg

SEQ ID NO: 9638 - DNA, 20 bp, synthetic construct
  source 1..20: mol_type = other DNA
ggaggagactcggggctgta

SEQ ID NO: 9639 - DNA, 20 bp, synthetic construct
  source 1..20: mol_type = other DNA
ctgaaactggaggagactcg

SEQ ID NO: 9640 - DNA, 20 bp, synthetic construct
  source 1..20: mol_type = other DNA
gagggaaagcttgcagggga

SEQ ID NO: 9641 - DNA, 20 bp, synthetic construct
  source 1..20: mol_type = other DNA
tggaggagactcggggctgt

SEQ ID NO: 9642 - DNA, 20 bp, synthetic construct
  source 1..20: mol_type = other DNA
ccctgggcgcgccgggaccg

SEQ ID NO: 9643 - DNA, 20 bp, synthetic construct
  source 1..20: mol_type = other DNA
ctggggcgcgccctcggtcc

SEQ ID NO: 9644 - DNA, 20 bp, synthetic construct
  source 1..20: mol_type = other DNA
cctgggcgcgccgggaccga

SEQ ID NO: 9645 - DNA, 20 bp, synthetic construct
  source 1..20: mol_type = other DNA
cctcggtcccggcgcgccca

SEQ ID NO: 9646 - DNA, 20 bp, synthetic construct
  source 1..20: mol_type = other DNA
gcgcggggcccggcacaggg

SEQ ID NO: 9647 - DNA, 20 bp, synthetic construct
  source 1..20: mol_type = other DNA
tctgcgcccgggagaggccc

SEQ ID NO: 9648 - DNA, 20 bp, synthetic construct
  source 1..20: mol_type = other DNA
tccctgtgccgggccccgcg

SEQ ID NO: 9649 - DNA, 20 bp, synthetic construct
  source 1..20: mol_type = other DNA
ccctgtgccgggccccgcgc

SEQ ID NO: 9650 - DNA, 20 bp, synthetic construct
  source 1..20: mol_type = other DNA
gggcccggcacagggaggcg

SEQ ID NO: 9651 - DNA, 20 bp, synthetic construct
  source 1..20: mol_type = other DNA
cccgcgcggggcccggcaca

SEQ ID NO: 9652 - DNA, 20 bp, synthetic construct
  source 1..20: mol_type = other DNA
ccgcacccaatggcgaacgg

SEQ ID NO: 9653 - DNA, 20 bp, synthetic construct
  source 1..20: mol_type = other DNA
gcgacgtcacccgcacccaa

SEQ ID NO: 9654 - DNA, 20 bp, synthetic construct
  source 1..20: mol_type = other DNA
cccgcacccaatggcgaacg

SEQ ID NO: 9655 - DNA, 20 bp, synthetic construct
  source 1..20: mol_type = other DNA
gccgagccgaggctataaga

SEQ ID NO: 9656 - DNA, 20 bp, synthetic construct
  source 1..20: mol_type = other DNA
ggtgacgtcgctcatttgca

SEQ ID NO: 9657 - DNA, 20 bp, synthetic construct
  source 1..20: mol_type = other DNA
gagctcatcgcgccgagccg

SEQ ID NO: 9658 - DNA, 20 bp, synthetic construct
  source 1..20: mol_type = other DNA
cgtcgctcatttgcatggag

SEQ ID NO: 9659 - DNA, 20 bp, synthetic construct
  source 1..20: mol_type = other DNA
gccctcttatagcctcggct

SEQ ID NO: 9660 - DNA, 20 bp, synthetic construct
  source 1..20: mol_type = other DNA
tgtgcgccctcttatagcct

SEQ ID NO: 9661 - DNA, 20 bp, synthetic construct
  source 1..20: mol_type = other DNA
gcgcgtcgccggggcaacgg

SEQ ID NO: 9662 - DNA, 20 bp, synthetic construct
  source 1..20: mol_type = other DNA
gacgtcgctcatttgcatgg

SEQ ID NO: 9663 - DNA, 20 bp, synthetic construct
  source 1..20: mol_type = other DNA
cgccgagccgaggctataag

SEQ ID NO: 9664 - DNA, 20 bp, synthetic construct
  source 1..20: mol_type = other DNA
gcgtttaccgcgcgtcgccg

SEQ ID NO: 9665 - DNA, 20 bp, synthetic construct
  source 1..20: mol_type = other DNA
accgcgcgtcgccggggcaa

SEQ ID NO: 9666 - DNA, 20 bp, synthetic construct
  source 1..20: mol_type = other DNA
aacggcggccgggcgggcgt

SEQ ID NO: 9667 - DNA, 20 bp, synthetic construct
  source 1..20: mol_type = other DNA
actgaggctgagtagcggga

SEQ ID NO: 9668 - DNA, 20 bp, synthetic construct
  source 1..20: mol_type = other DNA
cggtcacggcggcctgccca

SEQ ID NO: 9669 - DNA, 20 bp, synthetic construct
  source 1..20: mol_type = other DNA
gacgagggtgtcgatggtga

SEQ ID NO: 9670 - DNA, 20 bp, synthetic construct
  source 1..20: mol_type = other DNA
aacacgcagggcggtcacgg

SEQ ID NO: 9671 - DNA, 20 bp, synthetic construct
  source 1..20: mol_type = other DNA
gaccgccctgcgtgttccca

SEQ ID NO: 9672 - DNA, 20 bp, synthetic construct
  source 1..20: mol_type = other DNA
gggaacacgcagggcggtca

SEQ ID NO: 9673 - DNA, 20 bp, synthetic construct
  source 1..20: mol_type = other DNA
gtcccagcctttgacagtga

SEQ ID NO: 9674 - DNA, 20 bp, synthetic construct
  source 1..20: mol_type = other DNA
gaggctccctgggaacacgc

SEQ ID NO: 9675 - DNA, 20 bp, synthetic construct
  source 1..20: mol_type = other DNA
acgagggtgtcgatggtgag

SEQ ID NO: 9676 - DNA, 20 bp, synthetic construct
  source 1..20: mol_type = other DNA
aggggcggggcagctgccag

SEQ ID NO: 9677 - DNA, 20 bp, synthetic construct
  source 1..20: mol_type = other DNA
aggctccctgggaacacgca

SEQ ID NO: 9678 - DNA, 20 bp, synthetic construct
  source 1..20: mol_type = other DNA
gtcgatggtgaggggcgaag

SEQ ID NO: 9679 - DNA, 20 bp, synthetic construct
  source 1..20: mol_type = other DNA
ggggcggggcagctgccagg

SEQ ID NO: 9680 - DNA, 20 bp, synthetic construct
  source 1..20: mol_type = other DNA
gtgttcccagggagcctcca

SEQ ID NO: 9681 - DNA, 20 bp, synthetic construct
  source 1..20: mol_type = other DNA
cccctccccggccctccccc

SEQ ID NO: 9682 - DNA, 20 bp, synthetic construct
  source 1..20: mol_type = other DNA
ccagcccccagtcacgaggt

SEQ ID NO: 9683 - DNA, 20 bp, synthetic construct
  source 1..20: mol_type = other DNA
ccagcccgccctatccctgg

SEQ ID NO: 9684 - DNA, 20 bp, synthetic construct
  source 1..20: mol_type = other DNA
tgggccagcccccagtcacg

SEQ ID NO: 9685 - DNA, 20 bp, synthetic construct
  source 1..20: mol_type = other DNA
acagcccacctcgtgactgg

SEQ ID NO: 9686 - DNA, 20 bp, synthetic construct
  source 1..20: mol_type = other DNA
cccctgccccaggcacagca

SEQ ID NO: 9687 - DNA, 20 bp, synthetic construct
  source 1..20: mol_type = other DNA
agaacagcccacctcgtgac

SEQ ID NO: 9688 - DNA, 20 bp, synthetic construct
  source 1..20: mol_type = other DNA
gccagcccccagtcacgagg

SEQ ID NO: 9689 - DNA, 20 bp, synthetic construct
  source 1..20: mol_type = other DNA
aacagcccacctcgtgactg

SEQ ID NO: 9690 - DNA, 20 bp, synthetic construct
  source 1..20: mol_type = other DNA
ggctgttctccccctgcccc

SEQ ID NO: 9691 - DNA, 20 bp, synthetic construct
  source 1..20: mol_type = other DNA
cctctgccctgctgtgcctg

SEQ ID NO: 9692 - DNA, 20 bp, synthetic construct
  source 1..20: mol_type = other DNA
cctgctgtgcctggggcagg

SEQ ID NO: 9693 - DNA, 20 bp, synthetic construct
  source 1..20: mol_type = other DNA
aggcacagcagggcagaggg

SEQ ID NO: 9694 - DNA, 20 bp, synthetic construct
  source 1..20: mol_type = other DNA
cccaggcacagcagggcaga

SEQ ID NO: 9695 - DNA, 20 bp, synthetic construct
  source 1..20: mol_type = other DNA
ccccaggcacagcagggcag

SEQ ID NO: 9696 - DNA, 20 bp, synthetic construct
  source 1..20: mol_type = other DNA
ggcagagggaggaaggaggt

SEQ ID NO: 9697 - DNA, 20 bp, synthetic construct
  source 1..20: mol_type = other DNA
cagcggccctgagaaaccac

SEQ ID NO: 9698 - DNA, 20 bp, synthetic construct
  source 1..20: mol_type = other DNA
agcccaggaaccaaactgtg

SEQ ID NO: 9699 - DNA, 20 bp, synthetic construct
  source 1..20: mol_type = other DNA
acttagtccaccaagtccca

SEQ ID NO: 9700 - DNA, 20 bp, synthetic construct
  source 1..20: mol_type = other DNA
gaagtgtaccttactccctc

SEQ ID NO: 9701 - DNA, 20 bp, synthetic construct
  source 1..20: mol_type = other DNA
gaaccaaactgtgaggcccg

SEQ ID NO: 9702 - DNA, 20 bp, synthetic construct
  source 1..20: mol_type = other DNA
aagtgtaccttactccctcc

SEQ ID NO: 9703 - DNA, 20 bp, synthetic construct
  source 1..20: mol_type = other DNA
gctgatgcgaaaggtctcct

SEQ ID NO: 9704 - DNA, 20 bp, synthetic construct
  source 1..20: mol_type = other DNA
ggagtaaggtacacttcctg

SEQ ID NO: 9705 - DNA, 20 bp, synthetic construct
  source 1..20: mol_type = other DNA
caggagacctttcgcatcag

SEQ ID NO: 9706 - DNA, 20 bp, synthetic construct
  source 1..20: mol_type = other DNA
cctgggagctgaagtccccg

SEQ ID NO: 9707 - DNA, 20 bp, synthetic construct
  source 1..20: mol_type = other DNA
gtgaggcccggggcaccacg

SEQ ID NO: 9708 - DNA, 20 bp, synthetic construct
  source 1..20: mol_type = other DNA
tgaagtccccgtggtgcccc

SEQ ID NO: 9709 - DNA, 20 bp, synthetic construct
  source 1..20: mol_type = other DNA
ggaaccaaactgtgaggccc

SEQ ID NO: 9710 - DNA, 20 bp, synthetic construct
  source 1..20: mol_type = other DNA
ccacggggacttcagctccc

SEQ ID NO: 9711 - DNA, 20 bp, synthetic construct
  source 1..20: mol_type = other DNA
ctgaagtccccgtggtgccc

SEQ ID NO: 9712 - DNA, 20 bp, synthetic construct
  source 1..20: mol_type = other DNA
gagatctctggtgtagtccg

SEQ ID NO: 9713 - DNA, 20 bp, synthetic construct
  source 1..20: mol_type = other DNA
ctgtccacgccacctgagcg

SEQ ID NO: 9714 - DNA, 20 bp, synthetic construct
  source 1..20: mol_type = other DNA
tgccgggcttgcccaacgag

SEQ ID NO: 9715 - DNA, 20 bp, synthetic construct
  source 1..20: mol_type = other DNA
atctctggtgtagtccgagg

SEQ ID NO: 9716 - DNA, 20 bp, synthetic construct
  source 1..20: mol_type = other DNA
gggcaaacaccacgctcagg

SEQ ID NO: 9717 - DNA, 20 bp, synthetic construct
  source 1..20: mol_type = other DNA
agggggcaaacaccacgctc

SEQ ID NO: 9718 - DNA, 20 bp, synthetic construct
  source 1..20: mol_type = other DNA
tgctctggcgcccggcactg

SEQ ID NO: 9719 - DNA, 20 bp, synthetic construct
  source 1..20: mol_type = other DNA
gggcaagcccggcagaaagt

SEQ ID NO: 9720 - DNA, 20 bp, synthetic construct
  source 1..20: mol_type = other DNA
ctgccgggcttgcccaacga

SEQ ID NO: 9721 - DNA, 20 bp, synthetic construct
  source 1..20: mol_type = other DNA
aacaccacgctcaggtggcg

SEQ ID NO: 9722 - DNA, 20 bp, synthetic construct
  source 1..20: mol_type = other DNA
cagaaagtgggagcgactgg

SEQ ID NO: 9723 - DNA, 20 bp, synthetic construct
  source 1..20: mol_type = other DNA
tctgccgggcttgcccaacg

SEQ ID NO: 9724 - DNA, 20 bp, synthetic construct
  source 1..20: mol_type = other DNA
ggcactgcggctctgcgggc

SEQ ID NO: 9725 - DNA, 20 bp, synthetic construct
  source 1..20: mol_type = other DNA
gccgggcttgcccaacgagg

SEQ ID NO: 9726 - DNA, 20 bp, synthetic construct
  source 1..20: mol_type = other DNA
acgcccgccccgccctcccg

SEQ ID NO: 9727 - DNA, 20 bp, synthetic construct
  source 1..20: mol_type = other DNA
cgtctggagccgcccggttg

SEQ ID NO: 9728 - DNA, 20 bp, synthetic construct
  source 1..20: mol_type = other DNA
cctcttcggccgcaaccggg

SEQ ID NO: 9729 - DNA, 20 bp, synthetic construct
  source 1..20: mol_type = other DNA
tgcgcctttaaggcccgcgt

SEQ ID NO: 9730 - DNA, 20 bp, synthetic construct
  source 1..20: mol_type = other DNA
gcggctccagacgtccagga

SEQ ID NO: 9731 - DNA, 20 bp, synthetic construct
  source 1..20: mol_type = other DNA
gcgtcggcagagcgagcgca

SEQ ID NO: 9732 - DNA, 20 bp, synthetic construct
  source 1..20: mol_type = other DNA
tgcgctcgctctgccgacgc

SEQ ID NO: 9733 - DNA, 20 bp, synthetic construct
  source 1..20: mol_type = other DNA
ccagacgtccaggagggcag

SEQ ID NO: 9734 - DNA, 20 bp, synthetic construct
  source 1..20: mol_type = other DNA
ggcggctccagacgtccagg

SEQ ID NO: 9735 - DNA, 20 bp, synthetic construct
  source 1..20: mol_type = other DNA
cgtcggcagagcgagcgcag

SEQ ID NO: 9736 - DNA, 20 bp, synthetic construct
  source 1..20: mol_type = other DNA
cgcgtcggcagagcgagcgc

SEQ ID NO: 9737 - DNA, 20 bp, synthetic construct
  source 1..20: mol_type = other DNA
gaggctgggctggtgcggcg

SEQ ID NO: 9738 - DNA, 20 bp, synthetic construct
  source 1..20: mol_type = other DNA
gggcagaggctgggctggtg

SEQ ID NO: 9739 - DNA, 20 bp, synthetic construct
  source 1..20: mol_type = other DNA
gctgggctggtgcggcgcgg

SEQ ID NO: 9740 - DNA, 20 bp, synthetic construct
  source 1..20: mol_type = other DNA
caggagggcagaggctgggc

SEQ ID NO: 9741 - DNA, 20 bp, synthetic construct
  source 1..20: mol_type = other DNA
cgtccaggagggcagaggct

SEQ ID NO: 9742 - DNA, 20 bp, synthetic construct
  source 1..20: mol_type = other DNA
ccgggccgctctagccggtg

SEQ ID NO: 9743 - DNA, 20 bp, synthetic construct
  source 1..20: mol_type = other DNA
gctctagccggtgaggccgg

SEQ ID NO: 9744 - DNA, 20 bp, synthetic construct
  source 1..20: mol_type = other DNA
gctcgggaggaagtgccgat

SEQ ID NO: 9745 - DNA, 20 bp, synthetic construct
  source 1..20: mol_type = other DNA
cgcagccacagagagcccgc

SEQ ID NO: 9746 - DNA, 20 bp, synthetic construct
  source 1..20: mol_type = other DNA
gctgcggctgggaaaccgcg

SEQ ID NO: 9747 - DNA, 20 bp, synthetic construct
  source 1..20: mol_type = other DNA
gcggctgggaaaccgcgcgg

SEQ ID NO: 9748 - DNA, 20 bp, synthetic construct
  source 1..20: mol_type = other DNA
tcggctgctggggcgaaaag

SEQ ID NO: 9749 - DNA, 20 bp, synthetic construct
  source 1..20: mol_type = other DNA
gaagtgccgatcggctgctg

SEQ ID NO: 9750 - DNA, 20 bp, synthetic construct
  source 1..20: mol_type = other DNA
ggccgggcacctcctccgcg

SEQ ID NO: 9751 - DNA, 20 bp, synthetic construct
  source 1..20: mol_type = other DNA
cggaagcggcggcgctcggg

SEQ ID NO: 9752 - DNA, 20 bp, synthetic construct
  source 1..20: mol_type = other DNA
cggctgctggggcgaaaagg

SEQ ID NO: 9753 - DNA, 20 bp, synthetic construct
  source 1..20: mol_type = other DNA
tgaggccggcgggctctctg

SEQ ID NO: 9754 - DNA, 20 bp, synthetic construct
  source 1..20: mol_type = other DNA
cggaagtgcttggcgcgcgg

SEQ ID NO: 9755 - DNA, 20 bp, synthetic construct
  source 1..20: mol_type = other DNA
gcgccaagcacttccggaag

SEQ ID NO: 9756 - DNA, 20 bp, synthetic construct
  source 1..20: mol_type = other DNA
agccgggaagcggagcgcgg

SEQ ID NO: 9757 - DNA, 20 bp, synthetic construct
  source 1..20: mol_type = other DNA
ttatcaatgcctctgacagg

SEQ ID NO: 9758 - DNA, 20 bp, synthetic construct
  source 1..20: mol_type = other DNA
acagacttgcttcacaagac

SEQ ID NO: 9759 - DNA, 20 bp, synthetic construct
  source 1..20: mol_type = other DNA
aatagacacagacaccgatt

SEQ ID NO: 9760 - DNA, 20 bp, synthetic construct
  source 1..20: mol_type = other DNA
gaaaaccctcctcctgtcag

SEQ ID NO: 9761 - DNA, 20 bp, synthetic construct
  source 1..20: mol_type = other DNA
tgtcttcagcgtgacccaat

SEQ ID NO: 9762 - DNA, 20 bp, synthetic construct
  source 1..20: mol_type = other DNA
actccagtcagcaaaaatgt

SEQ ID NO: 9763 - DNA, 20 bp, synthetic construct
  source 1..20: mol_type = other DNA
tgtttatcaatgcctctgac

SEQ ID NO: 9764 - DNA, 20 bp, synthetic construct
  source 1..20: mol_type = other DNA
cattgataaacagcaagttg

SEQ ID NO: 9765 - DNA, 20 bp, synthetic construct
  source 1..20: mol_type = other DNA
tctggctgagctgattggag

SEQ ID NO: 9766 - DNA, 20 bp, synthetic construct
  source 1..20: mol_type = other DNA
ttgataaacagcaagttgtg

SEQ ID NO: 9767 - DNA, 20 bp, synthetic construct
  source 1..20: mol_type = other DNA
attgataaacagcaagttgt

SEQ ID NO: 9768 - DNA, 20 bp, synthetic construct
  source 1..20: mol_type = other DNA
caatgcctctgacaggagga

SEQ ID NO: 9769 - DNA, 20 bp, synthetic construct
  source 1..20: mol_type = other DNA
tcaatgcctctgacaggagg

SEQ ID NO: 9770 - DNA, 20 bp, synthetic construct
  source 1..20: mol_type = other DNA
gaatagacacagacaccgat

SEQ ID NO: 9771 - DNA, 20 bp, synthetic construct
  source 1..20: mol_type = other DNA
gactaatgaattaaaacatt

SEQ ID NO: 9772 - DNA, 20 bp, synthetic construct
  source 1..20: mol_type = other DNA
acgtcgcgctgggaatgccc

SEQ ID NO: 9773 - DNA, 20 bp, synthetic construct
  source 1..20: mol_type = other DNA
gtggggacgacgtctggcgg

SEQ ID NO: 9774 - DNA, 20 bp, synthetic construct
  source 1..20: mol_type = other DNA
tcatttgcatggtccgaggg

SEQ ID NO: 9775 - DNA, 20 bp, synthetic construct
  source 1..20: mol_type = other DNA
ggaccatgcaaatgagccgg

SEQ ID NO: 9776 - DNA, 20 bp, synthetic construct
  source 1..20: mol_type = other DNA
ggcggggctgacgtcgcgct

SEQ ID NO: 9777 - DNA, 20 bp, synthetic construct
  source 1..20: mol_type = other DNA
ctcatttgcatggtccgagg

SEQ ID NO: 9778 - DNA, 20 bp, synthetic construct
  source 1..20: mol_type = other DNA
ccggcgggaggcccaatgag

SEQ ID NO: 9779 - DNA, 20 bp, synthetic construct
  source 1..20: mol_type = other DNA
gaccatgcaaatgagccggc

SEQ ID NO: 9780 - DNA, 20 bp, synthetic construct
  source 1..20: mol_type = other DNA
cggcgggaggcccaatgagc

SEQ ID NO: 9781 - DNA, 20 bp, synthetic construct
  source 1..20: mol_type = other DNA
gggcaggacgccctcccggg

SEQ ID NO: 9782 - DNA, 20 bp, synthetic construct
  source 1..20: mol_type = other DNA
gggaggcccaatgagcgggc

SEQ ID NO: 9783 - DNA, 20 bp, synthetic construct
  source 1..20: mol_type = other DNA
catgcaaatgagccggcggg

SEQ ID NO: 9784 - DNA, 20 bp, synthetic construct
  source 1..20: mol_type = other DNA
tccccctccaagccccgccc

SEQ ID NO: 9785 - DNA, 20 bp, synthetic construct
  source 1..20: mol_type = other DNA
tcccgggcggggcttggagg

SEQ ID NO: 9786 - DNA, 20 bp, synthetic construct
  source 1..20: mol_type = other DNA
ccgctcattgggcctcccgc

SEQ ID NO: 9787 - DNA, 20 bp, synthetic construct
  source 1..20: mol_type = other DNA
gggttgtaccaggttcccta

SEQ ID NO: 9788 - DNA, 20 bp, synthetic construct
  source 1..20: mol_type = other DNA
aatgggaaatgacaattgtg

SEQ ID NO: 9789 - DNA, 20 bp, synthetic construct
  source 1..20: mol_type = other DNA
tcaacagcctggtactcacg

SEQ ID NO: 9790 - DNA, 20 bp, synthetic construct
  source 1..20: mol_type = other DNA
gaaatgacaattgtgaggtg

SEQ ID NO: 9791 - DNA, 20 bp, synthetic construct
  source 1..20: mol_type = other DNA
cccattggccaactcagtga

SEQ ID NO: 9792 - DNA, 20 bp, synthetic construct
  source 1..20: mol_type = other DNA
aacctggtacaacccagctt

SEQ ID NO: 9793 - DNA, 20 bp, synthetic construct
  source 1..20: mol_type = other DNA
agtaccaggctgttgaggct

SEQ ID NO: 9794 - DNA, 20 bp, synthetic construct
  source 1..20: mol_type = other DNA
ggtgggcaggcacatgtccc

SEQ ID NO: 9795 - DNA, 20 bp, synthetic construct
  source 1..20: mol_type = other DNA
gccaactcagtgagggccag

SEQ ID NO: 9796 - DNA, 20 bp, synthetic construct
  source 1..20: mol_type = other DNA
agtgagggccagaggccggt

SEQ ID NO: 9797 - DNA, 20 bp, synthetic construct
  source 1..20: mol_type = other DNA
cagtgagggccagaggccgg

SEQ ID NO: 9798 - DNA, 20 bp, synthetic construct
  source 1..20: mol_type = other DNA
gccctcactgagttggccaa

SEQ ID NO: 9799 - DNA, 20 bp, synthetic construct
  source 1..20: mol_type = other DNA
agggacatgtgcctgcccac

SEQ ID NO: 9800 - DNA, 20 bp, synthetic construct
  source 1..20: mol_type = other DNA
actcagtgagggccagaggc

SEQ ID NO: 9801 - DNA, 20 bp, synthetic construct
  source 1..20: mol_type = other DNA
ttccctagggtgcaggctgt

SEQ ID NO: 9802 - DNA, 20 bp, synthetic construct
  source 1..20: mol_type = other DNA
ctgaggaaagcgtcattcag

SEQ ID NO: 9803 - DNA, 20 bp, synthetic construct
  source 1..20: mol_type = other DNA
ctagcactctcttacaagaa

SEQ ID NO: 9804 - DNA, 20 bp, synthetic construct
  source 1..20: mol_type = other DNA
ccttcttgtaagagagtgct

SEQ ID NO: 9805 - DNA, 20 bp, synthetic construct
  source 1..20: mol_type = other DNA
tgaggaaagcgtcattcagg

SEQ ID NO: 9806 - DNA, 20 bp, synthetic construct
  source 1..20: mol_type = other DNA
gcactctcttacaagaaggg

SEQ ID NO: 9807 - DNA, 20 bp, synthetic construct
  source 1..20: mol_type = other DNA
ggatgacagaagccagatgc

SEQ ID NO: 9808 - DNA, 20 bp, synthetic construct
  source 1..20: mol_type = other DNA
gatgacacggaggcctaaat

SEQ ID NO: 9809 - DNA, 20 bp, synthetic construct
  source 1..20: mol_type = other DNA
ggaggattaggaataggagg

SEQ ID NO: 9810 - DNA, 20 bp, synthetic construct
  source 1..20: mol_type = other DNA
ttctgtcatcccagatgaca

SEQ ID NO: 9811 - DNA, 20 bp, synthetic construct
  source 1..20: mol_type = other DNA
tgtcatcccagatgacacgg

SEQ ID NO: 9812 - DNA, 20 bp, synthetic construct
  source 1..20: mol_type = other DNA
tctgaggaaagcgtcattca

SEQ ID NO: 9813 - DNA, 20 bp, synthetic construct
  source 1..20: mol_type = other DNA
gtgggaggattaggaatagg

SEQ ID NO: 9814 - DNA, 20 bp, synthetic construct
  source 1..20: mol_type = other DNA
taaggcaagcatcccaattt

SEQ ID NO: 9815 - DNA, 20 bp, synthetic construct
  source 1..20: mol_type = other DNA
tttaggcctccgtgtcatct

SEQ ID NO: 9816 - DNA, 20 bp, synthetic construct
  source 1..20: mol_type = other DNA
actctcttacaagaagggag

SEQ ID NO: 9817 - DNA, 20 bp, synthetic construct
  source 1..20: mol_type = other DNA
tgcggggcgcagacaaccag

SEQ ID NO: 9818 - DNA, 20 bp, synthetic construct
  source 1..20: mol_type = other DNA
gcgcgaggtctcagaagacc

SEQ ID NO: 9819 - DNA, 20 bp, synthetic construct
  source 1..20: mol_type = other DNA
gacaaccagcggccggccca

SEQ ID NO: 9820 - DNA, 20 bp, synthetic construct
  source 1..20: mol_type = other DNA
gggcgcagacaaccagcggc

SEQ ID NO: 9821 - DNA, 20 bp, synthetic construct
  source 1..20: mol_type = other DNA
gagcgagaatgggaatggga

SEQ ID NO: 9822 - DNA, 20 bp, synthetic construct
  source 1..20: mol_type = other DNA
gggtcttctgagacctcgcg

SEQ ID NO: 9823 - DNA, 20 bp, synthetic construct
  source 1..20: mol_type = other DNA
gtctcagaagacccgggcgt

SEQ ID NO: 9824 - DNA, 20 bp, synthetic construct
  source 1..20: mol_type = other DNA
ccccggcaggtcccacgccc

SEQ ID NO: 9825 - DNA, 20 bp, synthetic construct
  source 1..20: mol_type = other DNA
ccgggcgtgggacctgccgg

SEQ ID NO: 9826 - DNA, 20 bp, synthetic construct
  source 1..20: mol_type = other DNA
cccgggcgtgggacctgccg

SEQ ID NO: 9827 - DNA, 20 bp, synthetic construct
  source 1..20: mol_type = other DNA
ggggcgtgtccgggagcacc

SEQ ID NO: 9828 - DNA, 20 bp, synthetic construct
  source 1..20: mol_type = other DNA
ggtgctcccggacacgcccc

SEQ ID NO: 9829 - DNA, 20 bp, synthetic construct
  source 1..20: mol_type = other DNA
gaatgggaatgggagggacc

SEQ ID NO: 9830 - DNA, 20 bp, synthetic construct
  source 1..20: mol_type = other DNA
cgagcgagaatgggaatggg

SEQ ID NO: 9831 - DNA, 20 bp, synthetic construct
  source 1..20: mol_type = other DNA
tgggagggacccggtgctcc

SEQ ID NO: 9832 - DNA, 20 bp, synthetic construct
  source 1..20: mol_type = other DNA
ttgttaatgggactaccaga

SEQ ID NO: 9833 - DNA, 20 bp, synthetic construct
  source 1..20: mol_type = other DNA
gtccttgtgtagtcctaggg

SEQ ID NO: 9834 - DNA, 20 bp, synthetic construct
  source 1..20: mol_type = other DNA
tcagtccttgtgtagtccta

SEQ ID NO: 9835 - DNA, 20 bp, synthetic construct
  source 1..20: mol_type = other DNA
cccattagaacacgtgaaca

SEQ ID NO: 9836 - DNA, 20 bp, synthetic construct
  source 1..20: mol_type = other DNA
gtagacagtacctcctccct

SEQ ID NO: 9837 - DNA, 20 bp, synthetic construct
  source 1..20: mol_type = other DNA
taccagatggaagccagctt

SEQ ID NO: 9838 - DNA, 20 bp, synthetic construct
  source 1..20: mol_type = other DNA
actgtctacacagagctcta

SEQ ID NO: 9839 - DNA, 20 bp, synthetic construct
  source 1..20: mol_type = other DNA
tctacacagagctctaggga

SEQ ID NO: 9840 - DNA, 20 bp, synthetic construct
  source 1..20: mol_type = other DNA
ttccaaagctggcttccatc

SEQ ID NO: 9841 - DNA, 20 bp, synthetic construct
  source 1..20: mol_type = other DNA
tacacagagctctagggaag

SEQ ID NO: 9842 - DNA, 20 bp, synthetic construct
  source 1..20: mol_type = other DNA
gccttgttcacgtgttctaa

SEQ ID NO: 9843 - DNA, 20 bp, synthetic construct
  source 1..20: mol_type = other DNA
cttgtgtagtcctagggagg

SEQ ID NO: 9844 - DNA, 20 bp, synthetic construct
  source 1..20: mol_type = other DNA
ccttgttcacgtgttctaat

SEQ ID NO: 9845 - DNA, 20 bp, synthetic construct
  source 1..20: mol_type = other DNA
ctacacagagctctagggaa

SEQ ID NO: 9846 - DNA, 20 bp, synthetic construct
  source 1..20: mol_type = other DNA
acaaggcctgcttccaaagc

SEQ ID NO: 9847 - DNA, 20 bp, synthetic construct
  source 1..20: mol_type = other DNA
ggagacactgaccaccccag

SEQ ID NO: 9848 - DNA, 20 bp, synthetic construct
  source 1..20: mol_type = other DNA
gggtaactgtcgtgttgtag

SEQ ID NO: 9849 - DNA, 20 bp, synthetic construct
  source 1..20: mol_type = other DNA
ccaaagcaagcgagctaatg

SEQ ID NO: 9850 - DNA, 20 bp, synthetic construct
  source 1..20: mol_type = other DNA
agctaatggggcggcctctg

SEQ ID NO: 9851 - DNA, 20 bp, synthetic construct
  source 1..20: mol_type = other DNA
taactgtcgtgttgtagggg

SEQ ID NO: 9852 - DNA, 20 bp, synthetic construct
  source 1..20: mol_type = other DNA
gtgcagtattagcagagaag

SEQ ID NO: 9853 - DNA, 20 bp, synthetic construct
  source 1..20: mol_type = other DNA
tggcagagtgctggcgctga

SEQ ID NO: 9854 - DNA, 20 bp, synthetic construct
  source 1..20: mol_type = other DNA
attagctcgcttgctttggg

SEQ ID NO: 9855 - DNA, 20 bp, synthetic construct
  source 1..20: mol_type = other DNA
actgtcgtgttgtaggggcg

SEQ ID NO: 9856 - DNA, 20 bp, synthetic construct
  source 1..20: mol_type = other DNA
tgcagtattagcagagaagg

SEQ ID NO: 9857 - DNA, 20 bp, synthetic construct
  source 1..20: mol_type = other DNA
aagcaagcgagctaatgggg

SEQ ID NO: 9858 - DNA, 20 bp, synthetic construct
  source 1..20: mol_type = other DNA
gacagcggcgggggtaccct

SEQ ID NO: 9859 - DNA, 20 bp, synthetic construct
  source 1..20: mol_type = other DNA
taatggggcggcctctgggg

SEQ ID NO: 9860 - DNA, 20 bp, synthetic construct
  source 1..20: mol_type = other DNA
cgtcgctcccacggcgccca

SEQ ID NO: 9861 - DNA, 20 bp, synthetic construct
  source 1..20: mol_type = other DNA
tgtaggggcggggaagaggg

SEQ ID NO: 9862 - DNA, 20 bp, synthetic construct
  source 1..20: mol_type = other DNA
tggtccgcctagctaaggaa

SEQ ID NO: 9863 - DNA, 20 bp, synthetic construct
  source 1..20: mol_type = other DNA
tcggcctcttaaaggcgcag

SEQ ID NO: 9864 - DNA, 20 bp, synthetic construct
  source 1..20: mol_type = other DNA
accgtgtccctcagcaccca

SEQ ID NO: 9865 - DNA, 20 bp, synthetic construct
  source 1..20: mol_type = other DNA
gcctcggtgacgtcacgccg

SEQ ID NO: 9866 - DNA, 20 bp, synthetic construct
  source 1..20: mol_type = other DNA
ggccaatcggctgcccgcgt

SEQ ID NO: 9867 - DNA, 20 bp, synthetic construct
  source 1..20: mol_type = other DNA
gcgcctttaagaggccgacg

SEQ ID NO: 9868 - DNA, 20 bp, synthetic construct
  source 1..20: mol_type = other DNA
ggaacctttccttagctagg

SEQ ID NO: 9869 - DNA, 20 bp, synthetic construct
  source 1..20: mol_type = other DNA
ggttcccctgcgcctttaag

SEQ ID NO: 9870 - DNA, 20 bp, synthetic construct
  source 1..20: mol_type = other DNA
gccccggcgtgacgtcaccg

SEQ ID NO: 9871 - DNA, 20 bp, synthetic construct
  source 1..20: mol_type = other DNA
acgcctcggtgacgtcacgc

SEQ ID NO: 9872 - DNA, 20 bp, synthetic construct
  source 1..20: mol_type = other DNA
gtcggcctcttaaaggcgca

SEQ ID NO: 9873 - DNA, 20 bp, synthetic construct
  source 1..20: mol_type = other DNA
aaaaaaaaaaggggaagcgg

SEQ ID NO: 9874 - DNA, 20 bp, synthetic construct
  source 1..20: mol_type = other DNA
ggagaggaggaggtggcgag

SEQ ID NO: 9875 - DNA, 20 bp, synthetic construct
  source 1..20: mol_type = other DNA
gggagaggaggaggtggcga

SEQ ID NO: 9876 - DNA, 20 bp, synthetic construct
  source 1..20: mol_type = other DNA
acggacgccgggagaggagg

SEQ ID NO: 9877 - DNA, 20 bp, synthetic construct
  source 1..20: mol_type = other DNA
tcattacagaagtccacacg

SEQ ID NO: 9878 - DNA, 20 bp, synthetic construct
  source 1..20: mol_type = other DNA
ctacgtgtgtcagcctcgtg

SEQ ID NO: 9879 - DNA, 20 bp, synthetic construct
  source 1..20: mol_type = other DNA
ggccgcgcacgcaaatacgc

SEQ ID NO: 9880 - DNA, 20 bp, synthetic construct
  source 1..20: mol_type = other DNA
attgaaagctcctcagagag

SEQ ID NO: 9881 - DNA, 20 bp, synthetic construct
  source 1..20: mol_type = other DNA
cgctgctggcccgctctctg

SEQ ID NO: 9882 - DNA, 20 bp, synthetic construct
  source 1..20: mol_type = other DNA
tgatgccactgccagtcatg

SEQ ID NO: 9883 - DNA, 20 bp, synthetic construct
  source 1..20: mol_type = other DNA
ttgaaagctcctcagagagc

SEQ ID NO: 9884 - DNA, 20 bp, synthetic construct
  source 1..20: mol_type = other DNA
ggccccgcgcggcaacgcag

SEQ ID NO: 9885 - DNA, 20 bp, synthetic construct
  source 1..20: mol_type = other DNA
caggggcggaaccgcatgac

SEQ ID NO: 9886 - DNA, 20 bp, synthetic construct
  source 1..20: mol_type = other DNA
gcaaatacgcaggcacgcgc

SEQ ID NO: 9887 - DNA, 20 bp, synthetic construct
  source 1..20: mol_type = other DNA
gcacgcgcgggagcacgccc

SEQ ID NO: 9888 - DNA, 20 bp, synthetic construct
  source 1..20: mol_type = other DNA
ctgaggagctttcaatactt

SEQ ID NO: 9889 - DNA, 20 bp, synthetic construct
  source 1..20: mol_type = other DNA
tccgcccctgcgttgccgcg

SEQ ID NO: 9890 - DNA, 20 bp, synthetic construct
  source 1..20: mol_type = other DNA
cggaaccgcatgactggcag

SEQ ID NO: 9891 - DNA, 20 bp, synthetic construct
  source 1..20: mol_type = other DNA
tttgcgtgcgcggccccgcg

SEQ ID NO: 9892 - DNA, 20 bp, synthetic construct
  source 1..20: mol_type = other DNA
gtcctaagtctagccgctcg

SEQ ID NO: 9893 - DNA, 20 bp, synthetic construct
  source 1..20: mol_type = other DNA
ggcaagtgttgactgcgtgt

SEQ ID NO: 9894 - DNA, 20 bp, synthetic construct
  source 1..20: mol_type = other DNA
tgccacgagcggctagactt

SEQ ID NO: 9895 - DNA, 20 bp, synthetic construct
  source 1..20: mol_type = other DNA
catcgcccttaagtaaagga

SEQ ID NO: 9896 - DNA, 20 bp, synthetic construct
  source 1..20: mol_type = other DNA
atcgcccttaagtaaaggag

SEQ ID NO: 9897 - DNA, 20 bp, synthetic construct
  source 1..20: mol_type = other DNA
ggggcgatagaaggatggca

SEQ ID NO: 9898 - DNA, 20 bp, synthetic construct
  source 1..20: mol_type = other DNA
ggctggaggcaccaaagagg

SEQ ID NO: 9899 - DNA, 20 bp, synthetic construct
  source 1..20: mol_type = other DNA
ccatcgcccttaagtaaagg

SEQ ID NO: 9900 - DNA, 20 bp, synthetic construct
  source 1..20: mol_type = other DNA
cgagcggctagacttaggac

SEQ ID NO: 9901 - DNA, 20 bp, synthetic construct
  source 1..20: mol_type = other DNA
cctggctggaggcaccaaag

SEQ ID NO: 9902 - DNA, 20 bp, synthetic construct
  source 1..20: mol_type = other DNA
cagtcaacacttgccacgag

SEQ ID NO: 9903 - DNA, 20 bp, synthetic construct
  source 1..20: mol_type = other DNA
gggtgggggcgatagaagga

SEQ ID NO: 9904 - DNA, 20 bp, synthetic construct
  source 1..20: mol_type = other DNA
ctttggtgcctccagccagg

SEQ ID NO: 9905 - DNA, 20 bp, synthetic construct
  source 1..20: mol_type = other DNA
ggcaccaaagaggaggagaa

SEQ ID NO: 9906 - DNA, 20 bp, synthetic construct
  source 1..20: mol_type = other DNA
gcaccaaagaggaggagaag

SEQ ID NO: 9907 - DNA, 20 bp, synthetic construct
  source 1..20: mol_type = other DNA
acaccataggccgatcgggt

SEQ ID NO: 9908 - DNA, 20 bp, synthetic construct
  source 1..20: mol_type = other DNA
ccgatcggcctatggtgtgg

SEQ ID NO: 9909 - DNA, 20 bp, synthetic construct
  source 1..20: mol_type = other DNA
acccgatcggcctatggtgt

SEQ ID NO: 9910 - DNA, 20 bp, synthetic construct
  source 1..20: mol_type = other DNA
caggtgagaacccggtgctc

SEQ ID NO: 9911 - DNA, 20 bp, synthetic construct
  source 1..20: mol_type = other DNA
attagcataatccttacgcc

SEQ ID NO: 9912 - DNA, 20 bp, synthetic construct
  source 1..20: mol_type = other DNA
cccgatcggcctatggtgtg

SEQ ID NO: 9913 - DNA, 20 bp, synthetic construct
  source 1..20: mol_type = other DNA
cacccgatcggcctatggtg

SEQ ID NO: 9914 - DNA, 20 bp, synthetic construct
  source 1..20: mol_type = other DNA
actccaaggaaagacgggaa

SEQ ID NO: 9915 - DNA, 20 bp, synthetic construct
  source 1..20: mol_type = other DNA
gcggctctatcaggactcca

SEQ ID NO: 9916 - DNA, 20 bp, synthetic construct
  source 1..20: mol_type = other DNA
cacaccataggccgatcggg

SEQ ID NO: 9917 - DNA, 20 bp, synthetic construct
  source 1..20: mol_type = other DNA
cagagcaccgggttctcacc

SEQ ID NO: 9918 - DNA, 20 bp, synthetic construct
  source 1..20: mol_type = other DNA
ccttacgccaggtgagaacc

SEQ ID NO: 9919 - DNA, 20 bp, synthetic construct
  source 1..20: mol_type = other DNA
ccgccagagctccagagcac

SEQ ID NO: 9920 - DNA, 20 bp, synthetic construct
  source 1..20: mol_type = other DNA
cgccagagctccagagcacc

SEQ ID NO: 9921 - DNA, 20 bp, synthetic construct
  source 1..20: mol_type = other DNA
tacaagccccgccccgtccc

SEQ ID NO: 9922 - DNA, 20 bp, synthetic construct
  source 1..20: mol_type = other DNA
cggagccgatggccttacag

SEQ ID NO: 9923 - DNA, 20 bp, synthetic construct
  source 1..20: mol_type = other DNA
gggcggggcctactagtggg

SEQ ID NO: 9924 - DNA, 20 bp, synthetic construct
  source 1..20: mol_type = other DNA
tccggcccctgtaaggccat

SEQ ID NO: 9925 - DNA, 20 bp, synthetic construct
  source 1..20: mol_type = other DNA
cggaaggagccagtccgggg

SEQ ID NO: 9926 - DNA, 20 bp, synthetic construct
  source 1..20: mol_type = other DNA
ttccgggcggggcctactag

SEQ ID NO: 9927 - DNA, 20 bp, synthetic construct
  source 1..20: mol_type = other DNA
ggctggggcccccttccggg

SEQ ID NO: 9928 - DNA, 20 bp, synthetic construct
  source 1..20: mol_type = other DNA
tagtaggccccgcccggaag

SEQ ID NO: 9929 - DNA, 20 bp, synthetic construct
  source 1..20: mol_type = other DNA
gcggagccgatggccttaca

SEQ ID NO: 9930 - DNA, 20 bp, synthetic construct
  source 1..20: mol_type = other DNA
tgcccggaaggagccagtcc

SEQ ID NO: 9931 - DNA, 20 bp, synthetic construct
  source 1..20: mol_type = other DNA
tccgggcggggcctactagt

SEQ ID NO: 9932 - DNA, 20 bp, synthetic construct
  source 1..20: mol_type = other DNA
actagtaggccccgcccgga

SEQ ID NO: 9933 - DNA, 20 bp, synthetic construct
  source 1..20: mol_type = other DNA
gacaggccccgcccactagt

SEQ ID NO: 9934 - DNA, 20 bp, synthetic construct
  source 1..20: mol_type = other DNA
agtaggccccgcccggaagg

SEQ ID NO: 9935 - DNA, 20 bp, synthetic construct
  source 1..20: mol_type = other DNA
gggcggggcctgtcagtgag

SEQ ID NO: 9936 - DNA, 20 bp, synthetic construct
  source 1..20: mol_type = other DNA
gacgagcagcgcggaggctg

SEQ ID NO: 9937 - DNA, 20 bp, synthetic construct
  source 1..20: mol_type = other DNA
aaggtaaggagtcagaaacg

SEQ ID NO: 9938 - DNA, 20 bp, synthetic construct
  source 1..20: mol_type = other DNA
ggaaggtgggtgtgtagtcg

SEQ ID NO: 9939 - DNA, 20 bp, synthetic construct
  source 1..20: mol_type = other DNA
tcctcctgggagcctaactg

SEQ ID NO: 9940 - DNA, 20 bp, synthetic construct
  source 1..20: mol_type = other DNA
tcctgggagcctaactgagg

SEQ ID NO: 9941 - DNA, 20 bp, synthetic construct
  source 1..20: mol_type = other DNA
aggctcctccctaaacaccg

SEQ ID NO: 9942 - DNA, 20 bp, synthetic construct
  source 1..20: mol_type = other DNA
agtcgtggtactttacgcct

SEQ ID NO: 9943 - DNA, 20 bp, synthetic construct
  source 1..20: mol_type = other DNA
atctcaggtcccttggtgga

SEQ ID NO: 9944 - DNA, 20 bp, synthetic construct
  source 1..20: mol_type = other DNA
agaaatctcaggtcccttgg

SEQ ID NO: 9945 - DNA, 20 bp, synthetic construct
  source 1..20: mol_type = other DNA
ggtgtttagggaggagccta

SEQ ID NO: 9946 - DNA, 20 bp, synthetic construct
  source 1..20: mol_type = other DNA
caggtcccttggtggaaggt

SEQ ID NO: 9947 - DNA, 20 bp, synthetic construct
  source 1..20: mol_type = other DNA
tacacacccaccttccacca

SEQ ID NO: 9948 - DNA, 20 bp, synthetic construct
  source 1..20: mol_type = other DNA
tcaggtcccttggtggaagg

SEQ ID NO: 9949 - DNA, 20 bp, synthetic construct
  source 1..20: mol_type = other DNA
ttacgcctcggtgtttaggg

SEQ ID NO: 9950 - DNA, 20 bp, synthetic construct
  source 1..20: mol_type = other DNA
acacacccaccttccaccaa

SEQ ID NO: 9951 - DNA, 20 bp, synthetic construct
  source 1..20: mol_type = other DNA
cagaggttaacagaaatctc

SEQ ID NO: 9952 - DNA, 20 bp, synthetic construct
  source 1..20: mol_type = other DNA
gtctgacccagcgacaggcg

SEQ ID NO: 9953 - DNA, 20 bp, synthetic construct
  source 1..20: mol_type = other DNA
atatgacaaacactttccgc

SEQ ID NO: 9954 - DNA, 20 bp, synthetic construct
  source 1..20: mol_type = other DNA
gtcagacgacctggcagtag

SEQ ID NO: 9955 - DNA, 20 bp, synthetic construct
  source 1..20: mol_type = other DNA
tgtcgctgggtcagacgacc

SEQ ID NO: 9956 - DNA, 20 bp, synthetic construct
  source 1..20: mol_type = other DNA
tcagacgacctggcagtaga

SEQ ID NO: 9957 - DNA, 20 bp, synthetic construct
  source 1..20: mol_type = other DNA
gagattgcatgggacctctg

SEQ ID NO: 9958 - DNA, 20 bp, synthetic construct
  source 1..20: mol_type = other DNA
tactagtcccaggattccac

SEQ ID NO: 9959 - DNA, 20 bp, synthetic construct
  source 1..20: mol_type = other DNA
tggcagtagagggtgaagga

SEQ ID NO: 9960 - DNA, 20 bp, synthetic construct
  source 1..20: mol_type = other DNA
tgaaggatggagaaggcaga

SEQ ID NO: 9961 - DNA, 20 bp, synthetic construct
  source 1..20: mol_type = other DNA
gacctggcagtagagggtga

SEQ ID NO: 9962 - DNA, 20 bp, synthetic construct
  source 1..20: mol_type = other DNA
aggtcgtctgacccagcgac

SEQ ID NO: 9963 - DNA, 20 bp, synthetic construct
  source 1..20: mol_type = other DNA
tagagggtgaaggatggaga

SEQ ID NO: 9964 - DNA, 20 bp, synthetic construct
  source 1..20: mol_type = other DNA
gatggagaaggcagaaggca

SEQ ID NO: 9965 - DNA, 20 bp, synthetic construct
  source 1..20: mol_type = other DNA
ggatggagaaggcagaaggc

SEQ ID NO: 9966 - DNA, 20 bp, synthetic construct
  source 1..20: mol_type = other DNA
atccttcaccctctactgcc

SEQ ID NO: 9967 - DNA, 20 bp, synthetic construct
  source 1..20: mol_type = other DNA
cctagaccccattccggcag

SEQ ID NO: 9968 - DNA, 20 bp, synthetic construct
  source 1..20: mol_type = other DNA
gcctgcaggcgggtgactcc

SEQ ID NO: 9969 - DNA, 20 bp, synthetic construct
  source 1..20: mol_type = other DNA
tccctcccctcctagccccg

SEQ ID NO: 9970 - DNA, 20 bp, synthetic construct
  source 1..20: mol_type = other DNA
cctcgacctctgccggaatg

SEQ ID NO: 9971 - DNA, 20 bp, synthetic construct
  source 1..20: mol_type = other DNA
gccgggagtcacccgcctgc

SEQ ID NO: 9972 - DNA, 20 bp, synthetic construct
  source 1..20: mol_type = other DNA
ggtgactcccggcgcgcgga

SEQ ID NO: 9973 - DNA, 20 bp, synthetic construct
  source 1..20: mol_type = other DNA
ggcgtccgcggggctaggag

SEQ ID NO: 9974 - DNA, 20 bp, synthetic construct
  source 1..20: mol_type = other DNA
gggtgactcccggcgcgcgg

SEQ ID NO: 9975 - DNA, 20 bp, synthetic construct
  source 1..20: mol_type = other DNA
ccggctgcggcgcctgcagg

SEQ ID NO: 9976 - DNA, 20 bp, synthetic construct
  source 1..20: mol_type = other DNA
agggaaactgaggctcgagc

SEQ ID NO: 9977 - DNA, 20 bp, synthetic construct
  source 1..20: mol_type = other DNA
gactcccggcgcgcggaggg

SEQ ID NO: 9978 - DNA, 20 bp, synthetic construct
  source 1..20: mol_type = other DNA
ctaggaggggagggaaactg

SEQ ID NO: 9979 - DNA, 20 bp, synthetic construct
  source 1..20: mol_type = other DNA
gagggaaactgaggctcgag

SEQ ID NO: 9980 - DNA, 20 bp, synthetic construct
  source 1..20: mol_type = other DNA
tccgcggggctaggagggga

SEQ ID NO: 9981 - DNA, 20 bp, synthetic construct
  source 1..20: mol_type = other DNA
cggctgcggcgcctgcaggc

SEQ ID NO: 9982 - DNA, 20 bp, synthetic construct
  source 1..20: mol_type = other DNA
gggcagtcccagatccattg

SEQ ID NO: 9983 - DNA, 20 bp, synthetic construct
  source 1..20: mol_type = other DNA
ggcagtcccagatccattgg

SEQ ID NO: 9984 - DNA, 20 bp, synthetic construct
  source 1..20: mol_type = other DNA
aggggccactactcttaaag

SEQ ID NO: 9985 - DNA, 20 bp, synthetic construct
  source 1..20: mol_type = other DNA
cttgagcctcacgcagttag

SEQ ID NO: 9986 - DNA, 20 bp, synthetic construct
  source 1..20: mol_type = other DNA
ataggtcctcctctgaaggg

SEQ ID NO: 9987 - DNA, 20 bp, synthetic construct
  source 1..20: mol_type = other DNA
agcgcacccctaactgcgtg

SEQ ID NO: 9988 - DNA, 20 bp, synthetic construct
  source 1..20: mol_type = other DNA
gcccctcctcccttcagagg

SEQ ID NO: 9989 - DNA, 20 bp, synthetic construct
  source 1..20: mol_type = other DNA
gtcccagatccattgggggt

SEQ ID NO: 9990 - DNA, 20 bp, synthetic construct
  source 1..20: mol_type = other DNA
tgaggagggggaaggaccgt

SEQ ID NO: 9991 - DNA, 20 bp, synthetic construct
  source 1..20: mol_type = other DNA
gaaggaccgttggggtgtgg

SEQ ID NO: 9992 - DNA, 20 bp, synthetic construct
  source 1..20: mol_type = other DNA
aggagggggaaggaccgttg

SEQ ID NO: 9993 - DNA, 20 bp, synthetic construct
  source 1..20: mol_type = other DNA
ccgactccgccacaccccaa

SEQ ID NO: 9994 - DNA, 20 bp, synthetic construct
  source 1..20: mol_type = other DNA
ggggcgggagtggtgaggag

SEQ ID NO: 9995 - DNA, 20 bp, synthetic construct
  source 1..20: mol_type = other DNA
gggcgggagtggtgaggagg

SEQ ID NO: 9996 - DNA, 20 bp, synthetic construct
  source 1..20: mol_type = other DNA
actcccgcccccacccccaa

SEQ ID NO: 9997 - DNA, 20 bp, synthetic construct
  source 1..20: mol_type = other DNA
ggcgggcagcgctacgcgtg

SEQ ID NO: 9998 - DNA, 20 bp, synthetic construct
  source 1..20: mol_type = other DNA
gaggcgggcagcgctacgcg

SEQ ID NO: 9999 - DNA, 20 bp, synthetic construct
  source 1..20: mol_type = other DNA
gggtaggaccatcttacgct

SEQ ID NO: 10000 - DNA, 20 bp, synthetic construct
  source 1..20: mol_type = other DNA
ccagatttcaagagcgtggg

SEQ ID NO: 10001 - DNA, 20 bp, synthetic construct
  source 1..20: mol_type = other DNA
ggggtaggaccatcttacgc

SEQ ID NO: 10002 - DNA, 20 bp, synthetic construct
  source 1..20: mol_type = other DNA
tcacccagatttcaagagcg

SEQ ID NO: 10003 - DNA, 20 bp, synthetic construct
  source 1..20: mol_type = other DNA
gccaaggagccccaggaagt

SEQ ID NO: 10004 - DNA, 20 bp, synthetic construct
  source 1..20: mol_type = other DNA
aggcgggcagcgctacgcgt

SEQ ID NO: 10005 - DNA, 20 bp, synthetic construct
  source 1..20: mol_type = other DNA
cccgcctcaccccagcccga

SEQ ID NO: 10006 - DNA, 20 bp, synthetic construct
  source 1..20: mol_type = other DNA
gccctttcacctacttcctg

SEQ ID NO: 10007 - DNA, 20 bp, synthetic construct
  source 1..20: mol_type = other DNA
cccagcccgagggagcccag

SEQ ID NO: 10008 - DNA, 20 bp, synthetic construct
  source 1..20: mol_type = other DNA
ggaccccgccaaggagcccc

SEQ ID NO: 10009 - DNA, 20 bp, synthetic construct
  source 1..20: mol_type = other DNA
tacttcctggggctccttgg

SEQ ID NO: 10010 - DNA, 20 bp, synthetic construct
  source 1..20: mol_type = other DNA
cttcctggggctccttggcg

SEQ ID NO: 10011 - DNA, 20 bp, synthetic construct
  source 1..20: mol_type = other DNA
cttacgctgggaccccgcca

SEQ ID NO: 10012 - DNA, 20 bp, synthetic construct
  source 1..20: mol_type = other DNA
gtggctgactcgtgaaacca

SEQ ID NO: 10013 - DNA, 20 bp, synthetic construct
  source 1..20: mol_type = other DNA
gcctacacgcaactcaactc

SEQ ID NO: 10014 - DNA, 20 bp, synthetic construct
  source 1..20: mol_type = other DNA
agtggctgactcgtgaaacc

SEQ ID NO: 10015 - DNA, 20 bp, synthetic construct
  source 1..20: mol_type = other DNA
tggctgactcgtgaaaccag

SEQ ID NO: 10016 - DNA, 20 bp, synthetic construct
  source 1..20: mol_type = other DNA
gtttccatagttacaagccc

SEQ ID NO: 10017 - DNA, 20 bp, synthetic construct
  source 1..20: mol_type = other DNA
tgtttcttggaaggtgcccc

SEQ ID NO: 10018 - DNA, 20 bp, synthetic construct
  source 1..20: mol_type = other DNA
attatgatagaagtgttcct

SEQ ID NO: 10019 - DNA, 20 bp, synthetic construct
  source 1..20: mol_type = other DNA
tatcctgagaaaaagaccag

SEQ ID NO: 10020 - DNA, 20 bp, synthetic construct
  source 1..20: mol_type = other DNA
tatatcctgagaaaaagacc

SEQ ID NO: 10021 - DNA, 20 bp, synthetic construct
  source 1..20: mol_type = other DNA
atatcctgagaaaaagacca

SEQ ID NO: 10022 - DNA, 20 bp, synthetic construct
  source 1..20: mol_type = other DNA
acctgagttgagttgcgtgt

SEQ ID NO: 10023 - DNA, 20 bp, synthetic construct
  source 1..20: mol_type = other DNA
agaccaggggaaccctaaag

SEQ ID NO: 10024 - DNA, 20 bp, synthetic construct
  source 1..20: mol_type = other DNA
aggtcaccctcaaaactcac

SEQ ID NO: 10025 - DNA, 20 bp, synthetic construct
  source 1..20: mol_type = other DNA
tgttcctgggcttgtaacta

SEQ ID NO: 10026 - DNA, 20 bp, synthetic construct
  source 1..20: mol_type = other DNA
tgtttagaaaacactgctgc

SEQ ID NO: 10027 - DNA, 20 bp, synthetic construct
  source 1..20: mol_type = other DNA
cggcgcgggagcaatgccag

SEQ ID NO: 10028 - DNA, 20 bp, synthetic construct
  source 1..20: mol_type = other DNA
gcctcgcgtcccggatggga

SEQ ID NO: 10029 - DNA, 20 bp, synthetic construct
  source 1..20: mol_type = other DNA
ccagtggccccgagcgcccc

SEQ ID NO: 10030 - DNA, 20 bp, synthetic construct
  source 1..20: mol_type = other DNA
gcggcgaggcaaggcgcgga

SEQ ID NO: 10031 - DNA, 20 bp, synthetic construct
  source 1..20: mol_type = other DNA
cgagcgccccgggccacgcg

SEQ ID NO: 10032 - DNA, 20 bp, synthetic construct
  source 1..20: mol_type = other DNA
gccagtggccccgagcgccc

SEQ ID NO: 10033 - DNA, 20 bp, synthetic construct
  source 1..20: mol_type = other DNA
gcggtcccggcctcgcgtcc

SEQ ID NO: 10034 - DNA, 20 bp, synthetic construct
  source 1..20: mol_type = other DNA
gcgccttgcctcgccgcccg

SEQ ID NO: 10035 - DNA, 20 bp, synthetic construct
  source 1..20: mol_type = other DNA
tcccggcctcgcgtcccgga

SEQ ID NO: 10036 - DNA, 20 bp, synthetic construct
  source 1..20: mol_type = other DNA
ggcgaggcaaggcgcggagg

SEQ ID NO: 10037 - DNA, 20 bp, synthetic construct
  source 1..20: mol_type = other DNA
gaggagcggccggtgggtgg

SEQ ID NO: 10038 - DNA, 20 bp, synthetic construct
  source 1..20: mol_type = other DNA
cggcgaggcaaggcgcggag

SEQ ID NO: 10039 - DNA, 20 bp, synthetic construct
  source 1..20: mol_type = other DNA
gcgggcggcgaggcaaggcg

SEQ ID NO: 10040 - DNA, 20 bp, synthetic construct
  source 1..20: mol_type = other DNA
gagcgccccgggccacgcgc

SEQ ID NO: 10041 - DNA, 20 bp, synthetic construct
  source 1..20: mol_type = other DNA
ggcggcgaggcaaggcgcgg

SEQ ID NO: 10042 - DNA, 20 bp, synthetic construct
  source 1..20: mol_type = other DNA
ttatcggcgtctaaggggaa

SEQ ID NO: 10043 - DNA, 20 bp, synthetic construct
  source 1..20: mol_type = other DNA
ttcctcccgtcgcccgccaa

SEQ ID NO: 10044 - DNA, 20 bp, synthetic construct
  source 1..20: mol_type = other DNA
cctcctctcgctcagcgcgg

SEQ ID NO: 10045 - DNA, 20 bp, synthetic construct
  source 1..20: mol_type = other DNA
gtcccttatcggcgtctaag

SEQ ID NO: 10046 - DNA, 20 bp, synthetic construct
  source 1..20: mol_type = other DNA
ctcccgtcgcccgccaatgg

SEQ ID NO: 10047 - DNA, 20 bp, synthetic construct
  source 1..20: mol_type = other DNA
ctacctcctctcgctcagcg

SEQ ID NO: 10048 - DNA, 20 bp, synthetic construct
  source 1..20: mol_type = other DNA
acgcagtttaaaaggcgctg

SEQ ID NO: 10049 - DNA, 20 bp, synthetic construct
  source 1..20: mol_type = other DNA
agaacgcgcgccgccattgg

SEQ ID NO: 10050 - DNA, 20 bp, synthetic construct
  source 1..20: mol_type = other DNA
ccgccgcgctgagcgagagg

SEQ ID NO: 10051 - DNA, 20 bp, synthetic construct
  source 1..20: mol_type = other DNA
tagccgccgcgctgagcgag

SEQ ID NO: 10052 - DNA, 20 bp, synthetic construct
  source 1..20: mol_type = other DNA
cttatcggcgtctaagggga

SEQ ID NO: 10053 - DNA, 20 bp, synthetic construct
  source 1..20: mol_type = other DNA
ggagaaaacgaaaacagaag

SEQ ID NO: 10054 - DNA, 20 bp, synthetic construct
  source 1..20: mol_type = other DNA
tcggcgtctaaggggaaggg

SEQ ID NO: 10055 - DNA, 20 bp, synthetic construct
  source 1..20: mol_type = other DNA
ggcgacgggaggaagcgcgg

SEQ ID NO: 10056 - DNA, 20 bp, synthetic construct
  source 1..20: mol_type = other DNA
gagaaaacgaaaacagaagc

SEQ ID NO: 10057 - DNA, 20 bp, synthetic construct
  source 1..20: mol_type = other DNA
agtggtgtaaaagacaatcg

SEQ ID NO: 10058 - DNA, 20 bp, synthetic construct
  source 1..20: mol_type = other DNA
atcgcggccacacaccgcgt

SEQ ID NO: 10059 - DNA, 20 bp, synthetic construct
  source 1..20: mol_type = other DNA
ccgaaaccgttccttccgct

SEQ ID NO: 10060 - DNA, 20 bp, synthetic construct
  source 1..20: mol_type = other DNA
taggaagctttgctccggtc

SEQ ID NO: 10061 - DNA, 20 bp, synthetic construct
  source 1..20: mol_type = other DNA
tcgcggccacacaccgcgtg

SEQ ID NO: 10062 - DNA, 20 bp, synthetic construct
  source 1..20: mol_type = other DNA
tgctagctcagagatctggg

SEQ ID NO: 10063 - DNA, 20 bp, synthetic construct
  source 1..20: mol_type = other DNA
cgcggccacacaccgcgtgg

SEQ ID NO: 10064 - DNA, 20 bp, synthetic construct
  source 1..20: mol_type = other DNA
agaactaggaagctttgctc

SEQ ID NO: 10065 - DNA, 20 bp, synthetic construct
  source 1..20: mol_type = other DNA
tgctttgcgcagcccccacg

SEQ ID NO: 10066 - DNA, 20 bp, synthetic construct
  source 1..20: mol_type = other DNA
cgcagcccccacgcggtgtg

SEQ ID NO: 10067 - DNA, 20 bp, synthetic construct
  source 1..20: mol_type = other DNA
gcccagcccagcggaaggaa

SEQ ID NO: 10068 - DNA, 20 bp, synthetic construct
  source 1..20: mol_type = other DNA
acaaagcccagcccagcgga

SEQ ID NO: 10069 - DNA, 20 bp, synthetic construct
  source 1..20: mol_type = other DNA
gctagctcagagatctggga

SEQ ID NO: 10070 - DNA, 20 bp, synthetic construct
  source 1..20: mol_type = other DNA
gggagggacgaagtccagac

SEQ ID NO: 10071 - DNA, 20 bp, synthetic construct
  source 1..20: mol_type = other DNA
gggctgcgcaaagcagaact

SEQ ID NO: 10072 - DNA, 20 bp, synthetic construct
  source 1..20: mol_type = other DNA
gacaaaattctcctagccgc

SEQ ID NO: 10073 - DNA, 20 bp, synthetic construct
  source 1..20: mol_type = other DNA
ctggttaactgcttcggaag

SEQ ID NO: 10074 - DNA, 20 bp, synthetic construct
  source 1..20: mol_type = other DNA
agaaagcgacttgcctccaa

SEQ ID NO: 10075 - DNA, 20 bp, synthetic construct
  source 1..20: mol_type = other DNA
tgcctccaaaggagcctgcg

SEQ ID NO: 10076 - DNA, 20 bp, synthetic construct
  source 1..20: mol_type = other DNA
cgcccactcgcccagcactg

SEQ ID NO: 10077 - DNA, 20 bp, synthetic construct
  source 1..20: mol_type = other DNA
ggacgcacacggcgtagccc

SEQ ID NO: 10078 - DNA, 20 bp, synthetic construct
  source 1..20: mol_type = other DNA
agccgcagtgctgggcgagt

SEQ ID NO: 10079 - DNA, 20 bp, synthetic construct
  source 1..20: mol_type = other DNA
gaagaggacagcccgcagtc

SEQ ID NO: 10080 - DNA, 20 bp, synthetic construct
  source 1..20: mol_type = other DNA
cccagcactgcggctgcgcg

SEQ ID NO: 10081 - DNA, 20 bp, synthetic construct
  source 1..20: mol_type = other DNA
tccccgcgcagccgcagtgc

SEQ ID NO: 10082 - DNA, 20 bp, synthetic construct
  source 1..20: mol_type = other DNA
ccggcccgcggctagtgaga

SEQ ID NO: 10083 - DNA, 20 bp, synthetic construct
  source 1..20: mol_type = other DNA
tcgctgctcactccagactg

SEQ ID NO: 10084 - DNA, 20 bp, synthetic construct
  source 1..20: mol_type = other DNA
aaaggagcctgcgcggcccg

SEQ ID NO: 10085 - DNA, 20 bp, synthetic construct
  source 1..20: mol_type = other DNA
cggctgcgcggggacgcaca

SEQ ID NO: 10086 - DNA, 20 bp, synthetic construct
  source 1..20: mol_type = other DNA
cacggcgtagccccggcccg

SEQ ID NO: 10087 - DNA, 20 bp, synthetic construct
  source 1..20: mol_type = other DNA
gcgggcagaaactccgccag

SEQ ID NO: 10088 - DNA, 20 bp, synthetic construct
  source 1..20: mol_type = other DNA
tagttagggaagatcgcagc

SEQ ID NO: 10089 - DNA, 20 bp, synthetic construct
  source 1..20: mol_type = other DNA
ggtcgcagaagaccatccag

SEQ ID NO: 10090 - DNA, 20 bp, synthetic construct
  source 1..20: mol_type = other DNA
gtagttagggaagatcgcag

SEQ ID NO: 10091 - DNA, 20 bp, synthetic construct
  source 1..20: mol_type = other DNA
cttccctaactaccactctg

SEQ ID NO: 10092 - DNA, 20 bp, synthetic construct
  source 1..20: mol_type = other DNA
ggcttcctggaacgattagg

SEQ ID NO: 10093 - DNA, 20 bp, synthetic construct
  source 1..20: mol_type = other DNA
caggaagcccctccgcgtgc

SEQ ID NO: 10094 - DNA, 20 bp, synthetic construct
  source 1..20: mol_type = other DNA
gtcctcatctcccctctgga

SEQ ID NO: 10095 - DNA, 20 bp, synthetic construct
  source 1..20: mol_type = other DNA
gtcgcagaagaccatccaga

SEQ ID NO: 10096 - DNA, 20 bp, synthetic construct
  source 1..20: mol_type = other DNA
agcgggcagaaactccgcca

SEQ ID NO: 10097 - DNA, 20 bp, synthetic construct
  source 1..20: mol_type = other DNA
caggctcctttctcccctgg

SEQ ID NO: 10098 - DNA, 20 bp, synthetic construct
  source 1..20: mol_type = other DNA
caggggagaaaggagcctgg

SEQ ID NO: 10099 - DNA, 20 bp, synthetic construct
  source 1..20: mol_type = other DNA
ttaggcggaccgtcgccccc

SEQ ID NO: 10100 - DNA, 20 bp, synthetic construct
  source 1..20: mol_type = other DNA
ccaggggagaaaggagcctg

SEQ ID NO: 10101 - DNA, 20 bp, synthetic construct
  source 1..20: mol_type = other DNA
ccccaggctcctttctcccc

SEQ ID NO: 10102 - DNA, 20 bp, synthetic construct
  source 1..20: mol_type = other DNA
cacgagcatcaccccaccgg

SEQ ID NO: 10103 - DNA, 20 bp, synthetic construct
  source 1..20: mol_type = other DNA
cgccgacgctatttaaaccg

SEQ ID NO: 10104 - DNA, 20 bp, synthetic construct
  source 1..20: mol_type = other DNA
gcgcacgagcatcaccccac

SEQ ID NO: 10105 - DNA, 20 bp, synthetic construct
  source 1..20: mol_type = other DNA
tttaaaccgcggccatcccc

SEQ ID NO: 10106 - DNA, 20 bp, synthetic construct
  source 1..20: mol_type = other DNA
gcccaggccaatgagcgtcg

SEQ ID NO: 10107 - DNA, 20 bp, synthetic construct
  source 1..20: mol_type = other DNA
gagcatcaccccaccggcgg

SEQ ID NO: 10108 - DNA, 20 bp, synthetic construct
  source 1..20: mol_type = other DNA
agccaagctgtcagcccatg

SEQ ID NO: 10109 - DNA, 20 bp, synthetic construct
  source 1..20: mol_type = other DNA
ccatgtggcgtggccgcccg

SEQ ID NO: 10110 - DNA, 20 bp, synthetic construct
  source 1..20: mol_type = other DNA
agctgtcagcccatgtggcg

SEQ ID NO: 10111 - DNA, 20 bp, synthetic construct
  source 1..20: mol_type = other DNA
ccgcccaggccaatgagcgt

SEQ ID NO: 10112 - DNA, 20 bp, synthetic construct
  source 1..20: mol_type = other DNA
cccgagccgggaccctgcgc

SEQ ID NO: 10113 - DNA, 20 bp, synthetic construct
  source 1..20: mol_type = other DNA
acagcttggctgcgccgccc

SEQ ID NO: 10114 - DNA, 20 bp, synthetic construct
  source 1..20: mol_type = other DNA
tgagcgtcggggctgcgccc

SEQ ID NO: 10115 - DNA, 20 bp, synthetic construct
  source 1..20: mol_type = other DNA
gggacccggcgcgccgccgc

SEQ ID NO: 10116 - DNA, 20 bp, synthetic construct
  source 1..20: mol_type = other DNA
ccgacgctcattggcctggg

SEQ ID NO: 10117 - DNA, 20 bp, synthetic construct
  source 1..20: mol_type = other DNA
aaggtcaccccagttatcgg

SEQ ID NO: 10118 - DNA, 20 bp, synthetic construct
  source 1..20: mol_type = other DNA
gtttgctcctccgataactg

SEQ ID NO: 10119 - DNA, 20 bp, synthetic construct
  source 1..20: mol_type = other DNA
gcaaagcgtccgggcagcgt

SEQ ID NO: 10120 - DNA, 20 bp, synthetic construct
  source 1..20: mol_type = other DNA
gttatcggaggagcaaacag

SEQ ID NO: 10121 - DNA, 20 bp, synthetic construct
  source 1..20: mol_type = other DNA
ctgctggtgaatattaacca

SEQ ID NO: 10122 - DNA, 20 bp, synthetic construct
  source 1..20: mol_type = other DNA
agttatcggaggagcaaaca

SEQ ID NO: 10123 - DNA, 20 bp, synthetic construct
  source 1..20: mol_type = other DNA
tggatccagaggggcaacgg

SEQ ID NO: 10124 - DNA, 20 bp, synthetic construct
  source 1..20: mol_type = other DNA
gtggaagctgtacactgccc

SEQ ID NO: 10125 - DNA, 20 bp, synthetic construct
  source 1..20: mol_type = other DNA
tatttaagcagtggatccag

SEQ ID NO: 10126 - DNA, 20 bp, synthetic construct
  source 1..20: mol_type = other DNA
actcctttcggtaagtgcag

SEQ ID NO: 10127 - DNA, 20 bp, synthetic construct
  source 1..20: mol_type = other DNA
gcgactcagatcccagccag

SEQ ID NO: 10128 - DNA, 20 bp, synthetic construct
  source 1..20: mol_type = other DNA
tttaagcagtggatccagag

SEQ ID NO: 10129 - DNA, 20 bp, synthetic construct
  source 1..20: mol_type = other DNA
caaacaggggctaagtccac

SEQ ID NO: 10130 - DNA, 20 bp, synthetic construct
  source 1..20: mol_type = other DNA
aagcgtccgggcagcgtagg

SEQ ID NO: 10131 - DNA, 20 bp, synthetic construct
  source 1..20: mol_type = other DNA
tccgataactggggtgacct

SEQ ID NO: 10132 - DNA, 20 bp, synthetic construct
  source 1..20: mol_type = other DNA
gccttgaagagcctcgggga

SEQ ID NO: 10133 - DNA, 20 bp, synthetic construct
  source 1..20: mol_type = other DNA
gcaaacaggtcaggcccggg

SEQ ID NO: 10134 - DNA, 20 bp, synthetic construct
  source 1..20: mol_type = other DNA
caggattgcaaaaggtccaa

SEQ ID NO: 10135 - DNA, 20 bp, synthetic construct
  source 1..20: mol_type = other DNA
accccatttataggaagccc

SEQ ID NO: 10136 - DNA, 20 bp, synthetic construct
  source 1..20: mol_type = other DNA
ttggggaagggaacccacct

SEQ ID NO: 10137 - DNA, 20 bp, synthetic construct
  source 1..20: mol_type = other DNA
ggctgcggctgcatcccagg

SEQ ID NO: 10138 - DNA, 20 bp, synthetic construct
  source 1..20: mol_type = other DNA
aaagcaaacaggtcaggccc

SEQ ID NO: 10139 - DNA, 20 bp, synthetic construct
  source 1..20: mol_type = other DNA
gatgcagccgcagccaccag

SEQ ID NO: 10140 - DNA, 20 bp, synthetic construct
  source 1..20: mol_type = other DNA
ttgagccttgaagagcctcg

SEQ ID NO: 10141 - DNA, 20 bp, synthetic construct
  source 1..20: mol_type = other DNA
agccttgaagagcctcgggg

SEQ ID NO: 10142 - DNA, 20 bp, synthetic construct
  source 1..20: mol_type = other DNA
ccaggtgggccccctccccg

SEQ ID NO: 10143 - DNA, 20 bp, synthetic construct
  source 1..20: mol_type = other DNA
gctgcggctgcatcccaggt

SEQ ID NO: 10144 - DNA, 20 bp, synthetic construct
  source 1..20: mol_type = other DNA
gacccagcccctggtggctg

SEQ ID NO: 10145 - DNA, 20 bp, synthetic construct
  source 1..20: mol_type = other DNA
acctgggacccagcccctgg

SEQ ID NO: 10146 - DNA, 20 bp, synthetic construct
  source 1..20: mol_type = other DNA
cccacctgggacccagcccc

SEQ ID NO: 10147 - DNA, 20 bp, synthetic construct
  source 1..20: mol_type = other DNA
ccgctcaacagacgctgctg

SEQ ID NO: 10148 - DNA, 20 bp, synthetic construct
  source 1..20: mol_type = other DNA
ggacgaggaggcgttggacg

SEQ ID NO: 10149 - DNA, 20 bp, synthetic construct
  source 1..20: mol_type = other DNA
cgacactgcagttgtctacg

SEQ ID NO: 10150 - DNA, 20 bp, synthetic construct
  source 1..20: mol_type = other DNA
gggccgggacgaggaggcgt

SEQ ID NO: 10151 - DNA, 20 bp, synthetic construct
  source 1..20: mol_type = other DNA
tcaccgctacgccggagtcc

SEQ ID NO: 10152 - DNA, 20 bp, synthetic construct
  source 1..20: mol_type = other DNA
gaacccggactccggcgtag

SEQ ID NO: 10153 - DNA, 20 bp, synthetic construct
  source 1..20: mol_type = other DNA
gggacgaggaggcgttggac

SEQ ID NO: 10154 - DNA, 20 bp, synthetic construct
  source 1..20: mol_type = other DNA
gtgagtgcggcgccggttgt

SEQ ID NO: 10155 - DNA, 20 bp, synthetic construct
  source 1..20: mol_type = other DNA
ggtgagtgcggcgccggttg

SEQ ID NO: 10156 - DNA, 20 bp, synthetic construct
  source 1..20: mol_type = other DNA
actgcagttgtctacgcggc

SEQ ID NO: 10157 - DNA, 20 bp, synthetic construct
  source 1..20: mol_type = other DNA
ctccggcgtagcggtgagtg

SEQ ID NO: 10158 - DNA, 20 bp, synthetic construct
  source 1..20: mol_type = other DNA
ggcccgaggccggaggaacc

SEQ ID NO: 10159 - DNA, 20 bp, synthetic construct
  source 1..20: mol_type = other DNA
acgcctcctcgtcccggccc

SEQ ID NO: 10160 - DNA, 20 bp, synthetic construct
  source 1..20: mol_type = other DNA
ggcgccggttgtgggagcgg

SEQ ID NO: 10161 - DNA, 20 bp, synthetic construct
  source 1..20: mol_type = other DNA
ggggctcagccaggcctgcg

SEQ ID NO: 10162 - DNA, 20 bp, synthetic construct
  source 1..20: mol_type = other DNA
agctgggagttccggaatgg

SEQ ID NO: 10163 - DNA, 20 bp, synthetic construct
  source 1..20: mol_type = other DNA
ccacgcacccccgaacctag

SEQ ID NO: 10164 - DNA, 20 bp, synthetic construct
  source 1..20: mol_type = other DNA
ccagctcgaccccagccgcg

SEQ ID NO: 10165 - DNA, 20 bp, synthetic construct
  source 1..20: mol_type = other DNA
ctcccagctccacgcggctg

SEQ ID NO: 10166 - DNA, 20 bp, synthetic construct
  source 1..20: mol_type = other DNA
acgcggctggggtcgagctg

SEQ ID NO: 10167 - DNA, 20 bp, synthetic construct
  source 1..20: mol_type = other DNA
atgggggccgctaggttcgg

SEQ ID NO: 10168 - DNA, 20 bp, synthetic construct
  source 1..20: mol_type = other DNA
ccggaactcccagctccacg

SEQ ID NO: 10169 - DNA, 20 bp, synthetic construct
  source 1..20: mol_type = other DNA
agagggagggcgccacgcac

SEQ ID NO: 10170 - DNA, 20 bp, synthetic construct
  source 1..20: mol_type = other DNA
acccggcggccaggagagag

SEQ ID NO: 10171 - DNA, 20 bp, synthetic construct
  source 1..20: mol_type = other DNA
tcggcccgcagtccggtgcg

SEQ ID NO: 10172 - DNA, 20 bp, synthetic construct
  source 1..20: mol_type = other DNA
gcggccaggagagagaggga

SEQ ID NO: 10173 - DNA, 20 bp, synthetic construct
  source 1..20: mol_type = other DNA
gtgaaggggcgggcacccgg

SEQ ID NO: 10174 - DNA, 20 bp, synthetic construct
  source 1..20: mol_type = other DNA
cccggcggccaggagagaga

SEQ ID NO: 10175 - DNA, 20 bp, synthetic construct
  source 1..20: mol_type = other DNA
tccctctctctcctggccgc

SEQ ID NO: 10176 - DNA, 20 bp, synthetic construct
  source 1..20: mol_type = other DNA
ggcggccaggagagagaggg

SEQ ID NO: 10177 - DNA, 20 bp, synthetic construct
  source 1..20: mol_type = other DNA
ggcgagcagggtctccgggt

SEQ ID NO: 10178 - DNA, 20 bp, synthetic construct
  source 1..20: mol_type = other DNA
gagttagagttctcccggca

SEQ ID NO: 10179 - DNA, 20 bp, synthetic construct
  source 1..20: mol_type = other DNA
gccgccttcggctttccccg

SEQ ID NO: 10180 - DNA, 20 bp, synthetic construct
  source 1..20: mol_type = other DNA
cccggcatggcgagcctcgg

SEQ ID NO: 10181 - DNA, 20 bp, synthetic construct
  source 1..20: mol_type = other DNA
cgcgccccggggaaagccga

SEQ ID NO: 10182 - DNA, 20 bp, synthetic construct
  source 1..20: mol_type = other DNA
gggcgagcagggtctccggg

SEQ ID NO: 10183 - DNA, 20 bp, synthetic construct
  source 1..20: mol_type = other DNA
attcgcgacccggaggtgcg

SEQ ID NO: 10184 - DNA, 20 bp, synthetic construct
  source 1..20: mol_type = other DNA
tcggcggcctccagcctgcg

SEQ ID NO: 10185 - DNA, 20 bp, synthetic construct
  source 1..20: mol_type = other DNA
ccgggccattcgcgacccgg

SEQ ID NO: 10186 - DNA, 20 bp, synthetic construct
  source 1..20: mol_type = other DNA
ggcggcctccagcctgcgcg

SEQ ID NO: 10187 - DNA, 20 bp, synthetic construct
  source 1..20: mol_type = other DNA
gagcagggtctccgggtggg

SEQ ID NO: 10188 - DNA, 20 bp, synthetic construct
  source 1..20: mol_type = other DNA
gcgcaggctggaggccgccg

SEQ ID NO: 10189 - DNA, 20 bp, synthetic construct
  source 1..20: mol_type = other DNA
cggcggcctccagcctgcgc

SEQ ID NO: 10190 - DNA, 20 bp, synthetic construct
  source 1..20: mol_type = other DNA
ttcgcgacccggaggtgcgc

SEQ ID NO: 10191 - DNA, 20 bp, synthetic construct
  source 1..20: mol_type = other DNA
cgacgccccgcgcaggctgg

SEQ ID NO: 10192 - DNA, 20 bp, synthetic construct
  source 1..20: mol_type = other DNA
tgtttctctcgcgccaccac

SEQ ID NO: 10193 - DNA, 20 bp, synthetic construct
  source 1..20: mol_type = other DNA
agcctagaccccagcagagg

SEQ ID NO: 10194 - DNA, 20 bp, synthetic construct
  source 1..20: mol_type = other DNA
aggacacctggagctgcggc

SEQ ID NO: 10195 - DNA, 20 bp, synthetic construct
  source 1..20: mol_type = other DNA
ggctgggcggctaggacacc

SEQ ID NO: 10196 - DNA, 20 bp, synthetic construct
  source 1..20: mol_type = other DNA
ggggtcccgggacggcgtcg

SEQ ID NO: 10197 - DNA, 20 bp, synthetic construct
  source 1..20: mol_type = other DNA
gggacggcgtcgaggctggg

SEQ ID NO: 10198 - DNA, 20 bp, synthetic construct
  source 1..20: mol_type = other DNA
cgcggctgccgcctctgctg

SEQ ID NO: 10199 - DNA, 20 bp, synthetic construct
  source 1..20: mol_type = other DNA
ctcgcgccaccactggccgc

SEQ ID NO: 10200 - DNA, 20 bp, synthetic construct
  source 1..20: mol_type = other DNA
gctccgggacgccagcgccg

SEQ ID NO: 10201 - DNA, 20 bp, synthetic construct
  source 1..20: mol_type = other DNA
gagctgcggccggcggccag

SEQ ID NO: 10202 - DNA, 20 bp, synthetic construct
  source 1..20: mol_type = other DNA
aacagcctagaccccagcag

SEQ ID NO: 10203 - DNA, 20 bp, synthetic construct
  source 1..20: mol_type = other DNA
acacctggagctgcggccgg

SEQ ID NO: 10204 - DNA, 20 bp, synthetic construct
  source 1..20: mol_type = other DNA
ggctaggacacctggagctg

SEQ ID NO: 10205 - DNA, 20 bp, synthetic construct
  source 1..20: mol_type = other DNA
ctgcggccggcggccagtgg

SEQ ID NO: 10206 - DNA, 20 bp, synthetic construct
  source 1..20: mol_type = other DNA
cccagcagaggcggcagccg

SEQ ID NO: 10207 - DNA, 20 bp, synthetic construct
  source 1..20: mol_type = other DNA
gacacggacctacgaccccg

SEQ ID NO: 10208 - DNA, 20 bp, synthetic construct
  source 1..20: mol_type = other DNA
cgggggcagacggcagacgg

SEQ ID NO: 10209 - DNA, 20 bp, synthetic construct
  source 1..20: mol_type = other DNA
agagaaagggccgaggagag

SEQ ID NO: 10210 - DNA, 20 bp, synthetic construct
  source 1..20: mol_type = other DNA
ggcagcggcagcagctgcgt

SEQ ID NO: 10211 - DNA, 20 bp, synthetic construct
  source 1..20: mol_type = other DNA
ccggagcgagcgcgaggacg

SEQ ID NO: 10212 - DNA, 20 bp, synthetic construct
  source 1..20: mol_type = other DNA
cctcgtcctcgcgctcgctc

SEQ ID NO: 10213 - DNA, 20 bp, synthetic construct
  source 1..20: mol_type = other DNA
cctcggctgctgcccggcag

SEQ ID NO: 10214 - DNA, 20 bp, synthetic construct
  source 1..20: mol_type = other DNA
agcggcagcagctgcgtcgg

SEQ ID NO: 10215 - DNA, 20 bp, synthetic construct
  source 1..20: mol_type = other DNA
acacggacctacgaccccga

SEQ ID NO: 10216 - DNA, 20 bp, synthetic construct
  source 1..20: mol_type = other DNA
cgggcagcagccgaggtgct

SEQ ID NO: 10217 - DNA, 20 bp, synthetic construct
  source 1..20: mol_type = other DNA
cacggacctacgaccccgag

SEQ ID NO: 10218 - DNA, 20 bp, synthetic construct
  source 1..20: mol_type = other DNA
cctttctcttcccagcacct

SEQ ID NO: 10219 - DNA, 20 bp, synthetic construct
  source 1..20: mol_type = other DNA
gaagagaaagggccgaggag

SEQ ID NO: 10220 - DNA, 20 bp, synthetic construct
  source 1..20: mol_type = other DNA
ccgctgccgggcagcagccg

SEQ ID NO: 10221 - DNA, 20 bp, synthetic construct
  source 1..20: mol_type = other DNA
cgaggtgctgggaagagaaa

SEQ ID NO: 10222 - DNA, 20 bp, synthetic construct
  source 1..20: mol_type = other DNA
ctctggccgggacaccatgg

SEQ ID NO: 10223 - DNA, 20 bp, synthetic construct
  source 1..20: mol_type = other DNA
cgggcgccgagaacaaagcg

SEQ ID NO: 10224 - DNA, 20 bp, synthetic construct
  source 1..20: mol_type = other DNA
gctctggccgggacaccatg

SEQ ID NO: 10225 - DNA, 20 bp, synthetic construct
  source 1..20: mol_type = other DNA
gcggaggccggacaaagatg

SEQ ID NO: 10226 - DNA, 20 bp, synthetic construct
  source 1..20: mol_type = other DNA
ggctctggccgggacaccat

SEQ ID NO: 10227 - DNA, 20 bp, synthetic construct
  source 1..20: mol_type = other DNA
tctggccgggacaccatggg

SEQ ID NO: 10228 - DNA, 20 bp, synthetic construct
  source 1..20: mol_type = other DNA
gcgccgagaacaaagcgcgg

SEQ ID NO: 10229 - DNA, 20 bp, synthetic construct
  source 1..20: mol_type = other DNA
cccaggtgcgagcagcccgg

SEQ ID NO: 10230 - DNA, 20 bp, synthetic construct
  source 1..20: mol_type = other DNA
gggctctggccgggacacca

SEQ ID NO: 10231 - DNA, 20 bp, synthetic construct
  source 1..20: mol_type = other DNA
tggggctgcgcgatcgccga

SEQ ID NO: 10232 - DNA, 20 bp, synthetic construct
  source 1..20: mol_type = other DNA
ggggctgcgcgatcgccgag

SEQ ID NO: 10233 - DNA, 20 bp, synthetic construct
  source 1..20: mol_type = other DNA
gctgcgcgatcgccgagggg

SEQ ID NO: 10234 - DNA, 20 bp, synthetic construct
  source 1..20: mol_type = other DNA
atggggctgcgcgatcgccg

SEQ ID NO: 10235 - DNA, 20 bp, synthetic construct
  source 1..20: mol_type = other DNA
cctgccttgcagcctcccct

SEQ ID NO: 10236 - DNA, 20 bp, synthetic construct
  source 1..20: mol_type = other DNA
atcgccgaggggaggctgca

SEQ ID NO: 10237 - DNA, 20 bp, synthetic construct
  source 1..20: mol_type = other DNA
acgttggccccggtgcgcga

SEQ ID NO: 10238 - DNA, 20 bp, synthetic construct
  source 1..20: mol_type = other DNA
ccgcgaagctagggccacca

SEQ ID NO: 10239 - DNA, 20 bp, synthetic construct
  source 1..20: mol_type = other DNA
cgaagctagggccaccatgg

SEQ ID NO: 10240 - DNA, 20 bp, synthetic construct
  source 1..20: mol_type = other DNA
gttcacgccctcgcgcaccg

SEQ ID NO: 10241 - DNA, 20 bp, synthetic construct
  source 1..20: mol_type = other DNA
agggcgtgaactgcaggtcc

SEQ ID NO: 10242 - DNA, 20 bp, synthetic construct
  source 1..20: mol_type = other DNA
ccaccatggcggaccgcagg

SEQ ID NO: 10243 - DNA, 20 bp, synthetic construct
  source 1..20: mol_type = other DNA
gacgttggccccggtgcgcg

SEQ ID NO: 10244 - DNA, 20 bp, synthetic construct
  source 1..20: mol_type = other DNA
ccatggcggaccgcaggcgg

SEQ ID NO: 10245 - DNA, 20 bp, synthetic construct
  source 1..20: mol_type = other DNA
ccgccgcctgcggtccgcca

SEQ ID NO: 10246 - DNA, 20 bp, synthetic construct
  source 1..20: mol_type = other DNA
ccgcctgcggtccgccatgg

SEQ ID NO: 10247 - DNA, 20 bp, synthetic construct
  source 1..20: mol_type = other DNA
ccggccggagccgccgcctg

SEQ ID NO: 10248 - DNA, 20 bp, synthetic construct
  source 1..20: mol_type = other DNA
ggacggtggccgcgaagcta

SEQ ID NO: 10249 - DNA, 20 bp, synthetic construct
  source 1..20: mol_type = other DNA
tagcttcgcggccaccgtcc

SEQ ID NO: 10250 - DNA, 20 bp, synthetic construct
  source 1..20: mol_type = other DNA
ccatggtggccctagcttcg

SEQ ID NO: 10251 - DNA, 20 bp, synthetic construct
  source 1..20: mol_type = other DNA
gcaggcggcggctccggccg

SEQ ID NO: 10252 - DNA, 20 bp, synthetic construct
  source 1..20: mol_type = other DNA
gccatgacccagcagctcag

SEQ ID NO: 10253 - DNA, 20 bp, synthetic construct
  source 1..20: mol_type = other DNA
aggacagaagcgtgcagcca

SEQ ID NO: 10254 - DNA, 20 bp, synthetic construct
  source 1..20: mol_type = other DNA
catgacccagcagctcagag

SEQ ID NO: 10255 - DNA, 20 bp, synthetic construct
  source 1..20: mol_type = other DNA
gaaggtggacagagaccgaa

SEQ ID NO: 10256 - DNA, 20 bp, synthetic construct
  source 1..20: mol_type = other DNA
agctgctgggtcatggccgg

SEQ ID NO: 10257 - DNA, 20 bp, synthetic construct
  source 1..20: mol_type = other DNA
ggtctctgtccaccttcctc

SEQ ID NO: 10258 - DNA, 20 bp, synthetic construct
  source 1..20: mol_type = other DNA
agccaggcagcaaggaccag

SEQ ID NO: 10259 - DNA, 20 bp, synthetic construct
  source 1..20: mol_type = other DNA
ccatgacccagcagctcaga

SEQ ID NO: 10260 - DNA, 20 bp, synthetic construct
  source 1..20: mol_type = other DNA
gctgctgggtcatggccggg

SEQ ID NO: 10261 - DNA, 20 bp, synthetic construct
  source 1..20: mol_type = other DNA
gtgtccagagccaggcagca

SEQ ID NO: 10262 - DNA, 20 bp, synthetic construct
  source 1..20: mol_type = other DNA
gacagagaccgaaaggacaa

SEQ ID NO: 10263 - DNA, 20 bp, synthetic construct
  source 1..20: mol_type = other DNA
aggcagcaaggaccagagga

SEQ ID NO: 10264 - DNA, 20 bp, synthetic construct
  source 1..20: mol_type = other DNA
ggccagcctgctcctccccc

SEQ ID NO: 10265 - DNA, 20 bp, synthetic construct
  source 1..20: mol_type = other DNA
tggtccttgctgcctggctc

SEQ ID NO: 10266 - DNA, 20 bp, synthetic construct
  source 1..20: mol_type = other DNA
cagcaaggaccagaggaagg

SEQ ID NO: 10267 - DNA, 20 bp, synthetic construct
  source 1..20: mol_type = other DNA
ctgaactcgcagggtcccca

SEQ ID NO: 10268 - DNA, 20 bp, synthetic construct
  source 1..20: mol_type = other DNA
gaagtcctgcgagcgacgcg

SEQ ID NO: 10269 - DNA, 20 bp, synthetic construct
  source 1..20: mol_type = other DNA
ggcgccggggaccatctcca

SEQ ID NO: 10270 - DNA, 20 bp, synthetic construct
  source 1..20: mol_type = other DNA
cctgcgagcgacgcgcggcg

SEQ ID NO: 10271 - DNA, 20 bp, synthetic construct
  source 1..20: mol_type = other DNA
gtcctgcgagcgacgcgcgg

SEQ ID NO: 10272 - DNA, 20 bp, synthetic construct
  source 1..20: mol_type = other DNA
cacgagacaacaccagcccg

SEQ ID NO: 10273 - DNA, 20 bp, synthetic construct
  source 1..20: mol_type = other DNA
cggggcggcgagaggaaacg

SEQ ID NO: 10274 - DNA, 20 bp, synthetic construct
  source 1..20: mol_type = other DNA
ccggccctggagatggtccc

SEQ ID NO: 10275 - DNA, 20 bp, synthetic construct
  source 1..20: mol_type = other DNA
gagatggtccccggcgccgc

SEQ ID NO: 10276 - DNA, 20 bp, synthetic construct
  source 1..20: mol_type = other DNA
gccgggcccggccctggaga

SEQ ID NO: 10277 - DNA, 20 bp, synthetic construct
  source 1..20: mol_type = other DNA
gggaggccggagcagctgtc

SEQ ID NO: 10278 - DNA, 20 bp, synthetic construct
  source 1..20: mol_type = other DNA
ggcgagaggaaacgcggcgc

SEQ ID NO: 10279 - DNA, 20 bp, synthetic construct
  source 1..20: mol_type = other DNA
aacaccagcccgcggcgccg

SEQ ID NO: 10280 - DNA, 20 bp, synthetic construct
  source 1..20: mol_type = other DNA
acaacaccagcccgcggcgc

SEQ ID NO: 10281 - DNA, 20 bp, synthetic construct
  source 1..20: mol_type = other DNA
ggagatggtccccggcgccg

SEQ ID NO: 10282 - DNA, 20 bp, synthetic construct
  source 1..20: mol_type = other DNA
ggtacggatcaacaacaaga

SEQ ID NO: 10283 - DNA, 20 bp, synthetic construct
  source 1..20: mol_type = other DNA
acggatcaacaacaagatgg

SEQ ID NO: 10284 - DNA, 20 bp, synthetic construct
  source 1..20: mol_type = other DNA
gttgttgatccgtacccagt

SEQ ID NO: 10285 - DNA, 20 bp, synthetic construct
  source 1..20: mol_type = other DNA
gtggctgagcaccgctacag

SEQ ID NO: 10286 - DNA, 20 bp, synthetic construct
  source 1..20: mol_type = other DNA
gcgccgggagctggaccaag

SEQ ID NO: 10287 - DNA, 20 bp, synthetic construct
  source 1..20: mol_type = other DNA
ccggtgagaggccgctgtag

SEQ ID NO: 10288 - DNA, 20 bp, synthetic construct
  source 1..20: mol_type = other DNA
atagaccggcctgacgcccg

SEQ ID NO: 10289 - DNA, 20 bp, synthetic construct
  source 1..20: mol_type = other DNA
tgttgttgatccgtacccag

SEQ ID NO: 10290 - DNA, 20 bp, synthetic construct
  source 1..20: mol_type = other DNA
tggaccaagcggccggtgag

SEQ ID NO: 10291 - DNA, 20 bp, synthetic construct
  source 1..20: mol_type = other DNA
tagaccggcctgacgcccgc

SEQ ID NO: 10292 - DNA, 20 bp, synthetic construct
  source 1..20: mol_type = other DNA
gtcactcacctgcccggccc

SEQ ID NO: 10293 - DNA, 20 bp, synthetic construct
  source 1..20: mol_type = other DNA
agaccggcctgacgcccgcg

SEQ ID NO: 10294 - DNA, 20 bp, synthetic construct
  source 1..20: mol_type = other DNA
cgggagctggaccaagcggc

SEQ ID NO: 10295 - DNA, 20 bp, synthetic construct
  source 1..20: mol_type = other DNA
cccctggcaggcagcacagg

SEQ ID NO: 10296 - DNA, 20 bp, synthetic construct
  source 1..20: mol_type = other DNA
ccgctacagcggcctctcac

SEQ ID NO: 10297 - DNA, 20 bp, synthetic construct
  source 1..20: mol_type = other DNA
ggacggtcggagaaggcagt

SEQ ID NO: 10298 - DNA, 20 bp, synthetic construct
  source 1..20: mol_type = other DNA
atctccggtcgatggctctg

SEQ ID NO: 10299 - DNA, 20 bp, synthetic construct
  source 1..20: mol_type = other DNA
tgccatttcaatgtctgagg

SEQ ID NO: 10300 - DNA, 20 bp, synthetic construct
  source 1..20: mol_type = other DNA
aagagagcacgcctgccccg

SEQ ID NO: 10301 - DNA, 20 bp, synthetic construct
  source 1..20: mol_type = other DNA
ggagcagtctggagtagcag

SEQ ID NO: 10302 - DNA, 20 bp, synthetic construct
  source 1..20: mol_type = other DNA
agccaacccctaaaagctca

SEQ ID NO: 10303 - DNA, 20 bp, synthetic construct
  source 1..20: mol_type = other DNA
acgcctgccccgaggacgga

SEQ ID NO: 10304 - DNA, 20 bp, synthetic construct
  source 1..20: mol_type = other DNA
tggagtagcagcggtgacgg

SEQ ID NO: 10305 - DNA, 20 bp, synthetic construct
  source 1..20: mol_type = other DNA
gtctggagtagcagcggtga

SEQ ID NO: 10306 - DNA, 20 bp, synthetic construct
  source 1..20: mol_type = other DNA
aagcctgttcagcagcccag

SEQ ID NO: 10307 - DNA, 20 bp, synthetic construct
  source 1..20: mol_type = other DNA
cgaggacggacggtcggaga

SEQ ID NO: 10308 - DNA, 20 bp, synthetic construct
  source 1..20: mol_type = other DNA
aagccaacccctaaaagctc

SEQ ID NO: 10309 - DNA, 20 bp, synthetic construct
  source 1..20: mol_type = other DNA
gagcacgcctgccccgagga

SEQ ID NO: 10310 - DNA, 20 bp, synthetic construct
  source 1..20: mol_type = other DNA
ctgccccgaggacggacggt

SEQ ID NO: 10311 - DNA, 20 bp, synthetic construct
  source 1..20: mol_type = other DNA
cgaccgtccgtcctcggggc

SEQ ID NO: 10312 - DNA, 20 bp, synthetic construct
  source 1..20: mol_type = other DNA
ggggtccccgaacgttactg

SEQ ID NO: 10313 - DNA, 20 bp, synthetic construct
  source 1..20: mol_type = other DNA
ggcggccccagtaacgttcg

SEQ ID NO: 10314 - DNA, 20 bp, synthetic construct
  source 1..20: mol_type = other DNA
cctgcacaagctggagcacg

SEQ ID NO: 10315 - DNA, 20 bp, synthetic construct
  source 1..20: mol_type = other DNA
aagctggagcacgaggtgcg

SEQ ID NO: 10316 - DNA, 20 bp, synthetic construct
  source 1..20: mol_type = other DNA
ggcgccatggaggccgagcg

SEQ ID NO: 10317 - DNA, 20 bp, synthetic construct
  source 1..20: mol_type = other DNA
gggagggcagggccgacgga

SEQ ID NO: 10318 - DNA, 20 bp, synthetic construct
  source 1..20: mol_type = other DNA
agggcagggccgacggacgg

SEQ ID NO: 10319 - DNA, 20 bp, synthetic construct
  source 1..20: mol_type = other DNA
gggcagggccgacggacggc

SEQ ID NO: 10320 - DNA, 20 bp, synthetic construct
  source 1..20: mol_type = other DNA
cgcgggtgctggcgccatgg

SEQ ID NO: 10321 - DNA, 20 bp, synthetic construct
  source 1..20: mol_type = other DNA
ggcggtggcggcgctggagt

SEQ ID NO: 10322 - DNA, 20 bp, synthetic construct
  source 1..20: mol_type = other DNA
ggcggcgctggagtcggcgc

SEQ ID NO: 10323 - DNA, 20 bp, synthetic construct
  source 1..20: mol_type = other DNA
tggcggcgctggagtcggcg

SEQ ID NO: 10324 - DNA, 20 bp, synthetic construct
  source 1..20: mol_type = other DNA
ctggcgccatggaggccgag

SEQ ID NO: 10325 - DNA, 20 bp, synthetic construct
  source 1..20: mol_type = other DNA
cagggccgacggacggcggg

SEQ ID NO: 10326 - DNA, 20 bp, synthetic construct
  source 1..20: mol_type = other DNA
aggcgggagggcagggccga

SEQ ID NO: 10327 - DNA, 20 bp, synthetic construct
  source 1..20: mol_type = other DNA
caacccgatcgcaaccacgc

SEQ ID NO: 10328 - DNA, 20 bp, synthetic construct
  source 1..20: mol_type = other DNA
gccagattgcgatcgcgatg

SEQ ID NO: 10329 - DNA, 20 bp, synthetic construct
  source 1..20: mol_type = other DNA
tgggcactctgtctctgcgc

SEQ ID NO: 10330 - DNA, 20 bp, synthetic construct
  source 1..20: mol_type = other DNA
aattggggcgggctaaagga

SEQ ID NO: 10331 - DNA, 20 bp, synthetic construct
  source 1..20: mol_type = other DNA
ttgcgatcgcgatgaggctt

SEQ ID NO: 10332 - DNA, 20 bp, synthetic construct
  source 1..20: mol_type = other DNA
gctgggatcagcctttaaga

SEQ ID NO: 10333 - DNA, 20 bp, synthetic construct
  source 1..20: mol_type = other DNA
gctccagtcagtgtacaaga

SEQ ID NO: 10334 - DNA, 20 bp, synthetic construct
  source 1..20: mol_type = other DNA
atcgcaatctggcccccctg

SEQ ID NO: 10335 - DNA, 20 bp, synthetic construct
  source 1..20: mol_type = other DNA
ggtccatcttgtacactgac

SEQ ID NO: 10336 - DNA, 20 bp, synthetic construct
  source 1..20: mol_type = other DNA
ggggcgggctaaaggacggg

SEQ ID NO: 10337 - DNA, 20 bp, synthetic construct
  source 1..20: mol_type = other DNA
attggggcgggctaaaggac

SEQ ID NO: 10338 - DNA, 20 bp, synthetic construct
  source 1..20: mol_type = other DNA
gagtgcccagtgcgcctgcg

SEQ ID NO: 10339 - DNA, 20 bp, synthetic construct
  source 1..20: mol_type = other DNA
tcgcaaccacgcaggcgcac

SEQ ID NO: 10340 - DNA, 20 bp, synthetic construct
  source 1..20: mol_type = other DNA
gcctcatcgcgatcgcaatc

SEQ ID NO: 10341 - DNA, 20 bp, synthetic construct
  source 1..20: mol_type = other DNA
caggcggcaccggaagtggc

SEQ ID NO: 10342 - DNA, 20 bp, synthetic construct
  source 1..20: mol_type = other DNA
ggacccgcctgacccacccg

SEQ ID NO: 10343 - DNA, 20 bp, synthetic construct
  source 1..20: mol_type = other DNA
ttcacaggctgcgaggccac

SEQ ID NO: 10344 - DNA, 20 bp, synthetic construct
  source 1..20: mol_type = other DNA
cacgaccacgaagccgccgg

SEQ ID NO: 10345 - DNA, 20 bp, synthetic construct
  source 1..20: mol_type = other DNA
acaggctgcgaggccaccgg

SEQ ID NO: 10346 - DNA, 20 bp, synthetic construct
  source 1..20: mol_type = other DNA
gattcatctggtaggtgtgc

SEQ ID NO: 10347 - DNA, 20 bp, synthetic construct
  source 1..20: mol_type = other DNA
gcggcttcgtggtcgtgaag

SEQ ID NO: 10348 - DNA, 20 bp, synthetic construct
  source 1..20: mol_type = other DNA
gggtggagagggcctcgggt

SEQ ID NO: 10349 - DNA, 20 bp, synthetic construct
  source 1..20: mol_type = other DNA
gggagcccagggagcatgcg

SEQ ID NO: 10350 - DNA, 20 bp, synthetic construct
  source 1..20: mol_type = other DNA
gtggcctcgcagcctgtgaa

SEQ ID NO: 10351 - DNA, 20 bp, synthetic construct
  source 1..20: mol_type = other DNA
cgcccacgtgaagaacgcca

SEQ ID NO: 10352 - DNA, 20 bp, synthetic construct
  source 1..20: mol_type = other DNA
agggcctcgggtgggtcagg

SEQ ID NO: 10353 - DNA, 20 bp, synthetic construct
  source 1..20: mol_type = other DNA
gtgcaggccagtcatcccgg

SEQ ID NO: 10354 - DNA, 20 bp, synthetic construct
  source 1..20: mol_type = other DNA
tgtgcaggccagtcatcccg

SEQ ID NO: 10355 - DNA, 20 bp, synthetic construct
  source 1..20: mol_type = other DNA
ggtgtgcaggccagtcatcc

SEQ ID NO: 10356 - DNA, 20 bp, synthetic construct
  source 1..20: mol_type = other DNA
agctgtgaggcagtgctgtg

SEQ ID NO: 10357 - DNA, 20 bp, synthetic construct
  source 1..20: mol_type = other DNA
cagccggcgcgatccagacg

SEQ ID NO: 10358 - DNA, 20 bp, synthetic construct
  source 1..20: mol_type = other DNA
cggcgcgatccagacgcggt

SEQ ID NO: 10359 - DNA, 20 bp, synthetic construct
  source 1..20: mol_type = other DNA
cctccagtcgaacccgacaa

SEQ ID NO: 10360 - DNA, 20 bp, synthetic construct
  source 1..20: mol_type = other DNA
gttgtcgggttcgactggag

SEQ ID NO: 10361 - DNA, 20 bp, synthetic construct
  source 1..20: mol_type = other DNA
ccgggcttcacctaccccga

SEQ ID NO: 10362 - DNA, 20 bp, synthetic construct
  source 1..20: mol_type = other DNA
aggtccgatcctcctggtcg

SEQ ID NO: 10363 - DNA, 20 bp, synthetic construct
  source 1..20: mol_type = other DNA
ccggcgcgatccagacgcgg

SEQ ID NO: 10364 - DNA, 20 bp, synthetic construct
  source 1..20: mol_type = other DNA
ttcacctaccccgacggccg

SEQ ID NO: 10365 - DNA, 20 bp, synthetic construct
  source 1..20: mol_type = other DNA
gccctgcgtccgcgaccagg

SEQ ID NO: 10366 - DNA, 20 bp, synthetic construct
  source 1..20: mol_type = other DNA
aggcgaaggtccgatcctcc

SEQ ID NO: 10367 - DNA, 20 bp, synthetic construct
  source 1..20: mol_type = other DNA
ccgttgtcgggttcgactgg

SEQ ID NO: 10368 - DNA, 20 bp, synthetic construct
  source 1..20: mol_type = other DNA
gcgatccagacgcggtgggc

SEQ ID NO: 10369 - DNA, 20 bp, synthetic construct
  source 1..20: mol_type = other DNA
tcacctgcgagcggctgcgc

SEQ ID NO: 10370 - DNA, 20 bp, synthetic construct
  source 1..20: mol_type = other DNA
cctgcgagcggctgcgctgg

SEQ ID NO: 10371 - DNA, 20 bp, synthetic construct
  source 1..20: mol_type = other DNA
cgcaggggagaggccagccc

SEQ ID NO: 10372 - DNA, 20 bp, synthetic construct
  source 1..20: mol_type = other DNA
caggctggcctcacaaccaa

SEQ ID NO: 10373 - DNA, 20 bp, synthetic construct
  source 1..20: mol_type = other DNA
gctggcctcacaaccaaggg

SEQ ID NO: 10374 - DNA, 20 bp, synthetic construct
  source 1..20: mol_type = other DNA
accttagcgacagccgccct

SEQ ID NO: 10375 - DNA, 20 bp, synthetic construct
  source 1..20: mol_type = other DNA
ccccaacccgaactcacagc

SEQ ID NO: 10376 - DNA, 20 bp, synthetic construct
  source 1..20: mol_type = other DNA
gaagggctaggggtcaagaa

SEQ ID NO: 10377 - DNA, 20 bp, synthetic construct
  source 1..20: mol_type = other DNA
tctggcgccgctgctcccgg

SEQ ID NO: 10378 - DNA, 20 bp, synthetic construct
  source 1..20: mol_type = other DNA
agcagcggcgccagaagaga

SEQ ID NO: 10379 - DNA, 20 bp, synthetic construct
  source 1..20: mol_type = other DNA
gggagctcctccgggagcag

SEQ ID NO: 10380 - DNA, 20 bp, synthetic construct
  source 1..20: mol_type = other DNA
gccgtgccgggagctcctcc

SEQ ID NO: 10381 - DNA, 20 bp, synthetic construct
  source 1..20: mol_type = other DNA
agagggcagtgtttccactg

SEQ ID NO: 10382 - DNA, 20 bp, synthetic construct
  source 1..20: mol_type = other DNA
ggaagggctaggggtcaaga

SEQ ID NO: 10383 - DNA, 20 bp, synthetic construct
  source 1..20: mol_type = other DNA
acggcgacaggagggaagga

SEQ ID NO: 10384 - DNA, 20 bp, synthetic construct
  source 1..20: mol_type = other DNA
gctaggggtcaagaagggag

SEQ ID NO: 10385 - DNA, 20 bp, synthetic construct
  source 1..20: mol_type = other DNA
gggagggaaggaagggctag

SEQ ID NO: 10386 - DNA, 20 bp, synthetic construct
  source 1..20: mol_type = other DNA
gacggcgacaggagggaagg

SEQ ID NO: 10387 - DNA, 20 bp, synthetic construct
  source 1..20: mol_type = other DNA
ggcgagcactctagcgatgg

SEQ ID NO: 10388 - DNA, 20 bp, synthetic construct
  source 1..20: mol_type = other DNA
tgggcgatcagagaggatcc

SEQ ID NO: 10389 - DNA, 20 bp, synthetic construct
  source 1..20: mol_type = other DNA
gcgatcagagaggatcccgg

SEQ ID NO: 10390 - DNA, 20 bp, synthetic construct
  source 1..20: mol_type = other DNA
gcggcgagcactctagcgat

SEQ ID NO: 10391 - DNA, 20 bp, synthetic construct
  source 1..20: mol_type = other DNA
caggtcgtgcaggagtccgg

SEQ ID NO: 10392 - DNA, 20 bp, synthetic construct
  source 1..20: mol_type = other DNA
cggcgagcactctagcgatg

SEQ ID NO: 10393 - DNA, 20 bp, synthetic construct
  source 1..20: mol_type = other DNA
ggaacgcgaggctgctagcg

SEQ ID NO: 10394 - DNA, 20 bp, synthetic construct
  source 1..20: mol_type = other DNA
cgcggcgagcactctagcga

SEQ ID NO: 10395 - DNA, 20 bp, synthetic construct
  source 1..20: mol_type = other DNA
gctgtaggagcaggtcgtgc

SEQ ID NO: 10396 - DNA, 20 bp, synthetic construct
  source 1..20: mol_type = other DNA
gcaggagtccggaggaaagt

SEQ ID NO: 10397 - DNA, 20 bp, synthetic construct
  source 1..20: mol_type = other DNA
acccccagccctggaacgcg

SEQ ID NO: 10398 - DNA, 20 bp, synthetic construct
  source 1..20: mol_type = other DNA
gctagcagcctcgcgttcca

SEQ ID NO: 10399 - DNA, 20 bp, synthetic construct
  source 1..20: mol_type = other DNA
agcctcgcgttccagggctg

SEQ ID NO: 10400 - DNA, 20 bp, synthetic construct
  source 1..20: mol_type = other DNA
gtggcgggaagcttctgcgc

SEQ ID NO: 10401 - DNA, 20 bp, synthetic construct
  source 1..20: mol_type = other DNA
gcctcgcgttccagggctgg

SEQ ID NO: 10402 - DNA, 20 bp, synthetic construct
  source 1..20: mol_type = other DNA
gctccaggacccagcgcagg

SEQ ID NO: 10403 - DNA, 20 bp, synthetic construct
  source 1..20: mol_type = other DNA
accgctcagtctcccctccg

SEQ ID NO: 10404 - DNA, 20 bp, synthetic construct
  source 1..20: mol_type = other DNA
tcggaggggagactgagcgg

SEQ ID NO: 10405 - DNA, 20 bp, synthetic construct
  source 1..20: mol_type = other DNA
gcctcggaggggagactgag

SEQ ID NO: 10406 - DNA, 20 bp, synthetic construct
  source 1..20: mol_type = other DNA
ctgggtcctggagcgcagtg

SEQ ID NO: 10407 - DNA, 20 bp, synthetic construct
  source 1..20: mol_type = other DNA
gctgggtcctggagcgcagt

SEQ ID NO: 10408 - DNA, 20 bp, synthetic construct
  source 1..20: mol_type = other DNA
ggcaggcggcggcctcggag

SEQ ID NO: 10409 - DNA, 20 bp, synthetic construct
  source 1..20: mol_type = other DNA
gacccagcgcaggcggcagg

SEQ ID NO: 10410 - DNA, 20 bp, synthetic construct
  source 1..20: mol_type = other DNA
aggcaggcggcggcctcgga

SEQ ID NO: 10411 - DNA, 20 bp, synthetic construct
  source 1..20: mol_type = other DNA
caggacccagcgcaggcggc

SEQ ID NO: 10412 - DNA, 20 bp, synthetic construct
  source 1..20: mol_type = other DNA
acccagcgcaggcggcaggc

SEQ ID NO: 10413 - DNA, 20 bp, synthetic construct
  source 1..20: mol_type = other DNA
gcaggcgggcaggcaggcgg

SEQ ID NO: 10414 - DNA, 20 bp, synthetic construct
  source 1..20: mol_type = other DNA
gaggggagactgagcggtgg

SEQ ID NO: 10415 - DNA, 20 bp, synthetic construct
  source 1..20: mol_type = other DNA
agcgcaggcggcaggcgggc

SEQ ID NO: 10416 - DNA, 20 bp, synthetic construct
  source 1..20: mol_type = other DNA
gcggcaggcgggcaggcagg

SEQ ID NO: 10417 - DNA, 20 bp, synthetic construct
  source 1..20: mol_type = other DNA
gcagacagtggcagcgaaag

SEQ ID NO: 10418 - DNA, 20 bp, synthetic construct
  source 1..20: mol_type = other DNA
ggcccagcggacagagcccc

SEQ ID NO: 10419 - DNA, 20 bp, synthetic construct
  source 1..20: mol_type = other DNA
ctgccactgtctgctccccc

SEQ ID NO: 10420 - DNA, 20 bp, synthetic construct
  source 1..20: mol_type = other DNA
cagagccccgggcctgcggg

SEQ ID NO: 10421 - DNA, 20 bp, synthetic construct
  source 1..20: mol_type = other DNA
ctggctcggggcgagcagcg

SEQ ID NO: 10422 - DNA, 20 bp, synthetic construct
  source 1..20: mol_type = other DNA
gctgccactgtctgctcccc

SEQ ID NO: 10423 - DNA, 20 bp, synthetic construct
  source 1..20: mol_type = other DNA
ggcgagcagcgcgggcccag

SEQ ID NO: 10424 - DNA, 20 bp, synthetic construct
  source 1..20: mol_type = other DNA
ggctccgagcgctgggctgg

SEQ ID NO: 10425 - DNA, 20 bp, synthetic construct
  source 1..20: mol_type = other DNA
cgcgcctccagcccagcgct

SEQ ID NO: 10426 - DNA, 20 bp, synthetic construct
  source 1..20: mol_type = other DNA
gacagagccccgggcctgcg

SEQ ID NO: 10427 - DNA, 20 bp, synthetic construct
  source 1..20: mol_type = other DNA
cgcctccccccgcaggcccg

SEQ ID NO: 10428 - DNA, 20 bp, synthetic construct
  source 1..20: mol_type = other DNA
acagagccccgggcctgcgg

SEQ ID NO: 10429 - DNA, 20 bp, synthetic construct
  source 1..20: mol_type = other DNA
cggcccgggggagcagacag

SEQ ID NO: 10430 - DNA, 20 bp, synthetic construct
  source 1..20: mol_type = other DNA
gggaggcggcggcggcccgg

SEQ ID NO: 10431 - DNA, 20 bp, synthetic construct
  source 1..20: mol_type = other DNA
gggcccagcggacagagccc

SEQ ID NO: 10432 - DNA, 20 bp, synthetic construct
  source 1..20: mol_type = other DNA
cagagactgcaggtaagctg

SEQ ID NO: 10433 - DNA, 20 bp, synthetic construct
  source 1..20: mol_type = other DNA
gcactggacctgtgcaatag

SEQ ID NO: 10434 - DNA, 20 bp, synthetic construct
  source 1..20: mol_type = other DNA
agggattaaaggctagtctc

SEQ ID NO: 10435 - DNA, 20 bp, synthetic construct
  source 1..20: mol_type = other DNA
agagactgcaggtaagctgg

SEQ ID NO: 10436 - DNA, 20 bp, synthetic construct
  source 1..20: mol_type = other DNA
tcttctctctcagagactgc

SEQ ID NO: 10437 - DNA, 20 bp, synthetic construct
  source 1..20: mol_type = other DNA
agcatgaatccctgagccct

SEQ ID NO: 10438 - DNA, 20 bp, synthetic construct
  source 1..20: mol_type = other DNA
tcagagactgcaggtaagct

SEQ ID NO: 10439 - DNA, 20 bp, synthetic construct
  source 1..20: mol_type = other DNA
taaaggctagtctcaggctg

SEQ ID NO: 10440 - DNA, 20 bp, synthetic construct
  source 1..20: mol_type = other DNA
gcatgaatccctgagccctg

SEQ ID NO: 10441 - DNA, 20 bp, synthetic construct
  source 1..20: mol_type = other DNA
ttcccaataggaagaagccc

SEQ ID NO: 10442 - DNA, 20 bp, synthetic construct
  source 1..20: mol_type = other DNA
cagcatgaatccctgagccc

SEQ ID NO: 10443 - DNA, 20 bp, synthetic construct
  source 1..20: mol_type = other DNA
agaaacagggggaggccaag

SEQ ID NO: 10444 - DNA, 20 bp, synthetic construct
  source 1..20: mol_type = other DNA
acaggtccagtgcagacccc

SEQ ID NO: 10445 - DNA, 20 bp, synthetic construct
  source 1..20: mol_type = other DNA
agtgcagaccccagggctca

SEQ ID NO: 10446 - DNA, 20 bp, synthetic construct
  source 1..20: mol_type = other DNA
ttaaaggctagtctcaggct

SEQ ID NO: 10447 - DNA, 20 bp, synthetic construct
  source 1..20: mol_type = other DNA
gcgctgcggaaccggagctc

SEQ ID NO: 10448 - DNA, 20 bp, synthetic construct
  source 1..20: mol_type = other DNA
cggttccgcagcgccgcgcg

SEQ ID NO: 10449 - DNA, 20 bp, synthetic construct
  source 1..20: mol_type = other DNA
tgcggaaccggagctccggg

SEQ ID NO: 10450 - DNA, 20 bp, synthetic construct
  source 1..20: mol_type = other DNA
cgcgagaggcgacgaggccc

SEQ ID NO: 10451 - DNA, 20 bp, synthetic construct
  source 1..20: mol_type = other DNA
cagcggcgcgagaggcgacg

SEQ ID NO: 10452 - DNA, 20 bp, synthetic construct
  source 1..20: mol_type = other DNA
accggagctccgggcggcgt

SEQ ID NO: 10453 - DNA, 20 bp, synthetic construct
  source 1..20: mol_type = other DNA
ggttccgcagcgccgcgcgg

SEQ ID NO: 10454 - DNA, 20 bp, synthetic construct
  source 1..20: mol_type = other DNA
gccgacgccgcccggagctc

SEQ ID NO: 10455 - DNA, 20 bp, synthetic construct
  source 1..20: mol_type = other DNA
ggcgtcggcagcggcgcgag

SEQ ID NO: 10456 - DNA, 20 bp, synthetic construct
  source 1..20: mol_type = other DNA
tccggttccgcagcgccgcg

SEQ ID NO: 10457 - DNA, 20 bp, synthetic construct
  source 1..20: mol_type = other DNA
cgtccccgccgccctcgccg

SEQ ID NO: 10458 - DNA, 20 bp, synthetic construct
  source 1..20: mol_type = other DNA
gctccgggcggcgtcggcag

SEQ ID NO: 10459 - DNA, 20 bp, synthetic construct
  source 1..20: mol_type = other DNA
cccgcccccgcgcggcgctg

SEQ ID NO: 10460 - DNA, 20 bp, synthetic construct
  source 1..20: mol_type = other DNA
gagaggcgacgaggcccggg

SEQ ID NO: 10461 - DNA, 20 bp, synthetic construct
  source 1..20: mol_type = other DNA
ccgggcggcaggagccggcg

SEQ ID NO: 10462 - DNA, 20 bp, synthetic construct
  source 1..20: mol_type = other DNA
cgggaattcagcctccggcg

SEQ ID NO: 10463 - DNA, 20 bp, synthetic construct
  source 1..20: mol_type = other DNA
tgcgggaattcagcctccgg

SEQ ID NO: 10464 - DNA, 20 bp, synthetic construct
  source 1..20: mol_type = other DNA
gggaattcagcctccggcgg

SEQ ID NO: 10465 - DNA, 20 bp, synthetic construct
  source 1..20: mol_type = other DNA
acttcttggaaggcagactt

SEQ ID NO: 10466 - DNA, 20 bp, synthetic construct
  source 1..20: mol_type = other DNA
cagacttgggacgctttgtg

SEQ ID NO: 10467 - DNA, 20 bp, synthetic construct
  source 1..20: mol_type = other DNA
acagccccgcacacccactg

SEQ ID NO: 10468 - DNA, 20 bp, synthetic construct
  source 1..20: mol_type = other DNA
gacagccccgcacacccact

SEQ ID NO: 10469 - DNA, 20 bp, synthetic construct
  source 1..20: mol_type = other DNA
tccaccccagtgggtgtgcg

SEQ ID NO: 10470 - DNA, 20 bp, synthetic construct
  source 1..20: mol_type = other DNA
cgacagccccgcacacccac

SEQ ID NO: 10471 - DNA, 20 bp, synthetic construct
  source 1..20: mol_type = other DNA
ggcccccttctccaccccag

SEQ ID NO: 10472 - DNA, 20 bp, synthetic construct
  source 1..20: mol_type = other DNA
gccccgcacacccactgggg

SEQ ID NO: 10473 - DNA, 20 bp, synthetic construct
  source 1..20: mol_type = other DNA
ctgcctgctggaaagaaagc

SEQ ID NO: 10474 - DNA, 20 bp, synthetic construct
  source 1..20: mol_type = other DNA
gccagagcaaggctgcctgc

SEQ ID NO: 10475 - DNA, 20 bp, synthetic construct
  source 1..20: mol_type = other DNA
gcccccttctccaccccagt

SEQ ID NO: 10476 - DNA, 20 bp, synthetic construct
  source 1..20: mol_type = other DNA
acccactggggtggagaagg

SEQ ID NO: 10477 - DNA, 20 bp, synthetic construct
  source 1..20: mol_type = other DNA
gcagcgtgcaaggaaacacc

SEQ ID NO: 10478 - DNA, 20 bp, synthetic construct
  source 1..20: mol_type = other DNA
gggagtccaggcccagcacg

SEQ ID NO: 10479 - DNA, 20 bp, synthetic construct
  source 1..20: mol_type = other DNA
agcagcgtgcaaggaaacac

SEQ ID NO: 10480 - DNA, 20 bp, synthetic construct
  source 1..20: mol_type = other DNA
gcaaggaaacaccgggaaca

SEQ ID NO: 10481 - DNA, 20 bp, synthetic construct
  source 1..20: mol_type = other DNA
cgcgggccatgcgttcggcg

SEQ ID NO: 10482 - DNA, 20 bp, synthetic construct
  source 1..20: mol_type = other DNA
tgctgggcctggactcccgg

SEQ ID NO: 10483 - DNA, 20 bp, synthetic construct
  source 1..20: mol_type = other DNA
gcgccgaacgcatggcccgc

SEQ ID NO: 10484 - DNA, 20 bp, synthetic construct
  source 1..20: mol_type = other DNA
gctgggcctggactcccggg

SEQ ID NO: 10485 - DNA, 20 bp, synthetic construct
  source 1..20: mol_type = other DNA
gctgggccgcgccgaacgca

SEQ ID NO: 10486 - DNA, 20 bp, synthetic construct
  source 1..20: mol_type = other DNA
gccccgccgcccgcgcaccc

SEQ ID NO: 10487 - DNA, 20 bp, synthetic construct
  source 1..20: mol_type = other DNA
ttcctccctcccgccggccg

SEQ ID NO: 10488 - DNA, 20 bp, synthetic construct
  source 1..20: mol_type = other DNA
tcccgccggccggggtgcgc

SEQ ID NO: 10489 - DNA, 20 bp, synthetic construct
  source 1..20: mol_type = other DNA
cgcccgcgcaccccggccgg

SEQ ID NO: 10490 - DNA, 20 bp, synthetic construct
  source 1..20: mol_type = other DNA
gcgcaccccggccggcggga

SEQ ID NO: 10491 - DNA, 20 bp, synthetic construct
  source 1..20: mol_type = other DNA
ccggcgggagggaggaaaag

SEQ ID NO: 10492 - DNA, 20 bp, synthetic construct
  source 1..20: mol_type = other DNA
ggtgggcacggggcagtcgt

SEQ ID NO: 10493 - DNA, 20 bp, synthetic construct
  source 1..20: mol_type = other DNA
actgccccgtgcccaccccg

SEQ ID NO: 10494 - DNA, 20 bp, synthetic construct
  source 1..20: mol_type = other DNA
gggagaagttgggagcggcg

SEQ ID NO: 10495 - DNA, 20 bp, synthetic construct
  source 1..20: mol_type = other DNA
gtgggcacggggcagtcgtc

SEQ ID NO: 10496 - DNA, 20 bp, synthetic construct
  source 1..20: mol_type = other DNA
ctcaactttcccccgcgccg

SEQ ID NO: 10497 - DNA, 20 bp, synthetic construct
  source 1..20: mol_type = other DNA
gactgccccgtgcccacccc

SEQ ID NO: 10498 - DNA, 20 bp, synthetic construct
  source 1..20: mol_type = other DNA
gcagggggctggcctgcccg

SEQ ID NO: 10499 - DNA, 20 bp, synthetic construct
  source 1..20: mol_type = other DNA
gagttgggagaagttgggag

SEQ ID NO: 10500 - DNA, 20 bp, synthetic construct
  source 1..20: mol_type = other DNA
ttgggagaagttgggagcgg

SEQ ID NO: 10501 - DNA, 20 bp, synthetic construct
  source 1..20: mol_type = other DNA
tcaactttcccccgcgccgc

SEQ ID NO: 10502 - DNA, 20 bp, synthetic construct
  source 1..20: mol_type = other DNA
cgactgccccgtgcccaccc

SEQ ID NO: 10503 - DNA, 20 bp, synthetic construct
  source 1..20: mol_type = other DNA
ccggggggcgcgcacgcagg

SEQ ID NO: 10504 - DNA, 20 bp, synthetic construct
  source 1..20: mol_type = other DNA
gccggggggcgcgcacgcag

SEQ ID NO: 10505 - DNA, 20 bp, synthetic construct
  source 1..20: mol_type = other DNA
aagttgagttgggagaagtt

SEQ ID NO: 10506 - DNA, 20 bp, synthetic construct
  source 1..20: mol_type = other DNA
ctggcctgcccgcggcgcgg

SEQ ID NO: 10507 - DNA, 20 bp, synthetic construct
  source 1..20: mol_type = other DNA
ctgacacctggcacacccca

SEQ ID NO: 10508 - DNA, 20 bp, synthetic construct
  source 1..20: mol_type = other DNA
ggagtctgcgcgccagtgag

SEQ ID NO: 10509 - DNA, 20 bp, synthetic construct
  source 1..20: mol_type = other DNA
ttgtggccatggcctcctcg

SEQ ID NO: 10510 - DNA, 20 bp, synthetic construct
  source 1..20: mol_type = other DNA
ccttacctggggccagctgt

SEQ ID NO: 10511 - DNA, 20 bp, synthetic construct
  source 1..20: mol_type = other DNA
gctgacacctggcacacccc

SEQ ID NO: 10512 - DNA, 20 bp, synthetic construct
  source 1..20: mol_type = other DNA
caccatgctccgctgacacc

SEQ ID NO: 10513 - DNA, 20 bp, synthetic construct
  source 1..20: mol_type = other DNA
gagggccccttccttacctg

SEQ ID NO: 10514 - DNA, 20 bp, synthetic construct
  source 1..20: mol_type = other DNA
ctgaagccgccaccagcccc

SEQ ID NO: 10515 - DNA, 20 bp, synthetic construct
  source 1..20: mol_type = other DNA
gctggccccaggtaaggaag

SEQ ID NO: 10516 - DNA, 20 bp, synthetic construct
  source 1..20: mol_type = other DNA
aagtgcccacagctggcccc

SEQ ID NO: 10517 - DNA, 20 bp, synthetic construct
  source 1..20: mol_type = other DNA
gggccagctgtgggcacttg

SEQ ID NO: 10518 - DNA, 20 bp, synthetic construct
  source 1..20: mol_type = other DNA
agctggccccaggtaaggaa

SEQ ID NO: 10519 - DNA, 20 bp, synthetic construct
  source 1..20: mol_type = other DNA
tggagagtccggccccgagg

SEQ ID NO: 10520 - DNA, 20 bp, synthetic construct
  source 1..20: mol_type = other DNA
gagagaagaaaacagtggga

SEQ ID NO: 10521 - DNA, 20 bp, synthetic construct
  source 1..20: mol_type = other DNA
aaaagagagaagaaaacagt

SEQ ID NO: 10522 - DNA, 20 bp, synthetic construct
  source 1..20: mol_type = other DNA
tcggccccttcgccagtgtg

SEQ ID NO: 10523 - DNA, 20 bp, synthetic construct
  source 1..20: mol_type = other DNA
tacccgccgtgtctcagtag

SEQ ID NO: 10524 - DNA, 20 bp, synthetic construct
  source 1..20: mol_type = other DNA
ctccgctactgagacacggc

SEQ ID NO: 10525 - DNA, 20 bp, synthetic construct
  source 1..20: mol_type = other DNA
gctactgagacacggcgggt

SEQ ID NO: 10526 - DNA, 20 bp, synthetic construct
  source 1..20: mol_type = other DNA
gagctgtgagccggcgactc

SEQ ID NO: 10527 - DNA, 20 bp, synthetic construct
  source 1..20: mol_type = other DNA
gccggcgactcgggtccctg

SEQ ID NO: 10528 - DNA, 20 bp, synthetic construct
  source 1..20: mol_type = other DNA
cgttccccacactggcgaag

SEQ ID NO: 10529 - DNA, 20 bp, synthetic construct
  source 1..20: mol_type = other DNA
ctttctccgctactgagaca

SEQ ID NO: 10530 - DNA, 20 bp, synthetic construct
  source 1..20: mol_type = other DNA
gcgttccccacactggcgaa

SEQ ID NO: 10531 - DNA, 20 bp, synthetic construct
  source 1..20: mol_type = other DNA
cgccagtgtggggaacgcgg

SEQ ID NO: 10532 - DNA, 20 bp, synthetic construct
  source 1..20: mol_type = other DNA
ggagctgtgagccggcgact

SEQ ID NO: 10533 - DNA, 20 bp, synthetic construct
  source 1..20: mol_type = other DNA
aacgcggcggagctgtgagc

SEQ ID NO: 10534 - DNA, 20 bp, synthetic construct
  source 1..20: mol_type = other DNA
acctcagggacccgagtcgc

SEQ ID NO: 10535 - DNA, 20 bp, synthetic construct
  source 1..20: mol_type = other DNA
gagaaagaatccagacctca

SEQ ID NO: 10536 - DNA, 20 bp, synthetic construct
  source 1..20: mol_type = other DNA
ggagaaagaatccagacctc

SEQ ID NO: 10537 - DNA, 20 bp, synthetic construct
  source 1..20: mol_type = other DNA
agggtggcgctcgatggcac

SEQ ID NO: 10538 - DNA, 20 bp, synthetic construct
  source 1..20: mol_type = other DNA
catcgagcgccaccctgcac

SEQ ID NO: 10539 - DNA, 20 bp, synthetic construct
  source 1..20: mol_type = other DNA
acagcgaactgagctcggcg

SEQ ID NO: 10540 - DNA, 20 bp, synthetic construct
  source 1..20: mol_type = other DNA
cgagcgccaccctgcaccgg

SEQ ID NO: 10541 - DNA, 20 bp, synthetic construct
  source 1..20: mol_type = other DNA
ctgagctcggcgtggtcggg

SEQ ID NO: 10542 - DNA, 20 bp, synthetic construct
  source 1..20: mol_type = other DNA
gctcagttcgctgtccgcgc

SEQ ID NO: 10543 - DNA, 20 bp, synthetic construct
  source 1..20: mol_type = other DNA
ggccctcacctgcccaggga

SEQ ID NO: 10544 - DNA, 20 bp, synthetic construct
  source 1..20: mol_type = other DNA
caccctgcaccggcggcagg

SEQ ID NO: 10545 - DNA, 20 bp, synthetic construct
  source 1..20: mol_type = other DNA
gctgctccggactctggcca

SEQ ID NO: 10546 - DNA, 20 bp, synthetic construct
  source 1..20: mol_type = other DNA
cccagcgcgccccctgccgc

SEQ ID NO: 10547 - DNA, 20 bp, synthetic construct
  source 1..20: mol_type = other DNA
cccctgccgccggtgcaggg

SEQ ID NO: 10548 - DNA, 20 bp, synthetic construct
  source 1..20: mol_type = other DNA
agccgtccctgggcaggtga

SEQ ID NO: 10549 - DNA, 20 bp, synthetic construct
  source 1..20: mol_type = other DNA
accccggcccgaccccgacc

SEQ ID NO: 10550 - DNA, 20 bp, synthetic construct
  source 1..20: mol_type = other DNA
gtccgcgccggctcccaccc

SEQ ID NO: 10551 - DNA, 20 bp, synthetic construct
  source 1..20: mol_type = other DNA
tgaccgggccgggtcggggt

SEQ ID NO: 10552 - DNA, 20 bp, synthetic construct
  source 1..20: mol_type = other DNA
cacagacccggcgcaaacgg

SEQ ID NO: 10553 - DNA, 20 bp, synthetic construct
  source 1..20: mol_type = other DNA
ccgtgcaatgattaacccgg

SEQ ID NO: 10554 - DNA, 20 bp, synthetic construct
  source 1..20: mol_type = other DNA
ttgcacggagaggctcagcg

SEQ ID NO: 10555 - DNA, 20 bp, synthetic construct
  source 1..20: mol_type = other DNA
ccgccgggttaatcattgca

SEQ ID NO: 10556 - DNA, 20 bp, synthetic construct
  source 1..20: mol_type = other DNA
cctgcgccacgccgcaccaa

SEQ ID NO: 10557 - DNA, 20 bp, synthetic construct
  source 1..20: mol_type = other DNA
cgtgcaatgattaacccggc

SEQ ID NO: 10558 - DNA, 20 bp, synthetic construct
  source 1..20: mol_type = other DNA
caatgattaacccggcgggg

SEQ ID NO: 10559 - DNA, 20 bp, synthetic construct
  source 1..20: mol_type = other DNA
gcgcgcggccagcacagacc

SEQ ID NO: 10560 - DNA, 20 bp, synthetic construct
  source 1..20: mol_type = other DNA
ccggcccggggcccttggtg

SEQ ID NO: 10561 - DNA, 20 bp, synthetic construct
  source 1..20: mol_type = other DNA
ccttggtgcggcgtggcgca

SEQ ID NO: 10562 - DNA, 20 bp, synthetic construct
  source 1..20: mol_type = other DNA
cgtttgcgccgggtctgtgc

SEQ ID NO: 10563 - DNA, 20 bp, synthetic construct
  source 1..20: mol_type = other DNA
agcgtggagcgccaggcgcg

SEQ ID NO: 10564 - DNA, 20 bp, synthetic construct
  source 1..20: mol_type = other DNA
ggccggcgcgggacccgaga

SEQ ID NO: 10565 - DNA, 20 bp, synthetic construct
  source 1..20: mol_type = other DNA
gtgcaatgattaacccggcg

SEQ ID NO: 10566 - DNA, 20 bp, synthetic construct
  source 1..20: mol_type = other DNA
gggttaatcattgcacggag

SEQ ID NO: 10567 - DNA, 20 bp, synthetic construct
  source 1..20: mol_type = other DNA
attatagctgcgactcatgg

SEQ ID NO: 10568 - DNA, 20 bp, synthetic construct
  source 1..20: mol_type = other DNA
ctctgagaagccggactacg

SEQ ID NO: 10569 - DNA, 20 bp, synthetic construct
  source 1..20: mol_type = other DNA
gaagccggactacgcggcag

SEQ ID NO: 10570 - DNA, 20 bp, synthetic construct
  source 1..20: mol_type = other DNA
tcgtgcccaacatgcaggta

SEQ ID NO: 10571 - DNA, 20 bp, synthetic construct
  source 1..20: mol_type = other DNA
cctgcgctttggttcttgga

SEQ ID NO: 10572 - DNA, 20 bp, synthetic construct
  source 1..20: mol_type = other DNA
gcggcagcggctcttcaaag

SEQ ID NO: 10573 - DNA, 20 bp, synthetic construct
  source 1..20: mol_type = other DNA
aaaactgtagcaaaaactcc

SEQ ID NO: 10574 - DNA, 20 bp, synthetic construct
  source 1..20: mol_type = other DNA
taaggcaggagagcaaatgg

SEQ ID NO: 10575 - DNA, 20 bp, synthetic construct
  source 1..20: mol_type = other DNA
aaggcaggagagcaaatggc

SEQ ID NO: 10576 - DNA, 20 bp, synthetic construct
  source 1..20: mol_type = other DNA
aggcaggagagcaaatggcg

SEQ ID NO: 10577 - DNA, 20 bp, synthetic construct
  source 1..20: mol_type = other DNA
gcggctcttcaaagcggagc

SEQ ID NO: 10578 - DNA, 20 bp, synthetic construct
  source 1..20: mol_type = other DNA
ccagagggcgcagtggacgc

SEQ ID NO: 10579 - DNA, 20 bp, synthetic construct
  source 1..20: mol_type = other DNA
gggaggtccagagggcgcag

SEQ ID NO: 10580 - DNA, 20 bp, synthetic construct
  source 1..20: mol_type = other DNA
ggccggggacggagcacgga

SEQ ID NO: 10581 - DNA, 20 bp, synthetic construct
  source 1..20: mol_type = other DNA
aaggcggtgctctgagaagc

SEQ ID NO: 10582 - DNA, 20 bp, synthetic construct
  source 1..20: mol_type = other DNA
agcgcagctcgcgtcgaccc

SEQ ID NO: 10583 - DNA, 20 bp, synthetic construct
  source 1..20: mol_type = other DNA
gtctagcgcaggctcacctg

SEQ ID NO: 10584 - DNA, 20 bp, synthetic construct
  source 1..20: mol_type = other DNA
tgagcgactgcaggcaaacc

SEQ ID NO: 10585 - DNA, 20 bp, synthetic construct
  source 1..20: mol_type = other DNA
gggttaaggtgagcgactgc

SEQ ID NO: 10586 - DNA, 20 bp, synthetic construct
  source 1..20: mol_type = other DNA
gagaccccgcagaagagcct

SEQ ID NO: 10587 - DNA, 20 bp, synthetic construct
  source 1..20: mol_type = other DNA
ctagcgcaggctcacctgag

SEQ ID NO: 10588 - DNA, 20 bp, synthetic construct
  source 1..20: mol_type = other DNA
tagcgcaggctcacctgagg

SEQ ID NO: 10589 - DNA, 20 bp, synthetic construct
  source 1..20: mol_type = other DNA
agaccccgcagaagagcctg

SEQ ID NO: 10590 - DNA, 20 bp, synthetic construct
  source 1..20: mol_type = other DNA
aggggacgggggtctagcgc

SEQ ID NO: 10591 - DNA, 20 bp, synthetic construct
  source 1..20: mol_type = other DNA
tctagcgcaggctcacctga

SEQ ID NO: 10592 - DNA, 20 bp, synthetic construct
  source 1..20: mol_type = other DNA
gaccccgcagaagagcctgg

SEQ ID NO: 10593 - DNA, 20 bp, synthetic construct
  source 1..20: mol_type = other DNA
gcattcgggcgggcgcagga

SEQ ID NO: 10594 - DNA, 20 bp, synthetic construct
  source 1..20: mol_type = other DNA
gggggcaggcagaggagcca

SEQ ID NO: 10595 - DNA, 20 bp, synthetic construct
  source 1..20: mol_type = other DNA
attcgggcgggcgcaggaag

SEQ ID NO: 10596 - DNA, 20 bp, synthetic construct
  source 1..20: mol_type = other DNA
gggcgggcgcaggaagggga

SEQ ID NO: 10597 - DNA, 20 bp, synthetic construct
  source 1..20: mol_type = other DNA
gagtctgggtatggcatgag

SEQ ID NO: 10598 - DNA, 20 bp, synthetic construct
  source 1..20: mol_type = other DNA
ggagtctgggtatggcatga

SEQ ID NO: 10599 - DNA, 20 bp, synthetic construct
  source 1..20: mol_type = other DNA
atgccatacccagactccca

SEQ ID NO: 10600 - DNA, 20 bp, synthetic construct
  source 1..20: mol_type = other DNA
gggagtctgggtatggcatg

SEQ ID NO: 10601 - DNA, 20 bp, synthetic construct
  source 1..20: mol_type = other DNA
ggctgcagacagagaaggtg

SEQ ID NO: 10602 - DNA, 20 bp, synthetic construct
  source 1..20: mol_type = other DNA
gaggggtctgaggctcaggg

SEQ ID NO: 10603 - DNA, 20 bp, synthetic construct
  source 1..20: mol_type = other DNA
cagacagagaaggtgaggag

SEQ ID NO: 10604 - DNA, 20 bp, synthetic construct
  source 1..20: mol_type = other DNA
agagaggctgcagacagaga

SEQ ID NO: 10605 - DNA, 20 bp, synthetic construct
  source 1..20: mol_type = other DNA
ggtatggcatgaggggtctg

SEQ ID NO: 10606 - DNA, 20 bp, synthetic construct
  source 1..20: mol_type = other DNA
catgccatacccagactccc

SEQ ID NO: 10607 - DNA, 20 bp, synthetic construct
  source 1..20: mol_type = other DNA
aggggtctgaggctcaggga

SEQ ID NO: 10608 - DNA, 20 bp, synthetic construct
  source 1..20: mol_type = other DNA
gcagacagagaaggtgagga

SEQ ID NO: 10609 - DNA, 20 bp, synthetic construct
  source 1..20: mol_type = other DNA
agacagagaaggtgaggagg

SEQ ID NO: 10610 - DNA, 20 bp, synthetic construct
  source 1..20: mol_type = other DNA
catgaggggtctgaggctca

SEQ ID NO: 10611 - DNA, 20 bp, synthetic construct
  source 1..20: mol_type = other DNA
ggggtctgaggctcagggag

SEQ ID NO: 10612 - DNA, 20 bp, synthetic construct
  source 1..20: mol_type = other DNA
tgaaccaaaggcagtcatgg

SEQ ID NO: 10613 - DNA, 20 bp, synthetic construct
  source 1..20: mol_type = other DNA
ggcagaggcaggcctgctcg

SEQ ID NO: 10614 - DNA, 20 bp, synthetic construct
  source 1..20: mol_type = other DNA
gaacctgccggaccaccgcg

SEQ ID NO: 10615 - DNA, 20 bp, synthetic construct
  source 1..20: mol_type = other DNA
cagaggcaggcctgctcggg

SEQ ID NO: 10616 - DNA, 20 bp, synthetic construct
  source 1..20: mol_type = other DNA
acctgccggaccaccgcgcg

SEQ ID NO: 10617 - DNA, 20 bp, synthetic construct
  source 1..20: mol_type = other DNA
gcagaggcaggcctgctcgg

SEQ ID NO: 10618 - DNA, 20 bp, synthetic construct
  source 1..20: mol_type = other DNA
aaaaacagtccgcgacagct

SEQ ID NO: 10619 - DNA, 20 bp, synthetic construct
  source 1..20: mol_type = other DNA
ggccagagcagccctgcggg

SEQ ID NO: 10620 - DNA, 20 bp, synthetic construct
  source 1..20: mol_type = other DNA
tcccggccagagcagccctg

SEQ ID NO: 10621 - DNA, 20 bp, synthetic construct
  source 1..20: mol_type = other DNA
cgtgagaccggccgcccgca

SEQ ID NO: 10622 - DNA, 20 bp, synthetic construct
  source 1..20: mol_type = other DNA
tggccgccgtcgtccccgcg

SEQ ID NO: 10623 - DNA, 20 bp, synthetic construct
  source 1..20: mol_type = other DNA
acccccagcccgcagcccaa

SEQ ID NO: 10624 - DNA, 20 bp, synthetic construct
  source 1..20: mol_type = other DNA
aacctgccggaccaccgcgc

SEQ ID NO: 10625 - DNA, 20 bp, synthetic construct
  source 1..20: mol_type = other DNA
gcgtgagaccggccgcccgc

SEQ ID NO: 10626 - DNA, 20 bp, synthetic construct
  source 1..20: mol_type = other DNA
ccgccgtcgtccccgcgcgg

SEQ ID NO: 10627 - DNA, 20 bp, synthetic construct
  source 1..20: mol_type = other DNA
ggccagcgcgtgcatatagg

SEQ ID NO: 10628 - DNA, 20 bp, synthetic construct
  source 1..20: mol_type = other DNA
gaccccctatatgcacgcgc

SEQ ID NO: 10629 - DNA, 20 bp, synthetic construct
  source 1..20: mol_type = other DNA
gtctcccagcgctccatcac

SEQ ID NO: 10630 - DNA, 20 bp, synthetic construct
  source 1..20: mol_type = other DNA
ggggctacctttggaggagg

SEQ ID NO: 10631 - DNA, 20 bp, synthetic construct
  source 1..20: mol_type = other DNA
gctccatcaccggcttgccc

SEQ ID NO: 10632 - DNA, 20 bp, synthetic construct
  source 1..20: mol_type = other DNA
gcaagccggtgatggagcgc

SEQ ID NO: 10633 - DNA, 20 bp, synthetic construct
  source 1..20: mol_type = other DNA
gcccgggcggcgcgcgatcg

SEQ ID NO: 10634 - DNA, 20 bp, synthetic construct
  source 1..20: mol_type = other DNA
catcctgggcaagccggtga

SEQ ID NO: 10635 - DNA, 20 bp, synthetic construct
  source 1..20: mol_type = other DNA
cgaagatgggggtcgcgctg

SEQ ID NO: 10636 - DNA, 20 bp, synthetic construct
  source 1..20: mol_type = other DNA
gcgacccccatcttcgcgcc

SEQ ID NO: 10637 - DNA, 20 bp, synthetic construct
  source 1..20: mol_type = other DNA
ggggcgctcatgctgcaggc

SEQ ID NO: 10638 - DNA, 20 bp, synthetic construct
  source 1..20: mol_type = other DNA
cccgggcccgctccctgcag

SEQ ID NO: 10639 - DNA, 20 bp, synthetic construct
  source 1..20: mol_type = other DNA
ctgcagggagcgggcccggg

SEQ ID NO: 10640 - DNA, 20 bp, synthetic construct
  source 1..20: mol_type = other DNA
ctcgccgggcgcgaagatgg

SEQ ID NO: 10641 - DNA, 20 bp, synthetic construct
  source 1..20: mol_type = other DNA
ccggcccacaagcccctgca

SEQ ID NO: 10642 - DNA, 20 bp, synthetic construct
  source 1..20: mol_type = other DNA
gcaacaactcacacccgccg

SEQ ID NO: 10643 - DNA, 20 bp, synthetic construct
  source 1..20: mol_type = other DNA
ttatctcgagactagacgga

SEQ ID NO: 10644 - DNA, 20 bp, synthetic construct
  source 1..20: mol_type = other DNA
gacggaaggaaacgtatcag

SEQ ID NO: 10645 - DNA, 20 bp, synthetic construct
  source 1..20: mol_type = other DNA
ggaaggaaacgtatcagggg

SEQ ID NO: 10646 - DNA, 20 bp, synthetic construct
  source 1..20: mol_type = other DNA
agggttatctcgagactaga

SEQ ID NO: 10647 - DNA, 20 bp, synthetic construct
  source 1..20: mol_type = other DNA
ccgcaacaactcacacccgc

SEQ ID NO: 10648 - DNA, 20 bp, synthetic construct
  source 1..20: mol_type = other DNA
gaggccagaaggaaggagtt

SEQ ID NO: 10649 - DNA, 20 bp, synthetic construct
  source 1..20: mol_type = other DNA
ccggcgggtgtgagttgttg

SEQ ID NO: 10650 - DNA, 20 bp, synthetic construct
  source 1..20: mol_type = other DNA
ggcgggtgtgagttgttgcg

SEQ ID NO: 10651 - DNA, 20 bp, synthetic construct
  source 1..20: mol_type = other DNA
gaaggaaacgtatcagggga

SEQ ID NO: 10652 - DNA, 20 bp, synthetic construct
  source 1..20: mol_type = other DNA
tccttctggagtttccccgg

SEQ ID NO: 10653 - DNA, 20 bp, synthetic construct
  source 1..20: mol_type = other DNA
gtgagttgttgcggggtctg

SEQ ID NO: 10654 - DNA, 20 bp, synthetic construct
  source 1..20: mol_type = other DNA
tgagttgttgcggggtctgg

SEQ ID NO: 10655 - DNA, 20 bp, synthetic construct
  source 1..20: mol_type = other DNA
ggggaaactccagaaggaaa

SEQ ID NO: 10656 - DNA, 20 bp, synthetic construct
  source 1..20: mol_type = other DNA
cggggtctgggggagctggg

SEQ ID NO: 10657 - DNA, 20 bp, synthetic construct
  source 1..20: mol_type = other DNA
tggatcctccctacaatcag

SEQ ID NO: 10658 - DNA, 20 bp, synthetic construct
  source 1..20: mol_type = other DNA
actggatcctccctacaatc

SEQ ID NO: 10659 - DNA, 20 bp, synthetic construct
  source 1..20: mol_type = other DNA
ctggatcctccctacaatca

SEQ ID NO: 10660 - DNA, 20 bp, synthetic construct
  source 1..20: mol_type = other DNA
gagctcacctgcgctgcagt

SEQ ID NO: 10661 - DNA, 20 bp, synthetic construct
  source 1..20: mol_type = other DNA
gagctgacagagaggtcctc

SEQ ID NO: 10662 - DNA, 20 bp, synthetic construct
  source 1..20: mol_type = other DNA
agcgcaggtgagctctcctg

SEQ ID NO: 10663 - DNA, 20 bp, synthetic construct
  source 1..20: mol_type = other DNA
gtcagttcccactgcagcgc

SEQ ID NO: 10664 - DNA, 20 bp, synthetic construct
  source 1..20: mol_type = other DNA
cagctcccctgattgtaggg

SEQ ID NO: 10665 - DNA, 20 bp, synthetic construct
  source 1..20: mol_type = other DNA
attgtagggaggatccagtg

SEQ ID NO: 10666 - DNA, 20 bp, synthetic construct
  source 1..20: mol_type = other DNA
ctctgagtagtgcaggatgg

SEQ ID NO: 10667 - DNA, 20 bp, synthetic construct
  source 1..20: mol_type = other DNA
gagtagaagctgtctttgga

SEQ ID NO: 10668 - DNA, 20 bp, synthetic construct
  source 1..20: mol_type = other DNA
agagctcacctgcgctgcag

SEQ ID NO: 10669 - DNA, 20 bp, synthetic construct
  source 1..20: mol_type = other DNA
actactcagagcagcagccc

SEQ ID NO: 10670 - DNA, 20 bp, synthetic construct
  source 1..20: mol_type = other DNA
aatcaggggagctgacagag

SEQ ID NO: 10671 - DNA, 20 bp, synthetic construct
  source 1..20: mol_type = other DNA
tgagctgcttgctgggctgg

SEQ ID NO: 10672 - DNA, 20 bp, synthetic construct
  source 1..20: mol_type = other DNA
agccgagttacccgacatcg

SEQ ID NO: 10673 - DNA, 20 bp, synthetic construct
  source 1..20: mol_type = other DNA
gctcctgctgaccacgatgt

SEQ ID NO: 10674 - DNA, 20 bp, synthetic construct
  source 1..20: mol_type = other DNA
agaggacgcgagccacgctg

SEQ ID NO: 10675 - DNA, 20 bp, synthetic construct
  source 1..20: mol_type = other DNA
cacccggattgaaatgcccc

SEQ ID NO: 10676 - DNA, 20 bp, synthetic construct
  source 1..20: mol_type = other DNA
cactcagcgcctgtcccgga

SEQ ID NO: 10677 - DNA, 20 bp, synthetic construct
  source 1..20: mol_type = other DNA
gcttctcctagggtcgggtc

SEQ ID NO: 10678 - DNA, 20 bp, synthetic construct
  source 1..20: mol_type = other DNA
tcggctgcttctcctagggt

SEQ ID NO: 10679 - DNA, 20 bp, synthetic construct
  source 1..20: mol_type = other DNA
acatcgtggtcagcaggagc

SEQ ID NO: 10680 - DNA, 20 bp, synthetic construct
  source 1..20: mol_type = other DNA
gtggtcagcaggagctgggt

SEQ ID NO: 10681 - DNA, 20 bp, synthetic construct
  source 1..20: mol_type = other DNA
taactcggctgcttctccta

SEQ ID NO: 10682 - DNA, 20 bp, synthetic construct
  source 1..20: mol_type = other DNA
ggcccgcctgacccgaccct

SEQ ID NO: 10683 - DNA, 20 bp, synthetic construct
  source 1..20: mol_type = other DNA
gtcagcaggagctgggtcgg

SEQ ID NO: 10684 - DNA, 20 bp, synthetic construct
  source 1..20: mol_type = other DNA
cggctgcttctcctagggtc

SEQ ID NO: 10685 - DNA, 20 bp, synthetic construct
  source 1..20: mol_type = other DNA
catcgtggtcagcaggagct

SEQ ID NO: 10686 - DNA, 20 bp, synthetic construct
  source 1..20: mol_type = other DNA
ggtcgggtcaggcgggccag

SEQ ID NO: 10687 - DNA, 20 bp, synthetic construct
  source 1..20: mol_type = other DNA
ccggttcgaggtggctgacg

SEQ ID NO: 10688 - DNA, 20 bp, synthetic construct
  source 1..20: mol_type = other DNA
gcatcatcaatgctgaactg

SEQ ID NO: 10689 - DNA, 20 bp, synthetic construct
  source 1..20: mol_type = other DNA
gcgtcgggcccggttcgagg

SEQ ID NO: 10690 - DNA, 20 bp, synthetic construct
  source 1..20: mol_type = other DNA
ctcgtcagccacctcgaacc

SEQ ID NO: 10691 - DNA, 20 bp, synthetic construct
  source 1..20: mol_type = other DNA
ctgacgaggacaagcagtcc

SEQ ID NO: 10692 - DNA, 20 bp, synthetic construct
  source 1..20: mol_type = other DNA
gggtgtgtgggcgcagatgg

SEQ ID NO: 10693 - DNA, 20 bp, synthetic construct
  source 1..20: mol_type = other DNA
ggtgggccgggcggttcacc

SEQ ID NO: 10694 - DNA, 20 bp, synthetic construct
  source 1..20: mol_type = other DNA
agcggcgacgctgggtgtgt

SEQ ID NO: 10695 - DNA, 20 bp, synthetic construct
  source 1..20: mol_type = other DNA
gcgctaccaggtgaaccgcc

SEQ ID NO: 10696 - DNA, 20 bp, synthetic construct
  source 1..20: mol_type = other DNA
ggttcacctggtagcgcagc

SEQ ID NO: 10697 - DNA, 20 bp, synthetic construct
  source 1..20: mol_type = other DNA
gctgggtgtgtgggcgcaga

SEQ ID NO: 10698 - DNA, 20 bp, synthetic construct
  source 1..20: mol_type = other DNA
cagcggcgacgctgggtgtg

SEQ ID NO: 10699 - DNA, 20 bp, synthetic construct
  source 1..20: mol_type = other DNA
tgtgtgggcgcagatggcgg

SEQ ID NO: 10700 - DNA, 20 bp, synthetic construct
  source 1..20: mol_type = other DNA
ctcatggccccggcccgctc

SEQ ID NO: 10701 - DNA, 20 bp, synthetic construct
  source 1..20: mol_type = other DNA
aatgctgaactggggccggg

SEQ ID NO: 10702 - DNA, 20 bp, synthetic construct
  source 1..20: mol_type = other DNA
ggtgtccggagtgctagcca

SEQ ID NO: 10703 - DNA, 20 bp, synthetic construct
  source 1..20: mol_type = other DNA
cccgggagaccactatgcct

SEQ ID NO: 10704 - DNA, 20 bp, synthetic construct
  source 1..20: mol_type = other DNA
cggacacccacctcctcgca

SEQ ID NO: 10705 - DNA, 20 bp, synthetic construct
  source 1..20: mol_type = other DNA
tccggagtgctagccagggt

SEQ ID NO: 10706 - DNA, 20 bp, synthetic construct
  source 1..20: mol_type = other DNA
gggcctggaacacggagcag

SEQ ID NO: 10707 - DNA, 20 bp, synthetic construct
  source 1..20: mol_type = other DNA
gcagtggctgccctgcgagg

SEQ ID NO: 10708 - DNA, 20 bp, synthetic construct
  source 1..20: mol_type = other DNA
gtccggagtgctagccaggg

SEQ ID NO: 10709 - DNA, 20 bp, synthetic construct
  source 1..20: mol_type = other DNA
ccgtgttccaggcccagcag

SEQ ID NO: 10710 - DNA, 20 bp, synthetic construct
  source 1..20: mol_type = other DNA
ccaggcccagcagtggactg

SEQ ID NO: 10711 - DNA, 20 bp, synthetic construct
  source 1..20: mol_type = other DNA
tggctgccctgcgaggaggt

SEQ ID NO: 10712 - DNA, 20 bp, synthetic construct
  source 1..20: mol_type = other DNA
ccggagtgctagccagggtg

SEQ ID NO: 10713 - DNA, 20 bp, synthetic construct
  source 1..20: mol_type = other DNA
ggagcagtggctgccctgcg

SEQ ID NO: 10714 - DNA, 20 bp, synthetic construct
  source 1..20: mol_type = other DNA
gtggctgccctgcgaggagg

SEQ ID NO: 10715 - DNA, 20 bp, synthetic construct
  source 1..20: mol_type = other DNA
ccactgctgggcctggaaca

SEQ ID NO: 10716 - DNA, 20 bp, synthetic construct
  source 1..20: mol_type = other DNA
gccagggtggggctgggcta

SEQ ID NO: 10717 - DNA, 20 bp, synthetic construct
  source 1..20: mol_type = other DNA
ctagacgcgccgcgcaccga

SEQ ID NO: 10718 - DNA, 20 bp, synthetic construct
  source 1..20: mol_type = other DNA
gacgcgccgcgcaccgacgg

SEQ ID NO: 10719 - DNA, 20 bp, synthetic construct
  source 1..20: mol_type = other DNA
tctgcccatgtcccctccgt

SEQ ID NO: 10720 - DNA, 20 bp, synthetic construct
  source 1..20: mol_type = other DNA
cgcaccgacggaggggacat

SEQ ID NO: 10721 - DNA, 20 bp, synthetic construct
  source 1..20: mol_type = other DNA
acgcgccgcgcaccgacgga

SEQ ID NO: 10722 - DNA, 20 bp, synthetic construct
  source 1..20: mol_type = other DNA
atgtcccctccgtcggtgcg

SEQ ID NO: 10723 - DNA, 20 bp, synthetic construct
  source 1..20: mol_type = other DNA
cgcgccgcgcaccgacggag

SEQ ID NO: 10724 - DNA, 20 bp, synthetic construct
  source 1..20: mol_type = other DNA
gcgcaccgacggaggggaca

SEQ ID NO: 10725 - DNA, 20 bp, synthetic construct
  source 1..20: mol_type = other DNA
ggacatgggcagagcaatgg

SEQ ID NO: 10726 - DNA, 20 bp, synthetic construct
  source 1..20: mol_type = other DNA
aggggacatgggcagagcaa

SEQ ID NO: 10727 - DNA, 20 bp, synthetic construct
  source 1..20: mol_type = other DNA
gggcgggcgcaggcaaggtg

SEQ ID NO: 10728 - DNA, 20 bp, synthetic construct
  source 1..20: mol_type = other DNA
ggagaaccgctggctccggg

SEQ ID NO: 10729 - DNA, 20 bp, synthetic construct
  source 1..20: mol_type = other DNA
gcttggagaaccgctggctc

SEQ ID NO: 10730 - DNA, 20 bp, synthetic construct
  source 1..20: mol_type = other DNA
cttggagaaccgctggctcc

SEQ ID NO: 10731 - DNA, 20 bp, synthetic construct
  source 1..20: mol_type = other DNA
ggcgcgtctagcaggatgct

SEQ ID NO: 10732 - DNA, 20 bp, synthetic construct
  source 1..20: mol_type = other DNA
catctccacaggcaccagag

SEQ ID NO: 10733 - DNA, 20 bp, synthetic construct
  source 1..20: mol_type = other DNA
actgacaaaccatcatagca

SEQ ID NO: 10734 - DNA, 20 bp, synthetic construct
  source 1..20: mol_type = other DNA
agagctctagggcactctgg

SEQ ID NO: 10735 - DNA, 20 bp, synthetic construct
  source 1..20: mol_type = other DNA
tgtggagatgcctaactgac

SEQ ID NO: 10736 - DNA, 20 bp, synthetic construct
  source 1..20: mol_type = other DNA
tgtcagttaggcatctccac

SEQ ID NO: 10737 - DNA, 20 bp, synthetic construct
  source 1..20: mol_type = other DNA
aagagctctagggcactctg

SEQ ID NO: 10738 - DNA, 20 bp, synthetic construct
  source 1..20: mol_type = other DNA
acaaaccatcatagcaggga

SEQ ID NO: 10739 - DNA, 20 bp, synthetic construct
  source 1..20: mol_type = other DNA
accatcatagcagggaaggg

SEQ ID NO: 10740 - DNA, 20 bp, synthetic construct
  source 1..20: mol_type = other DNA
accccccttccctgctatga

SEQ ID NO: 10741 - DNA, 20 bp, synthetic construct
  source 1..20: mol_type = other DNA
aaccatcatagcagggaagg

SEQ ID NO: 10742 - DNA, 20 bp, synthetic construct
  source 1..20: mol_type = other DNA
aaaccatcatagcagggaag

SEQ ID NO: 10743 - DNA, 20 bp, synthetic construct
  source 1..20: mol_type = other DNA
ccagagtcctgcagcagaga

SEQ ID NO: 10744 - DNA, 20 bp, synthetic construct
  source 1..20: mol_type = other DNA
gctgccctctctggtgcctg

SEQ ID NO: 10745 - DNA, 20 bp, synthetic construct
  source 1..20: mol_type = other DNA
caggcaccagagagggcagc

SEQ ID NO: 10746 - DNA, 20 bp, synthetic construct
  source 1..20: mol_type = other DNA
atctccacaggcaccagaga

SEQ ID NO: 10747 - DNA, 20 bp, synthetic construct
  source 1..20: mol_type = other DNA
ggccccggagatcctcgcgt

SEQ ID NO: 10748 - DNA, 20 bp, synthetic construct
  source 1..20: mol_type = other DNA
gcggcgccggaacttgggcg

SEQ ID NO: 10749 - DNA, 20 bp, synthetic construct
  source 1..20: mol_type = other DNA
ccccggagatcctcgcgtag

SEQ ID NO: 10750 - DNA, 20 bp, synthetic construct
  source 1..20: mol_type = other DNA
gcggaacgctcccgcaagag

SEQ ID NO: 10751 - DNA, 20 bp, synthetic construct
  source 1..20: mol_type = other DNA
gagcgttccgcatcgccccg

SEQ ID NO: 10752 - DNA, 20 bp, synthetic construct
  source 1..20: mol_type = other DNA
gccccggagatcctcgcgta

SEQ ID NO: 10753 - DNA, 20 bp, synthetic construct
  source 1..20: mol_type = other DNA
aagacgagctttcgcagaca

SEQ ID NO: 10754 - DNA, 20 bp, synthetic construct
  source 1..20: mol_type = other DNA
tcctcgcgtaggggcccccg

SEQ ID NO: 10755 - DNA, 20 bp, synthetic construct
  source 1..20: mol_type = other DNA
caagagcggcgccggaactt

SEQ ID NO: 10756 - DNA, 20 bp, synthetic construct
  source 1..20: mol_type = other DNA
gagcggcgccggaacttggg

SEQ ID NO: 10757 - DNA, 20 bp, synthetic construct
  source 1..20: mol_type = other DNA
agcgttccgcatcgccccgg

SEQ ID NO: 10758 - DNA, 20 bp, synthetic construct
  source 1..20: mol_type = other DNA
gccccgggggcccctacgcg

SEQ ID NO: 10759 - DNA, 20 bp, synthetic construct
  source 1..20: mol_type = other DNA
taggggcccccggggcgatg

SEQ ID NO: 10760 - DNA, 20 bp, synthetic construct
  source 1..20: mol_type = other DNA
ctttcgcagacagggccggg

SEQ ID NO: 10761 - DNA, 20 bp, synthetic construct
  source 1..20: mol_type = other DNA
gcgccggaacttgggcgggg

SEQ ID NO: 10762 - DNA, 20 bp, synthetic construct
  source 1..20: mol_type = other DNA
accccagactcacaactcag

SEQ ID NO: 10763 - DNA, 20 bp, synthetic construct
  source 1..20: mol_type = other DNA
agaccccagactcacaactc

SEQ ID NO: 10764 - DNA, 20 bp, synthetic construct
  source 1..20: mol_type = other DNA
acggaaaagagcgaaagcga

SEQ ID NO: 10765 - DNA, 20 bp, synthetic construct
  source 1..20: mol_type = other DNA
gaccccagactcacaactca

SEQ ID NO: 10766 - DNA, 20 bp, synthetic construct
  source 1..20: mol_type = other DNA
cagactcacaactcaggggt

SEQ ID NO: 10767 - DNA, 20 bp, synthetic construct
  source 1..20: mol_type = other DNA
cgaaagcgaagggataaggg

SEQ ID NO: 10768 - DNA, 20 bp, synthetic construct
  source 1..20: mol_type = other DNA
agagcgaaagcgaagggata

SEQ ID NO: 10769 - DNA, 20 bp, synthetic construct
  source 1..20: mol_type = other DNA
gagcgaaagcgaagggataa

SEQ ID NO: 10770 - DNA, 20 bp, synthetic construct
  source 1..20: mol_type = other DNA
ggagggggtcgggcgagggt

SEQ ID NO: 10771 - DNA, 20 bp, synthetic construct
  source 1..20: mol_type = other DNA
cggaaaagagcgaaagcgaa

SEQ ID NO: 10772 - DNA, 20 bp, synthetic construct
  source 1..20: mol_type = other DNA
aggggaggaagcgtgaaaga

SEQ ID NO: 10773 - DNA, 20 bp, synthetic construct
  source 1..20: mol_type = other DNA
ggaagcgtgaaagagggaag

SEQ ID NO: 10774 - DNA, 20 bp, synthetic construct
  source 1..20: mol_type = other DNA
gcgaagggataagggaggag

SEQ ID NO: 10775 - DNA, 20 bp, synthetic construct
  source 1..20: mol_type = other DNA
gaggaagcgtgaaagaggga

SEQ ID NO: 10776 - DNA, 20 bp, synthetic construct
  source 1..20: mol_type = other DNA
gaggggaggaagcgtgaaag

SEQ ID NO: 10777 - DNA, 20 bp, synthetic construct
  source 1..20: mol_type = other DNA
ggtgaaggaaggctgacagt

SEQ ID NO: 10778 - DNA, 20 bp, synthetic construct
  source 1..20: mol_type = other DNA
gaactatgagtctagtgccc

SEQ ID NO: 10779 - DNA, 20 bp, synthetic construct
  source 1..20: mol_type = other DNA
aaggaaggctgacagtgggt

SEQ ID NO: 10780 - DNA, 20 bp, synthetic construct
  source 1..20: mol_type = other DNA
tcctctccagccccgaccca

SEQ ID NO: 10781 - DNA, 20 bp, synthetic construct
  source 1..20: mol_type = other DNA
ggttgaacaagcaggtaaga

SEQ ID NO: 10782 - DNA, 20 bp, synthetic construct
  source 1..20: mol_type = other DNA
aaggctgacagtgggtaggt

SEQ ID NO: 10783 - DNA, 20 bp, synthetic construct
  source 1..20: mol_type = other DNA
gcccaagatgattccagcag

SEQ ID NO: 10784 - DNA, 20 bp, synthetic construct
  source 1..20: mol_type = other DNA
acagtgggtaggtgggcata

SEQ ID NO: 10785 - DNA, 20 bp, synthetic construct
  source 1..20: mol_type = other DNA
gtgggcatagggagaccctg

SEQ ID NO: 10786 - DNA, 20 bp, synthetic construct
  source 1..20: mol_type = other DNA
gagtctagtgccctgggtcg

SEQ ID NO: 10787 - DNA, 20 bp, synthetic construct
  source 1..20: mol_type = other DNA
gctgcacagtgctgtcagaa

SEQ ID NO: 10788 - DNA, 20 bp, synthetic construct
  source 1..20: mol_type = other DNA
agtaagagcaagaccactgc

SEQ ID NO: 10789 - DNA, 20 bp, synthetic construct
  source 1..20: mol_type = other DNA
gcaggtaagagggtttggtg

SEQ ID NO: 10790 - DNA, 20 bp, synthetic construct
  source 1..20: mol_type = other DNA
caggtaagagggtttggtga

SEQ ID NO: 10791 - DNA, 20 bp, synthetic construct
  source 1..20: mol_type = other DNA
tggttgaacaagcaggtaag

SEQ ID NO: 10792 - DNA, 20 bp, synthetic construct
  source 1..20: mol_type = other DNA
tcagcccagcagtggaatcc

SEQ ID NO: 10793 - DNA, 20 bp, synthetic construct
  source 1..20: mol_type = other DNA
gagtcactgtctctagttag

SEQ ID NO: 10794 - DNA, 20 bp, synthetic construct
  source 1..20: mol_type = other DNA
ggaatccaggagcccagagg

SEQ ID NO: 10795 - DNA, 20 bp, synthetic construct
  source 1..20: mol_type = other DNA
tggccgggtaagaggcctgg

SEQ ID NO: 10796 - DNA, 20 bp, synthetic construct
  source 1..20: mol_type = other DNA
gcctcttacccggccacctc

SEQ ID NO: 10797 - DNA, 20 bp, synthetic construct
  source 1..20: mol_type = other DNA
ggctcctggattccactgct

SEQ ID NO: 10798 - DNA, 20 bp, synthetic construct
  source 1..20: mol_type = other DNA
ggaccaccaggcctcttacc

SEQ ID NO: 10799 - DNA, 20 bp, synthetic construct
  source 1..20: mol_type = other DNA
agtggaatccaggagcccag

SEQ ID NO: 10800 - DNA, 20 bp, synthetic construct
  source 1..20: mol_type = other DNA
agttggatcatgaacactgc

SEQ ID NO: 10801 - DNA, 20 bp, synthetic construct
  source 1..20: mol_type = other DNA
aggtggccgggtaagaggcc

SEQ ID NO: 10802 - DNA, 20 bp, synthetic construct
  source 1..20: mol_type = other DNA
tccaggagcccagaggtggc

SEQ ID NO: 10803 - DNA, 20 bp, synthetic construct
  source 1..20: mol_type = other DNA
ccaggagcccagaggtggcc

SEQ ID NO: 10804 - DNA, 20 bp, synthetic construct
  source 1..20: mol_type = other DNA
gctggagctcagcccagcag

SEQ ID NO: 10805 - DNA, 20 bp, synthetic construct
  source 1..20: mol_type = other DNA
cccagaggtggccgggtaag

SEQ ID NO: 10806 - DNA, 20 bp, synthetic construct
  source 1..20: mol_type = other DNA
gggctcctggattccactgc

SEQ ID NO: 10807 - DNA, 20 bp, synthetic construct
  source 1..20: mol_type = other DNA
gcgcggcgtgggtagagccg

SEQ ID NO: 10808 - DNA, 20 bp, synthetic construct
  source 1..20: mol_type = other DNA
gaaaagcgggcgagagacaa

SEQ ID NO: 10809 - DNA, 20 bp, synthetic construct
  source 1..20: mol_type = other DNA
gggcgagagacaaaggcagc

SEQ ID NO: 10810 - DNA, 20 bp, synthetic construct
  source 1..20: mol_type = other DNA
cggcgtgggtagagccgagg

SEQ ID NO: 10811 - DNA, 20 bp, synthetic construct
  source 1..20: mol_type = other DNA
cgcctcgctctcgctcccgg

SEQ ID NO: 10812 - DNA, 20 bp, synthetic construct
  source 1..20: mol_type = other DNA
ggcctccgggagcgagagcg

SEQ ID NO: 10813 - DNA, 20 bp, synthetic construct
  source 1..20: mol_type = other DNA
gctctacccacgccgcgccc

SEQ ID NO: 10814 - DNA, 20 bp, synthetic construct
  source 1..20: mol_type = other DNA
acggcgctcacatcccgggc

SEQ ID NO: 10815 - DNA, 20 bp, synthetic construct
  source 1..20: mol_type = other DNA
cgtgggtagagccgaggcgg

SEQ ID NO: 10816 - DNA, 20 bp, synthetic construct
  source 1..20: mol_type = other DNA
gcccgtgcgcccggcccccg

SEQ ID NO: 10817 - DNA, 20 bp, synthetic construct
  source 1..20: mol_type = other DNA
ctgccgccgccgctgctccg

SEQ ID NO: 10818 - DNA, 20 bp, synthetic construct
  source 1..20: mol_type = other DNA
gggtagagccgaggcggcgg

SEQ ID NO: 10819 - DNA, 20 bp, synthetic construct
  source 1..20: mol_type = other DNA
gccgctgctccgcgggccgg

SEQ ID NO: 10820 - DNA, 20 bp, synthetic construct
  source 1..20: mol_type = other DNA
tgccgccgccgctgctccgc

SEQ ID NO: 10821 - DNA, 20 bp, synthetic construct
  source 1..20: mol_type = other DNA
gcgcggcccgggcgcggcgt

SEQ ID NO: 10822 - DNA, 20 bp, synthetic construct
  source 1..20: mol_type = other DNA
ggagttagcacctccaagct

SEQ ID NO: 10823 - DNA, 20 bp, synthetic construct
  source 1..20: mol_type = other DNA
cttggaggtgctaactccag

SEQ ID NO: 10824 - DNA, 20 bp, synthetic construct
  source 1..20: mol_type = other DNA
ctgaagcagccactgcccag

SEQ ID NO: 10825 - DNA, 20 bp, synthetic construct
  source 1..20: mol_type = other DNA
gagtagctgagagccccacc

SEQ ID NO: 10826 - DNA, 20 bp, synthetic construct
  source 1..20: mol_type = other DNA
gagaggcactactgggctca

SEQ ID NO: 10827 - DNA, 20 bp, synthetic construct
  source 1..20: mol_type = other DNA
agtagctgagagccccacca

SEQ ID NO: 10828 - DNA, 20 bp, synthetic construct
  source 1..20: mol_type = other DNA
gtctcttctttgcaccccct

SEQ ID NO: 10829 - DNA, 20 bp, synthetic construct
  source 1..20: mol_type = other DNA
agagaggcactactgggctc

SEQ ID NO: 10830 - DNA, 20 bp, synthetic construct
  source 1..20: mol_type = other DNA
acctgaagcagccactgccc

SEQ ID NO: 10831 - DNA, 20 bp, synthetic construct
  source 1..20: mol_type = other DNA
tctttgcaccccctgggcag

SEQ ID NO: 10832 - DNA, 20 bp, synthetic construct
  source 1..20: mol_type = other DNA
tgggcagtggctgcttcagg

SEQ ID NO: 10833 - DNA, 20 bp, synthetic construct
  source 1..20: mol_type = other DNA
gacagcagcgcccagcttgg

SEQ ID NO: 10834 - DNA, 20 bp, synthetic construct
  source 1..20: mol_type = other DNA
tgaagcagccactgcccagg

SEQ ID NO: 10835 - DNA, 20 bp, synthetic construct
  source 1..20: mol_type = other DNA
agagacagcagcgcccagct

SEQ ID NO: 10836 - DNA, 20 bp, synthetic construct
  source 1..20: mol_type = other DNA
cctgaagcagccactgccca

SEQ ID NO: 10837 - DNA, 20 bp, synthetic construct
  source 1..20: mol_type = other DNA
gaacatggtgagtctcgaag

SEQ ID NO: 10838 - DNA, 20 bp, synthetic construct
  source 1..20: mol_type = other DNA
gagcccaggagaccagaaca

SEQ ID NO: 10839 - DNA, 20 bp, synthetic construct
  source 1..20: mol_type = other DNA
agaacatggtgagtctcgaa

SEQ ID NO: 10840 - DNA, 20 bp, synthetic construct
  source 1..20: mol_type = other DNA
tcccaggctctcacactcca

SEQ ID NO: 10841 - DNA, 20 bp, synthetic construct
  source 1..20: mol_type = other DNA
ggacccactggagcaaagat

SEQ ID NO: 10842 - DNA, 20 bp, synthetic construct
  source 1..20: mol_type = other DNA
ggagggaccttcgatcctcg

SEQ ID NO: 10843 - DNA, 20 bp, synthetic construct
  source 1..20: mol_type = other DNA
tcttgacaatcttattccca

SEQ ID NO: 10844 - DNA, 20 bp, synthetic construct
  source 1..20: mol_type = other DNA
cccactggagcaaagatggg

SEQ ID NO: 10845 - DNA, 20 bp, synthetic construct
  source 1..20: mol_type = other DNA
ctggtctcctgggctccccg

SEQ ID NO: 10846 - DNA, 20 bp, synthetic construct
  source 1..20: mol_type = other DNA
cagggctgggatgtggccat

SEQ ID NO: 10847 - DNA, 20 bp, synthetic construct
  source 1..20: mol_type = other DNA
tgggatgcaggagagaggga

SEQ ID NO: 10848 - DNA, 20 bp, synthetic construct
  source 1..20: mol_type = other DNA
ccactggagcaaagatggga

SEQ ID NO: 10849 - DNA, 20 bp, synthetic construct
  source 1..20: mol_type = other DNA
agtgtgagagcctgggatgc

SEQ ID NO: 10850 - DNA, 20 bp, synthetic construct
  source 1..20: mol_type = other DNA
ggtgagtctcgaaggggaat

SEQ ID NO: 10851 - DNA, 20 bp, synthetic construct
  source 1..20: mol_type = other DNA
agcaaagatgggagggaccc

SEQ ID NO: 10852 - DNA, 20 bp, synthetic construct
  source 1..20: mol_type = other DNA
agaaagtggtgacaccgccg

SEQ ID NO: 10853 - DNA, 20 bp, synthetic construct
  source 1..20: mol_type = other DNA
aaagcgcttcagtagcgaga

SEQ ID NO: 10854 - DNA, 20 bp, synthetic construct
  source 1..20: mol_type = other DNA
aagcgcttcagtagcgagag

SEQ ID NO: 10855 - DNA, 20 bp, synthetic construct
  source 1..20: mol_type = other DNA
tgagaaagtggtgacaccgc

SEQ ID NO: 10856 - DNA, 20 bp, synthetic construct
  source 1..20: mol_type = other DNA
aaaagcgcttcagtagcgag

SEQ ID NO: 10857 - DNA, 20 bp, synthetic construct
  source 1..20: mol_type = other DNA
cagggactccctccgcaccc

SEQ ID NO: 10858 - DNA, 20 bp, synthetic construct
  source 1..20: mol_type = other DNA
ggactccctccgcaccccgg

SEQ ID NO: 10859 - DNA, 20 bp, synthetic construct
  source 1..20: mol_type = other DNA
gctgagggaagattggccct

SEQ ID NO: 10860 - DNA, 20 bp, synthetic construct
  source 1..20: mol_type = other DNA
tgacaccgccggggtgcgga

SEQ ID NO: 10861 - DNA, 20 bp, synthetic construct
  source 1..20: mol_type = other DNA
gtgacaccgccggggtgcgg

SEQ ID NO: 10862 - DNA, 20 bp, synthetic construct
  source 1..20: mol_type = other DNA
ctgagggaagattggccctg

SEQ ID NO: 10863 - DNA, 20 bp, synthetic construct
  source 1..20: mol_type = other DNA
aaacttctcccaacagcccc

SEQ ID NO: 10864 - DNA, 20 bp, synthetic construct
  source 1..20: mol_type = other DNA
aacttctcccaacagcccca

SEQ ID NO: 10865 - DNA, 20 bp, synthetic construct
  source 1..20: mol_type = other DNA
cgaagaggggagtgggctga

SEQ ID NO: 10866 - DNA, 20 bp, synthetic construct
  source 1..20: mol_type = other DNA
agcgagaggggctgagaaag

SEQ ID NO: 10867 - DNA, 20 bp, synthetic construct
  source 1..20: mol_type = other DNA
ctgtccctgagaaccagcaa

SEQ ID NO: 10868 - DNA, 20 bp, synthetic construct
  source 1..20: mol_type = other DNA
tgctggttctcagggacagg

SEQ ID NO: 10869 - DNA, 20 bp, synthetic construct
  source 1..20: mol_type = other DNA
agccttgttagaatcagaca

SEQ ID NO: 10870 - DNA, 20 bp, synthetic construct
  source 1..20: mol_type = other DNA
gctgcctgtcaccgactaag

SEQ ID NO: 10871 - DNA, 20 bp, synthetic construct
  source 1..20: mol_type = other DNA
gatgtagaacatgatgcttg

SEQ ID NO: 10872 - DNA, 20 bp, synthetic construct
  source 1..20: mol_type = other DNA
agaatcagacatggcttcag

SEQ ID NO: 10873 - DNA, 20 bp, synthetic construct
  source 1..20: mol_type = other DNA
agccatgtctgattctaaca

SEQ ID NO: 10874 - DNA, 20 bp, synthetic construct
  source 1..20: mol_type = other DNA
gtcggtgacaggcagctcag

SEQ ID NO: 10875 - DNA, 20 bp, synthetic construct
  source 1..20: mol_type = other DNA
agtcggtgacaggcagctca

SEQ ID NO: 10876 - DNA, 20 bp, synthetic construct
  source 1..20: mol_type = other DNA
ggatgtagaacatgatgctt

SEQ ID NO: 10877 - DNA, 20 bp, synthetic construct
  source 1..20: mol_type = other DNA
tagtcggtgacaggcagctc

SEQ ID NO: 10878 - DNA, 20 bp, synthetic construct
  source 1..20: mol_type = other DNA
gacatggcttcaggggatgc

SEQ ID NO: 10879 - DNA, 20 bp, synthetic construct
  source 1..20: mol_type = other DNA
aggatgtagaacatgatgct

SEQ ID NO: 10880 - DNA, 20 bp, synthetic construct
  source 1..20: mol_type = other DNA
tagaatcagacatggcttca

SEQ ID NO: 10881 - DNA, 20 bp, synthetic construct
  source 1..20: mol_type = other DNA
ttagaatcagacatggcttc

SEQ ID NO: 10882 - DNA, 20 bp, synthetic construct
  source 1..20: mol_type = other DNA
taaccgcaaggagtagcgga

SEQ ID NO: 10883 - DNA, 20 bp, synthetic construct
  source 1..20: mol_type = other DNA
gaggacagaacctccgcctc

SEQ ID NO: 10884 - DNA, 20 bp, synthetic construct
  source 1..20: mol_type = other DNA
gcagtccctggtaaggcgtg

SEQ ID NO: 10885 - DNA, 20 bp, synthetic construct
  source 1..20: mol_type = other DNA
aaccgcaaggagtagcggag

SEQ ID NO: 10886 - DNA, 20 bp, synthetic construct
  source 1..20: mol_type = other DNA
cgcagtccctggtaaggcgt

SEQ ID NO: 10887 - DNA, 20 bp, synthetic construct
  source 1..20: mol_type = other DNA
ctaaccgcaaggagtagcgg

SEQ ID NO: 10888 - DNA, 20 bp, synthetic construct
  source 1..20: mol_type = other DNA
cttggccccacgccttacca

SEQ ID NO: 10889 - DNA, 20 bp, synthetic construct
  source 1..20: mol_type = other DNA
tagcggaggggaggtcgtga

SEQ ID NO: 10890 - DNA, 20 bp, synthetic construct
  source 1..20: mol_type = other DNA
ccgcagtccctggtaaggcg

SEQ ID NO: 10891 - DNA, 20 bp, synthetic construct
  source 1..20: mol_type = other DNA
ccacgccttaccagggactg

SEQ ID NO: 10892 - DNA, 20 bp, synthetic construct
  source 1..20: mol_type = other DNA
ggtcgtgatggcggcgccgg

SEQ ID NO: 10893 - DNA, 20 bp, synthetic construct
  source 1..20: mol_type = other DNA
cggaggggaggtcgtgatgg

SEQ ID NO: 10894 - DNA, 20 bp, synthetic construct
  source 1..20: mol_type = other DNA
ggaggtcgtgatggcggcgc

SEQ ID NO: 10895 - DNA, 20 bp, synthetic construct
  source 1..20: mol_type = other DNA
cgtgatggcggcgccggagg

SEQ ID NO: 10896 - DNA, 20 bp, synthetic construct
  source 1..20: mol_type = other DNA
gatggcggcgccggaggcgg

SEQ ID NO: 10897 - DNA, 20 bp, synthetic construct
  source 1..20: mol_type = other DNA
tgacagaagcttgtcgacgg

SEQ ID NO: 10898 - DNA, 20 bp, synthetic construct
  source 1..20: mol_type = other DNA
ctgtgacagaagcttgtcga

SEQ ID NO: 10899 - DNA, 20 bp, synthetic construct
  source 1..20: mol_type = other DNA
acagacaagatgtcggcgga

SEQ ID NO: 10900 - DNA, 20 bp, synthetic construct
  source 1..20: mol_type = other DNA
agagatgctcctctccgcaa

SEQ ID NO: 10901 - DNA, 20 bp, synthetic construct
  source 1..20: mol_type = other DNA
gtaatgccccgtatccccct

SEQ ID NO: 10902 - DNA, 20 bp, synthetic construct
  source 1..20: mol_type = other DNA
atggtagcttcgagcccttg

SEQ ID NO: 10903 - DNA, 20 bp, synthetic construct
  source 1..20: mol_type = other DNA
agcttcgagcccttgcggag

SEQ ID NO: 10904 - DNA, 20 bp, synthetic construct
  source 1..20: mol_type = other DNA
acgtgacttggggaccgcag

SEQ ID NO: 10905 - DNA, 20 bp, synthetic construct
  source 1..20: mol_type = other DNA
gacgtgacttggggaccgca

SEQ ID NO: 10906 - DNA, 20 bp, synthetic construct
  source 1..20: mol_type = other DNA
tcacactctccactcccctg

SEQ ID NO: 10907 - DNA, 20 bp, synthetic construct
  source 1..20: mol_type = other DNA
ggttacagacaagatgtcgg

SEQ ID NO: 10908 - DNA, 20 bp, synthetic construct
  source 1..20: mol_type = other DNA
agaggttacagacaagatgt

SEQ ID NO: 10909 - DNA, 20 bp, synthetic construct
  source 1..20: mol_type = other DNA
ttggcttcccggcttcctag

SEQ ID NO: 10910 - DNA, 20 bp, synthetic construct
  source 1..20: mol_type = other DNA
cggcttcctagggggatacg

SEQ ID NO: 10911 - DNA, 20 bp, synthetic construct
  source 1..20: mol_type = other DNA
tggcttcccggcttcctagg

SEQ ID NO: 10912 - DNA, 20 bp, synthetic construct
  source 1..20: mol_type = other DNA
ggtgagagcctccggaaggg

SEQ ID NO: 10913 - DNA, 20 bp, synthetic construct
  source 1..20: mol_type = other DNA
gcgatcgcggagcagggtcg

SEQ ID NO: 10914 - DNA, 20 bp, synthetic construct
  source 1..20: mol_type = other DNA
gagtgggcgatcgcggagca

SEQ ID NO: 10915 - DNA, 20 bp, synthetic construct
  source 1..20: mol_type = other DNA
ggcaggtgagagcctccgga

SEQ ID NO: 10916 - DNA, 20 bp, synthetic construct
  source 1..20: mol_type = other DNA
tgctccgcgatcgcccactc

SEQ ID NO: 10917 - DNA, 20 bp, synthetic construct
  source 1..20: mol_type = other DNA
gggcccaggaatggcgtaag

SEQ ID NO: 10918 - DNA, 20 bp, synthetic construct
  source 1..20: mol_type = other DNA
gctaagctgcgcggtggctg

SEQ ID NO: 10919 - DNA, 20 bp, synthetic construct
  source 1..20: mol_type = other DNA
gctgcagctaagctgcgcgg

SEQ ID NO: 10920 - DNA, 20 bp, synthetic construct
  source 1..20: mol_type = other DNA
gggcgatcgcggagcagggt

SEQ ID NO: 10921 - DNA, 20 bp, synthetic construct
  source 1..20: mol_type = other DNA
ggcccccccagactccgaga

SEQ ID NO: 10922 - DNA, 20 bp, synthetic construct
  source 1..20: mol_type = other DNA
ccgagcgggtcgccggctgt

SEQ ID NO: 10923 - DNA, 20 bp, synthetic construct
  source 1..20: mol_type = other DNA
gacgctgcagctaagctgcg

SEQ ID NO: 10924 - DNA, 20 bp, synthetic construct
  source 1..20: mol_type = other DNA
agaggccgcctcccttccgg

SEQ ID NO: 10925 - DNA, 20 bp, synthetic construct
  source 1..20: mol_type = other DNA
gcaggtgagagcctccggaa

SEQ ID NO: 10926 - DNA, 20 bp, synthetic construct
  source 1..20: mol_type = other DNA
gcccggccgggcgcccgagt

SEQ ID NO: 10927 - DNA, 20 bp, synthetic construct
  source 1..20: mol_type = other DNA
gggcccgaaaccaagactag

SEQ ID NO: 10928 - DNA, 20 bp, synthetic construct
  source 1..20: mol_type = other DNA
gacgagcgctgcactaacgc

SEQ ID NO: 10929 - DNA, 20 bp, synthetic construct
  source 1..20: mol_type = other DNA
aagcttaaggaccggcgaag

SEQ ID NO: 10930 - DNA, 20 bp, synthetic construct
  source 1..20: mol_type = other DNA
aagcaacgggcggacgcacc

SEQ ID NO: 10931 - DNA, 20 bp, synthetic construct
  source 1..20: mol_type = other DNA
tgaggcccggtctctggtga

SEQ ID NO: 10932 - DNA, 20 bp, synthetic construct
  source 1..20: mol_type = other DNA
cgggcccgaaaccaagacta

SEQ ID NO: 10933 - DNA, 20 bp, synthetic construct
  source 1..20: mol_type = other DNA
gcgcgccgtcaccagagacc

SEQ ID NO: 10934 - DNA, 20 bp, synthetic construct
  source 1..20: mol_type = other DNA
agaggacaaaaagcaacggg

SEQ ID NO: 10935 - DNA, 20 bp, synthetic construct
  source 1..20: mol_type = other DNA
acgcaggatccggctgccga

SEQ ID NO: 10936 - DNA, 20 bp, synthetic construct
  source 1..20: mol_type = other DNA
agtcttggtttcgggcccgg

SEQ ID NO: 10937 - DNA, 20 bp, synthetic construct
  source 1..20: mol_type = other DNA
ccgggcccgaaaccaagact

SEQ ID NO: 10938 - DNA, 20 bp, synthetic construct
  source 1..20: mol_type = other DNA
gatgccaggcgttgttccgc

SEQ ID NO: 10939 - DNA, 20 bp, synthetic construct
  source 1..20: mol_type = other DNA
acgggcggacgcacctggcg

SEQ ID NO: 10940 - DNA, 20 bp, synthetic construct
  source 1..20: mol_type = other DNA
gaggggcggcggcgaatgct

SEQ ID NO: 10941 - DNA, 20 bp, synthetic construct
  source 1..20: mol_type = other DNA
gcgaagaggacaaaaagcaa

SEQ ID NO: 10942 - DNA, 20 bp, synthetic construct
  source 1..20: mol_type = other DNA
agaccctccccgacagcaca

SEQ ID NO: 10943 - DNA, 20 bp, synthetic construct
  source 1..20: mol_type = other DNA
ttggggtcgcaattcaggtc

SEQ ID NO: 10944 - DNA, 20 bp, synthetic construct
  source 1..20: mol_type = other DNA
caggggagcagtccaggttg

SEQ ID NO: 10945 - DNA, 20 bp, synthetic construct
  source 1..20: mol_type = other DNA
cctgaattgcgaccccaacc

SEQ ID NO: 10946 - DNA, 20 bp, synthetic construct
  source 1..20: mol_type = other DNA
ttcaggtcaggtccggacca

SEQ ID NO: 10947 - DNA, 20 bp, synthetic construct
  source 1..20: mol_type = other DNA
cacgtgccgggccatactgg

SEQ ID NO: 10948 - DNA, 20 bp, synthetic construct
  source 1..20: mol_type = other DNA
tgccgggccatactggtggg

SEQ ID NO: 10949 - DNA, 20 bp, synthetic construct
  source 1..20: mol_type = other DNA
acgtgccgggccatactggt

SEQ ID NO: 10950 - DNA, 20 bp, synthetic construct
  source 1..20: mol_type = other DNA
tcaggggagcagtccaggtt

SEQ ID NO: 10951 - DNA, 20 bp, synthetic construct
  source 1..20: mol_type = other DNA
gtcgcaattcaggtcaggtc

SEQ ID NO: 10952 - DNA, 20 bp, synthetic construct
  source 1..20: mol_type = other DNA
cctgagtcgcgaccctggtc

SEQ ID NO: 10953 - DNA, 20 bp, synthetic construct
  source 1..20: mol_type = other DNA
cgggccatactggtgggcgg

SEQ ID NO: 10954 - DNA, 20 bp, synthetic construct
  source 1..20: mol_type = other DNA
ggggtaggggttgcggtcag

SEQ ID NO: 10955 - DNA, 20 bp, synthetic construct
  source 1..20: mol_type = other DNA
gtcaggggagcagtccaggt

SEQ ID NO: 10956 - DNA, 20 bp, synthetic construct
  source 1..20: mol_type = other DNA
tgcggtcaggggagcagtcc

SEQ ID NO: 10957 - DNA, 20 bp, synthetic construct
  source 1..20: mol_type = other DNA
ggcgaccccgaactccgctc

SEQ ID NO: 10958 - DNA, 20 bp, synthetic construct
  source 1..20: mol_type = other DNA
tgccgggatcactttccagg

SEQ ID NO: 10959 - DNA, 20 bp, synthetic construct
  source 1..20: mol_type = other DNA
gcttcgaaaccgcagtcctc

SEQ ID NO: 10960 - DNA, 20 bp, synthetic construct
  source 1..20: mol_type = other DNA
tgcttggcagcggataaaag

SEQ ID NO: 10961 - DNA, 20 bp, synthetic construct
  source 1..20: mol_type = other DNA
gcggctcagcgcgtaccggc

SEQ ID NO: 10962 - DNA, 20 bp, synthetic construct
  source 1..20: mol_type = other DNA
actttgcccctgcttggcag

SEQ ID NO: 10963 - DNA, 20 bp, synthetic construct
  source 1..20: mol_type = other DNA
tcggggtcgccggaggactg

SEQ ID NO: 10964 - DNA, 20 bp, synthetic construct
  source 1..20: mol_type = other DNA
gcttggcagcggataaaagg

SEQ ID NO: 10965 - DNA, 20 bp, synthetic construct
  source 1..20: mol_type = other DNA
ccaagcaggggcaaagtgcg

SEQ ID NO: 10966 - DNA, 20 bp, synthetic construct
  source 1..20: mol_type = other DNA
cgcggctcagcgcgtaccgg

SEQ ID NO: 10967 - DNA, 20 bp, synthetic construct
  source 1..20: mol_type = other DNA
aggctccggagcggagttcg

SEQ ID NO: 10968 - DNA, 20 bp, synthetic construct
  source 1..20: mol_type = other DNA
gcaaagtgcgaggagttgac

SEQ ID NO: 10969 - DNA, 20 bp, synthetic construct
  source 1..20: mol_type = other DNA
ggctgaggaaataccggaca

SEQ ID NO: 10970 - DNA, 20 bp, synthetic construct
  source 1..20: mol_type = other DNA
ttaaaggctagagctggcaa

SEQ ID NO: 10971 - DNA, 20 bp, synthetic construct
  source 1..20: mol_type = other DNA
gggaatttaaaggctagagc

SEQ ID NO: 10972 - DNA, 20 bp, synthetic construct
  source 1..20: mol_type = other DNA
acctagtgcgggcatctcca

SEQ ID NO: 10973 - DNA, 20 bp, synthetic construct
  source 1..20: mol_type = other DNA
aagcttcactaacctagtgc

SEQ ID NO: 10974 - DNA, 20 bp, synthetic construct
  source 1..20: mol_type = other DNA
catggtcaccttggatacca

SEQ ID NO: 10975 - DNA, 20 bp, synthetic construct
  source 1..20: mol_type = other DNA
gctttggagtgagacccagg

SEQ ID NO: 10976 - DNA, 20 bp, synthetic construct
  source 1..20: mol_type = other DNA
caagcttcactaacctagtg

SEQ ID NO: 10977 - DNA, 20 bp, synthetic construct
  source 1..20: mol_type = other DNA
agtcgcgtccttggtatcca

SEQ ID NO: 10978 - DNA, 20 bp, synthetic construct
  source 1..20: mol_type = other DNA
gccctggagatgcccgcact

SEQ ID NO: 10979 - DNA, 20 bp, synthetic construct
  source 1..20: mol_type = other DNA
acgcgacttcttgtttggag

SEQ ID NO: 10980 - DNA, 20 bp, synthetic construct
  source 1..20: mol_type = other DNA
tgctctttactctcttacca

SEQ ID NO: 10981 - DNA, 20 bp, synthetic construct
  source 1..20: mol_type = other DNA
gtgcgggcatctccagggca

SEQ ID NO: 10982 - DNA, 20 bp, synthetic construct
  source 1..20: mol_type = other DNA
tctttgggatttggcctcct

SEQ ID NO: 10983 - DNA, 20 bp, synthetic construct
  source 1..20: mol_type = other DNA
ggagctttggagtgagaccc

SEQ ID NO: 10984 - DNA, 20 bp, synthetic construct
  source 1..20: mol_type = other DNA
ccagggcatggagaatgcct

SEQ ID NO: 10985 - DNA, 20 bp, synthetic construct
  source 1..20: mol_type = other DNA
taggagcctaaataaggatc

SEQ ID NO: 10986 - DNA, 20 bp, synthetic construct
  source 1..20: mol_type = other DNA
ccaaggcattctccatgccc

SEQ ID NO: 10987 - DNA, 20 bp, synthetic construct
  source 1..20: mol_type = other DNA
gcgggcggacccaagcagtg

SEQ ID NO: 10988 - DNA, 20 bp, synthetic construct
  source 1..20: mol_type = other DNA
cgggcggacccaagcagtga

SEQ ID NO: 10989 - DNA, 20 bp, synthetic construct
  source 1..20: mol_type = other DNA
gccggccaggtatgtcaccc

SEQ ID NO: 10990 - DNA, 20 bp, synthetic construct
  source 1..20: mol_type = other DNA
gcccagggcaccctcgcggg

SEQ ID NO: 10991 - DNA, 20 bp, synthetic construct
  source 1..20: mol_type = other DNA
ccggccaggtatgtcaccca

SEQ ID NO: 10992 - DNA, 20 bp, synthetic construct
  source 1..20: mol_type = other DNA
ggatgggaacaaacttcaga

SEQ ID NO: 10993 - DNA, 20 bp, synthetic construct
  source 1..20: mol_type = other DNA
gggtgacatacctggccggc

SEQ ID NO: 10994 - DNA, 20 bp, synthetic construct
  source 1..20: mol_type = other DNA
taacccctgggtgacatacc

SEQ ID NO: 10995 - DNA, 20 bp, synthetic construct
  source 1..20: mol_type = other DNA
gaggagagacaccgggccca

SEQ ID NO: 10996 - DNA, 20 bp, synthetic construct
  source 1..20: mol_type = other DNA
tgggaacaaacttcagaagg

SEQ ID NO: 10997 - DNA, 20 bp, synthetic construct
  source 1..20: mol_type = other DNA
aagcagtgagggcctgcagc

SEQ ID NO: 10998 - DNA, 20 bp, synthetic construct
  source 1..20: mol_type = other DNA
ccgggcccagggcaccctcg

SEQ ID NO: 10999 - DNA, 20 bp, synthetic construct
  source 1..20: mol_type = other DNA
ctgcttgggtccgcccgcga

SEQ ID NO: 11000 - DNA, 20 bp, synthetic construct
  source 1..20: mol_type = other DNA
agtgagggcctgcagccggc

SEQ ID NO: 11001 - DNA, 20 bp, synthetic construct
  source 1..20: mol_type = other DNA
ttcagaaggaggagagacac

SEQ ID NO: 11002 - DNA, 20 bp, synthetic construct
  source 1..20: mol_type = other DNA
ccgctgagccgcctgcactg

SEQ ID NO: 11003 - DNA, 20 bp, synthetic construct
  source 1..20: mol_type = other DNA
gaacccagtatgcccggcga

SEQ ID NO: 11004 - DNA, 20 bp, synthetic construct
  source 1..20: mol_type = other DNA
aagacgcctccttccccaag

SEQ ID NO: 11005 - DNA, 20 bp, synthetic construct
  source 1..20: mol_type = other DNA
ggaaggaggcgtcttggccc

SEQ ID NO: 11006 - DNA, 20 bp, synthetic construct
  source 1..20: mol_type = other DNA
cccgagagaggtgagatcca

SEQ ID NO: 11007 - DNA, 20 bp, synthetic construct
  source 1..20: mol_type = other DNA
ccttcgacctcgctcccacc

SEQ ID NO: 11008 - DNA, 20 bp, synthetic construct
  source 1..20: mol_type = other DNA
ccaagatggccgcttgggga

SEQ ID NO: 11009 - DNA, 20 bp, synthetic construct
  source 1..20: mol_type = other DNA
ccgagagaggtgagatccaa

SEQ ID NO: 11010 - DNA, 20 bp, synthetic construct
  source 1..20: mol_type = other DNA
gtggcggcagcgcccgagag

SEQ ID NO: 11011 - DNA, 20 bp, synthetic construct
  source 1..20: mol_type = other DNA
gtctccaagatggccgcttg

SEQ ID NO: 11012 - DNA, 20 bp, synthetic construct
  source 1..20: mol_type = other DNA
caagcagagtgtctccaaga

SEQ ID NO: 11013 - DNA, 20 bp, synthetic construct
  source 1..20: mol_type = other DNA
cgctgagccgcctgcactgg

SEQ ID NO: 11014 - DNA, 20 bp, synthetic construct
  source 1..20: mol_type = other DNA
cttggcccgggcagcagtgg

SEQ ID NO: 11015 - DNA, 20 bp, synthetic construct
  source 1..20: mol_type = other DNA
agatggccgcttggggaagg

SEQ ID NO: 11016 - DNA, 20 bp, synthetic construct
  source 1..20: mol_type = other DNA
cgtcttggcccgggcagcag

SEQ ID NO: 11017 - DNA, 20 bp, synthetic construct
  source 1..20: mol_type = other DNA
cggcggcgccctctgaacgg

SEQ ID NO: 11018 - DNA, 20 bp, synthetic construct
  source 1..20: mol_type = other DNA
gcggcggcgccctctgaacg

SEQ ID NO: 11019 - DNA, 20 bp, synthetic construct
  source 1..20: mol_type = other DNA
ccagtgccgcgcggacatcg

SEQ ID NO: 11020 - DNA, 20 bp, synthetic construct
  source 1..20: mol_type = other DNA
ggggagccccgatgtccgcg

SEQ ID NO: 11021 - DNA, 20 bp, synthetic construct
  source 1..20: mol_type = other DNA
aggagagccccgcgggtgtg

SEQ ID NO: 11022 - DNA, 20 bp, synthetic construct
  source 1..20: mol_type = other DNA
agagccccgcgggtgtgcgg

SEQ ID NO: 11023 - DNA, 20 bp, synthetic construct
  source 1..20: mol_type = other DNA
agcccggagccagtgccgcg

SEQ ID NO: 11024 - DNA, 20 bp, synthetic construct
  source 1..20: mol_type = other DNA
acgcgccctccgcacacccg

SEQ ID NO: 11025 - DNA, 20 bp, synthetic construct
  source 1..20: mol_type = other DNA
gcgccctccgcacacccgcg

SEQ ID NO: 11026 - DNA, 20 bp, synthetic construct
  source 1..20: mol_type = other DNA
tcggggctcccccgttcaga

SEQ ID NO: 11027 - DNA, 20 bp, synthetic construct
  source 1..20: mol_type = other DNA
ggcggcactcacctgggcgg

SEQ ID NO: 11028 - DNA, 20 bp, synthetic construct
  source 1..20: mol_type = other DNA
atcggggctcccccgttcag

SEQ ID NO: 11029 - DNA, 20 bp, synthetic construct
  source 1..20: mol_type = other DNA
gcgggcggcactcacctggg

SEQ ID NO: 11030 - DNA, 20 bp, synthetic construct
  source 1..20: mol_type = other DNA
ggggcgggcggcactcacct

SEQ ID NO: 11031 - DNA, 20 bp, synthetic construct
  source 1..20: mol_type = other DNA
cccgcgcgggagggggacag

SEQ ID NO: 11032 - DNA, 20 bp, synthetic construct
  source 1..20: mol_type = other DNA
aatatcaggaaagacgctgt

SEQ ID NO: 11033 - DNA, 20 bp, synthetic construct
  source 1..20: mol_type = other DNA
gatgaagataagatctatgc

SEQ ID NO: 11034 - DNA, 20 bp, synthetic construct
  source 1..20: mol_type = other DNA
gagtacatatatactaacta

SEQ ID NO: 11035 - DNA, 20 bp, synthetic construct
  source 1..20: mol_type = other DNA
atgaagataagatctatgcc

SEQ ID NO: 11036 - DNA, 20 bp, synthetic construct
  source 1..20: mol_type = other DNA
ggagactcagactagaatgg

SEQ ID NO: 11037 - DNA, 20 bp, synthetic construct
  source 1..20: mol_type = other DNA
tcctgatatttagaatctgg

SEQ ID NO: 11038 - DNA, 20 bp, synthetic construct
  source 1..20: mol_type = other DNA
aatttagagttgtattgcac

SEQ ID NO: 11039 - DNA, 20 bp, synthetic construct
  source 1..20: mol_type = other DNA
tagaatctggaggtttaaag

SEQ ID NO: 11040 - DNA, 20 bp, synthetic construct
  source 1..20: mol_type = other DNA
ttcttagtaaactgcagcca

SEQ ID NO: 11041 - DNA, 20 bp, synthetic construct
  source 1..20: mol_type = other DNA
cagggagactcagactagaa

SEQ ID NO: 11042 - DNA, 20 bp, synthetic construct
  source 1..20: mol_type = other DNA
gttcttagtaaactgcagcc

SEQ ID NO: 11043 - DNA, 20 bp, synthetic construct
  source 1..20: mol_type = other DNA
aaatatcaggaaagacgctg

SEQ ID NO: 11044 - DNA, 20 bp, synthetic construct
  source 1..20: mol_type = other DNA
cattctagtctgagtctccc

SEQ ID NO: 11045 - DNA, 20 bp, synthetic construct
  source 1..20: mol_type = other DNA
acctccagattctaaatatc

SEQ ID NO: 11046 - DNA, 20 bp, synthetic construct
  source 1..20: mol_type = other DNA
tgcagtttactaagaacttt

SEQ ID NO: 11047 - DNA, 20 bp, synthetic construct
  source 1..20: mol_type = other DNA
agggaccaaagagtgtggat

SEQ ID NO: 11048 - DNA, 20 bp, synthetic construct
  source 1..20: mol_type = other DNA
ccgggacccccagatgcccg

SEQ ID NO: 11049 - DNA, 20 bp, synthetic construct
  source 1..20: mol_type = other DNA
ttccaagggaccaaagagtg

SEQ ID NO: 11050 - DNA, 20 bp, synthetic construct
  source 1..20: mol_type = other DNA
aagggaccaaagagtgtgga

SEQ ID NO: 11051 - DNA, 20 bp, synthetic construct
  source 1..20: mol_type = other DNA
agagtgtggatgggagttgg

SEQ ID NO: 11052 - DNA, 20 bp, synthetic construct
  source 1..20: mol_type = other DNA
ccccggccccgggcatctgg

SEQ ID NO: 11053 - DNA, 20 bp, synthetic construct
  source 1..20: mol_type = other DNA
gcctcccctacctgctgctg

SEQ ID NO: 11054 - DNA, 20 bp, synthetic construct
  source 1..20: mol_type = other DNA
ccagtgccgcagcagcaggt

SEQ ID NO: 11055 - DNA, 20 bp, synthetic construct
  source 1..20: mol_type = other DNA
aagagtgtggatgggagttg

SEQ ID NO: 11056 - DNA, 20 bp, synthetic construct
  source 1..20: mol_type = other DNA
cccgggacccccagatgccc

SEQ ID NO: 11057 - DNA, 20 bp, synthetic construct
  source 1..20: mol_type = other DNA
gccgcagcagcaggtagggg

SEQ ID NO: 11058 - DNA, 20 bp, synthetic construct
  source 1..20: mol_type = other DNA
tgctgcggcactggagacag

SEQ ID NO: 11059 - DNA, 20 bp, synthetic construct
  source 1..20: mol_type = other DNA
cagcaggtaggggaggcgcg

SEQ ID NO: 11060 - DNA, 20 bp, synthetic construct
  source 1..20: mol_type = other DNA
gaagacgggaaaagtgagcg

SEQ ID NO: 11061 - DNA, 20 bp, synthetic construct
  source 1..20: mol_type = other DNA
agtgccgcagcagcaggtag

SEQ ID NO: 11062 - DNA, 20 bp, synthetic construct
  source 1..20: mol_type = other DNA
acatgatggcagcgtccgga

SEQ ID NO: 11063 - DNA, 20 bp, synthetic construct
  source 1..20: mol_type = other DNA
gcttcccgcgctctccagcg

SEQ ID NO: 11064 - DNA, 20 bp, synthetic construct
  source 1..20: mol_type = other DNA
aggggaattagagagaaggg

SEQ ID NO: 11065 - DNA, 20 bp, synthetic construct
  source 1..20: mol_type = other DNA
cgcgaggaagcgccgcgagg

SEQ ID NO: 11066 - DNA, 20 bp, synthetic construct
  source 1..20: mol_type = other DNA
ggggccccgctggagagcgc

SEQ ID NO: 11067 - DNA, 20 bp, synthetic construct
  source 1..20: mol_type = other DNA
tcgcttcccgcgctctccag

SEQ ID NO: 11068 - DNA, 20 bp, synthetic construct
  source 1..20: mol_type = other DNA
ggggaattagagagaaggga

SEQ ID NO: 11069 - DNA, 20 bp, synthetic construct
  source 1..20: mol_type = other DNA
cgcggctggaggaaagcgag

SEQ ID NO: 11070 - DNA, 20 bp, synthetic construct
  source 1..20: mol_type = other DNA
tggagagcgcgggaagcgag

SEQ ID NO: 11071 - DNA, 20 bp, synthetic construct
  source 1..20: mol_type = other DNA
agagagaagaccgcggcgcg

SEQ ID NO: 11072 - DNA, 20 bp, synthetic construct
  source 1..20: mol_type = other DNA
aggaagcgccgcgaggcgga

SEQ ID NO: 11073 - DNA, 20 bp, synthetic construct
  source 1..20: mol_type = other DNA
ggggtggagagagaagaccg

SEQ ID NO: 11074 - DNA, 20 bp, synthetic construct
  source 1..20: mol_type = other DNA
gaagcgccgcgaggcggaag

SEQ ID NO: 11075 - DNA, 20 bp, synthetic construct
  source 1..20: mol_type = other DNA
gcggctggaggaaagcgaga

SEQ ID NO: 11076 - DNA, 20 bp, synthetic construct
  source 1..20: mol_type = other DNA
ccccctccccttccgcctcg

SEQ ID NO: 11077 - DNA, 20 bp, synthetic construct
  source 1..20: mol_type = other DNA
gaagcatcatggttcaacgt

SEQ ID NO: 11078 - DNA, 20 bp, synthetic construct
  source 1..20: mol_type = other DNA
atcgccgcctggctcgacgc

SEQ ID NO: 11079 - DNA, 20 bp, synthetic construct
  source 1..20: mol_type = other DNA
agaagcatcatggttcaacg

SEQ ID NO: 11080 - DNA, 20 bp, synthetic construct
  source 1..20: mol_type = other DNA
cactccagcgtcgagccagg

SEQ ID NO: 11081 - DNA, 20 bp, synthetic construct
  source 1..20: mol_type = other DNA
cctggctcgacgctggagtg

SEQ ID NO: 11082 - DNA, 20 bp, synthetic construct
  source 1..20: mol_type = other DNA
gcctggctcgacgctggagt

SEQ ID NO: 11083 - DNA, 20 bp, synthetic construct
  source 1..20: mol_type = other DNA
tggagtggggagaagcatca

SEQ ID NO: 11084 - DNA, 20 bp, synthetic construct
  source 1..20: mol_type = other DNA
gcggcggggacggtgctccg

SEQ ID NO: 11085 - DNA, 20 bp, synthetic construct
  source 1..20: mol_type = other DNA
gcggggacggtgctccgcgg

SEQ ID NO: 11086 - DNA, 20 bp, synthetic construct
  source 1..20: mol_type = other DNA
gggacggtgctccgcggcgg

SEQ ID NO: 11087 - DNA, 20 bp, synthetic construct
  source 1..20: mol_type = other DNA
cgacagccgggacgcggcca

SEQ ID NO: 11088 - DNA, 20 bp, synthetic construct
  source 1..20: mol_type = other DNA
ccgagcccgagcccgcgcgc

SEQ ID NO: 11089 - DNA, 20 bp, synthetic construct
  source 1..20: mol_type = other DNA
ctcccagcctgggcccccgg

SEQ ID NO: 11090 - DNA, 20 bp, synthetic construct
  source 1..20: mol_type = other DNA
agcccgagcccgcgcgccgg

SEQ ID NO: 11091 - DNA, 20 bp, synthetic construct
  source 1..20: mol_type = other DNA
aatgaggaggggaggttgtg

SEQ ID NO: 11092 - DNA, 20 bp, synthetic construct
  source 1..20: mol_type = other DNA
tgacataaaggccaagccac

SEQ ID NO: 11093 - DNA, 20 bp, synthetic construct
  source 1..20: mol_type = other DNA
gctgcctgcagagtaggaac

SEQ ID NO: 11094 - DNA, 20 bp, synthetic construct
  source 1..20: mol_type = other DNA
cataaaggccaagccacagg

SEQ ID NO: 11095 - DNA, 20 bp, synthetic construct
  source 1..20: mol_type = other DNA
cctacagagagtgagagcac

SEQ ID NO: 11096 - DNA, 20 bp, synthetic construct
  source 1..20: mol_type = other DNA
ccgtgctctcactctctgta

SEQ ID NO: 11097 - DNA, 20 bp, synthetic construct
  source 1..20: mol_type = other DNA
cccgtgctctcactctctgt

SEQ ID NO: 11098 - DNA, 20 bp, synthetic construct
  source 1..20: mol_type = other DNA
aagcaccatttcaagcaacc

SEQ ID NO: 11099 - DNA, 20 bp, synthetic construct
  source 1..20: mol_type = other DNA
gctcgctactctttgctgag

SEQ ID NO: 11100 - DNA, 20 bp, synthetic construct
  source 1..20: mol_type = other DNA
actcaagcagagataaaact

SEQ ID NO: 11101 - DNA, 20 bp, synthetic construct
  source 1..20: mol_type = other DNA
ctgcctgcagagtaggaact

SEQ ID NO: 11102 - DNA, 20 bp, synthetic construct
  source 1..20: mol_type = other DNA
agcagagataaaacttggta

SEQ ID NO: 11103 - DNA, 20 bp, synthetic construct
  source 1..20: mol_type = other DNA
taaaagagggcagcctcctg

SEQ ID NO: 11104 - DNA, 20 bp, synthetic construct
  source 1..20: mol_type = other DNA
ctcttccaggttgcttgaaa

SEQ ID NO: 11105 - DNA, 20 bp, synthetic construct
  source 1..20: mol_type = other DNA
gagggcagcctcctgtggct

SEQ ID NO: 11106 - DNA, 20 bp, synthetic construct
  source 1..20: mol_type = other DNA
taaacgtggacttgacataa

SEQ ID NO: 11107 - DNA, 20 bp, synthetic construct
  source 1..20: mol_type = other DNA
tccctacccctctcacaccg

SEQ ID NO: 11108 - DNA, 20 bp, synthetic construct
  source 1..20: mol_type = other DNA
aacggagcccggtacagctc

SEQ ID NO: 11109 - DNA, 20 bp, synthetic construct
  source 1..20: mol_type = other DNA
gtctgcgagaccgacttgga

SEQ ID NO: 11110 - DNA, 20 bp, synthetic construct
  source 1..20: mol_type = other DNA
actccctacccctctcacac

SEQ ID NO: 11111 - DNA, 20 bp, synthetic construct
  source 1..20: mol_type = other DNA
gcaactccccggtgtgagag

SEQ ID NO: 11112 - DNA, 20 bp, synthetic construct
  source 1..20: mol_type = other DNA
tggcaactccccggtgtgag

SEQ ID NO: 11113 - DNA, 20 bp, synthetic construct
  source 1..20: mol_type = other DNA
caggaagccgagcctcagct

SEQ ID NO: 11114 - DNA, 20 bp, synthetic construct
  source 1..20: mol_type = other DNA
ccaaaaccctgaccatcagc

SEQ ID NO: 11115 - DNA, 20 bp, synthetic construct
  source 1..20: mol_type = other DNA
ctccctacccctctcacacc

SEQ ID NO: 11116 - DNA, 20 bp, synthetic construct
  source 1..20: mol_type = other DNA
acttggacggagccgagctg

SEQ ID NO: 11117 - DNA, 20 bp, synthetic construct
  source 1..20: mol_type = other DNA
cagctcggctccgtccaagt

SEQ ID NO: 11118 - DNA, 20 bp, synthetic construct
  source 1..20: mol_type = other DNA
ggcaactccccggtgtgaga

SEQ ID NO: 11119 - DNA, 20 bp, synthetic construct
  source 1..20: mol_type = other DNA
gcgcgtctgcgagaccgact

SEQ ID NO: 11120 - DNA, 20 bp, synthetic construct
  source 1..20: mol_type = other DNA
gacggagccgagctgaggct

SEQ ID NO: 11121 - DNA, 20 bp, synthetic construct
  source 1..20: mol_type = other DNA
gaggctcggcttcctgctga

SEQ ID NO: 11122 - DNA, 20 bp, synthetic construct
  source 1..20: mol_type = other DNA
agtggctttccgagcttgat

SEQ ID NO: 11123 - DNA, 20 bp, synthetic construct
  source 1..20: mol_type = other DNA
ttacaaatacaagatgatag

SEQ ID NO: 11124 - DNA, 20 bp, synthetic construct
  source 1..20: mol_type = other DNA
catcaacccaaatttcacca

SEQ ID NO: 11125 - DNA, 20 bp, synthetic construct
  source 1..20: mol_type = other DNA
ctctataacgtttacaagaa

SEQ ID NO: 11126 - DNA, 20 bp, synthetic construct
  source 1..20: mol_type = other DNA
tcagatccttggtgaaattt

SEQ ID NO: 11127 - DNA, 20 bp, synthetic construct
  source 1..20: mol_type = other DNA
ttcttcttacctatcaagct

SEQ ID NO: 11128 - DNA, 20 bp, synthetic construct
  source 1..20: mol_type = other DNA
tgaaatgaaggctaatgtag

SEQ ID NO: 11129 - DNA, 20 bp, synthetic construct
  source 1..20: mol_type = other DNA
gtgcagaagcaatgttattc

SEQ ID NO: 11130 - DNA, 20 bp, synthetic construct
  source 1..20: mol_type = other DNA
atcttgagacttcagatcct

SEQ ID NO: 11131 - DNA, 20 bp, synthetic construct
  source 1..20: mol_type = other DNA
ttcagatccttggtgaaatt

SEQ ID NO: 11132 - DNA, 20 bp, synthetic construct
  source 1..20: mol_type = other DNA
ttcaactaaaatttgtatca

SEQ ID NO: 11133 - DNA, 20 bp, synthetic construct
  source 1..20: mol_type = other DNA
tgcttaaacataaatgctgt

SEQ ID NO: 11134 - DNA, 20 bp, synthetic construct
  source 1..20: mol_type = other DNA
gttctttattatcaatattt

SEQ ID NO: 11135 - DNA, 20 bp, synthetic construct
  source 1..20: mol_type = other DNA
cgcctcaccgcactccggag

SEQ ID NO: 11136 - DNA, 20 bp, synthetic construct
  source 1..20: mol_type = other DNA
gggaccgggaaaaggccaag

SEQ ID NO: 11137 - DNA, 20 bp, synthetic construct
  source 1..20: mol_type = other DNA
ggaaaaggccaagagggcgg

SEQ ID NO: 11138 - DNA, 20 bp, synthetic construct
  source 1..20: mol_type = other DNA
cggggacagcagcaggcgcg

SEQ ID NO: 11139 - DNA, 20 bp, synthetic construct
  source 1..20: mol_type = other DNA
ccgggaaaaggccaagaggg

SEQ ID NO: 11140 - DNA, 20 bp, synthetic construct
  source 1..20: mol_type = other DNA
ggtggcgggcgctcagcacc

SEQ ID NO: 11141 - DNA, 20 bp, synthetic construct
  source 1..20: mol_type = other DNA
ggacagcagcaggcgcgcgg

SEQ ID NO: 11142 - DNA, 20 bp, synthetic construct
  source 1..20: mol_type = other DNA
cgggggcctccacggccgag

SEQ ID NO: 11143 - DNA, 20 bp, synthetic construct
  source 1..20: mol_type = other DNA
ggaccgggaaaaggccaaga

SEQ ID NO: 11144 - DNA, 20 bp, synthetic construct
  source 1..20: mol_type = other DNA
ccgcctccgcccctcggccg

SEQ ID NO: 11145 - DNA, 20 bp, synthetic construct
  source 1..20: mol_type = other DNA
acagcagcaggcgcgcggcg

SEQ ID NO: 11146 - DNA, 20 bp, synthetic construct
  source 1..20: mol_type = other DNA
tcgggcacggggacagcagc

SEQ ID NO: 11147 - DNA, 20 bp, synthetic construct
  source 1..20: mol_type = other DNA
cctccgcccctcggccgtgg

SEQ ID NO: 11148 - DNA, 20 bp, synthetic construct
  source 1..20: mol_type = other DNA
gggcctccacggccgagggg

SEQ ID NO: 11149 - DNA, 20 bp, synthetic construct
  source 1..20: mol_type = other DNA
cctccacggccgaggggcgg

SEQ ID NO: 11150 - DNA, 20 bp, synthetic construct
  source 1..20: mol_type = other DNA
gaggaacaggaagccctgaa

SEQ ID NO: 11151 - DNA, 20 bp, synthetic construct
  source 1..20: mol_type = other DNA
ggggcgggactctattgtgg

SEQ ID NO: 11152 - DNA, 20 bp, synthetic construct
  source 1..20: mol_type = other DNA
cgcactcacctaccggcgcg

SEQ ID NO: 11153 - DNA, 20 bp, synthetic construct
  source 1..20: mol_type = other DNA
gcactcacctaccggcgcgc

SEQ ID NO: 11154 - DNA, 20 bp, synthetic construct
  source 1..20: mol_type = other DNA
agtggggcgggactctattg

SEQ ID NO: 11155 - DNA, 20 bp, synthetic construct
  source 1..20: mol_type = other DNA
tcgccgccaggccaggaccg

SEQ ID NO: 11156 - DNA, 20 bp, synthetic construct
  source 1..20: mol_type = other DNA
tgaggaacaggaagccctga

SEQ ID NO: 11157 - DNA, 20 bp, synthetic construct
  source 1..20: mol_type = other DNA
gggactctattgtggcggtg

SEQ ID NO: 11158 - DNA, 20 bp, synthetic construct
  source 1..20: mol_type = other DNA
ctattgtggcggtgaggaac

SEQ ID NO: 11159 - DNA, 20 bp, synthetic construct
  source 1..20: mol_type = other DNA
ggtgagtgcggcctcggtcc

SEQ ID NO: 11160 - DNA, 20 bp, synthetic construct
  source 1..20: mol_type = other DNA
cggcctcggtcctggcctgg

SEQ ID NO: 11161 - DNA, 20 bp, synthetic construct
  source 1..20: mol_type = other DNA
ctcacctaccggcgcgcggg

SEQ ID NO: 11162 - DNA, 20 bp, synthetic construct
  source 1..20: mol_type = other DNA
cgcgcgccggtaggtgagtg

SEQ ID NO: 11163 - DNA, 20 bp, synthetic construct
  source 1..20: mol_type = other DNA
ctcgcctcccgcgcgccggt

SEQ ID NO: 11164 - DNA, 20 bp, synthetic construct
  source 1..20: mol_type = other DNA
gtttggggtgggcgccgccg

SEQ ID NO: 11165 - DNA, 20 bp, synthetic construct
  source 1..20: mol_type = other DNA
gcgggcccggagatcaaacg

SEQ ID NO: 11166 - DNA, 20 bp, synthetic construct
  source 1..20: mol_type = other DNA
gtccctatcggcagaaccgg

SEQ ID NO: 11167 - DNA, 20 bp, synthetic construct
  source 1..20: mol_type = other DNA
cccgcagcaagggatcgcga

SEQ ID NO: 11168 - DNA, 20 bp, synthetic construct
  source 1..20: mol_type = other DNA
ggtagccgccgatttccccg

SEQ ID NO: 11169 - DNA, 20 bp, synthetic construct
  source 1..20: mol_type = other DNA
accttcgcgatcccttgctg

SEQ ID NO: 11170 - DNA, 20 bp, synthetic construct
  source 1..20: mol_type = other DNA
cagcaagggatcgcgaaggt

SEQ ID NO: 11171 - DNA, 20 bp, synthetic construct
  source 1..20: mol_type = other DNA
cccattggccgccacctcgg

SEQ ID NO: 11172 - DNA, 20 bp, synthetic construct
  source 1..20: mol_type = other DNA
gatcaaacgtggcccgcccc

SEQ ID NO: 11173 - DNA, 20 bp, synthetic construct
  source 1..20: mol_type = other DNA
cccctccgcggggaaatcgg

SEQ ID NO: 11174 - DNA, 20 bp, synthetic construct
  source 1..20: mol_type = other DNA
agcgcgctgtgccctgccgg

SEQ ID NO: 11175 - DNA, 20 bp, synthetic construct
  source 1..20: mol_type = other DNA
cgccaggtgccacgagccgg

SEQ ID NO: 11176 - DNA, 20 bp, synthetic construct
  source 1..20: mol_type = other DNA
gatctccgggcccgcagcaa

SEQ ID NO: 11177 - DNA, 20 bp, synthetic construct
  source 1..20: mol_type = other DNA
gccgccgatttccccgcgga

SEQ ID NO: 11178 - DNA, 20 bp, synthetic construct
  source 1..20: mol_type = other DNA
cagcgcgctgtgccctgccg

SEQ ID NO: 11179 - DNA, 20 bp, synthetic construct
  source 1..20: mol_type = other DNA
aacgtggcccgcccccggca

SEQ ID NO: 11180 - DNA, 20 bp, synthetic construct
  source 1..20: mol_type = other DNA
ccacccgccggggatccccg

SEQ ID NO: 11181 - DNA, 20 bp, synthetic construct
  source 1..20: mol_type = other DNA
ctaggcagctccaaatcccg

SEQ ID NO: 11182 - DNA, 20 bp, synthetic construct
  source 1..20: mol_type = other DNA
cctcctactcaccgaccgcg

SEQ ID NO: 11183 - DNA, 20 bp, synthetic construct
  source 1..20: mol_type = other DNA
gagctgcctagcctcgcggt

SEQ ID NO: 11184 - DNA, 20 bp, synthetic construct
  source 1..20: mol_type = other DNA
tactcaccgaccgcgaggct

SEQ ID NO: 11185 - DNA, 20 bp, synthetic construct
  source 1..20: mol_type = other DNA
tttggagctgcctagcctcg

SEQ ID NO: 11186 - DNA, 20 bp, synthetic construct
  source 1..20: mol_type = other DNA
tagcctcgcggtcggtgagt

SEQ ID NO: 11187 - DNA, 20 bp, synthetic construct
  source 1..20: mol_type = other DNA
ctcgcggtcggtgagtagga

SEQ ID NO: 11188 - DNA, 20 bp, synthetic construct
  source 1..20: mol_type = other DNA
cctcgcggtcggtgagtagg

SEQ ID NO: 11189 - DNA, 20 bp, synthetic construct
  source 1..20: mol_type = other DNA
cgggagggagcggtcgccgc

SEQ ID NO: 11190 - DNA, 20 bp, synthetic construct
  source 1..20: mol_type = other DNA
cctgacgcagcttgggcccg

SEQ ID NO: 11191 - DNA, 20 bp, synthetic construct
  source 1..20: mol_type = other DNA
gacgcagcttgggcccgcgg

SEQ ID NO: 11192 - DNA, 20 bp, synthetic construct
  source 1..20: mol_type = other DNA
gcgggagggagcggtcgccg

SEQ ID NO: 11193 - DNA, 20 bp, synthetic construct
  source 1..20: mol_type = other DNA
gtcggtgagtaggagggagc

SEQ ID NO: 11194 - DNA, 20 bp, synthetic construct
  source 1..20: mol_type = other DNA
cggcggcggcaagggcggga

SEQ ID NO: 11195 - DNA, 20 bp, synthetic construct
  source 1..20: mol_type = other DNA
actacacgaggcgaactcgg

SEQ ID NO: 11196 - DNA, 20 bp, synthetic construct
  source 1..20: mol_type = other DNA
gcggcggacagtgtaatgtt

SEQ ID NO: 11197 - DNA, 20 bp, synthetic construct
  source 1..20: mol_type = other DNA
tctgggggcaaaactacacg

SEQ ID NO: 11198 - DNA, 20 bp, synthetic construct
  source 1..20: mol_type = other DNA
gcagcctgcgaactagtcgg

SEQ ID NO: 11199 - DNA, 20 bp, synthetic construct
  source 1..20: mol_type = other DNA
ggcggcggacagtgtaatgt

SEQ ID NO: 11200 - DNA, 20 bp, synthetic construct
  source 1..20: mol_type = other DNA
gtaatgttgggtgggagtgc

SEQ ID NO: 11201 - DNA, 20 bp, synthetic construct
  source 1..20: mol_type = other DNA
gcggacagtgtaatgttggg

SEQ ID NO: 11202 - DNA, 20 bp, synthetic construct
  source 1..20: mol_type = other DNA
gccgccgagcagctccccgc

SEQ ID NO: 11203 - DNA, 20 bp, synthetic construct
  source 1..20: mol_type = other DNA
gccggcggggagctgctcgg

SEQ ID NO: 11204 - DNA, 20 bp, synthetic construct
  source 1..20: mol_type = other DNA
gtagttgctgagggtgccac

SEQ ID NO: 11205 - DNA, 20 bp, synthetic construct
  source 1..20: mol_type = other DNA
cgcctcaaaatgtcttccag

SEQ ID NO: 11206 - DNA, 20 bp, synthetic construct
  source 1..20: mol_type = other DNA
cggacagtgtaatgttgggt

SEQ ID NO: 11207 - DNA, 20 bp, synthetic construct
  source 1..20: mol_type = other DNA
ggcggggagctgctcggcgg

SEQ ID NO: 11208 - DNA, 20 bp, synthetic construct
  source 1..20: mol_type = other DNA
ctagtcggtggctcgggcgc

SEQ ID NO: 11209 - DNA, 20 bp, synthetic construct
  source 1..20: mol_type = other DNA
gtcggtggctcgggcgccgg

SEQ ID NO: 11210 - DNA, 20 bp, synthetic construct
  source 1..20: mol_type = other DNA
gggcccgtaagaaacacacg

SEQ ID NO: 11211 - DNA, 20 bp, synthetic construct
  source 1..20: mol_type = other DNA
tgggcccgtaagaaacacac

SEQ ID NO: 11212 - DNA, 20 bp, synthetic construct
  source 1..20: mol_type = other DNA
ttgggcccgtaagaaacaca

SEQ ID NO: 11213 - DNA, 20 bp, synthetic construct
  source 1..20: mol_type = other DNA
caggagcccgtccaccagga

SEQ ID NO: 11214 - DNA, 20 bp, synthetic construct
  source 1..20: mol_type = other DNA
cgcactcaccgccttcctgg

SEQ ID NO: 11215 - DNA, 20 bp, synthetic construct
  source 1..20: mol_type = other DNA
cccacccagccggagagctg

SEQ ID NO: 11216 - DNA, 20 bp, synthetic construct
  source 1..20: mol_type = other DNA
ccacccagccggagagctgg

SEQ ID NO: 11217 - DNA, 20 bp, synthetic construct
  source 1..20: mol_type = other DNA
cctggtggacgggctcctgg

SEQ ID NO: 11218 - DNA, 20 bp, synthetic construct
  source 1..20: mol_type = other DNA
gagcccgtccaccaggaagg

SEQ ID NO: 11219 - DNA, 20 bp, synthetic construct
  source 1..20: mol_type = other DNA
agcccacccagccggagagc

SEQ ID NO: 11220 - DNA, 20 bp, synthetic construct
  source 1..20: mol_type = other DNA
acagcagcagcacagccacc

SEQ ID NO: 11221 - DNA, 20 bp, synthetic construct
  source 1..20: mol_type = other DNA
gctgggggcatggaggagca

SEQ ID NO: 11222 - DNA, 20 bp, synthetic construct
  source 1..20: mol_type = other DNA
caccaggaaggcggtgagtg

SEQ ID NO: 11223 - DNA, 20 bp, synthetic construct
  source 1..20: mol_type = other DNA
ccggagagctgggggcatgg

SEQ ID NO: 11224 - DNA, 20 bp, synthetic construct
  source 1..20: mol_type = other DNA
ctgggggcatggaggagcag

SEQ ID NO: 11225 - DNA, 20 bp, synthetic construct
  source 1..20: mol_type = other DNA
agaatgcgggtgtatccggg

SEQ ID NO: 11226 - DNA, 20 bp, synthetic construct
  source 1..20: mol_type = other DNA
gtagagaatacgtcctgccc

SEQ ID NO: 11227 - DNA, 20 bp, synthetic construct
  source 1..20: mol_type = other DNA
ggacccctctgtcttaggaa

SEQ ID NO: 11228 - DNA, 20 bp, synthetic construct
  source 1..20: mol_type = other DNA
gtttagtgcagcctggaaga

SEQ ID NO: 11229 - DNA, 20 bp, synthetic construct
  source 1..20: mol_type = other DNA
gacccctctgtcttaggaag

SEQ ID NO: 11230 - DNA, 20 bp, synthetic construct
  source 1..20: mol_type = other DNA
gctccccttcctaagacaga

SEQ ID NO: 11231 - DNA, 20 bp, synthetic construct
  source 1..20: mol_type = other DNA
agctccccttcctaagacag

SEQ ID NO: 11232 - DNA, 20 bp, synthetic construct
  source 1..20: mol_type = other DNA
tggacccctctgtcttagga

SEQ ID NO: 11233 - DNA, 20 bp, synthetic construct
  source 1..20: mol_type = other DNA
tcctgcccaggcttcccagg

SEQ ID NO: 11234 - DNA, 20 bp, synthetic construct
  source 1..20: mol_type = other DNA
ctccccttcctaagacagag

SEQ ID NO: 11235 - DNA, 20 bp, synthetic construct
  source 1..20: mol_type = other DNA
ccgaggggcggggactacag

SEQ ID NO: 11236 - DNA, 20 bp, synthetic construct
  source 1..20: mol_type = other DNA
ctcagaatccagcaggatag

SEQ ID NO: 11237 - DNA, 20 bp, synthetic construct
  source 1..20: mol_type = other DNA
aggggagctcagaatccagc

SEQ ID NO: 11238 - DNA, 20 bp, synthetic construct
  source 1..20: mol_type = other DNA
agtttagtgcagcctggaag

SEQ ID NO: 11239 - DNA, 20 bp, synthetic construct
  source 1..20: mol_type = other DNA
ctaagacagaggggtccacc

SEQ ID NO: 11240 - DNA, 20 bp, synthetic construct
  source 1..20: mol_type = other DNA
cggaactggcattactgcag

SEQ ID NO: 11241 - DNA, 20 bp, synthetic construct
  source 1..20: mol_type = other DNA
gggagtagaatgcaggcaga

SEQ ID NO: 11242 - DNA, 20 bp, synthetic construct
  source 1..20: mol_type = other DNA
tgaaaagcaggccacggaac

SEQ ID NO: 11243 - DNA, 20 bp, synthetic construct
  source 1..20: mol_type = other DNA
gcaacatgcgctgctgcagg

SEQ ID NO: 11244 - DNA, 20 bp, synthetic construct
  source 1..20: mol_type = other DNA
ctgcagtaatgccagttccg

SEQ ID NO: 11245 - DNA, 20 bp, synthetic construct
  source 1..20: mol_type = other DNA
attctactcccaggcagctg

SEQ ID NO: 11246 - DNA, 20 bp, synthetic construct
  source 1..20: mol_type = other DNA
ggcgaggggtagaagagcac

SEQ ID NO: 11247 - DNA, 20 bp, synthetic construct
  source 1..20: mol_type = other DNA
gcgaggggtagaagagcaca

SEQ ID NO: 11248 - DNA, 20 bp, synthetic construct
  source 1..20: mol_type = other DNA
gccttggagggtgaaggcga

SEQ ID NO: 11249 - DNA, 20 bp, synthetic construct
  source 1..20: mol_type = other DNA
tctgcctgcattctactccc

SEQ ID NO: 11250 - DNA, 20 bp, synthetic construct
  source 1..20: mol_type = other DNA
gctgcctgggagtagaatgc

SEQ ID NO: 11251 - DNA, 20 bp, synthetic construct
  source 1..20: mol_type = other DNA
cgaggggtagaagagcacag

SEQ ID NO: 11252 - DNA, 20 bp, synthetic construct
  source 1..20: mol_type = other DNA
ggagtagaatgcaggcagaa

SEQ ID NO: 11253 - DNA, 20 bp, synthetic construct
  source 1..20: mol_type = other DNA
ccttggagggtgaaggcgag

SEQ ID NO: 11254 - DNA, 20 bp, synthetic construct
  source 1..20: mol_type = other DNA
ggcccagcaggacactctga

SEQ ID NO: 11255 - DNA, 20 bp, synthetic construct
  source 1..20: mol_type = other DNA
aaaagaccctttactcactg

SEQ ID NO: 11256 - DNA, 20 bp, synthetic construct
  source 1..20: mol_type = other DNA
gggagcaagatcctcagctc

SEQ ID NO: 11257 - DNA, 20 bp, synthetic construct
  source 1..20: mol_type = other DNA
gagaaggaatttccagatgc

SEQ ID NO: 11258 - DNA, 20 bp, synthetic construct
  source 1..20: mol_type = other DNA
ctggtagtttagagaagcta

SEQ ID NO: 11259 - DNA, 20 bp, synthetic construct
  source 1..20: mol_type = other DNA
agagagacaactcctgcatc

SEQ ID NO: 11260 - DNA, 20 bp, synthetic construct
  source 1..20: mol_type = other DNA
agaagctagggtctggatga

SEQ ID NO: 11261 - DNA, 20 bp, synthetic construct
  source 1..20: mol_type = other DNA
ctggaaattccttctctcag

SEQ ID NO: 11262 - DNA, 20 bp, synthetic construct
  source 1..20: mol_type = other DNA
ctagggtctggatgaaggca

SEQ ID NO: 11263 - DNA, 20 bp, synthetic construct
  source 1..20: mol_type = other DNA
agtttagagaagctagggtc

SEQ ID NO: 11264 - DNA, 20 bp, synthetic construct
  source 1..20: mol_type = other DNA
caccagcagcccctgagaga

SEQ ID NO: 11265 - DNA, 20 bp, synthetic construct
  source 1..20: mol_type = other DNA
ttctctcaggggctgctggt

SEQ ID NO: 11266 - DNA, 20 bp, synthetic construct
  source 1..20: mol_type = other DNA
gctagggtctggatgaaggc

SEQ ID NO: 11267 - DNA, 20 bp, synthetic construct
  source 1..20: mol_type = other DNA
tctggaaattccttctctca

SEQ ID NO: 11268 - DNA, 20 bp, synthetic construct
  source 1..20: mol_type = other DNA
atctggaaattccttctctc

SEQ ID NO: 11269 - DNA, 20 bp, synthetic construct
  source 1..20: mol_type = other DNA
ttccttctctcaggggctgc

SEQ ID NO: 11270 - DNA, 20 bp, synthetic construct
  source 1..20: mol_type = other DNA
ggcccggtccgcgacactgg

SEQ ID NO: 11271 - DNA, 20 bp, synthetic construct
  source 1..20: mol_type = other DNA
ccagtcagccggcgtcccca

SEQ ID NO: 11272 - DNA, 20 bp, synthetic construct
  source 1..20: mol_type = other DNA
gtgtcgcggaccgggccatg

SEQ ID NO: 11273 - DNA, 20 bp, synthetic construct
  source 1..20: mol_type = other DNA
tggggacgccggctgactgg

SEQ ID NO: 11274 - DNA, 20 bp, synthetic construct
  source 1..20: mol_type = other DNA
gacgccggctgactggtggg

SEQ ID NO: 11275 - DNA, 20 bp, synthetic construct
  source 1..20: mol_type = other DNA
agtgtcgcggaccgggccat

SEQ ID NO: 11276 - DNA, 20 bp, synthetic construct
  source 1..20: mol_type = other DNA
ggggacgccggctgactggt

SEQ ID NO: 11277 - DNA, 20 bp, synthetic construct
  source 1..20: mol_type = other DNA
catggcccggtccgcgacac

SEQ ID NO: 11278 - DNA, 20 bp, synthetic construct
  source 1..20: mol_type = other DNA
gccggctgactggtgggcgg

SEQ ID NO: 11279 - DNA, 20 bp, synthetic construct
  source 1..20: mol_type = other DNA
gccgccgcccaccagtcagc

SEQ ID NO: 11280 - DNA, 20 bp, synthetic construct
  source 1..20: mol_type = other DNA
cagcaggcacagcgccaggg

SEQ ID NO: 11281 - DNA, 20 bp, synthetic construct
  source 1..20: mol_type = other DNA
caggcacagcgccagggcgg

SEQ ID NO: 11282 - DNA, 20 bp, synthetic construct
  source 1..20: mol_type = other DNA
ccagcagcaggcacagcgcc

SEQ ID NO: 11283 - DNA, 20 bp, synthetic construct
  source 1..20: mol_type = other DNA
cagcagcaggcacagcgcca

SEQ ID NO: 11284 - DNA, 20 bp, synthetic construct
  source 1..20: mol_type = other DNA
ggaccgggccatggggacgc

SEQ ID NO: 11285 - DNA, 20 bp, synthetic construct
  source 1..20: mol_type = other DNA
ttaagagttaggttgcttgg

SEQ ID NO: 11286 - DNA, 20 bp, synthetic construct
  source 1..20: mol_type = other DNA
gtcccactgatggagaagct

SEQ ID NO: 11287 - DNA, 20 bp, synthetic construct
  source 1..20: mol_type = other DNA
aggtcatggtgtcagaagtt

SEQ ID NO: 11288 - DNA, 20 bp, synthetic construct
  source 1..20: mol_type = other DNA
gttgcttggaggagtttctg

SEQ ID NO: 11289 - DNA, 20 bp, synthetic construct
  source 1..20: mol_type = other DNA
tatcccagcttctccatcag

SEQ ID NO: 11290 - DNA, 20 bp, synthetic construct
  source 1..20: mol_type = other DNA
actggagctgcaggtcccac

SEQ ID NO: 11291 - DNA, 20 bp, synthetic construct
  source 1..20: mol_type = other DNA
caggtcatggtgtcagaagt

SEQ ID NO: 11292 - DNA, 20 bp, synthetic construct
  source 1..20: mol_type = other DNA
gaggagtttctgaggtttgg

SEQ ID NO: 11293 - DNA, 20 bp, synthetic construct
  source 1..20: mol_type = other DNA
gatatccacagaagctggtc

SEQ ID NO: 11294 - DNA, 20 bp, synthetic construct
  source 1..20: mol_type = other DNA
gctggtctggcagcaggtca

SEQ ID NO: 11295 - DNA, 20 bp, synthetic construct
  source 1..20: mol_type = other DNA
cagaagttgggttaagagtt

SEQ ID NO: 11296 - DNA, 20 bp, synthetic construct
  source 1..20: mol_type = other DNA
acagaagctggtctggcagc

SEQ ID NO: 11297 - DNA, 20 bp, synthetic construct
  source 1..20: mol_type = other DNA
gggttaagagttaggttgct

SEQ ID NO: 11298 - DNA, 20 bp, synthetic construct
  source 1..20: mol_type = other DNA
gctgggatatccacagaagc

SEQ ID NO: 11299 - DNA, 20 bp, synthetic construct
  source 1..20: mol_type = other DNA
cagctggtctcacagcagct

SEQ ID NO: 11300 - DNA, 20 bp, synthetic construct
  source 1..20: mol_type = other DNA
gtaaagttgagcgcgccgtg

SEQ ID NO: 11301 - DNA, 20 bp, synthetic construct
  source 1..20: mol_type = other DNA
aggtaaagttgagcgcgccg

SEQ ID NO: 11302 - DNA, 20 bp, synthetic construct
  source 1..20: mol_type = other DNA
ggcgcgctcaactttacctg

SEQ ID NO: 11303 - DNA, 20 bp, synthetic construct
  source 1..20: mol_type = other DNA
ggctccgcttacccggccgg

SEQ ID NO: 11304 - DNA, 20 bp, synthetic construct
  source 1..20: mol_type = other DNA
gctcgcggagtctggaccgc

SEQ ID NO: 11305 - DNA, 20 bp, synthetic construct
  source 1..20: mol_type = other DNA
ggtccagactccgcgagctc

SEQ ID NO: 11306 - DNA, 20 bp, synthetic construct
  source 1..20: mol_type = other DNA
cgggcgcgggagggtcgaag

SEQ ID NO: 11307 - DNA, 20 bp, synthetic construct
  source 1..20: mol_type = other DNA
cccggagaagaagctgcgcg

SEQ ID NO: 11308 - DNA, 20 bp, synthetic construct
  source 1..20: mol_type = other DNA
gtccagactccgcgagctcc

SEQ ID NO: 11309 - DNA, 20 bp, synthetic construct
  source 1..20: mol_type = other DNA
taagcggagcccggagctcg

SEQ ID NO: 11310 - DNA, 20 bp, synthetic construct
  source 1..20: mol_type = other DNA
cccggccggcggcctcctcg

SEQ ID NO: 11311 - DNA, 20 bp, synthetic construct
  source 1..20: mol_type = other DNA
cgccgcgctccgccccgagg

SEQ ID NO: 11312 - DNA, 20 bp, synthetic construct
  source 1..20: mol_type = other DNA
ggccggcggcctcctcgggg

SEQ ID NO: 11313 - DNA, 20 bp, synthetic construct
  source 1..20: mol_type = other DNA
tgagcgcgccgtggggccgg

SEQ ID NO: 11314 - DNA, 20 bp, synthetic construct
  source 1..20: mol_type = other DNA
accccccacccccggcccca

SEQ ID NO: 11315 - DNA, 20 bp, synthetic construct
  source 1..20: mol_type = other DNA
agccctcctacctgcgcacg

SEQ ID NO: 11316 - DNA, 20 bp, synthetic construct
  source 1..20: mol_type = other DNA
cttcctgagccgccacatcc

SEQ ID NO: 11317 - DNA, 20 bp, synthetic construct
  source 1..20: mol_type = other DNA
gcggcaccacgtgcgcaggt

SEQ ID NO: 11318 - DNA, 20 bp, synthetic construct
  source 1..20: mol_type = other DNA
gcaccacgtgcgcaggtagg

SEQ ID NO: 11319 - DNA, 20 bp, synthetic construct
  source 1..20: mol_type = other DNA
gagccatggctgcaggcact

SEQ ID NO: 11320 - DNA, 20 bp, synthetic construct
  source 1..20: mol_type = other DNA
accgagctggccgggagcca

SEQ ID NO: 11321 - DNA, 20 bp, synthetic construct
  source 1..20: mol_type = other DNA
agcggcggcaccacgtgcgc

SEQ ID NO: 11322 - DNA, 20 bp, synthetic construct
  source 1..20: mol_type = other DNA
cggcgggacccggcactgca

SEQ ID NO: 11323 - DNA, 20 bp, synthetic construct
  source 1..20: mol_type = other DNA
gggcgagcgggaggcagcag

SEQ ID NO: 11324 - DNA, 20 bp, synthetic construct
  source 1..20: mol_type = other DNA
ggagggctgccgggatgtgg

SEQ ID NO: 11325 - DNA, 20 bp, synthetic construct
  source 1..20: mol_type = other DNA
caccacgtgcgcaggtagga

SEQ ID NO: 11326 - DNA, 20 bp, synthetic construct
  source 1..20: mol_type = other DNA
gtaggagggctgccgggatg

SEQ ID NO: 11327 - DNA, 20 bp, synthetic construct
  source 1..20: mol_type = other DNA
ctgggttcagggcgagcggg

SEQ ID NO: 11328 - DNA, 20 bp, synthetic construct
  source 1..20: mol_type = other DNA
cgagcgggaggcagcagcgg

SEQ ID NO: 11329 - DNA, 20 bp, synthetic construct
  source 1..20: mol_type = other DNA
ggagccatggctgcaggcac

SEQ ID NO: 11330 - DNA, 20 bp, synthetic construct
  source 1..20: mol_type = other DNA
cagccatggacaatcaggtg

SEQ ID NO: 11331 - DNA, 20 bp, synthetic construct
  source 1..20: mol_type = other DNA
atggacaatcaggtgaggag

SEQ ID NO: 11332 - DNA, 20 bp, synthetic construct
  source 1..20: mol_type = other DNA
cggtggtttccggttccgcg

SEQ ID NO: 11333 - DNA, 20 bp, synthetic construct
  source 1..20: mol_type = other DNA
ccgtgatcggtgcgcgaccc

SEQ ID NO: 11334 - DNA, 20 bp, synthetic construct
  source 1..20: mol_type = other DNA
gctcctcacctgattgtcca

SEQ ID NO: 11335 - DNA, 20 bp, synthetic construct
  source 1..20: mol_type = other DNA
ccggaaaccaccgccagccc

SEQ ID NO: 11336 - DNA, 20 bp, synthetic construct
  source 1..20: mol_type = other DNA
gagcgggcggccgggatcgg

SEQ ID NO: 11337 - DNA, 20 bp, synthetic construct
  source 1..20: mol_type = other DNA
ggcggtggtttccggttccg

SEQ ID NO: 11338 - DNA, 20 bp, synthetic construct
  source 1..20: mol_type = other DNA
gggccgggcgggctgcgcag

SEQ ID NO: 11339 - DNA, 20 bp, synthetic construct
  source 1..20: mol_type = other DNA
gcggtggtttccggttccgc

SEQ ID NO: 11340 - DNA, 20 bp, synthetic construct
  source 1..20: mol_type = other DNA
cggtgcgcgacccgggctgg

SEQ ID NO: 11341 - DNA, 20 bp, synthetic construct
  source 1..20: mol_type = other DNA
tgcgcgacccgggctggcgg

SEQ ID NO: 11342 - DNA, 20 bp, synthetic construct
  source 1..20: mol_type = other DNA
gcccgccagccccgcggaac

SEQ ID NO: 11343 - DNA, 20 bp, synthetic construct
  source 1..20: mol_type = other DNA
cgggcggccgggatcggcgg

SEQ ID NO: 11344 - DNA, 20 bp, synthetic construct
  source 1..20: mol_type = other DNA
ccgctcgcccgccagccccg

SEQ ID NO: 11345 - DNA, 20 bp, synthetic construct
  source 1..20: mol_type = other DNA
ggcctggccgtggacctgtg

SEQ ID NO: 11346 - DNA, 20 bp, synthetic construct
  source 1..20: mol_type = other DNA
gcgcagagcgtcgtccaggt

SEQ ID NO: 11347 - DNA, 20 bp, synthetic construct
  source 1..20: mol_type = other DNA
cgcagagcgtcgtccaggtg

SEQ ID NO: 11348 - DNA, 20 bp, synthetic construct
  source 1..20: mol_type = other DNA
ggcggcgaaggggtcgagca

SEQ ID NO: 11349 - DNA, 20 bp, synthetic construct
  source 1..20: mol_type = other DNA
cgcgcagagcgtcgtccagg

SEQ ID NO: 11350 - DNA, 20 bp, synthetic construct
  source 1..20: mol_type = other DNA
gcgcgcgcagagcgtcgtcc

SEQ ID NO: 11351 - DNA, 20 bp, synthetic construct
  source 1..20: mol_type = other DNA
gcagctctcgcggcgcacgg

SEQ ID NO: 11352 - DNA, 20 bp, synthetic construct
  source 1..20: mol_type = other DNA
aggcgcggcagggcatcgcg

SEQ ID NO: 11353 - DNA, 20 bp, synthetic construct
  source 1..20: mol_type = other DNA
gcaggcgcggcagggcatcg

SEQ ID NO: 11354 - DNA, 20 bp, synthetic construct
  source 1..20: mol_type = other DNA
gccaagcgcgcggcgagcgc

SEQ ID NO: 11355 - DNA, 20 bp, synthetic construct
  source 1..20: mol_type = other DNA
cacggggccggccaagcgcg

SEQ ID NO: 11356 - DNA, 20 bp, synthetic construct
  source 1..20: mol_type = other DNA
gctgcagctctcgcggcgca

SEQ ID NO: 11357 - DNA, 20 bp, synthetic construct
  source 1..20: mol_type = other DNA
cggcgcagctgcagctctcg

SEQ ID NO: 11358 - DNA, 20 bp, synthetic construct
  source 1..20: mol_type = other DNA
gtccaggtggggcgcgagcg

SEQ ID NO: 11359 - DNA, 20 bp, synthetic construct
  source 1..20: mol_type = other DNA
cgcggcgcacggcggcgaag

SEQ ID NO: 11360 - DNA, 20 bp, synthetic construct
  source 1..20: mol_type = other DNA
cccgttcaccaggtcctggg

SEQ ID NO: 11361 - DNA, 20 bp, synthetic construct
  source 1..20: mol_type = other DNA
gccaggagggtgtgtggcgt

SEQ ID NO: 11362 - DNA, 20 bp, synthetic construct
  source 1..20: mol_type = other DNA
ggtacccgttcaccaggtcc

SEQ ID NO: 11363 - DNA, 20 bp, synthetic construct
  source 1..20: mol_type = other DNA
tgtgtggcgtgggtgctgcg

SEQ ID NO: 11364 - DNA, 20 bp, synthetic construct
  source 1..20: mol_type = other DNA
ggcacctgcaaggtgaggcg

SEQ ID NO: 11365 - DNA, 20 bp, synthetic construct
  source 1..20: mol_type = other DNA
gtacccgttcaccaggtcct

SEQ ID NO: 11366 - DNA, 20 bp, synthetic construct
  source 1..20: mol_type = other DNA
ccgcccaggacctggtgaac

SEQ ID NO: 11367 - DNA, 20 bp, synthetic construct
  source 1..20: mol_type = other DNA
tgggtgctgcggggccgtca

SEQ ID NO: 11368 - DNA, 20 bp, synthetic construct
  source 1..20: mol_type = other DNA
gcgtcccgcaggcaccctga

SEQ ID NO: 11369 - DNA, 20 bp, synthetic construct
  source 1..20: mol_type = other DNA
atgggggcacctgcaaggtg

SEQ ID NO: 11370 - DNA, 20 bp, synthetic construct
  source 1..20: mol_type = other DNA
tggctggcccgcccaggacc

SEQ ID NO: 11371 - DNA, 20 bp, synthetic construct
  source 1..20: mol_type = other DNA
cagccaggtgagcgtcccgc

SEQ ID NO: 11372 - DNA, 20 bp, synthetic construct
  source 1..20: mol_type = other DNA
cggggccgtcagggtgcctg

SEQ ID NO: 11373 - DNA, 20 bp, synthetic construct
  source 1..20: mol_type = other DNA
ggtgtgtggcgtgggtgctg

SEQ ID NO: 11374 - DNA, 20 bp, synthetic construct
  source 1..20: mol_type = other DNA
ggggccgtcagggtgcctgc

SEQ ID NO: 11375 - DNA, 20 bp, synthetic construct
  source 1..20: mol_type = other DNA
gccgccccgcgcctcactcg

SEQ ID NO: 11376 - DNA, 20 bp, synthetic construct
  source 1..20: mol_type = other DNA
gcggcgcgtccccctcgccg

SEQ ID NO: 11377 - DNA, 20 bp, synthetic construct
  source 1..20: mol_type = other DNA
acaagatggcggcggcgtgt

SEQ ID NO: 11378 - DNA, 20 bp, synthetic construct
  source 1..20: mol_type = other DNA
gggcgcccgcgagtgaggcg

SEQ ID NO: 11379 - DNA, 20 bp, synthetic construct
  source 1..20: mol_type = other DNA
ggaggtaaacaagatggcgg

SEQ ID NO: 11380 - DNA, 20 bp, synthetic construct
  source 1..20: mol_type = other DNA
ggcgtgtcgggcgcggaagg

SEQ ID NO: 11381 - DNA, 20 bp, synthetic construct
  source 1..20: mol_type = other DNA
gcccggggcgcccgcgagtg

SEQ ID NO: 11382 - DNA, 20 bp, synthetic construct
  source 1..20: mol_type = other DNA
ggcgcccgcgagtgaggcgc

SEQ ID NO: 11383 - DNA, 20 bp, synthetic construct
  source 1..20: mol_type = other DNA
gcgcccgcgagtgaggcgcg

SEQ ID NO: 11384 - DNA, 20 bp, synthetic construct
  source 1..20: mol_type = other DNA
accccccggcccggagcctg

SEQ ID NO: 11385 - DNA, 20 bp, synthetic construct
  source 1..20: mol_type = other DNA
tggcggcggcgtgtcgggcg

SEQ ID NO: 11386 - DNA, 20 bp, synthetic construct
  source 1..20: mol_type = other DNA
gagggaggtaaacaagatgg

SEQ ID NO: 11387 - DNA, 20 bp, synthetic construct
  source 1..20: mol_type = other DNA
ggcggcgaagggagcgcggg

SEQ ID NO: 11388 - DNA, 20 bp, synthetic construct
  source 1..20: mol_type = other DNA
ggggagggaggtaaacaaga

SEQ ID NO: 11389 - DNA, 20 bp, synthetic construct
  source 1..20: mol_type = other DNA
agtgaggcgcggggcggcga

SEQ ID NO: 11390 - DNA, 20 bp, synthetic construct
  source 1..20: mol_type = other DNA
gggcttatagtcttccgcgt

SEQ ID NO: 11391 - DNA, 20 bp, synthetic construct
  source 1..20: mol_type = other DNA
cttatagtcttccgcgtcgg

SEQ ID NO: 11392 - DNA, 20 bp, synthetic construct
  source 1..20: mol_type = other DNA
cgttcggtcgtcgcccgctg

SEQ ID NO: 11393 - DNA, 20 bp, synthetic construct
  source 1..20: mol_type = other DNA
caggcgaggcgccaccgacg

SEQ ID NO: 11394 - DNA, 20 bp, synthetic construct
  source 1..20: mol_type = other DNA
gcgcccgaggatcctccacg

SEQ ID NO: 11395 - DNA, 20 bp, synthetic construct
  source 1..20: mol_type = other DNA
cgaacgcccccgggaacacc

SEQ ID NO: 11396 - DNA, 20 bp, synthetic construct
  source 1..20: mol_type = other DNA
ccgaacgcccccgggaacac

SEQ ID NO: 11397 - DNA, 20 bp, synthetic construct
  source 1..20: mol_type = other DNA
cggaagactataagccccag

SEQ ID NO: 11398 - DNA, 20 bp, synthetic construct
  source 1..20: mol_type = other DNA
ccgcgcccgaggatcctcca

SEQ ID NO: 11399 - DNA, 20 bp, synthetic construct
  source 1..20: mol_type = other DNA
tcggggcccggtgttcccgg

SEQ ID NO: 11400 - DNA, 20 bp, synthetic construct
  source 1..20: mol_type = other DNA
ggaacaccgggccccgagct

SEQ ID NO: 11401 - DNA, 20 bp, synthetic construct
  source 1..20: mol_type = other DNA
ggcgacgaccgaacgccccc

SEQ ID NO: 11402 - DNA, 20 bp, synthetic construct
  source 1..20: mol_type = other DNA
tcgggcgcgggaccgagctc

SEQ ID NO: 11403 - DNA, 20 bp, synthetic construct
  source 1..20: mol_type = other DNA
ctcggggcccggtgttcccg

SEQ ID NO: 11404 - DNA, 20 bp, synthetic construct
  source 1..20: mol_type = other DNA
ggaagactataagccccagc

SEQ ID NO: 11405 - DNA, 20 bp, synthetic construct
  source 1..20: mol_type = other DNA
gctcttccgacatgaggcag

SEQ ID NO: 11406 - DNA, 20 bp, synthetic construct
  source 1..20: mol_type = other DNA
gcggcagctcttccgacatg

SEQ ID NO: 11407 - DNA, 20 bp, synthetic construct
  source 1..20: mol_type = other DNA
gcgcgtctgtcagtgacagc

SEQ ID NO: 11408 - DNA, 20 bp, synthetic construct
  source 1..20: mol_type = other DNA
ggaccgagcgcgtggaacca

SEQ ID NO: 11409 - DNA, 20 bp, synthetic construct
  source 1..20: mol_type = other DNA
ccgcggccgctgcctcatgt

SEQ ID NO: 11410 - DNA, 20 bp, synthetic construct
  source 1..20: mol_type = other DNA
agcgcgtggaaccacggacg

SEQ ID NO: 11411 - DNA, 20 bp, synthetic construct
  source 1..20: mol_type = other DNA
gcgcgtggaaccacggacgc

SEQ ID NO: 11412 - DNA, 20 bp, synthetic construct
  source 1..20: mol_type = other DNA
ctgtcccgggaccgagcgcg

SEQ ID NO: 11413 - DNA, 20 bp, synthetic construct
  source 1..20: mol_type = other DNA
gacatgaggcagcggccgcg

SEQ ID NO: 11414 - DNA, 20 bp, synthetic construct
  source 1..20: mol_type = other DNA
gcccgccgccgtgtcccccg

SEQ ID NO: 11415 - DNA, 20 bp, synthetic construct
  source 1..20: mol_type = other DNA
gcaggggccggagatggtgg

SEQ ID NO: 11416 - DNA, 20 bp, synthetic construct
  source 1..20: mol_type = other DNA
ggggcaggggccggagatgg

SEQ ID NO: 11417 - DNA, 20 bp, synthetic construct
  source 1..20: mol_type = other DNA
acatgaggcagcggccgcgg

SEQ ID NO: 11418 - DNA, 20 bp, synthetic construct
  source 1..20: mol_type = other DNA
agcggccgcgggggacacgg

SEQ ID NO: 11419 - DNA, 20 bp, synthetic construct
  source 1..20: mol_type = other DNA
ggacacggcggcgggcgcgg

SEQ ID NO: 11420 - DNA, 20 bp, synthetic construct
  source 1..20: mol_type = other DNA
ccggtacagagccctctgcg

SEQ ID NO: 11421 - DNA, 20 bp, synthetic construct
  source 1..20: mol_type = other DNA
gctgtcgttgtccacaggaa

SEQ ID NO: 11422 - DNA, 20 bp, synthetic construct
  source 1..20: mol_type = other DNA
cctgtggacaacgacagctg

SEQ ID NO: 11423 - DNA, 20 bp, synthetic construct
  source 1..20: mol_type = other DNA
ggcctcgcagccccgatcgg

SEQ ID NO: 11424 - DNA, 20 bp, synthetic construct
  source 1..20: mol_type = other DNA
agctgtcgttgtccacagga

SEQ ID NO: 11425 - DNA, 20 bp, synthetic construct
  source 1..20: mol_type = other DNA
ggacaacgacagctgaggcc

SEQ ID NO: 11426 - DNA, 20 bp, synthetic construct
  source 1..20: mol_type = other DNA
tggacaacgacagctgaggc

SEQ ID NO: 11427 - DNA, 20 bp, synthetic construct
  source 1..20: mol_type = other DNA
cctcagctgtcgttgtccac

SEQ ID NO: 11428 - DNA, 20 bp, synthetic construct
  source 1..20: mol_type = other DNA
gacctggcggccgccgatcg

SEQ ID NO: 11429 - DNA, 20 bp, synthetic construct
  source 1..20: mol_type = other DNA
cggcggctccagggacctgg

SEQ ID NO: 11430 - DNA, 20 bp, synthetic construct
  source 1..20: mol_type = other DNA
aggcggcggctccagggacc

SEQ ID NO: 11431 - DNA, 20 bp, synthetic construct
  source 1..20: mol_type = other DNA
gcggggaggcggcggctcca

SEQ ID NO: 11432 - DNA, 20 bp, synthetic construct
  source 1..20: mol_type = other DNA
gacagctgaggccgggagcg

SEQ ID NO: 11433 - DNA, 20 bp, synthetic construct
  source 1..20: mol_type = other DNA
agctgaggccgggagcgggg

SEQ ID NO: 11434 - DNA, 20 bp, synthetic construct
  source 1..20: mol_type = other DNA
atcggcggccgccaggtccc

SEQ ID NO: 11435 - DNA, 20 bp, synthetic construct
  source 1..20: mol_type = other DNA
acgcgtcattgtgttacctg

SEQ ID NO: 11436 - DNA, 20 bp, synthetic construct
  source 1..20: mol_type = other DNA
aaaaaaaccagcctagctcg

SEQ ID NO: 11437 - DNA, 20 bp, synthetic construct
  source 1..20: mol_type = other DNA
ccggctctcggagaaggacc

SEQ ID NO: 11438 - DNA, 20 bp, synthetic construct
  source 1..20: mol_type = other DNA
aaccagcctagctcgcgggc

SEQ ID NO: 11439 - DNA, 20 bp, synthetic construct
  source 1..20: mol_type = other DNA
gtcattgtgttacctgcggc

SEQ ID NO: 11440 - DNA, 20 bp, synthetic construct
  source 1..20: mol_type = other DNA
aaggacccggagagcccgtc

SEQ ID NO: 11441 - DNA, 20 bp, synthetic construct
  source 1..20: mol_type = other DNA
aaaaaaccagcctagctcgc

SEQ ID NO: 11442 - DNA, 20 bp, synthetic construct
  source 1..20: mol_type = other DNA
gtccttctccgagagccggg

SEQ ID NO: 11443 - DNA, 20 bp, synthetic construct
  source 1..20: mol_type = other DNA
gcccgcccggctctcggaga

SEQ ID NO: 11444 - DNA, 20 bp, synthetic construct
  source 1..20: mol_type = other DNA
ccgggtccttctccgagagc

SEQ ID NO: 11445 - DNA, 20 bp, synthetic construct
  source 1..20: mol_type = other DNA
aaggaaagaaagccgggagg

SEQ ID NO: 11446 - DNA, 20 bp, synthetic construct
  source 1..20: mol_type = other DNA
aagaaggggagcgcgagaga

SEQ ID NO: 11447 - DNA, 20 bp, synthetic construct
  source 1..20: mol_type = other DNA
tccttctccgagagccgggc

SEQ ID NO: 11448 - DNA, 20 bp, synthetic construct
  source 1..20: mol_type = other DNA
agccgggaggtggaagagga

SEQ ID NO: 11449 - DNA, 20 bp, synthetic construct
  source 1..20: mol_type = other DNA
aagccgggaggtggaagagg

SEQ ID NO: 11450 - DNA, 20 bp, synthetic construct
  source 1..20: mol_type = other DNA
gggtaggcgacccggacgga

SEQ ID NO: 11451 - DNA, 20 bp, synthetic construct
  source 1..20: mol_type = other DNA
cagcgcgaaatcttgccgag

SEQ ID NO: 11452 - DNA, 20 bp, synthetic construct
  source 1..20: mol_type = other DNA
acctcgccggccctccgtcc

SEQ ID NO: 11453 - DNA, 20 bp, synthetic construct
  source 1..20: mol_type = other DNA
tgggtaggcgacccggacgg

SEQ ID NO: 11454 - DNA, 20 bp, synthetic construct
  source 1..20: mol_type = other DNA
gcctcctcttcccttcgctc

SEQ ID NO: 11455 - DNA, 20 bp, synthetic construct
  source 1..20: mol_type = other DNA
ggaggccgcaaggagccaag

SEQ ID NO: 11456 - DNA, 20 bp, synthetic construct
  source 1..20: mol_type = other DNA
gaggccgcaaggagccaagc

SEQ ID NO: 11457 - DNA, 20 bp, synthetic construct
  source 1..20: mol_type = other DNA
tgctgggtaggcgacccgga

SEQ ID NO: 11458 - DNA, 20 bp, synthetic construct
  source 1..20: mol_type = other DNA
gccggagcgaagggaagagg

SEQ ID NO: 11459 - DNA, 20 bp, synthetic construct
  source 1..20: mol_type = other DNA
cacctcgccggccctccgtc

SEQ ID NO: 11460 - DNA, 20 bp, synthetic construct
  source 1..20: mol_type = other DNA
gtttcaccgggccggagcga

SEQ ID NO: 11461 - DNA, 20 bp, synthetic construct
  source 1..20: mol_type = other DNA
gtgatgcgagctgcgcctct

SEQ ID NO: 11462 - DNA, 20 bp, synthetic construct
  source 1..20: mol_type = other DNA
cggagggccggcgaggtgcg

SEQ ID NO: 11463 - DNA, 20 bp, synthetic construct
  source 1..20: mol_type = other DNA
caccagaccccgcacctcgc

SEQ ID NO: 11464 - DNA, 20 bp, synthetic construct
  source 1..20: mol_type = other DNA
gaagggaagaggaggccgca

SEQ ID NO: 11465 - DNA, 20 bp, synthetic construct
  source 1..20: mol_type = other DNA
ggagtctgtggactgaacgg

SEQ ID NO: 11466 - DNA, 20 bp, synthetic construct
  source 1..20: mol_type = other DNA
tgagccataaccggagtctg

SEQ ID NO: 11467 - DNA, 20 bp, synthetic construct
  source 1..20: mol_type = other DNA
ggcgtcccaggcggttgcaa

SEQ ID NO: 11468 - DNA, 20 bp, synthetic construct
  source 1..20: mol_type = other DNA
ctagaagcggaagtagttgt

SEQ ID NO: 11469 - DNA, 20 bp, synthetic construct
  source 1..20: mol_type = other DNA
aacctgcacagaccactcgg

SEQ ID NO: 11470 - DNA, 20 bp, synthetic construct
  source 1..20: mol_type = other DNA
actgaacggcgggagtctat

SEQ ID NO: 11471 - DNA, 20 bp, synthetic construct
  source 1..20: mol_type = other DNA
gagtggtctgtgcaggttcg

SEQ ID NO: 11472 - DNA, 20 bp, synthetic construct
  source 1..20: mol_type = other DNA
gcgaacctgcacagaccact

SEQ ID NO: 11473 - DNA, 20 bp, synthetic construct
  source 1..20: mol_type = other DNA
gcaggttcgcgggtcgctgg

SEQ ID NO: 11474 - DNA, 20 bp, synthetic construct
  source 1..20: mol_type = other DNA
ccactcggcggcgtcccagg

SEQ ID NO: 11475 - DNA, 20 bp, synthetic construct
  source 1..20: mol_type = other DNA
acttaccatatctccgctcc

SEQ ID NO: 11476 - DNA, 20 bp, synthetic construct
  source 1..20: mol_type = other DNA
ggttcgcgggtcgctggcgg

SEQ ID NO: 11477 - DNA, 20 bp, synthetic construct
  source 1..20: mol_type = other DNA
aggttcgcgggtcgctggcg

SEQ ID NO: 11478 - DNA, 20 bp, synthetic construct
  source 1..20: mol_type = other DNA
ggggtcgtgagggagtgcgc

SEQ ID NO: 11479 - DNA, 20 bp, synthetic construct
  source 1..20: mol_type = other DNA
ccgcctgggacgccgccgag

SEQ ID NO: 11480 - DNA, 20 bp, synthetic construct
  source 1..20: mol_type = other DNA
cctgaacttgaactcgaacc

SEQ ID NO: 11481 - DNA, 20 bp, synthetic construct
  source 1..20: mol_type = other DNA
gctgagtcaggagccacagt

SEQ ID NO: 11482 - DNA, 20 bp, synthetic construct
  source 1..20: mol_type = other DNA
tgaactcgaacccggatggg

SEQ ID NO: 11483 - DNA, 20 bp, synthetic construct
  source 1..20: mol_type = other DNA
ggccggaccctggcaggtga

SEQ ID NO: 11484 - DNA, 20 bp, synthetic construct
  source 1..20: mol_type = other DNA
gaactcgaacccggatggga

SEQ ID NO: 11485 - DNA, 20 bp, synthetic construct
  source 1..20: mol_type = other DNA
ccgggcaggcaggtgtaggg

SEQ ID NO: 11486 - DNA, 20 bp, synthetic construct
  source 1..20: mol_type = other DNA
gtgtagggtggagcccactg

SEQ ID NO: 11487 - DNA, 20 bp, synthetic construct
  source 1..20: mol_type = other DNA
acttgaactcgaacccggat

SEQ ID NO: 11488 - DNA, 20 bp, synthetic construct
  source 1..20: mol_type = other DNA
aactcgaacccggatgggag

SEQ ID NO: 11489 - DNA, 20 bp, synthetic construct
  source 1..20: mol_type = other DNA
gccctctccccactccgggc

SEQ ID NO: 11490 - DNA, 20 bp, synthetic construct
  source 1..20: mol_type = other DNA
cctgctgccttcacctgcca

SEQ ID NO: 11491 - DNA, 20 bp, synthetic construct
  source 1..20: mol_type = other DNA
cactccgggcaggcaggtgt

SEQ ID NO: 11492 - DNA, 20 bp, synthetic construct
  source 1..20: mol_type = other DNA
tacacctgcctgcccggagt

SEQ ID NO: 11493 - DNA, 20 bp, synthetic construct
  source 1..20: mol_type = other DNA
cctggcaggtgaaggcagca

SEQ ID NO: 11494 - DNA, 20 bp, synthetic construct
  source 1..20: mol_type = other DNA
ggctgagtcaggagccacag

SEQ ID NO: 11495 - DNA, 20 bp, synthetic construct
  source 1..20: mol_type = other DNA
atctctccaatgtatgccgc

SEQ ID NO: 11496 - DNA, 20 bp, synthetic construct
  source 1..20: mol_type = other DNA
agaaagctggaacccaactc

SEQ ID NO: 11497 - DNA, 20 bp, synthetic construct
  source 1..20: mol_type = other DNA
ctagaacctgcggcatacat

SEQ ID NO: 11498 - DNA, 20 bp, synthetic construct
  source 1..20: mol_type = other DNA
gttctagttgctttgtaagg

SEQ ID NO: 11499 - DNA, 20 bp, synthetic construct
  source 1..20: mol_type = other DNA
tgcttacagctacagaaagc

SEQ ID NO: 11500 - DNA, 20 bp, synthetic construct
  source 1..20: mol_type = other DNA
tttgcacaatcttaggggtg

SEQ ID NO: 11501 - DNA, 20 bp, synthetic construct
  source 1..20: mol_type = other DNA
tctgtagctgtaagcattgg

SEQ ID NO: 11502 - DNA, 20 bp, synthetic construct
  source 1..20: mol_type = other DNA
ctagttgctttgtaaggagg

SEQ ID NO: 11503 - DNA, 20 bp, synthetic construct
  source 1..20: mol_type = other DNA
ctttctgtagctgtaagcat

SEQ ID NO: 11504 - DNA, 20 bp, synthetic construct
  source 1..20: mol_type = other DNA
gcttctgcaagcttccatga

SEQ ID NO: 11505 - DNA, 20 bp, synthetic construct
  source 1..20: mol_type = other DNA
ctccaaaaataatcagaagg

SEQ ID NO: 11506 - DNA, 20 bp, synthetic construct
  source 1..20: mol_type = other DNA
gttctccaaaaataatcaga

SEQ ID NO: 11507 - DNA, 20 bp, synthetic construct
  source 1..20: mol_type = other DNA
aaaagtttcaatccagagtt

SEQ ID NO: 11508 - DNA, 20 bp, synthetic construct
  source 1..20: mol_type = other DNA
ttagagtgctttctaatttc

SEQ ID NO: 11509 - DNA, 20 bp, synthetic construct
  source 1..20: mol_type = other DNA
aaaaagtttcaatccagagt

SEQ ID NO: 11510 - DNA, 20 bp, synthetic construct
  source 1..20: mol_type = other DNA
tggcgaagccgactctccgg

SEQ ID NO: 11511 - DNA, 20 bp, synthetic construct
  source 1..20: mol_type = other DNA
ccgcagcatctagatcgtcg

SEQ ID NO: 11512 - DNA, 20 bp, synthetic construct
  source 1..20: mol_type = other DNA
ccacgacgatctagatgctg

SEQ ID NO: 11513 - DNA, 20 bp, synthetic construct
  source 1..20: mol_type = other DNA
ggccgcatcccccggagagt

SEQ ID NO: 11514 - DNA, 20 bp, synthetic construct
  source 1..20: mol_type = other DNA
tcgtcgccgccgattcgtca

SEQ ID NO: 11515 - DNA, 20 bp, synthetic construct
  source 1..20: mol_type = other DNA
acaccactgccacctgcgcg

SEQ ID NO: 11516 - DNA, 20 bp, synthetic construct
  source 1..20: mol_type = other DNA
gtggcgaagccgactctccg

SEQ ID NO: 11517 - DNA, 20 bp, synthetic construct
  source 1..20: mol_type = other DNA
cctgggaggctcggaagttg

SEQ ID NO: 11518 - DNA, 20 bp, synthetic construct
  source 1..20: mol_type = other DNA
ggctcggaagttgcggccca

SEQ ID NO: 11519 - DNA, 20 bp, synthetic construct
  source 1..20: mol_type = other DNA
gggcctcgcgcaggtggcag

SEQ ID NO: 11520 - DNA, 20 bp, synthetic construct
  source 1..20: mol_type = other DNA
tggagattggccgcatcccc

SEQ ID NO: 11521 - DNA, 20 bp, synthetic construct
  source 1..20: mol_type = other DNA
ggtgtttggtgcgcgcgccg

SEQ ID NO: 11522 - DNA, 20 bp, synthetic construct
  source 1..20: mol_type = other DNA
cccgctgggcctcgcgcagg

SEQ ID NO: 11523 - DNA, 20 bp, synthetic construct
  source 1..20: mol_type = other DNA
aatgcagaccctgtgcccgc

SEQ ID NO: 11524 - DNA, 20 bp, synthetic construct
  source 1..20: mol_type = other DNA
gtggtgtttggtgcgcgcgc

SEQ ID NO: 11525 - DNA, 20 bp, synthetic construct
  source 1..20: mol_type = other DNA
gcggagatgccaactacaca

SEQ ID NO: 11526 - DNA, 20 bp, synthetic construct
  source 1..20: mol_type = other DNA
actacacacggtgagtgccc

SEQ ID NO: 11527 - DNA, 20 bp, synthetic construct
  source 1..20: mol_type = other DNA
acacgaacagtcctgcaggc

SEQ ID NO: 11528 - DNA, 20 bp, synthetic construct
  source 1..20: mol_type = other DNA
ttcttcccaggcatctccgc

SEQ ID NO: 11529 - DNA, 20 bp, synthetic construct
  source 1..20: mol_type = other DNA
ggatcgggtgtccggacgcg

SEQ ID NO: 11530 - DNA, 20 bp, synthetic construct
  source 1..20: mol_type = other DNA
acgctcaaccgagccccgcg

SEQ ID NO: 11531 - DNA, 20 bp, synthetic construct
  source 1..20: mol_type = other DNA
ctgaacacgaacagtcctgc

SEQ ID NO: 11532 - DNA, 20 bp, synthetic construct
  source 1..20: mol_type = other DNA
cacgaacagtcctgcaggca

SEQ ID NO: 11533 - DNA, 20 bp, synthetic construct
  source 1..20: mol_type = other DNA
tccagcaggtaccgacccgc

SEQ ID NO: 11534 - DNA, 20 bp, synthetic construct
  source 1..20: mol_type = other DNA
tacctgctggagcccgcgcg

SEQ ID NO: 11535 - DNA, 20 bp, synthetic construct
  source 1..20: mol_type = other DNA
cggggatctcagagtttccc

SEQ ID NO: 11536 - DNA, 20 bp, synthetic construct
  source 1..20: mol_type = other DNA
gtacctgctggagcccgcgc

SEQ ID NO: 11537 - DNA, 20 bp, synthetic construct
  source 1..20: mol_type = other DNA
ttcttgcgcgccttcttccc

SEQ ID NO: 11538 - DNA, 20 bp, synthetic construct
  source 1..20: mol_type = other DNA
gcaggcagggatgctgggat

SEQ ID NO: 11539 - DNA, 20 bp, synthetic construct
  source 1..20: mol_type = other DNA
caggcagggatgctgggatc

SEQ ID NO: 11540 - DNA, 20 bp, synthetic construct
  source 1..20: mol_type = other DNA
tccatctgtaatatggtgag

SEQ ID NO: 11541 - DNA, 20 bp, synthetic construct
  source 1..20: mol_type = other DNA
actcaccatattacagatgg

SEQ ID NO: 11542 - DNA, 20 bp, synthetic construct
  source 1..20: mol_type = other DNA
caaactgaaagccggacccc

SEQ ID NO: 11543 - DNA, 20 bp, synthetic construct
  source 1..20: mol_type = other DNA
gccactcaccatattacaga

SEQ ID NO: 11544 - DNA, 20 bp, synthetic construct
  source 1..20: mol_type = other DNA
gactgcccatggtggcgcgc

SEQ ID NO: 11545 - DNA, 20 bp, synthetic construct
  source 1..20: mol_type = other DNA
tccccgccagcgcgccacca

SEQ ID NO: 11546 - DNA, 20 bp, synthetic construct
  source 1..20: mol_type = other DNA
gtccggctttcagtttggct

SEQ ID NO: 11547 - DNA, 20 bp, synthetic construct
  source 1..20: mol_type = other DNA
ggggaaaccgggactgccca

SEQ ID NO: 11548 - DNA, 20 bp, synthetic construct
  source 1..20: mol_type = other DNA
tgcccatggtggcgcgctgg

SEQ ID NO: 11549 - DNA, 20 bp, synthetic construct
  source 1..20: mol_type = other DNA
gaaaccgggactgcccatgg

SEQ ID NO: 11550 - DNA, 20 bp, synthetic construct
  source 1..20: mol_type = other DNA
ggggaggccgggcggcagcg

SEQ ID NO: 11551 - DNA, 20 bp, synthetic construct
  source 1..20: mol_type = other DNA
gctgggagagggaggccggg

SEQ ID NO: 11552 - DNA, 20 bp, synthetic construct
  source 1..20: mol_type = other DNA
gcgctggcggggaggccggg

SEQ ID NO: 11553 - DNA, 20 bp, synthetic construct
  source 1..20: mol_type = other DNA
tcagtttggctgggagaggg

SEQ ID NO: 11554 - DNA, 20 bp, synthetic construct
  source 1..20: mol_type = other DNA
ctttcagtttggctgggaga

SEQ ID NO: 11555 - DNA, 20 bp, synthetic construct
  source 1..20: mol_type = other DNA
tgcattatcctgtagcacga

SEQ ID NO: 11556 - DNA, 20 bp, synthetic construct
  source 1..20: mol_type = other DNA
tctacacctggctccacacg

SEQ ID NO: 11557 - DNA, 20 bp, synthetic construct
  source 1..20: mol_type = other DNA
cacgcggacgagcccgcgtg

SEQ ID NO: 11558 - DNA, 20 bp, synthetic construct
  source 1..20: mol_type = other DNA
tgtggagccaggtgtagagg

SEQ ID NO: 11559 - DNA, 20 bp, synthetic construct
  source 1..20: mol_type = other DNA
acagctggctctaatttgag

SEQ ID NO: 11560 - DNA, 20 bp, synthetic construct
  source 1..20: mol_type = other DNA
attgcacattaaaaagtcaa

SEQ ID NO: 11561 - DNA, 20 bp, synthetic construct
  source 1..20: mol_type = other DNA
gtgtagaggcggagcacagc

SEQ ID NO: 11562 - DNA, 20 bp, synthetic construct
  source 1..20: mol_type = other DNA
acgagcccgcgtgtggagcc

SEQ ID NO: 11563 - DNA, 20 bp, synthetic construct
  source 1..20: mol_type = other DNA
ctacacctggctccacacgc

SEQ ID NO: 11564 - DNA, 20 bp, synthetic construct
  source 1..20: mol_type = other DNA
tggagtgaggtcatctttaa

SEQ ID NO: 11565 - DNA, 20 bp, synthetic construct
  source 1..20: mol_type = other DNA
gcgtgtggagccaggtgtag

SEQ ID NO: 11566 - DNA, 20 bp, synthetic construct
  source 1..20: mol_type = other DNA
aaagtcaagggaatggagtg

SEQ ID NO: 11567 - DNA, 20 bp, synthetic construct
  source 1..20: mol_type = other DNA
aggtcatctttaaaggcaga

SEQ ID NO: 11568 - DNA, 20 bp, synthetic construct
  source 1..20: mol_type = other DNA
cacagctggctctaatttga

SEQ ID NO: 11569 - DNA, 20 bp, synthetic construct
  source 1..20: mol_type = other DNA
gcacagctggctctaatttg

SEQ ID NO: 11570 - DNA, 20 bp, synthetic construct
  source 1..20: mol_type = other DNA
gctgctgggacgcatagtgc

SEQ ID NO: 11571 - DNA, 20 bp, synthetic construct
  source 1..20: mol_type = other DNA
ggcaggacaaggtcaccagc

SEQ ID NO: 11572 - DNA, 20 bp, synthetic construct
  source 1..20: mol_type = other DNA
actatgcgtcccagcagctt

SEQ ID NO: 11573 - DNA, 20 bp, synthetic construct
  source 1..20: mol_type = other DNA
agtaggtctggtctgtgttg

SEQ ID NO: 11574 - DNA, 20 bp, synthetic construct
  source 1..20: mol_type = other DNA
cttgcttgcaactctgcacc

SEQ ID NO: 11575 - DNA, 20 bp, synthetic construct
  source 1..20: mol_type = other DNA
aggacaaggtcaccagcagg

SEQ ID NO: 11576 - DNA, 20 bp, synthetic construct
  source 1..20: mol_type = other DNA
ctatgcgtcccagcagcttg

SEQ ID NO: 11577 - DNA, 20 bp, synthetic construct
  source 1..20: mol_type = other DNA
tggtgaccttgtcctgcctg

SEQ ID NO: 11578 - DNA, 20 bp, synthetic construct
  source 1..20: mol_type = other DNA
aggtcaccagcaggaggcag

SEQ ID NO: 11579 - DNA, 20 bp, synthetic construct
  source 1..20: mol_type = other DNA
aaggtcaccagcaggaggca

SEQ ID NO: 11580 - DNA, 20 bp, synthetic construct
  source 1..20: mol_type = other DNA
ctgacccaaagtccccaggc

SEQ ID NO: 11581 - DNA, 20 bp, synthetic construct
  source 1..20: mol_type = other DNA
ggcaaggtgctggagaagtc

SEQ ID NO: 11582 - DNA, 20 bp, synthetic construct
  source 1..20: mol_type = other DNA
gaggcaggggacgaacttca

SEQ ID NO: 11583 - DNA, 20 bp, synthetic construct
  source 1..20: mol_type = other DNA
caaagtccccaggcaggaca

SEQ ID NO: 11584 - DNA, 20 bp, synthetic construct
  source 1..20: mol_type = other DNA
gggcctgacccaaagtcccc

SEQ ID NO: 11585 - DNA, 20 bp, synthetic construct
  source 1..20: mol_type = other DNA
acgtcatctgcgacaaggtg

SEQ ID NO: 11586 - DNA, 20 bp, synthetic construct
  source 1..20: mol_type = other DNA
gcagcacgtcatctgcgaca

SEQ ID NO: 11587 - DNA, 20 bp, synthetic construct
  source 1..20: mol_type = other DNA
cacgtcatctgcgacaaggt

SEQ ID NO: 11588 - DNA, 20 bp, synthetic construct
  source 1..20: mol_type = other DNA
gcacgtcatctgcgacaagg

SEQ ID NO: 11589 - DNA, 20 bp, synthetic construct
  source 1..20: mol_type = other DNA
caagagcattgggcggacca

SEQ ID NO: 11590 - DNA, 20 bp, synthetic construct
  source 1..20: mol_type = other DNA
gcgctgtaggttgagcagct

SEQ ID NO: 11591 - DNA, 20 bp, synthetic construct
  source 1..20: mol_type = other DNA
gcattgggcggaccatggct

SEQ ID NO: 11592 - DNA, 20 bp, synthetic construct
  source 1..20: mol_type = other DNA
ccgaggctgagcaagagcat

SEQ ID NO: 11593 - DNA, 20 bp, synthetic construct
  source 1..20: mol_type = other DNA
ggggctgcagaagatcccca

SEQ ID NO: 11594 - DNA, 20 bp, synthetic construct
  source 1..20: mol_type = other DNA
gcagaccagccaggaggccg

SEQ ID NO: 11595 - DNA, 20 bp, synthetic construct
  source 1..20: mol_type = other DNA
ggctgagcaagagcattggg

SEQ ID NO: 11596 - DNA, 20 bp, synthetic construct
  source 1..20: mol_type = other DNA
gaccatggctgggacgcctg

SEQ ID NO: 11597 - DNA, 20 bp, synthetic construct
  source 1..20: mol_type = other DNA
ggccccaggcgtcccagcca

SEQ ID NO: 11598 - DNA, 20 bp, synthetic construct
  source 1..20: mol_type = other DNA
cagcagcggcggcggggcgc

SEQ ID NO: 11599 - DNA, 20 bp, synthetic construct
  source 1..20: mol_type = other DNA
gccgctgctgcccccagccc

SEQ ID NO: 11600 - DNA, 20 bp, synthetic construct
  source 1..20: mol_type = other DNA
gagagaccgacgggattggg

SEQ ID NO: 11601 - DNA, 20 bp, synthetic construct
  source 1..20: mol_type = other DNA
agagaccgacgggattgggt

SEQ ID NO: 11602 - DNA, 20 bp, synthetic construct
  source 1..20: mol_type = other DNA
agtcggggccgccaatgaga

SEQ ID NO: 11603 - DNA, 20 bp, synthetic construct
  source 1..20: mol_type = other DNA
cgacccagctggacgagtcg

SEQ ID NO: 11604 - DNA, 20 bp, synthetic construct
  source 1..20: mol_type = other DNA
gcggggcggggcgtcaaggg

SEQ ID NO: 11605 - DNA, 20 bp, synthetic construct
  source 1..20: mol_type = other DNA
gaggaggagcgaggtagcgg

SEQ ID NO: 11606 - DNA, 20 bp, synthetic construct
  source 1..20: mol_type = other DNA
ctcctcccacccaatcccgt

SEQ ID NO: 11607 - DNA, 20 bp, synthetic construct
  source 1..20: mol_type = other DNA
gaccgacgggattgggtggg

SEQ ID NO: 11608 - DNA, 20 bp, synthetic construct
  source 1..20: mol_type = other DNA
gacacggggggagagaccga

SEQ ID NO: 11609 - DNA, 20 bp, synthetic construct
  source 1..20: mol_type = other DNA
ggaggaggagcgaggtagcg

SEQ ID NO: 11610 - DNA, 20 bp, synthetic construct
  source 1..20: mol_type = other DNA
ctctttctaagagagcaggg

SEQ ID NO: 11611 - DNA, 20 bp, synthetic construct
  source 1..20: mol_type = other DNA
gacgcaggggcggggacacg

SEQ ID NO: 11612 - DNA, 20 bp, synthetic construct
  source 1..20: mol_type = other DNA
tctaagagagcagggaggag

SEQ ID NO: 11613 - DNA, 20 bp, synthetic construct
  source 1..20: mol_type = other DNA
acgcaggggcggggacacgg

SEQ ID NO: 11614 - DNA, 20 bp, synthetic construct
  source 1..20: mol_type = other DNA
ttctaagagagcagggagga

SEQ ID NO: 11615 - DNA, 20 bp, synthetic construct
  source 1..20: mol_type = other DNA
ccgacagcgggctcacctcg

SEQ ID NO: 11616 - DNA, 20 bp, synthetic construct
  source 1..20: mol_type = other DNA
ccccgaggtgagcccgctgt

SEQ ID NO: 11617 - DNA, 20 bp, synthetic construct
  source 1..20: mol_type = other DNA
gggccgctacctgtaccccg

SEQ ID NO: 11618 - DNA, 20 bp, synthetic construct
  source 1..20: mol_type = other DNA
cgaggtgagcccgctgtcgg

SEQ ID NO: 11619 - DNA, 20 bp, synthetic construct
  source 1..20: mol_type = other DNA
ctgtcggaggacgaggaccg

SEQ ID NO: 11620 - DNA, 20 bp, synthetic construct
  source 1..20: mol_type = other DNA
gggtacaggtagcggcccgg

SEQ ID NO: 11621 - DNA, 20 bp, synthetic construct
  source 1..20: mol_type = other DNA
cggtcctcgtcctccgacag

SEQ ID NO: 11622 - DNA, 20 bp, synthetic construct
  source 1..20: mol_type = other DNA
agcccgagctgtcgctgccg

SEQ ID NO: 11623 - DNA, 20 bp, synthetic construct
  source 1..20: mol_type = other DNA
gagcccgctgtcggaggacg

SEQ ID NO: 11624 - DNA, 20 bp, synthetic construct
  source 1..20: mol_type = other DNA
gcccggcagctgccaccgcg

SEQ ID NO: 11625 - DNA, 20 bp, synthetic construct
  source 1..20: mol_type = other DNA
gtctcggctgcgccccgcgg

SEQ ID NO: 11626 - DNA, 20 bp, synthetic construct
  source 1..20: mol_type = other DNA
acgcccggcagctgccaccg

SEQ ID NO: 11627 - DNA, 20 bp, synthetic construct
  source 1..20: mol_type = other DNA
cgagaccccgcgcctcgccc

SEQ ID NO: 11628 - DNA, 20 bp, synthetic construct
  source 1..20: mol_type = other DNA
ggggtctcggctgcgccccg

SEQ ID NO: 11629 - DNA, 20 bp, synthetic construct
  source 1..20: mol_type = other DNA
cgcccggcagctgccaccgc

SEQ ID NO: 11630 - DNA, 20 bp, synthetic construct
  source 1..20: mol_type = other DNA
accgcgacaggccagaacac

SEQ ID NO: 11631 - DNA, 20 bp, synthetic construct
  source 1..20: mol_type = other DNA
tctggtctacagcgtaccca

SEQ ID NO: 11632 - DNA, 20 bp, synthetic construct
  source 1..20: mol_type = other DNA
gcgacaggccagaacacggg

SEQ ID NO: 11633 - DNA, 20 bp, synthetic construct
  source 1..20: mol_type = other DNA
gaccgcgacaggccagaaca

SEQ ID NO: 11634 - DNA, 20 bp, synthetic construct
  source 1..20: mol_type = other DNA
gtctggtctacagcgtaccc

SEQ ID NO: 11635 - DNA, 20 bp, synthetic construct
  source 1..20: mol_type = other DNA
gctgtagaccagaccgcgac

SEQ ID NO: 11636 - DNA, 20 bp, synthetic construct
  source 1..20: mol_type = other DNA
agccggcctagtgacactgc

SEQ ID NO: 11637 - DNA, 20 bp, synthetic construct
  source 1..20: mol_type = other DNA
cagccggcctagtgacactg

SEQ ID NO: 11638 - DNA, 20 bp, synthetic construct
  source 1..20: mol_type = other DNA
gcagtgtcactaggccggct

SEQ ID NO: 11639 - DNA, 20 bp, synthetic construct
  source 1..20: mol_type = other DNA
gcgtccggcggagggttgag

SEQ ID NO: 11640 - DNA, 20 bp, synthetic construct
  source 1..20: mol_type = other DNA
agtgtcactaggccggctgg

SEQ ID NO: 11641 - DNA, 20 bp, synthetic construct
  source 1..20: mol_type = other DNA
gcccgtgttctggcctgtcg

SEQ ID NO: 11642 - DNA, 20 bp, synthetic construct
  source 1..20: mol_type = other DNA
gagatgccccgagggctgcg

SEQ ID NO: 11643 - DNA, 20 bp, synthetic construct
  source 1..20: mol_type = other DNA
cgggagacccgcgcagccct

SEQ ID NO: 11644 - DNA, 20 bp, synthetic construct
  source 1..20: mol_type = other DNA
cacgggcggcggcttcgggc

SEQ ID NO: 11645 - DNA, 20 bp, synthetic construct
  source 1..20: mol_type = other DNA
tagcagcttacaccctgcag

SEQ ID NO: 11646 - DNA, 20 bp, synthetic construct
  source 1..20: mol_type = other DNA
ggagcacaactctctccctg

SEQ ID NO: 11647 - DNA, 20 bp, synthetic construct
  source 1..20: mol_type = other DNA
gcacggagcgaggcagaccc

SEQ ID NO: 11648 - DNA, 20 bp, synthetic construct
  source 1..20: mol_type = other DNA
aagaagcttcaaccttaagg

SEQ ID NO: 11649 - DNA, 20 bp, synthetic construct
  source 1..20: mol_type = other DNA
ggtctgcctcgctccgtgca

SEQ ID NO: 11650 - DNA, 20 bp, synthetic construct
  source 1..20: mol_type = other DNA
gatccgccatattggagctg

SEQ ID NO: 11651 - DNA, 20 bp, synthetic construct
  source 1..20: mol_type = other DNA
cacgaaggtggagctctcgg

SEQ ID NO: 11652 - DNA, 20 bp, synthetic construct
  source 1..20: mol_type = other DNA
tcccggccctgcacggagcg

SEQ ID NO: 11653 - DNA, 20 bp, synthetic construct
  source 1..20: mol_type = other DNA
tgcacggagcgaggcagacc

SEQ ID NO: 11654 - DNA, 20 bp, synthetic construct
  source 1..20: mol_type = other DNA
ggagcgaggcagacccgggc

SEQ ID NO: 11655 - DNA, 20 bp, synthetic construct
  source 1..20: mol_type = other DNA
aaagaagcttcaaccttaag

SEQ ID NO: 11656 - DNA, 20 bp, synthetic construct
  source 1..20: mol_type = other DNA
aatatggcggatccctctcc

SEQ ID NO: 11657 - DNA, 20 bp, synthetic construct
  source 1..20: mol_type = other DNA
cggccccagctccaatatgg

SEQ ID NO: 11658 - DNA, 20 bp, synthetic construct
  source 1..20: mol_type = other DNA
catattggagctggggccga

SEQ ID NO: 11659 - DNA, 20 bp, synthetic construct
  source 1..20: mol_type = other DNA
atccctctcccggccctgca

SEQ ID NO: 11660 - DNA, 20 bp, synthetic construct
  source 1..20: mol_type = other DNA
cgtctgtcaaaagcccgact

SEQ ID NO: 11661 - DNA, 20 bp, synthetic construct
  source 1..20: mol_type = other DNA
ggaggcgatttagactggag

SEQ ID NO: 11662 - DNA, 20 bp, synthetic construct
  source 1..20: mol_type = other DNA
cgggcttggtaacatcatca

SEQ ID NO: 11663 - DNA, 20 bp, synthetic construct
  source 1..20: mol_type = other DNA
gtaacaaaacccagaccccc

SEQ ID NO: 11664 - DNA, 20 bp, synthetic construct
  source 1..20: mol_type = other DNA
atttggactggacaattaag

SEQ ID NO: 11665 - DNA, 20 bp, synthetic construct
  source 1..20: mol_type = other DNA
gtctttgactgagaaagggg

SEQ ID NO: 11666 - DNA, 20 bp, synthetic construct
  source 1..20: mol_type = other DNA
gaggcgatttagactggagt

SEQ ID NO: 11667 - DNA, 20 bp, synthetic construct
  source 1..20: mol_type = other DNA
ccagtctaaatcgcctccat

SEQ ID NO: 11668 - DNA, 20 bp, synthetic construct
  source 1..20: mol_type = other DNA
aatgtctttgactgagaaag

SEQ ID NO: 11669 - DNA, 20 bp, synthetic construct
  source 1..20: mol_type = other DNA
gcccgactcggcagcagcgg

SEQ ID NO: 11670 - DNA, 20 bp, synthetic construct
  source 1..20: mol_type = other DNA
aaagcccgactcggcagcag

SEQ ID NO: 11671 - DNA, 20 bp, synthetic construct
  source 1..20: mol_type = other DNA
ccccaggtcccggccaatgg

SEQ ID NO: 11672 - DNA, 20 bp, synthetic construct
  source 1..20: mol_type = other DNA
ctccattggccgggacctgg

SEQ ID NO: 11673 - DNA, 20 bp, synthetic construct
  source 1..20: mol_type = other DNA
aaacccagacccccaggtcc

SEQ ID NO: 11674 - DNA, 20 bp, synthetic construct
  source 1..20: mol_type = other DNA
agaaaggggtggaggtgacc

SEQ ID NO: 11675 - DNA, 20 bp, synthetic construct
  source 1..20: mol_type = other DNA
agtggaaatctctaagtcgg

SEQ ID NO: 11676 - DNA, 20 bp, synthetic construct
  source 1..20: mol_type = other DNA
aatagtggaaatctctaagt

SEQ ID NO: 11677 - DNA, 20 bp, synthetic construct
  source 1..20: mol_type = other DNA
attcatgaattcaatgcgtg

SEQ ID NO: 11678 - DNA, 20 bp, synthetic construct
  source 1..20: mol_type = other DNA
agagatttccactatttgca

SEQ ID NO: 11679 - DNA, 20 bp, synthetic construct
  source 1..20: mol_type = other DNA
gcatcatctctatttatgca

SEQ ID NO: 11680 - DNA, 20 bp, synthetic construct
  source 1..20: mol_type = other DNA
tagagatttccactatttgc

SEQ ID NO: 11681 - DNA, 20 bp, synthetic construct
  source 1..20: mol_type = other DNA
tcatctctatttatgcaggg

SEQ ID NO: 11682 - DNA, 20 bp, synthetic construct
  source 1..20: mol_type = other DNA
aaaaataggagtttagccag

SEQ ID NO: 11683 - DNA, 20 bp, synthetic construct
  source 1..20: mol_type = other DNA
gtaagaaaattgataatcaa

SEQ ID NO: 11684 - DNA, 20 bp, synthetic construct
  source 1..20: mol_type = other DNA
agcatcatctctatttatgc

SEQ ID NO: 11685 - DNA, 20 bp, synthetic construct
  source 1..20: mol_type = other DNA
ctgttcaaattcatgtctaa

SEQ ID NO: 11686 - DNA, 20 bp, synthetic construct
  source 1..20: mol_type = other DNA
ttaagtatttaaatcacaat

SEQ ID NO: 11687 - DNA, 20 bp, synthetic construct
  source 1..20: mol_type = other DNA
agggtggaaatgttgtaaaa

SEQ ID NO: 11688 - DNA, 20 bp, synthetic construct
  source 1..20: mol_type = other DNA
gggtggaaatgttgtaaaat

SEQ ID NO: 11689 - DNA, 20 bp, synthetic construct
  source 1..20: mol_type = other DNA
attaagtatttaaatcacaa

SEQ ID NO: 11690 - DNA, 20 bp, synthetic construct
  source 1..20: mol_type = other DNA
gccttcggcgctagatccgg

SEQ ID NO: 11691 - DNA, 20 bp, synthetic construct
  source 1..20: mol_type = other DNA
cggggcaccccactcgagag

SEQ ID NO: 11692 - DNA, 20 bp, synthetic construct
  source 1..20: mol_type = other DNA
ggggcaccccactcgagagg

SEQ ID NO: 11693 - DNA, 20 bp, synthetic construct
  source 1..20: mol_type = other DNA
ccggggcaccccactcgaga

SEQ ID NO: 11694 - DNA, 20 bp, synthetic construct
  source 1..20: mol_type = other DNA
cccggggcaccccactcgag

SEQ ID NO: 11695 - DNA, 20 bp, synthetic construct
  source 1..20: mol_type = other DNA
aagccttcggcgctagatcc

SEQ ID NO: 11696 - DNA, 20 bp, synthetic construct
  source 1..20: mol_type = other DNA
ctttctccccctctcgagtg

SEQ ID NO: 11697 - DNA, 20 bp, synthetic construct
  source 1..20: mol_type = other DNA
agccttcggcgctagatccg

SEQ ID NO: 11698 - DNA, 20 bp, synthetic construct
  source 1..20: mol_type = other DNA
cttcggcgctagatccgggg

SEQ ID NO: 11699 - DNA, 20 bp, synthetic construct
  source 1..20: mol_type = other DNA
ccccccggatctagcgccga

SEQ ID NO: 11700 - DNA, 20 bp, synthetic construct
  source 1..20: mol_type = other DNA
ccttcggcgctagatccggg

SEQ ID NO: 11701 - DNA, 20 bp, synthetic construct
  source 1..20: mol_type = other DNA
tcctttctccccctctcgag

SEQ ID NO: 11702 - DNA, 20 bp, synthetic construct
  source 1..20: mol_type = other DNA
tttgtgttggagcggagcgg

SEQ ID NO: 11703 - DNA, 20 bp, synthetic construct
  source 1..20: mol_type = other DNA
tgttggagcggagcggcgga

SEQ ID NO: 11704 - DNA, 20 bp, synthetic construct
  source 1..20: mol_type = other DNA
gtgttggagcggagcggcgg

SEQ ID NO: 11705 - DNA, 20 bp, synthetic construct
  source 1..20: mol_type = other DNA
gttgctacggtcaagaaccg

SEQ ID NO: 11706 - DNA, 20 bp, synthetic construct
  source 1..20: mol_type = other DNA
ttgctacggtcaagaaccgg

SEQ ID NO: 11707 - DNA, 20 bp, synthetic construct
  source 1..20: mol_type = other DNA
ggttgctacggtcaagaacc

SEQ ID NO: 11708 - DNA, 20 bp, synthetic construct
  source 1..20: mol_type = other DNA
cagctgaccgggaagcgacg

SEQ ID NO: 11709 - DNA, 20 bp, synthetic construct
  source 1..20: mol_type = other DNA
ccttagcgggagcccgagtg

SEQ ID NO: 11710 - DNA, 20 bp, synthetic construct
  source 1..20: mol_type = other DNA
cgctaaggacgcagctgacc

SEQ ID NO: 11711 - DNA, 20 bp, synthetic construct
  source 1..20: mol_type = other DNA
agcgggagcccgagtgcggg

SEQ ID NO: 11712 - DNA, 20 bp, synthetic construct
  source 1..20: mol_type = other DNA
ccggtcagctgcgtccttag

SEQ ID NO: 11713 - DNA, 20 bp, synthetic construct
  source 1..20: mol_type = other DNA
cttagcgggagcccgagtgc

SEQ ID NO: 11714 - DNA, 20 bp, synthetic construct
  source 1..20: mol_type = other DNA
ggcggggcaggattccaggc

SEQ ID NO: 11715 - DNA, 20 bp, synthetic construct
  source 1..20: mol_type = other DNA
caggagccttgcctctcagg

SEQ ID NO: 11716 - DNA, 20 bp, synthetic construct
  source 1..20: mol_type = other DNA
agcccgccacctgagaggca

SEQ ID NO: 11717 - DNA, 20 bp, synthetic construct
  source 1..20: mol_type = other DNA
cgcagagcccgccacctgag

SEQ ID NO: 11718 - DNA, 20 bp, synthetic construct
  source 1..20: mol_type = other DNA
ggcggtggcgggcttggcgg

SEQ ID NO: 11719 - DNA, 20 bp, synthetic construct
  source 1..20: mol_type = other DNA
gagccttgcctctcaggtgg

SEQ ID NO: 11720 - DNA, 20 bp, synthetic construct
  source 1..20: mol_type = other DNA
agatggatgacccttaacct

SEQ ID NO: 11721 - DNA, 20 bp, synthetic construct
  source 1..20: mol_type = other DNA
acttgtagctgagcaccact

SEQ ID NO: 11722 - DNA, 20 bp, synthetic construct
  source 1..20: mol_type = other DNA
cagatggatgacccttaacc

SEQ ID NO: 11723 - DNA, 20 bp, synthetic construct
  source 1..20: mol_type = other DNA
accaaagtcttcagagaccc

SEQ ID NO: 11724 - DNA, 20 bp, synthetic construct
  source 1..20: mol_type = other DNA
acatgactttgaattccccc

SEQ ID NO: 11725 - DNA, 20 bp, synthetic construct
  source 1..20: mol_type = other DNA
agcatccacaacatctacaa

SEQ ID NO: 11726 - DNA, 20 bp, synthetic construct
  source 1..20: mol_type = other DNA
cttgtagctgagcaccacta

SEQ ID NO: 11727 - DNA, 20 bp, synthetic construct
  source 1..20: mol_type = other DNA
ttatcatcaaactcctcctg

SEQ ID NO: 11728 - DNA, 20 bp, synthetic construct
  source 1..20: mol_type = other DNA
tgctgctgagctggttcaga

SEQ ID NO: 11729 - DNA, 20 bp, synthetic construct
  source 1..20: mol_type = other DNA
caaggccattgtagatgttg

SEQ ID NO: 11730 - DNA, 20 bp, synthetic construct
  source 1..20: mol_type = other DNA
tatcatcaaactcctcctgg

SEQ ID NO: 11731 - DNA, 20 bp, synthetic construct
  source 1..20: mol_type = other DNA
tgactttgaattcccccagg

SEQ ID NO: 11732 - DNA, 20 bp, synthetic construct
  source 1..20: mol_type = other DNA
tcttcagagacccaggttaa

SEQ ID NO: 11733 - DNA, 20 bp, synthetic construct
  source 1..20: mol_type = other DNA
caccagtaaataaaaagtca

SEQ ID NO: 11734 - DNA, 20 bp, synthetic construct
  source 1..20: mol_type = other DNA
tgttgtggatgctgctgagc

SEQ ID NO: 11735 - DNA, 20 bp, synthetic construct
  source 1..20: mol_type = other DNA
cctatgcgcagaatcagagc

SEQ ID NO: 11736 - DNA, 20 bp, synthetic construct
  source 1..20: mol_type = other DNA
cccgcgacccggcgacccgg

SEQ ID NO: 11737 - DNA, 20 bp, synthetic construct
  source 1..20: mol_type = other DNA
gccgggcggcttcctgcagg

SEQ ID NO: 11738 - DNA, 20 bp, synthetic construct
  source 1..20: mol_type = other DNA
gcgacccggcgacccggcgg

SEQ ID NO: 11739 - DNA, 20 bp, synthetic construct
  source 1..20: mol_type = other DNA
cagccggcaacggctcgccc

SEQ ID NO: 11740 - DNA, 20 bp, synthetic construct
  source 1..20: mol_type = other DNA
ggcgccgggcggcttcctgc

SEQ ID NO: 11741 - DNA, 20 bp, synthetic construct
  source 1..20: mol_type = other DNA
gcggtggctgcagccggcaa

SEQ ID NO: 11742 - DNA, 20 bp, synthetic construct
  source 1..20: mol_type = other DNA
agtggcagcagcgtccgggc

SEQ ID NO: 11743 - DNA, 20 bp, synthetic construct
  source 1..20: mol_type = other DNA
gcccccgcgacccggcgacc

SEQ ID NO: 11744 - DNA, 20 bp, synthetic construct
  source 1..20: mol_type = other DNA
gcccagtggcagcagcgtcc

SEQ ID NO: 11745 - DNA, 20 bp, synthetic construct
  source 1..20: mol_type = other DNA
ggcagcagcgtccgggccgg

SEQ ID NO: 11746 - DNA, 20 bp, synthetic construct
  source 1..20: mol_type = other DNA
gcttcctgcaggcggcgccg

SEQ ID NO: 11747 - DNA, 20 bp, synthetic construct
  source 1..20: mol_type = other DNA
ggcccggacgctgctgccac

SEQ ID NO: 11748 - DNA, 20 bp, synthetic construct
  source 1..20: mol_type = other DNA
acccggcgacccggcggcgg

SEQ ID NO: 11749 - DNA, 20 bp, synthetic construct
  source 1..20: mol_type = other DNA
gccgcctgcaggaagccgcc

SEQ ID NO: 11750 - DNA, 20 bp, synthetic construct
  source 1..20: mol_type = other DNA
ccgagtgcgagcccagcaca

SEQ ID NO: 11751 - DNA, 20 bp, synthetic construct
  source 1..20: mol_type = other DNA
gcggacgcgcaggcaagacc

SEQ ID NO: 11752 - DNA, 20 bp, synthetic construct
  source 1..20: mol_type = other DNA
ctctgcccgagagactgcag

SEQ ID NO: 11753 - DNA, 20 bp, synthetic construct
  source 1..20: mol_type = other DNA
tactgcctaggatgacgctg

SEQ ID NO: 11754 - DNA, 20 bp, synthetic construct
  source 1..20: mol_type = other DNA
tgcccgagagactgcagcgg

SEQ ID NO: 11755 - DNA, 20 bp, synthetic construct
  source 1..20: mol_type = other DNA
ggcaagaccaggactcgggc

SEQ ID NO: 11756 - DNA, 20 bp, synthetic construct
  source 1..20: mol_type = other DNA
gcgcaggcaagaccaggact

SEQ ID NO: 11757 - DNA, 20 bp, synthetic construct
  source 1..20: mol_type = other DNA
gaccaggactcgggctggag

SEQ ID NO: 11758 - DNA, 20 bp, synthetic construct
  source 1..20: mol_type = other DNA
ccgagagactgcagcggcgg

SEQ ID NO: 11759 - DNA, 20 bp, synthetic construct
  source 1..20: mol_type = other DNA
agaccaggactcgggctgga

SEQ ID NO: 11760 - DNA, 20 bp, synthetic construct
  source 1..20: mol_type = other DNA
aagaccaggactcgggctgg

SEQ ID NO: 11761 - DNA, 20 bp, synthetic construct
  source 1..20: mol_type = other DNA
gcgggagcgggcggacgcgc

SEQ ID NO: 11762 - DNA, 20 bp, synthetic construct
  source 1..20: mol_type = other DNA
cgcaggcaagaccaggactc

SEQ ID NO: 11763 - DNA, 20 bp, synthetic construct
  source 1..20: mol_type = other DNA
agagactgcagcggcggcgg

SEQ ID NO: 11764 - DNA, 20 bp, synthetic construct
  source 1..20: mol_type = other DNA
gcggcggcggcgggagcggg

SEQ ID NO: 11765 - DNA, 20 bp, synthetic construct
  source 1..20: mol_type = other DNA
agcgagtcatggccaacgcg

SEQ ID NO: 11766 - DNA, 20 bp, synthetic construct
  source 1..20: mol_type = other DNA
cgagcgagtcatggccaacg

SEQ ID NO: 11767 - DNA, 20 bp, synthetic construct
  source 1..20: mol_type = other DNA
gagcgagtcatggccaacgc

SEQ ID NO: 11768 - DNA, 20 bp, synthetic construct
  source 1..20: mol_type = other DNA
agtctggatactagaagctg

SEQ ID NO: 11769 - DNA, 20 bp, synthetic construct
  source 1..20: mol_type = other DNA
ccgacccagagcttctccag

SEQ ID NO: 11770 - DNA, 20 bp, synthetic construct
  source 1..20: mol_type = other DNA
gcgttggccatgactcgctc

SEQ ID NO: 11771 - DNA, 20 bp, synthetic construct
  source 1..20: mol_type = other DNA
aaggcggagagtttgcaggt

SEQ ID NO: 11772 - DNA, 20 bp, synthetic construct
  source 1..20: mol_type = other DNA
acccagagcttctccagcgg

SEQ ID NO: 11773 - DNA, 20 bp, synthetic construct
  source 1..20: mol_type = other DNA
tagaagctgcggttgctccc

SEQ ID NO: 11774 - DNA, 20 bp, synthetic construct
  source 1..20: mol_type = other DNA
gctggagaagctctgggtcg

SEQ ID NO: 11775 - DNA, 20 bp, synthetic construct
  source 1..20: mol_type = other DNA
ccagactccagcgccgcccc

SEQ ID NO: 11776 - DNA, 20 bp, synthetic construct
  source 1..20: mol_type = other DNA
ctgcggttgctcccaggctc

SEQ ID NO: 11777 - DNA, 20 bp, synthetic construct
  source 1..20: mol_type = other DNA
tccagactccagcgccgccc

SEQ ID NO: 11778 - DNA, 20 bp, synthetic construct
  source 1..20: mol_type = other DNA
gccgccgctggagaagctct

SEQ ID NO: 11779 - DNA, 20 bp, synthetic construct
  source 1..20: mol_type = other DNA
ccgctggagaagctctgggt

SEQ ID NO: 11780 - DNA, 20 bp, synthetic construct
  source 1..20: mol_type = other DNA
actagatagcaaatgcaccg

SEQ ID NO: 11781 - DNA, 20 bp, synthetic construct
  source 1..20: mol_type = other DNA
acaggaaagattcgagatgg

SEQ ID NO: 11782 - DNA, 20 bp, synthetic construct
  source 1..20: mol_type = other DNA
ctgacaggaaagattcgaga

SEQ ID NO: 11783 - DNA, 20 bp, synthetic construct
  source 1..20: mol_type = other DNA
gcaaatgcaccgcggaggag

SEQ ID NO: 11784 - DNA, 20 bp, synthetic construct
  source 1..20: mol_type = other DNA
agatagcaaatgcaccgcgg

SEQ ID NO: 11785 - DNA, 20 bp, synthetic construct
  source 1..20: mol_type = other DNA
tagcaaatgcaccgcggagg

SEQ ID NO: 11786 - DNA, 20 bp, synthetic construct
  source 1..20: mol_type = other DNA
cttaaagtagccaatcccag

SEQ ID NO: 11787 - DNA, 20 bp, synthetic construct
  source 1..20: mol_type = other DNA
taagttactacagagttcct

SEQ ID NO: 11788 - DNA, 20 bp, synthetic construct
  source 1..20: mol_type = other DNA
aatgcaccgcggaggagggg

SEQ ID NO: 11789 - DNA, 20 bp, synthetic construct
  source 1..20: mol_type = other DNA
acttaaagtagccaatccca

SEQ ID NO: 11790 - DNA, 20 bp, synthetic construct
  source 1..20: mol_type = other DNA
ttccatactcagagtacgca

SEQ ID NO: 11791 - DNA, 20 bp, synthetic construct
  source 1..20: mol_type = other DNA
gcgtatgcttactctgattt

SEQ ID NO: 11792 - DNA, 20 bp, synthetic construct
  source 1..20: mol_type = other DNA
gaccgtgcgtactctgagta

SEQ ID NO: 11793 - DNA, 20 bp, synthetic construct
  source 1..20: mol_type = other DNA
ctgtagtaacttaagaaatt

SEQ ID NO: 11794 - DNA, 20 bp, synthetic construct
  source 1..20: mol_type = other DNA
tgtagtaacttaagaaattt

SEQ ID NO: 11795 - DNA, 20 bp, synthetic construct
  source 1..20: mol_type = other DNA
catcctgcctgcgttagcgg

SEQ ID NO: 11796 - DNA, 20 bp, synthetic construct
  source 1..20: mol_type = other DNA
tcctccaccgccgctaacgc

SEQ ID NO: 11797 - DNA, 20 bp, synthetic construct
  source 1..20: mol_type = other DNA
aggcgaccgacctgacccca

SEQ ID NO: 11798 - DNA, 20 bp, synthetic construct
  source 1..20: mol_type = other DNA
gcgaccgacctgaccccatg

SEQ ID NO: 11799 - DNA, 20 bp, synthetic construct
  source 1..20: mol_type = other DNA
cggcgccgagaagagactgt

SEQ ID NO: 11800 - DNA, 20 bp, synthetic construct
  source 1..20: mol_type = other DNA
gtggagggcggagtagacgg

SEQ ID NO: 11801 - DNA, 20 bp, synthetic construct
  source 1..20: mol_type = other DNA
agagaagaaagtgtcagagc

SEQ ID NO: 11802 - DNA, 20 bp, synthetic construct
  source 1..20: mol_type = other DNA
gagggcggagtagacggagg

SEQ ID NO: 11803 - DNA, 20 bp, synthetic construct
  source 1..20: mol_type = other DNA
aggaggcagagaggagtgga

SEQ ID NO: 11804 - DNA, 20 bp, synthetic construct
  source 1..20: mol_type = other DNA
ggagtggagggcggagtaga

SEQ ID NO: 11805 - DNA, 20 bp, synthetic construct
  source 1..20: mol_type = other DNA
gaggaggcagagaggagtgg

SEQ ID NO: 11806 - DNA, 20 bp, synthetic construct
  source 1..20: mol_type = other DNA
gttagcggcggtggaggagg

SEQ ID NO: 11807 - DNA, 20 bp, synthetic construct
  source 1..20: mol_type = other DNA
tgcgttagcggcggtggagg

SEQ ID NO: 11808 - DNA, 20 bp, synthetic construct
  source 1..20: mol_type = other DNA
gcctgcgttagcggcggtgg

SEQ ID NO: 11809 - DNA, 20 bp, synthetic construct
  source 1..20: mol_type = other DNA
aggcagagaggagtggaggg

SEQ ID NO: 11810 - DNA, 20 bp, synthetic construct
  source 1..20: mol_type = other DNA
ctgccgtgtggccgtaccgg

SEQ ID NO: 11811 - DNA, 20 bp, synthetic construct
  source 1..20: mol_type = other DNA
cggcgaatggcagcaccgtg

SEQ ID NO: 11812 - DNA, 20 bp, synthetic construct
  source 1..20: mol_type = other DNA
gagcgcggcgctaggaaaga

SEQ ID NO: 11813 - DNA, 20 bp, synthetic construct
  source 1..20: mol_type = other DNA
gggtaaagcagcccggcgaa

SEQ ID NO: 11814 - DNA, 20 bp, synthetic construct
  source 1..20: mol_type = other DNA
cgcggcgctaggaaagatgg

SEQ ID NO: 11815 - DNA, 20 bp, synthetic construct
  source 1..20: mol_type = other DNA
gccgcaacagcgccaaccgc

SEQ ID NO: 11816 - DNA, 20 bp, synthetic construct
  source 1..20: mol_type = other DNA
ctgacgggcagcccaagccc

SEQ ID NO: 11817 - DNA, 20 bp, synthetic construct
  source 1..20: mol_type = other DNA
gtgggcaacgcggtgccctg

SEQ ID NO: 11818 - DNA, 20 bp, synthetic construct
  source 1..20: mol_type = other DNA
agcggcggcggtgggcaacg

SEQ ID NO: 11819 - DNA, 20 bp, synthetic construct
  source 1..20: mol_type = other DNA
ctgcggggcccggccttgcg

SEQ ID NO: 11820 - DNA, 20 bp, synthetic construct
  source 1..20: mol_type = other DNA
gctaggaaagatggcggcag

SEQ ID NO: 11821 - DNA, 20 bp, synthetic construct
  source 1..20: mol_type = other DNA
aggaaagatggcggcagcgg

SEQ ID NO: 11822 - DNA, 20 bp, synthetic construct
  source 1..20: mol_type = other DNA
ccgtcaggccggaccccgca

SEQ ID NO: 11823 - DNA, 20 bp, synthetic construct
  source 1..20: mol_type = other DNA
aaagatggcggcagcggcgg

SEQ ID NO: 11824 - DNA, 20 bp, synthetic construct
  source 1..20: mol_type = other DNA
atggcggcagcggcggcggt

SEQ ID NO: 11825 - DNA, 20 bp, synthetic construct
  source 1..20: mol_type = other DNA
gcccggggttcagaaacctg

SEQ ID NO: 11826 - DNA, 20 bp, synthetic construct
  source 1..20: mol_type = other DNA
tctacacgagcgcgaagccg

SEQ ID NO: 11827 - DNA, 20 bp, synthetic construct
  source 1..20: mol_type = other DNA
gtgcggcgcaaggagtcgga

SEQ ID NO: 11828 - DNA, 20 bp, synthetic construct
  source 1..20: mol_type = other DNA
agccgcaggtttctgaaccc

SEQ ID NO: 11829 - DNA, 20 bp, synthetic construct
  source 1..20: mol_type = other DNA
ccggagtctggccgcagtcg

SEQ ID NO: 11830 - DNA, 20 bp, synthetic construct
  source 1..20: mol_type = other DNA
agcagtgcggcgcaaggagt

SEQ ID NO: 11831 - DNA, 20 bp, synthetic construct
  source 1..20: mol_type = other DNA
tacccgagccgctgcagcgt

SEQ ID NO: 11832 - DNA, 20 bp, synthetic construct
  source 1..20: mol_type = other DNA
gccgcaggtttctgaacccc

SEQ ID NO: 11833 - DNA, 20 bp, synthetic construct
  source 1..20: mol_type = other DNA
ctgcagcggctcgggtaccg

SEQ ID NO: 11834 - DNA, 20 bp, synthetic construct
  source 1..20: mol_type = other DNA
gactggcccggcgagcagtg

SEQ ID NO: 11835 - DNA, 20 bp, synthetic construct
  source 1..20: mol_type = other DNA
agtgcggcgcaaggagtcgg

SEQ ID NO: 11836 - DNA, 20 bp, synthetic construct
  source 1..20: mol_type = other DNA
agccaccactgccgcgactg

SEQ ID NO: 11837 - DNA, 20 bp, synthetic construct
  source 1..20: mol_type = other DNA
ccggcgagcagtgcggcgca

SEQ ID NO: 11838 - DNA, 20 bp, synthetic construct
  source 1..20: mol_type = other DNA
ggccgcagtcgcggcagtgg

SEQ ID NO: 11839 - DNA, 20 bp, synthetic construct
  source 1..20: mol_type = other DNA
tctggccgcagtcgcggcag

SEQ ID NO: 11840 - DNA, 20 bp, synthetic construct
  source 1..20: mol_type = other DNA
acggcgtagccggaagtcag

SEQ ID NO: 11841 - DNA, 20 bp, synthetic construct
  source 1..20: mol_type = other DNA
ggcgcggtcgagtcatcgca

SEQ ID NO: 11842 - DNA, 20 bp, synthetic construct
  source 1..20: mol_type = other DNA
taggccccggccgctaagag

SEQ ID NO: 11843 - DNA, 20 bp, synthetic construct
  source 1..20: mol_type = other DNA
aggccccggccgctaagagt

SEQ ID NO: 11844 - DNA, 20 bp, synthetic construct
  source 1..20: mol_type = other DNA
cgaccgcgccacccagacaa

SEQ ID NO: 11845 - DNA, 20 bp, synthetic construct
  source 1..20: mol_type = other DNA
tgaggcccactcttagcggc

SEQ ID NO: 11846 - DNA, 20 bp, synthetic construct
  source 1..20: mol_type = other DNA
gcctcatgagggccagcggc

SEQ ID NO: 11847 - DNA, 20 bp, synthetic construct
  source 1..20: mol_type = other DNA
ggagggacgggagaacgaag

SEQ ID NO: 11848 - DNA, 20 bp, synthetic construct
  source 1..20: mol_type = other DNA
tggcgcggtcgagtcatcgc

SEQ ID NO: 11849 - DNA, 20 bp, synthetic construct
  source 1..20: mol_type = other DNA
gacgggagaacgaagcggtg

SEQ ID NO: 11850 - DNA, 20 bp, synthetic construct
  source 1..20: mol_type = other DNA
gaccccccgcgccaaggcgc

SEQ ID NO: 11851 - DNA, 20 bp, synthetic construct
  source 1..20: mol_type = other DNA
cggctacgccgttgtctggg

SEQ ID NO: 11852 - DNA, 20 bp, synthetic construct
  source 1..20: mol_type = other DNA
ctagtcgaccccccgcgcca

SEQ ID NO: 11853 - DNA, 20 bp, synthetic construct
  source 1..20: mol_type = other DNA
acgccgttgtctgggtggcg

SEQ ID NO: 11854 - DNA, 20 bp, synthetic construct
  source 1..20: mol_type = other DNA
tccctccccgcgccttggcg

SEQ ID NO: 11855 - DNA, 20 bp, synthetic construct
  source 1..20: mol_type = other DNA
aggcggcagtgagtttccct

SEQ ID NO: 11856 - DNA, 20 bp, synthetic construct
  source 1..20: mol_type = other DNA
gcgcttccttagtaggtgga

SEQ ID NO: 11857 - DNA, 20 bp, synthetic construct
  source 1..20: mol_type = other DNA
ggcagtgagtttccctggga

SEQ ID NO: 11858 - DNA, 20 bp, synthetic construct
  source 1..20: mol_type = other DNA
gagcgcgcttccttagtagg

SEQ ID NO: 11859 - DNA, 20 bp, synthetic construct
  source 1..20: mol_type = other DNA
cttccttagtaggtggatgg

SEQ ID NO: 11860 - DNA, 20 bp, synthetic construct
  source 1..20: mol_type = other DNA
ggcgacgacgagaagggagt

SEQ ID NO: 11861 - DNA, 20 bp, synthetic construct
  source 1..20: mol_type = other DNA
tcggcccgggctgtcaagga

SEQ ID NO: 11862 - DNA, 20 bp, synthetic construct
  source 1..20: mol_type = other DNA
ggcgggcagaggtgatgtct

SEQ ID NO: 11863 - DNA, 20 bp, synthetic construct
  source 1..20: mol_type = other DNA
tgagctgggagagttggagg

SEQ ID NO: 11864 - DNA, 20 bp, synthetic construct
  source 1..20: mol_type = other DNA
tcaaaatggcgacgacgaga

SEQ ID NO: 11865 - DNA, 20 bp, synthetic construct
  source 1..20: mol_type = other DNA
gactgtggccggctgggagt

SEQ ID NO: 11866 - DNA, 20 bp, synthetic construct
  source 1..20: mol_type = other DNA
ggctgagctgggagagttgg

SEQ ID NO: 11867 - DNA, 20 bp, synthetic construct
  source 1..20: mol_type = other DNA
tgtggccggctgggagtagg

SEQ ID NO: 11868 - DNA, 20 bp, synthetic construct
  source 1..20: mol_type = other DNA
cactgccgcctactcccagc

SEQ ID NO: 11869 - DNA, 20 bp, synthetic construct
  source 1..20: mol_type = other DNA
cggcagtgagtttccctggg

SEQ ID NO: 11870 - DNA, 20 bp, synthetic construct
  source 1..20: mol_type = other DNA
ggctcacggactgttcgtag

SEQ ID NO: 11871 - DNA, 20 bp, synthetic construct
  source 1..20: mol_type = other DNA
cagggtgagcagaagaacgc

SEQ ID NO: 11872 - DNA, 20 bp, synthetic construct
  source 1..20: mol_type = other DNA
ggtgagcagaagaacgcagg

SEQ ID NO: 11873 - DNA, 20 bp, synthetic construct
  source 1..20: mol_type = other DNA
gccctcggcgcgtccggaca

SEQ ID NO: 11874 - DNA, 20 bp, synthetic construct
  source 1..20: mol_type = other DNA
gaagaacgcaggcggtgtcg

SEQ ID NO: 11875 - DNA, 20 bp, synthetic construct
  source 1..20: mol_type = other DNA
ggggctcacggactgttcgt

SEQ ID NO: 11876 - DNA, 20 bp, synthetic construct
  source 1..20: mol_type = other DNA
actgttcgtaggggacgtgc

SEQ ID NO: 11877 - DNA, 20 bp, synthetic construct
  source 1..20: mol_type = other DNA
gccctgtccggacgcgccga

SEQ ID NO: 11878 - DNA, 20 bp, synthetic construct
  source 1..20: mol_type = other DNA
ctgcgttcttctgctcaccc

SEQ ID NO: 11879 - DNA, 20 bp, synthetic construct
  source 1..20: mol_type = other DNA
ggcggtgtcggggaccatgg

SEQ ID NO: 11880 - DNA, 20 bp, synthetic construct
  source 1..20: mol_type = other DNA
ggtgtcggggaccatggcgg

SEQ ID NO: 11881 - DNA, 20 bp, synthetic construct
  source 1..20: mol_type = other DNA
ccagctccccgccaccgcca

SEQ ID NO: 11882 - DNA, 20 bp, synthetic construct
  source 1..20: mol_type = other DNA
ggcggtggcggggagctggg

SEQ ID NO: 11883 - DNA, 20 bp, synthetic construct
  source 1..20: mol_type = other DNA
ggacgcgccgagggcagcca

SEQ ID NO: 11884 - DNA, 20 bp, synthetic construct
  source 1..20: mol_type = other DNA
gcaggcggtgtcggggacca

SEQ ID NO: 11885 - DNA, 20 bp, synthetic construct
  source 1..20: mol_type = other DNA
agccactaccaaccacagta

SEQ ID NO: 11886 - DNA, 20 bp, synthetic construct
  source 1..20: mol_type = other DNA
agcctccaagcaataagagc

SEQ ID NO: 11887 - DNA, 20 bp, synthetic construct
  source 1..20: mol_type = other DNA
gaagtctggccatcggtaga

SEQ ID NO: 11888 - DNA, 20 bp, synthetic construct
  source 1..20: mol_type = other DNA
ccgatggccagacttctcac

SEQ ID NO: 11889 - DNA, 20 bp, synthetic construct
  source 1..20: mol_type = other DNA
gtcctgctcttattgcttgg

SEQ ID NO: 11890 - DNA, 20 bp, synthetic construct
  source 1..20: mol_type = other DNA
ccagtgagaagtctggccat

SEQ ID NO: 11891 - DNA, 20 bp, synthetic construct
  source 1..20: mol_type = other DNA
gctacttctctgccatactg

SEQ ID NO: 11892 - DNA, 20 bp, synthetic construct
  source 1..20: mol_type = other DNA
tgaacaatgcatgtgtagaa

SEQ ID NO: 11893 - DNA, 20 bp, synthetic construct
  source 1..20: mol_type = other DNA
gacagagaaaggatatagag

SEQ ID NO: 11894 - DNA, 20 bp, synthetic construct
  source 1..20: mol_type = other DNA
tggctgcatccctctaccga

SEQ ID NO: 11895 - DNA, 20 bp, synthetic construct
  source 1..20: mol_type = other DNA
cttctctgccatactgtggt

SEQ ID NO: 11896 - DNA, 20 bp, synthetic construct
  source 1..20: mol_type = other DNA
ggacagagaaaggatataga

SEQ ID NO: 11897 - DNA, 20 bp, synthetic construct
  source 1..20: mol_type = other DNA
caacagaattggagagtgag

SEQ ID NO: 11898 - DNA, 20 bp, synthetic construct
  source 1..20: mol_type = other DNA
acagaattggagagtgagag

SEQ ID NO: 11899 - DNA, 20 bp, synthetic construct
  source 1..20: mol_type = other DNA
aacagaattggagagtgaga

SEQ ID NO: 11900 - DNA, 20 bp, synthetic construct
  source 1..20: mol_type = other DNA
gagtacaaggtggtaatgct

SEQ ID NO: 11901 - DNA, 20 bp, synthetic construct
  source 1..20: mol_type = other DNA
aggtaagaaccatcagcgtc

SEQ ID NO: 11902 - DNA, 20 bp, synthetic construct
  source 1..20: mol_type = other DNA
gaggtaagaaccatcagcgt

SEQ ID NO: 11903 - DNA, 20 bp, synthetic construct
  source 1..20: mol_type = other DNA
tgctatgagacccgctcgag

SEQ ID NO: 11904 - DNA, 20 bp, synthetic construct
  source 1..20: mol_type = other DNA
tatgagacccgctcgagcgg

SEQ ID NO: 11905 - DNA, 20 bp, synthetic construct
  source 1..20: mol_type = other DNA
cgggtccagagagtacaagg

SEQ ID NO: 11906 - DNA, 20 bp, synthetic construct
  source 1..20: mol_type = other DNA
aggcgggtccagagagtaca

SEQ ID NO: 11907 - DNA, 20 bp, synthetic construct
  source 1..20: mol_type = other DNA
tccccgggcagcgcatcagg

SEQ ID NO: 11908 - DNA, 20 bp, synthetic construct
  source 1..20: mol_type = other DNA
cccgcctgatgcgctgcccg

SEQ ID NO: 11909 - DNA, 20 bp, synthetic construct
  source 1..20: mol_type = other DNA
agcagccagcccgacgctga

SEQ ID NO: 11910 - DNA, 20 bp, synthetic construct
  source 1..20: mol_type = other DNA
aagaaccatcagcgtcgggc

SEQ ID NO: 11911 - DNA, 20 bp, synthetic construct
  source 1..20: mol_type = other DNA
agagtacaaggtggtaatgc

SEQ ID NO: 11912 - DNA, 20 bp, synthetic construct
  source 1..20: mol_type = other DNA
aatgaagccagctgctcccc

SEQ ID NO: 11913 - DNA, 20 bp, synthetic construct
  source 1..20: mol_type = other DNA
gtggtaatgctgggagcagg

SEQ ID NO: 11914 - DNA, 20 bp, synthetic construct
  source 1..20: mol_type = other DNA
aaatgaagccagctgctccc

SEQ ID NO: 11915 - DNA, 20 bp, synthetic construct
  source 1..20: mol_type = other DNA
tcggccgccgccaaagcaca

SEQ ID NO: 11916 - DNA, 20 bp, synthetic construct
  source 1..20: mol_type = other DNA
tgtgccgaacttgtcgcctc

SEQ ID NO: 11917 - DNA, 20 bp, synthetic construct
  source 1..20: mol_type = other DNA
gttcggcacaactttcctgt

SEQ ID NO: 11918 - DNA, 20 bp, synthetic construct
  source 1..20: mol_type = other DNA
caagtctcagcattcatgcc

SEQ ID NO: 11919 - DNA, 20 bp, synthetic construct
  source 1..20: mol_type = other DNA
gtccccgaatccctgtgctt

SEQ ID NO: 11920 - DNA, 20 bp, synthetic construct
  source 1..20: mol_type = other DNA
gtcggccgccgccaaagcac

SEQ ID NO: 11921 - DNA, 20 bp, synthetic construct
  source 1..20: mol_type = other DNA
gaatccctgtgctttggcgg

SEQ ID NO: 11922 - DNA, 20 bp, synthetic construct
  source 1..20: mol_type = other DNA
aaactcccagccaaggcgcg

SEQ ID NO: 11923 - DNA, 20 bp, synthetic construct
  source 1..20: mol_type = other DNA
ctcccagccaaggcgcgcgg

SEQ ID NO: 11924 - DNA, 20 bp, synthetic construct
  source 1..20: mol_type = other DNA
tcatgcctggcttgcgcagg

SEQ ID NO: 11925 - DNA, 20 bp, synthetic construct
  source 1..20: mol_type = other DNA
tgcctggcttgcgcaggcgg

SEQ ID NO: 11926 - DNA, 20 bp, synthetic construct
  source 1..20: mol_type = other DNA
cattcatgcctggcttgcgc

SEQ ID NO: 11927 - DNA, 20 bp, synthetic construct
  source 1..20: mol_type = other DNA
gcgggcggggacgcgagcga

SEQ ID NO: 11928 - DNA, 20 bp, synthetic construct
  source 1..20: mol_type = other DNA
cctccccaaactcccagcca

SEQ ID NO: 11929 - DNA, 20 bp, synthetic construct
  source 1..20: mol_type = other DNA
gggacgcgagcgagggcgcg

SEQ ID NO: 11930 - DNA, 20 bp, synthetic construct
  source 1..20: mol_type = other DNA
cccgagccgggggccgcacg

SEQ ID NO: 11931 - DNA, 20 bp, synthetic construct
  source 1..20: mol_type = other DNA
ggccggcctctggctccgcg

SEQ ID NO: 11932 - DNA, 20 bp, synthetic construct
  source 1..20: mol_type = other DNA
ccccgcacccgccccccgtg

SEQ ID NO: 11933 - DNA, 20 bp, synthetic construct
  source 1..20: mol_type = other DNA
cctctggctccgcggggcga

SEQ ID NO: 11934 - DNA, 20 bp, synthetic construct
  source 1..20: mol_type = other DNA
ccgcgcccgtgtcccgcccg

SEQ ID NO: 11935 - DNA, 20 bp, synthetic construct
  source 1..20: mol_type = other DNA
cccgtgcggcccccggctcg

SEQ ID NO: 11936 - DNA, 20 bp, synthetic construct
  source 1..20: mol_type = other DNA
ccgccgccgccccgagccgg

SEQ ID NO: 11937 - DNA, 20 bp, synthetic construct
  source 1..20: mol_type = other DNA
gtgcggcccccggctcgggg

SEQ ID NO: 11938 - DNA, 20 bp, synthetic construct
  source 1..20: mol_type = other DNA
gccgccgccgccccgagccg

SEQ ID NO: 11939 - DNA, 20 bp, synthetic construct
  source 1..20: mol_type = other DNA
cccgccccccgtgcggcccc

SEQ ID NO: 11940 - DNA, 20 bp, synthetic construct
  source 1..20: mol_type = other DNA
cccgcggcgcccggagccgg

SEQ ID NO: 11941 - DNA, 20 bp, synthetic construct
  source 1..20: mol_type = other DNA
ccccgtgcggcccccggctc

SEQ ID NO: 11942 - DNA, 20 bp, synthetic construct
  source 1..20: mol_type = other DNA
ccctcgccccgcggagccag

SEQ ID NO: 11943 - DNA, 20 bp, synthetic construct
  source 1..20: mol_type = other DNA
cccccgtgcggcccccggct

SEQ ID NO: 11944 - DNA, 20 bp, synthetic construct
  source 1..20: mol_type = other DNA
ccgcggcgcccggagccggc

SEQ ID NO: 11945 - DNA, 20 bp, synthetic construct
  source 1..20: mol_type = other DNA
cagggacagaaacacacgcg

SEQ ID NO: 11946 - DNA, 20 bp, synthetic construct
  source 1..20: mol_type = other DNA
aacgacagatcaggaaccca

SEQ ID NO: 11947 - DNA, 20 bp, synthetic construct
  source 1..20: mol_type = other DNA
aaacgacagatcaggaaccc

SEQ ID NO: 11948 - DNA, 20 bp, synthetic construct
  source 1..20: mol_type = other DNA
agggcctggccgtttggagg

SEQ ID NO: 11949 - DNA, 20 bp, synthetic construct
  source 1..20: mol_type = other DNA
ggagctgactgacccgccgt

SEQ ID NO: 11950 - DNA, 20 bp, synthetic construct
  source 1..20: mol_type = other DNA
cagcgatgcctcgcccacgg

SEQ ID NO: 11951 - DNA, 20 bp, synthetic construct
  source 1..20: mol_type = other DNA
ctgcagcgatgcctcgccca

SEQ ID NO: 11952 - DNA, 20 bp, synthetic construct
  source 1..20: mol_type = other DNA
aggagctgactgacccgccg

SEQ ID NO: 11953 - DNA, 20 bp, synthetic construct
  source 1..20: mol_type = other DNA
cagggtagactcacagatcc

SEQ ID NO: 11954 - DNA, 20 bp, synthetic construct
  source 1..20: mol_type = other DNA
acggcgggtcagtcagctcc

SEQ ID NO: 11955 - DNA, 20 bp, synthetic construct
  source 1..20: mol_type = other DNA
gccgtttggaggaggtgctg

SEQ ID NO: 11956 - DNA, 20 bp, synthetic construct
  source 1..20: mol_type = other DNA
agcgatgcctcgcccacggc

SEQ ID NO: 11957 - DNA, 20 bp, synthetic construct
  source 1..20: mol_type = other DNA
gcgcgaagggaggcgggaca

SEQ ID NO: 11958 - DNA, 20 bp, synthetic construct
  source 1..20: mol_type = other DNA
gaggtgctggggcggcgcga

SEQ ID NO: 11959 - DNA, 20 bp, synthetic construct
  source 1..20: mol_type = other DNA
gtttggaggaggtgctgggg

SEQ ID NO: 11960 - DNA, 20 bp, synthetic construct
  source 1..20: mol_type = other DNA
cagccccatgcagtgagtcg

SEQ ID NO: 11961 - DNA, 20 bp, synthetic construct
  source 1..20: mol_type = other DNA
ctgatcctatagcctagtga

SEQ ID NO: 11962 - DNA, 20 bp, synthetic construct
  source 1..20: mol_type = other DNA
cccaaatcccaactctacac

SEQ ID NO: 11963 - DNA, 20 bp, synthetic construct
  source 1..20: mol_type = other DNA
gttgaatgtcattaactaag

SEQ ID NO: 11964 - DNA, 20 bp, synthetic construct
  source 1..20: mol_type = other DNA
cctccccgactcactgcatg

SEQ ID NO: 11965 - DNA, 20 bp, synthetic construct
  source 1..20: mol_type = other DNA
ccaaatcccaactctacaca

SEQ ID NO: 11966 - DNA, 20 bp, synthetic construct
  source 1..20: mol_type = other DNA
aactaagtggtaacagacaa

SEQ ID NO: 11967 - DNA, 20 bp, synthetic construct
  source 1..20: mol_type = other DNA
ttcctccccgactcactgca

SEQ ID NO: 11968 - DNA, 20 bp, synthetic construct
  source 1..20: mol_type = other DNA
tcctccccgactcactgcat

SEQ ID NO: 11969 - DNA, 20 bp, synthetic construct
  source 1..20: mol_type = other DNA
gataggattcgtgtctaaca

SEQ ID NO: 11970 - DNA, 20 bp, synthetic construct
  source 1..20: mol_type = other DNA
agtcggggaggaactggatt

SEQ ID NO: 11971 - DNA, 20 bp, synthetic construct
  source 1..20: mol_type = other DNA
gatattagaaccagttcttc

SEQ ID NO: 11972 - DNA, 20 bp, synthetic construct
  source 1..20: mol_type = other DNA
tctacttccctgtgtagagt

SEQ ID NO: 11973 - DNA, 20 bp, synthetic construct
  source 1..20: mol_type = other DNA
ggatttggagccagaagaac

SEQ ID NO: 11974 - DNA, 20 bp, synthetic construct
  source 1..20: mol_type = other DNA
ctacttccctgtgtagagtt

SEQ ID NO: 11975 - DNA, 20 bp, synthetic construct
  source 1..20: mol_type = other DNA
gaccctagtcggccgctgag

SEQ ID NO: 11976 - DNA, 20 bp, synthetic construct
  source 1..20: mol_type = other DNA
agactccgcgcgcctctcag

SEQ ID NO: 11977 - DNA, 20 bp, synthetic construct
  source 1..20: mol_type = other DNA
tcagcggccgactagggtca

SEQ ID NO: 11978 - DNA, 20 bp, synthetic construct
  source 1..20: mol_type = other DNA
agcggccgactagggtcacg

SEQ ID NO: 11979 - DNA, 20 bp, synthetic construct
  source 1..20: mol_type = other DNA
ggcatctccggcccgaatcc

SEQ ID NO: 11980 - DNA, 20 bp, synthetic construct
  source 1..20: mol_type = other DNA
ggagatgccggggacgcctc

SEQ ID NO: 11981 - DNA, 20 bp, synthetic construct
  source 1..20: mol_type = other DNA
tctgggccgctgccgtctag

SEQ ID NO: 11982 - DNA, 20 bp, synthetic construct
  source 1..20: mol_type = other DNA
cgggaacggtctgggctgcg

SEQ ID NO: 11983 - DNA, 20 bp, synthetic construct
  source 1..20: mol_type = other DNA
gggtccccagcggccagcat

SEQ ID NO: 11984 - DNA, 20 bp, synthetic construct
  source 1..20: mol_type = other DNA
gggaacggtctgggctgcgc

SEQ ID NO: 11985 - DNA, 20 bp, synthetic construct
  source 1..20: mol_type = other DNA
cgtctaggggtcccgtcccg

SEQ ID NO: 11986 - DNA, 20 bp, synthetic construct
  source 1..20: mol_type = other DNA
acgggacccctagacggcag

SEQ ID NO: 11987 - DNA, 20 bp, synthetic construct
  source 1..20: mol_type = other DNA
gattcgggccggagatgccg

SEQ ID NO: 11988 - DNA, 20 bp, synthetic construct
  source 1..20: mol_type = other DNA
gtcggccgctgagaggcgcg

SEQ ID NO: 11989 - DNA, 20 bp, synthetic construct
  source 1..20: mol_type = other DNA
gtcccgtcccgaggcgtccc

SEQ ID NO: 11990 - DNA, 20 bp, synthetic construct
  source 1..20: mol_type = other DNA
gagccaccgtccgagccttg

SEQ ID NO: 11991 - DNA, 20 bp, synthetic construct
  source 1..20: mol_type = other DNA
gctccgcaaggctcggacgg

SEQ ID NO: 11992 - DNA, 20 bp, synthetic construct
  source 1..20: mol_type = other DNA
gctcggacggtggctcctgg

SEQ ID NO: 11993 - DNA, 20 bp, synthetic construct
  source 1..20: mol_type = other DNA
aaggctcggacggtggctcc

SEQ ID NO: 11994 - DNA, 20 bp, synthetic construct
  source 1..20: mol_type = other DNA
gccttgcggagcgcggcagt

SEQ ID NO: 11995 - DNA, 20 bp, synthetic construct
  source 1..20: mol_type = other DNA
cgcgctccgcaaggctcgga

SEQ ID NO: 11996 - DNA, 20 bp, synthetic construct
  source 1..20: mol_type = other DNA
ctcggacggtggctcctggc

SEQ ID NO: 11997 - DNA, 20 bp, synthetic construct
  source 1..20: mol_type = other DNA
gcccactgccgcgctccgca

SEQ ID NO: 11998 - DNA, 20 bp, synthetic construct
  source 1..20: mol_type = other DNA
aggcaacggccagagggcgg

SEQ ID NO: 11999 - DNA, 20 bp, synthetic construct
  source 1..20: mol_type = other DNA
tccgtccggggccgggtcag

SEQ ID NO: 12000 - DNA, 20 bp, synthetic construct
  source 1..20: mol_type = other DNA
gctgcccgcagcccctgacc

SEQ ID NO: 12001 - DNA, 20 bp, synthetic construct
  source 1..20: mol_type = other DNA
cgtccgagccttgcggagcg

SEQ ID NO: 12002 - DNA, 20 bp, synthetic construct
  source 1..20: mol_type = other DNA
gcccctgacccggccccgga

SEQ ID NO: 12003 - DNA, 20 bp, synthetic construct
  source 1..20: mol_type = other DNA
cggagcgcggcagtgggcgc

SEQ ID NO: 12004 - DNA, 20 bp, synthetic construct
  source 1..20: mol_type = other DNA
cgcagcccctgacccggccc

SEQ ID NO: 12005 - DNA, 20 bp, synthetic construct
  source 1..20: mol_type = other DNA
caaggggtacttaaggtcag

SEQ ID NO: 12006 - DNA, 20 bp, synthetic construct
  source 1..20: mol_type = other DNA
ccctgagcctggtcgccaag

SEQ ID NO: 12007 - DNA, 20 bp, synthetic construct
  source 1..20: mol_type = other DNA
cagggcaccaggacctaccc

SEQ ID NO: 12008 - DNA, 20 bp, synthetic construct
  source 1..20: mol_type = other DNA
ctctgaccttaagtacccct

SEQ ID NO: 12009 - DNA, 20 bp, synthetic construct
  source 1..20: mol_type = other DNA
accaggacctacccaggcgc

SEQ ID NO: 12010 - DNA, 20 bp, synthetic construct
  source 1..20: mol_type = other DNA
tgagcgggattcagggcacc

SEQ ID NO: 12011 - DNA, 20 bp, synthetic construct
  source 1..20: mol_type = other DNA
ccccttggcgaccaggctca

SEQ ID NO: 12012 - DNA, 20 bp, synthetic construct
  source 1..20: mol_type = other DNA
caccaggacctacccaggcg

SEQ ID NO: 12013 - DNA, 20 bp, synthetic construct
  source 1..20: mol_type = other DNA
caggacctacccaggcgcgg

SEQ ID NO: 12014 - DNA, 20 bp, synthetic construct
  source 1..20: mol_type = other DNA
accccttggcgaccaggctc

SEQ ID NO: 12015 - DNA, 20 bp, synthetic construct
  source 1..20: mol_type = other DNA
ccaggacctacccaggcgcg

SEQ ID NO: 12016 - DNA, 20 bp, synthetic construct
  source 1..20: mol_type = other DNA
tggccaagggcagaatgagc

SEQ ID NO: 12017 - DNA, 20 bp, synthetic construct
  source 1..20: mol_type = other DNA
ggtgtcccccgcgcctgggt

SEQ ID NO: 12018 - DNA, 20 bp, synthetic construct
  source 1..20: mol_type = other DNA
tccctgagcctggtcgccaa

SEQ ID NO: 12019 - DNA, 20 bp, synthetic construct
  source 1..20: mol_type = other DNA
gtggccaagggcagaatgag

SEQ ID NO: 12020 - DNA, 20 bp, synthetic construct
  source 1..20: mol_type = other DNA
acctgaggcagactccacgt

SEQ ID NO: 12021 - DNA, 20 bp, synthetic construct
  source 1..20: mol_type = other DNA
gacgtggagtctgcctcagg

SEQ ID NO: 12022 - DNA, 20 bp, synthetic construct
  source 1..20: mol_type = other DNA
ccggctcatgccagccgacg

SEQ ID NO: 12023 - DNA, 20 bp, synthetic construct
  source 1..20: mol_type = other DNA
ctcaggtggaggaaccgctc

SEQ ID NO: 12024 - DNA, 20 bp, synthetic construct
  source 1..20: mol_type = other DNA
aggtggaggaaccgctccgg

SEQ ID NO: 12025 - DNA, 20 bp, synthetic construct
  source 1..20: mol_type = other DNA
caggtggaggaaccgctccg

SEQ ID NO: 12026 - DNA, 20 bp, synthetic construct
  source 1..20: mol_type = other DNA
tacaggtctgtgaagcaggc

SEQ ID NO: 12027 - DNA, 20 bp, synthetic construct
  source 1..20: mol_type = other DNA
gtggagtctgcctcaggtgg

SEQ ID NO: 12028 - DNA, 20 bp, synthetic construct
  source 1..20: mol_type = other DNA
gagatacaggtctgtgaagc

SEQ ID NO: 12029 - DNA, 20 bp, synthetic construct
  source 1..20: mol_type = other DNA
gccgtagggcgcagctgcag

SEQ ID NO: 12030 - DNA, 20 bp, synthetic construct
  source 1..20: mol_type = other DNA
gcaggttgctcagctgcccc

SEQ ID NO: 12031 - DNA, 20 bp, synthetic construct
  source 1..20: mol_type = other DNA
cggagcggttcctccacctg

SEQ ID NO: 12032 - DNA, 20 bp, synthetic construct
  source 1..20: mol_type = other DNA
ggccgtagggcgcagctgca

SEQ ID NO: 12033 - DNA, 20 bp, synthetic construct
  source 1..20: mol_type = other DNA
ttgctcagctgcccccggag

SEQ ID NO: 12034 - DNA, 20 bp, synthetic construct
  source 1..20: mol_type = other DNA
tcaggtggaggaaccgctcc

SEQ ID NO: 12035 - DNA, 20 bp, synthetic construct
  source 1..20: mol_type = other DNA
ggaggagccattgacaccgc

SEQ ID NO: 12036 - DNA, 20 bp, synthetic construct
  source 1..20: mol_type = other DNA
tcacagaaatctctttcagg

SEQ ID NO: 12037 - DNA, 20 bp, synthetic construct
  source 1..20: mol_type = other DNA
tgggcgagtggaggctccgg

SEQ ID NO: 12038 - DNA, 20 bp, synthetic construct
  source 1..20: mol_type = other DNA
gggaccgactgggcgagtgg

SEQ ID NO: 12039 - DNA, 20 bp, synthetic construct
  source 1..20: mol_type = other DNA
cggcgacagggctgacgagg

SEQ ID NO: 12040 - DNA, 20 bp, synthetic construct
  source 1..20: mol_type = other DNA
cttcgccgaggagagaaggg

SEQ ID NO: 12041 - DNA, 20 bp, synthetic construct
  source 1..20: mol_type = other DNA
cagcggcgacagggctgacg

SEQ ID NO: 12042 - DNA, 20 bp, synthetic construct
  source 1..20: mol_type = other DNA
cagcagaagcagcggcgaca

SEQ ID NO: 12043 - DNA, 20 bp, synthetic construct
  source 1..20: mol_type = other DNA
ggagcctccactcgcccagt

SEQ ID NO: 12044 - DNA, 20 bp, synthetic construct
  source 1..20: mol_type = other DNA
ggagggaccgactgggcgag

SEQ ID NO: 12045 - DNA, 20 bp, synthetic construct
  source 1..20: mol_type = other DNA
ctgcttctgctgctgctccg

SEQ ID NO: 12046 - DNA, 20 bp, synthetic construct
  source 1..20: mol_type = other DNA
gtcaatggctcctcctgcca

SEQ ID NO: 12047 - DNA, 20 bp, synthetic construct
  source 1..20: mol_type = other DNA
gcagcagaagcagcggcgac

SEQ ID NO: 12048 - DNA, 20 bp, synthetic construct
  source 1..20: mol_type = other DNA
gactgggcgagtggaggctc

SEQ ID NO: 12049 - DNA, 20 bp, synthetic construct
  source 1..20: mol_type = other DNA
cagggctgacgaggaggagg

SEQ ID NO: 12050 - DNA, 20 bp, synthetic construct
  source 1..20: mol_type = other DNA
gagcgccgactgtctacggg

SEQ ID NO: 12051 - DNA, 20 bp, synthetic construct
  source 1..20: mol_type = other DNA
ggacactgcgctcacgtacg

SEQ ID NO: 12052 - DNA, 20 bp, synthetic construct
  source 1..20: mol_type = other DNA
atgtgcgcgaggagtcgctc

SEQ ID NO: 12053 - DNA, 20 bp, synthetic construct
  source 1..20: mol_type = other DNA
cccggccgcccgtagacagt

SEQ ID NO: 12054 - DNA, 20 bp, synthetic construct
  source 1..20: mol_type = other DNA
gcgcctgggctacacacccc

SEQ ID NO: 12055 - DNA, 20 bp, synthetic construct
  source 1..20: mol_type = other DNA
gtgtagcccaggcgcgctgg

SEQ ID NO: 12056 - DNA, 20 bp, synthetic construct
  source 1..20: mol_type = other DNA
attgagcgccgactgtctac

SEQ ID NO: 12057 - DNA, 20 bp, synthetic construct
  source 1..20: mol_type = other DNA
tgcgctcacgtacgcggccg

SEQ ID NO: 12058 - DNA, 20 bp, synthetic construct
  source 1..20: mol_type = other DNA
tgtgtagcccaggcgcgctg

SEQ ID NO: 12059 - DNA, 20 bp, synthetic construct
  source 1..20: mol_type = other DNA
gactgtctacgggcggccgg

SEQ ID NO: 12060 - DNA, 20 bp, synthetic construct
  source 1..20: mol_type = other DNA
tattgagcgccgactgtcta

SEQ ID NO: 12061 - DNA, 20 bp, synthetic construct
  source 1..20: mol_type = other DNA
tgctccgctcccttcccggg

SEQ ID NO: 12062 - DNA, 20 bp, synthetic construct
  source 1..20: mol_type = other DNA
acgcggccgcggccacaacc

SEQ ID NO: 12063 - DNA, 20 bp, synthetic construct
  source 1..20: mol_type = other DNA
cgctgggcgccggctggcag

SEQ ID NO: 12064 - DNA, 20 bp, synthetic construct
  source 1..20: mol_type = other DNA
ggtgtgtagcccaggcgcgc

SEQ ID NO: 12065 - DNA, 20 bp, synthetic construct
  source 1..20: mol_type = other DNA
gggtagatggaccgatccca

SEQ ID NO: 12066 - DNA, 20 bp, synthetic construct
  source 1..20: mol_type = other DNA
atcggtccatctaccccgcg

SEQ ID NO: 12067 - DNA, 20 bp, synthetic construct
  source 1..20: mol_type = other DNA
ggagtgcgggcgctcgatcc

SEQ ID NO: 12068 - DNA, 20 bp, synthetic construct
  source 1..20: mol_type = other DNA
tgcgggcgctcgatccagga

SEQ ID NO: 12069 - DNA, 20 bp, synthetic construct
  source 1..20: mol_type = other DNA
ggggcagtcggagtgatccc

SEQ ID NO: 12070 - DNA, 20 bp, synthetic construct
  source 1..20: mol_type = other DNA
gggcgctcgatccaggaagg

SEQ ID NO: 12071 - DNA, 20 bp, synthetic construct
  source 1..20: mol_type = other DNA
gcgctcgatccaggaaggag

SEQ ID NO: 12072 - DNA, 20 bp, synthetic construct
  source 1..20: mol_type = other DNA
gcgtgcaggcgacagcgagc

SEQ ID NO: 12073 - DNA, 20 bp, synthetic construct
  source 1..20: mol_type = other DNA
ggcgctcgatccaggaagga

SEQ ID NO: 12074 - DNA, 20 bp, synthetic construct
  source 1..20: mol_type = other DNA
tccaggaaggaggggagctg

SEQ ID NO: 12075 - DNA, 20 bp, synthetic construct
  source 1..20: mol_type = other DNA
gacagcgagcgggactcggg

SEQ ID NO: 12076 - DNA, 20 bp, synthetic construct
  source 1..20: mol_type = other DNA
gggagctgaggctgaagctg

SEQ ID NO: 12077 - DNA, 20 bp, synthetic construct
  source 1..20: mol_type = other DNA
ggggagctgaggctgaagct

SEQ ID NO: 12078 - DNA, 20 bp, synthetic construct
  source 1..20: mol_type = other DNA
gcgggactcgggtggctgca

SEQ ID NO: 12079 - DNA, 20 bp, synthetic construct
  source 1..20: mol_type = other DNA
gctgaggctgaagctggggc

SEQ ID NO: 12080 - DNA, 20 bp, synthetic construct
  source 1..20: mol_type = other DNA
taaggatcttaagcccacct

SEQ ID NO: 12081 - DNA, 20 bp, synthetic construct
  source 1..20: mol_type = other DNA
ggccataggacacagagagc

SEQ ID NO: 12082 - DNA, 20 bp, synthetic construct
  source 1..20: mol_type = other DNA
ggaaaacgaagctccccgca

SEQ ID NO: 12083 - DNA, 20 bp, synthetic construct
  source 1..20: mol_type = other DNA
tggaaaacgaagctccccgc

SEQ ID NO: 12084 - DNA, 20 bp, synthetic construct
  source 1..20: mol_type = other DNA
ctagaggccgggaccctgcg

SEQ ID NO: 12085 - DNA, 20 bp, synthetic construct
  source 1..20: mol_type = other DNA
atctgagctctctggccagg

SEQ ID NO: 12086 - DNA, 20 bp, synthetic construct
  source 1..20: mol_type = other DNA
cgcacagcagccctagaggc

SEQ ID NO: 12087 - DNA, 20 bp, synthetic construct
  source 1..20: mol_type = other DNA
ccctagaggccgggaccctg

SEQ ID NO: 12088 - DNA, 20 bp, synthetic construct
  source 1..20: mol_type = other DNA
gcacagcagccctagaggcc

SEQ ID NO: 12089 - DNA, 20 bp, synthetic construct
  source 1..20: mol_type = other DNA
aggccataggacacagagag

SEQ ID NO: 12090 - DNA, 20 bp, synthetic construct
  source 1..20: mol_type = other DNA
ggcctctagggctgctgtgc

SEQ ID NO: 12091 - DNA, 20 bp, synthetic construct
  source 1..20: mol_type = other DNA
gagctctctggccaggagga

SEQ ID NO: 12092 - DNA, 20 bp, synthetic construct
  source 1..20: mol_type = other DNA
tgagctctctggccaggagg

SEQ ID NO: 12093 - DNA, 20 bp, synthetic construct
  source 1..20: mol_type = other DNA
cggcctctagggctgctgtg

SEQ ID NO: 12094 - DNA, 20 bp, synthetic construct
  source 1..20: mol_type = other DNA
caacgaggtcagggccaagg

SEQ ID NO: 12095 - DNA, 20 bp, synthetic construct
  source 1..20: mol_type = other DNA
gagagagaattcctgaccac

SEQ ID NO: 12096 - DNA, 20 bp, synthetic construct
  source 1..20: mol_type = other DNA
tcttcttgaccctgaagtag

SEQ ID NO: 12097 - DNA, 20 bp, synthetic construct
  source 1..20: mol_type = other DNA
acagtaaagggtgcctgcga

SEQ ID NO: 12098 - DNA, 20 bp, synthetic construct
  source 1..20: mol_type = other DNA
tcagaccttaaacgggaggg

SEQ ID NO: 12099 - DNA, 20 bp, synthetic construct
  source 1..20: mol_type = other DNA
acccacactccagccgagga

SEQ ID NO: 12100 - DNA, 20 bp, synthetic construct
  source 1..20: mol_type = other DNA
agccacccacactccagccg

SEQ ID NO: 12101 - DNA, 20 bp, synthetic construct
  source 1..20: mol_type = other DNA
agtaaagggtgcctgcgacg

SEQ ID NO: 12102 - DNA, 20 bp, synthetic construct
  source 1..20: mol_type = other DNA
ttcctcggctggagtgtggg

SEQ ID NO: 12103 - DNA, 20 bp, synthetic construct
  source 1..20: mol_type = other DNA
gccttcctcggctggagtgt

SEQ ID NO: 12104 - DNA, 20 bp, synthetic construct
  source 1..20: mol_type = other DNA
tgggtggcttggtgagccgg

SEQ ID NO: 12105 - DNA, 20 bp, synthetic construct
  source 1..20: mol_type = other DNA
gagccagtgcaccccgtcgc

SEQ ID NO: 12106 - DNA, 20 bp, synthetic construct
  source 1..20: mol_type = other DNA
gtgcctgcgacggggtgcac

SEQ ID NO: 12107 - DNA, 20 bp, synthetic construct
  source 1..20: mol_type = other DNA
gtgtgggtggcttggtgagc

SEQ ID NO: 12108 - DNA, 20 bp, synthetic construct
  source 1..20: mol_type = other DNA
tgccttcctcggctggagtg

SEQ ID NO: 12109 - DNA, 20 bp, synthetic construct
  source 1..20: mol_type = other DNA
tcagctctgccttcctcggc

SEQ ID NO: 12110 - DNA, 20 bp, synthetic construct
  source 1..20: mol_type = other DNA
gaccggatccgacccgtccg

SEQ ID NO: 12111 - DNA, 20 bp, synthetic construct
  source 1..20: mol_type = other DNA
cggatccgacccgtccgcgg

SEQ ID NO: 12112 - DNA, 20 bp, synthetic construct
  source 1..20: mol_type = other DNA
acgcgtaggctacgccaccg

SEQ ID NO: 12113 - DNA, 20 bp, synthetic construct
  source 1..20: mol_type = other DNA
gacccagaagtcttctggcg

SEQ ID NO: 12114 - DNA, 20 bp, synthetic construct
  source 1..20: mol_type = other DNA
tcggatccggtccctggacg

SEQ ID NO: 12115 - DNA, 20 bp, synthetic construct
  source 1..20: mol_type = other DNA
ctctacggggctcagtctgg

SEQ ID NO: 12116 - DNA, 20 bp, synthetic construct
  source 1..20: mol_type = other DNA
taggctacgccaccgcggac

SEQ ID NO: 12117 - DNA, 20 bp, synthetic construct
  source 1..20: mol_type = other DNA
gacttctgggtccccggacg

SEQ ID NO: 12118 - DNA, 20 bp, synthetic construct
  source 1..20: mol_type = other DNA
tcgcgcggttgtcttggaga

SEQ ID NO: 12119 - DNA, 20 bp, synthetic construct
  source 1..20: mol_type = other DNA
tgtcttggagagggacgcgt

SEQ ID NO: 12120 - DNA, 20 bp, synthetic construct
  source 1..20: mol_type = other DNA
gtaggctacgccaccgcgga

SEQ ID NO: 12121 - DNA, 20 bp, synthetic construct
  source 1..20: mol_type = other DNA
tctgttccgcgtccagggac

SEQ ID NO: 12122 - DNA, 20 bp, synthetic construct
  source 1..20: mol_type = other DNA
gtcgagcgagcagagcgcgc

SEQ ID NO: 12123 - DNA, 20 bp, synthetic construct
  source 1..20: mol_type = other DNA
actctacggggctcagtctg

SEQ ID NO: 12124 - DNA, 20 bp, synthetic construct
  source 1..20: mol_type = other DNA
tctgggggtggctgaatcag

SEQ ID NO: 12125 - DNA, 20 bp, synthetic construct
  source 1..20: mol_type = other DNA
aggaggaagccagagacatg

SEQ ID NO: 12126 - DNA, 20 bp, synthetic construct
  source 1..20: mol_type = other DNA
tcccctacctgtcaagaagg

SEQ ID NO: 12127 - DNA, 20 bp, synthetic construct
  source 1..20: mol_type = other DNA
accagagcatcgtcacctgg

SEQ ID NO: 12128 - DNA, 20 bp, synthetic construct
  source 1..20: mol_type = other DNA
ccagagcatcgtcacctgga

SEQ ID NO: 12129 - DNA, 20 bp, synthetic construct
  source 1..20: mol_type = other DNA
ctcagccagagccccgacgc

SEQ ID NO: 12130 - DNA, 20 bp, synthetic construct
  source 1..20: mol_type = other DNA
agaaccagagcatcgtcacc

SEQ ID NO: 12131 - DNA, 20 bp, synthetic construct
  source 1..20: mol_type = other DNA
cgcgggacctgcagtcgcca

SEQ ID NO: 12132 - DNA, 20 bp, synthetic construct
  source 1..20: mol_type = other DNA
gagctgcggcagctgagcag

SEQ ID NO: 12133 - DNA, 20 bp, synthetic construct
  source 1..20: mol_type = other DNA
atgctctggttctccggcgt

SEQ ID NO: 12134 - DNA, 20 bp, synthetic construct
  source 1..20: mol_type = other DNA
cgtcacctggagggaatccc

SEQ ID NO: 12135 - DNA, 20 bp, synthetic construct
  source 1..20: mol_type = other DNA
ctgcggcagctgagcagagg

SEQ ID NO: 12136 - DNA, 20 bp, synthetic construct
  source 1..20: mol_type = other DNA
cggcagctgagcagaggcgg

SEQ ID NO: 12137 - DNA, 20 bp, synthetic construct
  source 1..20: mol_type = other DNA
agtcgccagggattccctcc

SEQ ID NO: 12138 - DNA, 20 bp, synthetic construct
  source 1..20: mol_type = other DNA
gctgagcagaggcggcggcg

SEQ ID NO: 12139 - DNA, 20 bp, synthetic construct
  source 1..20: mol_type = other DNA
gctctggttctccggcgtcg

SEQ ID NO: 12140 - DNA, 20 bp, synthetic construct
  source 1..20: mol_type = other DNA
gcgcgacctgggtgccatgg

SEQ ID NO: 12141 - DNA, 20 bp, synthetic construct
  source 1..20: mol_type = other DNA
cagcggcggtgacaggccag

SEQ ID NO: 12142 - DNA, 20 bp, synthetic construct
  source 1..20: mol_type = other DNA
tgagcctggcagtggtctgg

SEQ ID NO: 12143 - DNA, 20 bp, synthetic construct
  source 1..20: mol_type = other DNA
tggtctggcggcgcccactg

SEQ ID NO: 12144 - DNA, 20 bp, synthetic construct
  source 1..20: mol_type = other DNA
ggaggcctcgaggccgcagt

SEQ ID NO: 12145 - DNA, 20 bp, synthetic construct
  source 1..20: mol_type = other DNA
aggccagcggcctgagaccg

SEQ ID NO: 12146 - DNA, 20 bp, synthetic construct
  source 1..20: mol_type = other DNA
ccagcggcctgagaccgcgg

SEQ ID NO: 12147 - DNA, 20 bp, synthetic construct
  source 1..20: mol_type = other DNA
cgcgcgcgacctgggtgcca

SEQ ID NO: 12148 - DNA, 20 bp, synthetic construct
  source 1..20: mol_type = other DNA
ccgctgccgccatggcaccc

SEQ ID NO: 12149 - DNA, 20 bp, synthetic construct
  source 1..20: mol_type = other DNA
gcctgagcctggcagtggtc

SEQ ID NO: 12150 - DNA, 20 bp, synthetic construct
  source 1..20: mol_type = other DNA
aggaggcctcgaggccgcag

SEQ ID NO: 12151 - DNA, 20 bp, synthetic construct
  source 1..20: mol_type = other DNA
gggtgccatggcggcagcgg

SEQ ID NO: 12152 - DNA, 20 bp, synthetic construct
  source 1..20: mol_type = other DNA
cggcggccgaggaggcctcg

SEQ ID NO: 12153 - DNA, 20 bp, synthetic construct
  source 1..20: mol_type = other DNA
gcctgagaccgcggcggccg

SEQ ID NO: 12154 - DNA, 20 bp, synthetic construct
  source 1..20: mol_type = other DNA
tgagaccgcggcggccgagg

SEQ ID NO: 12155 - DNA, 20 bp, synthetic construct
  source 1..20: mol_type = other DNA
tggtcaagttcaccatgaga

SEQ ID NO: 12156 - DNA, 20 bp, synthetic construct
  source 1..20: mol_type = other DNA
actgaaggagaagacgatct

SEQ ID NO: 12157 - DNA, 20 bp, synthetic construct
  source 1..20: mol_type = other DNA
cgcgggctccagactcgccg

SEQ ID NO: 12158 - DNA, 20 bp, synthetic construct
  source 1..20: mol_type = other DNA
gagagtcccgggagaagact

SEQ ID NO: 12159 - DNA, 20 bp, synthetic construct
  source 1..20: mol_type = other DNA
aggagaagacgatctgggag

SEQ ID NO: 12160 - DNA, 20 bp, synthetic construct
  source 1..20: mol_type = other DNA
ggccgaggcctggacagaag

SEQ ID NO: 12161 - DNA, 20 bp, synthetic construct
  source 1..20: mol_type = other DNA
tgactcggcactgagagtcc

SEQ ID NO: 12162 - DNA, 20 bp, synthetic construct
  source 1..20: mol_type = other DNA
agagatgctcaggaaggccg

SEQ ID NO: 12163 - DNA, 20 bp, synthetic construct
  source 1..20: mol_type = other DNA
cgaccgccgagtcttctccc

SEQ ID NO: 12164 - DNA, 20 bp, synthetic construct
  source 1..20: mol_type = other DNA
gaagacgatctgggagagga

SEQ ID NO: 12165 - DNA, 20 bp, synthetic construct
  source 1..20: mol_type = other DNA
cgaggcctggacagaagagg

SEQ ID NO: 12166 - DNA, 20 bp, synthetic construct
  source 1..20: mol_type = other DNA
agtcccgggagaagactcgg

SEQ ID NO: 12167 - DNA, 20 bp, synthetic construct
  source 1..20: mol_type = other DNA
ggaaggagagatgctcagga

SEQ ID NO: 12168 - DNA, 20 bp, synthetic construct
  source 1..20: mol_type = other DNA
gagaggaaggagagatgctc

SEQ ID NO: 12169 - DNA, 20 bp, synthetic construct
  source 1..20: mol_type = other DNA
gactcggcactgagagtccc

SEQ ID NO: 12170 - DNA, 20 bp, synthetic construct
  source 1..20: mol_type = other DNA
gcgcggtcgcggaagtatcg

SEQ ID NO: 12171 - DNA, 20 bp, synthetic construct
  source 1..20: mol_type = other DNA
cctaaccgttaagtgcgcta

SEQ ID NO: 12172 - DNA, 20 bp, synthetic construct
  source 1..20: mol_type = other DNA
gcatgcgctgcgcttagagg

SEQ ID NO: 12173 - DNA, 20 bp, synthetic construct
  source 1..20: mol_type = other DNA
tgttgccccagcaacaacca

SEQ ID NO: 12174 - DNA, 20 bp, synthetic construct
  source 1..20: mol_type = other DNA
cacggaaaccaagacgagcg

SEQ ID NO: 12175 - DNA, 20 bp, synthetic construct
  source 1..20: mol_type = other DNA
accgttaagtgcgctaaggt

SEQ ID NO: 12176 - DNA, 20 bp, synthetic construct
  source 1..20: mol_type = other DNA
ttacatatctcgcagccagg

SEQ ID NO: 12177 - DNA, 20 bp, synthetic construct
  source 1..20: mol_type = other DNA
ggtttccgtggttgttgctg

SEQ ID NO: 12178 - DNA, 20 bp, synthetic construct
  source 1..20: mol_type = other DNA
aaccaagacgagcgcggtcg

SEQ ID NO: 12179 - DNA, 20 bp, synthetic construct
  source 1..20: mol_type = other DNA
aggcgcgagccaggcctggt

SEQ ID NO: 12180 - DNA, 20 bp, synthetic construct
  source 1..20: mol_type = other DNA
atgcgctgcgcttagaggcg

SEQ ID NO: 12181 - DNA, 20 bp, synthetic construct
  source 1..20: mol_type = other DNA
cgcgctcgtcttggtttccg

SEQ ID NO: 12182 - DNA, 20 bp, synthetic construct
  source 1..20: mol_type = other DNA
tacatatctcgcagccaggc

SEQ ID NO: 12183 - DNA, 20 bp, synthetic construct
  source 1..20: mol_type = other DNA
ggagaggcgcgagccaggcc

SEQ ID NO: 12184 - DNA, 20 bp, synthetic construct
  source 1..20: mol_type = other DNA
gcctggctcgcgcctctccc

SEQ ID NO: 12185 - DNA, 20 bp, synthetic construct
  source 1..20: mol_type = other DNA
gaggctcaggcacacccgcg

SEQ ID NO: 12186 - DNA, 20 bp, synthetic construct
  source 1..20: mol_type = other DNA
cggaggctcaggcacacccg

SEQ ID NO: 12187 - DNA, 20 bp, synthetic construct
  source 1..20: mol_type = other DNA
gcgaggatgcggcgtgagga

SEQ ID NO: 12188 - DNA, 20 bp, synthetic construct
  source 1..20: mol_type = other DNA
gccctggccaggagctgtgg

SEQ ID NO: 12189 - DNA, 20 bp, synthetic construct
  source 1..20: mol_type = other DNA
ggttcccgggatgcgagcgc

SEQ ID NO: 12190 - DNA, 20 bp, synthetic construct
  source 1..20: mol_type = other DNA
ggacacttacccagggcctg

SEQ ID NO: 12191 - DNA, 20 bp, synthetic construct
  source 1..20: mol_type = other DNA
acacttacccagggcctgcg

SEQ ID NO: 12192 - DNA, 20 bp, synthetic construct
  source 1..20: mol_type = other DNA
ggccagggcgcgctgccccg

SEQ ID NO: 12193 - DNA, 20 bp, synthetic construct
  source 1..20: mol_type = other DNA
gctcgcatcccgggaacccg

SEQ ID NO: 12194 - DNA, 20 bp, synthetic construct
  source 1..20: mol_type = other DNA
cgcatcccgggaacccgcgg

SEQ ID NO: 12195 - DNA, 20 bp, synthetic construct
  source 1..20: mol_type = other DNA
ggaggctcaggcacacccgc

SEQ ID NO: 12196 - DNA, 20 bp, synthetic construct
  source 1..20: mol_type = other DNA
gcagtccctggagccgccgc

SEQ ID NO: 12197 - DNA, 20 bp, synthetic construct
  source 1..20: mol_type = other DNA
ctggccaggagctgtggcgg

SEQ ID NO: 12198 - DNA, 20 bp, synthetic construct
  source 1..20: mol_type = other DNA
cgcgccctggccaggagctg

SEQ ID NO: 12199 - DNA, 20 bp, synthetic construct
  source 1..20: mol_type = other DNA
ccagggcctgcggggcgcgg

SEQ ID NO: 12200 - DNA, 20 bp, synthetic construct
  source 1..20: mol_type = other DNA
ggataattgaccacttgaag

SEQ ID NO: 12201 - DNA, 20 bp, synthetic construct
  source 1..20: mol_type = other DNA
accaacccagccatctcagg

SEQ ID NO: 12202 - DNA, 20 bp, synthetic construct
  source 1..20: mol_type = other DNA
cagtgttctctatctatggg

SEQ ID NO: 12203 - DNA, 20 bp, synthetic construct
  source 1..20: mol_type = other DNA
tgacatctgaataaagtgag

SEQ ID NO: 12204 - DNA, 20 bp, synthetic construct
  source 1..20: mol_type = other DNA
tctgctgattcctcttcaag

SEQ ID NO: 12205 - DNA, 20 bp, synthetic construct
  source 1..20: mol_type = other DNA
ttggcagtgttctctatcta

SEQ ID NO: 12206 - DNA, 20 bp, synthetic construct
  source 1..20: mol_type = other DNA
tatatgtggaaaatattgag

SEQ ID NO: 12207 - DNA, 20 bp, synthetic construct
  source 1..20: mol_type = other DNA
tcctcctgagatggctgggt

SEQ ID NO: 12208 - DNA, 20 bp, synthetic construct
  source 1..20: mol_type = other DNA
ctgagatggctgggttggtt

SEQ ID NO: 12209 - DNA, 20 bp, synthetic construct
  source 1..20: mol_type = other DNA
tggcagtgttctctatctat

SEQ ID NO: 12210 - DNA, 20 bp, synthetic construct
  source 1..20: mol_type = other DNA
gacataagtaaagaaaactt

SEQ ID NO: 12211 - DNA, 20 bp, synthetic construct
  source 1..20: mol_type = other DNA
gcaaaaaaagttgagtcatc

SEQ ID NO: 12212 - DNA, 20 bp, synthetic construct
  source 1..20: mol_type = other DNA
atggctgggttggttaggag

SEQ ID NO: 12213 - DNA, 20 bp, synthetic construct
  source 1..20: mol_type = other DNA
agacataagtaaagaaaact

SEQ ID NO: 12214 - DNA, 20 bp, synthetic construct
  source 1..20: mol_type = other DNA
tgcaaaaaaagttgagtcat

SEQ ID NO: 12215 - DNA, 20 bp, synthetic construct
  source 1..20: mol_type = other DNA
atgtttctctacgacaacgg

SEQ ID NO: 12216 - DNA, 20 bp, synthetic construct
  source 1..20: mol_type = other DNA
gtcgtagagaaacatgacgg

SEQ ID NO: 12217 - DNA, 20 bp, synthetic construct
  source 1..20: mol_type = other DNA
tgacggtgggctcgatccag

SEQ ID NO: 12218 - DNA, 20 bp, synthetic construct
  source 1..20: mol_type = other DNA
ggcagggggcaacttctcgg

SEQ ID NO: 12219 - DNA, 20 bp, synthetic construct
  source 1..20: mol_type = other DNA
tcgtagagaaacatgacggt

SEQ ID NO: 12220 - DNA, 20 bp, synthetic construct
  source 1..20: mol_type = other DNA
acggtgggctcgatccagcg

SEQ ID NO: 12221 - DNA, 20 bp, synthetic construct
  source 1..20: mol_type = other DNA
gttgtcgtagagaaacatga

SEQ ID NO: 12222 - DNA, 20 bp, synthetic construct
  source 1..20: mol_type = other DNA
cggtgggctcgatccagcgg

SEQ ID NO: 12223 - DNA, 20 bp, synthetic construct
  source 1..20: mol_type = other DNA
tttctctacgacaacggcgg

SEQ ID NO: 12224 - DNA, 20 bp, synthetic construct
  source 1..20: mol_type = other DNA
ccactggggtcttctccatg

SEQ ID NO: 12225 - DNA, 20 bp, synthetic construct
  source 1..20: mol_type = other DNA
ctgtcatagcccgagccgca

SEQ ID NO: 12226 - DNA, 20 bp, synthetic construct
  source 1..20: mol_type = other DNA
tgttgagctcgtcggccacc

SEQ ID NO: 12227 - DNA, 20 bp, synthetic construct
  source 1..20: mol_type = other DNA
cgacaacggcggcggcctgg

SEQ ID NO: 12228 - DNA, 20 bp, synthetic construct
  source 1..20: mol_type = other DNA
gcgggggtggaggagcacgg

SEQ ID NO: 12229 - DNA, 20 bp, synthetic construct
  source 1..20: mol_type = other DNA
gtcatgtttctctacgacaa

SEQ ID NO: 12230 - DNA, 20 bp, synthetic construct
  source 1..20: mol_type = other DNA
gcgggagcgcgaggtcgatg

SEQ ID NO: 12231 - DNA, 20 bp, synthetic construct
  source 1..20: mol_type = other DNA
aagcgagagtctgagtcgcg

SEQ ID NO: 12232 - DNA, 20 bp, synthetic construct
  source 1..20: mol_type = other DNA
gagtctcgcggttccactcg

SEQ ID NO: 12233 - DNA, 20 bp, synthetic construct
  source 1..20: mol_type = other DNA
gatgtccggccggtctaagc

SEQ ID NO: 12234 - DNA, 20 bp, synthetic construct
  source 1..20: mol_type = other DNA
ggaagcgagagtctgagtcg

SEQ ID NO: 12235 - DNA, 20 bp, synthetic construct
  source 1..20: mol_type = other DNA
cggtctaagcgggagtctcg

SEQ ID NO: 12236 - DNA, 20 bp, synthetic construct
  source 1..20: mol_type = other DNA
agatgtccggccggtctaag

SEQ ID NO: 12237 - DNA, 20 bp, synthetic construct
  source 1..20: mol_type = other DNA
gcagctccggtcgcgtcaag

SEQ ID NO: 12238 - DNA, 20 bp, synthetic construct
  source 1..20: mol_type = other DNA
cggtagtggagatgtccggc

SEQ ID NO: 12239 - DNA, 20 bp, synthetic construct
  source 1..20: mol_type = other DNA
tcgctcccgcttgacgcgac

SEQ ID NO: 12240 - DNA, 20 bp, synthetic construct
  source 1..20: mol_type = other DNA
ctggacgactcggccggtag

SEQ ID NO: 12241 - DNA, 20 bp, synthetic construct
  source 1..20: mol_type = other DNA
agactctcgcttcccgcgag

SEQ ID NO: 12242 - DNA, 20 bp, synthetic construct
  source 1..20: mol_type = other DNA
agtctcgcggttccactcgc

SEQ ID NO: 12243 - DNA, 20 bp, synthetic construct
  source 1..20: mol_type = other DNA
cggccggtagtggagatgtc

SEQ ID NO: 12244 - DNA, 20 bp, synthetic construct
  source 1..20: mol_type = other DNA
tctgagtcgcggggcagctc

SEQ ID NO: 12245 - DNA, 20 bp, synthetic construct
  source 1..20: mol_type = other DNA
cagcagggaccccccagagg

SEQ ID NO: 12246 - DNA, 20 bp, synthetic construct
  source 1..20: mol_type = other DNA
cagcagcagggaccccccag

SEQ ID NO: 12247 - DNA, 20 bp, synthetic construct
  source 1..20: mol_type = other DNA
tccctgctgctgcccgaccc

SEQ ID NO: 12248 - DNA, 20 bp, synthetic construct
  source 1..20: mol_type = other DNA
ctcctccggctctgcagtgg

SEQ ID NO: 12249 - DNA, 20 bp, synthetic construct
  source 1..20: mol_type = other DNA
cacctcctccggctctgcag

SEQ ID NO: 12250 - DNA, 20 bp, synthetic construct
  source 1..20: mol_type = other DNA
cacgcccatagcggtcccac

SEQ ID NO: 12251 - DNA, 20 bp, synthetic construct
  source 1..20: mol_type = other DNA
gaggaggcgagccggagcga

SEQ ID NO: 12252 - DNA, 20 bp, synthetic construct
  source 1..20: mol_type = other DNA
gaggcgagccggagcgacgg

SEQ ID NO: 12253 - DNA, 20 bp, synthetic construct
  source 1..20: mol_type = other DNA
gccggggtcgggcagcagca

SEQ ID NO: 12254 - DNA, 20 bp, synthetic construct
  source 1..20: mol_type = other DNA
gcagggaccccccagaggcg

SEQ ID NO: 12255 - DNA, 20 bp, synthetic construct
  source 1..20: mol_type = other DNA
tcccacaggccccgcctctg

SEQ ID NO: 12256 - DNA, 20 bp, synthetic construct
  source 1..20: mol_type = other DNA
ggcgagccggagcgacggcg

SEQ ID NO: 12257 - DNA, 20 bp, synthetic construct
  source 1..20: mol_type = other DNA
gctgctgcccgaccccggct

SEQ ID NO: 12258 - DNA, 20 bp, synthetic construct
  source 1..20: mol_type = other DNA
gcccgaccccggctcggctc

SEQ ID NO: 12259 - DNA, 20 bp, synthetic construct
  source 1..20: mol_type = other DNA
ctggggccggagccgagccg

SEQ ID NO: 12260 - DNA, 20 bp, synthetic construct
  source 1..20: mol_type = other DNA
tgcgacgcgacagacccccg

SEQ ID NO: 12261 - DNA, 20 bp, synthetic construct
  source 1..20: mol_type = other DNA
aggatcagagcgcttgcccc

SEQ ID NO: 12262 - DNA, 20 bp, synthetic construct
  source 1..20: mol_type = other DNA
cctgcgacgcgacagacccc

SEQ ID NO: 12263 - DNA, 20 bp, synthetic construct
  source 1..20: mol_type = other DNA
gatcagagcgcttgccccgg

SEQ ID NO: 12264 - DNA, 20 bp, synthetic construct
  source 1..20: mol_type = other DNA
gaggatcagagcgcttgccc

SEQ ID NO: 12265 - DNA, 20 bp, synthetic construct
  source 1..20: mol_type = other DNA
ggatcagagcgcttgccccg

SEQ ID NO: 12266 - DNA, 20 bp, synthetic construct
  source 1..20: mol_type = other DNA
ctgcgacgcgacagaccccc

SEQ ID NO: 12267 - DNA, 20 bp, synthetic construct
  source 1..20: mol_type = other DNA
gaccccgcctgcttcgcccg

SEQ ID NO: 12268 - DNA, 20 bp, synthetic construct
  source 1..20: mol_type = other DNA
ggaggctggacagggtctac

SEQ ID NO: 12269 - DNA, 20 bp, synthetic construct
  source 1..20: mol_type = other DNA
caagcgctctgatcctcggc

SEQ ID NO: 12270 - DNA, 20 bp, synthetic construct
  source 1..20: mol_type = other DNA
ccagccgcgggcgaagcagg

SEQ ID NO: 12271 - DNA, 20 bp, synthetic construct
  source 1..20: mol_type = other DNA
cggcccgggagctgcccgag

SEQ ID NO: 12272 - DNA, 20 bp, synthetic construct
  source 1..20: mol_type = other DNA
ggtcctcatggccagggctc

SEQ ID NO: 12273 - DNA, 20 bp, synthetic construct
  source 1..20: mol_type = other DNA
cctcatggccagggctccgg

SEQ ID NO: 12274 - DNA, 20 bp, synthetic construct
  source 1..20: mol_type = other DNA
tcccgggccgcggccagccg

SEQ ID NO: 12275 - DNA, 20 bp, synthetic construct
  source 1..20: mol_type = other DNA
ctcggccttggacatcgtgg

SEQ ID NO: 12276 - DNA, 20 bp, synthetic construct
  source 1..20: mol_type = other DNA
ggcaacacaagcaccagctg

SEQ ID NO: 12277 - DNA, 20 bp, synthetic construct
  source 1..20: mol_type = other DNA
tgcatcccgacgcctcgctc

SEQ ID NO: 12278 - DNA, 20 bp, synthetic construct
  source 1..20: mol_type = other DNA
cttcagcaccctctacgggc

SEQ ID NO: 12279 - DNA, 20 bp, synthetic construct
  source 1..20: mol_type = other DNA
ggccaagacccgcccgtaga

SEQ ID NO: 12280 - DNA, 20 bp, synthetic construct
  source 1..20: mol_type = other DNA
ccttcagcaccctctacggg

SEQ ID NO: 12281 - DNA, 20 bp, synthetic construct
  source 1..20: mol_type = other DNA
cgggggcgggacttcagcgg

SEQ ID NO: 12282 - DNA, 20 bp, synthetic construct
  source 1..20: mol_type = other DNA
tagagggtgctgaagggccc

SEQ ID NO: 12283 - DNA, 20 bp, synthetic construct
  source 1..20: mol_type = other DNA
agagggtgctgaagggcccg

SEQ ID NO: 12284 - DNA, 20 bp, synthetic construct
  source 1..20: mol_type = other DNA
ggaggccggagcgaggcgtc

SEQ ID NO: 12285 - DNA, 20 bp, synthetic construct
  source 1..20: mol_type = other DNA
cggaggccggagcgaggcgt

SEQ ID NO: 12286 - DNA, 20 bp, synthetic construct
  source 1..20: mol_type = other DNA
tcttggccccgctgcccggg

SEQ ID NO: 12287 - DNA, 20 bp, synthetic construct
  source 1..20: mol_type = other DNA
cttcagcggaggccggagcg

SEQ ID NO: 12288 - DNA, 20 bp, synthetic construct
  source 1..20: mol_type = other DNA
ggcgtcgggatgcagcgccc

SEQ ID NO: 12289 - DNA, 20 bp, synthetic construct
  source 1..20: mol_type = other DNA
gtagagggtgctgaagggcc

SEQ ID NO: 12290 - DNA, 20 bp, synthetic construct
  source 1..20: mol_type = other DNA
gcagcagtcggcactcacgc

SEQ ID NO: 12291 - DNA, 20 bp, synthetic construct
  source 1..20: mol_type = other DNA
gtggcggcggcaacaatgca

SEQ ID NO: 12292 - DNA, 20 bp, synthetic construct
  source 1..20: mol_type = other DNA
tgcccgcccgcgtcactccg

SEQ ID NO: 12293 - DNA, 20 bp, synthetic construct
  source 1..20: mol_type = other DNA
gcagtcggcactcacgctgg

SEQ ID NO: 12294 - DNA, 20 bp, synthetic construct
  source 1..20: mol_type = other DNA
cgggcggaggacgcacgtcg

SEQ ID NO: 12295 - DNA, 20 bp, synthetic construct
  source 1..20: mol_type = other DNA
gcgggcggaggacgcacgtc

SEQ ID NO: 12296 - DNA, 20 bp, synthetic construct
  source 1..20: mol_type = other DNA
gccggccgggatgcagcagt

SEQ ID NO: 12297 - DNA, 20 bp, synthetic construct
  source 1..20: mol_type = other DNA
cccgagcgcctgcctggtgg

SEQ ID NO: 12298 - DNA, 20 bp, synthetic construct
  source 1..20: mol_type = other DNA
gcaccgctagcgcaagggcg

SEQ ID NO: 12299 - DNA, 20 bp, synthetic construct
  source 1..20: mol_type = other DNA
gctggtggctggcgctctgg

SEQ ID NO: 12300 - DNA, 20 bp, synthetic construct
  source 1..20: mol_type = other DNA
cctccgcccgcggagtgacg

SEQ ID NO: 12301 - DNA, 20 bp, synthetic construct
  source 1..20: mol_type = other DNA
cgacgtgcgtcctccgcccg

SEQ ID NO: 12302 - DNA, 20 bp, synthetic construct
  source 1..20: mol_type = other DNA
ctccgcccgcggagtgacgc

SEQ ID NO: 12303 - DNA, 20 bp, synthetic construct
  source 1..20: mol_type = other DNA
gcccgcccgcgtcactccgc

SEQ ID NO: 12304 - DNA, 20 bp, synthetic construct
  source 1..20: mol_type = other DNA
cgcgggcggaggacgcacgt

SEQ ID NO: 12305 - DNA, 20 bp, synthetic construct
  source 1..20: mol_type = other DNA
gggactgcagactcagacgg

SEQ ID NO: 12306 - DNA, 20 bp, synthetic construct
  source 1..20: mol_type = other DNA
gctgcaccgggccagagatg

SEQ ID NO: 12307 - DNA, 20 bp, synthetic construct
  source 1..20: mol_type = other DNA
cgtctgagtctgcagtcccg

SEQ ID NO: 12308 - DNA, 20 bp, synthetic construct
  source 1..20: mol_type = other DNA
gactcagacggtggtagtgg

SEQ ID NO: 12309 - DNA, 20 bp, synthetic construct
  source 1..20: mol_type = other DNA
gcagactcagacggtggtag

SEQ ID NO: 12310 - DNA, 20 bp, synthetic construct
  source 1..20: mol_type = other DNA
ctcgggactgcagactcaga

SEQ ID NO: 12311 - DNA, 20 bp, synthetic construct
  source 1..20: mol_type = other DNA
gacggcggcgctgagagagc

SEQ ID NO: 12312 - DNA, 20 bp, synthetic construct
  source 1..20: mol_type = other DNA
tcagacggtggtagtggcgg

SEQ ID NO: 12313 - DNA, 20 bp, synthetic construct
  source 1..20: mol_type = other DNA
tgagagagcgggagtggcag

SEQ ID NO: 12314 - DNA, 20 bp, synthetic construct
  source 1..20: mol_type = other DNA
cgacggcggcgctgagagag

SEQ ID NO: 12315 - DNA, 20 bp, synthetic construct
  source 1..20: mol_type = other DNA
ggtggtagtggcggtggcgg

SEQ ID NO: 12316 - DNA, 20 bp, synthetic construct
  source 1..20: mol_type = other DNA
ggcggtggcggtggcgacgg

SEQ ID NO: 12317 - DNA, 20 bp, synthetic construct
  source 1..20: mol_type = other DNA
aggggctctgggcctggcgg

SEQ ID NO: 12318 - DNA, 20 bp, synthetic construct
  source 1..20: mol_type = other DNA
cacaggggctctgggcctgg

SEQ ID NO: 12319 - DNA, 20 bp, synthetic construct
  source 1..20: mol_type = other DNA
ggtggcggtggcggtggcga

SEQ ID NO: 12320 - DNA, 20 bp, synthetic construct
  source 1..20: mol_type = other DNA
tatgtacacgcagctgactc

SEQ ID NO: 12321 - DNA, 20 bp, synthetic construct
  source 1..20: mol_type = other DNA
tagcagatctgcagcagata

SEQ ID NO: 12322 - DNA, 20 bp, synthetic construct
  source 1..20: mol_type = other DNA
ctctgtgtgaccgttcagca

SEQ ID NO: 12323 - DNA, 20 bp, synthetic construct
  source 1..20: mol_type = other DNA
ttcaaacgctttctttgagg

SEQ ID NO: 12324 - DNA, 20 bp, synthetic construct
  source 1..20: mol_type = other DNA
tgctgaacggtcacacagag

SEQ ID NO: 12325 - DNA, 20 bp, synthetic construct
  source 1..20: mol_type = other DNA
atagcagatctgcagcagat

SEQ ID NO: 12326 - DNA, 20 bp, synthetic construct
  source 1..20: mol_type = other DNA
atctgcagcagatagggtag

SEQ ID NO: 12327 - DNA, 20 bp, synthetic construct
  source 1..20: mol_type = other DNA
tacacgcagctgactcaggc

SEQ ID NO: 12328 - DNA, 20 bp, synthetic construct
  source 1..20: mol_type = other DNA
tcttcaaacgctttctttga

SEQ ID NO: 12329 - DNA, 20 bp, synthetic construct
  source 1..20: mol_type = other DNA
cagcagatagggtagaggaa

SEQ ID NO: 12330 - DNA, 20 bp, synthetic construct
  source 1..20: mol_type = other DNA
caggcaggctccatgctgaa

SEQ ID NO: 12331 - DNA, 20 bp, synthetic construct
  source 1..20: mol_type = other DNA
tttagaacaaagctaacaaa

SEQ ID NO: 12332 - DNA, 20 bp, synthetic construct
  source 1..20: mol_type = other DNA
cttcaaacgctttctttgag

SEQ ID NO: 12333 - DNA, 20 bp, synthetic construct
  source 1..20: mol_type = other DNA
agcagatagggtagaggaaa

SEQ ID NO: 12334 - DNA, 20 bp, synthetic construct
  source 1..20: mol_type = other DNA
ttcttcaaacgctttctttg

SEQ ID NO: 12335 - DNA, 20 bp, synthetic construct
  source 1..20: mol_type = other DNA
cttggttacagatccggacg

SEQ ID NO: 12336 - DNA, 20 bp, synthetic construct
  source 1..20: mol_type = other DNA
gtggtctgggaaaccaagtg

SEQ ID NO: 12337 - DNA, 20 bp, synthetic construct
  source 1..20: mol_type = other DNA
tgtggtctgggaaaccaagt

SEQ ID NO: 12338 - DNA, 20 bp, synthetic construct
  source 1..20: mol_type = other DNA
cacaaccaaatggggaccgg

SEQ ID NO: 12339 - DNA, 20 bp, synthetic construct
  source 1..20: mol_type = other DNA
ctgtggtctgggaaaccaag

SEQ ID NO: 12340 - DNA, 20 bp, synthetic construct
  source 1..20: mol_type = other DNA
caccgggacacaaccaaatg

SEQ ID NO: 12341 - DNA, 20 bp, synthetic construct
  source 1..20: mol_type = other DNA
cgtagccggcgtccccaaca

SEQ ID NO: 12342 - DNA, 20 bp, synthetic construct
  source 1..20: mol_type = other DNA
cccatggtcggctacccccc

SEQ ID NO: 12343 - DNA, 20 bp, synthetic construct
  source 1..20: mol_type = other DNA
acacaaccaaatggggaccg

SEQ ID NO: 12344 - DNA, 20 bp, synthetic construct
  source 1..20: mol_type = other DNA
cacttggtttcccagaccac

SEQ ID NO: 12345 - DNA, 20 bp, synthetic construct
  source 1..20: mol_type = other DNA
agccggcgtccccaacatgg

SEQ ID NO: 12346 - DNA, 20 bp, synthetic construct
  source 1..20: mol_type = other DNA
atccggacgtggacgtcttg

SEQ ID NO: 12347 - DNA, 20 bp, synthetic construct
  source 1..20: mol_type = other DNA
gaataagcgccttcacctcc

SEQ ID NO: 12348 - DNA, 20 bp, synthetic construct
  source 1..20: mol_type = other DNA
cttggggagccgccatgttg

SEQ ID NO: 12349 - DNA, 20 bp, synthetic construct
  source 1..20: mol_type = other DNA
gtcttggggagccgccatgt

SEQ ID NO: 12350 - DNA, 20 bp, synthetic construct
  source 1..20: mol_type = other DNA
ccccggcgtcacgctcaggt

SEQ ID NO: 12351 - DNA, 20 bp, synthetic construct
  source 1..20: mol_type = other DNA
aacctacctgagcgtgacgc

SEQ ID NO: 12352 - DNA, 20 bp, synthetic construct
  source 1..20: mol_type = other DNA
cgggcgtggagctcgtgcag

SEQ ID NO: 12353 - DNA, 20 bp, synthetic construct
  source 1..20: mol_type = other DNA
gtcacgctcaggtaggttgg

SEQ ID NO: 12354 - DNA, 20 bp, synthetic construct
  source 1..20: mol_type = other DNA
cccgagagctccgcgcacct

SEQ ID NO: 12355 - DNA, 20 bp, synthetic construct
  source 1..20: mol_type = other DNA
cctacctgagcgtgacgccg

SEQ ID NO: 12356 - DNA, 20 bp, synthetic construct
  source 1..20: mol_type = other DNA
cgtcacgctcaggtaggttg

SEQ ID NO: 12357 - DNA, 20 bp, synthetic construct
  source 1..20: mol_type = other DNA
gcgtcacgctcaggtaggtt

SEQ ID NO: 12358 - DNA, 20 bp, synthetic construct
  source 1..20: mol_type = other DNA
acctacctgagcgtgacgcc

SEQ ID NO: 12359 - DNA, 20 bp, synthetic construct
  source 1..20: mol_type = other DNA
cgtaccccggcgtcacgctc

SEQ ID NO: 12360 - DNA, 20 bp, synthetic construct
  source 1..20: mol_type = other DNA
gcggatggcgcccaggtgcg

SEQ ID NO: 12361 - DNA, 20 bp, synthetic construct
  source 1..20: mol_type = other DNA
gagctcgtgcagcggagcca

SEQ ID NO: 12362 - DNA, 20 bp, synthetic construct
  source 1..20: mol_type = other DNA
tgcagcggagccagggcgga

SEQ ID NO: 12363 - DNA, 20 bp, synthetic construct
  source 1..20: mol_type = other DNA
cgagctccacgcccgtaccc

SEQ ID NO: 12364 - DNA, 20 bp, synthetic construct
  source 1..20: mol_type = other DNA
ctcgtgcagcggagccaggg

SEQ ID NO: 12365 - DNA, 20 bp, synthetic construct
  source 1..20: mol_type = other DNA
acccgcccaagtatcggtca

SEQ ID NO: 12366 - DNA, 20 bp, synthetic construct
  source 1..20: mol_type = other DNA
ggccctgaccgatacttggg

SEQ ID NO: 12367 - DNA, 20 bp, synthetic construct
  source 1..20: mol_type = other DNA
cccgccagaccctcctccgg

SEQ ID NO: 12368 - DNA, 20 bp, synthetic construct
  source 1..20: mol_type = other DNA
gcactcacccgcccaagtat

SEQ ID NO: 12369 - DNA, 20 bp, synthetic construct
  source 1..20: mol_type = other DNA
gccctgaccgatacttgggc

SEQ ID NO: 12370 - DNA, 20 bp, synthetic construct
  source 1..20: mol_type = other DNA
actcagggagccgcctccgg

SEQ ID NO: 12371 - DNA, 20 bp, synthetic construct
  source 1..20: mol_type = other DNA
gccagaccctcctccggagg

SEQ ID NO: 12372 - DNA, 20 bp, synthetic construct
  source 1..20: mol_type = other DNA
agggagccgcctccggagga

SEQ ID NO: 12373 - DNA, 20 bp, synthetic construct
  source 1..20: mol_type = other DNA
agcagcaggaggaggcttcg

SEQ ID NO: 12374 - DNA, 20 bp, synthetic construct
  source 1..20: mol_type = other DNA
gcctccggaggagggtctgg

SEQ ID NO: 12375 - DNA, 20 bp, synthetic construct
  source 1..20: mol_type = other DNA
gggcccctgagagcagcagg

SEQ ID NO: 12376 - DNA, 20 bp, synthetic construct
  source 1..20: mol_type = other DNA
gctgaaatacctcaaggagt

SEQ ID NO: 12377 - DNA, 20 bp, synthetic construct
  source 1..20: mol_type = other DNA
tacttgggcgggtgagtgcg

SEQ ID NO: 12378 - DNA, 20 bp, synthetic construct
  source 1..20: mol_type = other DNA
agagcagcaggaggaggctt

SEQ ID NO: 12379 - DNA, 20 bp, synthetic construct
  source 1..20: mol_type = other DNA
cctcctcctgctgctctcag

SEQ ID NO: 12380 - DNA, 20 bp, synthetic construct
  source 1..20: mol_type = other DNA
ttatcgccgctaacactccg

SEQ ID NO: 12381 - DNA, 20 bp, synthetic construct
  source 1..20: mol_type = other DNA
gctccagcatgtatcagccg

SEQ ID NO: 12382 - DNA, 20 bp, synthetic construct
  source 1..20: mol_type = other DNA
gagggcgggcaggcgaccaa

SEQ ID NO: 12383 - DNA, 20 bp, synthetic construct
  source 1..20: mol_type = other DNA
ccagcatgtatcagccgagg

SEQ ID NO: 12384 - DNA, 20 bp, synthetic construct
  source 1..20: mol_type = other DNA
tttagacaaacactgggcga

SEQ ID NO: 12385 - DNA, 20 bp, synthetic construct
  source 1..20: mol_type = other DNA
agacaaacactgggcgacgg

SEQ ID NO: 12386 - DNA, 20 bp, synthetic construct
  source 1..20: mol_type = other DNA
tatcagccgaggtggagctg

SEQ ID NO: 12387 - DNA, 20 bp, synthetic construct
  source 1..20: mol_type = other DNA
ccacctcggctgatacatgc

SEQ ID NO: 12388 - DNA, 20 bp, synthetic construct
  source 1..20: mol_type = other DNA
tcagccgaggtggagctgcg

SEQ ID NO: 12389 - DNA, 20 bp, synthetic construct
  source 1..20: mol_type = other DNA
agggccccgcagctccacct

SEQ ID NO: 12390 - DNA, 20 bp, synthetic construct
  source 1..20: mol_type = other DNA
aaaggtgagcgcgccgcacc

SEQ ID NO: 12391 - DNA, 20 bp, synthetic construct
  source 1..20: mol_type = other DNA
atcagccgaggtggagctgc

SEQ ID NO: 12392 - DNA, 20 bp, synthetic construct
  source 1..20: mol_type = other DNA
gagcgcgccgcacccggccg

SEQ ID NO: 12393 - DNA, 20 bp, synthetic construct
  source 1..20: mol_type = other DNA
aagcagtttagacaaacact

SEQ ID NO: 12394 - DNA, 20 bp, synthetic construct
  source 1..20: mol_type = other DNA
taagcagtttagacaaacac

SEQ ID NO: 12395 - DNA, 20 bp, synthetic construct
  source 1..20: mol_type = other DNA
gtataaacaaggaacccgac

SEQ ID NO: 12396 - DNA, 20 bp, synthetic construct
  source 1..20: mol_type = other DNA
gcgcccacaaatgcgaccaa

SEQ ID NO: 12397 - DNA, 20 bp, synthetic construct
  source 1..20: mol_type = other DNA
acaaatgcgaccaaaggaca

SEQ ID NO: 12398 - DNA, 20 bp, synthetic construct
  source 1..20: mol_type = other DNA
ggacagggagctaaagcgcg

SEQ ID NO: 12399 - DNA, 20 bp, synthetic construct
  source 1..20: mol_type = other DNA
gcgcggcccagggatctcca

SEQ ID NO: 12400 - DNA, 20 bp, synthetic construct
  source 1..20: mol_type = other DNA
acagcccggagcgggaactc

SEQ ID NO: 12401 - DNA, 20 bp, synthetic construct
  source 1..20: mol_type = other DNA
gacagggagctaaagcgcgc

SEQ ID NO: 12402 - DNA, 20 bp, synthetic construct
  source 1..20: mol_type = other DNA
ccgtagtttcagtataaaca

SEQ ID NO: 12403 - DNA, 20 bp, synthetic construct
  source 1..20: mol_type = other DNA
ggagagcgcagcgcgcagta

SEQ ID NO: 12404 - DNA, 20 bp, synthetic construct
  source 1..20: mol_type = other DNA
tggtcgcatttgtgggcgcg

SEQ ID NO: 12405 - DNA, 20 bp, synthetic construct
  source 1..20: mol_type = other DNA
gggagagcgcagcgcgcagt

SEQ ID NO: 12406 - DNA, 20 bp, synthetic construct
  source 1..20: mol_type = other DNA
gcgcagcgcgcagtagggtc

SEQ ID NO: 12407 - DNA, 20 bp, synthetic construct
  source 1..20: mol_type = other DNA
ggagatccctgggccgcgcg

SEQ ID NO: 12408 - DNA, 20 bp, synthetic construct
  source 1..20: mol_type = other DNA
agggtccggagttcccgctc

SEQ ID NO: 12409 - DNA, 20 bp, synthetic construct
  source 1..20: mol_type = other DNA
actgcgcgctgcgctctccc

SEQ ID NO: 12410 - DNA, 20 bp, synthetic construct
  source 1..20: mol_type = other DNA
gtccggagcccggctcgctg

SEQ ID NO: 12411 - DNA, 20 bp, synthetic construct
  source 1..20: mol_type = other DNA
ccaaccccaaccctcgccgg

SEQ ID NO: 12412 - DNA, 20 bp, synthetic construct
  source 1..20: mol_type = other DNA
gtgcgaccccagtccggcga

SEQ ID NO: 12413 - DNA, 20 bp, synthetic construct
  source 1..20: mol_type = other DNA
gtaaaggtgcgaccccagtc

SEQ ID NO: 12414 - DNA, 20 bp, synthetic construct
  source 1..20: mol_type = other DNA
ccccacccctcgccggactg

SEQ ID NO: 12415 - DNA, 20 bp, synthetic construct
  source 1..20: mol_type = other DNA
cagcgagccgggctccggac

SEQ ID NO: 12416 - DNA, 20 bp, synthetic construct
  source 1..20: mol_type = other DNA
ctggcaagtgcgcagtgccg

SEQ ID NO: 12417 - DNA, 20 bp, synthetic construct
  source 1..20: mol_type = other DNA
gcggggtcgccgctgctctg

SEQ ID NO: 12418 - DNA, 20 bp, synthetic construct
  source 1..20: mol_type = other DNA
ggctcgctggggcagcatgg

SEQ ID NO: 12419 - DNA, 20 bp, synthetic construct
  source 1..20: mol_type = other DNA
gcagcctcgccagctcgccc

SEQ ID NO: 12420 - DNA, 20 bp, synthetic construct
  source 1..20: mol_type = other DNA
cggggtcgccgctgctctgg

SEQ ID NO: 12421 - DNA, 20 bp, synthetic construct
  source 1..20: mol_type = other DNA
gcccgcggcccccagagcag

SEQ ID NO: 12422 - DNA, 20 bp, synthetic construct
  source 1..20: mol_type = other DNA
ccagcgagccgggctccgga

SEQ ID NO: 12423 - DNA, 20 bp, synthetic construct
  source 1..20: mol_type = other DNA
ctcgctggggcagcatggcg

SEQ ID NO: 12424 - DNA, 20 bp, synthetic construct
  source 1..20: mol_type = other DNA
agtgccggggcgagctggcg

SEQ ID NO: 12425 - DNA, 20 bp, synthetic construct
  source 1..20: mol_type = other DNA
gagaagatcgccgcgactgg

SEQ ID NO: 12426 - DNA, 20 bp, synthetic construct
  source 1..20: mol_type = other DNA
acgataacactccagaagcg

SEQ ID NO: 12427 - DNA, 20 bp, synthetic construct
  source 1..20: mol_type = other DNA
gaagtacgccacctccgtgt

SEQ ID NO: 12428 - DNA, 20 bp, synthetic construct
  source 1..20: mol_type = other DNA
agccgagaccattagggaca

SEQ ID NO: 12429 - DNA, 20 bp, synthetic construct
  source 1..20: mol_type = other DNA
caggctgcgctccgacacgg

SEQ ID NO: 12430 - DNA, 20 bp, synthetic construct
  source 1..20: mol_type = other DNA
gcccaggctgcgctccgaca

SEQ ID NO: 12431 - DNA, 20 bp, synthetic construct
  source 1..20: mol_type = other DNA
atgtccctaatggtctcggc

SEQ ID NO: 12432 - DNA, 20 bp, synthetic construct
  source 1..20: mol_type = other DNA
gggcacgagcgacgcgtacg

SEQ ID NO: 12433 - DNA, 20 bp, synthetic construct
  source 1..20: mol_type = other DNA
gctgcgctccgacacggagg

SEQ ID NO: 12434 - DNA, 20 bp, synthetic construct
  source 1..20: mol_type = other DNA
gccgtggaggccgccagtcg

SEQ ID NO: 12435 - DNA, 20 bp, synthetic construct
  source 1..20: mol_type = other DNA
ctaatggtctcggctggccg

SEQ ID NO: 12436 - DNA, 20 bp, synthetic construct
  source 1..20: mol_type = other DNA
gcagcctgggcgcgcccgtg

SEQ ID NO: 12437 - DNA, 20 bp, synthetic construct
  source 1..20: mol_type = other DNA
ctcggctggccggggcctgg

SEQ ID NO: 12438 - DNA, 20 bp, synthetic construct
  source 1..20: mol_type = other DNA
accacacggcccccaggccc

SEQ ID NO: 12439 - DNA, 20 bp, synthetic construct
  source 1..20: mol_type = other DNA
gccggggcctgggggccgtg

SEQ ID NO: 12440 - DNA, 20 bp, synthetic construct
  source 1..20: mol_type = other DNA
caagatggcggacatctccc

SEQ ID NO: 12441 - DNA, 20 bp, synthetic construct
  source 1..20: mol_type = other DNA
cgaactcatcaggaagcgcg

SEQ ID NO: 12442 - DNA, 20 bp, synthetic construct
  source 1..20: mol_type = other DNA
actgctttcggcttgctcgg

SEQ ID NO: 12443 - DNA, 20 bp, synthetic construct
  source 1..20: mol_type = other DNA
tgctcggcggagcaagatgg

SEQ ID NO: 12444 - DNA, 20 bp, synthetic construct
  source 1..20: mol_type = other DNA
acgaactcatcaggaagcgc

SEQ ID NO: 12445 - DNA, 20 bp, synthetic construct
  source 1..20: mol_type = other DNA
gcttgctcggcggagcaaga

SEQ ID NO: 12446 - DNA, 20 bp, synthetic construct
  source 1..20: mol_type = other DNA
cttcctgatgagttcgtcca

SEQ ID NO: 12447 - DNA, 20 bp, synthetic construct
  source 1..20: mol_type = other DNA
acggcggcagccggccaatg

SEQ ID NO: 12448 - DNA, 20 bp, synthetic construct
  source 1..20: mol_type = other DNA
gacgaactcatcaggaagcg

SEQ ID NO: 12449 - DNA, 20 bp, synthetic construct
  source 1..20: mol_type = other DNA
gcttcctgatgagttcgtcc

SEQ ID NO: 12450 - DNA, 20 bp, synthetic construct
  source 1..20: mol_type = other DNA
cagccggccaatgaggagcg

SEQ ID NO: 12451 - DNA, 20 bp, synthetic construct
  source 1..20: mol_type = other DNA
ggcggcgaaaggacggtgag

SEQ ID NO: 12452 - DNA, 20 bp, synthetic construct
  source 1..20: mol_type = other DNA
gcggggcggcggcgaaagga

SEQ ID NO: 12453 - DNA, 20 bp, synthetic construct
  source 1..20: mol_type = other DNA
ctaaaccccgaagaaaggaa

SEQ ID NO: 12454 - DNA, 20 bp, synthetic construct
  source 1..20: mol_type = other DNA
actcatcaggaagcgcgggg

SEQ ID NO: 12455 - DNA, 20 bp, synthetic construct
  source 1..20: mol_type = other DNA
gtctcgagctcagtcaaacc

SEQ ID NO: 12456 - DNA, 20 bp, synthetic construct
  source 1..20: mol_type = other DNA
taagccacacagaatacccc

SEQ ID NO: 12457 - DNA, 20 bp, synthetic construct
  source 1..20: mol_type = other DNA
gtttgactgagctcgagact

SEQ ID NO: 12458 - DNA, 20 bp, synthetic construct
  source 1..20: mol_type = other DNA
taaactttattaggaacccc

SEQ ID NO: 12459 - DNA, 20 bp, synthetic construct
  source 1..20: mol_type = other DNA
agagcctggggtattctgtg

SEQ ID NO: 12460 - DNA, 20 bp, synthetic construct
  source 1..20: mol_type = other DNA
atatcaaacatatcacacag

SEQ ID NO: 12461 - DNA, 20 bp, synthetic construct
  source 1..20: mol_type = other DNA
taatccagtaatactgatac

SEQ ID NO: 12462 - DNA, 20 bp, synthetic construct
  source 1..20: mol_type = other DNA
gtgtcttgccctgtctccgg

SEQ ID NO: 12463 - DNA, 20 bp, synthetic construct
  source 1..20: mol_type = other DNA
attaggaacccccggagaca

SEQ ID NO: 12464 - DNA, 20 bp, synthetic construct
  source 1..20: mol_type = other DNA
gagacagggcaagacactgt

SEQ ID NO: 12465 - DNA, 20 bp, synthetic construct
  source 1..20: mol_type = other DNA
gagacctgtatcagtattac

SEQ ID NO: 12466 - DNA, 20 bp, synthetic construct
  source 1..20: mol_type = other DNA
acagtgtcttgccctgtctc

SEQ ID NO: 12467 - DNA, 20 bp, synthetic construct
  source 1..20: mol_type = other DNA
tcaaatgctataagaagaaa

SEQ ID NO: 12468 - DNA, 20 bp, synthetic construct
  source 1..20: mol_type = other DNA
tgtgatatgtttgatatatt

SEQ ID NO: 12469 - DNA, 20 bp, synthetic construct
  source 1..20: mol_type = other DNA
gaatatgtttgatatatagt

SEQ ID NO: 12470 - DNA, 20 bp, synthetic construct
  source 1..20: mol_type = other DNA
ctgagagtagggacttaccc

SEQ ID NO: 12471 - DNA, 20 bp, synthetic construct
  source 1..20: mol_type = other DNA
agcagcaggctcagcatctg

SEQ ID NO: 12472 - DNA, 20 bp, synthetic construct
  source 1..20: mol_type = other DNA
cccgctgggtagaaggaaca

SEQ ID NO: 12473 - DNA, 20 bp, synthetic construct
  source 1..20: mol_type = other DNA
gaaggaacagggagtggcca

SEQ ID NO: 12474 - DNA, 20 bp, synthetic construct
  source 1..20: mol_type = other DNA
gggagcaaggaggagcatcg

SEQ ID NO: 12475 - DNA, 20 bp, synthetic construct
  source 1..20: mol_type = other DNA
ggagcaaggaggagcatcgt

SEQ ID NO: 12476 - DNA, 20 bp, synthetic construct
  source 1..20: mol_type = other DNA
gtcttggtgctctgagtctg

SEQ ID NO: 12477 - DNA, 20 bp, synthetic construct
  source 1..20: mol_type = other DNA
tccaggtgacgctgatgtca

SEQ ID NO: 12478 - DNA, 20 bp, synthetic construct
  source 1..20: mol_type = other DNA
tgtcagggtctctgagagta

SEQ ID NO: 12479 - DNA, 20 bp, synthetic construct
  source 1..20: mol_type = other DNA
cgggcagcgccagcagcagc

SEQ ID NO: 12480 - DNA, 20 bp, synthetic construct
  source 1..20: mol_type = other DNA
cagcgtcacctggagcagag

SEQ ID NO: 12481 - DNA, 20 bp, synthetic construct
  source 1..20: mol_type = other DNA
ggtgctctgagtctgaggct

SEQ ID NO: 12482 - DNA, 20 bp, synthetic construct
  source 1..20: mol_type = other DNA
accctgacatcagcgtcacc

SEQ ID NO: 12483 - DNA, 20 bp, synthetic construct
  source 1..20: mol_type = other DNA
atgtcagggtctctgagagt

SEQ ID NO: 12484 - DNA, 20 bp, synthetic construct
  source 1..20: mol_type = other DNA
aggctgggccactctgctcc

SEQ ID NO: 12485 - DNA, 20 bp, synthetic construct
  source 1..20: mol_type = other DNA
gggcgagtcctcagcacccg

SEQ ID NO: 12486 - DNA, 20 bp, synthetic construct
  source 1..20: mol_type = other DNA
ggggcgagtcctcagcaccc

SEQ ID NO: 12487 - DNA, 20 bp, synthetic construct
  source 1..20: mol_type = other DNA
gttccggggctgcgtccgga

SEQ ID NO: 12488 - DNA, 20 bp, synthetic construct
  source 1..20: mol_type = other DNA
ggttccggggctgcgtccgg

SEQ ID NO: 12489 - DNA, 20 bp, synthetic construct
  source 1..20: mol_type = other DNA
ctctgagcagctccggcccc

SEQ ID NO: 12490 - DNA, 20 bp, synthetic construct
  source 1..20: mol_type = other DNA
ccggccgctctgagcagctc

SEQ ID NO: 12491 - DNA, 20 bp, synthetic construct
  source 1..20: mol_type = other DNA
cagagcggccggggccgtgt

SEQ ID NO: 12492 - DNA, 20 bp, synthetic construct
  source 1..20: mol_type = other DNA
gcgcgggccctcccggccag

SEQ ID NO: 12493 - DNA, 20 bp, synthetic construct
  source 1..20: mol_type = other DNA
ccccggccccgacacggccc

SEQ ID NO: 12494 - DNA, 20 bp, synthetic construct
  source 1..20: mol_type = other DNA
tcccgggcgggccggaccgg

SEQ ID NO: 12495 - DNA, 20 bp, synthetic construct
  source 1..20: mol_type = other DNA
ccgccgccgggggctctggg

SEQ ID NO: 12496 - DNA, 20 bp, synthetic construct
  source 1..20: mol_type = other DNA
ggctgccgccgctggccggg

SEQ ID NO: 12497 - DNA, 20 bp, synthetic construct
  source 1..20: mol_type = other DNA
ccgagtccccgcccgcccgc

SEQ ID NO: 12498 - DNA, 20 bp, synthetic construct
  source 1..20: mol_type = other DNA
ggggccggagctgctcagag

SEQ ID NO: 12499 - DNA, 20 bp, synthetic construct
  source 1..20: mol_type = other DNA
agcggcggcagcctcctccc

SEQ ID NO: 12500 - DNA, 20 bp, synthetic construct
  source 1..20: mol_type = other DNA
tgaatccacgggcacggagt

SEQ ID NO: 12501 - DNA, 20 bp, synthetic construct
  source 1..20: mol_type = other DNA
cccggccaactccgtgcccg

SEQ ID NO: 12502 - DNA, 20 bp, synthetic construct
  source 1..20: mol_type = other DNA
accagagacccgttcgcccc

SEQ ID NO: 12503 - DNA, 20 bp, synthetic construct
  source 1..20: mol_type = other DNA
gcgcaggcgctggcgtgctg

SEQ ID NO: 12504 - DNA, 20 bp, synthetic construct
  source 1..20: mol_type = other DNA
gcggcgcgggggttgagtcg

SEQ ID NO: 12505 - DNA, 20 bp, synthetic construct
  source 1..20: mol_type = other DNA
acgggcacggagttggccgg

SEQ ID NO: 12506 - DNA, 20 bp, synthetic construct
  source 1..20: mol_type = other DNA
gcgcgggggttgagtcgtgg

SEQ ID NO: 12507 - DNA, 20 bp, synthetic construct
  source 1..20: mol_type = other DNA
ggccagggggctgaatccac

SEQ ID NO: 12508 - DNA, 20 bp, synthetic construct
  source 1..20: mol_type = other DNA
ggggttgagtcgtggtggtg

SEQ ID NO: 12509 - DNA, 20 bp, synthetic construct
  source 1..20: mol_type = other DNA
cacgggcacggagttggccg

SEQ ID NO: 12510 - DNA, 20 bp, synthetic construct
  source 1..20: mol_type = other DNA
ttcagggtgtccgggtcccc

SEQ ID NO: 12511 - DNA, 20 bp, synthetic construct
  source 1..20: mol_type = other DNA
tgccggacgcgcgcaggcgc

SEQ ID NO: 12512 - DNA, 20 bp, synthetic construct
  source 1..20: mol_type = other DNA
ctggcgtgctggggccgcgg

SEQ ID NO: 12513 - DNA, 20 bp, synthetic construct
  source 1..20: mol_type = other DNA
tgctggggccgcggcggcgg

SEQ ID NO: 12514 - DNA, 20 bp, synthetic construct
  source 1..20: mol_type = other DNA
gcgtgctggggccgcggcgg

SEQ ID NO: 12515 - DNA, 20 bp, synthetic construct
  source 1..20: mol_type = other DNA
ggacttatcctgacataatg

SEQ ID NO: 12516 - DNA, 20 bp, synthetic construct
  source 1..20: mol_type = other DNA
tgagttatggatgagaggac

SEQ ID NO: 12517 - DNA, 20 bp, synthetic construct
  source 1..20: mol_type = other DNA
aaatttgagttatggatgag

SEQ ID NO: 12518 - DNA, 20 bp, synthetic construct
  source 1..20: mol_type = other DNA
gagttatggatgagaggaca

SEQ ID NO: 12519 - DNA, 20 bp, synthetic construct
  source 1..20: mol_type = other DNA
agttatggatgagaggacag

SEQ ID NO: 12520 - DNA, 20 bp, synthetic construct
  source 1..20: mol_type = other DNA
attggctcggccaatcacaa

SEQ ID NO: 12521 - DNA, 20 bp, synthetic construct
  source 1..20: mol_type = other DNA
tggacttatcctgacataat

SEQ ID NO: 12522 - DNA, 20 bp, synthetic construct
  source 1..20: mol_type = other DNA
ttggacttatcctgacataa

SEQ ID NO: 12523 - DNA, 20 bp, synthetic construct
  source 1..20: mol_type = other DNA
taaaaaaaccccattatgtc

SEQ ID NO: 12524 - DNA, 20 bp, synthetic construct
  source 1..20: mol_type = other DNA
cattggctcggccaatcaca

SEQ ID NO: 12525 - DNA, 20 bp, synthetic construct
  source 1..20: mol_type = other DNA
agtaagttggttgatgtcac

SEQ ID NO: 12526 - DNA, 20 bp, synthetic construct
  source 1..20: mol_type = other DNA
tgatgtcactggcattggct

SEQ ID NO: 12527 - DNA, 20 bp, synthetic construct
  source 1..20: mol_type = other DNA
ccttccaatcaaaagtaagt

SEQ ID NO: 12528 - DNA, 20 bp, synthetic construct
  source 1..20: mol_type = other DNA
tactcatttgtgtttattct

SEQ ID NO: 12529 - DNA, 20 bp, synthetic construct
  source 1..20: mol_type = other DNA
tttcggaacgcccttgtgat

SEQ ID NO: 12530 - DNA, 20 bp, synthetic construct
  source 1..20: mol_type = other DNA
ggaaactgacgctaagagtg

SEQ ID NO: 12531 - DNA, 20 bp, synthetic construct
  source 1..20: mol_type = other DNA
taggcggccgccataacagg

SEQ ID NO: 12532 - DNA, 20 bp, synthetic construct
  source 1..20: mol_type = other DNA
ccaggcacttacccgccgcg

SEQ ID NO: 12533 - DNA, 20 bp, synthetic construct
  source 1..20: mol_type = other DNA
ccaacacccgtgttgagaag

SEQ ID NO: 12534 - DNA, 20 bp, synthetic construct
  source 1..20: mol_type = other DNA
gggaaactgacgctaagagt

SEQ ID NO: 12535 - DNA, 20 bp, synthetic construct
  source 1..20: mol_type = other DNA
gcgcagaccgcctgttatgg

SEQ ID NO: 12536 - DNA, 20 bp, synthetic construct
  source 1..20: mol_type = other DNA
gggtaagtgcctgggagagg

SEQ ID NO: 12537 - DNA, 20 bp, synthetic construct
  source 1..20: mol_type = other DNA
cctatcccgccgcctctccc

SEQ ID NO: 12538 - DNA, 20 bp, synthetic construct
  source 1..20: mol_type = other DNA
tcccaggcacttacccgccg

SEQ ID NO: 12539 - DNA, 20 bp, synthetic construct
  source 1..20: mol_type = other DNA
cccaggcacttacccgccgc

SEQ ID NO: 12540 - DNA, 20 bp, synthetic construct
  source 1..20: mol_type = other DNA
ccgcctaagtcccacagaga

SEQ ID NO: 12541 - DNA, 20 bp, synthetic construct
  source 1..20: mol_type = other DNA
tcccaggctgggccccgcgg

SEQ ID NO: 12542 - DNA, 20 bp, synthetic construct
  source 1..20: mol_type = other DNA
cgggagtcgggtgggatccc

SEQ ID NO: 12543 - DNA, 20 bp, synthetic construct
  source 1..20: mol_type = other DNA
aagtgcctgggagaggcggc

SEQ ID NO: 12544 - DNA, 20 bp, synthetic construct
  source 1..20: mol_type = other DNA
taagtgcctgggagaggcgg

SEQ ID NO: 12545 - DNA, 20 bp, synthetic construct
  source 1..20: mol_type = other DNA
cctgatcatctgcccactcc

SEQ ID NO: 12546 - DNA, 20 bp, synthetic construct
  source 1..20: mol_type = other DNA
gacaggaggccagctcacct

SEQ ID NO: 12547 - DNA, 20 bp, synthetic construct
  source 1..20: mol_type = other DNA
ccgggagtgggcagatgatc

SEQ ID NO: 12548 - DNA, 20 bp, synthetic construct
  source 1..20: mol_type = other DNA
gtagcagtgccttggacccc

SEQ ID NO: 12549 - DNA, 20 bp, synthetic construct
  source 1..20: mol_type = other DNA
ggcgcaaggcctgcgacagg

SEQ ID NO: 12550 - DNA, 20 bp, synthetic construct
  source 1..20: mol_type = other DNA
ccaaggcactgctactctcc

SEQ ID NO: 12551 - DNA, 20 bp, synthetic construct
  source 1..20: mol_type = other DNA
ggtgagaccagcgcccagat

SEQ ID NO: 12552 - DNA, 20 bp, synthetic construct
  source 1..20: mol_type = other DNA
gtgagaccagcgcccagatt

SEQ ID NO: 12553 - DNA, 20 bp, synthetic construct
  source 1..20: mol_type = other DNA
tcctgtcgcaggccttgcgc

SEQ ID NO: 12554 - DNA, 20 bp, synthetic construct
  source 1..20: mol_type = other DNA
cctgtcgcaggccttgcgcc

SEQ ID NO: 12555 - DNA, 20 bp, synthetic construct
  source 1..20: mol_type = other DNA
gtgagctggcctcctgtcgc

SEQ ID NO: 12556 - DNA, 20 bp, synthetic construct
  source 1..20: mol_type = other DNA
cccggcgcaaggcctgcgac

SEQ ID NO: 12557 - DNA, 20 bp, synthetic construct
  source 1..20: mol_type = other DNA
tgagaccagcgcccagattg

SEQ ID NO: 12558 - DNA, 20 bp, synthetic construct
  source 1..20: mol_type = other DNA
gccagctcacctggggtcca

SEQ ID NO: 12559 - DNA, 20 bp, synthetic construct
  source 1..20: mol_type = other DNA
gcaggccttgcgccgggagt

SEQ ID NO: 12560 - DNA, 20 bp, synthetic construct
  source 1..20: mol_type = other DNA
agagcagacattcactgggt

SEQ ID NO: 12561 - DNA, 20 bp, synthetic construct
  source 1..20: mol_type = other DNA
ggtgaagagcagacattcac

SEQ ID NO: 12562 - DNA, 20 bp, synthetic construct
  source 1..20: mol_type = other DNA
ggaggagtaaaaactgaagc

SEQ ID NO: 12563 - DNA, 20 bp, synthetic construct
  source 1..20: mol_type = other DNA
aacccggagagtgtgtgcaa

SEQ ID NO: 12564 - DNA, 20 bp, synthetic construct
  source 1..20: mol_type = other DNA
tgttatatttcactgaaaag

SEQ ID NO: 12565 - DNA, 20 bp, synthetic construct
  source 1..20: mol_type = other DNA
ctctctcccaggagtttgag

SEQ ID NO: 12566 - DNA, 20 bp, synthetic construct
  source 1..20: mol_type = other DNA
agtgcatctccctctctccc

SEQ ID NO: 12567 - DNA, 20 bp, synthetic construct
  source 1..20: mol_type = other DNA
cctcaaactcctgggagaga

SEQ ID NO: 12568 - DNA, 20 bp, synthetic construct
  source 1..20: mol_type = other DNA
agtgaaatataacacacatt

SEQ ID NO: 12569 - DNA, 20 bp, synthetic construct
  source 1..20: mol_type = other DNA
ccctcaaactcctgggagag

SEQ ID NO: 12570 - DNA, 20 bp, synthetic construct
  source 1..20: mol_type = other DNA
cctctctcccaggagtttga

SEQ ID NO: 12571 - DNA, 20 bp, synthetic construct
  source 1..20: mol_type = other DNA
aaaaaaaggcaacaacaacc

SEQ ID NO: 12572 - DNA, 20 bp, synthetic construct
  source 1..20: mol_type = other DNA
cccccccccctcaaactcct

SEQ ID NO: 12573 - DNA, 20 bp, synthetic construct
  source 1..20: mol_type = other DNA
ccccccccccctcaaactcc

SEQ ID NO: 12574 - DNA, 20 bp, synthetic construct
  source 1..20: mol_type = other DNA
ccctctctcccaggagtttg

SEQ ID NO: 12575 - DNA, 20 bp, synthetic construct
  source 1..20: mol_type = other DNA
ggcaatggaaggagcgagcg

SEQ ID NO: 12576 - DNA, 20 bp, synthetic construct
  source 1..20: mol_type = other DNA
ccgccgtcgcgcgccaacgc

SEQ ID NO: 12577 - DNA, 20 bp, synthetic construct
  source 1..20: mol_type = other DNA
ggcatggcctccggagcccg

SEQ ID NO: 12578 - DNA, 20 bp, synthetic construct
  source 1..20: mol_type = other DNA
gcgaggcgcgccgctccagg

SEQ ID NO: 12579 - DNA, 20 bp, synthetic construct
  source 1..20: mol_type = other DNA
tccggaggccatgccggcgt

SEQ ID NO: 12580 - DNA, 20 bp, synthetic construct
  source 1..20: mol_type = other DNA
gtcgcgcgccaacgccggca

SEQ ID NO: 12581 - DNA, 20 bp, synthetic construct
  source 1..20: mol_type = other DNA
gcaatggaaggagcgagcgc

SEQ ID NO: 12582 - DNA, 20 bp, synthetic construct
  source 1..20: mol_type = other DNA
caatggaaggagcgagcgcg

SEQ ID NO: 12583 - DNA, 20 bp, synthetic construct
  source 1..20: mol_type = other DNA
atgccggcgttggcgcgcga

SEQ ID NO: 12584 - DNA, 20 bp, synthetic construct
  source 1..20: mol_type = other DNA
gagcgcggggaggagcgagg

SEQ ID NO: 12585 - DNA, 20 bp, synthetic construct
  source 1..20: mol_type = other DNA
tggaaggagcgagcgcgggg

SEQ ID NO: 12586 - DNA, 20 bp, synthetic construct
  source 1..20: mol_type = other DNA
ggggcgcgggaggcaatgga

SEQ ID NO: 12587 - DNA, 20 bp, synthetic construct
  source 1..20: mol_type = other DNA
ctggggaccccgggctccgg

SEQ ID NO: 12588 - DNA, 20 bp, synthetic construct
  source 1..20: mol_type = other DNA
gccggaggaggcgcgcgccc

SEQ ID NO: 12589 - DNA, 20 bp, synthetic construct
  source 1..20: mol_type = other DNA
agcgagcgcggggaggagcg

SEQ ID NO: 12590 - DNA, 20 bp, synthetic construct
  source 1..20: mol_type = other DNA
tcagtttagaaaccatggct

SEQ ID NO: 12591 - DNA, 20 bp, synthetic construct
  source 1..20: mol_type = other DNA
accatggctcggctgccaca

SEQ ID NO: 12592 - DNA, 20 bp, synthetic construct
  source 1..20: mol_type = other DNA
aatgtaaacagaacaggcag

SEQ ID NO: 12593 - DNA, 20 bp, synthetic construct
  source 1..20: mol_type = other DNA
ccccagcggcccgtgaatca

SEQ ID NO: 12594 - DNA, 20 bp, synthetic construct
  source 1..20: mol_type = other DNA
taaactgagccagctgcaga

SEQ ID NO: 12595 - DNA, 20 bp, synthetic construct
  source 1..20: mol_type = other DNA
gccctgtggcagccgagcca

SEQ ID NO: 12596 - DNA, 20 bp, synthetic construct
  source 1..20: mol_type = other DNA
gggggaggcggctagcgtgg

SEQ ID NO: 12597 - DNA, 20 bp, synthetic construct
  source 1..20: mol_type = other DNA
ggcggctagcgtggtggacc

SEQ ID NO: 12598 - DNA, 20 bp, synthetic construct
  source 1..20: mol_type = other DNA
tcggctgccacagggccacg

SEQ ID NO: 12599 - DNA, 20 bp, synthetic construct
  source 1..20: mol_type = other DNA
accccactagccaagccctg

SEQ ID NO: 12600 - DNA, 20 bp, synthetic construct
  source 1..20: mol_type = other DNA
gcacccccaacccccaaccc

SEQ ID NO: 12601 - DNA, 20 bp, synthetic construct
  source 1..20: mol_type = other DNA
ccaatgtaaacagaacaggc

SEQ ID NO: 12602 - DNA, 20 bp, synthetic construct
  source 1..20: mol_type = other DNA
gcggctagcgtggtggaccc

SEQ ID NO: 12603 - DNA, 20 bp, synthetic construct
  source 1..20: mol_type = other DNA
acccccaaccctggccccag

SEQ ID NO: 12604 - DNA, 20 bp, synthetic construct
  source 1..20: mol_type = other DNA
gccgctggggccagggttgg

SEQ ID NO: 12605 - DNA, 20 bp, synthetic construct
  source 1..20: mol_type = other DNA
gctgtcaccgtccatgcccg

SEQ ID NO: 12606 - DNA, 20 bp, synthetic construct
  source 1..20: mol_type = other DNA
gggtctgtgatacggatctg

SEQ ID NO: 12607 - DNA, 20 bp, synthetic construct
  source 1..20: mol_type = other DNA
ctgtcaccgtccatgcccgt

SEQ ID NO: 12608 - DNA, 20 bp, synthetic construct
  source 1..20: mol_type = other DNA
cagcaccagcgcccggacag

SEQ ID NO: 12609 - DNA, 20 bp, synthetic construct
  source 1..20: mol_type = other DNA
gagcccttggccccagacgg

SEQ ID NO: 12610 - DNA, 20 bp, synthetic construct
  source 1..20: mol_type = other DNA
tcaccgtccatgcccgtggg

SEQ ID NO: 12611 - DNA, 20 bp, synthetic construct
  source 1..20: mol_type = other DNA
ccggacagcggtgccgccca

SEQ ID NO: 12612 - DNA, 20 bp, synthetic construct
  source 1..20: mol_type = other DNA
gtccggggagccgccgtctg

SEQ ID NO: 12613 - DNA, 20 bp, synthetic construct
  source 1..20: mol_type = other DNA
gaaggggagcaacggcccga

SEQ ID NO: 12614 - DNA, 20 bp, synthetic construct
  source 1..20: mol_type = other DNA
gggcgctggtgctgaagccg

SEQ ID NO: 12615 - DNA, 20 bp, synthetic construct
  source 1..20: mol_type = other DNA
cgctggtgctgaagccgcgg

SEQ ID NO: 12616 - DNA, 20 bp, synthetic construct
  source 1..20: mol_type = other DNA
tggtgctgaagccgcggcgg

SEQ ID NO: 12617 - DNA, 20 bp, synthetic construct
  source 1..20: mol_type = other DNA
cgtgggcggcaccgctgtcc

SEQ ID NO: 12618 - DNA, 20 bp, synthetic construct
  source 1..20: mol_type = other DNA
tgctgaagccgcggcggcgg

SEQ ID NO: 12619 - DNA, 20 bp, synthetic construct
  source 1..20: mol_type = other DNA
cggacagcggtgccgcccac

SEQ ID NO: 12620 - DNA, 20 bp, synthetic construct
  source 1..20: mol_type = other DNA
accgatcctgaaccagccgc

SEQ ID NO: 12621 - DNA, 20 bp, synthetic construct
  source 1..20: mol_type = other DNA
ccggagccggagtggcgacc

SEQ ID NO: 12622 - DNA, 20 bp, synthetic construct
  source 1..20: mol_type = other DNA
ggagccagaaaggactgatc

SEQ ID NO: 12623 - DNA, 20 bp, synthetic construct
  source 1..20: mol_type = other DNA
ggcggctggttcaggatcgg

SEQ ID NO: 12624 - DNA, 20 bp, synthetic construct
  source 1..20: mol_type = other DNA
ggagtgggcaaaaagccact

SEQ ID NO: 12625 - DNA, 20 bp, synthetic construct
  source 1..20: mol_type = other DNA
tcgggactggcctcccccag

SEQ ID NO: 12626 - DNA, 20 bp, synthetic construct
  source 1..20: mol_type = other DNA
gtggcgaccgggtgcggagt

SEQ ID NO: 12627 - DNA, 20 bp, synthetic construct
  source 1..20: mol_type = other DNA
tccgcacccggtcgccactc

SEQ ID NO: 12628 - DNA, 20 bp, synthetic construct
  source 1..20: mol_type = other DNA
cggagtgggcaaaaagccac

SEQ ID NO: 12629 - DNA, 20 bp, synthetic construct
  source 1..20: mol_type = other DNA
gccggagccggagtggcgac

SEQ ID NO: 12630 - DNA, 20 bp, synthetic construct
  source 1..20: mol_type = other DNA
accagccgccggagccggag

SEQ ID NO: 12631 - DNA, 20 bp, synthetic construct
  source 1..20: mol_type = other DNA
agtgggcaaaaagccactgg

SEQ ID NO: 12632 - DNA, 20 bp, synthetic construct
  source 1..20: mol_type = other DNA
gagtgggcaaaaagccactg

SEQ ID NO: 12633 - DNA, 20 bp, synthetic construct
  source 1..20: mol_type = other DNA
agtggcgaccgggtgcggag

SEQ ID NO: 12634 - DNA, 20 bp, synthetic construct
  source 1..20: mol_type = other DNA
cccggtcgccactccggctc

SEQ ID NO: 12635 - DNA, 20 bp, synthetic construct
  source 1..20: mol_type = other DNA
tcaggcccaagaacaggcga

SEQ ID NO: 12636 - DNA, 20 bp, synthetic construct
  source 1..20: mol_type = other DNA
cagcctggccacgggtgcag

SEQ ID NO: 12637 - DNA, 20 bp, synthetic construct
  source 1..20: mol_type = other DNA
gggctcagtgctcagagcgg

SEQ ID NO: 12638 - DNA, 20 bp, synthetic construct
  source 1..20: mol_type = other DNA
gtgggttgcagcagatcctg

SEQ ID NO: 12639 - DNA, 20 bp, synthetic construct
  source 1..20: mol_type = other DNA
gcgcgccaggcggaatgcag

SEQ ID NO: 12640 - DNA, 20 bp, synthetic construct
  source 1..20: mol_type = other DNA
acgggctcaggcccaagaac

SEQ ID NO: 12641 - DNA, 20 bp, synthetic construct
  source 1..20: mol_type = other DNA
ccaagaacaggcgaaggcgc

SEQ ID NO: 12642 - DNA, 20 bp, synthetic construct
  source 1..20: mol_type = other DNA
tgggttgcagcagatcctgc

SEQ ID NO: 12643 - DNA, 20 bp, synthetic construct
  source 1..20: mol_type = other DNA
gggttgcagcagatcctgcg

SEQ ID NO: 12644 - DNA, 20 bp, synthetic construct
  source 1..20: mol_type = other DNA
gtcccagtccccgtccccgc

SEQ ID NO: 12645 - DNA, 20 bp, synthetic construct
  source 1..20: mol_type = other DNA
agtgctcagagcggaggcag

SEQ ID NO: 12646 - DNA, 20 bp, synthetic construct
  source 1..20: mol_type = other DNA
ggcgggctcagtgctcagag

SEQ ID NO: 12647 - DNA, 20 bp, synthetic construct
  source 1..20: mol_type = other DNA
cagagcggaggcagcggctg

SEQ ID NO: 12648 - DNA, 20 bp, synthetic construct
  source 1..20: mol_type = other DNA
cggctgcggcagcagcaggt

SEQ ID NO: 12649 - DNA, 20 bp, synthetic construct
  source 1..20: mol_type = other DNA
gcggctgcggcagcagcagg

SEQ ID NO: 12650 - DNA, 20 bp, synthetic construct
  source 1..20: mol_type = other DNA
gggtgtcatgtcagacaacg

SEQ ID NO: 12651 - DNA, 20 bp, synthetic construct
  source 1..20: mol_type = other DNA
gcgtctaggggcaatgtctg

SEQ ID NO: 12652 - DNA, 20 bp, synthetic construct
  source 1..20: mol_type = other DNA
gctgtttgcgggtctccgcg

SEQ ID NO: 12653 - DNA, 20 bp, synthetic construct
  source 1..20: mol_type = other DNA
agacattgcccctagacgcc

SEQ ID NO: 12654 - DNA, 20 bp, synthetic construct
  source 1..20: mol_type = other DNA
ggcaatgtctgaggggactg

SEQ ID NO: 12655 - DNA, 20 bp, synthetic construct
  source 1..20: mol_type = other DNA
gcagcggggtcgctgaggcg

SEQ ID NO: 12656 - DNA, 20 bp, synthetic construct
  source 1..20: mol_type = other DNA
cagcggggtcgctgaggcga

SEQ ID NO: 12657 - DNA, 20 bp, synthetic construct
  source 1..20: mol_type = other DNA
ctgaggagcctggcgtctag

SEQ ID NO: 12658 - DNA, 20 bp, synthetic construct
  source 1..20: mol_type = other DNA
ctgtttgcgggtctccgcgc

SEQ ID NO: 12659 - DNA, 20 bp, synthetic construct
  source 1..20: mol_type = other DNA
cgctgcgccccggtcccgcg

SEQ ID NO: 12660 - DNA, 20 bp, synthetic construct
  source 1..20: mol_type = other DNA
cagcgacactacgactcgcg

SEQ ID NO: 12661 - DNA, 20 bp, synthetic construct
  source 1..20: mol_type = other DNA
tcagcgaccccgctgcgccc

SEQ ID NO: 12662 - DNA, 20 bp, synthetic construct
  source 1..20: mol_type = other DNA
gcgcaggcgcaagataagct

SEQ ID NO: 12663 - DNA, 20 bp, synthetic construct
  source 1..20: mol_type = other DNA
cgcgggaccggggcgcagcg

SEQ ID NO: 12664 - DNA, 20 bp, synthetic construct
  source 1..20: mol_type = other DNA
cgcgcgggaccggggcgcag

SEQ ID NO: 12665 - DNA, 20 bp, synthetic construct
  source 1..20: mol_type = other DNA
caagttagagaacactgctg

SEQ ID NO: 12666 - DNA, 20 bp, synthetic construct
  source 1..20: mol_type = other DNA
cccctcaccaacatggccgc

SEQ ID NO: 12667 - DNA, 20 bp, synthetic construct
  source 1..20: mol_type = other DNA
agctgtctatggagatacct

SEQ ID NO: 12668 - DNA, 20 bp, synthetic construct
  source 1..20: mol_type = other DNA
agccccctcccccaaaacaa

SEQ ID NO: 12669 - DNA, 20 bp, synthetic construct
  source 1..20: mol_type = other DNA
tcatgcgcacttccagcccg

SEQ ID NO: 12670 - DNA, 20 bp, synthetic construct
  source 1..20: mol_type = other DNA
gagatacctaggccgggaga

SEQ ID NO: 12671 - DNA, 20 bp, synthetic construct
  source 1..20: mol_type = other DNA
tctatggagatacctaggcc

SEQ ID NO: 12672 - DNA, 20 bp, synthetic construct
  source 1..20: mol_type = other DNA
cgggagagggagaacacagt

SEQ ID NO: 12673 - DNA, 20 bp, synthetic construct
  source 1..20: mol_type = other DNA
gcccgcggccatgttggtga

SEQ ID NO: 12674 - DNA, 20 bp, synthetic construct
  source 1..20: mol_type = other DNA
gcccctcaccaacatggccg

SEQ ID NO: 12675 - DNA, 20 bp, synthetic construct
  source 1..20: mol_type = other DNA
cccgcggccatgttggtgag

SEQ ID NO: 12676 - DNA, 20 bp, synthetic construct
  source 1..20: mol_type = other DNA
acttccgcccctcaccaaca

SEQ ID NO: 12677 - DNA, 20 bp, synthetic construct
  source 1..20: mol_type = other DNA
agcccgcggccatgttggtg

SEQ ID NO: 12678 - DNA, 20 bp, synthetic construct
  source 1..20: mol_type = other DNA
gcggccatgttggtgagggg

SEQ ID NO: 12679 - DNA, 20 bp, synthetic construct
  source 1..20: mol_type = other DNA
caactgtgttctccctctcc

SEQ ID NO: 12680 - DNA, 20 bp, synthetic construct
  source 1..20: mol_type = other DNA
gaggaagtggtctcaaaccc

SEQ ID NO: 12681 - DNA, 20 bp, synthetic construct
  source 1..20: mol_type = other DNA
aagtggtctcaaaccccggc

SEQ ID NO: 12682 - DNA, 20 bp, synthetic construct
  source 1..20: mol_type = other DNA
cccaggggttggagtagccg

SEQ ID NO: 12683 - DNA, 20 bp, synthetic construct
  source 1..20: mol_type = other DNA
gtggcgaccaggccagacca

SEQ ID NO: 12684 - DNA, 20 bp, synthetic construct
  source 1..20: mol_type = other DNA
cggctactccaacccctggg

SEQ ID NO: 12685 - DNA, 20 bp, synthetic construct
  source 1..20: mol_type = other DNA
gccccggctactccaacccc

SEQ ID NO: 12686 - DNA, 20 bp, synthetic construct
  source 1..20: mol_type = other DNA
ggctactccaacccctgggc

SEQ ID NO: 12687 - DNA, 20 bp, synthetic construct
  source 1..20: mol_type = other DNA
cggtacccccgcccgcccag

SEQ ID NO: 12688 - DNA, 20 bp, synthetic construct
  source 1..20: mol_type = other DNA
cggagcgcgacagggaagcg

SEQ ID NO: 12689 - DNA, 20 bp, synthetic construct
  source 1..20: mol_type = other DNA
cgggggtaccgcctgggcaa

SEQ ID NO: 12690 - DNA, 20 bp, synthetic construct
  source 1..20: mol_type = other DNA
ggagcgcgacagggaagcgg

SEQ ID NO: 12691 - DNA, 20 bp, synthetic construct
  source 1..20: mol_type = other DNA
agcggagcgcgacagggaag

SEQ ID NO: 12692 - DNA, 20 bp, synthetic construct
  source 1..20: mol_type = other DNA
gcggtacccccgcccgccca

SEQ ID NO: 12693 - DNA, 20 bp, synthetic construct
  source 1..20: mol_type = other DNA
acccccgcccgcccaggggt

SEQ ID NO: 12694 - DNA, 20 bp, synthetic construct
  source 1..20: mol_type = other DNA
cggcgccccggcccttgccc

SEQ ID NO: 12695 - DNA, 20 bp, synthetic construct
  source 1..20: mol_type = other DNA
tcacagcctcagagttcacg

SEQ ID NO: 12696 - DNA, 20 bp, synthetic construct
  source 1..20: mol_type = other DNA
ggccacagtcacagatcttg

SEQ ID NO: 12697 - DNA, 20 bp, synthetic construct
  source 1..20: mol_type = other DNA
gcggtcagtgtgctgatgga

SEQ ID NO: 12698 - DNA, 20 bp, synthetic construct
  source 1..20: mol_type = other DNA
aagaggaggcttgaggccca

SEQ ID NO: 12699 - DNA, 20 bp, synthetic construct
  source 1..20: mol_type = other DNA
cggctgcctcgtgaactctg

SEQ ID NO: 12700 - DNA, 20 bp, synthetic construct
  source 1..20: mol_type = other DNA
cagggcggtcagtgtgctga

SEQ ID NO: 12701 - DNA, 20 bp, synthetic construct
  source 1..20: mol_type = other DNA
tgtgctgatggagggcaagg

SEQ ID NO: 12702 - DNA, 20 bp, synthetic construct
  source 1..20: mol_type = other DNA
cgaggcagccgaggaagagg

SEQ ID NO: 12703 - DNA, 20 bp, synthetic construct
  source 1..20: mol_type = other DNA
gggcaaggcggtctcggctg

SEQ ID NO: 12704 - DNA, 20 bp, synthetic construct
  source 1..20: mol_type = other DNA
ggcggtcagtgtgctgatgg

SEQ ID NO: 12705 - DNA, 20 bp, synthetic construct
  source 1..20: mol_type = other DNA
tcacgaggcagccgaggaag

SEQ ID NO: 12706 - DNA, 20 bp, synthetic construct
  source 1..20: mol_type = other DNA
ggaggcttgaggcccagggt

SEQ ID NO: 12707 - DNA, 20 bp, synthetic construct
  source 1..20: mol_type = other DNA
cagagttcacgaggcagccg

SEQ ID NO: 12708 - DNA, 20 bp, synthetic construct
  source 1..20: mol_type = other DNA
gccgaggaagaggaggcttg

SEQ ID NO: 12709 - DNA, 20 bp, synthetic construct
  source 1..20: mol_type = other DNA
aggaggcttgaggcccaggg

SEQ ID NO: 12710 - DNA, 20 bp, synthetic construct
  source 1..20: mol_type = other DNA
gggacgctgctggatctgcg

SEQ ID NO: 12711 - DNA, 20 bp, synthetic construct
  source 1..20: mol_type = other DNA
acggtcacgcgccccgcagg

SEQ ID NO: 12712 - DNA, 20 bp, synthetic construct
  source 1..20: mol_type = other DNA
gcgaccgtgtgtgagtgcgc

SEQ ID NO: 12713 - DNA, 20 bp, synthetic construct
  source 1..20: mol_type = other DNA
ggacgctgctggatctgcgg

SEQ ID NO: 12714 - DNA, 20 bp, synthetic construct
  source 1..20: mol_type = other DNA
cgcccgtccatggagcccga

SEQ ID NO: 12715 - DNA, 20 bp, synthetic construct
  source 1..20: mol_type = other DNA
cacacggtcgcgcacactca

SEQ ID NO: 12716 - DNA, 20 bp, synthetic construct
  source 1..20: mol_type = other DNA
cccccccgcgcactcacaca

SEQ ID NO: 12717 - DNA, 20 bp, synthetic construct
  source 1..20: mol_type = other DNA
gaccgtgtgtgagtgcgcgg

SEQ ID NO: 12718 - DNA, 20 bp, synthetic construct
  source 1..20: mol_type = other DNA
agggacgcggcgcccgtcca

SEQ ID NO: 12719 - DNA, 20 bp, synthetic construct
  source 1..20: mol_type = other DNA
cgaacctgccgctgtcgccg

SEQ ID NO: 12720 - DNA, 20 bp, synthetic construct
  source 1..20: mol_type = other DNA
cggcgggctgtgcagggacg

SEQ ID NO: 12721 - DNA, 20 bp, synthetic construct
  source 1..20: mol_type = other DNA
ggagcgagagtgggccgcgg

SEQ ID NO: 12722 - DNA, 20 bp, synthetic construct
  source 1..20: mol_type = other DNA
acctgccgctgtcgccgcgg

SEQ ID NO: 12723 - DNA, 20 bp, synthetic construct
  source 1..20: mol_type = other DNA
gcggggcggggagcgagagt

SEQ ID NO: 12724 - DNA, 20 bp, synthetic construct
  source 1..20: mol_type = other DNA
ccgccccgccgcggcgacag

SEQ ID NO: 12725 - DNA, 20 bp, synthetic construct
  source 1..20: mol_type = other DNA
atcactgccctccctaaaca

SEQ ID NO: 12726 - DNA, 20 bp, synthetic construct
  source 1..20: mol_type = other DNA
tcctgctgcttgcttggcga

SEQ ID NO: 12727 - DNA, 20 bp, synthetic construct
  source 1..20: mol_type = other DNA
cctaaacacggagccggctc

SEQ ID NO: 12728 - DNA, 20 bp, synthetic construct
  source 1..20: mol_type = other DNA
agtgatcacgcaagccggag

SEQ ID NO: 12729 - DNA, 20 bp, synthetic construct
  source 1..20: mol_type = other DNA
agggcagtgatcacgcaagc

SEQ ID NO: 12730 - DNA, 20 bp, synthetic construct
  source 1..20: mol_type = other DNA
gccctccctaaacacggagc

SEQ ID NO: 12731 - DNA, 20 bp, synthetic construct
  source 1..20: mol_type = other DNA
gccggctccgtgtttaggga

SEQ ID NO: 12732 - DNA, 20 bp, synthetic construct
  source 1..20: mol_type = other DNA
gatcacgcaagccggagcgg

SEQ ID NO: 12733 - DNA, 20 bp, synthetic construct
  source 1..20: mol_type = other DNA
gctgccaggtagctgaaagc

SEQ ID NO: 12734 - DNA, 20 bp, synthetic construct
  source 1..20: mol_type = other DNA
agccggctccgtgtttaggg

SEQ ID NO: 12735 - DNA, 20 bp, synthetic construct
  source 1..20: mol_type = other DNA
gaagggattgcgattctgga

SEQ ID NO: 12736 - DNA, 20 bp, synthetic construct
  source 1..20: mol_type = other DNA
ccggagcggcgggctgacgt

SEQ ID NO: 12737 - DNA, 20 bp, synthetic construct
  source 1..20: mol_type = other DNA
cggagccggctcgggaagtg

SEQ ID NO: 12738 - DNA, 20 bp, synthetic construct
  source 1..20: mol_type = other DNA
ctgacgttggacgagctgcc

SEQ ID NO: 12739 - DNA, 20 bp, synthetic construct
  source 1..20: mol_type = other DNA
atcacgcaagccggagcggc

SEQ ID NO: 12740 - DNA, 20 bp, synthetic construct
  source 1..20: mol_type = other DNA
gcggagggctcggcgatcag

SEQ ID NO: 12741 - DNA, 20 bp, synthetic construct
  source 1..20: mol_type = other DNA
gcctgtctaacgccccccca

SEQ ID NO: 12742 - DNA, 20 bp, synthetic construct
  source 1..20: mol_type = other DNA
gagggctcggcgatcagcgg

SEQ ID NO: 12743 - DNA, 20 bp, synthetic construct
  source 1..20: mol_type = other DNA
gcggtgcaggccgagctgcg

SEQ ID NO: 12744 - DNA, 20 bp, synthetic construct
  source 1..20: mol_type = other DNA
gcgcagctcggcctgcaccg

SEQ ID NO: 12745 - DNA, 20 bp, synthetic construct
  source 1..20: mol_type = other DNA
gacgacgttgctcagtcttg

SEQ ID NO: 12746 - DNA, 20 bp, synthetic construct
  source 1..20: mol_type = other DNA
gtgcaggccgagctgcgcgg

SEQ ID NO: 12747 - DNA, 20 bp, synthetic construct
  source 1..20: mol_type = other DNA
gacgttgctcagtcttgggg

SEQ ID NO: 12748 - DNA, 20 bp, synthetic construct
  source 1..20: mol_type = other DNA
gggaggccgcagcgccatgg

SEQ ID NO: 12749 - DNA, 20 bp, synthetic construct
  source 1..20: mol_type = other DNA
ggggaggccgcagcgccatg

SEQ ID NO: 12750 - DNA, 20 bp, synthetic construct
  source 1..20: mol_type = other DNA
tgcaggccgagctgcgcgga

SEQ ID NO: 12751 - DNA, 20 bp, synthetic construct
  source 1..20: mol_type = other DNA
ggctcggcgatcagcggcgg

SEQ ID NO: 12752 - DNA, 20 bp, synthetic construct
  source 1..20: mol_type = other DNA
cagcggcggcggcggcagtg

SEQ ID NO: 12753 - DNA, 20 bp, synthetic construct
  source 1..20: mol_type = other DNA
tcggcgatcagcggcggcgg

SEQ ID NO: 12754 - DNA, 20 bp, synthetic construct
  source 1..20: mol_type = other DNA
tcagcggcggcggcggcagt

SEQ ID NO: 12755 - DNA, 20 bp, synthetic construct
  source 1..20: mol_type = other DNA
tcaccctcagtggctcaacg

SEQ ID NO: 12756 - DNA, 20 bp, synthetic construct
  source 1..20: mol_type = other DNA
acgaggagaagatcgtccag

SEQ ID NO: 12757 - DNA, 20 bp, synthetic construct
  source 1..20: mol_type = other DNA
ggatctgctcaatcagccgc

SEQ ID NO: 12758 - DNA, 20 bp, synthetic construct
  source 1..20: mol_type = other DNA
agcagggccggctcctctgg

SEQ ID NO: 12759 - DNA, 20 bp, synthetic construct
  source 1..20: mol_type = other DNA
gcccagccccccacccccag

SEQ ID NO: 12760 - DNA, 20 bp, synthetic construct
  source 1..20: mol_type = other DNA
ttctcctcgttgagccactg

SEQ ID NO: 12761 - DNA, 20 bp, synthetic construct
  source 1..20: mol_type = other DNA
ttgagccactgagggtgaga

SEQ ID NO: 12762 - DNA, 20 bp, synthetic construct
  source 1..20: mol_type = other DNA
cctcgccttctcaccctcag

SEQ ID NO: 12763 - DNA, 20 bp, synthetic construct
  source 1..20: mol_type = other DNA
cactgagggtgagaaggcga

SEQ ID NO: 12764 - DNA, 20 bp, synthetic construct
  source 1..20: mol_type = other DNA
gagcagggccggctcctctg

SEQ ID NO: 12765 - DNA, 20 bp, synthetic construct
  source 1..20: mol_type = other DNA
tgagcagggccggctcctct

SEQ ID NO: 12766 - DNA, 20 bp, synthetic construct
  source 1..20: mol_type = other DNA
aaagtggggaagtgggcatg

SEQ ID NO: 12767 - DNA, 20 bp, synthetic construct
  source 1..20: mol_type = other DNA
gggccggctcctctgggggt

SEQ ID NO: 12768 - DNA, 20 bp, synthetic construct
  source 1..20: mol_type = other DNA
ccccccacccccagaggagc

SEQ ID NO: 12769 - DNA, 20 bp, synthetic construct
  source 1..20: mol_type = other DNA
ccactgagggtgagaaggcg

SEQ ID NO: 12770 - DNA, 20 bp, synthetic construct
  source 1..20: mol_type = other DNA
gcgccgcgaccgaccgaccg

SEQ ID NO: 12771 - DNA, 20 bp, synthetic construct
  source 1..20: mol_type = other DNA
gtgaatgtgagtgtgagcgc

SEQ ID NO: 12772 - DNA, 20 bp, synthetic construct
  source 1..20: mol_type = other DNA
agcgccgcgaccgaccgacc

SEQ ID NO: 12773 - DNA, 20 bp, synthetic construct
  source 1..20: mol_type = other DNA
gagcgccgcgaccgaccgac

SEQ ID NO: 12774 - DNA, 20 bp, synthetic construct
  source 1..20: mol_type = other DNA
gtgagtgtgagcgcgggtgt

SEQ ID NO: 12775 - DNA, 20 bp, synthetic construct
  source 1..20: mol_type = other DNA
gtcgcggcgctcggatccag

SEQ ID NO: 12776 - DNA, 20 bp, synthetic construct
  source 1..20: mol_type = other DNA
gtgcggggtgcgtggccgtg

SEQ ID NO: 12777 - DNA, 20 bp, synthetic construct
  source 1..20: mol_type = other DNA
tgtgaatgtgagtgtgagcg

SEQ ID NO: 12778 - DNA, 20 bp, synthetic construct
  source 1..20: mol_type = other DNA
ggtgcggggtgcgtggccgt

SEQ ID NO: 12779 - DNA, 20 bp, synthetic construct
  source 1..20: mol_type = other DNA
gacacacgcgggccacccca

SEQ ID NO: 12780 - DNA, 20 bp, synthetic construct
  source 1..20: mol_type = other DNA
gtgagcgcgggtgtgggtgc

SEQ ID NO: 12781 - DNA, 20 bp, synthetic construct
  source 1..20: mol_type = other DNA
tgagcgcgggtgtgggtgcg

SEQ ID NO: 12782 - DNA, 20 bp, synthetic construct
  source 1..20: mol_type = other DNA
gggtgtgggtgcggggtgcg

SEQ ID NO: 12783 - DNA, 20 bp, synthetic construct
  source 1..20: mol_type = other DNA
cggggtgcgtggccgtgggg

SEQ ID NO: 12784 - DNA, 20 bp, synthetic construct
  source 1..20: mol_type = other DNA
tgtgagcgcgggtgtgggtg

SEQ ID NO: 12785 - DNA, 20 bp, synthetic construct
  source 1..20: mol_type = other DNA
gagctgaggctcccagctgt

SEQ ID NO: 12786 - DNA, 20 bp, synthetic construct
  source 1..20: mol_type = other DNA
ggccagcgaggcccacagct

SEQ ID NO: 12787 - DNA, 20 bp, synthetic construct
  source 1..20: mol_type = other DNA
ccgggagcgcgggacagaca

SEQ ID NO: 12788 - DNA, 20 bp, synthetic construct
  source 1..20: mol_type = other DNA
agagcgcgcacgcaagcccc

SEQ ID NO: 12789 - DNA, 20 bp, synthetic construct
  source 1..20: mol_type = other DNA
gcgggacagacagggcacgc

SEQ ID NO: 12790 - DNA, 20 bp, synthetic construct
  source 1..20: mol_type = other DNA
cgggacagacagggcacgct

SEQ ID NO: 12791 - DNA, 20 bp, synthetic construct
  source 1..20: mol_type = other DNA
ctgtctgtcccgcgctcccg

SEQ ID NO: 12792 - DNA, 20 bp, synthetic construct
  source 1..20: mol_type = other DNA
acagacagggcacgctgggt

SEQ ID NO: 12793 - DNA, 20 bp, synthetic construct
  source 1..20: mol_type = other DNA
gacagggcacgctgggtcgg

SEQ ID NO: 12794 - DNA, 20 bp, synthetic construct
  source 1..20: mol_type = other DNA
cagagcgcgcacgcaagccc

SEQ ID NO: 12795 - DNA, 20 bp, synthetic construct
  source 1..20: mol_type = other DNA
ggagctgaggctcccagctg

SEQ ID NO: 12796 - DNA, 20 bp, synthetic construct
  source 1..20: mol_type = other DNA
acgctgggtcggcggagctg

SEQ ID NO: 12797 - DNA, 20 bp, synthetic construct
  source 1..20: mol_type = other DNA
cacgcaagccccgggagcgc

SEQ ID NO: 12798 - DNA, 20 bp, synthetic construct
  source 1..20: mol_type = other DNA
actgggcgaccgggccagcg

SEQ ID NO: 12799 - DNA, 20 bp, synthetic construct
  source 1..20: mol_type = other DNA
cctgtctgtcccgcgctccc

SEQ ID NO: 12800 - DNA, 20 bp, synthetic construct
  source 1..20: mol_type = other DNA
agtagatggcataatatatg

SEQ ID NO: 12801 - DNA, 20 bp, synthetic construct
  source 1..20: mol_type = other DNA
aaatgacaaaacgcagtaga

SEQ ID NO: 12802 - DNA, 20 bp, synthetic construct
  source 1..20: mol_type = other DNA
atataaacaagatcagcaga

SEQ ID NO: 12803 - DNA, 20 bp, synthetic construct
  source 1..20: mol_type = other DNA
aaggggaggatgagttggtg

SEQ ID NO: 12804 - DNA, 20 bp, synthetic construct
  source 1..20: mol_type = other DNA
agaaactttccagaaagggg

SEQ ID NO: 12805 - DNA, 20 bp, synthetic construct
  source 1..20: mol_type = other DNA
aaaggggaggatgagttggt

SEQ ID NO: 12806 - DNA, 20 bp, synthetic construct
  source 1..20: mol_type = other DNA
actctgagcagagttaattc

SEQ ID NO: 12807 - DNA, 20 bp, synthetic construct
  source 1..20: mol_type = other DNA
ccagaaaggggaggatgagt

SEQ ID NO: 12808 - DNA, 20 bp, synthetic construct
  source 1..20: mol_type = other DNA
agaaacagtgtgtttcagag

SEQ ID NO: 12809 - DNA, 20 bp, synthetic construct
  source 1..20: mol_type = other DNA
tttctattatagaagtgcaa

SEQ ID NO: 12810 - DNA, 20 bp, synthetic construct
  source 1..20: mol_type = other DNA
atgagttggtggggtgaagg

SEQ ID NO: 12811 - DNA, 20 bp, synthetic construct
  source 1..20: mol_type = other DNA
gatgagttggtggggtgaag

SEQ ID NO: 12812 - DNA, 20 bp, synthetic construct
  source 1..20: mol_type = other DNA
tcataaacggcttcagtttc

SEQ ID NO: 12813 - DNA, 20 bp, synthetic construct
  source 1..20: mol_type = other DNA
ctgctcagagttagatttgc

SEQ ID NO: 12814 - DNA, 20 bp, synthetic construct
  source 1..20: mol_type = other DNA
aacacactgtttctcataaa

SEQ ID NO: 12815 - DNA, 20 bp, synthetic construct
  source 1..20: mol_type = other DNA
tacctgcaagccctaagtaa

SEQ ID NO: 12816 - DNA, 20 bp, synthetic construct
  source 1..20: mol_type = other DNA
ggagtgacaggggtctggga

SEQ ID NO: 12817 - DNA, 20 bp, synthetic construct
  source 1..20: mol_type = other DNA
tcaggagaatgcaggagaca

SEQ ID NO: 12818 - DNA, 20 bp, synthetic construct
  source 1..20: mol_type = other DNA
catgggaccaagaagcagga

SEQ ID NO: 12819 - DNA, 20 bp, synthetic construct
  source 1..20: mol_type = other DNA
tgaaggtttcaggagaatgc

SEQ ID NO: 12820 - DNA, 20 bp, synthetic construct
  source 1..20: mol_type = other DNA
acacatcctgtctctgtgtg

SEQ ID NO: 12821 - DNA, 20 bp, synthetic construct
  source 1..20: mol_type = other DNA
aggggagaaagggagtgaca

SEQ ID NO: 12822 - DNA, 20 bp, synthetic construct
  source 1..20: mol_type = other DNA
tgcaggagacagggtgagga

SEQ ID NO: 12823 - DNA, 20 bp, synthetic construct
  source 1..20: mol_type = other DNA
accaagaagcaggaaggaag

SEQ ID NO: 12824 - DNA, 20 bp, synthetic construct
  source 1..20: mol_type = other DNA
ggggtgttgtctggcaggtg

SEQ ID NO: 12825 - DNA, 20 bp, synthetic construct
  source 1..20: mol_type = other DNA
gggagtgacaggggtctggg

SEQ ID NO: 12826 - DNA, 20 bp, synthetic construct
  source 1..20: mol_type = other DNA
ggggagaaagggagtgacag

SEQ ID NO: 12827 - DNA, 20 bp, synthetic construct
  source 1..20: mol_type = other DNA
gagacagggtgaggaaggag

SEQ ID NO: 12828 - DNA, 20 bp, synthetic construct
  source 1..20: mol_type = other DNA
ggagacagggtgaggaagga

SEQ ID NO: 12829 - DNA, 20 bp, synthetic construct
  source 1..20: mol_type = other DNA
aggagacagggtgaggaagg

SEQ ID NO: 12830 - DNA, 20 bp, synthetic construct
  source 1..20: mol_type = other DNA
tgaggaagagtatgagactc

SEQ ID NO: 12831 - DNA, 20 bp, synthetic construct
  source 1..20: mol_type = other DNA
cagatctcctgaagaaaagt

SEQ ID NO: 12832 - DNA, 20 bp, synthetic construct
  source 1..20: mol_type = other DNA
gatctctgagggagtactct

SEQ ID NO: 12833 - DNA, 20 bp, synthetic construct
  source 1..20: mol_type = other DNA
aacgtgtctaagatagaatc

SEQ ID NO: 12834 - DNA, 20 bp, synthetic construct
  source 1..20: mol_type = other DNA
accatgccttaagccgcaaa

SEQ ID NO: 12835 - DNA, 20 bp, synthetic construct
  source 1..20: mol_type = other DNA
gccatttgcggcttaaggca

SEQ ID NO: 12836 - DNA, 20 bp, synthetic construct
  source 1..20: mol_type = other DNA
tagacacgttaacttctcgg

SEQ ID NO: 12837 - DNA, 20 bp, synthetic construct
  source 1..20: mol_type = other DNA
ccgcaaatggcagctgactg

SEQ ID NO: 12838 - DNA, 20 bp, synthetic construct
  source 1..20: mol_type = other DNA
aagtcggaagctgttaattt

SEQ ID NO: 12839 - DNA, 20 bp, synthetic construct
  source 1..20: mol_type = other DNA
tagaatcaggatcatgttga

SEQ ID NO: 12840 - DNA, 20 bp, synthetic construct
  source 1..20: mol_type = other DNA
tttagaggaaacaggaacaa

SEQ ID NO: 12841 - DNA, 20 bp, synthetic construct
  source 1..20: mol_type = other DNA
ttctctttctatgatctctg

SEQ ID NO: 12842 - DNA, 20 bp, synthetic construct
  source 1..20: mol_type = other DNA
tttcctggtttagaggaaac

SEQ ID NO: 12843 - DNA, 20 bp, synthetic construct
  source 1..20: mol_type = other DNA
acacttgagaaaatgctgac

SEQ ID NO: 12844 - DNA, 20 bp, synthetic construct
  source 1..20: mol_type = other DNA
tttggtacagaaaaagggag

SEQ ID NO: 12845 - DNA, 20 bp, synthetic construct
  source 1..20: mol_type = other DNA
gggtcgaggtcgtggtagtg

SEQ ID NO: 12846 - DNA, 20 bp, synthetic construct
  source 1..20: mol_type = other DNA
cggcggaggacgcaaccgag

SEQ ID NO: 12847 - DNA, 20 bp, synthetic construct
  source 1..20: mol_type = other DNA
ccgcaaccacccctcgccca

SEQ ID NO: 12848 - DNA, 20 bp, synthetic construct
  source 1..20: mol_type = other DNA
gaggacgcaaccgagcggtg

SEQ ID NO: 12849 - DNA, 20 bp, synthetic construct
  source 1..20: mol_type = other DNA
aaccgagcggtgaggcgcgt

SEQ ID NO: 12850 - DNA, 20 bp, synthetic construct
  source 1..20: mol_type = other DNA
accacgacctcgacccccga

SEQ ID NO: 12851 - DNA, 20 bp, synthetic construct
  source 1..20: mol_type = other DNA
tgaggcgcgtgggccttcgg

SEQ ID NO: 12852 - DNA, 20 bp, synthetic construct
  source 1..20: mol_type = other DNA
ggaggcggagccttgggcga

SEQ ID NO: 12853 - DNA, 20 bp, synthetic construct
  source 1..20: mol_type = other DNA
gaggcggagccttgggcgag

SEQ ID NO: 12854 - DNA, 20 bp, synthetic construct
  source 1..20: mol_type = other DNA
gtgaggcgcgtgggccttcg

SEQ ID NO: 12855 - DNA, 20 bp, synthetic construct
  source 1..20: mol_type = other DNA
tgggcgaggggtggttgcgg

SEQ ID NO: 12856 - DNA, 20 bp, synthetic construct
  source 1..20: mol_type = other DNA
cggaggcggagccttgggcg

SEQ ID NO: 12857 - DNA, 20 bp, synthetic construct
  source 1..20: mol_type = other DNA
gcggagccttgggcgagggg

SEQ ID NO: 12858 - DNA, 20 bp, synthetic construct
  source 1..20: mol_type = other DNA
caaccgagcggtgaggcgcg

SEQ ID NO: 12859 - DNA, 20 bp, synthetic construct
  source 1..20: mol_type = other DNA
ggcgcggggaggccaagacc

SEQ ID NO: 12860 - DNA, 20 bp, synthetic construct
  source 1..20: mol_type = other DNA
ccttagatgaccataaccag

SEQ ID NO: 12861 - DNA, 20 bp, synthetic construct
  source 1..20: mol_type = other DNA
gtgtgtgacgatatgggtgc

SEQ ID NO: 12862 - DNA, 20 bp, synthetic construct
  source 1..20: mol_type = other DNA
gaccttagatgaccataacc

SEQ ID NO: 12863 - DNA, 20 bp, synthetic construct
  source 1..20: mol_type = other DNA
ttggcaggagaatagaaccc

SEQ ID NO: 12864 - DNA, 20 bp, synthetic construct
  source 1..20: mol_type = other DNA
agaaaggaatggccagcccc

SEQ ID NO: 12865 - DNA, 20 bp, synthetic construct
  source 1..20: mol_type = other DNA
cactcacagtagaaggaaag

SEQ ID NO: 12866 - DNA, 20 bp, synthetic construct
  source 1..20: mol_type = other DNA
tactgtgagtgtctctggat

SEQ ID NO: 12867 - DNA, 20 bp, synthetic construct
  source 1..20: mol_type = other DNA
ccagagacactcacagtaga

SEQ ID NO: 12868 - DNA, 20 bp, synthetic construct
  source 1..20: mol_type = other DNA
tctggatgggcagaaaggaa

SEQ ID NO: 12869 - DNA, 20 bp, synthetic construct
  source 1..20: mol_type = other DNA
acatgcacatggctggacac

SEQ ID NO: 12870 - DNA, 20 bp, synthetic construct
  source 1..20: mol_type = other DNA
accttagatgaccataacca

SEQ ID NO: 12871 - DNA, 20 bp, synthetic construct
  source 1..20: mol_type = other DNA
gtgtctctggatgggcagaa

SEQ ID NO: 12872 - DNA, 20 bp, synthetic construct
  source 1..20: mol_type = other DNA
ccttctactgtgagtgtctc

SEQ ID NO: 12873 - DNA, 20 bp, synthetic construct
  source 1..20: mol_type = other DNA
ctactgtgagtgtctctgga

SEQ ID NO: 12874 - DNA, 20 bp, synthetic construct
  source 1..20: mol_type = other DNA
cccctggttatggtcatcta

SEQ ID NO: 12875 - DNA, 20 bp, synthetic construct
  source 1..20: mol_type = other DNA
tttgcagcatagaagctccg

SEQ ID NO: 12876 - DNA, 20 bp, synthetic construct
  source 1..20: mol_type = other DNA
gaggcttagatgtctcgggt

SEQ ID NO: 12877 - DNA, 20 bp, synthetic construct
  source 1..20: mol_type = other DNA
ggttggatcggcttgttgcg

SEQ ID NO: 12878 - DNA, 20 bp, synthetic construct
  source 1..20: mol_type = other DNA
cagcatagaagctccgcgga

SEQ ID NO: 12879 - DNA, 20 bp, synthetic construct
  source 1..20: mol_type = other DNA
aactgaggtaaggctgtgcg

SEQ ID NO: 12880 - DNA, 20 bp, synthetic construct
  source 1..20: mol_type = other DNA
agcatagaagctccgcggac

SEQ ID NO: 12881 - DNA, 20 bp, synthetic construct
  source 1..20: mol_type = other DNA
tggatcggcttgttgcgggg

SEQ ID NO: 12882 - DNA, 20 bp, synthetic construct
  source 1..20: mol_type = other DNA
actgaggtaaggctgtgcgg

SEQ ID NO: 12883 - DNA, 20 bp, synthetic construct
  source 1..20: mol_type = other DNA
tcagtttaccttcccgtccg

SEQ ID NO: 12884 - DNA, 20 bp, synthetic construct
  source 1..20: mol_type = other DNA
gcggacgggaaggtaaactg

SEQ ID NO: 12885 - DNA, 20 bp, synthetic construct
  source 1..20: mol_type = other DNA
tagaagctccgcggacggga

SEQ ID NO: 12886 - DNA, 20 bp, synthetic construct
  source 1..20: mol_type = other DNA
ggatcggcttgttgcgggga

SEQ ID NO: 12887 - DNA, 20 bp, synthetic construct
  source 1..20: mol_type = other DNA
ctgaggtaaggctgtgcggg

SEQ ID NO: 12888 - DNA, 20 bp, synthetic construct
  source 1..20: mol_type = other DNA
cgggaaggtaaactgaggta

SEQ ID NO: 12889 - DNA, 20 bp, synthetic construct
  source 1..20: mol_type = other DNA
ttgttgcggggagggagggg

SEQ ID NO: 12890 - DNA, 20 bp, synthetic construct
  source 1..20: mol_type = other DNA
ctcctcggggtagtactcgg

SEQ ID NO: 12891 - DNA, 20 bp, synthetic construct
  source 1..20: mol_type = other DNA
ggcccccgagtactaccccg

SEQ ID NO: 12892 - DNA, 20 bp, synthetic construct
  source 1..20: mol_type = other DNA
cgtctgcctagcagtgtccg

SEQ ID NO: 12893 - DNA, 20 bp, synthetic construct
  source 1..20: mol_type = other DNA
ccccgagtactaccccgagg

SEQ ID NO: 12894 - DNA, 20 bp, synthetic construct
  source 1..20: mol_type = other DNA
gctgccggtcctcgagttgg

SEQ ID NO: 12895 - DNA, 20 bp, synthetic construct
  source 1..20: mol_type = other DNA
ccgcggcagcccccaactcg

SEQ ID NO: 12896 - DNA, 20 bp, synthetic construct
  source 1..20: mol_type = other DNA
aactcgaggaccggcagcca

SEQ ID NO: 12897 - DNA, 20 bp, synthetic construct
  source 1..20: mol_type = other DNA
cgcggacactgctaggcaga

SEQ ID NO: 12898 - DNA, 20 bp, synthetic construct
  source 1..20: mol_type = other DNA
gggctgccgcggacactgct

SEQ ID NO: 12899 - DNA, 20 bp, synthetic construct
  source 1..20: mol_type = other DNA
gtggctgccggtcctcgagt

SEQ ID NO: 12900 - DNA, 20 bp, synthetic construct
  source 1..20: mol_type = other DNA
gcagcccccaactcgaggac

SEQ ID NO: 12901 - DNA, 20 bp, synthetic construct
  source 1..20: mol_type = other DNA
cggcgagtaccgagcgcggg

SEQ ID NO: 12902 - DNA, 20 bp, synthetic construct
  source 1..20: mol_type = other DNA
agcgtggcccacggacaccg

SEQ ID NO: 12903 - DNA, 20 bp, synthetic construct
  source 1..20: mol_type = other DNA
cagacggcgagtaccgagcg

SEQ ID NO: 12904 - DNA, 20 bp, synthetic construct
  source 1..20: mol_type = other DNA
acaccgcggccacccgcgct

SEQ ID NO: 12905 - DNA, 20 bp, synthetic construct
  source 1..20: mol_type = other DNA
taggcacgtaaggcctcgtg

SEQ ID NO: 12906 - DNA, 20 bp, synthetic construct
  source 1..20: mol_type = other DNA
ggagggtatccggcttaagg

SEQ ID NO: 12907 - DNA, 20 bp, synthetic construct
  source 1..20: mol_type = other DNA
gcgcgcgacgcaacctcacg

SEQ ID NO: 12908 - DNA, 20 bp, synthetic construct
  source 1..20: mol_type = other DNA
accttcgcgccgaaggcggt

SEQ ID NO: 12909 - DNA, 20 bp, synthetic construct
  source 1..20: mol_type = other DNA
acagccgcgaggttctgcgc

SEQ ID NO: 12910 - DNA, 20 bp, synthetic construct
  source 1..20: mol_type = other DNA
gaaggcaggcttgctcctcg

SEQ ID NO: 12911 - DNA, 20 bp, synthetic construct
  source 1..20: mol_type = other DNA
ggcaggcttgctcctcgggg

SEQ ID NO: 12912 - DNA, 20 bp, synthetic construct
  source 1..20: mol_type = other DNA
ggataccctcccccaccccg

SEQ ID NO: 12913 - DNA, 20 bp, synthetic construct
  source 1..20: mol_type = other DNA
cgcgcccgcgcagaacctcg

SEQ ID NO: 12914 - DNA, 20 bp, synthetic construct
  source 1..20: mol_type = other DNA
cacagccgcgaggttctgcg

SEQ ID NO: 12915 - DNA, 20 bp, synthetic construct
  source 1..20: mol_type = other DNA
gcgcgggcgcggaagacggg

SEQ ID NO: 12916 - DNA, 20 bp, synthetic construct
  source 1..20: mol_type = other DNA
gcaggcttgctcctcggggt

SEQ ID NO: 12917 - DNA, 20 bp, synthetic construct
  source 1..20: mol_type = other DNA
ggaagacgggcggcgcgtgg

SEQ ID NO: 12918 - DNA, 20 bp, synthetic construct
  source 1..20: mol_type = other DNA
tttaggcgggcacagccgcg

SEQ ID NO: 12919 - DNA, 20 bp, synthetic construct
  source 1..20: mol_type = other DNA
gacgggcggcgcgtggcgga

SEQ ID NO: 12920 - DNA, 20 bp, synthetic construct
  source 1..20: mol_type = other DNA
atggtgattatcggaccaag

SEQ ID NO: 12921 - DNA, 20 bp, synthetic construct
  source 1..20: mol_type = other DNA
aagcgagagcagcagacgct

SEQ ID NO: 12922 - DNA, 20 bp, synthetic construct
  source 1..20: mol_type = other DNA
gaagcgagagcagcagacgc

SEQ ID NO: 12923 - DNA, 20 bp, synthetic construct
  source 1..20: mol_type = other DNA
gatcctattccgtgaatgat

SEQ ID NO: 12924 - DNA, 20 bp, synthetic construct
  source 1..20: mol_type = other DNA
tctgctccttgcagcctggg

SEQ ID NO: 12925 - DNA, 20 bp, synthetic construct
  source 1..20: mol_type = other DNA
ttccgtgaatgattggaatg

SEQ ID NO: 12926 - DNA, 20 bp, synthetic construct
  source 1..20: mol_type = other DNA
tccccacctcccaggctgca

SEQ ID NO: 12927 - DNA, 20 bp, synthetic construct
  source 1..20: mol_type = other DNA
acccacattccaatcattca

SEQ ID NO: 12928 - DNA, 20 bp, synthetic construct
  source 1..20: mol_type = other DNA
tccgtgaatgattggaatgt

SEQ ID NO: 12929 - DNA, 20 bp, synthetic construct
  source 1..20: mol_type = other DNA
attatcggaccaagaggccc

SEQ ID NO: 12930 - DNA, 20 bp, synthetic construct
  source 1..20: mol_type = other DNA
ctccataatgactgtgatgc

SEQ ID NO: 12931 - DNA, 20 bp, synthetic construct
  source 1..20: mol_type = other DNA
tccttgcagcctgggaggtg

SEQ ID NO: 12932 - DNA, 20 bp, synthetic construct
  source 1..20: mol_type = other DNA
gctccttgcagcctgggagg

SEQ ID NO: 12933 - DNA, 20 bp, synthetic construct
  source 1..20: mol_type = other DNA
ttccagcatcacagtcatta

SEQ ID NO: 12934 - DNA, 20 bp, synthetic construct
  source 1..20: mol_type = other DNA
ctggccgctccccacctccc

SEQ ID NO: 12935 - DNA, 20 bp, synthetic construct
  source 1..20: mol_type = other DNA
gctccccaagccttcgagag

SEQ ID NO: 12936 - DNA, 20 bp, synthetic construct
  source 1..20: mol_type = other DNA
gacagcaccaccggcgccgg

SEQ ID NO: 12937 - DNA, 20 bp, synthetic construct
  source 1..20: mol_type = other DNA
gcgccgctctcgaaggcttg

SEQ ID NO: 12938 - DNA, 20 bp, synthetic construct
  source 1..20: mol_type = other DNA
ctacagacgttcgcacacct

SEQ ID NO: 12939 - DNA, 20 bp, synthetic construct
  source 1..20: mol_type = other DNA
ctctcattggtccttcgcag

SEQ ID NO: 12940 - DNA, 20 bp, synthetic construct
  source 1..20: mol_type = other DNA
ggagtgtgcgccgctctcga

SEQ ID NO: 12941 - DNA, 20 bp, synthetic construct
  source 1..20: mol_type = other DNA
gggctgtcccgggacctctg

SEQ ID NO: 12942 - DNA, 20 bp, synthetic construct
  source 1..20: mol_type = other DNA
aaggcttggggagctcgggg

SEQ ID NO: 12943 - DNA, 20 bp, synthetic construct
  source 1..20: mol_type = other DNA
tcgaaggcttggggagctcg

SEQ ID NO: 12944 - DNA, 20 bp, synthetic construct
  source 1..20: mol_type = other DNA
ccaggtgtgcgaacgtctgt

SEQ ID NO: 12945 - DNA, 20 bp, synthetic construct
  source 1..20: mol_type = other DNA
agaggtcccgggacagcccg

SEQ ID NO: 12946 - DNA, 20 bp, synthetic construct
  source 1..20: mol_type = other DNA
gccagcgccccagaggtccc

SEQ ID NO: 12947 - DNA, 20 bp, synthetic construct
  source 1..20: mol_type = other DNA
tcccgggacctctggggcgc

SEQ ID NO: 12948 - DNA, 20 bp, synthetic construct
  source 1..20: mol_type = other DNA
tgccagcgccccagaggtcc

SEQ ID NO: 12949 - DNA, 20 bp, synthetic construct
  source 1..20: mol_type = other DNA
gcggcgcctcgggctgtccc

SEQ ID NO: 12950 - DNA, 20 bp, synthetic construct
  source 1..20: mol_type = other DNA
gaggacagagccttaaagtg

SEQ ID NO: 12951 - DNA, 20 bp, synthetic construct
  source 1..20: mol_type = other DNA
aggacagagccttaaagtgg

SEQ ID NO: 12952 - DNA, 20 bp, synthetic construct
  source 1..20: mol_type = other DNA
ccgaggacagagccttaaag

SEQ ID NO: 12953 - DNA, 20 bp, synthetic construct
  source 1..20: mol_type = other DNA
ggacagagccttaaagtggg

SEQ ID NO: 12954 - DNA, 20 bp, synthetic construct
  source 1..20: mol_type = other DNA
cgaggacagagccttaaagt

SEQ ID NO: 12955 - DNA, 20 bp, synthetic construct
  source 1..20: mol_type = other DNA
gacagagccttaaagtgggg

SEQ ID NO: 12956 - DNA, 20 bp, synthetic construct
  source 1..20: mol_type = other DNA
ggcatccccgagccccgcgt

SEQ ID NO: 12957 - DNA, 20 bp, synthetic construct
  source 1..20: mol_type = other DNA
gccgccccccggtcccgacg

SEQ ID NO: 12958 - DNA, 20 bp, synthetic construct
  source 1..20: mol_type = other DNA
cgccccccggtcccgacgcg

SEQ ID NO: 12959 - DNA, 20 bp, synthetic construct
  source 1..20: mol_type = other DNA
gcatccccgagccccgcgtc

SEQ ID NO: 12960 - DNA, 20 bp, synthetic construct
  source 1..20: mol_type = other DNA
cgagccccgcgtcgggaccg

SEQ ID NO: 12961 - DNA, 20 bp, synthetic construct
  source 1..20: mol_type = other DNA
tcggtttggtcggcggctgg

SEQ ID NO: 12962 - DNA, 20 bp, synthetic construct
  source 1..20: mol_type = other DNA
ggtcggcggctggaggagag

SEQ ID NO: 12963 - DNA, 20 bp, synthetic construct
  source 1..20: mol_type = other DNA
agccccgcgtcgggaccggg

SEQ ID NO: 12964 - DNA, 20 bp, synthetic construct
  source 1..20: mol_type = other DNA
gagccccgcgtcgggaccgg

SEQ ID NO: 12965 - DNA, 20 bp, synthetic construct
  source 1..20: mol_type = other DNA
gaggagaggcatacccactg

SEQ ID NO: 12966 - DNA, 20 bp, synthetic construct
  source 1..20: mol_type = other DNA
tcccagacctacgccccagt

SEQ ID NO: 12967 - DNA, 20 bp, synthetic construct
  source 1..20: mol_type = other DNA
cagaggagaggcatacccac

SEQ ID NO: 12968 - DNA, 20 bp, synthetic construct
  source 1..20: mol_type = other DNA
cggacgccgatccgcgcagg

SEQ ID NO: 12969 - DNA, 20 bp, synthetic construct
  source 1..20: mol_type = other DNA
agaggagaggcatacccact

SEQ ID NO: 12970 - DNA, 20 bp, synthetic construct
  source 1..20: mol_type = other DNA
gtcccagacctacgccccag

SEQ ID NO: 12971 - DNA, 20 bp, synthetic construct
  source 1..20: mol_type = other DNA
acctcagcagccgcccgctg

SEQ ID NO: 12972 - DNA, 20 bp, synthetic construct
  source 1..20: mol_type = other DNA
aggcatacccactggggcgt

SEQ ID NO: 12973 - DNA, 20 bp, synthetic construct
  source 1..20: mol_type = other DNA
tgagggccgggccagaggag

SEQ ID NO: 12974 - DNA, 20 bp, synthetic construct
  source 1..20: mol_type = other DNA
ggtatgcctctcctctggcc

SEQ ID NO: 12975 - DNA, 20 bp, synthetic construct
  source 1..20: mol_type = other DNA
gcgggcggctgctgaggtga

SEQ ID NO: 12976 - DNA, 20 bp, synthetic construct
  source 1..20: mol_type = other DNA
tgaggtgagggccgggccag

SEQ ID NO: 12977 - DNA, 20 bp, synthetic construct
  source 1..20: mol_type = other DNA
agcgggcggctgctgaggtg

SEQ ID NO: 12978 - DNA, 20 bp, synthetic construct
  source 1..20: mol_type = other DNA
tccgcagcgggcggctgctg

SEQ ID NO: 12979 - DNA, 20 bp, synthetic construct
  source 1..20: mol_type = other DNA
cagtgggtatgcctctcctc

SEQ ID NO: 12980 - DNA, 20 bp, synthetic construct
  source 1..20: mol_type = other DNA
gttcttgaaggtataaaatg

SEQ ID NO: 12981 - DNA, 20 bp, synthetic construct
  source 1..20: mol_type = other DNA
gaggtttagggtctactcta

SEQ ID NO: 12982 - DNA, 20 bp, synthetic construct
  source 1..20: mol_type = other DNA
ttggttctagctcaggagaa

SEQ ID NO: 12983 - DNA, 20 bp, synthetic construct
  source 1..20: mol_type = other DNA
ttctagctcaggagaaagga

SEQ ID NO: 12984 - DNA, 20 bp, synthetic construct
  source 1..20: mol_type = other DNA
attaagtaattggttcttga

SEQ ID NO: 12985 - DNA, 20 bp, synthetic construct
  source 1..20: mol_type = other DNA
aggatggaagcaggagtcgt

SEQ ID NO: 12986 - DNA, 20 bp, synthetic construct
  source 1..20: mol_type = other DNA
ggggtcggggacggaaaaga

SEQ ID NO: 12987 - DNA, 20 bp, synthetic construct
  source 1..20: mol_type = other DNA
tcaggagaaaggatggaagc

SEQ ID NO: 12988 - DNA, 20 bp, synthetic construct
  source 1..20: mol_type = other DNA
gaaggtataaaatgaggttt

SEQ ID NO: 12989 - DNA, 20 bp, synthetic construct
  source 1..20: mol_type = other DNA
aaggtataaaatgaggttta

SEQ ID NO: 12990 - DNA, 20 bp, synthetic construct
  source 1..20: mol_type = other DNA
ccggctagcgggagagagcg

SEQ ID NO: 12991 - DNA, 20 bp, synthetic construct
  source 1..20: mol_type = other DNA
cggaagagacattaagtaat

SEQ ID NO: 12992 - DNA, 20 bp, synthetic construct
  source 1..20: mol_type = other DNA
aaggagtctgggagggggtc

SEQ ID NO: 12993 - DNA, 20 bp, synthetic construct
  source 1..20: mol_type = other DNA
aggagtctgggagggggtcg

SEQ ID NO: 12994 - DNA, 20 bp, synthetic construct
  source 1..20: mol_type = other DNA
gtctgggagggggtcgggga

SEQ ID NO: 12995 - DNA, 20 bp, synthetic construct
  source 1..20: mol_type = other DNA
gggaccgcgagcggcagctg

SEQ ID NO: 12996 - DNA, 20 bp, synthetic construct
  source 1..20: mol_type = other DNA
gaggccaccgggaccgcgag

SEQ ID NO: 12997 - DNA, 20 bp, synthetic construct
  source 1..20: mol_type = other DNA
ccctccccagctgccgctcg

SEQ ID NO: 12998 - DNA, 20 bp, synthetic construct
  source 1..20: mol_type = other DNA
gctgccgctcgcggtcccgg

SEQ ID NO: 12999 - DNA, 20 bp, synthetic construct
  source 1..20: mol_type = other DNA
cgcggcaggtaagacggcgc

SEQ ID NO: 13000 - DNA, 20 bp, synthetic construct
  source 1..20: mol_type = other DNA
aggtaagacggcgctggccg

SEQ ID NO: 13001 - DNA, 20 bp, synthetic construct
  source 1..20: mol_type = other DNA
gagcgcacctgcctggtccg

SEQ ID NO: 13002 - DNA, 20 bp, synthetic construct
  source 1..20: mol_type = other DNA
gctggccgcggtgctgccgg

SEQ ID NO: 13003 - DNA, 20 bp, synthetic construct
  source 1..20: mol_type = other DNA
ccgcgagcggcagctgggga

SEQ ID NO: 13004 - DNA, 20 bp, synthetic construct
  source 1..20: mol_type = other DNA
cgggagcaaaacagctgatc

SEQ ID NO: 13005 - DNA, 20 bp, synthetic construct
  source 1..20: mol_type = other DNA
ttgctcccgctcgggctccg

SEQ ID NO: 13006 - DNA, 20 bp, synthetic construct
  source 1..20: mol_type = other DNA
accgcgagcggcagctgggg

SEQ ID NO: 13007 - DNA, 20 bp, synthetic construct
  source 1..20: mol_type = other DNA
aggtgcgctctccgggcgcg

SEQ ID NO: 13008 - DNA, 20 bp, synthetic construct
  source 1..20: mol_type = other DNA
gccgcggtgctgccggcggg

SEQ ID NO: 13009 - DNA, 20 bp, synthetic construct
  source 1..20: mol_type = other DNA
ggcgctggccgcggtgctgc

SEQ ID NO: 13010 - DNA, 20 bp, synthetic construct
  source 1..20: mol_type = other DNA
gctacttatggaagatacaa

SEQ ID NO: 13011 - DNA, 20 bp, synthetic construct
  source 1..20: mol_type = other DNA
gaggacctctctcacggaga

SEQ ID NO: 13012 - DNA, 20 bp, synthetic construct
  source 1..20: mol_type = other DNA
gcctcctctcagaaggaaga

SEQ ID NO: 13013 - DNA, 20 bp, synthetic construct
  source 1..20: mol_type = other DNA
accacagcaagcagaggctg

SEQ ID NO: 13014 - DNA, 20 bp, synthetic construct
  source 1..20: mol_type = other DNA
ccacagcaagcagaggctgg

SEQ ID NO: 13015 - DNA, 20 bp, synthetic construct
  source 1..20: mol_type = other DNA
ctacttatggaagatacaaa

SEQ ID NO: 13016 - DNA, 20 bp, synthetic construct
  source 1..20: mol_type = other DNA
cccaccctcttccttctgag

SEQ ID NO: 13017 - DNA, 20 bp, synthetic construct
  source 1..20: mol_type = other DNA
gggaaagacgaggaaagagg

SEQ ID NO: 13018 - DNA, 20 bp, synthetic construct
  source 1..20: mol_type = other DNA
accctcttccttctgagagg

SEQ ID NO: 13019 - DNA, 20 bp, synthetic construct
  source 1..20: mol_type = other DNA
ggggggaaagacgaggaaag

SEQ ID NO: 13020 - DNA, 20 bp, synthetic construct
  source 1..20: mol_type = other DNA
agcaagtacttgaaagctgg

SEQ ID NO: 13021 - DNA, 20 bp, synthetic construct
  source 1..20: mol_type = other DNA
ggctgggggggggaaagacg

SEQ ID NO: 13022 - DNA, 20 bp, synthetic construct
  source 1..20: mol_type = other DNA
gaccacagcaagcagaggct

SEQ ID NO: 13023 - DNA, 20 bp, synthetic construct
  source 1..20: mol_type = other DNA
acagcaagcagaggctgggg

SEQ ID NO: 13024 - DNA, 20 bp, synthetic construct
  source 1..20: mol_type = other DNA
ggaccacagcaagcagaggc

SEQ ID NO: 13025 - DNA, 20 bp, synthetic construct
  source 1..20: mol_type = other DNA
agaacgagagcgagtccgtg

SEQ ID NO: 13026 - DNA, 20 bp, synthetic construct
  source 1..20: mol_type = other DNA
gaacgagagcgagtccgtga

SEQ ID NO: 13027 - DNA, 20 bp, synthetic construct
  source 1..20: mol_type = other DNA
cacgcgccacatcaaggcag

SEQ ID NO: 13028 - DNA, 20 bp, synthetic construct
  source 1..20: mol_type = other DNA
gccccctactcgcgctgcta

SEQ ID NO: 13029 - DNA, 20 bp, synthetic construct
  source 1..20: mol_type = other DNA
cgccacatcaaggcagcggg

SEQ ID NO: 13030 - DNA, 20 bp, synthetic construct
  source 1..20: mol_type = other DNA
cctccgcacgcgccacatca

SEQ ID NO: 13031 - DNA, 20 bp, synthetic construct
  source 1..20: mol_type = other DNA
ctgcctcgcgcagctcgcgg

SEQ ID NO: 13032 - DNA, 20 bp, synthetic construct
  source 1..20: mol_type = other DNA
gttctgcctcgcgcagctcg

SEQ ID NO: 13033 - DNA, 20 bp, synthetic construct
  source 1..20: mol_type = other DNA
gagagcgagtccgtgagggt

SEQ ID NO: 13034 - DNA, 20 bp, synthetic construct
  source 1..20: mol_type = other DNA
tgaggcccgagccaagatgg

SEQ ID NO: 13035 - DNA, 20 bp, synthetic construct
  source 1..20: mol_type = other DNA
gtctgaggcccgagccaaga

SEQ ID NO: 13036 - DNA, 20 bp, synthetic construct
  source 1..20: mol_type = other DNA
ccgccgccgcgagctgcgcg

SEQ ID NO: 13037 - DNA, 20 bp, synthetic construct
  source 1..20: mol_type = other DNA
gagaagcggggcggagtctg

SEQ ID NO: 13038 - DNA, 20 bp, synthetic construct
  source 1..20: mol_type = other DNA
ttccccacccagagcctccc

SEQ ID NO: 13039 - DNA, 20 bp, synthetic construct
  source 1..20: mol_type = other DNA
gcggcggccggggaggctct

SEQ ID NO: 13040 - DNA, 20 bp, synthetic construct
  source 1..20: mol_type = other DNA
ggaggctggcatgactgggt

SEQ ID NO: 13041 - DNA, 20 bp, synthetic construct
  source 1..20: mol_type = other DNA
tggggtggtggtctgaccca

SEQ ID NO: 13042 - DNA, 20 bp, synthetic construct
  source 1..20: mol_type = other DNA
tggctgctgcatgggaaggg

SEQ ID NO: 13043 - DNA, 20 bp, synthetic construct
  source 1..20: mol_type = other DNA
caggagatggctgaccaaag

SEQ ID NO: 13044 - DNA, 20 bp, synthetic construct
  source 1..20: mol_type = other DNA
ggccagacggcaggcgacct

SEQ ID NO: 13045 - DNA, 20 bp, synthetic construct
  source 1..20: mol_type = other DNA
gtcgcctgccgtctggccca

SEQ ID NO: 13046 - DNA, 20 bp, synthetic construct
  source 1..20: mol_type = other DNA
gattcggctggctgctgcat

SEQ ID NO: 13047 - DNA, 20 bp, synthetic construct
  source 1..20: mol_type = other DNA
tggcgtgagtttgaagccag

SEQ ID NO: 13048 - DNA, 20 bp, synthetic construct
  source 1..20: mol_type = other DNA
gatggctgaccaaagaggct

SEQ ID NO: 13049 - DNA, 20 bp, synthetic construct
  source 1..20: mol_type = other DNA
ctgccgtctggcccatggcg

SEQ ID NO: 13050 - DNA, 20 bp, synthetic construct
  source 1..20: mol_type = other DNA
cttcaaactcacgccagcca

SEQ ID NO: 13051 - DNA, 20 bp, synthetic construct
  source 1..20: mol_type = other DNA
cccgccatgggccagacggc

SEQ ID NO: 13052 - DNA, 20 bp, synthetic construct
  source 1..20: mol_type = other DNA
tcaaccaagccccccacccc

SEQ ID NO: 13053 - DNA, 20 bp, synthetic construct
  source 1..20: mol_type = other DNA
gcctgccgtctggcccatgg

SEQ ID NO: 13054 - DNA, 20 bp, synthetic construct
  source 1..20: mol_type = other DNA
agtttgaagccaggggtggg

SEQ ID NO: 13055 - DNA, 20 bp, synthetic construct
  source 1..20: mol_type = other DNA
agacagcagggaaaaccccg

SEQ ID NO: 13056 - DNA, 20 bp, synthetic construct
  source 1..20: mol_type = other DNA
aagacagcagggaaaacccc

SEQ ID NO: 13057 - DNA, 20 bp, synthetic construct
  source 1..20: mol_type = other DNA
gtgccccgcaaagagagaca

SEQ ID NO: 13058 - DNA, 20 bp, synthetic construct
  source 1..20: mol_type = other DNA
gaaggtggagctcagagaag

SEQ ID NO: 13059 - DNA, 20 bp, synthetic construct
  source 1..20: mol_type = other DNA
caaccggttcagactggccg

SEQ ID NO: 13060 - DNA, 20 bp, synthetic construct
  source 1..20: mol_type = other DNA
acaaccggttcagactggcc

SEQ ID NO: 13061 - DNA, 20 bp, synthetic construct
  source 1..20: mol_type = other DNA
cagcagggaaaaccccgggg

SEQ ID NO: 13062 - DNA, 20 bp, synthetic construct
  source 1..20: mol_type = other DNA
cagtcacaaccggttcagac

SEQ ID NO: 13063 - DNA, 20 bp, synthetic construct
  source 1..20: mol_type = other DNA
ggaggagaaggcgaaagaga

SEQ ID NO: 13064 - DNA, 20 bp, synthetic construct
  source 1..20: mol_type = other DNA
ggagaaggcgaaagagaagg

SEQ ID NO: 13065 - DNA, 20 bp, synthetic construct
  source 1..20: mol_type = other DNA
tgccccgcaaagagagacaa

SEQ ID NO: 13066 - DNA, 20 bp, synthetic construct
  source 1..20: mol_type = other DNA
ctttcgccttctcctccccg

SEQ ID NO: 13067 - DNA, 20 bp, synthetic construct
  source 1..20: mol_type = other DNA
aaggtggagctcagagaagg

SEQ ID NO: 13068 - DNA, 20 bp, synthetic construct
  source 1..20: mol_type = other DNA
gagaaggtggagctcagaga

SEQ ID NO: 13069 - DNA, 20 bp, synthetic construct
  source 1..20: mol_type = other DNA
aaagacagcagggaaaaccc

SEQ ID NO: 13070 - DNA, 20 bp, synthetic construct
  source 1..20: mol_type = other DNA
aatcccccaaatcaaagatg

SEQ ID NO: 13071 - DNA, 20 bp, synthetic construct
  source 1..20: mol_type = other DNA
aatctctgattagaaaggga

SEQ ID NO: 13072 - DNA, 20 bp, synthetic construct
  source 1..20: mol_type = other DNA
aatctaggccaaaatctctg

SEQ ID NO: 13073 - DNA, 20 bp, synthetic construct
  source 1..20: mol_type = other DNA
caagctcaagttaatggatc

SEQ ID NO: 13074 - DNA, 20 bp, synthetic construct
  source 1..20: mol_type = other DNA
tagcagcatgctgttgtcta

SEQ ID NO: 13075 - DNA, 20 bp, synthetic construct
  source 1..20: mol_type = other DNA
atgaccacatctttgatttg

SEQ ID NO: 13076 - DNA, 20 bp, synthetic construct
  source 1..20: mol_type = other DNA
tgatgaccacatctttgatt

SEQ ID NO: 13077 - DNA, 20 bp, synthetic construct
  source 1..20: mol_type = other DNA
aatttactgtataaaaatga

SEQ ID NO: 13078 - DNA, 20 bp, synthetic construct
  source 1..20: mol_type = other DNA
ttattcttggaattaggaga

SEQ ID NO: 13079 - DNA, 20 bp, synthetic construct
  source 1..20: mol_type = other DNA
gatgaccacatctttgattt

SEQ ID NO: 13080 - DNA, 20 bp, synthetic construct
  source 1..20: mol_type = other DNA
tgttgtctatggcttattct

SEQ ID NO: 13081 - DNA, 20 bp, synthetic construct
  source 1..20: mol_type = other DNA
tatggcttattcttggaatt

SEQ ID NO: 13082 - DNA, 20 bp, synthetic construct
  source 1..20: mol_type = other DNA
agaaaatctctgattagaaa

SEQ ID NO: 13083 - DNA, 20 bp, synthetic construct
  source 1..20: mol_type = other DNA
tgaccacatctttgatttgg

SEQ ID NO: 13084 - DNA, 20 bp, synthetic construct
  source 1..20: mol_type = other DNA
aagaaaatctctgattagaa

SEQ ID NO: 13085 - DNA, 20 bp, synthetic construct
  source 1..20: mol_type = other DNA
ggcgaggccagccgagaaag

SEQ ID NO: 13086 - DNA, 20 bp, synthetic construct
  source 1..20: mol_type = other DNA
gcggctcgcccccaagcagg

SEQ ID NO: 13087 - DNA, 20 bp, synthetic construct
  source 1..20: mol_type = other DNA
gtgcgcaggcgcgaggtcgg

SEQ ID NO: 13088 - DNA, 20 bp, synthetic construct
  source 1..20: mol_type = other DNA
cggctcgcccccaagcagga

SEQ ID NO: 13089 - DNA, 20 bp, synthetic construct
  source 1..20: mol_type = other DNA
gccccctccctcctgcttgg

SEQ ID NO: 13090 - DNA, 20 bp, synthetic construct
  source 1..20: mol_type = other DNA
tcgcccccaagcaggaggga

SEQ ID NO: 13091 - DNA, 20 bp, synthetic construct
  source 1..20: mol_type = other DNA
ccggcgaggccagccgagaa

SEQ ID NO: 13092 - DNA, 20 bp, synthetic construct
  source 1..20: mol_type = other DNA
cggtggcgagagcgcgcgag

SEQ ID NO: 13093 - DNA, 20 bp, synthetic construct
  source 1..20: mol_type = other DNA
cggctctgcggcgtgtgcgc

SEQ ID NO: 13094 - DNA, 20 bp, synthetic construct
  source 1..20: mol_type = other DNA
ctggcgcggagccggctctg

SEQ ID NO: 13095 - DNA, 20 bp, synthetic construct
  source 1..20: mol_type = other DNA
gcggtggcgagagcgcgcga

SEQ ID NO: 13096 - DNA, 20 bp, synthetic construct
  source 1..20: mol_type = other DNA
gccagccgagaaaggggaga

SEQ ID NO: 13097 - DNA, 20 bp, synthetic construct
  source 1..20: mol_type = other DNA
ggtggcgagagcgcgcgagg

SEQ ID NO: 13098 - DNA, 20 bp, synthetic construct
  source 1..20: mol_type = other DNA
gcggcgtgtgcgcaggcgcg

SEQ ID NO: 13099 - DNA, 20 bp, synthetic construct
  source 1..20: mol_type = other DNA
cgtgtgcgcaggcgcgaggt

SEQ ID NO: 13100 - DNA, 20 bp, synthetic construct
  source 1..20: mol_type = other DNA
ggcagcggaggagctcaaca

SEQ ID NO: 13101 - DNA, 20 bp, synthetic construct
  source 1..20: mol_type = other DNA
cgggccagggtgcagaaagg

SEQ ID NO: 13102 - DNA, 20 bp, synthetic construct
  source 1..20: mol_type = other DNA
gcacggcgggaggctgtcgt

SEQ ID NO: 13103 - DNA, 20 bp, synthetic construct
  source 1..20: mol_type = other DNA
tgaggtcaagtagtagcgtt

SEQ ID NO: 13104 - DNA, 20 bp, synthetic construct
  source 1..20: mol_type = other DNA
ggaggtcagagaaggatgcg

SEQ ID NO: 13105 - DNA, 20 bp, synthetic construct
  source 1..20: mol_type = other DNA
ttgaggtcaagtagtagcgt

SEQ ID NO: 13106 - DNA, 20 bp, synthetic construct
  source 1..20: mol_type = other DNA
aggacacggcatcgtctgct

SEQ ID NO: 13107 - DNA, 20 bp, synthetic construct
  source 1..20: mol_type = other DNA
gagctcaacatggtaaggcc

SEQ ID NO: 13108 - DNA, 20 bp, synthetic construct
  source 1..20: mol_type = other DNA
caagtagtagcgttgggctg

SEQ ID NO: 13109 - DNA, 20 bp, synthetic construct
  source 1..20: mol_type = other DNA
ggcgtgcgcagctgcagcgg

SEQ ID NO: 13110 - DNA, 20 bp, synthetic construct
  source 1..20: mol_type = other DNA
cacggcgggaggctgtcgtt

SEQ ID NO: 13111 - DNA, 20 bp, synthetic construct
  source 1..20: mol_type = other DNA
gcgttgggctgcggcagcgg

SEQ ID NO: 13112 - DNA, 20 bp, synthetic construct
  source 1..20: mol_type = other DNA
ttgggcgtgcgcagctgcag

SEQ ID NO: 13113 - DNA, 20 bp, synthetic construct
  source 1..20: mol_type = other DNA
tctgcggggtgggagtgacc

SEQ ID NO: 13114 - DNA, 20 bp, synthetic construct
  source 1..20: mol_type = other DNA
gtagcgttgggctgcggcag

SEQ ID NO: 13115 - DNA, 20 bp, synthetic construct
  source 1..20: mol_type = other DNA
tcaagctggttccaacgctg

SEQ ID NO: 13116 - DNA, 20 bp, synthetic construct
  source 1..20: mol_type = other DNA
ggccgcccgggaagtcaaca

SEQ ID NO: 13117 - DNA, 20 bp, synthetic construct
  source 1..20: mol_type = other DNA
gccatccccgacgcggccaa

SEQ ID NO: 13118 - DNA, 20 bp, synthetic construct
  source 1..20: mol_type = other DNA
atccccgacgcggccaacgg

SEQ ID NO: 13119 - DNA, 20 bp, synthetic construct
  source 1..20: mol_type = other DNA
tccccgacgcggccaacgga

SEQ ID NO: 13120 - DNA, 20 bp, synthetic construct
  source 1..20: mol_type = other DNA
ggggtctgcccggaattggg

SEQ ID NO: 13121 - DNA, 20 bp, synthetic construct
  source 1..20: mol_type = other DNA
aggctgtggggcctcagcgt

SEQ ID NO: 13122 - DNA, 20 bp, synthetic construct
  source 1..20: mol_type = other DNA
gcccggaattgggaggctgt

SEQ ID NO: 13123 - DNA, 20 bp, synthetic construct
  source 1..20: mol_type = other DNA
cccggaattgggaggctgtg

SEQ ID NO: 13124 - DNA, 20 bp, synthetic construct
  source 1..20: mol_type = other DNA
ctgacgtgttacgtcacagt

SEQ ID NO: 13125 - DNA, 20 bp, synthetic construct
  source 1..20: mol_type = other DNA
tctgacgtgttacgtcacag

SEQ ID NO: 13126 - DNA, 20 bp, synthetic construct
  source 1..20: mol_type = other DNA
gcggcccgatttcaaaacag

SEQ ID NO: 13127 - DNA, 20 bp, synthetic construct
  source 1..20: mol_type = other DNA
gtcacagtgggcggaagtcg

SEQ ID NO: 13128 - DNA, 20 bp, synthetic construct
  source 1..20: mol_type = other DNA
ccagcttgagagaccccccg

SEQ ID NO: 13129 - DNA, 20 bp, synthetic construct
  source 1..20: mol_type = other DNA
acgtgttacgtcacagtggg

SEQ ID NO: 13130 - DNA, 20 bp, synthetic construct
  source 1..20: mol_type = other DNA
tggcggcggctgacaagagg

SEQ ID NO: 13131 - DNA, 20 bp, synthetic construct
  source 1..20: mol_type = other DNA
gagtacactaaggcccacgg

SEQ ID NO: 13132 - DNA, 20 bp, synthetic construct
  source 1..20: mol_type = other DNA
ggcagcgcgcaacatcgcag

SEQ ID NO: 13133 - DNA, 20 bp, synthetic construct
  source 1..20: mol_type = other DNA
gggtggcggcggctgacaag

SEQ ID NO: 13134 - DNA, 20 bp, synthetic construct
  source 1..20: mol_type = other DNA
gcggaccgagagcagagcta

SEQ ID NO: 13135 - DNA, 20 bp, synthetic construct
  source 1..20: mol_type = other DNA
gcaacatcgcagcgggctag

SEQ ID NO: 13136 - DNA, 20 bp, synthetic construct
  source 1..20: mol_type = other DNA
gcgggctagcggacagcgag

SEQ ID NO: 13137 - DNA, 20 bp, synthetic construct
  source 1..20: mol_type = other DNA
agcggaccgagagcagagct

SEQ ID NO: 13138 - DNA, 20 bp, synthetic construct
  source 1..20: mol_type = other DNA
cggcggctgacaagaggcgg

SEQ ID NO: 13139 - DNA, 20 bp, synthetic construct
  source 1..20: mol_type = other DNA
agagcagagctagggtctca

SEQ ID NO: 13140 - DNA, 20 bp, synthetic construct
  source 1..20: mol_type = other DNA
caggcggggcccgaagcggg

SEQ ID NO: 13141 - DNA, 20 bp, synthetic construct
  source 1..20: mol_type = other DNA
aagaggcggcggcccaggcg

SEQ ID NO: 13142 - DNA, 20 bp, synthetic construct
  source 1..20: mol_type = other DNA
acaagaggcggcggcccagg

SEQ ID NO: 13143 - DNA, 20 bp, synthetic construct
  source 1..20: mol_type = other DNA
tgagaccctagctctgctct

SEQ ID NO: 13144 - DNA, 20 bp, synthetic construct
  source 1..20: mol_type = other DNA
gcagcgcgcaacatcgcagc

SEQ ID NO: 13145 - DNA, 20 bp, synthetic construct
  source 1..20: mol_type = other DNA
tatgatggcttctaaaacct

SEQ ID NO: 13146 - DNA, 20 bp, synthetic construct
  source 1..20: mol_type = other DNA
gaacaaatgagtgcaagccc

SEQ ID NO: 13147 - DNA, 20 bp, synthetic construct
  source 1..20: mol_type = other DNA
tggtggtgcctgctgtccca

SEQ ID NO: 13148 - DNA, 20 bp, synthetic construct
  source 1..20: mol_type = other DNA
gttcagaggtcatgggcacc

SEQ ID NO: 13149 - DNA, 20 bp, synthetic construct
  source 1..20: mol_type = other DNA
tttccccagacactgagagc

SEQ ID NO: 13150 - DNA, 20 bp, synthetic construct
  source 1..20: mol_type = other DNA
accaccagctctcagtgtct

SEQ ID NO: 13151 - DNA, 20 bp, synthetic construct
  source 1..20: mol_type = other DNA
tcagttgtgtgctgctatga

SEQ ID NO: 13152 - DNA, 20 bp, synthetic construct
  source 1..20: mol_type = other DNA
gaagtttctagaaaagtgcc

SEQ ID NO: 13153 - DNA, 20 bp, synthetic construct
  source 1..20: mol_type = other DNA
ccccagacactgagagctgg

SEQ ID NO: 13154 - DNA, 20 bp, synthetic construct
  source 1..20: mol_type = other DNA
ccaccagctctcagtgtctg

SEQ ID NO: 13155 - DNA, 20 bp, synthetic construct
  source 1..20: mol_type = other DNA
tcagtgtctggggaaagagc

SEQ ID NO: 13156 - DNA, 20 bp, synthetic construct
  source 1..20: mol_type = other DNA
caaagcctgcccctcatccc

SEQ ID NO: 13157 - DNA, 20 bp, synthetic construct
  source 1..20: mol_type = other DNA
tgctctctgcctgggatgag

SEQ ID NO: 13158 - DNA, 20 bp, synthetic construct
  source 1..20: mol_type = other DNA
gttgctctctgcctgggatg

SEQ ID NO: 13159 - DNA, 20 bp, synthetic construct
  source 1..20: mol_type = other DNA
ctggtggtgcctgctgtccc

SEQ ID NO: 13160 - DNA, 20 bp, synthetic construct
  source 1..20: mol_type = other DNA
ggagggagtgtctccagtgg

SEQ ID NO: 13161 - DNA, 20 bp, synthetic construct
  source 1..20: mol_type = other DNA
aagccgccattgttccgccg

SEQ ID NO: 13162 - DNA, 20 bp, synthetic construct
  source 1..20: mol_type = other DNA
agccgccattgttccgccga

SEQ ID NO: 13163 - DNA, 20 bp, synthetic construct
  source 1..20: mol_type = other DNA
gcgggagggagtgtctccag

SEQ ID NO: 13164 - DNA, 20 bp, synthetic construct
  source 1..20: mol_type = other DNA
gccccgctgtcctccctcgg

SEQ ID NO: 13165 - DNA, 20 bp, synthetic construct
  source 1..20: mol_type = other DNA
gtcctccctcggcggaacaa

SEQ ID NO: 13166 - DNA, 20 bp, synthetic construct
  source 1..20: mol_type = other DNA
ctccctcggcggaacaatgg

SEQ ID NO: 13167 - DNA, 20 bp, synthetic construct
  source 1..20: mol_type = other DNA
ccgccgccaggagacccggg

SEQ ID NO: 13168 - DNA, 20 bp, synthetic construct
  source 1..20: mol_type = other DNA
tccgccgagggaggacagcg

SEQ ID NO: 13169 - DNA, 20 bp, synthetic construct
  source 1..20: mol_type = other DNA
ctccagtggcggccgctaag

SEQ ID NO: 13170 - DNA, 20 bp, synthetic construct
  source 1..20: mol_type = other DNA
gttccgccgagggaggacag

SEQ ID NO: 13171 - DNA, 20 bp, synthetic construct
  source 1..20: mol_type = other DNA
aggacagcggggcctggcgc

SEQ ID NO: 13172 - DNA, 20 bp, synthetic construct
  source 1..20: mol_type = other DNA
gacactccctcccgcctccc

SEQ ID NO: 13173 - DNA, 20 bp, synthetic construct
  source 1..20: mol_type = other DNA
aggagacccgggaggcggga

SEQ ID NO: 13174 - DNA, 20 bp, synthetic construct
  source 1..20: mol_type = other DNA
caggagacccgggaggcggg

SEQ ID NO: 13175 - DNA, 20 bp, synthetic construct
  source 1..20: mol_type = other DNA
ccaggcgtcagggagaacaa

SEQ ID NO: 13176 - DNA, 20 bp, synthetic construct
  source 1..20: mol_type = other DNA
ctcggccgacagcccgtacg

SEQ ID NO: 13177 - DNA, 20 bp, synthetic construct
  source 1..20: mol_type = other DNA
tcggccgacagcccgtacga

SEQ ID NO: 13178 - DNA, 20 bp, synthetic construct
  source 1..20: mol_type = other DNA
gggacggggccgcacaggac

SEQ ID NO: 13179 - DNA, 20 bp, synthetic construct
  source 1..20: mol_type = other DNA
cggccgacagcccgtacgag

SEQ ID NO: 13180 - DNA, 20 bp, synthetic construct
  source 1..20: mol_type = other DNA
tcaacaagggcccctcgtac

SEQ ID NO: 13181 - DNA, 20 bp, synthetic construct
  source 1..20: mol_type = other DNA
tggagctcatggctggcggg

SEQ ID NO: 13182 - DNA, 20 bp, synthetic construct
  source 1..20: mol_type = other DNA
ggggccgcacaggacgggac

SEQ ID NO: 13183 - DNA, 20 bp, synthetic construct
  source 1..20: mol_type = other DNA
ccgtcccgtcccgtcctgtg

SEQ ID NO: 13184 - DNA, 20 bp, synthetic construct
  source 1..20: mol_type = other DNA
acgggacgggacgggaccgc

SEQ ID NO: 13185 - DNA, 20 bp, synthetic construct
  source 1..20: mol_type = other DNA
ggggcccttgttgaactgcg

SEQ ID NO: 13186 - DNA, 20 bp, synthetic construct
  source 1..20: mol_type = other DNA
tgcgtggagctcatggctgg

SEQ ID NO: 13187 - DNA, 20 bp, synthetic construct
  source 1..20: mol_type = other DNA
gctcatggctggcgggcggg

SEQ ID NO: 13188 - DNA, 20 bp, synthetic construct
  source 1..20: mol_type = other DNA
aactgcgtggagctcatggc

SEQ ID NO: 13189 - DNA, 20 bp, synthetic construct
  source 1..20: mol_type = other DNA
gttgaactgcgtggagctca

SEQ ID NO: 13190 - DNA, 20 bp, synthetic construct
  source 1..20: mol_type = other DNA
gctgtgactgtcggctgtcg

SEQ ID NO: 13191 - DNA, 20 bp, synthetic construct
  source 1..20: mol_type = other DNA
gggagcacagagactgactg

SEQ ID NO: 13192 - DNA, 20 bp, synthetic construct
  source 1..20: mol_type = other DNA
agcccagctcctctccacag

SEQ ID NO: 13193 - DNA, 20 bp, synthetic construct
  source 1..20: mol_type = other DNA
ctgactggggtctcttgggt

SEQ ID NO: 13194 - DNA, 20 bp, synthetic construct
  source 1..20: mol_type = other DNA
gtcagagctgctgtgactgt

SEQ ID NO: 13195 - DNA, 20 bp, synthetic construct
  source 1..20: mol_type = other DNA
ggctcctgatcacaggtgag

SEQ ID NO: 13196 - DNA, 20 bp, synthetic construct
  source 1..20: mol_type = other DNA
gaggactctctgggagtggt

SEQ ID NO: 13197 - DNA, 20 bp, synthetic construct
  source 1..20: mol_type = other DNA
cctgcttgtcctctgtggag

SEQ ID NO: 13198 - DNA, 20 bp, synthetic construct
  source 1..20: mol_type = other DNA
ggaggactctctgggagtgg

SEQ ID NO: 13199 - DNA, 20 bp, synthetic construct
  source 1..20: mol_type = other DNA
ggggctcctgatcacaggtg

SEQ ID NO: 13200 - DNA, 20 bp, synthetic construct
  source 1..20: mol_type = other DNA
gggctcctgatcacaggtga

SEQ ID NO: 13201 - DNA, 20 bp, synthetic construct
  source 1..20: mol_type = other DNA
tcctgatcacaggtgagggg

SEQ ID NO: 13202 - DNA, 20 bp, synthetic construct
  source 1..20: mol_type = other DNA
ggctcagcacagaaggagga

SEQ ID NO: 13203 - DNA, 20 bp, synthetic construct
  source 1..20: mol_type = other DNA
cctctccacagaggacaagc

SEQ ID NO: 13204 - DNA, 20 bp, synthetic construct
  source 1..20: mol_type = other DNA
gtcctctgtggagaggagct

SEQ ID NO: 13205 - DNA, 20 bp, synthetic construct
  source 1..20: mol_type = other DNA
acagacatcagtatcagtcc

SEQ ID NO: 13206 - DNA, 20 bp, synthetic construct
  source 1..20: mol_type = other DNA
caacctcccagcctgagtgg

SEQ ID NO: 13207 - DNA, 20 bp, synthetic construct
  source 1..20: mol_type = other DNA
tatcagtccaggtaagtgca

SEQ ID NO: 13208 - DNA, 20 bp, synthetic construct
  source 1..20: mol_type = other DNA
ggtccaggattgctctccta

SEQ ID NO: 13209 - DNA, 20 bp, synthetic construct
  source 1..20: mol_type = other DNA
ccaggtaagtgcagggacca

SEQ ID NO: 13210 - DNA, 20 bp, synthetic construct
  source 1..20: mol_type = other DNA
tgaccctaggagagcaatcc

SEQ ID NO: 13211 - DNA, 20 bp, synthetic construct
  source 1..20: mol_type = other DNA
aaagcctctctcctccactc

SEQ ID NO: 13212 - DNA, 20 bp, synthetic construct
  source 1..20: mol_type = other DNA
aagcaacctcccagcctgag

SEQ ID NO: 13213 - DNA, 20 bp, synthetic construct
  source 1..20: mol_type = other DNA
gtatcagtccaggtaagtgc

SEQ ID NO: 13214 - DNA, 20 bp, synthetic construct
  source 1..20: mol_type = other DNA
attgctctcctagggtcaga

SEQ ID NO: 13215 - DNA, 20 bp, synthetic construct
  source 1..20: mol_type = other DNA
ccagcctgagtggaggagag

SEQ ID NO: 13216 - DNA, 20 bp, synthetic construct
  source 1..20: mol_type = other DNA
agatggagcctggcaggagc

SEQ ID NO: 13217 - DNA, 20 bp, synthetic construct
  source 1..20: mol_type = other DNA
gccaggctccatctgaccct

SEQ ID NO: 13218 - DNA, 20 bp, synthetic construct
  source 1..20: mol_type = other DNA
gatggagcctggcaggagct

SEQ ID NO: 13219 - DNA, 20 bp, synthetic construct
  source 1..20: mol_type = other DNA
agtctgtcccagctcctgcc

SEQ ID NO: 13220 - DNA, 20 bp, synthetic construct
  source 1..20: mol_type = other DNA
cttgaaactgacgtaatgcg

SEQ ID NO: 13221 - DNA, 20 bp, synthetic construct
  source 1..20: mol_type = other DNA
aaatagagcaaggatgtgcc

SEQ ID NO: 13222 - DNA, 20 bp, synthetic construct
  source 1..20: mol_type = other DNA
gacgtaatgcgcggagactg

SEQ ID NO: 13223 - DNA, 20 bp, synthetic construct
  source 1..20: mol_type = other DNA
ggatgtgcccggtgccgggt

SEQ ID NO: 13224 - DNA, 20 bp, synthetic construct
  source 1..20: mol_type = other DNA
aaccagcagcaccaaaaaag

SEQ ID NO: 13225 - DNA, 20 bp, synthetic construct
  source 1..20: mol_type = other DNA
ctagagattgcagtaagatc

SEQ ID NO: 13226 - DNA, 20 bp, synthetic construct
  source 1..20: mol_type = other DNA
tcccctctcccacccggcac

SEQ ID NO: 13227 - DNA, 20 bp, synthetic construct
  source 1..20: mol_type = other DNA
gcccggtgccgggtgggaga

SEQ ID NO: 13228 - DNA, 20 bp, synthetic construct
  source 1..20: mol_type = other DNA
aggatgtgcccggtgccggg

SEQ ID NO: 13229 - DNA, 20 bp, synthetic construct
  source 1..20: mol_type = other DNA
gctagagattgcagtaagat

SEQ ID NO: 13230 - DNA, 20 bp, synthetic construct
  source 1..20: mol_type = other DNA
cccctctcccacccggcacc

SEQ ID NO: 13231 - DNA, 20 bp, synthetic construct
  source 1..20: mol_type = other DNA
accccctcccctctcccacc

SEQ ID NO: 13232 - DNA, 20 bp, synthetic construct
  source 1..20: mol_type = other DNA
cagaaatgttatcgcttgtc

SEQ ID NO: 13233 - DNA, 20 bp, synthetic construct
  source 1..20: mol_type = other DNA
aagagaaaggaaatagagca

SEQ ID NO: 13234 - DNA, 20 bp, synthetic construct
  source 1..20: mol_type = other DNA
cccggtgccgggtgggagag

SEQ ID NO: 13235 - DNA, 20 bp, synthetic construct
  source 1..20: mol_type = other DNA
gagggaggtatttagtgcta

SEQ ID NO: 13236 - DNA, 20 bp, synthetic construct
  source 1..20: mol_type = other DNA
ggcttcttgtggtttcgcga

SEQ ID NO: 13237 - DNA, 20 bp, synthetic construct
  source 1..20: mol_type = other DNA
ggctcctgggatcgcgactc

SEQ ID NO: 13238 - DNA, 20 bp, synthetic construct
  source 1..20: mol_type = other DNA
tgggatcgcgactccggagt

SEQ ID NO: 13239 - DNA, 20 bp, synthetic construct
  source 1..20: mol_type = other DNA
cacaagaagccccaccccca

SEQ ID NO: 13240 - DNA, 20 bp, synthetic construct
  source 1..20: mol_type = other DNA
gcttcttgtggtttcgcgag

SEQ ID NO: 13241 - DNA, 20 bp, synthetic construct
  source 1..20: mol_type = other DNA
gccccttccttgcccgcacc

SEQ ID NO: 13242 - DNA, 20 bp, synthetic construct
  source 1..20: mol_type = other DNA
ggagccactggacctggtgc

SEQ ID NO: 13243 - DNA, 20 bp, synthetic construct
  source 1..20: mol_type = other DNA
tatttagtgctatggccctg

SEQ ID NO: 13244 - DNA, 20 bp, synthetic construct
  source 1..20: mol_type = other DNA
cttgcccgcaccaggtccag

SEQ ID NO: 13245 - DNA, 20 bp, synthetic construct
  source 1..20: mol_type = other DNA
gacctggtgcgggcaaggaa

SEQ ID NO: 13246 - DNA, 20 bp, synthetic construct
  source 1..20: mol_type = other DNA
acctggtgcgggcaaggaag

SEQ ID NO: 13247 - DNA, 20 bp, synthetic construct
  source 1..20: mol_type = other DNA
ggcggggcttgggcacaaga

SEQ ID NO: 13248 - DNA, 20 bp, synthetic construct
  source 1..20: mol_type = other DNA
gtcgcgatcccaggagccac

SEQ ID NO: 13249 - DNA, 20 bp, synthetic construct
  source 1..20: mol_type = other DNA
cgcgcccagaggcccagagt

SEQ ID NO: 13250 - DNA, 20 bp, synthetic construct
  source 1..20: mol_type = other DNA
gccagtggactgactgacag

SEQ ID NO: 13251 - DNA, 20 bp, synthetic construct
  source 1..20: mol_type = other DNA
ccgagcgacggacacagacg

SEQ ID NO: 13252 - DNA, 20 bp, synthetic construct
  source 1..20: mol_type = other DNA
gccgctgtcagtcagtccac

SEQ ID NO: 13253 - DNA, 20 bp, synthetic construct
  source 1..20: mol_type = other DNA
gcgcctgcgcacctaccatg

SEQ ID NO: 13254 - DNA, 20 bp, synthetic construct
  source 1..20: mol_type = other DNA
cgcacctaccatgcggcccg

SEQ ID NO: 13255 - DNA, 20 bp, synthetic construct
  source 1..20: mol_type = other DNA
ggcttccaccctccgagcga

SEQ ID NO: 13256 - DNA, 20 bp, synthetic construct
  source 1..20: mol_type = other DNA
cgtctgtgtccgtcgctcgg

SEQ ID NO: 13257 - DNA, 20 bp, synthetic construct
  source 1..20: mol_type = other DNA
tgtgtccgtcgctcggaggg

SEQ ID NO: 13258 - DNA, 20 bp, synthetic construct
  source 1..20: mol_type = other DNA
gggccgcatggtaggtgcgc

SEQ ID NO: 13259 - DNA, 20 bp, synthetic construct
  source 1..20: mol_type = other DNA
gacggacacagacgcggcgc

SEQ ID NO: 13260 - DNA, 20 bp, synthetic construct
  source 1..20: mol_type = other DNA
gtctgtgtccgtcgctcgga

SEQ ID NO: 13261 - DNA, 20 bp, synthetic construct
  source 1..20: mol_type = other DNA
cgacggacacagacgcggcg

SEQ ID NO: 13262 - DNA, 20 bp, synthetic construct
  source 1..20: mol_type = other DNA
gggtggaagccggggtctcg

SEQ ID NO: 13263 - DNA, 20 bp, synthetic construct
  source 1..20: mol_type = other DNA
gcccgcggcccgcgagaccc

SEQ ID NO: 13264 - DNA, 20 bp, synthetic construct
  source 1..20: mol_type = other DNA
gccggggtctcgcgggccgc

SEQ ID NO: 13265 - DNA, 20 bp, synthetic construct
  source 1..20: mol_type = other DNA
acagccaagctagaagcctg

SEQ ID NO: 13266 - DNA, 20 bp, synthetic construct
  source 1..20: mol_type = other DNA
tgggaactcggaaaagcggt

SEQ ID NO: 13267 - DNA, 20 bp, synthetic construct
  source 1..20: mol_type = other DNA
gagctcggttcgggaacgca

SEQ ID NO: 13268 - DNA, 20 bp, synthetic construct
  source 1..20: mol_type = other DNA
agggtgggaactcggaaaag

SEQ ID NO: 13269 - DNA, 20 bp, synthetic construct
  source 1..20: mol_type = other DNA
tggctagcgggtgatgaagt

SEQ ID NO: 13270 - DNA, 20 bp, synthetic construct
  source 1..20: mol_type = other DNA
agttcccaccctactcacct

SEQ ID NO: 13271 - DNA, 20 bp, synthetic construct
  source 1..20: mol_type = other DNA
ccctactcacctcggccgcg

SEQ ID NO: 13272 - DNA, 20 bp, synthetic construct
  source 1..20: mol_type = other DNA
gcggccgaggtgagtagggt

SEQ ID NO: 13273 - DNA, 20 bp, synthetic construct
  source 1..20: mol_type = other DNA
agagggtgctggctgccgcg

SEQ ID NO: 13274 - DNA, 20 bp, synthetic construct
  source 1..20: mol_type = other DNA
cgcggccgaggtgagtaggg

SEQ ID NO: 13275 - DNA, 20 bp, synthetic construct
  source 1..20: mol_type = other DNA
gccgcgcggccgaggtgagt

SEQ ID NO: 13276 - DNA, 20 bp, synthetic construct
  source 1..20: mol_type = other DNA
gaagcctgaggagccggaga

SEQ ID NO: 13277 - DNA, 20 bp, synthetic construct
  source 1..20: mol_type = other DNA
aagctagaagcctgaggagc

SEQ ID NO: 13278 - DNA, 20 bp, synthetic construct
  source 1..20: mol_type = other DNA
tgaggagccggagagggtgc

SEQ ID NO: 13279 - DNA, 20 bp, synthetic construct
  source 1..20: mol_type = other DNA
agaagcctgaggagccggag

SEQ ID NO: 13280 - DNA, 20 bp, synthetic construct
  source 1..20: mol_type = other DNA
ggatagagaaggttggcgcg

SEQ ID NO: 13281 - DNA, 20 bp, synthetic construct
  source 1..20: mol_type = other DNA
gagttccgcttcctgaacgg

SEQ ID NO: 13282 - DNA, 20 bp, synthetic construct
  source 1..20: mol_type = other DNA
gaacggcgggtggatagaga

SEQ ID NO: 13283 - DNA, 20 bp, synthetic construct
  source 1..20: mol_type = other DNA
gcgattggcgtgaccggcga

SEQ ID NO: 13284 - DNA, 20 bp, synthetic construct
  source 1..20: mol_type = other DNA
gtggatagagaaggttggcg

SEQ ID NO: 13285 - DNA, 20 bp, synthetic construct
  source 1..20: mol_type = other DNA
agttccgcttcctgaacggc

SEQ ID NO: 13286 - DNA, 20 bp, synthetic construct
  source 1..20: mol_type = other DNA
tggatagagaaggttggcgc

SEQ ID NO: 13287 - DNA, 20 bp, synthetic construct
  source 1..20: mol_type = other DNA
tccgagttccgcttcctgaa

SEQ ID NO: 13288 - DNA, 20 bp, synthetic construct
  source 1..20: mol_type = other DNA
gtccgctcaccggccatcgc

SEQ ID NO: 13289 - DNA, 20 bp, synthetic construct
  source 1..20: mol_type = other DNA
ggtcacgccaatcgcgccgc

SEQ ID NO: 13290 - DNA, 20 bp, synthetic construct
  source 1..20: mol_type = other DNA
gttggcgcggggaagaccgg

SEQ ID NO: 13291 - DNA, 20 bp, synthetic construct
  source 1..20: mol_type = other DNA
cggtcacgccaatcgcgccg

SEQ ID NO: 13292 - DNA, 20 bp, synthetic construct
  source 1..20: mol_type = other DNA
ttggcgcggggaagaccggc

SEQ ID NO: 13293 - DNA, 20 bp, synthetic construct
  source 1..20: mol_type = other DNA
ggcgggtggatagagaaggt

SEQ ID NO: 13294 - DNA, 20 bp, synthetic construct
  source 1..20: mol_type = other DNA
gcccggggcgcgcctcccgc

SEQ ID NO: 13295 - DNA, 20 bp, synthetic construct
  source 1..20: mol_type = other DNA
agtaaggccatgctcgctgg

SEQ ID NO: 13296 - DNA, 20 bp, synthetic construct
  source 1..20: mol_type = other DNA
gagccaccactccgacctag

SEQ ID NO: 13297 - DNA, 20 bp, synthetic construct
  source 1..20: mol_type = other DNA
gtaaggccatgctcgctggt

SEQ ID NO: 13298 - DNA, 20 bp, synthetic construct
  source 1..20: mol_type = other DNA
gccccgcccaccagcgagca

SEQ ID NO: 13299 - DNA, 20 bp, synthetic construct
  source 1..20: mol_type = other DNA
cggccgctaggtcggagtgg

SEQ ID NO: 13300 - DNA, 20 bp, synthetic construct
  source 1..20: mol_type = other DNA
cggcggccgctaggtcggag

SEQ ID NO: 13301 - DNA, 20 bp, synthetic construct
  source 1..20: mol_type = other DNA
ccgagcccagctccccgcgg

SEQ ID NO: 13302 - DNA, 20 bp, synthetic construct
  source 1..20: mol_type = other DNA
ggagctgggctcggccggag

SEQ ID NO: 13303 - DNA, 20 bp, synthetic construct
  source 1..20: mol_type = other DNA
cggaggggtggcggtcgctg

SEQ ID NO: 13304 - DNA, 20 bp, synthetic construct
  source 1..20: mol_type = other DNA
ccgcggcggccgctagcccc

SEQ ID NO: 13305 - DNA, 20 bp, synthetic construct
  source 1..20: mol_type = other DNA
taggtcggagtggtggctcg

SEQ ID NO: 13306 - DNA, 20 bp, synthetic construct
  source 1..20: mol_type = other DNA
ctaggtcggagtggtggctc

SEQ ID NO: 13307 - DNA, 20 bp, synthetic construct
  source 1..20: mol_type = other DNA
ggcggtcgctggggacctgg

SEQ ID NO: 13308 - DNA, 20 bp, synthetic construct
  source 1..20: mol_type = other DNA
gagtggtggctcggggccgg

SEQ ID NO: 13309 - DNA, 20 bp, synthetic construct
  source 1..20: mol_type = other DNA
cggccgagcccagctccccg

SEQ ID NO: 13310 - DNA, 20 bp, synthetic construct
  source 1..20: mol_type = other DNA
cccatgcccctgtcccgcag

SEQ ID NO: 13311 - DNA, 20 bp, synthetic construct
  source 1..20: mol_type = other DNA
acgcgcaactcctcacccgg

SEQ ID NO: 13312 - DNA, 20 bp, synthetic construct
  source 1..20: mol_type = other DNA
cggatcgagggtccgaagga

SEQ ID NO: 13313 - DNA, 20 bp, synthetic construct
  source 1..20: mol_type = other DNA
cttggagccactttcccgag

SEQ ID NO: 13314 - DNA, 20 bp, synthetic construct
  source 1..20: mol_type = other DNA
aggggcatgggcacaagctc

SEQ ID NO: 13315 - DNA, 20 bp, synthetic construct
  source 1..20: mol_type = other DNA
aaggagggctgcgagctggt

SEQ ID NO: 13316 - DNA, 20 bp, synthetic construct
  source 1..20: mol_type = other DNA
ctctcggatcgagggtccga

SEQ ID NO: 13317 - DNA, 20 bp, synthetic construct
  source 1..20: mol_type = other DNA
tcggatcgagggtccgaagg

SEQ ID NO: 13318 - DNA, 20 bp, synthetic construct
  source 1..20: mol_type = other DNA
ctggggcgctctcggatcga

SEQ ID NO: 13319 - DNA, 20 bp, synthetic construct
  source 1..20: mol_type = other DNA
gctggggcgctctcggatcg

SEQ ID NO: 13320 - DNA, 20 bp, synthetic construct
  source 1..20: mol_type = other DNA
catgggcacaagctctggct

SEQ ID NO: 13321 - DNA, 20 bp, synthetic construct
  source 1..20: mol_type = other DNA
tgcccatgcccctgtcccgc

SEQ ID NO: 13322 - DNA, 20 bp, synthetic construct
  source 1..20: mol_type = other DNA
tccgaaggagggctgcgagc

SEQ ID NO: 13323 - DNA, 20 bp, synthetic construct
  source 1..20: mol_type = other DNA
gaaggagggctgcgagctgg

SEQ ID NO: 13324 - DNA, 20 bp, synthetic construct
  source 1..20: mol_type = other DNA
atgggcacaagctctggctg

SEQ ID NO: 13325 - DNA, 20 bp, synthetic construct
  source 1..20: mol_type = other DNA
gcccctacacccgggatcgg

SEQ ID NO: 13326 - DNA, 20 bp, synthetic construct
  source 1..20: mol_type = other DNA
gggagaactggggttccggg

SEQ ID NO: 13327 - DNA, 20 bp, synthetic construct
  source 1..20: mol_type = other DNA
cccctacacccgggatcggg

SEQ ID NO: 13328 - DNA, 20 bp, synthetic construct
  source 1..20: mol_type = other DNA
tgcagagagcggcgtccgcg

SEQ ID NO: 13329 - DNA, 20 bp, synthetic construct
  source 1..20: mol_type = other DNA
ttccgggcgcccctacaccc

SEQ ID NO: 13330 - DNA, 20 bp, synthetic construct
  source 1..20: mol_type = other DNA
gggggcatccgggagaactg

SEQ ID NO: 13331 - DNA, 20 bp, synthetic construct
  source 1..20: mol_type = other DNA
ccccccgatcccgggtgtag

SEQ ID NO: 13332 - DNA, 20 bp, synthetic construct
  source 1..20: mol_type = other DNA
ccgcgccccggcccagcacg

SEQ ID NO: 13333 - DNA, 20 bp, synthetic construct
  source 1..20: mol_type = other DNA
ctcccggccccgccccacgg

SEQ ID NO: 13334 - DNA, 20 bp, synthetic construct
  source 1..20: mol_type = other DNA
cgccggccgcgccaggtgag

SEQ ID NO: 13335 - DNA, 20 bp, synthetic construct
  source 1..20: mol_type = other DNA
gcgccggccgcgccaggtga

SEQ ID NO: 13336 - DNA, 20 bp, synthetic construct
  source 1..20: mol_type = other DNA
gcgccaggtgaggggctgtg

SEQ ID NO: 13337 - DNA, 20 bp, synthetic construct
  source 1..20: mol_type = other DNA
ccacagcccctcacctggcg

SEQ ID NO: 13338 - DNA, 20 bp, synthetic construct
  source 1..20: mol_type = other DNA
tccgggcggcggaggagact

SEQ ID NO: 13339 - DNA, 20 bp, synthetic construct
  source 1..20: mol_type = other DNA
cagccccacagcccctcacc

SEQ ID NO: 13340 - DNA, 20 bp, synthetic construct
  source 1..20: mol_type = other DNA
aaagcgcacgaactccactc

SEQ ID NO: 13341 - DNA, 20 bp, synthetic construct
  source 1..20: mol_type = other DNA
gccaaaggccaggatgaaag

SEQ ID NO: 13342 - DNA, 20 bp, synthetic construct
  source 1..20: mol_type = other DNA
ggggccatggcgagaaatgg

SEQ ID NO: 13343 - DNA, 20 bp, synthetic construct
  source 1..20: mol_type = other DNA
ggaaggtggagccgtaggag

SEQ ID NO: 13344 - DNA, 20 bp, synthetic construct
  source 1..20: mol_type = other DNA
agccgtaggagagggattga

SEQ ID NO: 13345 - DNA, 20 bp, synthetic construct
  source 1..20: mol_type = other DNA
ggccaggatgaaagaggcga

SEQ ID NO: 13346 - DNA, 20 bp, synthetic construct
  source 1..20: mol_type = other DNA
cagggatcaggagcagtgca

SEQ ID NO: 13347 - DNA, 20 bp, synthetic construct
  source 1..20: mol_type = other DNA
agggatcaggagcagtgcag

SEQ ID NO: 13348 - DNA, 20 bp, synthetic construct
  source 1..20: mol_type = other DNA
tgacaggggaagtccaagag

SEQ ID NO: 13349 - DNA, 20 bp, synthetic construct
  source 1..20: mol_type = other DNA
cctggcctttggcaccggag

SEQ ID NO: 13350 - DNA, 20 bp, synthetic construct
  source 1..20: mol_type = other DNA
gggccatggcgagaaatgga

SEQ ID NO: 13351 - DNA, 20 bp, synthetic construct
  source 1..20: mol_type = other DNA
gcagggatcaggagcagtgc

SEQ ID NO: 13352 - DNA, 20 bp, synthetic construct
  source 1..20: mol_type = other DNA
gaactccactccggtgccaa

SEQ ID NO: 13353 - DNA, 20 bp, synthetic construct
  source 1..20: mol_type = other DNA
aggccaggatgaaagaggcg

SEQ ID NO: 13354 - DNA, 20 bp, synthetic construct
  source 1..20: mol_type = other DNA
tgaaagaggcgagggcagca

SEQ ID NO: 13355 - DNA, 20 bp, synthetic construct
  source 1..20: mol_type = other DNA
ccgggcgcggaagttgccgg

SEQ ID NO: 13356 - DNA, 20 bp, synthetic construct
  source 1..20: mol_type = other DNA
acatggctgtaggcccgccc

SEQ ID NO: 13357 - DNA, 20 bp, synthetic construct
  source 1..20: mol_type = other DNA
tggctgtaggcccgcccggg

SEQ ID NO: 13358 - DNA, 20 bp, synthetic construct
  source 1..20: mol_type = other DNA
cagccatgtcccgggacccg

SEQ ID NO: 13359 - DNA, 20 bp, synthetic construct
  source 1..20: mol_type = other DNA
tcctcccagccgcccgaccc

SEQ ID NO: 13360 - DNA, 20 bp, synthetic construct
  source 1..20: mol_type = other DNA
cgggcctacagccatgtccc

SEQ ID NO: 13361 - DNA, 20 bp, synthetic construct
  source 1..20: mol_type = other DNA
gcgggcctacagccatgtcc

SEQ ID NO: 13362 - DNA, 20 bp, synthetic construct
  source 1..20: mol_type = other DNA
cagagcgcggcagctgcgcg

SEQ ID NO: 13363 - DNA, 20 bp, synthetic construct
  source 1..20: mol_type = other DNA
acagccatgtcccgggaccc

SEQ ID NO: 13364 - DNA, 20 bp, synthetic construct
  source 1..20: mol_type = other DNA
tacagccatgtcccgggacc

SEQ ID NO: 13365 - DNA, 20 bp, synthetic construct
  source 1..20: mol_type = other DNA
cctcccagccgcccgacccc

SEQ ID NO: 13366 - DNA, 20 bp, synthetic construct
  source 1..20: mol_type = other DNA
agagcgcggcagctgcgcgc

SEQ ID NO: 13367 - DNA, 20 bp, synthetic construct
  source 1..20: mol_type = other DNA
tcccgggacccggggtcggg

SEQ ID NO: 13368 - DNA, 20 bp, synthetic construct
  source 1..20: mol_type = other DNA
gggtcccgggacatggctgt

SEQ ID NO: 13369 - DNA, 20 bp, synthetic construct
  source 1..20: mol_type = other DNA
ggaagttgccggcggccgcg

SEQ ID NO: 13370 - DNA, 20 bp, synthetic construct
  source 1..20: mol_type = other DNA
tctgagtaggacctaggagt

SEQ ID NO: 13371 - DNA, 20 bp, synthetic construct
  source 1..20: mol_type = other DNA
tcacgatctgatcagagtca

SEQ ID NO: 13372 - DNA, 20 bp, synthetic construct
  source 1..20: mol_type = other DNA
gagctgtctacggagagtga

SEQ ID NO: 13373 - DNA, 20 bp, synthetic construct
  source 1..20: mol_type = other DNA
gtcctactcagactggacac

SEQ ID NO: 13374 - DNA, 20 bp, synthetic construct
  source 1..20: mol_type = other DNA
cagatcgtgagccctatgtc

SEQ ID NO: 13375 - DNA, 20 bp, synthetic construct
  source 1..20: mol_type = other DNA
gtgacaacctggccagacat

SEQ ID NO: 13376 - DNA, 20 bp, synthetic construct
  source 1..20: mol_type = other DNA
cagggaagtctgtgacaacc

SEQ ID NO: 13377 - DNA, 20 bp, synthetic construct
  source 1..20: mol_type = other DNA
tgacaacctggccagacata

SEQ ID NO: 13378 - DNA, 20 bp, synthetic construct
  source 1..20: mol_type = other DNA
ggcctgtgtccagtctgagt

SEQ ID NO: 13379 - DNA, 20 bp, synthetic construct
  source 1..20: mol_type = other DNA
gggctgctggatgggtgagg

SEQ ID NO: 13380 - DNA, 20 bp, synthetic construct
  source 1..20: mol_type = other DNA
tgggtgagggggaattgggt

SEQ ID NO: 13381 - DNA, 20 bp, synthetic construct
  source 1..20: mol_type = other DNA
tgggctgctggatgggtgag

SEQ ID NO: 13382 - DNA, 20 bp, synthetic construct
  source 1..20: mol_type = other DNA
caggacaggcagcagagtct

SEQ ID NO: 13383 - DNA, 20 bp, synthetic construct
  source 1..20: mol_type = other DNA
aggacaggcagcagagtctg

SEQ ID NO: 13384 - DNA, 20 bp, synthetic construct
  source 1..20: mol_type = other DNA
cgtgagccctatgtctggcc

SEQ ID NO: 13385 - DNA, 20 bp, synthetic construct
  source 1..20: mol_type = other DNA
taggcaggcgaggacctgcg

SEQ ID NO: 13386 - DNA, 20 bp, synthetic construct
  source 1..20: mol_type = other DNA
gtcctcactggctccctcgg

SEQ ID NO: 13387 - DNA, 20 bp, synthetic construct
  source 1..20: mol_type = other DNA
gcagcagacagtggcgaact

SEQ ID NO: 13388 - DNA, 20 bp, synthetic construct
  source 1..20: mol_type = other DNA
ccaggcctcccagcatcgtg

SEQ ID NO: 13389 - DNA, 20 bp, synthetic construct
  source 1..20: mol_type = other DNA
ccgcaccgagaaggccaccg

SEQ ID NO: 13390 - DNA, 20 bp, synthetic construct
  source 1..20: mol_type = other DNA
cgcaccgagaaggccaccga

SEQ ID NO: 13391 - DNA, 20 bp, synthetic construct
  source 1..20: mol_type = other DNA
cctcggtggccttctcggtg

SEQ ID NO: 13392 - DNA, 20 bp, synthetic construct
  source 1..20: mol_type = other DNA
acacgatgctgggaggcctg

SEQ ID NO: 13393 - DNA, 20 bp, synthetic construct
  source 1..20: mol_type = other DNA
catcgtgtggcagcagacag

SEQ ID NO: 13394 - DNA, 20 bp, synthetic construct
  source 1..20: mol_type = other DNA
tgctgccacacgatgctggg

SEQ ID NO: 13395 - DNA, 20 bp, synthetic construct
  source 1..20: mol_type = other DNA
tgtctgctgccacacgatgc

SEQ ID NO: 13396 - DNA, 20 bp, synthetic construct
  source 1..20: mol_type = other DNA
cctggcccaccgcaccgaga

SEQ ID NO: 13397 - DNA, 20 bp, synthetic construct
  source 1..20: mol_type = other DNA
cctcggcagccagcttcccc

SEQ ID NO: 13398 - DNA, 20 bp, synthetic construct
  source 1..20: mol_type = other DNA
ggtggccttctcggtgcggt

SEQ ID NO: 13399 - DNA, 20 bp, synthetic construct
  source 1..20: mol_type = other DNA
cggtggccttctcggtgcgg

SEQ ID NO: 13400 - DNA, 20 bp, synthetic construct
  source 1..20: mol_type = other DNA
ttggccagcgctgccaaagg

SEQ ID NO: 13401 - DNA, 20 bp, synthetic construct
  source 1..20: mol_type = other DNA
ggcaaagccatgatggtgcg

SEQ ID NO: 13402 - DNA, 20 bp, synthetic construct
  source 1..20: mol_type = other DNA
gctgccaaaggaggccacgg

SEQ ID NO: 13403 - DNA, 20 bp, synthetic construct
  source 1..20: mol_type = other DNA
cctctgaggcccctgacccg

SEQ ID NO: 13404 - DNA, 20 bp, synthetic construct
  source 1..20: mol_type = other DNA
cctcagaggcaaagccatga

SEQ ID NO: 13405 - DNA, 20 bp, synthetic construct
  source 1..20: mol_type = other DNA
aggcaaagccatgatggtgc

SEQ ID NO: 13406 - DNA, 20 bp, synthetic construct
  source 1..20: mol_type = other DNA
gaggcaaagccatgatggtg

SEQ ID NO: 13407 - DNA, 20 bp, synthetic construct
  source 1..20: mol_type = other DNA
tgcctctgaggcccctgacc

SEQ ID NO: 13408 - DNA, 20 bp, synthetic construct
  source 1..20: mol_type = other DNA
actcacctcctgctcctccg

SEQ ID NO: 13409 - DNA, 20 bp, synthetic construct
  source 1..20: mol_type = other DNA
tggcagcgctggccaagccc

SEQ ID NO: 13410 - DNA, 20 bp, synthetic construct
  source 1..20: mol_type = other DNA
ggcttggccagcgctgccaa

SEQ ID NO: 13411 - DNA, 20 bp, synthetic construct
  source 1..20: mol_type = other DNA
aaagggagcgaggacagcgc

SEQ ID NO: 13412 - DNA, 20 bp, synthetic construct
  source 1..20: mol_type = other DNA
agcgctgccaaaggaggcca

SEQ ID NO: 13413 - DNA, 20 bp, synthetic construct
  source 1..20: mol_type = other DNA
ggcagcgctggccaagcccc

SEQ ID NO: 13414 - DNA, 20 bp, synthetic construct
  source 1..20: mol_type = other DNA
aaaggaggccacggaggagc

SEQ ID NO: 13415 - DNA, 20 bp, synthetic construct
  source 1..20: mol_type = other DNA
cgttctcggtttctcgcggg

SEQ ID NO: 13416 - DNA, 20 bp, synthetic construct
  source 1..20: mol_type = other DNA
gcctccgcgcagggtcccgt

SEQ ID NO: 13417 - DNA, 20 bp, synthetic construct
  source 1..20: mol_type = other DNA
ttcgactgagggctagcgag

SEQ ID NO: 13418 - DNA, 20 bp, synthetic construct
  source 1..20: mol_type = other DNA
tcccacgggaccctgcgcgg

SEQ ID NO: 13419 - DNA, 20 bp, synthetic construct
  source 1..20: mol_type = other DNA
gctggagcagggctgaagca

SEQ ID NO: 13420 - DNA, 20 bp, synthetic construct
  source 1..20: mol_type = other DNA
gcgaggaggctttcgactga

SEQ ID NO: 13421 - DNA, 20 bp, synthetic construct
  source 1..20: mol_type = other DNA
gctgaagcagggctgaagca

SEQ ID NO: 13422 - DNA, 20 bp, synthetic construct
  source 1..20: mol_type = other DNA
tttcgactgagggctagcga

SEQ ID NO: 13423 - DNA, 20 bp, synthetic construct
  source 1..20: mol_type = other DNA
agttcccacgggaccctgcg

SEQ ID NO: 13424 - DNA, 20 bp, synthetic construct
  source 1..20: mol_type = other DNA
gagggctagcgaggggagca

SEQ ID NO: 13425 - DNA, 20 bp, synthetic construct
  source 1..20: mol_type = other DNA
gcggggcccgcaggagcgtg

SEQ ID NO: 13426 - DNA, 20 bp, synthetic construct
  source 1..20: mol_type = other DNA
gctggagcagggctggagca

SEQ ID NO: 13427 - DNA, 20 bp, synthetic construct
  source 1..20: mol_type = other DNA
gcaggagcgtgcggggtccg

SEQ ID NO: 13428 - DNA, 20 bp, synthetic construct
  source 1..20: mol_type = other DNA
gagcagggctggagcagggc

SEQ ID NO: 13429 - DNA, 20 bp, synthetic construct
  source 1..20: mol_type = other DNA
gaggggagcagggctggagc

SEQ ID NO: 13430 - DNA, 20 bp, synthetic construct
  source 1..20: mol_type = other DNA
caaacagggagtactagagg

SEQ ID NO: 13431 - DNA, 20 bp, synthetic construct
  source 1..20: mol_type = other DNA
tgcccttgtctgtgacaacg

SEQ ID NO: 13432 - DNA, 20 bp, synthetic construct
  source 1..20: mol_type = other DNA
ggcctccaaaggcaatgcgg

SEQ ID NO: 13433 - DNA, 20 bp, synthetic construct
  source 1..20: mol_type = other DNA
gaggaggggcccttgaacac

SEQ ID NO: 13434 - DNA, 20 bp, synthetic construct
  source 1..20: mol_type = other DNA
attgccacaagcatactgca

SEQ ID NO: 13435 - DNA, 20 bp, synthetic construct
  source 1..20: mol_type = other DNA
aacagggagtactagaggag

SEQ ID NO: 13436 - DNA, 20 bp, synthetic construct
  source 1..20: mol_type = other DNA
tcatctgtaggcttcacctg

SEQ ID NO: 13437 - DNA, 20 bp, synthetic construct
  source 1..20: mol_type = other DNA
ctgactgagcttctccccac

SEQ ID NO: 13438 - DNA, 20 bp, synthetic construct
  source 1..20: mol_type = other DNA
aaacagggagtactagagga

SEQ ID NO: 13439 - DNA, 20 bp, synthetic construct
  source 1..20: mol_type = other DNA
gtggggagaagctcagtcag

SEQ ID NO: 13440 - DNA, 20 bp, synthetic construct
  source 1..20: mol_type = other DNA
acacaaacagggagtactag

SEQ ID NO: 13441 - DNA, 20 bp, synthetic construct
  source 1..20: mol_type = other DNA
tcagtggcagaacacaaaca

SEQ ID NO: 13442 - DNA, 20 bp, synthetic construct
  source 1..20: mol_type = other DNA
atctgtaggcttcacctgtg

SEQ ID NO: 13443 - DNA, 20 bp, synthetic construct
  source 1..20: mol_type = other DNA
cctggaggtgaggcttgttg

SEQ ID NO: 13444 - DNA, 20 bp, synthetic construct
  source 1..20: mol_type = other DNA
tgggtcaggccagtgttcaa

SEQ ID NO: 13445 - DNA, 20 bp, synthetic construct
  source 1..20: mol_type = other DNA
tcgcccagagctgtcaagtg

SEQ ID NO: 13446 - DNA, 20 bp, synthetic construct
  source 1..20: mol_type = other DNA
gctgcgggacgcgatggacg

SEQ ID NO: 13447 - DNA, 20 bp, synthetic construct
  source 1..20: mol_type = other DNA
ggtcgcccagagctgtcaag

SEQ ID NO: 13448 - DNA, 20 bp, synthetic construct
  source 1..20: mol_type = other DNA
gctgaagagctgctcttgga

SEQ ID NO: 13449 - DNA, 20 bp, synthetic construct
  source 1..20: mol_type = other DNA
gtcgcccagagctgtcaagt

SEQ ID NO: 13450 - DNA, 20 bp, synthetic construct
  source 1..20: mol_type = other DNA
aggtccccacttgacagctc

SEQ ID NO: 13451 - DNA, 20 bp, synthetic construct
  source 1..20: mol_type = other DNA
tgacagctctgggcgaccgg

SEQ ID NO: 13452 - DNA, 20 bp, synthetic construct
  source 1..20: mol_type = other DNA
actgctccacagcctgctgg

SEQ ID NO: 13453 - DNA, 20 bp, synthetic construct
  source 1..20: mol_type = other DNA
agccagcgccaggctgcagt

SEQ ID NO: 13454 - DNA, 20 bp, synthetic construct
  source 1..20: mol_type = other DNA
ggagtggacgcgagagtgag

SEQ ID NO: 13455 - DNA, 20 bp, synthetic construct
  source 1..20: mol_type = other DNA
aaaggctgcccgggagatcg

SEQ ID NO: 13456 - DNA, 20 bp, synthetic construct
  source 1..20: mol_type = other DNA
gcgagagtgagcggccgaga

SEQ ID NO: 13457 - DNA, 20 bp, synthetic construct
  source 1..20: mol_type = other DNA
cagcccagccccgatctccc

SEQ ID NO: 13458 - DNA, 20 bp, synthetic construct
  source 1..20: mol_type = other DNA
cgcgagagtgagcggccgag

SEQ ID NO: 13459 - DNA, 20 bp, synthetic construct
  source 1..20: mol_type = other DNA
gtgagcggccgagagggcgc

SEQ ID NO: 13460 - DNA, 20 bp, synthetic construct
  source 1..20: mol_type = other DNA
tggcgatgaaaccgcgtgcg

SEQ ID NO: 13461 - DNA, 20 bp, synthetic construct
  source 1..20: mol_type = other DNA
ggtcgcacgcaagtccgcgc

SEQ ID NO: 13462 - DNA, 20 bp, synthetic construct
  source 1..20: mol_type = other DNA
ggcgggcagcgtttgccgag

SEQ ID NO: 13463 - DNA, 20 bp, synthetic construct
  source 1..20: mol_type = other DNA
gtcgcacgcaagtccgcgcg

SEQ ID NO: 13464 - DNA, 20 bp, synthetic construct
  source 1..20: mol_type = other DNA
gggtcgcacgcaagtccgcg

SEQ ID NO: 13465 - DNA, 20 bp, synthetic construct
  source 1..20: mol_type = other DNA
cggggtccgggccacgcacg

SEQ ID NO: 13466 - DNA, 20 bp, synthetic construct
  source 1..20: mol_type = other DNA
tgcgacccggagcgcccgct

SEQ ID NO: 13467 - DNA, 20 bp, synthetic construct
  source 1..20: mol_type = other DNA
tgcgggacatgcgtgcgccc

SEQ ID NO: 13468 - DNA, 20 bp, synthetic construct
  source 1..20: mol_type = other DNA
cagagcagctggcagcgcgg

SEQ ID NO: 13469 - DNA, 20 bp, synthetic construct
  source 1..20: mol_type = other DNA
gcgcggacttgcgtgcgacc

SEQ ID NO: 13470 - DNA, 20 bp, synthetic construct
  source 1..20: mol_type = other DNA
cgtttgccgagcgggcgctc

SEQ ID NO: 13471 - DNA, 20 bp, synthetic construct
  source 1..20: mol_type = other DNA
aatcagagcagctggcagcg

SEQ ID NO: 13472 - DNA, 20 bp, synthetic construct
  source 1..20: mol_type = other DNA
gtttgccgagcgggcgctcc

SEQ ID NO: 13473 - DNA, 20 bp, synthetic construct
  source 1..20: mol_type = other DNA
gcgggcagcgtttgccgagc

SEQ ID NO: 13474 - DNA, 20 bp, synthetic construct
  source 1..20: mol_type = other DNA
agagcagctggcagcgcggc

SEQ ID NO: 13475 - DNA, 20 bp, synthetic construct
  source 1..20: mol_type = other DNA
agcgccctgagcgcacgcag

SEQ ID NO: 13476 - DNA, 20 bp, synthetic construct
  source 1..20: mol_type = other DNA
gctgcagctgaaagccgatc

SEQ ID NO: 13477 - DNA, 20 bp, synthetic construct
  source 1..20: mol_type = other DNA
tgcgtgcgctcagggcgctg

SEQ ID NO: 13478 - DNA, 20 bp, synthetic construct
  source 1..20: mol_type = other DNA
gcggctgcagcatccagagc

SEQ ID NO: 13479 - DNA, 20 bp, synthetic construct
  source 1..20: mol_type = other DNA
gaagacgcccggcgcgccgg

SEQ ID NO: 13480 - DNA, 20 bp, synthetic construct
  source 1..20: mol_type = other DNA
ggaagacgcccggcgcgccg

SEQ ID NO: 13481 - DNA, 20 bp, synthetic construct
  source 1..20: mol_type = other DNA
gcgcctcggccgctggcccc

SEQ ID NO: 13482 - DNA, 20 bp, synthetic construct
  source 1..20: mol_type = other DNA
ttcagctgcagcctccgggc

SEQ ID NO: 13483 - DNA, 20 bp, synthetic construct
  source 1..20: mol_type = other DNA
cgccttcccggccggcccgg

SEQ ID NO: 13484 - DNA, 20 bp, synthetic construct
  source 1..20: mol_type = other DNA
ccgggccggccgggaaggcg

SEQ ID NO: 13485 - DNA, 20 bp, synthetic construct
  source 1..20: mol_type = other DNA
ccgggaaggcggggagcggg

SEQ ID NO: 13486 - DNA, 20 bp, synthetic construct
  source 1..20: mol_type = other DNA
acgcagcggtagcagcagct

SEQ ID NO: 13487 - DNA, 20 bp, synthetic construct
  source 1..20: mol_type = other DNA
cgcagcggtagcagcagctg

SEQ ID NO: 13488 - DNA, 20 bp, synthetic construct
  source 1..20: mol_type = other DNA
agcctccgggccggccggga

SEQ ID NO: 13489 - DNA, 20 bp, synthetic construct
  source 1..20: mol_type = other DNA
gctgcagcctccgggccggc

SEQ ID NO: 13490 - DNA, 20 bp, synthetic construct
  source 1..20: mol_type = other DNA
ggggctgggacgcacacgcg

SEQ ID NO: 13491 - DNA, 20 bp, synthetic construct
  source 1..20: mol_type = other DNA
acgcgcggcgtacggtcccg

SEQ ID NO: 13492 - DNA, 20 bp, synthetic construct
  source 1..20: mol_type = other DNA
cgggcgcagagggcagccgg

SEQ ID NO: 13493 - DNA, 20 bp, synthetic construct
  source 1..20: mol_type = other DNA
ggccgccgcccgggcgcaga

SEQ ID NO: 13494 - DNA, 20 bp, synthetic construct
  source 1..20: mol_type = other DNA
gccccgccggccagcgcagg

SEQ ID NO: 13495 - DNA, 20 bp, synthetic construct
  source 1..20: mol_type = other DNA
acacgcgcggcgtacggtcc

SEQ ID NO: 13496 - DNA, 20 bp, synthetic construct
  source 1..20: mol_type = other DNA
ccgcggccgaggcactagtg

SEQ ID NO: 13497 - DNA, 20 bp, synthetic construct
  source 1..20: mol_type = other DNA
ggccgcgggagggagcgcaa

SEQ ID NO: 13498 - DNA, 20 bp, synthetic construct
  source 1..20: mol_type = other DNA
ctagtgcctcggccgcggga

SEQ ID NO: 13499 - DNA, 20 bp, synthetic construct
  source 1..20: mol_type = other DNA
actagtgcctcggccgcggg

SEQ ID NO: 13500 - DNA, 20 bp, synthetic construct
  source 1..20: mol_type = other DNA
cctcactagtgcctcggccg

SEQ ID NO: 13501 - DNA, 20 bp, synthetic construct
  source 1..20: mol_type = other DNA
tctgagcctcactagtgcct

SEQ ID NO: 13502 - DNA, 20 bp, synthetic construct
  source 1..20: mol_type = other DNA
agcgcagcgaaggaacgagc

SEQ ID NO: 13503 - DNA, 20 bp, synthetic construct
  source 1..20: mol_type = other DNA
ggagggagcgcaagggcgcg

SEQ ID NO: 13504 - DNA, 20 bp, synthetic construct
  source 1..20: mol_type = other DNA
gggagggagcgcaagggcgc

SEQ ID NO: 13505 - DNA, 20 bp, synthetic construct
  source 1..20: mol_type = other DNA
gctggtgggtggtctcgcgt

SEQ ID NO: 13506 - DNA, 20 bp, synthetic construct
  source 1..20: mol_type = other DNA
gcggttggccaacgcagtgg

SEQ ID NO: 13507 - DNA, 20 bp, synthetic construct
  source 1..20: mol_type = other DNA
ctggtgggtggtctcgcgtg

SEQ ID NO: 13508 - DNA, 20 bp, synthetic construct
  source 1..20: mol_type = other DNA
ggagcggttggccaacgcag

SEQ ID NO: 13509 - DNA, 20 bp, synthetic construct
  source 1..20: mol_type = other DNA
ggcggcagtcggtgtaaaca

SEQ ID NO: 13510 - DNA, 20 bp, synthetic construct
  source 1..20: mol_type = other DNA
gaccacccaccagccaggag

SEQ ID NO: 13511 - DNA, 20 bp, synthetic construct
  source 1..20: mol_type = other DNA
gccaacgcagtggcggcagt

SEQ ID NO: 13512 - DNA, 20 bp, synthetic construct
  source 1..20: mol_type = other DNA
accgactgccgccactgcgt

SEQ ID NO: 13513 - DNA, 20 bp, synthetic construct
  source 1..20: mol_type = other DNA
agcggtcgcaggacccgcag

SEQ ID NO: 13514 - DNA, 20 bp, synthetic construct
  source 1..20: mol_type = other DNA
ggctggtgggtggtctcgcg

SEQ ID NO: 13515 - DNA, 20 bp, synthetic construct
  source 1..20: mol_type = other DNA
gcaggacccgcagcggcgcg

SEQ ID NO: 13516 - DNA, 20 bp, synthetic construct
  source 1..20: mol_type = other DNA
aacaaggcctcgcgccgctg

SEQ ID NO: 13517 - DNA, 20 bp, synthetic construct
  source 1..20: mol_type = other DNA
ctgcgaccgctcctggctgg

SEQ ID NO: 13518 - DNA, 20 bp, synthetic construct
  source 1..20: mol_type = other DNA
tgcgaccgctcctggctggt

SEQ ID NO: 13519 - DNA, 20 bp, synthetic construct
  source 1..20: mol_type = other DNA
gtcctgcgaccgctcctggc

SEQ ID NO: 13520 - DNA, 20 bp, synthetic construct
  source 1..20: mol_type = other DNA
gcgggtggagcccttccaag

SEQ ID NO: 13521 - DNA, 20 bp, synthetic construct
  source 1..20: mol_type = other DNA
taaggctgcgccgcttggaa

SEQ ID NO: 13522 - DNA, 20 bp, synthetic construct
  source 1..20: mol_type = other DNA
ccagggtacaaagtacagca

SEQ ID NO: 13523 - DNA, 20 bp, synthetic construct
  source 1..20: mol_type = other DNA
ccctgctgtactttgtaccc

SEQ ID NO: 13524 - DNA, 20 bp, synthetic construct
  source 1..20: mol_type = other DNA
ccagacctgtcaccaacccc

SEQ ID NO: 13525 - DNA, 20 bp, synthetic construct
  source 1..20: mol_type = other DNA
acaaagtacagcagggacgc

SEQ ID NO: 13526 - DNA, 20 bp, synthetic construct
  source 1..20: mol_type = other DNA
tacaaagtacagcagggacg

SEQ ID NO: 13527 - DNA, 20 bp, synthetic construct
  source 1..20: mol_type = other DNA
cagaacccgccaactctcca

SEQ ID NO: 13528 - DNA, 20 bp, synthetic construct
  source 1..20: mol_type = other DNA
taggatgtcagctctttctg

SEQ ID NO: 13529 - DNA, 20 bp, synthetic construct
  source 1..20: mol_type = other DNA
aagtacagcagggacgcggg

SEQ ID NO: 13530 - DNA, 20 bp, synthetic construct
  source 1..20: mol_type = other DNA
atgtcgccctgccgttcctg

SEQ ID NO: 13531 - DNA, 20 bp, synthetic construct
  source 1..20: mol_type = other DNA
cctgtcaccaaccccaggaa

SEQ ID NO: 13532 - DNA, 20 bp, synthetic construct
  source 1..20: mol_type = other DNA
tactttgtaccctggagagt

SEQ ID NO: 13533 - DNA, 20 bp, synthetic construct
  source 1..20: mol_type = other DNA
caccaaccccaggaacggca

SEQ ID NO: 13534 - DNA, 20 bp, synthetic construct
  source 1..20: mol_type = other DNA
tcaccaaccccaggaacggc

SEQ ID NO: 13535 - DNA, 20 bp, synthetic construct
  source 1..20: mol_type = other DNA
tccattgctacttcagtcgg

SEQ ID NO: 13536 - DNA, 20 bp, synthetic construct
  source 1..20: mol_type = other DNA
tccacagcgctggcagacac

SEQ ID NO: 13537 - DNA, 20 bp, synthetic construct
  source 1..20: mol_type = other DNA
gttggacgaagtcgctctgg

SEQ ID NO: 13538 - DNA, 20 bp, synthetic construct
  source 1..20: mol_type = other DNA
gttgttggacgaagtcgctc

SEQ ID NO: 13539 - DNA, 20 bp, synthetic construct
  source 1..20: mol_type = other DNA
ggacgcgctggagtcgttgt

SEQ ID NO: 13540 - DNA, 20 bp, synthetic construct
  source 1..20: mol_type = other DNA
cccgggcatcagcttctatg

SEQ ID NO: 13541 - DNA, 20 bp, synthetic construct
  source 1..20: mol_type = other DNA
gcctgtgtctgccagcgctg

SEQ ID NO: 13542 - DNA, 20 bp, synthetic construct
  source 1..20: mol_type = other DNA
gccgccgactgaagtagcaa

SEQ ID NO: 13543 - DNA, 20 bp, synthetic construct
  source 1..20: mol_type = other DNA
ttggacgaagtcgctctgga

SEQ ID NO: 13544 - DNA, 20 bp, synthetic construct
  source 1..20: mol_type = other DNA
tccagccggctccacagcgc

SEQ ID NO: 13545 - DNA, 20 bp, synthetic construct
  source 1..20: mol_type = other DNA
tggacgaagtcgctctggag

SEQ ID NO: 13546 - DNA, 20 bp, synthetic construct
  source 1..20: mol_type = other DNA
tgaagtagcaatggacgcgc

SEQ ID NO: 13547 - DNA, 20 bp, synthetic construct
  source 1..20: mol_type = other DNA
acttcagtcggcggcgcccg

SEQ ID NO: 13548 - DNA, 20 bp, synthetic construct
  source 1..20: mol_type = other DNA
gtcgctctggaggggctcga

SEQ ID NO: 13549 - DNA, 20 bp, synthetic construct
  source 1..20: mol_type = other DNA
tacttcagtcggcggcgccc

SEQ ID NO: 13550 - DNA, 20 bp, synthetic construct
  source 1..20: mol_type = other DNA
gtctttgtaagactggacag

SEQ ID NO: 13551 - DNA, 20 bp, synthetic construct
  source 1..20: mol_type = other DNA
aacgctcctgatgtggaatg

SEQ ID NO: 13552 - DNA, 20 bp, synthetic construct
  source 1..20: mol_type = other DNA
gaagtttaaacaaaaggcaa

SEQ ID NO: 13553 - DNA, 20 bp, synthetic construct
  source 1..20: mol_type = other DNA
gaaggagctctctgtaccca

SEQ ID NO: 13554 - DNA, 20 bp, synthetic construct
  source 1..20: mol_type = other DNA
gtctcagctgcactttcctt

SEQ ID NO: 13555 - DNA, 20 bp, synthetic construct
  source 1..20: mol_type = other DNA
tgagctccagggcgcagtgg

SEQ ID NO: 13556 - DNA, 20 bp, synthetic construct
  source 1..20: mol_type = other DNA
tccctccctccactgcgccc

SEQ ID NO: 13557 - DNA, 20 bp, synthetic construct
  source 1..20: mol_type = other DNA
tccagggcgcagtggaggga

SEQ ID NO: 13558 - DNA, 20 bp, synthetic construct
  source 1..20: mol_type = other DNA
gagctccagggcgcagtgga

SEQ ID NO: 13559 - DNA, 20 bp, synthetic construct
  source 1..20: mol_type = other DNA
ctgcactctgttgagctcca

SEQ ID NO: 13560 - DNA, 20 bp, synthetic construct
  source 1..20: mol_type = other DNA
ctccagggcgcagtggaggg

SEQ ID NO: 13561 - DNA, 20 bp, synthetic construct
  source 1..20: mol_type = other DNA
tctgcacctcattccacatc

SEQ ID NO: 13562 - DNA, 20 bp, synthetic construct
  source 1..20: mol_type = other DNA
gctgcactctgttgagctcc

SEQ ID NO: 13563 - DNA, 20 bp, synthetic construct
  source 1..20: mol_type = other DNA
aagtttaaacaaaaggcaag

SEQ ID NO: 13564 - DNA, 20 bp, synthetic construct
  source 1..20: mol_type = other DNA
tgttgagctccagggcgcag

SEQ ID NO: 13565 - DNA, 20 bp, synthetic construct
  source 1..20: mol_type = other DNA
tctgggtccaagcaaacatg

SEQ ID NO: 13566 - DNA, 20 bp, synthetic construct
  source 1..20: mol_type = other DNA
aaaggaaagtggaacaagag

SEQ ID NO: 13567 - DNA, 20 bp, synthetic construct
  source 1..20: mol_type = other DNA
cgaggcagacaagactgccc

SEQ ID NO: 13568 - DNA, 20 bp, synthetic construct
  source 1..20: mol_type = other DNA
tctgcctcggctgtgaagtg

SEQ ID NO: 13569 - DNA, 20 bp, synthetic construct
  source 1..20: mol_type = other DNA
agtggaacaagaggggacaa

SEQ ID NO: 13570 - DNA, 20 bp, synthetic construct
  source 1..20: mol_type = other DNA
gcagacaagactgcccaggc

SEQ ID NO: 13571 - DNA, 20 bp, synthetic construct
  source 1..20: mol_type = other DNA
gcctccccacttcacagccg

SEQ ID NO: 13572 - DNA, 20 bp, synthetic construct
  source 1..20: mol_type = other DNA
aacatgaggcagctgccagc

SEQ ID NO: 13573 - DNA, 20 bp, synthetic construct
  source 1..20: mol_type = other DNA
gcctcggctgtgaagtgggg

SEQ ID NO: 13574 - DNA, 20 bp, synthetic construct
  source 1..20: mol_type = other DNA
acaagactgcccaggccggc

SEQ ID NO: 13575 - DNA, 20 bp, synthetic construct
  source 1..20: mol_type = other DNA
tgtctgcctcggctgtgaag

SEQ ID NO: 13576 - DNA, 20 bp, synthetic construct
  source 1..20: mol_type = other DNA
ccaaaggaaagtggaacaag

SEQ ID NO: 13577 - DNA, 20 bp, synthetic construct
  source 1..20: mol_type = other DNA
tttggggaaagtgagcgttg

SEQ ID NO: 13578 - DNA, 20 bp, synthetic construct
  source 1..20: mol_type = other DNA
aagtggaacaagaggggaca

SEQ ID NO: 13579 - DNA, 20 bp, synthetic construct
  source 1..20: mol_type = other DNA
tcactttccccaaaggaaag

SEQ ID NO: 13580 - DNA, 20 bp, synthetic construct
  source 1..20: mol_type = other DNA
gcccaacagcgcggtgcaag

SEQ ID NO: 13581 - DNA, 20 bp, synthetic construct
  source 1..20: mol_type = other DNA
cagtctccgagacttagggc

SEQ ID NO: 13582 - DNA, 20 bp, synthetic construct
  source 1..20: mol_type = other DNA
ttcgtcccggccctaagtct

SEQ ID NO: 13583 - DNA, 20 bp, synthetic construct
  source 1..20: mol_type = other DNA
cccaggccccggatccgcgg

SEQ ID NO: 13584 - DNA, 20 bp, synthetic construct
  source 1..20: mol_type = other DNA
ccgggcctcgcccaacagcg

SEQ ID NO: 13585 - DNA, 20 bp, synthetic construct
  source 1..20: mol_type = other DNA
cggcggctggggcctctagg

SEQ ID NO: 13586 - DNA, 20 bp, synthetic construct
  source 1..20: mol_type = other DNA
agtctccgagacttagggcc

SEQ ID NO: 13587 - DNA, 20 bp, synthetic construct
  source 1..20: mol_type = other DNA
tagggccgggacgaagcgct

SEQ ID NO: 13588 - DNA, 20 bp, synthetic construct
  source 1..20: mol_type = other DNA
ggtccccccccgcggatccg

SEQ ID NO: 13589 - DNA, 20 bp, synthetic construct
  source 1..20: mol_type = other DNA
ccgggcctcccctcaacccc

SEQ ID NO: 13590 - DNA, 20 bp, synthetic construct
  source 1..20: mol_type = other DNA
ggccgggacgaagcgctcgg

SEQ ID NO: 13591 - DNA, 20 bp, synthetic construct
  source 1..20: mol_type = other DNA
gcccaggccccggatccgcg

SEQ ID NO: 13592 - DNA, 20 bp, synthetic construct
  source 1..20: mol_type = other DNA
tcccctcaacccccggccgg

SEQ ID NO: 13593 - DNA, 20 bp, synthetic construct
  source 1..20: mol_type = other DNA
gacgaagcgctcggcggctg

SEQ ID NO: 13594 - DNA, 20 bp, synthetic construct
  source 1..20: mol_type = other DNA
ccaggccccggatccgcggg

SEQ ID NO: 13595 - DNA, 20 bp, synthetic construct
  source 1..20: mol_type = other DNA
ggattgggaagccgcacgag

SEQ ID NO: 13596 - DNA, 20 bp, synthetic construct
  source 1..20: mol_type = other DNA
aggattgggaagccgcacga

SEQ ID NO: 13597 - DNA, 20 bp, synthetic construct
  source 1..20: mol_type = other DNA
tgtggagagccccacgacgg

SEQ ID NO: 13598 - DNA, 20 bp, synthetic construct
  source 1..20: mol_type = other DNA
caggattgggaagccgcacg

SEQ ID NO: 13599 - DNA, 20 bp, synthetic construct
  source 1..20: mol_type = other DNA
tggggctctccacagagcac

SEQ ID NO: 13600 - DNA, 20 bp, synthetic construct
  source 1..20: mol_type = other DNA
ggggctctccacagagcacg

SEQ ID NO: 13601 - DNA, 20 bp, synthetic construct
  source 1..20: mol_type = other DNA
cacgtgacctgcccaggatt

SEQ ID NO: 13602 - DNA, 20 bp, synthetic construct
  source 1..20: mol_type = other DNA
ctctgtggagagccccacga

SEQ ID NO: 13603 - DNA, 20 bp, synthetic construct
  source 1..20: mol_type = other DNA
tcgcggcacctttaaggtgg

SEQ ID NO: 13604 - DNA, 20 bp, synthetic construct
  source 1..20: mol_type = other DNA
cggtcgcggcacctttaagg

SEQ ID NO: 13605 - DNA, 20 bp, synthetic construct
  source 1..20: mol_type = other DNA
ccaatcctgggcaggtcacg

SEQ ID NO: 13606 - DNA, 20 bp, synthetic construct
  source 1..20: mol_type = other DNA
gtggggctctccacagagca

SEQ ID NO: 13607 - DNA, 20 bp, synthetic construct
  source 1..20: mol_type = other DNA
ggagagccccacgacggcgg

SEQ ID NO: 13608 - DNA, 20 bp, synthetic construct
  source 1..20: mol_type = other DNA
tgaagccacgtgacctgccc

SEQ ID NO: 13609 - DNA, 20 bp, synthetic construct
  source 1..20: mol_type = other DNA
gagggctcaagcccctcgtg

SEQ ID NO: 13610 - DNA, 20 bp, synthetic construct
  source 1..20: mol_type = other DNA
tggaatatgccataagctcc

SEQ ID NO: 13611 - DNA, 20 bp, synthetic construct
  source 1..20: mol_type = other DNA
acctcacctcctactcacag

SEQ ID NO: 13612 - DNA, 20 bp, synthetic construct
  source 1..20: mol_type = other DNA
gagcaggctgttcccaagaa

SEQ ID NO: 13613 - DNA, 20 bp, synthetic construct
  source 1..20: mol_type = other DNA
catggaggctgcgctttgtg

SEQ ID NO: 13614 - DNA, 20 bp, synthetic construct
  source 1..20: mol_type = other DNA
tgaggataatgaagatgagc

SEQ ID NO: 13615 - DNA, 20 bp, synthetic construct
  source 1..20: mol_type = other DNA
gtgccactgtggtttacagt

SEQ ID NO: 13616 - DNA, 20 bp, synthetic construct
  source 1..20: mol_type = other DNA
tgacataggaaatgaagaat

SEQ ID NO: 13617 - DNA, 20 bp, synthetic construct
  source 1..20: mol_type = other DNA
gtttacagtaggcatagctg

SEQ ID NO: 13618 - DNA, 20 bp, synthetic construct
  source 1..20: mol_type = other DNA
gcgatgtcaccaggagctta

SEQ ID NO: 13619 - DNA, 20 bp, synthetic construct
  source 1..20: mol_type = other DNA
tgagcaggctgttcccaaga

SEQ ID NO: 13620 - DNA, 20 bp, synthetic construct
  source 1..20: mol_type = other DNA
acattctttgcgatgtcacc

SEQ ID NO: 13621 - DNA, 20 bp, synthetic construct
  source 1..20: mol_type = other DNA
caggctgttcccaagaaggg

SEQ ID NO: 13622 - DNA, 20 bp, synthetic construct
  source 1..20: mol_type = other DNA
cttctacctctgtgagtagg

SEQ ID NO: 13623 - DNA, 20 bp, synthetic construct
  source 1..20: mol_type = other DNA
cttcttctacctctgtgagt

SEQ ID NO: 13624 - DNA, 20 bp, synthetic construct
  source 1..20: mol_type = other DNA
acctctgtgagtaggaggtg

SEQ ID NO: 13625 - DNA, 20 bp, synthetic construct
  source 1..20: mol_type = other DNA
agactagaagtgtacccacg

SEQ ID NO: 13626 - DNA, 20 bp, synthetic construct
  source 1..20: mol_type = other DNA
tgagactagaagtgtaccca

SEQ ID NO: 13627 - DNA, 20 bp, synthetic construct
  source 1..20: mol_type = other DNA
gagactagaagtgtacccac

SEQ ID NO: 13628 - DNA, 20 bp, synthetic construct
  source 1..20: mol_type = other DNA
tcaccccgagtccaacaggt

SEQ ID NO: 13629 - DNA, 20 bp, synthetic construct
  source 1..20: mol_type = other DNA
tctgactcgaccggtccagg

SEQ ID NO: 13630 - DNA, 20 bp, synthetic construct
  source 1..20: mol_type = other DNA
cagccaacctgttggactcg

SEQ ID NO: 13631 - DNA, 20 bp, synthetic construct
  source 1..20: mol_type = other DNA
atcctcttagtctacacgtg

SEQ ID NO: 13632 - DNA, 20 bp, synthetic construct
  source 1..20: mol_type = other DNA
cacgtgaggtctgactcgac

SEQ ID NO: 13633 - DNA, 20 bp, synthetic construct
  source 1..20: mol_type = other DNA
gacctcacgtgtagactaag

SEQ ID NO: 13634 - DNA, 20 bp, synthetic construct
  source 1..20: mol_type = other DNA
ctgactcgaccggtccagga

SEQ ID NO: 13635 - DNA, 20 bp, synthetic construct
  source 1..20: mol_type = other DNA
gcagcttccaggggccccgt

SEQ ID NO: 13636 - DNA, 20 bp, synthetic construct
  source 1..20: mol_type = other DNA
ggctggagcgcagcttccag

SEQ ID NO: 13637 - DNA, 20 bp, synthetic construct
  source 1..20: mol_type = other DNA
aaggcaaggcagcaggcgct

SEQ ID NO: 13638 - DNA, 20 bp, synthetic construct
  source 1..20: mol_type = other DNA
aagtgtacccacggggcccc

SEQ ID NO: 13639 - DNA, 20 bp, synthetic construct
  source 1..20: mol_type = other DNA
ctgttggactcggggtgagg

SEQ ID NO: 13640 - DNA, 20 bp, synthetic construct
  source 1..20: mol_type = other DNA
gcctcccggcgcactcccag

SEQ ID NO: 13641 - DNA, 20 bp, synthetic construct
  source 1..20: mol_type = other DNA
ccaggccggaatctccccac

SEQ ID NO: 13642 - DNA, 20 bp, synthetic construct
  source 1..20: mol_type = other DNA
gcctctgggagtgcgccggg

SEQ ID NO: 13643 - DNA, 20 bp, synthetic construct
  source 1..20: mol_type = other DNA
atctccccaccggaagtgcg

SEQ ID NO: 13644 - DNA, 20 bp, synthetic construct
  source 1..20: mol_type = other DNA
ccggcctcgcacttccggtg

SEQ ID NO: 13645 - DNA, 20 bp, synthetic construct
  source 1..20: mol_type = other DNA
gcgcactcccagaggctggg

SEQ ID NO: 13646 - DNA, 20 bp, synthetic construct
  source 1..20: mol_type = other DNA
tccggcctcgcacttccggt

SEQ ID NO: 13647 - DNA, 20 bp, synthetic construct
  source 1..20: mol_type = other DNA
atccggcctcgcacttccgg

SEQ ID NO: 13648 - DNA, 20 bp, synthetic construct
  source 1..20: mol_type = other DNA
acacccactcacctcggccc

SEQ ID NO: 13649 - DNA, 20 bp, synthetic construct
  source 1..20: mol_type = other DNA
attccggcctggagctccca

SEQ ID NO: 13650 - DNA, 20 bp, synthetic construct
  source 1..20: mol_type = other DNA
gctcccagggccgaggtgag

SEQ ID NO: 13651 - DNA, 20 bp, synthetic construct
  source 1..20: mol_type = other DNA
acctcggccctgggagctcc

SEQ ID NO: 13652 - DNA, 20 bp, synthetic construct
  source 1..20: mol_type = other DNA
ggccgaggtgagtgggtgtg

SEQ ID NO: 13653 - DNA, 20 bp, synthetic construct
  source 1..20: mol_type = other DNA
ctcccagggccgaggtgagt

SEQ ID NO: 13654 - DNA, 20 bp, synthetic construct
  source 1..20: mol_type = other DNA
gaggtgagtgggtgtgcggc

SEQ ID NO: 13655 - DNA, 20 bp, synthetic construct
  source 1..20: mol_type = other DNA
taggcctccatagtagctgc

SEQ ID NO: 13656 - DNA, 20 bp, synthetic construct
  source 1..20: mol_type = other DNA
gtagctcatgttgtcagaag

SEQ ID NO: 13657 - DNA, 20 bp, synthetic construct
  source 1..20: mol_type = other DNA
tactccggcagctactatgg

SEQ ID NO: 13658 - DNA, 20 bp, synthetic construct
  source 1..20: mol_type = other DNA
tctgacaacatgagctactc

SEQ ID NO: 13659 - DNA, 20 bp, synthetic construct
  source 1..20: mol_type = other DNA
tacggctgtggaggattcgg

SEQ ID NO: 13660 - DNA, 20 bp, synthetic construct
  source 1..20: mol_type = other DNA
tgccacccatcatgctatgg

SEQ ID NO: 13661 - DNA, 20 bp, synthetic construct
  source 1..20: mol_type = other DNA
tactatggaggcctaggcta

SEQ ID NO: 13662 - DNA, 20 bp, synthetic construct
  source 1..20: mol_type = other DNA
ggcctaggctacggctgtgg

SEQ ID NO: 13663 - DNA, 20 bp, synthetic construct
  source 1..20: mol_type = other DNA
agtatcccccatagcatgat

SEQ ID NO: 13664 - DNA, 20 bp, synthetic construct
  source 1..20: mol_type = other DNA
atcccccatagcatgatggg

SEQ ID NO: 13665 - DNA, 20 bp, synthetic construct
  source 1..20: mol_type = other DNA
cacagctatagccatagccc

SEQ ID NO: 13666 - DNA, 20 bp, synthetic construct
  source 1..20: mol_type = other DNA
ggctacggctgtggaggatt

SEQ ID NO: 13667 - DNA, 20 bp, synthetic construct
  source 1..20: mol_type = other DNA
atcctccacagccgtagcct

SEQ ID NO: 13668 - DNA, 20 bp, synthetic construct
  source 1..20: mol_type = other DNA
ggaggcctaggctacggctg

SEQ ID NO: 13669 - DNA, 20 bp, synthetic construct
  source 1..20: mol_type = other DNA
ggattcggtggcctgggcta

SEQ ID NO: 13670 - DNA, 20 bp, synthetic construct
  source 1..20: mol_type = other DNA
atggccgctaatcttccaca

SEQ ID NO: 13671 - DNA, 20 bp, synthetic construct
  source 1..20: mol_type = other DNA
gtgataggaactgtaacctc

SEQ ID NO: 13672 - DNA, 20 bp, synthetic construct
  source 1..20: mol_type = other DNA
agtggagatagtgtgatctg

SEQ ID NO: 13673 - DNA, 20 bp, synthetic construct
  source 1..20: mol_type = other DNA
catggccgctaatcttccac

SEQ ID NO: 13674 - DNA, 20 bp, synthetic construct
  source 1..20: mol_type = other DNA
ggttacagttcctatcacat

SEQ ID NO: 13675 - DNA, 20 bp, synthetic construct
  source 1..20: mol_type = other DNA
cctggtcttctcaaaggtgt

SEQ ID NO: 13676 - DNA, 20 bp, synthetic construct
  source 1..20: mol_type = other DNA
ccagccctgtggaagattag

SEQ ID NO: 13677 - DNA, 20 bp, synthetic construct
  source 1..20: mol_type = other DNA
gactgtaactaccagggaga

SEQ ID NO: 13678 - DNA, 20 bp, synthetic construct
  source 1..20: mol_type = other DNA
tgactgtaactaccagggag

SEQ ID NO: 13679 - DNA, 20 bp, synthetic construct
  source 1..20: mol_type = other DNA
agagggcctggtcttctcaa

SEQ ID NO: 13680 - DNA, 20 bp, synthetic construct
  source 1..20: mol_type = other DNA
agaagaccaggccctctccc

SEQ ID NO: 13681 - DNA, 20 bp, synthetic construct
  source 1..20: mol_type = other DNA
ggtcttctcaaaggtgttgg

SEQ ID NO: 13682 - DNA, 20 bp, synthetic construct
  source 1..20: mol_type = other DNA
ccgctaatcttccacagggc

SEQ ID NO: 13683 - DNA, 20 bp, synthetic construct
  source 1..20: mol_type = other DNA
gtctttgactgtaactacca

SEQ ID NO: 13684 - DNA, 20 bp, synthetic construct
  source 1..20: mol_type = other DNA
tcctatcacattggaataca

SEQ ID NO: 13685 - DNA, 20 bp, synthetic construct
  source 1..20: mol_type = other DNA
atctgctcagacccgaccag

SEQ ID NO: 13686 - DNA, 20 bp, synthetic construct
  source 1..20: mol_type = other DNA
cagacccgaccagagggcgc

SEQ ID NO: 13687 - DNA, 20 bp, synthetic construct
  source 1..20: mol_type = other DNA
gtctgagcagatcactcgaa

SEQ ID NO: 13688 - DNA, 20 bp, synthetic construct
  source 1..20: mol_type = other DNA
tcgaacggcgacccccaccc

SEQ ID NO: 13689 - DNA, 20 bp, synthetic construct
  source 1..20: mol_type = other DNA
atggttgaccgttggctccg

SEQ ID NO: 13690 - DNA, 20 bp, synthetic construct
  source 1..20: mol_type = other DNA
tctgctcagacccgaccaga

SEQ ID NO: 13691 - DNA, 20 bp, synthetic construct
  source 1..20: mol_type = other DNA
tccatagccaccggcccgcg

SEQ ID NO: 13692 - DNA, 20 bp, synthetic construct
  source 1..20: mol_type = other DNA
gacccccaccccggagccaa

SEQ ID NO: 13693 - DNA, 20 bp, synthetic construct
  source 1..20: mol_type = other DNA
ggcggttgatggttgaccgt

SEQ ID NO: 13694 - DNA, 20 bp, synthetic construct
  source 1..20: mol_type = other DNA
tgatggttgaccgttggctc

SEQ ID NO: 13695 - DNA, 20 bp, synthetic construct
  source 1..20: mol_type = other DNA
tcgcgggccggtggctatgg

SEQ ID NO: 13696 - DNA, 20 bp, synthetic construct
  source 1..20: mol_type = other DNA
gttgaccgttggctccgggg

SEQ ID NO: 13697 - DNA, 20 bp, synthetic construct
  source 1..20: mol_type = other DNA
gatggttgaccgttggctcc

SEQ ID NO: 13698 - DNA, 20 bp, synthetic construct
  source 1..20: mol_type = other DNA
gccggtggctatggaggcgg

SEQ ID NO: 13699 - DNA, 20 bp, synthetic construct
  source 1..20: mol_type = other DNA
ttgaccgttggctccggggt

SEQ ID NO: 13700 - DNA, 20 bp, synthetic construct
  source 1..20: mol_type = other DNA
tcggaaatccagctttccgg

SEQ ID NO: 13701 - DNA, 20 bp, synthetic construct
  source 1..20: mol_type = other DNA
agcgcggcgtcccatcgggg

SEQ ID NO: 13702 - DNA, 20 bp, synthetic construct
  source 1..20: mol_type = other DNA
cggagcgcggcgtcccatcg

SEQ ID NO: 13703 - DNA, 20 bp, synthetic construct
  source 1..20: mol_type = other DNA
cccggaaagctggatttccg

SEQ ID NO: 13704 - DNA, 20 bp, synthetic construct
  source 1..20: mol_type = other DNA
gccgcccggtcccacggacg

SEQ ID NO: 13705 - DNA, 20 bp, synthetic construct
  source 1..20: mol_type = other DNA
agctggatttccgaggctgg

SEQ ID NO: 13706 - DNA, 20 bp, synthetic construct
  source 1..20: mol_type = other DNA
tcgccgcccggtcccacgga

SEQ ID NO: 13707 - DNA, 20 bp, synthetic construct
  source 1..20: mol_type = other DNA
cgggcggcgagctgcagggt

SEQ ID NO: 13708 - DNA, 20 bp, synthetic construct
  source 1..20: mol_type = other DNA
cagctcgccgcccggtccca

SEQ ID NO: 13709 - DNA, 20 bp, synthetic construct
  source 1..20: mol_type = other DNA
ctcggctcagcggcgcgcag

SEQ ID NO: 13710 - DNA, 20 bp, synthetic construct
  source 1..20: mol_type = other DNA
gcggcgagctgcagggttgg

SEQ ID NO: 13711 - DNA, 20 bp, synthetic construct
  source 1..20: mol_type = other DNA
gctcggctcagcggcgcgca

SEQ ID NO: 13712 - DNA, 20 bp, synthetic construct
  source 1..20: mol_type = other DNA
gcggggggcgctcggctcag

SEQ ID NO: 13713 - DNA, 20 bp, synthetic construct
  source 1..20: mol_type = other DNA
ggcggcgagctgcagggttg

SEQ ID NO: 13714 - DNA, 20 bp, synthetic construct
  source 1..20: mol_type = other DNA
ggaccgggcggcgagctgca

SEQ ID NO: 13715 - DNA, 20 bp, synthetic construct
  source 1..20: mol_type = other DNA
accgcgcgcaccacagcgag

SEQ ID NO: 13716 - DNA, 20 bp, synthetic construct
  source 1..20: mol_type = other DNA
gcgcaccacagcgagcggag

SEQ ID NO: 13717 - DNA, 20 bp, synthetic construct
  source 1..20: mol_type = other DNA
accacagcgagcggagcgga

SEQ ID NO: 13718 - DNA, 20 bp, synthetic construct
  source 1..20: mol_type = other DNA
tccgctcgctgtggtgcgcg

SEQ ID NO: 13719 - DNA, 20 bp, synthetic construct
  source 1..20: mol_type = other DNA
cccctccgctccgctcgctg

SEQ ID NO: 13720 - DNA, 20 bp, synthetic construct
  source 1..20: mol_type = other DNA
gcggcgcgtggcaggtccgg

SEQ ID NO: 13721 - DNA, 20 bp, synthetic construct
  source 1..20: mol_type = other DNA
caccacagcgagcggagcgg

SEQ ID NO: 13722 - DNA, 20 bp, synthetic construct
  source 1..20: mol_type = other DNA
caggtccggcgggcgcgagg

SEQ ID NO: 13723 - DNA, 20 bp, synthetic construct
  source 1..20: mol_type = other DNA
gcggcggcgcgtggcaggtc

SEQ ID NO: 13724 - DNA, 20 bp, synthetic construct
  source 1..20: mol_type = other DNA
tggcaggtccggcgggcgcg

SEQ ID NO: 13725 - DNA, 20 bp, synthetic construct
  source 1..20: mol_type = other DNA
tgtggtgcgcgcggtggcgg

SEQ ID NO: 13726 - DNA, 20 bp, synthetic construct
  source 1..20: mol_type = other DNA
gtccggcgggcgcgaggcgg

SEQ ID NO: 13727 - DNA, 20 bp, synthetic construct
  source 1..20: mol_type = other DNA
ggtgcgcgcggtggcggtgg

SEQ ID NO: 13728 - DNA, 20 bp, synthetic construct
  source 1..20: mol_type = other DNA
cggcgggcgcgaggcggcgg

SEQ ID NO: 13729 - DNA, 20 bp, synthetic construct
  source 1..20: mol_type = other DNA
gcgcgcggtggcggtggcgg

SEQ ID NO: 13730 - DNA, 20 bp, synthetic construct
  source 1..20: mol_type = other DNA
ggcacgggccgggtacccgt

SEQ ID NO: 13731 - DNA, 20 bp, synthetic construct
  source 1..20: mol_type = other DNA
ggtcgcaggtcacttgcttg

SEQ ID NO: 13732 - DNA, 20 bp, synthetic construct
  source 1..20: mol_type = other DNA
ccacctctggatgccgccga

SEQ ID NO: 13733 - DNA, 20 bp, synthetic construct
  source 1..20: mol_type = other DNA
ccgtcggcggcatccagagg

SEQ ID NO: 13734 - DNA, 20 bp, synthetic construct
  source 1..20: mol_type = other DNA
ggcatccagaggtggtcgtg

SEQ ID NO: 13735 - DNA, 20 bp, synthetic construct
  source 1..20: mol_type = other DNA
tacccgtcggcggcatccag

SEQ ID NO: 13736 - DNA, 20 bp, synthetic construct
  source 1..20: mol_type = other DNA
gcgcatgcgccactgcaggc

SEQ ID NO: 13737 - DNA, 20 bp, synthetic construct
  source 1..20: mol_type = other DNA
acgggccgggtacccgtcgg

SEQ ID NO: 13738 - DNA, 20 bp, synthetic construct
  source 1..20: mol_type = other DNA
cgcgaaccgccagcctgcag

SEQ ID NO: 13739 - DNA, 20 bp, synthetic construct
  source 1..20: mol_type = other DNA
ctggtgccggcctaaggagg

SEQ ID NO: 13740 - DNA, 20 bp, synthetic construct
  source 1..20: mol_type = other DNA
ctgctggtgccggcctaagg

SEQ ID NO: 13741 - DNA, 20 bp, synthetic construct
  source 1..20: mol_type = other DNA
catgcgccactgcaggctgg

SEQ ID NO: 13742 - DNA, 20 bp, synthetic construct
  source 1..20: mol_type = other DNA
cagcagaagccgggcgagcg

SEQ ID NO: 13743 - DNA, 20 bp, synthetic construct
  source 1..20: mol_type = other DNA
tgccggcctaaggaggaggc

SEQ ID NO: 13744 - DNA, 20 bp, synthetic construct
  source 1..20: mol_type = other DNA
aggccggcaccagcagaagc

SEQ ID NO: 13745 - DNA, 20 bp, synthetic construct
  source 1..20: mol_type = other DNA
gcagagagaaagtctccagg

SEQ ID NO: 13746 - DNA, 20 bp, synthetic construct
  source 1..20: mol_type = other DNA
gcttgggatagagagaaacc

SEQ ID NO: 13747 - DNA, 20 bp, synthetic construct
  source 1..20: mol_type = other DNA
gaggaccgctccccaaaccc

SEQ ID NO: 13748 - DNA, 20 bp, synthetic construct
  source 1..20: mol_type = other DNA
agcgctcagcgtctagtctg

SEQ ID NO: 13749 - DNA, 20 bp, synthetic construct
  source 1..20: mol_type = other DNA
cggcggttccacccgcagag

SEQ ID NO: 13750 - DNA, 20 bp, synthetic construct
  source 1..20: mol_type = other DNA
gttaagcaattctgacccac

SEQ ID NO: 13751 - DNA, 20 bp, synthetic construct
  source 1..20: mol_type = other DNA
gggtcagaattgcttaacct

SEQ ID NO: 13752 - DNA, 20 bp, synthetic construct
  source 1..20: mol_type = other DNA
cttgcagagagaaagtctcc

SEQ ID NO: 13753 - DNA, 20 bp, synthetic construct
  source 1..20: mol_type = other DNA
acgcggcgccgctctgcggg

SEQ ID NO: 13754 - DNA, 20 bp, synthetic construct
  source 1..20: mol_type = other DNA
ccgaggccgggagcgcgcgg

SEQ ID NO: 13755 - DNA, 20 bp, synthetic construct
  source 1..20: mol_type = other DNA
cgggacgcggcgccgctctg

SEQ ID NO: 13756 - DNA, 20 bp, synthetic construct
  source 1..20: mol_type = other DNA
gggacgcggcgccgctctgc

SEQ ID NO: 13757 - DNA, 20 bp, synthetic construct
  source 1..20: mol_type = other DNA
gcgccgcgtcccggctgcgt

SEQ ID NO: 13758 - DNA, 20 bp, synthetic construct
  source 1..20: mol_type = other DNA
cttgggatagagagaaacca

SEQ ID NO: 13759 - DNA, 20 bp, synthetic construct
  source 1..20: mol_type = other DNA
atagagagaaaccagggttt

SEQ ID NO: 13760 - DNA, 20 bp, synthetic construct
  source 1..20: mol_type = other DNA
ccagtgagtcatccagagta

SEQ ID NO: 13761 - DNA, 20 bp, synthetic construct
  source 1..20: mol_type = other DNA
tgctagtcagacaagtgaca

SEQ ID NO: 13762 - DNA, 20 bp, synthetic construct
  source 1..20: mol_type = other DNA
tgagtcatccagagtaaggt

SEQ ID NO: 13763 - DNA, 20 bp, synthetic construct
  source 1..20: mol_type = other DNA
tggtctaggtttcctaggct

SEQ ID NO: 13764 - DNA, 20 bp, synthetic construct
  source 1..20: mol_type = other DNA
cagtgtgtaaagctaaatga

SEQ ID NO: 13765 - DNA, 20 bp, synthetic construct
  source 1..20: mol_type = other DNA
tagctttacacactggtgtt

SEQ ID NO: 13766 - DNA, 20 bp, synthetic construct
  source 1..20: mol_type = other DNA
atcccaatacaggcatgaag

SEQ ID NO: 13767 - DNA, 20 bp, synthetic construct
  source 1..20: mol_type = other DNA
catcatttagctttacacac

SEQ ID NO: 13768 - DNA, 20 bp, synthetic construct
  source 1..20: mol_type = other DNA
ttgctagtcagacaagtgac

SEQ ID NO: 13769 - DNA, 20 bp, synthetic construct
  source 1..20: mol_type = other DNA
ttcgtgttcctaccttactc

SEQ ID NO: 13770 - DNA, 20 bp, synthetic construct
  source 1..20: mol_type = other DNA
taggtgccaaatcccaatac

SEQ ID NO: 13771 - DNA, 20 bp, synthetic construct
  source 1..20: mol_type = other DNA
ggccacttcatgcctgtatt

SEQ ID NO: 13772 - DNA, 20 bp, synthetic construct
  source 1..20: mol_type = other DNA
ttcatgcctgtattgggatt

SEQ ID NO: 13773 - DNA, 20 bp, synthetic construct
  source 1..20: mol_type = other DNA
gtcagacaagtgacagggaa

SEQ ID NO: 13774 - DNA, 20 bp, synthetic construct
  source 1..20: mol_type = other DNA
tggccacttcatgcctgtat

SEQ ID NO: 13775 - DNA, 20 bp, synthetic construct
  source 1..20: mol_type = other DNA
gcaaggaggatgctcaagac

SEQ ID NO: 13776 - DNA, 20 bp, synthetic construct
  source 1..20: mol_type = other DNA
gagtcttctgagagtagggt

SEQ ID NO: 13777 - DNA, 20 bp, synthetic construct
  source 1..20: mol_type = other DNA
gctgccagggtccctgaaga

SEQ ID NO: 13778 - DNA, 20 bp, synthetic construct
  source 1..20: mol_type = other DNA
gagggaagacacgcggaaac

SEQ ID NO: 13779 - DNA, 20 bp, synthetic construct
  source 1..20: mol_type = other DNA
actcagcaggcctggcaagg

SEQ ID NO: 13780 - DNA, 20 bp, synthetic construct
  source 1..20: mol_type = other DNA
ccctgaagagggaagacacg

SEQ ID NO: 13781 - DNA, 20 bp, synthetic construct
  source 1..20: mol_type = other DNA
aaggaggatgctcaagacag

SEQ ID NO: 13782 - DNA, 20 bp, synthetic construct
  source 1..20: mol_type = other DNA
aagactcagcaggcctggca

SEQ ID NO: 13783 - DNA, 20 bp, synthetic construct
  source 1..20: mol_type = other DNA
tttgctctcagatgctgcca

SEQ ID NO: 13784 - DNA, 20 bp, synthetic construct
  source 1..20: mol_type = other DNA
caaggaggatgctcaagaca

SEQ ID NO: 13785 - DNA, 20 bp, synthetic construct
  source 1..20: mol_type = other DNA
ccgcgtgtcttccctcttca

SEQ ID NO: 13786 - DNA, 20 bp, synthetic construct
  source 1..20: mol_type = other DNA
tccgcgtgtcttccctcttc

SEQ ID NO: 13787 - DNA, 20 bp, synthetic construct
  source 1..20: mol_type = other DNA
tcttccctcttcagggaccc

SEQ ID NO: 13788 - DNA, 20 bp, synthetic construct
  source 1..20: mol_type = other DNA
ctgctgagtcttctgagagt

SEQ ID NO: 13789 - DNA, 20 bp, synthetic construct
  source 1..20: mol_type = other DNA
tgctgccagggtccctgaag

SEQ ID NO: 13790 - DNA, 20 bp, synthetic construct
  source 1..20: mol_type = other DNA
gggacggcgtagctcgcggg

SEQ ID NO: 13791 - DNA, 20 bp, synthetic construct
  source 1..20: mol_type = other DNA
aggagggacggcgtagctcg

SEQ ID NO: 13792 - DNA, 20 bp, synthetic construct
  source 1..20: mol_type = other DNA
cgtagctcgcgggaggacca

SEQ ID NO: 13793 - DNA, 20 bp, synthetic construct
  source 1..20: mol_type = other DNA
acttacacgctcggcagctg

SEQ ID NO: 13794 - DNA, 20 bp, synthetic construct
  source 1..20: mol_type = other DNA
ttacacgctcggcagctgcg

SEQ ID NO: 13795 - DNA, 20 bp, synthetic construct
  source 1..20: mol_type = other DNA
cgccgcccgcggagccacca

SEQ ID NO: 13796 - DNA, 20 bp, synthetic construct
  source 1..20: mol_type = other DNA
cagcagccggccctcggccg

SEQ ID NO: 13797 - DNA, 20 bp, synthetic construct
  source 1..20: mol_type = other DNA
cgcggagccaccacggccga

SEQ ID NO: 13798 - DNA, 20 bp, synthetic construct
  source 1..20: mol_type = other DNA
gagccaccacggccgagggc

SEQ ID NO: 13799 - DNA, 20 bp, synthetic construct
  source 1..20: mol_type = other DNA
cctcggccgtggtggctccg

SEQ ID NO: 13800 - DNA, 20 bp, synthetic construct
  source 1..20: mol_type = other DNA
cagccggccctcggccgtgg

SEQ ID NO: 13801 - DNA, 20 bp, synthetic construct
  source 1..20: mol_type = other DNA
gggcggcgcgccggagagcg

SEQ ID NO: 13802 - DNA, 20 bp, synthetic construct
  source 1..20: mol_type = other DNA
gctctccggcgcgccgcccg

SEQ ID NO: 13803 - DNA, 20 bp, synthetic construct
  source 1..20: mol_type = other DNA
gcgccggagagcgtggctgc

SEQ ID NO: 13804 - DNA, 20 bp, synthetic construct
  source 1..20: mol_type = other DNA
ggaccgcggcgcccagcagc

SEQ ID NO: 13805 - DNA, 20 bp, synthetic construct
  source 1..20: mol_type = other DNA
agaaaatagaggaatagcgg

SEQ ID NO: 13806 - DNA, 20 bp, synthetic construct
  source 1..20: mol_type = other DNA
gaatagcgggggatcatgga

SEQ ID NO: 13807 - DNA, 20 bp, synthetic construct
  source 1..20: mol_type = other DNA
ggaatagcgggggatcatgg

SEQ ID NO: 13808 - DNA, 20 bp, synthetic construct
  source 1..20: mol_type = other DNA
gcaggaattcagctgctgga

SEQ ID NO: 13809 - DNA, 20 bp, synthetic construct
  source 1..20: mol_type = other DNA
aagaaaatagaggaatagcg

SEQ ID NO: 13810 - DNA, 20 bp, synthetic construct
  source 1..20: mol_type = other DNA
gtccgaggaaaagaaaatag

SEQ ID NO: 13811 - DNA, 20 bp, synthetic construct
  source 1..20: mol_type = other DNA
ggcggttcgtcctgctctgg

SEQ ID NO: 13812 - DNA, 20 bp, synthetic construct
  source 1..20: mol_type = other DNA
ggttcgtcctgctctggcgg

SEQ ID NO: 13813 - DNA, 20 bp, synthetic construct
  source 1..20: mol_type = other DNA
aggaattcagctgctggagg

SEQ ID NO: 13814 - DNA, 20 bp, synthetic construct
  source 1..20: mol_type = other DNA
ggaattcagctgctggaggg

SEQ ID NO: 13815 - DNA, 20 bp, synthetic construct
  source 1..20: mol_type = other DNA
ggagggaggagattctgggg

SEQ ID NO: 13816 - DNA, 20 bp, synthetic construct
  source 1..20: mol_type = other DNA
tgcaggaattcagctgctgg

SEQ ID NO: 13817 - DNA, 20 bp, synthetic construct
  source 1..20: mol_type = other DNA
caggaattcagctgctggag

SEQ ID NO: 13818 - DNA, 20 bp, synthetic construct
  source 1..20: mol_type = other DNA
tcagcagccgccgccagagc

SEQ ID NO: 13819 - DNA, 20 bp, synthetic construct
  source 1..20: mol_type = other DNA
gctgctggaggggggcgtgt

SEQ ID NO: 13820 - DNA, 20 bp, synthetic construct
  source 1..20: mol_type = other DNA
ggagacagaaagagcgagcg

SEQ ID NO: 13821 - DNA, 20 bp, synthetic construct
  source 1..20: mol_type = other DNA
gcgtcggagctgcccgctgt

SEQ ID NO: 13822 - DNA, 20 bp, synthetic construct
  source 1..20: mol_type = other DNA
gaggaggagaaagagagcga

SEQ ID NO: 13823 - DNA, 20 bp, synthetic construct
  source 1..20: mol_type = other DNA
gtgagcgagagcgagaagga

SEQ ID NO: 13824 - DNA, 20 bp, synthetic construct
  source 1..20: mol_type = other DNA
gtctcctctctctcccacag

SEQ ID NO: 13825 - DNA, 20 bp, synthetic construct
  source 1..20: mol_type = other DNA
ggagagagctggagagagca

SEQ ID NO: 13826 - DNA, 20 bp, synthetic construct
  source 1..20: mol_type = other DNA
agaggaggagaaagagagcg

SEQ ID NO: 13827 - DNA, 20 bp, synthetic construct
  source 1..20: mol_type = other DNA
gagcgagaaggagggagagg

SEQ ID NO: 13828 - DNA, 20 bp, synthetic construct
  source 1..20: mol_type = other DNA
agtgagcgagagcgagaagg

SEQ ID NO: 13829 - DNA, 20 bp, synthetic construct
  source 1..20: mol_type = other DNA
aggagaaagagagcgagggc

SEQ ID NO: 13830 - DNA, 20 bp, synthetic construct
  source 1..20: mol_type = other DNA
gggagagagctggagagagc

SEQ ID NO: 13831 - DNA, 20 bp, synthetic construct
  source 1..20: mol_type = other DNA
tggagagagcagggagaggg

SEQ ID NO: 13832 - DNA, 20 bp, synthetic construct
  source 1..20: mol_type = other DNA
agctggagagagcagggaga

SEQ ID NO: 13833 - DNA, 20 bp, synthetic construct
  source 1..20: mol_type = other DNA
gaaagagagcgagggcgggc

SEQ ID NO: 13834 - DNA, 20 bp, synthetic construct
  source 1..20: mol_type = other DNA
gagctggagagagcagggag

SEQ ID NO: 13835 - DNA, 20 bp, synthetic construct
  source 1..20: mol_type = other DNA
ctccaggaacgcttcgagca

SEQ ID NO: 13836 - DNA, 20 bp, synthetic construct
  source 1..20: mol_type = other DNA
agaatggctagggtcctctg

SEQ ID NO: 13837 - DNA, 20 bp, synthetic construct
  source 1..20: mol_type = other DNA
gggcgcacagagaatggcta

SEQ ID NO: 13838 - DNA, 20 bp, synthetic construct
  source 1..20: mol_type = other DNA
agggcgcacagagaatggct

SEQ ID NO: 13839 - DNA, 20 bp, synthetic construct
  source 1..20: mol_type = other DNA
cagagagtggaaaacagcag

SEQ ID NO: 13840 - DNA, 20 bp, synthetic construct
  source 1..20: mol_type = other DNA
gctggccctgtcttcacctg

SEQ ID NO: 13841 - DNA, 20 bp, synthetic construct
  source 1..20: mol_type = other DNA
tagagctccatcctccccag

SEQ ID NO: 13842 - DNA, 20 bp, synthetic construct
  source 1..20: mol_type = other DNA
ggccctgtcttcacctgtgg

SEQ ID NO: 13843 - DNA, 20 bp, synthetic construct
  source 1..20: mol_type = other DNA
atggctagggtcctctgggg

SEQ ID NO: 13844 - DNA, 20 bp, synthetic construct
  source 1..20: mol_type = other DNA
agagaatggctagggtcctc

SEQ ID NO: 13845 - DNA, 20 bp, synthetic construct
  source 1..20: mol_type = other DNA
gagcccaagctctcctccac

SEQ ID NO: 13846 - DNA, 20 bp, synthetic construct
  source 1..20: mol_type = other DNA
tcacctgtggaggagagctt

SEQ ID NO: 13847 - DNA, 20 bp, synthetic construct
  source 1..20: mol_type = other DNA
aggaggctcagcacagagag

SEQ ID NO: 13848 - DNA, 20 bp, synthetic construct
  source 1..20: mol_type = other DNA
caggtgaagacagggccagc

SEQ ID NO: 13849 - DNA, 20 bp, synthetic construct
  source 1..20: mol_type = other DNA
ctcctccacaggtgaagaca

SEQ ID NO: 13850 - DNA, 20 bp, synthetic construct
  source 1..20: mol_type = other DNA
tgactgcagatcgctggtga

SEQ ID NO: 13851 - DNA, 20 bp, synthetic construct
  source 1..20: mol_type = other DNA
ggcttcgttcgtaaggaagg

SEQ ID NO: 13852 - DNA, 20 bp, synthetic construct
  source 1..20: mol_type = other DNA
gggcttcgttcgtaaggaag

SEQ ID NO: 13853 - DNA, 20 bp, synthetic construct
  source 1..20: mol_type = other DNA
gagcccatgttcccgccagg

SEQ ID NO: 13854 - DNA, 20 bp, synthetic construct
  source 1..20: mol_type = other DNA
accagcgatctgcagtcagt

SEQ ID NO: 13855 - DNA, 20 bp, synthetic construct
  source 1..20: mol_type = other DNA
ctgactgcagatcgctggtg

SEQ ID NO: 13856 - DNA, 20 bp, synthetic construct
  source 1..20: mol_type = other DNA
gactgcagatcgctggtgag

SEQ ID NO: 13857 - DNA, 20 bp, synthetic construct
  source 1..20: mol_type = other DNA
caggcgggcgtcgggctagt

SEQ ID NO: 13858 - DNA, 20 bp, synthetic construct
  source 1..20: mol_type = other DNA
accaactgactgcagatcgc

SEQ ID NO: 13859 - DNA, 20 bp, synthetic construct
  source 1..20: mol_type = other DNA
ctagcccgacgcccgcctgg

SEQ ID NO: 13860 - DNA, 20 bp, synthetic construct
  source 1..20: mol_type = other DNA
gccttccacgaccctctagc

SEQ ID NO: 13861 - DNA, 20 bp, synthetic construct
  source 1..20: mol_type = other DNA
gacacagcaggagcgacccc

SEQ ID NO: 13862 - DNA, 20 bp, synthetic construct
  source 1..20: mol_type = other DNA
gaacaccgcgcgcgacgtgc

SEQ ID NO: 13863 - DNA, 20 bp, synthetic construct
  source 1..20: mol_type = other DNA
gtcgggctagtgggcaggcg

SEQ ID NO: 13864 - DNA, 20 bp, synthetic construct
  source 1..20: mol_type = other DNA
cgggcgtcgggctagtgggc

SEQ ID NO: 13865 - DNA, 20 bp, synthetic construct
  source 1..20: mol_type = other DNA
cactcgatcacacccgccga

SEQ ID NO: 13866 - DNA, 20 bp, synthetic construct
  source 1..20: mol_type = other DNA
actcgatcacacccgccgag

SEQ ID NO: 13867 - DNA, 20 bp, synthetic construct
  source 1..20: mol_type = other DNA
ccactcgatcacacccgccg

SEQ ID NO: 13868 - DNA, 20 bp, synthetic construct
  source 1..20: mol_type = other DNA
ggcggcggcgcggagaacaa

SEQ ID NO: 13869 - DNA, 20 bp, synthetic construct
  source 1..20: mol_type = other DNA
cggcggcgcggagaacaagg

SEQ ID NO: 13870 - DNA, 20 bp, synthetic construct
  source 1..20: mol_type = other DNA
cctcggcgggtgtgatcgag

SEQ ID NO: 13871 - DNA, 20 bp, synthetic construct
  source 1..20: mol_type = other DNA
gggcgctaggcgatgaggcg

SEQ ID NO: 13872 - DNA, 20 bp, synthetic construct
  source 1..20: mol_type = other DNA
cgatcacacccgccgagggg

SEQ ID NO: 13873 - DNA, 20 bp, synthetic construct
  source 1..20: mol_type = other DNA
gaggggggcgctaggcgatg

SEQ ID NO: 13874 - DNA, 20 bp, synthetic construct
  source 1..20: mol_type = other DNA
gaggcggcggcgactgaggg

SEQ ID NO: 13875 - DNA, 20 bp, synthetic construct
  source 1..20: mol_type = other DNA
cccgcccctcctcccctcgg

SEQ ID NO: 13876 - DNA, 20 bp, synthetic construct
  source 1..20: mol_type = other DNA
cggaggcggcggcgactgag

SEQ ID NO: 13877 - DNA, 20 bp, synthetic construct
  source 1..20: mol_type = other DNA
gcggaggcggcggcgactga

SEQ ID NO: 13878 - DNA, 20 bp, synthetic construct
  source 1..20: mol_type = other DNA
tcgccgccgcctccgcccgc

SEQ ID NO: 13879 - DNA, 20 bp, synthetic construct
  source 1..20: mol_type = other DNA
ggaggcggcggcgactgagg

SEQ ID NO: 13880 - DNA, 20 bp, synthetic construct
  source 1..20: mol_type = other DNA
gccgcttccccaggaaaacg

SEQ ID NO: 13881 - DNA, 20 bp, synthetic construct
  source 1..20: mol_type = other DNA
ccgagctccagacacaaagg

SEQ ID NO: 13882 - DNA, 20 bp, synthetic construct
  source 1..20: mol_type = other DNA
gcccactgacccccgcagcg

SEQ ID NO: 13883 - DNA, 20 bp, synthetic construct
  source 1..20: mol_type = other DNA
gcgcccactgacccccgcag

SEQ ID NO: 13884 - DNA, 20 bp, synthetic construct
  source 1..20: mol_type = other DNA
gagctccagacacaaaggcg

SEQ ID NO: 13885 - DNA, 20 bp, synthetic construct
  source 1..20: mol_type = other DNA
cgcccgagctccagacacaa

SEQ ID NO: 13886 - DNA, 20 bp, synthetic construct
  source 1..20: mol_type = other DNA
cccactgacccccgcagcgg

SEQ ID NO: 13887 - DNA, 20 bp, synthetic construct
  source 1..20: mol_type = other DNA
cgagcaggaagcgagcccgg

SEQ ID NO: 13888 - DNA, 20 bp, synthetic construct
  source 1..20: mol_type = other DNA
ccccaggaaaacgcggccgc

SEQ ID NO: 13889 - DNA, 20 bp, synthetic construct
  source 1..20: mol_type = other DNA
ctcctcctcccccgctgcgg

SEQ ID NO: 13890 - DNA, 20 bp, synthetic construct
  source 1..20: mol_type = other DNA
tgcggcgcaggaagccgagc

SEQ ID NO: 13891 - DNA, 20 bp, synthetic construct
  source 1..20: mol_type = other DNA
aggaggagggactgcggcgc

SEQ ID NO: 13892 - DNA, 20 bp, synthetic construct
  source 1..20: mol_type = other DNA
cctcctcctcccccgctgcg

SEQ ID NO: 13893 - DNA, 20 bp, synthetic construct
  source 1..20: mol_type = other DNA
accccgcccgccgcttcccc

SEQ ID NO: 13894 - DNA, 20 bp, synthetic construct
  source 1..20: mol_type = other DNA
tccctcctcctcccccgctg

SEQ ID NO: 13895 - DNA, 20 bp, synthetic construct
  source 1..20: mol_type = other DNA
ccggaacccaagcgcagagt

SEQ ID NO: 13896 - DNA, 20 bp, synthetic construct
  source 1..20: mol_type = other DNA
gcgacaggcacaaagtcacg

SEQ ID NO: 13897 - DNA, 20 bp, synthetic construct
  source 1..20: mol_type = other DNA
aaacactaccgcagtctcag

SEQ ID NO: 13898 - DNA, 20 bp, synthetic construct
  source 1..20: mol_type = other DNA
tcacggggtaatgaacttcg

SEQ ID NO: 13899 - DNA, 20 bp, synthetic construct
  source 1..20: mol_type = other DNA
agcgacaggcacaaagtcac

SEQ ID NO: 13900 - DNA, 20 bp, synthetic construct
  source 1..20: mol_type = other DNA
atctccagaagcgctctgac

SEQ ID NO: 13901 - DNA, 20 bp, synthetic construct
  source 1..20: mol_type = other DNA
cgctctgacaggcagccgcg

SEQ ID NO: 13902 - DNA, 20 bp, synthetic construct
  source 1..20: mol_type = other DNA
gcgcttctggagatattaca

SEQ ID NO: 13903 - DNA, 20 bp, synthetic construct
  source 1..20: mol_type = other DNA
gggacccagcccgcagcgac

SEQ ID NO: 13904 - DNA, 20 bp, synthetic construct
  source 1..20: mol_type = other DNA
acgccctattcccctccccg

SEQ ID NO: 13905 - DNA, 20 bp, synthetic construct
  source 1..20: mol_type = other DNA
agcgctctgacaggcagccg

SEQ ID NO: 13906 - DNA, 20 bp, synthetic construct
  source 1..20: mol_type = other DNA
gcgctctgacaggcagccgc

SEQ ID NO: 13907 - DNA, 20 bp, synthetic construct
  source 1..20: mol_type = other DNA
cagcgacaggcacaaagtca

SEQ ID NO: 13908 - DNA, 20 bp, synthetic construct
  source 1..20: mol_type = other DNA
tctgacaggcagccgcgggg

SEQ ID NO: 13909 - DNA, 20 bp, synthetic construct
  source 1..20: mol_type = other DNA
cgcttctggagatattacag

SEQ ID NO: 13910 - DNA, 20 bp, synthetic construct
  source 1..20: mol_type = other DNA
gtggttgggtggtaagatgg

SEQ ID NO: 13911 - DNA, 20 bp, synthetic construct
  source 1..20: mol_type = other DNA
aaggtgccggcgcttgcgag

SEQ ID NO: 13912 - DNA, 20 bp, synthetic construct
  source 1..20: mol_type = other DNA
cgcttgcgagcggcgccagg

SEQ ID NO: 13913 - DNA, 20 bp, synthetic construct
  source 1..20: mol_type = other DNA
acccaaccaccgccgacgca

SEQ ID NO: 13914 - DNA, 20 bp, synthetic construct
  source 1..20: mol_type = other DNA
tgcggctcggcgacttggtg

SEQ ID NO: 13915 - DNA, 20 bp, synthetic construct
  source 1..20: mol_type = other DNA
cttggtgtggtgagtccgag

SEQ ID NO: 13916 - DNA, 20 bp, synthetic construct
  source 1..20: mol_type = other DNA
ctggcgccgctcgcaagcgc

SEQ ID NO: 13917 - DNA, 20 bp, synthetic construct
  source 1..20: mol_type = other DNA
agatggcggctgtgagtctg

SEQ ID NO: 13918 - DNA, 20 bp, synthetic construct
  source 1..20: mol_type = other DNA
gaaggggcagtccagtcccg

SEQ ID NO: 13919 - DNA, 20 bp, synthetic construct
  source 1..20: mol_type = other DNA
actggactgccccttccgcc

SEQ ID NO: 13920 - DNA, 20 bp, synthetic construct
  source 1..20: mol_type = other DNA
ggcggcccgtgcgtcggcgg

SEQ ID NO: 13921 - DNA, 20 bp, synthetic construct
  source 1..20: mol_type = other DNA
gtgcgtcggcggtggttggg

SEQ ID NO: 13922 - DNA, 20 bp, synthetic construct
  source 1..20: mol_type = other DNA
cccggcggcccgtgcgtcgg

SEQ ID NO: 13923 - DNA, 20 bp, synthetic construct
  source 1..20: mol_type = other DNA
gcggtggttgggtggtaaga

SEQ ID NO: 13924 - DNA, 20 bp, synthetic construct
  source 1..20: mol_type = other DNA
gcggctgtgagtctgcggct

SEQ ID NO: 13925 - DNA, 20 bp, synthetic construct
  source 1..20: mol_type = other DNA
cgaggacccagcctgcacgg

SEQ ID NO: 13926 - DNA, 20 bp, synthetic construct
  source 1..20: mol_type = other DNA
gccatgcaggcccacgtggt

SEQ ID NO: 13927 - DNA, 20 bp, synthetic construct
  source 1..20: mol_type = other DNA
acgcgaggacccagcctgca

SEQ ID NO: 13928 - DNA, 20 bp, synthetic construct
  source 1..20: mol_type = other DNA
cccgctggcacctaccacgt

SEQ ID NO: 13929 - DNA, 20 bp, synthetic construct
  source 1..20: mol_type = other DNA
aggacccagcctgcacggcg

SEQ ID NO: 13930 - DNA, 20 bp, synthetic construct
  source 1..20: mol_type = other DNA
gcccacgtggtaggtgccag

SEQ ID NO: 13931 - DNA, 20 bp, synthetic construct
  source 1..20: mol_type = other DNA
ccaggccatgcaggcccacg

SEQ ID NO: 13932 - DNA, 20 bp, synthetic construct
  source 1..20: mol_type = other DNA
gagcagcccttaggccccgc

SEQ ID NO: 13933 - DNA, 20 bp, synthetic construct
  source 1..20: mol_type = other DNA
ccacgtggtaggtgccagcg

SEQ ID NO: 13934 - DNA, 20 bp, synthetic construct
  source 1..20: mol_type = other DNA
cgctcgggattggagcccgc

SEQ ID NO: 13935 - DNA, 20 bp, synthetic construct
  source 1..20: mol_type = other DNA
tgagcagcccttaggccccg

SEQ ID NO: 13936 - DNA, 20 bp, synthetic construct
  source 1..20: mol_type = other DNA
cgaggagagccaggccatgc

SEQ ID NO: 13937 - DNA, 20 bp, synthetic construct
  source 1..20: mol_type = other DNA
gcgagagaggactggagggc

SEQ ID NO: 13938 - DNA, 20 bp, synthetic construct
  source 1..20: mol_type = other DNA
cgtggtaggtgccagcgggg

SEQ ID NO: 13939 - DNA, 20 bp, synthetic construct
  source 1..20: mol_type = other DNA
agcgagagaggactggaggg

SEQ ID NO: 13940 - DNA, 20 bp, synthetic construct
  source 1..20: mol_type = other DNA
tgggggagcgagttacagag

SEQ ID NO: 13941 - DNA, 20 bp, synthetic construct
  source 1..20: mol_type = other DNA
aaagaagattaaagagcgcg

SEQ ID NO: 13942 - DNA, 20 bp, synthetic construct
  source 1..20: mol_type = other DNA
gccttctgccgaagaagtag

SEQ ID NO: 13943 - DNA, 20 bp, synthetic construct
  source 1..20: mol_type = other DNA
gaagattaaagagcgcgagg

SEQ ID NO: 13944 - DNA, 20 bp, synthetic construct
  source 1..20: mol_type = other DNA
gttacagagcggcgagccag

SEQ ID NO: 13945 - DNA, 20 bp, synthetic construct
  source 1..20: mol_type = other DNA
gggccttctgccgaagaagt

SEQ ID NO: 13946 - DNA, 20 bp, synthetic construct
  source 1..20: mol_type = other DNA
ttctgccgaagaagtagggg

SEQ ID NO: 13947 - DNA, 20 bp, synthetic construct
  source 1..20: mol_type = other DNA
tctgccgaagaagtaggggc

SEQ ID NO: 13948 - DNA, 20 bp, synthetic construct
  source 1..20: mol_type = other DNA
gcgcgcgctcatccagctca

SEQ ID NO: 13949 - DNA, 20 bp, synthetic construct
  source 1..20: mol_type = other DNA
tcatccagctcagggcccgc

SEQ ID NO: 13950 - DNA, 20 bp, synthetic construct
  source 1..20: mol_type = other DNA
gcggcgggactgggaaggag

SEQ ID NO: 13951 - DNA, 20 bp, synthetic construct
  source 1..20: mol_type = other DNA
cgagccagcgggccctgagc

SEQ ID NO: 13952 - DNA, 20 bp, synthetic construct
  source 1..20: mol_type = other DNA
gccgaagaagtaggggcggg

SEQ ID NO: 13953 - DNA, 20 bp, synthetic construct
  source 1..20: mol_type = other DNA
ggggggaagtttaggagttg

SEQ ID NO: 13954 - DNA, 20 bp, synthetic construct
  source 1..20: mol_type = other DNA
ggggagcggggtggggttgg

SEQ ID NO: 13955 - DNA, 20 bp, synthetic construct
  source 1..20: mol_type = other DNA
tggagccgcctccggaagag

SEQ ID NO: 13956 - DNA, 20 bp, synthetic construct
  source 1..20: mol_type = other DNA
ggctccctccgaggtccccg

SEQ ID NO: 13957 - DNA, 20 bp, synthetic construct
  source 1..20: mol_type = other DNA
ggcttcgggtgagagcctgg

SEQ ID NO: 13958 - DNA, 20 bp, synthetic construct
  source 1..20: mol_type = other DNA
ggacctcggagggagcccgg

SEQ ID NO: 13959 - DNA, 20 bp, synthetic construct
  source 1..20: mol_type = other DNA
gagaccgcggggacctcgga

SEQ ID NO: 13960 - DNA, 20 bp, synthetic construct
  source 1..20: mol_type = other DNA
ggccgggcccctcgagcctg

SEQ ID NO: 13961 - DNA, 20 bp, synthetic construct
  source 1..20: mol_type = other DNA
aagaggggaccggagaccgc

SEQ ID NO: 13962 - DNA, 20 bp, synthetic construct
  source 1..20: mol_type = other DNA
aggctctcacccgaagccgc

SEQ ID NO: 13963 - DNA, 20 bp, synthetic construct
  source 1..20: mol_type = other DNA
gagagcctgggggacgccga

SEQ ID NO: 13964 - DNA, 20 bp, synthetic construct
  source 1..20: mol_type = other DNA
aggccctccccaggctcgag

SEQ ID NO: 13965 - DNA, 20 bp, synthetic construct
  source 1..20: mol_type = other DNA
agaggggaccggagaccgcg

SEQ ID NO: 13966 - DNA, 20 bp, synthetic construct
  source 1..20: mol_type = other DNA
aagccgccgggctccctccg

SEQ ID NO: 13967 - DNA, 20 bp, synthetic construct
  source 1..20: mol_type = other DNA
ggagaccgcggggacctcgg

SEQ ID NO: 13968 - DNA, 20 bp, synthetic construct
  source 1..20: mol_type = other DNA
tgagagcctgggggacgccg

SEQ ID NO: 13969 - DNA, 20 bp, synthetic construct
  source 1..20: mol_type = other DNA
cccggccctcggcgtccccc

SEQ ID NO: 13970 - DNA, 20 bp, synthetic construct
  source 1..20: mol_type = other DNA
ggacgccgcgcggaaaaggt

SEQ ID NO: 13971 - DNA, 20 bp, synthetic construct
  source 1..20: mol_type = other DNA
cacgcccggcacaaaggtcc

SEQ ID NO: 13972 - DNA, 20 bp, synthetic construct
  source 1..20: mol_type = other DNA
gctgttccgcgactcccgct

SEQ ID NO: 13973 - DNA, 20 bp, synthetic construct
  source 1..20: mol_type = other DNA
ccccagcccccaaccgctgg

SEQ ID NO: 13974 - DNA, 20 bp, synthetic construct
  source 1..20: mol_type = other DNA
gagaggcccagcgggagtcg

SEQ ID NO: 13975 - DNA, 20 bp, synthetic construct
  source 1..20: mol_type = other DNA
acgccgcgcggaaaaggtag

SEQ ID NO: 13976 - DNA, 20 bp, synthetic construct
  source 1..20: mol_type = other DNA
gggcggccgccagcggttgg

SEQ ID NO: 13977 - DNA, 20 bp, synthetic construct
  source 1..20: mol_type = other DNA
ccgcgccgggacctttgtgc

SEQ ID NO: 13978 - DNA, 20 bp, synthetic construct
  source 1..20: mol_type = other DNA
agcccgcgggagaggcccag

SEQ ID NO: 13979 - DNA, 20 bp, synthetic construct
  source 1..20: mol_type = other DNA
cacccccacgcccggcacaa

SEQ ID NO: 13980 - DNA, 20 bp, synthetic construct
  source 1..20: mol_type = other DNA
ctcccgctgggcctctcccg

SEQ ID NO: 13981 - DNA, 20 bp, synthetic construct
  source 1..20: mol_type = other DNA
ctgccccagcccccaaccgc

SEQ ID NO: 13982 - DNA, 20 bp, synthetic construct
  source 1..20: mol_type = other DNA
cgcgcggaaaaggtaggggc

SEQ ID NO: 13983 - DNA, 20 bp, synthetic construct
  source 1..20: mol_type = other DNA
gccgggccccggacgccgcg

SEQ ID NO: 13984 - DNA, 20 bp, synthetic construct
  source 1..20: mol_type = other DNA
gacctttgtgccgggcgtgg

SEQ ID NO: 13985 - DNA, 20 bp, synthetic construct
  source 1..20: mol_type = other DNA
gcgcggaccctcaccttgcg

SEQ ID NO: 13986 - DNA, 20 bp, synthetic construct
  source 1..20: mol_type = other DNA
agagcgcgcgggacactccg

SEQ ID NO: 13987 - DNA, 20 bp, synthetic construct
  source 1..20: mol_type = other DNA
gcgggaggagaccaagtcgg

SEQ ID NO: 13988 - DNA, 20 bp, synthetic construct
  source 1..20: mol_type = other DNA
ggagaccaagtcggtggcga

SEQ ID NO: 13989 - DNA, 20 bp, synthetic construct
  source 1..20: mol_type = other DNA
ggagcgggccgcgcaaggtg

SEQ ID NO: 13990 - DNA, 20 bp, synthetic construct
  source 1..20: mol_type = other DNA
aggagaccaagtcggtggcg

SEQ ID NO: 13991 - DNA, 20 bp, synthetic construct
  source 1..20: mol_type = other DNA
gagcgggccgcgcaaggtga

SEQ ID NO: 13992 - DNA, 20 bp, synthetic construct
  source 1..20: mol_type = other DNA
gcaacccccggccggacgcg

SEQ ID NO: 13993 - DNA, 20 bp, synthetic construct
  source 1..20: mol_type = other DNA
accctcgccgggccccgctg

SEQ ID NO: 13994 - DNA, 20 bp, synthetic construct
  source 1..20: mol_type = other DNA
gggtccgcgcgtccggccgg

SEQ ID NO: 13995 - DNA, 20 bp, synthetic construct
  source 1..20: mol_type = other DNA
cgagagcgagcgagagcgcg

SEQ ID NO: 13996 - DNA, 20 bp, synthetic construct
  source 1..20: mol_type = other DNA
gagagcgagcgagagcgcgc

SEQ ID NO: 13997 - DNA, 20 bp, synthetic construct
  source 1..20: mol_type = other DNA
ttgcagcgcgcgccgcagcg

SEQ ID NO: 13998 - DNA, 20 bp, synthetic construct
  source 1..20: mol_type = other DNA
cgaggggagcgggccgcgca

SEQ ID NO: 13999 - DNA, 20 bp, synthetic construct
  source 1..20: mol_type = other DNA
gcagcggggcccggcgaggg

SEQ ID NO: 14000 - DNA, 20 bp, synthetic construct
  source 1..20: mol_type = other DNA
cgccgagcacgggtcacctg

SEQ ID NO: 14001 - DNA, 20 bp, synthetic construct
  source 1..20: mol_type = other DNA
gcagcccggacgccgagcac

SEQ ID NO: 14002 - DNA, 20 bp, synthetic construct
  source 1..20: mol_type = other DNA
agctccccagcaccgcacgg

SEQ ID NO: 14003 - DNA, 20 bp, synthetic construct
  source 1..20: mol_type = other DNA
gccaacatgctggccccgcg

SEQ ID NO: 14004 - DNA, 20 bp, synthetic construct
  source 1..20: mol_type = other DNA
tccgcgcggggccagcatgt

SEQ ID NO: 14005 - DNA, 20 bp, synthetic construct
  source 1..20: mol_type = other DNA
ggtcctgcagcggtggctag

SEQ ID NO: 14006 - DNA, 20 bp, synthetic construct
  source 1..20: mol_type = other DNA
tgcacctggtcctgcagcgg

SEQ ID NO: 14007 - DNA, 20 bp, synthetic construct
  source 1..20: mol_type = other DNA
gccagctccccagcaccgca

SEQ ID NO: 14008 - DNA, 20 bp, synthetic construct
  source 1..20: mol_type = other DNA
gtccccgccgtgcggtgctg

SEQ ID NO: 14009 - DNA, 20 bp, synthetic construct
  source 1..20: mol_type = other DNA
ggcgtccgggctgccgtcgg

SEQ ID NO: 14010 - DNA, 20 bp, synthetic construct
  source 1..20: mol_type = other DNA
gcgctcgcgtccccgccgtg

SEQ ID NO: 14011 - DNA, 20 bp, synthetic construct
  source 1..20: mol_type = other DNA
ctccccagcaccgcacggcg

SEQ ID NO: 14012 - DNA, 20 bp, synthetic construct
  source 1..20: mol_type = other DNA
tcggcgtccgggctgccgtc

SEQ ID NO: 14013 - DNA, 20 bp, synthetic construct
  source 1..20: mol_type = other DNA
ttgaacctcggtcggcgccc

SEQ ID NO: 14014 - DNA, 20 bp, synthetic construct
  source 1..20: mol_type = other DNA
gcacgggtcacctgcggcgc

SEQ ID NO: 14015 - DNA, 20 bp, synthetic construct
  source 1..20: mol_type = other DNA
cagccgccgaggcatcccag

SEQ ID NO: 14016 - DNA, 20 bp, synthetic construct
  source 1..20: mol_type = other DNA
cagtacagtagagtgtgcgc

SEQ ID NO: 14017 - DNA, 20 bp, synthetic construct
  source 1..20: mol_type = other DNA
gtacagtagagtgtgcgccg

SEQ ID NO: 14018 - DNA, 20 bp, synthetic construct
  source 1..20: mol_type = other DNA
ccagccgccgaggcatccca

SEQ ID NO: 14019 - DNA, 20 bp, synthetic construct
  source 1..20: mol_type = other DNA
agacaagtccgaggccccgg

SEQ ID NO: 14020 - DNA, 20 bp, synthetic construct
  source 1..20: mol_type = other DNA
tgcgggtccgagtcaaggtg

SEQ ID NO: 14021 - DNA, 20 bp, synthetic construct
  source 1..20: mol_type = other DNA
cctcccctgggatgcctcgg

SEQ ID NO: 14022 - DNA, 20 bp, synthetic construct
  source 1..20: mol_type = other DNA
ccgagtcaaggtgaggctgg

SEQ ID NO: 14023 - DNA, 20 bp, synthetic construct
  source 1..20: mol_type = other DNA
cgccgaggcatcccagggga

SEQ ID NO: 14024 - DNA, 20 bp, synthetic construct
  source 1..20: mol_type = other DNA
ggtccgagtcaaggtgaggc

SEQ ID NO: 14025 - DNA, 20 bp, synthetic construct
  source 1..20: mol_type = other DNA
ggtggtgcgggtccgagtca

SEQ ID NO: 14026 - DNA, 20 bp, synthetic construct
  source 1..20: mol_type = other DNA
gtgagtcggcccagccgccg

SEQ ID NO: 14027 - DNA, 20 bp, synthetic construct
  source 1..20: mol_type = other DNA
ccgccgaggcatcccagggg

SEQ ID NO: 14028 - DNA, 20 bp, synthetic construct
  source 1..20: mol_type = other DNA
ggtcagccgtcaccctgaga

SEQ ID NO: 14029 - DNA, 20 bp, synthetic construct
  source 1..20: mol_type = other DNA
ctgaccgttgccccccaccc

SEQ ID NO: 14030 - DNA, 20 bp, synthetic construct
  source 1..20: mol_type = other DNA
ctgtacctctcgtaccacag

SEQ ID NO: 14031 - DNA, 20 bp, synthetic construct
  source 1..20: mol_type = other DNA
tgggtacaggaacattgacc

SEQ ID NO: 14032 - DNA, 20 bp, synthetic construct
  source 1..20: mol_type = other DNA
tctgtggtacgagaggtaca

SEQ ID NO: 14033 - DNA, 20 bp, synthetic construct
  source 1..20: mol_type = other DNA
cctgtcctctgtggtacgag

SEQ ID NO: 14034 - DNA, 20 bp, synthetic construct
  source 1..20: mol_type = other DNA
tggtacgagaggtacagggg

SEQ ID NO: 14035 - DNA, 20 bp, synthetic construct
  source 1..20: mol_type = other DNA
ggtcaatgttcctgtaccca

SEQ ID NO: 14036 - DNA, 20 bp, synthetic construct
  source 1..20: mol_type = other DNA
tggaggagacctgtcctctg

SEQ ID NO: 14037 - DNA, 20 bp, synthetic construct
  source 1..20: mol_type = other DNA
ctgtggtacgagaggtacag

SEQ ID NO: 14038 - DNA, 20 bp, synthetic construct
  source 1..20: mol_type = other DNA
taacctggtcgcttagcact

SEQ ID NO: 14039 - DNA, 20 bp, synthetic construct
  source 1..20: mol_type = other DNA
cctctcgtaccacagaggac

SEQ ID NO: 14040 - DNA, 20 bp, synthetic construct
  source 1..20: mol_type = other DNA
aatgttcctgtacccatggc

SEQ ID NO: 14041 - DNA, 20 bp, synthetic construct
  source 1..20: mol_type = other DNA
acaagaccaaaggtgaggct

SEQ ID NO: 14042 - DNA, 20 bp, synthetic construct
  source 1..20: mol_type = other DNA
tccagacaagaccaaaggtg

SEQ ID NO: 14043 - DNA, 20 bp, synthetic construct
  source 1..20: mol_type = other DNA
gaatatccagacaagaccaa

SEQ ID NO: 14044 - DNA, 20 bp, synthetic construct
  source 1..20: mol_type = other DNA
ggaggtgtctggacttctgg

SEQ ID NO: 14045 - DNA, 20 bp, synthetic construct
  source 1..20: mol_type = other DNA
ggatcccgctctacaggcag

SEQ ID NO: 14046 - DNA, 20 bp, synthetic construct
  source 1..20: mol_type = other DNA
gctgtgcgcccgcctcgctg

SEQ ID NO: 14047 - DNA, 20 bp, synthetic construct
  source 1..20: mol_type = other DNA
ggggggcaactgcatcaccc

SEQ ID NO: 14048 - DNA, 20 bp, synthetic construct
  source 1..20: mol_type = other DNA
gcgaggcgggcgcacagcgc

SEQ ID NO: 14049 - DNA, 20 bp, synthetic construct
  source 1..20: mol_type = other DNA
cggagccgctgcctgtagag

SEQ ID NO: 14050 - DNA, 20 bp, synthetic construct
  source 1..20: mol_type = other DNA
tgtgcgcccgcctcgctgcg

SEQ ID NO: 14051 - DNA, 20 bp, synthetic construct
  source 1..20: mol_type = other DNA
agcgaggcgggcgcacagcg

SEQ ID NO: 14052 - DNA, 20 bp, synthetic construct
  source 1..20: mol_type = other DNA
aactgcatcaccccgggcgc

SEQ ID NO: 14053 - DNA, 20 bp, synthetic construct
  source 1..20: mol_type = other DNA
ggagccgctgcctgtagagc

SEQ ID NO: 14054 - DNA, 20 bp, synthetic construct
  source 1..20: mol_type = other DNA
gaggcgggcgcacagcgcgg

SEQ ID NO: 14055 - DNA, 20 bp, synthetic construct
  source 1..20: mol_type = other DNA
aggcgggcgcacagcgcggg

SEQ ID NO: 14056 - DNA, 20 bp, synthetic construct
  source 1..20: mol_type = other DNA
cgaggcgggcgcacagcgcg

SEQ ID NO: 14057 - DNA, 20 bp, synthetic construct
  source 1..20: mol_type = other DNA
ccccgggccccgcagcgagg

SEQ ID NO: 14058 - DNA, 20 bp, synthetic construct
  source 1..20: mol_type = other DNA
gctgcgcccgcccgcgcccg

SEQ ID NO: 14059 - DNA, 20 bp, synthetic construct
  source 1..20: mol_type = other DNA
tgcatcaccccgggcgcggg

SEQ ID NO: 14060 - DNA, 20 bp, synthetic construct
  source 1..20: mol_type = other DNA
cggtaacaaccagtcgcctg

SEQ ID NO: 14061 - DNA, 20 bp, synthetic construct
  source 1..20: mol_type = other DNA
caggcgactggttgttaccg

SEQ ID NO: 14062 - DNA, 20 bp, synthetic construct
  source 1..20: mol_type = other DNA
gttgttaccgaggaagatgg

SEQ ID NO: 14063 - DNA, 20 bp, synthetic construct
  source 1..20: mol_type = other DNA
ggcccgtgcgccaagctcag

SEQ ID NO: 14064 - DNA, 20 bp, synthetic construct
  source 1..20: mol_type = other DNA
agatggcggcgccagacccg

SEQ ID NO: 14065 - DNA, 20 bp, synthetic construct
  source 1..20: mol_type = other DNA
gcgatcttccctagcgcctc

SEQ ID NO: 14066 - DNA, 20 bp, synthetic construct
  source 1..20: mol_type = other DNA
gcttggcgcacgggccgacc

SEQ ID NO: 14067 - DNA, 20 bp, synthetic construct
  source 1..20: mol_type = other DNA
ctggttgttaccgaggaaga

SEQ ID NO: 14068 - DNA, 20 bp, synthetic construct
  source 1..20: mol_type = other DNA
ggccccacgcctcaggcgac

SEQ ID NO: 14069 - DNA, 20 bp, synthetic construct
  source 1..20: mol_type = other DNA
ggaacgcggcgcagccgtgg

SEQ ID NO: 14070 - DNA, 20 bp, synthetic construct
  source 1..20: mol_type = other DNA
ccaagctcagcgggcgtccg

SEQ ID NO: 14071 - DNA, 20 bp, synthetic construct
  source 1..20: mol_type = other DNA
gagggaacgcggcgcagccg

SEQ ID NO: 14072 - DNA, 20 bp, synthetic construct
  source 1..20: mol_type = other DNA
ggccgggagcaaaggctgct

SEQ ID NO: 14073 - DNA, 20 bp, synthetic construct
  source 1..20: mol_type = other DNA
cagccccgcactcacctggt

SEQ ID NO: 14074 - DNA, 20 bp, synthetic construct
  source 1..20: mol_type = other DNA
cgctagggaagatcgcaccg

SEQ ID NO: 14075 - DNA, 20 bp, synthetic construct
  source 1..20: mol_type = other DNA
atagcaggactaatcttccg

SEQ ID NO: 14076 - DNA, 20 bp, synthetic construct
  source 1..20: mol_type = other DNA
gataccacaaacctgctccc

SEQ ID NO: 14077 - DNA, 20 bp, synthetic construct
  source 1..20: mol_type = other DNA
ttctgcggctacacaaaacc

SEQ ID NO: 14078 - DNA, 20 bp, synthetic construct
  source 1..20: mol_type = other DNA
gctcctggggatgctatggg

SEQ ID NO: 14079 - DNA, 20 bp, synthetic construct
  source 1..20: mol_type = other DNA
tcctgctatgctcgctcctg

SEQ ID NO: 14080 - DNA, 20 bp, synthetic construct
  source 1..20: mol_type = other DNA
aaagatcaccatactttgca

SEQ ID NO: 14081 - DNA, 20 bp, synthetic construct
  source 1..20: mol_type = other DNA
gcaggtttgtggtatctgcc

SEQ ID NO: 14082 - DNA, 20 bp, synthetic construct
  source 1..20: mol_type = other DNA
gcagcctgggagcaggtttg

SEQ ID NO: 14083 - DNA, 20 bp, synthetic construct
  source 1..20: mol_type = other DNA
ccaaccaaatgccagctccg

SEQ ID NO: 14084 - DNA, 20 bp, synthetic construct
  source 1..20: mol_type = other DNA
ccgcggagctggcatttggt

SEQ ID NO: 14085 - DNA, 20 bp, synthetic construct
  source 1..20: mol_type = other DNA
ttcttccaccctgcaaagta

SEQ ID NO: 14086 - DNA, 20 bp, synthetic construct
  source 1..20: mol_type = other DNA
tggcctcccatagcatcccc

SEQ ID NO: 14087 - DNA, 20 bp, synthetic construct
  source 1..20: mol_type = other DNA
catccggatttccagttctg

SEQ ID NO: 14088 - DNA, 20 bp, synthetic construct
  source 1..20: mol_type = other DNA
agcaggtttgtggtatctgc

SEQ ID NO: 14089 - DNA, 20 bp, synthetic construct
  source 1..20: mol_type = other DNA
aactcagcctctttcttcta

SEQ ID NO: 14090 - DNA, 20 bp, synthetic construct
  source 1..20: mol_type = other DNA
gattcgggaaaccagaaccc

SEQ ID NO: 14091 - DNA, 20 bp, synthetic construct
  source 1..20: mol_type = other DNA
gaacttgcctacgcgtccgt

SEQ ID NO: 14092 - DNA, 20 bp, synthetic construct
  source 1..20: mol_type = other DNA
ttggcaaataaccagcaggt

SEQ ID NO: 14093 - DNA, 20 bp, synthetic construct
  source 1..20: mol_type = other DNA
gggagaaaagaaaataaccc

SEQ ID NO: 14094 - DNA, 20 bp, synthetic construct
  source 1..20: mol_type = other DNA
ccgccctggaccttccaccc

SEQ ID NO: 14095 - DNA, 20 bp, synthetic construct
  source 1..20: mol_type = other DNA
cttggcaaataaccagcagg

SEQ ID NO: 14096 - DNA, 20 bp, synthetic construct
  source 1..20: mol_type = other DNA
tcacttggcaaataaccagc

SEQ ID NO: 14097 - DNA, 20 bp, synthetic construct
  source 1..20: mol_type = other DNA
cccgggtggaaggtccaggg

SEQ ID NO: 14098 - DNA, 20 bp, synthetic construct
  source 1..20: mol_type = other DNA
gggcggtgctagcagggaag

SEQ ID NO: 14099 - DNA, 20 bp, synthetic construct
  source 1..20: mol_type = other DNA
agcagggaagagggacgcgc

SEQ ID NO: 14100 - DNA, 20 bp, synthetic construct
  source 1..20: mol_type = other DNA
cgccagactcgctgcccggg

SEQ ID NO: 14101 - DNA, 20 bp, synthetic construct
  source 1..20: mol_type = other DNA
ttcgggaaaccagaaccctg

SEQ ID NO: 14102 - DNA, 20 bp, synthetic construct
  source 1..20: mol_type = other DNA
cagaaccctggggcagctgg

SEQ ID NO: 14103 - DNA, 20 bp, synthetic construct
  source 1..20: mol_type = other DNA
aaagacatctgcccacctgc

SEQ ID NO: 14104 - DNA, 20 bp, synthetic construct
  source 1..20: mol_type = other DNA
tttctcccccagctgcccca

SEQ ID NO: 14105 - DNA, 20 bp, synthetic construct
  source 1..20: mol_type = other DNA
tccatcctcaacaagtacga

SEQ ID NO: 14106 - DNA, 20 bp, synthetic construct
  source 1..20: mol_type = other DNA
gtccagctggatccattcag

SEQ ID NO: 14107 - DNA, 20 bp, synthetic construct
  source 1..20: mol_type = other DNA
acaagtacgacggtgagcac

SEQ ID NO: 14108 - DNA, 20 bp, synthetic construct
  source 1..20: mol_type = other DNA
caagtacgacggtgagcacc

SEQ ID NO: 14109 - DNA, 20 bp, synthetic construct
  source 1..20: mol_type = other DNA
gctcaccgtcgtacttgttg

SEQ ID NO: 14110 - DNA, 20 bp, synthetic construct
  source 1..20: mol_type = other DNA
ggctgttcctgggagtatgg

SEQ ID NO: 14111 - DNA, 20 bp, synthetic construct
  source 1..20: mol_type = other DNA
cggggagaagctgtagacct

SEQ ID NO: 14112 - DNA, 20 bp, synthetic construct
  source 1..20: mol_type = other DNA
agctgtagacctgggccccc

SEQ ID NO: 14113 - DNA, 20 bp, synthetic construct
  source 1..20: mol_type = other DNA
ctctgaccactcgcagcccc

SEQ ID NO: 14114 - DNA, 20 bp, synthetic construct
  source 1..20: mol_type = other DNA
tggatccattcaggggaccc

SEQ ID NO: 14115 - DNA, 20 bp, synthetic construct
  source 1..20: mol_type = other DNA
gcggggagaagctgtagacc

SEQ ID NO: 14116 - DNA, 20 bp, synthetic construct
  source 1..20: mol_type = other DNA
ggaggggggtgtggagccag

SEQ ID NO: 14117 - DNA, 20 bp, synthetic construct
  source 1..20: mol_type = other DNA
ctccctgcccccatactccc

SEQ ID NO: 14118 - DNA, 20 bp, synthetic construct
  source 1..20: mol_type = other DNA
gaggggggtgtggagccagg

SEQ ID NO: 14119 - DNA, 20 bp, synthetic construct
  source 1..20: mol_type = other DNA
gagggggaggatggatggag

SEQ ID NO: 14120 - DNA, 20 bp, synthetic construct
  source 1..20: mol_type = other DNA
tccccgccccgcatgcagcg

SEQ ID NO: 14121 - DNA, 20 bp, synthetic construct
  source 1..20: mol_type = other DNA
ggccgcctccagagagtaag

SEQ ID NO: 14122 - DNA, 20 bp, synthetic construct
  source 1..20: mol_type = other DNA
gcggggaccagggacccgtg

SEQ ID NO: 14123 - DNA, 20 bp, synthetic construct
  source 1..20: mol_type = other DNA
tgccacttactctctggagg

SEQ ID NO: 14124 - DNA, 20 bp, synthetic construct
  source 1..20: mol_type = other DNA
acggctccgcgctgcatgcg

SEQ ID NO: 14125 - DNA, 20 bp, synthetic construct
  source 1..20: mol_type = other DNA
gcccgggtccctcagtgccg

SEQ ID NO: 14126 - DNA, 20 bp, synthetic construct
  source 1..20: mol_type = other DNA
ggacggctccgcgctgcatg

SEQ ID NO: 14127 - DNA, 20 bp, synthetic construct
  source 1..20: mol_type = other DNA
tccgggccgccgcggcactg

SEQ ID NO: 14128 - DNA, 20 bp, synthetic construct
  source 1..20: mol_type = other DNA
tcagtgccgcggcggcccgg

SEQ ID NO: 14129 - DNA, 20 bp, synthetic construct
  source 1..20: mol_type = other DNA
gaatgccacttactctctgg

SEQ ID NO: 14130 - DNA, 20 bp, synthetic construct
  source 1..20: mol_type = other DNA
tgcatgcggggcggggacca

SEQ ID NO: 14131 - DNA, 20 bp, synthetic construct
  source 1..20: mol_type = other DNA
ccgggccgccgcggcactga

SEQ ID NO: 14132 - DNA, 20 bp, synthetic construct
  source 1..20: mol_type = other DNA
cgggtccctcagtgccgcgg

SEQ ID NO: 14133 - DNA, 20 bp, synthetic construct
  source 1..20: mol_type = other DNA
gctccgcgctgcatgcgggg

SEQ ID NO: 14134 - DNA, 20 bp, synthetic construct
  source 1..20: mol_type = other DNA
ggcggcccggaggtggcggg

SEQ ID NO: 14135 - DNA, 20 bp, synthetic construct
  source 1..20: mol_type = other DNA
gagcaaggagcgcggaatcg

SEQ ID NO: 14136 - DNA, 20 bp, synthetic construct
  source 1..20: mol_type = other DNA
ctagaggatccagctagctc

SEQ ID NO: 14137 - DNA, 20 bp, synthetic construct
  source 1..20: mol_type = other DNA
gatcctctaggcaggtgcgt

SEQ ID NO: 14138 - DNA, 20 bp, synthetic construct
  source 1..20: mol_type = other DNA
ggatcctctaggcaggtgcg

SEQ ID NO: 14139 - DNA, 20 bp, synthetic construct
  source 1..20: mol_type = other DNA
tagtgcagccagcgccctcg

SEQ ID NO: 14140 - DNA, 20 bp, synthetic construct
  source 1..20: mol_type = other DNA
ttacggaagtaccgcgagca

SEQ ID NO: 14141 - DNA, 20 bp, synthetic construct
  source 1..20: mol_type = other DNA
ctgacggcgctgctaggctc

SEQ ID NO: 14142 - DNA, 20 bp, synthetic construct
  source 1..20: mol_type = other DNA
gattccgcgctccttgctcg

SEQ ID NO: 14143 - DNA, 20 bp, synthetic construct
  source 1..20: mol_type = other DNA
gcgcccacgcacctgcctag

SEQ ID NO: 14144 - DNA, 20 bp, synthetic construct
  source 1..20: mol_type = other DNA
gctagctggatcctctaggc

SEQ ID NO: 14145 - DNA, 20 bp, synthetic construct
  source 1..20: mol_type = other DNA
agtaccgcgagcaaggagcg

SEQ ID NO: 14146 - DNA, 20 bp, synthetic construct
  source 1..20: mol_type = other DNA
cacagcgccaacgccgcgca

SEQ ID NO: 14147 - DNA, 20 bp, synthetic construct
  source 1..20: mol_type = other DNA
acccttgccctgcgcggcgt

SEQ ID NO: 14148 - DNA, 20 bp, synthetic construct
  source 1..20: mol_type = other DNA
cgttggcgctgtgggcctga

SEQ ID NO: 14149 - DNA, 20 bp, synthetic construct
  source 1..20: mol_type = other DNA
aggcaggtgcgtgggcgctg

SEQ ID NO: 14150 - DNA, 20 bp, synthetic construct
  source 1..20: mol_type = other DNA
ggacgcacgcagtggagatg

SEQ ID NO: 14151 - DNA, 20 bp, synthetic construct
  source 1..20: mol_type = other DNA
gcagtgaggttgctaagaga

SEQ ID NO: 14152 - DNA, 20 bp, synthetic construct
  source 1..20: mol_type = other DNA
gtgcggacgactttgtctgt

SEQ ID NO: 14153 - DNA, 20 bp, synthetic construct
  source 1..20: mol_type = other DNA
gcgcccagcagagtcaggtg

SEQ ID NO: 14154 - DNA, 20 bp, synthetic construct
  source 1..20: mol_type = other DNA
gactttgtctgtaggagcag

SEQ ID NO: 14155 - DNA, 20 bp, synthetic construct
  source 1..20: mol_type = other DNA
cgtatttccggttaagatgg

SEQ ID NO: 14156 - DNA, 20 bp, synthetic construct
  source 1..20: mol_type = other DNA
agaggggcgccggaataagg

SEQ ID NO: 14157 - DNA, 20 bp, synthetic construct
  source 1..20: mol_type = other DNA
tttgtctgtaggagcagcgg

SEQ ID NO: 14158 - DNA, 20 bp, synthetic construct
  source 1..20: mol_type = other DNA
agcggcggcttgaggacccg

SEQ ID NO: 14159 - DNA, 20 bp, synthetic construct
  source 1..20: mol_type = other DNA
aaggcggatctcacctcccc

SEQ ID NO: 14160 - DNA, 20 bp, synthetic construct
  source 1..20: mol_type = other DNA
cagcggcggcttgaggaccc

SEQ ID NO: 14161 - DNA, 20 bp, synthetic construct
  source 1..20: mol_type = other DNA
gtaggagcagcggcggcttg

SEQ ID NO: 14162 - DNA, 20 bp, synthetic construct
  source 1..20: mol_type = other DNA
taaggcggatctcacctccc

SEQ ID NO: 14163 - DNA, 20 bp, synthetic construct
  source 1..20: mol_type = other DNA
tggcggcgcccagcagagtc

SEQ ID NO: 14164 - DNA, 20 bp, synthetic construct
  source 1..20: mol_type = other DNA
gcagcggcggcttgaggacc

SEQ ID NO: 14165 - DNA, 20 bp, synthetic construct
  source 1..20: mol_type = other DNA
ttccaggcacccagcaacgg

SEQ ID NO: 14166 - DNA, 20 bp, synthetic construct
  source 1..20: mol_type = other DNA
ctagaggtcaagatcagctc

SEQ ID NO: 14167 - DNA, 20 bp, synthetic construct
  source 1..20: mol_type = other DNA
gctgatcttgacctctagga

SEQ ID NO: 14168 - DNA, 20 bp, synthetic construct
  source 1..20: mol_type = other DNA
gatcagctctggctaggtaa

SEQ ID NO: 14169 - DNA, 20 bp, synthetic construct
  source 1..20: mol_type = other DNA
tgacctctaggatggtgagg

SEQ ID NO: 14170 - DNA, 20 bp, synthetic construct
  source 1..20: mol_type = other DNA
ggtcaagatcagctctggct

SEQ ID NO: 14171 - DNA, 20 bp, synthetic construct
  source 1..20: mol_type = other DNA
ttgacctctaggatggtgag

SEQ ID NO: 14172 - DNA, 20 bp, synthetic construct
  source 1..20: mol_type = other DNA
aggccccctcaccatcctag

SEQ ID NO: 14173 - DNA, 20 bp, synthetic construct
  source 1..20: mol_type = other DNA
tcttgacctctaggatggtg

SEQ ID NO: 14174 - DNA, 20 bp, synthetic construct
  source 1..20: mol_type = other DNA
cttgacctctaggatggtga

SEQ ID NO: 14175 - DNA, 20 bp, synthetic construct
  source 1..20: mol_type = other DNA
gctctggctaggtaaggggt

SEQ ID NO: 14176 - DNA, 20 bp, synthetic construct
  source 1..20: mol_type = other DNA
atcagctctggctaggtaag

SEQ ID NO: 14177 - DNA, 20 bp, synthetic construct
  source 1..20: mol_type = other DNA
ctggctaggtaaggggtggg

SEQ ID NO: 14178 - DNA, 20 bp, synthetic construct
  source 1..20: mol_type = other DNA
tgagggggcctgaggcctgg

SEQ ID NO: 14179 - DNA, 20 bp, synthetic construct
  source 1..20: mol_type = other DNA
agatcagctctggctaggta

SEQ ID NO: 14180 - DNA, 20 bp, synthetic construct
  source 1..20: mol_type = other DNA
actcttatgagaaccagcaa

SEQ ID NO: 14181 - DNA, 20 bp, synthetic construct
  source 1..20: mol_type = other DNA
tcagtaaaattctaaggcag

SEQ ID NO: 14182 - DNA, 20 bp, synthetic construct
  source 1..20: mol_type = other DNA
agccatgtctgattctaacg

SEQ ID NO: 14183 - DNA, 20 bp, synthetic construct
  source 1..20: mol_type = other DNA
cgcctcgttagaatcagaca

SEQ ID NO: 14184 - DNA, 20 bp, synthetic construct
  source 1..20: mol_type = other DNA
gatcagtaaaattctaaggc

SEQ ID NO: 14185 - DNA, 20 bp, synthetic construct
  source 1..20: mol_type = other DNA
gcttggggttatcattgctg

SEQ ID NO: 14186 - DNA, 20 bp, synthetic construct
  source 1..20: mol_type = other DNA
atcagtaaaattctaaggca

SEQ ID NO: 14187 - DNA, 20 bp, synthetic construct
  source 1..20: mol_type = other DNA
tcaactgagaagtcagcctc

SEQ ID NO: 14188 - DNA, 20 bp, synthetic construct
  source 1..20: mol_type = other DNA
cttggggttatcattgctgc

SEQ ID NO: 14189 - DNA, 20 bp, synthetic construct
  source 1..20: mol_type = other DNA
ttatgagaaccagcaatggc

SEQ ID NO: 14190 - DNA, 20 bp, synthetic construct
  source 1..20: mol_type = other DNA
tgctccacttagtcggtgac

SEQ ID NO: 14191 - DNA, 20 bp, synthetic construct
  source 1..20: mol_type = other DNA
aaatgttcttgagctaggaa

SEQ ID NO: 14192 - DNA, 20 bp, synthetic construct
  source 1..20: mol_type = other DNA
gaaacactgctccacttagt

SEQ ID NO: 14193 - DNA, 20 bp, synthetic construct
  source 1..20: mol_type = other DNA
cagcaatggcaggttcttga

SEQ ID NO: 14194 - DNA, 20 bp, synthetic construct
  source 1..20: mol_type = other DNA
cttcaagaacctgccattgc

SEQ ID NO: 14195 - DNA, 20 bp, synthetic construct
  source 1..20: mol_type = other DNA
gatggccaagcgctcccgtc

SEQ ID NO: 14196 - DNA, 20 bp, synthetic construct
  source 1..20: mol_type = other DNA
ggacaccggacgggagcgct

SEQ ID NO: 14197 - DNA, 20 bp, synthetic construct
  source 1..20: mol_type = other DNA
ctggagccgtagcggcaagt

SEQ ID NO: 14198 - DNA, 20 bp, synthetic construct
  source 1..20: mol_type = other DNA
tggggattctcggatctccg

SEQ ID NO: 14199 - DNA, 20 bp, synthetic construct
  source 1..20: mol_type = other DNA
tctgctcctctgccggagag

SEQ ID NO: 14200 - DNA, 20 bp, synthetic construct
  source 1..20: mol_type = other DNA
ggccatcctctctccggcag

SEQ ID NO: 14201 - DNA, 20 bp, synthetic construct
  source 1..20: mol_type = other DNA
agcagagccgaggagccctg

SEQ ID NO: 14202 - DNA, 20 bp, synthetic construct
  source 1..20: mol_type = other DNA
cgtagcggcaagtgggcttg

SEQ ID NO: 14203 - DNA, 20 bp, synthetic construct
  source 1..20: mol_type = other DNA
agaagacccgctctcatccc

SEQ ID NO: 14204 - DNA, 20 bp, synthetic construct
  source 1..20: mol_type = other DNA
acaaactttgagggacccca

SEQ ID NO: 14205 - DNA, 20 bp, synthetic construct
  source 1..20: mol_type = other DNA
tgggtcctggagcagagccg

SEQ ID NO: 14206 - DNA, 20 bp, synthetic construct
  source 1..20: mol_type = other DNA
ggagcagagccgaggagccc

SEQ ID NO: 14207 - DNA, 20 bp, synthetic construct
  source 1..20: mol_type = other DNA
gtttgtgtctggagccgtag

SEQ ID NO: 14208 - DNA, 20 bp, synthetic construct
  source 1..20: mol_type = other DNA
gagcagagccgaggagccct

SEQ ID NO: 14209 - DNA, 20 bp, synthetic construct
  source 1..20: mol_type = other DNA
tctggagccgtagcggcaag

SEQ ID NO: 14210 - DNA, 20 bp, synthetic construct
  source 1..20: mol_type = other DNA
aacaaaacaggtgaggtcgg

SEQ ID NO: 14211 - DNA, 20 bp, synthetic construct
  source 1..20: mol_type = other DNA
gacgagagcccgacagccgg

SEQ ID NO: 14212 - DNA, 20 bp, synthetic construct
  source 1..20: mol_type = other DNA
cccgacgagagcccgacagc

SEQ ID NO: 14213 - DNA, 20 bp, synthetic construct
  source 1..20: mol_type = other DNA
gcctgcccagccggagcgaa

SEQ ID NO: 14214 - DNA, 20 bp, synthetic construct
  source 1..20: mol_type = other DNA
tggaggaaattcctccgctg

SEQ ID NO: 14215 - DNA, 20 bp, synthetic construct
  source 1..20: mol_type = other DNA
tgcctgcccagccggagcga

SEQ ID NO: 14216 - DNA, 20 bp, synthetic construct
  source 1..20: mol_type = other DNA
gccggctgtcgggctctcgt

SEQ ID NO: 14217 - DNA, 20 bp, synthetic construct
  source 1..20: mol_type = other DNA
gctcgggcgccgccggctgt

SEQ ID NO: 14218 - DNA, 20 bp, synthetic construct
  source 1..20: mol_type = other DNA
cggggcggcgcccttcgctc

SEQ ID NO: 14219 - DNA, 20 bp, synthetic construct
  source 1..20: mol_type = other DNA
cctggcgcgggctctgcgcg

SEQ ID NO: 14220 - DNA, 20 bp, synthetic construct
  source 1..20: mol_type = other DNA
tgggcaggcaggtcgggctc

SEQ ID NO: 14221 - DNA, 20 bp, synthetic construct
  source 1..20: mol_type = other DNA
gccctggcgcgggctctgcg

SEQ ID NO: 14222 - DNA, 20 bp, synthetic construct
  source 1..20: mol_type = other DNA
aggtcgggctcgggcgccgc

SEQ ID NO: 14223 - DNA, 20 bp, synthetic construct
  source 1..20: mol_type = other DNA
ccctggcgcgggctctgcgc

SEQ ID NO: 14224 - DNA, 20 bp, synthetic construct
  source 1..20: mol_type = other DNA
ggcgcgggctctgcgcgggg

SEQ ID NO: 14225 - DNA, 20 bp, synthetic construct
  source 1..20: mol_type = other DNA
tgggccagccgagccgaccc

SEQ ID NO: 14226 - DNA, 20 bp, synthetic construct
  source 1..20: mol_type = other DNA
ctgctgccgcgggtcagagg

SEQ ID NO: 14227 - DNA, 20 bp, synthetic construct
  source 1..20: mol_type = other DNA
aggcagggggttcgtgacgc

SEQ ID NO: 14228 - DNA, 20 bp, synthetic construct
  source 1..20: mol_type = other DNA
gtgacgccggctgggtctgg

SEQ ID NO: 14229 - DNA, 20 bp, synthetic construct
  source 1..20: mol_type = other DNA
ctgagtgctcacggcccccg

SEQ ID NO: 14230 - DNA, 20 bp, synthetic construct
  source 1..20: mol_type = other DNA
gaggcgggtcagagcaggca

SEQ ID NO: 14231 - DNA, 20 bp, synthetic construct
  source 1..20: mol_type = other DNA
gagccgacccgggcttctgg

SEQ ID NO: 14232 - DNA, 20 bp, synthetic construct
  source 1..20: mol_type = other DNA
ccgcggtcccccagaagccc

SEQ ID NO: 14233 - DNA, 20 bp, synthetic construct
  source 1..20: mol_type = other DNA
ggtcccccagaagcccgggt

SEQ ID NO: 14234 - DNA, 20 bp, synthetic construct
  source 1..20: mol_type = other DNA
aggcgggtcagagcaggcag

SEQ ID NO: 14235 - DNA, 20 bp, synthetic construct
  source 1..20: mol_type = other DNA
ccacagcccccagacccagc

SEQ ID NO: 14236 - DNA, 20 bp, synthetic construct
  source 1..20: mol_type = other DNA
cgagccgacccgggcttctg

SEQ ID NO: 14237 - DNA, 20 bp, synthetic construct
  source 1..20: mol_type = other DNA
agaggcgggtcagagcaggc

SEQ ID NO: 14238 - DNA, 20 bp, synthetic construct
  source 1..20: mol_type = other DNA
ggtcagaggcgggtcagagc

SEQ ID NO: 14239 - DNA, 20 bp, synthetic construct
  source 1..20: mol_type = other DNA
ggcgggtcagagcaggcagg

SEQ ID NO: 14240 - DNA, 20 bp, synthetic construct
  source 1..20: mol_type = other DNA
gtgtcagcggagtcatcctg

SEQ ID NO: 14241 - DNA, 20 bp, synthetic construct
  source 1..20: mol_type = other DNA
ggcctgcagagcccatgaga

SEQ ID NO: 14242 - DNA, 20 bp, synthetic construct
  source 1..20: mol_type = other DNA
cgcgagctgcccgataatgg

SEQ ID NO: 14243 - DNA, 20 bp, synthetic construct
  source 1..20: mol_type = other DNA
tcggtggcctgaggagcgca

SEQ ID NO: 14244 - DNA, 20 bp, synthetic construct
  source 1..20: mol_type = other DNA
gaaaggccagatttacctca

SEQ ID NO: 14245 - DNA, 20 bp, synthetic construct
  source 1..20: mol_type = other DNA
cggcctgcagagcccatgag

SEQ ID NO: 14246 - DNA, 20 bp, synthetic construct
  source 1..20: mol_type = other DNA
gcgcgccggctgctgactgg

SEQ ID NO: 14247 - DNA, 20 bp, synthetic construct
  source 1..20: mol_type = other DNA
aagcggcagcgtctaccctg

SEQ ID NO: 14248 - DNA, 20 bp, synthetic construct
  source 1..20: mol_type = other DNA
ggtggccccggtatgagagg

SEQ ID NO: 14249 - DNA, 20 bp, synthetic construct
  source 1..20: mol_type = other DNA
atgagaggaggccgcgactg

SEQ ID NO: 14250 - DNA, 20 bp, synthetic construct
  source 1..20: mol_type = other DNA
gcttgtcacagacgtgtcag

SEQ ID NO: 14251 - DNA, 20 bp, synthetic construct
  source 1..20: mol_type = other DNA
gagcccatgagagggagaag

SEQ ID NO: 14252 - DNA, 20 bp, synthetic construct
  source 1..20: mol_type = other DNA
cgccggctgctgactggagg

SEQ ID NO: 14253 - DNA, 20 bp, synthetic construct
  source 1..20: mol_type = other DNA
cggctgctgactggaggcgg

SEQ ID NO: 14254 - DNA, 20 bp, synthetic construct
  source 1..20: mol_type = other DNA
ctgactggaggcggcggcag

SEQ ID NO: 14255 - DNA, 20 bp, synthetic construct
  source 1..20: mol_type = other DNA
agattagcccatcggatgga

SEQ ID NO: 14256 - DNA, 20 bp, synthetic construct
  source 1..20: mol_type = other DNA
ttccagattagcccatcgga

SEQ ID NO: 14257 - DNA, 20 bp, synthetic construct
  source 1..20: mol_type = other DNA
tgaggatccttccatccgat

SEQ ID NO: 14258 - DNA, 20 bp, synthetic construct
  source 1..20: mol_type = other DNA
gcccttccagattagcccat

SEQ ID NO: 14259 - DNA, 20 bp, synthetic construct
  source 1..20: mol_type = other DNA
aaggatcctcaactttgggc

SEQ ID NO: 14260 - DNA, 20 bp, synthetic construct
  source 1..20: mol_type = other DNA
gagcagggtctcctcccccc

SEQ ID NO: 14261 - DNA, 20 bp, synthetic construct
  source 1..20: mol_type = other DNA
gatggaaggatcctcaactt

SEQ ID NO: 14262 - DNA, 20 bp, synthetic construct
  source 1..20: mol_type = other DNA
tccgatgggctaatctggaa

SEQ ID NO: 14263 - DNA, 20 bp, synthetic construct
  source 1..20: mol_type = other DNA
tcttcacctgcccaaagttg

SEQ ID NO: 14264 - DNA, 20 bp, synthetic construct
  source 1..20: mol_type = other DNA
ttgaggatccttccatccga

SEQ ID NO: 14265 - DNA, 20 bp, synthetic construct
  source 1..20: mol_type = other DNA
ctaatctggaagggcaggag

SEQ ID NO: 14266 - DNA, 20 bp, synthetic construct
  source 1..20: mol_type = other DNA
gaggtgggggctgtctcctg

SEQ ID NO: 14267 - DNA, 20 bp, synthetic construct
  source 1..20: mol_type = other DNA
ggaggagaccctgctctccc

SEQ ID NO: 14268 - DNA, 20 bp, synthetic construct
  source 1..20: mol_type = other DNA
ggtgggggctgtctcctggg

SEQ ID NO: 14269 - DNA, 20 bp, synthetic construct
  source 1..20: mol_type = other DNA
gcttgctgccagggagagca

SEQ ID NO: 14270 - DNA, 20 bp, synthetic construct
  source 1..20: mol_type = other DNA
gagctgctattgaacacggc

SEQ ID NO: 14271 - DNA, 20 bp, synthetic construct
  source 1..20: mol_type = other DNA
atcccgtactgtatcctgaa

SEQ ID NO: 14272 - DNA, 20 bp, synthetic construct
  source 1..20: mol_type = other DNA
aattcttagacaaaaagtag

SEQ ID NO: 14273 - DNA, 20 bp, synthetic construct
  source 1..20: mol_type = other DNA
ttatgagctgctattgaaca

SEQ ID NO: 14274 - DNA, 20 bp, synthetic construct
  source 1..20: mol_type = other DNA
ggggaagcggttgggcacag

SEQ ID NO: 14275 - DNA, 20 bp, synthetic construct
  source 1..20: mol_type = other DNA
ccaattcttagacaaaaagt

SEQ ID NO: 14276 - DNA, 20 bp, synthetic construct
  source 1..20: mol_type = other DNA
aaaaagtaggggaagcggtt

SEQ ID NO: 14277 - DNA, 20 bp, synthetic construct
  source 1..20: mol_type = other DNA
cgggatcctttctggaatgg

SEQ ID NO: 14278 - DNA, 20 bp, synthetic construct
  source 1..20: mol_type = other DNA
tagacaaaaagtaggggaag

SEQ ID NO: 14279 - DNA, 20 bp, synthetic construct
  source 1..20: mol_type = other DNA
ctgaacagacaggtcttgct

SEQ ID NO: 14280 - DNA, 20 bp, synthetic construct
  source 1..20: mol_type = other DNA
ataagacctccattccagaa

SEQ ID NO: 14281 - DNA, 20 bp, synthetic construct
  source 1..20: mol_type = other DNA
ctcctttcaggatacagtac

SEQ ID NO: 14282 - DNA, 20 bp, synthetic construct
  source 1..20: mol_type = other DNA
gtacgggatcctttctggaa

SEQ ID NO: 14283 - DNA, 20 bp, synthetic construct
  source 1..20: mol_type = other DNA
atacagtacgggatcctttc

SEQ ID NO: 14284 - DNA, 20 bp, synthetic construct
  source 1..20: mol_type = other DNA
attgtagcatttctcctttc

SEQ ID NO: 14285 - DNA, 20 bp, synthetic construct
  source 1..20: mol_type = other DNA
gcggcgcggtggcacgaaga

SEQ ID NO: 14286 - DNA, 20 bp, synthetic construct
  source 1..20: mol_type = other DNA
tcgtccctgggctccgcaag

SEQ ID NO: 14287 - DNA, 20 bp, synthetic construct
  source 1..20: mol_type = other DNA
gcggtggcacgaagatggcg

SEQ ID NO: 14288 - DNA, 20 bp, synthetic construct
  source 1..20: mol_type = other DNA
gcgcggtggcacgaagatgg

SEQ ID NO: 14289 - DNA, 20 bp, synthetic construct
  source 1..20: mol_type = other DNA
tcgtgccaccgcgccgcttg

SEQ ID NO: 14290 - DNA, 20 bp, synthetic construct
  source 1..20: mol_type = other DNA
ctggcaggggcagtgaccgg

SEQ ID NO: 14291 - DNA, 20 bp, synthetic construct
  source 1..20: mol_type = other DNA
agccggcgctcggtggccac

SEQ ID NO: 14292 - DNA, 20 bp, synthetic construct
  source 1..20: mol_type = other DNA
ctacccgtggccaaagcccg

SEQ ID NO: 14293 - DNA, 20 bp, synthetic construct
  source 1..20: mol_type = other DNA
caccgagcgccggctggcag

SEQ ID NO: 14294 - DNA, 20 bp, synthetic construct
  source 1..20: mol_type = other DNA
gagcccagggacgaacgggc

SEQ ID NO: 14295 - DNA, 20 bp, synthetic construct
  source 1..20: mol_type = other DNA
cctgggctccgcaagcggcg

SEQ ID NO: 14296 - DNA, 20 bp, synthetic construct
  source 1..20: mol_type = other DNA
agcccgtggccaccgagcgc

SEQ ID NO: 14297 - DNA, 20 bp, synthetic construct
  source 1..20: mol_type = other DNA
ccctgccagccggcgctcgg

SEQ ID NO: 14298 - DNA, 20 bp, synthetic construct
  source 1..20: mol_type = other DNA
cgtggccaccgagcgccggc

SEQ ID NO: 14299 - DNA, 20 bp, synthetic construct
  source 1..20: mol_type = other DNA
cggtcactgcccctgccagc

SEQ ID NO: 14300 - DNA, 20 bp, synthetic construct
  source 1..20: mol_type = other DNA
cccatgccagtgcccatgcg

SEQ ID NO: 14301 - DNA, 20 bp, synthetic construct
  source 1..20: mol_type = other DNA
acctgcacccactgcgccca

SEQ ID NO: 14302 - DNA, 20 bp, synthetic construct
  source 1..20: mol_type = other DNA
tacctctccggcgtcactgg

SEQ ID NO: 14303 - DNA, 20 bp, synthetic construct
  source 1..20: mol_type = other DNA
ccagtgacgccggagaggta

SEQ ID NO: 14304 - DNA, 20 bp, synthetic construct
  source 1..20: mol_type = other DNA
ccggctgctctgcgctgtga

SEQ ID NO: 14305 - DNA, 20 bp, synthetic construct
  source 1..20: mol_type = other DNA
agcgcagagcagccggcgag

SEQ ID NO: 14306 - DNA, 20 bp, synthetic construct
  source 1..20: mol_type = other DNA
cggcggccccgcatgggcac

SEQ ID NO: 14307 - DNA, 20 bp, synthetic construct
  source 1..20: mol_type = other DNA
ggggccgccgccagtgacgc

SEQ ID NO: 14308 - DNA, 20 bp, synthetic construct
  source 1..20: mol_type = other DNA
tgcacccactgcgcccaggg

SEQ ID NO: 14309 - DNA, 20 bp, synthetic construct
  source 1..20: mol_type = other DNA
cacctgcacccactgcgccc

SEQ ID NO: 14310 - DNA, 20 bp, synthetic construct
  source 1..20: mol_type = other DNA
cttgttgccgcccaaagcgc

SEQ ID NO: 14311 - DNA, 20 bp, synthetic construct
  source 1..20: mol_type = other DNA
ctctccggcgtcactggcgg

SEQ ID NO: 14312 - DNA, 20 bp, synthetic construct
  source 1..20: mol_type = other DNA
cggcgagcggcagcagctcc

SEQ ID NO: 14313 - DNA, 20 bp, synthetic construct
  source 1..20: mol_type = other DNA
cactggcggcggccccgcat

SEQ ID NO: 14314 - DNA, 20 bp, synthetic construct
  source 1..20: mol_type = other DNA
atgggcactggcatgggcgc

SEQ ID NO: 14315 - DNA, 20 bp, synthetic construct
  source 1..20: mol_type = other DNA
tggagcgcggcagcaagcgt

SEQ ID NO: 14316 - DNA, 20 bp, synthetic construct
  source 1..20: mol_type = other DNA
agcaagcgtgggaacgcggg

SEQ ID NO: 14317 - DNA, 20 bp, synthetic construct
  source 1..20: mol_type = other DNA
ggcagcaagcgtgggaacgc

SEQ ID NO: 14318 - DNA, 20 bp, synthetic construct
  source 1..20: mol_type = other DNA
acggcggcaggtaggcacag

SEQ ID NO: 14319 - DNA, 20 bp, synthetic construct
  source 1..20: mol_type = other DNA
ggcaggtaggcacagtgggc

SEQ ID NO: 14320 - DNA, 20 bp, synthetic construct
  source 1..20: mol_type = other DNA
gaccggaccgcgcgggacac

SEQ ID NO: 14321 - DNA, 20 bp, synthetic construct
  source 1..20: mol_type = other DNA
tgggaacgcgggcggcgaga

SEQ ID NO: 14322 - DNA, 20 bp, synthetic construct
  source 1..20: mol_type = other DNA
ggtaggcacagtgggcgggt

SEQ ID NO: 14323 - DNA, 20 bp, synthetic construct
  source 1..20: mol_type = other DNA
ctggcgcatcgcctggagcg

SEQ ID NO: 14324 - DNA, 20 bp, synthetic construct
  source 1..20: mol_type = other DNA
cggcggcaggtaggcacagt

SEQ ID NO: 14325 - DNA, 20 bp, synthetic construct
  source 1..20: mol_type = other DNA
tagggcgcccgtgtcccgcg

SEQ ID NO: 14326 - DNA, 20 bp, synthetic construct
  source 1..20: mol_type = other DNA
ctggagcgcggcagcaagcg

SEQ ID NO: 14327 - DNA, 20 bp, synthetic construct
  source 1..20: mol_type = other DNA
cggcagcaagcgtgggaacg

SEQ ID NO: 14328 - DNA, 20 bp, synthetic construct
  source 1..20: mol_type = other DNA
gcggcaggacggcggcaggt

SEQ ID NO: 14329 - DNA, 20 bp, synthetic construct
  source 1..20: mol_type = other DNA
cggcaggtaggcacagtggg

SEQ ID NO: 14330 - DNA, 20 bp, synthetic construct
  source 1..20: mol_type = other DNA
tgactaaagttcctaagggc

SEQ ID NO: 14331 - DNA, 20 bp, synthetic construct
  source 1..20: mol_type = other DNA
ttcgaccagccaaggagacc

SEQ ID NO: 14332 - DNA, 20 bp, synthetic construct
  source 1..20: mol_type = other DNA
aacaaacaaatcggccagaa

SEQ ID NO: 14333 - DNA, 20 bp, synthetic construct
  source 1..20: mol_type = other DNA
gccaaggagacctggtggca

SEQ ID NO: 14334 - DNA, 20 bp, synthetic construct
  source 1..20: mol_type = other DNA
aagttcacatgagtaaattt

SEQ ID NO: 14335 - DNA, 20 bp, synthetic construct
  source 1..20: mol_type = other DNA
gaccagccaaggagacctgg

SEQ ID NO: 14336 - DNA, 20 bp, synthetic construct
  source 1..20: mol_type = other DNA
tgtttgctttcgaccagcca

SEQ ID NO: 14337 - DNA, 20 bp, synthetic construct
  source 1..20: mol_type = other DNA
aactcaccaaccctgccacc

SEQ ID NO: 14338 - DNA, 20 bp, synthetic construct
  source 1..20: mol_type = other DNA
agccaaggagacctggtggc

SEQ ID NO: 14339 - DNA, 20 bp, synthetic construct
  source 1..20: mol_type = other DNA
aggagacctggtggcagggt

SEQ ID NO: 14340 - DNA, 20 bp, synthetic construct
  source 1..20: mol_type = other DNA
gggttggtgagttacctttc

SEQ ID NO: 14341 - DNA, 20 bp, synthetic construct
  source 1..20: mol_type = other DNA
taaaatccaaacaaacaaat

SEQ ID NO: 14342 - DNA, 20 bp, synthetic construct
  source 1..20: mol_type = other DNA
accctgccaccaggtctcct

SEQ ID NO: 14343 - DNA, 20 bp, synthetic construct
  source 1..20: mol_type = other DNA
ttctggccgatttgtttgtt

SEQ ID NO: 14344 - DNA, 20 bp, synthetic construct
  source 1..20: mol_type = other DNA
tgccaccaggtctccttggc

SEQ ID NO: 14345 - DNA, 20 bp, synthetic construct
  source 1..20: mol_type = other DNA
acctagggcagagctgccgc

SEQ ID NO: 14346 - DNA, 20 bp, synthetic construct
  source 1..20: mol_type = other DNA
ccgccgcgatgcccaccatg

SEQ ID NO: 14347 - DNA, 20 bp, synthetic construct
  source 1..20: mol_type = other DNA
actctgcacctgtcacggcg

SEQ ID NO: 14348 - DNA, 20 bp, synthetic construct
  source 1..20: mol_type = other DNA
gacacggtcctccgcatggt

SEQ ID NO: 14349 - DNA, 20 bp, synthetic construct
  source 1..20: mol_type = other DNA
cgacacggtcctccgcatgg

SEQ ID NO: 14350 - DNA, 20 bp, synthetic construct
  source 1..20: mol_type = other DNA
ggcccccgcacgccgacagg

SEQ ID NO: 14351 - DNA, 20 bp, synthetic construct
  source 1..20: mol_type = other DNA
ccccgcacgccgacaggagg

SEQ ID NO: 14352 - DNA, 20 bp, synthetic construct
  source 1..20: mol_type = other DNA
ctcctcctgtcggcgtgcgg

SEQ ID NO: 14353 - DNA, 20 bp, synthetic construct
  source 1..20: mol_type = other DNA
gaggaggagaaaggcagcgg

SEQ ID NO: 14354 - DNA, 20 bp, synthetic construct
  source 1..20: mol_type = other DNA
gtggcggcgcccgcagagct

SEQ ID NO: 14355 - DNA, 20 bp, synthetic construct
  source 1..20: mol_type = other DNA
agcggtggcggcgaaggtgg

SEQ ID NO: 14356 - DNA, 20 bp, synthetic construct
  source 1..20: mol_type = other DNA
caagagctcgcccagctctg

SEQ ID NO: 14357 - DNA, 20 bp, synthetic construct
  source 1..20: mol_type = other DNA
caggaggaggagaaaggcag

SEQ ID NO: 14358 - DNA, 20 bp, synthetic construct
  source 1..20: mol_type = other DNA
gaggagaaaggcagcggtgg

SEQ ID NO: 14359 - DNA, 20 bp, synthetic construct
  source 1..20: mol_type = other DNA
ggcagcggtggcggcgaagg

SEQ ID NO: 14360 - DNA, 20 bp, synthetic construct
  source 1..20: mol_type = other DNA
gtccctggggaaaagattcg

SEQ ID NO: 14361 - DNA, 20 bp, synthetic construct
  source 1..20: mol_type = other DNA
aagattcggggtcactgtcg

SEQ ID NO: 14362 - DNA, 20 bp, synthetic construct
  source 1..20: mol_type = other DNA
cagaggaacggaaacagctc

SEQ ID NO: 14363 - DNA, 20 bp, synthetic construct
  source 1..20: mol_type = other DNA
cagctccaggaacggcatgg

SEQ ID NO: 14364 - DNA, 20 bp, synthetic construct
  source 1..20: mol_type = other DNA
aggaacggaaacagctctgg

SEQ ID NO: 14365 - DNA, 20 bp, synthetic construct
  source 1..20: mol_type = other DNA
gagtcgtttctccagccccg

SEQ ID NO: 14366 - DNA, 20 bp, synthetic construct
  source 1..20: mol_type = other DNA
gcccgccaaccgagtgcccg

SEQ ID NO: 14367 - DNA, 20 bp, synthetic construct
  source 1..20: mol_type = other DNA
attcggggtcactgtcgggg

SEQ ID NO: 14368 - DNA, 20 bp, synthetic construct
  source 1..20: mol_type = other DNA
gcaaattcgtgtccagctcc

SEQ ID NO: 14369 - DNA, 20 bp, synthetic construct
  source 1..20: mol_type = other DNA
ccgccaaccgagtgcccgcg

SEQ ID NO: 14370 - DNA, 20 bp, synthetic construct
  source 1..20: mol_type = other DNA
cagggacagggccggacccc

SEQ ID NO: 14371 - DNA, 20 bp, synthetic construct
  source 1..20: mol_type = other DNA
ggagtggggagtggtccctg

SEQ ID NO: 14372 - DNA, 20 bp, synthetic construct
  source 1..20: mol_type = other DNA
agtcgtttctccagccccgc

SEQ ID NO: 14373 - DNA, 20 bp, synthetic construct
  source 1..20: mol_type = other DNA
gtccagctccaggaacggca

SEQ ID NO: 14374 - DNA, 20 bp, synthetic construct
  source 1..20: mol_type = other DNA
ttcgtgtccagctccaggaa

SEQ ID NO: 14375 - DNA, 20 bp, synthetic construct
  source 1..20: mol_type = other DNA
ttaggacgctgactgcgagg

SEQ ID NO: 14376 - DNA, 20 bp, synthetic construct
  source 1..20: mol_type = other DNA
acagccaagaagtgtatgca

SEQ ID NO: 14377 - DNA, 20 bp, synthetic construct
  source 1..20: mol_type = other DNA
gtgtgcgctcagcaggacgt

SEQ ID NO: 14378 - DNA, 20 bp, synthetic construct
  source 1..20: mol_type = other DNA
ggactcaccgaccttgaagc

SEQ ID NO: 14379 - DNA, 20 bp, synthetic construct
  source 1..20: mol_type = other DNA
tagccatgacccctctttgg

SEQ ID NO: 14380 - DNA, 20 bp, synthetic construct
  source 1..20: mol_type = other DNA
gcccccacctgtgtgcaggg

SEQ ID NO: 14381 - DNA, 20 bp, synthetic construct
  source 1..20: mol_type = other DNA
tctgctttattcctccaaag

SEQ ID NO: 14382 - DNA, 20 bp, synthetic construct
  source 1..20: mol_type = other DNA
ggaggctccggcttcaaggt

SEQ ID NO: 14383 - DNA, 20 bp, synthetic construct
  source 1..20: mol_type = other DNA
cacagccaagaagtgtatgc

SEQ ID NO: 14384 - DNA, 20 bp, synthetic construct
  source 1..20: mol_type = other DNA
tgtgtgcgctcagcaggacg

SEQ ID NO: 14385 - DNA, 20 bp, synthetic construct
  source 1..20: mol_type = other DNA
tgcgctcagcaggacgtggg

SEQ ID NO: 14386 - DNA, 20 bp, synthetic construct
  source 1..20: mol_type = other DNA
ccgttaggacgctgactgcg

SEQ ID NO: 14387 - DNA, 20 bp, synthetic construct
  source 1..20: mol_type = other DNA
gccaagggcgggagctctgc

SEQ ID NO: 14388 - DNA, 20 bp, synthetic construct
  source 1..20: mol_type = other DNA
cacctgtgtgcagggaggag

SEQ ID NO: 14389 - DNA, 20 bp, synthetic construct
  source 1..20: mol_type = other DNA
gcagggaggaggggtcgctt

SEQ ID NO: 14390 - DNA, 20 bp, synthetic construct
  source 1..20: mol_type = other DNA
ggagcagtctgacaatccgg

SEQ ID NO: 14391 - DNA, 20 bp, synthetic construct
  source 1..20: mol_type = other DNA
atactatctattaagtgatg

SEQ ID NO: 14392 - DNA, 20 bp, synthetic construct
  source 1..20: mol_type = other DNA
cagttcaggaaatcttacac

SEQ ID NO: 14393 - DNA, 20 bp, synthetic construct
  source 1..20: mol_type = other DNA
ctcttctttagactgccacg

SEQ ID NO: 14394 - DNA, 20 bp, synthetic construct
  source 1..20: mol_type = other DNA
ctcgtggcagtctaaagaag

SEQ ID NO: 14395 - DNA, 20 bp, synthetic construct
  source 1..20: mol_type = other DNA
tccaacacagatggagatta

SEQ ID NO: 14396 - DNA, 20 bp, synthetic construct
  source 1..20: mol_type = other DNA
aatgctgtcattaaagtctt

SEQ ID NO: 14397 - DNA, 20 bp, synthetic construct
  source 1..20: mol_type = other DNA
agaaattctgagagaaactt

SEQ ID NO: 14398 - DNA, 20 bp, synthetic construct
  source 1..20: mol_type = other DNA
aaatgctgtcattaaagtct

SEQ ID NO: 14399 - DNA, 20 bp, synthetic construct
  source 1..20: mol_type = other DNA
ttaacagattccaacacaga

SEQ ID NO: 14400 - DNA, 20 bp, synthetic construct
  source 1..20: mol_type = other DNA
atgtgagaactcaaggttca

SEQ ID NO: 14401 - DNA, 20 bp, synthetic construct
  source 1..20: mol_type = other DNA
tcgtggcagtctaaagaaga

SEQ ID NO: 14402 - DNA, 20 bp, synthetic construct
  source 1..20: mol_type = other DNA
gatgtgagaactcaaggttc

SEQ ID NO: 14403 - DNA, 20 bp, synthetic construct
  source 1..20: mol_type = other DNA
aaagcagatgtgagaactca

SEQ ID NO: 14404 - DNA, 20 bp, synthetic construct
  source 1..20: mol_type = other DNA
gccataatctccatctgtgt

SEQ ID NO: 14405 - DNA, 20 bp, synthetic construct
  source 1..20: mol_type = other DNA
acgattcacagcgtccacac

SEQ ID NO: 14406 - DNA, 20 bp, synthetic construct
  source 1..20: mol_type = other DNA
ggtgtggacgctgtgaatcg

SEQ ID NO: 14407 - DNA, 20 bp, synthetic construct
  source 1..20: mol_type = other DNA
cacagcgtccacaccggcat

SEQ ID NO: 14408 - DNA, 20 bp, synthetic construct
  source 1..20: mol_type = other DNA
ggaaaagaagggcaatccgg

SEQ ID NO: 14409 - DNA, 20 bp, synthetic construct
  source 1..20: mol_type = other DNA
gcgtccacaccggcatcggc

SEQ ID NO: 14410 - DNA, 20 bp, synthetic construct
  source 1..20: mol_type = other DNA
ggctgggcaacaggaaaaga

SEQ ID NO: 14411 - DNA, 20 bp, synthetic construct
  source 1..20: mol_type = other DNA
acttcctgccgatgccggtg

SEQ ID NO: 14412 - DNA, 20 bp, synthetic construct
  source 1..20: mol_type = other DNA
gctgggcaacaggaaaagaa

SEQ ID NO: 14413 - DNA, 20 bp, synthetic construct
  source 1..20: mol_type = other DNA
atggggagaagcggagaacc

SEQ ID NO: 14414 - DNA, 20 bp, synthetic construct
  source 1..20: mol_type = other DNA
cagtcgacgagggagggaaa

SEQ ID NO: 14415 - DNA, 20 bp, synthetic construct
  source 1..20: mol_type = other DNA
ccagcccagccctagtgtca

SEQ ID NO: 14416 - DNA, 20 bp, synthetic construct
  source 1..20: mol_type = other DNA
cgacgagggagggaaaggga

SEQ ID NO: 14417 - DNA, 20 bp, synthetic construct
  source 1..20: mol_type = other DNA
aagtaggggatggggagaag

SEQ ID NO: 14418 - DNA, 20 bp, synthetic construct
  source 1..20: mol_type = other DNA
tcgacgagggagggaaaggg

SEQ ID NO: 14419 - DNA, 20 bp, synthetic construct
  source 1..20: mol_type = other DNA
gagggaggaaagtaggggat

SEQ ID NO: 14420 - DNA, 20 bp, synthetic construct
  source 1..20: mol_type = other DNA
aagaagggttagcatcgcgg

SEQ ID NO: 14421 - DNA, 20 bp, synthetic construct
  source 1..20: mol_type = other DNA
caggacatcatccacgaccc

SEQ ID NO: 14422 - DNA, 20 bp, synthetic construct
  source 1..20: mol_type = other DNA
acaggacatcatccacgacc

SEQ ID NO: 14423 - DNA, 20 bp, synthetic construct
  source 1..20: mol_type = other DNA
gcccgtgtgaatgccctcgg

SEQ ID NO: 14424 - DNA, 20 bp, synthetic construct
  source 1..20: mol_type = other DNA
atcgtcaaggtgcggaacgc

SEQ ID NO: 14425 - DNA, 20 bp, synthetic construct
  source 1..20: mol_type = other DNA
ggcaagaagggttagcatcg

SEQ ID NO: 14426 - DNA, 20 bp, synthetic construct
  source 1..20: mol_type = other DNA
tcaagggcatcgtcaaggtg

SEQ ID NO: 14427 - DNA, 20 bp, synthetic construct
  source 1..20: mol_type = other DNA
ggtcgtggatgatgtcctgt

SEQ ID NO: 14428 - DNA, 20 bp, synthetic construct
  source 1..20: mol_type = other DNA
gggtcgtggatgatgtcctg

SEQ ID NO: 14429 - DNA, 20 bp, synthetic construct
  source 1..20: mol_type = other DNA
gggcagaggcggcgtgagtg

SEQ ID NO: 14430 - DNA, 20 bp, synthetic construct
  source 1..20: mol_type = other DNA
cgtgagtgcggcgttccggc

SEQ ID NO: 14431 - DNA, 20 bp, synthetic construct
  source 1..20: mol_type = other DNA
ctcacgccgcctctgcccac

SEQ ID NO: 14432 - DNA, 20 bp, synthetic construct
  source 1..20: mol_type = other DNA
aaggtgcggaacgctggccg

SEQ ID NO: 14433 - DNA, 20 bp, synthetic construct
  source 1..20: mol_type = other DNA
tgatgtcctgtgggcagagg

SEQ ID NO: 14434 - DNA, 20 bp, synthetic construct
  source 1..20: mol_type = other DNA
ggatgatgtcctgtgggcag

SEQ ID NO: 14435 - DNA, 20 bp, synthetic construct
  source 1..20: mol_type = other DNA
ctagggcagaagatcgagag

SEQ ID NO: 14436 - DNA, 20 bp, synthetic construct
  source 1..20: mol_type = other DNA
tagggcagaagatcgagaga

SEQ ID NO: 14437 - DNA, 20 bp, synthetic construct
  source 1..20: mol_type = other DNA
ggtgacagaggagactgcag

SEQ ID NO: 14438 - DNA, 20 bp, synthetic construct
  source 1..20: mol_type = other DNA
gagagaggccacacaggagt

SEQ ID NO: 14439 - DNA, 20 bp, synthetic construct
  source 1..20: mol_type = other DNA
ctctgtcacccactcctgtg

SEQ ID NO: 14440 - DNA, 20 bp, synthetic construct
  source 1..20: mol_type = other DNA
ggcaggcccaggtcaggagg

SEQ ID NO: 14441 - DNA, 20 bp, synthetic construct
  source 1..20: mol_type = other DNA
cacacaggagtgggtgacag

SEQ ID NO: 14442 - DNA, 20 bp, synthetic construct
  source 1..20: mol_type = other DNA
ggagagaggccacacaggag

SEQ ID NO: 14443 - DNA, 20 bp, synthetic construct
  source 1..20: mol_type = other DNA
ggtcaggaggaggtagagag

SEQ ID NO: 14444 - DNA, 20 bp, synthetic construct
  source 1..20: mol_type = other DNA
gtcaggaggaggtagagaga

SEQ ID NO: 14445 - DNA, 20 bp, synthetic construct
  source 1..20: mol_type = other DNA
gactgcagagggcaggtcta

SEQ ID NO: 14446 - DNA, 20 bp, synthetic construct
  source 1..20: mol_type = other DNA
gcagaagatcgagagagggc

SEQ ID NO: 14447 - DNA, 20 bp, synthetic construct
  source 1..20: mol_type = other DNA
gtgacagaggagactgcaga

SEQ ID NO: 14448 - DNA, 20 bp, synthetic construct
  source 1..20: mol_type = other DNA
cagaggagactgcagagggc

SEQ ID NO: 14449 - DNA, 20 bp, synthetic construct
  source 1..20: mol_type = other DNA
agagagggcaggcccaggtc

SEQ ID NO: 14450 - DNA, 20 bp, synthetic construct
  source 1..20: mol_type = other DNA
ctacacggtcggcacatgcg

SEQ ID NO: 14451 - DNA, 20 bp, synthetic construct
  source 1..20: mol_type = other DNA
ccagctcttccctacacggt

SEQ ID NO: 14452 - DNA, 20 bp, synthetic construct
  source 1..20: mol_type = other DNA
cgcgcatgtgccgaccgtgt

SEQ ID NO: 14453 - DNA, 20 bp, synthetic construct
  source 1..20: mol_type = other DNA
gcgcatgtgccgaccgtgta

SEQ ID NO: 14454 - DNA, 20 bp, synthetic construct
  source 1..20: mol_type = other DNA
gaacccagctcttccctaca

SEQ ID NO: 14455 - DNA, 20 bp, synthetic construct
  source 1..20: mol_type = other DNA
tcccctaccctccaccgtcc

SEQ ID NO: 14456 - DNA, 20 bp, synthetic construct
  source 1..20: mol_type = other DNA
cggcggctcccggacggtgg

SEQ ID NO: 14457 - DNA, 20 bp, synthetic construct
  source 1..20: mol_type = other DNA
tcctgactcctcggcggcgg

SEQ ID NO: 14458 - DNA, 20 bp, synthetic construct
  source 1..20: mol_type = other DNA
gtaggggaagtggaggaaga

SEQ ID NO: 14459 - DNA, 20 bp, synthetic construct
  source 1..20: mol_type = other DNA
cggtggcggcggctcccgga

SEQ ID NO: 14460 - DNA, 20 bp, synthetic construct
  source 1..20: mol_type = other DNA
gctcccggacggtggagggt

SEQ ID NO: 14461 - DNA, 20 bp, synthetic construct
  source 1..20: mol_type = other DNA
gtggagggtaggggaagtgg

SEQ ID NO: 14462 - DNA, 20 bp, synthetic construct
  source 1..20: mol_type = other DNA
tggcggcggctcccggacgg

SEQ ID NO: 14463 - DNA, 20 bp, synthetic construct
  source 1..20: mol_type = other DNA
ggcggctcccggacggtgga

SEQ ID NO: 14464 - DNA, 20 bp, synthetic construct
  source 1..20: mol_type = other DNA
cgaccgtgtagggaagagct

SEQ ID NO: 14465 - DNA, 20 bp, synthetic construct
  source 1..20: mol_type = other DNA
gacgggacctgccgttccgg

SEQ ID NO: 14466 - DNA, 20 bp, synthetic construct
  source 1..20: mol_type = other DNA
gagtcggaggagcctgcgct

SEQ ID NO: 14467 - DNA, 20 bp, synthetic construct
  source 1..20: mol_type = other DNA
tccgactccgccagcgcagg

SEQ ID NO: 14468 - DNA, 20 bp, synthetic construct
  source 1..20: mol_type = other DNA
cctccgactccgccagcgca

SEQ ID NO: 14469 - DNA, 20 bp, synthetic construct
  source 1..20: mol_type = other DNA
tcctccgactccgccagcgc

SEQ ID NO: 14470 - DNA, 20 bp, synthetic construct
  source 1..20: mol_type = other DNA
ctcccctcgctccttcctag

SEQ ID NO: 14471 - DNA, 20 bp, synthetic construct
  source 1..20: mol_type = other DNA
cgggcgcgcgggtaagtgcg

SEQ ID NO: 14472 - DNA, 20 bp, synthetic construct
  source 1..20: mol_type = other DNA
gcgcgcgggtaagtgcgcgg

SEQ ID NO: 14473 - DNA, 20 bp, synthetic construct
  source 1..20: mol_type = other DNA
ccctgcgctggcggagtcgg

SEQ ID NO: 14474 - DNA, 20 bp, synthetic construct
  source 1..20: mol_type = other DNA
ctccgactccgccagcgcag

SEQ ID NO: 14475 - DNA, 20 bp, synthetic construct
  source 1..20: mol_type = other DNA
ggacccagcagcgggcgcgc

SEQ ID NO: 14476 - DNA, 20 bp, synthetic construct
  source 1..20: mol_type = other DNA
ggagtcggaggagcctgcgc

SEQ ID NO: 14477 - DNA, 20 bp, synthetic construct
  source 1..20: mol_type = other DNA
agccgcgccccctgcgctgg

SEQ ID NO: 14478 - DNA, 20 bp, synthetic construct
  source 1..20: mol_type = other DNA
gccccccgccggcccagcgc

SEQ ID NO: 14479 - DNA, 20 bp, synthetic construct
  source 1..20: mol_type = other DNA
ggcagccgcgccccctgcgc

SEQ ID NO: 14480 - DNA, 20 bp, synthetic construct
  source 1..20: mol_type = other DNA
gtgtacataccagtcagctg

SEQ ID NO: 14481 - DNA, 20 bp, synthetic construct
  source 1..20: mol_type = other DNA
gtggctgtgtagcaagatga

SEQ ID NO: 14482 - DNA, 20 bp, synthetic construct
  source 1..20: mol_type = other DNA
ctggtatgtacaccccagct

SEQ ID NO: 14483 - DNA, 20 bp, synthetic construct
  source 1..20: mol_type = other DNA
aggacgggaccacagctgac

SEQ ID NO: 14484 - DNA, 20 bp, synthetic construct
  source 1..20: mol_type = other DNA
gccctgcataaagagaagga

SEQ ID NO: 14485 - DNA, 20 bp, synthetic construct
  source 1..20: mol_type = other DNA
gctgtgtagcaagatgaggg

SEQ ID NO: 14486 - DNA, 20 bp, synthetic construct
  source 1..20: mol_type = other DNA
tggagccctgcataaagaga

SEQ ID NO: 14487 - DNA, 20 bp, synthetic construct
  source 1..20: mol_type = other DNA
tctggcccagaaggcctcag

SEQ ID NO: 14488 - DNA, 20 bp, synthetic construct
  source 1..20: mol_type = other DNA
ttctggcccagaaggcctca

SEQ ID NO: 14489 - DNA, 20 bp, synthetic construct
  source 1..20: mol_type = other DNA
tagaaggaagggcccagctg

SEQ ID NO: 14490 - DNA, 20 bp, synthetic construct
  source 1..20: mol_type = other DNA
ggtggctgtgtagcaagatg

SEQ ID NO: 14491 - DNA, 20 bp, synthetic construct
  source 1..20: mol_type = other DNA
ttgctacacagccacccctg

SEQ ID NO: 14492 - DNA, 20 bp, synthetic construct
  source 1..20: mol_type = other DNA
ggcccagaaggcctcagggg

SEQ ID NO: 14493 - DNA, 20 bp, synthetic construct
  source 1..20: mol_type = other DNA
agtgcgggttctggcccaga

SEQ ID NO: 14494 - DNA, 20 bp, synthetic construct
  source 1..20: mol_type = other DNA
gtagcaagatgagggaggtt

SEQ ID NO: 14495 - DNA, 20 bp, synthetic construct
  source 1..20: mol_type = other DNA
catctaaggacaggccatga

SEQ ID NO: 14496 - DNA, 20 bp, synthetic construct
  source 1..20: mol_type = other DNA
acatggccagatctattagg

SEQ ID NO: 14497 - DNA, 20 bp, synthetic construct
  source 1..20: mol_type = other DNA
ccagatctattaggtggacc

SEQ ID NO: 14498 - DNA, 20 bp, synthetic construct
  source 1..20: mol_type = other DNA
taattctgatgacagaccaa

SEQ ID NO: 14499 - DNA, 20 bp, synthetic construct
  source 1..20: mol_type = other DNA
ccatctaaggacaggccatg

SEQ ID NO: 14500 - DNA, 20 bp, synthetic construct
  source 1..20: mol_type = other DNA
tacacaaaatcgaaccctca

SEQ ID NO: 14501 - DNA, 20 bp, synthetic construct
  source 1..20: mol_type = other DNA
cagggctaatgaaccatcta

SEQ ID NO: 14502 - DNA, 20 bp, synthetic construct
  source 1..20: mol_type = other DNA
cctggtccacctaatagatc

SEQ ID NO: 14503 - DNA, 20 bp, synthetic construct
  source 1..20: mol_type = other DNA
cgttactcatgccagacctt

SEQ ID NO: 14504 - DNA, 20 bp, synthetic construct
  source 1..20: mol_type = other DNA
acgttactcatgccagacct

SEQ ID NO: 14505 - DNA, 20 bp, synthetic construct
  source 1..20: mol_type = other DNA
gagacatggccagatctatt

SEQ ID NO: 14506 - DNA, 20 bp, synthetic construct
  source 1..20: mol_type = other DNA
ctaatgaaccatctaaggac

SEQ ID NO: 14507 - DNA, 20 bp, synthetic construct
  source 1..20: mol_type = other DNA
cctgatttctctgcttccca

SEQ ID NO: 14508 - DNA, 20 bp, synthetic construct
  source 1..20: mol_type = other DNA
cttgggaagcagagaaatca

SEQ ID NO: 14509 - DNA, 20 bp, synthetic construct
  source 1..20: mol_type = other DNA
cctcatggcctgtccttaga

SEQ ID NO: 14510 - DNA, 20 bp, synthetic construct
  source 1..20: mol_type = other DNA
gcggcccacgcgcagcgaca

SEQ ID NO: 14511 - DNA, 20 bp, synthetic construct
  source 1..20: mol_type = other DNA
gttcggtgggcccaatcccg

SEQ ID NO: 14512 - DNA, 20 bp, synthetic construct
  source 1..20: mol_type = other DNA
ccgaaacagccgcaccgccc

SEQ ID NO: 14513 - DNA, 20 bp, synthetic construct
  source 1..20: mol_type = other DNA
ctccaagatggccgctcgcg

SEQ ID NO: 14514 - DNA, 20 bp, synthetic construct
  source 1..20: mol_type = other DNA
cgaaacagccgcaccgcccc

SEQ ID NO: 14515 - DNA, 20 bp, synthetic construct
  source 1..20: mol_type = other DNA
cccgcgagcggccatcttgg

SEQ ID NO: 14516 - DNA, 20 bp, synthetic construct
  source 1..20: mol_type = other DNA
caagatggccgctcgcgggg

SEQ ID NO: 14517 - DNA, 20 bp, synthetic construct
  source 1..20: mol_type = other DNA
cggtgggcccaatcccgggg

SEQ ID NO: 14518 - DNA, 20 bp, synthetic construct
  source 1..20: mol_type = other DNA
ggttcggtgggcccaatccc

SEQ ID NO: 14519 - DNA, 20 bp, synthetic construct
  source 1..20: mol_type = other DNA
gcctccaagatggccgctcg

SEQ ID NO: 14520 - DNA, 20 bp, synthetic construct
  source 1..20: mol_type = other DNA
ggctggttccgccccgcgag

SEQ ID NO: 14521 - DNA, 20 bp, synthetic construct
  source 1..20: mol_type = other DNA
gctgtggccggctccggcag

SEQ ID NO: 14522 - DNA, 20 bp, synthetic construct
  source 1..20: mol_type = other DNA
tgtggccggctccggcaggg

SEQ ID NO: 14523 - DNA, 20 bp, synthetic construct
  source 1..20: mol_type = other DNA
ctgtggccggctccggcagg

SEQ ID NO: 14524 - DNA, 20 bp, synthetic construct
  source 1..20: mol_type = other DNA
agcggccatcttggaggctg

SEQ ID NO: 14525 - DNA, 20 bp, synthetic construct
  source 1..20: mol_type = other DNA
ggggcccaacgcgaacacca

SEQ ID NO: 14526 - DNA, 20 bp, synthetic construct
  source 1..20: mol_type = other DNA
caacttctcacgcatctctg

SEQ ID NO: 14527 - DNA, 20 bp, synthetic construct
  source 1..20: mol_type = other DNA
ccaacgcgaacaccagggca

SEQ ID NO: 14528 - DNA, 20 bp, synthetic construct
  source 1..20: mol_type = other DNA
ttctcacgcatctctggggt

SEQ ID NO: 14529 - DNA, 20 bp, synthetic construct
  source 1..20: mol_type = other DNA
gggcagacgggggtccatgg

SEQ ID NO: 14530 - DNA, 20 bp, synthetic construct
  source 1..20: mol_type = other DNA
cttctcacgcatctctgggg

SEQ ID NO: 14531 - DNA, 20 bp, synthetic construct
  source 1..20: mol_type = other DNA
cggggcccaacgcgaacacc

SEQ ID NO: 14532 - DNA, 20 bp, synthetic construct
  source 1..20: mol_type = other DNA
gcgcccaggcgggcagacgg

SEQ ID NO: 14533 - DNA, 20 bp, synthetic construct
  source 1..20: mol_type = other DNA
gcccagcagcaccagcgccc

SEQ ID NO: 14534 - DNA, 20 bp, synthetic construct
  source 1..20: mol_type = other DNA
agcgcccaggcgggcagacg

SEQ ID NO: 14535 - DNA, 20 bp, synthetic construct
  source 1..20: mol_type = other DNA
cagcagcaccagcgcccagg

SEQ ID NO: 14536 - DNA, 20 bp, synthetic construct
  source 1..20: mol_type = other DNA
agcagcaccagcgcccaggc

SEQ ID NO: 14537 - DNA, 20 bp, synthetic construct
  source 1..20: mol_type = other DNA
cccggcgccacccaccacca

SEQ ID NO: 14538 - DNA, 20 bp, synthetic construct
  source 1..20: mol_type = other DNA
tccatggtggtgggtggcgc

SEQ ID NO: 14539 - DNA, 20 bp, synthetic construct
  source 1..20: mol_type = other DNA
ccagcgcccaggcgggcaga

SEQ ID NO: 14540 - DNA, 20 bp, synthetic construct
  source 1..20: mol_type = other DNA
ctggagcgcactctccagcg

SEQ ID NO: 14541 - DNA, 20 bp, synthetic construct
  source 1..20: mol_type = other DNA
ccaaaggttagacttcctcc

SEQ ID NO: 14542 - DNA, 20 bp, synthetic construct
  source 1..20: mol_type = other DNA
gctgtcttggagtctcccaa

SEQ ID NO: 14543 - DNA, 20 bp, synthetic construct
  source 1..20: mol_type = other DNA
cgaagggacaacggaaaagg

SEQ ID NO: 14544 - DNA, 20 bp, synthetic construct
  source 1..20: mol_type = other DNA
ggagagtgcgctccaggatg

SEQ ID NO: 14545 - DNA, 20 bp, synthetic construct
  source 1..20: mol_type = other DNA
acccagacccccgccgacct

SEQ ID NO: 14546 - DNA, 20 bp, synthetic construct
  source 1..20: mol_type = other DNA
ggcacccaaaactttccgct

SEQ ID NO: 14547 - DNA, 20 bp, synthetic construct
  source 1..20: mol_type = other DNA
tcgcgccccaaaccacatcc

SEQ ID NO: 14548 - DNA, 20 bp, synthetic construct
  source 1..20: mol_type = other DNA
tttggggcgcgaagggacaa

SEQ ID NO: 14549 - DNA, 20 bp, synthetic construct
  source 1..20: mol_type = other DNA
ggatgtggtttggggcgcga

SEQ ID NO: 14550 - DNA, 20 bp, synthetic construct
  source 1..20: mol_type = other DNA
gcagcggggacggtgcgccg

SEQ ID NO: 14551 - DNA, 20 bp, synthetic construct
  source 1..20: mol_type = other DNA
tggcagcggggacggtgcgc

SEQ ID NO: 14552 - DNA, 20 bp, synthetic construct
  source 1..20: mol_type = other DNA
ctccagcgtggctggcagcg

SEQ ID NO: 14553 - DNA, 20 bp, synthetic construct
  source 1..20: mol_type = other DNA
gtccccgctgccagccacgc

SEQ ID NO: 14554 - DNA, 20 bp, synthetic construct
  source 1..20: mol_type = other DNA
agcgtggctggcagcgggga

SEQ ID NO: 14555 - DNA, 20 bp, synthetic construct
  source 1..20: mol_type = other DNA
agtggaagttgcccacgtcg

SEQ ID NO: 14556 - DNA, 20 bp, synthetic construct
  source 1..20: mol_type = other DNA
tatttctacgaccccgacgt

SEQ ID NO: 14557 - DNA, 20 bp, synthetic construct
  source 1..20: mol_type = other DNA
cggcaccatggccaagaccg

SEQ ID NO: 14558 - DNA, 20 bp, synthetic construct
  source 1..20: mol_type = other DNA
ccctatgaagccccatcgcc

SEQ ID NO: 14559 - DNA, 20 bp, synthetic construct
  source 1..20: mol_type = other DNA
aggcggggttgcaactccag

SEQ ID NO: 14560 - DNA, 20 bp, synthetic construct
  source 1..20: mol_type = other DNA
gtagaaataggccacggtct

SEQ ID NO: 14561 - DNA, 20 bp, synthetic construct
  source 1..20: mol_type = other DNA
tgggtcaatgccaggcgatg

SEQ ID NO: 14562 - DNA, 20 bp, synthetic construct
  source 1..20: mol_type = other DNA
ctatttctacgaccccgacg

SEQ ID NO: 14563 - DNA, 20 bp, synthetic construct
  source 1..20: mol_type = other DNA
gtagtggaagttgcccacgt

SEQ ID NO: 14564 - DNA, 20 bp, synthetic construct
  source 1..20: mol_type = other DNA
ggggtcgtagaaataggcca

SEQ ID NO: 14565 - DNA, 20 bp, synthetic construct
  source 1..20: mol_type = other DNA
ataggccacggtcttggcca

SEQ ID NO: 14566 - DNA, 20 bp, synthetic construct
  source 1..20: mol_type = other DNA
ggtcttggccatggtgccgg

SEQ ID NO: 14567 - DNA, 20 bp, synthetic construct
  source 1..20: mol_type = other DNA
cacggtcttggccatggtgc

SEQ ID NO: 14568 - DNA, 20 bp, synthetic construct
  source 1..20: mol_type = other DNA
cctccgccgcccgccgcccg

SEQ ID NO: 14569 - DNA, 20 bp, synthetic construct
  source 1..20: mol_type = other DNA
gtcttggccatggtgccggc

SEQ ID NO: 14570 - DNA, 20 bp, synthetic construct
  source 1..20: mol_type = other DNA
acaggtgacatggcgcccgt

SEQ ID NO: 14571 - DNA, 20 bp, synthetic construct
  source 1..20: mol_type = other DNA
tacaggtgacatggcgcccg

SEQ ID NO: 14572 - DNA, 20 bp, synthetic construct
  source 1..20: mol_type = other DNA
cgggctcgaggcgcaaagca

SEQ ID NO: 14573 - DNA, 20 bp, synthetic construct
  source 1..20: mol_type = other DNA
cgaagtgcgagcccgtccca

SEQ ID NO: 14574 - DNA, 20 bp, synthetic construct
  source 1..20: mol_type = other DNA
aggtgagccaaaggcgaacc

SEQ ID NO: 14575 - DNA, 20 bp, synthetic construct
  source 1..20: mol_type = other DNA
gggctcgcacttcgggacac

SEQ ID NO: 14576 - DNA, 20 bp, synthetic construct
  source 1..20: mol_type = other DNA
gaagtgcgagcccgtcccac

SEQ ID NO: 14577 - DNA, 20 bp, synthetic construct
  source 1..20: mol_type = other DNA
tggtgtccccgaggcgacgg

SEQ ID NO: 14578 - DNA, 20 bp, synthetic construct
  source 1..20: mol_type = other DNA
tcgcggctgaggtgagccaa

SEQ ID NO: 14579 - DNA, 20 bp, synthetic construct
  source 1..20: mol_type = other DNA
ctggtgtccccgaggcgacg

SEQ ID NO: 14580 - DNA, 20 bp, synthetic construct
  source 1..20: mol_type = other DNA
gtgacatggcgcccgtggga

SEQ ID NO: 14581 - DNA, 20 bp, synthetic construct
  source 1..20: mol_type = other DNA
tggcggcgacgcggttgctg

SEQ ID NO: 14582 - DNA, 20 bp, synthetic construct
  source 1..20: mol_type = other DNA
cactggtgtccccgaggcga

SEQ ID NO: 14583 - DNA, 20 bp, synthetic construct
  source 1..20: mol_type = other DNA
ctgtggtgctggcggcgacg

SEQ ID NO: 14584 - DNA, 20 bp, synthetic construct
  source 1..20: mol_type = other DNA
gatggcggctgtggtgctgg

SEQ ID NO: 14585 - DNA, 20 bp, synthetic construct
  source 1..20: mol_type = other DNA
gccgtgctccggagaaactc

SEQ ID NO: 14586 - DNA, 20 bp, synthetic construct
  source 1..20: mol_type = other DNA
ccgtgctccggagaaactcg

SEQ ID NO: 14587 - DNA, 20 bp, synthetic construct
  source 1..20: mol_type = other DNA
cgtgctccggagaaactcgg

SEQ ID NO: 14588 - DNA, 20 bp, synthetic construct
  source 1..20: mol_type = other DNA
aagaggaggcgcgagaatgg

SEQ ID NO: 14589 - DNA, 20 bp, synthetic construct
  source 1..20: mol_type = other DNA
atggaggtggaggccgtctg

SEQ ID NO: 14590 - DNA, 20 bp, synthetic construct
  source 1..20: mol_type = other DNA
aggaggcgcgagaatggagg

SEQ ID NO: 14591 - DNA, 20 bp, synthetic construct
  source 1..20: mol_type = other DNA
aggcgcgagaatggaggtgg

SEQ ID NO: 14592 - DNA, 20 bp, synthetic construct
  source 1..20: mol_type = other DNA
ctgtggtggcgcgggcgagg

SEQ ID NO: 14593 - DNA, 20 bp, synthetic construct
  source 1..20: mol_type = other DNA
gaggtggaggccgtctgtgg

SEQ ID NO: 14594 - DNA, 20 bp, synthetic construct
  source 1..20: mol_type = other DNA
gaggccgtctgtggtggcgc

SEQ ID NO: 14595 - DNA, 20 bp, synthetic construct
  source 1..20: mol_type = other DNA
ggaggccgtctgtggtggcg

SEQ ID NO: 14596 - DNA, 20 bp, synthetic construct
  source 1..20: mol_type = other DNA
cctcgggtggcgggaagagg

SEQ ID NO: 14597 - DNA, 20 bp, synthetic construct
  source 1..20: mol_type = other DNA
cctgccttcagcaaggcccc

SEQ ID NO: 14598 - DNA, 20 bp, synthetic construct
  source 1..20: mol_type = other DNA
gctgccgggggccttgctga

SEQ ID NO: 14599 - DNA, 20 bp, synthetic construct
  source 1..20: mol_type = other DNA
gggggccttgctgaaggcag

SEQ ID NO: 14600 - DNA, 20 bp, synthetic construct
  source 1..20: mol_type = other DNA
cggctctcgcaggagacaag

SEQ ID NO: 14601 - DNA, 20 bp, synthetic construct
  source 1..20: mol_type = other DNA
gagccaagttcgcgtacccc

SEQ ID NO: 14602 - DNA, 20 bp, synthetic construct
  source 1..20: mol_type = other DNA
aagacgcaggtgcgccacgg

SEQ ID NO: 14603 - DNA, 20 bp, synthetic construct
  source 1..20: mol_type = other DNA
cccagactccaacccggctc

SEQ ID NO: 14604 - DNA, 20 bp, synthetic construct
  source 1..20: mol_type = other DNA
catgtctctggagcccgctc

SEQ ID NO: 14605 - DNA, 20 bp, synthetic construct
  source 1..20: mol_type = other DNA
cccccgcccagactccaacc

SEQ ID NO: 14606 - DNA, 20 bp, synthetic construct
  source 1..20: mol_type = other DNA
tgtctcctgcgagagccgcg

SEQ ID NO: 14607 - DNA, 20 bp, synthetic construct
  source 1..20: mol_type = other DNA
cttgtctcctgcgagagccg

SEQ ID NO: 14608 - DNA, 20 bp, synthetic construct
  source 1..20: mol_type = other DNA
gtctcctgcgagagccgcgg

SEQ ID NO: 14609 - DNA, 20 bp, synthetic construct
  source 1..20: mol_type = other DNA
ccgggttggagtctgggcgg

SEQ ID NO: 14610 - DNA, 20 bp, synthetic construct
  source 1..20: mol_type = other DNA
ctccagctccgcggcccccg

SEQ ID NO: 14611 - DNA, 20 bp, synthetic construct
  source 1..20: mol_type = other DNA
gctggagccggagctgaagc

SEQ ID NO: 14612 - DNA, 20 bp, synthetic construct
  source 1..20: mol_type = other DNA
cagctccggctccagctccg

SEQ ID NO: 14613 - DNA, 20 bp, synthetic construct
  source 1..20: mol_type = other DNA
gccggagctgaagccggagc

SEQ ID NO: 14614 - DNA, 20 bp, synthetic construct
  source 1..20: mol_type = other DNA
gagccgggttggagtctggg

SEQ ID NO: 14615 - DNA, 20 bp, synthetic construct
  source 1..20: mol_type = other DNA
ggtgcaggcagccctggtgt

SEQ ID NO: 14616 - DNA, 20 bp, synthetic construct
  source 1..20: mol_type = other DNA
cgcggcagccacaacatccg

SEQ ID NO: 14617 - DNA, 20 bp, synthetic construct
  source 1..20: mol_type = other DNA
cggatgttgtggctgccgcg

SEQ ID NO: 14618 - DNA, 20 bp, synthetic construct
  source 1..20: mol_type = other DNA
gcctgcacccgactcagcag

SEQ ID NO: 14619 - DNA, 20 bp, synthetic construct
  source 1..20: mol_type = other DNA
aggccccagcacctccacca

SEQ ID NO: 14620 - DNA, 20 bp, synthetic construct
  source 1..20: mol_type = other DNA
ggccacggccccggatgttg

SEQ ID NO: 14621 - DNA, 20 bp, synthetic construct
  source 1..20: mol_type = other DNA
gggccctggtggaggtgctg

SEQ ID NO: 14622 - DNA, 20 bp, synthetic construct
  source 1..20: mol_type = other DNA
aaggccccagcacctccacc

SEQ ID NO: 14623 - DNA, 20 bp, synthetic construct
  source 1..20: mol_type = other DNA
ggggagatggctgaggccga

SEQ ID NO: 14624 - DNA, 20 bp, synthetic construct
  source 1..20: mol_type = other DNA
cccggatgttgtggctgccg

SEQ ID NO: 14625 - DNA, 20 bp, synthetic construct
  source 1..20: mol_type = other DNA
cggcctcagccatctccccg

SEQ ID NO: 14626 - DNA, 20 bp, synthetic construct
  source 1..20: mol_type = other DNA
gaagccgggcctggggtcgt

SEQ ID NO: 14627 - DNA, 20 bp, synthetic construct
  source 1..20: mol_type = other DNA
ggagatggctgaggccgaag

SEQ ID NO: 14628 - DNA, 20 bp, synthetic construct
  source 1..20: mol_type = other DNA
ttgtggctgccgcggggaga

SEQ ID NO: 14629 - DNA, 20 bp, synthetic construct
  source 1..20: mol_type = other DNA
ctgccgcggggagatggctg

SEQ ID NO: 14630 - DNA, 20 bp, synthetic construct
  source 1..20: mol_type = other DNA
ctggaggccacgcgtctggg

SEQ ID NO: 14631 - DNA, 20 bp, synthetic construct
  source 1..20: mol_type = other DNA
gtgccggccatggactccgg

SEQ ID NO: 14632 - DNA, 20 bp, synthetic construct
  source 1..20: mol_type = other DNA
cggcacgcgctgggtactcg

SEQ ID NO: 14633 - DNA, 20 bp, synthetic construct
  source 1..20: mol_type = other DNA
cccgagtacccagcgcgtgc

SEQ ID NO: 14634 - DNA, 20 bp, synthetic construct
  source 1..20: mol_type = other DNA
agctgctccagcagcgatgg

SEQ ID NO: 14635 - DNA, 20 bp, synthetic construct
  source 1..20: mol_type = other DNA
gccgctggctctatcccgtc

SEQ ID NO: 14636 - DNA, 20 bp, synthetic construct
  source 1..20: mol_type = other DNA
ccggccatggactccggagg

SEQ ID NO: 14637 - DNA, 20 bp, synthetic construct
  source 1..20: mol_type = other DNA
gtccatggccggcacgcgct

SEQ ID NO: 14638 - DNA, 20 bp, synthetic construct
  source 1..20: mol_type = other DNA
cagcgatggtggaacggaag

SEQ ID NO: 14639 - DNA, 20 bp, synthetic construct
  source 1..20: mol_type = other DNA
tgcgccgcctccggagtcca

SEQ ID NO: 14640 - DNA, 20 bp, synthetic construct
  source 1..20: mol_type = other DNA
ggaggcggcgcagggcctga

SEQ ID NO: 14641 - DNA, 20 bp, synthetic construct
  source 1..20: mol_type = other DNA
ggcagctgctccagcagcga

SEQ ID NO: 14642 - DNA, 20 bp, synthetic construct
  source 1..20: mol_type = other DNA
ttcaggccctgcgccgcctc

SEQ ID NO: 14643 - DNA, 20 bp, synthetic construct
  source 1..20: mol_type = other DNA
gtactcggggcgctgctccg

SEQ ID NO: 14644 - DNA, 20 bp, synthetic construct
  source 1..20: mol_type = other DNA
tggactccggaggcggcgca

SEQ ID NO: 14645 - DNA, 20 bp, synthetic construct
  source 1..20: mol_type = other DNA
agcactgccgaccttgtccg

SEQ ID NO: 14646 - DNA, 20 bp, synthetic construct
  source 1..20: mol_type = other DNA
ggaaggaaactcctcggaca

SEQ ID NO: 14647 - DNA, 20 bp, synthetic construct
  source 1..20: mol_type = other DNA
ggaaactcctcggacaaggt

SEQ ID NO: 14648 - DNA, 20 bp, synthetic construct
  source 1..20: mol_type = other DNA
acctgaaccttgctccgaga

SEQ ID NO: 14649 - DNA, 20 bp, synthetic construct
  source 1..20: mol_type = other DNA
gacctgaaccttgctccgag

SEQ ID NO: 14650 - DNA, 20 bp, synthetic construct
  source 1..20: mol_type = other DNA
gaggactccctctcggagca

SEQ ID NO: 14651 - DNA, 20 bp, synthetic construct
  source 1..20: mol_type = other DNA
ggacgtcagccaaggtgaga

SEQ ID NO: 14652 - DNA, 20 bp, synthetic construct
  source 1..20: mol_type = other DNA
gctccgagagggagtcctcg

SEQ ID NO: 14653 - DNA, 20 bp, synthetic construct
  source 1..20: mol_type = other DNA
gtcctcgcggacgtcagcca

SEQ ID NO: 14654 - DNA, 20 bp, synthetic construct
  source 1..20: mol_type = other DNA
cgtccgcgaggactccctct

SEQ ID NO: 14655 - DNA, 20 bp, synthetic construct
  source 1..20: mol_type = other DNA
gagccctcagctctccgccc

SEQ ID NO: 14656 - DNA, 20 bp, synthetic construct
  source 1..20: mol_type = other DNA
aagcccgggcggagagctga

SEQ ID NO: 14657 - DNA, 20 bp, synthetic construct
  source 1..20: mol_type = other DNA
caccttggctgacgtccgcg

SEQ ID NO: 14658 - DNA, 20 bp, synthetic construct
  source 1..20: mol_type = other DNA
aaagcccgggcggagagctg

SEQ ID NO: 14659 - DNA, 20 bp, synthetic construct
  source 1..20: mol_type = other DNA
gtgggagttgagggagcgga

SEQ ID NO: 14660 - DNA, 20 bp, synthetic construct
  source 1..20: mol_type = other DNA
gagaggtagcggcttacgtg

SEQ ID NO: 14661 - DNA, 20 bp, synthetic construct
  source 1..20: mol_type = other DNA
ccggctacgaccttgagcgg

SEQ ID NO: 14662 - DNA, 20 bp, synthetic construct
  source 1..20: mol_type = other DNA
tgagaggtagcggcttacgt

SEQ ID NO: 14663 - DNA, 20 bp, synthetic construct
  source 1..20: mol_type = other DNA
tggcggtagaagtagcttgg

SEQ ID NO: 14664 - DNA, 20 bp, synthetic construct
  source 1..20: mol_type = other DNA
actgaaaatgggcttcacga

SEQ ID NO: 14665 - DNA, 20 bp, synthetic construct
  source 1..20: mol_type = other DNA
gctgggcccatgagaaaccc

SEQ ID NO: 14666 - DNA, 20 bp, synthetic construct
  source 1..20: mol_type = other DNA
gggccggctacgaccttgag

SEQ ID NO: 14667 - DNA, 20 bp, synthetic construct
  source 1..20: mol_type = other DNA
aatgggcttcacgaaggtgc

SEQ ID NO: 14668 - DNA, 20 bp, synthetic construct
  source 1..20: mol_type = other DNA
gtgagaggtagcggcttacg

SEQ ID NO: 14669 - DNA, 20 bp, synthetic construct
  source 1..20: mol_type = other DNA
gatgctttggcaagatggcg

SEQ ID NO: 14670 - DNA, 20 bp, synthetic construct
  source 1..20: mol_type = other DNA
cggcttacgtggggacccgg

SEQ ID NO: 14671 - DNA, 20 bp, synthetic construct
  source 1..20: mol_type = other DNA
gagtggatgctttggcaaga

SEQ ID NO: 14672 - DNA, 20 bp, synthetic construct
  source 1..20: mol_type = other DNA
gggcttcacgaaggtgctgg

SEQ ID NO: 14673 - DNA, 20 bp, synthetic construct
  source 1..20: mol_type = other DNA
tagcggcttacgtggggacc

SEQ ID NO: 14674 - DNA, 20 bp, synthetic construct
  source 1..20: mol_type = other DNA
tggatgctttggcaagatgg

SEQ ID NO: 14675 - DNA, 20 bp, synthetic construct
  source 1..20: mol_type = other DNA
caggaggaaacagtaccggc

SEQ ID NO: 14676 - DNA, 20 bp, synthetic construct
  source 1..20: mol_type = other DNA
gaggaaacagtaccggctgg

SEQ ID NO: 14677 - DNA, 20 bp, synthetic construct
  source 1..20: mol_type = other DNA
ccagtagggaggaaaaccgg

SEQ ID NO: 14678 - DNA, 20 bp, synthetic construct
  source 1..20: mol_type = other DNA
ggccggtcttgcaggagcgg

SEQ ID NO: 14679 - DNA, 20 bp, synthetic construct
  source 1..20: mol_type = other DNA
ggaaaaccggaggagagcgc

SEQ ID NO: 14680 - DNA, 20 bp, synthetic construct
  source 1..20: mol_type = other DNA
agcgcaggaggaaacagtac

SEQ ID NO: 14681 - DNA, 20 bp, synthetic construct
  source 1..20: mol_type = other DNA
aaacagtaccggctggaggc

SEQ ID NO: 14682 - DNA, 20 bp, synthetic construct
  source 1..20: mol_type = other DNA
aggccggtcttgcaggagcg

SEQ ID NO: 14683 - DNA, 20 bp, synthetic construct
  source 1..20: mol_type = other DNA
ggaggccggtcttgcaggag

SEQ ID NO: 14684 - DNA, 20 bp, synthetic construct
  source 1..20: mol_type = other DNA
aaaccggaggagagcgcagg

SEQ ID NO: 14685 - DNA, 20 bp, synthetic construct
  source 1..20: mol_type = other DNA
gaggccggtcttgcaggagc

SEQ ID NO: 14686 - DNA, 20 bp, synthetic construct
  source 1..20: mol_type = other DNA
gcaggagcgggggactgctg

SEQ ID NO: 14687 - DNA, 20 bp, synthetic construct
  source 1..20: mol_type = other DNA
caggagcgggggactgctgg

SEQ ID NO: 14688 - DNA, 20 bp, synthetic construct
  source 1..20: mol_type = other DNA
tttcctcctgcgctctcctc

SEQ ID NO: 14689 - DNA, 20 bp, synthetic construct
  source 1..20: mol_type = other DNA
ctgcaagaccggcctccagc

SEQ ID NO: 14690 - DNA, 20 bp, synthetic construct
  source 1..20: mol_type = other DNA
ctccgcgcagaggtcgacag

SEQ ID NO: 14691 - DNA, 20 bp, synthetic construct
  source 1..20: mol_type = other DNA
aacctctgtcgacctctgcg

SEQ ID NO: 14692 - DNA, 20 bp, synthetic construct
  source 1..20: mol_type = other DNA
agtcccccacgctcttcaca

SEQ ID NO: 14693 - DNA, 20 bp, synthetic construct
  source 1..20: mol_type = other DNA
caggagccatgtgagtaccc

SEQ ID NO: 14694 - DNA, 20 bp, synthetic construct
  source 1..20: mol_type = other DNA
ccgggtactcacatggctcc

SEQ ID NO: 14695 - DNA, 20 bp, synthetic construct
  source 1..20: mol_type = other DNA
ggtcgacagaggttgaggca

SEQ ID NO: 14696 - DNA, 20 bp, synthetic construct
  source 1..20: mol_type = other DNA
catgtgagtacccgggaccc

SEQ ID NO: 14697 - DNA, 20 bp, synthetic construct
  source 1..20: mol_type = other DNA
ctctctccctgtgaagagcg

SEQ ID NO: 14698 - DNA, 20 bp, synthetic construct
  source 1..20: mol_type = other DNA
tgtgagtacccgggaccccg

SEQ ID NO: 14699 - DNA, 20 bp, synthetic construct
  source 1..20: mol_type = other DNA
atgtgagtacccgggacccc

SEQ ID NO: 14700 - DNA, 20 bp, synthetic construct
  source 1..20: mol_type = other DNA
gcagaggtcgacagaggttg

SEQ ID NO: 14701 - DNA, 20 bp, synthetic construct
  source 1..20: mol_type = other DNA
gagtcccccacgctcttcac

SEQ ID NO: 14702 - DNA, 20 bp, synthetic construct
  source 1..20: mol_type = other DNA
acagggagagagaagtgagc

SEQ ID NO: 14703 - DNA, 20 bp, synthetic construct
  source 1..20: mol_type = other DNA
ccaggagccatgtgagtacc

SEQ ID NO: 14704 - DNA, 20 bp, synthetic construct
  source 1..20: mol_type = other DNA
acttgggtggcctggccccg

SEQ ID NO: 14705 - DNA, 20 bp, synthetic construct
  source 1..20: mol_type = other DNA
gccagccgcagacaacgaag

SEQ ID NO: 14706 - DNA, 20 bp, synthetic construct
  source 1..20: mol_type = other DNA
ggggctctcatagtgctgga

SEQ ID NO: 14707 - DNA, 20 bp, synthetic construct
  source 1..20: mol_type = other DNA
ggcagaggcaccgaaggccg

SEQ ID NO: 14708 - DNA, 20 bp, synthetic construct
  source 1..20: mol_type = other DNA
cgggcggtggacagtcatgg

SEQ ID NO: 14709 - DNA, 20 bp, synthetic construct
  source 1..20: mol_type = other DNA
tctgcgtgctcttcccggcg

SEQ ID NO: 14710 - DNA, 20 bp, synthetic construct
  source 1..20: mol_type = other DNA
cggggctctcatagtgctgg

SEQ ID NO: 14711 - DNA, 20 bp, synthetic construct
  source 1..20: mol_type = other DNA
cggcgggcggtggacagtca

SEQ ID NO: 14712 - DNA, 20 bp, synthetic construct
  source 1..20: mol_type = other DNA
aagcggagcaaagagcccct

SEQ ID NO: 14713 - DNA, 20 bp, synthetic construct
  source 1..20: mol_type = other DNA
gactgtccaccgcccgccgc

SEQ ID NO: 14714 - DNA, 20 bp, synthetic construct
  source 1..20: mol_type = other DNA
gcgcggggctctcatagtgc

SEQ ID NO: 14715 - DNA, 20 bp, synthetic construct
  source 1..20: mol_type = other DNA
cactatgagagccccgcgcc

SEQ ID NO: 14716 - DNA, 20 bp, synthetic construct
  source 1..20: mol_type = other DNA
gcactatgagagccccgcgc

SEQ ID NO: 14717 - DNA, 20 bp, synthetic construct
  source 1..20: mol_type = other DNA
acagtcatggcggcccggcg

SEQ ID NO: 14718 - DNA, 20 bp, synthetic construct
  source 1..20: mol_type = other DNA
ctggagggcgtggaccgcgc

SEQ ID NO: 14719 - DNA, 20 bp, synthetic construct
  source 1..20: mol_type = other DNA
agtcatggcggcccggcgcg

SEQ ID NO: 14720 - DNA, 20 bp, synthetic construct
  source 1..20: mol_type = other DNA
gagccgggcgcttagaacag

SEQ ID NO: 14721 - DNA, 20 bp, synthetic construct
  source 1..20: mol_type = other DNA
ctcagtttctcactccgaag

SEQ ID NO: 14722 - DNA, 20 bp, synthetic construct
  source 1..20: mol_type = other DNA
gcagcagccagagagggagt

SEQ ID NO: 14723 - DNA, 20 bp, synthetic construct
  source 1..20: mol_type = other DNA
agaacagaggcttgcacagg

SEQ ID NO: 14724 - DNA, 20 bp, synthetic construct
  source 1..20: mol_type = other DNA
gaagtggcagcagccagaga

SEQ ID NO: 14725 - DNA, 20 bp, synthetic construct
  source 1..20: mol_type = other DNA
gaggtgggtactctgagcca

SEQ ID NO: 14726 - DNA, 20 bp, synthetic construct
  source 1..20: mol_type = other DNA
agccagagagggagtcggtg

SEQ ID NO: 14727 - DNA, 20 bp, synthetic construct
  source 1..20: mol_type = other DNA
cttagaacagaggcttgcac

SEQ ID NO: 14728 - DNA, 20 bp, synthetic construct
  source 1..20: mol_type = other DNA
aagcctctgttctaagcgcc

SEQ ID NO: 14729 - DNA, 20 bp, synthetic construct
  source 1..20: mol_type = other DNA
agggagtcggtgtggacgcg

SEQ ID NO: 14730 - DNA, 20 bp, synthetic construct
  source 1..20: mol_type = other DNA
acagaggcttgcacaggtgg

SEQ ID NO: 14731 - DNA, 20 bp, synthetic construct
  source 1..20: mol_type = other DNA
aggtgggtactctgagccat

SEQ ID NO: 14732 - DNA, 20 bp, synthetic construct
  source 1..20: mol_type = other DNA
aggcttgcacaggtggaggt

SEQ ID NO: 14733 - DNA, 20 bp, synthetic construct
  source 1..20: mol_type = other DNA
gaggcttgcacaggtggagg

SEQ ID NO: 14734 - DNA, 20 bp, synthetic construct
  source 1..20: mol_type = other DNA
tcggtgtggacgcgaggagc

SEQ ID NO: 14735 - DNA, 20 bp, synthetic construct
  source 1..20: mol_type = other DNA
atggccgagtctcctcactg

SEQ ID NO: 14736 - DNA, 20 bp, synthetic construct
  source 1..20: mol_type = other DNA
gcgcgctggcagcaccagag

SEQ ID NO: 14737 - DNA, 20 bp, synthetic construct
  source 1..20: mol_type = other DNA
cgtgcgcgccctcaggtgtg

SEQ ID NO: 14738 - DNA, 20 bp, synthetic construct
  source 1..20: mol_type = other DNA
gcacggtctggcggtagtgc

SEQ ID NO: 14739 - DNA, 20 bp, synthetic construct
  source 1..20: mol_type = other DNA
gcgggtcgtggcgggtcttg

SEQ ID NO: 14740 - DNA, 20 bp, synthetic construct
  source 1..20: mol_type = other DNA
cctctggtgctgccagcgcg

SEQ ID NO: 14741 - DNA, 20 bp, synthetic construct
  source 1..20: mol_type = other DNA
gcggccgcagtgaggagact

SEQ ID NO: 14742 - DNA, 20 bp, synthetic construct
  source 1..20: mol_type = other DNA
ccgcgcgctggcagcaccag

SEQ ID NO: 14743 - DNA, 20 bp, synthetic construct
  source 1..20: mol_type = other DNA
ccggcaccgcggccgcagtg

SEQ ID NO: 14744 - DNA, 20 bp, synthetic construct
  source 1..20: mol_type = other DNA
cgcgcgctggcagcaccaga

SEQ ID NO: 14745 - DNA, 20 bp, synthetic construct
  source 1..20: mol_type = other DNA
ggcagcaccagaggggcccg

SEQ ID NO: 14746 - DNA, 20 bp, synthetic construct
  source 1..20: mol_type = other DNA
cgggtcttgcggccgcgcgc

SEQ ID NO: 14747 - DNA, 20 bp, synthetic construct
  source 1..20: mol_type = other DNA
acggggtccccgcgcccagg

SEQ ID NO: 14748 - DNA, 20 bp, synthetic construct
  source 1..20: mol_type = other DNA
aggggcccggggcctgcacg

SEQ ID NO: 14749 - DNA, 20 bp, synthetic construct
  source 1..20: mol_type = other DNA
gcgctgagccgcctgggcgc

SEQ ID NO: 14750 - DNA, 20 bp, synthetic construct
  source 1..20: mol_type = other DNA
ttgtgccagcgactaaaaag

SEQ ID NO: 14751 - DNA, 20 bp, synthetic construct
  source 1..20: mol_type = other DNA
cggaggccgcacctggttag

SEQ ID NO: 14752 - DNA, 20 bp, synthetic construct
  source 1..20: mol_type = other DNA
agtaacggcttgaggtgcgg

SEQ ID NO: 14753 - DNA, 20 bp, synthetic construct
  source 1..20: mol_type = other DNA
gtgtccttggacttagagag

SEQ ID NO: 14754 - DNA, 20 bp, synthetic construct
  source 1..20: mol_type = other DNA
tgtccttggacttagagagt

SEQ ID NO: 14755 - DNA, 20 bp, synthetic construct
  source 1..20: mol_type = other DNA
gctgggcgagtaacggcttg

SEQ ID NO: 14756 - DNA, 20 bp, synthetic construct
  source 1..20: mol_type = other DNA
gctctgcctctaaccaggtg

SEQ ID NO: 14757 - DNA, 20 bp, synthetic construct
  source 1..20: mol_type = other DNA
gaggtgagagcgggtcgcgg

SEQ ID NO: 14758 - DNA, 20 bp, synthetic construct
  source 1..20: mol_type = other DNA
gactaaaaagaggtgagagc

SEQ ID NO: 14759 - DNA, 20 bp, synthetic construct
  source 1..20: mol_type = other DNA
gaacactcccgctccgaagc

SEQ ID NO: 14760 - DNA, 20 bp, synthetic construct
  source 1..20: mol_type = other DNA
ccacagctctgcctctaacc

SEQ ID NO: 14761 - DNA, 20 bp, synthetic construct
  source 1..20: mol_type = other DNA
ggggacgtccggcttcggag

SEQ ID NO: 14762 - DNA, 20 bp, synthetic construct
  source 1..20: mol_type = other DNA
gtccttggacttagagagtg

SEQ ID NO: 14763 - DNA, 20 bp, synthetic construct
  source 1..20: mol_type = other DNA
aaagaggtgagagcgggtcg

SEQ ID NO: 14764 - DNA, 20 bp, synthetic construct
  source 1..20: mol_type = other DNA
gggacgtccggcttcggagc

SEQ ID NO: 14765 - DNA, 20 bp, synthetic construct
  source 1..20: mol_type = other DNA
gcggcagacggcgacagtgg

SEQ ID NO: 14766 - DNA, 20 bp, synthetic construct
  source 1..20: mol_type = other DNA
gcggcgtcggtggcgagctg

SEQ ID NO: 14767 - DNA, 20 bp, synthetic construct
  source 1..20: mol_type = other DNA
tccccggcttcctgcggcgt

SEQ ID NO: 14768 - DNA, 20 bp, synthetic construct
  source 1..20: mol_type = other DNA
ggtacctgcaagccctgcca

SEQ ID NO: 14769 - DNA, 20 bp, synthetic construct
  source 1..20: mol_type = other DNA
gcgtcggtggcgagctgagg

SEQ ID NO: 14770 - DNA, 20 bp, synthetic construct
  source 1..20: mol_type = other DNA
gctgcggcagacggcgacag

SEQ ID NO: 14771 - DNA, 20 bp, synthetic construct
  source 1..20: mol_type = other DNA
cagctcgccaccgacgccgc

SEQ ID NO: 14772 - DNA, 20 bp, synthetic construct
  source 1..20: mol_type = other DNA
tcggtggcgagctgaggtgg

SEQ ID NO: 14773 - DNA, 20 bp, synthetic construct
  source 1..20: mol_type = other DNA
gcagacggcgacagtggcgg

SEQ ID NO: 14774 - DNA, 20 bp, synthetic construct
  source 1..20: mol_type = other DNA
ggcagggcttgcaggtaccg

SEQ ID NO: 14775 - DNA, 20 bp, synthetic construct
  source 1..20: mol_type = other DNA
gtggcggcggcgccatggca

SEQ ID NO: 14776 - DNA, 20 bp, synthetic construct
  source 1..20: mol_type = other DNA
tggaggcaggctgcggcaga

SEQ ID NO: 14777 - DNA, 20 bp, synthetic construct
  source 1..20: mol_type = other DNA
gctgaggtggaggcaggctg

SEQ ID NO: 14778 - DNA, 20 bp, synthetic construct
  source 1..20: mol_type = other DNA
cgacagtggcggcggcgcca

SEQ ID NO: 14779 - DNA, 20 bp, synthetic construct
  source 1..20: mol_type = other DNA
tggcgagctgaggtggaggc

SEQ ID NO: 14780 - DNA, 20 bp, synthetic construct
  source 1..20: mol_type = other DNA
tcaacatcgtgcgacagtcc

SEQ ID NO: 14781 - DNA, 20 bp, synthetic construct
  source 1..20: mol_type = other DNA
actgtcgcacgatgttgatg

SEQ ID NO: 14782 - DNA, 20 bp, synthetic construct
  source 1..20: mol_type = other DNA
aaggggcaatcacataaggt

SEQ ID NO: 14783 - DNA, 20 bp, synthetic construct
  source 1..20: mol_type = other DNA
tcaggctgcacaaaatgaag

SEQ ID NO: 14784 - DNA, 20 bp, synthetic construct
  source 1..20: mol_type = other DNA
ggactgtcgcacgatgttga

SEQ ID NO: 14785 - DNA, 20 bp, synthetic construct
  source 1..20: mol_type = other DNA
gccattacaacaaaaactgg

SEQ ID NO: 14786 - DNA, 20 bp, synthetic construct
  source 1..20: mol_type = other DNA
gacagtccgggcagttgaga

SEQ ID NO: 14787 - DNA, 20 bp, synthetic construct
  source 1..20: mol_type = other DNA
tcgcacgatgttgatggggt

SEQ ID NO: 14788 - DNA, 20 bp, synthetic construct
  source 1..20: mol_type = other DNA
aaaacggttgttcccaccca

SEQ ID NO: 14789 - DNA, 20 bp, synthetic construct
  source 1..20: mol_type = other DNA
aaactggcggcgaggaactg

SEQ ID NO: 14790 - DNA, 20 bp, synthetic construct
  source 1..20: mol_type = other DNA
ctgaaaggggcaatcacata

SEQ ID NO: 14791 - DNA, 20 bp, synthetic construct
  source 1..20: mol_type = other DNA
gcacaaaatgaagcggtgca

SEQ ID NO: 14792 - DNA, 20 bp, synthetic construct
  source 1..20: mol_type = other DNA
gatgttgatggggtcgggga

SEQ ID NO: 14793 - DNA, 20 bp, synthetic construct
  source 1..20: mol_type = other DNA
cttatgtgattgcccctttc

SEQ ID NO: 14794 - DNA, 20 bp, synthetic construct
  source 1..20: mol_type = other DNA
tgcacaaaatgaagcggtgc

SEQ ID NO: 14795 - DNA, 20 bp, synthetic construct
  source 1..20: mol_type = other DNA
ggtaacctggaacttccacc

SEQ ID NO: 14796 - DNA, 20 bp, synthetic construct
  source 1..20: mol_type = other DNA
gtaacctggaacttccacct

SEQ ID NO: 14797 - DNA, 20 bp, synthetic construct
  source 1..20: mol_type = other DNA
gttccaggttaccccagacc

SEQ ID NO: 14798 - DNA, 20 bp, synthetic construct
  source 1..20: mol_type = other DNA
cttcaacggaccggacaggg

SEQ ID NO: 14799 - DNA, 20 bp, synthetic construct
  source 1..20: mol_type = other DNA
gacctagcgcagagcccagg

SEQ ID NO: 14800 - DNA, 20 bp, synthetic construct
  source 1..20: mol_type = other DNA
agagacctagcgcagagccc

SEQ ID NO: 14801 - DNA, 20 bp, synthetic construct
  source 1..20: mol_type = other DNA
tgtttcactccctccccgcg

SEQ ID NO: 14802 - DNA, 20 bp, synthetic construct
  source 1..20: mol_type = other DNA
tctgtttcactccctccccg

SEQ ID NO: 14803 - DNA, 20 bp, synthetic construct
  source 1..20: mol_type = other DNA
cctggggcggagctgtctag

SEQ ID NO: 14804 - DNA, 20 bp, synthetic construct
  source 1..20: mol_type = other DNA
agagcgccgagtcctaggcc

SEQ ID NO: 14805 - DNA, 20 bp, synthetic construct
  source 1..20: mol_type = other DNA
cccgcgagctgcgcgccccg

SEQ ID NO: 14806 - DNA, 20 bp, synthetic construct
  source 1..20: mol_type = other DNA
cccgcggggcgcgcagctcg

SEQ ID NO: 14807 - DNA, 20 bp, synthetic construct
  source 1..20: mol_type = other DNA
ctgtttcactccctccccgc

SEQ ID NO: 14808 - DNA, 20 bp, synthetic construct
  source 1..20: mol_type = other DNA
ggaggtggcccaggagtgct

SEQ ID NO: 14809 - DNA, 20 bp, synthetic construct
  source 1..20: mol_type = other DNA
cgagtcctaggccaggtctg

SEQ ID NO: 14810 - DNA, 20 bp, synthetic construct
  source 1..20: mol_type = other DNA
gcctcggttgaagtgagcag

SEQ ID NO: 14811 - DNA, 20 bp, synthetic construct
  source 1..20: mol_type = other DNA
agtcacataggataggcagg

SEQ ID NO: 14812 - DNA, 20 bp, synthetic construct
  source 1..20: mol_type = other DNA
tcctctgctcacttcaaccg

SEQ ID NO: 14813 - DNA, 20 bp, synthetic construct
  source 1..20: mol_type = other DNA
cagaggacatgctggccggt

SEQ ID NO: 14814 - DNA, 20 bp, synthetic construct
  source 1..20: mol_type = other DNA
ggcactgacgctgagaacag

SEQ ID NO: 14815 - DNA, 20 bp, synthetic construct
  source 1..20: mol_type = other DNA
gaagtgagcagaggacatgc

SEQ ID NO: 14816 - DNA, 20 bp, synthetic construct
  source 1..20: mol_type = other DNA
gcagaggacatgctggccgg

SEQ ID NO: 14817 - DNA, 20 bp, synthetic construct
  source 1..20: mol_type = other DNA
gacgctgagaacagaggcag

SEQ ID NO: 14818 - DNA, 20 bp, synthetic construct
  source 1..20: mol_type = other DNA
ctggccggtgggctctggcg

SEQ ID NO: 14819 - DNA, 20 bp, synthetic construct
  source 1..20: mol_type = other DNA
tggccggtgggctctggcgg

SEQ ID NO: 14820 - DNA, 20 bp, synthetic construct
  source 1..20: mol_type = other DNA
tgagcagaggacatgctggc

SEQ ID NO: 14821 - DNA, 20 bp, synthetic construct
  source 1..20: mol_type = other DNA
acatgctggccggtgggctc

SEQ ID NO: 14822 - DNA, 20 bp, synthetic construct
  source 1..20: mol_type = other DNA
ctgcccccgccagagcccac

SEQ ID NO: 14823 - DNA, 20 bp, synthetic construct
  source 1..20: mol_type = other DNA
tgctggccggtgggctctgg

SEQ ID NO: 14824 - DNA, 20 bp, synthetic construct
  source 1..20: mol_type = other DNA
aggagggaagagtgtgcaga

SEQ ID NO: 14825 - DNA, 20 bp, synthetic construct
  source 1..20: mol_type = other DNA
ggatgacatctacaaggctg

SEQ ID NO: 14826 - DNA, 20 bp, synthetic construct
  source 1..20: mol_type = other DNA
gtagatgtcatccatgctgg

SEQ ID NO: 14827 - DNA, 20 bp, synthetic construct
  source 1..20: mol_type = other DNA
acatctacaaggctgcggtg

SEQ ID NO: 14828 - DNA, 20 bp, synthetic construct
  source 1..20: mol_type = other DNA
cagcatggatgacatctaca

SEQ ID NO: 14829 - DNA, 20 bp, synthetic construct
  source 1..20: mol_type = other DNA
gctcacaggacagcttgctg

SEQ ID NO: 14830 - DNA, 20 bp, synthetic construct
  source 1..20: mol_type = other DNA
tggggtgggcaggcccactg

SEQ ID NO: 14831 - DNA, 20 bp, synthetic construct
  source 1..20: mol_type = other DNA
ggggtgggcaggcccactgg

SEQ ID NO: 14832 - DNA, 20 bp, synthetic construct
  source 1..20: mol_type = other DNA
cttgtagatgtcatccatgc

SEQ ID NO: 14833 - DNA, 20 bp, synthetic construct
  source 1..20: mol_type = other DNA
cagctgagtgagcccccagt

SEQ ID NO: 14834 - DNA, 20 bp, synthetic construct
  source 1..20: mol_type = other DNA
tcagctgagtgagcccccag

SEQ ID NO: 14835 - DNA, 20 bp, synthetic construct
  source 1..20: mol_type = other DNA
caaggctgcggtgagggaca

SEQ ID NO: 14836 - DNA, 20 bp, synthetic construct
  source 1..20: mol_type = other DNA
catctacaaggctgcggtga

SEQ ID NO: 14837 - DNA, 20 bp, synthetic construct
  source 1..20: mol_type = other DNA
gacagggctgggtagggctg

SEQ ID NO: 14838 - DNA, 20 bp, synthetic construct
  source 1..20: mol_type = other DNA
ggtgagggacagggctgggt

SEQ ID NO: 14839 - DNA, 20 bp, synthetic construct
  source 1..20: mol_type = other DNA
gtgagggacagggctgggta

SEQ ID NO: 14840 - DNA, 20 bp, synthetic construct
  source 1..20: mol_type = other DNA
aatcatgaaaaattggtatg

SEQ ID NO: 14841 - DNA, 20 bp, synthetic construct
  source 1..20: mol_type = other DNA
tagttagacacaggacctgc

SEQ ID NO: 14842 - DNA, 20 bp, synthetic construct
  source 1..20: mol_type = other DNA
gggtagacgcactagattac

SEQ ID NO: 14843 - DNA, 20 bp, synthetic construct
  source 1..20: mol_type = other DNA
cctgctgggccacagaaagg

SEQ ID NO: 14844 - DNA, 20 bp, synthetic construct
  source 1..20: mol_type = other DNA
ggacctgctgggccacagaa

SEQ ID NO: 14845 - DNA, 20 bp, synthetic construct
  source 1..20: mol_type = other DNA
agttagacacaggacctgct

SEQ ID NO: 14846 - DNA, 20 bp, synthetic construct
  source 1..20: mol_type = other DNA
ataatgtcctagttagacac

SEQ ID NO: 14847 - DNA, 20 bp, synthetic construct
  source 1..20: mol_type = other DNA
ggccacagaaaggaggctct

SEQ ID NO: 14848 - DNA, 20 bp, synthetic construct
  source 1..20: mol_type = other DNA
gacccataatcatgaaaaat

SEQ ID NO: 14849 - DNA, 20 bp, synthetic construct
  source 1..20: mol_type = other DNA
gggccacagaaaggaggctc

SEQ ID NO: 14850 - DNA, 20 bp, synthetic construct
  source 1..20: mol_type = other DNA
agcaggtcctgtgtctaact

SEQ ID NO: 14851 - DNA, 20 bp, synthetic construct
  source 1..20: mol_type = other DNA
tacccagagcctcctttctg

SEQ ID NO: 14852 - DNA, 20 bp, synthetic construct
  source 1..20: mol_type = other DNA
ataaacaatataaaattcat

SEQ ID NO: 14853 - DNA, 20 bp, synthetic construct
  source 1..20: mol_type = other DNA
taaacaatataaaattcatt

SEQ ID NO: 14854 - DNA, 20 bp, synthetic construct
  source 1..20: mol_type = other DNA
cctcctttctgtggcccagc

SEQ ID NO: 14855 - DNA, 20 bp, synthetic construct
  source 1..20: mol_type = other DNA
gggcgaggcccgattctcgg

SEQ ID NO: 14856 - DNA, 20 bp, synthetic construct
  source 1..20: mol_type = other DNA
gactcagcggtccgagtccg

SEQ ID NO: 14857 - DNA, 20 bp, synthetic construct
  source 1..20: mol_type = other DNA
cgagtccgtggcagtccgga

SEQ ID NO: 14858 - DNA, 20 bp, synthetic construct
  source 1..20: mol_type = other DNA
agggcgaggcccgattctcg

SEQ ID NO: 14859 - DNA, 20 bp, synthetic construct
  source 1..20: mol_type = other DNA
gtcgcaggagcagcaagtgg

SEQ ID NO: 14860 - DNA, 20 bp, synthetic construct
  source 1..20: mol_type = other DNA
ggtccgagtccgtggcagtc

SEQ ID NO: 14861 - DNA, 20 bp, synthetic construct
  source 1..20: mol_type = other DNA
gcctctgctcacctcatcca

SEQ ID NO: 14862 - DNA, 20 bp, synthetic construct
  source 1..20: mol_type = other DNA
gactcggaccgctgagtccc

SEQ ID NO: 14863 - DNA, 20 bp, synthetic construct
  source 1..20: mol_type = other DNA
ccaggtccagccgcccagca

SEQ ID NO: 14864 - DNA, 20 bp, synthetic construct
  source 1..20: mol_type = other DNA
gctggtggccggggactcag

SEQ ID NO: 14865 - DNA, 20 bp, synthetic construct
  source 1..20: mol_type = other DNA
tcgggcctcgccctgctggg

SEQ ID NO: 14866 - DNA, 20 bp, synthetic construct
  source 1..20: mol_type = other DNA
cccgtggatgaggtgagcag

SEQ ID NO: 14867 - DNA, 20 bp, synthetic construct
  source 1..20: mol_type = other DNA
agcgcgcccaggctttgccc

SEQ ID NO: 14868 - DNA, 20 bp, synthetic construct
  source 1..20: mol_type = other DNA
cctctgctcacctcatccac

SEQ ID NO: 14869 - DNA, 20 bp, synthetic construct
  source 1..20: mol_type = other DNA
tggatgaggtgagcagaggc

SEQ ID NO: 14870 - DNA, 20 bp, synthetic construct
  source 1..20: mol_type = other DNA
tcatcgacgcccaggacgca

SEQ ID NO: 14871 - DNA, 20 bp, synthetic construct
  source 1..20: mol_type = other DNA
gctgcaagaactaatactgc

SEQ ID NO: 14872 - DNA, 20 bp, synthetic construct
  source 1..20: mol_type = other DNA
agaactaatactgcaggagc

SEQ ID NO: 14873 - DNA, 20 bp, synthetic construct
  source 1..20: mol_type = other DNA
aagaactaatactgcaggag

SEQ ID NO: 14874 - DNA, 20 bp, synthetic construct
  source 1..20: mol_type = other DNA
ctaggggcgcacccagcacg

SEQ ID NO: 14875 - DNA, 20 bp, synthetic construct
  source 1..20: mol_type = other DNA
ttgcgtcctgggcgtcgatg

SEQ ID NO: 14876 - DNA, 20 bp, synthetic construct
  source 1..20: mol_type = other DNA
gtcctgggcgtcgatgaggc

SEQ ID NO: 14877 - DNA, 20 bp, synthetic construct
  source 1..20: mol_type = other DNA
tgcccgcctcatcgacgccc

SEQ ID NO: 14878 - DNA, 20 bp, synthetic construct
  source 1..20: mol_type = other DNA
gctggtggtggcggctgagg

SEQ ID NO: 14879 - DNA, 20 bp, synthetic construct
  source 1..20: mol_type = other DNA
aggcgccgcttcgaggcccg

SEQ ID NO: 14880 - DNA, 20 bp, synthetic construct
  source 1..20: mol_type = other DNA
ttagttcttgcagctggtgg

SEQ ID NO: 14881 - DNA, 20 bp, synthetic construct
  source 1..20: mol_type = other DNA
cgtcctgggcgtcgatgagg

SEQ ID NO: 14882 - DNA, 20 bp, synthetic construct
  source 1..20: mol_type = other DNA
gttcttgcagctggtggtgg

SEQ ID NO: 14883 - DNA, 20 bp, synthetic construct
  source 1..20: mol_type = other DNA
gcagctggtggtggcggctg

SEQ ID NO: 14884 - DNA, 20 bp, synthetic construct
  source 1..20: mol_type = other DNA
gtattagttcttgcagctgg

SEQ ID NO: 14885 - DNA, 20 bp, synthetic construct
  source 1..20: mol_type = other DNA
gggttcaggcctgttccccg

SEQ ID NO: 14886 - DNA, 20 bp, synthetic construct
  source 1..20: mol_type = other DNA
ccgccaccgcctctagaacg

SEQ ID NO: 14887 - DNA, 20 bp, synthetic construct
  source 1..20: mol_type = other DNA
ccaccgcctctagaacgcgg

SEQ ID NO: 14888 - DNA, 20 bp, synthetic construct
  source 1..20: mol_type = other DNA
ctctggggaatcgaaacgcg

SEQ ID NO: 14889 - DNA, 20 bp, synthetic construct
  source 1..20: mol_type = other DNA
cctcctccgcgttctagagg

SEQ ID NO: 14890 - DNA, 20 bp, synthetic construct
  source 1..20: mol_type = other DNA
gctctggggaatcgaaacgc

SEQ ID NO: 14891 - DNA, 20 bp, synthetic construct
  source 1..20: mol_type = other DNA
tcaccaccaagctggagcga

SEQ ID NO: 14892 - DNA, 20 bp, synthetic construct
  source 1..20: mol_type = other DNA
ggatgtccatcgctccagct

SEQ ID NO: 14893 - DNA, 20 bp, synthetic construct
  source 1..20: mol_type = other DNA
cctccgcgttctagaggcgg

SEQ ID NO: 14894 - DNA, 20 bp, synthetic construct
  source 1..20: mol_type = other DNA
ccgcgttctagaggcggtgg

SEQ ID NO: 14895 - DNA, 20 bp, synthetic construct
  source 1..20: mol_type = other DNA
ccgcggctgcggcagcacca

SEQ ID NO: 14896 - DNA, 20 bp, synthetic construct
  source 1..20: mol_type = other DNA
ccgcctctagaacgcggagg

SEQ ID NO: 14897 - DNA, 20 bp, synthetic construct
  source 1..20: mol_type = other DNA
aggcctgttccccgcggctg

SEQ ID NO: 14898 - DNA, 20 bp, synthetic construct
  source 1..20: mol_type = other DNA
ctggtgctgccgcagccgcg

SEQ ID NO: 14899 - DNA, 20 bp, synthetic construct
  source 1..20: mol_type = other DNA
ccctggtgctgccgcagccg

SEQ ID NO: 14900 - DNA, 20 bp, synthetic construct
  source 1..20: mol_type = other DNA
cgagcgctgcagggtcacca

SEQ ID NO: 14901 - DNA, 20 bp, synthetic construct
  source 1..20: mol_type = other DNA
ggtcaccagggccatggctg

SEQ ID NO: 14902 - DNA, 20 bp, synthetic construct
  source 1..20: mol_type = other DNA
atggctgcggcgcggtgcga

SEQ ID NO: 14903 - DNA, 20 bp, synthetic construct
  source 1..20: mol_type = other DNA
cgcacgcgcggccccagctc

SEQ ID NO: 14904 - DNA, 20 bp, synthetic construct
  source 1..20: mol_type = other DNA
gagctggggccgcgcgtgcg

SEQ ID NO: 14905 - DNA, 20 bp, synthetic construct
  source 1..20: mol_type = other DNA
ctgcagggtcaccagggcca

SEQ ID NO: 14906 - DNA, 20 bp, synthetic construct
  source 1..20: mol_type = other DNA
gcccccctgccccgcacgcg

SEQ ID NO: 14907 - DNA, 20 bp, synthetic construct
  source 1..20: mol_type = other DNA
ggcctcggcgcggcgtccgg

SEQ ID NO: 14908 - DNA, 20 bp, synthetic construct
  source 1..20: mol_type = other DNA
ccagggccatggctgcggcg

SEQ ID NO: 14909 - DNA, 20 bp, synthetic construct
  source 1..20: mol_type = other DNA
cagctccggcggcctcggcg

SEQ ID NO: 14910 - DNA, 20 bp, synthetic construct
  source 1..20: mol_type = other DNA
cgccgaggccgccggagctg

SEQ ID NO: 14911 - DNA, 20 bp, synthetic construct
  source 1..20: mol_type = other DNA
cgcccgcgcgcggctccagg

SEQ ID NO: 14912 - DNA, 20 bp, synthetic construct
  source 1..20: mol_type = other DNA
gcgcggctccaggaggcccc

SEQ ID NO: 14913 - DNA, 20 bp, synthetic construct
  source 1..20: mol_type = other DNA
cgccaccgccaccgccgccc

SEQ ID NO: 14914 - DNA, 20 bp, synthetic construct
  source 1..20: mol_type = other DNA
catggctgcggcgcggtgcg

SEQ ID NO: 14915 - DNA, 20 bp, synthetic construct
  source 1..20: mol_type = other DNA
ctgacctcctttctcctcgg

SEQ ID NO: 14916 - DNA, 20 bp, synthetic construct
  source 1..20: mol_type = other DNA
ctcgccgccgaggagaaagg

SEQ ID NO: 14917 - DNA, 20 bp, synthetic construct
  source 1..20: mol_type = other DNA
attccagccgcagaagctca

SEQ ID NO: 14918 - DNA, 20 bp, synthetic construct
  source 1..20: mol_type = other DNA
aaaggaggtcaggagagctc

SEQ ID NO: 14919 - DNA, 20 bp, synthetic construct
  source 1..20: mol_type = other DNA
tcggaaaaaatcccggtacg

SEQ ID NO: 14920 - DNA, 20 bp, synthetic construct
  source 1..20: mol_type = other DNA
cggaaaaaatcccggtacgc

SEQ ID NO: 14921 - DNA, 20 bp, synthetic construct
  source 1..20: mol_type = other DNA
agctcagggctcccgcgtac

SEQ ID NO: 14922 - DNA, 20 bp, synthetic construct
  source 1..20: mol_type = other DNA
cgccgcgagccctccccgcg

SEQ ID NO: 14923 - DNA, 20 bp, synthetic construct
  source 1..20: mol_type = other DNA
ccgggcgccgggagccgctg

SEQ ID NO: 14924 - DNA, 20 bp, synthetic construct
  source 1..20: mol_type = other DNA
tttctgctcggaaaaaatcc

SEQ ID NO: 14925 - DNA, 20 bp, synthetic construct
  source 1..20: mol_type = other DNA
tcgccgcgagccctccccgc

SEQ ID NO: 14926 - DNA, 20 bp, synthetic construct
  source 1..20: mol_type = other DNA
agaggctccgctcgccgccg

SEQ ID NO: 14927 - DNA, 20 bp, synthetic construct
  source 1..20: mol_type = other DNA
ttcgccgcgagccctccccg

SEQ ID NO: 14928 - DNA, 20 bp, synthetic construct
  source 1..20: mol_type = other DNA
gcgggagccctgagcttctg

SEQ ID NO: 14929 - DNA, 20 bp, synthetic construct
  source 1..20: mol_type = other DNA
gctcagggctcccgcgtacc

SEQ ID NO: 14930 - DNA, 20 bp, synthetic construct
  source 1..20: mol_type = other DNA
gaggtggactctgccgacac

SEQ ID NO: 14931 - DNA, 20 bp, synthetic construct
  source 1..20: mol_type = other DNA
gccggcttcgagataagtcc

SEQ ID NO: 14932 - DNA, 20 bp, synthetic construct
  source 1..20: mol_type = other DNA
gccgggacttatctcgaagc

SEQ ID NO: 14933 - DNA, 20 bp, synthetic construct
  source 1..20: mol_type = other DNA
gataagtcccggcgcttgcg

SEQ ID NO: 14934 - DNA, 20 bp, synthetic construct
  source 1..20: mol_type = other DNA
agccgcccgtcgtcgccagg

SEQ ID NO: 14935 - DNA, 20 bp, synthetic construct
  source 1..20: mol_type = other DNA
cgccgcgcggactcatgccg

SEQ ID NO: 14936 - DNA, 20 bp, synthetic construct
  source 1..20: mol_type = other DNA
ctccccggcatgagtccgcg

SEQ ID NO: 14937 - DNA, 20 bp, synthetic construct
  source 1..20: mol_type = other DNA
cgcttacctctctccggtgt

SEQ ID NO: 14938 - DNA, 20 bp, synthetic construct
  source 1..20: mol_type = other DNA
gcccgtcgtcgccaggcggg

SEQ ID NO: 14939 - DNA, 20 bp, synthetic construct
  source 1..20: mol_type = other DNA
actctgccgacaccggagag

SEQ ID NO: 14940 - DNA, 20 bp, synthetic construct
  source 1..20: mol_type = other DNA
aagtcccggcgcttgcgcgg

SEQ ID NO: 14941 - DNA, 20 bp, synthetic construct
  source 1..20: mol_type = other DNA
agccgccgccgcgcaagcgc

SEQ ID NO: 14942 - DNA, 20 bp, synthetic construct
  source 1..20: mol_type = other DNA
ttgcgcggcggcggctatgg

SEQ ID NO: 14943 - DNA, 20 bp, synthetic construct
  source 1..20: mol_type = other DNA
ggctatggcggcggaggagg

SEQ ID NO: 14944 - DNA, 20 bp, synthetic construct
  source 1..20: mol_type = other DNA
cgcggcggcggctatggcgg

SEQ ID NO: 14945 - DNA, 20 bp, synthetic construct
  source 1..20: mol_type = other DNA
gagcagcgccaggatgtcac

SEQ ID NO: 14946 - DNA, 20 bp, synthetic construct
  source 1..20: mol_type = other DNA
tgtgagaagacagcagtgct

SEQ ID NO: 14947 - DNA, 20 bp, synthetic construct
  source 1..20: mol_type = other DNA
agagcagcgccaggatgtca

SEQ ID NO: 14948 - DNA, 20 bp, synthetic construct
  source 1..20: mol_type = other DNA
gaggaggagaagcagcagtg

SEQ ID NO: 14949 - DNA, 20 bp, synthetic construct
  source 1..20: mol_type = other DNA
ggccagctcccgtgacatcc

SEQ ID NO: 14950 - DNA, 20 bp, synthetic construct
  source 1..20: mol_type = other DNA
ggatcctcctcccaggaaag

SEQ ID NO: 14951 - DNA, 20 bp, synthetic construct
  source 1..20: mol_type = other DNA
tgccatggatgtcattgtga

SEQ ID NO: 14952 - DNA, 20 bp, synthetic construct
  source 1..20: mol_type = other DNA
gtgacatcctggcgctgctc

SEQ ID NO: 14953 - DNA, 20 bp, synthetic construct
  source 1..20: mol_type = other DNA
caccttcacaatgacatcca

SEQ ID NO: 14954 - DNA, 20 bp, synthetic construct
  source 1..20: mol_type = other DNA
gcaggaagacaagaatgcca

SEQ ID NO: 14955 - DNA, 20 bp, synthetic construct
  source 1..20: mol_type = other DNA
aggtgagcccctttcctggg

SEQ ID NO: 14956 - DNA, 20 bp, synthetic construct
  source 1..20: mol_type = other DNA
cttgaagccagagcagcgcc

SEQ ID NO: 14957 - DNA, 20 bp, synthetic construct
  source 1..20: mol_type = other DNA
agacaggagagagggtgtga

SEQ ID NO: 14958 - DNA, 20 bp, synthetic construct
  source 1..20: mol_type = other DNA
gagaggaggagaagcagcag

SEQ ID NO: 14959 - DNA, 20 bp, synthetic construct
  source 1..20: mol_type = other DNA
agaggaggagaagcagcagt

SEQ ID NO: 14960 - DNA, 20 bp, synthetic construct
  source 1..20: mol_type = other DNA
gacaacatggcggcccactg

SEQ ID NO: 14961 - DNA, 20 bp, synthetic construct
  source 1..20: mol_type = other DNA
gcggagcggtaggatgaaga

SEQ ID NO: 14962 - DNA, 20 bp, synthetic construct
  source 1..20: mol_type = other DNA
gccagagagagaagatcggg

SEQ ID NO: 14963 - DNA, 20 bp, synthetic construct
  source 1..20: mol_type = other DNA
ccagtgggccgccatgttgt

SEQ ID NO: 14964 - DNA, 20 bp, synthetic construct
  source 1..20: mol_type = other DNA
tgtcggagtgaaaggtaagg

SEQ ID NO: 14965 - DNA, 20 bp, synthetic construct
  source 1..20: mol_type = other DNA
gcgccagagagagaagatcg

SEQ ID NO: 14966 - DNA, 20 bp, synthetic construct
  source 1..20: mol_type = other DNA
tgttgtcggagtgaaaggta

SEQ ID NO: 14967 - DNA, 20 bp, synthetic construct
  source 1..20: mol_type = other DNA
cgccagagagagaagatcgg

SEQ ID NO: 14968 - DNA, 20 bp, synthetic construct
  source 1..20: mol_type = other DNA
gttgtcggagtgaaaggtaa

SEQ ID NO: 14969 - DNA, 20 bp, synthetic construct
  source 1..20: mol_type = other DNA
gagcgccagagagagaagat

SEQ ID NO: 14970 - DNA, 20 bp, synthetic construct
  source 1..20: mol_type = other DNA
agcgccagagagagaagatc

SEQ ID NO: 14971 - DNA, 20 bp, synthetic construct
  source 1..20: mol_type = other DNA
ctttcactccgacaacatgg

SEQ ID NO: 14972 - DNA, 20 bp, synthetic construct
  source 1..20: mol_type = other DNA
gcgccaacccagtccccagt

SEQ ID NO: 14973 - DNA, 20 bp, synthetic construct
  source 1..20: mol_type = other DNA
gcggatactcacgggcggag

SEQ ID NO: 14974 - DNA, 20 bp, synthetic construct
  source 1..20: mol_type = other DNA
ttgtcggagtgaaaggtaag

SEQ ID NO: 14975 - DNA, 20 bp, synthetic construct
  source 1..20: mol_type = other DNA
accgcgcgctcgcttgaccg

SEQ ID NO: 14976 - DNA, 20 bp, synthetic construct
  source 1..20: mol_type = other DNA
gcgctgcgccgaccaagccg

SEQ ID NO: 14977 - DNA, 20 bp, synthetic construct
  source 1..20: mol_type = other DNA
gccgcggtcaagcgagcgcg

SEQ ID NO: 14978 - DNA, 20 bp, synthetic construct
  source 1..20: mol_type = other DNA
gccccgaagggagggcatcg

SEQ ID NO: 14979 - DNA, 20 bp, synthetic construct
  source 1..20: mol_type = other DNA
gcggtcaagcgagcgcgcgg

SEQ ID NO: 14980 - DNA, 20 bp, synthetic construct
  source 1..20: mol_type = other DNA
aagggagggcatcgcggcag

SEQ ID NO: 14981 - DNA, 20 bp, synthetic construct
  source 1..20: mol_type = other DNA
gtcgccgcagccaggcgcac

SEQ ID NO: 14982 - DNA, 20 bp, synthetic construct
  source 1..20: mol_type = other DNA
ccggcaccaggccccgccgc

SEQ ID NO: 14983 - DNA, 20 bp, synthetic construct
  source 1..20: mol_type = other DNA
tgcgtccgtgcgcccggcgg

SEQ ID NO: 14984 - DNA, 20 bp, synthetic construct
  source 1..20: mol_type = other DNA
gcgcctggctgcggcgacgg

SEQ ID NO: 14985 - DNA, 20 bp, synthetic construct
  source 1..20: mol_type = other DNA
ggtgcgcctggctgcggcga

SEQ ID NO: 14986 - DNA, 20 bp, synthetic construct
  source 1..20: mol_type = other DNA
cggcggcgaggggacgcgcg

SEQ ID NO: 14987 - DNA, 20 bp, synthetic construct
  source 1..20: mol_type = other DNA
gctgcggcgacggcggcgag

SEQ ID NO: 14988 - DNA, 20 bp, synthetic construct
  source 1..20: mol_type = other DNA
ggtgccggtgcgcctggctg

SEQ ID NO: 14989 - DNA, 20 bp, synthetic construct
  source 1..20: mol_type = other DNA
ccggcggcggggcctggtgc

SEQ ID NO: 14990 - DNA, 20 bp, synthetic construct
  source 1..20: mol_type = other DNA
ggtggcggcgcagtctcggt

SEQ ID NO: 14991 - DNA, 20 bp, synthetic construct
  source 1..20: mol_type = other DNA
gacttatgggggtttcacag

SEQ ID NO: 14992 - DNA, 20 bp, synthetic construct
  source 1..20: mol_type = other DNA
tcgagctcccaaaaccgagc

SEQ ID NO: 14993 - DNA, 20 bp, synthetic construct
  source 1..20: mol_type = other DNA
gttctaccagacgacttatg

SEQ ID NO: 14994 - DNA, 20 bp, synthetic construct
  source 1..20: mol_type = other DNA
taggcggtatgagtttggct

SEQ ID NO: 14995 - DNA, 20 bp, synthetic construct
  source 1..20: mol_type = other DNA
ttctaccagacgacttatgg

SEQ ID NO: 14996 - DNA, 20 bp, synthetic construct
  source 1..20: mol_type = other DNA
gaggcaaagaggagccctga

SEQ ID NO: 14997 - DNA, 20 bp, synthetic construct
  source 1..20: mol_type = other DNA
cccaaaaccgagctggtgag

SEQ ID NO: 14998 - DNA, 20 bp, synthetic construct
  source 1..20: mol_type = other DNA
ggtttcacagaggcaagatc

SEQ ID NO: 14999 - DNA, 20 bp, synthetic construct
  source 1..20: mol_type = other DNA
aggcaaagaggagccctgaa

SEQ ID NO: 15000 - DNA, 20 bp, synthetic construct
  source 1..20: mol_type = other DNA
gtttcacagaggcaagatcc

SEQ ID NO: 15001 - DNA, 20 bp, synthetic construct
  source 1..20: mol_type = other DNA
ggcggtatgagtttggctgg

SEQ ID NO: 15002 - DNA, 20 bp, synthetic construct
  source 1..20: mol_type = other DNA
ggcggcgcagtctcggtagg

SEQ ID NO: 15003 - DNA, 20 bp, synthetic construct
  source 1..20: mol_type = other DNA
tgcaggtggcggcgcagtct

SEQ ID NO: 15004 - DNA, 20 bp, synthetic construct
  source 1..20: mol_type = other DNA
agctggtgaggggctgcagg

SEQ ID NO: 15005 - DNA, 20 bp, synthetic construct
  source 1..20: mol_type = other DNA
ggtcaccgagagtggacgcg

SEQ ID NO: 15006 - DNA, 20 bp, synthetic construct
  source 1..20: mol_type = other DNA
tggggctcgaagatgcgacc

SEQ ID NO: 15007 - DNA, 20 bp, synthetic construct
  source 1..20: mol_type = other DNA
gcgccgcggcccttgcactc

SEQ ID NO: 15008 - DNA, 20 bp, synthetic construct
  source 1..20: mol_type = other DNA
gcggtgagtgagctccgggc

SEQ ID NO: 15009 - DNA, 20 bp, synthetic construct
  source 1..20: mol_type = other DNA
cggcggcggtgagtgagctc

SEQ ID NO: 15010 - DNA, 20 bp, synthetic construct
  source 1..20: mol_type = other DNA
ctgcggcgggagctggacgc

SEQ ID NO: 15011 - DNA, 20 bp, synthetic construct
  source 1..20: mol_type = other DNA
gctgcggcgggagctggacg

SEQ ID NO: 15012 - DNA, 20 bp, synthetic construct
  source 1..20: mol_type = other DNA
gtgagctccgggctggagcg

SEQ ID NO: 15013 - DNA, 20 bp, synthetic construct
  source 1..20: mol_type = other DNA
gagcggggcggggtgtgcgc

SEQ ID NO: 15014 - DNA, 20 bp, synthetic construct
  source 1..20: mol_type = other DNA
gagtgagctccgggctggag

SEQ ID NO: 15015 - DNA, 20 bp, synthetic construct
  source 1..20: mol_type = other DNA
cggcgggagctggacgcggg

SEQ ID NO: 15016 - DNA, 20 bp, synthetic construct
  source 1..20: mol_type = other DNA
ggcggcggtgagtgagctcc

SEQ ID NO: 15017 - DNA, 20 bp, synthetic construct
  source 1..20: mol_type = other DNA
ccgggctctgctggctgcgg

SEQ ID NO: 15018 - DNA, 20 bp, synthetic construct
  source 1..20: mol_type = other DNA
cggccgggctctgctggctg

SEQ ID NO: 15019 - DNA, 20 bp, synthetic construct
  source 1..20: mol_type = other DNA
ctggacgcgggaggaggcgg

SEQ ID NO: 15020 - DNA, 20 bp, synthetic construct
  source 1..20: mol_type = other DNA
agacagcaagggttcgccca

SEQ ID NO: 15021 - DNA, 20 bp, synthetic construct
  source 1..20: mol_type = other DNA
ggaacatcgggcagcatgag

SEQ ID NO: 15022 - DNA, 20 bp, synthetic construct
  source 1..20: mol_type = other DNA
tggcgaaagctcgtacaggc

SEQ ID NO: 15023 - DNA, 20 bp, synthetic construct
  source 1..20: mol_type = other DNA
aagcgggagccagacagcaa

SEQ ID NO: 15024 - DNA, 20 bp, synthetic construct
  source 1..20: mol_type = other DNA
cagacagcaagggttcgccc

SEQ ID NO: 15025 - DNA, 20 bp, synthetic construct
  source 1..20: mol_type = other DNA
gtccctgcggcgctaagaag

SEQ ID NO: 15026 - DNA, 20 bp, synthetic construct
  source 1..20: mol_type = other DNA
tctttggcgaaagctcgtac

SEQ ID NO: 15027 - DNA, 20 bp, synthetic construct
  source 1..20: mol_type = other DNA
tgtccctgcggcgctaagaa

SEQ ID NO: 15028 - DNA, 20 bp, synthetic construct
  source 1..20: mol_type = other DNA
aagaaggtaacgcgagccct

SEQ ID NO: 15029 - DNA, 20 bp, synthetic construct
  source 1..20: mol_type = other DNA
cgggctcttcctgcgcacca

SEQ ID NO: 15030 - DNA, 20 bp, synthetic construct
  source 1..20: mol_type = other DNA
cagacgtgtgtgtgtccctg

SEQ ID NO: 15031 - DNA, 20 bp, synthetic construct
  source 1..20: mol_type = other DNA
gagccgcagccgtggtgcgc

SEQ ID NO: 15032 - DNA, 20 bp, synthetic construct
  source 1..20: mol_type = other DNA
gcgctaagaaggggagactg

SEQ ID NO: 15033 - DNA, 20 bp, synthetic construct
  source 1..20: mol_type = other DNA
ggagactgaggctgaggctg

SEQ ID NO: 15034 - DNA, 20 bp, synthetic construct
  source 1..20: mol_type = other DNA
cgggcagcatgagcggctgc

SEQ ID NO: 15035 - DNA, 20 bp, synthetic construct
  source 1..20: mol_type = other DNA
accctgacctgcttacgccc

SEQ ID NO: 15036 - DNA, 20 bp, synthetic construct
  source 1..20: mol_type = other DNA
gtaagcaggtcagggtgatg

SEQ ID NO: 15037 - DNA, 20 bp, synthetic construct
  source 1..20: mol_type = other DNA
acctgggcgtaagcaggtca

SEQ ID NO: 15038 - DNA, 20 bp, synthetic construct
  source 1..20: mol_type = other DNA
agggatgtggacagcttgac

SEQ ID NO: 15039 - DNA, 20 bp, synthetic construct
  source 1..20: mol_type = other DNA
gcgaggaggatgctggcgcg

SEQ ID NO: 15040 - DNA, 20 bp, synthetic construct
  source 1..20: mol_type = other DNA
acgcgaggaggatgctggcg

SEQ ID NO: 15041 - DNA, 20 bp, synthetic construct
  source 1..20: mol_type = other DNA
gcgcaggacccggctcacct

SEQ ID NO: 15042 - DNA, 20 bp, synthetic construct
  source 1..20: mol_type = other DNA
cgtcaagctgtccacatccc

SEQ ID NO: 15043 - DNA, 20 bp, synthetic construct
  source 1..20: mol_type = other DNA
cagggatgtggacagcttga

SEQ ID NO: 15044 - DNA, 20 bp, synthetic construct
  source 1..20: mol_type = other DNA
gcaggtcagggtgatgtggc

SEQ ID NO: 15045 - DNA, 20 bp, synthetic construct
  source 1..20: mol_type = other DNA
gatgtggcgggctgaggcca

SEQ ID NO: 15046 - DNA, 20 bp, synthetic construct
  source 1..20: mol_type = other DNA
cgcgaggaggatgctggcgc

SEQ ID NO: 15047 - DNA, 20 bp, synthetic construct
  source 1..20: mol_type = other DNA
agggcacggggcgcaggacc

SEQ ID NO: 15048 - DNA, 20 bp, synthetic construct
  source 1..20: mol_type = other DNA
agcaggtcagggtgatgtgg

SEQ ID NO: 15049 - DNA, 20 bp, synthetic construct
  source 1..20: mol_type = other DNA
gcgggctgaggccagggatg

SEQ ID NO: 15050 - DNA, 20 bp, synthetic construct
  source 1..20: mol_type = other DNA
gacgccaacactgcagcacg

SEQ ID NO: 15051 - DNA, 20 bp, synthetic construct
  source 1..20: mol_type = other DNA
ctacactcccaaacgcgctg

SEQ ID NO: 15052 - DNA, 20 bp, synthetic construct
  source 1..20: mol_type = other DNA
ggacgccaacactgcagcac

SEQ ID NO: 15053 - DNA, 20 bp, synthetic construct
  source 1..20: mol_type = other DNA
cggacgccaacactgcagca

SEQ ID NO: 15054 - DNA, 20 bp, synthetic construct
  source 1..20: mol_type = other DNA
ggaccagcaagcacctgcac

SEQ ID NO: 15055 - DNA, 20 bp, synthetic construct
  source 1..20: mol_type = other DNA
cgctcccgaaaccttgtcga

SEQ ID NO: 15056 - DNA, 20 bp, synthetic construct
  source 1..20: mol_type = other DNA
tcgcctttggtccttcgaca

SEQ ID NO: 15057 - DNA, 20 bp, synthetic construct
  source 1..20: mol_type = other DNA
cgtcccgcgccacaagaaca

SEQ ID NO: 15058 - DNA, 20 bp, synthetic construct
  source 1..20: mol_type = other DNA
aaaccttgtcgaaggaccaa

SEQ ID NO: 15059 - DNA, 20 bp, synthetic construct
  source 1..20: mol_type = other DNA
gtcgaaggaccaaaggcgac

SEQ ID NO: 15060 - DNA, 20 bp, synthetic construct
  source 1..20: mol_type = other DNA
ggagccccgtgctgcagtgt

SEQ ID NO: 15061 - DNA, 20 bp, synthetic construct
  source 1..20: mol_type = other DNA
tcgggagcgggtctggaagg

SEQ ID NO: 15062 - DNA, 20 bp, synthetic construct
  source 1..20: mol_type = other DNA
ggtccttgttcttgtggcgc

SEQ ID NO: 15063 - DNA, 20 bp, synthetic construct
  source 1..20: mol_type = other DNA
gtggaccccagtgcctggga

SEQ ID NO: 15064 - DNA, 20 bp, synthetic construct
  source 1..20: mol_type = other DNA
ttcgggagcgggtctggaag

SEQ ID NO: 15065 - DNA, 20 bp, synthetic construct
  source 1..20: mol_type = other DNA
gcttgtggcccagcatggcg

SEQ ID NO: 15066 - DNA, 20 bp, synthetic construct
  source 1..20: mol_type = other DNA
cgcaggcgacaagggcccgg

SEQ ID NO: 15067 - DNA, 20 bp, synthetic construct
  source 1..20: mol_type = other DNA
gccgagcaaggagcccccgg

SEQ ID NO: 15068 - DNA, 20 bp, synthetic construct
  source 1..20: mol_type = other DNA
ccgcaggcgacaagggcccg

SEQ ID NO: 15069 - DNA, 20 bp, synthetic construct
  source 1..20: mol_type = other DNA
cccaggctgcggacgcgcgt

SEQ ID NO: 15070 - DNA, 20 bp, synthetic construct
  source 1..20: mol_type = other DNA
ccccgggcccttgtcgcctg

SEQ ID NO: 15071 - DNA, 20 bp, synthetic construct
  source 1..20: mol_type = other DNA
gcccacctcggcctctccca

SEQ ID NO: 15072 - DNA, 20 bp, synthetic construct
  source 1..20: mol_type = other DNA
gggggcgccgcaggcgacaa

SEQ ID NO: 15073 - DNA, 20 bp, synthetic construct
  source 1..20: mol_type = other DNA
ccggccgagcaaggagcccc

SEQ ID NO: 15074 - DNA, 20 bp, synthetic construct
  source 1..20: mol_type = other DNA
gccgcaggcgacaagggccc

SEQ ID NO: 15075 - DNA, 20 bp, synthetic construct
  source 1..20: mol_type = other DNA
gccgcgcctgctcccgccgg

SEQ ID NO: 15076 - DNA, 20 bp, synthetic construct
  source 1..20: mol_type = other DNA
gccatgggagaggccgaggt

SEQ ID NO: 15077 - DNA, 20 bp, synthetic construct
  source 1..20: mol_type = other DNA
gtggccgcgcctgctcccgc

SEQ ID NO: 15078 - DNA, 20 bp, synthetic construct
  source 1..20: mol_type = other DNA
agaggccgaggtgggcggcg

SEQ ID NO: 15079 - DNA, 20 bp, synthetic construct
  source 1..20: mol_type = other DNA
ggccatgggagaggccgagg

SEQ ID NO: 15080 - DNA, 20 bp, synthetic construct
  source 1..20: mol_type = other DNA
gctgtgggcggcttctccgt

SEQ ID NO: 15081 - DNA, 20 bp, synthetic construct
  source 1..20: mol_type = other DNA
gaatcggacgaaggaaaggt

SEQ ID NO: 15082 - DNA, 20 bp, synthetic construct
  source 1..20: mol_type = other DNA
gcttctccgtgggctactag

SEQ ID NO: 15083 - DNA, 20 bp, synthetic construct
  source 1..20: mol_type = other DNA
agccggacaccagagccttg

SEQ ID NO: 15084 - DNA, 20 bp, synthetic construct
  source 1..20: mol_type = other DNA
ccgggcccgctagtagccca

SEQ ID NO: 15085 - DNA, 20 bp, synthetic construct
  source 1..20: mol_type = other DNA
aggtaggaaggagcgcaccg

SEQ ID NO: 15086 - DNA, 20 bp, synthetic construct
  source 1..20: mol_type = other DNA
gagactgcttccgccagccc

SEQ ID NO: 15087 - DNA, 20 bp, synthetic construct
  source 1..20: mol_type = other DNA
aaggtaggaaggagcgcacc

SEQ ID NO: 15088 - DNA, 20 bp, synthetic construct
  source 1..20: mol_type = other DNA
aggctctggtgtccggctgt

SEQ ID NO: 15089 - DNA, 20 bp, synthetic construct
  source 1..20: mol_type = other DNA
acggagaagccgcccacagc

SEQ ID NO: 15090 - DNA, 20 bp, synthetic construct
  source 1..20: mol_type = other DNA
ctctggtgtccggctgtggg

SEQ ID NO: 15091 - DNA, 20 bp, synthetic construct
  source 1..20: mol_type = other DNA
ggctgtgggcggcttctccg

SEQ ID NO: 15092 - DNA, 20 bp, synthetic construct
  source 1..20: mol_type = other DNA
gccggacaccagagccttga

SEQ ID NO: 15093 - DNA, 20 bp, synthetic construct
  source 1..20: mol_type = other DNA
aaggctctggtgtccggctg

SEQ ID NO: 15094 - DNA, 20 bp, synthetic construct
  source 1..20: mol_type = other DNA
gatggcggccctcaaggctc

SEQ ID NO: 15095 - DNA, 20 bp, synthetic construct
  source 1..20: mol_type = other DNA
aagatcaggtgtgtgtctgg

SEQ ID NO: 15096 - DNA, 20 bp, synthetic construct
  source 1..20: mol_type = other DNA
ttgctgccatataagaggga

SEQ ID NO: 15097 - DNA, 20 bp, synthetic construct
  source 1..20: mol_type = other DNA
cggaggcgtggacggatctc

SEQ ID NO: 15098 - DNA, 20 bp, synthetic construct
  source 1..20: mol_type = other DNA
aggtagtccacccgcagcca

SEQ ID NO: 15099 - DNA, 20 bp, synthetic construct
  source 1..20: mol_type = other DNA
agatctccggagccagctgt

SEQ ID NO: 15100 - DNA, 20 bp, synthetic construct
  source 1..20: mol_type = other DNA
ccctccagactccctggctg

SEQ ID NO: 15101 - DNA, 20 bp, synthetic construct
  source 1..20: mol_type = other DNA
agcagaaagccgactgctgg

SEQ ID NO: 15102 - DNA, 20 bp, synthetic construct
  source 1..20: mol_type = other DNA
cccgcagccagggagtctgg

SEQ ID NO: 15103 - DNA, 20 bp, synthetic construct
  source 1..20: mol_type = other DNA
acacctgatcttcccacagc

SEQ ID NO: 15104 - DNA, 20 bp, synthetic construct
  source 1..20: mol_type = other DNA
ggcgctcggcctccagcagt

SEQ ID NO: 15105 - DNA, 20 bp, synthetic construct
  source 1..20: mol_type = other DNA
ccgcagccagggagtctgga

SEQ ID NO: 15106 - DNA, 20 bp, synthetic construct
  source 1..20: mol_type = other DNA
ccagactccctggctgcggg

SEQ ID NO: 15107 - DNA, 20 bp, synthetic construct
  source 1..20: mol_type = other DNA
cctccagactccctggctgc

SEQ ID NO: 15108 - DNA, 20 bp, synthetic construct
  source 1..20: mol_type = other DNA
cgtgctccctccagactccc

SEQ ID NO: 15109 - DNA, 20 bp, synthetic construct
  source 1..20: mol_type = other DNA
gtctggagggagcacgcagc

SEQ ID NO: 15110 - DNA, 20 bp, synthetic construct
  source 1..20: mol_type = other DNA
gccggcggcttcaagagcga

SEQ ID NO: 15111 - DNA, 20 bp, synthetic construct
  source 1..20: mol_type = other DNA
cggacccctagaaagccctg

SEQ ID NO: 15112 - DNA, 20 bp, synthetic construct
  source 1..20: mol_type = other DNA
gcgcggcccgatgaagaagg

SEQ ID NO: 15113 - DNA, 20 bp, synthetic construct
  source 1..20: mol_type = other DNA
gcgcatccaccgatcaactt

SEQ ID NO: 15114 - DNA, 20 bp, synthetic construct
  source 1..20: mol_type = other DNA
gtcgctcttgaagccgccgg

SEQ ID NO: 15115 - DNA, 20 bp, synthetic construct
  source 1..20: mol_type = other DNA
agagacttcatggtgccgcc

SEQ ID NO: 15116 - DNA, 20 bp, synthetic construct
  source 1..20: mol_type = other DNA
cgtgcgcggcccgatgaaga

SEQ ID NO: 15117 - DNA, 20 bp, synthetic construct
  source 1..20: mol_type = other DNA
catccaccgatcaacttggg

SEQ ID NO: 15118 - DNA, 20 bp, synthetic construct
  source 1..20: mol_type = other DNA
tccgtcgctcttgaagccgc

SEQ ID NO: 15119 - DNA, 20 bp, synthetic construct
  source 1..20: mol_type = other DNA
ccgatcaacttgggcggaga

SEQ ID NO: 15120 - DNA, 20 bp, synthetic construct
  source 1..20: mol_type = other DNA
gggcccgcagggctttctag

SEQ ID NO: 15121 - DNA, 20 bp, synthetic construct
  source 1..20: mol_type = other DNA
ggacccctagaaagccctgc

SEQ ID NO: 15122 - DNA, 20 bp, synthetic construct
  source 1..20: mol_type = other DNA
gctcttgaagccgccggcgg

SEQ ID NO: 15123 - DNA, 20 bp, synthetic construct
  source 1..20: mol_type = other DNA
gcgcacgcgcccgccgccgg

SEQ ID NO: 15124 - DNA, 20 bp, synthetic construct
  source 1..20: mol_type = other DNA
gccgcgcacgcgcccgccgc

SEQ ID NO: 15125 - DNA, 20 bp, synthetic construct
  source 1..20: mol_type = other DNA
tactccttcaccgcgcgctg

SEQ ID NO: 15126 - DNA, 20 bp, synthetic construct
  source 1..20: mol_type = other DNA
gggacggcagtgctgcggga

SEQ ID NO: 15127 - DNA, 20 bp, synthetic construct
  source 1..20: mol_type = other DNA
ggtgggcgctcagcatcccg

SEQ ID NO: 15128 - DNA, 20 bp, synthetic construct
  source 1..20: mol_type = other DNA
gtgctgcgggaaggcacgcg

SEQ ID NO: 15129 - DNA, 20 bp, synthetic construct
  source 1..20: mol_type = other DNA
gctcgcagccgggcatgagg

SEQ ID NO: 15130 - DNA, 20 bp, synthetic construct
  source 1..20: mol_type = other DNA
tcccggggacggcagtgctg

SEQ ID NO: 15131 - DNA, 20 bp, synthetic construct
  source 1..20: mol_type = other DNA
gcagctcgcagccgggcatg

SEQ ID NO: 15132 - DNA, 20 bp, synthetic construct
  source 1..20: mol_type = other DNA
gcccacgggcagctcgcagc

SEQ ID NO: 15133 - DNA, 20 bp, synthetic construct
  source 1..20: mol_type = other DNA
cccgcagcactgccgtcccc

SEQ ID NO: 15134 - DNA, 20 bp, synthetic construct
  source 1..20: mol_type = other DNA
tcccgcagcactgccgtccc

SEQ ID NO: 15135 - DNA, 20 bp, synthetic construct
  source 1..20: mol_type = other DNA
aggcacgcgaggccggccgg

SEQ ID NO: 15136 - DNA, 20 bp, synthetic construct
  source 1..20: mol_type = other DNA
ggcgctcagcatcccgggga

SEQ ID NO: 15137 - DNA, 20 bp, synthetic construct
  source 1..20: mol_type = other DNA
acccgccgctccccaccccc

SEQ ID NO: 15138 - DNA, 20 bp, synthetic construct
  source 1..20: mol_type = other DNA
cccggggacggcagtgctgc

SEQ ID NO: 15139 - DNA, 20 bp, synthetic construct
  source 1..20: mol_type = other DNA
ggcacgcgaggccggccggg

SEQ ID NO: 15140 - DNA, 20 bp, synthetic construct
  source 1..20: mol_type = other DNA
gggacgcaggtagcgggaca

SEQ ID NO: 15141 - DNA, 20 bp, synthetic construct
  source 1..20: mol_type = other DNA
cgggctcagcaaaccgtccg

SEQ ID NO: 15142 - DNA, 20 bp, synthetic construct
  source 1..20: mol_type = other DNA
acgcaggtagcgggacatgg

SEQ ID NO: 15143 - DNA, 20 bp, synthetic construct
  source 1..20: mol_type = other DNA
gcccagtgccgccaccacca

SEQ ID NO: 15144 - DNA, 20 bp, synthetic construct
  source 1..20: mol_type = other DNA
gggtcctctccaggcgcctg

SEQ ID NO: 15145 - DNA, 20 bp, synthetic construct
  source 1..20: mol_type = other DNA
caggcgcctggagaggaccc

SEQ ID NO: 15146 - DNA, 20 bp, synthetic construct
  source 1..20: mol_type = other DNA
ggggacggagtgaagatggc

SEQ ID NO: 15147 - DNA, 20 bp, synthetic construct
  source 1..20: mol_type = other DNA
ggagaggaccctggtggtgg

SEQ ID NO: 15148 - DNA, 20 bp, synthetic construct
  source 1..20: mol_type = other DNA
caggtagcgggacatggcgg

SEQ ID NO: 15149 - DNA, 20 bp, synthetic construct
  source 1..20: mol_type = other DNA
tggtggcggcactgggccgg

SEQ ID NO: 15150 - DNA, 20 bp, synthetic construct
  source 1..20: mol_type = other DNA
gaggccgcaggcgcctggag

SEQ ID NO: 15151 - DNA, 20 bp, synthetic construct
  source 1..20: mol_type = other DNA
gcgcctggagaggaccctgg

SEQ ID NO: 15152 - DNA, 20 bp, synthetic construct
  source 1..20: mol_type = other DNA
tggcggcggcgtgtctcggc

SEQ ID NO: 15153 - DNA, 20 bp, synthetic construct
  source 1..20: mol_type = other DNA
aggctcggccgcctgagccg

SEQ ID NO: 15154 - DNA, 20 bp, synthetic construct
  source 1..20: mol_type = other DNA
caaaccgtccgcggctcagg

SEQ ID NO: 15155 - DNA, 20 bp, synthetic construct
  source 1..20: mol_type = other DNA
aagctgctatcggtcagttg

SEQ ID NO: 15156 - DNA, 20 bp, synthetic construct
  source 1..20: mol_type = other DNA
tcaaccaatgtgccacacct

SEQ ID NO: 15157 - DNA, 20 bp, synthetic construct
  source 1..20: mol_type = other DNA
gtcagctaaagaccatgaga

SEQ ID NO: 15158 - DNA, 20 bp, synthetic construct
  source 1..20: mol_type = other DNA
tgtcagctaaagaccatgag

SEQ ID NO: 15159 - DNA, 20 bp, synthetic construct
  source 1..20: mol_type = other DNA
ccacacctaggagaaagaag

SEQ ID NO: 15160 - DNA, 20 bp, synthetic construct
  source 1..20: mol_type = other DNA
acattggttgacctttgcca

SEQ ID NO: 15161 - DNA, 20 bp, synthetic construct
  source 1..20: mol_type = other DNA
ttctcctaggtgtggcacat

SEQ ID NO: 15162 - DNA, 20 bp, synthetic construct
  source 1..20: mol_type = other DNA
caccatgcccggctcaaaat

SEQ ID NO: 15163 - DNA, 20 bp, synthetic construct
  source 1..20: mol_type = other DNA
cacattggttgacctttgcc

SEQ ID NO: 15164 - DNA, 20 bp, synthetic construct
  source 1..20: mol_type = other DNA
cctcttctttctcctaggtg

SEQ ID NO: 15165 - DNA, 20 bp, synthetic construct
  source 1..20: mol_type = other DNA
ttctagctttctccctctca

SEQ ID NO: 15166 - DNA, 20 bp, synthetic construct
  source 1..20: mol_type = other DNA
actggcctcttctttctcct

SEQ ID NO: 15167 - DNA, 20 bp, synthetic construct
  source 1..20: mol_type = other DNA
agattctgaaaatcactaac

SEQ ID NO: 15168 - DNA, 20 bp, synthetic construct
  source 1..20: mol_type = other DNA
gaaggtgggggccctggcaa

SEQ ID NO: 15169 - DNA, 20 bp, synthetic construct
  source 1..20: mol_type = other DNA
tatgccgaaggtgggggccc

SEQ ID NO: 15170 - DNA, 20 bp, synthetic construct
  source 1..20: mol_type = other DNA
cacctacccagcgcagtcag

SEQ ID NO: 15171 - DNA, 20 bp, synthetic construct
  source 1..20: mol_type = other DNA
tcccctgagagcctgaaccc

SEQ ID NO: 15172 - DNA, 20 bp, synthetic construct
  source 1..20: mol_type = other DNA
cctacctgctccccaaatcg

SEQ ID NO: 15173 - DNA, 20 bp, synthetic construct
  source 1..20: mol_type = other DNA
gtggcgaggctctcaagccc

SEQ ID NO: 15174 - DNA, 20 bp, synthetic construct
  source 1..20: mol_type = other DNA
ggagcgaccacactcactcg

SEQ ID NO: 15175 - DNA, 20 bp, synthetic construct
  source 1..20: mol_type = other DNA
ccacggcagggatgtcaccc

SEQ ID NO: 15176 - DNA, 20 bp, synthetic construct
  source 1..20: mol_type = other DNA
gccgagtccaggtgtcccgc

SEQ ID NO: 15177 - DNA, 20 bp, synthetic construct
  source 1..20: mol_type = other DNA
gcccgggttcaggctctcag

SEQ ID NO: 15178 - DNA, 20 bp, synthetic construct
  source 1..20: mol_type = other DNA
cacggcagggatgtcacccg

SEQ ID NO: 15179 - DNA, 20 bp, synthetic construct
  source 1..20: mol_type = other DNA
tcaggggagctggcagaacc

SEQ ID NO: 15180 - DNA, 20 bp, synthetic construct
  source 1..20: mol_type = other DNA
gcttgagagcctcgccaccc

SEQ ID NO: 15181 - DNA, 20 bp, synthetic construct
  source 1..20: mol_type = other DNA
cttgagagcctcgccacccc

SEQ ID NO: 15182 - DNA, 20 bp, synthetic construct
  source 1..20: mol_type = other DNA
cacgcgcctgggtgtcggcg

SEQ ID NO: 15183 - DNA, 20 bp, synthetic construct
  source 1..20: mol_type = other DNA
tgcgggaccgcgagtgagtg

SEQ ID NO: 15184 - DNA, 20 bp, synthetic construct
  source 1..20: mol_type = other DNA
gttcaggctctcaggggagc

SEQ ID NO: 15185 - DNA, 20 bp, synthetic construct
  source 1..20: mol_type = other DNA
ggggtggttcagcatccgct

SEQ ID NO: 15186 - DNA, 20 bp, synthetic construct
  source 1..20: mol_type = other DNA
ggccgcaggatccaagctga

SEQ ID NO: 15187 - DNA, 20 bp, synthetic construct
  source 1..20: mol_type = other DNA
acctgaggcgccgttcagga

SEQ ID NO: 15188 - DNA, 20 bp, synthetic construct
  source 1..20: mol_type = other DNA
ttagctctgcagaaaacctg

SEQ ID NO: 15189 - DNA, 20 bp, synthetic construct
  source 1..20: mol_type = other DNA
tctgggaaggcccagcatgg

SEQ ID NO: 15190 - DNA, 20 bp, synthetic construct
  source 1..20: mol_type = other DNA
ctggagctcagcctctggga

SEQ ID NO: 15191 - DNA, 20 bp, synthetic construct
  source 1..20: mol_type = other DNA
ggaggcagccacagctccgg

SEQ ID NO: 15192 - DNA, 20 bp, synthetic construct
  source 1..20: mol_type = other DNA
catggaggcagccacagctc

SEQ ID NO: 15193 - DNA, 20 bp, synthetic construct
  source 1..20: mol_type = other DNA
tgcggccacctccggagctg

SEQ ID NO: 15194 - DNA, 20 bp, synthetic construct
  source 1..20: mol_type = other DNA
tccatgctgggccttcccag

SEQ ID NO: 15195 - DNA, 20 bp, synthetic construct
  source 1..20: mol_type = other DNA
ggcagccacagctccggagg

SEQ ID NO: 15196 - DNA, 20 bp, synthetic construct
  source 1..20: mol_type = other DNA
ggtgaaagaagccagcccag

SEQ ID NO: 15197 - DNA, 20 bp, synthetic construct
  source 1..20: mol_type = other DNA
gcctctgggaaggcccagca

SEQ ID NO: 15198 - DNA, 20 bp, synthetic construct
  source 1..20: mol_type = other DNA
ttggatcctgcggccacctc

SEQ ID NO: 15199 - DNA, 20 bp, synthetic construct
  source 1..20: mol_type = other DNA
acagctccggaggtggccgc

SEQ ID NO: 15200 - DNA, 20 bp, synthetic construct
  source 1..20: mol_type = other DNA
tcccagtcacaattatcacc

SEQ ID NO: 15201 - DNA, 20 bp, synthetic construct
  source 1..20: mol_type = other DNA
tggttagttacctaaatacc

SEQ ID NO: 15202 - DNA, 20 bp, synthetic construct
  source 1..20: mol_type = other DNA
ggtagggacgtgctgtaggc

SEQ ID NO: 15203 - DNA, 20 bp, synthetic construct
  source 1..20: mol_type = other DNA
gtacggcgtgttggtcccag

SEQ ID NO: 15204 - DNA, 20 bp, synthetic construct
  source 1..20: mol_type = other DNA
ctgaggtagggacgtgctgt

SEQ ID NO: 15205 - DNA, 20 bp, synthetic construct
  source 1..20: mol_type = other DNA
gacgacgcaaagcgaggagg

SEQ ID NO: 15206 - DNA, 20 bp, synthetic construct
  source 1..20: mol_type = other DNA
tgactgggatcttggcgccg

SEQ ID NO: 15207 - DNA, 20 bp, synthetic construct
  source 1..20: mol_type = other DNA
tcatccgcagatccaacagc

SEQ ID NO: 15208 - DNA, 20 bp, synthetic construct
  source 1..20: mol_type = other DNA
gcggctgcggtacggcgtgt

SEQ ID NO: 15209 - DNA, 20 bp, synthetic construct
  source 1..20: mol_type = other DNA
acccggtgataattgtgact

SEQ ID NO: 15210 - DNA, 20 bp, synthetic construct
  source 1..20: mol_type = other DNA
gggcgtgcgcggctgcggta

SEQ ID NO: 15211 - DNA, 20 bp, synthetic construct
  source 1..20: mol_type = other DNA
cctacctcagctgaaccgct

SEQ ID NO: 15212 - DNA, 20 bp, synthetic construct
  source 1..20: mol_type = other DNA
cccagcggttcagctgaggt

SEQ ID NO: 15213 - DNA, 20 bp, synthetic construct
  source 1..20: mol_type = other DNA
ccctacctcagctgaaccgc

SEQ ID NO: 15214 - DNA, 20 bp, synthetic construct
  source 1..20: mol_type = other DNA
gtgctgggcgtgcgcggctg

SEQ ID NO: 15215 - DNA, 20 bp, synthetic construct
  source 1..20: mol_type = other DNA
aagaagatgatctccatctg

SEQ ID NO: 15216 - DNA, 20 bp, synthetic construct
  source 1..20: mol_type = other DNA
ggataaagaaaacagctcaa

SEQ ID NO: 15217 - DNA, 20 bp, synthetic construct
  source 1..20: mol_type = other DNA
gatggagatcatcttcttcg

SEQ ID NO: 15218 - DNA, 20 bp, synthetic construct
  source 1..20: mol_type = other DNA
caatggctgaggagtagccc

SEQ ID NO: 15219 - DNA, 20 bp, synthetic construct
  source 1..20: mol_type = other DNA
ggaagtcagccagcatcctg

SEQ ID NO: 15220 - DNA, 20 bp, synthetic construct
  source 1..20: mol_type = other DNA
cattaaccaggtaaactatg

SEQ ID NO: 15221 - DNA, 20 bp, synthetic construct
  source 1..20: mol_type = other DNA
agaagatgatctccatctga

SEQ ID NO: 15222 - DNA, 20 bp, synthetic construct
  source 1..20: mol_type = other DNA
actcctcagccattgccccc

SEQ ID NO: 15223 - DNA, 20 bp, synthetic construct
  source 1..20: mol_type = other DNA
agcccaggtcaacaaaggag

SEQ ID NO: 15224 - DNA, 20 bp, synthetic construct
  source 1..20: mol_type = other DNA
tatcttcatgggcatcaccc

SEQ ID NO: 15225 - DNA, 20 bp, synthetic construct
  source 1..20: mol_type = other DNA
caacaaaggagaggttgcag

SEQ ID NO: 15226 - DNA, 20 bp, synthetic construct
  source 1..20: mol_type = other DNA
gaagtcagccagcatcctgg

SEQ ID NO: 15227 - DNA, 20 bp, synthetic construct
  source 1..20: mol_type = other DNA
ggagtagcccaggtcaacaa

SEQ ID NO: 15228 - DNA, 20 bp, synthetic construct
  source 1..20: mol_type = other DNA
taggaagtcagccagcatcc

SEQ ID NO: 15229 - DNA, 20 bp, synthetic construct
  source 1..20: mol_type = other DNA
catcacccaggaccctcaga

SEQ ID NO: 15230 - DNA, 20 bp, synthetic construct
  source 1..20: mol_type = other DNA
agtgtccccgcccggaaaca

SEQ ID NO: 15231 - DNA, 20 bp, synthetic construct
  source 1..20: mol_type = other DNA
cccgttctgatcctcctgcg

SEQ ID NO: 15232 - DNA, 20 bp, synthetic construct
  source 1..20: mol_type = other DNA
cgcgcaggaggatcagaacg

SEQ ID NO: 15233 - DNA, 20 bp, synthetic construct
  source 1..20: mol_type = other DNA
cgccgcggctgcgccatccg

SEQ ID NO: 15234 - DNA, 20 bp, synthetic construct
  source 1..20: mol_type = other DNA
ttacccacagaggcccgccg

SEQ ID NO: 15235 - DNA, 20 bp, synthetic construct
  source 1..20: mol_type = other DNA
aaacacggcagcgcgaacag

SEQ ID NO: 15236 - DNA, 20 bp, synthetic construct
  source 1..20: mol_type = other DNA
ggaaggaagcagtgagcgcg

SEQ ID NO: 15237 - DNA, 20 bp, synthetic construct
  source 1..20: mol_type = other DNA
accgcgcaggaggatcagaa

SEQ ID NO: 15238 - DNA, 20 bp, synthetic construct
  source 1..20: mol_type = other DNA
ggaagcagtgagcgcgcggt

SEQ ID NO: 15239 - DNA, 20 bp, synthetic construct
  source 1..20: mol_type = other DNA
cgaaacttcatggccgcgga

SEQ ID NO: 15240 - DNA, 20 bp, synthetic construct
  source 1..20: mol_type = other DNA
aggaagcagtgagcgcgcgg

SEQ ID NO: 15241 - DNA, 20 bp, synthetic construct
  source 1..20: mol_type = other DNA
caggaggatcagaacgggga

SEQ ID NO: 15242 - DNA, 20 bp, synthetic construct
  source 1..20: mol_type = other DNA
cagccgcggcgggcctctgt

SEQ ID NO: 15243 - DNA, 20 bp, synthetic construct
  source 1..20: mol_type = other DNA
tttccgggcggggacactca

SEQ ID NO: 15244 - DNA, 20 bp, synthetic construct
  source 1..20: mol_type = other DNA
gcagccgcggcgggcctctg

SEQ ID NO: 15245 - DNA, 20 bp, synthetic construct
  source 1..20: mol_type = other DNA
cctgcggtcaccacacagcg

SEQ ID NO: 15246 - DNA, 20 bp, synthetic construct
  source 1..20: mol_type = other DNA
gcaggccccagacatgaggg

SEQ ID NO: 15247 - DNA, 20 bp, synthetic construct
  source 1..20: mol_type = other DNA
accgcaggccccagacatga

SEQ ID NO: 15248 - DNA, 20 bp, synthetic construct
  source 1..20: mol_type = other DNA
gaccgcaggccccagacatg

SEQ ID NO: 15249 - DNA, 20 bp, synthetic construct
  source 1..20: mol_type = other DNA
cagcgcggccagggcagagt

SEQ ID NO: 15250 - DNA, 20 bp, synthetic construct
  source 1..20: mol_type = other DNA
ccgccgccgcccagagaccg

SEQ ID NO: 15251 - DNA, 20 bp, synthetic construct
  source 1..20: mol_type = other DNA
gtcaccacacagcgcggcca

SEQ ID NO: 15252 - DNA, 20 bp, synthetic construct
  source 1..20: mol_type = other DNA
ggcggcggcccactctgccc

SEQ ID NO: 15253 - DNA, 20 bp, synthetic construct
  source 1..20: mol_type = other DNA
tctgccctggccgcgctgtg

SEQ ID NO: 15254 - DNA, 20 bp, synthetic construct
  source 1..20: mol_type = other DNA
aggcagcctcggtctctggg

SEQ ID NO: 15255 - DNA, 20 bp, synthetic construct
  source 1..20: mol_type = other DNA
cagcctcggtctctgggcgg

SEQ ID NO: 15256 - DNA, 20 bp, synthetic construct
  source 1..20: mol_type = other DNA
acgggccgccctcatgtctg

SEQ ID NO: 15257 - DNA, 20 bp, synthetic construct
  source 1..20: mol_type = other DNA
acagcgcggccagggcagag

SEQ ID NO: 15258 - DNA, 20 bp, synthetic construct
  source 1..20: mol_type = other DNA
cagcaggggcagcagagcac

SEQ ID NO: 15259 - DNA, 20 bp, synthetic construct
  source 1..20: mol_type = other DNA
cctcggtctctgggcggcgg

SEQ ID NO: 15260 - DNA, 20 bp, synthetic construct
  source 1..20: mol_type = other DNA
cccgcgggcactggatgacg

SEQ ID NO: 15261 - DNA, 20 bp, synthetic construct
  source 1..20: mol_type = other DNA
tccgcgtcatccagtgcccg

SEQ ID NO: 15262 - DNA, 20 bp, synthetic construct
  source 1..20: mol_type = other DNA
acctctcaggctaatcccga

SEQ ID NO: 15263 - DNA, 20 bp, synthetic construct
  source 1..20: mol_type = other DNA
gacctctcaggctaatcccg

SEQ ID NO: 15264 - DNA, 20 bp, synthetic construct
  source 1..20: mol_type = other DNA
ccgcgtcatccagtgcccgc

SEQ ID NO: 15265 - DNA, 20 bp, synthetic construct
  source 1..20: mol_type = other DNA
aatgcaaagactgtgaggag

SEQ ID NO: 15266 - DNA, 20 bp, synthetic construct
  source 1..20: mol_type = other DNA
ctgaccccaaccgccacccg

SEQ ID NO: 15267 - DNA, 20 bp, synthetic construct
  source 1..20: mol_type = other DNA
aaagactgtgaggagaggta

SEQ ID NO: 15268 - DNA, 20 bp, synthetic construct
  source 1..20: mol_type = other DNA
cgtcatccagtgcccgcggg

SEQ ID NO: 15269 - DNA, 20 bp, synthetic construct
  source 1..20: mol_type = other DNA
gtcaggccaatggggaaaga

SEQ ID NO: 15270 - DNA, 20 bp, synthetic construct
  source 1..20: mol_type = other DNA
gggattagcctgagaggtcc

SEQ ID NO: 15271 - DNA, 20 bp, synthetic construct
  source 1..20: mol_type = other DNA
tgaccccaaccgccacccgc

SEQ ID NO: 15272 - DNA, 20 bp, synthetic construct
  source 1..20: mol_type = other DNA
gccctcgggattagcctgag

SEQ ID NO: 15273 - DNA, 20 bp, synthetic construct
  source 1..20: mol_type = other DNA
ttggcgctcggcttctgcgg

SEQ ID NO: 15274 - DNA, 20 bp, synthetic construct
  source 1..20: mol_type = other DNA
gcgctcggcttctgcggagg

SEQ ID NO: 15275 - DNA, 20 bp, synthetic construct
  source 1..20: mol_type = other DNA
tatttagtatatactcaggt

SEQ ID NO: 15276 - DNA, 20 bp, synthetic construct
  source 1..20: mol_type = other DNA
tatacacccaactccctcac

SEQ ID NO: 15277 - DNA, 20 bp, synthetic construct
  source 1..20: mol_type = other DNA
tttcttcatagatacagggt

SEQ ID NO: 15278 - DNA, 20 bp, synthetic construct
  source 1..20: mol_type = other DNA
aaggattccagtgagggagt

SEQ ID NO: 15279 - DNA, 20 bp, synthetic construct
  source 1..20: mol_type = other DNA
ttatttagtatatactcagg

SEQ ID NO: 15280 - DNA, 20 bp, synthetic construct
  source 1..20: mol_type = other DNA
tccattctaagaggtttcaa

SEQ ID NO: 15281 - DNA, 20 bp, synthetic construct
  source 1..20: mol_type = other DNA
ccttctaaggattccagtga

SEQ ID NO: 15282 - DNA, 20 bp, synthetic construct
  source 1..20: mol_type = other DNA
aggattccagtgagggagtt

SEQ ID NO: 15283 - DNA, 20 bp, synthetic construct
  source 1..20: mol_type = other DNA
ccctcactggaatccttaga

SEQ ID NO: 15284 - DNA, 20 bp, synthetic construct
  source 1..20: mol_type = other DNA
tccttctaaggattccagtg

SEQ ID NO: 15285 - DNA, 20 bp, synthetic construct
  source 1..20: mol_type = other DNA
agtgagggagttgggtgtat

SEQ ID NO: 15286 - DNA, 20 bp, synthetic construct
  source 1..20: mol_type = other DNA
agggagttgggtgtatagga

SEQ ID NO: 15287 - DNA, 20 bp, synthetic construct
  source 1..20: mol_type = other DNA
ccattctaagaggtttcaaa

SEQ ID NO: 15288 - DNA, 20 bp, synthetic construct
  source 1..20: mol_type = other DNA
agaggtttcaaagggaaact

SEQ ID NO: 15289 - DNA, 20 bp, synthetic construct
  source 1..20: mol_type = other DNA
ccctttgaaacctcttagaa

SEQ ID NO: 15290 - DNA, 20 bp, synthetic construct
  source 1..20: mol_type = other DNA
gtgtttaggctaaagtccac

SEQ ID NO: 15291 - DNA, 20 bp, synthetic construct
  source 1..20: mol_type = other DNA
gagatcaccctctcaatgaa

SEQ ID NO: 15292 - DNA, 20 bp, synthetic construct
  source 1..20: mol_type = other DNA
cagagaccaagagcgcgaag

SEQ ID NO: 15293 - DNA, 20 bp, synthetic construct
  source 1..20: mol_type = other DNA
cttggtctctgaaatctcac

SEQ ID NO: 15294 - DNA, 20 bp, synthetic construct
  source 1..20: mol_type = other DNA
ccgggccaaatcccctaagg

SEQ ID NO: 15295 - DNA, 20 bp, synthetic construct
  source 1..20: mol_type = other DNA
tcagagaccaagagcgcgaa

SEQ ID NO: 15296 - DNA, 20 bp, synthetic construct
  source 1..20: mol_type = other DNA
gccaaatcccctaaggtggt

SEQ ID NO: 15297 - DNA, 20 bp, synthetic construct
  source 1..20: mol_type = other DNA
cgtctgggatgtgaaaagcg

SEQ ID NO: 15298 - DNA, 20 bp, synthetic construct
  source 1..20: mol_type = other DNA
aggtttgcttctacagcccg

SEQ ID NO: 15299 - DNA, 20 bp, synthetic construct
  source 1..20: mol_type = other DNA
ttcagagaccaagagcgcga

SEQ ID NO: 15300 - DNA, 20 bp, synthetic construct
  source 1..20: mol_type = other DNA
gaccaagagcgcgaaggggc

SEQ ID NO: 15301 - DNA, 20 bp, synthetic construct
  source 1..20: mol_type = other DNA
gacatctgcctttcattgag

SEQ ID NO: 15302 - DNA, 20 bp, synthetic construct
  source 1..20: mol_type = other DNA
aatcccctaaggtggtagga

SEQ ID NO: 15303 - DNA, 20 bp, synthetic construct
  source 1..20: mol_type = other DNA
ggtggtaggaaggcgggtaa

SEQ ID NO: 15304 - DNA, 20 bp, synthetic construct
  source 1..20: mol_type = other DNA
cccctaaggtggtaggaagg

SEQ ID NO: 15305 - DNA, 20 bp, synthetic construct
  source 1..20: mol_type = other DNA
ttgggagggtgtgacaagtg

SEQ ID NO: 15306 - DNA, 20 bp, synthetic construct
  source 1..20: mol_type = other DNA
aaaggagggttcttcatcag

SEQ ID NO: 15307 - DNA, 20 bp, synthetic construct
  source 1..20: mol_type = other DNA
agcctgtctgtaggacacaa

SEQ ID NO: 15308 - DNA, 20 bp, synthetic construct
  source 1..20: mol_type = other DNA
tttgtgtcctacagacaggc

SEQ ID NO: 15309 - DNA, 20 bp, synthetic construct
  source 1..20: mol_type = other DNA
caaaggcagcttctcaaagg

SEQ ID NO: 15310 - DNA, 20 bp, synthetic construct
  source 1..20: mol_type = other DNA
gctctggattatctggggat

SEQ ID NO: 15311 - DNA, 20 bp, synthetic construct
  source 1..20: mol_type = other DNA
gcccccatagcaaagaagga

SEQ ID NO: 15312 - DNA, 20 bp, synthetic construct
  source 1..20: mol_type = other DNA
tagggcccccatagcaaaga

SEQ ID NO: 15313 - DNA, 20 bp, synthetic construct
  source 1..20: mol_type = other DNA
tttggccccagcctgtctgt

SEQ ID NO: 15314 - DNA, 20 bp, synthetic construct
  source 1..20: mol_type = other DNA
aaaggcagcttctcaaagga

SEQ ID NO: 15315 - DNA, 20 bp, synthetic construct
  source 1..20: mol_type = other DNA
tgcctttgtgtcctacagac

SEQ ID NO: 15316 - DNA, 20 bp, synthetic construct
  source 1..20: mol_type = other DNA
tgtgtcctacagacaggctg

SEQ ID NO: 15317 - DNA, 20 bp, synthetic construct
  source 1..20: mol_type = other DNA
catcagtggttactgtcaga

SEQ ID NO: 15318 - DNA, 20 bp, synthetic construct
  source 1..20: mol_type = other DNA
acacaaaggcagcttctcaa

SEQ ID NO: 15319 - DNA, 20 bp, synthetic construct
  source 1..20: mol_type = other DNA
acttgggagggtgtgacaag

SEQ ID NO: 15320 - DNA, 20 bp, synthetic construct
  source 1..20: mol_type = other DNA
ggcagcgccgcgaagacgag

SEQ ID NO: 15321 - DNA, 20 bp, synthetic construct
  source 1..20: mol_type = other DNA
ttcgcggcgctgccagatcg

SEQ ID NO: 15322 - DNA, 20 bp, synthetic construct
  source 1..20: mol_type = other DNA
agtttgcaccgaccccgatc

SEQ ID NO: 15323 - DNA, 20 bp, synthetic construct
  source 1..20: mol_type = other DNA
cggcccaggtgctcaccgcg

SEQ ID NO: 15324 - DNA, 20 bp, synthetic construct
  source 1..20: mol_type = other DNA
tcctctgggcgcgctcgggt

SEQ ID NO: 15325 - DNA, 20 bp, synthetic construct
  source 1..20: mol_type = other DNA
cccgacccgagcgcgcccag

SEQ ID NO: 15326 - DNA, 20 bp, synthetic construct
  source 1..20: mol_type = other DNA
acccgagcgcgcccagagga

SEQ ID NO: 15327 - DNA, 20 bp, synthetic construct
  source 1..20: mol_type = other DNA
cgagcgcgcccagaggacgg

SEQ ID NO: 15328 - DNA, 20 bp, synthetic construct
  source 1..20: mol_type = other DNA
gagcgcaccagcccggaccc

SEQ ID NO: 15329 - DNA, 20 bp, synthetic construct
  source 1..20: mol_type = other DNA
agcgcgcccagaggacggcg

SEQ ID NO: 15330 - DNA, 20 bp, synthetic construct
  source 1..20: mol_type = other DNA
gagcgcgcccagaggacggc

SEQ ID NO: 15331 - DNA, 20 bp, synthetic construct
  source 1..20: mol_type = other DNA
agccggccgggcggtctccg

SEQ ID NO: 15332 - DNA, 20 bp, synthetic construct
  source 1..20: mol_type = other DNA
gacccccgagcagcgccgcg

SEQ ID NO: 15333 - DNA, 20 bp, synthetic construct
  source 1..20: mol_type = other DNA
tcaccgcgcggcgctgctcg

SEQ ID NO: 15334 - DNA, 20 bp, synthetic construct
  source 1..20: mol_type = other DNA
caccgcgcggcgctgctcgg

SEQ ID NO: 15335 - DNA, 20 bp, synthetic construct
  source 1..20: mol_type = other DNA
gcggccgcggcgccatattg

SEQ ID NO: 15336 - DNA, 20 bp, synthetic construct
  source 1..20: mol_type = other DNA
agggccgcaatatggcgccg

SEQ ID NO: 15337 - DNA, 20 bp, synthetic construct
  source 1..20: mol_type = other DNA
gggctgtagccggagtggag

SEQ ID NO: 15338 - DNA, 20 bp, synthetic construct
  source 1..20: mol_type = other DNA
ggctggcagccgctccactc

SEQ ID NO: 15339 - DNA, 20 bp, synthetic construct
  source 1..20: mol_type = other DNA
agtggagcggctgccagccg

SEQ ID NO: 15340 - DNA, 20 bp, synthetic construct
  source 1..20: mol_type = other DNA
cccggctccttcctactccc

SEQ ID NO: 15341 - DNA, 20 bp, synthetic construct
  source 1..20: mol_type = other DNA
ctccactccggctacagccc

SEQ ID NO: 15342 - DNA, 20 bp, synthetic construct
  source 1..20: mol_type = other DNA
gcggctgccagccgaggagc

SEQ ID NO: 15343 - DNA, 20 bp, synthetic construct
  source 1..20: mol_type = other DNA
ccggctccttcctactcccc

SEQ ID NO: 15344 - DNA, 20 bp, synthetic construct
  source 1..20: mol_type = other DNA
cggggagtaggaaggagccg

SEQ ID NO: 15345 - DNA, 20 bp, synthetic construct
  source 1..20: mol_type = other DNA
gccgggcccggggagtagga

SEQ ID NO: 15346 - DNA, 20 bp, synthetic construct
  source 1..20: mol_type = other DNA
aagtggcggtgccgggcccg

SEQ ID NO: 15347 - DNA, 20 bp, synthetic construct
  source 1..20: mol_type = other DNA
tgccagccgaggagcaggcg

SEQ ID NO: 15348 - DNA, 20 bp, synthetic construct
  source 1..20: mol_type = other DNA
agccggggctgtagccggag

SEQ ID NO: 15349 - DNA, 20 bp, synthetic construct
  source 1..20: mol_type = other DNA
ggaggcggaagtggcggtgc

SEQ ID NO: 15350 - DNA, 20 bp, synthetic construct
  source 1..20: mol_type = other DNA
tgagcacagataactccagg

SEQ ID NO: 15351 - DNA, 20 bp, synthetic construct
  source 1..20: mol_type = other DNA
tctgagcacagataactcca

SEQ ID NO: 15352 - DNA, 20 bp, synthetic construct
  source 1..20: mol_type = other DNA
ggtaggagcgataggcccac

SEQ ID NO: 15353 - DNA, 20 bp, synthetic construct
  source 1..20: mol_type = other DNA
ttctgttacccagctcctgg

SEQ ID NO: 15354 - DNA, 20 bp, synthetic construct
  source 1..20: mol_type = other DNA
tccaggagctgggtaacaga

SEQ ID NO: 15355 - DNA, 20 bp, synthetic construct
  source 1..20: mol_type = other DNA
tccacaccatggccacctgc

SEQ ID NO: 15356 - DNA, 20 bp, synthetic construct
  source 1..20: mol_type = other DNA
gtaggagcgataggcccaca

SEQ ID NO: 15357 - DNA, 20 bp, synthetic construct
  source 1..20: mol_type = other DNA
gccatggtgtggagcagcaa

SEQ ID NO: 15358 - DNA, 20 bp, synthetic construct
  source 1..20: mol_type = other DNA
ggccatggtgtggagcagca

SEQ ID NO: 15359 - DNA, 20 bp, synthetic construct
  source 1..20: mol_type = other DNA
tacccagctcctggaggcag

SEQ ID NO: 15360 - DNA, 20 bp, synthetic construct
  source 1..20: mol_type = other DNA
tccttctgttacccagctcc

SEQ ID NO: 15361 - DNA, 20 bp, synthetic construct
  source 1..20: mol_type = other DNA
ccacagggcctgccagcagg

SEQ ID NO: 15362 - DNA, 20 bp, synthetic construct
  source 1..20: mol_type = other DNA
gccagcaggtggccatggtg

SEQ ID NO: 15363 - DNA, 20 bp, synthetic construct
  source 1..20: mol_type = other DNA
gcccttgctgctccacacca

SEQ ID NO: 15364 - DNA, 20 bp, synthetic construct
  source 1..20: mol_type = other DNA
agccactgcctccaggagct

SEQ ID NO: 15365 - DNA, 20 bp, synthetic construct
  source 1..20: mol_type = other DNA
ttgtggcatctacacagctg

SEQ ID NO: 15366 - DNA, 20 bp, synthetic construct
  source 1..20: mol_type = other DNA
ggaggtgtggagtcagcatg

SEQ ID NO: 15367 - DNA, 20 bp, synthetic construct
  source 1..20: mol_type = other DNA
gctgaagtacaggaaggttg

SEQ ID NO: 15368 - DNA, 20 bp, synthetic construct
  source 1..20: mol_type = other DNA
gtgtgaggattgaagctgag

SEQ ID NO: 15369 - DNA, 20 bp, synthetic construct
  source 1..20: mol_type = other DNA
gggaggtgtggagtcagcat

SEQ ID NO: 15370 - DNA, 20 bp, synthetic construct
  source 1..20: mol_type = other DNA
gagcgaagaagctgaagtac

SEQ ID NO: 15371 - DNA, 20 bp, synthetic construct
  source 1..20: mol_type = other DNA
ggagaaggcgggtcagcgcg

SEQ ID NO: 15372 - DNA, 20 bp, synthetic construct
  source 1..20: mol_type = other DNA
gaagaagctgaagtacagga

SEQ ID NO: 15373 - DNA, 20 bp, synthetic construct
  source 1..20: mol_type = other DNA
tacacagctgcggagaaggc

SEQ ID NO: 15374 - DNA, 20 bp, synthetic construct
  source 1..20: mol_type = other DNA
cggagaaggcgggtcagcgc

SEQ ID NO: 15375 - DNA, 20 bp, synthetic construct
  source 1..20: mol_type = other DNA
ggagtcagcatggggctagg

SEQ ID NO: 15376 - DNA, 20 bp, synthetic construct
  source 1..20: mol_type = other DNA
ctacacagctgcggagaagg

SEQ ID NO: 15377 - DNA, 20 bp, synthetic construct
  source 1..20: mol_type = other DNA
ggggaggtgtggagtcagca

SEQ ID NO: 15378 - DNA, 20 bp, synthetic construct
  source 1..20: mol_type = other DNA
gcggagaaggcgggtcagcg

SEQ ID NO: 15379 - DNA, 20 bp, synthetic construct
  source 1..20: mol_type = other DNA
catctacacagctgcggaga

SEQ ID NO: 15380 - DNA, 20 bp, synthetic construct
  source 1..20: mol_type = other DNA
agccaccatcgagcttcgcg

SEQ ID NO: 15381 - DNA, 20 bp, synthetic construct
  source 1..20: mol_type = other DNA
aaccccgcgaagctcgatgg

SEQ ID NO: 15382 - DNA, 20 bp, synthetic construct
  source 1..20: mol_type = other DNA
gggccggcatctgaagcgag

SEQ ID NO: 15383 - DNA, 20 bp, synthetic construct
  source 1..20: mol_type = other DNA
ggccggcatctgaagcgagc

SEQ ID NO: 15384 - DNA, 20 bp, synthetic construct
  source 1..20: mol_type = other DNA
ggagccaccatcgagcttcg

SEQ ID NO: 15385 - DNA, 20 bp, synthetic construct
  source 1..20: mol_type = other DNA
accagcctgcgtatgcccgg

SEQ ID NO: 15386 - DNA, 20 bp, synthetic construct
  source 1..20: mol_type = other DNA
agcaaccccgcgaagctcga

SEQ ID NO: 15387 - DNA, 20 bp, synthetic construct
  source 1..20: mol_type = other DNA
actcgagtccccgcaacccc

SEQ ID NO: 15388 - DNA, 20 bp, synthetic construct
  source 1..20: mol_type = other DNA
tgctgggctgacggatccgc

SEQ ID NO: 15389 - DNA, 20 bp, synthetic construct
  source 1..20: mol_type = other DNA
gttgcggggactcgagtccg

SEQ ID NO: 15390 - DNA, 20 bp, synthetic construct
  source 1..20: mol_type = other DNA
cagggcctccgggcatacgc

SEQ ID NO: 15391 - DNA, 20 bp, synthetic construct
  source 1..20: mol_type = other DNA
ttgctgggctgacggatccg

SEQ ID NO: 15392 - DNA, 20 bp, synthetic construct
  source 1..20: mol_type = other DNA
gaagcgagcgggacgcagcg

SEQ ID NO: 15393 - DNA, 20 bp, synthetic construct
  source 1..20: mol_type = other DNA
tcgcttcagatgccggcccg

SEQ ID NO: 15394 - DNA, 20 bp, synthetic construct
  source 1..20: mol_type = other DNA
gcagcgcggccagggcctcc

SEQ ID NO: 15395 - DNA, 20 bp, synthetic construct
  source 1..20: mol_type = other DNA
tcggctcccggacgcgacgg

SEQ ID NO: 15396 - DNA, 20 bp, synthetic construct
  source 1..20: mol_type = other DNA
tcagcgtcgctatttcacgc

SEQ ID NO: 15397 - DNA, 20 bp, synthetic construct
  source 1..20: mol_type = other DNA
gtcccaggtaagatacccag

SEQ ID NO: 15398 - DNA, 20 bp, synthetic construct
  source 1..20: mol_type = other DNA
tcgctatttcacgccggcgg

SEQ ID NO: 15399 - DNA, 20 bp, synthetic construct
  source 1..20: mol_type = other DNA
agagcgtttatccgctgaca

SEQ ID NO: 15400 - DNA, 20 bp, synthetic construct
  source 1..20: mol_type = other DNA
gtagtagtgagtacgtgctg

SEQ ID NO: 15401 - DNA, 20 bp, synthetic construct
  source 1..20: mol_type = other DNA
gcggataaacgctctcccct

SEQ ID NO: 15402 - DNA, 20 bp, synthetic construct
  source 1..20: mol_type = other DNA
gacaatggtttccatgtcag

SEQ ID NO: 15403 - DNA, 20 bp, synthetic construct
  source 1..20: mol_type = other DNA
gcgtcgctatttcacgccgg

SEQ ID NO: 15404 - DNA, 20 bp, synthetic construct
  source 1..20: mol_type = other DNA
gagtacgtgctgaggagcaa

SEQ ID NO: 15405 - DNA, 20 bp, synthetic construct
  source 1..20: mol_type = other DNA
ccgtcgcgtccgggagccga

SEQ ID NO: 15406 - DNA, 20 bp, synthetic construct
  source 1..20: mol_type = other DNA
ccctcggctcccggacgcga

SEQ ID NO: 15407 - DNA, 20 bp, synthetic construct
  source 1..20: mol_type = other DNA
cgtcgcgtccgggagccgag

SEQ ID NO: 15408 - DNA, 20 bp, synthetic construct
  source 1..20: mol_type = other DNA
tccgtcgcgtccgggagccg

SEQ ID NO: 15409 - DNA, 20 bp, synthetic construct
  source 1..20: mol_type = other DNA
aacgctctcccctcggctcc

SEQ ID NO: 15410 - DNA, 20 bp, synthetic construct
  source 1..20: mol_type = other DNA
agatccctgcaccatgccgt

SEQ ID NO: 15411 - DNA, 20 bp, synthetic construct
  source 1..20: mol_type = other DNA
agggcctgggacgccgtgag

SEQ ID NO: 15412 - DNA, 20 bp, synthetic construct
  source 1..20: mol_type = other DNA
gaagtggctatcgccagagt

SEQ ID NO: 15413 - DNA, 20 bp, synthetic construct
  source 1..20: mol_type = other DNA
ttctccgacggcatggtgca

SEQ ID NO: 15414 - DNA, 20 bp, synthetic construct
  source 1..20: mol_type = other DNA
tgcggcggcgaatccgactc

SEQ ID NO: 15415 - DNA, 20 bp, synthetic construct
  source 1..20: mol_type = other DNA
tggtgcagggatctgggcgg

SEQ ID NO: 15416 - DNA, 20 bp, synthetic construct
  source 1..20: mol_type = other DNA
agggtcccggcggctcccgg

SEQ ID NO: 15417 - DNA, 20 bp, synthetic construct
  source 1..20: mol_type = other DNA
cgacgacgcgagggtcccgg

SEQ ID NO: 15418 - DNA, 20 bp, synthetic construct
  source 1..20: mol_type = other DNA
tgcttgaaggtcttctccga

SEQ ID NO: 15419 - DNA, 20 bp, synthetic construct
  source 1..20: mol_type = other DNA
gcatggtgcagggatctggg

SEQ ID NO: 15420 - DNA, 20 bp, synthetic construct
  source 1..20: mol_type = other DNA
gagggtcccggcggctcccg

SEQ ID NO: 15421 - DNA, 20 bp, synthetic construct
  source 1..20: mol_type = other DNA
ccgcagcagccgccgccccc

SEQ ID NO: 15422 - DNA, 20 bp, synthetic construct
  source 1..20: mol_type = other DNA
cggcggcggcgacgacgcga

SEQ ID NO: 15423 - DNA, 20 bp, synthetic construct
  source 1..20: mol_type = other DNA
tgcagggatctgggcggcgg

SEQ ID NO: 15424 - DNA, 20 bp, synthetic construct
  source 1..20: mol_type = other DNA
cggcgacgacgcgagggtcc

SEQ ID NO: 15425 - DNA, 20 bp, synthetic construct
  source 1..20: mol_type = other DNA
gtcgccgtagcgctgcgcaa

SEQ ID NO: 15426 - DNA, 20 bp, synthetic construct
  source 1..20: mol_type = other DNA
cccaagcctcaccctcacac

SEQ ID NO: 15427 - DNA, 20 bp, synthetic construct
  source 1..20: mol_type = other DNA
caatggagatgagcctcccg

SEQ ID NO: 15428 - DNA, 20 bp, synthetic construct
  source 1..20: mol_type = other DNA
tacggcgacccgcaactccg

SEQ ID NO: 15429 - DNA, 20 bp, synthetic construct
  source 1..20: mol_type = other DNA
acatctgctttcctgtgtga

SEQ ID NO: 15430 - DNA, 20 bp, synthetic construct
  source 1..20: mol_type = other DNA
tcgaattcctgcgagaaaag

SEQ ID NO: 15431 - DNA, 20 bp, synthetic construct
  source 1..20: mol_type = other DNA
attcctgcgagaaaagtggc

SEQ ID NO: 15432 - DNA, 20 bp, synthetic construct
  source 1..20: mol_type = other DNA
cgacccgcaactccgaggct

SEQ ID NO: 15433 - DNA, 20 bp, synthetic construct
  source 1..20: mol_type = other DNA
tgggaaatgtagtccagagc

SEQ ID NO: 15434 - DNA, 20 bp, synthetic construct
  source 1..20: mol_type = other DNA
cttgggccgggttccccggg

SEQ ID NO: 15435 - DNA, 20 bp, synthetic construct
  source 1..20: mol_type = other DNA
gatgagcctcccggggaacc

SEQ ID NO: 15436 - DNA, 20 bp, synthetic construct
  source 1..20: mol_type = other DNA
cacatctgctttcctgtgtg

SEQ ID NO: 15437 - DNA, 20 bp, synthetic construct
  source 1..20: mol_type = other DNA
tgtgagggtgaggcttgggc

SEQ ID NO: 15438 - DNA, 20 bp, synthetic construct
  source 1..20: mol_type = other DNA
gcaatggagatgagcctccc

SEQ ID NO: 15439 - DNA, 20 bp, synthetic construct
  source 1..20: mol_type = other DNA
cctgtgtgagggtgaggctt

SEQ ID NO: 15440 - DNA, 20 bp, synthetic construct
  source 1..20: mol_type = other DNA
cccgccggctctccgaacgg

SEQ ID NO: 15441 - DNA, 20 bp, synthetic construct
  source 1..20: mol_type = other DNA
gatgctgctcgctgtgagcg

SEQ ID NO: 15442 - DNA, 20 bp, synthetic construct
  source 1..20: mol_type = other DNA
cctgttgggtctttgggacg

SEQ ID NO: 15443 - DNA, 20 bp, synthetic construct
  source 1..20: mol_type = other DNA
cggctctccgaacggaggcg

SEQ ID NO: 15444 - DNA, 20 bp, synthetic construct
  source 1..20: mol_type = other DNA
cctccgttcggagagccggc

SEQ ID NO: 15445 - DNA, 20 bp, synthetic construct
  source 1..20: mol_type = other DNA
gcctccgttcggagagccgg

SEQ ID NO: 15446 - DNA, 20 bp, synthetic construct
  source 1..20: mol_type = other DNA
gcgcctctcggccaggtacg

SEQ ID NO: 15447 - DNA, 20 bp, synthetic construct
  source 1..20: mol_type = other DNA
cggccgcgtacctggccgag

SEQ ID NO: 15448 - DNA, 20 bp, synthetic construct
  source 1..20: mol_type = other DNA
gccgagaggcgcccgcccgc

SEQ ID NO: 15449 - DNA, 20 bp, synthetic construct
  source 1..20: mol_type = other DNA
gccggctctccgaacggagg

SEQ ID NO: 15450 - DNA, 20 bp, synthetic construct
  source 1..20: mol_type = other DNA
gtacgcggccggctgggata

SEQ ID NO: 15451 - DNA, 20 bp, synthetic construct
  source 1..20: mol_type = other DNA
tacgcggccggctgggatag

SEQ ID NO: 15452 - DNA, 20 bp, synthetic construct
  source 1..20: mol_type = other DNA
tcccgtccgccgctggcccc

SEQ ID NO: 15453 - DNA, 20 bp, synthetic construct
  source 1..20: mol_type = other DNA
ggaggagtcacggcccggga

SEQ ID NO: 15454 - DNA, 20 bp, synthetic construct
  source 1..20: mol_type = other DNA
gcgggggaaaggaggagtca

SEQ ID NO: 15455 - DNA, 20 bp, synthetic construct
  source 1..20: mol_type = other DNA
acagggaagaagcaaacgtg

SEQ ID NO: 15456 - DNA, 20 bp, synthetic construct
  source 1..20: mol_type = other DNA
agaactccggagaaaccctg

SEQ ID NO: 15457 - DNA, 20 bp, synthetic construct
  source 1..20: mol_type = other DNA
aaaaaccgcttactccccca

SEQ ID NO: 15458 - DNA, 20 bp, synthetic construct
  source 1..20: mol_type = other DNA
tagaactccggagaaaccct

SEQ ID NO: 15459 - DNA, 20 bp, synthetic construct
  source 1..20: mol_type = other DNA
tccctccagctgggaacaca

SEQ ID NO: 15460 - DNA, 20 bp, synthetic construct
  source 1..20: mol_type = other DNA
cgtgtggctcgtcagaagca

SEQ ID NO: 15461 - DNA, 20 bp, synthetic construct
  source 1..20: mol_type = other DNA
acactcatgtccctccagct

SEQ ID NO: 15462 - DNA, 20 bp, synthetic construct
  source 1..20: mol_type = other DNA
caaaaaccgcttactccccc

SEQ ID NO: 15463 - DNA, 20 bp, synthetic construct
  source 1..20: mol_type = other DNA
tccctgtgttcccagctgga

SEQ ID NO: 15464 - DNA, 20 bp, synthetic construct
  source 1..20: mol_type = other DNA
gtggctcgtcagaagcaagg

SEQ ID NO: 15465 - DNA, 20 bp, synthetic construct
  source 1..20: mol_type = other DNA
ttccctgtgttcccagctgg

SEQ ID NO: 15466 - DNA, 20 bp, synthetic construct
  source 1..20: mol_type = other DNA
gaactccggagaaaccctgg

SEQ ID NO: 15467 - DNA, 20 bp, synthetic construct
  source 1..20: mol_type = other DNA
gacctgagtgagtagaactc

SEQ ID NO: 15468 - DNA, 20 bp, synthetic construct
  source 1..20: mol_type = other DNA
ccgcccctcacacccagccc

SEQ ID NO: 15469 - DNA, 20 bp, synthetic construct
  source 1..20: mol_type = other DNA
gtagaactccggagaaaccc

SEQ ID NO: 15470 - DNA, 20 bp, synthetic construct
  source 1..20: mol_type = other DNA
gggatctcgcgaaaggaaag

SEQ ID NO: 15471 - DNA, 20 bp, synthetic construct
  source 1..20: mol_type = other DNA
gcagtcaagcagcaagatgg

SEQ ID NO: 15472 - DNA, 20 bp, synthetic construct
  source 1..20: mol_type = other DNA
aaggtgcttaggaagttgaa

SEQ ID NO: 15473 - DNA, 20 bp, synthetic construct
  source 1..20: mol_type = other DNA
aggagaggggatctcgcgaa

SEQ ID NO: 15474 - DNA, 20 bp, synthetic construct
  source 1..20: mol_type = other DNA
gtcaagcagcaagatggagg

SEQ ID NO: 15475 - DNA, 20 bp, synthetic construct
  source 1..20: mol_type = other DNA
agtcaagcagcaagatggag

SEQ ID NO: 15476 - DNA, 20 bp, synthetic construct
  source 1..20: mol_type = other DNA
agctccggccatttgcccgg

SEQ ID NO: 15477 - DNA, 20 bp, synthetic construct
  source 1..20: mol_type = other DNA
ggggcagtcaagcagcaaga

SEQ ID NO: 15478 - DNA, 20 bp, synthetic construct
  source 1..20: mol_type = other DNA
taagcacctttcaggttggg

SEQ ID NO: 15479 - DNA, 20 bp, synthetic construct
  source 1..20: mol_type = other DNA
tccagtgctggggttagcac

SEQ ID NO: 15480 - DNA, 20 bp, synthetic construct
  source 1..20: mol_type = other DNA
gaagttgaaaggcccagagg

SEQ ID NO: 15481 - DNA, 20 bp, synthetic construct
  source 1..20: mol_type = other DNA
taggaagttgaaaggcccag

SEQ ID NO: 15482 - DNA, 20 bp, synthetic construct
  source 1..20: mol_type = other DNA
ctcggaccacccaacctgaa

SEQ ID NO: 15483 - DNA, 20 bp, synthetic construct
  source 1..20: mol_type = other DNA
gctctggttctgggactgag

SEQ ID NO: 15484 - DNA, 20 bp, synthetic construct
  source 1..20: mol_type = other DNA
ctcgcgaaaggaaagaggtc

SEQ ID NO: 15485 - DNA, 20 bp, synthetic construct
  source 1..20: mol_type = other DNA
gatgatagaattgtgagtgc

SEQ ID NO: 15486 - DNA, 20 bp, synthetic construct
  source 1..20: mol_type = other DNA
ggaactgcaagactcccgga

SEQ ID NO: 15487 - DNA, 20 bp, synthetic construct
  source 1..20: mol_type = other DNA
atgatagaattgtgagtgcg

SEQ ID NO: 15488 - DNA, 20 bp, synthetic construct
  source 1..20: mol_type = other DNA
gaggtgggcaagcggcgaaa

SEQ ID NO: 15489 - DNA, 20 bp, synthetic construct
  source 1..20: mol_type = other DNA
gggaactgcaagactcccgg

SEQ ID NO: 15490 - DNA, 20 bp, synthetic construct
  source 1..20: mol_type = other DNA
caggcacggacgtaggaccc

SEQ ID NO: 15491 - DNA, 20 bp, synthetic construct
  source 1..20: mol_type = other DNA
aacagcaccaggactgccag

SEQ ID NO: 15492 - DNA, 20 bp, synthetic construct
  source 1..20: mol_type = other DNA
caggggaactgcaagactcc

SEQ ID NO: 15493 - DNA, 20 bp, synthetic construct
  source 1..20: mol_type = other DNA
ctgcgaccgcgctccctgtg

SEQ ID NO: 15494 - DNA, 20 bp, synthetic construct
  source 1..20: mol_type = other DNA
gaccgcgctccctgtgaggt

SEQ ID NO: 15495 - DNA, 20 bp, synthetic construct
  source 1..20: mol_type = other DNA
cgaccgcgctccctgtgagg

SEQ ID NO: 15496 - DNA, 20 bp, synthetic construct
  source 1..20: mol_type = other DNA
ctccctgtgaggtgggcaag

SEQ ID NO: 15497 - DNA, 20 bp, synthetic construct
  source 1..20: mol_type = other DNA
tgcccacctcacagggagcg

SEQ ID NO: 15498 - DNA, 20 bp, synthetic construct
  source 1..20: mol_type = other DNA
caacagcaccaggactgcca

SEQ ID NO: 15499 - DNA, 20 bp, synthetic construct
  source 1..20: mol_type = other DNA
cgggagtcttgcagttcccc

SEQ ID NO: 15500 - DNA, 20 bp, synthetic construct
  source 1..20: mol_type = other DNA
tcacaacacagcagaaactg

SEQ ID NO: 15501 - DNA, 20 bp, synthetic construct
  source 1..20: mol_type = other DNA
cagaagggctgcaagaacag

SEQ ID NO: 15502 - DNA, 20 bp, synthetic construct
  source 1..20: mol_type = other DNA
agccagttcctgttcctgag

SEQ ID NO: 15503 - DNA, 20 bp, synthetic construct
  source 1..20: mol_type = other DNA
tgggtgctgagcgcctcgtg

SEQ ID NO: 15504 - DNA, 20 bp, synthetic construct
  source 1..20: mol_type = other DNA
gcagctgcagactgagagga

SEQ ID NO: 15505 - DNA, 20 bp, synthetic construct
  source 1..20: mol_type = other DNA
cgcagctgcagactgagagg

SEQ ID NO: 15506 - DNA, 20 bp, synthetic construct
  source 1..20: mol_type = other DNA
gctttgctcagagcttgtag

SEQ ID NO: 15507 - DNA, 20 bp, synthetic construct
  source 1..20: mol_type = other DNA
tcagaagggctgcaagaaca

SEQ ID NO: 15508 - DNA, 20 bp, synthetic construct
  source 1..20: mol_type = other DNA
tcctgagaggacagagattg

SEQ ID NO: 15509 - DNA, 20 bp, synthetic construct
  source 1..20: mol_type = other DNA
tcccgcagctgcagactgag

SEQ ID NO: 15510 - DNA, 20 bp, synthetic construct
  source 1..20: mol_type = other DNA
gcaagaacaggggcttggat

SEQ ID NO: 15511 - DNA, 20 bp, synthetic construct
  source 1..20: mol_type = other DNA
caagaacaggggcttggata

SEQ ID NO: 15512 - DNA, 20 bp, synthetic construct
  source 1..20: mol_type = other DNA
tgctgtgttgtgaccccacg

SEQ ID NO: 15513 - DNA, 20 bp, synthetic construct
  source 1..20: mol_type = other DNA
gctgcagactgagaggaggg

SEQ ID NO: 15514 - DNA, 20 bp, synthetic construct
  source 1..20: mol_type = other DNA
aacaggggcttggatagggc

SEQ ID NO: 15515 - DNA, 20 bp, synthetic construct
  source 1..20: mol_type = other DNA
ggaacatggccctgtatcag

SEQ ID NO: 15516 - DNA, 20 bp, synthetic construct
  source 1..20: mol_type = other DNA
gcctgcaagcctgtaaacct

SEQ ID NO: 15517 - DNA, 20 bp, synthetic construct
  source 1..20: mol_type = other DNA
gataatctgtttgaggatgt

SEQ ID NO: 15518 - DNA, 20 bp, synthetic construct
  source 1..20: mol_type = other DNA
acatggccctgtatcagagg

SEQ ID NO: 15519 - DNA, 20 bp, synthetic construct
  source 1..20: mol_type = other DNA
aagcctgtaaaccttggagc

SEQ ID NO: 15520 - DNA, 20 bp, synthetic construct
  source 1..20: mol_type = other DNA
tctggggactcggaggacca

SEQ ID NO: 15521 - DNA, 20 bp, synthetic construct
  source 1..20: mol_type = other DNA
ctgtttgaggatgtaggcac

SEQ ID NO: 15522 - DNA, 20 bp, synthetic construct
  source 1..20: mol_type = other DNA
gggagaggaggagtggcgtg

SEQ ID NO: 15523 - DNA, 20 bp, synthetic construct
  source 1..20: mol_type = other DNA
acaccgccacctctgataca

SEQ ID NO: 15524 - DNA, 20 bp, synthetic construct
  source 1..20: mol_type = other DNA
tggccctgtatcagaggtgg

SEQ ID NO: 15525 - DNA, 20 bp, synthetic construct
  source 1..20: mol_type = other DNA
ggatgtaggcactggtgtga

SEQ ID NO: 15526 - DNA, 20 bp, synthetic construct
  source 1..20: mol_type = other DNA
acaggcttgcaggctacaca

SEQ ID NO: 15527 - DNA, 20 bp, synthetic construct
  source 1..20: mol_type = other DNA
ctcggaggaccagggagagg

SEQ ID NO: 15528 - DNA, 20 bp, synthetic construct
  source 1..20: mol_type = other DNA
ggcactggtgtgaaggaaca

SEQ ID NO: 15529 - DNA, 20 bp, synthetic construct
  source 1..20: mol_type = other DNA
tggcggtgtctccggctcca

SEQ ID NO: 15530 - DNA, 20 bp, synthetic construct
  source 1..20: mol_type = other DNA
ccagccgaggacctgaatcc

SEQ ID NO: 15531 - DNA, 20 bp, synthetic construct
  source 1..20: mol_type = other DNA
gggattcaggtcctcggctg

SEQ ID NO: 15532 - DNA, 20 bp, synthetic construct
  source 1..20: mol_type = other DNA
aagctggtgctggtttctgt

SEQ ID NO: 15533 - DNA, 20 bp, synthetic construct
  source 1..20: mol_type = other DNA
ttctggacgcccagaagcca

SEQ ID NO: 15534 - DNA, 20 bp, synthetic construct
  source 1..20: mol_type = other DNA
gcagcccagcagcagcgccg

SEQ ID NO: 15535 - DNA, 20 bp, synthetic construct
  source 1..20: mol_type = other DNA
tggacgcccagaagccaagg

SEQ ID NO: 15536 - DNA, 20 bp, synthetic construct
  source 1..20: mol_type = other DNA
tttgcagagcagtcagtctg

SEQ ID NO: 15537 - DNA, 20 bp, synthetic construct
  source 1..20: mol_type = other DNA
ttggcttctgggcgtccaga

SEQ ID NO: 15538 - DNA, 20 bp, synthetic construct
  source 1..20: mol_type = other DNA
tgctctgcaaaccccagccg

SEQ ID NO: 15539 - DNA, 20 bp, synthetic construct
  source 1..20: mol_type = other DNA
cccagaagccaaggcggaga

SEQ ID NO: 15540 - DNA, 20 bp, synthetic construct
  source 1..20: mol_type = other DNA
gctgggctgctgggctggcg

SEQ ID NO: 15541 - DNA, 20 bp, synthetic construct
  source 1..20: mol_type = other DNA
agggaggttgaagctggtgc

SEQ ID NO: 15542 - DNA, 20 bp, synthetic construct
  source 1..20: mol_type = other DNA
ctgggcatgctcagtagccg

SEQ ID NO: 15543 - DNA, 20 bp, synthetic construct
  source 1..20: mol_type = other DNA
ggcgctgctgctgggctgct

SEQ ID NO: 15544 - DNA, 20 bp, synthetic construct
  source 1..20: mol_type = other DNA
cggcgctgctgctgggctgc

SEQ ID NO: 15545 - DNA, 20 bp, synthetic construct
  source 1..20: mol_type = other DNA
gttagcctaggcatctacgg

SEQ ID NO: 15546 - DNA, 20 bp, synthetic construct
  source 1..20: mol_type = other DNA
gccgacgcttctgtcaggtg

SEQ ID NO: 15547 - DNA, 20 bp, synthetic construct
  source 1..20: mol_type = other DNA
gggcggcgagagcctcatgg

SEQ ID NO: 15548 - DNA, 20 bp, synthetic construct
  source 1..20: mol_type = other DNA
agcctaggcatctacggcgg

SEQ ID NO: 15549 - DNA, 20 bp, synthetic construct
  source 1..20: mol_type = other DNA
ggaggaagagagcgaccaag

SEQ ID NO: 15550 - DNA, 20 bp, synthetic construct
  source 1..20: mol_type = other DNA
gcggcgtcggaatcagcagt

SEQ ID NO: 15551 - DNA, 20 bp, synthetic construct
  source 1..20: mol_type = other DNA
gcctcacctgacagaagcgt

SEQ ID NO: 15552 - DNA, 20 bp, synthetic construct
  source 1..20: mol_type = other DNA
gaggttagcctaggcatcta

SEQ ID NO: 15553 - DNA, 20 bp, synthetic construct
  source 1..20: mol_type = other DNA
gaggaggaggaggttagcct

SEQ ID NO: 15554 - DNA, 20 bp, synthetic construct
  source 1..20: mol_type = other DNA
cggcgagagcctcatggcgg

SEQ ID NO: 15555 - DNA, 20 bp, synthetic construct
  source 1..20: mol_type = other DNA
gctgggcggcgagagcctca

SEQ ID NO: 15556 - DNA, 20 bp, synthetic construct
  source 1..20: mol_type = other DNA
gcgcaggggctggtacgcgc

SEQ ID NO: 15557 - DNA, 20 bp, synthetic construct
  source 1..20: mol_type = other DNA
aggggctggtacgcgctggg

SEQ ID NO: 15558 - DNA, 20 bp, synthetic construct
  source 1..20: mol_type = other DNA
ctaggcatctacggcggcgg

SEQ ID NO: 15559 - DNA, 20 bp, synthetic construct
  source 1..20: mol_type = other DNA
ggcatctacggcggcggcgg

SEQ ID NO: 15560 - DNA, 20 bp, synthetic construct
  source 1..20: mol_type = other DNA
gccattgggcaaccgtccga

SEQ ID NO: 15561 - DNA, 20 bp, synthetic construct
  source 1..20: mol_type = other DNA
caaccgtccgagggaacgcg

SEQ ID NO: 15562 - DNA, 20 bp, synthetic construct
  source 1..20: mol_type = other DNA
gagactagggtctgcgctcg

SEQ ID NO: 15563 - DNA, 20 bp, synthetic construct
  source 1..20: mol_type = other DNA
agcctcgcaggccgaagcga

SEQ ID NO: 15564 - DNA, 20 bp, synthetic construct
  source 1..20: mol_type = other DNA
tccctcggacggttgcccaa

SEQ ID NO: 15565 - DNA, 20 bp, synthetic construct
  source 1..20: mol_type = other DNA
cttgtcccaggccttcgctt

SEQ ID NO: 15566 - DNA, 20 bp, synthetic construct
  source 1..20: mol_type = other DNA
gtctgcgctcgcggcgaccg

SEQ ID NO: 15567 - DNA, 20 bp, synthetic construct
  source 1..20: mol_type = other DNA
tctgaagtctcgcgcctccc

SEQ ID NO: 15568 - DNA, 20 bp, synthetic construct
  source 1..20: mol_type = other DNA
gaggctacagctgtgcgcag

SEQ ID NO: 15569 - DNA, 20 bp, synthetic construct
  source 1..20: mol_type = other DNA
gtagcagcaggtgggagact

SEQ ID NO: 15570 - DNA, 20 bp, synthetic construct
  source 1..20: mol_type = other DNA
tacagctgtgcgcagtggcg

SEQ ID NO: 15571 - DNA, 20 bp, synthetic construct
  source 1..20: mol_type = other DNA
gcgcacagctgtagcctcgc

SEQ ID NO: 15572 - DNA, 20 bp, synthetic construct
  source 1..20: mol_type = other DNA
cggcctcgcgttccctcgga

SEQ ID NO: 15573 - DNA, 20 bp, synthetic construct
  source 1..20: mol_type = other DNA
ggctgctaagtagcagcagg

SEQ ID NO: 15574 - DNA, 20 bp, synthetic construct
  source 1..20: mol_type = other DNA
tagcagcaggtgggagacta

SEQ ID NO: 15575 - DNA, 20 bp, synthetic construct
  source 1..20: mol_type = other DNA
gtggcccaaaggcctaaccg

SEQ ID NO: 15576 - DNA, 20 bp, synthetic construct
  source 1..20: mol_type = other DNA
tcctctctcacaccagcggc

SEQ ID NO: 15577 - DNA, 20 bp, synthetic construct
  source 1..20: mol_type = other DNA
tgggccacaaggagccgaga

SEQ ID NO: 15578 - DNA, 20 bp, synthetic construct
  source 1..20: mol_type = other DNA
ctcctctctcacaccagcgg

SEQ ID NO: 15579 - DNA, 20 bp, synthetic construct
  source 1..20: mol_type = other DNA
tgtggcccaaaggcctaacc

SEQ ID NO: 15580 - DNA, 20 bp, synthetic construct
  source 1..20: mol_type = other DNA
agatccctaggccagaccgc

SEQ ID NO: 15581 - DNA, 20 bp, synthetic construct
  source 1..20: mol_type = other DNA
aaggcctaaccggggtccgg

SEQ ID NO: 15582 - DNA, 20 bp, synthetic construct
  source 1..20: mol_type = other DNA
gcccgccgctggtgtgagag

SEQ ID NO: 15583 - DNA, 20 bp, synthetic construct
  source 1..20: mol_type = other DNA
tactccctctcggctccttg

SEQ ID NO: 15584 - DNA, 20 bp, synthetic construct
  source 1..20: mol_type = other DNA
ttgggccacaaggagccgag

SEQ ID NO: 15585 - DNA, 20 bp, synthetic construct
  source 1..20: mol_type = other DNA
tccccgttgcccctttgggg

SEQ ID NO: 15586 - DNA, 20 bp, synthetic construct
  source 1..20: mol_type = other DNA
gcagccatcccgccccaaag

SEQ ID NO: 15587 - DNA, 20 bp, synthetic construct
  source 1..20: mol_type = other DNA
taggccagaccgccggaccc

SEQ ID NO: 15588 - DNA, 20 bp, synthetic construct
  source 1..20: mol_type = other DNA
cccgccccaaaggggcaacg

SEQ ID NO: 15589 - DNA, 20 bp, synthetic construct
  source 1..20: mol_type = other DNA
cctttggggcgggatggctg

SEQ ID NO: 15590 - DNA, 20 bp, synthetic construct
  source 1..20: mol_type = other DNA
tcagtggatcacgctcggag

SEQ ID NO: 15591 - DNA, 20 bp, synthetic construct
  source 1..20: mol_type = other DNA
cagtggatcacgctcggagg

SEQ ID NO: 15592 - DNA, 20 bp, synthetic construct
  source 1..20: mol_type = other DNA
ggaaatcagtggatcacgct

SEQ ID NO: 15593 - DNA, 20 bp, synthetic construct
  source 1..20: mol_type = other DNA
ccagaggcagtaacctaaca

SEQ ID NO: 15594 - DNA, 20 bp, synthetic construct
  source 1..20: mol_type = other DNA
agggtgaaaagagtgtgagg

SEQ ID NO: 15595 - DNA, 20 bp, synthetic construct
  source 1..20: mol_type = other DNA
ctcggctgctcgctcacctg

SEQ ID NO: 15596 - DNA, 20 bp, synthetic construct
  source 1..20: mol_type = other DNA
cctcccccccaaacatccag

SEQ ID NO: 15597 - DNA, 20 bp, synthetic construct
  source 1..20: mol_type = other DNA
ggtgagcgagcagccgagcg

SEQ ID NO: 15598 - DNA, 20 bp, synthetic construct
  source 1..20: mol_type = other DNA
agtggatcacgctcggaggg

SEQ ID NO: 15599 - DNA, 20 bp, synthetic construct
  source 1..20: mol_type = other DNA
aatcagtggatcacgctcgg

SEQ ID NO: 15600 - DNA, 20 bp, synthetic construct
  source 1..20: mol_type = other DNA
atcagtggatcacgctcgga

SEQ ID NO: 15601 - DNA, 20 bp, synthetic construct
  source 1..20: mol_type = other DNA
gccgagcgcggccaaggact

SEQ ID NO: 15602 - DNA, 20 bp, synthetic construct
  source 1..20: mol_type = other DNA
gaggccgccatgttgggaga

SEQ ID NO: 15603 - DNA, 20 bp, synthetic construct
  source 1..20: mol_type = other DNA
ctttccctctcccaacatgg

SEQ ID NO: 15604 - DNA, 20 bp, synthetic construct
  source 1..20: mol_type = other DNA
tgaggccgccatgttgggag

SEQ ID NO: 15605 - DNA, 20 bp, synthetic construct
  source 1..20: mol_type = other DNA
gagtcgcggccgccagctag

SEQ ID NO: 15606 - DNA, 20 bp, synthetic construct
  source 1..20: mol_type = other DNA
cacggacgcgagctaggcac

SEQ ID NO: 15607 - DNA, 20 bp, synthetic construct
  source 1..20: mol_type = other DNA
gagcgtgccgaagcgctgga

SEQ ID NO: 15608 - DNA, 20 bp, synthetic construct
  source 1..20: mol_type = other DNA
cccaggcaggcgcagagtcg

SEQ ID NO: 15609 - DNA, 20 bp, synthetic construct
  source 1..20: mol_type = other DNA
cgcccccggcccagtccagg

SEQ ID NO: 15610 - DNA, 20 bp, synthetic construct
  source 1..20: mol_type = other DNA
atgcaatcgggacctcctcc

SEQ ID NO: 15611 - DNA, 20 bp, synthetic construct
  source 1..20: mol_type = other DNA
agagtcgcggccgccagcta

SEQ ID NO: 15612 - DNA, 20 bp, synthetic construct
  source 1..20: mol_type = other DNA
tgaagctccctccagcgctt

SEQ ID NO: 15613 - DNA, 20 bp, synthetic construct
  source 1..20: mol_type = other DNA
agagcgtgccgaagcgctgg

SEQ ID NO: 15614 - DNA, 20 bp, synthetic construct
  source 1..20: mol_type = other DNA
cttcccgcgcccctagctgg

SEQ ID NO: 15615 - DNA, 20 bp, synthetic construct
  source 1..20: mol_type = other DNA
caaagagcgtgccgaagcgc

SEQ ID NO: 15616 - DNA, 20 bp, synthetic construct
  source 1..20: mol_type = other DNA
gactccgggacccagggcgc

SEQ ID NO: 15617 - DNA, 20 bp, synthetic construct
  source 1..20: mol_type = other DNA
ctcctcctggactgggccgg

SEQ ID NO: 15618 - DNA, 20 bp, synthetic construct
  source 1..20: mol_type = other DNA
ccccggcccagtccaggagg

SEQ ID NO: 15619 - DNA, 20 bp, synthetic construct
  source 1..20: mol_type = other DNA
gtccgcccccggcccagtcc

SEQ ID NO: 15620 - DNA, 20 bp, synthetic construct
  source 1..20: mol_type = other DNA
aggtaagcgaaacaagccgg

SEQ ID NO: 15621 - DNA, 20 bp, synthetic construct
  source 1..20: mol_type = other DNA
ggagtccgtgtctcgaatga

SEQ ID NO: 15622 - DNA, 20 bp, synthetic construct
  source 1..20: mol_type = other DNA
taggtaagcgaaacaagccg

SEQ ID NO: 15623 - DNA, 20 bp, synthetic construct
  source 1..20: mol_type = other DNA
gggagtccgtgtctcgaatg

SEQ ID NO: 15624 - DNA, 20 bp, synthetic construct
  source 1..20: mol_type = other DNA
cagggatcggaagccggttg

SEQ ID NO: 15625 - DNA, 20 bp, synthetic construct
  source 1..20: mol_type = other DNA
aaccggcttccgatccctgc

SEQ ID NO: 15626 - DNA, 20 bp, synthetic construct
  source 1..20: mol_type = other DNA
gaggactgggtgcgcctgca

SEQ ID NO: 15627 - DNA, 20 bp, synthetic construct
  source 1..20: mol_type = other DNA
agccagggactcgggccgcg

SEQ ID NO: 15628 - DNA, 20 bp, synthetic construct
  source 1..20: mol_type = other DNA
ggactgcgagccagggactc

SEQ ID NO: 15629 - DNA, 20 bp, synthetic construct
  source 1..20: mol_type = other DNA
agccgggggactgcgagcca

SEQ ID NO: 15630 - DNA, 20 bp, synthetic construct
  source 1..20: mol_type = other DNA
gtccctggctcgcagtcccc

SEQ ID NO: 15631 - DNA, 20 bp, synthetic construct
  source 1..20: mol_type = other DNA
gggactgcgagccagggact

SEQ ID NO: 15632 - DNA, 20 bp, synthetic construct
  source 1..20: mol_type = other DNA
gagccagggactcgggccgc

SEQ ID NO: 15633 - DNA, 20 bp, synthetic construct
  source 1..20: mol_type = other DNA
gaagccggttggggtgtgag

SEQ ID NO: 15634 - DNA, 20 bp, synthetic construct
  source 1..20: mol_type = other DNA
tgcagggatcggaagccggt

SEQ ID NO: 15635 - DNA, 20 bp, synthetic construct
  source 1..20: mol_type = other DNA
ctctcacggtgccaagatgg

SEQ ID NO: 15636 - DNA, 20 bp, synthetic construct
  source 1..20: mol_type = other DNA
cggccctgctccgtttgctg

SEQ ID NO: 15637 - DNA, 20 bp, synthetic construct
  source 1..20: mol_type = other DNA
ccatcttggcaccgtgagag

SEQ ID NO: 15638 - DNA, 20 bp, synthetic construct
  source 1..20: mol_type = other DNA
gagccccagcaaacggagca

SEQ ID NO: 15639 - DNA, 20 bp, synthetic construct
  source 1..20: mol_type = other DNA
gccatcttggcaccgtgaga

SEQ ID NO: 15640 - DNA, 20 bp, synthetic construct
  source 1..20: mol_type = other DNA
ggagccccagcaaacggagc

SEQ ID NO: 15641 - DNA, 20 bp, synthetic construct
  source 1..20: mol_type = other DNA
cgtttgctggggctccgccg

SEQ ID NO: 15642 - DNA, 20 bp, synthetic construct
  source 1..20: mol_type = other DNA
gccccgggcctggctccgcg

SEQ ID NO: 15643 - DNA, 20 bp, synthetic construct
  source 1..20: mol_type = other DNA
tcacggtgccaagatggcgg

SEQ ID NO: 15644 - DNA, 20 bp, synthetic construct
  source 1..20: mol_type = other DNA
cggtgccaagatggcggcgg

SEQ ID NO: 15645 - DNA, 20 bp, synthetic construct
  source 1..20: mol_type = other DNA
cccgcgcggagccaggcccg

SEQ ID NO: 15646 - DNA, 20 bp, synthetic construct
  source 1..20: mol_type = other DNA
ccgcccccgccggcgccccg

SEQ ID NO: 15647 - DNA, 20 bp, synthetic construct
  source 1..20: mol_type = other DNA
gccgcggcccccgcccccgc

SEQ ID NO: 15648 - DNA, 20 bp, synthetic construct
  source 1..20: mol_type = other DNA
cccgggcctggctccgcgcg

SEQ ID NO: 15649 - DNA, 20 bp, synthetic construct
  source 1..20: mol_type = other DNA
ccccgggcctggctccgcgc

SEQ ID NO: 15650 - DNA, 20 bp, synthetic construct
  source 1..20: mol_type = other DNA
agcacgctggctcaagggga

SEQ ID NO: 15651 - DNA, 20 bp, synthetic construct
  source 1..20: mol_type = other DNA
agggagagggacatcaggag

SEQ ID NO: 15652 - DNA, 20 bp, synthetic construct
  source 1..20: mol_type = other DNA
ccccagcacgctggctcaag

SEQ ID NO: 15653 - DNA, 20 bp, synthetic construct
  source 1..20: mol_type = other DNA
ccccttgagccagcgtgctg

SEQ ID NO: 15654 - DNA, 20 bp, synthetic construct
  source 1..20: mol_type = other DNA
atggagatggcagatagcag

SEQ ID NO: 15655 - DNA, 20 bp, synthetic construct
  source 1..20: mol_type = other DNA
gtgccgtcaccccagcacgc

SEQ ID NO: 15656 - DNA, 20 bp, synthetic construct
  source 1..20: mol_type = other DNA
tagcaggggctgtggaggga

SEQ ID NO: 15657 - DNA, 20 bp, synthetic construct
  source 1..20: mol_type = other DNA
gcagatagcaggggctgtgg

SEQ ID NO: 15658 - DNA, 20 bp, synthetic construct
  source 1..20: mol_type = other DNA
gagccagcgtgctggggtga

SEQ ID NO: 15659 - DNA, 20 bp, synthetic construct
  source 1..20: mol_type = other DNA
gagggagggagagggacatc

SEQ ID NO: 15660 - DNA, 20 bp, synthetic construct
  source 1..20: mol_type = other DNA
ggagaggccaaggctggagc

SEQ ID NO: 15661 - DNA, 20 bp, synthetic construct
  source 1..20: mol_type = other DNA
agggacatcaggagaggcca

SEQ ID NO: 15662 - DNA, 20 bp, synthetic construct
  source 1..20: mol_type = other DNA
cagcacgctggctcaagggg

SEQ ID NO: 15663 - DNA, 20 bp, synthetic construct
  source 1..20: mol_type = other DNA
acatcaggagaggccaaggc

SEQ ID NO: 15664 - DNA, 20 bp, synthetic construct
  source 1..20: mol_type = other DNA
gatggagatggcagatagca

SEQ ID NO: 15665 - DNA, 20 bp, synthetic construct
  source 1..20: mol_type = other DNA
gacgatgtggttctttgccc

SEQ ID NO: 15666 - DNA, 20 bp, synthetic construct
  source 1..20: mol_type = other DNA
agctaaggcgcccgaacccg

SEQ ID NO: 15667 - DNA, 20 bp, synthetic construct
  source 1..20: mol_type = other DNA
gggttcgggcgccttagctc

SEQ ID NO: 15668 - DNA, 20 bp, synthetic construct
  source 1..20: mol_type = other DNA
tcgaacggaaagtcccggac

SEQ ID NO: 15669 - DNA, 20 bp, synthetic construct
  source 1..20: mol_type = other DNA
gtggttctttgcccgggacc

SEQ ID NO: 15670 - DNA, 20 bp, synthetic construct
  source 1..20: mol_type = other DNA
taaggcgcccgaacccgcgg

SEQ ID NO: 15671 - DNA, 20 bp, synthetic construct
  source 1..20: mol_type = other DNA
ggccggaggacccggagcta

SEQ ID NO: 15672 - DNA, 20 bp, synthetic construct
  source 1..20: mol_type = other DNA
tcctccggccgcccgagccg

SEQ ID NO: 15673 - DNA, 20 bp, synthetic construct
  source 1..20: mol_type = other DNA
cggcggcggtggggacgatg

SEQ ID NO: 15674 - DNA, 20 bp, synthetic construct
  source 1..20: mol_type = other DNA
ggcgcccgaacccgcggcgg

SEQ ID NO: 15675 - DNA, 20 bp, synthetic construct
  source 1..20: mol_type = other DNA
gccccctctccgccccgccc

SEQ ID NO: 15676 - DNA, 20 bp, synthetic construct
  source 1..20: mol_type = other DNA
atcgtccccaccgccgccgc

SEQ ID NO: 15677 - DNA, 20 bp, synthetic construct
  source 1..20: mol_type = other DNA
catcgtccccaccgccgccg

SEQ ID NO: 15678 - DNA, 20 bp, synthetic construct
  source 1..20: mol_type = other DNA
gcccgaacccgcggcggcgg

SEQ ID NO: 15679 - DNA, 20 bp, synthetic construct
  source 1..20: mol_type = other DNA
ccgaacccgcggcggcggtg

SEQ ID NO: 15680 - DNA, 20 bp, synthetic construct
  source 1..20: mol_type = other DNA
ggaaagaaaccaagcgttgg

SEQ ID NO: 15681 - DNA, 20 bp, synthetic construct
  source 1..20: mol_type = other DNA
tcgctcgcccgcaagcaaag

SEQ ID NO: 15682 - DNA, 20 bp, synthetic construct
  source 1..20: mol_type = other DNA
accggagagccggctagata

SEQ ID NO: 15683 - DNA, 20 bp, synthetic construct
  source 1..20: mol_type = other DNA
gacggaaagaaaccaagcgt

SEQ ID NO: 15684 - DNA, 20 bp, synthetic construct
  source 1..20: mol_type = other DNA
tcagatgctggtgcagatcc

SEQ ID NO: 15685 - DNA, 20 bp, synthetic construct
  source 1..20: mol_type = other DNA
ggtgcagatcccggatgaga

SEQ ID NO: 15686 - DNA, 20 bp, synthetic construct
  source 1..20: mol_type = other DNA
acggaaagaaaccaagcgtt

SEQ ID NO: 15687 - DNA, 20 bp, synthetic construct
  source 1..20: mol_type = other DNA
gggtcacctgaccggagagc

SEQ ID NO: 15688 - DNA, 20 bp, synthetic construct
  source 1..20: mol_type = other DNA
ggaccccggactggagactg

SEQ ID NO: 15689 - DNA, 20 bp, synthetic construct
  source 1..20: mol_type = other DNA
atctagccggctctccggtc

SEQ ID NO: 15690 - DNA, 20 bp, synthetic construct
  source 1..20: mol_type = other DNA
caccagcatctgagagaaag

SEQ ID NO: 15691 - DNA, 20 bp, synthetic construct
  source 1..20: mol_type = other DNA
ctctggctccagctccccgc

SEQ ID NO: 15692 - DNA, 20 bp, synthetic construct
  source 1..20: mol_type = other DNA
ctggctccagctccccgccg

SEQ ID NO: 15693 - DNA, 20 bp, synthetic construct
  source 1..20: mol_type = other DNA
gcggggagctggagccagag

SEQ ID NO: 15694 - DNA, 20 bp, synthetic construct
  source 1..20: mol_type = other DNA
gcgtgctttgggccccggcg

SEQ ID NO: 15695 - DNA, 20 bp, synthetic construct
  source 1..20: mol_type = other DNA
acccggcacgcggtcaacgc

SEQ ID NO: 15696 - DNA, 20 bp, synthetic construct
  source 1..20: mol_type = other DNA
aggaaaggaccatcgctcag

SEQ ID NO: 15697 - DNA, 20 bp, synthetic construct
  source 1..20: mol_type = other DNA
aaggaaaggaccatcgctca

SEQ ID NO: 15698 - DNA, 20 bp, synthetic construct
  source 1..20: mol_type = other DNA
agcctgcgttgaccgcgtgc

SEQ ID NO: 15699 - DNA, 20 bp, synthetic construct
  source 1..20: mol_type = other DNA
ctgcaggccgccatgacacc

SEQ ID NO: 15700 - DNA, 20 bp, synthetic construct
  source 1..20: mol_type = other DNA
gaaggaaaggaccatcgctc

SEQ ID NO: 15701 - DNA, 20 bp, synthetic construct
  source 1..20: mol_type = other DNA
gtgagtgcccgatcccgccg

SEQ ID NO: 15702 - DNA, 20 bp, synthetic construct
  source 1..20: mol_type = other DNA
gcacgagcagcagtacctgc

SEQ ID NO: 15703 - DNA, 20 bp, synthetic construct
  source 1..20: mol_type = other DNA
aaggaccatcgctcaggggc

SEQ ID NO: 15704 - DNA, 20 bp, synthetic construct
  source 1..20: mol_type = other DNA
ccgccatgacacccggcacg

SEQ ID NO: 15705 - DNA, 20 bp, synthetic construct
  source 1..20: mol_type = other DNA
ccgcgtgccgggtgtcatgg

SEQ ID NO: 15706 - DNA, 20 bp, synthetic construct
  source 1..20: mol_type = other DNA
gtcctttccttctgccacgg

SEQ ID NO: 15707 - DNA, 20 bp, synthetic construct
  source 1..20: mol_type = other DNA
tgaccgcgtgccgggtgtca

SEQ ID NO: 15708 - DNA, 20 bp, synthetic construct
  source 1..20: mol_type = other DNA
cggctccggcccctgagcga

SEQ ID NO: 15709 - DNA, 20 bp, synthetic construct
  source 1..20: mol_type = other DNA
cgctcaggggccggagccgg

SEQ ID NO: 15710 - DNA, 20 bp, synthetic construct
  source 1..20: mol_type = other DNA
tcttcacgccttcagtaccg

SEQ ID NO: 15711 - DNA, 20 bp, synthetic construct
  source 1..20: mol_type = other DNA
tcgacatggcctaacagtga

SEQ ID NO: 15712 - DNA, 20 bp, synthetic construct
  source 1..20: mol_type = other DNA
agtttgccgagtgcagtccc

SEQ ID NO: 15713 - DNA, 20 bp, synthetic construct
  source 1..20: mol_type = other DNA
ctcactgttaggccatgtcg

SEQ ID NO: 15714 - DNA, 20 bp, synthetic construct
  source 1..20: mol_type = other DNA
ctggggtcgagcgttgcggg

SEQ ID NO: 15715 - DNA, 20 bp, synthetic construct
  source 1..20: mol_type = other DNA
gggggcgcaggaaacaatag

SEQ ID NO: 15716 - DNA, 20 bp, synthetic construct
  source 1..20: mol_type = other DNA
aagagctcgctctgtgcgcg

SEQ ID NO: 15717 - DNA, 20 bp, synthetic construct
  source 1..20: mol_type = other DNA
gctcgaccccaggattcccc

SEQ ID NO: 15718 - DNA, 20 bp, synthetic construct
  source 1..20: mol_type = other DNA
ggcgagccgggggaatcctg

SEQ ID NO: 15719 - DNA, 20 bp, synthetic construct
  source 1..20: mol_type = other DNA
atggcgggcaggcgagccgg

SEQ ID NO: 15720 - DNA, 20 bp, synthetic construct
  source 1..20: mol_type = other DNA
tggggtcgagcgttgcggga

SEQ ID NO: 15721 - DNA, 20 bp, synthetic construct
  source 1..20: mol_type = other DNA
catggcgggcaggcgagccg

SEQ ID NO: 15722 - DNA, 20 bp, synthetic construct
  source 1..20: mol_type = other DNA
ctcccgcaacgctcgacccc

SEQ ID NO: 15723 - DNA, 20 bp, synthetic construct
  source 1..20: mol_type = other DNA
aatcctggggtcgagcgttg

SEQ ID NO: 15724 - DNA, 20 bp, synthetic construct
  source 1..20: mol_type = other DNA
accttccttgtcggccatgg

SEQ ID NO: 15725 - DNA, 20 bp, synthetic construct
  source 1..20: mol_type = other DNA
ggctccacgatgcccatccg

SEQ ID NO: 15726 - DNA, 20 bp, synthetic construct
  source 1..20: mol_type = other DNA
gcaccttcccgtagccgtcg

SEQ ID NO: 15727 - DNA, 20 bp, synthetic construct
  source 1..20: mol_type = other DNA
tccacgatgcccatccgggg

SEQ ID NO: 15728 - DNA, 20 bp, synthetic construct
  source 1..20: mol_type = other DNA
ggtcctcgacggctacggga

SEQ ID NO: 15729 - DNA, 20 bp, synthetic construct
  source 1..20: mol_type = other DNA
gccgcgcgcctgccggacga

SEQ ID NO: 15730 - DNA, 20 bp, synthetic construct
  source 1..20: mol_type = other DNA
tgccgcgcgcctgccggacg

SEQ ID NO: 15731 - DNA, 20 bp, synthetic construct
  source 1..20: mol_type = other DNA
ctctagtgacagcggcccgc

SEQ ID NO: 15732 - DNA, 20 bp, synthetic construct
  source 1..20: mol_type = other DNA
gtgacagcggcccgctggag

SEQ ID NO: 15733 - DNA, 20 bp, synthetic construct
  source 1..20: mol_type = other DNA
gtcagagcccgggctccggt

SEQ ID NO: 15734 - DNA, 20 bp, synthetic construct
  source 1..20: mol_type = other DNA
gccctcgtccggcaggcgcg

SEQ ID NO: 15735 - DNA, 20 bp, synthetic construct
  source 1..20: mol_type = other DNA
tcagagcccgggctccggtg

SEQ ID NO: 15736 - DNA, 20 bp, synthetic construct
  source 1..20: mol_type = other DNA
gaagccaggcgtcagagccc

SEQ ID NO: 15737 - DNA, 20 bp, synthetic construct
  source 1..20: mol_type = other DNA
cgtcagagcccgggctccgg

SEQ ID NO: 15738 - DNA, 20 bp, synthetic construct
  source 1..20: mol_type = other DNA
gagagctgccgcgcgcctgc

SEQ ID NO: 15739 - DNA, 20 bp, synthetic construct
  source 1..20: mol_type = other DNA
ctctcgggcttcctctccag

SEQ ID NO: 15740 - DNA, 20 bp, synthetic construct
  source 1..20: mol_type = other DNA
accaaggtaagcgccgtacg

SEQ ID NO: 15741 - DNA, 20 bp, synthetic construct
  source 1..20: mol_type = other DNA
gcaggcgagcgggccgatcg

SEQ ID NO: 15742 - DNA, 20 bp, synthetic construct
  source 1..20: mol_type = other DNA
caggcgagcgggccgatcgt

SEQ ID NO: 15743 - DNA, 20 bp, synthetic construct
  source 1..20: mol_type = other DNA
aagcgaggagaggatcaggt

SEQ ID NO: 15744 - DNA, 20 bp, synthetic construct
  source 1..20: mol_type = other DNA
tgccctccccggacttgcac

SEQ ID NO: 15745 - DNA, 20 bp, synthetic construct
  source 1..20: mol_type = other DNA
acagccgcccgtgcaagtcc

SEQ ID NO: 15746 - DNA, 20 bp, synthetic construct
  source 1..20: mol_type = other DNA
cagccgcccgtgcaagtccg

SEQ ID NO: 15747 - DNA, 20 bp, synthetic construct
  source 1..20: mol_type = other DNA
tgacgtttcccgagaaacca

SEQ ID NO: 15748 - DNA, 20 bp, synthetic construct
  source 1..20: mol_type = other DNA
aggcaagcgaggagaggatc

SEQ ID NO: 15749 - DNA, 20 bp, synthetic construct
  source 1..20: mol_type = other DNA
ccgcccgtgcaagtccgggg

SEQ ID NO: 15750 - DNA, 20 bp, synthetic construct
  source 1..20: mol_type = other DNA
ggctgtggctcaggcaagcg

SEQ ID NO: 15751 - DNA, 20 bp, synthetic construct
  source 1..20: mol_type = other DNA
agggcaccagagcgcgcacc

SEQ ID NO: 15752 - DNA, 20 bp, synthetic construct
  source 1..20: mol_type = other DNA
cggggagatgagcaggcgag

SEQ ID NO: 15753 - DNA, 20 bp, synthetic construct
  source 1..20: mol_type = other DNA
ggggagatgagcaggcgagc

SEQ ID NO: 15754 - DNA, 20 bp, synthetic construct
  source 1..20: mol_type = other DNA
gcggggcggtgccggcaaga

SEQ ID NO: 15755 - DNA, 20 bp, synthetic construct
  source 1..20: mol_type = other DNA
agtgcctgtagattgggttg

SEQ ID NO: 15756 - DNA, 20 bp, synthetic construct
  source 1..20: mol_type = other DNA
caacccaatctacaggcact

SEQ ID NO: 15757 - DNA, 20 bp, synthetic construct
  source 1..20: mol_type = other DNA
ccagtgcctgtagattgggt

SEQ ID NO: 15758 - DNA, 20 bp, synthetic construct
  source 1..20: mol_type = other DNA
gttcccagtgcctgtagatt

SEQ ID NO: 15759 - DNA, 20 bp, synthetic construct
  source 1..20: mol_type = other DNA
gagggaaaaagaggcgtaga

SEQ ID NO: 15760 - DNA, 20 bp, synthetic construct
  source 1..20: mol_type = other DNA
ccaacccaatctacaggcac

SEQ ID NO: 15761 - DNA, 20 bp, synthetic construct
  source 1..20: mol_type = other DNA
cagaaaacaaacaattcggg

SEQ ID NO: 15762 - DNA, 20 bp, synthetic construct
  source 1..20: mol_type = other DNA
tgggaacttgcaagcagcca

SEQ ID NO: 15763 - DNA, 20 bp, synthetic construct
  source 1..20: mol_type = other DNA
agttcccagtgcctgtagat

SEQ ID NO: 15764 - DNA, 20 bp, synthetic construct
  source 1..20: mol_type = other DNA
gagttggggggaagcctcag

SEQ ID NO: 15765 - DNA, 20 bp, synthetic construct
  source 1..20: mol_type = other DNA
attcgggcggagggaaaaag

SEQ ID NO: 15766 - DNA, 20 bp, synthetic construct
  source 1..20: mol_type = other DNA
aagcctcagcggctccctga

SEQ ID NO: 15767 - DNA, 20 bp, synthetic construct
  source 1..20: mol_type = other DNA
cagtccccaacccaatctac

SEQ ID NO: 15768 - DNA, 20 bp, synthetic construct
  source 1..20: mol_type = other DNA
cagtgcctgtagattgggtt

SEQ ID NO: 15769 - DNA, 20 bp, synthetic construct
  source 1..20: mol_type = other DNA
ctgggaacttgcaagcagcc

SEQ ID NO: 15770 - DNA, 20 bp, synthetic construct
  source 1..20: mol_type = other DNA
ccagggtcctgaccgccgag

SEQ ID NO: 15771 - DNA, 20 bp, synthetic construct
  source 1..20: mol_type = other DNA
tgttgggaagccctggacgt

SEQ ID NO: 15772 - DNA, 20 bp, synthetic construct
  source 1..20: mol_type = other DNA
ggaaccgcgttcgaccgccc

SEQ ID NO: 15773 - DNA, 20 bp, synthetic construct
  source 1..20: mol_type = other DNA
gtgttgggaagccctggacg

SEQ ID NO: 15774 - DNA, 20 bp, synthetic construct
  source 1..20: mol_type = other DNA
cccccactcacccagcgacg

SEQ ID NO: 15775 - DNA, 20 bp, synthetic construct
  source 1..20: mol_type = other DNA
aaccccctgccctcatcccc

SEQ ID NO: 15776 - DNA, 20 bp, synthetic construct
  source 1..20: mol_type = other DNA
ccgcgtcgctgggtgagtgg

SEQ ID NO: 15777 - DNA, 20 bp, synthetic construct
  source 1..20: mol_type = other DNA
tccgcgtcgctgggtgagtg

SEQ ID NO: 15778 - DNA, 20 bp, synthetic construct
  source 1..20: mol_type = other DNA
gcagggggttcccggagctg

SEQ ID NO: 15779 - DNA, 20 bp, synthetic construct
  source 1..20: mol_type = other DNA
ggacgtgggcccccagctcc

SEQ ID NO: 15780 - DNA, 20 bp, synthetic construct
  source 1..20: mol_type = other DNA
cagggggttcccggagctgg

SEQ ID NO: 15781 - DNA, 20 bp, synthetic construct
  source 1..20: mol_type = other DNA
gcggcggtgttgggaagccc

SEQ ID NO: 15782 - DNA, 20 bp, synthetic construct
  source 1..20: mol_type = other DNA
gcagctccagccggggccgg

SEQ ID NO: 15783 - DNA, 20 bp, synthetic construct
  source 1..20: mol_type = other DNA
gagctgggggcccacgtcca

SEQ ID NO: 15784 - DNA, 20 bp, synthetic construct
  source 1..20: mol_type = other DNA
agtgggggcagctccagccg

SEQ ID NO: 15785 - DNA, 20 bp, synthetic construct
  source 1..20: mol_type = other DNA
gcgcgacctgggtgccatgg

SEQ ID NO: 15786 - DNA, 20 bp, synthetic construct
  source 1..20: mol_type = other DNA
cagcggcggtgacaggccag

SEQ ID NO: 15787 - DNA, 20 bp, synthetic construct
  source 1..20: mol_type = other DNA
tgagcctggcagtggtctgg

SEQ ID NO: 15788 - DNA, 20 bp, synthetic construct
  source 1..20: mol_type = other DNA
tggtctggcggcgcccactg

SEQ ID NO: 15789 - DNA, 20 bp, synthetic construct
  source 1..20: mol_type = other DNA
ggaggcctcgaggccgcagt

SEQ ID NO: 15790 - DNA, 20 bp, synthetic construct
  source 1..20: mol_type = other DNA
aggccagcggcctgagaccg

SEQ ID NO: 15791 - DNA, 20 bp, synthetic construct
  source 1..20: mol_type = other DNA
ccagcggcctgagaccgcgg

SEQ ID NO: 15792 - DNA, 20 bp, synthetic construct
  source 1..20: mol_type = other DNA
cgcgcgcgacctgggtgcca

SEQ ID NO: 15793 - DNA, 20 bp, synthetic construct
  source 1..20: mol_type = other DNA
ccgctgccgccatggcaccc

SEQ ID NO: 15794 - DNA, 20 bp, synthetic construct
  source 1..20: mol_type = other DNA
gcctgagcctggcagtggtc

SEQ ID NO: 15795 - DNA, 20 bp, synthetic construct
  source 1..20: mol_type = other DNA
aggaggcctcgaggccgcag

SEQ ID NO: 15796 - DNA, 20 bp, synthetic construct
  source 1..20: mol_type = other DNA
gggtgccatggcggcagcgg

SEQ ID NO: 15797 - DNA, 20 bp, synthetic construct
  source 1..20: mol_type = other DNA
cggcggccgaggaggcctcg

SEQ ID NO: 15798 - DNA, 20 bp, synthetic construct
  source 1..20: mol_type = other DNA
gcctgagaccgcggcggccg

SEQ ID NO: 15799 - DNA, 20 bp, synthetic construct
  source 1..20: mol_type = other DNA
tgagaccgcggcggccgagg

SEQ ID NO: 15800 - DNA, 20 bp, synthetic construct
  source 1..20: mol_type = other DNA
cacaggacccttgcacaaga

SEQ ID NO: 15801 - DNA, 20 bp, synthetic construct
  source 1..20: mol_type = other DNA
gagaggctccgtcttgtgca

SEQ ID NO: 15802 - DNA, 20 bp, synthetic construct
  source 1..20: mol_type = other DNA
ccggtttccggcgggagcgt

SEQ ID NO: 15803 - DNA, 20 bp, synthetic construct
  source 1..20: mol_type = other DNA
gagcgtgggccgccagactc

SEQ ID NO: 15804 - DNA, 20 bp, synthetic construct
  source 1..20: mol_type = other DNA
ggccagtgcagccagcccac

SEQ ID NO: 15805 - DNA, 20 bp, synthetic construct
  source 1..20: mol_type = other DNA
tctggcaggcaccaccgcag

SEQ ID NO: 15806 - DNA, 20 bp, synthetic construct
  source 1..20: mol_type = other DNA
gtcttgtgcaagggtcctgt

SEQ ID NO: 15807 - DNA, 20 bp, synthetic construct
  source 1..20: mol_type = other DNA
agaggctccgtcttgtgcaa

SEQ ID NO: 15808 - DNA, 20 bp, synthetic construct
  source 1..20: mol_type = other DNA
ggagcctctcccgagtctgg

SEQ ID NO: 15809 - DNA, 20 bp, synthetic construct
  source 1..20: mol_type = other DNA
gctgcgggtccggtttccgg

SEQ ID NO: 15810 - DNA, 20 bp, synthetic construct
  source 1..20: mol_type = other DNA
ggctgcactggcctctgcgg

SEQ ID NO: 15811 - DNA, 20 bp, synthetic construct
  source 1..20: mol_type = other DNA
tgggccgccagactcgggag

SEQ ID NO: 15812 - DNA, 20 bp, synthetic construct
  source 1..20: mol_type = other DNA
tgtgcaagggtcctgtgggc

SEQ ID NO: 15813 - DNA, 20 bp, synthetic construct
  source 1..20: mol_type = other DNA
ctggcggcccacgctcccgc

SEQ ID NO: 15814 - DNA, 20 bp, synthetic construct
  source 1..20: mol_type = other DNA
gctggctgcactggcctctg

SEQ ID NO: 15815 - DNA, 20 bp, synthetic construct
  source 1..20: mol_type = other DNA
gtacgtgccaacaaaaccca

SEQ ID NO: 15816 - DNA, 20 bp, synthetic construct
  source 1..20: mol_type = other DNA
agggacggaggcctgagtca

SEQ ID NO: 15817 - DNA, 20 bp, synthetic construct
  source 1..20: mol_type = other DNA
ctgagtcaggggttccgcca

SEQ ID NO: 15818 - DNA, 20 bp, synthetic construct
  source 1..20: mol_type = other DNA
caaagcgaaaaacaaaccca

SEQ ID NO: 15819 - DNA, 20 bp, synthetic construct
  source 1..20: mol_type = other DNA
ctgaaagacagagcaccttg

SEQ ID NO: 15820 - DNA, 20 bp, synthetic construct
  source 1..20: mol_type = other DNA
cacggccaaaaccttcccta

SEQ ID NO: 15821 - DNA, 20 bp, synthetic construct
  source 1..20: mol_type = other DNA
actggctccagccttaggga

SEQ ID NO: 15822 - DNA, 20 bp, synthetic construct
  source 1..20: mol_type = other DNA
gggacggaggcctgagtcag

SEQ ID NO: 15823 - DNA, 20 bp, synthetic construct
  source 1..20: mol_type = other DNA
agcgaaaaacaaacccaggg

SEQ ID NO: 15824 - DNA, 20 bp, synthetic construct
  source 1..20: mol_type = other DNA
gcgaaaaacaaacccaggga

SEQ ID NO: 15825 - DNA, 20 bp, synthetic construct
  source 1..20: mol_type = other DNA
cctggcggaacccctgactc

SEQ ID NO: 15826 - DNA, 20 bp, synthetic construct
  source 1..20: mol_type = other DNA
gagggacggaggcctgagtc

SEQ ID NO: 15827 - DNA, 20 bp, synthetic construct
  source 1..20: mol_type = other DNA
ccaaagcgaaaaacaaaccc

SEQ ID NO: 15828 - DNA, 20 bp, synthetic construct
  source 1..20: mol_type = other DNA
acaaacccagggagggacgg

SEQ ID NO: 15829 - DNA, 20 bp, synthetic construct
  source 1..20: mol_type = other DNA
aaaacaaacccagggaggga

SEQ ID NO: 15830 - DNA, 20 bp, synthetic construct
  source 1..20: mol_type = other DNA
cagccgagtccaaataggag

SEQ ID NO: 15831 - DNA, 20 bp, synthetic construct
  source 1..20: mol_type = other DNA
ggcttccaaagtgatcatgg

SEQ ID NO: 15832 - DNA, 20 bp, synthetic construct
  source 1..20: mol_type = other DNA
ataggagcggccacagccag

SEQ ID NO: 15833 - DNA, 20 bp, synthetic construct
  source 1..20: mol_type = other DNA
gggaggacttcagtgcccgc

SEQ ID NO: 15834 - DNA, 20 bp, synthetic construct
  source 1..20: mol_type = other DNA
ttccaaagtgatcatggagg

SEQ ID NO: 15835 - DNA, 20 bp, synthetic construct
  source 1..20: mol_type = other DNA
cgcgcccgtggctactcgag

SEQ ID NO: 15836 - DNA, 20 bp, synthetic construct
  source 1..20: mol_type = other DNA
gaacccgagctcgctccgcg

SEQ ID NO: 15837 - DNA, 20 bp, synthetic construct
  source 1..20: mol_type = other DNA
gagcagctgctgccagcccg

SEQ ID NO: 15838 - DNA, 20 bp, synthetic construct
  source 1..20: mol_type = other DNA
cgggaggacttcagtgcccg

SEQ ID NO: 15839 - DNA, 20 bp, synthetic construct
  source 1..20: mol_type = other DNA
gtggctactcgagcggcagc

SEQ ID NO: 15840 - DNA, 20 bp, synthetic construct
  source 1..20: mol_type = other DNA
gctgccgctcgagtagccac

SEQ ID NO: 15841 - DNA, 20 bp, synthetic construct
  source 1..20: mol_type = other DNA
ctactcgagcggcagccggg

SEQ ID NO: 15842 - DNA, 20 bp, synthetic construct
  source 1..20: mol_type = other DNA
tctggtcccgatcgcgcccg

SEQ ID NO: 15843 - DNA, 20 bp, synthetic construct
  source 1..20: mol_type = other DNA
agcagctgctgccagcccgc

SEQ ID NO: 15844 - DNA, 20 bp, synthetic construct
  source 1..20: mol_type = other DNA
cgcgggcactgaagtcctcc

SEQ ID NO: 15845 - DNA, 20 bp, synthetic construct
  source 1..20: mol_type = other DNA
gaagagccgagggtccagtg

SEQ ID NO: 15846 - DNA, 20 bp, synthetic construct
  source 1..20: mol_type = other DNA
cagaacacacaagaagtcca

SEQ ID NO: 15847 - DNA, 20 bp, synthetic construct
  source 1..20: mol_type = other DNA
gaagtccaaggaagagccga

SEQ ID NO: 15848 - DNA, 20 bp, synthetic construct
  source 1..20: mol_type = other DNA
agaagtccaaggaagagccg

SEQ ID NO: 15849 - DNA, 20 bp, synthetic construct
  source 1..20: mol_type = other DNA
tccgaccacagcttggcttg

SEQ ID NO: 15850 - DNA, 20 bp, synthetic construct
  source 1..20: mol_type = other DNA
ctgagagtgtaaaaggcagc

SEQ ID NO: 15851 - DNA, 20 bp, synthetic construct
  source 1..20: mol_type = other DNA
aggaagagccgagggtccag

SEQ ID NO: 15852 - DNA, 20 bp, synthetic construct
  source 1..20: mol_type = other DNA
ggaagagccgagggtccagt

SEQ ID NO: 15853 - DNA, 20 bp, synthetic construct
  source 1..20: mol_type = other DNA
ctctagctcagaggccccac

SEQ ID NO: 15854 - DNA, 20 bp, synthetic construct
  source 1..20: mol_type = other DNA
ccaggccaccccgccacccc

SEQ ID NO: 15855 - DNA, 20 bp, synthetic construct
  source 1..20: mol_type = other DNA
tttacactctcagcctgggg

SEQ ID NO: 15856 - DNA, 20 bp, synthetic construct
  source 1..20: mol_type = other DNA
gctgagagtgtaaaaggcag

SEQ ID NO: 15857 - DNA, 20 bp, synthetic construct
  source 1..20: mol_type = other DNA
tggggcctctgagctagaga

SEQ ID NO: 15858 - DNA, 20 bp, synthetic construct
  source 1..20: mol_type = other DNA
actctcagcctggggtggcg

SEQ ID NO: 15859 - DNA, 20 bp, synthetic construct
  source 1..20: mol_type = other DNA
ggggtggcggggtggcctgg

SEQ ID NO: 15860 - DNA, 20 bp, synthetic construct
  source 1..20: mol_type = other DNA
gggtgacgcgacgatctcag

SEQ ID NO: 15861 - DNA, 20 bp, synthetic construct
  source 1..20: mol_type = other DNA
ccaagatcaggaacctgccc

SEQ ID NO: 15862 - DNA, 20 bp, synthetic construct
  source 1..20: mol_type = other DNA
agggtctcagggtcaggtcg

SEQ ID NO: 15863 - DNA, 20 bp, synthetic construct
  source 1..20: mol_type = other DNA
gatcaggaacctgccctggt

SEQ ID NO: 15864 - DNA, 20 bp, synthetic construct
  source 1..20: mol_type = other DNA
gtcgcggctggtcactgtgc

SEQ ID NO: 15865 - DNA, 20 bp, synthetic construct
  source 1..20: mol_type = other DNA
gcgacctgaccctgagaccc

SEQ ID NO: 15866 - DNA, 20 bp, synthetic construct
  source 1..20: mol_type = other DNA
ccagccacctcctccccgcg

SEQ ID NO: 15867 - DNA, 20 bp, synthetic construct
  source 1..20: mol_type = other DNA
ggtaggaggaggccgagcgg

SEQ ID NO: 15868 - DNA, 20 bp, synthetic construct
  source 1..20: mol_type = other DNA
cgcgcgaactgtaagtgcca

SEQ ID NO: 15869 - DNA, 20 bp, synthetic construct
  source 1..20: mol_type = other DNA
gaacctgccctggtaggagg

SEQ ID NO: 15870 - DNA, 20 bp, synthetic construct
  source 1..20: mol_type = other DNA
cctggtaggaggaggccgag

SEQ ID NO: 15871 - DNA, 20 bp, synthetic construct
  source 1..20: mol_type = other DNA
caggaacctgccctggtagg

SEQ ID NO: 15872 - DNA, 20 bp, synthetic construct
  source 1..20: mol_type = other DNA
cgctcggcctcctcctacca

SEQ ID NO: 15873 - DNA, 20 bp, synthetic construct
  source 1..20: mol_type = other DNA
gcggcggcggtgggcagagg

SEQ ID NO: 15874 - DNA, 20 bp, synthetic construct
  source 1..20: mol_type = other DNA
agtgccagggtctcagggtc

SEQ ID NO: 15875 - DNA, 20 bp, synthetic construct
  source 1..20: mol_type = other DNA
gcgcggccgcgtgggctatg

SEQ ID NO: 15876 - DNA, 20 bp, synthetic construct
  source 1..20: mol_type = other DNA
ccgccgccccatagcccacg

SEQ ID NO: 15877 - DNA, 20 bp, synthetic construct
  source 1..20: mol_type = other DNA
cggccgcgtgggctatgggg

SEQ ID NO: 15878 - DNA, 20 bp, synthetic construct
  source 1..20: mol_type = other DNA
gaggtgtagggctagagttc

SEQ ID NO: 15879 - DNA, 20 bp, synthetic construct
  source 1..20: mol_type = other DNA
gtttctgcgtgctgcgtgcg

SEQ ID NO: 15880 - DNA, 20 bp, synthetic construct
  source 1..20: mol_type = other DNA
acgcagaaaccggcccgcca

SEQ ID NO: 15881 - DNA, 20 bp, synthetic construct
  source 1..20: mol_type = other DNA
ggaccccgaggcctgcgagg

SEQ ID NO: 15882 - DNA, 20 bp, synthetic construct
  source 1..20: mol_type = other DNA
cccggaccccgaggcctgcg

SEQ ID NO: 15883 - DNA, 20 bp, synthetic construct
  source 1..20: mol_type = other DNA
cggtaggagccgggacccgg

SEQ ID NO: 15884 - DNA, 20 bp, synthetic construct
  source 1..20: mol_type = other DNA
ggaagcccaggaggagcccc

SEQ ID NO: 15885 - DNA, 20 bp, synthetic construct
  source 1..20: mol_type = other DNA
cggggtccgggaagcccagg

SEQ ID NO: 15886 - DNA, 20 bp, synthetic construct
  source 1..20: mol_type = other DNA
ccccgaggcctgcgaggcgg

SEQ ID NO: 15887 - DNA, 20 bp, synthetic construct
  source 1..20: mol_type = other DNA
tgctgcgtgcgcggccgcgt

SEQ ID NO: 15888 - DNA, 20 bp, synthetic construct
  source 1..20: mol_type = other DNA
gctatggggcggcggtcgcg

SEQ ID NO: 15889 - DNA, 20 bp, synthetic construct
  source 1..20: mol_type = other DNA
cggaagtcccgggaggtgta

SEQ ID NO: 15890 - DNA, 20 bp, synthetic construct
  source 1..20: mol_type = other DNA
ggcttccgagcacagcatgg

SEQ ID NO: 15891 - DNA, 20 bp, synthetic construct
  source 1..20: mol_type = other DNA
taaaagcagcagcagagagt

SEQ ID NO: 15892 - DNA, 20 bp, synthetic construct
  source 1..20: mol_type = other DNA
ctcgctcactcgctcgtccc

SEQ ID NO: 15893 - DNA, 20 bp, synthetic construct
  source 1..20: mol_type = other DNA
tggggctccggcttgctgcg

SEQ ID NO: 15894 - DNA, 20 bp, synthetic construct
  source 1..20: mol_type = other DNA
cttgaccgccatgctgtgct

SEQ ID NO: 15895 - DNA, 20 bp, synthetic construct
  source 1..20: mol_type = other DNA
gctgcggggagagctgtgcg

SEQ ID NO: 15896 - DNA, 20 bp, synthetic construct
  source 1..20: mol_type = other DNA
catgctgtgctcggaagccg

SEQ ID NO: 15897 - DNA, 20 bp, synthetic construct
  source 1..20: mol_type = other DNA
cgagcacagcatggcggtca

SEQ ID NO: 15898 - DNA, 20 bp, synthetic construct
  source 1..20: mol_type = other DNA
gagctgtgcggggcttggac

SEQ ID NO: 15899 - DNA, 20 bp, synthetic construct
  source 1..20: mol_type = other DNA
cccggcttccgagcacagca

SEQ ID NO: 15900 - DNA, 20 bp, synthetic construct
  source 1..20: mol_type = other DNA
ctgtgcggggcttggaccgg

SEQ ID NO: 15901 - DNA, 20 bp, synthetic construct
  source 1..20: mol_type = other DNA
gcggggcttggaccggagga

SEQ ID NO: 15902 - DNA, 20 bp, synthetic construct
  source 1..20: mol_type = other DNA
ttgctgcggggagagctgtg

SEQ ID NO: 15903 - DNA, 20 bp, synthetic construct
  source 1..20: mol_type = other DNA
gccatgctgtgctcggaagc

SEQ ID NO: 15904 - DNA, 20 bp, synthetic construct
  source 1..20: mol_type = other DNA
gcagtggggggctgcaggca

SEQ ID NO: 15905 - DNA, 20 bp, synthetic construct
  source 1..20: mol_type = other DNA
tgggcagcctcagctcgctg

SEQ ID NO: 15906 - DNA, 20 bp, synthetic construct
  source 1..20: mol_type = other DNA
gagactttccacctcccgct

SEQ ID NO: 15907 - DNA, 20 bp, synthetic construct
  source 1..20: mol_type = other DNA
agaaggtggaagtgcagagt

SEQ ID NO: 15908 - DNA, 20 bp, synthetic construct
  source 1..20: mol_type = other DNA
acccctgcctgaaacagtgc

SEQ ID NO: 15909 - DNA, 20 bp, synthetic construct
  source 1..20: mol_type = other DNA
cccctgcctgaaacagtgca

SEQ ID NO: 15910 - DNA, 20 bp, synthetic construct
  source 1..20: mol_type = other DNA
cccttctccccagcgagctg

SEQ ID NO: 15911 - DNA, 20 bp, synthetic construct
  source 1..20: mol_type = other DNA
cctgaaacagtgcagggaga

SEQ ID NO: 15912 - DNA, 20 bp, synthetic construct
  source 1..20: mol_type = other DNA
agcgagctgaggctgcccag

SEQ ID NO: 15913 - DNA, 20 bp, synthetic construct
  source 1..20: mol_type = other DNA
agctgaggctgcccagcggg

SEQ ID NO: 15914 - DNA, 20 bp, synthetic construct
  source 1..20: mol_type = other DNA
ctcagctcgctggggagaag

SEQ ID NO: 15915 - DNA, 20 bp, synthetic construct
  source 1..20: mol_type = other DNA
tggggagaaggggacagtgt

SEQ ID NO: 15916 - DNA, 20 bp, synthetic construct
  source 1..20: mol_type = other DNA
gagaaggtggaagtgcagag

SEQ ID NO: 15917 - DNA, 20 bp, synthetic construct
  source 1..20: mol_type = other DNA
aaggggacagtgtgggcgag

SEQ ID NO: 15918 - DNA, 20 bp, synthetic construct
  source 1..20: mol_type = other DNA
gcctcagctcgctggggaga

SEQ ID NO: 15919 - DNA, 20 bp, synthetic construct
  source 1..20: mol_type = other DNA
ctggggagaaggggacagtg

SEQ ID NO: 15920 - DNA, 20 bp, synthetic construct
  source 1..20: mol_type = other DNA
gtgcacgcaggtaatcgggt

SEQ ID NO: 15921 - DNA, 20 bp, synthetic construct
  source 1..20: mol_type = other DNA
ttcgggcccccacctcaccc

SEQ ID NO: 15922 - DNA, 20 bp, synthetic construct
  source 1..20: mol_type = other DNA
aagctggccagggtgaggtg

SEQ ID NO: 15923 - DNA, 20 bp, synthetic construct
  source 1..20: mol_type = other DNA
tcaagctggccagggtgagg

SEQ ID NO: 15924 - DNA, 20 bp, synthetic construct
  source 1..20: mol_type = other DNA
aggtgggggcccgaatttgg

SEQ ID NO: 15925 - DNA, 20 bp, synthetic construct
  source 1..20: mol_type = other DNA
acggctggtgtccatgatgg

SEQ ID NO: 15926 - DNA, 20 bp, synthetic construct
  source 1..20: mol_type = other DNA
tgtccatgatggcggcgcgg

SEQ ID NO: 15927 - DNA, 20 bp, synthetic construct
  source 1..20: mol_type = other DNA
cacacggctggtgtccatga

SEQ ID NO: 15928 - DNA, 20 bp, synthetic construct
  source 1..20: mol_type = other DNA
gcagcctatcaagctggcca

SEQ ID NO: 15929 - DNA, 20 bp, synthetic construct
  source 1..20: mol_type = other DNA
ccagcttgataggctgcaca

SEQ ID NO: 15930 - DNA, 20 bp, synthetic construct
  source 1..20: mol_type = other DNA
gcggcgcggcggcggtctgg

SEQ ID NO: 15931 - DNA, 20 bp, synthetic construct
  source 1..20: mol_type = other DNA
gcggcggcggtctggcggag

SEQ ID NO: 15932 - DNA, 20 bp, synthetic construct
  source 1..20: mol_type = other DNA
ccatgatggcggcgcggcgg

SEQ ID NO: 15933 - DNA, 20 bp, synthetic construct
  source 1..20: mol_type = other DNA
tggtgtccatgatggcggcg

SEQ ID NO: 15934 - DNA, 20 bp, synthetic construct
  source 1..20: mol_type = other DNA
cttgataggctgcacacggc

SEQ ID NO: 15935 - DNA, 20 bp, synthetic construct
  source 1..20: mol_type = other DNA
gtgacgccttcgcgtccaga

SEQ ID NO: 15936 - DNA, 20 bp, synthetic construct
  source 1..20: mol_type = other DNA
tcgcgtccagacggaagtgc

SEQ ID NO: 15937 - DNA, 20 bp, synthetic construct
  source 1..20: mol_type = other DNA
ttcgcgtccagacggaagtg

SEQ ID NO: 15938 - DNA, 20 bp, synthetic construct
  source 1..20: mol_type = other DNA
gcagcagcacggaaagcgcc

SEQ ID NO: 15939 - DNA, 20 bp, synthetic construct
  source 1..20: mol_type = other DNA
cggaaagcgccaggcacgac

SEQ ID NO: 15940 - DNA, 20 bp, synthetic construct
  source 1..20: mol_type = other DNA
gagccgggagccggtcgcgg

SEQ ID NO: 15941 - DNA, 20 bp, synthetic construct
  source 1..20: mol_type = other DNA
cgtccagacggaagtgcggg

SEQ ID NO: 15942 - DNA, 20 bp, synthetic construct
  source 1..20: mol_type = other DNA
tcaggctcaggcacaggctt

SEQ ID NO: 15943 - DNA, 20 bp, synthetic construct
  source 1..20: mol_type = other DNA
tcaggcacaggcttgggacc

SEQ ID NO: 15944 - DNA, 20 bp, synthetic construct
  source 1..20: mol_type = other DNA
tcaggctcaggctcaggcac

SEQ ID NO: 15945 - DNA, 20 bp, synthetic construct
  source 1..20: mol_type = other DNA
cgagccgggagccggtcgcg

SEQ ID NO: 15946 - DNA, 20 bp, synthetic construct
  source 1..20: mol_type = other DNA
cccgagccgggagccggtcg

SEQ ID NO: 15947 - DNA, 20 bp, synthetic construct
  source 1..20: mol_type = other DNA
cctgagcccgagccgggagc

SEQ ID NO: 15948 - DNA, 20 bp, synthetic construct
  source 1..20: mol_type = other DNA
gcctgagcctgagcccgagc

SEQ ID NO: 15949 - DNA, 20 bp, synthetic construct
  source 1..20: mol_type = other DNA
acaggcttgggacccggctg

SEQ ID NO: 15950 - DNA, 20 bp, synthetic construct
  source 1..20: mol_type = other DNA
atgtgcaggaccctaacgac

SEQ ID NO: 15951 - DNA, 20 bp, synthetic construct
  source 1..20: mol_type = other DNA
gacactcaccgtaaatgggc

SEQ ID NO: 15952 - DNA, 20 bp, synthetic construct
  source 1..20: mol_type = other DNA
cgcagccgcgggcctcgcgt

SEQ ID NO: 15953 - DNA, 20 bp, synthetic construct
  source 1..20: mol_type = other DNA
actcaccgtaaatgggccgg

SEQ ID NO: 15954 - DNA, 20 bp, synthetic construct
  source 1..20: mol_type = other DNA
taccaccccaaggctgagga

SEQ ID NO: 15955 - DNA, 20 bp, synthetic construct
  source 1..20: mol_type = other DNA
cgcgggcctcgcgtaggcgc

SEQ ID NO: 15956 - DNA, 20 bp, synthetic construct
  source 1..20: mol_type = other DNA
tgtcgttagggtcctgcaca

SEQ ID NO: 15957 - DNA, 20 bp, synthetic construct
  source 1..20: mol_type = other DNA
accctaacgacaggcgcctc

SEQ ID NO: 15958 - DNA, 20 bp, synthetic construct
  source 1..20: mol_type = other DNA
ggcgacgcggggccatgtgc

SEQ ID NO: 15959 - DNA, 20 bp, synthetic construct
  source 1..20: mol_type = other DNA
gttgggccggcgcctacgcg

SEQ ID NO: 15960 - DNA, 20 bp, synthetic construct
  source 1..20: mol_type = other DNA
cttgtcatcatggcgacgcg

SEQ ID NO: 15961 - DNA, 20 bp, synthetic construct
  source 1..20: mol_type = other DNA
aaggctgaggaaggttgggc

SEQ ID NO: 15962 - DNA, 20 bp, synthetic construct
  source 1..20: mol_type = other DNA
gcttgtcatcatggcgacgc

SEQ ID NO: 15963 - DNA, 20 bp, synthetic construct
  source 1..20: mol_type = other DNA
cgggccgggcaggcgcaggg

SEQ ID NO: 15964 - DNA, 20 bp, synthetic construct
  source 1..20: mol_type = other DNA
cgcgggccgggcaggcgcag

SEQ ID NO: 15965 - DNA, 20 bp, synthetic construct
  source 1..20: mol_type = other DNA
agagcagttgtcctggatgg

SEQ ID NO: 15966 - DNA, 20 bp, synthetic construct
  source 1..20: mol_type = other DNA
tacaaggcaagtcgttaggg

SEQ ID NO: 15967 - DNA, 20 bp, synthetic construct
  source 1..20: mol_type = other DNA
aggtggtggagcgcccgcag

SEQ ID NO: 15968 - DNA, 20 bp, synthetic construct
  source 1..20: mol_type = other DNA
caaggcaagtcgttagggag

SEQ ID NO: 15969 - DNA, 20 bp, synthetic construct
  source 1..20: mol_type = other DNA
ggggagaaggacctggctga

SEQ ID NO: 15970 - DNA, 20 bp, synthetic construct
  source 1..20: mol_type = other DNA
ggcagagcagttgtcctgga

SEQ ID NO: 15971 - DNA, 20 bp, synthetic construct
  source 1..20: mol_type = other DNA
acaaggcaagtcgttaggga

SEQ ID NO: 15972 - DNA, 20 bp, synthetic construct
  source 1..20: mol_type = other DNA
gcaccaagaggcactcgccc

SEQ ID NO: 15973 - DNA, 20 bp, synthetic construct
  source 1..20: mol_type = other DNA
ggacaactgctctgccaacg

SEQ ID NO: 15974 - DNA, 20 bp, synthetic construct
  source 1..20: mol_type = other DNA
tcccaggcccccggaaccca

SEQ ID NO: 15975 - DNA, 20 bp, synthetic construct
  source 1..20: mol_type = other DNA
caccaagaggcactcgcccc

SEQ ID NO: 15976 - DNA, 20 bp, synthetic construct
  source 1..20: mol_type = other DNA
cgttggcagagcagttgtcc

SEQ ID NO: 15977 - DNA, 20 bp, synthetic construct
  source 1..20: mol_type = other DNA
agttgcaggtcccaggcccc

SEQ ID NO: 15978 - DNA, 20 bp, synthetic construct
  source 1..20: mol_type = other DNA
agtcgttagggaggggcccg

SEQ ID NO: 15979 - DNA, 20 bp, synthetic construct
  source 1..20: mol_type = other DNA
tagaaagagttgcaggtccc

SEQ ID NO: 15980 - DNA, 20 bp, synthetic construct
  source 1..20: mol_type = other DNA
gctcgtgtactcgttaggtg

SEQ ID NO: 15981 - DNA, 20 bp, synthetic construct
  source 1..20: mol_type = other DNA
ctaacgagtacacgagcagc

SEQ ID NO: 15982 - DNA, 20 bp, synthetic construct
  source 1..20: mol_type = other DNA
ctgctgcttcacaaaagagg

SEQ ID NO: 15983 - DNA, 20 bp, synthetic construct
  source 1..20: mol_type = other DNA
agagcagcaggaggtgacag

SEQ ID NO: 15984 - DNA, 20 bp, synthetic construct
  source 1..20: mol_type = other DNA
gaggtgacagcggtggatga

SEQ ID NO: 15985 - DNA, 20 bp, synthetic construct
  source 1..20: mol_type = other DNA
gcagcaggaggtgacagcgg

SEQ ID NO: 15986 - DNA, 20 bp, synthetic construct
  source 1..20: mol_type = other DNA
ggcgggacaggatggttctg

SEQ ID NO: 15987 - DNA, 20 bp, synthetic construct
  source 1..20: mol_type = other DNA
acagcggtggatgagggaga

SEQ ID NO: 15988 - DNA, 20 bp, synthetic construct
  source 1..20: mol_type = other DNA
ggaggtgacagcggtggatg

SEQ ID NO: 15989 - DNA, 20 bp, synthetic construct
  source 1..20: mol_type = other DNA
gcagcaggaagagcagcagg

SEQ ID NO: 15990 - DNA, 20 bp, synthetic construct
  source 1..20: mol_type = other DNA
ttgaaggtggcgggacagga

SEQ ID NO: 15991 - DNA, 20 bp, synthetic construct
  source 1..20: mol_type = other DNA
tgcttcacaaaagaggtggc

SEQ ID NO: 15992 - DNA, 20 bp, synthetic construct
  source 1..20: mol_type = other DNA
cgagcagcaggaagagcagc

SEQ ID NO: 15993 - DNA, 20 bp, synthetic construct
  source 1..20: mol_type = other DNA
gacagcggtggatgagggag

SEQ ID NO: 15994 - DNA, 20 bp, synthetic construct
  source 1..20: mol_type = other DNA
ctgctgctcgtgtactcgtt

SEQ ID NO: 15995 - DNA, 20 bp, synthetic construct
  source 1..20: mol_type = other DNA
gctccagcagatgagcgcgt

SEQ ID NO: 15996 - DNA, 20 bp, synthetic construct
  source 1..20: mol_type = other DNA
cggccttcctgaccaagctg

SEQ ID NO: 15997 - DNA, 20 bp, synthetic construct
  source 1..20: mol_type = other DNA
ggagcgcgcccgttgcaaga

SEQ ID NO: 15998 - DNA, 20 bp, synthetic construct
  source 1..20: mol_type = other DNA
gcgcgcccgttgcaagatgg

SEQ ID NO: 15999 - DNA, 20 bp, synthetic construct
  source 1..20: mol_type = other DNA
gtggaccctcgtgagcgacc

SEQ ID NO: 16000 - DNA, 20 bp, synthetic construct
  source 1..20: mol_type = other DNA
gctcacgagggtccacagct

SEQ ID NO: 16001 - DNA, 20 bp, synthetic construct
  source 1..20: mol_type = other DNA
ggtccacagcttggtcagga

SEQ ID NO: 16002 - DNA, 20 bp, synthetic construct
  source 1..20: mol_type = other DNA
ggctgtgtgtgcgcagcggg

SEQ ID NO: 16003 - DNA, 20 bp, synthetic construct
  source 1..20: mol_type = other DNA
ccggggctgtgtgtgcgcag

SEQ ID NO: 16004 - DNA, 20 bp, synthetic construct
  source 1..20: mol_type = other DNA
cgctgcgcacacacagcccc

SEQ ID NO: 16005 - DNA, 20 bp, synthetic construct
  source 1..20: mol_type = other DNA
cgcccgttgcaagatggcgg

SEQ ID NO: 16006 - DNA, 20 bp, synthetic construct
  source 1..20: mol_type = other DNA
ccggaaggctggcgcggcga

SEQ ID NO: 16007 - DNA, 20 bp, synthetic construct
  source 1..20: mol_type = other DNA
gctgcgcacacacagccccg

SEQ ID NO: 16008 - DNA, 20 bp, synthetic construct
  source 1..20: mol_type = other DNA
ccgctgcgcacacacagccc

SEQ ID NO: 16009 - DNA, 20 bp, synthetic construct
  source 1..20: mol_type = other DNA
tgtgtgtgcgcagcgggcgg

SEQ ID NO: 16010 - DNA, 20 bp, synthetic construct
  source 1..20: mol_type = other DNA
ctatttatacttcctaacgg

SEQ ID NO: 16011 - DNA, 20 bp, synthetic construct
  source 1..20: mol_type = other DNA
atcagatctgaactctccgc

SEQ ID NO: 16012 - DNA, 20 bp, synthetic construct
  source 1..20: mol_type = other DNA
tgaacaagcgcgctccggca

SEQ ID NO: 16013 - DNA, 20 bp, synthetic construct
  source 1..20: mol_type = other DNA
aacattgaacaagcgcgctc

SEQ ID NO: 16014 - DNA, 20 bp, synthetic construct
  source 1..20: mol_type = other DNA
ggagaaaaagaagtaagaag

SEQ ID NO: 16015 - DNA, 20 bp, synthetic construct
  source 1..20: mol_type = other DNA
atctttgacaattcttcctg

SEQ ID NO: 16016 - DNA, 20 bp, synthetic construct
  source 1..20: mol_type = other DNA
gggaactgatgcttccctgc

SEQ ID NO: 16017 - DNA, 20 bp, synthetic construct
  source 1..20: mol_type = other DNA
aaggggcgggggctgccgga

SEQ ID NO: 16018 - DNA, 20 bp, synthetic construct
  source 1..20: mol_type = other DNA
gaaaaagaagtaagaagagg

SEQ ID NO: 16019 - DNA, 20 bp, synthetic construct
  source 1..20: mol_type = other DNA
catcagttcccatttccctc

SEQ ID NO: 16020 - DNA, 20 bp, synthetic construct
  source 1..20: mol_type = other DNA
gaaagaggaggagaagtaga

SEQ ID NO: 16021 - DNA, 20 bp, synthetic construct
  source 1..20: mol_type = other DNA
gaaggggcgggggctgccgg

SEQ ID NO: 16022 - DNA, 20 bp, synthetic construct
  source 1..20: mol_type = other DNA
ttgaacaagcgcgctccggc

SEQ ID NO: 16023 - DNA, 20 bp, synthetic construct
  source 1..20: mol_type = other DNA
gggggctgccggagggaaat

SEQ ID NO: 16024 - DNA, 20 bp, synthetic construct
  source 1..20: mol_type = other DNA
cgggggctgccggagggaaa

SEQ ID NO: 16025 - DNA, 20 bp, synthetic construct
  source 1..20: mol_type = other DNA
ctgatccaccttcagcaacg

SEQ ID NO: 16026 - DNA, 20 bp, synthetic construct
  source 1..20: mol_type = other DNA
ggtgtccagaggatcggaca

SEQ ID NO: 16027 - DNA, 20 bp, synthetic construct
  source 1..20: mol_type = other DNA
gacgcagtttccggcgtgag

SEQ ID NO: 16028 - DNA, 20 bp, synthetic construct
  source 1..20: mol_type = other DNA
aggcgctgtggactccaggg

SEQ ID NO: 16029 - DNA, 20 bp, synthetic construct
  source 1..20: mol_type = other DNA
gggcggacggcacagaggga

SEQ ID NO: 16030 - DNA, 20 bp, synthetic construct
  source 1..20: mol_type = other DNA
gggcgagcgagagagcaagc

SEQ ID NO: 16031 - DNA, 20 bp, synthetic construct
  source 1..20: mol_type = other DNA
agcaggcagcaggctgccgg

SEQ ID NO: 16032 - DNA, 20 bp, synthetic construct
  source 1..20: mol_type = other DNA
gggcgggcggacggcacaga

SEQ ID NO: 16033 - DNA, 20 bp, synthetic construct
  source 1..20: mol_type = other DNA
cgtgagcggcgaaagccggg

SEQ ID NO: 16034 - DNA, 20 bp, synthetic construct
  source 1..20: mol_type = other DNA
cgggcgggcggacggcacag

SEQ ID NO: 16035 - DNA, 20 bp, synthetic construct
  source 1..20: mol_type = other DNA
gtgagcggcgaaagccggga

SEQ ID NO: 16036 - DNA, 20 bp, synthetic construct
  source 1..20: mol_type = other DNA
cgggcggacggcacagaggg

SEQ ID NO: 16037 - DNA, 20 bp, synthetic construct
  source 1..20: mol_type = other DNA
gcaagcaggcagcaggctgc

SEQ ID NO: 16038 - DNA, 20 bp, synthetic construct
  source 1..20: mol_type = other DNA
gcaggcagcaggctgccggc

SEQ ID NO: 16039 - DNA, 20 bp, synthetic construct
  source 1..20: mol_type = other DNA
cgagagagcaagcaggcagc

SEQ ID NO: 16040 - DNA, 20 bp, synthetic construct
  source 1..20: mol_type = other DNA
ggtcggcgcgagaacaagca

SEQ ID NO: 16041 - DNA, 20 bp, synthetic construct
  source 1..20: mol_type = other DNA
tccaccgcctgcaccacgga

SEQ ID NO: 16042 - DNA, 20 bp, synthetic construct
  source 1..20: mol_type = other DNA
cggtcggcgcgagaacaagc

SEQ ID NO: 16043 - DNA, 20 bp, synthetic construct
  source 1..20: mol_type = other DNA
cggctgcaccggttcgcggt

SEQ ID NO: 16044 - DNA, 20 bp, synthetic construct
  source 1..20: mol_type = other DNA
gcccgcagcactcggcgaag

SEQ ID NO: 16045 - DNA, 20 bp, synthetic construct
  source 1..20: mol_type = other DNA
ccagcctaccctcccggcta

SEQ ID NO: 16046 - DNA, 20 bp, synthetic construct
  source 1..20: mol_type = other DNA
gagaacaagcagggtggcgc

SEQ ID NO: 16047 - DNA, 20 bp, synthetic construct
  source 1..20: mol_type = other DNA
aagcggagccttagccggga

SEQ ID NO: 16048 - DNA, 20 bp, synthetic construct
  source 1..20: mol_type = other DNA
cggcgcgagaacaagcaggg

SEQ ID NO: 16049 - DNA, 20 bp, synthetic construct
  source 1..20: mol_type = other DNA
cgagaacaagcagggtggcg

SEQ ID NO: 16050 - DNA, 20 bp, synthetic construct
  source 1..20: mol_type = other DNA
ctggcggctgcaccggttcg

SEQ ID NO: 16051 - DNA, 20 bp, synthetic construct
  source 1..20: mol_type = other DNA
gctgctgctggcgccgtccg

SEQ ID NO: 16052 - DNA, 20 bp, synthetic construct
  source 1..20: mol_type = other DNA
gcagcaggcccagcacggcc

SEQ ID NO: 16053 - DNA, 20 bp, synthetic construct
  source 1..20: mol_type = other DNA
cagcagcagcaggcccagca

SEQ ID NO: 16054 - DNA, 20 bp, synthetic construct
  source 1..20: mol_type = other DNA
cggacggcgccagcagcagc

SEQ ID NO: 16055 - DNA, 20 bp, synthetic construct
  source 1..20: mol_type = other DNA
tcccctacgcgctacacaag

SEQ ID NO: 16056 - DNA, 20 bp, synthetic construct
  source 1..20: mol_type = other DNA
tgggccaggggtgcaatgga

SEQ ID NO: 16057 - DNA, 20 bp, synthetic construct
  source 1..20: mol_type = other DNA
tccacttgtgtagcgcgtag

SEQ ID NO: 16058 - DNA, 20 bp, synthetic construct
  source 1..20: mol_type = other DNA
ccatcttgtcagcaccgtag

SEQ ID NO: 16059 - DNA, 20 bp, synthetic construct
  source 1..20: mol_type = other DNA
ggctggcggagctgtcgctg

SEQ ID NO: 16060 - DNA, 20 bp, synthetic construct
  source 1..20: mol_type = other DNA
ctacggtgctgacaagatgg

SEQ ID NO: 16061 - DNA, 20 bp, synthetic construct
  source 1..20: mol_type = other DNA
gctccacttgtgtagcgcgt

SEQ ID NO: 16062 - DNA, 20 bp, synthetic construct
  source 1..20: mol_type = other DNA
gctgccctccattgcacccc

SEQ ID NO: 16063 - DNA, 20 bp, synthetic construct
  source 1..20: mol_type = other DNA
gtaggggagaagccggcact

SEQ ID NO: 16064 - DNA, 20 bp, synthetic construct
  source 1..20: mol_type = other DNA
gtagcgcgtaggggagaagc

SEQ ID NO: 16065 - DNA, 20 bp, synthetic construct
  source 1..20: mol_type = other DNA
taggggagaagccggcactc

SEQ ID NO: 16066 - DNA, 20 bp, synthetic construct
  source 1..20: mol_type = other DNA
ggtgctgacaagatggcggc

SEQ ID NO: 16067 - DNA, 20 bp, synthetic construct
  source 1..20: mol_type = other DNA
tcgctgcggcgcccgagtgc

SEQ ID NO: 16068 - DNA, 20 bp, synthetic construct
  source 1..20: mol_type = other DNA
gctgacaagatggcggctgg

SEQ ID NO: 16069 - DNA, 20 bp, synthetic construct
  source 1..20: mol_type = other DNA
ccgctacggtgctgacaaga

SEQ ID NO: 16070 - DNA, 20 bp, synthetic construct
  source 1..20: mol_type = other DNA
aaaccattgttgcagaccaa

SEQ ID NO: 16071 - DNA, 20 bp, synthetic construct
  source 1..20: mol_type = other DNA
actcctgctaaccaacaaaa

SEQ ID NO: 16072 - DNA, 20 bp, synthetic construct
  source 1..20: mol_type = other DNA
ataaagcctttcccaacatc

SEQ ID NO: 16073 - DNA, 20 bp, synthetic construct
  source 1..20: mol_type = other DNA
tgctttactgtcctgatgtt

SEQ ID NO: 16074 - DNA, 20 bp, synthetic construct
  source 1..20: mol_type = other DNA
tactgtcctgatgttgggaa

SEQ ID NO: 16075 - DNA, 20 bp, synthetic construct
  source 1..20: mol_type = other DNA
ccaaatactctggtcaccaa

SEQ ID NO: 16076 - DNA, 20 bp, synthetic construct
  source 1..20: mol_type = other DNA
gtcaccaaagggacaatatt

SEQ ID NO: 16077 - DNA, 20 bp, synthetic construct
  source 1..20: mol_type = other DNA
ctttggtgaccagagtattt

SEQ ID NO: 16078 - DNA, 20 bp, synthetic construct
  source 1..20: mol_type = other DNA
attgatcacaaattcaggaa

SEQ ID NO: 16079 - DNA, 20 bp, synthetic construct
  source 1..20: mol_type = other DNA
cctttggtgaccagagtatt

SEQ ID NO: 16080 - DNA, 20 bp, synthetic construct
  source 1..20: mol_type = other DNA
caaatactctggtcaccaaa

SEQ ID NO: 16081 - DNA, 20 bp, synthetic construct
  source 1..20: mol_type = other DNA
tacttctttcccaaatactc

SEQ ID NO: 16082 - DNA, 20 bp, synthetic construct
  source 1..20: mol_type = other DNA
ttgctttactgtcctgatgt

SEQ ID NO: 16083 - DNA, 20 bp, synthetic construct
  source 1..20: mol_type = other DNA
ctcaccaaatattgtccctt

SEQ ID NO: 16084 - DNA, 20 bp, synthetic construct
  source 1..20: mol_type = other DNA
tgatgttgggaaaggcttta

SEQ ID NO: 16085 - DNA, 20 bp, synthetic construct
  source 1..20: mol_type = other DNA
ccaatgtactgtgcaagccc

SEQ ID NO: 16086 - DNA, 20 bp, synthetic construct
  source 1..20: mol_type = other DNA
gagcgactgagtcgtccgtg

SEQ ID NO: 16087 - DNA, 20 bp, synthetic construct
  source 1..20: mol_type = other DNA
gcacagtacattggaacgtg

SEQ ID NO: 16088 - DNA, 20 bp, synthetic construct
  source 1..20: mol_type = other DNA
ggagcagccatataaagtca

SEQ ID NO: 16089 - DNA, 20 bp, synthetic construct
  source 1..20: mol_type = other DNA
cctgggcttgcacagtacat

SEQ ID NO: 16090 - DNA, 20 bp, synthetic construct
  source 1..20: mol_type = other DNA
tggggatctacagcagccaa

SEQ ID NO: 16091 - DNA, 20 bp, synthetic construct
  source 1..20: mol_type = other DNA
tgactttatatggctgctcc

SEQ ID NO: 16092 - DNA, 20 bp, synthetic construct
  source 1..20: mol_type = other DNA
taaagtcagggacaagcctt

SEQ ID NO: 16093 - DNA, 20 bp, synthetic construct
  source 1..20: mol_type = other DNA
tccgtgaggaaaaagaggcg

SEQ ID NO: 16094 - DNA, 20 bp, synthetic construct
  source 1..20: mol_type = other DNA
agtcgtccgtgaggaaaaag

SEQ ID NO: 16095 - DNA, 20 bp, synthetic construct
  source 1..20: mol_type = other DNA
cgagtgagctgggagaaggg

SEQ ID NO: 16096 - DNA, 20 bp, synthetic construct
  source 1..20: mol_type = other DNA
caggcgagtgagctgggaga

SEQ ID NO: 16097 - DNA, 20 bp, synthetic construct
  source 1..20: mol_type = other DNA
ggcgagtgagctgggagaag

SEQ ID NO: 16098 - DNA, 20 bp, synthetic construct
  source 1..20: mol_type = other DNA
gcaagcccaggcgagtgagc

SEQ ID NO: 16099 - DNA, 20 bp, synthetic construct
  source 1..20: mol_type = other DNA
gcgagtgagctgggagaagg

SEQ ID NO: 16100 - DNA, 20 bp, synthetic construct
  source 1..20: mol_type = other DNA
gagcgcgggtgagtcacggg

SEQ ID NO: 16101 - DNA, 20 bp, synthetic construct
  source 1..20: mol_type = other DNA
aggatgaaggcagagagcgc

SEQ ID NO: 16102 - DNA, 20 bp, synthetic construct
  source 1..20: mol_type = other DNA
agagagcgcgggtgagtcac

SEQ ID NO: 16103 - DNA, 20 bp, synthetic construct
  source 1..20: mol_type = other DNA
ggaggtgagcgctggcgaga

SEQ ID NO: 16104 - DNA, 20 bp, synthetic construct
  source 1..20: mol_type = other DNA
cagagagcgcgggtgagtca

SEQ ID NO: 16105 - DNA, 20 bp, synthetic construct
  source 1..20: mol_type = other DNA
caggagccagcgagcgaaca

SEQ ID NO: 16106 - DNA, 20 bp, synthetic construct
  source 1..20: mol_type = other DNA
cggaggtgagcgctggcgag

SEQ ID NO: 16107 - DNA, 20 bp, synthetic construct
  source 1..20: mol_type = other DNA
gcgagagggcggaggacgga

SEQ ID NO: 16108 - DNA, 20 bp, synthetic construct
  source 1..20: mol_type = other DNA
gagcgctggcgagagggcgg

SEQ ID NO: 16109 - DNA, 20 bp, synthetic construct
  source 1..20: mol_type = other DNA
ggtgagcgctggcgagaggg

SEQ ID NO: 16110 - DNA, 20 bp, synthetic construct
  source 1..20: mol_type = other DNA
gaggatgaaggcagagagcg

SEQ ID NO: 16111 - DNA, 20 bp, synthetic construct
  source 1..20: mol_type = other DNA
ggcgagagggcggaggacgg

SEQ ID NO: 16112 - DNA, 20 bp, synthetic construct
  source 1..20: mol_type = other DNA
caggcggcggaggtgagcgc

SEQ ID NO: 16113 - DNA, 20 bp, synthetic construct
  source 1..20: mol_type = other DNA
gagggcggaggacggagggc

SEQ ID NO: 16114 - DNA, 20 bp, synthetic construct
  source 1..20: mol_type = other DNA
tggcggcaggcggcaggcgg

SEQ ID NO: 16115 - DNA, 20 bp, synthetic construct
  source 1..20: mol_type = other DNA
gcaccgagaacacgccccag

SEQ ID NO: 16116 - DNA, 20 bp, synthetic construct
  source 1..20: mol_type = other DNA
ggggcagcgagtggttctgg

SEQ ID NO: 16117 - DNA, 20 bp, synthetic construct
  source 1..20: mol_type = other DNA
gtggatgaacaccccgaact

SEQ ID NO: 16118 - DNA, 20 bp, synthetic construct
  source 1..20: mol_type = other DNA
gagcggccgagtcggtgcgt

SEQ ID NO: 16119 - DNA, 20 bp, synthetic construct
  source 1..20: mol_type = other DNA
gctgctgctcttcctcggag

SEQ ID NO: 16120 - DNA, 20 bp, synthetic construct
  source 1..20: mol_type = other DNA
gccggccgcgacctcatccc

SEQ ID NO: 16121 - DNA, 20 bp, synthetic construct
  source 1..20: mol_type = other DNA
gtcgctgaggggtagcgatg

SEQ ID NO: 16122 - DNA, 20 bp, synthetic construct
  source 1..20: mol_type = other DNA
tcgctgaggggtagcgatgc

SEQ ID NO: 16123 - DNA, 20 bp, synthetic construct
  source 1..20: mol_type = other DNA
gggtagcgatgcgggctccg

SEQ ID NO: 16124 - DNA, 20 bp, synthetic construct
  source 1..20: mol_type = other DNA
agcaacagcgcgggacccgc

SEQ ID NO: 16125 - DNA, 20 bp, synthetic construct
  source 1..20: mol_type = other DNA
gcaccgactcggccgctccg

SEQ ID NO: 16126 - DNA, 20 bp, synthetic construct
  source 1..20: mol_type = other DNA
gagcagcagcagcaacagcg

SEQ ID NO: 16127 - DNA, 20 bp, synthetic construct
  source 1..20: mol_type = other DNA
agcagcagcagcaacagcgc

SEQ ID NO: 16128 - DNA, 20 bp, synthetic construct
  source 1..20: mol_type = other DNA
tccggggatgaggtcgcggc

SEQ ID NO: 16129 - DNA, 20 bp, synthetic construct
  source 1..20: mol_type = other DNA
gggctccggggatgaggtcg

SEQ ID NO: 16130 - DNA, 20 bp, synthetic construct
  source 1..20: mol_type = other DNA
gctgtacgagatccagcacg

SEQ ID NO: 16131 - DNA, 20 bp, synthetic construct
  source 1..20: mol_type = other DNA
accatgggcaacttcgcacg

SEQ ID NO: 16132 - DNA, 20 bp, synthetic construct
  source 1..20: mol_type = other DNA
ctcgtacagctgaatgacgc

SEQ ID NO: 16133 - DNA, 20 bp, synthetic construct
  source 1..20: mol_type = other DNA
cagctgtacgagatccagca

SEQ ID NO: 16134 - DNA, 20 bp, synthetic construct
  source 1..20: mol_type = other DNA
gaccatgggcaacttcgcac

SEQ ID NO: 16135 - DNA, 20 bp, synthetic construct
  source 1..20: mol_type = other DNA
ggaaaccagactccaaacat

SEQ ID NO: 16136 - DNA, 20 bp, synthetic construct
  source 1..20: mol_type = other DNA
ggtgcagccaatttcagcta

SEQ ID NO: 16137 - DNA, 20 bp, synthetic construct
  source 1..20: mol_type = other DNA
gccccgtgcgaagttgccca

SEQ ID NO: 16138 - DNA, 20 bp, synthetic construct
  source 1..20: mol_type = other DNA
ggcaacttcgcacggggcac

SEQ ID NO: 16139 - DNA, 20 bp, synthetic construct
  source 1..20: mol_type = other DNA
agctgtacgagatccagcac

SEQ ID NO: 16140 - DNA, 20 bp, synthetic construct
  source 1..20: mol_type = other DNA
gatgatctgaggcttctcga

SEQ ID NO: 16141 - DNA, 20 bp, synthetic construct
  source 1..20: mol_type = other DNA
tgaaattggctgcaccatgt

SEQ ID NO: 16142 - DNA, 20 bp, synthetic construct
  source 1..20: mol_type = other DNA
tgaccatgggcaacttcgca

SEQ ID NO: 16143 - DNA, 20 bp, synthetic construct
  source 1..20: mol_type = other DNA
aggcttctcgaaggccgaca

SEQ ID NO: 16144 - DNA, 20 bp, synthetic construct
  source 1..20: mol_type = other DNA
gcagcttcaggtccccgtgc

SEQ ID NO: 16145 - DNA, 20 bp, synthetic construct
  source 1..20: mol_type = other DNA
ggcaaagcggccgcctgaag

SEQ ID NO: 16146 - DNA, 20 bp, synthetic construct
  source 1..20: mol_type = other DNA
gcgaggagactgttaaggaa

SEQ ID NO: 16147 - DNA, 20 bp, synthetic construct
  source 1..20: mol_type = other DNA
tcctcgcagtaagggaagaa

SEQ ID NO: 16148 - DNA, 20 bp, synthetic construct
  source 1..20: mol_type = other DNA
gcccttcttcccttactgcg

SEQ ID NO: 16149 - DNA, 20 bp, synthetic construct
  source 1..20: mol_type = other DNA
gaagggcgcgccggctacag

SEQ ID NO: 16150 - DNA, 20 bp, synthetic construct
  source 1..20: mol_type = other DNA
tcccgaagcccggcaactga

SEQ ID NO: 16151 - DNA, 20 bp, synthetic construct
  source 1..20: mol_type = other DNA
ttcgggaatgaccggcaaag

SEQ ID NO: 16152 - DNA, 20 bp, synthetic construct
  source 1..20: mol_type = other DNA
gcggtggctcctcgcagtaa

SEQ ID NO: 16153 - DNA, 20 bp, synthetic construct
  source 1..20: mol_type = other DNA
gaggagactgttaaggaaag

SEQ ID NO: 16154 - DNA, 20 bp, synthetic construct
  source 1..20: mol_type = other DNA
gtaagggaagaagggcgcgc

SEQ ID NO: 16155 - DNA, 20 bp, synthetic construct
  source 1..20: mol_type = other DNA
aaagcggccgcctgaagagg

SEQ ID NO: 16156 - DNA, 20 bp, synthetic construct
  source 1..20: mol_type = other DNA
aggagactgttaaggaaagg

SEQ ID NO: 16157 - DNA, 20 bp, synthetic construct
  source 1..20: mol_type = other DNA
cgaagcccggcaactgaggg

SEQ ID NO: 16158 - DNA, 20 bp, synthetic construct
  source 1..20: mol_type = other DNA
ttcccgaagcccggcaactg

SEQ ID NO: 16159 - DNA, 20 bp, synthetic construct
  source 1..20: mol_type = other DNA
gctgctgtaaattgctgctg

SEQ ID NO: 16160 - DNA, 20 bp, synthetic construct
  source 1..20: mol_type = other DNA
gtgggatctgcgaacacgtg

SEQ ID NO: 16161 - DNA, 20 bp, synthetic construct
  source 1..20: mol_type = other DNA
atctgcgaacacgtgaggcg

SEQ ID NO: 16162 - DNA, 20 bp, synthetic construct
  source 1..20: mol_type = other DNA
ggatctgcgaacacgtgagg

SEQ ID NO: 16163 - DNA, 20 bp, synthetic construct
  source 1..20: mol_type = other DNA
ccgctagagcgcgaaagcca

SEQ ID NO: 16164 - DNA, 20 bp, synthetic construct
  source 1..20: mol_type = other DNA
tgaaaaggaggcgcccgcta

SEQ ID NO: 16165 - DNA, 20 bp, synthetic construct
  source 1..20: mol_type = other DNA
gctaaggcggcaaccgacgc

SEQ ID NO: 16166 - DNA, 20 bp, synthetic construct
  source 1..20: mol_type = other DNA
cgagacactggcctttggcg

SEQ ID NO: 16167 - DNA, 20 bp, synthetic construct
  source 1..20: mol_type = other DNA
aaaggaggcgcccgctaagg

SEQ ID NO: 16168 - DNA, 20 bp, synthetic construct
  source 1..20: mol_type = other DNA
ggaggcggaggacgagacac

SEQ ID NO: 16169 - DNA, 20 bp, synthetic construct
  source 1..20: mol_type = other DNA
gaggacgagacactggcctt

SEQ ID NO: 16170 - DNA, 20 bp, synthetic construct
  source 1..20: mol_type = other DNA
aaagccagggatgaaggatg

SEQ ID NO: 16171 - DNA, 20 bp, synthetic construct
  source 1..20: mol_type = other DNA
catccctcatccttcatccc

SEQ ID NO: 16172 - DNA, 20 bp, synthetic construct
  source 1..20: mol_type = other DNA
aaggatgagggatgaaaagg

SEQ ID NO: 16173 - DNA, 20 bp, synthetic construct
  source 1..20: mol_type = other DNA
aagccagggatgaaggatga

SEQ ID NO: 16174 - DNA, 20 bp, synthetic construct
  source 1..20: mol_type = other DNA
gctttcgcgctctagcggag

SEQ ID NO: 16175 - DNA, 20 bp, synthetic construct
  source 1..20: mol_type = other DNA
agtcagggcgcacaaacccc

SEQ ID NO: 16176 - DNA, 20 bp, synthetic construct
  source 1..20: mol_type = other DNA
cttatcggccaacggacgcg

SEQ ID NO: 16177 - DNA, 20 bp, synthetic construct
  source 1..20: mol_type = other DNA
ggaagcagcagcgactctaa

SEQ ID NO: 16178 - DNA, 20 bp, synthetic construct
  source 1..20: mol_type = other DNA
gcgactctaaaggcagcccc

SEQ ID NO: 16179 - DNA, 20 bp, synthetic construct
  source 1..20: mol_type = other DNA
tctgccacgcaggcgcacgg

SEQ ID NO: 16180 - DNA, 20 bp, synthetic construct
  source 1..20: mol_type = other DNA
cgcacaaaccccaggagaga

SEQ ID NO: 16181 - DNA, 20 bp, synthetic construct
  source 1..20: mol_type = other DNA
acaaaccccaggagagaagg

SEQ ID NO: 16182 - DNA, 20 bp, synthetic construct
  source 1..20: mol_type = other DNA
gcttctgccacgcaggcgca

SEQ ID NO: 16183 - DNA, 20 bp, synthetic construct
  source 1..20: mol_type = other DNA
tgcttccgccttctctcctg

SEQ ID NO: 16184 - DNA, 20 bp, synthetic construct
  source 1..20: mol_type = other DNA
gagcggaggcaactgctgtg

SEQ ID NO: 16185 - DNA, 20 bp, synthetic construct
  source 1..20: mol_type = other DNA
tgcctccgctcggcccgcgc

SEQ ID NO: 16186 - DNA, 20 bp, synthetic construct
  source 1..20: mol_type = other DNA
ccggccgccgtgcgcctgcg

SEQ ID NO: 16187 - DNA, 20 bp, synthetic construct
  source 1..20: mol_type = other DNA
gaaccgctttagccagcctg

SEQ ID NO: 16188 - DNA, 20 bp, synthetic construct
  source 1..20: mol_type = other DNA
ataagggagcgcgcgcccgc

SEQ ID NO: 16189 - DNA, 20 bp, synthetic construct
  source 1..20: mol_type = other DNA
ggccggcgcgggccgagcgg

SEQ ID NO: 16190 - DNA, 20 bp, synthetic construct
  source 1..20: mol_type = other DNA
ggagagtctagtgtcacgtg

SEQ ID NO: 16191 - DNA, 20 bp, synthetic construct
  source 1..20: mol_type = other DNA
aggcacagcgcgcgaagacg

SEQ ID NO: 16192 - DNA, 20 bp, synthetic construct
  source 1..20: mol_type = other DNA
gctacggcaagagagtgaga

SEQ ID NO: 16193 - DNA, 20 bp, synthetic construct
  source 1..20: mol_type = other DNA
tctagtgtcacgtgaggccc

SEQ ID NO: 16194 - DNA, 20 bp, synthetic construct
  source 1..20: mol_type = other DNA
ggcgcgagtgaagcaaagcg

SEQ ID NO: 16195 - DNA, 20 bp, synthetic construct
  source 1..20: mol_type = other DNA
cagctgggtccggtccgtcg

SEQ ID NO: 16196 - DNA, 20 bp, synthetic construct
  source 1..20: mol_type = other DNA
ccgtagctgcgccgccaccg

SEQ ID NO: 16197 - DNA, 20 bp, synthetic construct
  source 1..20: mol_type = other DNA
agtgtcacgtgaggccccgg

SEQ ID NO: 16198 - DNA, 20 bp, synthetic construct
  source 1..20: mol_type = other DNA
tgccgtagctgcgccgccac

SEQ ID NO: 16199 - DNA, 20 bp, synthetic construct
  source 1..20: mol_type = other DNA
gaaggaagggaagccggaag

SEQ ID NO: 16200 - DNA, 20 bp, synthetic construct
  source 1..20: mol_type = other DNA
gtcacgtgaggccccggtgg

SEQ ID NO: 16201 - DNA, 20 bp, synthetic construct
  source 1..20: mol_type = other DNA
gagaaggaagggaagccgga

SEQ ID NO: 16202 - DNA, 20 bp, synthetic construct
  source 1..20: mol_type = other DNA
cggcaagagagtgagaagga

SEQ ID NO: 16203 - DNA, 20 bp, synthetic construct
  source 1..20: mol_type = other DNA
gagtgagaaggaagggaagc

SEQ ID NO: 16204 - DNA, 20 bp, synthetic construct
  source 1..20: mol_type = other DNA
agaaggaagggaagccggaa

SEQ ID NO: 16205 - DNA, 20 bp, synthetic construct
  source 1..20: mol_type = other DNA
tgggccgcagcggtagcgac

SEQ ID NO: 16206 - DNA, 20 bp, synthetic construct
  source 1..20: mol_type = other DNA
gcgacaggaagcgccagcag

SEQ ID NO: 16207 - DNA, 20 bp, synthetic construct
  source 1..20: mol_type = other DNA
agcgacaggaagcgccagca

SEQ ID NO: 16208 - DNA, 20 bp, synthetic construct
  source 1..20: mol_type = other DNA
cgcgcaacacgtgaccccac

SEQ ID NO: 16209 - DNA, 20 bp, synthetic construct
  source 1..20: mol_type = other DNA
aaccccggccttgtctcacc

SEQ ID NO: 16210 - DNA, 20 bp, synthetic construct
  source 1..20: mol_type = other DNA
caacacgtgaccccactggc

SEQ ID NO: 16211 - DNA, 20 bp, synthetic construct
  source 1..20: mol_type = other DNA
tagcgacaggaagcgccagc

SEQ ID NO: 16212 - DNA, 20 bp, synthetic construct
  source 1..20: mol_type = other DNA
gcttcctgtcgctaccgctg

SEQ ID NO: 16213 - DNA, 20 bp, synthetic construct
  source 1..20: mol_type = other DNA
gcgcgagccacctcccctgc

SEQ ID NO: 16214 - DNA, 20 bp, synthetic construct
  source 1..20: mol_type = other DNA
acaggaagcgccagcagggg

SEQ ID NO: 16215 - DNA, 20 bp, synthetic construct
  source 1..20: mol_type = other DNA
ggcaccgccctgggctcccg

SEQ ID NO: 16216 - DNA, 20 bp, synthetic construct
  source 1..20: mol_type = other DNA
ccagggcccgcgggagccca

SEQ ID NO: 16217 - DNA, 20 bp, synthetic construct
  source 1..20: mol_type = other DNA
gtcgctaccgctgcggccca

SEQ ID NO: 16218 - DNA, 20 bp, synthetic construct
  source 1..20: mol_type = other DNA
ccgcgggccctgggccgcag

SEQ ID NO: 16219 - DNA, 20 bp, synthetic construct
  source 1..20: mol_type = other DNA
ccgctgcggcccagggcccg

SEQ ID NO: 16220 - DNA, 20 bp, synthetic construct
  source 1..20: mol_type = other DNA
gtggcaccggtgcacgctga

SEQ ID NO: 16221 - DNA, 20 bp, synthetic construct
  source 1..20: mol_type = other DNA
ggccgagaagcgtatcttcg

SEQ ID NO: 16222 - DNA, 20 bp, synthetic construct
  source 1..20: mol_type = other DNA
cagcgatgcccacatcccca

SEQ ID NO: 16223 - DNA, 20 bp, synthetic construct
  source 1..20: mol_type = other DNA
tccaacctgacccccatacc

SEQ ID NO: 16224 - DNA, 20 bp, synthetic construct
  source 1..20: mol_type = other DNA
ccggctccttcagcgtgcac

SEQ ID NO: 16225 - DNA, 20 bp, synthetic construct
  source 1..20: mol_type = other DNA
tcgaagccaaggctactcca

SEQ ID NO: 16226 - DNA, 20 bp, synthetic construct
  source 1..20: mol_type = other DNA
gtgcacgctgaaggagccgg

SEQ ID NO: 16227 - DNA, 20 bp, synthetic construct
  source 1..20: mol_type = other DNA
cgaagcaatcaagagtctca

SEQ ID NO: 16228 - DNA, 20 bp, synthetic construct
  source 1..20: mol_type = other DNA
aaggagccggcggaaccggg

SEQ ID NO: 16229 - DNA, 20 bp, synthetic construct
  source 1..20: mol_type = other DNA
ctgaaggagccggcggaacc

SEQ ID NO: 16230 - DNA, 20 bp, synthetic construct
  source 1..20: mol_type = other DNA
ccggtgcacgctgaaggagc

SEQ ID NO: 16231 - DNA, 20 bp, synthetic construct
  source 1..20: mol_type = other DNA
ggcggaaccgggtggccatg

SEQ ID NO: 16232 - DNA, 20 bp, synthetic construct
  source 1..20: mol_type = other DNA
ccgggtggccatggggatgt

SEQ ID NO: 16233 - DNA, 20 bp, synthetic construct
  source 1..20: mol_type = other DNA
ggacgctttgtgggagatgc

SEQ ID NO: 16234 - DNA, 20 bp, synthetic construct
  source 1..20: mol_type = other DNA
ccgaagatacgcttctcggc

SEQ ID NO: 16235 - DNA, 20 bp, synthetic construct
  source 1..20: mol_type = other DNA
tggatcctggaacgtgcacc

SEQ ID NO: 16236 - DNA, 20 bp, synthetic construct
  source 1..20: mol_type = other DNA
gggtgcacgttccaggatcc

SEQ ID NO: 16237 - DNA, 20 bp, synthetic construct
  source 1..20: mol_type = other DNA
gcagagagagcagagcacag

SEQ ID NO: 16238 - DNA, 20 bp, synthetic construct
  source 1..20: mol_type = other DNA
gaggatgctgagaagcctag

SEQ ID NO: 16239 - DNA, 20 bp, synthetic construct
  source 1..20: mol_type = other DNA
ttccaggatccaggtgccca

SEQ ID NO: 16240 - DNA, 20 bp, synthetic construct
  source 1..20: mol_type = other DNA
cataaagaagcactggacgc

SEQ ID NO: 16241 - DNA, 20 bp, synthetic construct
  source 1..20: mol_type = other DNA
caaaggggtcagcgaagagc

SEQ ID NO: 16242 - DNA, 20 bp, synthetic construct
  source 1..20: mol_type = other DNA
agtcccagcttcatgacccc

SEQ ID NO: 16243 - DNA, 20 bp, synthetic construct
  source 1..20: mol_type = other DNA
gggtcagcgaagagcaggct

SEQ ID NO: 16244 - DNA, 20 bp, synthetic construct
  source 1..20: mol_type = other DNA
gcccagccatgccctggggt

SEQ ID NO: 16245 - DNA, 20 bp, synthetic construct
  source 1..20: mol_type = other DNA
aggatgctgagaagcctaga

SEQ ID NO: 16246 - DNA, 20 bp, synthetic construct
  source 1..20: mol_type = other DNA
tccaggatccaggtgcccag

SEQ ID NO: 16247 - DNA, 20 bp, synthetic construct
  source 1..20: mol_type = other DNA
gttccaggatccaggtgccc

SEQ ID NO: 16248 - DNA, 20 bp, synthetic construct
  source 1..20: mol_type = other DNA
gctctctctgctggcaggtg

SEQ ID NO: 16249 - DNA, 20 bp, synthetic construct
  source 1..20: mol_type = other DNA
acccctgggcacctggatcc

SEQ ID NO: 16250 - DNA, 20 bp, synthetic construct
  source 1..20: mol_type = other DNA
gcagccagcgtaccaggtaa

SEQ ID NO: 16251 - DNA, 20 bp, synthetic construct
  source 1..20: mol_type = other DNA
cagaccgttacctggtacgc

SEQ ID NO: 16252 - DNA, 20 bp, synthetic construct
  source 1..20: mol_type = other DNA
accctgcattccaattgccc

SEQ ID NO: 16253 - DNA, 20 bp, synthetic construct
  source 1..20: mol_type = other DNA
taaccgcaaaaacagggacc

SEQ ID NO: 16254 - DNA, 20 bp, synthetic construct
  source 1..20: mol_type = other DNA
gcctgggcaattggaatgca

SEQ ID NO: 16255 - DNA, 20 bp, synthetic construct
  source 1..20: mol_type = other DNA
tccgactctgacaagagtga

SEQ ID NO: 16256 - DNA, 20 bp, synthetic construct
  source 1..20: mol_type = other DNA
ctccgactctgacaagagtg

SEQ ID NO: 16257 - DNA, 20 bp, synthetic construct
  source 1..20: mol_type = other DNA
gaggtagcagccagcgtacc

SEQ ID NO: 16258 - DNA, 20 bp, synthetic construct
  source 1..20: mol_type = other DNA
tggcagaagaggtagagcca

SEQ ID NO: 16259 - DNA, 20 bp, synthetic construct
  source 1..20: mol_type = other DNA
gactctgacaagagtgaggg

SEQ ID NO: 16260 - DNA, 20 bp, synthetic construct
  source 1..20: mol_type = other DNA
tccctcactcttgtcagagt

SEQ ID NO: 16261 - DNA, 20 bp, synthetic construct
  source 1..20: mol_type = other DNA
cttgtcagagtcggagctac

SEQ ID NO: 16262 - DNA, 20 bp, synthetic construct
  source 1..20: mol_type = other DNA
aaaaaatagtgaaatcaatt

SEQ ID NO: 16263 - DNA, 20 bp, synthetic construct
  source 1..20: mol_type = other DNA
gaaatcaattaggtttaatc

SEQ ID NO: 16264 - DNA, 20 bp, synthetic construct
  source 1..20: mol_type = other DNA
gactgagagatgacaattac

SEQ ID NO: 16265 - DNA, 20 bp, synthetic construct
  source 1..20: mol_type = other DNA
accacagggccaccttcccg

SEQ ID NO: 16266 - DNA, 20 bp, synthetic construct
  source 1..20: mol_type = other DNA
cgcccagagacagcagccac

SEQ ID NO: 16267 - DNA, 20 bp, synthetic construct
  source 1..20: mol_type = other DNA
tggcgacggaggcggaagtg

SEQ ID NO: 16268 - DNA, 20 bp, synthetic construct
  source 1..20: mol_type = other DNA
cccacctcgggagcctccca

SEQ ID NO: 16269 - DNA, 20 bp, synthetic construct
  source 1..20: mol_type = other DNA
ccggggcgggatggctgcag

SEQ ID NO: 16270 - DNA, 20 bp, synthetic construct
  source 1..20: mol_type = other DNA
cggtggctgctgtctctggg

SEQ ID NO: 16271 - DNA, 20 bp, synthetic construct
  source 1..20: mol_type = other DNA
cgggccgtgggaggctcccg

SEQ ID NO: 16272 - DNA, 20 bp, synthetic construct
  source 1..20: mol_type = other DNA
ggtggctgctgtctctgggc

SEQ ID NO: 16273 - DNA, 20 bp, synthetic construct
  source 1..20: mol_type = other DNA
gtgggaggctcccgaggtgg

SEQ ID NO: 16274 - DNA, 20 bp, synthetic construct
  source 1..20: mol_type = other DNA
gtctctgggcgggccgtggg

SEQ ID NO: 16275 - DNA, 20 bp, synthetic construct
  source 1..20: mol_type = other DNA
gggcgggatggctgcagcgg

SEQ ID NO: 16276 - DNA, 20 bp, synthetic construct
  source 1..20: mol_type = other DNA
gctgtctctgggcgggccgt

SEQ ID NO: 16277 - DNA, 20 bp, synthetic construct
  source 1..20: mol_type = other DNA
gccgtgggaggctcccgagg

SEQ ID NO: 16278 - DNA, 20 bp, synthetic construct
  source 1..20: mol_type = other DNA
ccgctgcagccatcccgccc

SEQ ID NO: 16279 - DNA, 20 bp, synthetic construct
  source 1..20: mol_type = other DNA
cgtgggaggctcccgaggtg

SEQ ID NO: 16280 - DNA, 20 bp, synthetic construct
  source 1..20: mol_type = other DNA
gtcaccatgtcggaccccga

SEQ ID NO: 16281 - DNA, 20 bp, synthetic construct
  source 1..20: mol_type = other DNA
cacgttgctgaagctctgcg

SEQ ID NO: 16282 - DNA, 20 bp, synthetic construct
  source 1..20: mol_type = other DNA
agagggaaaggtgcttcgca

SEQ ID NO: 16283 - DNA, 20 bp, synthetic construct
  source 1..20: mol_type = other DNA
agcttccacaaaccagatag

SEQ ID NO: 16284 - DNA, 20 bp, synthetic construct
  source 1..20: mol_type = other DNA
cgagcggctctacctgtgcg

SEQ ID NO: 16285 - DNA, 20 bp, synthetic construct
  source 1..20: mol_type = other DNA
ggaagtcgctgtacatctca

SEQ ID NO: 16286 - DNA, 20 bp, synthetic construct
  source 1..20: mol_type = other DNA
ctttagaaaattccccgcac

SEQ ID NO: 16287 - DNA, 20 bp, synthetic construct
  source 1..20: mol_type = other DNA
ggcgagcggctctacctgtg

SEQ ID NO: 16288 - DNA, 20 bp, synthetic construct
  source 1..20: mol_type = other DNA
cgggtgatggggtgatggat

SEQ ID NO: 16289 - DNA, 20 bp, synthetic construct
  source 1..20: mol_type = other DNA
aaagctggagaacctctatc

SEQ ID NO: 16290 - DNA, 20 bp, synthetic construct
  source 1..20: mol_type = other DNA
gagaacctctatctggtttg

SEQ ID NO: 16291 - DNA, 20 bp, synthetic construct
  source 1..20: mol_type = other DNA
agagacaatcaaagaaaagc

SEQ ID NO: 16292 - DNA, 20 bp, synthetic construct
  source 1..20: mol_type = other DNA
atctcatggttgctaagaaa

SEQ ID NO: 16293 - DNA, 20 bp, synthetic construct
  source 1..20: mol_type = other DNA
gcgagcggctctacctgtgc

SEQ ID NO: 16294 - DNA, 20 bp, synthetic construct
  source 1..20: mol_type = other DNA
agtgacgggtgatggggtga

SEQ ID NO: 16295 - DNA, 20 bp, synthetic construct
  source 1..20: mol_type = other DNA
agcagctctcccgccgccag

SEQ ID NO: 16296 - DNA, 20 bp, synthetic construct
  source 1..20: mol_type = other DNA
cagctctcccgccgccagag

SEQ ID NO: 16297 - DNA, 20 bp, synthetic construct
  source 1..20: mol_type = other DNA
ggatcccgggagctgcctgg

SEQ ID NO: 16298 - DNA, 20 bp, synthetic construct
  source 1..20: mol_type = other DNA
gcagctctcccgccgccaga

SEQ ID NO: 16299 - DNA, 20 bp, synthetic construct
  source 1..20: mol_type = other DNA
cccggcccggggaaggtgag

SEQ ID NO: 16300 - DNA, 20 bp, synthetic construct
  source 1..20: mol_type = other DNA
cgcagccgctcaccttcccc

SEQ ID NO: 16301 - DNA, 20 bp, synthetic construct
  source 1..20: mol_type = other DNA
ctccgtccccgcccctctgg

SEQ ID NO: 16302 - DNA, 20 bp, synthetic construct
  source 1..20: mol_type = other DNA
cgtccccgcccctctggcgg

SEQ ID NO: 16303 - DNA, 20 bp, synthetic construct
  source 1..20: mol_type = other DNA
tctggcggcgggagagctgc

SEQ ID NO: 16304 - DNA, 20 bp, synthetic construct
  source 1..20: mol_type = other DNA
ctctcccgccgccagagggg

SEQ ID NO: 16305 - DNA, 20 bp, synthetic construct
  source 1..20: mol_type = other DNA
tcccgggagctgcctggagg

SEQ ID NO: 16306 - DNA, 20 bp, synthetic construct
  source 1..20: mol_type = other DNA
ctggaggcgggcccggcccg

SEQ ID NO: 16307 - DNA, 20 bp, synthetic construct
  source 1..20: mol_type = other DNA
gccagaggggcggggacgga

SEQ ID NO: 16308 - DNA, 20 bp, synthetic construct
  source 1..20: mol_type = other DNA
gaggggcggggacggaggga

SEQ ID NO: 16309 - DNA, 20 bp, synthetic construct
  source 1..20: mol_type = other DNA
tccctccgtccccgcccctc

SEQ ID NO: 16310 - DNA, 20 bp, synthetic construct
  source 1..20: mol_type = other DNA
cggcggtctgttctccgctg

SEQ ID NO: 16311 - DNA, 20 bp, synthetic construct
  source 1..20: mol_type = other DNA
ggagcctgccccaacccccg

SEQ ID NO: 16312 - DNA, 20 bp, synthetic construct
  source 1..20: mol_type = other DNA
catatgggaatcatgggctc

SEQ ID NO: 16313 - DNA, 20 bp, synthetic construct
  source 1..20: mol_type = other DNA
cggtctgttctccgctgagg

SEQ ID NO: 16314 - DNA, 20 bp, synthetic construct
  source 1..20: mol_type = other DNA
ccgggcgtgcgagtgagtga

SEQ ID NO: 16315 - DNA, 20 bp, synthetic construct
  source 1..20: mol_type = other DNA
cctcactcactcgcacgccc

SEQ ID NO: 16316 - DNA, 20 bp, synthetic construct
  source 1..20: mol_type = other DNA
tctgccccgctcctcctcag

SEQ ID NO: 16317 - DNA, 20 bp, synthetic construct
  source 1..20: mol_type = other DNA
acagggcatatgggaatcat

SEQ ID NO: 16318 - DNA, 20 bp, synthetic construct
  source 1..20: mol_type = other DNA
ttctccgctgaggaggagcg

SEQ ID NO: 16319 - DNA, 20 bp, synthetic construct
  source 1..20: mol_type = other DNA
aggaggagcggggcagagga

SEQ ID NO: 16320 - DNA, 20 bp, synthetic construct
  source 1..20: mol_type = other DNA
tacagggcatatgggaatca

SEQ ID NO: 16321 - DNA, 20 bp, synthetic construct
  source 1..20: mol_type = other DNA
gggcagaggagggaggcagc

SEQ ID NO: 16322 - DNA, 20 bp, synthetic construct
  source 1..20: mol_type = other DNA
gaggaggagcggggcagagg

SEQ ID NO: 16323 - DNA, 20 bp, synthetic construct
  source 1..20: mol_type = other DNA
aggagcggggcagaggaggg

SEQ ID NO: 16324 - DNA, 20 bp, synthetic construct
  source 1..20: mol_type = other DNA
gttctccgctgaggaggagc

SEQ ID NO: 16325 - DNA, 20 bp, synthetic construct
  source 1..20: mol_type = other DNA
gcggcgccgccacctgacaa

SEQ ID NO: 16326 - DNA, 20 bp, synthetic construct
  source 1..20: mol_type = other DNA
gcgtcacttccgttgtcagg

SEQ ID NO: 16327 - DNA, 20 bp, synthetic construct
  source 1..20: mol_type = other DNA
ggcgaatagctctgaccacc

SEQ ID NO: 16328 - DNA, 20 bp, synthetic construct
  source 1..20: mol_type = other DNA
tgaccacccggcgaaggtga

SEQ ID NO: 16329 - DNA, 20 bp, synthetic construct
  source 1..20: mol_type = other DNA
ggcgccgcagccatggaggg

SEQ ID NO: 16330 - DNA, 20 bp, synthetic construct
  source 1..20: mol_type = other DNA
tcacttccgttgtcaggtgg

SEQ ID NO: 16331 - DNA, 20 bp, synthetic construct
  source 1..20: mol_type = other DNA
gccgcctccctccatggctg

SEQ ID NO: 16332 - DNA, 20 bp, synthetic construct
  source 1..20: mol_type = other DNA
ggcggcgccgcagccatgga

SEQ ID NO: 16333 - DNA, 20 bp, synthetic construct
  source 1..20: mol_type = other DNA
gccgcagccatggagggagg

SEQ ID NO: 16334 - DNA, 20 bp, synthetic construct
  source 1..20: mol_type = other DNA
gctcgggtggctgcgctggg

SEQ ID NO: 16335 - DNA, 20 bp, synthetic construct
  source 1..20: mol_type = other DNA
cgggtggctgcgctgggagg

SEQ ID NO: 16336 - DNA, 20 bp, synthetic construct
  source 1..20: mol_type = other DNA
gtggctgcgctgggaggcgg

SEQ ID NO: 16337 - DNA, 20 bp, synthetic construct
  source 1..20: mol_type = other DNA
gccatggagggaggcggcgg

SEQ ID NO: 16338 - DNA, 20 bp, synthetic construct
  source 1..20: mol_type = other DNA
gcagccatggagggaggcgg

SEQ ID NO: 16339 - DNA, 20 bp, synthetic construct
  source 1..20: mol_type = other DNA
gccgccgccgcctccctcca

SEQ ID NO: 16340 - DNA, 20 bp, synthetic construct
  source 1..20: mol_type = other DNA
gcggcggccccggagcaacg

SEQ ID NO: 16341 - DNA, 20 bp, synthetic construct
  source 1..20: mol_type = other DNA
gggagccggtgagtggtgcg

SEQ ID NO: 16342 - DNA, 20 bp, synthetic construct
  source 1..20: mol_type = other DNA
gtgcgcggccgagggacacc

SEQ ID NO: 16343 - DNA, 20 bp, synthetic construct
  source 1..20: mol_type = other DNA
cagcccgcacgagcgcctgg

SEQ ID NO: 16344 - DNA, 20 bp, synthetic construct
  source 1..20: mol_type = other DNA
cgcagcgccgcgttgctccg

SEQ ID NO: 16345 - DNA, 20 bp, synthetic construct
  source 1..20: mol_type = other DNA
ggtgagtggtgcgcggccga

SEQ ID NO: 16346 - DNA, 20 bp, synthetic construct
  source 1..20: mol_type = other DNA
gccgccgccaggcgctcgtg

SEQ ID NO: 16347 - DNA, 20 bp, synthetic construct
  source 1..20: mol_type = other DNA
gcgcaccactcaccggctcc

SEQ ID NO: 16348 - DNA, 20 bp, synthetic construct
  source 1..20: mol_type = other DNA
gcaagggcgcgggctcgcgg

SEQ ID NO: 16349 - DNA, 20 bp, synthetic construct
  source 1..20: mol_type = other DNA
cccgcacgagcgcctggcgg

SEQ ID NO: 16350 - DNA, 20 bp, synthetic construct
  source 1..20: mol_type = other DNA
gggctgcgctgggagccggg

SEQ ID NO: 16351 - DNA, 20 bp, synthetic construct
  source 1..20: mol_type = other DNA
gcgcgccgggagccggtgag

SEQ ID NO: 16352 - DNA, 20 bp, synthetic construct
  source 1..20: mol_type = other DNA
acacctggcggtgcgggcaa

SEQ ID NO: 16353 - DNA, 20 bp, synthetic construct
  source 1..20: mol_type = other DNA
cgcggccgagggacacctgg

SEQ ID NO: 16354 - DNA, 20 bp, synthetic construct
  source 1..20: mol_type = other DNA
ctgggagccgggcggtcggg

SEQ ID NO: 16355 - DNA, 20 bp, synthetic construct
  source 1..20: mol_type = other DNA
gtgatcttgggtcccagcgt

SEQ ID NO: 16356 - DNA, 20 bp, synthetic construct
  source 1..20: mol_type = other DNA
acgcctctgcgcgaggaacg

SEQ ID NO: 16357 - DNA, 20 bp, synthetic construct
  source 1..20: mol_type = other DNA
gacaagtgttcacaggaggt

SEQ ID NO: 16358 - DNA, 20 bp, synthetic construct
  source 1..20: mol_type = other DNA
gctcctcgttcctcgcgcag

SEQ ID NO: 16359 - DNA, 20 bp, synthetic construct
  source 1..20: mol_type = other DNA
acaagtgttcacaggaggtg

SEQ ID NO: 16360 - DNA, 20 bp, synthetic construct
  source 1..20: mol_type = other DNA
cttgcgtgccccagcgacac

SEQ ID NO: 16361 - DNA, 20 bp, synthetic construct
  source 1..20: mol_type = other DNA
ccccagcgacacaggcctcg

SEQ ID NO: 16362 - DNA, 20 bp, synthetic construct
  source 1..20: mol_type = other DNA
atcacctatcaggtgccacc

SEQ ID NO: 16363 - DNA, 20 bp, synthetic construct
  source 1..20: mol_type = other DNA
tgatcttgggtcccagcgtg

SEQ ID NO: 16364 - DNA, 20 bp, synthetic construct
  source 1..20: mol_type = other DNA
acttgtcagagacagcctcg

SEQ ID NO: 16365 - DNA, 20 bp, synthetic construct
  source 1..20: mol_type = other DNA
tgtctctgacaagtgttcac

SEQ ID NO: 16366 - DNA, 20 bp, synthetic construct
  source 1..20: mol_type = other DNA
ggtggggacgcctctgcgcg

SEQ ID NO: 16367 - DNA, 20 bp, synthetic construct
  source 1..20: mol_type = other DNA
gcgcgaggaacgaggagcta

SEQ ID NO: 16368 - DNA, 20 bp, synthetic construct
  source 1..20: mol_type = other DNA
cctcgaggcctgtgtcgctg

SEQ ID NO: 16369 - DNA, 20 bp, synthetic construct
  source 1..20: mol_type = other DNA
ctctgacaagtgttcacagg

SEQ ID NO: 16370 - DNA, 20 bp, synthetic construct
  source 1..20: mol_type = other DNA
gttaggagtcggctttacgt

SEQ ID NO: 16371 - DNA, 20 bp, synthetic construct
  source 1..20: mol_type = other DNA
gagcagcctcgacgctatgg

SEQ ID NO: 16372 - DNA, 20 bp, synthetic construct
  source 1..20: mol_type = other DNA
caggctcctccatagcgtcg

SEQ ID NO: 16373 - DNA, 20 bp, synthetic construct
  source 1..20: mol_type = other DNA
ggttaggagtcggctttacg

SEQ ID NO: 16374 - DNA, 20 bp, synthetic construct
  source 1..20: mol_type = other DNA
tagcgtcgaggctgctctgg

SEQ ID NO: 16375 - DNA, 20 bp, synthetic construct
  source 1..20: mol_type = other DNA
caactctgcgtagctcctcc

SEQ ID NO: 16376 - DNA, 20 bp, synthetic construct
  source 1..20: mol_type = other DNA
ggcggtcaccgcagtaacac

SEQ ID NO: 16377 - DNA, 20 bp, synthetic construct
  source 1..20: mol_type = other DNA
ctacccctcagccctacctg

SEQ ID NO: 16378 - DNA, 20 bp, synthetic construct
  source 1..20: mol_type = other DNA
ccagagcagcctcgacgcta

SEQ ID NO: 16379 - DNA, 20 bp, synthetic construct
  source 1..20: mol_type = other DNA
tagggctgaggggtagcacc

SEQ ID NO: 16380 - DNA, 20 bp, synthetic construct
  source 1..20: mol_type = other DNA
ccatagcgtcgaggctgctc

SEQ ID NO: 16381 - DNA, 20 bp, synthetic construct
  source 1..20: mol_type = other DNA
ctcgacgctatggaggagcc

SEQ ID NO: 16382 - DNA, 20 bp, synthetic construct
  source 1..20: mol_type = other DNA
gctacccctcagccctacct

SEQ ID NO: 16383 - DNA, 20 bp, synthetic construct
  source 1..20: mol_type = other DNA
ccctcagccctacctggggc

SEQ ID NO: 16384 - DNA, 20 bp, synthetic construct
  source 1..20: mol_type = other DNA
ccagccccaggtagggctga

SEQ ID NO: 16385 - DNA, 20 bp, synthetic construct
  source 1..20: mol_type = other DNA
cgggtcccagcggatcgtga

SEQ ID NO: 16386 - DNA, 20 bp, synthetic construct
  source 1..20: mol_type = other DNA
ggggccctcgggagcatgcg

SEQ ID NO: 16387 - DNA, 20 bp, synthetic construct
  source 1..20: mol_type = other DNA
ggcgtcgcttcggagcgcgg

SEQ ID NO: 16388 - DNA, 20 bp, synthetic construct
  source 1..20: mol_type = other DNA
ctgggctcgctgggcgacgg

SEQ ID NO: 16389 - DNA, 20 bp, synthetic construct
  source 1..20: mol_type = other DNA
gccgcgctccgaagcgacgc

SEQ ID NO: 16390 - DNA, 20 bp, synthetic construct
  source 1..20: mol_type = other DNA
gctgccgcgcatgctcccga

SEQ ID NO: 16391 - DNA, 20 bp, synthetic construct
  source 1..20: mol_type = other DNA
ggaggctgtccgcgccgcgt

SEQ ID NO: 16392 - DNA, 20 bp, synthetic construct
  source 1..20: mol_type = other DNA
gagctgggctcgctgggcga

SEQ ID NO: 16393 - DNA, 20 bp, synthetic construct
  source 1..20: mol_type = other DNA
gctccgaagcgacgccggga

SEQ ID NO: 16394 - DNA, 20 bp, synthetic construct
  source 1..20: mol_type = other DNA
gcgcatgctcccgagggccc

SEQ ID NO: 16395 - DNA, 20 bp, synthetic construct
  source 1..20: mol_type = other DNA
gagcatgcgcggcagccacc

SEQ ID NO: 16396 - DNA, 20 bp, synthetic construct
  source 1..20: mol_type = other DNA
tcgctgggcgacggcggaag

SEQ ID NO: 16397 - DNA, 20 bp, synthetic construct
  source 1..20: mol_type = other DNA
aagcgacgccgggacggccg

SEQ ID NO: 16398 - DNA, 20 bp, synthetic construct
  source 1..20: mol_type = other DNA
cccagctccggtcccagccc

SEQ ID NO: 16399 - DNA, 20 bp, synthetic construct
  source 1..20: mol_type = other DNA
tcgcccagcgagcccagctc

SEQ ID NO: 16400 - DNA, 20 bp, synthetic construct
  source 1..20: mol_type = other DNA
aagccgactcaacagagcta

SEQ ID NO: 16401 - DNA, 20 bp, synthetic construct
  source 1..20: mol_type = other DNA
gacgccctacaggataagca

SEQ ID NO: 16402 - DNA, 20 bp, synthetic construct
  source 1..20: mol_type = other DNA
gtagagaacgatccaccgct

SEQ ID NO: 16403 - DNA, 20 bp, synthetic construct
  source 1..20: mol_type = other DNA
ctgtagggcgtccaacctgg

SEQ ID NO: 16404 - DNA, 20 bp, synthetic construct
  source 1..20: mol_type = other DNA
atcctgtagggcgtccaacc

SEQ ID NO: 16405 - DNA, 20 bp, synthetic construct
  source 1..20: mol_type = other DNA
cgtagagaacgatccaccgc

SEQ ID NO: 16406 - DNA, 20 bp, synthetic construct
  source 1..20: mol_type = other DNA
ggacgccctacaggataagc

SEQ ID NO: 16407 - DNA, 20 bp, synthetic construct
  source 1..20: mol_type = other DNA
ccgactcaacagagctatgg

SEQ ID NO: 16408 - DNA, 20 bp, synthetic construct
  source 1..20: mol_type = other DNA
tttgactgtgagagacccag

SEQ ID NO: 16409 - DNA, 20 bp, synthetic construct
  source 1..20: mol_type = other DNA
gactgtgagagacccagcgg

SEQ ID NO: 16410 - DNA, 20 bp, synthetic construct
  source 1..20: mol_type = other DNA
tgctcatgagtccaccaggt

SEQ ID NO: 16411 - DNA, 20 bp, synthetic construct
  source 1..20: mol_type = other DNA
cgactcaacagagctatggc

SEQ ID NO: 16412 - DNA, 20 bp, synthetic construct
  source 1..20: mol_type = other DNA
tacgttctgtgttcggtgag

SEQ ID NO: 16413 - DNA, 20 bp, synthetic construct
  source 1..20: mol_type = other DNA
gttctccctgcttatcctgt

SEQ ID NO: 16414 - DNA, 20 bp, synthetic construct
  source 1..20: mol_type = other DNA
tctttgctcatgagtccacc

SEQ ID NO: 16415 - DNA, 20 bp, synthetic construct
  source 1..20: mol_type = other DNA
ggccatggctgaccaacgcg

SEQ ID NO: 16416 - DNA, 20 bp, synthetic construct
  source 1..20: mol_type = other DNA
gtgacgacttcgccgcgcgt

SEQ ID NO: 16417 - DNA, 20 bp, synthetic construct
  source 1..20: mol_type = other DNA
caccagggaagctcaacggg

SEQ ID NO: 16418 - DNA, 20 bp, synthetic construct
  source 1..20: mol_type = other DNA
caagctacgtagcgcgagag

SEQ ID NO: 16419 - DNA, 20 bp, synthetic construct
  source 1..20: mol_type = other DNA
gctacgtagcgcgagagcgg

SEQ ID NO: 16420 - DNA, 20 bp, synthetic construct
  source 1..20: mol_type = other DNA
agcgcagcgagggtcgcgct

SEQ ID NO: 16421 - DNA, 20 bp, synthetic construct
  source 1..20: mol_type = other DNA
gagccgatgccctcgccgcg

SEQ ID NO: 16422 - DNA, 20 bp, synthetic construct
  source 1..20: mol_type = other DNA
acgggcggacagcgcagcga

SEQ ID NO: 16423 - DNA, 20 bp, synthetic construct
  source 1..20: mol_type = other DNA
cctgaccctttccctccgca

SEQ ID NO: 16424 - DNA, 20 bp, synthetic construct
  source 1..20: mol_type = other DNA
gagagccgatgccctcgccg

SEQ ID NO: 16425 - DNA, 20 bp, synthetic construct
  source 1..20: mol_type = other DNA
aacgggcggacagcgcagcg

SEQ ID NO: 16426 - DNA, 20 bp, synthetic construct
  source 1..20: mol_type = other DNA
gccgggccgggcagcccgag

SEQ ID NO: 16427 - DNA, 20 bp, synthetic construct
  source 1..20: mol_type = other DNA
tagcgcgagagcggtggcca

SEQ ID NO: 16428 - DNA, 20 bp, synthetic construct
  source 1..20: mol_type = other DNA
agagccgatgccctcgccgc

SEQ ID NO: 16429 - DNA, 20 bp, synthetic construct
  source 1..20: mol_type = other DNA
agctcaccagggaagctcaa

SEQ ID NO: 16430 - DNA, 20 bp, synthetic construct
  source 1..20: mol_type = other DNA
gggcagatgcgggccgccga

SEQ ID NO: 16431 - DNA, 20 bp, synthetic construct
  source 1..20: mol_type = other DNA
ctcctcccgccgcttacccg

SEQ ID NO: 16432 - DNA, 20 bp, synthetic construct
  source 1..20: mol_type = other DNA
ctaggacggccccgggtaag

SEQ ID NO: 16433 - DNA, 20 bp, synthetic construct
  source 1..20: mol_type = other DNA
agcaggcggcgcgctccgga

SEQ ID NO: 16434 - DNA, 20 bp, synthetic construct
  source 1..20: mol_type = other DNA
cagtcggggcgggctcaggg

SEQ ID NO: 16435 - DNA, 20 bp, synthetic construct
  source 1..20: mol_type = other DNA
cgcctgctcgcgctggaagg

SEQ ID NO: 16436 - DNA, 20 bp, synthetic construct
  source 1..20: mol_type = other DNA
ggcagatgcgggccgccgag

SEQ ID NO: 16437 - DNA, 20 bp, synthetic construct
  source 1..20: mol_type = other DNA
gcagatgcgggccgccgagg

SEQ ID NO: 16438 - DNA, 20 bp, synthetic construct
  source 1..20: mol_type = other DNA
ctccttccagcgcgagcagg

SEQ ID NO: 16439 - DNA, 20 bp, synthetic construct
  source 1..20: mol_type = other DNA
gagcaggcggcgcgctccgg

SEQ ID NO: 16440 - DNA, 20 bp, synthetic construct
  source 1..20: mol_type = other DNA
agcgcgccgcctgctcgcgc

SEQ ID NO: 16441 - DNA, 20 bp, synthetic construct
  source 1..20: mol_type = other DNA
ggctcagggcgggcgcgcgg

SEQ ID NO: 16442 - DNA, 20 bp, synthetic construct
  source 1..20: mol_type = other DNA
agtcggggcgggctcagggc

SEQ ID NO: 16443 - DNA, 20 bp, synthetic construct
  source 1..20: mol_type = other DNA
tccagccccagctctccctc

SEQ ID NO: 16444 - DNA, 20 bp, synthetic construct
  source 1..20: mol_type = other DNA
ggagggagagctggggctgg

SEQ ID NO: 16445 - DNA, 20 bp, synthetic construct
  source 1..20: mol_type = other DNA
gtcaattctatcgcactccc

SEQ ID NO: 16446 - DNA, 20 bp, synthetic construct
  source 1..20: mol_type = other DNA
aagttgtagaattgcttcgg

SEQ ID NO: 16447 - DNA, 20 bp, synthetic construct
  source 1..20: mol_type = other DNA
ctgggaacttcacacatcgc

SEQ ID NO: 16448 - DNA, 20 bp, synthetic construct
  source 1..20: mol_type = other DNA
acttcacacatcgccggctg

SEQ ID NO: 16449 - DNA, 20 bp, synthetic construct
  source 1..20: mol_type = other DNA
ccgtgtgttgaggagcgccc

SEQ ID NO: 16450 - DNA, 20 bp, synthetic construct
  source 1..20: mol_type = other DNA
aattgcttcggaggctaccc

SEQ ID NO: 16451 - DNA, 20 bp, synthetic construct
  source 1..20: mol_type = other DNA
ccaggctcatcaacatttga

SEQ ID NO: 16452 - DNA, 20 bp, synthetic construct
  source 1..20: mol_type = other DNA
agccgggctgagtgcgtgct

SEQ ID NO: 16453 - DNA, 20 bp, synthetic construct
  source 1..20: mol_type = other DNA
cccaggctcatcaacatttg

SEQ ID NO: 16454 - DNA, 20 bp, synthetic construct
  source 1..20: mol_type = other DNA
ttggcaatgagaagagtgaa

SEQ ID NO: 16455 - DNA, 20 bp, synthetic construct
  source 1..20: mol_type = other DNA
ttcccagcacgcactcagcc

SEQ ID NO: 16456 - DNA, 20 bp, synthetic construct
  source 1..20: mol_type = other DNA
agaaaagactcagccgcagc

SEQ ID NO: 16457 - DNA, 20 bp, synthetic construct
  source 1..20: mol_type = other DNA
ctcatcaacatttgagggtg

SEQ ID NO: 16458 - DNA, 20 bp, synthetic construct
  source 1..20: mol_type = other DNA
cagccgggctgagtgcgtgc

SEQ ID NO: 16459 - DNA, 20 bp, synthetic construct
  source 1..20: mol_type = other DNA
atttgagggtgaggagcagc

SEQ ID NO: 16460 - DNA, 20 bp, synthetic construct
  source 1..20: mol_type = other DNA
ccaagacgcctccccgagcg

SEQ ID NO: 16461 - DNA, 20 bp, synthetic construct
  source 1..20: mol_type = other DNA
gcctgacgctcggaagacaa

SEQ ID NO: 16462 - DNA, 20 bp, synthetic construct
  source 1..20: mol_type = other DNA
cccggaggagccgaggttgg

SEQ ID NO: 16463 - DNA, 20 bp, synthetic construct
  source 1..20: mol_type = other DNA
ggcccgacaggacagcgctc

SEQ ID NO: 16464 - DNA, 20 bp, synthetic construct
  source 1..20: mol_type = other DNA
tgtcctgtcgggccgagtcg

SEQ ID NO: 16465 - DNA, 20 bp, synthetic construct
  source 1..20: mol_type = other DNA
gccaagctgtccgccaacct

SEQ ID NO: 16466 - DNA, 20 bp, synthetic construct
  source 1..20: mol_type = other DNA
aaggacggaggtctaggaag

SEQ ID NO: 16467 - DNA, 20 bp, synthetic construct
  source 1..20: mol_type = other DNA
acgctcggaagacaacggat

SEQ ID NO: 16468 - DNA, 20 bp, synthetic construct
  source 1..20: mol_type = other DNA
gacgctcggaagacaacgga

SEQ ID NO: 16469 - DNA, 20 bp, synthetic construct
  source 1..20: mol_type = other DNA
gcccgacaggacagcgctcc

SEQ ID NO: 16470 - DNA, 20 bp, synthetic construct
  source 1..20: mol_type = other DNA
gacccggagcgctgtcctgt

SEQ ID NO: 16471 - DNA, 20 bp, synthetic construct
  source 1..20: mol_type = other DNA
acccggagcgctgtcctgtc

SEQ ID NO: 16472 - DNA, 20 bp, synthetic construct
  source 1..20: mol_type = other DNA
cgcgctcggggaggcgtctt

SEQ ID NO: 16473 - DNA, 20 bp, synthetic construct
  source 1..20: mol_type = other DNA
ccgcgctcggggaggcgtct

SEQ ID NO: 16474 - DNA, 20 bp, synthetic construct
  source 1..20: mol_type = other DNA
ggcccgcgactcggcccgac

SEQ ID NO: 16475 - DNA, 20 bp, synthetic construct
  source 1..20: mol_type = other DNA
ccccgagtgcgaccaacagg

SEQ ID NO: 16476 - DNA, 20 bp, synthetic construct
  source 1..20: mol_type = other DNA
cccgagtgcgaccaacaggt

SEQ ID NO: 16477 - DNA, 20 bp, synthetic construct
  source 1..20: mol_type = other DNA
ccacctgttggtcgcactcg

SEQ ID NO: 16478 - DNA, 20 bp, synthetic construct
  source 1..20: mol_type = other DNA
atgctcctctcccttagcgg

SEQ ID NO: 16479 - DNA, 20 bp, synthetic construct
  source 1..20: mol_type = other DNA
cccaggatctgcccaccgct

SEQ ID NO: 16480 - DNA, 20 bp, synthetic construct
  source 1..20: mol_type = other DNA
gcactcggggcatgatttgg

SEQ ID NO: 16481 - DNA, 20 bp, synthetic construct
  source 1..20: mol_type = other DNA
gggccggtcgggctgcaccg

SEQ ID NO: 16482 - DNA, 20 bp, synthetic construct
  source 1..20: mol_type = other DNA
gctcccggaggccgagcggt

SEQ ID NO: 16483 - DNA, 20 bp, synthetic construct
  source 1..20: mol_type = other DNA
ggcccccggcacccacctgt

SEQ ID NO: 16484 - DNA, 20 bp, synthetic construct
  source 1..20: mol_type = other DNA
ggctcccggaggccgagcgg

SEQ ID NO: 16485 - DNA, 20 bp, synthetic construct
  source 1..20: mol_type = other DNA
gggcctcgccgggctcccgg

SEQ ID NO: 16486 - DNA, 20 bp, synthetic construct
  source 1..20: mol_type = other DNA
cagatcctggggcccgccgg

SEQ ID NO: 16487 - DNA, 20 bp, synthetic construct
  source 1..20: mol_type = other DNA
atcctggggcccgccggcgg

SEQ ID NO: 16488 - DNA, 20 bp, synthetic construct
  source 1..20: mol_type = other DNA
cttagcggcggcagcagcga

SEQ ID NO: 16489 - DNA, 20 bp, synthetic construct
  source 1..20: mol_type = other DNA
gacatgctcctctcccttag

SEQ ID NO: 16490 - DNA, 20 bp, synthetic construct
  source 1..20: mol_type = other DNA
acgggtccgggtcggaactg

SEQ ID NO: 16491 - DNA, 20 bp, synthetic construct
  source 1..20: mol_type = other DNA
actgaggcgacccgtcacca

SEQ ID NO: 16492 - DNA, 20 bp, synthetic construct
  source 1..20: mol_type = other DNA
ctgaggcgacccgtcaccaa

SEQ ID NO: 16493 - DNA, 20 bp, synthetic construct
  source 1..20: mol_type = other DNA
gggtcgcctcagttccgacc

SEQ ID NO: 16494 - DNA, 20 bp, synthetic construct
  source 1..20: mol_type = other DNA
ccggactgaggctcttacag

SEQ ID NO: 16495 - DNA, 20 bp, synthetic construct
  source 1..20: mol_type = other DNA
gtggctcccggaagtagggc

SEQ ID NO: 16496 - DNA, 20 bp, synthetic construct
  source 1..20: mol_type = other DNA
ctgacgtggctcccggaagt

SEQ ID NO: 16497 - DNA, 20 bp, synthetic construct
  source 1..20: mol_type = other DNA
ccggaagtagggctggcgta

SEQ ID NO: 16498 - DNA, 20 bp, synthetic construct
  source 1..20: mol_type = other DNA
tgacgtggctcccggaagta

SEQ ID NO: 16499 - DNA, 20 bp, synthetic construct
  source 1..20: mol_type = other DNA
cccggaagtagggctggcgt

SEQ ID NO: 16500 - DNA, 20 bp, synthetic construct
  source 1..20: mol_type = other DNA
tccctgctggcccttggtga

SEQ ID NO: 16501 - DNA, 20 bp, synthetic construct
  source 1..20: mol_type = other DNA
agcagcgtacgggtccgggt

SEQ ID NO: 16502 - DNA, 20 bp, synthetic construct
  source 1..20: mol_type = other DNA
cgtacgctgctgcgctgacg

SEQ ID NO: 16503 - DNA, 20 bp, synthetic construct
  source 1..20: mol_type = other DNA
gcgcagcagcgtacgggtcc

SEQ ID NO: 16504 - DNA, 20 bp, synthetic construct
  source 1..20: mol_type = other DNA
acgtcagcgcagcagcgtac

SEQ ID NO: 16505 - DNA, 20 bp, synthetic construct
  source 1..20: mol_type = other DNA
cgttggccacaatgcagacg

SEQ ID NO: 16506 - DNA, 20 bp, synthetic construct
  source 1..20: mol_type = other DNA
gaaaatgtgcccgctgtgtg

SEQ ID NO: 16507 - DNA, 20 bp, synthetic construct
  source 1..20: mol_type = other DNA
ttgcaagtctggctcatggg

SEQ ID NO: 16508 - DNA, 20 bp, synthetic construct
  source 1..20: mol_type = other DNA
cgtacacatggtgaggtgtc

SEQ ID NO: 16509 - DNA, 20 bp, synthetic construct
  source 1..20: mol_type = other DNA
tgacacctcaccatgtgtac

SEQ ID NO: 16510 - DNA, 20 bp, synthetic construct
  source 1..20: mol_type = other DNA
gagggagagccccacacagc

SEQ ID NO: 16511 - DNA, 20 bp, synthetic construct
  source 1..20: mol_type = other DNA
cctctgcctcgtctgcattg

SEQ ID NO: 16512 - DNA, 20 bp, synthetic construct
  source 1..20: mol_type = other DNA
ggtgaggtgtcaggaaggac

SEQ ID NO: 16513 - DNA, 20 bp, synthetic construct
  source 1..20: mol_type = other DNA
cacaatgcagacgaggcaga

SEQ ID NO: 16514 - DNA, 20 bp, synthetic construct
  source 1..20: mol_type = other DNA
gacgaggcagagggtaatga

SEQ ID NO: 16515 - DNA, 20 bp, synthetic construct
  source 1..20: mol_type = other DNA
ccacaatgcagacgaggcag

SEQ ID NO: 16516 - DNA, 20 bp, synthetic construct
  source 1..20: mol_type = other DNA
gaggtgtcaggaaggacagg

SEQ ID NO: 16517 - DNA, 20 bp, synthetic construct
  source 1..20: mol_type = other DNA
ctgacacctcaccatgtgta

SEQ ID NO: 16518 - DNA, 20 bp, synthetic construct
  source 1..20: mol_type = other DNA
cacatggtgaggtgtcagga

SEQ ID NO: 16519 - DNA, 20 bp, synthetic construct
  source 1..20: mol_type = other DNA
tgagggagagccccacacag

SEQ ID NO: 16520 - DNA, 20 bp, synthetic construct
  source 1..20: mol_type = other DNA
tgccccctgcttcaacaacg

SEQ ID NO: 16521 - DNA, 20 bp, synthetic construct
  source 1..20: mol_type = other DNA
cccctgcttcaacaacgtgg

SEQ ID NO: 16522 - DNA, 20 bp, synthetic construct
  source 1..20: mol_type = other DNA
tttgaaaggcccgcaagccg

SEQ ID NO: 16523 - DNA, 20 bp, synthetic construct
  source 1..20: mol_type = other DNA
tacgagagcttcctcaggac

SEQ ID NO: 16524 - DNA, 20 bp, synthetic construct
  source 1..20: mol_type = other DNA
tccgccacgttgttgaagca

SEQ ID NO: 16525 - DNA, 20 bp, synthetic construct
  source 1..20: mol_type = other DNA
tgcgggcctttcaaacatgg

SEQ ID NO: 16526 - DNA, 20 bp, synthetic construct
  source 1..20: mol_type = other DNA
tgttgaagcagggggcattg

SEQ ID NO: 16527 - DNA, 20 bp, synthetic construct
  source 1..20: mol_type = other DNA
ttcctcaggaccggagtccg

SEQ ID NO: 16528 - DNA, 20 bp, synthetic construct
  source 1..20: mol_type = other DNA
ccgccacgttgttgaagcag

SEQ ID NO: 16529 - DNA, 20 bp, synthetic construct
  source 1..20: mol_type = other DNA
cgccacgttgttgaagcagg

SEQ ID NO: 16530 - DNA, 20 bp, synthetic construct
  source 1..20: mol_type = other DNA
ctcaggaccggagtccgggg

SEQ ID NO: 16531 - DNA, 20 bp, synthetic construct
  source 1..20: mol_type = other DNA
gcctttcaaacatggaggag

SEQ ID NO: 16532 - DNA, 20 bp, synthetic construct
  source 1..20: mol_type = other DNA
acatggaggagcgggagcgg

SEQ ID NO: 16533 - DNA, 20 bp, synthetic construct
  source 1..20: mol_type = other DNA
agccgaggccgatgggaaga

SEQ ID NO: 16534 - DNA, 20 bp, synthetic construct
  source 1..20: mol_type = other DNA
catggaggagcgggagcggg

SEQ ID NO: 16535 - DNA, 20 bp, synthetic construct
  source 1..20: mol_type = other DNA
gtggagcagctgccgacgcg

SEQ ID NO: 16536 - DNA, 20 bp, synthetic construct
  source 1..20: mol_type = other DNA
accgagcgggcggaccgacg

SEQ ID NO: 16537 - DNA, 20 bp, synthetic construct
  source 1..20: mol_type = other DNA
tgggctcggctggagcaccc

SEQ ID NO: 16538 - DNA, 20 bp, synthetic construct
  source 1..20: mol_type = other DNA
tccagccgagcccaaccgag

SEQ ID NO: 16539 - DNA, 20 bp, synthetic construct
  source 1..20: mol_type = other DNA
gccgagcccaaccgagcggg

SEQ ID NO: 16540 - DNA, 20 bp, synthetic construct
  source 1..20: mol_type = other DNA
cggaggctccagagggcggc

SEQ ID NO: 16541 - DNA, 20 bp, synthetic construct
  source 1..20: mol_type = other DNA
ccagccgagcccaaccgagc

SEQ ID NO: 16542 - DNA, 20 bp, synthetic construct
  source 1..20: mol_type = other DNA
actcgggaggagcagagcgc

SEQ ID NO: 16543 - DNA, 20 bp, synthetic construct
  source 1..20: mol_type = other DNA
gcagagcgcaggctccgccg

SEQ ID NO: 16544 - DNA, 20 bp, synthetic construct
  source 1..20: mol_type = other DNA
caaccgagcgggcggaccga

SEQ ID NO: 16545 - DNA, 20 bp, synthetic construct
  source 1..20: mol_type = other DNA
ctggagcaccccggccgcgg

SEQ ID NO: 16546 - DNA, 20 bp, synthetic construct
  source 1..20: mol_type = other DNA
aggggaggaggagactcggg

SEQ ID NO: 16547 - DNA, 20 bp, synthetic construct
  source 1..20: mol_type = other DNA
ggcccggaggctccagaggg

SEQ ID NO: 16548 - DNA, 20 bp, synthetic construct
  source 1..20: mol_type = other DNA
ccggaggctccagagggcgg

SEQ ID NO: 16549 - DNA, 20 bp, synthetic construct
  source 1..20: mol_type = other DNA
ggcaggggaggaggagactc

SEQ ID NO: 16550 - DNA, 20 bp, synthetic construct
  source 1..20: mol_type = other DNA
ggtactggttagtctcctag

SEQ ID NO: 16551 - DNA, 20 bp, synthetic construct
  source 1..20: mol_type = other DNA
ctgcctatatcccctaaagg

SEQ ID NO: 16552 - DNA, 20 bp, synthetic construct
  source 1..20: mol_type = other DNA
acctttaggggatataggca

SEQ ID NO: 16553 - DNA, 20 bp, synthetic construct
  source 1..20: mol_type = other DNA
caccactaaagccccagcac

SEQ ID NO: 16554 - DNA, 20 bp, synthetic construct
  source 1..20: mol_type = other DNA
cctatatcccctaaaggtgg

SEQ ID NO: 16555 - DNA, 20 bp, synthetic construct
  source 1..20: mol_type = other DNA
ctatatcccctaaaggtgga

SEQ ID NO: 16556 - DNA, 20 bp, synthetic construct
  source 1..20: mol_type = other DNA
ggtggttctctcctgtgctg

SEQ ID NO: 16557 - DNA, 20 bp, synthetic construct
  source 1..20: mol_type = other DNA
caaacctgggatctcagccc

SEQ ID NO: 16558 - DNA, 20 bp, synthetic construct
  source 1..20: mol_type = other DNA
tgggatctcagcccaggaca

SEQ ID NO: 16559 - DNA, 20 bp, synthetic construct
  source 1..20: mol_type = other DNA
atctcagcccaggacaaggt

SEQ ID NO: 16560 - DNA, 20 bp, synthetic construct
  source 1..20: mol_type = other DNA
gatctcagcccaggacaagg

SEQ ID NO: 16561 - DNA, 20 bp, synthetic construct
  source 1..20: mol_type = other DNA
cacccagcccagaagttcca

SEQ ID NO: 16562 - DNA, 20 bp, synthetic construct
  source 1..20: mol_type = other DNA
ttgtcctgggctgagatccc

SEQ ID NO: 16563 - DNA, 20 bp, synthetic construct
  source 1..20: mol_type = other DNA
cctggaacttctgggctggg

SEQ ID NO: 16564 - DNA, 20 bp, synthetic construct
  source 1..20: mol_type = other DNA
cagcccagaagttccaggga

SEQ ID NO: 16565 - DNA, 20 bp, synthetic construct
  source 1..20: mol_type = other DNA
aggttgggatcacctggcac

SEQ ID NO: 16566 - DNA, 20 bp, synthetic construct
  source 1..20: mol_type = other DNA
aggtgatcccaacctcgccc

SEQ ID NO: 16567 - DNA, 20 bp, synthetic construct
  source 1..20: mol_type = other DNA
aatcacaggctcccttcagc

SEQ ID NO: 16568 - DNA, 20 bp, synthetic construct
  source 1..20: mol_type = other DNA
atcacctggcaccggctgaa

SEQ ID NO: 16569 - DNA, 20 bp, synthetic construct
  source 1..20: mol_type = other DNA
gggagtcagctgagctgccg

SEQ ID NO: 16570 - DNA, 20 bp, synthetic construct
  source 1..20: mol_type = other DNA
ccccgctacaaaaaaatcac

SEQ ID NO: 16571 - DNA, 20 bp, synthetic construct
  source 1..20: mol_type = other DNA
gagttacagcttccattctg

SEQ ID NO: 16572 - DNA, 20 bp, synthetic construct
  source 1..20: mol_type = other DNA
ccaggatctgtcagaggctg

SEQ ID NO: 16573 - DNA, 20 bp, synthetic construct
  source 1..20: mol_type = other DNA
gatcacctggcaccggctga

SEQ ID NO: 16574 - DNA, 20 bp, synthetic construct
  source 1..20: mol_type = other DNA
gcttccattctggggcgacg

SEQ ID NO: 16575 - DNA, 20 bp, synthetic construct
  source 1..20: mol_type = other DNA
ggggcgaggttgggatcacc

SEQ ID NO: 16576 - DNA, 20 bp, synthetic construct
  source 1..20: mol_type = other DNA
aggttcccaggatctgtcag

SEQ ID NO: 16577 - DNA, 20 bp, synthetic construct
  source 1..20: mol_type = other DNA
tgagctgccggggcgaggtt

SEQ ID NO: 16578 - DNA, 20 bp, synthetic construct
  source 1..20: mol_type = other DNA
cccaggatctgtcagaggct

SEQ ID NO: 16579 - DNA, 20 bp, synthetic construct
  source 1..20: mol_type = other DNA
ggctcccttcagccggtgcc

SEQ ID NO: 16580 - DNA, 20 bp, synthetic construct
  source 1..20: mol_type = other DNA
gaagccctgcacgcccatgg

SEQ ID NO: 16581 - DNA, 20 bp, synthetic construct
  source 1..20: mol_type = other DNA
ctggaagccctgcacgccca

SEQ ID NO: 16582 - DNA, 20 bp, synthetic construct
  source 1..20: mol_type = other DNA
gcctcccagggccatgtctg

SEQ ID NO: 16583 - DNA, 20 bp, synthetic construct
  source 1..20: mol_type = other DNA
ggcaggtccctccccagaca

SEQ ID NO: 16584 - DNA, 20 bp, synthetic construct
  source 1..20: mol_type = other DNA
cctcggcctcggcctcgcag

SEQ ID NO: 16585 - DNA, 20 bp, synthetic construct
  source 1..20: mol_type = other DNA
ccctgggaggcggcagcaca

SEQ ID NO: 16586 - DNA, 20 bp, synthetic construct
  source 1..20: mol_type = other DNA
tccctccccagacatggccc

SEQ ID NO: 16587 - DNA, 20 bp, synthetic construct
  source 1..20: mol_type = other DNA
tgggaggcggcagcacatgg

SEQ ID NO: 16588 - DNA, 20 bp, synthetic construct
  source 1..20: mol_type = other DNA
tcccagggccatgtctgggg

SEQ ID NO: 16589 - DNA, 20 bp, synthetic construct
  source 1..20: mol_type = other DNA
cggcctcggcctcgcagcgg

SEQ ID NO: 16590 - DNA, 20 bp, synthetic construct
  source 1..20: mol_type = other DNA
ccagacatggccctgggagg

SEQ ID NO: 16591 - DNA, 20 bp, synthetic construct
  source 1..20: mol_type = other DNA
gcagcacatggcggccgcgg

SEQ ID NO: 16592 - DNA, 20 bp, synthetic construct
  source 1..20: mol_type = other DNA
tccccagacatggccctggg

SEQ ID NO: 16593 - DNA, 20 bp, synthetic construct
  source 1..20: mol_type = other DNA
cggcctcgcagcggcggcag

SEQ ID NO: 16594 - DNA, 20 bp, synthetic construct
  source 1..20: mol_type = other DNA
cctcgcagcggcggcagcgg

SEQ ID NO: 16595 - DNA, 20 bp, synthetic construct
  source 1..20: mol_type = other DNA
aggcctgatctcgaaaacga

SEQ ID NO: 16596 - DNA, 20 bp, synthetic construct
  source 1..20: mol_type = other DNA
gtggcttaggaataccctcc

SEQ ID NO: 16597 - DNA, 20 bp, synthetic construct
  source 1..20: mol_type = other DNA
cactgaagcgatagccggga

SEQ ID NO: 16598 - DNA, 20 bp, synthetic construct
  source 1..20: mol_type = other DNA
gaattgaggggtggttgtag

SEQ ID NO: 16599 - DNA, 20 bp, synthetic construct
  source 1..20: mol_type = other DNA
gggggcgttccggaattgag

SEQ ID NO: 16600 - DNA, 20 bp, synthetic construct
  source 1..20: mol_type = other DNA
ccactgaagcgatagccggg

SEQ ID NO: 16601 - DNA, 20 bp, synthetic construct
  source 1..20: mol_type = other DNA
ttgaggggtggttgtagtgg

SEQ ID NO: 16602 - DNA, 20 bp, synthetic construct
  source 1..20: mol_type = other DNA
ggcgttccggaattgagggg

SEQ ID NO: 16603 - DNA, 20 bp, synthetic construct
  source 1..20: mol_type = other DNA
agcggccgggcaggtattgg

SEQ ID NO: 16604 - DNA, 20 bp, synthetic construct
  source 1..20: mol_type = other DNA
aattatcgcgatagcagcag

SEQ ID NO: 16605 - DNA, 20 bp, synthetic construct
  source 1..20: mol_type = other DNA
gaacgcccccaatacctgcc

SEQ ID NO: 16606 - DNA, 20 bp, synthetic construct
  source 1..20: mol_type = other DNA
tcgcgatagcagcagcggcc

SEQ ID NO: 16607 - DNA, 20 bp, synthetic construct
  source 1..20: mol_type = other DNA
ggtggttgtagtggtggctt

SEQ ID NO: 16608 - DNA, 20 bp, synthetic construct
  source 1..20: mol_type = other DNA
gatagcagcagcggccgggc

SEQ ID NO: 16609 - DNA, 20 bp, synthetic construct
  source 1..20: mol_type = other DNA
atcgcgatagcagcagcggc

SEQ ID NO: 16610 - DNA, 20 bp, synthetic construct
  source 1..20: mol_type = other DNA
gacgaagaaacgataaatgg

SEQ ID NO: 16611 - DNA, 20 bp, synthetic construct
  source 1..20: mol_type = other DNA
ggagaccggcacgagaagag

SEQ ID NO: 16612 - DNA, 20 bp, synthetic construct
  source 1..20: mol_type = other DNA
gagaccggcacgagaagagc

SEQ ID NO: 16613 - DNA, 20 bp, synthetic construct
  source 1..20: mol_type = other DNA
tcgggacgcggcaagcaggg

SEQ ID NO: 16614 - DNA, 20 bp, synthetic construct
  source 1..20: mol_type = other DNA
aagacccgctcttctcgtgc

SEQ ID NO: 16615 - DNA, 20 bp, synthetic construct
  source 1..20: mol_type = other DNA
cggcgcgccggtgtacctgg

SEQ ID NO: 16616 - DNA, 20 bp, synthetic construct
  source 1..20: mol_type = other DNA
ttcttcgtcatgtcgggacg

SEQ ID NO: 16617 - DNA, 20 bp, synthetic construct
  source 1..20: mol_type = other DNA
atgtcgggacgcggcaagca

SEQ ID NO: 16618 - DNA, 20 bp, synthetic construct
  source 1..20: mol_type = other DNA
gactgccgagatcctggagc

SEQ ID NO: 16619 - DNA, 20 bp, synthetic construct
  source 1..20: mol_type = other DNA
gtacctgactgccgagatcc

SEQ ID NO: 16620 - DNA, 20 bp, synthetic construct
  source 1..20: mol_type = other DNA
cgcgccggtgtacctggcgg

SEQ ID NO: 16621 - DNA, 20 bp, synthetic construct
  source 1..20: mol_type = other DNA
ttatcgtttcttcgtcatgt

SEQ ID NO: 16622 - DNA, 20 bp, synthetic construct
  source 1..20: mol_type = other DNA
tatcgtttcttcgtcatgtc

SEQ ID NO: 16623 - DNA, 20 bp, synthetic construct
  source 1..20: mol_type = other DNA
cgccaggtacaccggcgcgc

SEQ ID NO: 16624 - DNA, 20 bp, synthetic construct
  source 1..20: mol_type = other DNA
ggtgtacctggcggcggtgc

SEQ ID NO: 16625 - DNA, 20 bp, synthetic construct
  source 1..20: mol_type = other DNA
gcctcagggctccgcgcgag

SEQ ID NO: 16626 - DNA, 20 bp, synthetic construct
  source 1..20: mol_type = other DNA
ggaggacgctgactgcctca

SEQ ID NO: 16627 - DNA, 20 bp, synthetic construct
  source 1..20: mol_type = other DNA
tccagcactcttgcctgcaa

SEQ ID NO: 16628 - DNA, 20 bp, synthetic construct
  source 1..20: mol_type = other DNA
ttgcaggcaagagtgctgga

SEQ ID NO: 16629 - DNA, 20 bp, synthetic construct
  source 1..20: mol_type = other DNA
agtcagcgtcctccaggcta

SEQ ID NO: 16630 - DNA, 20 bp, synthetic construct
  source 1..20: mol_type = other DNA
gcgtcctccaggctagggaa

SEQ ID NO: 16631 - DNA, 20 bp, synthetic construct
  source 1..20: mol_type = other DNA
cagtgacccggaagtagaag

SEQ ID NO: 16632 - DNA, 20 bp, synthetic construct
  source 1..20: mol_type = other DNA
aattgctgctcctaccgctc

SEQ ID NO: 16633 - DNA, 20 bp, synthetic construct
  source 1..20: mol_type = other DNA
tgaggcagtcagcgtcctcc

SEQ ID NO: 16634 - DNA, 20 bp, synthetic construct
  source 1..20: mol_type = other DNA
cttgcaggcaagagtgctgg

SEQ ID NO: 16635 - DNA, 20 bp, synthetic construct
  source 1..20: mol_type = other DNA
gcagcggcgaccggagcggt

SEQ ID NO: 16636 - DNA, 20 bp, synthetic construct
  source 1..20: mol_type = other DNA
caggcaagagtgctggaggg

SEQ ID NO: 16637 - DNA, 20 bp, synthetic construct
  source 1..20: mol_type = other DNA
ggcggcagcggcgaccggag

SEQ ID NO: 16638 - DNA, 20 bp, synthetic construct
  source 1..20: mol_type = other DNA
gcccttgcaggcaagagtgc

SEQ ID NO: 16639 - DNA, 20 bp, synthetic construct
  source 1..20: mol_type = other DNA
agagtgctggagggcggcag

SEQ ID NO: 16640 - DNA, 20 bp, synthetic construct
  source 1..20: mol_type = other DNA
ttagttgagactcgtcggtg

SEQ ID NO: 16641 - DNA, 20 bp, synthetic construct
  source 1..20: mol_type = other DNA
tgctgggcgatcgctgttcg

SEQ ID NO: 16642 - DNA, 20 bp, synthetic construct
  source 1..20: mol_type = other DNA
aaaagggactcccggagcta

SEQ ID NO: 16643 - DNA, 20 bp, synthetic construct
  source 1..20: mol_type = other DNA
tagccggcactcactgtgtg

SEQ ID NO: 16644 - DNA, 20 bp, synthetic construct
  source 1..20: mol_type = other DNA
gagtccccacccctagctcc

SEQ ID NO: 16645 - DNA, 20 bp, synthetic construct
  source 1..20: mol_type = other DNA
cctggaagcggacttggtgc

SEQ ID NO: 16646 - DNA, 20 bp, synthetic construct
  source 1..20: mol_type = other DNA
cgagtccccacccctagctc

SEQ ID NO: 16647 - DNA, 20 bp, synthetic construct
  source 1..20: mol_type = other DNA
ctggaagcggacttggtgct

SEQ ID NO: 16648 - DNA, 20 bp, synthetic construct
  source 1..20: mol_type = other DNA
ggaaggcgcacccaagatgg

SEQ ID NO: 16649 - DNA, 20 bp, synthetic construct
  source 1..20: mol_type = other DNA
aaagggactcccggagctag

SEQ ID NO: 16650 - DNA, 20 bp, synthetic construct
  source 1..20: mol_type = other DNA
accgacgagtctcaactaaa

SEQ ID NO: 16651 - DNA, 20 bp, synthetic construct
  source 1..20: mol_type = other DNA
ggactcccggagctaggggt

SEQ ID NO: 16652 - DNA, 20 bp, synthetic construct
  source 1..20: mol_type = other DNA
gggactcccggagctagggg

SEQ ID NO: 16653 - DNA, 20 bp, synthetic construct
  source 1..20: mol_type = other DNA
agaaaccgaaagcctggaag

SEQ ID NO: 16654 - DNA, 20 bp, synthetic construct
  source 1..20: mol_type = other DNA
ccgggaaggcgcacccaaga

SEQ ID NO: 16655 - DNA, 20 bp, synthetic construct
  source 1..20: mol_type = other DNA
gcgggtgtaaacagcctctg

SEQ ID NO: 16656 - DNA, 20 bp, synthetic construct
  source 1..20: mol_type = other DNA
tccgcccgcgtcctcccacg

SEQ ID NO: 16657 - DNA, 20 bp, synthetic construct
  source 1..20: mol_type = other DNA
gcggtgtaaacagccgcggc

SEQ ID NO: 16658 - DNA, 20 bp, synthetic construct
  source 1..20: mol_type = other DNA
tgcaggtcaccaaggcacag

SEQ ID NO: 16659 - DNA, 20 bp, synthetic construct
  source 1..20: mol_type = other DNA
attaaacaactgagcgcccg

SEQ ID NO: 16660 - DNA, 20 bp, synthetic construct
  source 1..20: mol_type = other DNA
tttacacccgctgagcagca

SEQ ID NO: 16661 - DNA, 20 bp, synthetic construct
  source 1..20: mol_type = other DNA
gattaaacaactgagcgccc

SEQ ID NO: 16662 - DNA, 20 bp, synthetic construct
  source 1..20: mol_type = other DNA
cagtcctggcctgcccgccg

SEQ ID NO: 16663 - DNA, 20 bp, synthetic construct
  source 1..20: mol_type = other DNA
ggctcggccgtgctgctcag

SEQ ID NO: 16664 - DNA, 20 bp, synthetic construct
  source 1..20: mol_type = other DNA
ctctgcggtgtaaacagccg

SEQ ID NO: 16665 - DNA, 20 bp, synthetic construct
  source 1..20: mol_type = other DNA
agaggctgtttacaccgcag

SEQ ID NO: 16666 - DNA, 20 bp, synthetic construct
  source 1..20: mol_type = other DNA
acgggaggcttcttccggct

SEQ ID NO: 16667 - DNA, 20 bp, synthetic construct
  source 1..20: mol_type = other DNA
tgcggtgtaaacagccgcgg

SEQ ID NO: 16668 - DNA, 20 bp, synthetic construct
  source 1..20: mol_type = other DNA
ggggcgggcactgacagtcc

SEQ ID NO: 16669 - DNA, 20 bp, synthetic construct
  source 1..20: mol_type = other DNA
gctgagcagcacggccgagc

SEQ ID NO: 16670 - DNA, 20 bp, synthetic construct
  source 1..20: mol_type = other DNA
gcagcacccggtcgttgagg

SEQ ID NO: 16671 - DNA, 20 bp, synthetic construct
  source 1..20: mol_type = other DNA
tgccaacctcctcaacgacc

SEQ ID NO: 16672 - DNA, 20 bp, synthetic construct
  source 1..20: mol_type = other DNA
ggttggcatcggggtacgcg

SEQ ID NO: 16673 - DNA, 20 bp, synthetic construct
  source 1..20: mol_type = other DNA
ctgcgccgacagccctctgg

SEQ ID NO: 16674 - DNA, 20 bp, synthetic construct
  source 1..20: mol_type = other DNA
gcagaagcgagagccgagcg

SEQ ID NO: 16675 - DNA, 20 bp, synthetic construct
  source 1..20: mol_type = other DNA
gcgaggggcagaagagcgcg

SEQ ID NO: 16676 - DNA, 20 bp, synthetic construct
  source 1..20: mol_type = other DNA
cgaggggcagaagagcgcga

SEQ ID NO: 16677 - DNA, 20 bp, synthetic construct
  source 1..20: mol_type = other DNA
gagtccgcacgctccggcga

SEQ ID NO: 16678 - DNA, 20 bp, synthetic construct
  source 1..20: mol_type = other DNA
gcagcagagtccgcacgctc

SEQ ID NO: 16679 - DNA, 20 bp, synthetic construct
  source 1..20: mol_type = other DNA
agtccgcacgctccggcgag

SEQ ID NO: 16680 - DNA, 20 bp, synthetic construct
  source 1..20: mol_type = other DNA
ctactgcgccgacagccctc

SEQ ID NO: 16681 - DNA, 20 bp, synthetic construct
  source 1..20: mol_type = other DNA
agagtccgcacgctccggcg

SEQ ID NO: 16682 - DNA, 20 bp, synthetic construct
  source 1..20: mol_type = other DNA
gaagagcgcgagggagcgcg

SEQ ID NO: 16683 - DNA, 20 bp, synthetic construct
  source 1..20: mol_type = other DNA
tggagcctccagagggctgt

SEQ ID NO: 16684 - DNA, 20 bp, synthetic construct
  source 1..20: mol_type = other DNA
agaagagcgcgagggagcgc

SEQ ID NO: 16685 - DNA, 20 bp, synthetic construct
  source 1..20: mol_type = other DNA
gagggcggagtgctacggac

SEQ ID NO: 16686 - DNA, 20 bp, synthetic construct
  source 1..20: mol_type = other DNA
cctggacaaggagtccacgc

SEQ ID NO: 16687 - DNA, 20 bp, synthetic construct
  source 1..20: mol_type = other DNA
gagtcttggctcccagccgg

SEQ ID NO: 16688 - DNA, 20 bp, synthetic construct
  source 1..20: mol_type = other DNA
tacaggcgcggtgcactctg

SEQ ID NO: 16689 - DNA, 20 bp, synthetic construct
  source 1..20: mol_type = other DNA
ccaggtaaccaggacgccca

SEQ ID NO: 16690 - DNA, 20 bp, synthetic construct
  source 1..20: mol_type = other DNA
ctggacaaggagtccacgct

SEQ ID NO: 16691 - DNA, 20 bp, synthetic construct
  source 1..20: mol_type = other DNA
ggccggcgctggcctgactg

SEQ ID NO: 16692 - DNA, 20 bp, synthetic construct
  source 1..20: mol_type = other DNA
gggcggagtgctacggaccg

SEQ ID NO: 16693 - DNA, 20 bp, synthetic construct
  source 1..20: mol_type = other DNA
aagcggagggcggagtgcta

SEQ ID NO: 16694 - DNA, 20 bp, synthetic construct
  source 1..20: mol_type = other DNA
acaggcgcggtgcactctgg

SEQ ID NO: 16695 - DNA, 20 bp, synthetic construct
  source 1..20: mol_type = other DNA
tacagggcgggagaagcgga

SEQ ID NO: 16696 - DNA, 20 bp, synthetic construct
  source 1..20: mol_type = other DNA
ggccgcagtcaggccagcgc

SEQ ID NO: 16697 - DNA, 20 bp, synthetic construct
  source 1..20: mol_type = other DNA
agggcgggagaagcggaggg

SEQ ID NO: 16698 - DNA, 20 bp, synthetic construct
  source 1..20: mol_type = other DNA
ctacagggcgggagaagcgg

SEQ ID NO: 16699 - DNA, 20 bp, synthetic construct
  source 1..20: mol_type = other DNA
cggctacagggcgggagaag

SEQ ID NO: 16700 - DNA, 20 bp, synthetic construct
  source 1..20: mol_type = other DNA
gaaagactgccgggcgcatg

SEQ ID NO: 16701 - DNA, 20 bp, synthetic construct
  source 1..20: mol_type = other DNA
aggagcgacgtccgtcaccg

SEQ ID NO: 16702 - DNA, 20 bp, synthetic construct
  source 1..20: mol_type = other DNA
ggttgttcactggctgtccg

SEQ ID NO: 16703 - DNA, 20 bp, synthetic construct
  source 1..20: mol_type = other DNA
gccgaatagccccgccgccg

SEQ ID NO: 16704 - DNA, 20 bp, synthetic construct
  source 1..20: mol_type = other DNA
gactgccgggcgcatgcggt

SEQ ID NO: 16705 - DNA, 20 bp, synthetic construct
  source 1..20: mol_type = other DNA
cgcccggcagtctttcacgg

SEQ ID NO: 16706 - DNA, 20 bp, synthetic construct
  source 1..20: mol_type = other DNA
agcgacgtccgtcaccgcgg

SEQ ID NO: 16707 - DNA, 20 bp, synthetic construct
  source 1..20: mol_type = other DNA
tcgcgccgctgactcctgcg

SEQ ID NO: 16708 - DNA, 20 bp, synthetic construct
  source 1..20: mol_type = other DNA
ccggcagtctttcacggagg

SEQ ID NO: 16709 - DNA, 20 bp, synthetic construct
  source 1..20: mol_type = other DNA
tcacctcgcccctgattggt

SEQ ID NO: 16710 - DNA, 20 bp, synthetic construct
  source 1..20: mol_type = other DNA
caaccccgaccgcatgcgcc

SEQ ID NO: 16711 - DNA, 20 bp, synthetic construct
  source 1..20: mol_type = other DNA
atgcggtcggggttgttcac

SEQ ID NO: 16712 - DNA, 20 bp, synthetic construct
  source 1..20: mol_type = other DNA
ccgcctccgtgaaagactgc

SEQ ID NO: 16713 - DNA, 20 bp, synthetic construct
  source 1..20: mol_type = other DNA
agctgggccggcgacgcgcg

SEQ ID NO: 16714 - DNA, 20 bp, synthetic construct
  source 1..20: mol_type = other DNA
cgtcagcgacagagctgggc

SEQ ID NO: 16715 - DNA, 20 bp, synthetic construct
  source 1..20: mol_type = other DNA
tagcacacgaaccttccacg

SEQ ID NO: 16716 - DNA, 20 bp, synthetic construct
  source 1..20: mol_type = other DNA
ataggactccatgttcccaa

SEQ ID NO: 16717 - DNA, 20 bp, synthetic construct
  source 1..20: mol_type = other DNA
gctagttagatgggcgccag

SEQ ID NO: 16718 - DNA, 20 bp, synthetic construct
  source 1..20: mol_type = other DNA
gacccctccatgcttcccgc

SEQ ID NO: 16719 - DNA, 20 bp, synthetic construct
  source 1..20: mol_type = other DNA
tcgccaggcgtcctcgtgga

SEQ ID NO: 16720 - DNA, 20 bp, synthetic construct
  source 1..20: mol_type = other DNA
cgggaccgcgggatgggtgt

SEQ ID NO: 16721 - DNA, 20 bp, synthetic construct
  source 1..20: mol_type = other DNA
tgctagttagatgggcgcca

SEQ ID NO: 16722 - DNA, 20 bp, synthetic construct
  source 1..20: mol_type = other DNA
tcgccggcgggaagcatgga

SEQ ID NO: 16723 - DNA, 20 bp, synthetic construct
  source 1..20: mol_type = other DNA
gtcgccggcgggaagcatgg

SEQ ID NO: 16724 - DNA, 20 bp, synthetic construct
  source 1..20: mol_type = other DNA
gaggacgcctggcgagagaa

SEQ ID NO: 16725 - DNA, 20 bp, synthetic construct
  source 1..20: mol_type = other DNA
tgcttcccgccggcgacccc

SEQ ID NO: 16726 - DNA, 20 bp, synthetic construct
  source 1..20: mol_type = other DNA
cgccggcgggaagcatggag

SEQ ID NO: 16727 - DNA, 20 bp, synthetic construct
  source 1..20: mol_type = other DNA
tgggcgccaggggtcgccgg

SEQ ID NO: 16728 - DNA, 20 bp, synthetic construct
  source 1..20: mol_type = other DNA
agatgggcgccaggggtcgc

SEQ ID NO: 16729 - DNA, 20 bp, synthetic construct
  source 1..20: mol_type = other DNA
aagcatggaggggtctttgg

SEQ ID NO: 16730 - DNA, 20 bp, synthetic construct
  source 1..20: mol_type = other DNA
agaggacgacgagcgcgcag

SEQ ID NO: 16731 - DNA, 20 bp, synthetic construct
  source 1..20: mol_type = other DNA
tcaccagctgaaaagcgcag

SEQ ID NO: 16732 - DNA, 20 bp, synthetic construct
  source 1..20: mol_type = other DNA
tcctgtataggcgggcacca

SEQ ID NO: 16733 - DNA, 20 bp, synthetic construct
  source 1..20: mol_type = other DNA
gggctccaggaggctcgcgg

SEQ ID NO: 16734 - DNA, 20 bp, synthetic construct
  source 1..20: mol_type = other DNA
ggctccaggaggctcgcgga

SEQ ID NO: 16735 - DNA, 20 bp, synthetic construct
  source 1..20: mol_type = other DNA
gctccaggaggctcgcggag

SEQ ID NO: 16736 - DNA, 20 bp, synthetic construct
  source 1..20: mol_type = other DNA
ggcaccatgggctcctgctc

SEQ ID NO: 16737 - DNA, 20 bp, synthetic construct
  source 1..20: mol_type = other DNA
gcggccggagcaggagccca

SEQ ID NO: 16738 - DNA, 20 bp, synthetic construct
  source 1..20: mol_type = other DNA
cgggggctccaggaggctcg

SEQ ID NO: 16739 - DNA, 20 bp, synthetic construct
  source 1..20: mol_type = other DNA
ccttcggccgtagcagcccg

SEQ ID NO: 16740 - DNA, 20 bp, synthetic construct
  source 1..20: mol_type = other DNA
gacgacgagcgcgcagcggc

SEQ ID NO: 16741 - DNA, 20 bp, synthetic construct
  source 1..20: mol_type = other DNA
cgggcaccgggggctccagg

SEQ ID NO: 16742 - DNA, 20 bp, synthetic construct
  source 1..20: mol_type = other DNA
gccgaaggtggcgtcgcctg

SEQ ID NO: 16743 - DNA, 20 bp, synthetic construct
  source 1..20: mol_type = other DNA
cgggctgctacggccgaagg

SEQ ID NO: 16744 - DNA, 20 bp, synthetic construct
  source 1..20: mol_type = other DNA
gaggcatcccccctcggagc

SEQ ID NO: 16745 - DNA, 20 bp, synthetic construct
  source 1..20: mol_type = other DNA
attacggtgctcgagcacgc

SEQ ID NO: 16746 - DNA, 20 bp, synthetic construct
  source 1..20: mol_type = other DNA
tgctcgagcaccgtaatccc

SEQ ID NO: 16747 - DNA, 20 bp, synthetic construct
  source 1..20: mol_type = other DNA
gtgctcgagcaccgtaatcc

SEQ ID NO: 16748 - DNA, 20 bp, synthetic construct
  source 1..20: mol_type = other DNA
cggtgctcgagcacgctggt

SEQ ID NO: 16749 - DNA, 20 bp, synthetic construct
  source 1..20: mol_type = other DNA
acctccgagcccctgctccg

SEQ ID NO: 16750 - DNA, 20 bp, synthetic construct
  source 1..20: mol_type = other DNA
ggccgcacgccgcggagcag

SEQ ID NO: 16751 - DNA, 20 bp, synthetic construct
  source 1..20: mol_type = other DNA
gcacaacactgttcaagtcc

SEQ ID NO: 16752 - DNA, 20 bp, synthetic construct
  source 1..20: mol_type = other DNA
cacaacactgttcaagtccc

SEQ ID NO: 16753 - DNA, 20 bp, synthetic construct
  source 1..20: mol_type = other DNA
acggtgctcgagcacgctgg

SEQ ID NO: 16754 - DNA, 20 bp, synthetic construct
  source 1..20: mol_type = other DNA
gccgcggagcaggggctcgg

SEQ ID NO: 16755 - DNA, 20 bp, synthetic construct
  source 1..20: mol_type = other DNA
acgctggtgggaaaggaccc

SEQ ID NO: 16756 - DNA, 20 bp, synthetic construct
  source 1..20: mol_type = other DNA
cacgctggtgggaaaggacc

SEQ ID NO: 16757 - DNA, 20 bp, synthetic construct
  source 1..20: mol_type = other DNA
agcaggggctcggaggtccc

SEQ ID NO: 16758 - DNA, 20 bp, synthetic construct
  source 1..20: mol_type = other DNA
gcgtcatcagtcggcgccag

SEQ ID NO: 16759 - DNA, 20 bp, synthetic construct
  source 1..20: mol_type = other DNA
ccaggaagtgcgtcatcagt

SEQ ID NO: 16760 - DNA, 20 bp, synthetic construct
  source 1..20: mol_type = other DNA
cagtgggtgcacgtggaagg

SEQ ID NO: 16761 - DNA, 20 bp, synthetic construct
  source 1..20: mol_type = other DNA
ttggggtccattgcaacccg

SEQ ID NO: 16762 - DNA, 20 bp, synthetic construct
  source 1..20: mol_type = other DNA
gggaactctagtctcgcctc

SEQ ID NO: 16763 - DNA, 20 bp, synthetic construct
  source 1..20: mol_type = other DNA
gaagaggcagtgggtgcacg

SEQ ID NO: 16764 - DNA, 20 bp, synthetic construct
  source 1..20: mol_type = other DNA
acccgggcgtcccttaccag

SEQ ID NO: 16765 - DNA, 20 bp, synthetic construct
  source 1..20: mol_type = other DNA
ctagagttcccaagcgagaa

SEQ ID NO: 16766 - DNA, 20 bp, synthetic construct
  source 1..20: mol_type = other DNA
gcgtcccttaccagcggcac

SEQ ID NO: 16767 - DNA, 20 bp, synthetic construct
  source 1..20: mol_type = other DNA
actagagttcccaagcgaga

SEQ ID NO: 16768 - DNA, 20 bp, synthetic construct
  source 1..20: mol_type = other DNA
agtctcgcctcgggttgcaa

SEQ ID NO: 16769 - DNA, 20 bp, synthetic construct
  source 1..20: mol_type = other DNA
gcgagaagggaagaggcagt

SEQ ID NO: 16770 - DNA, 20 bp, synthetic construct
  source 1..20: mol_type = other DNA
ggtgcacgtggaaggcggag

SEQ ID NO: 16771 - DNA, 20 bp, synthetic construct
  source 1..20: mol_type = other DNA
cagcggcacaggagcagttg

SEQ ID NO: 16772 - DNA, 20 bp, synthetic construct
  source 1..20: mol_type = other DNA
aggcagtgggtgcacgtgga

SEQ ID NO: 16773 - DNA, 20 bp, synthetic construct
  source 1..20: mol_type = other DNA
accagcggcacaggagcagt

SEQ ID NO: 16774 - DNA, 20 bp, synthetic construct
  source 1..20: mol_type = other DNA
agcgagaagggaagaggcag

SEQ ID NO: 16775 - DNA, 20 bp, synthetic construct
  source 1..20: mol_type = other DNA
tgacagccccaattaaacgg

SEQ ID NO: 16776 - DNA, 20 bp, synthetic construct
  source 1..20: mol_type = other DNA
cccatgaaaaaccagctccg

SEQ ID NO: 16777 - DNA, 20 bp, synthetic construct
  source 1..20: mol_type = other DNA
cgacatgtgcgcccgcgctg

SEQ ID NO: 16778 - DNA, 20 bp, synthetic construct
  source 1..20: mol_type = other DNA
gacatgtgcgcccgcgctgg

SEQ ID NO: 16779 - DNA, 20 bp, synthetic construct
  source 1..20: mol_type = other DNA
acatgtgcgcccgcgctggg

SEQ ID NO: 16780 - DNA, 20 bp, synthetic construct
  source 1..20: mol_type = other DNA
ctgtcaggccgcggtgcgcg

SEQ ID NO: 16781 - DNA, 20 bp, synthetic construct
  source 1..20: mol_type = other DNA
ccggccctccgcgcgcaccg

SEQ ID NO: 16782 - DNA, 20 bp, synthetic construct
  source 1..20: mol_type = other DNA
caggccgcggtgcgcgcgga

SEQ ID NO: 16783 - DNA, 20 bp, synthetic construct
  source 1..20: mol_type = other DNA
cgggcgggacggaggccggg

SEQ ID NO: 16784 - DNA, 20 bp, synthetic construct
  source 1..20: mol_type = other DNA
tcaggccgcggtgcgcgcgg

SEQ ID NO: 16785 - DNA, 20 bp, synthetic construct
  source 1..20: mol_type = other DNA
gctccgcggccccccagcgc

SEQ ID NO: 16786 - DNA, 20 bp, synthetic construct
  source 1..20: mol_type = other DNA
cgggcgggcgggcgggacgg

SEQ ID NO: 16787 - DNA, 20 bp, synthetic construct
  source 1..20: mol_type = other DNA
acggaggccgggaggccggg

SEQ ID NO: 16788 - DNA, 20 bp, synthetic construct
  source 1..20: mol_type = other DNA
gccccggcctcccggcctcc

SEQ ID NO: 16789 - DNA, 20 bp, synthetic construct
  source 1..20: mol_type = other DNA
gggcgggcgggacggaggcc

SEQ ID NO: 16790 - DNA, 20 bp, synthetic construct
  source 1..20: mol_type = other DNA
aagttcacgccgcccgacac

SEQ ID NO: 16791 - DNA, 20 bp, synthetic construct
  source 1..20: mol_type = other DNA
gcgacaaaatggctgcccga

SEQ ID NO: 16792 - DNA, 20 bp, synthetic construct
  source 1..20: mol_type = other DNA
ggttcgagcccggtgtcggg

SEQ ID NO: 16793 - DNA, 20 bp, synthetic construct
  source 1..20: mol_type = other DNA
agttcacgccgcccgacacc

SEQ ID NO: 16794 - DNA, 20 bp, synthetic construct
  source 1..20: mol_type = other DNA
ggtgccgcgcaaaggactcc

SEQ ID NO: 16795 - DNA, 20 bp, synthetic construct
  source 1..20: mol_type = other DNA
ccttcccggagtcctttgcg

SEQ ID NO: 16796 - DNA, 20 bp, synthetic construct
  source 1..20: mol_type = other DNA
ggcgacaaaatggctgcccg

SEQ ID NO: 16797 - DNA, 20 bp, synthetic construct
  source 1..20: mol_type = other DNA
aaatggctgcccgagggaga

SEQ ID NO: 16798 - DNA, 20 bp, synthetic construct
  source 1..20: mol_type = other DNA
ggcggagcctcagggccggg

SEQ ID NO: 16799 - DNA, 20 bp, synthetic construct
  source 1..20: mol_type = other DNA
cccggagcctcccggccctg

SEQ ID NO: 16800 - DNA, 20 bp, synthetic construct
  source 1..20: mol_type = other DNA
gaggctccgggccccgcggg

SEQ ID NO: 16801 - DNA, 20 bp, synthetic construct
  source 1..20: mol_type = other DNA
cccgccaccgccaccgcccg

SEQ ID NO: 16802 - DNA, 20 bp, synthetic construct
  source 1..20: mol_type = other DNA
ccgggaggctccgggccccg

SEQ ID NO: 16803 - DNA, 20 bp, synthetic construct
  source 1..20: mol_type = other DNA
ccgccaccgccaccgcccgc

SEQ ID NO: 16804 - DNA, 20 bp, synthetic construct
  source 1..20: mol_type = other DNA
gacgggcggagcctcagggc

SEQ ID NO: 16805 - DNA, 20 bp, synthetic construct
  source 1..20: mol_type = other DNA
gctgaggtgggtatcgtccg

SEQ ID NO: 16806 - DNA, 20 bp, synthetic construct
  source 1..20: mol_type = other DNA
ctccctccgcgagaaacccg

SEQ ID NO: 16807 - DNA, 20 bp, synthetic construct
  source 1..20: mol_type = other DNA
gatcctcgggtttctcgcgg

SEQ ID NO: 16808 - DNA, 20 bp, synthetic construct
  source 1..20: mol_type = other DNA
gcggatcctcgggtttctcg

SEQ ID NO: 16809 - DNA, 20 bp, synthetic construct
  source 1..20: mol_type = other DNA
acctcagcaggcgagagagg

SEQ ID NO: 16810 - DNA, 20 bp, synthetic construct
  source 1..20: mol_type = other DNA
agatgagattgccaaggctc

SEQ ID NO: 16811 - DNA, 20 bp, synthetic construct
  source 1..20: mol_type = other DNA
ggagaggctcggaagaaggg

SEQ ID NO: 16812 - DNA, 20 bp, synthetic construct
  source 1..20: mol_type = other DNA
gatggcagatgagattgcca

SEQ ID NO: 16813 - DNA, 20 bp, synthetic construct
  source 1..20: mol_type = other DNA
agaggagaggctcggaagaa

SEQ ID NO: 16814 - DNA, 20 bp, synthetic construct
  source 1..20: mol_type = other DNA
atctcggcctctctcccgcg

SEQ ID NO: 16815 - DNA, 20 bp, synthetic construct
  source 1..20: mol_type = other DNA
tcggcctctctcccgcgcgg

SEQ ID NO: 16816 - DNA, 20 bp, synthetic construct
  source 1..20: mol_type = other DNA
ccgcgcggcggccagaggag

SEQ ID NO: 16817 - DNA, 20 bp, synthetic construct
  source 1..20: mol_type = other DNA
gcgcgggagagaggccgaga

SEQ ID NO: 16818 - DNA, 20 bp, synthetic construct
  source 1..20: mol_type = other DNA
cctctcctctggccgccgcg

SEQ ID NO: 16819 - DNA, 20 bp, synthetic construct
  source 1..20: mol_type = other DNA
cggcggccagaggagaggct

SEQ ID NO: 16820 - DNA, 20 bp, synthetic construct
  source 1..20: mol_type = other DNA
aaaacaacatgcgaaatccc

SEQ ID NO: 16821 - DNA, 20 bp, synthetic construct
  source 1..20: mol_type = other DNA
aaacaacatgcgaaatccct

SEQ ID NO: 16822 - DNA, 20 bp, synthetic construct
  source 1..20: mol_type = other DNA
agaacaagtacagagttcag

SEQ ID NO: 16823 - DNA, 20 bp, synthetic construct
  source 1..20: mol_type = other DNA
ggaaactgaaacatcctgct

SEQ ID NO: 16824 - DNA, 20 bp, synthetic construct
  source 1..20: mol_type = other DNA
aagcctgaggctgaacaaag

SEQ ID NO: 16825 - DNA, 20 bp, synthetic construct
  source 1..20: mol_type = other DNA
gggaaactgaaacatcctgc

SEQ ID NO: 16826 - DNA, 20 bp, synthetic construct
  source 1..20: mol_type = other DNA
gtttggaatgaagtttcact

SEQ ID NO: 16827 - DNA, 20 bp, synthetic construct
  source 1..20: mol_type = other DNA
gctgttgagtgtgctctcag

SEQ ID NO: 16828 - DNA, 20 bp, synthetic construct
  source 1..20: mol_type = other DNA
caggatgtttcagtttccca

SEQ ID NO: 16829 - DNA, 20 bp, synthetic construct
  source 1..20: mol_type = other DNA
gtgtgctctcagtggagctt

SEQ ID NO: 16830 - DNA, 20 bp, synthetic construct
  source 1..20: mol_type = other DNA
gaagaacccagaagcccagc

SEQ ID NO: 16831 - DNA, 20 bp, synthetic construct
  source 1..20: mol_type = other DNA
gcaggatgtttcagtttccc

SEQ ID NO: 16832 - DNA, 20 bp, synthetic construct
  source 1..20: mol_type = other DNA
gaaacatcctgctgggcttc

SEQ ID NO: 16833 - DNA, 20 bp, synthetic construct
  source 1..20: mol_type = other DNA
tgtttggaatgaagtttcac

SEQ ID NO: 16834 - DNA, 20 bp, synthetic construct
  source 1..20: mol_type = other DNA
aaacatcctgctgggcttct

SEQ ID NO: 16835 - DNA, 20 bp, synthetic construct
  source 1..20: mol_type = other DNA
gaagcggcgttagtgaatcg

SEQ ID NO: 16836 - DNA, 20 bp, synthetic construct
  source 1..20: mol_type = other DNA
gttagtgaatcggggccttg

SEQ ID NO: 16837 - DNA, 20 bp, synthetic construct
  source 1..20: mol_type = other DNA
tcactaacgccgcttccgca

SEQ ID NO: 16838 - DNA, 20 bp, synthetic construct
  source 1..20: mol_type = other DNA
cggcggcgggccgagccctg

SEQ ID NO: 16839 - DNA, 20 bp, synthetic construct
  source 1..20: mol_type = other DNA
caggatggaggtggcggtcg

SEQ ID NO: 16840 - DNA, 20 bp, synthetic construct
  source 1..20: mol_type = other DNA
cgcgaccgccacctccatcc

SEQ ID NO: 16841 - DNA, 20 bp, synthetic construct
  source 1..20: mol_type = other DNA
ggcggaggcggccttcgcgc

SEQ ID NO: 16842 - DNA, 20 bp, synthetic construct
  source 1..20: mol_type = other DNA
tggggagcccaggatggagg

SEQ ID NO: 16843 - DNA, 20 bp, synthetic construct
  source 1..20: mol_type = other DNA
ggagcccaggatggaggtgg

SEQ ID NO: 16844 - DNA, 20 bp, synthetic construct
  source 1..20: mol_type = other DNA
cctccatcctgggctcccca

SEQ ID NO: 16845 - DNA, 20 bp, synthetic construct
  source 1..20: mol_type = other DNA
acgccgcttccgcagggcgc

SEQ ID NO: 16846 - DNA, 20 bp, synthetic construct
  source 1..20: mol_type = other DNA
gatggaggtggcggtcgcgg

SEQ ID NO: 16847 - DNA, 20 bp, synthetic construct
  source 1..20: mol_type = other DNA
gcgccggcgccctgcggaag

SEQ ID NO: 16848 - DNA, 20 bp, synthetic construct
  source 1..20: mol_type = other DNA
ccttggggagcccaggatgg

SEQ ID NO: 16849 - DNA, 20 bp, synthetic construct
  source 1..20: mol_type = other DNA
gggccttggggagcccagga

SEQ ID NO: 16850 - DNA, 20 bp, synthetic construct
  source 1..20: mol_type = other DNA
tatactgtgtctgtattggt

SEQ ID NO: 16851 - DNA, 20 bp, synthetic construct
  source 1..20: mol_type = other DNA
taactgatagtcgctaactt

SEQ ID NO: 16852 - DNA, 20 bp, synthetic construct
  source 1..20: mol_type = other DNA
gtgtggtaagtatttgacaa

SEQ ID NO: 16853 - DNA, 20 bp, synthetic construct
  source 1..20: mol_type = other DNA
gttggaatgtccaaacaaac

SEQ ID NO: 16854 - DNA, 20 bp, synthetic construct
  source 1..20: mol_type = other DNA
tcacttggttacagctgact

SEQ ID NO: 16855 - DNA, 20 bp, synthetic construct
  source 1..20: mol_type = other DNA
ttcacttggttacagctgac

SEQ ID NO: 16856 - DNA, 20 bp, synthetic construct
  source 1..20: mol_type = other DNA
tcagttaagagtagattgca

SEQ ID NO: 16857 - DNA, 20 bp, synthetic construct
  source 1..20: mol_type = other DNA
atcagttaagagtagattgc

SEQ ID NO: 16858 - DNA, 20 bp, synthetic construct
  source 1..20: mol_type = other DNA
agttaagagtagattgcagg

SEQ ID NO: 16859 - DNA, 20 bp, synthetic construct
  source 1..20: mol_type = other DNA
ggctgacattacatttcact

SEQ ID NO: 16860 - DNA, 20 bp, synthetic construct
  source 1..20: mol_type = other DNA
aaccaatacagacacagtat

SEQ ID NO: 16861 - DNA, 20 bp, synthetic construct
  source 1..20: mol_type = other DNA
cagttaagagtagattgcag

SEQ ID NO: 16862 - DNA, 20 bp, synthetic construct
  source 1..20: mol_type = other DNA
tacctatactgtgtctgtat

SEQ ID NO: 16863 - DNA, 20 bp, synthetic construct
  source 1..20: mol_type = other DNA
aaattctattccagtttgtt

SEQ ID NO: 16864 - DNA, 20 bp, synthetic construct
  source 1..20: mol_type = other DNA
cacttggttacagctgactg

SEQ ID NO: 16865 - DNA, 20 bp, synthetic construct
  source 1..20: mol_type = other DNA
ccaggccggagcacaatcgg

SEQ ID NO: 16866 - DNA, 20 bp, synthetic construct
  source 1..20: mol_type = other DNA
ggagtggctctaggcagatg

SEQ ID NO: 16867 - DNA, 20 bp, synthetic construct
  source 1..20: mol_type = other DNA
cactgccgtccatgactccg

SEQ ID NO: 16868 - DNA, 20 bp, synthetic construct
  source 1..20: mol_type = other DNA
agcgtcaccggctcccggag

SEQ ID NO: 16869 - DNA, 20 bp, synthetic construct
  source 1..20: mol_type = other DNA
cgcggagtcatggacggcag

SEQ ID NO: 16870 - DNA, 20 bp, synthetic construct
  source 1..20: mol_type = other DNA
ggcggccgcggagtcatgga

SEQ ID NO: 16871 - DNA, 20 bp, synthetic construct
  source 1..20: mol_type = other DNA
aggcagatggggcagctgaa

SEQ ID NO: 16872 - DNA, 20 bp, synthetic construct
  source 1..20: mol_type = other DNA
acaatcggcggcgccctggg

SEQ ID NO: 16873 - DNA, 20 bp, synthetic construct
  source 1..20: mol_type = other DNA
catgactccgcggccgccca

SEQ ID NO: 16874 - DNA, 20 bp, synthetic construct
  source 1..20: mol_type = other DNA
cctagagccactccgggagc

SEQ ID NO: 16875 - DNA, 20 bp, synthetic construct
  source 1..20: mol_type = other DNA
gagcacaatcggcggcgccc

SEQ ID NO: 16876 - DNA, 20 bp, synthetic construct
  source 1..20: mol_type = other DNA
cctgggcggccgcggagtca

SEQ ID NO: 16877 - DNA, 20 bp, synthetic construct
  source 1..20: mol_type = other DNA
agggcagcgtcaccggctcc

SEQ ID NO: 16878 - DNA, 20 bp, synthetic construct
  source 1..20: mol_type = other DNA
ccggagtggctctaggcaga

SEQ ID NO: 16879 - DNA, 20 bp, synthetic construct
  source 1..20: mol_type = other DNA
taggcagatggggcagctga

SEQ ID NO: 16880 - DNA, 20 bp, synthetic construct
  source 1..20: mol_type = other DNA
accagttgacactacatcgg

SEQ ID NO: 16881 - DNA, 20 bp, synthetic construct
  source 1..20: mol_type = other DNA
ccagttgacactacatcggt

SEQ ID NO: 16882 - DNA, 20 bp, synthetic construct
  source 1..20: mol_type = other DNA
gtaagcagacgagtatctga

SEQ ID NO: 16883 - DNA, 20 bp, synthetic construct
  source 1..20: mol_type = other DNA
atgtgctagtagaagtgtga

SEQ ID NO: 16884 - DNA, 20 bp, synthetic construct
  source 1..20: mol_type = other DNA
ggtaagcagacgagtatctg

SEQ ID NO: 16885 - DNA, 20 bp, synthetic construct
  source 1..20: mol_type = other DNA
aatgtgctagtagaagtgtg

SEQ ID NO: 16886 - DNA, 20 bp, synthetic construct
  source 1..20: mol_type = other DNA
tctgttggatgctaaaagca

SEQ ID NO: 16887 - DNA, 20 bp, synthetic construct
  source 1..20: mol_type = other DNA
ctctcagaatccagacgcta

SEQ ID NO: 16888 - DNA, 20 bp, synthetic construct
  source 1..20: mol_type = other DNA
gctagtagaagtgtgagggc

SEQ ID NO: 16889 - DNA, 20 bp, synthetic construct
  source 1..20: mol_type = other DNA
gcacatttcttaacaggcaa

SEQ ID NO: 16890 - DNA, 20 bp, synthetic construct
  source 1..20: mol_type = other DNA
ctactagcacatttcttaac

SEQ ID NO: 16891 - DNA, 20 bp, synthetic construct
  source 1..20: mol_type = other DNA
ccaacagaaaatctctgctt

SEQ ID NO: 16892 - DNA, 20 bp, synthetic construct
  source 1..20: mol_type = other DNA
ctagtagaagtgtgagggca

SEQ ID NO: 16893 - DNA, 20 bp, synthetic construct
  source 1..20: mol_type = other DNA
caacagaaaatctctgctta

SEQ ID NO: 16894 - DNA, 20 bp, synthetic construct
  source 1..20: mol_type = other DNA
aggaataaaagttgaaaatt

SEQ ID NO: 16895 - DNA, 20 bp, synthetic construct
  source 1..20: mol_type = other DNA
aggcgccgggaggttccggg

SEQ ID NO: 16896 - DNA, 20 bp, synthetic construct
  source 1..20: mol_type = other DNA
cccggactcggacgcgtggt

SEQ ID NO: 16897 - DNA, 20 bp, synthetic construct
  source 1..20: mol_type = other DNA
agggcccggactcggacgcg

SEQ ID NO: 16898 - DNA, 20 bp, synthetic construct
  source 1..20: mol_type = other DNA
cccgctcggccgagctgtcg

SEQ ID NO: 16899 - DNA, 20 bp, synthetic construct
  source 1..20: mol_type = other DNA
ccggaacctcccggcgcctg

SEQ ID NO: 16900 - DNA, 20 bp, synthetic construct
  source 1..20: mol_type = other DNA
acgcgtggtaggtgagtgcg

SEQ ID NO: 16901 - DNA, 20 bp, synthetic construct
  source 1..20: mol_type = other DNA
cctaccacgcgtccgagtcc

SEQ ID NO: 16902 - DNA, 20 bp, synthetic construct
  source 1..20: mol_type = other DNA
cgtccgagtccgggccctgg

SEQ ID NO: 16903 - DNA, 20 bp, synthetic construct
  source 1..20: mol_type = other DNA
agtgcgcggccacgacagct

SEQ ID NO: 16904 - DNA, 20 bp, synthetic construct
  source 1..20: mol_type = other DNA
agggagctgggccaggcggt

SEQ ID NO: 16905 - DNA, 20 bp, synthetic construct
  source 1..20: mol_type = other DNA
gggccgcgcattctcagcgc

SEQ ID NO: 16906 - DNA, 20 bp, synthetic construct
  source 1..20: mol_type = other DNA
ccgagtccgggccctggcgg

SEQ ID NO: 16907 - DNA, 20 bp, synthetic construct
  source 1..20: mol_type = other DNA
agtccgggccctggcggcgg

SEQ ID NO: 16908 - DNA, 20 bp, synthetic construct
  source 1..20: mol_type = other DNA
cggcggcggcagcagctgcg

SEQ ID NO: 16909 - DNA, 20 bp, synthetic construct
  source 1..20: mol_type = other DNA
ggcggcggcagcagctgcgg

SEQ ID NO: 16910 - DNA, 20 bp, synthetic construct
  source 1..20: mol_type = other DNA
gtcggcttgcccagtgaatg

SEQ ID NO: 16911 - DNA, 20 bp, synthetic construct
  source 1..20: mol_type = other DNA
aggctcatggcaggtgcaca

SEQ ID NO: 16912 - DNA, 20 bp, synthetic construct
  source 1..20: mol_type = other DNA
tgagccaggaagtgctcttg

SEQ ID NO: 16913 - DNA, 20 bp, synthetic construct
  source 1..20: mol_type = other DNA
ccaaaggacccaagaatgga

SEQ ID NO: 16914 - DNA, 20 bp, synthetic construct
  source 1..20: mol_type = other DNA
gcctagcccaggctcatggc

SEQ ID NO: 16915 - DNA, 20 bp, synthetic construct
  source 1..20: mol_type = other DNA
agcacttcctggctcacagt

SEQ ID NO: 16916 - DNA, 20 bp, synthetic construct
  source 1..20: mol_type = other DNA
acctccaaaggacccaagaa

SEQ ID NO: 16917 - DNA, 20 bp, synthetic construct
  source 1..20: mol_type = other DNA
ggacccaagaatggatggct

SEQ ID NO: 16918 - DNA, 20 bp, synthetic construct
  source 1..20: mol_type = other DNA
cctagcctagcccaggctca

SEQ ID NO: 16919 - DNA, 20 bp, synthetic construct
  source 1..20: mol_type = other DNA
ggtgggcaggggagaggcga

SEQ ID NO: 16920 - DNA, 20 bp, synthetic construct
  source 1..20: mol_type = other DNA
ggaggggcctagcctagccc

SEQ ID NO: 16921 - DNA, 20 bp, synthetic construct
  source 1..20: mol_type = other DNA
tcctttggaggtgagctaag

SEQ ID NO: 16922 - DNA, 20 bp, synthetic construct
  source 1..20: mol_type = other DNA
caggggagaggcgagggctc

SEQ ID NO: 16923 - DNA, 20 bp, synthetic construct
  source 1..20: mol_type = other DNA
aggtgggcaggggagaggcg

SEQ ID NO: 16924 - DNA, 20 bp, synthetic construct
  source 1..20: mol_type = other DNA
gggctggggcaggtgggcag

SEQ ID NO: 16925 - DNA, 20 bp, synthetic construct
  source 1..20: mol_type = other DNA
ggtcttcctaccagcgaatg

SEQ ID NO: 16926 - DNA, 20 bp, synthetic construct
  source 1..20: mol_type = other DNA
gaagaaagagacagcgatgg

SEQ ID NO: 16927 - DNA, 20 bp, synthetic construct
  source 1..20: mol_type = other DNA
caagggcccacctagcgggg

SEQ ID NO: 16928 - DNA, 20 bp, synthetic construct
  source 1..20: mol_type = other DNA
cttcctaccagcgaatgggg

SEQ ID NO: 16929 - DNA, 20 bp, synthetic construct
  source 1..20: mol_type = other DNA
ccgccgggactcgcactcgg

SEQ ID NO: 16930 - DNA, 20 bp, synthetic construct
  source 1..20: mol_type = other DNA
ccagaagaaagagacagcga

SEQ ID NO: 16931 - DNA, 20 bp, synthetic construct
  source 1..20: mol_type = other DNA
gcccaagggcccacctagcg

SEQ ID NO: 16932 - DNA, 20 bp, synthetic construct
  source 1..20: mol_type = other DNA
gagcccaagggcccacctag

SEQ ID NO: 16933 - DNA, 20 bp, synthetic construct
  source 1..20: mol_type = other DNA
tagcggggaggcagcctgga

SEQ ID NO: 16934 - DNA, 20 bp, synthetic construct
  source 1..20: mol_type = other DNA
caggctgcctccccgctagg

SEQ ID NO: 16935 - DNA, 20 bp, synthetic construct
  source 1..20: mol_type = other DNA
aggctgcctccccgctaggt

SEQ ID NO: 16936 - DNA, 20 bp, synthetic construct
  source 1..20: mol_type = other DNA
gggccgccgggactcgcact

SEQ ID NO: 16937 - DNA, 20 bp, synthetic construct
  source 1..20: mol_type = other DNA
ggtgagctggtgggcgcgtg

SEQ ID NO: 16938 - DNA, 20 bp, synthetic construct
  source 1..20: mol_type = other DNA
gactcttcctccccattcgc

SEQ ID NO: 16939 - DNA, 20 bp, synthetic construct
  source 1..20: mol_type = other DNA
agagacagcgatggcggcag

SEQ ID NO: 16940 - DNA, 20 bp, synthetic construct
  source 1..20: mol_type = other DNA
tggatggtgaaccctgaagt

SEQ ID NO: 16941 - DNA, 20 bp, synthetic construct
  source 1..20: mol_type = other DNA
gacagagacctctgacgccg

SEQ ID NO: 16942 - DNA, 20 bp, synthetic construct
  source 1..20: mol_type = other DNA
ggaagtgggggtcagaccgg

SEQ ID NO: 16943 - DNA, 20 bp, synthetic construct
  source 1..20: mol_type = other DNA
gttcacggcaggattcggtt

SEQ ID NO: 16944 - DNA, 20 bp, synthetic construct
  source 1..20: mol_type = other DNA
gaccggaggtcaggccctcg

SEQ ID NO: 16945 - DNA, 20 bp, synthetic construct
  source 1..20: mol_type = other DNA
agggaaggatagtggaagtg

SEQ ID NO: 16946 - DNA, 20 bp, synthetic construct
  source 1..20: mol_type = other DNA
aagggaaggatagtggaagt

SEQ ID NO: 16947 - DNA, 20 bp, synthetic construct
  source 1..20: mol_type = other DNA
accggaggtcaggccctcga

SEQ ID NO: 16948 - DNA, 20 bp, synthetic construct
  source 1..20: mol_type = other DNA
aggattcggttaggtgagtg

SEQ ID NO: 16949 - DNA, 20 bp, synthetic construct
  source 1..20: mol_type = other DNA
ggcagctgaggagaaaggga

SEQ ID NO: 16950 - DNA, 20 bp, synthetic construct
  source 1..20: mol_type = other DNA
gacttcggagggggcagctg

SEQ ID NO: 16951 - DNA, 20 bp, synthetic construct
  source 1..20: mol_type = other DNA
tgtggcatcctcggcgtcag

SEQ ID NO: 16952 - DNA, 20 bp, synthetic construct
  source 1..20: mol_type = other DNA
ttaggtgagtgtggcatcct

SEQ ID NO: 16953 - DNA, 20 bp, synthetic construct
  source 1..20: mol_type = other DNA
tcgagggcccgcggcgcagg

SEQ ID NO: 16954 - DNA, 20 bp, synthetic construct
  source 1..20: mol_type = other DNA
gggaaggatagtggaagtgg

SEQ ID NO: 16955 - DNA, 20 bp, synthetic construct
  source 1..20: mol_type = other DNA
gcagcagaaccagcaacaga

SEQ ID NO: 16956 - DNA, 20 bp, synthetic construct
  source 1..20: mol_type = other DNA
agcagcagaaccagcaacag

SEQ ID NO: 16957 - DNA, 20 bp, synthetic construct
  source 1..20: mol_type = other DNA
gcagaaccagcaacagaggg

SEQ ID NO: 16958 - DNA, 20 bp, synthetic construct
  source 1..20: mol_type = other DNA
ggaggctggtggtcatgccg

SEQ ID NO: 16959 - DNA, 20 bp, synthetic construct
  source 1..20: mol_type = other DNA
aggatgcgaaccaggaaccc

SEQ ID NO: 16960 - DNA, 20 bp, synthetic construct
  source 1..20: mol_type = other DNA
gctggggtcgcagccacccg

SEQ ID NO: 16961 - DNA, 20 bp, synthetic construct
  source 1..20: mol_type = other DNA
gggaggcattgctaggggac

SEQ ID NO: 16962 - DNA, 20 bp, synthetic construct
  source 1..20: mol_type = other DNA
gcgccgactgcagagccggg

SEQ ID NO: 16963 - DNA, 20 bp, synthetic construct
  source 1..20: mol_type = other DNA
ctgcagagccgggaggctgg

SEQ ID NO: 16964 - DNA, 20 bp, synthetic construct
  source 1..20: mol_type = other DNA
cagcctcccggctctgcagt

SEQ ID NO: 16965 - DNA, 20 bp, synthetic construct
  source 1..20: mol_type = other DNA
cggcatgaccaccagcctcc

SEQ ID NO: 16966 - DNA, 20 bp, synthetic construct
  source 1..20: mol_type = other DNA
tctgcagtcggcgcccaggc

SEQ ID NO: 16967 - DNA, 20 bp, synthetic construct
  source 1..20: mol_type = other DNA
acagagggaggatgcgaacc

SEQ ID NO: 16968 - DNA, 20 bp, synthetic construct
  source 1..20: mol_type = other DNA
gtcaagtgacgcgaagcggc

SEQ ID NO: 16969 - DNA, 20 bp, synthetic construct
  source 1..20: mol_type = other DNA
cgggaggctggtggtcatgc

SEQ ID NO: 16970 - DNA, 20 bp, synthetic construct
  source 1..20: mol_type = other DNA
ggtgcaggaagcttacgcgg

SEQ ID NO: 16971 - DNA, 20 bp, synthetic construct
  source 1..20: mol_type = other DNA
cgagagactacctcagcgag

SEQ ID NO: 16972 - DNA, 20 bp, synthetic construct
  source 1..20: mol_type = other DNA
ctcgctgaggtagtctctcg

SEQ ID NO: 16973 - DNA, 20 bp, synthetic construct
  source 1..20: mol_type = other DNA
accagcgcctcggatgcggg

SEQ ID NO: 16974 - DNA, 20 bp, synthetic construct
  source 1..20: mol_type = other DNA
tccctgaacacagacagcgc

SEQ ID NO: 16975 - DNA, 20 bp, synthetic construct
  source 1..20: mol_type = other DNA
cgggaccagcgcctcggatg

SEQ ID NO: 16976 - DNA, 20 bp, synthetic construct
  source 1..20: mol_type = other DNA
gcggtggcagccgctcgctg

SEQ ID NO: 16977 - DNA, 20 bp, synthetic construct
  source 1..20: mol_type = other DNA
ccaggtgcaggaagcttacg

SEQ ID NO: 16978 - DNA, 20 bp, synthetic construct
  source 1..20: mol_type = other DNA
atccctgaacacagacagcg

SEQ ID NO: 16979 - DNA, 20 bp, synthetic construct
  source 1..20: mol_type = other DNA
ggctgcgggagcgcgaagcg

SEQ ID NO: 16980 - DNA, 20 bp, synthetic construct
  source 1..20: mol_type = other DNA
catccgaggcgctggtcccg

SEQ ID NO: 16981 - DNA, 20 bp, synthetic construct
  source 1..20: mol_type = other DNA
gcggctgcgggagcgcgaag

SEQ ID NO: 16982 - DNA, 20 bp, synthetic construct
  source 1..20: mol_type = other DNA
tgtctgtgttcagggatccc

SEQ ID NO: 16983 - DNA, 20 bp, synthetic construct
  source 1..20: mol_type = other DNA
ggtagtctctcgcggcgccg

SEQ ID NO: 16984 - DNA, 20 bp, synthetic construct
  source 1..20: mol_type = other DNA
cgcgtaagcttcctgcacct

SEQ ID NO: 16985 - DNA, 20 bp, synthetic construct
  source 1..20: mol_type = other DNA
tctgtcctccggcaaaagcg

SEQ ID NO: 16986 - DNA, 20 bp, synthetic construct
  source 1..20: mol_type = other DNA
cagagactgacatggaacag

SEQ ID NO: 16987 - DNA, 20 bp, synthetic construct
  source 1..20: mol_type = other DNA
attcctgtctcactagtgat

SEQ ID NO: 16988 - DNA, 20 bp, synthetic construct
  source 1..20: mol_type = other DNA
gcagaggtaggctgaaggtt

SEQ ID NO: 16989 - DNA, 20 bp, synthetic construct
  source 1..20: mol_type = other DNA
gaactctaaggtgacagcag

SEQ ID NO: 16990 - DNA, 20 bp, synthetic construct
  source 1..20: mol_type = other DNA
acagagactgacatggaaca

SEQ ID NO: 16991 - DNA, 20 bp, synthetic construct
  source 1..20: mol_type = other DNA
agccagtctagctgctgcac

SEQ ID NO: 16992 - DNA, 20 bp, synthetic construct
  source 1..20: mol_type = other DNA
tgacagcagaggtaggctga

SEQ ID NO: 16993 - DNA, 20 bp, synthetic construct
  source 1..20: mol_type = other DNA
ccatgtcagtctctgtcctc

SEQ ID NO: 16994 - DNA, 20 bp, synthetic construct
  source 1..20: mol_type = other DNA
tctaaggtgacagcagaggt

SEQ ID NO: 16995 - DNA, 20 bp, synthetic construct
  source 1..20: mol_type = other DNA
ccggaggacagagactgaca

SEQ ID NO: 16996 - DNA, 20 bp, synthetic construct
  source 1..20: mol_type = other DNA
actgacatggaacaggggaa

SEQ ID NO: 16997 - DNA, 20 bp, synthetic construct
  source 1..20: mol_type = other DNA
agtctagctgctgcacaggc

SEQ ID NO: 16998 - DNA, 20 bp, synthetic construct
  source 1..20: mol_type = other DNA
gctggctggctggctgctaa

SEQ ID NO: 16999 - DNA, 20 bp, synthetic construct
  source 1..20: mol_type = other DNA
gacagagactgacatggaac

SEQ ID NO: 17000 - DNA, 20 bp, synthetic construct
  source 1..20: mol_type = other DNA
gccaagctcctccacagacg

SEQ ID NO: 17001 - DNA, 20 bp, synthetic construct
  source 1..20: mol_type = other DNA
gagatttggaggcctcgcgt

SEQ ID NO: 17002 - DNA, 20 bp, synthetic construct
  source 1..20: mol_type = other DNA
cacaggcagtcgccaatacc

SEQ ID NO: 17003 - DNA, 20 bp, synthetic construct
  source 1..20: mol_type = other DNA
ggcagtcgccaataccaggc

SEQ ID NO: 17004 - DNA, 20 bp, synthetic construct
  source 1..20: mol_type = other DNA
cgtcgctggggttactcgtg

SEQ ID NO: 17005 - DNA, 20 bp, synthetic construct
  source 1..20: mol_type = other DNA
tgcacacaaaaccggagaca

SEQ ID NO: 17006 - DNA, 20 bp, synthetic construct
  source 1..20: mol_type = other DNA
gcgcggagaaagcgtcgctg

SEQ ID NO: 17007 - DNA, 20 bp, synthetic construct
  source 1..20: mol_type = other DNA
agatttggaggcctcgcgtg

SEQ ID NO: 17008 - DNA, 20 bp, synthetic construct
  source 1..20: mol_type = other DNA
ggagagggccgcgtctgtgg

SEQ ID NO: 17009 - DNA, 20 bp, synthetic construct
  source 1..20: mol_type = other DNA
cgaaattgggcttggaaccc

SEQ ID NO: 17010 - DNA, 20 bp, synthetic construct
  source 1..20: mol_type = other DNA
cgcggccctctccccacgcg

SEQ ID NO: 17011 - DNA, 20 bp, synthetic construct
  source 1..20: mol_type = other DNA
gttcgccagcccagcaggtg

SEQ ID NO: 17012 - DNA, 20 bp, synthetic construct
  source 1..20: mol_type = other DNA
agcttggctccgcacctgct

SEQ ID NO: 17013 - DNA, 20 bp, synthetic construct
  source 1..20: mol_type = other DNA
gccgcgtctgtggaggagct

SEQ ID NO: 17014 - DNA, 20 bp, synthetic construct
  source 1..20: mol_type = other DNA
tggggagagggccgcgtctg

SEQ ID NO: 17015 - DNA, 20 bp, synthetic construct
  source 1..20: mol_type = other DNA
acagcttgttagacaaggat

SEQ ID NO: 17016 - DNA, 20 bp, synthetic construct
  source 1..20: mol_type = other DNA
tatttaccttctgaccacga

SEQ ID NO: 17017 - DNA, 20 bp, synthetic construct
  source 1..20: mol_type = other DNA
tgagatctgagcctgaagag

SEQ ID NO: 17018 - DNA, 20 bp, synthetic construct
  source 1..20: mol_type = other DNA
aaggacaggaaacctgagaa

SEQ ID NO: 17019 - DNA, 20 bp, synthetic construct
  source 1..20: mol_type = other DNA
tccttgtctaacaagctgta

SEQ ID NO: 17020 - DNA, 20 bp, synthetic construct
  source 1..20: mol_type = other DNA
gagatctgagcctgaagaga

SEQ ID NO: 17021 - DNA, 20 bp, synthetic construct
  source 1..20: mol_type = other DNA
aggaaacctgagaaaggaag

SEQ ID NO: 17022 - DNA, 20 bp, synthetic construct
  source 1..20: mol_type = other DNA
tccttacagcttgttagaca

SEQ ID NO: 17023 - DNA, 20 bp, synthetic construct
  source 1..20: mol_type = other DNA
gagctttgagatgaaaggac

SEQ ID NO: 17024 - DNA, 20 bp, synthetic construct
  source 1..20: mol_type = other DNA
agaagggggggctgagcaag

SEQ ID NO: 17025 - DNA, 20 bp, synthetic construct
  source 1..20: mol_type = other DNA
caggaaacctgagaaaggaa

SEQ ID NO: 17026 - DNA, 20 bp, synthetic construct
  source 1..20: mol_type = other DNA
acaggaaacctgagaaagga

SEQ ID NO: 17027 - DNA, 20 bp, synthetic construct
  source 1..20: mol_type = other DNA
gagaagggggggctgagcaa

SEQ ID NO: 17028 - DNA, 20 bp, synthetic construct
  source 1..20: mol_type = other DNA
ctgacttgttccctctcttc

SEQ ID NO: 17029 - DNA, 20 bp, synthetic construct
  source 1..20: mol_type = other DNA
tgagaaaggaaggggagaag

SEQ ID NO: 17030 - DNA, 20 bp, synthetic construct
  source 1..20: mol_type = other DNA
gccttcctaagtgctcgccg

SEQ ID NO: 17031 - DNA, 20 bp, synthetic construct
  source 1..20: mol_type = other DNA
agactcgccagtttcaaccc

SEQ ID NO: 17032 - DNA, 20 bp, synthetic construct
  source 1..20: mol_type = other DNA
gggagttggagagccgaaag

SEQ ID NO: 17033 - DNA, 20 bp, synthetic construct
  source 1..20: mol_type = other DNA
accgcggcgagcacttagga

SEQ ID NO: 17034 - DNA, 20 bp, synthetic construct
  source 1..20: mol_type = other DNA
ggcgagcacttaggaaggcg

SEQ ID NO: 17035 - DNA, 20 bp, synthetic construct
  source 1..20: mol_type = other DNA
ggcgcgtcggccggctaccg

SEQ ID NO: 17036 - DNA, 20 bp, synthetic construct
  source 1..20: mol_type = other DNA
cgagcacttaggaaggcgcg

SEQ ID NO: 17037 - DNA, 20 bp, synthetic construct
  source 1..20: mol_type = other DNA
tcccggggaagctggcgcgt

SEQ ID NO: 17038 - DNA, 20 bp, synthetic construct
  source 1..20: mol_type = other DNA
cctgcaaagaaaagtttccg

SEQ ID NO: 17039 - DNA, 20 bp, synthetic construct
  source 1..20: mol_type = other DNA
gactggaaacttcagtggcg

SEQ ID NO: 17040 - DNA, 20 bp, synthetic construct
  source 1..20: mol_type = other DNA
aaactgactggaaacttcag

SEQ ID NO: 17041 - DNA, 20 bp, synthetic construct
  source 1..20: mol_type = other DNA
ggctaccgcggcgagcactt

SEQ ID NO: 17042 - DNA, 20 bp, synthetic construct
  source 1..20: mol_type = other DNA
tggagcgggcagctgtgaac

SEQ ID NO: 17043 - DNA, 20 bp, synthetic construct
  source 1..20: mol_type = other DNA
ttgcaggaggagaagagaag

SEQ ID NO: 17044 - DNA, 20 bp, synthetic construct
  source 1..20: mol_type = other DNA
ctttgcaggaggagaagaga

SEQ ID NO: 17045 - DNA, 20 bp, synthetic construct
  source 1..20: mol_type = other DNA
gccgggactctgaactatgg

SEQ ID NO: 17046 - DNA, 20 bp, synthetic construct
  source 1..20: mol_type = other DNA
gtactgttgaaagcgacaag

SEQ ID NO: 17047 - DNA, 20 bp, synthetic construct
  source 1..20: mol_type = other DNA
ctgttgaaagcgacaagtgg

SEQ ID NO: 17048 - DNA, 20 bp, synthetic construct
  source 1..20: mol_type = other DNA
gcggccgggactctgaacta

SEQ ID NO: 17049 - DNA, 20 bp, synthetic construct
  source 1..20: mol_type = other DNA
ggactctgaactatggcggt

SEQ ID NO: 17050 - DNA, 20 bp, synthetic construct
  source 1..20: mol_type = other DNA
gtgtagacaaaatggcgccg

SEQ ID NO: 17051 - DNA, 20 bp, synthetic construct
  source 1..20: mol_type = other DNA
accgccatagttcagagtcc

SEQ ID NO: 17052 - DNA, 20 bp, synthetic construct
  source 1..20: mol_type = other DNA
cagagtcccggccgctagag

SEQ ID NO: 17053 - DNA, 20 bp, synthetic construct
  source 1..20: mol_type = other DNA
acagcaggcagccatgatgg

SEQ ID NO: 17054 - DNA, 20 bp, synthetic construct
  source 1..20: mol_type = other DNA
aagtggaggcgccgctctag

SEQ ID NO: 17055 - DNA, 20 bp, synthetic construct
  source 1..20: mol_type = other DNA
cgcgcgagcgatttagtctg

SEQ ID NO: 17056 - DNA, 20 bp, synthetic construct
  source 1..20: mol_type = other DNA
ccatcatggctgcctgctgt

SEQ ID NO: 17057 - DNA, 20 bp, synthetic construct
  source 1..20: mol_type = other DNA
cagcaggcagccatgatggc

SEQ ID NO: 17058 - DNA, 20 bp, synthetic construct
  source 1..20: mol_type = other DNA
tctgaggcgaagcttcggag

SEQ ID NO: 17059 - DNA, 20 bp, synthetic construct
  source 1..20: mol_type = other DNA
tacttccccctccctacagc

SEQ ID NO: 17060 - DNA, 20 bp, synthetic construct
  source 1..20: mol_type = other DNA
cagctcggcgccaaccaccg

SEQ ID NO: 17061 - DNA, 20 bp, synthetic construct
  source 1..20: mol_type = other DNA
cccagctccagcaagagcgc

SEQ ID NO: 17062 - DNA, 20 bp, synthetic construct
  source 1..20: mol_type = other DNA
ggcccaggcacgcagcggtg

SEQ ID NO: 17063 - DNA, 20 bp, synthetic construct
  source 1..20: mol_type = other DNA
cgggtggcccaggcacgcag

SEQ ID NO: 17064 - DNA, 20 bp, synthetic construct
  source 1..20: mol_type = other DNA
agctcggcgccaaccaccgc

SEQ ID NO: 17065 - DNA, 20 bp, synthetic construct
  source 1..20: mol_type = other DNA
ccccagctccagcaagagcg

SEQ ID NO: 17066 - DNA, 20 bp, synthetic construct
  source 1..20: mol_type = other DNA
tgaggaccgcggccacagct

SEQ ID NO: 17067 - DNA, 20 bp, synthetic construct
  source 1..20: mol_type = other DNA
gcacgcagcggtgaggaccg

SEQ ID NO: 17068 - DNA, 20 bp, synthetic construct
  source 1..20: mol_type = other DNA
cggtggttggcgccgagctg

SEQ ID NO: 17069 - DNA, 20 bp, synthetic construct
  source 1..20: mol_type = other DNA
agctccagcaagagcgcggg

SEQ ID NO: 17070 - DNA, 20 bp, synthetic construct
  source 1..20: mol_type = other DNA
gctccagcaagagcgcgggc

SEQ ID NO: 17071 - DNA, 20 bp, synthetic construct
  source 1..20: mol_type = other DNA
gctgggaggcccgcggtggt

SEQ ID NO: 17072 - DNA, 20 bp, synthetic construct
  source 1..20: mol_type = other DNA
cctcccagccagccccgcgg

SEQ ID NO: 17073 - DNA, 20 bp, synthetic construct
  source 1..20: mol_type = other DNA
ccgcgctcttgctggagctg

SEQ ID NO: 17074 - DNA, 20 bp, synthetic construct
  source 1..20: mol_type = other DNA
ttggcgccgagctgtggccg

SEQ ID NO: 17075 - DNA, 20 bp, synthetic construct
  source 1..20: mol_type = other DNA
gctgacactgacaacaccgc

SEQ ID NO: 17076 - DNA, 20 bp, synthetic construct
  source 1..20: mol_type = other DNA
gctaggagagacccggacca

SEQ ID NO: 17077 - DNA, 20 bp, synthetic construct
  source 1..20: mol_type = other DNA
ccccggcatcgcgacccccg

SEQ ID NO: 17078 - DNA, 20 bp, synthetic construct
  source 1..20: mol_type = other DNA
caggactagtgggtgccaca

SEQ ID NO: 17079 - DNA, 20 bp, synthetic construct
  source 1..20: mol_type = other DNA
gaccacggagacagagaccc

SEQ ID NO: 17080 - DNA, 20 bp, synthetic construct
  source 1..20: mol_type = other DNA
gaccagtcccctccagggtc

SEQ ID NO: 17081 - DNA, 20 bp, synthetic construct
  source 1..20: mol_type = other DNA
cagtcccctccagggtccgg

SEQ ID NO: 17082 - DNA, 20 bp, synthetic construct
  source 1..20: mol_type = other DNA
gtcccctccagggtccggcg

SEQ ID NO: 17083 - DNA, 20 bp, synthetic construct
  source 1..20: mol_type = other DNA
ggccggcaccggctccggga

SEQ ID NO: 17084 - DNA, 20 bp, synthetic construct
  source 1..20: mol_type = other DNA
tctgcagaccagtcccctcc

SEQ ID NO: 17085 - DNA, 20 bp, synthetic construct
  source 1..20: mol_type = other DNA
tcgcgggccggcaccggctc

SEQ ID NO: 17086 - DNA, 20 bp, synthetic construct
  source 1..20: mol_type = other DNA
ggccccgccggaccctggag

SEQ ID NO: 17087 - DNA, 20 bp, synthetic construct
  source 1..20: mol_type = other DNA
agccctcccggagccggtgc

SEQ ID NO: 17088 - DNA, 20 bp, synthetic construct
  source 1..20: mol_type = other DNA
ctgcagaccagtcccctcca

SEQ ID NO: 17089 - DNA, 20 bp, synthetic construct
  source 1..20: mol_type = other DNA
gcacgcagccctcccggagc

SEQ ID NO: 17090 - DNA, 20 bp, synthetic construct
  source 1..20: mol_type = other DNA
caggcgcgtccacacaatgc

SEQ ID NO: 17091 - DNA, 20 bp, synthetic construct
  source 1..20: mol_type = other DNA
tgaagcgggtaacgtcgtag

SEQ ID NO: 17092 - DNA, 20 bp, synthetic construct
  source 1..20: mol_type = other DNA
agccggcagacgcagtacac

SEQ ID NO: 17093 - DNA, 20 bp, synthetic construct
  source 1..20: mol_type = other DNA
gcggcgcggcaacatggcga

SEQ ID NO: 17094 - DNA, 20 bp, synthetic construct
  source 1..20: mol_type = other DNA
catgaagcgggtaacgtcgt

SEQ ID NO: 17095 - DNA, 20 bp, synthetic construct
  source 1..20: mol_type = other DNA
gtcgcactcgatcatgaagc

SEQ ID NO: 17096 - DNA, 20 bp, synthetic construct
  source 1..20: mol_type = other DNA
ccagcgcgcccggcattgtg

SEQ ID NO: 17097 - DNA, 20 bp, synthetic construct
  source 1..20: mol_type = other DNA
gagccggcagacgcagtaca

SEQ ID NO: 17098 - DNA, 20 bp, synthetic construct
  source 1..20: mol_type = other DNA
gggtaacgtcgtaggggagc

SEQ ID NO: 17099 - DNA, 20 bp, synthetic construct
  source 1..20: mol_type = other DNA
ggcggcgcggcgcggcaaca

SEQ ID NO: 17100 - DNA, 20 bp, synthetic construct
  source 1..20: mol_type = other DNA
tgcccgtgtactgcgtctgc

SEQ ID NO: 17101 - DNA, 20 bp, synthetic construct
  source 1..20: mol_type = other DNA
gcctggccgggagcgcgcgc

SEQ ID NO: 17102 - DNA, 20 bp, synthetic construct
  source 1..20: mol_type = other DNA
tccccgtcccctcccggccg

SEQ ID NO: 17103 - DNA, 20 bp, synthetic construct
  source 1..20: mol_type = other DNA
ctggccgggagcgcgcgcgg

SEQ ID NO: 17104 - DNA, 20 bp, synthetic construct
  source 1..20: mol_type = other DNA
cgtcgcactcgatcatgaag

SEQ ID NO: 17105 - DNA, 20 bp, synthetic construct
  source 1..20: mol_type = other DNA
taaattggaagcacagccac

SEQ ID NO: 17106 - DNA, 20 bp, synthetic construct
  source 1..20: mol_type = other DNA
gagagagggaatgaagccac

SEQ ID NO: 17107 - DNA, 20 bp, synthetic construct
  source 1..20: mol_type = other DNA
gggtgaggaacaggtcgccg

SEQ ID NO: 17108 - DNA, 20 bp, synthetic construct
  source 1..20: mol_type = other DNA
tgtaagggaccagcgagaga

SEQ ID NO: 17109 - DNA, 20 bp, synthetic construct
  source 1..20: mol_type = other DNA
atgaagccacgggctgtgag

SEQ ID NO: 17110 - DNA, 20 bp, synthetic construct
  source 1..20: mol_type = other DNA
gaaagtgtgagggcgaagcg

SEQ ID NO: 17111 - DNA, 20 bp, synthetic construct
  source 1..20: mol_type = other DNA
aatgaagccacgggctgtga

SEQ ID NO: 17112 - DNA, 20 bp, synthetic construct
  source 1..20: mol_type = other DNA
cgagagagggaatgaagcca

SEQ ID NO: 17113 - DNA, 20 bp, synthetic construct
  source 1..20: mol_type = other DNA
cttccaatttaggaagaccc

SEQ ID NO: 17114 - DNA, 20 bp, synthetic construct
  source 1..20: mol_type = other DNA
ctcgcgcccctcacagcccg

SEQ ID NO: 17115 - DNA, 20 bp, synthetic construct
  source 1..20: mol_type = other DNA
aaagtgtgagggcgaagcgg

SEQ ID NO: 17116 - DNA, 20 bp, synthetic construct
  source 1..20: mol_type = other DNA
gaatgaagccacgggctgtg

SEQ ID NO: 17117 - DNA, 20 bp, synthetic construct
  source 1..20: mol_type = other DNA
gtaggtgggagcgcgggcga

SEQ ID NO: 17118 - DNA, 20 bp, synthetic construct
  source 1..20: mol_type = other DNA
acgggctgtgaggggcgcga

SEQ ID NO: 17119 - DNA, 20 bp, synthetic construct
  source 1..20: mol_type = other DNA
agttgtgctcttggtgaatg

SEQ ID NO: 17120 - DNA, 20 bp, synthetic construct
  source 1..20: mol_type = other DNA
tcttcatctgataatacaag

SEQ ID NO: 17121 - DNA, 20 bp, synthetic construct
  source 1..20: mol_type = other DNA
aatgtcgtccttaagaatgt

SEQ ID NO: 17122 - DNA, 20 bp, synthetic construct
  source 1..20: mol_type = other DNA
cttgtattatcagatgaaga

SEQ ID NO: 17123 - DNA, 20 bp, synthetic construct
  source 1..20: mol_type = other DNA
gtattatcagatgaagaagg

SEQ ID NO: 17124 - DNA, 20 bp, synthetic construct
  source 1..20: mol_type = other DNA
aatgaaaaatcatcatcatc

SEQ ID NO: 17125 - DNA, 20 bp, synthetic construct
  source 1..20: mol_type = other DNA
tccttcctcaaaattcttga

SEQ ID NO: 17126 - DNA, 20 bp, synthetic construct
  source 1..20: mol_type = other DNA
ttcttgaaggtatgtatatg

SEQ ID NO: 17127 - DNA, 20 bp, synthetic construct
  source 1..20: mol_type = other DNA
cagaatggtctctataaaag

SEQ ID NO: 17128 - DNA, 20 bp, synthetic construct
  source 1..20: mol_type = other DNA
tatcagatgaagaaggtggc

SEQ ID NO: 17129 - DNA, 20 bp, synthetic construct
  source 1..20: mol_type = other DNA
tattctttccaacattctta

SEQ ID NO: 17130 - DNA, 20 bp, synthetic construct
  source 1..20: mol_type = other DNA
tggctgctgtgtttgcagaa

SEQ ID NO: 17131 - DNA, 20 bp, synthetic construct
  source 1..20: mol_type = other DNA
tttgaggaaggatgggaaag

SEQ ID NO: 17132 - DNA, 20 bp, synthetic construct
  source 1..20: mol_type = other DNA
ggaaagaataattaaaattt

SEQ ID NO: 17133 - DNA, 20 bp, synthetic construct
  source 1..20: mol_type = other DNA
tggaaagaataattaaaatt

SEQ ID NO: 17134 - DNA, 20 bp, synthetic construct
  source 1..20: mol_type = other DNA
ggtgtctaagcgctcgcgga

SEQ ID NO: 17135 - DNA, 20 bp, synthetic construct
  source 1..20: mol_type = other DNA
agaaggtgtctaagcgctcg

SEQ ID NO: 17136 - DNA, 20 bp, synthetic construct
  source 1..20: mol_type = other DNA
ggaggtgagcgggtcagacc

SEQ ID NO: 17137 - DNA, 20 bp, synthetic construct
  source 1..20: mol_type = other DNA
gccgggtcccaagccgcgac

SEQ ID NO: 17138 - DNA, 20 bp, synthetic construct
  source 1..20: mol_type = other DNA
tctttcctggtgtcccgtcg

SEQ ID NO: 17139 - DNA, 20 bp, synthetic construct
  source 1..20: mol_type = other DNA
ggcttagcggcccgacgtcg

SEQ ID NO: 17140 - DNA, 20 bp, synthetic construct
  source 1..20: mol_type = other DNA
ctcggaaacaggtgctcgtg

SEQ ID NO: 17141 - DNA, 20 bp, synthetic construct
  source 1..20: mol_type = other DNA
gtctaagcgctcgcggaagg

SEQ ID NO: 17142 - DNA, 20 bp, synthetic construct
  source 1..20: mol_type = other DNA
tgccgggtcccaagccgcga

SEQ ID NO: 17143 - DNA, 20 bp, synthetic construct
  source 1..20: mol_type = other DNA
gctcggaaacaggtgctcgt

SEQ ID NO: 17144 - DNA, 20 bp, synthetic construct
  source 1..20: mol_type = other DNA
aggctgcacggccgcgacgt

SEQ ID NO: 17145 - DNA, 20 bp, synthetic construct
  source 1..20: mol_type = other DNA
cacgagcacctgtttccgag

SEQ ID NO: 17146 - DNA, 20 bp, synthetic construct
  source 1..20: mol_type = other DNA
tgtttccgagcggagagcgc

SEQ ID NO: 17147 - DNA, 20 bp, synthetic construct
  source 1..20: mol_type = other DNA
cgctcggaaacaggtgctcg

SEQ ID NO: 17148 - DNA, 20 bp, synthetic construct
  source 1..20: mol_type = other DNA
ccaagccgcgacgggacacc

SEQ ID NO: 17149 - DNA, 20 bp, synthetic construct
  source 1..20: mol_type = other DNA
aggtgtgagcttcacgaagg

SEQ ID NO: 17150 - DNA, 20 bp, synthetic construct
  source 1..20: mol_type = other DNA
gggaggtgtgagcttcacga

SEQ ID NO: 17151 - DNA, 20 bp, synthetic construct
  source 1..20: mol_type = other DNA
gggactcgttggcggcgtgg

SEQ ID NO: 17152 - DNA, 20 bp, synthetic construct
  source 1..20: mol_type = other DNA
caatcattcagcgacagtgg

SEQ ID NO: 17153 - DNA, 20 bp, synthetic construct
  source 1..20: mol_type = other DNA
gttgacaccaacgtggccac

SEQ ID NO: 17154 - DNA, 20 bp, synthetic construct
  source 1..20: mol_type = other DNA
atgcaatcattcagcgacag

SEQ ID NO: 17155 - DNA, 20 bp, synthetic construct
  source 1..20: mol_type = other DNA
aggggcgccggtggccacgt

SEQ ID NO: 17156 - DNA, 20 bp, synthetic construct
  source 1..20: mol_type = other DNA
cacgcccggggactcgttgg

SEQ ID NO: 17157 - DNA, 20 bp, synthetic construct
  source 1..20: mol_type = other DNA
gaaggaggttgacaccaacg

SEQ ID NO: 17158 - DNA, 20 bp, synthetic construct
  source 1..20: mol_type = other DNA
gctcacacctcccccgcccc

SEQ ID NO: 17159 - DNA, 20 bp, synthetic construct
  source 1..20: mol_type = other DNA
agctcacacctcccccgccc

SEQ ID NO: 17160 - DNA, 20 bp, synthetic construct
  source 1..20: mol_type = other DNA
gactcgttggcggcgtggag

SEQ ID NO: 17161 - DNA, 20 bp, synthetic construct
  source 1..20: mol_type = other DNA
ggactcgttggcggcgtgga

SEQ ID NO: 17162 - DNA, 20 bp, synthetic construct
  source 1..20: mol_type = other DNA
cacacctcccccgccccggg

SEQ ID NO: 17163 - DNA, 20 bp, synthetic construct
  source 1..20: mol_type = other DNA
acacctcccccgccccggga

SEQ ID NO: 17164 - DNA, 20 bp, synthetic construct
  source 1..20: mol_type = other DNA
gggccgtgtttacacagcgg

SEQ ID NO: 17165 - DNA, 20 bp, synthetic construct
  source 1..20: mol_type = other DNA
gccgggccgtgtttacacag

SEQ ID NO: 17166 - DNA, 20 bp, synthetic construct
  source 1..20: mol_type = other DNA
gaggacgctcgccctgccgg

SEQ ID NO: 17167 - DNA, 20 bp, synthetic construct
  source 1..20: mol_type = other DNA
cggcggcggcacgatggtca

SEQ ID NO: 17168 - DNA, 20 bp, synthetic construct
  source 1..20: mol_type = other DNA
agtccctataggctggcgac

SEQ ID NO: 17169 - DNA, 20 bp, synthetic construct
  source 1..20: mol_type = other DNA
aggacgctcgccctgccgga

SEQ ID NO: 17170 - DNA, 20 bp, synthetic construct
  source 1..20: mol_type = other DNA
tcgcccgccggacctcaccc

SEQ ID NO: 17171 - DNA, 20 bp, synthetic construct
  source 1..20: mol_type = other DNA
cccgccggacctcacccagg

SEQ ID NO: 17172 - DNA, 20 bp, synthetic construct
  source 1..20: mol_type = other DNA
cgtgtttacacagcggcggg

SEQ ID NO: 17173 - DNA, 20 bp, synthetic construct
  source 1..20: mol_type = other DNA
gacctcacccaggcgggacg

SEQ ID NO: 17174 - DNA, 20 bp, synthetic construct
  source 1..20: mol_type = other DNA
gtgtttacacagcggcgggc

SEQ ID NO: 17175 - DNA, 20 bp, synthetic construct
  source 1..20: mol_type = other DNA
ggacgcggaacccggcgcgg

SEQ ID NO: 17176 - DNA, 20 bp, synthetic construct
  source 1..20: mol_type = other DNA
cgcggacgcggaacccggcg

SEQ ID NO: 17177 - DNA, 20 bp, synthetic construct
  source 1..20: mol_type = other DNA
ccggcgcggcggcggcacga

SEQ ID NO: 17178 - DNA, 20 bp, synthetic construct
  source 1..20: mol_type = other DNA
cgcggaacccggcgcggcgg

SEQ ID NO: 17179 - DNA, 20 bp, synthetic construct
  source 1..20: mol_type = other DNA
gagaaccgacggaggaccgc

SEQ ID NO: 17180 - DNA, 20 bp, synthetic construct
  source 1..20: mol_type = other DNA
ggtagctgaagaccagaccg

SEQ ID NO: 17181 - DNA, 20 bp, synthetic construct
  source 1..20: mol_type = other DNA
cagcccggtactcttccggc

SEQ ID NO: 17182 - DNA, 20 bp, synthetic construct
  source 1..20: mol_type = other DNA
actaacgagagaaccgacgg

SEQ ID NO: 17183 - DNA, 20 bp, synthetic construct
  source 1..20: mol_type = other DNA
tcggttctctcgttagtcca

SEQ ID NO: 17184 - DNA, 20 bp, synthetic construct
  source 1..20: mol_type = other DNA
tggactaacgagagaaccga

SEQ ID NO: 17185 - DNA, 20 bp, synthetic construct
  source 1..20: mol_type = other DNA
agagaaccgacggaggaccg

SEQ ID NO: 17186 - DNA, 20 bp, synthetic construct
  source 1..20: mol_type = other DNA
agggtagcgcgagagagcga

SEQ ID NO: 17187 - DNA, 20 bp, synthetic construct
  source 1..20: mol_type = other DNA
cggccggaagagtaccgggc

SEQ ID NO: 17188 - DNA, 20 bp, synthetic construct
  source 1..20: mol_type = other DNA
cgctaccctcccgccgcccg

SEQ ID NO: 17189 - DNA, 20 bp, synthetic construct
  source 1..20: mol_type = other DNA
cgccgcccgcggtcctccgt

SEQ ID NO: 17190 - DNA, 20 bp, synthetic construct
  source 1..20: mol_type = other DNA
aaccgacggaggaccgcggg

SEQ ID NO: 17191 - DNA, 20 bp, synthetic construct
  source 1..20: mol_type = other DNA
gggttccctccaggcgccgc

SEQ ID NO: 17192 - DNA, 20 bp, synthetic construct
  source 1..20: mol_type = other DNA
gtaccgggctggcgggcctg

SEQ ID NO: 17193 - DNA, 20 bp, synthetic construct
  source 1..20: mol_type = other DNA
ggcaggccgccgcaccgccg

SEQ ID NO: 17194 - DNA, 20 bp, synthetic construct
  source 1..20: mol_type = other DNA
ggacccggcaggttgagcac

SEQ ID NO: 17195 - DNA, 20 bp, synthetic construct
  source 1..20: mol_type = other DNA
aagcgcttgagttcgcccag

SEQ ID NO: 17196 - DNA, 20 bp, synthetic construct
  source 1..20: mol_type = other DNA
cgacgagttcacggcctgcg

SEQ ID NO: 17197 - DNA, 20 bp, synthetic construct
  source 1..20: mol_type = other DNA
aactcgtcgagctgcgcgtg

SEQ ID NO: 17198 - DNA, 20 bp, synthetic construct
  source 1..20: mol_type = other DNA
gcgggaggcccaccggcagg

SEQ ID NO: 17199 - DNA, 20 bp, synthetic construct
  source 1..20: mol_type = other DNA
ttgagttcgcccagcggctg

SEQ ID NO: 17200 - DNA, 20 bp, synthetic construct
  source 1..20: mol_type = other DNA
aacgcgaggagagcctgcgc

SEQ ID NO: 17201 - DNA, 20 bp, synthetic construct
  source 1..20: mol_type = other DNA
agttcgcccagcggctgcgg

SEQ ID NO: 17202 - DNA, 20 bp, synthetic construct
  source 1..20: mol_type = other DNA
cgcgcagctcgacgagttca

SEQ ID NO: 17203 - DNA, 20 bp, synthetic construct
  source 1..20: mol_type = other DNA
gggagcgcggggccaggacc

SEQ ID NO: 17204 - DNA, 20 bp, synthetic construct
  source 1..20: mol_type = other DNA
cggagccggggcctgagccc

SEQ ID NO: 17205 - DNA, 20 bp, synthetic construct
  source 1..20: mol_type = other DNA
gagagcctgcgccggagccg

SEQ ID NO: 17206 - DNA, 20 bp, synthetic construct
  source 1..20: mol_type = other DNA
cgtcgagctgcgcgtgcggc

SEQ ID NO: 17207 - DNA, 20 bp, synthetic construct
  source 1..20: mol_type = other DNA
gcgcgcggctcggggaccgc

SEQ ID NO: 17208 - DNA, 20 bp, synthetic construct
  source 1..20: mol_type = other DNA
cgcgcggctcggggaccgcg

SEQ ID NO: 17209 - DNA, 20 bp, synthetic construct
  source 1..20: mol_type = other DNA
ccttgcgcgtcacatgacgg

SEQ ID NO: 17210 - DNA, 20 bp, synthetic construct
  source 1..20: mol_type = other DNA
ctggagccgcagcagccggt

SEQ ID NO: 17211 - DNA, 20 bp, synthetic construct
  source 1..20: mol_type = other DNA
cgggggcggacagctgcctg

SEQ ID NO: 17212 - DNA, 20 bp, synthetic construct
  source 1..20: mol_type = other DNA
tgcgcgtcacatgacggcgg

SEQ ID NO: 17213 - DNA, 20 bp, synthetic construct
  source 1..20: mol_type = other DNA
acagctgcctggggatcgtg

SEQ ID NO: 17214 - DNA, 20 bp, synthetic construct
  source 1..20: mol_type = other DNA
gccggtaggattgcggcgtg

SEQ ID NO: 17215 - DNA, 20 bp, synthetic construct
  source 1..20: mol_type = other DNA
cggctgctgcggctccagcg

SEQ ID NO: 17216 - DNA, 20 bp, synthetic construct
  source 1..20: mol_type = other DNA
ggctgctgcggctccagcgg

SEQ ID NO: 17217 - DNA, 20 bp, synthetic construct
  source 1..20: mol_type = other DNA
cgcaatcctaccggctgctg

SEQ ID NO: 17218 - DNA, 20 bp, synthetic construct
  source 1..20: mol_type = other DNA
ggcagctgtccgcccccggg

SEQ ID NO: 17219 - DNA, 20 bp, synthetic construct
  source 1..20: mol_type = other DNA
gtgcggccagccccgcccgg

SEQ ID NO: 17220 - DNA, 20 bp, synthetic construct
  source 1..20: mol_type = other DNA
accggctgctgcggctccag

SEQ ID NO: 17221 - DNA, 20 bp, synthetic construct
  source 1..20: mol_type = other DNA
cccaggcagctgtccgcccc

SEQ ID NO: 17222 - DNA, 20 bp, synthetic construct
  source 1..20: mol_type = other DNA
ccaggcagctgtccgccccc

SEQ ID NO: 17223 - DNA, 20 bp, synthetic construct
  source 1..20: mol_type = other DNA
cgcagcagccggtaggattg

SEQ ID NO: 17224 - DNA, 20 bp, synthetic construct
  source 1..20: mol_type = other DNA
tcagccgcgttcttcatccg

SEQ ID NO: 17225 - DNA, 20 bp, synthetic construct
  source 1..20: mol_type = other DNA
ggctgcgccagcatgaggcg

SEQ ID NO: 17226 - DNA, 20 bp, synthetic construct
  source 1..20: mol_type = other DNA
cccctaaccccgcctcatgc

SEQ ID NO: 17227 - DNA, 20 bp, synthetic construct
  source 1..20: mol_type = other DNA
gaggccccggatgaagaacg

SEQ ID NO: 17228 - DNA, 20 bp, synthetic construct
  source 1..20: mol_type = other DNA
aagactacgcagcctggagc

SEQ ID NO: 17229 - DNA, 20 bp, synthetic construct
  source 1..20: mol_type = other DNA
acctgggcggagagcgatgt

SEQ ID NO: 17230 - DNA, 20 bp, synthetic construct
  source 1..20: mol_type = other DNA
ggggctgcgccagcatgagg

SEQ ID NO: 17231 - DNA, 20 bp, synthetic construct
  source 1..20: mol_type = other DNA
gggctgcgccagcatgaggc

SEQ ID NO: 17232 - DNA, 20 bp, synthetic construct
  source 1..20: mol_type = other DNA
gacctgggcggagagcgatg

SEQ ID NO: 17233 - DNA, 20 bp, synthetic construct
  source 1..20: mol_type = other DNA
acccacatcgctctccgccc

SEQ ID NO: 17234 - DNA, 20 bp, synthetic construct
  source 1..20: mol_type = other DNA
gccgggctgaggctcagggt

SEQ ID NO: 17235 - DNA, 20 bp, synthetic construct
  source 1..20: mol_type = other DNA
gctgacgctgagacccagct

SEQ ID NO: 17236 - DNA, 20 bp, synthetic construct
  source 1..20: mol_type = other DNA
gcgggggctgcgccagcatg

SEQ ID NO: 17237 - DNA, 20 bp, synthetic construct
  source 1..20: mol_type = other DNA
ggcggagagcgatgtgggtc

SEQ ID NO: 17238 - DNA, 20 bp, synthetic construct
  source 1..20: mol_type = other DNA
gctgcgtagtcttcccagct

SEQ ID NO: 17239 - DNA, 20 bp, synthetic construct
  source 1..20: mol_type = other DNA
gtgcctgaggacgcagcgta

SEQ ID NO: 17240 - DNA, 20 bp, synthetic construct
  source 1..20: mol_type = other DNA
ggtgcctgaggacgcagcgt

SEQ ID NO: 17241 - DNA, 20 bp, synthetic construct
  source 1..20: mol_type = other DNA
gctgtatacctaaattagga

SEQ ID NO: 17242 - DNA, 20 bp, synthetic construct
  source 1..20: mol_type = other DNA
taatggctaagagagagaca

SEQ ID NO: 17243 - DNA, 20 bp, synthetic construct
  source 1..20: mol_type = other DNA
aggcacctaggctatagccc

SEQ ID NO: 17244 - DNA, 20 bp, synthetic construct
  source 1..20: mol_type = other DNA
ggcacctaggctatagccca

SEQ ID NO: 17245 - DNA, 20 bp, synthetic construct
  source 1..20: mol_type = other DNA
ggctatagcctaggtgcctg

SEQ ID NO: 17246 - DNA, 20 bp, synthetic construct
  source 1..20: mol_type = other DNA
ttggagatacaacctgctag

SEQ ID NO: 17247 - DNA, 20 bp, synthetic construct
  source 1..20: mol_type = other DNA
agctgtatacctaaattagg

SEQ ID NO: 17248 - DNA, 20 bp, synthetic construct
  source 1..20: mol_type = other DNA
ctgaaccattagtacctagg

SEQ ID NO: 17249 - DNA, 20 bp, synthetic construct
  source 1..20: mol_type = other DNA
gactccctgggctatagcct

SEQ ID NO: 17250 - DNA, 20 bp, synthetic construct
  source 1..20: mol_type = other DNA
agtctgaaccattagtacct

SEQ ID NO: 17251 - DNA, 20 bp, synthetic construct
  source 1..20: mol_type = other DNA
aagccctacgctgcgtcctc

SEQ ID NO: 17252 - DNA, 20 bp, synthetic construct
  source 1..20: mol_type = other DNA
cttgacatgagcagttatgc

SEQ ID NO: 17253 - DNA, 20 bp, synthetic construct
  source 1..20: mol_type = other DNA
agactttcatttcctctagc

SEQ ID NO: 17254 - DNA, 20 bp, synthetic construct
  source 1..20: mol_type = other DNA
ggctccctctgaggcgaccg

SEQ ID NO: 17255 - DNA, 20 bp, synthetic construct
  source 1..20: mol_type = other DNA
ggcggatcacagcttccccg

SEQ ID NO: 17256 - DNA, 20 bp, synthetic construct
  source 1..20: mol_type = other DNA
gtccgcagctggcctccccg

SEQ ID NO: 17257 - DNA, 20 bp, synthetic construct
  source 1..20: mol_type = other DNA
gcggatcacagcttccccgc

SEQ ID NO: 17258 - DNA, 20 bp, synthetic construct
  source 1..20: mol_type = other DNA
cacgacctgccccctgactc

SEQ ID NO: 17259 - DNA, 20 bp, synthetic construct
  source 1..20: mol_type = other DNA
ggcctattatctgctgatcc

SEQ ID NO: 17260 - DNA, 20 bp, synthetic construct
  source 1..20: mol_type = other DNA
cccgccgcgcgcccgagtca

SEQ ID NO: 17261 - DNA, 20 bp, synthetic construct
  source 1..20: mol_type = other DNA
cgccgcgcgcccgagtcagg

SEQ ID NO: 17262 - DNA, 20 bp, synthetic construct
  source 1..20: mol_type = other DNA
gcggggacacctgctgccga

SEQ ID NO: 17263 - DNA, 20 bp, synthetic construct
  source 1..20: mol_type = other DNA
ggcggggacacctgctgccg

SEQ ID NO: 17264 - DNA, 20 bp, synthetic construct
  source 1..20: mol_type = other DNA
ccggagcccgggctcccgcg

SEQ ID NO: 17265 - DNA, 20 bp, synthetic construct
  source 1..20: mol_type = other DNA
ccgccgcgcgcccgagtcag

SEQ ID NO: 17266 - DNA, 20 bp, synthetic construct
  source 1..20: mol_type = other DNA
cccctgactcgggcgcgcgg

SEQ ID NO: 17267 - DNA, 20 bp, synthetic construct
  source 1..20: mol_type = other DNA
cctgactcgggcgcgcggcg

SEQ ID NO: 17268 - DNA, 20 bp, synthetic construct
  source 1..20: mol_type = other DNA
gtcagggggcaggtcgtgca

SEQ ID NO: 17269 - DNA, 20 bp, synthetic construct
  source 1..20: mol_type = other DNA
gcatcctgacgacaaaactc

SEQ ID NO: 17270 - DNA, 20 bp, synthetic construct
  source 1..20: mol_type = other DNA
taagagactattctccagag

SEQ ID NO: 17271 - DNA, 20 bp, synthetic construct
  source 1..20: mol_type = other DNA
gtatttatcaactgtaccta

SEQ ID NO: 17272 - DNA, 20 bp, synthetic construct
  source 1..20: mol_type = other DNA
gatttggaagtcgggacact

SEQ ID NO: 17273 - DNA, 20 bp, synthetic construct
  source 1..20: mol_type = other DNA
atttaattgccagcaaaacc

SEQ ID NO: 17274 - DNA, 20 bp, synthetic construct
  source 1..20: mol_type = other DNA
ccccatataatggaagatcc

SEQ ID NO: 17275 - DNA, 20 bp, synthetic construct
  source 1..20: mol_type = other DNA
ctattctccagagtggcccg

SEQ ID NO: 17276 - DNA, 20 bp, synthetic construct
  source 1..20: mol_type = other DNA
attctccagagtggcccgtg

SEQ ID NO: 17277 - DNA, 20 bp, synthetic construct
  source 1..20: mol_type = other DNA
catgttcttattcttcccca

SEQ ID NO: 17278 - DNA, 20 bp, synthetic construct
  source 1..20: mol_type = other DNA
aaatcatctagaagagcaga

SEQ ID NO: 17279 - DNA, 20 bp, synthetic construct
  source 1..20: mol_type = other DNA
agtatttatcaactgtacct

SEQ ID NO: 17280 - DNA, 20 bp, synthetic construct
  source 1..20: mol_type = other DNA
tattctccagagtggcccgt

SEQ ID NO: 17281 - DNA, 20 bp, synthetic construct
  source 1..20: mol_type = other DNA
atgttcttattcttccccac

SEQ ID NO: 17282 - DNA, 20 bp, synthetic construct
  source 1..20: mol_type = other DNA
ttcttccccacgggccactc

SEQ ID NO: 17283 - DNA, 20 bp, synthetic construct
  source 1..20: mol_type = other DNA
gtcgtcaggatgctgtattt

SEQ ID NO: 17284 - DNA, 20 bp, synthetic construct
  source 1..20: mol_type = other DNA
attctcaaaccctaaccaca

SEQ ID NO: 17285 - DNA, 20 bp, synthetic construct
  source 1..20: mol_type = other DNA
tgagcctatactttgcctgt

SEQ ID NO: 17286 - DNA, 20 bp, synthetic construct
  source 1..20: mol_type = other DNA
ttcaggaatatccagccatg

SEQ ID NO: 17287 - DNA, 20 bp, synthetic construct
  source 1..20: mol_type = other DNA
tagggtttgagaataaggca

SEQ ID NO: 17288 - DNA, 20 bp, synthetic construct
  source 1..20: mol_type = other DNA
tcaaaccctaaccacatggc

SEQ ID NO: 17289 - DNA, 20 bp, synthetic construct
  source 1..20: mol_type = other DNA
cagagcccatcctatgtgca

SEQ ID NO: 17290 - DNA, 20 bp, synthetic construct
  source 1..20: mol_type = other DNA
tgacactgtccagtagttgg

SEQ ID NO: 17291 - DNA, 20 bp, synthetic construct
  source 1..20: mol_type = other DNA
ctgaaccagtgacaagctgg

SEQ ID NO: 17292 - DNA, 20 bp, synthetic construct
  source 1..20: mol_type = other DNA
cactgaaccagtgacaagct

SEQ ID NO: 17293 - DNA, 20 bp, synthetic construct
  source 1..20: mol_type = other DNA
gggtttgagaataaggcaag

SEQ ID NO: 17294 - DNA, 20 bp, synthetic construct
  source 1..20: mol_type = other DNA
agcccatcctatgtgcaagg

SEQ ID NO: 17295 - DNA, 20 bp, synthetic construct
  source 1..20: mol_type = other DNA
aaatgacactgtccagtagt

SEQ ID NO: 17296 - DNA, 20 bp, synthetic construct
  source 1..20: mol_type = other DNA
actgaaccagtgacaagctg

SEQ ID NO: 17297 - DNA, 20 bp, synthetic construct
  source 1..20: mol_type = other DNA
agggtttgagaataaggcaa

SEQ ID NO: 17298 - DNA, 20 bp, synthetic construct
  source 1..20: mol_type = other DNA
ccagcttgtcactggttcag

SEQ ID NO: 17299 - DNA, 20 bp, synthetic construct
  source 1..20: mol_type = other DNA
gacccacgcgacctgacgtg

SEQ ID NO: 17300 - DNA, 20 bp, synthetic construct
  source 1..20: mol_type = other DNA
agacccacgcgacctgacgt

SEQ ID NO: 17301 - DNA, 20 bp, synthetic construct
  source 1..20: mol_type = other DNA
gggcggccccagtcagacgc

SEQ ID NO: 17302 - DNA, 20 bp, synthetic construct
  source 1..20: mol_type = other DNA
gacagacccataaacatcca

SEQ ID NO: 17303 - DNA, 20 bp, synthetic construct
  source 1..20: mol_type = other DNA
gatgtttatgggtctgtctg

SEQ ID NO: 17304 - DNA, 20 bp, synthetic construct
  source 1..20: mol_type = other DNA
ccaggtaagaagccaaggtc

SEQ ID NO: 17305 - DNA, 20 bp, synthetic construct
  source 1..20: mol_type = other DNA
cagacccaggtaagaagcca

SEQ ID NO: 17306 - DNA, 20 bp, synthetic construct
  source 1..20: mol_type = other DNA
ccccaaagcctgaacaggca

SEQ ID NO: 17307 - DNA, 20 bp, synthetic construct
  source 1..20: mol_type = other DNA
ctgtctgtgggtgagcctgt

SEQ ID NO: 17308 - DNA, 20 bp, synthetic construct
  source 1..20: mol_type = other DNA
gggtgagcctgtgggtcccg

SEQ ID NO: 17309 - DNA, 20 bp, synthetic construct
  source 1..20: mol_type = other DNA
gaacaggcagggccagaccc

SEQ ID NO: 17310 - DNA, 20 bp, synthetic construct
  source 1..20: mol_type = other DNA
taagaagccaaggtccggaa

SEQ ID NO: 17311 - DNA, 20 bp, synthetic construct
  source 1..20: mol_type = other DNA
gtaagaagccaaggtccgga

SEQ ID NO: 17312 - DNA, 20 bp, synthetic construct
  source 1..20: mol_type = other DNA
ccggaagggtcgcgggcgcg

SEQ ID NO: 17313 - DNA, 20 bp, synthetic construct
  source 1..20: mol_type = other DNA
gccaaggtccggaagggtcg

SEQ ID NO: 17314 - DNA, 20 bp, synthetic construct
  source 1..20: mol_type = other DNA
agctcaggtgagtgacacgt

SEQ ID NO: 17315 - DNA, 20 bp, synthetic construct
  source 1..20: mol_type = other DNA
gtgacacgttggaatggccc

SEQ ID NO: 17316 - DNA, 20 bp, synthetic construct
  source 1..20: mol_type = other DNA
gctgagtatgggtgtggtgt

SEQ ID NO: 17317 - DNA, 20 bp, synthetic construct
  source 1..20: mol_type = other DNA
gcaggggctgagtatgggtg

SEQ ID NO: 17318 - DNA, 20 bp, synthetic construct
  source 1..20: mol_type = other DNA
aggtgagtgacacgttggaa

SEQ ID NO: 17319 - DNA, 20 bp, synthetic construct
  source 1..20: mol_type = other DNA
gggtgtggtgtagggagtgt

SEQ ID NO: 17320 - DNA, 20 bp, synthetic construct
  source 1..20: mol_type = other DNA
cctgcaggcaaggagagaac

SEQ ID NO: 17321 - DNA, 20 bp, synthetic construct
  source 1..20: mol_type = other DNA
ggtcaggttcccgagagctc

SEQ ID NO: 17322 - DNA, 20 bp, synthetic construct
  source 1..20: mol_type = other DNA
aggcaaggagagaacaggtc

SEQ ID NO: 17323 - DNA, 20 bp, synthetic construct
  source 1..20: mol_type = other DNA
tgcctgcaggggctgagtat

SEQ ID NO: 17324 - DNA, 20 bp, synthetic construct
  source 1..20: mol_type = other DNA
tgacacgttggaatggccca

SEQ ID NO: 17325 - DNA, 20 bp, synthetic construct
  source 1..20: mol_type = other DNA
ggtgtggtgtagggagtgta

SEQ ID NO: 17326 - DNA, 20 bp, synthetic construct
  source 1..20: mol_type = other DNA
cacccatactcagcccctgc

SEQ ID NO: 17327 - DNA, 20 bp, synthetic construct
  source 1..20: mol_type = other DNA
atactcagcccctgcaggca

SEQ ID NO: 17328 - DNA, 20 bp, synthetic construct
  source 1..20: mol_type = other DNA
tgttctctccttgcctgcag

SEQ ID NO: 17329 - DNA, 20 bp, synthetic construct
  source 1..20: mol_type = other DNA
catgacgatgagcgcgatgt

SEQ ID NO: 17330 - DNA, 20 bp, synthetic construct
  source 1..20: mol_type = other DNA
cgggcgccgaagacatcggg

SEQ ID NO: 17331 - DNA, 20 bp, synthetic construct
  source 1..20: mol_type = other DNA
gatgagcgcgatgtaggaat

SEQ ID NO: 17332 - DNA, 20 bp, synthetic construct
  source 1..20: mol_type = other DNA
gagaagcagcagccaccgca

SEQ ID NO: 17333 - DNA, 20 bp, synthetic construct
  source 1..20: mol_type = other DNA
aagcagcagccaccgcacgg

SEQ ID NO: 17334 - DNA, 20 bp, synthetic construct
  source 1..20: mol_type = other DNA
cttggtgggtgaactctgga

SEQ ID NO: 17335 - DNA, 20 bp, synthetic construct
  source 1..20: mol_type = other DNA
ttctcgggcgccgaagacat

SEQ ID NO: 17336 - DNA, 20 bp, synthetic construct
  source 1..20: mol_type = other DNA
agcgcgatgtaggaataggg

SEQ ID NO: 17337 - DNA, 20 bp, synthetic construct
  source 1..20: mol_type = other DNA
cagcagccaccgcacggcgg

SEQ ID NO: 17338 - DNA, 20 bp, synthetic construct
  source 1..20: mol_type = other DNA
ccgtccgcggcgcagagcag

SEQ ID NO: 17339 - DNA, 20 bp, synthetic construct
  source 1..20: mol_type = other DNA
gctcagcgtcaggcgcttgg

SEQ ID NO: 17340 - DNA, 20 bp, synthetic construct
  source 1..20: mol_type = other DNA
gcgcagagcagcggcggcag

SEQ ID NO: 17341 - DNA, 20 bp, synthetic construct
  source 1..20: mol_type = other DNA
tccgcggcgcagagcagcgg

SEQ ID NO: 17342 - DNA, 20 bp, synthetic construct
  source 1..20: mol_type = other DNA
ccgccgccgccgccgtgcgg

SEQ ID NO: 17343 - DNA, 20 bp, synthetic construct
  source 1..20: mol_type = other DNA
ccgccgccgccgccgccgtg

SEQ ID NO: 17344 - DNA, 20 bp, synthetic construct
  source 1..20: mol_type = other DNA
gccatggctccagtgacgcg

SEQ ID NO: 17345 - DNA, 20 bp, synthetic construct
  source 1..20: mol_type = other DNA
cggccgccagccacatgcag

SEQ ID NO: 17346 - DNA, 20 bp, synthetic construct
  source 1..20: mol_type = other DNA
cggaggaaaccgggtgacgg

SEQ ID NO: 17347 - DNA, 20 bp, synthetic construct
  source 1..20: mol_type = other DNA
gagcgaactgaactgctctg

SEQ ID NO: 17348 - DNA, 20 bp, synthetic construct
  source 1..20: mol_type = other DNA
gggcgacgaaggcaaaggga

SEQ ID NO: 17349 - DNA, 20 bp, synthetic construct
  source 1..20: mol_type = other DNA
tcagttcgctcactcctcgc

SEQ ID NO: 17350 - DNA, 20 bp, synthetic construct
  source 1..20: mol_type = other DNA
gtgacgcgaggagagcccga

SEQ ID NO: 17351 - DNA, 20 bp, synthetic construct
  source 1..20: mol_type = other DNA
gtaggtctcggcgaacgcca

SEQ ID NO: 17352 - DNA, 20 bp, synthetic construct
  source 1..20: mol_type = other DNA
gcgaggagagcccgaaggag

SEQ ID NO: 17353 - DNA, 20 bp, synthetic construct
  source 1..20: mol_type = other DNA
tcctcgcgtcactggagcca

SEQ ID NO: 17354 - DNA, 20 bp, synthetic construct
  source 1..20: mol_type = other DNA
gagcccgaaggagaggcggc

SEQ ID NO: 17355 - DNA, 20 bp, synthetic construct
  source 1..20: mol_type = other DNA
cttcctctgcatgtggctgg

SEQ ID NO: 17356 - DNA, 20 bp, synthetic construct
  source 1..20: mol_type = other DNA
aggagagcccgaaggagagg

SEQ ID NO: 17357 - DNA, 20 bp, synthetic construct
  source 1..20: mol_type = other DNA
gctccttcttcctctgcatg

SEQ ID NO: 17358 - DNA, 20 bp, synthetic construct
  source 1..20: mol_type = other DNA
cgaaggagaggcggccggcg

SEQ ID NO: 17359 - DNA, 20 bp, synthetic construct
  source 1..20: mol_type = other DNA
gccgcgcgagtgaatcgagg

SEQ ID NO: 17360 - DNA, 20 bp, synthetic construct
  source 1..20: mol_type = other DNA
gcgcgagtgaatcgaggcgg

SEQ ID NO: 17361 - DNA, 20 bp, synthetic construct
  source 1..20: mol_type = other DNA
cggaggcggcaggaaccgac

SEQ ID NO: 17362 - DNA, 20 bp, synthetic construct
  source 1..20: mol_type = other DNA
ctgaaccggagccagcgagg

SEQ ID NO: 17363 - DNA, 20 bp, synthetic construct
  source 1..20: mol_type = other DNA
aaactgaaccggagccagcg

SEQ ID NO: 17364 - DNA, 20 bp, synthetic construct
  source 1..20: mol_type = other DNA
aaccggccggccatcgcccg

SEQ ID NO: 17365 - DNA, 20 bp, synthetic construct
  source 1..20: mol_type = other DNA
gcgggcgcggaatcgggcat

SEQ ID NO: 17366 - DNA, 20 bp, synthetic construct
  source 1..20: mol_type = other DNA
gatggccggccggttccgga

SEQ ID NO: 17367 - DNA, 20 bp, synthetic construct
  source 1..20: mol_type = other DNA
acgacatcattaaactgaac

SEQ ID NO: 17368 - DNA, 20 bp, synthetic construct
  source 1..20: mol_type = other DNA
cgacaaaatggacatgtctc

SEQ ID NO: 17369 - DNA, 20 bp, synthetic construct
  source 1..20: mol_type = other DNA
accggagccagcgaggcggc

SEQ ID NO: 17370 - DNA, 20 bp, synthetic construct
  source 1..20: mol_type = other DNA
gcccgattccgcgcccgcca

SEQ ID NO: 17371 - DNA, 20 bp, synthetic construct
  source 1..20: mol_type = other DNA
tcggttcctgccgcctccgc

SEQ ID NO: 17372 - DNA, 20 bp, synthetic construct
  source 1..20: mol_type = other DNA
gcccgccatggccgacaaaa

SEQ ID NO: 17373 - DNA, 20 bp, synthetic construct
  source 1..20: mol_type = other DNA
gcctccgccggccgcgccgc

SEQ ID NO: 17374 - DNA, 20 bp, synthetic construct
  source 1..20: mol_type = other DNA
agccggccggtgagcgcctg

SEQ ID NO: 17375 - DNA, 20 bp, synthetic construct
  source 1..20: mol_type = other DNA
cagaggtgagagtcgcgccc

SEQ ID NO: 17376 - DNA, 20 bp, synthetic construct
  source 1..20: mol_type = other DNA
gccggctggacctgtggagt

SEQ ID NO: 17377 - DNA, 20 bp, synthetic construct
  source 1..20: mol_type = other DNA
gcatttcacgaactccatcc

SEQ ID NO: 17378 - DNA, 20 bp, synthetic construct
  source 1..20: mol_type = other DNA
ctgtggagtaggtgcttcga

SEQ ID NO: 17379 - DNA, 20 bp, synthetic construct
  source 1..20: mol_type = other DNA
cctcgaagcacctactccac

SEQ ID NO: 17380 - DNA, 20 bp, synthetic construct
  source 1..20: mol_type = other DNA
gggcgcgactctcacctctg

SEQ ID NO: 17381 - DNA, 20 bp, synthetic construct
  source 1..20: mol_type = other DNA
cctgtggagtaggtgcttcg

SEQ ID NO: 17382 - DNA, 20 bp, synthetic construct
  source 1..20: mol_type = other DNA
acctactccacaggtccagc

SEQ ID NO: 17383 - DNA, 20 bp, synthetic construct
  source 1..20: mol_type = other DNA
tcaccggccggctggacctg

SEQ ID NO: 17384 - DNA, 20 bp, synthetic construct
  source 1..20: mol_type = other DNA
gcagaggtgagagtcgcgcc

SEQ ID NO: 17385 - DNA, 20 bp, synthetic construct
  source 1..20: mol_type = other DNA
actccacaggtccagccggc

SEQ ID NO: 17386 - DNA, 20 bp, synthetic construct
  source 1..20: mol_type = other DNA
ggcgcaggcggcggactccc

SEQ ID NO: 17387 - DNA, 20 bp, synthetic construct
  source 1..20: mol_type = other DNA
tgagcgcctggggaccgcag

SEQ ID NO: 17388 - DNA, 20 bp, synthetic construct
  source 1..20: mol_type = other DNA
gtccccaggcgctcaccggc

SEQ ID NO: 17389 - DNA, 20 bp, synthetic construct
  source 1..20: mol_type = other DNA
cccagaggtagggtcgcggg

SEQ ID NO: 17390 - DNA, 20 bp, synthetic construct
  source 1..20: mol_type = other DNA
gtgtgctgcgcccagaggta

SEQ ID NO: 17391 - DNA, 20 bp, synthetic construct
  source 1..20: mol_type = other DNA
ctgtggtgtgctgcgcccag

SEQ ID NO: 17392 - DNA, 20 bp, synthetic construct
  source 1..20: mol_type = other DNA
gccccggctgcgggtcgcga

SEQ ID NO: 17393 - DNA, 20 bp, synthetic construct
  source 1..20: mol_type = other DNA
gccgtcgcgacccgcagccg

SEQ ID NO: 17394 - DNA, 20 bp, synthetic construct
  source 1..20: mol_type = other DNA
ccggctgcgggtcgcgacgg

SEQ ID NO: 17395 - DNA, 20 bp, synthetic construct
  source 1..20: mol_type = other DNA
cacatccctccgccgcgccc

SEQ ID NO: 17396 - DNA, 20 bp, synthetic construct
  source 1..20: mol_type = other DNA
tcctccgctccgggccagcg

SEQ ID NO: 17397 - DNA, 20 bp, synthetic construct
  source 1..20: mol_type = other DNA
tccgccgcgccccggcacgg

SEQ ID NO: 17398 - DNA, 20 bp, synthetic construct
  source 1..20: mol_type = other DNA
tccgctccgggccagcgcgg

SEQ ID NO: 17399 - DNA, 20 bp, synthetic construct
  source 1..20: mol_type = other DNA
gcgccccctcccccgtgccg

SEQ ID NO: 17400 - DNA, 20 bp, synthetic construct
  source 1..20: mol_type = other DNA
gctgcgggtcgcgacggcgg

SEQ ID NO: 17401 - DNA, 20 bp, synthetic construct
  source 1..20: mol_type = other DNA
gctccgggccagcgcggcgg

SEQ ID NO: 17402 - DNA, 20 bp, synthetic construct
  source 1..20: mol_type = other DNA
tgcgggtcgcgacggcggcg

SEQ ID NO: 17403 - DNA, 20 bp, synthetic construct
  source 1..20: mol_type = other DNA
cctccgccgcgccccggcac

SEQ ID NO: 17404 - DNA, 20 bp, synthetic construct
  source 1..20: mol_type = other DNA
gaggactatgggcaaatcag

SEQ ID NO: 17405 - DNA, 20 bp, synthetic construct
  source 1..20: mol_type = other DNA
ggacaaagaaggaacgataa

SEQ ID NO: 17406 - DNA, 20 bp, synthetic construct
  source 1..20: mol_type = other DNA
atccaggcttacgaagatgc

SEQ ID NO: 17407 - DNA, 20 bp, synthetic construct
  source 1..20: mol_type = other DNA
accccctgcatgtagcacca

SEQ ID NO: 17408 - DNA, 20 bp, synthetic construct
  source 1..20: mol_type = other DNA
atgtccttatgcttccacct

SEQ ID NO: 17409 - DNA, 20 bp, synthetic construct
  source 1..20: mol_type = other DNA
ccctgcatgtagcaccaagg

SEQ ID NO: 17410 - DNA, 20 bp, synthetic construct
  source 1..20: mol_type = other DNA
agcaccaaggtggaagcata

SEQ ID NO: 17411 - DNA, 20 bp, synthetic construct
  source 1..20: mol_type = other DNA
acaggagctgaaatgaaagc

SEQ ID NO: 17412 - DNA, 20 bp, synthetic construct
  source 1..20: mol_type = other DNA
atgggattcagtgacttcag

SEQ ID NO: 17413 - DNA, 20 bp, synthetic construct
  source 1..20: mol_type = other DNA
gcaaaaatcataactgactg

SEQ ID NO: 17414 - DNA, 20 bp, synthetic construct
  source 1..20: mol_type = other DNA
gctttcatttcagctcctgt

SEQ ID NO: 17415 - DNA, 20 bp, synthetic construct
  source 1..20: mol_type = other DNA
gtccagcatcttcgtaagcc

SEQ ID NO: 17416 - DNA, 20 bp, synthetic construct
  source 1..20: mol_type = other DNA
tgaaagctggtgagcaatcc

SEQ ID NO: 17417 - DNA, 20 bp, synthetic construct
  source 1..20: mol_type = other DNA
ctgtggaagaagagagttct

SEQ ID NO: 17418 - DNA, 20 bp, synthetic construct
  source 1..20: mol_type = other DNA
ttaattcaggagatgcctac

SEQ ID NO: 17419 - DNA, 20 bp, synthetic construct
  source 1..20: mol_type = other DNA
tggaccactcacagtcatcg

SEQ ID NO: 17420 - DNA, 20 bp, synthetic construct
  source 1..20: mol_type = other DNA
cgatgactgtgagtggtcca

SEQ ID NO: 17421 - DNA, 20 bp, synthetic construct
  source 1..20: mol_type = other DNA
gctggcctgtagagagaaag

SEQ ID NO: 17422 - DNA, 20 bp, synthetic construct
  source 1..20: mol_type = other DNA
ggggttgggtacgcaccccg

SEQ ID NO: 17423 - DNA, 20 bp, synthetic construct
  source 1..20: mol_type = other DNA
ccgcgcaggcgcagtctctg

SEQ ID NO: 17424 - DNA, 20 bp, synthetic construct
  source 1..20: mol_type = other DNA
gggttgggtacgcaccccgg

SEQ ID NO: 17425 - DNA, 20 bp, synthetic construct
  source 1..20: mol_type = other DNA
aggttgtctcgtgcccgcgc

SEQ ID NO: 17426 - DNA, 20 bp, synthetic construct
  source 1..20: mol_type = other DNA
cccagagactgcgcctgcgc

SEQ ID NO: 17427 - DNA, 20 bp, synthetic construct
  source 1..20: mol_type = other DNA
gccccggccggccacccccg

SEQ ID NO: 17428 - DNA, 20 bp, synthetic construct
  source 1..20: mol_type = other DNA
gagccccggccggccacccc

SEQ ID NO: 17429 - DNA, 20 bp, synthetic construct
  source 1..20: mol_type = other DNA
ccccagagactgcgcctgcg

SEQ ID NO: 17430 - DNA, 20 bp, synthetic construct
  source 1..20: mol_type = other DNA
gtccagggacccccgagccc

SEQ ID NO: 17431 - DNA, 20 bp, synthetic construct
  source 1..20: mol_type = other DNA
agccccggccggccaccccc

SEQ ID NO: 17432 - DNA, 20 bp, synthetic construct
  source 1..20: mol_type = other DNA
ggtggccggccggggctcgg

SEQ ID NO: 17433 - DNA, 20 bp, synthetic construct
  source 1..20: mol_type = other DNA
agggacccccgagccccggc

SEQ ID NO: 17434 - DNA, 20 bp, synthetic construct
  source 1..20: mol_type = other DNA
cccgttcgacatcctgcgcg

SEQ ID NO: 17435 - DNA, 20 bp, synthetic construct
  source 1..20: mol_type = other DNA
tcagctgctggacgacgagt

SEQ ID NO: 17436 - DNA, 20 bp, synthetic construct
  source 1..20: mol_type = other DNA
cagcagctgatggaagcggt

SEQ ID NO: 17437 - DNA, 20 bp, synthetic construct
  source 1..20: mol_type = other DNA
actcgtcgtccagcagctga

SEQ ID NO: 17438 - DNA, 20 bp, synthetic construct
  source 1..20: mol_type = other DNA
gcctcgcgcaggatgtcgaa

SEQ ID NO: 17439 - DNA, 20 bp, synthetic construct
  source 1..20: mol_type = other DNA
tcatgccgccgcgaccactg

SEQ ID NO: 17440 - DNA, 20 bp, synthetic construct
  source 1..20: mol_type = other DNA
tcccgggcccgcagtggtcg

SEQ ID NO: 17441 - DNA, 20 bp, synthetic construct
  source 1..20: mol_type = other DNA
ggagcgggcggcatgggtcc

SEQ ID NO: 17442 - DNA, 20 bp, synthetic construct
  source 1..20: mol_type = other DNA
cggacagggtagggcccgga

SEQ ID NO: 17443 - DNA, 20 bp, synthetic construct
  source 1..20: mol_type = other DNA
ccggacagggtagggcccgg

SEQ ID NO: 17444 - DNA, 20 bp, synthetic construct
  source 1..20: mol_type = other DNA
tcctgcgcgaggccgagcgc

SEQ ID NO: 17445 - DNA, 20 bp, synthetic construct
  source 1..20: mol_type = other DNA
cgaccactgcgggcccggga

SEQ ID NO: 17446 - DNA, 20 bp, synthetic construct
  source 1..20: mol_type = other DNA
gcgaccactgcgggcccggg

SEQ ID NO: 17447 - DNA, 20 bp, synthetic construct
  source 1..20: mol_type = other DNA
gggtagggcccggagggcgg

SEQ ID NO: 17448 - DNA, 20 bp, synthetic construct
  source 1..20: mol_type = other DNA
gctccgccgccaccgccctc

SEQ ID NO: 17449 - DNA, 20 bp, synthetic construct
  source 1..20: mol_type = other DNA
gtcccagcccctctcagagg

SEQ ID NO: 17450 - DNA, 20 bp, synthetic construct
  source 1..20: mol_type = other DNA
ccgcacgcctcctctgagag

SEQ ID NO: 17451 - DNA, 20 bp, synthetic construct
  source 1..20: mol_type = other DNA
gccgcacgcctcctctgaga

SEQ ID NO: 17452 - DNA, 20 bp, synthetic construct
  source 1..20: mol_type = other DNA
ggccggagtggggctcccag

SEQ ID NO: 17453 - DNA, 20 bp, synthetic construct
  source 1..20: mol_type = other DNA
cccctctcagaggaggcgtg

SEQ ID NO: 17454 - DNA, 20 bp, synthetic construct
  source 1..20: mol_type = other DNA
taagtcccagcccctctcag

SEQ ID NO: 17455 - DNA, 20 bp, synthetic construct
  source 1..20: mol_type = other DNA
ggccgcacgcctcctctgag

SEQ ID NO: 17456 - DNA, 20 bp, synthetic construct
  source 1..20: mol_type = other DNA
tggctcgggggataatggca

SEQ ID NO: 17457 - DNA, 20 bp, synthetic construct
  source 1..20: mol_type = other DNA
cccccgagccaggccggagt

SEQ ID NO: 17458 - DNA, 20 bp, synthetic construct
  source 1..20: mol_type = other DNA
ccccactccggcctggctcg

SEQ ID NO: 17459 - DNA, 20 bp, synthetic construct
  source 1..20: mol_type = other DNA
ccccgagccaggccggagtg

SEQ ID NO: 17460 - DNA, 20 bp, synthetic construct
  source 1..20: mol_type = other DNA
cccactccggcctggctcgg

SEQ ID NO: 17461 - DNA, 20 bp, synthetic construct
  source 1..20: mol_type = other DNA
ttagagccgagagctcctct

SEQ ID NO: 17462 - DNA, 20 bp, synthetic construct
  source 1..20: mol_type = other DNA
agcctctggctgcagaacct

SEQ ID NO: 17463 - DNA, 20 bp, synthetic construct
  source 1..20: mol_type = other DNA
tcccccgagccaggccggag

SEQ ID NO: 17464 - DNA, 20 bp, synthetic construct
  source 1..20: mol_type = other DNA
cctgcccggagcgagcgtgt

SEQ ID NO: 17465 - DNA, 20 bp, synthetic construct
  source 1..20: mol_type = other DNA
gagcgagcgtgtgggagtgg

SEQ ID NO: 17466 - DNA, 20 bp, synthetic construct
  source 1..20: mol_type = other DNA
cgtgagcagccggaggatcg

SEQ ID NO: 17467 - DNA, 20 bp, synthetic construct
  source 1..20: mol_type = other DNA
cgatgcgagtgtgtatgtgc

SEQ ID NO: 17468 - DNA, 20 bp, synthetic construct
  source 1..20: mol_type = other DNA
ccgatgcgagtgtgtatgtg

SEQ ID NO: 17469 - DNA, 20 bp, synthetic construct
  source 1..20: mol_type = other DNA
tcgcggagtcccaatgaaac

SEQ ID NO: 17470 - DNA, 20 bp, synthetic construct
  source 1..20: mol_type = other DNA
attgggactccgcgatcctc

SEQ ID NO: 17471 - DNA, 20 bp, synthetic construct
  source 1..20: mol_type = other DNA
ggctacctgcgggctgtgga

SEQ ID NO: 17472 - DNA, 20 bp, synthetic construct
  source 1..20: mol_type = other DNA
tgcgggcgagaagatggcgg

SEQ ID NO: 17473 - DNA, 20 bp, synthetic construct
  source 1..20: mol_type = other DNA
atgtgcgggcgagaagatgg

SEQ ID NO: 17474 - DNA, 20 bp, synthetic construct
  source 1..20: mol_type = other DNA
ggggaagcagcgtgagcagc

SEQ ID NO: 17475 - DNA, 20 bp, synthetic construct
  source 1..20: mol_type = other DNA
gaagcagcgtgagcagccgg

SEQ ID NO: 17476 - DNA, 20 bp, synthetic construct
  source 1..20: mol_type = other DNA
tgtatgtgcgggcgagaaga

SEQ ID NO: 17477 - DNA, 20 bp, synthetic construct
  source 1..20: mol_type = other DNA
ctgcgggctgtggagggcca

SEQ ID NO: 17478 - DNA, 20 bp, synthetic construct
  source 1..20: mol_type = other DNA
gcgagaagatggcggcggcg

SEQ ID NO: 17479 - DNA, 20 bp, synthetic construct
  source 1..20: mol_type = other DNA
tggagtgactccgtgagtgt

SEQ ID NO: 17480 - DNA, 20 bp, synthetic construct
  source 1..20: mol_type = other DNA
ggcccgttccaggacttggg

SEQ ID NO: 17481 - DNA, 20 bp, synthetic construct
  source 1..20: mol_type = other DNA
gtgagtgtcggtgccccgga

SEQ ID NO: 17482 - DNA, 20 bp, synthetic construct
  source 1..20: mol_type = other DNA
cgtgagtgtcggtgccccgg

SEQ ID NO: 17483 - DNA, 20 bp, synthetic construct
  source 1..20: mol_type = other DNA
ctagagcgctcttcgctcca

SEQ ID NO: 17484 - DNA, 20 bp, synthetic construct
  source 1..20: mol_type = other DNA
ctccgtgagtgtcggtgccc

SEQ ID NO: 17485 - DNA, 20 bp, synthetic construct
  source 1..20: mol_type = other DNA
acgggcctccccaccctccg

SEQ ID NO: 17486 - DNA, 20 bp, synthetic construct
  source 1..20: mol_type = other DNA
cacggagcacccagagaagt

SEQ ID NO: 17487 - DNA, 20 bp, synthetic construct
  source 1..20: mol_type = other DNA
caacttctctgggtgctccg

SEQ ID NO: 17488 - DNA, 20 bp, synthetic construct
  source 1..20: mol_type = other DNA
ttccaggacttgggaggcga

SEQ ID NO: 17489 - DNA, 20 bp, synthetic construct
  source 1..20: mol_type = other DNA
caccctcgcctcccaagtcc

SEQ ID NO: 17490 - DNA, 20 bp, synthetic construct
  source 1..20: mol_type = other DNA
gtgtcggtgccccggagggt

SEQ ID NO: 17491 - DNA, 20 bp, synthetic construct
  source 1..20: mol_type = other DNA
ctccggggcaccgacactca

SEQ ID NO: 17492 - DNA, 20 bp, synthetic construct
  source 1..20: mol_type = other DNA
gaacgggcctccccaccctc

SEQ ID NO: 17493 - DNA, 20 bp, synthetic construct
  source 1..20: mol_type = other DNA
aacgggcctccccaccctcc

SEQ ID NO: 17494 - DNA, 20 bp, synthetic construct
  source 1..20: mol_type = other DNA
actgactgaagccaaaacca

SEQ ID NO: 17495 - DNA, 20 bp, synthetic construct
  source 1..20: mol_type = other DNA
ctgtcgtgatgagaaaatag

SEQ ID NO: 17496 - DNA, 20 bp, synthetic construct
  source 1..20: mol_type = other DNA
gaggcccgatgcagataccg

SEQ ID NO: 17497 - DNA, 20 bp, synthetic construct
  source 1..20: mol_type = other DNA
taacatttgaaacagatgaa

SEQ ID NO: 17498 - DNA, 20 bp, synthetic construct
  source 1..20: mol_type = other DNA
caggagctgaataccctccc

SEQ ID NO: 17499 - DNA, 20 bp, synthetic construct
  source 1..20: mol_type = other DNA
cccacctgtgtgtgcctggg

SEQ ID NO: 17500 - DNA, 20 bp, synthetic construct
  source 1..20: mol_type = other DNA
cacaggtgggacacaaataa

SEQ ID NO: 17501 - DNA, 20 bp, synthetic construct
  source 1..20: mol_type = other DNA
ccctcccaggcacacacagg

SEQ ID NO: 17502 - DNA, 20 bp, synthetic construct
  source 1..20: mol_type = other DNA
aactgactgaagccaaaacc

SEQ ID NO: 17503 - DNA, 20 bp, synthetic construct
  source 1..20: mol_type = other DNA
cctcccaggcacacacaggt

SEQ ID NO: 17504 - DNA, 20 bp, synthetic construct
  source 1..20: mol_type = other DNA
ataccctcccaggcacacac

SEQ ID NO: 17505 - DNA, 20 bp, synthetic construct
  source 1..20: mol_type = other DNA
acacaggtgggacacaaata

SEQ ID NO: 17506 - DNA, 20 bp, synthetic construct
  source 1..20: mol_type = other DNA
ccacctgtgtgtgcctggga

SEQ ID NO: 17507 - DNA, 20 bp, synthetic construct
  source 1..20: mol_type = other DNA
tgtcccacctgtgtgtgcct

SEQ ID NO: 17508 - DNA, 20 bp, synthetic construct
  source 1..20: mol_type = other DNA
ttcagctcctgaagccagtg

SEQ ID NO: 17509 - DNA, 20 bp, synthetic construct
  source 1..20: mol_type = other DNA
taaactaagtaggctttgct

SEQ ID NO: 17510 - DNA, 20 bp, synthetic construct
  source 1..20: mol_type = other DNA
atacaaggtctgaaatactt

SEQ ID NO: 17511 - DNA, 20 bp, synthetic construct
  source 1..20: mol_type = other DNA
cctacttagtttagatctcc

SEQ ID NO: 17512 - DNA, 20 bp, synthetic construct
  source 1..20: mol_type = other DNA
tatacaaggtctgaaatact

SEQ ID NO: 17513 - DNA, 20 bp, synthetic construct
  source 1..20: mol_type = other DNA
ttaagtttctacttagcatg

SEQ ID NO: 17514 - DNA, 20 bp, synthetic construct
  source 1..20: mol_type = other DNA
cctggagatctaaactaagt

SEQ ID NO: 17515 - DNA, 20 bp, synthetic construct
  source 1..20: mol_type = other DNA
aaaacaaagaaaggacagaa

SEQ ID NO: 17516 - DNA, 20 bp, synthetic construct
  source 1..20: mol_type = other DNA
aatttaatactaagtataca

SEQ ID NO: 17517 - DNA, 20 bp, synthetic construct
  source 1..20: mol_type = other DNA
tttctacttagcatgtggaa

SEQ ID NO: 17518 - DNA, 20 bp, synthetic construct
  source 1..20: mol_type = other DNA
aaaaacaaagaaaggacaga

SEQ ID NO: 17519 - DNA, 20 bp, synthetic construct
  source 1..20: mol_type = other DNA
ctttctttaaaaacaaagaa

SEQ ID NO: 17520 - DNA, 20 bp, synthetic construct
  source 1..20: mol_type = other DNA
agttaggggtgtacaagacg

SEQ ID NO: 17521 - DNA, 20 bp, synthetic construct
  source 1..20: mol_type = other DNA
gctcctccgaatcacgcgag

SEQ ID NO: 17522 - DNA, 20 bp, synthetic construct
  source 1..20: mol_type = other DNA
ggagttaggggtgtacaaga

SEQ ID NO: 17523 - DNA, 20 bp, synthetic construct
  source 1..20: mol_type = other DNA
ttgtacacccctaactcctg

SEQ ID NO: 17524 - DNA, 20 bp, synthetic construct
  source 1..20: mol_type = other DNA
gagactgggcaggatggttg

SEQ ID NO: 17525 - DNA, 20 bp, synthetic construct
  source 1..20: mol_type = other DNA
ggaggagcctcaggagttag

SEQ ID NO: 17526 - DNA, 20 bp, synthetic construct
  source 1..20: mol_type = other DNA
atggcggtctccgtgcgcac

SEQ ID NO: 17527 - DNA, 20 bp, synthetic construct
  source 1..20: mol_type = other DNA
aaagaaagaaagttctcctc

SEQ ID NO: 17528 - DNA, 20 bp, synthetic construct
  source 1..20: mol_type = other DNA
cttccactcgcgtgattcgg

SEQ ID NO: 17529 - DNA, 20 bp, synthetic construct
  source 1..20: mol_type = other DNA
aagacggggaagcggagact

SEQ ID NO: 17530 - DNA, 20 bp, synthetic construct
  source 1..20: mol_type = other DNA
ggagactgggcaggatggtt

SEQ ID NO: 17531 - DNA, 20 bp, synthetic construct
  source 1..20: mol_type = other DNA
gaagcggagactgggcagga

SEQ ID NO: 17532 - DNA, 20 bp, synthetic construct
  source 1..20: mol_type = other DNA
gatggttggggtcaggaaag

SEQ ID NO: 17533 - DNA, 20 bp, synthetic construct
  source 1..20: mol_type = other DNA
gagttaggggtgtacaagac

SEQ ID NO: 17534 - DNA, 20 bp, synthetic construct
  source 1..20: mol_type = other DNA
cggggaagcggagactgggc

SEQ ID NO: 17535 - DNA, 20 bp, synthetic construct
  source 1..20: mol_type = other DNA
ggctgcaggatccttctccg

SEQ ID NO: 17536 - DNA, 20 bp, synthetic construct
  source 1..20: mol_type = other DNA
cctatccgcgaacagagttg

SEQ ID NO: 17537 - DNA, 20 bp, synthetic construct
  source 1..20: mol_type = other DNA
accctatccgcgaacagagt

SEQ ID NO: 17538 - DNA, 20 bp, synthetic construct
  source 1..20: mol_type = other DNA
ctgaacggatgtccgagagc

SEQ ID NO: 17539 - DNA, 20 bp, synthetic construct
  source 1..20: mol_type = other DNA
ggacgggagttccccggaga

SEQ ID NO: 17540 - DNA, 20 bp, synthetic construct
  source 1..20: mol_type = other DNA
ttgggactcaggagaagtga

SEQ ID NO: 17541 - DNA, 20 bp, synthetic construct
  source 1..20: mol_type = other DNA
ggagaagtgaggggtgacag

SEQ ID NO: 17542 - DNA, 20 bp, synthetic construct
  source 1..20: mol_type = other DNA
ggatcctgcagcccgagtcc

SEQ ID NO: 17543 - DNA, 20 bp, synthetic construct
  source 1..20: mol_type = other DNA
gcggccggacgggagttccc

SEQ ID NO: 17544 - DNA, 20 bp, synthetic construct
  source 1..20: mol_type = other DNA
cgggtcctctcgcactcacc

SEQ ID NO: 17545 - DNA, 20 bp, synthetic construct
  source 1..20: mol_type = other DNA
tgggactcaggagaagtgag

SEQ ID NO: 17546 - DNA, 20 bp, synthetic construct
  source 1..20: mol_type = other DNA
cttgggactcaggagaagtg

SEQ ID NO: 17547 - DNA, 20 bp, synthetic construct
  source 1..20: mol_type = other DNA
gagaagtgaggggtgacagg

SEQ ID NO: 17548 - DNA, 20 bp, synthetic construct
  source 1..20: mol_type = other DNA
aggagaagtgaggggtgaca

SEQ ID NO: 17549 - DNA, 20 bp, synthetic construct
  source 1..20: mol_type = other DNA
cgagtcccggtgagtgcgag

SEQ ID NO: 17550 - DNA, 20 bp, synthetic construct
  source 1..20: mol_type = other DNA
gggaccggaagtgccgaatg

SEQ ID NO: 17551 - DNA, 20 bp, synthetic construct
  source 1..20: mol_type = other DNA
acagcttcggaggcgaatca

SEQ ID NO: 17552 - DNA, 20 bp, synthetic construct
  source 1..20: mol_type = other DNA
tgcacccctgacagcttcgg

SEQ ID NO: 17553 - DNA, 20 bp, synthetic construct
  source 1..20: mol_type = other DNA
ttcgcctccgaagctgtcag

SEQ ID NO: 17554 - DNA, 20 bp, synthetic construct
  source 1..20: mol_type = other DNA
ggtgcagcagccgtctgagg

SEQ ID NO: 17555 - DNA, 20 bp, synthetic construct
  source 1..20: mol_type = other DNA
gggtgcagcagccgtctgag

SEQ ID NO: 17556 - DNA, 20 bp, synthetic construct
  source 1..20: mol_type = other DNA
gagagtgggagccttcagtc

SEQ ID NO: 17557 - DNA, 20 bp, synthetic construct
  source 1..20: mol_type = other DNA
ggggtgcagcagccgtctga

SEQ ID NO: 17558 - DNA, 20 bp, synthetic construct
  source 1..20: mol_type = other DNA
gatcctccatgaaaaagaag

SEQ ID NO: 17559 - DNA, 20 bp, synthetic construct
  source 1..20: mol_type = other DNA
cagcggagatttcggagcag

SEQ ID NO: 17560 - DNA, 20 bp, synthetic construct
  source 1..20: mol_type = other DNA
gcgggaccggaagtgccgaa

SEQ ID NO: 17561 - DNA, 20 bp, synthetic construct
  source 1..20: mol_type = other DNA
ccgaatggggaccaagatgg

SEQ ID NO: 17562 - DNA, 20 bp, synthetic construct
  source 1..20: mol_type = other DNA
aggggtgcagcagccgtctg

SEQ ID NO: 17563 - DNA, 20 bp, synthetic construct
  source 1..20: mol_type = other DNA
ccacctcccaccccctcaga

SEQ ID NO: 17564 - DNA, 20 bp, synthetic construct
  source 1..20: mol_type = other DNA
gtgccgaatggggaccaaga

SEQ ID NO: 17565 - DNA, 20 bp, synthetic construct
  source 1..20: mol_type = other DNA
agagagaaaattgtactgtg

SEQ ID NO: 17566 - DNA, 20 bp, synthetic construct
  source 1..20: mol_type = other DNA
gtgcaccaagagatctggcg

SEQ ID NO: 17567 - DNA, 20 bp, synthetic construct
  source 1..20: mol_type = other DNA
gaccttgacagcttcacagg

SEQ ID NO: 17568 - DNA, 20 bp, synthetic construct
  source 1..20: mol_type = other DNA
gcaccaagagatctggcgag

SEQ ID NO: 17569 - DNA, 20 bp, synthetic construct
  source 1..20: mol_type = other DNA
atattctagcgcatataggg

SEQ ID NO: 17570 - DNA, 20 bp, synthetic construct
  source 1..20: mol_type = other DNA
gggcatcctcgaaaaggcca

SEQ ID NO: 17571 - DNA, 20 bp, synthetic construct
  source 1..20: mol_type = other DNA
tgcaccaagagatctggcga

SEQ ID NO: 17572 - DNA, 20 bp, synthetic construct
  source 1..20: mol_type = other DNA
gtacgcttcctcgagacttg

SEQ ID NO: 17573 - DNA, 20 bp, synthetic construct
  source 1..20: mol_type = other DNA
agaaagagccccaagtctcg

SEQ ID NO: 17574 - DNA, 20 bp, synthetic construct
  source 1..20: mol_type = other DNA
gaggaccttgacagcttcac

SEQ ID NO: 17575 - DNA, 20 bp, synthetic construct
  source 1..20: mol_type = other DNA
atagatattctagcgcatat

SEQ ID NO: 17576 - DNA, 20 bp, synthetic construct
  source 1..20: mol_type = other DNA
tagatattctagcgcatata

SEQ ID NO: 17577 - DNA, 20 bp, synthetic construct
  source 1..20: mol_type = other DNA
gcccgcctgtgaagctgtca

SEQ ID NO: 17578 - DNA, 20 bp, synthetic construct
  source 1..20: mol_type = other DNA
accttgacagcttcacaggc

SEQ ID NO: 17579 - DNA, 20 bp, synthetic construct
  source 1..20: mol_type = other DNA
ctcgaaaaggccagggacag

SEQ ID NO: 17580 - DNA, 20 bp, synthetic construct
  source 1..20: mol_type = other DNA
caacaacagcgcctgatgcg

SEQ ID NO: 17581 - DNA, 20 bp, synthetic construct
  source 1..20: mol_type = other DNA
tcagcgcgcagattagagct

SEQ ID NO: 17582 - DNA, 20 bp, synthetic construct
  source 1..20: mol_type = other DNA
ggcgcccggtgcactatgcg

SEQ ID NO: 17583 - DNA, 20 bp, synthetic construct
  source 1..20: mol_type = other DNA
cagcgcgcagattagagctg

SEQ ID NO: 17584 - DNA, 20 bp, synthetic construct
  source 1..20: mol_type = other DNA
ccggttcggtcagagtcgca

SEQ ID NO: 17585 - DNA, 20 bp, synthetic construct
  source 1..20: mol_type = other DNA
ggccacggccactgtcacgg

SEQ ID NO: 17586 - DNA, 20 bp, synthetic construct
  source 1..20: mol_type = other DNA
cggccactgtcacggcggag

SEQ ID NO: 17587 - DNA, 20 bp, synthetic construct
  source 1..20: mol_type = other DNA
acggccactgtcacggcgga

SEQ ID NO: 17588 - DNA, 20 bp, synthetic construct
  source 1..20: mol_type = other DNA
cacggccactgtcacggcgg

SEQ ID NO: 17589 - DNA, 20 bp, synthetic construct
  source 1..20: mol_type = other DNA
cggcgagtgtgtgcgcgagg

SEQ ID NO: 17590 - DNA, 20 bp, synthetic construct
  source 1..20: mol_type = other DNA
tcaggcgctgttgttggagc

SEQ ID NO: 17591 - DNA, 20 bp, synthetic construct
  source 1..20: mol_type = other DNA
gcgagtgtgtgcgcgaggag

SEQ ID NO: 17592 - DNA, 20 bp, synthetic construct
  source 1..20: mol_type = other DNA
gctcggcgagtgtgtgcgcg

SEQ ID NO: 17593 - DNA, 20 bp, synthetic construct
  source 1..20: mol_type = other DNA
cgagtgtgtgcgcgaggagg

SEQ ID NO: 17594 - DNA, 20 bp, synthetic construct
  source 1..20: mol_type = other DNA
tcacggcggaggggcgcgcg

SEQ ID NO: 17595 - DNA, 20 bp, synthetic construct
  source 1..20: mol_type = other DNA
ggctcacagaagatagcccc

SEQ ID NO: 17596 - DNA, 20 bp, synthetic construct
  source 1..20: mol_type = other DNA
aaagccagcagcctgcaatg

SEQ ID NO: 17597 - DNA, 20 bp, synthetic construct
  source 1..20: mol_type = other DNA
acttgcagcaaggcttgctg

SEQ ID NO: 17598 - DNA, 20 bp, synthetic construct
  source 1..20: mol_type = other DNA
ttctctgaagacttgcagca

SEQ ID NO: 17599 - DNA, 20 bp, synthetic construct
  source 1..20: mol_type = other DNA
agcagtagcaaccccattgc

SEQ ID NO: 17600 - DNA, 20 bp, synthetic construct
  source 1..20: mol_type = other DNA
ttatagtgtcattcacagct

SEQ ID NO: 17601 - DNA, 20 bp, synthetic construct
  source 1..20: mol_type = other DNA
tcagagaagcatgagctgtt

SEQ ID NO: 17602 - DNA, 20 bp, synthetic construct
  source 1..20: mol_type = other DNA
taaagccagcagcctgcaat

SEQ ID NO: 17603 - DNA, 20 bp, synthetic construct
  source 1..20: mol_type = other DNA
tgtttaaaaagacatacctg

SEQ ID NO: 17604 - DNA, 20 bp, synthetic construct
  source 1..20: mol_type = other DNA
agtgtttaaaaagacatacc

SEQ ID NO: 17605 - DNA, 20 bp, synthetic construct
  source 1..20: mol_type = other DNA
caatggggttgctactgctg

SEQ ID NO: 17606 - DNA, 20 bp, synthetic construct
  source 1..20: mol_type = other DNA
gtgtttaaaaagacatacct

SEQ ID NO: 17607 - DNA, 20 bp, synthetic construct
  source 1..20: mol_type = other DNA
gtaaagccagcagcctgcaa

SEQ ID NO: 17608 - DNA, 20 bp, synthetic construct
  source 1..20: mol_type = other DNA
taaaaccacacaaaaaggaa

SEQ ID NO: 17609 - DNA, 20 bp, synthetic construct
  source 1..20: mol_type = other DNA
gcaaccccattgcaggctgc

SEQ ID NO: 17610 - DNA, 20 bp, synthetic construct
  source 1..20: mol_type = other DNA
gattggtccaatgtgatgtg

SEQ ID NO: 17611 - DNA, 20 bp, synthetic construct
  source 1..20: mol_type = other DNA
gaagaagcgatcaattaaga

SEQ ID NO: 17612 - DNA, 20 bp, synthetic construct
  source 1..20: mol_type = other DNA
ctgaactcctcacatcacat

SEQ ID NO: 17613 - DNA, 20 bp, synthetic construct
  source 1..20: mol_type = other DNA
aaatttacaaaggcattagc

SEQ ID NO: 17614 - DNA, 20 bp, synthetic construct
  source 1..20: mol_type = other DNA
tcttctatgaaatgatagat

SEQ ID NO: 17615 - DNA, 20 bp, synthetic construct
  source 1..20: mol_type = other DNA
cagctatcaccaggctcggt

SEQ ID NO: 17616 - DNA, 20 bp, synthetic construct
  source 1..20: mol_type = other DNA
gaggagttcagttatgtgtt

SEQ ID NO: 17617 - DNA, 20 bp, synthetic construct
  source 1..20: mol_type = other DNA
ttggacaaccagctatcacc

SEQ ID NO: 17618 - DNA, 20 bp, synthetic construct
  source 1..20: mol_type = other DNA
cttaattgatcgcttcttct

SEQ ID NO: 17619 - DNA, 20 bp, synthetic construct
  source 1..20: mol_type = other DNA
gtgggaagattcataggtag

SEQ ID NO: 17620 - DNA, 20 bp, synthetic construct
  source 1..20: mol_type = other DNA
aaaaatataacttccaaagt

SEQ ID NO: 17621 - DNA, 20 bp, synthetic construct
  source 1..20: mol_type = other DNA
aaaatagtgggaagattcat

SEQ ID NO: 17622 - DNA, 20 bp, synthetic construct
  source 1..20: mol_type = other DNA
cgcttcttctaggccaactt

SEQ ID NO: 17623 - DNA, 20 bp, synthetic construct
  source 1..20: mol_type = other DNA
actaacagttaaatttacaa

SEQ ID NO: 17624 - DNA, 20 bp, synthetic construct
  source 1..20: mol_type = other DNA
ggtgacaagcctaccgagcc

SEQ ID NO: 17625 - DNA, 20 bp, synthetic construct
  source 1..20: mol_type = other DNA
gctgggatatggcttaacct

SEQ ID NO: 17626 - DNA, 20 bp, synthetic construct
  source 1..20: mol_type = other DNA
atggcttaaccttggaccct

SEQ ID NO: 17627 - DNA, 20 bp, synthetic construct
  source 1..20: mol_type = other DNA
gaagacattgcttgtatgca

SEQ ID NO: 17628 - DNA, 20 bp, synthetic construct
  source 1..20: mol_type = other DNA
tatcccagctcagtaaagcc

SEQ ID NO: 17629 - DNA, 20 bp, synthetic construct
  source 1..20: mol_type = other DNA
gttctccctatgaccttaag

SEQ ID NO: 17630 - DNA, 20 bp, synthetic construct
  source 1..20: mol_type = other DNA
ggctttactgagctgggata

SEQ ID NO: 17631 - DNA, 20 bp, synthetic construct
  source 1..20: mol_type = other DNA
tgtcatcctcttaaggtcat

SEQ ID NO: 17632 - DNA, 20 bp, synthetic construct
  source 1..20: mol_type = other DNA
gcaatgtcttcagaaaacct

SEQ ID NO: 17633 - DNA, 20 bp, synthetic construct
  source 1..20: mol_type = other DNA
gctcctggctttactgagct

SEQ ID NO: 17634 - DNA, 20 bp, synthetic construct
  source 1..20: mol_type = other DNA
ttgggaaatgaggatgctcc

SEQ ID NO: 17635 - DNA, 20 bp, synthetic construct
  source 1..20: mol_type = other DNA
agattgttgtcatcctctta

SEQ ID NO: 17636 - DNA, 20 bp, synthetic construct
  source 1..20: mol_type = other DNA
caatgtcttcagaaaaccta

SEQ ID NO: 17637 - DNA, 20 bp, synthetic construct
  source 1..20: mol_type = other DNA
ttcagaaaacctagggtcca

SEQ ID NO: 17638 - DNA, 20 bp, synthetic construct
  source 1..20: mol_type = other DNA
ttgacacagctgaagtttac

SEQ ID NO: 17639 - DNA, 20 bp, synthetic construct
  source 1..20: mol_type = other DNA
gtcatcctcttaaggtcata

SEQ ID NO: 17640 - DNA, 20 bp, synthetic construct
  source 1..20: mol_type = other DNA
gtagaaagacgttagtatgt

SEQ ID NO: 17641 - DNA, 20 bp, synthetic construct
  source 1..20: mol_type = other DNA
tggccgccaccagttctggt

SEQ ID NO: 17642 - DNA, 20 bp, synthetic construct
  source 1..20: mol_type = other DNA
tgcgaataccaaactggcag

SEQ ID NO: 17643 - DNA, 20 bp, synthetic construct
  source 1..20: mol_type = other DNA
tagagccaaccagcagctca

SEQ ID NO: 17644 - DNA, 20 bp, synthetic construct
  source 1..20: mol_type = other DNA
cagtggccaagctaagccaa

SEQ ID NO: 17645 - DNA, 20 bp, synthetic construct
  source 1..20: mol_type = other DNA
ccagtggccaagctaagcca

SEQ ID NO: 17646 - DNA, 20 bp, synthetic construct
  source 1..20: mol_type = other DNA
ggtagaaagacgttagtatg

SEQ ID NO: 17647 - DNA, 20 bp, synthetic construct
  source 1..20: mol_type = other DNA
tgtctctgcttgagcgccag

SEQ ID NO: 17648 - DNA, 20 bp, synthetic construct
  source 1..20: mol_type = other DNA
aagcagagacacagtgaaca

SEQ ID NO: 17649 - DNA, 20 bp, synthetic construct
  source 1..20: mol_type = other DNA
tgaataagctcatttctgac

SEQ ID NO: 17650 - DNA, 20 bp, synthetic construct
  source 1..20: mol_type = other DNA
gctcatttctgactggctac

SEQ ID NO: 17651 - DNA, 20 bp, synthetic construct
  source 1..20: mol_type = other DNA
tactaacgtctttctaccct

SEQ ID NO: 17652 - DNA, 20 bp, synthetic construct
  source 1..20: mol_type = other DNA
tttctacccttggcttagct

SEQ ID NO: 17653 - DNA, 20 bp, synthetic construct
  source 1..20: mol_type = other DNA
ttattcataaaagtgcagta

SEQ ID NO: 17654 - DNA, 20 bp, synthetic construct
  source 1..20: mol_type = other DNA
ccttggcttagcttggccac

SEQ ID NO: 17655 - DNA, 20 bp, synthetic construct
  source 1..20: mol_type = other DNA
aagcgggcgacgcgaaacga

SEQ ID NO: 17656 - DNA, 20 bp, synthetic construct
  source 1..20: mol_type = other DNA
tggagtgcgggtctctgctg

SEQ ID NO: 17657 - DNA, 20 bp, synthetic construct
  source 1..20: mol_type = other DNA
gtcgccgcacgctacaccgc

SEQ ID NO: 17658 - DNA, 20 bp, synthetic construct
  source 1..20: mol_type = other DNA
gcagagacccgcactccaca

SEQ ID NO: 17659 - DNA, 20 bp, synthetic construct
  source 1..20: mol_type = other DNA
gtctctgctgcggacgccgg

SEQ ID NO: 17660 - DNA, 20 bp, synthetic construct
  source 1..20: mol_type = other DNA
gccgagtgcagcgcgcccga

SEQ ID NO: 17661 - DNA, 20 bp, synthetic construct
  source 1..20: mol_type = other DNA
tgacgctcagccgggccttg

SEQ ID NO: 17662 - DNA, 20 bp, synthetic construct
  source 1..20: mol_type = other DNA
ggcgccggcggtgtagcgtg

SEQ ID NO: 17663 - DNA, 20 bp, synthetic construct
  source 1..20: mol_type = other DNA
cttccgcgcgaacaaaatgg

SEQ ID NO: 17664 - DNA, 20 bp, synthetic construct
  source 1..20: mol_type = other DNA
gcgacgcgaaacgacggcgc

SEQ ID NO: 17665 - DNA, 20 bp, synthetic construct
  source 1..20: mol_type = other DNA
gctgcactcggcgaggccgg

SEQ ID NO: 17666 - DNA, 20 bp, synthetic construct
  source 1..20: mol_type = other DNA
agccgggccttgtggagtgc

SEQ ID NO: 17667 - DNA, 20 bp, synthetic construct
  source 1..20: mol_type = other DNA
caaggcccggctgagcgtca

SEQ ID NO: 17668 - DNA, 20 bp, synthetic construct
  source 1..20: mol_type = other DNA
cgggcgcgctgcactcggcg

SEQ ID NO: 17669 - DNA, 20 bp, synthetic construct
  source 1..20: mol_type = other DNA
cagccgggccttgtggagtg

SEQ ID NO: 17670 - DNA, 20 bp, synthetic construct
  source 1..20: mol_type = other DNA
aggggccagcagggtgactg

SEQ ID NO: 17671 - DNA, 20 bp, synthetic construct
  source 1..20: mol_type = other DNA
cccgaagcatcacacatgtg

SEQ ID NO: 17672 - DNA, 20 bp, synthetic construct
  source 1..20: mol_type = other DNA
tgtgtggagcattctctagt

SEQ ID NO: 17673 - DNA, 20 bp, synthetic construct
  source 1..20: mol_type = other DNA
cattgaggatgctgccccag

SEQ ID NO: 17674 - DNA, 20 bp, synthetic construct
  source 1..20: mol_type = other DNA
ccagtgggaatctctgatga

SEQ ID NO: 17675 - DNA, 20 bp, synthetic construct
  source 1..20: mol_type = other DNA
gactggggcaggcgccatga

SEQ ID NO: 17676 - DNA, 20 bp, synthetic construct
  source 1..20: mol_type = other DNA
caataaacaggaagacttcg

SEQ ID NO: 17677 - DNA, 20 bp, synthetic construct
  source 1..20: mol_type = other DNA
cagtcaccctgctggcccct

SEQ ID NO: 17678 - DNA, 20 bp, synthetic construct
  source 1..20: mol_type = other DNA
acattgaggatgctgcccca

SEQ ID NO: 17679 - DNA, 20 bp, synthetic construct
  source 1..20: mol_type = other DNA
gacattgaggatgctgcccc

SEQ ID NO: 17680 - DNA, 20 bp, synthetic construct
  source 1..20: mol_type = other DNA
gggctggctgcaagacattg

SEQ ID NO: 17681 - DNA, 20 bp, synthetic construct
  source 1..20: mol_type = other DNA
gccagcccggtgcaataaac

SEQ ID NO: 17682 - DNA, 20 bp, synthetic construct
  source 1..20: mol_type = other DNA
agtcaccctgctggcccctg

SEQ ID NO: 17683 - DNA, 20 bp, synthetic construct
  source 1..20: mol_type = other DNA
atgctgccccaggggccagc

SEQ ID NO: 17684 - DNA, 20 bp, synthetic construct
  source 1..20: mol_type = other DNA
ccagtcaccctgctggcccc

SEQ ID NO: 17685 - DNA, 20 bp, synthetic construct
  source 1..20: mol_type = other DNA
gcgtcggcaccatgaggcga

SEQ ID NO: 17686 - DNA, 20 bp, synthetic construct
  source 1..20: mol_type = other DNA
gcggcggcgtcggcaccatg

SEQ ID NO: 17687 - DNA, 20 bp, synthetic construct
  source 1..20: mol_type = other DNA
cgacgccgccgcacaagctg

SEQ ID NO: 17688 - DNA, 20 bp, synthetic construct
  source 1..20: mol_type = other DNA
ggcgtcggcaccatgaggcg

SEQ ID NO: 17689 - DNA, 20 bp, synthetic construct
  source 1..20: mol_type = other DNA
agtccccgcagcttgtgcgg

SEQ ID NO: 17690 - DNA, 20 bp, synthetic construct
  source 1..20: mol_type = other DNA
ctcagtccccgcagcttgtg

SEQ ID NO: 17691 - DNA, 20 bp, synthetic construct
  source 1..20: mol_type = other DNA
aagcactcggccgggacgca

SEQ ID NO: 17692 - DNA, 20 bp, synthetic construct
  source 1..20: mol_type = other DNA
agcaggtcgaagcactcggc

SEQ ID NO: 17693 - DNA, 20 bp, synthetic construct
  source 1..20: mol_type = other DNA
tcggccgggacgcagggcgt

SEQ ID NO: 17694 - DNA, 20 bp, synthetic construct
  source 1..20: mol_type = other DNA
acgccgccgcacaagctgcg

SEQ ID NO: 17695 - DNA, 20 bp, synthetic construct
  source 1..20: mol_type = other DNA
gacgccgccgcacaagctgc

SEQ ID NO: 17696 - DNA, 20 bp, synthetic construct
  source 1..20: mol_type = other DNA
ggcgagggccccggagcctg

SEQ ID NO: 17697 - DNA, 20 bp, synthetic construct
  source 1..20: mol_type = other DNA
tccctgccccgcaggctccg

SEQ ID NO: 17698 - DNA, 20 bp, synthetic construct
  source 1..20: mol_type = other DNA
ggccgggacgcagggcgtgg

SEQ ID NO: 17699 - DNA, 20 bp, synthetic construct
  source 1..20: mol_type = other DNA
cgagggccccggagcctgcg

SEQ ID NO: 17700 - DNA, 20 bp, synthetic construct
  source 1..20: mol_type = other DNA
aaatagctctacttctatca

SEQ ID NO: 17701 - DNA, 20 bp, synthetic construct
  source 1..20: mol_type = other DNA
cattatcaaagatttacacc

SEQ ID NO: 17702 - DNA, 20 bp, synthetic construct
  source 1..20: mol_type = other DNA
ccaggccttaatcagaataa

SEQ ID NO: 17703 - DNA, 20 bp, synthetic construct
  source 1..20: mol_type = other DNA
caggccttaatcagaataaa

SEQ ID NO: 17704 - DNA, 20 bp, synthetic construct
  source 1..20: mol_type = other DNA
tatgcatacttggtgtcaaa

SEQ ID NO: 17705 - DNA, 20 bp, synthetic construct
  source 1..20: mol_type = other DNA
accaaagcaaagtaataaat

SEQ ID NO: 17706 - DNA, 20 bp, synthetic construct
  source 1..20: mol_type = other DNA
caaatggaagtctctgtaat

SEQ ID NO: 17707 - DNA, 20 bp, synthetic construct
  source 1..20: mol_type = other DNA
aagcaaagtaataaataggc

SEQ ID NO: 17708 - DNA, 20 bp, synthetic construct
  source 1..20: mol_type = other DNA
gcgtccctttattctgatta

SEQ ID NO: 17709 - DNA, 20 bp, synthetic construct
  source 1..20: mol_type = other DNA
agtaataaataggcaggaga

SEQ ID NO: 17710 - DNA, 20 bp, synthetic construct
  source 1..20: mol_type = other DNA
caattataggagtgaaataa

SEQ ID NO: 17711 - DNA, 20 bp, synthetic construct
  source 1..20: mol_type = other DNA
cctttattctgattaaggcc

SEQ ID NO: 17712 - DNA, 20 bp, synthetic construct
  source 1..20: mol_type = other DNA
tttctgcccttaactaaaac

SEQ ID NO: 17713 - DNA, 20 bp, synthetic construct
  source 1..20: mol_type = other DNA
gcctatttattactttgctt

SEQ ID NO: 17714 - DNA, 20 bp, synthetic construct
  source 1..20: mol_type = other DNA
actaaaactggatcaattat

SEQ ID NO: 17715 - DNA, 20 bp, synthetic construct
  source 1..20: mol_type = other DNA
ggagaagagcacgttgactg

SEQ ID NO: 17716 - DNA, 20 bp, synthetic construct
  source 1..20: mol_type = other DNA
gcaacccgataccatcggac

SEQ ID NO: 17717 - DNA, 20 bp, synthetic construct
  source 1..20: mol_type = other DNA
ttcccgcaacccgataccat

SEQ ID NO: 17718 - DNA, 20 bp, synthetic construct
  source 1..20: mol_type = other DNA
ggcagtcgttacctccccgt

SEQ ID NO: 17719 - DNA, 20 bp, synthetic construct
  source 1..20: mol_type = other DNA
ggcggagaaatcctgtccga

SEQ ID NO: 17720 - DNA, 20 bp, synthetic construct
  source 1..20: mol_type = other DNA
gcagtcgttacctccccgtt

SEQ ID NO: 17721 - DNA, 20 bp, synthetic construct
  source 1..20: mol_type = other DNA
ttctccgcctcagcccaacg

SEQ ID NO: 17722 - DNA, 20 bp, synthetic construct
  source 1..20: mol_type = other DNA
tacaacagctccactcgcgc

SEQ ID NO: 17723 - DNA, 20 bp, synthetic construct
  source 1..20: mol_type = other DNA
tccgcctcagcccaacgggg

SEQ ID NO: 17724 - DNA, 20 bp, synthetic construct
  source 1..20: mol_type = other DNA
ctccactcgcgccggacaca

SEQ ID NO: 17725 - DNA, 20 bp, synthetic construct
  source 1..20: mol_type = other DNA
gctccactcgcgccggacac

SEQ ID NO: 17726 - DNA, 20 bp, synthetic construct
  source 1..20: mol_type = other DNA
ggctgcctgggagtaggccg

SEQ ID NO: 17727 - DNA, 20 bp, synthetic construct
  source 1..20: mol_type = other DNA
gttacctccccgttgggctg

SEQ ID NO: 17728 - DNA, 20 bp, synthetic construct
  source 1..20: mol_type = other DNA
ctccctgtgtccggcgcgag

SEQ ID NO: 17729 - DNA, 20 bp, synthetic construct
  source 1..20: mol_type = other DNA
tgctcgctgctccctgtgtc

SEQ ID NO: 17730 - DNA, 20 bp, synthetic construct
  source 1..20: mol_type = other DNA
tgaatgtgtgatcaggttag

SEQ ID NO: 17731 - DNA, 20 bp, synthetic construct
  source 1..20: mol_type = other DNA
ggtgggatatgtgctcattg

SEQ ID NO: 17732 - DNA, 20 bp, synthetic construct
  source 1..20: mol_type = other DNA
taatcatcatgagaaataca

SEQ ID NO: 17733 - DNA, 20 bp, synthetic construct
  source 1..20: mol_type = other DNA
catagagtgaatgtgtgatc

SEQ ID NO: 17734 - DNA, 20 bp, synthetic construct
  source 1..20: mol_type = other DNA
caggttaggggtattgacag

SEQ ID NO: 17735 - DNA, 20 bp, synthetic construct
  source 1..20: mol_type = other DNA
aataaaggagagataggcca

SEQ ID NO: 17736 - DNA, 20 bp, synthetic construct
  source 1..20: mol_type = other DNA
gtgaatgtgtgatcaggtta

SEQ ID NO: 17737 - DNA, 20 bp, synthetic construct
  source 1..20: mol_type = other DNA
gtcccccatgtacctttccc

SEQ ID NO: 17738 - DNA, 20 bp, synthetic construct
  source 1..20: mol_type = other DNA
agtgaatgtgtgatcaggtt

SEQ ID NO: 17739 - DNA, 20 bp, synthetic construct
  source 1..20: mol_type = other DNA
aggagagataggccagggaa

SEQ ID NO: 17740 - DNA, 20 bp, synthetic construct
  source 1..20: mol_type = other DNA
ggtattgacagaggaatagc

SEQ ID NO: 17741 - DNA, 20 bp, synthetic construct
  source 1..20: mol_type = other DNA
atgagaaatacatggagaat

SEQ ID NO: 17742 - DNA, 20 bp, synthetic construct
  source 1..20: mol_type = other DNA
caataaaggagagataggcc

SEQ ID NO: 17743 - DNA, 20 bp, synthetic construct
  source 1..20: mol_type = other DNA
ggcatcaataaaggagagat

SEQ ID NO: 17744 - DNA, 20 bp, synthetic construct
  source 1..20: mol_type = other DNA
ggaatagcaggcatcaataa

SEQ ID NO: 17745 - DNA, 20 bp, synthetic construct
  source 1..20: mol_type = other DNA
ccaacggtggtaccaaccaa

SEQ ID NO: 17746 - DNA, 20 bp, synthetic construct
  source 1..20: mol_type = other DNA
cttggttggtaccaccgttg

SEQ ID NO: 17747 - DNA, 20 bp, synthetic construct
  source 1..20: mol_type = other DNA
gtaatcacctgccccaacgg

SEQ ID NO: 17748 - DNA, 20 bp, synthetic construct
  source 1..20: mol_type = other DNA
ggcacttcccgcgtatcccc

SEQ ID NO: 17749 - DNA, 20 bp, synthetic construct
  source 1..20: mol_type = other DNA
ctccagctgatactgatcca

SEQ ID NO: 17750 - DNA, 20 bp, synthetic construct
  source 1..20: mol_type = other DNA
gttggtaccaccgttggggc

SEQ ID NO: 17751 - DNA, 20 bp, synthetic construct
  source 1..20: mol_type = other DNA
tctgtaatcacctgccccaa

SEQ ID NO: 17752 - DNA, 20 bp, synthetic construct
  source 1..20: mol_type = other DNA
agtgagaaactgcatgtgtt

SEQ ID NO: 17753 - DNA, 20 bp, synthetic construct
  source 1..20: mol_type = other DNA
agggcttctgccttacctga

SEQ ID NO: 17754 - DNA, 20 bp, synthetic construct
  source 1..20: mol_type = other DNA
tcaggtaaggcagaagccct

SEQ ID NO: 17755 - DNA, 20 bp, synthetic construct
  source 1..20: mol_type = other DNA
gtaaggcagaagcccttggt

SEQ ID NO: 17756 - DNA, 20 bp, synthetic construct
  source 1..20: mol_type = other DNA
tgatccagggccatcaggta

SEQ ID NO: 17757 - DNA, 20 bp, synthetic construct
  source 1..20: mol_type = other DNA
cccaacggtggtaccaacca

SEQ ID NO: 17758 - DNA, 20 bp, synthetic construct
  source 1..20: mol_type = other DNA
tctgccttacctgatggccc

SEQ ID NO: 17759 - DNA, 20 bp, synthetic construct
  source 1..20: mol_type = other DNA
aagtgagaaactgcatgtgt

SEQ ID NO: 17760 - DNA, 20 bp, synthetic construct
  source 1..20: mol_type = other DNA
tcggcgcgctggatagtgga

SEQ ID NO: 17761 - DNA, 20 bp, synthetic construct
  source 1..20: mol_type = other DNA
ggcttcggcgcgctggatag

SEQ ID NO: 17762 - DNA, 20 bp, synthetic construct
  source 1..20: mol_type = other DNA
caggtagcaaagccgagctc

SEQ ID NO: 17763 - DNA, 20 bp, synthetic construct
  source 1..20: mol_type = other DNA
gggcggagcggccaacatgg

SEQ ID NO: 17764 - DNA, 20 bp, synthetic construct
  source 1..20: mol_type = other DNA
gagacacaagaagcggatcc

SEQ ID NO: 17765 - DNA, 20 bp, synthetic construct
  source 1..20: mol_type = other DNA
aggtagcaaagccgagctct

SEQ ID NO: 17766 - DNA, 20 bp, synthetic construct
  source 1..20: mol_type = other DNA
accgggcggagcggccaaca

SEQ ID NO: 17767 - DNA, 20 bp, synthetic construct
  source 1..20: mol_type = other DNA
gcaaagccgagctctgggca

SEQ ID NO: 17768 - DNA, 20 bp, synthetic construct
  source 1..20: mol_type = other DNA
ggcgcgctggatagtggaag

SEQ ID NO: 17769 - DNA, 20 bp, synthetic construct
  source 1..20: mol_type = other DNA
tcagagggaaccgggcggag

SEQ ID NO: 17770 - DNA, 20 bp, synthetic construct
  source 1..20: mol_type = other DNA
agcaaagccgagctctgggc

SEQ ID NO: 17771 - DNA, 20 bp, synthetic construct
  source 1..20: mol_type = other DNA
aaagccgagctctgggcagg

SEQ ID NO: 17772 - DNA, 20 bp, synthetic construct
  source 1..20: mol_type = other DNA
gaagccccctgcccagagct

SEQ ID NO: 17773 - DNA, 20 bp, synthetic construct
  source 1..20: mol_type = other DNA
aacgcaggagacacaagaag

SEQ ID NO: 17774 - DNA, 20 bp, synthetic construct
  source 1..20: mol_type = other DNA
caaagccgagctctgggcag

SEQ ID NO: 17775 - DNA, 20 bp, synthetic construct
  source 1..20: mol_type = other DNA
ccagaggcctcacaaagcgt

SEQ ID NO: 17776 - DNA, 20 bp, synthetic construct
  source 1..20: mol_type = other DNA
ggccagacatgacgagcaag

SEQ ID NO: 17777 - DNA, 20 bp, synthetic construct
  source 1..20: mol_type = other DNA
tgtcgcgcagtactttacgg

SEQ ID NO: 17778 - DNA, 20 bp, synthetic construct
  source 1..20: mol_type = other DNA
gtctcacccaacgctttgtg

SEQ ID NO: 17779 - DNA, 20 bp, synthetic construct
  source 1..20: mol_type = other DNA
ggcgtgctctgtataggtca

SEQ ID NO: 17780 - DNA, 20 bp, synthetic construct
  source 1..20: mol_type = other DNA
gggaagggtcttggcaaagg

SEQ ID NO: 17781 - DNA, 20 bp, synthetic construct
  source 1..20: mol_type = other DNA
ggcgggaagggtcttggcaa

SEQ ID NO: 17782 - DNA, 20 bp, synthetic construct
  source 1..20: mol_type = other DNA
catctccggcctcatctacg

SEQ ID NO: 17783 - DNA, 20 bp, synthetic construct
  source 1..20: mol_type = other DNA
gacccttcccgcctttgccg

SEQ ID NO: 17784 - DNA, 20 bp, synthetic construct
  source 1..20: mol_type = other DNA
tgtctggccgcggcaaaggc

SEQ ID NO: 17785 - DNA, 20 bp, synthetic construct
  source 1..20: mol_type = other DNA
ctgtataggtcacggcgtcc

SEQ ID NO: 17786 - DNA, 20 bp, synthetic construct
  source 1..20: mol_type = other DNA
gtcatgtctggccgcggcaa

SEQ ID NO: 17787 - DNA, 20 bp, synthetic construct
  source 1..20: mol_type = other DNA
ggagactcgcggggtgctga

SEQ ID NO: 17788 - DNA, 20 bp, synthetic construct
  source 1..20: mol_type = other DNA
ttgctcgtcatgtctggccg

SEQ ID NO: 17789 - DNA, 20 bp, synthetic construct
  source 1..20: mol_type = other DNA
atgtctggccgcggcaaagg

SEQ ID NO: 17790 - DNA, 20 bp, synthetic construct
  source 1..20: mol_type = other DNA
gcctcgtcctgagcactcgg

SEQ ID NO: 17791 - DNA, 20 bp, synthetic construct
  source 1..20: mol_type = other DNA
gcctcagaaggtgtgagcag

SEQ ID NO: 17792 - DNA, 20 bp, synthetic construct
  source 1..20: mol_type = other DNA
gccactgctcacaccttctg

SEQ ID NO: 17793 - DNA, 20 bp, synthetic construct
  source 1..20: mol_type = other DNA
atagcgagctttccaagcat

SEQ ID NO: 17794 - DNA, 20 bp, synthetic construct
  source 1..20: mol_type = other DNA
gcctccgagtgctcaggacg

SEQ ID NO: 17795 - DNA, 20 bp, synthetic construct
  source 1..20: mol_type = other DNA
tccccaaccttggtggccca

SEQ ID NO: 17796 - DNA, 20 bp, synthetic construct
  source 1..20: mol_type = other DNA
aaagctcgctatgctgctgt

SEQ ID NO: 17797 - DNA, 20 bp, synthetic construct
  source 1..20: mol_type = other DNA
aggagtgcctccgagtgctc

SEQ ID NO: 17798 - DNA, 20 bp, synthetic construct
  source 1..20: mol_type = other DNA
acttggcagctccccaacct

SEQ ID NO: 17799 - DNA, 20 bp, synthetic construct
  source 1..20: mol_type = other DNA
tcacactccctgggccacca

SEQ ID NO: 17800 - DNA, 20 bp, synthetic construct
  source 1..20: mol_type = other DNA
tggcagctccccaaccttgg

SEQ ID NO: 17801 - DNA, 20 bp, synthetic construct
  source 1..20: mol_type = other DNA
ttggtggcccagggagtgtg

SEQ ID NO: 17802 - DNA, 20 bp, synthetic construct
  source 1..20: mol_type = other DNA
tccctgggccaccaaggttg

SEQ ID NO: 17803 - DNA, 20 bp, synthetic construct
  source 1..20: mol_type = other DNA
tatgctgctgtgggtccagc

SEQ ID NO: 17804 - DNA, 20 bp, synthetic construct
  source 1..20: mol_type = other DNA
ggactgattgcaggaaaact

SEQ ID NO: 17805 - DNA, 20 bp, synthetic construct
  source 1..20: mol_type = other DNA
ggtcgctcgctcggtcccgt

SEQ ID NO: 17806 - DNA, 20 bp, synthetic construct
  source 1..20: mol_type = other DNA
acgcgccggagcgggaccga

SEQ ID NO: 17807 - DNA, 20 bp, synthetic construct
  source 1..20: mol_type = other DNA
gtgcgggccccaagcggctg

SEQ ID NO: 17808 - DNA, 20 bp, synthetic construct
  source 1..20: mol_type = other DNA
ggaagtggaggagctgctgc

SEQ ID NO: 17809 - DNA, 20 bp, synthetic construct
  source 1..20: mol_type = other DNA
ggcgtcggcgggtggcgcgt

SEQ ID NO: 17810 - DNA, 20 bp, synthetic construct
  source 1..20: mol_type = other DNA
aggagctgctgctggtgctg

SEQ ID NO: 17811 - DNA, 20 bp, synthetic construct
  source 1..20: mol_type = other DNA
cctcccctcccccacccttg

SEQ ID NO: 17812 - DNA, 20 bp, synthetic construct
  source 1..20: mol_type = other DNA
ggaggagggacgcgccggag

SEQ ID NO: 17813 - DNA, 20 bp, synthetic construct
  source 1..20: mol_type = other DNA
gctgctggtgctggggccgg

SEQ ID NO: 17814 - DNA, 20 bp, synthetic construct
  source 1..20: mol_type = other DNA
ccaagcggctgaggcgtcgg

SEQ ID NO: 17815 - DNA, 20 bp, synthetic construct
  source 1..20: mol_type = other DNA
gggccggaggagggacgcgc

SEQ ID NO: 17816 - DNA, 20 bp, synthetic construct
  source 1..20: mol_type = other DNA
gaggagggacgcgccggagc

SEQ ID NO: 17817 - DNA, 20 bp, synthetic construct
  source 1..20: mol_type = other DNA
gccccaagcggctgaggcgt

SEQ ID NO: 17818 - DNA, 20 bp, synthetic construct
  source 1..20: mol_type = other DNA
caagcggctgaggcgtcggc

SEQ ID NO: 17819 - DNA, 20 bp, synthetic construct
  source 1..20: mol_type = other DNA
gggaggggccgcaagggtgg

SEQ ID NO: 17820 - DNA, 20 bp, synthetic construct
  source 1..20: mol_type = other DNA
atttatcgggtgcccatgtg

SEQ ID NO: 17821 - DNA, 20 bp, synthetic construct
  source 1..20: mol_type = other DNA
tttatcgggtgcccatgtgg

SEQ ID NO: 17822 - DNA, 20 bp, synthetic construct
  source 1..20: mol_type = other DNA
cagtggcataacttgctggg

SEQ ID NO: 17823 - DNA, 20 bp, synthetic construct
  source 1..20: mol_type = other DNA
aatttatcgggtgcccatgt

SEQ ID NO: 17824 - DNA, 20 bp, synthetic construct
  source 1..20: mol_type = other DNA
tcgcagtggcataacttgct

SEQ ID NO: 17825 - DNA, 20 bp, synthetic construct
  source 1..20: mol_type = other DNA
cagcatatgtagtacttcag

SEQ ID NO: 17826 - DNA, 20 bp, synthetic construct
  source 1..20: mol_type = other DNA
gtcgcagtggcataacttgc

SEQ ID NO: 17827 - DNA, 20 bp, synthetic construct
  source 1..20: mol_type = other DNA
ccccacccccacccccacat

SEQ ID NO: 17828 - DNA, 20 bp, synthetic construct
  source 1..20: mol_type = other DNA
ctctctgacttctgtcgcag

SEQ ID NO: 17829 - DNA, 20 bp, synthetic construct
  source 1..20: mol_type = other DNA
attgaagttaaaggttactt

SEQ ID NO: 17830 - DNA, 20 bp, synthetic construct
  source 1..20: mol_type = other DNA
tcgggtgcccatgtgggggt

SEQ ID NO: 17831 - DNA, 20 bp, synthetic construct
  source 1..20: mol_type = other DNA
atcgggtgcccatgtggggg

SEQ ID NO: 17832 - DNA, 20 bp, synthetic construct
  source 1..20: mol_type = other DNA
aggttactttggagtttgtt

SEQ ID NO: 17833 - DNA, 20 bp, synthetic construct
  source 1..20: mol_type = other DNA
agtttgtttggaaatgtgta

SEQ ID NO: 17834 - DNA, 20 bp, synthetic construct
  source 1..20: mol_type = other DNA
gggtgcccatgtgggggtgg

SEQ ID NO: 17835 - DNA, 20 bp, synthetic construct
  source 1..20: mol_type = other DNA
gggccgggtaccatggacgt

SEQ ID NO: 17836 - DNA, 20 bp, synthetic construct
  source 1..20: mol_type = other DNA
agccacactgccgtaaagtg

SEQ ID NO: 17837 - DNA, 20 bp, synthetic construct
  source 1..20: mol_type = other DNA
ctaacttctcatgccacccg

SEQ ID NO: 17838 - DNA, 20 bp, synthetic construct
  source 1..20: mol_type = other DNA
tgcactcacgcccagaccgc

SEQ ID NO: 17839 - DNA, 20 bp, synthetic construct
  source 1..20: mol_type = other DNA
cagaagttcgcccacgtcca

SEQ ID NO: 17840 - DNA, 20 bp, synthetic construct
  source 1..20: mol_type = other DNA
tcgcccacgtccatggtacc

SEQ ID NO: 17841 - DNA, 20 bp, synthetic construct
  source 1..20: mol_type = other DNA
tgggccgggtaccatggacg

SEQ ID NO: 17842 - DNA, 20 bp, synthetic construct
  source 1..20: mol_type = other DNA
ctgcactcacgcccagaccg

SEQ ID NO: 17843 - DNA, 20 bp, synthetic construct
  source 1..20: mol_type = other DNA
agggaagtggagtatttgct

SEQ ID NO: 17844 - DNA, 20 bp, synthetic construct
  source 1..20: mol_type = other DNA
atttgctgggccgggtacca

SEQ ID NO: 17845 - DNA, 20 bp, synthetic construct
  source 1..20: mol_type = other DNA
tgggcgtgagtgcagggaag

SEQ ID NO: 17846 - DNA, 20 bp, synthetic construct
  source 1..20: mol_type = other DNA
gcggtctgggcgtgagtgca

SEQ ID NO: 17847 - DNA, 20 bp, synthetic construct
  source 1..20: mol_type = other DNA
gaccgcgggcccgtcagccg

SEQ ID NO: 17848 - DNA, 20 bp, synthetic construct
  source 1..20: mol_type = other DNA
cggcagtgtggctggagccg

SEQ ID NO: 17849 - DNA, 20 bp, synthetic construct
  source 1..20: mol_type = other DNA
agccgcggctgacgggcccg

SEQ ID NO: 17850 - DNA, 20 bp, synthetic construct
  source 1..20: mol_type = other DNA
agggaacaaaggagcggaga

SEQ ID NO: 17851 - DNA, 20 bp, synthetic construct
  source 1..20: mol_type = other DNA
ctctcactctgacagcgccg

SEQ ID NO: 17852 - DNA, 20 bp, synthetic construct
  source 1..20: mol_type = other DNA
gaggggagagagttgggcga

SEQ ID NO: 17853 - DNA, 20 bp, synthetic construct
  source 1..20: mol_type = other DNA
atcttctggcagccggccgg

SEQ ID NO: 17854 - DNA, 20 bp, synthetic construct
  source 1..20: mol_type = other DNA
gggaacaaaggagcggagag

SEQ ID NO: 17855 - DNA, 20 bp, synthetic construct
  source 1..20: mol_type = other DNA
cgagcaggagcagggaacaa

SEQ ID NO: 17856 - DNA, 20 bp, synthetic construct
  source 1..20: mol_type = other DNA
aggagcagggaacaaaggag

SEQ ID NO: 17857 - DNA, 20 bp, synthetic construct
  source 1..20: mol_type = other DNA
aggtgcgccgagcaggagca

SEQ ID NO: 17858 - DNA, 20 bp, synthetic construct
  source 1..20: mol_type = other DNA
cagggaacaaaggagcggag

SEQ ID NO: 17859 - DNA, 20 bp, synthetic construct
  source 1..20: mol_type = other DNA
gaggtgcgccgagcaggagc

SEQ ID NO: 17860 - DNA, 20 bp, synthetic construct
  source 1..20: mol_type = other DNA
gggatcttctggcagccggc

SEQ ID NO: 17861 - DNA, 20 bp, synthetic construct
  source 1..20: mol_type = other DNA
aacaaaggagcggagagggg

SEQ ID NO: 17862 - DNA, 20 bp, synthetic construct
  source 1..20: mol_type = other DNA
ggaggggagagagttgggcg

SEQ ID NO: 17863 - DNA, 20 bp, synthetic construct
  source 1..20: mol_type = other DNA
gttgggcgagggagagcccc

SEQ ID NO: 17864 - DNA, 20 bp, synthetic construct
  source 1..20: mol_type = other DNA
acaaaggagcggagagggga

SEQ ID NO: 17865 - DNA, 20 bp, synthetic construct
  source 1..20: mol_type = other DNA
caggagcagaaacaagccgg

SEQ ID NO: 17866 - DNA, 20 bp, synthetic construct
  source 1..20: mol_type = other DNA
caggtgcgccaggaccacct

SEQ ID NO: 17867 - DNA, 20 bp, synthetic construct
  source 1..20: mol_type = other DNA
actgctcttcccggtcatgg

SEQ ID NO: 17868 - DNA, 20 bp, synthetic construct
  source 1..20: mol_type = other DNA
ggtgacggccgaggtggtcc

SEQ ID NO: 17869 - DNA, 20 bp, synthetic construct
  source 1..20: mol_type = other DNA
gaaagaggtagctcgggacg

SEQ ID NO: 17870 - DNA, 20 bp, synthetic construct
  source 1..20: mol_type = other DNA
cagcggcggtgcctcggagg

SEQ ID NO: 17871 - DNA, 20 bp, synthetic construct
  source 1..20: mol_type = other DNA
gatcagcggcggtgcctcgg

SEQ ID NO: 17872 - DNA, 20 bp, synthetic construct
  source 1..20: mol_type = other DNA
cggctggcgcctccatgacc

SEQ ID NO: 17873 - DNA, 20 bp, synthetic construct
  source 1..20: mol_type = other DNA
gtcatggaggcgccagccgc

SEQ ID NO: 17874 - DNA, 20 bp, synthetic construct
  source 1..20: mol_type = other DNA
gtcctggcgcacctgggcgg

SEQ ID NO: 17875 - DNA, 20 bp, synthetic construct
  source 1..20: mol_type = other DNA
accgggaagagcagtgcgcc

SEQ ID NO: 17876 - DNA, 20 bp, synthetic construct
  source 1..20: mol_type = other DNA
gccgggcagcgcctcctccg

SEQ ID NO: 17877 - DNA, 20 bp, synthetic construct
  source 1..20: mol_type = other DNA
gaggaggcgctgcccggcgc

SEQ ID NO: 17878 - DNA, 20 bp, synthetic construct
  source 1..20: mol_type = other DNA
caacaggagcagaaacaagc

SEQ ID NO: 17879 - DNA, 20 bp, synthetic construct
  source 1..20: mol_type = other DNA
gttgcttgggacttgggccc

SEQ ID NO: 17880 - DNA, 20 bp, synthetic construct
  source 1..20: mol_type = other DNA
acaaaccctcaccgaaccag

SEQ ID NO: 17881 - DNA, 20 bp, synthetic construct
  source 1..20: mol_type = other DNA
agtggccaccaccatgacaa

SEQ ID NO: 17882 - DNA, 20 bp, synthetic construct
  source 1..20: mol_type = other DNA
ggttcggtgagggtttgtgg

SEQ ID NO: 17883 - DNA, 20 bp, synthetic construct
  source 1..20: mol_type = other DNA
attctggtcccttgtcatgg

SEQ ID NO: 17884 - DNA, 20 bp, synthetic construct
  source 1..20: mol_type = other DNA
aagggaccagaatggaacct

SEQ ID NO: 17885 - DNA, 20 bp, synthetic construct
  source 1..20: mol_type = other DNA
caagggaccagaatggaacc

SEQ ID NO: 17886 - DNA, 20 bp, synthetic construct
  source 1..20: mol_type = other DNA
ggtggccactggttcggtga

SEQ ID NO: 17887 - DNA, 20 bp, synthetic construct
  source 1..20: mol_type = other DNA
tggtggccactggttcggtg

SEQ ID NO: 17888 - DNA, 20 bp, synthetic construct
  source 1..20: mol_type = other DNA
ccagaatggaacctgggaga

SEQ ID NO: 17889 - DNA, 20 bp, synthetic construct
  source 1..20: mol_type = other DNA
ctggtcccttgtcatggtgg

SEQ ID NO: 17890 - DNA, 20 bp, synthetic construct
  source 1..20: mol_type = other DNA
tgtggtggatggcaaggagc

SEQ ID NO: 17891 - DNA, 20 bp, synthetic construct
  source 1..20: mol_type = other DNA
ttcattactctccatctccc

SEQ ID NO: 17892 - DNA, 20 bp, synthetic construct
  source 1..20: mol_type = other DNA
cagtggccaccaccatgaca

SEQ ID NO: 17893 - DNA, 20 bp, synthetic construct
  source 1..20: mol_type = other DNA
accatgacaagggaccagaa

SEQ ID NO: 17894 - DNA, 20 bp, synthetic construct
  source 1..20: mol_type = other DNA
catggtggtggccactggtt

SEQ ID NO: 17895 - DNA, 20 bp, synthetic construct
  source 1..20: mol_type = other DNA
cgagcagtgtgatttctctg

SEQ ID NO: 17896 - DNA, 20 bp, synthetic construct
  source 1..20: mol_type = other DNA
agttaacataagtgctctgg

SEQ ID NO: 17897 - DNA, 20 bp, synthetic construct
  source 1..20: mol_type = other DNA
cctctgagacatccgaattg

SEQ ID NO: 17898 - DNA, 20 bp, synthetic construct
  source 1..20: mol_type = other DNA
ccacaattcggatgtctcag

SEQ ID NO: 17899 - DNA, 20 bp, synthetic construct
  source 1..20: mol_type = other DNA
cagtttgcaaaatcaagcta

SEQ ID NO: 17900 - DNA, 20 bp, synthetic construct
  source 1..20: mol_type = other DNA
tgttaacaatgcatccacag

SEQ ID NO: 17901 - DNA, 20 bp, synthetic construct
  source 1..20: mol_type = other DNA
aaaagtcgagcttacctctg

SEQ ID NO: 17902 - DNA, 20 bp, synthetic construct
  source 1..20: mol_type = other DNA
cacactgctcgcccacaatt

SEQ ID NO: 17903 - DNA, 20 bp, synthetic construct
  source 1..20: mol_type = other DNA
ctctgagacatccgaattgt

SEQ ID NO: 17904 - DNA, 20 bp, synthetic construct
  source 1..20: mol_type = other DNA
cacaattcggatgtctcaga

SEQ ID NO: 17905 - DNA, 20 bp, synthetic construct
  source 1..20: mol_type = other DNA
aattcggatgtctcagaggg

SEQ ID NO: 17906 - DNA, 20 bp, synthetic construct
  source 1..20: mol_type = other DNA
attcggatgtctcagaggga

SEQ ID NO: 17907 - DNA, 20 bp, synthetic construct
  source 1..20: mol_type = other DNA
caaaatcaagctatggctaa

SEQ ID NO: 17908 - DNA, 20 bp, synthetic construct
  source 1..20: mol_type = other DNA
tcggatgtctcagagggagg

SEQ ID NO: 17909 - DNA, 20 bp, synthetic construct
  source 1..20: mol_type = other DNA
ttcggatgtctcagagggag

SEQ ID NO: 17910 - DNA, 20 bp, synthetic construct
  source 1..20: mol_type = other DNA
ggcggctgcacgaagatcag

SEQ ID NO: 17911 - DNA, 20 bp, synthetic construct
  source 1..20: mol_type = other DNA
agcccgcagaagccgttcag

SEQ ID NO: 17912 - DNA, 20 bp, synthetic construct
  source 1..20: mol_type = other DNA
ggtggggtgtgtgtctaaag

SEQ ID NO: 17913 - DNA, 20 bp, synthetic construct
  source 1..20: mol_type = other DNA
agccgttcagaggacaccac

SEQ ID NO: 17914 - DNA, 20 bp, synthetic construct
  source 1..20: mol_type = other DNA
atatcgggttgagactcctg

SEQ ID NO: 17915 - DNA, 20 bp, synthetic construct
  source 1..20: mol_type = other DNA
tccgtgcgcccagcgtccca

SEQ ID NO: 17916 - DNA, 20 bp, synthetic construct
  source 1..20: mol_type = other DNA
cggcggctgcacgaagatca

SEQ ID NO: 17917 - DNA, 20 bp, synthetic construct
  source 1..20: mol_type = other DNA
acgctgggcgcacggacccg

SEQ ID NO: 17918 - DNA, 20 bp, synthetic construct
  source 1..20: mol_type = other DNA
cgatatgacacgcacctgct

SEQ ID NO: 17919 - DNA, 20 bp, synthetic construct
  source 1..20: mol_type = other DNA
ctgggcgcacggacccgcgg

SEQ ID NO: 17920 - DNA, 20 bp, synthetic construct
  source 1..20: mol_type = other DNA
ggcctgggccctgggacgct

SEQ ID NO: 17921 - DNA, 20 bp, synthetic construct
  source 1..20: mol_type = other DNA
gatcttcgtgcagccgccgc

SEQ ID NO: 17922 - DNA, 20 bp, synthetic construct
  source 1..20: mol_type = other DNA
gccctgggacgctgggcgca

SEQ ID NO: 17923 - DNA, 20 bp, synthetic construct
  source 1..20: mol_type = other DNA
tcccagggcccaggccgagc

SEQ ID NO: 17924 - DNA, 20 bp, synthetic construct
  source 1..20: mol_type = other DNA
tgatcttcgtgcagccgccg

SEQ ID NO: 17925 - DNA, 20 bp, synthetic construct
  source 1..20: mol_type = other DNA
gtcagccccaacaaagatgg

SEQ ID NO: 17926 - DNA, 20 bp, synthetic construct
  source 1..20: mol_type = other DNA
gcaagccaagaagtacgaga

SEQ ID NO: 17927 - DNA, 20 bp, synthetic construct
  source 1..20: mol_type = other DNA
gttgtcagccccaacaaaga

SEQ ID NO: 17928 - DNA, 20 bp, synthetic construct
  source 1..20: mol_type = other DNA
agtacgagaagggccaggcg

SEQ ID NO: 17929 - DNA, 20 bp, synthetic construct
  source 1..20: mol_type = other DNA
actgagacagactcgtcctc

SEQ ID NO: 17930 - DNA, 20 bp, synthetic construct
  source 1..20: mol_type = other DNA
caagccaagaagtacgagaa

SEQ ID NO: 17931 - DNA, 20 bp, synthetic construct
  source 1..20: mol_type = other DNA
caagaagtacgagaagggcc

SEQ ID NO: 17932 - DNA, 20 bp, synthetic construct
  source 1..20: mol_type = other DNA
aacaaagatggcggcagcgg

SEQ ID NO: 17933 - DNA, 20 bp, synthetic construct
  source 1..20: mol_type = other DNA
gatggcggcagcggaggcta

SEQ ID NO: 17934 - DNA, 20 bp, synthetic construct
  source 1..20: mol_type = other DNA
cccaacaaagatggcggcag

SEQ ID NO: 17935 - DNA, 20 bp, synthetic construct
  source 1..20: mol_type = other DNA
cgctgccgccatctttgttg

SEQ ID NO: 17936 - DNA, 20 bp, synthetic construct
  source 1..20: mol_type = other DNA
ctgagacagactcgtcctct

SEQ ID NO: 17937 - DNA, 20 bp, synthetic construct
  source 1..20: mol_type = other DNA
tccgctgccgccatctttgt

SEQ ID NO: 17938 - DNA, 20 bp, synthetic construct
  source 1..20: mol_type = other DNA
ctggcccttctcgtacttct

SEQ ID NO: 17939 - DNA, 20 bp, synthetic construct
  source 1..20: mol_type = other DNA
ccgctgccgccatctttgtt

SEQ ID NO: 17940 - DNA, 20 bp, synthetic construct
  source 1..20: mol_type = other DNA
aaggtaagtgcagatgactt

SEQ ID NO: 17941 - DNA, 20 bp, synthetic construct
  source 1..20: mol_type = other DNA
gaaacagaatcctatttgga

SEQ ID NO: 17942 - DNA, 20 bp, synthetic construct
  source 1..20: mol_type = other DNA
aggattctgtttcaacagca

SEQ ID NO: 17943 - DNA, 20 bp, synthetic construct
  source 1..20: mol_type = other DNA
ttgcaaatgcatgcagagca

SEQ ID NO: 17944 - DNA, 20 bp, synthetic construct
  source 1..20: mol_type = other DNA
ataaagcacacttaatttgt

SEQ ID NO: 17945 - DNA, 20 bp, synthetic construct
  source 1..20: mol_type = other DNA
taggattctgtttcaacagc

SEQ ID NO: 17946 - DNA, 20 bp, synthetic construct
  source 1..20: mol_type = other DNA
ctatttggaaggcagacatg

SEQ ID NO: 17947 - DNA, 20 bp, synthetic construct
  source 1..20: mol_type = other DNA
gtttcaacagcagggcagct

SEQ ID NO: 17948 - DNA, 20 bp, synthetic construct
  source 1..20: mol_type = other DNA
tgttgaaacagaatcctatt

SEQ ID NO: 17949 - DNA, 20 bp, synthetic construct
  source 1..20: mol_type = other DNA
cctaattcagaatcttcaaa

SEQ ID NO: 17950 - DNA, 20 bp, synthetic construct
  source 1..20: mol_type = other DNA
tgtttcaacagcagggcagc

SEQ ID NO: 17951 - DNA, 20 bp, synthetic construct
  source 1..20: mol_type = other DNA
tgctctgcatgcatttgcaa

SEQ ID NO: 17952 - DNA, 20 bp, synthetic construct
  source 1..20: mol_type = other DNA
gcatgcatttgcaaaggctc

SEQ ID NO: 17953 - DNA, 20 bp, synthetic construct
  source 1..20: mol_type = other DNA
ccatttgaagattctgaatt

SEQ ID NO: 17954 - DNA, 20 bp, synthetic construct
  source 1..20: mol_type = other DNA
cacatgtctgccttccaaat

SEQ ID NO: 17955 - DNA, 20 bp, synthetic construct
  source 1..20: mol_type = other DNA
cgtggcgcacatcccacgca

SEQ ID NO: 17956 - DNA, 20 bp, synthetic construct
  source 1..20: mol_type = other DNA
tctgtctctgtaattccccc

SEQ ID NO: 17957 - DNA, 20 bp, synthetic construct
  source 1..20: mol_type = other DNA
gataacagggtaaagggagt

SEQ ID NO: 17958 - DNA, 20 bp, synthetic construct
  source 1..20: mol_type = other DNA
gagccgccctccctggacag

SEQ ID NO: 17959 - DNA, 20 bp, synthetic construct
  source 1..20: mol_type = other DNA
acatttgcgggaacgcagag

SEQ ID NO: 17960 - DNA, 20 bp, synthetic construct
  source 1..20: mol_type = other DNA
cggagcgaagctggataaca

SEQ ID NO: 17961 - DNA, 20 bp, synthetic construct
  source 1..20: mol_type = other DNA
ggataacagggtaaagggag

SEQ ID NO: 17962 - DNA, 20 bp, synthetic construct
  source 1..20: mol_type = other DNA
ggggggcctctgtccaggga

SEQ ID NO: 17963 - DNA, 20 bp, synthetic construct
  source 1..20: mol_type = other DNA
acagggtaaagggagtgggt

SEQ ID NO: 17964 - DNA, 20 bp, synthetic construct
  source 1..20: mol_type = other DNA
gcagagcggagcgtggagag

SEQ ID NO: 17965 - DNA, 20 bp, synthetic construct
  source 1..20: mol_type = other DNA
cgggaacgcagagcggagcg

SEQ ID NO: 17966 - DNA, 20 bp, synthetic construct
  source 1..20: mol_type = other DNA
gaagctggataacagggtaa

SEQ ID NO: 17967 - DNA, 20 bp, synthetic construct
  source 1..20: mol_type = other DNA
tggggggcctctgtccaggg

SEQ ID NO: 17968 - DNA, 20 bp, synthetic construct
  source 1..20: mol_type = other DNA
tcgacccgagccgccctccc

SEQ ID NO: 17969 - DNA, 20 bp, synthetic construct
  source 1..20: mol_type = other DNA
aacagggtaaagggagtggg

SEQ ID NO: 17970 - DNA, 20 bp, synthetic construct
  source 1..20: mol_type = other DNA
gagctccccgcgatcatgca

SEQ ID NO: 17971 - DNA, 20 bp, synthetic construct
  source 1..20: mol_type = other DNA
tcaaacagatgcagcaacgt

SEQ ID NO: 17972 - DNA, 20 bp, synthetic construct
  source 1..20: mol_type = other DNA
gggtatgccttgcatgatcg

SEQ ID NO: 17973 - DNA, 20 bp, synthetic construct
  source 1..20: mol_type = other DNA
gtatgccttgcatgatcgcg

SEQ ID NO: 17974 - DNA, 20 bp, synthetic construct
  source 1..20: mol_type = other DNA
gcgatcatgcaaggcatacc

SEQ ID NO: 17975 - DNA, 20 bp, synthetic construct
  source 1..20: mol_type = other DNA
tcaagcagtgccagcctgtg

SEQ ID NO: 17976 - DNA, 20 bp, synthetic construct
  source 1..20: mol_type = other DNA
gtttgacagccaagaagccg

SEQ ID NO: 17977 - DNA, 20 bp, synthetic construct
  source 1..20: mol_type = other DNA
agcaacgtcggctcctgccg

SEQ ID NO: 17978 - DNA, 20 bp, synthetic construct
  source 1..20: mol_type = other DNA
agcagtgccagcctgtgcgg

SEQ ID NO: 17979 - DNA, 20 bp, synthetic construct
  source 1..20: mol_type = other DNA
acttcccggcttctctaggt

SEQ ID NO: 17980 - DNA, 20 bp, synthetic construct
  source 1..20: mol_type = other DNA
ggtatgccttgcatgatcgc

SEQ ID NO: 17981 - DNA, 20 bp, synthetic construct
  source 1..20: mol_type = other DNA
caggctggcactgcttgaag

SEQ ID NO: 17982 - DNA, 20 bp, synthetic construct
  source 1..20: mol_type = other DNA
ctcctgccgaggagcccaag

SEQ ID NO: 17983 - DNA, 20 bp, synthetic construct
  source 1..20: mol_type = other DNA
ggtcccgggatccgccgcac

SEQ ID NO: 17984 - DNA, 20 bp, synthetic construct
  source 1..20: mol_type = other DNA
gccaagaagccggggccagg

SEQ ID NO: 17985 - DNA, 20 bp, synthetic construct
  source 1..20: mol_type = other DNA
gggaagctgggactgcctgg

SEQ ID NO: 17986 - DNA, 20 bp, synthetic construct
  source 1..20: mol_type = other DNA
acagctgccctgccgccacc

SEQ ID NO: 17987 - DNA, 20 bp, synthetic construct
  source 1..20: mol_type = other DNA
aagctgggactgcctggtgg

SEQ ID NO: 17988 - DNA, 20 bp, synthetic construct
  source 1..20: mol_type = other DNA
gtggcggcagggcagctgtc

SEQ ID NO: 17989 - DNA, 20 bp, synthetic construct
  source 1..20: mol_type = other DNA
aaactgcttgctgttctcag

SEQ ID NO: 17990 - DNA, 20 bp, synthetic construct
  source 1..20: mol_type = other DNA
gttctcagcggccattgctc

SEQ ID NO: 17991 - DNA, 20 bp, synthetic construct
  source 1..20: mol_type = other DNA
gaagaggagcgctaagctgc

SEQ ID NO: 17992 - DNA, 20 bp, synthetic construct
  source 1..20: mol_type = other DNA
agaggagcgctaagctgccg

SEQ ID NO: 17993 - DNA, 20 bp, synthetic construct
  source 1..20: mol_type = other DNA
ccgcctacaaggacttcccc

SEQ ID NO: 17994 - DNA, 20 bp, synthetic construct
  source 1..20: mol_type = other DNA
gaggccagaagactggtttg

SEQ ID NO: 17995 - DNA, 20 bp, synthetic construct
  source 1..20: mol_type = other DNA
gcgggcctggggcgccacag

SEQ ID NO: 17996 - DNA, 20 bp, synthetic construct
  source 1..20: mol_type = other DNA
tctgtggcgccccaggcccg

SEQ ID NO: 17997 - DNA, 20 bp, synthetic construct
  source 1..20: mol_type = other DNA
aaccagtcttctggcctctg

SEQ ID NO: 17998 - DNA, 20 bp, synthetic construct
  source 1..20: mol_type = other DNA
ctgtggcgccccaggcccgc

SEQ ID NO: 17999 - DNA, 20 bp, synthetic construct
  source 1..20: mol_type = other DNA
tctggcctctgtggcgcccc

SEQ ID NO: 18000 - DNA, 20 bp, synthetic construct
  source 1..20: mol_type = other DNA
ccactccctgtcccgcatcg

SEQ ID NO: 18001 - DNA, 20 bp, synthetic construct
  source 1..20: mol_type = other DNA
ggtcacgggcggcaacgtga

SEQ ID NO: 18002 - DNA, 20 bp, synthetic construct
  source 1..20: mol_type = other DNA
atgaagtgcctggtcacggg

SEQ ID NO: 18003 - DNA, 20 bp, synthetic construct
  source 1..20: mol_type = other DNA
gcaacgtgaagggtgagtgc

SEQ ID NO: 18004 - DNA, 20 bp, synthetic construct
  source 1..20: mol_type = other DNA
ctgccccagcgctccgccag

SEQ ID NO: 18005 - DNA, 20 bp, synthetic construct
  source 1..20: mol_type = other DNA
ggaagggaccccggacccgg

SEQ ID NO: 18006 - DNA, 20 bp, synthetic construct
  source 1..20: mol_type = other DNA
tgggcagtgttggccgctgg

SEQ ID NO: 18007 - DNA, 20 bp, synthetic construct
  source 1..20: mol_type = other DNA
agctgggcagtgttggccgc

SEQ ID NO: 18008 - DNA, 20 bp, synthetic construct
  source 1..20: mol_type = other DNA
tggccgctggcggagcgctg

SEQ ID NO: 18009 - DNA, 20 bp, synthetic construct
  source 1..20: mol_type = other DNA
tcacgttgccgcccgtgacc

SEQ ID NO: 18010 - DNA, 20 bp, synthetic construct
  source 1..20: mol_type = other DNA
cgcggagagctgggcagtgt

SEQ ID NO: 18011 - DNA, 20 bp, synthetic construct
  source 1..20: mol_type = other DNA
gcgggaagggaccccggacc

SEQ ID NO: 18012 - DNA, 20 bp, synthetic construct
  source 1..20: mol_type = other DNA
agcatgaagtgcctggtcac

SEQ ID NO: 18013 - DNA, 20 bp, synthetic construct
  source 1..20: mol_type = other DNA
gtcacgggcggcaacgtgaa

SEQ ID NO: 18014 - DNA, 20 bp, synthetic construct
  source 1..20: mol_type = other DNA
cccggaggtcgcggagagct

SEQ ID NO: 18015 - DNA, 20 bp, synthetic construct
  source 1..20: mol_type = other DNA
tccgcttcagattaaagggg

SEQ ID NO: 18016 - DNA, 20 bp, synthetic construct
  source 1..20: mol_type = other DNA
cgcgctccccggctggaaag

SEQ ID NO: 18017 - DNA, 20 bp, synthetic construct
  source 1..20: mol_type = other DNA
cggcggtgcttgtttgtgcg

SEQ ID NO: 18018 - DNA, 20 bp, synthetic construct
  source 1..20: mol_type = other DNA
cgggttcgggctgcagacgg

SEQ ID NO: 18019 - DNA, 20 bp, synthetic construct
  source 1..20: mol_type = other DNA
cctccgcttcagattaaagg

SEQ ID NO: 18020 - DNA, 20 bp, synthetic construct
  source 1..20: mol_type = other DNA
tccccccctttaatctgaag

SEQ ID NO: 18021 - DNA, 20 bp, synthetic construct
  source 1..20: mol_type = other DNA
ctccgcttcagattaaaggg

SEQ ID NO: 18022 - DNA, 20 bp, synthetic construct
  source 1..20: mol_type = other DNA
ccccctttaatctgaagcgg

SEQ ID NO: 18023 - DNA, 20 bp, synthetic construct
  source 1..20: mol_type = other DNA
cccctttaatctgaagcgga

SEQ ID NO: 18024 - DNA, 20 bp, synthetic construct
  source 1..20: mol_type = other DNA
cggcggcactgggaaaatgg

SEQ ID NO: 18025 - DNA, 20 bp, synthetic construct
  source 1..20: mol_type = other DNA
gccaccgctcgccgagccgg

SEQ ID NO: 18026 - DNA, 20 bp, synthetic construct
  source 1..20: mol_type = other DNA
cccgccggctcggcgagcgg

SEQ ID NO: 18027 - DNA, 20 bp, synthetic construct
  source 1..20: mol_type = other DNA
gccggctcggcgagcggtgg

SEQ ID NO: 18028 - DNA, 20 bp, synthetic construct
  source 1..20: mol_type = other DNA
ggctcggcgagcggtggcgg

SEQ ID NO: 18029 - DNA, 20 bp, synthetic construct
  source 1..20: mol_type = other DNA
tcggcgagcggtggcggcgg

SEQ ID NO: 18030 - DNA, 20 bp, synthetic construct
  source 1..20: mol_type = other DNA
tggtcacagaaaacacaatg

SEQ ID NO: 18031 - DNA, 20 bp, synthetic construct
  source 1..20: mol_type = other DNA
gcaggctcctaagtcaatga

SEQ ID NO: 18032 - DNA, 20 bp, synthetic construct
  source 1..20: mol_type = other DNA
ctggccagtagaaagtacat

SEQ ID NO: 18033 - DNA, 20 bp, synthetic construct
  source 1..20: mol_type = other DNA
gcttgccacatagagcacag

SEQ ID NO: 18034 - DNA, 20 bp, synthetic construct
  source 1..20: mol_type = other DNA
ggatggagagaatcactcag

SEQ ID NO: 18035 - DNA, 20 bp, synthetic construct
  source 1..20: mol_type = other DNA
cagttggctggaccaatgga

SEQ ID NO: 18036 - DNA, 20 bp, synthetic construct
  source 1..20: mol_type = other DNA
actggccagtagaaagtaca

SEQ ID NO: 18037 - DNA, 20 bp, synthetic construct
  source 1..20: mol_type = other DNA
acatgggggagtgtaagtga

SEQ ID NO: 18038 - DNA, 20 bp, synthetic construct
  source 1..20: mol_type = other DNA
cagaggaaaacactaggagg

SEQ ID NO: 18039 - DNA, 20 bp, synthetic construct
  source 1..20: mol_type = other DNA
tctgggactcactcattcat

SEQ ID NO: 18040 - DNA, 20 bp, synthetic construct
  source 1..20: mol_type = other DNA
aacaggtcataaatcatctt

SEQ ID NO: 18041 - DNA, 20 bp, synthetic construct
  source 1..20: mol_type = other DNA
ggccagtagaaagtacatgg

SEQ ID NO: 18042 - DNA, 20 bp, synthetic construct
  source 1..20: mol_type = other DNA
gaacaggtcataaatcatct

SEQ ID NO: 18043 - DNA, 20 bp, synthetic construct
  source 1..20: mol_type = other DNA
tgagaactaagaaaatgggg

SEQ ID NO: 18044 - DNA, 20 bp, synthetic construct
  source 1..20: mol_type = other DNA
agcccagttggctggaccaa

SEQ ID NO: 18045 - DNA, 20 bp, synthetic construct
  source 1..20: mol_type = other DNA
cagacagaacctactatgtg

SEQ ID NO: 18046 - DNA, 20 bp, synthetic construct
  source 1..20: mol_type = other DNA
acagaacctactatgtgcgg

SEQ ID NO: 18047 - DNA, 20 bp, synthetic construct
  source 1..20: mol_type = other DNA
cagctgccgccgcacatagt

SEQ ID NO: 18048 - DNA, 20 bp, synthetic construct
  source 1..20: mol_type = other DNA
gcacatagtaggttctgtct

SEQ ID NO: 18049 - DNA, 20 bp, synthetic construct
  source 1..20: mol_type = other DNA
caaaaccgcttgcctcgcag

SEQ ID NO: 18050 - DNA, 20 bp, synthetic construct
  source 1..20: mol_type = other DNA
gtctcgccggaagcctgcgt

SEQ ID NO: 18051 - DNA, 20 bp, synthetic construct
  source 1..20: mol_type = other DNA
agtaggttctgtctgggact

SEQ ID NO: 18052 - DNA, 20 bp, synthetic construct
  source 1..20: mol_type = other DNA
cctccagctcagcccctgcg

SEQ ID NO: 18053 - DNA, 20 bp, synthetic construct
  source 1..20: mol_type = other DNA
gcagcgaggccgcccgacgc

SEQ ID NO: 18054 - DNA, 20 bp, synthetic construct
  source 1..20: mol_type = other DNA
actatgtgcggcggcagctg

SEQ ID NO: 18055 - DNA, 20 bp, synthetic construct
  source 1..20: mol_type = other DNA
cgccggaagcctgcgtcggg

SEQ ID NO: 18056 - DNA, 20 bp, synthetic construct
  source 1..20: mol_type = other DNA
cctcgcaggggctgagctgg

SEQ ID NO: 18057 - DNA, 20 bp, synthetic construct
  source 1..20: mol_type = other DNA
tggcgctgcagcggctgcag

SEQ ID NO: 18058 - DNA, 20 bp, synthetic construct
  source 1..20: mol_type = other DNA
ggcgggaaggcgggagctgg

SEQ ID NO: 18059 - DNA, 20 bp, synthetic construct
  source 1..20: mol_type = other DNA
tgtgcggcggcagctggggc

SEQ ID NO: 18060 - DNA, 20 bp, synthetic construct
  source 1..20: mol_type = other DNA
ctgcaggtccgcaatccgcg

SEQ ID NO: 18061 - DNA, 20 bp, synthetic construct
  source 1..20: mol_type = other DNA
tcagccccacctaacgcccc

SEQ ID NO: 18062 - DNA, 20 bp, synthetic construct
  source 1..20: mol_type = other DNA
cggattgcggacctgcaggg

SEQ ID NO: 18063 - DNA, 20 bp, synthetic construct
  source 1..20: mol_type = other DNA
acgcggattgcggacctgca

SEQ ID NO: 18064 - DNA, 20 bp, synthetic construct
  source 1..20: mol_type = other DNA
gagagcgccgggcctccacg

SEQ ID NO: 18065 - DNA, 20 bp, synthetic construct
  source 1..20: mol_type = other DNA
ggctccgggggcgttaggtg

SEQ ID NO: 18066 - DNA, 20 bp, synthetic construct
  source 1..20: mol_type = other DNA
tgcaccagcaaacactaaca

SEQ ID NO: 18067 - DNA, 20 bp, synthetic construct
  source 1..20: mol_type = other DNA
caggtccgcaatccgcgtgg

SEQ ID NO: 18068 - DNA, 20 bp, synthetic construct
  source 1..20: mol_type = other DNA
tcagcctgagaagggccggt

SEQ ID NO: 18069 - DNA, 20 bp, synthetic construct
  source 1..20: mol_type = other DNA
aacagggagaagccggaaag

SEQ ID NO: 18070 - DNA, 20 bp, synthetic construct
  source 1..20: mol_type = other DNA
acagggagaagccggaaagt

SEQ ID NO: 18071 - DNA, 20 bp, synthetic construct
  source 1..20: mol_type = other DNA
ccgggacctcagcctgagaa

SEQ ID NO: 18072 - DNA, 20 bp, synthetic construct
  source 1..20: mol_type = other DNA
cagggagaagccggaaagtg

SEQ ID NO: 18073 - DNA, 20 bp, synthetic construct
  source 1..20: mol_type = other DNA
actagcacatccctccctgc

SEQ ID NO: 18074 - DNA, 20 bp, synthetic construct
  source 1..20: mol_type = other DNA
ggattgcggacctgcaggga

SEQ ID NO: 18075 - DNA, 20 bp, synthetic construct
  source 1..20: mol_type = other DNA
ggtctgggtaaattgatgag

SEQ ID NO: 18076 - DNA, 20 bp, synthetic construct
  source 1..20: mol_type = other DNA
aaggtctgggtaaattgatg

SEQ ID NO: 18077 - DNA, 20 bp, synthetic construct
  source 1..20: mol_type = other DNA
tacccagaccttcaggaaag

SEQ ID NO: 18078 - DNA, 20 bp, synthetic construct
  source 1..20: mol_type = other DNA
atcagtggttatgcaaaagt

SEQ ID NO: 18079 - DNA, 20 bp, synthetic construct
  source 1..20: mol_type = other DNA
tcttctaattctctccagac

SEQ ID NO: 18080 - DNA, 20 bp, synthetic construct
  source 1..20: mol_type = other DNA
ttagaagagaacaatgcaga

SEQ ID NO: 18081 - DNA, 20 bp, synthetic construct
  source 1..20: mol_type = other DNA
gtgatggctgagaagcatcc

SEQ ID NO: 18082 - DNA, 20 bp, synthetic construct
  source 1..20: mol_type = other DNA
aggtctgggtaaattgatga

SEQ ID NO: 18083 - DNA, 20 bp, synthetic construct
  source 1..20: mol_type = other DNA
caggaaagtggtataggtgc

SEQ ID NO: 18084 - DNA, 20 bp, synthetic construct
  source 1..20: mol_type = other DNA
gaagaagaatccagcagaag

SEQ ID NO: 18085 - DNA, 20 bp, synthetic construct
  source 1..20: mol_type = other DNA
agaacaatgcagatggaccc

SEQ ID NO: 18086 - DNA, 20 bp, synthetic construct
  source 1..20: mol_type = other DNA
ctgaagaagaatccagcaga

SEQ ID NO: 18087 - DNA, 20 bp, synthetic construct
  source 1..20: mol_type = other DNA
tctgtccagtccccttctgc

SEQ ID NO: 18088 - DNA, 20 bp, synthetic construct
  source 1..20: mol_type = other DNA
gcctgctgcagtctcctgtc

SEQ ID NO: 18089 - DNA, 20 bp, synthetic construct
  source 1..20: mol_type = other DNA
tgaagaagaatccagcagaa

SEQ ID NO: 18090 - DNA, 20 bp, synthetic construct
  source 1..20: mol_type = other DNA
ccccacctaccagggatccg

SEQ ID NO: 18091 - DNA, 20 bp, synthetic construct
  source 1..20: mol_type = other DNA
aacgtcaacctcccaacgcg

SEQ ID NO: 18092 - DNA, 20 bp, synthetic construct
  source 1..20: mol_type = other DNA
ggcttctgcggagttgcccg

SEQ ID NO: 18093 - DNA, 20 bp, synthetic construct
  source 1..20: mol_type = other DNA
ggcagccccggatccctggt

SEQ ID NO: 18094 - DNA, 20 bp, synthetic construct
  source 1..20: mol_type = other DNA
ccgcggaccgtagcgcgctg

SEQ ID NO: 18095 - DNA, 20 bp, synthetic construct
  source 1..20: mol_type = other DNA
cgcggaccgtagcgcgctga

SEQ ID NO: 18096 - DNA, 20 bp, synthetic construct
  source 1..20: mol_type = other DNA
agccggcagccccggatccc

SEQ ID NO: 18097 - DNA, 20 bp, synthetic construct
  source 1..20: mol_type = other DNA
ccgcagaagccccagccccc

SEQ ID NO: 18098 - DNA, 20 bp, synthetic construct
  source 1..20: mol_type = other DNA
ccgtagcgcgctgagggcgc

SEQ ID NO: 18099 - DNA, 20 bp, synthetic construct
  source 1..20: mol_type = other DNA
ccaggacccagtggcgcagc

SEQ ID NO: 18100 - DNA, 20 bp, synthetic construct
  source 1..20: mol_type = other DNA
cccaggaccccaggacccag

SEQ ID NO: 18101 - DNA, 20 bp, synthetic construct
  source 1..20: mol_type = other DNA
actgggtcctggggtcctgg

SEQ ID NO: 18102 - DNA, 20 bp, synthetic construct
  source 1..20: mol_type = other DNA
ggctgcgccactgggtcctg

SEQ ID NO: 18103 - DNA, 20 bp, synthetic construct
  source 1..20: mol_type = other DNA
cgccccttccccacctacca

SEQ ID NO: 18104 - DNA, 20 bp, synthetic construct
  source 1..20: mol_type = other DNA
gccccagcccccaggacccc

SEQ ID NO: 18105 - DNA, 20 bp, synthetic construct
  source 1..20: mol_type = other DNA
ccagagccgatcagagcgcg

SEQ ID NO: 18106 - DNA, 20 bp, synthetic construct
  source 1..20: mol_type = other DNA
ggcgaagcgagccgctcggg

SEQ ID NO: 18107 - DNA, 20 bp, synthetic construct
  source 1..20: mol_type = other DNA
ggagaggggagccctcagcg

SEQ ID NO: 18108 - DNA, 20 bp, synthetic construct
  source 1..20: mol_type = other DNA
tcgggcgaagcgagccgctc

SEQ ID NO: 18109 - DNA, 20 bp, synthetic construct
  source 1..20: mol_type = other DNA
atcgggcgaagcgagccgct

SEQ ID NO: 18110 - DNA, 20 bp, synthetic construct
  source 1..20: mol_type = other DNA
cccgcgtcccgcctcccgag

SEQ ID NO: 18111 - DNA, 20 bp, synthetic construct
  source 1..20: mol_type = other DNA
gcggctgcggtgcctgggag

SEQ ID NO: 18112 - DNA, 20 bp, synthetic construct
  source 1..20: mol_type = other DNA
ggctgcggtgcctgggagag

SEQ ID NO: 18113 - DNA, 20 bp, synthetic construct
  source 1..20: mol_type = other DNA
ccgggagagcgggcgcagcg

SEQ ID NO: 18114 - DNA, 20 bp, synthetic construct
  source 1..20: mol_type = other DNA
ggagagcgggcgcagcgcgg

SEQ ID NO: 18115 - DNA, 20 bp, synthetic construct
  source 1..20: mol_type = other DNA
gctcgggaggcgggacgcgg

SEQ ID NO: 18116 - DNA, 20 bp, synthetic construct
  source 1..20: mol_type = other DNA
tgcgcccgctctcccggccc

SEQ ID NO: 18117 - DNA, 20 bp, synthetic construct
  source 1..20: mol_type = other DNA
ggccccggctgccccgctga

SEQ ID NO: 18118 - DNA, 20 bp, synthetic construct
  source 1..20: mol_type = other DNA
agagcgggcgcagcgcggcg

SEQ ID NO: 18119 - DNA, 20 bp, synthetic construct
  source 1..20: mol_type = other DNA
cggctgcggtgcctgggaga

SEQ ID NO: 18120 - DNA, 20 bp, synthetic construct
  source 1..20: mol_type = other DNA
agagcctcgccacaagccgg

SEQ ID NO: 18121 - DNA, 20 bp, synthetic construct
  source 1..20: mol_type = other DNA
ctaggggcgtactgagacat

SEQ ID NO: 18122 - DNA, 20 bp, synthetic construct
  source 1..20: mol_type = other DNA
tgcgtaccccatcaacatcg

SEQ ID NO: 18123 - DNA, 20 bp, synthetic construct
  source 1..20: mol_type = other DNA
acgatgttgatggggtacgc

SEQ ID NO: 18124 - DNA, 20 bp, synthetic construct
  source 1..20: mol_type = other DNA
ttcagagcctcgccacaagc

SEQ ID NO: 18125 - DNA, 20 bp, synthetic construct
  source 1..20: mol_type = other DNA
ggaggagcgcacggtctgtg

SEQ ID NO: 18126 - DNA, 20 bp, synthetic construct
  source 1..20: mol_type = other DNA
cctcttgaagtccgggctag

SEQ ID NO: 18127 - DNA, 20 bp, synthetic construct
  source 1..20: mol_type = other DNA
gctaggggcgtactgagaca

SEQ ID NO: 18128 - DNA, 20 bp, synthetic construct
  source 1..20: mol_type = other DNA
ggcgtactgagacatgggcg

SEQ ID NO: 18129 - DNA, 20 bp, synthetic construct
  source 1..20: mol_type = other DNA
tgagacatgggcgaggccgg

SEQ ID NO: 18130 - DNA, 20 bp, synthetic construct
  source 1..20: mol_type = other DNA
cgggagggcggaggagcgca

SEQ ID NO: 18131 - DNA, 20 bp, synthetic construct
  source 1..20: mol_type = other DNA
ccaaagccctcttgaagtcc

SEQ ID NO: 18132 - DNA, 20 bp, synthetic construct
  source 1..20: mol_type = other DNA
cgcacggtctgtgtggtctg

SEQ ID NO: 18133 - DNA, 20 bp, synthetic construct
  source 1..20: mol_type = other DNA
gggctctggccgccggcttg

SEQ ID NO: 18134 - DNA, 20 bp, synthetic construct
  source 1..20: mol_type = other DNA
cggcggcgccgggagggcgg

SEQ ID NO: 18135 - DNA, 20 bp, synthetic construct
  source 1..20: mol_type = other DNA
taggcgtcgggcctagcgag

SEQ ID NO: 18136 - DNA, 20 bp, synthetic construct
  source 1..20: mol_type = other DNA
ggagcgaactctgaagcctg

SEQ ID NO: 18137 - DNA, 20 bp, synthetic construct
  source 1..20: mol_type = other DNA
gagatgtccgggtagcgcca

SEQ ID NO: 18138 - DNA, 20 bp, synthetic construct
  source 1..20: mol_type = other DNA
caggggacaacgaggcacag

SEQ ID NO: 18139 - DNA, 20 bp, synthetic construct
  source 1..20: mol_type = other DNA
cggcaccctgagagatgtcc

SEQ ID NO: 18140 - DNA, 20 bp, synthetic construct
  source 1..20: mol_type = other DNA
tgcgggccccggcgacacgg

SEQ ID NO: 18141 - DNA, 20 bp, synthetic construct
  source 1..20: mol_type = other DNA
gcgggccccggcgacacgga

SEQ ID NO: 18142 - DNA, 20 bp, synthetic construct
  source 1..20: mol_type = other DNA
cgctacccggacatctctca

SEQ ID NO: 18143 - DNA, 20 bp, synthetic construct
  source 1..20: mol_type = other DNA
agatgtccgggtagcgccag

SEQ ID NO: 18144 - DNA, 20 bp, synthetic construct
  source 1..20: mol_type = other DNA
ggtagcgccaggggacaacg

SEQ ID NO: 18145 - DNA, 20 bp, synthetic construct
  source 1..20: mol_type = other DNA
gcaggaggcttctaggcgtc

SEQ ID NO: 18146 - DNA, 20 bp, synthetic construct
  source 1..20: mol_type = other DNA
ccggacatctctcagggtgc

SEQ ID NO: 18147 - DNA, 20 bp, synthetic construct
  source 1..20: mol_type = other DNA
ccggcaccctgagagatgtc

SEQ ID NO: 18148 - DNA, 20 bp, synthetic construct
  source 1..20: mol_type = other DNA
agagatgtccgggtagcgcc

SEQ ID NO: 18149 - DNA, 20 bp, synthetic construct
  source 1..20: mol_type = other DNA
agtccagatcttcatggtgc

SEQ ID NO: 18150 - DNA, 20 bp, synthetic construct
  source 1..20: mol_type = other DNA
agccatttccccgaacgccg

SEQ ID NO: 18151 - DNA, 20 bp, synthetic construct
  source 1..20: mol_type = other DNA
ctagccccgcgccatctcgg

SEQ ID NO: 18152 - DNA, 20 bp, synthetic construct
  source 1..20: mol_type = other DNA
aaatggctgcgagaccctag

SEQ ID NO: 18153 - DNA, 20 bp, synthetic construct
  source 1..20: mol_type = other DNA
cccgggacgccacttaccgc

SEQ ID NO: 18154 - DNA, 20 bp, synthetic construct
  source 1..20: mol_type = other DNA
tgggcggacggccaccgaga

SEQ ID NO: 18155 - DNA, 20 bp, synthetic construct
  source 1..20: mol_type = other DNA
tgcgagaccctagaggcctg

SEQ ID NO: 18156 - DNA, 20 bp, synthetic construct
  source 1..20: mol_type = other DNA
cctgcggtaagtggcgtccc

SEQ ID NO: 18157 - DNA, 20 bp, synthetic construct
  source 1..20: mol_type = other DNA
cgctcccgccgagaagatgg

SEQ ID NO: 18158 - DNA, 20 bp, synthetic construct
  source 1..20: mol_type = other DNA
gagagccgcggatcccgcac

SEQ ID NO: 18159 - DNA, 20 bp, synthetic construct
  source 1..20: mol_type = other DNA
ttccccgaacgccgcggagt

SEQ ID NO: 18160 - DNA, 20 bp, synthetic construct
  source 1..20: mol_type = other DNA
ggcctgcggcctgcggtaag

SEQ ID NO: 18161 - DNA, 20 bp, synthetic construct
  source 1..20: mol_type = other DNA
ccctagaggcctgcggcctg

SEQ ID NO: 18162 - DNA, 20 bp, synthetic construct
  source 1..20: mol_type = other DNA
gtggccgtccgcccactccg

SEQ ID NO: 18163 - DNA, 20 bp, synthetic construct
  source 1..20: mol_type = other DNA
cccgaacgccgcggagtggg

SEQ ID NO: 18164 - DNA, 20 bp, synthetic construct
  source 1..20: mol_type = other DNA
aacgccgcggagtgggcgga

SEQ ID NO: 18165 - DNA, 20 bp, synthetic construct
  source 1..20: mol_type = other DNA
ggagtctcgcgccagctgag

SEQ ID NO: 18166 - DNA, 20 bp, synthetic construct
  source 1..20: mol_type = other DNA
gctcgtactggagcgaagag

SEQ ID NO: 18167 - DNA, 20 bp, synthetic construct
  source 1..20: mol_type = other DNA
aagagcggcctcctgaagga

SEQ ID NO: 18168 - DNA, 20 bp, synthetic construct
  source 1..20: mol_type = other DNA
gtctcgcgccagctgagcgg

SEQ ID NO: 18169 - DNA, 20 bp, synthetic construct
  source 1..20: mol_type = other DNA
agagcggcctcctgaaggag

SEQ ID NO: 18170 - DNA, 20 bp, synthetic construct
  source 1..20: mol_type = other DNA
tcttcgctccagtacgagcg

SEQ ID NO: 18171 - DNA, 20 bp, synthetic construct
  source 1..20: mol_type = other DNA
agtacgagcgcgggccgtgg

SEQ ID NO: 18172 - DNA, 20 bp, synthetic construct
  source 1..20: mol_type = other DNA
cgggaggccggcctctgagg

SEQ ID NO: 18173 - DNA, 20 bp, synthetic construct
  source 1..20: mol_type = other DNA
gcgcgtggccgagcgagctt

SEQ ID NO: 18174 - DNA, 20 bp, synthetic construct
  source 1..20: mol_type = other DNA
ccagctgagcggcggtcggg

SEQ ID NO: 18175 - DNA, 20 bp, synthetic construct
  source 1..20: mol_type = other DNA
tgcgggaggccggcctctga

SEQ ID NO: 18176 - DNA, 20 bp, synthetic construct
  source 1..20: mol_type = other DNA
gcgggaggccggcctctgag

SEQ ID NO: 18177 - DNA, 20 bp, synthetic construct
  source 1..20: mol_type = other DNA
gtgcgggaggccggcctctg

SEQ ID NO: 18178 - DNA, 20 bp, synthetic construct
  source 1..20: mol_type = other DNA
cacgcgccccgccccctcag

SEQ ID NO: 18179 - DNA, 20 bp, synthetic construct
  source 1..20: mol_type = other DNA
gctgagcggcggtcgggcgg

SEQ ID NO: 18180 - DNA, 20 bp, synthetic construct
  source 1..20: mol_type = other DNA
ttggtaggaggacatgacta

SEQ ID NO: 18181 - DNA, 20 bp, synthetic construct
  source 1..20: mol_type = other DNA
acctgctttaacccttcccc

SEQ ID NO: 18182 - DNA, 20 bp, synthetic construct
  source 1..20: mol_type = other DNA
ggagtctctgaagagagctg

SEQ ID NO: 18183 - DNA, 20 bp, synthetic construct
  source 1..20: mol_type = other DNA
atggggacaatgggaacctg

SEQ ID NO: 18184 - DNA, 20 bp, synthetic construct
  source 1..20: mol_type = other DNA
acctggggaagggttaaagc

SEQ ID NO: 18185 - DNA, 20 bp, synthetic construct
  source 1..20: mol_type = other DNA
tctgggcaggggcttattgt

SEQ ID NO: 18186 - DNA, 20 bp, synthetic construct
  source 1..20: mol_type = other DNA
tggtaggaggacatgactat

SEQ ID NO: 18187 - DNA, 20 bp, synthetic construct
  source 1..20: mol_type = other DNA
tatggggacaatgggaacct

SEQ ID NO: 18188 - DNA, 20 bp, synthetic construct
  source 1..20: mol_type = other DNA
ggacaatgggaacctgggga

SEQ ID NO: 18189 - DNA, 20 bp, synthetic construct
  source 1..20: mol_type = other DNA
taagcccctgcccagagatg

SEQ ID NO: 18190 - DNA, 20 bp, synthetic construct
  source 1..20: mol_type = other DNA
cctgcccagagatgagggaa

SEQ ID NO: 18191 - DNA, 20 bp, synthetic construct
  source 1..20: mol_type = other DNA
aagcccctgcccagagatga

SEQ ID NO: 18192 - DNA, 20 bp, synthetic construct
  source 1..20: mol_type = other DNA
ggtaggaggacatgactatg

SEQ ID NO: 18193 - DNA, 20 bp, synthetic construct
  source 1..20: mol_type = other DNA
gacaatgggaacctggggaa

SEQ ID NO: 18194 - DNA, 20 bp, synthetic construct
  source 1..20: mol_type = other DNA
ggacatgactatggggacaa

SEQ ID NO: 18195 - DNA, 20 bp, synthetic construct
  source 1..20: mol_type = other DNA
gctgaggtaacggcacacga

SEQ ID NO: 18196 - DNA, 20 bp, synthetic construct
  source 1..20: mol_type = other DNA
atgtctcacacactgactag

SEQ ID NO: 18197 - DNA, 20 bp, synthetic construct
  source 1..20: mol_type = other DNA
gccgttacctcagccccagg

SEQ ID NO: 18198 - DNA, 20 bp, synthetic construct
  source 1..20: mol_type = other DNA
gcgtgcgcagaaggcctggt

SEQ ID NO: 18199 - DNA, 20 bp, synthetic construct
  source 1..20: mol_type = other DNA
tatgtctcacacactgacta

SEQ ID NO: 18200 - DNA, 20 bp, synthetic construct
  source 1..20: mol_type = other DNA
ccagctcctaagcaacttcg

SEQ ID NO: 18201 - DNA, 20 bp, synthetic construct
  source 1..20: mol_type = other DNA
cacgagccccgaagttgctt

SEQ ID NO: 18202 - DNA, 20 bp, synthetic construct
  source 1..20: mol_type = other DNA
ccccgaagttgcttaggagc

SEQ ID NO: 18203 - DNA, 20 bp, synthetic construct
  source 1..20: mol_type = other DNA
gtaacggcacacgacggccc

SEQ ID NO: 18204 - DNA, 20 bp, synthetic construct
  source 1..20: mol_type = other DNA
tgtgccgttacctcagcccc

SEQ ID NO: 18205 - DNA, 20 bp, synthetic construct
  source 1..20: mol_type = other DNA
ggccgagcctgggaaccacc

SEQ ID NO: 18206 - DNA, 20 bp, synthetic construct
  source 1..20: mol_type = other DNA
cgcgtgcgcagaaggcctgg

SEQ ID NO: 18207 - DNA, 20 bp, synthetic construct
  source 1..20: mol_type = other DNA
gccgagcctgggaaccacct

SEQ ID NO: 18208 - DNA, 20 bp, synthetic construct
  source 1..20: mol_type = other DNA
ccgagcctgggaaccacctg

SEQ ID NO: 18209 - DNA, 20 bp, synthetic construct
  source 1..20: mol_type = other DNA
cagaaggcctggtgggtgcg

SEQ ID NO: 18210 - DNA, 20 bp, synthetic construct
  source 1..20: mol_type = other DNA
tcgctctctcgcgccagcgc

SEQ ID NO: 18211 - DNA, 20 bp, synthetic construct
  source 1..20: mol_type = other DNA
cagctgcgtctgcccgagcg

SEQ ID NO: 18212 - DNA, 20 bp, synthetic construct
  source 1..20: mol_type = other DNA
cgcgctcgggcagacgcagc

SEQ ID NO: 18213 - DNA, 20 bp, synthetic construct
  source 1..20: mol_type = other DNA
cagcaggcagaacggctgcg

SEQ ID NO: 18214 - DNA, 20 bp, synthetic construct
  source 1..20: mol_type = other DNA
gcggcacgtgctcccggcgc

SEQ ID NO: 18215 - DNA, 20 bp, synthetic construct
  source 1..20: mol_type = other DNA
cctcgaggagcggctgcctg

SEQ ID NO: 18216 - DNA, 20 bp, synthetic construct
  source 1..20: mol_type = other DNA
gcctgggggcgcaaggctca

SEQ ID NO: 18217 - DNA, 20 bp, synthetic construct
  source 1..20: mol_type = other DNA
agtgtcggcgatggaggcag

SEQ ID NO: 18218 - DNA, 20 bp, synthetic construct
  source 1..20: mol_type = other DNA
gagagcgagcgccaccgccg

SEQ ID NO: 18219 - DNA, 20 bp, synthetic construct
  source 1..20: mol_type = other DNA
atggaggcagcggtgacagc

SEQ ID NO: 18220 - DNA, 20 bp, synthetic construct
  source 1..20: mol_type = other DNA
gacagcaggcagaacggctg

SEQ ID NO: 18221 - DNA, 20 bp, synthetic construct
  source 1..20: mol_type = other DNA
agcggtgacagcaggcagaa

SEQ ID NO: 18222 - DNA, 20 bp, synthetic construct
  source 1..20: mol_type = other DNA
cagaacggctgcggggcccg

SEQ ID NO: 18223 - DNA, 20 bp, synthetic construct
  source 1..20: mol_type = other DNA
aacggctgcggggcccgcgg

SEQ ID NO: 18224 - DNA, 20 bp, synthetic construct
  source 1..20: mol_type = other DNA
acagcaggcagaacggctgc

SEQ ID NO: 18225 - DNA, 20 bp, synthetic construct
  source 1..20: mol_type = other DNA
aagacttgttaacaaaggag

SEQ ID NO: 18226 - DNA, 20 bp, synthetic construct
  source 1..20: mol_type = other DNA
gagcggagattccagaagca

SEQ ID NO: 18227 - DNA, 20 bp, synthetic construct
  source 1..20: mol_type = other DNA
catggtttactatttacatg

SEQ ID NO: 18228 - DNA, 20 bp, synthetic construct
  source 1..20: mol_type = other DNA
tggacttactggattgcatt

SEQ ID NO: 18229 - DNA, 20 bp, synthetic construct
  source 1..20: mol_type = other DNA
ctggacttactggattgcat

SEQ ID NO: 18230 - DNA, 20 bp, synthetic construct
  source 1..20: mol_type = other DNA
tttggaagacttgttaacaa

SEQ ID NO: 18231 - DNA, 20 bp, synthetic construct
  source 1..20: mol_type = other DNA
tcttccaaataaatgggctg

SEQ ID NO: 18232 - DNA, 20 bp, synthetic construct
  source 1..20: mol_type = other DNA
actggattgcattgggcaga

SEQ ID NO: 18233 - DNA, 20 bp, synthetic construct
  source 1..20: mol_type = other DNA
actcccacagcccatttatt

SEQ ID NO: 18234 - DNA, 20 bp, synthetic construct
  source 1..20: mol_type = other DNA
ctcttgtagcacaagattgc

SEQ ID NO: 18235 - DNA, 20 bp, synthetic construct
  source 1..20: mol_type = other DNA
tccatcaatttcttatgctt

SEQ ID NO: 18236 - DNA, 20 bp, synthetic construct
  source 1..20: mol_type = other DNA
taacaagtcttccaaataaa

SEQ ID NO: 18237 - DNA, 20 bp, synthetic construct
  source 1..20: mol_type = other DNA
cttccaaataaatgggctgt

SEQ ID NO: 18238 - DNA, 20 bp, synthetic construct
  source 1..20: mol_type = other DNA
aacaagtcttccaaataaat

SEQ ID NO: 18239 - DNA, 20 bp, synthetic construct
  source 1..20: mol_type = other DNA
taaatagtaaaccatgcttc

SEQ ID NO: 18240 - DNA, 20 bp, synthetic construct
  source 1..20: mol_type = other DNA
caatacttcccagaaggacg

SEQ ID NO: 18241 - DNA, 20 bp, synthetic construct
  source 1..20: mol_type = other DNA
actgggaccttcagcatgga

SEQ ID NO: 18242 - DNA, 20 bp, synthetic construct
  source 1..20: mol_type = other DNA
tccgctgctatgtcattacc

SEQ ID NO: 18243 - DNA, 20 bp, synthetic construct
  source 1..20: mol_type = other DNA
gatacccctgctgctcagac

SEQ ID NO: 18244 - DNA, 20 bp, synthetic construct
  source 1..20: mol_type = other DNA
ctgaactgggaccttcagca

SEQ ID NO: 18245 - DNA, 20 bp, synthetic construct
  source 1..20: mol_type = other DNA
cttgcccaatacttcccaga

SEQ ID NO: 18246 - DNA, 20 bp, synthetic construct
  source 1..20: mol_type = other DNA
atccctgagccagaaggcca

SEQ ID NO: 18247 - DNA, 20 bp, synthetic construct
  source 1..20: mol_type = other DNA
tccaggtaatgacatagcag

SEQ ID NO: 18248 - DNA, 20 bp, synthetic construct
  source 1..20: mol_type = other DNA
ctgctatgtcattacctgga

SEQ ID NO: 18249 - DNA, 20 bp, synthetic construct
  source 1..20: mol_type = other DNA
accttcagcatggagggcgg

SEQ ID NO: 18250 - DNA, 20 bp, synthetic construct
  source 1..20: mol_type = other DNA
atggagggcgggggttcaga

SEQ ID NO: 18251 - DNA, 20 bp, synthetic construct
  source 1..20: mol_type = other DNA
aactgggaccttcagcatgg

SEQ ID NO: 18252 - DNA, 20 bp, synthetic construct
  source 1..20: mol_type = other DNA
tgagccagaaggccagggca

SEQ ID NO: 18253 - DNA, 20 bp, synthetic construct
  source 1..20: mol_type = other DNA
gggaccttcagcatggaggg

SEQ ID NO: 18254 - DNA, 20 bp, synthetic construct
  source 1..20: mol_type = other DNA
ggtatcccccagccctgccc

SEQ ID NO: 18255 - DNA, 20 bp, synthetic construct
  source 1..20: mol_type = other DNA
cggctacgccgacacaacgg

SEQ ID NO: 18256 - DNA, 20 bp, synthetic construct
  source 1..20: mol_type = other DNA
aggcggctacgccgacacaa

SEQ ID NO: 18257 - DNA, 20 bp, synthetic construct
  source 1..20: mol_type = other DNA
gcccgacccgcactcacccg

SEQ ID NO: 18258 - DNA, 20 bp, synthetic construct
  source 1..20: mol_type = other DNA
gcagcctcccgccgttgtgt

SEQ ID NO: 18259 - DNA, 20 bp, synthetic construct
  source 1..20: mol_type = other DNA
ggctacgccgacacaacggc

SEQ ID NO: 18260 - DNA, 20 bp, synthetic construct
  source 1..20: mol_type = other DNA
ctgggcctgcagtgaccggg

SEQ ID NO: 18261 - DNA, 20 bp, synthetic construct
  source 1..20: mol_type = other DNA
acaacggcgggaggctgcag

SEQ ID NO: 18262 - DNA, 20 bp, synthetic construct
  source 1..20: mol_type = other DNA
tacgccgacacaacggcggg

SEQ ID NO: 18263 - DNA, 20 bp, synthetic construct
  source 1..20: mol_type = other DNA
ggctgcagcggtctgcgcgc

SEQ ID NO: 18264 - DNA, 20 bp, synthetic construct
  source 1..20: mol_type = other DNA
cgctggccgcgggtgagtgc

SEQ ID NO: 18265 - DNA, 20 bp, synthetic construct
  source 1..20: mol_type = other DNA
ggtctgcgcgccgggagcgg

SEQ ID NO: 18266 - DNA, 20 bp, synthetic construct
  source 1..20: mol_type = other DNA
tggctgggcctgcagtgacc

SEQ ID NO: 18267 - DNA, 20 bp, synthetic construct
  source 1..20: mol_type = other DNA
ggccgcgggtgagtgcgggt

SEQ ID NO: 18268 - DNA, 20 bp, synthetic construct
  source 1..20: mol_type = other DNA
ctgcagtgaccgggaggagg

SEQ ID NO: 18269 - DNA, 20 bp, synthetic construct
  source 1..20: mol_type = other DNA
tcggcgtagccgcctcctcc

SEQ ID NO: 18270 - DNA, 20 bp, synthetic construct
  source 1..20: mol_type = other DNA
gcctgcatctcgtacgccgt

SEQ ID NO: 18271 - DNA, 20 bp, synthetic construct
  source 1..20: mol_type = other DNA
ggcacggcagtctcagtgcg

SEQ ID NO: 18272 - DNA, 20 bp, synthetic construct
  source 1..20: mol_type = other DNA
ctgtgccagatgtacggcgg

SEQ ID NO: 18273 - DNA, 20 bp, synthetic construct
  source 1..20: mol_type = other DNA
cgcctgcatctcgtacgccg

SEQ ID NO: 18274 - DNA, 20 bp, synthetic construct
  source 1..20: mol_type = other DNA
tacctgtgccagatgtacgg

SEQ ID NO: 18275 - DNA, 20 bp, synthetic construct
  source 1..20: mol_type = other DNA
ctccgccgtacatctggcac

SEQ ID NO: 18276 - DNA, 20 bp, synthetic construct
  source 1..20: mol_type = other DNA
gccacccccaagccgagccg

SEQ ID NO: 18277 - DNA, 20 bp, synthetic construct
  source 1..20: mol_type = other DNA
gcgcactgagactgccgtgc

SEQ ID NO: 18278 - DNA, 20 bp, synthetic construct
  source 1..20: mol_type = other DNA
ccaggcgcgccgtcccaccc

SEQ ID NO: 18279 - DNA, 20 bp, synthetic construct
  source 1..20: mol_type = other DNA
gccgtgccggacccccgagc

SEQ ID NO: 18280 - DNA, 20 bp, synthetic construct
  source 1..20: mol_type = other DNA
ggcctcggcgcgctcggctc

SEQ ID NO: 18281 - DNA, 20 bp, synthetic construct
  source 1..20: mol_type = other DNA
caagccgagccggggtggga

SEQ ID NO: 18282 - DNA, 20 bp, synthetic construct
  source 1..20: mol_type = other DNA
gtcccaccccggctcggctt

SEQ ID NO: 18283 - DNA, 20 bp, synthetic construct
  source 1..20: mol_type = other DNA
gcgtcggcggcggaggcgcg

SEQ ID NO: 18284 - DNA, 20 bp, synthetic construct
  source 1..20: mol_type = other DNA
cccccaagccgagccggggt

SEQ ID NO: 18285 - DNA, 20 bp, synthetic construct
  source 1..20: mol_type = other DNA
ctagtgcgtcacgtcgtcgg

SEQ ID NO: 18286 - DNA, 20 bp, synthetic construct
  source 1..20: mol_type = other DNA
tagtgcgtcacgtcgtcgga

SEQ ID NO: 18287 - DNA, 20 bp, synthetic construct
  source 1..20: mol_type = other DNA
gcgctagtgcgtcacgtcgt

SEQ ID NO: 18288 - DNA, 20 bp, synthetic construct
  source 1..20: mol_type = other DNA
acgtcgtcggagggcacggt

SEQ ID NO: 18289 - DNA, 20 bp, synthetic construct
  source 1..20: mol_type = other DNA
cacgtcgtcggagggcacgg

SEQ ID NO: 18290 - DNA, 20 bp, synthetic construct
  source 1..20: mol_type = other DNA
gccgcggccgacccgcgacg

SEQ ID NO: 18291 - DNA, 20 bp, synthetic construct
  source 1..20: mol_type = other DNA
ggaggcagccgcactcgccc

SEQ ID NO: 18292 - DNA, 20 bp, synthetic construct
  source 1..20: mol_type = other DNA
cgcggctgccagggcgagtg

SEQ ID NO: 18293 - DNA, 20 bp, synthetic construct
  source 1..20: mol_type = other DNA
gccgacccgcgacgaggagc

SEQ ID NO: 18294 - DNA, 20 bp, synthetic construct
  source 1..20: mol_type = other DNA
tcctcgtcgcgggtcggccg

SEQ ID NO: 18295 - DNA, 20 bp, synthetic construct
  source 1..20: mol_type = other DNA
gacgaggagccgggcgtccg

SEQ ID NO: 18296 - DNA, 20 bp, synthetic construct
  source 1..20: mol_type = other DNA
gacgcccggctcctcgtcgc

SEQ ID NO: 18297 - DNA, 20 bp, synthetic construct
  source 1..20: mol_type = other DNA
ggacgcccggctcctcgtcg

SEQ ID NO: 18298 - DNA, 20 bp, synthetic construct
  source 1..20: mol_type = other DNA
cggctgcctcccgctcgccc

SEQ ID NO: 18299 - DNA, 20 bp, synthetic construct
  source 1..20: mol_type = other DNA
tcggagggcacggtgggccg

SEQ ID NO: 18300 - DNA, 20 bp, synthetic construct
  source 1..20: mol_type = other DNA
agcgcgcccaaaccagcccg

SEQ ID NO: 18301 - DNA, 20 bp, synthetic construct
  source 1..20: mol_type = other DNA
gccggaacggatgtccgcca

SEQ ID NO: 18302 - DNA, 20 bp, synthetic construct
  source 1..20: mol_type = other DNA
tccaggctgtgcccgacgtg

SEQ ID NO: 18303 - DNA, 20 bp, synthetic construct
  source 1..20: mol_type = other DNA
ggcggacatccgttccggca

SEQ ID NO: 18304 - DNA, 20 bp, synthetic construct
  source 1..20: mol_type = other DNA
gctgcttcctccatcgcgtg

SEQ ID NO: 18305 - DNA, 20 bp, synthetic construct
  source 1..20: mol_type = other DNA
ggcgacctcaaggatgccag

SEQ ID NO: 18306 - DNA, 20 bp, synthetic construct
  source 1..20: mol_type = other DNA
tcagaaccctctcatcgtca

SEQ ID NO: 18307 - DNA, 20 bp, synthetic construct
  source 1..20: mol_type = other DNA
gcccggacctcacgcgatgg

SEQ ID NO: 18308 - DNA, 20 bp, synthetic construct
  source 1..20: mol_type = other DNA
cctggcctctggcatccttg

SEQ ID NO: 18309 - DNA, 20 bp, synthetic construct
  source 1..20: mol_type = other DNA
tggcatccttgaggtcgccg

SEQ ID NO: 18310 - DNA, 20 bp, synthetic construct
  source 1..20: mol_type = other DNA
ctccaggctgtgcccgacgt

SEQ ID NO: 18311 - DNA, 20 bp, synthetic construct
  source 1..20: mol_type = other DNA
gctccaggctgtgcccgacg

SEQ ID NO: 18312 - DNA, 20 bp, synthetic construct
  source 1..20: mol_type = other DNA
gcgcgcccaaaccagcccgc

SEQ ID NO: 18313 - DNA, 20 bp, synthetic construct
  source 1..20: mol_type = other DNA
ccggcccggacctcacgcga

SEQ ID NO: 18314 - DNA, 20 bp, synthetic construct
  source 1..20: mol_type = other DNA
ccatcgcgtgaggtccgggc

SEQ ID NO: 18315 - DNA, 20 bp, synthetic construct
  source 1..20: mol_type = other DNA
gagcagcagcctctgaggtg

SEQ ID NO: 18316 - DNA, 20 bp, synthetic construct
  source 1..20: mol_type = other DNA
gtgggagcaaaaccaacgcc

SEQ ID NO: 18317 - DNA, 20 bp, synthetic construct
  source 1..20: mol_type = other DNA
tgctgctccgagccaggcgt

SEQ ID NO: 18318 - DNA, 20 bp, synthetic construct
  source 1..20: mol_type = other DNA
agcctctgaggtgagggcga

SEQ ID NO: 18319 - DNA, 20 bp, synthetic construct
  source 1..20: mol_type = other DNA
gcctctgaggtgagggcgag

SEQ ID NO: 18320 - DNA, 20 bp, synthetic construct
  source 1..20: mol_type = other DNA
gcccctcgccctcacctcag

SEQ ID NO: 18321 - DNA, 20 bp, synthetic construct
  source 1..20: mol_type = other DNA
ctggggcccggccggagtcg

SEQ ID NO: 18322 - DNA, 20 bp, synthetic construct
  source 1..20: mol_type = other DNA
ccgtcagagccgccatcttg

SEQ ID NO: 18323 - DNA, 20 bp, synthetic construct
  source 1..20: mol_type = other DNA
ggcccgtctgcgtccgcccc

SEQ ID NO: 18324 - DNA, 20 bp, synthetic construct
  source 1..20: mol_type = other DNA
ccacaagatggcggctctga

SEQ ID NO: 18325 - DNA, 20 bp, synthetic construct
  source 1..20: mol_type = other DNA
agcagcagcctctgaggtga

SEQ ID NO: 18326 - DNA, 20 bp, synthetic construct
  source 1..20: mol_type = other DNA
gctcggagcagcagcctctg

SEQ ID NO: 18327 - DNA, 20 bp, synthetic construct
  source 1..20: mol_type = other DNA
gacgggccgggctgaggctg

SEQ ID NO: 18328 - DNA, 20 bp, synthetic construct
  source 1..20: mol_type = other DNA
cgtccgcccagccccgactc

SEQ ID NO: 18329 - DNA, 20 bp, synthetic construct
  source 1..20: mol_type = other DNA
cgaggggcgcgggccggtgt

SEQ ID NO: 18330 - DNA, 20 bp, synthetic construct
  source 1..20: mol_type = other DNA
atacatcagccatatagaaa

SEQ ID NO: 18331 - DNA, 20 bp, synthetic construct
  source 1..20: mol_type = other DNA
tgactctcctcttgagtaaa

SEQ ID NO: 18332 - DNA, 20 bp, synthetic construct
  source 1..20: mol_type = other DNA
tagaaattatggtattctat

SEQ ID NO: 18333 - DNA, 20 bp, synthetic construct
  source 1..20: mol_type = other DNA
agaataccataatttctaat

SEQ ID NO: 18334 - DNA, 20 bp, synthetic construct
  source 1..20: mol_type = other DNA
aacagtcctattagaaatta

SEQ ID NO: 18335 - DNA, 20 bp, synthetic construct
  source 1..20: mol_type = other DNA
aaaatgtaaattatttattt

SEQ ID NO: 18336 - DNA, 20 bp, synthetic construct
  source 1..20: mol_type = other DNA
tgggggtcagacttccacag

SEQ ID NO: 18337 - DNA, 20 bp, synthetic construct
  source 1..20: mol_type = other DNA
ccatcatccacgccctccca

SEQ ID NO: 18338 - DNA, 20 bp, synthetic construct
  source 1..20: mol_type = other DNA
ggtgcgatgcacatgggtga

SEQ ID NO: 18339 - DNA, 20 bp, synthetic construct
  source 1..20: mol_type = other DNA
gggagggcgtggatgatggt

SEQ ID NO: 18340 - DNA, 20 bp, synthetic construct
  source 1..20: mol_type = other DNA
gggaaggtggggcgatgtgg

SEQ ID NO: 18341 - DNA, 20 bp, synthetic construct
  source 1..20: mol_type = other DNA
gggggtcagacttccacagt

SEQ ID NO: 18342 - DNA, 20 bp, synthetic construct
  source 1..20: mol_type = other DNA
ggtgatggaaatgaagactg

SEQ ID NO: 18343 - DNA, 20 bp, synthetic construct
  source 1..20: mol_type = other DNA
ggggtcagacttccacagtg

SEQ ID NO: 18344 - DNA, 20 bp, synthetic construct
  source 1..20: mol_type = other DNA
gggtgatggaaatgaagact

SEQ ID NO: 18345 - DNA, 20 bp, synthetic construct
  source 1..20: mol_type = other DNA
ggggaaggtggggcgatgtg

SEQ ID NO: 18346 - DNA, 20 bp, synthetic construct
  source 1..20: mol_type = other DNA
aatgaagactggggaaggtg

SEQ ID NO: 18347 - DNA, 20 bp, synthetic construct
  source 1..20: mol_type = other DNA
tgggagggcgtggatgatgg

SEQ ID NO: 18348 - DNA, 20 bp, synthetic construct
  source 1..20: mol_type = other DNA
tggtgagagggctccctggg

SEQ ID NO: 18349 - DNA, 20 bp, synthetic construct
  source 1..20: mol_type = other DNA
ggtgagagggctccctggga

SEQ ID NO: 18350 - DNA, 20 bp, synthetic construct
  source 1..20: mol_type = other DNA
accatcatccacgccctccc

SEQ ID NO: 18351 - DNA, 20 bp, synthetic construct
  source 1..20: mol_type = other DNA
ccgttggcggttggagaagg

SEQ ID NO: 18352 - DNA, 20 bp, synthetic construct
  source 1..20: mol_type = other DNA
atcccgctcgctccacgctg

SEQ ID NO: 18353 - DNA, 20 bp, synthetic construct
  source 1..20: mol_type = other DNA
cctcaggcgcaggcggccgt

SEQ ID NO: 18354 - DNA, 20 bp, synthetic construct
  source 1..20: mol_type = other DNA
caggcgcaggcggccgttgg

SEQ ID NO: 18355 - DNA, 20 bp, synthetic construct
  source 1..20: mol_type = other DNA
gccgttggcggttggagaag

SEQ ID NO: 18356 - DNA, 20 bp, synthetic construct
  source 1..20: mol_type = other DNA
cccccttctccaaccgccaa

SEQ ID NO: 18357 - DNA, 20 bp, synthetic construct
  source 1..20: mol_type = other DNA
gctccacgctgcggcagccc

SEQ ID NO: 18358 - DNA, 20 bp, synthetic construct
  source 1..20: mol_type = other DNA
gcagcgtggagcgagcggga

SEQ ID NO: 18359 - DNA, 20 bp, synthetic construct
  source 1..20: mol_type = other DNA
tgccgcagcgtggagcgagc

SEQ ID NO: 18360 - DNA, 20 bp, synthetic construct
  source 1..20: mol_type = other DNA
ggccgggcctcaggcgcagg

SEQ ID NO: 18361 - DNA, 20 bp, synthetic construct
  source 1..20: mol_type = other DNA
agcgtggagcgagcgggatg

SEQ ID NO: 18362 - DNA, 20 bp, synthetic construct
  source 1..20: mol_type = other DNA
ccaacggccgcctgcgcctg

SEQ ID NO: 18363 - DNA, 20 bp, synthetic construct
  source 1..20: mol_type = other DNA
gagcgagcgggatggggcgt

SEQ ID NO: 18364 - DNA, 20 bp, synthetic construct
  source 1..20: mol_type = other DNA
ccgccggggctgccgcagcg

SEQ ID NO: 18365 - DNA, 20 bp, synthetic construct
  source 1..20: mol_type = other DNA
gtgggccgggcctcaggcgc

SEQ ID NO: 18366 - DNA, 20 bp, synthetic construct
  source 1..20: mol_type = other DNA
gctgtgcctgaattccagca

SEQ ID NO: 18367 - DNA, 20 bp, synthetic construct
  source 1..20: mol_type = other DNA
ttatcgcagatgaagccacc

SEQ ID NO: 18368 - DNA, 20 bp, synthetic construct
  source 1..20: mol_type = other DNA
ctcatcagactcaaggcctg

SEQ ID NO: 18369 - DNA, 20 bp, synthetic construct
  source 1..20: mol_type = other DNA
gtatggcgttgtgcagatga

SEQ ID NO: 18370 - DNA, 20 bp, synthetic construct
  source 1..20: mol_type = other DNA
gggaatgtctggttacagta

SEQ ID NO: 18371 - DNA, 20 bp, synthetic construct
  source 1..20: mol_type = other DNA
ctagctcagctgtgatggga

SEQ ID NO: 18372 - DNA, 20 bp, synthetic construct
  source 1..20: mol_type = other DNA
tccagcagggaggaggcatg

SEQ ID NO: 18373 - DNA, 20 bp, synthetic construct
  source 1..20: mol_type = other DNA
tagctcagctgtgatgggaa

SEQ ID NO: 18374 - DNA, 20 bp, synthetic construct
  source 1..20: mol_type = other DNA
agctgtgatgggaagggagt

SEQ ID NO: 18375 - DNA, 20 bp, synthetic construct
  source 1..20: mol_type = other DNA
cctgaattccagcagggagg

SEQ ID NO: 18376 - DNA, 20 bp, synthetic construct
  source 1..20: mol_type = other DNA
acctcatgcctcctccctgc

SEQ ID NO: 18377 - DNA, 20 bp, synthetic construct
  source 1..20: mol_type = other DNA
cacagcatcagcatcacctc

SEQ ID NO: 18378 - DNA, 20 bp, synthetic construct
  source 1..20: mol_type = other DNA
aaagagttgttatcagtaga

SEQ ID NO: 18379 - DNA, 20 bp, synthetic construct
  source 1..20: mol_type = other DNA
cctcctccctgctggaattc

SEQ ID NO: 18380 - DNA, 20 bp, synthetic construct
  source 1..20: mol_type = other DNA
tgctgtgcctgaattccagc

SEQ ID NO: 18381 - DNA, 20 bp, synthetic construct
  source 1..20: mol_type = other DNA
agggccagtgtcttgctgag

SEQ ID NO: 18382 - DNA, 20 bp, synthetic construct
  source 1..20: mol_type = other DNA
gggcgctaagcctcagacag

SEQ ID NO: 18383 - DNA, 20 bp, synthetic construct
  source 1..20: mol_type = other DNA
ccggcccctcagcaagacac

SEQ ID NO: 18384 - DNA, 20 bp, synthetic construct
  source 1..20: mol_type = other DNA
acttcgcagccctgttccca

SEQ ID NO: 18385 - DNA, 20 bp, synthetic construct
  source 1..20: mol_type = other DNA
agcaagacactggccctctg

SEQ ID NO: 18386 - DNA, 20 bp, synthetic construct
  source 1..20: mol_type = other DNA
agagggccagtgtcttgctg

SEQ ID NO: 18387 - DNA, 20 bp, synthetic construct
  source 1..20: mol_type = other DNA
ggagggtcggggctctcgca

SEQ ID NO: 18388 - DNA, 20 bp, synthetic construct
  source 1..20: mol_type = other DNA
cctccggagccatgggaaca

SEQ ID NO: 18389 - DNA, 20 bp, synthetic construct
  source 1..20: mol_type = other DNA
ccctgttcccatggctccgg

SEQ ID NO: 18390 - DNA, 20 bp, synthetic construct
  source 1..20: mol_type = other DNA
cctgcagcctccggagccat

SEQ ID NO: 18391 - DNA, 20 bp, synthetic construct
  source 1..20: mol_type = other DNA
gagggccagtgtcttgctga

SEQ ID NO: 18392 - DNA, 20 bp, synthetic construct
  source 1..20: mol_type = other DNA
agtcctgtgcctgcagcctc

SEQ ID NO: 18393 - DNA, 20 bp, synthetic construct
  source 1..20: mol_type = other DNA
cccatggctccggaggctgc

SEQ ID NO: 18394 - DNA, 20 bp, synthetic construct
  source 1..20: mol_type = other DNA
ccagtgtcttgctgaggggc

SEQ ID NO: 18395 - DNA, 20 bp, synthetic construct
  source 1..20: mol_type = other DNA
gctccggaggctgcaggcac

SEQ ID NO: 18396 - DNA, 20 bp, synthetic construct
  source 1..20: mol_type = other DNA
cagacggactcgcaggcgtg

SEQ ID NO: 18397 - DNA, 20 bp, synthetic construct
  source 1..20: mol_type = other DNA
gactcactgagcgtgtgtga

SEQ ID NO: 18398 - DNA, 20 bp, synthetic construct
  source 1..20: mol_type = other DNA
acggactcgcaggcgtgtgg

SEQ ID NO: 18399 - DNA, 20 bp, synthetic construct
  source 1..20: mol_type = other DNA
acagtacacggtgagcagca

SEQ ID NO: 18400 - DNA, 20 bp, synthetic construct
  source 1..20: mol_type = other DNA
tcaccgtgtactgtgtgcgg

SEQ ID NO: 18401 - DNA, 20 bp, synthetic construct
  source 1..20: mol_type = other DNA
gggaaaaggtcacctcggag

SEQ ID NO: 18402 - DNA, 20 bp, synthetic construct
  source 1..20: mol_type = other DNA
gcggccgtgcttgctagtga

SEQ ID NO: 18403 - DNA, 20 bp, synthetic construct
  source 1..20: mol_type = other DNA
gccgtgcttgctagtgaggg

SEQ ID NO: 18404 - DNA, 20 bp, synthetic construct
  source 1..20: mol_type = other DNA
tgactcactgagcgtgtgtg

SEQ ID NO: 18405 - DNA, 20 bp, synthetic construct
  source 1..20: mol_type = other DNA
ccgtgcttgctagtgagggc

SEQ ID NO: 18406 - DNA, 20 bp, synthetic construct
  source 1..20: mol_type = other DNA
cccgccctcactagcaagca

SEQ ID NO: 18407 - DNA, 20 bp, synthetic construct
  source 1..20: mol_type = other DNA
gcttgctagtgagggcggga

SEQ ID NO: 18408 - DNA, 20 bp, synthetic construct
  source 1..20: mol_type = other DNA
gactcgcaggcgtgtggcgg

SEQ ID NO: 18409 - DNA, 20 bp, synthetic construct
  source 1..20: mol_type = other DNA
cggcaggcagacggactcgc

SEQ ID NO: 18410 - DNA, 20 bp, synthetic construct
  source 1..20: mol_type = other DNA
cactgagcgtgtgtgaggga

SEQ ID NO: 18411 - DNA, 20 bp, synthetic construct
  source 1..20: mol_type = other DNA
gcccagagtgtcccgagtag

SEQ ID NO: 18412 - DNA, 20 bp, synthetic construct
  source 1..20: mol_type = other DNA
tgtcccgagtagcggcagtg

SEQ ID NO: 18413 - DNA, 20 bp, synthetic construct
  source 1..20: mol_type = other DNA
tctgtcacagacctatctgc

SEQ ID NO: 18414 - DNA, 20 bp, synthetic construct
  source 1..20: mol_type = other DNA
ggtgaaggcgacccgcagat

SEQ ID NO: 18415 - DNA, 20 bp, synthetic construct
  source 1..20: mol_type = other DNA
gtgtcccgagtagcggcagt

SEQ ID NO: 18416 - DNA, 20 bp, synthetic construct
  source 1..20: mol_type = other DNA
agtgtcccgagtagcggcag

SEQ ID NO: 18417 - DNA, 20 bp, synthetic construct
  source 1..20: mol_type = other DNA
gtctgtcacagacctatctg

SEQ ID NO: 18418 - DNA, 20 bp, synthetic construct
  source 1..20: mol_type = other DNA
gtttctgagatgctgggtga

SEQ ID NO: 18419 - DNA, 20 bp, synthetic construct
  source 1..20: mol_type = other DNA
cctcggaaacgtcgctggcg

SEQ ID NO: 18420 - DNA, 20 bp, synthetic construct
  source 1..20: mol_type = other DNA
ggaaacgtcgctggcgcgga

SEQ ID NO: 18421 - DNA, 20 bp, synthetic construct
  source 1..20: mol_type = other DNA
cggaaacgtcgctggcgcgg

SEQ ID NO: 18422 - DNA, 20 bp, synthetic construct
  source 1..20: mol_type = other DNA
gctggcgcggagggatggtt

SEQ ID NO: 18423 - DNA, 20 bp, synthetic construct
  source 1..20: mol_type = other DNA
gttgtcctcggaaacgtcgc

SEQ ID NO: 18424 - DNA, 20 bp, synthetic construct
  source 1..20: mol_type = other DNA
acgtcgctggcgcggaggga

SEQ ID NO: 18425 - DNA, 20 bp, synthetic construct
  source 1..20: mol_type = other DNA
ccgcgccagcgacgtttccg

SEQ ID NO: 18426 - DNA, 20 bp, synthetic construct
  source 1..20: mol_type = other DNA
tacccgtaccacagaaatgc

SEQ ID NO: 18427 - DNA, 20 bp, synthetic construct
  source 1..20: mol_type = other DNA
acccgtaccacagaaatgca

SEQ ID NO: 18428 - DNA, 20 bp, synthetic construct
  source 1..20: mol_type = other DNA
ggaaggaaaccacactccaa

SEQ ID NO: 18429 - DNA, 20 bp, synthetic construct
  source 1..20: mol_type = other DNA
atttcttgagctaggaaagg

SEQ ID NO: 18430 - DNA, 20 bp, synthetic construct
  source 1..20: mol_type = other DNA
ggcacagtagagagcttcca

SEQ ID NO: 18431 - DNA, 20 bp, synthetic construct
  source 1..20: mol_type = other DNA
cacatacctggaagaagcaa

SEQ ID NO: 18432 - DNA, 20 bp, synthetic construct
  source 1..20: mol_type = other DNA
tatcccacgccagccagccc

SEQ ID NO: 18433 - DNA, 20 bp, synthetic construct
  source 1..20: mol_type = other DNA
caatggtccctgcatttctg

SEQ ID NO: 18434 - DNA, 20 bp, synthetic construct
  source 1..20: mol_type = other DNA
tccctgcatttctgtggtac

SEQ ID NO: 18435 - DNA, 20 bp, synthetic construct
  source 1..20: mol_type = other DNA
cagtagagagcttccagggc

SEQ ID NO: 18436 - DNA, 20 bp, synthetic construct
  source 1..20: mol_type = other DNA
gtgttcagagcagaagaaag

SEQ ID NO: 18437 - DNA, 20 bp, synthetic construct
  source 1..20: mol_type = other DNA
gggatttcttgagctaggaa

SEQ ID NO: 18438 - DNA, 20 bp, synthetic construct
  source 1..20: mol_type = other DNA
ttcagagcagaagaaagagg

SEQ ID NO: 18439 - DNA, 20 bp, synthetic construct
  source 1..20: mol_type = other DNA
cttgagctaggaaaggtggt

SEQ ID NO: 18440 - DNA, 20 bp, synthetic construct
  source 1..20: mol_type = other DNA
cttccagggctggctggcgt

SEQ ID NO: 18441 - DNA, 20 bp, synthetic construct
  source 1..20: mol_type = other DNA
ccgacgacgttcgatggagt

SEQ ID NO: 18442 - DNA, 20 bp, synthetic construct
  source 1..20: mol_type = other DNA
gcccgccatcttgttcccag

SEQ ID NO: 18443 - DNA, 20 bp, synthetic construct
  source 1..20: mol_type = other DNA
cctactccatcgaacgtcgt

SEQ ID NO: 18444 - DNA, 20 bp, synthetic construct
  source 1..20: mol_type = other DNA
agatcgagctccctggctgc

SEQ ID NO: 18445 - DNA, 20 bp, synthetic construct
  source 1..20: mol_type = other DNA
ccgcgagaactccacgcaga

SEQ ID NO: 18446 - DNA, 20 bp, synthetic construct
  source 1..20: mol_type = other DNA
aactgcccctgggaacaaga

SEQ ID NO: 18447 - DNA, 20 bp, synthetic construct
  source 1..20: mol_type = other DNA
ccttctgcgtggagttctcg

SEQ ID NO: 18448 - DNA, 20 bp, synthetic construct
  source 1..20: mol_type = other DNA
ctgccggctcgccttctgcg

SEQ ID NO: 18449 - DNA, 20 bp, synthetic construct
  source 1..20: mol_type = other DNA
agaaggcgagccggcagcca

SEQ ID NO: 18450 - DNA, 20 bp, synthetic construct
  source 1..20: mol_type = other DNA
gcggaagagatcgagctccc

SEQ ID NO: 18451 - DNA, 20 bp, synthetic construct
  source 1..20: mol_type = other DNA
gatctcgctcttcgggacaa

SEQ ID NO: 18452 - DNA, 20 bp, synthetic construct
  source 1..20: mol_type = other DNA
actccacgcagaaggcgagc

SEQ ID NO: 18453 - DNA, 20 bp, synthetic construct
  source 1..20: mol_type = other DNA
ggcccgccatcttgttccca

SEQ ID NO: 18454 - DNA, 20 bp, synthetic construct
  source 1..20: mol_type = other DNA
tgcccctgggaacaagatgg

SEQ ID NO: 18455 - DNA, 20 bp, synthetic construct
  source 1..20: mol_type = other DNA
ttgttcccaggggcagttgg

SEQ ID NO: 18456 - DNA, 20 bp, synthetic construct
  source 1..20: mol_type = other DNA
aagaaaacgagcgcgagagg

SEQ ID NO: 18457 - DNA, 20 bp, synthetic construct
  source 1..20: mol_type = other DNA
gagcgcgcgcgcgaaaactc

SEQ ID NO: 18458 - DNA, 20 bp, synthetic construct
  source 1..20: mol_type = other DNA
cgtgccatattggaatgagt

SEQ ID NO: 18459 - DNA, 20 bp, synthetic construct
  source 1..20: mol_type = other DNA
tattggaatgagtcggagcg

SEQ ID NO: 18460 - DNA, 20 bp, synthetic construct
  source 1..20: mol_type = other DNA
cccctccacccgcgctccgg

SEQ ID NO: 18461 - DNA, 20 bp, synthetic construct
  source 1..20: mol_type = other DNA
agaaagaaaacgagcgcgag

SEQ ID NO: 18462 - DNA, 20 bp, synthetic construct
  source 1..20: mol_type = other DNA
gcccccctccacccgcgctc

SEQ ID NO: 18463 - DNA, 20 bp, synthetic construct
  source 1..20: mol_type = other DNA
ctccacccgcgctccggcgg

SEQ ID NO: 18464 - DNA, 20 bp, synthetic construct
  source 1..20: mol_type = other DNA
cacccgcgctccggcggagg

SEQ ID NO: 18465 - DNA, 20 bp, synthetic construct
  source 1..20: mol_type = other DNA
gccggagcgcgggtggaggg

SEQ ID NO: 18466 - DNA, 20 bp, synthetic construct
  source 1..20: mol_type = other DNA
gaaagaaaacgagcgcgaga

SEQ ID NO: 18467 - DNA, 20 bp, synthetic construct
  source 1..20: mol_type = other DNA
ctgggttcggcggagcgggg

SEQ ID NO: 18468 - DNA, 20 bp, synthetic construct
  source 1..20: mol_type = other DNA
cgctccggcggaggcggcgg

SEQ ID NO: 18469 - DNA, 20 bp, synthetic construct
  source 1..20: mol_type = other DNA
ctgctgggttcggcggagcg

SEQ ID NO: 18470 - DNA, 20 bp, synthetic construct
  source 1..20: mol_type = other DNA
ccgccgcctccgccggagcg

SEQ ID NO: 18471 - DNA, 20 bp, synthetic construct
  source 1..20: mol_type = other DNA
tgcggcctttaccatggtgg

SEQ ID NO: 18472 - DNA, 20 bp, synthetic construct
  source 1..20: mol_type = other DNA
gtgcccaggagtgaacatcc

SEQ ID NO: 18473 - DNA, 20 bp, synthetic construct
  source 1..20: mol_type = other DNA
gatgttcactcctgggcacc

SEQ ID NO: 18474 - DNA, 20 bp, synthetic construct
  source 1..20: mol_type = other DNA
tgttcactcctgggcacccg

SEQ ID NO: 18475 - DNA, 20 bp, synthetic construct
  source 1..20: mol_type = other DNA
atgttcactcctgggcaccc

SEQ ID NO: 18476 - DNA, 20 bp, synthetic construct
  source 1..20: mol_type = other DNA
ggtcccggtcccggcgtcag

SEQ ID NO: 18477 - DNA, 20 bp, synthetic construct
  source 1..20: mol_type = other DNA
acccggggaagtggaagcgc

SEQ ID NO: 18478 - DNA, 20 bp, synthetic construct
  source 1..20: mol_type = other DNA
gagccactgacgccgggacc

SEQ ID NO: 18479 - DNA, 20 bp, synthetic construct
  source 1..20: mol_type = other DNA
ggaagcgccgggccctgctg

SEQ ID NO: 18480 - DNA, 20 bp, synthetic construct
  source 1..20: mol_type = other DNA
gcgccgggccctgctgcggg

SEQ ID NO: 18481 - DNA, 20 bp, synthetic construct
  source 1..20: mol_type = other DNA
agcgccgggccctgctgcgg

SEQ ID NO: 18482 - DNA, 20 bp, synthetic construct
  source 1..20: mol_type = other DNA
tggctctcccccccgcagca

SEQ ID NO: 18483 - DNA, 20 bp, synthetic construct
  source 1..20: mol_type = other DNA
aagcgccgggccctgctgcg

SEQ ID NO: 18484 - DNA, 20 bp, synthetic construct
  source 1..20: mol_type = other DNA
cgccgggccctgctgcgggg

SEQ ID NO: 18485 - DNA, 20 bp, synthetic construct
  source 1..20: mol_type = other DNA
ggcggcggcggtcccggtcc

SEQ ID NO: 18486 - DNA, 20 bp, synthetic construct
  source 1..20: mol_type = other DNA
ggggacggtctaagaagggt

SEQ ID NO: 18487 - DNA, 20 bp, synthetic construct
  source 1..20: mol_type = other DNA
agaagatcactccgttccaa

SEQ ID NO: 18488 - DNA, 20 bp, synthetic construct
  source 1..20: mol_type = other DNA
gaagatcactccgttccaaa

SEQ ID NO: 18489 - DNA, 20 bp, synthetic construct
  source 1..20: mol_type = other DNA
gggggacggtctaagaaggg

SEQ ID NO: 18490 - DNA, 20 bp, synthetic construct
  source 1..20: mol_type = other DNA
aagggggggacggtctaaga

SEQ ID NO: 18491 - DNA, 20 bp, synthetic construct
  source 1..20: mol_type = other DNA
ggtctaagaagggtgggaga

SEQ ID NO: 18492 - DNA, 20 bp, synthetic construct
  source 1..20: mol_type = other DNA
tgagatgaaaactttccctt

SEQ ID NO: 18493 - DNA, 20 bp, synthetic construct
  source 1..20: mol_type = other DNA
tgaaaactttccctttggaa

SEQ ID NO: 18494 - DNA, 20 bp, synthetic construct
  source 1..20: mol_type = other DNA
ttggggtaaaaggggaaggg

SEQ ID NO: 18495 - DNA, 20 bp, synthetic construct
  source 1..20: mol_type = other DNA
tctaagaagggtgggagagg

SEQ ID NO: 18496 - DNA, 20 bp, synthetic construct
  source 1..20: mol_type = other DNA
agggggggacggtctaagaa

SEQ ID NO: 18497 - DNA, 20 bp, synthetic construct
  source 1..20: mol_type = other DNA
gtctaagaagggtgggagag

SEQ ID NO: 18498 - DNA, 20 bp, synthetic construct
  source 1..20: mol_type = other DNA
gtattggggtaaaaggggaa

SEQ ID NO: 18499 - DNA, 20 bp, synthetic construct
  source 1..20: mol_type = other DNA
attggggtaaaaggggaagg

SEQ ID NO: 18500 - DNA, 20 bp, synthetic construct
  source 1..20: mol_type = other DNA
gatcacaaatttagctcgca

SEQ ID NO: 18501 - DNA, 20 bp, synthetic construct
  source 1..20: mol_type = other DNA
agcggggagcggttagaggt

SEQ ID NO: 18502 - DNA, 20 bp, synthetic construct
  source 1..20: mol_type = other DNA
cggaagctgcgatgcggaca

SEQ ID NO: 18503 - DNA, 20 bp, synthetic construct
  source 1..20: mol_type = other DNA
tccagcgagttcatgtcggg

SEQ ID NO: 18504 - DNA, 20 bp, synthetic construct
  source 1..20: mol_type = other DNA
gccgcccgacatgaactcgc

SEQ ID NO: 18505 - DNA, 20 bp, synthetic construct
  source 1..20: mol_type = other DNA
gggccgcggaagctgcgatg

SEQ ID NO: 18506 - DNA, 20 bp, synthetic construct
  source 1..20: mol_type = other DNA
ggccgcagaggatggagcta

SEQ ID NO: 18507 - DNA, 20 bp, synthetic construct
  source 1..20: mol_type = other DNA
cagcggggagcggttagagg

SEQ ID NO: 18508 - DNA, 20 bp, synthetic construct
  source 1..20: mol_type = other DNA
gccgcagaggatggagctag

SEQ ID NO: 18509 - DNA, 20 bp, synthetic construct
  source 1..20: mol_type = other DNA
gagcggttagaggtgggagt

SEQ ID NO: 18510 - DNA, 20 bp, synthetic construct
  source 1..20: mol_type = other DNA
gcctacgcgcccccaagctc

SEQ ID NO: 18511 - DNA, 20 bp, synthetic construct
  source 1..20: mol_type = other DNA
tgctccagcgagttcatgtc

SEQ ID NO: 18512 - DNA, 20 bp, synthetic construct
  source 1..20: mol_type = other DNA
tgtccgcatcgcagcttccg

SEQ ID NO: 18513 - DNA, 20 bp, synthetic construct
  source 1..20: mol_type = other DNA
cgatgcggacagggcagcgg

SEQ ID NO: 18514 - DNA, 20 bp, synthetic construct
  source 1..20: mol_type = other DNA
agaggtgggagttggcgctg

SEQ ID NO: 18515 - DNA, 20 bp, synthetic construct
  source 1..20: mol_type = other DNA
gaggtgggagttggcgctgc

SEQ ID NO: 18516 - DNA, 20 bp, synthetic construct
  source 1..20: mol_type = other DNA
agctcagggtgactgcccaa

SEQ ID NO: 18517 - DNA, 20 bp, synthetic construct
  source 1..20: mol_type = other DNA
gctccgaactcgcgagctgt

SEQ ID NO: 18518 - DNA, 20 bp, synthetic construct
  source 1..20: mol_type = other DNA
gccttccaggtggacaggtg

SEQ ID NO: 18519 - DNA, 20 bp, synthetic construct
  source 1..20: mol_type = other DNA
agagcgggcagccttccagg

SEQ ID NO: 18520 - DNA, 20 bp, synthetic construct
  source 1..20: mol_type = other DNA
ggtacagcttgccgagctca

SEQ ID NO: 18521 - DNA, 20 bp, synthetic construct
  source 1..20: mol_type = other DNA
ttgggcagtcaccctgagct

SEQ ID NO: 18522 - DNA, 20 bp, synthetic construct
  source 1..20: mol_type = other DNA
acctcacctgtccacctgga

SEQ ID NO: 18523 - DNA, 20 bp, synthetic construct
  source 1..20: mol_type = other DNA
aggtacagcttgccgagctc

SEQ ID NO: 18524 - DNA, 20 bp, synthetic construct
  source 1..20: mol_type = other DNA
ctgtacctcacctgtccacc

SEQ ID NO: 18525 - DNA, 20 bp, synthetic construct
  source 1..20: mol_type = other DNA
ccaggaccctcagggagagc

SEQ ID NO: 18526 - DNA, 20 bp, synthetic construct
  source 1..20: mol_type = other DNA
caagggactcccaggccaag

SEQ ID NO: 18527 - DNA, 20 bp, synthetic construct
  source 1..20: mol_type = other DNA
aaggctgcccgctctccctg

SEQ ID NO: 18528 - DNA, 20 bp, synthetic construct
  source 1..20: mol_type = other DNA
aggctgcccgctctccctga

SEQ ID NO: 18529 - DNA, 20 bp, synthetic construct
  source 1..20: mol_type = other DNA
tcgcagagcccctgttgccc

SEQ ID NO: 18530 - DNA, 20 bp, synthetic construct
  source 1..20: mol_type = other DNA
ccctgagggtcctgggaagg

SEQ ID NO: 18531 - DNA, 20 bp, synthetic construct
  source 1..20: mol_type = other DNA
agatcctggagaccgtcatg

SEQ ID NO: 18532 - DNA, 20 bp, synthetic construct
  source 1..20: mol_type = other DNA
agaacctcaggtgagaagtg

SEQ ID NO: 18533 - DNA, 20 bp, synthetic construct
  source 1..20: mol_type = other DNA
gctggatgcccacaggatcc

SEQ ID NO: 18534 - DNA, 20 bp, synthetic construct
  source 1..20: mol_type = other DNA
gatgatccccagccccaaga

SEQ ID NO: 18535 - DNA, 20 bp, synthetic construct
  source 1..20: mol_type = other DNA
ccgcaggatgcagtggacga

SEQ ID NO: 18536 - DNA, 20 bp, synthetic construct
  source 1..20: mol_type = other DNA
ggcatccagctgccccatga

SEQ ID NO: 18537 - DNA, 20 bp, synthetic construct
  source 1..20: mol_type = other DNA
ccttcgtccactgcatcctg

SEQ ID NO: 18538 - DNA, 20 bp, synthetic construct
  source 1..20: mol_type = other DNA
tgcagtggacgaaggtgttg

SEQ ID NO: 18539 - DNA, 20 bp, synthetic construct
  source 1..20: mol_type = other DNA
gatgcagtggacgaaggtgt

SEQ ID NO: 18540 - DNA, 20 bp, synthetic construct
  source 1..20: mol_type = other DNA
caagagtccgcaggatgcag

SEQ ID NO: 18541 - DNA, 20 bp, synthetic construct
  source 1..20: mol_type = other DNA
ccagctggccaagagtccgc

SEQ ID NO: 18542 - DNA, 20 bp, synthetic construct
  source 1..20: mol_type = other DNA
gactcttggccagctggggt

SEQ ID NO: 18543 - DNA, 20 bp, synthetic construct
  source 1..20: mol_type = other DNA
tgcggactcttggccagctg

SEQ ID NO: 18544 - DNA, 20 bp, synthetic construct
  source 1..20: mol_type = other DNA
ggatgatccccagccccaag

SEQ ID NO: 18545 - DNA, 20 bp, synthetic construct
  source 1..20: mol_type = other DNA
tagaccagtcctaccccagc

SEQ ID NO: 18546 - DNA, 20 bp, synthetic construct
  source 1..20: mol_type = other DNA
ccccgaattggtcctcacgg

SEQ ID NO: 18547 - DNA, 20 bp, synthetic construct
  source 1..20: mol_type = other DNA
ggatttgctcgacttggacg

SEQ ID NO: 18548 - DNA, 20 bp, synthetic construct
  source 1..20: mol_type = other DNA
acagcttggctacctccgtg

SEQ ID NO: 18549 - DNA, 20 bp, synthetic construct
  source 1..20: mol_type = other DNA
cgaggagcttcgctacagct

SEQ ID NO: 18550 - DNA, 20 bp, synthetic construct
  source 1..20: mol_type = other DNA
cctccgtgaggaccaattcg

SEQ ID NO: 18551 - DNA, 20 bp, synthetic construct
  source 1..20: mol_type = other DNA
ggtttccaggaagtgacgtc

SEQ ID NO: 18552 - DNA, 20 bp, synthetic construct
  source 1..20: mol_type = other DNA
gagcaaatcctccatctccg

SEQ ID NO: 18553 - DNA, 20 bp, synthetic construct
  source 1..20: mol_type = other DNA
ctccgtgaggaccaattcgg

SEQ ID NO: 18554 - DNA, 20 bp, synthetic construct
  source 1..20: mol_type = other DNA
agcagcggcggagcccacag

SEQ ID NO: 18555 - DNA, 20 bp, synthetic construct
  source 1..20: mol_type = other DNA
ccccgcccccaggccactgt

SEQ ID NO: 18556 - DNA, 20 bp, synthetic construct
  source 1..20: mol_type = other DNA
gccgggtgaggcccagaagg

SEQ ID NO: 18557 - DNA, 20 bp, synthetic construct
  source 1..20: mol_type = other DNA
acgtcaggcggccgcggaga

SEQ ID NO: 18558 - DNA, 20 bp, synthetic construct
  source 1..20: mol_type = other DNA
ttccaggaagtgacgtcagg

SEQ ID NO: 18559 - DNA, 20 bp, synthetic construct
  source 1..20: mol_type = other DNA
gcggagcccacagtggcctg

SEQ ID NO: 18560 - DNA, 20 bp, synthetic construct
  source 1..20: mol_type = other DNA
tcaggcggccgcggagatgg

SEQ ID NO: 18561 - DNA, 20 bp, synthetic construct
  source 1..20: mol_type = other DNA
agttacctggaacacggcgc

SEQ ID NO: 18562 - DNA, 20 bp, synthetic construct
  source 1..20: mol_type = other DNA
ggcagtggaagaaatgcccg

SEQ ID NO: 18563 - DNA, 20 bp, synthetic construct
  source 1..20: mol_type = other DNA
tggcccagttacctggaaca

SEQ ID NO: 18564 - DNA, 20 bp, synthetic construct
  source 1..20: mol_type = other DNA
cggcgtctttggaagatccg

SEQ ID NO: 18565 - DNA, 20 bp, synthetic construct
  source 1..20: mol_type = other DNA
tccaggtaactgggccaccg

SEQ ID NO: 18566 - DNA, 20 bp, synthetic construct
  source 1..20: mol_type = other DNA
cggcagtcttccgagcaaga

SEQ ID NO: 18567 - DNA, 20 bp, synthetic construct
  source 1..20: mol_type = other DNA
gccaggtctcggaagctcca

SEQ ID NO: 18568 - DNA, 20 bp, synthetic construct
  source 1..20: mol_type = other DNA
tacttagcgttccctcagac

SEQ ID NO: 18569 - DNA, 20 bp, synthetic construct
  source 1..20: mol_type = other DNA
catcttgctcggaagactgc

SEQ ID NO: 18570 - DNA, 20 bp, synthetic construct
  source 1..20: mol_type = other DNA
gcgttccctcagacgggcag

SEQ ID NO: 18571 - DNA, 20 bp, synthetic construct
  source 1..20: mol_type = other DNA
aacccaactcaccgagctcc

SEQ ID NO: 18572 - DNA, 20 bp, synthetic construct
  source 1..20: mol_type = other DNA
tccgagcaagatggcgccgc

SEQ ID NO: 18573 - DNA, 20 bp, synthetic construct
  source 1..20: mol_type = other DNA
ccgagacctggcaccagtcc

SEQ ID NO: 18574 - DNA, 20 bp, synthetic construct
  source 1..20: mol_type = other DNA
ttcacgccgccccctccccc

SEQ ID NO: 18575 - DNA, 20 bp, synthetic construct
  source 1..20: mol_type = other DNA
ttccgagcaagatggcgccg

SEQ ID NO: 18576 - DNA, 20 bp, synthetic construct
  source 1..20: mol_type = other DNA
ggccatcatcggctgcacgg

SEQ ID NO: 18577 - DNA, 20 bp, synthetic construct
  source 1..20: mol_type = other DNA
gccatcatcggctgcacgga

SEQ ID NO: 18578 - DNA, 20 bp, synthetic construct
  source 1..20: mol_type = other DNA
cagagaagtgactggaatag

SEQ ID NO: 18579 - DNA, 20 bp, synthetic construct
  source 1..20: mol_type = other DNA
gacagcagccagtaggtgga

SEQ ID NO: 18580 - DNA, 20 bp, synthetic construct
  source 1..20: mol_type = other DNA
gagaaaagtcaaggtcactc

SEQ ID NO: 18581 - DNA, 20 bp, synthetic construct
  source 1..20: mol_type = other DNA
tagggccatcatcggctgca

SEQ ID NO: 18582 - DNA, 20 bp, synthetic construct
  source 1..20: mol_type = other DNA
aagggacagcagccagtagg

SEQ ID NO: 18583 - DNA, 20 bp, synthetic construct
  source 1..20: mol_type = other DNA
tcagctgccagagaagtgac

SEQ ID NO: 18584 - DNA, 20 bp, synthetic construct
  source 1..20: mol_type = other DNA
cggctgcacggagggactgg

SEQ ID NO: 18585 - DNA, 20 bp, synthetic construct
  source 1..20: mol_type = other DNA
tgagatggagcagggaccat

SEQ ID NO: 18586 - DNA, 20 bp, synthetic construct
  source 1..20: mol_type = other DNA
gagatggagcagggaccata

SEQ ID NO: 18587 - DNA, 20 bp, synthetic construct
  source 1..20: mol_type = other DNA
tccctccgtgcagccgatga

SEQ ID NO: 18588 - DNA, 20 bp, synthetic construct
  source 1..20: mol_type = other DNA
ggagggactggagggagcag

SEQ ID NO: 18589 - DNA, 20 bp, synthetic construct
  source 1..20: mol_type = other DNA
ggctgcacggagggactgga

SEQ ID NO: 18590 - DNA, 20 bp, synthetic construct
  source 1..20: mol_type = other DNA
tgcagccgatgatggcccta

SEQ ID NO: 18591 - DNA, 20 bp, synthetic construct
  source 1..20: mol_type = other DNA
accggaagttaaggcgttcg

SEQ ID NO: 18592 - DNA, 20 bp, synthetic construct
  source 1..20: mol_type = other DNA
aagactagcgctcttgggac

SEQ ID NO: 18593 - DNA, 20 bp, synthetic construct
  source 1..20: mol_type = other DNA
ttcgcggcgtgtggtaagtg

SEQ ID NO: 18594 - DNA, 20 bp, synthetic construct
  source 1..20: mol_type = other DNA
acgggtgtaccgggttgtgg

SEQ ID NO: 18595 - DNA, 20 bp, synthetic construct
  source 1..20: mol_type = other DNA
gcggcgtgtggtaagtgagg

SEQ ID NO: 18596 - DNA, 20 bp, synthetic construct
  source 1..20: mol_type = other DNA
agccgaagggccggcaaacg

SEQ ID NO: 18597 - DNA, 20 bp, synthetic construct
  source 1..20: mol_type = other DNA
gagcgtccctgggagaacct

SEQ ID NO: 18598 - DNA, 20 bp, synthetic construct
  source 1..20: mol_type = other DNA
ccggcaaacgcggacagaga

SEQ ID NO: 18599 - DNA, 20 bp, synthetic construct
  source 1..20: mol_type = other DNA
gttaaggcgttcgcggcgtg

SEQ ID NO: 18600 - DNA, 20 bp, synthetic construct
  source 1..20: mol_type = other DNA
tcgcggcgtgtggtaagtga

SEQ ID NO: 18601 - DNA, 20 bp, synthetic construct
  source 1..20: mol_type = other DNA
cagccatcgccgccacaacc

SEQ ID NO: 18602 - DNA, 20 bp, synthetic construct
  source 1..20: mol_type = other DNA
agatggcacctgagcgtccc

SEQ ID NO: 18603 - DNA, 20 bp, synthetic construct
  source 1..20: mol_type = other DNA
cgcggcgtgtggtaagtgag

SEQ ID NO: 18604 - DNA, 20 bp, synthetic construct
  source 1..20: mol_type = other DNA
gtaccgggttgtggcggcga

SEQ ID NO: 18605 - DNA, 20 bp, synthetic construct
  source 1..20: mol_type = other DNA
gttgtggcggcgatggctgt

SEQ ID NO: 18606 - DNA, 20 bp, synthetic construct
  source 1..20: mol_type = other DNA
actgctccacacatcaacgc

SEQ ID NO: 18607 - DNA, 20 bp, synthetic construct
  source 1..20: mol_type = other DNA
aaaactacttacgagcccca

SEQ ID NO: 18608 - DNA, 20 bp, synthetic construct
  source 1..20: mol_type = other DNA
cctgcaccatatacacacac

SEQ ID NO: 18609 - DNA, 20 bp, synthetic construct
  source 1..20: mol_type = other DNA
ccagtgtgtgtatatggtgc

SEQ ID NO: 18610 - DNA, 20 bp, synthetic construct
  source 1..20: mol_type = other DNA
tatcagtccaaagtgattgg

SEQ ID NO: 18611 - DNA, 20 bp, synthetic construct
  source 1..20: mol_type = other DNA
tgcaccatatacacacactg

SEQ ID NO: 18612 - DNA, 20 bp, synthetic construct
  source 1..20: mol_type = other DNA
atatcagtccaaagtgattg

SEQ ID NO: 18613 - DNA, 20 bp, synthetic construct
  source 1..20: mol_type = other DNA
ggactgccagcgttgatgtg

SEQ ID NO: 18614 - DNA, 20 bp, synthetic construct
  source 1..20: mol_type = other DNA
aatatcagtccaaagtgatt

SEQ ID NO: 18615 - DNA, 20 bp, synthetic construct
  source 1..20: mol_type = other DNA
agcagtgacagcatgtctgc

SEQ ID NO: 18616 - DNA, 20 bp, synthetic construct
  source 1..20: mol_type = other DNA
catcaacgctggcagtcctt

SEQ ID NO: 18617 - DNA, 20 bp, synthetic construct
  source 1..20: mol_type = other DNA
acatcaacgctggcagtcct

SEQ ID NO: 18618 - DNA, 20 bp, synthetic construct
  source 1..20: mol_type = other DNA
gaatatcagtccaaagtgat

SEQ ID NO: 18619 - DNA, 20 bp, synthetic construct
  source 1..20: mol_type = other DNA
atcaacgctggcagtccttg

SEQ ID NO: 18620 - DNA, 20 bp, synthetic construct
  source 1..20: mol_type = other DNA
caggcactgtgctttctgcc

SEQ ID NO: 18621 - DNA, 20 bp, synthetic construct
  source 1..20: mol_type = other DNA
cgcgtggctcgagtgcctgg

SEQ ID NO: 18622 - DNA, 20 bp, synthetic construct
  source 1..20: mol_type = other DNA
gcgtcaccgactgctgcagc

SEQ ID NO: 18623 - DNA, 20 bp, synthetic construct
  source 1..20: mol_type = other DNA
cggcaggattccggctccag

SEQ ID NO: 18624 - DNA, 20 bp, synthetic construct
  source 1..20: mol_type = other DNA
tcaccgactgctgcagcagg

SEQ ID NO: 18625 - DNA, 20 bp, synthetic construct
  source 1..20: mol_type = other DNA
ttccgcgtccgcccctgctc

SEQ ID NO: 18626 - DNA, 20 bp, synthetic construct
  source 1..20: mol_type = other DNA
ctccagcggctgcaggcgcg

SEQ ID NO: 18627 - DNA, 20 bp, synthetic construct
  source 1..20: mol_type = other DNA
tgcgggcgaagccggagcag

SEQ ID NO: 18628 - DNA, 20 bp, synthetic construct
  source 1..20: mol_type = other DNA
agccacgcgcctgcagccgc

SEQ ID NO: 18629 - DNA, 20 bp, synthetic construct
  source 1..20: mol_type = other DNA
gggcgaagccggagcagggg

SEQ ID NO: 18630 - DNA, 20 bp, synthetic construct
  source 1..20: mol_type = other DNA
gcccgcagctccgcgcccgc

SEQ ID NO: 18631 - DNA, 20 bp, synthetic construct
  source 1..20: mol_type = other DNA
ggaagaggaagccggcgagg

SEQ ID NO: 18632 - DNA, 20 bp, synthetic construct
  source 1..20: mol_type = other DNA
tgcccgcgggcgcggagctg

SEQ ID NO: 18633 - DNA, 20 bp, synthetic construct
  source 1..20: mol_type = other DNA
ggaggaagaggaagccggcg

SEQ ID NO: 18634 - DNA, 20 bp, synthetic construct
  source 1..20: mol_type = other DNA
agaggaagccggcgaggagg

SEQ ID NO: 18635 - DNA, 20 bp, synthetic construct
  source 1..20: mol_type = other DNA
gaagccggcgaggaggcgga

SEQ ID NO: 18636 - DNA, 20 bp, synthetic construct
  source 1..20: mol_type = other DNA
ggtgggtgcatcctgcgctg

SEQ ID NO: 18637 - DNA, 20 bp, synthetic construct
  source 1..20: mol_type = other DNA
gagcaaggggaaactccgag

SEQ ID NO: 18638 - DNA, 20 bp, synthetic construct
  source 1..20: mol_type = other DNA
agttccagtcaccgagcgag

SEQ ID NO: 18639 - DNA, 20 bp, synthetic construct
  source 1..20: mol_type = other DNA
gagttccagtcaccgagcga

SEQ ID NO: 18640 - DNA, 20 bp, synthetic construct
  source 1..20: mol_type = other DNA
ggagttccagtcaccgagcg

SEQ ID NO: 18641 - DNA, 20 bp, synthetic construct
  source 1..20: mol_type = other DNA
cgggcgcgctacccagacgc

SEQ ID NO: 18642 - DNA, 20 bp, synthetic construct
  source 1..20: mol_type = other DNA
cgagcgaggggcgcaagggt

SEQ ID NO: 18643 - DNA, 20 bp, synthetic construct
  source 1..20: mol_type = other DNA
caaggggaaactccgagagg

SEQ ID NO: 18644 - DNA, 20 bp, synthetic construct
  source 1..20: mol_type = other DNA
tcaccgagcgaggggcgcaa

SEQ ID NO: 18645 - DNA, 20 bp, synthetic construct
  source 1..20: mol_type = other DNA
actccatctcccgggagcaa

SEQ ID NO: 18646 - DNA, 20 bp, synthetic construct
  source 1..20: mol_type = other DNA
ggctctgcacaccagcgtct

SEQ ID NO: 18647 - DNA, 20 bp, synthetic construct
  source 1..20: mol_type = other DNA
aaggggaaactccgagagga

SEQ ID NO: 18648 - DNA, 20 bp, synthetic construct
  source 1..20: mol_type = other DNA
gaaattgaaatactatcagg

SEQ ID NO: 18649 - DNA, 20 bp, synthetic construct
  source 1..20: mol_type = other DNA
agaaattgaaatactatcag

SEQ ID NO: 18650 - DNA, 20 bp, synthetic construct
  source 1..20: mol_type = other DNA
tcggagtttccccttgctcc

SEQ ID NO: 18651 - DNA, 20 bp, synthetic construct
  source 1..20: mol_type = other DNA
ctcctgtcatcgctcacggg

SEQ ID NO: 18652 - DNA, 20 bp, synthetic construct
  source 1..20: mol_type = other DNA
agtcgccggatcggatgctg

SEQ ID NO: 18653 - DNA, 20 bp, synthetic construct
  source 1..20: mol_type = other DNA
agggtccccagcatccgatc

SEQ ID NO: 18654 - DNA, 20 bp, synthetic construct
  source 1..20: mol_type = other DNA
gagcttggaagtcgccggat

SEQ ID NO: 18655 - DNA, 20 bp, synthetic construct
  source 1..20: mol_type = other DNA
acactcctgtcatcgctcac

SEQ ID NO: 18656 - DNA, 20 bp, synthetic construct
  source 1..20: mol_type = other DNA
aagtcgccggatcggatgct

SEQ ID NO: 18657 - DNA, 20 bp, synthetic construct
  source 1..20: mol_type = other DNA
gtgaagtctctgtctccggc

SEQ ID NO: 18658 - DNA, 20 bp, synthetic construct
  source 1..20: mol_type = other DNA
ctgccgccgccacaacagca

SEQ ID NO: 18659 - DNA, 20 bp, synthetic construct
  source 1..20: mol_type = other DNA
tcccagtctcctcctcgccg

SEQ ID NO: 18660 - DNA, 20 bp, synthetic construct
  source 1..20: mol_type = other DNA
aacactcctgtcatcgctca

SEQ ID NO: 18661 - DNA, 20 bp, synthetic construct
  source 1..20: mol_type = other DNA
ctgtcatcgctcacgggcgg

SEQ ID NO: 18662 - DNA, 20 bp, synthetic construct
  source 1..20: mol_type = other DNA
gtctccggccggctgactgc

SEQ ID NO: 18663 - DNA, 20 bp, synthetic construct
  source 1..20: mol_type = other DNA
gccgcggcgaggaggagact

SEQ ID NO: 18664 - DNA, 20 bp, synthetic construct
  source 1..20: mol_type = other DNA
tcgctcacgggcggcggcag

SEQ ID NO: 18665 - DNA, 20 bp, synthetic construct
  source 1..20: mol_type = other DNA
aggcggcggccgcggcgagg

SEQ ID NO: 18666 - DNA, 20 bp, synthetic construct
  source 1..20: mol_type = other DNA
tcatacgcgccacgaagttg

SEQ ID NO: 18667 - DNA, 20 bp, synthetic construct
  source 1..20: mol_type = other DNA
cggcctggcgagagtttgtg

SEQ ID NO: 18668 - DNA, 20 bp, synthetic construct
  source 1..20: mol_type = other DNA
gctgagctcgcatgtgcggg

SEQ ID NO: 18669 - DNA, 20 bp, synthetic construct
  source 1..20: mol_type = other DNA
gacctcggtggcctgcaggg

SEQ ID NO: 18670 - DNA, 20 bp, synthetic construct
  source 1..20: mol_type = other DNA
aagttggggttgaattccac

SEQ ID NO: 18671 - DNA, 20 bp, synthetic construct
  source 1..20: mol_type = other DNA
ggaattcaaccccaacttcg

SEQ ID NO: 18672 - DNA, 20 bp, synthetic construct
  source 1..20: mol_type = other DNA
tcgccgcacaaactctcgcc

SEQ ID NO: 18673 - DNA, 20 bp, synthetic construct
  source 1..20: mol_type = other DNA
agttggggttgaattccaca

SEQ ID NO: 18674 - DNA, 20 bp, synthetic construct
  source 1..20: mol_type = other DNA
tgctgagctcgcatgtgcgg

SEQ ID NO: 18675 - DNA, 20 bp, synthetic construct
  source 1..20: mol_type = other DNA
catgcgagctcagcagattg

SEQ ID NO: 18676 - DNA, 20 bp, synthetic construct
  source 1..20: mol_type = other DNA
ctgctgagctcgcatgtgcg

SEQ ID NO: 18677 - DNA, 20 bp, synthetic construct
  source 1..20: mol_type = other DNA
atgcgagctcagcagattgt

SEQ ID NO: 18678 - DNA, 20 bp, synthetic construct
  source 1..20: mol_type = other DNA
atctgctgagctcgcatgtg

SEQ ID NO: 18679 - DNA, 20 bp, synthetic construct
  source 1..20: mol_type = other DNA
tctgctgagctcgcatgtgc

SEQ ID NO: 18680 - DNA, 20 bp, synthetic construct
  source 1..20: mol_type = other DNA
gaggcgcagggggaagccac

SEQ ID NO: 18681 - DNA, 20 bp, synthetic construct
  source 1..20: mol_type = other DNA
ggacctagaaactgctgcgc

SEQ ID NO: 18682 - DNA, 20 bp, synthetic construct
  source 1..20: mol_type = other DNA
aagtgaccttccctcagagc

SEQ ID NO: 18683 - DNA, 20 bp, synthetic construct
  source 1..20: mol_type = other DNA
tcagagccggtcttcccgcg

SEQ ID NO: 18684 - DNA, 20 bp, synthetic construct
  source 1..20: mol_type = other DNA
gctcccaggcggcgaaagca

SEQ ID NO: 18685 - DNA, 20 bp, synthetic construct
  source 1..20: mol_type = other DNA
gaggatcggcgagtgcggct

SEQ ID NO: 18686 - DNA, 20 bp, synthetic construct
  source 1..20: mol_type = other DNA
tgcgccggacggctcccagg

SEQ ID NO: 18687 - DNA, 20 bp, synthetic construct
  source 1..20: mol_type = other DNA
ccggttcccgggacgcgaag

SEQ ID NO: 18688 - DNA, 20 bp, synthetic construct
  source 1..20: mol_type = other DNA
tcggaagccagccggttccc

SEQ ID NO: 18689 - DNA, 20 bp, synthetic construct
  source 1..20: mol_type = other DNA
gcgggacggcggggacagtg

SEQ ID NO: 18690 - DNA, 20 bp, synthetic construct
  source 1..20: mol_type = other DNA
agccggttcccgggacgcga

SEQ ID NO: 18691 - DNA, 20 bp, synthetic construct
  source 1..20: mol_type = other DNA
agtgcggctcggaagccagc

SEQ ID NO: 18692 - DNA, 20 bp, synthetic construct
  source 1..20: mol_type = other DNA
ctagaaactgctgcgccgga

SEQ ID NO: 18693 - DNA, 20 bp, synthetic construct
  source 1..20: mol_type = other DNA
ttcccgggacgcgaaggggc

SEQ ID NO: 18694 - DNA, 20 bp, synthetic construct
  source 1..20: mol_type = other DNA
gttcccgggacgcgaagggg

SEQ ID NO: 18695 - DNA, 20 bp, synthetic construct
  source 1..20: mol_type = other DNA
gccggttcccgggacgcgaa

SEQ ID NO: 18696 - DNA, 20 bp, synthetic construct
  source 1..20: mol_type = other DNA
agccccccactacaaatgcg

SEQ ID NO: 18697 - DNA, 20 bp, synthetic construct
  source 1..20: mol_type = other DNA
gccagctctggagtcaggta

SEQ ID NO: 18698 - DNA, 20 bp, synthetic construct
  source 1..20: mol_type = other DNA
ggttcctgctggttccacag

SEQ ID NO: 18699 - DNA, 20 bp, synthetic construct
  source 1..20: mol_type = other DNA
ccagccccccactacaaatg

SEQ ID NO: 18700 - DNA, 20 bp, synthetic construct
  source 1..20: mol_type = other DNA
ctccccgcatttgtagtggg

SEQ ID NO: 18701 - DNA, 20 bp, synthetic construct
  source 1..20: mol_type = other DNA
cagccccccactacaaatgc

SEQ ID NO: 18702 - DNA, 20 bp, synthetic construct
  source 1..20: mol_type = other DNA
caggcccatcctcttcccaa

SEQ ID NO: 18703 - DNA, 20 bp, synthetic construct
  source 1..20: mol_type = other DNA
ccagctctggagtcaggtag

SEQ ID NO: 18704 - DNA, 20 bp, synthetic construct
  source 1..20: mol_type = other DNA
ccctccccgcatttgtagtg

SEQ ID NO: 18705 - DNA, 20 bp, synthetic construct
  source 1..20: mol_type = other DNA
tcagcctctgtggaaccagc

SEQ ID NO: 18706 - DNA, 20 bp, synthetic construct
  source 1..20: mol_type = other DNA
gctgcctttgggaagaggat

SEQ ID NO: 18707 - DNA, 20 bp, synthetic construct
  source 1..20: mol_type = other DNA
agtcaggtaggggttcctgc

SEQ ID NO: 18708 - DNA, 20 bp, synthetic construct
  source 1..20: mol_type = other DNA
ttgggaagaggatgggcctg

SEQ ID NO: 18709 - DNA, 20 bp, synthetic construct
  source 1..20: mol_type = other DNA
agccagctctggagtcaggt

SEQ ID NO: 18710 - DNA, 20 bp, synthetic construct
  source 1..20: mol_type = other DNA
ggctgcggtggcgagggcgg

SEQ ID NO: 18711 - DNA, 20 bp, synthetic construct
  source 1..20: mol_type = other DNA
aggatgtgctacgaggaccc

SEQ ID NO: 18712 - DNA, 20 bp, synthetic construct
  source 1..20: mol_type = other DNA
catggtagggcccatctgag

SEQ ID NO: 18713 - DNA, 20 bp, synthetic construct
  source 1..20: mol_type = other DNA
cagaaccaggatgtgctacg

SEQ ID NO: 18714 - DNA, 20 bp, synthetic construct
  source 1..20: mol_type = other DNA
caacaccagcaggcacggag

SEQ ID NO: 18715 - DNA, 20 bp, synthetic construct
  source 1..20: mol_type = other DNA
gcacaggactggagtcctcc

SEQ ID NO: 18716 - DNA, 20 bp, synthetic construct
  source 1..20: mol_type = other DNA
ctgagacagacggaggtagg

SEQ ID NO: 18717 - DNA, 20 bp, synthetic construct
  source 1..20: mol_type = other DNA
ccaagccgcccaacaccagc

SEQ ID NO: 18718 - DNA, 20 bp, synthetic construct
  source 1..20: mol_type = other DNA
accaccctctccgtgcctgc

SEQ ID NO: 18719 - DNA, 20 bp, synthetic construct
  source 1..20: mol_type = other DNA
accagcaggcacggagaggg

SEQ ID NO: 18720 - DNA, 20 bp, synthetic construct
  source 1..20: mol_type = other DNA
gttgggcggcttggaggcta

SEQ ID NO: 18721 - DNA, 20 bp, synthetic construct
  source 1..20: mol_type = other DNA
aacaccagcaggcacggaga

SEQ ID NO: 18722 - DNA, 20 bp, synthetic construct
  source 1..20: mol_type = other DNA
gctggtgttgggcggcttgg

SEQ ID NO: 18723 - DNA, 20 bp, synthetic construct
  source 1..20: mol_type = other DNA
gagggtggtgtctgctgccc

SEQ ID NO: 18724 - DNA, 20 bp, synthetic construct
  source 1..20: mol_type = other DNA
ccgtgcctgctggtgttggg

SEQ ID NO: 18725 - DNA, 20 bp, synthetic construct
  source 1..20: mol_type = other DNA
tctgctgccctggagcctgg

SEQ ID NO: 18726 - DNA, 20 bp, synthetic construct
  source 1..20: mol_type = other DNA
gccgtagttacggtcgactg

SEQ ID NO: 18727 - DNA, 20 bp, synthetic construct
  source 1..20: mol_type = other DNA
cgtcggacatcgtgaacccc

SEQ ID NO: 18728 - DNA, 20 bp, synthetic construct
  source 1..20: mol_type = other DNA
gtgctggaaagcgtgagtgt

SEQ ID NO: 18729 - DNA, 20 bp, synthetic construct
  source 1..20: mol_type = other DNA
ggggttcacgatgtccgacg

SEQ ID NO: 18730 - DNA, 20 bp, synthetic construct
  source 1..20: mol_type = other DNA
gggccgggttaggcgacttg

SEQ ID NO: 18731 - DNA, 20 bp, synthetic construct
  source 1..20: mol_type = other DNA
tcgtcggacatcgtgaaccc

SEQ ID NO: 18732 - DNA, 20 bp, synthetic construct
  source 1..20: mol_type = other DNA
caaggccaactatgacgtgc

SEQ ID NO: 18733 - DNA, 20 bp, synthetic construct
  source 1..20: mol_type = other DNA
gggccgcgactccagagacc

SEQ ID NO: 18734 - DNA, 20 bp, synthetic construct
  source 1..20: mol_type = other DNA
cgatgtccgacgaggaagcg

SEQ ID NO: 18735 - DNA, 20 bp, synthetic construct
  source 1..20: mol_type = other DNA
gagccgggtctctggagtcg

SEQ ID NO: 18736 - DNA, 20 bp, synthetic construct
  source 1..20: mol_type = other DNA
gaggaagcgaggcagagcgg

SEQ ID NO: 18737 - DNA, 20 bp, synthetic construct
  source 1..20: mol_type = other DNA
gtctctggagtcgcggcccg

SEQ ID NO: 18738 - DNA, 20 bp, synthetic construct
  source 1..20: mol_type = other DNA
gacgaggaagcgaggcagag

SEQ ID NO: 18739 - DNA, 20 bp, synthetic construct
  source 1..20: mol_type = other DNA
gctctgcctcgcttcctcgt

SEQ ID NO: 18740 - DNA, 20 bp, synthetic construct
  source 1..20: mol_type = other DNA
gactccagagacccggctcc

SEQ ID NO: 18741 - DNA, 20 bp, synthetic construct
  source 1..20: mol_type = other DNA
gcagcatgtcaagtcctgcg

SEQ ID NO: 18742 - DNA, 20 bp, synthetic construct
  source 1..20: mol_type = other DNA
aagggcgacgtcaggtacag

SEQ ID NO: 18743 - DNA, 20 bp, synthetic construct
  source 1..20: mol_type = other DNA
ggaggcacaagggcgacgtc

SEQ ID NO: 18744 - DNA, 20 bp, synthetic construct
  source 1..20: mol_type = other DNA
cctgcgcggccgggacactg

SEQ ID NO: 18745 - DNA, 20 bp, synthetic construct
  source 1..20: mol_type = other DNA
catgctgcccgactgcctgt

SEQ ID NO: 18746 - DNA, 20 bp, synthetic construct
  source 1..20: mol_type = other DNA
gcggcagcgcagctcgccct

SEQ ID NO: 18747 - DNA, 20 bp, synthetic construct
  source 1..20: mol_type = other DNA
ctgcgcggccgggacactga

SEQ ID NO: 18748 - DNA, 20 bp, synthetic construct
  source 1..20: mol_type = other DNA
gcccgactgcctgtcggccg

SEQ ID NO: 18749 - DNA, 20 bp, synthetic construct
  source 1..20: mol_type = other DNA
tggcccctgccagcagccgg

SEQ ID NO: 18750 - DNA, 20 bp, synthetic construct
  source 1..20: mol_type = other DNA
agggcgagctgcgctgccgc

SEQ ID NO: 18751 - DNA, 20 bp, synthetic construct
  source 1..20: mol_type = other DNA
gccctcggccgacaggcagt

SEQ ID NO: 18752 - DNA, 20 bp, synthetic construct
  source 1..20: mol_type = other DNA
cccgactgcctgtcggccga

SEQ ID NO: 18753 - DNA, 20 bp, synthetic construct
  source 1..20: mol_type = other DNA
gcagctcgccctcggccgac

SEQ ID NO: 18754 - DNA, 20 bp, synthetic construct
  source 1..20: mol_type = other DNA
ccgtggcccctgccagcagc

SEQ ID NO: 18755 - DNA, 20 bp, synthetic construct
  source 1..20: mol_type = other DNA
atcccgcgccctcagtgtcc

SEQ ID NO: 18756 - DNA, 20 bp, synthetic construct
  source 1..20: mol_type = other DNA
ttaaaagcagatggtagctg

SEQ ID NO: 18757 - DNA, 20 bp, synthetic construct
  source 1..20: mol_type = other DNA
tgggttgggcttacctgctg

SEQ ID NO: 18758 - DNA, 20 bp, synthetic construct
  source 1..20: mol_type = other DNA
actccactatgaagacactc

SEQ ID NO: 18759 - DNA, 20 bp, synthetic construct
  source 1..20: mol_type = other DNA
gctcctgagtgtcttcatag

SEQ ID NO: 18760 - DNA, 20 bp, synthetic construct
  source 1..20: mol_type = other DNA
cgtgggcacttctggagacc

SEQ ID NO: 18761 - DNA, 20 bp, synthetic construct
  source 1..20: mol_type = other DNA
ggtgggttgggcttacctgc

SEQ ID NO: 18762 - DNA, 20 bp, synthetic construct
  source 1..20: mol_type = other DNA
tcttcatagtggagtcgtcc

SEQ ID NO: 18763 - DNA, 20 bp, synthetic construct
  source 1..20: mol_type = other DNA
agctgaggttgattcaatgc

SEQ ID NO: 18764 - DNA, 20 bp, synthetic construct
  source 1..20: mol_type = other DNA
ttgggcttacctgctggggt

SEQ ID NO: 18765 - DNA, 20 bp, synthetic construct
  source 1..20: mol_type = other DNA
accaactagcaggtaactcc

SEQ ID NO: 18766 - DNA, 20 bp, synthetic construct
  source 1..20: mol_type = other DNA
cccaggctgttaaaagcaga

SEQ ID NO: 18767 - DNA, 20 bp, synthetic construct
  source 1..20: mol_type = other DNA
cgtgatctgctcgctactac

SEQ ID NO: 18768 - DNA, 20 bp, synthetic construct
  source 1..20: mol_type = other DNA
acccggagttacctgctagt

SEQ ID NO: 18769 - DNA, 20 bp, synthetic construct
  source 1..20: mol_type = other DNA
caccaactagcaggtaactc

SEQ ID NO: 18770 - DNA, 20 bp, synthetic construct
  source 1..20: mol_type = other DNA
cttcaaacagattggaaacc

SEQ ID NO: 18771 - DNA, 20 bp, synthetic construct
  source 1..20: mol_type = other DNA
ggacccgcaaggctactccc

SEQ ID NO: 18772 - DNA, 20 bp, synthetic construct
  source 1..20: mol_type = other DNA
gcctgcgccccctggcatgg

SEQ ID NO: 18773 - DNA, 20 bp, synthetic construct
  source 1..20: mol_type = other DNA
gcagtgggcaggtatggctg

SEQ ID NO: 18774 - DNA, 20 bp, synthetic construct
  source 1..20: mol_type = other DNA
cagtgggcaggtatggctga

SEQ ID NO: 18775 - DNA, 20 bp, synthetic construct
  source 1..20: mol_type = other DNA
tccagacgcgcctccaccgc

SEQ ID NO: 18776 - DNA, 20 bp, synthetic construct
  source 1..20: mol_type = other DNA
catacctgcccactgcccgg

SEQ ID NO: 18777 - DNA, 20 bp, synthetic construct
  source 1..20: mol_type = other DNA
gccgccgccaccatgccagg

SEQ ID NO: 18778 - DNA, 20 bp, synthetic construct
  source 1..20: mol_type = other DNA
tgcgccccctggcatggtgg

SEQ ID NO: 18779 - DNA, 20 bp, synthetic construct
  source 1..20: mol_type = other DNA
agccatacctgcccactgcc

SEQ ID NO: 18780 - DNA, 20 bp, synthetic construct
  source 1..20: mol_type = other DNA
ggccgccgccaccatgccag

SEQ ID NO: 18781 - DNA, 20 bp, synthetic construct
  source 1..20: mol_type = other DNA
tggcggcggcccttagcgct

SEQ ID NO: 18782 - DNA, 20 bp, synthetic construct
  source 1..20: mol_type = other DNA
acctgcccactgcccggcgg

SEQ ID NO: 18783 - DNA, 20 bp, synthetic construct
  source 1..20: mol_type = other DNA
gggccgccgccaccatgcca

SEQ ID NO: 18784 - DNA, 20 bp, synthetic construct
  source 1..20: mol_type = other DNA
ccagacgcgcctccaccgcc

SEQ ID NO: 18785 - DNA, 20 bp, synthetic construct
  source 1..20: mol_type = other DNA
gcgcctccaccgccgggcag

SEQ ID NO: 18786 - DNA, 20 bp, synthetic construct
  source 1..20: mol_type = other DNA
ctggaagctccgcaggatgg

SEQ ID NO: 18787 - DNA, 20 bp, synthetic construct
  source 1..20: mol_type = other DNA
aaaagaagctccgccttccg

SEQ ID NO: 18788 - DNA, 20 bp, synthetic construct
  source 1..20: mol_type = other DNA
ggtggtcctggaagctccgc

SEQ ID NO: 18789 - DNA, 20 bp, synthetic construct
  source 1..20: mol_type = other DNA
gcggaagccggaagcaaaag

SEQ ID NO: 18790 - DNA, 20 bp, synthetic construct
  source 1..20: mol_type = other DNA
accaccgagttcggagccgc

SEQ ID NO: 18791 - DNA, 20 bp, synthetic construct
  source 1..20: mol_type = other DNA
cggaagccggaagcaaaagc

SEQ ID NO: 18792 - DNA, 20 bp, synthetic construct
  source 1..20: mol_type = other DNA
agcgggtcctgctagccccg

SEQ ID NO: 18793 - DNA, 20 bp, synthetic construct
  source 1..20: mol_type = other DNA
ccccgcggctccgaactcgg

SEQ ID NO: 18794 - DNA, 20 bp, synthetic construct
  source 1..20: mol_type = other DNA
cctggaagctccgcaggatg

SEQ ID NO: 18795 - DNA, 20 bp, synthetic construct
  source 1..20: mol_type = other DNA
ccatcttctcccccatcctg

SEQ ID NO: 18796 - DNA, 20 bp, synthetic construct
  source 1..20: mol_type = other DNA
gaccaccgagttcggagccg

SEQ ID NO: 18797 - DNA, 20 bp, synthetic construct
  source 1..20: mol_type = other DNA
ccaccgagttcggagccgcg

SEQ ID NO: 18798 - DNA, 20 bp, synthetic construct
  source 1..20: mol_type = other DNA
gtcctggaagctccgcagga

SEQ ID NO: 18799 - DNA, 20 bp, synthetic construct
  source 1..20: mol_type = other DNA
tcgcccgcccgcgcctccag

SEQ ID NO: 18800 - DNA, 20 bp, synthetic construct
  source 1..20: mol_type = other DNA
gcttccgctggaggcgcggg

SEQ ID NO: 18801 - DNA, 20 bp, synthetic construct
  source 1..20: mol_type = other DNA
gctgcgtctactgcgaggta

SEQ ID NO: 18802 - DNA, 20 bp, synthetic construct
  source 1..20: mol_type = other DNA
ccctggaagtcctatgcggg

SEQ ID NO: 18803 - DNA, 20 bp, synthetic construct
  source 1..20: mol_type = other DNA
ggatgtttctgtgctcgtgg

SEQ ID NO: 18804 - DNA, 20 bp, synthetic construct
  source 1..20: mol_type = other DNA
tctttgctgcgtctactgcg

SEQ ID NO: 18805 - DNA, 20 bp, synthetic construct
  source 1..20: mol_type = other DNA
gccatcccggcaagactgag

SEQ ID NO: 18806 - DNA, 20 bp, synthetic construct
  source 1..20: mol_type = other DNA
ccagatgcgaatcctgttgt

SEQ ID NO: 18807 - DNA, 20 bp, synthetic construct
  source 1..20: mol_type = other DNA
gaatctgaaaccatctgctc

SEQ ID NO: 18808 - DNA, 20 bp, synthetic construct
  source 1..20: mol_type = other DNA
gccagatgcgaatcctgttg

SEQ ID NO: 18809 - DNA, 20 bp, synthetic construct
  source 1..20: mol_type = other DNA
gtgccatcccggcaagactg

SEQ ID NO: 18810 - DNA, 20 bp, synthetic construct
  source 1..20: mol_type = other DNA
tgccatcccggcaagactga

SEQ ID NO: 18811 - DNA, 20 bp, synthetic construct
  source 1..20: mol_type = other DNA
caaccctggaagtcctatgc

SEQ ID NO: 18812 - DNA, 20 bp, synthetic construct
  source 1..20: mol_type = other DNA
aggatgtttctgtgctcgtg

SEQ ID NO: 18813 - DNA, 20 bp, synthetic construct
  source 1..20: mol_type = other DNA
ctctgggaaaggctgcggcg

SEQ ID NO: 18814 - DNA, 20 bp, synthetic construct
  source 1..20: mol_type = other DNA
gcagcctttcccagagcaga

SEQ ID NO: 18815 - DNA, 20 bp, synthetic construct
  source 1..20: mol_type = other DNA
gaaaccatctgctctgggaa

SEQ ID NO: 18816 - DNA, 20 bp, synthetic construct
  source 1..20: mol_type = other DNA
ggtgtactgggaattcagag

SEQ ID NO: 18817 - DNA, 20 bp, synthetic construct
  source 1..20: mol_type = other DNA
gggaacccagggagcgcgat

SEQ ID NO: 18818 - DNA, 20 bp, synthetic construct
  source 1..20: mol_type = other DNA
acagcggcagggggaaccca

SEQ ID NO: 18819 - DNA, 20 bp, synthetic construct
  source 1..20: mol_type = other DNA
aggaggaccacggccactcc

SEQ ID NO: 18820 - DNA, 20 bp, synthetic construct
  source 1..20: mol_type = other DNA
ggggaacccagggagcgcga

SEQ ID NO: 18821 - DNA, 20 bp, synthetic construct
  source 1..20: mol_type = other DNA
agggagcgcgatgggctgca

SEQ ID NO: 18822 - DNA, 20 bp, synthetic construct
  source 1..20: mol_type = other DNA
tgggctgcagggctgcatca

SEQ ID NO: 18823 - DNA, 20 bp, synthetic construct
  source 1..20: mol_type = other DNA
cagcagcagcaggaggacca

SEQ ID NO: 18824 - DNA, 20 bp, synthetic construct
  source 1..20: mol_type = other DNA
gcagggacacagatgggaga

SEQ ID NO: 18825 - DNA, 20 bp, synthetic construct
  source 1..20: mol_type = other DNA
tgctctgcagcagcagcagg

SEQ ID NO: 18826 - DNA, 20 bp, synthetic construct
  source 1..20: mol_type = other DNA
gacagcggcagggggaaccc

SEQ ID NO: 18827 - DNA, 20 bp, synthetic construct
  source 1..20: mol_type = other DNA
gctcctgccaggagtggccg

SEQ ID NO: 18828 - DNA, 20 bp, synthetic construct
  source 1..20: mol_type = other DNA
ggaccacggccactcctggc

SEQ ID NO: 18829 - DNA, 20 bp, synthetic construct
  source 1..20: mol_type = other DNA
gtgtgctctgcagcagcagc

SEQ ID NO: 18830 - DNA, 20 bp, synthetic construct
  source 1..20: mol_type = other DNA
atcagggctcctgccaggag

SEQ ID NO: 18831 - DNA, 20 bp, synthetic construct
  source 1..20: mol_type = other DNA
ggggacgaaagtctgcccgg

SEQ ID NO: 18832 - DNA, 20 bp, synthetic construct
  source 1..20: mol_type = other DNA
gaaggctcactcgcagcgca

SEQ ID NO: 18833 - DNA, 20 bp, synthetic construct
  source 1..20: mol_type = other DNA
gggacgaaagtctgcccgga

SEQ ID NO: 18834 - DNA, 20 bp, synthetic construct
  source 1..20: mol_type = other DNA
agcctggggaacccgcgcca

SEQ ID NO: 18835 - DNA, 20 bp, synthetic construct
  source 1..20: mol_type = other DNA
aacccgcgccagggagacac

SEQ ID NO: 18836 - DNA, 20 bp, synthetic construct
  source 1..20: mol_type = other DNA
aggacgagagaagagctgag

SEQ ID NO: 18837 - DNA, 20 bp, synthetic construct
  source 1..20: mol_type = other DNA
cgggccagcgggctagcctg

SEQ ID NO: 18838 - DNA, 20 bp, synthetic construct
  source 1..20: mol_type = other DNA
gactttcgtcccccaccccc

SEQ ID NO: 18839 - DNA, 20 bp, synthetic construct
  source 1..20: mol_type = other DNA
agaggacgagagaagagctg

SEQ ID NO: 18840 - DNA, 20 bp, synthetic construct
  source 1..20: mol_type = other DNA
gcgcctgtgtctccctggcg

SEQ ID NO: 18841 - DNA, 20 bp, synthetic construct
  source 1..20: mol_type = other DNA
cgcctgtgtctccctggcgc

SEQ ID NO: 18842 - DNA, 20 bp, synthetic construct
  source 1..20: mol_type = other DNA
ggttccccaggctagcccgc

SEQ ID NO: 18843 - DNA, 20 bp, synthetic construct
  source 1..20: mol_type = other DNA
gtgagccttccgcgctcccg

SEQ ID NO: 18844 - DNA, 20 bp, synthetic construct
  source 1..20: mol_type = other DNA
gaggacgagagaagagctga

SEQ ID NO: 18845 - DNA, 20 bp, synthetic construct
  source 1..20: mol_type = other DNA
cgccagggagacacaggcgc

SEQ ID NO: 18846 - DNA, 20 bp, synthetic construct
  source 1..20: mol_type = other DNA
tctgatgcagcacctgacaa

SEQ ID NO: 18847 - DNA, 20 bp, synthetic construct
  source 1..20: mol_type = other DNA
aacagagtaacgctttaatg

SEQ ID NO: 18848 - DNA, 20 bp, synthetic construct
  source 1..20: mol_type = other DNA
attaaagcgttactctgttg

SEQ ID NO: 18849 - DNA, 20 bp, synthetic construct
  source 1..20: mol_type = other DNA
gatgtaaacacagtctatta

SEQ ID NO: 18850 - DNA, 20 bp, synthetic construct
  source 1..20: mol_type = other DNA
ctctgatgcagcacctgaca

SEQ ID NO: 18851 - DNA, 20 bp, synthetic construct
  source 1..20: mol_type = other DNA
agatctaggaagctggtgga

SEQ ID NO: 18852 - DNA, 20 bp, synthetic construct
  source 1..20: mol_type = other DNA
ttctctgcacgggaaacatg

SEQ ID NO: 18853 - DNA, 20 bp, synthetic construct
  source 1..20: mol_type = other DNA
caacagagtaacgctttaat

SEQ ID NO: 18854 - DNA, 20 bp, synthetic construct
  source 1..20: mol_type = other DNA
tttacatcagctccgattcc

SEQ ID NO: 18855 - DNA, 20 bp, synthetic construct
  source 1..20: mol_type = other DNA
ccaacagagtaacgctttaa

SEQ ID NO: 18856 - DNA, 20 bp, synthetic construct
  source 1..20: mol_type = other DNA
gaaacatgtgggcccttgtc

SEQ ID NO: 18857 - DNA, 20 bp, synthetic construct
  source 1..20: mol_type = other DNA
ggcaaatttgttctctgcac

SEQ ID NO: 18858 - DNA, 20 bp, synthetic construct
  source 1..20: mol_type = other DNA
ccattaaagcgttactctgt

SEQ ID NO: 18859 - DNA, 20 bp, synthetic construct
  source 1..20: mol_type = other DNA
gggcaaatttgttctctgca

SEQ ID NO: 18860 - DNA, 20 bp, synthetic construct
  source 1..20: mol_type = other DNA
cattaaagcgttactctgtt

SEQ ID NO: 18861 - DNA, 20 bp, synthetic construct
  source 1..20: mol_type = other DNA
ggggatggagaaaaaatcca

SEQ ID NO: 18862 - DNA, 20 bp, synthetic construct
  source 1..20: mol_type = other DNA
ccagcattctaggaaaagca

SEQ ID NO: 18863 - DNA, 20 bp, synthetic construct
  source 1..20: mol_type = other DNA
gctttaaccaaagagacatg

SEQ ID NO: 18864 - DNA, 20 bp, synthetic construct
  source 1..20: mol_type = other DNA
gccagcattctaggaaaagc

SEQ ID NO: 18865 - DNA, 20 bp, synthetic construct
  source 1..20: mol_type = other DNA
gcagctcagcaatgtcatcc

SEQ ID NO: 18866 - DNA, 20 bp, synthetic construct
  source 1..20: mol_type = other DNA
ggggaagtctgcttgaaagg

SEQ ID NO: 18867 - DNA, 20 bp, synthetic construct
  source 1..20: mol_type = other DNA
cagcaatgtcatccaggccc

SEQ ID NO: 18868 - DNA, 20 bp, synthetic construct
  source 1..20: mol_type = other DNA
tttaaccaaagagacatgag

SEQ ID NO: 18869 - DNA, 20 bp, synthetic construct
  source 1..20: mol_type = other DNA
gcattctaggaaaagcaggg

SEQ ID NO: 18870 - DNA, 20 bp, synthetic construct
  source 1..20: mol_type = other DNA
ctttatgaaaaggaagcagg

SEQ ID NO: 18871 - DNA, 20 bp, synthetic construct
  source 1..20: mol_type = other DNA
tgaggggaagtctgcttgaa

SEQ ID NO: 18872 - DNA, 20 bp, synthetic construct
  source 1..20: mol_type = other DNA
gacttcccctcatgtctctt

SEQ ID NO: 18873 - DNA, 20 bp, synthetic construct
  source 1..20: mol_type = other DNA
ttgctttatgaaaaggaagc

SEQ ID NO: 18874 - DNA, 20 bp, synthetic construct
  source 1..20: mol_type = other DNA
attctaggaaaagcagggcg

SEQ ID NO: 18875 - DNA, 20 bp, synthetic construct
  source 1..20: mol_type = other DNA
ctttaaccaaagagacatga

SEQ ID NO: 18876 - DNA, 20 bp, synthetic construct
  source 1..20: mol_type = other DNA
tcctgcagacggttcaccag

SEQ ID NO: 18877 - DNA, 20 bp, synthetic construct
  source 1..20: mol_type = other DNA
tacgacctgacagggagtag

SEQ ID NO: 18878 - DNA, 20 bp, synthetic construct
  source 1..20: mol_type = other DNA
cgttagctgtcagagccaag

SEQ ID NO: 18879 - DNA, 20 bp, synthetic construct
  source 1..20: mol_type = other DNA
tagctgtcagagccaagcgg

SEQ ID NO: 18880 - DNA, 20 bp, synthetic construct
  source 1..20: mol_type = other DNA
ccaggtcctggcgcagacgt

SEQ ID NO: 18881 - DNA, 20 bp, synthetic construct
  source 1..20: mol_type = other DNA
ccgacgtctgcgccaggacc

SEQ ID NO: 18882 - DNA, 20 bp, synthetic construct
  source 1..20: mol_type = other DNA
agctgtcagagccaagcggc

SEQ ID NO: 18883 - DNA, 20 bp, synthetic construct
  source 1..20: mol_type = other DNA
gggctcagccagccaggtcc

SEQ ID NO: 18884 - DNA, 20 bp, synthetic construct
  source 1..20: mol_type = other DNA
gccaagcggcgggctggcgg

SEQ ID NO: 18885 - DNA, 20 bp, synthetic construct
  source 1..20: mol_type = other DNA
cgatctgcggcagctccagc

SEQ ID NO: 18886 - DNA, 20 bp, synthetic construct
  source 1..20: mol_type = other DNA
cagcagcagccagggcagcg

SEQ ID NO: 18887 - DNA, 20 bp, synthetic construct
  source 1..20: mol_type = other DNA
agagccaagcggcgggctgg

SEQ ID NO: 18888 - DNA, 20 bp, synthetic construct
  source 1..20: mol_type = other DNA
gtcagagccaagcggcgggc

SEQ ID NO: 18889 - DNA, 20 bp, synthetic construct
  source 1..20: mol_type = other DNA
gagtaggggccgcgctgccc

SEQ ID NO: 18890 - DNA, 20 bp, synthetic construct
  source 1..20: mol_type = other DNA
cggcgcagcagcagcagcca

SEQ ID NO: 18891 - DNA, 20 bp, synthetic construct
  source 1..20: mol_type = other DNA
ttcccggtaatggatctgtg

SEQ ID NO: 18892 - DNA, 20 bp, synthetic construct
  source 1..20: mol_type = other DNA
cagaagtggggtcaaccaga

SEQ ID NO: 18893 - DNA, 20 bp, synthetic construct
  source 1..20: mol_type = other DNA
gatccattaccgggaaccca

SEQ ID NO: 18894 - DNA, 20 bp, synthetic construct
  source 1..20: mol_type = other DNA
ggttcccggtaatggatctg

SEQ ID NO: 18895 - DNA, 20 bp, synthetic construct
  source 1..20: mol_type = other DNA
gttcccggtaatggatctgt

SEQ ID NO: 18896 - DNA, 20 bp, synthetic construct
  source 1..20: mol_type = other DNA
aggagcgagcgcgcccagag

SEQ ID NO: 18897 - DNA, 20 bp, synthetic construct
  source 1..20: mol_type = other DNA
ccttcccacccagtttccct

SEQ ID NO: 18898 - DNA, 20 bp, synthetic construct
  source 1..20: mol_type = other DNA
ccagcagctgagctccactc

SEQ ID NO: 18899 - DNA, 20 bp, synthetic construct
  source 1..20: mol_type = other DNA
ccagagtggagctcagctgc

SEQ ID NO: 18900 - DNA, 20 bp, synthetic construct
  source 1..20: mol_type = other DNA
acccggaagtgggtaggcgc

SEQ ID NO: 18901 - DNA, 20 bp, synthetic construct
  source 1..20: mol_type = other DNA
cagctgctgggagccagcgg

SEQ ID NO: 18902 - DNA, 20 bp, synthetic construct
  source 1..20: mol_type = other DNA
tcagctgctgggagccagcg

SEQ ID NO: 18903 - DNA, 20 bp, synthetic construct
  source 1..20: mol_type = other DNA
cagagtggagctcagctgct

SEQ ID NO: 18904 - DNA, 20 bp, synthetic construct
  source 1..20: mol_type = other DNA
gctcagctgctgggagccag

SEQ ID NO: 18905 - DNA, 20 bp, synthetic construct
  source 1..20: mol_type = other DNA
cgccccacagatccattacc

SEQ ID NO: 18906 - DNA, 20 bp, synthetic construct
  source 1..20: mol_type = other DNA
gacaaagcgcgccagcgcgg

SEQ ID NO: 18907 - DNA, 20 bp, synthetic construct
  source 1..20: mol_type = other DNA
cctcgcggagaagccagcca

SEQ ID NO: 18908 - DNA, 20 bp, synthetic construct
  source 1..20: mol_type = other DNA
gaggacaaagcgcgccagcg

SEQ ID NO: 18909 - DNA, 20 bp, synthetic construct
  source 1..20: mol_type = other DNA
gcggcaaccccgagccaccc

SEQ ID NO: 18910 - DNA, 20 bp, synthetic construct
  source 1..20: mol_type = other DNA
cgggccgggattgcgcgagg

SEQ ID NO: 18911 - DNA, 20 bp, synthetic construct
  source 1..20: mol_type = other DNA
acccgggccgggattgcgcg

SEQ ID NO: 18912 - DNA, 20 bp, synthetic construct
  source 1..20: mol_type = other DNA
ccatggctggcttctccgcg

SEQ ID NO: 18913 - DNA, 20 bp, synthetic construct
  source 1..20: mol_type = other DNA
gccttgccgccgccacctcg

SEQ ID NO: 18914 - DNA, 20 bp, synthetic construct
  source 1..20: mol_type = other DNA
gcttctccgcgaggtggcgg

SEQ ID NO: 18915 - DNA, 20 bp, synthetic construct
  source 1..20: mol_type = other DNA
cgccagcgcggaggagccgg

SEQ ID NO: 18916 - DNA, 20 bp, synthetic construct
  source 1..20: mol_type = other DNA
aagccagccatgggcgccgc

SEQ ID NO: 18917 - DNA, 20 bp, synthetic construct
  source 1..20: mol_type = other DNA
ctcgcggagaagccagccat

SEQ ID NO: 18918 - DNA, 20 bp, synthetic construct
  source 1..20: mol_type = other DNA
gcgcgccagcgcggaggagc

SEQ ID NO: 18919 - DNA, 20 bp, synthetic construct
  source 1..20: mol_type = other DNA
cgccgccggctcctccgcgc

SEQ ID NO: 18920 - DNA, 20 bp, synthetic construct
  source 1..20: mol_type = other DNA
ggaggagccggcggcgccca

SEQ ID NO: 18921 - DNA, 20 bp, synthetic construct
  source 1..20: mol_type = other DNA
cccgagcggccgccaaacaa

SEQ ID NO: 18922 - DNA, 20 bp, synthetic construct
  source 1..20: mol_type = other DNA
ggacgacgaaaaatcccccc

SEQ ID NO: 18923 - DNA, 20 bp, synthetic construct
  source 1..20: mol_type = other DNA
gaggagctcggtcgccgaag

SEQ ID NO: 18924 - DNA, 20 bp, synthetic construct
  source 1..20: mol_type = other DNA
cgtcagtcgagtccggagtg

SEQ ID NO: 18925 - DNA, 20 bp, synthetic construct
  source 1..20: mol_type = other DNA
gagctcggtcgccgaagcgg

SEQ ID NO: 18926 - DNA, 20 bp, synthetic construct
  source 1..20: mol_type = other DNA
gtttgcccgtcagtcgagtc

SEQ ID NO: 18927 - DNA, 20 bp, synthetic construct
  source 1..20: mol_type = other DNA
agctcggtcgccgaagcgga

SEQ ID NO: 18928 - DNA, 20 bp, synthetic construct
  source 1..20: mol_type = other DNA
tcaagagtctccctccgctt

SEQ ID NO: 18929 - DNA, 20 bp, synthetic construct
  source 1..20: mol_type = other DNA
cctccgggcaaaggtccagg

SEQ ID NO: 18930 - DNA, 20 bp, synthetic construct
  source 1..20: mol_type = other DNA
ggcgaccgagctcctcactc

SEQ ID NO: 18931 - DNA, 20 bp, synthetic construct
  source 1..20: mol_type = other DNA
ggtccaggcggtggccgtgg

SEQ ID NO: 18932 - DNA, 20 bp, synthetic construct
  source 1..20: mol_type = other DNA
gcttcatcttgccgccgcca

SEQ ID NO: 18933 - DNA, 20 bp, synthetic construct
  source 1..20: mol_type = other DNA
ccgggcaaaggtccaggcgg

SEQ ID NO: 18934 - DNA, 20 bp, synthetic construct
  source 1..20: mol_type = other DNA
cgagtccggagtgaggagct

SEQ ID NO: 18935 - DNA, 20 bp, synthetic construct
  source 1..20: mol_type = other DNA
ccaggcggtggccgtggcgg

SEQ ID NO: 18936 - DNA, 20 bp, synthetic construct
  source 1..20: mol_type = other DNA
gagctggaaaaataccgcta

SEQ ID NO: 18937 - DNA, 20 bp, synthetic construct
  source 1..20: mol_type = other DNA
gttctccctacctctaatgg

SEQ ID NO: 18938 - DNA, 20 bp, synthetic construct
  source 1..20: mol_type = other DNA
accatacataaacggagctg

SEQ ID NO: 18939 - DNA, 20 bp, synthetic construct
  source 1..20: mol_type = other DNA
ccgccgccgccattagaggt

SEQ ID NO: 18940 - DNA, 20 bp, synthetic construct
  source 1..20: mol_type = other DNA
tttaccaagaatctctgctg

SEQ ID NO: 18941 - DNA, 20 bp, synthetic construct
  source 1..20: mol_type = other DNA
agagctggaaaaataccgct

SEQ ID NO: 18942 - DNA, 20 bp, synthetic construct
  source 1..20: mol_type = other DNA
caggggctttggcctcccag

SEQ ID NO: 18943 - DNA, 20 bp, synthetic construct
  source 1..20: mol_type = other DNA
aataccgctagggcccaaga

SEQ ID NO: 18944 - DNA, 20 bp, synthetic construct
  source 1..20: mol_type = other DNA
accgctagggcccaagatgg

SEQ ID NO: 18945 - DNA, 20 bp, synthetic construct
  source 1..20: mol_type = other DNA
gatcgcagcccgcccctggg

SEQ ID NO: 18946 - DNA, 20 bp, synthetic construct
  source 1..20: mol_type = other DNA
ttcagatcgcagcccgcccc

SEQ ID NO: 18947 - DNA, 20 bp, synthetic construct
  source 1..20: mol_type = other DNA
tcagatcgcagcccgcccct

SEQ ID NO: 18948 - DNA, 20 bp, synthetic construct
  source 1..20: mol_type = other DNA
caggccgctcttcccagagc

SEQ ID NO: 18949 - DNA, 20 bp, synthetic construct
  source 1..20: mol_type = other DNA
tgagccgccgccgccattag

SEQ ID NO: 18950 - DNA, 20 bp, synthetic construct
  source 1..20: mol_type = other DNA
ttaccaagaatctctgctgc

SEQ ID NO: 18951 - DNA, 20 bp, synthetic construct
  source 1..20: mol_type = other DNA
ggcgctgcgaacgttcgccg

SEQ ID NO: 18952 - DNA, 20 bp, synthetic construct
  source 1..20: mol_type = other DNA
cggcggggaagtgagcaagg

SEQ ID NO: 18953 - DNA, 20 bp, synthetic construct
  source 1..20: mol_type = other DNA
aggccccggagccacccccg

SEQ ID NO: 18954 - DNA, 20 bp, synthetic construct
  source 1..20: mol_type = other DNA
ggcagcgcctactcaggccc

SEQ ID NO: 18955 - DNA, 20 bp, synthetic construct
  source 1..20: mol_type = other DNA
cgacgacccctgctccggcg

SEQ ID NO: 18956 - DNA, 20 bp, synthetic construct
  source 1..20: mol_type = other DNA
caccttgctcacttccccgc

SEQ ID NO: 18957 - DNA, 20 bp, synthetic construct
  source 1..20: mol_type = other DNA
ggcggggaagtgagcaaggt

SEQ ID NO: 18958 - DNA, 20 bp, synthetic construct
  source 1..20: mol_type = other DNA
gctgcgaacgttcgccgcgg

SEQ ID NO: 18959 - DNA, 20 bp, synthetic construct
  source 1..20: mol_type = other DNA
cggggaagtgagcaaggtgg

SEQ ID NO: 18960 - DNA, 20 bp, synthetic construct
  source 1..20: mol_type = other DNA
gcgctgcgaacgttcgccgc

SEQ ID NO: 18961 - DNA, 20 bp, synthetic construct
  source 1..20: mol_type = other DNA
gcgcgtgccgggcggagaag

SEQ ID NO: 18962 - DNA, 20 bp, synthetic construct
  source 1..20: mol_type = other DNA
agccccctcggctgaggcag

SEQ ID NO: 18963 - DNA, 20 bp, synthetic construct
  source 1..20: mol_type = other DNA
gcggggaagtgagcaaggtg

SEQ ID NO: 18964 - DNA, 20 bp, synthetic construct
  source 1..20: mol_type = other DNA
tcgccgcgggggtggctccg

SEQ ID NO: 18965 - DNA, 20 bp, synthetic construct
  source 1..20: mol_type = other DNA
ggtggctccggggcctgagt

SEQ ID NO: 18966 - DNA, 20 bp, synthetic construct
  source 1..20: mol_type = other DNA
gcgtgaggcgcacaaaaggg

SEQ ID NO: 18967 - DNA, 20 bp, synthetic construct
  source 1..20: mol_type = other DNA
gcctcacgcagaaacagaag

SEQ ID NO: 18968 - DNA, 20 bp, synthetic construct
  source 1..20: mol_type = other DNA
cgtgaggcgcacaaaagggc

SEQ ID NO: 18969 - DNA, 20 bp, synthetic construct
  source 1..20: mol_type = other DNA
cctcacgcagaaacagaagg

SEQ ID NO: 18970 - DNA, 20 bp, synthetic construct
  source 1..20: mol_type = other DNA
gtgaggcgcacaaaagggcg

SEQ ID NO: 18971 - DNA, 20 bp, synthetic construct
  source 1..20: mol_type = other DNA
ctgcacgcgcgctcgctcgg

SEQ ID NO: 18972 - DNA, 20 bp, synthetic construct
  source 1..20: mol_type = other DNA
gccccgagcacccgcagctc

SEQ ID NO: 18973 - DNA, 20 bp, synthetic construct
  source 1..20: mol_type = other DNA
gaccgagccacgggcccccg

SEQ ID NO: 18974 - DNA, 20 bp, synthetic construct
  source 1..20: mol_type = other DNA
gccggagctgcgggtgctcg

SEQ ID NO: 18975 - DNA, 20 bp, synthetic construct
  source 1..20: mol_type = other DNA
gctgcacgcgcgctcgctcg

SEQ ID NO: 18976 - DNA, 20 bp, synthetic construct
  source 1..20: mol_type = other DNA
ggagctgcgggtgctcgggg

SEQ ID NO: 18977 - DNA, 20 bp, synthetic construct
  source 1..20: mol_type = other DNA
gctccggcgccgcggcgaga

SEQ ID NO: 18978 - DNA, 20 bp, synthetic construct
  source 1..20: mol_type = other DNA
ccgcgctgggcgcgctgagg

SEQ ID NO: 18979 - DNA, 20 bp, synthetic construct
  source 1..20: mol_type = other DNA
tcgccgcggcgccggagctg

SEQ ID NO: 18980 - DNA, 20 bp, synthetic construct
  source 1..20: mol_type = other DNA
cacccgcagctccggcgccg

SEQ ID NO: 18981 - DNA, 20 bp, synthetic construct
  source 1..20: mol_type = other DNA
gaacagtgtatccacagcgt

SEQ ID NO: 18982 - DNA, 20 bp, synthetic construct
  source 1..20: mol_type = other DNA
ggaacagtgtatccacagcg

SEQ ID NO: 18983 - DNA, 20 bp, synthetic construct
  source 1..20: mol_type = other DNA
gaggtgagcagaaaccagcg

SEQ ID NO: 18984 - DNA, 20 bp, synthetic construct
  source 1..20: mol_type = other DNA
agcagagtcattgtgaccag

SEQ ID NO: 18985 - DNA, 20 bp, synthetic construct
  source 1..20: mol_type = other DNA
aagaggtgagcagaaaccag

SEQ ID NO: 18986 - DNA, 20 bp, synthetic construct
  source 1..20: mol_type = other DNA
cctggcatggtcccacgctg

SEQ ID NO: 18987 - DNA, 20 bp, synthetic construct
  source 1..20: mol_type = other DNA
gcagagtcattgtgaccaga

SEQ ID NO: 18988 - DNA, 20 bp, synthetic construct
  source 1..20: mol_type = other DNA
ttagggaaagaacatcagga

SEQ ID NO: 18989 - DNA, 20 bp, synthetic construct
  source 1..20: mol_type = other DNA
atccagtcttccctccccgc

SEQ ID NO: 18990 - DNA, 20 bp, synthetic construct
  source 1..20: mol_type = other DNA
tgtgaccagaggggtttgtg

SEQ ID NO: 18991 - DNA, 20 bp, synthetic construct
  source 1..20: mol_type = other DNA
cagagtcattgtgaccagag

SEQ ID NO: 18992 - DNA, 20 bp, synthetic construct
  source 1..20: mol_type = other DNA
tgtgtggctgaagaggcagg

SEQ ID NO: 18993 - DNA, 20 bp, synthetic construct
  source 1..20: mol_type = other DNA
gtttgtgtggctgaagaggc

SEQ ID NO: 18994 - DNA, 20 bp, synthetic construct
  source 1..20: mol_type = other DNA
aggggtttgtgtggctgaag

SEQ ID NO: 18995 - DNA, 20 bp, synthetic construct
  source 1..20: mol_type = other DNA
ttcagccacacaaacccctc

SEQ ID NO: 18996 - DNA, 20 bp, synthetic construct
  source 1..20: mol_type = other DNA
agccaatgtgacgggatcag

SEQ ID NO: 18997 - DNA, 20 bp, synthetic construct
  source 1..20: mol_type = other DNA
ccttacgggagccaatgtga

SEQ ID NO: 18998 - DNA, 20 bp, synthetic construct
  source 1..20: mol_type = other DNA
ccgtcacattggctcccgta

SEQ ID NO: 18999 - DNA, 20 bp, synthetic construct
  source 1..20: mol_type = other DNA
gccactcattccccactcac

SEQ ID NO: 19000 - DNA, 20 bp, synthetic construct
  source 1..20: mol_type = other DNA
cttacgggagccaatgtgac

SEQ ID NO: 19001 - DNA, 20 bp, synthetic construct
  source 1..20: mol_type = other DNA
gtttagcgggtgccggtgag

SEQ ID NO: 19002 - DNA, 20 bp, synthetic construct
  source 1..20: mol_type = other DNA
tgcccctgatcccgtcacat

SEQ ID NO: 19003 - DNA, 20 bp, synthetic construct
  source 1..20: mol_type = other DNA
attggctcccgtaaggccat

SEQ ID NO: 19004 - DNA, 20 bp, synthetic construct
  source 1..20: mol_type = other DNA
ggaatgagtggcggagagtg

SEQ ID NO: 19005 - DNA, 20 bp, synthetic construct
  source 1..20: mol_type = other DNA
gctgaaggtttagcgggtgc

SEQ ID NO: 19006 - DNA, 20 bp, synthetic construct
  source 1..20: mol_type = other DNA
tctgctctgcttcccttcgg

SEQ ID NO: 19007 - DNA, 20 bp, synthetic construct
  source 1..20: mol_type = other DNA
tccgaagggaagcagagcag

SEQ ID NO: 19008 - DNA, 20 bp, synthetic construct
  source 1..20: mol_type = other DNA
ggtgagtggggaatgagtgg

SEQ ID NO: 19009 - DNA, 20 bp, synthetic construct
  source 1..20: mol_type = other DNA
ttagcgggtgccggtgagtg

SEQ ID NO: 19010 - DNA, 20 bp, synthetic construct
  source 1..20: mol_type = other DNA
gccggtgagtggggaatgag

SEQ ID NO: 19011 - DNA, 20 bp, synthetic construct
  source 1..20: mol_type = other DNA
ggaaagagcaaagtctgcgc

SEQ ID NO: 19012 - DNA, 20 bp, synthetic construct
  source 1..20: mol_type = other DNA
agaaagatggtggtgtgtgt

SEQ ID NO: 19013 - DNA, 20 bp, synthetic construct
  source 1..20: mol_type = other DNA
cccgagcgcaagaaagatgg

SEQ ID NO: 19014 - DNA, 20 bp, synthetic construct
  source 1..20: mol_type = other DNA
gggttgccagacgctggaat

SEQ ID NO: 19015 - DNA, 20 bp, synthetic construct
  source 1..20: mol_type = other DNA
gccgccgggttgccagacgc

SEQ ID NO: 19016 - DNA, 20 bp, synthetic construct
  source 1..20: mol_type = other DNA
gccccctggccggccgactg

SEQ ID NO: 19017 - DNA, 20 bp, synthetic construct
  source 1..20: mol_type = other DNA
tccagcgtctggcaacccgg

SEQ ID NO: 19018 - DNA, 20 bp, synthetic construct
  source 1..20: mol_type = other DNA
tcttgcgctcgggaagctcg

SEQ ID NO: 19019 - DNA, 20 bp, synthetic construct
  source 1..20: mol_type = other DNA
agaccacccattccagcgtc

SEQ ID NO: 19020 - DNA, 20 bp, synthetic construct
  source 1..20: mol_type = other DNA
tcgggaagctcggggctcag

SEQ ID NO: 19021 - DNA, 20 bp, synthetic construct
  source 1..20: mol_type = other DNA
ttgccagacgctggaatggg

SEQ ID NO: 19022 - DNA, 20 bp, synthetic construct
  source 1..20: mol_type = other DNA
gccccagtcggccggccagg

SEQ ID NO: 19023 - DNA, 20 bp, synthetic construct
  source 1..20: mol_type = other DNA
gaggagccagagtcgccgcc

SEQ ID NO: 19024 - DNA, 20 bp, synthetic construct
  source 1..20: mol_type = other DNA
tgaggagccagagtcgccgc

SEQ ID NO: 19025 - DNA, 20 bp, synthetic construct
  source 1..20: mol_type = other DNA
ctcctcctccttcagtgctg

SEQ ID NO: 19026 - DNA, 20 bp, synthetic construct
  source 1..20: mol_type = other DNA
gtcctggcttgagagccgag

SEQ ID NO: 19027 - DNA, 20 bp, synthetic construct
  source 1..20: mol_type = other DNA
agctcgcctgttctccctcg

SEQ ID NO: 19028 - DNA, 20 bp, synthetic construct
  source 1..20: mol_type = other DNA
gagccgagcggcaagagcgc

SEQ ID NO: 19029 - DNA, 20 bp, synthetic construct
  source 1..20: mol_type = other DNA
agagccgagcggcaagagcg

SEQ ID NO: 19030 - DNA, 20 bp, synthetic construct
  source 1..20: mol_type = other DNA
gtttgtgcaaactcggccgg

SEQ ID NO: 19031 - DNA, 20 bp, synthetic construct
  source 1..20: mol_type = other DNA
aggaagccgcgagggagaac

SEQ ID NO: 19032 - DNA, 20 bp, synthetic construct
  source 1..20: mol_type = other DNA
gagtaggagaggaagccgcg

SEQ ID NO: 19033 - DNA, 20 bp, synthetic construct
  source 1..20: mol_type = other DNA
ggagcctgggagtgcgctgc

SEQ ID NO: 19034 - DNA, 20 bp, synthetic construct
  source 1..20: mol_type = other DNA
gtgcgctgccggcgtggcag

SEQ ID NO: 19035 - DNA, 20 bp, synthetic construct
  source 1..20: mol_type = other DNA
cacgccggcagcgcactccc

SEQ ID NO: 19036 - DNA, 20 bp, synthetic construct
  source 1..20: mol_type = other DNA
cacgggcaccgctgccacgc

SEQ ID NO: 19037 - DNA, 20 bp, synthetic construct
  source 1..20: mol_type = other DNA
agtaggagaggaagccgcga

SEQ ID NO: 19038 - DNA, 20 bp, synthetic construct
  source 1..20: mol_type = other DNA
ggggaagggaagagtaggag

SEQ ID NO: 19039 - DNA, 20 bp, synthetic construct
  source 1..20: mol_type = other DNA
gggccggggaagggaagagt

SEQ ID NO: 19040 - DNA, 20 bp, synthetic construct
  source 1..20: mol_type = other DNA
cgagcggcaagagcgcgggc

SEQ ID NO: 19041 - DNA, 20 bp, synthetic construct
  source 1..20: mol_type = other DNA
actgcgaagacaaatcgccc

SEQ ID NO: 19042 - DNA, 20 bp, synthetic construct
  source 1..20: mol_type = other DNA
atagactgatgataaatcct

SEQ ID NO: 19043 - DNA, 20 bp, synthetic construct
  source 1..20: mol_type = other DNA
aatagactgatgataaatcc

SEQ ID NO: 19044 - DNA, 20 bp, synthetic construct
  source 1..20: mol_type = other DNA
cttctattatgaaatattcc

SEQ ID NO: 19045 - DNA, 20 bp, synthetic construct
  source 1..20: mol_type = other DNA
tacctttcagtgaacatgaa

SEQ ID NO: 19046 - DNA, 20 bp, synthetic construct
  source 1..20: mol_type = other DNA
cccaagctcaaatgggcagc

SEQ ID NO: 19047 - DNA, 20 bp, synthetic construct
  source 1..20: mol_type = other DNA
taccattcatgttcactgaa

SEQ ID NO: 19048 - DNA, 20 bp, synthetic construct
  source 1..20: mol_type = other DNA
ccgcggaaccggttaagccg

SEQ ID NO: 19049 - DNA, 20 bp, synthetic construct
  source 1..20: mol_type = other DNA
agcgcccctgagccttccca

SEQ ID NO: 19050 - DNA, 20 bp, synthetic construct
  source 1..20: mol_type = other DNA
tgcactcacctcttccgcag

SEQ ID NO: 19051 - DNA, 20 bp, synthetic construct
  source 1..20: mol_type = other DNA
ggcacggagcggctcccgtt

SEQ ID NO: 19052 - DNA, 20 bp, synthetic construct
  source 1..20: mol_type = other DNA
tcgggcgcgtcagcagccga

SEQ ID NO: 19053 - DNA, 20 bp, synthetic construct
  source 1..20: mol_type = other DNA
cctgagccttcccatggccc

SEQ ID NO: 19054 - DNA, 20 bp, synthetic construct
  source 1..20: mol_type = other DNA
ccgcggcttaaccggttccg

SEQ ID NO: 19055 - DNA, 20 bp, synthetic construct
  source 1..20: mol_type = other DNA
gctgacgcgcccgaagcccg

SEQ ID NO: 19056 - DNA, 20 bp, synthetic construct
  source 1..20: mol_type = other DNA
gcggaagaggtgagtgcagc

SEQ ID NO: 19057 - DNA, 20 bp, synthetic construct
  source 1..20: mol_type = other DNA
ggaaggctcaggggcgctcg

SEQ ID NO: 19058 - DNA, 20 bp, synthetic construct
  source 1..20: mol_type = other DNA
ccgggccatgggaaggctca

SEQ ID NO: 19059 - DNA, 20 bp, synthetic construct
  source 1..20: mol_type = other DNA
ccccagcccgggccatggga

SEQ ID NO: 19060 - DNA, 20 bp, synthetic construct
  source 1..20: mol_type = other DNA
cccgggccatgggaaggctc

SEQ ID NO: 19061 - DNA, 20 bp, synthetic construct
  source 1..20: mol_type = other DNA
cgggccatgggaaggctcag

SEQ ID NO: 19062 - DNA, 20 bp, synthetic construct
  source 1..20: mol_type = other DNA
ctcagccgggatcggcgccg

SEQ ID NO: 19063 - DNA, 20 bp, synthetic construct
  source 1..20: mol_type = other DNA
tgtgatccgtcgcttcccag

SEQ ID NO: 19064 - DNA, 20 bp, synthetic construct
  source 1..20: mol_type = other DNA
cgagtgccacatcactgcgc

SEQ ID NO: 19065 - DNA, 20 bp, synthetic construct
  source 1..20: mol_type = other DNA
ggacggccagcgcagtgatg

SEQ ID NO: 19066 - DNA, 20 bp, synthetic construct
  source 1..20: mol_type = other DNA
agcgcagtgatgtggcactc

SEQ ID NO: 19067 - DNA, 20 bp, synthetic construct
  source 1..20: mol_type = other DNA
gcccagcgagcgcagagccc

SEQ ID NO: 19068 - DNA, 20 bp, synthetic construct
  source 1..20: mol_type = other DNA
tgtggcactcgggccgcgcg

SEQ ID NO: 19069 - DNA, 20 bp, synthetic construct
  source 1..20: mol_type = other DNA
atcactgcgctggccgtcca

SEQ ID NO: 19070 - DNA, 20 bp, synthetic construct
  source 1..20: mol_type = other DNA
gtggggcggcggaccttgga

SEQ ID NO: 19071 - DNA, 20 bp, synthetic construct
  source 1..20: mol_type = other DNA
gatgtggcactcgggccgcg

SEQ ID NO: 19072 - DNA, 20 bp, synthetic construct
  source 1..20: mol_type = other DNA
aggactgtaaggagcagcag

SEQ ID NO: 19073 - DNA, 20 bp, synthetic construct
  source 1..20: mol_type = other DNA
aaggagcagcagcggcagcg

SEQ ID NO: 19074 - DNA, 20 bp, synthetic construct
  source 1..20: mol_type = other DNA
gcagcgggggcggcatggtg

SEQ ID NO: 19075 - DNA, 20 bp, synthetic construct
  source 1..20: mol_type = other DNA
aggagcagcagcggcagcgg

SEQ ID NO: 19076 - DNA, 20 bp, synthetic construct
  source 1..20: mol_type = other DNA
cgcagagccccggccccgcg

SEQ ID NO: 19077 - DNA, 20 bp, synthetic construct
  source 1..20: mol_type = other DNA
taaggagcagcagcggcagc

SEQ ID NO: 19078 - DNA, 20 bp, synthetic construct
  source 1..20: mol_type = other DNA
gcaggggagatgaaaagtgt

SEQ ID NO: 19079 - DNA, 20 bp, synthetic construct
  source 1..20: mol_type = other DNA
aagggacagtacagcaactg

SEQ ID NO: 19080 - DNA, 20 bp, synthetic construct
  source 1..20: mol_type = other DNA
cgctgctgccatggggatcg

SEQ ID NO: 19081 - DNA, 20 bp, synthetic construct
  source 1..20: mol_type = other DNA
gtgtgcagacagttaagatt

SEQ ID NO: 19082 - DNA, 20 bp, synthetic construct
  source 1..20: mol_type = other DNA
gtatggatgctggctgatcc

SEQ ID NO: 19083 - DNA, 20 bp, synthetic construct
  source 1..20: mol_type = other DNA
atcactccgctgctgccatg

SEQ ID NO: 19084 - DNA, 20 bp, synthetic construct
  source 1..20: mol_type = other DNA
acacagaaaagcactgtcac

SEQ ID NO: 19085 - DNA, 20 bp, synthetic construct
  source 1..20: mol_type = other DNA
cccgatccccatggcagcag

SEQ ID NO: 19086 - DNA, 20 bp, synthetic construct
  source 1..20: mol_type = other DNA
ccacccctccccgatcccca

SEQ ID NO: 19087 - DNA, 20 bp, synthetic construct
  source 1..20: mol_type = other DNA
taagatttggtgttccagca

SEQ ID NO: 19088 - DNA, 20 bp, synthetic construct
  source 1..20: mol_type = other DNA
ctttcttcatgtatggatgc

SEQ ID NO: 19089 - DNA, 20 bp, synthetic construct
  source 1..20: mol_type = other DNA
gctgccatggggatcgggga

SEQ ID NO: 19090 - DNA, 20 bp, synthetic construct
  source 1..20: mol_type = other DNA
tatcactgaaagaggtattg

SEQ ID NO: 19091 - DNA, 20 bp, synthetic construct
  source 1..20: mol_type = other DNA
actgaaagaggtattgagga

SEQ ID NO: 19092 - DNA, 20 bp, synthetic construct
  source 1..20: mol_type = other DNA
agagataatctgtgtgcttt

SEQ ID NO: 19093 - DNA, 20 bp, synthetic construct
  source 1..20: mol_type = other DNA
gattggggcacagagaaaag

SEQ ID NO: 19094 - DNA, 20 bp, synthetic construct
  source 1..20: mol_type = other DNA
gggcacagagaaaagaggtt

SEQ ID NO: 19095 - DNA, 20 bp, synthetic construct
  source 1..20: mol_type = other DNA
ggcacagagaaaagaggttg

SEQ ID NO: 19096 - DNA, 20 bp, synthetic construct
  source 1..20: mol_type = other DNA
cgctaagggtgcaggagaag

SEQ ID NO: 19097 - DNA, 20 bp, synthetic construct
  source 1..20: mol_type = other DNA
gccgctaagggtgcaggaga

SEQ ID NO: 19098 - DNA, 20 bp, synthetic construct
  source 1..20: mol_type = other DNA
ctcccaaaaaagcagagaag

SEQ ID NO: 19099 - DNA, 20 bp, synthetic construct
  source 1..20: mol_type = other DNA
gcgtggaaataagggattgg

SEQ ID NO: 19100 - DNA, 20 bp, synthetic construct
  source 1..20: mol_type = other DNA
ggggcacagagaaaagaggt

SEQ ID NO: 19101 - DNA, 20 bp, synthetic construct
  source 1..20: mol_type = other DNA
ggtgcagaaataagggattg

SEQ ID NO: 19102 - DNA, 20 bp, synthetic construct
  source 1..20: mol_type = other DNA
ggacttgccgctaagggtgc

SEQ ID NO: 19103 - DNA, 20 bp, synthetic construct
  source 1..20: mol_type = other DNA
gttcttgccccgtagaaaag

SEQ ID NO: 19104 - DNA, 20 bp, synthetic construct
  source 1..20: mol_type = other DNA
ctctcccaaaaaagcagaga

SEQ ID NO: 19105 - DNA, 20 bp, synthetic construct
  source 1..20: mol_type = other DNA
cccttctcctgcacccttag

SEQ ID NO: 19106 - DNA, 20 bp, synthetic construct
  source 1..20: mol_type = other DNA
ccgctaagggtgcaggagaa

SEQ ID NO: 19107 - DNA, 20 bp, synthetic construct
  source 1..20: mol_type = other DNA
gggtgcaggagaaggggttg

SEQ ID NO: 19108 - DNA, 20 bp, synthetic construct
  source 1..20: mol_type = other DNA
tcgtagacagaggtgtgccg

SEQ ID NO: 19109 - DNA, 20 bp, synthetic construct
  source 1..20: mol_type = other DNA
cgtagacagaggtgtgccgg

SEQ ID NO: 19110 - DNA, 20 bp, synthetic construct
  source 1..20: mol_type = other DNA
ctccgccgcccaaggtaagg

SEQ ID NO: 19111 - DNA, 20 bp, synthetic construct
  source 1..20: mol_type = other DNA
gcggacccccttaccttggg

SEQ ID NO: 19112 - DNA, 20 bp, synthetic construct
  source 1..20: mol_type = other DNA
gtagacagaggtgtgccggg

SEQ ID NO: 19113 - DNA, 20 bp, synthetic construct
  source 1..20: mol_type = other DNA
cggattcagcttctgcccag

SEQ ID NO: 19114 - DNA, 20 bp, synthetic construct
  source 1..20: mol_type = other DNA
gacccccttaccttgggcgg

SEQ ID NO: 19115 - DNA, 20 bp, synthetic construct
  source 1..20: mol_type = other DNA
gattcagcttctgcccagtg

SEQ ID NO: 19116 - DNA, 20 bp, synthetic construct
  source 1..20: mol_type = other DNA
tggctccgccgcccaaggta

SEQ ID NO: 19117 - DNA, 20 bp, synthetic construct
  source 1..20: mol_type = other DNA
aatgctcgtgctacctgccc

SEQ ID NO: 19118 - DNA, 20 bp, synthetic construct
  source 1..20: mol_type = other DNA
aaacagctgaaagccccact

SEQ ID NO: 19119 - DNA, 20 bp, synthetic construct
  source 1..20: mol_type = other DNA
ggcactggctccgccgccca

SEQ ID NO: 19120 - DNA, 20 bp, synthetic construct
  source 1..20: mol_type = other DNA
gctccgccgcccaaggtaag

SEQ ID NO: 19121 - DNA, 20 bp, synthetic construct
  source 1..20: mol_type = other DNA
ctgtccccctcccctccccc

SEQ ID NO: 19122 - DNA, 20 bp, synthetic construct
  source 1..20: mol_type = other DNA
ggcggcggagccagtgccgc

SEQ ID NO: 19123 - DNA, 20 bp, synthetic construct
  source 1..20: mol_type = other DNA
aagactcacagtctgctggt

SEQ ID NO: 19124 - DNA, 20 bp, synthetic construct
  source 1..20: mol_type = other DNA
aaagactcacagtctgctgg

SEQ ID NO: 19125 - DNA, 20 bp, synthetic construct
  source 1..20: mol_type = other DNA
cacaaagactcacagtctgc

SEQ ID NO: 19126 - DNA, 20 bp, synthetic construct
  source 1..20: mol_type = other DNA
tattcttaagtacctttaac

SEQ ID NO: 19127 - DNA, 20 bp, synthetic construct
  source 1..20: mol_type = other DNA
taatgtatactgaactgcag

SEQ ID NO: 19128 - DNA, 20 bp, synthetic construct
  source 1..20: mol_type = other DNA
tcagtatacattacatattg

SEQ ID NO: 19129 - DNA, 20 bp, synthetic construct
  source 1..20: mol_type = other DNA
agaaacgacatgagcacagc

SEQ ID NO: 19130 - DNA, 20 bp, synthetic construct
  source 1..20: mol_type = other DNA
gttctatacattcctgttaa

SEQ ID NO: 19131 - DNA, 20 bp, synthetic construct
  source 1..20: mol_type = other DNA
ctcatcaatataacaaagaa

SEQ ID NO: 19132 - DNA, 20 bp, synthetic construct
  source 1..20: mol_type = other DNA
agcaaaaaatatattactgt

SEQ ID NO: 19133 - DNA, 20 bp, synthetic construct
  source 1..20: mol_type = other DNA
cagcagactgtgagtctttg

SEQ ID NO: 19134 - DNA, 20 bp, synthetic construct
  source 1..20: mol_type = other DNA
tctgcctccaactccaaaga

SEQ ID NO: 19135 - DNA, 20 bp, synthetic construct
  source 1..20: mol_type = other DNA
tgagaagtggactctttcaa

SEQ ID NO: 19136 - DNA, 20 bp, synthetic construct
  source 1..20: mol_type = other DNA
agtgactcctagctgggcac

SEQ ID NO: 19137 - DNA, 20 bp, synthetic construct
  source 1..20: mol_type = other DNA
ctgggcactggatgcagttg

SEQ ID NO: 19138 - DNA, 20 bp, synthetic construct
  source 1..20: mol_type = other DNA
tggatgcagttgaggattgc

SEQ ID NO: 19139 - DNA, 20 bp, synthetic construct
  source 1..20: mol_type = other DNA
cttctcagtgactcctagct

SEQ ID NO: 19140 - DNA, 20 bp, synthetic construct
  source 1..20: mol_type = other DNA
agctaggagtcactgagaag

SEQ ID NO: 19141 - DNA, 20 bp, synthetic construct
  source 1..20: mol_type = other DNA
ttaatttccatctttggagt

SEQ ID NO: 19142 - DNA, 20 bp, synthetic construct
  source 1..20: mol_type = other DNA
actgcatccagtgcccagct

SEQ ID NO: 19143 - DNA, 20 bp, synthetic construct
  source 1..20: mol_type = other DNA
gaagagggtcactccctcac

SEQ ID NO: 19144 - DNA, 20 bp, synthetic construct
  source 1..20: mol_type = other DNA
acttctcagtgactcctagc

SEQ ID NO: 19145 - DNA, 20 bp, synthetic construct
  source 1..20: mol_type = other DNA
ctttcaatggcagccagtga

SEQ ID NO: 19146 - DNA, 20 bp, synthetic construct
  source 1..20: mol_type = other DNA
taaactttaatttccatctt

SEQ ID NO: 19147 - DNA, 20 bp, synthetic construct
  source 1..20: mol_type = other DNA
atttccatctttggagttgg

SEQ ID NO: 19148 - DNA, 20 bp, synthetic construct
  source 1..20: mol_type = other DNA
tctttcaatggcagccagtg

SEQ ID NO: 19149 - DNA, 20 bp, synthetic construct
  source 1..20: mol_type = other DNA
tggtcttcgatgcacaggag

SEQ ID NO: 19150 - DNA, 20 bp, synthetic construct
  source 1..20: mol_type = other DNA
gagctaagtccccagattgg

SEQ ID NO: 19151 - DNA, 20 bp, synthetic construct
  source 1..20: mol_type = other DNA
ataatgggcccagttgtctg

SEQ ID NO: 19152 - DNA, 20 bp, synthetic construct
  source 1..20: mol_type = other DNA
cccgcagcccgcagacaact

SEQ ID NO: 19153 - DNA, 20 bp, synthetic construct
  source 1..20: mol_type = other DNA
gcagggaaaaaattaaaacc

SEQ ID NO: 19154 - DNA, 20 bp, synthetic construct
  source 1..20: mol_type = other DNA
ggctctggtcttcgatgcac

SEQ ID NO: 19155 - DNA, 20 bp, synthetic construct
  source 1..20: mol_type = other DNA
agccagcctcctccaatctg

SEQ ID NO: 19156 - DNA, 20 bp, synthetic construct
  source 1..20: mol_type = other DNA
taatgggcccagttgtctgc

SEQ ID NO: 19157 - DNA, 20 bp, synthetic construct
  source 1..20: mol_type = other DNA
ggggagctaagtccccagat

SEQ ID NO: 19158 - DNA, 20 bp, synthetic construct
  source 1..20: mol_type = other DNA
agattggaggaggctggctc

SEQ ID NO: 19159 - DNA, 20 bp, synthetic construct
  source 1..20: mol_type = other DNA
agagccagcctcctccaatc

SEQ ID NO: 19160 - DNA, 20 bp, synthetic construct
  source 1..20: mol_type = other DNA
ctaagtccccagattggagg

SEQ ID NO: 19161 - DNA, 20 bp, synthetic construct
  source 1..20: mol_type = other DNA
ccagttgtctgcgggctgcg

SEQ ID NO: 19162 - DNA, 20 bp, synthetic construct
  source 1..20: mol_type = other DNA
caacttgtttctcccagccc

SEQ ID NO: 19163 - DNA, 20 bp, synthetic construct
  source 1..20: mol_type = other DNA
gagccagcctcctccaatct

SEQ ID NO: 19164 - DNA, 20 bp, synthetic construct
  source 1..20: mol_type = other DNA
agggtctcaccttccgcgca

SEQ ID NO: 19165 - DNA, 20 bp, synthetic construct
  source 1..20: mol_type = other DNA
gccaacagctcagccttgcg

SEQ ID NO: 19166 - DNA, 20 bp, synthetic construct
  source 1..20: mol_type = other DNA
gagctgttggcaccctgctg

SEQ ID NO: 19167 - DNA, 20 bp, synthetic construct
  source 1..20: mol_type = other DNA
gagagcattattgatctgaa

SEQ ID NO: 19168 - DNA, 20 bp, synthetic construct
  source 1..20: mol_type = other DNA
tggcacagtgatttggaaag

SEQ ID NO: 19169 - DNA, 20 bp, synthetic construct
  source 1..20: mol_type = other DNA
tccgcgcaaggctgagctgt

SEQ ID NO: 19170 - DNA, 20 bp, synthetic construct
  source 1..20: mol_type = other DNA
aaagcctggacccctctctg

SEQ ID NO: 19171 - DNA, 20 bp, synthetic construct
  source 1..20: mol_type = other DNA
tgcaggagcagcagcaccga

SEQ ID NO: 19172 - DNA, 20 bp, synthetic construct
  source 1..20: mol_type = other DNA
aaaggggaaacagaagagaa

SEQ ID NO: 19173 - DNA, 20 bp, synthetic construct
  source 1..20: mol_type = other DNA
cagcaccgacggccgcagca

SEQ ID NO: 19174 - DNA, 20 bp, synthetic construct
  source 1..20: mol_type = other DNA
attgatctgaagggtaaatg

SEQ ID NO: 19175 - DNA, 20 bp, synthetic construct
  source 1..20: mol_type = other DNA
gtggagggagccacagagag

SEQ ID NO: 19176 - DNA, 20 bp, synthetic construct
  source 1..20: mol_type = other DNA
gatctgaagggtaaatgtgg

SEQ ID NO: 19177 - DNA, 20 bp, synthetic construct
  source 1..20: mol_type = other DNA
agcctcttccaggaagaaag

SEQ ID NO: 19178 - DNA, 20 bp, synthetic construct
  source 1..20: mol_type = other DNA
atgtggagggagccacagag

SEQ ID NO: 19179 - DNA, 20 bp, synthetic construct
  source 1..20: mol_type = other DNA
gggtcagactccgctccctg

SEQ ID NO: 19180 - DNA, 20 bp, synthetic construct
  source 1..20: mol_type = other DNA
atgtgtgtaccatcctaccc

SEQ ID NO: 19181 - DNA, 20 bp, synthetic construct
  source 1..20: mol_type = other DNA
agggtaggatggtacacaca

SEQ ID NO: 19182 - DNA, 20 bp, synthetic construct
  source 1..20: mol_type = other DNA
taggatggtacacacatggg

SEQ ID NO: 19183 - DNA, 20 bp, synthetic construct
  source 1..20: mol_type = other DNA
agggagcggagtctgacccg

SEQ ID NO: 19184 - DNA, 20 bp, synthetic construct
  source 1..20: mol_type = other DNA
cagggagcggagtctgaccc

SEQ ID NO: 19185 - DNA, 20 bp, synthetic construct
  source 1..20: mol_type = other DNA
gtaccatcctaccctggccg

SEQ ID NO: 19186 - DNA, 20 bp, synthetic construct
  source 1..20: mol_type = other DNA
gccgaggcccttgggaacac

SEQ ID NO: 19187 - DNA, 20 bp, synthetic construct
  source 1..20: mol_type = other DNA
gggaaactcacctgggcccc

SEQ ID NO: 19188 - DNA, 20 bp, synthetic construct
  source 1..20: mol_type = other DNA
tggctgcttctgcatcccca

SEQ ID NO: 19189 - DNA, 20 bp, synthetic construct
  source 1..20: mol_type = other DNA
gcttctgcatccccagggag

SEQ ID NO: 19190 - DNA, 20 bp, synthetic construct
  source 1..20: mol_type = other DNA
ccagggagcggagtctgacc

SEQ ID NO: 19191 - DNA, 20 bp, synthetic construct
  source 1..20: mol_type = other DNA
gttcccaagggcctcggcca

SEQ ID NO: 19192 - DNA, 20 bp, synthetic construct
  source 1..20: mol_type = other DNA
gggtaggatggtacacacat

SEQ ID NO: 19193 - DNA, 20 bp, synthetic construct
  source 1..20: mol_type = other DNA
gggcctcggccagggtagga

SEQ ID NO: 19194 - DNA, 20 bp, synthetic construct
  source 1..20: mol_type = other DNA
tagcaataggggaaaatgtg

SEQ ID NO: 19195 - DNA, 20 bp, synthetic construct
  source 1..20: mol_type = other DNA
ccgaatcaggttagtctacg

SEQ ID NO: 19196 - DNA, 20 bp, synthetic construct
  source 1..20: mol_type = other DNA
ttccccagagggccgtaagg

SEQ ID NO: 19197 - DNA, 20 bp, synthetic construct
  source 1..20: mol_type = other DNA
tcccgaatcaggttagtcta

SEQ ID NO: 19198 - DNA, 20 bp, synthetic construct
  source 1..20: mol_type = other DNA
gtgaaaagcctcagaagata

SEQ ID NO: 19199 - DNA, 20 bp, synthetic construct
  source 1..20: mol_type = other DNA
ggaatatgccctatcttctg

SEQ ID NO: 19200 - DNA, 20 bp, synthetic construct
  source 1..20: mol_type = other DNA
tgtgaaaagcctcagaagat

SEQ ID NO: 19201 - DNA, 20 bp, synthetic construct
  source 1..20: mol_type = other DNA
cccgaatcaggttagtctac

SEQ ID NO: 19202 - DNA, 20 bp, synthetic construct
  source 1..20: mol_type = other DNA
ccccgtagactaacctgatt

SEQ ID NO: 19203 - DNA, 20 bp, synthetic construct
  source 1..20: mol_type = other DNA
tgagagaaaagtcttcacag

SEQ ID NO: 19204 - DNA, 20 bp, synthetic construct
  source 1..20: mol_type = other DNA
cccgtagactaacctgattc

SEQ ID NO: 19205 - DNA, 20 bp, synthetic construct
  source 1..20: mol_type = other DNA
ataggggaaaatgtggggag

SEQ ID NO: 19206 - DNA, 20 bp, synthetic construct
  source 1..20: mol_type = other DNA
caataggggaaaatgtgggg

SEQ ID NO: 19207 - DNA, 20 bp, synthetic construct
  source 1..20: mol_type = other DNA
aataggggaaaatgtgggga

SEQ ID NO: 19208 - DNA, 20 bp, synthetic construct
  source 1..20: mol_type = other DNA
ggggaaaatgtggggagggg

SEQ ID NO: 19209 - DNA, 20 bp, synthetic construct
  source 1..20: mol_type = other DNA
aaagaaagaaaaactaggcg

SEQ ID NO: 19210 - DNA, 20 bp, synthetic construct
  source 1..20: mol_type = other DNA
cccccgtttctaccaaaaag

SEQ ID NO: 19211 - DNA, 20 bp, synthetic construct
  source 1..20: mol_type = other DNA
gaccctcccgcctccgccag

SEQ ID NO: 19212 - DNA, 20 bp, synthetic construct
  source 1..20: mol_type = other DNA
aggaagaatgtaaacgggac

SEQ ID NO: 19213 - DNA, 20 bp, synthetic construct
  source 1..20: mol_type = other DNA
ttacattcttcctctggcgg

SEQ ID NO: 19214 - DNA, 20 bp, synthetic construct
  source 1..20: mol_type = other DNA
tcccgtttacattcttcctc

SEQ ID NO: 19215 - DNA, 20 bp, synthetic construct
  source 1..20: mol_type = other DNA
cagctgctcggaggttgagg

SEQ ID NO: 19216 - DNA, 20 bp, synthetic construct
  source 1..20: mol_type = other DNA
cgtttacattcttcctctgg

SEQ ID NO: 19217 - DNA, 20 bp, synthetic construct
  source 1..20: mol_type = other DNA
cattcttcctctggcggagg

SEQ ID NO: 19218 - DNA, 20 bp, synthetic construct
  source 1..20: mol_type = other DNA
ttcctctggcggaggcggga

SEQ ID NO: 19219 - DNA, 20 bp, synthetic construct
  source 1..20: mol_type = other DNA
attcttcctctggcggaggc

SEQ ID NO: 19220 - DNA, 20 bp, synthetic construct
  source 1..20: mol_type = other DNA
cttcctctggcggaggcggg

SEQ ID NO: 19221 - DNA, 20 bp, synthetic construct
  source 1..20: mol_type = other DNA
gccagaggaagaatgtaaac

SEQ ID NO: 19222 - DNA, 20 bp, synthetic construct
  source 1..20: mol_type = other DNA
gggagggtcgcttgaagcct

SEQ ID NO: 19223 - DNA, 20 bp, synthetic construct
  source 1..20: mol_type = other DNA
cgccagaggaagaatgtaaa

SEQ ID NO: 19224 - DNA, 20 bp, synthetic construct
  source 1..20: mol_type = other DNA
ccgggcccgggttcaaaacg

SEQ ID NO: 19225 - DNA, 20 bp, synthetic construct
  source 1..20: mol_type = other DNA
ggaacagaccgccgtgagag

SEQ ID NO: 19226 - DNA, 20 bp, synthetic construct
  source 1..20: mol_type = other DNA
acagaccgccgtgagagagg

SEQ ID NO: 19227 - DNA, 20 bp, synthetic construct
  source 1..20: mol_type = other DNA
ccggcacccctcctctctca

SEQ ID NO: 19228 - DNA, 20 bp, synthetic construct
  source 1..20: mol_type = other DNA
gcacccctcctctctcacgg

SEQ ID NO: 19229 - DNA, 20 bp, synthetic construct
  source 1..20: mol_type = other DNA
tactcaccggtcccgagctc

SEQ ID NO: 19230 - DNA, 20 bp, synthetic construct
  source 1..20: mol_type = other DNA
gggcgacccaacgcagccgc

SEQ ID NO: 19231 - DNA, 20 bp, synthetic construct
  source 1..20: mol_type = other DNA
cccctcctgagcccgcccgg

SEQ ID NO: 19232 - DNA, 20 bp, synthetic construct
  source 1..20: mol_type = other DNA
gcggggacgagctgtcgcgc

SEQ ID NO: 19233 - DNA, 20 bp, synthetic construct
  source 1..20: mol_type = other DNA
agaccgccgtgagagaggag

SEQ ID NO: 19234 - DNA, 20 bp, synthetic construct
  source 1..20: mol_type = other DNA
gctggttgctcgtgcaggag

SEQ ID NO: 19235 - DNA, 20 bp, synthetic construct
  source 1..20: mol_type = other DNA
actcaccggtcccgagctcc

SEQ ID NO: 19236 - DNA, 20 bp, synthetic construct
  source 1..20: mol_type = other DNA
ctggttgctcgtgcaggagc

SEQ ID NO: 19237 - DNA, 20 bp, synthetic construct
  source 1..20: mol_type = other DNA
tccgggccgcgaatcccggc

SEQ ID NO: 19238 - DNA, 20 bp, synthetic construct
  source 1..20: mol_type = other DNA
ggattcgcggcccggagctc

SEQ ID NO: 19239 - DNA, 20 bp, synthetic construct
  source 1..20: mol_type = other DNA
cccggatgggccgttagtcg

SEQ ID NO: 19240 - DNA, 20 bp, synthetic construct
  source 1..20: mol_type = other DNA
cgttagtcggggctcagccg

SEQ ID NO: 19241 - DNA, 20 bp, synthetic construct
  source 1..20: mol_type = other DNA
ctcagccgcggagtgagcga

SEQ ID NO: 19242 - DNA, 20 bp, synthetic construct
  source 1..20: mol_type = other DNA
cccaccgccatcccgtcccg

SEQ ID NO: 19243 - DNA, 20 bp, synthetic construct
  source 1..20: mol_type = other DNA
ccccgggacgggatggcggt

SEQ ID NO: 19244 - DNA, 20 bp, synthetic construct
  source 1..20: mol_type = other DNA
gctcagccgcggagtgagcg

SEQ ID NO: 19245 - DNA, 20 bp, synthetic construct
  source 1..20: mol_type = other DNA
cgccaccacctctcccgcgc

SEQ ID NO: 19246 - DNA, 20 bp, synthetic construct
  source 1..20: mol_type = other DNA
aggatggcggcggatggcgc

SEQ ID NO: 19247 - DNA, 20 bp, synthetic construct
  source 1..20: mol_type = other DNA
atggcagcttctcctccccc

SEQ ID NO: 19248 - DNA, 20 bp, synthetic construct
  source 1..20: mol_type = other DNA
cccgggacgggatggcggtg

SEQ ID NO: 19249 - DNA, 20 bp, synthetic construct
  source 1..20: mol_type = other DNA
tccccgggacgggatggcgg

SEQ ID NO: 19250 - DNA, 20 bp, synthetic construct
  source 1..20: mol_type = other DNA
cggcgcgggagaggtggtgg

SEQ ID NO: 19251 - DNA, 20 bp, synthetic construct
  source 1..20: mol_type = other DNA
ttccggcgcgggagaggtgg

SEQ ID NO: 19252 - DNA, 20 bp, synthetic construct
  source 1..20: mol_type = other DNA
ggctccccgggacgggatgg

SEQ ID NO: 19253 - DNA, 20 bp, synthetic construct
  source 1..20: mol_type = other DNA
ggtggggcgggggaggatgg

SEQ ID NO: 19254 - DNA, 20 bp, synthetic construct
  source 1..20: mol_type = other DNA
ttacggagttgggttacatg

SEQ ID NO: 19255 - DNA, 20 bp, synthetic construct
  source 1..20: mol_type = other DNA
gtgtaatggccctcagagca

SEQ ID NO: 19256 - DNA, 20 bp, synthetic construct
  source 1..20: mol_type = other DNA
gtgtggtgaggacaggaaca

SEQ ID NO: 19257 - DNA, 20 bp, synthetic construct
  source 1..20: mol_type = other DNA
tcatcagggtgtggaacccc

SEQ ID NO: 19258 - DNA, 20 bp, synthetic construct
  source 1..20: mol_type = other DNA
caaatcagtctcagtccgtg

SEQ ID NO: 19259 - DNA, 20 bp, synthetic construct
  source 1..20: mol_type = other DNA
agttgggttacatgaggagg

SEQ ID NO: 19260 - DNA, 20 bp, synthetic construct
  source 1..20: mol_type = other DNA
ctctgagggccattacactc

SEQ ID NO: 19261 - DNA, 20 bp, synthetic construct
  source 1..20: mol_type = other DNA
agtgtaatggccctcagagc

SEQ ID NO: 19262 - DNA, 20 bp, synthetic construct
  source 1..20: mol_type = other DNA
cgggctcaggagggtcatca

SEQ ID NO: 19263 - DNA, 20 bp, synthetic construct
  source 1..20: mol_type = other DNA
tcaggagggtcatcagggtg

SEQ ID NO: 19264 - DNA, 20 bp, synthetic construct
  source 1..20: mol_type = other DNA
tcagagcagggctggtcctg

SEQ ID NO: 19265 - DNA, 20 bp, synthetic construct
  source 1..20: mol_type = other DNA
ccaggaccagccctgctctg

SEQ ID NO: 19266 - DNA, 20 bp, synthetic construct
  source 1..20: mol_type = other DNA
caggaccagccctgctctga

SEQ ID NO: 19267 - DNA, 20 bp, synthetic construct
  source 1..20: mol_type = other DNA
ttgttcctgtcctcaccaca

SEQ ID NO: 19268 - DNA, 20 bp, synthetic construct
  source 1..20: mol_type = other DNA
tcagtccgtgtggtgaggac

SEQ ID NO: 19269 - DNA, 20 bp, synthetic construct
  source 1..20: mol_type = other DNA
cagcacggtacactccgccg

SEQ ID NO: 19270 - DNA, 20 bp, synthetic construct
  source 1..20: mol_type = other DNA
cagtgagattagtgctcgcg

SEQ ID NO: 19271 - DNA, 20 bp, synthetic construct
  source 1..20: mol_type = other DNA
tggcagcgagtagagcagca

SEQ ID NO: 19272 - DNA, 20 bp, synthetic construct
  source 1..20: mol_type = other DNA
gctgccattcgcccgcaggt

SEQ ID NO: 19273 - DNA, 20 bp, synthetic construct
  source 1..20: mol_type = other DNA
gggcaggaggggcgcagcgt

SEQ ID NO: 19274 - DNA, 20 bp, synthetic construct
  source 1..20: mol_type = other DNA
tgggcgagcgcgccgacctg

SEQ ID NO: 19275 - DNA, 20 bp, synthetic construct
  source 1..20: mol_type = other DNA
gctgcgcccctcctgcccag

SEQ ID NO: 19276 - DNA, 20 bp, synthetic construct
  source 1..20: mol_type = other DNA
gcagtgagattagtgctcgc

SEQ ID NO: 19277 - DNA, 20 bp, synthetic construct
  source 1..20: mol_type = other DNA
agccccggcgcggctcaggt

SEQ ID NO: 19278 - DNA, 20 bp, synthetic construct
  source 1..20: mol_type = other DNA
gggcgagcgcgccgacctgc

SEQ ID NO: 19279 - DNA, 20 bp, synthetic construct
  source 1..20: mol_type = other DNA
actcgctgccattcgcccgc

SEQ ID NO: 19280 - DNA, 20 bp, synthetic construct
  source 1..20: mol_type = other DNA
cgcccacctgagccgcgccg

SEQ ID NO: 19281 - DNA, 20 bp, synthetic construct
  source 1..20: mol_type = other DNA
gtcccacggtcccgcagccc

SEQ ID NO: 19282 - DNA, 20 bp, synthetic construct
  source 1..20: mol_type = other DNA
tagtgctcgcggggccgcgg

SEQ ID NO: 19283 - DNA, 20 bp, synthetic construct
  source 1..20: mol_type = other DNA
acggtcccgcagccccggcg

SEQ ID NO: 19284 - DNA, 20 bp, synthetic construct
  source 1..20: mol_type = other DNA
gccgcacaacatgctacctg

SEQ ID NO: 19285 - DNA, 20 bp, synthetic construct
  source 1..20: mol_type = other DNA
gccgcaggtagcatgttgtg

SEQ ID NO: 19286 - DNA, 20 bp, synthetic construct
  source 1..20: mol_type = other DNA
ggccatggccgctgtgccga

SEQ ID NO: 19287 - DNA, 20 bp, synthetic construct
  source 1..20: mol_type = other DNA
agcgggcgccgtcggcacag

SEQ ID NO: 19288 - DNA, 20 bp, synthetic construct
  source 1..20: mol_type = other DNA
cgcacgccagaagcagctcg

SEQ ID NO: 19289 - DNA, 20 bp, synthetic construct
  source 1..20: mol_type = other DNA
ggcacagcggccatggccaa

SEQ ID NO: 19290 - DNA, 20 bp, synthetic construct
  source 1..20: mol_type = other DNA
gctacctgcggccgccccgg

SEQ ID NO: 19291 - DNA, 20 bp, synthetic construct
  source 1..20: mol_type = other DNA
gcccgcccggatcccgcctg

SEQ ID NO: 19292 - DNA, 20 bp, synthetic construct
  source 1..20: mol_type = other DNA
gcgcacgccagaagcagctc

SEQ ID NO: 19293 - DNA, 20 bp, synthetic construct
  source 1..20: mol_type = other DNA
cgggggcccctggagcgcag

SEQ ID NO: 19294 - DNA, 20 bp, synthetic construct
  source 1..20: mol_type = other DNA
tgccgcaggcgggatccggg

SEQ ID NO: 19295 - DNA, 20 bp, synthetic construct
  source 1..20: mol_type = other DNA
cagcggccatggccaagggg

SEQ ID NO: 19296 - DNA, 20 bp, synthetic construct
  source 1..20: mol_type = other DNA
gcacagcggccatggccaag

SEQ ID NO: 19297 - DNA, 20 bp, synthetic construct
  source 1..20: mol_type = other DNA
cgcaggggagcgggcgccgt

SEQ ID NO: 19298 - DNA, 20 bp, synthetic construct
  source 1..20: mol_type = other DNA
gcgggggcccctggagcgca

SEQ ID NO: 19299 - DNA, 20 bp, synthetic construct
  source 1..20: mol_type = other DNA
gtgaacgcggcggagctgtg

SEQ ID NO: 19300 - DNA, 20 bp, synthetic construct
  source 1..20: mol_type = other DNA
gttctgaccccactacaaca

SEQ ID NO: 19301 - DNA, 20 bp, synthetic construct
  source 1..20: mol_type = other DNA
ctgtcctactgagacacggc

SEQ ID NO: 19302 - DNA, 20 bp, synthetic construct
  source 1..20: mol_type = other DNA
ctttgcccacgtggtgaacg

SEQ ID NO: 19303 - DNA, 20 bp, synthetic construct
  source 1..20: mol_type = other DNA
ccccactacaacaaggccca

SEQ ID NO: 19304 - DNA, 20 bp, synthetic construct
  source 1..20: mol_type = other DNA
tgcccacgtggtgaacgcgg

SEQ ID NO: 19305 - DNA, 20 bp, synthetic construct
  source 1..20: mol_type = other DNA
tgaacgcggcggagctgtga

SEQ ID NO: 19306 - DNA, 20 bp, synthetic construct
  source 1..20: mol_type = other DNA
ccatgggccttgttgtagtg

SEQ ID NO: 19307 - DNA, 20 bp, synthetic construct
  source 1..20: mol_type = other DNA
gcggagctgtgagggtgtga

SEQ ID NO: 19308 - DNA, 20 bp, synthetic construct
  source 1..20: mol_type = other DNA
gacacggccggtaggtccgc

SEQ ID NO: 19309 - DNA, 20 bp, synthetic construct
  source 1..20: mol_type = other DNA
cctaccggccgtgtctcagt

SEQ ID NO: 19310 - DNA, 20 bp, synthetic construct
  source 1..20: mol_type = other DNA
tccgcaggccagtcttccca

SEQ ID NO: 19311 - DNA, 20 bp, synthetic construct
  source 1..20: mol_type = other DNA
cctactgagacacggccggt

SEQ ID NO: 19312 - DNA, 20 bp, synthetic construct
  source 1..20: mol_type = other DNA
cccctgggaagactggcctg

SEQ ID NO: 19313 - DNA, 20 bp, synthetic construct
  source 1..20: mol_type = other DNA
acagaaaaagtccagacagc

SEQ ID NO: 19314 - DNA, 20 bp, synthetic construct
  source 1..20: mol_type = other DNA
ggtgagtcagtcagtcgatg

SEQ ID NO: 19315 - DNA, 20 bp, synthetic construct
  source 1..20: mol_type = other DNA
agcagcagcagcgttagcgg

SEQ ID NO: 19316 - DNA, 20 bp, synthetic construct
  source 1..20: mol_type = other DNA
cgagaaagccccgagccgga

SEQ ID NO: 19317 - DNA, 20 bp, synthetic construct
  source 1..20: mol_type = other DNA
ccggctcggggctttctcgg

SEQ ID NO: 19318 - DNA, 20 bp, synthetic construct
  source 1..20: mol_type = other DNA
gctcggggctttctcggcgg

SEQ ID NO: 19319 - DNA, 20 bp, synthetic construct
  source 1..20: mol_type = other DNA
agggtgcacggcgtgtcccc

SEQ ID NO: 19320 - DNA, 20 bp, synthetic construct
  source 1..20: mol_type = other DNA
gtgcacggcgtgtccccggg

SEQ ID NO: 19321 - DNA, 20 bp, synthetic construct
  source 1..20: mol_type = other DNA
gccgtgcaccctccggctcg

SEQ ID NO: 19322 - DNA, 20 bp, synthetic construct
  source 1..20: mol_type = other DNA
ccgagaaagccccgagccgg

SEQ ID NO: 19323 - DNA, 20 bp, synthetic construct
  source 1..20: mol_type = other DNA
gccccgagccggagggtgca

SEQ ID NO: 19324 - DNA, 20 bp, synthetic construct
  source 1..20: mol_type = other DNA
gtgtccccgggcggctgcag

SEQ ID NO: 19325 - DNA, 20 bp, synthetic construct
  source 1..20: mol_type = other DNA
gctcccgctgcagccgcccg

SEQ ID NO: 19326 - DNA, 20 bp, synthetic construct
  source 1..20: mol_type = other DNA
agcagcagcgttagcggcgg

SEQ ID NO: 19327 - DNA, 20 bp, synthetic construct
  source 1..20: mol_type = other DNA
ccgccgagaaagccccgagc

SEQ ID NO: 19328 - DNA, 20 bp, synthetic construct
  source 1..20: mol_type = other DNA
ggcggctgcagcgggagccc

SEQ ID NO: 19329 - DNA, 20 bp, synthetic construct
  source 1..20: mol_type = other DNA
aaggcacgctccaaacagga

SEQ ID NO: 19330 - DNA, 20 bp, synthetic construct
  source 1..20: mol_type = other DNA
aaaggcacgctccaaacagg

SEQ ID NO: 19331 - DNA, 20 bp, synthetic construct
  source 1..20: mol_type = other DNA
gcagcttcccggctctgcca

SEQ ID NO: 19332 - DNA, 20 bp, synthetic construct
  source 1..20: mol_type = other DNA
agaaagactgagtctctccc

SEQ ID NO: 19333 - DNA, 20 bp, synthetic construct
  source 1..20: mol_type = other DNA
cggctccgcttgctcagcca

SEQ ID NO: 19334 - DNA, 20 bp, synthetic construct
  source 1..20: mol_type = other DNA
gcacgctccaaacaggaggg

SEQ ID NO: 19335 - DNA, 20 bp, synthetic construct
  source 1..20: mol_type = other DNA
ggctctgccagggctgccgg

SEQ ID NO: 19336 - DNA, 20 bp, synthetic construct
  source 1..20: mol_type = other DNA
ctggcagagccgggaagctg

SEQ ID NO: 19337 - DNA, 20 bp, synthetic construct
  source 1..20: mol_type = other DNA
ctctcccaggacagctgctg

SEQ ID NO: 19338 - DNA, 20 bp, synthetic construct
  source 1..20: mol_type = other DNA
ggctgagcaagcggagccgc

SEQ ID NO: 19339 - DNA, 20 bp, synthetic construct
  source 1..20: mol_type = other DNA
tgtgaccgcagcagctgtcc

SEQ ID NO: 19340 - DNA, 20 bp, synthetic construct
  source 1..20: mol_type = other DNA
ccgggaagctgcggccgcag

SEQ ID NO: 19341 - DNA, 20 bp, synthetic construct
  source 1..20: mol_type = other DNA
gcctcccggcctggcccctg

SEQ ID NO: 19342 - DNA, 20 bp, synthetic construct
  source 1..20: mol_type = other DNA
ttggggaggagagggtggcg

SEQ ID NO: 19343 - DNA, 20 bp, synthetic construct
  source 1..20: mol_type = other DNA
gagctttggggaggagaggg

SEQ ID NO: 19344 - DNA, 20 bp, synthetic construct
  source 1..20: mol_type = other DNA
agtgaggacgcatagatgtg

SEQ ID NO: 19345 - DNA, 20 bp, synthetic construct
  source 1..20: mol_type = other DNA
gaagtgaggacgcatagatg

SEQ ID NO: 19346 - DNA, 20 bp, synthetic construct
  source 1..20: mol_type = other DNA
atccccgtgcccctattggg

SEQ ID NO: 19347 - DNA, 20 bp, synthetic construct
  source 1..20: mol_type = other DNA
tgtggggcgccgcccaatag

SEQ ID NO: 19348 - DNA, 20 bp, synthetic construct
  source 1..20: mol_type = other DNA
cgtcgactgcccagagtccg

SEQ ID NO: 19349 - DNA, 20 bp, synthetic construct
  source 1..20: mol_type = other DNA
gggtcaggggagccacctgg

SEQ ID NO: 19350 - DNA, 20 bp, synthetic construct
  source 1..20: mol_type = other DNA
aggggcacggggatgagtgg

SEQ ID NO: 19351 - DNA, 20 bp, synthetic construct
  source 1..20: mol_type = other DNA
cgcgcccccccacctccagg

SEQ ID NO: 19352 - DNA, 20 bp, synthetic construct
  source 1..20: mol_type = other DNA
tcaggggagccacctggagg

SEQ ID NO: 19353 - DNA, 20 bp, synthetic construct
  source 1..20: mol_type = other DNA
cgcgggaggtgagggccgtg

SEQ ID NO: 19354 - DNA, 20 bp, synthetic construct
  source 1..20: mol_type = other DNA
tccggcgcggagcccagagc

SEQ ID NO: 19355 - DNA, 20 bp, synthetic construct
  source 1..20: mol_type = other DNA
gcgggaggtgagggccgtgg

SEQ ID NO: 19356 - DNA, 20 bp, synthetic construct
  source 1..20: mol_type = other DNA
ggccctcacctcccgcgccc

SEQ ID NO: 19357 - DNA, 20 bp, synthetic construct
  source 1..20: mol_type = other DNA
gctcccctgacccccacctc

SEQ ID NO: 19358 - DNA, 20 bp, synthetic construct
  source 1..20: mol_type = other DNA
ctcccctgacccccacctcc

SEQ ID NO: 19359 - DNA, 20 bp, synthetic construct
  source 1..20: mol_type = other DNA
gctgtgtctagttgtcaggg

SEQ ID NO: 19360 - DNA, 20 bp, synthetic construct
  source 1..20: mol_type = other DNA
aaataagcactgcaaacctt

SEQ ID NO: 19361 - DNA, 20 bp, synthetic construct
  source 1..20: mol_type = other DNA
ggaggaagtcagtcttcagc

SEQ ID NO: 19362 - DNA, 20 bp, synthetic construct
  source 1..20: mol_type = other DNA
ctgtgtctagttgtcagggt

SEQ ID NO: 19363 - DNA, 20 bp, synthetic construct
  source 1..20: mol_type = other DNA
gaagtcagtcttcagcaggc

SEQ ID NO: 19364 - DNA, 20 bp, synthetic construct
  source 1..20: mol_type = other DNA
tctacatgctatgcaggaga

SEQ ID NO: 19365 - DNA, 20 bp, synthetic construct
  source 1..20: mol_type = other DNA
ccagctgtgtctagttgtca

SEQ ID NO: 19366 - DNA, 20 bp, synthetic construct
  source 1..20: mol_type = other DNA
tgcactgcaggaaatgctga

SEQ ID NO: 19367 - DNA, 20 bp, synthetic construct
  source 1..20: mol_type = other DNA
cactgcaaacctttggcagc

SEQ ID NO: 19368 - DNA, 20 bp, synthetic construct
  source 1..20: mol_type = other DNA
tgcaaacctttggcagcagg

SEQ ID NO: 19369 - DNA, 20 bp, synthetic construct
  source 1..20: mol_type = other DNA
cccagctgtgtctagttgtc

SEQ ID NO: 19370 - DNA, 20 bp, synthetic construct
  source 1..20: mol_type = other DNA
tgctgacttctttagctttc

SEQ ID NO: 19371 - DNA, 20 bp, synthetic construct
  source 1..20: mol_type = other DNA
tgacttcctcctgctgccaa

SEQ ID NO: 19372 - DNA, 20 bp, synthetic construct
  source 1..20: mol_type = other DNA
gacttctttagctttcaggc

SEQ ID NO: 19373 - DNA, 20 bp, synthetic construct
  source 1..20: mol_type = other DNA
aggtttgcagtgcttattta

SEQ ID NO: 19374 - DNA, 20 bp, synthetic construct
  source 1..20: mol_type = other DNA
gaggctgccgatagtccggg

SEQ ID NO: 19375 - DNA, 20 bp, synthetic construct
  source 1..20: mol_type = other DNA
gcgccgcgaaaaagttcccc

SEQ ID NO: 19376 - DNA, 20 bp, synthetic construct
  source 1..20: mol_type = other DNA
gccgaggctgccgatagtcc

SEQ ID NO: 19377 - DNA, 20 bp, synthetic construct
  source 1..20: mol_type = other DNA
ggcagcggtcagcgatcccg

SEQ ID NO: 19378 - DNA, 20 bp, synthetic construct
  source 1..20: mol_type = other DNA
cctgctgaatcctgtcctcg

SEQ ID NO: 19379 - DNA, 20 bp, synthetic construct
  source 1..20: mol_type = other DNA
cgctcgctctcatacacgcc

SEQ ID NO: 19380 - DNA, 20 bp, synthetic construct
  source 1..20: mol_type = other DNA
gccgatagtccgggaggcag

SEQ ID NO: 19381 - DNA, 20 bp, synthetic construct
  source 1..20: mol_type = other DNA
tcgggatcctgagcgctcct

SEQ ID NO: 19382 - DNA, 20 bp, synthetic construct
  source 1..20: mol_type = other DNA
tcccggggtcccgagccgcg

SEQ ID NO: 19383 - DNA, 20 bp, synthetic construct
  source 1..20: mol_type = other DNA
cccggagcccaggagcgctc

SEQ ID NO: 19384 - DNA, 20 bp, synthetic construct
  source 1..20: mol_type = other DNA
ctcgggatcctgagcgctcc

SEQ ID NO: 19385 - DNA, 20 bp, synthetic construct
  source 1..20: mol_type = other DNA
tcctgagcgctcctgggctc

SEQ ID NO: 19386 - DNA, 20 bp, synthetic construct
  source 1..20: mol_type = other DNA
tcctcgcggctcgggacccc

SEQ ID NO: 19387 - DNA, 20 bp, synthetic construct
  source 1..20: mol_type = other DNA
ctcatacacgcccggagccc

SEQ ID NO: 19388 - DNA, 20 bp, synthetic construct
  source 1..20: mol_type = other DNA
ggcagaggcggcggcggcag

SEQ ID NO: 19389 - DNA, 20 bp, synthetic construct
  source 1..20: mol_type = other DNA
gggttggggaggccgatgag

SEQ ID NO: 19390 - DNA, 20 bp, synthetic construct
  source 1..20: mol_type = other DNA
aaagagcagcgggaggactc

SEQ ID NO: 19391 - DNA, 20 bp, synthetic construct
  source 1..20: mol_type = other DNA
ggaggagaaagagcagcggg

SEQ ID NO: 19392 - DNA, 20 bp, synthetic construct
  source 1..20: mol_type = other DNA
gcgagcgagcgagcgagtgc

SEQ ID NO: 19393 - DNA, 20 bp, synthetic construct
  source 1..20: mol_type = other DNA
aggggagcgcagggttgggg

SEQ ID NO: 19394 - DNA, 20 bp, synthetic construct
  source 1..20: mol_type = other DNA
agcgagcgagcgagcgagtg

SEQ ID NO: 19395 - DNA, 20 bp, synthetic construct
  source 1..20: mol_type = other DNA
gcgggaggactcgggctggg

SEQ ID NO: 19396 - DNA, 20 bp, synthetic construct
  source 1..20: mol_type = other DNA
gagtgcgggagcggccgcct

SEQ ID NO: 19397 - DNA, 20 bp, synthetic construct
  source 1..20: mol_type = other DNA
cgggctgggaggggagcgca

SEQ ID NO: 19398 - DNA, 20 bp, synthetic construct
  source 1..20: mol_type = other DNA
ggaggaggagaaagagcagc

SEQ ID NO: 19399 - DNA, 20 bp, synthetic construct
  source 1..20: mol_type = other DNA
gcagcgggaggactcgggct

SEQ ID NO: 19400 - DNA, 20 bp, synthetic construct
  source 1..20: mol_type = other DNA
ccagccgcgcccgcagccgg

SEQ ID NO: 19401 - DNA, 20 bp, synthetic construct
  source 1..20: mol_type = other DNA
cgagcgagcgagtgcgggag

SEQ ID NO: 19402 - DNA, 20 bp, synthetic construct
  source 1..20: mol_type = other DNA
ggctgggcggggagccgagg

SEQ ID NO: 19403 - DNA, 20 bp, synthetic construct
  source 1..20: mol_type = other DNA
gctgcgggcgcggctgggcg

SEQ ID NO: 19404 - DNA, 20 bp, synthetic construct
  source 1..20: mol_type = other DNA
gctcagcccagcgcaaagga

SEQ ID NO: 19405 - DNA, 20 bp, synthetic construct
  source 1..20: mol_type = other DNA
cccgccagcccaccccagag

SEQ ID NO: 19406 - DNA, 20 bp, synthetic construct
  source 1..20: mol_type = other DNA
tgccacccaaaaaccaagca

SEQ ID NO: 19407 - DNA, 20 bp, synthetic construct
  source 1..20: mol_type = other DNA
gagcccggctaggacggccg

SEQ ID NO: 19408 - DNA, 20 bp, synthetic construct
  source 1..20: mol_type = other DNA
agagcgccatattcctcctc

SEQ ID NO: 19409 - DNA, 20 bp, synthetic construct
  source 1..20: mol_type = other DNA
ggctcagcccagcgcaaagg

SEQ ID NO: 19410 - DNA, 20 bp, synthetic construct
  source 1..20: mol_type = other DNA
ctctcccggactcctgtcca

SEQ ID NO: 19411 - DNA, 20 bp, synthetic construct
  source 1..20: mol_type = other DNA
ccagagccgagagcaggagt

SEQ ID NO: 19412 - DNA, 20 bp, synthetic construct
  source 1..20: mol_type = other DNA
cccccttggtcccctctctg

SEQ ID NO: 19413 - DNA, 20 bp, synthetic construct
  source 1..20: mol_type = other DNA
ctgagcccagagccgagagc

SEQ ID NO: 19414 - DNA, 20 bp, synthetic construct
  source 1..20: mol_type = other DNA
gaagccctggacaggagtcc

SEQ ID NO: 19415 - DNA, 20 bp, synthetic construct
  source 1..20: mol_type = other DNA
aagagtgagcccggctagga

SEQ ID NO: 19416 - DNA, 20 bp, synthetic construct
  source 1..20: mol_type = other DNA
ccgccagcccaccccagaga

SEQ ID NO: 19417 - DNA, 20 bp, synthetic construct
  source 1..20: mol_type = other DNA
ccttggtcccctctctgggg

SEQ ID NO: 19418 - DNA, 20 bp, synthetic construct
  source 1..20: mol_type = other DNA
tgggtggcagcagccagagg

SEQ ID NO: 19419 - DNA, 20 bp, synthetic construct
  source 1..20: mol_type = other DNA
gaggaagtctagaataaaag

SEQ ID NO: 19420 - DNA, 20 bp, synthetic construct
  source 1..20: mol_type = other DNA
cttggggccaagtttagggg

SEQ ID NO: 19421 - DNA, 20 bp, synthetic construct
  source 1..20: mol_type = other DNA
gagcgcagcggggatcaggt

SEQ ID NO: 19422 - DNA, 20 bp, synthetic construct
  source 1..20: mol_type = other DNA
cgggccggggaccagaaccc

SEQ ID NO: 19423 - DNA, 20 bp, synthetic construct
  source 1..20: mol_type = other DNA
cccgcgcccgagcgccaccg

SEQ ID NO: 19424 - DNA, 20 bp, synthetic construct
  source 1..20: mol_type = other DNA
tgacaaccagcatgccgaga

SEQ ID NO: 19425 - DNA, 20 bp, synthetic construct
  source 1..20: mol_type = other DNA
gcggggatcaggtcggaccg

SEQ ID NO: 19426 - DNA, 20 bp, synthetic construct
  source 1..20: mol_type = other DNA
agcggggatcaggtcggacc

SEQ ID NO: 19427 - DNA, 20 bp, synthetic construct
  source 1..20: mol_type = other DNA
cccccgcgcccgagcgccac

SEQ ID NO: 19428 - DNA, 20 bp, synthetic construct
  source 1..20: mol_type = other DNA
gaataaaagaggaaggaggg

SEQ ID NO: 19429 - DNA, 20 bp, synthetic construct
  source 1..20: mol_type = other DNA
ccggtggcgctcgggcgcgg

SEQ ID NO: 19430 - DNA, 20 bp, synthetic construct
  source 1..20: mol_type = other DNA
gggcggccccggtggcgctc

SEQ ID NO: 19431 - DNA, 20 bp, synthetic construct
  source 1..20: mol_type = other DNA
ctagaataaaagaggaagga

SEQ ID NO: 19432 - DNA, 20 bp, synthetic construct
  source 1..20: mol_type = other DNA
tctagaataaaagaggaagg

SEQ ID NO: 19433 - DNA, 20 bp, synthetic construct
  source 1..20: mol_type = other DNA
aagtctagaataaaagagga

SEQ ID NO: 19434 - DNA, 20 bp, synthetic construct
  source 1..20: mol_type = other DNA
acagcttgcaaagtcctgtg

SEQ ID NO: 19435 - DNA, 20 bp, synthetic construct
  source 1..20: mol_type = other DNA
gtgggtggatgcgtgcgtct

SEQ ID NO: 19436 - DNA, 20 bp, synthetic construct
  source 1..20: mol_type = other DNA
attatctcacagtgccacac

SEQ ID NO: 19437 - DNA, 20 bp, synthetic construct
  source 1..20: mol_type = other DNA
aagtggagcacatcagtgaa

SEQ ID NO: 19438 - DNA, 20 bp, synthetic construct
  source 1..20: mol_type = other DNA
aagggattagaagctctgtc

SEQ ID NO: 19439 - DNA, 20 bp, synthetic construct
  source 1..20: mol_type = other DNA
gtaccaggaacccagcgcag

SEQ ID NO: 19440 - DNA, 20 bp, synthetic construct
  source 1..20: mol_type = other DNA
agtggagcacatcagtgaaa

SEQ ID NO: 19441 - DNA, 20 bp, synthetic construct
  source 1..20: mol_type = other DNA
ggatatgtgtctcagtgaag

SEQ ID NO: 19442 - DNA, 20 bp, synthetic construct
  source 1..20: mol_type = other DNA
acaggactttgcaagctgtc

SEQ ID NO: 19443 - DNA, 20 bp, synthetic construct
  source 1..20: mol_type = other DNA
gggtgaacttaacctttcac

SEQ ID NO: 19444 - DNA, 20 bp, synthetic construct
  source 1..20: mol_type = other DNA
gctgtcaggtctgagtgaga

SEQ ID NO: 19445 - DNA, 20 bp, synthetic construct
  source 1..20: mol_type = other DNA
agatggagcacaccagtgaa

SEQ ID NO: 19446 - DNA, 20 bp, synthetic construct
  source 1..20: mol_type = other DNA
aaaaaattctcctattgctc

SEQ ID NO: 19447 - DNA, 20 bp, synthetic construct
  source 1..20: mol_type = other DNA
tttgttctaatatttatgct

SEQ ID NO: 19448 - DNA, 20 bp, synthetic construct
  source 1..20: mol_type = other DNA
cttataatttcctgagcaat

SEQ ID NO: 19449 - DNA, 20 bp, synthetic construct
  source 1..20: mol_type = other DNA
gggaagccatgccgcgccgc

SEQ ID NO: 19450 - DNA, 20 bp, synthetic construct
  source 1..20: mol_type = other DNA
ggcgcggcatggcttccccg

SEQ ID NO: 19451 - DNA, 20 bp, synthetic construct
  source 1..20: mol_type = other DNA
gccggaaccctagcccgaga

SEQ ID NO: 19452 - DNA, 20 bp, synthetic construct
  source 1..20: mol_type = other DNA
cggcgtgattgatccgtcac

SEQ ID NO: 19453 - DNA, 20 bp, synthetic construct
  source 1..20: mol_type = other DNA
ggctcggctcagaacggccg

SEQ ID NO: 19454 - DNA, 20 bp, synthetic construct
  source 1..20: mol_type = other DNA
ggttccggctcggctcagaa

SEQ ID NO: 19455 - DNA, 20 bp, synthetic construct
  source 1..20: mol_type = other DNA
ccggcgtgattgatccgtca

SEQ ID NO: 19456 - DNA, 20 bp, synthetic construct
  source 1..20: mol_type = other DNA
gggctgcccggagctccgcg

SEQ ID NO: 19457 - DNA, 20 bp, synthetic construct
  source 1..20: mol_type = other DNA
ggggaagccatgccgcgccg

SEQ ID NO: 19458 - DNA, 20 bp, synthetic construct
  source 1..20: mol_type = other DNA
ggcagcggcggcgcccgtga

SEQ ID NO: 19459 - DNA, 20 bp, synthetic construct
  source 1..20: mol_type = other DNA
gctcagaacggccgcggcgg

SEQ ID NO: 19460 - DNA, 20 bp, synthetic construct
  source 1..20: mol_type = other DNA
gagccggcgcccgcagcccg

SEQ ID NO: 19461 - DNA, 20 bp, synthetic construct
  source 1..20: mol_type = other DNA
tcggctcagaacggccgcgg

SEQ ID NO: 19462 - DNA, 20 bp, synthetic construct
  source 1..20: mol_type = other DNA
cagaacggccgcggcggcgg

SEQ ID NO: 19463 - DNA, 20 bp, synthetic construct
  source 1..20: mol_type = other DNA
gcggccgttctgagccgagc

SEQ ID NO: 19464 - DNA, 20 bp, synthetic construct
  source 1..20: mol_type = other DNA
gccgtacccgaagcgttgag

SEQ ID NO: 19465 - DNA, 20 bp, synthetic construct
  source 1..20: mol_type = other DNA
gccgctcaacgcttcgggta

SEQ ID NO: 19466 - DNA, 20 bp, synthetic construct
  source 1..20: mol_type = other DNA
cgcgcgcgcgagctgtgggt

SEQ ID NO: 19467 - DNA, 20 bp, synthetic construct
  source 1..20: mol_type = other DNA
ctcgaacgccgccaccactc

SEQ ID NO: 19468 - DNA, 20 bp, synthetic construct
  source 1..20: mol_type = other DNA
gctgctggcggcccgagtgg

SEQ ID NO: 19469 - DNA, 20 bp, synthetic construct
  source 1..20: mol_type = other DNA
gctgctgctggcggcccgag

SEQ ID NO: 19470 - DNA, 20 bp, synthetic construct
  source 1..20: mol_type = other DNA
gctggcggcccgagtggtgg

SEQ ID NO: 19471 - DNA, 20 bp, synthetic construct
  source 1..20: mol_type = other DNA
ttgcgggctgggtggctccg

SEQ ID NO: 19472 - DNA, 20 bp, synthetic construct
  source 1..20: mol_type = other DNA
ggcgctggcgctgctgctgg

SEQ ID NO: 19473 - DNA, 20 bp, synthetic construct
  source 1..20: mol_type = other DNA
gttgcgggctgggtggctcc

SEQ ID NO: 19474 - DNA, 20 bp, synthetic construct
  source 1..20: mol_type = other DNA
gcgggatgttgcgggctggg

SEQ ID NO: 19475 - DNA, 20 bp, synthetic construct
  source 1..20: mol_type = other DNA
tgggtggctccggggcgcgg

SEQ ID NO: 19476 - DNA, 20 bp, synthetic construct
  source 1..20: mol_type = other DNA
gcctggctcagtggcttctg

SEQ ID NO: 19477 - DNA, 20 bp, synthetic construct
  source 1..20: mol_type = other DNA
agtggcttctgcgggcttcg

SEQ ID NO: 19478 - DNA, 20 bp, synthetic construct
  source 1..20: mol_type = other DNA
tgttgcgggctgggtggctc

SEQ ID NO: 19479 - DNA, 20 bp, synthetic construct
  source 1..20: mol_type = other DNA
gcgagggagccgctaccgca

SEQ ID NO: 19480 - DNA, 20 bp, synthetic construct
  source 1..20: mol_type = other DNA
ccgctaccgcagggaatgcg

SEQ ID NO: 19481 - DNA, 20 bp, synthetic construct
  source 1..20: mol_type = other DNA
gagccatggccgaggtgttg

SEQ ID NO: 19482 - DNA, 20 bp, synthetic construct
  source 1..20: mol_type = other DNA
gcggaggccgagaccagacg

SEQ ID NO: 19483 - DNA, 20 bp, synthetic construct
  source 1..20: mol_type = other DNA
cgagaccagacgcggagcca

SEQ ID NO: 19484 - DNA, 20 bp, synthetic construct
  source 1..20: mol_type = other DNA
ggccagcgtccgcaacacct

SEQ ID NO: 19485 - DNA, 20 bp, synthetic construct
  source 1..20: mol_type = other DNA
cgtccgcaacacctcggcca

SEQ ID NO: 19486 - DNA, 20 bp, synthetic construct
  source 1..20: mol_type = other DNA
ggtgcaccccgcattccctg

SEQ ID NO: 19487 - DNA, 20 bp, synthetic construct
  source 1..20: mol_type = other DNA
gccgctaccgcagggaatgc

SEQ ID NO: 19488 - DNA, 20 bp, synthetic construct
  source 1..20: mol_type = other DNA
ctgcggtagcggctccctcg

SEQ ID NO: 19489 - DNA, 20 bp, synthetic construct
  source 1..20: mol_type = other DNA
cagacgcggagccatggccg

SEQ ID NO: 19490 - DNA, 20 bp, synthetic construct
  source 1..20: mol_type = other DNA
ggacgctggccggtgagtgc

SEQ ID NO: 19491 - DNA, 20 bp, synthetic construct
  source 1..20: mol_type = other DNA
tcggccccgggtgcccgcga

SEQ ID NO: 19492 - DNA, 20 bp, synthetic construct
  source 1..20: mol_type = other DNA
tgagtgcaggcctcggcccc

SEQ ID NO: 19493 - DNA, 20 bp, synthetic construct
  source 1..20: mol_type = other DNA
gtgagtgcaggcctcggccc

SEQ ID NO: 19494 - DNA, 20 bp, synthetic construct
  source 1..20: mol_type = other DNA
tgtgcgcttcttatctcctg

SEQ ID NO: 19495 - DNA, 20 bp, synthetic construct
  source 1..20: mol_type = other DNA
catttggagatgaggatgtg

SEQ ID NO: 19496 - DNA, 20 bp, synthetic construct
  source 1..20: mol_type = other DNA
ggtacatgtctcatttgcaa

SEQ ID NO: 19497 - DNA, 20 bp, synthetic construct
  source 1..20: mol_type = other DNA
cggatgttacagtaagttgc

SEQ ID NO: 19498 - DNA, 20 bp, synthetic construct
  source 1..20: mol_type = other DNA
ctgaggctgcagcaagatca

SEQ ID NO: 19499 - DNA, 20 bp, synthetic construct
  source 1..20: mol_type = other DNA
cacatcctcatctccaaatg

SEQ ID NO: 19500 - DNA, 20 bp, synthetic construct
  source 1..20: mol_type = other DNA
aaatgcttaactcactgcca

SEQ ID NO: 19501 - DNA, 20 bp, synthetic construct
  source 1..20: mol_type = other DNA
ggccaggcagctgcgaactc

SEQ ID NO: 19502 - DNA, 20 bp, synthetic construct
  source 1..20: mol_type = other DNA
agttcgcagctgcctggcca

SEQ ID NO: 19503 - DNA, 20 bp, synthetic construct
  source 1..20: mol_type = other DNA
gagacatgtaccgtgtaaaa

SEQ ID NO: 19504 - DNA, 20 bp, synthetic construct
  source 1..20: mol_type = other DNA
cacagacaggaagacagccc

SEQ ID NO: 19505 - DNA, 20 bp, synthetic construct
  source 1..20: mol_type = other DNA
cctgaggctgcagcaagatc

SEQ ID NO: 19506 - DNA, 20 bp, synthetic construct
  source 1..20: mol_type = other DNA
gcatttggagatgaggatgt

SEQ ID NO: 19507 - DNA, 20 bp, synthetic construct
  source 1..20: mol_type = other DNA
taaaatggaaatgctttcct

SEQ ID NO: 19508 - DNA, 20 bp, synthetic construct
  source 1..20: mol_type = other DNA
cctgatcttgctgcagcctc

SEQ ID NO: 19509 - DNA, 20 bp, synthetic construct
  source 1..20: mol_type = other DNA
cgcacacccaggatcgagcg

SEQ ID NO: 19510 - DNA, 20 bp, synthetic construct
  source 1..20: mol_type = other DNA
gccgcacacccaggatcgag

SEQ ID NO: 19511 - DNA, 20 bp, synthetic construct
  source 1..20: mol_type = other DNA
gagcgctgcggcagtttcca

SEQ ID NO: 19512 - DNA, 20 bp, synthetic construct
  source 1..20: mol_type = other DNA
cggcagtttccatggtgaga

SEQ ID NO: 19513 - DNA, 20 bp, synthetic construct
  source 1..20: mol_type = other DNA
gaaactgccgcagcgctccc

SEQ ID NO: 19514 - DNA, 20 bp, synthetic construct
  source 1..20: mol_type = other DNA
tcggaggagggaggaacccg

SEQ ID NO: 19515 - DNA, 20 bp, synthetic construct
  source 1..20: mol_type = other DNA
gcttgttgaccatctcacca

SEQ ID NO: 19516 - DNA, 20 bp, synthetic construct
  source 1..20: mol_type = other DNA
gtacctggtagtcgtagctg

SEQ ID NO: 19517 - DNA, 20 bp, synthetic construct
  source 1..20: mol_type = other DNA
gcacctcggcggtctctcgg

SEQ ID NO: 19518 - DNA, 20 bp, synthetic construct
  source 1..20: mol_type = other DNA
ctacgactaccaggtacctc

SEQ ID NO: 19519 - DNA, 20 bp, synthetic construct
  source 1..20: mol_type = other DNA
gctacgactaccaggtacct

SEQ ID NO: 19520 - DNA, 20 bp, synthetic construct
  source 1..20: mol_type = other DNA
cctcggcggtctctcggagg

SEQ ID NO: 19521 - DNA, 20 bp, synthetic construct
  source 1..20: mol_type = other DNA
agggaggaacccgaggtacc

SEQ ID NO: 19522 - DNA, 20 bp, synthetic construct
  source 1..20: mol_type = other DNA
gccccgcccagggagcgctg

SEQ ID NO: 19523 - DNA, 20 bp, synthetic construct
  source 1..20: mol_type = other DNA
ggcggtctctcggaggaggg

SEQ ID NO: 19524 - DNA, 20 bp, synthetic construct
  source 1..20: mol_type = other DNA
gaacaattgctatagaccag

SEQ ID NO: 19525 - DNA, 20 bp, synthetic construct
  source 1..20: mol_type = other DNA
agagcagtggtcaccaagtg

SEQ ID NO: 19526 - DNA, 20 bp, synthetic construct
  source 1..20: mol_type = other DNA
ctactgaattggaagtgctg

SEQ ID NO: 19527 - DNA, 20 bp, synthetic construct
  source 1..20: mol_type = other DNA
tctgcaggtgagtctcatga

SEQ ID NO: 19528 - DNA, 20 bp, synthetic construct
  source 1..20: mol_type = other DNA
aattggaagtgctgaggatg

SEQ ID NO: 19529 - DNA, 20 bp, synthetic construct
  source 1..20: mol_type = other DNA
gaattggaagtgctgaggat

SEQ ID NO: 19530 - DNA, 20 bp, synthetic construct
  source 1..20: mol_type = other DNA
tgtggttgaacaagctctgc

SEQ ID NO: 19531 - DNA, 20 bp, synthetic construct
  source 1..20: mol_type = other DNA
ggatggggtccagcaatctg

SEQ ID NO: 19532 - DNA, 20 bp, synthetic construct
  source 1..20: mol_type = other DNA
caattagttggagctttctt

SEQ ID NO: 19533 - DNA, 20 bp, synthetic construct
  source 1..20: mol_type = other DNA
ctcagcacttccaattcagt

SEQ ID NO: 19534 - DNA, 20 bp, synthetic construct
  source 1..20: mol_type = other DNA
cgctgtttcacttagagcag

SEQ ID NO: 19535 - DNA, 20 bp, synthetic construct
  source 1..20: mol_type = other DNA
tgaattggaagtgctgagga

SEQ ID NO: 19536 - DNA, 20 bp, synthetic construct
  source 1..20: mol_type = other DNA
cttgttcaaccacagattgc

SEQ ID NO: 19537 - DNA, 20 bp, synthetic construct
  source 1..20: mol_type = other DNA
tgttgttcttcacaattagt

SEQ ID NO: 19538 - DNA, 20 bp, synthetic construct
  source 1..20: mol_type = other DNA
cccacccagacctactgaat

SEQ ID NO: 19539 - DNA, 20 bp, synthetic construct
  source 1..20: mol_type = other DNA
acggtcactcacaggcgcag

SEQ ID NO: 19540 - DNA, 20 bp, synthetic construct
  source 1..20: mol_type = other DNA
acccatactattcggacaga

SEQ ID NO: 19541 - DNA, 20 bp, synthetic construct
  source 1..20: mol_type = other DNA
gtgatgtctttgcctggccg

SEQ ID NO: 19542 - DNA, 20 bp, synthetic construct
  source 1..20: mol_type = other DNA
ggaaaaggcggagagacacg

SEQ ID NO: 19543 - DNA, 20 bp, synthetic construct
  source 1..20: mol_type = other DNA
gccatctgtccgaatagtat

SEQ ID NO: 19544 - DNA, 20 bp, synthetic construct
  source 1..20: mol_type = other DNA
ttccattcacggtcactcac

SEQ ID NO: 19545 - DNA, 20 bp, synthetic construct
  source 1..20: mol_type = other DNA
ccaggaaaagaggtcagccc

SEQ ID NO: 19546 - DNA, 20 bp, synthetic construct
  source 1..20: mol_type = other DNA
aggaaaaggcggagagacac

SEQ ID NO: 19547 - DNA, 20 bp, synthetic construct
  source 1..20: mol_type = other DNA
ggagagacacggggctgctg

SEQ ID NO: 19548 - DNA, 20 bp, synthetic construct
  source 1..20: mol_type = other DNA
cgcctgtgagtgaccgtgaa

SEQ ID NO: 19549 - DNA, 20 bp, synthetic construct
  source 1..20: mol_type = other DNA
cagtcgcaacccatactatt

SEQ ID NO: 19550 - DNA, 20 bp, synthetic construct
  source 1..20: mol_type = other DNA
tgccatctgtccgaatagta

SEQ ID NO: 19551 - DNA, 20 bp, synthetic construct
  source 1..20: mol_type = other DNA
gcgaaaagggccaggaaaag

SEQ ID NO: 19552 - DNA, 20 bp, synthetic construct
  source 1..20: mol_type = other DNA
aaggaaaaggcggagagaca

SEQ ID NO: 19553 - DNA, 20 bp, synthetic construct
  source 1..20: mol_type = other DNA
cgaaagagacacagggagag

SEQ ID NO: 19554 - DNA, 20 bp, synthetic construct
  source 1..20: mol_type = other DNA
tgctagggtgcgaactgcca

SEQ ID NO: 19555 - DNA, 20 bp, synthetic construct
  source 1..20: mol_type = other DNA
gctcgggtgtcagggaatag

SEQ ID NO: 19556 - DNA, 20 bp, synthetic construct
  source 1..20: mol_type = other DNA
cagggagaagaccggagctc

SEQ ID NO: 19557 - DNA, 20 bp, synthetic construct
  source 1..20: mol_type = other DNA
aatcggtcgggctcgtgcag

SEQ ID NO: 19558 - DNA, 20 bp, synthetic construct
  source 1..20: mol_type = other DNA
cgaactgccagggcaggtgt

SEQ ID NO: 19559 - DNA, 20 bp, synthetic construct
  source 1..20: mol_type = other DNA
agccgaagctggagctgcta

SEQ ID NO: 19560 - DNA, 20 bp, synthetic construct
  source 1..20: mol_type = other DNA
gcgaactgccagggcaggtg

SEQ ID NO: 19561 - DNA, 20 bp, synthetic construct
  source 1..20: mol_type = other DNA
ccggccaatgccagctgcag

SEQ ID NO: 19562 - DNA, 20 bp, synthetic construct
  source 1..20: mol_type = other DNA
cccgcagcccacacctgccc

SEQ ID NO: 19563 - DNA, 20 bp, synthetic construct
  source 1..20: mol_type = other DNA
attggccgggactggaagtg

SEQ ID NO: 19564 - DNA, 20 bp, synthetic construct
  source 1..20: mol_type = other DNA
ttggccgggactggaagtgc

SEQ ID NO: 19565 - DNA, 20 bp, synthetic construct
  source 1..20: mol_type = other DNA
gaagcccgcacttccagtcc

SEQ ID NO: 19566 - DNA, 20 bp, synthetic construct
  source 1..20: mol_type = other DNA
agggtgcgaactgccagggc

SEQ ID NO: 19567 - DNA, 20 bp, synthetic construct
  source 1..20: mol_type = other DNA
tgcgccactgcagctggcat

SEQ ID NO: 19568 - DNA, 20 bp, synthetic construct
  source 1..20: mol_type = other DNA
gccagggcaggtgtgggctg

SEQ ID NO: 19569 - DNA, 20 bp, synthetic construct
  source 1..20: mol_type = other DNA
accctcgctggcgagctgag

SEQ ID NO: 19570 - DNA, 20 bp, synthetic construct
  source 1..20: mol_type = other DNA
tcctctcagctcgccagcga

SEQ ID NO: 19571 - DNA, 20 bp, synthetic construct
  source 1..20: mol_type = other DNA
gttgctccaatcaccactgg

SEQ ID NO: 19572 - DNA, 20 bp, synthetic construct
  source 1..20: mol_type = other DNA
ggggaggtccctgacatcga

SEQ ID NO: 19573 - DNA, 20 bp, synthetic construct
  source 1..20: mol_type = other DNA
gcgagctgagaggaaatggc

SEQ ID NO: 19574 - DNA, 20 bp, synthetic construct
  source 1..20: mol_type = other DNA
agggagcctccagtggtgat

SEQ ID NO: 19575 - DNA, 20 bp, synthetic construct
  source 1..20: mol_type = other DNA
ccagcgagggtgcctcggga

SEQ ID NO: 19576 - DNA, 20 bp, synthetic construct
  source 1..20: mol_type = other DNA
tcgaaggccgagcccaccgc

SEQ ID NO: 19577 - DNA, 20 bp, synthetic construct
  source 1..20: mol_type = other DNA
cgagctgagaggaaatggcg

SEQ ID NO: 19578 - DNA, 20 bp, synthetic construct
  source 1..20: mol_type = other DNA
gccagcgagggtgcctcggg

SEQ ID NO: 19579 - DNA, 20 bp, synthetic construct
  source 1..20: mol_type = other DNA
ttcctctcagctcgccagcg

SEQ ID NO: 19580 - DNA, 20 bp, synthetic construct
  source 1..20: mol_type = other DNA
ctgtccacggctcctgcggt

SEQ ID NO: 19581 - DNA, 20 bp, synthetic construct
  source 1..20: mol_type = other DNA
ggcgagctgagaggaaatgg

SEQ ID NO: 19582 - DNA, 20 bp, synthetic construct
  source 1..20: mol_type = other DNA
gctggcgagctgagaggaaa

SEQ ID NO: 19583 - DNA, 20 bp, synthetic construct
  source 1..20: mol_type = other DNA
gctgagaggaaatggcgggg

SEQ ID NO: 19584 - DNA, 20 bp, synthetic construct
  source 1..20: mol_type = other DNA
ctgtggcaccatcccgagca

SEQ ID NO: 19585 - DNA, 20 bp, synthetic construct
  source 1..20: mol_type = other DNA
gtggcaccatcccgagcaag

SEQ ID NO: 19586 - DNA, 20 bp, synthetic construct
  source 1..20: mol_type = other DNA
ctgaactcacccattcgaag

SEQ ID NO: 19587 - DNA, 20 bp, synthetic construct
  source 1..20: mol_type = other DNA
tggcaccatcccgagcaagg

SEQ ID NO: 19588 - DNA, 20 bp, synthetic construct
  source 1..20: mol_type = other DNA
tgcatgcggcatacttgccc

SEQ ID NO: 19589 - DNA, 20 bp, synthetic construct
  source 1..20: mol_type = other DNA
tgtggcaccatcccgagcaa

SEQ ID NO: 19590 - DNA, 20 bp, synthetic construct
  source 1..20: mol_type = other DNA
catgcggcatacttgccctg

SEQ ID NO: 19591 - DNA, 20 bp, synthetic construct
  source 1..20: mol_type = other DNA
ctcacccattcgaagcggag

SEQ ID NO: 19592 - DNA, 20 bp, synthetic construct
  source 1..20: mol_type = other DNA
tggtgccacaggaggctgtg

SEQ ID NO: 19593 - DNA, 20 bp, synthetic construct
  source 1..20: mol_type = other DNA
gctcgggatggtgccacagg

SEQ ID NO: 19594 - DNA, 20 bp, synthetic construct
  source 1..20: mol_type = other DNA
ggcaccatcccgagcaaggg

SEQ ID NO: 19595 - DNA, 20 bp, synthetic construct
  source 1..20: mol_type = other DNA
cacccattcgaagcggagcg

SEQ ID NO: 19596 - DNA, 20 bp, synthetic construct
  source 1..20: mol_type = other DNA
cttgctcgggatggtgccac

SEQ ID NO: 19597 - DNA, 20 bp, synthetic construct
  source 1..20: mol_type = other DNA
ggggcccgcacagcctcctg

SEQ ID NO: 19598 - DNA, 20 bp, synthetic construct
  source 1..20: mol_type = other DNA
ggtgccacaggaggctgtgc

SEQ ID NO: 19599 - DNA, 20 bp, synthetic construct
  source 1..20: mol_type = other DNA
cggctagggatcagacatgg

SEQ ID NO: 19600 - DNA, 20 bp, synthetic construct
  source 1..20: mol_type = other DNA
gcgggcggctggcgacacgg

SEQ ID NO: 19601 - DNA, 20 bp, synthetic construct
  source 1..20: mol_type = other DNA
cggcggctagggatcagaca

SEQ ID NO: 19602 - DNA, 20 bp, synthetic construct
  source 1..20: mol_type = other DNA
catggcggcggatctgaacc

SEQ ID NO: 19603 - DNA, 20 bp, synthetic construct
  source 1..20: mol_type = other DNA
ctagggatcagacatggcgg

SEQ ID NO: 19604 - DNA, 20 bp, synthetic construct
  source 1..20: mol_type = other DNA
ggggcagggagatccactcc

SEQ ID NO: 19605 - DNA, 20 bp, synthetic construct
  source 1..20: mol_type = other DNA
gcggcagcaggagaaggcgg

SEQ ID NO: 19606 - DNA, 20 bp, synthetic construct
  source 1..20: mol_type = other DNA
gcagcaggagaaggcggcgg

SEQ ID NO: 19607 - DNA, 20 bp, synthetic construct
  source 1..20: mol_type = other DNA
gcggcggcagcaggagaagg

SEQ ID NO: 19608 - DNA, 20 bp, synthetic construct
  source 1..20: mol_type = other DNA
ccctcctccctcggcagccg

SEQ ID NO: 19609 - DNA, 20 bp, synthetic construct
  source 1..20: mol_type = other DNA
tcctccctcggcagccgcgg

SEQ ID NO: 19610 - DNA, 20 bp, synthetic construct
  source 1..20: mol_type = other DNA
gccgcggcggcagcaggaga

SEQ ID NO: 19611 - DNA, 20 bp, synthetic construct
  source 1..20: mol_type = other DNA
gccgccgcggctgccgaggg

SEQ ID NO: 19612 - DNA, 20 bp, synthetic construct
  source 1..20: mol_type = other DNA
ccgcggctgccgagggagga

SEQ ID NO: 19613 - DNA, 20 bp, synthetic construct
  source 1..20: mol_type = other DNA
gccttctcctgctgccgccg

SEQ ID NO: 19614 - DNA, 20 bp, synthetic construct
  source 1..20: mol_type = other DNA
aacaccctgaagagcaacat

SEQ ID NO: 19615 - DNA, 20 bp, synthetic construct
  source 1..20: mol_type = other DNA
aatctgtattaaagcgttcc

SEQ ID NO: 19616 - DNA, 20 bp, synthetic construct
  source 1..20: mol_type = other DNA
cattgcattacaaaaatacc

SEQ ID NO: 19617 - DNA, 20 bp, synthetic construct
  source 1..20: mol_type = other DNA
gaacaccctgaagagcaaca

SEQ ID NO: 19618 - DNA, 20 bp, synthetic construct
  source 1..20: mol_type = other DNA
gatttaaaacataaatagct

SEQ ID NO: 19619 - DNA, 20 bp, synthetic construct
  source 1..20: mol_type = other DNA
taatacagattagaaaatca

SEQ ID NO: 19620 - DNA, 20 bp, synthetic construct
  source 1..20: mol_type = other DNA
gttagagaagatttagttgt

SEQ ID NO: 19621 - DNA, 20 bp, synthetic construct
  source 1..20: mol_type = other DNA
ttctcccatgttgctcttca

SEQ ID NO: 19622 - DNA, 20 bp, synthetic construct
  source 1..20: mol_type = other DNA
tttctcccatgttgctcttc

SEQ ID NO: 19623 - DNA, 20 bp, synthetic construct
  source 1..20: mol_type = other DNA
aggtaaatctgacaaatctg

SEQ ID NO: 19624 - DNA, 20 bp, synthetic construct
  source 1..20: mol_type = other DNA
aatacatctggtgtctaata

SEQ ID NO: 19625 - DNA, 20 bp, synthetic construct
  source 1..20: mol_type = other DNA
gtaggtaaatctgacaaatc

SEQ ID NO: 19626 - DNA, 20 bp, synthetic construct
  source 1..20: mol_type = other DNA
gagaaagactgagagagaac

SEQ ID NO: 19627 - DNA, 20 bp, synthetic construct
  source 1..20: mol_type = other DNA
gataaaagctaagttggaga

SEQ ID NO: 19628 - DNA, 20 bp, synthetic construct
  source 1..20: mol_type = other DNA
taggtaaatctgacaaatct

SEQ ID NO: 19629 - DNA, 20 bp, synthetic construct
  source 1..20: mol_type = other DNA
ataaaagctaagttggagaa

SEQ ID NO: 19630 - DNA, 20 bp, synthetic construct
  source 1..20: mol_type = other DNA
atttcaaggaacccagttgc

SEQ ID NO: 19631 - DNA, 20 bp, synthetic construct
  source 1..20: mol_type = other DNA
ccagttgctggaaatacatc

SEQ ID NO: 19632 - DNA, 20 bp, synthetic construct
  source 1..20: mol_type = other DNA
attggagataaaagctaagt

SEQ ID NO: 19633 - DNA, 20 bp, synthetic construct
  source 1..20: mol_type = other DNA
tatgaaccagagaaatttca

SEQ ID NO: 19634 - DNA, 20 bp, synthetic construct
  source 1..20: mol_type = other DNA
gttctctctcagtctttctc

SEQ ID NO: 19635 - DNA, 20 bp, synthetic construct
  source 1..20: mol_type = other DNA
tgggttccttgaaatttctc

SEQ ID NO: 19636 - DNA, 20 bp, synthetic construct
  source 1..20: mol_type = other DNA
ccagatgtatttccagcaac

SEQ ID NO: 19637 - DNA, 20 bp, synthetic construct
  source 1..20: mol_type = other DNA
ttctctctcagtctttctct

SEQ ID NO: 19638 - DNA, 20 bp, synthetic construct
  source 1..20: mol_type = other DNA
cagcacgggatacaggcgcg

SEQ ID NO: 19639 - DNA, 20 bp, synthetic construct
  source 1..20: mol_type = other DNA
gcagcagcagcagtcgcgaa

SEQ ID NO: 19640 - DNA, 20 bp, synthetic construct
  source 1..20: mol_type = other DNA
tgtatcccgtgctgtttccc

SEQ ID NO: 19641 - DNA, 20 bp, synthetic construct
  source 1..20: mol_type = other DNA
gtctgccagggaaacagcac

SEQ ID NO: 19642 - DNA, 20 bp, synthetic construct
  source 1..20: mol_type = other DNA
agcagcagtcgcgaaagggt

SEQ ID NO: 19643 - DNA, 20 bp, synthetic construct
  source 1..20: mol_type = other DNA
gagcgcctgtgtgtctgcca

SEQ ID NO: 19644 - DNA, 20 bp, synthetic construct
  source 1..20: mol_type = other DNA
agcacgggatacaggcgcgc

SEQ ID NO: 19645 - DNA, 20 bp, synthetic construct
  source 1..20: mol_type = other DNA
ccggacgtggaagcagcaag

SEQ ID NO: 19646 - DNA, 20 bp, synthetic construct
  source 1..20: mol_type = other DNA
gcgaaagggtagggtccagg

SEQ ID NO: 19647 - DNA, 20 bp, synthetic construct
  source 1..20: mol_type = other DNA
gcagcagtcgcgaaagggta

SEQ ID NO: 19648 - DNA, 20 bp, synthetic construct
  source 1..20: mol_type = other DNA
ggtccaggtggctgtgacgg

SEQ ID NO: 19649 - DNA, 20 bp, synthetic construct
  source 1..20: mol_type = other DNA
tgtttccctggcagacacac

SEQ ID NO: 19650 - DNA, 20 bp, synthetic construct
  source 1..20: mol_type = other DNA
ggatacaggcgcgcgggtgc

SEQ ID NO: 19651 - DNA, 20 bp, synthetic construct
  source 1..20: mol_type = other DNA
tgtctgccagggaaacagca

SEQ ID NO: 19652 - DNA, 20 bp, synthetic construct
  source 1..20: mol_type = other DNA
ctccttgccagcctgcaggg

SEQ ID NO: 19653 - DNA, 20 bp, synthetic construct
  source 1..20: mol_type = other DNA
tgtaaagatatccaaagatg

SEQ ID NO: 19654 - DNA, 20 bp, synthetic construct
  source 1..20: mol_type = other DNA
gtatattggtatcaagagtg

SEQ ID NO: 19655 - DNA, 20 bp, synthetic construct
  source 1..20: mol_type = other DNA
acagttcagcatggcttgag

SEQ ID NO: 19656 - DNA, 20 bp, synthetic construct
  source 1..20: mol_type = other DNA
tggagggctcagaaaaacac

SEQ ID NO: 19657 - DNA, 20 bp, synthetic construct
  source 1..20: mol_type = other DNA
cagaaaaacacaggaaaatg

SEQ ID NO: 19658 - DNA, 20 bp, synthetic construct
  source 1..20: mol_type = other DNA
aaacaagcatatctttcaca

SEQ ID NO: 19659 - DNA, 20 bp, synthetic construct
  source 1..20: mol_type = other DNA
gaatgagagccaagtgaagg

SEQ ID NO: 19660 - DNA, 20 bp, synthetic construct
  source 1..20: mol_type = other DNA
agaggttgtaacagtttgga

SEQ ID NO: 19661 - DNA, 20 bp, synthetic construct
  source 1..20: mol_type = other DNA
gaagaatgagagccaagtga

SEQ ID NO: 19662 - DNA, 20 bp, synthetic construct
  source 1..20: mol_type = other DNA
catatctttcacatggtgac

SEQ ID NO: 19663 - DNA, 20 bp, synthetic construct
  source 1..20: mol_type = other DNA
aatggactaataaagtatat

SEQ ID NO: 19664 - DNA, 20 bp, synthetic construct
  source 1..20: mol_type = other DNA
agcatggcttgagaggtctc

SEQ ID NO: 19665 - DNA, 20 bp, synthetic construct
  source 1..20: mol_type = other DNA
caaatttggaactgggtagc

SEQ ID NO: 19666 - DNA, 20 bp, synthetic construct
  source 1..20: mol_type = other DNA
caaagatgtggaagcaaatt

SEQ ID NO: 19667 - DNA, 20 bp, synthetic construct
  source 1..20: mol_type = other DNA
caaatttgcttccacatctt

SEQ ID NO: 19668 - DNA, 20 bp, synthetic construct
  source 1..20: mol_type = other DNA
ctccgcagcaacacaacagg

SEQ ID NO: 19669 - DNA, 20 bp, synthetic construct
  source 1..20: mol_type = other DNA
cctgttgtgttgctgcggag

SEQ ID NO: 19670 - DNA, 20 bp, synthetic construct
  source 1..20: mol_type = other DNA
ggccccctgttgtgttgctg

SEQ ID NO: 19671 - DNA, 20 bp, synthetic construct
  source 1..20: mol_type = other DNA
gcggagaggtgaggttccgg

SEQ ID NO: 19672 - DNA, 20 bp, synthetic construct
  source 1..20: mol_type = other DNA
gctgggctgggaagtgtccg

SEQ ID NO: 19673 - DNA, 20 bp, synthetic construct
  source 1..20: mol_type = other DNA
tgtgttgctgcggagaggtg

SEQ ID NO: 19674 - DNA, 20 bp, synthetic construct
  source 1..20: mol_type = other DNA
cgggagccggaagcccagcg

SEQ ID NO: 19675 - DNA, 20 bp, synthetic construct
  source 1..20: mol_type = other DNA
gctgcggagaggtgaggttc

SEQ ID NO: 19676 - DNA, 20 bp, synthetic construct
  source 1..20: mol_type = other DNA
gggagggtgcgcggacgcgg

SEQ ID NO: 19677 - DNA, 20 bp, synthetic construct
  source 1..20: mol_type = other DNA
gccgcggccggctccgcgct

SEQ ID NO: 19678 - DNA, 20 bp, synthetic construct
  source 1..20: mol_type = other DNA
gtgaggttccggaggccctg

SEQ ID NO: 19679 - DNA, 20 bp, synthetic construct
  source 1..20: mol_type = other DNA
ccggaagcccagcgcggagc

SEQ ID NO: 19680 - DNA, 20 bp, synthetic construct
  source 1..20: mol_type = other DNA
cttaggatcgggagggtgcg

SEQ ID NO: 19681 - DNA, 20 bp, synthetic construct
  source 1..20: mol_type = other DNA
tccggaggccctgaggtcag

SEQ ID NO: 19682 - DNA, 20 bp, synthetic construct
  source 1..20: mol_type = other DNA
gcccagcgcggagccggccg

SEQ ID NO: 19683 - DNA, 20 bp, synthetic construct
  source 1..20: mol_type = other DNA
ggctcggaggcgcacctgtg

SEQ ID NO: 19684 - DNA, 20 bp, synthetic construct
  source 1..20: mol_type = other DNA
gcacacccagacgcctccgg

SEQ ID NO: 19685 - DNA, 20 bp, synthetic construct
  source 1..20: mol_type = other DNA
tccgcacacccagacgcctc

SEQ ID NO: 19686 - DNA, 20 bp, synthetic construct
  source 1..20: mol_type = other DNA
gtgaggtgtccctgaggaga

SEQ ID NO: 19687 - DNA, 20 bp, synthetic construct
  source 1..20: mol_type = other DNA
cgcacacccagacgcctccg

SEQ ID NO: 19688 - DNA, 20 bp, synthetic construct
  source 1..20: mol_type = other DNA
tgcgcacgcgcgctgtcccc

SEQ ID NO: 19689 - DNA, 20 bp, synthetic construct
  source 1..20: mol_type = other DNA
gcacgcgcgctgtcccccgg

SEQ ID NO: 19690 - DNA, 20 bp, synthetic construct
  source 1..20: mol_type = other DNA
aggtgtccctgaggagaggg

SEQ ID NO: 19691 - DNA, 20 bp, synthetic construct
  source 1..20: mol_type = other DNA
gcacccacctccctctcctc

SEQ ID NO: 19692 - DNA, 20 bp, synthetic construct
  source 1..20: mol_type = other DNA
gcacctgtgaggtgtccctg

SEQ ID NO: 19693 - DNA, 20 bp, synthetic construct
  source 1..20: mol_type = other DNA
tctttcccggagggaggcgg

SEQ ID NO: 19694 - DNA, 20 bp, synthetic construct
  source 1..20: mol_type = other DNA
tgtgaggtgtccctgaggag

SEQ ID NO: 19695 - DNA, 20 bp, synthetic construct
  source 1..20: mol_type = other DNA
ccagggagcgggctgggggt

SEQ ID NO: 19696 - DNA, 20 bp, synthetic construct
  source 1..20: mol_type = other DNA
ccagcccgctccctggcccc

SEQ ID NO: 19697 - DNA, 20 bp, synthetic construct
  source 1..20: mol_type = other DNA
aggagagggaggtgggtgcg

SEQ ID NO: 19698 - DNA, 20 bp, synthetic construct
  source 1..20: mol_type = other DNA
gtagctataagacgacccct

SEQ ID NO: 19699 - DNA, 20 bp, synthetic construct
  source 1..20: mol_type = other DNA
aagtgaacttagaggttgtg

SEQ ID NO: 19700 - DNA, 20 bp, synthetic construct
  source 1..20: mol_type = other DNA
agtgtctaaactccaaacaa

SEQ ID NO: 19701 - DNA, 20 bp, synthetic construct
  source 1..20: mol_type = other DNA
tcttatagctaccagcccac

SEQ ID NO: 19702 - DNA, 20 bp, synthetic construct
  source 1..20: mol_type = other DNA
acgcacgcgcaagaagcaag

SEQ ID NO: 19703 - DNA, 20 bp, synthetic construct
  source 1..20: mol_type = other DNA
agctctacaagccggcaggg

SEQ ID NO: 19704 - DNA, 20 bp, synthetic construct
  source 1..20: mol_type = other DNA
gaagtgaacttagaggttgt

SEQ ID NO: 19705 - DNA, 20 bp, synthetic construct
  source 1..20: mol_type = other DNA
tagactaaatgcctgtgggc

SEQ ID NO: 19706 - DNA, 20 bp, synthetic construct
  source 1..20: mol_type = other DNA
ctaagttcacttcacctccg

SEQ ID NO: 19707 - DNA, 20 bp, synthetic construct
  source 1..20: mol_type = other DNA
tgcacgtgtatccatataca

SEQ ID NO: 19708 - DNA, 20 bp, synthetic construct
  source 1..20: mol_type = other DNA
ttagaggttgtggggccgag

SEQ ID NO: 19709 - DNA, 20 bp, synthetic construct
  source 1..20: mol_type = other DNA
gttgtttggagtttagacac

SEQ ID NO: 19710 - DNA, 20 bp, synthetic construct
  source 1..20: mol_type = other DNA
tgaagtgaacttagaggttg

SEQ ID NO: 19711 - DNA, 20 bp, synthetic construct
  source 1..20: mol_type = other DNA
cggaggtgaagtgaacttag

SEQ ID NO: 19712 - DNA, 20 bp, synthetic construct
  source 1..20: mol_type = other DNA
cttagaggttgtggggccga

SEQ ID NO: 19713 - DNA, 20 bp, synthetic construct
  source 1..20: mol_type = other DNA
ggcgtctacagctgccacga

SEQ ID NO: 19714 - DNA, 20 bp, synthetic construct
  source 1..20: mol_type = other DNA
aacgagaaacccgtagcgcc

SEQ ID NO: 19715 - DNA, 20 bp, synthetic construct
  source 1..20: mol_type = other DNA
cgctacgggtttctcgttgg

SEQ ID NO: 19716 - DNA, 20 bp, synthetic construct
  source 1..20: mol_type = other DNA
acgctctaaccgctcgcctc

SEQ ID NO: 19717 - DNA, 20 bp, synthetic construct
  source 1..20: mol_type = other DNA
gaggggaactggccgcgtga

SEQ ID NO: 19718 - DNA, 20 bp, synthetic construct
  source 1..20: mol_type = other DNA
ttcgtggcagctgtagacgc

SEQ ID NO: 19719 - DNA, 20 bp, synthetic construct
  source 1..20: mol_type = other DNA
ggaaaaggcataaagtccgt

SEQ ID NO: 19720 - DNA, 20 bp, synthetic construct
  source 1..20: mol_type = other DNA
agccgcagctgccatcttag

SEQ ID NO: 19721 - DNA, 20 bp, synthetic construct
  source 1..20: mol_type = other DNA
aggggaactggccgcgtgag

SEQ ID NO: 19722 - DNA, 20 bp, synthetic construct
  source 1..20: mol_type = other DNA
tacgggtttctcgttggagg

SEQ ID NO: 19723 - DNA, 20 bp, synthetic construct
  source 1..20: mol_type = other DNA
ggatgggccggtctcggagc

SEQ ID NO: 19724 - DNA, 20 bp, synthetic construct
  source 1..20: mol_type = other DNA
ctcgcctcaggcccctcacg

SEQ ID NO: 19725 - DNA, 20 bp, synthetic construct
  source 1..20: mol_type = other DNA
cgcccctaagatggcagctg

SEQ ID NO: 19726 - DNA, 20 bp, synthetic construct
  source 1..20: mol_type = other DNA
tcgtggcagctgtagacgcc

SEQ ID NO: 19727 - DNA, 20 bp, synthetic construct
  source 1..20: mol_type = other DNA
cagctgtagacgccgggaaa

SEQ ID NO: 19728 - DNA, 20 bp, synthetic construct
  source 1..20: mol_type = other DNA
aggcggcagattcttggcgg

SEQ ID NO: 19729 - DNA, 20 bp, synthetic construct
  source 1..20: mol_type = other DNA
gccaggcggcagattcttgg

SEQ ID NO: 19730 - DNA, 20 bp, synthetic construct
  source 1..20: mol_type = other DNA
ggactctgaggcccggaacg

SEQ ID NO: 19731 - DNA, 20 bp, synthetic construct
  source 1..20: mol_type = other DNA
ctctcggagaaagaagctcc

SEQ ID NO: 19732 - DNA, 20 bp, synthetic construct
  source 1..20: mol_type = other DNA
gtccttccgagcgcgccagg

SEQ ID NO: 19733 - DNA, 20 bp, synthetic construct
  source 1..20: mol_type = other DNA
gcctggcgcgctcggaagga

SEQ ID NO: 19734 - DNA, 20 bp, synthetic construct
  source 1..20: mol_type = other DNA
gccgccaagaatctgccgcc

SEQ ID NO: 19735 - DNA, 20 bp, synthetic construct
  source 1..20: mol_type = other DNA
ggaacgcggcagccggctcg

SEQ ID NO: 19736 - DNA, 20 bp, synthetic construct
  source 1..20: mol_type = other DNA
ctggcgcgctcggaaggacg

SEQ ID NO: 19737 - DNA, 20 bp, synthetic construct
  source 1..20: mol_type = other DNA
cggcggcgcctccccagtgc

SEQ ID NO: 19738 - DNA, 20 bp, synthetic construct
  source 1..20: mol_type = other DNA
gctcggggccgccggcactg

SEQ ID NO: 19739 - DNA, 20 bp, synthetic construct
  source 1..20: mol_type = other DNA
cggcagattcttggcggcgg

SEQ ID NO: 19740 - DNA, 20 bp, synthetic construct
  source 1..20: mol_type = other DNA
gaggcccggaacgcggcagc

SEQ ID NO: 19741 - DNA, 20 bp, synthetic construct
  source 1..20: mol_type = other DNA
cggggccgccggcactgggg

SEQ ID NO: 19742 - DNA, 20 bp, synthetic construct
  source 1..20: mol_type = other DNA
cagtgccggcggccccgagc

SEQ ID NO: 19743 - DNA, 20 bp, synthetic construct
  source 1..20: mol_type = other DNA
gcggcttcatgaatattccg

SEQ ID NO: 19744 - DNA, 20 bp, synthetic construct
  source 1..20: mol_type = other DNA
ctatggcaacccgcgagctg

SEQ ID NO: 19745 - DNA, 20 bp, synthetic construct
  source 1..20: mol_type = other DNA
gaggaggcgaggcgagctcg

SEQ ID NO: 19746 - DNA, 20 bp, synthetic construct
  source 1..20: mol_type = other DNA
ggccagccacaaagcccggg

SEQ ID NO: 19747 - DNA, 20 bp, synthetic construct
  source 1..20: mol_type = other DNA
ctcgcgggttgccataggag

SEQ ID NO: 19748 - DNA, 20 bp, synthetic construct
  source 1..20: mol_type = other DNA
atgaagccgccgcagctcgc

SEQ ID NO: 19749 - DNA, 20 bp, synthetic construct
  source 1..20: mol_type = other DNA
tggcaacccgcgagctgcgg

SEQ ID NO: 19750 - DNA, 20 bp, synthetic construct
  source 1..20: mol_type = other DNA
tcatgaatattccggggcgc

SEQ ID NO: 19751 - DNA, 20 bp, synthetic construct
  source 1..20: mol_type = other DNA
ggagcccgagcgctgccgga

SEQ ID NO: 19752 - DNA, 20 bp, synthetic construct
  source 1..20: mol_type = other DNA
ggtggccagccacaaagccc

SEQ ID NO: 19753 - DNA, 20 bp, synthetic construct
  source 1..20: mol_type = other DNA
aggcgaggcgagctcgcggg

SEQ ID NO: 19754 - DNA, 20 bp, synthetic construct
  source 1..20: mol_type = other DNA
gctgccggagggcgcttcgg

SEQ ID NO: 19755 - DNA, 20 bp, synthetic construct
  source 1..20: mol_type = other DNA
catgaagccgccgcagctcg

SEQ ID NO: 19756 - DNA, 20 bp, synthetic construct
  source 1..20: mol_type = other DNA
gggagcccgagcgctgccgg

SEQ ID NO: 19757 - DNA, 20 bp, synthetic construct
  source 1..20: mol_type = other DNA
ataggagcggctccagcagc

SEQ ID NO: 19758 - DNA, 20 bp, synthetic construct
  source 1..20: mol_type = other DNA
gggatctacgcagcttgcgg

SEQ ID NO: 19759 - DNA, 20 bp, synthetic construct
  source 1..20: mol_type = other DNA
ggaacgagagcgcgaagcta

SEQ ID NO: 19760 - DNA, 20 bp, synthetic construct
  source 1..20: mol_type = other DNA
ggatgcgcggtgttaaacta

SEQ ID NO: 19761 - DNA, 20 bp, synthetic construct
  source 1..20: mol_type = other DNA
gggacctggagatattagag

SEQ ID NO: 19762 - DNA, 20 bp, synthetic construct
  source 1..20: mol_type = other DNA
gaagcgcaccccgactgccg

SEQ ID NO: 19763 - DNA, 20 bp, synthetic construct
  source 1..20: mol_type = other DNA
gcgcgaagctaaggtatgtc

SEQ ID NO: 19764 - DNA, 20 bp, synthetic construct
  source 1..20: mol_type = other DNA
aagggacctggagatattag

SEQ ID NO: 19765 - DNA, 20 bp, synthetic construct
  source 1..20: mol_type = other DNA
agggacctggagatattaga

SEQ ID NO: 19766 - DNA, 20 bp, synthetic construct
  source 1..20: mol_type = other DNA
cacgaagatctccaggcccc

SEQ ID NO: 19767 - DNA, 20 bp, synthetic construct
  source 1..20: mol_type = other DNA
taaggtatgtcgggctcccg

SEQ ID NO: 19768 - DNA, 20 bp, synthetic construct
  source 1..20: mol_type = other DNA
acatcccctctaatatctcc

SEQ ID NO: 19769 - DNA, 20 bp, synthetic construct
  source 1..20: mol_type = other DNA
tacgcagcttgcggtggcga

SEQ ID NO: 19770 - DNA, 20 bp, synthetic construct
  source 1..20: mol_type = other DNA
gtgttaaactaagggatgac

SEQ ID NO: 19771 - DNA, 20 bp, synthetic construct
  source 1..20: mol_type = other DNA
gcacgaagatctccaggccc

SEQ ID NO: 19772 - DNA, 20 bp, synthetic construct
  source 1..20: mol_type = other DNA
gcagcttgcggtggcgaagg

SEQ ID NO: 19773 - DNA, 20 bp, synthetic construct
  source 1..20: mol_type = other DNA
gcctgcatgccgcctcatgg

SEQ ID NO: 19774 - DNA, 20 bp, synthetic construct
  source 1..20: mol_type = other DNA
gggagcaggccacagaacgc

SEQ ID NO: 19775 - DNA, 20 bp, synthetic construct
  source 1..20: mol_type = other DNA
cctcacagatgaacaaagtg

SEQ ID NO: 19776 - DNA, 20 bp, synthetic construct
  source 1..20: mol_type = other DNA
gtggccagtgacagacccca

SEQ ID NO: 19777 - DNA, 20 bp, synthetic construct
  source 1..20: mol_type = other DNA
gaagggcctcaagatgagtt

SEQ ID NO: 19778 - DNA, 20 bp, synthetic construct
  source 1..20: mol_type = other DNA
ctcgcccctaactcatcttg

SEQ ID NO: 19779 - DNA, 20 bp, synthetic construct
  source 1..20: mol_type = other DNA
cccatgaggcggcatgcagg

SEQ ID NO: 19780 - DNA, 20 bp, synthetic construct
  source 1..20: mol_type = other DNA
accccaaggactctaggcta

SEQ ID NO: 19781 - DNA, 20 bp, synthetic construct
  source 1..20: mol_type = other DNA
gccagaggacccccatgagg

SEQ ID NO: 19782 - DNA, 20 bp, synthetic construct
  source 1..20: mol_type = other DNA
accttagcctagagtccttg

SEQ ID NO: 19783 - DNA, 20 bp, synthetic construct
  source 1..20: mol_type = other DNA
catgaggcggcatgcaggcg

SEQ ID NO: 19784 - DNA, 20 bp, synthetic construct
  source 1..20: mol_type = other DNA
tgacagaccccaaggactct

SEQ ID NO: 19785 - DNA, 20 bp, synthetic construct
  source 1..20: mol_type = other DNA
cgtgctcctgggccagccag

SEQ ID NO: 19786 - DNA, 20 bp, synthetic construct
  source 1..20: mol_type = other DNA
ccagccagaggacccccatg

SEQ ID NO: 19787 - DNA, 20 bp, synthetic construct
  source 1..20: mol_type = other DNA
gtctccttacctgcgttctg

SEQ ID NO: 19788 - DNA, 20 bp, synthetic construct
  source 1..20: mol_type = other DNA
cttctcacgcatcctcccgg

SEQ ID NO: 19789 - DNA, 20 bp, synthetic construct
  source 1..20: mol_type = other DNA
acaggagccaccatcttggg

SEQ ID NO: 19790 - DNA, 20 bp, synthetic construct
  source 1..20: mol_type = other DNA
gggctgaggaacttcctctg

SEQ ID NO: 19791 - DNA, 20 bp, synthetic construct
  source 1..20: mol_type = other DNA
tcttctcacgcatcctcccg

SEQ ID NO: 19792 - DNA, 20 bp, synthetic construct
  source 1..20: mol_type = other DNA
gctgaggaacttcctctggg

SEQ ID NO: 19793 - DNA, 20 bp, synthetic construct
  source 1..20: mol_type = other DNA
gctcgcactcacggagacac

SEQ ID NO: 19794 - DNA, 20 bp, synthetic construct
  source 1..20: mol_type = other DNA
agagcgtccaccgcccaaga

SEQ ID NO: 19795 - DNA, 20 bp, synthetic construct
  source 1..20: mol_type = other DNA
agacacaggagccaccatct

SEQ ID NO: 19796 - DNA, 20 bp, synthetic construct
  source 1..20: mol_type = other DNA
gcgtccaccgcccaagatgg

SEQ ID NO: 19797 - DNA, 20 bp, synthetic construct
  source 1..20: mol_type = other DNA
tccgtgagtgcgagcggacg

SEQ ID NO: 19798 - DNA, 20 bp, synthetic construct
  source 1..20: mol_type = other DNA
tgtgtctccgtgagtgcgag

SEQ ID NO: 19799 - DNA, 20 bp, synthetic construct
  source 1..20: mol_type = other DNA
ctggacgccccctcccggag

SEQ ID NO: 19800 - DNA, 20 bp, synthetic construct
  source 1..20: mol_type = other DNA
ggcggtggacgctctggccg

SEQ ID NO: 19801 - DNA, 20 bp, synthetic construct
  source 1..20: mol_type = other DNA
cccgtcccgcccgctccggg

SEQ ID NO: 19802 - DNA, 20 bp, synthetic construct
  source 1..20: mol_type = other DNA
gtgagtgcgagcggacgggg

SEQ ID NO: 19803 - DNA, 20 bp, synthetic construct
  source 1..20: mol_type = other DNA
gatccctgacatatacgaag

SEQ ID NO: 19804 - DNA, 20 bp, synthetic construct
  source 1..20: mol_type = other DNA
tcacactggcactaccaaag

SEQ ID NO: 19805 - DNA, 20 bp, synthetic construct
  source 1..20: mol_type = other DNA
ttgatccctgacatatacga

SEQ ID NO: 19806 - DNA, 20 bp, synthetic construct
  source 1..20: mol_type = other DNA
tgatccctgacatatacgaa

SEQ ID NO: 19807 - DNA, 20 bp, synthetic construct
  source 1..20: mol_type = other DNA
gagcactggagaaatcattg

SEQ ID NO: 19808 - DNA, 20 bp, synthetic construct
  source 1..20: mol_type = other DNA
tccgtcctgcaatagcaaca

SEQ ID NO: 19809 - DNA, 20 bp, synthetic construct
  source 1..20: mol_type = other DNA
tcattgtggatgagtcacac

SEQ ID NO: 19810 - DNA, 20 bp, synthetic construct
  source 1..20: mol_type = other DNA
agggatcaataatgataagt

SEQ ID NO: 19811 - DNA, 20 bp, synthetic construct
  source 1..20: mol_type = other DNA
ttagcagacgaaaaccactt

SEQ ID NO: 19812 - DNA, 20 bp, synthetic construct
  source 1..20: mol_type = other DNA
caaccccttcgtatatgtca

SEQ ID NO: 19813 - DNA, 20 bp, synthetic construct
  source 1..20: mol_type = other DNA
gccatgttgctattgcagga

SEQ ID NO: 19814 - DNA, 20 bp, synthetic construct
  source 1..20: mol_type = other DNA
ctcgagaacaagatgagcac

SEQ ID NO: 19815 - DNA, 20 bp, synthetic construct
  source 1..20: mol_type = other DNA
tcaataatgataagtaggcc

SEQ ID NO: 19816 - DNA, 20 bp, synthetic construct
  source 1..20: mol_type = other DNA
atcaataatgataagtaggc

SEQ ID NO: 19817 - DNA, 20 bp, synthetic construct
  source 1..20: mol_type = other DNA
ctctgccatgttgctattgc

SEQ ID NO: 19818 - DNA, 20 bp, synthetic construct
  source 1..20: mol_type = other DNA
cgagagccgagagacagtcc

SEQ ID NO: 19819 - DNA, 20 bp, synthetic construct
  source 1..20: mol_type = other DNA
gctcgggcccgtaaacaacg

SEQ ID NO: 19820 - DNA, 20 bp, synthetic construct
  source 1..20: mol_type = other DNA
gagagccgagagacagtccc

SEQ ID NO: 19821 - DNA, 20 bp, synthetic construct
  source 1..20: mol_type = other DNA
cccgtcagctgggccccgtg

SEQ ID NO: 19822 - DNA, 20 bp, synthetic construct
  source 1..20: mol_type = other DNA
ccgtcagctgggccccgtgc

SEQ ID NO: 19823 - DNA, 20 bp, synthetic construct
  source 1..20: mol_type = other DNA
agatcgcgacccagagcgcg

SEQ ID NO: 19824 - DNA, 20 bp, synthetic construct
  source 1..20: mol_type = other DNA
ggccccgtcccaggatctcg

SEQ ID NO: 19825 - DNA, 20 bp, synthetic construct
  source 1..20: mol_type = other DNA
gcgctctgggtcgcgatctg

SEQ ID NO: 19826 - DNA, 20 bp, synthetic construct
  source 1..20: mol_type = other DNA
gtgcgggccgcgggaaaagg

SEQ ID NO: 19827 - DNA, 20 bp, synthetic construct
  source 1..20: mol_type = other DNA
cccgcacggggcccagctga

SEQ ID NO: 19828 - DNA, 20 bp, synthetic construct
  source 1..20: mol_type = other DNA
agacagtcccgggcgcagcg

SEQ ID NO: 19829 - DNA, 20 bp, synthetic construct
  source 1..20: mol_type = other DNA
gatcgcgacccagagcgcgc

SEQ ID NO: 19830 - DNA, 20 bp, synthetic construct
  source 1..20: mol_type = other DNA
atcgcgacccagagcgcgcg

SEQ ID NO: 19831 - DNA, 20 bp, synthetic construct
  source 1..20: mol_type = other DNA
cgggcgggcggcgggagaga

SEQ ID NO: 19832 - DNA, 20 bp, synthetic construct
  source 1..20: mol_type = other DNA
gcacctgggctggcgggtgg

SEQ ID NO: 19833 - DNA, 20 bp, synthetic construct
  source 1..20: mol_type = other DNA
gcccggccctccactggcgg

SEQ ID NO: 19834 - DNA, 20 bp, synthetic construct
  source 1..20: mol_type = other DNA
cccggggaacaagcggcccg

SEQ ID NO: 19835 - DNA, 20 bp, synthetic construct
  source 1..20: mol_type = other DNA
agcgcccggccctccactgg

SEQ ID NO: 19836 - DNA, 20 bp, synthetic construct
  source 1..20: mol_type = other DNA
caggagccgccgccagtgga

SEQ ID NO: 19837 - DNA, 20 bp, synthetic construct
  source 1..20: mol_type = other DNA
gcgcagggccgagcggacgg

SEQ ID NO: 19838 - DNA, 20 bp, synthetic construct
  source 1..20: mol_type = other DNA
gagtggccgcggcctcccgg

SEQ ID NO: 19839 - DNA, 20 bp, synthetic construct
  source 1..20: mol_type = other DNA
ggcgcagggccgagcggacg

SEQ ID NO: 19840 - DNA, 20 bp, synthetic construct
  source 1..20: mol_type = other DNA
ggcgcaggagccgccgccag

SEQ ID NO: 19841 - DNA, 20 bp, synthetic construct
  source 1..20: mol_type = other DNA
agtggccgcggcctcccggg

SEQ ID NO: 19842 - DNA, 20 bp, synthetic construct
  source 1..20: mol_type = other DNA
cgcagggccgagcggacggg

SEQ ID NO: 19843 - DNA, 20 bp, synthetic construct
  source 1..20: mol_type = other DNA
gcagggccgagcggacgggg

SEQ ID NO: 19844 - DNA, 20 bp, synthetic construct
  source 1..20: mol_type = other DNA
ggggcgggcgcagggccgag

SEQ ID NO: 19845 - DNA, 20 bp, synthetic construct
  source 1..20: mol_type = other DNA
ggagtggccgcggcctcccg

SEQ ID NO: 19846 - DNA, 20 bp, synthetic construct
  source 1..20: mol_type = other DNA
gcaggagccgccgccagtgg

SEQ ID NO: 19847 - DNA, 20 bp, synthetic construct
  source 1..20: mol_type = other DNA
cagtggagggccgggcgctg

SEQ ID NO: 19848 - DNA, 20 bp, synthetic construct
  source 1..20: mol_type = other DNA
cagcggcgggatgtccatag

SEQ ID NO: 19849 - DNA, 20 bp, synthetic construct
  source 1..20: mol_type = other DNA
cggcgggatgtccatagcgg

SEQ ID NO: 19850 - DNA, 20 bp, synthetic construct
  source 1..20: mol_type = other DNA
cagccccgacgcgttctcca

SEQ ID NO: 19851 - DNA, 20 bp, synthetic construct
  source 1..20: mol_type = other DNA
ggcgctcggctcctcgttgg

SEQ ID NO: 19852 - DNA, 20 bp, synthetic construct
  source 1..20: mol_type = other DNA
cgctatggacatcccgccgc

SEQ ID NO: 19853 - DNA, 20 bp, synthetic construct
  source 1..20: mol_type = other DNA
gcgccctggagaacgcgtcg

SEQ ID NO: 19854 - DNA, 20 bp, synthetic construct
  source 1..20: mol_type = other DNA
gcccggactcgccgccaacg

SEQ ID NO: 19855 - DNA, 20 bp, synthetic construct
  source 1..20: mol_type = other DNA
tagcggcggctgctggaccc

SEQ ID NO: 19856 - DNA, 20 bp, synthetic construct
  source 1..20: mol_type = other DNA
gggtccagcagccgccgcta

SEQ ID NO: 19857 - DNA, 20 bp, synthetic construct
  source 1..20: mol_type = other DNA
cagggcgctcggctcctcgt

SEQ ID NO: 19858 - DNA, 20 bp, synthetic construct
  source 1..20: mol_type = other DNA
tcagccccgacgcgttctcc

SEQ ID NO: 19859 - DNA, 20 bp, synthetic construct
  source 1..20: mol_type = other DNA
gagcgccctggagaacgcgt

SEQ ID NO: 19860 - DNA, 20 bp, synthetic construct
  source 1..20: mol_type = other DNA
cgatcttgccggccagcggc

SEQ ID NO: 19861 - DNA, 20 bp, synthetic construct
  source 1..20: mol_type = other DNA
aacgcgtcggggctgagccg

SEQ ID NO: 19862 - DNA, 20 bp, synthetic construct
  source 1..20: mol_type = other DNA
caacgaggagccgagcgccc

SEQ ID NO: 19863 - DNA, 20 bp, synthetic construct
  source 1..20: mol_type = other DNA
gccggtgagaagcgcagtcg

SEQ ID NO: 19864 - DNA, 20 bp, synthetic construct
  source 1..20: mol_type = other DNA
gggcacggggatgagctcag

SEQ ID NO: 19865 - DNA, 20 bp, synthetic construct
  source 1..20: mol_type = other DNA
ccggtgagaagcgcagtcgg

SEQ ID NO: 19866 - DNA, 20 bp, synthetic construct
  source 1..20: mol_type = other DNA
gacgtccttcacctccgctg

SEQ ID NO: 19867 - DNA, 20 bp, synthetic construct
  source 1..20: mol_type = other DNA
tgagtcctactcagccccag

SEQ ID NO: 19868 - DNA, 20 bp, synthetic construct
  source 1..20: mol_type = other DNA
gagccggtgagaagcgcagt

SEQ ID NO: 19869 - DNA, 20 bp, synthetic construct
  source 1..20: mol_type = other DNA
aggggcctctagaaagagct

SEQ ID NO: 19870 - DNA, 20 bp, synthetic construct
  source 1..20: mol_type = other DNA
caggggcctctagaaagagc

SEQ ID NO: 19871 - DNA, 20 bp, synthetic construct
  source 1..20: mol_type = other DNA
gaagcgcagtcgggggcacg

SEQ ID NO: 19872 - DNA, 20 bp, synthetic construct
  source 1..20: mol_type = other DNA
ggggcacggggatgagctca

SEQ ID NO: 19873 - DNA, 20 bp, synthetic construct
  source 1..20: mol_type = other DNA
cccccgactgcgcttctcac

SEQ ID NO: 19874 - DNA, 20 bp, synthetic construct
  source 1..20: mol_type = other DNA
agccggtgagaagcgcagtc

SEQ ID NO: 19875 - DNA, 20 bp, synthetic construct
  source 1..20: mol_type = other DNA
ggacgtccttccccaggagc

SEQ ID NO: 19876 - DNA, 20 bp, synthetic construct
  source 1..20: mol_type = other DNA
gtcctactcagccccagcgg

SEQ ID NO: 19877 - DNA, 20 bp, synthetic construct
  source 1..20: mol_type = other DNA
gcgcttctcaccggctcctg

SEQ ID NO: 19878 - DNA, 20 bp, synthetic construct
  source 1..20: mol_type = other DNA
tcccccataatatcaggaag

SEQ ID NO: 19879 - DNA, 20 bp, synthetic construct
  source 1..20: mol_type = other DNA
ggctgtctctagtggccacc

SEQ ID NO: 19880 - DNA, 20 bp, synthetic construct
  source 1..20: mol_type = other DNA
ctttagccctcagactcagg

SEQ ID NO: 19881 - DNA, 20 bp, synthetic construct
  source 1..20: mol_type = other DNA
aggcttctgattccaaggtc

SEQ ID NO: 19882 - DNA, 20 bp, synthetic construct
  source 1..20: mol_type = other DNA
ctaggtgggagtcctgctgg

SEQ ID NO: 19883 - DNA, 20 bp, synthetic construct
  source 1..20: mol_type = other DNA
caggcttctgattccaaggt

SEQ ID NO: 19884 - DNA, 20 bp, synthetic construct
  source 1..20: mol_type = other DNA
ctggggcagtgtctgcctgg

SEQ ID NO: 19885 - DNA, 20 bp, synthetic construct
  source 1..20: mol_type = other DNA
gggggccagccactccctag

SEQ ID NO: 19886 - DNA, 20 bp, synthetic construct
  source 1..20: mol_type = other DNA
ccactccctagaggagcccc

SEQ ID NO: 19887 - DNA, 20 bp, synthetic construct
  source 1..20: mol_type = other DNA
cctggggctcctctagggag

SEQ ID NO: 19888 - DNA, 20 bp, synthetic construct
  source 1..20: mol_type = other DNA
actagagacagcccagcctg

SEQ ID NO: 19889 - DNA, 20 bp, synthetic construct
  source 1..20: mol_type = other DNA
catggaagaaaacccgacct

SEQ ID NO: 19890 - DNA, 20 bp, synthetic construct
  source 1..20: mol_type = other DNA
ggtgggagtcctgctggagg

SEQ ID NO: 19891 - DNA, 20 bp, synthetic construct
  source 1..20: mol_type = other DNA
ccaggctgggctgtctctag

SEQ ID NO: 19892 - DNA, 20 bp, synthetic construct
  source 1..20: mol_type = other DNA
accttggaatcagaagcctg

SEQ ID NO: 19893 - DNA, 20 bp, synthetic construct
  source 1..20: mol_type = other DNA
cagcggcttcgccatcgcgc

SEQ ID NO: 19894 - DNA, 20 bp, synthetic construct
  source 1..20: mol_type = other DNA
agcgcgaagaagtagtcgcg

SEQ ID NO: 19895 - DNA, 20 bp, synthetic construct
  source 1..20: mol_type = other DNA
ccagcgtgaagtgcaagtgc

SEQ ID NO: 19896 - DNA, 20 bp, synthetic construct
  source 1..20: mol_type = other DNA
ccagcgcgaagaagtagtcg

SEQ ID NO: 19897 - DNA, 20 bp, synthetic construct
  source 1..20: mol_type = other DNA
gcggcggcacacgcgaacgc

SEQ ID NO: 19898 - DNA, 20 bp, synthetic construct
  source 1..20: mol_type = other DNA
ggcacacgcgaacgccggga

SEQ ID NO: 19899 - DNA, 20 bp, synthetic construct
  source 1..20: mol_type = other DNA
cgcggggcgtggccacattg

SEQ ID NO: 19900 - DNA, 20 bp, synthetic construct
  source 1..20: mol_type = other DNA
ccagagcagctgcaccatcc

SEQ ID NO: 19901 - DNA, 20 bp, synthetic construct
  source 1..20: mol_type = other DNA
agtgccgggcgccagagcag

SEQ ID NO: 19902 - DNA, 20 bp, synthetic construct
  source 1..20: mol_type = other DNA
gagatggaggaggaaagcgg

SEQ ID NO: 19903 - DNA, 20 bp, synthetic construct
  source 1..20: mol_type = other DNA
aggcggaggaaaagagatgg

SEQ ID NO: 19904 - DNA, 20 bp, synthetic construct
  source 1..20: mol_type = other DNA
cttcgccatcgcgccggcgg

SEQ ID NO: 19905 - DNA, 20 bp, synthetic construct
  source 1..20: mol_type = other DNA
aaagagatggaggaggaaag

SEQ ID NO: 19906 - DNA, 20 bp, synthetic construct
  source 1..20: mol_type = other DNA
cggaggaaaagagatggagg

SEQ ID NO: 19907 - DNA, 20 bp, synthetic construct
  source 1..20: mol_type = other DNA
catcgcgccggcggaggcgg

SEQ ID NO: 19908 - DNA, 20 bp, synthetic construct
  source 1..20: mol_type = other DNA
gagcgcgcggaacagaggcg

SEQ ID NO: 19909 - DNA, 20 bp, synthetic construct
  source 1..20: mol_type = other DNA
agcgcgcggaacagaggcgc

SEQ ID NO: 19910 - DNA, 20 bp, synthetic construct
  source 1..20: mol_type = other DNA
ggagccaggccaagtccggc

SEQ ID NO: 19911 - DNA, 20 bp, synthetic construct
  source 1..20: mol_type = other DNA
cggcggacgcaccggcccga

SEQ ID NO: 19912 - DNA, 20 bp, synthetic construct
  source 1..20: mol_type = other DNA
gccaggccaagtccggccgg

SEQ ID NO: 19913 - DNA, 20 bp, synthetic construct
  source 1..20: mol_type = other DNA
gcgcggaacagaggcgcggg

SEQ ID NO: 19914 - DNA, 20 bp, synthetic construct
  source 1..20: mol_type = other DNA
ggccggcggcgcgttccctc

SEQ ID NO: 19915 - DNA, 20 bp, synthetic construct
  source 1..20: mol_type = other DNA
tgcgaggccggcggacgcac

SEQ ID NO: 19916 - DNA, 20 bp, synthetic construct
  source 1..20: mol_type = other DNA
ccggcggacgcaccggcccg

SEQ ID NO: 19917 - DNA, 20 bp, synthetic construct
  source 1..20: mol_type = other DNA
tggcctggctcccggagccg

SEQ ID NO: 19918 - DNA, 20 bp, synthetic construct
  source 1..20: mol_type = other DNA
ggcggcggtggtctcggcgg

SEQ ID NO: 19919 - DNA, 20 bp, synthetic construct
  source 1..20: mol_type = other DNA
cagaggcgcgggcggctgcg

SEQ ID NO: 19920 - DNA, 20 bp, synthetic construct
  source 1..20: mol_type = other DNA
gcgggcggctgcgaggccgg

SEQ ID NO: 19921 - DNA, 20 bp, synthetic construct
  source 1..20: mol_type = other DNA
agcggcggcggtggtctcgg

SEQ ID NO: 19922 - DNA, 20 bp, synthetic construct
  source 1..20: mol_type = other DNA
agccggggcggcgagcgcgg

SEQ ID NO: 19923 - DNA, 20 bp, synthetic construct
  source 1..20: mol_type = other DNA
gggtcagcggaggtcagcgg

SEQ ID NO: 19924 - DNA, 20 bp, synthetic construct
  source 1..20: mol_type = other DNA
gcggttcagctcattccctg

SEQ ID NO: 19925 - DNA, 20 bp, synthetic construct
  source 1..20: mol_type = other DNA
ggtgtgacaggagccagctt

SEQ ID NO: 19926 - DNA, 20 bp, synthetic construct
  source 1..20: mol_type = other DNA
gaccccgcgctaaccccgcg

SEQ ID NO: 19927 - DNA, 20 bp, synthetic construct
  source 1..20: mol_type = other DNA
ggttagcgcggggtcagcgg

SEQ ID NO: 19928 - DNA, 20 bp, synthetic construct
  source 1..20: mol_type = other DNA
ggggtcagcggaggtcagcg

SEQ ID NO: 19929 - DNA, 20 bp, synthetic construct
  source 1..20: mol_type = other DNA
ccagctttggctgcttgtcg

SEQ ID NO: 19930 - DNA, 20 bp, synthetic construct
  source 1..20: mol_type = other DNA
cagcggctccgagggcgcgg

SEQ ID NO: 19931 - DNA, 20 bp, synthetic construct
  source 1..20: mol_type = other DNA
gtcagcagcagcggctccga

SEQ ID NO: 19932 - DNA, 20 bp, synthetic construct
  source 1..20: mol_type = other DNA
gcgtcccgtcaggcgccgcg

SEQ ID NO: 19933 - DNA, 20 bp, synthetic construct
  source 1..20: mol_type = other DNA
gtcccgtcaggcgccgcgcg

SEQ ID NO: 19934 - DNA, 20 bp, synthetic construct
  source 1..20: mol_type = other DNA
cgggacgcgggccggcctca

SEQ ID NO: 19935 - DNA, 20 bp, synthetic construct
  source 1..20: mol_type = other DNA
gcggggtcagcggaggtcag

SEQ ID NO: 19936 - DNA, 20 bp, synthetic construct
  source 1..20: mol_type = other DNA
tcagcgggggtcagcagcag

SEQ ID NO: 19937 - DNA, 20 bp, synthetic construct
  source 1..20: mol_type = other DNA
ggtcagcagcagcggctccg

SEQ ID NO: 19938 - DNA, 20 bp, synthetic construct
  source 1..20: mol_type = other DNA
gggttgtgaagggaagcgga

SEQ ID NO: 19939 - DNA, 20 bp, synthetic construct
  source 1..20: mol_type = other DNA
gctgttagagaggcaaggaa

SEQ ID NO: 19940 - DNA, 20 bp, synthetic construct
  source 1..20: mol_type = other DNA
tcctggctgttagagaggca

SEQ ID NO: 19941 - DNA, 20 bp, synthetic construct
  source 1..20: mol_type = other DNA
ggttgtgaagggaagcggaa

SEQ ID NO: 19942 - DNA, 20 bp, synthetic construct
  source 1..20: mol_type = other DNA
gaggcaaggaaaggagagag

SEQ ID NO: 19943 - DNA, 20 bp, synthetic construct
  source 1..20: mol_type = other DNA
gaagggaagggaggtcccgt

SEQ ID NO: 19944 - DNA, 20 bp, synthetic construct
  source 1..20: mol_type = other DNA
ccccagaccccagcgtccca

SEQ ID NO: 19945 - DNA, 20 bp, synthetic construct
  source 1..20: mol_type = other DNA
aaaggagagaggggttgtga

SEQ ID NO: 19946 - DNA, 20 bp, synthetic construct
  source 1..20: mol_type = other DNA
ggaggtcccgtgggacgctg

SEQ ID NO: 19947 - DNA, 20 bp, synthetic construct
  source 1..20: mol_type = other DNA
aaggagagaggggttgtgaa

SEQ ID NO: 19948 - DNA, 20 bp, synthetic construct
  source 1..20: mol_type = other DNA
cccagaccccagcgtcccac

SEQ ID NO: 19949 - DNA, 20 bp, synthetic construct
  source 1..20: mol_type = other DNA
agaggcaaggaaaggagaga

SEQ ID NO: 19950 - DNA, 20 bp, synthetic construct
  source 1..20: mol_type = other DNA
gagaggcaaggaaaggagag

SEQ ID NO: 19951 - DNA, 20 bp, synthetic construct
  source 1..20: mol_type = other DNA
tgaagggaagcggaagggaa

SEQ ID NO: 19952 - DNA, 20 bp, synthetic construct
  source 1..20: mol_type = other DNA
gtgaagggaagcggaaggga

SEQ ID NO: 19953 - DNA, 20 bp, synthetic construct
  source 1..20: mol_type = other DNA
acaacatgcgcgcgtcgcgg

SEQ ID NO: 19954 - DNA, 20 bp, synthetic construct
  source 1..20: mol_type = other DNA
cgaacaacatgcgcgcgtcg

SEQ ID NO: 19955 - DNA, 20 bp, synthetic construct
  source 1..20: mol_type = other DNA
ggcagggtagagagcgcttg

SEQ ID NO: 19956 - DNA, 20 bp, synthetic construct
  source 1..20: mol_type = other DNA
tcgggatcgggaatcggctc

SEQ ID NO: 19957 - DNA, 20 bp, synthetic construct
  source 1..20: mol_type = other DNA
gcgcgggttaggatctgggt

SEQ ID NO: 19958 - DNA, 20 bp, synthetic construct
  source 1..20: mol_type = other DNA
cgcgtcgcggaggaggtgcg

SEQ ID NO: 19959 - DNA, 20 bp, synthetic construct
  source 1..20: mol_type = other DNA
ggcgtgctcgctcaggcagc

SEQ ID NO: 19960 - DNA, 20 bp, synthetic construct
  source 1..20: mol_type = other DNA
gggcgtgctcgctcaggcag

SEQ ID NO: 19961 - DNA, 20 bp, synthetic construct
  source 1..20: mol_type = other DNA
gttgttcggcgcttcggccg

SEQ ID NO: 19962 - DNA, 20 bp, synthetic construct
  source 1..20: mol_type = other DNA
acatgcgcgcgtcgcggagg

SEQ ID NO: 19963 - DNA, 20 bp, synthetic construct
  source 1..20: mol_type = other DNA
gtcgtacatggcggcggcgg

SEQ ID NO: 19964 - DNA, 20 bp, synthetic construct
  source 1..20: mol_type = other DNA
gagcgcttgcgggcgccggg

SEQ ID NO: 19965 - DNA, 20 bp, synthetic construct
  source 1..20: mol_type = other DNA
tgatccgcagcagctccgcc

SEQ ID NO: 19966 - DNA, 20 bp, synthetic construct
  source 1..20: mol_type = other DNA
ggcgccgggcggagctgctg

SEQ ID NO: 19967 - DNA, 20 bp, synthetic construct
  source 1..20: mol_type = other DNA
cgtacatggcggcggcggcg

SEQ ID NO: 19968 - DNA, 20 bp, synthetic construct
  source 1..20: mol_type = other DNA
ttggggctgtgggagaacgg

SEQ ID NO: 19969 - DNA, 20 bp, synthetic construct
  source 1..20: mol_type = other DNA
ggtggaggcagatatgcact

SEQ ID NO: 19970 - DNA, 20 bp, synthetic construct
  source 1..20: mol_type = other DNA
ggttctgattccataccaga

SEQ ID NO: 19971 - DNA, 20 bp, synthetic construct
  source 1..20: mol_type = other DNA
tggttctgattccataccag

SEQ ID NO: 19972 - DNA, 20 bp, synthetic construct
  source 1..20: mol_type = other DNA
tggtggaggcagatatgcac

SEQ ID NO: 19973 - DNA, 20 bp, synthetic construct
  source 1..20: mol_type = other DNA
ggggatgcatgcatagcctc

SEQ ID NO: 19974 - DNA, 20 bp, synthetic construct
  source 1..20: mol_type = other DNA
aattctgtgaagttccaggc

SEQ ID NO: 19975 - DNA, 20 bp, synthetic construct
  source 1..20: mol_type = other DNA
tgcatgcatagcctctggct

SEQ ID NO: 19976 - DNA, 20 bp, synthetic construct
  source 1..20: mol_type = other DNA
gcctgggtgatcccagccag

SEQ ID NO: 19977 - DNA, 20 bp, synthetic construct
  source 1..20: mol_type = other DNA
attgctcttaccctctggta

SEQ ID NO: 19978 - DNA, 20 bp, synthetic construct
  source 1..20: mol_type = other DNA
attctgtgaagttccaggct

SEQ ID NO: 19979 - DNA, 20 bp, synthetic construct
  source 1..20: mol_type = other DNA
acagaattgctcttaccctc

SEQ ID NO: 19980 - DNA, 20 bp, synthetic construct
  source 1..20: mol_type = other DNA
tccattctgactgcagtctg

SEQ ID NO: 19981 - DNA, 20 bp, synthetic construct
  source 1..20: mol_type = other DNA
tgaagttccaggctgggtgg

SEQ ID NO: 19982 - DNA, 20 bp, synthetic construct
  source 1..20: mol_type = other DNA
tgtgaagttccaggctgggt

SEQ ID NO: 19983 - DNA, 20 bp, synthetic construct
  source 1..20: mol_type = other DNA
gaagatcaatatctcccgtg

SEQ ID NO: 19984 - DNA, 20 bp, synthetic construct
  source 1..20: mol_type = other DNA
aagatcaatatctcccgtga

SEQ ID NO: 19985 - DNA, 20 bp, synthetic construct
  source 1..20: mol_type = other DNA
cagagttcattacttagtgg

SEQ ID NO: 19986 - DNA, 20 bp, synthetic construct
  source 1..20: mol_type = other DNA
gcacagagttcattacttag

SEQ ID NO: 19987 - DNA, 20 bp, synthetic construct
  source 1..20: mol_type = other DNA
acagagttcattacttagtg

SEQ ID NO: 19988 - DNA, 20 bp, synthetic construct
  source 1..20: mol_type = other DNA
gtgggaggattaggaatagg

SEQ ID NO: 19989 - DNA, 20 bp, synthetic construct
  source 1..20: mol_type = other DNA
ttggtgggaggattaggaat

SEQ ID NO: 19990 - DNA, 20 bp, synthetic construct
  source 1..20: mol_type = other DNA
gagcccagaaggatagaacc

SEQ ID NO: 19991 - DNA, 20 bp, synthetic construct
  source 1..20: mol_type = other DNA
aatcctcccaccaaagaaag

SEQ ID NO: 19992 - DNA, 20 bp, synthetic construct
  source 1..20: mol_type = other DNA
cacagagttcattacttagt

SEQ ID NO: 19993 - DNA, 20 bp, synthetic construct
  source 1..20: mol_type = other DNA
tgtgaagagagagggctggg

SEQ ID NO: 19994 - DNA, 20 bp, synthetic construct
  source 1..20: mol_type = other DNA
tagtgggggccagctgtgat

SEQ ID NO: 19995 - DNA, 20 bp, synthetic construct
  source 1..20: mol_type = other DNA
ggcagttggccgatcacagc

SEQ ID NO: 19996 - DNA, 20 bp, synthetic construct
  source 1..20: mol_type = other DNA
gtgaagagagagggctgggt

SEQ ID NO: 19997 - DNA, 20 bp, synthetic construct
  source 1..20: mol_type = other DNA
gatctgtgaagagagagggc

SEQ ID NO: 19998 - DNA, 20 bp, synthetic construct
  source 1..20: mol_type = other DNA
cagacggagcgcggtgttgg

SEQ ID NO: 19999 - DNA, 20 bp, synthetic construct
  source 1..20: mol_type = other DNA
gcagacggagcgcggtgttg

SEQ ID NO: 20000 - DNA, 20 bp, synthetic construct
  source 1..20: mol_type = other DNA
agagggtcctgctggcgcga

SEQ ID NO: 20001 - DNA, 20 bp, synthetic construct
  source 1..20: mol_type = other DNA
gggcagcggcggtgcagagg

SEQ ID NO: 20002 - DNA, 20 bp, synthetic construct
  source 1..20: mol_type = other DNA
cagagggtcctgctggcgcg

SEQ ID NO: 20003 - DNA, 20 bp, synthetic construct
  source 1..20: mol_type = other DNA
aaccgaccgccgggcagcgg

SEQ ID NO: 20004 - DNA, 20 bp, synthetic construct
  source 1..20: mol_type = other DNA
gcggaagaccggaacgcaga

SEQ ID NO: 20005 - DNA, 20 bp, synthetic construct
  source 1..20: mol_type = other DNA
gcagaggcggcggctgcaga

SEQ ID NO: 20006 - DNA, 20 bp, synthetic construct
  source 1..20: mol_type = other DNA
ggtcctgctggcgcgagggt

SEQ ID NO: 20007 - DNA, 20 bp, synthetic construct
  source 1..20: mol_type = other DNA
gccgggcagcggcggtgcag

SEQ ID NO: 20008 - DNA, 20 bp, synthetic construct
  source 1..20: mol_type = other DNA
cagcggcggtgcagaggcgg

SEQ ID NO: 20009 - DNA, 20 bp, synthetic construct
  source 1..20: mol_type = other DNA
cggcggctgcagacggagcg

SEQ ID NO: 20010 - DNA, 20 bp, synthetic construct
  source 1..20: mol_type = other DNA
gggtcctgctggcgcgaggg

SEQ ID NO: 20011 - DNA, 20 bp, synthetic construct
  source 1..20: mol_type = other DNA
ggtgggtaggaggggacgcg

SEQ ID NO: 20012 - DNA, 20 bp, synthetic construct
  source 1..20: mol_type = other DNA
ggcgcgagggtgggtaggag

SEQ ID NO: 20013 - DNA, 20 bp, synthetic construct
  source 1..20: mol_type = other DNA
tacacaaggactgaaccaga

SEQ ID NO: 20014 - DNA, 20 bp, synthetic construct
  source 1..20: mol_type = other DNA
cttcaccaacgactccaagt

SEQ ID NO: 20015 - DNA, 20 bp, synthetic construct
  source 1..20: mol_type = other DNA
gagctgggcatggaataggc

SEQ ID NO: 20016 - DNA, 20 bp, synthetic construct
  source 1..20: mol_type = other DNA
ctcctccctaggactacaca

SEQ ID NO: 20017 - DNA, 20 bp, synthetic construct
  source 1..20: mol_type = other DNA
acagagcatattggttctgt

SEQ ID NO: 20018 - DNA, 20 bp, synthetic construct
  source 1..20: mol_type = other DNA
gacagagcatattggttctg

SEQ ID NO: 20019 - DNA, 20 bp, synthetic construct
  source 1..20: mol_type = other DNA
tgatggtgatcagaagcaga

SEQ ID NO: 20020 - DNA, 20 bp, synthetic construct
  source 1..20: mol_type = other DNA
caccatcatctactcctact

SEQ ID NO: 20021 - DNA, 20 bp, synthetic construct
  source 1..20: mol_type = other DNA
ggttctgtgggatattaata

SEQ ID NO: 20022 - DNA, 20 bp, synthetic construct
  source 1..20: mol_type = other DNA
tgcaaaacgacagagcatat

SEQ ID NO: 20023 - DNA, 20 bp, synthetic construct
  source 1..20: mol_type = other DNA
ctccaagtaggagtagatga

SEQ ID NO: 20024 - DNA, 20 bp, synthetic construct
  source 1..20: mol_type = other DNA
actggagctgggcatggaat

SEQ ID NO: 20025 - DNA, 20 bp, synthetic construct
  source 1..20: mol_type = other DNA
tcagaagcagaaggatttct

SEQ ID NO: 20026 - DNA, 20 bp, synthetic construct
  source 1..20: mol_type = other DNA
gatttctaggatgatgttca

SEQ ID NO: 20027 - DNA, 20 bp, synthetic construct
  source 1..20: mol_type = other DNA
ttgctctgtcctcttccttc

SEQ ID NO: 20028 - DNA, 20 bp, synthetic construct
  source 1..20: mol_type = other DNA
agagcgggaatgccttaatg

SEQ ID NO: 20029 - DNA, 20 bp, synthetic construct
  source 1..20: mol_type = other DNA
taaggcattcccgctctccg

SEQ ID NO: 20030 - DNA, 20 bp, synthetic construct
  source 1..20: mol_type = other DNA
tcggcggtgaaagtgtgaga

SEQ ID NO: 20031 - DNA, 20 bp, synthetic construct
  source 1..20: mol_type = other DNA
ccaagcctgcgcggtaatgg

SEQ ID NO: 20032 - DNA, 20 bp, synthetic construct
  source 1..20: mol_type = other DNA
atgcggtgaccaagcctgcg

SEQ ID NO: 20033 - DNA, 20 bp, synthetic construct
  source 1..20: mol_type = other DNA
cgcggaccggcgcacagacc

SEQ ID NO: 20034 - DNA, 20 bp, synthetic construct
  source 1..20: mol_type = other DNA
gtcttcctccattaccgcgc

SEQ ID NO: 20035 - DNA, 20 bp, synthetic construct
  source 1..20: mol_type = other DNA
agtcaaagttgacccaacta

SEQ ID NO: 20036 - DNA, 20 bp, synthetic construct
  source 1..20: mol_type = other DNA
tcacactttcaccgccgaga

SEQ ID NO: 20037 - DNA, 20 bp, synthetic construct
  source 1..20: mol_type = other DNA
ctcggcggtgaaagtgtgag

SEQ ID NO: 20038 - DNA, 20 bp, synthetic construct
  source 1..20: mol_type = other DNA
aagcgcccatggcagagcga

SEQ ID NO: 20039 - DNA, 20 bp, synthetic construct
  source 1..20: mol_type = other DNA
agagcagttccgcggagagc

SEQ ID NO: 20040 - DNA, 20 bp, synthetic construct
  source 1..20: mol_type = other DNA
tcgctgccgggtctgtgcgc

SEQ ID NO: 20041 - DNA, 20 bp, synthetic construct
  source 1..20: mol_type = other DNA
ggaggagctggaagcgccca

SEQ ID NO: 20042 - DNA, 20 bp, synthetic construct
  source 1..20: mol_type = other DNA
gaagcgcccatggcagagcg

SEQ ID NO: 20043 - DNA, 20 bp, synthetic construct
  source 1..20: mol_type = other DNA
ggcaacgcgacaagcgcgcg

SEQ ID NO: 20044 - DNA, 20 bp, synthetic construct
  source 1..20: mol_type = other DNA
ggacgacgacgactcggaca

SEQ ID NO: 20045 - DNA, 20 bp, synthetic construct
  source 1..20: mol_type = other DNA
gctcaagccccaggtgtccg

SEQ ID NO: 20046 - DNA, 20 bp, synthetic construct
  source 1..20: mol_type = other DNA
gacgtcggcggccatgagaa

SEQ ID NO: 20047 - DNA, 20 bp, synthetic construct
  source 1..20: mol_type = other DNA
gacaagcgcgcgaggcagag

SEQ ID NO: 20048 - DNA, 20 bp, synthetic construct
  source 1..20: mol_type = other DNA
cgcgcttgtcgcgttgcccc

SEQ ID NO: 20049 - DNA, 20 bp, synthetic construct
  source 1..20: mol_type = other DNA
cggcggccatgagaagggct

SEQ ID NO: 20050 - DNA, 20 bp, synthetic construct
  source 1..20: mol_type = other DNA
gcgacaagcgcgcgaggcag

SEQ ID NO: 20051 - DNA, 20 bp, synthetic construct
  source 1..20: mol_type = other DNA
cgacaagcgcgcgaggcaga

SEQ ID NO: 20052 - DNA, 20 bp, synthetic construct
  source 1..20: mol_type = other DNA
gctcgcggacagtcggcgcg

SEQ ID NO: 20053 - DNA, 20 bp, synthetic construct
  source 1..20: mol_type = other DNA
ctcgcggacagtcggcgcgc

SEQ ID NO: 20054 - DNA, 20 bp, synthetic construct
  source 1..20: mol_type = other DNA
catgagaagggctcggccgg

SEQ ID NO: 20055 - DNA, 20 bp, synthetic construct
  source 1..20: mol_type = other DNA
cgcgttgccccgggctccgg

SEQ ID NO: 20056 - DNA, 20 bp, synthetic construct
  source 1..20: mol_type = other DNA
cccgccgcccgcctccggcg

SEQ ID NO: 20057 - DNA, 20 bp, synthetic construct
  source 1..20: mol_type = other DNA
gtggccgcgccggaggcggg

SEQ ID NO: 20058 - DNA, 20 bp, synthetic construct
  source 1..20: mol_type = other DNA
ggcagtggcatcagcgatgg

SEQ ID NO: 20059 - DNA, 20 bp, synthetic construct
  source 1..20: mol_type = other DNA
gctgtatcgtgtcgccggca

SEQ ID NO: 20060 - DNA, 20 bp, synthetic construct
  source 1..20: mol_type = other DNA
tgcccgtgcatctacagccg

SEQ ID NO: 20061 - DNA, 20 bp, synthetic construct
  source 1..20: mol_type = other DNA
ccccagtattgcccaagtgg

SEQ ID NO: 20062 - DNA, 20 bp, synthetic construct
  source 1..20: mol_type = other DNA
gcagcgctgtatcgtgtcgc

SEQ ID NO: 20063 - DNA, 20 bp, synthetic construct
  source 1..20: mol_type = other DNA
actggcagtggcatcagcga

SEQ ID NO: 20064 - DNA, 20 bp, synthetic construct
  source 1..20: mol_type = other DNA
gtatcgtgtcgccggcaggg

SEQ ID NO: 20065 - DNA, 20 bp, synthetic construct
  source 1..20: mol_type = other DNA
cagcgatggcggctgcgtcg

SEQ ID NO: 20066 - DNA, 20 bp, synthetic construct
  source 1..20: mol_type = other DNA
gccatgcaggaagatcagag

SEQ ID NO: 20067 - DNA, 20 bp, synthetic construct
  source 1..20: mol_type = other DNA
gcctctctgatcttcctgca

SEQ ID NO: 20068 - DNA, 20 bp, synthetic construct
  source 1..20: mol_type = other DNA
ctgatcttcctgcatggctc

SEQ ID NO: 20069 - DNA, 20 bp, synthetic construct
  source 1..20: mol_type = other DNA
gaggcgctatgcctccctgc

SEQ ID NO: 20070 - DNA, 20 bp, synthetic construct
  source 1..20: mol_type = other DNA
gatggcggctgcgtcggggt

SEQ ID NO: 20071 - DNA, 20 bp, synthetic construct
  source 1..20: mol_type = other DNA
atcagcgatggcggctgcgt

SEQ ID NO: 20072 - DNA, 20 bp, synthetic construct
  source 1..20: mol_type = other DNA
gaaatccacctgagccatgc

SEQ ID NO: 20073 - DNA, 20 bp, synthetic construct
  source 1..20: mol_type = other DNA
gctacgtcaacaactatggc

SEQ ID NO: 20074 - DNA, 20 bp, synthetic construct
  source 1..20: mol_type = other DNA
aagacacaccatgggcccag

SEQ ID NO: 20075 - DNA, 20 bp, synthetic construct
  source 1..20: mol_type = other DNA
cacagcagcgacgacgcagg

SEQ ID NO: 20076 - DNA, 20 bp, synthetic construct
  source 1..20: mol_type = other DNA
acagccctcaagacacacca

SEQ ID NO: 20077 - DNA, 20 bp, synthetic construct
  source 1..20: mol_type = other DNA
cagccctcaagacacaccat

SEQ ID NO: 20078 - DNA, 20 bp, synthetic construct
  source 1..20: mol_type = other DNA
taaagctacgtcaacaacta

SEQ ID NO: 20079 - DNA, 20 bp, synthetic construct
  source 1..20: mol_type = other DNA
gaggcagttgcgagtcgctg

SEQ ID NO: 20080 - DNA, 20 bp, synthetic construct
  source 1..20: mol_type = other DNA
ctacacagcagcgacgacgc

SEQ ID NO: 20081 - DNA, 20 bp, synthetic construct
  source 1..20: mol_type = other DNA
agctacgtcaacaactatgg

SEQ ID NO: 20082 - DNA, 20 bp, synthetic construct
  source 1..20: mol_type = other DNA
tcaacaactatggcgggcga

SEQ ID NO: 20083 - DNA, 20 bp, synthetic construct
  source 1..20: mol_type = other DNA
tgggcccatggtgtgtcttg

SEQ ID NO: 20084 - DNA, 20 bp, synthetic construct
  source 1..20: mol_type = other DNA
tgtgtagcaaacctgcctct

SEQ ID NO: 20085 - DNA, 20 bp, synthetic construct
  source 1..20: mol_type = other DNA
ggaggcagttgcgagtcgct

SEQ ID NO: 20086 - DNA, 20 bp, synthetic construct
  source 1..20: mol_type = other DNA
agcagcgacgacgcaggcgg

SEQ ID NO: 20087 - DNA, 20 bp, synthetic construct
  source 1..20: mol_type = other DNA
tgtcttgagggctgtgagag

SEQ ID NO: 20088 - DNA, 20 bp, synthetic construct
  source 1..20: mol_type = other DNA
ggccagacctgccagcgcgc

SEQ ID NO: 20089 - DNA, 20 bp, synthetic construct
  source 1..20: mol_type = other DNA
gagcagggaccaggcggttg

SEQ ID NO: 20090 - DNA, 20 bp, synthetic construct
  source 1..20: mol_type = other DNA
ccgcgggacctgcaagcccg

SEQ ID NO: 20091 - DNA, 20 bp, synthetic construct
  source 1..20: mol_type = other DNA
cagggaccaggcggttgcgg

SEQ ID NO: 20092 - DNA, 20 bp, synthetic construct
  source 1..20: mol_type = other DNA
ctgtgtccgagtccgagtct

SEQ ID NO: 20093 - DNA, 20 bp, synthetic construct
  source 1..20: mol_type = other DNA
tgcgcggagcagggaccagg

SEQ ID NO: 20094 - DNA, 20 bp, synthetic construct
  source 1..20: mol_type = other DNA
tctgggctgggcgcgacccg

SEQ ID NO: 20095 - DNA, 20 bp, synthetic construct
  source 1..20: mol_type = other DNA
gcgctggcaggtctggccgc

SEQ ID NO: 20096 - DNA, 20 bp, synthetic construct
  source 1..20: mol_type = other DNA
gacagccatggccggcgcgc

SEQ ID NO: 20097 - DNA, 20 bp, synthetic construct
  source 1..20: mol_type = other DNA
cgcgctggcaggtctggccg

SEQ ID NO: 20098 - DNA, 20 bp, synthetic construct
  source 1..20: mol_type = other DNA
gcggcggcgacagccatggc

SEQ ID NO: 20099 - DNA, 20 bp, synthetic construct
  source 1..20: mol_type = other DNA
ccgcgggcttgcaggtcccg

SEQ ID NO: 20100 - DNA, 20 bp, synthetic construct
  source 1..20: mol_type = other DNA
cgctgcgcggagcagggacc

SEQ ID NO: 20101 - DNA, 20 bp, synthetic construct
  source 1..20: mol_type = other DNA
gcccagcccagactcggact

SEQ ID NO: 20102 - DNA, 20 bp, synthetic construct
  source 1..20: mol_type = other DNA
ggttgcggcggcgacagcca

SEQ ID NO: 20103 - DNA, 20 bp, synthetic construct
  source 1..20: mol_type = other DNA
agtgtcttgggcgctaacgg

SEQ ID NO: 20104 - DNA, 20 bp, synthetic construct
  source 1..20: mol_type = other DNA
agttctggagtctaaacaca

SEQ ID NO: 20105 - DNA, 20 bp, synthetic construct
  source 1..20: mol_type = other DNA
gctgtcctggtagtgcatgg

SEQ ID NO: 20106 - DNA, 20 bp, synthetic construct
  source 1..20: mol_type = other DNA
cggcgagaacgcggcaagtg

SEQ ID NO: 20107 - DNA, 20 bp, synthetic construct
  source 1..20: mol_type = other DNA
acactgcgtcaggactcctg

SEQ ID NO: 20108 - DNA, 20 bp, synthetic construct
  source 1..20: mol_type = other DNA
ctgtcctggtagtgcatggt

SEQ ID NO: 20109 - DNA, 20 bp, synthetic construct
  source 1..20: mol_type = other DNA
ggcgctgaggggccgactgg

SEQ ID NO: 20110 - DNA, 20 bp, synthetic construct
  source 1..20: mol_type = other DNA
ggagtcctgacgcagtgtct

SEQ ID NO: 20111 - DNA, 20 bp, synthetic construct
  source 1..20: mol_type = other DNA
gcggcgagaacgcggcaagt

SEQ ID NO: 20112 - DNA, 20 bp, synthetic construct
  source 1..20: mol_type = other DNA
gtcttgggcgctaacggcgg

SEQ ID NO: 20113 - DNA, 20 bp, synthetic construct
  source 1..20: mol_type = other DNA
tgcgggcggagaagtgcctc

SEQ ID NO: 20114 - DNA, 20 bp, synthetic construct
  source 1..20: mol_type = other DNA
ggcggcgagaacgcggcaag

SEQ ID NO: 20115 - DNA, 20 bp, synthetic construct
  source 1..20: mol_type = other DNA
ttggtccgggagcccccagt

SEQ ID NO: 20116 - DNA, 20 bp, synthetic construct
  source 1..20: mol_type = other DNA
ggcccggagccggcgctgag

SEQ ID NO: 20117 - DNA, 20 bp, synthetic construct
  source 1..20: mol_type = other DNA
agcctgcggcggcgagaacg

SEQ ID NO: 20118 - DNA, 20 bp, synthetic construct
  source 1..20: mol_type = other DNA
agagtgagccaactcaccta

SEQ ID NO: 20119 - DNA, 20 bp, synthetic construct
  source 1..20: mol_type = other DNA
gagccaactcacctaaggaa

SEQ ID NO: 20120 - DNA, 20 bp, synthetic construct
  source 1..20: mol_type = other DNA
tcacttgggtcataggctaa

SEQ ID NO: 20121 - DNA, 20 bp, synthetic construct
  source 1..20: mol_type = other DNA
aggcttctggtcaccagcag

SEQ ID NO: 20122 - DNA, 20 bp, synthetic construct
  source 1..20: mol_type = other DNA
aagaagaatccaattcactt

SEQ ID NO: 20123 - DNA, 20 bp, synthetic construct
  source 1..20: mol_type = other DNA
taagaagaatccaattcact

SEQ ID NO: 20124 - DNA, 20 bp, synthetic construct
  source 1..20: mol_type = other DNA
agccaactcacctaaggaaa

SEQ ID NO: 20125 - DNA, 20 bp, synthetic construct
  source 1..20: mol_type = other DNA
gaaggggccttaacctctgc

SEQ ID NO: 20126 - DNA, 20 bp, synthetic construct
  source 1..20: mol_type = other DNA
taagcagaatgcagaaatgc

SEQ ID NO: 20127 - DNA, 20 bp, synthetic construct
  source 1..20: mol_type = other DNA
agcctatgacccaagtgaat

SEQ ID NO: 20128 - DNA, 20 bp, synthetic construct
  source 1..20: mol_type = other DNA
aatgcagaaatgcaggcttc

SEQ ID NO: 20129 - DNA, 20 bp, synthetic construct
  source 1..20: mol_type = other DNA
atccaattcacttgggtcat

SEQ ID NO: 20130 - DNA, 20 bp, synthetic construct
  source 1..20: mol_type = other DNA
ttccctttccttaggtgagt

SEQ ID NO: 20131 - DNA, 20 bp, synthetic construct
  source 1..20: mol_type = other DNA
ctggtcaccagcagaggtta

SEQ ID NO: 20132 - DNA, 20 bp, synthetic construct
  source 1..20: mol_type = other DNA
ctgcttaattccctttcctt

SEQ ID NO: 20133 - DNA, 20 bp, synthetic construct
  source 1..20: mol_type = other DNA
ggagcggagagaatactcga

SEQ ID NO: 20134 - DNA, 20 bp, synthetic construct
  source 1..20: mol_type = other DNA
gagcggagagaatactcgaa

SEQ ID NO: 20135 - DNA, 20 bp, synthetic construct
  source 1..20: mol_type = other DNA
tttgtgcggtacgaaggtgg

SEQ ID NO: 20136 - DNA, 20 bp, synthetic construct
  source 1..20: mol_type = other DNA
ataccatttgtgcggtacga

SEQ ID NO: 20137 - DNA, 20 bp, synthetic construct
  source 1..20: mol_type = other DNA
ggacgacattcgggccgcgg

SEQ ID NO: 20138 - DNA, 20 bp, synthetic construct
  source 1..20: mol_type = other DNA
caccgctcggctgcacccag

SEQ ID NO: 20139 - DNA, 20 bp, synthetic construct
  source 1..20: mol_type = other DNA
cctggacgacattcgggccg

SEQ ID NO: 20140 - DNA, 20 bp, synthetic construct
  source 1..20: mol_type = other DNA
tgcagccgagcggtgtggag

SEQ ID NO: 20141 - DNA, 20 bp, synthetic construct
  source 1..20: mol_type = other DNA
ctgggtgcagccgagcggtg

SEQ ID NO: 20142 - DNA, 20 bp, synthetic construct
  source 1..20: mol_type = other DNA
atttgtgcggtacgaaggtg

SEQ ID NO: 20143 - DNA, 20 bp, synthetic construct
  source 1..20: mol_type = other DNA
atcgtaaaactgttagtatc

SEQ ID NO: 20144 - DNA, 20 bp, synthetic construct
  source 1..20: mol_type = other DNA
cggggaccctggacgacatt

SEQ ID NO: 20145 - DNA, 20 bp, synthetic construct
  source 1..20: mol_type = other DNA
ggccgctgggtgcagccgag

SEQ ID NO: 20146 - DNA, 20 bp, synthetic construct
  source 1..20: mol_type = other DNA
ggggaccctggacgacattc

SEQ ID NO: 20147 - DNA, 20 bp, synthetic construct
  source 1..20: mol_type = other DNA
gctgcacccagcggccgccg

SEQ ID NO: 20148 - DNA, 20 bp, synthetic construct
  source 1..20: mol_type = other DNA
aggccgagcgcacccgacgc

SEQ ID NO: 20149 - DNA, 20 bp, synthetic construct
  source 1..20: mol_type = other DNA
gcggcggtggagtgaacgag

SEQ ID NO: 20150 - DNA, 20 bp, synthetic construct
  source 1..20: mol_type = other DNA
tggagtgaacgagcggcgag

SEQ ID NO: 20151 - DNA, 20 bp, synthetic construct
  source 1..20: mol_type = other DNA
ggtgcgctcggcctcgcccg

SEQ ID NO: 20152 - DNA, 20 bp, synthetic construct
  source 1..20: mol_type = other DNA
cgacgccggcagcagcggat

SEQ ID NO: 20153 - DNA, 20 bp, synthetic construct
  source 1..20: mol_type = other DNA
caatccgctgctgccggcgt

SEQ ID NO: 20154 - DNA, 20 bp, synthetic construct
  source 1..20: mol_type = other DNA
tgccgggaaccggaccgggt

SEQ ID NO: 20155 - DNA, 20 bp, synthetic construct
  source 1..20: mol_type = other DNA
ctgccgggaaccggaccggg

SEQ ID NO: 20156 - DNA, 20 bp, synthetic construct
  source 1..20: mol_type = other DNA
gggctgccgggaaccggacc

SEQ ID NO: 20157 - DNA, 20 bp, synthetic construct
  source 1..20: mol_type = other DNA
gcacccgacgccggcagcag

SEQ ID NO: 20158 - DNA, 20 bp, synthetic construct
  source 1..20: mol_type = other DNA
agccggggaaggagggccgc

SEQ ID NO: 20159 - DNA, 20 bp, synthetic construct
  source 1..20: mol_type = other DNA
gagcgggagccggggaagga

SEQ ID NO: 20160 - DNA, 20 bp, synthetic construct
  source 1..20: mol_type = other DNA
ggagtgaacgagcggcgagc

SEQ ID NO: 20161 - DNA, 20 bp, synthetic construct
  source 1..20: mol_type = other DNA
cgagcggcgagcgggagccg

SEQ ID NO: 20162 - DNA, 20 bp, synthetic construct
  source 1..20: mol_type = other DNA
aacgagcggcgagcgggagc

SEQ ID NO: 20163 - DNA, 20 bp, synthetic construct
  source 1..20: mol_type = other DNA
accagccaacccagatcccg

SEQ ID NO: 20164 - DNA, 20 bp, synthetic construct
  source 1..20: mol_type = other DNA
ccatggagaccccgtcccag

SEQ ID NO: 20165 - DNA, 20 bp, synthetic construct
  source 1..20: mol_type = other DNA
gtcggtgactcagtgttcgc

SEQ ID NO: 20166 - DNA, 20 bp, synthetic construct
  source 1..20: mol_type = other DNA
tcggacctcgggatctgggt

SEQ ID NO: 20167 - DNA, 20 bp, synthetic construct
  source 1..20: mol_type = other DNA
caggttggcagcgctgcccg

SEQ ID NO: 20168 - DNA, 20 bp, synthetic construct
  source 1..20: mol_type = other DNA
gctgtcggacctcgggatct

SEQ ID NO: 20169 - DNA, 20 bp, synthetic construct
  source 1..20: mol_type = other DNA
ggatctgggttggctggtgt

SEQ ID NO: 20170 - DNA, 20 bp, synthetic construct
  source 1..20: mol_type = other DNA
ggtctccatggccggcaggt

SEQ ID NO: 20171 - DNA, 20 bp, synthetic construct
  source 1..20: mol_type = other DNA
aggttggcagcgctgcccgc

SEQ ID NO: 20172 - DNA, 20 bp, synthetic construct
  source 1..20: mol_type = other DNA
gctggctctcggcttgctcc

SEQ ID NO: 20173 - DNA, 20 bp, synthetic construct
  source 1..20: mol_type = other DNA
cagcggcgcgccacccgcag

SEQ ID NO: 20174 - DNA, 20 bp, synthetic construct
  source 1..20: mol_type = other DNA
gccgggcgctgtcggacctc

SEQ ID NO: 20175 - DNA, 20 bp, synthetic construct
  source 1..20: mol_type = other DNA
tgggttggctggtgtaggtg

SEQ ID NO: 20176 - DNA, 20 bp, synthetic construct
  source 1..20: mol_type = other DNA
ggatctgggccgggcgctgt

SEQ ID NO: 20177 - DNA, 20 bp, synthetic construct
  source 1..20: mol_type = other DNA
gctctcggcttgctcctggc

SEQ ID NO: 20178 - DNA, 20 bp, synthetic construct
  source 1..20: mol_type = other DNA
tcacgtccgctccaaaaccg

SEQ ID NO: 20179 - DNA, 20 bp, synthetic construct
  source 1..20: mol_type = other DNA
ggcggctgctgggtcgtcgg

SEQ ID NO: 20180 - DNA, 20 bp, synthetic construct
  source 1..20: mol_type = other DNA
acctcggagcagagccatgg

SEQ ID NO: 20181 - DNA, 20 bp, synthetic construct
  source 1..20: mol_type = other DNA
gccgccatggctctgctccg

SEQ ID NO: 20182 - DNA, 20 bp, synthetic construct
  source 1..20: mol_type = other DNA
gcggcgcgggtctgtggtgt

SEQ ID NO: 20183 - DNA, 20 bp, synthetic construct
  source 1..20: mol_type = other DNA
cggcgcgggtctgtggtgtg

SEQ ID NO: 20184 - DNA, 20 bp, synthetic construct
  source 1..20: mol_type = other DNA
ggcgcgggtctgtggtgtgg

SEQ ID NO: 20185 - DNA, 20 bp, synthetic construct
  source 1..20: mol_type = other DNA
ctcacctcggagcagagcca

SEQ ID NO: 20186 - DNA, 20 bp, synthetic construct
  source 1..20: mol_type = other DNA
cgacgacccagcagccgcca

SEQ ID NO: 20187 - DNA, 20 bp, synthetic construct
  source 1..20: mol_type = other DNA
cgtccgctccaaaaccgagg

SEQ ID NO: 20188 - DNA, 20 bp, synthetic construct
  source 1..20: mol_type = other DNA
tcgtcggcggcgcgggtctg

SEQ ID NO: 20189 - DNA, 20 bp, synthetic construct
  source 1..20: mol_type = other DNA
ggggagggcaggaccccgag

SEQ ID NO: 20190 - DNA, 20 bp, synthetic construct
  source 1..20: mol_type = other DNA
cctcctctcctcgcccctcg

SEQ ID NO: 20191 - DNA, 20 bp, synthetic construct
  source 1..20: mol_type = other DNA
gaggggcgaggagaggagga

SEQ ID NO: 20192 - DNA, 20 bp, synthetic construct
  source 1..20: mol_type = other DNA
ggagggggctgcgctcacct

SEQ ID NO: 20193 - DNA, 20 bp, synthetic construct
  source 1..20: mol_type = other DNA
gcaatgcccactcgctgtcg

SEQ ID NO: 20194 - DNA, 20 bp, synthetic construct
  source 1..20: mol_type = other DNA
gcatgtagtcggtagtacta

SEQ ID NO: 20195 - DNA, 20 bp, synthetic construct
  source 1..20: mol_type = other DNA
gtgttctccggcacacactg

SEQ ID NO: 20196 - DNA, 20 bp, synthetic construct
  source 1..20: mol_type = other DNA
atggtttgaagtggtgaaca

SEQ ID NO: 20197 - DNA, 20 bp, synthetic construct
  source 1..20: mol_type = other DNA
acttcaaaccatactgcaga

SEQ ID NO: 20198 - DNA, 20 bp, synthetic construct
  source 1..20: mol_type = other DNA
cacttcaaaccatactgcag

SEQ ID NO: 20199 - DNA, 20 bp, synthetic construct
  source 1..20: mol_type = other DNA
tacgtgtagcccgtgttctc

SEQ ID NO: 20200 - DNA, 20 bp, synthetic construct
  source 1..20: mol_type = other DNA
cagtcctccccagtgtgtgc

SEQ ID NO: 20201 - DNA, 20 bp, synthetic construct
  source 1..20: mol_type = other DNA
ttctccggcacacactgggg

SEQ ID NO: 20202 - DNA, 20 bp, synthetic construct
  source 1..20: mol_type = other DNA
ccagtgtgtgccggagaaca

SEQ ID NO: 20203 - DNA, 20 bp, synthetic construct
  source 1..20: mol_type = other DNA
atgcccactcgctgtcgcgg

SEQ ID NO: 20204 - DNA, 20 bp, synthetic construct
  source 1..20: mol_type = other DNA
caaaccatactgcagagggc

SEQ ID NO: 20205 - DNA, 20 bp, synthetic construct
  source 1..20: mol_type = other DNA
ctctgcagtatggtttgaag

SEQ ID NO: 20206 - DNA, 20 bp, synthetic construct
  source 1..20: mol_type = other DNA
tcaaaccatactgcagaggg

SEQ ID NO: 20207 - DNA, 20 bp, synthetic construct
  source 1..20: mol_type = other DNA
ctttcccgccctctgcagta

SEQ ID NO: 20208 - DNA, 20 bp, synthetic construct
  source 1..20: mol_type = other DNA
accacacctgcagagcgctc

SEQ ID NO: 20209 - DNA, 20 bp, synthetic construct
  source 1..20: mol_type = other DNA
gcgcggccgagctatctgcg

SEQ ID NO: 20210 - DNA, 20 bp, synthetic construct
  source 1..20: mol_type = other DNA
ggcagcgccacacacctggg

SEQ ID NO: 20211 - DNA, 20 bp, synthetic construct
  source 1..20: mol_type = other DNA
ggctgcccgggattcgccgc

SEQ ID NO: 20212 - DNA, 20 bp, synthetic construct
  source 1..20: mol_type = other DNA
ggcggccagcggcgaatccc

SEQ ID NO: 20213 - DNA, 20 bp, synthetic construct
  source 1..20: mol_type = other DNA
gcagagcgccgcgagcaggg

SEQ ID NO: 20214 - DNA, 20 bp, synthetic construct
  source 1..20: mol_type = other DNA
gcccgagcgctctgcaggtg

SEQ ID NO: 20215 - DNA, 20 bp, synthetic construct
  source 1..20: mol_type = other DNA
cctgggcagcgccacacacc

SEQ ID NO: 20216 - DNA, 20 bp, synthetic construct
  source 1..20: mol_type = other DNA
cgagcgctctgcaggtgtgg

SEQ ID NO: 20217 - DNA, 20 bp, synthetic construct
  source 1..20: mol_type = other DNA
cgggaggcgaggtgccggct

SEQ ID NO: 20218 - DNA, 20 bp, synthetic construct
  source 1..20: mol_type = other DNA
aggcagcccgagcgctctgc

SEQ ID NO: 20219 - DNA, 20 bp, synthetic construct
  source 1..20: mol_type = other DNA
gccggggccccgagcgcagg

SEQ ID NO: 20220 - DNA, 20 bp, synthetic construct
  source 1..20: mol_type = other DNA
gcctgcgctcggggccccgg

SEQ ID NO: 20221 - DNA, 20 bp, synthetic construct
  source 1..20: mol_type = other DNA
ggcctcgccgcctgcgctcg

SEQ ID NO: 20222 - DNA, 20 bp, synthetic construct
  source 1..20: mol_type = other DNA
tggcctcgccgcctgcgctc

SEQ ID NO: 20223 - DNA, 20 bp, synthetic construct
  source 1..20: mol_type = other DNA
gccgaactacgaaccaactg

SEQ ID NO: 20224 - DNA, 20 bp, synthetic construct
  source 1..20: mol_type = other DNA
gcccacacactacaggcagg

SEQ ID NO: 20225 - DNA, 20 bp, synthetic construct
  source 1..20: mol_type = other DNA
tggttcgtagttcggctctg

SEQ ID NO: 20226 - DNA, 20 bp, synthetic construct
  source 1..20: mol_type = other DNA
ccagcccacacactacaggc

SEQ ID NO: 20227 - DNA, 20 bp, synthetic construct
  source 1..20: mol_type = other DNA
gttggttcgtagttcggctc

SEQ ID NO: 20228 - DNA, 20 bp, synthetic construct
  source 1..20: mol_type = other DNA
gcctcctgcctgtagtgtgt

SEQ ID NO: 20229 - DNA, 20 bp, synthetic construct
  source 1..20: mol_type = other DNA
cggcggcggcaaaggctgtg

SEQ ID NO: 20230 - DNA, 20 bp, synthetic construct
  source 1..20: mol_type = other DNA
cgggcaggagccgtgaggct

SEQ ID NO: 20231 - DNA, 20 bp, synthetic construct
  source 1..20: mol_type = other DNA
gttggtgcgagcttccagct

SEQ ID NO: 20232 - DNA, 20 bp, synthetic construct
  source 1..20: mol_type = other DNA
ccggccaggagcaagcgcgc

SEQ ID NO: 20233 - DNA, 20 bp, synthetic construct
  source 1..20: mol_type = other DNA
aagcgcgccggcgtgagcgg

SEQ ID NO: 20234 - DNA, 20 bp, synthetic construct
  source 1..20: mol_type = other DNA
agcaagcgcgccggcgtgag

SEQ ID NO: 20235 - DNA, 20 bp, synthetic construct
  source 1..20: mol_type = other DNA
ggagccgtgaggctcggagg

SEQ ID NO: 20236 - DNA, 20 bp, synthetic construct
  source 1..20: mol_type = other DNA
gcggcggcggcaaaggctgt

SEQ ID NO: 20237 - DNA, 20 bp, synthetic construct
  source 1..20: mol_type = other DNA
tgcctgtagtgtgtgggctg

SEQ ID NO: 20238 - DNA, 20 bp, synthetic construct
  source 1..20: mol_type = other DNA
aggaataaaaagcttcacga

SEQ ID NO: 20239 - DNA, 20 bp, synthetic construct
  source 1..20: mol_type = other DNA
tgtaatcagcacgatttcgc

SEQ ID NO: 20240 - DNA, 20 bp, synthetic construct
  source 1..20: mol_type = other DNA
gatctaacaccagaaagagt

SEQ ID NO: 20241 - DNA, 20 bp, synthetic construct
  source 1..20: mol_type = other DNA
tcgtgctgattacaggagct

SEQ ID NO: 20242 - DNA, 20 bp, synthetic construct
  source 1..20: mol_type = other DNA
aagcttcacgaaggactcta

SEQ ID NO: 20243 - DNA, 20 bp, synthetic construct
  source 1..20: mol_type = other DNA
cctctaaaagcagtttagag

SEQ ID NO: 20244 - DNA, 20 bp, synthetic construct
  source 1..20: mol_type = other DNA
atcgtgctgattacaggagc

SEQ ID NO: 20245 - DNA, 20 bp, synthetic construct
  source 1..20: mol_type = other DNA
aaagcttcacgaaggactct

SEQ ID NO: 20246 - DNA, 20 bp, synthetic construct
  source 1..20: mol_type = other DNA
atctaacaccagaaagagta

SEQ ID NO: 20247 - DNA, 20 bp, synthetic construct
  source 1..20: mol_type = other DNA
ggcgaaatcgtgctgattac

SEQ ID NO: 20248 - DNA, 20 bp, synthetic construct
  source 1..20: mol_type = other DNA
gagtaggggcgagagcaagg

SEQ ID NO: 20249 - DNA, 20 bp, synthetic construct
  source 1..20: mol_type = other DNA
tctaacaccagaaagagtag

SEQ ID NO: 20250 - DNA, 20 bp, synthetic construct
  source 1..20: mol_type = other DNA
aagaggagaaaatcagtcac

SEQ ID NO: 20251 - DNA, 20 bp, synthetic construct
  source 1..20: mol_type = other DNA
aaagagtaggggcgagagca

SEQ ID NO: 20252 - DNA, 20 bp, synthetic construct
  source 1..20: mol_type = other DNA
gctctcgcccctactctttc

SEQ ID NO: 20253 - DNA, 20 bp, synthetic construct
  source 1..20: mol_type = other DNA
cgatgcgtcactgatcggtg

SEQ ID NO: 20254 - DNA, 20 bp, synthetic construct
  source 1..20: mol_type = other DNA
gcgggagtcggctgcacgtg

SEQ ID NO: 20255 - DNA, 20 bp, synthetic construct
  source 1..20: mol_type = other DNA
cgggagtcggctgcacgtgc

SEQ ID NO: 20256 - DNA, 20 bp, synthetic construct
  source 1..20: mol_type = other DNA
gagtcggctgcacgtgcggg

SEQ ID NO: 20257 - DNA, 20 bp, synthetic construct
  source 1..20: mol_type = other DNA
cgtcactgatcggtgaggcg

SEQ ID NO: 20258 - DNA, 20 bp, synthetic construct
  source 1..20: mol_type = other DNA
cgcgaggaaagccgacccct

SEQ ID NO: 20259 - DNA, 20 bp, synthetic construct
  source 1..20: mol_type = other DNA
gctgttggcggcggttggct

SEQ ID NO: 20260 - DNA, 20 bp, synthetic construct
  source 1..20: mol_type = other DNA
gcggggccggctgttggcgg

SEQ ID NO: 20261 - DNA, 20 bp, synthetic construct
  source 1..20: mol_type = other DNA
atcggtgaggcgcggccgag

SEQ ID NO: 20262 - DNA, 20 bp, synthetic construct
  source 1..20: mol_type = other DNA
gatcggtgaggcgcggccga

SEQ ID NO: 20263 - DNA, 20 bp, synthetic construct
  source 1..20: mol_type = other DNA
ggcggcggttggctcggcgc

SEQ ID NO: 20264 - DNA, 20 bp, synthetic construct
  source 1..20: mol_type = other DNA
tgggcggggccggctgttgg

SEQ ID NO: 20265 - DNA, 20 bp, synthetic construct
  source 1..20: mol_type = other DNA
gtgaggcgcggccgaggggt

SEQ ID NO: 20266 - DNA, 20 bp, synthetic construct
  source 1..20: mol_type = other DNA
tggcggcggttggctcggcg

SEQ ID NO: 20267 - DNA, 20 bp, synthetic construct
  source 1..20: mol_type = other DNA
tcggctgcacgtgcgggcgg

SEQ ID NO: 20268 - DNA, 20 bp, synthetic construct
  source 1..20: mol_type = other DNA
tctgcgcccgacgtaggctg

SEQ ID NO: 20269 - DNA, 20 bp, synthetic construct
  source 1..20: mol_type = other DNA
ggagcgtctgcgcccgacgt

SEQ ID NO: 20270 - DNA, 20 bp, synthetic construct
  source 1..20: mol_type = other DNA
gccgagaagcagaaacacga

SEQ ID NO: 20271 - DNA, 20 bp, synthetic construct
  source 1..20: mol_type = other DNA
agaagcagaaacacgacggg

SEQ ID NO: 20272 - DNA, 20 bp, synthetic construct
  source 1..20: mol_type = other DNA
gaagcagaaacacgacgggc

SEQ ID NO: 20273 - DNA, 20 bp, synthetic construct
  source 1..20: mol_type = other DNA
caggccccgcagcctacgtc

SEQ ID NO: 20274 - DNA, 20 bp, synthetic construct
  source 1..20: mol_type = other DNA
ccgagaagcagaaacacgac

SEQ ID NO: 20275 - DNA, 20 bp, synthetic construct
  source 1..20: mol_type = other DNA
cgcagacgctccccctggcg

SEQ ID NO: 20276 - DNA, 20 bp, synthetic construct
  source 1..20: mol_type = other DNA
ccaggaactgagtctgcgca

SEQ ID NO: 20277 - DNA, 20 bp, synthetic construct
  source 1..20: mol_type = other DNA
tgcgcccgacgtaggctgcg

SEQ ID NO: 20278 - DNA, 20 bp, synthetic construct
  source 1..20: mol_type = other DNA
ggcgcagacgctccccctgg

SEQ ID NO: 20279 - DNA, 20 bp, synthetic construct
  source 1..20: mol_type = other DNA
gcgggtactggtgattctcc

SEQ ID NO: 20280 - DNA, 20 bp, synthetic construct
  source 1..20: mol_type = other DNA
cccccgcccgccccgccagg

SEQ ID NO: 20281 - DNA, 20 bp, synthetic construct
  source 1..20: mol_type = other DNA
agggcggtgactcggctcgg

SEQ ID NO: 20282 - DNA, 20 bp, synthetic construct
  source 1..20: mol_type = other DNA
gcccccgcccgccccgccag

SEQ ID NO: 20283 - DNA, 20 bp, synthetic construct
  source 1..20: mol_type = other DNA
tggcccggccccgtatccag

SEQ ID NO: 20284 - DNA, 20 bp, synthetic construct
  source 1..20: mol_type = other DNA
ccaggcgacccctggatacg

SEQ ID NO: 20285 - DNA, 20 bp, synthetic construct
  source 1..20: mol_type = other DNA
gtggcccggccccgtatcca

SEQ ID NO: 20286 - DNA, 20 bp, synthetic construct
  source 1..20: mol_type = other DNA
ggccacgcgcgccccgagag

SEQ ID NO: 20287 - DNA, 20 bp, synthetic construct
  source 1..20: mol_type = other DNA
gcccaggcgacccctggata

SEQ ID NO: 20288 - DNA, 20 bp, synthetic construct
  source 1..20: mol_type = other DNA
cggagcgggaggctgaagcg

SEQ ID NO: 20289 - DNA, 20 bp, synthetic construct
  source 1..20: mol_type = other DNA
gatgaggagccgggccaccc

SEQ ID NO: 20290 - DNA, 20 bp, synthetic construct
  source 1..20: mol_type = other DNA
ctcctcatcctccgctctcg

SEQ ID NO: 20291 - DNA, 20 bp, synthetic construct
  source 1..20: mol_type = other DNA
cacgcgcgccccgagagcgg

SEQ ID NO: 20292 - DNA, 20 bp, synthetic construct
  source 1..20: mol_type = other DNA
agcgggaggctgaagcgcgg

SEQ ID NO: 20293 - DNA, 20 bp, synthetic construct
  source 1..20: mol_type = other DNA
aggctgaagcgcggcggaga

SEQ ID NO: 20294 - DNA, 20 bp, synthetic construct
  source 1..20: mol_type = other DNA
ctgaagcgcggcggagaggg

SEQ ID NO: 20295 - DNA, 20 bp, synthetic construct
  source 1..20: mol_type = other DNA
cggagagcgaggctggagcg

SEQ ID NO: 20296 - DNA, 20 bp, synthetic construct
  source 1..20: mol_type = other DNA
ctggagcgcggcggagcggg

SEQ ID NO: 20297 - DNA, 20 bp, synthetic construct
  source 1..20: mol_type = other DNA
ggtgcgggcggcggagagcg

SEQ ID NO: 20298 - DNA, 20 bp, synthetic construct
  source 1..20: mol_type = other DNA
tcaggcaccaccactgacct

SEQ ID NO: 20299 - DNA, 20 bp, synthetic construct
  source 1..20: mol_type = other DNA
gaaacaggacacaaccctca

SEQ ID NO: 20300 - DNA, 20 bp, synthetic construct
  source 1..20: mol_type = other DNA
ccagaacctctcgcagtgaa

SEQ ID NO: 20301 - DNA, 20 bp, synthetic construct
  source 1..20: mol_type = other DNA
tcactgtcccaggtcagtgg

SEQ ID NO: 20302 - DNA, 20 bp, synthetic construct
  source 1..20: mol_type = other DNA
tacttacgattcactgtccc

SEQ ID NO: 20303 - DNA, 20 bp, synthetic construct
  source 1..20: mol_type = other DNA
agaggcttctgagctcccca

SEQ ID NO: 20304 - DNA, 20 bp, synthetic construct
  source 1..20: mol_type = other DNA
gattcactgtcccaggtcag

SEQ ID NO: 20305 - DNA, 20 bp, synthetic construct
  source 1..20: mol_type = other DNA
tcataataacagcagccatg

SEQ ID NO: 20306 - DNA, 20 bp, synthetic construct
  source 1..20: mol_type = other DNA
ttctgagctccccatggccc

SEQ ID NO: 20307 - DNA, 20 bp, synthetic construct
  source 1..20: mol_type = other DNA
agtatgcctttcactgcgag

SEQ ID NO: 20308 - DNA, 20 bp, synthetic construct
  source 1..20: mol_type = other DNA
ttcaggcaccaccactgacc

SEQ ID NO: 20309 - DNA, 20 bp, synthetic construct
  source 1..20: mol_type = other DNA
tgcctgaagctgaggagaca

SEQ ID NO: 20310 - DNA, 20 bp, synthetic construct
  source 1..20: mol_type = other DNA
agtggtggtgcctgaagctg

SEQ ID NO: 20311 - DNA, 20 bp, synthetic construct
  source 1..20: mol_type = other DNA
cactgcgagaggttctggag

SEQ ID NO: 20312 - DNA, 20 bp, synthetic construct
  source 1..20: mol_type = other DNA
tgctgcctgcctgggccatg

SEQ ID NO: 20313 - DNA, 20 bp, synthetic construct
  source 1..20: mol_type = other DNA
tcagcggcagcaaccgagaa

SEQ ID NO: 20314 - DNA, 20 bp, synthetic construct
  source 1..20: mol_type = other DNA
tcagccccgcaggtcccggt

SEQ ID NO: 20315 - DNA, 20 bp, synthetic construct
  source 1..20: mol_type = other DNA
caggtcccggtgggaatgcg

SEQ ID NO: 20316 - DNA, 20 bp, synthetic construct
  source 1..20: mol_type = other DNA
tggctgggcgggctcctcag

SEQ ID NO: 20317 - DNA, 20 bp, synthetic construct
  source 1..20: mol_type = other DNA
gcactcagccccgcaggtcc

SEQ ID NO: 20318 - DNA, 20 bp, synthetic construct
  source 1..20: mol_type = other DNA
ctcagccccgcaggtcccgg

SEQ ID NO: 20319 - DNA, 20 bp, synthetic construct
  source 1..20: mol_type = other DNA
cattcccaccgggacctgcg

SEQ ID NO: 20320 - DNA, 20 bp, synthetic construct
  source 1..20: mol_type = other DNA
gcggcctggcctcggcctcg

SEQ ID NO: 20321 - DNA, 20 bp, synthetic construct
  source 1..20: mol_type = other DNA
agaagggcactcagccccgc

SEQ ID NO: 20322 - DNA, 20 bp, synthetic construct
  source 1..20: mol_type = other DNA
ggagcccgcccagccagcca

SEQ ID NO: 20323 - DNA, 20 bp, synthetic construct
  source 1..20: mol_type = other DNA
cttctcggttgctgccgctg

SEQ ID NO: 20324 - DNA, 20 bp, synthetic construct
  source 1..20: mol_type = other DNA
ccgaggccaggccgcagccc

SEQ ID NO: 20325 - DNA, 20 bp, synthetic construct
  source 1..20: mol_type = other DNA
cccagccagccagggccgcg

SEQ ID NO: 20326 - DNA, 20 bp, synthetic construct
  source 1..20: mol_type = other DNA
gtggggcggctcctgggctg

SEQ ID NO: 20327 - DNA, 20 bp, synthetic construct
  source 1..20: mol_type = other DNA
ctcagcggcagcaaccgaga

SEQ ID NO: 20328 - DNA, 20 bp, synthetic construct
  source 1..20: mol_type = other DNA
gtggtgaagagtaaccaatg

SEQ ID NO: 20329 - DNA, 20 bp, synthetic construct
  source 1..20: mol_type = other DNA
tatctaaagtatcacatcca

SEQ ID NO: 20330 - DNA, 20 bp, synthetic construct
  source 1..20: mol_type = other DNA
ggaaagttcgaagcttgcta

SEQ ID NO: 20331 - DNA, 20 bp, synthetic construct
  source 1..20: mol_type = other DNA
gatgttcatgaatcgctgcg

SEQ ID NO: 20332 - DNA, 20 bp, synthetic construct
  source 1..20: mol_type = other DNA
cgagtggatgatagctgcac

SEQ ID NO: 20333 - DNA, 20 bp, synthetic construct
  source 1..20: mol_type = other DNA
ggaaatggattacagatgtt

SEQ ID NO: 20334 - DNA, 20 bp, synthetic construct
  source 1..20: mol_type = other DNA
tttacttacctgtcgcacag

SEQ ID NO: 20335 - DNA, 20 bp, synthetic construct
  source 1..20: mol_type = other DNA
agcacttaattctagaacat

SEQ ID NO: 20336 - DNA, 20 bp, synthetic construct
  source 1..20: mol_type = other DNA
ggatccacaggacttccaaa

SEQ ID NO: 20337 - DNA, 20 bp, synthetic construct
  source 1..20: mol_type = other DNA
atgattactgcaatatctga

SEQ ID NO: 20338 - DNA, 20 bp, synthetic construct
  source 1..20: mol_type = other DNA
acattattgctggtataact

SEQ ID NO: 20339 - DNA, 20 bp, synthetic construct
  source 1..20: mol_type = other DNA
cagaaaggattccagaacta

SEQ ID NO: 20340 - DNA, 20 bp, synthetic construct
  source 1..20: mol_type = other DNA
catgttgaaaccaacactga

SEQ ID NO: 20341 - DNA, 20 bp, synthetic construct
  source 1..20: mol_type = other DNA
gggaactcggaccaggtcgg

SEQ ID NO: 20342 - DNA, 20 bp, synthetic construct
  source 1..20: mol_type = other DNA
gggcatcattgtgcatacca

SEQ ID NO: 20343 - DNA, 20 bp, synthetic construct
  source 1..20: mol_type = other DNA
tgttcctgggaagtacagcg

SEQ ID NO: 20344 - DNA, 20 bp, synthetic construct
  source 1..20: mol_type = other DNA
acatctacttctccacgcgt

SEQ ID NO: 20345 - DNA, 20 bp, synthetic construct
  source 1..20: mol_type = other DNA
aatgcgcgttaggcaatccc

SEQ ID NO: 20346 - DNA, 20 bp, synthetic construct
  source 1..20: mol_type = other DNA
caggatgccaatccagacaa

SEQ ID NO: 20347 - DNA, 20 bp, synthetic construct
  source 1..20: mol_type = other DNA
ctgctggacataagccaccg

SEQ ID NO: 20348 - DNA, 20 bp, synthetic construct
  source 1..20: mol_type = other DNA
ggtccacgtgcacttcaagg

SEQ ID NO: 20349 - DNA, 20 bp, synthetic construct
  source 1..20: mol_type = other DNA
gtgaagctgcggatcgccca

SEQ ID NO: 20350 - DNA, 20 bp, synthetic construct
  source 1..20: mol_type = other DNA
agttgcgcgggcatagcacg

SEQ ID NO: 20351 - DNA, 20 bp, synthetic construct
  source 1..20: mol_type = other DNA
acctacccgccattgagggt

SEQ ID NO: 20352 - DNA, 20 bp, synthetic construct
  source 1..20: mol_type = other DNA
tgaagagcgtcggccagtgg

SEQ ID NO: 20353 - DNA, 20 bp, synthetic construct
  source 1..20: mol_type = other DNA
gacagccaacgcgctacgag

SEQ ID NO: 20354 - DNA, 20 bp, synthetic construct
  source 1..20: mol_type = other DNA
gcatagccgtagtcgtcgca

SEQ ID NO: 20355 - DNA, 20 bp, synthetic construct
  source 1..20: mol_type = other DNA
ggcagcatgccactaggcac

SEQ ID NO: 20356 - DNA, 20 bp, synthetic construct
  source 1..20: mol_type = other DNA
ggaagacggctgcaacgtga

SEQ ID NO: 20357 - DNA, 20 bp, synthetic construct
  source 1..20: mol_type = other DNA
gacgtcacgctgtacaagta

SEQ ID NO: 20358 - DNA, 20 bp, synthetic construct
  source 1..20: mol_type = other DNA
gccccgacgcgctcgtacag

SEQ ID NO: 20359 - DNA, 20 bp, synthetic construct
  source 1..20: mol_type = other DNA
cagttccagatcgcgcactg

SEQ ID NO: 20360 - DNA, 20 bp, synthetic construct
  source 1..20: mol_type = other DNA
gaaggcggccgggtcgatgt

SEQ ID NO: 20361 - DNA, 20 bp, synthetic construct
  source 1..20: mol_type = other DNA
ggcggcgactttgactaccc

SEQ ID NO: 20362 - DNA, 20 bp, synthetic construct
  source 1..20: mol_type = other DNA
ggcggcgccgtcatgcccgg

SEQ ID NO: 20363 - DNA, 20 bp, synthetic construct
  source 1..20: mol_type = other DNA
ttggcttcatcctcctcgcg

SEQ ID NO: 20364 - DNA, 20 bp, synthetic construct
  source 1..20: mol_type = other DNA
ggccaggaactcgtcgttga

SEQ ID NO: 20365 - DNA, 20 bp, synthetic construct
  source 1..20: mol_type = other DNA
agtgcgcgatctggaactgc

SEQ ID NO: 20366 - DNA, 20 bp, synthetic construct
  source 1..20: mol_type = other DNA
gatgtaggcgctgatgtcga

SEQ ID NO: 20367 - DNA, 20 bp, synthetic construct
  source 1..20: mol_type = other DNA
tgctcgcagatgccgcccag

SEQ ID NO: 20368 - DNA, 20 bp, synthetic construct
  source 1..20: mol_type = other DNA
cgcgccccggggaaagccga

SEQ ID NO: 20369 - DNA, 20 bp, synthetic construct
  source 1..20: mol_type = other DNA
ggctcctgcttgatcaccag

SEQ ID NO: 20370 - DNA, 20 bp, synthetic construct
  source 1..20: mol_type = other DNA
cctgccgtccaggtagccgg

SEQ ID NO: 20371 - DNA, 20 bp, synthetic construct
  source 1..20: mol_type = other DNA
gccgcgcagccgtagccggg

SEQ ID NO: 20372 - DNA, 20 bp, synthetic construct
  source 1..20: mol_type = other DNA
gagaaggccaaggcggccgt

SEQ ID NO: 20373 - DNA, 20 bp, synthetic construct
  source 1..20: mol_type = other DNA
atcaggtactccctcaacac

SEQ ID NO: 20374 - DNA, 20 bp, synthetic construct
  source 1..20: mol_type = other DNA
gctgacagggcagatacctg

SEQ ID NO: 20375 - DNA, 20 bp, synthetic construct
  source 1..20: mol_type = other DNA
gctatcatcatcgtggtcgg

SEQ ID NO: 20376 - DNA, 20 bp, synthetic construct
  source 1..20: mol_type = other DNA
ctatggtgtcccggctgaca

SEQ ID NO: 20377 - DNA, 20 bp, synthetic construct
  source 1..20: mol_type = other DNA
ctggctcaataggtccaagg

SEQ ID NO: 20378 - DNA, 20 bp, synthetic construct
  source 1..20: mol_type = other DNA
cccaggcccatgataccatg

SEQ ID NO: 20379 - DNA, 20 bp, synthetic construct
  source 1..20: mol_type = other DNA
tgaagttgcagaaggcaccc

SEQ ID NO: 20380 - DNA, 20 bp, synthetic construct
  source 1..20: mol_type = other DNA
aggtggcaggaggtcacagt

SEQ ID NO: 20381 - DNA, 20 bp, synthetic construct
  source 1..20: mol_type = other DNA
gtcacagtgggtccgaaact

SEQ ID NO: 20382 - DNA, 20 bp, synthetic construct
  source 1..20: mol_type = other DNA
gactggaacacacccaagaa

SEQ ID NO: 20383 - DNA, 20 bp, synthetic construct
  source 1..20: mol_type = other DNA
gacctgcgctgtcgcgcgag

SEQ ID NO: 20384 - DNA, 20 bp, synthetic construct
  source 1..20: mol_type = other DNA
cagcttacccagtacaagga

SEQ ID NO: 20385 - DNA, 20 bp, synthetic construct
  source 1..20: mol_type = other DNA
gcagaatatgtacatgagga

SEQ ID NO: 20386 - DNA, 20 bp, synthetic construct
  source 1..20: mol_type = other DNA
caggtcctccgtgagagcgc

SEQ ID NO: 20387 - DNA, 20 bp, synthetic construct
  source 1..20: mol_type = other DNA
tgtgctctacttcacttggc

SEQ ID NO: 20388 - DNA, 20 bp, synthetic construct
  source 1..20: mol_type = other DNA
ggtccgagaggtgtacgaag

SEQ ID NO: 20389 - DNA, 20 bp, synthetic construct
  source 1..20: mol_type = other DNA
gacacggacctacgaccccg

SEQ ID NO: 20390 - DNA, 20 bp, synthetic construct
  source 1..20: mol_type = other DNA
ccggagcgagcgcgaggacg

SEQ ID NO: 20391 - DNA, 20 bp, synthetic construct
  source 1..20: mol_type = other DNA
cctcgtcctcgcgctcgctc

SEQ ID NO: 20392 - DNA, 20 bp, synthetic construct
  source 1..20: mol_type = other DNA
gtacgaagaggcgggagtca

SEQ ID NO: 20393 - DNA, 20 bp, synthetic construct
  source 1..20: mol_type = other DNA
cgtgtatgtactgactgtca

SEQ ID NO: 20394 - DNA, 20 bp, synthetic construct
  source 1..20: mol_type = other DNA
gaccgctggatcgtgccggg

SEQ ID NO: 20395 - DNA, 20 bp, synthetic construct
  source 1..20: mol_type = other DNA
gtgcttccggagcgagcgcg

SEQ ID NO: 20396 - DNA, 20 bp, synthetic construct
  source 1..20: mol_type = other DNA
ccccgcccggcacgatccag

SEQ ID NO: 20397 - DNA, 20 bp, synthetic construct
  source 1..20: mol_type = other DNA
tcctgttagtgagtagcagc

SEQ ID NO: 20398 - DNA, 20 bp, synthetic construct
  source 1..20: mol_type = other DNA
cgaggggttcaagaagcggg

SEQ ID NO: 20399 - DNA, 20 bp, synthetic construct
  source 1..20: mol_type = other DNA
agtgagtagcagccggtacc

SEQ ID NO: 20400 - DNA, 20 bp, synthetic construct
  source 1..20: mol_type = other DNA
actgactgtcacggagctgc

SEQ ID NO: 20401 - DNA, 20 bp, synthetic construct
  source 1..20: mol_type = other DNA
gttcgaagacgcccaggagc

SEQ ID NO: 20402 - DNA, 20 bp, synthetic construct
  source 1..20: mol_type = other DNA
gggcgtcttcgaacagaacc

SEQ ID NO: 20403 - DNA, 20 bp, synthetic construct
  source 1..20: mol_type = other DNA
acctggtgtggacccacgcg

SEQ ID NO: 20404 - DNA, 20 bp, synthetic construct
  source 1..20: mol_type = other DNA
gcatattcacgagcatgcga

SEQ ID NO: 20405 - DNA, 20 bp, synthetic construct
  source 1..20: mol_type = other DNA
gccattgatctgatgtacgg

SEQ ID NO: 20406 - DNA, 20 bp, synthetic construct
  source 1..20: mol_type = other DNA
gtcccgcagaagtggcgtgt

SEQ ID NO: 20407 - DNA, 20 bp, synthetic construct
  source 1..20: mol_type = other DNA
tgccgctccacacgaagcac

SEQ ID NO: 20408 - DNA, 20 bp, synthetic construct
  source 1..20: mol_type = other DNA
tccaccgacactgcaaaggt

SEQ ID NO: 20409 - DNA, 20 bp, synthetic construct
  source 1..20: mol_type = other DNA
tggggctctgcatctcacag

SEQ ID NO: 20410 - DNA, 20 bp, synthetic construct
  source 1..20: mol_type = other DNA
gtgtcggtggagcacgtcca

SEQ ID NO: 20411 - DNA, 20 bp, synthetic construct
  source 1..20: mol_type = other DNA
cctcgaactgcaccataggt

SEQ ID NO: 20412 - DNA, 20 bp, synthetic construct
  source 1..20: mol_type = other DNA
catggaaataatcgccaagg

SEQ ID NO: 20413 - DNA, 20 bp, synthetic construct
  source 1..20: mol_type = other DNA
gggccgcgatgaggaactcg

SEQ ID NO: 20414 - DNA, 20 bp, synthetic construct
  source 1..20: mol_type = other DNA
gtacatcagatcaatggctg

SEQ ID NO: 20415 - DNA, 20 bp, synthetic construct
  source 1..20: mol_type = other DNA
aggaatgcagcctgttgagg

SEQ ID NO: 20416 - DNA, 20 bp, synthetic construct
  source 1..20: mol_type = other DNA
agccgaagaagacacagtag

SEQ ID NO: 20417 - DNA, 20 bp, synthetic construct
  source 1..20: mol_type = other DNA
gctcacctcctgaaacagtg

SEQ ID NO: 20418 - DNA, 20 bp, synthetic construct
  source 1..20: mol_type = other DNA
aagacgtctgtgtcaaacgc

SEQ ID NO: 20419 - DNA, 20 bp, synthetic construct
  source 1..20: mol_type = other DNA
gtagagcgctaagggatgtg

SEQ ID NO: 20420 - DNA, 20 bp, synthetic construct
  source 1..20: mol_type = other DNA
tcacggtcccaggtagactt

SEQ ID NO: 20421 - DNA, 20 bp, synthetic construct
  source 1..20: mol_type = other DNA
cccaactggccccaaagaag

SEQ ID NO: 20422 - DNA, 20 bp, synthetic construct
  source 1..20: mol_type = other DNA
ggaagaagctatgcccatag

SEQ ID NO: 20423 - DNA, 20 bp, synthetic construct
  source 1..20: mol_type = other DNA
tcatcgtgtggagcgcatca

SEQ ID NO: 20424 - DNA, 20 bp, synthetic construct
  source 1..20: mol_type = other DNA
tgagtcaccagaccagtgca

SEQ ID NO: 20425 - DNA, 20 bp, synthetic construct
  source 1..20: mol_type = other DNA
gtagctcttatcaaaggtgc

SEQ ID NO: 20426 - DNA, 20 bp, synthetic construct
  source 1..20: mol_type = other DNA
ggagctctgtgataaatctg

SEQ ID NO: 20427 - DNA, 20 bp, synthetic construct
  source 1..20: mol_type = other DNA
tgatcctgaccggaagctgg

SEQ ID NO: 20428 - DNA, 20 bp, synthetic construct
  source 1..20: mol_type = other DNA
ggacaccaggaaaggaatga

SEQ ID NO: 20429 - DNA, 20 bp, synthetic construct
  source 1..20: mol_type = other DNA
ggggcagaaagccctccaca

SEQ ID NO: 20430 - DNA, 20 bp, synthetic construct
  source 1..20: mol_type = other DNA
catcgatgtccgaaattccc

SEQ ID NO: 20431 - DNA, 20 bp, synthetic construct
  source 1..20: mol_type = other DNA
ggggctggacgacttcagga

SEQ ID NO: 20432 - DNA, 20 bp, synthetic construct
  source 1..20: mol_type = other DNA
ggctcggaaggcattcctgg

SEQ ID NO: 20433 - DNA, 20 bp, synthetic construct
  source 1..20: mol_type = other DNA
aggatgtgtccactgaacgt

SEQ ID NO: 20434 - DNA, 20 bp, synthetic construct
  source 1..20: mol_type = other DNA
gttgcaagccaccaacctcg

SEQ ID NO: 20435 - DNA, 20 bp, synthetic construct
  source 1..20: mol_type = other DNA
ctggtgtccatactcagtgg

SEQ ID NO: 20436 - DNA, 20 bp, synthetic construct
  source 1..20: mol_type = other DNA
caggcaccaagaccacagaa

SEQ ID NO: 20437 - DNA, 20 bp, synthetic construct
  source 1..20: mol_type = other DNA
atcatcgcgaccccagccac

SEQ ID NO: 20438 - DNA, 20 bp, synthetic construct
  source 1..20: mol_type = other DNA
gagccacagccatcaagacg

SEQ ID NO: 20439 - DNA, 20 bp, synthetic construct
  source 1..20: mol_type = other DNA
gaatatgggcacctactccc

SEQ ID NO: 20440 - DNA, 20 bp, synthetic construct
  source 1..20: mol_type = other DNA
cggaagactcagctgagcac

SEQ ID NO: 20441 - DNA, 20 bp, synthetic construct
  source 1..20: mol_type = other DNA
ggtccccaacatgtccacca

SEQ ID NO: 20442 - DNA, 20 bp, synthetic construct
  source 1..20: mol_type = other DNA
accatcatgtccctgaccac

SEQ ID NO: 20443 - DNA, 20 bp, synthetic construct
  source 1..20: mol_type = other DNA
tggacaccgaggccatgatg

SEQ ID NO: 20444 - DNA, 20 bp, synthetic construct
  source 1..20: mol_type = other DNA
ccaaggccacgggattgaag

SEQ ID NO: 20445 - DNA, 20 bp, synthetic construct
  source 1..20: mol_type = other DNA
agaaaccggaacaacagcac

SEQ ID NO: 20446 - DNA, 20 bp, synthetic construct
  source 1..20: mol_type = other DNA
atcaccaccacagagtcccc

SEQ ID NO: 20447 - DNA, 20 bp, synthetic construct
  source 1..20: mol_type = other DNA
tgatggaccctctttgacca

SEQ ID NO: 20448 - DNA, 20 bp, synthetic construct
  source 1..20: mol_type = other DNA
cgtgggccgcgacgcacgcg

SEQ ID NO: 20449 - DNA, 20 bp, synthetic construct
  source 1..20: mol_type = other DNA
aggcctctggaggttcagcg

SEQ ID NO: 20450 - DNA, 20 bp, synthetic construct
  source 1..20: mol_type = other DNA
catccaggaccagattgctc

SEQ ID NO: 20451 - DNA, 20 bp, synthetic construct
  source 1..20: mol_type = other DNA
cacccgttgccgctcaccgt

SEQ ID NO: 20452 - DNA, 20 bp, synthetic construct
  source 1..20: mol_type = other DNA
aaagataccaccaaagtcct

SEQ ID NO: 20453 - DNA, 20 bp, synthetic construct
  source 1..20: mol_type = other DNA
tgtccccgctgaacctccag

SEQ ID NO: 20454 - DNA, 20 bp, synthetic construct
  source 1..20: mol_type = other DNA
ggagaggaaggagcagcccc

SEQ ID NO: 20455 - DNA, 20 bp, synthetic construct
  source 1..20: mol_type = other DNA
cgggtggtccaggagcacgg

SEQ ID NO: 20456 - DNA, 20 bp, synthetic construct
  source 1..20: mol_type = other DNA
accaaagtccttggcaggtg

SEQ ID NO: 20457 - DNA, 20 bp, synthetic construct
  source 1..20: mol_type = other DNA
agattgctctggtggagagg

SEQ ID NO: 20458 - DNA, 20 bp, synthetic construct
  source 1..20: mol_type = other DNA
aagatgtatcgaatgtcccc

SEQ ID NO: 20459 - DNA, 20 bp, synthetic construct
  source 1..20: mol_type = other DNA
ggaccacccgagtcttggag

SEQ ID NO: 20460 - DNA, 20 bp, synthetic construct
  source 1..20: mol_type = other DNA
tgaacctccagaggcctgcg

SEQ ID NO: 20461 - DNA, 20 bp, synthetic construct
  source 1..20: mol_type = other DNA
gcctgcggggaactcagcaa

SEQ ID NO: 20462 - DNA, 20 bp, synthetic construct
  source 1..20: mol_type = other DNA
ccaggagcacggcgggcggg

SEQ ID NO: 20463 - DNA, 20 bp, synthetic construct
  source 1..20: mol_type = other DNA
ggaacaagtactatggccgt

SEQ ID NO: 20464 - DNA, 20 bp, synthetic construct
  source 1..20: mol_type = other DNA
gctgctgcttgtgacaacgc

SEQ ID NO: 20465 - DNA, 20 bp, synthetic construct
  source 1..20: mol_type = other DNA
cagtggcagtgaccacaagg

SEQ ID NO: 20466 - DNA, 20 bp, synthetic construct
  source 1..20: mol_type = other DNA
tgctgtgtccgcctacttgg

SEQ ID NO: 20467 - DNA, 20 bp, synthetic construct
  source 1..20: mol_type = other DNA
ccttggactcggagcgcatg

SEQ ID NO: 20468 - DNA, 20 bp, synthetic construct
  source 1..20: mol_type = other DNA
cagatgctagatggcaacag

SEQ ID NO: 20469 - DNA, 20 bp, synthetic construct
  source 1..20: mol_type = other DNA
cttccttcttagctcacagg

SEQ ID NO: 20470 - DNA, 20 bp, synthetic construct
  source 1..20: mol_type = other DNA
ggaggcaaagagtccgaagg

SEQ ID NO: 20471 - DNA, 20 bp, synthetic construct
  source 1..20: mol_type = other DNA
tcttcaggtccaacacgcag

SEQ ID NO: 20472 - DNA, 20 bp, synthetic construct
  source 1..20: mol_type = other DNA
cggcgggagtgtttgcgccg

SEQ ID NO: 20473 - DNA, 20 bp, synthetic construct
  source 1..20: mol_type = other DNA
tgaactccttcatttcggga

SEQ ID NO: 20474 - DNA, 20 bp, synthetic construct
  source 1..20: mol_type = other DNA
caggtgtaccagctggacac

SEQ ID NO: 20475 - DNA, 20 bp, synthetic construct
  source 1..20: mol_type = other DNA
ctcgtaaaagcgctgttccc

SEQ ID NO: 20476 - DNA, 20 bp, synthetic construct
  source 1..20: mol_type = other DNA
aacaggatgacacaacagaa

SEQ ID NO: 20477 - DNA, 20 bp, synthetic construct
  source 1..20: mol_type = other DNA
aagatgggcacgcggcagca

SEQ ID NO: 20478 - DNA, 20 bp, synthetic construct
  source 1..20: mol_type = other DNA
tggtactgacagaaccggca

SEQ ID NO: 20479 - DNA, 20 bp, synthetic construct
  source 1..20: mol_type = other DNA
ccgcatcgtggacacatccg

SEQ ID NO: 20480 - DNA, 20 bp, synthetic construct
  source 1..20: mol_type = other DNA
aggacttgccagcgagatcg

SEQ ID NO: 20481 - DNA, 20 bp, synthetic construct
  source 1..20: mol_type = other DNA
aagcgtgtggccaagcacag

SEQ ID NO: 20482 - DNA, 20 bp, synthetic construct
  source 1..20: mol_type = other DNA
tgacttaagggtgatagtgt

SEQ ID NO: 20483 - DNA, 20 bp, synthetic construct
  source 1..20: mol_type = other DNA
gaggtcaatggtgaacacaa

SEQ ID NO: 20484 - DNA, 20 bp, synthetic construct
  source 1..20: mol_type = other DNA
ggcttccaagaagatactgc

SEQ ID NO: 20485 - DNA, 20 bp, synthetic construct
  source 1..20: mol_type = other DNA
ccagtactgaactttgagag

SEQ ID NO: 20486 - DNA, 20 bp, synthetic construct
  source 1..20: mol_type = other DNA
gttagacgaggatcaggcgt

SEQ ID NO: 20487 - DNA, 20 bp, synthetic construct
  source 1..20: mol_type = other DNA
accatacactttaaccagcg

SEQ ID NO: 20488 - DNA, 20 bp, synthetic construct
  source 1..20: mol_type = other DNA
gagccatcgaccggagatgg

SEQ ID NO: 20489 - DNA, 20 bp, synthetic construct
  source 1..20: mol_type = other DNA
tcacaataaaccagatgatg

SEQ ID NO: 20490 - DNA, 20 bp, synthetic construct
  source 1..20: mol_type = other DNA
gtggccatgatggacaggta

SEQ ID NO: 20491 - DNA, 20 bp, synthetic construct
  source 1..20: mol_type = other DNA
ggcacccgactggccagtag

SEQ ID NO: 20492 - DNA, 20 bp, synthetic construct
  source 1..20: mol_type = other DNA
gattccactctggccatgtg

SEQ ID NO: 20493 - DNA, 20 bp, synthetic construct
  source 1..20: mol_type = other DNA
cggttcgcggatccagcacg

SEQ ID NO: 20494 - DNA, 20 bp, synthetic construct
  source 1..20: mol_type = other DNA
tcgtccatgatataccacac

SEQ ID NO: 20495 - DNA, 20 bp, synthetic construct
  source 1..20: mol_type = other DNA
gccacttgacatcaaccccg

SEQ ID NO: 20496 - DNA, 20 bp, synthetic construct
  source 1..20: mol_type = other DNA
ccacgcctggacgtgccgtg

SEQ ID NO: 20497 - DNA, 20 bp, synthetic construct
  source 1..20: mol_type = other DNA
gtgacccgagactttgccta

SEQ ID NO: 20498 - DNA, 20 bp, synthetic construct
  source 1..20: mol_type = other DNA
tggaagtagctgacaaactg

SEQ ID NO: 20499 - DNA, 20 bp, synthetic construct
  source 1..20: mol_type = other DNA
gctcgggtgtgcaagagctg

SEQ ID NO: 20500 - DNA, 20 bp, synthetic construct
  source 1..20: mol_type = other DNA
ctgtactgggcagctcaccg

SEQ ID NO: 20501 - DNA, 20 bp, synthetic construct
  source 1..20: mol_type = other DNA
ggggtccccgaacgttactg

SEQ ID NO: 20502 - DNA, 20 bp, synthetic construct
  source 1..20: mol_type = other DNA
ggaagcagcagcccaacccg

SEQ ID NO: 20503 - DNA, 20 bp, synthetic construct
  source 1..20: mol_type = other DNA
ggcagcccaccccaacaggt

SEQ ID NO: 20504 - DNA, 20 bp, synthetic construct
  source 1..20: mol_type = other DNA
acagtcagcaggttctcgca

SEQ ID NO: 20505 - DNA, 20 bp, synthetic construct
  source 1..20: mol_type = other DNA
agcgtgtaggccacctgctg

SEQ ID NO: 20506 - DNA, 20 bp, synthetic construct
  source 1..20: mol_type = other DNA
gggctacgcacttgaagatg

SEQ ID NO: 20507 - DNA, 20 bp, synthetic construct
  source 1..20: mol_type = other DNA
gccatgcggtgcagcagccc

SEQ ID NO: 20508 - DNA, 20 bp, synthetic construct
  source 1..20: mol_type = other DNA
cctatgcgccggctacttcg

SEQ ID NO: 20509 - DNA, 20 bp, synthetic construct
  source 1..20: mol_type = other DNA
ggatcttaatgttgcacatg

SEQ ID NO: 20510 - DNA, 20 bp, synthetic construct
  source 1..20: mol_type = other DNA
ccacgaagtagccggcgcat

SEQ ID NO: 20511 - DNA, 20 bp, synthetic construct
  source 1..20: mol_type = other DNA
gctcatcatagcgatagtag

SEQ ID NO: 20512 - DNA, 20 bp, synthetic construct
  source 1..20: mol_type = other DNA
gatagtagtgggctttagag

SEQ ID NO: 20513 - DNA, 20 bp, synthetic construct
  source 1..20: mol_type = other DNA
tgtacaagatggacccgcta

SEQ ID NO: 20514 - DNA, 20 bp, synthetic construct
  source 1..20: mol_type = other DNA
ggtgacccggtccaaacctc

SEQ ID NO: 20515 - DNA, 20 bp, synthetic construct
  source 1..20: mol_type = other DNA
atcgtgtataagctggtgcc

SEQ ID NO: 20516 - DNA, 20 bp, synthetic construct
  source 1..20: mol_type = other DNA
gctcaacctcaaactggacc

SEQ ID NO: 20517 - DNA, 20 bp, synthetic construct
  source 1..20: mol_type = other DNA
ccgggtcacccagcccactg

SEQ ID NO: 20518 - DNA, 20 bp, synthetic construct
  source 1..20: mol_type = other DNA
ggcagtacttgctagtttgg

SEQ ID NO: 20519 - DNA, 20 bp, synthetic construct
  source 1..20: mol_type = other DNA
agtatgaagacactctgtga

SEQ ID NO: 20520 - DNA, 20 bp, synthetic construct
  source 1..20: mol_type = other DNA
tccagtttgaggttgagcag

SEQ ID NO: 20521 - DNA, 20 bp, synthetic construct
  source 1..20: mol_type = other DNA
tgagcagtggctgtgtctcg

SEQ ID NO: 20522 - DNA, 20 bp, synthetic construct
  source 1..20: mol_type = other DNA
aggccgaggttgctcagtgc

SEQ ID NO: 20523 - DNA, 20 bp, synthetic construct
  source 1..20: mol_type = other DNA
gaagctgatagccaggaaca

SEQ ID NO: 20524 - DNA, 20 bp, synthetic construct
  source 1..20: mol_type = other DNA
cctattattggcctagacca

SEQ ID NO: 20525 - DNA, 20 bp, synthetic construct
  source 1..20: mol_type = other DNA
ggacccgccaaatccagagg

SEQ ID NO: 20526 - DNA, 20 bp, synthetic construct
  source 1..20: mol_type = other DNA
gatggacccgccaaatccag

SEQ ID NO: 20527 - DNA, 20 bp, synthetic construct
  source 1..20: mol_type = other DNA
tcacactcacacccagtctg

SEQ ID NO: 20528 - DNA, 20 bp, synthetic construct
  source 1..20: mol_type = other DNA
agtgtgaagatggtcctgat

SEQ ID NO: 20529 - DNA, 20 bp, synthetic construct
  source 1..20: mol_type = other DNA
tgtacatagcgccttggtct

SEQ ID NO: 20530 - DNA, 20 bp, synthetic construct
  source 1..20: mol_type = other DNA
aacagggtcacccacagact

SEQ ID NO: 20531 - DNA, 20 bp, synthetic construct
  source 1..20: mol_type = other DNA
gatcctgcagctgctcagga

SEQ ID NO: 20532 - DNA, 20 bp, synthetic construct
  source 1..20: mol_type = other DNA
gaggtgaaaacgcctgaaga

SEQ ID NO: 20533 - DNA, 20 bp, synthetic construct
  source 1..20: mol_type = other DNA
ggaaccagcaactcaacgtc

SEQ ID NO: 20534 - DNA, 20 bp, synthetic construct
  source 1..20: mol_type = other DNA
cacactcacacccagtctgt

SEQ ID NO: 20535 - DNA, 20 bp, synthetic construct
  source 1..20: mol_type = other DNA
ggaggctgtacatagcgcct

SEQ ID NO: 20536 - DNA, 20 bp, synthetic construct
  source 1..20: mol_type = other DNA
tgaaaacgcctgaagaaggt

SEQ ID NO: 20537 - DNA, 20 bp, synthetic construct
  source 1..20: mol_type = other DNA
tgaagctgatagccaggaac

SEQ ID NO: 20538 - DNA, 20 bp, synthetic construct
  source 1..20: mol_type = other DNA
acaggcttagaggactggct

SEQ ID NO: 20539 - DNA, 20 bp, synthetic construct
  source 1..20: mol_type = other DNA
tactagacgtataagtatag

SEQ ID NO: 20540 - DNA, 20 bp, synthetic construct
  source 1..20: mol_type = other DNA
cagaagtcacaaatccgcac

SEQ ID NO: 20541 - DNA, 20 bp, synthetic construct
  source 1..20: mol_type = other DNA
caaacaacatattattcccc

SEQ ID NO: 20542 - DNA, 20 bp, synthetic construct
  source 1..20: mol_type = other DNA
tccgcacaggcttagaggac

SEQ ID NO: 20543 - DNA, 20 bp, synthetic construct
  source 1..20: mol_type = other DNA
aaccacatttgcggcaatgg

SEQ ID NO: 20544 - DNA, 20 bp, synthetic construct
  source 1..20: mol_type = other DNA
gatgagggagacttaaggaa

SEQ ID NO: 20545 - DNA, 20 bp, synthetic construct
  source 1..20: mol_type = other DNA
gcaggaaaaagcccaaagca

SEQ ID NO: 20546 - DNA, 20 bp, synthetic construct
  source 1..20: mol_type = other DNA
agtttatgctgccactgcta

SEQ ID NO: 20547 - DNA, 20 bp, synthetic construct
  source 1..20: mol_type = other DNA
agggagacttaaggaatgga

SEQ ID NO: 20548 - DNA, 20 bp, synthetic construct
  source 1..20: mol_type = other DNA
gccagtcctctaagcctgtg

SEQ ID NO: 20549 - DNA, 20 bp, synthetic construct
  source 1..20: mol_type = other DNA
tgtctgggttcctgactctg

SEQ ID NO: 20550 - DNA, 20 bp, synthetic construct
  source 1..20: mol_type = other DNA
ggacgagttcttattggaga

SEQ ID NO: 20551 - DNA, 20 bp, synthetic construct
  source 1..20: mol_type = other DNA
agacaacaaaaccacatttg

SEQ ID NO: 20552 - DNA, 20 bp, synthetic construct
  source 1..20: mol_type = other DNA
ctgctacggagaaatcagaa

SEQ ID NO: 20553 - DNA, 20 bp, synthetic construct
  source 1..20: mol_type = other DNA
tgatgatccggtcccccagt

SEQ ID NO: 20554 - DNA, 20 bp, synthetic construct
  source 1..20: mol_type = other DNA
actgtactgactcacccctc

SEQ ID NO: 20555 - DNA, 20 bp, synthetic construct
  source 1..20: mol_type = other DNA
agagaatgggactctcaggt

SEQ ID NO: 20556 - DNA, 20 bp, synthetic construct
  source 1..20: mol_type = other DNA
agaggcgagtgatttgactg

SEQ ID NO: 20557 - DNA, 20 bp, synthetic construct
  source 1..20: mol_type = other DNA
ccccaacccgaactcacagc

SEQ ID NO: 20558 - DNA, 20 bp, synthetic construct
  source 1..20: mol_type = other DNA
ccaaagttcgcatgaatcca

SEQ ID NO: 20559 - DNA, 20 bp, synthetic construct
  source 1..20: mol_type = other DNA
gcagccgggaagatttccag

SEQ ID NO: 20560 - DNA, 20 bp, synthetic construct
  source 1..20: mol_type = other DNA
aagcaacaaactgcactgta

SEQ ID NO: 20561 - DNA, 20 bp, synthetic construct
  source 1..20: mol_type = other DNA
actgcgggacgaagagctcg

SEQ ID NO: 20562 - DNA, 20 bp, synthetic construct
  source 1..20: mol_type = other DNA
gaggaccaggtaaacttccg

SEQ ID NO: 20563 - DNA, 20 bp, synthetic construct
  source 1..20: mol_type = other DNA
gactcacccctctggaaaga

SEQ ID NO: 20564 - DNA, 20 bp, synthetic construct
  source 1..20: mol_type = other DNA
agagctcgaggagatcaaga

SEQ ID NO: 20565 - DNA, 20 bp, synthetic construct
  source 1..20: mol_type = other DNA
cggttcaccagcctggacaa

SEQ ID NO: 20566 - DNA, 20 bp, synthetic construct
  source 1..20: mol_type = other DNA
gcctggacaaaggagagaat

SEQ ID NO: 20567 - DNA, 20 bp, synthetic construct
  source 1..20: mol_type = other DNA
gaaaagagcaaagatgtgaa

SEQ ID NO: 20568 - DNA, 20 bp, synthetic construct
  source 1..20: mol_type = other DNA
gaacctctacctgttaggtg

SEQ ID NO: 20569 - DNA, 20 bp, synthetic construct
  source 1..20: mol_type = other DNA
gccaacacagagcccaccaa

SEQ ID NO: 20570 - DNA, 20 bp, synthetic construct
  source 1..20: mol_type = other DNA
gtaccacacctaacaggtag

SEQ ID NO: 20571 - DNA, 20 bp, synthetic construct
  source 1..20: mol_type = other DNA
agagtgatggagtccctaga

SEQ ID NO: 20572 - DNA, 20 bp, synthetic construct
  source 1..20: mol_type = other DNA
tactagagagcccatcgcct

SEQ ID NO: 20573 - DNA, 20 bp, synthetic construct
  source 1..20: mol_type = other DNA
tccaggaggtcccaggcgat

SEQ ID NO: 20574 - DNA, 20 bp, synthetic construct
  source 1..20: mol_type = other DNA
tagagtgatggagtccctag

SEQ ID NO: 20575 - DNA, 20 bp, synthetic construct
  source 1..20: mol_type = other DNA
ttactagagagcccatcgcc

SEQ ID NO: 20576 - DNA, 20 bp, synthetic construct
  source 1..20: mol_type = other DNA
tctaacgaagatggagagta

SEQ ID NO: 20577 - DNA, 20 bp, synthetic construct
  source 1..20: mol_type = other DNA
gtccaggaggtcccaggcga

SEQ ID NO: 20578 - DNA, 20 bp, synthetic construct
  source 1..20: mol_type = other DNA
gctctctagtaagccctcta

SEQ ID NO: 20579 - DNA, 20 bp, synthetic construct
  source 1..20: mol_type = other DNA
gtgttgaacctctacctgtt

SEQ ID NO: 20580 - DNA, 20 bp, synthetic construct
  source 1..20: mol_type = other DNA
agccaacacagagcccacca

SEQ ID NO: 20581 - DNA, 20 bp, synthetic construct
  source 1..20: mol_type = other DNA
gttggctagttggcttctgg

SEQ ID NO: 20582 - DNA, 20 bp, synthetic construct
  source 1..20: mol_type = other DNA
ttggcttctggtggtccagg

SEQ ID NO: 20583 - DNA, 20 bp, synthetic construct
  source 1..20: mol_type = other DNA
ggctgacagacgcgaagcga

SEQ ID NO: 20584 - DNA, 20 bp, synthetic construct
  source 1..20: mol_type = other DNA
gacactggccaacaagaccc

SEQ ID NO: 20585 - DNA, 20 bp, synthetic construct
  source 1..20: mol_type = other DNA
tccaccgtgagccatatctg

SEQ ID NO: 20586 - DNA, 20 bp, synthetic construct
  source 1..20: mol_type = other DNA
gcatctggacggtattgtgg

SEQ ID NO: 20587 - DNA, 20 bp, synthetic construct
  source 1..20: mol_type = other DNA
cacggcgtcaaacatcaggg

SEQ ID NO: 20588 - DNA, 20 bp, synthetic construct
  source 1..20: mol_type = other DNA
acaggctgagcccctatgag

SEQ ID NO: 20589 - DNA, 20 bp, synthetic construct
  source 1..20: mol_type = other DNA
gtggtactctaaccgcaccc

SEQ ID NO: 20590 - DNA, 20 bp, synthetic construct
  source 1..20: mol_type = other DNA
ttcatgaggctggtcccgtg

SEQ ID NO: 20591 - DNA, 20 bp, synthetic construct
  source 1..20: mol_type = other DNA
ggacagccagtacgagacca

SEQ ID NO: 20592 - DNA, 20 bp, synthetic construct
  source 1..20: mol_type = other DNA
agaacccatacgtcatgcgc

SEQ ID NO: 20593 - DNA, 20 bp, synthetic construct
  source 1..20: mol_type = other DNA
agccccccacgggaaaccac

SEQ ID NO: 20594 - DNA, 20 bp, synthetic construct
  source 1..20: mol_type = other DNA
cgattggaggaactggtgcg

SEQ ID NO: 20595 - DNA, 20 bp, synthetic construct
  source 1..20: mol_type = other DNA
gatgtacttgtaaaacgctg

SEQ ID NO: 20596 - DNA, 20 bp, synthetic construct
  source 1..20: mol_type = other DNA
ataccatgtgcactcggtag

SEQ ID NO: 20597 - DNA, 20 bp, synthetic construct
  source 1..20: mol_type = other DNA
aaagatgtctacttccactc

SEQ ID NO: 20598 - DNA, 20 bp, synthetic construct
  source 1..20: mol_type = other DNA
accgcctcttcgtaacacgg

SEQ ID NO: 20599 - DNA, 20 bp, synthetic construct
  source 1..20: mol_type = other DNA
gtgagcacctcgctataggg

SEQ ID NO: 20600 - DNA, 20 bp, synthetic construct
  source 1..20: mol_type = other DNA
accaccgtgttacgaagagg

SEQ ID NO: 20601 - DNA, 20 bp, synthetic construct
  source 1..20: mol_type = other DNA
gaggtgctcacggacacgcg

SEQ ID NO: 20602 - DNA, 20 bp, synthetic construct
  source 1..20: mol_type = other DNA
gcctccaggcggctacggtg

SEQ ID NO: 20603 - DNA, 20 bp, synthetic construct
  source 1..20: mol_type = other DNA
ggacatgtccgattccgctg

SEQ ID NO: 20604 - DNA, 20 bp, synthetic construct
  source 1..20: mol_type = other DNA
ggaagggcgtgacgatcttg

SEQ ID NO: 20605 - DNA, 20 bp, synthetic construct
  source 1..20: mol_type = other DNA
gccctatagcgaggtgctca

SEQ ID NO: 20606 - DNA, 20 bp, synthetic construct
  source 1..20: mol_type = other DNA
agactgccctcgagttcgag

SEQ ID NO: 20607 - DNA, 20 bp, synthetic construct
  source 1..20: mol_type = other DNA
accgacaggtgcgtaggcgg

SEQ ID NO: 20608 - DNA, 20 bp, synthetic construct
  source 1..20: mol_type = other DNA
ccgcctcaaacggcgccagg

SEQ ID NO: 20609 - DNA, 20 bp, synthetic construct
  source 1..20: mol_type = other DNA
cccgccgcctacgcacctgt

SEQ ID NO: 20610 - DNA, 20 bp, synthetic construct
  source 1..20: mol_type = other DNA
cctcctggcgccgtttgagg

SEQ ID NO: 20611 - DNA, 20 bp, synthetic construct
  source 1..20: mol_type = other DNA
cgtgagccggcgcctccagg

SEQ ID NO: 20612 - DNA, 20 bp, synthetic construct
  source 1..20: mol_type = other DNA
gccggcttctggctcatctg

SEQ ID NO: 20613 - DNA, 20 bp, synthetic construct
  source 1..20: mol_type = other DNA
ccagccagtcgagcaagtgc

SEQ ID NO: 20614 - DNA, 20 bp, synthetic construct
  source 1..20: mol_type = other DNA
gagctcatccggcgcacgtg

SEQ ID NO: 20615 - DNA, 20 bp, synthetic construct
  source 1..20: mol_type = other DNA
tgagcagaaagcgcgcgtgc

SEQ ID NO: 20616 - DNA, 20 bp, synthetic construct
  source 1..20: mol_type = other DNA
aggaagtcctggatgcgcgc

SEQ ID NO: 20617 - DNA, 20 bp, synthetic construct
  source 1..20: mol_type = other DNA
gaggcgttcgccacgcacgg

SEQ ID NO: 20618 - DNA, 20 bp, synthetic construct
  source 1..20: mol_type = other DNA
gacgcaccggccaagtgcgc

SEQ ID NO: 20619 - DNA, 20 bp, synthetic construct
  source 1..20: mol_type = other DNA
gggtcccaccgacgctcccg

SEQ ID NO: 20620 - DNA, 20 bp, synthetic construct
  source 1..20: mol_type = other DNA
ggcaagagcgcagctacggc

SEQ ID NO: 20621 - DNA, 20 bp, synthetic construct
  source 1..20: mol_type = other DNA
ctgcaggaagcggactacgt

SEQ ID NO: 20622 - DNA, 20 bp, synthetic construct
  source 1..20: mol_type = other DNA
gggtgcccaatagaaagagg

SEQ ID NO: 20623 - DNA, 20 bp, synthetic construct
  source 1..20: mol_type = other DNA
tcgcgtcgctcgtagtgctc

SEQ ID NO: 20624 - DNA, 20 bp, synthetic construct
  source 1..20: mol_type = other DNA
gaacgcctcggcgaacgcca

SEQ ID NO: 20625 - DNA, 20 bp, synthetic construct
  source 1..20: mol_type = other DNA
ggcggcagtggcggtaccgc

SEQ ID NO: 20626 - DNA, 20 bp, synthetic construct
  source 1..20: mol_type = other DNA
gccggtgcgtcccaaagcag

SEQ ID NO: 20627 - DNA, 20 bp, synthetic construct
  source 1..20: mol_type = other DNA
gcacggcgacgtgctgcagt

SEQ ID NO: 20628 - DNA, 20 bp, synthetic construct
  source 1..20: mol_type = other DNA
gcctgaggcgtggaaacacg

SEQ ID NO: 20629 - DNA, 20 bp, synthetic construct
  source 1..20: mol_type = other DNA
ctgtcctttagtatcaagtg

SEQ ID NO: 20630 - DNA, 20 bp, synthetic construct
  source 1..20: mol_type = other DNA
gccagcattcgaacaaacgt

SEQ ID NO: 20631 - DNA, 20 bp, synthetic construct
  source 1..20: mol_type = other DNA
ggtgaatgagccctacgaga

SEQ ID NO: 20632 - DNA, 20 bp, synthetic construct
  source 1..20: mol_type = other DNA
actcaccggttctgcagtag

SEQ ID NO: 20633 - DNA, 20 bp, synthetic construct
  source 1..20: mol_type = other DNA
tgtatattcagggctccctc

SEQ ID NO: 20634 - DNA, 20 bp, synthetic construct
  source 1..20: mol_type = other DNA
tgaatggtaccttccaattg

SEQ ID NO: 20635 - DNA, 20 bp, synthetic construct
  source 1..20: mol_type = other DNA
gaggccagtaaaaatgaaac

SEQ ID NO: 20636 - DNA, 20 bp, synthetic construct
  source 1..20: mol_type = other DNA
tcgaagccaagtgctcagca

SEQ ID NO: 20637 - DNA, 20 bp, synthetic construct
  source 1..20: mol_type = other DNA
caaaccagatcttggcacgc

SEQ ID NO: 20638 - DNA, 20 bp, synthetic construct
  source 1..20: mol_type = other DNA
agtggggcagctgtattctg

SEQ ID NO: 20639 - DNA, 20 bp, synthetic construct
  source 1..20: mol_type = other DNA
ggtagatcttgtgtgtgtac

SEQ ID NO: 20640 - DNA, 20 bp, synthetic construct
  source 1..20: mol_type = other DNA
atgccgcatacctctgcagg

SEQ ID NO: 20641 - DNA, 20 bp, synthetic construct
  source 1..20: mol_type = other DNA
ggtgcataagctggagcctg

SEQ ID NO: 20642 - DNA, 20 bp, synthetic construct
  source 1..20: mol_type = other DNA
cctgcctgtgtctgtagatg

SEQ ID NO: 20643 - DNA, 20 bp, synthetic construct
  source 1..20: mol_type = other DNA
cttctggcgcgcgatagcag

SEQ ID NO: 20644 - DNA, 20 bp, synthetic construct
  source 1..20: mol_type = other DNA
gtccggaatatcagaagcgc

SEQ ID NO: 20645 - DNA, 20 bp, synthetic construct
  source 1..20: mol_type = other DNA
aaggggcgctggctctacaa

SEQ ID NO: 20646 - DNA, 20 bp, synthetic construct
  source 1..20: mol_type = other DNA
tgagcgcgaagccgccacgc

SEQ ID NO: 20647 - DNA, 20 bp, synthetic construct
  source 1..20: mol_type = other DNA
acggctgcgctggctaccca

SEQ ID NO: 20648 - DNA, 20 bp, synthetic construct
  source 1..20: mol_type = other DNA
gacaacctgcgccacggcta

SEQ ID NO: 20649 - DNA, 20 bp, synthetic construct
  source 1..20: mol_type = other DNA
ggtacttgccctcctcgcgg

SEQ ID NO: 20650 - DNA, 20 bp, synthetic construct
  source 1..20: mol_type = other DNA
cagcggcgagcgcaccacca

SEQ ID NO: 20651 - DNA, 20 bp, synthetic construct
  source 1..20: mol_type = other DNA
aggagccagagtattcgccc

SEQ ID NO: 20652 - DNA, 20 bp, synthetic construct
  source 1..20: mol_type = other DNA
ggagccagggcaaacggcat

SEQ ID NO: 20653 - DNA, 20 bp, synthetic construct
  source 1..20: mol_type = other DNA
ccataggacaagccacgcca

SEQ ID NO: 20654 - DNA, 20 bp, synthetic construct
  source 1..20: mol_type = other DNA
caacaaggtccgccagaaag

SEQ ID NO: 20655 - DNA, 20 bp, synthetic construct
  source 1..20: mol_type = other DNA
ggcgtgagcgaacgctccag

SEQ ID NO: 20656 - DNA, 20 bp, synthetic construct
  source 1..20: mol_type = other DNA
caagtaccgccacaacgtgc

SEQ ID NO: 20657 - DNA, 20 bp, synthetic construct
  source 1..20: mol_type = other DNA
gcagcgcgccccgctggaag

SEQ ID NO: 20658 - DNA, 20 bp, synthetic construct
  source 1..20: mol_type = other DNA
agaacggctacaatctccgg

SEQ ID NO: 20659 - DNA, 20 bp, synthetic construct
  source 1..20: mol_type = other DNA
tggtgaccacgaccgcctcg

SEQ ID NO: 20660 - DNA, 20 bp, synthetic construct
  source 1..20: mol_type = other DNA
gcatcttcatagcacccgag

SEQ ID NO: 20661 - DNA, 20 bp, synthetic construct
  source 1..20: mol_type = other DNA
ggcgcacagagcgcagatgt

SEQ ID NO: 20662 - DNA, 20 bp, synthetic construct
  source 1..20: mol_type = other DNA
ctccaaggcagacgcgaccg

SEQ ID NO: 20663 - DNA, 20 bp, synthetic construct
  source 1..20: mol_type = other DNA
caggtggtagacgtcgcgga

SEQ ID NO: 20664 - DNA, 20 bp, synthetic construct
  source 1..20: mol_type = other DNA
ccgagtgcgacagcttgtgt

SEQ ID NO: 20665 - DNA, 20 bp, synthetic construct
  source 1..20: mol_type = other DNA
tgctatgaagatgccgacca

SEQ ID NO: 20666 - DNA, 20 bp, synthetic construct
  source 1..20: mol_type = other DNA
ccctgccgccgcctctacgg

SEQ ID NO: 20667 - DNA, 20 bp, synthetic construct
  source 1..20: mol_type = other DNA
cgccgccgcggcgatagtgg

SEQ ID NO: 20668 - DNA, 20 bp, synthetic construct
  source 1..20: mol_type = other DNA
cgaggttggggctacgacgg

SEQ ID NO: 20669 - DNA, 20 bp, synthetic construct
  source 1..20: mol_type = other DNA
ggccggccttggctcccgtg

SEQ ID NO: 20670 - DNA, 20 bp, synthetic construct
  source 1..20: mol_type = other DNA
cgtggtcaccacgccaccgg

SEQ ID NO: 20671 - DNA, 20 bp, synthetic construct
  source 1..20: mol_type = other DNA
aaccatgcctgcgagatgtg

SEQ ID NO: 20672 - DNA, 20 bp, synthetic construct
  source 1..20: mol_type = other DNA
ccgccggctccgctcagctg

SEQ ID NO: 20673 - DNA, 20 bp, synthetic construct
  source 1..20: mol_type = other DNA
gagaagccgatcaccaacag

SEQ ID NO: 20674 - DNA, 20 bp, synthetic construct
  source 1..20: mol_type = other DNA
agccagctgagatgttgcgg

SEQ ID NO: 20675 - DNA, 20 bp, synthetic construct
  source 1..20: mol_type = other DNA
tgtggagttggacgcagtgt

SEQ ID NO: 20676 - DNA, 20 bp, synthetic construct
  source 1..20: mol_type = other DNA
gaggaactccacgcagccta

SEQ ID NO: 20677 - DNA, 20 bp, synthetic construct
  source 1..20: mol_type = other DNA
gggcctcaatctcatccgtg

SEQ ID NO: 20678 - DNA, 20 bp, synthetic construct
  source 1..20: mol_type = other DNA
gcagagcatggtacctcatg

SEQ ID NO: 20679 - DNA, 20 bp, synthetic construct
  source 1..20: mol_type = other DNA
gatctcgtggtagtccatgt

SEQ ID NO: 20680 - DNA, 20 bp, synthetic construct
  source 1..20: mol_type = other DNA
gcagctacaaccttcaggag

SEQ ID NO: 20681 - DNA, 20 bp, synthetic construct
  source 1..20: mol_type = other DNA
attctgtctgcctagaaccc

SEQ ID NO: 20682 - DNA, 20 bp, synthetic construct
  source 1..20: mol_type = other DNA
gttgctcctggacaaaaacc

SEQ ID NO: 20683 - DNA, 20 bp, synthetic construct
  source 1..20: mol_type = other DNA
cagtgggtgatggatgtggt

SEQ ID NO: 20684 - DNA, 20 bp, synthetic construct
  source 1..20: mol_type = other DNA
ggccctggggtgtcttgcgg

SEQ ID NO: 20685 - DNA, 20 bp, synthetic construct
  source 1..20: mol_type = other DNA
gctttggcagcaattccacg

SEQ ID NO: 20686 - DNA, 20 bp, synthetic construct
  source 1..20: mol_type = other DNA
agtcttcctccccatagctg

SEQ ID NO: 20687 - DNA, 20 bp, synthetic construct
  source 1..20: mol_type = other DNA
gtcctcaaaccggtgacctg

SEQ ID NO: 20688 - DNA, 20 bp, synthetic construct
  source 1..20: mol_type = other DNA
gtggtgagcagtaatgcttg

SEQ ID NO: 20689 - DNA, 20 bp, synthetic construct
  source 1..20: mol_type = other DNA
tggatggctgctcatcggcg

SEQ ID NO: 20690 - DNA, 20 bp, synthetic construct
  source 1..20: mol_type = other DNA
tcgtggccgagtgccagcac

SEQ ID NO: 20691 - DNA, 20 bp, synthetic construct
  source 1..20: mol_type = other DNA
gccaatgatgaagagcacca

SEQ ID NO: 20692 - DNA, 20 bp, synthetic construct
  source 1..20: mol_type = other DNA
caacctgtcagacttccggg

SEQ ID NO: 20693 - DNA, 20 bp, synthetic construct
  source 1..20: mol_type = other DNA
tcaggtatgagtcccaggta

SEQ ID NO: 20694 - DNA, 20 bp, synthetic construct
  source 1..20: mol_type = other DNA
tcatcctcaacaaccacacc

SEQ ID NO: 20695 - DNA, 20 bp, synthetic construct
  source 1..20: mol_type = other DNA
ccggaactacctgtacgggc

SEQ ID NO: 20696 - DNA, 20 bp, synthetic construct
  source 1..20: mol_type = other DNA
ccgtacaggtagttccgggc

SEQ ID NO: 20697 - DNA, 20 bp, synthetic construct
  source 1..20: mol_type = other DNA
cgtggacccttcctcactca

SEQ ID NO: 20698 - DNA, 20 bp, synthetic construct
  source 1..20: mol_type = other DNA
gggactcatacctgagcctg

SEQ ID NO: 20699 - DNA, 20 bp, synthetic construct
  source 1..20: mol_type = other DNA
ttcaacggcctggtggcact

SEQ ID NO: 20700 - DNA, 20 bp, synthetic construct
  source 1..20: mol_type = other DNA
gagatgacagaccaggtgac

SEQ ID NO: 20701 - DNA, 20 bp, synthetic construct
  source 1..20: mol_type = other DNA
caaccacacctggaacctcg

SEQ ID NO: 20702 - DNA, 20 bp, synthetic construct
  source 1..20: mol_type = other DNA
gggccacagccgcacgtccc

SEQ ID NO: 20703 - DNA, 20 bp, synthetic construct
  source 1..20: mol_type = other DNA
gctgcatcagtcaaacaccg

SEQ ID NO: 20704 - DNA, 20 bp, synthetic construct
  source 1..20: mol_type = other DNA
gagctgcatcagtcaaacac

SEQ ID NO: 20705 - DNA, 20 bp, synthetic construct
  source 1..20: mol_type = other DNA
aaagtcgggatcctacacct

SEQ ID NO: 20706 - DNA, 20 bp, synthetic construct
  source 1..20: mol_type = other DNA
ggtgaagataatacctaaag

SEQ ID NO: 20707 - DNA, 20 bp, synthetic construct
  source 1..20: mol_type = other DNA
cccaaatccagatttatccc

SEQ ID NO: 20708 - DNA, 20 bp, synthetic construct
  source 1..20: mol_type = other DNA
caggatacagctgagatccc

SEQ ID NO: 20709 - DNA, 20 bp, synthetic construct
  source 1..20: mol_type = other DNA
tattatcttcaccttgacgc

SEQ ID NO: 20710 - DNA, 20 bp, synthetic construct
  source 1..20: mol_type = other DNA
tttgaagtgcgcgacatgga

SEQ ID NO: 20711 - DNA, 20 bp, synthetic construct
  source 1..20: mol_type = other DNA
tcaaacaccggggataaatc

SEQ ID NO: 20712 - DNA, 20 bp, synthetic construct
  source 1..20: mol_type = other DNA
tctgtctgctgcccaggtgt

SEQ ID NO: 20713 - DNA, 20 bp, synthetic construct
  source 1..20: mol_type = other DNA
ataaatctggatttgggttc

SEQ ID NO: 20714 - DNA, 20 bp, synthetic construct
  source 1..20: mol_type = other DNA
agctgcatcagtcaaacacc

SEQ ID NO: 20715 - DNA, 20 bp, synthetic construct
  source 1..20: mol_type = other DNA
aagaaccagcagctgaaagt

SEQ ID NO: 20716 - DNA, 20 bp, synthetic construct
  source 1..20: mol_type = other DNA
cactgtaaaatgccagaagc

SEQ ID NO: 20717 - DNA, 20 bp, synthetic construct
  source 1..20: mol_type = other DNA
gcagcagacagaagaagatc

SEQ ID NO: 20718 - DNA, 20 bp, synthetic construct
  source 1..20: mol_type = other DNA
gttacgcatgatctgcacga

SEQ ID NO: 20719 - DNA, 20 bp, synthetic construct
  source 1..20: mol_type = other DNA
acgctggtgacacagaacag

SEQ ID NO: 20720 - DNA, 20 bp, synthetic construct
  source 1..20: mol_type = other DNA
ctgcatggtacgcacgacag

SEQ ID NO: 20721 - DNA, 20 bp, synthetic construct
  source 1..20: mol_type = other DNA
tgagcatgcggaccagagca

SEQ ID NO: 20722 - DNA, 20 bp, synthetic construct
  source 1..20: mol_type = other DNA
gtagttgatgagatgcacaa

SEQ ID NO: 20723 - DNA, 20 bp, synthetic construct
  source 1..20: mol_type = other DNA
cacatctgagaggttgcgca

SEQ ID NO: 20724 - DNA, 20 bp, synthetic construct
  source 1..20: mol_type = other DNA
tagaacaggaccgactccac

SEQ ID NO: 20725 - DNA, 20 bp, synthetic construct
  source 1..20: mol_type = other DNA
tagcaccttgagcacacgac

SEQ ID NO: 20726 - DNA, 20 bp, synthetic construct
  source 1..20: mol_type = other DNA
tgtgaaccagctgtcgaaga

SEQ ID NO: 20727 - DNA, 20 bp, synthetic construct
  source 1..20: mol_type = other DNA
ctggtactccagatcacctg

SEQ ID NO: 20728 - DNA, 20 bp, synthetic construct
  source 1..20: mol_type = other DNA
ttacccatagctgatcatcc

SEQ ID NO: 20729 - DNA, 20 bp, synthetic construct
  source 1..20: mol_type = other DNA
caccaaactgctcaacgacg

SEQ ID NO: 20730 - DNA, 20 bp, synthetic construct
  source 1..20: mol_type = other DNA
tgtcctcgcctgacacacca

SEQ ID NO: 20731 - DNA, 20 bp, synthetic construct
  source 1..20: mol_type = other DNA
gggttgttcttgttgagcag

SEQ ID NO: 20732 - DNA, 20 bp, synthetic construct
  source 1..20: mol_type = other DNA
tgagcagcttcacgatggct

SEQ ID NO: 20733 - DNA, 20 bp, synthetic construct
  source 1..20: mol_type = other DNA
agagctgcagagagacaagg

SEQ ID NO: 20734 - DNA, 20 bp, synthetic construct
  source 1..20: mol_type = other DNA
gagtcacccgttctacgacg

SEQ ID NO: 20735 - DNA, 20 bp, synthetic construct
  source 1..20: mol_type = other DNA
gtcactgtgaacctcagcac

SEQ ID NO: 20736 - DNA, 20 bp, synthetic construct
  source 1..20: mol_type = other DNA
agagtgacgcatacctgatg

SEQ ID NO: 20737 - DNA, 20 bp, synthetic construct
  source 1..20: mol_type = other DNA
cttaccgcaaaacttcggga

SEQ ID NO: 20738 - DNA, 20 bp, synthetic construct
  source 1..20: mol_type = other DNA
ctcaccggacgccctcgttg

SEQ ID NO: 20739 - DNA, 20 bp, synthetic construct
  source 1..20: mol_type = other DNA
cccgtagtggaaatagacga

SEQ ID NO: 20740 - DNA, 20 bp, synthetic construct
  source 1..20: mol_type = other DNA
ggtgttcgtggagctcactc

SEQ ID NO: 20741 - DNA, 20 bp, synthetic construct
  source 1..20: mol_type = other DNA
gaacttgaaggccctctacg

SEQ ID NO: 20742 - DNA, 20 bp, synthetic construct
  source 1..20: mol_type = other DNA
ggacaagattcgcttctatg

SEQ ID NO: 20743 - DNA, 20 bp, synthetic construct
  source 1..20: mol_type = other DNA
agtgaggaagaggccctcgg

SEQ ID NO: 20744 - DNA, 20 bp, synthetic construct
  source 1..20: mol_type = other DNA
tgcccccagcatccacaacg

SEQ ID NO: 20745 - DNA, 20 bp, synthetic construct
  source 1..20: mol_type = other DNA
actgacgccaaactgctgtg

SEQ ID NO: 20746 - DNA, 20 bp, synthetic construct
  source 1..20: mol_type = other DNA
agcaagacccacctacctgc

SEQ ID NO: 20747 - DNA, 20 bp, synthetic construct
  source 1..20: mol_type = other DNA
agaagcgaatcttgtcccga

SEQ ID NO: 20748 - DNA, 20 bp, synthetic construct
  source 1..20: mol_type = other DNA
cctgaagcagtagtatcccc

SEQ ID NO: 20749 - DNA, 20 bp, synthetic construct
  source 1..20: mol_type = other DNA
agagggtcaagactatctga

SEQ ID NO: 20750 - DNA, 20 bp, synthetic construct
  source 1..20: mol_type = other DNA
gaattaaggaatgcctgtcg

SEQ ID NO: 20751 - DNA, 20 bp, synthetic construct
  source 1..20: mol_type = other DNA
agcactgcgaggagtacgga

SEQ ID NO: 20752 - DNA, 20 bp, synthetic construct
  source 1..20: mol_type = other DNA
gtcgggtttgacatcaactg

SEQ ID NO: 20753 - DNA, 20 bp, synthetic construct
  source 1..20: mol_type = other DNA
aatgtggtcaaacatagctt

SEQ ID NO: 20754 - DNA, 20 bp, synthetic construct
  source 1..20: mol_type = other DNA
cctccaaagtgagttacctg

SEQ ID NO: 20755 - DNA, 20 bp, synthetic construct
  source 1..20: mol_type = other DNA
gggcatcgaccataagggac

SEQ ID NO: 20756 - DNA, 20 bp, synthetic construct
  source 1..20: mol_type = other DNA
ctgacgggttaagaaggtca

SEQ ID NO: 20757 - DNA, 20 bp, synthetic construct
  source 1..20: mol_type = other DNA
caaagtctagaatatacctg

SEQ ID NO: 20758 - DNA, 20 bp, synthetic construct
  source 1..20: mol_type = other DNA
atgatccacagtggaagcag

SEQ ID NO: 20759 - DNA, 20 bp, synthetic construct
  source 1..20: mol_type = other DNA
cacatgaacaattccaggca

SEQ ID NO: 20760 - DNA, 20 bp, synthetic construct
  source 1..20: mol_type = other DNA
catggaagagcggttgaccc

SEQ ID NO: 20761 - DNA, 20 bp, synthetic construct
  source 1..20: mol_type = other DNA
tgctcgaatcgcttccccag

SEQ ID NO: 20762 - DNA, 20 bp, synthetic construct
  source 1..20: mol_type = other DNA
aagtgatgtccagcctgtga

SEQ ID NO: 20763 - DNA, 20 bp, synthetic construct
  source 1..20: mol_type = other DNA
ggaacggtcatcccactcgg

SEQ ID NO: 20764 - DNA, 20 bp, synthetic construct
  source 1..20: mol_type = other DNA
gatgttacgcatgatcatgg

SEQ ID NO: 20765 - DNA, 20 bp, synthetic construct
  source 1..20: mol_type = other DNA
aagactcgtaggaatcgatg

SEQ ID NO: 20766 - DNA, 20 bp, synthetic construct
  source 1..20: mol_type = other DNA
tggggtcccacacaactctg

SEQ ID NO: 20767 - DNA, 20 bp, synthetic construct
  source 1..20: mol_type = other DNA
ctctggcgctagataccctg

SEQ ID NO: 20768 - DNA, 20 bp, synthetic construct
  source 1..20: mol_type = other DNA
accctaaggacgtcatcggc

SEQ ID NO: 20769 - DNA, 20 bp, synthetic construct
  source 1..20: mol_type = other DNA
ttccagcagagaccgcatga

SEQ ID NO: 20770 - DNA, 20 bp, synthetic construct
  source 1..20: mol_type = other DNA
tagctcgatgaacacaacgg

SEQ ID NO: 20771 - DNA, 20 bp, synthetic construct
  source 1..20: mol_type = other DNA
agagatccttaaatgctcca

SEQ ID NO: 20772 - DNA, 20 bp, synthetic construct
  source 1..20: mol_type = other DNA
tccatggatgaaacccaccc

SEQ ID NO: 20773 - DNA, 20 bp, synthetic construct
  source 1..20: mol_type = other DNA
gtaacatcaggatctgccgc

SEQ ID NO: 20774 - DNA, 20 bp, synthetic construct
  source 1..20: mol_type = other DNA
taatcttcaccgcaaactcg

SEQ ID NO: 20775 - DNA, 20 bp, synthetic construct
  source 1..20: mol_type = other DNA
agagacacacatccttcgcc

SEQ ID NO: 20776 - DNA, 20 bp, synthetic construct
  source 1..20: mol_type = other DNA
gcttctcgccaggttccaag

SEQ ID NO: 20777 - DNA, 20 bp, synthetic construct
  source 1..20: mol_type = other DNA
gatgtgtgtctctcgccgtg

SEQ ID NO: 20778 - DNA, 20 bp, synthetic construct
  source 1..20: mol_type = other DNA
ggaccgcgtcatgattgagg

SEQ ID NO: 20779 - DNA, 20 bp, synthetic construct
  source 1..20: mol_type = other DNA
cgcccacctcaatcatgacg

SEQ ID NO: 20780 - DNA, 20 bp, synthetic construct
  source 1..20: mol_type = other DNA
gatgctgaccttctacagcg

SEQ ID NO: 20781 - DNA, 20 bp, synthetic construct
  source 1..20: mol_type = other DNA
tcactctagcaagaatgctg

SEQ ID NO: 20782 - DNA, 20 bp, synthetic construct
  source 1..20: mol_type = other DNA
gtggtgggcctgctagttgt

SEQ ID NO: 20783 - DNA, 20 bp, synthetic construct
  source 1..20: mol_type = other DNA
tacagcgcggacaccgacca

SEQ ID NO: 20784 - DNA, 20 bp, synthetic construct
  source 1..20: mol_type = other DNA
tcgccgggctcacgtagtca

SEQ ID NO: 20785 - DNA, 20 bp, synthetic construct
  source 1..20: mol_type = other DNA
cgagaagggatctccagttg

SEQ ID NO: 20786 - DNA, 20 bp, synthetic construct
  source 1..20: mol_type = other DNA
caatcatgacgcggtcccag

SEQ ID NO: 20787 - DNA, 20 bp, synthetic construct
  source 1..20: mol_type = other DNA
cttggtgatcagggatgggt

SEQ ID NO: 20788 - DNA, 20 bp, synthetic construct
  source 1..20: mol_type = other DNA
gtgaagttcacccagtccat

SEQ ID NO: 20789 - DNA, 20 bp, synthetic construct
  source 1..20: mol_type = other DNA
tgggtatacacggtactggt

SEQ ID NO: 20790 - DNA, 20 bp, synthetic construct
  source 1..20: mol_type = other DNA
actgatgggagtctcaggca

SEQ ID NO: 20791 - DNA, 20 bp, synthetic construct
  source 1..20: mol_type = other DNA
gtgggtgtaggacgtgatgc

SEQ ID NO: 20792 - DNA, 20 bp, synthetic construct
  source 1..20: mol_type = other DNA
gagtctcaccgtgaggacca

SEQ ID NO: 20793 - DNA, 20 bp, synthetic construct
  source 1..20: mol_type = other DNA
gccagacccaggctcactcg

SEQ ID NO: 20794 - DNA, 20 bp, synthetic construct
  source 1..20: mol_type = other DNA
actccaacgactatgacacc

SEQ ID NO: 20795 - DNA, 20 bp, synthetic construct
  source 1..20: mol_type = other DNA
ccccgacactcccataccgc

SEQ ID NO: 20796 - DNA, 20 bp, synthetic construct
  source 1..20: mol_type = other DNA
aggatgcgatcggtccatgc

SEQ ID NO: 20797 - DNA, 20 bp, synthetic construct
  source 1..20: mol_type = other DNA
gaggggaaagcacatccatg

SEQ ID NO: 20798 - DNA, 20 bp, synthetic construct
  source 1..20: mol_type = other DNA
ccagtacccaaacaggccag

SEQ ID NO: 20799 - DNA, 20 bp, synthetic construct
  source 1..20: mol_type = other DNA
tgacatatatgttattgggt

SEQ ID NO: 20800 - DNA, 20 bp, synthetic construct
  source 1..20: mol_type = other DNA
ggatcccctgcatacggaca

SEQ ID NO: 20801 - DNA, 20 bp, synthetic construct
  source 1..20: mol_type = other DNA
taaaggcagcatcggaaagg

SEQ ID NO: 20802 - DNA, 20 bp, synthetic construct
  source 1..20: mol_type = other DNA
aggtcactgagatctagagg

SEQ ID NO: 20803 - DNA, 20 bp, synthetic construct
  source 1..20: mol_type = other DNA
tggagatgcagaattgtgag

SEQ ID NO: 20804 - DNA, 20 bp, synthetic construct
  source 1..20: mol_type = other DNA
ggaccgatcgcatcctgtgg

SEQ ID NO: 20805 - DNA, 20 bp, synthetic construct
  source 1..20: mol_type = other DNA
gttcctatcaaacttgtagg

SEQ ID NO: 20806 - DNA, 20 bp, synthetic construct
  source 1..20: mol_type = other DNA
tgtaggtgggcgggaagagt

SEQ ID NO: 20807 - DNA, 20 bp, synthetic construct
  source 1..20: mol_type = other DNA
atgctgcctttaatgactcg

SEQ ID NO: 20808 - DNA, 20 bp, synthetic construct
  source 1..20: mol_type = other DNA
ggccagcgcgtgcatatagg

SEQ ID NO: 20809 - DNA, 20 bp, synthetic construct
  source 1..20: mol_type = other DNA
cgacacgtacccactctcgg

SEQ ID NO: 20810 - DNA, 20 bp, synthetic construct
  source 1..20: mol_type = other DNA
gcccgcggcctacgacgcag

SEQ ID NO: 20811 - DNA, 20 bp, synthetic construct
  source 1..20: mol_type = other DNA
atcaaagtgaccgtcaggca

SEQ ID NO: 20812 - DNA, 20 bp, synthetic construct
  source 1..20: mol_type = other DNA
gaccccctatatgcacgcgc

SEQ ID NO: 20813 - DNA, 20 bp, synthetic construct
  source 1..20: mol_type = other DNA
ggccccacggcagacacaca

SEQ ID NO: 20814 - DNA, 20 bp, synthetic construct
  source 1..20: mol_type = other DNA
caccttgtgtgtctgccgtg

SEQ ID NO: 20815 - DNA, 20 bp, synthetic construct
  source 1..20: mol_type = other DNA
tggatcatcgagtgcaatga

SEQ ID NO: 20816 - DNA, 20 bp, synthetic construct
  source 1..20: mol_type = other DNA
tgggtgccacatcctcccac

SEQ ID NO: 20817 - DNA, 20 bp, synthetic construct
  source 1..20: mol_type = other DNA
gcaatgacggcgtcttccag

SEQ ID NO: 20818 - DNA, 20 bp, synthetic construct
  source 1..20: mol_type = other DNA
cgggcgccgccccccacgcg

SEQ ID NO: 20819 - DNA, 20 bp, synthetic construct
  source 1..20: mol_type = other DNA
cgcagcgtcaaaggtgcagg

SEQ ID NO: 20820 - DNA, 20 bp, synthetic construct
  source 1..20: mol_type = other DNA
gtctcccagcgctccatcac

SEQ ID NO: 20821 - DNA, 20 bp, synthetic construct
  source 1..20: mol_type = other DNA
gatgatccaatgctcatcaa

SEQ ID NO: 20822 - DNA, 20 bp, synthetic construct
  source 1..20: mol_type = other DNA
acccactctcggaggagacc

SEQ ID NO: 20823 - DNA, 20 bp, synthetic construct
  source 1..20: mol_type = other DNA
tccgcaacgacatcgagtgg

SEQ ID NO: 20824 - DNA, 20 bp, synthetic construct
  source 1..20: mol_type = other DNA
caacatcgttgtctaacccg

SEQ ID NO: 20825 - DNA, 20 bp, synthetic construct
  source 1..20: mol_type = other DNA
tggacttgagaagcacgtag

SEQ ID NO: 20826 - DNA, 20 bp, synthetic construct
  source 1..20: mol_type = other DNA
tggctgtacatgtcccgaga

SEQ ID NO: 20827 - DNA, 20 bp, synthetic construct
  source 1..20: mol_type = other DNA
cattggcgcttcccgagtcg

SEQ ID NO: 20828 - DNA, 20 bp, synthetic construct
  source 1..20: mol_type = other DNA
cccgggttagacaacgatgt

SEQ ID NO: 20829 - DNA, 20 bp, synthetic construct
  source 1..20: mol_type = other DNA
gggcgcgaaaaagctgccat

SEQ ID NO: 20830 - DNA, 20 bp, synthetic construct
  source 1..20: mol_type = other DNA
cattggcgccgtgaacaaca

SEQ ID NO: 20831 - DNA, 20 bp, synthetic construct
  source 1..20: mol_type = other DNA
ccccccactcgatgtcgttg

SEQ ID NO: 20832 - DNA, 20 bp, synthetic construct
  source 1..20: mol_type = other DNA
tctaacccggggtcagccag

SEQ ID NO: 20833 - DNA, 20 bp, synthetic construct
  source 1..20: mol_type = other DNA
ccctcctcgctcccagccgg

SEQ ID NO: 20834 - DNA, 20 bp, synthetic construct
  source 1..20: mol_type = other DNA
ggcgccaatgaagcgattca

SEQ ID NO: 20835 - DNA, 20 bp, synthetic construct
  source 1..20: mol_type = other DNA
tccaccggctgggagcgagg

SEQ ID NO: 20836 - DNA, 20 bp, synthetic construct
  source 1..20: mol_type = other DNA
agacaacgatgttggcgtgg

SEQ ID NO: 20837 - DNA, 20 bp, synthetic construct
  source 1..20: mol_type = other DNA
cgtgaacaacatggaccaga

SEQ ID NO: 20838 - DNA, 20 bp, synthetic construct
  source 1..20: mol_type = other DNA
agtcaagattgaccagaccg

SEQ ID NO: 20839 - DNA, 20 bp, synthetic construct
  source 1..20: mol_type = other DNA
ggccaagatcgaccagaacg

SEQ ID NO: 20840 - DNA, 20 bp, synthetic construct
  source 1..20: mol_type = other DNA
caggcgttcatgcagctcgg

SEQ ID NO: 20841 - DNA, 20 bp, synthetic construct
  source 1..20: mol_type = other DNA
ggagaagtgaacacttacgc

SEQ ID NO: 20842 - DNA, 20 bp, synthetic construct
  source 1..20: mol_type = other DNA
tgaggtgagccagaagatcg

SEQ ID NO: 20843 - DNA, 20 bp, synthetic construct
  source 1..20: mol_type = other DNA
cagcctggctccctatgctc

SEQ ID NO: 20844 - DNA, 20 bp, synthetic construct
  source 1..20: mol_type = other DNA
gctgagcaacaatgccaagg

SEQ ID NO: 20845 - DNA, 20 bp, synthetic construct
  source 1..20: mol_type = other DNA
tggctcacctcattggcatg

SEQ ID NO: 20846 - DNA, 20 bp, synthetic construct
  source 1..20: mol_type = other DNA
gccttgagctcgtcggcgtg

SEQ ID NO: 20847 - DNA, 20 bp, synthetic construct
  source 1..20: mol_type = other DNA
ccagatgaagaagaacgccg

SEQ ID NO: 20848 - DNA, 20 bp, synthetic construct
  source 1..20: mol_type = other DNA
tccctcttacttgagttgct

SEQ ID NO: 20849 - DNA, 20 bp, synthetic construct
  source 1..20: mol_type = other DNA
gaccccctacgcacagcgca

SEQ ID NO: 20850 - DNA, 20 bp, synthetic construct
  source 1..20: mol_type = other DNA
tgaggtcagtgctgaccagg

SEQ ID NO: 20851 - DNA, 20 bp, synthetic construct
  source 1..20: mol_type = other DNA
gagcatagggagccaggctg

SEQ ID NO: 20852 - DNA, 20 bp, synthetic construct
  source 1..20: mol_type = other DNA
ggaaggtcaggccctcaagc

SEQ ID NO: 20853 - DNA, 20 bp, synthetic construct
  source 1..20: mol_type = other DNA
atggtgtggagcactttgtg

SEQ ID NO: 20854 - DNA, 20 bp, synthetic construct
  source 1..20: mol_type = other DNA
gaaggtaggaatcaaagatc

SEQ ID NO: 20855 - DNA, 20 bp, synthetic construct
  source 1..20: mol_type = other DNA
taattctctggagcatatga

SEQ ID NO: 20856 - DNA, 20 bp, synthetic construct
  source 1..20: mol_type = other DNA
gtgcatctctgtctgaaggt

SEQ ID NO: 20857 - DNA, 20 bp, synthetic construct
  source 1..20: mol_type = other DNA
tggcgagtaactgtagtcta

SEQ ID NO: 20858 - DNA, 20 bp, synthetic construct
  source 1..20: mol_type = other DNA
taaggagccagagagaatgg

SEQ ID NO: 20859 - DNA, 20 bp, synthetic construct
  source 1..20: mol_type = other DNA
acgcccaattatttgcaacg

SEQ ID NO: 20860 - DNA, 20 bp, synthetic construct
  source 1..20: mol_type = other DNA
ccttcagacagagatgcacc

SEQ ID NO: 20861 - DNA, 20 bp, synthetic construct
  source 1..20: mol_type = other DNA
gtggaattgagcaaaggctc

SEQ ID NO: 20862 - DNA, 20 bp, synthetic construct
  source 1..20: mol_type = other DNA
aagctgtctgggaaatggtg

SEQ ID NO: 20863 - DNA, 20 bp, synthetic construct
  source 1..20: mol_type = other DNA
ttgtcatttctctagatccc

SEQ ID NO: 20864 - DNA, 20 bp, synthetic construct
  source 1..20: mol_type = other DNA
ctggttaaagcagaaagggg

SEQ ID NO: 20865 - DNA, 20 bp, synthetic construct
  source 1..20: mol_type = other DNA
gcatatgaaggcagctgcac

SEQ ID NO: 20866 - DNA, 20 bp, synthetic construct
  source 1..20: mol_type = other DNA
tatgcttacggttcccccgg

SEQ ID NO: 20867 - DNA, 20 bp, synthetic construct
  source 1..20: mol_type = other DNA
gcaaagacgggcacaccagg

SEQ ID NO: 20868 - DNA, 20 bp, synthetic construct
  source 1..20: mol_type = other DNA
ccctgggcccgagtccagcg

SEQ ID NO: 20869 - DNA, 20 bp, synthetic construct
  source 1..20: mol_type = other DNA
gcgtcgggcccggttcgagg

SEQ ID NO: 20870 - DNA, 20 bp, synthetic construct
  source 1..20: mol_type = other DNA
aggaggccagcaccactcgg

SEQ ID NO: 20871 - DNA, 20 bp, synthetic construct
  source 1..20: mol_type = other DNA
gcccgacgctcgaagtgcag

SEQ ID NO: 20872 - DNA, 20 bp, synthetic construct
  source 1..20: mol_type = other DNA
ctgacgaggacaagcagtcc

SEQ ID NO: 20873 - DNA, 20 bp, synthetic construct
  source 1..20: mol_type = other DNA
aaagggtgttgggtccagct

SEQ ID NO: 20874 - DNA, 20 bp, synthetic construct
  source 1..20: mol_type = other DNA
tcttctggatcaaagggtgt

SEQ ID NO: 20875 - DNA, 20 bp, synthetic construct
  source 1..20: mol_type = other DNA
ccggttcgaggtggctgacg

SEQ ID NO: 20876 - DNA, 20 bp, synthetic construct
  source 1..20: mol_type = other DNA
tcccccatccggctccggag

SEQ ID NO: 20877 - DNA, 20 bp, synthetic construct
  source 1..20: mol_type = other DNA
gctcctacaacacctgctgc

SEQ ID NO: 20878 - DNA, 20 bp, synthetic construct
  source 1..20: mol_type = other DNA
aacctggagaacgatgagga

SEQ ID NO: 20879 - DNA, 20 bp, synthetic construct
  source 1..20: mol_type = other DNA
gcaggtgttgtaggagcgct

SEQ ID NO: 20880 - DNA, 20 bp, synthetic construct
  source 1..20: mol_type = other DNA
ggaccactgggagctgcgga

SEQ ID NO: 20881 - DNA, 20 bp, synthetic construct
  source 1..20: mol_type = other DNA
tgatggtgctgaaggaccac

SEQ ID NO: 20882 - DNA, 20 bp, synthetic construct
  source 1..20: mol_type = other DNA
ggttcacctggtagcgcagc

SEQ ID NO: 20883 - DNA, 20 bp, synthetic construct
  source 1..20: mol_type = other DNA
cagccctcaggattgcgtgg

SEQ ID NO: 20884 - DNA, 20 bp, synthetic construct
  source 1..20: mol_type = other DNA
gccagaggatgccaatcgcg

SEQ ID NO: 20885 - DNA, 20 bp, synthetic construct
  source 1..20: mol_type = other DNA
agtggacgtgagaactaaga

SEQ ID NO: 20886 - DNA, 20 bp, synthetic construct
  source 1..20: mol_type = other DNA
cgtgcacaggacgatccggt

SEQ ID NO: 20887 - DNA, 20 bp, synthetic construct
  source 1..20: mol_type = other DNA
aggacctcgagaatggccag

SEQ ID NO: 20888 - DNA, 20 bp, synthetic construct
  source 1..20: mol_type = other DNA
gcacctcgatgccataggct

SEQ ID NO: 20889 - DNA, 20 bp, synthetic construct
  source 1..20: mol_type = other DNA
gtgcggacacttatggccca

SEQ ID NO: 20890 - DNA, 20 bp, synthetic construct
  source 1..20: mol_type = other DNA
ctcccacgacgaccacgttg

SEQ ID NO: 20891 - DNA, 20 bp, synthetic construct
  source 1..20: mol_type = other DNA
acagctgcagcgaaggacca

SEQ ID NO: 20892 - DNA, 20 bp, synthetic construct
  source 1..20: mol_type = other DNA
aggttcctgggggagcgcgt

SEQ ID NO: 20893 - DNA, 20 bp, synthetic construct
  source 1..20: mol_type = other DNA
gcttgggacggtcgtaggga

SEQ ID NO: 20894 - DNA, 20 bp, synthetic construct
  source 1..20: mol_type = other DNA
tccgcactacggcgcacccc

SEQ ID NO: 20895 - DNA, 20 bp, synthetic construct
  source 1..20: mol_type = other DNA
aggggcagcgcacccgacca

SEQ ID NO: 20896 - DNA, 20 bp, synthetic construct
  source 1..20: mol_type = other DNA
tcccccaggaacctcctgaa

SEQ ID NO: 20897 - DNA, 20 bp, synthetic construct
  source 1..20: mol_type = other DNA
tctgcatgtagaacttcacc

SEQ ID NO: 20898 - DNA, 20 bp, synthetic construct
  source 1..20: mol_type = other DNA
ggcactgctcctacccacgc

SEQ ID NO: 20899 - DNA, 20 bp, synthetic construct
  source 1..20: mol_type = other DNA
gagtacttccaactctgggt

SEQ ID NO: 20900 - DNA, 20 bp, synthetic construct
  source 1..20: mol_type = other DNA
tgctcctacccacgcaggtg

SEQ ID NO: 20901 - DNA, 20 bp, synthetic construct
  source 1..20: mol_type = other DNA
cgccagggcctcacctgcgt

SEQ ID NO: 20902 - DNA, 20 bp, synthetic construct
  source 1..20: mol_type = other DNA
agggcctcacctgcgtgggt

SEQ ID NO: 20903 - DNA, 20 bp, synthetic construct
  source 1..20: mol_type = other DNA
ggacatgggcagagcaatgg

SEQ ID NO: 20904 - DNA, 20 bp, synthetic construct
  source 1..20: mol_type = other DNA
gcgccagggcctcacctgcg

SEQ ID NO: 20905 - DNA, 20 bp, synthetic construct
  source 1..20: mol_type = other DNA
tccaactaatgccaccacca

SEQ ID NO: 20906 - DNA, 20 bp, synthetic construct
  source 1..20: mol_type = other DNA
aggggacatgggcagagcaa

SEQ ID NO: 20907 - DNA, 20 bp, synthetic construct
  source 1..20: mol_type = other DNA
aactaatgccaccaccaagg

SEQ ID NO: 20908 - DNA, 20 bp, synthetic construct
  source 1..20: mol_type = other DNA
agagttggaagtactctggg

SEQ ID NO: 20909 - DNA, 20 bp, synthetic construct
  source 1..20: mol_type = other DNA
gagactggctgttgactgca

SEQ ID NO: 20910 - DNA, 20 bp, synthetic construct
  source 1..20: mol_type = other DNA
gtcaacagccagtctcttcg

SEQ ID NO: 20911 - DNA, 20 bp, synthetic construct
  source 1..20: mol_type = other DNA
accaccagccgccttggtgg

SEQ ID NO: 20912 - DNA, 20 bp, synthetic construct
  source 1..20: mol_type = other DNA
atttggggccaacccagagt

SEQ ID NO: 20913 - DNA, 20 bp, synthetic construct
  source 1..20: mol_type = other DNA
tcacccgctccttacaacgc

SEQ ID NO: 20914 - DNA, 20 bp, synthetic construct
  source 1..20: mol_type = other DNA
gtgcgcctacgagtgactga

SEQ ID NO: 20915 - DNA, 20 bp, synthetic construct
  source 1..20: mol_type = other DNA
taccagctttgaccgacacg

SEQ ID NO: 20916 - DNA, 20 bp, synthetic construct
  source 1..20: mol_type = other DNA
aggaagagcagcaccggcgt

SEQ ID NO: 20917 - DNA, 20 bp, synthetic construct
  source 1..20: mol_type = other DNA
acgtagtgatgtccaaagca

SEQ ID NO: 20918 - DNA, 20 bp, synthetic construct
  source 1..20: mol_type = other DNA
ccaaagcacggccttcgtag

SEQ ID NO: 20919 - DNA, 20 bp, synthetic construct
  source 1..20: mol_type = other DNA
gtcactcgtaggcgcactcc

SEQ ID NO: 20920 - DNA, 20 bp, synthetic construct
  source 1..20: mol_type = other DNA
gtagtagacccagtcgaagc

SEQ ID NO: 20921 - DNA, 20 bp, synthetic construct
  source 1..20: mol_type = other DNA
ccctgcagataactcactgg

SEQ ID NO: 20922 - DNA, 20 bp, synthetic construct
  source 1..20: mol_type = other DNA
taaggagcgggtgaacgctt

SEQ ID NO: 20923 - DNA, 20 bp, synthetic construct
  source 1..20: mol_type = other DNA
agtggagtgaatcctgagcg

SEQ ID NO: 20924 - DNA, 20 bp, synthetic construct
  source 1..20: mol_type = other DNA
ggaactgcaccgcggagact

SEQ ID NO: 20925 - DNA, 20 bp, synthetic construct
  source 1..20: mol_type = other DNA
tccgggccacatgttcatca

SEQ ID NO: 20926 - DNA, 20 bp, synthetic construct
  source 1..20: mol_type = other DNA
cgaagccggcttccactgcg

SEQ ID NO: 20927 - DNA, 20 bp, synthetic construct
  source 1..20: mol_type = other DNA
ccgacacgtggacgtggttg

SEQ ID NO: 20928 - DNA, 20 bp, synthetic construct
  source 1..20: mol_type = other DNA
gatgtacctacccgtcgaag

SEQ ID NO: 20929 - DNA, 20 bp, synthetic construct
  source 1..20: mol_type = other DNA
ccgcaatggacacgcaaagg

SEQ ID NO: 20930 - DNA, 20 bp, synthetic construct
  source 1..20: mol_type = other DNA
aggtaacaggaacacccaca

SEQ ID NO: 20931 - DNA, 20 bp, synthetic construct
  source 1..20: mol_type = other DNA
acatggctaaatatagatag

SEQ ID NO: 20932 - DNA, 20 bp, synthetic construct
  source 1..20: mol_type = other DNA
agagatgctcttcatatgga

SEQ ID NO: 20933 - DNA, 20 bp, synthetic construct
  source 1..20: mol_type = other DNA
tactgtggtatggttcacgt

SEQ ID NO: 20934 - DNA, 20 bp, synthetic construct
  source 1..20: mol_type = other DNA
cgtgctgctatagtagtgaa

SEQ ID NO: 20935 - DNA, 20 bp, synthetic construct
  source 1..20: mol_type = other DNA
ctgattgcgaccgaagaagt

SEQ ID NO: 20936 - DNA, 20 bp, synthetic construct
  source 1..20: mol_type = other DNA
atataagggacacactgatg

SEQ ID NO: 20937 - DNA, 20 bp, synthetic construct
  source 1..20: mol_type = other DNA
ttgcgggctgcgatgatgag

SEQ ID NO: 20938 - DNA, 20 bp, synthetic construct
  source 1..20: mol_type = other DNA
caacacctgcctaatgattg

SEQ ID NO: 20939 - DNA, 20 bp, synthetic construct
  source 1..20: mol_type = other DNA
actggacattgtgaaatact

SEQ ID NO: 20940 - DNA, 20 bp, synthetic construct
  source 1..20: mol_type = other DNA
aactaattcaacccccctgc

SEQ ID NO: 20941 - DNA, 20 bp, synthetic construct
  source 1..20: mol_type = other DNA
gttctcacggtcatttgcaa

SEQ ID NO: 20942 - DNA, 20 bp, synthetic construct
  source 1..20: mol_type = other DNA
acagctcctctgtaaatgat

SEQ ID NO: 20943 - DNA, 20 bp, synthetic construct
  source 1..20: mol_type = other DNA
ggatctatcgaggctctaca

SEQ ID NO: 20944 - DNA, 20 bp, synthetic construct
  source 1..20: mol_type = other DNA
aaggaaagagtctactgtcg

SEQ ID NO: 20945 - DNA, 20 bp, synthetic construct
  source 1..20: mol_type = other DNA
gccactcttgagcagtacca

SEQ ID NO: 20946 - DNA, 20 bp, synthetic construct
  source 1..20: mol_type = other DNA
ctattcaagacacagaacaa

SEQ ID NO: 20947 - DNA, 20 bp, synthetic construct
  source 1..20: mol_type = other DNA
tcttgcggttaactcgacgc

SEQ ID NO: 20948 - DNA, 20 bp, synthetic construct
  source 1..20: mol_type = other DNA
ctcctgccgtgacttcatag

SEQ ID NO: 20949 - DNA, 20 bp, synthetic construct
  source 1..20: mol_type = other DNA
gtggaagtcccgagttgagg

SEQ ID NO: 20950 - DNA, 20 bp, synthetic construct
  source 1..20: mol_type = other DNA
ctatatgtctggttgatccc

SEQ ID NO: 20951 - DNA, 20 bp, synthetic construct
  source 1..20: mol_type = other DNA
gttatctataagacaccttg

SEQ ID NO: 20952 - DNA, 20 bp, synthetic construct
  source 1..20: mol_type = other DNA
agaactaagacttggcacaa

SEQ ID NO: 20953 - DNA, 20 bp, synthetic construct
  source 1..20: mol_type = other DNA
atgaggaatgagcagtaccg

SEQ ID NO: 20954 - DNA, 20 bp, synthetic construct
  source 1..20: mol_type = other DNA
ctggatagttagttgatggc

SEQ ID NO: 20955 - DNA, 20 bp, synthetic construct
  source 1..20: mol_type = other DNA
tccatgggagcacggtagga

SEQ ID NO: 20956 - DNA, 20 bp, synthetic construct
  source 1..20: mol_type = other DNA
ccttacctgaatcaatactg

SEQ ID NO: 20957 - DNA, 20 bp, synthetic construct
  source 1..20: mol_type = other DNA
aaacatgtgcacaaaccggt

SEQ ID NO: 20958 - DNA, 20 bp, synthetic construct
  source 1..20: mol_type = other DNA
ctaccttcagtcgacagtag

SEQ ID NO: 20959 - DNA, 20 bp, synthetic construct
  source 1..20: mol_type = other DNA
ggcagctataaccagctatg

SEQ ID NO: 20960 - DNA, 20 bp, synthetic construct
  source 1..20: mol_type = other DNA
cctcctctactgtcgactga

SEQ ID NO: 20961 - DNA, 20 bp, synthetic construct
  source 1..20: mol_type = other DNA
ccttcagtcgacagtagagg

SEQ ID NO: 20962 - DNA, 20 bp, synthetic construct
  source 1..20: mol_type = other DNA
gaaatcagatggtgtttaca

SEQ ID NO: 20963 - DNA, 20 bp, synthetic construct
  source 1..20: mol_type = other DNA
cttcagtcgacagtagagga

SEQ ID NO: 20964 - DNA, 20 bp, synthetic construct
  source 1..20: mol_type = other DNA
gcctcagctctgctatatcc

SEQ ID NO: 20965 - DNA, 20 bp, synthetic construct
  source 1..20: mol_type = other DNA
tccaggatatagcagagctg

SEQ ID NO: 20966 - DNA, 20 bp, synthetic construct
  source 1..20: mol_type = other DNA
tcagagtctcgtaagtctcc

SEQ ID NO: 20967 - DNA, 20 bp, synthetic construct
  source 1..20: mol_type = other DNA
gcagagctgaggctctccca

SEQ ID NO: 20968 - DNA, 20 bp, synthetic construct
  source 1..20: mol_type = other DNA
tctatcccctcagcggccct

SEQ ID NO: 20969 - DNA, 20 bp, synthetic construct
  source 1..20: mol_type = other DNA
ctattctaaagctactgtgg

SEQ ID NO: 20970 - DNA, 20 bp, synthetic construct
  source 1..20: mol_type = other DNA
aattccatacagaaacagga

SEQ ID NO: 20971 - DNA, 20 bp, synthetic construct
  source 1..20: mol_type = other DNA
acagaaacaggatggcatcc

SEQ ID NO: 20972 - DNA, 20 bp, synthetic construct
  source 1..20: mol_type = other DNA
gtcgacagtagaggagggtg

SEQ ID NO: 20973 - DNA, 20 bp, synthetic construct
  source 1..20: mol_type = other DNA
atgaggtcgttagcgagcaa

SEQ ID NO: 20974 - DNA, 20 bp, synthetic construct
  source 1..20: mol_type = other DNA
actctgggtgccgtacggag

SEQ ID NO: 20975 - DNA, 20 bp, synthetic construct
  source 1..20: mol_type = other DNA
ttgaggccgaccaagagcca

SEQ ID NO: 20976 - DNA, 20 bp, synthetic construct
  source 1..20: mol_type = other DNA
agcaatgctgatgctccgga

SEQ ID NO: 20977 - DNA, 20 bp, synthetic construct
  source 1..20: mol_type = other DNA
tgcttcgcagtgccctaccg

SEQ ID NO: 20978 - DNA, 20 bp, synthetic construct
  source 1..20: mol_type = other DNA
ctcagatacctgcgacacca

SEQ ID NO: 20979 - DNA, 20 bp, synthetic construct
  source 1..20: mol_type = other DNA
gcagaccccagccagaaacg

SEQ ID NO: 20980 - DNA, 20 bp, synthetic construct
  source 1..20: mol_type = other DNA
cagccaaatcataaacggcg

SEQ ID NO: 20981 - DNA, 20 bp, synthetic construct
  source 1..20: mol_type = other DNA
ttcacgcactgcagcacggt

SEQ ID NO: 20982 - DNA, 20 bp, synthetic construct
  source 1..20: mol_type = other DNA
gcccacagctcctacaccat

SEQ ID NO: 20983 - DNA, 20 bp, synthetic construct
  source 1..20: mol_type = other DNA
gcgtcctggtgcatccgcag

SEQ ID NO: 20984 - DNA, 20 bp, synthetic construct
  source 1..20: mol_type = other DNA
gatggtgtcagactcggaca

SEQ ID NO: 20985 - DNA, 20 bp, synthetic construct
  source 1..20: mol_type = other DNA
ggtcggcctcaagactgtgc

SEQ ID NO: 20986 - DNA, 20 bp, synthetic construct
  source 1..20: mol_type = other DNA
tcacttctggaaacagtgtg

SEQ ID NO: 20987 - DNA, 20 bp, synthetic construct
  source 1..20: mol_type = other DNA
ggctggggtctgctggcgaa

SEQ ID NO: 20988 - DNA, 20 bp, synthetic construct
  source 1..20: mol_type = other DNA
cgatgcccacatccgaaagg

SEQ ID NO: 20989 - DNA, 20 bp, synthetic construct
  source 1..20: mol_type = other DNA
ctctaaagcacatctcccga

SEQ ID NO: 20990 - DNA, 20 bp, synthetic construct
  source 1..20: mol_type = other DNA
tgccctggatcacgtagctg

SEQ ID NO: 20991 - DNA, 20 bp, synthetic construct
  source 1..20: mol_type = other DNA
ccgccacaccgacttgtggt

SEQ ID NO: 20992 - DNA, 20 bp, synthetic construct
  source 1..20: mol_type = other DNA
atgacgcgcagcgcggcgga

SEQ ID NO: 20993 - DNA, 20 bp, synthetic construct
  source 1..20: mol_type = other DNA
tgtcagtgatctgcttgcag

SEQ ID NO: 20994 - DNA, 20 bp, synthetic construct
  source 1..20: mol_type = other DNA
cgatctcctgcacaaacgcg

SEQ ID NO: 20995 - DNA, 20 bp, synthetic construct
  source 1..20: mol_type = other DNA
gatgagcagaaggccagtgt

SEQ ID NO: 20996 - DNA, 20 bp, synthetic construct
  source 1..20: mol_type = other DNA
cttgaggcgctgcagacccc

SEQ ID NO: 20997 - DNA, 20 bp, synthetic construct
  source 1..20: mol_type = other DNA
accacaagtcggtgtggcgg

SEQ ID NO: 20998 - DNA, 20 bp, synthetic construct
  source 1..20: mol_type = other DNA
tgtgacaacatcagtgacac

SEQ ID NO: 20999 - DNA, 20 bp, synthetic construct
  source 1..20: mol_type = other DNA
tgatgttgtcacaggagcgc

SEQ ID NO: 21000 - DNA, 20 bp, synthetic construct
  source 1..20: mol_type = other DNA
ggcccagcccgttgtcggtg

SEQ ID NO: 21001 - DNA, 20 bp, synthetic construct
  source 1..20: mol_type = other DNA
gaggttgaggctctcgatgt

SEQ ID NO: 21002 - DNA, 20 bp, synthetic construct
  source 1..20: mol_type = other DNA
gctggggaacagcgacgggt

SEQ ID NO: 21003 - DNA, 20 bp, synthetic construct
  source 1..20: mol_type = other DNA
gttgcgaacgagaagacctg

SEQ ID NO: 21004 - DNA, 20 bp, synthetic construct
  source 1..20: mol_type = other DNA
agtgccgacagctctcacag

SEQ ID NO: 21005 - DNA, 20 bp, synthetic construct
  source 1..20: mol_type = other DNA
gtgtgatccttgcataccgg

SEQ ID NO: 21006 - DNA, 20 bp, synthetic construct
  source 1..20: mol_type = other DNA
gacgaccgagcggtcagcga

SEQ ID NO: 21007 - DNA, 20 bp, synthetic construct
  source 1..20: mol_type = other DNA
gcgacaggcacactcagcat

SEQ ID NO: 21008 - DNA, 20 bp, synthetic construct
  source 1..20: mol_type = other DNA
ctgacataaggtaagtgggt

SEQ ID NO: 21009 - DNA, 20 bp, synthetic construct
  source 1..20: mol_type = other DNA
acccacttaccttatgtcag

SEQ ID NO: 21010 - DNA, 20 bp, synthetic construct
  source 1..20: mol_type = other DNA
gctggtcacagtccttcacg

SEQ ID NO: 21011 - DNA, 20 bp, synthetic construct
  source 1..20: mol_type = other DNA
agtagctgagagccccacca

SEQ ID NO: 21012 - DNA, 20 bp, synthetic construct
  source 1..20: mol_type = other DNA
ggactgtgaccagcatagaa

SEQ ID NO: 21013 - DNA, 20 bp, synthetic construct
  source 1..20: mol_type = other DNA
gcactgccagccattgcgac

SEQ ID NO: 21014 - DNA, 20 bp, synthetic construct
  source 1..20: mol_type = other DNA
gagaggcactactgggctca

SEQ ID NO: 21015 - DNA, 20 bp, synthetic construct
  source 1..20: mol_type = other DNA
agctgggcacatgcagactc

SEQ ID NO: 21016 - DNA, 20 bp, synthetic construct
  source 1..20: mol_type = other DNA
agtgggtgggctgagggtgt

SEQ ID NO: 21017 - DNA, 20 bp, synthetic construct
  source 1..20: mol_type = other DNA
gtcagcgaagggtttggaag

SEQ ID NO: 21018 - DNA, 20 bp, synthetic construct
  source 1..20: mol_type = other DNA
tgagcgtgagtagaggccac

SEQ ID NO: 21019 - DNA, 20 bp, synthetic construct
  source 1..20: mol_type = other DNA
agtcggctaccgccaagttg

SEQ ID NO: 21020 - DNA, 20 bp, synthetic construct
  source 1..20: mol_type = other DNA
actacagccacgacaaacgg

SEQ ID NO: 21021 - DNA, 20 bp, synthetic construct
  source 1..20: mol_type = other DNA
ctggtgccagaacttccgag

SEQ ID NO: 21022 - DNA, 20 bp, synthetic construct
  source 1..20: mol_type = other DNA
taaaccccaagccacggcac

SEQ ID NO: 21023 - DNA, 20 bp, synthetic construct
  source 1..20: mol_type = other DNA
tgacggcattcgaggccaag

SEQ ID NO: 21024 - DNA, 20 bp, synthetic construct
  source 1..20: mol_type = other DNA
gcccaggaccagccggacga

SEQ ID NO: 21025 - DNA, 20 bp, synthetic construct
  source 1..20: mol_type = other DNA
caaacggcgggagcgagccg

SEQ ID NO: 21026 - DNA, 20 bp, synthetic construct
  source 1..20: mol_type = other DNA
tcaccactggccctttggcg

SEQ ID NO: 21027 - DNA, 20 bp, synthetic construct
  source 1..20: mol_type = other DNA
ccggaccacccggtacagga

SEQ ID NO: 21028 - DNA, 20 bp, synthetic construct
  source 1..20: mol_type = other DNA
tgccgtcacccagaccacca

SEQ ID NO: 21029 - DNA, 20 bp, synthetic construct
  source 1..20: mol_type = other DNA
gacgactgcaaagatgacca

SEQ ID NO: 21030 - DNA, 20 bp, synthetic construct
  source 1..20: mol_type = other DNA
ggagggtatggtcagcagca

SEQ ID NO: 21031 - DNA, 20 bp, synthetic construct
  source 1..20: mol_type = other DNA
cagaaagcggtcggcgctga

SEQ ID NO: 21032 - DNA, 20 bp, synthetic construct
  source 1..20: mol_type = other DNA
ctttcatcctgctccggacg

SEQ ID NO: 21033 - DNA, 20 bp, synthetic construct
  source 1..20: mol_type = other DNA
aaagtccggagccgatcaca

SEQ ID NO: 21034 - DNA, 20 bp, synthetic construct
  source 1..20: mol_type = other DNA
gttaccttgatagcataggg

SEQ ID NO: 21035 - DNA, 20 bp, synthetic construct
  source 1..20: mol_type = other DNA
aatgcctccctactatcttg

SEQ ID NO: 21036 - DNA, 20 bp, synthetic construct
  source 1..20: mol_type = other DNA
actacaggatgagatgtacg

SEQ ID NO: 21037 - DNA, 20 bp, synthetic construct
  source 1..20: mol_type = other DNA
agtttgtgacagctatgcca

SEQ ID NO: 21038 - DNA, 20 bp, synthetic construct
  source 1..20: mol_type = other DNA
catcctctgaaattccctgg

SEQ ID NO: 21039 - DNA, 20 bp, synthetic construct
  source 1..20: mol_type = other DNA
aagaatgacttacctaagag

SEQ ID NO: 21040 - DNA, 20 bp, synthetic construct
  source 1..20: mol_type = other DNA
ttggtgcagaaagtacaaag

SEQ ID NO: 21041 - DNA, 20 bp, synthetic construct
  source 1..20: mol_type = other DNA
acaccaatgtgtgaagtgac

SEQ ID NO: 21042 - DNA, 20 bp, synthetic construct
  source 1..20: mol_type = other DNA
tgcaataataccttctacag

SEQ ID NO: 21043 - DNA, 20 bp, synthetic construct
  source 1..20: mol_type = other DNA
gactgtctccacttcaatgt

SEQ ID NO: 21044 - DNA, 20 bp, synthetic construct
  source 1..20: mol_type = other DNA
gctgaaggacttacgactct

SEQ ID NO: 21045 - DNA, 20 bp, synthetic construct
  source 1..20: mol_type = other DNA
ttaatatgaaggaatacact

SEQ ID NO: 21046 - DNA, 20 bp, synthetic construct
  source 1..20: mol_type = other DNA
ctgtacagactgtgaaccaa

SEQ ID NO: 21047 - DNA, 20 bp, synthetic construct
  source 1..20: mol_type = other DNA
tttctgaaaggacaggacga

SEQ ID NO: 21048 - DNA, 20 bp, synthetic construct
  source 1..20: mol_type = other DNA
taatacgccatgcagatccc

SEQ ID NO: 21049 - DNA, 20 bp, synthetic construct
  source 1..20: mol_type = other DNA
gctggcctggacaattactg

SEQ ID NO: 21050 - DNA, 20 bp, synthetic construct
  source 1..20: mol_type = other DNA
cctcacctgagcaggcgacg

SEQ ID NO: 21051 - DNA, 20 bp, synthetic construct
  source 1..20: mol_type = other DNA
ctgagcaggcgacgtggcag

SEQ ID NO: 21052 - DNA, 20 bp, synthetic construct
  source 1..20: mol_type = other DNA
tgcatggcgtattatgagag

SEQ ID NO: 21053 - DNA, 20 bp, synthetic construct
  source 1..20: mol_type = other DNA
tccagatcaacagcttcgcg

SEQ ID NO: 21054 - DNA, 20 bp, synthetic construct
  source 1..20: mol_type = other DNA
tgaagccccagtaattgtcc

SEQ ID NO: 21055 - DNA, 20 bp, synthetic construct
  source 1..20: mol_type = other DNA
tggactcggcgcctgtgacc

SEQ ID NO: 21056 - DNA, 20 bp, synthetic construct
  source 1..20: mol_type = other DNA
tgtgaccaggcagccaatga

SEQ ID NO: 21057 - DNA, 20 bp, synthetic construct
  source 1..20: mol_type = other DNA
agcttcgcgtggtgcagacg

SEQ ID NO: 21058 - DNA, 20 bp, synthetic construct
  source 1..20: mol_type = other DNA
gtgcagacgcggaaagctga

SEQ ID NO: 21059 - DNA, 20 bp, synthetic construct
  source 1..20: mol_type = other DNA
actggcaaaaatattctcga

SEQ ID NO: 21060 - DNA, 20 bp, synthetic construct
  source 1..20: mol_type = other DNA
aaataatctcacagtttcca

SEQ ID NO: 21061 - DNA, 20 bp, synthetic construct
  source 1..20: mol_type = other DNA
gcccagacggtcctggatga

SEQ ID NO: 21062 - DNA, 20 bp, synthetic construct
  source 1..20: mol_type = other DNA
gatgacggcagcatcgacta

SEQ ID NO: 21063 - DNA, 20 bp, synthetic construct
  source 1..20: mol_type = other DNA
aagagactgcatggtaccag

SEQ ID NO: 21064 - DNA, 20 bp, synthetic construct
  source 1..20: mol_type = other DNA
ggaacctctcaacgcttcgg

SEQ ID NO: 21065 - DNA, 20 bp, synthetic construct
  source 1..20: mol_type = other DNA
acttgagacaagctctacgc

SEQ ID NO: 21066 - DNA, 20 bp, synthetic construct
  source 1..20: mol_type = other DNA
ccaaggagaatcagcactcg

SEQ ID NO: 21067 - DNA, 20 bp, synthetic construct
  source 1..20: mol_type = other DNA
caggaaatgccaacaagccc

SEQ ID NO: 21068 - DNA, 20 bp, synthetic construct
  source 1..20: mol_type = other DNA
gaaacctcgggccaccactg

SEQ ID NO: 21069 - DNA, 20 bp, synthetic construct
  source 1..20: mol_type = other DNA
caggctctggtccacgctgt

SEQ ID NO: 21070 - DNA, 20 bp, synthetic construct
  source 1..20: mol_type = other DNA
gatgctgaagaagaaacctc

SEQ ID NO: 21071 - DNA, 20 bp, synthetic construct
  source 1..20: mol_type = other DNA
ccaaagcctgtgcctacctg

SEQ ID NO: 21072 - DNA, 20 bp, synthetic construct
  source 1..20: mol_type = other DNA
aaagtgcttaagctgttcat

SEQ ID NO: 21073 - DNA, 20 bp, synthetic construct
  source 1..20: mol_type = other DNA
gtgcaaagaagtcctccagg

SEQ ID NO: 21074 - DNA, 20 bp, synthetic construct
  source 1..20: mol_type = other DNA
cgagtgctgattctccttgg

SEQ ID NO: 21075 - DNA, 20 bp, synthetic construct
  source 1..20: mol_type = other DNA
cgagttcatagaactccttg

SEQ ID NO: 21076 - DNA, 20 bp, synthetic construct
  source 1..20: mol_type = other DNA
ctcaagtagttctatctggg

SEQ ID NO: 21077 - DNA, 20 bp, synthetic construct
  source 1..20: mol_type = other DNA
cctgggcctgtgagccagga

SEQ ID NO: 21078 - DNA, 20 bp, synthetic construct
  source 1..20: mol_type = other DNA
tcctggaactcagaaatacg

SEQ ID NO: 21079 - DNA, 20 bp, synthetic construct
  source 1..20: mol_type = other DNA
tatttataatgacccaacct

SEQ ID NO: 21080 - DNA, 20 bp, synthetic construct
  source 1..20: mol_type = other DNA
tcagccgttaataaagcagt

SEQ ID NO: 21081 - DNA, 20 bp, synthetic construct
  source 1..20: mol_type = other DNA
cagagtatgaatcaacacaa

SEQ ID NO: 21082 - DNA, 20 bp, synthetic construct
  source 1..20: mol_type = other DNA
ttacctctttaatccaatgg

SEQ ID NO: 21083 - DNA, 20 bp, synthetic construct
  source 1..20: mol_type = other DNA
gctaaacaccttctagtcaa

SEQ ID NO: 21084 - DNA, 20 bp, synthetic construct
  source 1..20: mol_type = other DNA
actgtgtaaaagatttgtgc

SEQ ID NO: 21085 - DNA, 20 bp, synthetic construct
  source 1..20: mol_type = other DNA
tgtttctaatggcgatttgg

SEQ ID NO: 21086 - DNA, 20 bp, synthetic construct
  source 1..20: mol_type = other DNA
gagctatggaaacacgttga

SEQ ID NO: 21087 - DNA, 20 bp, synthetic construct
  source 1..20: mol_type = other DNA
taggaatggtaagcatataa

SEQ ID NO: 21088 - DNA, 20 bp, synthetic construct
  source 1..20: mol_type = other DNA
aaacatactgtagtattccc

SEQ ID NO: 21089 - DNA, 20 bp, synthetic construct
  source 1..20: mol_type = other DNA
tctgactccacatatgtgac

SEQ ID NO: 21090 - DNA, 20 bp, synthetic construct
  source 1..20: mol_type = other DNA
gacttcatgaaggtatgatg

SEQ ID NO: 21091 - DNA, 20 bp, synthetic construct
  source 1..20: mol_type = other DNA
ggtagatccatacatgcatg

SEQ ID NO: 21092 - DNA, 20 bp, synthetic construct
  source 1..20: mol_type = other DNA
acccagtgtagagggaagta

SEQ ID NO: 21093 - DNA, 20 bp, synthetic construct
  source 1..20: mol_type = other DNA
aacgtgagtgctataacctg

SEQ ID NO: 21094 - DNA, 20 bp, synthetic construct
  source 1..20: mol_type = other DNA
gccatgaggaaagcgtacaa

SEQ ID NO: 21095 - DNA, 20 bp, synthetic construct
  source 1..20: mol_type = other DNA
catgactttcctctctacgg

SEQ ID NO: 21096 - DNA, 20 bp, synthetic construct
  source 1..20: mol_type = other DNA
aagtagcggcccccagtcgg

SEQ ID NO: 21097 - DNA, 20 bp, synthetic construct
  source 1..20: mol_type = other DNA
ctgtagatggccgaagacag

SEQ ID NO: 21098 - DNA, 20 bp, synthetic construct
  source 1..20: mol_type = other DNA
gtgttcgtttgggtgcaaag

SEQ ID NO: 21099 - DNA, 20 bp, synthetic construct
  source 1..20: mol_type = other DNA
tggaactcgaggttctgaag

SEQ ID NO: 21100 - DNA, 20 bp, synthetic construct
  source 1..20: mol_type = other DNA
gtgatctccagccagtaccc

SEQ ID NO: 21101 - DNA, 20 bp, synthetic construct
  source 1..20: mol_type = other DNA
tttgtggtgagcatccactc

SEQ ID NO: 21102 - DNA, 20 bp, synthetic construct
  source 1..20: mol_type = other DNA
ctccgctcctcaatcagtgt

SEQ ID NO: 21103 - DNA, 20 bp, synthetic construct
  source 1..20: mol_type = other DNA
gggtgacgtcccctccaaga

SEQ ID NO: 21104 - DNA, 20 bp, synthetic construct
  source 1..20: mol_type = other DNA
cacttgttgacaaagataag

SEQ ID NO: 21105 - DNA, 20 bp, synthetic construct
  source 1..20: mol_type = other DNA
atcacctgctcgtcgcctgg

SEQ ID NO: 21106 - DNA, 20 bp, synthetic construct
  source 1..20: mol_type = other DNA
cttgggcagcatgaagacct

SEQ ID NO: 21107 - DNA, 20 bp, synthetic construct
  source 1..20: mol_type = other DNA
cccactccacatccagctcg

SEQ ID NO: 21108 - DNA, 20 bp, synthetic construct
  source 1..20: mol_type = other DNA
tatggccaatataatggcat

SEQ ID NO: 21109 - DNA, 20 bp, synthetic construct
  source 1..20: mol_type = other DNA
tggtaaccggtcatcctcgg

SEQ ID NO: 21110 - DNA, 20 bp, synthetic construct
  source 1..20: mol_type = other DNA
agtggtgcttcgatattcag

SEQ ID NO: 21111 - DNA, 20 bp, synthetic construct
  source 1..20: mol_type = other DNA
cctgaattgttactgagctg

SEQ ID NO: 21112 - DNA, 20 bp, synthetic construct
  source 1..20: mol_type = other DNA
agccgcccaagtggattcga

SEQ ID NO: 21113 - DNA, 20 bp, synthetic construct
  source 1..20: mol_type = other DNA
agtgtttattctatcatggg

SEQ ID NO: 21114 - DNA, 20 bp, synthetic construct
  source 1..20: mol_type = other DNA
tgttggactaaagctcaaga

SEQ ID NO: 21115 - DNA, 20 bp, synthetic construct
  source 1..20: mol_type = other DNA
aaggcccccaaatcaacttg

SEQ ID NO: 21116 - DNA, 20 bp, synthetic construct
  source 1..20: mol_type = other DNA
agagacatgcttgagtctgc

SEQ ID NO: 21117 - DNA, 20 bp, synthetic construct
  source 1..20: mol_type = other DNA
atcccaaagcaaaattacca

SEQ ID NO: 21118 - DNA, 20 bp, synthetic construct
  source 1..20: mol_type = other DNA
caacctgactaatgaacaca

SEQ ID NO: 21119 - DNA, 20 bp, synthetic construct
  source 1..20: mol_type = other DNA
gccatggacactagtactgt

SEQ ID NO: 21120 - DNA, 20 bp, synthetic construct
  source 1..20: mol_type = other DNA
ggaatttgtaacggaggaag

SEQ ID NO: 21121 - DNA, 20 bp, synthetic construct
  source 1..20: mol_type = other DNA
ctctgctccaatccaaacac

SEQ ID NO: 21122 - DNA, 20 bp, synthetic construct
  source 1..20: mol_type = other DNA
gaagttggtctgatcggctg

SEQ ID NO: 21123 - DNA, 20 bp, synthetic construct
  source 1..20: mol_type = other DNA
gtactcacattcctcaagac

SEQ ID NO: 21124 - DNA, 20 bp, synthetic construct
  source 1..20: mol_type = other DNA
tataccgaagaagtcagaca

SEQ ID NO: 21125 - DNA, 20 bp, synthetic construct
  source 1..20: mol_type = other DNA
atgccgagttgggcagtatg

SEQ ID NO: 21126 - DNA, 20 bp, synthetic construct
  source 1..20: mol_type = other DNA
tgtgcgtcatcgatgagatt

SEQ ID NO: 21127 - DNA, 20 bp, synthetic construct
  source 1..20: mol_type = other DNA
gaaaacgtgaatgccgagtt

SEQ ID NO: 21128 - DNA, 20 bp, synthetic construct
  source 1..20: mol_type = other DNA
aactctcgataaaggccccc

SEQ ID NO: 21129 - DNA, 20 bp, synthetic construct
  source 1..20: mol_type = other DNA
agttggcactacccgtcttg

SEQ ID NO: 21130 - DNA, 20 bp, synthetic construct
  source 1..20: mol_type = other DNA
tcacgttgtccggcacccgg

SEQ ID NO: 21131 - DNA, 20 bp, synthetic construct
  source 1..20: mol_type = other DNA
tgacgcacactctttgccct

SEQ ID NO: 21132 - DNA, 20 bp, synthetic construct
  source 1..20: mol_type = other DNA
ccaactgctcaaaagaagtc

SEQ ID NO: 21133 - DNA, 20 bp, synthetic construct
  source 1..20: mol_type = other DNA
tcgtcacgttgtccggcacc

SEQ ID NO: 21134 - DNA, 20 bp, synthetic construct
  source 1..20: mol_type = other DNA
attgatccataaagccagtg

SEQ ID NO: 21135 - DNA, 20 bp, synthetic construct
  source 1..20: mol_type = other DNA
ttcaggttagagcctccacc

SEQ ID NO: 21136 - DNA, 20 bp, synthetic construct
  source 1..20: mol_type = other DNA
gatcccctcagggttacctg

SEQ ID NO: 21137 - DNA, 20 bp, synthetic construct
  source 1..20: mol_type = other DNA
tccatcaacaggcacaccag

SEQ ID NO: 21138 - DNA, 20 bp, synthetic construct
  source 1..20: mol_type = other DNA
gatcctcataattcccgacg

SEQ ID NO: 21139 - DNA, 20 bp, synthetic construct
  source 1..20: mol_type = other DNA
atgatcagaaagagccgtag

SEQ ID NO: 21140 - DNA, 20 bp, synthetic construct
  source 1..20: mol_type = other DNA
gccgagctttgtaagagcgg

SEQ ID NO: 21141 - DNA, 20 bp, synthetic construct
  source 1..20: mol_type = other DNA
aaataccagggcacaagcgt

SEQ ID NO: 21142 - DNA, 20 bp, synthetic construct
  source 1..20: mol_type = other DNA
caggtgtagaacttgcaggt

SEQ ID NO: 21143 - DNA, 20 bp, synthetic construct
  source 1..20: mol_type = other DNA
ggagggaggcgctgtaatgg

SEQ ID NO: 21144 - DNA, 20 bp, synthetic construct
  source 1..20: mol_type = other DNA
tatatatgaccccacctaca

SEQ ID NO: 21145 - DNA, 20 bp, synthetic construct
  source 1..20: mol_type = other DNA
caatgtaggtactacaaacc

SEQ ID NO: 21146 - DNA, 20 bp, synthetic construct
  source 1..20: mol_type = other DNA
acccagctgtcaaagagaag

SEQ ID NO: 21147 - DNA, 20 bp, synthetic construct
  source 1..20: mol_type = other DNA
cagcaggagctcatcgtctg

SEQ ID NO: 21148 - DNA, 20 bp, synthetic construct
  source 1..20: mol_type = other DNA
atgtcgtcttccaagtagag

SEQ ID NO: 21149 - DNA, 20 bp, synthetic construct
  source 1..20: mol_type = other DNA
cattcatagacatcattctg

SEQ ID NO: 21150 - DNA, 20 bp, synthetic construct
  source 1..20: mol_type = other DNA
tctgatcattgccaacacaa

SEQ ID NO: 21151 - DNA, 20 bp, synthetic construct
  source 1..20: mol_type = other DNA
tccattctgcaggaccctgg

SEQ ID NO: 21152 - DNA, 20 bp, synthetic construct
  source 1..20: mol_type = other DNA
aatcaaagtgatcccataca

SEQ ID NO: 21153 - DNA, 20 bp, synthetic construct
  source 1..20: mol_type = other DNA
atagtgccgttagtcaagaa

SEQ ID NO: 21154 - DNA, 20 bp, synthetic construct
  source 1..20: mol_type = other DNA
cacgatcacaatgatcgaag

SEQ ID NO: 21155 - DNA, 20 bp, synthetic construct
  source 1..20: mol_type = other DNA
aaaaatgtgaaatttatcgg

SEQ ID NO: 21156 - DNA, 20 bp, synthetic construct
  source 1..20: mol_type = other DNA
aggaagttgaagtagctaag

SEQ ID NO: 21157 - DNA, 20 bp, synthetic construct
  source 1..20: mol_type = other DNA
aagtgtcctgggatgcactt

SEQ ID NO: 21158 - DNA, 20 bp, synthetic construct
  source 1..20: mol_type = other DNA
tatcatctaagacttactcc

SEQ ID NO: 21159 - DNA, 20 bp, synthetic construct
  source 1..20: mol_type = other DNA
acccagcacacaagagtcag

SEQ ID NO: 21160 - DNA, 20 bp, synthetic construct
  source 1..20: mol_type = other DNA
tagtgctatagtggatgaga

SEQ ID NO: 21161 - DNA, 20 bp, synthetic construct
  source 1..20: mol_type = other DNA
gcttacgagaaagttcatca

SEQ ID NO: 21162 - DNA, 20 bp, synthetic construct
  source 1..20: mol_type = other DNA
tccagaagcattctccacgg

SEQ ID NO: 21163 - DNA, 20 bp, synthetic construct
  source 1..20: mol_type = other DNA
aaggaactagaagaattgtt

SEQ ID NO: 21164 - DNA, 20 bp, synthetic construct
  source 1..20: mol_type = other DNA
tactggaatggtttgatggt

SEQ ID NO: 21165 - DNA, 20 bp, synthetic construct
  source 1..20: mol_type = other DNA
attctacattatctgagaga

SEQ ID NO: 21166 - DNA, 20 bp, synthetic construct
  source 1..20: mol_type = other DNA
catcacggcgtcatgcagca

SEQ ID NO: 21167 - DNA, 20 bp, synthetic construct
  source 1..20: mol_type = other DNA
tgaaaaggaacaaaagtcca

SEQ ID NO: 21168 - DNA, 20 bp, synthetic construct
  source 1..20: mol_type = other DNA
tgtcgcagggccttacaccc

SEQ ID NO: 21169 - DNA, 20 bp, synthetic construct
  source 1..20: mol_type = other DNA
ggcactcgagcggctcgagg

SEQ ID NO: 21170 - DNA, 20 bp, synthetic construct
  source 1..20: mol_type = other DNA
gtcgagaggttgcgccccag

SEQ ID NO: 21171 - DNA, 20 bp, synthetic construct
  source 1..20: mol_type = other DNA
ccccagtggcgtgttggaag

SEQ ID NO: 21172 - DNA, 20 bp, synthetic construct
  source 1..20: mol_type = other DNA
gggccaggtctacgatgcgc

SEQ ID NO: 21173 - DNA, 20 bp, synthetic construct
  source 1..20: mol_type = other DNA
ccacgcagctgtccataggg

SEQ ID NO: 21174 - DNA, 20 bp, synthetic construct
  source 1..20: mol_type = other DNA
gagcccagggaatccgactg

SEQ ID NO: 21175 - DNA, 20 bp, synthetic construct
  source 1..20: mol_type = other DNA
accccgaaagcaccttcgca

SEQ ID NO: 21176 - DNA, 20 bp, synthetic construct
  source 1..20: mol_type = other DNA
tgagcggcagcactacccag

SEQ ID NO: 21177 - DNA, 20 bp, synthetic construct
  source 1..20: mol_type = other DNA
tgacgcagccatggctgacg

SEQ ID NO: 21178 - DNA, 20 bp, synthetic construct
  source 1..20: mol_type = other DNA
atccggcctggagtgatagg

SEQ ID NO: 21179 - DNA, 20 bp, synthetic construct
  source 1..20: mol_type = other DNA
cgctcgagtgcccatttgag

SEQ ID NO: 21180 - DNA, 20 bp, synthetic construct
  source 1..20: mol_type = other DNA
gagctggcgagagatgtcgc

SEQ ID NO: 21181 - DNA, 20 bp, synthetic construct
  source 1..20: mol_type = other DNA
ctattaatggagctgacact

SEQ ID NO: 21182 - DNA, 20 bp, synthetic construct
  source 1..20: mol_type = other DNA
ggtaggtctggtgagtcgag

SEQ ID NO: 21183 - DNA, 20 bp, synthetic construct
  source 1..20: mol_type = other DNA
tgtgcatgagatctacaatg

SEQ ID NO: 21184 - DNA, 20 bp, synthetic construct
  source 1..20: mol_type = other DNA
gtctcgtcgccaatgcgagt

SEQ ID NO: 21185 - DNA, 20 bp, synthetic construct
  source 1..20: mol_type = other DNA
actgccaggagatcccatag

SEQ ID NO: 21186 - DNA, 20 bp, synthetic construct
  source 1..20: mol_type = other DNA
acagcccgctggatcaccgt

SEQ ID NO: 21187 - DNA, 20 bp, synthetic construct
  source 1..20: mol_type = other DNA
atgtagtgggaataatctaa

SEQ ID NO: 21188 - DNA, 20 bp, synthetic construct
  source 1..20: mol_type = other DNA
atctaagggcagcgccaacg

SEQ ID NO: 21189 - DNA, 20 bp, synthetic construct
  source 1..20: mol_type = other DNA
ttggcgacgagacagcccgc

SEQ ID NO: 21190 - DNA, 20 bp, synthetic construct
  source 1..20: mol_type = other DNA
gtggcggcagcgcccgagag

SEQ ID NO: 21191 - DNA, 20 bp, synthetic construct
  source 1..20: mol_type = other DNA
agaccagtttgagtacgagc

SEQ ID NO: 21192 - DNA, 20 bp, synthetic construct
  source 1..20: mol_type = other DNA
ggccaggctcagcacaccag

SEQ ID NO: 21193 - DNA, 20 bp, synthetic construct
  source 1..20: mol_type = other DNA
cagcgggcagggaaatgtag

SEQ ID NO: 21194 - DNA, 20 bp, synthetic construct
  source 1..20: mol_type = other DNA
gcagcgccaacggggtgaag

SEQ ID NO: 21195 - DNA, 20 bp, synthetic construct
  source 1..20: mol_type = other DNA
ccagcacggccgtcttgtgc

SEQ ID NO: 21196 - DNA, 20 bp, synthetic construct
  source 1..20: mol_type = other DNA
cctgcacaagacggccgtgc

SEQ ID NO: 21197 - DNA, 20 bp, synthetic construct
  source 1..20: mol_type = other DNA
atgcacaatgtagcagtctg

SEQ ID NO: 21198 - DNA, 20 bp, synthetic construct
  source 1..20: mol_type = other DNA
tcgccagcttggccacacgc

SEQ ID NO: 21199 - DNA, 20 bp, synthetic construct
  source 1..20: mol_type = other DNA
gtgttcgcggacgtgcagga

SEQ ID NO: 21200 - DNA, 20 bp, synthetic construct
  source 1..20: mol_type = other DNA
acgtccgcgaacaccaggag

SEQ ID NO: 21201 - DNA, 20 bp, synthetic construct
  source 1..20: mol_type = other DNA
aggcggtgacaacaggacgc

SEQ ID NO: 21202 - DNA, 20 bp, synthetic construct
  source 1..20: mol_type = other DNA
catgcacagagacaggaccc

SEQ ID NO: 21203 - DNA, 20 bp, synthetic construct
  source 1..20: mol_type = other DNA
cgtccagcgtcatgaccagg

SEQ ID NO: 21204 - DNA, 20 bp, synthetic construct
  source 1..20: mol_type = other DNA
gaaggacgcggcgttctgcg

SEQ ID NO: 21205 - DNA, 20 bp, synthetic construct
  source 1..20: mol_type = other DNA
cacaccagcaggtacagcac

SEQ ID NO: 21206 - DNA, 20 bp, synthetic construct
  source 1..20: mol_type = other DNA
ccgacgtcctgtacatgctg

SEQ ID NO: 21207 - DNA, 20 bp, synthetic construct
  source 1..20: mol_type = other DNA
ccccagcatgtacaggacgt

SEQ ID NO: 21208 - DNA, 20 bp, synthetic construct
  source 1..20: mol_type = other DNA
gaacacgctggtcatctacg

SEQ ID NO: 21209 - DNA, 20 bp, synthetic construct
  source 1..20: mol_type = other DNA
cctgttgtcaccgcctccag

SEQ ID NO: 21210 - DNA, 20 bp, synthetic construct
  source 1..20: mol_type = other DNA
ctacattctcaacctggcag

SEQ ID NO: 21211 - DNA, 20 bp, synthetic construct
  source 1..20: mol_type = other DNA
gccagctggccggagcccgt

SEQ ID NO: 21212 - DNA, 20 bp, synthetic construct
  source 1..20: mol_type = other DNA
atcatctacacggccgtgct

SEQ ID NO: 21213 - DNA, 20 bp, synthetic construct
  source 1..20: mol_type = other DNA
ctggagcacacgttattagg

SEQ ID NO: 21214 - DNA, 20 bp, synthetic construct
  source 1..20: mol_type = other DNA
tgataaccccataaactgca

SEQ ID NO: 21215 - DNA, 20 bp, synthetic construct
  source 1..20: mol_type = other DNA
gacatagaggatccccgggt

SEQ ID NO: 21216 - DNA, 20 bp, synthetic construct
  source 1..20: mol_type = other DNA
gaagacagacaccccaacag

SEQ ID NO: 21217 - DNA, 20 bp, synthetic construct
  source 1..20: mol_type = other DNA
cagaggtaagctgtataaag

SEQ ID NO: 21218 - DNA, 20 bp, synthetic construct
  source 1..20: mol_type = other DNA
taaacagagatgatcgacag

SEQ ID NO: 21219 - DNA, 20 bp, synthetic construct
  source 1..20: mol_type = other DNA
gggcacagctaatgaaggtc

SEQ ID NO: 21220 - DNA, 20 bp, synthetic construct
  source 1..20: mol_type = other DNA
gatatccattggccggacaa

SEQ ID NO: 21221 - DNA, 20 bp, synthetic construct
  source 1..20: mol_type = other DNA
gggtgaagctcattagagtg

SEQ ID NO: 21222 - DNA, 20 bp, synthetic construct
  source 1..20: mol_type = other DNA
caggtttggaacgtttcgca

SEQ ID NO: 21223 - DNA, 20 bp, synthetic construct
  source 1..20: mol_type = other DNA
gagtgcttacaatcttcccg

SEQ ID NO: 21224 - DNA, 20 bp, synthetic construct
  source 1..20: mol_type = other DNA
agactggaaatgaacaggtt

SEQ ID NO: 21225 - DNA, 20 bp, synthetic construct
  source 1..20: mol_type = other DNA
tgtccggccaatggatatcc

SEQ ID NO: 21226 - DNA, 20 bp, synthetic construct
  source 1..20: mol_type = other DNA
gcaggtacctggctgacaga

SEQ ID NO: 21227 - DNA, 20 bp, synthetic construct
  source 1..20: mol_type = other DNA
ggagatgatccagataaagg

SEQ ID NO: 21228 - DNA, 20 bp, synthetic construct
  source 1..20: mol_type = other DNA
ggcatcaggattcaagcacg

SEQ ID NO: 21229 - DNA, 20 bp, synthetic construct
  source 1..20: mol_type = other DNA
attctgtacaactaccgcca

SEQ ID NO: 21230 - DNA, 20 bp, synthetic construct
  source 1..20: mol_type = other DNA
tgaggtccagggcttcgagt

SEQ ID NO: 21231 - DNA, 20 bp, synthetic construct
  source 1..20: mol_type = other DNA
ttccagccatatcgccaacg

SEQ ID NO: 21232 - DNA, 20 bp, synthetic construct
  source 1..20: mol_type = other DNA
gatgagaaccccttcgccca

SEQ ID NO: 21233 - DNA, 20 bp, synthetic construct
  source 1..20: mol_type = other DNA
gagaatcgaaggttccaaca

SEQ ID NO: 21234 - DNA, 20 bp, synthetic construct
  source 1..20: mol_type = other DNA
tcctgggagagcttcaacaa

SEQ ID NO: 21235 - DNA, 20 bp, synthetic construct
  source 1..20: mol_type = other DNA
tctttggccccacagaaagg

SEQ ID NO: 21236 - DNA, 20 bp, synthetic construct
  source 1..20: mol_type = other DNA
ggggttctcatcagccacga

SEQ ID NO: 21237 - DNA, 20 bp, synthetic construct
  source 1..20: mol_type = other DNA
tgaaagactgaaggccacac

SEQ ID NO: 21238 - DNA, 20 bp, synthetic construct
  source 1..20: mol_type = other DNA
caggtctcggtccttcctga

SEQ ID NO: 21239 - DNA, 20 bp, synthetic construct
  source 1..20: mol_type = other DNA
atccgggacaacgagcggag

SEQ ID NO: 21240 - DNA, 20 bp, synthetic construct
  source 1..20: mol_type = other DNA
tccatagaactgtccatatg

SEQ ID NO: 21241 - DNA, 20 bp, synthetic construct
  source 1..20: mol_type = other DNA
cagctgcacggtaaagatgg

SEQ ID NO: 21242 - DNA, 20 bp, synthetic construct
  source 1..20: mol_type = other DNA
cagcacggcatggatgacga

SEQ ID NO: 21243 - DNA, 20 bp, synthetic construct
  source 1..20: mol_type = other DNA
gcgatccgtaggcggtactg

SEQ ID NO: 21244 - DNA, 20 bp, synthetic construct
  source 1..20: mol_type = other DNA
tcctccccggatcttaaagg

SEQ ID NO: 21245 - DNA, 20 bp, synthetic construct
  source 1..20: mol_type = other DNA
tccacaatgtcctcccgacg

SEQ ID NO: 21246 - DNA, 20 bp, synthetic construct
  source 1..20: mol_type = other DNA
cagcagacttgggagaacgc

SEQ ID NO: 21247 - DNA, 20 bp, synthetic construct
  source 1..20: mol_type = other DNA
cttgaagataccctcataag

SEQ ID NO: 21248 - DNA, 20 bp, synthetic construct
  source 1..20: mol_type = other DNA
gctataccatgtcagactcg

SEQ ID NO: 21249 - DNA, 20 bp, synthetic construct
  source 1..20: mol_type = other DNA
gctgtcagcaccgggatgga

SEQ ID NO: 21250 - DNA, 20 bp, synthetic construct
  source 1..20: mol_type = other DNA
ggcactgccgagccgatggg

SEQ ID NO: 21251 - DNA, 20 bp, synthetic construct
  source 1..20: mol_type = other DNA
ctgcatcgaactcctccccg

SEQ ID NO: 21252 - DNA, 20 bp, synthetic construct
  source 1..20: mol_type = other DNA
aagttcaatgaggagaacta

SEQ ID NO: 21253 - DNA, 20 bp, synthetic construct
  source 1..20: mol_type = other DNA
agagtccgtatcggataagg

SEQ ID NO: 21254 - DNA, 20 bp, synthetic construct
  source 1..20: mol_type = other DNA
tgaatcggtgaacttgtctg

SEQ ID NO: 21255 - DNA, 20 bp, synthetic construct
  source 1..20: mol_type = other DNA
ctagctcttaccatctgtgg

SEQ ID NO: 21256 - DNA, 20 bp, synthetic construct
  source 1..20: mol_type = other DNA
ttacatcacaagtggagccc

SEQ ID NO: 21257 - DNA, 20 bp, synthetic construct
  source 1..20: mol_type = other DNA
aaggcacaacggcctctgag

SEQ ID NO: 21258 - DNA, 20 bp, synthetic construct
  source 1..20: mol_type = other DNA
gcagtggttcagattccggt

SEQ ID NO: 21259 - DNA, 20 bp, synthetic construct
  source 1..20: mol_type = other DNA
ggagcccattgagagcgatg

SEQ ID NO: 21260 - DNA, 20 bp, synthetic construct
  source 1..20: mol_type = other DNA
accaagccgaggttcacgac

SEQ ID NO: 21261 - DNA, 20 bp, synthetic construct
  source 1..20: mol_type = other DNA
ctgtgcgccaaactcgtctg

SEQ ID NO: 21262 - DNA, 20 bp, synthetic construct
  source 1..20: mol_type = other DNA
ctgtccccacagtgcatccg

SEQ ID NO: 21263 - DNA, 20 bp, synthetic construct
  source 1..20: mol_type = other DNA
cttacccgtaccagtagcga

SEQ ID NO: 21264 - DNA, 20 bp, synthetic construct
  source 1..20: mol_type = other DNA
gaggtcgacactccgctctg

SEQ ID NO: 21265 - DNA, 20 bp, synthetic construct
  source 1..20: mol_type = other DNA
ggggctgacttaccgcagag

SEQ ID NO: 21266 - DNA, 20 bp, synthetic construct
  source 1..20: mol_type = other DNA
ggatcctcccggcgtgctcg

SEQ ID NO: 21267 - DNA, 20 bp, synthetic construct
  source 1..20: mol_type = other DNA
gtgacgaggggtgcttgtgc

SEQ ID NO: 21268 - DNA, 20 bp, synthetic construct
  source 1..20: mol_type = other DNA
caccaaccaaggactgtgcg

SEQ ID NO: 21269 - DNA, 20 bp, synthetic construct
  source 1..20: mol_type = other DNA
aaggatggcgatgtgtagag

SEQ ID NO: 21270 - DNA, 20 bp, synthetic construct
  source 1..20: mol_type = other DNA
gaactaccaggcgtccatgg

SEQ ID NO: 21271 - DNA, 20 bp, synthetic construct
  source 1..20: mol_type = other DNA
gcagctccacgagcacatca

SEQ ID NO: 21272 - DNA, 20 bp, synthetic construct
  source 1..20: mol_type = other DNA
agctcacccaacaacagctc

SEQ ID NO: 21273 - DNA, 20 bp, synthetic construct
  source 1..20: mol_type = other DNA
ggtgacggggacacattcca

SEQ ID NO: 21274 - DNA, 20 bp, synthetic construct
  source 1..20: mol_type = other DNA
gaggggccgagacttgtctg

SEQ ID NO: 21275 - DNA, 20 bp, synthetic construct
  source 1..20: mol_type = other DNA
gcgcgacaggtaccccgagt

SEQ ID NO: 21276 - DNA, 20 bp, synthetic construct
  source 1..20: mol_type = other DNA
cccgcccactccaacgtgtg

SEQ ID NO: 21277 - DNA, 20 bp, synthetic construct
  source 1..20: mol_type = other DNA
aagaccgggctgtccaaaca

SEQ ID NO: 21278 - DNA, 20 bp, synthetic construct
  source 1..20: mol_type = other DNA
cagtcgagcttagtcccgag

SEQ ID NO: 21279 - DNA, 20 bp, synthetic construct
  source 1..20: mol_type = other DNA
gactgaacccactaagcatg

SEQ ID NO: 21280 - DNA, 20 bp, synthetic construct
  source 1..20: mol_type = other DNA
cagcggccagcacacaaccc

SEQ ID NO: 21281 - DNA, 20 bp, synthetic construct
  source 1..20: mol_type = other DNA
gatgtgcttctctagaacac

SEQ ID NO: 21282 - DNA, 20 bp, synthetic construct
  source 1..20: mol_type = other DNA
agcacagcgccgagtccgag

SEQ ID NO: 21283 - DNA, 20 bp, synthetic construct
  source 1..20: mol_type = other DNA
aggacaagctcccctcagag

SEQ ID NO: 21284 - DNA, 20 bp, synthetic construct
  source 1..20: mol_type = other DNA
ggtcttaaaggcgatgccgc

SEQ ID NO: 21285 - DNA, 20 bp, synthetic construct
  source 1..20: mol_type = other DNA
ccagcgcgcggatgtcaaag

SEQ ID NO: 21286 - DNA, 20 bp, synthetic construct
  source 1..20: mol_type = other DNA
acgctgacggtgaacatcgt

SEQ ID NO: 21287 - DNA, 20 bp, synthetic construct
  source 1..20: mol_type = other DNA
gcaaatgcggaccctggaca

SEQ ID NO: 21288 - DNA, 20 bp, synthetic construct
  source 1..20: mol_type = other DNA
ggccaccatgaacttggcac

SEQ ID NO: 21289 - DNA, 20 bp, synthetic construct
  source 1..20: mol_type = other DNA
ggagttcaaagcccacgaag

SEQ ID NO: 21290 - DNA, 20 bp, synthetic construct
  source 1..20: mol_type = other DNA
tctggaacctgcccaaacct

SEQ ID NO: 21291 - DNA, 20 bp, synthetic construct
  source 1..20: mol_type = other DNA
gacaggcataaagaatggcg

SEQ ID NO: 21292 - DNA, 20 bp, synthetic construct
  source 1..20: mol_type = other DNA
tggagcggaaacccagcacg

SEQ ID NO: 21293 - DNA, 20 bp, synthetic construct
  source 1..20: mol_type = other DNA
cctaactagttggtaaccgt

SEQ ID NO: 21294 - DNA, 20 bp, synthetic construct
  source 1..20: mol_type = other DNA
tggcaagcagggtattatcg

SEQ ID NO: 21295 - DNA, 20 bp, synthetic construct
  source 1..20: mol_type = other DNA
aggagcaggggcctcgacaa

SEQ ID NO: 21296 - DNA, 20 bp, synthetic construct
  source 1..20: mol_type = other DNA
cagatggctacgtccgtgtc

SEQ ID NO: 21297 - DNA, 20 bp, synthetic construct
  source 1..20: mol_type = other DNA
gaagcgcaggagctgacagt

SEQ ID NO: 21298 - DNA, 20 bp, synthetic construct
  source 1..20: mol_type = other DNA
ttcaggtcgaccccagcact

SEQ ID NO: 21299 - DNA, 20 bp, synthetic construct
  source 1..20: mol_type = other DNA
actcagggtagagaatttgc

SEQ ID NO: 21300 - DNA, 20 bp, synthetic construct
  source 1..20: mol_type = other DNA
tgtgtcatgggagtgcagca

SEQ ID NO: 21301 - DNA, 20 bp, synthetic construct
  source 1..20: mol_type = other DNA
gcacgaggggctagaactca

SEQ ID NO: 21302 - DNA, 20 bp, synthetic construct
  source 1..20: mol_type = other DNA
gataataccctgcttgccac

SEQ ID NO: 21303 - DNA, 20 bp, synthetic construct
  source 1..20: mol_type = other DNA
aaaatgatcaattacattgg

SEQ ID NO: 21304 - DNA, 20 bp, synthetic construct
  source 1..20: mol_type = other DNA
tgcagcagaagcattactgg

SEQ ID NO: 21305 - DNA, 20 bp, synthetic construct
  source 1..20: mol_type = other DNA
ccaggaatgagaagttccga

SEQ ID NO: 21306 - DNA, 20 bp, synthetic construct
  source 1..20: mol_type = other DNA
aaaagtacaacctgccactg

SEQ ID NO: 21307 - DNA, 20 bp, synthetic construct
  source 1..20: mol_type = other DNA
catttcttataatgggtgtg

SEQ ID NO: 21308 - DNA, 20 bp, synthetic construct
  source 1..20: mol_type = other DNA
catgcagcggtcataggaca

SEQ ID NO: 21309 - DNA, 20 bp, synthetic construct
  source 1..20: mol_type = other DNA
gtttgcagatggccatgcag

SEQ ID NO: 21310 - DNA, 20 bp, synthetic construct
  source 1..20: mol_type = other DNA
atggggatctgaaagggtga

SEQ ID NO: 21311 - DNA, 20 bp, synthetic construct
  source 1..20: mol_type = other DNA
cctacatgttaagtgtgact

SEQ ID NO: 21312 - DNA, 20 bp, synthetic construct
  source 1..20: mol_type = other DNA
gccaggagctaaagacaaga

SEQ ID NO: 21313 - DNA, 20 bp, synthetic construct
  source 1..20: mol_type = other DNA
gtgcaagagagctgcagcat

SEQ ID NO: 21314 - DNA, 20 bp, synthetic construct
  source 1..20: mol_type = other DNA
atgatgattgtgtaatgaag

SEQ ID NO: 21315 - DNA, 20 bp, synthetic construct
  source 1..20: mol_type = other DNA
acaacagtgacaaggaatct

SEQ ID NO: 21316 - DNA, 20 bp, synthetic construct
  source 1..20: mol_type = other DNA
tacatgggagtctgcagatg

SEQ ID NO: 21317 - DNA, 20 bp, synthetic construct
  source 1..20: mol_type = other DNA
gtaatgaagaggtttgcaga

SEQ ID NO: 21318 - DNA, 20 bp, synthetic construct
  source 1..20: mol_type = other DNA
tgatgggtccatgataaccg

SEQ ID NO: 21319 - DNA, 20 bp, synthetic construct
  source 1..20: mol_type = other DNA
aatgcatgcggtctatccgt

SEQ ID NO: 21320 - DNA, 20 bp, synthetic construct
  source 1..20: mol_type = other DNA
aggtaccgaagtggcatccg

SEQ ID NO: 21321 - DNA, 20 bp, synthetic construct
  source 1..20: mol_type = other DNA
ccggatcccatggtcaacca

SEQ ID NO: 21322 - DNA, 20 bp, synthetic construct
  source 1..20: mol_type = other DNA
ccagagtcccacattccctg

SEQ ID NO: 21323 - DNA, 20 bp, synthetic construct
  source 1..20: mol_type = other DNA
gatgtacatcggctgagtga

SEQ ID NO: 21324 - DNA, 20 bp, synthetic construct
  source 1..20: mol_type = other DNA
agcgacctgacaccatgttg

SEQ ID NO: 21325 - DNA, 20 bp, synthetic construct
  source 1..20: mol_type = other DNA
ttatggcgaagctcatatga

SEQ ID NO: 21326 - DNA, 20 bp, synthetic construct
  source 1..20: mol_type = other DNA
atacggtacctgtttagcgt

SEQ ID NO: 21327 - DNA, 20 bp, synthetic construct
  source 1..20: mol_type = other DNA
tctatatagaggaatcccca

SEQ ID NO: 21328 - DNA, 20 bp, synthetic construct
  source 1..20: mol_type = other DNA
aagcccttcgaacatacacc

SEQ ID NO: 21329 - DNA, 20 bp, synthetic construct
  source 1..20: mol_type = other DNA
tggccgcattccccccaatg

SEQ ID NO: 21330 - DNA, 20 bp, synthetic construct
  source 1..20: mol_type = other DNA
gaagaccttaaagccaatgc

SEQ ID NO: 21331 - DNA, 20 bp, synthetic construct
  source 1..20: mol_type = other DNA
tccggttcaatgtagctgca

SEQ ID NO: 21332 - DNA, 20 bp, synthetic construct
  source 1..20: mol_type = other DNA
aaggtgagcgcatcaccgat

SEQ ID NO: 21333 - DNA, 20 bp, synthetic construct
  source 1..20: mol_type = other DNA
tagatgaacggcgcaaaagg

SEQ ID NO: 21334 - DNA, 20 bp, synthetic construct
  source 1..20: mol_type = other DNA
caggagctgtgaagcataag

SEQ ID NO: 21335 - DNA, 20 bp, synthetic construct
  source 1..20: mol_type = other DNA
aactcacaataacctcaaga

SEQ ID NO: 21336 - DNA, 20 bp, synthetic construct
  source 1..20: mol_type = other DNA
caggaagcagcaggagtacg

SEQ ID NO: 21337 - DNA, 20 bp, synthetic construct
  source 1..20: mol_type = other DNA
gttctcccaggcgaagctgt

SEQ ID NO: 21338 - DNA, 20 bp, synthetic construct
  source 1..20: mol_type = other DNA
gctgtcgagaaacctcatca

SEQ ID NO: 21339 - DNA, 20 bp, synthetic construct
  source 1..20: mol_type = other DNA
cctttcagaatgtccagagg

SEQ ID NO: 21340 - DNA, 20 bp, synthetic construct
  source 1..20: mol_type = other DNA
gcctttcatatagagatcga

SEQ ID NO: 21341 - DNA, 20 bp, synthetic construct
  source 1..20: mol_type = other DNA
cgaaaacctgaagatccaga

SEQ ID NO: 21342 - DNA, 20 bp, synthetic construct
  source 1..20: mol_type = other DNA
tgaaaggctacaggaacaga

SEQ ID NO: 21343 - DNA, 20 bp, synthetic construct
  source 1..20: mol_type = other DNA
aaccaagaacaagttctccc

SEQ ID NO: 21344 - DNA, 20 bp, synthetic construct
  source 1..20: mol_type = other DNA
tcctcagaaaacatggtaag

SEQ ID NO: 21345 - DNA, 20 bp, synthetic construct
  source 1..20: mol_type = other DNA
accctcgatctctatatgaa

SEQ ID NO: 21346 - DNA, 20 bp, synthetic construct
  source 1..20: mol_type = other DNA
ctgaggcagaactagatgaa

SEQ ID NO: 21347 - DNA, 20 bp, synthetic construct
  source 1..20: mol_type = other DNA
aatttctcaagagaacaaga

SEQ ID NO: 21348 - DNA, 20 bp, synthetic construct
  source 1..20: mol_type = other DNA
gtgtacttctctgagatggg

SEQ ID NO: 21349 - DNA, 20 bp, synthetic construct
  source 1..20: mol_type = other DNA
gcaggtgtacgagaacgcgt

SEQ ID NO: 21350 - DNA, 20 bp, synthetic construct
  source 1..20: mol_type = other DNA
gaagaacagccgctgcggga

SEQ ID NO: 21351 - DNA, 20 bp, synthetic construct
  source 1..20: mol_type = other DNA
catctcagagaagtacacca

SEQ ID NO: 21352 - DNA, 20 bp, synthetic construct
  source 1..20: mol_type = other DNA
gcagcaccttgggaaacatg

SEQ ID NO: 21353 - DNA, 20 bp, synthetic construct
  source 1..20: mol_type = other DNA
ggggacaaagctcaagtatg

SEQ ID NO: 21354 - DNA, 20 bp, synthetic construct
  source 1..20: mol_type = other DNA
tcatagatacttgaactggt

SEQ ID NO: 21355 - DNA, 20 bp, synthetic construct
  source 1..20: mol_type = other DNA
acccagaagaacactcccct

SEQ ID NO: 21356 - DNA, 20 bp, synthetic construct
  source 1..20: mol_type = other DNA
aagtatgaggtggacaccag

SEQ ID NO: 21357 - DNA, 20 bp, synthetic construct
  source 1..20: mol_type = other DNA
tcgcccatttgcacatctgg

SEQ ID NO: 21358 - DNA, 20 bp, synthetic construct
  source 1..20: mol_type = other DNA
acctgcagcacgcgatagaa

SEQ ID NO: 21359 - DNA, 20 bp, synthetic construct
  source 1..20: mol_type = other DNA
tgtgctgtagtgggcaacgg

SEQ ID NO: 21360 - DNA, 20 bp, synthetic construct
  source 1..20: mol_type = other DNA
accccagcatcatcacagag

SEQ ID NO: 21361 - DNA, 20 bp, synthetic construct
  source 1..20: mol_type = other DNA
agtcagagctgttcgacagg

SEQ ID NO: 21362 - DNA, 20 bp, synthetic construct
  source 1..20: mol_type = other DNA
accggtagtagggcatgtcc

SEQ ID NO: 21363 - DNA, 20 bp, synthetic construct
  source 1..20: mol_type = other DNA
agcgctcaaaccagacgtgt

SEQ ID NO: 21364 - DNA, 20 bp, synthetic construct
  source 1..20: mol_type = other DNA
cccacaggaccgtgagccga

SEQ ID NO: 21365 - DNA, 20 bp, synthetic construct
  source 1..20: mol_type = other DNA
taggtgggtcaagtgcacgg

SEQ ID NO: 21366 - DNA, 20 bp, synthetic construct
  source 1..20: mol_type = other DNA
gtagagtttgcggataccaa

SEQ ID NO: 21367 - DNA, 20 bp, synthetic construct
  source 1..20: mol_type = other DNA
gatgatcacatcgatcggtg

SEQ ID NO: 21368 - DNA, 20 bp, synthetic construct
  source 1..20: mol_type = other DNA
ggatagcactggctttcaca

SEQ ID NO: 21369 - DNA, 20 bp, synthetic construct
  source 1..20: mol_type = other DNA
gcgctctcacctgtcatggt

SEQ ID NO: 21370 - DNA, 20 bp, synthetic construct
  source 1..20: mol_type = other DNA
tctggtggtgggcacaactg

SEQ ID NO: 21371 - DNA, 20 bp, synthetic construct
  source 1..20: mol_type = other DNA
gctaccttgagaatggagcg

SEQ ID NO: 21372 - DNA, 20 bp, synthetic construct
  source 1..20: mol_type = other DNA
aagtggtagtagtaaggctc

SEQ ID NO: 21373 - DNA, 20 bp, synthetic construct
  source 1..20: mol_type = other DNA
cagcgatggctattatgcca

SEQ ID NO: 21374 - DNA, 20 bp, synthetic construct
  source 1..20: mol_type = other DNA
tgggatacttgccaaatggg

SEQ ID NO: 21375 - DNA, 20 bp, synthetic construct
  source 1..20: mol_type = other DNA
tcacacccccatcttaccgt

SEQ ID NO: 21376 - DNA, 20 bp, synthetic construct
  source 1..20: mol_type = other DNA
gtttgagcgctcggaagtga

SEQ ID NO: 21377 - DNA, 20 bp, synthetic construct
  source 1..20: mol_type = other DNA
aaggagactccaaaaatggc

SEQ ID NO: 21378 - DNA, 20 bp, synthetic construct
  source 1..20: mol_type = other DNA
actacacgaggcgaactcgg

SEQ ID NO: 21379 - DNA, 20 bp, synthetic construct
  source 1..20: mol_type = other DNA
agagaacacggccgatctgg

SEQ ID NO: 21380 - DNA, 20 bp, synthetic construct
  source 1..20: mol_type = other DNA
caaacggactgagtgctccg

SEQ ID NO: 21381 - DNA, 20 bp, synthetic construct
  source 1..20: mol_type = other DNA
gcggcgggggaacgtacggg

SEQ ID NO: 21382 - DNA, 20 bp, synthetic construct
  source 1..20: mol_type = other DNA
gttctctgcctcgtggtccg

SEQ ID NO: 21383 - DNA, 20 bp, synthetic construct
  source 1..20: mol_type = other DNA
tctgggggcaaaactacacg

SEQ ID NO: 21384 - DNA, 20 bp, synthetic construct
  source 1..20: mol_type = other DNA
acgagttgcacgagaactcg

SEQ ID NO: 21385 - DNA, 20 bp, synthetic construct
  source 1..20: mol_type = other DNA
caccctcagcaactactacg

SEQ ID NO: 21386 - DNA, 20 bp, synthetic construct
  source 1..20: mol_type = other DNA
aatcccgtagtggcgcccgt

SEQ ID NO: 21387 - DNA, 20 bp, synthetic construct
  source 1..20: mol_type = other DNA
ggactcgcttataggccatg

SEQ ID NO: 21388 - DNA, 20 bp, synthetic construct
  source 1..20: mol_type = other DNA
ggaccacgaggcagagaaca

SEQ ID NO: 21389 - DNA, 20 bp, synthetic construct
  source 1..20: mol_type = other DNA
gattaagcctgaaacccgag

SEQ ID NO: 21390 - DNA, 20 bp, synthetic construct
  source 1..20: mol_type = other DNA
ccggcagcggcggcgatgag

SEQ ID NO: 21391 - DNA, 20 bp, synthetic construct
  source 1..20: mol_type = other DNA
gcactcagtccgtttggagg

SEQ ID NO: 21392 - DNA, 20 bp, synthetic construct
  source 1..20: mol_type = other DNA
ccatccaggagcgcacgtag

SEQ ID NO: 21393 - DNA, 20 bp, synthetic construct
  source 1..20: mol_type = other DNA
ccaaggggctgagcgatcca

SEQ ID NO: 21394 - DNA, 20 bp, synthetic construct
  source 1..20: mol_type = other DNA
gggaccggatcagcactcga

SEQ ID NO: 21395 - DNA, 20 bp, synthetic construct
  source 1..20: mol_type = other DNA
tgcaggagcgcattgatgga

SEQ ID NO: 21396 - DNA, 20 bp, synthetic construct
  source 1..20: mol_type = other DNA
gctgctggttctcgttgagt

SEQ ID NO: 21397 - DNA, 20 bp, synthetic construct
  source 1..20: mol_type = other DNA
cagatttagccggcagtgcg

SEQ ID NO: 21398 - DNA, 20 bp, synthetic construct
  source 1..20: mol_type = other DNA
gcaatgactacattgtccct

SEQ ID NO: 21399 - DNA, 20 bp, synthetic construct
  source 1..20: mol_type = other DNA
tcacagccgtccagaatgag

SEQ ID NO: 21400 - DNA, 20 bp, synthetic construct
  source 1..20: mol_type = other DNA
cagctcgtcaaggatgcgta

SEQ ID NO: 21401 - DNA, 20 bp, synthetic construct
  source 1..20: mol_type = other DNA
gccatcatcttctttgaccc

SEQ ID NO: 21402 - DNA, 20 bp, synthetic construct
  source 1..20: mol_type = other DNA
aggatcaccccggtacctgt

SEQ ID NO: 21403 - DNA, 20 bp, synthetic construct
  source 1..20: mol_type = other DNA
ggacgtgctgctcctaggtg

SEQ ID NO: 21404 - DNA, 20 bp, synthetic construct
  source 1..20: mol_type = other DNA
tacggtgcctcgagctgtga

SEQ ID NO: 21405 - DNA, 20 bp, synthetic construct
  source 1..20: mol_type = other DNA
agctttctgcgagctccccc

SEQ ID NO: 21406 - DNA, 20 bp, synthetic construct
  source 1..20: mol_type = other DNA
cgcactgccggctaaatctg

SEQ ID NO: 21407 - DNA, 20 bp, synthetic construct
  source 1..20: mol_type = other DNA
gccagcatgggctctgagca

SEQ ID NO: 21408 - DNA, 20 bp, synthetic construct
  source 1..20: mol_type = other DNA
gagaagcaggacgactatgg

SEQ ID NO: 21409 - DNA, 20 bp, synthetic construct
  source 1..20: mol_type = other DNA
gtagagaatacgtcctgccc

SEQ ID NO: 21410 - DNA, 20 bp, synthetic construct
  source 1..20: mol_type = other DNA
gactatggcggctcagccga

SEQ ID NO: 21411 - DNA, 20 bp, synthetic construct
  source 1..20: mol_type = other DNA
gtgagcagtcttgtacccac

SEQ ID NO: 21412 - DNA, 20 bp, synthetic construct
  source 1..20: mol_type = other DNA
acgtattctctactccgtgt

SEQ ID NO: 21413 - DNA, 20 bp, synthetic construct
  source 1..20: mol_type = other DNA
agtgactgcacatgacagcg

SEQ ID NO: 21414 - DNA, 20 bp, synthetic construct
  source 1..20: mol_type = other DNA
catgctatcgacctggacga

SEQ ID NO: 21415 - DNA, 20 bp, synthetic construct
  source 1..20: mol_type = other DNA
ccaccaccaggtacaacgtg

SEQ ID NO: 21416 - DNA, 20 bp, synthetic construct
  source 1..20: mol_type = other DNA
gtccatgcccacaaagtgcg

SEQ ID NO: 21417 - DNA, 20 bp, synthetic construct
  source 1..20: mol_type = other DNA
gaatctttaccctatagacg

SEQ ID NO: 21418 - DNA, 20 bp, synthetic construct
  source 1..20: mol_type = other DNA
atagttgtaaggaccgtcgg

SEQ ID NO: 21419 - DNA, 20 bp, synthetic construct
  source 1..20: mol_type = other DNA
acatgctatcgacctggacg

SEQ ID NO: 21420 - DNA, 20 bp, synthetic construct
  source 1..20: mol_type = other DNA
tacccactggcacattctcg

SEQ ID NO: 21421 - DNA, 20 bp, synthetic construct
  source 1..20: mol_type = other DNA
tattctctactccgtgtcgg

SEQ ID NO: 21422 - DNA, 20 bp, synthetic construct
  source 1..20: mol_type = other DNA
tagttgtaaggaccgtcgga

SEQ ID NO: 21423 - DNA, 20 bp, synthetic construct
  source 1..20: mol_type = other DNA
gctgcctgggagtagaatgc

SEQ ID NO: 21424 - DNA, 20 bp, synthetic construct
  source 1..20: mol_type = other DNA
gccttggagggtgaaggcga

SEQ ID NO: 21425 - DNA, 20 bp, synthetic construct
  source 1..20: mol_type = other DNA
gcgaggggtagaagagcaca

SEQ ID NO: 21426 - DNA, 20 bp, synthetic construct
  source 1..20: mol_type = other DNA
gggagtagaatgcaggcaga

SEQ ID NO: 21427 - DNA, 20 bp, synthetic construct
  source 1..20: mol_type = other DNA
cgaggggtagaagagcacag

SEQ ID NO: 21428 - DNA, 20 bp, synthetic construct
  source 1..20: mol_type = other DNA
ggcgaggggtagaagagcac

SEQ ID NO: 21429 - DNA, 20 bp, synthetic construct
  source 1..20: mol_type = other DNA
tctgcctgcattctactccc

SEQ ID NO: 21430 - DNA, 20 bp, synthetic construct
  source 1..20: mol_type = other DNA
ggagtagaatgcaggcagaa

SEQ ID NO: 21431 - DNA, 20 bp, synthetic construct
  source 1..20: mol_type = other DNA
ggccttggagggtgaaggcg

SEQ ID NO: 21432 - DNA, 20 bp, synthetic construct
  source 1..20: mol_type = other DNA
ccttggagggtgaaggcgag

SEQ ID NO: 21433 - DNA, 20 bp, synthetic construct
  source 1..20: mol_type = other DNA
atgatgacagaatattgcag

SEQ ID NO: 21434 - DNA, 20 bp, synthetic construct
  source 1..20: mol_type = other DNA
tattctgtcatcatgagatg

SEQ ID NO: 21435 - DNA, 20 bp, synthetic construct
  source 1..20: mol_type = other DNA
gatgtcctacgatcggtaca

SEQ ID NO: 21436 - DNA, 20 bp, synthetic construct
  source 1..20: mol_type = other DNA
cagggtgaagacgtataaca

SEQ ID NO: 21437 - DNA, 20 bp, synthetic construct
  source 1..20: mol_type = other DNA
ggatgagaaccacatggacc

SEQ ID NO: 21438 - DNA, 20 bp, synthetic construct
  source 1..20: mol_type = other DNA
aaaaggtctgcattgtgcat

SEQ ID NO: 21439 - DNA, 20 bp, synthetic construct
  source 1..20: mol_type = other DNA
atggggagtgtgcacagtcc

SEQ ID NO: 21440 - DNA, 20 bp, synthetic construct
  source 1..20: mol_type = other DNA
cccaagatgctgacaaacct

SEQ ID NO: 21441 - DNA, 20 bp, synthetic construct
  source 1..20: mol_type = other DNA
acagggagaaaagcccagag

SEQ ID NO: 21442 - DNA, 20 bp, synthetic construct
  source 1..20: mol_type = other DNA
aagcagcaaagatgaccacc

SEQ ID NO: 21443 - DNA, 20 bp, synthetic construct
  source 1..20: mol_type = other DNA
gatttcatggggcccacaga

SEQ ID NO: 21444 - DNA, 20 bp, synthetic construct
  source 1..20: mol_type = other DNA
gctgtcacttcttgggcatg

SEQ ID NO: 21445 - DNA, 20 bp, synthetic construct
  source 1..20: mol_type = other DNA
tccatgtggttctcatcctg

SEQ ID NO: 21446 - DNA, 20 bp, synthetic construct
  source 1..20: mol_type = other DNA
tgggaaatggggccatcctg

SEQ ID NO: 21447 - DNA, 20 bp, synthetic construct
  source 1..20: mol_type = other DNA
gtgagagaaagaagtacatg

SEQ ID NO: 21448 - DNA, 20 bp, synthetic construct
  source 1..20: mol_type = other DNA
tccgcaggtccccgtacgcg

SEQ ID NO: 21449 - DNA, 20 bp, synthetic construct
  source 1..20: mol_type = other DNA
gcgctcccagccctacagag

SEQ ID NO: 21450 - DNA, 20 bp, synthetic construct
  source 1..20: mol_type = other DNA
cctcgcgtggtacaagccag

SEQ ID NO: 21451 - DNA, 20 bp, synthetic construct
  source 1..20: mol_type = other DNA
ggggcacagctcctactcgg

SEQ ID NO: 21452 - DNA, 20 bp, synthetic construct
  source 1..20: mol_type = other DNA
ggcccggtccgcgacactgg

SEQ ID NO: 21453 - DNA, 20 bp, synthetic construct
  source 1..20: mol_type = other DNA
ccgctggcttgtaccacgcg

SEQ ID NO: 21454 - DNA, 20 bp, synthetic construct
  source 1..20: mol_type = other DNA
cgtggtacaagccagcggcg

SEQ ID NO: 21455 - DNA, 20 bp, synthetic construct
  source 1..20: mol_type = other DNA
gccgcgcgtacggggacctg

SEQ ID NO: 21456 - DNA, 20 bp, synthetic construct
  source 1..20: mol_type = other DNA
ttgtaccacgcgaggccagg

SEQ ID NO: 21457 - DNA, 20 bp, synthetic construct
  source 1..20: mol_type = other DNA
tcacgaggctccgcagcctg

SEQ ID NO: 21458 - DNA, 20 bp, synthetic construct
  source 1..20: mol_type = other DNA
ggggtgcagttgcagctccg

SEQ ID NO: 21459 - DNA, 20 bp, synthetic construct
  source 1..20: mol_type = other DNA
gaggccggacagcagccccg

SEQ ID NO: 21460 - DNA, 20 bp, synthetic construct
  source 1..20: mol_type = other DNA
ctactcggtgggccgcgccg

SEQ ID NO: 21461 - DNA, 20 bp, synthetic construct
  source 1..20: mol_type = other DNA
caggcacagcgccagggcgg

SEQ ID NO: 21462 - DNA, 20 bp, synthetic construct
  source 1..20: mol_type = other DNA
ggctgctgtccggcctccgc

SEQ ID NO: 21463 - DNA, 20 bp, synthetic construct
  source 1..20: mol_type = other DNA
gtgccgcccagacagtcgtg

SEQ ID NO: 21464 - DNA, 20 bp, synthetic construct
  source 1..20: mol_type = other DNA
ccgcccagacagtcgtgtgg

SEQ ID NO: 21465 - DNA, 20 bp, synthetic construct
  source 1..20: mol_type = other DNA
tgccctccacacgactgtct

SEQ ID NO: 21466 - DNA, 20 bp, synthetic construct
  source 1..20: mol_type = other DNA
aagctagtctggcagctgcg

SEQ ID NO: 21467 - DNA, 20 bp, synthetic construct
  source 1..20: mol_type = other DNA
attggtggtggcatcagcta

SEQ ID NO: 21468 - DNA, 20 bp, synthetic construct
  source 1..20: mol_type = other DNA
ggagccacaggtcccactga

SEQ ID NO: 21469 - DNA, 20 bp, synthetic construct
  source 1..20: mol_type = other DNA
ggcatcagctatggccagga

SEQ ID NO: 21470 - DNA, 20 bp, synthetic construct
  source 1..20: mol_type = other DNA
actggagctgcaggtcccac

SEQ ID NO: 21471 - DNA, 20 bp, synthetic construct
  source 1..20: mol_type = other DNA
tggtggcatcagctatggcc

SEQ ID NO: 21472 - DNA, 20 bp, synthetic construct
  source 1..20: mol_type = other DNA
tatcccagcttctccatcag

SEQ ID NO: 21473 - DNA, 20 bp, synthetic construct
  source 1..20: mol_type = other DNA
gagctgatctggcagcagct

SEQ ID NO: 21474 - DNA, 20 bp, synthetic construct
  source 1..20: mol_type = other DNA
ggaactggctgtggcattgg

SEQ ID NO: 21475 - DNA, 20 bp, synthetic construct
  source 1..20: mol_type = other DNA
ttctccatcagtgggacctg

SEQ ID NO: 21476 - DNA, 20 bp, synthetic construct
  source 1..20: mol_type = other DNA
actggctgtggcattggtgg

SEQ ID NO: 21477 - DNA, 20 bp, synthetic construct
  source 1..20: mol_type = other DNA
aatgccacagccagttccgc

SEQ ID NO: 21478 - DNA, 20 bp, synthetic construct
  source 1..20: mol_type = other DNA
tggtggacaacccgcactcg

SEQ ID NO: 21479 - DNA, 20 bp, synthetic construct
  source 1..20: mol_type = other DNA
ggagaaccaggccacgcaca

SEQ ID NO: 21480 - DNA, 20 bp, synthetic construct
  source 1..20: mol_type = other DNA
cgcgacgagctggcctactg

SEQ ID NO: 21481 - DNA, 20 bp, synthetic construct
  source 1..20: mol_type = other DNA
gcagcgacacgtagaacggc

SEQ ID NO: 21482 - DNA, 20 bp, synthetic construct
  source 1..20: mol_type = other DNA
gttgagtggcgcgcgcagga

SEQ ID NO: 21483 - DNA, 20 bp, synthetic construct
  source 1..20: mol_type = other DNA
ggtcgaagaagaactcgtcg

SEQ ID NO: 21484 - DNA, 20 bp, synthetic construct
  source 1..20: mol_type = other DNA
tgcgcgcaaaagcgccacga

SEQ ID NO: 21485 - DNA, 20 bp, synthetic construct
  source 1..20: mol_type = other DNA
gtaggccagctcgtcgcgga

SEQ ID NO: 21486 - DNA, 20 bp, synthetic construct
  source 1..20: mol_type = other DNA
cacgaaggacacggacacgc

SEQ ID NO: 21487 - DNA, 20 bp, synthetic construct
  source 1..20: mol_type = other DNA
catgccggacatccgcgccg

SEQ ID NO: 21488 - DNA, 20 bp, synthetic construct
  source 1..20: mol_type = other DNA
cgtgctctacgtgatgcgcc

SEQ ID NO: 21489 - DNA, 20 bp, synthetic construct
  source 1..20: mol_type = other DNA
gggaagctgcgactgctgcg

SEQ ID NO: 21490 - DNA, 20 bp, synthetic construct
  source 1..20: mol_type = other DNA
acacggtctccagcacgaac

SEQ ID NO: 21491 - DNA, 20 bp, synthetic construct
  source 1..20: mol_type = other DNA
acgatggcgcggaaggcgca

SEQ ID NO: 21492 - DNA, 20 bp, synthetic construct
  source 1..20: mol_type = other DNA
cgaacaggctgcggcacttg

SEQ ID NO: 21493 - DNA, 20 bp, synthetic construct
  source 1..20: mol_type = other DNA
acaccactgtcactcgagcg

SEQ ID NO: 21494 - DNA, 20 bp, synthetic construct
  source 1..20: mol_type = other DNA
tgaatctggtcgcttccgga

SEQ ID NO: 21495 - DNA, 20 bp, synthetic construct
  source 1..20: mol_type = other DNA
tgaaccagaggactatgtgg

SEQ ID NO: 21496 - DNA, 20 bp, synthetic construct
  source 1..20: mol_type = other DNA
gctgtggagcaaattgacat

SEQ ID NO: 21497 - DNA, 20 bp, synthetic construct
  source 1..20: mol_type = other DNA
ctggcgtctagtctccaagg

SEQ ID NO: 21498 - DNA, 20 bp, synthetic construct
  source 1..20: mol_type = other DNA
agttggtacatcacaaacat

SEQ ID NO: 21499 - DNA, 20 bp, synthetic construct
  source 1..20: mol_type = other DNA
ggatttcctgaaatgttggg

SEQ ID NO: 21500 - DNA, 20 bp, synthetic construct
  source 1..20: mol_type = other DNA
gcctcctcaacagttacacc

SEQ ID NO: 21501 - DNA, 20 bp, synthetic construct
  source 1..20: mol_type = other DNA
tctgatggtataattgcccc

SEQ ID NO: 21502 - DNA, 20 bp, synthetic construct
  source 1..20: mol_type = other DNA
gctcgggctttacctgtgat

SEQ ID NO: 21503 - DNA, 20 bp, synthetic construct
  source 1..20: mol_type = other DNA
tacaaagggatagagattgc

SEQ ID NO: 21504 - DNA, 20 bp, synthetic construct
  source 1..20: mol_type = other DNA
gggctgcagtgtgtacagct

SEQ ID NO: 21505 - DNA, 20 bp, synthetic construct
  source 1..20: mol_type = other DNA
ttcaggaaacagtacagcaa

SEQ ID NO: 21506 - DNA, 20 bp, synthetic construct
  source 1..20: mol_type = other DNA
gcggcatatgcaagagcaag

SEQ ID NO: 21507 - DNA, 20 bp, synthetic construct
  source 1..20: mol_type = other DNA
tgggctgacatgtttgaaag

SEQ ID NO: 21508 - DNA, 20 bp, synthetic construct
  source 1..20: mol_type = other DNA
gagcttgtaccggaactccg

SEQ ID NO: 21509 - DNA, 20 bp, synthetic construct
  source 1..20: mol_type = other DNA
gctggatgtcacattgctcg

SEQ ID NO: 21510 - DNA, 20 bp, synthetic construct
  source 1..20: mol_type = other DNA
gtggaattgtgggtaacatg

SEQ ID NO: 21511 - DNA, 20 bp, synthetic construct
  source 1..20: mol_type = other DNA
taggtgatggtaatgcccga

SEQ ID NO: 21512 - DNA, 20 bp, synthetic construct
  source 1..20: mol_type = other DNA
aagaagaccaaaccatccca

SEQ ID NO: 21513 - DNA, 20 bp, synthetic construct
  source 1..20: mol_type = other DNA
gtagaggagtcggggtacgc

SEQ ID NO: 21514 - DNA, 20 bp, synthetic construct
  source 1..20: mol_type = other DNA
ggggttcactcacgactgga

SEQ ID NO: 21515 - DNA, 20 bp, synthetic construct
  source 1..20: mol_type = other DNA
gccctcgcccagcttccgcg

SEQ ID NO: 21516 - DNA, 20 bp, synthetic construct
  source 1..20: mol_type = other DNA
gggctttggcgagtcggcgg

SEQ ID NO: 21517 - DNA, 20 bp, synthetic construct
  source 1..20: mol_type = other DNA
gactcctctactttgtaggg

SEQ ID NO: 21518 - DNA, 20 bp, synthetic construct
  source 1..20: mol_type = other DNA
ggacaagagcagcaccagag

SEQ ID NO: 21519 - DNA, 20 bp, synthetic construct
  source 1..20: mol_type = other DNA
caggttcaggaacaggtcgt

SEQ ID NO: 21520 - DNA, 20 bp, synthetic construct
  source 1..20: mol_type = other DNA
gtttcaggaggagccgagga

SEQ ID NO: 21521 - DNA, 20 bp, synthetic construct
  source 1..20: mol_type = other DNA
caagccacacaaggtgacca

SEQ ID NO: 21522 - DNA, 20 bp, synthetic construct
  source 1..20: mol_type = other DNA
ggtggaggagtccaactcag

SEQ ID NO: 21523 - DNA, 20 bp, synthetic construct
  source 1..20: mol_type = other DNA
aactcaccataaggatgcgc

SEQ ID NO: 21524 - DNA, 20 bp, synthetic construct
  source 1..20: mol_type = other DNA
ggtgtacgtgaacggagagt

SEQ ID NO: 21525 - DNA, 20 bp, synthetic construct
  source 1..20: mol_type = other DNA
acagtcggactcccatgatg

SEQ ID NO: 21526 - DNA, 20 bp, synthetic construct
  source 1..20: mol_type = other DNA
gcttctcgaagtgctcccgg

SEQ ID NO: 21527 - DNA, 20 bp, synthetic construct
  source 1..20: mol_type = other DNA
gagtgccgaggtgtacaccg

SEQ ID NO: 21528 - DNA, 20 bp, synthetic construct
  source 1..20: mol_type = other DNA
tgggtgaccaacatcagcga

SEQ ID NO: 21529 - DNA, 20 bp, synthetic construct
  source 1..20: mol_type = other DNA
acctggatgacaacgagagg

SEQ ID NO: 21530 - DNA, 20 bp, synthetic construct
  source 1..20: mol_type = other DNA
gaggaaacgcaagatgtacg

SEQ ID NO: 21531 - DNA, 20 bp, synthetic construct
  source 1..20: mol_type = other DNA
cactcacgcctcctcgccgg

SEQ ID NO: 21532 - DNA, 20 bp, synthetic construct
  source 1..20: mol_type = other DNA
ccaagacggacctcaagctc

SEQ ID NO: 21533 - DNA, 20 bp, synthetic construct
  source 1..20: mol_type = other DNA
gagcctcaccttcctgacgt

SEQ ID NO: 21534 - DNA, 20 bp, synthetic construct
  source 1..20: mol_type = other DNA
gctcatctacggcaccccca

SEQ ID NO: 21535 - DNA, 20 bp, synthetic construct
  source 1..20: mol_type = other DNA
caagctctgggggatcgacc

SEQ ID NO: 21536 - DNA, 20 bp, synthetic construct
  source 1..20: mol_type = other DNA
gccttcaccacagggttcgg

SEQ ID NO: 21537 - DNA, 20 bp, synthetic construct
  source 1..20: mol_type = other DNA
ggccttggccagcgcagtca

SEQ ID NO: 21538 - DNA, 20 bp, synthetic construct
  source 1..20: mol_type = other DNA
gccaggagggtgtgtggcgt

SEQ ID NO: 21539 - DNA, 20 bp, synthetic construct
  source 1..20: mol_type = other DNA
tgtgtggcgtgggtgctgcg

SEQ ID NO: 21540 - DNA, 20 bp, synthetic construct
  source 1..20: mol_type = other DNA
gcgtcccgcaggcaccctga

SEQ ID NO: 21541 - DNA, 20 bp, synthetic construct
  source 1..20: mol_type = other DNA
tgggtgctgcggggccgtca

SEQ ID NO: 21542 - DNA, 20 bp, synthetic construct
  source 1..20: mol_type = other DNA
cagccaggtgagcgtcccgc

SEQ ID NO: 21543 - DNA, 20 bp, synthetic construct
  source 1..20: mol_type = other DNA
aaggtgaggcggggccagga

SEQ ID NO: 21544 - DNA, 20 bp, synthetic construct
  source 1..20: mol_type = other DNA
gtgcctgcgggacgctcacc

SEQ ID NO: 21545 - DNA, 20 bp, synthetic construct
  source 1..20: mol_type = other DNA
ggcacctgcaaggtgaggcg

SEQ ID NO: 21546 - DNA, 20 bp, synthetic construct
  source 1..20: mol_type = other DNA
cccgttcaccaggtcctggg

SEQ ID NO: 21547 - DNA, 20 bp, synthetic construct
  source 1..20: mol_type = other DNA
ggccaggagggtgtgtggcg

SEQ ID NO: 21548 - DNA, 20 bp, synthetic construct
  source 1..20: mol_type = other DNA
cggggccgtcagggtgcctg

SEQ ID NO: 21549 - DNA, 20 bp, synthetic construct
  source 1..20: mol_type = other DNA
ggtgtgtggcgtgggtgctg

SEQ ID NO: 21550 - DNA, 20 bp, synthetic construct
  source 1..20: mol_type = other DNA
acccacgccacacaccctcc

SEQ ID NO: 21551 - DNA, 20 bp, synthetic construct
  source 1..20: mol_type = other DNA
ggggcacctgcaaggtgagg

SEQ ID NO: 21552 - DNA, 20 bp, synthetic construct
  source 1..20: mol_type = other DNA
atgggggcacctgcaaggtg

SEQ ID NO: 21553 - DNA, 20 bp, synthetic construct
  source 1..20: mol_type = other DNA
ggcactgcacccgttcgcgg

SEQ ID NO: 21554 - DNA, 20 bp, synthetic construct
  source 1..20: mol_type = other DNA
gttgcgaaggatccccaacg

SEQ ID NO: 21555 - DNA, 20 bp, synthetic construct
  source 1..20: mol_type = other DNA
gtgatggagtactgcgtgtg

SEQ ID NO: 21556 - DNA, 20 bp, synthetic construct
  source 1..20: mol_type = other DNA
agatgttgtccccttcgaag

SEQ ID NO: 21557 - DNA, 20 bp, synthetic construct
  source 1..20: mol_type = other DNA
gtactccatcaccatatacg

SEQ ID NO: 21558 - DNA, 20 bp, synthetic construct
  source 1..20: mol_type = other DNA
accctcaaaatctccgacct

SEQ ID NO: 21559 - DNA, 20 bp, synthetic construct
  source 1..20: mol_type = other DNA
gggggaaggctcttacggca

SEQ ID NO: 21560 - DNA, 20 bp, synthetic construct
  source 1..20: mol_type = other DNA
tctaccagccgcgccgcaag

SEQ ID NO: 21561 - DNA, 20 bp, synthetic construct
  source 1..20: mol_type = other DNA
ggtggacatctggtcggctg

SEQ ID NO: 21562 - DNA, 20 bp, synthetic construct
  source 1..20: mol_type = other DNA
ccaccgcatcgactccaccg

SEQ ID NO: 21563 - DNA, 20 bp, synthetic construct
  source 1..20: mol_type = other DNA
catcggcaagtacctgatgg

SEQ ID NO: 21564 - DNA, 20 bp, synthetic construct
  source 1..20: mol_type = other DNA
tgcacaaggacatcaagccg

SEQ ID NO: 21565 - DNA, 20 bp, synthetic construct
  source 1..20: mol_type = other DNA
gggaaattcaactactgagg

SEQ ID NO: 21566 - DNA, 20 bp, synthetic construct
  source 1..20: mol_type = other DNA
gttgtttgagaacatcggga

SEQ ID NO: 21567 - DNA, 20 bp, synthetic construct
  source 1..20: mol_type = other DNA
tgccccgcgcacgcacccgt

SEQ ID NO: 21568 - DNA, 20 bp, synthetic construct
  source 1..20: mol_type = other DNA
acagcccggaaattagagca

SEQ ID NO: 21569 - DNA, 20 bp, synthetic construct
  source 1..20: mol_type = other DNA
tcctgtgggaccacactcag

SEQ ID NO: 21570 - DNA, 20 bp, synthetic construct
  source 1..20: mol_type = other DNA
tatcctgtgggaccacactc

SEQ ID NO: 21571 - DNA, 20 bp, synthetic construct
  source 1..20: mol_type = other DNA
cagaaaactacccctgagtg

SEQ ID NO: 21572 - DNA, 20 bp, synthetic construct
  source 1..20: mol_type = other DNA
atcctgtgggaccacactca

SEQ ID NO: 21573 - DNA, 20 bp, synthetic construct
  source 1..20: mol_type = other DNA
caggaagagaagctgtcagg

SEQ ID NO: 21574 - DNA, 20 bp, synthetic construct
  source 1..20: mol_type = other DNA
aagcacagagcaaccagcag

SEQ ID NO: 21575 - DNA, 20 bp, synthetic construct
  source 1..20: mol_type = other DNA
cacagagcaaccagcagagg

SEQ ID NO: 21576 - DNA, 20 bp, synthetic construct
  source 1..20: mol_type = other DNA
acccctgagtgtggtcccac

SEQ ID NO: 21577 - DNA, 20 bp, synthetic construct
  source 1..20: mol_type = other DNA
aactcttccaccagccagca

SEQ ID NO: 21578 - DNA, 20 bp, synthetic construct
  source 1..20: mol_type = other DNA
ccaagcagaggctcccgtgc

SEQ ID NO: 21579 - DNA, 20 bp, synthetic construct
  source 1..20: mol_type = other DNA
tcaaagctgagcggcagctg

SEQ ID NO: 21580 - DNA, 20 bp, synthetic construct
  source 1..20: mol_type = other DNA
agagcaaccagcagaggtgg

SEQ ID NO: 21581 - DNA, 20 bp, synthetic construct
  source 1..20: mol_type = other DNA
agcagaggtggcggccctgg

SEQ ID NO: 21582 - DNA, 20 bp, synthetic construct
  source 1..20: mol_type = other DNA
actccgctacagccaagcag

SEQ ID NO: 21583 - DNA, 20 bp, synthetic construct
  source 1..20: mol_type = other DNA
gggagactgttactactgcg

SEQ ID NO: 21584 - DNA, 20 bp, synthetic construct
  source 1..20: mol_type = other DNA
gctaccacgtcactgcatcg

SEQ ID NO: 21585 - DNA, 20 bp, synthetic construct
  source 1..20: mol_type = other DNA
tggggcaatccattatgcac

SEQ ID NO: 21586 - DNA, 20 bp, synthetic construct
  source 1..20: mol_type = other DNA
atacttgcttatctcaagtg

SEQ ID NO: 21587 - DNA, 20 bp, synthetic construct
  source 1..20: mol_type = other DNA
gagatccagactgatcgtca

SEQ ID NO: 21588 - DNA, 20 bp, synthetic construct
  source 1..20: mol_type = other DNA
tgtacgcccggcattacgcg

SEQ ID NO: 21589 - DNA, 20 bp, synthetic construct
  source 1..20: mol_type = other DNA
aggctgaactgattaatggg

SEQ ID NO: 21590 - DNA, 20 bp, synthetic construct
  source 1..20: mol_type = other DNA
cctgggacatgacgaacagg

SEQ ID NO: 21591 - DNA, 20 bp, synthetic construct
  source 1..20: mol_type = other DNA
tccacgcggcgcttacctga

SEQ ID NO: 21592 - DNA, 20 bp, synthetic construct
  source 1..20: mol_type = other DNA
gactagcaaacgtcttcacg

SEQ ID NO: 21593 - DNA, 20 bp, synthetic construct
  source 1..20: mol_type = other DNA
gatcgttcaggagacccacc

SEQ ID NO: 21594 - DNA, 20 bp, synthetic construct
  source 1..20: mol_type = other DNA
tctgctgcatcttaaaaggg

SEQ ID NO: 21595 - DNA, 20 bp, synthetic construct
  source 1..20: mol_type = other DNA
ggctgcactgaagaccgcca

SEQ ID NO: 21596 - DNA, 20 bp, synthetic construct
  source 1..20: mol_type = other DNA
agacacaaactcaggtacaa

SEQ ID NO: 21597 - DNA, 20 bp, synthetic construct
  source 1..20: mol_type = other DNA
gatggtgaacatgagagtcg

SEQ ID NO: 21598 - DNA, 20 bp, synthetic construct
  source 1..20: mol_type = other DNA
aggagatgtcccaaacagga

SEQ ID NO: 21599 - DNA, 20 bp, synthetic construct
  source 1..20: mol_type = other DNA
ccggtacagagccctctgcg

SEQ ID NO: 21600 - DNA, 20 bp, synthetic construct
  source 1..20: mol_type = other DNA
ccggcctgagcatccatgct

SEQ ID NO: 21601 - DNA, 20 bp, synthetic construct
  source 1..20: mol_type = other DNA
gcccgggactgtgagcttcg

SEQ ID NO: 21602 - DNA, 20 bp, synthetic construct
  source 1..20: mol_type = other DNA
ccctgacccagctattagcg

SEQ ID NO: 21603 - DNA, 20 bp, synthetic construct
  source 1..20: mol_type = other DNA
cagacagccccactcctccg

SEQ ID NO: 21604 - DNA, 20 bp, synthetic construct
  source 1..20: mol_type = other DNA
gctgcctgggacccgaccac

SEQ ID NO: 21605 - DNA, 20 bp, synthetic construct
  source 1..20: mol_type = other DNA
tccgcgaagctcacagtccc

SEQ ID NO: 21606 - DNA, 20 bp, synthetic construct
  source 1..20: mol_type = other DNA
gcctagaaaggctcctgtga

SEQ ID NO: 21607 - DNA, 20 bp, synthetic construct
  source 1..20: mol_type = other DNA
gaaggagagtcctgaagtgc

SEQ ID NO: 21608 - DNA, 20 bp, synthetic construct
  source 1..20: mol_type = other DNA
gaggaagtcccaagagccaa

SEQ ID NO: 21609 - DNA, 20 bp, synthetic construct
  source 1..20: mol_type = other DNA
tggatgctcaggccggccag

SEQ ID NO: 21610 - DNA, 20 bp, synthetic construct
  source 1..20: mol_type = other DNA
tccatccaagagatgagggc

SEQ ID NO: 21611 - DNA, 20 bp, synthetic construct
  source 1..20: mol_type = other DNA
caggaaggaagaggaaccgg

SEQ ID NO: 21612 - DNA, 20 bp, synthetic construct
  source 1..20: mol_type = other DNA
gacgtgatgcaggagaccta

SEQ ID NO: 21613 - DNA, 20 bp, synthetic construct
  source 1..20: mol_type = other DNA
atgggccccgaatgtaacag

SEQ ID NO: 21614 - DNA, 20 bp, synthetic construct
  source 1..20: mol_type = other DNA
agtgacccccattcaaacag

SEQ ID NO: 21615 - DNA, 20 bp, synthetic construct
  source 1..20: mol_type = other DNA
gttgcccccgatgacaggcg

SEQ ID NO: 21616 - DNA, 20 bp, synthetic construct
  source 1..20: mol_type = other DNA
gaggtcctatacgttgcttg

SEQ ID NO: 21617 - DNA, 20 bp, synthetic construct
  source 1..20: mol_type = other DNA
gtatgtgtcacactcgtcgc

SEQ ID NO: 21618 - DNA, 20 bp, synthetic construct
  source 1..20: mol_type = other DNA
acggcatctgtaatgagccc

SEQ ID NO: 21619 - DNA, 20 bp, synthetic construct
  source 1..20: mol_type = other DNA
gcggatctgatactcaaagt

SEQ ID NO: 21620 - DNA, 20 bp, synthetic construct
  source 1..20: mol_type = other DNA
caagttcccccgttgagaca

SEQ ID NO: 21621 - DNA, 20 bp, synthetic construct
  source 1..20: mol_type = other DNA
ccaactaccacttacgtgag

SEQ ID NO: 21622 - DNA, 20 bp, synthetic construct
  source 1..20: mol_type = other DNA
cctaataactgttcccacgg

SEQ ID NO: 21623 - DNA, 20 bp, synthetic construct
  source 1..20: mol_type = other DNA
ggagtatcagtcccgcgtca

SEQ ID NO: 21624 - DNA, 20 bp, synthetic construct
  source 1..20: mol_type = other DNA
tgccgcacgaccccctgtga

SEQ ID NO: 21625 - DNA, 20 bp, synthetic construct
  source 1..20: mol_type = other DNA
cccgtgaggaccacagacgt

SEQ ID NO: 21626 - DNA, 20 bp, synthetic construct
  source 1..20: mol_type = other DNA
gcacttgcagaaatagtcac

SEQ ID NO: 21627 - DNA, 20 bp, synthetic construct
  source 1..20: mol_type = other DNA
agcaacccttgtagaaacgg

SEQ ID NO: 21628 - DNA, 20 bp, synthetic construct
  source 1..20: mol_type = other DNA
acagtagaggcatattctgg

SEQ ID NO: 21629 - DNA, 20 bp, synthetic construct
  source 1..20: mol_type = other DNA
gcgtcatggaatcgtcagag

SEQ ID NO: 21630 - DNA, 20 bp, synthetic construct
  source 1..20: mol_type = other DNA
ctgaagctgttagtactcgg

SEQ ID NO: 21631 - DNA, 20 bp, synthetic construct
  source 1..20: mol_type = other DNA
tgaagctgttagtactcggt

SEQ ID NO: 21632 - DNA, 20 bp, synthetic construct
  source 1..20: mol_type = other DNA
ttagaggcagagtaattccg

SEQ ID NO: 21633 - DNA, 20 bp, synthetic construct
  source 1..20: mol_type = other DNA
atagagatcaccatcaactg

SEQ ID NO: 21634 - DNA, 20 bp, synthetic construct
  source 1..20: mol_type = other DNA
tgccgaagatgaaacaaagg

SEQ ID NO: 21635 - DNA, 20 bp, synthetic construct
  source 1..20: mol_type = other DNA
ggaatgtctggtcacaggca

SEQ ID NO: 21636 - DNA, 20 bp, synthetic construct
  source 1..20: mol_type = other DNA
agctttccataacacagggc

SEQ ID NO: 21637 - DNA, 20 bp, synthetic construct
  source 1..20: mol_type = other DNA
gtgagaagggcagtacagtc

SEQ ID NO: 21638 - DNA, 20 bp, synthetic construct
  source 1..20: mol_type = other DNA
aatatgcctctactgtgaga

SEQ ID NO: 21639 - DNA, 20 bp, synthetic construct
  source 1..20: mol_type = other DNA
tgatctctatcctcctgtgg

SEQ ID NO: 21640 - DNA, 20 bp, synthetic construct
  source 1..20: mol_type = other DNA
taaagaatgtcaggaagaga

SEQ ID NO: 21641 - DNA, 20 bp, synthetic construct
  source 1..20: mol_type = other DNA
acaaaggaggcagaaaatca

SEQ ID NO: 21642 - DNA, 20 bp, synthetic construct
  source 1..20: mol_type = other DNA
catcctcactgctgctgctg

SEQ ID NO: 21643 - DNA, 20 bp, synthetic construct
  source 1..20: mol_type = other DNA
agaaggaggagcgatacaag

SEQ ID NO: 21644 - DNA, 20 bp, synthetic construct
  source 1..20: mol_type = other DNA
tcttctgtgtcgctcatcca

SEQ ID NO: 21645 - DNA, 20 bp, synthetic construct
  source 1..20: mol_type = other DNA
aaacggtcagcccgcatgtg

SEQ ID NO: 21646 - DNA, 20 bp, synthetic construct
  source 1..20: mol_type = other DNA
ggcactggggcagtgacgca

SEQ ID NO: 21647 - DNA, 20 bp, synthetic construct
  source 1..20: mol_type = other DNA
ggtgtgacaactgcaatgag

SEQ ID NO: 21648 - DNA, 20 bp, synthetic construct
  source 1..20: mol_type = other DNA
tgtcggcgcactgaggactg

SEQ ID NO: 21649 - DNA, 20 bp, synthetic construct
  source 1..20: mol_type = other DNA
aagtattgctcagatgactg

SEQ ID NO: 21650 - DNA, 20 bp, synthetic construct
  source 1..20: mol_type = other DNA
gttggggccatgcttgctcg

SEQ ID NO: 21651 - DNA, 20 bp, synthetic construct
  source 1..20: mol_type = other DNA
gatagcgaatctctagcttg

SEQ ID NO: 21652 - DNA, 20 bp, synthetic construct
  source 1..20: mol_type = other DNA
aagtgaagcatgtgaagcgt

SEQ ID NO: 21653 - DNA, 20 bp, synthetic construct
  source 1..20: mol_type = other DNA
gctatcggcacaagaagtca

SEQ ID NO: 21654 - DNA, 20 bp, synthetic construct
  source 1..20: mol_type = other DNA
ccgacagtaccactcccgga

SEQ ID NO: 21655 - DNA, 20 bp, synthetic construct
  source 1..20: mol_type = other DNA
atgcgccctaacttctgtga

SEQ ID NO: 21656 - DNA, 20 bp, synthetic construct
  source 1..20: mol_type = other DNA
ccgtgctcttcagcaatgca

SEQ ID NO: 21657 - DNA, 20 bp, synthetic construct
  source 1..20: mol_type = other DNA
ggctgcggagaggatttgtg

SEQ ID NO: 21658 - DNA, 20 bp, synthetic construct
  source 1..20: mol_type = other DNA
gctgagtcaggagccacagt

SEQ ID NO: 21659 - DNA, 20 bp, synthetic construct
  source 1..20: mol_type = other DNA
gccctctccccactccgggc

SEQ ID NO: 21660 - DNA, 20 bp, synthetic construct
  source 1..20: mol_type = other DNA
gtgtagggtggagcccactg

SEQ ID NO: 21661 - DNA, 20 bp, synthetic construct
  source 1..20: mol_type = other DNA
ccgggcaggcaggtgtaggg

SEQ ID NO: 21662 - DNA, 20 bp, synthetic construct
  source 1..20: mol_type = other DNA
cactccgggcaggcaggtgt

SEQ ID NO: 21663 - DNA, 20 bp, synthetic construct
  source 1..20: mol_type = other DNA
ctacacctgcctgcccggag

SEQ ID NO: 21664 - DNA, 20 bp, synthetic construct
  source 1..20: mol_type = other DNA
gaaggcagcagggctgagtc

SEQ ID NO: 21665 - DNA, 20 bp, synthetic construct
  source 1..20: mol_type = other DNA
actccgggcaggcaggtgta

SEQ ID NO: 21666 - DNA, 20 bp, synthetic construct
  source 1..20: mol_type = other DNA
tacacctgcctgcccggagt

SEQ ID NO: 21667 - DNA, 20 bp, synthetic construct
  source 1..20: mol_type = other DNA
ggccggaccctggcaggtga

SEQ ID NO: 21668 - DNA, 20 bp, synthetic construct
  source 1..20: mol_type = other DNA
ggctgagtcaggagccacag

SEQ ID NO: 21669 - DNA, 20 bp, synthetic construct
  source 1..20: mol_type = other DNA
cctggcaggtgaaggcagca

SEQ ID NO: 21670 - DNA, 20 bp, synthetic construct
  source 1..20: mol_type = other DNA
ccaccctacacctgcctgcc

SEQ ID NO: 21671 - DNA, 20 bp, synthetic construct
  source 1..20: mol_type = other DNA
cctgctgccttcacctgcca

SEQ ID NO: 21672 - DNA, 20 bp, synthetic construct
  source 1..20: mol_type = other DNA
ccctggcaggtgaaggcagc

SEQ ID NO: 21673 - DNA, 20 bp, synthetic construct
  source 1..20: mol_type = other DNA
cagccctagagaaacgtgcg

SEQ ID NO: 21674 - DNA, 20 bp, synthetic construct
  source 1..20: mol_type = other DNA
gtgaacgtgttccgatgtgg

SEQ ID NO: 21675 - DNA, 20 bp, synthetic construct
  source 1..20: mol_type = other DNA
actctcgctcagcatcccat

SEQ ID NO: 21676 - DNA, 20 bp, synthetic construct
  source 1..20: mol_type = other DNA
atcggaacacgttcacacaa

SEQ ID NO: 21677 - DNA, 20 bp, synthetic construct
  source 1..20: mol_type = other DNA
taattgagtatggatggcgg

SEQ ID NO: 21678 - DNA, 20 bp, synthetic construct
  source 1..20: mol_type = other DNA
acgatctgaacagcagatca

SEQ ID NO: 21679 - DNA, 20 bp, synthetic construct
  source 1..20: mol_type = other DNA
ctgttcagatcgttccaatg

SEQ ID NO: 21680 - DNA, 20 bp, synthetic construct
  source 1..20: mol_type = other DNA
gaacatggaccagtgaaggt

SEQ ID NO: 21681 - DNA, 20 bp, synthetic construct
  source 1..20: mol_type = other DNA
acttcgaattactcactctg

SEQ ID NO: 21682 - DNA, 20 bp, synthetic construct
  source 1..20: mol_type = other DNA
aattcaggtactgatgtcaa

SEQ ID NO: 21683 - DNA, 20 bp, synthetic construct
  source 1..20: mol_type = other DNA
acattgaaacactaaaaggt

SEQ ID NO: 21684 - DNA, 20 bp, synthetic construct
  source 1..20: mol_type = other DNA
cagggctccagtaatgaaca

SEQ ID NO: 21685 - DNA, 20 bp, synthetic construct
  source 1..20: mol_type = other DNA
tacctgtttggaaatgtacg

SEQ ID NO: 21686 - DNA, 20 bp, synthetic construct
  source 1..20: mol_type = other DNA
agggggcttgaagaatgtgt

SEQ ID NO: 21687 - DNA, 20 bp, synthetic construct
  source 1..20: mol_type = other DNA
tggaggtggccagtgagctg

SEQ ID NO: 21688 - DNA, 20 bp, synthetic construct
  source 1..20: mol_type = other DNA
gagatctccgacgacgaccg

SEQ ID NO: 21689 - DNA, 20 bp, synthetic construct
  source 1..20: mol_type = other DNA
ccaggtgcttgcgcgtacgg

SEQ ID NO: 21690 - DNA, 20 bp, synthetic construct
  source 1..20: mol_type = other DNA
cgtatgctctatatgcacag

SEQ ID NO: 21691 - DNA, 20 bp, synthetic construct
  source 1..20: mol_type = other DNA
acaaagtcatagatgtgcgg

SEQ ID NO: 21692 - DNA, 20 bp, synthetic construct
  source 1..20: mol_type = other DNA
cctgcagccattccagaacg

SEQ ID NO: 21693 - DNA, 20 bp, synthetic construct
  source 1..20: mol_type = other DNA
gtgggtaggaagtatggcgc

SEQ ID NO: 21694 - DNA, 20 bp, synthetic construct
  source 1..20: mol_type = other DNA
tgaccgccggggcttgaagg

SEQ ID NO: 21695 - DNA, 20 bp, synthetic construct
  source 1..20: mol_type = other DNA
acggcacatatccttcagga

SEQ ID NO: 21696 - DNA, 20 bp, synthetic construct
  source 1..20: mol_type = other DNA
agagccatcggaaatttccg

SEQ ID NO: 21697 - DNA, 20 bp, synthetic construct
  source 1..20: mol_type = other DNA
atcagaactacgaaactgag

SEQ ID NO: 21698 - DNA, 20 bp, synthetic construct
  source 1..20: mol_type = other DNA
ccgaagcgggacgaagagcg

SEQ ID NO: 21699 - DNA, 20 bp, synthetic construct
  source 1..20: mol_type = other DNA
gcgagacctcaaccgcaaga

SEQ ID NO: 21700 - DNA, 20 bp, synthetic construct
  source 1..20: mol_type = other DNA
cccagtgggcacagtctgag

SEQ ID NO: 21701 - DNA, 20 bp, synthetic construct
  source 1..20: mol_type = other DNA
ctcccgacagcaggcaccgt

SEQ ID NO: 21702 - DNA, 20 bp, synthetic construct
  source 1..20: mol_type = other DNA
gaagggcacactctcattgg

SEQ ID NO: 21703 - DNA, 20 bp, synthetic construct
  source 1..20: mol_type = other DNA
tcgagtgtgctactcaactc

SEQ ID NO: 21704 - DNA, 20 bp, synthetic construct
  source 1..20: mol_type = other DNA
acgctcaaccgagccccgcg

SEQ ID NO: 21705 - DNA, 20 bp, synthetic construct
  source 1..20: mol_type = other DNA
cgctcaaccgagccccgcgc

SEQ ID NO: 21706 - DNA, 20 bp, synthetic construct
  source 1..20: mol_type = other DNA
tacctgctggagcccgcgcg

SEQ ID NO: 21707 - DNA, 20 bp, synthetic construct
  source 1..20: mol_type = other DNA
ttggagacaaactgaacttc

SEQ ID NO: 21708 - DNA, 20 bp, synthetic construct
  source 1..20: mol_type = other DNA
atatccaaactcttctgctc

SEQ ID NO: 21709 - DNA, 20 bp, synthetic construct
  source 1..20: mol_type = other DNA
gctactcaactcaggagatt

SEQ ID NO: 21710 - DNA, 20 bp, synthetic construct
  source 1..20: mol_type = other DNA
cggcaccggcggagatgcct

SEQ ID NO: 21711 - DNA, 20 bp, synthetic construct
  source 1..20: mol_type = other DNA
tcagattcagaagtttctgc

SEQ ID NO: 21712 - DNA, 20 bp, synthetic construct
  source 1..20: mol_type = other DNA
gtacctgctggagcccgcgc

SEQ ID NO: 21713 - DNA, 20 bp, synthetic construct
  source 1..20: mol_type = other DNA
ttcttgcgcgccttcttccc

SEQ ID NO: 21714 - DNA, 20 bp, synthetic construct
  source 1..20: mol_type = other DNA
cccagcgggtcggtacctgc

SEQ ID NO: 21715 - DNA, 20 bp, synthetic construct
  source 1..20: mol_type = other DNA
ggtacctgctggagcccgcg

SEQ ID NO: 21716 - DNA, 20 bp, synthetic construct
  source 1..20: mol_type = other DNA
ggttcctgagcagaagagtt

SEQ ID NO: 21717 - DNA, 20 bp, synthetic construct
  source 1..20: mol_type = other DNA
gcggcaccggcggagatgcc

SEQ ID NO: 21718 - DNA, 20 bp, synthetic construct
  source 1..20: mol_type = other DNA
agttcatataccttagacag

SEQ ID NO: 21719 - DNA, 20 bp, synthetic construct
  source 1..20: mol_type = other DNA
tccattccgggagaatgtgt

SEQ ID NO: 21720 - DNA, 20 bp, synthetic construct
  source 1..20: mol_type = other DNA
tggcaacatgaacgaacctg

SEQ ID NO: 21721 - DNA, 20 bp, synthetic construct
  source 1..20: mol_type = other DNA
tgtatgccaacacattctcc

SEQ ID NO: 21722 - DNA, 20 bp, synthetic construct
  source 1..20: mol_type = other DNA
gttcatataccttagacagt

SEQ ID NO: 21723 - DNA, 20 bp, synthetic construct
  source 1..20: mol_type = other DNA
gaagtacaatgcctgaagca

SEQ ID NO: 21724 - DNA, 20 bp, synthetic construct
  source 1..20: mol_type = other DNA
acacattctcccggaatgga

SEQ ID NO: 21725 - DNA, 20 bp, synthetic construct
  source 1..20: mol_type = other DNA
taataaaccagaactcacct

SEQ ID NO: 21726 - DNA, 20 bp, synthetic construct
  source 1..20: mol_type = other DNA
tctgctccacatcaacagaa

SEQ ID NO: 21727 - DNA, 20 bp, synthetic construct
  source 1..20: mol_type = other DNA
gccacacagaagaagaaggt

SEQ ID NO: 21728 - DNA, 20 bp, synthetic construct
  source 1..20: mol_type = other DNA
tattgcggacatccttcagg

SEQ ID NO: 21729 - DNA, 20 bp, synthetic construct
  source 1..20: mol_type = other DNA
tcttctgtgtggcaatgctg

SEQ ID NO: 21730 - DNA, 20 bp, synthetic construct
  source 1..20: mol_type = other DNA
aaacttgctgacgtgcctgg

SEQ ID NO: 21731 - DNA, 20 bp, synthetic construct
  source 1..20: mol_type = other DNA
caaggcccagcaaaagaaga

SEQ ID NO: 21732 - DNA, 20 bp, synthetic construct
  source 1..20: mol_type = other DNA
tctgctctggaaaaagacat

SEQ ID NO: 21733 - DNA, 20 bp, synthetic construct
  source 1..20: mol_type = other DNA
acagctggctctaatttgag

SEQ ID NO: 21734 - DNA, 20 bp, synthetic construct
  source 1..20: mol_type = other DNA
tctacacctggctccacacg

SEQ ID NO: 21735 - DNA, 20 bp, synthetic construct
  source 1..20: mol_type = other DNA
ctgtgctccgcctctacacc

SEQ ID NO: 21736 - DNA, 20 bp, synthetic construct
  source 1..20: mol_type = other DNA
cacgcggacgagcccgcgtg

SEQ ID NO: 21737 - DNA, 20 bp, synthetic construct
  source 1..20: mol_type = other DNA
tgtggagccaggtgtagagg

SEQ ID NO: 21738 - DNA, 20 bp, synthetic construct
  source 1..20: mol_type = other DNA
ctacacctggctccacacgc

SEQ ID NO: 21739 - DNA, 20 bp, synthetic construct
  source 1..20: mol_type = other DNA
gtgtagaggcggagcacagc

SEQ ID NO: 21740 - DNA, 20 bp, synthetic construct
  source 1..20: mol_type = other DNA
cacagctggctctaatttga

SEQ ID NO: 21741 - DNA, 20 bp, synthetic construct
  source 1..20: mol_type = other DNA
gcgtgtggagccaggtgtag

SEQ ID NO: 21742 - DNA, 20 bp, synthetic construct
  source 1..20: mol_type = other DNA
acgagcccgcgtgtggagcc

SEQ ID NO: 21743 - DNA, 20 bp, synthetic construct
  source 1..20: mol_type = other DNA
gcacagctggctctaatttg

SEQ ID NO: 21744 - DNA, 20 bp, synthetic construct
  source 1..20: mol_type = other DNA
cacacggatggcctaagcac

SEQ ID NO: 21745 - DNA, 20 bp, synthetic construct
  source 1..20: mol_type = other DNA
agacctactggtgtgagtac

SEQ ID NO: 21746 - DNA, 20 bp, synthetic construct
  source 1..20: mol_type = other DNA
gctgctgggacgcatagtgc

SEQ ID NO: 21747 - DNA, 20 bp, synthetic construct
  source 1..20: mol_type = other DNA
ccttcaccatgcgtgccagg

SEQ ID NO: 21748 - DNA, 20 bp, synthetic construct
  source 1..20: mol_type = other DNA
ccccctggcacgcatggtga

SEQ ID NO: 21749 - DNA, 20 bp, synthetic construct
  source 1..20: mol_type = other DNA
caggccccgaggcaaaagca

SEQ ID NO: 21750 - DNA, 20 bp, synthetic construct
  source 1..20: mol_type = other DNA
caggtgacttccagcctcaa

SEQ ID NO: 21751 - DNA, 20 bp, synthetic construct
  source 1..20: mol_type = other DNA
gggtccagcctccctgcaca

SEQ ID NO: 21752 - DNA, 20 bp, synthetic construct
  source 1..20: mol_type = other DNA
tgtactcacaccagtaggtc

SEQ ID NO: 21753 - DNA, 20 bp, synthetic construct
  source 1..20: mol_type = other DNA
aggcaaaagcaaggaagcac

SEQ ID NO: 21754 - DNA, 20 bp, synthetic construct
  source 1..20: mol_type = other DNA
ttactggaatcaagccctgc

SEQ ID NO: 21755 - DNA, 20 bp, synthetic construct
  source 1..20: mol_type = other DNA
agagcccaaccagcagcctg

SEQ ID NO: 21756 - DNA, 20 bp, synthetic construct
  source 1..20: mol_type = other DNA
agtaggtctggtctgtgttg

SEQ ID NO: 21757 - DNA, 20 bp, synthetic construct
  source 1..20: mol_type = other DNA
acctgctgcatatgggcctg

SEQ ID NO: 21758 - DNA, 20 bp, synthetic construct
  source 1..20: mol_type = other DNA
tggtgaccttgtcctgcctg

SEQ ID NO: 21759 - DNA, 20 bp, synthetic construct
  source 1..20: mol_type = other DNA
tgccctgagcaagctacggg

SEQ ID NO: 21760 - DNA, 20 bp, synthetic construct
  source 1..20: mol_type = other DNA
aagatccgtgagctgcgcgc

SEQ ID NO: 21761 - DNA, 20 bp, synthetic construct
  source 1..20: mol_type = other DNA
gaacctcgccaaattccacg

SEQ ID NO: 21762 - DNA, 20 bp, synthetic construct
  source 1..20: mol_type = other DNA
gctgcaggtgcaatgacacg

SEQ ID NO: 21763 - DNA, 20 bp, synthetic construct
  source 1..20: mol_type = other DNA
agaggtaggtcagctcggtc

SEQ ID NO: 21764 - DNA, 20 bp, synthetic construct
  source 1..20: mol_type = other DNA
gcagcacgtcatctgcgaca

SEQ ID NO: 21765 - DNA, 20 bp, synthetic construct
  source 1..20: mol_type = other DNA
gcagcactgccagatccgcg

SEQ ID NO: 21766 - DNA, 20 bp, synthetic construct
  source 1..20: mol_type = other DNA
gatgaagaggttgaccagcg

SEQ ID NO: 21767 - DNA, 20 bp, synthetic construct
  source 1..20: mol_type = other DNA
cgcggatgtcgttatgggac

SEQ ID NO: 21768 - DNA, 20 bp, synthetic construct
  source 1..20: mol_type = other DNA
aggcacctgcgcgcagcacg

SEQ ID NO: 21769 - DNA, 20 bp, synthetic construct
  source 1..20: mol_type = other DNA
cctctacctggaccacaaca

SEQ ID NO: 21770 - DNA, 20 bp, synthetic construct
  source 1..20: mol_type = other DNA
acaagtagataagttgcttg

SEQ ID NO: 21771 - DNA, 20 bp, synthetic construct
  source 1..20: mol_type = other DNA
agcggggagagcaacccccg

SEQ ID NO: 21772 - DNA, 20 bp, synthetic construct
  source 1..20: mol_type = other DNA
gaggccgcggaaggcaccgg

SEQ ID NO: 21773 - DNA, 20 bp, synthetic construct
  source 1..20: mol_type = other DNA
ccgacaggtagagccagcgc

SEQ ID NO: 21774 - DNA, 20 bp, synthetic construct
  source 1..20: mol_type = other DNA
gcacgtacgcgaagactccc

SEQ ID NO: 21775 - DNA, 20 bp, synthetic construct
  source 1..20: mol_type = other DNA
ggcacgcttcgactacgacc

SEQ ID NO: 21776 - DNA, 20 bp, synthetic construct
  source 1..20: mol_type = other DNA
aaggccgccaaagacgtgct

SEQ ID NO: 21777 - DNA, 20 bp, synthetic construct
  source 1..20: mol_type = other DNA
gcgctcagcgtagtaaatca

SEQ ID NO: 21778 - DNA, 20 bp, synthetic construct
  source 1..20: mol_type = other DNA
ccgagctcctcctcaaacag

SEQ ID NO: 21779 - DNA, 20 bp, synthetic construct
  source 1..20: mol_type = other DNA
tcgaagagcgcccacacgcg

SEQ ID NO: 21780 - DNA, 20 bp, synthetic construct
  source 1..20: mol_type = other DNA
cgaggacccctactcgtcgc

SEQ ID NO: 21781 - DNA, 20 bp, synthetic construct
  source 1..20: mol_type = other DNA
ctgcccttctatctcgaggt

SEQ ID NO: 21782 - DNA, 20 bp, synthetic construct
  source 1..20: mol_type = other DNA
gccgcaggcgcccacgacgg

SEQ ID NO: 21783 - DNA, 20 bp, synthetic construct
  source 1..20: mol_type = other DNA
cacgcacaccccctccacgt

SEQ ID NO: 21784 - DNA, 20 bp, synthetic construct
  source 1..20: mol_type = other DNA
tgttctccggaggtgccccg

SEQ ID NO: 21785 - DNA, 20 bp, synthetic construct
  source 1..20: mol_type = other DNA
ggagaacatcaccaacgtgg

SEQ ID NO: 21786 - DNA, 20 bp, synthetic construct
  source 1..20: mol_type = other DNA
ggcagaaggtgatgcgcatg

SEQ ID NO: 21787 - DNA, 20 bp, synthetic construct
  source 1..20: mol_type = other DNA
gcagcatcgcgacgctgagg

SEQ ID NO: 21788 - DNA, 20 bp, synthetic construct
  source 1..20: mol_type = other DNA
tggagcccaggatgtcatcg

SEQ ID NO: 21789 - DNA, 20 bp, synthetic construct
  source 1..20: mol_type = other DNA
tccagctacatctcgcacct

SEQ ID NO: 21790 - DNA, 20 bp, synthetic construct
  source 1..20: mol_type = other DNA
ctgtcggaggacgaggaccg

SEQ ID NO: 21791 - DNA, 20 bp, synthetic construct
  source 1..20: mol_type = other DNA
gggtacaggtagcggcccgg

SEQ ID NO: 21792 - DNA, 20 bp, synthetic construct
  source 1..20: mol_type = other DNA
gaaaccctgtcgcgtgcacg

SEQ ID NO: 21793 - DNA, 20 bp, synthetic construct
  source 1..20: mol_type = other DNA
aatcttggagagcttgcggt

SEQ ID NO: 21794 - DNA, 20 bp, synthetic construct
  source 1..20: mol_type = other DNA
gaaggccgtgttcacgctgt

SEQ ID NO: 21795 - DNA, 20 bp, synthetic construct
  source 1..20: mol_type = other DNA
cgaggtgagcccgctgtcgg

SEQ ID NO: 21796 - DNA, 20 bp, synthetic construct
  source 1..20: mol_type = other DNA
caggtgcgagatgtagctgg

SEQ ID NO: 21797 - DNA, 20 bp, synthetic construct
  source 1..20: mol_type = other DNA
cttggagagcttgcggtcgg

SEQ ID NO: 21798 - DNA, 20 bp, synthetic construct
  source 1..20: mol_type = other DNA
ccgacagcgggctcacctcg

SEQ ID NO: 21799 - DNA, 20 bp, synthetic construct
  source 1..20: mol_type = other DNA
gaccgcggcagcgacagctc

SEQ ID NO: 21800 - DNA, 20 bp, synthetic construct
  source 1..20: mol_type = other DNA
tgcggtcggcgggctcggtg

SEQ ID NO: 21801 - DNA, 20 bp, synthetic construct
  source 1..20: mol_type = other DNA
caggccgtgagccccggcag

SEQ ID NO: 21802 - DNA, 20 bp, synthetic construct
  source 1..20: mol_type = other DNA
tgagccccggcagcggcaca

SEQ ID NO: 21803 - DNA, 20 bp, synthetic construct
  source 1..20: mol_type = other DNA
cagcgtgcgcagcgccgtga

SEQ ID NO: 21804 - DNA, 20 bp, synthetic construct
  source 1..20: mol_type = other DNA
agggcgagtcccgtatccgg

SEQ ID NO: 21805 - DNA, 20 bp, synthetic construct
  source 1..20: mol_type = other DNA
cggtagtggccgcccatgtg

SEQ ID NO: 21806 - DNA, 20 bp, synthetic construct
  source 1..20: mol_type = other DNA
gccggcgaacagcggagcac

SEQ ID NO: 21807 - DNA, 20 bp, synthetic construct
  source 1..20: mol_type = other DNA
ggggtccacgccgtccagcg

SEQ ID NO: 21808 - DNA, 20 bp, synthetic construct
  source 1..20: mol_type = other DNA
tccactgtgcaggcaagtcg

SEQ ID NO: 21809 - DNA, 20 bp, synthetic construct
  source 1..20: mol_type = other DNA
aacgggtagccgtcgagcgg

SEQ ID NO: 21810 - DNA, 20 bp, synthetic construct
  source 1..20: mol_type = other DNA
gggctaaggacgagcgcaag

SEQ ID NO: 21811 - DNA, 20 bp, synthetic construct
  source 1..20: mol_type = other DNA
gagccccatcggggacatga

SEQ ID NO: 21812 - DNA, 20 bp, synthetic construct
  source 1..20: mol_type = other DNA
gcggaggcgcgcccagactc

SEQ ID NO: 21813 - DNA, 20 bp, synthetic construct
  source 1..20: mol_type = other DNA
cgagacctgcgcgtagctgt

SEQ ID NO: 21814 - DNA, 20 bp, synthetic construct
  source 1..20: mol_type = other DNA
cccagcccggccatcaccgc

SEQ ID NO: 21815 - DNA, 20 bp, synthetic construct
  source 1..20: mol_type = other DNA
ggctcagcgactcggcccag

SEQ ID NO: 21816 - DNA, 20 bp, synthetic construct
  source 1..20: mol_type = other DNA
actacaagtaccggccgcgg

SEQ ID NO: 21817 - DNA, 20 bp, synthetic construct
  source 1..20: mol_type = other DNA
gactctggcagtcgcggtag

SEQ ID NO: 21818 - DNA, 20 bp, synthetic construct
  source 1..20: mol_type = other DNA
gtcgtggaaggcgctgacgc

SEQ ID NO: 21819 - DNA, 20 bp, synthetic construct
  source 1..20: mol_type = other DNA
gcactgcgtatataggccga

SEQ ID NO: 21820 - DNA, 20 bp, synthetic construct
  source 1..20: mol_type = other DNA
atagcagaacgacttcgaag

SEQ ID NO: 21821 - DNA, 20 bp, synthetic construct
  source 1..20: mol_type = other DNA
gcagtaccaagtgtatctag

SEQ ID NO: 21822 - DNA, 20 bp, synthetic construct
  source 1..20: mol_type = other DNA
actttggcagaatctagcta

SEQ ID NO: 21823 - DNA, 20 bp, synthetic construct
  source 1..20: mol_type = other DNA
gtgactattgcagtaaatag

SEQ ID NO: 21824 - DNA, 20 bp, synthetic construct
  source 1..20: mol_type = other DNA
tatatcatcctatacttggt

SEQ ID NO: 21825 - DNA, 20 bp, synthetic construct
  source 1..20: mol_type = other DNA
gcagaacagaatgccaccag

SEQ ID NO: 21826 - DNA, 20 bp, synthetic construct
  source 1..20: mol_type = other DNA
tcttggcacgcataacatgt

SEQ ID NO: 21827 - DNA, 20 bp, synthetic construct
  source 1..20: mol_type = other DNA
tcttaggtcatcaagtcatg

SEQ ID NO: 21828 - DNA, 20 bp, synthetic construct
  source 1..20: mol_type = other DNA
aggcgttatgaagagcacct

SEQ ID NO: 21829 - DNA, 20 bp, synthetic construct
  source 1..20: mol_type = other DNA
atgagactgcggaagctcgg

SEQ ID NO: 21830 - DNA, 20 bp, synthetic construct
  source 1..20: mol_type = other DNA
aagcttgcagagttccacag

SEQ ID NO: 21831 - DNA, 20 bp, synthetic construct
  source 1..20: mol_type = other DNA
ctggtgtctgaagaacagag

SEQ ID NO: 21832 - DNA, 20 bp, synthetic construct
  source 1..20: mol_type = other DNA
tcagaagtgctgctacttcg

SEQ ID NO: 21833 - DNA, 20 bp, synthetic construct
  source 1..20: mol_type = other DNA
aacacaagcatctaattctg

SEQ ID NO: 21834 - DNA, 20 bp, synthetic construct
  source 1..20: mol_type = other DNA
aaattgcgtcccctcagcgg

SEQ ID NO: 21835 - DNA, 20 bp, synthetic construct
  source 1..20: mol_type = other DNA
gacacagccctgaatccccg

SEQ ID NO: 21836 - DNA, 20 bp, synthetic construct
  source 1..20: mol_type = other DNA
aggtcttcgagctggaacgc

SEQ ID NO: 21837 - DNA, 20 bp, synthetic construct
  source 1..20: mol_type = other DNA
accgtgtggacatagccctg

SEQ ID NO: 21838 - DNA, 20 bp, synthetic construct
  source 1..20: mol_type = other DNA
gcttgcgagaagaggacccg

SEQ ID NO: 21839 - DNA, 20 bp, synthetic construct
  source 1..20: mol_type = other DNA
tcagcggcggccagcatgca

SEQ ID NO: 21840 - DNA, 20 bp, synthetic construct
  source 1..20: mol_type = other DNA
ggtcctcttctcgcaagccc

SEQ ID NO: 21841 - DNA, 20 bp, synthetic construct
  source 1..20: mol_type = other DNA
agactcgtgcagcgagccca

SEQ ID NO: 21842 - DNA, 20 bp, synthetic construct
  source 1..20: mol_type = other DNA
cctgaagctcacatccactc

SEQ ID NO: 21843 - DNA, 20 bp, synthetic construct
  source 1..20: mol_type = other DNA
ggaacatgaagaggagcccg

SEQ ID NO: 21844 - DNA, 20 bp, synthetic construct
  source 1..20: mol_type = other DNA
gacggccggagactgcaagg

SEQ ID NO: 21845 - DNA, 20 bp, synthetic construct
  source 1..20: mol_type = other DNA
gggacagccacgcggcgcgg

SEQ ID NO: 21846 - DNA, 20 bp, synthetic construct
  source 1..20: mol_type = other DNA
ccatggtgcgcacttgcagg

SEQ ID NO: 21847 - DNA, 20 bp, synthetic construct
  source 1..20: mol_type = other DNA
ccgcctgcaagtgcgcacca

SEQ ID NO: 21848 - DNA, 20 bp, synthetic construct
  source 1..20: mol_type = other DNA
caggacaagtctctggagct

SEQ ID NO: 21849 - DNA, 20 bp, synthetic construct
  source 1..20: mol_type = other DNA
agaaaaccataagctatgga

SEQ ID NO: 21850 - DNA, 20 bp, synthetic construct
  source 1..20: mol_type = other DNA
caagccagttgcataatgag

SEQ ID NO: 21851 - DNA, 20 bp, synthetic construct
  source 1..20: mol_type = other DNA
gagctgtgggacaatgctcg

SEQ ID NO: 21852 - DNA, 20 bp, synthetic construct
  source 1..20: mol_type = other DNA
accatgctcctaccgctgtg

SEQ ID NO: 21853 - DNA, 20 bp, synthetic construct
  source 1..20: mol_type = other DNA
atggtatcgatcttgggcaa

SEQ ID NO: 21854 - DNA, 20 bp, synthetic construct
  source 1..20: mol_type = other DNA
aactcaagacaactatgaag

SEQ ID NO: 21855 - DNA, 20 bp, synthetic construct
  source 1..20: mol_type = other DNA
cggtaggagcatggtgagcg

SEQ ID NO: 21856 - DNA, 20 bp, synthetic construct
  source 1..20: mol_type = other DNA
agtttctagtgagggtcgtg

SEQ ID NO: 21857 - DNA, 20 bp, synthetic construct
  source 1..20: mol_type = other DNA
tcgtggtgaagctcatgtcc

SEQ ID NO: 21858 - DNA, 20 bp, synthetic construct
  source 1..20: mol_type = other DNA
ggggcatctcgcaaaagaag

SEQ ID NO: 21859 - DNA, 20 bp, synthetic construct
  source 1..20: mol_type = other DNA
ggtctgaccaccagcatggt

SEQ ID NO: 21860 - DNA, 20 bp, synthetic construct
  source 1..20: mol_type = other DNA
gtaatggagtggcctgcaga

SEQ ID NO: 21861 - DNA, 20 bp, synthetic construct
  source 1..20: mol_type = other DNA
actcggttgcccccagccaa

SEQ ID NO: 21862 - DNA, 20 bp, synthetic construct
  source 1..20: mol_type = other DNA
ggtacatctccatctcattg

SEQ ID NO: 21863 - DNA, 20 bp, synthetic construct
  source 1..20: mol_type = other DNA
caggacaacaaagacaaagc

SEQ ID NO: 21864 - DNA, 20 bp, synthetic construct
  source 1..20: mol_type = other DNA
ggagacaggcgtgacaccac

SEQ ID NO: 21865 - DNA, 20 bp, synthetic construct
  source 1..20: mol_type = other DNA
gtggtggcagaaccgacgga

SEQ ID NO: 21866 - DNA, 20 bp, synthetic construct
  source 1..20: mol_type = other DNA
agatccagcgcaacaccctg

SEQ ID NO: 21867 - DNA, 20 bp, synthetic construct
  source 1..20: mol_type = other DNA
cgtgacctctatgcaaccca

SEQ ID NO: 21868 - DNA, 20 bp, synthetic construct
  source 1..20: mol_type = other DNA
ttcggggtagacctccatag

SEQ ID NO: 21869 - DNA, 20 bp, synthetic construct
  source 1..20: mol_type = other DNA
ccttcgaagcgaaagtactg

SEQ ID NO: 21870 - DNA, 20 bp, synthetic construct
  source 1..20: mol_type = other DNA
gggagagtcggtcatcgcta

SEQ ID NO: 21871 - DNA, 20 bp, synthetic construct
  source 1..20: mol_type = other DNA
aggcactcgggagaaagggt

SEQ ID NO: 21872 - DNA, 20 bp, synthetic construct
  source 1..20: mol_type = other DNA
ggggatgggcagcccgacga

SEQ ID NO: 21873 - DNA, 20 bp, synthetic construct
  source 1..20: mol_type = other DNA
acggactctcctataaccag

SEQ ID NO: 21874 - DNA, 20 bp, synthetic construct
  source 1..20: mol_type = other DNA
ccaagctcagtgctcgacgg

SEQ ID NO: 21875 - DNA, 20 bp, synthetic construct
  source 1..20: mol_type = other DNA
tgtacaccgcaagtcccgga

SEQ ID NO: 21876 - DNA, 20 bp, synthetic construct
  source 1..20: mol_type = other DNA
tgagtcagtacagagccgta

SEQ ID NO: 21877 - DNA, 20 bp, synthetic construct
  source 1..20: mol_type = other DNA
agcactgcgaacaggcaagg

SEQ ID NO: 21878 - DNA, 20 bp, synthetic construct
  source 1..20: mol_type = other DNA
cagccaagttatccagcgag

SEQ ID NO: 21879 - DNA, 20 bp, synthetic construct
  source 1..20: mol_type = other DNA
atacctagcggatgacacgg

SEQ ID NO: 21880 - DNA, 20 bp, synthetic construct
  source 1..20: mol_type = other DNA
agctcatgggcactgagcga

SEQ ID NO: 21881 - DNA, 20 bp, synthetic construct
  source 1..20: mol_type = other DNA
gaggttgacaagccggccca

SEQ ID NO: 21882 - DNA, 20 bp, synthetic construct
  source 1..20: mol_type = other DNA
catggccacgtcatcgtctg

SEQ ID NO: 21883 - DNA, 20 bp, synthetic construct
  source 1..20: mol_type = other DNA
ggcacttgaggagataggcg

SEQ ID NO: 21884 - DNA, 20 bp, synthetic construct
  source 1..20: mol_type = other DNA
tgcacggtacccgtgcgacg

SEQ ID NO: 21885 - DNA, 20 bp, synthetic construct
  source 1..20: mol_type = other DNA
gcagcttccagacatcgccc

SEQ ID NO: 21886 - DNA, 20 bp, synthetic construct
  source 1..20: mol_type = other DNA
caggcagcagcactgaccca

SEQ ID NO: 21887 - DNA, 20 bp, synthetic construct
  source 1..20: mol_type = other DNA
gactctggccccgcttacag

SEQ ID NO: 21888 - DNA, 20 bp, synthetic construct
  source 1..20: mol_type = other DNA
ggtagggcccaagctgcacg

SEQ ID NO: 21889 - DNA, 20 bp, synthetic construct
  source 1..20: mol_type = other DNA
aagcaccagccctacaagct

SEQ ID NO: 21890 - DNA, 20 bp, synthetic construct
  source 1..20: mol_type = other DNA
cctgcagatccatgacgagg

SEQ ID NO: 21891 - DNA, 20 bp, synthetic construct
  source 1..20: mol_type = other DNA
acccataaaacggcagctcg

SEQ ID NO: 21892 - DNA, 20 bp, synthetic construct
  source 1..20: mol_type = other DNA
tgccaagccttacccagcag

SEQ ID NO: 21893 - DNA, 20 bp, synthetic construct
  source 1..20: mol_type = other DNA
cccacctcgggctcccacgg

SEQ ID NO: 21894 - DNA, 20 bp, synthetic construct
  source 1..20: mol_type = other DNA
agagtctcccctgatgtacg

SEQ ID NO: 21895 - DNA, 20 bp, synthetic construct
  source 1..20: mol_type = other DNA
gatggagtcctcgtacatca

SEQ ID NO: 21896 - DNA, 20 bp, synthetic construct
  source 1..20: mol_type = other DNA
gatgtacgaggactccatcc

SEQ ID NO: 21897 - DNA, 20 bp, synthetic construct
  source 1..20: mol_type = other DNA
cttgtagctgagcaccacta

SEQ ID NO: 21898 - DNA, 20 bp, synthetic construct
  source 1..20: mol_type = other DNA
atggagtcctcgtacatcag

SEQ ID NO: 21899 - DNA, 20 bp, synthetic construct
  source 1..20: mol_type = other DNA
acatgactttgaattccccc

SEQ ID NO: 21900 - DNA, 20 bp, synthetic construct
  source 1..20: mol_type = other DNA
tgatgataaacagttccaga

SEQ ID NO: 21901 - DNA, 20 bp, synthetic construct
  source 1..20: mol_type = other DNA
tcaaggccctcctgttaccc

SEQ ID NO: 21902 - DNA, 20 bp, synthetic construct
  source 1..20: mol_type = other DNA
ccccacttcctgcatcacac

SEQ ID NO: 21903 - DNA, 20 bp, synthetic construct
  source 1..20: mol_type = other DNA
acttgtagctgagcaccact

SEQ ID NO: 21904 - DNA, 20 bp, synthetic construct
  source 1..20: mol_type = other DNA
ttacccaggctgtgagtctg

SEQ ID NO: 21905 - DNA, 20 bp, synthetic construct
  source 1..20: mol_type = other DNA
ttatcatcaaactcctcctg

SEQ ID NO: 21906 - DNA, 20 bp, synthetic construct
  source 1..20: mol_type = other DNA
cctggagtcctgtgtgatgc

SEQ ID NO: 21907 - DNA, 20 bp, synthetic construct
  source 1..20: mol_type = other DNA
tatcatcaaactcctcctgg

SEQ ID NO: 21908 - DNA, 20 bp, synthetic construct
  source 1..20: mol_type = other DNA
tgactttgaattcccccagg

SEQ ID NO: 21909 - DNA, 20 bp, synthetic construct
  source 1..20: mol_type = other DNA
tgtcagggcattgttatccg

SEQ ID NO: 21910 - DNA, 20 bp, synthetic construct
  source 1..20: mol_type = other DNA
ggtttcgagacatcgttgtg

SEQ ID NO: 21911 - DNA, 20 bp, synthetic construct
  source 1..20: mol_type = other DNA
ggacaaccggccaattaggt

SEQ ID NO: 21912 - DNA, 20 bp, synthetic construct
  source 1..20: mol_type = other DNA
ggctctgctctgaccaacgg

SEQ ID NO: 21913 - DNA, 20 bp, synthetic construct
  source 1..20: mol_type = other DNA
aatgggagtatcttatccga

SEQ ID NO: 21914 - DNA, 20 bp, synthetic construct
  source 1..20: mol_type = other DNA
gcgtgacagtcgaggcccgt

SEQ ID NO: 21915 - DNA, 20 bp, synthetic construct
  source 1..20: mol_type = other DNA
acgggagcaccgaggacacg

SEQ ID NO: 21916 - DNA, 20 bp, synthetic construct
  source 1..20: mol_type = other DNA
gaagcgaattaaccctcccc

SEQ ID NO: 21917 - DNA, 20 bp, synthetic construct
  source 1..20: mol_type = other DNA
gttgtccagcgaccggcgaa

SEQ ID NO: 21918 - DNA, 20 bp, synthetic construct
  source 1..20: mol_type = other DNA
tcagaacgggatggaaaatg

SEQ ID NO: 21919 - DNA, 20 bp, synthetic construct
  source 1..20: mol_type = other DNA
cgtgaatcacgctacactgg

SEQ ID NO: 21920 - DNA, 20 bp, synthetic construct
  source 1..20: mol_type = other DNA
ccggctctgagaaggatgag

SEQ ID NO: 21921 - DNA, 20 bp, synthetic construct
  source 1..20: mol_type = other DNA
gccagaatgaaagcaactgt

SEQ ID NO: 21922 - DNA, 20 bp, synthetic construct
  source 1..20: mol_type = other DNA
cagcagtttgctgtcgtctg

SEQ ID NO: 21923 - DNA, 20 bp, synthetic construct
  source 1..20: mol_type = other DNA
taacaatgccctgacacctg

SEQ ID NO: 21924 - DNA, 20 bp, synthetic construct
  source 1..20: mol_type = other DNA
ccattgttgtcactacgcgt

SEQ ID NO: 21925 - DNA, 20 bp, synthetic construct
  source 1..20: mol_type = other DNA
gctcccggacaagtcatcgg

SEQ ID NO: 21926 - DNA, 20 bp, synthetic construct
  source 1..20: mol_type = other DNA
gtggctgtgtcggtactgcg

SEQ ID NO: 21927 - DNA, 20 bp, synthetic construct
  source 1..20: mol_type = other DNA
ctagtggatgaacccttgag

SEQ ID NO: 21928 - DNA, 20 bp, synthetic construct
  source 1..20: mol_type = other DNA
tgaggcccgtggctaccggt

SEQ ID NO: 21929 - DNA, 20 bp, synthetic construct
  source 1..20: mol_type = other DNA
gggtaacgggtactcactgg

SEQ ID NO: 21930 - DNA, 20 bp, synthetic construct
  source 1..20: mol_type = other DNA
tccagtacactcctctgacg

SEQ ID NO: 21931 - DNA, 20 bp, synthetic construct
  source 1..20: mol_type = other DNA
gtcagatgcaacgcgagtga

SEQ ID NO: 21932 - DNA, 20 bp, synthetic construct
  source 1..20: mol_type = other DNA
gcacactctccgggaaacga

SEQ ID NO: 21933 - DNA, 20 bp, synthetic construct
  source 1..20: mol_type = other DNA
agcctcgacacacgacccac

SEQ ID NO: 21934 - DNA, 20 bp, synthetic construct
  source 1..20: mol_type = other DNA
cagcgacacagtaccgcgtg

SEQ ID NO: 21935 - DNA, 20 bp, synthetic construct
  source 1..20: mol_type = other DNA
agtgggaaccacggttgcag

SEQ ID NO: 21936 - DNA, 20 bp, synthetic construct
  source 1..20: mol_type = other DNA
ccatgtcacacggtagccag

SEQ ID NO: 21937 - DNA, 20 bp, synthetic construct
  source 1..20: mol_type = other DNA
caaagtcaccgagtcgatcg

SEQ ID NO: 21938 - DNA, 20 bp, synthetic construct
  source 1..20: mol_type = other DNA
gccctctacgccaacagcat

SEQ ID NO: 21939 - DNA, 20 bp, synthetic construct
  source 1..20: mol_type = other DNA
taggagtaaatcctccactg

SEQ ID NO: 21940 - DNA, 20 bp, synthetic construct
  source 1..20: mol_type = other DNA
tctattgccataccatgctg

SEQ ID NO: 21941 - DNA, 20 bp, synthetic construct
  source 1..20: mol_type = other DNA
catacacttcatgccaacgg

SEQ ID NO: 21942 - DNA, 20 bp, synthetic construct
  source 1..20: mol_type = other DNA
catccacagcccctcgtaca

SEQ ID NO: 21943 - DNA, 20 bp, synthetic construct
  source 1..20: mol_type = other DNA
ggcgccgatccatcccagga

SEQ ID NO: 21944 - DNA, 20 bp, synthetic construct
  source 1..20: mol_type = other DNA
agcaacccgtgccttgatgg

SEQ ID NO: 21945 - DNA, 20 bp, synthetic construct
  source 1..20: mol_type = other DNA
tggaggatttactcctatgc

SEQ ID NO: 21946 - DNA, 20 bp, synthetic construct
  source 1..20: mol_type = other DNA
cgacaacatcgtgaccgccc

SEQ ID NO: 21947 - DNA, 20 bp, synthetic construct
  source 1..20: mol_type = other DNA
gggcagggcagtgctgacga

SEQ ID NO: 21948 - DNA, 20 bp, synthetic construct
  source 1..20: mol_type = other DNA
gactttgcactggatctgcc

SEQ ID NO: 21949 - DNA, 20 bp, synthetic construct
  source 1..20: mol_type = other DNA
ggcggtcacgatgttgtcgc

SEQ ID NO: 21950 - DNA, 20 bp, synthetic construct
  source 1..20: mol_type = other DNA
cctgcgtgtcgcagagcacc

SEQ ID NO: 21951 - DNA, 20 bp, synthetic construct
  source 1..20: mol_type = other DNA
atgaggatggctgtcattgg

SEQ ID NO: 21952 - DNA, 20 bp, synthetic construct
  source 1..20: mol_type = other DNA
aggagtcaaagactttgcac

SEQ ID NO: 21953 - DNA, 20 bp, synthetic construct
  source 1..20: mol_type = other DNA
tgaggtgcagaagatgagga

SEQ ID NO: 21954 - DNA, 20 bp, synthetic construct
  source 1..20: mol_type = other DNA
catcacaggacccaaaaggg

SEQ ID NO: 21955 - DNA, 20 bp, synthetic construct
  source 1..20: mol_type = other DNA
aacgggccgaagacttccag

SEQ ID NO: 21956 - DNA, 20 bp, synthetic construct
  source 1..20: mol_type = other DNA
tatgaggctatgactaaact

SEQ ID NO: 21957 - DNA, 20 bp, synthetic construct
  source 1..20: mol_type = other DNA
gctccagggaatctccccga

SEQ ID NO: 21958 - DNA, 20 bp, synthetic construct
  source 1..20: mol_type = other DNA
agaggaaggaaatgattcgg

SEQ ID NO: 21959 - DNA, 20 bp, synthetic construct
  source 1..20: mol_type = other DNA
cattatccaaatcattcccc

SEQ ID NO: 21960 - DNA, 20 bp, synthetic construct
  source 1..20: mol_type = other DNA
ggtatttgagcaccaaccgt

SEQ ID NO: 21961 - DNA, 20 bp, synthetic construct
  source 1..20: mol_type = other DNA
tggtatttgagcaccaaccg

SEQ ID NO: 21962 - DNA, 20 bp, synthetic construct
  source 1..20: mol_type = other DNA
tttgcaaggagacccacggt

SEQ ID NO: 21963 - DNA, 20 bp, synthetic construct
  source 1..20: mol_type = other DNA
ctgagagacactcaccttcg

SEQ ID NO: 21964 - DNA, 20 bp, synthetic construct
  source 1..20: mol_type = other DNA
tggataatgaccctaaccgt

SEQ ID NO: 21965 - DNA, 20 bp, synthetic construct
  source 1..20: mol_type = other DNA
cagagaagatccaaaaggtg

SEQ ID NO: 21966 - DNA, 20 bp, synthetic construct
  source 1..20: mol_type = other DNA
gtgggaaaagatgaaagcct

SEQ ID NO: 21967 - DNA, 20 bp, synthetic construct
  source 1..20: mol_type = other DNA
ttggataatgaccctaaccg

SEQ ID NO: 21968 - DNA, 20 bp, synthetic construct
  source 1..20: mol_type = other DNA
gaccctaaccgtgggaatca

SEQ ID NO: 21969 - DNA, 20 bp, synthetic construct
  source 1..20: mol_type = other DNA
tggatcatatcgttcaacac

SEQ ID NO: 21970 - DNA, 20 bp, synthetic construct
  source 1..20: mol_type = other DNA
aagacgtcctcaattacccc

SEQ ID NO: 21971 - DNA, 20 bp, synthetic construct
  source 1..20: mol_type = other DNA
acggaaacctatccgatgtg

SEQ ID NO: 21972 - DNA, 20 bp, synthetic construct
  source 1..20: mol_type = other DNA
aggaacttgggactaagcaa

SEQ ID NO: 21973 - DNA, 20 bp, synthetic construct
  source 1..20: mol_type = other DNA
actgcaccaaccaccaactg

SEQ ID NO: 21974 - DNA, 20 bp, synthetic construct
  source 1..20: mol_type = other DNA
tgatccgagacattgacgag

SEQ ID NO: 21975 - DNA, 20 bp, synthetic construct
  source 1..20: mol_type = other DNA
caagaacgaccactaatgca

SEQ ID NO: 21976 - DNA, 20 bp, synthetic construct
  source 1..20: mol_type = other DNA
aggctgacaaaatgactcga

SEQ ID NO: 21977 - DNA, 20 bp, synthetic construct
  source 1..20: mol_type = other DNA
caagcaccctcgacaaacct

SEQ ID NO: 21978 - DNA, 20 bp, synthetic construct
  source 1..20: mol_type = other DNA
gcgaacgtttagctcatcac

SEQ ID NO: 21979 - DNA, 20 bp, synthetic construct
  source 1..20: mol_type = other DNA
gatctgttatatgcagtagg

SEQ ID NO: 21980 - DNA, 20 bp, synthetic construct
  source 1..20: mol_type = other DNA
cagcaaaagcccgaatgccc

SEQ ID NO: 21981 - DNA, 20 bp, synthetic construct
  source 1..20: mol_type = other DNA
gcaccacatcacatagctcc

SEQ ID NO: 21982 - DNA, 20 bp, synthetic construct
  source 1..20: mol_type = other DNA
ctgaatactgtatttgaccc

SEQ ID NO: 21983 - DNA, 20 bp, synthetic construct
  source 1..20: mol_type = other DNA
atgtgatgtggtgctagttg

SEQ ID NO: 21984 - DNA, 20 bp, synthetic construct
  source 1..20: mol_type = other DNA
tcacggccgcgatgtagcag

SEQ ID NO: 21985 - DNA, 20 bp, synthetic construct
  source 1..20: mol_type = other DNA
gagcaccgtcccatacccgg

SEQ ID NO: 21986 - DNA, 20 bp, synthetic construct
  source 1..20: mol_type = other DNA
gtggactggacgctgaccaa

SEQ ID NO: 21987 - DNA, 20 bp, synthetic construct
  source 1..20: mol_type = other DNA
tcatactatcagagcaacag

SEQ ID NO: 21988 - DNA, 20 bp, synthetic construct
  source 1..20: mol_type = other DNA
gcacccgctgtcaaccgctg

SEQ ID NO: 21989 - DNA, 20 bp, synthetic construct
  source 1..20: mol_type = other DNA
tagacgaggccatgctcacg

SEQ ID NO: 21990 - DNA, 20 bp, synthetic construct
  source 1..20: mol_type = other DNA
ccagtgatgagatcgtacca

SEQ ID NO: 21991 - DNA, 20 bp, synthetic construct
  source 1..20: mol_type = other DNA
gaccggattcaacacatccc

SEQ ID NO: 21992 - DNA, 20 bp, synthetic construct
  source 1..20: mol_type = other DNA
cagctcaggaggcacgaccg

SEQ ID NO: 21993 - DNA, 20 bp, synthetic construct
  source 1..20: mol_type = other DNA
ggacagtgagcgcgtgcgcg

SEQ ID NO: 21994 - DNA, 20 bp, synthetic construct
  source 1..20: mol_type = other DNA
ctgcatgagcgagtggcacg

SEQ ID NO: 21995 - DNA, 20 bp, synthetic construct
  source 1..20: mol_type = other DNA
gagggtgactgcgaacaacc

SEQ ID NO: 21996 - DNA, 20 bp, synthetic construct
  source 1..20: mol_type = other DNA
tgtgctgctttgacaagacg

SEQ ID NO: 21997 - DNA, 20 bp, synthetic construct
  source 1..20: mol_type = other DNA
cggctgcacgtcatcttcgg

SEQ ID NO: 21998 - DNA, 20 bp, synthetic construct
  source 1..20: mol_type = other DNA
ctttacgctatccatgctgg

SEQ ID NO: 21999 - DNA, 20 bp, synthetic construct
  source 1..20: mol_type = other DNA
gctgggcaaatactacgtca

SEQ ID NO: 22000 - DNA, 20 bp, synthetic construct
  source 1..20: mol_type = other DNA
cgaccagatcacgtggatcg

SEQ ID NO: 22001 - DNA, 20 bp, synthetic construct
  source 1..20: mol_type = other DNA
gacaggctggtcctctactg

SEQ ID NO: 22002 - DNA, 20 bp, synthetic construct
  source 1..20: mol_type = other DNA
gatgcagcgaccatcaccgt

SEQ ID NO: 22003 - DNA, 20 bp, synthetic construct
  source 1..20: mol_type = other DNA
aacaggttatgttcgccacg

SEQ ID NO: 22004 - DNA, 20 bp, synthetic construct
  source 1..20: mol_type = other DNA
aagcccacctcgtgcagaca

SEQ ID NO: 22005 - DNA, 20 bp, synthetic construct
  source 1..20: mol_type = other DNA
gtctccaagcgacacctgcg

SEQ ID NO: 22006 - DNA, 20 bp, synthetic construct
  source 1..20: mol_type = other DNA
tagcaagccaccattgccta

SEQ ID NO: 22007 - DNA, 20 bp, synthetic construct
  source 1..20: mol_type = other DNA
tggatcgggggcaacgagga

SEQ ID NO: 22008 - DNA, 20 bp, synthetic construct
  source 1..20: mol_type = other DNA
acagggcacgatgtactcca

SEQ ID NO: 22009 - DNA, 20 bp, synthetic construct
  source 1..20: mol_type = other DNA
caagcagctgcactgcaccg

SEQ ID NO: 22010 - DNA, 20 bp, synthetic construct
  source 1..20: mol_type = other DNA
agaggaccagcctgtcgatg

SEQ ID NO: 22011 - DNA, 20 bp, synthetic construct
  source 1..20: mol_type = other DNA
gtgccctgtctgcacgaggt

SEQ ID NO: 22012 - DNA, 20 bp, synthetic construct
  source 1..20: mol_type = other DNA
gagggacaggaggaagctga

SEQ ID NO: 22013 - DNA, 20 bp, synthetic construct
  source 1..20: mol_type = other DNA
ggtggtgggcgactgcgtcc

SEQ ID NO: 22014 - DNA, 20 bp, synthetic construct
  source 1..20: mol_type = other DNA
aggctgttaaacggtatcgg

SEQ ID NO: 22015 - DNA, 20 bp, synthetic construct
  source 1..20: mol_type = other DNA
cagcggtaacgacaacaacc

SEQ ID NO: 22016 - DNA, 20 bp, synthetic construct
  source 1..20: mol_type = other DNA
gccccggcgagctaagcccg

SEQ ID NO: 22017 - DNA, 20 bp, synthetic construct
  source 1..20: mol_type = other DNA
ggcggaggctcggatagcgg

SEQ ID NO: 22018 - DNA, 20 bp, synthetic construct
  source 1..20: mol_type = other DNA
gtggcagcgccgaaaagagg

SEQ ID NO: 22019 - DNA, 20 bp, synthetic construct
  source 1..20: mol_type = other DNA
ggtgccagtccggttgcctg

SEQ ID NO: 22020 - DNA, 20 bp, synthetic construct
  source 1..20: mol_type = other DNA
agaagaaggagtacgtgatg

SEQ ID NO: 22021 - DNA, 20 bp, synthetic construct
  source 1..20: mol_type = other DNA
atccgagcctccgccagacg

SEQ ID NO: 22022 - DNA, 20 bp, synthetic construct
  source 1..20: mol_type = other DNA
ccttaatcgactgaagaaga

SEQ ID NO: 22023 - DNA, 20 bp, synthetic construct
  source 1..20: mol_type = other DNA
aggcggagaaagtccccagg

SEQ ID NO: 22024 - DNA, 20 bp, synthetic construct
  source 1..20: mol_type = other DNA
aggcggcgacaaagagtccc

SEQ ID NO: 22025 - DNA, 20 bp, synthetic construct
  source 1..20: mol_type = other DNA
caggcaaccggactggcacc

SEQ ID NO: 22026 - DNA, 20 bp, synthetic construct
  source 1..20: mol_type = other DNA
aggcgatcgccagcctcccg

SEQ ID NO: 22027 - DNA, 20 bp, synthetic construct
  source 1..20: mol_type = other DNA
tcttcttcagtcgattaagg

SEQ ID NO: 22028 - DNA, 20 bp, synthetic construct
  source 1..20: mol_type = other DNA
cgtgcgcgcgccctcccccg

SEQ ID NO: 22029 - DNA, 20 bp, synthetic construct
  source 1..20: mol_type = other DNA
caagtgactaaactcgacga

SEQ ID NO: 22030 - DNA, 20 bp, synthetic construct
  source 1..20: mol_type = other DNA
cgggctccgagactcagcgt

SEQ ID NO: 22031 - DNA, 20 bp, synthetic construct
  source 1..20: mol_type = other DNA
tatctccccgtatagatccg

SEQ ID NO: 22032 - DNA, 20 bp, synthetic construct
  source 1..20: mol_type = other DNA
aagcagacccaactgaaccg

SEQ ID NO: 22033 - DNA, 20 bp, synthetic construct
  source 1..20: mol_type = other DNA
tagtagctgtagtcgaccgg

SEQ ID NO: 22034 - DNA, 20 bp, synthetic construct
  source 1..20: mol_type = other DNA
gcaggacgctacacgatgga

SEQ ID NO: 22035 - DNA, 20 bp, synthetic construct
  source 1..20: mol_type = other DNA
taccagtacgatgagacctc

SEQ ID NO: 22036 - DNA, 20 bp, synthetic construct
  source 1..20: mol_type = other DNA
ggactatcggaccgagcaag

SEQ ID NO: 22037 - DNA, 20 bp, synthetic construct
  source 1..20: mol_type = other DNA
cacccaccactcactatcga

SEQ ID NO: 22038 - DNA, 20 bp, synthetic construct
  source 1..20: mol_type = other DNA
catctaccaacaatcagccg

SEQ ID NO: 22039 - DNA, 20 bp, synthetic construct
  source 1..20: mol_type = other DNA
gaggaggacagcaccgcgta

SEQ ID NO: 22040 - DNA, 20 bp, synthetic construct
  source 1..20: mol_type = other DNA
tgatccagcctcgtgccgag

SEQ ID NO: 22041 - DNA, 20 bp, synthetic construct
  source 1..20: mol_type = other DNA
tgactatgacgactcatctg

SEQ ID NO: 22042 - DNA, 20 bp, synthetic construct
  source 1..20: mol_type = other DNA
gcacggcgtgcaagcacggg

SEQ ID NO: 22043 - DNA, 20 bp, synthetic construct
  source 1..20: mol_type = other DNA
tgagcattgtagtaatactg

SEQ ID NO: 22044 - DNA, 20 bp, synthetic construct
  source 1..20: mol_type = other DNA
gtggggccgctgtaccccgg

SEQ ID NO: 22045 - DNA, 20 bp, synthetic construct
  source 1..20: mol_type = other DNA
ggacgcagtctgcatgctcg

SEQ ID NO: 22046 - DNA, 20 bp, synthetic construct
  source 1..20: mol_type = other DNA
gtgttgatacagcggactcg

SEQ ID NO: 22047 - DNA, 20 bp, synthetic construct
  source 1..20: mol_type = other DNA
agaccagcgcaacacggacg

SEQ ID NO: 22048 - DNA, 20 bp, synthetic construct
  source 1..20: mol_type = other DNA
acatcaacgagtgtgagacc

SEQ ID NO: 22049 - DNA, 20 bp, synthetic construct
  source 1..20: mol_type = other DNA
ggaactgcaggaaaccaacg

SEQ ID NO: 22050 - DNA, 20 bp, synthetic construct
  source 1..20: mol_type = other DNA
ggtctgagttgggtacccta

SEQ ID NO: 22051 - DNA, 20 bp, synthetic construct
  source 1..20: mol_type = other DNA
atgcagcagtcagtacgcac

SEQ ID NO: 22052 - DNA, 20 bp, synthetic construct
  source 1..20: mol_type = other DNA
gcactgcaccgacgtcaacg

SEQ ID NO: 22053 - DNA, 20 bp, synthetic construct
  source 1..20: mol_type = other DNA
actccgtgtgcatcaacacc

SEQ ID NO: 22054 - DNA, 20 bp, synthetic construct
  source 1..20: mol_type = other DNA
cgatggctcgcggtcgtgcg

SEQ ID NO: 22055 - DNA, 20 bp, synthetic construct
  source 1..20: mol_type = other DNA
tgggcactgttaggcaccgt

SEQ ID NO: 22056 - DNA, 20 bp, synthetic construct
  source 1..20: mol_type = other DNA
ggagcgccagtgccgtaagg

SEQ ID NO: 22057 - DNA, 20 bp, synthetic construct
  source 1..20: mol_type = other DNA
gtgatggagtgtgacgcgtg

SEQ ID NO: 22058 - DNA, 20 bp, synthetic construct
  source 1..20: mol_type = other DNA
gcgtgcgacgacgacatcga

SEQ ID NO: 22059 - DNA, 20 bp, synthetic construct
  source 1..20: mol_type = other DNA
caaggatggatagttaccca

SEQ ID NO: 22060 - DNA, 20 bp, synthetic construct
  source 1..20: mol_type = other DNA
tattcggacttacacacccc

SEQ ID NO: 22061 - DNA, 20 bp, synthetic construct
  source 1..20: mol_type = other DNA
atcactgtctggaaccacac

SEQ ID NO: 22062 - DNA, 20 bp, synthetic construct
  source 1..20: mol_type = other DNA
ctggagcaaaatattgtccc

SEQ ID NO: 22063 - DNA, 20 bp, synthetic construct
  source 1..20: mol_type = other DNA
gggtggcagagccataggtc

SEQ ID NO: 22064 - DNA, 20 bp, synthetic construct
  source 1..20: mol_type = other DNA
tcttatgaaagtccctccag

SEQ ID NO: 22065 - DNA, 20 bp, synthetic construct
  source 1..20: mol_type = other DNA
tagacgtagaatcctatcac

SEQ ID NO: 22066 - DNA, 20 bp, synthetic construct
  source 1..20: mol_type = other DNA
gggtgcttacagatcagtga

SEQ ID NO: 22067 - DNA, 20 bp, synthetic construct
  source 1..20: mol_type = other DNA
tgcatactgtgagcaccccc

SEQ ID NO: 22068 - DNA, 20 bp, synthetic construct
  source 1..20: mol_type = other DNA
gtaggtgatttgaatggctc

SEQ ID NO: 22069 - DNA, 20 bp, synthetic construct
  source 1..20: mol_type = other DNA
ttggccagcaaagaccagac

SEQ ID NO: 22070 - DNA, 20 bp, synthetic construct
  source 1..20: mol_type = other DNA
tgccacccaagacctcatag

SEQ ID NO: 22071 - DNA, 20 bp, synthetic construct
  source 1..20: mol_type = other DNA
ctgtggtcaggatcagcacg

SEQ ID NO: 22072 - DNA, 20 bp, synthetic construct
  source 1..20: mol_type = other DNA
tctatgagcccctagagtac

SEQ ID NO: 22073 - DNA, 20 bp, synthetic construct
  source 1..20: mol_type = other DNA
attcattataatgttcacgg

SEQ ID NO: 22074 - DNA, 20 bp, synthetic construct
  source 1..20: mol_type = other DNA
atgcgggagcagtacatgcg

SEQ ID NO: 22075 - DNA, 20 bp, synthetic construct
  source 1..20: mol_type = other DNA
agaagatgcttataagaccc

SEQ ID NO: 22076 - DNA, 20 bp, synthetic construct
  source 1..20: mol_type = other DNA
gagtacaaggtggtaatgct

SEQ ID NO: 22077 - DNA, 20 bp, synthetic construct
  source 1..20: mol_type = other DNA
aggcgggtccagagagtaca

SEQ ID NO: 22078 - DNA, 20 bp, synthetic construct
  source 1..20: mol_type = other DNA
ccacacctatgaaattcccc

SEQ ID NO: 22079 - DNA, 20 bp, synthetic construct
  source 1..20: mol_type = other DNA
tgaccgtcaatcatttcagg

SEQ ID NO: 22080 - DNA, 20 bp, synthetic construct
  source 1..20: mol_type = other DNA
ggggaatttcataggtgtgg

SEQ ID NO: 22081 - DNA, 20 bp, synthetic construct
  source 1..20: mol_type = other DNA
gcttccacttacctatagta

SEQ ID NO: 22082 - DNA, 20 bp, synthetic construct
  source 1..20: mol_type = other DNA
taaaatcggcactcacctgg

SEQ ID NO: 22083 - DNA, 20 bp, synthetic construct
  source 1..20: mol_type = other DNA
gcagggggagttggtaaaag

SEQ ID NO: 22084 - DNA, 20 bp, synthetic construct
  source 1..20: mol_type = other DNA
aaatgattgacggtcagtga

SEQ ID NO: 22085 - DNA, 20 bp, synthetic construct
  source 1..20: mol_type = other DNA
tcgcatgtactgctcccgca

SEQ ID NO: 22086 - DNA, 20 bp, synthetic construct
  source 1..20: mol_type = other DNA
tagtagggtcatgataatca

SEQ ID NO: 22087 - DNA, 20 bp, synthetic construct
  source 1..20: mol_type = other DNA
tccccgggcagcgcatcagg

SEQ ID NO: 22088 - DNA, 20 bp, synthetic construct
  source 1..20: mol_type = other DNA
cccgcctgatgcgctgcccg

SEQ ID NO: 22089 - DNA, 20 bp, synthetic construct
  source 1..20: mol_type = other DNA
actacccagacgtgtatgcg

SEQ ID NO: 22090 - DNA, 20 bp, synthetic construct
  source 1..20: mol_type = other DNA
ccggtgtcgcagagtcggga

SEQ ID NO: 22091 - DNA, 20 bp, synthetic construct
  source 1..20: mol_type = other DNA
cccacagtgtcagagtcagg

SEQ ID NO: 22092 - DNA, 20 bp, synthetic construct
  source 1..20: mol_type = other DNA
gccgactcagagagcaacaa

SEQ ID NO: 22093 - DNA, 20 bp, synthetic construct
  source 1..20: mol_type = other DNA
cctcgctgcaagtaaagatg

SEQ ID NO: 22094 - DNA, 20 bp, synthetic construct
  source 1..20: mol_type = other DNA
catgaggacagacctcactg

SEQ ID NO: 22095 - DNA, 20 bp, synthetic construct
  source 1..20: mol_type = other DNA
tcggccgccgccaaagcaca

SEQ ID NO: 22096 - DNA, 20 bp, synthetic construct
  source 1..20: mol_type = other DNA
gcctgcaagacgcccccgga

SEQ ID NO: 22097 - DNA, 20 bp, synthetic construct
  source 1..20: mol_type = other DNA
tgtgccgaacttgtcgcctc

SEQ ID NO: 22098 - DNA, 20 bp, synthetic construct
  source 1..20: mol_type = other DNA
ggcagcctcaaactccagga

SEQ ID NO: 22099 - DNA, 20 bp, synthetic construct
  source 1..20: mol_type = other DNA
cagctacctgagtgtcaagg

SEQ ID NO: 22100 - DNA, 20 bp, synthetic construct
  source 1..20: mol_type = other DNA
ggggtaactctggctcaccc

SEQ ID NO: 22101 - DNA, 20 bp, synthetic construct
  source 1..20: mol_type = other DNA
cagggagctctctttagctg

SEQ ID NO: 22102 - DNA, 20 bp, synthetic construct
  source 1..20: mol_type = other DNA
ctggcgacacccctggagag

SEQ ID NO: 22103 - DNA, 20 bp, synthetic construct
  source 1..20: mol_type = other DNA
gcaacaagggcaagaagcgg

SEQ ID NO: 22104 - DNA, 20 bp, synthetic construct
  source 1..20: mol_type = other DNA
acgacccggcgaggtacccc

SEQ ID NO: 22105 - DNA, 20 bp, synthetic construct
  source 1..20: mol_type = other DNA
ctgcagaatctcctacgacc

SEQ ID NO: 22106 - DNA, 20 bp, synthetic construct
  source 1..20: mol_type = other DNA
gtggaaggcactgagcacgc

SEQ ID NO: 22107 - DNA, 20 bp, synthetic construct
  source 1..20: mol_type = other DNA
cctgaccgggctgttcggcg

SEQ ID NO: 22108 - DNA, 20 bp, synthetic construct
  source 1..20: mol_type = other DNA
gacacgctgcgcaggttggt

SEQ ID NO: 22109 - DNA, 20 bp, synthetic construct
  source 1..20: mol_type = other DNA
cctcgccgaacagcccggtc

SEQ ID NO: 22110 - DNA, 20 bp, synthetic construct
  source 1..20: mol_type = other DNA
gcaacgcgagctgcccggca

SEQ ID NO: 22111 - DNA, 20 bp, synthetic construct
  source 1..20: mol_type = other DNA
gaagcctactgcctgtgccg

SEQ ID NO: 22112 - DNA, 20 bp, synthetic construct
  source 1..20: mol_type = other DNA
acaggcagtaggcttcaggc

SEQ ID NO: 22113 - DNA, 20 bp, synthetic construct
  source 1..20: mol_type = other DNA
gcgttgcgcgcctgctcacg

SEQ ID NO: 22114 - DNA, 20 bp, synthetic construct
  source 1..20: mol_type = other DNA
gcagccccggcacaggcagt

SEQ ID NO: 22115 - DNA, 20 bp, synthetic construct
  source 1..20: mol_type = other DNA
tccaccacacgctgcagctg

SEQ ID NO: 22116 - DNA, 20 bp, synthetic construct
  source 1..20: mol_type = other DNA
cccagggcgacacgctgcgc

SEQ ID NO: 22117 - DNA, 20 bp, synthetic construct
  source 1..20: mol_type = other DNA
gtaggcttcaggcaggtacc

SEQ ID NO: 22118 - DNA, 20 bp, synthetic construct
  source 1..20: mol_type = other DNA
gagctactggagcagctgta

SEQ ID NO: 22119 - DNA, 20 bp, synthetic construct
  source 1..20: mol_type = other DNA
ggagctgactgacccgccgt

SEQ ID NO: 22120 - DNA, 20 bp, synthetic construct
  source 1..20: mol_type = other DNA
tgcactaacctgttatcaag

SEQ ID NO: 22121 - DNA, 20 bp, synthetic construct
  source 1..20: mol_type = other DNA
atacgtatattactcttcca

SEQ ID NO: 22122 - DNA, 20 bp, synthetic construct
  source 1..20: mol_type = other DNA
aggagctgactgacccgccg

SEQ ID NO: 22123 - DNA, 20 bp, synthetic construct
  source 1..20: mol_type = other DNA
ctaaagatcatcgatttagg

SEQ ID NO: 22124 - DNA, 20 bp, synthetic construct
  source 1..20: mol_type = other DNA
ctgttatcaaggggcatcca

SEQ ID NO: 22125 - DNA, 20 bp, synthetic construct
  source 1..20: mol_type = other DNA
tttgcttaggtatctgacag

SEQ ID NO: 22126 - DNA, 20 bp, synthetic construct
  source 1..20: mol_type = other DNA
ctgcagcgatgcctcgccca

SEQ ID NO: 22127 - DNA, 20 bp, synthetic construct
  source 1..20: mol_type = other DNA
accttgtgcgaagaaattag

SEQ ID NO: 22128 - DNA, 20 bp, synthetic construct
  source 1..20: mol_type = other DNA
aagtccaaactctagatcta

SEQ ID NO: 22129 - DNA, 20 bp, synthetic construct
  source 1..20: mol_type = other DNA
tgctgcaatctcactgacga

SEQ ID NO: 22130 - DNA, 20 bp, synthetic construct
  source 1..20: mol_type = other DNA
tcccccaggaataaaagctg

SEQ ID NO: 22131 - DNA, 20 bp, synthetic construct
  source 1..20: mol_type = other DNA
ggtgtgattgcacttgttag

SEQ ID NO: 22132 - DNA, 20 bp, synthetic construct
  source 1..20: mol_type = other DNA
aacagattcaaatataagtg

SEQ ID NO: 22133 - DNA, 20 bp, synthetic construct
  source 1..20: mol_type = other DNA
tattcttcatgaagcaccaa

SEQ ID NO: 22134 - DNA, 20 bp, synthetic construct
  source 1..20: mol_type = other DNA
cccaaatcccaactctacac

SEQ ID NO: 22135 - DNA, 20 bp, synthetic construct
  source 1..20: mol_type = other DNA
cagccccatgcagtgagtcg

SEQ ID NO: 22136 - DNA, 20 bp, synthetic construct
  source 1..20: mol_type = other DNA
tcctccccgactcactgcat

SEQ ID NO: 22137 - DNA, 20 bp, synthetic construct
  source 1..20: mol_type = other DNA
cctccccgactcactgcatg

SEQ ID NO: 22138 - DNA, 20 bp, synthetic construct
  source 1..20: mol_type = other DNA
ccaaatcccaactctacaca

SEQ ID NO: 22139 - DNA, 20 bp, synthetic construct
  source 1..20: mol_type = other DNA
tctacttccctgtgtagagt

SEQ ID NO: 22140 - DNA, 20 bp, synthetic construct
  source 1..20: mol_type = other DNA
ttcctccccgactcactgca

SEQ ID NO: 22141 - DNA, 20 bp, synthetic construct
  source 1..20: mol_type = other DNA
agtcggggaggaactggatt

SEQ ID NO: 22142 - DNA, 20 bp, synthetic construct
  source 1..20: mol_type = other DNA
gcagtgagtcggggaggaac

SEQ ID NO: 22143 - DNA, 20 bp, synthetic construct
  source 1..20: mol_type = other DNA
tcagccccatgcagtgagtc

SEQ ID NO: 22144 - DNA, 20 bp, synthetic construct
  source 1..20: mol_type = other DNA
ctcagccccatgcagtgagt

SEQ ID NO: 22145 - DNA, 20 bp, synthetic construct
  source 1..20: mol_type = other DNA
ccctgtgtagagttgggatt

SEQ ID NO: 22146 - DNA, 20 bp, synthetic construct
  source 1..20: mol_type = other DNA
ccccatgcagtgagtcgggg

SEQ ID NO: 22147 - DNA, 20 bp, synthetic construct
  source 1..20: mol_type = other DNA
ggatttggagccagaagaac

SEQ ID NO: 22148 - DNA, 20 bp, synthetic construct
  source 1..20: mol_type = other DNA
gatattagaaccagttcttc

SEQ ID NO: 22149 - DNA, 20 bp, synthetic construct
  source 1..20: mol_type = other DNA
gaccccagtgttcacaagcg

SEQ ID NO: 22150 - DNA, 20 bp, synthetic construct
  source 1..20: mol_type = other DNA
ggaggaggctgaacgcacga

SEQ ID NO: 22151 - DNA, 20 bp, synthetic construct
  source 1..20: mol_type = other DNA
tggactgcagtacacaatca

SEQ ID NO: 22152 - DNA, 20 bp, synthetic construct
  source 1..20: mol_type = other DNA
gcttggtacgcagagcaccg

SEQ ID NO: 22153 - DNA, 20 bp, synthetic construct
  source 1..20: mol_type = other DNA
tcatctgcttctctcgagcg

SEQ ID NO: 22154 - DNA, 20 bp, synthetic construct
  source 1..20: mol_type = other DNA
ggaatatctgaagatagctc

SEQ ID NO: 22155 - DNA, 20 bp, synthetic construct
  source 1..20: mol_type = other DNA
aacaatggccaacgaagcac

SEQ ID NO: 22156 - DNA, 20 bp, synthetic construct
  source 1..20: mol_type = other DNA
ggaaccatgatctatttatg

SEQ ID NO: 22157 - DNA, 20 bp, synthetic construct
  source 1..20: mol_type = other DNA
gatgactccggaaatgtggg

SEQ ID NO: 22158 - DNA, 20 bp, synthetic construct
  source 1..20: mol_type = other DNA
catctcgtacagtgacaagg

SEQ ID NO: 22159 - DNA, 20 bp, synthetic construct
  source 1..20: mol_type = other DNA
ggtcataaatgtgaagcccc

SEQ ID NO: 22160 - DNA, 20 bp, synthetic construct
  source 1..20: mol_type = other DNA
aaagatctactgccctcctg

SEQ ID NO: 22161 - DNA, 20 bp, synthetic construct
  source 1..20: mol_type = other DNA
cgagatggagttcaattgcg

SEQ ID NO: 22162 - DNA, 20 bp, synthetic construct
  source 1..20: mol_type = other DNA
tcaaaatggacaagaaggtt

SEQ ID NO: 22163 - DNA, 20 bp, synthetic construct
  source 1..20: mol_type = other DNA
tccggcacaccaaatcaaag

SEQ ID NO: 22164 - DNA, 20 bp, synthetic construct
  source 1..20: mol_type = other DNA
tgcgcgccgtcatgaactcg

SEQ ID NO: 22165 - DNA, 20 bp, synthetic construct
  source 1..20: mol_type = other DNA
cctgtgcatctactctcccg

SEQ ID NO: 22166 - DNA, 20 bp, synthetic construct
  source 1..20: mol_type = other DNA
agccacaccggtgacgccga

SEQ ID NO: 22167 - DNA, 20 bp, synthetic construct
  source 1..20: mol_type = other DNA
ggcgttgatcacgctaagca

SEQ ID NO: 22168 - DNA, 20 bp, synthetic construct
  source 1..20: mol_type = other DNA
gcagaagctgccatccaacg

SEQ ID NO: 22169 - DNA, 20 bp, synthetic construct
  source 1..20: mol_type = other DNA
tggacgtcctggctcgcctg

SEQ ID NO: 22170 - DNA, 20 bp, synthetic construct
  source 1..20: mol_type = other DNA
ggagcacggcccggttcacg

SEQ ID NO: 22171 - DNA, 20 bp, synthetic construct
  source 1..20: mol_type = other DNA
cggagatacgtgcaacgccg

SEQ ID NO: 22172 - DNA, 20 bp, synthetic construct
  source 1..20: mol_type = other DNA
cgccctggaccactacaagg

SEQ ID NO: 22173 - DNA, 20 bp, synthetic construct
  source 1..20: mol_type = other DNA
ggggctcggcactggaacca

SEQ ID NO: 22174 - DNA, 20 bp, synthetic construct
  source 1..20: mol_type = other DNA
attgtcatgaacgagctctc

SEQ ID NO: 22175 - DNA, 20 bp, synthetic construct
  source 1..20: mol_type = other DNA
gaggtagaagtggtcggcgc

SEQ ID NO: 22176 - DNA, 20 bp, synthetic construct
  source 1..20: mol_type = other DNA
cctggacacatccaacgtga

SEQ ID NO: 22177 - DNA, 20 bp, synthetic construct
  source 1..20: mol_type = other DNA
ggagaatagtcgctcgatgc

SEQ ID NO: 22178 - DNA, 20 bp, synthetic construct
  source 1..20: mol_type = other DNA
ggttcacccgccgatggctg

SEQ ID NO: 22179 - DNA, 20 bp, synthetic construct
  source 1..20: mol_type = other DNA
ggccaccaccaatctactgg

SEQ ID NO: 22180 - DNA, 20 bp, synthetic construct
  source 1..20: mol_type = other DNA
agaggtgaagcagagcacgg

SEQ ID NO: 22181 - DNA, 20 bp, synthetic construct
  source 1..20: mol_type = other DNA
gggaaagcaagagaagaggg

SEQ ID NO: 22182 - DNA, 20 bp, synthetic construct
  source 1..20: mol_type = other DNA
tgctccatgacctctcactg

SEQ ID NO: 22183 - DNA, 20 bp, synthetic construct
  source 1..20: mol_type = other DNA
tgactcgctgcccattgcac

SEQ ID NO: 22184 - DNA, 20 bp, synthetic construct
  source 1..20: mol_type = other DNA
gtgtagagtccaaacaccgg

SEQ ID NO: 22185 - DNA, 20 bp, synthetic construct
  source 1..20: mol_type = other DNA
ctacactattgactccaacc

SEQ ID NO: 22186 - DNA, 20 bp, synthetic construct
  source 1..20: mol_type = other DNA
tgggcagctcagccaggttg

SEQ ID NO: 22187 - DNA, 20 bp, synthetic construct
  source 1..20: mol_type = other DNA
caggcccgccagcggtaatg

SEQ ID NO: 22188 - DNA, 20 bp, synthetic construct
  source 1..20: mol_type = other DNA
tggtgccggaacccctcgtg

SEQ ID NO: 22189 - DNA, 20 bp, synthetic construct
  source 1..20: mol_type = other DNA
tgcatggatggaggccaggg

SEQ ID NO: 22190 - DNA, 20 bp, synthetic construct
  source 1..20: mol_type = other DNA
aagataccaagtccagatag

SEQ ID NO: 22191 - DNA, 20 bp, synthetic construct
  source 1..20: mol_type = other DNA
gctacccacgccgatcccgg

SEQ ID NO: 22192 - DNA, 20 bp, synthetic construct
  source 1..20: mol_type = other DNA
atggtgggttcctaccgtcg

SEQ ID NO: 22193 - DNA, 20 bp, synthetic construct
  source 1..20: mol_type = other DNA
cgacggccgagcctgtcatg

SEQ ID NO: 22194 - DNA, 20 bp, synthetic construct
  source 1..20: mol_type = other DNA
actcactatccgagggtcga

SEQ ID NO: 22195 - DNA, 20 bp, synthetic construct
  source 1..20: mol_type = other DNA
ctcagcgaactctttcgaag

SEQ ID NO: 22196 - DNA, 20 bp, synthetic construct
  source 1..20: mol_type = other DNA
ggaaccttccaaatatgcag

SEQ ID NO: 22197 - DNA, 20 bp, synthetic construct
  source 1..20: mol_type = other DNA
tgtctaaagtgagcacaact

SEQ ID NO: 22198 - DNA, 20 bp, synthetic construct
  source 1..20: mol_type = other DNA
actgcattaaagactatgaa

SEQ ID NO: 22199 - DNA, 20 bp, synthetic construct
  source 1..20: mol_type = other DNA
agatcctagaagatgataag

SEQ ID NO: 22200 - DNA, 20 bp, synthetic construct
  source 1..20: mol_type = other DNA
agtagatcgggagatgctga

SEQ ID NO: 22201 - DNA, 20 bp, synthetic construct
  source 1..20: mol_type = other DNA
tttagcacaactcagtgaca

SEQ ID NO: 22202 - DNA, 20 bp, synthetic construct
  source 1..20: mol_type = other DNA
tgtcaccgaaattctcctcc

SEQ ID NO: 22203 - DNA, 20 bp, synthetic construct
  source 1..20: mol_type = other DNA
tgtgctcactttagacacac

SEQ ID NO: 22204 - DNA, 20 bp, synthetic construct
  source 1..20: mol_type = other DNA
gccactttgtagagaaaatg

SEQ ID NO: 22205 - DNA, 20 bp, synthetic construct
  source 1..20: mol_type = other DNA
ctggtaaaacctgatgacat

SEQ ID NO: 22206 - DNA, 20 bp, synthetic construct
  source 1..20: mol_type = other DNA
ggcctcagtgaacatgaaga

SEQ ID NO: 22207 - DNA, 20 bp, synthetic construct
  source 1..20: mol_type = other DNA
agtagactttatgaagacag

SEQ ID NO: 22208 - DNA, 20 bp, synthetic construct
  source 1..20: mol_type = other DNA
gtttaagtccggaatgaaca

SEQ ID NO: 22209 - DNA, 20 bp, synthetic construct
  source 1..20: mol_type = other DNA
atatataacagatcatgcac

SEQ ID NO: 22210 - DNA, 20 bp, synthetic construct
  source 1..20: mol_type = other DNA
aaccactgtagggttagcat

SEQ ID NO: 22211 - DNA, 20 bp, synthetic construct
  source 1..20: mol_type = other DNA
agtatgaacatccaaatccc

SEQ ID NO: 22212 - DNA, 20 bp, synthetic construct
  source 1..20: mol_type = other DNA
agagccttccataaaaacga

SEQ ID NO: 22213 - DNA, 20 bp, synthetic construct
  source 1..20: mol_type = other DNA
ttactgtaatctctaagcag

SEQ ID NO: 22214 - DNA, 20 bp, synthetic construct
  source 1..20: mol_type = other DNA
actaacctgtacatgtactt

SEQ ID NO: 22215 - DNA, 20 bp, synthetic construct
  source 1..20: mol_type = other DNA
gatggacgaggccttattga

SEQ ID NO: 22216 - DNA, 20 bp, synthetic construct
  source 1..20: mol_type = other DNA
caggttcaggatgcatcata

SEQ ID NO: 22217 - DNA, 20 bp, synthetic construct
  source 1..20: mol_type = other DNA
gatgttacagtgcttgatgg

SEQ ID NO: 22218 - DNA, 20 bp, synthetic construct
  source 1..20: mol_type = other DNA
gtgtcccacaaagaacagta

SEQ ID NO: 22219 - DNA, 20 bp, synthetic construct
  source 1..20: mol_type = other DNA
ccagcatggtgggatttatg

SEQ ID NO: 22220 - DNA, 20 bp, synthetic construct
  source 1..20: mol_type = other DNA
cctcaggagcggaacaacgt

SEQ ID NO: 22221 - DNA, 20 bp, synthetic construct
  source 1..20: mol_type = other DNA
gttcgatgtgaaattcacca

SEQ ID NO: 22222 - DNA, 20 bp, synthetic construct
  source 1..20: mol_type = other DNA
ctggaatatatactgatgaa

SEQ ID NO: 22223 - DNA, 20 bp, synthetic construct
  source 1..20: mol_type = other DNA
tgttggatatatgacaataa

SEQ ID NO: 22224 - DNA, 20 bp, synthetic construct
  source 1..20: mol_type = other DNA
tcgcacataccccagatgga

SEQ ID NO: 22225 - DNA, 20 bp, synthetic construct
  source 1..20: mol_type = other DNA
ggaggatttctactacacag

SEQ ID NO: 22226 - DNA, 20 bp, synthetic construct
  source 1..20: mol_type = other DNA
cgggaggactctgtacaaca

SEQ ID NO: 22227 - DNA, 20 bp, synthetic construct
  source 1..20: mol_type = other DNA
ggactctgatcagttcaagc

SEQ ID NO: 22228 - DNA, 20 bp, synthetic construct
  source 1..20: mol_type = other DNA
caggtttatgtgtggtacgg

SEQ ID NO: 22229 - DNA, 20 bp, synthetic construct
  source 1..20: mol_type = other DNA
aagttggcctcggtcccggg

SEQ ID NO: 22230 - DNA, 20 bp, synthetic construct
  source 1..20: mol_type = other DNA
agtggtgacatctcggacag

SEQ ID NO: 22231 - DNA, 20 bp, synthetic construct
  source 1..20: mol_type = other DNA
aggtgatgtacaagtgcctg

SEQ ID NO: 22232 - DNA, 20 bp, synthetic construct
  source 1..20: mol_type = other DNA
cccgtgcggcctgcgaccca

SEQ ID NO: 22233 - DNA, 20 bp, synthetic construct
  source 1..20: mol_type = other DNA
gggtcaagagtgcacaggac

SEQ ID NO: 22234 - DNA, 20 bp, synthetic construct
  source 1..20: mol_type = other DNA
ctcggagccactgctagaag

SEQ ID NO: 22235 - DNA, 20 bp, synthetic construct
  source 1..20: mol_type = other DNA
ggaacatcgatgtcccaaag

SEQ ID NO: 22236 - DNA, 20 bp, synthetic construct
  source 1..20: mol_type = other DNA
gtgtcgtttgatgcccacaa

SEQ ID NO: 22237 - DNA, 20 bp, synthetic construct
  source 1..20: mol_type = other DNA
gtgtcatcagaggtggtgaa

SEQ ID NO: 22238 - DNA, 20 bp, synthetic construct
  source 1..20: mol_type = other DNA
gctcccactccagtgaccgc

SEQ ID NO: 22239 - DNA, 20 bp, synthetic construct
  source 1..20: mol_type = other DNA
ttcactgcatccctctcccg

SEQ ID NO: 22240 - DNA, 20 bp, synthetic construct
  source 1..20: mol_type = other DNA
ttatcgaggtcactgaacac

SEQ ID NO: 22241 - DNA, 20 bp, synthetic construct
  source 1..20: mol_type = other DNA
gtgtcgagtagcacgttcgg

SEQ ID NO: 22242 - DNA, 20 bp, synthetic construct
  source 1..20: mol_type = other DNA
tgaggacgtgcgtctacaga

SEQ ID NO: 22243 - DNA, 20 bp, synthetic construct
  source 1..20: mol_type = other DNA
caggtacaacgccgtcaccg

SEQ ID NO: 22244 - DNA, 20 bp, synthetic construct
  source 1..20: mol_type = other DNA
gcaacctaacaaaaagtgag

SEQ ID NO: 22245 - DNA, 20 bp, synthetic construct
  source 1..20: mol_type = other DNA
cggaacgctcaaaagtgaag

SEQ ID NO: 22246 - DNA, 20 bp, synthetic construct
  source 1..20: mol_type = other DNA
ccacctggagcactacatcg

SEQ ID NO: 22247 - DNA, 20 bp, synthetic construct
  source 1..20: mol_type = other DNA
caggctgagtcacttacgtc

SEQ ID NO: 22248 - DNA, 20 bp, synthetic construct
  source 1..20: mol_type = other DNA
ctgatagtggtggacatcca

SEQ ID NO: 22249 - DNA, 20 bp, synthetic construct
  source 1..20: mol_type = other DNA
tcaggcggatgttgtcatcg

SEQ ID NO: 22250 - DNA, 20 bp, synthetic construct
  source 1..20: mol_type = other DNA
agaagaagagcgccatcccg

SEQ ID NO: 22251 - DNA, 20 bp, synthetic construct
  source 1..20: mol_type = other DNA
aaccggatttgcgagagcat

SEQ ID NO: 22252 - DNA, 20 bp, synthetic construct
  source 1..20: mol_type = other DNA
ggataccccagtgagaagcg

SEQ ID NO: 22253 - DNA, 20 bp, synthetic construct
  source 1..20: mol_type = other DNA
ctacatcgagcccgtagacc

SEQ ID NO: 22254 - DNA, 20 bp, synthetic construct
  source 1..20: mol_type = other DNA
ggacggtcaggaagtaccgg

SEQ ID NO: 22255 - DNA, 20 bp, synthetic construct
  source 1..20: mol_type = other DNA
gccacacgtggccatcgaag

SEQ ID NO: 22256 - DNA, 20 bp, synthetic construct
  source 1..20: mol_type = other DNA
tacacagtccctgatccccc

SEQ ID NO: 22257 - DNA, 20 bp, synthetic construct
  source 1..20: mol_type = other DNA
tcccgtatgaagagtgcaag

SEQ ID NO: 22258 - DNA, 20 bp, synthetic construct
  source 1..20: mol_type = other DNA
gaagtttgcccgtgcccacg

SEQ ID NO: 22259 - DNA, 20 bp, synthetic construct
  source 1..20: mol_type = other DNA
cttgcactcttcatacggga

SEQ ID NO: 22260 - DNA, 20 bp, synthetic construct
  source 1..20: mol_type = other DNA
gcggctgtacaagtccacca

SEQ ID NO: 22261 - DNA, 20 bp, synthetic construct
  source 1..20: mol_type = other DNA
ggaagacggcttcaaacagt

SEQ ID NO: 22262 - DNA, 20 bp, synthetic construct
  source 1..20: mol_type = other DNA
tgatggatcacgcagcagtt

SEQ ID NO: 22263 - DNA, 20 bp, synthetic construct
  source 1..20: mol_type = other DNA
ccaagaccaaatagcagttg

SEQ ID NO: 22264 - DNA, 20 bp, synthetic construct
  source 1..20: mol_type = other DNA
tctggtacatgggccacacg

SEQ ID NO: 22265 - DNA, 20 bp, synthetic construct
  source 1..20: mol_type = other DNA
ctccccagcatgaccaacgg

SEQ ID NO: 22266 - DNA, 20 bp, synthetic construct
  source 1..20: mol_type = other DNA
gtccagagactccagcactg

SEQ ID NO: 22267 - DNA, 20 bp, synthetic construct
  source 1..20: mol_type = other DNA
tgggcacgggcaaacttctg

SEQ ID NO: 22268 - DNA, 20 bp, synthetic construct
  source 1..20: mol_type = other DNA
tttacttgtagctgtagagc

SEQ ID NO: 22269 - DNA, 20 bp, synthetic construct
  source 1..20: mol_type = other DNA
ccgaaacaccaagacgtcgg

SEQ ID NO: 22270 - DNA, 20 bp, synthetic construct
  source 1..20: mol_type = other DNA
aaggtcccgaaattcagtgg

SEQ ID NO: 22271 - DNA, 20 bp, synthetic construct
  source 1..20: mol_type = other DNA
tcgcggtaccactcggcgcg

SEQ ID NO: 22272 - DNA, 20 bp, synthetic construct
  source 1..20: mol_type = other DNA
cgtggtgcacggcttaacca

SEQ ID NO: 22273 - DNA, 20 bp, synthetic construct
  source 1..20: mol_type = other DNA
gcaagtccatgggtgcaccg

SEQ ID NO: 22274 - DNA, 20 bp, synthetic construct
  source 1..20: mol_type = other DNA
ctcacagaacgtcaagtcgt

SEQ ID NO: 22275 - DNA, 20 bp, synthetic construct
  source 1..20: mol_type = other DNA
ggtgcagtgcaatgatgcac

SEQ ID NO: 22276 - DNA, 20 bp, synthetic construct
  source 1..20: mol_type = other DNA
cacctgcacaaggacgacga

SEQ ID NO: 22277 - DNA, 20 bp, synthetic construct
  source 1..20: mol_type = other DNA
gttggtggacacttgtccgt

SEQ ID NO: 22278 - DNA, 20 bp, synthetic construct
  source 1..20: mol_type = other DNA
gcaaggatttcccacgcccg

SEQ ID NO: 22279 - DNA, 20 bp, synthetic construct
  source 1..20: mol_type = other DNA
tccctccaaatgaacggctg

SEQ ID NO: 22280 - DNA, 20 bp, synthetic construct
  source 1..20: mol_type = other DNA
gtcaaacacggcatatctcg

SEQ ID NO: 22281 - DNA, 20 bp, synthetic construct
  source 1..20: mol_type = other DNA
tcaccataaaaactggcacg

SEQ ID NO: 22282 - DNA, 20 bp, synthetic construct
  source 1..20: mol_type = other DNA
ggagcgtaatcccataagga

SEQ ID NO: 22283 - DNA, 20 bp, synthetic construct
  source 1..20: mol_type = other DNA
gtacggaatcatcgatgaca

SEQ ID NO: 22284 - DNA, 20 bp, synthetic construct
  source 1..20: mol_type = other DNA
caataacatcgacgaccgcg

SEQ ID NO: 22285 - DNA, 20 bp, synthetic construct
  source 1..20: mol_type = other DNA
aggagcgctcgcgatcggtg

SEQ ID NO: 22286 - DNA, 20 bp, synthetic construct
  source 1..20: mol_type = other DNA
ctgagcgtggatgaacagag

SEQ ID NO: 22287 - DNA, 20 bp, synthetic construct
  source 1..20: mol_type = other DNA
tctgccttccagacgatccg

SEQ ID NO: 22288 - DNA, 20 bp, synthetic construct
  source 1..20: mol_type = other DNA
cgagctgacacacaccgaag

SEQ ID NO: 22289 - DNA, 20 bp, synthetic construct
  source 1..20: mol_type = other DNA
gagaggcaggagctcgatga

SEQ ID NO: 22290 - DNA, 20 bp, synthetic construct
  source 1..20: mol_type = other DNA
cgcccacgacagcttgtgga

SEQ ID NO: 22291 - DNA, 20 bp, synthetic construct
  source 1..20: mol_type = other DNA
gtgaaggaaatctacatccg

SEQ ID NO: 22292 - DNA, 20 bp, synthetic construct
  source 1..20: mol_type = other DNA
ggaccgtgagaagagtcaga

SEQ ID NO: 22293 - DNA, 20 bp, synthetic construct
  source 1..20: mol_type = other DNA
ggagtctcacgtgctgtcca

SEQ ID NO: 22294 - DNA, 20 bp, synthetic construct
  source 1..20: mol_type = other DNA
gcctgtagctgggtaagcgg

SEQ ID NO: 22295 - DNA, 20 bp, synthetic construct
  source 1..20: mol_type = other DNA
gccgagctctgcacgcggtg

SEQ ID NO: 22296 - DNA, 20 bp, synthetic construct
  source 1..20: mol_type = other DNA
ttcaaccacatcggtgacga

SEQ ID NO: 22297 - DNA, 20 bp, synthetic construct
  source 1..20: mol_type = other DNA
agcttgtgataggactgctc

SEQ ID NO: 22298 - DNA, 20 bp, synthetic construct
  source 1..20: mol_type = other DNA
gatcagcaatagtgcattgg

SEQ ID NO: 22299 - DNA, 20 bp, synthetic construct
  source 1..20: mol_type = other DNA
cttctcgtggaccaagtcgg

SEQ ID NO: 22300 - DNA, 20 bp, synthetic construct
  source 1..20: mol_type = other DNA
gaacgttacctggacatgtg

SEQ ID NO: 22301 - DNA, 20 bp, synthetic construct
  source 1..20: mol_type = other DNA
tggtgaagaacgacgcccgc

SEQ ID NO: 22302 - DNA, 20 bp, synthetic construct
  source 1..20: mol_type = other DNA
tgtgttccaaacatacctgt

SEQ ID NO: 22303 - DNA, 20 bp, synthetic construct
  source 1..20: mol_type = other DNA
acagatggtacaattgatag

SEQ ID NO: 22304 - DNA, 20 bp, synthetic construct
  source 1..20: mol_type = other DNA
gcgcgagccgttccagcgca

SEQ ID NO: 22305 - DNA, 20 bp, synthetic construct
  source 1..20: mol_type = other DNA
caccttagtcacataccccc

SEQ ID NO: 22306 - DNA, 20 bp, synthetic construct
  source 1..20: mol_type = other DNA
gcagttatcgtacagaaatg

SEQ ID NO: 22307 - DNA, 20 bp, synthetic construct
  source 1..20: mol_type = other DNA
tccaaacaccgtgcaaacgc

SEQ ID NO: 22308 - DNA, 20 bp, synthetic construct
  source 1..20: mol_type = other DNA
agcagacacacattatgcaa

SEQ ID NO: 22309 - DNA, 20 bp, synthetic construct
  source 1..20: mol_type = other DNA
cataaacatcacttcgaaag

SEQ ID NO: 22310 - DNA, 20 bp, synthetic construct
  source 1..20: mol_type = other DNA
gagggtgtgcagtatcaaga

SEQ ID NO: 22311 - DNA, 20 bp, synthetic construct
  source 1..20: mol_type = other DNA
gctgtcccgagactgtgccc

SEQ ID NO: 22312 - DNA, 20 bp, synthetic construct
  source 1..20: mol_type = other DNA
agggcgttgtcacagagtct

SEQ ID NO: 22313 - DNA, 20 bp, synthetic construct
  source 1..20: mol_type = other DNA
aggaagtgctcccaccctgg

SEQ ID NO: 22314 - DNA, 20 bp, synthetic construct
  source 1..20: mol_type = other DNA
ggagatgtacgccgcgatca

SEQ ID NO: 22315 - DNA, 20 bp, synthetic construct
  source 1..20: mol_type = other DNA
gctccacgatctcaggcgac

SEQ ID NO: 22316 - DNA, 20 bp, synthetic construct
  source 1..20: mol_type = other DNA
gcggacttaccgaagagcag

SEQ ID NO: 22317 - DNA, 20 bp, synthetic construct
  source 1..20: mol_type = other DNA
gcagcgccagcacgttaccc

SEQ ID NO: 22318 - DNA, 20 bp, synthetic construct
  source 1..20: mol_type = other DNA
gcaggttgttcgatatggtg

SEQ ID NO: 22319 - DNA, 20 bp, synthetic construct
  source 1..20: mol_type = other DNA
gcgcgcgagcagatgccgcg

SEQ ID NO: 22320 - DNA, 20 bp, synthetic construct
  source 1..20: mol_type = other DNA
tgtacttgtggaagtcccga

SEQ ID NO: 22321 - DNA, 20 bp, synthetic construct
  source 1..20: mol_type = other DNA
caccatacctggctctacca

SEQ ID NO: 22322 - DNA, 20 bp, synthetic construct
  source 1..20: mol_type = other DNA
tcctgactgatgaagagtgt

SEQ ID NO: 22323 - DNA, 20 bp, synthetic construct
  source 1..20: mol_type = other DNA
ccatatcgaacaacctgcag

SEQ ID NO: 22324 - DNA, 20 bp, synthetic construct
  source 1..20: mol_type = other DNA
ggcggatggcacgcatgatg

SEQ ID NO: 22325 - DNA, 20 bp, synthetic construct
  source 1..20: mol_type = other DNA
ggcttgcacagcggacgcac

SEQ ID NO: 22326 - DNA, 20 bp, synthetic construct
  source 1..20: mol_type = other DNA
ctcttcgtgcactacagcaa

SEQ ID NO: 22327 - DNA, 20 bp, synthetic construct
  source 1..20: mol_type = other DNA
tcggatgaagtgatccctgt

SEQ ID NO: 22328 - DNA, 20 bp, synthetic construct
  source 1..20: mol_type = other DNA
ttacgctcgtgccccaccta

SEQ ID NO: 22329 - DNA, 20 bp, synthetic construct
  source 1..20: mol_type = other DNA
tatgagtaataaatatccac

SEQ ID NO: 22330 - DNA, 20 bp, synthetic construct
  source 1..20: mol_type = other DNA
atgtacatcagtgtcaggta

SEQ ID NO: 22331 - DNA, 20 bp, synthetic construct
  source 1..20: mol_type = other DNA
tggtcaagttcaccatgaga

SEQ ID NO: 22332 - DNA, 20 bp, synthetic construct
  source 1..20: mol_type = other DNA
cagcacttagaaaatgaccc

SEQ ID NO: 22333 - DNA, 20 bp, synthetic construct
  source 1..20: mol_type = other DNA
gctggggcaatcctcaaaca

SEQ ID NO: 22334 - DNA, 20 bp, synthetic construct
  source 1..20: mol_type = other DNA
tgttgctgatatattgttgg

SEQ ID NO: 22335 - DNA, 20 bp, synthetic construct
  source 1..20: mol_type = other DNA
actcatagaactgaatgctg

SEQ ID NO: 22336 - DNA, 20 bp, synthetic construct
  source 1..20: mol_type = other DNA
gatttccagccagagctgag

SEQ ID NO: 22337 - DNA, 20 bp, synthetic construct
  source 1..20: mol_type = other DNA
aaatgaccctggaagcaatg

SEQ ID NO: 22338 - DNA, 20 bp, synthetic construct
  source 1..20: mol_type = other DNA
ttcacagctgcttattactg

SEQ ID NO: 22339 - DNA, 20 bp, synthetic construct
  source 1..20: mol_type = other DNA
cgcgggctccagactcgccg

SEQ ID NO: 22340 - DNA, 20 bp, synthetic construct
  source 1..20: mol_type = other DNA
tatcaaggagcagatgctgt

SEQ ID NO: 22341 - DNA, 20 bp, synthetic construct
  source 1..20: mol_type = other DNA
ggaatctgactgtgatgaac

SEQ ID NO: 22342 - DNA, 20 bp, synthetic construct
  source 1..20: mol_type = other DNA
atcacagtcagattccaaga

SEQ ID NO: 22343 - DNA, 20 bp, synthetic construct
  source 1..20: mol_type = other DNA
cttaatgaaagtgatgagca

SEQ ID NO: 22344 - DNA, 20 bp, synthetic construct
  source 1..20: mol_type = other DNA
gcgggagggccaaacgcaag

SEQ ID NO: 22345 - DNA, 20 bp, synthetic construct
  source 1..20: mol_type = other DNA
agtggacaccccgcagatag

SEQ ID NO: 22346 - DNA, 20 bp, synthetic construct
  source 1..20: mol_type = other DNA
cgtgatcgggcagatcatag

SEQ ID NO: 22347 - DNA, 20 bp, synthetic construct
  source 1..20: mol_type = other DNA
tgcaagtggggcattcacac

SEQ ID NO: 22348 - DNA, 20 bp, synthetic construct
  source 1..20: mol_type = other DNA
gacctgcacttcgccaccaa

SEQ ID NO: 22349 - DNA, 20 bp, synthetic construct
  source 1..20: mol_type = other DNA
gcggcatggaagctcctgtc

SEQ ID NO: 22350 - DNA, 20 bp, synthetic construct
  source 1..20: mol_type = other DNA
gccaccaaaggtcttcaagg

SEQ ID NO: 22351 - DNA, 20 bp, synthetic construct
  source 1..20: mol_type = other DNA
tgccatgtgcccagtagccc

SEQ ID NO: 22352 - DNA, 20 bp, synthetic construct
  source 1..20: mol_type = other DNA
gggcagatcataggggccag

SEQ ID NO: 22353 - DNA, 20 bp, synthetic construct
  source 1..20: mol_type = other DNA
tggcgaagtgcaggtcgatg

SEQ ID NO: 22354 - DNA, 20 bp, synthetic construct
  source 1..20: mol_type = other DNA
cacacctggaaatggagccg

SEQ ID NO: 22355 - DNA, 20 bp, synthetic construct
  source 1..20: mol_type = other DNA
agctggcctgccccacgtgg

SEQ ID NO: 22356 - DNA, 20 bp, synthetic construct
  source 1..20: mol_type = other DNA
aaaatccatagcctgcaagc

SEQ ID NO: 22357 - DNA, 20 bp, synthetic construct
  source 1..20: mol_type = other DNA
gacctttggtggcgaagtgc

SEQ ID NO: 22358 - DNA, 20 bp, synthetic construct
  source 1..20: mol_type = other DNA
gtgtggtcccaggacagctt

SEQ ID NO: 22359 - DNA, 20 bp, synthetic construct
  source 1..20: mol_type = other DNA
aggaaggccgagtactcggt

SEQ ID NO: 22360 - DNA, 20 bp, synthetic construct
  source 1..20: mol_type = other DNA
catttatgactacatccacg

SEQ ID NO: 22361 - DNA, 20 bp, synthetic construct
  source 1..20: mol_type = other DNA
ttatgcatcagcaacgatcg

SEQ ID NO: 22362 - DNA, 20 bp, synthetic construct
  source 1..20: mol_type = other DNA
atgcagaacagcgacagccg

SEQ ID NO: 22363 - DNA, 20 bp, synthetic construct
  source 1..20: mol_type = other DNA
ccaacccctccaagcgacac

SEQ ID NO: 22364 - DNA, 20 bp, synthetic construct
  source 1..20: mol_type = other DNA
ctcagggaacagactgacgc

SEQ ID NO: 22365 - DNA, 20 bp, synthetic construct
  source 1..20: mol_type = other DNA
tactcactttgcatccgcgg

SEQ ID NO: 22366 - DNA, 20 bp, synthetic construct
  source 1..20: mol_type = other DNA
ggaccgcctcaacgccgagt

SEQ ID NO: 22367 - DNA, 20 bp, synthetic construct
  source 1..20: mol_type = other DNA
caggagatgatgctatcctg

SEQ ID NO: 22368 - DNA, 20 bp, synthetic construct
  source 1..20: mol_type = other DNA
ggtaactgacactgaggcgc

SEQ ID NO: 22369 - DNA, 20 bp, synthetic construct
  source 1..20: mol_type = other DNA
ttccgattcgcacagactgg

SEQ ID NO: 22370 - DNA, 20 bp, synthetic construct
  source 1..20: mol_type = other DNA
gtctcttaatggctttgctc

SEQ ID NO: 22371 - DNA, 20 bp, synthetic construct
  source 1..20: mol_type = other DNA
gacagcgggaaagcacagtg

SEQ ID NO: 22372 - DNA, 20 bp, synthetic construct
  source 1..20: mol_type = other DNA
gagatgatgtcaggcgggaa

SEQ ID NO: 22373 - DNA, 20 bp, synthetic construct
  source 1..20: mol_type = other DNA
ggggagggtccatggcccag

SEQ ID NO: 22374 - DNA, 20 bp, synthetic construct
  source 1..20: mol_type = other DNA
tttgctgctggcctatgtgt

SEQ ID NO: 22375 - DNA, 20 bp, synthetic construct
  source 1..20: mol_type = other DNA
gtgcatgagaggttgagcaa

SEQ ID NO: 22376 - DNA, 20 bp, synthetic construct
  source 1..20: mol_type = other DNA
cataggccataacagcgaga

SEQ ID NO: 22377 - DNA, 20 bp, synthetic construct
  source 1..20: mol_type = other DNA
gcaaacaatagtacctgtag

SEQ ID NO: 22378 - DNA, 20 bp, synthetic construct
  source 1..20: mol_type = other DNA
tgttggggccacagtaagag

SEQ ID NO: 22379 - DNA, 20 bp, synthetic construct
  source 1..20: mol_type = other DNA
gccggccactgacaatgact

SEQ ID NO: 22380 - DNA, 20 bp, synthetic construct
  source 1..20: mol_type = other DNA
aataagaaaaactttgacca

SEQ ID NO: 22381 - DNA, 20 bp, synthetic construct
  source 1..20: mol_type = other DNA
gttggatccaaacaggatca

SEQ ID NO: 22382 - DNA, 20 bp, synthetic construct
  source 1..20: mol_type = other DNA
actcagtgcagcccaagcca

SEQ ID NO: 22383 - DNA, 20 bp, synthetic construct
  source 1..20: mol_type = other DNA
gacataccagatctccagaa

SEQ ID NO: 22384 - DNA, 20 bp, synthetic construct
  source 1..20: mol_type = other DNA
gaaatctgtaagctctgctg

SEQ ID NO: 22385 - DNA, 20 bp, synthetic construct
  source 1..20: mol_type = other DNA
acccagtcattgtcagtggc

SEQ ID NO: 22386 - DNA, 20 bp, synthetic construct
  source 1..20: mol_type = other DNA
aaagtacatgggtttgtgga

SEQ ID NO: 22387 - DNA, 20 bp, synthetic construct
  source 1..20: mol_type = other DNA
tggacatatcagtgcatgag

SEQ ID NO: 22388 - DNA, 20 bp, synthetic construct
  source 1..20: mol_type = other DNA
ttagctagaaaaaagtacat

SEQ ID NO: 22389 - DNA, 20 bp, synthetic construct
  source 1..20: mol_type = other DNA
atgtttctctacgacaacgg

SEQ ID NO: 22390 - DNA, 20 bp, synthetic construct
  source 1..20: mol_type = other DNA
gacaagtacatggataccgc

SEQ ID NO: 22391 - DNA, 20 bp, synthetic construct
  source 1..20: mol_type = other DNA
gaaggcgaactccttagcgc

SEQ ID NO: 22392 - DNA, 20 bp, synthetic construct
  source 1..20: mol_type = other DNA
ccctatggctacttcggcag

SEQ ID NO: 22393 - DNA, 20 bp, synthetic construct
  source 1..20: mol_type = other DNA
atccatgtacttgtccgcga

SEQ ID NO: 22394 - DNA, 20 bp, synthetic construct
  source 1..20: mol_type = other DNA
gacgcggctcctggcgccaa

SEQ ID NO: 22395 - DNA, 20 bp, synthetic construct
  source 1..20: mol_type = other DNA
ggcagggggcaacttctcgg

SEQ ID NO: 22396 - DNA, 20 bp, synthetic construct
  source 1..20: mol_type = other DNA
tactacccgtgcgcccgcat

SEQ ID NO: 22397 - DNA, 20 bp, synthetic construct
  source 1..20: mol_type = other DNA
ggcagcggcgcagagctcgt

SEQ ID NO: 22398 - DNA, 20 bp, synthetic construct
  source 1..20: mol_type = other DNA
atatccaggtagccaggcat

SEQ ID NO: 22399 - DNA, 20 bp, synthetic construct
  source 1..20: mol_type = other DNA
gagttcgccttctaccacca

SEQ ID NO: 22400 - DNA, 20 bp, synthetic construct
  source 1..20: mol_type = other DNA
acctcccgaggacgacgcgg

SEQ ID NO: 22401 - DNA, 20 bp, synthetic construct
  source 1..20: mol_type = other DNA
cgcgcacgacttgatggcgt

SEQ ID NO: 22402 - DNA, 20 bp, synthetic construct
  source 1..20: mol_type = other DNA
gttgcggcactggttggccg

SEQ ID NO: 22403 - DNA, 20 bp, synthetic construct
  source 1..20: mol_type = other DNA
gagctcaacaagaacatgga

SEQ ID NO: 22404 - DNA, 20 bp, synthetic construct
  source 1..20: mol_type = other DNA
aggcgtgagacttcaaaccc

SEQ ID NO: 22405 - DNA, 20 bp, synthetic construct
  source 1..20: mol_type = other DNA
gaacatcaaacgtcctccag

SEQ ID NO: 22406 - DNA, 20 bp, synthetic construct
  source 1..20: mol_type = other DNA
ataagcattgatgtgtgaga

SEQ ID NO: 22407 - DNA, 20 bp, synthetic construct
  source 1..20: mol_type = other DNA
tcagtcccacaatacccggc

SEQ ID NO: 22408 - DNA, 20 bp, synthetic construct
  source 1..20: mol_type = other DNA
agaaagtagttccggagagg

SEQ ID NO: 22409 - DNA, 20 bp, synthetic construct
  source 1..20: mol_type = other DNA
agtggtaccatcatatgccc

SEQ ID NO: 22410 - DNA, 20 bp, synthetic construct
  source 1..20: mol_type = other DNA
actgcctgaagcatctcatg

SEQ ID NO: 22411 - DNA, 20 bp, synthetic construct
  source 1..20: mol_type = other DNA
aaactggacactgtgaatgt

SEQ ID NO: 22412 - DNA, 20 bp, synthetic construct
  source 1..20: mol_type = other DNA
agtaaaacttgagggtgtgg

SEQ ID NO: 22413 - DNA, 20 bp, synthetic construct
  source 1..20: mol_type = other DNA
taactcaccagatcaggatg

SEQ ID NO: 22414 - DNA, 20 bp, synthetic construct
  source 1..20: mol_type = other DNA
tgatctcatagttgtctgga

SEQ ID NO: 22415 - DNA, 20 bp, synthetic construct
  source 1..20: mol_type = other DNA
actcccgcttcacgcgcaca

SEQ ID NO: 22416 - DNA, 20 bp, synthetic construct
  source 1..20: mol_type = other DNA
agaaagtcaacgccatctcc

SEQ ID NO: 22417 - DNA, 20 bp, synthetic construct
  source 1..20: mol_type = other DNA
tcttacctgaaggacagcgt

SEQ ID NO: 22418 - DNA, 20 bp, synthetic construct
  source 1..20: mol_type = other DNA
caccgtgatatcctccaatg

SEQ ID NO: 22419 - DNA, 20 bp, synthetic construct
  source 1..20: mol_type = other DNA
caagaagggccaaacgtgtg

SEQ ID NO: 22420 - DNA, 20 bp, synthetic construct
  source 1..20: mol_type = other DNA
gctgacctgcacccctgatg

SEQ ID NO: 22421 - DNA, 20 bp, synthetic construct
  source 1..20: mol_type = other DNA
cattgggagggatgacaccg

SEQ ID NO: 22422 - DNA, 20 bp, synthetic construct
  source 1..20: mol_type = other DNA
ggcattgggagggatgacac

SEQ ID NO: 22423 - DNA, 20 bp, synthetic construct
  source 1..20: mol_type = other DNA
aggaaggacattccccaaga

SEQ ID NO: 22424 - DNA, 20 bp, synthetic construct
  source 1..20: mol_type = other DNA
gagaccatctcccccggaga

SEQ ID NO: 22425 - DNA, 20 bp, synthetic construct
  source 1..20: mol_type = other DNA
gcattgggagggatgacacc

SEQ ID NO: 22426 - DNA, 20 bp, synthetic construct
  source 1..20: mol_type = other DNA
ggctccatatgccacatcag

SEQ ID NO: 22427 - DNA, 20 bp, synthetic construct
  source 1..20: mol_type = other DNA
gatgtggcatatggagccac

SEQ ID NO: 22428 - DNA, 20 bp, synthetic construct
  source 1..20: mol_type = other DNA
gagatcgagaccatctcccc

SEQ ID NO: 22429 - DNA, 20 bp, synthetic construct
  source 1..20: mol_type = other DNA
gatgacaccggggtggcccg

SEQ ID NO: 22430 - DNA, 20 bp, synthetic construct
  source 1..20: mol_type = other DNA
atccctgctagatgagcttg

SEQ ID NO: 22431 - DNA, 20 bp, synthetic construct
  source 1..20: mol_type = other DNA
tggctccatatgccacatca

SEQ ID NO: 22432 - DNA, 20 bp, synthetic construct
  source 1..20: mol_type = other DNA
gaagagggtgcagcccaggt

SEQ ID NO: 22433 - DNA, 20 bp, synthetic construct
  source 1..20: mol_type = other DNA
ctagatgagcttggggcaga

SEQ ID NO: 22434 - DNA, 20 bp, synthetic construct
  source 1..20: mol_type = other DNA
gcaagcctacaacccgtgtg

SEQ ID NO: 22435 - DNA, 20 bp, synthetic construct
  source 1..20: mol_type = other DNA
ctgctgcttcgactacgaca

SEQ ID NO: 22436 - DNA, 20 bp, synthetic construct
  source 1..20: mol_type = other DNA
ctggagtactccaccccgca

SEQ ID NO: 22437 - DNA, 20 bp, synthetic construct
  source 1..20: mol_type = other DNA
gactacgacagggcgtgccc

SEQ ID NO: 22438 - DNA, 20 bp, synthetic construct
  source 1..20: mol_type = other DNA
tctgtgtgtgtagaccagtg

SEQ ID NO: 22439 - DNA, 20 bp, synthetic construct
  source 1..20: mol_type = other DNA
ggtctgcacaaccactccag

SEQ ID NO: 22440 - DNA, 20 bp, synthetic construct
  source 1..20: mol_type = other DNA
ccaagcctgtcgcttcaccg

SEQ ID NO: 22441 - DNA, 20 bp, synthetic construct
  source 1..20: mol_type = other DNA
acactggtctacacacacag

SEQ ID NO: 22442 - DNA, 20 bp, synthetic construct
  source 1..20: mol_type = other DNA
tccattcccccacgaagcac

SEQ ID NO: 22443 - DNA, 20 bp, synthetic construct
  source 1..20: mol_type = other DNA
cacgggttgtaggcttgcac

SEQ ID NO: 22444 - DNA, 20 bp, synthetic construct
  source 1..20: mol_type = other DNA
gcagaggtagttataaaggc

SEQ ID NO: 22445 - DNA, 20 bp, synthetic construct
  source 1..20: mol_type = other DNA
gtgcagcaggagcctcagaa

SEQ ID NO: 22446 - DNA, 20 bp, synthetic construct
  source 1..20: mol_type = other DNA
gaccccgcctgcttcgcccg

SEQ ID NO: 22447 - DNA, 20 bp, synthetic construct
  source 1..20: mol_type = other DNA
ggaggctggacagggtctac

SEQ ID NO: 22448 - DNA, 20 bp, synthetic construct
  source 1..20: mol_type = other DNA
ccacccctggaagagagagc

SEQ ID NO: 22449 - DNA, 20 bp, synthetic construct
  source 1..20: mol_type = other DNA
aggaagtgggaatacagacg

SEQ ID NO: 22450 - DNA, 20 bp, synthetic construct
  source 1..20: mol_type = other DNA
tgagggtcaagccatactgc

SEQ ID NO: 22451 - DNA, 20 bp, synthetic construct
  source 1..20: mol_type = other DNA
gcacagtctgggacccgtgg

SEQ ID NO: 22452 - DNA, 20 bp, synthetic construct
  source 1..20: mol_type = other DNA
ggctgtggagaaccacgtga

SEQ ID NO: 22453 - DNA, 20 bp, synthetic construct
  source 1..20: mol_type = other DNA
tgatctggatcgacacccag

SEQ ID NO: 22454 - DNA, 20 bp, synthetic construct
  source 1..20: mol_type = other DNA
gatctcaatctcatcaaggg

SEQ ID NO: 22455 - DNA, 20 bp, synthetic construct
  source 1..20: mol_type = other DNA
gtgtcgatccagatcactga

SEQ ID NO: 22456 - DNA, 20 bp, synthetic construct
  source 1..20: mol_type = other DNA
acctcccgggttcccacgtg

SEQ ID NO: 22457 - DNA, 20 bp, synthetic construct
  source 1..20: mol_type = other DNA
gaaagcaggacatacctgga

SEQ ID NO: 22458 - DNA, 20 bp, synthetic construct
  source 1..20: mol_type = other DNA
tggcagaataaccaagtgct

SEQ ID NO: 22459 - DNA, 20 bp, synthetic construct
  source 1..20: mol_type = other DNA
cctgacccaggagaagattg

SEQ ID NO: 22460 - DNA, 20 bp, synthetic construct
  source 1..20: mol_type = other DNA
gccgcacgtgggaacccggg

SEQ ID NO: 22461 - DNA, 20 bp, synthetic construct
  source 1..20: mol_type = other DNA
gtcccagactgtgcacgccc

SEQ ID NO: 22462 - DNA, 20 bp, synthetic construct
  source 1..20: mol_type = other DNA
gctgttccctcctccgccgg

SEQ ID NO: 22463 - DNA, 20 bp, synthetic construct
  source 1..20: mol_type = other DNA
ctcggccttggacatcgtgg

SEQ ID NO: 22464 - DNA, 20 bp, synthetic construct
  source 1..20: mol_type = other DNA
actccgactcacgacgagaa

SEQ ID NO: 22465 - DNA, 20 bp, synthetic construct
  source 1..20: mol_type = other DNA
tgaaagctgagcgcacgccg

SEQ ID NO: 22466 - DNA, 20 bp, synthetic construct
  source 1..20: mol_type = other DNA
gctattgcagacttacccgg

SEQ ID NO: 22467 - DNA, 20 bp, synthetic construct
  source 1..20: mol_type = other DNA
tgtaaaggccggcatgacgg

SEQ ID NO: 22468 - DNA, 20 bp, synthetic construct
  source 1..20: mol_type = other DNA
ggagtggatagggttaatcc

SEQ ID NO: 22469 - DNA, 20 bp, synthetic construct
  source 1..20: mol_type = other DNA
ggtctcaaagcctatccggg

SEQ ID NO: 22470 - DNA, 20 bp, synthetic construct
  source 1..20: mol_type = other DNA
gacatgagcggagccgcccg

SEQ ID NO: 22471 - DNA, 20 bp, synthetic construct
  source 1..20: mol_type = other DNA
caccgccgctgaacacgcag

SEQ ID NO: 22472 - DNA, 20 bp, synthetic construct
  source 1..20: mol_type = other DNA
caagcccgccggcctagcga

SEQ ID NO: 22473 - DNA, 20 bp, synthetic construct
  source 1..20: mol_type = other DNA
ggtgtgccttaaggctgttg

SEQ ID NO: 22474 - DNA, 20 bp, synthetic construct
  source 1..20: mol_type = other DNA
tcgccaaggcgccgtcccag

SEQ ID NO: 22475 - DNA, 20 bp, synthetic construct
  source 1..20: mol_type = other DNA
gcgctccacgtgcttgaagg

SEQ ID NO: 22476 - DNA, 20 bp, synthetic construct
  source 1..20: mol_type = other DNA
ccagcagcctgcccaaagcg

SEQ ID NO: 22477 - DNA, 20 bp, synthetic construct
  source 1..20: mol_type = other DNA
gcaagtacctgtcagaccgc

SEQ ID NO: 22478 - DNA, 20 bp, synthetic construct
  source 1..20: mol_type = other DNA
ggcagcgcgcagcgctcgag

SEQ ID NO: 22479 - DNA, 20 bp, synthetic construct
  source 1..20: mol_type = other DNA
tccttcccgatacatcactg

SEQ ID NO: 22480 - DNA, 20 bp, synthetic construct
  source 1..20: mol_type = other DNA
gcaaggatgccaccaatgtg

SEQ ID NO: 22481 - DNA, 20 bp, synthetic construct
  source 1..20: mol_type = other DNA
tgagcaatgtggcgatacag

SEQ ID NO: 22482 - DNA, 20 bp, synthetic construct
  source 1..20: mol_type = other DNA
aaacagcgttacttaggcaa

SEQ ID NO: 22483 - DNA, 20 bp, synthetic construct
  source 1..20: mol_type = other DNA
gccatcacgataaaactctg

SEQ ID NO: 22484 - DNA, 20 bp, synthetic construct
  source 1..20: mol_type = other DNA
gaggtctaccatacactcaa

SEQ ID NO: 22485 - DNA, 20 bp, synthetic construct
  source 1..20: mol_type = other DNA
tgccatgcgactaggtgcag

SEQ ID NO: 22486 - DNA, 20 bp, synthetic construct
  source 1..20: mol_type = other DNA
caggccttcaacgtgatcaa

SEQ ID NO: 22487 - DNA, 20 bp, synthetic construct
  source 1..20: mol_type = other DNA
atgtatcgggaaggatcagt

SEQ ID NO: 22488 - DNA, 20 bp, synthetic construct
  source 1..20: mol_type = other DNA
gatagtccctgacaaagtcc

SEQ ID NO: 22489 - DNA, 20 bp, synthetic construct
  source 1..20: mol_type = other DNA
gtggatctctatactgccaa

SEQ ID NO: 22490 - DNA, 20 bp, synthetic construct
  source 1..20: mol_type = other DNA
ggcctcatagatgcccgtag

SEQ ID NO: 22491 - DNA, 20 bp, synthetic construct
  source 1..20: mol_type = other DNA
cagccctcatcagctcagtg

SEQ ID NO: 22492 - DNA, 20 bp, synthetic construct
  source 1..20: mol_type = other DNA
actgttctccaggatattgg

SEQ ID NO: 22493 - DNA, 20 bp, synthetic construct
  source 1..20: mol_type = other DNA
tctggccgtgtgtaaggcag

SEQ ID NO: 22494 - DNA, 20 bp, synthetic construct
  source 1..20: mol_type = other DNA
gcagcttgagaattacattg

SEQ ID NO: 22495 - DNA, 20 bp, synthetic construct
  source 1..20: mol_type = other DNA
tgcaatatggatgtcaatgg

SEQ ID NO: 22496 - DNA, 20 bp, synthetic construct
  source 1..20: mol_type = other DNA
gagaaatccggttccacgtg

SEQ ID NO: 22497 - DNA, 20 bp, synthetic construct
  source 1..20: mol_type = other DNA
ctttagtgcaaagattgaca

SEQ ID NO: 22498 - DNA, 20 bp, synthetic construct
  source 1..20: mol_type = other DNA
cgccgaagtccagaaaacag

SEQ ID NO: 22499 - DNA, 20 bp, synthetic construct
  source 1..20: mol_type = other DNA
ttctggaagaatgaaagtgt

SEQ ID NO: 22500 - DNA, 20 bp, synthetic construct
  source 1..20: mol_type = other DNA
gctggttcctatctccagca

SEQ ID NO: 22501 - DNA, 20 bp, synthetic construct
  source 1..20: mol_type = other DNA
gaatgcagttcagaaccaca

SEQ ID NO: 22502 - DNA, 20 bp, synthetic construct
  source 1..20: mol_type = other DNA
gctgacagatgttgagaccc

SEQ ID NO: 22503 - DNA, 20 bp, synthetic construct
  source 1..20: mol_type = other DNA
aatctttgcactaaagaagg

SEQ ID NO: 22504 - DNA, 20 bp, synthetic construct
  source 1..20: mol_type = other DNA
ctgaaggacactgttgttgg

SEQ ID NO: 22505 - DNA, 20 bp, synthetic construct
  source 1..20: mol_type = other DNA
gctctgcagtctgagagagg

SEQ ID NO: 22506 - DNA, 20 bp, synthetic construct
  source 1..20: mol_type = other DNA
tgatggaaaattatactcag

SEQ ID NO: 22507 - DNA, 20 bp, synthetic construct
  source 1..20: mol_type = other DNA
tcaacatctggaacatgtga

SEQ ID NO: 22508 - DNA, 20 bp, synthetic construct
  source 1..20: mol_type = other DNA
gatataaccggattcaacat

SEQ ID NO: 22509 - DNA, 20 bp, synthetic construct
  source 1..20: mol_type = other DNA
gttgcgtcacagaatacagg

SEQ ID NO: 22510 - DNA, 20 bp, synthetic construct
  source 1..20: mol_type = other DNA
tgaacaatcacggatatcct

SEQ ID NO: 22511 - DNA, 20 bp, synthetic construct
  source 1..20: mol_type = other DNA
gaggctctcagtgatggtac

SEQ ID NO: 22512 - DNA, 20 bp, synthetic construct
  source 1..20: mol_type = other DNA
gaataagcgccttcacctcc

SEQ ID NO: 22513 - DNA, 20 bp, synthetic construct
  source 1..20: mol_type = other DNA
ccatcactgagagcctcatg

SEQ ID NO: 22514 - DNA, 20 bp, synthetic construct
  source 1..20: mol_type = other DNA
ccagcaatcaggcctcatgg

SEQ ID NO: 22515 - DNA, 20 bp, synthetic construct
  source 1..20: mol_type = other DNA
ttaagggtcctgaacaatca

SEQ ID NO: 22516 - DNA, 20 bp, synthetic construct
  source 1..20: mol_type = other DNA
tcatcctgctgatccccatg

SEQ ID NO: 22517 - DNA, 20 bp, synthetic construct
  source 1..20: mol_type = other DNA
agtgatggtactggatgtct

SEQ ID NO: 22518 - DNA, 20 bp, synthetic construct
  source 1..20: mol_type = other DNA
gaggagatctcttaaggcaa

SEQ ID NO: 22519 - DNA, 20 bp, synthetic construct
  source 1..20: mol_type = other DNA
caaaaagcagatgctcaggt

SEQ ID NO: 22520 - DNA, 20 bp, synthetic construct
  source 1..20: mol_type = other DNA
atcacaaaaagcagatgctc

SEQ ID NO: 22521 - DNA, 20 bp, synthetic construct
  source 1..20: mol_type = other DNA
aaagcagaacttcttcaggg

SEQ ID NO: 22522 - DNA, 20 bp, synthetic construct
  source 1..20: mol_type = other DNA
acaacttctactccaggaag

SEQ ID NO: 22523 - DNA, 20 bp, synthetic construct
  source 1..20: mol_type = other DNA
catggggatcagcaggatga

SEQ ID NO: 22524 - DNA, 20 bp, synthetic construct
  source 1..20: mol_type = other DNA
tggtcacgtggagcgacgtg

SEQ ID NO: 22525 - DNA, 20 bp, synthetic construct
  source 1..20: mol_type = other DNA
ccaggaactctaacacgttg

SEQ ID NO: 22526 - DNA, 20 bp, synthetic construct
  source 1..20: mol_type = other DNA
ggtggacaccggctgtgacg

SEQ ID NO: 22527 - DNA, 20 bp, synthetic construct
  source 1..20: mol_type = other DNA
agggaccggcgatgctctgc

SEQ ID NO: 22528 - DNA, 20 bp, synthetic construct
  source 1..20: mol_type = other DNA
gcacgtcgctccacgtgacc

SEQ ID NO: 22529 - DNA, 20 bp, synthetic construct
  source 1..20: mol_type = other DNA
caggagcaagaaggtatcct

SEQ ID NO: 22530 - DNA, 20 bp, synthetic construct
  source 1..20: mol_type = other DNA
agctgctggcctatgagagt

SEQ ID NO: 22531 - DNA, 20 bp, synthetic construct
  source 1..20: mol_type = other DNA
gacgataggtcaagaagaga

SEQ ID NO: 22532 - DNA, 20 bp, synthetic construct
  source 1..20: mol_type = other DNA
gagaggcgctagacactgtg

SEQ ID NO: 22533 - DNA, 20 bp, synthetic construct
  source 1..20: mol_type = other DNA
cctccagtgggacttcactg

SEQ ID NO: 22534 - DNA, 20 bp, synthetic construct
  source 1..20: mol_type = other DNA
ttagcatgaaatgggcctgg

SEQ ID NO: 22535 - DNA, 20 bp, synthetic construct
  source 1..20: mol_type = other DNA
gtatccttggaacagcctga

SEQ ID NO: 22536 - DNA, 20 bp, synthetic construct
  source 1..20: mol_type = other DNA
gctggtgttcctcctagggg

SEQ ID NO: 22537 - DNA, 20 bp, synthetic construct
  source 1..20: mol_type = other DNA
gcggctatccgcagcacgtg

SEQ ID NO: 22538 - DNA, 20 bp, synthetic construct
  source 1..20: mol_type = other DNA
acggctaggcagggacagag

SEQ ID NO: 22539 - DNA, 20 bp, synthetic construct
  source 1..20: mol_type = other DNA
tatcaccagcacgcgtacga

SEQ ID NO: 22540 - DNA, 20 bp, synthetic construct
  source 1..20: mol_type = other DNA
tgaggcagaggaatatgcag

SEQ ID NO: 22541 - DNA, 20 bp, synthetic construct
  source 1..20: mol_type = other DNA
acgcgtgctggtgatacccg

SEQ ID NO: 22542 - DNA, 20 bp, synthetic construct
  source 1..20: mol_type = other DNA
gtggaccacagggtacgcca

SEQ ID NO: 22543 - DNA, 20 bp, synthetic construct
  source 1..20: mol_type = other DNA
tagacgacacgcaattcctg

SEQ ID NO: 22544 - DNA, 20 bp, synthetic construct
  source 1..20: mol_type = other DNA
gtggtccactcccaatactg

SEQ ID NO: 22545 - DNA, 20 bp, synthetic construct
  source 1..20: mol_type = other DNA
gatcacccagcgcttctatg

SEQ ID NO: 22546 - DNA, 20 bp, synthetic construct
  source 1..20: mol_type = other DNA
cgtgtcgtctacgtactcca

SEQ ID NO: 22547 - DNA, 20 bp, synthetic construct
  source 1..20: mol_type = other DNA
ggattacatctccctgaacg

SEQ ID NO: 22548 - DNA, 20 bp, synthetic construct
  source 1..20: mol_type = other DNA
agtatctgcggagcaactcc

SEQ ID NO: 22549 - DNA, 20 bp, synthetic construct
  source 1..20: mol_type = other DNA
acagcgacgccgcgattccg

SEQ ID NO: 22550 - DNA, 20 bp, synthetic construct
  source 1..20: mol_type = other DNA
aggtcagcgtgatctccgca

SEQ ID NO: 22551 - DNA, 20 bp, synthetic construct
  source 1..20: mol_type = other DNA
ccgccgctacaaccagagcg

SEQ ID NO: 22552 - DNA, 20 bp, synthetic construct
  source 1..20: mol_type = other DNA
gcggccgggccgcgacacag

SEQ ID NO: 22553 - DNA, 20 bp, synthetic construct
  source 1..20: mol_type = other DNA
ctgagccacggtgtccgccg

SEQ ID NO: 22554 - DNA, 20 bp, synthetic construct
  source 1..20: mol_type = other DNA
gaggacgtgtccagtttgag

SEQ ID NO: 22555 - DNA, 20 bp, synthetic construct
  source 1..20: mol_type = other DNA
gctgatccagcgcaccaatg

SEQ ID NO: 22556 - DNA, 20 bp, synthetic construct
  source 1..20: mol_type = other DNA
gtcctcggtcacggtactgg

SEQ ID NO: 22557 - DNA, 20 bp, synthetic construct
  source 1..20: mol_type = other DNA
ggacatgcggaggtcgtcgg

SEQ ID NO: 22558 - DNA, 20 bp, synthetic construct
  source 1..20: mol_type = other DNA
aggctccctccctctcgtgg

SEQ ID NO: 22559 - DNA, 20 bp, synthetic construct
  source 1..20: mol_type = other DNA
caggaactcatcatagatgt

SEQ ID NO: 22560 - DNA, 20 bp, synthetic construct
  source 1..20: mol_type = other DNA
gatggacgaggagctaaggc

SEQ ID NO: 22561 - DNA, 20 bp, synthetic construct
  source 1..20: mol_type = other DNA
aggtcgggaacgcctcattg

SEQ ID NO: 22562 - DNA, 20 bp, synthetic construct
  source 1..20: mol_type = other DNA
gggtgggcaccggatgcaag

SEQ ID NO: 22563 - DNA, 20 bp, synthetic construct
  source 1..20: mol_type = other DNA
ttggagcgatggtcaccacg

SEQ ID NO: 22564 - DNA, 20 bp, synthetic construct
  source 1..20: mol_type = other DNA
ggcttgggcgaaatcagagg

SEQ ID NO: 22565 - DNA, 20 bp, synthetic construct
  source 1..20: mol_type = other DNA
aatcctgcacaactgagctg

SEQ ID NO: 22566 - DNA, 20 bp, synthetic construct
  source 1..20: mol_type = other DNA
gggatgcctcacctgaaggc

SEQ ID NO: 22567 - DNA, 20 bp, synthetic construct
  source 1..20: mol_type = other DNA
ccaaaccgtcacgagccagg

SEQ ID NO: 22568 - DNA, 20 bp, synthetic construct
  source 1..20: mol_type = other DNA
agggatgagtgggagagctc

SEQ ID NO: 22569 - DNA, 20 bp, synthetic construct
  source 1..20: mol_type = other DNA
ctgcaacgacccttacacgt

SEQ ID NO: 22570 - DNA, 20 bp, synthetic construct
  source 1..20: mol_type = other DNA
gcagctgactcatatagagc

SEQ ID NO: 22571 - DNA, 20 bp, synthetic construct
  source 1..20: mol_type = other DNA
gagaactgtgagccgatctg

SEQ ID NO: 22572 - DNA, 20 bp, synthetic construct
  source 1..20: mol_type = other DNA
ccagcacttagtacctaatg

SEQ ID NO: 22573 - DNA, 20 bp, synthetic construct
  source 1..20: mol_type = other DNA
ccgaatagccagtggcgaag

SEQ ID NO: 22574 - DNA, 20 bp, synthetic construct
  source 1..20: mol_type = other DNA
atatccctttgtatagactg

SEQ ID NO: 22575 - DNA, 20 bp, synthetic construct
  source 1..20: mol_type = other DNA
aatactcaatcattcttgct

SEQ ID NO: 22576 - DNA, 20 bp, synthetic construct
  source 1..20: mol_type = other DNA
taaataaccgagaactgagt

SEQ ID NO: 22577 - DNA, 20 bp, synthetic construct
  source 1..20: mol_type = other DNA
tcaactcctcacggaatgga

SEQ ID NO: 22578 - DNA, 20 bp, synthetic construct
  source 1..20: mol_type = other DNA
ggctgagcgcagcaagcttg

SEQ ID NO: 22579 - DNA, 20 bp, synthetic construct
  source 1..20: mol_type = other DNA
tctggtgctcaacacataag

SEQ ID NO: 22580 - DNA, 20 bp, synthetic construct
  source 1..20: mol_type = other DNA
gtatttcattgacgtagctc

SEQ ID NO: 22581 - DNA, 20 bp, synthetic construct
  source 1..20: mol_type = other DNA
ggaccctttggataatgaca

SEQ ID NO: 22582 - DNA, 20 bp, synthetic construct
  source 1..20: mol_type = other DNA
catgacaacaacctcctctc

SEQ ID NO: 22583 - DNA, 20 bp, synthetic construct
  source 1..20: mol_type = other DNA
ctacagaaatctgtatggtg

SEQ ID NO: 22584 - DNA, 20 bp, synthetic construct
  source 1..20: mol_type = other DNA
gagccggatcagagttgcgg

SEQ ID NO: 22585 - DNA, 20 bp, synthetic construct
  source 1..20: mol_type = other DNA
gggccgtcgtcgtagaccgg

SEQ ID NO: 22586 - DNA, 20 bp, synthetic construct
  source 1..20: mol_type = other DNA
gcgccagtctcagccaaggg

SEQ ID NO: 22587 - DNA, 20 bp, synthetic construct
  source 1..20: mol_type = other DNA
ttccggcggtcagtgccccg

SEQ ID NO: 22588 - DNA, 20 bp, synthetic construct
  source 1..20: mol_type = other DNA
gctgcgctgcaggcgcgtcg

SEQ ID NO: 22589 - DNA, 20 bp, synthetic construct
  source 1..20: mol_type = other DNA
gacgggcgcggggacaagct

SEQ ID NO: 22590 - DNA, 20 bp, synthetic construct
  source 1..20: mol_type = other DNA
tggaggccgaacgtcaggag

SEQ ID NO: 22591 - DNA, 20 bp, synthetic construct
  source 1..20: mol_type = other DNA
gacaagctgggctgctaggg

SEQ ID NO: 22592 - DNA, 20 bp, synthetic construct
  source 1..20: mol_type = other DNA
ctagggcggcagggtcaagg

SEQ ID NO: 22593 - DNA, 20 bp, synthetic construct
  source 1..20: mol_type = other DNA
caccaaaaggccgacgcccc

SEQ ID NO: 22594 - DNA, 20 bp, synthetic construct
  source 1..20: mol_type = other DNA
cacctcggggcactgaccgc

SEQ ID NO: 22595 - DNA, 20 bp, synthetic construct
  source 1..20: mol_type = other DNA
taccggccgcgcgcagagcg

SEQ ID NO: 22596 - DNA, 20 bp, synthetic construct
  source 1..20: mol_type = other DNA
ggatcagcaggcgcgcgtcc

SEQ ID NO: 22597 - DNA, 20 bp, synthetic construct
  source 1..20: mol_type = other DNA
actgaccgccggaagcggcg

SEQ ID NO: 22598 - DNA, 20 bp, synthetic construct
  source 1..20: mol_type = other DNA
gtcagtgccccgaggtgagg

SEQ ID NO: 22599 - DNA, 20 bp, synthetic construct
  source 1..20: mol_type = other DNA
cgggatctgcaccgcgacca

SEQ ID NO: 22600 - DNA, 20 bp, synthetic construct
  source 1..20: mol_type = other DNA
cgcggcccaggaacttgtcg

SEQ ID NO: 22601 - DNA, 20 bp, synthetic construct
  source 1..20: mol_type = other DNA
agctggcctctcgtagacag

SEQ ID NO: 22602 - DNA, 20 bp, synthetic construct
  source 1..20: mol_type = other DNA
gaagacagaaggactctcag

SEQ ID NO: 22603 - DNA, 20 bp, synthetic construct
  source 1..20: mol_type = other DNA
cagcgatggcagctcgaagg

SEQ ID NO: 22604 - DNA, 20 bp, synthetic construct
  source 1..20: mol_type = other DNA
tcatcatcactgtcgaccga

SEQ ID NO: 22605 - DNA, 20 bp, synthetic construct
  source 1..20: mol_type = other DNA
aggggaagaataaggacagt

SEQ ID NO: 22606 - DNA, 20 bp, synthetic construct
  source 1..20: mol_type = other DNA
agaggaaggggagtcagtag

SEQ ID NO: 22607 - DNA, 20 bp, synthetic construct
  source 1..20: mol_type = other DNA
attgatgcagacattagagc

SEQ ID NO: 22608 - DNA, 20 bp, synthetic construct
  source 1..20: mol_type = other DNA
gcaaactgagagtttaacac

SEQ ID NO: 22609 - DNA, 20 bp, synthetic construct
  source 1..20: mol_type = other DNA
tgtggcctctgagtttgcgg

SEQ ID NO: 22610 - DNA, 20 bp, synthetic construct
  source 1..20: mol_type = other DNA
caaggagcgaggagaaattg

SEQ ID NO: 22611 - DNA, 20 bp, synthetic construct
  source 1..20: mol_type = other DNA
agaccagagctgtcaagccc

SEQ ID NO: 22612 - DNA, 20 bp, synthetic construct
  source 1..20: mol_type = other DNA
tggagctgtgagccctgttg

SEQ ID NO: 22613 - DNA, 20 bp, synthetic construct
  source 1..20: mol_type = other DNA
ggatcttaagcaactgaacc

SEQ ID NO: 22614 - DNA, 20 bp, synthetic construct
  source 1..20: mol_type = other DNA
ctctcgcaagcagcagacca

SEQ ID NO: 22615 - DNA, 20 bp, synthetic construct
  source 1..20: mol_type = other DNA
gtcccggacactggtgaaca

SEQ ID NO: 22616 - DNA, 20 bp, synthetic construct
  source 1..20: mol_type = other DNA
tgaaatgccataccatgtgg

SEQ ID NO: 22617 - DNA, 20 bp, synthetic construct
  source 1..20: mol_type = other DNA
gctggatcccaactcgagat

SEQ ID NO: 22618 - DNA, 20 bp, synthetic construct
  source 1..20: mol_type = other DNA
tgggtttatgaaggcagcag

SEQ ID NO: 22619 - DNA, 20 bp, synthetic construct
  source 1..20: mol_type = other DNA
tgtccgggacatgttggtca

SEQ ID NO: 22620 - DNA, 20 bp, synthetic construct
  source 1..20: mol_type = other DNA
tcagatgcccggctcaaact

SEQ ID NO: 22621 - DNA, 20 bp, synthetic construct
  source 1..20: mol_type = other DNA
gtggtggagaaagccgcctg

SEQ ID NO: 22622 - DNA, 20 bp, synthetic construct
  source 1..20: mol_type = other DNA
gccttcataaacccacccat

SEQ ID NO: 22623 - DNA, 20 bp, synthetic construct
  source 1..20: mol_type = other DNA
ggcatcaaatctctgctgga

SEQ ID NO: 22624 - DNA, 20 bp, synthetic construct
  source 1..20: mol_type = other DNA
cgggcatcagcaacctggcg

SEQ ID NO: 22625 - DNA, 20 bp, synthetic construct
  source 1..20: mol_type = other DNA
gagagggagggccttggaca

SEQ ID NO: 22626 - DNA, 20 bp, synthetic construct
  source 1..20: mol_type = other DNA
ggccctccctctcaccaaag

SEQ ID NO: 22627 - DNA, 20 bp, synthetic construct
  source 1..20: mol_type = other DNA
tcgaatcaaagggaaagtgc

SEQ ID NO: 22628 - DNA, 20 bp, synthetic construct
  source 1..20: mol_type = other DNA
gtttgagccgggcatctgag

SEQ ID NO: 22629 - DNA, 20 bp, synthetic construct
  source 1..20: mol_type = other DNA
atatcaaacatatcacacag

SEQ ID NO: 22630 - DNA, 20 bp, synthetic construct
  source 1..20: mol_type = other DNA
gagacagggcaagacactgt

SEQ ID NO: 22631 - DNA, 20 bp, synthetic construct
  source 1..20: mol_type = other DNA
gaatatgtttgatatatagt

SEQ ID NO: 22632 - DNA, 20 bp, synthetic construct
  source 1..20: mol_type = other DNA
tgtgatatgtttgatatatt

SEQ ID NO: 22633 - DNA, 20 bp, synthetic construct
  source 1..20: mol_type = other DNA
cccccagtgggtgctaaccg

SEQ ID NO: 22634 - DNA, 20 bp, synthetic construct
  source 1..20: mol_type = other DNA
gctaaccgcggcgcactgcg

SEQ ID NO: 22635 - DNA, 20 bp, synthetic construct
  source 1..20: mol_type = other DNA
gttctacatcatccagaccg

SEQ ID NO: 22636 - DNA, 20 bp, synthetic construct
  source 1..20: mol_type = other DNA
gtctggatgatgtagaactg

SEQ ID NO: 22637 - DNA, 20 bp, synthetic construct
  source 1..20: mol_type = other DNA
agcaaacgggcattgttggg

SEQ ID NO: 22638 - DNA, 20 bp, synthetic construct
  source 1..20: mol_type = other DNA
ggactcaccaggggccacgt

SEQ ID NO: 22639 - DNA, 20 bp, synthetic construct
  source 1..20: mol_type = other DNA
caggtgagcctgagagtccg

SEQ ID NO: 22640 - DNA, 20 bp, synthetic construct
  source 1..20: mol_type = other DNA
cctcggagaccttccccccg

SEQ ID NO: 22641 - DNA, 20 bp, synthetic construct
  source 1..20: mol_type = other DNA
gggaaggtctccgaggcagg

SEQ ID NO: 22642 - DNA, 20 bp, synthetic construct
  source 1..20: mol_type = other DNA
gcagcgtgaccgtgtggatg

SEQ ID NO: 22643 - DNA, 20 bp, synthetic construct
  source 1..20: mol_type = other DNA
gcgccgcggttagcacccac

SEQ ID NO: 22644 - DNA, 20 bp, synthetic construct
  source 1..20: mol_type = other DNA
atgtggctggagatgttcac

SEQ ID NO: 22645 - DNA, 20 bp, synthetic construct
  source 1..20: mol_type = other DNA
gccagatccttgatgtccct

SEQ ID NO: 22646 - DNA, 20 bp, synthetic construct
  source 1..20: mol_type = other DNA
tactggatgcacttctgcgg

SEQ ID NO: 22647 - DNA, 20 bp, synthetic construct
  source 1..20: mol_type = other DNA
taggccgggctcgccaggac

SEQ ID NO: 22648 - DNA, 20 bp, synthetic construct
  source 1..20: mol_type = other DNA
ggacatggacgaccacaggt

SEQ ID NO: 22649 - DNA, 20 bp, synthetic construct
  source 1..20: mol_type = other DNA
catggccccacgtagagtgg

SEQ ID NO: 22650 - DNA, 20 bp, synthetic construct
  source 1..20: mol_type = other DNA
ctttagcgctgcctccgatg

SEQ ID NO: 22651 - DNA, 20 bp, synthetic construct
  source 1..20: mol_type = other DNA
ccggcgtgacgggagtgtgt

SEQ ID NO: 22652 - DNA, 20 bp, synthetic construct
  source 1..20: mol_type = other DNA
tgacgttctcgtagaccccg

SEQ ID NO: 22653 - DNA, 20 bp, synthetic construct
  source 1..20: mol_type = other DNA
gcggcggcgcaagcgagagt

SEQ ID NO: 22654 - DNA, 20 bp, synthetic construct
  source 1..20: mol_type = other DNA
gctcactccaaaccagtcgg

SEQ ID NO: 22655 - DNA, 20 bp, synthetic construct
  source 1..20: mol_type = other DNA
atctatggcatcgcgcccgt

SEQ ID NO: 22656 - DNA, 20 bp, synthetic construct
  source 1..20: mol_type = other DNA
gcgatacgctggccccgtcg

SEQ ID NO: 22657 - DNA, 20 bp, synthetic construct
  source 1..20: mol_type = other DNA
gagcaggcggacctcaccgg

SEQ ID NO: 22658 - DNA, 20 bp, synthetic construct
  source 1..20: mol_type = other DNA
aggtgccatccctaacggag

SEQ ID NO: 22659 - DNA, 20 bp, synthetic construct
  source 1..20: mol_type = other DNA
gagaagcggccgtatgggct

SEQ ID NO: 22660 - DNA, 20 bp, synthetic construct
  source 1..20: mol_type = other DNA
gctgtcgatgcgcttgcggt

SEQ ID NO: 22661 - DNA, 20 bp, synthetic construct
  source 1..20: mol_type = other DNA
aggatgtgtccagctcatcg

SEQ ID NO: 22662 - DNA, 20 bp, synthetic construct
  source 1..20: mol_type = other DNA
ccgtggccgtgccttccgtg

SEQ ID NO: 22663 - DNA, 20 bp, synthetic construct
  source 1..20: mol_type = other DNA
taatggtgtgggttcgacgt

SEQ ID NO: 22664 - DNA, 20 bp, synthetic construct
  source 1..20: mol_type = other DNA
tcaatgactacacagcgcca

SEQ ID NO: 22665 - DNA, 20 bp, synthetic construct
  source 1..20: mol_type = other DNA
agactgaccggcgcagacgg

SEQ ID NO: 22666 - DNA, 20 bp, synthetic construct
  source 1..20: mol_type = other DNA
atgggagtcaagctagtcgt

SEQ ID NO: 22667 - DNA, 20 bp, synthetic construct
  source 1..20: mol_type = other DNA
gtaggattcccatcaaacag

SEQ ID NO: 22668 - DNA, 20 bp, synthetic construct
  source 1..20: mol_type = other DNA
gctgtgctacagtctatgag

SEQ ID NO: 22669 - DNA, 20 bp, synthetic construct
  source 1..20: mol_type = other DNA
tgggcagctatatggcacgt

SEQ ID NO: 22670 - DNA, 20 bp, synthetic construct
  source 1..20: mol_type = other DNA
aggttcagggatccacacat

SEQ ID NO: 22671 - DNA, 20 bp, synthetic construct
  source 1..20: mol_type = other DNA
aggatcgacggccgagtaag

SEQ ID NO: 22672 - DNA, 20 bp, synthetic construct
  source 1..20: mol_type = other DNA
aaagcgctacactgaagacc

SEQ ID NO: 22673 - DNA, 20 bp, synthetic construct
  source 1..20: mol_type = other DNA
atagccctgtgacttatcct

SEQ ID NO: 22674 - DNA, 20 bp, synthetic construct
  source 1..20: mol_type = other DNA
atattgatgccttaaatggg

SEQ ID NO: 22675 - DNA, 20 bp, synthetic construct
  source 1..20: mol_type = other DNA
ggagaggcataagttccctg

SEQ ID NO: 22676 - DNA, 20 bp, synthetic construct
  source 1..20: mol_type = other DNA
ggatctgatcacacccacag

SEQ ID NO: 22677 - DNA, 20 bp, synthetic construct
  source 1..20: mol_type = other DNA
tgcacgtagcacagatgacc

SEQ ID NO: 22678 - DNA, 20 bp, synthetic construct
  source 1..20: mol_type = other DNA
aggactcgacccagattcgg

SEQ ID NO: 22679 - DNA, 20 bp, synthetic construct
  source 1..20: mol_type = other DNA
ccaaggagcacggtgacccg

SEQ ID NO: 22680 - DNA, 20 bp, synthetic construct
  source 1..20: mol_type = other DNA
ggaaacacgcctccgaaaag

SEQ ID NO: 22681 - DNA, 20 bp, synthetic construct
  source 1..20: mol_type = other DNA
gtccaacaagctcttggcga

SEQ ID NO: 22682 - DNA, 20 bp, synthetic construct
  source 1..20: mol_type = other DNA
cgaaatggaaaccagacact

SEQ ID NO: 22683 - DNA, 20 bp, synthetic construct
  source 1..20: mol_type = other DNA
gctgcgactacctgagcgcg

SEQ ID NO: 22684 - DNA, 20 bp, synthetic construct
  source 1..20: mol_type = other DNA
aggcacaagtgcccctacag

SEQ ID NO: 22685 - DNA, 20 bp, synthetic construct
  source 1..20: mol_type = other DNA
ctggaaggattactgcacac

SEQ ID NO: 22686 - DNA, 20 bp, synthetic construct
  source 1..20: mol_type = other DNA
gggtcgctccggacgccgag

SEQ ID NO: 22687 - DNA, 20 bp, synthetic construct
  source 1..20: mol_type = other DNA
cagactgtcgctgcacacgg

SEQ ID NO: 22688 - DNA, 20 bp, synthetic construct
  source 1..20: mol_type = other DNA
ccttcgcagccactccagga

SEQ ID NO: 22689 - DNA, 20 bp, synthetic construct
  source 1..20: mol_type = other DNA
tccggagcgaccccatgctc

SEQ ID NO: 22690 - DNA, 20 bp, synthetic construct
  source 1..20: mol_type = other DNA
gtaatgggctttgagatggg

SEQ ID NO: 22691 - DNA, 20 bp, synthetic construct
  source 1..20: mol_type = other DNA
cggagggggtctggatgggt

SEQ ID NO: 22692 - DNA, 20 bp, synthetic construct
  source 1..20: mol_type = other DNA
gagtccttcccacagcccgg

SEQ ID NO: 22693 - DNA, 20 bp, synthetic construct
  source 1..20: mol_type = other DNA
gcgctgtacatcctcggaag

SEQ ID NO: 22694 - DNA, 20 bp, synthetic construct
  source 1..20: mol_type = other DNA
tatggttcggggtatagagg

SEQ ID NO: 22695 - DNA, 20 bp, synthetic construct
  source 1..20: mol_type = other DNA
atggtacggctgaacagcgt

SEQ ID NO: 22696 - DNA, 20 bp, synthetic construct
  source 1..20: mol_type = other DNA
ataaacggtccgtgccatgg

SEQ ID NO: 22697 - DNA, 20 bp, synthetic construct
  source 1..20: mol_type = other DNA
accatagacatctcatggta

SEQ ID NO: 22698 - DNA, 20 bp, synthetic construct
  source 1..20: mol_type = other DNA
tcacagagatgttcacacaa

SEQ ID NO: 22699 - DNA, 20 bp, synthetic construct
  source 1..20: mol_type = other DNA
cttccgaggatgtacagcgc

SEQ ID NO: 22700 - DNA, 20 bp, synthetic construct
  source 1..20: mol_type = other DNA
acatcccatgattctagcac

SEQ ID NO: 22701 - DNA, 20 bp, synthetic construct
  source 1..20: mol_type = other DNA
ggaagaggtcctgtcggaac

SEQ ID NO: 22702 - DNA, 20 bp, synthetic construct
  source 1..20: mol_type = other DNA
tgcttgccaacatcctccag

SEQ ID NO: 22703 - DNA, 20 bp, synthetic construct
  source 1..20: mol_type = other DNA
tggagctcggggccggcacg

SEQ ID NO: 22704 - DNA, 20 bp, synthetic construct
  source 1..20: mol_type = other DNA
ggcaatgtttcgctggcaca

SEQ ID NO: 22705 - DNA, 20 bp, synthetic construct
  source 1..20: mol_type = other DNA
ggaggatgttggcaagcagg

SEQ ID NO: 22706 - DNA, 20 bp, synthetic construct
  source 1..20: mol_type = other DNA
ggaagtggccatggtaatga

SEQ ID NO: 22707 - DNA, 20 bp, synthetic construct
  source 1..20: mol_type = other DNA
atagaagcttgaattgggac

SEQ ID NO: 22708 - DNA, 20 bp, synthetic construct
  source 1..20: mol_type = other DNA
attctagagtatgccccccg

SEQ ID NO: 22709 - DNA, 20 bp, synthetic construct
  source 1..20: mol_type = other DNA
tggaaacgtgtacttggctc

SEQ ID NO: 22710 - DNA, 20 bp, synthetic construct
  source 1..20: mol_type = other DNA
tgacgagcagcgaacagcca

SEQ ID NO: 22711 - DNA, 20 bp, synthetic construct
  source 1..20: mol_type = other DNA
tctttccggaggactcgctg

SEQ ID NO: 22712 - DNA, 20 bp, synthetic construct
  source 1..20: mol_type = other DNA
catcaacccatactgcaggt

SEQ ID NO: 22713 - DNA, 20 bp, synthetic construct
  source 1..20: mol_type = other DNA
aggtgatggagaatagcagt

SEQ ID NO: 22714 - DNA, 20 bp, synthetic construct
  source 1..20: mol_type = other DNA
atgctctaatgtactgccat

SEQ ID NO: 22715 - DNA, 20 bp, synthetic construct
  source 1..20: mol_type = other DNA
gcgcagagagatcgaaatcc

SEQ ID NO: 22716 - DNA, 20 bp, synthetic construct
  source 1..20: mol_type = other DNA
catgaggacaagtgcagatg

SEQ ID NO: 22717 - DNA, 20 bp, synthetic construct
  source 1..20: mol_type = other DNA
aagtcccagatagagaagga

SEQ ID NO: 22718 - DNA, 20 bp, synthetic construct
  source 1..20: mol_type = other DNA
gggcacttacgttaagatgt

SEQ ID NO: 22719 - DNA, 20 bp, synthetic construct
  source 1..20: mol_type = other DNA
gaagaaaagccatttcatcg

SEQ ID NO: 22720 - DNA, 20 bp, synthetic construct
  source 1..20: mol_type = other DNA
gaatcaagtagatcctcctc

SEQ ID NO: 22721 - DNA, 20 bp, synthetic construct
  source 1..20: mol_type = other DNA
gggtgacaggctctttccgg

SEQ ID NO: 22722 - DNA, 20 bp, synthetic construct
  source 1..20: mol_type = other DNA
aatctgctcttagggctcaa

SEQ ID NO: 22723 - DNA, 20 bp, synthetic construct
  source 1..20: mol_type = other DNA
ttccaccagcgtgtcgtacg

SEQ ID NO: 22724 - DNA, 20 bp, synthetic construct
  source 1..20: mol_type = other DNA
gcagacacgttgctcttgtg

SEQ ID NO: 22725 - DNA, 20 bp, synthetic construct
  source 1..20: mol_type = other DNA
gtcacgcccaataaccgcta

SEQ ID NO: 22726 - DNA, 20 bp, synthetic construct
  source 1..20: mol_type = other DNA
gaatgtccagccctcccttg

SEQ ID NO: 22727 - DNA, 20 bp, synthetic construct
  source 1..20: mol_type = other DNA
agcagcccgactctcccgcg

SEQ ID NO: 22728 - DNA, 20 bp, synthetic construct
  source 1..20: mol_type = other DNA
cagaatggtgcgccctcatg

SEQ ID NO: 22729 - DNA, 20 bp, synthetic construct
  source 1..20: mol_type = other DNA
gtgcccggtgaccatcatgt

SEQ ID NO: 22730 - DNA, 20 bp, synthetic construct
  source 1..20: mol_type = other DNA
taaagatttcccgaaaacgg

SEQ ID NO: 22731 - DNA, 20 bp, synthetic construct
  source 1..20: mol_type = other DNA
ttcacgccgccagcatagga

SEQ ID NO: 22732 - DNA, 20 bp, synthetic construct
  source 1..20: mol_type = other DNA
tccgcgtcgccagccacagg

SEQ ID NO: 22733 - DNA, 20 bp, synthetic construct
  source 1..20: mol_type = other DNA
agcctggtgccagtcgtacc

SEQ ID NO: 22734 - DNA, 20 bp, synthetic construct
  source 1..20: mol_type = other DNA
taccgcccaccacccacacg

SEQ ID NO: 22735 - DNA, 20 bp, synthetic construct
  source 1..20: mol_type = other DNA
ggaggggaccagtttggtga

SEQ ID NO: 22736 - DNA, 20 bp, synthetic construct
  source 1..20: mol_type = other DNA
aggcactttctggtaatgct

SEQ ID NO: 22737 - DNA, 20 bp, synthetic construct
  source 1..20: mol_type = other DNA
ctcaggaagcagcccatacg

SEQ ID NO: 22738 - DNA, 20 bp, synthetic construct
  source 1..20: mol_type = other DNA
aaagctgttcatgtgaacca

SEQ ID NO: 22739 - DNA, 20 bp, synthetic construct
  source 1..20: mol_type = other DNA
ggtgctttgcgattcacagg

SEQ ID NO: 22740 - DNA, 20 bp, synthetic construct
  source 1..20: mol_type = other DNA
gcagggaaggtactaggatc

SEQ ID NO: 22741 - DNA, 20 bp, synthetic construct
  source 1..20: mol_type = other DNA
tgtatgcacagcacttgacc

SEQ ID NO: 22742 - DNA, 20 bp, synthetic construct
  source 1..20: mol_type = other DNA
ggggtctcaacgcacacccg

SEQ ID NO: 22743 - DNA, 20 bp, synthetic construct
  source 1..20: mol_type = other DNA
gtaaccaaagctgattgact

SEQ ID NO: 22744 - DNA, 20 bp, synthetic construct
  source 1..20: mol_type = other DNA
acccattccacgatcggctc

SEQ ID NO: 22745 - DNA, 20 bp, synthetic construct
  source 1..20: mol_type = other DNA
gtacttgtgacaaattagca

SEQ ID NO: 22746 - DNA, 20 bp, synthetic construct
  source 1..20: mol_type = other DNA
gcatggaatatatattctcc

SEQ ID NO: 22747 - DNA, 20 bp, synthetic construct
  source 1..20: mol_type = other DNA
tcttcttaatgtgtaaagca

SEQ ID NO: 22748 - DNA, 20 bp, synthetic construct
  source 1..20: mol_type = other DNA
gaagtcatcatcatatccca

SEQ ID NO: 22749 - DNA, 20 bp, synthetic construct
  source 1..20: mol_type = other DNA
gtatgaaagccagctacaga

SEQ ID NO: 22750 - DNA, 20 bp, synthetic construct
  source 1..20: mol_type = other DNA
cgtacatctgatttgtgggt

SEQ ID NO: 22751 - DNA, 20 bp, synthetic construct
  source 1..20: mol_type = other DNA
aattgtggcaatgtggtctg

SEQ ID NO: 22752 - DNA, 20 bp, synthetic construct
  source 1..20: mol_type = other DNA
agaggaacaagtgtagtatc

SEQ ID NO: 22753 - DNA, 20 bp, synthetic construct
  source 1..20: mol_type = other DNA
gtacgtccgcaagcagcgag

SEQ ID NO: 22754 - DNA, 20 bp, synthetic construct
  source 1..20: mol_type = other DNA
cttaccgtggaccttactgg

SEQ ID NO: 22755 - DNA, 20 bp, synthetic construct
  source 1..20: mol_type = other DNA
gcagaagtaccctcaagcag

SEQ ID NO: 22756 - DNA, 20 bp, synthetic construct
  source 1..20: mol_type = other DNA
ctgcagagttcacccatgca

SEQ ID NO: 22757 - DNA, 20 bp, synthetic construct
  source 1..20: mol_type = other DNA
ctgtcccaacacctcaacaa

SEQ ID NO: 22758 - DNA, 20 bp, synthetic construct
  source 1..20: mol_type = other DNA
agggcggaatgcatccagag

SEQ ID NO: 22759 - DNA, 20 bp, synthetic construct
  source 1..20: mol_type = other DNA
agacacgcacctccgtgacg

SEQ ID NO: 22760 - DNA, 20 bp, synthetic construct
  source 1..20: mol_type = other DNA
ccatcttcgccacacgccac

SEQ ID NO: 22761 - DNA, 20 bp, synthetic construct
  source 1..20: mol_type = other DNA
ggcggcccaccagaaagccg

SEQ ID NO: 22762 - DNA, 20 bp, synthetic construct
  source 1..20: mol_type = other DNA
tatcgaccacctcccgctgt

SEQ ID NO: 22763 - DNA, 20 bp, synthetic construct
  source 1..20: mol_type = other DNA
gcggacgtaccaggtgtaca

SEQ ID NO: 22764 - DNA, 20 bp, synthetic construct
  source 1..20: mol_type = other DNA
gcagaagaaccctagcaagg

SEQ ID NO: 22765 - DNA, 20 bp, synthetic construct
  source 1..20: mol_type = other DNA
tgtccccatcacaggcacag

SEQ ID NO: 22766 - DNA, 20 bp, synthetic construct
  source 1..20: mol_type = other DNA
ggcggaggaaccgtttcaag

SEQ ID NO: 22767 - DNA, 20 bp, synthetic construct
  source 1..20: mol_type = other DNA
tcctgttccaggcctatgag

SEQ ID NO: 22768 - DNA, 20 bp, synthetic construct
  source 1..20: mol_type = other DNA
gtctccacgaaacacagcgt

SEQ ID NO: 22769 - DNA, 20 bp, synthetic construct
  source 1..20: mol_type = other DNA
gagggctgccagattgacga

SEQ ID NO: 22770 - DNA, 20 bp, synthetic construct
  source 1..20: mol_type = other DNA
gagggcacaggtccgaagca

SEQ ID NO: 22771 - DNA, 20 bp, synthetic construct
  source 1..20: mol_type = other DNA
catgcgacacatggaatgga

SEQ ID NO: 22772 - DNA, 20 bp, synthetic construct
  source 1..20: mol_type = other DNA
ccgcgtcgaagcgctcgaag

SEQ ID NO: 22773 - DNA, 20 bp, synthetic construct
  source 1..20: mol_type = other DNA
gcgctggaagagcagacgcg

SEQ ID NO: 22774 - DNA, 20 bp, synthetic construct
  source 1..20: mol_type = other DNA
ctccggcctcaccacgagcg

SEQ ID NO: 22775 - DNA, 20 bp, synthetic construct
  source 1..20: mol_type = other DNA
catgtggtcagcgtcaggta

SEQ ID NO: 22776 - DNA, 20 bp, synthetic construct
  source 1..20: mol_type = other DNA
tgtccggcctcggagaatgg

SEQ ID NO: 22777 - DNA, 20 bp, synthetic construct
  source 1..20: mol_type = other DNA
ggtctggaattgtaggacca

SEQ ID NO: 22778 - DNA, 20 bp, synthetic construct
  source 1..20: mol_type = other DNA
cacagccagatagttgccca

SEQ ID NO: 22779 - DNA, 20 bp, synthetic construct
  source 1..20: mol_type = other DNA
ggaaggcacctggtagtcag

SEQ ID NO: 22780 - DNA, 20 bp, synthetic construct
  source 1..20: mol_type = other DNA
ctgctggttcgcagcactgg

SEQ ID NO: 22781 - DNA, 20 bp, synthetic construct
  source 1..20: mol_type = other DNA
gacgccccacaccaaaacca

SEQ ID NO: 22782 - DNA, 20 bp, synthetic construct
  source 1..20: mol_type = other DNA
gcgctcgtggagcacggcgg

SEQ ID NO: 22783 - DNA, 20 bp, synthetic construct
  source 1..20: mol_type = other DNA
taggaggcccatagtcgtcg

SEQ ID NO: 22784 - DNA, 20 bp, synthetic construct
  source 1..20: mol_type = other DNA
gcagcatcaagtcccgatca

SEQ ID NO: 22785 - DNA, 20 bp, synthetic construct
  source 1..20: mol_type = other DNA
catgctgagggactccggag

SEQ ID NO: 22786 - DNA, 20 bp, synthetic construct
  source 1..20: mol_type = other DNA
tgatcataggcgagcaccag

SEQ ID NO: 22787 - DNA, 20 bp, synthetic construct
  source 1..20: mol_type = other DNA
gcctcctaagcacatgagca

SEQ ID NO: 22788 - DNA, 20 bp, synthetic construct
  source 1..20: mol_type = other DNA
ttggtacctagatgcattcg

SEQ ID NO: 22789 - DNA, 20 bp, synthetic construct
  source 1..20: mol_type = other DNA
aagcgttgaaaaggcgctgg

SEQ ID NO: 22790 - DNA, 20 bp, synthetic construct
  source 1..20: mol_type = other DNA
gcagaaaaacgcctgtctag

SEQ ID NO: 22791 - DNA, 20 bp, synthetic construct
  source 1..20: mol_type = other DNA
tatactctgaatctgtaagt

SEQ ID NO: 22792 - DNA, 20 bp, synthetic construct
  source 1..20: mol_type = other DNA
catgctggttgccttggaac

SEQ ID NO: 22793 - DNA, 20 bp, synthetic construct
  source 1..20: mol_type = other DNA
ccagcatggactgctcaatg

SEQ ID NO: 22794 - DNA, 20 bp, synthetic construct
  source 1..20: mol_type = other DNA
actcccctcactaaaggatg

SEQ ID NO: 22795 - DNA, 20 bp, synthetic construct
  source 1..20: mol_type = other DNA
ggtaccaatggagccaactg

SEQ ID NO: 22796 - DNA, 20 bp, synthetic construct
  source 1..20: mol_type = other DNA
catgtctcctccaatggtgg

SEQ ID NO: 22797 - DNA, 20 bp, synthetic construct
  source 1..20: mol_type = other DNA
ccagactcaggagtggaccg

SEQ ID NO: 22798 - DNA, 20 bp, synthetic construct
  source 1..20: mol_type = other DNA
caggtgggctggcttcatcg

SEQ ID NO: 22799 - DNA, 20 bp, synthetic construct
  source 1..20: mol_type = other DNA
ctcctcgaatacatcatcgg

SEQ ID NO: 22800 - DNA, 20 bp, synthetic construct
  source 1..20: mol_type = other DNA
gccacgcattgtctatgcca

SEQ ID NO: 22801 - DNA, 20 bp, synthetic construct
  source 1..20: mol_type = other DNA
aggtaggcagagcccgtgcg

SEQ ID NO: 22802 - DNA, 20 bp, synthetic construct
  source 1..20: mol_type = other DNA
tgtgctcttgtccttcggtg

SEQ ID NO: 22803 - DNA, 20 bp, synthetic construct
  source 1..20: mol_type = other DNA
gcagatgccttctaccagcg

SEQ ID NO: 22804 - DNA, 20 bp, synthetic construct
  source 1..20: mol_type = other DNA
catctgcaagcgctgagtcg

SEQ ID NO: 22805 - DNA, 20 bp, synthetic construct
  source 1..20: mol_type = other DNA
gaaggtgtgattgagccagg

SEQ ID NO: 22806 - DNA, 20 bp, synthetic construct
  source 1..20: mol_type = other DNA
gaaggcccacagctcgccca

SEQ ID NO: 22807 - DNA, 20 bp, synthetic construct
  source 1..20: mol_type = other DNA
ccagaggcacagaccgccgt

SEQ ID NO: 22808 - DNA, 20 bp, synthetic construct
  source 1..20: mol_type = other DNA
cgtgaggagcccgaacgcca

SEQ ID NO: 22809 - DNA, 20 bp, synthetic construct
  source 1..20: mol_type = other DNA
aacttcactgagacccacgt

SEQ ID NO: 22810 - DNA, 20 bp, synthetic construct
  source 1..20: mol_type = other DNA
actggtggccacgaatgtgt

SEQ ID NO: 22811 - DNA, 20 bp, synthetic construct
  source 1..20: mol_type = other DNA
gggttagcacggtggagaca

SEQ ID NO: 22812 - DNA, 20 bp, synthetic construct
  source 1..20: mol_type = other DNA
ggtgcacatgggcaaacacc

SEQ ID NO: 22813 - DNA, 20 bp, synthetic construct
  source 1..20: mol_type = other DNA
gtacttggtcatgtatggtg

SEQ ID NO: 22814 - DNA, 20 bp, synthetic construct
  source 1..20: mol_type = other DNA
tcacgcaatctggagcgctc

SEQ ID NO: 22815 - DNA, 20 bp, synthetic construct
  source 1..20: mol_type = other DNA
gatgtgtgcccctgtgatgg

SEQ ID NO: 22816 - DNA, 20 bp, synthetic construct
  source 1..20: mol_type = other DNA
tgtggtgattcgcttctggt

SEQ ID NO: 22817 - DNA, 20 bp, synthetic construct
  source 1..20: mol_type = other DNA
tgtcgagatcctcccctctg

SEQ ID NO: 22818 - DNA, 20 bp, synthetic construct
  source 1..20: mol_type = other DNA
tacgagcgagcccgcgtgct

SEQ ID NO: 22819 - DNA, 20 bp, synthetic construct
  source 1..20: mol_type = other DNA
ggcctgcggtcgctccccag

SEQ ID NO: 22820 - DNA, 20 bp, synthetic construct
  source 1..20: mol_type = other DNA
caggatgtgtgcccctgtga

SEQ ID NO: 22821 - DNA, 20 bp, synthetic construct
  source 1..20: mol_type = other DNA
gcgctcgggtgcccagcacg

SEQ ID NO: 22822 - DNA, 20 bp, synthetic construct
  source 1..20: mol_type = other DNA
ctccagctccaccatcacag

SEQ ID NO: 22823 - DNA, 20 bp, synthetic construct
  source 1..20: mol_type = other DNA
aatgtcgagatcctcccctc

SEQ ID NO: 22824 - DNA, 20 bp, synthetic construct
  source 1..20: mol_type = other DNA
ccctgtgatggtggagctgg

SEQ ID NO: 22825 - DNA, 20 bp, synthetic construct
  source 1..20: mol_type = other DNA
attcgcttctggttggcctg

SEQ ID NO: 22826 - DNA, 20 bp, synthetic construct
  source 1..20: mol_type = other DNA
gatgatgtggaggaggatga

SEQ ID NO: 22827 - DNA, 20 bp, synthetic construct
  source 1..20: mol_type = other DNA
tgacttggagaatgccgaag

SEQ ID NO: 22828 - DNA, 20 bp, synthetic construct
  source 1..20: mol_type = other DNA
tcctaggggcaattgagcgc

SEQ ID NO: 22829 - DNA, 20 bp, synthetic construct
  source 1..20: mol_type = other DNA
gactcgggatgagaaacgca

SEQ ID NO: 22830 - DNA, 20 bp, synthetic construct
  source 1..20: mol_type = other DNA
agaagctccccggacgactc

SEQ ID NO: 22831 - DNA, 20 bp, synthetic construct
  source 1..20: mol_type = other DNA
tcggaagacgtacttgacgt

SEQ ID NO: 22832 - DNA, 20 bp, synthetic construct
  source 1..20: mol_type = other DNA
tcaccacaagaagtactgca

SEQ ID NO: 22833 - DNA, 20 bp, synthetic construct
  source 1..20: mol_type = other DNA
gtcttccgaactgagaatgg

SEQ ID NO: 22834 - DNA, 20 bp, synthetic construct
  source 1..20: mol_type = other DNA
ccttcccaggcggtgatcca

SEQ ID NO: 22835 - DNA, 20 bp, synthetic construct
  source 1..20: mol_type = other DNA
tgccactcaatccatgaccc

SEQ ID NO: 22836 - DNA, 20 bp, synthetic construct
  source 1..20: mol_type = other DNA
tggggaagacccaaccagtg

SEQ ID NO: 22837 - DNA, 20 bp, synthetic construct
  source 1..20: mol_type = other DNA
gggtcatggattgagtggca

SEQ ID NO: 22838 - DNA, 20 bp, synthetic construct
  source 1..20: mol_type = other DNA
atgatgcagttgacacggag

SEQ ID NO: 22839 - DNA, 20 bp, synthetic construct
  source 1..20: mol_type = other DNA
agcagctgtactccccgatg

SEQ ID NO: 22840 - DNA, 20 bp, synthetic construct
  source 1..20: mol_type = other DNA
gggacagtgcagattcagga

SEQ ID NO: 22841 - DNA, 20 bp, synthetic construct
  source 1..20: mol_type = other DNA
gagggaactggcgccatcag

SEQ ID NO: 22842 - DNA, 20 bp, synthetic construct
  source 1..20: mol_type = other DNA
gcagctggatggccaaactg

SEQ ID NO: 22843 - DNA, 20 bp, synthetic construct
  source 1..20: mol_type = other DNA
gccactgatctccctgtgtg

SEQ ID NO: 22844 - DNA, 20 bp, synthetic construct
  source 1..20: mol_type = other DNA
ggacagcagatacacagcgg

SEQ ID NO: 22845 - DNA, 20 bp, synthetic construct
  source 1..20: mol_type = other DNA
gcagtgctcttagaagtgca

SEQ ID NO: 22846 - DNA, 20 bp, synthetic construct
  source 1..20: mol_type = other DNA
cagtagtcgggagctctcag

SEQ ID NO: 22847 - DNA, 20 bp, synthetic construct
  source 1..20: mol_type = other DNA
gttgcttggagcaatggtcg

SEQ ID NO: 22848 - DNA, 20 bp, synthetic construct
  source 1..20: mol_type = other DNA
cagaagctacacctggcctg

SEQ ID NO: 22849 - DNA, 20 bp, synthetic construct
  source 1..20: mol_type = other DNA
gaccttgcggggcagaacat

SEQ ID NO: 22850 - DNA, 20 bp, synthetic construct
  source 1..20: mol_type = other DNA
gaggctaggtgtgtatatcc

SEQ ID NO: 22851 - DNA, 20 bp, synthetic construct
  source 1..20: mol_type = other DNA
gcaagcaatagccccgcaca

SEQ ID NO: 22852 - DNA, 20 bp, synthetic construct
  source 1..20: mol_type = other DNA
tggtagttgcagcggtcagc

SEQ ID NO: 22853 - DNA, 20 bp, synthetic construct
  source 1..20: mol_type = other DNA
aggtgagcgctgctacagtg

SEQ ID NO: 22854 - DNA, 20 bp, synthetic construct
  source 1..20: mol_type = other DNA
gtgcggctgtcccggaccag

SEQ ID NO: 22855 - DNA, 20 bp, synthetic construct
  source 1..20: mol_type = other DNA
gtcattggcagcctagtgtg

SEQ ID NO: 22856 - DNA, 20 bp, synthetic construct
  source 1..20: mol_type = other DNA
gccagccgccggccatcatg

SEQ ID NO: 22857 - DNA, 20 bp, synthetic construct
  source 1..20: mol_type = other DNA
aggccagagcctaagccaca

SEQ ID NO: 22858 - DNA, 20 bp, synthetic construct
  source 1..20: mol_type = other DNA
acccggcgcctcagtaccaa

SEQ ID NO: 22859 - DNA, 20 bp, synthetic construct
  source 1..20: mol_type = other DNA
ccgcgggaagtagccacccg

SEQ ID NO: 22860 - DNA, 20 bp, synthetic construct
  source 1..20: mol_type = other DNA
acccggacagtagcccgtag

SEQ ID NO: 22861 - DNA, 20 bp, synthetic construct
  source 1..20: mol_type = other DNA
gcagtggtggcgctccgaag

SEQ ID NO: 22862 - DNA, 20 bp, synthetic construct
  source 1..20: mol_type = other DNA
gaggcgccgggtacatcgcg

SEQ ID NO: 22863 - DNA, 20 bp, synthetic construct
  source 1..20: mol_type = other DNA
gggtcccaaacaactcagga

SEQ ID NO: 22864 - DNA, 20 bp, synthetic construct
  source 1..20: mol_type = other DNA
gctggtcctcagacttcacg

SEQ ID NO: 22865 - DNA, 20 bp, synthetic construct
  source 1..20: mol_type = other DNA
gagactctgggcgcatatgc

SEQ ID NO: 22866 - DNA, 20 bp, synthetic construct
  source 1..20: mol_type = other DNA
ttgggttcggaggatcactc

SEQ ID NO: 22867 - DNA, 20 bp, synthetic construct
  source 1..20: mol_type = other DNA
gctgggcccacgaaggcgtc

SEQ ID NO: 22868 - DNA, 20 bp, synthetic construct
  source 1..20: mol_type = other DNA
gtggctacttcccgcggacc

SEQ ID NO: 22869 - DNA, 20 bp, synthetic construct
  source 1..20: mol_type = other DNA
tcttcggagcgccaccactg

SEQ ID NO: 22870 - DNA, 20 bp, synthetic construct
  source 1..20: mol_type = other DNA
tatgcgcccagagtctcggg

SEQ ID NO: 22871 - DNA, 20 bp, synthetic construct
  source 1..20: mol_type = other DNA
ccgggcccgagaagttggtg

SEQ ID NO: 22872 - DNA, 20 bp, synthetic construct
  source 1..20: mol_type = other DNA
tccgaagaggcgcaggacat

SEQ ID NO: 22873 - DNA, 20 bp, synthetic construct
  source 1..20: mol_type = other DNA
agattcacaagcgatccgag

SEQ ID NO: 22874 - DNA, 20 bp, synthetic construct
  source 1..20: mol_type = other DNA
agccctatctgacttcgcac

SEQ ID NO: 22875 - DNA, 20 bp, synthetic construct
  source 1..20: mol_type = other DNA
cagggaagtgccttcgacag

SEQ ID NO: 22876 - DNA, 20 bp, synthetic construct
  source 1..20: mol_type = other DNA
ggcggtgcagtgctaagaag

SEQ ID NO: 22877 - DNA, 20 bp, synthetic construct
  source 1..20: mol_type = other DNA
gcagccgcggaagtatcccc

SEQ ID NO: 22878 - DNA, 20 bp, synthetic construct
  source 1..20: mol_type = other DNA
gatgctggaacgtcgttgca

SEQ ID NO: 22879 - DNA, 20 bp, synthetic construct
  source 1..20: mol_type = other DNA
gaggcaacaaggcacgtcag

SEQ ID NO: 22880 - DNA, 20 bp, synthetic construct
  source 1..20: mol_type = other DNA
gaggcccggcccttcatatg

SEQ ID NO: 22881 - DNA, 20 bp, synthetic construct
  source 1..20: mol_type = other DNA
ggtcccactgggcaaagctc

SEQ ID NO: 22882 - DNA, 20 bp, synthetic construct
  source 1..20: mol_type = other DNA
agcagcttcgagctcatctg

SEQ ID NO: 22883 - DNA, 20 bp, synthetic construct
  source 1..20: mol_type = other DNA
gcggcggtgagcgatcaagt

SEQ ID NO: 22884 - DNA, 20 bp, synthetic construct
  source 1..20: mol_type = other DNA
accagctagttgcccacaag

SEQ ID NO: 22885 - DNA, 20 bp, synthetic construct
  source 1..20: mol_type = other DNA
ggcggccgcactctttgcac

SEQ ID NO: 22886 - DNA, 20 bp, synthetic construct
  source 1..20: mol_type = other DNA
tgggcagagcttccgaggct

SEQ ID NO: 22887 - DNA, 20 bp, synthetic construct
  source 1..20: mol_type = other DNA
gcgacggccacactcagggc

SEQ ID NO: 22888 - DNA, 20 bp, synthetic construct
  source 1..20: mol_type = other DNA
ggtgactgatgccaactacg

SEQ ID NO: 22889 - DNA, 20 bp, synthetic construct
  source 1..20: mol_type = other DNA
atgaaggcttatatgagtgc

SEQ ID NO: 22890 - DNA, 20 bp, synthetic construct
  source 1..20: mol_type = other DNA
gacagagacccggacagcga

SEQ ID NO: 22891 - DNA, 20 bp, synthetic construct
  source 1..20: mol_type = other DNA
ggaacgtgacggcgaccgag

SEQ ID NO: 22892 - DNA, 20 bp, synthetic construct
  source 1..20: mol_type = other DNA
tcggtcgccgtcacgttccg

SEQ ID NO: 22893 - DNA, 20 bp, synthetic construct
  source 1..20: mol_type = other DNA
gatctccagatacaccgagg

SEQ ID NO: 22894 - DNA, 20 bp, synthetic construct
  source 1..20: mol_type = other DNA
ggcgaccgaggggcagaatg

SEQ ID NO: 22895 - DNA, 20 bp, synthetic construct
  source 1..20: mol_type = other DNA
agcttcagatttccaaagtg

SEQ ID NO: 22896 - DNA, 20 bp, synthetic construct
  source 1..20: mol_type = other DNA
tccaatggtggttcctgcgg

SEQ ID NO: 22897 - DNA, 20 bp, synthetic construct
  source 1..20: mol_type = other DNA
gctcttgcccgacagagacc

SEQ ID NO: 22898 - DNA, 20 bp, synthetic construct
  source 1..20: mol_type = other DNA
atgtcctgcgccttccagag

SEQ ID NO: 22899 - DNA, 20 bp, synthetic construct
  source 1..20: mol_type = other DNA
gcttcaggaacacaaggccc

SEQ ID NO: 22900 - DNA, 20 bp, synthetic construct
  source 1..20: mol_type = other DNA
gccggaggacctggatcccg

SEQ ID NO: 22901 - DNA, 20 bp, synthetic construct
  source 1..20: mol_type = other DNA
cggtgtatctggagatccaa

SEQ ID NO: 22902 - DNA, 20 bp, synthetic construct
  source 1..20: mol_type = other DNA
aaagtgaggaaaaaggatga

SEQ ID NO: 22903 - DNA, 20 bp, synthetic construct
  source 1..20: mol_type = other DNA
gccgtcaccaatctctacaa

SEQ ID NO: 22904 - DNA, 20 bp, synthetic construct
  source 1..20: mol_type = other DNA
gccgtggcccagctctacaa

SEQ ID NO: 22905 - DNA, 20 bp, synthetic construct
  source 1..20: mol_type = other DNA
tttgtagagattggtgacgg

SEQ ID NO: 22906 - DNA, 20 bp, synthetic construct
  source 1..20: mol_type = other DNA
ggggacactacagtcagtct

SEQ ID NO: 22907 - DNA, 20 bp, synthetic construct
  source 1..20: mol_type = other DNA
gctctagagtttcgtggtgg

SEQ ID NO: 22908 - DNA, 20 bp, synthetic construct
  source 1..20: mol_type = other DNA
gcgacgcaataaggatgtgt

SEQ ID NO: 22909 - DNA, 20 bp, synthetic construct
  source 1..20: mol_type = other DNA
tttgtagagctgggccacgg

SEQ ID NO: 22910 - DNA, 20 bp, synthetic construct
  source 1..20: mol_type = other DNA
gtggcacctcttccagaact

SEQ ID NO: 22911 - DNA, 20 bp, synthetic construct
  source 1..20: mol_type = other DNA
agcacaagcagcagaagctg

SEQ ID NO: 22912 - DNA, 20 bp, synthetic construct
  source 1..20: mol_type = other DNA
gggacccagagagaaagtcc

SEQ ID NO: 22913 - DNA, 20 bp, synthetic construct
  source 1..20: mol_type = other DNA
gtcctggctgctgacacact

SEQ ID NO: 22914 - DNA, 20 bp, synthetic construct
  source 1..20: mol_type = other DNA
gatttgatcagcttcctgtg

SEQ ID NO: 22915 - DNA, 20 bp, synthetic construct
  source 1..20: mol_type = other DNA
cttgtgctcgggctgcgcgg

SEQ ID NO: 22916 - DNA, 20 bp, synthetic construct
  source 1..20: mol_type = other DNA
ccgagcactggttctccaag

SEQ ID NO: 22917 - DNA, 20 bp, synthetic construct
  source 1..20: mol_type = other DNA
ggagcggcagtgcctggccg

SEQ ID NO: 22918 - DNA, 20 bp, synthetic construct
  source 1..20: mol_type = other DNA
gcccagccccccacccccag

SEQ ID NO: 22919 - DNA, 20 bp, synthetic construct
  source 1..20: mol_type = other DNA
cactgagggtgagaaggcga

SEQ ID NO: 22920 - DNA, 20 bp, synthetic construct
  source 1..20: mol_type = other DNA
agcagggccggctcctctgg

SEQ ID NO: 22921 - DNA, 20 bp, synthetic construct
  source 1..20: mol_type = other DNA
tgagcagggccggctcctct

SEQ ID NO: 22922 - DNA, 20 bp, synthetic construct
  source 1..20: mol_type = other DNA
gagcagggccggctcctctg

SEQ ID NO: 22923 - DNA, 20 bp, synthetic construct
  source 1..20: mol_type = other DNA
gggccggctcctctgggggt

SEQ ID NO: 22924 - DNA, 20 bp, synthetic construct
  source 1..20: mol_type = other DNA
ccccccacccccagaggagc

SEQ ID NO: 22925 - DNA, 20 bp, synthetic construct
  source 1..20: mol_type = other DNA
ccactgagggtgagaaggcg

SEQ ID NO: 22926 - DNA, 20 bp, synthetic construct
  source 1..20: mol_type = other DNA
ccggctcctctgggggtggg

SEQ ID NO: 22927 - DNA, 20 bp, synthetic construct
  source 1..20: mol_type = other DNA
ggccggctcctctgggggtg

SEQ ID NO: 22928 - DNA, 20 bp, synthetic construct
  source 1..20: mol_type = other DNA
ttctcctcgttgagccactg

SEQ ID NO: 22929 - DNA, 20 bp, synthetic construct
  source 1..20: mol_type = other DNA
cctcgccttctcaccctcag

SEQ ID NO: 22930 - DNA, 20 bp, synthetic construct
  source 1..20: mol_type = other DNA
ttgagccactgagggtgaga

SEQ ID NO: 22931 - DNA, 20 bp, synthetic construct
  source 1..20: mol_type = other DNA
agggccggctcctctggggg

SEQ ID NO: 22932 - DNA, 20 bp, synthetic construct
  source 1..20: mol_type = other DNA
gggtggggggctgggcgtgg

SEQ ID NO: 22933 - DNA, 20 bp, synthetic construct
  source 1..20: mol_type = other DNA
gcacgataaccatgccaaag

SEQ ID NO: 22934 - DNA, 20 bp, synthetic construct
  source 1..20: mol_type = other DNA
ccctgccgacgcatccgtgg

SEQ ID NO: 22935 - DNA, 20 bp, synthetic construct
  source 1..20: mol_type = other DNA
ccaccgaaaggatctcgtcg

SEQ ID NO: 22936 - DNA, 20 bp, synthetic construct
  source 1..20: mol_type = other DNA
gggtagccggcaaactcccg

SEQ ID NO: 22937 - DNA, 20 bp, synthetic construct
  source 1..20: mol_type = other DNA
tgggcgtcaccacctcgatg

SEQ ID NO: 22938 - DNA, 20 bp, synthetic construct
  source 1..20: mol_type = other DNA
gttgagccgcaggtcgtgca

SEQ ID NO: 22939 - DNA, 20 bp, synthetic construct
  source 1..20: mol_type = other DNA
tgctgggcgccaagtctccg

SEQ ID NO: 22940 - DNA, 20 bp, synthetic construct
  source 1..20: mol_type = other DNA
gcaccacgtcacgttcacct

SEQ ID NO: 22941 - DNA, 20 bp, synthetic construct
  source 1..20: mol_type = other DNA
gttcttgagggtcatgacgt

SEQ ID NO: 22942 - DNA, 20 bp, synthetic construct
  source 1..20: mol_type = other DNA
gaggctcgggcactcggaga

SEQ ID NO: 22943 - DNA, 20 bp, synthetic construct
  source 1..20: mol_type = other DNA
ccgtactccaggccaagtgt

SEQ ID NO: 22944 - DNA, 20 bp, synthetic construct
  source 1..20: mol_type = other DNA
gttcccaaagcggttgagcg

SEQ ID NO: 22945 - DNA, 20 bp, synthetic construct
  source 1..20: mol_type = other DNA
aagctcagcaacctgacgga

SEQ ID NO: 22946 - DNA, 20 bp, synthetic construct
  source 1..20: mol_type = other DNA
cgtgacgctggacaaactgc

SEQ ID NO: 22947 - DNA, 20 bp, synthetic construct
  source 1..20: mol_type = other DNA
gaacgagatctcctacatcg

SEQ ID NO: 22948 - DNA, 20 bp, synthetic construct
  source 1..20: mol_type = other DNA
tgagcagatcgagcttgccg

SEQ ID NO: 22949 - DNA, 20 bp, synthetic construct
  source 1..20: mol_type = other DNA
agaactctcttgcttcgcgg

SEQ ID NO: 22950 - DNA, 20 bp, synthetic construct
  source 1..20: mol_type = other DNA
atggccaggtagcccgacca

SEQ ID NO: 22951 - DNA, 20 bp, synthetic construct
  source 1..20: mol_type = other DNA
tgactgagtgtccctacatg

SEQ ID NO: 22952 - DNA, 20 bp, synthetic construct
  source 1..20: mol_type = other DNA
gagcgaacgctggacgatgg

SEQ ID NO: 22953 - DNA, 20 bp, synthetic construct
  source 1..20: mol_type = other DNA
aatagccaggtggatagcgg

SEQ ID NO: 22954 - DNA, 20 bp, synthetic construct
  source 1..20: mol_type = other DNA
aaccactggagaagcaacac

SEQ ID NO: 22955 - DNA, 20 bp, synthetic construct
  source 1..20: mol_type = other DNA
ccctgatcgcgtcagcccgg

SEQ ID NO: 22956 - DNA, 20 bp, synthetic construct
  source 1..20: mol_type = other DNA
ctggcatcaaaacacgtgaa

SEQ ID NO: 22957 - DNA, 20 bp, synthetic construct
  source 1..20: mol_type = other DNA
taccctgcaatgaaacccgg

SEQ ID NO: 22958 - DNA, 20 bp, synthetic construct
  source 1..20: mol_type = other DNA
aaaatcactagggtagtcac

SEQ ID NO: 22959 - DNA, 20 bp, synthetic construct
  source 1..20: mol_type = other DNA
gacgtgttaaacctcagcat

SEQ ID NO: 22960 - DNA, 20 bp, synthetic construct
  source 1..20: mol_type = other DNA
ttcatgcgaccgtagcctcc

SEQ ID NO: 22961 - DNA, 20 bp, synthetic construct
  source 1..20: mol_type = other DNA
gcttctggcatgctacggga

SEQ ID NO: 22962 - DNA, 20 bp, synthetic construct
  source 1..20: mol_type = other DNA
tcccagcccatctactatgg

SEQ ID NO: 22963 - DNA, 20 bp, synthetic construct
  source 1..20: mol_type = other DNA
tgccagtatacctagcgacg

SEQ ID NO: 22964 - DNA, 20 bp, synthetic construct
  source 1..20: mol_type = other DNA
agtgcacagaaggctccatg

SEQ ID NO: 22965 - DNA, 20 bp, synthetic construct
  source 1..20: mol_type = other DNA
ttctcgcctcataatacccc

SEQ ID NO: 22966 - DNA, 20 bp, synthetic construct
  source 1..20: mol_type = other DNA
acagctgtgagcacgaagag

SEQ ID NO: 22967 - DNA, 20 bp, synthetic construct
  source 1..20: mol_type = other DNA
agaggacaaaacaaacctga

SEQ ID NO: 22968 - DNA, 20 bp, synthetic construct
  source 1..20: mol_type = other DNA
ctgcagcggacagcaaatgg

SEQ ID NO: 22969 - DNA, 20 bp, synthetic construct
  source 1..20: mol_type = other DNA
tgccaaatatcctacaatgg

SEQ ID NO: 22970 - DNA, 20 bp, synthetic construct
  source 1..20: mol_type = other DNA
catcctcgctcgggactgtg

SEQ ID NO: 22971 - DNA, 20 bp, synthetic construct
  source 1..20: mol_type = other DNA
gagccatcggactacagcaa

SEQ ID NO: 22972 - DNA, 20 bp, synthetic construct
  source 1..20: mol_type = other DNA
ttggcgaataaccacctgcg

SEQ ID NO: 22973 - DNA, 20 bp, synthetic construct
  source 1..20: mol_type = other DNA
tcggtctgtatacagatcag

SEQ ID NO: 22974 - DNA, 20 bp, synthetic construct
  source 1..20: mol_type = other DNA
ggcccttcgtgcctgaaaag

SEQ ID NO: 22975 - DNA, 20 bp, synthetic construct
  source 1..20: mol_type = other DNA
acagtcatttgaactactgt

SEQ ID NO: 22976 - DNA, 20 bp, synthetic construct
  source 1..20: mol_type = other DNA
gctcatcatctctcttggtg

SEQ ID NO: 22977 - DNA, 20 bp, synthetic construct
  source 1..20: mol_type = other DNA
ggtgctgtgaataggtgtca

SEQ ID NO: 22978 - DNA, 20 bp, synthetic construct
  source 1..20: mol_type = other DNA
gacaaggagatcgaacacca

SEQ ID NO: 22979 - DNA, 20 bp, synthetic construct
  source 1..20: mol_type = other DNA
atagaccatagtaacctggg

SEQ ID NO: 22980 - DNA, 20 bp, synthetic construct
  source 1..20: mol_type = other DNA
tgtctcgcagaagaacatgg

SEQ ID NO: 22981 - DNA, 20 bp, synthetic construct
  source 1..20: mol_type = other DNA
gaggacctcaggagcgtgga

SEQ ID NO: 22982 - DNA, 20 bp, synthetic construct
  source 1..20: mol_type = other DNA
tgagcgtcctcaccgtcatg

SEQ ID NO: 22983 - DNA, 20 bp, synthetic construct
  source 1..20: mol_type = other DNA
cgtggacggacgaaaatgcc

SEQ ID NO: 22984 - DNA, 20 bp, synthetic construct
  source 1..20: mol_type = other DNA
tgttcttctgcgagacaaag

SEQ ID NO: 22985 - DNA, 20 bp, synthetic construct
  source 1..20: mol_type = other DNA
ctgcacagtgtagtttcgga

SEQ ID NO: 22986 - DNA, 20 bp, synthetic construct
  source 1..20: mol_type = other DNA
tcaccgtcatgtggttgccc

SEQ ID NO: 22987 - DNA, 20 bp, synthetic construct
  source 1..20: mol_type = other DNA
ttcgtccgtccacgctcctg

SEQ ID NO: 22988 - DNA, 20 bp, synthetic construct
  source 1..20: mol_type = other DNA
gctgctgctgaagccggaca

SEQ ID NO: 22989 - DNA, 20 bp, synthetic construct
  source 1..20: mol_type = other DNA
tgtgggagtggagtttgagg

SEQ ID NO: 22990 - DNA, 20 bp, synthetic construct
  source 1..20: mol_type = other DNA
ctacactgtgcagtttgatg

SEQ ID NO: 22991 - DNA, 20 bp, synthetic construct
  source 1..20: mol_type = other DNA
tgtgcagtttgatgtgggag

SEQ ID NO: 22992 - DNA, 20 bp, synthetic construct
  source 1..20: mol_type = other DNA
cacagccaagctgatgtctg

SEQ ID NO: 22993 - DNA, 20 bp, synthetic construct
  source 1..20: mol_type = other DNA
ggtggcacaaagcacgtcaa

SEQ ID NO: 22994 - DNA, 20 bp, synthetic construct
  source 1..20: mol_type = other DNA
aggccatcagagatttgccg

SEQ ID NO: 22995 - DNA, 20 bp, synthetic construct
  source 1..20: mol_type = other DNA
agcacgagatgtgacggcta

SEQ ID NO: 22996 - DNA, 20 bp, synthetic construct
  source 1..20: mol_type = other DNA
ccttagatcgaggatgtaag

SEQ ID NO: 22997 - DNA, 20 bp, synthetic construct
  source 1..20: mol_type = other DNA
aaaagatggacagagatatg

SEQ ID NO: 22998 - DNA, 20 bp, synthetic construct
  source 1..20: mol_type = other DNA
ccgcaaatggcagctgactg

SEQ ID NO: 22999 - DNA, 20 bp, synthetic construct
  source 1..20: mol_type = other DNA
cagggctgagaagtgtgttg

SEQ ID NO: 23000 - DNA, 20 bp, synthetic construct
  source 1..20: mol_type = other DNA
agtacctcctcaatctatgg

SEQ ID NO: 23001 - DNA, 20 bp, synthetic construct
  source 1..20: mol_type = other DNA
caaaagcatcttaatgctgg

SEQ ID NO: 23002 - DNA, 20 bp, synthetic construct
  source 1..20: mol_type = other DNA
gttgctctggctaatctccg

SEQ ID NO: 23003 - DNA, 20 bp, synthetic construct
  source 1..20: mol_type = other DNA
ggagaaaagtatagaaggta

SEQ ID NO: 23004 - DNA, 20 bp, synthetic construct
  source 1..20: mol_type = other DNA
cctgttcctcctccaatgaa

SEQ ID NO: 23005 - DNA, 20 bp, synthetic construct
  source 1..20: mol_type = other DNA
cctccacagacacacatctg

SEQ ID NO: 23006 - DNA, 20 bp, synthetic construct
  source 1..20: mol_type = other DNA
gaagaacactgtgatctcag

SEQ ID NO: 23007 - DNA, 20 bp, synthetic construct
  source 1..20: mol_type = other DNA
gaacatggatagaagcagaa

SEQ ID NO: 23008 - DNA, 20 bp, synthetic construct
  source 1..20: mol_type = other DNA
atccccaccaccgtaccgtg

SEQ ID NO: 23009 - DNA, 20 bp, synthetic construct
  source 1..20: mol_type = other DNA
caggagtgtgtccaccgtcg

SEQ ID NO: 23010 - DNA, 20 bp, synthetic construct
  source 1..20: mol_type = other DNA
tccatgcgaggtggagccga

SEQ ID NO: 23011 - DNA, 20 bp, synthetic construct
  source 1..20: mol_type = other DNA
ccacgaacgagtgtgcggcg

SEQ ID NO: 23012 - DNA, 20 bp, synthetic construct
  source 1..20: mol_type = other DNA
tccagcagacaggccacgcg

SEQ ID NO: 23013 - DNA, 20 bp, synthetic construct
  source 1..20: mol_type = other DNA
atgatcttctgggcacacgc

SEQ ID NO: 23014 - DNA, 20 bp, synthetic construct
  source 1..20: mol_type = other DNA
cccacagggcttccgtccag

SEQ ID NO: 23015 - DNA, 20 bp, synthetic construct
  source 1..20: mol_type = other DNA
gccgtcggaagaactgaaca

SEQ ID NO: 23016 - DNA, 20 bp, synthetic construct
  source 1..20: mol_type = other DNA
agcccgccagggtcccacag

SEQ ID NO: 23017 - DNA, 20 bp, synthetic construct
  source 1..20: mol_type = other DNA
agatggtgtcgaccgcacct

SEQ ID NO: 23018 - DNA, 20 bp, synthetic construct
  source 1..20: mol_type = other DNA
agccccagcgcccttcaccg

SEQ ID NO: 23019 - DNA, 20 bp, synthetic construct
  source 1..20: mol_type = other DNA
ggatcctgaagctcgagcac

SEQ ID NO: 23020 - DNA, 20 bp, synthetic construct
  source 1..20: mol_type = other DNA
gagcagccctcgacttcctg

SEQ ID NO: 23021 - DNA, 20 bp, synthetic construct
  source 1..20: mol_type = other DNA
tgaagagtccttgtgctccg

SEQ ID NO: 23022 - DNA, 20 bp, synthetic construct
  source 1..20: mol_type = other DNA
tctgaagtcagcctgtcctg

SEQ ID NO: 23023 - DNA, 20 bp, synthetic construct
  source 1..20: mol_type = other DNA
gcagcggctccctatagggt

SEQ ID NO: 23024 - DNA, 20 bp, synthetic construct
  source 1..20: mol_type = other DNA
cagaaagtgccggaaaccgg

SEQ ID NO: 23025 - DNA, 20 bp, synthetic construct
  source 1..20: mol_type = other DNA
tttctgagttcgcacacctg

SEQ ID NO: 23026 - DNA, 20 bp, synthetic construct
  source 1..20: mol_type = other DNA
tgatgagatgcagttgtgcg

SEQ ID NO: 23027 - DNA, 20 bp, synthetic construct
  source 1..20: mol_type = other DNA
tgagataccaggcccagacc

SEQ ID NO: 23028 - DNA, 20 bp, synthetic construct
  source 1..20: mol_type = other DNA
gtatctcacagtagcgggta

SEQ ID NO: 23029 - DNA, 20 bp, synthetic construct
  source 1..20: mol_type = other DNA
caactggcagctggctaacg

SEQ ID NO: 23030 - DNA, 20 bp, synthetic construct
  source 1..20: mol_type = other DNA
gtctagagaaatgtgagctg

SEQ ID NO: 23031 - DNA, 20 bp, synthetic construct
  source 1..20: mol_type = other DNA
ctcctctcccaaacccagtg

SEQ ID NO: 23032 - DNA, 20 bp, synthetic construct
  source 1..20: mol_type = other DNA
aggggtgatgacttaccagg

SEQ ID NO: 23033 - DNA, 20 bp, synthetic construct
  source 1..20: mol_type = other DNA
agaaaaactatgctttgagt

SEQ ID NO: 23034 - DNA, 20 bp, synthetic construct
  source 1..20: mol_type = other DNA
gaagaatgagaggccagcaa

SEQ ID NO: 23035 - DNA, 20 bp, synthetic construct
  source 1..20: mol_type = other DNA
ctccaggaagcgcatggtgt

SEQ ID NO: 23036 - DNA, 20 bp, synthetic construct
  source 1..20: mol_type = other DNA
ggtgtccaccaagagacaac

SEQ ID NO: 23037 - DNA, 20 bp, synthetic construct
  source 1..20: mol_type = other DNA
gagccggtcactatcgactg

SEQ ID NO: 23038 - DNA, 20 bp, synthetic construct
  source 1..20: mol_type = other DNA
ctgtaggatcctccgatagg

SEQ ID NO: 23039 - DNA, 20 bp, synthetic construct
  source 1..20: mol_type = other DNA
agaaccgactggaccccacg

SEQ ID NO: 23040 - DNA, 20 bp, synthetic construct
  source 1..20: mol_type = other DNA
gaaagcccggccctactatg

SEQ ID NO: 23041 - DNA, 20 bp, synthetic construct
  source 1..20: mol_type = other DNA
gctgaaccatgctacctgca

SEQ ID NO: 23042 - DNA, 20 bp, synthetic construct
  source 1..20: mol_type = other DNA
ctgggccttgagctcaaagt

SEQ ID NO: 23043 - DNA, 20 bp, synthetic construct
  source 1..20: mol_type = other DNA
ggctcggcggctggctaagg

SEQ ID NO: 23044 - DNA, 20 bp, synthetic construct
  source 1..20: mol_type = other DNA
ggccagcgaggagatcaacc

SEQ ID NO: 23045 - DNA, 20 bp, synthetic construct
  source 1..20: mol_type = other DNA
gtaggggcggctcttgccga

SEQ ID NO: 23046 - DNA, 20 bp, synthetic construct
  source 1..20: mol_type = other DNA
atacacagggttcccacttg

SEQ ID NO: 23047 - DNA, 20 bp, synthetic construct
  source 1..20: mol_type = other DNA
ggcagcgctgcggtacgagc

SEQ ID NO: 23048 - DNA, 20 bp, synthetic construct
  source 1..20: mol_type = other DNA
ggcacagccgagtcactcgc

SEQ ID NO: 23049 - DNA, 20 bp, synthetic construct
  source 1..20: mol_type = other DNA
agaactggatcctagaatac

SEQ ID NO: 23050 - DNA, 20 bp, synthetic construct
  source 1..20: mol_type = other DNA
tcggaggatcctacaggagt

SEQ ID NO: 23051 - DNA, 20 bp, synthetic construct
  source 1..20: mol_type = other DNA
ggagttggagcacctgaacc

SEQ ID NO: 23052 - DNA, 20 bp, synthetic construct
  source 1..20: mol_type = other DNA
cttgccgatggccctccgga

SEQ ID NO: 23053 - DNA, 20 bp, synthetic construct
  source 1..20: mol_type = other DNA
ctgacaatggaactgactgg

SEQ ID NO: 23054 - DNA, 20 bp, synthetic construct
  source 1..20: mol_type = other DNA
ggcccccgagtactaccccg

SEQ ID NO: 23055 - DNA, 20 bp, synthetic construct
  source 1..20: mol_type = other DNA
aaagagaggatacggaatgc

SEQ ID NO: 23056 - DNA, 20 bp, synthetic construct
  source 1..20: mol_type = other DNA
aggacgacgagcgcagctgt

SEQ ID NO: 23057 - DNA, 20 bp, synthetic construct
  source 1..20: mol_type = other DNA
acaaactggcttctctcaag

SEQ ID NO: 23058 - DNA, 20 bp, synthetic construct
  source 1..20: mol_type = other DNA
cagctgtcggggccgcgagt

SEQ ID NO: 23059 - DNA, 20 bp, synthetic construct
  source 1..20: mol_type = other DNA
tgaagagctggagagcgccg

SEQ ID NO: 23060 - DNA, 20 bp, synthetic construct
  source 1..20: mol_type = other DNA
tcttgccacagattctatgg

SEQ ID NO: 23061 - DNA, 20 bp, synthetic construct
  source 1..20: mol_type = other DNA
tggtacttacttccagctgg

SEQ ID NO: 23062 - DNA, 20 bp, synthetic construct
  source 1..20: mol_type = other DNA
tagatcagcagtacaaagag

SEQ ID NO: 23063 - DNA, 20 bp, synthetic construct
  source 1..20: mol_type = other DNA
cagttgcaacaactgcaaga

SEQ ID NO: 23064 - DNA, 20 bp, synthetic construct
  source 1..20: mol_type = other DNA
gttaacaaatagtttagctg

SEQ ID NO: 23065 - DNA, 20 bp, synthetic construct
  source 1..20: mol_type = other DNA
tcatgaccagaaagttgcgg

SEQ ID NO: 23066 - DNA, 20 bp, synthetic construct
  source 1..20: mol_type = other DNA
tccccatcccagacaagagg

SEQ ID NO: 23067 - DNA, 20 bp, synthetic construct
  source 1..20: mol_type = other DNA
agaagactatgtagaaatga

SEQ ID NO: 23068 - DNA, 20 bp, synthetic construct
  source 1..20: mol_type = other DNA
actaagcagatgtcgatcgg

SEQ ID NO: 23069 - DNA, 20 bp, synthetic construct
  source 1..20: mol_type = other DNA
gatcgaggtctataagcacg

SEQ ID NO: 23070 - DNA, 20 bp, synthetic construct
  source 1..20: mol_type = other DNA
caaggaggtccagacgatcg

SEQ ID NO: 23071 - DNA, 20 bp, synthetic construct
  source 1..20: mol_type = other DNA
agaggaaagtaagaagccgg

SEQ ID NO: 23072 - DNA, 20 bp, synthetic construct
  source 1..20: mol_type = other DNA
tgatgggcccgtctatagca

SEQ ID NO: 23073 - DNA, 20 bp, synthetic construct
  source 1..20: mol_type = other DNA
tcgacatctgcttagtgctg

SEQ ID NO: 23074 - DNA, 20 bp, synthetic construct
  source 1..20: mol_type = other DNA
gagtgctcgaggccccacaa

SEQ ID NO: 23075 - DNA, 20 bp, synthetic construct
  source 1..20: mol_type = other DNA
ggtcatatggagccgctgca

SEQ ID NO: 23076 - DNA, 20 bp, synthetic construct
  source 1..20: mol_type = other DNA
gccgccagaaacttcccaca

SEQ ID NO: 23077 - DNA, 20 bp, synthetic construct
  source 1..20: mol_type = other DNA
tacatgcagagggtcctccg

SEQ ID NO: 23078 - DNA, 20 bp, synthetic construct
  source 1..20: mol_type = other DNA
ggccctgctcacctgtatgg

SEQ ID NO: 23079 - DNA, 20 bp, synthetic construct
  source 1..20: mol_type = other DNA
acactatggaccttgaaact

SEQ ID NO: 23080 - DNA, 20 bp, synthetic construct
  source 1..20: mol_type = other DNA
gatctcaggcacttccaggc

SEQ ID NO: 23081 - DNA, 20 bp, synthetic construct
  source 1..20: mol_type = other DNA
agactgtcagttgcacacta

SEQ ID NO: 23082 - DNA, 20 bp, synthetic construct
  source 1..20: mol_type = other DNA
tctgggagaagatggtcata

SEQ ID NO: 23083 - DNA, 20 bp, synthetic construct
  source 1..20: mol_type = other DNA
ggcgcgcaccggctcacggt

SEQ ID NO: 23084 - DNA, 20 bp, synthetic construct
  source 1..20: mol_type = other DNA
cagttagcgagttggtaccg

SEQ ID NO: 23085 - DNA, 20 bp, synthetic construct
  source 1..20: mol_type = other DNA
gtcctacgagttgcaaccgg

SEQ ID NO: 23086 - DNA, 20 bp, synthetic construct
  source 1..20: mol_type = other DNA
acgatccgacacgctaatca

SEQ ID NO: 23087 - DNA, 20 bp, synthetic construct
  source 1..20: mol_type = other DNA
cgagtaagaccaactcccca

SEQ ID NO: 23088 - DNA, 20 bp, synthetic construct
  source 1..20: mol_type = other DNA
tagctgggcttatcaaacgc

SEQ ID NO: 23089 - DNA, 20 bp, synthetic construct
  source 1..20: mol_type = other DNA
ttattgctgatggtaatcga

SEQ ID NO: 23090 - DNA, 20 bp, synthetic construct
  source 1..20: mol_type = other DNA
ttgctgatggtaatcgatgg

SEQ ID NO: 23091 - DNA, 20 bp, synthetic construct
  source 1..20: mol_type = other DNA
cacgacacgcatcctggatg

SEQ ID NO: 23092 - DNA, 20 bp, synthetic construct
  source 1..20: mol_type = other DNA
ctgactccggctataacgct

SEQ ID NO: 23093 - DNA, 20 bp, synthetic construct
  source 1..20: mol_type = other DNA
agaggaaaatgagagtccag

SEQ ID NO: 23094 - DNA, 20 bp, synthetic construct
  source 1..20: mol_type = other DNA
tcacgtccagaacttccacc

SEQ ID NO: 23095 - DNA, 20 bp, synthetic construct
  source 1..20: mol_type = other DNA
tgagcccgcgctgacgtcca

SEQ ID NO: 23096 - DNA, 20 bp, synthetic construct
  source 1..20: mol_type = other DNA
cggcgcgcaccggctcacgg

SEQ ID NO: 23097 - DNA, 20 bp, synthetic construct
  source 1..20: mol_type = other DNA
cacggctagagtgtccgtgg

SEQ ID NO: 23098 - DNA, 20 bp, synthetic construct
  source 1..20: mol_type = other DNA
gaggacggttcactactaga

SEQ ID NO: 23099 - DNA, 20 bp, synthetic construct
  source 1..20: mol_type = other DNA
attgtcgatgattcagtcag

SEQ ID NO: 23100 - DNA, 20 bp, synthetic construct
  source 1..20: mol_type = other DNA
gtagtcatagtcggctcccg

SEQ ID NO: 23101 - DNA, 20 bp, synthetic construct
  source 1..20: mol_type = other DNA
gataacgaaccacaaatacc

SEQ ID NO: 23102 - DNA, 20 bp, synthetic construct
  source 1..20: mol_type = other DNA
tctagtagtgaaccgtcctc

SEQ ID NO: 23103 - DNA, 20 bp, synthetic construct
  source 1..20: mol_type = other DNA
tggttcacgcttcccagagt

SEQ ID NO: 23104 - DNA, 20 bp, synthetic construct
  source 1..20: mol_type = other DNA
cttgatactcggctcaggtg

SEQ ID NO: 23105 - DNA, 20 bp, synthetic construct
  source 1..20: mol_type = other DNA
tcatagtcggctcccgagga

SEQ ID NO: 23106 - DNA, 20 bp, synthetic construct
  source 1..20: mol_type = other DNA
atgcaaatatatagagcacc

SEQ ID NO: 23107 - DNA, 20 bp, synthetic construct
  source 1..20: mol_type = other DNA
taagcccccccaaaacaaga

SEQ ID NO: 23108 - DNA, 20 bp, synthetic construct
  source 1..20: mol_type = other DNA
agaaggcatttcactcacag

SEQ ID NO: 23109 - DNA, 20 bp, synthetic construct
  source 1..20: mol_type = other DNA
tcgctcttgatactcggctc

SEQ ID NO: 23110 - DNA, 20 bp, synthetic construct
  source 1..20: mol_type = other DNA
cctcaaatccatcagcactg

SEQ ID NO: 23111 - DNA, 20 bp, synthetic construct
  source 1..20: mol_type = other DNA
tcccagagtaggtgtcattg

SEQ ID NO: 23112 - DNA, 20 bp, synthetic construct
  source 1..20: mol_type = other DNA
tctggggaccacagtgctga

SEQ ID NO: 23113 - DNA, 20 bp, synthetic construct
  source 1..20: mol_type = other DNA
gggacaccagcaccgaaccg

SEQ ID NO: 23114 - DNA, 20 bp, synthetic construct
  source 1..20: mol_type = other DNA
gaaggcgccatagtccgagg

SEQ ID NO: 23115 - DNA, 20 bp, synthetic construct
  source 1..20: mol_type = other DNA
atgctgccctacatgaacgt

SEQ ID NO: 23116 - DNA, 20 bp, synthetic construct
  source 1..20: mol_type = other DNA
agcgagcgcgaccctacctg

SEQ ID NO: 23117 - DNA, 20 bp, synthetic construct
  source 1..20: mol_type = other DNA
gactcgctctacggcgccag

SEQ ID NO: 23118 - DNA, 20 bp, synthetic construct
  source 1..20: mol_type = other DNA
tgcagggccgggaagacgac

SEQ ID NO: 23119 - DNA, 20 bp, synthetic construct
  source 1..20: mol_type = other DNA
gtagagcgagtccccgtgca

SEQ ID NO: 23120 - DNA, 20 bp, synthetic construct
  source 1..20: mol_type = other DNA
aacaccgagtccttgcagcg

SEQ ID NO: 23121 - DNA, 20 bp, synthetic construct
  source 1..20: mol_type = other DNA
tgcactgtcggcggaagcgg

SEQ ID NO: 23122 - DNA, 20 bp, synthetic construct
  source 1..20: mol_type = other DNA
cagcatctggtgcggtaccg

SEQ ID NO: 23123 - DNA, 20 bp, synthetic construct
  source 1..20: mol_type = other DNA
tcaaccagctgcactgtcgg

SEQ ID NO: 23124 - DNA, 20 bp, synthetic construct
  source 1..20: mol_type = other DNA
caaggactcggtgttgccgg

SEQ ID NO: 23125 - DNA, 20 bp, synthetic construct
  source 1..20: mol_type = other DNA
tcgacaacatcctagccgcc

SEQ ID NO: 23126 - DNA, 20 bp, synthetic construct
  source 1..20: mol_type = other DNA
gtagttgttgtagccgaggc

SEQ ID NO: 23127 - DNA, 20 bp, synthetic construct
  source 1..20: mol_type = other DNA
gttgccggtggcgcacagcg

SEQ ID NO: 23128 - DNA, 20 bp, synthetic construct
  source 1..20: mol_type = other DNA
gtagatctccagccgaggat

SEQ ID NO: 23129 - DNA, 20 bp, synthetic construct
  source 1..20: mol_type = other DNA
ggcacatcggcacttatcag

SEQ ID NO: 23130 - DNA, 20 bp, synthetic construct
  source 1..20: mol_type = other DNA
gataagtgccgatgtgccgt

SEQ ID NO: 23131 - DNA, 20 bp, synthetic construct
  source 1..20: mol_type = other DNA
acagtgacgttgcggatggg

SEQ ID NO: 23132 - DNA, 20 bp, synthetic construct
  source 1..20: mol_type = other DNA
tggagactccttaccatgtg

SEQ ID NO: 23133 - DNA, 20 bp, synthetic construct
  source 1..20: mol_type = other DNA
cagccagatggacagaatgg

SEQ ID NO: 23134 - DNA, 20 bp, synthetic construct
  source 1..20: mol_type = other DNA
gtggcctacaagttccacat

SEQ ID NO: 23135 - DNA, 20 bp, synthetic construct
  source 1..20: mol_type = other DNA
ccccatccgcaacgtcactg

SEQ ID NO: 23136 - DNA, 20 bp, synthetic construct
  source 1..20: mol_type = other DNA
gttgtcatagtagacagcga

SEQ ID NO: 23137 - DNA, 20 bp, synthetic construct
  source 1..20: mol_type = other DNA
gatccatttcatgtgcccac

SEQ ID NO: 23138 - DNA, 20 bp, synthetic construct
  source 1..20: mol_type = other DNA
tgccactctctgactaggag

SEQ ID NO: 23139 - DNA, 20 bp, synthetic construct
  source 1..20: mol_type = other DNA
tggggctctatggtgagact

SEQ ID NO: 23140 - DNA, 20 bp, synthetic construct
  source 1..20: mol_type = other DNA
gtgggcacatgaaatggatc

SEQ ID NO: 23141 - DNA, 20 bp, synthetic construct
  source 1..20: mol_type = other DNA
tggtagaggtcgatgagctc

SEQ ID NO: 23142 - DNA, 20 bp, synthetic construct
  source 1..20: mol_type = other DNA
ccaaggcaggatggacacgg

SEQ ID NO: 23143 - DNA, 20 bp, synthetic construct
  source 1..20: mol_type = other DNA
aacctgaacgctatgacctg

SEQ ID NO: 23144 - DNA, 20 bp, synthetic construct
  source 1..20: mol_type = other DNA
ccatggtttcaactgcgcag

SEQ ID NO: 23145 - DNA, 20 bp, synthetic construct
  source 1..20: mol_type = other DNA
aaatcggtgaattatagatg

SEQ ID NO: 23146 - DNA, 20 bp, synthetic construct
  source 1..20: mol_type = other DNA
gtggaaacgtgggcaagacc

SEQ ID NO: 23147 - DNA, 20 bp, synthetic construct
  source 1..20: mol_type = other DNA
gcgatactcccccacagtca

SEQ ID NO: 23148 - DNA, 20 bp, synthetic construct
  source 1..20: mol_type = other DNA
ataatcaatccatcgcggag

SEQ ID NO: 23149 - DNA, 20 bp, synthetic construct
  source 1..20: mol_type = other DNA
ggagcccaaaacttggtatg

SEQ ID NO: 23150 - DNA, 20 bp, synthetic construct
  source 1..20: mol_type = other DNA
cttcaatcgcataactcagg

SEQ ID NO: 23151 - DNA, 20 bp, synthetic construct
  source 1..20: mol_type = other DNA
ttgatgaaaacactaaacaa

SEQ ID NO: 23152 - DNA, 20 bp, synthetic construct
  source 1..20: mol_type = other DNA
caggaaggccccacaacccc

SEQ ID NO: 23153 - DNA, 20 bp, synthetic construct
  source 1..20: mol_type = other DNA
cacatgccaaagtacaagta

SEQ ID NO: 23154 - DNA, 20 bp, synthetic construct
  source 1..20: mol_type = other DNA
gcaggtcctgaattgttccc

SEQ ID NO: 23155 - DNA, 20 bp, synthetic construct
  source 1..20: mol_type = other DNA
cctgctggaaaaggaatgtg

SEQ ID NO: 23156 - DNA, 20 bp, synthetic construct
  source 1..20: mol_type = other DNA
atttatggtgctgacatcag

SEQ ID NO: 23157 - DNA, 20 bp, synthetic construct
  source 1..20: mol_type = other DNA
atggcctcccagtgtagctg

SEQ ID NO: 23158 - DNA, 20 bp, synthetic construct
  source 1..20: mol_type = other DNA
tatgggctaggacaaaaacg

SEQ ID NO: 23159 - DNA, 20 bp, synthetic construct
  source 1..20: mol_type = other DNA
tgatcataggccagaaccag

SEQ ID NO: 23160 - DNA, 20 bp, synthetic construct
  source 1..20: mol_type = other DNA
caagacgcgcgccgactccg

SEQ ID NO: 23161 - DNA, 20 bp, synthetic construct
  source 1..20: mol_type = other DNA
aagctctctataccatgatg

SEQ ID NO: 23162 - DNA, 20 bp, synthetic construct
  source 1..20: mol_type = other DNA
aagacgacaacgataacgcc

SEQ ID NO: 23163 - DNA, 20 bp, synthetic construct
  source 1..20: mol_type = other DNA
gatcgagcaggcaacaatgg

SEQ ID NO: 23164 - DNA, 20 bp, synthetic construct
  source 1..20: mol_type = other DNA
aattgctgcacaccgaatcg

SEQ ID NO: 23165 - DNA, 20 bp, synthetic construct
  source 1..20: mol_type = other DNA
tgtgctcagaatccgtcagg

SEQ ID NO: 23166 - DNA, 20 bp, synthetic construct
  source 1..20: mol_type = other DNA
aagaaggccaagtcgcgcaa

SEQ ID NO: 23167 - DNA, 20 bp, synthetic construct
  source 1..20: mol_type = other DNA
tgtatctgccacaacaacga

SEQ ID NO: 23168 - DNA, 20 bp, synthetic construct
  source 1..20: mol_type = other DNA
tgggatgggtgcgaacgctg

SEQ ID NO: 23169 - DNA, 20 bp, synthetic construct
  source 1..20: mol_type = other DNA
agacctgagcgtgtacagcg

SEQ ID NO: 23170 - DNA, 20 bp, synthetic construct
  source 1..20: mol_type = other DNA
aagctgaagaaaaacatggg

SEQ ID NO: 23171 - DNA, 20 bp, synthetic construct
  source 1..20: mol_type = other DNA
gtgtagattggcatctccag

SEQ ID NO: 23172 - DNA, 20 bp, synthetic construct
  source 1..20: mol_type = other DNA
tcttcctctggccacaacag

SEQ ID NO: 23173 - DNA, 20 bp, synthetic construct
  source 1..20: mol_type = other DNA
tgattgcatggaaagagcta

SEQ ID NO: 23174 - DNA, 20 bp, synthetic construct
  source 1..20: mol_type = other DNA
tatatccaggatgaaagcat

SEQ ID NO: 23175 - DNA, 20 bp, synthetic construct
  source 1..20: mol_type = other DNA
gttgatagtaatccagccat

SEQ ID NO: 23176 - DNA, 20 bp, synthetic construct
  source 1..20: mol_type = other DNA
attactatcaactatctgct

SEQ ID NO: 23177 - DNA, 20 bp, synthetic construct
  source 1..20: mol_type = other DNA
caagagacacccgtttacct

SEQ ID NO: 23178 - DNA, 20 bp, synthetic construct
  source 1..20: mol_type = other DNA
gttgatagtttccaataccc

SEQ ID NO: 23179 - DNA, 20 bp, synthetic construct
  source 1..20: mol_type = other DNA
caggatcattactggccaag

SEQ ID NO: 23180 - DNA, 20 bp, synthetic construct
  source 1..20: mol_type = other DNA
tagcttcttgtgctatggga

SEQ ID NO: 23181 - DNA, 20 bp, synthetic construct
  source 1..20: mol_type = other DNA
aaattgcagagcattatctg

SEQ ID NO: 23182 - DNA, 20 bp, synthetic construct
  source 1..20: mol_type = other DNA
caagtttatacatctataag

SEQ ID NO: 23183 - DNA, 20 bp, synthetic construct
  source 1..20: mol_type = other DNA
gcaatttcgcctctatggca

SEQ ID NO: 23184 - DNA, 20 bp, synthetic construct
  source 1..20: mol_type = other DNA
gcagaaaaggagaatgacac

SEQ ID NO: 23185 - DNA, 20 bp, synthetic construct
  source 1..20: mol_type = other DNA
tgatagctttgcttgctgtg

SEQ ID NO: 23186 - DNA, 20 bp, synthetic construct
  source 1..20: mol_type = other DNA
cttgtgtagaggctccccca

SEQ ID NO: 23187 - DNA, 20 bp, synthetic construct
  source 1..20: mol_type = other DNA
cagtaatgatcctggcaccc

SEQ ID NO: 23188 - DNA, 20 bp, synthetic construct
  source 1..20: mol_type = other DNA
cccaagcgggcagtacgcga

SEQ ID NO: 23189 - DNA, 20 bp, synthetic construct
  source 1..20: mol_type = other DNA
tgagtctgccaggttacgga

SEQ ID NO: 23190 - DNA, 20 bp, synthetic construct
  source 1..20: mol_type = other DNA
tgatggcctcacgacatagg

SEQ ID NO: 23191 - DNA, 20 bp, synthetic construct
  source 1..20: mol_type = other DNA
agccgattgctgtacggaag

SEQ ID NO: 23192 - DNA, 20 bp, synthetic construct
  source 1..20: mol_type = other DNA
acagaatgcgcagtgcacgt

SEQ ID NO: 23193 - DNA, 20 bp, synthetic construct
  source 1..20: mol_type = other DNA
acaagggcagccacaatacg

SEQ ID NO: 23194 - DNA, 20 bp, synthetic construct
  source 1..20: mol_type = other DNA
ccaggcccctgacccaagtg

SEQ ID NO: 23195 - DNA, 20 bp, synthetic construct
  source 1..20: mol_type = other DNA
tgtgctgagcagctaagtct

SEQ ID NO: 23196 - DNA, 20 bp, synthetic construct
  source 1..20: mol_type = other DNA
tctgtaggcactgcgagtcc

SEQ ID NO: 23197 - DNA, 20 bp, synthetic construct
  source 1..20: mol_type = other DNA
cttcgtgcgcagctatggcg

SEQ ID NO: 23198 - DNA, 20 bp, synthetic construct
  source 1..20: mol_type = other DNA
gcctcggctgagttccagga

SEQ ID NO: 23199 - DNA, 20 bp, synthetic construct
  source 1..20: mol_type = other DNA
accgaacggcccgtgccctg

SEQ ID NO: 23200 - DNA, 20 bp, synthetic construct
  source 1..20: mol_type = other DNA
ggggcggagcacttacccaa

SEQ ID NO: 23201 - DNA, 20 bp, synthetic construct
  source 1..20: mol_type = other DNA
aggtcgtggctgatctccga

SEQ ID NO: 23202 - DNA, 20 bp, synthetic construct
  source 1..20: mol_type = other DNA
tccccaaggctcctcgatgg

SEQ ID NO: 23203 - DNA, 20 bp, synthetic construct
  source 1..20: mol_type = other DNA
cattagggggacttacaaag

SEQ ID NO: 23204 - DNA, 20 bp, synthetic construct
  source 1..20: mol_type = other DNA
ggcatggaagggctgaagcg

SEQ ID NO: 23205 - DNA, 20 bp, synthetic construct
  source 1..20: mol_type = other DNA
aggaggtacaggttcactcc

SEQ ID NO: 23206 - DNA, 20 bp, synthetic construct
  source 1..20: mol_type = other DNA
aagctgctctccgaggttcg

SEQ ID NO: 23207 - DNA, 20 bp, synthetic construct
  source 1..20: mol_type = other DNA
accagcttgaaccaggagca

SEQ ID NO: 23208 - DNA, 20 bp, synthetic construct
  source 1..20: mol_type = other DNA
tggacctccgcgatctgcag

SEQ ID NO: 23209 - DNA, 20 bp, synthetic construct
  source 1..20: mol_type = other DNA
accagccctcactcacagag

SEQ ID NO: 23210 - DNA, 20 bp, synthetic construct
  source 1..20: mol_type = other DNA
ggagcaagggaagcagcaac

SEQ ID NO: 23211 - DNA, 20 bp, synthetic construct
  source 1..20: mol_type = other DNA
ccagggccgctggaccaaca

SEQ ID NO: 23212 - DNA, 20 bp, synthetic construct
  source 1..20: mol_type = other DNA
tggaaggtcagggaaacatc

SEQ ID NO: 23213 - DNA, 20 bp, synthetic construct
  source 1..20: mol_type = other DNA
cagtcagcctgcatctcgcc

SEQ ID NO: 23214 - DNA, 20 bp, synthetic construct
  source 1..20: mol_type = other DNA
agctcctgcaggctcagctg

SEQ ID NO: 23215 - DNA, 20 bp, synthetic construct
  source 1..20: mol_type = other DNA
ctggtgtctggggattccca

SEQ ID NO: 23216 - DNA, 20 bp, synthetic construct
  source 1..20: mol_type = other DNA
cgggctctacctggaagcgg

SEQ ID NO: 23217 - DNA, 20 bp, synthetic construct
  source 1..20: mol_type = other DNA
gcgccaggcctggaaggtca

SEQ ID NO: 23218 - DNA, 20 bp, synthetic construct
  source 1..20: mol_type = other DNA
tgggttggatccctggcaag

SEQ ID NO: 23219 - DNA, 20 bp, synthetic construct
  source 1..20: mol_type = other DNA
tgcaggatcacgttagccaa

SEQ ID NO: 23220 - DNA, 20 bp, synthetic construct
  source 1..20: mol_type = other DNA
aaggacaatcagaagattgg

SEQ ID NO: 23221 - DNA, 20 bp, synthetic construct
  source 1..20: mol_type = other DNA
ttgaaatcaggccaagcgct

SEQ ID NO: 23222 - DNA, 20 bp, synthetic construct
  source 1..20: mol_type = other DNA
gatggatgcttgctgattgt

SEQ ID NO: 23223 - DNA, 20 bp, synthetic construct
  source 1..20: mol_type = other DNA
cagttatataaaaactactg

SEQ ID NO: 23224 - DNA, 20 bp, synthetic construct
  source 1..20: mol_type = other DNA
tacggatccccactagctgt

SEQ ID NO: 23225 - DNA, 20 bp, synthetic construct
  source 1..20: mol_type = other DNA
agtcctgtacatagaatggc

SEQ ID NO: 23226 - DNA, 20 bp, synthetic construct
  source 1..20: mol_type = other DNA
agacctgtcacaatcttcag

SEQ ID NO: 23227 - DNA, 20 bp, synthetic construct
  source 1..20: mol_type = other DNA
gttgagttctatggactgga

SEQ ID NO: 23228 - DNA, 20 bp, synthetic construct
  source 1..20: mol_type = other DNA
gcagagcagcatatatgaaa

SEQ ID NO: 23229 - DNA, 20 bp, synthetic construct
  source 1..20: mol_type = other DNA
tcatatatgctgctctgcag

SEQ ID NO: 23230 - DNA, 20 bp, synthetic construct
  source 1..20: mol_type = other DNA
gggtctcatcagactgccac

SEQ ID NO: 23231 - DNA, 20 bp, synthetic construct
  source 1..20: mol_type = other DNA
cttacctacaacaatgccat

SEQ ID NO: 23232 - DNA, 20 bp, synthetic construct
  source 1..20: mol_type = other DNA
tcatgcttaggtcttggatg

SEQ ID NO: 23233 - DNA, 20 bp, synthetic construct
  source 1..20: mol_type = other DNA
gaggtctcatgatacgttgg

SEQ ID NO: 23234 - DNA, 20 bp, synthetic construct
  source 1..20: mol_type = other DNA
aacaccttatggtatgacaa

SEQ ID NO: 23235 - DNA, 20 bp, synthetic construct
  source 1..20: mol_type = other DNA
caggactgcgcacaatgccc

SEQ ID NO: 23236 - DNA, 20 bp, synthetic construct
  source 1..20: mol_type = other DNA
tgtcattgagaaacatgcgc

SEQ ID NO: 23237 - DNA, 20 bp, synthetic construct
  source 1..20: mol_type = other DNA
gcagtcctgaacatgtgaat

SEQ ID NO: 23238 - DNA, 20 bp, synthetic construct
  source 1..20: mol_type = other DNA
gaaggccaagacacacctcg

SEQ ID NO: 23239 - DNA, 20 bp, synthetic construct
  source 1..20: mol_type = other DNA
agaagcattgacccgatgga

SEQ ID NO: 23240 - DNA, 20 bp, synthetic construct
  source 1..20: mol_type = other DNA
aaaagaacattagagaatgc

SEQ ID NO: 23241 - DNA, 20 bp, synthetic construct
  source 1..20: mol_type = other DNA
attaatccattctctagagg

SEQ ID NO: 23242 - DNA, 20 bp, synthetic construct
  source 1..20: mol_type = other DNA
tggcagagatcttacaaggc

SEQ ID NO: 23243 - DNA, 20 bp, synthetic construct
  source 1..20: mol_type = other DNA
agaaactggcagagagcttg

SEQ ID NO: 23244 - DNA, 20 bp, synthetic construct
  source 1..20: mol_type = other DNA
aatggggaggcctgctacca

SEQ ID NO: 23245 - DNA, 20 bp, synthetic construct
  source 1..20: mol_type = other DNA
aataaactccagaaagtcgc

SEQ ID NO: 23246 - DNA, 20 bp, synthetic construct
  source 1..20: mol_type = other DNA
ttccctcacggaaagcatga

SEQ ID NO: 23247 - DNA, 20 bp, synthetic construct
  source 1..20: mol_type = other DNA
ggcacgagaacctccaaaag

SEQ ID NO: 23248 - DNA, 20 bp, synthetic construct
  source 1..20: mol_type = other DNA
gctattagacaggtactgcc

SEQ ID NO: 23249 - DNA, 20 bp, synthetic construct
  source 1..20: mol_type = other DNA
actccgtcatgtagagcaca

SEQ ID NO: 23250 - DNA, 20 bp, synthetic construct
  source 1..20: mol_type = other DNA
accatctaccggcctgacga

SEQ ID NO: 23251 - DNA, 20 bp, synthetic construct
  source 1..20: mol_type = other DNA
ggcagactcgccgaagacag

SEQ ID NO: 23252 - DNA, 20 bp, synthetic construct
  source 1..20: mol_type = other DNA
agatgtttgctgctcgaggg

SEQ ID NO: 23253 - DNA, 20 bp, synthetic construct
  source 1..20: mol_type = other DNA
tcccaggttactacagtgca

SEQ ID NO: 23254 - DNA, 20 bp, synthetic construct
  source 1..20: mol_type = other DNA
ggacctgtaccgaatcctga

SEQ ID NO: 23255 - DNA, 20 bp, synthetic construct
  source 1..20: mol_type = other DNA
ggctggagttgagacatcga

SEQ ID NO: 23256 - DNA, 20 bp, synthetic construct
  source 1..20: mol_type = other DNA
caagtaactcagcgtgtccg

SEQ ID NO: 23257 - DNA, 20 bp, synthetic construct
  source 1..20: mol_type = other DNA
ccgtggacgtggctcggcag

SEQ ID NO: 23258 - DNA, 20 bp, synthetic construct
  source 1..20: mol_type = other DNA
gctgtcacggcgattccaga

SEQ ID NO: 23259 - DNA, 20 bp, synthetic construct
  source 1..20: mol_type = other DNA
gcatcaggacaagtgacagg

SEQ ID NO: 23260 - DNA, 20 bp, synthetic construct
  source 1..20: mol_type = other DNA
gaacttctggagcagaaccc

SEQ ID NO: 23261 - DNA, 20 bp, synthetic construct
  source 1..20: mol_type = other DNA
caggtggcgatgcgccagcg

SEQ ID NO: 23262 - DNA, 20 bp, synthetic construct
  source 1..20: mol_type = other DNA
atcatccgccaaggactcca

SEQ ID NO: 23263 - DNA, 20 bp, synthetic construct
  source 1..20: mol_type = other DNA
cttctcggctgagatgaccg

SEQ ID NO: 23264 - DNA, 20 bp, synthetic construct
  source 1..20: mol_type = other DNA
cagtgccacccccaaaactg

SEQ ID NO: 23265 - DNA, 20 bp, synthetic construct
  source 1..20: mol_type = other DNA
accacggccgtggagacctg

SEQ ID NO: 23266 - DNA, 20 bp, synthetic construct
  source 1..20: mol_type = other DNA
cccgtgcacagatccgcctg

SEQ ID NO: 23267 - DNA, 20 bp, synthetic construct
  source 1..20: mol_type = other DNA
gtcgacgatctccttgccga

SEQ ID NO: 23268 - DNA, 20 bp, synthetic construct
  source 1..20: mol_type = other DNA
ggcctccctgcgatttgacg

SEQ ID NO: 23269 - DNA, 20 bp, synthetic construct
  source 1..20: mol_type = other DNA
gatctgtgcacgggactgca

SEQ ID NO: 23270 - DNA, 20 bp, synthetic construct
  source 1..20: mol_type = other DNA
gaactgtactgcctggaaca

SEQ ID NO: 23271 - DNA, 20 bp, synthetic construct
  source 1..20: mol_type = other DNA
gatcaccgggaaggaagatg

SEQ ID NO: 23272 - DNA, 20 bp, synthetic construct
  source 1..20: mol_type = other DNA
ctaccacgagcagctgtccg

SEQ ID NO: 23273 - DNA, 20 bp, synthetic construct
  source 1..20: mol_type = other DNA
ggagatcgtcgacctggtcc

SEQ ID NO: 23274 - DNA, 20 bp, synthetic construct
  source 1..20: mol_type = other DNA
aagtgcgcacaggaacctat

SEQ ID NO: 23275 - DNA, 20 bp, synthetic construct
  source 1..20: mol_type = other DNA
cctgaccacccacacgaccc

SEQ ID NO: 23276 - DNA, 20 bp, synthetic construct
  source 1..20: mol_type = other DNA
acgtgggacgctcgatgtcc

SEQ ID NO: 23277 - DNA, 20 bp, synthetic construct
  source 1..20: mol_type = other DNA
gcggccaataattacgccag

SEQ ID NO: 23278 - DNA, 20 bp, synthetic construct
  source 1..20: mol_type = other DNA
ggccgcccgggaagtcaaca

SEQ ID NO: 23279 - DNA, 20 bp, synthetic construct
  source 1..20: mol_type = other DNA
acactggaacatatcaagac

SEQ ID NO: 23280 - DNA, 20 bp, synthetic construct
  source 1..20: mol_type = other DNA
gatggatcccattccagtcg

SEQ ID NO: 23281 - DNA, 20 bp, synthetic construct
  source 1..20: mol_type = other DNA
ggacatcgtgtaccgcacca

SEQ ID NO: 23282 - DNA, 20 bp, synthetic construct
  source 1..20: mol_type = other DNA
ggtcttgatatgttccagtg

SEQ ID NO: 23283 - DNA, 20 bp, synthetic construct
  source 1..20: mol_type = other DNA
gacaaatgcaatgaaaactg

SEQ ID NO: 23284 - DNA, 20 bp, synthetic construct
  source 1..20: mol_type = other DNA
ctcctgaggaacatgcaggt

SEQ ID NO: 23285 - DNA, 20 bp, synthetic construct
  source 1..20: mol_type = other DNA
agaccggttaacaaagctac

SEQ ID NO: 23286 - DNA, 20 bp, synthetic construct
  source 1..20: mol_type = other DNA
catcgggcaggagacagtgc

SEQ ID NO: 23287 - DNA, 20 bp, synthetic construct
  source 1..20: mol_type = other DNA
cgacgccgtgttgacttccc

SEQ ID NO: 23288 - DNA, 20 bp, synthetic construct
  source 1..20: mol_type = other DNA
gcactgtctcctgcccgatg

SEQ ID NO: 23289 - DNA, 20 bp, synthetic construct
  source 1..20: mol_type = other DNA
caggagctggaagatctcca

SEQ ID NO: 23290 - DNA, 20 bp, synthetic construct
  source 1..20: mol_type = other DNA
tggagatcttccagctcctg

SEQ ID NO: 23291 - DNA, 20 bp, synthetic construct
  source 1..20: mol_type = other DNA
tcctgaagagaactgaaagt

SEQ ID NO: 23292 - DNA, 20 bp, synthetic construct
  source 1..20: mol_type = other DNA
cgggcggcctgctgagcctg

SEQ ID NO: 23293 - DNA, 20 bp, synthetic construct
  source 1..20: mol_type = other DNA
acacacgccatgaacctgtg

SEQ ID NO: 23294 - DNA, 20 bp, synthetic construct
  source 1..20: mol_type = other DNA
gccgcatggacgcatcacac

SEQ ID NO: 23295 - DNA, 20 bp, synthetic construct
  source 1..20: mol_type = other DNA
tggattacgcggccaatctg

SEQ ID NO: 23296 - DNA, 20 bp, synthetic construct
  source 1..20: mol_type = other DNA
gctgggctgataagtaccac

SEQ ID NO: 23297 - DNA, 20 bp, synthetic construct
  source 1..20: mol_type = other DNA
agccttggcaactggaaacg

SEQ ID NO: 23298 - DNA, 20 bp, synthetic construct
  source 1..20: mol_type = other DNA
ggaccatgtccaaatccacc

SEQ ID NO: 23299 - DNA, 20 bp, synthetic construct
  source 1..20: mol_type = other DNA
tgaagaagtctccgtcaatg

SEQ ID NO: 23300 - DNA, 20 bp, synthetic construct
  source 1..20: mol_type = other DNA
tccagtggacggattgacgg

SEQ ID NO: 23301 - DNA, 20 bp, synthetic construct
  source 1..20: mol_type = other DNA
gcctggccgatctgatcgag

SEQ ID NO: 23302 - DNA, 20 bp, synthetic construct
  source 1..20: mol_type = other DNA
acaatgttgaccacaccagg

SEQ ID NO: 23303 - DNA, 20 bp, synthetic construct
  source 1..20: mol_type = other DNA
ttccacggcccaatccactg

SEQ ID NO: 23304 - DNA, 20 bp, synthetic construct
  source 1..20: mol_type = other DNA
ggccgccattgcctcccatg

SEQ ID NO: 23305 - DNA, 20 bp, synthetic construct
  source 1..20: mol_type = other DNA
tcccgctcctgatgcaagca

SEQ ID NO: 23306 - DNA, 20 bp, synthetic construct
  source 1..20: mol_type = other DNA
ctgaggactcaccgccaggt

SEQ ID NO: 23307 - DNA, 20 bp, synthetic construct
  source 1..20: mol_type = other DNA
gctccaaggtcactctcttg

SEQ ID NO: 23308 - DNA, 20 bp, synthetic construct
  source 1..20: mol_type = other DNA
acacgagccagtacaagggt

SEQ ID NO: 23309 - DNA, 20 bp, synthetic construct
  source 1..20: mol_type = other DNA
gataacaagactgttgccca

SEQ ID NO: 23310 - DNA, 20 bp, synthetic construct
  source 1..20: mol_type = other DNA
ctcatcgctagggtaaacca

SEQ ID NO: 23311 - DNA, 20 bp, synthetic construct
  source 1..20: mol_type = other DNA
ttgtgcagtaccagtagaca

SEQ ID NO: 23312 - DNA, 20 bp, synthetic construct
  source 1..20: mol_type = other DNA
ccagaccttcatgtgcaagg

SEQ ID NO: 23313 - DNA, 20 bp, synthetic construct
  source 1..20: mol_type = other DNA
caaaaggaacatgtcggtca

SEQ ID NO: 23314 - DNA, 20 bp, synthetic construct
  source 1..20: mol_type = other DNA
gcagcaagccatgaccacga

SEQ ID NO: 23315 - DNA, 20 bp, synthetic construct
  source 1..20: mol_type = other DNA
cttatacagccaaatcaagg

SEQ ID NO: 23316 - DNA, 20 bp, synthetic construct
  source 1..20: mol_type = other DNA
agcagctgccaatacccaga

SEQ ID NO: 23317 - DNA, 20 bp, synthetic construct
  source 1..20: mol_type = other DNA
catgagagcacatacttgga

SEQ ID NO: 23318 - DNA, 20 bp, synthetic construct
  source 1..20: mol_type = other DNA
gctgatcatgtgcatcagcg

SEQ ID NO: 23319 - DNA, 20 bp, synthetic construct
  source 1..20: mol_type = other DNA
tgaaggtctggaacttccac

SEQ ID NO: 23320 - DNA, 20 bp, synthetic construct
  source 1..20: mol_type = other DNA
gtactggctcgtgttcatcg

SEQ ID NO: 23321 - DNA, 20 bp, synthetic construct
  source 1..20: mol_type = other DNA
agggaagagtgacaagaaag

SEQ ID NO: 23322 - DNA, 20 bp, synthetic construct
  source 1..20: mol_type = other DNA
caggtacattgccattgccc

SEQ ID NO: 23323 - DNA, 20 bp, synthetic construct
  source 1..20: mol_type = other DNA
ctggagccgaaacggtaccc

SEQ ID NO: 23324 - DNA, 20 bp, synthetic construct
  source 1..20: mol_type = other DNA
tgcggttgtaagttgctcgg

SEQ ID NO: 23325 - DNA, 20 bp, synthetic construct
  source 1..20: mol_type = other DNA
ggaaccaacaggaaatgatg

SEQ ID NO: 23326 - DNA, 20 bp, synthetic construct
  source 1..20: mol_type = other DNA
gcgccggcgcccgcaaaaag

SEQ ID NO: 23327 - DNA, 20 bp, synthetic construct
  source 1..20: mol_type = other DNA
cattggattcaactatccct

SEQ ID NO: 23328 - DNA, 20 bp, synthetic construct
  source 1..20: mol_type = other DNA
aaatgggcggactgttgaag

SEQ ID NO: 23329 - DNA, 20 bp, synthetic construct
  source 1..20: mol_type = other DNA
ggaggagcccgccccgcaag

SEQ ID NO: 23330 - DNA, 20 bp, synthetic construct
  source 1..20: mol_type = other DNA
tatatcgatgatgaatggtc

SEQ ID NO: 23331 - DNA, 20 bp, synthetic construct
  source 1..20: mol_type = other DNA
tctgcctggagtcaagacac

SEQ ID NO: 23332 - DNA, 20 bp, synthetic construct
  source 1..20: mol_type = other DNA
gaaaacctcactgtcaatgg

SEQ ID NO: 23333 - DNA, 20 bp, synthetic construct
  source 1..20: mol_type = other DNA
gcgggcgccggcgcaagccg

SEQ ID NO: 23334 - DNA, 20 bp, synthetic construct
  source 1..20: mol_type = other DNA
tggtgggcactggcgcgctc

SEQ ID NO: 23335 - DNA, 20 bp, synthetic construct
  source 1..20: mol_type = other DNA
atcccactgataatcagaag

SEQ ID NO: 23336 - DNA, 20 bp, synthetic construct
  source 1..20: mol_type = other DNA
ctcacctgcactgatctgtg

SEQ ID NO: 23337 - DNA, 20 bp, synthetic construct
  source 1..20: mol_type = other DNA
accgagctgggcctcgacct

SEQ ID NO: 23338 - DNA, 20 bp, synthetic construct
  source 1..20: mol_type = other DNA
gagctccgcacctggatcga

SEQ ID NO: 23339 - DNA, 20 bp, synthetic construct
  source 1..20: mol_type = other DNA
tgactgcctacggcacgaga

SEQ ID NO: 23340 - DNA, 20 bp, synthetic construct
  source 1..20: mol_type = other DNA
tcacccaggccaagactaag

SEQ ID NO: 23341 - DNA, 20 bp, synthetic construct
  source 1..20: mol_type = other DNA
tgtctcttctcgccctggcg

SEQ ID NO: 23342 - DNA, 20 bp, synthetic construct
  source 1..20: mol_type = other DNA
tggcctcgaacaggtccaca

SEQ ID NO: 23343 - DNA, 20 bp, synthetic construct
  source 1..20: mol_type = other DNA
ggagcggttgatcttgggga

SEQ ID NO: 23344 - DNA, 20 bp, synthetic construct
  source 1..20: mol_type = other DNA
tgagagtgggaacatgacgc

SEQ ID NO: 23345 - DNA, 20 bp, synthetic construct
  source 1..20: mol_type = other DNA
tgcgtcatcgggctgcaggt

SEQ ID NO: 23346 - DNA, 20 bp, synthetic construct
  source 1..20: mol_type = other DNA
tgtcggccgaggtcaagaac

SEQ ID NO: 23347 - DNA, 20 bp, synthetic construct
  source 1..20: mol_type = other DNA
cagtcgggcatgactgccta

SEQ ID NO: 23348 - DNA, 20 bp, synthetic construct
  source 1..20: mol_type = other DNA
gaaccatatcctgcccccca

SEQ ID NO: 23349 - DNA, 20 bp, synthetic construct
  source 1..20: mol_type = other DNA
ctccatgcagaactggcacc

SEQ ID NO: 23350 - DNA, 20 bp, synthetic construct
  source 1..20: mol_type = other DNA
tttcgacgatgccaccatga

SEQ ID NO: 23351 - DNA, 20 bp, synthetic construct
  source 1..20: mol_type = other DNA
ggtgccagttctgcatggag

SEQ ID NO: 23352 - DNA, 20 bp, synthetic construct
  source 1..20: mol_type = other DNA
gttcatgccgtagctgacca

SEQ ID NO: 23353 - DNA, 20 bp, synthetic construct
  source 1..20: mol_type = other DNA
gctgttccaaaacatcaccc

SEQ ID NO: 23354 - DNA, 20 bp, synthetic construct
  source 1..20: mol_type = other DNA
ttcaatagtgaactggacag

SEQ ID NO: 23355 - DNA, 20 bp, synthetic construct
  source 1..20: mol_type = other DNA
gttatataaccagcaatgag

SEQ ID NO: 23356 - DNA, 20 bp, synthetic construct
  source 1..20: mol_type = other DNA
cattcaagcaaatatcccag

SEQ ID NO: 23357 - DNA, 20 bp, synthetic construct
  source 1..20: mol_type = other DNA
ggaacagcagggatccattg

SEQ ID NO: 23358 - DNA, 20 bp, synthetic construct
  source 1..20: mol_type = other DNA
cgtcgctggcatcgtgactg

SEQ ID NO: 23359 - DNA, 20 bp, synthetic construct
  source 1..20: mol_type = other DNA
ggaatcactcacggtgtacg

SEQ ID NO: 23360 - DNA, 20 bp, synthetic construct
  source 1..20: mol_type = other DNA
tctgcagaaaacaacgtccc

SEQ ID NO: 23361 - DNA, 20 bp, synthetic construct
  source 1..20: mol_type = other DNA
caagcctattattggcacaa

SEQ ID NO: 23362 - DNA, 20 bp, synthetic construct
  source 1..20: mol_type = other DNA
atttatggttcgtagggtgt

SEQ ID NO: 23363 - DNA, 20 bp, synthetic construct
  source 1..20: mol_type = other DNA
tggcaggggctcctgatcac

SEQ ID NO: 23364 - DNA, 20 bp, synthetic construct
  source 1..20: mol_type = other DNA
cccagtcacgatgccagcga

SEQ ID NO: 23365 - DNA, 20 bp, synthetic construct
  source 1..20: mol_type = other DNA
acgtcccaggccttcctgtg

SEQ ID NO: 23366 - DNA, 20 bp, synthetic construct
  source 1..20: mol_type = other DNA
tttccctctgcagcactgga

SEQ ID NO: 23367 - DNA, 20 bp, synthetic construct
  source 1..20: mol_type = other DNA
aacatcaccctggaggacgc

SEQ ID NO: 23368 - DNA, 20 bp, synthetic construct
  source 1..20: mol_type = other DNA
gaactcagaacagtagaggt

SEQ ID NO: 23369 - DNA, 20 bp, synthetic construct
  source 1..20: mol_type = other DNA
gagggaagaatcgatagcag

SEQ ID NO: 23370 - DNA, 20 bp, synthetic construct
  source 1..20: mol_type = other DNA
cttccctctcaataagacct

SEQ ID NO: 23371 - DNA, 20 bp, synthetic construct
  source 1..20: mol_type = other DNA
acagacatcagtatcagtcc

SEQ ID NO: 23372 - DNA, 20 bp, synthetic construct
  source 1..20: mol_type = other DNA
tcagcccaggtcttattgag

SEQ ID NO: 23373 - DNA, 20 bp, synthetic construct
  source 1..20: mol_type = other DNA
ttgaactccatccagaacag

SEQ ID NO: 23374 - DNA, 20 bp, synthetic construct
  source 1..20: mol_type = other DNA
aggccttcatgatcacagac

SEQ ID NO: 23375 - DNA, 20 bp, synthetic construct
  source 1..20: mol_type = other DNA
ccggcatcccagctgacgtc

SEQ ID NO: 23376 - DNA, 20 bp, synthetic construct
  source 1..20: mol_type = other DNA
gtggaaaggcctgtgcagag

SEQ ID NO: 23377 - DNA, 20 bp, synthetic construct
  source 1..20: mol_type = other DNA
cgggaacacagctgttcacg

SEQ ID NO: 23378 - DNA, 20 bp, synthetic construct
  source 1..20: mol_type = other DNA
ccaagctggcctccatccac

SEQ ID NO: 23379 - DNA, 20 bp, synthetic construct
  source 1..20: mol_type = other DNA
gtagaggtcggcctcagccc

SEQ ID NO: 23380 - DNA, 20 bp, synthetic construct
  source 1..20: mol_type = other DNA
ctactgttctgagttctctg

SEQ ID NO: 23381 - DNA, 20 bp, synthetic construct
  source 1..20: mol_type = other DNA
tcacctgtctgtgatcatga

SEQ ID NO: 23382 - DNA, 20 bp, synthetic construct
  source 1..20: mol_type = other DNA
cagaacagggggcacaggga

SEQ ID NO: 23383 - DNA, 20 bp, synthetic construct
  source 1..20: mol_type = other DNA
taggactgcataaccgcacc

SEQ ID NO: 23384 - DNA, 20 bp, synthetic construct
  source 1..20: mol_type = other DNA
gagtacatctacgtcagggg

SEQ ID NO: 23385 - DNA, 20 bp, synthetic construct
  source 1..20: mol_type = other DNA
gacagacaagagctcgagtg

SEQ ID NO: 23386 - DNA, 20 bp, synthetic construct
  source 1..20: mol_type = other DNA
cccacaagtgccttcagatg

SEQ ID NO: 23387 - DNA, 20 bp, synthetic construct
  source 1..20: mol_type = other DNA
gccctgatgtaattgtagtg

SEQ ID NO: 23388 - DNA, 20 bp, synthetic construct
  source 1..20: mol_type = other DNA
atttcccgacactacaggtg

SEQ ID NO: 23389 - DNA, 20 bp, synthetic construct
  source 1..20: mol_type = other DNA
aaatgggacctatgatgtgc

SEQ ID NO: 23390 - DNA, 20 bp, synthetic construct
  source 1..20: mol_type = other DNA
ctctagacaaaatggtacag

SEQ ID NO: 23391 - DNA, 20 bp, synthetic construct
  source 1..20: mol_type = other DNA
cagaagcaagagtgcacagt

SEQ ID NO: 23392 - DNA, 20 bp, synthetic construct
  source 1..20: mol_type = other DNA
tgtatgacggactcccccgc

SEQ ID NO: 23393 - DNA, 20 bp, synthetic construct
  source 1..20: mol_type = other DNA
agtgcttaatcagatctgtg

SEQ ID NO: 23394 - DNA, 20 bp, synthetic construct
  source 1..20: mol_type = other DNA
atgaccgtcctcttcgccgt

SEQ ID NO: 23395 - DNA, 20 bp, synthetic construct
  source 1..20: mol_type = other DNA
tccctcctttccgcatgatg

SEQ ID NO: 23396 - DNA, 20 bp, synthetic construct
  source 1..20: mol_type = other DNA
atcacctgcaaggatcggat

SEQ ID NO: 23397 - DNA, 20 bp, synthetic construct
  source 1..20: mol_type = other DNA
gacaagataacagtcaaagc

SEQ ID NO: 23398 - DNA, 20 bp, synthetic construct
  source 1..20: mol_type = other DNA
atctcgatgaggtcactcgg

SEQ ID NO: 23399 - DNA, 20 bp, synthetic construct
  source 1..20: mol_type = other DNA
cagcggccgttgcagaacag

SEQ ID NO: 23400 - DNA, 20 bp, synthetic construct
  source 1..20: mol_type = other DNA
aaggcacagtggaaagaacc

SEQ ID NO: 23401 - DNA, 20 bp, synthetic construct
  source 1..20: mol_type = other DNA
tcaccacctggatctcgatg

SEQ ID NO: 23402 - DNA, 20 bp, synthetic construct
  source 1..20: mol_type = other DNA
gtcatcaggcaccaggacct

SEQ ID NO: 23403 - DNA, 20 bp, synthetic construct
  source 1..20: mol_type = other DNA
gcactacagcttgcacacgg

SEQ ID NO: 23404 - DNA, 20 bp, synthetic construct
  source 1..20: mol_type = other DNA
gcaagctgtagtgcgcgcgc

SEQ ID NO: 23405 - DNA, 20 bp, synthetic construct
  source 1..20: mol_type = other DNA
tcggaggcctccggacacag

SEQ ID NO: 23406 - DNA, 20 bp, synthetic construct
  source 1..20: mol_type = other DNA
cgaacatggccacttggctg

SEQ ID NO: 23407 - DNA, 20 bp, synthetic construct
  source 1..20: mol_type = other DNA
gagctgctgttccacgaaca

SEQ ID NO: 23408 - DNA, 20 bp, synthetic construct
  source 1..20: mol_type = other DNA
ggtctcgcatgtctgaggag

SEQ ID NO: 23409 - DNA, 20 bp, synthetic construct
  source 1..20: mol_type = other DNA
cagctcggaaaccagccgga

SEQ ID NO: 23410 - DNA, 20 bp, synthetic construct
  source 1..20: mol_type = other DNA
gaaggtgacggacaccacgc

SEQ ID NO: 23411 - DNA, 20 bp, synthetic construct
  source 1..20: mol_type = other DNA
gccaaggccttgaaggcgcg

SEQ ID NO: 23412 - DNA, 20 bp, synthetic construct
  source 1..20: mol_type = other DNA
tggagccgggcacctctcgg

SEQ ID NO: 23413 - DNA, 20 bp, synthetic construct
  source 1..20: mol_type = other DNA
cctgagcgtggaacgctatg

SEQ ID NO: 23414 - DNA, 20 bp, synthetic construct
  source 1..20: mol_type = other DNA
gtagttggtaggcgtgcgca

SEQ ID NO: 23415 - DNA, 20 bp, synthetic construct
  source 1..20: mol_type = other DNA
caggtagagcacgctcatga

SEQ ID NO: 23416 - DNA, 20 bp, synthetic construct
  source 1..20: mol_type = other DNA
ggacttgaacctgactgacg

SEQ ID NO: 23417 - DNA, 20 bp, synthetic construct
  source 1..20: mol_type = other DNA
accatgttgtagagggcccg

SEQ ID NO: 23418 - DNA, 20 bp, synthetic construct
  source 1..20: mol_type = other DNA
ccctggagctctatgagatg

SEQ ID NO: 23419 - DNA, 20 bp, synthetic construct
  source 1..20: mol_type = other DNA
gcagtcgcagcccaatgagc

SEQ ID NO: 23420 - DNA, 20 bp, synthetic construct
  source 1..20: mol_type = other DNA
atgaacagctctgtctgctg

SEQ ID NO: 23421 - DNA, 20 bp, synthetic construct
  source 1..20: mol_type = other DNA
ggcagtgacgttgagcactg

SEQ ID NO: 23422 - DNA, 20 bp, synthetic construct
  source 1..20: mol_type = other DNA
aggaaccccatggcttgcaa

SEQ ID NO: 23423 - DNA, 20 bp, synthetic construct
  source 1..20: mol_type = other DNA
cccagacggccccaagcact

SEQ ID NO: 23424 - DNA, 20 bp, synthetic construct
  source 1..20: mol_type = other DNA
cacgaagatcagcaggtatg

SEQ ID NO: 23425 - DNA, 20 bp, synthetic construct
  source 1..20: mol_type = other DNA
gccaccaacgcccagcagga

SEQ ID NO: 23426 - DNA, 20 bp, synthetic construct
  source 1..20: mol_type = other DNA
cacatgggcccgcgtcacca

SEQ ID NO: 23427 - DNA, 20 bp, synthetic construct
  source 1..20: mol_type = other DNA
gtggcgcaggatgaccagac

SEQ ID NO: 23428 - DNA, 20 bp, synthetic construct
  source 1..20: mol_type = other DNA
ttcctagaccaaagtacctg

SEQ ID NO: 23429 - DNA, 20 bp, synthetic construct
  source 1..20: mol_type = other DNA
tggtggtatggtaccaaatg

SEQ ID NO: 23430 - DNA, 20 bp, synthetic construct
  source 1..20: mol_type = other DNA
gagagtgttcagcaagacta

SEQ ID NO: 23431 - DNA, 20 bp, synthetic construct
  source 1..20: mol_type = other DNA
aatacctgaaactgaactct

SEQ ID NO: 23432 - DNA, 20 bp, synthetic construct
  source 1..20: mol_type = other DNA
gagcagcaaaatctcactgc

SEQ ID NO: 23433 - DNA, 20 bp, synthetic construct
  source 1..20: mol_type = other DNA
aaaagaaggtcatcctgaag

SEQ ID NO: 23434 - DNA, 20 bp, synthetic construct
  source 1..20: mol_type = other DNA
gaccccagcgctggcaaatg

SEQ ID NO: 23435 - DNA, 20 bp, synthetic construct
  source 1..20: mol_type = other DNA
tgggactccattctgttgca

SEQ ID NO: 23436 - DNA, 20 bp, synthetic construct
  source 1..20: mol_type = other DNA
gagtcccagccacccaggag

SEQ ID NO: 23437 - DNA, 20 bp, synthetic construct
  source 1..20: mol_type = other DNA
tggtggagccccagtgcagg

SEQ ID NO: 23438 - DNA, 20 bp, synthetic construct
  source 1..20: mol_type = other DNA
gggccttctcaaagaaaaga

SEQ ID NO: 23439 - DNA, 20 bp, synthetic construct
  source 1..20: mol_type = other DNA
ccctgcctccccctgcactg

SEQ ID NO: 23440 - DNA, 20 bp, synthetic construct
  source 1..20: mol_type = other DNA
atgtcttccttgcaggacag

SEQ ID NO: 23441 - DNA, 20 bp, synthetic construct
  source 1..20: mol_type = other DNA
gcaggacagaggtcagatca

SEQ ID NO: 23442 - DNA, 20 bp, synthetic construct
  source 1..20: mol_type = other DNA
agcgctggggtcttcagctg

SEQ ID NO: 23443 - DNA, 20 bp, synthetic construct
  source 1..20: mol_type = other DNA
agttagatcaagcagaaacc

SEQ ID NO: 23444 - DNA, 20 bp, synthetic construct
  source 1..20: mol_type = other DNA
agtccggctggctctacaag

SEQ ID NO: 23445 - DNA, 20 bp, synthetic construct
  source 1..20: mol_type = other DNA
tccaggagcatgccgtacag

SEQ ID NO: 23446 - DNA, 20 bp, synthetic construct
  source 1..20: mol_type = other DNA
ttatagttcccagtggcatg

SEQ ID NO: 23447 - DNA, 20 bp, synthetic construct
  source 1..20: mol_type = other DNA
gatgatctaagcaccaatgg

SEQ ID NO: 23448 - DNA, 20 bp, synthetic construct
  source 1..20: mol_type = other DNA
tctggaagtcccttgatgtg

SEQ ID NO: 23449 - DNA, 20 bp, synthetic construct
  source 1..20: mol_type = other DNA
tcttaccttaaggtcaccgg

SEQ ID NO: 23450 - DNA, 20 bp, synthetic construct
  source 1..20: mol_type = other DNA
gtgacaagagacctgatgtc

SEQ ID NO: 23451 - DNA, 20 bp, synthetic construct
  source 1..20: mol_type = other DNA
taagaacccagactccaaca

SEQ ID NO: 23452 - DNA, 20 bp, synthetic construct
  source 1..20: mol_type = other DNA
aacttgtgaatgcacgccag

SEQ ID NO: 23453 - DNA, 20 bp, synthetic construct
  source 1..20: mol_type = other DNA
tcatgttgaaaggcttgaca

SEQ ID NO: 23454 - DNA, 20 bp, synthetic construct
  source 1..20: mol_type = other DNA
tgaaagcttaaataattagg

SEQ ID NO: 23455 - DNA, 20 bp, synthetic construct
  source 1..20: mol_type = other DNA
ttctgcaaatcagtcctgag

SEQ ID NO: 23456 - DNA, 20 bp, synthetic construct
  source 1..20: mol_type = other DNA
gctgggagctctctgccagt

SEQ ID NO: 23457 - DNA, 20 bp, synthetic construct
  source 1..20: mol_type = other DNA
gattgacacaaataaaatcc

SEQ ID NO: 23458 - DNA, 20 bp, synthetic construct
  source 1..20: mol_type = other DNA
accgttactgcgctatcgtg

SEQ ID NO: 23459 - DNA, 20 bp, synthetic construct
  source 1..20: mol_type = other DNA
cggcggccgatcttctcccg

SEQ ID NO: 23460 - DNA, 20 bp, synthetic construct
  source 1..20: mol_type = other DNA
gggaacctgagcgacgcaag

SEQ ID NO: 23461 - DNA, 20 bp, synthetic construct
  source 1..20: mol_type = other DNA
gcctgtcggacgtgcgcgtg

SEQ ID NO: 23462 - DNA, 20 bp, synthetic construct
  source 1..20: mol_type = other DNA
ggcgcaccgtcttgcagatg

SEQ ID NO: 23463 - DNA, 20 bp, synthetic construct
  source 1..20: mol_type = other DNA
tgcgccgccgcgagttcccg

SEQ ID NO: 23464 - DNA, 20 bp, synthetic construct
  source 1..20: mol_type = other DNA
catcgtgtccacgctcagcg

SEQ ID NO: 23465 - DNA, 20 bp, synthetic construct
  source 1..20: mol_type = other DNA
gtctagccttggcaactgcg

SEQ ID NO: 23466 - DNA, 20 bp, synthetic construct
  source 1..20: mol_type = other DNA
agttgccaaggctagacagc

SEQ ID NO: 23467 - DNA, 20 bp, synthetic construct
  source 1..20: mol_type = other DNA
gcagctccgtgcgacagcag

SEQ ID NO: 23468 - DNA, 20 bp, synthetic construct
  source 1..20: mol_type = other DNA
aggtccggtagaggcagccg

SEQ ID NO: 23469 - DNA, 20 bp, synthetic construct
  source 1..20: mol_type = other DNA
tggacctcttcactccgccc

SEQ ID NO: 23470 - DNA, 20 bp, synthetic construct
  source 1..20: mol_type = other DNA
gcgccgtgagcagatccgat

SEQ ID NO: 23471 - DNA, 20 bp, synthetic construct
  source 1..20: mol_type = other DNA
tagggacagcgacaggatga

SEQ ID NO: 23472 - DNA, 20 bp, synthetic construct
  source 1..20: mol_type = other DNA
gaagcgcagcacgcgcgcgt

SEQ ID NO: 23473 - DNA, 20 bp, synthetic construct
  source 1..20: mol_type = other DNA
ctttgactgactgtaaccag

SEQ ID NO: 23474 - DNA, 20 bp, synthetic construct
  source 1..20: mol_type = other DNA
gtccagttccatgcgccagg

SEQ ID NO: 23475 - DNA, 20 bp, synthetic construct
  source 1..20: mol_type = other DNA
caggagcctccacagaatcc

SEQ ID NO: 23476 - DNA, 20 bp, synthetic construct
  source 1..20: mol_type = other DNA
tctggatataaataaactca

SEQ ID NO: 23477 - DNA, 20 bp, synthetic construct
  source 1..20: mol_type = other DNA
tatgcacaatgtctgctatg

SEQ ID NO: 23478 - DNA, 20 bp, synthetic construct
  source 1..20: mol_type = other DNA
tctgatgtcgacatcccaag

SEQ ID NO: 23479 - DNA, 20 bp, synthetic construct
  source 1..20: mol_type = other DNA
tgttacctgttatacggcac

SEQ ID NO: 23480 - DNA, 20 bp, synthetic construct
  source 1..20: mol_type = other DNA
ccaacaggacccgctcagtg

SEQ ID NO: 23481 - DNA, 20 bp, synthetic construct
  source 1..20: mol_type = other DNA
ccaggatgagttctaagcac

SEQ ID NO: 23482 - DNA, 20 bp, synthetic construct
  source 1..20: mol_type = other DNA
tgggtaagggtccttacaga

SEQ ID NO: 23483 - DNA, 20 bp, synthetic construct
  source 1..20: mol_type = other DNA
tctgtgttgcaggtcccatt

SEQ ID NO: 23484 - DNA, 20 bp, synthetic construct
  source 1..20: mol_type = other DNA
tatgtgacaggggctcacaa

SEQ ID NO: 23485 - DNA, 20 bp, synthetic construct
  source 1..20: mol_type = other DNA
acaggagaagatggcatatg

SEQ ID NO: 23486 - DNA, 20 bp, synthetic construct
  source 1..20: mol_type = other DNA
aatgatgggcagtaccacaa

SEQ ID NO: 23487 - DNA, 20 bp, synthetic construct
  source 1..20: mol_type = other DNA
tggacacctagtggctctga

SEQ ID NO: 23488 - DNA, 20 bp, synthetic construct
  source 1..20: mol_type = other DNA
actcaccgacacatagaccg

SEQ ID NO: 23489 - DNA, 20 bp, synthetic construct
  source 1..20: mol_type = other DNA
tggcacacaggccgaacacg

SEQ ID NO: 23490 - DNA, 20 bp, synthetic construct
  source 1..20: mol_type = other DNA
gaagggagtgtggtaacccg

SEQ ID NO: 23491 - DNA, 20 bp, synthetic construct
  source 1..20: mol_type = other DNA
agagagtgcggtcatagcac

SEQ ID NO: 23492 - DNA, 20 bp, synthetic construct
  source 1..20: mol_type = other DNA
agccggcatacacgtccaca

SEQ ID NO: 23493 - DNA, 20 bp, synthetic construct
  source 1..20: mol_type = other DNA
tctgctgataaaccgagtcg

SEQ ID NO: 23494 - DNA, 20 bp, synthetic construct
  source 1..20: mol_type = other DNA
ccgacaggcctgccacgcgg

SEQ ID NO: 23495 - DNA, 20 bp, synthetic construct
  source 1..20: mol_type = other DNA
cgtgagcccgcatacgcccg

SEQ ID NO: 23496 - DNA, 20 bp, synthetic construct
  source 1..20: mol_type = other DNA
gcggagggcagcatcaacgc

SEQ ID NO: 23497 - DNA, 20 bp, synthetic construct
  source 1..20: mol_type = other DNA
gcggcacgtggatggtcatg

SEQ ID NO: 23498 - DNA, 20 bp, synthetic construct
  source 1..20: mol_type = other DNA
ccttcctgcggcgtacggtg

SEQ ID NO: 23499 - DNA, 20 bp, synthetic construct
  source 1..20: mol_type = other DNA
tccctgttggcagatcatgg

SEQ ID NO: 23500 - DNA, 20 bp, synthetic construct
  source 1..20: mol_type = other DNA
tcctcgttggtctccacgta

SEQ ID NO: 23501 - DNA, 20 bp, synthetic construct
  source 1..20: mol_type = other DNA
cagcgatgcccgccccgatg

SEQ ID NO: 23502 - DNA, 20 bp, synthetic construct
  source 1..20: mol_type = other DNA
tgcacggtggggtagagcga

SEQ ID NO: 23503 - DNA, 20 bp, synthetic construct
  source 1..20: mol_type = other DNA
aaagcgcacgaactccactc

SEQ ID NO: 23504 - DNA, 20 bp, synthetic construct
  source 1..20: mol_type = other DNA
tcatgggcctcaaacaggtg

SEQ ID NO: 23505 - DNA, 20 bp, synthetic construct
  source 1..20: mol_type = other DNA
cgagaaggatgctaaagatg

SEQ ID NO: 23506 - DNA, 20 bp, synthetic construct
  source 1..20: mol_type = other DNA
gctgcccaacaaatagaagc

SEQ ID NO: 23507 - DNA, 20 bp, synthetic construct
  source 1..20: mol_type = other DNA
tactgggagcccatacccaa

SEQ ID NO: 23508 - DNA, 20 bp, synthetic construct
  source 1..20: mol_type = other DNA
gcccgagcctcccacaacac

SEQ ID NO: 23509 - DNA, 20 bp, synthetic construct
  source 1..20: mol_type = other DNA
tgacatggagcacaaagcag

SEQ ID NO: 23510 - DNA, 20 bp, synthetic construct
  source 1..20: mol_type = other DNA
cagtaccgcatcaccagctg

SEQ ID NO: 23511 - DNA, 20 bp, synthetic construct
  source 1..20: mol_type = other DNA
tccctccaagaagtggccga

SEQ ID NO: 23512 - DNA, 20 bp, synthetic construct
  source 1..20: mol_type = other DNA
aaagcagaggagcggcaccc

SEQ ID NO: 23513 - DNA, 20 bp, synthetic construct
  source 1..20: mol_type = other DNA
ctgaaggaccccaaagtacc

SEQ ID NO: 23514 - DNA, 20 bp, synthetic construct
  source 1..20: mol_type = other DNA
tcacccggaccaccagactc

SEQ ID NO: 23515 - DNA, 20 bp, synthetic construct
  source 1..20: mol_type = other DNA
gccaaaggccaggatgaaag

SEQ ID NO: 23516 - DNA, 20 bp, synthetic construct
  source 1..20: mol_type = other DNA
gcctcatacctgcaaggcca

SEQ ID NO: 23517 - DNA, 20 bp, synthetic construct
  source 1..20: mol_type = other DNA
gggcagccagccatccctgg

SEQ ID NO: 23518 - DNA, 20 bp, synthetic construct
  source 1..20: mol_type = other DNA
gcagggacgaatacgtgagg

SEQ ID NO: 23519 - DNA, 20 bp, synthetic construct
  source 1..20: mol_type = other DNA
gcggcacaggacgtcactgg

SEQ ID NO: 23520 - DNA, 20 bp, synthetic construct
  source 1..20: mol_type = other DNA
ccaacgagacccatcagctg

SEQ ID NO: 23521 - DNA, 20 bp, synthetic construct
  source 1..20: mol_type = other DNA
aggaagtcgtcctgctacgg

SEQ ID NO: 23522 - DNA, 20 bp, synthetic construct
  source 1..20: mol_type = other DNA
agcagcgcgtccactaggga

SEQ ID NO: 23523 - DNA, 20 bp, synthetic construct
  source 1..20: mol_type = other DNA
gagagaagtcctgaccaggt

SEQ ID NO: 23524 - DNA, 20 bp, synthetic construct
  source 1..20: mol_type = other DNA
gcagcgctacaacgccagca

SEQ ID NO: 23525 - DNA, 20 bp, synthetic construct
  source 1..20: mol_type = other DNA
ggcgcggaggcgagcgatga

SEQ ID NO: 23526 - DNA, 20 bp, synthetic construct
  source 1..20: mol_type = other DNA
tgtaccacgaggccggacag

SEQ ID NO: 23527 - DNA, 20 bp, synthetic construct
  source 1..20: mol_type = other DNA
gcatgcacaaaggaatgtgg

SEQ ID NO: 23528 - DNA, 20 bp, synthetic construct
  source 1..20: mol_type = other DNA
gcaacttctcaataacactc

SEQ ID NO: 23529 - DNA, 20 bp, synthetic construct
  source 1..20: mol_type = other DNA
acggaggagcatggcagaag

SEQ ID NO: 23530 - DNA, 20 bp, synthetic construct
  source 1..20: mol_type = other DNA
cccacgagcccgagctgatg

SEQ ID NO: 23531 - DNA, 20 bp, synthetic construct
  source 1..20: mol_type = other DNA
gccccaacacgagcgagaga

SEQ ID NO: 23532 - DNA, 20 bp, synthetic construct
  source 1..20: mol_type = other DNA
atgctgacacatgtgggcgg

SEQ ID NO: 23533 - DNA, 20 bp, synthetic construct
  source 1..20: mol_type = other DNA
atatgctgttctacctactg

SEQ ID NO: 23534 - DNA, 20 bp, synthetic construct
  source 1..20: mol_type = other DNA
catgcaaacattcccacagt

SEQ ID NO: 23535 - DNA, 20 bp, synthetic construct
  source 1..20: mol_type = other DNA
tatgctgttctacctactgt

SEQ ID NO: 23536 - DNA, 20 bp, synthetic construct
  source 1..20: mol_type = other DNA
gaggataccgtgacaagaag

SEQ ID NO: 23537 - DNA, 20 bp, synthetic construct
  source 1..20: mol_type = other DNA
tgcatgagcatcctgtgagt

SEQ ID NO: 23538 - DNA, 20 bp, synthetic construct
  source 1..20: mol_type = other DNA
tctgcatcctcttcttgtca

SEQ ID NO: 23539 - DNA, 20 bp, synthetic construct
  source 1..20: mol_type = other DNA
gcagcagcacacagagaacc

SEQ ID NO: 23540 - DNA, 20 bp, synthetic construct
  source 1..20: mol_type = other DNA
agcacacagagaaccaggac

SEQ ID NO: 23541 - DNA, 20 bp, synthetic construct
  source 1..20: mol_type = other DNA
acaagaagaggatgcagagt

SEQ ID NO: 23542 - DNA, 20 bp, synthetic construct
  source 1..20: mol_type = other DNA
caggacaggcagcagagtct

SEQ ID NO: 23543 - DNA, 20 bp, synthetic construct
  source 1..20: mol_type = other DNA
aggacaggcagcagagtctg

SEQ ID NO: 23544 - DNA, 20 bp, synthetic construct
  source 1..20: mol_type = other DNA
cagcccactctcccactcac

SEQ ID NO: 23545 - DNA, 20 bp, synthetic construct
  source 1..20: mol_type = other DNA
cttgtcacggtatcctccct

SEQ ID NO: 23546 - DNA, 20 bp, synthetic construct
  source 1..20: mol_type = other DNA
ccagactctgctgcctgtcc

SEQ ID NO: 23547 - DNA, 20 bp, synthetic construct
  source 1..20: mol_type = other DNA
tgtgctgctgctgcaggccc

SEQ ID NO: 23548 - DNA, 20 bp, synthetic construct
  source 1..20: mol_type = other DNA
tgaagccataaagaaagccc

SEQ ID NO: 23549 - DNA, 20 bp, synthetic construct
  source 1..20: mol_type = other DNA
ctgttcagttcatgccgtgg

SEQ ID NO: 23550 - DNA, 20 bp, synthetic construct
  source 1..20: mol_type = other DNA
aaagaaagcccaggagtcag

SEQ ID NO: 23551 - DNA, 20 bp, synthetic construct
  source 1..20: mol_type = other DNA
ggaggaagtggtgaaggagg

SEQ ID NO: 23552 - DNA, 20 bp, synthetic construct
  source 1..20: mol_type = other DNA
ggaggtggtgggacatgcca

SEQ ID NO: 23553 - DNA, 20 bp, synthetic construct
  source 1..20: mol_type = other DNA
tgccgtggaggaagtggtga

SEQ ID NO: 23554 - DNA, 20 bp, synthetic construct
  source 1..20: mol_type = other DNA
actttctgctgcatgggtga

SEQ ID NO: 23555 - DNA, 20 bp, synthetic construct
  source 1..20: mol_type = other DNA
gtcctcactggctccctcgg

SEQ ID NO: 23556 - DNA, 20 bp, synthetic construct
  source 1..20: mol_type = other DNA
cgcaccgagaaggccaccga

SEQ ID NO: 23557 - DNA, 20 bp, synthetic construct
  source 1..20: mol_type = other DNA
ccgcaccgagaaggccaccg

SEQ ID NO: 23558 - DNA, 20 bp, synthetic construct
  source 1..20: mol_type = other DNA
acacgatgctgggaggcctg

SEQ ID NO: 23559 - DNA, 20 bp, synthetic construct
  source 1..20: mol_type = other DNA
cctcggtggccttctcggtg

SEQ ID NO: 23560 - DNA, 20 bp, synthetic construct
  source 1..20: mol_type = other DNA
gcagaaagtctggacaaact

SEQ ID NO: 23561 - DNA, 20 bp, synthetic construct
  source 1..20: mol_type = other DNA
gtccagactttctgctgcat

SEQ ID NO: 23562 - DNA, 20 bp, synthetic construct
  source 1..20: mol_type = other DNA
taaagaaagcccaggagtca

SEQ ID NO: 23563 - DNA, 20 bp, synthetic construct
  source 1..20: mol_type = other DNA
cagacgccaggtacgagctg

SEQ ID NO: 23564 - DNA, 20 bp, synthetic construct
  source 1..20: mol_type = other DNA
gttggtagggacggaactcg

SEQ ID NO: 23565 - DNA, 20 bp, synthetic construct
  source 1..20: mol_type = other DNA
tggtgcggatgcggaggtgt

SEQ ID NO: 23566 - DNA, 20 bp, synthetic construct
  source 1..20: mol_type = other DNA
gcgtctgctgaccttcgtgc

SEQ ID NO: 23567 - DNA, 20 bp, synthetic construct
  source 1..20: mol_type = other DNA
cacgaaggtcagcagacgcc

SEQ ID NO: 23568 - DNA, 20 bp, synthetic construct
  source 1..20: mol_type = other DNA
ttcaactcctatctccactc

SEQ ID NO: 23569 - DNA, 20 bp, synthetic construct
  source 1..20: mol_type = other DNA
gcggatgcggaggtgttggt

SEQ ID NO: 23570 - DNA, 20 bp, synthetic construct
  source 1..20: mol_type = other DNA
ctccgtccgcagctcgtacc

SEQ ID NO: 23571 - DNA, 20 bp, synthetic construct
  source 1..20: mol_type = other DNA
gcggtggcccgagtggagat

SEQ ID NO: 23572 - DNA, 20 bp, synthetic construct
  source 1..20: mol_type = other DNA
gctgccaaaggaggccacgg

SEQ ID NO: 23573 - DNA, 20 bp, synthetic construct
  source 1..20: mol_type = other DNA
aaggtgcagagggccacgct

SEQ ID NO: 23574 - DNA, 20 bp, synthetic construct
  source 1..20: mol_type = other DNA
cctctgaggcccctgacccg

SEQ ID NO: 23575 - DNA, 20 bp, synthetic construct
  source 1..20: mol_type = other DNA
cgagtggagataggagttga

SEQ ID NO: 23576 - DNA, 20 bp, synthetic construct
  source 1..20: mol_type = other DNA
ttggccagcgctgccaaagg

SEQ ID NO: 23577 - DNA, 20 bp, synthetic construct
  source 1..20: mol_type = other DNA
actcacctcctgctcctccg

SEQ ID NO: 23578 - DNA, 20 bp, synthetic construct
  source 1..20: mol_type = other DNA
gctgaacttcacctgaatcg

SEQ ID NO: 23579 - DNA, 20 bp, synthetic construct
  source 1..20: mol_type = other DNA
cagaagacgaaggatagtgg

SEQ ID NO: 23580 - DNA, 20 bp, synthetic construct
  source 1..20: mol_type = other DNA
tggtatgacgaagggtacag

SEQ ID NO: 23581 - DNA, 20 bp, synthetic construct
  source 1..20: mol_type = other DNA
agacccaaaatggtaaccaa

SEQ ID NO: 23582 - DNA, 20 bp, synthetic construct
  source 1..20: mol_type = other DNA
aaatcaatcaggagcaacac

SEQ ID NO: 23583 - DNA, 20 bp, synthetic construct
  source 1..20: mol_type = other DNA
gataaggtcaaccactctga

SEQ ID NO: 23584 - DNA, 20 bp, synthetic construct
  source 1..20: mol_type = other DNA
atgtggagattcaagcaccg

SEQ ID NO: 23585 - DNA, 20 bp, synthetic construct
  source 1..20: mol_type = other DNA
aaacccctgaaggtatatgg

SEQ ID NO: 23586 - DNA, 20 bp, synthetic construct
  source 1..20: mol_type = other DNA
aagtgctcggcctaatctgg

SEQ ID NO: 23587 - DNA, 20 bp, synthetic construct
  source 1..20: mol_type = other DNA
acaagcgtgcgattcactgc

SEQ ID NO: 23588 - DNA, 20 bp, synthetic construct
  source 1..20: mol_type = other DNA
gactcccagcatgctcacgc

SEQ ID NO: 23589 - DNA, 20 bp, synthetic construct
  source 1..20: mol_type = other DNA
gggatactgcatccaacctg

SEQ ID NO: 23590 - DNA, 20 bp, synthetic construct
  source 1..20: mol_type = other DNA
tccatctccgtaaaccagtg

SEQ ID NO: 23591 - DNA, 20 bp, synthetic construct
  source 1..20: mol_type = other DNA
agaggatggagtccaactga

SEQ ID NO: 23592 - DNA, 20 bp, synthetic construct
  source 1..20: mol_type = other DNA
tcagagaactgtggtctgca

SEQ ID NO: 23593 - DNA, 20 bp, synthetic construct
  source 1..20: mol_type = other DNA
aacagggagtactagaggag

SEQ ID NO: 23594 - DNA, 20 bp, synthetic construct
  source 1..20: mol_type = other DNA
gtggggagaagctcagtcag

SEQ ID NO: 23595 - DNA, 20 bp, synthetic construct
  source 1..20: mol_type = other DNA
caaacagggagtactagagg

SEQ ID NO: 23596 - DNA, 20 bp, synthetic construct
  source 1..20: mol_type = other DNA
gaggaggggcccttgaacac

SEQ ID NO: 23597 - DNA, 20 bp, synthetic construct
  source 1..20: mol_type = other DNA
aaacagggagtactagagga

SEQ ID NO: 23598 - DNA, 20 bp, synthetic construct
  source 1..20: mol_type = other DNA
tcagtggcagaacacaaaca

SEQ ID NO: 23599 - DNA, 20 bp, synthetic construct
  source 1..20: mol_type = other DNA
acacaaacagggagtactag

SEQ ID NO: 23600 - DNA, 20 bp, synthetic construct
  source 1..20: mol_type = other DNA
ggtgaggcttgttggggatt

SEQ ID NO: 23601 - DNA, 20 bp, synthetic construct
  source 1..20: mol_type = other DNA
tgggtcaggccagtgttcaa

SEQ ID NO: 23602 - DNA, 20 bp, synthetic construct
  source 1..20: mol_type = other DNA
tcatctgtaggcttcacctg

SEQ ID NO: 23603 - DNA, 20 bp, synthetic construct
  source 1..20: mol_type = other DNA
ctgactgagcttctccccac

SEQ ID NO: 23604 - DNA, 20 bp, synthetic construct
  source 1..20: mol_type = other DNA
atctgtaggcttcacctgtg

SEQ ID NO: 23605 - DNA, 20 bp, synthetic construct
  source 1..20: mol_type = other DNA
ttgggtcaggccagtgttca

SEQ ID NO: 23606 - DNA, 20 bp, synthetic construct
  source 1..20: mol_type = other DNA
ggcttgttggggattgggtc

SEQ ID NO: 23607 - DNA, 20 bp, synthetic construct
  source 1..20: mol_type = other DNA
cctggaggtgaggcttgttg

SEQ ID NO: 23608 - DNA, 20 bp, synthetic construct
  source 1..20: mol_type = other DNA
ggaaggctgctacctgcaca

SEQ ID NO: 23609 - DNA, 20 bp, synthetic construct
  source 1..20: mol_type = other DNA
gcccaggtagttgacgacaa

SEQ ID NO: 23610 - DNA, 20 bp, synthetic construct
  source 1..20: mol_type = other DNA
gggctgccacagatacgcag

SEQ ID NO: 23611 - DNA, 20 bp, synthetic construct
  source 1..20: mol_type = other DNA
gacatttcgcaggataaagg

SEQ ID NO: 23612 - DNA, 20 bp, synthetic construct
  source 1..20: mol_type = other DNA
ggggcacggcctctccacga

SEQ ID NO: 23613 - DNA, 20 bp, synthetic construct
  source 1..20: mol_type = other DNA
cctcacaccatccgatgaag

SEQ ID NO: 23614 - DNA, 20 bp, synthetic construct
  source 1..20: mol_type = other DNA
agaggaagaggcacttgcgc

SEQ ID NO: 23615 - DNA, 20 bp, synthetic construct
  source 1..20: mol_type = other DNA
tggcccaggcgacgatgatg

SEQ ID NO: 23616 - DNA, 20 bp, synthetic construct
  source 1..20: mol_type = other DNA
tggaccagatcggaacgtgc

SEQ ID NO: 23617 - DNA, 20 bp, synthetic construct
  source 1..20: mol_type = other DNA
gcacgttccgatctggtcca

SEQ ID NO: 23618 - DNA, 20 bp, synthetic construct
  source 1..20: mol_type = other DNA
ctcatagtagagcttgccga

SEQ ID NO: 23619 - DNA, 20 bp, synthetic construct
  source 1..20: mol_type = other DNA
ggaagggcagactcaccgca

SEQ ID NO: 23620 - DNA, 20 bp, synthetic construct
  source 1..20: mol_type = other DNA
ggtcgtgttgcagtaggagt

SEQ ID NO: 23621 - DNA, 20 bp, synthetic construct
  source 1..20: mol_type = other DNA
tgacgccgttgaagtactcg

SEQ ID NO: 23622 - DNA, 20 bp, synthetic construct
  source 1..20: mol_type = other DNA
gcgcaggcgctcagtggagt

SEQ ID NO: 23623 - DNA, 20 bp, synthetic construct
  source 1..20: mol_type = other DNA
tgctcgggacacgaacatgg

SEQ ID NO: 23624 - DNA, 20 bp, synthetic construct
  source 1..20: mol_type = other DNA
ggctcaccccagcaccacgt

SEQ ID NO: 23625 - DNA, 20 bp, synthetic construct
  source 1..20: mol_type = other DNA
acacccgactcgctgacctg

SEQ ID NO: 23626 - DNA, 20 bp, synthetic construct
  source 1..20: mol_type = other DNA
atacacggccggagcaacga

SEQ ID NO: 23627 - DNA, 20 bp, synthetic construct
  source 1..20: mol_type = other DNA
gtagtggttggacgggacga

SEQ ID NO: 23628 - DNA, 20 bp, synthetic construct
  source 1..20: mol_type = other DNA
ctacaaccccgacaacccca

SEQ ID NO: 23629 - DNA, 20 bp, synthetic construct
  source 1..20: mol_type = other DNA
cagctacccggagaacggcg

SEQ ID NO: 23630 - DNA, 20 bp, synthetic construct
  source 1..20: mol_type = other DNA
caggaagcgcgagaccagga

SEQ ID NO: 23631 - DNA, 20 bp, synthetic construct
  source 1..20: mol_type = other DNA
ccgtgtatgccagccacgtg

SEQ ID NO: 23632 - DNA, 20 bp, synthetic construct
  source 1..20: mol_type = other DNA
gcggacctcgtagtcgaaga

SEQ ID NO: 23633 - DNA, 20 bp, synthetic construct
  source 1..20: mol_type = other DNA
tcagacaagtcctccaccca

SEQ ID NO: 23634 - DNA, 20 bp, synthetic construct
  source 1..20: mol_type = other DNA
gcggggcttctggtacgacg

SEQ ID NO: 23635 - DNA, 20 bp, synthetic construct
  source 1..20: mol_type = other DNA
gcagcagccggagtcggtgt

SEQ ID NO: 23636 - DNA, 20 bp, synthetic construct
  source 1..20: mol_type = other DNA
caggtcctgccacttgatga

SEQ ID NO: 23637 - DNA, 20 bp, synthetic construct
  source 1..20: mol_type = other DNA
tcatggggttgtcaaccatg

SEQ ID NO: 23638 - DNA, 20 bp, synthetic construct
  source 1..20: mol_type = other DNA
ggcagtgacgccgagtcgtg

SEQ ID NO: 23639 - DNA, 20 bp, synthetic construct
  source 1..20: mol_type = other DNA
gcggcacgcgtggaaccccg

SEQ ID NO: 23640 - DNA, 20 bp, synthetic construct
  source 1..20: mol_type = other DNA
tggccacaccaactacagcg

SEQ ID NO: 23641 - DNA, 20 bp, synthetic construct
  source 1..20: mol_type = other DNA
gtgtagcccacggagtgcag

SEQ ID NO: 23642 - DNA, 20 bp, synthetic construct
  source 1..20: mol_type = other DNA
gtgggctacacggcgctggt

SEQ ID NO: 23643 - DNA, 20 bp, synthetic construct
  source 1..20: mol_type = other DNA
cagagcaccgacggcatccg

SEQ ID NO: 23644 - DNA, 20 bp, synthetic construct
  source 1..20: mol_type = other DNA
tgcacagccagccccgccgc

SEQ ID NO: 23645 - DNA, 20 bp, synthetic construct
  source 1..20: mol_type = other DNA
cgcagccgcctctaccacga

SEQ ID NO: 23646 - DNA, 20 bp, synthetic construct
  source 1..20: mol_type = other DNA
cctgcactccgtgggctaca

SEQ ID NO: 23647 - DNA, 20 bp, synthetic construct
  source 1..20: mol_type = other DNA
gctgcccgactcgctgctcg

SEQ ID NO: 23648 - DNA, 20 bp, synthetic construct
  source 1..20: mol_type = other DNA
cagcgagtcgggcagcgcaa

SEQ ID NO: 23649 - DNA, 20 bp, synthetic construct
  source 1..20: mol_type = other DNA
ggcaaggtgggccacgcccg

SEQ ID NO: 23650 - DNA, 20 bp, synthetic construct
  source 1..20: mol_type = other DNA
acgaccggctcaccttccac

SEQ ID NO: 23651 - DNA, 20 bp, synthetic construct
  source 1..20: mol_type = other DNA
tggcctacccggcctttctg

SEQ ID NO: 23652 - DNA, 20 bp, synthetic construct
  source 1..20: mol_type = other DNA
cccgtggcccagagcaccga

SEQ ID NO: 23653 - DNA, 20 bp, synthetic construct
  source 1..20: mol_type = other DNA
tccaatccctgcgacgcccg

SEQ ID NO: 23654 - DNA, 20 bp, synthetic construct
  source 1..20: mol_type = other DNA
gtgcggagcatgtacccgag

SEQ ID NO: 23655 - DNA, 20 bp, synthetic construct
  source 1..20: mol_type = other DNA
agagcccgttgaatttggcg

SEQ ID NO: 23656 - DNA, 20 bp, synthetic construct
  source 1..20: mol_type = other DNA
acgagcgtcattctcacacg

SEQ ID NO: 23657 - DNA, 20 bp, synthetic construct
  source 1..20: mol_type = other DNA
tgtgcactgtgagatcaacg

SEQ ID NO: 23658 - DNA, 20 bp, synthetic construct
  source 1..20: mol_type = other DNA
gggcacgtcgcagtaaaggc

SEQ ID NO: 23659 - DNA, 20 bp, synthetic construct
  source 1..20: mol_type = other DNA
tcgcacgcctcctcgatcag

SEQ ID NO: 23660 - DNA, 20 bp, synthetic construct
  source 1..20: mol_type = other DNA
tgcagtactggtcgtacagg

SEQ ID NO: 23661 - DNA, 20 bp, synthetic construct
  source 1..20: mol_type = other DNA
cctcggcggcacgcttgatg

SEQ ID NO: 23662 - DNA, 20 bp, synthetic construct
  source 1..20: mol_type = other DNA
cagtgcaacaaccacgcgtg

SEQ ID NO: 23663 - DNA, 20 bp, synthetic construct
  source 1..20: mol_type = other DNA
gtgcgtggccggctaccacg

SEQ ID NO: 23664 - DNA, 20 bp, synthetic construct
  source 1..20: mol_type = other DNA
ggcaagccctgcaagaatgg

SEQ ID NO: 23665 - DNA, 20 bp, synthetic construct
  source 1..20: mol_type = other DNA
ccacgttggtgtgcagcacg

SEQ ID NO: 23666 - DNA, 20 bp, synthetic construct
  source 1..20: mol_type = other DNA
agttgcactggctgtcacag

SEQ ID NO: 23667 - DNA, 20 bp, synthetic construct
  source 1..20: mol_type = other DNA
gtccccagaaccttgtgcac

SEQ ID NO: 23668 - DNA, 20 bp, synthetic construct
  source 1..20: mol_type = other DNA
gtaaagcgggaaccctctga

SEQ ID NO: 23669 - DNA, 20 bp, synthetic construct
  source 1..20: mol_type = other DNA
aggcactgagctgtaaggtg

SEQ ID NO: 23670 - DNA, 20 bp, synthetic construct
  source 1..20: mol_type = other DNA
atgcctggttcactgaaggt

SEQ ID NO: 23671 - DNA, 20 bp, synthetic construct
  source 1..20: mol_type = other DNA
ggcatggtgggggcaaccga

SEQ ID NO: 23672 - DNA, 20 bp, synthetic construct
  source 1..20: mol_type = other DNA
tcagtgaaccaggcatggtg

SEQ ID NO: 23673 - DNA, 20 bp, synthetic construct
  source 1..20: mol_type = other DNA
catcgagaccagcgccgcgt

SEQ ID NO: 23674 - DNA, 20 bp, synthetic construct
  source 1..20: mol_type = other DNA
gctggtctcgatgtctgtgc

SEQ ID NO: 23675 - DNA, 20 bp, synthetic construct
  source 1..20: mol_type = other DNA
ggccccatggctactaccca

SEQ ID NO: 23676 - DNA, 20 bp, synthetic construct
  source 1..20: mol_type = other DNA
gaaaaccgctctgccagctg

SEQ ID NO: 23677 - DNA, 20 bp, synthetic construct
  source 1..20: mol_type = other DNA
agcccagtgaggctgtaggg

SEQ ID NO: 23678 - DNA, 20 bp, synthetic construct
  source 1..20: mol_type = other DNA
gagctaaaccggcagctgcg

SEQ ID NO: 23679 - DNA, 20 bp, synthetic construct
  source 1..20: mol_type = other DNA
tcacccaccttcagtgaacc

SEQ ID NO: 23680 - DNA, 20 bp, synthetic construct
  source 1..20: mol_type = other DNA
accactcacctggacgtgct

SEQ ID NO: 23681 - DNA, 20 bp, synthetic construct
  source 1..20: mol_type = other DNA
gctgagtcctgaagaggcca

SEQ ID NO: 23682 - DNA, 20 bp, synthetic construct
  source 1..20: mol_type = other DNA
ctactacccagggagcccag

SEQ ID NO: 23683 - DNA, 20 bp, synthetic construct
  source 1..20: mol_type = other DNA
tgccagagcccgctcaacgc

SEQ ID NO: 23684 - DNA, 20 bp, synthetic construct
  source 1..20: mol_type = other DNA
gtggccaaggtagtaaacct

SEQ ID NO: 23685 - DNA, 20 bp, synthetic construct
  source 1..20: mol_type = other DNA
cagaacgggaccttgagcga

SEQ ID NO: 23686 - DNA, 20 bp, synthetic construct
  source 1..20: mol_type = other DNA
cattgctaagatgcgcatgg

SEQ ID NO: 23687 - DNA, 20 bp, synthetic construct
  source 1..20: mol_type = other DNA
ccgcgtccacgctgagcacg

SEQ ID NO: 23688 - DNA, 20 bp, synthetic construct
  source 1..20: mol_type = other DNA
gcagcgcaccgaagggccag

SEQ ID NO: 23689 - DNA, 20 bp, synthetic construct
  source 1..20: mol_type = other DNA
cacagtcagacagtagatgc

SEQ ID NO: 23690 - DNA, 20 bp, synthetic construct
  source 1..20: mol_type = other DNA
cacaggcagatagcccccac

SEQ ID NO: 23691 - DNA, 20 bp, synthetic construct
  source 1..20: mol_type = other DNA
caggtttactaccttggcca

SEQ ID NO: 23692 - DNA, 20 bp, synthetic construct
  source 1..20: mol_type = other DNA
gggccagtggcgcaacaacg

SEQ ID NO: 23693 - DNA, 20 bp, synthetic construct
  source 1..20: mol_type = other DNA
caatgatgagcacgtagcac

SEQ ID NO: 23694 - DNA, 20 bp, synthetic construct
  source 1..20: mol_type = other DNA
ggccaacagcgacggcacgg

SEQ ID NO: 23695 - DNA, 20 bp, synthetic construct
  source 1..20: mol_type = other DNA
tcaaggcggcccgctaccgc

SEQ ID NO: 23696 - DNA, 20 bp, synthetic construct
  source 1..20: mol_type = other DNA
cgtggtcttctctcgcaccg

SEQ ID NO: 23697 - DNA, 20 bp, synthetic construct
  source 1..20: mol_type = other DNA
gtagatgaaagagatcagga

SEQ ID NO: 23698 - DNA, 20 bp, synthetic construct
  source 1..20: mol_type = other DNA
gaggcaccgaaccatgacgt

SEQ ID NO: 23699 - DNA, 20 bp, synthetic construct
  source 1..20: mol_type = other DNA
catgtgatccgattacccac

SEQ ID NO: 23700 - DNA, 20 bp, synthetic construct
  source 1..20: mol_type = other DNA
tgtatgtcgacgatgcctcg

SEQ ID NO: 23701 - DNA, 20 bp, synthetic construct
  source 1..20: mol_type = other DNA
taccagtatatgctgaacgc

SEQ ID NO: 23702 - DNA, 20 bp, synthetic construct
  source 1..20: mol_type = other DNA
tgaggtaccacagaaacatg

SEQ ID NO: 23703 - DNA, 20 bp, synthetic construct
  source 1..20: mol_type = other DNA
catgccgctactttaaggag

SEQ ID NO: 23704 - DNA, 20 bp, synthetic construct
  source 1..20: mol_type = other DNA
gttgtaatgtgggtcgcaga

SEQ ID NO: 23705 - DNA, 20 bp, synthetic construct
  source 1..20: mol_type = other DNA
gcctcaacaccccactaggt

SEQ ID NO: 23706 - DNA, 20 bp, synthetic construct
  source 1..20: mol_type = other DNA
cacgcaggaaatgtacttgg

SEQ ID NO: 23707 - DNA, 20 bp, synthetic construct
  source 1..20: mol_type = other DNA
cccatcctcctgcatagacc

SEQ ID NO: 23708 - DNA, 20 bp, synthetic construct
  source 1..20: mol_type = other DNA
tcgaacacaatgtccactgg

SEQ ID NO: 23709 - DNA, 20 bp, synthetic construct
  source 1..20: mol_type = other DNA
gactatgatgacccaaaggt

SEQ ID NO: 23710 - DNA, 20 bp, synthetic construct
  source 1..20: mol_type = other DNA
gttccgcaccaagcggacaa

SEQ ID NO: 23711 - DNA, 20 bp, synthetic construct
  source 1..20: mol_type = other DNA
gcacgtggtgtactccagca

SEQ ID NO: 23712 - DNA, 20 bp, synthetic construct
  source 1..20: mol_type = other DNA
cggtggtggagaaccttcag

SEQ ID NO: 23713 - DNA, 20 bp, synthetic construct
  source 1..20: mol_type = other DNA
agataacaccattctcagtg

SEQ ID NO: 23714 - DNA, 20 bp, synthetic construct
  source 1..20: mol_type = other DNA
ggaggaagccagtgtccgtg

SEQ ID NO: 23715 - DNA, 20 bp, synthetic construct
  source 1..20: mol_type = other DNA
gtgttggactgacaacggcc

SEQ ID NO: 23716 - DNA, 20 bp, synthetic construct
  source 1..20: mol_type = other DNA
gtccgtgcggtacctcagca

SEQ ID NO: 23717 - DNA, 20 bp, synthetic construct
  source 1..20: mol_type = other DNA
gattatgtcccagtgtctgg

SEQ ID NO: 23718 - DNA, 20 bp, synthetic construct
  source 1..20: mol_type = other DNA
gtttctccagtgctgcatgg

SEQ ID NO: 23719 - DNA, 20 bp, synthetic construct
  source 1..20: mol_type = other DNA
cagcaaagcagtctacccag

SEQ ID NO: 23720 - DNA, 20 bp, synthetic construct
  source 1..20: mol_type = other DNA
cttctgtgacatgacctctg

SEQ ID NO: 23721 - DNA, 20 bp, synthetic construct
  source 1..20: mol_type = other DNA
accaccagaggatggagtac

SEQ ID NO: 23722 - DNA, 20 bp, synthetic construct
  source 1..20: mol_type = other DNA
tatccagtgaaatatggaga

SEQ ID NO: 23723 - DNA, 20 bp, synthetic construct
  source 1..20: mol_type = other DNA
aatatggagaaggaaagtgt

SEQ ID NO: 23724 - DNA, 20 bp, synthetic construct
  source 1..20: mol_type = other DNA
catgcgtgggaagtgcacgg

SEQ ID NO: 23725 - DNA, 20 bp, synthetic construct
  source 1..20: mol_type = other DNA
gtgcacgagaatgacatgcg

SEQ ID NO: 23726 - DNA, 20 bp, synthetic construct
  source 1..20: mol_type = other DNA
atctctgcccagaagctgca

SEQ ID NO: 23727 - DNA, 20 bp, synthetic construct
  source 1..20: mol_type = other DNA
aggtcatgtcacagaaggtc

SEQ ID NO: 23728 - DNA, 20 bp, synthetic construct
  source 1..20: mol_type = other DNA
gttgaagaggaagtgtgcat

SEQ ID NO: 23729 - DNA, 20 bp, synthetic construct
  source 1..20: mol_type = other DNA
acaccacttagcaagaagga

SEQ ID NO: 23730 - DNA, 20 bp, synthetic construct
  source 1..20: mol_type = other DNA
tcttcgtccaccaggcccgt

SEQ ID NO: 23731 - DNA, 20 bp, synthetic construct
  source 1..20: mol_type = other DNA
cgcgaggacctacctcaaag

SEQ ID NO: 23732 - DNA, 20 bp, synthetic construct
  source 1..20: mol_type = other DNA
ctctggctggtggcgcaccg

SEQ ID NO: 23733 - DNA, 20 bp, synthetic construct
  source 1..20: mol_type = other DNA
agcatctcatcaaagcctgg

SEQ ID NO: 23734 - DNA, 20 bp, synthetic construct
  source 1..20: mol_type = other DNA
tggacaggatccacttgacc

SEQ ID NO: 23735 - DNA, 20 bp, synthetic construct
  source 1..20: mol_type = other DNA
aggagggtatcaagtggcag

SEQ ID NO: 23736 - DNA, 20 bp, synthetic construct
  source 1..20: mol_type = other DNA
tacgcgcagttcttccctca

SEQ ID NO: 23737 - DNA, 20 bp, synthetic construct
  source 1..20: mol_type = other DNA
gagctgcagtctctctacag

SEQ ID NO: 23738 - DNA, 20 bp, synthetic construct
  source 1..20: mol_type = other DNA
cacggtgcgccaccagccag

SEQ ID NO: 23739 - DNA, 20 bp, synthetic construct
  source 1..20: mol_type = other DNA
ccgcatcaaaggcgttgaag

SEQ ID NO: 23740 - DNA, 20 bp, synthetic construct
  source 1..20: mol_type = other DNA
cagtccacgagaagctcaag

SEQ ID NO: 23741 - DNA, 20 bp, synthetic construct
  source 1..20: mol_type = other DNA
agatagcagcgacagtgagc

SEQ ID NO: 23742 - DNA, 20 bp, synthetic construct
  source 1..20: mol_type = other DNA
ggcctctccatcctgctgcg

SEQ ID NO: 23743 - DNA, 20 bp, synthetic construct
  source 1..20: mol_type = other DNA
caaatggtgcacccacgtcg

SEQ ID NO: 23744 - DNA, 20 bp, synthetic construct
  source 1..20: mol_type = other DNA
tcctaaaggggcctacaacg

SEQ ID NO: 23745 - DNA, 20 bp, synthetic construct
  source 1..20: mol_type = other DNA
gggccaacacaagaagacgc

SEQ ID NO: 23746 - DNA, 20 bp, synthetic construct
  source 1..20: mol_type = other DNA
caagtgagatgagtaccatg

SEQ ID NO: 23747 - DNA, 20 bp, synthetic construct
  source 1..20: mol_type = other DNA
gtagcactcaggtggaaccc

SEQ ID NO: 23748 - DNA, 20 bp, synthetic construct
  source 1..20: mol_type = other DNA
cgtgtgccttcacataagag

SEQ ID NO: 23749 - DNA, 20 bp, synthetic construct
  source 1..20: mol_type = other DNA
ctggaacagcgagacacctg

SEQ ID NO: 23750 - DNA, 20 bp, synthetic construct
  source 1..20: mol_type = other DNA
ggaacaggagagtcgcatgg

SEQ ID NO: 23751 - DNA, 20 bp, synthetic construct
  source 1..20: mol_type = other DNA
cagacatgcccattcagcag

SEQ ID NO: 23752 - DNA, 20 bp, synthetic construct
  source 1..20: mol_type = other DNA
acagccatcaatacagtgtg

SEQ ID NO: 23753 - DNA, 20 bp, synthetic construct
  source 1..20: mol_type = other DNA
ggaacctgctaagcattgtg

SEQ ID NO: 23754 - DNA, 20 bp, synthetic construct
  source 1..20: mol_type = other DNA
ccaggcacgaatacagcctg

SEQ ID NO: 23755 - DNA, 20 bp, synthetic construct
  source 1..20: mol_type = other DNA
gtgccgctgtaggtgacacc

SEQ ID NO: 23756 - DNA, 20 bp, synthetic construct
  source 1..20: mol_type = other DNA
acttagcactgtcaacagga

SEQ ID NO: 23757 - DNA, 20 bp, synthetic construct
  source 1..20: mol_type = other DNA
aagacactgcacaagttctg

SEQ ID NO: 23758 - DNA, 20 bp, synthetic construct
  source 1..20: mol_type = other DNA
tgcactacacctataaaccg

SEQ ID NO: 23759 - DNA, 20 bp, synthetic construct
  source 1..20: mol_type = other DNA
atggggttcttatagttccg

SEQ ID NO: 23760 - DNA, 20 bp, synthetic construct
  source 1..20: mol_type = other DNA
caggcgtgatcctctaactg

SEQ ID NO: 23761 - DNA, 20 bp, synthetic construct
  source 1..20: mol_type = other DNA
gatattggcattactacacg

SEQ ID NO: 23762 - DNA, 20 bp, synthetic construct
  source 1..20: mol_type = other DNA
tcaccttctgtaatatccca

SEQ ID NO: 23763 - DNA, 20 bp, synthetic construct
  source 1..20: mol_type = other DNA
tctgcgcaagaatcttcccg

SEQ ID NO: 23764 - DNA, 20 bp, synthetic construct
  source 1..20: mol_type = other DNA
gagcatgctccataacccac

SEQ ID NO: 23765 - DNA, 20 bp, synthetic construct
  source 1..20: mol_type = other DNA
tccaagagttaacataccag

SEQ ID NO: 23766 - DNA, 20 bp, synthetic construct
  source 1..20: mol_type = other DNA
tccaccaagtcagacccaag

SEQ ID NO: 23767 - DNA, 20 bp, synthetic construct
  source 1..20: mol_type = other DNA
tcagcatagagagagaggcc

SEQ ID NO: 23768 - DNA, 20 bp, synthetic construct
  source 1..20: mol_type = other DNA
ccccctgacagagacaggaa

SEQ ID NO: 23769 - DNA, 20 bp, synthetic construct
  source 1..20: mol_type = other DNA
caaagagccaaaaacacgga

SEQ ID NO: 23770 - DNA, 20 bp, synthetic construct
  source 1..20: mol_type = other DNA
ggctgctagatcgagagtcc

SEQ ID NO: 23771 - DNA, 20 bp, synthetic construct
  source 1..20: mol_type = other DNA
ttaggcatattacctttggg

SEQ ID NO: 23772 - DNA, 20 bp, synthetic construct
  source 1..20: mol_type = other DNA
gaaatgcgaaggcttgacta

SEQ ID NO: 23773 - DNA, 20 bp, synthetic construct
  source 1..20: mol_type = other DNA
gcctacaggaccagcacatg

SEQ ID NO: 23774 - DNA, 20 bp, synthetic construct
  source 1..20: mol_type = other DNA
acggaaccagaagatagcta

SEQ ID NO: 23775 - DNA, 20 bp, synthetic construct
  source 1..20: mol_type = other DNA
gctgagtgatgcaacgatcc

SEQ ID NO: 23776 - DNA, 20 bp, synthetic construct
  source 1..20: mol_type = other DNA
cagagcatttgtaagaatgg

SEQ ID NO: 23777 - DNA, 20 bp, synthetic construct
  source 1..20: mol_type = other DNA
ggcctgaggaatggtgcacg

SEQ ID NO: 23778 - DNA, 20 bp, synthetic construct
  source 1..20: mol_type = other DNA
tatggcaatatagtggtcaa

SEQ ID NO: 23779 - DNA, 20 bp, synthetic construct
  source 1..20: mol_type = other DNA
ttgccatatgctacccactg

SEQ ID NO: 23780 - DNA, 20 bp, synthetic construct
  source 1..20: mol_type = other DNA
gctatcttctggttccgtgc

SEQ ID NO: 23781 - DNA, 20 bp, synthetic construct
  source 1..20: mol_type = other DNA
tccacatgtgctggtcctgt

SEQ ID NO: 23782 - DNA, 20 bp, synthetic construct
  source 1..20: mol_type = other DNA
caggctgttcccaagaaggg

SEQ ID NO: 23783 - DNA, 20 bp, synthetic construct
  source 1..20: mol_type = other DNA
tgaggataatgaagatgagc

SEQ ID NO: 23784 - DNA, 20 bp, synthetic construct
  source 1..20: mol_type = other DNA
agaggtacatgggttcatgg

SEQ ID NO: 23785 - DNA, 20 bp, synthetic construct
  source 1..20: mol_type = other DNA
catggaggctgcgctttgtg

SEQ ID NO: 23786 - DNA, 20 bp, synthetic construct
  source 1..20: mol_type = other DNA
ctgctccagccagcatgcag

SEQ ID NO: 23787 - DNA, 20 bp, synthetic construct
  source 1..20: mol_type = other DNA
gtcagggatcttgctggtga

SEQ ID NO: 23788 - DNA, 20 bp, synthetic construct
  source 1..20: mol_type = other DNA
gactgcttcacggtcaacgt

SEQ ID NO: 23789 - DNA, 20 bp, synthetic construct
  source 1..20: mol_type = other DNA
gtgcattagctggttcaccg

SEQ ID NO: 23790 - DNA, 20 bp, synthetic construct
  source 1..20: mol_type = other DNA
aagcagtccccgagcgccaa

SEQ ID NO: 23791 - DNA, 20 bp, synthetic construct
  source 1..20: mol_type = other DNA
aagaagtactcgttgtccac

SEQ ID NO: 23792 - DNA, 20 bp, synthetic construct
  source 1..20: mol_type = other DNA
catcgtcgcaaagctccaga

SEQ ID NO: 23793 - DNA, 20 bp, synthetic construct
  source 1..20: mol_type = other DNA
tcctgcaggagatccagtac

SEQ ID NO: 23794 - DNA, 20 bp, synthetic construct
  source 1..20: mol_type = other DNA
agctaatgcacacatactcc

SEQ ID NO: 23795 - DNA, 20 bp, synthetic construct
  source 1..20: mol_type = other DNA
gacacctgtcccgcacacac

SEQ ID NO: 23796 - DNA, 20 bp, synthetic construct
  source 1..20: mol_type = other DNA
gctgctccatgacatgcagg

SEQ ID NO: 23797 - DNA, 20 bp, synthetic construct
  source 1..20: mol_type = other DNA
agaagggcaagatggcaagg

SEQ ID NO: 23798 - DNA, 20 bp, synthetic construct
  source 1..20: mol_type = other DNA
aagtgggagccagaccacgc

SEQ ID NO: 23799 - DNA, 20 bp, synthetic construct
  source 1..20: mol_type = other DNA
atcggaacgcctgcgagctg

SEQ ID NO: 23800 - DNA, 20 bp, synthetic construct
  source 1..20: mol_type = other DNA
tggaatatcctggagaaacc

SEQ ID NO: 23801 - DNA, 20 bp, synthetic construct
  source 1..20: mol_type = other DNA
agcttgccaaggcgcgtgtg

SEQ ID NO: 23802 - DNA, 20 bp, synthetic construct
  source 1..20: mol_type = other DNA
acgcaggagctggagaacgt

SEQ ID NO: 23803 - DNA, 20 bp, synthetic construct
  source 1..20: mol_type = other DNA
tctggcgacggcgcttgacg

SEQ ID NO: 23804 - DNA, 20 bp, synthetic construct
  source 1..20: mol_type = other DNA
ggccgactacctcagaagag

SEQ ID NO: 23805 - DNA, 20 bp, synthetic construct
  source 1..20: mol_type = other DNA
caagtccacacagttcaacg

SEQ ID NO: 23806 - DNA, 20 bp, synthetic construct
  source 1..20: mol_type = other DNA
gcgaatgccaccgatgaacg

SEQ ID NO: 23807 - DNA, 20 bp, synthetic construct
  source 1..20: mol_type = other DNA
ggccagtactcacagcgaga

SEQ ID NO: 23808 - DNA, 20 bp, synthetic construct
  source 1..20: mol_type = other DNA
gcagcatcgtcatgaagagg

SEQ ID NO: 23809 - DNA, 20 bp, synthetic construct
  source 1..20: mol_type = other DNA
ccttcaaatacagcaaagag

SEQ ID NO: 23810 - DNA, 20 bp, synthetic construct
  source 1..20: mol_type = other DNA
aagagccccaggaacatgag

SEQ ID NO: 23811 - DNA, 20 bp, synthetic construct
  source 1..20: mol_type = other DNA
ctccccatcctaccagcgcg

SEQ ID NO: 23812 - DNA, 20 bp, synthetic construct
  source 1..20: mol_type = other DNA
gacatacaggaagctccagt

SEQ ID NO: 23813 - DNA, 20 bp, synthetic construct
  source 1..20: mol_type = other DNA
tgtcttcacagctctggcga

SEQ ID NO: 23814 - DNA, 20 bp, synthetic construct
  source 1..20: mol_type = other DNA
gtagagaagcaccagcccca

SEQ ID NO: 23815 - DNA, 20 bp, synthetic construct
  source 1..20: mol_type = other DNA
ctacaacaagtggctgacaa

SEQ ID NO: 23816 - DNA, 20 bp, synthetic construct
  source 1..20: mol_type = other DNA
ctgaaccagcgccctggaca

SEQ ID NO: 23817 - DNA, 20 bp, synthetic construct
  source 1..20: mol_type = other DNA
gttgtagaaggtgatgccga

SEQ ID NO: 23818 - DNA, 20 bp, synthetic construct
  source 1..20: mol_type = other DNA
taggcctccatagtagctgc

SEQ ID NO: 23819 - DNA, 20 bp, synthetic construct
  source 1..20: mol_type = other DNA
tctgacaacatgagctactc

SEQ ID NO: 23820 - DNA, 20 bp, synthetic construct
  source 1..20: mol_type = other DNA
tactccggcagctactatgg

SEQ ID NO: 23821 - DNA, 20 bp, synthetic construct
  source 1..20: mol_type = other DNA
ctgggctatggctatagctg

SEQ ID NO: 23822 - DNA, 20 bp, synthetic construct
  source 1..20: mol_type = other DNA
tactatggaggcctaggcta

SEQ ID NO: 23823 - DNA, 20 bp, synthetic construct
  source 1..20: mol_type = other DNA
tacggctgtggaggattcgg

SEQ ID NO: 23824 - DNA, 20 bp, synthetic construct
  source 1..20: mol_type = other DNA
ggcctaggctacggctgtgg

SEQ ID NO: 23825 - DNA, 20 bp, synthetic construct
  source 1..20: mol_type = other DNA
cacagctatagccatagccc

SEQ ID NO: 23826 - DNA, 20 bp, synthetic construct
  source 1..20: mol_type = other DNA
atcccccatagcatgatggg

SEQ ID NO: 23827 - DNA, 20 bp, synthetic construct
  source 1..20: mol_type = other DNA
tatggctatagctgtggatg

SEQ ID NO: 23828 - DNA, 20 bp, synthetic construct
  source 1..20: mol_type = other DNA
cacagccatagcccagtctg

SEQ ID NO: 23829 - DNA, 20 bp, synthetic construct
  source 1..20: mol_type = other DNA
ggaggcctaggctacggctg

SEQ ID NO: 23830 - DNA, 20 bp, synthetic construct
  source 1..20: mol_type = other DNA
ggctatggctgtggctatgg

SEQ ID NO: 23831 - DNA, 20 bp, synthetic construct
  source 1..20: mol_type = other DNA
ggattcggtggcctgggcta

SEQ ID NO: 23832 - DNA, 20 bp, synthetic construct
  source 1..20: mol_type = other DNA
agcttccgcagactgggcta

SEQ ID NO: 23833 - DNA, 20 bp, synthetic construct
  source 1..20: mol_type = other DNA
ggattcatgggaatgtcccg

SEQ ID NO: 23834 - DNA, 20 bp, synthetic construct
  source 1..20: mol_type = other DNA
ggggagcggtaaatgcacat

SEQ ID NO: 23835 - DNA, 20 bp, synthetic construct
  source 1..20: mol_type = other DNA
atagagtcggcagttcagtt

SEQ ID NO: 23836 - DNA, 20 bp, synthetic construct
  source 1..20: mol_type = other DNA
tggacagttcccagacacgc

SEQ ID NO: 23837 - DNA, 20 bp, synthetic construct
  source 1..20: mol_type = other DNA
aaaagccgtggagatactca

SEQ ID NO: 23838 - DNA, 20 bp, synthetic construct
  source 1..20: mol_type = other DNA
ctcagaacagaagatcccgg

SEQ ID NO: 23839 - DNA, 20 bp, synthetic construct
  source 1..20: mol_type = other DNA
gcatctatgatgtaccagga

SEQ ID NO: 23840 - DNA, 20 bp, synthetic construct
  source 1..20: mol_type = other DNA
tgggtgtccaataagaccga

SEQ ID NO: 23841 - DNA, 20 bp, synthetic construct
  source 1..20: mol_type = other DNA
gaagggcaactcaagcacct

SEQ ID NO: 23842 - DNA, 20 bp, synthetic construct
  source 1..20: mol_type = other DNA
tgacaccctccagcaactga

SEQ ID NO: 23843 - DNA, 20 bp, synthetic construct
  source 1..20: mol_type = other DNA
ggcttccgagggaatgacat

SEQ ID NO: 23844 - DNA, 20 bp, synthetic construct
  source 1..20: mol_type = other DNA
aaatgcagagcaatccagag

SEQ ID NO: 23845 - DNA, 20 bp, synthetic construct
  source 1..20: mol_type = other DNA
attggctgatactaacttgg

SEQ ID NO: 23846 - DNA, 20 bp, synthetic construct
  source 1..20: mol_type = other DNA
gggactgcgtgacctgtcac

SEQ ID NO: 23847 - DNA, 20 bp, synthetic construct
  source 1..20: mol_type = other DNA
ataccaactcactgatgtcc

SEQ ID NO: 23848 - DNA, 20 bp, synthetic construct
  source 1..20: mol_type = other DNA
ggtggctcaattctaatgga

SEQ ID NO: 23849 - DNA, 20 bp, synthetic construct
  source 1..20: mol_type = other DNA
atagaacaggaaccacatgg

SEQ ID NO: 23850 - DNA, 20 bp, synthetic construct
  source 1..20: mol_type = other DNA
agctggagacagcctcacaa

SEQ ID NO: 23851 - DNA, 20 bp, synthetic construct
  source 1..20: mol_type = other DNA
cagaagtgccaatcccaaca

SEQ ID NO: 23852 - DNA, 20 bp, synthetic construct
  source 1..20: mol_type = other DNA
cggtagtcgctccagtacca

SEQ ID NO: 23853 - DNA, 20 bp, synthetic construct
  source 1..20: mol_type = other DNA
acagcatgagggttaaagtg

SEQ ID NO: 23854 - DNA, 20 bp, synthetic construct
  source 1..20: mol_type = other DNA
agagaatacaggaccaaaag

SEQ ID NO: 23855 - DNA, 20 bp, synthetic construct
  source 1..20: mol_type = other DNA
ttgccacaaggacaatacac

SEQ ID NO: 23856 - DNA, 20 bp, synthetic construct
  source 1..20: mol_type = other DNA
gagagcctgtcccgcaaaca

SEQ ID NO: 23857 - DNA, 20 bp, synthetic construct
  source 1..20: mol_type = other DNA
gagttcatgggatctgcgtg

SEQ ID NO: 23858 - DNA, 20 bp, synthetic construct
  source 1..20: mol_type = other DNA
tagtcctgtggatttaagca

SEQ ID NO: 23859 - DNA, 20 bp, synthetic construct
  source 1..20: mol_type = other DNA
ttattgggtccagtagggaa

SEQ ID NO: 23860 - DNA, 20 bp, synthetic construct
  source 1..20: mol_type = other DNA
acacttactaatagaggcta

SEQ ID NO: 23861 - DNA, 20 bp, synthetic construct
  source 1..20: mol_type = other DNA
agtcatggaagctccaaaca

SEQ ID NO: 23862 - DNA, 20 bp, synthetic construct
  source 1..20: mol_type = other DNA
ccaagcccccaaatagcctg

SEQ ID NO: 23863 - DNA, 20 bp, synthetic construct
  source 1..20: mol_type = other DNA
gtaggcacataatacagacg

SEQ ID NO: 23864 - DNA, 20 bp, synthetic construct
  source 1..20: mol_type = other DNA
acaaggctgaagccagactg

SEQ ID NO: 23865 - DNA, 20 bp, synthetic construct
  source 1..20: mol_type = other DNA
ttcctcaatgaagagaaccg

SEQ ID NO: 23866 - DNA, 20 bp, synthetic construct
  source 1..20: mol_type = other DNA
gcctcaacaacaagaacccc

SEQ ID NO: 23867 - DNA, 20 bp, synthetic construct
  source 1..20: mol_type = other DNA
tcctccccgcaccaagcaca

SEQ ID NO: 23868 - DNA, 20 bp, synthetic construct
  source 1..20: mol_type = other DNA
tgaactcgcctcttaaactg

SEQ ID NO: 23869 - DNA, 20 bp, synthetic construct
  source 1..20: mol_type = other DNA
aatgtggttggtcctcaggg

SEQ ID NO: 23870 - DNA, 20 bp, synthetic construct
  source 1..20: mol_type = other DNA
gagctcatctgtgatcaggt

SEQ ID NO: 23871 - DNA, 20 bp, synthetic construct
  source 1..20: mol_type = other DNA
gagctatgtggatactggtg

SEQ ID NO: 23872 - DNA, 20 bp, synthetic construct
  source 1..20: mol_type = other DNA
catggagagcacagacaacg

SEQ ID NO: 23873 - DNA, 20 bp, synthetic construct
  source 1..20: mol_type = other DNA
agcctttgacaacttcaagg

SEQ ID NO: 23874 - DNA, 20 bp, synthetic construct
  source 1..20: mol_type = other DNA
cgtgacagagcactgggcaa

SEQ ID NO: 23875 - DNA, 20 bp, synthetic construct
  source 1..20: mol_type = other DNA
tcttccacagactgctccag

SEQ ID NO: 23876 - DNA, 20 bp, synthetic construct
  source 1..20: mol_type = other DNA
catacttgatggtcaggtgg

SEQ ID NO: 23877 - DNA, 20 bp, synthetic construct
  source 1..20: mol_type = other DNA
agtgccacccagttcaagag

SEQ ID NO: 23878 - DNA, 20 bp, synthetic construct
  source 1..20: mol_type = other DNA
gtttctagggagcggcaccg

SEQ ID NO: 23879 - DNA, 20 bp, synthetic construct
  source 1..20: mol_type = other DNA
tatgcctttgacaagaaccg

SEQ ID NO: 23880 - DNA, 20 bp, synthetic construct
  source 1..20: mol_type = other DNA
tgtgaccgtggacaatcgcc

SEQ ID NO: 23881 - DNA, 20 bp, synthetic construct
  source 1..20: mol_type = other DNA
gcacctcaacgctgtgaccg

SEQ ID NO: 23882 - DNA, 20 bp, synthetic construct
  source 1..20: mol_type = other DNA
aacctgcaactggtgccgtg

SEQ ID NO: 23883 - DNA, 20 bp, synthetic construct
  source 1..20: mol_type = other DNA
tgtccacggtcacagcgttg

SEQ ID NO: 23884 - DNA, 20 bp, synthetic construct
  source 1..20: mol_type = other DNA
ccttcatgagctgctgtggt

SEQ ID NO: 23885 - DNA, 20 bp, synthetic construct
  source 1..20: mol_type = other DNA
taagggagcaaagcttgtat

SEQ ID NO: 23886 - DNA, 20 bp, synthetic construct
  source 1..20: mol_type = other DNA
ttctcaggcccgaatggaag

SEQ ID NO: 23887 - DNA, 20 bp, synthetic construct
  source 1..20: mol_type = other DNA
aaggagtagctctccaccag

SEQ ID NO: 23888 - DNA, 20 bp, synthetic construct
  source 1..20: mol_type = other DNA
taccgggtcacatttaggac

SEQ ID NO: 23889 - DNA, 20 bp, synthetic construct
  source 1..20: mol_type = other DNA
aagagacctccagcaagcag

SEQ ID NO: 23890 - DNA, 20 bp, synthetic construct
  source 1..20: mol_type = other DNA
gtgcaccacctggaagcccg

SEQ ID NO: 23891 - DNA, 20 bp, synthetic construct
  source 1..20: mol_type = other DNA
atacacgctgatcgatgagc

SEQ ID NO: 23892 - DNA, 20 bp, synthetic construct
  source 1..20: mol_type = other DNA
tgttcttctatagggtctgt

SEQ ID NO: 23893 - DNA, 20 bp, synthetic construct
  source 1..20: mol_type = other DNA
tacagccagtatgaagtgcg

SEQ ID NO: 23894 - DNA, 20 bp, synthetic construct
  source 1..20: mol_type = other DNA
ggacctctgtgcgctatgag

SEQ ID NO: 23895 - DNA, 20 bp, synthetic construct
  source 1..20: mol_type = other DNA
tgctgacctacatcgcgccc

SEQ ID NO: 23896 - DNA, 20 bp, synthetic construct
  source 1..20: mol_type = other DNA
cgggtggctgacgactgtgt

SEQ ID NO: 23897 - DNA, 20 bp, synthetic construct
  source 1..20: mol_type = other DNA
ctggagcaaatagatatgca

SEQ ID NO: 23898 - DNA, 20 bp, synthetic construct
  source 1..20: mol_type = other DNA
gcgctgcgatcggagactgg

SEQ ID NO: 23899 - DNA, 20 bp, synthetic construct
  source 1..20: mol_type = other DNA
agaggcgcgggtagtcaaag

SEQ ID NO: 23900 - DNA, 20 bp, synthetic construct
  source 1..20: mol_type = other DNA
gggaccgctcaagcagtgtg

SEQ ID NO: 23901 - DNA, 20 bp, synthetic construct
  source 1..20: mol_type = other DNA
ggacaagatgcgccagtcgg

SEQ ID NO: 23902 - DNA, 20 bp, synthetic construct
  source 1..20: mol_type = other DNA
agtcgacgggaacaacgcag

SEQ ID NO: 23903 - DNA, 20 bp, synthetic construct
  source 1..20: mol_type = other DNA
aagacggcactgcctagcag

SEQ ID NO: 23904 - DNA, 20 bp, synthetic construct
  source 1..20: mol_type = other DNA
tctgaacagcactaaacgtg

SEQ ID NO: 23905 - DNA, 20 bp, synthetic construct
  source 1..20: mol_type = other DNA
tgtacgcgatcacccagttg

SEQ ID NO: 23906 - DNA, 20 bp, synthetic construct
  source 1..20: mol_type = other DNA
gtaatgtgtgaagaagccca

SEQ ID NO: 23907 - DNA, 20 bp, synthetic construct
  source 1..20: mol_type = other DNA
tgatggaagaagcgccaccc

SEQ ID NO: 23908 - DNA, 20 bp, synthetic construct
  source 1..20: mol_type = other DNA
gactttgacggcaagaaccg

SEQ ID NO: 23909 - DNA, 20 bp, synthetic construct
  source 1..20: mol_type = other DNA
gcagtactcgcgctaccaga

SEQ ID NO: 23910 - DNA, 20 bp, synthetic construct
  source 1..20: mol_type = other DNA
ggccgaacctgagatcgacg

SEQ ID NO: 23911 - DNA, 20 bp, synthetic construct
  source 1..20: mol_type = other DNA
gccgacaagatgaagaaccg

SEQ ID NO: 23912 - DNA, 20 bp, synthetic construct
  source 1..20: mol_type = other DNA
agcttcggccagttcaaccc

SEQ ID NO: 23913 - DNA, 20 bp, synthetic construct
  source 1..20: mol_type = other DNA
tcgtcctcgtacacgtcgcg

SEQ ID NO: 23914 - DNA, 20 bp, synthetic construct
  source 1..20: mol_type = other DNA
gtgcccgtgttcgaggccgt

SEQ ID NO: 23915 - DNA, 20 bp, synthetic construct
  source 1..20: mol_type = other DNA
ggagattgccaaggtcaccg

SEQ ID NO: 23916 - DNA, 20 bp, synthetic construct
  source 1..20: mol_type = other DNA
gttgtaggggtagccgtagt

SEQ ID NO: 23917 - DNA, 20 bp, synthetic construct
  source 1..20: mol_type = other DNA
cgtgatcgtctacgccagcg

SEQ ID NO: 23918 - DNA, 20 bp, synthetic construct
  source 1..20: mol_type = other DNA
aacgggcagcgcaagtacgg

SEQ ID NO: 23919 - DNA, 20 bp, synthetic construct
  source 1..20: mol_type = other DNA
ggagcgcacgggctacagca

SEQ ID NO: 23920 - DNA, 20 bp, synthetic construct
  source 1..20: mol_type = other DNA
gagtactgctccttgtccac

SEQ ID NO: 23921 - DNA, 20 bp, synthetic construct
  source 1..20: mol_type = other DNA
ggagtacgagagccaccgcg

SEQ ID NO: 23922 - DNA, 20 bp, synthetic construct
  source 1..20: mol_type = other DNA
aagacctcgcagccacgctg

SEQ ID NO: 23923 - DNA, 20 bp, synthetic construct
  source 1..20: mol_type = other DNA
aatgagcagaatctatatgg

SEQ ID NO: 23924 - DNA, 20 bp, synthetic construct
  source 1..20: mol_type = other DNA
agtggatctctgtaccacct

SEQ ID NO: 23925 - DNA, 20 bp, synthetic construct
  source 1..20: mol_type = other DNA
caactctggtcgatgaaaag

SEQ ID NO: 23926 - DNA, 20 bp, synthetic construct
  source 1..20: mol_type = other DNA
aggattggccaagtccattg

SEQ ID NO: 23927 - DNA, 20 bp, synthetic construct
  source 1..20: mol_type = other DNA
gggtgtcaaacttcaaccgc

SEQ ID NO: 23928 - DNA, 20 bp, synthetic construct
  source 1..20: mol_type = other DNA
acaggccatggagaagtgta

SEQ ID NO: 23929 - DNA, 20 bp, synthetic construct
  source 1..20: mol_type = other DNA
agaaatctagcaatttactc

SEQ ID NO: 23930 - DNA, 20 bp, synthetic construct
  source 1..20: mol_type = other DNA
ggttccgagaagtaaagctt

SEQ ID NO: 23931 - DNA, 20 bp, synthetic construct
  source 1..20: mol_type = other DNA
acaggcttgtacttgagtcc

SEQ ID NO: 23932 - DNA, 20 bp, synthetic construct
  source 1..20: mol_type = other DNA
tggcacctatgcacctccag

SEQ ID NO: 23933 - DNA, 20 bp, synthetic construct
  source 1..20: mol_type = other DNA
ttggagaatgaataagatag

SEQ ID NO: 23934 - DNA, 20 bp, synthetic construct
  source 1..20: mol_type = other DNA
gttggtgaaagttcctcacc

SEQ ID NO: 23935 - DNA, 20 bp, synthetic construct
  source 1..20: mol_type = other DNA
aaggctggtcggaccaactc

SEQ ID NO: 23936 - DNA, 20 bp, synthetic construct
  source 1..20: mol_type = other DNA
taggtgccaaatcccaatac

SEQ ID NO: 23937 - DNA, 20 bp, synthetic construct
  source 1..20: mol_type = other DNA
gaagtgtaaggatgcaggat

SEQ ID NO: 23938 - DNA, 20 bp, synthetic construct
  source 1..20: mol_type = other DNA
attcataccgggtaacactg

SEQ ID NO: 23939 - DNA, 20 bp, synthetic construct
  source 1..20: mol_type = other DNA
ttcccatggtgactccactg

SEQ ID NO: 23940 - DNA, 20 bp, synthetic construct
  source 1..20: mol_type = other DNA
tcaatgacagtggtcagctg

SEQ ID NO: 23941 - DNA, 20 bp, synthetic construct
  source 1..20: mol_type = other DNA
aagactctatgaaagcacaa

SEQ ID NO: 23942 - DNA, 20 bp, synthetic construct
  source 1..20: mol_type = other DNA
aaacctgcgcgaagtgacca

SEQ ID NO: 23943 - DNA, 20 bp, synthetic construct
  source 1..20: mol_type = other DNA
tcctagagggggttccaatg

SEQ ID NO: 23944 - DNA, 20 bp, synthetic construct
  source 1..20: mol_type = other DNA
gtgctgaagatccaaaacgt

SEQ ID NO: 23945 - DNA, 20 bp, synthetic construct
  source 1..20: mol_type = other DNA
tcctccagacaccccgaagt

SEQ ID NO: 23946 - DNA, 20 bp, synthetic construct
  source 1..20: mol_type = other DNA
ctggacattcagggcgacag

SEQ ID NO: 23947 - DNA, 20 bp, synthetic construct
  source 1..20: mol_type = other DNA
gctgcaccgtgtcattggag

SEQ ID NO: 23948 - DNA, 20 bp, synthetic construct
  source 1..20: mol_type = other DNA
cagcaacccggagtacacga

SEQ ID NO: 23949 - DNA, 20 bp, synthetic construct
  source 1..20: mol_type = other DNA
tgagtggaggatctgaaccg

SEQ ID NO: 23950 - DNA, 20 bp, synthetic construct
  source 1..20: mol_type = other DNA
aattacacgtggtaccacaa

SEQ ID NO: 23951 - DNA, 20 bp, synthetic construct
  source 1..20: mol_type = other DNA
tcccagtgatgccatagtga

SEQ ID NO: 23952 - DNA, 20 bp, synthetic construct
  source 1..20: mol_type = other DNA
gtccaagactgagaaatgga

SEQ ID NO: 23953 - DNA, 20 bp, synthetic construct
  source 1..20: mol_type = other DNA
acacagatgcacgatcgacg

SEQ ID NO: 23954 - DNA, 20 bp, synthetic construct
  source 1..20: mol_type = other DNA
ctacgcgcgcatctaccgag

SEQ ID NO: 23955 - DNA, 20 bp, synthetic construct
  source 1..20: mol_type = other DNA
cctgcgtcaccgaccagtag

SEQ ID NO: 23956 - DNA, 20 bp, synthetic construct
  source 1..20: mol_type = other DNA
tgtaccaggtctcgtcgttg

SEQ ID NO: 23957 - DNA, 20 bp, synthetic construct
  source 1..20: mol_type = other DNA
tagtcggggacgcaccgtcg

SEQ ID NO: 23958 - DNA, 20 bp, synthetic construct
  source 1..20: mol_type = other DNA
ccacgatggtggccttgacg

SEQ ID NO: 23959 - DNA, 20 bp, synthetic construct
  source 1..20: mol_type = other DNA
gccgagtactggccgcgcgg

SEQ ID NO: 23960 - DNA, 20 bp, synthetic construct
  source 1..20: mol_type = other DNA
gatgagccacacggccacga

SEQ ID NO: 23961 - DNA, 20 bp, synthetic construct
  source 1..20: mol_type = other DNA
gccggacgagagcagcgcag

SEQ ID NO: 23962 - DNA, 20 bp, synthetic construct
  source 1..20: mol_type = other DNA
tggcggtagagcgagaccag

SEQ ID NO: 23963 - DNA, 20 bp, synthetic construct
  source 1..20: mol_type = other DNA
accaggcccatgatgaggca

SEQ ID NO: 23964 - DNA, 20 bp, synthetic construct
  source 1..20: mol_type = other DNA
ggtagatgcgcgcgtagacc

SEQ ID NO: 23965 - DNA, 20 bp, synthetic construct
  source 1..20: mol_type = other DNA
cacctgcccgaagtaccagt

SEQ ID NO: 23966 - DNA, 20 bp, synthetic construct
  source 1..20: mol_type = other DNA
gcggggttgccaatgcctcg

SEQ ID NO: 23967 - DNA, 20 bp, synthetic construct
  source 1..20: mol_type = other DNA
gagctcgttggccaacgaga

SEQ ID NO: 23968 - DNA, 20 bp, synthetic construct
  source 1..20: mol_type = other DNA
agggtgagaaaaccacgttg

SEQ ID NO: 23969 - DNA, 20 bp, synthetic construct
  source 1..20: mol_type = other DNA
ctggacgaagatcgcgtctg

SEQ ID NO: 23970 - DNA, 20 bp, synthetic construct
  source 1..20: mol_type = other DNA
ccggagcacggtcaagcaag

SEQ ID NO: 23971 - DNA, 20 bp, synthetic construct
  source 1..20: mol_type = other DNA
cctggaactgccctaccacg

SEQ ID NO: 23972 - DNA, 20 bp, synthetic construct
  source 1..20: mol_type = other DNA
cagacgcgatcttcgtccag

SEQ ID NO: 23973 - DNA, 20 bp, synthetic construct
  source 1..20: mol_type = other DNA
gctccttgtacagatgccgg

SEQ ID NO: 23974 - DNA, 20 bp, synthetic construct
  source 1..20: mol_type = other DNA
ccctctacttcaacggccag

SEQ ID NO: 23975 - DNA, 20 bp, synthetic construct
  source 1..20: mol_type = other DNA
ctggagcatggccaacaccg

SEQ ID NO: 23976 - DNA, 20 bp, synthetic construct
  source 1..20: mol_type = other DNA
caggtgggccacgtaggatg

SEQ ID NO: 23977 - DNA, 20 bp, synthetic construct
  source 1..20: mol_type = other DNA
gagccgtggaccagctgaca

SEQ ID NO: 23978 - DNA, 20 bp, synthetic construct
  source 1..20: mol_type = other DNA
gctgagttcaccacgcccga

SEQ ID NO: 23979 - DNA, 20 bp, synthetic construct
  source 1..20: mol_type = other DNA
ggcagcaatgaacatgctga

SEQ ID NO: 23980 - DNA, 20 bp, synthetic construct
  source 1..20: mol_type = other DNA
tgggtgaagacacacacaaa

SEQ ID NO: 23981 - DNA, 20 bp, synthetic construct
  source 1..20: mol_type = other DNA
cggaacagcctgaagaagtg

SEQ ID NO: 23982 - DNA, 20 bp, synthetic construct
  source 1..20: mol_type = other DNA
tggccattactacgacatcc

SEQ ID NO: 23983 - DNA, 20 bp, synthetic construct
  source 1..20: mol_type = other DNA
tccatgggagcgtccaacgg

SEQ ID NO: 23984 - DNA, 20 bp, synthetic construct
  source 1..20: mol_type = other DNA
caaactgggatttacccaag

SEQ ID NO: 23985 - DNA, 20 bp, synthetic construct
  source 1..20: mol_type = other DNA
gcggcgtggtgcaccagatg

SEQ ID NO: 23986 - DNA, 20 bp, synthetic construct
  source 1..20: mol_type = other DNA
ggacgaggacacgccgacct

SEQ ID NO: 23987 - DNA, 20 bp, synthetic construct
  source 1..20: mol_type = other DNA
atcaccgcgctgtcccacgg

SEQ ID NO: 23988 - DNA, 20 bp, synthetic construct
  source 1..20: mol_type = other DNA
ccaagcagttcaagcagcgg

SEQ ID NO: 23989 - DNA, 20 bp, synthetic construct
  source 1..20: mol_type = other DNA
ggacatcaagccctcggtgg

SEQ ID NO: 23990 - DNA, 20 bp, synthetic construct
  source 1..20: mol_type = other DNA
ccgttggacgctcccatgga

SEQ ID NO: 23991 - DNA, 20 bp, synthetic construct
  source 1..20: mol_type = other DNA
gggacagcgcggtgatccac

SEQ ID NO: 23992 - DNA, 20 bp, synthetic construct
  source 1..20: mol_type = other DNA
cgcgcaccacgacccgcact

SEQ ID NO: 23993 - DNA, 20 bp, synthetic construct
  source 1..20: mol_type = other DNA
atgccgttcaccgtgaagct

SEQ ID NO: 23994 - DNA, 20 bp, synthetic construct
  source 1..20: mol_type = other DNA
cttgatgtccggctggccca

SEQ ID NO: 23995 - DNA, 20 bp, synthetic construct
  source 1..20: mol_type = other DNA
taaccaccacccgggacccg

SEQ ID NO: 23996 - DNA, 20 bp, synthetic construct
  source 1..20: mol_type = other DNA
tacggcgctctgcagagcaa

SEQ ID NO: 23997 - DNA, 20 bp, synthetic construct
  source 1..20: mol_type = other DNA
cccagggggctggtggacca

SEQ ID NO: 23998 - DNA, 20 bp, synthetic construct
  source 1..20: mol_type = other DNA
cagtgactgagttattggcg

SEQ ID NO: 23999 - DNA, 20 bp, synthetic construct
  source 1..20: mol_type = other DNA
gtcaagacgatcatagtcac

SEQ ID NO: 24000 - DNA, 20 bp, synthetic construct
  source 1..20: mol_type = other DNA
accccagggcccgcaaacag

SEQ ID NO: 24001 - DNA, 20 bp, synthetic construct
  source 1..20: mol_type = other DNA
tcagacacctattaccgtcc

SEQ ID NO: 24002 - DNA, 20 bp, synthetic construct
  source 1..20: mol_type = other DNA
ataagccaggagtactgtgc

SEQ ID NO: 24003 - DNA, 20 bp, synthetic construct
  source 1..20: mol_type = other DNA
cagtactcctggcttatcaa

SEQ ID NO: 24004 - DNA, 20 bp, synthetic construct
  source 1..20: mol_type = other DNA
ctgtagccaaaaagttgctg

SEQ ID NO: 24005 - DNA, 20 bp, synthetic construct
  source 1..20: mol_type = other DNA
gcatggattcagtagtgagc

SEQ ID NO: 24006 - DNA, 20 bp, synthetic construct
  source 1..20: mol_type = other DNA
caacaactccaaccctgtgg

SEQ ID NO: 24007 - DNA, 20 bp, synthetic construct
  source 1..20: mol_type = other DNA
tgccattcaatgttgcagag

SEQ ID NO: 24008 - DNA, 20 bp, synthetic construct
  source 1..20: mol_type = other DNA
gccagcaagaccacagtcac

SEQ ID NO: 24009 - DNA, 20 bp, synthetic construct
  source 1..20: mol_type = other DNA
tctgattgtttatccaccac

SEQ ID NO: 24010 - DNA, 20 bp, synthetic construct
  source 1..20: mol_type = other DNA
gctggggcagattgtggaca

SEQ ID NO: 24011 - DNA, 20 bp, synthetic construct
  source 1..20: mol_type = other DNA
gactatgatcgtcttgactg

SEQ ID NO: 24012 - DNA, 20 bp, synthetic construct
  source 1..20: mol_type = other DNA
acggtaataggtgtctgaag

SEQ ID NO: 24013 - DNA, 20 bp, synthetic construct
  source 1..20: mol_type = other DNA
tatgaccctggaattactgc

SEQ ID NO: 24014 - DNA, 20 bp, synthetic construct
  source 1..20: mol_type = other DNA
acatacctgcagtaattcca

SEQ ID NO: 24015 - DNA, 20 bp, synthetic construct
  source 1..20: mol_type = other DNA
gctgcagctcttcgaacagg

SEQ ID NO: 24016 - DNA, 20 bp, synthetic construct
  source 1..20: mol_type = other DNA
attctgtgcggttgaagtgt

SEQ ID NO: 24017 - DNA, 20 bp, synthetic construct
  source 1..20: mol_type = other DNA
taagaatattcctatgaccc

SEQ ID NO: 24018 - DNA, 20 bp, synthetic construct
  source 1..20: mol_type = other DNA
gcgtatttcagtacttccag

SEQ ID NO: 24019 - DNA, 20 bp, synthetic construct
  source 1..20: mol_type = other DNA
caagcacttctgattctgtg

SEQ ID NO: 24020 - DNA, 20 bp, synthetic construct
  source 1..20: mol_type = other DNA
attctagcaaataagtcagg

SEQ ID NO: 24021 - DNA, 20 bp, synthetic construct
  source 1..20: mol_type = other DNA
tcgcaagcagagtacagatg

SEQ ID NO: 24022 - DNA, 20 bp, synthetic construct
  source 1..20: mol_type = other DNA
ttgctgcagctcttcgaaca

SEQ ID NO: 24023 - DNA, 20 bp, synthetic construct
  source 1..20: mol_type = other DNA
acaaaaatagagtacgaagt

SEQ ID NO: 24024 - DNA, 20 bp, synthetic construct
  source 1..20: mol_type = other DNA
tgctgcagctcttcgaacag

SEQ ID NO: 24025 - DNA, 20 bp, synthetic construct
  source 1..20: mol_type = other DNA
gatggtgcagaagaagaacg

SEQ ID NO: 24026 - DNA, 20 bp, synthetic construct
  source 1..20: mol_type = other DNA
tcagaagtgcttggtgcccg

SEQ ID NO: 24027 - DNA, 20 bp, synthetic construct
  source 1..20: mol_type = other DNA
gccctgaggcaagagaagaa

SEQ ID NO: 24028 - DNA, 20 bp, synthetic construct
  source 1..20: mol_type = other DNA
gaaacgtccacagcaaccaa

SEQ ID NO: 24029 - DNA, 20 bp, synthetic construct
  source 1..20: mol_type = other DNA
ggccattggcttctcatgga

SEQ ID NO: 24030 - DNA, 20 bp, synthetic construct
  source 1..20: mol_type = other DNA
gcttccgggatagaacgtca

SEQ ID NO: 24031 - DNA, 20 bp, synthetic construct
  source 1..20: mol_type = other DNA
caggcggacaaaggcgatca

SEQ ID NO: 24032 - DNA, 20 bp, synthetic construct
  source 1..20: mol_type = other DNA
ttaaatactggcacatcggg

SEQ ID NO: 24033 - DNA, 20 bp, synthetic construct
  source 1..20: mol_type = other DNA
aggcaggagaccttgaggct

SEQ ID NO: 24034 - DNA, 20 bp, synthetic construct
  source 1..20: mol_type = other DNA
tctatcccggaagctccacc

SEQ ID NO: 24035 - DNA, 20 bp, synthetic construct
  source 1..20: mol_type = other DNA
agtccatattaagggacctg

SEQ ID NO: 24036 - DNA, 20 bp, synthetic construct
  source 1..20: mol_type = other DNA
gggattgtcagccggctgag

SEQ ID NO: 24037 - DNA, 20 bp, synthetic construct
  source 1..20: mol_type = other DNA
aggaacatcacgcccaacat

SEQ ID NO: 24038 - DNA, 20 bp, synthetic construct
  source 1..20: mol_type = other DNA
ggccagtgagaacccagatg

SEQ ID NO: 24039 - DNA, 20 bp, synthetic construct
  source 1..20: mol_type = other DNA
caatagcaacgtcatggtga

SEQ ID NO: 24040 - DNA, 20 bp, synthetic construct
  source 1..20: mol_type = other DNA
agacagatgctccaattgga

SEQ ID NO: 24041 - DNA, 20 bp, synthetic construct
  source 1..20: mol_type = other DNA
accatagactataagaagaa

SEQ ID NO: 24042 - DNA, 20 bp, synthetic construct
  source 1..20: mol_type = other DNA
aattggaaggaacagagcct

SEQ ID NO: 24043 - DNA, 20 bp, synthetic construct
  source 1..20: mol_type = other DNA
gattggcagctctaacgctg

SEQ ID NO: 24044 - DNA, 20 bp, synthetic construct
  source 1..20: mol_type = other DNA
agaaactcagagcaaatacg

SEQ ID NO: 24045 - DNA, 20 bp, synthetic construct
  source 1..20: mol_type = other DNA
gccaccaaacacgacagtga

SEQ ID NO: 24046 - DNA, 20 bp, synthetic construct
  source 1..20: mol_type = other DNA
aggtcgaactccaatcccga

SEQ ID NO: 24047 - DNA, 20 bp, synthetic construct
  source 1..20: mol_type = other DNA
aggacacgtggaatgcctca

SEQ ID NO: 24048 - DNA, 20 bp, synthetic construct
  source 1..20: mol_type = other DNA
tacagtgattaagccacctg

SEQ ID NO: 24049 - DNA, 20 bp, synthetic construct
  source 1..20: mol_type = other DNA
ctaggccaaatcacccaagg

SEQ ID NO: 24050 - DNA, 20 bp, synthetic construct
  source 1..20: mol_type = other DNA
gtgacagcccaagatactac

SEQ ID NO: 24051 - DNA, 20 bp, synthetic construct
  source 1..20: mol_type = other DNA
acctgggtaggactgatagg

SEQ ID NO: 24052 - DNA, 20 bp, synthetic construct
  source 1..20: mol_type = other DNA
gcttcctgatgcattcatgg

SEQ ID NO: 24053 - DNA, 20 bp, synthetic construct
  source 1..20: mol_type = other DNA
aaaggaaataccttgaaggg

SEQ ID NO: 24054 - DNA, 20 bp, synthetic construct
  source 1..20: mol_type = other DNA
tgtatccaagagaatctaca

SEQ ID NO: 24055 - DNA, 20 bp, synthetic construct
  source 1..20: mol_type = other DNA
actaaaaagtcagatgacac

SEQ ID NO: 24056 - DNA, 20 bp, synthetic construct
  source 1..20: mol_type = other DNA
aaaataagctcagaaagaag

SEQ ID NO: 24057 - DNA, 20 bp, synthetic construct
  source 1..20: mol_type = other DNA
ggagatgatttggagtctgg

SEQ ID NO: 24058 - DNA, 20 bp, synthetic construct
  source 1..20: mol_type = other DNA
tgattcacacaccgactccg

SEQ ID NO: 24059 - DNA, 20 bp, synthetic construct
  source 1..20: mol_type = other DNA
gcagccgtgcagcacgagcg

SEQ ID NO: 24060 - DNA, 20 bp, synthetic construct
  source 1..20: mol_type = other DNA
cggtgtccaccactccagag

SEQ ID NO: 24061 - DNA, 20 bp, synthetic construct
  source 1..20: mol_type = other DNA
ttgcggatggtggacgtccg

SEQ ID NO: 24062 - DNA, 20 bp, synthetic construct
  source 1..20: mol_type = other DNA
ctggtcttgcaaagacagcg

SEQ ID NO: 24063 - DNA, 20 bp, synthetic construct
  source 1..20: mol_type = other DNA
gagggccacttgcttgcgga

SEQ ID NO: 24064 - DNA, 20 bp, synthetic construct
  source 1..20: mol_type = other DNA
gggtcccattcacttcatgg

SEQ ID NO: 24065 - DNA, 20 bp, synthetic construct
  source 1..20: mol_type = other DNA
aggccgctgaccttgggcgt

SEQ ID NO: 24066 - DNA, 20 bp, synthetic construct
  source 1..20: mol_type = other DNA
tggacacaaggaggagaacg

SEQ ID NO: 24067 - DNA, 20 bp, synthetic construct
  source 1..20: mol_type = other DNA
cacttcatagagatacattg

SEQ ID NO: 24068 - DNA, 20 bp, synthetic construct
  source 1..20: mol_type = other DNA
gaagtcaacatgaacaaaga

SEQ ID NO: 24069 - DNA, 20 bp, synthetic construct
  source 1..20: mol_type = other DNA
cagctcggggaagcactacg

SEQ ID NO: 24070 - DNA, 20 bp, synthetic construct
  source 1..20: mol_type = other DNA
tcagccgacacgccctgcac

SEQ ID NO: 24071 - DNA, 20 bp, synthetic construct
  source 1..20: mol_type = other DNA
cgccgagggaaagtgcgcgg

SEQ ID NO: 24072 - DNA, 20 bp, synthetic construct
  source 1..20: mol_type = other DNA
tgtgtggcgaccgcagctcg

SEQ ID NO: 24073 - DNA, 20 bp, synthetic construct
  source 1..20: mol_type = other DNA
gaatcgacgtaattccagtg

SEQ ID NO: 24074 - DNA, 20 bp, synthetic construct
  source 1..20: mol_type = other DNA
cacggtactagactccggga

SEQ ID NO: 24075 - DNA, 20 bp, synthetic construct
  source 1..20: mol_type = other DNA
gagcaaagtccccggaagcg

SEQ ID NO: 24076 - DNA, 20 bp, synthetic construct
  source 1..20: mol_type = other DNA
gagagaagtaggccaaactc

SEQ ID NO: 24077 - DNA, 20 bp, synthetic construct
  source 1..20: mol_type = other DNA
gctgacagcacagccgtgaa

SEQ ID NO: 24078 - DNA, 20 bp, synthetic construct
  source 1..20: mol_type = other DNA
gatcccttgcagcacaccac

SEQ ID NO: 24079 - DNA, 20 bp, synthetic construct
  source 1..20: mol_type = other DNA
cacacccacagacaaaaagt

SEQ ID NO: 24080 - DNA, 20 bp, synthetic construct
  source 1..20: mol_type = other DNA
aaggacttgaagaaacctcg

SEQ ID NO: 24081 - DNA, 20 bp, synthetic construct
  source 1..20: mol_type = other DNA
cctgctaagccaaacagaga

SEQ ID NO: 24082 - DNA, 20 bp, synthetic construct
  source 1..20: mol_type = other DNA
cggagtctagtaccgtgaag

SEQ ID NO: 24083 - DNA, 20 bp, synthetic construct
  source 1..20: mol_type = other DNA
ctgcgtgtcggatcccaagg

SEQ ID NO: 24084 - DNA, 20 bp, synthetic construct
  source 1..20: mol_type = other DNA
ttccacttcccatgagacca

SEQ ID NO: 24085 - DNA, 20 bp, synthetic construct
  source 1..20: mol_type = other DNA
ggttggctgccatttaaacg

SEQ ID NO: 24086 - DNA, 20 bp, synthetic construct
  source 1..20: mol_type = other DNA
gcaggcgaaagtgatgtcgc

SEQ ID NO: 24087 - DNA, 20 bp, synthetic construct
  source 1..20: mol_type = other DNA
gaggtggagccagtttccta

SEQ ID NO: 24088 - DNA, 20 bp, synthetic construct
  source 1..20: mol_type = other DNA
aggtgggcatgatcaccgtg

SEQ ID NO: 24089 - DNA, 20 bp, synthetic construct
  source 1..20: mol_type = other DNA
acaggactttgaaggtacca

SEQ ID NO: 24090 - DNA, 20 bp, synthetic construct
  source 1..20: mol_type = other DNA
tcactcgaggacgcagtgcg

SEQ ID NO: 24091 - DNA, 20 bp, synthetic construct
  source 1..20: mol_type = other DNA
cacgtgggcccctttaacga

SEQ ID NO: 24092 - DNA, 20 bp, synthetic construct
  source 1..20: mol_type = other DNA
ccaccgaacgatacacacgt

SEQ ID NO: 24093 - DNA, 20 bp, synthetic construct
  source 1..20: mol_type = other DNA
tacgctcgacgggtgctgaa

SEQ ID NO: 24094 - DNA, 20 bp, synthetic construct
  source 1..20: mol_type = other DNA
gcgggtgaggctgcaacacg

SEQ ID NO: 24095 - DNA, 20 bp, synthetic construct
  source 1..20: mol_type = other DNA
gctcgcgagcagaaccaggt

SEQ ID NO: 24096 - DNA, 20 bp, synthetic construct
  source 1..20: mol_type = other DNA
ggtgtccacgtgatcattgg

SEQ ID NO: 24097 - DNA, 20 bp, synthetic construct
  source 1..20: mol_type = other DNA
gcaggagactctggtccacg

SEQ ID NO: 24098 - DNA, 20 bp, synthetic construct
  source 1..20: mol_type = other DNA
ttggatcaaccagctgacgc

SEQ ID NO: 24099 - DNA, 20 bp, synthetic construct
  source 1..20: mol_type = other DNA
ccaacgtgtgtatcgttcgg

SEQ ID NO: 24100 - DNA, 20 bp, synthetic construct
  source 1..20: mol_type = other DNA
gccggagcagctcctaaccc

SEQ ID NO: 24101 - DNA, 20 bp, synthetic construct
  source 1..20: mol_type = other DNA
gtatcgccaccacccacagg

SEQ ID NO: 24102 - DNA, 20 bp, synthetic construct
  source 1..20: mol_type = other DNA
atgacgtcatgatgccccag

SEQ ID NO: 24103 - DNA, 20 bp, synthetic construct
  source 1..20: mol_type = other DNA
ctcaacgagcagcgcaaccg

SEQ ID NO: 24104 - DNA, 20 bp, synthetic construct
  source 1..20: mol_type = other DNA
cgcatcgtgtcacagaacgt

SEQ ID NO: 24105 - DNA, 20 bp, synthetic construct
  source 1..20: mol_type = other DNA
cagcgacatcgagatcccgt

SEQ ID NO: 24106 - DNA, 20 bp, synthetic construct
  source 1..20: mol_type = other DNA
cgtgctacgggtctcgcagt

SEQ ID NO: 24107 - DNA, 20 bp, synthetic construct
  source 1..20: mol_type = other DNA
acgtaacggtgcgcatccac

SEQ ID NO: 24108 - DNA, 20 bp, synthetic construct
  source 1..20: mol_type = other DNA
gcaggccgagcgcagtctcg

SEQ ID NO: 24109 - DNA, 20 bp, synthetic construct
  source 1..20: mol_type = other DNA
ccgatggacgtgttgaccga

SEQ ID NO: 24110 - DNA, 20 bp, synthetic construct
  source 1..20: mol_type = other DNA
cctggaacgcaacgaatccg

SEQ ID NO: 24111 - DNA, 20 bp, synthetic construct
  source 1..20: mol_type = other DNA
gaggacgattacgactacta

SEQ ID NO: 24112 - DNA, 20 bp, synthetic construct
  source 1..20: mol_type = other DNA
gtgcacggaagacacagacc

SEQ ID NO: 24113 - DNA, 20 bp, synthetic construct
  source 1..20: mol_type = other DNA
aaaggtgaaagcttcgactc

SEQ ID NO: 24114 - DNA, 20 bp, synthetic construct
  source 1..20: mol_type = other DNA
gcggcagtgcgtggtctcgg

SEQ ID NO: 24115 - DNA, 20 bp, synthetic construct
  source 1..20: mol_type = other DNA
ctgcggaccaccctcagcgg

SEQ ID NO: 24116 - DNA, 20 bp, synthetic construct
  source 1..20: mol_type = other DNA
ccagagcagcgacacggagt

SEQ ID NO: 24117 - DNA, 20 bp, synthetic construct
  source 1..20: mol_type = other DNA
tacgcgtgctccatgcagaa

SEQ ID NO: 24118 - DNA, 20 bp, synthetic construct
  source 1..20: mol_type = other DNA
cagactgcagaccacccacg

SEQ ID NO: 24119 - DNA, 20 bp, synthetic construct
  source 1..20: mol_type = other DNA
ggccagttctgactgcaacg

SEQ ID NO: 24120 - DNA, 20 bp, synthetic construct
  source 1..20: mol_type = other DNA
ctggcccacagcctcgacga

SEQ ID NO: 24121 - DNA, 20 bp, synthetic construct
  source 1..20: mol_type = other DNA
gagaaccatgagctccggcg

SEQ ID NO: 24122 - DNA, 20 bp, synthetic construct
  source 1..20: mol_type = other DNA
gtccacagctggaacgcgca

SEQ ID NO: 24123 - DNA, 20 bp, synthetic construct
  source 1..20: mol_type = other DNA
ccgacacgtcggcgtcctgg

SEQ ID NO: 24124 - DNA, 20 bp, synthetic construct
  source 1..20: mol_type = other DNA
ccagatccgaggcctgcgtg

SEQ ID NO: 24125 - DNA, 20 bp, synthetic construct
  source 1..20: mol_type = other DNA
gctcagagcagcaggacagt

SEQ ID NO: 24126 - DNA, 20 bp, synthetic construct
  source 1..20: mol_type = other DNA
aggcgctgagtgcgctgcgg

SEQ ID NO: 24127 - DNA, 20 bp, synthetic construct
  source 1..20: mol_type = other DNA
ggcagcccgaggagccgagt

SEQ ID NO: 24128 - DNA, 20 bp, synthetic construct
  source 1..20: mol_type = other DNA
ccggtccccaaagacccgaa

SEQ ID NO: 24129 - DNA, 20 bp, synthetic construct
  source 1..20: mol_type = other DNA
cgacgcacccggagacaccc

SEQ ID NO: 24130 - DNA, 20 bp, synthetic construct
  source 1..20: mol_type = other DNA
agctcagcgagcagaacctc

SEQ ID NO: 24131 - DNA, 20 bp, synthetic construct
  source 1..20: mol_type = other DNA
cactggctggagcagagctg

SEQ ID NO: 24132 - DNA, 20 bp, synthetic construct
  source 1..20: mol_type = other DNA
gagcctggcactgtccccga

SEQ ID NO: 24133 - DNA, 20 bp, synthetic construct
  source 1..20: mol_type = other DNA
taggcctctgggctttacgg

SEQ ID NO: 24134 - DNA, 20 bp, synthetic construct
  source 1..20: mol_type = other DNA
gcacaacaccagctaagctc

SEQ ID NO: 24135 - DNA, 20 bp, synthetic construct
  source 1..20: mol_type = other DNA
ttggctggaggaatgttaca

SEQ ID NO: 24136 - DNA, 20 bp, synthetic construct
  source 1..20: mol_type = other DNA
gaatgtgaatgccaaagcga

SEQ ID NO: 24137 - DNA, 20 bp, synthetic construct
  source 1..20: mol_type = other DNA
gaacggggtgaatggaacag

SEQ ID NO: 24138 - DNA, 20 bp, synthetic construct
  source 1..20: mol_type = other DNA
tggatctgagtaatatcctc

SEQ ID NO: 24139 - DNA, 20 bp, synthetic construct
  source 1..20: mol_type = other DNA
aatgtaaccaaccgtagcaa

SEQ ID NO: 24140 - DNA, 20 bp, synthetic construct
  source 1..20: mol_type = other DNA
aaagtgaaacccggcatctg

SEQ ID NO: 24141 - DNA, 20 bp, synthetic construct
  source 1..20: mol_type = other DNA
tggacaaggtgagcaataga

SEQ ID NO: 24142 - DNA, 20 bp, synthetic construct
  source 1..20: mol_type = other DNA
aagacatggatgcttactgc

SEQ ID NO: 24143 - DNA, 20 bp, synthetic construct
  source 1..20: mol_type = other DNA
gtggagaatgtatacaagca

SEQ ID NO: 24144 - DNA, 20 bp, synthetic construct
  source 1..20: mol_type = other DNA
tcatcacatcgtgcagaagt

SEQ ID NO: 24145 - DNA, 20 bp, synthetic construct
  source 1..20: mol_type = other DNA
tgaaatgaggaggattactt

SEQ ID NO: 24146 - DNA, 20 bp, synthetic construct
  source 1..20: mol_type = other DNA
ggaaatgggacatttgagtg

SEQ ID NO: 24147 - DNA, 20 bp, synthetic construct
  source 1..20: mol_type = other DNA
aaatgatggacaatgtcacc

SEQ ID NO: 24148 - DNA, 20 bp, synthetic construct
  source 1..20: mol_type = other DNA
taacccgcttataacccggt

SEQ ID NO: 24149 - DNA, 20 bp, synthetic construct
  source 1..20: mol_type = other DNA
acggccacgaacttccgagt

SEQ ID NO: 24150 - DNA, 20 bp, synthetic construct
  source 1..20: mol_type = other DNA
ctcctagtgagtaaccacac

SEQ ID NO: 24151 - DNA, 20 bp, synthetic construct
  source 1..20: mol_type = other DNA
atatacctgtatatgctacg

SEQ ID NO: 24152 - DNA, 20 bp, synthetic construct
  source 1..20: mol_type = other DNA
aactctgtgtgtgtaaacca

SEQ ID NO: 24153 - DNA, 20 bp, synthetic construct
  source 1..20: mol_type = other DNA
gaggactgctgtggaactgt

SEQ ID NO: 24154 - DNA, 20 bp, synthetic construct
  source 1..20: mol_type = other DNA
actcagagaggccgttgtga

SEQ ID NO: 24155 - DNA, 20 bp, synthetic construct
  source 1..20: mol_type = other DNA
ggcactgtgtcaatactgtg

SEQ ID NO: 24156 - DNA, 20 bp, synthetic construct
  source 1..20: mol_type = other DNA
gaactgacaagtcggtaaca

SEQ ID NO: 24157 - DNA, 20 bp, synthetic construct
  source 1..20: mol_type = other DNA
agatattgatgagtgtactc

SEQ ID NO: 24158 - DNA, 20 bp, synthetic construct
  source 1..20: mol_type = other DNA
attctcactaatgagagtgg

SEQ ID NO: 24159 - DNA, 20 bp, synthetic construct
  source 1..20: mol_type = other DNA
ccggaccacaagcactgtag

SEQ ID NO: 24160 - DNA, 20 bp, synthetic construct
  source 1..20: mol_type = other DNA
ggaacgcactggtaagatcc

SEQ ID NO: 24161 - DNA, 20 bp, synthetic construct
  source 1..20: mol_type = other DNA
cattcctcacgtctaccccg

SEQ ID NO: 24162 - DNA, 20 bp, synthetic construct
  source 1..20: mol_type = other DNA
attgctcctactcaagtgac

SEQ ID NO: 24163 - DNA, 20 bp, synthetic construct
  source 1..20: mol_type = other DNA
gtgatgggacgcttaaacaa

SEQ ID NO: 24164 - DNA, 20 bp, synthetic construct
  source 1..20: mol_type = other DNA
acctgcagctggcagacgga

SEQ ID NO: 24165 - DNA, 20 bp, synthetic construct
  source 1..20: mol_type = other DNA
ttggagtcacaccgacgagg

SEQ ID NO: 24166 - DNA, 20 bp, synthetic construct
  source 1..20: mol_type = other DNA
aatttatgcagtgcacgccc

SEQ ID NO: 24167 - DNA, 20 bp, synthetic construct
  source 1..20: mol_type = other DNA
tcagtctccgaccccaagca

SEQ ID NO: 24168 - DNA, 20 bp, synthetic construct
  source 1..20: mol_type = other DNA
agagtaaagaccgaagatgg

SEQ ID NO: 24169 - DNA, 20 bp, synthetic construct
  source 1..20: mol_type = other DNA
cagatgtgacgcctgcccag

SEQ ID NO: 24170 - DNA, 20 bp, synthetic construct
  source 1..20: mol_type = other DNA
gattgtgaacggaatccacc

SEQ ID NO: 24171 - DNA, 20 bp, synthetic construct
  source 1..20: mol_type = other DNA
gccaagtcaaacaagcaggt

SEQ ID NO: 24172 - DNA, 20 bp, synthetic construct
  source 1..20: mol_type = other DNA
ttacctgaagaacgatggga

SEQ ID NO: 24173 - DNA, 20 bp, synthetic construct
  source 1..20: mol_type = other DNA
gctgagcaatttgcagcgag

SEQ ID NO: 24174 - DNA, 20 bp, synthetic construct
  source 1..20: mol_type = other DNA
acatagagatcattcagggc

SEQ ID NO: 24175 - DNA, 20 bp, synthetic construct
  source 1..20: mol_type = other DNA
tgtcggtacattggacacct

SEQ ID NO: 24176 - DNA, 20 bp, synthetic construct
  source 1..20: mol_type = other DNA
tcagctcttccaagaagtcc

SEQ ID NO: 24177 - DNA, 20 bp, synthetic construct
  source 1..20: mol_type = other DNA
cgtttcctgtgtagccctcg

SEQ ID NO: 24178 - DNA, 20 bp, synthetic construct
  source 1..20: mol_type = other DNA
acgtcgagcgaggtgatctg

SEQ ID NO: 24179 - DNA, 20 bp, synthetic construct
  source 1..20: mol_type = other DNA
agtgctgagctggtcgtatg

SEQ ID NO: 24180 - DNA, 20 bp, synthetic construct
  source 1..20: mol_type = other DNA
tgtagatattcggccctcgg

SEQ ID NO: 24181 - DNA, 20 bp, synthetic construct
  source 1..20: mol_type = other DNA
tgaaactcagcatcgctcag

SEQ ID NO: 24182 - DNA, 20 bp, synthetic construct
  source 1..20: mol_type = other DNA
cacttgttggaccttagaca

SEQ ID NO: 24183 - DNA, 20 bp, synthetic construct
  source 1..20: mol_type = other DNA
tggtccatgacagcgaggat

SEQ ID NO: 24184 - DNA, 20 bp, synthetic construct
  source 1..20: mol_type = other DNA
cacacgtacctgaaccacga

SEQ ID NO: 24185 - DNA, 20 bp, synthetic construct
  source 1..20: mol_type = other DNA
gatgccacaaaagcaaacaa

SEQ ID NO: 24186 - DNA, 20 bp, synthetic construct
  source 1..20: mol_type = other DNA
gggcccacccctactatgcg

SEQ ID NO: 24187 - DNA, 20 bp, synthetic construct
  source 1..20: mol_type = other DNA
gcaaaagagcggaactctgg

SEQ ID NO: 24188 - DNA, 20 bp, synthetic construct
  source 1..20: mol_type = other DNA
aagtgacctcaagcatgcgg

SEQ ID NO: 24189 - DNA, 20 bp, synthetic construct
  source 1..20: mol_type = other DNA
gcggatctatcatggcggtg

SEQ ID NO: 24190 - DNA, 20 bp, synthetic construct
  source 1..20: mol_type = other DNA
gcaggtattgataaaagtca

SEQ ID NO: 24191 - DNA, 20 bp, synthetic construct
  source 1..20: mol_type = other DNA
tgggtgggtaacggcatagg

SEQ ID NO: 24192 - DNA, 20 bp, synthetic construct
  source 1..20: mol_type = other DNA
cgtgcagcgcccgtagatgt

SEQ ID NO: 24193 - DNA, 20 bp, synthetic construct
  source 1..20: mol_type = other DNA
ctcacagaggactcaagtcg

SEQ ID NO: 24194 - DNA, 20 bp, synthetic construct
  source 1..20: mol_type = other DNA
gtacgaggcctaccgaaccc

SEQ ID NO: 24195 - DNA, 20 bp, synthetic construct
  source 1..20: mol_type = other DNA
gggtcttgagtccttggcac

SEQ ID NO: 24196 - DNA, 20 bp, synthetic construct
  source 1..20: mol_type = other DNA
cttacctggtagcaggacaa

SEQ ID NO: 24197 - DNA, 20 bp, synthetic construct
  source 1..20: mol_type = other DNA
agagcttacctcaaggacac

SEQ ID NO: 24198 - DNA, 20 bp, synthetic construct
  source 1..20: mol_type = other DNA
gtccagtgaagcatctctgg

SEQ ID NO: 24199 - DNA, 20 bp, synthetic construct
  source 1..20: mol_type = other DNA
ggaaaatgagagatgactgt

SEQ ID NO: 24200 - DNA, 20 bp, synthetic construct
  source 1..20: mol_type = other DNA
catcagtgacaagtttgtca

SEQ ID NO: 24201 - DNA, 20 bp, synthetic construct
  source 1..20: mol_type = other DNA
cctgaataagcatgtgatcc

SEQ ID NO: 24202 - DNA, 20 bp, synthetic construct
  source 1..20: mol_type = other DNA
aatggtcttgagcatttggg

SEQ ID NO: 24203 - DNA, 20 bp, synthetic construct
  source 1..20: mol_type = other DNA
tgatcagcgagaggaaaggg

SEQ ID NO: 24204 - DNA, 20 bp, synthetic construct
  source 1..20: mol_type = other DNA
agtggcaaagattaagggtc

SEQ ID NO: 24205 - DNA, 20 bp, synthetic construct
  source 1..20: mol_type = other DNA
aatgctcaagaccattgggc

SEQ ID NO: 24206 - DNA, 20 bp, synthetic construct
  source 1..20: mol_type = other DNA
agaacacagctggtctagga

SEQ ID NO: 24207 - DNA, 20 bp, synthetic construct
  source 1..20: mol_type = other DNA
aaaggatggagactttgacg

SEQ ID NO: 24208 - DNA, 20 bp, synthetic construct
  source 1..20: mol_type = other DNA
tctgagaggcaggacatggt

SEQ ID NO: 24209 - DNA, 20 bp, synthetic construct
  source 1..20: mol_type = other DNA
gtggtgctcgtagtcgtcca

SEQ ID NO: 24210 - DNA, 20 bp, synthetic construct
  source 1..20: mol_type = other DNA
agagcgaatcgtgccactcc

SEQ ID NO: 24211 - DNA, 20 bp, synthetic construct
  source 1..20: mol_type = other DNA
gccacctggcaggcaaacgc

SEQ ID NO: 24212 - DNA, 20 bp, synthetic construct
  source 1..20: mol_type = other DNA
ggggcgcgcaacgaagcgaa

SEQ ID NO: 24213 - DNA, 20 bp, synthetic construct
  source 1..20: mol_type = other DNA
gcgtccagcaggtgtccgga

SEQ ID NO: 24214 - DNA, 20 bp, synthetic construct
  source 1..20: mol_type = other DNA
tcttccagatcctgtctgag

SEQ ID NO: 24215 - DNA, 20 bp, synthetic construct
  source 1..20: mol_type = other DNA
cagagaccggaaggatcaca

SEQ ID NO: 24216 - DNA, 20 bp, synthetic construct
  source 1..20: mol_type = other DNA
aaacatttccgtgcagcgtg

SEQ ID NO: 24217 - DNA, 20 bp, synthetic construct
  source 1..20: mol_type = other DNA
caagaccagcagagaccgga

SEQ ID NO: 24218 - DNA, 20 bp, synthetic construct
  source 1..20: mol_type = other DNA
ccgacgtgcctgagaagccc

SEQ ID NO: 24219 - DNA, 20 bp, synthetic construct
  source 1..20: mol_type = other DNA
ccaggacgtgatcatgcagg

SEQ ID NO: 24220 - DNA, 20 bp, synthetic construct
  source 1..20: mol_type = other DNA
cgtccagggcatcgaacacc

SEQ ID NO: 24221 - DNA, 20 bp, synthetic construct
  source 1..20: mol_type = other DNA
gcctgtagagcgggatcccg

SEQ ID NO: 24222 - DNA, 20 bp, synthetic construct
  source 1..20: mol_type = other DNA
cgaagaactggtgctcccgc

SEQ ID NO: 24223 - DNA, 20 bp, synthetic construct
  source 1..20: mol_type = other DNA
tggtgtggtagtcgcacacg

SEQ ID NO: 24224 - DNA, 20 bp, synthetic construct
  source 1..20: mol_type = other DNA
ccgtcgctcacgctgttcgg

SEQ ID NO: 24225 - DNA, 20 bp, synthetic construct
  source 1..20: mol_type = other DNA
ggtgaccggctacgactggt

SEQ ID NO: 24226 - DNA, 20 bp, synthetic construct
  source 1..20: mol_type = other DNA
tctggaccgtgtgtcggccg

SEQ ID NO: 24227 - DNA, 20 bp, synthetic construct
  source 1..20: mol_type = other DNA
gccgacatcgccttcaccgg

SEQ ID NO: 24228 - DNA, 20 bp, synthetic construct
  source 1..20: mol_type = other DNA
gacgcgcacaaaagcacctg

SEQ ID NO: 24229 - DNA, 20 bp, synthetic construct
  source 1..20: mol_type = other DNA
agcgacacacagttctaccc

SEQ ID NO: 24230 - DNA, 20 bp, synthetic construct
  source 1..20: mol_type = other DNA
ggcgggagactcacccacgg

SEQ ID NO: 24231 - DNA, 20 bp, synthetic construct
  source 1..20: mol_type = other DNA
gtcatcgctgcgcaggtcca

SEQ ID NO: 24232 - DNA, 20 bp, synthetic construct
  source 1..20: mol_type = other DNA
agcccacaattctcaaatgg

SEQ ID NO: 24233 - DNA, 20 bp, synthetic construct
  source 1..20: mol_type = other DNA
cagtatggtacagagcctgg

SEQ ID NO: 24234 - DNA, 20 bp, synthetic construct
  source 1..20: mol_type = other DNA
gccctcaggtcctctccacc

SEQ ID NO: 24235 - DNA, 20 bp, synthetic construct
  source 1..20: mol_type = other DNA
gccaggacagggccacaatg

SEQ ID NO: 24236 - DNA, 20 bp, synthetic construct
  source 1..20: mol_type = other DNA
gcagcgtccacatcgtgcac

SEQ ID NO: 24237 - DNA, 20 bp, synthetic construct
  source 1..20: mol_type = other DNA
ggggagtccctccttgcgca

SEQ ID NO: 24238 - DNA, 20 bp, synthetic construct
  source 1..20: mol_type = other DNA
aatccgttgagcaaaaaccg

SEQ ID NO: 24239 - DNA, 20 bp, synthetic construct
  source 1..20: mol_type = other DNA
atagcaggactaatcttccg

SEQ ID NO: 24240 - DNA, 20 bp, synthetic construct
  source 1..20: mol_type = other DNA
ggccagcagcgtgataacga

SEQ ID NO: 24241 - DNA, 20 bp, synthetic construct
  source 1..20: mol_type = other DNA
gcagcgtgataacgaaggtg

SEQ ID NO: 24242 - DNA, 20 bp, synthetic construct
  source 1..20: mol_type = other DNA
ctcccggtctatcctacccg

SEQ ID NO: 24243 - DNA, 20 bp, synthetic construct
  source 1..20: mol_type = other DNA
atctacacccacaaagtgtg

SEQ ID NO: 24244 - DNA, 20 bp, synthetic construct
  source 1..20: mol_type = other DNA
tgaactcaccggaaccaaag

SEQ ID NO: 24245 - DNA, 20 bp, synthetic construct
  source 1..20: mol_type = other DNA
ggtagcccgcagcagatgcg

SEQ ID NO: 24246 - DNA, 20 bp, synthetic construct
  source 1..20: mol_type = other DNA
tggcagaggataccatccaa

SEQ ID NO: 24247 - DNA, 20 bp, synthetic construct
  source 1..20: mol_type = other DNA
ggatacaaatgataatgccc

SEQ ID NO: 24248 - DNA, 20 bp, synthetic construct
  source 1..20: mol_type = other DNA
caccagtagaaccatcagtg

SEQ ID NO: 24249 - DNA, 20 bp, synthetic construct
  source 1..20: mol_type = other DNA
tcctgctatgctcgctcctg

SEQ ID NO: 24250 - DNA, 20 bp, synthetic construct
  source 1..20: mol_type = other DNA
gctcctggggatgctatggg

SEQ ID NO: 24251 - DNA, 20 bp, synthetic construct
  source 1..20: mol_type = other DNA
caggtgacggcaagtgacag

SEQ ID NO: 24252 - DNA, 20 bp, synthetic construct
  source 1..20: mol_type = other DNA
gtgagagaagacgcacctca

SEQ ID NO: 24253 - DNA, 20 bp, synthetic construct
  source 1..20: mol_type = other DNA
caaaccagacaagttatacg

SEQ ID NO: 24254 - DNA, 20 bp, synthetic construct
  source 1..20: mol_type = other DNA
gggaggcggcacccccactg

SEQ ID NO: 24255 - DNA, 20 bp, synthetic construct
  source 1..20: mol_type = other DNA
aaagcaaggaagccgcagtg

SEQ ID NO: 24256 - DNA, 20 bp, synthetic construct
  source 1..20: mol_type = other DNA
tggtgagcgatttccaccag

SEQ ID NO: 24257 - DNA, 20 bp, synthetic construct
  source 1..20: mol_type = other DNA
cagcaccccaatctcctcgg

SEQ ID NO: 24258 - DNA, 20 bp, synthetic construct
  source 1..20: mol_type = other DNA
tataacttgtctggtttggg

SEQ ID NO: 24259 - DNA, 20 bp, synthetic construct
  source 1..20: mol_type = other DNA
ctggtccagtccgggctggg

SEQ ID NO: 24260 - DNA, 20 bp, synthetic construct
  source 1..20: mol_type = other DNA
cggcgcccccgaggagattg

SEQ ID NO: 24261 - DNA, 20 bp, synthetic construct
  source 1..20: mol_type = other DNA
gctgctggtccagtccgggc

SEQ ID NO: 24262 - DNA, 20 bp, synthetic construct
  source 1..20: mol_type = other DNA
gggagctgctggtccagtcc

SEQ ID NO: 24263 - DNA, 20 bp, synthetic construct
  source 1..20: mol_type = other DNA
attggggtgctggttctccc

SEQ ID NO: 24264 - DNA, 20 bp, synthetic construct
  source 1..20: mol_type = other DNA
tcccgcccagcccgctcccg

SEQ ID NO: 24265 - DNA, 20 bp, synthetic construct
  source 1..20: mol_type = other DNA
ggactggaccagcagctccc

SEQ ID NO: 24266 - DNA, 20 bp, synthetic construct
  source 1..20: mol_type = other DNA
caacagcagaaagaaaagca

SEQ ID NO: 24267 - DNA, 20 bp, synthetic construct
  source 1..20: mol_type = other DNA
tccgggctgggcggcgcagg

SEQ ID NO: 24268 - DNA, 20 bp, synthetic construct
  source 1..20: mol_type = other DNA
cggggagaagctgtagacct

SEQ ID NO: 24269 - DNA, 20 bp, synthetic construct
  source 1..20: mol_type = other DNA
agctgtagacctgggccccc

SEQ ID NO: 24270 - DNA, 20 bp, synthetic construct
  source 1..20: mol_type = other DNA
ggaggggggtgtggagccag

SEQ ID NO: 24271 - DNA, 20 bp, synthetic construct
  source 1..20: mol_type = other DNA
gttcctgggagtatgggggc

SEQ ID NO: 24272 - DNA, 20 bp, synthetic construct
  source 1..20: mol_type = other DNA
gagtatgggggcagggagcg

SEQ ID NO: 24273 - DNA, 20 bp, synthetic construct
  source 1..20: mol_type = other DNA
gaggggggtgtggagccagg

SEQ ID NO: 24274 - DNA, 20 bp, synthetic construct
  source 1..20: mol_type = other DNA
ggctgttcctgggagtatgg

SEQ ID NO: 24275 - DNA, 20 bp, synthetic construct
  source 1..20: mol_type = other DNA
tggaggggggtgtggagcca

SEQ ID NO: 24276 - DNA, 20 bp, synthetic construct
  source 1..20: mol_type = other DNA
gagggggaggatggatggag

SEQ ID NO: 24277 - DNA, 20 bp, synthetic construct
  source 1..20: mol_type = other DNA
gcggggagaagctgtagacc

SEQ ID NO: 24278 - DNA, 20 bp, synthetic construct
  source 1..20: mol_type = other DNA
ggagtatgggggcagggagc

SEQ ID NO: 24279 - DNA, 20 bp, synthetic construct
  source 1..20: mol_type = other DNA
agggggaggatggatggagg

SEQ ID NO: 24280 - DNA, 20 bp, synthetic construct
  source 1..20: mol_type = other DNA
ctgagggggaggatggatgg

SEQ ID NO: 24281 - DNA, 20 bp, synthetic construct
  source 1..20: mol_type = other DNA
ctccctgcccccatactccc

SEQ ID NO: 24282 - DNA, 20 bp, synthetic construct
  source 1..20: mol_type = other DNA
gggagtatgggggcagggag

SEQ ID NO: 24283 - DNA, 20 bp, synthetic construct
  source 1..20: mol_type = other DNA
gagccgccccactcaaaagg

SEQ ID NO: 24284 - DNA, 20 bp, synthetic construct
  source 1..20: mol_type = other DNA
tcgccgcacgcgcaagcccg

SEQ ID NO: 24285 - DNA, 20 bp, synthetic construct
  source 1..20: mol_type = other DNA
ccgcacggctcccgcacgag

SEQ ID NO: 24286 - DNA, 20 bp, synthetic construct
  source 1..20: mol_type = other DNA
ccctgagctggttatccccg

SEQ ID NO: 24287 - DNA, 20 bp, synthetic construct
  source 1..20: mol_type = other DNA
tgtgtgacccctgtccggag

SEQ ID NO: 24288 - DNA, 20 bp, synthetic construct
  source 1..20: mol_type = other DNA
gacaatagggcgaggtcgcg

SEQ ID NO: 24289 - DNA, 20 bp, synthetic construct
  source 1..20: mol_type = other DNA
acctcacacagttgagtccg

SEQ ID NO: 24290 - DNA, 20 bp, synthetic construct
  source 1..20: mol_type = other DNA
gtgaggtccacacggactgt

SEQ ID NO: 24291 - DNA, 20 bp, synthetic construct
  source 1..20: mol_type = other DNA
cgtacagtcgctgggccggg

SEQ ID NO: 24292 - DNA, 20 bp, synthetic construct
  source 1..20: mol_type = other DNA
aggacgactcccccaggcgg

SEQ ID NO: 24293 - DNA, 20 bp, synthetic construct
  source 1..20: mol_type = other DNA
cgtgcggcgaggcctttgcg

SEQ ID NO: 24294 - DNA, 20 bp, synthetic construct
  source 1..20: mol_type = other DNA
ccctgtaggagcccagcgcg

SEQ ID NO: 24295 - DNA, 20 bp, synthetic construct
  source 1..20: mol_type = other DNA
accccaaagccgacctcccg

SEQ ID NO: 24296 - DNA, 20 bp, synthetic construct
  source 1..20: mol_type = other DNA
tggccgcactcaggacacac

SEQ ID NO: 24297 - DNA, 20 bp, synthetic construct
  source 1..20: mol_type = other DNA
ccagctcggtcctcttcgag

SEQ ID NO: 24298 - DNA, 20 bp, synthetic construct
  source 1..20: mol_type = other DNA
tgttccgtgaccctcgagca

SEQ ID NO: 24299 - DNA, 20 bp, synthetic construct
  source 1..20: mol_type = other DNA
caggcgaataacctggtgtg

SEQ ID NO: 24300 - DNA, 20 bp, synthetic construct
  source 1..20: mol_type = other DNA
gagtcgatcattgagaaaca

SEQ ID NO: 24301 - DNA, 20 bp, synthetic construct
  source 1..20: mol_type = other DNA
agtatcaagtactcacaccc

SEQ ID NO: 24302 - DNA, 20 bp, synthetic construct
  source 1..20: mol_type = other DNA
tgcctatctcccaagaatgt

SEQ ID NO: 24303 - DNA, 20 bp, synthetic construct
  source 1..20: mol_type = other DNA
tgagcaaacttggtaatgtg

SEQ ID NO: 24304 - DNA, 20 bp, synthetic construct
  source 1..20: mol_type = other DNA
taagtccatacactttccga

SEQ ID NO: 24305 - DNA, 20 bp, synthetic construct
  source 1..20: mol_type = other DNA
taaaagtcacgtgcccattg

SEQ ID NO: 24306 - DNA, 20 bp, synthetic construct
  source 1..20: mol_type = other DNA
gtacctagaagccgtgaccc

SEQ ID NO: 24307 - DNA, 20 bp, synthetic construct
  source 1..20: mol_type = other DNA
gcatatcacaagcaatacca

SEQ ID NO: 24308 - DNA, 20 bp, synthetic construct
  source 1..20: mol_type = other DNA
atgcccaaagaagtgaacct

SEQ ID NO: 24309 - DNA, 20 bp, synthetic construct
  source 1..20: mol_type = other DNA
aagaaataggaacaaagcaa

SEQ ID NO: 24310 - DNA, 20 bp, synthetic construct
  source 1..20: mol_type = other DNA
ataagaaccttagccttagg

SEQ ID NO: 24311 - DNA, 20 bp, synthetic construct
  source 1..20: mol_type = other DNA
ttatgatccttataagcccc

SEQ ID NO: 24312 - DNA, 20 bp, synthetic construct
  source 1..20: mol_type = other DNA
caccaaggacagcgcatgca

SEQ ID NO: 24313 - DNA, 20 bp, synthetic construct
  source 1..20: mol_type = other DNA
cggcacgtgcagtcagaacg

SEQ ID NO: 24314 - DNA, 20 bp, synthetic construct
  source 1..20: mol_type = other DNA
gagaacatggacaatgccgc

SEQ ID NO: 24315 - DNA, 20 bp, synthetic construct
  source 1..20: mol_type = other DNA
ggaccgcgacgcctgcgaca

SEQ ID NO: 24316 - DNA, 20 bp, synthetic construct
  source 1..20: mol_type = other DNA
tcaacacagagaagccgtcc

SEQ ID NO: 24317 - DNA, 20 bp, synthetic construct
  source 1..20: mol_type = other DNA
cagccgcagcagcttacgca

SEQ ID NO: 24318 - DNA, 20 bp, synthetic construct
  source 1..20: mol_type = other DNA
tcctccagaaccgatgagtg

SEQ ID NO: 24319 - DNA, 20 bp, synthetic construct
  source 1..20: mol_type = other DNA
tgggctgtgacagcactcgg

SEQ ID NO: 24320 - DNA, 20 bp, synthetic construct
  source 1..20: mol_type = other DNA
aagccttggaggttgcgtgg

SEQ ID NO: 24321 - DNA, 20 bp, synthetic construct
  source 1..20: mol_type = other DNA
cccaggtctggtccgagagc

SEQ ID NO: 24322 - DNA, 20 bp, synthetic construct
  source 1..20: mol_type = other DNA
gcctcggaaggcagccgaca

SEQ ID NO: 24323 - DNA, 20 bp, synthetic construct
  source 1..20: mol_type = other DNA
gctgcagatggccatcaccg

SEQ ID NO: 24324 - DNA, 20 bp, synthetic construct
  source 1..20: mol_type = other DNA
tggcgggcggcacagctcat

SEQ ID NO: 24325 - DNA, 20 bp, synthetic construct
  source 1..20: mol_type = other DNA
ttggtctccagaggcgtcag

SEQ ID NO: 24326 - DNA, 20 bp, synthetic construct
  source 1..20: mol_type = other DNA
cgaccagcaagagcgagagg

SEQ ID NO: 24327 - DNA, 20 bp, synthetic construct
  source 1..20: mol_type = other DNA
acccggacactcacaggaga

SEQ ID NO: 24328 - DNA, 20 bp, synthetic construct
  source 1..20: mol_type = other DNA
gcagctacgagcccacgtgg

SEQ ID NO: 24329 - DNA, 20 bp, synthetic construct
  source 1..20: mol_type = other DNA
tggaaggggcgatcgcacag

SEQ ID NO: 24330 - DNA, 20 bp, synthetic construct
  source 1..20: mol_type = other DNA
gcactgtctcgcggcactcg

SEQ ID NO: 24331 - DNA, 20 bp, synthetic construct
  source 1..20: mol_type = other DNA
cagggccgggtggtatgatg

SEQ ID NO: 24332 - DNA, 20 bp, synthetic construct
  source 1..20: mol_type = other DNA
caaaggacagccgaagaagg

SEQ ID NO: 24333 - DNA, 20 bp, synthetic construct
  source 1..20: mol_type = other DNA
ggccggtgtggacaataacc

SEQ ID NO: 24334 - DNA, 20 bp, synthetic construct
  source 1..20: mol_type = other DNA
ccagacccacacccaccgcg

SEQ ID NO: 24335 - DNA, 20 bp, synthetic construct
  source 1..20: mol_type = other DNA
gagtacccggcgggcgaagg

SEQ ID NO: 24336 - DNA, 20 bp, synthetic construct
  source 1..20: mol_type = other DNA
gcccagacaacccgagaaga

SEQ ID NO: 24337 - DNA, 20 bp, synthetic construct
  source 1..20: mol_type = other DNA
gccctggggccgaatctgga

SEQ ID NO: 24338 - DNA, 20 bp, synthetic construct
  source 1..20: mol_type = other DNA
cagacaccccacgaggatgg

SEQ ID NO: 24339 - DNA, 20 bp, synthetic construct
  source 1..20: mol_type = other DNA
acagtgcctgtgccgcccga

SEQ ID NO: 24340 - DNA, 20 bp, synthetic construct
  source 1..20: mol_type = other DNA
ctgaagctgtgcgtgcccgg

SEQ ID NO: 24341 - DNA, 20 bp, synthetic construct
  source 1..20: mol_type = other DNA
gcagcggtgcccgtcggcac

SEQ ID NO: 24342 - DNA, 20 bp, synthetic construct
  source 1..20: mol_type = other DNA
tgggtggcaccagcaccggg

SEQ ID NO: 24343 - DNA, 20 bp, synthetic construct
  source 1..20: mol_type = other DNA
taatatgccatgcagatccc

SEQ ID NO: 24344 - DNA, 20 bp, synthetic construct
  source 1..20: mol_type = other DNA
ctgagcaggcgacatggcag

SEQ ID NO: 24345 - DNA, 20 bp, synthetic construct
  source 1..20: mol_type = other DNA
cgagtggaaaaaaggctgtg

SEQ ID NO: 24346 - DNA, 20 bp, synthetic construct
  source 1..20: mol_type = other DNA
ggctggaagaaacattgtga

SEQ ID NO: 24347 - DNA, 20 bp, synthetic construct
  source 1..20: mol_type = other DNA
ttccctctcatcctcaggca

SEQ ID NO: 24348 - DNA, 20 bp, synthetic construct
  source 1..20: mol_type = other DNA
aaagagtctcacagtttcca

SEQ ID NO: 24349 - DNA, 20 bp, synthetic construct
  source 1..20: mol_type = other DNA
cacagataattgcatctgtg

SEQ ID NO: 24350 - DNA, 20 bp, synthetic construct
  source 1..20: mol_type = other DNA
ccatgtcgcctgctcaggtg

SEQ ID NO: 24351 - DNA, 20 bp, synthetic construct
  source 1..20: mol_type = other DNA
cctcacctgagcaggcgaca

SEQ ID NO: 24352 - DNA, 20 bp, synthetic construct
  source 1..20: mol_type = other DNA
tgtgaggtcatcagtgatca

SEQ ID NO: 24353 - DNA, 20 bp, synthetic construct
  source 1..20: mol_type = other DNA
tgcatggcatattatgagag

SEQ ID NO: 24354 - DNA, 20 bp, synthetic construct
  source 1..20: mol_type = other DNA
gccgtcatccaggaccgtct

SEQ ID NO: 24355 - DNA, 20 bp, synthetic construct
  source 1..20: mol_type = other DNA
caccacagcccagacggtcc

SEQ ID NO: 24356 - DNA, 20 bp, synthetic construct
  source 1..20: mol_type = other DNA
agtcagagcctcacctgagc

SEQ ID NO: 24357 - DNA, 20 bp, synthetic construct
  source 1..20: mol_type = other DNA
ctgtgaccaggcagccaatg

SEQ ID NO: 24358 - DNA, 20 bp, synthetic construct
  source 1..20: mol_type = other DNA
gacagacggaacgagtcctg

SEQ ID NO: 24359 - DNA, 20 bp, synthetic construct
  source 1..20: mol_type = other DNA
tacttacatgaggagccgtg

SEQ ID NO: 24360 - DNA, 20 bp, synthetic construct
  source 1..20: mol_type = other DNA
gctgtcactggtggtaatgt

SEQ ID NO: 24361 - DNA, 20 bp, synthetic construct
  source 1..20: mol_type = other DNA
aggccctgaagaaaattcgg

SEQ ID NO: 24362 - DNA, 20 bp, synthetic construct
  source 1..20: mol_type = other DNA
aagaggaccctgatcgctga

SEQ ID NO: 24363 - DNA, 20 bp, synthetic construct
  source 1..20: mol_type = other DNA
tctggcacgaggaatcaacc

SEQ ID NO: 24364 - DNA, 20 bp, synthetic construct
  source 1..20: mol_type = other DNA
cccacccctccgagcagtca

SEQ ID NO: 24365 - DNA, 20 bp, synthetic construct
  source 1..20: mol_type = other DNA
attgcccctgtcaaaatcag

SEQ ID NO: 24366 - DNA, 20 bp, synthetic construct
  source 1..20: mol_type = other DNA
ggcccgaggctcctcgcaca

SEQ ID NO: 24367 - DNA, 20 bp, synthetic construct
  source 1..20: mol_type = other DNA
gaggggtgggcggcaaatgc

SEQ ID NO: 24368 - DNA, 20 bp, synthetic construct
  source 1..20: mol_type = other DNA
cctcaccgtgtggtacatga

SEQ ID NO: 24369 - DNA, 20 bp, synthetic construct
  source 1..20: mol_type = other DNA
agaaactgatccacttcatg

SEQ ID NO: 24370 - DNA, 20 bp, synthetic construct
  source 1..20: mol_type = other DNA
agagaagagtgtgtcaatgg

SEQ ID NO: 24371 - DNA, 20 bp, synthetic construct
  source 1..20: mol_type = other DNA
ttgacaggggcaatttggtg

SEQ ID NO: 24372 - DNA, 20 bp, synthetic construct
  source 1..20: mol_type = other DNA
gaacttggagcttcggaaga

SEQ ID NO: 24373 - DNA, 20 bp, synthetic construct
  source 1..20: mol_type = other DNA
ccgagtcatgatcctcgtgg

SEQ ID NO: 24374 - DNA, 20 bp, synthetic construct
  source 1..20: mol_type = other DNA
atcccacatttcaacaccca

SEQ ID NO: 24375 - DNA, 20 bp, synthetic construct
  source 1..20: mol_type = other DNA
tcctcgcctgaacttgcgag

SEQ ID NO: 24376 - DNA, 20 bp, synthetic construct
  source 1..20: mol_type = other DNA
tgtgggacaccgggaaaaag

SEQ ID NO: 24377 - DNA, 20 bp, synthetic construct
  source 1..20: mol_type = other DNA
cctgtagtaggccacatgca

SEQ ID NO: 24378 - DNA, 20 bp, synthetic construct
  source 1..20: mol_type = other DNA
ggagggcccacagccggatg

SEQ ID NO: 24379 - DNA, 20 bp, synthetic construct
  source 1..20: mol_type = other DNA
gattcggaaaaagatgctgc

SEQ ID NO: 24380 - DNA, 20 bp, synthetic construct
  source 1..20: mol_type = other DNA
agtgtggggtgacgagcaag

SEQ ID NO: 24381 - DNA, 20 bp, synthetic construct
  source 1..20: mol_type = other DNA
acagccggatgtgggacacc

SEQ ID NO: 24382 - DNA, 20 bp, synthetic construct
  source 1..20: mol_type = other DNA
ttcggatagaggggtcgctg

SEQ ID NO: 24383 - DNA, 20 bp, synthetic construct
  source 1..20: mol_type = other DNA
tgccctgggtgttgaaatgt

SEQ ID NO: 24384 - DNA, 20 bp, synthetic construct
  source 1..20: mol_type = other DNA
agtggtttcgtgcctgtagt

SEQ ID NO: 24385 - DNA, 20 bp, synthetic construct
  source 1..20: mol_type = other DNA
gatccacaccttcccgatgc

SEQ ID NO: 24386 - DNA, 20 bp, synthetic construct
  source 1..20: mol_type = other DNA
accactcgcaagttcaggcg

SEQ ID NO: 24387 - DNA, 20 bp, synthetic construct
  source 1..20: mol_type = other DNA
gtggctgcccaggaagtgtg

SEQ ID NO: 24388 - DNA, 20 bp, synthetic construct
  source 1..20: mol_type = other DNA
tgaggcagtaccgtcggctc

SEQ ID NO: 24389 - DNA, 20 bp, synthetic construct
  source 1..20: mol_type = other DNA
tccagcgtgtagcaggcacg

SEQ ID NO: 24390 - DNA, 20 bp, synthetic construct
  source 1..20: mol_type = other DNA
agccgctacctgcgcagcga

SEQ ID NO: 24391 - DNA, 20 bp, synthetic construct
  source 1..20: mol_type = other DNA
cgcagacggagacaagccct

SEQ ID NO: 24392 - DNA, 20 bp, synthetic construct
  source 1..20: mol_type = other DNA
tctggaggagagtcacccac

SEQ ID NO: 24393 - DNA, 20 bp, synthetic construct
  source 1..20: mol_type = other DNA
ctggaccctggtcacccatg

SEQ ID NO: 24394 - DNA, 20 bp, synthetic construct
  source 1..20: mol_type = other DNA
agcggctgtcacaggacttg

SEQ ID NO: 24395 - DNA, 20 bp, synthetic construct
  source 1..20: mol_type = other DNA
cctccgaagaagcggccgtg

SEQ ID NO: 24396 - DNA, 20 bp, synthetic construct
  source 1..20: mol_type = other DNA
tacacgctggagttcaaggc

SEQ ID NO: 24397 - DNA, 20 bp, synthetic construct
  source 1..20: mol_type = other DNA
gccactacctggcacccgtg

SEQ ID NO: 24398 - DNA, 20 bp, synthetic construct
  source 1..20: mol_type = other DNA
gcggccatctcgtcctcccg

SEQ ID NO: 24399 - DNA, 20 bp, synthetic construct
  source 1..20: mol_type = other DNA
accttctattccagcactgg

SEQ ID NO: 24400 - DNA, 20 bp, synthetic construct
  source 1..20: mol_type = other DNA
tacctgacagctgagagctt

SEQ ID NO: 24401 - DNA, 20 bp, synthetic construct
  source 1..20: mol_type = other DNA
tttgcatcaggaaggtctcg

SEQ ID NO: 24402 - DNA, 20 bp, synthetic construct
  source 1..20: mol_type = other DNA
acccgacccaggacaaggca

SEQ ID NO: 24403 - DNA, 20 bp, synthetic construct
  source 1..20: mol_type = other DNA
tagtgcccagaactcacgaa

SEQ ID NO: 24404 - DNA, 20 bp, synthetic construct
  source 1..20: mol_type = other DNA
tgaatgagtatctgttgtcc

SEQ ID NO: 24405 - DNA, 20 bp, synthetic construct
  source 1..20: mol_type = other DNA
gaggtaggccgaggtagtta

SEQ ID NO: 24406 - DNA, 20 bp, synthetic construct
  source 1..20: mol_type = other DNA
cttggaacctaccctcaaag

SEQ ID NO: 24407 - DNA, 20 bp, synthetic construct
  source 1..20: mol_type = other DNA
aaagggaagaattagagccg

SEQ ID NO: 24408 - DNA, 20 bp, synthetic construct
  source 1..20: mol_type = other DNA
tatcaggcttaagatctcgg

SEQ ID NO: 24409 - DNA, 20 bp, synthetic construct
  source 1..20: mol_type = other DNA
caggttggataccagtgact

SEQ ID NO: 24410 - DNA, 20 bp, synthetic construct
  source 1..20: mol_type = other DNA
aatgcatcctacaaaaggat

SEQ ID NO: 24411 - DNA, 20 bp, synthetic construct
  source 1..20: mol_type = other DNA
cagaaagacctctgcacggg

SEQ ID NO: 24412 - DNA, 20 bp, synthetic construct
  source 1..20: mol_type = other DNA
caagtcactggtatccaacc

SEQ ID NO: 24413 - DNA, 20 bp, synthetic construct
  source 1..20: mol_type = other DNA
gctcagctgaagcatgaagc

SEQ ID NO: 24414 - DNA, 20 bp, synthetic construct
  source 1..20: mol_type = other DNA
aaaatctgttccacatgctg

SEQ ID NO: 24415 - DNA, 20 bp, synthetic construct
  source 1..20: mol_type = other DNA
agtgaatcacatttggatgt

SEQ ID NO: 24416 - DNA, 20 bp, synthetic construct
  source 1..20: mol_type = other DNA
gcttcagctgagcagtgccc

SEQ ID NO: 24417 - DNA, 20 bp, synthetic construct
  source 1..20: mol_type = other DNA
ataggcgcttctgggatcaa

SEQ ID NO: 24418 - DNA, 20 bp, synthetic construct
  source 1..20: mol_type = other DNA
gagcagggtctcctcccccc

SEQ ID NO: 24419 - DNA, 20 bp, synthetic construct
  source 1..20: mol_type = other DNA
gaggtgggggctgtctcctg

SEQ ID NO: 24420 - DNA, 20 bp, synthetic construct
  source 1..20: mol_type = other DNA
ctaatctggaagggcaggag

SEQ ID NO: 24421 - DNA, 20 bp, synthetic construct
  source 1..20: mol_type = other DNA
gcaggagaggcttgctgcca

SEQ ID NO: 24422 - DNA, 20 bp, synthetic construct
  source 1..20: mol_type = other DNA
ggaggagaccctgctctccc

SEQ ID NO: 24423 - DNA, 20 bp, synthetic construct
  source 1..20: mol_type = other DNA
aggtgggggctgtctcctgg

SEQ ID NO: 24424 - DNA, 20 bp, synthetic construct
  source 1..20: mol_type = other DNA
gggaggtgggggctgtctcc

SEQ ID NO: 24425 - DNA, 20 bp, synthetic construct
  source 1..20: mol_type = other DNA
ggcttgctgccagggagagc

SEQ ID NO: 24426 - DNA, 20 bp, synthetic construct
  source 1..20: mol_type = other DNA
gcttgctgccagggagagca

SEQ ID NO: 24427 - DNA, 20 bp, synthetic construct
  source 1..20: mol_type = other DNA
tccgatgggctaatctggaa

SEQ ID NO: 24428 - DNA, 20 bp, synthetic construct
  source 1..20: mol_type = other DNA
ggtgggggctgtctcctggg

SEQ ID NO: 24429 - DNA, 20 bp, synthetic construct
  source 1..20: mol_type = other DNA
gggggctgtctcctgggggg

SEQ ID NO: 24430 - DNA, 20 bp, synthetic construct
  source 1..20: mol_type = other DNA
atccgatgggctaatctgga

SEQ ID NO: 24431 - DNA, 20 bp, synthetic construct
  source 1..20: mol_type = other DNA
atgggctaatctggaagggc

SEQ ID NO: 24432 - DNA, 20 bp, synthetic construct
  source 1..20: mol_type = other DNA
ggcaggagaggcttgctgcc

SEQ ID NO: 24433 - DNA, 20 bp, synthetic construct
  source 1..20: mol_type = other DNA
tccgttacgtgcctcgcagg

SEQ ID NO: 24434 - DNA, 20 bp, synthetic construct
  source 1..20: mol_type = other DNA
catgcccgccgaaatctgcg

SEQ ID NO: 24435 - DNA, 20 bp, synthetic construct
  source 1..20: mol_type = other DNA
gctgagcatgaacgatctcc

SEQ ID NO: 24436 - DNA, 20 bp, synthetic construct
  source 1..20: mol_type = other DNA
ggagcaagaccatgagaaga

SEQ ID NO: 24437 - DNA, 20 bp, synthetic construct
  source 1..20: mol_type = other DNA
gtattggttgtgtcttggtg

SEQ ID NO: 24438 - DNA, 20 bp, synthetic construct
  source 1..20: mol_type = other DNA
gctccttgctaccatagtat

SEQ ID NO: 24439 - DNA, 20 bp, synthetic construct
  source 1..20: mol_type = other DNA
tgtcaccagaaacagaaggt

SEQ ID NO: 24440 - DNA, 20 bp, synthetic construct
  source 1..20: mol_type = other DNA
tctgtacaaagaccatatca

SEQ ID NO: 24441 - DNA, 20 bp, synthetic construct
  source 1..20: mol_type = other DNA
ttcatgctcagccctaccac

SEQ ID NO: 24442 - DNA, 20 bp, synthetic construct
  source 1..20: mol_type = other DNA
gaagaaggaggttcccgctg

SEQ ID NO: 24443 - DNA, 20 bp, synthetic construct
  source 1..20: mol_type = other DNA
acagacacatgaaaatccca

SEQ ID NO: 24444 - DNA, 20 bp, synthetic construct
  source 1..20: mol_type = other DNA
agtagaagaagatcatggca

SEQ ID NO: 24445 - DNA, 20 bp, synthetic construct
  source 1..20: mol_type = other DNA
ctggtgacactgcccttctg

SEQ ID NO: 24446 - DNA, 20 bp, synthetic construct
  source 1..20: mol_type = other DNA
gtggaaggagaaaccctagg

SEQ ID NO: 24447 - DNA, 20 bp, synthetic construct
  source 1..20: mol_type = other DNA
tcaggctatagaagactggg

SEQ ID NO: 24448 - DNA, 20 bp, synthetic construct
  source 1..20: mol_type = other DNA
actgtcgtgtgccacggacc

SEQ ID NO: 24449 - DNA, 20 bp, synthetic construct
  source 1..20: mol_type = other DNA
tgttctgggacatgcgcctg

SEQ ID NO: 24450 - DNA, 20 bp, synthetic construct
  source 1..20: mol_type = other DNA
ggacatgcgcctgtggcacg

SEQ ID NO: 24451 - DNA, 20 bp, synthetic construct
  source 1..20: mol_type = other DNA
accactgtctccttggtcag

SEQ ID NO: 24452 - DNA, 20 bp, synthetic construct
  source 1..20: mol_type = other DNA
agggaacagctactcactga

SEQ ID NO: 24453 - DNA, 20 bp, synthetic construct
  source 1..20: mol_type = other DNA
actcggggtgtgcctcgcgg

SEQ ID NO: 24454 - DNA, 20 bp, synthetic construct
  source 1..20: mol_type = other DNA
cgcgaggcacaccccgagtg

SEQ ID NO: 24455 - DNA, 20 bp, synthetic construct
  source 1..20: mol_type = other DNA
tcttcaactgtcgtgtgcca

SEQ ID NO: 24456 - DNA, 20 bp, synthetic construct
  source 1..20: mol_type = other DNA
ggtcccctctgcgtgctggg

SEQ ID NO: 24457 - DNA, 20 bp, synthetic construct
  source 1..20: mol_type = other DNA
cccggaaggagatcgaagcc

SEQ ID NO: 24458 - DNA, 20 bp, synthetic construct
  source 1..20: mol_type = other DNA
gcgccgcccagcacgcagag

SEQ ID NO: 24459 - DNA, 20 bp, synthetic construct
  source 1..20: mol_type = other DNA
agcccggtacctgcagcgaa

SEQ ID NO: 24460 - DNA, 20 bp, synthetic construct
  source 1..20: mol_type = other DNA
gtctccttggtcagcggagg

SEQ ID NO: 24461 - DNA, 20 bp, synthetic construct
  source 1..20: mol_type = other DNA
tcctgacccacagcccagca

SEQ ID NO: 24462 - DNA, 20 bp, synthetic construct
  source 1..20: mol_type = other DNA
tccgctgaccaaggagacag

SEQ ID NO: 24463 - DNA, 20 bp, synthetic construct
  source 1..20: mol_type = other DNA
attgccacacggtgtaccag

SEQ ID NO: 24464 - DNA, 20 bp, synthetic construct
  source 1..20: mol_type = other DNA
cttcctactaaactgaacag

SEQ ID NO: 24465 - DNA, 20 bp, synthetic construct
  source 1..20: mol_type = other DNA
gacgccagagccataatcag

SEQ ID NO: 24466 - DNA, 20 bp, synthetic construct
  source 1..20: mol_type = other DNA
caaacaagatgcgctcgtgg

SEQ ID NO: 24467 - DNA, 20 bp, synthetic construct
  source 1..20: mol_type = other DNA
aggaacgtacgttctggacg

SEQ ID NO: 24468 - DNA, 20 bp, synthetic construct
  source 1..20: mol_type = other DNA
tggagaaggcctcgtcgtgg

SEQ ID NO: 24469 - DNA, 20 bp, synthetic construct
  source 1..20: mol_type = other DNA
tttgggagagaatacgccca

SEQ ID NO: 24470 - DNA, 20 bp, synthetic construct
  source 1..20: mol_type = other DNA
gatgtacgaccgcgctgcag

SEQ ID NO: 24471 - DNA, 20 bp, synthetic construct
  source 1..20: mol_type = other DNA
gtgggtgctccctcacgcga

SEQ ID NO: 24472 - DNA, 20 bp, synthetic construct
  source 1..20: mol_type = other DNA
gaccaatatcaccacggaga

SEQ ID NO: 24473 - DNA, 20 bp, synthetic construct
  source 1..20: mol_type = other DNA
ccccagccatacctgaacgc

SEQ ID NO: 24474 - DNA, 20 bp, synthetic construct
  source 1..20: mol_type = other DNA
atgagacccttagcacgctg

SEQ ID NO: 24475 - DNA, 20 bp, synthetic construct
  source 1..20: mol_type = other DNA
tgcacacctctccatccgga

SEQ ID NO: 24476 - DNA, 20 bp, synthetic construct
  source 1..20: mol_type = other DNA
ggagtaggacatgttgtcgt

SEQ ID NO: 24477 - DNA, 20 bp, synthetic construct
  source 1..20: mol_type = other DNA
gatccgcgagctgaaggatg

SEQ ID NO: 24478 - DNA, 20 bp, synthetic construct
  source 1..20: mol_type = other DNA
gtgatcagcttctactatgg

SEQ ID NO: 24479 - DNA, 20 bp, synthetic construct
  source 1..20: mol_type = other DNA
cttctgtggacgattacatg

SEQ ID NO: 24480 - DNA, 20 bp, synthetic construct
  source 1..20: mol_type = other DNA
gtggtgtaccccgtcaccag

SEQ ID NO: 24481 - DNA, 20 bp, synthetic construct
  source 1..20: mol_type = other DNA
aaggagcccttccccgccgg

SEQ ID NO: 24482 - DNA, 20 bp, synthetic construct
  source 1..20: mol_type = other DNA
attgacagtagcatgtatcc

SEQ ID NO: 24483 - DNA, 20 bp, synthetic construct
  source 1..20: mol_type = other DNA
gaagttacagagatggagtg

SEQ ID NO: 24484 - DNA, 20 bp, synthetic construct
  source 1..20: mol_type = other DNA
gcgtaacctcgtcttccaag

SEQ ID NO: 24485 - DNA, 20 bp, synthetic construct
  source 1..20: mol_type = other DNA
tgaatggtgcgcgtcgtagg

SEQ ID NO: 24486 - DNA, 20 bp, synthetic construct
  source 1..20: mol_type = other DNA
accaagctgtatgggcccga

SEQ ID NO: 24487 - DNA, 20 bp, synthetic construct
  source 1..20: mol_type = other DNA
cctgcctctgtcgctcgctg

SEQ ID NO: 24488 - DNA, 20 bp, synthetic construct
  source 1..20: mol_type = other DNA
cggatcccttggaaacacgc

SEQ ID NO: 24489 - DNA, 20 bp, synthetic construct
  source 1..20: mol_type = other DNA
agtttaccgaattgttcctg

SEQ ID NO: 24490 - DNA, 20 bp, synthetic construct
  source 1..20: mol_type = other DNA
taaagggaagtttaaagaag

SEQ ID NO: 24491 - DNA, 20 bp, synthetic construct
  source 1..20: mol_type = other DNA
gctgcgcccaccagtctgga

SEQ ID NO: 24492 - DNA, 20 bp, synthetic construct
  source 1..20: mol_type = other DNA
aatcgacgagctgatcaagg

SEQ ID NO: 24493 - DNA, 20 bp, synthetic construct
  source 1..20: mol_type = other DNA
ctttggataccagctaccga

SEQ ID NO: 24494 - DNA, 20 bp, synthetic construct
  source 1..20: mol_type = other DNA
gctgtgttgaggtggatcaa

SEQ ID NO: 24495 - DNA, 20 bp, synthetic construct
  source 1..20: mol_type = other DNA
tcacgtgtactgtcctgaag

SEQ ID NO: 24496 - DNA, 20 bp, synthetic construct
  source 1..20: mol_type = other DNA
atctcctcaaggcccacacg

SEQ ID NO: 24497 - DNA, 20 bp, synthetic construct
  source 1..20: mol_type = other DNA
ttatacaatggagagcctcc

SEQ ID NO: 24498 - DNA, 20 bp, synthetic construct
  source 1..20: mol_type = other DNA
tcgagacataggacaacctg

SEQ ID NO: 24499 - DNA, 20 bp, synthetic construct
  source 1..20: mol_type = other DNA
tccagcataagatggcgact

SEQ ID NO: 24500 - DNA, 20 bp, synthetic construct
  source 1..20: mol_type = other DNA
gatgcgttgacatcagaggc

SEQ ID NO: 24501 - DNA, 20 bp, synthetic construct
  source 1..20: mol_type = other DNA
taaagaccgccagagggcgt

SEQ ID NO: 24502 - DNA, 20 bp, synthetic construct
  source 1..20: mol_type = other DNA
cagatgtgttgggtttactg

SEQ ID NO: 24503 - DNA, 20 bp, synthetic construct
  source 1..20: mol_type = other DNA
gtgttgccaatctcttatga

SEQ ID NO: 24504 - DNA, 20 bp, synthetic construct
  source 1..20: mol_type = other DNA
cgctggattaggcaatcagg

SEQ ID NO: 24505 - DNA, 20 bp, synthetic construct
  source 1..20: mol_type = other DNA
agaatttgtgaagacgattg

SEQ ID NO: 24506 - DNA, 20 bp, synthetic construct
  source 1..20: mol_type = other DNA
gctcggcaaaagaatattcg

SEQ ID NO: 24507 - DNA, 20 bp, synthetic construct
  source 1..20: mol_type = other DNA
ggtttatttcgtgagcagtg

SEQ ID NO: 24508 - DNA, 20 bp, synthetic construct
  source 1..20: mol_type = other DNA
aacaggtcgttatacaacac

SEQ ID NO: 24509 - DNA, 20 bp, synthetic construct
  source 1..20: mol_type = other DNA
gaaatactgtcgtactccaa

SEQ ID NO: 24510 - DNA, 20 bp, synthetic construct
  source 1..20: mol_type = other DNA
tgtcctagcaccgttccact

SEQ ID NO: 24511 - DNA, 20 bp, synthetic construct
  source 1..20: mol_type = other DNA
accacttaagctctcaaatg

SEQ ID NO: 24512 - DNA, 20 bp, synthetic construct
  source 1..20: mol_type = other DNA
ggatgtttcaatgtagcaca

SEQ ID NO: 24513 - DNA, 20 bp, synthetic construct
  source 1..20: mol_type = other DNA
gtgaacaagaaacaaacgca

SEQ ID NO: 24514 - DNA, 20 bp, synthetic construct
  source 1..20: mol_type = other DNA
gtttaagaagtgcaccatag

SEQ ID NO: 24515 - DNA, 20 bp, synthetic construct
  source 1..20: mol_type = other DNA
tgaatctataatcaccgagt

SEQ ID NO: 24516 - DNA, 20 bp, synthetic construct
  source 1..20: mol_type = other DNA
cagagagcgactttcaggag

SEQ ID NO: 24517 - DNA, 20 bp, synthetic construct
  source 1..20: mol_type = other DNA
gatcataaattacagtgtcc

SEQ ID NO: 24518 - DNA, 20 bp, synthetic construct
  source 1..20: mol_type = other DNA
tcagttgagaaatacacagt

SEQ ID NO: 24519 - DNA, 20 bp, synthetic construct
  source 1..20: mol_type = other DNA
caaaatctggatccttacag

SEQ ID NO: 24520 - DNA, 20 bp, synthetic construct
  source 1..20: mol_type = other DNA
gctcagccatttggaatcga

SEQ ID NO: 24521 - DNA, 20 bp, synthetic construct
  source 1..20: mol_type = other DNA
ccaatttatgaagtatgcct

SEQ ID NO: 24522 - DNA, 20 bp, synthetic construct
  source 1..20: mol_type = other DNA
acatgacaccaagctgatgc

SEQ ID NO: 24523 - DNA, 20 bp, synthetic construct
  source 1..20: mol_type = other DNA
ggtgcccactacgccgatgg

SEQ ID NO: 24524 - DNA, 20 bp, synthetic construct
  source 1..20: mol_type = other DNA
gagatggacagctgcgcgca

SEQ ID NO: 24525 - DNA, 20 bp, synthetic construct
  source 1..20: mol_type = other DNA
accgtcacgttcacgcgctg

SEQ ID NO: 24526 - DNA, 20 bp, synthetic construct
  source 1..20: mol_type = other DNA
gtgaacgtgacggtacggcc

SEQ ID NO: 24527 - DNA, 20 bp, synthetic construct
  source 1..20: mol_type = other DNA
ccgccaaccgagtgcccgcg

SEQ ID NO: 24528 - DNA, 20 bp, synthetic construct
  source 1..20: mol_type = other DNA
gagtcgtttctccagccccg

SEQ ID NO: 24529 - DNA, 20 bp, synthetic construct
  source 1..20: mol_type = other DNA
ttacgtccgcaggtttgccc

SEQ ID NO: 24530 - DNA, 20 bp, synthetic construct
  source 1..20: mol_type = other DNA
agcgcgtgaacgtgacggta

SEQ ID NO: 24531 - DNA, 20 bp, synthetic construct
  source 1..20: mol_type = other DNA
ctccatcctgggcaaacctg

SEQ ID NO: 24532 - DNA, 20 bp, synthetic construct
  source 1..20: mol_type = other DNA
gtggctgcggttgtcctcgg

SEQ ID NO: 24533 - DNA, 20 bp, synthetic construct
  source 1..20: mol_type = other DNA
ccctcagcgcgtgaacgtga

SEQ ID NO: 24534 - DNA, 20 bp, synthetic construct
  source 1..20: mol_type = other DNA
cgcaggtttgcccaggatgg

SEQ ID NO: 24535 - DNA, 20 bp, synthetic construct
  source 1..20: mol_type = other DNA
cagctgcgcgcagggctcgg

SEQ ID NO: 24536 - DNA, 20 bp, synthetic construct
  source 1..20: mol_type = other DNA
ggtggacccgctcagcgcca

SEQ ID NO: 24537 - DNA, 20 bp, synthetic construct
  source 1..20: mol_type = other DNA
ggcctggccatggcgctgag

SEQ ID NO: 24538 - DNA, 20 bp, synthetic construct
  source 1..20: mol_type = other DNA
gacacccaacggctacacgc

SEQ ID NO: 24539 - DNA, 20 bp, synthetic construct
  source 1..20: mol_type = other DNA
cacccgggccgagcgaaggg

SEQ ID NO: 24540 - DNA, 20 bp, synthetic construct
  source 1..20: mol_type = other DNA
aaatgaggaggatcacacca

SEQ ID NO: 24541 - DNA, 20 bp, synthetic construct
  source 1..20: mol_type = other DNA
gtcatcaaactaagacacaa

SEQ ID NO: 24542 - DNA, 20 bp, synthetic construct
  source 1..20: mol_type = other DNA
gaagcttggcataaatggcg

SEQ ID NO: 24543 - DNA, 20 bp, synthetic construct
  source 1..20: mol_type = other DNA
gatctggatgcatcaaaggt

SEQ ID NO: 24544 - DNA, 20 bp, synthetic construct
  source 1..20: mol_type = other DNA
gacacaacggctatgacccc

SEQ ID NO: 24545 - DNA, 20 bp, synthetic construct
  source 1..20: mol_type = other DNA
atttctcatctggataaatg

SEQ ID NO: 24546 - DNA, 20 bp, synthetic construct
  source 1..20: mol_type = other DNA
gatgaagcacacaacggatc

SEQ ID NO: 24547 - DNA, 20 bp, synthetic construct
  source 1..20: mol_type = other DNA
gcactggccgcagcatccgt

SEQ ID NO: 24548 - DNA, 20 bp, synthetic construct
  source 1..20: mol_type = other DNA
ccagtgcatccagactggag

SEQ ID NO: 24549 - DNA, 20 bp, synthetic construct
  source 1..20: mol_type = other DNA
ggcaccagtgtcctgaccac

SEQ ID NO: 24550 - DNA, 20 bp, synthetic construct
  source 1..20: mol_type = other DNA
catgttaataaaggggacac

SEQ ID NO: 24551 - DNA, 20 bp, synthetic construct
  source 1..20: mol_type = other DNA
ctgtcttctcgggtgcgcac

SEQ ID NO: 24552 - DNA, 20 bp, synthetic construct
  source 1..20: mol_type = other DNA
tggtgacgaggagtcctatg

SEQ ID NO: 24553 - DNA, 20 bp, synthetic construct
  source 1..20: mol_type = other DNA
agagtggtggcttgcaaatg

SEQ ID NO: 24554 - DNA, 20 bp, synthetic construct
  source 1..20: mol_type = other DNA
tgaaacaggacttcaaactg

SEQ ID NO: 24555 - DNA, 20 bp, synthetic construct
  source 1..20: mol_type = other DNA
tgcaacagcgtctactgctg

SEQ ID NO: 24556 - DNA, 20 bp, synthetic construct
  source 1..20: mol_type = other DNA
gaagcctgttccctacaaag

SEQ ID NO: 24557 - DNA, 20 bp, synthetic construct
  source 1..20: mol_type = other DNA
tatcagagaactccagagag

SEQ ID NO: 24558 - DNA, 20 bp, synthetic construct
  source 1..20: mol_type = other DNA
gttctctgatacaatcagct

SEQ ID NO: 24559 - DNA, 20 bp, synthetic construct
  source 1..20: mol_type = other DNA
ggtaattctgattctgccca

SEQ ID NO: 24560 - DNA, 20 bp, synthetic construct
  source 1..20: mol_type = other DNA
gaaatggagaagagatgcga

SEQ ID NO: 24561 - DNA, 20 bp, synthetic construct
  source 1..20: mol_type = other DNA
atagaagtcggctcaaaacg

SEQ ID NO: 24562 - DNA, 20 bp, synthetic construct
  source 1..20: mol_type = other DNA
gtcaaatctagccagaacct

SEQ ID NO: 24563 - DNA, 20 bp, synthetic construct
  source 1..20: mol_type = other DNA
gtctttctgggtcagctgag

SEQ ID NO: 24564 - DNA, 20 bp, synthetic construct
  source 1..20: mol_type = other DNA
gaatacctcagatacgggct

SEQ ID NO: 24565 - DNA, 20 bp, synthetic construct
  source 1..20: mol_type = other DNA
gtgtgaatacacatgctccc

SEQ ID NO: 24566 - DNA, 20 bp, synthetic construct
  source 1..20: mol_type = other DNA
acgggcctggatatctacga

SEQ ID NO: 24567 - DNA, 20 bp, synthetic construct
  source 1..20: mol_type = other DNA
ttgtacagaatgatataacc

SEQ ID NO: 24568 - DNA, 20 bp, synthetic construct
  source 1..20: mol_type = other DNA
aggagatgaattgatgaccc

SEQ ID NO: 24569 - DNA, 20 bp, synthetic construct
  source 1..20: mol_type = other DNA
agtaattatttgttaaccgg

SEQ ID NO: 24570 - DNA, 20 bp, synthetic construct
  source 1..20: mol_type = other DNA
agtatggaatatattcctga

SEQ ID NO: 24571 - DNA, 20 bp, synthetic construct
  source 1..20: mol_type = other DNA
taacagtttatcctgtcccc

SEQ ID NO: 24572 - DNA, 20 bp, synthetic construct
  source 1..20: mol_type = other DNA
tagtatggaatatattcctg

SEQ ID NO: 24573 - DNA, 20 bp, synthetic construct
  source 1..20: mol_type = other DNA
caagactgtggatttcacgc

SEQ ID NO: 24574 - DNA, 20 bp, synthetic construct
  source 1..20: mol_type = other DNA
ggtaaacctatgctacgcca

SEQ ID NO: 24575 - DNA, 20 bp, synthetic construct
  source 1..20: mol_type = other DNA
caagaacctaaggaaattag

SEQ ID NO: 24576 - DNA, 20 bp, synthetic construct
  source 1..20: mol_type = other DNA
aaagtgtgggatgctgtctc

SEQ ID NO: 24577 - DNA, 20 bp, synthetic construct
  source 1..20: mol_type = other DNA
taaacacattgtcaagactg

SEQ ID NO: 24578 - DNA, 20 bp, synthetic construct
  source 1..20: mol_type = other DNA
aaaagctctgtggtgcagtg

SEQ ID NO: 24579 - DNA, 20 bp, synthetic construct
  source 1..20: mol_type = other DNA
gtatctccctggcgtagcat

SEQ ID NO: 24580 - DNA, 20 bp, synthetic construct
  source 1..20: mol_type = other DNA
ataaggcgtgatgccactga

SEQ ID NO: 24581 - DNA, 20 bp, synthetic construct
  source 1..20: mol_type = other DNA
atgaagagatgcagaattga

SEQ ID NO: 24582 - DNA, 20 bp, synthetic construct
  source 1..20: mol_type = other DNA
ggagatacaggagactggat

SEQ ID NO: 24583 - DNA, 20 bp, synthetic construct
  source 1..20: mol_type = other DNA
aaggtgcggaacgctggccg

SEQ ID NO: 24584 - DNA, 20 bp, synthetic construct
  source 1..20: mol_type = other DNA
gggcagaggcggcgtgagtg

SEQ ID NO: 24585 - DNA, 20 bp, synthetic construct
  source 1..20: mol_type = other DNA
cgtgagtgcggcgttccggc

SEQ ID NO: 24586 - DNA, 20 bp, synthetic construct
  source 1..20: mol_type = other DNA
gcggcgtgagtgcggcgttc

SEQ ID NO: 24587 - DNA, 20 bp, synthetic construct
  source 1..20: mol_type = other DNA
gtgagtgcggcgttccggcc

SEQ ID NO: 24588 - DNA, 20 bp, synthetic construct
  source 1..20: mol_type = other DNA
tcaaggtgcggaacgctggc

SEQ ID NO: 24589 - DNA, 20 bp, synthetic construct
  source 1..20: mol_type = other DNA
gtgcggaacgctggccgggg

SEQ ID NO: 24590 - DNA, 20 bp, synthetic construct
  source 1..20: mol_type = other DNA
gaggggaagggacgcccggc

SEQ ID NO: 24591 - DNA, 20 bp, synthetic construct
  source 1..20: mol_type = other DNA
tcaagggcatcgtcaaggtg

SEQ ID NO: 24592 - DNA, 20 bp, synthetic construct
  source 1..20: mol_type = other DNA
cgtcccttcccctcccgccc

SEQ ID NO: 24593 - DNA, 20 bp, synthetic construct
  source 1..20: mol_type = other DNA
atcgtcaaggtgcggaacgc

SEQ ID NO: 24594 - DNA, 20 bp, synthetic construct
  source 1..20: mol_type = other DNA
tggccggggcgggaggggaa

SEQ ID NO: 24595 - DNA, 20 bp, synthetic construct
  source 1..20: mol_type = other DNA
tgcggaacgctggccggggc

SEQ ID NO: 24596 - DNA, 20 bp, synthetic construct
  source 1..20: mol_type = other DNA
gaacgctggccggggcggga

SEQ ID NO: 24597 - DNA, 20 bp, synthetic construct
  source 1..20: mol_type = other DNA
caaggtgcggaacgctggcc

SEQ ID NO: 24598 - DNA, 20 bp, synthetic construct
  source 1..20: mol_type = other DNA
ttccccagactcgatgtagg

SEQ ID NO: 24599 - DNA, 20 bp, synthetic construct
  source 1..20: mol_type = other DNA
gcagccactcgagttctcag

SEQ ID NO: 24600 - DNA, 20 bp, synthetic construct
  source 1..20: mol_type = other DNA
caatcccctgcagtaccaag

SEQ ID NO: 24601 - DNA, 20 bp, synthetic construct
  source 1..20: mol_type = other DNA
cttaccttgagaacgcgcag

SEQ ID NO: 24602 - DNA, 20 bp, synthetic construct
  source 1..20: mol_type = other DNA
ggtcaggcggcaagtagtgg

SEQ ID NO: 24603 - DNA, 20 bp, synthetic construct
  source 1..20: mol_type = other DNA
agtaccaagtggcacactgt

SEQ ID NO: 24604 - DNA, 20 bp, synthetic construct
  source 1..20: mol_type = other DNA
ctgggccgaaggtatgtgga

SEQ ID NO: 24605 - DNA, 20 bp, synthetic construct
  source 1..20: mol_type = other DNA
ctccgcctacatcgagtctg

SEQ ID NO: 24606 - DNA, 20 bp, synthetic construct
  source 1..20: mol_type = other DNA
gtaggcggagaggtcaatgg

SEQ ID NO: 24607 - DNA, 20 bp, synthetic construct
  source 1..20: mol_type = other DNA
gagggtaggcaaagggccga

SEQ ID NO: 24608 - DNA, 20 bp, synthetic construct
  source 1..20: mol_type = other DNA
catgcacctgcccccaactc

SEQ ID NO: 24609 - DNA, 20 bp, synthetic construct
  source 1..20: mol_type = other DNA
aggggacatgtgtgagcatg

SEQ ID NO: 24610 - DNA, 20 bp, synthetic construct
  source 1..20: mol_type = other DNA
cccagggagctacgacccca

SEQ ID NO: 24611 - DNA, 20 bp, synthetic construct
  source 1..20: mol_type = other DNA
ggggagggcgccttcaggag

SEQ ID NO: 24612 - DNA, 20 bp, synthetic construct
  source 1..20: mol_type = other DNA
ctggcatctacagcagccca

SEQ ID NO: 24613 - DNA, 20 bp, synthetic construct
  source 1..20: mol_type = other DNA
aggcggtctcgatcacgcgg

SEQ ID NO: 24614 - DNA, 20 bp, synthetic construct
  source 1..20: mol_type = other DNA
gaaaacgacgagaaccagag

SEQ ID NO: 24615 - DNA, 20 bp, synthetic construct
  source 1..20: mol_type = other DNA
gaaagtagaagtcgcgatcg

SEQ ID NO: 24616 - DNA, 20 bp, synthetic construct
  source 1..20: mol_type = other DNA
caggagacagtgtccgcgag

SEQ ID NO: 24617 - DNA, 20 bp, synthetic construct
  source 1..20: mol_type = other DNA
ttggagaccatctattgatg

SEQ ID NO: 24618 - DNA, 20 bp, synthetic construct
  source 1..20: mol_type = other DNA
agacctgctacgtctgagtg

SEQ ID NO: 24619 - DNA, 20 bp, synthetic construct
  source 1..20: mol_type = other DNA
ccaaagaacggactagacat

SEQ ID NO: 24620 - DNA, 20 bp, synthetic construct
  source 1..20: mol_type = other DNA
ctactgaggatatcatctcg

SEQ ID NO: 24621 - DNA, 20 bp, synthetic construct
  source 1..20: mol_type = other DNA
gtgttctcgtactgctctgg

SEQ ID NO: 24622 - DNA, 20 bp, synthetic construct
  source 1..20: mol_type = other DNA
cttgataatgagttaatgga

SEQ ID NO: 24623 - DNA, 20 bp, synthetic construct
  source 1..20: mol_type = other DNA
aggtcacccagcagaagacc

SEQ ID NO: 24624 - DNA, 20 bp, synthetic construct
  source 1..20: mol_type = other DNA
attatgcttggctttcactg

SEQ ID NO: 24625 - DNA, 20 bp, synthetic construct
  source 1..20: mol_type = other DNA
gaagcagatctcctcggaga

SEQ ID NO: 24626 - DNA, 20 bp, synthetic construct
  source 1..20: mol_type = other DNA
acatgttgctatcttcagca

SEQ ID NO: 24627 - DNA, 20 bp, synthetic construct
  source 1..20: mol_type = other DNA
agtctggctctgaagaagag

SEQ ID NO: 24628 - DNA, 20 bp, synthetic construct
  source 1..20: mol_type = other DNA
gtataactcaatgacaccgt

SEQ ID NO: 24629 - DNA, 20 bp, synthetic construct
  source 1..20: mol_type = other DNA
atgaagactggctctctacg

SEQ ID NO: 24630 - DNA, 20 bp, synthetic construct
  source 1..20: mol_type = other DNA
tgtcaccaaggactccaacg

SEQ ID NO: 24631 - DNA, 20 bp, synthetic construct
  source 1..20: mol_type = other DNA
aagtttgcaaaccacgtgag

SEQ ID NO: 24632 - DNA, 20 bp, synthetic construct
  source 1..20: mol_type = other DNA
tcctccgtcgctgacacctg

SEQ ID NO: 24633 - DNA, 20 bp, synthetic construct
  source 1..20: mol_type = other DNA
agggataaaaactggtactt

SEQ ID NO: 24634 - DNA, 20 bp, synthetic construct
  source 1..20: mol_type = other DNA
tcatcagagactctgccgag

SEQ ID NO: 24635 - DNA, 20 bp, synthetic construct
  source 1..20: mol_type = other DNA
tggaaccctggagactgcac

SEQ ID NO: 24636 - DNA, 20 bp, synthetic construct
  source 1..20: mol_type = other DNA
agtcttcatttggaaccctg

SEQ ID NO: 24637 - DNA, 20 bp, synthetic construct
  source 1..20: mol_type = other DNA
ggagaagtgtggtggcatcg

SEQ ID NO: 24638 - DNA, 20 bp, synthetic construct
  source 1..20: mol_type = other DNA
caaactctcgaaagaccagg

SEQ ID NO: 24639 - DNA, 20 bp, synthetic construct
  source 1..20: mol_type = other DNA
tcttctgtgtcaaaacgcac

SEQ ID NO: 24640 - DNA, 20 bp, synthetic construct
  source 1..20: mol_type = other DNA
caggcagctccgcaaatgga

SEQ ID NO: 24641 - DNA, 20 bp, synthetic construct
  source 1..20: mol_type = other DNA
gtcggactttgtgaaatacg

SEQ ID NO: 24642 - DNA, 20 bp, synthetic construct
  source 1..20: mol_type = other DNA
caccttgcttccctcggaga

SEQ ID NO: 24643 - DNA, 20 bp, synthetic construct
  source 1..20: mol_type = other DNA
agattagaacaagctgatcg

SEQ ID NO: 24644 - DNA, 20 bp, synthetic construct
  source 1..20: mol_type = other DNA
gaggagtcagtagcaatcaa

SEQ ID NO: 24645 - DNA, 20 bp, synthetic construct
  source 1..20: mol_type = other DNA
ggagacctaagctaaaggca

SEQ ID NO: 24646 - DNA, 20 bp, synthetic construct
  source 1..20: mol_type = other DNA
ctggcgtactaggcctgtgt

SEQ ID NO: 24647 - DNA, 20 bp, synthetic construct
  source 1..20: mol_type = other DNA
tgggcatattcttaacaacc

SEQ ID NO: 24648 - DNA, 20 bp, synthetic construct
  source 1..20: mol_type = other DNA
gatgatacgtagccaggacc

SEQ ID NO: 24649 - DNA, 20 bp, synthetic construct
  source 1..20: mol_type = other DNA
ccagtgagtcaggatccttg

SEQ ID NO: 24650 - DNA, 20 bp, synthetic construct
  source 1..20: mol_type = other DNA
attgatgaccccttcatccc

SEQ ID NO: 24651 - DNA, 20 bp, synthetic construct
  source 1..20: mol_type = other DNA
ccctggacttccacacatgg

SEQ ID NO: 24652 - DNA, 20 bp, synthetic construct
  source 1..20: mol_type = other DNA
acgtaaccctgccatgatgc

SEQ ID NO: 24653 - DNA, 20 bp, synthetic construct
  source 1..20: mol_type = other DNA
taagaatatgcccaatctca

SEQ ID NO: 24654 - DNA, 20 bp, synthetic construct
  source 1..20: mol_type = other DNA
ccctaggaacttatctacag

SEQ ID NO: 24655 - DNA, 20 bp, synthetic construct
  source 1..20: mol_type = other DNA
ggatcagctgctgcatatgg

SEQ ID NO: 24656 - DNA, 20 bp, synthetic construct
  source 1..20: mol_type = other DNA
agacacatgctgccgcatca

SEQ ID NO: 24657 - DNA, 20 bp, synthetic construct
  source 1..20: mol_type = other DNA
aggctgggcttggcctatcg

SEQ ID NO: 24658 - DNA, 20 bp, synthetic construct
  source 1..20: mol_type = other DNA
tcgcctacgcaaccagagag

SEQ ID NO: 24659 - DNA, 20 bp, synthetic construct
  source 1..20: mol_type = other DNA
cgcctacgcaaccagagaga

SEQ ID NO: 24660 - DNA, 20 bp, synthetic construct
  source 1..20: mol_type = other DNA
gtggcggatgacgctgtcga

SEQ ID NO: 24661 - DNA, 20 bp, synthetic construct
  source 1..20: mol_type = other DNA
gatgacgctgtcgagggtgc

SEQ ID NO: 24662 - DNA, 20 bp, synthetic construct
  source 1..20: mol_type = other DNA
gggcctggataattcagtgc

SEQ ID NO: 24663 - DNA, 20 bp, synthetic construct
  source 1..20: mol_type = other DNA
ggtggcggatgacgctgtcg

SEQ ID NO: 24664 - DNA, 20 bp, synthetic construct
  source 1..20: mol_type = other DNA
cagcagtgtcctgcgcacca

SEQ ID NO: 24665 - DNA, 20 bp, synthetic construct
  source 1..20: mol_type = other DNA
tgccctctctctggttgcgt

SEQ ID NO: 24666 - DNA, 20 bp, synthetic construct
  source 1..20: mol_type = other DNA
gcagcagtgtcctgcgcacc

SEQ ID NO: 24667 - DNA, 20 bp, synthetic construct
  source 1..20: mol_type = other DNA
ctgtaaagatccaggcctgg

SEQ ID NO: 24668 - DNA, 20 bp, synthetic construct
  source 1..20: mol_type = other DNA
ggataattcagtgctggtgg

SEQ ID NO: 24669 - DNA, 20 bp, synthetic construct
  source 1..20: mol_type = other DNA
ggtgctggagaagaaacggc

SEQ ID NO: 24670 - DNA, 20 bp, synthetic construct
  source 1..20: mol_type = other DNA
aaaagcagctgtaaagatcc

SEQ ID NO: 24671 - DNA, 20 bp, synthetic construct
  source 1..20: mol_type = other DNA
ctgaattatccaggccctga

SEQ ID NO: 24672 - DNA, 20 bp, synthetic construct
  source 1..20: mol_type = other DNA
gaagaaacagcagaaaatca

SEQ ID NO: 24673 - DNA, 20 bp, synthetic construct
  source 1..20: mol_type = other DNA
gtgatcatatagatactggg

SEQ ID NO: 24674 - DNA, 20 bp, synthetic construct
  source 1..20: mol_type = other DNA
atatgatcactcccaacggg

SEQ ID NO: 24675 - DNA, 20 bp, synthetic construct
  source 1..20: mol_type = other DNA
agaatccttaccttcataag

SEQ ID NO: 24676 - DNA, 20 bp, synthetic construct
  source 1..20: mol_type = other DNA
taccactcgagaatattcga

SEQ ID NO: 24677 - DNA, 20 bp, synthetic construct
  source 1..20: mol_type = other DNA
cttaggcactatgtcgtccg

SEQ ID NO: 24678 - DNA, 20 bp, synthetic construct
  source 1..20: mol_type = other DNA
catgtaggtggctattatca

SEQ ID NO: 24679 - DNA, 20 bp, synthetic construct
  source 1..20: mol_type = other DNA
aggggctcggcacagatgta

SEQ ID NO: 24680 - DNA, 20 bp, synthetic construct
  source 1..20: mol_type = other DNA
ctccgaccacggcaacccag

SEQ ID NO: 24681 - DNA, 20 bp, synthetic construct
  source 1..20: mol_type = other DNA
aatattcgaagggaggggct

SEQ ID NO: 24682 - DNA, 20 bp, synthetic construct
  source 1..20: mol_type = other DNA
cggatttccacccggacacg

SEQ ID NO: 24683 - DNA, 20 bp, synthetic construct
  source 1..20: mol_type = other DNA
ccgggtctttcttaatgcga

SEQ ID NO: 24684 - DNA, 20 bp, synthetic construct
  source 1..20: mol_type = other DNA
gtctctatactgcccagggt

SEQ ID NO: 24685 - DNA, 20 bp, synthetic construct
  source 1..20: mol_type = other DNA
ctcggacgacatagtgccta

SEQ ID NO: 24686 - DNA, 20 bp, synthetic construct
  source 1..20: mol_type = other DNA
caggagcccagtcaggatgg

SEQ ID NO: 24687 - DNA, 20 bp, synthetic construct
  source 1..20: mol_type = other DNA
tgggctcctgagcttcatgg

SEQ ID NO: 24688 - DNA, 20 bp, synthetic construct
  source 1..20: mol_type = other DNA
gcactagcgcgcgtacgaag

SEQ ID NO: 24689 - DNA, 20 bp, synthetic construct
  source 1..20: mol_type = other DNA
gccaggaggcctgcgaccgg

SEQ ID NO: 24690 - DNA, 20 bp, synthetic construct
  source 1..20: mol_type = other DNA
gagatgcgtgagaagttgtg

SEQ ID NO: 24691 - DNA, 20 bp, synthetic construct
  source 1..20: mol_type = other DNA
ccactgtagcaactcacctg

SEQ ID NO: 24692 - DNA, 20 bp, synthetic construct
  source 1..20: mol_type = other DNA
ggccgacagtaatctcacgc

SEQ ID NO: 24693 - DNA, 20 bp, synthetic construct
  source 1..20: mol_type = other DNA
ccccaggtgagttgctacag

SEQ ID NO: 24694 - DNA, 20 bp, synthetic construct
  source 1..20: mol_type = other DNA
ggggcccaacgcgaacacca

SEQ ID NO: 24695 - DNA, 20 bp, synthetic construct
  source 1..20: mol_type = other DNA
tcccagcgtgagattactgt

SEQ ID NO: 24696 - DNA, 20 bp, synthetic construct
  source 1..20: mol_type = other DNA
caacttctcacgcatctctg

SEQ ID NO: 24697 - DNA, 20 bp, synthetic construct
  source 1..20: mol_type = other DNA
tccccactcacggtcgcctc

SEQ ID NO: 24698 - DNA, 20 bp, synthetic construct
  source 1..20: mol_type = other DNA
ccaacgcgaacaccagggca

SEQ ID NO: 24699 - DNA, 20 bp, synthetic construct
  source 1..20: mol_type = other DNA
gcgctagtgcgcgtgtgcgg

SEQ ID NO: 24700 - DNA, 20 bp, synthetic construct
  source 1..20: mol_type = other DNA
tactgtcggccaccagccca

SEQ ID NO: 24701 - DNA, 20 bp, synthetic construct
  source 1..20: mol_type = other DNA
tggcttcggtggaccagcgg

SEQ ID NO: 24702 - DNA, 20 bp, synthetic construct
  source 1..20: mol_type = other DNA
gctggtccaccgaagccagg

SEQ ID NO: 24703 - DNA, 20 bp, synthetic construct
  source 1..20: mol_type = other DNA
cctgggcccaaacaaaatgg

SEQ ID NO: 24704 - DNA, 20 bp, synthetic construct
  source 1..20: mol_type = other DNA
aagctcgcggcccaacaggt

SEQ ID NO: 24705 - DNA, 20 bp, synthetic construct
  source 1..20: mol_type = other DNA
ggggtcggttgggatctgtc

SEQ ID NO: 24706 - DNA, 20 bp, synthetic construct
  source 1..20: mol_type = other DNA
aactgcagctgcgtcacccg

SEQ ID NO: 24707 - DNA, 20 bp, synthetic construct
  source 1..20: mol_type = other DNA
agctcctgcagagtgaagcg

SEQ ID NO: 24708 - DNA, 20 bp, synthetic construct
  source 1..20: mol_type = other DNA
ctggaggcgctggtgaatga

SEQ ID NO: 24709 - DNA, 20 bp, synthetic construct
  source 1..20: mol_type = other DNA
gatgtcatacacgtcctcgg

SEQ ID NO: 24710 - DNA, 20 bp, synthetic construct
  source 1..20: mol_type = other DNA
tgcccagggccataagctcg

SEQ ID NO: 24711 - DNA, 20 bp, synthetic construct
  source 1..20: mol_type = other DNA
gttcaaagtcgtccgcgtcc

SEQ ID NO: 24712 - DNA, 20 bp, synthetic construct
  source 1..20: mol_type = other DNA
tcccacactcacctccccgc

SEQ ID NO: 24713 - DNA, 20 bp, synthetic construct
  source 1..20: mol_type = other DNA
cctcggcggtcagctggaag

SEQ ID NO: 24714 - DNA, 20 bp, synthetic construct
  source 1..20: mol_type = other DNA
cacccgggggtcgctgccca

SEQ ID NO: 24715 - DNA, 20 bp, synthetic construct
  source 1..20: mol_type = other DNA
ggaggagctgaagatggaga

SEQ ID NO: 24716 - DNA, 20 bp, synthetic construct
  source 1..20: mol_type = other DNA
ccgcgtcctggagatgctgg

SEQ ID NO: 24717 - DNA, 20 bp, synthetic construct
  source 1..20: mol_type = other DNA
gagggaccacctcaggaagg

SEQ ID NO: 24718 - DNA, 20 bp, synthetic construct
  source 1..20: mol_type = other DNA
acctggagcacaatgcacgt

SEQ ID NO: 24719 - DNA, 20 bp, synthetic construct
  source 1..20: mol_type = other DNA
tgggtcaatgccaggcgatg

SEQ ID NO: 24720 - DNA, 20 bp, synthetic construct
  source 1..20: mol_type = other DNA
tccctctaggtaccaccctc

SEQ ID NO: 24721 - DNA, 20 bp, synthetic construct
  source 1..20: mol_type = other DNA
gagttctgctcgcgttacac

SEQ ID NO: 24722 - DNA, 20 bp, synthetic construct
  source 1..20: mol_type = other DNA
agagaccgtaatgcaggacc

SEQ ID NO: 24723 - DNA, 20 bp, synthetic construct
  source 1..20: mol_type = other DNA
gccggttatcaaccaggtag

SEQ ID NO: 24724 - DNA, 20 bp, synthetic construct
  source 1..20: mol_type = other DNA
aggtgacatgtatgaagtcg

SEQ ID NO: 24725 - DNA, 20 bp, synthetic construct
  source 1..20: mol_type = other DNA
gtcagccccaccaatatgca

SEQ ID NO: 24726 - DNA, 20 bp, synthetic construct
  source 1..20: mol_type = other DNA
ctgaacgtgcccctgcggga

SEQ ID NO: 24727 - DNA, 20 bp, synthetic construct
  source 1..20: mol_type = other DNA
acctcagcatccgagggcat

SEQ ID NO: 24728 - DNA, 20 bp, synthetic construct
  source 1..20: mol_type = other DNA
tggtatggcttgaagacctc

SEQ ID NO: 24729 - DNA, 20 bp, synthetic construct
  source 1..20: mol_type = other DNA
agtcttaatgccttcaacgt

SEQ ID NO: 24730 - DNA, 20 bp, synthetic construct
  source 1..20: mol_type = other DNA
gaagcggcacatgtcatgtt

SEQ ID NO: 24731 - DNA, 20 bp, synthetic construct
  source 1..20: mol_type = other DNA
gagcagaactcaaagagccc

SEQ ID NO: 24732 - DNA, 20 bp, synthetic construct
  source 1..20: mol_type = other DNA
tagcagaagccagaggccta

SEQ ID NO: 24733 - DNA, 20 bp, synthetic construct
  source 1..20: mol_type = other DNA
ggatccacacctgttagccg

SEQ ID NO: 24734 - DNA, 20 bp, synthetic construct
  source 1..20: mol_type = other DNA
attggataatgggcttcgcg

SEQ ID NO: 24735 - DNA, 20 bp, synthetic construct
  source 1..20: mol_type = other DNA
ctactacactcccgaccgca

SEQ ID NO: 24736 - DNA, 20 bp, synthetic construct
  source 1..20: mol_type = other DNA
tctgtgactgccagacatca

SEQ ID NO: 24737 - DNA, 20 bp, synthetic construct
  source 1..20: mol_type = other DNA
tatgaagcgaaataccttag

SEQ ID NO: 24738 - DNA, 20 bp, synthetic construct
  source 1..20: mol_type = other DNA
agatctgtggcccagtacac

SEQ ID NO: 24739 - DNA, 20 bp, synthetic construct
  source 1..20: mol_type = other DNA
tagcaaaggcttggacacgg

SEQ ID NO: 24740 - DNA, 20 bp, synthetic construct
  source 1..20: mol_type = other DNA
agcagacacagcatacatgg

SEQ ID NO: 24741 - DNA, 20 bp, synthetic construct
  source 1..20: mol_type = other DNA
accatgatgtgcgtgagctc

SEQ ID NO: 24742 - DNA, 20 bp, synthetic construct
  source 1..20: mol_type = other DNA
atgaagaagtcgagatgacg

SEQ ID NO: 24743 - DNA, 20 bp, synthetic construct
  source 1..20: mol_type = other DNA
ctaaaccgtctgtacgcagg

SEQ ID NO: 24744 - DNA, 20 bp, synthetic construct
  source 1..20: mol_type = other DNA
gcttacgttggaaaagcatg

SEQ ID NO: 24745 - DNA, 20 bp, synthetic construct
  source 1..20: mol_type = other DNA
gcttacagggagaacacagt

SEQ ID NO: 24746 - DNA, 20 bp, synthetic construct
  source 1..20: mol_type = other DNA
cgcatggtgctggccggcgt

SEQ ID NO: 24747 - DNA, 20 bp, synthetic construct
  source 1..20: mol_type = other DNA
tgaaaccaaagtaaccacat

SEQ ID NO: 24748 - DNA, 20 bp, synthetic construct
  source 1..20: mol_type = other DNA
tctaggccgtcatcagtgta

SEQ ID NO: 24749 - DNA, 20 bp, synthetic construct
  source 1..20: mol_type = other DNA
aatgcttcggataagatcat

SEQ ID NO: 24750 - DNA, 20 bp, synthetic construct
  source 1..20: mol_type = other DNA
ccggccactacgaactgccg

SEQ ID NO: 24751 - DNA, 20 bp, synthetic construct
  source 1..20: mol_type = other DNA
tgaagcattgagttccaaca

SEQ ID NO: 24752 - DNA, 20 bp, synthetic construct
  source 1..20: mol_type = other DNA
tgtaccggaggactgcacag

SEQ ID NO: 24753 - DNA, 20 bp, synthetic construct
  source 1..20: mol_type = other DNA
tatccgaagcattacaagca

SEQ ID NO: 24754 - DNA, 20 bp, synthetic construct
  source 1..20: mol_type = other DNA
agacaccgtgagcaggctag

SEQ ID NO: 24755 - DNA, 20 bp, synthetic construct
  source 1..20: mol_type = other DNA
gcaagccttgaggagaacca

SEQ ID NO: 24756 - DNA, 20 bp, synthetic construct
  source 1..20: mol_type = other DNA
tcacggcccagggagacatg

SEQ ID NO: 24757 - DNA, 20 bp, synthetic construct
  source 1..20: mol_type = other DNA
tcaggggcattgacgttgtg

SEQ ID NO: 24758 - DNA, 20 bp, synthetic construct
  source 1..20: mol_type = other DNA
actgcacagcgggactgaat

SEQ ID NO: 24759 - DNA, 20 bp, synthetic construct
  source 1..20: mol_type = other DNA
gctgatgaatgttatcgaga

SEQ ID NO: 24760 - DNA, 20 bp, synthetic construct
  source 1..20: mol_type = other DNA
cggtcagctttgtgtaccgg

SEQ ID NO: 24761 - DNA, 20 bp, synthetic construct
  source 1..20: mol_type = other DNA
tgtgcccaacatcatcattg

SEQ ID NO: 24762 - DNA, 20 bp, synthetic construct
  source 1..20: mol_type = other DNA
gtaaagctgaatgaaattgt

SEQ ID NO: 24763 - DNA, 20 bp, synthetic construct
  source 1..20: mol_type = other DNA
tcacggttcagagccaccgg

SEQ ID NO: 24764 - DNA, 20 bp, synthetic construct
  source 1..20: mol_type = other DNA
cctgtcccgcatccatcgtg

SEQ ID NO: 24765 - DNA, 20 bp, synthetic construct
  source 1..20: mol_type = other DNA
ggtcttacactgatcggccc

SEQ ID NO: 24766 - DNA, 20 bp, synthetic construct
  source 1..20: mol_type = other DNA
agaagaagcccctccagtcg

SEQ ID NO: 24767 - DNA, 20 bp, synthetic construct
  source 1..20: mol_type = other DNA
tcaccatcgtggtcaacggt

SEQ ID NO: 24768 - DNA, 20 bp, synthetic construct
  source 1..20: mol_type = other DNA
aagctcaccggttcatatcg

SEQ ID NO: 24769 - DNA, 20 bp, synthetic construct
  source 1..20: mol_type = other DNA
aaagaactgaacccatgggt

SEQ ID NO: 24770 - DNA, 20 bp, synthetic construct
  source 1..20: mol_type = other DNA
gatgtattcacagctgtcca

SEQ ID NO: 24771 - DNA, 20 bp, synthetic construct
  source 1..20: mol_type = other DNA
gtgtgtgcctatgaccctgt

SEQ ID NO: 24772 - DNA, 20 bp, synthetic construct
  source 1..20: mol_type = other DNA
caaagtgacaatgagcacct

SEQ ID NO: 24773 - DNA, 20 bp, synthetic construct
  source 1..20: mol_type = other DNA
ggtgagcaggcagtcgaaga

SEQ ID NO: 24774 - DNA, 20 bp, synthetic construct
  source 1..20: mol_type = other DNA
gcagccgggctatacccttg

SEQ ID NO: 24775 - DNA, 20 bp, synthetic construct
  source 1..20: mol_type = other DNA
gctgctgacatgcttctccg

SEQ ID NO: 24776 - DNA, 20 bp, synthetic construct
  source 1..20: mol_type = other DNA
ggagggtgactcttcccgca

SEQ ID NO: 24777 - DNA, 20 bp, synthetic construct
  source 1..20: mol_type = other DNA
tgcaaacacatcctgcaccg

SEQ ID NO: 24778 - DNA, 20 bp, synthetic construct
  source 1..20: mol_type = other DNA
tcgggcacgctgagcaaccg

SEQ ID NO: 24779 - DNA, 20 bp, synthetic construct
  source 1..20: mol_type = other DNA
atgctcgatcccacagtcgg

SEQ ID NO: 24780 - DNA, 20 bp, synthetic construct
  source 1..20: mol_type = other DNA
ccgacgcattagacaatgag

SEQ ID NO: 24781 - DNA, 20 bp, synthetic construct
  source 1..20: mol_type = other DNA
tgtgggatcgagcatatgtg

SEQ ID NO: 24782 - DNA, 20 bp, synthetic construct
  source 1..20: mol_type = other DNA
tcattgtgtgtattgatcaa

SEQ ID NO: 24783 - DNA, 20 bp, synthetic construct
  source 1..20: mol_type = other DNA
tcccacactcaagatacctg

SEQ ID NO: 24784 - DNA, 20 bp, synthetic construct
  source 1..20: mol_type = other DNA
gcttggacatcatgtagcca

SEQ ID NO: 24785 - DNA, 20 bp, synthetic construct
  source 1..20: mol_type = other DNA
agaaagccgcgttcagcccc

SEQ ID NO: 24786 - DNA, 20 bp, synthetic construct
  source 1..20: mol_type = other DNA
acagctcagcaagcagaact

SEQ ID NO: 24787 - DNA, 20 bp, synthetic construct
  source 1..20: mol_type = other DNA
cccagacttcagctacatgg

SEQ ID NO: 24788 - DNA, 20 bp, synthetic construct
  source 1..20: mol_type = other DNA
ggacgattctactgttgcca

SEQ ID NO: 24789 - DNA, 20 bp, synthetic construct
  source 1..20: mol_type = other DNA
gtcatacttacgcatcaagt

SEQ ID NO: 24790 - DNA, 20 bp, synthetic construct
  source 1..20: mol_type = other DNA
gagagctctgcggcgtactg

SEQ ID NO: 24791 - DNA, 20 bp, synthetic construct
  source 1..20: mol_type = other DNA
acacaagacgaagagatgtc

SEQ ID NO: 24792 - DNA, 20 bp, synthetic construct
  source 1..20: mol_type = other DNA
gaagtctcctgtacagacaa

SEQ ID NO: 24793 - DNA, 20 bp, synthetic construct
  source 1..20: mol_type = other DNA
ttagactgcagaatccgcaa

SEQ ID NO: 24794 - DNA, 20 bp, synthetic construct
  source 1..20: mol_type = other DNA
tagagggaggcgaaaaacag

SEQ ID NO: 24795 - DNA, 20 bp, synthetic construct
  source 1..20: mol_type = other DNA
tcttccatagtgcatgacca

SEQ ID NO: 24796 - DNA, 20 bp, synthetic construct
  source 1..20: mol_type = other DNA
gcaggtcaaatcttcgcctg

SEQ ID NO: 24797 - DNA, 20 bp, synthetic construct
  source 1..20: mol_type = other DNA
gtacatgggccagcggtatg

SEQ ID NO: 24798 - DNA, 20 bp, synthetic construct
  source 1..20: mol_type = other DNA
accgctggcccatgtacatg

SEQ ID NO: 24799 - DNA, 20 bp, synthetic construct
  source 1..20: mol_type = other DNA
taaacagagatgggaaacga

SEQ ID NO: 24800 - DNA, 20 bp, synthetic construct
  source 1..20: mol_type = other DNA
ggccccgtccaagttagaag

SEQ ID NO: 24801 - DNA, 20 bp, synthetic construct
  source 1..20: mol_type = other DNA
tggttcttcaaattgcacat

SEQ ID NO: 24802 - DNA, 20 bp, synthetic construct
  source 1..20: mol_type = other DNA
accaagccctgttgaaacac

SEQ ID NO: 24803 - DNA, 20 bp, synthetic construct
  source 1..20: mol_type = other DNA
gatggtgtggttcgtttgag

SEQ ID NO: 24804 - DNA, 20 bp, synthetic construct
  source 1..20: mol_type = other DNA
tgagataaacaatgaagatg

SEQ ID NO: 24805 - DNA, 20 bp, synthetic construct
  source 1..20: mol_type = other DNA
ggggccaattcatactcagg

SEQ ID NO: 24806 - DNA, 20 bp, synthetic construct
  source 1..20: mol_type = other DNA
ggagtccaaaactacttacc

SEQ ID NO: 24807 - DNA, 20 bp, synthetic construct
  source 1..20: mol_type = other DNA
gcccgacgggatagagccag

SEQ ID NO: 24808 - DNA, 20 bp, synthetic construct
  source 1..20: mol_type = other DNA
tgagtgacgaatagggacat

SEQ ID NO: 24809 - DNA, 20 bp, synthetic construct
  source 1..20: mol_type = other DNA
ggtccgatgcaacaaacccc

SEQ ID NO: 24810 - DNA, 20 bp, synthetic construct
  source 1..20: mol_type = other DNA
gtggagaactcagaaaccgc

SEQ ID NO: 24811 - DNA, 20 bp, synthetic construct
  source 1..20: mol_type = other DNA
tggccagtgtgatgtgatcg

SEQ ID NO: 24812 - DNA, 20 bp, synthetic construct
  source 1..20: mol_type = other DNA
ttctccaccagtgagaccat

SEQ ID NO: 24813 - DNA, 20 bp, synthetic construct
  source 1..20: mol_type = other DNA
gcatcaggtctttatatctg

SEQ ID NO: 24814 - DNA, 20 bp, synthetic construct
  source 1..20: mol_type = other DNA
ttccagccgagaaacagcaa

SEQ ID NO: 24815 - DNA, 20 bp, synthetic construct
  source 1..20: mol_type = other DNA
tagagattaaagacagtcgc

SEQ ID NO: 24816 - DNA, 20 bp, synthetic construct
  source 1..20: mol_type = other DNA
gcagctgtcactgtgccgta

SEQ ID NO: 24817 - DNA, 20 bp, synthetic construct
  source 1..20: mol_type = other DNA
aacaagcaatgtggctagag

SEQ ID NO: 24818 - DNA, 20 bp, synthetic construct
  source 1..20: mol_type = other DNA
cagtctagccaagaaggcac

SEQ ID NO: 24819 - DNA, 20 bp, synthetic construct
  source 1..20: mol_type = other DNA
acccaatataaggaatgttg

SEQ ID NO: 24820 - DNA, 20 bp, synthetic construct
  source 1..20: mol_type = other DNA
gcatcggaccagtgtcccta

SEQ ID NO: 24821 - DNA, 20 bp, synthetic construct
  source 1..20: mol_type = other DNA
acatacctgtggtcatggct

SEQ ID NO: 24822 - DNA, 20 bp, synthetic construct
  source 1..20: mol_type = other DNA
tgtcagagaagccagctcca

SEQ ID NO: 24823 - DNA, 20 bp, synthetic construct
  source 1..20: mol_type = other DNA
ctaccgcgcctggtatcggg

SEQ ID NO: 24824 - DNA, 20 bp, synthetic construct
  source 1..20: mol_type = other DNA
actgaaaatgggcttcacga

SEQ ID NO: 24825 - DNA, 20 bp, synthetic construct
  source 1..20: mol_type = other DNA
tggcggtagaagtagcttgg

SEQ ID NO: 24826 - DNA, 20 bp, synthetic construct
  source 1..20: mol_type = other DNA
gagctcgcgcaccctccgct

SEQ ID NO: 24827 - DNA, 20 bp, synthetic construct
  source 1..20: mol_type = other DNA
tatcgggaggtgccgaacac

SEQ ID NO: 24828 - DNA, 20 bp, synthetic construct
  source 1..20: mol_type = other DNA
acatgaacgaggccaagcgg

SEQ ID NO: 24829 - DNA, 20 bp, synthetic construct
  source 1..20: mol_type = other DNA
gttcggcacctcccgatacc

SEQ ID NO: 24830 - DNA, 20 bp, synthetic construct
  source 1..20: mol_type = other DNA
gaccagaagatcaaccaccc

SEQ ID NO: 24831 - DNA, 20 bp, synthetic construct
  source 1..20: mol_type = other DNA
gcacctcccgataccaggcg

SEQ ID NO: 24832 - DNA, 20 bp, synthetic construct
  source 1..20: mol_type = other DNA
tgcccatgtcacagacccca

SEQ ID NO: 24833 - DNA, 20 bp, synthetic construct
  source 1..20: mol_type = other DNA
atgcccatgtcacagacccc

SEQ ID NO: 24834 - DNA, 20 bp, synthetic construct
  source 1..20: mol_type = other DNA
cagtgatgtccagctggaat

SEQ ID NO: 24835 - DNA, 20 bp, synthetic construct
  source 1..20: mol_type = other DNA
gggacatgaacgaggccaag

SEQ ID NO: 24836 - DNA, 20 bp, synthetic construct
  source 1..20: mol_type = other DNA
tttcagtcgggacatgaacg

SEQ ID NO: 24837 - DNA, 20 bp, synthetic construct
  source 1..20: mol_type = other DNA
aatgggcttcacgaaggtgc

SEQ ID NO: 24838 - DNA, 20 bp, synthetic construct
  source 1..20: mol_type = other DNA
taggcatcacccttacccag

SEQ ID NO: 24839 - DNA, 20 bp, synthetic construct
  source 1..20: mol_type = other DNA
gcaccgcgatgcccacacgg

SEQ ID NO: 24840 - DNA, 20 bp, synthetic construct
  source 1..20: mol_type = other DNA
tcccgctccataggcactcg

SEQ ID NO: 24841 - DNA, 20 bp, synthetic construct
  source 1..20: mol_type = other DNA
agacttaccaagaaagatcc

SEQ ID NO: 24842 - DNA, 20 bp, synthetic construct
  source 1..20: mol_type = other DNA
agaggggaactggtgaacct

SEQ ID NO: 24843 - DNA, 20 bp, synthetic construct
  source 1..20: mol_type = other DNA
gggaggcgtagtaggccgcg

SEQ ID NO: 24844 - DNA, 20 bp, synthetic construct
  source 1..20: mol_type = other DNA
tctggacactgcatgatcac

SEQ ID NO: 24845 - DNA, 20 bp, synthetic construct
  source 1..20: mol_type = other DNA
taaagagggtccaatagatg

SEQ ID NO: 24846 - DNA, 20 bp, synthetic construct
  source 1..20: mol_type = other DNA
ggatcagcctcatcaccgag

SEQ ID NO: 24847 - DNA, 20 bp, synthetic construct
  source 1..20: mol_type = other DNA
caagccaaccgccaaaagga

SEQ ID NO: 24848 - DNA, 20 bp, synthetic construct
  source 1..20: mol_type = other DNA
cttgtgagactggtccaggt

SEQ ID NO: 24849 - DNA, 20 bp, synthetic construct
  source 1..20: mol_type = other DNA
tgtctcaccacttgaagatg

SEQ ID NO: 24850 - DNA, 20 bp, synthetic construct
  source 1..20: mol_type = other DNA
tgagtctggttactacagcc

SEQ ID NO: 24851 - DNA, 20 bp, synthetic construct
  source 1..20: mol_type = other DNA
tgatcatgcagtgtccagaa

SEQ ID NO: 24852 - DNA, 20 bp, synthetic construct
  source 1..20: mol_type = other DNA
ggctgtagtaaccagactca

SEQ ID NO: 24853 - DNA, 20 bp, synthetic construct
  source 1..20: mol_type = other DNA
tgagtcgcgagccccagaca

SEQ ID NO: 24854 - DNA, 20 bp, synthetic construct
  source 1..20: mol_type = other DNA
tgaccatgcagcggtcgcac

SEQ ID NO: 24855 - DNA, 20 bp, synthetic construct
  source 1..20: mol_type = other DNA
gctgcacgggaccattgccg

SEQ ID NO: 24856 - DNA, 20 bp, synthetic construct
  source 1..20: mol_type = other DNA
gcagagccggtccaccttcg

SEQ ID NO: 24857 - DNA, 20 bp, synthetic construct
  source 1..20: mol_type = other DNA
gagaggccacgctcatacgc

SEQ ID NO: 24858 - DNA, 20 bp, synthetic construct
  source 1..20: mol_type = other DNA
tctgagccgactggtaggga

SEQ ID NO: 24859 - DNA, 20 bp, synthetic construct
  source 1..20: mol_type = other DNA
ggcaggcgggcacctgtcca

SEQ ID NO: 24860 - DNA, 20 bp, synthetic construct
  source 1..20: mol_type = other DNA
agtggccaaaatctccccag

SEQ ID NO: 24861 - DNA, 20 bp, synthetic construct
  source 1..20: mol_type = other DNA
cagggacgcccagaggatcg

SEQ ID NO: 24862 - DNA, 20 bp, synthetic construct
  source 1..20: mol_type = other DNA
caggcttgccctgccgaccg

SEQ ID NO: 24863 - DNA, 20 bp, synthetic construct
  source 1..20: mol_type = other DNA
gccaccgggaggccacgagg

SEQ ID NO: 24864 - DNA, 20 bp, synthetic construct
  source 1..20: mol_type = other DNA
aaggggccagcccacacccg

SEQ ID NO: 24865 - DNA, 20 bp, synthetic construct
  source 1..20: mol_type = other DNA
aggagcccacagaactgctg

SEQ ID NO: 24866 - DNA, 20 bp, synthetic construct
  source 1..20: mol_type = other DNA
ttgcagccaacgagatgaac

SEQ ID NO: 24867 - DNA, 20 bp, synthetic construct
  source 1..20: mol_type = other DNA
gcctcatgggtcatggcgga

SEQ ID NO: 24868 - DNA, 20 bp, synthetic construct
  source 1..20: mol_type = other DNA
tgcgtatctgtccacgacga

SEQ ID NO: 24869 - DNA, 20 bp, synthetic construct
  source 1..20: mol_type = other DNA
tggtgtaaacagccagacgt

SEQ ID NO: 24870 - DNA, 20 bp, synthetic construct
  source 1..20: mol_type = other DNA
ggcactcacctccttggcac

SEQ ID NO: 24871 - DNA, 20 bp, synthetic construct
  source 1..20: mol_type = other DNA
attaaggaaaagttgagcca

SEQ ID NO: 24872 - DNA, 20 bp, synthetic construct
  source 1..20: mol_type = other DNA
gccaccgcgccgaactgctc

SEQ ID NO: 24873 - DNA, 20 bp, synthetic construct
  source 1..20: mol_type = other DNA
ggaaccggagcagttcggcg

SEQ ID NO: 24874 - DNA, 20 bp, synthetic construct
  source 1..20: mol_type = other DNA
cttgcaaaagaaaagtgacg

SEQ ID NO: 24875 - DNA, 20 bp, synthetic construct
  source 1..20: mol_type = other DNA
gtggaagcgctgtgcgccgc

SEQ ID NO: 24876 - DNA, 20 bp, synthetic construct
  source 1..20: mol_type = other DNA
tctgcgtgctcttcccggcg

SEQ ID NO: 24877 - DNA, 20 bp, synthetic construct
  source 1..20: mol_type = other DNA
aagtgacgtggaggatcact

SEQ ID NO: 24878 - DNA, 20 bp, synthetic construct
  source 1..20: mol_type = other DNA
tggctgtttacaccaatcta

SEQ ID NO: 24879 - DNA, 20 bp, synthetic construct
  source 1..20: mol_type = other DNA
cctgttcctccagttacagc

SEQ ID NO: 24880 - DNA, 20 bp, synthetic construct
  source 1..20: mol_type = other DNA
gcgcgcacccacccgggaac

SEQ ID NO: 24881 - DNA, 20 bp, synthetic construct
  source 1..20: mol_type = other DNA
ggggctctcatagtgctgga

SEQ ID NO: 24882 - DNA, 20 bp, synthetic construct
  source 1..20: mol_type = other DNA
tggaggaacaggaccaggtc

SEQ ID NO: 24883 - DNA, 20 bp, synthetic construct
  source 1..20: mol_type = other DNA
aaagccacgagagtaatctg

SEQ ID NO: 24884 - DNA, 20 bp, synthetic construct
  source 1..20: mol_type = other DNA
gctctgggatatgactacaa

SEQ ID NO: 24885 - DNA, 20 bp, synthetic construct
  source 1..20: mol_type = other DNA
acgcacagaacacatcaagt

SEQ ID NO: 24886 - DNA, 20 bp, synthetic construct
  source 1..20: mol_type = other DNA
gcagcttctagtggtacccg

SEQ ID NO: 24887 - DNA, 20 bp, synthetic construct
  source 1..20: mol_type = other DNA
gtacggagttgagagggaca

SEQ ID NO: 24888 - DNA, 20 bp, synthetic construct
  source 1..20: mol_type = other DNA
ggggagccaagaccatcgag

SEQ ID NO: 24889 - DNA, 20 bp, synthetic construct
  source 1..20: mol_type = other DNA
gctgaggaacaaagtatcag

SEQ ID NO: 24890 - DNA, 20 bp, synthetic construct
  source 1..20: mol_type = other DNA
aagacgacgcccatagaagc

SEQ ID NO: 24891 - DNA, 20 bp, synthetic construct
  source 1..20: mol_type = other DNA
tccacagccagtgatagcta

SEQ ID NO: 24892 - DNA, 20 bp, synthetic construct
  source 1..20: mol_type = other DNA
agaaagagaccgaatggaca

SEQ ID NO: 24893 - DNA, 20 bp, synthetic construct
  source 1..20: mol_type = other DNA
tgtcggcttcaatgaaatgg

SEQ ID NO: 24894 - DNA, 20 bp, synthetic construct
  source 1..20: mol_type = other DNA
tggaatccagaaggaccgag

SEQ ID NO: 24895 - DNA, 20 bp, synthetic construct
  source 1..20: mol_type = other DNA
tcagggcccaaagcatccca

SEQ ID NO: 24896 - DNA, 20 bp, synthetic construct
  source 1..20: mol_type = other DNA
gggccatgagtatgttgccg

SEQ ID NO: 24897 - DNA, 20 bp, synthetic construct
  source 1..20: mol_type = other DNA
gatggaggagtcccaactgg

SEQ ID NO: 24898 - DNA, 20 bp, synthetic construct
  source 1..20: mol_type = other DNA
gcgagtgaacatgccgcccg

SEQ ID NO: 24899 - DNA, 20 bp, synthetic construct
  source 1..20: mol_type = other DNA
agttcgtgtccgaggtgcag

SEQ ID NO: 24900 - DNA, 20 bp, synthetic construct
  source 1..20: mol_type = other DNA
ttgaccctcacaggatagcg

SEQ ID NO: 24901 - DNA, 20 bp, synthetic construct
  source 1..20: mol_type = other DNA
ggaaccaggcggagaaccgg

SEQ ID NO: 24902 - DNA, 20 bp, synthetic construct
  source 1..20: mol_type = other DNA
tcagcacgaagaactccgca

SEQ ID NO: 24903 - DNA, 20 bp, synthetic construct
  source 1..20: mol_type = other DNA
ggttccaggccatcagctcg

SEQ ID NO: 24904 - DNA, 20 bp, synthetic construct
  source 1..20: mol_type = other DNA
gcacggtctggcggtagtgc

SEQ ID NO: 24905 - DNA, 20 bp, synthetic construct
  source 1..20: mol_type = other DNA
caggatggagttcgtgtccg

SEQ ID NO: 24906 - DNA, 20 bp, synthetic construct
  source 1..20: mol_type = other DNA
ggtgcagaggaaggtgcacg

SEQ ID NO: 24907 - DNA, 20 bp, synthetic construct
  source 1..20: mol_type = other DNA
tgagggcgcgcacggtctgg

SEQ ID NO: 24908 - DNA, 20 bp, synthetic construct
  source 1..20: mol_type = other DNA
tccccccggccgcacacctg

SEQ ID NO: 24909 - DNA, 20 bp, synthetic construct
  source 1..20: mol_type = other DNA
ggtgcacgaggcccgagccg

SEQ ID NO: 24910 - DNA, 20 bp, synthetic construct
  source 1..20: mol_type = other DNA
cgcacacctgagggcgcgca

SEQ ID NO: 24911 - DNA, 20 bp, synthetic construct
  source 1..20: mol_type = other DNA
caagacccgccacgacccgc

SEQ ID NO: 24912 - DNA, 20 bp, synthetic construct
  source 1..20: mol_type = other DNA
gcgggtcgtggcgggtcttg

SEQ ID NO: 24913 - DNA, 20 bp, synthetic construct
  source 1..20: mol_type = other DNA
acagccgccaataagaacaa

SEQ ID NO: 24914 - DNA, 20 bp, synthetic construct
  source 1..20: mol_type = other DNA
tcttccgcccaaagagacca

SEQ ID NO: 24915 - DNA, 20 bp, synthetic construct
  source 1..20: mol_type = other DNA
ggctgtgtaagagtatccag

SEQ ID NO: 24916 - DNA, 20 bp, synthetic construct
  source 1..20: mol_type = other DNA
tgccacaccgttgaaaaggg

SEQ ID NO: 24917 - DNA, 20 bp, synthetic construct
  source 1..20: mol_type = other DNA
tcttgtttaggcatcatctg

SEQ ID NO: 24918 - DNA, 20 bp, synthetic construct
  source 1..20: mol_type = other DNA
atctccatggtctctttggg

SEQ ID NO: 24919 - DNA, 20 bp, synthetic construct
  source 1..20: mol_type = other DNA
cttacctttgttcttattgg

SEQ ID NO: 24920 - DNA, 20 bp, synthetic construct
  source 1..20: mol_type = other DNA
gcggctgtgtaagagtatcc

SEQ ID NO: 24921 - DNA, 20 bp, synthetic construct
  source 1..20: mol_type = other DNA
aagactgggccaaatctcca

SEQ ID NO: 24922 - DNA, 20 bp, synthetic construct
  source 1..20: mol_type = other DNA
cggctgtgtaagagtatcca

SEQ ID NO: 24923 - DNA, 20 bp, synthetic construct
  source 1..20: mol_type = other DNA
cggaagacaggtcaggcccc

SEQ ID NO: 24924 - DNA, 20 bp, synthetic construct
  source 1..20: mol_type = other DNA
ctttgggcggaagacaggtc

SEQ ID NO: 24925 - DNA, 20 bp, synthetic construct
  source 1..20: mol_type = other DNA
ccagtgccacaccgttgaaa

SEQ ID NO: 24926 - DNA, 20 bp, synthetic construct
  source 1..20: mol_type = other DNA
ggtctctttgggcggaagac

SEQ ID NO: 24927 - DNA, 20 bp, synthetic construct
  source 1..20: mol_type = other DNA
cagtgccacaccgttgaaaa

SEQ ID NO: 24928 - DNA, 20 bp, synthetic construct
  source 1..20: mol_type = other DNA
gctatagcagataaggaaca

SEQ ID NO: 24929 - DNA, 20 bp, synthetic construct
  source 1..20: mol_type = other DNA
accaaggcacaaattgtgca

SEQ ID NO: 24930 - DNA, 20 bp, synthetic construct
  source 1..20: mol_type = other DNA
tgcaaggcttccgttccagg

SEQ ID NO: 24931 - DNA, 20 bp, synthetic construct
  source 1..20: mol_type = other DNA
caggtagaagcccatgaaca

SEQ ID NO: 24932 - DNA, 20 bp, synthetic construct
  source 1..20: mol_type = other DNA
acatggagtggctgaaccac

SEQ ID NO: 24933 - DNA, 20 bp, synthetic construct
  source 1..20: mol_type = other DNA
ggagtggctgaaccacaggg

SEQ ID NO: 24934 - DNA, 20 bp, synthetic construct
  source 1..20: mol_type = other DNA
cagggctgccaggaaaacca

SEQ ID NO: 24935 - DNA, 20 bp, synthetic construct
  source 1..20: mol_type = other DNA
ggacgggcagcagccactgg

SEQ ID NO: 24936 - DNA, 20 bp, synthetic construct
  source 1..20: mol_type = other DNA
agaagcccatgaacatggag

SEQ ID NO: 24937 - DNA, 20 bp, synthetic construct
  source 1..20: mol_type = other DNA
aaccacagggcggggttgag

SEQ ID NO: 24938 - DNA, 20 bp, synthetic construct
  source 1..20: mol_type = other DNA
ggaggacgggcagcagccac

SEQ ID NO: 24939 - DNA, 20 bp, synthetic construct
  source 1..20: mol_type = other DNA
gttccaggaggaagctgagc

SEQ ID NO: 24940 - DNA, 20 bp, synthetic construct
  source 1..20: mol_type = other DNA
tgaggggcttggggatgagg

SEQ ID NO: 24941 - DNA, 20 bp, synthetic construct
  source 1..20: mol_type = other DNA
gggcggggttgaggggcttg

SEQ ID NO: 24942 - DNA, 20 bp, synthetic construct
  source 1..20: mol_type = other DNA
gggcttggggatgaggagga

SEQ ID NO: 24943 - DNA, 20 bp, synthetic construct
  source 1..20: mol_type = other DNA
atggccctttcaacgtcctg

SEQ ID NO: 24944 - DNA, 20 bp, synthetic construct
  source 1..20: mol_type = other DNA
ggagaataaatattatgcga

SEQ ID NO: 24945 - DNA, 20 bp, synthetic construct
  source 1..20: mol_type = other DNA
aactccctggagataaactt

SEQ ID NO: 24946 - DNA, 20 bp, synthetic construct
  source 1..20: mol_type = other DNA
caactccagttcacaaactg

SEQ ID NO: 24947 - DNA, 20 bp, synthetic construct
  source 1..20: mol_type = other DNA
acagatatcacagaaaccac

SEQ ID NO: 24948 - DNA, 20 bp, synthetic construct
  source 1..20: mol_type = other DNA
tgacgttgtcaaaaatccga

SEQ ID NO: 24949 - DNA, 20 bp, synthetic construct
  source 1..20: mol_type = other DNA
aaggtacttgggacaaaacc

SEQ ID NO: 24950 - DNA, 20 bp, synthetic construct
  source 1..20: mol_type = other DNA
agatcacgaagttgtgacaa

SEQ ID NO: 24951 - DNA, 20 bp, synthetic construct
  source 1..20: mol_type = other DNA
taaggatgcatacaaatttg

SEQ ID NO: 24952 - DNA, 20 bp, synthetic construct
  source 1..20: mol_type = other DNA
ataagaacaatgtcatctcc

SEQ ID NO: 24953 - DNA, 20 bp, synthetic construct
  source 1..20: mol_type = other DNA
agaagagttcccttcagagg

SEQ ID NO: 24954 - DNA, 20 bp, synthetic construct
  source 1..20: mol_type = other DNA
atgcagaaatacataccagg

SEQ ID NO: 24955 - DNA, 20 bp, synthetic construct
  source 1..20: mol_type = other DNA
taccattataaaaaacccaa

SEQ ID NO: 24956 - DNA, 20 bp, synthetic construct
  source 1..20: mol_type = other DNA
ggattggaattgctcagaga

SEQ ID NO: 24957 - DNA, 20 bp, synthetic construct
  source 1..20: mol_type = other DNA
aacattcacagaaaaatcag

SEQ ID NO: 24958 - DNA, 20 bp, synthetic construct
  source 1..20: mol_type = other DNA
tgttgttcgaacatcaatgg

SEQ ID NO: 24959 - DNA, 20 bp, synthetic construct
  source 1..20: mol_type = other DNA
gcactaacaacagatcatgt

SEQ ID NO: 24960 - DNA, 20 bp, synthetic construct
  source 1..20: mol_type = other DNA
ggcatcatgacgatactccc

SEQ ID NO: 24961 - DNA, 20 bp, synthetic construct
  source 1..20: mol_type = other DNA
gctgaaggagagcgacgacg

SEQ ID NO: 24962 - DNA, 20 bp, synthetic construct
  source 1..20: mol_type = other DNA
atggaataatattacggaag

SEQ ID NO: 24963 - DNA, 20 bp, synthetic construct
  source 1..20: mol_type = other DNA
tcaaccacaaaagatgacgt

SEQ ID NO: 24964 - DNA, 20 bp, synthetic construct
  source 1..20: mol_type = other DNA
gcacagatctaagaacacga

SEQ ID NO: 24965 - DNA, 20 bp, synthetic construct
  source 1..20: mol_type = other DNA
tcctgaacatctcaccgagt

SEQ ID NO: 24966 - DNA, 20 bp, synthetic construct
  source 1..20: mol_type = other DNA
aatttgatgaacttgtgcac

SEQ ID NO: 24967 - DNA, 20 bp, synthetic construct
  source 1..20: mol_type = other DNA
gaagttgaaatacgcatact

SEQ ID NO: 24968 - DNA, 20 bp, synthetic construct
  source 1..20: mol_type = other DNA
caatcgtataaagttagact

SEQ ID NO: 24969 - DNA, 20 bp, synthetic construct
  source 1..20: mol_type = other DNA
agggacatcggatcatgaca

SEQ ID NO: 24970 - DNA, 20 bp, synthetic construct
  source 1..20: mol_type = other DNA
taaaaatggcaacgtagagc

SEQ ID NO: 24971 - DNA, 20 bp, synthetic construct
  source 1..20: mol_type = other DNA
tcaacgttgtactttcctca

SEQ ID NO: 24972 - DNA, 20 bp, synthetic construct
  source 1..20: mol_type = other DNA
cattcttatccacaacatca

SEQ ID NO: 24973 - DNA, 20 bp, synthetic construct
  source 1..20: mol_type = other DNA
tgagaacaccaaccatacac

SEQ ID NO: 24974 - DNA, 20 bp, synthetic construct
  source 1..20: mol_type = other DNA
ggagctgagagagtggatcg

SEQ ID NO: 24975 - DNA, 20 bp, synthetic construct
  source 1..20: mol_type = other DNA
ttggcctcaaaaatgtcgtg

SEQ ID NO: 24976 - DNA, 20 bp, synthetic construct
  source 1..20: mol_type = other DNA
gagccggggaagctaagaga

SEQ ID NO: 24977 - DNA, 20 bp, synthetic construct
  source 1..20: mol_type = other DNA
aggagcggaaattcgagccg

SEQ ID NO: 24978 - DNA, 20 bp, synthetic construct
  source 1..20: mol_type = other DNA
cacctctacgaccccaagct

SEQ ID NO: 24979 - DNA, 20 bp, synthetic construct
  source 1..20: mol_type = other DNA
ggggtgacaggccgtcgcat

SEQ ID NO: 24980 - DNA, 20 bp, synthetic construct
  source 1..20: mol_type = other DNA
atcggcaacaacttcatgga

SEQ ID NO: 24981 - DNA, 20 bp, synthetic construct
  source 1..20: mol_type = other DNA
ccagcttggggtcgtagagg

SEQ ID NO: 24982 - DNA, 20 bp, synthetic construct
  source 1..20: mol_type = other DNA
tcaaggccatcaccaagtat

SEQ ID NO: 24983 - DNA, 20 bp, synthetic construct
  source 1..20: mol_type = other DNA
gtcagccgaggttaagaaca

SEQ ID NO: 24984 - DNA, 20 bp, synthetic construct
  source 1..20: mol_type = other DNA
tgcctacgggctgtcagccg

SEQ ID NO: 24985 - DNA, 20 bp, synthetic construct
  source 1..20: mol_type = other DNA
ttcatggacggcctcaaaga

SEQ ID NO: 24986 - DNA, 20 bp, synthetic construct
  source 1..20: mol_type = other DNA
gcatgacggcctatggcacc

SEQ ID NO: 24987 - DNA, 20 bp, synthetic construct
  source 1..20: mol_type = other DNA
gaaaggaaacaaggtgaacg

SEQ ID NO: 24988 - DNA, 20 bp, synthetic construct
  source 1..20: mol_type = other DNA
catgatggttcggtgcatga

SEQ ID NO: 24989 - DNA, 20 bp, synthetic construct
  source 1..20: mol_type = other DNA
tgcaccgaaccatcatgacc

SEQ ID NO: 24990 - DNA, 20 bp, synthetic construct
  source 1..20: mol_type = other DNA
gccttcgacatcttcgtgct

SEQ ID NO: 24991 - DNA, 20 bp, synthetic construct
  source 1..20: mol_type = other DNA
gctgcaggagatgatcgatg

SEQ ID NO: 24992 - DNA, 20 bp, synthetic construct
  source 1..20: mol_type = other DNA
acccccaggcagcggcacgg

SEQ ID NO: 24993 - DNA, 20 bp, synthetic construct
  source 1..20: mol_type = other DNA
gtgctcacttgtcaaacatg

SEQ ID NO: 24994 - DNA, 20 bp, synthetic construct
  source 1..20: mol_type = other DNA
gcccagcacgaagatgtcga

SEQ ID NO: 24995 - DNA, 20 bp, synthetic construct
  source 1..20: mol_type = other DNA
tgcatgaaggacgacagcaa

SEQ ID NO: 24996 - DNA, 20 bp, synthetic construct
  source 1..20: mol_type = other DNA
cagcaaagggaaatctgagg

SEQ ID NO: 24997 - DNA, 20 bp, synthetic construct
  source 1..20: mol_type = other DNA
ggatggctgcatcagcacca

SEQ ID NO: 24998 - DNA, 20 bp, synthetic construct
  source 1..20: mol_type = other DNA
gggccagaaccccacccctg

SEQ ID NO: 24999 - DNA, 20 bp, synthetic construct
  source 1..20: mol_type = other DNA
gtccaccgtgccgctgcctg

SEQ ID NO: 25000 - DNA, 20 bp, synthetic construct
  source 1..20: mol_type = other DNA
tgcatcagcaccaaggagct

SEQ ID NO: 25001 - DNA, 20 bp, synthetic construct
  source 1..20: mol_type = other DNA
gatgatcgatgaggtggacg

SEQ ID NO: 25002 - DNA, 20 bp, synthetic construct
  source 1..20: mol_type = other DNA
ttcgtgctgggcgctgagga

SEQ ID NO: 25003 - DNA, 20 bp, synthetic construct
  source 1..20: mol_type = other DNA
tagcactacagaatgccaag

SEQ ID NO: 25004 - DNA, 20 bp, synthetic construct
  source 1..20: mol_type = other DNA
tctgatgtgaatgctacaca

SEQ ID NO: 25005 - DNA, 20 bp, synthetic construct
  source 1..20: mol_type = other DNA
gtgctacactgtacaaactg

SEQ ID NO: 25006 - DNA, 20 bp, synthetic construct
  source 1..20: mol_type = other DNA
gtctgatgtgaatgctacac

SEQ ID NO: 25007 - DNA, 20 bp, synthetic construct
  source 1..20: mol_type = other DNA
tggatgaaagtaagacatcg

SEQ ID NO: 25008 - DNA, 20 bp, synthetic construct
  source 1..20: mol_type = other DNA
ctgaagatcaaaataatgct

SEQ ID NO: 25009 - DNA, 20 bp, synthetic construct
  source 1..20: mol_type = other DNA
gctctctcaccttcaatagt

SEQ ID NO: 25010 - DNA, 20 bp, synthetic construct
  source 1..20: mol_type = other DNA
gctaacattgtccaaaatgc

SEQ ID NO: 25011 - DNA, 20 bp, synthetic construct
  source 1..20: mol_type = other DNA
tgtacaaactgaggcatctg

SEQ ID NO: 25012 - DNA, 20 bp, synthetic construct
  source 1..20: mol_type = other DNA
gtactctgtcaacccagagc

SEQ ID NO: 25013 - DNA, 20 bp, synthetic construct
  source 1..20: mol_type = other DNA
aagacatcgtggccagctct

SEQ ID NO: 25014 - DNA, 20 bp, synthetic construct
  source 1..20: mol_type = other DNA
gaggaccacaaagaggagga

SEQ ID NO: 25015 - DNA, 20 bp, synthetic construct
  source 1..20: mol_type = other DNA
agaggaccacaaagaggagg

SEQ ID NO: 25016 - DNA, 20 bp, synthetic construct
  source 1..20: mol_type = other DNA
atgccaagaggaccacaaag

SEQ ID NO: 25017 - DNA, 20 bp, synthetic construct
  source 1..20: mol_type = other DNA
agctataaatggaacagcag

SEQ ID NO: 25018 - DNA, 20 bp, synthetic construct
  source 1..20: mol_type = other DNA
agcctattgcagtcccacgg

SEQ ID NO: 25019 - DNA, 20 bp, synthetic construct
  source 1..20: mol_type = other DNA
gtaggagagaccaagccgtg

SEQ ID NO: 25020 - DNA, 20 bp, synthetic construct
  source 1..20: mol_type = other DNA
ggaaggtcctaagtacagac

SEQ ID NO: 25021 - DNA, 20 bp, synthetic construct
  source 1..20: mol_type = other DNA
gctccagatgagtagaacgt

SEQ ID NO: 25022 - DNA, 20 bp, synthetic construct
  source 1..20: mol_type = other DNA
aggcctgcgggtactaccag

SEQ ID NO: 25023 - DNA, 20 bp, synthetic construct
  source 1..20: mol_type = other DNA
catgtccagcagttccaatg

SEQ ID NO: 25024 - DNA, 20 bp, synthetic construct
  source 1..20: mol_type = other DNA
gcgacgcgactagcagctgt

SEQ ID NO: 25025 - DNA, 20 bp, synthetic construct
  source 1..20: mol_type = other DNA
gctcctcgcaccacaccagg

SEQ ID NO: 25026 - DNA, 20 bp, synthetic construct
  source 1..20: mol_type = other DNA
accgagcttcgggattaccg

SEQ ID NO: 25027 - DNA, 20 bp, synthetic construct
  source 1..20: mol_type = other DNA
gagtctgaatcctggacgag

SEQ ID NO: 25028 - DNA, 20 bp, synthetic construct
  source 1..20: mol_type = other DNA
gaaggcaactcaacaccctg

SEQ ID NO: 25029 - DNA, 20 bp, synthetic construct
  source 1..20: mol_type = other DNA
gcccacacaaaacagaccca

SEQ ID NO: 25030 - DNA, 20 bp, synthetic construct
  source 1..20: mol_type = other DNA
cgccgccactgccacaacgc

SEQ ID NO: 25031 - DNA, 20 bp, synthetic construct
  source 1..20: mol_type = other DNA
gagtccggacgcacacacag

SEQ ID NO: 25032 - DNA, 20 bp, synthetic construct
  source 1..20: mol_type = other DNA
aggaagtggcacgcctgctg

SEQ ID NO: 25033 - DNA, 20 bp, synthetic construct
  source 1..20: mol_type = other DNA
atacagtatgcattggacca

SEQ ID NO: 25034 - DNA, 20 bp, synthetic construct
  source 1..20: mol_type = other DNA
tgctggcagcactaaccacc

SEQ ID NO: 25035 - DNA, 20 bp, synthetic construct
  source 1..20: mol_type = other DNA
tgcatactgtataagcccag

SEQ ID NO: 25036 - DNA, 20 bp, synthetic construct
  source 1..20: mol_type = other DNA
ataacagatggcgtagacca

SEQ ID NO: 25037 - DNA, 20 bp, synthetic construct
  source 1..20: mol_type = other DNA
caggtattcgtggacaccgt

SEQ ID NO: 25038 - DNA, 20 bp, synthetic construct
  source 1..20: mol_type = other DNA
agtggctgtatcatgtgaca

SEQ ID NO: 25039 - DNA, 20 bp, synthetic construct
  source 1..20: mol_type = other DNA
aaggctgtttgcgaaaatgg

SEQ ID NO: 25040 - DNA, 20 bp, synthetic construct
  source 1..20: mol_type = other DNA
gttgctgtggcaggtattcg

SEQ ID NO: 25041 - DNA, 20 bp, synthetic construct
  source 1..20: mol_type = other DNA
cttgaccgtcacctcaatcc

SEQ ID NO: 25042 - DNA, 20 bp, synthetic construct
  source 1..20: mol_type = other DNA
tgccagagacataccaggcg

SEQ ID NO: 25043 - DNA, 20 bp, synthetic construct
  source 1..20: mol_type = other DNA
ccgcgggcacaggcgaactc

SEQ ID NO: 25044 - DNA, 20 bp, synthetic construct
  source 1..20: mol_type = other DNA
aggcaggggacaataacaga

SEQ ID NO: 25045 - DNA, 20 bp, synthetic construct
  source 1..20: mol_type = other DNA
ccagggcgtgaacgtcaccc

SEQ ID NO: 25046 - DNA, 20 bp, synthetic construct
  source 1..20: mol_type = other DNA
tcatctctaccagcatgctt

SEQ ID NO: 25047 - DNA, 20 bp, synthetic construct
  source 1..20: mol_type = other DNA
ccaggacgcaaggctccttg

SEQ ID NO: 25048 - DNA, 20 bp, synthetic construct
  source 1..20: mol_type = other DNA
agccttcaacgtaaagtccg

SEQ ID NO: 25049 - DNA, 20 bp, synthetic construct
  source 1..20: mol_type = other DNA
catctctgatcattagtggg

SEQ ID NO: 25050 - DNA, 20 bp, synthetic construct
  source 1..20: mol_type = other DNA
tatccttacgcataaccttg

SEQ ID NO: 25051 - DNA, 20 bp, synthetic construct
  source 1..20: mol_type = other DNA
tcatgctctgaccatcacat

SEQ ID NO: 25052 - DNA, 20 bp, synthetic construct
  source 1..20: mol_type = other DNA
gaccccaagcaataccggtg

SEQ ID NO: 25053 - DNA, 20 bp, synthetic construct
  source 1..20: mol_type = other DNA
ttactgtctggtgctaatga

SEQ ID NO: 25054 - DNA, 20 bp, synthetic construct
  source 1..20: mol_type = other DNA
acttcattatatatcctggc

SEQ ID NO: 25055 - DNA, 20 bp, synthetic construct
  source 1..20: mol_type = other DNA
ttgaatacaagccagaagta

SEQ ID NO: 25056 - DNA, 20 bp, synthetic construct
  source 1..20: mol_type = other DNA
gcatttaacaaactttatag

SEQ ID NO: 25057 - DNA, 20 bp, synthetic construct
  source 1..20: mol_type = other DNA
actttagtggttcaatccaa

SEQ ID NO: 25058 - DNA, 20 bp, synthetic construct
  source 1..20: mol_type = other DNA
agtgcgttcacaatcagttg

SEQ ID NO: 25059 - DNA, 20 bp, synthetic construct
  source 1..20: mol_type = other DNA
tcagacctaagtaatatgga

SEQ ID NO: 25060 - DNA, 20 bp, synthetic construct
  source 1..20: mol_type = other DNA
gacagatccagttgagtatg

SEQ ID NO: 25061 - DNA, 20 bp, synthetic construct
  source 1..20: mol_type = other DNA
tgggagacttgacgatctca

SEQ ID NO: 25062 - DNA, 20 bp, synthetic construct
  source 1..20: mol_type = other DNA
ttataccacaggcaaccttg

SEQ ID NO: 25063 - DNA, 20 bp, synthetic construct
  source 1..20: mol_type = other DNA
agcatcacgcgccccaacgc

SEQ ID NO: 25064 - DNA, 20 bp, synthetic construct
  source 1..20: mol_type = other DNA
aatgatacgcttcattccag

SEQ ID NO: 25065 - DNA, 20 bp, synthetic construct
  source 1..20: mol_type = other DNA
ttgcgaagacagaatcaagc

SEQ ID NO: 25066 - DNA, 20 bp, synthetic construct
  source 1..20: mol_type = other DNA
cattgcataggctatgactg

SEQ ID NO: 25067 - DNA, 20 bp, synthetic construct
  source 1..20: mol_type = other DNA
tgcagatggcgggagcattg

SEQ ID NO: 25068 - DNA, 20 bp, synthetic construct
  source 1..20: mol_type = other DNA
agggtacatgcagtcggcac

SEQ ID NO: 25069 - DNA, 20 bp, synthetic construct
  source 1..20: mol_type = other DNA
agagtcgccggaaacagcag

SEQ ID NO: 25070 - DNA, 20 bp, synthetic construct
  source 1..20: mol_type = other DNA
gcagccctcttcttacaaca

SEQ ID NO: 25071 - DNA, 20 bp, synthetic construct
  source 1..20: mol_type = other DNA
cagagtccggaaccttgctg

SEQ ID NO: 25072 - DNA, 20 bp, synthetic construct
  source 1..20: mol_type = other DNA
gagctgtcccaacggcatgg

SEQ ID NO: 25073 - DNA, 20 bp, synthetic construct
  source 1..20: mol_type = other DNA
gaaggaattcggctggcctc

SEQ ID NO: 25074 - DNA, 20 bp, synthetic construct
  source 1..20: mol_type = other DNA
ggaccgggtccggtacatgg

SEQ ID NO: 25075 - DNA, 20 bp, synthetic construct
  source 1..20: mol_type = other DNA
tgggcggcatcatccaagaa

SEQ ID NO: 25076 - DNA, 20 bp, synthetic construct
  source 1..20: mol_type = other DNA
gctgccagtttcatcctcag

SEQ ID NO: 25077 - DNA, 20 bp, synthetic construct
  source 1..20: mol_type = other DNA
ccctcacctgcatgcttgtg

SEQ ID NO: 25078 - DNA, 20 bp, synthetic construct
  source 1..20: mol_type = other DNA
tggggttactgtatcaactg

SEQ ID NO: 25079 - DNA, 20 bp, synthetic construct
  source 1..20: mol_type = other DNA
tctatggatatactctgggt

SEQ ID NO: 25080 - DNA, 20 bp, synthetic construct
  source 1..20: mol_type = other DNA
agatactagaccagtctgag

SEQ ID NO: 25081 - DNA, 20 bp, synthetic construct
  source 1..20: mol_type = other DNA
gtcccaacatgagtagatgc

SEQ ID NO: 25082 - DNA, 20 bp, synthetic construct
  source 1..20: mol_type = other DNA
aggtaagataccatcagaca

SEQ ID NO: 25083 - DNA, 20 bp, synthetic construct
  source 1..20: mol_type = other DNA
tgacagacgaatcagcacaa

SEQ ID NO: 25084 - DNA, 20 bp, synthetic construct
  source 1..20: mol_type = other DNA
ccatggagggtatgaaacag

SEQ ID NO: 25085 - DNA, 20 bp, synthetic construct
  source 1..20: mol_type = other DNA
gtagccccagcatatatcac

SEQ ID NO: 25086 - DNA, 20 bp, synthetic construct
  source 1..20: mol_type = other DNA
gctttgagacaatagtgtag

SEQ ID NO: 25087 - DNA, 20 bp, synthetic construct
  source 1..20: mol_type = other DNA
acagtcctgggagtatatgc

SEQ ID NO: 25088 - DNA, 20 bp, synthetic construct
  source 1..20: mol_type = other DNA
tggtgtgtgtacacgatatg

SEQ ID NO: 25089 - DNA, 20 bp, synthetic construct
  source 1..20: mol_type = other DNA
cttgattcgtaccacttcag

SEQ ID NO: 25090 - DNA, 20 bp, synthetic construct
  source 1..20: mol_type = other DNA
aagagctatcacttccacat

SEQ ID NO: 25091 - DNA, 20 bp, synthetic construct
  source 1..20: mol_type = other DNA
atggagaaattagcaaacca

SEQ ID NO: 25092 - DNA, 20 bp, synthetic construct
  source 1..20: mol_type = other DNA
cctaggaacagagtcccatg

SEQ ID NO: 25093 - DNA, 20 bp, synthetic construct
  source 1..20: mol_type = other DNA
gacaccctggaagtacgcga

SEQ ID NO: 25094 - DNA, 20 bp, synthetic construct
  source 1..20: mol_type = other DNA
gttcttgctgctgataacgg

SEQ ID NO: 25095 - DNA, 20 bp, synthetic construct
  source 1..20: mol_type = other DNA
gtcgctgtggaaatacacgg

SEQ ID NO: 25096 - DNA, 20 bp, synthetic construct
  source 1..20: mol_type = other DNA
gggctacacattaagtgacg

SEQ ID NO: 25097 - DNA, 20 bp, synthetic construct
  source 1..20: mol_type = other DNA
atactgaccggagaaagcta

SEQ ID NO: 25098 - DNA, 20 bp, synthetic construct
  source 1..20: mol_type = other DNA
catctggaccatcgaagcag

SEQ ID NO: 25099 - DNA, 20 bp, synthetic construct
  source 1..20: mol_type = other DNA
tgccctccagacggtacccg

SEQ ID NO: 25100 - DNA, 20 bp, synthetic construct
  source 1..20: mol_type = other DNA
cccgtccgtcgtagatatgg

SEQ ID NO: 25101 - DNA, 20 bp, synthetic construct
  source 1..20: mol_type = other DNA
gaccctggcatacccgaaag

SEQ ID NO: 25102 - DNA, 20 bp, synthetic construct
  source 1..20: mol_type = other DNA
gggtagaagtcagggaaccc

SEQ ID NO: 25103 - DNA, 20 bp, synthetic construct
  source 1..20: mol_type = other DNA
ggccagtcaattgatacccc

SEQ ID NO: 25104 - DNA, 20 bp, synthetic construct
  source 1..20: mol_type = other DNA
gggcatatcccggctcacac

SEQ ID NO: 25105 - DNA, 20 bp, synthetic construct
  source 1..20: mol_type = other DNA
gttactgtgcccaaggacta

SEQ ID NO: 25106 - DNA, 20 bp, synthetic construct
  source 1..20: mol_type = other DNA
atggtgatgaaatctccaga

SEQ ID NO: 25107 - DNA, 20 bp, synthetic construct
  source 1..20: mol_type = other DNA
ggcattgttatggtactccg

SEQ ID NO: 25108 - DNA, 20 bp, synthetic construct
  source 1..20: mol_type = other DNA
taaggtgtgatatagacgta

SEQ ID NO: 25109 - DNA, 20 bp, synthetic construct
  source 1..20: mol_type = other DNA
ttggacgaagtagtagaccc

SEQ ID NO: 25110 - DNA, 20 bp, synthetic construct
  source 1..20: mol_type = other DNA
gtggagatgtgccctaggat

SEQ ID NO: 25111 - DNA, 20 bp, synthetic construct
  source 1..20: mol_type = other DNA
tagacgtagggcaccatgtg

SEQ ID NO: 25112 - DNA, 20 bp, synthetic construct
  source 1..20: mol_type = other DNA
actcgctgaagtacccatca

SEQ ID NO: 25113 - DNA, 20 bp, synthetic construct
  source 1..20: mol_type = other DNA
ggtcgttcagggaaacccca

SEQ ID NO: 25114 - DNA, 20 bp, synthetic construct
  source 1..20: mol_type = other DNA
aataggtcaaaagcatagac

SEQ ID NO: 25115 - DNA, 20 bp, synthetic construct
  source 1..20: mol_type = other DNA
ttaaccctttagctggccta

SEQ ID NO: 25116 - DNA, 20 bp, synthetic construct
  source 1..20: mol_type = other DNA
agaacataagcactcaccaa

SEQ ID NO: 25117 - DNA, 20 bp, synthetic construct
  source 1..20: mol_type = other DNA
atcttgcttgggcacaacct

SEQ ID NO: 25118 - DNA, 20 bp, synthetic construct
  source 1..20: mol_type = other DNA
caagacctcctccaaaacca

SEQ ID NO: 25119 - DNA, 20 bp, synthetic construct
  source 1..20: mol_type = other DNA
ttgtggaatccattgaagag

SEQ ID NO: 25120 - DNA, 20 bp, synthetic construct
  source 1..20: mol_type = other DNA
ggtcaggatggctaactggt

SEQ ID NO: 25121 - DNA, 20 bp, synthetic construct
  source 1..20: mol_type = other DNA
aaaccatggagaaggacaag

SEQ ID NO: 25122 - DNA, 20 bp, synthetic construct
  source 1..20: mol_type = other DNA
ttggtctgtcttgatcagca

SEQ ID NO: 25123 - DNA, 20 bp, synthetic construct
  source 1..20: mol_type = other DNA
acacggacgtgaaacaccgc

SEQ ID NO: 25124 - DNA, 20 bp, synthetic construct
  source 1..20: mol_type = other DNA
agattggaaccagaccacaa

SEQ ID NO: 25125 - DNA, 20 bp, synthetic construct
  source 1..20: mol_type = other DNA
tggttccaatctccccacac

SEQ ID NO: 25126 - DNA, 20 bp, synthetic construct
  source 1..20: mol_type = other DNA
tcagcttctccatcagtatg

SEQ ID NO: 25127 - DNA, 20 bp, synthetic construct
  source 1..20: mol_type = other DNA
tatgtgattagctctcggct

SEQ ID NO: 25128 - DNA, 20 bp, synthetic construct
  source 1..20: mol_type = other DNA
cttaacggatgtctctgggg

SEQ ID NO: 25129 - DNA, 20 bp, synthetic construct
  source 1..20: mol_type = other DNA
ggagatcgatgagttggttg

SEQ ID NO: 25130 - DNA, 20 bp, synthetic construct
  source 1..20: mol_type = other DNA
catactcgtgatggaaatca

SEQ ID NO: 25131 - DNA, 20 bp, synthetic construct
  source 1..20: mol_type = other DNA
tgatacttacttgtagagaa

SEQ ID NO: 25132 - DNA, 20 bp, synthetic construct
  source 1..20: mol_type = other DNA
cactaccatgactatcagga

SEQ ID NO: 25133 - DNA, 20 bp, synthetic construct
  source 1..20: mol_type = other DNA
gaaacaccgctggaaggcgg

SEQ ID NO: 25134 - DNA, 20 bp, synthetic construct
  source 1..20: mol_type = other DNA
tccacagcgccctggccatg

SEQ ID NO: 25135 - DNA, 20 bp, synthetic construct
  source 1..20: mol_type = other DNA
gtctctggggtggtgtgcag

SEQ ID NO: 25136 - DNA, 20 bp, synthetic construct
  source 1..20: mol_type = other DNA
tgttcttccaggccttcttg

SEQ ID NO: 25137 - DNA, 20 bp, synthetic construct
  source 1..20: mol_type = other DNA
caccttcacaatgacatcca

SEQ ID NO: 25138 - DNA, 20 bp, synthetic construct
  source 1..20: mol_type = other DNA
tcttagacaggaatcgcccg

SEQ ID NO: 25139 - DNA, 20 bp, synthetic construct
  source 1..20: mol_type = other DNA
cttaaggacttaccgatgtg

SEQ ID NO: 25140 - DNA, 20 bp, synthetic construct
  source 1..20: mol_type = other DNA
gagccaacaccggataacct

SEQ ID NO: 25141 - DNA, 20 bp, synthetic construct
  source 1..20: mol_type = other DNA
gtgtaggggtccgtccctgg

SEQ ID NO: 25142 - DNA, 20 bp, synthetic construct
  source 1..20: mol_type = other DNA
tcccccactctccgatcgtg

SEQ ID NO: 25143 - DNA, 20 bp, synthetic construct
  source 1..20: mol_type = other DNA
ttagttgcaaactccaacac

SEQ ID NO: 25144 - DNA, 20 bp, synthetic construct
  source 1..20: mol_type = other DNA
gtattatggagttactccct

SEQ ID NO: 25145 - DNA, 20 bp, synthetic construct
  source 1..20: mol_type = other DNA
gcagcagcccaataacaacc

SEQ ID NO: 25146 - DNA, 20 bp, synthetic construct
  source 1..20: mol_type = other DNA
agagttctggcaattaccag

SEQ ID NO: 25147 - DNA, 20 bp, synthetic construct
  source 1..20: mol_type = other DNA
caaacatcgatggcctactg

SEQ ID NO: 25148 - DNA, 20 bp, synthetic construct
  source 1..20: mol_type = other DNA
actgctacttccgaatccca

SEQ ID NO: 25149 - DNA, 20 bp, synthetic construct
  source 1..20: mol_type = other DNA
ggtgcccttgtagtgaatgc

SEQ ID NO: 25150 - DNA, 20 bp, synthetic construct
  source 1..20: mol_type = other DNA
tgaggaactaatgatgactg

SEQ ID NO: 25151 - DNA, 20 bp, synthetic construct
  source 1..20: mol_type = other DNA
tcctcctctcctggacccgt

SEQ ID NO: 25152 - DNA, 20 bp, synthetic construct
  source 1..20: mol_type = other DNA
acagcaaacggatccccttg

SEQ ID NO: 25153 - DNA, 20 bp, synthetic construct
  source 1..20: mol_type = other DNA
tgtacacgtcgtattcgccc

SEQ ID NO: 25154 - DNA, 20 bp, synthetic construct
  source 1..20: mol_type = other DNA
ctgcgagacctacatgtcgg

SEQ ID NO: 25155 - DNA, 20 bp, synthetic construct
  source 1..20: mol_type = other DNA
gctgaacttcacgtcggaca

SEQ ID NO: 25156 - DNA, 20 bp, synthetic construct
  source 1..20: mol_type = other DNA
cattggcaaagatcctccga

SEQ ID NO: 25157 - DNA, 20 bp, synthetic construct
  source 1..20: mol_type = other DNA
agaagaatgagcggttactg

SEQ ID NO: 25158 - DNA, 20 bp, synthetic construct
  source 1..20: mol_type = other DNA
gaaacttaaggacctgtcca

SEQ ID NO: 25159 - DNA, 20 bp, synthetic construct
  source 1..20: mol_type = other DNA
accgttgagttcaaccacac

SEQ ID NO: 25160 - DNA, 20 bp, synthetic construct
  source 1..20: mol_type = other DNA
gggcagcgcctcaccgttgg

SEQ ID NO: 25161 - DNA, 20 bp, synthetic construct
  source 1..20: mol_type = other DNA
caacatggaggaccttacgg

SEQ ID NO: 25162 - DNA, 20 bp, synthetic construct
  source 1..20: mol_type = other DNA
actgaagctcctgtcggtga

SEQ ID NO: 25163 - DNA, 20 bp, synthetic construct
  source 1..20: mol_type = other DNA
agtgggcggcgttctgctgt

SEQ ID NO: 25164 - DNA, 20 bp, synthetic construct
  source 1..20: mol_type = other DNA
gatagtcaaactccggctcg

SEQ ID NO: 25165 - DNA, 20 bp, synthetic construct
  source 1..20: mol_type = other DNA
cctgcggctctgcgacatgc

SEQ ID NO: 25166 - DNA, 20 bp, synthetic construct
  source 1..20: mol_type = other DNA
gaacgagataaaaggcccga

SEQ ID NO: 25167 - DNA, 20 bp, synthetic construct
  source 1..20: mol_type = other DNA
gcccgaaggatacaacctga

SEQ ID NO: 25168 - DNA, 20 bp, synthetic construct
  source 1..20: mol_type = other DNA
ctgtgagcggccactaaccc

SEQ ID NO: 25169 - DNA, 20 bp, synthetic construct
  source 1..20: mol_type = other DNA
gcctcgaaaggtcaacaccc

SEQ ID NO: 25170 - DNA, 20 bp, synthetic construct
  source 1..20: mol_type = other DNA
tgacgcatagacttccgacc

SEQ ID NO: 25171 - DNA, 20 bp, synthetic construct
  source 1..20: mol_type = other DNA
agagacatatgagcggctcg

SEQ ID NO: 25172 - DNA, 20 bp, synthetic construct
  source 1..20: mol_type = other DNA
gggttagtggccgctcacag

SEQ ID NO: 25173 - DNA, 20 bp, synthetic construct
  source 1..20: mol_type = other DNA
gacttatgggggtttcacag

SEQ ID NO: 25174 - DNA, 20 bp, synthetic construct
  source 1..20: mol_type = other DNA
gataggtgattatgggcccg

SEQ ID NO: 25175 - DNA, 20 bp, synthetic construct
  source 1..20: mol_type = other DNA
agtgacagtgccacttgttg

SEQ ID NO: 25176 - DNA, 20 bp, synthetic construct
  source 1..20: mol_type = other DNA
tgaaacccccataagtcgtc

SEQ ID NO: 25177 - DNA, 20 bp, synthetic construct
  source 1..20: mol_type = other DNA
gaagcgccgagtagtcacca

SEQ ID NO: 25178 - DNA, 20 bp, synthetic construct
  source 1..20: mol_type = other DNA
gccagtcaagacggcgaaag

SEQ ID NO: 25179 - DNA, 20 bp, synthetic construct
  source 1..20: mol_type = other DNA
cgaggccttaagctcttgag

SEQ ID NO: 25180 - DNA, 20 bp, synthetic construct
  source 1..20: mol_type = other DNA
agaagcaggttcataagaag

SEQ ID NO: 25181 - DNA, 20 bp, synthetic construct
  source 1..20: mol_type = other DNA
cctgcctctcctgtacccga

SEQ ID NO: 25182 - DNA, 20 bp, synthetic construct
  source 1..20: mol_type = other DNA
cggagatgatgagtatcaag

SEQ ID NO: 25183 - DNA, 20 bp, synthetic construct
  source 1..20: mol_type = other DNA
tggatggagctcggtcccgg

SEQ ID NO: 25184 - DNA, 20 bp, synthetic construct
  source 1..20: mol_type = other DNA
tattcgtttatgcagctccg

SEQ ID NO: 25185 - DNA, 20 bp, synthetic construct
  source 1..20: mol_type = other DNA
tggtgcacagagtaaaaagg

SEQ ID NO: 25186 - DNA, 20 bp, synthetic construct
  source 1..20: mol_type = other DNA
gtcccgctgaatcctgtcgc

SEQ ID NO: 25187 - DNA, 20 bp, synthetic construct
  source 1..20: mol_type = other DNA
gccctttaagagatccggtg

SEQ ID NO: 25188 - DNA, 20 bp, synthetic construct
  source 1..20: mol_type = other DNA
tcatagggttgcaaaagctc

SEQ ID NO: 25189 - DNA, 20 bp, synthetic construct
  source 1..20: mol_type = other DNA
ggacagtgcaaagcgatcgg

SEQ ID NO: 25190 - DNA, 20 bp, synthetic construct
  source 1..20: mol_type = other DNA
aagccaacacaacgaaaagg

SEQ ID NO: 25191 - DNA, 20 bp, synthetic construct
  source 1..20: mol_type = other DNA
ggcaggttatttatcactgg

SEQ ID NO: 25192 - DNA, 20 bp, synthetic construct
  source 1..20: mol_type = other DNA
attgaattcagtaggaactt

SEQ ID NO: 25193 - DNA, 20 bp, synthetic construct
  source 1..20: mol_type = other DNA
ataatgacgatgctactaaa

SEQ ID NO: 25194 - DNA, 20 bp, synthetic construct
  source 1..20: mol_type = other DNA
aagcaagttgaccatagaag

SEQ ID NO: 25195 - DNA, 20 bp, synthetic construct
  source 1..20: mol_type = other DNA
gagttctagatcgcaaagac

SEQ ID NO: 25196 - DNA, 20 bp, synthetic construct
  source 1..20: mol_type = other DNA
taaaaacctgtacaaagagt

SEQ ID NO: 25197 - DNA, 20 bp, synthetic construct
  source 1..20: mol_type = other DNA
cgccgtgggaaacagagcgt

SEQ ID NO: 25198 - DNA, 20 bp, synthetic construct
  source 1..20: mol_type = other DNA
ctttcccgactgctccatcg

SEQ ID NO: 25199 - DNA, 20 bp, synthetic construct
  source 1..20: mol_type = other DNA
ctgctgagtacgcctgcaca

SEQ ID NO: 25200 - DNA, 20 bp, synthetic construct
  source 1..20: mol_type = other DNA
caggtctggattactaatgg

SEQ ID NO: 25201 - DNA, 20 bp, synthetic construct
  source 1..20: mol_type = other DNA
tggcgaaagctcgtacaggc

SEQ ID NO: 25202 - DNA, 20 bp, synthetic construct
  source 1..20: mol_type = other DNA
cttgcctaaactggcgtccg

SEQ ID NO: 25203 - DNA, 20 bp, synthetic construct
  source 1..20: mol_type = other DNA
ggactcccgaaaaattgacc

SEQ ID NO: 25204 - DNA, 20 bp, synthetic construct
  source 1..20: mol_type = other DNA
gaagataaattaggcattcg

SEQ ID NO: 25205 - DNA, 20 bp, synthetic construct
  source 1..20: mol_type = other DNA
gcagggatgctggaccaacc

SEQ ID NO: 25206 - DNA, 20 bp, synthetic construct
  source 1..20: mol_type = other DNA
tagtcttgagtacatggtgt

SEQ ID NO: 25207 - DNA, 20 bp, synthetic construct
  source 1..20: mol_type = other DNA
ctcactcacacactgccagg

SEQ ID NO: 25208 - DNA, 20 bp, synthetic construct
  source 1..20: mol_type = other DNA
tgtggctctgctccggattg

SEQ ID NO: 25209 - DNA, 20 bp, synthetic construct
  source 1..20: mol_type = other DNA
tgaaaacaccaagatacctg

SEQ ID NO: 25210 - DNA, 20 bp, synthetic construct
  source 1..20: mol_type = other DNA
aacagcggccggttcagcat

SEQ ID NO: 25211 - DNA, 20 bp, synthetic construct
  source 1..20: mol_type = other DNA
atagtagaaagagactttgg

SEQ ID NO: 25212 - DNA, 20 bp, synthetic construct
  source 1..20: mol_type = other DNA
tgtgaccctggcagcgcacc

SEQ ID NO: 25213 - DNA, 20 bp, synthetic construct
  source 1..20: mol_type = other DNA
ctccatatgtatctctaccc

SEQ ID NO: 25214 - DNA, 20 bp, synthetic construct
  source 1..20: mol_type = other DNA
ttgtcatagagggcgtgcag

SEQ ID NO: 25215 - DNA, 20 bp, synthetic construct
  source 1..20: mol_type = other DNA
ttctagcagccagtaaatcg

SEQ ID NO: 25216 - DNA, 20 bp, synthetic construct
  source 1..20: mol_type = other DNA
cattattaaaaaggatcctg

SEQ ID NO: 25217 - DNA, 20 bp, synthetic construct
  source 1..20: mol_type = other DNA
aaatggcaaagttgcatccg

SEQ ID NO: 25218 - DNA, 20 bp, synthetic construct
  source 1..20: mol_type = other DNA
tgaggaaggcattcaggctc

SEQ ID NO: 25219 - DNA, 20 bp, synthetic construct
  source 1..20: mol_type = other DNA
aacgtttgatgacagacaga

SEQ ID NO: 25220 - DNA, 20 bp, synthetic construct
  source 1..20: mol_type = other DNA
gtgaaatccaaagcagcagt

SEQ ID NO: 25221 - DNA, 20 bp, synthetic construct
  source 1..20: mol_type = other DNA
tttcagctgcttcaacagag

SEQ ID NO: 25222 - DNA, 20 bp, synthetic construct
  source 1..20: mol_type = other DNA
acaacagttcgtgcttcagt

SEQ ID NO: 25223 - DNA, 20 bp, synthetic construct
  source 1..20: mol_type = other DNA
gtggtgatcttctctggaga

SEQ ID NO: 25224 - DNA, 20 bp, synthetic construct
  source 1..20: mol_type = other DNA
tcggaagaacacagatagcg

SEQ ID NO: 25225 - DNA, 20 bp, synthetic construct
  source 1..20: mol_type = other DNA
ccaattgcaaatgtctggag

SEQ ID NO: 25226 - DNA, 20 bp, synthetic construct
  source 1..20: mol_type = other DNA
tctacaaccataagaaggtg

SEQ ID NO: 25227 - DNA, 20 bp, synthetic construct
  source 1..20: mol_type = other DNA
tactggctgctagaaaggta

SEQ ID NO: 25228 - DNA, 20 bp, synthetic construct
  source 1..20: mol_type = other DNA
gaaggacacggaaaaccgcg

SEQ ID NO: 25229 - DNA, 20 bp, synthetic construct
  source 1..20: mol_type = other DNA
aggaagccaggacaaagcgc

SEQ ID NO: 25230 - DNA, 20 bp, synthetic construct
  source 1..20: mol_type = other DNA
tggccctccatgccttgaca

SEQ ID NO: 25231 - DNA, 20 bp, synthetic construct
  source 1..20: mol_type = other DNA
gcggccgtgtcaaggcatgg

SEQ ID NO: 25232 - DNA, 20 bp, synthetic construct
  source 1..20: mol_type = other DNA
caggaccccacacacgtcac

SEQ ID NO: 25233 - DNA, 20 bp, synthetic construct
  source 1..20: mol_type = other DNA
gcggccacagccaggaacac

SEQ ID NO: 25234 - DNA, 20 bp, synthetic construct
  source 1..20: mol_type = other DNA
gagccccgcacggccaccca

SEQ ID NO: 25235 - DNA, 20 bp, synthetic construct
  source 1..20: mol_type = other DNA
ggcccctggcacaaatgcag

SEQ ID NO: 25236 - DNA, 20 bp, synthetic construct
  source 1..20: mol_type = other DNA
gacaaagcgcaggccgctgc

SEQ ID NO: 25237 - DNA, 20 bp, synthetic construct
  source 1..20: mol_type = other DNA
cacgtcaccggagccccgca

SEQ ID NO: 25238 - DNA, 20 bp, synthetic construct
  source 1..20: mol_type = other DNA
acaggccggcgtgaaggaca

SEQ ID NO: 25239 - DNA, 20 bp, synthetic construct
  source 1..20: mol_type = other DNA
cagccaggaacaccggcagg

SEQ ID NO: 25240 - DNA, 20 bp, synthetic construct
  source 1..20: mol_type = other DNA
gacagacaggcgggtgaccc

SEQ ID NO: 25241 - DNA, 20 bp, synthetic construct
  source 1..20: mol_type = other DNA
tgtcctggcttccttcgccc

SEQ ID NO: 25242 - DNA, 20 bp, synthetic construct
  source 1..20: mol_type = other DNA
ggccgccgccaggaggagca

SEQ ID NO: 25243 - DNA, 20 bp, synthetic construct
  source 1..20: mol_type = other DNA
catgtacgacatgcaggcgc

SEQ ID NO: 25244 - DNA, 20 bp, synthetic construct
  source 1..20: mol_type = other DNA
cagatggtcccagatgacct

SEQ ID NO: 25245 - DNA, 20 bp, synthetic construct
  source 1..20: mol_type = other DNA
agttcagccagaacatcggg

SEQ ID NO: 25246 - DNA, 20 bp, synthetic construct
  source 1..20: mol_type = other DNA
cagcgcctgcatgtcgtaca

SEQ ID NO: 25247 - DNA, 20 bp, synthetic construct
  source 1..20: mol_type = other DNA
ggcgctcaccgacgggcttg

SEQ ID NO: 25248 - DNA, 20 bp, synthetic construct
  source 1..20: mol_type = other DNA
gcagcctgggcgctcaccga

SEQ ID NO: 25249 - DNA, 20 bp, synthetic construct
  source 1..20: mol_type = other DNA
tacaaatcatgtggaagtgt

SEQ ID NO: 25250 - DNA, 20 bp, synthetic construct
  source 1..20: mol_type = other DNA
agaggcacacctccacctcg

SEQ ID NO: 25251 - DNA, 20 bp, synthetic construct
  source 1..20: mol_type = other DNA
cctgaatgatctcttctgga

SEQ ID NO: 25252 - DNA, 20 bp, synthetic construct
  source 1..20: mol_type = other DNA
tccagaagagatcattcagg

SEQ ID NO: 25253 - DNA, 20 bp, synthetic construct
  source 1..20: mol_type = other DNA
aggaaaagtgatgatagaag

SEQ ID NO: 25254 - DNA, 20 bp, synthetic construct
  source 1..20: mol_type = other DNA
cgcaggcgacaagggcccgg

SEQ ID NO: 25255 - DNA, 20 bp, synthetic construct
  source 1..20: mol_type = other DNA
gcttgtggcccagcatggcg

SEQ ID NO: 25256 - DNA, 20 bp, synthetic construct
  source 1..20: mol_type = other DNA
cagcccggcggaggagacag

SEQ ID NO: 25257 - DNA, 20 bp, synthetic construct
  source 1..20: mol_type = other DNA
tcaggaggtccgagaaggtg

SEQ ID NO: 25258 - DNA, 20 bp, synthetic construct
  source 1..20: mol_type = other DNA
ggaagaacaccgcaagatcg

SEQ ID NO: 25259 - DNA, 20 bp, synthetic construct
  source 1..20: mol_type = other DNA
tagtggtggagacccaagaa

SEQ ID NO: 25260 - DNA, 20 bp, synthetic construct
  source 1..20: mol_type = other DNA
gtgaagatggcccaccgagc

SEQ ID NO: 25261 - DNA, 20 bp, synthetic construct
  source 1..20: mol_type = other DNA
tcaggttccaacggcagatg

SEQ ID NO: 25262 - DNA, 20 bp, synthetic construct
  source 1..20: mol_type = other DNA
cagttcatccggcctcatgg

SEQ ID NO: 25263 - DNA, 20 bp, synthetic construct
  source 1..20: mol_type = other DNA
ccgggcccgctagtagccca

SEQ ID NO: 25264 - DNA, 20 bp, synthetic construct
  source 1..20: mol_type = other DNA
ttcttgggtctccaccacta

SEQ ID NO: 25265 - DNA, 20 bp, synthetic construct
  source 1..20: mol_type = other DNA
tccaacggcagatggggcac

SEQ ID NO: 25266 - DNA, 20 bp, synthetic construct
  source 1..20: mol_type = other DNA
acttgtgcttcaggttccaa

SEQ ID NO: 25267 - DNA, 20 bp, synthetic construct
  source 1..20: mol_type = other DNA
tgtgatacggccttcaatct

SEQ ID NO: 25268 - DNA, 20 bp, synthetic construct
  source 1..20: mol_type = other DNA
gatcgaggagtgtgtgaaga

SEQ ID NO: 25269 - DNA, 20 bp, synthetic construct
  source 1..20: mol_type = other DNA
ccttccctgaacccgcgagc

SEQ ID NO: 25270 - DNA, 20 bp, synthetic construct
  source 1..20: mol_type = other DNA
ctctggtgtccggctgtggg

SEQ ID NO: 25271 - DNA, 20 bp, synthetic construct
  source 1..20: mol_type = other DNA
ggctgtgggcggcttctccg

SEQ ID NO: 25272 - DNA, 20 bp, synthetic construct
  source 1..20: mol_type = other DNA
atgctgccccgaaagatcac

SEQ ID NO: 25273 - DNA, 20 bp, synthetic construct
  source 1..20: mol_type = other DNA
cttacgtgaaacccttcaga

SEQ ID NO: 25274 - DNA, 20 bp, synthetic construct
  source 1..20: mol_type = other DNA
gtctctggccagcgtccccg

SEQ ID NO: 25275 - DNA, 20 bp, synthetic construct
  source 1..20: mol_type = other DNA
atggagagccaggccaccag

SEQ ID NO: 25276 - DNA, 20 bp, synthetic construct
  source 1..20: mol_type = other DNA
gggacgctggccagagacag

SEQ ID NO: 25277 - DNA, 20 bp, synthetic construct
  source 1..20: mol_type = other DNA
gctcaggttgcgccacgtcg

SEQ ID NO: 25278 - DNA, 20 bp, synthetic construct
  source 1..20: mol_type = other DNA
agggcgaggccgtggcagaa

SEQ ID NO: 25279 - DNA, 20 bp, synthetic construct
  source 1..20: mol_type = other DNA
atggagcgaagtcgcttcga

SEQ ID NO: 25280 - DNA, 20 bp, synthetic construct
  source 1..20: mol_type = other DNA
gattgctcatggaggaacca

SEQ ID NO: 25281 - DNA, 20 bp, synthetic construct
  source 1..20: mol_type = other DNA
ggacgctggccagagacagg

SEQ ID NO: 25282 - DNA, 20 bp, synthetic construct
  source 1..20: mol_type = other DNA
gcaacacagcagcctggctc

SEQ ID NO: 25283 - DNA, 20 bp, synthetic construct
  source 1..20: mol_type = other DNA
gtttgatgtaccttgattag

SEQ ID NO: 25284 - DNA, 20 bp, synthetic construct
  source 1..20: mol_type = other DNA
ggcagaaggcttgatggcac

SEQ ID NO: 25285 - DNA, 20 bp, synthetic construct
  source 1..20: mol_type = other DNA
acgtggcgcaacctgagctg

SEQ ID NO: 25286 - DNA, 20 bp, synthetic construct
  source 1..20: mol_type = other DNA
cacatccaactggaccacca

SEQ ID NO: 25287 - DNA, 20 bp, synthetic construct
  source 1..20: mol_type = other DNA
gaagggtttcacgtaagcga

SEQ ID NO: 25288 - DNA, 20 bp, synthetic construct
  source 1..20: mol_type = other DNA
ggtgtaccggagtagtccag

SEQ ID NO: 25289 - DNA, 20 bp, synthetic construct
  source 1..20: mol_type = other DNA
gacctacagacggatccagg

SEQ ID NO: 25290 - DNA, 20 bp, synthetic construct
  source 1..20: mol_type = other DNA
tgctaggattaccagcccag

SEQ ID NO: 25291 - DNA, 20 bp, synthetic construct
  source 1..20: mol_type = other DNA
tgtggtcaataatggcaccg

SEQ ID NO: 25292 - DNA, 20 bp, synthetic construct
  source 1..20: mol_type = other DNA
acttgctcgagggaacaccc

SEQ ID NO: 25293 - DNA, 20 bp, synthetic construct
  source 1..20: mol_type = other DNA
acccatcctactctattagg

SEQ ID NO: 25294 - DNA, 20 bp, synthetic construct
  source 1..20: mol_type = other DNA
gatcagaggcagtaatccac

SEQ ID NO: 25295 - DNA, 20 bp, synthetic construct
  source 1..20: mol_type = other DNA
gtttctgatctaccgacgca

SEQ ID NO: 25296 - DNA, 20 bp, synthetic construct
  source 1..20: mol_type = other DNA
agaagggccgagaataggca

SEQ ID NO: 25297 - DNA, 20 bp, synthetic construct
  source 1..20: mol_type = other DNA
ttgactgcacacttccaacc

SEQ ID NO: 25298 - DNA, 20 bp, synthetic construct
  source 1..20: mol_type = other DNA
ggcacagaaatcctccggtg

SEQ ID NO: 25299 - DNA, 20 bp, synthetic construct
  source 1..20: mol_type = other DNA
ctgcagcacttcgcgaacga

SEQ ID NO: 25300 - DNA, 20 bp, synthetic construct
  source 1..20: mol_type = other DNA
gagatgagggtcatcagaca

SEQ ID NO: 25301 - DNA, 20 bp, synthetic construct
  source 1..20: mol_type = other DNA
aggtgatggtgtgcgctccg

SEQ ID NO: 25302 - DNA, 20 bp, synthetic construct
  source 1..20: mol_type = other DNA
gagactccccaagatgtggt

SEQ ID NO: 25303 - DNA, 20 bp, synthetic construct
  source 1..20: mol_type = other DNA
aggagggcttcggctcgctg

SEQ ID NO: 25304 - DNA, 20 bp, synthetic construct
  source 1..20: mol_type = other DNA
gagtacagccgacccgccgc

SEQ ID NO: 25305 - DNA, 20 bp, synthetic construct
  source 1..20: mol_type = other DNA
cagctgtagaacctcatgca

SEQ ID NO: 25306 - DNA, 20 bp, synthetic construct
  source 1..20: mol_type = other DNA
accggccaggtagcgcacgg

SEQ ID NO: 25307 - DNA, 20 bp, synthetic construct
  source 1..20: mol_type = other DNA
ctgcggcgctgctacgcgcg

SEQ ID NO: 25308 - DNA, 20 bp, synthetic construct
  source 1..20: mol_type = other DNA
ggcagcattgccctctcgga

SEQ ID NO: 25309 - DNA, 20 bp, synthetic construct
  source 1..20: mol_type = other DNA
ccaggagcacagctcgcaag

SEQ ID NO: 25310 - DNA, 20 bp, synthetic construct
  source 1..20: mol_type = other DNA
ggccacgctgctgaccgtag

SEQ ID NO: 25311 - DNA, 20 bp, synthetic construct
  source 1..20: mol_type = other DNA
ccaggttatagagcagaaag

SEQ ID NO: 25312 - DNA, 20 bp, synthetic construct
  source 1..20: mol_type = other DNA
gggtctggagcagacggaac

SEQ ID NO: 25313 - DNA, 20 bp, synthetic construct
  source 1..20: mol_type = other DNA
gagggcggacgcaactggct

SEQ ID NO: 25314 - DNA, 20 bp, synthetic construct
  source 1..20: mol_type = other DNA
gcaccgcctgcaccgcttgg

SEQ ID NO: 25315 - DNA, 20 bp, synthetic construct
  source 1..20: mol_type = other DNA
tcccgctctcacaggctcgg

SEQ ID NO: 25316 - DNA, 20 bp, synthetic construct
  source 1..20: mol_type = other DNA
gaaggcagcatctaccgcca

SEQ ID NO: 25317 - DNA, 20 bp, synthetic construct
  source 1..20: mol_type = other DNA
accgccaaggccttgcggag

SEQ ID NO: 25318 - DNA, 20 bp, synthetic construct
  source 1..20: mol_type = other DNA
acttactctttcgatccccc

SEQ ID NO: 25319 - DNA, 20 bp, synthetic construct
  source 1..20: mol_type = other DNA
ggaacgtggccgacgacacc

SEQ ID NO: 25320 - DNA, 20 bp, synthetic construct
  source 1..20: mol_type = other DNA
cgtggccgacgacaccaggt

SEQ ID NO: 25321 - DNA, 20 bp, synthetic construct
  source 1..20: mol_type = other DNA
ttctacactcgccgtccaag

SEQ ID NO: 25322 - DNA, 20 bp, synthetic construct
  source 1..20: mol_type = other DNA
gaagccgaagttatgaaagg

SEQ ID NO: 25323 - DNA, 20 bp, synthetic construct
  source 1..20: mol_type = other DNA
cttactctttcgatccccct

SEQ ID NO: 25324 - DNA, 20 bp, synthetic construct
  source 1..20: mol_type = other DNA
ttgtacctacctggtgtcgt

SEQ ID NO: 25325 - DNA, 20 bp, synthetic construct
  source 1..20: mol_type = other DNA
gtctctgttcgtcaggaacg

SEQ ID NO: 25326 - DNA, 20 bp, synthetic construct
  source 1..20: mol_type = other DNA
cataagcaaatcctcttgga

SEQ ID NO: 25327 - DNA, 20 bp, synthetic construct
  source 1..20: mol_type = other DNA
gtagaccgactggaagacca

SEQ ID NO: 25328 - DNA, 20 bp, synthetic construct
  source 1..20: mol_type = other DNA
gaatggcttctgctacgccg

SEQ ID NO: 25329 - DNA, 20 bp, synthetic construct
  source 1..20: mol_type = other DNA
aaaggaggagatcaagaagt

SEQ ID NO: 25330 - DNA, 20 bp, synthetic construct
  source 1..20: mol_type = other DNA
cggcgagtgtagaaatcaag

SEQ ID NO: 25331 - DNA, 20 bp, synthetic construct
  source 1..20: mol_type = other DNA
ctacgccgtggtcttccagt

SEQ ID NO: 25332 - DNA, 20 bp, synthetic construct
  source 1..20: mol_type = other DNA
gattgaaatacagtttgccc

SEQ ID NO: 25333 - DNA, 20 bp, synthetic construct
  source 1..20: mol_type = other DNA
gtcagctaaagaccatgaga

SEQ ID NO: 25334 - DNA, 20 bp, synthetic construct
  source 1..20: mol_type = other DNA
tgtcagctaaagaccatgag

SEQ ID NO: 25335 - DNA, 20 bp, synthetic construct
  source 1..20: mol_type = other DNA
ccacacctaggagaaagaag

SEQ ID NO: 25336 - DNA, 20 bp, synthetic construct
  source 1..20: mol_type = other DNA
agattctgaaaatcactaac

SEQ ID NO: 25337 - DNA, 20 bp, synthetic construct
  source 1..20: mol_type = other DNA
cctcttctttctcctaggtg

SEQ ID NO: 25338 - DNA, 20 bp, synthetic construct
  source 1..20: mol_type = other DNA
actggcctcttctttctcct

SEQ ID NO: 25339 - DNA, 20 bp, synthetic construct
  source 1..20: mol_type = other DNA
ttctagctttctccctctca

SEQ ID NO: 25340 - DNA, 20 bp, synthetic construct
  source 1..20: mol_type = other DNA
tggcctggcacgttctcatg

SEQ ID NO: 25341 - DNA, 20 bp, synthetic construct
  source 1..20: mol_type = other DNA
ggccagcatgcggaaagaag

SEQ ID NO: 25342 - DNA, 20 bp, synthetic construct
  source 1..20: mol_type = other DNA
tcatcctctgagcacgctgt

SEQ ID NO: 25343 - DNA, 20 bp, synthetic construct
  source 1..20: mol_type = other DNA
tcacgccattcctacaccag

SEQ ID NO: 25344 - DNA, 20 bp, synthetic construct
  source 1..20: mol_type = other DNA
caaaaagtcggacatgtgcg

SEQ ID NO: 25345 - DNA, 20 bp, synthetic construct
  source 1..20: mol_type = other DNA
tgtactctctggcaacacag

SEQ ID NO: 25346 - DNA, 20 bp, synthetic construct
  source 1..20: mol_type = other DNA
tgacaagtgatgacaacctg

SEQ ID NO: 25347 - DNA, 20 bp, synthetic construct
  source 1..20: mol_type = other DNA
tgatgatgctgtaccagcgc

SEQ ID NO: 25348 - DNA, 20 bp, synthetic construct
  source 1..20: mol_type = other DNA
cctggaaggtgctccgaccg

SEQ ID NO: 25349 - DNA, 20 bp, synthetic construct
  source 1..20: mol_type = other DNA
caaggctcacctcacagctc

SEQ ID NO: 25350 - DNA, 20 bp, synthetic construct
  source 1..20: mol_type = other DNA
cagcgatgtcagcgagcggg

SEQ ID NO: 25351 - DNA, 20 bp, synthetic construct
  source 1..20: mol_type = other DNA
cggacaatgctgaagagctg

SEQ ID NO: 25352 - DNA, 20 bp, synthetic construct
  source 1..20: mol_type = other DNA
tcctgaaggcgtgtggcagc

SEQ ID NO: 25353 - DNA, 20 bp, synthetic construct
  source 1..20: mol_type = other DNA
ggatctacctcatcaactcc

SEQ ID NO: 25354 - DNA, 20 bp, synthetic construct
  source 1..20: mol_type = other DNA
agaaagctgggacaactctg

SEQ ID NO: 25355 - DNA, 20 bp, synthetic construct
  source 1..20: mol_type = other DNA
ggacaccgccccaagatacg

SEQ ID NO: 25356 - DNA, 20 bp, synthetic construct
  source 1..20: mol_type = other DNA
tccaccagcttaatactctg

SEQ ID NO: 25357 - DNA, 20 bp, synthetic construct
  source 1..20: mol_type = other DNA
gaaggctgacacaaaatccg

SEQ ID NO: 25358 - DNA, 20 bp, synthetic construct
  source 1..20: mol_type = other DNA
catgggtcaccttctatagg

SEQ ID NO: 25359 - DNA, 20 bp, synthetic construct
  source 1..20: mol_type = other DNA
ccagcccacccagctgcacg

SEQ ID NO: 25360 - DNA, 20 bp, synthetic construct
  source 1..20: mol_type = other DNA
agcaaagacacggaaggcat

SEQ ID NO: 25361 - DNA, 20 bp, synthetic construct
  source 1..20: mol_type = other DNA
agcgacctgagtcagcacgt

SEQ ID NO: 25362 - DNA, 20 bp, synthetic construct
  source 1..20: mol_type = other DNA
gaggcagacctacatccgga

SEQ ID NO: 25363 - DNA, 20 bp, synthetic construct
  source 1..20: mol_type = other DNA
cccccaccgtaccaatcacc

SEQ ID NO: 25364 - DNA, 20 bp, synthetic construct
  source 1..20: mol_type = other DNA
ctgtttcactgagtccgcac

SEQ ID NO: 25365 - DNA, 20 bp, synthetic construct
  source 1..20: mol_type = other DNA
aatcaccaggatgtcaatgg

SEQ ID NO: 25366 - DNA, 20 bp, synthetic construct
  source 1..20: mol_type = other DNA
actcagagcaccccaagatc

SEQ ID NO: 25367 - DNA, 20 bp, synthetic construct
  source 1..20: mol_type = other DNA
tctgggatacacggtgcaga

SEQ ID NO: 25368 - DNA, 20 bp, synthetic construct
  source 1..20: mol_type = other DNA
gcttcagcgctacactggaa

SEQ ID NO: 25369 - DNA, 20 bp, synthetic construct
  source 1..20: mol_type = other DNA
ccggatgtaggtctgcctca

SEQ ID NO: 25370 - DNA, 20 bp, synthetic construct
  source 1..20: mol_type = other DNA
tcctttgagacttaccaagg

SEQ ID NO: 25371 - DNA, 20 bp, synthetic construct
  source 1..20: mol_type = other DNA
ttggtattctccagggacag

SEQ ID NO: 25372 - DNA, 20 bp, synthetic construct
  source 1..20: mol_type = other DNA
accagggtctgctaatccag

SEQ ID NO: 25373 - DNA, 20 bp, synthetic construct
  source 1..20: mol_type = other DNA
accactggattagcagaccc

SEQ ID NO: 25374 - DNA, 20 bp, synthetic construct
  source 1..20: mol_type = other DNA
acttgatacagaatctcctg

SEQ ID NO: 25375 - DNA, 20 bp, synthetic construct
  source 1..20: mol_type = other DNA
tgaagtaccaggaaatgcaa

SEQ ID NO: 25376 - DNA, 20 bp, synthetic construct
  source 1..20: mol_type = other DNA
tgttggatctgcggatgagg

SEQ ID NO: 25377 - DNA, 20 bp, synthetic construct
  source 1..20: mol_type = other DNA
ggatgaggaggaggatcctg

SEQ ID NO: 25378 - DNA, 20 bp, synthetic construct
  source 1..20: mol_type = other DNA
cttgatacagaatctcctgt

SEQ ID NO: 25379 - DNA, 20 bp, synthetic construct
  source 1..20: mol_type = other DNA
gcaacatagtaaaagagtag

SEQ ID NO: 25380 - DNA, 20 bp, synthetic construct
  source 1..20: mol_type = other DNA
ttacatcttcttctggaacc

SEQ ID NO: 25381 - DNA, 20 bp, synthetic construct
  source 1..20: mol_type = other DNA
tggttagttacctaaatacc

SEQ ID NO: 25382 - DNA, 20 bp, synthetic construct
  source 1..20: mol_type = other DNA
tacatactgttagagaccac

SEQ ID NO: 25383 - DNA, 20 bp, synthetic construct
  source 1..20: mol_type = other DNA
gtggagagctctatgaagag

SEQ ID NO: 25384 - DNA, 20 bp, synthetic construct
  source 1..20: mol_type = other DNA
tgtaggtatcataactattg

SEQ ID NO: 25385 - DNA, 20 bp, synthetic construct
  source 1..20: mol_type = other DNA
tattggaaccacagtaactc

SEQ ID NO: 25386 - DNA, 20 bp, synthetic construct
  source 1..20: mol_type = other DNA
ggatgctgagtgctatgtcc

SEQ ID NO: 25387 - DNA, 20 bp, synthetic construct
  source 1..20: mol_type = other DNA
cacaaaacgaccataggcca

SEQ ID NO: 25388 - DNA, 20 bp, synthetic construct
  source 1..20: mol_type = other DNA
acatgaaggtgctatagtgg

SEQ ID NO: 25389 - DNA, 20 bp, synthetic construct
  source 1..20: mol_type = other DNA
gagagccaagcagacctgct

SEQ ID NO: 25390 - DNA, 20 bp, synthetic construct
  source 1..20: mol_type = other DNA
caatggctgaggagtagccc

SEQ ID NO: 25391 - DNA, 20 bp, synthetic construct
  source 1..20: mol_type = other DNA
gctgaaggtgagggtagtgt

SEQ ID NO: 25392 - DNA, 20 bp, synthetic construct
  source 1..20: mol_type = other DNA
ggaagtcagccagcatcctg

SEQ ID NO: 25393 - DNA, 20 bp, synthetic construct
  source 1..20: mol_type = other DNA
atagtggaggggtcgacaaa

SEQ ID NO: 25394 - DNA, 20 bp, synthetic construct
  source 1..20: mol_type = other DNA
tattccccactacattaacc

SEQ ID NO: 25395 - DNA, 20 bp, synthetic construct
  source 1..20: mol_type = other DNA
aagagagggccaagagtggt

SEQ ID NO: 25396 - DNA, 20 bp, synthetic construct
  source 1..20: mol_type = other DNA
gtaggtgtctgagcaagaga

SEQ ID NO: 25397 - DNA, 20 bp, synthetic construct
  source 1..20: mol_type = other DNA
ctaaactcactagaccagcc

SEQ ID NO: 25398 - DNA, 20 bp, synthetic construct
  source 1..20: mol_type = other DNA
agcccaggtcaacaaaggag

SEQ ID NO: 25399 - DNA, 20 bp, synthetic construct
  source 1..20: mol_type = other DNA
cattaaccaggtaaactatg

SEQ ID NO: 25400 - DNA, 20 bp, synthetic construct
  source 1..20: mol_type = other DNA
tccacggagaccgtgaggca

SEQ ID NO: 25401 - DNA, 20 bp, synthetic construct
  source 1..20: mol_type = other DNA
ggatgaagttaagcttatca

SEQ ID NO: 25402 - DNA, 20 bp, synthetic construct
  source 1..20: mol_type = other DNA
taagcttatcagggctgatg

SEQ ID NO: 25403 - DNA, 20 bp, synthetic construct
  source 1..20: mol_type = other DNA
ggatgtcatgggtcacaatg

SEQ ID NO: 25404 - DNA, 20 bp, synthetic construct
  source 1..20: mol_type = other DNA
tcctaggaatcacctttatg

SEQ ID NO: 25405 - DNA, 20 bp, synthetic construct
  source 1..20: mol_type = other DNA
tgtgacaagctggctaatgg

SEQ ID NO: 25406 - DNA, 20 bp, synthetic construct
  source 1..20: mol_type = other DNA
aggtgattcctaggaaattg

SEQ ID NO: 25407 - DNA, 20 bp, synthetic construct
  source 1..20: mol_type = other DNA
gaaggacttacaagaaccgg

SEQ ID NO: 25408 - DNA, 20 bp, synthetic construct
  source 1..20: mol_type = other DNA
ctaatggaggagtgagcatg

SEQ ID NO: 25409 - DNA, 20 bp, synthetic construct
  source 1..20: mol_type = other DNA
gaagactgcccagaatgcca

SEQ ID NO: 25410 - DNA, 20 bp, synthetic construct
  source 1..20: mol_type = other DNA
tccctgcctcacggtctccg

SEQ ID NO: 25411 - DNA, 20 bp, synthetic construct
  source 1..20: mol_type = other DNA
agtgagcatgtggtgtgagc

SEQ ID NO: 25412 - DNA, 20 bp, synthetic construct
  source 1..20: mol_type = other DNA
gaagactatgaagagtgttg

SEQ ID NO: 25413 - DNA, 20 bp, synthetic construct
  source 1..20: mol_type = other DNA
gtggtcccagatcctgatgt

SEQ ID NO: 25414 - DNA, 20 bp, synthetic construct
  source 1..20: mol_type = other DNA
ctccctgctcacgtgtgaag

SEQ ID NO: 25415 - DNA, 20 bp, synthetic construct
  source 1..20: mol_type = other DNA
gtggcgatgatgctcagacg

SEQ ID NO: 25416 - DNA, 20 bp, synthetic construct
  source 1..20: mol_type = other DNA
cttgatagcgcagtcggtgt

SEQ ID NO: 25417 - DNA, 20 bp, synthetic construct
  source 1..20: mol_type = other DNA
aagtgacttacgtcaaaccc

SEQ ID NO: 25418 - DNA, 20 bp, synthetic construct
  source 1..20: mol_type = other DNA
gggcgtcaaagtcttctcgg

SEQ ID NO: 25419 - DNA, 20 bp, synthetic construct
  source 1..20: mol_type = other DNA
gactgccctggctcgaactg

SEQ ID NO: 25420 - DNA, 20 bp, synthetic construct
  source 1..20: mol_type = other DNA
ggctacaaggaaccctgtgg

SEQ ID NO: 25421 - DNA, 20 bp, synthetic construct
  source 1..20: mol_type = other DNA
cagccgccgtgaagttgcgc

SEQ ID NO: 25422 - DNA, 20 bp, synthetic construct
  source 1..20: mol_type = other DNA
cgaaacctggtgtggaacgc

SEQ ID NO: 25423 - DNA, 20 bp, synthetic construct
  source 1..20: mol_type = other DNA
cgacgcactcaaaagcagcg

SEQ ID NO: 25424 - DNA, 20 bp, synthetic construct
  source 1..20: mol_type = other DNA
aacaacgacattgcaccccg

SEQ ID NO: 25425 - DNA, 20 bp, synthetic construct
  source 1..20: mol_type = other DNA
ctggacagctcagagagcat

SEQ ID NO: 25426 - DNA, 20 bp, synthetic construct
  source 1..20: mol_type = other DNA
ccatcgtggacatgatcgtg

SEQ ID NO: 25427 - DNA, 20 bp, synthetic construct
  source 1..20: mol_type = other DNA
agggagaacgaggcaagccg

SEQ ID NO: 25428 - DNA, 20 bp, synthetic construct
  source 1..20: mol_type = other DNA
cctcggtgccatttccagcg

SEQ ID NO: 25429 - DNA, 20 bp, synthetic construct
  source 1..20: mol_type = other DNA
caggggtatccgggcaacag

SEQ ID NO: 25430 - DNA, 20 bp, synthetic construct
  source 1..20: mol_type = other DNA
aattatcaagaagttacaag

SEQ ID NO: 25431 - DNA, 20 bp, synthetic construct
  source 1..20: mol_type = other DNA
atataaccttgttatatctg

SEQ ID NO: 25432 - DNA, 20 bp, synthetic construct
  source 1..20: mol_type = other DNA
agaggcatttgatacaatcc

SEQ ID NO: 25433 - DNA, 20 bp, synthetic construct
  source 1..20: mol_type = other DNA
aggctgtttgaaatgtagca

SEQ ID NO: 25434 - DNA, 20 bp, synthetic construct
  source 1..20: mol_type = other DNA
tattcgtctgactgatgaca

SEQ ID NO: 25435 - DNA, 20 bp, synthetic construct
  source 1..20: mol_type = other DNA
taatcagctacaaacaaaag

SEQ ID NO: 25436 - DNA, 20 bp, synthetic construct
  source 1..20: mol_type = other DNA
aatccagttcacagaaaggt

SEQ ID NO: 25437 - DNA, 20 bp, synthetic construct
  source 1..20: mol_type = other DNA
gcaactggactttacacgaa

SEQ ID NO: 25438 - DNA, 20 bp, synthetic construct
  source 1..20: mol_type = other DNA
cagactgtctgagttagaag

SEQ ID NO: 25439 - DNA, 20 bp, synthetic construct
  source 1..20: mol_type = other DNA
tcccattctaggagctacag

SEQ ID NO: 25440 - DNA, 20 bp, synthetic construct
  source 1..20: mol_type = other DNA
gagaaaaatcaagtacaact

SEQ ID NO: 25441 - DNA, 20 bp, synthetic construct
  source 1..20: mol_type = other DNA
aacatgccaaagaaattcca

SEQ ID NO: 25442 - DNA, 20 bp, synthetic construct
  source 1..20: mol_type = other DNA
gagataaagaaatttctcgc

SEQ ID NO: 25443 - DNA, 20 bp, synthetic construct
  source 1..20: mol_type = other DNA
attatctgcagaacttctga

SEQ ID NO: 25444 - DNA, 20 bp, synthetic construct
  source 1..20: mol_type = other DNA
gagttatccaaaatagctgc

SEQ ID NO: 25445 - DNA, 20 bp, synthetic construct
  source 1..20: mol_type = other DNA
tatacacccaactccctcac

SEQ ID NO: 25446 - DNA, 20 bp, synthetic construct
  source 1..20: mol_type = other DNA
ccttctaaggattccagtga

SEQ ID NO: 25447 - DNA, 20 bp, synthetic construct
  source 1..20: mol_type = other DNA
tccattctaagaggtttcaa

SEQ ID NO: 25448 - DNA, 20 bp, synthetic construct
  source 1..20: mol_type = other DNA
aaggattccagtgagggagt

SEQ ID NO: 25449 - DNA, 20 bp, synthetic construct
  source 1..20: mol_type = other DNA
agtgagggagttgggtgtat

SEQ ID NO: 25450 - DNA, 20 bp, synthetic construct
  source 1..20: mol_type = other DNA
ccctcactggaatccttaga

SEQ ID NO: 25451 - DNA, 20 bp, synthetic construct
  source 1..20: mol_type = other DNA
agggagttgggtgtatagga

SEQ ID NO: 25452 - DNA, 20 bp, synthetic construct
  source 1..20: mol_type = other DNA
tccttctaaggattccagtg

SEQ ID NO: 25453 - DNA, 20 bp, synthetic construct
  source 1..20: mol_type = other DNA
ccattctaagaggtttcaaa

SEQ ID NO: 25454 - DNA, 20 bp, synthetic construct
  source 1..20: mol_type = other DNA
agaggtttcaaagggaaact

SEQ ID NO: 25455 - DNA, 20 bp, synthetic construct
  source 1..20: mol_type = other DNA
aggattccagtgagggagtt

SEQ ID NO: 25456 - DNA, 20 bp, synthetic construct
  source 1..20: mol_type = other DNA
agaatagcaattctatgatt

SEQ ID NO: 25457 - DNA, 20 bp, synthetic construct
  source 1..20: mol_type = other DNA
gaatagcaattctatgattt

SEQ ID NO: 25458 - DNA, 20 bp, synthetic construct
  source 1..20: mol_type = other DNA
ccctttgaaacctcttagaa

SEQ ID NO: 25459 - DNA, 20 bp, synthetic construct
  source 1..20: mol_type = other DNA
actgctccctcacaaatcct

SEQ ID NO: 25460 - DNA, 20 bp, synthetic construct
  source 1..20: mol_type = other DNA
tggtccccttaacccgcagc

SEQ ID NO: 25461 - DNA, 20 bp, synthetic construct
  source 1..20: mol_type = other DNA
gcacacttacaacctcgtgc

SEQ ID NO: 25462 - DNA, 20 bp, synthetic construct
  source 1..20: mol_type = other DNA
taccctcactctctgcgtgg

SEQ ID NO: 25463 - DNA, 20 bp, synthetic construct
  source 1..20: mol_type = other DNA
gcccaaccgccagttcaccc

SEQ ID NO: 25464 - DNA, 20 bp, synthetic construct
  source 1..20: mol_type = other DNA
ggcttgagagtcgaagtcga

SEQ ID NO: 25465 - DNA, 20 bp, synthetic construct
  source 1..20: mol_type = other DNA
ctgttcatagaaccgctcca

SEQ ID NO: 25466 - DNA, 20 bp, synthetic construct
  source 1..20: mol_type = other DNA
agaatgagtatgtcaagatg

SEQ ID NO: 25467 - DNA, 20 bp, synthetic construct
  source 1..20: mol_type = other DNA
gagtgagggtagtgcggacc

SEQ ID NO: 25468 - DNA, 20 bp, synthetic construct
  source 1..20: mol_type = other DNA
cctccaccttggcccgagtg

SEQ ID NO: 25469 - DNA, 20 bp, synthetic construct
  source 1..20: mol_type = other DNA
cagggagtacttgtgtccgg

SEQ ID NO: 25470 - DNA, 20 bp, synthetic construct
  source 1..20: mol_type = other DNA
ggcttaccacaccatcgagc

SEQ ID NO: 25471 - DNA, 20 bp, synthetic construct
  source 1..20: mol_type = other DNA
gggagtgactaagcagatat

SEQ ID NO: 25472 - DNA, 20 bp, synthetic construct
  source 1..20: mol_type = other DNA
ggtactggagcgcatcgagc

SEQ ID NO: 25473 - DNA, 20 bp, synthetic construct
  source 1..20: mol_type = other DNA
ctctgtctgtaccttgcgga

SEQ ID NO: 25474 - DNA, 20 bp, synthetic construct
  source 1..20: mol_type = other DNA
gccaccagagccgtgtacaa

SEQ ID NO: 25475 - DNA, 20 bp, synthetic construct
  source 1..20: mol_type = other DNA
tgaaagggaagatacagcgt

SEQ ID NO: 25476 - DNA, 20 bp, synthetic construct
  source 1..20: mol_type = other DNA
tattcctatgagtcaagtgg

SEQ ID NO: 25477 - DNA, 20 bp, synthetic construct
  source 1..20: mol_type = other DNA
gataccactcaccttcactc

SEQ ID NO: 25478 - DNA, 20 bp, synthetic construct
  source 1..20: mol_type = other DNA
gcagcttcttaggcagtctg

SEQ ID NO: 25479 - DNA, 20 bp, synthetic construct
  source 1..20: mol_type = other DNA
acggctctggtggcacacca

SEQ ID NO: 25480 - DNA, 20 bp, synthetic construct
  source 1..20: mol_type = other DNA
gaagtaaacagatcccttgt

SEQ ID NO: 25481 - DNA, 20 bp, synthetic construct
  source 1..20: mol_type = other DNA
tgtggtctctgattgcatgg

SEQ ID NO: 25482 - DNA, 20 bp, synthetic construct
  source 1..20: mol_type = other DNA
tcttcgatgagaaacagcag

SEQ ID NO: 25483 - DNA, 20 bp, synthetic construct
  source 1..20: mol_type = other DNA
gagccgtgtacaacggccag

SEQ ID NO: 25484 - DNA, 20 bp, synthetic construct
  source 1..20: mol_type = other DNA
ttgactcataggaatagaga

SEQ ID NO: 25485 - DNA, 20 bp, synthetic construct
  source 1..20: mol_type = other DNA
gccgttgtacacggctctgg

SEQ ID NO: 25486 - DNA, 20 bp, synthetic construct
  source 1..20: mol_type = other DNA
aggggataagctatgaatat

SEQ ID NO: 25487 - DNA, 20 bp, synthetic construct
  source 1..20: mol_type = other DNA
actgcctaagaagctgccct

SEQ ID NO: 25488 - DNA, 20 bp, synthetic construct
  source 1..20: mol_type = other DNA
tagatggaggggaagatgca

SEQ ID NO: 25489 - DNA, 20 bp, synthetic construct
  source 1..20: mol_type = other DNA
aggacgcaaacagattcgcg

SEQ ID NO: 25490 - DNA, 20 bp, synthetic construct
  source 1..20: mol_type = other DNA
gccatattgcatgaacaccg

SEQ ID NO: 25491 - DNA, 20 bp, synthetic construct
  source 1..20: mol_type = other DNA
gccacaggtcccctccgctc

SEQ ID NO: 25492 - DNA, 20 bp, synthetic construct
  source 1..20: mol_type = other DNA
tccacgcacccactgaccgt

SEQ ID NO: 25493 - DNA, 20 bp, synthetic construct
  source 1..20: mol_type = other DNA
gttcatgcaatatggcatcg

SEQ ID NO: 25494 - DNA, 20 bp, synthetic construct
  source 1..20: mol_type = other DNA
ggagctggctttcagcacga

SEQ ID NO: 25495 - DNA, 20 bp, synthetic construct
  source 1..20: mol_type = other DNA
tgttggccgtggtattggcg

SEQ ID NO: 25496 - DNA, 20 bp, synthetic construct
  source 1..20: mol_type = other DNA
gacacttgaccactgcccag

SEQ ID NO: 25497 - DNA, 20 bp, synthetic construct
  source 1..20: mol_type = other DNA
cttccaggtgatgtacacag

SEQ ID NO: 25498 - DNA, 20 bp, synthetic construct
  source 1..20: mol_type = other DNA
ccagcaggaatacttgtcga

SEQ ID NO: 25499 - DNA, 20 bp, synthetic construct
  source 1..20: mol_type = other DNA
ggctgaagaagctcctctcg

SEQ ID NO: 25500 - DNA, 20 bp, synthetic construct
  source 1..20: mol_type = other DNA
tacctgccttggcaccacaa

SEQ ID NO: 25501 - DNA, 20 bp, synthetic construct
  source 1..20: mol_type = other DNA
ggggacgacgaacagcatgg

SEQ ID NO: 25502 - DNA, 20 bp, synthetic construct
  source 1..20: mol_type = other DNA
actgcacctgtaccaggcgg

SEQ ID NO: 25503 - DNA, 20 bp, synthetic construct
  source 1..20: mol_type = other DNA
cgctggcggaatcctacctg

SEQ ID NO: 25504 - DNA, 20 bp, synthetic construct
  source 1..20: mol_type = other DNA
gacgcggagttattaccgag

SEQ ID NO: 25505 - DNA, 20 bp, synthetic construct
  source 1..20: mol_type = other DNA
ggatcccgggtggtcaacgt

SEQ ID NO: 25506 - DNA, 20 bp, synthetic construct
  source 1..20: mol_type = other DNA
caaactccacgccgattgtg

SEQ ID NO: 25507 - DNA, 20 bp, synthetic construct
  source 1..20: mol_type = other DNA
ccgggagacatacaactcac

SEQ ID NO: 25508 - DNA, 20 bp, synthetic construct
  source 1..20: mol_type = other DNA
cccacccacgttgaccaccc

SEQ ID NO: 25509 - DNA, 20 bp, synthetic construct
  source 1..20: mol_type = other DNA
cctggccagccccaacatcg

SEQ ID NO: 25510 - DNA, 20 bp, synthetic construct
  source 1..20: mol_type = other DNA
ccagtgagttgtatgtctcc

SEQ ID NO: 25511 - DNA, 20 bp, synthetic construct
  source 1..20: mol_type = other DNA
ggaaagtgacctcccgctca

SEQ ID NO: 25512 - DNA, 20 bp, synthetic construct
  source 1..20: mol_type = other DNA
gctgacggatgcccgcaccc

SEQ ID NO: 25513 - DNA, 20 bp, synthetic construct
  source 1..20: mol_type = other DNA
ggtgtacgacatcaccaggt

SEQ ID NO: 25514 - DNA, 20 bp, synthetic construct
  source 1..20: mol_type = other DNA
ctgtggcaacaagaaggacc

SEQ ID NO: 25515 - DNA, 20 bp, synthetic construct
  source 1..20: mol_type = other DNA
ggccccacaggtcagtgacg

SEQ ID NO: 25516 - DNA, 20 bp, synthetic construct
  source 1..20: mol_type = other DNA
tggccaggagcggtttcggt

SEQ ID NO: 25517 - DNA, 20 bp, synthetic construct
  source 1..20: mol_type = other DNA
gaagctacagatttgggaca

SEQ ID NO: 25518 - DNA, 20 bp, synthetic construct
  source 1..20: mol_type = other DNA
ggttggagtcctgtttgact

SEQ ID NO: 25519 - DNA, 20 bp, synthetic construct
  source 1..20: mol_type = other DNA
tggcggagtagcacacgcac

SEQ ID NO: 25520 - DNA, 20 bp, synthetic construct
  source 1..20: mol_type = other DNA
tcatagggaacaggattaag

SEQ ID NO: 25521 - DNA, 20 bp, synthetic construct
  source 1..20: mol_type = other DNA
ggagtccttaagatactcga

SEQ ID NO: 25522 - DNA, 20 bp, synthetic construct
  source 1..20: mol_type = other DNA
tggccatcgcggtggaacac

SEQ ID NO: 25523 - DNA, 20 bp, synthetic construct
  source 1..20: mol_type = other DNA
gcgtcatccagaccgagcac

SEQ ID NO: 25524 - DNA, 20 bp, synthetic construct
  source 1..20: mol_type = other DNA
gcagccccccgaagaacagg

SEQ ID NO: 25525 - DNA, 20 bp, synthetic construct
  source 1..20: mol_type = other DNA
tcctcgtccccagtaaggta

SEQ ID NO: 25526 - DNA, 20 bp, synthetic construct
  source 1..20: mol_type = other DNA
tcacgtctgcctcttcggag

SEQ ID NO: 25527 - DNA, 20 bp, synthetic construct
  source 1..20: mol_type = other DNA
tgaagcccaggattagccta

SEQ ID NO: 25528 - DNA, 20 bp, synthetic construct
  source 1..20: mol_type = other DNA
caggccgcaccccaacgatg

SEQ ID NO: 25529 - DNA, 20 bp, synthetic construct
  source 1..20: mol_type = other DNA
tgctactccgccagcatcgg

SEQ ID NO: 25530 - DNA, 20 bp, synthetic construct
  source 1..20: mol_type = other DNA
tgcaccagaagagcgccatg

SEQ ID NO: 25531 - DNA, 20 bp, synthetic construct
  source 1..20: mol_type = other DNA
gcagcaagatgaccatggtg

SEQ ID NO: 25532 - DNA, 20 bp, synthetic construct
  source 1..20: mol_type = other DNA
atgtgcgatgggcaccatca

SEQ ID NO: 25533 - DNA, 20 bp, synthetic construct
  source 1..20: mol_type = other DNA
gaggatctgcagccacaacc

SEQ ID NO: 25534 - DNA, 20 bp, synthetic construct
  source 1..20: mol_type = other DNA
ggaggtgtggagtcagcatg

SEQ ID NO: 25535 - DNA, 20 bp, synthetic construct
  source 1..20: mol_type = other DNA
gggaggtgtggagtcagcat

SEQ ID NO: 25536 - DNA, 20 bp, synthetic construct
  source 1..20: mol_type = other DNA
ggagaaggcgggtcagcgcg

SEQ ID NO: 25537 - DNA, 20 bp, synthetic construct
  source 1..20: mol_type = other DNA
ggagtcagcatggggctagg

SEQ ID NO: 25538 - DNA, 20 bp, synthetic construct
  source 1..20: mol_type = other DNA
cggagaaggcgggtcagcgc

SEQ ID NO: 25539 - DNA, 20 bp, synthetic construct
  source 1..20: mol_type = other DNA
ttgtggcatctacacagctg

SEQ ID NO: 25540 - DNA, 20 bp, synthetic construct
  source 1..20: mol_type = other DNA
ggggaggtgtggagtcagca

SEQ ID NO: 25541 - DNA, 20 bp, synthetic construct
  source 1..20: mol_type = other DNA
gtccacccgctgggggcatg

SEQ ID NO: 25542 - DNA, 20 bp, synthetic construct
  source 1..20: mol_type = other DNA
tgtccacccgctgggggcat

SEQ ID NO: 25543 - DNA, 20 bp, synthetic construct
  source 1..20: mol_type = other DNA
tacacagctgcggagaaggc

SEQ ID NO: 25544 - DNA, 20 bp, synthetic construct
  source 1..20: mol_type = other DNA
gcggagaaggcgggtcagcg

SEQ ID NO: 25545 - DNA, 20 bp, synthetic construct
  source 1..20: mol_type = other DNA
cacccgctgggggcatgggg

SEQ ID NO: 25546 - DNA, 20 bp, synthetic construct
  source 1..20: mol_type = other DNA
catctacacagctgcggaga

SEQ ID NO: 25547 - DNA, 20 bp, synthetic construct
  source 1..20: mol_type = other DNA
ctacacagctgcggagaagg

SEQ ID NO: 25548 - DNA, 20 bp, synthetic construct
  source 1..20: mol_type = other DNA
gctgggggcatggggaggtg

SEQ ID NO: 25549 - DNA, 20 bp, synthetic construct
  source 1..20: mol_type = other DNA
aagatccgtaccattgcccc

SEQ ID NO: 25550 - DNA, 20 bp, synthetic construct
  source 1..20: mol_type = other DNA
gctatccgtcaggtgtcatg

SEQ ID NO: 25551 - DNA, 20 bp, synthetic construct
  source 1..20: mol_type = other DNA
ggagaaggaactgtacactt

SEQ ID NO: 25552 - DNA, 20 bp, synthetic construct
  source 1..20: mol_type = other DNA
ctgtgtgtgaagatcgtgca

SEQ ID NO: 25553 - DNA, 20 bp, synthetic construct
  source 1..20: mol_type = other DNA
gccataataatctgatccga

SEQ ID NO: 25554 - DNA, 20 bp, synthetic construct
  source 1..20: mol_type = other DNA
agtgaagtctatgtttgggg

SEQ ID NO: 25555 - DNA, 20 bp, synthetic construct
  source 1..20: mol_type = other DNA
aaggtaaaggacgttgtgta

SEQ ID NO: 25556 - DNA, 20 bp, synthetic construct
  source 1..20: mol_type = other DNA
ggtggttctgacacgaaaca

SEQ ID NO: 25557 - DNA, 20 bp, synthetic construct
  source 1..20: mol_type = other DNA
aggatgactcactggttgtg

SEQ ID NO: 25558 - DNA, 20 bp, synthetic construct
  source 1..20: mol_type = other DNA
attgagctggaatattgtaa

SEQ ID NO: 25559 - DNA, 20 bp, synthetic construct
  source 1..20: mol_type = other DNA
gggaactacaagaagcgtct

SEQ ID NO: 25560 - DNA, 20 bp, synthetic construct
  source 1..20: mol_type = other DNA
ctatcgacagccaaagcatg

SEQ ID NO: 25561 - DNA, 20 bp, synthetic construct
  source 1..20: mol_type = other DNA
agggaatacccactttgctg

SEQ ID NO: 25562 - DNA, 20 bp, synthetic construct
  source 1..20: mol_type = other DNA
ggtctgaatcagtgcatgtc

SEQ ID NO: 25563 - DNA, 20 bp, synthetic construct
  source 1..20: mol_type = other DNA
acaacttgtccttctgacga

SEQ ID NO: 25564 - DNA, 20 bp, synthetic construct
  source 1..20: mol_type = other DNA
tcagcgtcgctatttcacgc

SEQ ID NO: 25565 - DNA, 20 bp, synthetic construct
  source 1..20: mol_type = other DNA
tcgttggcccagtccgaaca

SEQ ID NO: 25566 - DNA, 20 bp, synthetic construct
  source 1..20: mol_type = other DNA
ataacaggcccgaagacctc

SEQ ID NO: 25567 - DNA, 20 bp, synthetic construct
  source 1..20: mol_type = other DNA
gcaggggtcgtattatgagg

SEQ ID NO: 25568 - DNA, 20 bp, synthetic construct
  source 1..20: mol_type = other DNA
cctgctgctgaaacccatcg

SEQ ID NO: 25569 - DNA, 20 bp, synthetic construct
  source 1..20: mol_type = other DNA
cgtgtacgacctaacgtcat

SEQ ID NO: 25570 - DNA, 20 bp, synthetic construct
  source 1..20: mol_type = other DNA
ttaggtcgtacacgcgtccc

SEQ ID NO: 25571 - DNA, 20 bp, synthetic construct
  source 1..20: mol_type = other DNA
aagcacatagatccgctgac

SEQ ID NO: 25572 - DNA, 20 bp, synthetic construct
  source 1..20: mol_type = other DNA
caggccaggatatcagccac

SEQ ID NO: 25573 - DNA, 20 bp, synthetic construct
  source 1..20: mol_type = other DNA
acgtgcacaaagcggccccg

SEQ ID NO: 25574 - DNA, 20 bp, synthetic construct
  source 1..20: mol_type = other DNA
ctatttcacgccggcggagg

SEQ ID NO: 25575 - DNA, 20 bp, synthetic construct
  source 1..20: mol_type = other DNA
ccagggcttcccaaaatcgt

SEQ ID NO: 25576 - DNA, 20 bp, synthetic construct
  source 1..20: mol_type = other DNA
taatacgacccctgccacca

SEQ ID NO: 25577 - DNA, 20 bp, synthetic construct
  source 1..20: mol_type = other DNA
cattaacacgctcacgtcgc

SEQ ID NO: 25578 - DNA, 20 bp, synthetic construct
  source 1..20: mol_type = other DNA
cagtccgaacagggcagctg

SEQ ID NO: 25579 - DNA, 20 bp, synthetic construct
  source 1..20: mol_type = other DNA
ggcgacactcaccgaaggtg

SEQ ID NO: 25580 - DNA, 20 bp, synthetic construct
  source 1..20: mol_type = other DNA
ctcgcggcgacactcaccga

SEQ ID NO: 25581 - DNA, 20 bp, synthetic construct
  source 1..20: mol_type = other DNA
gtgataatagaacgatacaa

SEQ ID NO: 25582 - DNA, 20 bp, synthetic construct
  source 1..20: mol_type = other DNA
gggaggcatagaccatgtac

SEQ ID NO: 25583 - DNA, 20 bp, synthetic construct
  source 1..20: mol_type = other DNA
ggtgataatagaacgataca

SEQ ID NO: 25584 - DNA, 20 bp, synthetic construct
  source 1..20: mol_type = other DNA
agatccctgcaccatgccgt

SEQ ID NO: 25585 - DNA, 20 bp, synthetic construct
  source 1..20: mol_type = other DNA
catccaaccaaaatcccggt

SEQ ID NO: 25586 - DNA, 20 bp, synthetic construct
  source 1..20: mol_type = other DNA
gcagcatccaaccaaaatcc

SEQ ID NO: 25587 - DNA, 20 bp, synthetic construct
  source 1..20: mol_type = other DNA
gatgctgctctcgaataagt

SEQ ID NO: 25588 - DNA, 20 bp, synthetic construct
  source 1..20: mol_type = other DNA
tgagctcactcatgttgaca

SEQ ID NO: 25589 - DNA, 20 bp, synthetic construct
  source 1..20: mol_type = other DNA
tgtatcgttctattatcacc

SEQ ID NO: 25590 - DNA, 20 bp, synthetic construct
  source 1..20: mol_type = other DNA
atacacctctgagattggtg

SEQ ID NO: 25591 - DNA, 20 bp, synthetic construct
  source 1..20: mol_type = other DNA
gttggtgaacggacacagca

SEQ ID NO: 25592 - DNA, 20 bp, synthetic construct
  source 1..20: mol_type = other DNA
tccgttcaccaacaggaaga

SEQ ID NO: 25593 - DNA, 20 bp, synthetic construct
  source 1..20: mol_type = other DNA
tgttgacatggtcaggtaca

SEQ ID NO: 25594 - DNA, 20 bp, synthetic construct
  source 1..20: mol_type = other DNA
gttgatagagagctgactag

SEQ ID NO: 25595 - DNA, 20 bp, synthetic construct
  source 1..20: mol_type = other DNA
acttctacaagcagtatcca

SEQ ID NO: 25596 - DNA, 20 bp, synthetic construct
  source 1..20: mol_type = other DNA
agctctctatcaaccatcca

SEQ ID NO: 25597 - DNA, 20 bp, synthetic construct
  source 1..20: mol_type = other DNA
aattcatctgatcagcgtcc

SEQ ID NO: 25598 - DNA, 20 bp, synthetic construct
  source 1..20: mol_type = other DNA
cagctctctatcaaccatcc

SEQ ID NO: 25599 - DNA, 20 bp, synthetic construct
  source 1..20: mol_type = other DNA
tgaggtggaataagaaatgt

SEQ ID NO: 25600 - DNA, 20 bp, synthetic construct
  source 1..20: mol_type = other DNA
gaaacatccctgaacatcac

SEQ ID NO: 25601 - DNA, 20 bp, synthetic construct
  source 1..20: mol_type = other DNA
tatgagtgaagagaaaccat

SEQ ID NO: 25602 - DNA, 20 bp, synthetic construct
  source 1..20: mol_type = other DNA
aaaagtagacatgtcttcac

SEQ ID NO: 25603 - DNA, 20 bp, synthetic construct
  source 1..20: mol_type = other DNA
actatgaatctaaggagtat

SEQ ID NO: 25604 - DNA, 20 bp, synthetic construct
  source 1..20: mol_type = other DNA
ccatgggaatgtaagatatg

SEQ ID NO: 25605 - DNA, 20 bp, synthetic construct
  source 1..20: mol_type = other DNA
tatgggaagtcctttagtcg

SEQ ID NO: 25606 - DNA, 20 bp, synthetic construct
  source 1..20: mol_type = other DNA
tatccttacccactgaaacc

SEQ ID NO: 25607 - DNA, 20 bp, synthetic construct
  source 1..20: mol_type = other DNA
cactcgttactcgacatcag

SEQ ID NO: 25608 - DNA, 20 bp, synthetic construct
  source 1..20: mol_type = other DNA
gtgatctccttattggaaca

SEQ ID NO: 25609 - DNA, 20 bp, synthetic construct
  source 1..20: mol_type = other DNA
tgtcgatacaggggtacagt

SEQ ID NO: 25610 - DNA, 20 bp, synthetic construct
  source 1..20: mol_type = other DNA
cctcgtgctcttctcggttg

SEQ ID NO: 25611 - DNA, 20 bp, synthetic construct
  source 1..20: mol_type = other DNA
ccccaaccgagaagagcacg

SEQ ID NO: 25612 - DNA, 20 bp, synthetic construct
  source 1..20: mol_type = other DNA
tgctatgcagcgcatgacac

SEQ ID NO: 25613 - DNA, 20 bp, synthetic construct
  source 1..20: mol_type = other DNA
tccgaggtgactgtcgatac

SEQ ID NO: 25614 - DNA, 20 bp, synthetic construct
  source 1..20: mol_type = other DNA
gaaaattaaggatacagcac

SEQ ID NO: 25615 - DNA, 20 bp, synthetic construct
  source 1..20: mol_type = other DNA
taaatttgtggggttctccg

SEQ ID NO: 25616 - DNA, 20 bp, synthetic construct
  source 1..20: mol_type = other DNA
caggcgatgatgccaggtgt

SEQ ID NO: 25617 - DNA, 20 bp, synthetic construct
  source 1..20: mol_type = other DNA
ggcatcatcgcctgttgcag

SEQ ID NO: 25618 - DNA, 20 bp, synthetic construct
  source 1..20: mol_type = other DNA
ggaagagagtgacattcctc

SEQ ID NO: 25619 - DNA, 20 bp, synthetic construct
  source 1..20: mol_type = other DNA
ggttggggtggtcctagccc

SEQ ID NO: 25620 - DNA, 20 bp, synthetic construct
  source 1..20: mol_type = other DNA
gaatgtcactctcttccccg

SEQ ID NO: 25621 - DNA, 20 bp, synthetic construct
  source 1..20: mol_type = other DNA
gcagggagggacccaccagg

SEQ ID NO: 25622 - DNA, 20 bp, synthetic construct
  source 1..20: mol_type = other DNA
ggccgctcatcgcagcactg

SEQ ID NO: 25623 - DNA, 20 bp, synthetic construct
  source 1..20: mol_type = other DNA
gctcctgtgcgcacagcgcg

SEQ ID NO: 25624 - DNA, 20 bp, synthetic construct
  source 1..20: mol_type = other DNA
cgatagtacgtaccaggcgt

SEQ ID NO: 25625 - DNA, 20 bp, synthetic construct
  source 1..20: mol_type = other DNA
gagatcaaaacaagccctcc

SEQ ID NO: 25626 - DNA, 20 bp, synthetic construct
  source 1..20: mol_type = other DNA
tatgttggatattaatgctt

SEQ ID NO: 25627 - DNA, 20 bp, synthetic construct
  source 1..20: mol_type = other DNA
gacacggccaccctactgcc

SEQ ID NO: 25628 - DNA, 20 bp, synthetic construct
  source 1..20: mol_type = other DNA
gcagtggagcaactggcaga

SEQ ID NO: 25629 - DNA, 20 bp, synthetic construct
  source 1..20: mol_type = other DNA
gtgacacttctccagatgaa

SEQ ID NO: 25630 - DNA, 20 bp, synthetic construct
  source 1..20: mol_type = other DNA
tagcttacgtgagttcctgg

SEQ ID NO: 25631 - DNA, 20 bp, synthetic construct
  source 1..20: mol_type = other DNA
agcttacgtgagttcctgga

SEQ ID NO: 25632 - DNA, 20 bp, synthetic construct
  source 1..20: mol_type = other DNA
gcagtagggtggccgtgtca

SEQ ID NO: 25633 - DNA, 20 bp, synthetic construct
  source 1..20: mol_type = other DNA
agtgacacttctccagatga

SEQ ID NO: 25634 - DNA, 20 bp, synthetic construct
  source 1..20: mol_type = other DNA
acggccaccctactgcctgg

SEQ ID NO: 25635 - DNA, 20 bp, synthetic construct
  source 1..20: mol_type = other DNA
gactatagaagacaaagcag

SEQ ID NO: 25636 - DNA, 20 bp, synthetic construct
  source 1..20: mol_type = other DNA
ccggcctccaggcagtaggg

SEQ ID NO: 25637 - DNA, 20 bp, synthetic construct
  source 1..20: mol_type = other DNA
agacaaagcagtggagcaac

SEQ ID NO: 25638 - DNA, 20 bp, synthetic construct
  source 1..20: mol_type = other DNA
accctactgcctggaggccg

SEQ ID NO: 25639 - DNA, 20 bp, synthetic construct
  source 1..20: mol_type = other DNA
gcattcgcatgacagatgga

SEQ ID NO: 25640 - DNA, 20 bp, synthetic construct
  source 1..20: mol_type = other DNA
ggattcggacggagagcgcg

SEQ ID NO: 25641 - DNA, 20 bp, synthetic construct
  source 1..20: mol_type = other DNA
ccaggatgacattgcagtca

SEQ ID NO: 25642 - DNA, 20 bp, synthetic construct
  source 1..20: mol_type = other DNA
atgcgcattcgcatgacaga

SEQ ID NO: 25643 - DNA, 20 bp, synthetic construct
  source 1..20: mol_type = other DNA
acagatggacggacactggt

SEQ ID NO: 25644 - DNA, 20 bp, synthetic construct
  source 1..20: mol_type = other DNA
gcgcgcccgacagcagctag

SEQ ID NO: 25645 - DNA, 20 bp, synthetic construct
  source 1..20: mol_type = other DNA
cgtgactgcaatgtcatcct

SEQ ID NO: 25646 - DNA, 20 bp, synthetic construct
  source 1..20: mol_type = other DNA
attctcttctcgtagcagca

SEQ ID NO: 25647 - DNA, 20 bp, synthetic construct
  source 1..20: mol_type = other DNA
cggagagcgcgaggactcgg

SEQ ID NO: 25648 - DNA, 20 bp, synthetic construct
  source 1..20: mol_type = other DNA
gcccgtgctaaccccagcac

SEQ ID NO: 25649 - DNA, 20 bp, synthetic construct
  source 1..20: mol_type = other DNA
caccccgcgcaggattcgga

SEQ ID NO: 25650 - DNA, 20 bp, synthetic construct
  source 1..20: mol_type = other DNA
catgacagatggacggacac

SEQ ID NO: 25651 - DNA, 20 bp, synthetic construct
  source 1..20: mol_type = other DNA
tgcagtcacggtcagtgcag

SEQ ID NO: 25652 - DNA, 20 bp, synthetic construct
  source 1..20: mol_type = other DNA
tgtcatcctgggctcggcgc

SEQ ID NO: 25653 - DNA, 20 bp, synthetic construct
  source 1..20: mol_type = other DNA
ggaactcctgcgccgagccc

SEQ ID NO: 25654 - DNA, 20 bp, synthetic construct
  source 1..20: mol_type = other DNA
agaccttggattgccagtgt

SEQ ID NO: 25655 - DNA, 20 bp, synthetic construct
  source 1..20: mol_type = other DNA
aagaccttggattgccagtg

SEQ ID NO: 25656 - DNA, 20 bp, synthetic construct
  source 1..20: mol_type = other DNA
tatctatgtggatcagggta

SEQ ID NO: 25657 - DNA, 20 bp, synthetic construct
  source 1..20: mol_type = other DNA
tatttgtaggactgagtgga

SEQ ID NO: 25658 - DNA, 20 bp, synthetic construct
  source 1..20: mol_type = other DNA
gtgctccctggacgcacggg

SEQ ID NO: 25659 - DNA, 20 bp, synthetic construct
  source 1..20: mol_type = other DNA
ggtgaatttaggcgctatca

SEQ ID NO: 25660 - DNA, 20 bp, synthetic construct
  source 1..20: mol_type = other DNA
tatttcttagttatgccccg

SEQ ID NO: 25661 - DNA, 20 bp, synthetic construct
  source 1..20: mol_type = other DNA
gagcaacgttcgcgtcatca

SEQ ID NO: 25662 - DNA, 20 bp, synthetic construct
  source 1..20: mol_type = other DNA
catacttacagaacagaacc

SEQ ID NO: 25663 - DNA, 20 bp, synthetic construct
  source 1..20: mol_type = other DNA
aatacttactgataaatagt

SEQ ID NO: 25664 - DNA, 20 bp, synthetic construct
  source 1..20: mol_type = other DNA
cgagaactggagagaactgc

SEQ ID NO: 25665 - DNA, 20 bp, synthetic construct
  source 1..20: mol_type = other DNA
tgaatggggagaagatcttg

SEQ ID NO: 25666 - DNA, 20 bp, synthetic construct
  source 1..20: mol_type = other DNA
tcagggtccaaggactaaga

SEQ ID NO: 25667 - DNA, 20 bp, synthetic construct
  source 1..20: mol_type = other DNA
gtagatgtcacagagcagcc

SEQ ID NO: 25668 - DNA, 20 bp, synthetic construct
  source 1..20: mol_type = other DNA
actttataagtgataaagag

SEQ ID NO: 25669 - DNA, 20 bp, synthetic construct
  source 1..20: mol_type = other DNA
tctttggtgaatacgaacgg

SEQ ID NO: 25670 - DNA, 20 bp, synthetic construct
  source 1..20: mol_type = other DNA
ccaaagactcaaccttgcga

SEQ ID NO: 25671 - DNA, 20 bp, synthetic construct
  source 1..20: mol_type = other DNA
caggacccgagcagaatccg

SEQ ID NO: 25672 - DNA, 20 bp, synthetic construct
  source 1..20: mol_type = other DNA
tcaagagggagacaagccac

SEQ ID NO: 25673 - DNA, 20 bp, synthetic construct
  source 1..20: mol_type = other DNA
agaactgacagtcctccttg

SEQ ID NO: 25674 - DNA, 20 bp, synthetic construct
  source 1..20: mol_type = other DNA
caacaacaagaccaatagta

SEQ ID NO: 25675 - DNA, 20 bp, synthetic construct
  source 1..20: mol_type = other DNA
tcactcggaaggatgatttg

SEQ ID NO: 25676 - DNA, 20 bp, synthetic construct
  source 1..20: mol_type = other DNA
caattaccaagagcagagca

SEQ ID NO: 25677 - DNA, 20 bp, synthetic construct
  source 1..20: mol_type = other DNA
tcaggacccaactctctctc

SEQ ID NO: 25678 - DNA, 20 bp, synthetic construct
  source 1..20: mol_type = other DNA
cagttggttcaagactatga

SEQ ID NO: 25679 - DNA, 20 bp, synthetic construct
  source 1..20: mol_type = other DNA
ctcccttgtgaaatggccga

SEQ ID NO: 25680 - DNA, 20 bp, synthetic construct
  source 1..20: mol_type = other DNA
atatagtgccttcaactacc

SEQ ID NO: 25681 - DNA, 20 bp, synthetic construct
  source 1..20: mol_type = other DNA
cagagagctccaagcagtgt

SEQ ID NO: 25682 - DNA, 20 bp, synthetic construct
  source 1..20: mol_type = other DNA
aagggcatccaacaagtgtt

SEQ ID NO: 25683 - DNA, 20 bp, synthetic construct
  source 1..20: mol_type = other DNA
caggaaacagcattctgggg

SEQ ID NO: 25684 - DNA, 20 bp, synthetic construct
  source 1..20: mol_type = other DNA
caggctgagtatgcccatcg

SEQ ID NO: 25685 - DNA, 20 bp, synthetic construct
  source 1..20: mol_type = other DNA
ggaccaccggcgcattggga

SEQ ID NO: 25686 - DNA, 20 bp, synthetic construct
  source 1..20: mol_type = other DNA
ctgctgctcgacccttccgg

SEQ ID NO: 25687 - DNA, 20 bp, synthetic construct
  source 1..20: mol_type = other DNA
tctgacattcgattccccag

SEQ ID NO: 25688 - DNA, 20 bp, synthetic construct
  source 1..20: mol_type = other DNA
aagggtgtataatgcactag

SEQ ID NO: 25689 - DNA, 20 bp, synthetic construct
  source 1..20: mol_type = other DNA
agtgatatcttaatagtccg

SEQ ID NO: 25690 - DNA, 20 bp, synthetic construct
  source 1..20: mol_type = other DNA
tgactttggggctctacacc

SEQ ID NO: 25691 - DNA, 20 bp, synthetic construct
  source 1..20: mol_type = other DNA
tcagcctgatgttcgcccac

SEQ ID NO: 25692 - DNA, 20 bp, synthetic construct
  source 1..20: mol_type = other DNA
caatctgtccagtatgccga

SEQ ID NO: 25693 - DNA, 20 bp, synthetic construct
  source 1..20: mol_type = other DNA
ccaaagtcagctagtcgcag

SEQ ID NO: 25694 - DNA, 20 bp, synthetic construct
  source 1..20: mol_type = other DNA
tccccacaacagaattgctg

SEQ ID NO: 25695 - DNA, 20 bp, synthetic construct
  source 1..20: mol_type = other DNA
cttctgtacaacagatcagg

SEQ ID NO: 25696 - DNA, 20 bp, synthetic construct
  source 1..20: mol_type = other DNA
acacccttgtccctcgtggc

SEQ ID NO: 25697 - DNA, 20 bp, synthetic construct
  source 1..20: mol_type = other DNA
tctgccgggctagttggtag

SEQ ID NO: 25698 - DNA, 20 bp, synthetic construct
  source 1..20: mol_type = other DNA
gaatggagaaccttatgatc

SEQ ID NO: 25699 - DNA, 20 bp, synthetic construct
  source 1..20: mol_type = other DNA
gtccaatgtaagagatacgt

SEQ ID NO: 25700 - DNA, 20 bp, synthetic construct
  source 1..20: mol_type = other DNA
cattggacatgagtagcttg

SEQ ID NO: 25701 - DNA, 20 bp, synthetic construct
  source 1..20: mol_type = other DNA
agaccttgtgagaattcggc

SEQ ID NO: 25702 - DNA, 20 bp, synthetic construct
  source 1..20: mol_type = other DNA
tgtgtctataccaacaccac

SEQ ID NO: 25703 - DNA, 20 bp, synthetic construct
  source 1..20: mol_type = other DNA
gcttacttgagcttcggaag

SEQ ID NO: 25704 - DNA, 20 bp, synthetic construct
  source 1..20: mol_type = other DNA
atgctgaattgacaatctgg

SEQ ID NO: 25705 - DNA, 20 bp, synthetic construct
  source 1..20: mol_type = other DNA
atggccagcagattgagaga

SEQ ID NO: 25706 - DNA, 20 bp, synthetic construct
  source 1..20: mol_type = other DNA
ttctcacaaggtctcagctg

SEQ ID NO: 25707 - DNA, 20 bp, synthetic construct
  source 1..20: mol_type = other DNA
ggatggtcaagatcttgaag

SEQ ID NO: 25708 - DNA, 20 bp, synthetic construct
  source 1..20: mol_type = other DNA
agcagcaaatgtaattgtgg

SEQ ID NO: 25709 - DNA, 20 bp, synthetic construct
  source 1..20: mol_type = other DNA
caattaatcagaagaagagt

SEQ ID NO: 25710 - DNA, 20 bp, synthetic construct
  source 1..20: mol_type = other DNA
aatgtgggtatcttacaatg

SEQ ID NO: 25711 - DNA, 20 bp, synthetic construct
  source 1..20: mol_type = other DNA
ttggcggaagatccgaagca

SEQ ID NO: 25712 - DNA, 20 bp, synthetic construct
  source 1..20: mol_type = other DNA
gtaatgtgatgggcgatagg

SEQ ID NO: 25713 - DNA, 20 bp, synthetic construct
  source 1..20: mol_type = other DNA
gctcaggttggaccatgctg

SEQ ID NO: 25714 - DNA, 20 bp, synthetic construct
  source 1..20: mol_type = other DNA
tgaacgcatacccgaagcaa

SEQ ID NO: 25715 - DNA, 20 bp, synthetic construct
  source 1..20: mol_type = other DNA
agaagatcagctattccggg

SEQ ID NO: 25716 - DNA, 20 bp, synthetic construct
  source 1..20: mol_type = other DNA
gcacgtagttcaaagaacag

SEQ ID NO: 25717 - DNA, 20 bp, synthetic construct
  source 1..20: mol_type = other DNA
caggtggttgaagattatgc

SEQ ID NO: 25718 - DNA, 20 bp, synthetic construct
  source 1..20: mol_type = other DNA
gacatgtgaagagtgcttga

SEQ ID NO: 25719 - DNA, 20 bp, synthetic construct
  source 1..20: mol_type = other DNA
ttgcatgtgtaatatgtggt

SEQ ID NO: 25720 - DNA, 20 bp, synthetic construct
  source 1..20: mol_type = other DNA
aggtaatctaaaaaggacgg

SEQ ID NO: 25721 - DNA, 20 bp, synthetic construct
  source 1..20: mol_type = other DNA
ttgagagtgcacaaatcctg

SEQ ID NO: 25722 - DNA, 20 bp, synthetic construct
  source 1..20: mol_type = other DNA
caagcctttaactgaatgtg

SEQ ID NO: 25723 - DNA, 20 bp, synthetic construct
  source 1..20: mol_type = other DNA
ataacatacaacgatgcctt

SEQ ID NO: 25724 - DNA, 20 bp, synthetic construct
  source 1..20: mol_type = other DNA
tggctgttgtaaaacaacaa

SEQ ID NO: 25725 - DNA, 20 bp, synthetic construct
  source 1..20: mol_type = other DNA
cattagagatggtggcccat

SEQ ID NO: 25726 - DNA, 20 bp, synthetic construct
  source 1..20: mol_type = other DNA
aaaggattcacagagttgca

SEQ ID NO: 25727 - DNA, 20 bp, synthetic construct
  source 1..20: mol_type = other DNA
tcacattgtaaggcatgccc

SEQ ID NO: 25728 - DNA, 20 bp, synthetic construct
  source 1..20: mol_type = other DNA
tagttgctgttcttaaaagc

SEQ ID NO: 25729 - DNA, 20 bp, synthetic construct
  source 1..20: mol_type = other DNA
gaggagtgatcactagtcga

SEQ ID NO: 25730 - DNA, 20 bp, synthetic construct
  source 1..20: mol_type = other DNA
tgtcgcctgcatgaatccga

SEQ ID NO: 25731 - DNA, 20 bp, synthetic construct
  source 1..20: mol_type = other DNA
tcacttaaggagcgcaaccc

SEQ ID NO: 25732 - DNA, 20 bp, synthetic construct
  source 1..20: mol_type = other DNA
tctgtgctccaactcggacg

SEQ ID NO: 25733 - DNA, 20 bp, synthetic construct
  source 1..20: mol_type = other DNA
gcaaagtggcaataaatgag

SEQ ID NO: 25734 - DNA, 20 bp, synthetic construct
  source 1..20: mol_type = other DNA
gatggtcaggcagtctaccc

SEQ ID NO: 25735 - DNA, 20 bp, synthetic construct
  source 1..20: mol_type = other DNA
gtggctggatctctgaaacg

SEQ ID NO: 25736 - DNA, 20 bp, synthetic construct
  source 1..20: mol_type = other DNA
tatggcactgaatttaacca

SEQ ID NO: 25737 - DNA, 20 bp, synthetic construct
  source 1..20: mol_type = other DNA
ctttcagatcactctgaccg

SEQ ID NO: 25738 - DNA, 20 bp, synthetic construct
  source 1..20: mol_type = other DNA
ccgtgtaagcatcccagacg

SEQ ID NO: 25739 - DNA, 20 bp, synthetic construct
  source 1..20: mol_type = other DNA
gtgacttccgcattatggag

SEQ ID NO: 25740 - DNA, 20 bp, synthetic construct
  source 1..20: mol_type = other DNA
tgagttcaaccgaatctctg

SEQ ID NO: 25741 - DNA, 20 bp, synthetic construct
  source 1..20: mol_type = other DNA
acagattagctcaatgtcag

SEQ ID NO: 25742 - DNA, 20 bp, synthetic construct
  source 1..20: mol_type = other DNA
caagccgagtgtgaatgtgt

SEQ ID NO: 25743 - DNA, 20 bp, synthetic construct
  source 1..20: mol_type = other DNA
acctgcaccaggctactctc

SEQ ID NO: 25744 - DNA, 20 bp, synthetic construct
  source 1..20: mol_type = other DNA
ttacctgactgcttaaccga

SEQ ID NO: 25745 - DNA, 20 bp, synthetic construct
  source 1..20: mol_type = other DNA
tgcaaagacccatacatcac

SEQ ID NO: 25746 - DNA, 20 bp, synthetic construct
  source 1..20: mol_type = other DNA
aaatcttctgctgccaacac

SEQ ID NO: 25747 - DNA, 20 bp, synthetic construct
  source 1..20: mol_type = other DNA
ggtacctaagaacttccctc

SEQ ID NO: 25748 - DNA, 20 bp, synthetic construct
  source 1..20: mol_type = other DNA
tggaatcctgaagttatcag

SEQ ID NO: 25749 - DNA, 20 bp, synthetic construct
  source 1..20: mol_type = other DNA
tacacctcaaccttacctga

SEQ ID NO: 25750 - DNA, 20 bp, synthetic construct
  source 1..20: mol_type = other DNA
aataatgaataattcccaag

SEQ ID NO: 25751 - DNA, 20 bp, synthetic construct
  source 1..20: mol_type = other DNA
tttgtggaacagaaatgtga

SEQ ID NO: 25752 - DNA, 20 bp, synthetic construct
  source 1..20: mol_type = other DNA
gttccacaaagtccaagatg

SEQ ID NO: 25753 - DNA, 20 bp, synthetic construct
  source 1..20: mol_type = other DNA
cttaaccgatggctctgatg

SEQ ID NO: 25754 - DNA, 20 bp, synthetic construct
  source 1..20: mol_type = other DNA
gcttcactggaatgcactgt

SEQ ID NO: 25755 - DNA, 20 bp, synthetic construct
  source 1..20: mol_type = other DNA
gatgtatgggtctttgcaag

SEQ ID NO: 25756 - DNA, 20 bp, synthetic construct
  source 1..20: mol_type = other DNA
taggttgaaaagctgttaga

SEQ ID NO: 25757 - DNA, 20 bp, synthetic construct
  source 1..20: mol_type = other DNA
aatatgaccaggaagaagaa

SEQ ID NO: 25758 - DNA, 20 bp, synthetic construct
  source 1..20: mol_type = other DNA
atcaaaagaggaatatgacc

SEQ ID NO: 25759 - DNA, 20 bp, synthetic construct
  source 1..20: mol_type = other DNA
tgccctgagtctcaatgaag

SEQ ID NO: 25760 - DNA, 20 bp, synthetic construct
  source 1..20: mol_type = other DNA
gtcatcgttactgtgccaag

SEQ ID NO: 25761 - DNA, 20 bp, synthetic construct
  source 1..20: mol_type = other DNA
acggatgacctggaaggaga

SEQ ID NO: 25762 - DNA, 20 bp, synthetic construct
  source 1..20: mol_type = other DNA
tcaagcacaggataaaggta

SEQ ID NO: 25763 - DNA, 20 bp, synthetic construct
  source 1..20: mol_type = other DNA
agcagctcgagtggactggg

SEQ ID NO: 25764 - DNA, 20 bp, synthetic construct
  source 1..20: mol_type = other DNA
tgatgactacagaggaggcg

SEQ ID NO: 25765 - DNA, 20 bp, synthetic construct
  source 1..20: mol_type = other DNA
tcttccttaggagtactccg

SEQ ID NO: 25766 - DNA, 20 bp, synthetic construct
  source 1..20: mol_type = other DNA
gatgactacccacctagaag

SEQ ID NO: 25767 - DNA, 20 bp, synthetic construct
  source 1..20: mol_type = other DNA
agtagaagaacggctacaga

SEQ ID NO: 25768 - DNA, 20 bp, synthetic construct
  source 1..20: mol_type = other DNA
gatgaaacggatgacctgga

SEQ ID NO: 25769 - DNA, 20 bp, synthetic construct
  source 1..20: mol_type = other DNA
gcgatttgggaagacggctc

SEQ ID NO: 25770 - DNA, 20 bp, synthetic construct
  source 1..20: mol_type = other DNA
cgggatatggatcgatatgg

SEQ ID NO: 25771 - DNA, 20 bp, synthetic construct
  source 1..20: mol_type = other DNA
tgtcatatcggtcttcatag

SEQ ID NO: 25772 - DNA, 20 bp, synthetic construct
  source 1..20: mol_type = other DNA
atttggcagtgggtatcgca

SEQ ID NO: 25773 - DNA, 20 bp, synthetic construct
  source 1..20: mol_type = other DNA
gtaacgatgacgatgtgtat

SEQ ID NO: 25774 - DNA, 20 bp, synthetic construct
  source 1..20: mol_type = other DNA
atgcagtacttattatggtg

SEQ ID NO: 25775 - DNA, 20 bp, synthetic construct
  source 1..20: mol_type = other DNA
caaaaacagcccgttgactg

SEQ ID NO: 25776 - DNA, 20 bp, synthetic construct
  source 1..20: mol_type = other DNA
gacctccaacatgacggaca

SEQ ID NO: 25777 - DNA, 20 bp, synthetic construct
  source 1..20: mol_type = other DNA
ccataataagtactgcatca

SEQ ID NO: 25778 - DNA, 20 bp, synthetic construct
  source 1..20: mol_type = other DNA
tcctacgacaggtggatgtg

SEQ ID NO: 25779 - DNA, 20 bp, synthetic construct
  source 1..20: mol_type = other DNA
ccaacggaggcacctggttg

SEQ ID NO: 25780 - DNA, 20 bp, synthetic construct
  source 1..20: mol_type = other DNA
agaggggcacacagtcggtg

SEQ ID NO: 25781 - DNA, 20 bp, synthetic construct
  source 1..20: mol_type = other DNA
atgcagctgtgaacgatcag

SEQ ID NO: 25782 - DNA, 20 bp, synthetic construct
  source 1..20: mol_type = other DNA
gcccgttgactgcggcgtgt

SEQ ID NO: 25783 - DNA, 20 bp, synthetic construct
  source 1..20: mol_type = other DNA
ggccctgtccgtcatgttgg

SEQ ID NO: 25784 - DNA, 20 bp, synthetic construct
  source 1..20: mol_type = other DNA
acgatgaccgggggcacacg

SEQ ID NO: 25785 - DNA, 20 bp, synthetic construct
  source 1..20: mol_type = other DNA
cacaggcattctccagaccg

SEQ ID NO: 25786 - DNA, 20 bp, synthetic construct
  source 1..20: mol_type = other DNA
gtcatcgtcctggagaacca

SEQ ID NO: 25787 - DNA, 20 bp, synthetic construct
  source 1..20: mol_type = other DNA
ttctccaggacgatgaccgg

SEQ ID NO: 25788 - DNA, 20 bp, synthetic construct
  source 1..20: mol_type = other DNA
atgcaggcacatcttcacgt

SEQ ID NO: 25789 - DNA, 20 bp, synthetic construct
  source 1..20: mol_type = other DNA
gaggcaccattcgtacccgt

SEQ ID NO: 25790 - DNA, 20 bp, synthetic construct
  source 1..20: mol_type = other DNA
taggagcaatgactgttggt

SEQ ID NO: 25791 - DNA, 20 bp, synthetic construct
  source 1..20: mol_type = other DNA
atgtcagtcaaacttaccaa

SEQ ID NO: 25792 - DNA, 20 bp, synthetic construct
  source 1..20: mol_type = other DNA
ttatataaactgaagagcag

SEQ ID NO: 25793 - DNA, 20 bp, synthetic construct
  source 1..20: mol_type = other DNA
attatataaactgaagagca

SEQ ID NO: 25794 - DNA, 20 bp, synthetic construct
  source 1..20: mol_type = other DNA
actcattcgaaaagctaaag

SEQ ID NO: 25795 - DNA, 20 bp, synthetic construct
  source 1..20: mol_type = other DNA
tgtcagtcaaacttaccaac

SEQ ID NO: 25796 - DNA, 20 bp, synthetic construct
  source 1..20: mol_type = other DNA
aacttaccaacgggtacgaa

SEQ ID NO: 25797 - DNA, 20 bp, synthetic construct
  source 1..20: mol_type = other DNA
tcatctgatccacatgcgtg

SEQ ID NO: 25798 - DNA, 20 bp, synthetic construct
  source 1..20: mol_type = other DNA
cacatgcgtgtggcagccca

SEQ ID NO: 25799 - DNA, 20 bp, synthetic construct
  source 1..20: mol_type = other DNA
gttgtaggagcaatgactgt

SEQ ID NO: 25800 - DNA, 20 bp, synthetic construct
  source 1..20: mol_type = other DNA
gattatataaactgaagagc

SEQ ID NO: 25801 - DNA, 20 bp, synthetic construct
  source 1..20: mol_type = other DNA
gatcttcctcatatgaagga

SEQ ID NO: 25802 - DNA, 20 bp, synthetic construct
  source 1..20: mol_type = other DNA
ccttcatatgaggaagatca

SEQ ID NO: 25803 - DNA, 20 bp, synthetic construct
  source 1..20: mol_type = other DNA
cttgggctgccacacgcatg

SEQ ID NO: 25804 - DNA, 20 bp, synthetic construct
  source 1..20: mol_type = other DNA
acagcaagcacaccatcggg

SEQ ID NO: 25805 - DNA, 20 bp, synthetic construct
  source 1..20: mol_type = other DNA
agagatcagacagagtaccc

SEQ ID NO: 25806 - DNA, 20 bp, synthetic construct
  source 1..20: mol_type = other DNA
acagctcttacagcgcacac

SEQ ID NO: 25807 - DNA, 20 bp, synthetic construct
  source 1..20: mol_type = other DNA
acgaccccaagtactggcga

SEQ ID NO: 25808 - DNA, 20 bp, synthetic construct
  source 1..20: mol_type = other DNA
gtgaccacaggggcgaatcg

SEQ ID NO: 25809 - DNA, 20 bp, synthetic construct
  source 1..20: mol_type = other DNA
aagatgcgcatggctcgatg

SEQ ID NO: 25810 - DNA, 20 bp, synthetic construct
  source 1..20: mol_type = other DNA
agtgtgacaaaatagaggct

SEQ ID NO: 25811 - DNA, 20 bp, synthetic construct
  source 1..20: mol_type = other DNA
cgattcgtagatcttcaggt

SEQ ID NO: 25812 - DNA, 20 bp, synthetic construct
  source 1..20: mol_type = other DNA
gatgcggggaccttgcacag

SEQ ID NO: 25813 - DNA, 20 bp, synthetic construct
  source 1..20: mol_type = other DNA
cccgtgtcatcaagacaccc

SEQ ID NO: 25814 - DNA, 20 bp, synthetic construct
  source 1..20: mol_type = other DNA
agtgaggtccagcgaaatgt

SEQ ID NO: 25815 - DNA, 20 bp, synthetic construct
  source 1..20: mol_type = other DNA
cgaagtccacatagactcgg

SEQ ID NO: 25816 - DNA, 20 bp, synthetic construct
  source 1..20: mol_type = other DNA
tgcactctgcctcaaatacg

SEQ ID NO: 25817 - DNA, 20 bp, synthetic construct
  source 1..20: mol_type = other DNA
ggaaagcagaagtctcccga

SEQ ID NO: 25818 - DNA, 20 bp, synthetic construct
  source 1..20: mol_type = other DNA
cctcctccgagtgccgcatg

SEQ ID NO: 25819 - DNA, 20 bp, synthetic construct
  source 1..20: mol_type = other DNA
agaggagactcactaaggtg

SEQ ID NO: 25820 - DNA, 20 bp, synthetic construct
  source 1..20: mol_type = other DNA
gcagcgccggatgagagtga

SEQ ID NO: 25821 - DNA, 20 bp, synthetic construct
  source 1..20: mol_type = other DNA
gcagttgattcgcaagcacg

SEQ ID NO: 25822 - DNA, 20 bp, synthetic construct
  source 1..20: mol_type = other DNA
ggaactgcagaaaccgaaca

SEQ ID NO: 25823 - DNA, 20 bp, synthetic construct
  source 1..20: mol_type = other DNA
gccgcgtccgcgaagtactg

SEQ ID NO: 25824 - DNA, 20 bp, synthetic construct
  source 1..20: mol_type = other DNA
cttaaggaaactctcccgga

SEQ ID NO: 25825 - DNA, 20 bp, synthetic construct
  source 1..20: mol_type = other DNA
caggagccctcaccgccgtg

SEQ ID NO: 25826 - DNA, 20 bp, synthetic construct
  source 1..20: mol_type = other DNA
caggaggtgaagatgaatgt

SEQ ID NO: 25827 - DNA, 20 bp, synthetic construct
  source 1..20: mol_type = other DNA
tggaggtaaaagctcaccag

SEQ ID NO: 25828 - DNA, 20 bp, synthetic construct
  source 1..20: mol_type = other DNA
ggtcatgcagctcaaatatg

SEQ ID NO: 25829 - DNA, 20 bp, synthetic construct
  source 1..20: mol_type = other DNA
gaaatctgtaatgttcacgt

SEQ ID NO: 25830 - DNA, 20 bp, synthetic construct
  source 1..20: mol_type = other DNA
gaactggtgcagctccactg

SEQ ID NO: 25831 - DNA, 20 bp, synthetic construct
  source 1..20: mol_type = other DNA
ggagagggcatgtgaagcgc

SEQ ID NO: 25832 - DNA, 20 bp, synthetic construct
  source 1..20: mol_type = other DNA
gtagcctggctcctcgaccc

SEQ ID NO: 25833 - DNA, 20 bp, synthetic construct
  source 1..20: mol_type = other DNA
caggctcattaacaagcacc

SEQ ID NO: 25834 - DNA, 20 bp, synthetic construct
  source 1..20: mol_type = other DNA
agaacatcttgaccaccaca

SEQ ID NO: 25835 - DNA, 20 bp, synthetic construct
  source 1..20: mol_type = other DNA
agctcggtccacgaacacgg

SEQ ID NO: 25836 - DNA, 20 bp, synthetic construct
  source 1..20: mol_type = other DNA
cttgaggtatattcccaacg

SEQ ID NO: 25837 - DNA, 20 bp, synthetic construct
  source 1..20: mol_type = other DNA
agcattgccgaactcgaagg

SEQ ID NO: 25838 - DNA, 20 bp, synthetic construct
  source 1..20: mol_type = other DNA
ggaagccatgtacgacgtgg

SEQ ID NO: 25839 - DNA, 20 bp, synthetic construct
  source 1..20: mol_type = other DNA
agtggtcagagagaagtggt

SEQ ID NO: 25840 - DNA, 20 bp, synthetic construct
  source 1..20: mol_type = other DNA
ctgggggctacaccagatcg

SEQ ID NO: 25841 - DNA, 20 bp, synthetic construct
  source 1..20: mol_type = other DNA
cagcctctgtcacgacgtgg

SEQ ID NO: 25842 - DNA, 20 bp, synthetic construct
  source 1..20: mol_type = other DNA
cgggagcagacggtcaaggt

SEQ ID NO: 25843 - DNA, 20 bp, synthetic construct
  source 1..20: mol_type = other DNA
gcagcagccctacgcaaccc

SEQ ID NO: 25844 - DNA, 20 bp, synthetic construct
  source 1..20: mol_type = other DNA
ccccatcgtagaccagacac

SEQ ID NO: 25845 - DNA, 20 bp, synthetic construct
  source 1..20: mol_type = other DNA
gaacgaggccaacctcaatg

SEQ ID NO: 25846 - DNA, 20 bp, synthetic construct
  source 1..20: mol_type = other DNA
acagtgagaccgcagagcac

SEQ ID NO: 25847 - DNA, 20 bp, synthetic construct
  source 1..20: mol_type = other DNA
cattgagtagaggttgtggg

SEQ ID NO: 25848 - DNA, 20 bp, synthetic construct
  source 1..20: mol_type = other DNA
gactacatgtattcggccca

SEQ ID NO: 25849 - DNA, 20 bp, synthetic construct
  source 1..20: mol_type = other DNA
tatcccttacatacccgtgg

SEQ ID NO: 25850 - DNA, 20 bp, synthetic construct
  source 1..20: mol_type = other DNA
ggagaagattaagatacagc

SEQ ID NO: 25851 - DNA, 20 bp, synthetic construct
  source 1..20: mol_type = other DNA
agaacccagaactagttgcc

SEQ ID NO: 25852 - DNA, 20 bp, synthetic construct
  source 1..20: mol_type = other DNA
cccaggatacaagacatggt

SEQ ID NO: 25853 - DNA, 20 bp, synthetic construct
  source 1..20: mol_type = other DNA
tacctgacaagtgacgttgc

SEQ ID NO: 25854 - DNA, 20 bp, synthetic construct
  source 1..20: mol_type = other DNA
cagtgaaatctatctcccag

SEQ ID NO: 25855 - DNA, 20 bp, synthetic construct
  source 1..20: mol_type = other DNA
gacggaaagaaaccaagcgt

SEQ ID NO: 25856 - DNA, 20 bp, synthetic construct
  source 1..20: mol_type = other DNA
ggtgggactctcagcgacct

SEQ ID NO: 25857 - DNA, 20 bp, synthetic construct
  source 1..20: mol_type = other DNA
agcggctaccccgaaagctg

SEQ ID NO: 25858 - DNA, 20 bp, synthetic construct
  source 1..20: mol_type = other DNA
gagctcatggaggtatagtt

SEQ ID NO: 25859 - DNA, 20 bp, synthetic construct
  source 1..20: mol_type = other DNA
taagatacagctggccaatg

SEQ ID NO: 25860 - DNA, 20 bp, synthetic construct
  source 1..20: mol_type = other DNA
ggtgcagatcccggatgaga

SEQ ID NO: 25861 - DNA, 20 bp, synthetic construct
  source 1..20: mol_type = other DNA
aagggcggtgatagctccag

SEQ ID NO: 25862 - DNA, 20 bp, synthetic construct
  source 1..20: mol_type = other DNA
tgccttctaggagctcatgg

SEQ ID NO: 25863 - DNA, 20 bp, synthetic construct
  source 1..20: mol_type = other DNA
caccagcatctgagagaaag

SEQ ID NO: 25864 - DNA, 20 bp, synthetic construct
  source 1..20: mol_type = other DNA
gatgtcctagcaattaatgg

SEQ ID NO: 25865 - DNA, 20 bp, synthetic construct
  source 1..20: mol_type = other DNA
atcactataggtgcgatggt

SEQ ID NO: 25866 - DNA, 20 bp, synthetic construct
  source 1..20: mol_type = other DNA
tggctacttctatgatacac

SEQ ID NO: 25867 - DNA, 20 bp, synthetic construct
  source 1..20: mol_type = other DNA
aaataatgctgatccatgaa

SEQ ID NO: 25868 - DNA, 20 bp, synthetic construct
  source 1..20: mol_type = other DNA
gagcactatggagtagcgca

SEQ ID NO: 25869 - DNA, 20 bp, synthetic construct
  source 1..20: mol_type = other DNA
caaaataagattagatacgg

SEQ ID NO: 25870 - DNA, 20 bp, synthetic construct
  source 1..20: mol_type = other DNA
aagaaactggtgttaccaag

SEQ ID NO: 25871 - DNA, 20 bp, synthetic construct
  source 1..20: mol_type = other DNA
ggagcacctaaaagtcagat

SEQ ID NO: 25872 - DNA, 20 bp, synthetic construct
  source 1..20: mol_type = other DNA
atttcaaagaggacaaacac

SEQ ID NO: 25873 - DNA, 20 bp, synthetic construct
  source 1..20: mol_type = other DNA
gtacgaataggaataattga

SEQ ID NO: 25874 - DNA, 20 bp, synthetic construct
  source 1..20: mol_type = other DNA
tatacccaacaaataattca

SEQ ID NO: 25875 - DNA, 20 bp, synthetic construct
  source 1..20: mol_type = other DNA
agtcctagagtcaaatggta

SEQ ID NO: 25876 - DNA, 20 bp, synthetic construct
  source 1..20: mol_type = other DNA
gtggacttaggcaacaggta

SEQ ID NO: 25877 - DNA, 20 bp, synthetic construct
  source 1..20: mol_type = other DNA
gattacgagcatgacaaagt

SEQ ID NO: 25878 - DNA, 20 bp, synthetic construct
  source 1..20: mol_type = other DNA
aagtagccagctggaaagag

SEQ ID NO: 25879 - DNA, 20 bp, synthetic construct
  source 1..20: mol_type = other DNA
attgccgttacagaccagaa

SEQ ID NO: 25880 - DNA, 20 bp, synthetic construct
  source 1..20: mol_type = other DNA
cactacgacagtgagaaagg

SEQ ID NO: 25881 - DNA, 20 bp, synthetic construct
  source 1..20: mol_type = other DNA
atcattagggagctgcacac

SEQ ID NO: 25882 - DNA, 20 bp, synthetic construct
  source 1..20: mol_type = other DNA
tctttgttgcgatgatacaa

SEQ ID NO: 25883 - DNA, 20 bp, synthetic construct
  source 1..20: mol_type = other DNA
cagtgtgagcatcaactgag

SEQ ID NO: 25884 - DNA, 20 bp, synthetic construct
  source 1..20: mol_type = other DNA
ctgacccaaacagagactca

SEQ ID NO: 25885 - DNA, 20 bp, synthetic construct
  source 1..20: mol_type = other DNA
tcttggaacccaaatctcag

SEQ ID NO: 25886 - DNA, 20 bp, synthetic construct
  source 1..20: mol_type = other DNA
gaacggcactgatgtcccac

SEQ ID NO: 25887 - DNA, 20 bp, synthetic construct
  source 1..20: mol_type = other DNA
agactcatggagtagatgcc

SEQ ID NO: 25888 - DNA, 20 bp, synthetic construct
  source 1..20: mol_type = other DNA
tttggtgatgacccatgctc

SEQ ID NO: 25889 - DNA, 20 bp, synthetic construct
  source 1..20: mol_type = other DNA
gcattcatcgacttgtcctg

SEQ ID NO: 25890 - DNA, 20 bp, synthetic construct
  source 1..20: mol_type = other DNA
tgtcctggggacacacacat

SEQ ID NO: 25891 - DNA, 20 bp, synthetic construct
  source 1..20: mol_type = other DNA
tctgggttgcactctccaga

SEQ ID NO: 25892 - DNA, 20 bp, synthetic construct
  source 1..20: mol_type = other DNA
ctccgtggacatcagaagga

SEQ ID NO: 25893 - DNA, 20 bp, synthetic construct
  source 1..20: mol_type = other DNA
atcagtgccgttccaaagga

SEQ ID NO: 25894 - DNA, 20 bp, synthetic construct
  source 1..20: mol_type = other DNA
taaacttggaccacaacagg

SEQ ID NO: 25895 - DNA, 20 bp, synthetic construct
  source 1..20: mol_type = other DNA
catatcgttgaggtgaacga

SEQ ID NO: 25896 - DNA, 20 bp, synthetic construct
  source 1..20: mol_type = other DNA
acctcaacgatatgcagccg

SEQ ID NO: 25897 - DNA, 20 bp, synthetic construct
  source 1..20: mol_type = other DNA
gaggactacgcgctacccgc

SEQ ID NO: 25898 - DNA, 20 bp, synthetic construct
  source 1..20: mol_type = other DNA
gcggtaccagagcggcaagt

SEQ ID NO: 25899 - DNA, 20 bp, synthetic construct
  source 1..20: mol_type = other DNA
cctggggtctccctacccgg

SEQ ID NO: 25900 - DNA, 20 bp, synthetic construct
  source 1..20: mol_type = other DNA
cacccggactcccccaacac

SEQ ID NO: 25901 - DNA, 20 bp, synthetic construct
  source 1..20: mol_type = other DNA
gcccggccacagtaaatgac

SEQ ID NO: 25902 - DNA, 20 bp, synthetic construct
  source 1..20: mol_type = other DNA
gggtcgcggcgggtaggcgt

SEQ ID NO: 25903 - DNA, 20 bp, synthetic construct
  source 1..20: mol_type = other DNA
tgccgctctggtaccgccag

SEQ ID NO: 25904 - DNA, 20 bp, synthetic construct
  source 1..20: mol_type = other DNA
ggacgcggacgagcgtcgcg

SEQ ID NO: 25905 - DNA, 20 bp, synthetic construct
  source 1..20: mol_type = other DNA
tccaaggaagcggctcggcg

SEQ ID NO: 25906 - DNA, 20 bp, synthetic construct
  source 1..20: mol_type = other DNA
aaagctcacaaacaacaagg

SEQ ID NO: 25907 - DNA, 20 bp, synthetic construct
  source 1..20: mol_type = other DNA
ggtagcgcgtagtcctcacg

SEQ ID NO: 25908 - DNA, 20 bp, synthetic construct
  source 1..20: mol_type = other DNA
gacgtacaggcggtttcctg

SEQ ID NO: 25909 - DNA, 20 bp, synthetic construct
  source 1..20: mol_type = other DNA
gtgaattctgccccgtgacc

SEQ ID NO: 25910 - DNA, 20 bp, synthetic construct
  source 1..20: mol_type = other DNA
tgataggcaaagattacatg

SEQ ID NO: 25911 - DNA, 20 bp, synthetic construct
  source 1..20: mol_type = other DNA
tccaaattgcagctgaccta

SEQ ID NO: 25912 - DNA, 20 bp, synthetic construct
  source 1..20: mol_type = other DNA
acagttcctagacttctatg

SEQ ID NO: 25913 - DNA, 20 bp, synthetic construct
  source 1..20: mol_type = other DNA
gaagtctaggaactgttggt

SEQ ID NO: 25914 - DNA, 20 bp, synthetic construct
  source 1..20: mol_type = other DNA
acaagcagaatacttacgac

SEQ ID NO: 25915 - DNA, 20 bp, synthetic construct
  source 1..20: mol_type = other DNA
agttggaaaatggtaccaca

SEQ ID NO: 25916 - DNA, 20 bp, synthetic construct
  source 1..20: mol_type = other DNA
gctggatcaggctgaaaatg

SEQ ID NO: 25917 - DNA, 20 bp, synthetic construct
  source 1..20: mol_type = other DNA
cctaggactctcacagaagg

SEQ ID NO: 25918 - DNA, 20 bp, synthetic construct
  source 1..20: mol_type = other DNA
agaggaggagcagaaacgac

SEQ ID NO: 25919 - DNA, 20 bp, synthetic construct
  source 1..20: mol_type = other DNA
ggcaagaagaacaagaggta

SEQ ID NO: 25920 - DNA, 20 bp, synthetic construct
  source 1..20: mol_type = other DNA
gtggttgctaagagagcaga

SEQ ID NO: 25921 - DNA, 20 bp, synthetic construct
  source 1..20: mol_type = other DNA
tgtactccaggcttgcgtca

SEQ ID NO: 25922 - DNA, 20 bp, synthetic construct
  source 1..20: mol_type = other DNA
gaacatatacattgcccctc

SEQ ID NO: 25923 - DNA, 20 bp, synthetic construct
  source 1..20: mol_type = other DNA
attactctgaaatccacggg

SEQ ID NO: 25924 - DNA, 20 bp, synthetic construct
  source 1..20: mol_type = other DNA
gcaggtgagctcggactcga

SEQ ID NO: 25925 - DNA, 20 bp, synthetic construct
  source 1..20: mol_type = other DNA
ggagcgcagatccaagactg

SEQ ID NO: 25926 - DNA, 20 bp, synthetic construct
  source 1..20: mol_type = other DNA
tgaggcagaccacttggacc

SEQ ID NO: 25927 - DNA, 20 bp, synthetic construct
  source 1..20: mol_type = other DNA
gacatcgtcaattacaactc

SEQ ID NO: 25928 - DNA, 20 bp, synthetic construct
  source 1..20: mol_type = other DNA
tgcaacaagactctgaccac

SEQ ID NO: 25929 - DNA, 20 bp, synthetic construct
  source 1..20: mol_type = other DNA
tgctggctgtggacaaacag

SEQ ID NO: 25930 - DNA, 20 bp, synthetic construct
  source 1..20: mol_type = other DNA
cggtagcatttactgcaagg

SEQ ID NO: 25931 - DNA, 20 bp, synthetic construct
  source 1..20: mol_type = other DNA
ggcgcgcatgaccatctccg

SEQ ID NO: 25932 - DNA, 20 bp, synthetic construct
  source 1..20: mol_type = other DNA
atctccggaggccacatcca

SEQ ID NO: 25933 - DNA, 20 bp, synthetic construct
  source 1..20: mol_type = other DNA
cgtaccgttgaagtaaggca

SEQ ID NO: 25934 - DNA, 20 bp, synthetic construct
  source 1..20: mol_type = other DNA
cacttcgagaccctcttgca

SEQ ID NO: 25935 - DNA, 20 bp, synthetic construct
  source 1..20: mol_type = other DNA
agcccttccttaccgcgtcg

SEQ ID NO: 25936 - DNA, 20 bp, synthetic construct
  source 1..20: mol_type = other DNA
gagaagcccgccctgtgcgc

SEQ ID NO: 25937 - DNA, 20 bp, synthetic construct
  source 1..20: mol_type = other DNA
gaagtgctgtgaatgtaagc

SEQ ID NO: 25938 - DNA, 20 bp, synthetic construct
  source 1..20: mol_type = other DNA
ctcggacaggtactatctgc

SEQ ID NO: 25939 - DNA, 20 bp, synthetic construct
  source 1..20: mol_type = other DNA
ccccacaggaatcctcaatg

SEQ ID NO: 25940 - DNA, 20 bp, synthetic construct
  source 1..20: mol_type = other DNA
acctttgacaccaacagcga

SEQ ID NO: 25941 - DNA, 20 bp, synthetic construct
  source 1..20: mol_type = other DNA
ttcagcatgtatgacctgga

SEQ ID NO: 25942 - DNA, 20 bp, synthetic construct
  source 1..20: mol_type = other DNA
atgtatgacctggacggcaa

SEQ ID NO: 25943 - DNA, 20 bp, synthetic construct
  source 1..20: mol_type = other DNA
gacgtgctcggcaaacttgg

SEQ ID NO: 25944 - DNA, 20 bp, synthetic construct
  source 1..20: mol_type = other DNA
gtcaccatagggaaagaagt

SEQ ID NO: 25945 - DNA, 20 bp, synthetic construct
  source 1..20: mol_type = other DNA
gatgaactcccgaaagtcta

SEQ ID NO: 25946 - DNA, 20 bp, synthetic construct
  source 1..20: mol_type = other DNA
tccacattgaggattcctgt

SEQ ID NO: 25947 - DNA, 20 bp, synthetic construct
  source 1..20: mol_type = other DNA
acatgagcttctgctccagg

SEQ ID NO: 25948 - DNA, 20 bp, synthetic construct
  source 1..20: mol_type = other DNA
cctggagcagaagctcatgt

SEQ ID NO: 25949 - DNA, 20 bp, synthetic construct
  source 1..20: mol_type = other DNA
accatcttgtaaatggcctg

SEQ ID NO: 25950 - DNA, 20 bp, synthetic construct
  source 1..20: mol_type = other DNA
gtccaggtcatacatgctga

SEQ ID NO: 25951 - DNA, 20 bp, synthetic construct
  source 1..20: mol_type = other DNA
gagctgcaggagtggtacaa

SEQ ID NO: 25952 - DNA, 20 bp, synthetic construct
  source 1..20: mol_type = other DNA
caacggctacatcagccggg

SEQ ID NO: 25953 - DNA, 20 bp, synthetic construct
  source 1..20: mol_type = other DNA
gtggtacaagggcttcctca

SEQ ID NO: 25954 - DNA, 20 bp, synthetic construct
  source 1..20: mol_type = other DNA
ggagatgtacgccgcgatca

SEQ ID NO: 25955 - DNA, 20 bp, synthetic construct
  source 1..20: mol_type = other DNA
gctccacgatctcaggcgac

SEQ ID NO: 25956 - DNA, 20 bp, synthetic construct
  source 1..20: mol_type = other DNA
gcggacttaccgaagagcag

SEQ ID NO: 25957 - DNA, 20 bp, synthetic construct
  source 1..20: mol_type = other DNA
gcagcgccagcacgttaccc

SEQ ID NO: 25958 - DNA, 20 bp, synthetic construct
  source 1..20: mol_type = other DNA
gcaggttgttcgatatggtg

SEQ ID NO: 25959 - DNA, 20 bp, synthetic construct
  source 1..20: mol_type = other DNA
gcgcgcgagcagatgccgcg

SEQ ID NO: 25960 - DNA, 20 bp, synthetic construct
  source 1..20: mol_type = other DNA
tgtacttgtggaagtcccga

SEQ ID NO: 25961 - DNA, 20 bp, synthetic construct
  source 1..20: mol_type = other DNA
caccatacctggctctacca

SEQ ID NO: 25962 - DNA, 20 bp, synthetic construct
  source 1..20: mol_type = other DNA
tcctgactgatgaagagtgt

SEQ ID NO: 25963 - DNA, 20 bp, synthetic construct
  source 1..20: mol_type = other DNA
ccatatcgaacaacctgcag

SEQ ID NO: 25964 - DNA, 20 bp, synthetic construct
  source 1..20: mol_type = other DNA
ggcggatggcacgcatgatg

SEQ ID NO: 25965 - DNA, 20 bp, synthetic construct
  source 1..20: mol_type = other DNA
ggcttgcacagcggacgcac

SEQ ID NO: 25966 - DNA, 20 bp, synthetic construct
  source 1..20: mol_type = other DNA
ctcttcgtgcactacagcaa

SEQ ID NO: 25967 - DNA, 20 bp, synthetic construct
  source 1..20: mol_type = other DNA
tcggatgaagtgatccctgt

SEQ ID NO: 25968 - DNA, 20 bp, synthetic construct
  source 1..20: mol_type = other DNA
ttacgctcgtgccccaccta

SEQ ID NO: 25969 - DNA, 20 bp, synthetic construct
  source 1..20: mol_type = other DNA
tcctaaatattgtgaacccg

SEQ ID NO: 25970 - DNA, 20 bp, synthetic construct
  source 1..20: mol_type = other DNA
aacgtgatactcgcaaactg

SEQ ID NO: 25971 - DNA, 20 bp, synthetic construct
  source 1..20: mol_type = other DNA
gttaccttctcctttaacca

SEQ ID NO: 25972 - DNA, 20 bp, synthetic construct
  source 1..20: mol_type = other DNA
tccaagaagaatgttaatgt

SEQ ID NO: 25973 - DNA, 20 bp, synthetic construct
  source 1..20: mol_type = other DNA
tagaaatcagctgaatactc

SEQ ID NO: 25974 - DNA, 20 bp, synthetic construct
  source 1..20: mol_type = other DNA
tatttccctgattacagcat

SEQ ID NO: 25975 - DNA, 20 bp, synthetic construct
  source 1..20: mol_type = other DNA
aaatcagctgaatactctgg

SEQ ID NO: 25976 - DNA, 20 bp, synthetic construct
  source 1..20: mol_type = other DNA
tatgcagactgtttatctca

SEQ ID NO: 25977 - DNA, 20 bp, synthetic construct
  source 1..20: mol_type = other DNA
gaacccgtggttaaaggaga

SEQ ID NO: 25978 - DNA, 20 bp, synthetic construct
  source 1..20: mol_type = other DNA
atactctggaggatgatcat

SEQ ID NO: 25979 - DNA, 20 bp, synthetic construct
  source 1..20: mol_type = other DNA
tttatctcagggaaatatca

SEQ ID NO: 25980 - DNA, 20 bp, synthetic construct
  source 1..20: mol_type = other DNA
cttgcagtccttgtttggag

SEQ ID NO: 25981 - DNA, 20 bp, synthetic construct
  source 1..20: mol_type = other DNA
aatactctggaggatgatca

SEQ ID NO: 25982 - DNA, 20 bp, synthetic construct
  source 1..20: mol_type = other DNA
gaatcatcttagttcttcag

SEQ ID NO: 25983 - DNA, 20 bp, synthetic construct
  source 1..20: mol_type = other DNA
agcagagtatctaagagata

SEQ ID NO: 25984 - DNA, 20 bp, synthetic construct
  source 1..20: mol_type = other DNA
caagcaaacatgttgaaaag

SEQ ID NO: 25985 - DNA, 20 bp, synthetic construct
  source 1..20: mol_type = other DNA
ttgtactaccaaatatctag

SEQ ID NO: 25986 - DNA, 20 bp, synthetic construct
  source 1..20: mol_type = other DNA
acagtgaaattacaaaccat

SEQ ID NO: 25987 - DNA, 20 bp, synthetic construct
  source 1..20: mol_type = other DNA
agtcgccgtttgatgcgaga

SEQ ID NO: 25988 - DNA, 20 bp, synthetic construct
  source 1..20: mol_type = other DNA
aaagaaacaaatgatagagg

SEQ ID NO: 25989 - DNA, 20 bp, synthetic construct
  source 1..20: mol_type = other DNA
agggactccaagctcatctc

SEQ ID NO: 25990 - DNA, 20 bp, synthetic construct
  source 1..20: mol_type = other DNA
aaaaattaagaaagcaacgg

SEQ ID NO: 25991 - DNA, 20 bp, synthetic construct
  source 1..20: mol_type = other DNA
actctcctccgcctgatgct

SEQ ID NO: 25992 - DNA, 20 bp, synthetic construct
  source 1..20: mol_type = other DNA
gccaggccctgagatgagct

SEQ ID NO: 25993 - DNA, 20 bp, synthetic construct
  source 1..20: mol_type = other DNA
catcttcaccgagcatcagg

SEQ ID NO: 25994 - DNA, 20 bp, synthetic construct
  source 1..20: mol_type = other DNA
gaagatgatgtgctgaaaca

SEQ ID NO: 25995 - DNA, 20 bp, synthetic construct
  source 1..20: mol_type = other DNA
cttcaccgagcatcaggcgg

SEQ ID NO: 25996 - DNA, 20 bp, synthetic construct
  source 1..20: mol_type = other DNA
gaatgaagagaaaatcaagc

SEQ ID NO: 25997 - DNA, 20 bp, synthetic construct
  source 1..20: mol_type = other DNA
gtttctagaaatgaagtcaa

SEQ ID NO: 25998 - DNA, 20 bp, synthetic construct
  source 1..20: mol_type = other DNA
actttataaggaagatgaca

SEQ ID NO: 25999 - DNA, 20 bp, synthetic construct
  source 1..20: mol_type = other DNA
atacctgaatggaagatagg

SEQ ID NO: 26000 - DNA, 20 bp, synthetic construct
  source 1..20: mol_type = other DNA
gcaaagcgcttcacagacgc

SEQ ID NO: 26001 - DNA, 20 bp, synthetic construct
  source 1..20: mol_type = other DNA
tccctgcaaacagtcgagaa

SEQ ID NO: 26002 - DNA, 20 bp, synthetic construct
  source 1..20: mol_type = other DNA
acagaaaacaagcatcgttg

SEQ ID NO: 26003 - DNA, 20 bp, synthetic construct
  source 1..20: mol_type = other DNA
gcctacagagcactcctgtc

SEQ ID NO: 26004 - DNA, 20 bp, synthetic construct
  source 1..20: mol_type = other DNA
gccatcgccgttcactgcaa

SEQ ID NO: 26005 - DNA, 20 bp, synthetic construct
  source 1..20: mol_type = other DNA
gctaaacaaaaagatttatg

SEQ ID NO: 26006 - DNA, 20 bp, synthetic construct
  source 1..20: mol_type = other DNA
ttgcttggattagaatatgc

SEQ ID NO: 26007 - DNA, 20 bp, synthetic construct
  source 1..20: mol_type = other DNA
acatctgtgagaacaccgaa

SEQ ID NO: 26008 - DNA, 20 bp, synthetic construct
  source 1..20: mol_type = other DNA
ccactatttctccatcgatg

SEQ ID NO: 26009 - DNA, 20 bp, synthetic construct
  source 1..20: mol_type = other DNA
ctagatgatatgtctattgg

SEQ ID NO: 26010 - DNA, 20 bp, synthetic construct
  source 1..20: mol_type = other DNA
ccagtgacaacatcgtgcga

SEQ ID NO: 26011 - DNA, 20 bp, synthetic construct
  source 1..20: mol_type = other DNA
ataaggaaagtaggcttcag

SEQ ID NO: 26012 - DNA, 20 bp, synthetic construct
  source 1..20: mol_type = other DNA
tacaccattgccaagttcag

SEQ ID NO: 26013 - DNA, 20 bp, synthetic construct
  source 1..20: mol_type = other DNA
gaagaaggtacttactgcat

SEQ ID NO: 26014 - DNA, 20 bp, synthetic construct
  source 1..20: mol_type = other DNA
accatactgacactacgtga

SEQ ID NO: 26015 - DNA, 20 bp, synthetic construct
  source 1..20: mol_type = other DNA
gcgcccgtgaacttctgcgg

SEQ ID NO: 26016 - DNA, 20 bp, synthetic construct
  source 1..20: mol_type = other DNA
gaggctggactgtgatccag

SEQ ID NO: 26017 - DNA, 20 bp, synthetic construct
  source 1..20: mol_type = other DNA
acgaaggtgtaggtgcagcg

SEQ ID NO: 26018 - DNA, 20 bp, synthetic construct
  source 1..20: mol_type = other DNA
cgtgctcaacgcgtccgccg

SEQ ID NO: 26019 - DNA, 20 bp, synthetic construct
  source 1..20: mol_type = other DNA
ggaaccacaggcaccagtgg

SEQ ID NO: 26020 - DNA, 20 bp, synthetic construct
  source 1..20: mol_type = other DNA
gcgctgcgcaaggagagccg

SEQ ID NO: 26021 - DNA, 20 bp, synthetic construct
  source 1..20: mol_type = other DNA
cctaatgtcgacttacccac

SEQ ID NO: 26022 - DNA, 20 bp, synthetic construct
  source 1..20: mol_type = other DNA
ggaacttgacgtccagctgg

SEQ ID NO: 26023 - DNA, 20 bp, synthetic construct
  source 1..20: mol_type = other DNA
gcgtcgcccgcgtggatgcg

SEQ ID NO: 26024 - DNA, 20 bp, synthetic construct
  source 1..20: mol_type = other DNA
gctcgcgtaacagctcctcg

SEQ ID NO: 26025 - DNA, 20 bp, synthetic construct
  source 1..20: mol_type = other DNA
atggtgtgagcagcaactgg

SEQ ID NO: 26026 - DNA, 20 bp, synthetic construct
  source 1..20: mol_type = other DNA
gcaggcatgggagaagccat

SEQ ID NO: 26027 - DNA, 20 bp, synthetic construct
  source 1..20: mol_type = other DNA
gtgctacccacaagacggac

SEQ ID NO: 26028 - DNA, 20 bp, synthetic construct
  source 1..20: mol_type = other DNA
cagtgacaccagtaggatgc

SEQ ID NO: 26029 - DNA, 20 bp, synthetic construct
  source 1..20: mol_type = other DNA
ggaccgtagagaagcaagtg

SEQ ID NO: 26030 - DNA, 20 bp, synthetic construct
  source 1..20: mol_type = other DNA
ctgaatgcttcagatgaccg

SEQ ID NO: 26031 - DNA, 20 bp, synthetic construct
  source 1..20: mol_type = other DNA
cgaaccgaaacctcgtgcag

SEQ ID NO: 26032 - DNA, 20 bp, synthetic construct
  source 1..20: mol_type = other DNA
tccacgacatgttccaggcg

SEQ ID NO: 26033 - DNA, 20 bp, synthetic construct
  source 1..20: mol_type = other DNA
gtgctagcaaagctcaggat

SEQ ID NO: 26034 - DNA, 20 bp, synthetic construct
  source 1..20: mol_type = other DNA
tgcttctctacggtccccca

SEQ ID NO: 26035 - DNA, 20 bp, synthetic construct
  source 1..20: mol_type = other DNA
cgaggaatagacatcattcg

SEQ ID NO: 26036 - DNA, 20 bp, synthetic construct
  source 1..20: mol_type = other DNA
ttccagtggagacatgcgta

SEQ ID NO: 26037 - DNA, 20 bp, synthetic construct
  source 1..20: mol_type = other DNA
tcctgagctttgctagcaca

SEQ ID NO: 26038 - DNA, 20 bp, synthetic construct
  source 1..20: mol_type = other DNA
ttgacagatagttacagatg

SEQ ID NO: 26039 - DNA, 20 bp, synthetic construct
  source 1..20: mol_type = other DNA
attgataaacttctgaactg

SEQ ID NO: 26040 - DNA, 20 bp, synthetic construct
  source 1..20: mol_type = other DNA
gcccagaatgccttgagaag

SEQ ID NO: 26041 - DNA, 20 bp, synthetic construct
  source 1..20: mol_type = other DNA
cttatttacctccaagacca

SEQ ID NO: 26042 - DNA, 20 bp, synthetic construct
  source 1..20: mol_type = other DNA
attctgggcgtcctgagtca

SEQ ID NO: 26043 - DNA, 20 bp, synthetic construct
  source 1..20: mol_type = other DNA
tcccctgactcctgaactca

SEQ ID NO: 26044 - DNA, 20 bp, synthetic construct
  source 1..20: mol_type = other DNA
gctgcggattgcaacacgcg

SEQ ID NO: 26045 - DNA, 20 bp, synthetic construct
  source 1..20: mol_type = other DNA
gagctcaagatcgtgcccga

SEQ ID NO: 26046 - DNA, 20 bp, synthetic construct
  source 1..20: mol_type = other DNA
tgctcgtccatcaagccaag

SEQ ID NO: 26047 - DNA, 20 bp, synthetic construct
  source 1..20: mol_type = other DNA
tatgatgaggccgcacgttg

SEQ ID NO: 26048 - DNA, 20 bp, synthetic construct
  source 1..20: mol_type = other DNA
ggatgcctggaatcacacag

SEQ ID NO: 26049 - DNA, 20 bp, synthetic construct
  source 1..20: mol_type = other DNA
gatgatggggtaatatccta

SEQ ID NO: 26050 - DNA, 20 bp, synthetic construct
  source 1..20: mol_type = other DNA
gaacatggtaggtcggatct

SEQ ID NO: 26051 - DNA, 20 bp, synthetic construct
  source 1..20: mol_type = other DNA
gtggaataaacgtcagccaa

SEQ ID NO: 26052 - DNA, 20 bp, synthetic construct
  source 1..20: mol_type = other DNA
atgatgcctccagcataccc

SEQ ID NO: 26053 - DNA, 20 bp, synthetic construct
  source 1..20: mol_type = other DNA
tgttctccttgacgatctcg

SEQ ID NO: 26054 - DNA, 20 bp, synthetic construct
  source 1..20: mol_type = other DNA
gtgttcactaaaccctattg

SEQ ID NO: 26055 - DNA, 20 bp, synthetic construct
  source 1..20: mol_type = other DNA
ccccatcatcagaatactgg

SEQ ID NO: 26056 - DNA, 20 bp, synthetic construct
  source 1..20: mol_type = other DNA
atgtgtctaatgaactgcca

SEQ ID NO: 26057 - DNA, 20 bp, synthetic construct
  source 1..20: mol_type = other DNA
gtaaccagtaattcttaaag

SEQ ID NO: 26058 - DNA, 20 bp, synthetic construct
  source 1..20: mol_type = other DNA
ccagttcatggacgctctca

SEQ ID NO: 26059 - DNA, 20 bp, synthetic construct
  source 1..20: mol_type = other DNA
ggagcaacccctataagttg

SEQ ID NO: 26060 - DNA, 20 bp, synthetic construct
  source 1..20: mol_type = other DNA
gcccagagtgccatacgcta

SEQ ID NO: 26061 - DNA, 20 bp, synthetic construct
  source 1..20: mol_type = other DNA
acccgaatgcaaaaccagcg

SEQ ID NO: 26062 - DNA, 20 bp, synthetic construct
  source 1..20: mol_type = other DNA
taactcgttactgaataaca

SEQ ID NO: 26063 - DNA, 20 bp, synthetic construct
  source 1..20: mol_type = other DNA
cagataggcctgcctaaccc

SEQ ID NO: 26064 - DNA, 20 bp, synthetic construct
  source 1..20: mol_type = other DNA
tggaggaagtatctcacacc

SEQ ID NO: 26065 - DNA, 20 bp, synthetic construct
  source 1..20: mol_type = other DNA
tagctgatcaaaccaaggat

SEQ ID NO: 26066 - DNA, 20 bp, synthetic construct
  source 1..20: mol_type = other DNA
ggttatgcccaaaatgcagt

SEQ ID NO: 26067 - DNA, 20 bp, synthetic construct
  source 1..20: mol_type = other DNA
agtgaatctgtaagcagact

SEQ ID NO: 26068 - DNA, 20 bp, synthetic construct
  source 1..20: mol_type = other DNA
atctataggatacactgcag

SEQ ID NO: 26069 - DNA, 20 bp, synthetic construct
  source 1..20: mol_type = other DNA
gccactatgaacatggaatc

SEQ ID NO: 26070 - DNA, 20 bp, synthetic construct
  source 1..20: mol_type = other DNA
ggaaatggagaggtgacatt

SEQ ID NO: 26071 - DNA, 20 bp, synthetic construct
  source 1..20: mol_type = other DNA
gcgctgaacaaagtcttctg

SEQ ID NO: 26072 - DNA, 20 bp, synthetic construct
  source 1..20: mol_type = other DNA
gggggccttaccttacaacc

SEQ ID NO: 26073 - DNA, 20 bp, synthetic construct
  source 1..20: mol_type = other DNA
tctggatttcagtgacatca

SEQ ID NO: 26074 - DNA, 20 bp, synthetic construct
  source 1..20: mol_type = other DNA
agaaggtggaagtgcagagt

SEQ ID NO: 26075 - DNA, 20 bp, synthetic construct
  source 1..20: mol_type = other DNA
cccctgcctgaaacagtgca

SEQ ID NO: 26076 - DNA, 20 bp, synthetic construct
  source 1..20: mol_type = other DNA
tggggagaaggggacagtgt

SEQ ID NO: 26077 - DNA, 20 bp, synthetic construct
  source 1..20: mol_type = other DNA
acccctgcctgaaacagtgc

SEQ ID NO: 26078 - DNA, 20 bp, synthetic construct
  source 1..20: mol_type = other DNA
gagaaggtggaagtgcagag

SEQ ID NO: 26079 - DNA, 20 bp, synthetic construct
  source 1..20: mol_type = other DNA
tgggcagcctcagctcgctg

SEQ ID NO: 26080 - DNA, 20 bp, synthetic construct
  source 1..20: mol_type = other DNA
cctgaaacagtgcagggaga

SEQ ID NO: 26081 - DNA, 20 bp, synthetic construct
  source 1..20: mol_type = other DNA
gaaacagtgcagggagaagg

SEQ ID NO: 26082 - DNA, 20 bp, synthetic construct
  source 1..20: mol_type = other DNA
ctggggagaaggggacagtg

SEQ ID NO: 26083 - DNA, 20 bp, synthetic construct
  source 1..20: mol_type = other DNA
aaggggacagtgtgggcgag

SEQ ID NO: 26084 - DNA, 20 bp, synthetic construct
  source 1..20: mol_type = other DNA
ctcagctcgctggggagaag

SEQ ID NO: 26085 - DNA, 20 bp, synthetic construct
  source 1..20: mol_type = other DNA
gcctcagctcgctggggaga

SEQ ID NO: 26086 - DNA, 20 bp, synthetic construct
  source 1..20: mol_type = other DNA
cctcagctcgctggggagaa

SEQ ID NO: 26087 - DNA, 20 bp, synthetic construct
  source 1..20: mol_type = other DNA
tggggacccgtaggtgcgcg

SEQ ID NO: 26088 - DNA, 20 bp, synthetic construct
  source 1..20: mol_type = other DNA
cacacggctggtgtccatga

SEQ ID NO: 26089 - DNA, 20 bp, synthetic construct
  source 1..20: mol_type = other DNA
cgtgcactgtccctgagaac

SEQ ID NO: 26090 - DNA, 20 bp, synthetic construct
  source 1..20: mol_type = other DNA
tgcccaggaccttggtgacc

SEQ ID NO: 26091 - DNA, 20 bp, synthetic construct
  source 1..20: mol_type = other DNA
cctgagaaccggtcctgccc

SEQ ID NO: 26092 - DNA, 20 bp, synthetic construct
  source 1..20: mol_type = other DNA
ttctcagggacagtgcacgc

SEQ ID NO: 26093 - DNA, 20 bp, synthetic construct
  source 1..20: mol_type = other DNA
ctatcaagctggccagggtg

SEQ ID NO: 26094 - DNA, 20 bp, synthetic construct
  source 1..20: mol_type = other DNA
gtaaaaggccccgtgcgcga

SEQ ID NO: 26095 - DNA, 20 bp, synthetic construct
  source 1..20: mol_type = other DNA
agtcagagcgagaagcccgg

SEQ ID NO: 26096 - DNA, 20 bp, synthetic construct
  source 1..20: mol_type = other DNA
gcacgtcgccctcgcgcacg

SEQ ID NO: 26097 - DNA, 20 bp, synthetic construct
  source 1..20: mol_type = other DNA
atgaattccacgcgcaccta

SEQ ID NO: 26098 - DNA, 20 bp, synthetic construct
  source 1..20: mol_type = other DNA
ctgggcaggaccggttctca

SEQ ID NO: 26099 - DNA, 20 bp, synthetic construct
  source 1..20: mol_type = other DNA
cctccaggtcaccaaggtcc

SEQ ID NO: 26100 - DNA, 20 bp, synthetic construct
  source 1..20: mol_type = other DNA
ttctttcctccaggtcacca

SEQ ID NO: 26101 - DNA, 20 bp, synthetic construct
  source 1..20: mol_type = other DNA
agcacgtcgccctcgcgcac

SEQ ID NO: 26102 - DNA, 20 bp, synthetic construct
  source 1..20: mol_type = other DNA
gtacatggtatatcttactc

SEQ ID NO: 26103 - DNA, 20 bp, synthetic construct
  source 1..20: mol_type = other DNA
gcagcagcacggaaagcgcc

SEQ ID NO: 26104 - DNA, 20 bp, synthetic construct
  source 1..20: mol_type = other DNA
tggttgagcccatactgaag

SEQ ID NO: 26105 - DNA, 20 bp, synthetic construct
  source 1..20: mol_type = other DNA
tctacatcaggcccccgcac

SEQ ID NO: 26106 - DNA, 20 bp, synthetic construct
  source 1..20: mol_type = other DNA
aagaagctctgtcacaatca

SEQ ID NO: 26107 - DNA, 20 bp, synthetic construct
  source 1..20: mol_type = other DNA
tcaggcccccgcacaggcat

SEQ ID NO: 26108 - DNA, 20 bp, synthetic construct
  source 1..20: mol_type = other DNA
gcatgggctccacaacatga

SEQ ID NO: 26109 - DNA, 20 bp, synthetic construct
  source 1..20: mol_type = other DNA
gggccttctacttctgtaca

SEQ ID NO: 26110 - DNA, 20 bp, synthetic construct
  source 1..20: mol_type = other DNA
tggagcccatgcctgtgcgg

SEQ ID NO: 26111 - DNA, 20 bp, synthetic construct
  source 1..20: mol_type = other DNA
gtggagcccatgcctgtgcg

SEQ ID NO: 26112 - DNA, 20 bp, synthetic construct
  source 1..20: mol_type = other DNA
ataccatgtacagaagtaga

SEQ ID NO: 26113 - DNA, 20 bp, synthetic construct
  source 1..20: mol_type = other DNA
gcagctgtcagacgccgcca

SEQ ID NO: 26114 - DNA, 20 bp, synthetic construct
  source 1..20: mol_type = other DNA
ttgtggagcccatgcctgtg

SEQ ID NO: 26115 - DNA, 20 bp, synthetic construct
  source 1..20: mol_type = other DNA
caggcacgacaggctgagca

SEQ ID NO: 26116 - DNA, 20 bp, synthetic construct
  source 1..20: mol_type = other DNA
cagctgcgccagcagcagca

SEQ ID NO: 26117 - DNA, 20 bp, synthetic construct
  source 1..20: mol_type = other DNA
gagtcgggaaaataaatgca

SEQ ID NO: 26118 - DNA, 20 bp, synthetic construct
  source 1..20: mol_type = other DNA
gaagaaagttcccaatagtg

SEQ ID NO: 26119 - DNA, 20 bp, synthetic construct
  source 1..20: mol_type = other DNA
acttggcttgtaccacacca

SEQ ID NO: 26120 - DNA, 20 bp, synthetic construct
  source 1..20: mol_type = other DNA
tccatacatcaataagcgca

SEQ ID NO: 26121 - DNA, 20 bp, synthetic construct
  source 1..20: mol_type = other DNA
tgtaacgatgagtacaaact

SEQ ID NO: 26122 - DNA, 20 bp, synthetic construct
  source 1..20: mol_type = other DNA
ctttcagtctatatcggcac

SEQ ID NO: 26123 - DNA, 20 bp, synthetic construct
  source 1..20: mol_type = other DNA
gtattcacccactctggcat

SEQ ID NO: 26124 - DNA, 20 bp, synthetic construct
  source 1..20: mol_type = other DNA
acatacgtcggtgcatctcc

SEQ ID NO: 26125 - DNA, 20 bp, synthetic construct
  source 1..20: mol_type = other DNA
ttaaggtctgtaaaacaaca

SEQ ID NO: 26126 - DNA, 20 bp, synthetic construct
  source 1..20: mol_type = other DNA
tgtctttcgactgattgaag

SEQ ID NO: 26127 - DNA, 20 bp, synthetic construct
  source 1..20: mol_type = other DNA
agtgccagcttatcctctgt

SEQ ID NO: 26128 - DNA, 20 bp, synthetic construct
  source 1..20: mol_type = other DNA
atcacagaccaaaagtagta

SEQ ID NO: 26129 - DNA, 20 bp, synthetic construct
  source 1..20: mol_type = other DNA
agaggacaagatagaagctg

SEQ ID NO: 26130 - DNA, 20 bp, synthetic construct
  source 1..20: mol_type = other DNA
gttaaggtaccagcatggac

SEQ ID NO: 26131 - DNA, 20 bp, synthetic construct
  source 1..20: mol_type = other DNA
gtcatcagagggaaattagg

SEQ ID NO: 26132 - DNA, 20 bp, synthetic construct
  source 1..20: mol_type = other DNA
tattggtcccatacgatctc

SEQ ID NO: 26133 - DNA, 20 bp, synthetic construct
  source 1..20: mol_type = other DNA
agaacagaggagtacagtag

SEQ ID NO: 26134 - DNA, 20 bp, synthetic construct
  source 1..20: mol_type = other DNA
agagtataacgatgttcttg

SEQ ID NO: 26135 - DNA, 20 bp, synthetic construct
  source 1..20: mol_type = other DNA
acagacgattgctgtactcg

SEQ ID NO: 26136 - DNA, 20 bp, synthetic construct
  source 1..20: mol_type = other DNA
cttgagagtatgccagcctc

SEQ ID NO: 26137 - DNA, 20 bp, synthetic construct
  source 1..20: mol_type = other DNA
tgggtaagccctaggaaaag

SEQ ID NO: 26138 - DNA, 20 bp, synthetic construct
  source 1..20: mol_type = other DNA
agtcaatctcctacaaatcc

SEQ ID NO: 26139 - DNA, 20 bp, synthetic construct
  source 1..20: mol_type = other DNA
gcagtagttgaagaaatcac

SEQ ID NO: 26140 - DNA, 20 bp, synthetic construct
  source 1..20: mol_type = other DNA
ttagtgggactacctctggt

SEQ ID NO: 26141 - DNA, 20 bp, synthetic construct
  source 1..20: mol_type = other DNA
aagaccttgaaagtttaggc

SEQ ID NO: 26142 - DNA, 20 bp, synthetic construct
  source 1..20: mol_type = other DNA
agtaagtaaaccaccctcag

SEQ ID NO: 26143 - DNA, 20 bp, synthetic construct
  source 1..20: mol_type = other DNA
atctttaagggattctgagg

SEQ ID NO: 26144 - DNA, 20 bp, synthetic construct
  source 1..20: mol_type = other DNA
gaagcactgaaaaatcccat

SEQ ID NO: 26145 - DNA, 20 bp, synthetic construct
  source 1..20: mol_type = other DNA
tgcacttgtgaatctgtgca

SEQ ID NO: 26146 - DNA, 20 bp, synthetic construct
  source 1..20: mol_type = other DNA
aaaggataacatagaaaggc

SEQ ID NO: 26147 - DNA, 20 bp, synthetic construct
  source 1..20: mol_type = other DNA
aaagcctattgtgaaccacg

SEQ ID NO: 26148 - DNA, 20 bp, synthetic construct
  source 1..20: mol_type = other DNA
tttggtgggcaaccaatcag

SEQ ID NO: 26149 - DNA, 20 bp, synthetic construct
  source 1..20: mol_type = other DNA
tgcttcactgacaatccccg

SEQ ID NO: 26150 - DNA, 20 bp, synthetic construct
  source 1..20: mol_type = other DNA
tgaaagcctattgtgaacca

SEQ ID NO: 26151 - DNA, 20 bp, synthetic construct
  source 1..20: mol_type = other DNA
tttcagtagacacctcccgt

SEQ ID NO: 26152 - DNA, 20 bp, synthetic construct
  source 1..20: mol_type = other DNA
gaaagcctattgtgaaccac

SEQ ID NO: 26153 - DNA, 20 bp, synthetic construct
  source 1..20: mol_type = other DNA
agatcagattccgatttggt

SEQ ID NO: 26154 - DNA, 20 bp, synthetic construct
  source 1..20: mol_type = other DNA
gtgtttcaacagcctacggg

SEQ ID NO: 26155 - DNA, 20 bp, synthetic construct
  source 1..20: mol_type = other DNA
caatccccgtggttcacaat

SEQ ID NO: 26156 - DNA, 20 bp, synthetic construct
  source 1..20: mol_type = other DNA
ggcgggacaggatggttctg

SEQ ID NO: 26157 - DNA, 20 bp, synthetic construct
  source 1..20: mol_type = other DNA
aagcagatcagattccgatt

SEQ ID NO: 26158 - DNA, 20 bp, synthetic construct
  source 1..20: mol_type = other DNA
tgattggttgcccaccaaat

SEQ ID NO: 26159 - DNA, 20 bp, synthetic construct
  source 1..20: mol_type = other DNA
ttgaaggtggcgggacagga

SEQ ID NO: 26160 - DNA, 20 bp, synthetic construct
  source 1..20: mol_type = other DNA
aacagacaaacctgcacagt

SEQ ID NO: 26161 - DNA, 20 bp, synthetic construct
  source 1..20: mol_type = other DNA
cagatcagattccgatttgg

SEQ ID NO: 26162 - DNA, 20 bp, synthetic construct
  source 1..20: mol_type = other DNA
gcaacagaaagtcgtcaaca

SEQ ID NO: 26163 - DNA, 20 bp, synthetic construct
  source 1..20: mol_type = other DNA
gagaactgccggctatactt

SEQ ID NO: 26164 - DNA, 20 bp, synthetic construct
  source 1..20: mol_type = other DNA
aaagtggtccacatcgagca

SEQ ID NO: 26165 - DNA, 20 bp, synthetic construct
  source 1..20: mol_type = other DNA
agcttccacgtgttcgacca

SEQ ID NO: 26166 - DNA, 20 bp, synthetic construct
  source 1..20: mol_type = other DNA
gtatagccggcagttctccc

SEQ ID NO: 26167 - DNA, 20 bp, synthetic construct
  source 1..20: mol_type = other DNA
acggacgtgcagctgatgaa

SEQ ID NO: 26168 - DNA, 20 bp, synthetic construct
  source 1..20: mol_type = other DNA
gggagcatagacgagaggtg

SEQ ID NO: 26169 - DNA, 20 bp, synthetic construct
  source 1..20: mol_type = other DNA
tgaagacataaagatccgcc

SEQ ID NO: 26170 - DNA, 20 bp, synthetic construct
  source 1..20: mol_type = other DNA
tgcagtcaaaccggatcctg

SEQ ID NO: 26171 - DNA, 20 bp, synthetic construct
  source 1..20: mol_type = other DNA
cccctgatgctgaacgacag

SEQ ID NO: 26172 - DNA, 20 bp, synthetic construct
  source 1..20: mol_type = other DNA
ggactcgcctcctctacccg

SEQ ID NO: 26173 - DNA, 20 bp, synthetic construct
  source 1..20: mol_type = other DNA
ggtctgttgcagtgagaatg

SEQ ID NO: 26174 - DNA, 20 bp, synthetic construct
  source 1..20: mol_type = other DNA
acaacatggccagcttcgtg

SEQ ID NO: 26175 - DNA, 20 bp, synthetic construct
  source 1..20: mol_type = other DNA
agagggtgtccacggaagat

SEQ ID NO: 26176 - DNA, 20 bp, synthetic construct
  source 1..20: mol_type = other DNA
cctggccacgcaggaagcat

SEQ ID NO: 26177 - DNA, 20 bp, synthetic construct
  source 1..20: mol_type = other DNA
aagtcggaccaatttcaccc

SEQ ID NO: 26178 - DNA, 20 bp, synthetic construct
  source 1..20: mol_type = other DNA
ggcagcccgcgactgacgga

SEQ ID NO: 26179 - DNA, 20 bp, synthetic construct
  source 1..20: mol_type = other DNA
gcagctgggtacctgcactc

SEQ ID NO: 26180 - DNA, 20 bp, synthetic construct
  source 1..20: mol_type = other DNA
gctcagttcctctcgcatga

SEQ ID NO: 26181 - DNA, 20 bp, synthetic construct
  source 1..20: mol_type = other DNA
ggagctgaaagatcgcaaag

SEQ ID NO: 26182 - DNA, 20 bp, synthetic construct
  source 1..20: mol_type = other DNA
gccagaccaaaatcaagcag

SEQ ID NO: 26183 - DNA, 20 bp, synthetic construct
  source 1..20: mol_type = other DNA
gggcgccgccgagagaagca

SEQ ID NO: 26184 - DNA, 20 bp, synthetic construct
  source 1..20: mol_type = other DNA
catgaaggcgtcgggatagt

SEQ ID NO: 26185 - DNA, 20 bp, synthetic construct
  source 1..20: mol_type = other DNA
gcgaaagggatggaggacga

SEQ ID NO: 26186 - DNA, 20 bp, synthetic construct
  source 1..20: mol_type = other DNA
agaaggaggcgatcacgtac

SEQ ID NO: 26187 - DNA, 20 bp, synthetic construct
  source 1..20: mol_type = other DNA
tttgcgatctttcagctccg

SEQ ID NO: 26188 - DNA, 20 bp, synthetic construct
  source 1..20: mol_type = other DNA
ccagcgactgggcctgtcgg

SEQ ID NO: 26189 - DNA, 20 bp, synthetic construct
  source 1..20: mol_type = other DNA
agaggaactgagccagcgac

SEQ ID NO: 26190 - DNA, 20 bp, synthetic construct
  source 1..20: mol_type = other DNA
cctggaacaactcaatgagc

SEQ ID NO: 26191 - DNA, 20 bp, synthetic construct
  source 1..20: mol_type = other DNA
cagcagcccggcagtccggg

SEQ ID NO: 26192 - DNA, 20 bp, synthetic construct
  source 1..20: mol_type = other DNA
cagggagcggatcacaagtg

SEQ ID NO: 26193 - DNA, 20 bp, synthetic construct
  source 1..20: mol_type = other DNA
attgggcatcacaaacacct

SEQ ID NO: 26194 - DNA, 20 bp, synthetic construct
  source 1..20: mol_type = other DNA
agcccacttataagaagcga

SEQ ID NO: 26195 - DNA, 20 bp, synthetic construct
  source 1..20: mol_type = other DNA
agtggatctgagttaggtca

SEQ ID NO: 26196 - DNA, 20 bp, synthetic construct
  source 1..20: mol_type = other DNA
ttgacctccaggtcaaaatg

SEQ ID NO: 26197 - DNA, 20 bp, synthetic construct
  source 1..20: mol_type = other DNA
agaagatggaaacaactttg

SEQ ID NO: 26198 - DNA, 20 bp, synthetic construct
  source 1..20: mol_type = other DNA
ctgggagattcatgtcagag

SEQ ID NO: 26199 - DNA, 20 bp, synthetic construct
  source 1..20: mol_type = other DNA
gttgattgagaaatgtaaca

SEQ ID NO: 26200 - DNA, 20 bp, synthetic construct
  source 1..20: mol_type = other DNA
gagtgtgaagaagccttcca

SEQ ID NO: 26201 - DNA, 20 bp, synthetic construct
  source 1..20: mol_type = other DNA
ctgattcccaggatagaaga

SEQ ID NO: 26202 - DNA, 20 bp, synthetic construct
  source 1..20: mol_type = other DNA
ggctattggtgagaagaatg

SEQ ID NO: 26203 - DNA, 20 bp, synthetic construct
  source 1..20: mol_type = other DNA
gaaaagcaaccagcagctgg

SEQ ID NO: 26204 - DNA, 20 bp, synthetic construct
  source 1..20: mol_type = other DNA
agaaagtgaaacctgagatc

SEQ ID NO: 26205 - DNA, 20 bp, synthetic construct
  source 1..20: mol_type = other DNA
tccttaggcagaagacttgg

SEQ ID NO: 26206 - DNA, 20 bp, synthetic construct
  source 1..20: mol_type = other DNA
aatagccatgatggactgga

SEQ ID NO: 26207 - DNA, 20 bp, synthetic construct
  source 1..20: mol_type = other DNA
tatgaagatggacctcgcac

SEQ ID NO: 26208 - DNA, 20 bp, synthetic construct
  source 1..20: mol_type = other DNA
aagcggagccttagccggga

SEQ ID NO: 26209 - DNA, 20 bp, synthetic construct
  source 1..20: mol_type = other DNA
ccaccaggtcataatagtcg

SEQ ID NO: 26210 - DNA, 20 bp, synthetic construct
  source 1..20: mol_type = other DNA
acatcaccttgtacaaggca

SEQ ID NO: 26211 - DNA, 20 bp, synthetic construct
  source 1..20: mol_type = other DNA
atcgcagagaatatttacga

SEQ ID NO: 26212 - DNA, 20 bp, synthetic construct
  source 1..20: mol_type = other DNA
actattatgacctggtggat

SEQ ID NO: 26213 - DNA, 20 bp, synthetic construct
  source 1..20: mol_type = other DNA
agcagaaaggatcacagatg

SEQ ID NO: 26214 - DNA, 20 bp, synthetic construct
  source 1..20: mol_type = other DNA
gcaatgtggccacaaacagg

SEQ ID NO: 26215 - DNA, 20 bp, synthetic construct
  source 1..20: mol_type = other DNA
ttacctgagaaatatgaaca

SEQ ID NO: 26216 - DNA, 20 bp, synthetic construct
  source 1..20: mol_type = other DNA
gcccgcagcactcggcgaag

SEQ ID NO: 26217 - DNA, 20 bp, synthetic construct
  source 1..20: mol_type = other DNA
ctctcacgctctccctgcac

SEQ ID NO: 26218 - DNA, 20 bp, synthetic construct
  source 1..20: mol_type = other DNA
aaggcttgatggcatctatg

SEQ ID NO: 26219 - DNA, 20 bp, synthetic construct
  source 1..20: mol_type = other DNA
aaggtgatgtttgaagcatg

SEQ ID NO: 26220 - DNA, 20 bp, synthetic construct
  source 1..20: mol_type = other DNA
tatgaacatggctttctggt

SEQ ID NO: 26221 - DNA, 20 bp, synthetic construct
  source 1..20: mol_type = other DNA
cagttacagttgtggattcg

SEQ ID NO: 26222 - DNA, 20 bp, synthetic construct
  source 1..20: mol_type = other DNA
tgtgcattgatattcaacgg

SEQ ID NO: 26223 - DNA, 20 bp, synthetic construct
  source 1..20: mol_type = other DNA
gttacttggattcctctgtg

SEQ ID NO: 26224 - DNA, 20 bp, synthetic construct
  source 1..20: mol_type = other DNA
aacaggaatataagccacga

SEQ ID NO: 26225 - DNA, 20 bp, synthetic construct
  source 1..20: mol_type = other DNA
gttctagtagtaccgtgaac

SEQ ID NO: 26226 - DNA, 20 bp, synthetic construct
  source 1..20: mol_type = other DNA
cagatgctaaagttaaagct

SEQ ID NO: 26227 - DNA, 20 bp, synthetic construct
  source 1..20: mol_type = other DNA
gatacatgtaatcttacctg

SEQ ID NO: 26228 - DNA, 20 bp, synthetic construct
  source 1..20: mol_type = other DNA
gataaccgtccaggaatgag

SEQ ID NO: 26229 - DNA, 20 bp, synthetic construct
  source 1..20: mol_type = other DNA
gcaaacaagccactgaattg

SEQ ID NO: 26230 - DNA, 20 bp, synthetic construct
  source 1..20: mol_type = other DNA
ttgctataccagttgagaca

SEQ ID NO: 26231 - DNA, 20 bp, synthetic construct
  source 1..20: mol_type = other DNA
gagaggactcctgtaatgct

SEQ ID NO: 26232 - DNA, 20 bp, synthetic construct
  source 1..20: mol_type = other DNA
atctggtatgttgaacttag

SEQ ID NO: 26233 - DNA, 20 bp, synthetic construct
  source 1..20: mol_type = other DNA
ctctagagatacatgtccac

SEQ ID NO: 26234 - DNA, 20 bp, synthetic construct
  source 1..20: mol_type = other DNA
gaggacatccagtctcgaat

SEQ ID NO: 26235 - DNA, 20 bp, synthetic construct
  source 1..20: mol_type = other DNA
atgacattgatacaaacaca

SEQ ID NO: 26236 - DNA, 20 bp, synthetic construct
  source 1..20: mol_type = other DNA
tacggaatgttcttactgag

SEQ ID NO: 26237 - DNA, 20 bp, synthetic construct
  source 1..20: mol_type = other DNA
gcagccgcctgacggatggt

SEQ ID NO: 26238 - DNA, 20 bp, synthetic construct
  source 1..20: mol_type = other DNA
aaagtcctatattgaagctc

SEQ ID NO: 26239 - DNA, 20 bp, synthetic construct
  source 1..20: mol_type = other DNA
ttcttgaggagaatattcgg

SEQ ID NO: 26240 - DNA, 20 bp, synthetic construct
  source 1..20: mol_type = other DNA
tgaggcattccaatgaccag

SEQ ID NO: 26241 - DNA, 20 bp, synthetic construct
  source 1..20: mol_type = other DNA
gacttccgtggatacgccct

SEQ ID NO: 26242 - DNA, 20 bp, synthetic construct
  source 1..20: mol_type = other DNA
agggctagctaaggaatcca

SEQ ID NO: 26243 - DNA, 20 bp, synthetic construct
  source 1..20: mol_type = other DNA
tgactgctcccaaccaactg

SEQ ID NO: 26244 - DNA, 20 bp, synthetic construct
  source 1..20: mol_type = other DNA
cagtttaggggagttacgtg

SEQ ID NO: 26245 - DNA, 20 bp, synthetic construct
  source 1..20: mol_type = other DNA
gtttctctatgaacgatcca

SEQ ID NO: 26246 - DNA, 20 bp, synthetic construct
  source 1..20: mol_type = other DNA
aggggactttctgtattggt

SEQ ID NO: 26247 - DNA, 20 bp, synthetic construct
  source 1..20: mol_type = other DNA
taataatgaagccattcgag

SEQ ID NO: 26248 - DNA, 20 bp, synthetic construct
  source 1..20: mol_type = other DNA
cacaggcctttgtacaagtg

SEQ ID NO: 26249 - DNA, 20 bp, synthetic construct
  source 1..20: mol_type = other DNA
gatcttgtcagacagtcggt

SEQ ID NO: 26250 - DNA, 20 bp, synthetic construct
  source 1..20: mol_type = other DNA
cttatggaagatcagtgatg

SEQ ID NO: 26251 - DNA, 20 bp, synthetic construct
  source 1..20: mol_type = other DNA
taatcgccattaggtatctc

SEQ ID NO: 26252 - DNA, 20 bp, synthetic construct
  source 1..20: mol_type = other DNA
tttcggcctccactcgtgag

SEQ ID NO: 26253 - DNA, 20 bp, synthetic construct
  source 1..20: mol_type = other DNA
cctgtgccagaactcacggg

SEQ ID NO: 26254 - DNA, 20 bp, synthetic construct
  source 1..20: mol_type = other DNA
tggctacagataaaagctcc

SEQ ID NO: 26255 - DNA, 20 bp, synthetic construct
  source 1..20: mol_type = other DNA
tctgtagccaggaaagagcg

SEQ ID NO: 26256 - DNA, 20 bp, synthetic construct
  source 1..20: mol_type = other DNA
aattcaccaaccggaacccc

SEQ ID NO: 26257 - DNA, 20 bp, synthetic construct
  source 1..20: mol_type = other DNA
gcatcagaatggcaaggttg

SEQ ID NO: 26258 - DNA, 20 bp, synthetic construct
  source 1..20: mol_type = other DNA
cctgtcaaccagctccgagc

SEQ ID NO: 26259 - DNA, 20 bp, synthetic construct
  source 1..20: mol_type = other DNA
gttccggttggtgaattctg

SEQ ID NO: 26260 - DNA, 20 bp, synthetic construct
  source 1..20: mol_type = other DNA
tgtggagcatcagaatggca

SEQ ID NO: 26261 - DNA, 20 bp, synthetic construct
  source 1..20: mol_type = other DNA
gataaaagctccaggttccg

SEQ ID NO: 26262 - DNA, 20 bp, synthetic construct
  source 1..20: mol_type = other DNA
gaaacctgaagtggaccctg

SEQ ID NO: 26263 - DNA, 20 bp, synthetic construct
  source 1..20: mol_type = other DNA
cctcccgtgagttctggcac

SEQ ID NO: 26264 - DNA, 20 bp, synthetic construct
  source 1..20: mol_type = other DNA
gaaagagcggggctggcgga

SEQ ID NO: 26265 - DNA, 20 bp, synthetic construct
  source 1..20: mol_type = other DNA
gcatcatgtagaagcacttg

SEQ ID NO: 26266 - DNA, 20 bp, synthetic construct
  source 1..20: mol_type = other DNA
agggctgcgaacctgcaccc

SEQ ID NO: 26267 - DNA, 20 bp, synthetic construct
  source 1..20: mol_type = other DNA
tgtcacaccattatgaatcg

SEQ ID NO: 26268 - DNA, 20 bp, synthetic construct
  source 1..20: mol_type = other DNA
gcgcggaggatggctcgtgg

SEQ ID NO: 26269 - DNA, 20 bp, synthetic construct
  source 1..20: mol_type = other DNA
tggttcaggccgactcaccc

SEQ ID NO: 26270 - DNA, 20 bp, synthetic construct
  source 1..20: mol_type = other DNA
ggtcagcgcgccctgagtgt

SEQ ID NO: 26271 - DNA, 20 bp, synthetic construct
  source 1..20: mol_type = other DNA
tcataatggtgtgacatgtc

SEQ ID NO: 26272 - DNA, 20 bp, synthetic construct
  source 1..20: mol_type = other DNA
ccggaggtggacttctcgca

SEQ ID NO: 26273 - DNA, 20 bp, synthetic construct
  source 1..20: mol_type = other DNA
aagcgacagtcccttggccc

SEQ ID NO: 26274 - DNA, 20 bp, synthetic construct
  source 1..20: mol_type = other DNA
gtcctcgcaggttacccgcg

SEQ ID NO: 26275 - DNA, 20 bp, synthetic construct
  source 1..20: mol_type = other DNA
tagccgccccggagtctcaa

SEQ ID NO: 26276 - DNA, 20 bp, synthetic construct
  source 1..20: mol_type = other DNA
cgcgtcccaaaggctcccgg

SEQ ID NO: 26277 - DNA, 20 bp, synthetic construct
  source 1..20: mol_type = other DNA
gctccgcctccagacagttg

SEQ ID NO: 26278 - DNA, 20 bp, synthetic construct
  source 1..20: mol_type = other DNA
tctggaggcggagcgactgg

SEQ ID NO: 26279 - DNA, 20 bp, synthetic construct
  source 1..20: mol_type = other DNA
tgacctcacctggccacccg

SEQ ID NO: 26280 - DNA, 20 bp, synthetic construct
  source 1..20: mol_type = other DNA
aaggccttagccccgtcggg

SEQ ID NO: 26281 - DNA, 20 bp, synthetic construct
  source 1..20: mol_type = other DNA
ccggagggcagcatctccta

SEQ ID NO: 26282 - DNA, 20 bp, synthetic construct
  source 1..20: mol_type = other DNA
ttgacgacaaagcatcacga

SEQ ID NO: 26283 - DNA, 20 bp, synthetic construct
  source 1..20: mol_type = other DNA
aagaagcgcgcagtgaactg

SEQ ID NO: 26284 - DNA, 20 bp, synthetic construct
  source 1..20: mol_type = other DNA
gtggtagtaaatgaccgatg

SEQ ID NO: 26285 - DNA, 20 bp, synthetic construct
  source 1..20: mol_type = other DNA
ttaacaaggtcgtacagctc

SEQ ID NO: 26286 - DNA, 20 bp, synthetic construct
  source 1..20: mol_type = other DNA
gttcgacgaagccaagttcg

SEQ ID NO: 26287 - DNA, 20 bp, synthetic construct
  source 1..20: mol_type = other DNA
gtgagtggtatagtccatag

SEQ ID NO: 26288 - DNA, 20 bp, synthetic construct
  source 1..20: mol_type = other DNA
tcgtcaaaactacatacctg

SEQ ID NO: 26289 - DNA, 20 bp, synthetic construct
  source 1..20: mol_type = other DNA
gaacttggcttcgtcgaacc

SEQ ID NO: 26290 - DNA, 20 bp, synthetic construct
  source 1..20: mol_type = other DNA
actggaactccaaagacgtg

SEQ ID NO: 26291 - DNA, 20 bp, synthetic construct
  source 1..20: mol_type = other DNA
gagcttgccagatcacaagt

SEQ ID NO: 26292 - DNA, 20 bp, synthetic construct
  source 1..20: mol_type = other DNA
tataccactcactcttagag

SEQ ID NO: 26293 - DNA, 20 bp, synthetic construct
  source 1..20: mol_type = other DNA
ttcggggtgttcatccactg

SEQ ID NO: 26294 - DNA, 20 bp, synthetic construct
  source 1..20: mol_type = other DNA
tgatctgatctggtctgatg

SEQ ID NO: 26295 - DNA, 20 bp, synthetic construct
  source 1..20: mol_type = other DNA
aagtcggcgtagctgaagcc

SEQ ID NO: 26296 - DNA, 20 bp, synthetic construct
  source 1..20: mol_type = other DNA
tttactaccacctcatccta

SEQ ID NO: 26297 - DNA, 20 bp, synthetic construct
  source 1..20: mol_type = other DNA
accatgggcaacttcgcacg

SEQ ID NO: 26298 - DNA, 20 bp, synthetic construct
  source 1..20: mol_type = other DNA
gctgtacgagatccagcacg

SEQ ID NO: 26299 - DNA, 20 bp, synthetic construct
  source 1..20: mol_type = other DNA
caagagagactgttggactg

SEQ ID NO: 26300 - DNA, 20 bp, synthetic construct
  source 1..20: mol_type = other DNA
ctcgtacagctgaatgacgc

SEQ ID NO: 26301 - DNA, 20 bp, synthetic construct
  source 1..20: mol_type = other DNA
aaggccaaacctattaaatg

SEQ ID NO: 26302 - DNA, 20 bp, synthetic construct
  source 1..20: mol_type = other DNA
cacggtgtttgactgtaagt

SEQ ID NO: 26303 - DNA, 20 bp, synthetic construct
  source 1..20: mol_type = other DNA
tcagaaatatggcattacgg

SEQ ID NO: 26304 - DNA, 20 bp, synthetic construct
  source 1..20: mol_type = other DNA
tagtccacctatgccatcta

SEQ ID NO: 26305 - DNA, 20 bp, synthetic construct
  source 1..20: mol_type = other DNA
ggagacaaacatcaaaaatg

SEQ ID NO: 26306 - DNA, 20 bp, synthetic construct
  source 1..20: mol_type = other DNA
taagttagtagccacatctc

SEQ ID NO: 26307 - DNA, 20 bp, synthetic construct
  source 1..20: mol_type = other DNA
ggagcacctgaaattgtgac

SEQ ID NO: 26308 - DNA, 20 bp, synthetic construct
  source 1..20: mol_type = other DNA
gctaatatggaacctgtaca

SEQ ID NO: 26309 - DNA, 20 bp, synthetic construct
  source 1..20: mol_type = other DNA
ttgtgctggctatgacaatg

SEQ ID NO: 26310 - DNA, 20 bp, synthetic construct
  source 1..20: mol_type = other DNA
ggcaggaactgtgaaggtgt

SEQ ID NO: 26311 - DNA, 20 bp, synthetic construct
  source 1..20: mol_type = other DNA
ggtggactaggaattggaga

SEQ ID NO: 26312 - DNA, 20 bp, synthetic construct
  source 1..20: mol_type = other DNA
tcactctacacatcatgaga

SEQ ID NO: 26313 - DNA, 20 bp, synthetic construct
  source 1..20: mol_type = other DNA
tgttctagccacaataggac

SEQ ID NO: 26314 - DNA, 20 bp, synthetic construct
  source 1..20: mol_type = other DNA
agacaatgtagtgagaatat

SEQ ID NO: 26315 - DNA, 20 bp, synthetic construct
  source 1..20: mol_type = other DNA
agataaaatagttaccgccc

SEQ ID NO: 26316 - DNA, 20 bp, synthetic construct
  source 1..20: mol_type = other DNA
cagagacctagatccaactc

SEQ ID NO: 26317 - DNA, 20 bp, synthetic construct
  source 1..20: mol_type = other DNA
acagatctgagcaatatacc

SEQ ID NO: 26318 - DNA, 20 bp, synthetic construct
  source 1..20: mol_type = other DNA
cccttcttacagtaatgacg

SEQ ID NO: 26319 - DNA, 20 bp, synthetic construct
  source 1..20: mol_type = other DNA
cagccaacagatactgatgg

SEQ ID NO: 26320 - DNA, 20 bp, synthetic construct
  source 1..20: mol_type = other DNA
aaagtggtgcaagatcttag

SEQ ID NO: 26321 - DNA, 20 bp, synthetic construct
  source 1..20: mol_type = other DNA
aaaatcggatacagatacag

SEQ ID NO: 26322 - DNA, 20 bp, synthetic construct
  source 1..20: mol_type = other DNA
gttaaattcaaagcagcaca

SEQ ID NO: 26323 - DNA, 20 bp, synthetic construct
  source 1..20: mol_type = other DNA
ctagccactatatcaggctc

SEQ ID NO: 26324 - DNA, 20 bp, synthetic construct
  source 1..20: mol_type = other DNA
gcagaagagaaactaccaac

SEQ ID NO: 26325 - DNA, 20 bp, synthetic construct
  source 1..20: mol_type = other DNA
caagatgtgtctaaaaaggt

SEQ ID NO: 26326 - DNA, 20 bp, synthetic construct
  source 1..20: mol_type = other DNA
gagagcaaagcaccttgctg

SEQ ID NO: 26327 - DNA, 20 bp, synthetic construct
  source 1..20: mol_type = other DNA
aggtgcgggtccaacagatg

SEQ ID NO: 26328 - DNA, 20 bp, synthetic construct
  source 1..20: mol_type = other DNA
aagatgacgacgtcccagag

SEQ ID NO: 26329 - DNA, 20 bp, synthetic construct
  source 1..20: mol_type = other DNA
gactgacaaggcgtggcatg

SEQ ID NO: 26330 - DNA, 20 bp, synthetic construct
  source 1..20: mol_type = other DNA
tcaccatccacgagtcgaga

SEQ ID NO: 26331 - DNA, 20 bp, synthetic construct
  source 1..20: mol_type = other DNA
aggacaaggacacggtcgtg

SEQ ID NO: 26332 - DNA, 20 bp, synthetic construct
  source 1..20: mol_type = other DNA
ggcgtaagcaacttctgcgc

SEQ ID NO: 26333 - DNA, 20 bp, synthetic construct
  source 1..20: mol_type = other DNA
aaagccggcaataaacacac

SEQ ID NO: 26334 - DNA, 20 bp, synthetic construct
  source 1..20: mol_type = other DNA
cccgaccacatcatccgcca

SEQ ID NO: 26335 - DNA, 20 bp, synthetic construct
  source 1..20: mol_type = other DNA
tgcagcccaagagaacaggt

SEQ ID NO: 26336 - DNA, 20 bp, synthetic construct
  source 1..20: mol_type = other DNA
cacagcgagtcatctcctcg

SEQ ID NO: 26337 - DNA, 20 bp, synthetic construct
  source 1..20: mol_type = other DNA
gacattcctgaagccgaagg

SEQ ID NO: 26338 - DNA, 20 bp, synthetic construct
  source 1..20: mol_type = other DNA
agaaaacctacccatcccag

SEQ ID NO: 26339 - DNA, 20 bp, synthetic construct
  source 1..20: mol_type = other DNA
agactgtttgccctatggta

SEQ ID NO: 26340 - DNA, 20 bp, synthetic construct
  source 1..20: mol_type = other DNA
gacggcaaaatagtcagctg

SEQ ID NO: 26341 - DNA, 20 bp, synthetic construct
  source 1..20: mol_type = other DNA
ggtcacaattcagaatccca

SEQ ID NO: 26342 - DNA, 20 bp, synthetic construct
  source 1..20: mol_type = other DNA
tggtcccagcacgacggcag

SEQ ID NO: 26343 - DNA, 20 bp, synthetic construct
  source 1..20: mol_type = other DNA
tgtttgtgtatcctaggaag

SEQ ID NO: 26344 - DNA, 20 bp, synthetic construct
  source 1..20: mol_type = other DNA
agtcagggcgcacaaacccc

SEQ ID NO: 26345 - DNA, 20 bp, synthetic construct
  source 1..20: mol_type = other DNA
gcgactctaaaggcagcccc

SEQ ID NO: 26346 - DNA, 20 bp, synthetic construct
  source 1..20: mol_type = other DNA
ccagagaagaaccttcaaga

SEQ ID NO: 26347 - DNA, 20 bp, synthetic construct
  source 1..20: mol_type = other DNA
gtctctgatgtgctgccctg

SEQ ID NO: 26348 - DNA, 20 bp, synthetic construct
  source 1..20: mol_type = other DNA
aaagactggtcccagcacga

SEQ ID NO: 26349 - DNA, 20 bp, synthetic construct
  source 1..20: mol_type = other DNA
ggaagcagcagcgactctaa

SEQ ID NO: 26350 - DNA, 20 bp, synthetic construct
  source 1..20: mol_type = other DNA
ggttcctggtatggaaacct

SEQ ID NO: 26351 - DNA, 20 bp, synthetic construct
  source 1..20: mol_type = other DNA
gttccacaaacagtcccagc

SEQ ID NO: 26352 - DNA, 20 bp, synthetic construct
  source 1..20: mol_type = other DNA
acctaggcccgcgagtgccc

SEQ ID NO: 26353 - DNA, 20 bp, synthetic construct
  source 1..20: mol_type = other DNA
gcagcacatcagagacacca

SEQ ID NO: 26354 - DNA, 20 bp, synthetic construct
  source 1..20: mol_type = other DNA
gcgccctgactggcagcagg

SEQ ID NO: 26355 - DNA, 20 bp, synthetic construct
  source 1..20: mol_type = other DNA
agaggaatggctgtgttcca

SEQ ID NO: 26356 - DNA, 20 bp, synthetic construct
  source 1..20: mol_type = other DNA
acaaaccccaggagagaagg

SEQ ID NO: 26357 - DNA, 20 bp, synthetic construct
  source 1..20: mol_type = other DNA
gtagatacatatcacaacac

SEQ ID NO: 26358 - DNA, 20 bp, synthetic construct
  source 1..20: mol_type = other DNA
accactgtccaacatggcaa

SEQ ID NO: 26359 - DNA, 20 bp, synthetic construct
  source 1..20: mol_type = other DNA
ttatagtgccgtgctataag

SEQ ID NO: 26360 - DNA, 20 bp, synthetic construct
  source 1..20: mol_type = other DNA
aggtgtaattaccccagaag

SEQ ID NO: 26361 - DNA, 20 bp, synthetic construct
  source 1..20: mol_type = other DNA
gtgaaggcatacctaccaac

SEQ ID NO: 26362 - DNA, 20 bp, synthetic construct
  source 1..20: mol_type = other DNA
accattgccatgttggacag

SEQ ID NO: 26363 - DNA, 20 bp, synthetic construct
  source 1..20: mol_type = other DNA
aggggaagaattgaaagtga

SEQ ID NO: 26364 - DNA, 20 bp, synthetic construct
  source 1..20: mol_type = other DNA
aaagccaaaactgatgctgg

SEQ ID NO: 26365 - DNA, 20 bp, synthetic construct
  source 1..20: mol_type = other DNA
agccgttaaagagatcacac

SEQ ID NO: 26366 - DNA, 20 bp, synthetic construct
  source 1..20: mol_type = other DNA
agtggctgagtacctgaccc

SEQ ID NO: 26367 - DNA, 20 bp, synthetic construct
  source 1..20: mol_type = other DNA
ttgctcagcactatgtgaag

SEQ ID NO: 26368 - DNA, 20 bp, synthetic construct
  source 1..20: mol_type = other DNA
ataacagaatatgaagagag

SEQ ID NO: 26369 - DNA, 20 bp, synthetic construct
  source 1..20: mol_type = other DNA
attgaagaagatgatggtga

SEQ ID NO: 26370 - DNA, 20 bp, synthetic construct
  source 1..20: mol_type = other DNA
tggattgttggaaacagatg

SEQ ID NO: 26371 - DNA, 20 bp, synthetic construct
  source 1..20: mol_type = other DNA
ccctggcctggcttaccttg

SEQ ID NO: 26372 - DNA, 20 bp, synthetic construct
  source 1..20: mol_type = other DNA
acggattcacaactaccgag

SEQ ID NO: 26373 - DNA, 20 bp, synthetic construct
  source 1..20: mol_type = other DNA
agactgtatgcgggatgtgg

SEQ ID NO: 26374 - DNA, 20 bp, synthetic construct
  source 1..20: mol_type = other DNA
gcaagaagccagcacccaag

SEQ ID NO: 26375 - DNA, 20 bp, synthetic construct
  source 1..20: mol_type = other DNA
tcataggccggagcatctca

SEQ ID NO: 26376 - DNA, 20 bp, synthetic construct
  source 1..20: mol_type = other DNA
gaagatacatactgaccctc

SEQ ID NO: 26377 - DNA, 20 bp, synthetic construct
  source 1..20: mol_type = other DNA
tgccgccaacttctcgatgt

SEQ ID NO: 26378 - DNA, 20 bp, synthetic construct
  source 1..20: mol_type = other DNA
cagacttagacccagacccg

SEQ ID NO: 26379 - DNA, 20 bp, synthetic construct
  source 1..20: mol_type = other DNA
cctgacgtcccagcaacccc

SEQ ID NO: 26380 - DNA, 20 bp, synthetic construct
  source 1..20: mol_type = other DNA
gaggctgaacaagtaccgcg

SEQ ID NO: 26381 - DNA, 20 bp, synthetic construct
  source 1..20: mol_type = other DNA
gagaggcagaaagatcaatg

SEQ ID NO: 26382 - DNA, 20 bp, synthetic construct
  source 1..20: mol_type = other DNA
gctattcgagcacaccgagc

SEQ ID NO: 26383 - DNA, 20 bp, synthetic construct
  source 1..20: mol_type = other DNA
gctgcaggaggtcttaggtg

SEQ ID NO: 26384 - DNA, 20 bp, synthetic construct
  source 1..20: mol_type = other DNA
accgtgcccgagagctcatg

SEQ ID NO: 26385 - DNA, 20 bp, synthetic construct
  source 1..20: mol_type = other DNA
agccccggctgataaagacg

SEQ ID NO: 26386 - DNA, 20 bp, synthetic construct
  source 1..20: mol_type = other DNA
agatacctgactccaaggca

SEQ ID NO: 26387 - DNA, 20 bp, synthetic construct
  source 1..20: mol_type = other DNA
atgatctgtcctaactccgg

SEQ ID NO: 26388 - DNA, 20 bp, synthetic construct
  source 1..20: mol_type = other DNA
aaagtattataaagactcca

SEQ ID NO: 26389 - DNA, 20 bp, synthetic construct
  source 1..20: mol_type = other DNA
ggactctattcagagactga

SEQ ID NO: 26390 - DNA, 20 bp, synthetic construct
  source 1..20: mol_type = other DNA
tttgacgaaggtgtatgttg

SEQ ID NO: 26391 - DNA, 20 bp, synthetic construct
  source 1..20: mol_type = other DNA
tgtactaaacaaagacatcc

SEQ ID NO: 26392 - DNA, 20 bp, synthetic construct
  source 1..20: mol_type = other DNA
tggctttggaccagaatatg

SEQ ID NO: 26393 - DNA, 20 bp, synthetic construct
  source 1..20: mol_type = other DNA
gggagaccttcctagcacag

SEQ ID NO: 26394 - DNA, 20 bp, synthetic construct
  source 1..20: mol_type = other DNA
gaaatctcgactctatcaac

SEQ ID NO: 26395 - DNA, 20 bp, synthetic construct
  source 1..20: mol_type = other DNA
ttggaggaataccttatctc

SEQ ID NO: 26396 - DNA, 20 bp, synthetic construct
  source 1..20: mol_type = other DNA
ggacggttctgtggttatgc

SEQ ID NO: 26397 - DNA, 20 bp, synthetic construct
  source 1..20: mol_type = other DNA
tggcatggaaccccgcaatg

SEQ ID NO: 26398 - DNA, 20 bp, synthetic construct
  source 1..20: mol_type = other DNA
cacaactaatgtgaacagcc

SEQ ID NO: 26399 - DNA, 20 bp, synthetic construct
  source 1..20: mol_type = other DNA
tttgtgatagaagaaaaaca

SEQ ID NO: 26400 - DNA, 20 bp, synthetic construct
  source 1..20: mol_type = other DNA
taaagtagaagtgaagacac

SEQ ID NO: 26401 - DNA, 20 bp, synthetic construct
  source 1..20: mol_type = other DNA
tagccaacagcagaaacacc

SEQ ID NO: 26402 - DNA, 20 bp, synthetic construct
  source 1..20: mol_type = other DNA
ccttactcggctcttctgtg

SEQ ID NO: 26403 - DNA, 20 bp, synthetic construct
  source 1..20: mol_type = other DNA
cacagaagagccgagtaagg

SEQ ID NO: 26404 - DNA, 20 bp, synthetic construct
  source 1..20: mol_type = other DNA
ttcctcggccccgatggcac

SEQ ID NO: 26405 - DNA, 20 bp, synthetic construct
  source 1..20: mol_type = other DNA
gcagccagcggtcactgatg

SEQ ID NO: 26406 - DNA, 20 bp, synthetic construct
  source 1..20: mol_type = other DNA
gatgagacactgcatgcctg

SEQ ID NO: 26407 - DNA, 20 bp, synthetic construct
  source 1..20: mol_type = other DNA
ccggaccctcccatttccag

SEQ ID NO: 26408 - DNA, 20 bp, synthetic construct
  source 1..20: mol_type = other DNA
ctgtcccagcaggtatctgt

SEQ ID NO: 26409 - DNA, 20 bp, synthetic construct
  source 1..20: mol_type = other DNA
cactcacggcttgcggcagt

SEQ ID NO: 26410 - DNA, 20 bp, synthetic construct
  source 1..20: mol_type = other DNA
gggggaagaagtccgtaacc

SEQ ID NO: 26411 - DNA, 20 bp, synthetic construct
  source 1..20: mol_type = other DNA
tctgggccaggtcataccct

SEQ ID NO: 26412 - DNA, 20 bp, synthetic construct
  source 1..20: mol_type = other DNA
tgaggtccttgttgaagcca

SEQ ID NO: 26413 - DNA, 20 bp, synthetic construct
  source 1..20: mol_type = other DNA
agaggtggtgctctccaagg

SEQ ID NO: 26414 - DNA, 20 bp, synthetic construct
  source 1..20: mol_type = other DNA
tgcctggggagacacaggtc

SEQ ID NO: 26415 - DNA, 20 bp, synthetic construct
  source 1..20: mol_type = other DNA
gaggccggcctgccaaggct

SEQ ID NO: 26416 - DNA, 20 bp, synthetic construct
  source 1..20: mol_type = other DNA
gcagtgtctcatctcaggct

SEQ ID NO: 26417 - DNA, 20 bp, synthetic construct
  source 1..20: mol_type = other DNA
ggacaagcatgaaatccccc

SEQ ID NO: 26418 - DNA, 20 bp, synthetic construct
  source 1..20: mol_type = other DNA
acaaagtgctccaataaggg

SEQ ID NO: 26419 - DNA, 20 bp, synthetic construct
  source 1..20: mol_type = other DNA
cagcaggggaccgctgagag

SEQ ID NO: 26420 - DNA, 20 bp, synthetic construct
  source 1..20: mol_type = other DNA
tggtaggagggagtcaggtc

SEQ ID NO: 26421 - DNA, 20 bp, synthetic construct
  source 1..20: mol_type = other DNA
agaaagagacttcacgatgc

SEQ ID NO: 26422 - DNA, 20 bp, synthetic construct
  source 1..20: mol_type = other DNA
atccctggcaacatcctgag

SEQ ID NO: 26423 - DNA, 20 bp, synthetic construct
  source 1..20: mol_type = other DNA
cctgaccctgggacttgtca

SEQ ID NO: 26424 - DNA, 20 bp, synthetic construct
  source 1..20: mol_type = other DNA
aaagcaaagtgatcttgaag

SEQ ID NO: 26425 - DNA, 20 bp, synthetic construct
  source 1..20: mol_type = other DNA
ggtaagagttggacttgtca

SEQ ID NO: 26426 - DNA, 20 bp, synthetic construct
  source 1..20: mol_type = other DNA
aagaatagagaggctacctg

SEQ ID NO: 26427 - DNA, 20 bp, synthetic construct
  source 1..20: mol_type = other DNA
gagggatgaactgcagtcca

SEQ ID NO: 26428 - DNA, 20 bp, synthetic construct
  source 1..20: mol_type = other DNA
ggatgaagacgacaaagacg

SEQ ID NO: 26429 - DNA, 20 bp, synthetic construct
  source 1..20: mol_type = other DNA
atgcttgttcagccagcggg

SEQ ID NO: 26430 - DNA, 20 bp, synthetic construct
  source 1..20: mol_type = other DNA
agagaagctcaggcaagctg

SEQ ID NO: 26431 - DNA, 20 bp, synthetic construct
  source 1..20: mol_type = other DNA
acacgaagtcgactctgctc

SEQ ID NO: 26432 - DNA, 20 bp, synthetic construct
  source 1..20: mol_type = other DNA
gatgtgccttgggaaaaggg

SEQ ID NO: 26433 - DNA, 20 bp, synthetic construct
  source 1..20: mol_type = other DNA
gtgccttgggaaaagggagg

SEQ ID NO: 26434 - DNA, 20 bp, synthetic construct
  source 1..20: mol_type = other DNA
gaaatcttcaacactatgga

SEQ ID NO: 26435 - DNA, 20 bp, synthetic construct
  source 1..20: mol_type = other DNA
taacgatcagctcatctggt

SEQ ID NO: 26436 - DNA, 20 bp, synthetic construct
  source 1..20: mol_type = other DNA
aattcaaaatacttacccga

SEQ ID NO: 26437 - DNA, 20 bp, synthetic construct
  source 1..20: mol_type = other DNA
cccaaggcacatcgaacctg

SEQ ID NO: 26438 - DNA, 20 bp, synthetic construct
  source 1..20: mol_type = other DNA
tatggtacccatcatacctc

SEQ ID NO: 26439 - DNA, 20 bp, synthetic construct
  source 1..20: mol_type = other DNA
aggtttatagctcggtgctg

SEQ ID NO: 26440 - DNA, 20 bp, synthetic construct
  source 1..20: mol_type = other DNA
gtcctttattaatagaatgg

SEQ ID NO: 26441 - DNA, 20 bp, synthetic construct
  source 1..20: mol_type = other DNA
ccttcgcgcggcccgaagcg

SEQ ID NO: 26442 - DNA, 20 bp, synthetic construct
  source 1..20: mol_type = other DNA
ctgaaagccatggaagacgg

SEQ ID NO: 26443 - DNA, 20 bp, synthetic construct
  source 1..20: mol_type = other DNA
ccgcatacctgtccttcgcg

SEQ ID NO: 26444 - DNA, 20 bp, synthetic construct
  source 1..20: mol_type = other DNA
tgtagcgtttgcaaatactg

SEQ ID NO: 26445 - DNA, 20 bp, synthetic construct
  source 1..20: mol_type = other DNA
ccaataagagcagaaatgcc

SEQ ID NO: 26446 - DNA, 20 bp, synthetic construct
  source 1..20: mol_type = other DNA
tggaatcagcttcttcccgt

SEQ ID NO: 26447 - DNA, 20 bp, synthetic construct
  source 1..20: mol_type = other DNA
gcagaagccgatctacgcca

SEQ ID NO: 26448 - DNA, 20 bp, synthetic construct
  source 1..20: mol_type = other DNA
gcctcgatgatagaatacca

SEQ ID NO: 26449 - DNA, 20 bp, synthetic construct
  source 1..20: mol_type = other DNA
gctgagacactgtacaccat

SEQ ID NO: 26450 - DNA, 20 bp, synthetic construct
  source 1..20: mol_type = other DNA
atcatcgaggctacaagctg

SEQ ID NO: 26451 - DNA, 20 bp, synthetic construct
  source 1..20: mol_type = other DNA
tggaggacattgatatgtgt

SEQ ID NO: 26452 - DNA, 20 bp, synthetic construct
  source 1..20: mol_type = other DNA
gcagagccacagaaaggacc

SEQ ID NO: 26453 - DNA, 20 bp, synthetic construct
  source 1..20: mol_type = other DNA
agttgatgcccgtcatgatg

SEQ ID NO: 26454 - DNA, 20 bp, synthetic construct
  source 1..20: mol_type = other DNA
agcactttgagcgagcaacc

SEQ ID NO: 26455 - DNA, 20 bp, synthetic construct
  source 1..20: mol_type = other DNA
ggtacccaacaaggatgaac

SEQ ID NO: 26456 - DNA, 20 bp, synthetic construct
  source 1..20: mol_type = other DNA
gaagccatcaacaactcagt

SEQ ID NO: 26457 - DNA, 20 bp, synthetic construct
  source 1..20: mol_type = other DNA
gagaagctcctattggatga

SEQ ID NO: 26458 - DNA, 20 bp, synthetic construct
  source 1..20: mol_type = other DNA
acctggctgttccacgagat

SEQ ID NO: 26459 - DNA, 20 bp, synthetic construct
  source 1..20: mol_type = other DNA
atgtaatgggctgtctgtga

SEQ ID NO: 26460 - DNA, 20 bp, synthetic construct
  source 1..20: mol_type = other DNA
ggaatgcccagattgagctg

SEQ ID NO: 26461 - DNA, 20 bp, synthetic construct
  source 1..20: mol_type = other DNA
ctgatcaaaggcaccatgaa

SEQ ID NO: 26462 - DNA, 20 bp, synthetic construct
  source 1..20: mol_type = other DNA
gtgaccagcaaccacgacgg

SEQ ID NO: 26463 - DNA, 20 bp, synthetic construct
  source 1..20: mol_type = other DNA
actatgcagactattcactg

SEQ ID NO: 26464 - DNA, 20 bp, synthetic construct
  source 1..20: mol_type = other DNA
ttgaggcgactgtcattcgg

SEQ ID NO: 26465 - DNA, 20 bp, synthetic construct
  source 1..20: mol_type = other DNA
aggtgaccccgcacaacgcg

SEQ ID NO: 26466 - DNA, 20 bp, synthetic construct
  source 1..20: mol_type = other DNA
cctggactatgactgtcaga

SEQ ID NO: 26467 - DNA, 20 bp, synthetic construct
  source 1..20: mol_type = other DNA
ccgcttctcccgtcacagcg

SEQ ID NO: 26468 - DNA, 20 bp, synthetic construct
  source 1..20: mol_type = other DNA
tcccagacatctatggaccc

SEQ ID NO: 26469 - DNA, 20 bp, synthetic construct
  source 1..20: mol_type = other DNA
gggaacttgaggagggcacg

SEQ ID NO: 26470 - DNA, 20 bp, synthetic construct
  source 1..20: mol_type = other DNA
aggagacccctaccattctg

SEQ ID NO: 26471 - DNA, 20 bp, synthetic construct
  source 1..20: mol_type = other DNA
cgaatgacagtcgcctcaag

SEQ ID NO: 26472 - DNA, 20 bp, synthetic construct
  source 1..20: mol_type = other DNA
tggggtgcatgtgccgacac

SEQ ID NO: 26473 - DNA, 20 bp, synthetic construct
  source 1..20: mol_type = other DNA
atgtctgtgtcatggagacc

SEQ ID NO: 26474 - DNA, 20 bp, synthetic construct
  source 1..20: mol_type = other DNA
acggggctgaacaggttccg

SEQ ID NO: 26475 - DNA, 20 bp, synthetic construct
  source 1..20: mol_type = other DNA
ggagacctggaacccagaga

SEQ ID NO: 26476 - DNA, 20 bp, synthetic construct
  source 1..20: mol_type = other DNA
gctgtgactgctacgtccaa

SEQ ID NO: 26477 - DNA, 20 bp, synthetic construct
  source 1..20: mol_type = other DNA
agctgctactggctgtacgg

SEQ ID NO: 26478 - DNA, 20 bp, synthetic construct
  source 1..20: mol_type = other DNA
atgcttagcaccacgaatgt

SEQ ID NO: 26479 - DNA, 20 bp, synthetic construct
  source 1..20: mol_type = other DNA
gagtatactgagttgcacct

SEQ ID NO: 26480 - DNA, 20 bp, synthetic construct
  source 1..20: mol_type = other DNA
ctgactatggttatactcag

SEQ ID NO: 26481 - DNA, 20 bp, synthetic construct
  source 1..20: mol_type = other DNA
tccacataatcatggcccac

SEQ ID NO: 26482 - DNA, 20 bp, synthetic construct
  source 1..20: mol_type = other DNA
acatacaacgtaagtacctg

SEQ ID NO: 26483 - DNA, 20 bp, synthetic construct
  source 1..20: mol_type = other DNA
aggcctggcaactgcaactg

SEQ ID NO: 26484 - DNA, 20 bp, synthetic construct
  source 1..20: mol_type = other DNA
gcagcaacagttctactcgt

SEQ ID NO: 26485 - DNA, 20 bp, synthetic construct
  source 1..20: mol_type = other DNA
tcacaatagtgaatctgtgg

SEQ ID NO: 26486 - DNA, 20 bp, synthetic construct
  source 1..20: mol_type = other DNA
atgtttcagacgttatgaag

SEQ ID NO: 26487 - DNA, 20 bp, synthetic construct
  source 1..20: mol_type = other DNA
accagaatatgtaactgctg

SEQ ID NO: 26488 - DNA, 20 bp, synthetic construct
  source 1..20: mol_type = other DNA
aacctccatctggcattcgg

SEQ ID NO: 26489 - DNA, 20 bp, synthetic construct
  source 1..20: mol_type = other DNA
ctttaatgatcccaatgcta

SEQ ID NO: 26490 - DNA, 20 bp, synthetic construct
  source 1..20: mol_type = other DNA
agtaaaggtggtccctgtcc

SEQ ID NO: 26491 - DNA, 20 bp, synthetic construct
  source 1..20: mol_type = other DNA
ctggcgaagacgagaagaag

SEQ ID NO: 26492 - DNA, 20 bp, synthetic construct
  source 1..20: mol_type = other DNA
tgtggtaatcttctacgacg

SEQ ID NO: 26493 - DNA, 20 bp, synthetic construct
  source 1..20: mol_type = other DNA
cccgtaggccggccgtaccg

SEQ ID NO: 26494 - DNA, 20 bp, synthetic construct
  source 1..20: mol_type = other DNA
acacgtaccgctgagcacgt

SEQ ID NO: 26495 - DNA, 20 bp, synthetic construct
  source 1..20: mol_type = other DNA
gcatagtgcagtgtttggcg

SEQ ID NO: 26496 - DNA, 20 bp, synthetic construct
  source 1..20: mol_type = other DNA
ggggaactggccatacagca

SEQ ID NO: 26497 - DNA, 20 bp, synthetic construct
  source 1..20: mol_type = other DNA
gtggcaagcccagtgacatg

SEQ ID NO: 26498 - DNA, 20 bp, synthetic construct
  source 1..20: mol_type = other DNA
ggacacagaatccagccgga

SEQ ID NO: 26499 - DNA, 20 bp, synthetic construct
  source 1..20: mol_type = other DNA
cgctcaccagatgcttcccg

SEQ ID NO: 26500 - DNA, 20 bp, synthetic construct
  source 1..20: mol_type = other DNA
accggtgagttgcccagacg

SEQ ID NO: 26501 - DNA, 20 bp, synthetic construct
  source 1..20: mol_type = other DNA
gtgcacagagacctgaagct

SEQ ID NO: 26502 - DNA, 20 bp, synthetic construct
  source 1..20: mol_type = other DNA
atggttatccgatgtgtcct

SEQ ID NO: 26503 - DNA, 20 bp, synthetic construct
  source 1..20: mol_type = other DNA
gagagccaggaagagcggca

SEQ ID NO: 26504 - DNA, 20 bp, synthetic construct
  source 1..20: mol_type = other DNA
cgtcgggactgatgtaggca

SEQ ID NO: 26505 - DNA, 20 bp, synthetic construct
  source 1..20: mol_type = other DNA
catgagcacagaggcagtcc

SEQ ID NO: 26506 - DNA, 20 bp, synthetic construct
  source 1..20: mol_type = other DNA
gggaagcatctggtgagcga

SEQ ID NO: 26507 - DNA, 20 bp, synthetic construct
  source 1..20: mol_type = other DNA
cacagccgactactaccccg

SEQ ID NO: 26508 - DNA, 20 bp, synthetic construct
  source 1..20: mol_type = other DNA
gtggaccgagaccttcccaa

SEQ ID NO: 26509 - DNA, 20 bp, synthetic construct
  source 1..20: mol_type = other DNA
ctgcagcgacccctacacac

SEQ ID NO: 26510 - DNA, 20 bp, synthetic construct
  source 1..20: mol_type = other DNA
ccggcttaccagttccacgt

SEQ ID NO: 26511 - DNA, 20 bp, synthetic construct
  source 1..20: mol_type = other DNA
atcgccccctgtgacgaggt

SEQ ID NO: 26512 - DNA, 20 bp, synthetic construct
  source 1..20: mol_type = other DNA
ggtggcaactgagatctgca

SEQ ID NO: 26513 - DNA, 20 bp, synthetic construct
  source 1..20: mol_type = other DNA
cagtgacaagaccagcaacc

SEQ ID NO: 26514 - DNA, 20 bp, synthetic construct
  source 1..20: mol_type = other DNA
ctggtcttgtcactgaagca

SEQ ID NO: 26515 - DNA, 20 bp, synthetic construct
  source 1..20: mol_type = other DNA
gcccgcgagtgcttcaacat

SEQ ID NO: 26516 - DNA, 20 bp, synthetic construct
  source 1..20: mol_type = other DNA
gctgctgctcgatgcacagg

SEQ ID NO: 26517 - DNA, 20 bp, synthetic construct
  source 1..20: mol_type = other DNA
ggaaacactgatccagcacc

SEQ ID NO: 26518 - DNA, 20 bp, synthetic construct
  source 1..20: mol_type = other DNA
gggcaccttaaggacgtcgt

SEQ ID NO: 26519 - DNA, 20 bp, synthetic construct
  source 1..20: mol_type = other DNA
cagagggtccttgttcacaa

SEQ ID NO: 26520 - DNA, 20 bp, synthetic construct
  source 1..20: mol_type = other DNA
gttcaacaggctgtgctacc

SEQ ID NO: 26521 - DNA, 20 bp, synthetic construct
  source 1..20: mol_type = other DNA
actcacagatgatggccatg

SEQ ID NO: 26522 - DNA, 20 bp, synthetic construct
  source 1..20: mol_type = other DNA
gtggcggaacccatcaatgt

SEQ ID NO: 26523 - DNA, 20 bp, synthetic construct
  source 1..20: mol_type = other DNA
ggcagatgtggagctcaacc

SEQ ID NO: 26524 - DNA, 20 bp, synthetic construct
  source 1..20: mol_type = other DNA
gtactacggcgttgtgacac

SEQ ID NO: 26525 - DNA, 20 bp, synthetic construct
  source 1..20: mol_type = other DNA
taccaatgggcagagtgcac

SEQ ID NO: 26526 - DNA, 20 bp, synthetic construct
  source 1..20: mol_type = other DNA
acatcatactcctgggccac

SEQ ID NO: 26527 - DNA, 20 bp, synthetic construct
  source 1..20: mol_type = other DNA
gcagaggctggccataccaa

SEQ ID NO: 26528 - DNA, 20 bp, synthetic construct
  source 1..20: mol_type = other DNA
ctcattgcagacctctagtg

SEQ ID NO: 26529 - DNA, 20 bp, synthetic construct
  source 1..20: mol_type = other DNA
gctgctcaatcaccttcaag

SEQ ID NO: 26530 - DNA, 20 bp, synthetic construct
  source 1..20: mol_type = other DNA
ttcttgtgttcgatgcacac

SEQ ID NO: 26531 - DNA, 20 bp, synthetic construct
  source 1..20: mol_type = other DNA
gcttggtgatgatgtacact

SEQ ID NO: 26532 - DNA, 20 bp, synthetic construct
  source 1..20: mol_type = other DNA
aacccaactcacctacctgg

SEQ ID NO: 26533 - DNA, 20 bp, synthetic construct
  source 1..20: mol_type = other DNA
aacaatgggctcgagggcgc

SEQ ID NO: 26534 - DNA, 20 bp, synthetic construct
  source 1..20: mol_type = other DNA
ggcatacttgttgtgtagtg

SEQ ID NO: 26535 - DNA, 20 bp, synthetic construct
  source 1..20: mol_type = other DNA
ccaattatccagcacagcta

SEQ ID NO: 26536 - DNA, 20 bp, synthetic construct
  source 1..20: mol_type = other DNA
gagcagcttcgtgtccatgg

SEQ ID NO: 26537 - DNA, 20 bp, synthetic construct
  source 1..20: mol_type = other DNA
caatggtgagggactacatg

SEQ ID NO: 26538 - DNA, 20 bp, synthetic construct
  source 1..20: mol_type = other DNA
ataggtctccagcccttcag

SEQ ID NO: 26539 - DNA, 20 bp, synthetic construct
  source 1..20: mol_type = other DNA
agaaacatctatccaccgag

SEQ ID NO: 26540 - DNA, 20 bp, synthetic construct
  source 1..20: mol_type = other DNA
ggaccgctgattggagcaag

SEQ ID NO: 26541 - DNA, 20 bp, synthetic construct
  source 1..20: mol_type = other DNA
tgagaaacatctatccaccg

SEQ ID NO: 26542 - DNA, 20 bp, synthetic construct
  source 1..20: mol_type = other DNA
ctccggtggaacaggaccgt

SEQ ID NO: 26543 - DNA, 20 bp, synthetic construct
  source 1..20: mol_type = other DNA
gaatcaggatatgattgccc

SEQ ID NO: 26544 - DNA, 20 bp, synthetic construct
  source 1..20: mol_type = other DNA
gaagaggcccaagcagccca

SEQ ID NO: 26545 - DNA, 20 bp, synthetic construct
  source 1..20: mol_type = other DNA
gaggagaaccaagctatgac

SEQ ID NO: 26546 - DNA, 20 bp, synthetic construct
  source 1..20: mol_type = other DNA
atcctacggtcctgttccac

SEQ ID NO: 26547 - DNA, 20 bp, synthetic construct
  source 1..20: mol_type = other DNA
agatcagccgtgccactgaa

SEQ ID NO: 26548 - DNA, 20 bp, synthetic construct
  source 1..20: mol_type = other DNA
aagcagcccagggaatcccc

SEQ ID NO: 26549 - DNA, 20 bp, synthetic construct
  source 1..20: mol_type = other DNA
tcaggatatgattgccctgg

SEQ ID NO: 26550 - DNA, 20 bp, synthetic construct
  source 1..20: mol_type = other DNA
aatctgtcttccctttgtgg

SEQ ID NO: 26551 - DNA, 20 bp, synthetic construct
  source 1..20: mol_type = other DNA
cagcggtccattgtttccag

SEQ ID NO: 26552 - DNA, 20 bp, synthetic construct
  source 1..20: mol_type = other DNA
gtggaccttacataccaatg

SEQ ID NO: 26553 - DNA, 20 bp, synthetic construct
  source 1..20: mol_type = other DNA
aatgaggtgatatgtccatg

SEQ ID NO: 26554 - DNA, 20 bp, synthetic construct
  source 1..20: mol_type = other DNA
gttctctatcatggctcgag

SEQ ID NO: 26555 - DNA, 20 bp, synthetic construct
  source 1..20: mol_type = other DNA
aggctgtgaagcgttcccac

SEQ ID NO: 26556 - DNA, 20 bp, synthetic construct
  source 1..20: mol_type = other DNA
tcagtttctgagccagaccg

SEQ ID NO: 26557 - DNA, 20 bp, synthetic construct
  source 1..20: mol_type = other DNA
gggtgttggaatagaggtgc

SEQ ID NO: 26558 - DNA, 20 bp, synthetic construct
  source 1..20: mol_type = other DNA
ccagctctcttacattgctg

SEQ ID NO: 26559 - DNA, 20 bp, synthetic construct
  source 1..20: mol_type = other DNA
tgcccccaggatcagtgaag

SEQ ID NO: 26560 - DNA, 20 bp, synthetic construct
  source 1..20: mol_type = other DNA
atgaaatactacttctacca

SEQ ID NO: 26561 - DNA, 20 bp, synthetic construct
  source 1..20: mol_type = other DNA
gaggtcccgcttcatggcat

SEQ ID NO: 26562 - DNA, 20 bp, synthetic construct
  source 1..20: mol_type = other DNA
gctccacttcactgatcctg

SEQ ID NO: 26563 - DNA, 20 bp, synthetic construct
  source 1..20: mol_type = other DNA
acattgctgaggacgagaat

SEQ ID NO: 26564 - DNA, 20 bp, synthetic construct
  source 1..20: mol_type = other DNA
aatatgtctccctgcatgtc

SEQ ID NO: 26565 - DNA, 20 bp, synthetic construct
  source 1..20: mol_type = other DNA
gaagattgtggggtatgtcc

SEQ ID NO: 26566 - DNA, 20 bp, synthetic construct
  source 1..20: mol_type = other DNA
cttgttcccctgcagtaacc

SEQ ID NO: 26567 - DNA, 20 bp, synthetic construct
  source 1..20: mol_type = other DNA
gaccacccccacatgaactg

SEQ ID NO: 26568 - DNA, 20 bp, synthetic construct
  source 1..20: mol_type = other DNA
gaccagtgtccatggaacgg

SEQ ID NO: 26569 - DNA, 20 bp, synthetic construct
  source 1..20: mol_type = other DNA
gagatgctccgaatgatcca

SEQ ID NO: 26570 - DNA, 20 bp, synthetic construct
  source 1..20: mol_type = other DNA
atctcctaacaagcctcgag

SEQ ID NO: 26571 - DNA, 20 bp, synthetic construct
  source 1..20: mol_type = other DNA
agacagcacttagtgccatg

SEQ ID NO: 26572 - DNA, 20 bp, synthetic construct
  source 1..20: mol_type = other DNA
tgaatgggcgcgaattcagt

SEQ ID NO: 26573 - DNA, 20 bp, synthetic construct
  source 1..20: mol_type = other DNA
tgtggatccggaaattgccc

SEQ ID NO: 26574 - DNA, 20 bp, synthetic construct
  source 1..20: mol_type = other DNA
ataaggtgactcaatgacag

SEQ ID NO: 26575 - DNA, 20 bp, synthetic construct
  source 1..20: mol_type = other DNA
ctgatgcaagcttctatgca

SEQ ID NO: 26576 - DNA, 20 bp, synthetic construct
  source 1..20: mol_type = other DNA
cagggtggaatgcatgtcaa

SEQ ID NO: 26577 - DNA, 20 bp, synthetic construct
  source 1..20: mol_type = other DNA
aggtggtcccaagtaacctc

SEQ ID NO: 26578 - DNA, 20 bp, synthetic construct
  source 1..20: mol_type = other DNA
ctccaggagctaaggaacca

SEQ ID NO: 26579 - DNA, 20 bp, synthetic construct
  source 1..20: mol_type = other DNA
agcaaagcataagccagttg

SEQ ID NO: 26580 - DNA, 20 bp, synthetic construct
  source 1..20: mol_type = other DNA
acaggtagtgatgagaattg

SEQ ID NO: 26581 - DNA, 20 bp, synthetic construct
  source 1..20: mol_type = other DNA
tgtccagaatagtccccagg

SEQ ID NO: 26582 - DNA, 20 bp, synthetic construct
  source 1..20: mol_type = other DNA
cccttccctagagatcgtgg

SEQ ID NO: 26583 - DNA, 20 bp, synthetic construct
  source 1..20: mol_type = other DNA
ccttccccagtacctatccg

SEQ ID NO: 26584 - DNA, 20 bp, synthetic construct
  source 1..20: mol_type = other DNA
agggcatcggctctcgccgg

SEQ ID NO: 26585 - DNA, 20 bp, synthetic construct
  source 1..20: mol_type = other DNA
catctctctgctgcaacgcg

SEQ ID NO: 26586 - DNA, 20 bp, synthetic construct
  source 1..20: mol_type = other DNA
caccagggaagctcaacggg

SEQ ID NO: 26587 - DNA, 20 bp, synthetic construct
  source 1..20: mol_type = other DNA
cgctctgctcccgcactcgg

SEQ ID NO: 26588 - DNA, 20 bp, synthetic construct
  source 1..20: mol_type = other DNA
cggatgacgagctgtatcag

SEQ ID NO: 26589 - DNA, 20 bp, synthetic construct
  source 1..20: mol_type = other DNA
gtcgatgtacattgcctgag

SEQ ID NO: 26590 - DNA, 20 bp, synthetic construct
  source 1..20: mol_type = other DNA
ataaacggaaaccgcgtgct

SEQ ID NO: 26591 - DNA, 20 bp, synthetic construct
  source 1..20: mol_type = other DNA
acgggcggacagcgcagcga

SEQ ID NO: 26592 - DNA, 20 bp, synthetic construct
  source 1..20: mol_type = other DNA
gagccgatgccctcgccgcg

SEQ ID NO: 26593 - DNA, 20 bp, synthetic construct
  source 1..20: mol_type = other DNA
gtcttcggtgatgtcctggt

SEQ ID NO: 26594 - DNA, 20 bp, synthetic construct
  source 1..20: mol_type = other DNA
agcgcagcgagggtcgcgct

SEQ ID NO: 26595 - DNA, 20 bp, synthetic construct
  source 1..20: mol_type = other DNA
atcgacagctacaacagccg

SEQ ID NO: 26596 - DNA, 20 bp, synthetic construct
  source 1..20: mol_type = other DNA
gagtgcgggagcagagcgca

SEQ ID NO: 26597 - DNA, 20 bp, synthetic construct
  source 1..20: mol_type = other DNA
gatgtcgtagaccaggatgt

SEQ ID NO: 26598 - DNA, 20 bp, synthetic construct
  source 1..20: mol_type = other DNA
ctacctggagcgtattgaca

SEQ ID NO: 26599 - DNA, 20 bp, synthetic construct
  source 1..20: mol_type = other DNA
gtacaagaactggcgcacga

SEQ ID NO: 26600 - DNA, 20 bp, synthetic construct
  source 1..20: mol_type = other DNA
gctggggatattgcaggagt

SEQ ID NO: 26601 - DNA, 20 bp, synthetic construct
  source 1..20: mol_type = other DNA
ctgaggttccgatcaccctg

SEQ ID NO: 26602 - DNA, 20 bp, synthetic construct
  source 1..20: mol_type = other DNA
cttgtacaacgagttcagcg

SEQ ID NO: 26603 - DNA, 20 bp, synthetic construct
  source 1..20: mol_type = other DNA
gtggaaagtcgaggatctgg

SEQ ID NO: 26604 - DNA, 20 bp, synthetic construct
  source 1..20: mol_type = other DNA
ggatgtaggcgtggacactc

SEQ ID NO: 26605 - DNA, 20 bp, synthetic construct
  source 1..20: mol_type = other DNA
cgttcatgacgacagcaggc

SEQ ID NO: 26606 - DNA, 20 bp, synthetic construct
  source 1..20: mol_type = other DNA
agcagcagatgtcgtagacc

SEQ ID NO: 26607 - DNA, 20 bp, synthetic construct
  source 1..20: mol_type = other DNA
ggatctggaggtcgtgcacg

SEQ ID NO: 26608 - DNA, 20 bp, synthetic construct
  source 1..20: mol_type = other DNA
acagggaaggcgctgatggg

SEQ ID NO: 26609 - DNA, 20 bp, synthetic construct
  source 1..20: mol_type = other DNA
gtgggcagacacctgctgca

SEQ ID NO: 26610 - DNA, 20 bp, synthetic construct
  source 1..20: mol_type = other DNA
cagcaggcaggtaaaggcgg

SEQ ID NO: 26611 - DNA, 20 bp, synthetic construct
  source 1..20: mol_type = other DNA
ttgttgcccacgatgatgat

SEQ ID NO: 26612 - DNA, 20 bp, synthetic construct
  source 1..20: mol_type = other DNA
aaggcaaggcatgaagtgtc

SEQ ID NO: 26613 - DNA, 20 bp, synthetic construct
  source 1..20: mol_type = other DNA
tagtggaatgagtaatggca

SEQ ID NO: 26614 - DNA, 20 bp, synthetic construct
  source 1..20: mol_type = other DNA
aggatgccccacccaaatca

SEQ ID NO: 26615 - DNA, 20 bp, synthetic construct
  source 1..20: mol_type = other DNA
tctgactttgattcgatctg

SEQ ID NO: 26616 - DNA, 20 bp, synthetic construct
  source 1..20: mol_type = other DNA
cagccagaggaactgaaccc

SEQ ID NO: 26617 - DNA, 20 bp, synthetic construct
  source 1..20: mol_type = other DNA
aaattgagcagttgcgcaca

SEQ ID NO: 26618 - DNA, 20 bp, synthetic construct
  source 1..20: mol_type = other DNA
aagtacacaagtatgggtcg

SEQ ID NO: 26619 - DNA, 20 bp, synthetic construct
  source 1..20: mol_type = other DNA
tccagacctcaaaattgtgt

SEQ ID NO: 26620 - DNA, 20 bp, synthetic construct
  source 1..20: mol_type = other DNA
catgctctcatatgtctggg

SEQ ID NO: 26621 - DNA, 20 bp, synthetic construct
  source 1..20: mol_type = other DNA
gccctattactataaagcag

SEQ ID NO: 26622 - DNA, 20 bp, synthetic construct
  source 1..20: mol_type = other DNA
tttaaggctcgaatagtaag

SEQ ID NO: 26623 - DNA, 20 bp, synthetic construct
  source 1..20: mol_type = other DNA
ttatggtattgacagcatgc

SEQ ID NO: 26624 - DNA, 20 bp, synthetic construct
  source 1..20: mol_type = other DNA
gcagaaaagagttctaaaca

SEQ ID NO: 26625 - DNA, 20 bp, synthetic construct
  source 1..20: mol_type = other DNA
ccaaacagagtgtactggat

SEQ ID NO: 26626 - DNA, 20 bp, synthetic construct
  source 1..20: mol_type = other DNA
gcaaggtgctcatgacggca

SEQ ID NO: 26627 - DNA, 20 bp, synthetic construct
  source 1..20: mol_type = other DNA
gcagcgcatctccttcaggt

SEQ ID NO: 26628 - DNA, 20 bp, synthetic construct
  source 1..20: mol_type = other DNA
taggatggaacatggatctc

SEQ ID NO: 26629 - DNA, 20 bp, synthetic construct
  source 1..20: mol_type = other DNA
ggcactgtacatgaggtcgt

SEQ ID NO: 26630 - DNA, 20 bp, synthetic construct
  source 1..20: mol_type = other DNA
gcgcggccagcagacctgca

SEQ ID NO: 26631 - DNA, 20 bp, synthetic construct
  source 1..20: mol_type = other DNA
caggcaggtaggatggaaca

SEQ ID NO: 26632 - DNA, 20 bp, synthetic construct
  source 1..20: mol_type = other DNA
ccaggtcggcactgtacatg

SEQ ID NO: 26633 - DNA, 20 bp, synthetic construct
  source 1..20: mol_type = other DNA
gtgccaagtaccctgctcca

SEQ ID NO: 26634 - DNA, 20 bp, synthetic construct
  source 1..20: mol_type = other DNA
gaagcagcagcagaaggagc

SEQ ID NO: 26635 - DNA, 20 bp, synthetic construct
  source 1..20: mol_type = other DNA
agtgccaagtaccctgctcc

SEQ ID NO: 26636 - DNA, 20 bp, synthetic construct
  source 1..20: mol_type = other DNA
gaacatggatctcaggcacc

SEQ ID NO: 26637 - DNA, 20 bp, synthetic construct
  source 1..20: mol_type = other DNA
cctgcaggcgccctggagca

SEQ ID NO: 26638 - DNA, 20 bp, synthetic construct
  source 1..20: mol_type = other DNA
tacagtgccgacctgggccc

SEQ ID NO: 26639 - DNA, 20 bp, synthetic construct
  source 1..20: mol_type = other DNA
ctcatgtacagtgccgacct

SEQ ID NO: 26640 - DNA, 20 bp, synthetic construct
  source 1..20: mol_type = other DNA
atgaggtcgttggcaatgcc

SEQ ID NO: 26641 - DNA, 20 bp, synthetic construct
  source 1..20: mol_type = other DNA
agcagcgcatctccttcagg

SEQ ID NO: 26642 - DNA, 20 bp, synthetic construct
  source 1..20: mol_type = other DNA
ccccgagtgcgaccaacagg

SEQ ID NO: 26643 - DNA, 20 bp, synthetic construct
  source 1..20: mol_type = other DNA
cattcagatcatatcagacg

SEQ ID NO: 26644 - DNA, 20 bp, synthetic construct
  source 1..20: mol_type = other DNA
gatcatatcagacgaggaag

SEQ ID NO: 26645 - DNA, 20 bp, synthetic construct
  source 1..20: mol_type = other DNA
gcatgtaaatcatgtccttg

SEQ ID NO: 26646 - DNA, 20 bp, synthetic construct
  source 1..20: mol_type = other DNA
tgcatctgccaaaaaacatg

SEQ ID NO: 26647 - DNA, 20 bp, synthetic construct
  source 1..20: mol_type = other DNA
ctaataaatatgtaaccaca

SEQ ID NO: 26648 - DNA, 20 bp, synthetic construct
  source 1..20: mol_type = other DNA
ggaggcgaacagagagagtt

SEQ ID NO: 26649 - DNA, 20 bp, synthetic construct
  source 1..20: mol_type = other DNA
acccacctgttggtcgcact

SEQ ID NO: 26650 - DNA, 20 bp, synthetic construct
  source 1..20: mol_type = other DNA
cccgagtgcgaccaacaggt

SEQ ID NO: 26651 - DNA, 20 bp, synthetic construct
  source 1..20: mol_type = other DNA
ccacctgttggtcgcactcg

SEQ ID NO: 26652 - DNA, 20 bp, synthetic construct
  source 1..20: mol_type = other DNA
acaagcatgaggccaagagg

SEQ ID NO: 26653 - DNA, 20 bp, synthetic construct
  source 1..20: mol_type = other DNA
tcacagttacctgtagaagg

SEQ ID NO: 26654 - DNA, 20 bp, synthetic construct
  source 1..20: mol_type = other DNA
ccatacagaaaacaagcatg

SEQ ID NO: 26655 - DNA, 20 bp, synthetic construct
  source 1..20: mol_type = other DNA
ggcccccggcacccacctgt

SEQ ID NO: 26656 - DNA, 20 bp, synthetic construct
  source 1..20: mol_type = other DNA
aaaaaacatgaggaagaaag

SEQ ID NO: 26657 - DNA, 20 bp, synthetic construct
  source 1..20: mol_type = other DNA
ttattgcctgtccagtactg

SEQ ID NO: 26658 - DNA, 20 bp, synthetic construct
  source 1..20: mol_type = other DNA
tatcacccacagtactggac

SEQ ID NO: 26659 - DNA, 20 bp, synthetic construct
  source 1..20: mol_type = other DNA
tattgcctgtccagtactgt

SEQ ID NO: 26660 - DNA, 20 bp, synthetic construct
  source 1..20: mol_type = other DNA
gcaaatatcacccacagtac

SEQ ID NO: 26661 - DNA, 20 bp, synthetic construct
  source 1..20: mol_type = other DNA
atcatcgtctatcttctctg

SEQ ID NO: 26662 - DNA, 20 bp, synthetic construct
  source 1..20: mol_type = other DNA
tcatcgtctatcttctctgt

SEQ ID NO: 26663 - DNA, 20 bp, synthetic construct
  source 1..20: mol_type = other DNA
tcttctccttcagagtaaag

SEQ ID NO: 26664 - DNA, 20 bp, synthetic construct
  source 1..20: mol_type = other DNA
ggcggtggttatcatgggtg

SEQ ID NO: 26665 - DNA, 20 bp, synthetic construct
  source 1..20: mol_type = other DNA
ctccttcagagtaaagtggt

SEQ ID NO: 26666 - DNA, 20 bp, synthetic construct
  source 1..20: mol_type = other DNA
agagaataaaactgtgtcag

SEQ ID NO: 26667 - DNA, 20 bp, synthetic construct
  source 1..20: mol_type = other DNA
caatgtgattccaccaacgt

SEQ ID NO: 26668 - DNA, 20 bp, synthetic construct
  source 1..20: mol_type = other DNA
gaatgtcacaggtagactaa

SEQ ID NO: 26669 - DNA, 20 bp, synthetic construct
  source 1..20: mol_type = other DNA
aatcttcaccagaatgtcac

SEQ ID NO: 26670 - DNA, 20 bp, synthetic construct
  source 1..20: mol_type = other DNA
aagaaaagccaaaatcaggt

SEQ ID NO: 26671 - DNA, 20 bp, synthetic construct
  source 1..20: mol_type = other DNA
tgaagatggaaagagccatt

SEQ ID NO: 26672 - DNA, 20 bp, synthetic construct
  source 1..20: mol_type = other DNA
accaagcaccccgaacgccg

SEQ ID NO: 26673 - DNA, 20 bp, synthetic construct
  source 1..20: mol_type = other DNA
cttacgcggtgtcttcgaag

SEQ ID NO: 26674 - DNA, 20 bp, synthetic construct
  source 1..20: mol_type = other DNA
gcccagctccagacaccgag

SEQ ID NO: 26675 - DNA, 20 bp, synthetic construct
  source 1..20: mol_type = other DNA
cgttggccacaatgcagacg

SEQ ID NO: 26676 - DNA, 20 bp, synthetic construct
  source 1..20: mol_type = other DNA
ttgcaagtctggctcatggg

SEQ ID NO: 26677 - DNA, 20 bp, synthetic construct
  source 1..20: mol_type = other DNA
tcccacaggtactgtgtccg

SEQ ID NO: 26678 - DNA, 20 bp, synthetic construct
  source 1..20: mol_type = other DNA
ggacccagatgcttaatgaa

SEQ ID NO: 26679 - DNA, 20 bp, synthetic construct
  source 1..20: mol_type = other DNA
cctcctgctggtacctaatg

SEQ ID NO: 26680 - DNA, 20 bp, synthetic construct
  source 1..20: mol_type = other DNA
ggattgcagccgttcgggca

SEQ ID NO: 26681 - DNA, 20 bp, synthetic construct
  source 1..20: mol_type = other DNA
atccccggacacagtacctg

SEQ ID NO: 26682 - DNA, 20 bp, synthetic construct
  source 1..20: mol_type = other DNA
cccattaggtaccagcagga

SEQ ID NO: 26683 - DNA, 20 bp, synthetic construct
  source 1..20: mol_type = other DNA
agaagaccgagcgcagcatc

SEQ ID NO: 26684 - DNA, 20 bp, synthetic construct
  source 1..20: mol_type = other DNA
gtgctgtggaaaccgctgca

SEQ ID NO: 26685 - DNA, 20 bp, synthetic construct
  source 1..20: mol_type = other DNA
aggtaccagcaggagggcgt

SEQ ID NO: 26686 - DNA, 20 bp, synthetic construct
  source 1..20: mol_type = other DNA
gacttgcaagctgagatggt

SEQ ID NO: 26687 - DNA, 20 bp, synthetic construct
  source 1..20: mol_type = other DNA
agaacttgtcgaatgcaaca

SEQ ID NO: 26688 - DNA, 20 bp, synthetic construct
  source 1..20: mol_type = other DNA
ccatcgctgtatccgtgagg

SEQ ID NO: 26689 - DNA, 20 bp, synthetic construct
  source 1..20: mol_type = other DNA
tcactgactctcactagggt

SEQ ID NO: 26690 - DNA, 20 bp, synthetic construct
  source 1..20: mol_type = other DNA
ccccctcacggatacagcga

SEQ ID NO: 26691 - DNA, 20 bp, synthetic construct
  source 1..20: mol_type = other DNA
acctaccgaaaacctgtcct

SEQ ID NO: 26692 - DNA, 20 bp, synthetic construct
  source 1..20: mol_type = other DNA
tcagagctgacatccagccg

SEQ ID NO: 26693 - DNA, 20 bp, synthetic construct
  source 1..20: mol_type = other DNA
attcgcgtgagcacgttgcg

SEQ ID NO: 26694 - DNA, 20 bp, synthetic construct
  source 1..20: mol_type = other DNA
cctctaggcacttactgatg

SEQ ID NO: 26695 - DNA, 20 bp, synthetic construct
  source 1..20: mol_type = other DNA
cccctgcttcaacaacgtgg

SEQ ID NO: 26696 - DNA, 20 bp, synthetic construct
  source 1..20: mol_type = other DNA
ggacttcggggcgtctgtac

SEQ ID NO: 26697 - DNA, 20 bp, synthetic construct
  source 1..20: mol_type = other DNA
gcggcgacgagtcctgcccg

SEQ ID NO: 26698 - DNA, 20 bp, synthetic construct
  source 1..20: mol_type = other DNA
cagcgatggagttcacccag

SEQ ID NO: 26699 - DNA, 20 bp, synthetic construct
  source 1..20: mol_type = other DNA
aggcaggcggggcgcgtaca

SEQ ID NO: 26700 - DNA, 20 bp, synthetic construct
  source 1..20: mol_type = other DNA
tacgagagcttcctcaggac

SEQ ID NO: 26701 - DNA, 20 bp, synthetic construct
  source 1..20: mol_type = other DNA
ccgccacgttgttgaagcag

SEQ ID NO: 26702 - DNA, 20 bp, synthetic construct
  source 1..20: mol_type = other DNA
cagagtggagcgtaacgcag

SEQ ID NO: 26703 - DNA, 20 bp, synthetic construct
  source 1..20: mol_type = other DNA
tctgcacatacctttcgatg

SEQ ID NO: 26704 - DNA, 20 bp, synthetic construct
  source 1..20: mol_type = other DNA
aggtccgacgtgttcaccag

SEQ ID NO: 26705 - DNA, 20 bp, synthetic construct
  source 1..20: mol_type = other DNA
ccctgtgtccatgtacgtca

SEQ ID NO: 26706 - DNA, 20 bp, synthetic construct
  source 1..20: mol_type = other DNA
gaatgcagagatacacaatg

SEQ ID NO: 26707 - DNA, 20 bp, synthetic construct
  source 1..20: mol_type = other DNA
gaaaggaagatcaagtcgca

SEQ ID NO: 26708 - DNA, 20 bp, synthetic construct
  source 1..20: mol_type = other DNA
catctcatcctcgcccgacg

SEQ ID NO: 26709 - DNA, 20 bp, synthetic construct
  source 1..20: mol_type = other DNA
gttgatgcgacccacgaacc

SEQ ID NO: 26710 - DNA, 20 bp, synthetic construct
  source 1..20: mol_type = other DNA
aagacggtcctgcgccacag

SEQ ID NO: 26711 - DNA, 20 bp, synthetic construct
  source 1..20: mol_type = other DNA
gtaggtgtggctatttacac

SEQ ID NO: 26712 - DNA, 20 bp, synthetic construct
  source 1..20: mol_type = other DNA
gagcttgcaggcgtagcacg

SEQ ID NO: 26713 - DNA, 20 bp, synthetic construct
  source 1..20: mol_type = other DNA
gctcgaacaggacgtcgtgc

SEQ ID NO: 26714 - DNA, 20 bp, synthetic construct
  source 1..20: mol_type = other DNA
ggaagtccgtgaatgccttg

SEQ ID NO: 26715 - DNA, 20 bp, synthetic construct
  source 1..20: mol_type = other DNA
gcatttgtagacgcattacg

SEQ ID NO: 26716 - DNA, 20 bp, synthetic construct
  source 1..20: mol_type = other DNA
cctgcaccagaaatatgata

SEQ ID NO: 26717 - DNA, 20 bp, synthetic construct
  source 1..20: mol_type = other DNA
gctgaatggagtgctaaccc

SEQ ID NO: 26718 - DNA, 20 bp, synthetic construct
  source 1..20: mol_type = other DNA
cagacacggaaaggtcgctg

SEQ ID NO: 26719 - DNA, 20 bp, synthetic construct
  source 1..20: mol_type = other DNA
taagctcggagtttggacgg

SEQ ID NO: 26720 - DNA, 20 bp, synthetic construct
  source 1..20: mol_type = other DNA
ataggcctcttacccttgta

SEQ ID NO: 26721 - DNA, 20 bp, synthetic construct
  source 1..20: mol_type = other DNA
gcttatattagatactgacc

SEQ ID NO: 26722 - DNA, 20 bp, synthetic construct
  source 1..20: mol_type = other DNA
tgaaccccagtgacttactc

SEQ ID NO: 26723 - DNA, 20 bp, synthetic construct
  source 1..20: mol_type = other DNA
tccgcttgtgatcacagaca

SEQ ID NO: 26724 - DNA, 20 bp, synthetic construct
  source 1..20: mol_type = other DNA
gctaaccctggtgctagagg

SEQ ID NO: 26725 - DNA, 20 bp, synthetic construct
  source 1..20: mol_type = other DNA
tgttgcagtctggtcagagc

SEQ ID NO: 26726 - DNA, 20 bp, synthetic construct
  source 1..20: mol_type = other DNA
ggaggatgacacgtgcctga

SEQ ID NO: 26727 - DNA, 20 bp, synthetic construct
  source 1..20: mol_type = other DNA
ggctagcagctcctggcggg

SEQ ID NO: 26728 - DNA, 20 bp, synthetic construct
  source 1..20: mol_type = other DNA
gctgtcatatggcctgggac

SEQ ID NO: 26729 - DNA, 20 bp, synthetic construct
  source 1..20: mol_type = other DNA
ggagaggcccaagcacagca

SEQ ID NO: 26730 - DNA, 20 bp, synthetic construct
  source 1..20: mol_type = other DNA
agaggaggatggaactgcag

SEQ ID NO: 26731 - DNA, 20 bp, synthetic construct
  source 1..20: mol_type = other DNA
tggaactgcagtggacagtg

SEQ ID NO: 26732 - DNA, 20 bp, synthetic construct
  source 1..20: mol_type = other DNA
aggtacggccactagcacgc

SEQ ID NO: 26733 - DNA, 20 bp, synthetic construct
  source 1..20: mol_type = other DNA
ggcaaatgagcccaaccacg

SEQ ID NO: 26734 - DNA, 20 bp, synthetic construct
  source 1..20: mol_type = other DNA
tgggcaaggatacactgctc

SEQ ID NO: 26735 - DNA, 20 bp, synthetic construct
  source 1..20: mol_type = other DNA
ccaaagagtattgtcgagag

SEQ ID NO: 26736 - DNA, 20 bp, synthetic construct
  source 1..20: mol_type = other DNA
gggatgtgacggatgaggat

SEQ ID NO: 26737 - DNA, 20 bp, synthetic construct
  source 1..20: mol_type = other DNA
ctcgggcctcccgttgcacg

SEQ ID NO: 26738 - DNA, 20 bp, synthetic construct
  source 1..20: mol_type = other DNA
gtggaactgggtcaagacga

SEQ ID NO: 26739 - DNA, 20 bp, synthetic construct
  source 1..20: mol_type = other DNA
gttacttaccagtatggtca

SEQ ID NO: 26740 - DNA, 20 bp, synthetic construct
  source 1..20: mol_type = other DNA
catttagcacgtacaatggg

SEQ ID NO: 26741 - DNA, 20 bp, synthetic construct
  source 1..20: mol_type = other DNA
gaagcggttcatgtccagat

SEQ ID NO: 26742 - DNA, 20 bp, synthetic construct
  source 1..20: mol_type = other DNA
gacaagactggtaatgcgct

SEQ ID NO: 26743 - DNA, 20 bp, synthetic construct
  source 1..20: mol_type = other DNA
gtagatgcctggattgagat

SEQ ID NO: 26744 - DNA, 20 bp, synthetic construct
  source 1..20: mol_type = other DNA
tgtatggggcattggactgt

SEQ ID NO: 26745 - DNA, 20 bp, synthetic construct
  source 1..20: mol_type = other DNA
ggagagtgtgggttggaaca

SEQ ID NO: 26746 - DNA, 20 bp, synthetic construct
  source 1..20: mol_type = other DNA
agtgtgcacactgaccgggc

SEQ ID NO: 26747 - DNA, 20 bp, synthetic construct
  source 1..20: mol_type = other DNA
tcaggaagccaactagccga

SEQ ID NO: 26748 - DNA, 20 bp, synthetic construct
  source 1..20: mol_type = other DNA
gctctgctgcgtcttacggt

SEQ ID NO: 26749 - DNA, 20 bp, synthetic construct
  source 1..20: mol_type = other DNA
ttgatcactacgtcgcaagg

SEQ ID NO: 26750 - DNA, 20 bp, synthetic construct
  source 1..20: mol_type = other DNA
agacccaggagaccaaacaa

SEQ ID NO: 26751 - DNA, 20 bp, synthetic construct
  source 1..20: mol_type = other DNA
agtcatacgcaaccaagcca

SEQ ID NO: 26752 - DNA, 20 bp, synthetic construct
  source 1..20: mol_type = other DNA
ataataccttcgtcaggaca

SEQ ID NO: 26753 - DNA, 20 bp, synthetic construct
  source 1..20: mol_type = other DNA
aggaaagtctcctcaaaccc

SEQ ID NO: 26754 - DNA, 20 bp, synthetic construct
  source 1..20: mol_type = other DNA
ggtgagtgggcacgttggca

SEQ ID NO: 26755 - DNA, 20 bp, synthetic construct
  source 1..20: mol_type = other DNA
cagcgggaacaagattggct

SEQ ID NO: 26756 - DNA, 20 bp, synthetic construct
  source 1..20: mol_type = other DNA
catgggcactgaaatagtag

SEQ ID NO: 26757 - DNA, 20 bp, synthetic construct
  source 1..20: mol_type = other DNA
ctatagagcagagcggccgg

SEQ ID NO: 26758 - DNA, 20 bp, synthetic construct
  source 1..20: mol_type = other DNA
ttacagtacatacattctgg

SEQ ID NO: 26759 - DNA, 20 bp, synthetic construct
  source 1..20: mol_type = other DNA
accaagtaaactccagtgaa

SEQ ID NO: 26760 - DNA, 20 bp, synthetic construct
  source 1..20: mol_type = other DNA
tcctggtgggcatcgacagg

SEQ ID NO: 26761 - DNA, 20 bp, synthetic construct
  source 1..20: mol_type = other DNA
cggtagaggacaagaaccgc

SEQ ID NO: 26762 - DNA, 20 bp, synthetic construct
  source 1..20: mol_type = other DNA
taccgctatatgcttaccgc

SEQ ID NO: 26763 - DNA, 20 bp, synthetic construct
  source 1..20: mol_type = other DNA
gatgtcagtgcagttgccaa

SEQ ID NO: 26764 - DNA, 20 bp, synthetic construct
  source 1..20: mol_type = other DNA
atattaaattacctcgagga

SEQ ID NO: 26765 - DNA, 20 bp, synthetic construct
  source 1..20: mol_type = other DNA
accgcataccatattggcag

SEQ ID NO: 26766 - DNA, 20 bp, synthetic construct
  source 1..20: mol_type = other DNA
tagctacaaaactacaaggc

SEQ ID NO: 26767 - DNA, 20 bp, synthetic construct
  source 1..20: mol_type = other DNA
ccatatacataatatgtcca

SEQ ID NO: 26768 - DNA, 20 bp, synthetic construct
  source 1..20: mol_type = other DNA
tccttgcaaagggagaccta

SEQ ID NO: 26769 - DNA, 20 bp, synthetic construct
  source 1..20: mol_type = other DNA
aggtcaacactgatacaaca

SEQ ID NO: 26770 - DNA, 20 bp, synthetic construct
  source 1..20: mol_type = other DNA
gtctgtcattccatggtcag

SEQ ID NO: 26771 - DNA, 20 bp, synthetic construct
  source 1..20: mol_type = other DNA
gaagaggctagatgtcaatc

SEQ ID NO: 26772 - DNA, 20 bp, synthetic construct
  source 1..20: mol_type = other DNA
gtacctgttagcctttaccc

SEQ ID NO: 26773 - DNA, 20 bp, synthetic construct
  source 1..20: mol_type = other DNA
tgcaacaaaactggatacgt

SEQ ID NO: 26774 - DNA, 20 bp, synthetic construct
  source 1..20: mol_type = other DNA
gaagaaagtccaactcagtg

SEQ ID NO: 26775 - DNA, 20 bp, synthetic construct
  source 1..20: mol_type = other DNA
gctatcagagctacatgacc

SEQ ID NO: 26776 - DNA, 20 bp, synthetic construct
  source 1..20: mol_type = other DNA
cgtaaagtgcatctgctcga

SEQ ID NO: 26777 - DNA, 20 bp, synthetic construct
  source 1..20: mol_type = other DNA
gagaccggcacgagaagagc

SEQ ID NO: 26778 - DNA, 20 bp, synthetic construct
  source 1..20: mol_type = other DNA
gcaagggcaactatgctgag

SEQ ID NO: 26779 - DNA, 20 bp, synthetic construct
  source 1..20: mol_type = other DNA
caagtggcgcgggataatgc

SEQ ID NO: 26780 - DNA, 20 bp, synthetic construct
  source 1..20: mol_type = other DNA
cagtcggtgcactcggccca

SEQ ID NO: 26781 - DNA, 20 bp, synthetic construct
  source 1..20: mol_type = other DNA
ggcaactatgctgagcgggt

SEQ ID NO: 26782 - DNA, 20 bp, synthetic construct
  source 1..20: mol_type = other DNA
tcgggacgcggcaagcaggg

SEQ ID NO: 26783 - DNA, 20 bp, synthetic construct
  source 1..20: mol_type = other DNA
gtgcaccgactgctccgcaa

SEQ ID NO: 26784 - DNA, 20 bp, synthetic construct
  source 1..20: mol_type = other DNA
cggcgcgccggtgtacctgg

SEQ ID NO: 26785 - DNA, 20 bp, synthetic construct
  source 1..20: mol_type = other DNA
tgccggtctccagttccccg

SEQ ID NO: 26786 - DNA, 20 bp, synthetic construct
  source 1..20: mol_type = other DNA
aagacccgctcttctcgtgc

SEQ ID NO: 26787 - DNA, 20 bp, synthetic construct
  source 1..20: mol_type = other DNA
gtacctgactgccgagatcc

SEQ ID NO: 26788 - DNA, 20 bp, synthetic construct
  source 1..20: mol_type = other DNA
gactgccgagatcctggagc

SEQ ID NO: 26789 - DNA, 20 bp, synthetic construct
  source 1..20: mol_type = other DNA
tgcggatggccagctgcaag

SEQ ID NO: 26790 - DNA, 20 bp, synthetic construct
  source 1..20: mol_type = other DNA
cgccaggtacaccggcgcgc

SEQ ID NO: 26791 - DNA, 20 bp, synthetic construct
  source 1..20: mol_type = other DNA
ggtcttcttgttgtcgcggg

SEQ ID NO: 26792 - DNA, 20 bp, synthetic construct
  source 1..20: mol_type = other DNA
ggagcgaatcaaggagcgtg

SEQ ID NO: 26793 - DNA, 20 bp, synthetic construct
  source 1..20: mol_type = other DNA
gcgaatcaaggagcgtgtgg

SEQ ID NO: 26794 - DNA, 20 bp, synthetic construct
  source 1..20: mol_type = other DNA
tgacattgaacctacagaca

SEQ ID NO: 26795 - DNA, 20 bp, synthetic construct
  source 1..20: mol_type = other DNA
gaatccccccacaacagcag

SEQ ID NO: 26796 - DNA, 20 bp, synthetic construct
  source 1..20: mol_type = other DNA
tctaaaggtggagcgaatca

SEQ ID NO: 26797 - DNA, 20 bp, synthetic construct
  source 1..20: mol_type = other DNA
gagcgtgtggaggagaaaga

SEQ ID NO: 26798 - DNA, 20 bp, synthetic construct
  source 1..20: mol_type = other DNA
atgctaattaaagtgaaggt

SEQ ID NO: 26799 - DNA, 20 bp, synthetic construct
  source 1..20: mol_type = other DNA
gatgagcctctgctgttgtg

SEQ ID NO: 26800 - DNA, 20 bp, synthetic construct
  source 1..20: mol_type = other DNA
cagcagaggctcatctacag

SEQ ID NO: 26801 - DNA, 20 bp, synthetic construct
  source 1..20: mol_type = other DNA
gaagatgctaattaaagtga

SEQ ID NO: 26802 - DNA, 20 bp, synthetic construct
  source 1..20: mol_type = other DNA
tgagcctctgctgttgtggg

SEQ ID NO: 26803 - DNA, 20 bp, synthetic construct
  source 1..20: mol_type = other DNA
gtttcagacgctgaccggaa

SEQ ID NO: 26804 - DNA, 20 bp, synthetic construct
  source 1..20: mol_type = other DNA
gcatgcatcaccttgtctgt

SEQ ID NO: 26805 - DNA, 20 bp, synthetic construct
  source 1..20: mol_type = other DNA
ggagcgtgtggaggagaaag

SEQ ID NO: 26806 - DNA, 20 bp, synthetic construct
  source 1..20: mol_type = other DNA
atgagcctctgctgttgtgg

SEQ ID NO: 26807 - DNA, 20 bp, synthetic construct
  source 1..20: mol_type = other DNA
attacctatagtccgaaaca

SEQ ID NO: 26808 - DNA, 20 bp, synthetic construct
  source 1..20: mol_type = other DNA
aagaggtaagctgtctgtcg

SEQ ID NO: 26809 - DNA, 20 bp, synthetic construct
  source 1..20: mol_type = other DNA
taataaatccagttgatctg

SEQ ID NO: 26810 - DNA, 20 bp, synthetic construct
  source 1..20: mol_type = other DNA
gggccgaggcaagataagca

SEQ ID NO: 26811 - DNA, 20 bp, synthetic construct
  source 1..20: mol_type = other DNA
tgtggttccacctaatgtca

SEQ ID NO: 26812 - DNA, 20 bp, synthetic construct
  source 1..20: mol_type = other DNA
ctgaactgctctacagagtg

SEQ ID NO: 26813 - DNA, 20 bp, synthetic construct
  source 1..20: mol_type = other DNA
aaggtgtctcgaagaagctc

SEQ ID NO: 26814 - DNA, 20 bp, synthetic construct
  source 1..20: mol_type = other DNA
gctgatggcagagattggtg

SEQ ID NO: 26815 - DNA, 20 bp, synthetic construct
  source 1..20: mol_type = other DNA
gaagatggacagaaaagctg

SEQ ID NO: 26816 - DNA, 20 bp, synthetic construct
  source 1..20: mol_type = other DNA
gtttctccaactcaaccaca

SEQ ID NO: 26817 - DNA, 20 bp, synthetic construct
  source 1..20: mol_type = other DNA
ggcccatgtaatccttcatg

SEQ ID NO: 26818 - DNA, 20 bp, synthetic construct
  source 1..20: mol_type = other DNA
gctcaaacgtatcttgaaga

SEQ ID NO: 26819 - DNA, 20 bp, synthetic construct
  source 1..20: mol_type = other DNA
ccgggatgttgctatagatg

SEQ ID NO: 26820 - DNA, 20 bp, synthetic construct
  source 1..20: mol_type = other DNA
ttgtcttcaggtctattctg

SEQ ID NO: 26821 - DNA, 20 bp, synthetic construct
  source 1..20: mol_type = other DNA
tctggtttgcagagtgctga

SEQ ID NO: 26822 - DNA, 20 bp, synthetic construct
  source 1..20: mol_type = other DNA
gaacctgaaagaactcaatg

SEQ ID NO: 26823 - DNA, 20 bp, synthetic construct
  source 1..20: mol_type = other DNA
tgtaggaatgatttgaatca

SEQ ID NO: 26824 - DNA, 20 bp, synthetic construct
  source 1..20: mol_type = other DNA
tctgctccttcaatgaatct

SEQ ID NO: 26825 - DNA, 20 bp, synthetic construct
  source 1..20: mol_type = other DNA
gtggccgaatgcaggaggaa

SEQ ID NO: 26826 - DNA, 20 bp, synthetic construct
  source 1..20: mol_type = other DNA
actgcaaattcgacatccgc

SEQ ID NO: 26827 - DNA, 20 bp, synthetic construct
  source 1..20: mol_type = other DNA
gcttcatagacaccagcgtg

SEQ ID NO: 26828 - DNA, 20 bp, synthetic construct
  source 1..20: mol_type = other DNA
tcacaatctcccaattctgg

SEQ ID NO: 26829 - DNA, 20 bp, synthetic construct
  source 1..20: mol_type = other DNA
tgcggatgtcgaatttgcag

SEQ ID NO: 26830 - DNA, 20 bp, synthetic construct
  source 1..20: mol_type = other DNA
ttgaaaggaacactctcaca

SEQ ID NO: 26831 - DNA, 20 bp, synthetic construct
  source 1..20: mol_type = other DNA
caggacacagattgggacac

SEQ ID NO: 26832 - DNA, 20 bp, synthetic construct
  source 1..20: mol_type = other DNA
tgaaataactgaatatatgt

SEQ ID NO: 26833 - DNA, 20 bp, synthetic construct
  source 1..20: mol_type = other DNA
tcttgcagtatacagcctgg

SEQ ID NO: 26834 - DNA, 20 bp, synthetic construct
  source 1..20: mol_type = other DNA
caaagcttggcagaagaagg

SEQ ID NO: 26835 - DNA, 20 bp, synthetic construct
  source 1..20: mol_type = other DNA
agaaaacacgtacttctcca

SEQ ID NO: 26836 - DNA, 20 bp, synthetic construct
  source 1..20: mol_type = other DNA
actttctggggagcactgga

SEQ ID NO: 26837 - DNA, 20 bp, synthetic construct
  source 1..20: mol_type = other DNA
gtgttcaatgaaatcgtgcg

SEQ ID NO: 26838 - DNA, 20 bp, synthetic construct
  source 1..20: mol_type = other DNA
cgtgcctccgtaggtctgcg

SEQ ID NO: 26839 - DNA, 20 bp, synthetic construct
  source 1..20: mol_type = other DNA
gttcgtggcctctaagatga

SEQ ID NO: 26840 - DNA, 20 bp, synthetic construct
  source 1..20: mol_type = other DNA
gcgacgatcttccgcatgga

SEQ ID NO: 26841 - DNA, 20 bp, synthetic construct
  source 1..20: mol_type = other DNA
cgaggaacagaagtgcgagg

SEQ ID NO: 26842 - DNA, 20 bp, synthetic construct
  source 1..20: mol_type = other DNA
ggttggcatcggggtacgcg

SEQ ID NO: 26843 - DNA, 20 bp, synthetic construct
  source 1..20: mol_type = other DNA
tgtggcacagagggcaacga

SEQ ID NO: 26844 - DNA, 20 bp, synthetic construct
  source 1..20: mol_type = other DNA
acagcttctcggccgtcagg

SEQ ID NO: 26845 - DNA, 20 bp, synthetic construct
  source 1..20: mol_type = other DNA
agaggccacgaacatgcaag

SEQ ID NO: 26846 - DNA, 20 bp, synthetic construct
  source 1..20: mol_type = other DNA
gaacaagctcaagtggaacc

SEQ ID NO: 26847 - DNA, 20 bp, synthetic construct
  source 1..20: mol_type = other DNA
gaaatcgtgcggggtcattg

SEQ ID NO: 26848 - DNA, 20 bp, synthetic construct
  source 1..20: mol_type = other DNA
gatcgtcgccacctggatgc

SEQ ID NO: 26849 - DNA, 20 bp, synthetic construct
  source 1..20: mol_type = other DNA
gcagcacccggtcgttgagg

SEQ ID NO: 26850 - DNA, 20 bp, synthetic construct
  source 1..20: mol_type = other DNA
tccacttgagcttgttcacc

SEQ ID NO: 26851 - DNA, 20 bp, synthetic construct
  source 1..20: mol_type = other DNA
acatttgaagtaggacaccg

SEQ ID NO: 26852 - DNA, 20 bp, synthetic construct
  source 1..20: mol_type = other DNA
gaagcatctaaaacaaatgg

SEQ ID NO: 26853 - DNA, 20 bp, synthetic construct
  source 1..20: mol_type = other DNA
attggtggtgcttctagtcg

SEQ ID NO: 26854 - DNA, 20 bp, synthetic construct
  source 1..20: mol_type = other DNA
ttccaagttagacaaccagt

SEQ ID NO: 26855 - DNA, 20 bp, synthetic construct
  source 1..20: mol_type = other DNA
ccattcactggcgctgtacg

SEQ ID NO: 26856 - DNA, 20 bp, synthetic construct
  source 1..20: mol_type = other DNA
ctggctacaccgagtgattg

SEQ ID NO: 26857 - DNA, 20 bp, synthetic construct
  source 1..20: mol_type = other DNA
acttcctacttactgggata

SEQ ID NO: 26858 - DNA, 20 bp, synthetic construct
  source 1..20: mol_type = other DNA
ttggctagaacatattaagg

SEQ ID NO: 26859 - DNA, 20 bp, synthetic construct
  source 1..20: mol_type = other DNA
tatttgctggcacaaccagg

SEQ ID NO: 26860 - DNA, 20 bp, synthetic construct
  source 1..20: mol_type = other DNA
gccttctatactctaaaaga

SEQ ID NO: 26861 - DNA, 20 bp, synthetic construct
  source 1..20: mol_type = other DNA
tactctatttatcacaccaa

SEQ ID NO: 26862 - DNA, 20 bp, synthetic construct
  source 1..20: mol_type = other DNA
aagtattccctgaaaatggg

SEQ ID NO: 26863 - DNA, 20 bp, synthetic construct
  source 1..20: mol_type = other DNA
ttgctgacaaggtagagtca

SEQ ID NO: 26864 - DNA, 20 bp, synthetic construct
  source 1..20: mol_type = other DNA
gatttgctcataaacctgag

SEQ ID NO: 26865 - DNA, 20 bp, synthetic construct
  source 1..20: mol_type = other DNA
tggactagaaactgtgtgta

SEQ ID NO: 26866 - DNA, 20 bp, synthetic construct
  source 1..20: mol_type = other DNA
agtatacataccctcaaatc

SEQ ID NO: 26867 - DNA, 20 bp, synthetic construct
  source 1..20: mol_type = other DNA
gaaatagccaagttcaacag

SEQ ID NO: 26868 - DNA, 20 bp, synthetic construct
  source 1..20: mol_type = other DNA
tctactgctaggttgtatgc

SEQ ID NO: 26869 - DNA, 20 bp, synthetic construct
  source 1..20: mol_type = other DNA
cctggggaactagactgacg

SEQ ID NO: 26870 - DNA, 20 bp, synthetic construct
  source 1..20: mol_type = other DNA
ggaaccgctcatagttaccc

SEQ ID NO: 26871 - DNA, 20 bp, synthetic construct
  source 1..20: mol_type = other DNA
cttgaattggaactgacgga

SEQ ID NO: 26872 - DNA, 20 bp, synthetic construct
  source 1..20: mol_type = other DNA
ggtagatggatgagacatcg

SEQ ID NO: 26873 - DNA, 20 bp, synthetic construct
  source 1..20: mol_type = other DNA
tcatatcacagatgcaatcc

SEQ ID NO: 26874 - DNA, 20 bp, synthetic construct
  source 1..20: mol_type = other DNA
gacttgaccttcctattgag

SEQ ID NO: 26875 - DNA, 20 bp, synthetic construct
  source 1..20: mol_type = other DNA
cttgctcctctaacaacaag

SEQ ID NO: 26876 - DNA, 20 bp, synthetic construct
  source 1..20: mol_type = other DNA
caagcttcgtggtagcgcac

SEQ ID NO: 26877 - DNA, 20 bp, synthetic construct
  source 1..20: mol_type = other DNA
tccacttgacacatcagtga

SEQ ID NO: 26878 - DNA, 20 bp, synthetic construct
  source 1..20: mol_type = other DNA
aaggacaataatctgaccac

SEQ ID NO: 26879 - DNA, 20 bp, synthetic construct
  source 1..20: mol_type = other DNA
agtccgcagaatctatgtac

SEQ ID NO: 26880 - DNA, 20 bp, synthetic construct
  source 1..20: mol_type = other DNA
ccttgacatccgcctcacca

SEQ ID NO: 26881 - DNA, 20 bp, synthetic construct
  source 1..20: mol_type = other DNA
tcccgaacactattctgggt

SEQ ID NO: 26882 - DNA, 20 bp, synthetic construct
  source 1..20: mol_type = other DNA
tgaagtgcttgatatcacag

SEQ ID NO: 26883 - DNA, 20 bp, synthetic construct
  source 1..20: mol_type = other DNA
gactgctgcctcatatccgg

SEQ ID NO: 26884 - DNA, 20 bp, synthetic construct
  source 1..20: mol_type = other DNA
agactgctgcctcatatccg

SEQ ID NO: 26885 - DNA, 20 bp, synthetic construct
  source 1..20: mol_type = other DNA
tgatgcgcaaggccatccga

SEQ ID NO: 26886 - DNA, 20 bp, synthetic construct
  source 1..20: mol_type = other DNA
attgtgggagcagacaatgt

SEQ ID NO: 26887 - DNA, 20 bp, synthetic construct
  source 1..20: mol_type = other DNA
gaactgacttctccagagct

SEQ ID NO: 26888 - DNA, 20 bp, synthetic construct
  source 1..20: mol_type = other DNA
acacaaagcccacattcccc

SEQ ID NO: 26889 - DNA, 20 bp, synthetic construct
  source 1..20: mol_type = other DNA
gttgagcatgttcagcagcg

SEQ ID NO: 26890 - DNA, 20 bp, synthetic construct
  source 1..20: mol_type = other DNA
gaccagcccaaaggagaagg

SEQ ID NO: 26891 - DNA, 20 bp, synthetic construct
  source 1..20: mol_type = other DNA
gcaccacagccttcccgcga

SEQ ID NO: 26892 - DNA, 20 bp, synthetic construct
  source 1..20: mol_type = other DNA
caagaacaccatgatgcgca

SEQ ID NO: 26893 - DNA, 20 bp, synthetic construct
  source 1..20: mol_type = other DNA
caggggcaccattgaaatcc

SEQ ID NO: 26894 - DNA, 20 bp, synthetic construct
  source 1..20: mol_type = other DNA
acatgtccctgatctcagtg

SEQ ID NO: 26895 - DNA, 20 bp, synthetic construct
  source 1..20: mol_type = other DNA
tagtggtgatacctaaagcc

SEQ ID NO: 26896 - DNA, 20 bp, synthetic construct
  source 1..20: mol_type = other DNA
atccagcaggtgttcgacaa

SEQ ID NO: 26897 - DNA, 20 bp, synthetic construct
  source 1..20: mol_type = other DNA
gtaccggctgcgctatgtca

SEQ ID NO: 26898 - DNA, 20 bp, synthetic construct
  source 1..20: mol_type = other DNA
atagcgcagccggtactgga

SEQ ID NO: 26899 - DNA, 20 bp, synthetic construct
  source 1..20: mol_type = other DNA
tcaccagctgaaaagcgcag

SEQ ID NO: 26900 - DNA, 20 bp, synthetic construct
  source 1..20: mol_type = other DNA
aaacacctgcctctccaggg

SEQ ID NO: 26901 - DNA, 20 bp, synthetic construct
  source 1..20: mol_type = other DNA
ggatggtgccgaagagtccc

SEQ ID NO: 26902 - DNA, 20 bp, synthetic construct
  source 1..20: mol_type = other DNA
ccaggatgacgatgatgatg

SEQ ID NO: 26903 - DNA, 20 bp, synthetic construct
  source 1..20: mol_type = other DNA
ccaccatgacatagcgcagc

SEQ ID NO: 26904 - DNA, 20 bp, synthetic construct
  source 1..20: mol_type = other DNA
tggccaggatgggcgcccac

SEQ ID NO: 26905 - DNA, 20 bp, synthetic construct
  source 1..20: mol_type = other DNA
cctctccctagtacacgctg

SEQ ID NO: 26906 - DNA, 20 bp, synthetic construct
  source 1..20: mol_type = other DNA
gatgatgatgtggacaaagt

SEQ ID NO: 26907 - DNA, 20 bp, synthetic construct
  source 1..20: mol_type = other DNA
agtctgcactcacctttaag

SEQ ID NO: 26908 - DNA, 20 bp, synthetic construct
  source 1..20: mol_type = other DNA
acagccagcacctgacacca

SEQ ID NO: 26909 - DNA, 20 bp, synthetic construct
  source 1..20: mol_type = other DNA
gccaggctgtctgcatgagg

SEQ ID NO: 26910 - DNA, 20 bp, synthetic construct
  source 1..20: mol_type = other DNA
tgcttctacctggaagtcgg

SEQ ID NO: 26911 - DNA, 20 bp, synthetic construct
  source 1..20: mol_type = other DNA
gctcctggtggcgtgagcgc

SEQ ID NO: 26912 - DNA, 20 bp, synthetic construct
  source 1..20: mol_type = other DNA
acccatgcatatatgcccgg

SEQ ID NO: 26913 - DNA, 20 bp, synthetic construct
  source 1..20: mol_type = other DNA
ggatataagactctatcaca

SEQ ID NO: 26914 - DNA, 20 bp, synthetic construct
  source 1..20: mol_type = other DNA
gcaatggcttatcagatcga

SEQ ID NO: 26915 - DNA, 20 bp, synthetic construct
  source 1..20: mol_type = other DNA
gtgtcataacatcgaacccg

SEQ ID NO: 26916 - DNA, 20 bp, synthetic construct
  source 1..20: mol_type = other DNA
tctaagaaggaacaccaccg

SEQ ID NO: 26917 - DNA, 20 bp, synthetic construct
  source 1..20: mol_type = other DNA
tggcagttggaacaaccaca

SEQ ID NO: 26918 - DNA, 20 bp, synthetic construct
  source 1..20: mol_type = other DNA
accaacaaagtacaagtcac

SEQ ID NO: 26919 - DNA, 20 bp, synthetic construct
  source 1..20: mol_type = other DNA
tttgtctgatgactactcaa

SEQ ID NO: 26920 - DNA, 20 bp, synthetic construct
  source 1..20: mol_type = other DNA
tgtgacataaattcagtgca

SEQ ID NO: 26921 - DNA, 20 bp, synthetic construct
  source 1..20: mol_type = other DNA
gtttgtctctaccccaactc

SEQ ID NO: 26922 - DNA, 20 bp, synthetic construct
  source 1..20: mol_type = other DNA
ttaatagtggtacacacagt

SEQ ID NO: 26923 - DNA, 20 bp, synthetic construct
  source 1..20: mol_type = other DNA
tataggttaaacttagaaca

SEQ ID NO: 26924 - DNA, 20 bp, synthetic construct
  source 1..20: mol_type = other DNA
gccaatgaaacccccaagat

SEQ ID NO: 26925 - DNA, 20 bp, synthetic construct
  source 1..20: mol_type = other DNA
ggtagagacaaacatcatta

SEQ ID NO: 26926 - DNA, 20 bp, synthetic construct
  source 1..20: mol_type = other DNA
gaaaggagatccaatgaggt

SEQ ID NO: 26927 - DNA, 20 bp, synthetic construct
  source 1..20: mol_type = other DNA
acccgggcgtcccttaccag

SEQ ID NO: 26928 - DNA, 20 bp, synthetic construct
  source 1..20: mol_type = other DNA
gcacttgcaggagctggcgc

SEQ ID NO: 26929 - DNA, 20 bp, synthetic construct
  source 1..20: mol_type = other DNA
gcaggagctggcgcaggtgc

SEQ ID NO: 26930 - DNA, 20 bp, synthetic construct
  source 1..20: mol_type = other DNA
cagcggcacaggagcagttg

SEQ ID NO: 26931 - DNA, 20 bp, synthetic construct
  source 1..20: mol_type = other DNA
gcgtcccttaccagcggcac

SEQ ID NO: 26932 - DNA, 20 bp, synthetic construct
  source 1..20: mol_type = other DNA
ccagggctgcatctgcaaag

SEQ ID NO: 26933 - DNA, 20 bp, synthetic construct
  source 1..20: mol_type = other DNA
accagcggcacaggagcagt

SEQ ID NO: 26934 - DNA, 20 bp, synthetic construct
  source 1..20: mol_type = other DNA
gcagcaggagcagcagcctg

SEQ ID NO: 26935 - DNA, 20 bp, synthetic construct
  source 1..20: mol_type = other DNA
cacacttggcacagcccaca

SEQ ID NO: 26936 - DNA, 20 bp, synthetic construct
  source 1..20: mol_type = other DNA
cccaactgctcctgtgccgc

SEQ ID NO: 26937 - DNA, 20 bp, synthetic construct
  source 1..20: mol_type = other DNA
gcagctgctgcgcctgatgt

SEQ ID NO: 26938 - DNA, 20 bp, synthetic construct
  source 1..20: mol_type = other DNA
ctgctgctcctgctgccctg

SEQ ID NO: 26939 - DNA, 20 bp, synthetic construct
  source 1..20: mol_type = other DNA
ctgcatctgcaaaggggcat

SEQ ID NO: 26940 - DNA, 20 bp, synthetic construct
  source 1..20: mol_type = other DNA
ccagcggcacaggagcagtt

SEQ ID NO: 26941 - DNA, 20 bp, synthetic construct
  source 1..20: mol_type = other DNA
tgctgctcctgctgccctgt

SEQ ID NO: 26942 - DNA, 20 bp, synthetic construct
  source 1..20: mol_type = other DNA
gacgactcgaagagctcgtg

SEQ ID NO: 26943 - DNA, 20 bp, synthetic construct
  source 1..20: mol_type = other DNA
tgagcactgcgagaccaacg

SEQ ID NO: 26944 - DNA, 20 bp, synthetic construct
  source 1..20: mol_type = other DNA
cgagtcgtcgcacatcgaga

SEQ ID NO: 26945 - DNA, 20 bp, synthetic construct
  source 1..20: mol_type = other DNA
gctgctctacgacgaggcca

SEQ ID NO: 26946 - DNA, 20 bp, synthetic construct
  source 1..20: mol_type = other DNA
ctctcggtccgactcgccgt

SEQ ID NO: 26947 - DNA, 20 bp, synthetic construct
  source 1..20: mol_type = other DNA
tgccctgcaagagcgccgag

SEQ ID NO: 26948 - DNA, 20 bp, synthetic construct
  source 1..20: mol_type = other DNA
tgccaggcctactacctcca

SEQ ID NO: 26949 - DNA, 20 bp, synthetic construct
  source 1..20: mol_type = other DNA
tgcgcaggcggcgcaacatg

SEQ ID NO: 26950 - DNA, 20 bp, synthetic construct
  source 1..20: mol_type = other DNA
tggagtccttggcgcagccg

SEQ ID NO: 26951 - DNA, 20 bp, synthetic construct
  source 1..20: mol_type = other DNA
agcagtgccaccgagtcaga

SEQ ID NO: 26952 - DNA, 20 bp, synthetic construct
  source 1..20: mol_type = other DNA
ctacagaagctgcgcgacga

SEQ ID NO: 26953 - DNA, 20 bp, synthetic construct
  source 1..20: mol_type = other DNA
ggcctcgtcgtagagcagca

SEQ ID NO: 26954 - DNA, 20 bp, synthetic construct
  source 1..20: mol_type = other DNA
ctggttggctggatggcaca

SEQ ID NO: 26955 - DNA, 20 bp, synthetic construct
  source 1..20: mol_type = other DNA
atgttgcgccgcctgcgcaa

SEQ ID NO: 26956 - DNA, 20 bp, synthetic construct
  source 1..20: mol_type = other DNA
catacttgccgagcacgtcc

SEQ ID NO: 26957 - DNA, 20 bp, synthetic construct
  source 1..20: mol_type = other DNA
gctccttacgaagctaagtg

SEQ ID NO: 26958 - DNA, 20 bp, synthetic construct
  source 1..20: mol_type = other DNA
aagttcacgccgcccgacac

SEQ ID NO: 26959 - DNA, 20 bp, synthetic construct
  source 1..20: mol_type = other DNA
gttgggctgagtcgggatcg

SEQ ID NO: 26960 - DNA, 20 bp, synthetic construct
  source 1..20: mol_type = other DNA
ctggccccggggatccgaag

SEQ ID NO: 26961 - DNA, 20 bp, synthetic construct
  source 1..20: mol_type = other DNA
gtgaacttgttcgccaacga

SEQ ID NO: 26962 - DNA, 20 bp, synthetic construct
  source 1..20: mol_type = other DNA
tccgcagcgacccgaccagt

SEQ ID NO: 26963 - DNA, 20 bp, synthetic construct
  source 1..20: mol_type = other DNA
ccgatcccgactcagcccaa

SEQ ID NO: 26964 - DNA, 20 bp, synthetic construct
  source 1..20: mol_type = other DNA
gccgactggtcgggtcgctg

SEQ ID NO: 26965 - DNA, 20 bp, synthetic construct
  source 1..20: mol_type = other DNA
ccttcctcttcggatccccg

SEQ ID NO: 26966 - DNA, 20 bp, synthetic construct
  source 1..20: mol_type = other DNA
ggagctgttcaagcggaaga

SEQ ID NO: 26967 - DNA, 20 bp, synthetic construct
  source 1..20: mol_type = other DNA
gcttcctggagctgttcaag

SEQ ID NO: 26968 - DNA, 20 bp, synthetic construct
  source 1..20: mol_type = other DNA
gttcaagcggaagatggagg

SEQ ID NO: 26969 - DNA, 20 bp, synthetic construct
  source 1..20: mol_type = other DNA
ggggacgtcgcccgagagcg

SEQ ID NO: 26970 - DNA, 20 bp, synthetic construct
  source 1..20: mol_type = other DNA
gagcggggacgaggaggtgt

SEQ ID NO: 26971 - DNA, 20 bp, synthetic construct
  source 1..20: mol_type = other DNA
ggggatccgaagaggaaggg

SEQ ID NO: 26972 - DNA, 20 bp, synthetic construct
  source 1..20: mol_type = other DNA
gaataagggttatcgaatgg

SEQ ID NO: 26973 - DNA, 20 bp, synthetic construct
  source 1..20: mol_type = other DNA
tcatggaaagcaaggcacta

SEQ ID NO: 26974 - DNA, 20 bp, synthetic construct
  source 1..20: mol_type = other DNA
acatatatcccagatttctg

SEQ ID NO: 26975 - DNA, 20 bp, synthetic construct
  source 1..20: mol_type = other DNA
cctgaataagggttatcgaa

SEQ ID NO: 26976 - DNA, 20 bp, synthetic construct
  source 1..20: mol_type = other DNA
gtggtgaatgaaggttcaga

SEQ ID NO: 26977 - DNA, 20 bp, synthetic construct
  source 1..20: mol_type = other DNA
tatcgaatggtggtgaatga

SEQ ID NO: 26978 - DNA, 20 bp, synthetic construct
  source 1..20: mol_type = other DNA
agatgagattgccaaggctc

SEQ ID NO: 26979 - DNA, 20 bp, synthetic construct
  source 1..20: mol_type = other DNA
gggaaatgtcatggaaagca

SEQ ID NO: 26980 - DNA, 20 bp, synthetic construct
  source 1..20: mol_type = other DNA
ctttgggaagatcatccgca

SEQ ID NO: 26981 - DNA, 20 bp, synthetic construct
  source 1..20: mol_type = other DNA
ggtatcaccagaaaatgtgt

SEQ ID NO: 26982 - DNA, 20 bp, synthetic construct
  source 1..20: mol_type = other DNA
gctgatctgggcctgaataa

SEQ ID NO: 26983 - DNA, 20 bp, synthetic construct
  source 1..20: mol_type = other DNA
gtgcttgaggggaaatgtca

SEQ ID NO: 26984 - DNA, 20 bp, synthetic construct
  source 1..20: mol_type = other DNA
gatggcagatgagattgcca

SEQ ID NO: 26985 - DNA, 20 bp, synthetic construct
  source 1..20: mol_type = other DNA
gtgaatgaaggttcagatgg

SEQ ID NO: 26986 - DNA, 20 bp, synthetic construct
  source 1..20: mol_type = other DNA
aaaatgtgttggtgcttgag

SEQ ID NO: 26987 - DNA, 20 bp, synthetic construct
  source 1..20: mol_type = other DNA
gcttaccatgagccatacga

SEQ ID NO: 26988 - DNA, 20 bp, synthetic construct
  source 1..20: mol_type = other DNA
atgaacagcatatactgaag

SEQ ID NO: 26989 - DNA, 20 bp, synthetic construct
  source 1..20: mol_type = other DNA
gaagttaatattatgtgggc

SEQ ID NO: 26990 - DNA, 20 bp, synthetic construct
  source 1..20: mol_type = other DNA
gaatcagttccaaaggacca

SEQ ID NO: 26991 - DNA, 20 bp, synthetic construct
  source 1..20: mol_type = other DNA
taatactcctagccatcata

SEQ ID NO: 26992 - DNA, 20 bp, synthetic construct
  source 1..20: mol_type = other DNA
aatgctcctgaaaaatagac

SEQ ID NO: 26993 - DNA, 20 bp, synthetic construct
  source 1..20: mol_type = other DNA
tccatatggaaaataagtga

SEQ ID NO: 26994 - DNA, 20 bp, synthetic construct
  source 1..20: mol_type = other DNA
cccaggaagtatatatctgg

SEQ ID NO: 26995 - DNA, 20 bp, synthetic construct
  source 1..20: mol_type = other DNA
aaggctgaataccaagtcca

SEQ ID NO: 26996 - DNA, 20 bp, synthetic construct
  source 1..20: mol_type = other DNA
gccaaagtcaactcctaaga

SEQ ID NO: 26997 - DNA, 20 bp, synthetic construct
  source 1..20: mol_type = other DNA
cttattgaagaatccaggtg

SEQ ID NO: 26998 - DNA, 20 bp, synthetic construct
  source 1..20: mol_type = other DNA
gttgtcagctggattctcaa

SEQ ID NO: 26999 - DNA, 20 bp, synthetic construct
  source 1..20: mol_type = other DNA
gacagactgtctcagtgctg

SEQ ID NO: 27000 - DNA, 20 bp, synthetic construct
  source 1..20: mol_type = other DNA
gggggtatgaagagggccag

SEQ ID NO: 27001 - DNA, 20 bp, synthetic construct
  source 1..20: mol_type = other DNA
tcatagggttcatcatggta

SEQ ID NO: 27002 - DNA, 20 bp, synthetic construct
  source 1..20: mol_type = other DNA
aagtggtgatcagtatccgg

SEQ ID NO: 27003 - DNA, 20 bp, synthetic construct
  source 1..20: mol_type = other DNA
ggacgagaacatgactgcgg

SEQ ID NO: 27004 - DNA, 20 bp, synthetic construct
  source 1..20: mol_type = other DNA
agagatgctccgctacaaag

SEQ ID NO: 27005 - DNA, 20 bp, synthetic construct
  source 1..20: mol_type = other DNA
gtgctggagaactacaacaa

SEQ ID NO: 27006 - DNA, 20 bp, synthetic construct
  source 1..20: mol_type = other DNA
tgaaacgcccttctacgtgg

SEQ ID NO: 27007 - DNA, 20 bp, synthetic construct
  source 1..20: mol_type = other DNA
gcctcacccagacgtaccga

SEQ ID NO: 27008 - DNA, 20 bp, synthetic construct
  source 1..20: mol_type = other DNA
acctgcggacctacaacctg

SEQ ID NO: 27009 - DNA, 20 bp, synthetic construct
  source 1..20: mol_type = other DNA
gggctatagttaggtcgctg

SEQ ID NO: 27010 - DNA, 20 bp, synthetic construct
  source 1..20: mol_type = other DNA
cagctgagaggaccataccc

SEQ ID NO: 27011 - DNA, 20 bp, synthetic construct
  source 1..20: mol_type = other DNA
ctgatgcggaagcccgcctg

SEQ ID NO: 27012 - DNA, 20 bp, synthetic construct
  source 1..20: mol_type = other DNA
acgtactgcatggagtcacg

SEQ ID NO: 27013 - DNA, 20 bp, synthetic construct
  source 1..20: mol_type = other DNA
gcgcatgctcagccagatga

SEQ ID NO: 27014 - DNA, 20 bp, synthetic construct
  source 1..20: mol_type = other DNA
acttgagggtcggatactgt

SEQ ID NO: 27015 - DNA, 20 bp, synthetic construct
  source 1..20: mol_type = other DNA
aggccagcaatgatgtcgga

SEQ ID NO: 27016 - DNA, 20 bp, synthetic construct
  source 1..20: mol_type = other DNA
cgacaacaaggccttcaatg

SEQ ID NO: 27017 - DNA, 20 bp, synthetic construct
  source 1..20: mol_type = other DNA
taatctttcttaccaatccc

SEQ ID NO: 27018 - DNA, 20 bp, synthetic construct
  source 1..20: mol_type = other DNA
gcccttgagtggctggacat

SEQ ID NO: 27019 - DNA, 20 bp, synthetic construct
  source 1..20: mol_type = other DNA
gaatggcaacttcatagaac

SEQ ID NO: 27020 - DNA, 20 bp, synthetic construct
  source 1..20: mol_type = other DNA
atgtccagccactcaagggc

SEQ ID NO: 27021 - DNA, 20 bp, synthetic construct
  source 1..20: mol_type = other DNA
gctgaaactgaatcaactac

SEQ ID NO: 27022 - DNA, 20 bp, synthetic construct
  source 1..20: mol_type = other DNA
ggcatgttcaacacagcaag

SEQ ID NO: 27023 - DNA, 20 bp, synthetic construct
  source 1..20: mol_type = other DNA
cagttctagtttctccaagc

SEQ ID NO: 27024 - DNA, 20 bp, synthetic construct
  source 1..20: mol_type = other DNA
gatagaaaaagaggaatgga

SEQ ID NO: 27025 - DNA, 20 bp, synthetic construct
  source 1..20: mol_type = other DNA
aacttcctgatactatagaa

SEQ ID NO: 27026 - DNA, 20 bp, synthetic construct
  source 1..20: mol_type = other DNA
tgaagacctgaagcgagaga

SEQ ID NO: 27027 - DNA, 20 bp, synthetic construct
  source 1..20: mol_type = other DNA
tcagtttcagcagagaagaa

SEQ ID NO: 27028 - DNA, 20 bp, synthetic construct
  source 1..20: mol_type = other DNA
caaaatcaagactgtcccca

SEQ ID NO: 27029 - DNA, 20 bp, synthetic construct
  source 1..20: mol_type = other DNA
tatatgtgatcttccacaag

SEQ ID NO: 27030 - DNA, 20 bp, synthetic construct
  source 1..20: mol_type = other DNA
gctaagagaaaaggtcacca

SEQ ID NO: 27031 - DNA, 20 bp, synthetic construct
  source 1..20: mol_type = other DNA
gagataaatctaacacaatg

SEQ ID NO: 27032 - DNA, 20 bp, synthetic construct
  source 1..20: mol_type = other DNA
acagacacacgcgctccgcg

SEQ ID NO: 27033 - DNA, 20 bp, synthetic construct
  source 1..20: mol_type = other DNA
gaggaccgcatggacgagct

SEQ ID NO: 27034 - DNA, 20 bp, synthetic construct
  source 1..20: mol_type = other DNA
ccgtggcctgcgtcaaccag

SEQ ID NO: 27035 - DNA, 20 bp, synthetic construct
  source 1..20: mol_type = other DNA
agagtgcagccgtagcagag

SEQ ID NO: 27036 - DNA, 20 bp, synthetic construct
  source 1..20: mol_type = other DNA
gtccaaagtcctgagcgccg

SEQ ID NO: 27037 - DNA, 20 bp, synthetic construct
  source 1..20: mol_type = other DNA
tggccgcatcgtggcgcgag

SEQ ID NO: 27038 - DNA, 20 bp, synthetic construct
  source 1..20: mol_type = other DNA
gccatgctaggccgctccca

SEQ ID NO: 27039 - DNA, 20 bp, synthetic construct
  source 1..20: mol_type = other DNA
gcgcggggcaaaaggaggcg

SEQ ID NO: 27040 - DNA, 20 bp, synthetic construct
  source 1..20: mol_type = other DNA
gcgctgcgacgcgtgccccg

SEQ ID NO: 27041 - DNA, 20 bp, synthetic construct
  source 1..20: mol_type = other DNA
gcccagtgtcccggagccgt

SEQ ID NO: 27042 - DNA, 20 bp, synthetic construct
  source 1..20: mol_type = other DNA
gtgaagctgagctccctcgg

SEQ ID NO: 27043 - DNA, 20 bp, synthetic construct
  source 1..20: mol_type = other DNA
gattctggcgggctcggctc

SEQ ID NO: 27044 - DNA, 20 bp, synthetic construct
  source 1..20: mol_type = other DNA
tcctctagccggcgcagcgg

SEQ ID NO: 27045 - DNA, 20 bp, synthetic construct
  source 1..20: mol_type = other DNA
tgcacagtccaggcgcacag

SEQ ID NO: 27046 - DNA, 20 bp, synthetic construct
  source 1..20: mol_type = other DNA
gcctgtgcccgcgccaccta

SEQ ID NO: 27047 - DNA, 20 bp, synthetic construct
  source 1..20: mol_type = other DNA
aagcttatcggctatagcca

SEQ ID NO: 27048 - DNA, 20 bp, synthetic construct
  source 1..20: mol_type = other DNA
acttacctgtatatcgctga

SEQ ID NO: 27049 - DNA, 20 bp, synthetic construct
  source 1..20: mol_type = other DNA
ggctatagccgataagcttg

SEQ ID NO: 27050 - DNA, 20 bp, synthetic construct
  source 1..20: mol_type = other DNA
aatggtgaccatgataactg

SEQ ID NO: 27051 - DNA, 20 bp, synthetic construct
  source 1..20: mol_type = other DNA
ggggcagacagtctacaccg

SEQ ID NO: 27052 - DNA, 20 bp, synthetic construct
  source 1..20: mol_type = other DNA
accagttgacactacatcgg

SEQ ID NO: 27053 - DNA, 20 bp, synthetic construct
  source 1..20: mol_type = other DNA
tatgtcataactggtccaca

SEQ ID NO: 27054 - DNA, 20 bp, synthetic construct
  source 1..20: mol_type = other DNA
ggaggaacgatgatgaatgt

SEQ ID NO: 27055 - DNA, 20 bp, synthetic construct
  source 1..20: mol_type = other DNA
ggtgtagactgtctgcccca

SEQ ID NO: 27056 - DNA, 20 bp, synthetic construct
  source 1..20: mol_type = other DNA
gaagaacggctacaacctgc

SEQ ID NO: 27057 - DNA, 20 bp, synthetic construct
  source 1..20: mol_type = other DNA
gttgtccatgaaggtctatg

SEQ ID NO: 27058 - DNA, 20 bp, synthetic construct
  source 1..20: mol_type = other DNA
cctcaagaagtctgaacaag

SEQ ID NO: 27059 - DNA, 20 bp, synthetic construct
  source 1..20: mol_type = other DNA
agatagcgaagatgtacatg

SEQ ID NO: 27060 - DNA, 20 bp, synthetic construct
  source 1..20: mol_type = other DNA
cccatcaactactggaagaa

SEQ ID NO: 27061 - DNA, 20 bp, synthetic construct
  source 1..20: mol_type = other DNA
catgttgaggaagatgaaag

SEQ ID NO: 27062 - DNA, 20 bp, synthetic construct
  source 1..20: mol_type = other DNA
ggcagtgggcatctggacgc

SEQ ID NO: 27063 - DNA, 20 bp, synthetic construct
  source 1..20: mol_type = other DNA
gttccgacgctccttgaagg

SEQ ID NO: 27064 - DNA, 20 bp, synthetic construct
  source 1..20: mol_type = other DNA
ttgatgcagttccactgctg

SEQ ID NO: 27065 - DNA, 20 bp, synthetic construct
  source 1..20: mol_type = other DNA
agcaattgtaggtaaacagc

SEQ ID NO: 27066 - DNA, 20 bp, synthetic construct
  source 1..20: mol_type = other DNA
gcagcaacaactcacaggac

SEQ ID NO: 27067 - DNA, 20 bp, synthetic construct
  source 1..20: mol_type = other DNA
aggagcaggatgaagtactg

SEQ ID NO: 27068 - DNA, 20 bp, synthetic construct
  source 1..20: mol_type = other DNA
cacctgctggtagtaggcgt

SEQ ID NO: 27069 - DNA, 20 bp, synthetic construct
  source 1..20: mol_type = other DNA
accccaaccccagctgaaca

SEQ ID NO: 27070 - DNA, 20 bp, synthetic construct
  source 1..20: mol_type = other DNA
gcgccaccttcaaggagcgt

SEQ ID NO: 27071 - DNA, 20 bp, synthetic construct
  source 1..20: mol_type = other DNA
ggctgatgtagtcactcttg

SEQ ID NO: 27072 - DNA, 20 bp, synthetic construct
  source 1..20: mol_type = other DNA
ggccacagcctacatcctgg

SEQ ID NO: 27073 - DNA, 20 bp, synthetic construct
  source 1..20: mol_type = other DNA
ctggtggtagcgcttggtca

SEQ ID NO: 27074 - DNA, 20 bp, synthetic construct
  source 1..20: mol_type = other DNA
tttctgctggagatcatcgc

SEQ ID NO: 27075 - DNA, 20 bp, synthetic construct
  source 1..20: mol_type = other DNA
ggtggcgggcactgtcgtca

SEQ ID NO: 27076 - DNA, 20 bp, synthetic construct
  source 1..20: mol_type = other DNA
gtgtactgcttgtagctggc

SEQ ID NO: 27077 - DNA, 20 bp, synthetic construct
  source 1..20: mol_type = other DNA
ccagatgtgtgtcctagacc

SEQ ID NO: 27078 - DNA, 20 bp, synthetic construct
  source 1..20: mol_type = other DNA
ggaagatccccggattgcaa

SEQ ID NO: 27079 - DNA, 20 bp, synthetic construct
  source 1..20: mol_type = other DNA
ctccaggcgatagaggcgtg

SEQ ID NO: 27080 - DNA, 20 bp, synthetic construct
  source 1..20: mol_type = other DNA
tgtggacgaagcattgacct

SEQ ID NO: 27081 - DNA, 20 bp, synthetic construct
  source 1..20: mol_type = other DNA
ggcccaaagacattaccgga

SEQ ID NO: 27082 - DNA, 20 bp, synthetic construct
  source 1..20: mol_type = other DNA
gggacggcgctgctatcagt

SEQ ID NO: 27083 - DNA, 20 bp, synthetic construct
  source 1..20: mol_type = other DNA
tgggagttaagagtcacctg

SEQ ID NO: 27084 - DNA, 20 bp, synthetic construct
  source 1..20: mol_type = other DNA
cagtgaacagccatctaccg

SEQ ID NO: 27085 - DNA, 20 bp, synthetic construct
  source 1..20: mol_type = other DNA
gaaccggagcacgtccacac

SEQ ID NO: 27086 - DNA, 20 bp, synthetic construct
  source 1..20: mol_type = other DNA
gctggagacaagctagctaa

SEQ ID NO: 27087 - DNA, 20 bp, synthetic construct
  source 1..20: mol_type = other DNA
gaagcatctagtgtccactt

SEQ ID NO: 27088 - DNA, 20 bp, synthetic construct
  source 1..20: mol_type = other DNA
gaggcccagcagatggagtg

SEQ ID NO: 27089 - DNA, 20 bp, synthetic construct
  source 1..20: mol_type = other DNA
agcaaggactcgccaggaag

SEQ ID NO: 27090 - DNA, 20 bp, synthetic construct
  source 1..20: mol_type = other DNA
ctgcagcaatgactttagca

SEQ ID NO: 27091 - DNA, 20 bp, synthetic construct
  source 1..20: mol_type = other DNA
gattctgggctgctaggctc

SEQ ID NO: 27092 - DNA, 20 bp, synthetic construct
  source 1..20: mol_type = other DNA
tagacaacgctactacccaa

SEQ ID NO: 27093 - DNA, 20 bp, synthetic construct
  source 1..20: mol_type = other DNA
accgagcaaaagttatcggt

SEQ ID NO: 27094 - DNA, 20 bp, synthetic construct
  source 1..20: mol_type = other DNA
agagtgttctggtctcacat

SEQ ID NO: 27095 - DNA, 20 bp, synthetic construct
  source 1..20: mol_type = other DNA
aatggcaaggatctattaca

SEQ ID NO: 27096 - DNA, 20 bp, synthetic construct
  source 1..20: mol_type = other DNA
tcatggacaaataatctggt

SEQ ID NO: 27097 - DNA, 20 bp, synthetic construct
  source 1..20: mol_type = other DNA
aagttagttctccacaacta

SEQ ID NO: 27098 - DNA, 20 bp, synthetic construct
  source 1..20: mol_type = other DNA
agcgcatctctaagagacac

SEQ ID NO: 27099 - DNA, 20 bp, synthetic construct
  source 1..20: mol_type = other DNA
taggtcttgctgtatgatgt

SEQ ID NO: 27100 - DNA, 20 bp, synthetic construct
  source 1..20: mol_type = other DNA
aaaaatggaatgtggtgtcg

SEQ ID NO: 27101 - DNA, 20 bp, synthetic construct
  source 1..20: mol_type = other DNA
aatgaccagctagttaaaga

SEQ ID NO: 27102 - DNA, 20 bp, synthetic construct
  source 1..20: mol_type = other DNA
catgcagaagcaaacgatag

SEQ ID NO: 27103 - DNA, 20 bp, synthetic construct
  source 1..20: mol_type = other DNA
atttctattaaagacaatcg

SEQ ID NO: 27104 - DNA, 20 bp, synthetic construct
  source 1..20: mol_type = other DNA
cagctggtgggagtgacaag

SEQ ID NO: 27105 - DNA, 20 bp, synthetic construct
  source 1..20: mol_type = other DNA
attacattacagatatgcac

SEQ ID NO: 27106 - DNA, 20 bp, synthetic construct
  source 1..20: mol_type = other DNA
gaactcatcagctgtaatgt

SEQ ID NO: 27107 - DNA, 20 bp, synthetic construct
  source 1..20: mol_type = other DNA
ccgggaagactacctcgtgg

SEQ ID NO: 27108 - DNA, 20 bp, synthetic construct
  source 1..20: mol_type = other DNA
ataagatctgtctctacccc

SEQ ID NO: 27109 - DNA, 20 bp, synthetic construct
  source 1..20: mol_type = other DNA
gattggaactgtgaatgaca

SEQ ID NO: 27110 - DNA, 20 bp, synthetic construct
  source 1..20: mol_type = other DNA
ggaagccccacccaaaatcc

SEQ ID NO: 27111 - DNA, 20 bp, synthetic construct
  source 1..20: mol_type = other DNA
gctaatgcacaagctgagtg

SEQ ID NO: 27112 - DNA, 20 bp, synthetic construct
  source 1..20: mol_type = other DNA
gctctgtgccaagtatagca

SEQ ID NO: 27113 - DNA, 20 bp, synthetic construct
  source 1..20: mol_type = other DNA
gcaggtcacagtacagctcc

SEQ ID NO: 27114 - DNA, 20 bp, synthetic construct
  source 1..20: mol_type = other DNA
tgaacgagctcggatccgtg

SEQ ID NO: 27115 - DNA, 20 bp, synthetic construct
  source 1..20: mol_type = other DNA
tcctcgactccagtcagaag

SEQ ID NO: 27116 - DNA, 20 bp, synthetic construct
  source 1..20: mol_type = other DNA
ggtggcttcacagcaccagt

SEQ ID NO: 27117 - DNA, 20 bp, synthetic construct
  source 1..20: mol_type = other DNA
gctgtactgtgacctgctgc

SEQ ID NO: 27118 - DNA, 20 bp, synthetic construct
  source 1..20: mol_type = other DNA
tagggaactagattctggtc

SEQ ID NO: 27119 - DNA, 20 bp, synthetic construct
  source 1..20: mol_type = other DNA
aggaatatggcaagctatgt

SEQ ID NO: 27120 - DNA, 20 bp, synthetic construct
  source 1..20: mol_type = other DNA
accctatgaacctgactctg

SEQ ID NO: 27121 - DNA, 20 bp, synthetic construct
  source 1..20: mol_type = other DNA
actggcccagaaagcaagga

SEQ ID NO: 27122 - DNA, 20 bp, synthetic construct
  source 1..20: mol_type = other DNA
gctctctgccagatacgagc

SEQ ID NO: 27123 - DNA, 20 bp, synthetic construct
  source 1..20: mol_type = other DNA
caagagcgagttgacaaaca

SEQ ID NO: 27124 - DNA, 20 bp, synthetic construct
  source 1..20: mol_type = other DNA
atgattgcctgtgacgaagt

SEQ ID NO: 27125 - DNA, 20 bp, synthetic construct
  source 1..20: mol_type = other DNA
caggaccgaggcttctgagt

SEQ ID NO: 27126 - DNA, 20 bp, synthetic construct
  source 1..20: mol_type = other DNA
ttcggccactaaaaagaaca

SEQ ID NO: 27127 - DNA, 20 bp, synthetic construct
  source 1..20: mol_type = other DNA
tgtgctgcgccaaatgtaga

SEQ ID NO: 27128 - DNA, 20 bp, synthetic construct
  source 1..20: mol_type = other DNA
gaggagcgacagccgtccgc

SEQ ID NO: 27129 - DNA, 20 bp, synthetic construct
  source 1..20: mol_type = other DNA
gaggcaggcagctgatggat

SEQ ID NO: 27130 - DNA, 20 bp, synthetic construct
  source 1..20: mol_type = other DNA
gatgatgtaagcacccaggc

SEQ ID NO: 27131 - DNA, 20 bp, synthetic construct
  source 1..20: mol_type = other DNA
gccgccaaggaaaagagata

SEQ ID NO: 27132 - DNA, 20 bp, synthetic construct
  source 1..20: mol_type = other DNA
ggcccaagtgaatgtctgag

SEQ ID NO: 27133 - DNA, 20 bp, synthetic construct
  source 1..20: mol_type = other DNA
ccagacatcacggtgattgt

SEQ ID NO: 27134 - DNA, 20 bp, synthetic construct
  source 1..20: mol_type = other DNA
tggcagagagccttgagctc

SEQ ID NO: 27135 - DNA, 20 bp, synthetic construct
  source 1..20: mol_type = other DNA
agtgactgctgtgctcagcg

SEQ ID NO: 27136 - DNA, 20 bp, synthetic construct
  source 1..20: mol_type = other DNA
tggcgcagtggtagggtcgt

SEQ ID NO: 27137 - DNA, 20 bp, synthetic construct
  source 1..20: mol_type = other DNA
gatgtagtcagtgagaatcc

SEQ ID NO: 27138 - DNA, 20 bp, synthetic construct
  source 1..20: mol_type = other DNA
tccatctctcaaagtactag

SEQ ID NO: 27139 - DNA, 20 bp, synthetic construct
  source 1..20: mol_type = other DNA
gacactgatcagccacacaa

SEQ ID NO: 27140 - DNA, 20 bp, synthetic construct
  source 1..20: mol_type = other DNA
gccactagtactttgagaga

SEQ ID NO: 27141 - DNA, 20 bp, synthetic construct
  source 1..20: mol_type = other DNA
agtcaggcatgtgaaatacc

SEQ ID NO: 27142 - DNA, 20 bp, synthetic construct
  source 1..20: mol_type = other DNA
gcatgagcccggtcaagaag

SEQ ID NO: 27143 - DNA, 20 bp, synthetic construct
  source 1..20: mol_type = other DNA
acaactcatcactcaataag

SEQ ID NO: 27144 - DNA, 20 bp, synthetic construct
  source 1..20: mol_type = other DNA
aagctttatggatttaccaa

SEQ ID NO: 27145 - DNA, 20 bp, synthetic construct
  source 1..20: mol_type = other DNA
atacctgctggagagacatg

SEQ ID NO: 27146 - DNA, 20 bp, synthetic construct
  source 1..20: mol_type = other DNA
tactattcagaagagtagct

SEQ ID NO: 27147 - DNA, 20 bp, synthetic construct
  source 1..20: mol_type = other DNA
ctgtttgatcagctctggat

SEQ ID NO: 27148 - DNA, 20 bp, synthetic construct
  source 1..20: mol_type = other DNA
cttggagaataatgtcctga

SEQ ID NO: 27149 - DNA, 20 bp, synthetic construct
  source 1..20: mol_type = other DNA
tgtgtggctgatcagtgtca

SEQ ID NO: 27150 - DNA, 20 bp, synthetic construct
  source 1..20: mol_type = other DNA
ttctaaggtggacagcagca

SEQ ID NO: 27151 - DNA, 20 bp, synthetic construct
  source 1..20: mol_type = other DNA
cagagaaatccaagaaactg

SEQ ID NO: 27152 - DNA, 20 bp, synthetic construct
  source 1..20: mol_type = other DNA
tacactgatacatccctcga

SEQ ID NO: 27153 - DNA, 20 bp, synthetic construct
  source 1..20: mol_type = other DNA
ttacactgatacatccctcg

SEQ ID NO: 27154 - DNA, 20 bp, synthetic construct
  source 1..20: mol_type = other DNA
gtaatgccaaggaccctcga

SEQ ID NO: 27155 - DNA, 20 bp, synthetic construct
  source 1..20: mol_type = other DNA
gatggagttcgccagtcgag

SEQ ID NO: 27156 - DNA, 20 bp, synthetic construct
  source 1..20: mol_type = other DNA
actttggcccagtcaatcaa

SEQ ID NO: 27157 - DNA, 20 bp, synthetic construct
  source 1..20: mol_type = other DNA
tggcccagtcaatcaaaggt

SEQ ID NO: 27158 - DNA, 20 bp, synthetic construct
  source 1..20: mol_type = other DNA
aaagagaaagccagatatgg

SEQ ID NO: 27159 - DNA, 20 bp, synthetic construct
  source 1..20: mol_type = other DNA
agtcatacaccttaaccaag

SEQ ID NO: 27160 - DNA, 20 bp, synthetic construct
  source 1..20: mol_type = other DNA
gaatctgggaagtaatgcca

SEQ ID NO: 27161 - DNA, 20 bp, synthetic construct
  source 1..20: mol_type = other DNA
agtaatgccaaggaccctcg

SEQ ID NO: 27162 - DNA, 20 bp, synthetic construct
  source 1..20: mol_type = other DNA
tgactatcaagaagatggtt

SEQ ID NO: 27163 - DNA, 20 bp, synthetic construct
  source 1..20: mol_type = other DNA
cttctgtaatacacttggag

SEQ ID NO: 27164 - DNA, 20 bp, synthetic construct
  source 1..20: mol_type = other DNA
agcaaagagaaagccagata

SEQ ID NO: 27165 - DNA, 20 bp, synthetic construct
  source 1..20: mol_type = other DNA
gtgtatgactatcaagaaga

SEQ ID NO: 27166 - DNA, 20 bp, synthetic construct
  source 1..20: mol_type = other DNA
gaagaatgatagccaggatg

SEQ ID NO: 27167 - DNA, 20 bp, synthetic construct
  source 1..20: mol_type = other DNA
gttgagataagtaagtatgc

SEQ ID NO: 27168 - DNA, 20 bp, synthetic construct
  source 1..20: mol_type = other DNA
gttgagtaagttgtgagcca

SEQ ID NO: 27169 - DNA, 20 bp, synthetic construct
  source 1..20: mol_type = other DNA
taggtgtgaggctcgtctga

SEQ ID NO: 27170 - DNA, 20 bp, synthetic construct
  source 1..20: mol_type = other DNA
cactccttacacgacaccag

SEQ ID NO: 27171 - DNA, 20 bp, synthetic construct
  source 1..20: mol_type = other DNA
cactactgatgcaacatcag

SEQ ID NO: 27172 - DNA, 20 bp, synthetic construct
  source 1..20: mol_type = other DNA
gaagcaacaagaaaatcaga

SEQ ID NO: 27173 - DNA, 20 bp, synthetic construct
  source 1..20: mol_type = other DNA
tttggcttccaaataatccc

SEQ ID NO: 27174 - DNA, 20 bp, synthetic construct
  source 1..20: mol_type = other DNA
gttggagaactatagcaact

SEQ ID NO: 27175 - DNA, 20 bp, synthetic construct
  source 1..20: mol_type = other DNA
tgaatgtaaagaatgtagga

SEQ ID NO: 27176 - DNA, 20 bp, synthetic construct
  source 1..20: mol_type = other DNA
tgtggaaaagcgtttaatcg

SEQ ID NO: 27177 - DNA, 20 bp, synthetic construct
  source 1..20: mol_type = other DNA
atgaatgtaaggaatgtgga

SEQ ID NO: 27178 - DNA, 20 bp, synthetic construct
  source 1..20: mol_type = other DNA
acatcagaaaattcataatg

SEQ ID NO: 27179 - DNA, 20 bp, synthetic construct
  source 1..20: mol_type = other DNA
tgaatgtaagcaatgcggga

SEQ ID NO: 27180 - DNA, 20 bp, synthetic construct
  source 1..20: mol_type = other DNA
acattcatagggtttctcac

SEQ ID NO: 27181 - DNA, 20 bp, synthetic construct
  source 1..20: mol_type = other DNA
tgagaaaccctatcaatgta

SEQ ID NO: 27182 - DNA, 20 bp, synthetic construct
  source 1..20: mol_type = other DNA
aggtgcaactaccctgtgcg

SEQ ID NO: 27183 - DNA, 20 bp, synthetic construct
  source 1..20: mol_type = other DNA
gctcctccatgcagcaaccc

SEQ ID NO: 27184 - DNA, 20 bp, synthetic construct
  source 1..20: mol_type = other DNA
actggtcacagcagtaacaa

SEQ ID NO: 27185 - DNA, 20 bp, synthetic construct
  source 1..20: mol_type = other DNA
agaatgatgggacgttgcat

SEQ ID NO: 27186 - DNA, 20 bp, synthetic construct
  source 1..20: mol_type = other DNA
tgatcatggtggaagaatgt

SEQ ID NO: 27187 - DNA, 20 bp, synthetic construct
  source 1..20: mol_type = other DNA
agagggacacagtctgatca

SEQ ID NO: 27188 - DNA, 20 bp, synthetic construct
  source 1..20: mol_type = other DNA
ggctctttggatcccagatg

SEQ ID NO: 27189 - DNA, 20 bp, synthetic construct
  source 1..20: mol_type = other DNA
ctagggctgctgataagctc

SEQ ID NO: 27190 - DNA, 20 bp, synthetic construct
  source 1..20: mol_type = other DNA
gtgccttataccctttagga

SEQ ID NO: 27191 - DNA, 20 bp, synthetic construct
  source 1..20: mol_type = other DNA
tgtcctgggttgctgcatgg

SEQ ID NO: 27192 - DNA, 20 bp, synthetic construct
  source 1..20: mol_type = other DNA
ggacagcagctagtgccacc

SEQ ID NO: 27193 - DNA, 20 bp, synthetic construct
  source 1..20: mol_type = other DNA
tgtcattcagcacattccgg

SEQ ID NO: 27194 - DNA, 20 bp, synthetic construct
  source 1..20: mol_type = other DNA
tgggatccaaagagccagta

SEQ ID NO: 27195 - DNA, 20 bp, synthetic construct
  source 1..20: mol_type = other DNA
ggcctggcagatgtgcacag

SEQ ID NO: 27196 - DNA, 20 bp, synthetic construct
  source 1..20: mol_type = other DNA
gagctcatctccagaatgat

SEQ ID NO: 27197 - DNA, 20 bp, synthetic construct
  source 1..20: mol_type = other DNA
ctcacccgagtgctcgccgg

SEQ ID NO: 27198 - DNA, 20 bp, synthetic construct
  source 1..20: mol_type = other DNA
ttcaccgacttcctccgccg

SEQ ID NO: 27199 - DNA, 20 bp, synthetic construct
  source 1..20: mol_type = other DNA
caaaggctacgactggacgc

SEQ ID NO: 27200 - DNA, 20 bp, synthetic construct
  source 1..20: mol_type = other DNA
acgtcgcggaagtcgatagg

SEQ ID NO: 27201 - DNA, 20 bp, synthetic construct
  source 1..20: mol_type = other DNA
gctggtacttgtaatccggg

SEQ ID NO: 27202 - DNA, 20 bp, synthetic construct
  source 1..20: mol_type = other DNA
accatgtccgaggactccgc

SEQ ID NO: 27203 - DNA, 20 bp, synthetic construct
  source 1..20: mol_type = other DNA
gctcggcgttgtgcaagtgc

SEQ ID NO: 27204 - DNA, 20 bp, synthetic construct
  source 1..20: mol_type = other DNA
gtcacctacacgggcagcta

SEQ ID NO: 27205 - DNA, 20 bp, synthetic construct
  source 1..20: mol_type = other DNA
ggagatgtgcgtctgctccg

SEQ ID NO: 27206 - DNA, 20 bp, synthetic construct
  source 1..20: mol_type = other DNA
gctcggacaccgagaacacg

SEQ ID NO: 27207 - DNA, 20 bp, synthetic construct
  source 1..20: mol_type = other DNA
gcggtcagccaggtgctcaa

SEQ ID NO: 27208 - DNA, 20 bp, synthetic construct
  source 1..20: mol_type = other DNA
gacatcgaaggtctcgatgt

SEQ ID NO: 27209 - DNA, 20 bp, synthetic construct
  source 1..20: mol_type = other DNA
caggagaacacgttccccaa

SEQ ID NO: 27210 - DNA, 20 bp, synthetic construct
  source 1..20: mol_type = other DNA
ccccgtgtgcatccgcgagg

SEQ ID NO: 27211 - DNA, 20 bp, synthetic construct
  source 1..20: mol_type = other DNA
gacttccgcgacgtggacat

SEQ ID NO: 27212 - DNA, 20 bp, synthetic construct
  source 1..20: mol_type = other DNA
caagatctaggtctcgtgaa

SEQ ID NO: 27213 - DNA, 20 bp, synthetic construct
  source 1..20: mol_type = other DNA
aaacaacaagaaatagctgc

SEQ ID NO: 27214 - DNA, 20 bp, synthetic construct
  source 1..20: mol_type = other DNA
gaagcagggaaagaaaacgg

SEQ ID NO: 27215 - DNA, 20 bp, synthetic construct
  source 1..20: mol_type = other DNA
gaagtctcgatccaggagta

SEQ ID NO: 27216 - DNA, 20 bp, synthetic construct
  source 1..20: mol_type = other DNA
acgccatcgtagtagaagca

SEQ ID NO: 27217 - DNA, 20 bp, synthetic construct
  source 1..20: mol_type = other DNA
acaggcataggactagaagc

SEQ ID NO: 27218 - DNA, 20 bp, synthetic construct
  source 1..20: mol_type = other DNA
aaagaaagaaagtcatcaag

SEQ ID NO: 27219 - DNA, 20 bp, synthetic construct
  source 1..20: mol_type = other DNA
ccaagtccacctcccttcag

SEQ ID NO: 27220 - DNA, 20 bp, synthetic construct
  source 1..20: mol_type = other DNA
aaacacagcaatggatgcac

SEQ ID NO: 27221 - DNA, 20 bp, synthetic construct
  source 1..20: mol_type = other DNA
agagaaagaaaacgaaagtc

SEQ ID NO: 27222 - DNA, 20 bp, synthetic construct
  source 1..20: mol_type = other DNA
cctgtgtcttgatcttgagc

SEQ ID NO: 27223 - DNA, 20 bp, synthetic construct
  source 1..20: mol_type = other DNA
gaaatcgagatccagaagca

SEQ ID NO: 27224 - DNA, 20 bp, synthetic construct
  source 1..20: mol_type = other DNA
gtaggacaaggagtaggagt

SEQ ID NO: 27225 - DNA, 20 bp, synthetic construct
  source 1..20: mol_type = other DNA
ataatgaaggaagaaaacac

SEQ ID NO: 27226 - DNA, 20 bp, synthetic construct
  source 1..20: mol_type = other DNA
gagccggagcagaagcaaag

SEQ ID NO: 27227 - DNA, 20 bp, synthetic construct
  source 1..20: mol_type = other DNA
gatgacatctatgagagtgg

SEQ ID NO: 27228 - DNA, 20 bp, synthetic construct
  source 1..20: mol_type = other DNA
gtgaaatacctgcatgacct

SEQ ID NO: 27229 - DNA, 20 bp, synthetic construct
  source 1..20: mol_type = other DNA
tgtggaactccgggatacgt

SEQ ID NO: 27230 - DNA, 20 bp, synthetic construct
  source 1..20: mol_type = other DNA
gatgtaggcgatgacaccta

SEQ ID NO: 27231 - DNA, 20 bp, synthetic construct
  source 1..20: mol_type = other DNA
aagccccacttacaagatgt

SEQ ID NO: 27232 - DNA, 20 bp, synthetic construct
  source 1..20: mol_type = other DNA
tgtacaccgggatctcaagg

SEQ ID NO: 27233 - DNA, 20 bp, synthetic construct
  source 1..20: mol_type = other DNA
atgacctgggcattgtacac

SEQ ID NO: 27234 - DNA, 20 bp, synthetic construct
  source 1..20: mol_type = other DNA
ccactcacagctgcatgatg

SEQ ID NO: 27235 - DNA, 20 bp, synthetic construct
  source 1..20: mol_type = other DNA
tcattctcgtcatagaaggg

SEQ ID NO: 27236 - DNA, 20 bp, synthetic construct
  source 1..20: mol_type = other DNA
tgtggaaaaaggcttctaca

SEQ ID NO: 27237 - DNA, 20 bp, synthetic construct
  source 1..20: mol_type = other DNA
catccagggctacaatgttg

SEQ ID NO: 27238 - DNA, 20 bp, synthetic construct
  source 1..20: mol_type = other DNA
tcccggagttccacaggcgg

SEQ ID NO: 27239 - DNA, 20 bp, synthetic construct
  source 1..20: mol_type = other DNA
tcagagatgtcgtcccagta

SEQ ID NO: 27240 - DNA, 20 bp, synthetic construct
  source 1..20: mol_type = other DNA
gaagccctacagcaaggctg

SEQ ID NO: 27241 - DNA, 20 bp, synthetic construct
  source 1..20: mol_type = other DNA
actctcatagatgtcatcca

SEQ ID NO: 27242 - DNA, 20 bp, synthetic construct
  source 1..20: mol_type = other DNA
gaccggaccatcatgcccga

SEQ ID NO: 27243 - DNA, 20 bp, synthetic construct
  source 1..20: mol_type = other DNA
gaagtggaccaagcccgcga

SEQ ID NO: 27244 - DNA, 20 bp, synthetic construct
  source 1..20: mol_type = other DNA
atgctcagattggtctacgc

SEQ ID NO: 27245 - DNA, 20 bp, synthetic construct
  source 1..20: mol_type = other DNA
cccgggacccgccttagccg

SEQ ID NO: 27246 - DNA, 20 bp, synthetic construct
  source 1..20: mol_type = other DNA
aggcgaagagtgacgccagg

SEQ ID NO: 27247 - DNA, 20 bp, synthetic construct
  source 1..20: mol_type = other DNA
gagatctgggcgatcagtga

SEQ ID NO: 27248 - DNA, 20 bp, synthetic construct
  source 1..20: mol_type = other DNA
actgctgggtcacagagact

SEQ ID NO: 27249 - DNA, 20 bp, synthetic construct
  source 1..20: mol_type = other DNA
cagtgtcagagtgacgtggt

SEQ ID NO: 27250 - DNA, 20 bp, synthetic construct
  source 1..20: mol_type = other DNA
ctgaggttgaccatcatggc

SEQ ID NO: 27251 - DNA, 20 bp, synthetic construct
  source 1..20: mol_type = other DNA
aatctgagcataccatggta

SEQ ID NO: 27252 - DNA, 20 bp, synthetic construct
  source 1..20: mol_type = other DNA
tctgtagttggaagtcaacc

SEQ ID NO: 27253 - DNA, 20 bp, synthetic construct
  source 1..20: mol_type = other DNA
agtggagctctccacaattg

SEQ ID NO: 27254 - DNA, 20 bp, synthetic construct
  source 1..20: mol_type = other DNA
cctaatttgccgtctatacg

SEQ ID NO: 27255 - DNA, 20 bp, synthetic construct
  source 1..20: mol_type = other DNA
gagatgcccgaagctgccgt

SEQ ID NO: 27256 - DNA, 20 bp, synthetic construct
  source 1..20: mol_type = other DNA
gtgggagtacccaggttccg

SEQ ID NO: 27257 - DNA, 20 bp, synthetic construct
  source 1..20: mol_type = other DNA
ggatgagtatgagtacgtgt

SEQ ID NO: 27258 - DNA, 20 bp, synthetic construct
  source 1..20: mol_type = other DNA
gtcactgacatagaacgtgg

SEQ ID NO: 27259 - DNA, 20 bp, synthetic construct
  source 1..20: mol_type = other DNA
gtggaggaaatgtcccgcga

SEQ ID NO: 27260 - DNA, 20 bp, synthetic construct
  source 1..20: mol_type = other DNA
tccaggcactcacatacccg

SEQ ID NO: 27261 - DNA, 20 bp, synthetic construct
  source 1..20: mol_type = other DNA
gcaaggccccgaacacacca

SEQ ID NO: 27262 - DNA, 20 bp, synthetic construct
  source 1..20: mol_type = other DNA
ggtgtcagagaactcgaggt

SEQ ID NO: 27263 - DNA, 20 bp, synthetic construct
  source 1..20: mol_type = other DNA
gagcatatgaagtggaaagg

SEQ ID NO: 27264 - DNA, 20 bp, synthetic construct
  source 1..20: mol_type = other DNA
gtcacacacctcatctgacg

SEQ ID NO: 27265 - DNA, 20 bp, synthetic construct
  source 1..20: mol_type = other DNA
agaccgccagcgctcataca

SEQ ID NO: 27266 - DNA, 20 bp, synthetic construct
  source 1..20: mol_type = other DNA
gtactgcctaatctgcgtga

SEQ ID NO: 27267 - DNA, 20 bp, synthetic construct
  source 1..20: mol_type = other DNA
tcgacgagtttcccatcagg

SEQ ID NO: 27268 - DNA, 20 bp, synthetic construct
  source 1..20: mol_type = other DNA
ccaggaagtcagctcacgct

SEQ ID NO: 27269 - DNA, 20 bp, synthetic construct
  source 1..20: mol_type = other DNA
ttcacagctaatcaaagacc

SEQ ID NO: 27270 - DNA, 20 bp, synthetic construct
  source 1..20: mol_type = other DNA
ggccggcctgatgagataga

SEQ ID NO: 27271 - DNA, 20 bp, synthetic construct
  source 1..20: mol_type = other DNA
tcaatggtgctttccgatcg

SEQ ID NO: 27272 - DNA, 20 bp, synthetic construct
  source 1..20: mol_type = other DNA
tagcgggatactgtgtagaa

SEQ ID NO: 27273 - DNA, 20 bp, synthetic construct
  source 1..20: mol_type = other DNA
atgttcatgattgagatcgc

SEQ ID NO: 27274 - DNA, 20 bp, synthetic construct
  source 1..20: mol_type = other DNA
aaagctggtgtactgataag

SEQ ID NO: 27275 - DNA, 20 bp, synthetic construct
  source 1..20: mol_type = other DNA
tgtttctttcagctcgactg

SEQ ID NO: 27276 - DNA, 20 bp, synthetic construct
  source 1..20: mol_type = other DNA
agtgttgtaatggcctcccc

SEQ ID NO: 27277 - DNA, 20 bp, synthetic construct
  source 1..20: mol_type = other DNA
catagactaaccacatgagg

SEQ ID NO: 27278 - DNA, 20 bp, synthetic construct
  source 1..20: mol_type = other DNA
gtccacgatattgtaaacag

SEQ ID NO: 27279 - DNA, 20 bp, synthetic construct
  source 1..20: mol_type = other DNA
gctgtataccgagacagatt

SEQ ID NO: 27280 - DNA, 20 bp, synthetic construct
  source 1..20: mol_type = other DNA
aaatctctctagatgagtac

SEQ ID NO: 27281 - DNA, 20 bp, synthetic construct
  source 1..20: mol_type = other DNA
caaagcacgaataaattcac

SEQ ID NO: 27282 - DNA, 20 bp, synthetic construct
  source 1..20: mol_type = other DNA
taacgatgaagttcacatag

SEQ ID NO: 27283 - DNA, 20 bp, synthetic construct
  source 1..20: mol_type = other DNA
gagctccacagtgatccaaa

SEQ ID NO: 27284 - DNA, 20 bp, synthetic construct
  source 1..20: mol_type = other DNA
taccatgcaggtcacgtcct

SEQ ID NO: 27285 - DNA, 20 bp, synthetic construct
  source 1..20: mol_type = other DNA
atttctcaagacaagaagat

SEQ ID NO: 27286 - DNA, 20 bp, synthetic construct
  source 1..20: mol_type = other DNA
cttgtcttctgtagaaacca

SEQ ID NO: 27287 - DNA, 20 bp, synthetic construct
  source 1..20: mol_type = other DNA
gtacctattacttacatctg

SEQ ID NO: 27288 - DNA, 20 bp, synthetic construct
  source 1..20: mol_type = other DNA
aaatgcgaagtcatatgggt

SEQ ID NO: 27289 - DNA, 20 bp, synthetic construct
  source 1..20: mol_type = other DNA
ggtaggctgtcaccacctca

SEQ ID NO: 27290 - DNA, 20 bp, synthetic construct
  source 1..20: mol_type = other DNA
gtacaaattcggtcatacca

SEQ ID NO: 27291 - DNA, 20 bp, synthetic construct
  source 1..20: mol_type = other DNA
tgctatcccagagtcaaggt

SEQ ID NO: 27292 - DNA, 20 bp, synthetic construct
  source 1..20: mol_type = other DNA
aatgcgagtgctatcccaga

SEQ ID NO: 27293 - DNA, 20 bp, synthetic construct
  source 1..20: mol_type = other DNA
ggtgctcacgtagatcatcc

SEQ ID NO: 27294 - DNA, 20 bp, synthetic construct
  source 1..20: mol_type = other DNA
gcactcaagccatatgcaga

SEQ ID NO: 27295 - DNA, 20 bp, synthetic construct
  source 1..20: mol_type = other DNA
gcagagccagatggcacgga

SEQ ID NO: 27296 - DNA, 20 bp, synthetic construct
  source 1..20: mol_type = other DNA
tgcagaagccagtttgcctg

SEQ ID NO: 27297 - DNA, 20 bp, synthetic construct
  source 1..20: mol_type = other DNA
agaggtaactgaaagagctg

SEQ ID NO: 27298 - DNA, 20 bp, synthetic construct
  source 1..20: mol_type = other DNA
agagccaagagaaaactgga

SEQ ID NO: 27299 - DNA, 20 bp, synthetic construct
  source 1..20: mol_type = other DNA
cctggatgacctgcagatgg

SEQ ID NO: 27300 - DNA, 20 bp, synthetic construct
  source 1..20: mol_type = other DNA
tcacaaccaggcccgcattg

SEQ ID NO: 27301 - DNA, 20 bp, synthetic construct
  source 1..20: mol_type = other DNA
agatagtgtggctgagcttg

SEQ ID NO: 27302 - DNA, 20 bp, synthetic construct
  source 1..20: mol_type = other DNA
gttgtagtagatgtaatccc

SEQ ID NO: 27303 - DNA, 20 bp, synthetic construct
  source 1..20: mol_type = other DNA
gccacggaaaagccagaccg

SEQ ID NO: 27304 - DNA, 20 bp, synthetic construct
  source 1..20: mol_type = other DNA
ggtgtctaagcgctcgcgga

SEQ ID NO: 27305 - DNA, 20 bp, synthetic construct
  source 1..20: mol_type = other DNA
tagacgacgatgccgccctg

SEQ ID NO: 27306 - DNA, 20 bp, synthetic construct
  source 1..20: mol_type = other DNA
gggtcggagtggacatcgga

SEQ ID NO: 27307 - DNA, 20 bp, synthetic construct
  source 1..20: mol_type = other DNA
ggggctactcgaaacaggta

SEQ ID NO: 27308 - DNA, 20 bp, synthetic construct
  source 1..20: mol_type = other DNA
aagacgtggacaagggcaca

SEQ ID NO: 27309 - DNA, 20 bp, synthetic construct
  source 1..20: mol_type = other DNA
ggagcaagctgtccccgtca

SEQ ID NO: 27310 - DNA, 20 bp, synthetic construct
  source 1..20: mol_type = other DNA
aggtcttggtggccaaatgc

SEQ ID NO: 27311 - DNA, 20 bp, synthetic construct
  source 1..20: mol_type = other DNA
gcggtggtagtgcctcaagg

SEQ ID NO: 27312 - DNA, 20 bp, synthetic construct
  source 1..20: mol_type = other DNA
gtggtagaactgctctccgt

SEQ ID NO: 27313 - DNA, 20 bp, synthetic construct
  source 1..20: mol_type = other DNA
ctcaaaccaacggttcctgg

SEQ ID NO: 27314 - DNA, 20 bp, synthetic construct
  source 1..20: mol_type = other DNA
gactcggatgaacccttcgg

SEQ ID NO: 27315 - DNA, 20 bp, synthetic construct
  source 1..20: mol_type = other DNA
tgccaagaggactcagactg

SEQ ID NO: 27316 - DNA, 20 bp, synthetic construct
  source 1..20: mol_type = other DNA
agacaattgatcctgtttgg

SEQ ID NO: 27317 - DNA, 20 bp, synthetic construct
  source 1..20: mol_type = other DNA
acaccgtatgagcggcagga

SEQ ID NO: 27318 - DNA, 20 bp, synthetic construct
  source 1..20: mol_type = other DNA
gtatagtgttccctggaacc

SEQ ID NO: 27319 - DNA, 20 bp, synthetic construct
  source 1..20: mol_type = other DNA
gttggtgttaacctccccag

SEQ ID NO: 27320 - DNA, 20 bp, synthetic construct
  source 1..20: mol_type = other DNA
agtggagacaccgaacgctc

SEQ ID NO: 27321 - DNA, 20 bp, synthetic construct
  source 1..20: mol_type = other DNA
ccatgtacataagctcccgg

SEQ ID NO: 27322 - DNA, 20 bp, synthetic construct
  source 1..20: mol_type = other DNA
aacactatacctgagtgaag

SEQ ID NO: 27323 - DNA, 20 bp, synthetic construct
  source 1..20: mol_type = other DNA
tggggaggttaacaccaacg

SEQ ID NO: 27324 - DNA, 20 bp, synthetic construct
  source 1..20: mol_type = other DNA
gctgcgtagcacagagcaga

SEQ ID NO: 27325 - DNA, 20 bp, synthetic construct
  source 1..20: mol_type = other DNA
acagcccccaacctgctatg

SEQ ID NO: 27326 - DNA, 20 bp, synthetic construct
  source 1..20: mol_type = other DNA
acctcccctgagaagagcag

SEQ ID NO: 27327 - DNA, 20 bp, synthetic construct
  source 1..20: mol_type = other DNA
tggcagaggccatagtgacg

SEQ ID NO: 27328 - DNA, 20 bp, synthetic construct
  source 1..20: mol_type = other DNA
agggctgtgcatctccttgg

SEQ ID NO: 27329 - DNA, 20 bp, synthetic construct
  source 1..20: mol_type = other DNA
gggtgggctatagtagcgca

SEQ ID NO: 27330 - DNA, 20 bp, synthetic construct
  source 1..20: mol_type = other DNA
cccggatcgataccagcccc

SEQ ID NO: 27331 - DNA, 20 bp, synthetic construct
  source 1..20: mol_type = other DNA
gatgctcaacgccagtacca

SEQ ID NO: 27332 - DNA, 20 bp, synthetic construct
  source 1..20: mol_type = other DNA
gctgccaatactccaacagt

SEQ ID NO: 27333 - DNA, 20 bp, synthetic construct
  source 1..20: mol_type = other DNA
tcctgctgcaccattagccc

SEQ ID NO: 27334 - DNA, 20 bp, synthetic construct
  source 1..20: mol_type = other DNA
aaccattcagagcataactc

SEQ ID NO: 27335 - DNA, 20 bp, synthetic construct
  source 1..20: mol_type = other DNA
atgacagaaacagctcaggt

SEQ ID NO: 27336 - DNA, 20 bp, synthetic construct
  source 1..20: mol_type = other DNA
atttaacagagctaccatag

SEQ ID NO: 27337 - DNA, 20 bp, synthetic construct
  source 1..20: mol_type = other DNA
caagagatggtccaaatagg

SEQ ID NO: 27338 - DNA, 20 bp, synthetic construct
  source 1..20: mol_type = other DNA
aaataactcacatcacacaa

SEQ ID NO: 27339 - DNA, 20 bp, synthetic construct
  source 1..20: mol_type = other DNA
aatgattcctggcaaagcaa

SEQ ID NO: 27340 - DNA, 20 bp, synthetic construct
  source 1..20: mol_type = other DNA
ttgctgagtcaaaaggcact

SEQ ID NO: 27341 - DNA, 20 bp, synthetic construct
  source 1..20: mol_type = other DNA
ctggtgttggaagttacagg

SEQ ID NO: 27342 - DNA, 20 bp, synthetic construct
  source 1..20: mol_type = other DNA
gacactgctagtgcagttga

SEQ ID NO: 27343 - DNA, 20 bp, synthetic construct
  source 1..20: mol_type = other DNA
acaatggtgcctacagaaag

SEQ ID NO: 27344 - DNA, 20 bp, synthetic construct
  source 1..20: mol_type = other DNA
atggaaacttactcattggg

SEQ ID NO: 27345 - DNA, 20 bp, synthetic construct
  source 1..20: mol_type = other DNA
tgtacttacagatattgctg

SEQ ID NO: 27346 - DNA, 20 bp, synthetic construct
  source 1..20: mol_type = other DNA
agaagaagttgcaggaactc

SEQ ID NO: 27347 - DNA, 20 bp, synthetic construct
  source 1..20: mol_type = other DNA
aaaacacatcagtataacat

SEQ ID NO: 27348 - DNA, 20 bp, synthetic construct
  source 1..20: mol_type = other DNA
ctatgtggcagatatcgagg

SEQ ID NO: 27349 - DNA, 20 bp, synthetic construct
  source 1..20: mol_type = other DNA
cagaaaacatcccagaaaag

SEQ ID NO: 27350 - DNA, 20 bp, synthetic construct
  source 1..20: mol_type = other DNA
taaactatcagggctgtcga

SEQ ID NO: 27351 - DNA, 20 bp, synthetic construct
  source 1..20: mol_type = other DNA
aggaagattatgatcgcctg

SEQ ID NO: 27352 - DNA, 20 bp, synthetic construct
  source 1..20: mol_type = other DNA
tataacatcggtatctgggt

SEQ ID NO: 27353 - DNA, 20 bp, synthetic construct
  source 1..20: mol_type = other DNA
gccactcacctaaactatca

SEQ ID NO: 27354 - DNA, 20 bp, synthetic construct
  source 1..20: mol_type = other DNA
gatccttcttattcccaacc

SEQ ID NO: 27355 - DNA, 20 bp, synthetic construct
  source 1..20: mol_type = other DNA
acagaaatgcttgacttctg

SEQ ID NO: 27356 - DNA, 20 bp, synthetic construct
  source 1..20: mol_type = other DNA
cacatagttctcaaacactg

SEQ ID NO: 27357 - DNA, 20 bp, synthetic construct
  source 1..20: mol_type = other DNA
tatcgaggtggatggaaagc

SEQ ID NO: 27358 - DNA, 20 bp, synthetic construct
  source 1..20: mol_type = other DNA
cttgctcatagtcttcagca

SEQ ID NO: 27359 - DNA, 20 bp, synthetic construct
  source 1..20: mol_type = other DNA
ttcggaatgatgagcacaca

SEQ ID NO: 27360 - DNA, 20 bp, synthetic construct
  source 1..20: mol_type = other DNA
actgtgggcacatacacctc

SEQ ID NO: 27361 - DNA, 20 bp, synthetic construct
  source 1..20: mol_type = other DNA
gagcaagcatgtctttccac

SEQ ID NO: 27362 - DNA, 20 bp, synthetic construct
  source 1..20: mol_type = other DNA
ggacccggcaggttgagcac

SEQ ID NO: 27363 - DNA, 20 bp, synthetic construct
  source 1..20: mol_type = other DNA
aactcgtcgagctgcgcgtg

SEQ ID NO: 27364 - DNA, 20 bp, synthetic construct
  source 1..20: mol_type = other DNA
cgacgagttcacggcctgcg

SEQ ID NO: 27365 - DNA, 20 bp, synthetic construct
  source 1..20: mol_type = other DNA
aacgcgaggagagcctgcgc

SEQ ID NO: 27366 - DNA, 20 bp, synthetic construct
  source 1..20: mol_type = other DNA
gtgctcaacctgccgggtcc

SEQ ID NO: 27367 - DNA, 20 bp, synthetic construct
  source 1..20: mol_type = other DNA
cgctcccgcgcgccctggag

SEQ ID NO: 27368 - DNA, 20 bp, synthetic construct
  source 1..20: mol_type = other DNA
gggagcgcggggccaggacc

SEQ ID NO: 27369 - DNA, 20 bp, synthetic construct
  source 1..20: mol_type = other DNA
tccagggcgcgcgggagcgc

SEQ ID NO: 27370 - DNA, 20 bp, synthetic construct
  source 1..20: mol_type = other DNA
cgcgcagctcgacgagttca

SEQ ID NO: 27371 - DNA, 20 bp, synthetic construct
  source 1..20: mol_type = other DNA
ggcctgagcccgggccgcgc

SEQ ID NO: 27372 - DNA, 20 bp, synthetic construct
  source 1..20: mol_type = other DNA
gttcacggcctgcgcggccc

SEQ ID NO: 27373 - DNA, 20 bp, synthetic construct
  source 1..20: mol_type = other DNA
gagagcctgcgccggagccg

SEQ ID NO: 27374 - DNA, 20 bp, synthetic construct
  source 1..20: mol_type = other DNA
gcccgcccgcgcccgctcca

SEQ ID NO: 27375 - DNA, 20 bp, synthetic construct
  source 1..20: mol_type = other DNA
gctcccgcgcgccctggagc

SEQ ID NO: 27376 - DNA, 20 bp, synthetic construct
  source 1..20: mol_type = other DNA
ccagggcgcgcgggagcgcg

SEQ ID NO: 27377 - DNA, 20 bp, synthetic construct
  source 1..20: mol_type = other DNA
gcagcacacacctcacaacg

SEQ ID NO: 27378 - DNA, 20 bp, synthetic construct
  source 1..20: mol_type = other DNA
gcggtgtatacataatagca

SEQ ID NO: 27379 - DNA, 20 bp, synthetic construct
  source 1..20: mol_type = other DNA
gtgtggacatccgccgtgga

SEQ ID NO: 27380 - DNA, 20 bp, synthetic construct
  source 1..20: mol_type = other DNA
cagtgtaaccagatccacca

SEQ ID NO: 27381 - DNA, 20 bp, synthetic construct
  source 1..20: mol_type = other DNA
gaaatgagccccccaataca

SEQ ID NO: 27382 - DNA, 20 bp, synthetic construct
  source 1..20: mol_type = other DNA
gaacgacgtaccctgagtgt

SEQ ID NO: 27383 - DNA, 20 bp, synthetic construct
  source 1..20: mol_type = other DNA
gcactgcgtaagtcaggttc

SEQ ID NO: 27384 - DNA, 20 bp, synthetic construct
  source 1..20: mol_type = other DNA
agatgcctgacgctcggcag

SEQ ID NO: 27385 - DNA, 20 bp, synthetic construct
  source 1..20: mol_type = other DNA
ttggcccaaccagccagatg

SEQ ID NO: 27386 - DNA, 20 bp, synthetic construct
  source 1..20: mol_type = other DNA
atacccaccttatacatgat

SEQ ID NO: 27387 - DNA, 20 bp, synthetic construct
  source 1..20: mol_type = other DNA
attaccttgcatccaagaca

SEQ ID NO: 27388 - DNA, 20 bp, synthetic construct
  source 1..20: mol_type = other DNA
gggcctacaagtatctacta

SEQ ID NO: 27389 - DNA, 20 bp, synthetic construct
  source 1..20: mol_type = other DNA
ccctgccctacaatctccac

SEQ ID NO: 27390 - DNA, 20 bp, synthetic construct
  source 1..20: mol_type = other DNA
gccctcgataacaatgtcac

SEQ ID NO: 27391 - DNA, 20 bp, synthetic construct
  source 1..20: mol_type = other DNA
gcactggccaactccgtgca

SEQ ID NO: 27392 - DNA, 20 bp, synthetic construct
  source 1..20: mol_type = other DNA
catgtggagcgattccggta

SEQ ID NO: 27393 - DNA, 20 bp, synthetic construct
  source 1..20: mol_type = other DNA
tccggtgtgagctcaaagca

SEQ ID NO: 27394 - DNA, 20 bp, synthetic construct
  source 1..20: mol_type = other DNA
tccactctaccatgagtgtg

SEQ ID NO: 27395 - DNA, 20 bp, synthetic construct
  source 1..20: mol_type = other DNA
ggagacacaagcagtgcact

SEQ ID NO: 27396 - DNA, 20 bp, synthetic construct
  source 1..20: mol_type = other DNA
ttgctttgagctcacaccgg

SEQ ID NO: 27397 - DNA, 20 bp, synthetic construct
  source 1..20: mol_type = other DNA
tgtctaccttctctgaaggt

SEQ ID NO: 27398 - DNA, 20 bp, synthetic construct
  source 1..20: mol_type = other DNA
tgggatgagagcagatgccg

SEQ ID NO: 27399 - DNA, 20 bp, synthetic construct
  source 1..20: mol_type = other DNA
aagctacagacctgtctctg

SEQ ID NO: 27400 - DNA, 20 bp, synthetic construct
  source 1..20: mol_type = other DNA
gaaggtagacacatcagtgc

SEQ ID NO: 27401 - DNA, 20 bp, synthetic construct
  source 1..20: mol_type = other DNA
cggacacagtcagaggcgaa

SEQ ID NO: 27402 - DNA, 20 bp, synthetic construct
  source 1..20: mol_type = other DNA
tgcagtggttgacagagtgt

SEQ ID NO: 27403 - DNA, 20 bp, synthetic construct
  source 1..20: mol_type = other DNA
tctgctctcatcccacgagc

SEQ ID NO: 27404 - DNA, 20 bp, synthetic construct
  source 1..20: mol_type = other DNA
gcaaggggactcgatgacat

SEQ ID NO: 27405 - DNA, 20 bp, synthetic construct
  source 1..20: mol_type = other DNA
acctagaattacagttgcag

SEQ ID NO: 27406 - DNA, 20 bp, synthetic construct
  source 1..20: mol_type = other DNA
caagccccccatcccgacac

SEQ ID NO: 27407 - DNA, 20 bp, synthetic construct
  source 1..20: mol_type = other DNA
atgaccgcttcacctctcag

SEQ ID NO: 27408 - DNA, 20 bp, synthetic construct
  source 1..20: mol_type = other DNA
taaggtaagcagatccatgc

SEQ ID NO: 27409 - DNA, 20 bp, synthetic construct
  source 1..20: mol_type = other DNA
tctgcttaccttaccgtcca

SEQ ID NO: 27410 - DNA, 20 bp, synthetic construct
  source 1..20: mol_type = other DNA
gcgactacaagattaacact

SEQ ID NO: 27411 - DNA, 20 bp, synthetic construct
  source 1..20: mol_type = other DNA
ggagatgatcatccacaatg

SEQ ID NO: 27412 - DNA, 20 bp, synthetic construct
  source 1..20: mol_type = other DNA
atgtggagcccagtgattcg

SEQ ID NO: 27413 - DNA, 20 bp, synthetic construct
  source 1..20: mol_type = other DNA
attgtggatgatcatctccg

SEQ ID NO: 27414 - DNA, 20 bp, synthetic construct
  source 1..20: mol_type = other DNA
gggctggaagctcatcatgt

SEQ ID NO: 27415 - DNA, 20 bp, synthetic construct
  source 1..20: mol_type = other DNA
ggtaaacttgataatacacc

SEQ ID NO: 27416 - DNA, 20 bp, synthetic construct
  source 1..20: mol_type = other DNA
caatgggactttgacttgcg

SEQ ID NO: 27417 - DNA, 20 bp, synthetic construct
  source 1..20: mol_type = other DNA
ttacttgtctaccctcacac

SEQ ID NO: 27418 - DNA, 20 bp, synthetic construct
  source 1..20: mol_type = other DNA
aagcggtcattggtgatgat

SEQ ID NO: 27419 - DNA, 20 bp, synthetic construct
  source 1..20: mol_type = other DNA
aatagcttgaatggctgacc

SEQ ID NO: 27420 - DNA, 20 bp, synthetic construct
  source 1..20: mol_type = other DNA
ggtagacaagtaacttcaca

SEQ ID NO: 27421 - DNA, 20 bp, synthetic construct
  source 1..20: mol_type = other DNA
actgtgattcggtgtcccca

SEQ ID NO: 27422 - DNA, 20 bp, synthetic construct
  source 1..20: mol_type = other DNA
gacgagcccccgccacgtgg

SEQ ID NO: 27423 - DNA, 20 bp, synthetic construct
  source 1..20: mol_type = other DNA
tttgccactgcgtatcacag

SEQ ID NO: 27424 - DNA, 20 bp, synthetic construct
  source 1..20: mol_type = other DNA
tataacattcctcttagcag

SEQ ID NO: 27425 - DNA, 20 bp, synthetic construct
  source 1..20: mol_type = other DNA
tcaaggcacttgatatacca

SEQ ID NO: 27426 - DNA, 20 bp, synthetic construct
  source 1..20: mol_type = other DNA
aaaggtggttaccttagtga

SEQ ID NO: 27427 - DNA, 20 bp, synthetic construct
  source 1..20: mol_type = other DNA
gaatgaagggtcgtgcccgt

SEQ ID NO: 27428 - DNA, 20 bp, synthetic construct
  source 1..20: mol_type = other DNA
gaaactagtagtattcagtt

SEQ ID NO: 27429 - DNA, 20 bp, synthetic construct
  source 1..20: mol_type = other DNA
ggctccctctgaggcgaccg

SEQ ID NO: 27430 - DNA, 20 bp, synthetic construct
  source 1..20: mol_type = other DNA
caggtgatattcagaccaca

SEQ ID NO: 27431 - DNA, 20 bp, synthetic construct
  source 1..20: mol_type = other DNA
ctggaggcaccgacaggaca

SEQ ID NO: 27432 - DNA, 20 bp, synthetic construct
  source 1..20: mol_type = other DNA
tgtacatttctatggtgctg

SEQ ID NO: 27433 - DNA, 20 bp, synthetic construct
  source 1..20: mol_type = other DNA
taaagagtactgtacatatg

SEQ ID NO: 27434 - DNA, 20 bp, synthetic construct
  source 1..20: mol_type = other DNA
ggctatatcagagtactctg

SEQ ID NO: 27435 - DNA, 20 bp, synthetic construct
  source 1..20: mol_type = other DNA
gaaacagtgatgctgttaag

SEQ ID NO: 27436 - DNA, 20 bp, synthetic construct
  source 1..20: mol_type = other DNA
agtgacaaagactcatcagt

SEQ ID NO: 27437 - DNA, 20 bp, synthetic construct
  source 1..20: mol_type = other DNA
tgcacgtggaaagtgaccat

SEQ ID NO: 27438 - DNA, 20 bp, synthetic construct
  source 1..20: mol_type = other DNA
gtggcaagcgggcagaatca

SEQ ID NO: 27439 - DNA, 20 bp, synthetic construct
  source 1..20: mol_type = other DNA
agagtaaggggatgacaccg

SEQ ID NO: 27440 - DNA, 20 bp, synthetic construct
  source 1..20: mol_type = other DNA
agatagaaggacctggtcag

SEQ ID NO: 27441 - DNA, 20 bp, synthetic construct
  source 1..20: mol_type = other DNA
tcacccggaaaaggaatgag

SEQ ID NO: 27442 - DNA, 20 bp, synthetic construct
  source 1..20: mol_type = other DNA
agagggtgcgagtactccta

SEQ ID NO: 27443 - DNA, 20 bp, synthetic construct
  source 1..20: mol_type = other DNA
ggtgtcatccccttactctg

SEQ ID NO: 27444 - DNA, 20 bp, synthetic construct
  source 1..20: mol_type = other DNA
gaccatgggctccagataga

SEQ ID NO: 27445 - DNA, 20 bp, synthetic construct
  source 1..20: mol_type = other DNA
cccaggataagagagtcgct

SEQ ID NO: 27446 - DNA, 20 bp, synthetic construct
  source 1..20: mol_type = other DNA
cactttccacgtgcacccag

SEQ ID NO: 27447 - DNA, 20 bp, synthetic construct
  source 1..20: mol_type = other DNA
actcctctggcagatgatgg

SEQ ID NO: 27448 - DNA, 20 bp, synthetic construct
  source 1..20: mol_type = other DNA
aaggcatcgggaaagagaag

SEQ ID NO: 27449 - DNA, 20 bp, synthetic construct
  source 1..20: mol_type = other DNA
atgccttatccaaattacag

SEQ ID NO: 27450 - DNA, 20 bp, synthetic construct
  source 1..20: mol_type = other DNA
cgggtgaaatgtgtcaatga

SEQ ID NO: 27451 - DNA, 20 bp, synthetic construct
  source 1..20: mol_type = other DNA
aggacctggtcagtggcaag

SEQ ID NO: 27452 - DNA, 20 bp, synthetic construct
  source 1..20: mol_type = other DNA
gagaaccctgagctacgcca

SEQ ID NO: 27453 - DNA, 20 bp, synthetic construct
  source 1..20: mol_type = other DNA
acagaacgccctgtcggaca

SEQ ID NO: 27454 - DNA, 20 bp, synthetic construct
  source 1..20: mol_type = other DNA
tgtggagacccacccagcac

SEQ ID NO: 27455 - DNA, 20 bp, synthetic construct
  source 1..20: mol_type = other DNA
agcctcgggaacttccggca

SEQ ID NO: 27456 - DNA, 20 bp, synthetic construct
  source 1..20: mol_type = other DNA
tcaaaaccgggagaagtccg

SEQ ID NO: 27457 - DNA, 20 bp, synthetic construct
  source 1..20: mol_type = other DNA
tggctgtgatgacagacacc

SEQ ID NO: 27458 - DNA, 20 bp, synthetic construct
  source 1..20: mol_type = other DNA
tgaagatctcaaagtagctg

SEQ ID NO: 27459 - DNA, 20 bp, synthetic construct
  source 1..20: mol_type = other DNA
gggccttcgaggctctccga

SEQ ID NO: 27460 - DNA, 20 bp, synthetic construct
  source 1..20: mol_type = other DNA
cagagaagcccattaggagc

SEQ ID NO: 27461 - DNA, 20 bp, synthetic construct
  source 1..20: mol_type = other DNA
agacagcccagaagtcgccc

SEQ ID NO: 27462 - DNA, 20 bp, synthetic construct
  source 1..20: mol_type = other DNA
gtccacacgaccatctcctg

SEQ ID NO: 27463 - DNA, 20 bp, synthetic construct
  source 1..20: mol_type = other DNA
attgacatcagcactcatca

SEQ ID NO: 27464 - DNA, 20 bp, synthetic construct
  source 1..20: mol_type = other DNA
cctatggccctacttactgg

SEQ ID NO: 27465 - DNA, 20 bp, synthetic construct
  source 1..20: mol_type = other DNA
tgagggacattggagagagg

SEQ ID NO: 27466 - DNA, 20 bp, synthetic construct
  source 1..20: mol_type = other DNA
ggacctaaaaaagcaaaagg

SEQ ID NO: 27467 - DNA, 20 bp, synthetic construct
  source 1..20: mol_type = other DNA
ggatgagcccacagtacacg

SEQ ID NO: 27468 - DNA, 20 bp, synthetic construct
  source 1..20: mol_type = other DNA
taggaatactcaccaccccc

SEQ ID NO: 27469 - DNA, 20 bp, synthetic construct
  source 1..20: mol_type = other DNA
atagccatgagcatgccagt

SEQ ID NO: 27470 - DNA, 20 bp, synthetic construct
  source 1..20: mol_type = other DNA
agtggagagcgcccaagcgg

SEQ ID NO: 27471 - DNA, 20 bp, synthetic construct
  source 1..20: mol_type = other DNA
cgaggcgccgtagatgtgcg

SEQ ID NO: 27472 - DNA, 20 bp, synthetic construct
  source 1..20: mol_type = other DNA
gtcactctcgcccgagaagg

SEQ ID NO: 27473 - DNA, 20 bp, synthetic construct
  source 1..20: mol_type = other DNA
cattctcgccgtctgacacg

SEQ ID NO: 27474 - DNA, 20 bp, synthetic construct
  source 1..20: mol_type = other DNA
gttcattgaggtatctaaag

SEQ ID NO: 27475 - DNA, 20 bp, synthetic construct
  source 1..20: mol_type = other DNA
gatgtgcaagcagggatacc

SEQ ID NO: 27476 - DNA, 20 bp, synthetic construct
  source 1..20: mol_type = other DNA
ctgcccgcccggctcaatga

SEQ ID NO: 27477 - DNA, 20 bp, synthetic construct
  source 1..20: mol_type = other DNA
ggaagggcgcgtgctcgcgg

SEQ ID NO: 27478 - DNA, 20 bp, synthetic construct
  source 1..20: mol_type = other DNA
cctgcacccctccttcaacc

SEQ ID NO: 27479 - DNA, 20 bp, synthetic construct
  source 1..20: mol_type = other DNA
gacccgcagctcgtggatgt

SEQ ID NO: 27480 - DNA, 20 bp, synthetic construct
  source 1..20: mol_type = other DNA
gcacaggcagcatgttggag

SEQ ID NO: 27481 - DNA, 20 bp, synthetic construct
  source 1..20: mol_type = other DNA
gcgcaggttgaactggatgc

SEQ ID NO: 27482 - DNA, 20 bp, synthetic construct
  source 1..20: mol_type = other DNA
gtgtgacttgatgagccgtg

SEQ ID NO: 27483 - DNA, 20 bp, synthetic construct
  source 1..20: mol_type = other DNA
tgcccgaaacccaaaggacg

SEQ ID NO: 27484 - DNA, 20 bp, synthetic construct
  source 1..20: mol_type = other DNA
gtgctggtaccaggacccgt

SEQ ID NO: 27485 - DNA, 20 bp, synthetic construct
  source 1..20: mol_type = other DNA
tggatcattgacctcaagga

SEQ ID NO: 27486 - DNA, 20 bp, synthetic construct
  source 1..20: mol_type = other DNA
gatactggacatgatctacc

SEQ ID NO: 27487 - DNA, 20 bp, synthetic construct
  source 1..20: mol_type = other DNA
gtccagtatctggctcaccc

SEQ ID NO: 27488 - DNA, 20 bp, synthetic construct
  source 1..20: mol_type = other DNA
ccttgaggtcaatgatccag

SEQ ID NO: 27489 - DNA, 20 bp, synthetic construct
  source 1..20: mol_type = other DNA
tcacttaccagacttggggt

SEQ ID NO: 27490 - DNA, 20 bp, synthetic construct
  source 1..20: mol_type = other DNA
ccgggctcccatctacgtac

SEQ ID NO: 27491 - DNA, 20 bp, synthetic construct
  source 1..20: mol_type = other DNA
tctgatccaacagagtctga

SEQ ID NO: 27492 - DNA, 20 bp, synthetic construct
  source 1..20: mol_type = other DNA
catcaagtcacacctgcccc

SEQ ID NO: 27493 - DNA, 20 bp, synthetic construct
  source 1..20: mol_type = other DNA
ggacccagccatgcacctga

SEQ ID NO: 27494 - DNA, 20 bp, synthetic construct
  source 1..20: mol_type = other DNA
catacggtggaaatggtagt

SEQ ID NO: 27495 - DNA, 20 bp, synthetic construct
  source 1..20: mol_type = other DNA
gatgagcaggtcatcaggtc

SEQ ID NO: 27496 - DNA, 20 bp, synthetic construct
  source 1..20: mol_type = other DNA
gagcccggttacacttctct

SEQ ID NO: 27497 - DNA, 20 bp, synthetic construct
  source 1..20: mol_type = other DNA
ggcggccactcgtacatggg

SEQ ID NO: 27498 - DNA, 20 bp, synthetic construct
  source 1..20: mol_type = other DNA
catgacgatgagcgcgatgt

SEQ ID NO: 27499 - DNA, 20 bp, synthetic construct
  source 1..20: mol_type = other DNA
aaggccaagaagaccaacgc

SEQ ID NO: 27500 - DNA, 20 bp, synthetic construct
  source 1..20: mol_type = other DNA
gtgcttcatcaagctaccca

SEQ ID NO: 27501 - DNA, 20 bp, synthetic construct
  source 1..20: mol_type = other DNA
ggtagatctcgctcagcgtc

SEQ ID NO: 27502 - DNA, 20 bp, synthetic construct
  source 1..20: mol_type = other DNA
agtggccgttcatcatgccc

SEQ ID NO: 27503 - DNA, 20 bp, synthetic construct
  source 1..20: mol_type = other DNA
tcgaggagggctcctttcgg

SEQ ID NO: 27504 - DNA, 20 bp, synthetic construct
  source 1..20: mol_type = other DNA
tggacgggccggacgacgcg

SEQ ID NO: 27505 - DNA, 20 bp, synthetic construct
  source 1..20: mol_type = other DNA
catgtacgagtggccgccgt

SEQ ID NO: 27506 - DNA, 20 bp, synthetic construct
  source 1..20: mol_type = other DNA
catttccttcggaagccgcg

SEQ ID NO: 27507 - DNA, 20 bp, synthetic construct
  source 1..20: mol_type = other DNA
ggaagccgtaggtgtccggg

SEQ ID NO: 27508 - DNA, 20 bp, synthetic construct
  source 1..20: mol_type = other DNA
gtcgtggtgcgggtactcgc

SEQ ID NO: 27509 - DNA, 20 bp, synthetic construct
  source 1..20: mol_type = other DNA
tggtaggagccccggaagaa

SEQ ID NO: 27510 - DNA, 20 bp, synthetic construct
  source 1..20: mol_type = other DNA
aggtggggcaccgagtggct

SEQ ID NO: 27511 - DNA, 20 bp, synthetic construct
  source 1..20: mol_type = other DNA
cttggtgggtgaactctgga

SEQ ID NO: 27512 - DNA, 20 bp, synthetic construct
  source 1..20: mol_type = other DNA
tgacagagctcatattggta

SEQ ID NO: 27513 - DNA, 20 bp, synthetic construct
  source 1..20: mol_type = other DNA
cagaatccacaacaactgta

SEQ ID NO: 27514 - DNA, 20 bp, synthetic construct
  source 1..20: mol_type = other DNA
tatggaaaagattaaaccaa

SEQ ID NO: 27515 - DNA, 20 bp, synthetic construct
  source 1..20: mol_type = other DNA
ggtatgccacctcaaaatgt

SEQ ID NO: 27516 - DNA, 20 bp, synthetic construct
  source 1..20: mol_type = other DNA
aatttgaagaggttacaaaa

SEQ ID NO: 27517 - DNA, 20 bp, synthetic construct
  source 1..20: mol_type = other DNA
caatgtctatttccaaagtg

SEQ ID NO: 27518 - DNA, 20 bp, synthetic construct
  source 1..20: mol_type = other DNA
actttgatggcttctctgag

SEQ ID NO: 27519 - DNA, 20 bp, synthetic construct
  source 1..20: mol_type = other DNA
agccatcaaagtcagaaaca

SEQ ID NO: 27520 - DNA, 20 bp, synthetic construct
  source 1..20: mol_type = other DNA
tggaccaccaaagaaaatct

SEQ ID NO: 27521 - DNA, 20 bp, synthetic construct
  source 1..20: mol_type = other DNA
aagctgctcggagtggactc

SEQ ID NO: 27522 - DNA, 20 bp, synthetic construct
  source 1..20: mol_type = other DNA
ggtgtggtaattcatctacc

SEQ ID NO: 27523 - DNA, 20 bp, synthetic construct
  source 1..20: mol_type = other DNA
gggcgacgaaggcaaaggga

SEQ ID NO: 27524 - DNA, 20 bp, synthetic construct
  source 1..20: mol_type = other DNA
tacagttgttgtggattctg

SEQ ID NO: 27525 - DNA, 20 bp, synthetic construct
  source 1..20: mol_type = other DNA
gtggtgctcggtgcgcagtg

SEQ ID NO: 27526 - DNA, 20 bp, synthetic construct
  source 1..20: mol_type = other DNA
cggaggaaaccgggtgacgg

SEQ ID NO: 27527 - DNA, 20 bp, synthetic construct
  source 1..20: mol_type = other DNA
gctgtgcactatgatcgctc

SEQ ID NO: 27528 - DNA, 20 bp, synthetic construct
  source 1..20: mol_type = other DNA
cagcagacgtgcactttgag

SEQ ID NO: 27529 - DNA, 20 bp, synthetic construct
  source 1..20: mol_type = other DNA
gcggaaggcagatgccctga

SEQ ID NO: 27530 - DNA, 20 bp, synthetic construct
  source 1..20: mol_type = other DNA
ggtgccggcgtggagacagg

SEQ ID NO: 27531 - DNA, 20 bp, synthetic construct
  source 1..20: mol_type = other DNA
tttcccacctgtctccacgc

SEQ ID NO: 27532 - DNA, 20 bp, synthetic construct
  source 1..20: mol_type = other DNA
ggagacaggtgggaaactgc

SEQ ID NO: 27533 - DNA, 20 bp, synthetic construct
  source 1..20: mol_type = other DNA
aaattcagcaaagagttcct

SEQ ID NO: 27534 - DNA, 20 bp, synthetic construct
  source 1..20: mol_type = other DNA
atttggaacgctgaagaagg

SEQ ID NO: 27535 - DNA, 20 bp, synthetic construct
  source 1..20: mol_type = other DNA
ttcgacagtggcttcggcgg

SEQ ID NO: 27536 - DNA, 20 bp, synthetic construct
  source 1..20: mol_type = other DNA
gccgccgcgcgagtgaatcg

SEQ ID NO: 27537 - DNA, 20 bp, synthetic construct
  source 1..20: mol_type = other DNA
gcctcgattcactcgcgcgg

SEQ ID NO: 27538 - DNA, 20 bp, synthetic construct
  source 1..20: mol_type = other DNA
ctgaaccggagccagcgagg

SEQ ID NO: 27539 - DNA, 20 bp, synthetic construct
  source 1..20: mol_type = other DNA
caaaacaacttcccgacaag

SEQ ID NO: 27540 - DNA, 20 bp, synthetic construct
  source 1..20: mol_type = other DNA
ccgaccggcgccctacagca

SEQ ID NO: 27541 - DNA, 20 bp, synthetic construct
  source 1..20: mol_type = other DNA
ggccgggccggctcccaggg

SEQ ID NO: 27542 - DNA, 20 bp, synthetic construct
  source 1..20: mol_type = other DNA
caaaaacaggcccatagagt

SEQ ID NO: 27543 - DNA, 20 bp, synthetic construct
  source 1..20: mol_type = other DNA
caggtatgttaagaagttag

SEQ ID NO: 27544 - DNA, 20 bp, synthetic construct
  source 1..20: mol_type = other DNA
taagccggagaatattgact

SEQ ID NO: 27545 - DNA, 20 bp, synthetic construct
  source 1..20: mol_type = other DNA
gcccattctccggcaaatgt

SEQ ID NO: 27546 - DNA, 20 bp, synthetic construct
  source 1..20: mol_type = other DNA
gcgtaaccccactcaccgtt

SEQ ID NO: 27547 - DNA, 20 bp, synthetic construct
  source 1..20: mol_type = other DNA
aggcgctggatggggaaatg

SEQ ID NO: 27548 - DNA, 20 bp, synthetic construct
  source 1..20: mol_type = other DNA
taagcatgtgacctctgaac

SEQ ID NO: 27549 - DNA, 20 bp, synthetic construct
  source 1..20: mol_type = other DNA
gagtgaaagttgtgtaacag

SEQ ID NO: 27550 - DNA, 20 bp, synthetic construct
  source 1..20: mol_type = other DNA
ccggagaatgggcattggga

SEQ ID NO: 27551 - DNA, 20 bp, synthetic construct
  source 1..20: mol_type = other DNA
gactatctggaagaccagca

SEQ ID NO: 27552 - DNA, 20 bp, synthetic construct
  source 1..20: mol_type = other DNA
ggtgatgcccaagatggacc

SEQ ID NO: 27553 - DNA, 20 bp, synthetic construct
  source 1..20: mol_type = other DNA
agtactgccactatgttgct

SEQ ID NO: 27554 - DNA, 20 bp, synthetic construct
  source 1..20: mol_type = other DNA
tcctttaccaaccagactgg

SEQ ID NO: 27555 - DNA, 20 bp, synthetic construct
  source 1..20: mol_type = other DNA
agatgacatgaccatcagtg

SEQ ID NO: 27556 - DNA, 20 bp, synthetic construct
  source 1..20: mol_type = other DNA
gctggtcttccagatagtca

SEQ ID NO: 27557 - DNA, 20 bp, synthetic construct
  source 1..20: mol_type = other DNA
gaccagacggtgctccacga

SEQ ID NO: 27558 - DNA, 20 bp, synthetic construct
  source 1..20: mol_type = other DNA
cctcacgcttgacaatcgag

SEQ ID NO: 27559 - DNA, 20 bp, synthetic construct
  source 1..20: mol_type = other DNA
cagggtgaagacggatcatg

SEQ ID NO: 27560 - DNA, 20 bp, synthetic construct
  source 1..20: mol_type = other DNA
ttcatccccacgcagaccgg

SEQ ID NO: 27561 - DNA, 20 bp, synthetic construct
  source 1..20: mol_type = other DNA
cttggcagatggctacacca

SEQ ID NO: 27562 - DNA, 20 bp, synthetic construct
  source 1..20: mol_type = other DNA
gggcaaggtctcccgaaggt

SEQ ID NO: 27563 - DNA, 20 bp, synthetic construct
  source 1..20: mol_type = other DNA
gctcagtgacagtcgaggat

SEQ ID NO: 27564 - DNA, 20 bp, synthetic construct
  source 1..20: mol_type = other DNA
ggacctcaggagataccccc

SEQ ID NO: 27565 - DNA, 20 bp, synthetic construct
  source 1..20: mol_type = other DNA
tactgataacgattctgtcg

SEQ ID NO: 27566 - DNA, 20 bp, synthetic construct
  source 1..20: mol_type = other DNA
acatggttaaggtataatcc

SEQ ID NO: 27567 - DNA, 20 bp, synthetic construct
  source 1..20: mol_type = other DNA
cagaatcgttatcagtatag

SEQ ID NO: 27568 - DNA, 20 bp, synthetic construct
  source 1..20: mol_type = other DNA
ttaaaaatagcacataccga

SEQ ID NO: 27569 - DNA, 20 bp, synthetic construct
  source 1..20: mol_type = other DNA
cctgatgggacagtgctgta

SEQ ID NO: 27570 - DNA, 20 bp, synthetic construct
  source 1..20: mol_type = other DNA
ggacgagcagaactgcactc

SEQ ID NO: 27571 - DNA, 20 bp, synthetic construct
  source 1..20: mol_type = other DNA
gttgagagggatcccagaat

SEQ ID NO: 27572 - DNA, 20 bp, synthetic construct
  source 1..20: mol_type = other DNA
tgactgatgacaggtatctg

SEQ ID NO: 27573 - DNA, 20 bp, synthetic construct
  source 1..20: mol_type = other DNA
gtaacggcgaacatataatg

SEQ ID NO: 27574 - DNA, 20 bp, synthetic construct
  source 1..20: mol_type = other DNA
agtcggccgcgaccaggttg

SEQ ID NO: 27575 - DNA, 20 bp, synthetic construct
  source 1..20: mol_type = other DNA
taggcctataaagtagggaa

SEQ ID NO: 27576 - DNA, 20 bp, synthetic construct
  source 1..20: mol_type = other DNA
caggatggacaggcagcgct

SEQ ID NO: 27577 - DNA, 20 bp, synthetic construct
  source 1..20: mol_type = other DNA
ctccaggatactccgcagca

SEQ ID NO: 27578 - DNA, 20 bp, synthetic construct
  source 1..20: mol_type = other DNA
agcagaccctgagcttcacg

SEQ ID NO: 27579 - DNA, 20 bp, synthetic construct
  source 1..20: mol_type = other DNA
gaaaggtcatcacaggactg

SEQ ID NO: 27580 - DNA, 20 bp, synthetic construct
  source 1..20: mol_type = other DNA
tgggatggcggatattgatg

SEQ ID NO: 27581 - DNA, 20 bp, synthetic construct
  source 1..20: mol_type = other DNA
tgtcgcgctgacaggaaacg

SEQ ID NO: 27582 - DNA, 20 bp, synthetic construct
  source 1..20: mol_type = other DNA
taatgtggccgctaaggaag

SEQ ID NO: 27583 - DNA, 20 bp, synthetic construct
  source 1..20: mol_type = other DNA
agcgctgcctgtccatcctg

SEQ ID NO: 27584 - DNA, 20 bp, synthetic construct
  source 1..20: mol_type = other DNA
tgatggcgctcagcatgctt

SEQ ID NO: 27585 - DNA, 20 bp, synthetic construct
  source 1..20: mol_type = other DNA
gcggcggcagtggtaccaga

SEQ ID NO: 27586 - DNA, 20 bp, synthetic construct
  source 1..20: mol_type = other DNA
cagatttcattacaatcgcg

SEQ ID NO: 27587 - DNA, 20 bp, synthetic construct
  source 1..20: mol_type = other DNA
tgcaatgaccagatcgacgc

SEQ ID NO: 27588 - DNA, 20 bp, synthetic construct
  source 1..20: mol_type = other DNA
gaggtcagtgctctttgcgg

SEQ ID NO: 27589 - DNA, 20 bp, synthetic construct
  source 1..20: mol_type = other DNA
tcaccactagcgcccggatg

SEQ ID NO: 27590 - DNA, 20 bp, synthetic construct
  source 1..20: mol_type = other DNA
gagcttgctgaggagaatag

SEQ ID NO: 27591 - DNA, 20 bp, synthetic construct
  source 1..20: mol_type = other DNA
gggtccttgagagacttccg

SEQ ID NO: 27592 - DNA, 20 bp, synthetic construct
  source 1..20: mol_type = other DNA
gatctaagaggttactgatg

SEQ ID NO: 27593 - DNA, 20 bp, synthetic construct
  source 1..20: mol_type = other DNA
agagctgaaccccattactc

SEQ ID NO: 27594 - DNA, 20 bp, synthetic construct
  source 1..20: mol_type = other DNA
gaggccttgcggaacatcgg

SEQ ID NO: 27595 - DNA, 20 bp, synthetic construct
  source 1..20: mol_type = other DNA
accctctgggtcatcgacca

SEQ ID NO: 27596 - DNA, 20 bp, synthetic construct
  source 1..20: mol_type = other DNA
atgtcaaagcactctaccgg

SEQ ID NO: 27597 - DNA, 20 bp, synthetic construct
  source 1..20: mol_type = other DNA
tctgagcatcagtcacgggt

SEQ ID NO: 27598 - DNA, 20 bp, synthetic construct
  source 1..20: mol_type = other DNA
caccaacagctatgactacg

SEQ ID NO: 27599 - DNA, 20 bp, synthetic construct
  source 1..20: mol_type = other DNA
tcacgtcggcatcaaaggtc

SEQ ID NO: 27600 - DNA, 20 bp, synthetic construct
  source 1..20: mol_type = other DNA
aaacagaggcatccaaaggt

SEQ ID NO: 27601 - DNA, 20 bp, synthetic construct
  source 1..20: mol_type = other DNA
ggtgcgatacatgtcctcga

SEQ ID NO: 27602 - DNA, 20 bp, synthetic construct
  source 1..20: mol_type = other DNA
gatcgagacagaccgttgag

SEQ ID NO: 27603 - DNA, 20 bp, synthetic construct
  source 1..20: mol_type = other DNA
agaactgaagacaacatggg

SEQ ID NO: 27604 - DNA, 20 bp, synthetic construct
  source 1..20: mol_type = other DNA
gaagcggactcctagaagag

SEQ ID NO: 27605 - DNA, 20 bp, synthetic construct
  source 1..20: mol_type = other DNA
ggatgctcgaaagagctgag

SEQ ID NO: 27606 - DNA, 20 bp, synthetic construct
  source 1..20: mol_type = other DNA
gcctctctgtctcatagggt

SEQ ID NO: 27607 - DNA, 20 bp, synthetic construct
  source 1..20: mol_type = other DNA
ggcccgagagggggtatgcg

SEQ ID NO: 27608 - DNA, 20 bp, synthetic construct
  source 1..20: mol_type = other DNA
ggtatctttacccgatcccc

SEQ ID NO: 27609 - DNA, 20 bp, synthetic construct
  source 1..20: mol_type = other DNA
atagggtcggtattccctgt

SEQ ID NO: 27610 - DNA, 20 bp, synthetic construct
  source 1..20: mol_type = other DNA
gctatcgggccgctgagcga

SEQ ID NO: 27611 - DNA, 20 bp, synthetic construct
  source 1..20: mol_type = other DNA
gcgcaagaggcgcgacgagg

SEQ ID NO: 27612 - DNA, 20 bp, synthetic construct
  source 1..20: mol_type = other DNA
tgtggagccaactgcaccga

SEQ ID NO: 27613 - DNA, 20 bp, synthetic construct
  source 1..20: mol_type = other DNA
gctcagcggcccgatagccc

SEQ ID NO: 27614 - DNA, 20 bp, synthetic construct
  source 1..20: mol_type = other DNA
gcctcgcgcaggatgtcgaa

SEQ ID NO: 27615 - DNA, 20 bp, synthetic construct
  source 1..20: mol_type = other DNA
tcagctgctggacgacgagt

SEQ ID NO: 27616 - DNA, 20 bp, synthetic construct
  source 1..20: mol_type = other DNA
aaggatggaatgacagccgt

SEQ ID NO: 27617 - DNA, 20 bp, synthetic construct
  source 1..20: mol_type = other DNA
aagggaacgcaacctgacag

SEQ ID NO: 27618 - DNA, 20 bp, synthetic construct
  source 1..20: mol_type = other DNA
tagaaatgacagctacactc

SEQ ID NO: 27619 - DNA, 20 bp, synthetic construct
  source 1..20: mol_type = other DNA
gaaactgaccaagctccgag

SEQ ID NO: 27620 - DNA, 20 bp, synthetic construct
  source 1..20: mol_type = other DNA
tcagctgcttcactaaggtc

SEQ ID NO: 27621 - DNA, 20 bp, synthetic construct
  source 1..20: mol_type = other DNA
ggtcaatgatgtgccccgcg

SEQ ID NO: 27622 - DNA, 20 bp, synthetic construct
  source 1..20: mol_type = other DNA
gaccagaggaaagtgtctca

SEQ ID NO: 27623 - DNA, 20 bp, synthetic construct
  source 1..20: mol_type = other DNA
tcctcgtcctcgggaatgtg

SEQ ID NO: 27624 - DNA, 20 bp, synthetic construct
  source 1..20: mol_type = other DNA
tcctggacttcctcccacgg

SEQ ID NO: 27625 - DNA, 20 bp, synthetic construct
  source 1..20: mol_type = other DNA
atccccagtcaggacaatcg

SEQ ID NO: 27626 - DNA, 20 bp, synthetic construct
  source 1..20: mol_type = other DNA
gagttcacagtccccacaag

SEQ ID NO: 27627 - DNA, 20 bp, synthetic construct
  source 1..20: mol_type = other DNA
tctgccgagaagtccaaccc

SEQ ID NO: 27628 - DNA, 20 bp, synthetic construct
  source 1..20: mol_type = other DNA
aggatgtaggagaagcgctg

SEQ ID NO: 27629 - DNA, 20 bp, synthetic construct
  source 1..20: mol_type = other DNA
tcaaactcacaggctcgcca

SEQ ID NO: 27630 - DNA, 20 bp, synthetic construct
  source 1..20: mol_type = other DNA
gtggtctcggggtactggag

SEQ ID NO: 27631 - DNA, 20 bp, synthetic construct
  source 1..20: mol_type = other DNA
ggaggacaagaagaaaaacc

SEQ ID NO: 27632 - DNA, 20 bp, synthetic construct
  source 1..20: mol_type = other DNA
tgccactacatagacactgc

SEQ ID NO: 27633 - DNA, 20 bp, synthetic construct
  source 1..20: mol_type = other DNA
ccagtgtcgttgcaaccccg

SEQ ID NO: 27634 - DNA, 20 bp, synthetic construct
  source 1..20: mol_type = other DNA
aaatagctgtaatatccagg

SEQ ID NO: 27635 - DNA, 20 bp, synthetic construct
  source 1..20: mol_type = other DNA
gctgtggataaactacctga

SEQ ID NO: 27636 - DNA, 20 bp, synthetic construct
  source 1..20: mol_type = other DNA
agggcttagaatcatgaaag

SEQ ID NO: 27637 - DNA, 20 bp, synthetic construct
  source 1..20: mol_type = other DNA
aggagtctgtaaatatatgt

SEQ ID NO: 27638 - DNA, 20 bp, synthetic construct
  source 1..20: mol_type = other DNA
atcatgggtgttgacgtaca

SEQ ID NO: 27639 - DNA, 20 bp, synthetic construct
  source 1..20: mol_type = other DNA
gcagtgacaccaggactgca

SEQ ID NO: 27640 - DNA, 20 bp, synthetic construct
  source 1..20: mol_type = other DNA
tccatcgactgccagtaccc

SEQ ID NO: 27641 - DNA, 20 bp, synthetic construct
  source 1..20: mol_type = other DNA
acaaccgagaataaattcag

SEQ ID NO: 27642 - DNA, 20 bp, synthetic construct
  source 1..20: mol_type = other DNA
gtacctccaaaaccccgaca

SEQ ID NO: 27643 - DNA, 20 bp, synthetic construct
  source 1..20: mol_type = other DNA
actgaccaaaatcagccccg

SEQ ID NO: 27644 - DNA, 20 bp, synthetic construct
  source 1..20: mol_type = other DNA
gccctcttcctcctcgccgg

SEQ ID NO: 27645 - DNA, 20 bp, synthetic construct
  source 1..20: mol_type = other DNA
aatgtcactgacagagtctg

SEQ ID NO: 27646 - DNA, 20 bp, synthetic construct
  source 1..20: mol_type = other DNA
ttcatcaggtggtacatcgg

SEQ ID NO: 27647 - DNA, 20 bp, synthetic construct
  source 1..20: mol_type = other DNA
ggtggttcaccacatcatga

SEQ ID NO: 27648 - DNA, 20 bp, synthetic construct
  source 1..20: mol_type = other DNA
ggaacatgagcagaacccgc

SEQ ID NO: 27649 - DNA, 20 bp, synthetic construct
  source 1..20: mol_type = other DNA
gacgaggcccggaaccacta

SEQ ID NO: 27650 - DNA, 20 bp, synthetic construct
  source 1..20: mol_type = other DNA
gagcagaacccgccggtctg

SEQ ID NO: 27651 - DNA, 20 bp, synthetic construct
  source 1..20: mol_type = other DNA
gatgggccggatcttgtcgt

SEQ ID NO: 27652 - DNA, 20 bp, synthetic construct
  source 1..20: mol_type = other DNA
cctgcagtgctccagagcgg

SEQ ID NO: 27653 - DNA, 20 bp, synthetic construct
  source 1..20: mol_type = other DNA
gggcctcgtcacagctgagg

SEQ ID NO: 27654 - DNA, 20 bp, synthetic construct
  source 1..20: mol_type = other DNA
tcagctctgaacagatgtcc

SEQ ID NO: 27655 - DNA, 20 bp, synthetic construct
  source 1..20: mol_type = other DNA
ccggaaccactacggcggcg

SEQ ID NO: 27656 - DNA, 20 bp, synthetic construct
  source 1..20: mol_type = other DNA
atccggcccatctccagcat

SEQ ID NO: 27657 - DNA, 20 bp, synthetic construct
  source 1..20: mol_type = other DNA
gagggacttactttgctctg

SEQ ID NO: 27658 - DNA, 20 bp, synthetic construct
  source 1..20: mol_type = other DNA
catctccagcattggacagg

SEQ ID NO: 27659 - DNA, 20 bp, synthetic construct
  source 1..20: mol_type = other DNA
gaaccacctcagctgtgacg

SEQ ID NO: 27660 - DNA, 20 bp, synthetic construct
  source 1..20: mol_type = other DNA
taagctctgccagcactttg

SEQ ID NO: 27661 - DNA, 20 bp, synthetic construct
  source 1..20: mol_type = other DNA
cttgcaggtgcagagctaca

SEQ ID NO: 27662 - DNA, 20 bp, synthetic construct
  source 1..20: mol_type = other DNA
ctagcgtgtacccccttgac

SEQ ID NO: 27663 - DNA, 20 bp, synthetic construct
  source 1..20: mol_type = other DNA
gaatgggaaggtgacgaatg

SEQ ID NO: 27664 - DNA, 20 bp, synthetic construct
  source 1..20: mol_type = other DNA
ccaatctgagcagcaatccg

SEQ ID NO: 27665 - DNA, 20 bp, synthetic construct
  source 1..20: mol_type = other DNA
ctgatgtatacccatttgac

SEQ ID NO: 27666 - DNA, 20 bp, synthetic construct
  source 1..20: mol_type = other DNA
ggagattgaattacttaagg

SEQ ID NO: 27667 - DNA, 20 bp, synthetic construct
  source 1..20: mol_type = other DNA
gatccagaaatcgagatgag

SEQ ID NO: 27668 - DNA, 20 bp, synthetic construct
  source 1..20: mol_type = other DNA
tcctcaccttcccgctcaga

SEQ ID NO: 27669 - DNA, 20 bp, synthetic construct
  source 1..20: mol_type = other DNA
tcattgacttgcagcaccac

SEQ ID NO: 27670 - DNA, 20 bp, synthetic construct
  source 1..20: mol_type = other DNA
tccacaaagctgcaagaagg

SEQ ID NO: 27671 - DNA, 20 bp, synthetic construct
  source 1..20: mol_type = other DNA
ggttctccaggagaaagatg

SEQ ID NO: 27672 - DNA, 20 bp, synthetic construct
  source 1..20: mol_type = other DNA
actcacagtagatctccacc

SEQ ID NO: 27673 - DNA, 20 bp, synthetic construct
  source 1..20: mol_type = other DNA
tttacagcctgccttactgt

SEQ ID NO: 27674 - DNA, 20 bp, synthetic construct
  source 1..20: mol_type = other DNA
acttacagtagagctccacc

SEQ ID NO: 27675 - DNA, 20 bp, synthetic construct
  source 1..20: mol_type = other DNA
tgggaaaaacagaaaagagg

SEQ ID NO: 27676 - DNA, 20 bp, synthetic construct
  source 1..20: mol_type = other DNA
tatctgtgcacagtgacttg

SEQ ID NO: 27677 - DNA, 20 bp, synthetic construct
  source 1..20: mol_type = other DNA
taccagtagcggagcagacc

SEQ ID NO: 27678 - DNA, 20 bp, synthetic construct
  source 1..20: mol_type = other DNA
tcagttggtcaccttagaat

SEQ ID NO: 27679 - DNA, 20 bp, synthetic construct
  source 1..20: mol_type = other DNA
gaaagctaaaggattgacat

SEQ ID NO: 27680 - DNA, 20 bp, synthetic construct
  source 1..20: mol_type = other DNA
ccagcaacaacgccaaggaa

SEQ ID NO: 27681 - DNA, 20 bp, synthetic construct
  source 1..20: mol_type = other DNA
aatgtagatggcaattgtga

SEQ ID NO: 27682 - DNA, 20 bp, synthetic construct
  source 1..20: mol_type = other DNA
aatatcacttcttcaggcat

SEQ ID NO: 27683 - DNA, 20 bp, synthetic construct
  source 1..20: mol_type = other DNA
gtctcctattctctactcag

SEQ ID NO: 27684 - DNA, 20 bp, synthetic construct
  source 1..20: mol_type = other DNA
taggacagagagcacccgct

SEQ ID NO: 27685 - DNA, 20 bp, synthetic construct
  source 1..20: mol_type = other DNA
tcaagttataatgtgttacc

SEQ ID NO: 27686 - DNA, 20 bp, synthetic construct
  source 1..20: mol_type = other DNA
agctccagacttgttatctg

SEQ ID NO: 27687 - DNA, 20 bp, synthetic construct
  source 1..20: mol_type = other DNA
ccatgtacaacaaagctgtg

SEQ ID NO: 27688 - DNA, 20 bp, synthetic construct
  source 1..20: mol_type = other DNA
gtttgatctgtgcttgtgtg

SEQ ID NO: 27689 - DNA, 20 bp, synthetic construct
  source 1..20: mol_type = other DNA
cttcaggtataactgtttgg

SEQ ID NO: 27690 - DNA, 20 bp, synthetic construct
  source 1..20: mol_type = other DNA
ggaggaagatctaccacaga

SEQ ID NO: 27691 - DNA, 20 bp, synthetic construct
  source 1..20: mol_type = other DNA
cccctgaatctagaaatcag

SEQ ID NO: 27692 - DNA, 20 bp, synthetic construct
  source 1..20: mol_type = other DNA
caagcgacggatcctttctg

SEQ ID NO: 27693 - DNA, 20 bp, synthetic construct
  source 1..20: mol_type = other DNA
gagccaaacccgtagaaatg

SEQ ID NO: 27694 - DNA, 20 bp, synthetic construct
  source 1..20: mol_type = other DNA
ccaagatctaccaagagggt

SEQ ID NO: 27695 - DNA, 20 bp, synthetic construct
  source 1..20: mol_type = other DNA
ccaagcttgaactacccttg

SEQ ID NO: 27696 - DNA, 20 bp, synthetic construct
  source 1..20: mol_type = other DNA
aggcgccgagactgacaacg

SEQ ID NO: 27697 - DNA, 20 bp, synthetic construct
  source 1..20: mol_type = other DNA
gttcagtgcagatcccaatg

SEQ ID NO: 27698 - DNA, 20 bp, synthetic construct
  source 1..20: mol_type = other DNA
tggtggacctccacaaaatg

SEQ ID NO: 27699 - DNA, 20 bp, synthetic construct
  source 1..20: mol_type = other DNA
aggaagaaagcgccaaggcg

SEQ ID NO: 27700 - DNA, 20 bp, synthetic construct
  source 1..20: mol_type = other DNA
atggcggtctccgtgcgcac

SEQ ID NO: 27701 - DNA, 20 bp, synthetic construct
  source 1..20: mol_type = other DNA
gactgacaacgcggtcccac

SEQ ID NO: 27702 - DNA, 20 bp, synthetic construct
  source 1..20: mol_type = other DNA
gagtggagtcgggtgcgctg

SEQ ID NO: 27703 - DNA, 20 bp, synthetic construct
  source 1..20: mol_type = other DNA
gcgcaccggcagcttctcgt

SEQ ID NO: 27704 - DNA, 20 bp, synthetic construct
  source 1..20: mol_type = other DNA
aaccctcttggtagatcttg

SEQ ID NO: 27705 - DNA, 20 bp, synthetic construct
  source 1..20: mol_type = other DNA
actgtcaaaatgcaggagct

SEQ ID NO: 27706 - DNA, 20 bp, synthetic construct
  source 1..20: mol_type = other DNA
agcgccaaggcgaggcatgg

SEQ ID NO: 27707 - DNA, 20 bp, synthetic construct
  source 1..20: mol_type = other DNA
acggagaacgacctcaacca

SEQ ID NO: 27708 - DNA, 20 bp, synthetic construct
  source 1..20: mol_type = other DNA
gatcaatgtaatgaaccgtg

SEQ ID NO: 27709 - DNA, 20 bp, synthetic construct
  source 1..20: mol_type = other DNA
aagctcaacgagaatcactc

SEQ ID NO: 27710 - DNA, 20 bp, synthetic construct
  source 1..20: mol_type = other DNA
atgaagagtgtccccggctc

SEQ ID NO: 27711 - DNA, 20 bp, synthetic construct
  source 1..20: mol_type = other DNA
actggcaggcacctagcact

SEQ ID NO: 27712 - DNA, 20 bp, synthetic construct
  source 1..20: mol_type = other DNA
gttgagatgttgatcatgcg

SEQ ID NO: 27713 - DNA, 20 bp, synthetic construct
  source 1..20: mol_type = other DNA
acattgtagagggatccata

SEQ ID NO: 27714 - DNA, 20 bp, synthetic construct
  source 1..20: mol_type = other DNA
tcaatgcagtgaatgaacac

SEQ ID NO: 27715 - DNA, 20 bp, synthetic construct
  source 1..20: mol_type = other DNA
tgtgtgatgagagtaggatg

SEQ ID NO: 27716 - DNA, 20 bp, synthetic construct
  source 1..20: mol_type = other DNA
acaccgtgatattgtacaga

SEQ ID NO: 27717 - DNA, 20 bp, synthetic construct
  source 1..20: mol_type = other DNA
ggaaccctgaacaaacactc

SEQ ID NO: 27718 - DNA, 20 bp, synthetic construct
  source 1..20: mol_type = other DNA
ggtccagctattgcagtaca

SEQ ID NO: 27719 - DNA, 20 bp, synthetic construct
  source 1..20: mol_type = other DNA
ctctacaatgtactacatga

SEQ ID NO: 27720 - DNA, 20 bp, synthetic construct
  source 1..20: mol_type = other DNA
caagtatggagagatgcctg

SEQ ID NO: 27721 - DNA, 20 bp, synthetic construct
  source 1..20: mol_type = other DNA
atcctactctcatcacacac

SEQ ID NO: 27722 - DNA, 20 bp, synthetic construct
  source 1..20: mol_type = other DNA
gcgtaagtatagctcactgc

SEQ ID NO: 27723 - DNA, 20 bp, synthetic construct
  source 1..20: mol_type = other DNA
ggagacccaccagccaatag

SEQ ID NO: 27724 - DNA, 20 bp, synthetic construct
  source 1..20: mol_type = other DNA
tctgaatggcctgatagagg

SEQ ID NO: 27725 - DNA, 20 bp, synthetic construct
  source 1..20: mol_type = other DNA
cacagactcaccccattcgg

SEQ ID NO: 27726 - DNA, 20 bp, synthetic construct
  source 1..20: mol_type = other DNA
ggtggaatgtgacagacagg

SEQ ID NO: 27727 - DNA, 20 bp, synthetic construct
  source 1..20: mol_type = other DNA
tgtggtggcgaggttgatca

SEQ ID NO: 27728 - DNA, 20 bp, synthetic construct
  source 1..20: mol_type = other DNA
agggtgacctcagtcaggat

SEQ ID NO: 27729 - DNA, 20 bp, synthetic construct
  source 1..20: mol_type = other DNA
gctgtatacgaacggctctg

SEQ ID NO: 27730 - DNA, 20 bp, synthetic construct
  source 1..20: mol_type = other DNA
tggcttatatgttaccatgg

SEQ ID NO: 27731 - DNA, 20 bp, synthetic construct
  source 1..20: mol_type = other DNA
tgttaagaagtgcattgggc

SEQ ID NO: 27732 - DNA, 20 bp, synthetic construct
  source 1..20: mol_type = other DNA
gggtccatacctgcttgcaa

SEQ ID NO: 27733 - DNA, 20 bp, synthetic construct
  source 1..20: mol_type = other DNA
atcagggtatagagtctccc

SEQ ID NO: 27734 - DNA, 20 bp, synthetic construct
  source 1..20: mol_type = other DNA
atgttctgtgtaataagctg

SEQ ID NO: 27735 - DNA, 20 bp, synthetic construct
  source 1..20: mol_type = other DNA
taagccaattagctcctgca

SEQ ID NO: 27736 - DNA, 20 bp, synthetic construct
  source 1..20: mol_type = other DNA
catgagggagactgtcaata

SEQ ID NO: 27737 - DNA, 20 bp, synthetic construct
  source 1..20: mol_type = other DNA
agactactgtacctatgtgc

SEQ ID NO: 27738 - DNA, 20 bp, synthetic construct
  source 1..20: mol_type = other DNA
ggaggaatggataacaacaa

SEQ ID NO: 27739 - DNA, 20 bp, synthetic construct
  source 1..20: mol_type = other DNA
gcgtcacacatcattacctg

SEQ ID NO: 27740 - DNA, 20 bp, synthetic construct
  source 1..20: mol_type = other DNA
gacaaggtcccagagagcat

SEQ ID NO: 27741 - DNA, 20 bp, synthetic construct
  source 1..20: mol_type = other DNA
aggatgcattgagttaatga

SEQ ID NO: 27742 - DNA, 20 bp, synthetic construct
  source 1..20: mol_type = other DNA
tgacccacatcatcaatgca

SEQ ID NO: 27743 - DNA, 20 bp, synthetic construct
  source 1..20: mol_type = other DNA
atgatctgagaacaaatctg

SEQ ID NO: 27744 - DNA, 20 bp, synthetic construct
  source 1..20: mol_type = other DNA
cccacagctacacaatggta

SEQ ID NO: 27745 - DNA, 20 bp, synthetic construct
  source 1..20: mol_type = other DNA
gcatccttgagcatctgcga

SEQ ID NO: 27746 - DNA, 20 bp, synthetic construct
  source 1..20: mol_type = other DNA
tatggagctcctcagctgga

SEQ ID NO: 27747 - DNA, 20 bp, synthetic construct
  source 1..20: mol_type = other DNA
cagcacacttccaccacctg

SEQ ID NO: 27748 - DNA, 20 bp, synthetic construct
  source 1..20: mol_type = other DNA
taaaggcaagaagcatgctc

SEQ ID NO: 27749 - DNA, 20 bp, synthetic construct
  source 1..20: mol_type = other DNA
aggctgcttggaattaaaag

SEQ ID NO: 27750 - DNA, 20 bp, synthetic construct
  source 1..20: mol_type = other DNA
tgtttgtgaagccaagcaag

SEQ ID NO: 27751 - DNA, 20 bp, synthetic construct
  source 1..20: mol_type = other DNA
acaaacatcacttgtaaaca

SEQ ID NO: 27752 - DNA, 20 bp, synthetic construct
  source 1..20: mol_type = other DNA
ccacataaaagacccgcccg

SEQ ID NO: 27753 - DNA, 20 bp, synthetic construct
  source 1..20: mol_type = other DNA
gagtataggacattcaccta

SEQ ID NO: 27754 - DNA, 20 bp, synthetic construct
  source 1..20: mol_type = other DNA
catccactgggacataaagg

SEQ ID NO: 27755 - DNA, 20 bp, synthetic construct
  source 1..20: mol_type = other DNA
tcagctacacacttggccgc

SEQ ID NO: 27756 - DNA, 20 bp, synthetic construct
  source 1..20: mol_type = other DNA
aagtggtagctcgactgttg

SEQ ID NO: 27757 - DNA, 20 bp, synthetic construct
  source 1..20: mol_type = other DNA
gcaggacgtgctgtagcacg

SEQ ID NO: 27758 - DNA, 20 bp, synthetic construct
  source 1..20: mol_type = other DNA
gatgtgtctaccctggagca

SEQ ID NO: 27759 - DNA, 20 bp, synthetic construct
  source 1..20: mol_type = other DNA
ggagcaactcaacaggcggt

SEQ ID NO: 27760 - DNA, 20 bp, synthetic construct
  source 1..20: mol_type = other DNA
aaccacctggcagcgtccga

SEQ ID NO: 27761 - DNA, 20 bp, synthetic construct
  source 1..20: mol_type = other DNA
atctgcttcaaatactacca

SEQ ID NO: 27762 - DNA, 20 bp, synthetic construct
  source 1..20: mol_type = other DNA
tgaacgctaccagcacaacc

SEQ ID NO: 27763 - DNA, 20 bp, synthetic construct
  source 1..20: mol_type = other DNA
ggaagcagcagtcatcacgg

SEQ ID NO: 27764 - DNA, 20 bp, synthetic construct
  source 1..20: mol_type = other DNA
gatgagaccgtccaaggaca

SEQ ID NO: 27765 - DNA, 20 bp, synthetic construct
  source 1..20: mol_type = other DNA
tcatgctgaaaatacctggg

SEQ ID NO: 27766 - DNA, 20 bp, synthetic construct
  source 1..20: mol_type = other DNA
ggcggggaccacagttgcga

SEQ ID NO: 27767 - DNA, 20 bp, synthetic construct
  source 1..20: mol_type = other DNA
aaatgatatcaaccgttgtg

SEQ ID NO: 27768 - DNA, 20 bp, synthetic construct
  source 1..20: mol_type = other DNA
aaggaccattagccacacaa

SEQ ID NO: 27769 - DNA, 20 bp, synthetic construct
  source 1..20: mol_type = other DNA
aacttccaataattccaaca

SEQ ID NO: 27770 - DNA, 20 bp, synthetic construct
  source 1..20: mol_type = other DNA
catattgatatagatgaggc

SEQ ID NO: 27771 - DNA, 20 bp, synthetic construct
  source 1..20: mol_type = other DNA
tacagaagaatacgaatcac

SEQ ID NO: 27772 - DNA, 20 bp, synthetic construct
  source 1..20: mol_type = other DNA
tgtagagctgtcgaattaca

SEQ ID NO: 27773 - DNA, 20 bp, synthetic construct
  source 1..20: mol_type = other DNA
agatgaggcaggctgttact

SEQ ID NO: 27774 - DNA, 20 bp, synthetic construct
  source 1..20: mol_type = other DNA
ggcaggctgttacttggcag

SEQ ID NO: 27775 - DNA, 20 bp, synthetic construct
  source 1..20: mol_type = other DNA
aatacatattgatatagatg

SEQ ID NO: 27776 - DNA, 20 bp, synthetic construct
  source 1..20: mol_type = other DNA
attcttctgtataaaagccc

SEQ ID NO: 27777 - DNA, 20 bp, synthetic construct
  source 1..20: mol_type = other DNA
ctggtaatgccagagtaagc

SEQ ID NO: 27778 - DNA, 20 bp, synthetic construct
  source 1..20: mol_type = other DNA
catcaaggaaaagtcaaatg

SEQ ID NO: 27779 - DNA, 20 bp, synthetic construct
  source 1..20: mol_type = other DNA
ttgacttgggtgtggcacct

SEQ ID NO: 27780 - DNA, 20 bp, synthetic construct
  source 1..20: mol_type = other DNA
tgtgtgtcagctgaagacag

SEQ ID NO: 27781 - DNA, 20 bp, synthetic construct
  source 1..20: mol_type = other DNA
atctaccgaatacaagaacc

SEQ ID NO: 27782 - DNA, 20 bp, synthetic construct
  source 1..20: mol_type = other DNA
gctatagctggtcatcacta

SEQ ID NO: 27783 - DNA, 20 bp, synthetic construct
  source 1..20: mol_type = other DNA
ctcctagaccaactccacac

SEQ ID NO: 27784 - DNA, 20 bp, synthetic construct
  source 1..20: mol_type = other DNA
tgtgatctgcctcagaacca

SEQ ID NO: 27785 - DNA, 20 bp, synthetic construct
  source 1..20: mol_type = other DNA
atggaggacagacatgacat

SEQ ID NO: 27786 - DNA, 20 bp, synthetic construct
  source 1..20: mol_type = other DNA
agtgtggagttggtctagga

SEQ ID NO: 27787 - DNA, 20 bp, synthetic construct
  source 1..20: mol_type = other DNA
catggaggacagacatgaca

SEQ ID NO: 27788 - DNA, 20 bp, synthetic construct
  source 1..20: mol_type = other DNA
atgaccagctatagccctgt

SEQ ID NO: 27789 - DNA, 20 bp, synthetic construct
  source 1..20: mol_type = other DNA
tcatcagcaactgcaacacc

SEQ ID NO: 27790 - DNA, 20 bp, synthetic construct
  source 1..20: mol_type = other DNA
catttggtgcagaagcacca

SEQ ID NO: 27791 - DNA, 20 bp, synthetic construct
  source 1..20: mol_type = other DNA
tctgctgcagcatctcatgg

SEQ ID NO: 27792 - DNA, 20 bp, synthetic construct
  source 1..20: mol_type = other DNA
cagcagaggagcgctctgtg

SEQ ID NO: 27793 - DNA, 20 bp, synthetic construct
  source 1..20: mol_type = other DNA
aaaagggagccagttgcaga

SEQ ID NO: 27794 - DNA, 20 bp, synthetic construct
  source 1..20: mol_type = other DNA
cctggagacctgcttgctgc

SEQ ID NO: 27795 - DNA, 20 bp, synthetic construct
  source 1..20: mol_type = other DNA
aggagcgctctgtgtggaag

SEQ ID NO: 27796 - DNA, 20 bp, synthetic construct
  source 1..20: mol_type = other DNA
ctgtccttgagacacaagaa

SEQ ID NO: 27797 - DNA, 20 bp, synthetic construct
  source 1..20: mol_type = other DNA
ttattcataaaagtgcagta

SEQ ID NO: 27798 - DNA, 20 bp, synthetic construct
  source 1..20: mol_type = other DNA
tgaataagctcatttctgac

SEQ ID NO: 27799 - DNA, 20 bp, synthetic construct
  source 1..20: mol_type = other DNA
gctcatttctgactggctac

SEQ ID NO: 27800 - DNA, 20 bp, synthetic construct
  source 1..20: mol_type = other DNA
attgtacatctggtcatatg

SEQ ID NO: 27801 - DNA, 20 bp, synthetic construct
  source 1..20: mol_type = other DNA
cgaagagagagtgtatgacc

SEQ ID NO: 27802 - DNA, 20 bp, synthetic construct
  source 1..20: mol_type = other DNA
agagagagtgtatgaccagg

SEQ ID NO: 27803 - DNA, 20 bp, synthetic construct
  source 1..20: mol_type = other DNA
gaaataagagaatcaagccc

SEQ ID NO: 27804 - DNA, 20 bp, synthetic construct
  source 1..20: mol_type = other DNA
gagagtgtatgaccaggtgg

SEQ ID NO: 27805 - DNA, 20 bp, synthetic construct
  source 1..20: mol_type = other DNA
acactctctcttcgcaagtg

SEQ ID NO: 27806 - DNA, 20 bp, synthetic construct
  source 1..20: mol_type = other DNA
gtgtatgaccaggtggtgga

SEQ ID NO: 27807 - DNA, 20 bp, synthetic construct
  source 1..20: mol_type = other DNA
tggaggcgcacaacatcctc

SEQ ID NO: 27808 - DNA, 20 bp, synthetic construct
  source 1..20: mol_type = other DNA
caaccagaaccggagcatgg

SEQ ID NO: 27809 - DNA, 20 bp, synthetic construct
  source 1..20: mol_type = other DNA
gggtggagcccaactacctg

SEQ ID NO: 27810 - DNA, 20 bp, synthetic construct
  source 1..20: mol_type = other DNA
gagtccctgttccaaaggat

SEQ ID NO: 27811 - DNA, 20 bp, synthetic construct
  source 1..20: mol_type = other DNA
ggcttgtcgggagctggtcc

SEQ ID NO: 27812 - DNA, 20 bp, synthetic construct
  source 1..20: mol_type = other DNA
tgaccaggtggtggaaggtg

SEQ ID NO: 27813 - DNA, 20 bp, synthetic construct
  source 1..20: mol_type = other DNA
agttctggaatctttctggc

SEQ ID NO: 27814 - DNA, 20 bp, synthetic construct
  source 1..20: mol_type = other DNA
agatctgaattccagagaac

SEQ ID NO: 27815 - DNA, 20 bp, synthetic construct
  source 1..20: mol_type = other DNA
tcggaggtaaatgtgaaccg

SEQ ID NO: 27816 - DNA, 20 bp, synthetic construct
  source 1..20: mol_type = other DNA
aacgctggcaaggtacgccg

SEQ ID NO: 27817 - DNA, 20 bp, synthetic construct
  source 1..20: mol_type = other DNA
aatgacttccaggtgctccg

SEQ ID NO: 27818 - DNA, 20 bp, synthetic construct
  source 1..20: mol_type = other DNA
gagtatgcacaaggtcgcgc

SEQ ID NO: 27819 - DNA, 20 bp, synthetic construct
  source 1..20: mol_type = other DNA
gcgtcgttccaagctgcgcg

SEQ ID NO: 27820 - DNA, 20 bp, synthetic construct
  source 1..20: mol_type = other DNA
tccagcagaagttctcccga

SEQ ID NO: 27821 - DNA, 20 bp, synthetic construct
  source 1..20: mol_type = other DNA
gaatgccacagccttgagtg

SEQ ID NO: 27822 - DNA, 20 bp, synthetic construct
  source 1..20: mol_type = other DNA
gttggagatgacgttcagca

SEQ ID NO: 27823 - DNA, 20 bp, synthetic construct
  source 1..20: mol_type = other DNA
ctggaacctcgacggctcag

SEQ ID NO: 27824 - DNA, 20 bp, synthetic construct
  source 1..20: mol_type = other DNA
tccaggagaaaggcgagtgg

SEQ ID NO: 27825 - DNA, 20 bp, synthetic construct
  source 1..20: mol_type = other DNA
cgggagcgggagcaaaatcg

SEQ ID NO: 27826 - DNA, 20 bp, synthetic construct
  source 1..20: mol_type = other DNA
tgtggcaccaaggacctccg

SEQ ID NO: 27827 - DNA, 20 bp, synthetic construct
  source 1..20: mol_type = other DNA
gctgcagctctggaagcgca

SEQ ID NO: 27828 - DNA, 20 bp, synthetic construct
  source 1..20: mol_type = other DNA
aggggccagcagggtgactg

SEQ ID NO: 27829 - DNA, 20 bp, synthetic construct
  source 1..20: mol_type = other DNA
gggactcactgcagcttgtg

SEQ ID NO: 27830 - DNA, 20 bp, synthetic construct
  source 1..20: mol_type = other DNA
gcccgcaggccacgcagtgg

SEQ ID NO: 27831 - DNA, 20 bp, synthetic construct
  source 1..20: mol_type = other DNA
tcgcggcgcgtcctccgcag

SEQ ID NO: 27832 - DNA, 20 bp, synthetic construct
  source 1..20: mol_type = other DNA
agaggcccccgacggagaca

SEQ ID NO: 27833 - DNA, 20 bp, synthetic construct
  source 1..20: mol_type = other DNA
accgtccttgtctccgtcgg

SEQ ID NO: 27834 - DNA, 20 bp, synthetic construct
  source 1..20: mol_type = other DNA
aagcactcggccgggacgca

SEQ ID NO: 27835 - DNA, 20 bp, synthetic construct
  source 1..20: mol_type = other DNA
ctgcagccgcaggagtcggt

SEQ ID NO: 27836 - DNA, 20 bp, synthetic construct
  source 1..20: mol_type = other DNA
tgagctggaggcggcgacag

SEQ ID NO: 27837 - DNA, 20 bp, synthetic construct
  source 1..20: mol_type = other DNA
tcggccgggacgcagggcgt

SEQ ID NO: 27838 - DNA, 20 bp, synthetic construct
  source 1..20: mol_type = other DNA
ggggcgccaaagagcagccc

SEQ ID NO: 27839 - DNA, 20 bp, synthetic construct
  source 1..20: mol_type = other DNA
gaccagcaggtcgaagcact

SEQ ID NO: 27840 - DNA, 20 bp, synthetic construct
  source 1..20: mol_type = other DNA
gtcccctcccgaagcagccg

SEQ ID NO: 27841 - DNA, 20 bp, synthetic construct
  source 1..20: mol_type = other DNA
tgccaggcccagcagcgcgg

SEQ ID NO: 27842 - DNA, 20 bp, synthetic construct
  source 1..20: mol_type = other DNA
ccaaagagcagcccgggcag

SEQ ID NO: 27843 - DNA, 20 bp, synthetic construct
  source 1..20: mol_type = other DNA
tggtgggtctggtgagctgg

SEQ ID NO: 27844 - DNA, 20 bp, synthetic construct
  source 1..20: mol_type = other DNA
gtccgccactgcgtggcctg

SEQ ID NO: 27845 - DNA, 20 bp, synthetic construct
  source 1..20: mol_type = other DNA
caattataggagtgaaataa

SEQ ID NO: 27846 - DNA, 20 bp, synthetic construct
  source 1..20: mol_type = other DNA
aagcaaagtaataaataggc

SEQ ID NO: 27847 - DNA, 20 bp, synthetic construct
  source 1..20: mol_type = other DNA
accaaagcaaagtaataaat

SEQ ID NO: 27848 - DNA, 20 bp, synthetic construct
  source 1..20: mol_type = other DNA
gcctatttattactttgctt

SEQ ID NO: 27849 - DNA, 20 bp, synthetic construct
  source 1..20: mol_type = other DNA
agtaataaataggcaggaga

SEQ ID NO: 27850 - DNA, 20 bp, synthetic construct
  source 1..20: mol_type = other DNA
tttctgcccttaactaaaac

SEQ ID NO: 27851 - DNA, 20 bp, synthetic construct
  source 1..20: mol_type = other DNA
actaaaactggatcaattat

SEQ ID NO: 27852 - DNA, 20 bp, synthetic construct
  source 1..20: mol_type = other DNA
tattcctaagagtaaaacca

SEQ ID NO: 27853 - DNA, 20 bp, synthetic construct
  source 1..20: mol_type = other DNA
gatgacaagaaaaaaaacag

SEQ ID NO: 27854 - DNA, 20 bp, synthetic construct
  source 1..20: mol_type = other DNA
gcaaggcgtaggttaatgag

SEQ ID NO: 27855 - DNA, 20 bp, synthetic construct
  source 1..20: mol_type = other DNA
tacaaaagaagcagctcagg

SEQ ID NO: 27856 - DNA, 20 bp, synthetic construct
  source 1..20: mol_type = other DNA
tatagaagatcctgatcctg

SEQ ID NO: 27857 - DNA, 20 bp, synthetic construct
  source 1..20: mol_type = other DNA
tccatacttcctctgtccag

SEQ ID NO: 27858 - DNA, 20 bp, synthetic construct
  source 1..20: mol_type = other DNA
tttacctcagtgccaacaga

SEQ ID NO: 27859 - DNA, 20 bp, synthetic construct
  source 1..20: mol_type = other DNA
tgagcgagatggtgctgtca

SEQ ID NO: 27860 - DNA, 20 bp, synthetic construct
  source 1..20: mol_type = other DNA
cctgaataaacggaatctgg

SEQ ID NO: 27861 - DNA, 20 bp, synthetic construct
  source 1..20: mol_type = other DNA
ccactcactggtctcaatag

SEQ ID NO: 27862 - DNA, 20 bp, synthetic construct
  source 1..20: mol_type = other DNA
atgggatcttcgtctaatga

SEQ ID NO: 27863 - DNA, 20 bp, synthetic construct
  source 1..20: mol_type = other DNA
cttctgttacagtattggca

SEQ ID NO: 27864 - DNA, 20 bp, synthetic construct
  source 1..20: mol_type = other DNA
attcaatgaagacggtgcat

SEQ ID NO: 27865 - DNA, 20 bp, synthetic construct
  source 1..20: mol_type = other DNA
agatcacaaaacagctgccc

SEQ ID NO: 27866 - DNA, 20 bp, synthetic construct
  source 1..20: mol_type = other DNA
aaggctatggaagaaatgaa

SEQ ID NO: 27867 - DNA, 20 bp, synthetic construct
  source 1..20: mol_type = other DNA
ggtgggatatgtgctcattg

SEQ ID NO: 27868 - DNA, 20 bp, synthetic construct
  source 1..20: mol_type = other DNA
ttagcagggcacacacacac

SEQ ID NO: 27869 - DNA, 20 bp, synthetic construct
  source 1..20: mol_type = other DNA
caggttaggggtattgacag

SEQ ID NO: 27870 - DNA, 20 bp, synthetic construct
  source 1..20: mol_type = other DNA
taggccagggaaaggtacat

SEQ ID NO: 27871 - DNA, 20 bp, synthetic construct
  source 1..20: mol_type = other DNA
tgaatgtgtgatcaggttag

SEQ ID NO: 27872 - DNA, 20 bp, synthetic construct
  source 1..20: mol_type = other DNA
gggcatcctacttactgtga

SEQ ID NO: 27873 - DNA, 20 bp, synthetic construct
  source 1..20: mol_type = other DNA
gtgcaggcgaggttgagcaa

SEQ ID NO: 27874 - DNA, 20 bp, synthetic construct
  source 1..20: mol_type = other DNA
acattcactctatggaaaga

SEQ ID NO: 27875 - DNA, 20 bp, synthetic construct
  source 1..20: mol_type = other DNA
aagaaggccatcctattcaa

SEQ ID NO: 27876 - DNA, 20 bp, synthetic construct
  source 1..20: mol_type = other DNA
tcactgccagcccatcactg

SEQ ID NO: 27877 - DNA, 20 bp, synthetic construct
  source 1..20: mol_type = other DNA
tatgggtgtcagtgcaggcg

SEQ ID NO: 27878 - DNA, 20 bp, synthetic construct
  source 1..20: mol_type = other DNA
caagcagatgaatccactgt

SEQ ID NO: 27879 - DNA, 20 bp, synthetic construct
  source 1..20: mol_type = other DNA
atgatagtcatatagtgcaa

SEQ ID NO: 27880 - DNA, 20 bp, synthetic construct
  source 1..20: mol_type = other DNA
tgtcatctatatcatcactg

SEQ ID NO: 27881 - DNA, 20 bp, synthetic construct
  source 1..20: mol_type = other DNA
ccacaccactcccattagca

SEQ ID NO: 27882 - DNA, 20 bp, synthetic construct
  source 1..20: mol_type = other DNA
atggctcgccatgtacagac

SEQ ID NO: 27883 - DNA, 20 bp, synthetic construct
  source 1..20: mol_type = other DNA
agacatgaactcttcaatgg

SEQ ID NO: 27884 - DNA, 20 bp, synthetic construct
  source 1..20: mol_type = other DNA
agagctgcaagatccaaccc

SEQ ID NO: 27885 - DNA, 20 bp, synthetic construct
  source 1..20: mol_type = other DNA
agatcgtaatacctcacctt

SEQ ID NO: 27886 - DNA, 20 bp, synthetic construct
  source 1..20: mol_type = other DNA
atgtattacggatatatacg

SEQ ID NO: 27887 - DNA, 20 bp, synthetic construct
  source 1..20: mol_type = other DNA
atggaggaattattaaagtg

SEQ ID NO: 27888 - DNA, 20 bp, synthetic construct
  source 1..20: mol_type = other DNA
caggcatggaaagtggtcct

SEQ ID NO: 27889 - DNA, 20 bp, synthetic construct
  source 1..20: mol_type = other DNA
acaaattacagggttcacag

SEQ ID NO: 27890 - DNA, 20 bp, synthetic construct
  source 1..20: mol_type = other DNA
catacggtccaacacaccat

SEQ ID NO: 27891 - DNA, 20 bp, synthetic construct
  source 1..20: mol_type = other DNA
ggcacttcccgcgtatcccc

SEQ ID NO: 27892 - DNA, 20 bp, synthetic construct
  source 1..20: mol_type = other DNA
ctgcctacacgagtcccagg

SEQ ID NO: 27893 - DNA, 20 bp, synthetic construct
  source 1..20: mol_type = other DNA
tagtcctattaggatccagt

SEQ ID NO: 27894 - DNA, 20 bp, synthetic construct
  source 1..20: mol_type = other DNA
gcccagacgatagtcttggt

SEQ ID NO: 27895 - DNA, 20 bp, synthetic construct
  source 1..20: mol_type = other DNA
gtgatcagtaaggtagccag

SEQ ID NO: 27896 - DNA, 20 bp, synthetic construct
  source 1..20: mol_type = other DNA
gaaaaaataggcatacagac

SEQ ID NO: 27897 - DNA, 20 bp, synthetic construct
  source 1..20: mol_type = other DNA
ggtgtttattacctcagtgt

SEQ ID NO: 27898 - DNA, 20 bp, synthetic construct
  source 1..20: mol_type = other DNA
atcatttggctcataactgg

SEQ ID NO: 27899 - DNA, 20 bp, synthetic construct
  source 1..20: mol_type = other DNA
gccgctattactgcaatcac

SEQ ID NO: 27900 - DNA, 20 bp, synthetic construct
  source 1..20: mol_type = other DNA
aacagcctgcacccacactg

SEQ ID NO: 27901 - DNA, 20 bp, synthetic construct
  source 1..20: mol_type = other DNA
aagtgggcaaaggccaagaa

SEQ ID NO: 27902 - DNA, 20 bp, synthetic construct
  source 1..20: mol_type = other DNA
ggaagctttatttacaacca

SEQ ID NO: 27903 - DNA, 20 bp, synthetic construct
  source 1..20: mol_type = other DNA
acagttgaatcgaagatact

SEQ ID NO: 27904 - DNA, 20 bp, synthetic construct
  source 1..20: mol_type = other DNA
aaatagaatgcatcgagctg

SEQ ID NO: 27905 - DNA, 20 bp, synthetic construct
  source 1..20: mol_type = other DNA
taccaataaaataatcaacc

SEQ ID NO: 27906 - DNA, 20 bp, synthetic construct
  source 1..20: mol_type = other DNA
agaaaaacctgatcatcatg

SEQ ID NO: 27907 - DNA, 20 bp, synthetic construct
  source 1..20: mol_type = other DNA
aggtgtttattacctcagtg

SEQ ID NO: 27908 - DNA, 20 bp, synthetic construct
  source 1..20: mol_type = other DNA
tggccagcagaaatgagagt

SEQ ID NO: 27909 - DNA, 20 bp, synthetic construct
  source 1..20: mol_type = other DNA
tcatttctgctggccaaagg

SEQ ID NO: 27910 - DNA, 20 bp, synthetic construct
  source 1..20: mol_type = other DNA
ccggtgacccatcatattgg

SEQ ID NO: 27911 - DNA, 20 bp, synthetic construct
  source 1..20: mol_type = other DNA
tgaaccatctaaagaagaga

SEQ ID NO: 27912 - DNA, 20 bp, synthetic construct
  source 1..20: mol_type = other DNA
tgtcgcgcagtactttacgg

SEQ ID NO: 27913 - DNA, 20 bp, synthetic construct
  source 1..20: mol_type = other DNA
gtactgcgcgacaatatcca

SEQ ID NO: 27914 - DNA, 20 bp, synthetic construct
  source 1..20: mol_type = other DNA
gggaagggtcttggcaaagg

SEQ ID NO: 27915 - DNA, 20 bp, synthetic construct
  source 1..20: mol_type = other DNA
catctccggcctcatctacg

SEQ ID NO: 27916 - DNA, 20 bp, synthetic construct
  source 1..20: mol_type = other DNA
gcggcgagcaaggcgccgga

SEQ ID NO: 27917 - DNA, 20 bp, synthetic construct
  source 1..20: mol_type = other DNA
agtactgcgcgacaatatcc

SEQ ID NO: 27918 - DNA, 20 bp, synthetic construct
  source 1..20: mol_type = other DNA
tgtctggccgcggcaaaggc

SEQ ID NO: 27919 - DNA, 20 bp, synthetic construct
  source 1..20: mol_type = other DNA
ggagactcgcggggtgctga

SEQ ID NO: 27920 - DNA, 20 bp, synthetic construct
  source 1..20: mol_type = other DNA
catctacgaggagactcgcg

SEQ ID NO: 27921 - DNA, 20 bp, synthetic construct
  source 1..20: mol_type = other DNA
agatgcgcttcacgccgccg

SEQ ID NO: 27922 - DNA, 20 bp, synthetic construct
  source 1..20: mol_type = other DNA
agtctcctcgtagatgaggc

SEQ ID NO: 27923 - DNA, 20 bp, synthetic construct
  source 1..20: mol_type = other DNA
gttcctggagaacgtgatcc

SEQ ID NO: 27924 - DNA, 20 bp, synthetic construct
  source 1..20: mol_type = other DNA
atccggcgccttgctcgccg

SEQ ID NO: 27925 - DNA, 20 bp, synthetic construct
  source 1..20: mol_type = other DNA
tggccggcttggtgatgccc

SEQ ID NO: 27926 - DNA, 20 bp, synthetic construct
  source 1..20: mol_type = other DNA
cgccgcggcgagcaaggcgc

SEQ ID NO: 27927 - DNA, 20 bp, synthetic construct
  source 1..20: mol_type = other DNA
aatgacgtcaatggatacgg

SEQ ID NO: 27928 - DNA, 20 bp, synthetic construct
  source 1..20: mol_type = other DNA
agcagttctggacatcgaag

SEQ ID NO: 27929 - DNA, 20 bp, synthetic construct
  source 1..20: mol_type = other DNA
accaatgagaggagtgccga

SEQ ID NO: 27930 - DNA, 20 bp, synthetic construct
  source 1..20: mol_type = other DNA
tgtctatgccatcctcaacg

SEQ ID NO: 27931 - DNA, 20 bp, synthetic construct
  source 1..20: mol_type = other DNA
cacctgccggtaccagatgt

SEQ ID NO: 27932 - DNA, 20 bp, synthetic construct
  source 1..20: mol_type = other DNA
tcaggaagaccgagtagccc

SEQ ID NO: 27933 - DNA, 20 bp, synthetic construct
  source 1..20: mol_type = other DNA
aggagtgtcttcatgaacca

SEQ ID NO: 27934 - DNA, 20 bp, synthetic construct
  source 1..20: mol_type = other DNA
aggctgaccacatagaagag

SEQ ID NO: 27935 - DNA, 20 bp, synthetic construct
  source 1..20: mol_type = other DNA
tcccccgccagcgtggatgt

SEQ ID NO: 27936 - DNA, 20 bp, synthetic construct
  source 1..20: mol_type = other DNA
acaggcagtcaccacctgaa

SEQ ID NO: 27937 - DNA, 20 bp, synthetic construct
  source 1..20: mol_type = other DNA
gaagggtgtgcgccccgtga

SEQ ID NO: 27938 - DNA, 20 bp, synthetic construct
  source 1..20: mol_type = other DNA
atgctgaactcccgaaagta

SEQ ID NO: 27939 - DNA, 20 bp, synthetic construct
  source 1..20: mol_type = other DNA
tgatgccgaatatacacgta

SEQ ID NO: 27940 - DNA, 20 bp, synthetic construct
  source 1..20: mol_type = other DNA
gccccccaacagtggcgaga

SEQ ID NO: 27941 - DNA, 20 bp, synthetic construct
  source 1..20: mol_type = other DNA
gttgtagatgtcgaggctac

SEQ ID NO: 27942 - DNA, 20 bp, synthetic construct
  source 1..20: mol_type = other DNA
actggagaatattaagccta

SEQ ID NO: 27943 - DNA, 20 bp, synthetic construct
  source 1..20: mol_type = other DNA
gcagttaatgcagcaatatg

SEQ ID NO: 27944 - DNA, 20 bp, synthetic construct
  source 1..20: mol_type = other DNA
acctcgaggtaacaaaccct

SEQ ID NO: 27945 - DNA, 20 bp, synthetic construct
  source 1..20: mol_type = other DNA
atattcaaggagatgaccga

SEQ ID NO: 27946 - DNA, 20 bp, synthetic construct
  source 1..20: mol_type = other DNA
agagcctgatgtactgttcg

SEQ ID NO: 27947 - DNA, 20 bp, synthetic construct
  source 1..20: mol_type = other DNA
tgtgttgataagttgtacaa

SEQ ID NO: 27948 - DNA, 20 bp, synthetic construct
  source 1..20: mol_type = other DNA
ggattgggtttctcacctcg

SEQ ID NO: 27949 - DNA, 20 bp, synthetic construct
  source 1..20: mol_type = other DNA
gagactaaagaatggagaac

SEQ ID NO: 27950 - DNA, 20 bp, synthetic construct
  source 1..20: mol_type = other DNA
actgttcgtgggagactcca

SEQ ID NO: 27951 - DNA, 20 bp, synthetic construct
  source 1..20: mol_type = other DNA
agatgaccgatggatgtctc

SEQ ID NO: 27952 - DNA, 20 bp, synthetic construct
  source 1..20: mol_type = other DNA
agaagtagcaggtgggatcg

SEQ ID NO: 27953 - DNA, 20 bp, synthetic construct
  source 1..20: mol_type = other DNA
acagcagaagaagtagcagg

SEQ ID NO: 27954 - DNA, 20 bp, synthetic construct
  source 1..20: mol_type = other DNA
caggtcattgttgtctgggt

SEQ ID NO: 27955 - DNA, 20 bp, synthetic construct
  source 1..20: mol_type = other DNA
aaaattcagtgcatgaagtg

SEQ ID NO: 27956 - DNA, 20 bp, synthetic construct
  source 1..20: mol_type = other DNA
tatcaacacaaggcagccac

SEQ ID NO: 27957 - DNA, 20 bp, synthetic construct
  source 1..20: mol_type = other DNA
aaacctgcactaaccatgag

SEQ ID NO: 27958 - DNA, 20 bp, synthetic construct
  source 1..20: mol_type = other DNA
acagaacagcatgcaagctt

SEQ ID NO: 27959 - DNA, 20 bp, synthetic construct
  source 1..20: mol_type = other DNA
tagggttggaacttacctcc

SEQ ID NO: 27960 - DNA, 20 bp, synthetic construct
  source 1..20: mol_type = other DNA
caaccagaccagacactgcg

SEQ ID NO: 27961 - DNA, 20 bp, synthetic construct
  source 1..20: mol_type = other DNA
aatgatttctgactccagtg

SEQ ID NO: 27962 - DNA, 20 bp, synthetic construct
  source 1..20: mol_type = other DNA
ggaccttcaaaaactgccgt

SEQ ID NO: 27963 - DNA, 20 bp, synthetic construct
  source 1..20: mol_type = other DNA
gatcttccctccacacaatg

SEQ ID NO: 27964 - DNA, 20 bp, synthetic construct
  source 1..20: mol_type = other DNA
tcgatgcgaataagcagcaa

SEQ ID NO: 27965 - DNA, 20 bp, synthetic construct
  source 1..20: mol_type = other DNA
acggatcaaacgctgcaagc

SEQ ID NO: 27966 - DNA, 20 bp, synthetic construct
  source 1..20: mol_type = other DNA
atcccatcatactctcactg

SEQ ID NO: 27967 - DNA, 20 bp, synthetic construct
  source 1..20: mol_type = other DNA
tctgcatcgactagcaaatg

SEQ ID NO: 27968 - DNA, 20 bp, synthetic construct
  source 1..20: mol_type = other DNA
gctggtaattgtgacactgt

SEQ ID NO: 27969 - DNA, 20 bp, synthetic construct
  source 1..20: mol_type = other DNA
ggggtgcaaaggttcacggc

SEQ ID NO: 27970 - DNA, 20 bp, synthetic construct
  source 1..20: mol_type = other DNA
gatttacgtacagctttatg

SEQ ID NO: 27971 - DNA, 20 bp, synthetic construct
  source 1..20: mol_type = other DNA
ggaaaatgctctgaacaacc

SEQ ID NO: 27972 - DNA, 20 bp, synthetic construct
  source 1..20: mol_type = other DNA
actgtattgcagtgaagtgc

SEQ ID NO: 27973 - DNA, 20 bp, synthetic construct
  source 1..20: mol_type = other DNA
atattgctccaggacaatga

SEQ ID NO: 27974 - DNA, 20 bp, synthetic construct
  source 1..20: mol_type = other DNA
caaactggtactcgagaacg

SEQ ID NO: 27975 - DNA, 20 bp, synthetic construct
  source 1..20: mol_type = other DNA
aagcaaatcgaccacagcta

SEQ ID NO: 27976 - DNA, 20 bp, synthetic construct
  source 1..20: mol_type = other DNA
agctcggattccatgaacct

SEQ ID NO: 27977 - DNA, 20 bp, synthetic construct
  source 1..20: mol_type = other DNA
cggcctgagatgtgtacaga

SEQ ID NO: 27978 - DNA, 20 bp, synthetic construct
  source 1..20: mol_type = other DNA
catcattcaggagatgcacg

SEQ ID NO: 27979 - DNA, 20 bp, synthetic construct
  source 1..20: mol_type = other DNA
acacaatcccagcacggctg

SEQ ID NO: 27980 - DNA, 20 bp, synthetic construct
  source 1..20: mol_type = other DNA
gcagattattgacagagatg

SEQ ID NO: 27981 - DNA, 20 bp, synthetic construct
  source 1..20: mol_type = other DNA
tccctcttcactctcatgga

SEQ ID NO: 27982 - DNA, 20 bp, synthetic construct
  source 1..20: mol_type = other DNA
caatcgtgagcgcttcctga

SEQ ID NO: 27983 - DNA, 20 bp, synthetic construct
  source 1..20: mol_type = other DNA
aaggtggtacaggtctggca

SEQ ID NO: 27984 - DNA, 20 bp, synthetic construct
  source 1..20: mol_type = other DNA
tcctctcacccagagtgttg

SEQ ID NO: 27985 - DNA, 20 bp, synthetic construct
  source 1..20: mol_type = other DNA
tgtgccttcggggccaatca

SEQ ID NO: 27986 - DNA, 20 bp, synthetic construct
  source 1..20: mol_type = other DNA
agaagtgctcatcgatgctc

SEQ ID NO: 27987 - DNA, 20 bp, synthetic construct
  source 1..20: mol_type = other DNA
gacgagccaaaactgatccc

SEQ ID NO: 27988 - DNA, 20 bp, synthetic construct
  source 1..20: mol_type = other DNA
gagaaggggcaacctaccca

SEQ ID NO: 27989 - DNA, 20 bp, synthetic construct
  source 1..20: mol_type = other DNA
ggttcatcaacgcccgccgc

SEQ ID NO: 27990 - DNA, 20 bp, synthetic construct
  source 1..20: mol_type = other DNA
gatcccggggatgacggctt

SEQ ID NO: 27991 - DNA, 20 bp, synthetic construct
  source 1..20: mol_type = other DNA
ctgaaggataggcattgtaa

SEQ ID NO: 27992 - DNA, 20 bp, synthetic construct
  source 1..20: mol_type = other DNA
gacagtggcctccctagggt

SEQ ID NO: 27993 - DNA, 20 bp, synthetic construct
  source 1..20: mol_type = other DNA
gcggatgaagaaaggtccaa

SEQ ID NO: 27994 - DNA, 20 bp, synthetic construct
  source 1..20: mol_type = other DNA
cagaaatcttggccccacgg

SEQ ID NO: 27995 - DNA, 20 bp, synthetic construct
  source 1..20: mol_type = other DNA
gatgacggcttaggagacag

SEQ ID NO: 27996 - DNA, 20 bp, synthetic construct
  source 1..20: mol_type = other DNA
aacacacctgtctacgctac

SEQ ID NO: 27997 - DNA, 20 bp, synthetic construct
  source 1..20: mol_type = other DNA
gagctctgtggagtccgtga

SEQ ID NO: 27998 - DNA, 20 bp, synthetic construct
  source 1..20: mol_type = other DNA
agcatctggcagtgagactg

SEQ ID NO: 27999 - DNA, 20 bp, synthetic construct
  source 1..20: mol_type = other DNA
tcaatgcagtcacagtggta

SEQ ID NO: 28000 - DNA, 20 bp, synthetic construct
  source 1..20: mol_type = other DNA
gatttctgaaacgagctctg

SEQ ID NO: 28001 - DNA, 20 bp, synthetic construct
  source 1..20: mol_type = other DNA
cctttctcagcatgtcaggg

SEQ ID NO: 28002 - DNA, 20 bp, synthetic construct
  source 1..20: mol_type = other DNA
agtaggtcctcagagcgcgt

SEQ ID NO: 28003 - DNA, 20 bp, synthetic construct
  source 1..20: mol_type = other DNA
tggaagacccattacatcgt

SEQ ID NO: 28004 - DNA, 20 bp, synthetic construct
  source 1..20: mol_type = other DNA
gtcattgaagtctctcactg

SEQ ID NO: 28005 - DNA, 20 bp, synthetic construct
  source 1..20: mol_type = other DNA
cagagtcatccaaaataagg

SEQ ID NO: 28006 - DNA, 20 bp, synthetic construct
  source 1..20: mol_type = other DNA
gtcttccacccgccaaagag

SEQ ID NO: 28007 - DNA, 20 bp, synthetic construct
  source 1..20: mol_type = other DNA
gagcttacctgactataggc

SEQ ID NO: 28008 - DNA, 20 bp, synthetic construct
  source 1..20: mol_type = other DNA
tgaggacgtgaagcgcacag

SEQ ID NO: 28009 - DNA, 20 bp, synthetic construct
  source 1..20: mol_type = other DNA
tggatacggatgaagcacat

SEQ ID NO: 28010 - DNA, 20 bp, synthetic construct
  source 1..20: mol_type = other DNA
atcccggtaataaacatcct

SEQ ID NO: 28011 - DNA, 20 bp, synthetic construct
  source 1..20: mol_type = other DNA
agaggcaagcttcacacgca

SEQ ID NO: 28012 - DNA, 20 bp, synthetic construct
  source 1..20: mol_type = other DNA
tatagaggtactcatagctt

SEQ ID NO: 28013 - DNA, 20 bp, synthetic construct
  source 1..20: mol_type = other DNA
aatgtggacttaaagcacac

SEQ ID NO: 28014 - DNA, 20 bp, synthetic construct
  source 1..20: mol_type = other DNA
gaagcttgcctctcgaaatg

SEQ ID NO: 28015 - DNA, 20 bp, synthetic construct
  source 1..20: mol_type = other DNA
tctgactgggtgatctgggt

SEQ ID NO: 28016 - DNA, 20 bp, synthetic construct
  source 1..20: mol_type = other DNA
ccataccttaaaagaacgga

SEQ ID NO: 28017 - DNA, 20 bp, synthetic construct
  source 1..20: mol_type = other DNA
acgtactgcaatcttgcggg

SEQ ID NO: 28018 - DNA, 20 bp, synthetic construct
  source 1..20: mol_type = other DNA
cacattccgcaactatgatg

SEQ ID NO: 28019 - DNA, 20 bp, synthetic construct
  source 1..20: mol_type = other DNA
cggtcagtaccttaacatgc

SEQ ID NO: 28020 - DNA, 20 bp, synthetic construct
  source 1..20: mol_type = other DNA
atagttgcggaatgtgctag

SEQ ID NO: 28021 - DNA, 20 bp, synthetic construct
  source 1..20: mol_type = other DNA
ccttgtgtgtgtgcaaaagg

SEQ ID NO: 28022 - DNA, 20 bp, synthetic construct
  source 1..20: mol_type = other DNA
agaaccgcggctggaagcag

SEQ ID NO: 28023 - DNA, 20 bp, synthetic construct
  source 1..20: mol_type = other DNA
aagggaccagaatggaacct

SEQ ID NO: 28024 - DNA, 20 bp, synthetic construct
  source 1..20: mol_type = other DNA
gggagaaggagaaccgcggc

SEQ ID NO: 28025 - DNA, 20 bp, synthetic construct
  source 1..20: mol_type = other DNA
tttacaggcactggtcacct

SEQ ID NO: 28026 - DNA, 20 bp, synthetic construct
  source 1..20: mol_type = other DNA
tgagggctacatgaaggccc

SEQ ID NO: 28027 - DNA, 20 bp, synthetic construct
  source 1..20: mol_type = other DNA
tatgatgtggatttcactgt

SEQ ID NO: 28028 - DNA, 20 bp, synthetic construct
  source 1..20: mol_type = other DNA
aaactttgagggctacatga

SEQ ID NO: 28029 - DNA, 20 bp, synthetic construct
  source 1..20: mol_type = other DNA
ccagaatggaacctgggaga

SEQ ID NO: 28030 - DNA, 20 bp, synthetic construct
  source 1..20: mol_type = other DNA
gagggctacatgaaggccct

SEQ ID NO: 28031 - DNA, 20 bp, synthetic construct
  source 1..20: mol_type = other DNA
cccagtctcctccttaccca

SEQ ID NO: 28032 - DNA, 20 bp, synthetic construct
  source 1..20: mol_type = other DNA
cacttagcgtgataaacccg

SEQ ID NO: 28033 - DNA, 20 bp, synthetic construct
  source 1..20: mol_type = other DNA
tatccgacaaggaaatccgg

SEQ ID NO: 28034 - DNA, 20 bp, synthetic construct
  source 1..20: mol_type = other DNA
aagctctaagggataaagac

SEQ ID NO: 28035 - DNA, 20 bp, synthetic construct
  source 1..20: mol_type = other DNA
agaatggctgcccaccgtcg

SEQ ID NO: 28036 - DNA, 20 bp, synthetic construct
  source 1..20: mol_type = other DNA
agatgtattccgcatagtca

SEQ ID NO: 28037 - DNA, 20 bp, synthetic construct
  source 1..20: mol_type = other DNA
cagtgccatgcaagagatgg

SEQ ID NO: 28038 - DNA, 20 bp, synthetic construct
  source 1..20: mol_type = other DNA
gactgacatcggaaccagag

SEQ ID NO: 28039 - DNA, 20 bp, synthetic construct
  source 1..20: mol_type = other DNA
aagtaaatccaacttacaca

SEQ ID NO: 28040 - DNA, 20 bp, synthetic construct
  source 1..20: mol_type = other DNA
caggtaggataactgttcaa

SEQ ID NO: 28041 - DNA, 20 bp, synthetic construct
  source 1..20: mol_type = other DNA
cctgcggtacaacatcaaca

SEQ ID NO: 28042 - DNA, 20 bp, synthetic construct
  source 1..20: mol_type = other DNA
gaacagtaacaataaggagc

SEQ ID NO: 28043 - DNA, 20 bp, synthetic construct
  source 1..20: mol_type = other DNA
cgcactgaagtggctcgacg

SEQ ID NO: 28044 - DNA, 20 bp, synthetic construct
  source 1..20: mol_type = other DNA
tggcgcttgggagagatgag

SEQ ID NO: 28045 - DNA, 20 bp, synthetic construct
  source 1..20: mol_type = other DNA
ctcttccgcccaaacttccg

SEQ ID NO: 28046 - DNA, 20 bp, synthetic construct
  source 1..20: mol_type = other DNA
caggcccaaatggactgttg

SEQ ID NO: 28047 - DNA, 20 bp, synthetic construct
  source 1..20: mol_type = other DNA
cacacggtccatgtccgtgc

SEQ ID NO: 28048 - DNA, 20 bp, synthetic construct
  source 1..20: mol_type = other DNA
tctgacctccgcccttccgt

SEQ ID NO: 28049 - DNA, 20 bp, synthetic construct
  source 1..20: mol_type = other DNA
tacctcgaggatgtcagtgt

SEQ ID NO: 28050 - DNA, 20 bp, synthetic construct
  source 1..20: mol_type = other DNA
gagtcacttacatacagccg

SEQ ID NO: 28051 - DNA, 20 bp, synthetic construct
  source 1..20: mol_type = other DNA
ttccgtcggcaggtacagtg

SEQ ID NO: 28052 - DNA, 20 bp, synthetic construct
  source 1..20: mol_type = other DNA
cagcccagatgtggtatacg

SEQ ID NO: 28053 - DNA, 20 bp, synthetic construct
  source 1..20: mol_type = other DNA
tgtccccatagacgctgaag

SEQ ID NO: 28054 - DNA, 20 bp, synthetic construct
  source 1..20: mol_type = other DNA
cgggagttgcagtggagcag

SEQ ID NO: 28055 - DNA, 20 bp, synthetic construct
  source 1..20: mol_type = other DNA
agtgttggtgcggctctcgt

SEQ ID NO: 28056 - DNA, 20 bp, synthetic construct
  source 1..20: mol_type = other DNA
ggcatactggaagaggcggt

SEQ ID NO: 28057 - DNA, 20 bp, synthetic construct
  source 1..20: mol_type = other DNA
agccaggagagaagtttcgg

SEQ ID NO: 28058 - DNA, 20 bp, synthetic construct
  source 1..20: mol_type = other DNA
ctggtcggaagggagatggg

SEQ ID NO: 28059 - DNA, 20 bp, synthetic construct
  source 1..20: mol_type = other DNA
gaggtgtttagtccccctcg

SEQ ID NO: 28060 - DNA, 20 bp, synthetic construct
  source 1..20: mol_type = other DNA
cggaggctggcaggcgaagg

SEQ ID NO: 28061 - DNA, 20 bp, synthetic construct
  source 1..20: mol_type = other DNA
cggaggtcagacctgcctgg

SEQ ID NO: 28062 - DNA, 20 bp, synthetic construct
  source 1..20: mol_type = other DNA
gagctgtctcgctaccgcgg

SEQ ID NO: 28063 - DNA, 20 bp, synthetic construct
  source 1..20: mol_type = other DNA
gacaggacggttctacggag

SEQ ID NO: 28064 - DNA, 20 bp, synthetic construct
  source 1..20: mol_type = other DNA
aagccgctatagtgggaccc

SEQ ID NO: 28065 - DNA, 20 bp, synthetic construct
  source 1..20: mol_type = other DNA
gtccccggtcacgaaagctc

SEQ ID NO: 28066 - DNA, 20 bp, synthetic construct
  source 1..20: mol_type = other DNA
cggaggacacatcgtagaca

SEQ ID NO: 28067 - DNA, 20 bp, synthetic construct
  source 1..20: mol_type = other DNA
tacctgcgaagccgctatag

SEQ ID NO: 28068 - DNA, 20 bp, synthetic construct
  source 1..20: mol_type = other DNA
cgtgtctacgatgtgtcctc

SEQ ID NO: 28069 - DNA, 20 bp, synthetic construct
  source 1..20: mol_type = other DNA
ggtcggatacgtcatccacg

SEQ ID NO: 28070 - DNA, 20 bp, synthetic construct
  source 1..20: mol_type = other DNA
gcctgcttcagaacagtccc

SEQ ID NO: 28071 - DNA, 20 bp, synthetic construct
  source 1..20: mol_type = other DNA
tggcagcacggcttatgggc

SEQ ID NO: 28072 - DNA, 20 bp, synthetic construct
  source 1..20: mol_type = other DNA
aaaaggcgaaagccagcgcg

SEQ ID NO: 28073 - DNA, 20 bp, synthetic construct
  source 1..20: mol_type = other DNA
gtagaagctgcgatcaccag

SEQ ID NO: 28074 - DNA, 20 bp, synthetic construct
  source 1..20: mol_type = other DNA
tcgctaccgcggcggcccag

SEQ ID NO: 28075 - DNA, 20 bp, synthetic construct
  source 1..20: mol_type = other DNA
acagctcctccggtatgaaa

SEQ ID NO: 28076 - DNA, 20 bp, synthetic construct
  source 1..20: mol_type = other DNA
ggtgatcgcagcttctacct

SEQ ID NO: 28077 - DNA, 20 bp, synthetic construct
  source 1..20: mol_type = other DNA
tccataccgggagacaacca

SEQ ID NO: 28078 - DNA, 20 bp, synthetic construct
  source 1..20: mol_type = other DNA
caagttaatgaccgccatgg

SEQ ID NO: 28079 - DNA, 20 bp, synthetic construct
  source 1..20: mol_type = other DNA
ccacatagaataggaacgtg

SEQ ID NO: 28080 - DNA, 20 bp, synthetic construct
  source 1..20: mol_type = other DNA
ctgtcagcagaaaaacgctg

SEQ ID NO: 28081 - DNA, 20 bp, synthetic construct
  source 1..20: mol_type = other DNA
aagtagaggctgattaagtg

SEQ ID NO: 28082 - DNA, 20 bp, synthetic construct
  source 1..20: mol_type = other DNA
atgaggtaggtcaagcgaaa

SEQ ID NO: 28083 - DNA, 20 bp, synthetic construct
  source 1..20: mol_type = other DNA
ggcggtcattaacttggtgg

SEQ ID NO: 28084 - DNA, 20 bp, synthetic construct
  source 1..20: mol_type = other DNA
tacttcatagtgcttattgg

SEQ ID NO: 28085 - DNA, 20 bp, synthetic construct
  source 1..20: mol_type = other DNA
cagcgtccacatgccagcac

SEQ ID NO: 28086 - DNA, 20 bp, synthetic construct
  source 1..20: mol_type = other DNA
cctcacgttcctattctatg

SEQ ID NO: 28087 - DNA, 20 bp, synthetic construct
  source 1..20: mol_type = other DNA
caataagcactatgaagtag

SEQ ID NO: 28088 - DNA, 20 bp, synthetic construct
  source 1..20: mol_type = other DNA
acatccaagtcttcttgatg

SEQ ID NO: 28089 - DNA, 20 bp, synthetic construct
  source 1..20: mol_type = other DNA
gaccaacagaatcacagcaa

SEQ ID NO: 28090 - DNA, 20 bp, synthetic construct
  source 1..20: mol_type = other DNA
tcctggtgaaaatgaacacc

SEQ ID NO: 28091 - DNA, 20 bp, synthetic construct
  source 1..20: mol_type = other DNA
gtacatgtggatgtgcagca

SEQ ID NO: 28092 - DNA, 20 bp, synthetic construct
  source 1..20: mol_type = other DNA
ggcctgggacacgtacgaca

SEQ ID NO: 28093 - DNA, 20 bp, synthetic construct
  source 1..20: mol_type = other DNA
tcatggggagcgtcgctcag

SEQ ID NO: 28094 - DNA, 20 bp, synthetic construct
  source 1..20: mol_type = other DNA
gggcgcgtagtggccatagg

SEQ ID NO: 28095 - DNA, 20 bp, synthetic construct
  source 1..20: mol_type = other DNA
ccgaggagttccctcacatg

SEQ ID NO: 28096 - DNA, 20 bp, synthetic construct
  source 1..20: mol_type = other DNA
ggactcgatggccactcgag

SEQ ID NO: 28097 - DNA, 20 bp, synthetic construct
  source 1..20: mol_type = other DNA
gcatgtgagggaactcctcg

SEQ ID NO: 28098 - DNA, 20 bp, synthetic construct
  source 1..20: mol_type = other DNA
attcgaccaactcaccccag

SEQ ID NO: 28099 - DNA, 20 bp, synthetic construct
  source 1..20: mol_type = other DNA
agagacctacaaaaagatgc

SEQ ID NO: 28100 - DNA, 20 bp, synthetic construct
  source 1..20: mol_type = other DNA
acgtacgacacggaccgcga

SEQ ID NO: 28101 - DNA, 20 bp, synthetic construct
  source 1..20: mol_type = other DNA
cgctggccgagcttcgcgcg

SEQ ID NO: 28102 - DNA, 20 bp, synthetic construct
  source 1..20: mol_type = other DNA
gccgcgtaccgggcgcgtag

SEQ ID NO: 28103 - DNA, 20 bp, synthetic construct
  source 1..20: mol_type = other DNA
ggacgagcggcgtttccggg

SEQ ID NO: 28104 - DNA, 20 bp, synthetic construct
  source 1..20: mol_type = other DNA
ggatcgcgcacacgcagcag

SEQ ID NO: 28105 - DNA, 20 bp, synthetic construct
  source 1..20: mol_type = other DNA
gggaagccatccccagacgc

SEQ ID NO: 28106 - DNA, 20 bp, synthetic construct
  source 1..20: mol_type = other DNA
ggtcgtactggaagttcccg

SEQ ID NO: 28107 - DNA, 20 bp, synthetic construct
  source 1..20: mol_type = other DNA
gctcggcatgcagttcggcg

SEQ ID NO: 28108 - DNA, 20 bp, synthetic construct
  source 1..20: mol_type = other DNA
accctccagtcatcaccccg

SEQ ID NO: 28109 - DNA, 20 bp, synthetic construct
  source 1..20: mol_type = other DNA
gaacatgaagtagaactccg

SEQ ID NO: 28110 - DNA, 20 bp, synthetic construct
  source 1..20: mol_type = other DNA
ctccaccacaacgcaatcgg

SEQ ID NO: 28111 - DNA, 20 bp, synthetic construct
  source 1..20: mol_type = other DNA
acaagtacgagtcaagcctc

SEQ ID NO: 28112 - DNA, 20 bp, synthetic construct
  source 1..20: mol_type = other DNA
tatggagtttaggatcagtg

SEQ ID NO: 28113 - DNA, 20 bp, synthetic construct
  source 1..20: mol_type = other DNA
gggcttctcccctagaccgt

SEQ ID NO: 28114 - DNA, 20 bp, synthetic construct
  source 1..20: mol_type = other DNA
ccggaaaccagccccaaccc

SEQ ID NO: 28115 - DNA, 20 bp, synthetic construct
  source 1..20: mol_type = other DNA
cacaggctggaattgagtga

SEQ ID NO: 28116 - DNA, 20 bp, synthetic construct
  source 1..20: mol_type = other DNA
aataatgtccgactcccaag

SEQ ID NO: 28117 - DNA, 20 bp, synthetic construct
  source 1..20: mol_type = other DNA
gctggctgcacctatcgctt

SEQ ID NO: 28118 - DNA, 20 bp, synthetic construct
  source 1..20: mol_type = other DNA
gaggcttgactcgtacttgt

SEQ ID NO: 28119 - DNA, 20 bp, synthetic construct
  source 1..20: mol_type = other DNA
tctttggtccaccccaacta

SEQ ID NO: 28120 - DNA, 20 bp, synthetic construct
  source 1..20: mol_type = other DNA
tacaccttccacccccccgc

SEQ ID NO: 28121 - DNA, 20 bp, synthetic construct
  source 1..20: mol_type = other DNA
cggcgtggatcccagagatg

SEQ ID NO: 28122 - DNA, 20 bp, synthetic construct
  source 1..20: mol_type = other DNA
aagaggtcagaatcatgcgc

SEQ ID NO: 28123 - DNA, 20 bp, synthetic construct
  source 1..20: mol_type = other DNA
gggcatacactgagtacagg

SEQ ID NO: 28124 - DNA, 20 bp, synthetic construct
  source 1..20: mol_type = other DNA
aatgggcaccgtgttgtcag

SEQ ID NO: 28125 - DNA, 20 bp, synthetic construct
  source 1..20: mol_type = other DNA
aaagatgagatacatgtcta

SEQ ID NO: 28126 - DNA, 20 bp, synthetic construct
  source 1..20: mol_type = other DNA
gagatcacaccaaagtacag

SEQ ID NO: 28127 - DNA, 20 bp, synthetic construct
  source 1..20: mol_type = other DNA
ctgagatcacaccaaagtac

SEQ ID NO: 28128 - DNA, 20 bp, synthetic construct
  source 1..20: mol_type = other DNA
ggtgaagacccctgacaaca

SEQ ID NO: 28129 - DNA, 20 bp, synthetic construct
  source 1..20: mol_type = other DNA
tgagatcacaccaaagtaca

SEQ ID NO: 28130 - DNA, 20 bp, synthetic construct
  source 1..20: mol_type = other DNA
gtgtatgcccagatcttcag

SEQ ID NO: 28131 - DNA, 20 bp, synthetic construct
  source 1..20: mol_type = other DNA
aaatgggcaccgtgttgtca

SEQ ID NO: 28132 - DNA, 20 bp, synthetic construct
  source 1..20: mol_type = other DNA
tctttgaacagaagcaccta

SEQ ID NO: 28133 - DNA, 20 bp, synthetic construct
  source 1..20: mol_type = other DNA
atacatgtctacggccatga

SEQ ID NO: 28134 - DNA, 20 bp, synthetic construct
  source 1..20: mol_type = other DNA
tccagacaatgtagatgacc

SEQ ID NO: 28135 - DNA, 20 bp, synthetic construct
  source 1..20: mol_type = other DNA
acaggaggaagcagctgatg

SEQ ID NO: 28136 - DNA, 20 bp, synthetic construct
  source 1..20: mol_type = other DNA
tgaggatggtgatgaaagac

SEQ ID NO: 28137 - DNA, 20 bp, synthetic construct
  source 1..20: mol_type = other DNA
gcactggctgaagtgacgct

SEQ ID NO: 28138 - DNA, 20 bp, synthetic construct
  source 1..20: mol_type = other DNA
gggaggagttcaccgtccgg

SEQ ID NO: 28139 - DNA, 20 bp, synthetic construct
  source 1..20: mol_type = other DNA
ttgtgagtcttccgcacccc

SEQ ID NO: 28140 - DNA, 20 bp, synthetic construct
  source 1..20: mol_type = other DNA
tgctggggcgcggagcatgt

SEQ ID NO: 28141 - DNA, 20 bp, synthetic construct
  source 1..20: mol_type = other DNA
gtattgctggaagaagagcg

SEQ ID NO: 28142 - DNA, 20 bp, synthetic construct
  source 1..20: mol_type = other DNA
gcgctgtaagatcctgatga

SEQ ID NO: 28143 - DNA, 20 bp, synthetic construct
  source 1..20: mol_type = other DNA
gagcggggcaaagagaaagc

SEQ ID NO: 28144 - DNA, 20 bp, synthetic construct
  source 1..20: mol_type = other DNA
gcgcagcaggtcctgaccag

SEQ ID NO: 28145 - DNA, 20 bp, synthetic construct
  source 1..20: mol_type = other DNA
cctgcgcagctaccacgagg

SEQ ID NO: 28146 - DNA, 20 bp, synthetic construct
  source 1..20: mol_type = other DNA
ccactccctgtcccgcatcg

SEQ ID NO: 28147 - DNA, 20 bp, synthetic construct
  source 1..20: mol_type = other DNA
gctcttcttccagcaatacc

SEQ ID NO: 28148 - DNA, 20 bp, synthetic construct
  source 1..20: mol_type = other DNA
agcgtcacttcagccagtgc

SEQ ID NO: 28149 - DNA, 20 bp, synthetic construct
  source 1..20: mol_type = other DNA
gtgacgctgggcattggccg

SEQ ID NO: 28150 - DNA, 20 bp, synthetic construct
  source 1..20: mol_type = other DNA
gcctcaaggaattccgggtg

SEQ ID NO: 28151 - DNA, 20 bp, synthetic construct
  source 1..20: mol_type = other DNA
catctcagtcaccatggctt

SEQ ID NO: 28152 - DNA, 20 bp, synthetic construct
  source 1..20: mol_type = other DNA
tcataggactgagataagag

SEQ ID NO: 28153 - DNA, 20 bp, synthetic construct
  source 1..20: mol_type = other DNA
tcactgtctaccaaatcatg

SEQ ID NO: 28154 - DNA, 20 bp, synthetic construct
  source 1..20: mol_type = other DNA
gcttcatagtgaatttcggg

SEQ ID NO: 28155 - DNA, 20 bp, synthetic construct
  source 1..20: mol_type = other DNA
cagagctgtcacctggaatg

SEQ ID NO: 28156 - DNA, 20 bp, synthetic construct
  source 1..20: mol_type = other DNA
ctagtggcatagccaacttg

SEQ ID NO: 28157 - DNA, 20 bp, synthetic construct
  source 1..20: mol_type = other DNA
gttgctaagtccctctgaag

SEQ ID NO: 28158 - DNA, 20 bp, synthetic construct
  source 1..20: mol_type = other DNA
caaggataacagctttactg

SEQ ID NO: 28159 - DNA, 20 bp, synthetic construct
  source 1..20: mol_type = other DNA
tgaaccacacagtgcgcagg

SEQ ID NO: 28160 - DNA, 20 bp, synthetic construct
  source 1..20: mol_type = other DNA
tttccgaaataatcctacca

SEQ ID NO: 28161 - DNA, 20 bp, synthetic construct
  source 1..20: mol_type = other DNA
atgaacacaagagtccaact

SEQ ID NO: 28162 - DNA, 20 bp, synthetic construct
  source 1..20: mol_type = other DNA
ggaagcagtagattatcacc

SEQ ID NO: 28163 - DNA, 20 bp, synthetic construct
  source 1..20: mol_type = other DNA
gtcagcatcaactggctccg

SEQ ID NO: 28164 - DNA, 20 bp, synthetic construct
  source 1..20: mol_type = other DNA
ggggttgatagttcttgggg

SEQ ID NO: 28165 - DNA, 20 bp, synthetic construct
  source 1..20: mol_type = other DNA
agagcatgctgaaatctcag

SEQ ID NO: 28166 - DNA, 20 bp, synthetic construct
  source 1..20: mol_type = other DNA
acgtgtccgggctgccacac

SEQ ID NO: 28167 - DNA, 20 bp, synthetic construct
  source 1..20: mol_type = other DNA
caggctagtctgagaagccg

SEQ ID NO: 28168 - DNA, 20 bp, synthetic construct
  source 1..20: mol_type = other DNA
agtaaacaggatgaagacgt

SEQ ID NO: 28169 - DNA, 20 bp, synthetic construct
  source 1..20: mol_type = other DNA
catggcctttgacagatatg

SEQ ID NO: 28170 - DNA, 20 bp, synthetic construct
  source 1..20: mol_type = other DNA
tggtcacagaaaacacaatg

SEQ ID NO: 28171 - DNA, 20 bp, synthetic construct
  source 1..20: mol_type = other DNA
acagggagtgactgacacca

SEQ ID NO: 28172 - DNA, 20 bp, synthetic construct
  source 1..20: mol_type = other DNA
tagggccacatatctgtcaa

SEQ ID NO: 28173 - DNA, 20 bp, synthetic construct
  source 1..20: mol_type = other DNA
ataatggtcagatagtggag

SEQ ID NO: 28174 - DNA, 20 bp, synthetic construct
  source 1..20: mol_type = other DNA
gtgactgacaccaagggtcc

SEQ ID NO: 28175 - DNA, 20 bp, synthetic construct
  source 1..20: mol_type = other DNA
gatagtggaggggcttacat

SEQ ID NO: 28176 - DNA, 20 bp, synthetic construct
  source 1..20: mol_type = other DNA
gaccatgaactgcaatctgt

SEQ ID NO: 28177 - DNA, 20 bp, synthetic construct
  source 1..20: mol_type = other DNA
cagggagtgactgacaccaa

SEQ ID NO: 28178 - DNA, 20 bp, synthetic construct
  source 1..20: mol_type = other DNA
atagtggaggggcttacata

SEQ ID NO: 28179 - DNA, 20 bp, synthetic construct
  source 1..20: mol_type = other DNA
ctggccagtagaaagtacat

SEQ ID NO: 28180 - DNA, 20 bp, synthetic construct
  source 1..20: mol_type = other DNA
ggccgtgtatacacaaacat

SEQ ID NO: 28181 - DNA, 20 bp, synthetic construct
  source 1..20: mol_type = other DNA
atcttcttcatccacgtcgt

SEQ ID NO: 28182 - DNA, 20 bp, synthetic construct
  source 1..20: mol_type = other DNA
aaccttagggaacctccaca

SEQ ID NO: 28183 - DNA, 20 bp, synthetic construct
  source 1..20: mol_type = other DNA
cggcccggcagatacctgag

SEQ ID NO: 28184 - DNA, 20 bp, synthetic construct
  source 1..20: mol_type = other DNA
gacatggtctggatagttgg

SEQ ID NO: 28185 - DNA, 20 bp, synthetic construct
  source 1..20: mol_type = other DNA
cccggcagatacctgagcgg

SEQ ID NO: 28186 - DNA, 20 bp, synthetic construct
  source 1..20: mol_type = other DNA
agatacctgagcggtggcca

SEQ ID NO: 28187 - DNA, 20 bp, synthetic construct
  source 1..20: mol_type = other DNA
gtcgctgtgtcccagaacat

SEQ ID NO: 28188 - DNA, 20 bp, synthetic construct
  source 1..20: mol_type = other DNA
tgattatgggtaagaagacc

SEQ ID NO: 28189 - DNA, 20 bp, synthetic construct
  source 1..20: mol_type = other DNA
accacaacctcttcagtaga

SEQ ID NO: 28190 - DNA, 20 bp, synthetic construct
  source 1..20: mol_type = other DNA
accttctactgaagaggttg

SEQ ID NO: 28191 - DNA, 20 bp, synthetic construct
  source 1..20: mol_type = other DNA
attagcaaataaagtagaca

SEQ ID NO: 28192 - DNA, 20 bp, synthetic construct
  source 1..20: mol_type = other DNA
gtagacatggtctggatagt

SEQ ID NO: 28193 - DNA, 20 bp, synthetic construct
  source 1..20: mol_type = other DNA
gtgtcccagaacatgggcat

SEQ ID NO: 28194 - DNA, 20 bp, synthetic construct
  source 1..20: mol_type = other DNA
agaaaatgagctccttgtgg

SEQ ID NO: 28195 - DNA, 20 bp, synthetic construct
  source 1..20: mol_type = other DNA
cgtcgctgtgtcccagaaca

SEQ ID NO: 28196 - DNA, 20 bp, synthetic construct
  source 1..20: mol_type = other DNA
gcaagaacggggacctgccc

SEQ ID NO: 28197 - DNA, 20 bp, synthetic construct
  source 1..20: mol_type = other DNA
cgtgactatagaattcaccc

SEQ ID NO: 28198 - DNA, 20 bp, synthetic construct
  source 1..20: mol_type = other DNA
taataaaacattgactacag

SEQ ID NO: 28199 - DNA, 20 bp, synthetic construct
  source 1..20: mol_type = other DNA
gaactctgtgaaccgacgtc

SEQ ID NO: 28200 - DNA, 20 bp, synthetic construct
  source 1..20: mol_type = other DNA
gtactgctgtttcaaaccag

SEQ ID NO: 28201 - DNA, 20 bp, synthetic construct
  source 1..20: mol_type = other DNA
tctgtgaaccgacgtctggt

SEQ ID NO: 28202 - DNA, 20 bp, synthetic construct
  source 1..20: mol_type = other DNA
aattcctcctctgagaacca

SEQ ID NO: 28203 - DNA, 20 bp, synthetic construct
  source 1..20: mol_type = other DNA
gcagaaaatgaacatatctc

SEQ ID NO: 28204 - DNA, 20 bp, synthetic construct
  source 1..20: mol_type = other DNA
gtacagattcttctgaacag

SEQ ID NO: 28205 - DNA, 20 bp, synthetic construct
  source 1..20: mol_type = other DNA
accacaggagaactggcaca

SEQ ID NO: 28206 - DNA, 20 bp, synthetic construct
  source 1..20: mol_type = other DNA
taatgacagaacacagactt

SEQ ID NO: 28207 - DNA, 20 bp, synthetic construct
  source 1..20: mol_type = other DNA
cagctgtttgaggatcagtg

SEQ ID NO: 28208 - DNA, 20 bp, synthetic construct
  source 1..20: mol_type = other DNA
ctttgagaagtcaactgtgg

SEQ ID NO: 28209 - DNA, 20 bp, synthetic construct
  source 1..20: mol_type = other DNA
aaacataacagttctcacac

SEQ ID NO: 28210 - DNA, 20 bp, synthetic construct
  source 1..20: mol_type = other DNA
tcaacaaagaaaataggttg

SEQ ID NO: 28211 - DNA, 20 bp, synthetic construct
  source 1..20: mol_type = other DNA
tgtcatagaagagaacccat

SEQ ID NO: 28212 - DNA, 20 bp, synthetic construct
  source 1..20: mol_type = other DNA
ggtctgggtaaattgatgag

SEQ ID NO: 28213 - DNA, 20 bp, synthetic construct
  source 1..20: mol_type = other DNA
gagacatagctacaactgac

SEQ ID NO: 28214 - DNA, 20 bp, synthetic construct
  source 1..20: mol_type = other DNA
atttgggacgtcaagaccag

SEQ ID NO: 28215 - DNA, 20 bp, synthetic construct
  source 1..20: mol_type = other DNA
tcattacaatcttacagagg

SEQ ID NO: 28216 - DNA, 20 bp, synthetic construct
  source 1..20: mol_type = other DNA
gtgatggctgagaagcatcc

SEQ ID NO: 28217 - DNA, 20 bp, synthetic construct
  source 1..20: mol_type = other DNA
gccagtataaaggcacctgt

SEQ ID NO: 28218 - DNA, 20 bp, synthetic construct
  source 1..20: mol_type = other DNA
caagtttggaaactatcagc

SEQ ID NO: 28219 - DNA, 20 bp, synthetic construct
  source 1..20: mol_type = other DNA
tcagccatcacggaatccaa

SEQ ID NO: 28220 - DNA, 20 bp, synthetic construct
  source 1..20: mol_type = other DNA
atcagtggttatgcaaaagt

SEQ ID NO: 28221 - DNA, 20 bp, synthetic construct
  source 1..20: mol_type = other DNA
gaagaagaatccagcagaag

SEQ ID NO: 28222 - DNA, 20 bp, synthetic construct
  source 1..20: mol_type = other DNA
gctgctttaggtgggatcag

SEQ ID NO: 28223 - DNA, 20 bp, synthetic construct
  source 1..20: mol_type = other DNA
tgtctataggtaaaatctca

SEQ ID NO: 28224 - DNA, 20 bp, synthetic construct
  source 1..20: mol_type = other DNA
ttacctatagacacagaaag

SEQ ID NO: 28225 - DNA, 20 bp, synthetic construct
  source 1..20: mol_type = other DNA
tcagagtatattaaaaatag

SEQ ID NO: 28226 - DNA, 20 bp, synthetic construct
  source 1..20: mol_type = other DNA
caggaaagtggtataggtgc

SEQ ID NO: 28227 - DNA, 20 bp, synthetic construct
  source 1..20: mol_type = other DNA
ggcccttggcgtgcccgacg

SEQ ID NO: 28228 - DNA, 20 bp, synthetic construct
  source 1..20: mol_type = other DNA
ctggcaatctcccccgatgg

SEQ ID NO: 28229 - DNA, 20 bp, synthetic construct
  source 1..20: mol_type = other DNA
gctcaggcgacagtcgaagt

SEQ ID NO: 28230 - DNA, 20 bp, synthetic construct
  source 1..20: mol_type = other DNA
tgtgttcgtctgccctggcg

SEQ ID NO: 28231 - DNA, 20 bp, synthetic construct
  source 1..20: mol_type = other DNA
ggcattgaaggccgatgcgg

SEQ ID NO: 28232 - DNA, 20 bp, synthetic construct
  source 1..20: mol_type = other DNA
aaccagcaccaactacccag

SEQ ID NO: 28233 - DNA, 20 bp, synthetic construct
  source 1..20: mol_type = other DNA
agtccgaaacaccgtcaatg

SEQ ID NO: 28234 - DNA, 20 bp, synthetic construct
  source 1..20: mol_type = other DNA
cagacgaacacatcgccctg

SEQ ID NO: 28235 - DNA, 20 bp, synthetic construct
  source 1..20: mol_type = other DNA
agggctgccagtggatcgca

SEQ ID NO: 28236 - DNA, 20 bp, synthetic construct
  source 1..20: mol_type = other DNA
accggctccagaataggcaa

SEQ ID NO: 28237 - DNA, 20 bp, synthetic construct
  source 1..20: mol_type = other DNA
agagcttgctgggcccatgt

SEQ ID NO: 28238 - DNA, 20 bp, synthetic construct
  source 1..20: mol_type = other DNA
ccacgtcccgcagcgaggcg

SEQ ID NO: 28239 - DNA, 20 bp, synthetic construct
  source 1..20: mol_type = other DNA
ggggtcaggtgagctgaaca

SEQ ID NO: 28240 - DNA, 20 bp, synthetic construct
  source 1..20: mol_type = other DNA
ttccgatgatgattccaggg

SEQ ID NO: 28241 - DNA, 20 bp, synthetic construct
  source 1..20: mol_type = other DNA
gagctgcgggggtatcaggg

SEQ ID NO: 28242 - DNA, 20 bp, synthetic construct
  source 1..20: mol_type = other DNA
atagggcgattggtaaaaga

SEQ ID NO: 28243 - DNA, 20 bp, synthetic construct
  source 1..20: mol_type = other DNA
atacatcggaatcggatgga

SEQ ID NO: 28244 - DNA, 20 bp, synthetic construct
  source 1..20: mol_type = other DNA
cgctctcgctacctgtgcgg

SEQ ID NO: 28245 - DNA, 20 bp, synthetic construct
  source 1..20: mol_type = other DNA
gacaaatgtcagctacagtg

SEQ ID NO: 28246 - DNA, 20 bp, synthetic construct
  source 1..20: mol_type = other DNA
tgtaggagtctgccgaaccc

SEQ ID NO: 28247 - DNA, 20 bp, synthetic construct
  source 1..20: mol_type = other DNA
ctttactccagtaaatcagg

SEQ ID NO: 28248 - DNA, 20 bp, synthetic construct
  source 1..20: mol_type = other DNA
cagtgcgcagagaagcggag

SEQ ID NO: 28249 - DNA, 20 bp, synthetic construct
  source 1..20: mol_type = other DNA
catgaacagagagccaagca

SEQ ID NO: 28250 - DNA, 20 bp, synthetic construct
  source 1..20: mol_type = other DNA
tgtccgaaccgcaaatgcaa

SEQ ID NO: 28251 - DNA, 20 bp, synthetic construct
  source 1..20: mol_type = other DNA
cagtcaaactagaaaacatg

SEQ ID NO: 28252 - DNA, 20 bp, synthetic construct
  source 1..20: mol_type = other DNA
cgattccgatgtatctctgg

SEQ ID NO: 28253 - DNA, 20 bp, synthetic construct
  source 1..20: mol_type = other DNA
acctacttaccagatgatgg

SEQ ID NO: 28254 - DNA, 20 bp, synthetic construct
  source 1..20: mol_type = other DNA
gcacactcctccgtatgatg

SEQ ID NO: 28255 - DNA, 20 bp, synthetic construct
  source 1..20: mol_type = other DNA
agaaatttaacaatgactgg

SEQ ID NO: 28256 - DNA, 20 bp, synthetic construct
  source 1..20: mol_type = other DNA
taatagaaagatccaacaca

SEQ ID NO: 28257 - DNA, 20 bp, synthetic construct
  source 1..20: mol_type = other DNA
ggctttggacagcagtcccg

SEQ ID NO: 28258 - DNA, 20 bp, synthetic construct
  source 1..20: mol_type = other DNA
tacaacgatggagactacga

SEQ ID NO: 28259 - DNA, 20 bp, synthetic construct
  source 1..20: mol_type = other DNA
gcttgggcggaatgctaagt

SEQ ID NO: 28260 - DNA, 20 bp, synthetic construct
  source 1..20: mol_type = other DNA
acgatgttgatggggtacgc

SEQ ID NO: 28261 - DNA, 20 bp, synthetic construct
  source 1..20: mol_type = other DNA
ttgtagctgttcagagactg

SEQ ID NO: 28262 - DNA, 20 bp, synthetic construct
  source 1..20: mol_type = other DNA
cgatgttgatggggtacgca

SEQ ID NO: 28263 - DNA, 20 bp, synthetic construct
  source 1..20: mol_type = other DNA
tgaagatgacaagaccgagg

SEQ ID NO: 28264 - DNA, 20 bp, synthetic construct
  source 1..20: mol_type = other DNA
ccctagcccggacttcaaga

SEQ ID NO: 28265 - DNA, 20 bp, synthetic construct
  source 1..20: mol_type = other DNA
cactgaagatgacaagaccg

SEQ ID NO: 28266 - DNA, 20 bp, synthetic construct
  source 1..20: mol_type = other DNA
tgcgtaccccatcaacatcg

SEQ ID NO: 28267 - DNA, 20 bp, synthetic construct
  source 1..20: mol_type = other DNA
ccatgcccaagaactacctg

SEQ ID NO: 28268 - DNA, 20 bp, synthetic construct
  source 1..20: mol_type = other DNA
ccaaagccacgatgttgatg

SEQ ID NO: 28269 - DNA, 20 bp, synthetic construct
  source 1..20: mol_type = other DNA
ggtcttgtcatcttcagtgt

SEQ ID NO: 28270 - DNA, 20 bp, synthetic construct
  source 1..20: mol_type = other DNA
gttgtagctgttcagagact

SEQ ID NO: 28271 - DNA, 20 bp, synthetic construct
  source 1..20: mol_type = other DNA
cacaggtagttcttgggcat

SEQ ID NO: 28272 - DNA, 20 bp, synthetic construct
  source 1..20: mol_type = other DNA
aaaccctatgaacccaagtg

SEQ ID NO: 28273 - DNA, 20 bp, synthetic construct
  source 1..20: mol_type = other DNA
ttcacatcggcagccacccg

SEQ ID NO: 28274 - DNA, 20 bp, synthetic construct
  source 1..20: mol_type = other DNA
cacacttacagacttcacaa

SEQ ID NO: 28275 - DNA, 20 bp, synthetic construct
  source 1..20: mol_type = other DNA
tcacatcggcagccacccgt

SEQ ID NO: 28276 - DNA, 20 bp, synthetic construct
  source 1..20: mol_type = other DNA
cctatgaacccaagtgtggt

SEQ ID NO: 28277 - DNA, 20 bp, synthetic construct
  source 1..20: mol_type = other DNA
cttacagacttcacaatgga

SEQ ID NO: 28278 - DNA, 20 bp, synthetic construct
  source 1..20: mol_type = other DNA
acagacttctcagcacagag

SEQ ID NO: 28279 - DNA, 20 bp, synthetic construct
  source 1..20: mol_type = other DNA
gacagacatatagatccctc

SEQ ID NO: 28280 - DNA, 20 bp, synthetic construct
  source 1..20: mol_type = other DNA
actctgtgctgagaagtctg

SEQ ID NO: 28281 - DNA, 20 bp, synthetic construct
  source 1..20: mol_type = other DNA
cagacttctcagcacagagt

SEQ ID NO: 28282 - DNA, 20 bp, synthetic construct
  source 1..20: mol_type = other DNA
tatatacaaaccacatcctc

SEQ ID NO: 28283 - DNA, 20 bp, synthetic construct
  source 1..20: mol_type = other DNA
ttgtaacagtttcccacggg

SEQ ID NO: 28284 - DNA, 20 bp, synthetic construct
  source 1..20: mol_type = other DNA
gtggctgtgcaactttccag

SEQ ID NO: 28285 - DNA, 20 bp, synthetic construct
  source 1..20: mol_type = other DNA
gctgttgtaacagtttccca

SEQ ID NO: 28286 - DNA, 20 bp, synthetic construct
  source 1..20: mol_type = other DNA
tgtggttggagttgatgtgt

SEQ ID NO: 28287 - DNA, 20 bp, synthetic construct
  source 1..20: mol_type = other DNA
acgatcggatctaacaacgg

SEQ ID NO: 28288 - DNA, 20 bp, synthetic construct
  source 1..20: mol_type = other DNA
gccatcgctgtcactatcgg

SEQ ID NO: 28289 - DNA, 20 bp, synthetic construct
  source 1..20: mol_type = other DNA
ttgtgatcgctcgcccacga

SEQ ID NO: 28290 - DNA, 20 bp, synthetic construct
  source 1..20: mol_type = other DNA
cttacctctgaatccgacac

SEQ ID NO: 28291 - DNA, 20 bp, synthetic construct
  source 1..20: mol_type = other DNA
tcttggttctaacctcactg

SEQ ID NO: 28292 - DNA, 20 bp, synthetic construct
  source 1..20: mol_type = other DNA
atcaaacgtcccgcaaacag

SEQ ID NO: 28293 - DNA, 20 bp, synthetic construct
  source 1..20: mol_type = other DNA
cccagacagcacccacatgg

SEQ ID NO: 28294 - DNA, 20 bp, synthetic construct
  source 1..20: mol_type = other DNA
attactgcagtacaccgagt

SEQ ID NO: 28295 - DNA, 20 bp, synthetic construct
  source 1..20: mol_type = other DNA
caggccatacgaccctgagg

SEQ ID NO: 28296 - DNA, 20 bp, synthetic construct
  source 1..20: mol_type = other DNA
cagaagtctagcgaagacca

SEQ ID NO: 28297 - DNA, 20 bp, synthetic construct
  source 1..20: mol_type = other DNA
taataacaacaggcacgtca

SEQ ID NO: 28298 - DNA, 20 bp, synthetic construct
  source 1..20: mol_type = other DNA
ggcacgaggtttctaggtgc

SEQ ID NO: 28299 - DNA, 20 bp, synthetic construct
  source 1..20: mol_type = other DNA
agctgaagcaccactcgatg

SEQ ID NO: 28300 - DNA, 20 bp, synthetic construct
  source 1..20: mol_type = other DNA
gccagcctcacaacaacagg

SEQ ID NO: 28301 - DNA, 20 bp, synthetic construct
  source 1..20: mol_type = other DNA
catctccttctcaatatgga

SEQ ID NO: 28302 - DNA, 20 bp, synthetic construct
  source 1..20: mol_type = other DNA
taatacttacagcgataacc

SEQ ID NO: 28303 - DNA, 20 bp, synthetic construct
  source 1..20: mol_type = other DNA
atatggtcgctctatgacgc

SEQ ID NO: 28304 - DNA, 20 bp, synthetic construct
  source 1..20: mol_type = other DNA
gatatggtcgctctatgacg

SEQ ID NO: 28305 - DNA, 20 bp, synthetic construct
  source 1..20: mol_type = other DNA
gaggacacctgatacttcgg

SEQ ID NO: 28306 - DNA, 20 bp, synthetic construct
  source 1..20: mol_type = other DNA
aggattagggaatggactct

SEQ ID NO: 28307 - DNA, 20 bp, synthetic construct
  source 1..20: mol_type = other DNA
atctgcagttccactgacag

SEQ ID NO: 28308 - DNA, 20 bp, synthetic construct
  source 1..20: mol_type = other DNA
tggcccggtggaccctatga

SEQ ID NO: 28309 - DNA, 20 bp, synthetic construct
  source 1..20: mol_type = other DNA
gaagatagaggtgtcactga

SEQ ID NO: 28310 - DNA, 20 bp, synthetic construct
  source 1..20: mol_type = other DNA
cctgtctaccatgaaatcaa

SEQ ID NO: 28311 - DNA, 20 bp, synthetic construct
  source 1..20: mol_type = other DNA
tgtcactgaaggaattgcag

SEQ ID NO: 28312 - DNA, 20 bp, synthetic construct
  source 1..20: mol_type = other DNA
accttccctccagattattg

SEQ ID NO: 28313 - DNA, 20 bp, synthetic construct
  source 1..20: mol_type = other DNA
acagggggcaggaatatgag

SEQ ID NO: 28314 - DNA, 20 bp, synthetic construct
  source 1..20: mol_type = other DNA
cagtcagagccaaaatctgc

SEQ ID NO: 28315 - DNA, 20 bp, synthetic construct
  source 1..20: mol_type = other DNA
atgatgatgacagtaagata

SEQ ID NO: 28316 - DNA, 20 bp, synthetic construct
  source 1..20: mol_type = other DNA
atccatcacagaactcgaga

SEQ ID NO: 28317 - DNA, 20 bp, synthetic construct
  source 1..20: mol_type = other DNA
ggagtctctgaagagagctg

SEQ ID NO: 28318 - DNA, 20 bp, synthetic construct
  source 1..20: mol_type = other DNA
tctgggcaggggcttattgt

SEQ ID NO: 28319 - DNA, 20 bp, synthetic construct
  source 1..20: mol_type = other DNA
taagcccctgcccagagatg

SEQ ID NO: 28320 - DNA, 20 bp, synthetic construct
  source 1..20: mol_type = other DNA
acctggggaagggttaaagc

SEQ ID NO: 28321 - DNA, 20 bp, synthetic construct
  source 1..20: mol_type = other DNA
aagcccctgcccagagatga

SEQ ID NO: 28322 - DNA, 20 bp, synthetic construct
  source 1..20: mol_type = other DNA
cctgcccagagatgagggaa

SEQ ID NO: 28323 - DNA, 20 bp, synthetic construct
  source 1..20: mol_type = other DNA
atggggacaatgggaacctg

SEQ ID NO: 28324 - DNA, 20 bp, synthetic construct
  source 1..20: mol_type = other DNA
acctgctttaacccttcccc

SEQ ID NO: 28325 - DNA, 20 bp, synthetic construct
  source 1..20: mol_type = other DNA
attccctcatctctgggcag

SEQ ID NO: 28326 - DNA, 20 bp, synthetic construct
  source 1..20: mol_type = other DNA
tatggggacaatgggaacct

SEQ ID NO: 28327 - DNA, 20 bp, synthetic construct
  source 1..20: mol_type = other DNA
ccccaccattccctcatctc

SEQ ID NO: 28328 - DNA, 20 bp, synthetic construct
  source 1..20: mol_type = other DNA
ccattccctcatctctgggc

SEQ ID NO: 28329 - DNA, 20 bp, synthetic construct
  source 1..20: mol_type = other DNA
gacaatgggaacctggggaa

SEQ ID NO: 28330 - DNA, 20 bp, synthetic construct
  source 1..20: mol_type = other DNA
ctatggggacaatgggaacc

SEQ ID NO: 28331 - DNA, 20 bp, synthetic construct
  source 1..20: mol_type = other DNA
ggacaatgggaacctgggga

SEQ ID NO: 28332 - DNA, 20 bp, synthetic construct
  source 1..20: mol_type = other DNA
tagagtaaaaacaaatgggt

SEQ ID NO: 28333 - DNA, 20 bp, synthetic construct
  source 1..20: mol_type = other DNA
ttccatgaaaacctgtcacc

SEQ ID NO: 28334 - DNA, 20 bp, synthetic construct
  source 1..20: mol_type = other DNA
ccaagtttcccaagaccacg

SEQ ID NO: 28335 - DNA, 20 bp, synthetic construct
  source 1..20: mol_type = other DNA
aaataaggaagtcatcaccc

SEQ ID NO: 28336 - DNA, 20 bp, synthetic construct
  source 1..20: mol_type = other DNA
gagtaaaaacaaatgggtag

SEQ ID NO: 28337 - DNA, 20 bp, synthetic construct
  source 1..20: mol_type = other DNA
ccagttgagaagaaagcagt

SEQ ID NO: 28338 - DNA, 20 bp, synthetic construct
  source 1..20: mol_type = other DNA
cccacctgaaattcaaacat

SEQ ID NO: 28339 - DNA, 20 bp, synthetic construct
  source 1..20: mol_type = other DNA
ccacctgaaattcaaacatg

SEQ ID NO: 28340 - DNA, 20 bp, synthetic construct
  source 1..20: mol_type = other DNA
aagtgacagtcctcttgggt

SEQ ID NO: 28341 - DNA, 20 bp, synthetic construct
  source 1..20: mol_type = other DNA
tcccacctgaaattcaaaca

SEQ ID NO: 28342 - DNA, 20 bp, synthetic construct
  source 1..20: mol_type = other DNA
atgaagtgttctgtagcaaa

SEQ ID NO: 28343 - DNA, 20 bp, synthetic construct
  source 1..20: mol_type = other DNA
agtcatcacccaggagctgg

SEQ ID NO: 28344 - DNA, 20 bp, synthetic construct
  source 1..20: mol_type = other DNA
tcacccaggagctggaggta

SEQ ID NO: 28345 - DNA, 20 bp, synthetic construct
  source 1..20: mol_type = other DNA
cccatgtttgaatttcaggt

SEQ ID NO: 28346 - DNA, 20 bp, synthetic construct
  source 1..20: mol_type = other DNA
aagcagtaggagctgtgatg

SEQ ID NO: 28347 - DNA, 20 bp, synthetic construct
  source 1..20: mol_type = other DNA
ccagtacagtatcttcgatg

SEQ ID NO: 28348 - DNA, 20 bp, synthetic construct
  source 1..20: mol_type = other DNA
catgcaaggcatgccaactg

SEQ ID NO: 28349 - DNA, 20 bp, synthetic construct
  source 1..20: mol_type = other DNA
cttgtcactcagatccatgc

SEQ ID NO: 28350 - DNA, 20 bp, synthetic construct
  source 1..20: mol_type = other DNA
gatcaacgccatctattcga

SEQ ID NO: 28351 - DNA, 20 bp, synthetic construct
  source 1..20: mol_type = other DNA
agtagtcaagtcctcaagca

SEQ ID NO: 28352 - DNA, 20 bp, synthetic construct
  source 1..20: mol_type = other DNA
tacaagggctgagtagctca

SEQ ID NO: 28353 - DNA, 20 bp, synthetic construct
  source 1..20: mol_type = other DNA
aaaagctagccatataatgc

SEQ ID NO: 28354 - DNA, 20 bp, synthetic construct
  source 1..20: mol_type = other DNA
gaaattctcccgctagaccc

SEQ ID NO: 28355 - DNA, 20 bp, synthetic construct
  source 1..20: mol_type = other DNA
agaaggtacataagtagccc

SEQ ID NO: 28356 - DNA, 20 bp, synthetic construct
  source 1..20: mol_type = other DNA
tagtcatgcattatgtcagg

SEQ ID NO: 28357 - DNA, 20 bp, synthetic construct
  source 1..20: mol_type = other DNA
agtgacaactcctaggttgg

SEQ ID NO: 28358 - DNA, 20 bp, synthetic construct
  source 1..20: mol_type = other DNA
gaagactacagtaacaaaca

SEQ ID NO: 28359 - DNA, 20 bp, synthetic construct
  source 1..20: mol_type = other DNA
ggatatcagcgagaagctgt

SEQ ID NO: 28360 - DNA, 20 bp, synthetic construct
  source 1..20: mol_type = other DNA
tgttccagctaacttcaacg

SEQ ID NO: 28361 - DNA, 20 bp, synthetic construct
  source 1..20: mol_type = other DNA
tgtgtgcacggctgatacat

SEQ ID NO: 28362 - DNA, 20 bp, synthetic construct
  source 1..20: mol_type = other DNA
ggggctctacctcctgacgt

SEQ ID NO: 28363 - DNA, 20 bp, synthetic construct
  source 1..20: mol_type = other DNA
aggacacatagcagatgtcc

SEQ ID NO: 28364 - DNA, 20 bp, synthetic construct
  source 1..20: mol_type = other DNA
acagaagacaaagtactgag

SEQ ID NO: 28365 - DNA, 20 bp, synthetic construct
  source 1..20: mol_type = other DNA
atggtggttggcgcctatgt

SEQ ID NO: 28366 - DNA, 20 bp, synthetic construct
  source 1..20: mol_type = other DNA
tatgaggactgtgtaaagca

SEQ ID NO: 28367 - DNA, 20 bp, synthetic construct
  source 1..20: mol_type = other DNA
gtcagacagcatcttagggg

SEQ ID NO: 28368 - DNA, 20 bp, synthetic construct
  source 1..20: mol_type = other DNA
tgataccttcaccagcgagg

SEQ ID NO: 28369 - DNA, 20 bp, synthetic construct
  source 1..20: mol_type = other DNA
gtgagagtccatcttaatga

SEQ ID NO: 28370 - DNA, 20 bp, synthetic construct
  source 1..20: mol_type = other DNA
aacgacaacactgactatga

SEQ ID NO: 28371 - DNA, 20 bp, synthetic construct
  source 1..20: mol_type = other DNA
aacaaagtgtatgggatatg

SEQ ID NO: 28372 - DNA, 20 bp, synthetic construct
  source 1..20: mol_type = other DNA
ggttgcagattgcagcatac

SEQ ID NO: 28373 - DNA, 20 bp, synthetic construct
  source 1..20: mol_type = other DNA
gaggatggtctgaaagtccc

SEQ ID NO: 28374 - DNA, 20 bp, synthetic construct
  source 1..20: mol_type = other DNA
ccaggaaggacaggttactg

SEQ ID NO: 28375 - DNA, 20 bp, synthetic construct
  source 1..20: mol_type = other DNA
gagggaggtcacagaaaaag

SEQ ID NO: 28376 - DNA, 20 bp, synthetic construct
  source 1..20: mol_type = other DNA
gctggtgaaggtatcagagc

SEQ ID NO: 28377 - DNA, 20 bp, synthetic construct
  source 1..20: mol_type = other DNA
gcactcggaccacgcagcgg

SEQ ID NO: 28378 - DNA, 20 bp, synthetic construct
  source 1..20: mol_type = other DNA
ggaaccgcacacaaagagcg

SEQ ID NO: 28379 - DNA, 20 bp, synthetic construct
  source 1..20: mol_type = other DNA
ccgagtgtgcaagaacgacg

SEQ ID NO: 28380 - DNA, 20 bp, synthetic construct
  source 1..20: mol_type = other DNA
ggcattgtactgcatcccgg

SEQ ID NO: 28381 - DNA, 20 bp, synthetic construct
  source 1..20: mol_type = other DNA
gctccagctctacgcggtag

SEQ ID NO: 28382 - DNA, 20 bp, synthetic construct
  source 1..20: mol_type = other DNA
ggaagatgcaggagccgtcg

SEQ ID NO: 28383 - DNA, 20 bp, synthetic construct
  source 1..20: mol_type = other DNA
caggcaccagctgactcgag

SEQ ID NO: 28384 - DNA, 20 bp, synthetic construct
  source 1..20: mol_type = other DNA
cgcctcgtccatcagagggt

SEQ ID NO: 28385 - DNA, 20 bp, synthetic construct
  source 1..20: mol_type = other DNA
aagtttcgacactcgccctg

SEQ ID NO: 28386 - DNA, 20 bp, synthetic construct
  source 1..20: mol_type = other DNA
ccgtccccgcctcagaaccc

SEQ ID NO: 28387 - DNA, 20 bp, synthetic construct
  source 1..20: mol_type = other DNA
tcatacaccccgagtactgc

SEQ ID NO: 28388 - DNA, 20 bp, synthetic construct
  source 1..20: mol_type = other DNA
ggagtttgagacctaccggc

SEQ ID NO: 28389 - DNA, 20 bp, synthetic construct
  source 1..20: mol_type = other DNA
gccttactttgtccatgcgg

SEQ ID NO: 28390 - DNA, 20 bp, synthetic construct
  source 1..20: mol_type = other DNA
gctgtgaagagcatcccgtc

SEQ ID NO: 28391 - DNA, 20 bp, synthetic construct
  source 1..20: mol_type = other DNA
ggcccgctgcccacaaacac

SEQ ID NO: 28392 - DNA, 20 bp, synthetic construct
  source 1..20: mol_type = other DNA
aagtgcaggagattcatccc

SEQ ID NO: 28393 - DNA, 20 bp, synthetic construct
  source 1..20: mol_type = other DNA
atatcttctacaatggaccg

SEQ ID NO: 28394 - DNA, 20 bp, synthetic construct
  source 1..20: mol_type = other DNA
ggctccaggcaggctatcgt

SEQ ID NO: 28395 - DNA, 20 bp, synthetic construct
  source 1..20: mol_type = other DNA
cgggagcggcgggtgttcgg

SEQ ID NO: 28396 - DNA, 20 bp, synthetic construct
  source 1..20: mol_type = other DNA
gggaattaaggagcatgagc

SEQ ID NO: 28397 - DNA, 20 bp, synthetic construct
  source 1..20: mol_type = other DNA
gcaaaacggagcatgaacat

SEQ ID NO: 28398 - DNA, 20 bp, synthetic construct
  source 1..20: mol_type = other DNA
aattgatacaaagaccattg

SEQ ID NO: 28399 - DNA, 20 bp, synthetic construct
  source 1..20: mol_type = other DNA
tgaagccatggtgctaaaga

SEQ ID NO: 28400 - DNA, 20 bp, synthetic construct
  source 1..20: mol_type = other DNA
attatctctggagaacacgg

SEQ ID NO: 28401 - DNA, 20 bp, synthetic construct
  source 1..20: mol_type = other DNA
gcagcgctcctgggcaactg

SEQ ID NO: 28402 - DNA, 20 bp, synthetic construct
  source 1..20: mol_type = other DNA
gaaaaaatctataagggtgt

SEQ ID NO: 28403 - DNA, 20 bp, synthetic construct
  source 1..20: mol_type = other DNA
tccctcaggacaaccacgac

SEQ ID NO: 28404 - DNA, 20 bp, synthetic construct
  source 1..20: mol_type = other DNA
cgacgtgtcgaagctgtctc

SEQ ID NO: 28405 - DNA, 20 bp, synthetic construct
  source 1..20: mol_type = other DNA
gctcactgtacctctttcgg

SEQ ID NO: 28406 - DNA, 20 bp, synthetic construct
  source 1..20: mol_type = other DNA
ccgttcatgtgagtagttgg

SEQ ID NO: 28407 - DNA, 20 bp, synthetic construct
  source 1..20: mol_type = other DNA
cccacgtaccgacaccactg

SEQ ID NO: 28408 - DNA, 20 bp, synthetic construct
  source 1..20: mol_type = other DNA
taaccacacgggctacgatg

SEQ ID NO: 28409 - DNA, 20 bp, synthetic construct
  source 1..20: mol_type = other DNA
ggcattcatcgtctacacag

SEQ ID NO: 28410 - DNA, 20 bp, synthetic construct
  source 1..20: mol_type = other DNA
agaggccattaaaaacatgg

SEQ ID NO: 28411 - DNA, 20 bp, synthetic construct
  source 1..20: mol_type = other DNA
gccgtgaaatacaccacctg

SEQ ID NO: 28412 - DNA, 20 bp, synthetic construct
  source 1..20: mol_type = other DNA
ggggaccaggaaactacctg

SEQ ID NO: 28413 - DNA, 20 bp, synthetic construct
  source 1..20: mol_type = other DNA
cttggaatcggagctagaca

SEQ ID NO: 28414 - DNA, 20 bp, synthetic construct
  source 1..20: mol_type = other DNA
tgggagtgaacatgtacatg

SEQ ID NO: 28415 - DNA, 20 bp, synthetic construct
  source 1..20: mol_type = other DNA
gacaatgctggcaaatatgg

SEQ ID NO: 28416 - DNA, 20 bp, synthetic construct
  source 1..20: mol_type = other DNA
gccagttccaggtacaagag

SEQ ID NO: 28417 - DNA, 20 bp, synthetic construct
  source 1..20: mol_type = other DNA
gaagaaagagaccaccacgc

SEQ ID NO: 28418 - DNA, 20 bp, synthetic construct
  source 1..20: mol_type = other DNA
tgcttgggtaggcagatgcg

SEQ ID NO: 28419 - DNA, 20 bp, synthetic construct
  source 1..20: mol_type = other DNA
ggagaacgggggtgtgcagt

SEQ ID NO: 28420 - DNA, 20 bp, synthetic construct
  source 1..20: mol_type = other DNA
tagatgatgagcacgcaata

SEQ ID NO: 28421 - DNA, 20 bp, synthetic construct
  source 1..20: mol_type = other DNA
ggagtggaagaggtaccaga

SEQ ID NO: 28422 - DNA, 20 bp, synthetic construct
  source 1..20: mol_type = other DNA
agtgagatgcagctaactgt

SEQ ID NO: 28423 - DNA, 20 bp, synthetic construct
  source 1..20: mol_type = other DNA
aatcagtactgctatgacac

SEQ ID NO: 28424 - DNA, 20 bp, synthetic construct
  source 1..20: mol_type = other DNA
gtttccactcatactcgaag

SEQ ID NO: 28425 - DNA, 20 bp, synthetic construct
  source 1..20: mol_type = other DNA
aagttgaaggtgttggacac

SEQ ID NO: 28426 - DNA, 20 bp, synthetic construct
  source 1..20: mol_type = other DNA
aacatctgttccttcaagag

SEQ ID NO: 28427 - DNA, 20 bp, synthetic construct
  source 1..20: mol_type = other DNA
gtaactttgggtaagaaaag

SEQ ID NO: 28428 - DNA, 20 bp, synthetic construct
  source 1..20: mol_type = other DNA
accttcggaagtgcttgcaa

SEQ ID NO: 28429 - DNA, 20 bp, synthetic construct
  source 1..20: mol_type = other DNA
tagagatgcacggccagcac

SEQ ID NO: 28430 - DNA, 20 bp, synthetic construct
  source 1..20: mol_type = other DNA
agcggccaaagattggaaag

SEQ ID NO: 28431 - DNA, 20 bp, synthetic construct
  source 1..20: mol_type = other DNA
tctgaattagagcctatgaa

SEQ ID NO: 28432 - DNA, 20 bp, synthetic construct
  source 1..20: mol_type = other DNA
ggaccatattctccagacat

SEQ ID NO: 28433 - DNA, 20 bp, synthetic construct
  source 1..20: mol_type = other DNA
ttaccttgctgatcagtggt

SEQ ID NO: 28434 - DNA, 20 bp, synthetic construct
  source 1..20: mol_type = other DNA
ctgattatgctaagattctg

SEQ ID NO: 28435 - DNA, 20 bp, synthetic construct
  source 1..20: mol_type = other DNA
gtatacatgagagaagacag

SEQ ID NO: 28436 - DNA, 20 bp, synthetic construct
  source 1..20: mol_type = other DNA
tcctttacagaagatgcgct

SEQ ID NO: 28437 - DNA, 20 bp, synthetic construct
  source 1..20: mol_type = other DNA
ttatatcgcaatgaaccgcg

SEQ ID NO: 28438 - DNA, 20 bp, synthetic construct
  source 1..20: mol_type = other DNA
attatggactctacatccga

SEQ ID NO: 28439 - DNA, 20 bp, synthetic construct
  source 1..20: mol_type = other DNA
aattccgggtcagctcgtgg

SEQ ID NO: 28440 - DNA, 20 bp, synthetic construct
  source 1..20: mol_type = other DNA
tacatccgagggcttgacgg

SEQ ID NO: 28441 - DNA, 20 bp, synthetic construct
  source 1..20: mol_type = other DNA
tcagaaccctctcatcgtca

SEQ ID NO: 28442 - DNA, 20 bp, synthetic construct
  source 1..20: mol_type = other DNA
gaacacgttccagcgtccga

SEQ ID NO: 28443 - DNA, 20 bp, synthetic construct
  source 1..20: mol_type = other DNA
cagcagatcaaagaagggtg

SEQ ID NO: 28444 - DNA, 20 bp, synthetic construct
  source 1..20: mol_type = other DNA
ggcggacatccgttccggca

SEQ ID NO: 28445 - DNA, 20 bp, synthetic construct
  source 1..20: mol_type = other DNA
acggtagagcaagttctccc

SEQ ID NO: 28446 - DNA, 20 bp, synthetic construct
  source 1..20: mol_type = other DNA
aggctgaactcggcaagccc

SEQ ID NO: 28447 - DNA, 20 bp, synthetic construct
  source 1..20: mol_type = other DNA
gccggaacggatgtccgcca

SEQ ID NO: 28448 - DNA, 20 bp, synthetic construct
  source 1..20: mol_type = other DNA
gttccggcatggagaacgag

SEQ ID NO: 28449 - DNA, 20 bp, synthetic construct
  source 1..20: mol_type = other DNA
gaaagaagctacagtctgcc

SEQ ID NO: 28450 - DNA, 20 bp, synthetic construct
  source 1..20: mol_type = other DNA
gatgagagggttctgaaaca

SEQ ID NO: 28451 - DNA, 20 bp, synthetic construct
  source 1..20: mol_type = other DNA
ggcagacctggctgaccgtg

SEQ ID NO: 28452 - DNA, 20 bp, synthetic construct
  source 1..20: mol_type = other DNA
tggaagtagtggcgccacag

SEQ ID NO: 28453 - DNA, 20 bp, synthetic construct
  source 1..20: mol_type = other DNA
aggcttcaacgtggaaaccg

SEQ ID NO: 28454 - DNA, 20 bp, synthetic construct
  source 1..20: mol_type = other DNA
gaaatgcgcatcctcatggt

SEQ ID NO: 28455 - DNA, 20 bp, synthetic construct
  source 1..20: mol_type = other DNA
ggcaggcctgatcttcgtgg

SEQ ID NO: 28456 - DNA, 20 bp, synthetic construct
  source 1..20: mol_type = other DNA
tgacagagagcgtgtgaacg

SEQ ID NO: 28457 - DNA, 20 bp, synthetic construct
  source 1..20: mol_type = other DNA
cttaagcttgtagaggatcg

SEQ ID NO: 28458 - DNA, 20 bp, synthetic construct
  source 1..20: mol_type = other DNA
ctcacctatggtgggaatgg

SEQ ID NO: 28459 - DNA, 20 bp, synthetic construct
  source 1..20: mol_type = other DNA
gcgtgtgaacgaggcccgtg

SEQ ID NO: 28460 - DNA, 20 bp, synthetic construct
  source 1..20: mol_type = other DNA
agaacatcagcttcactgtg

SEQ ID NO: 28461 - DNA, 20 bp, synthetic construct
  source 1..20: mol_type = other DNA
atcctctacaagcttaagct

SEQ ID NO: 28462 - DNA, 20 bp, synthetic construct
  source 1..20: mol_type = other DNA
gctgatgttcttgtactcca

SEQ ID NO: 28463 - DNA, 20 bp, synthetic construct
  source 1..20: mol_type = other DNA
cccgcacccaggcttcaacg

SEQ ID NO: 28464 - DNA, 20 bp, synthetic construct
  source 1..20: mol_type = other DNA
tgaggagctcatgaggatgc

SEQ ID NO: 28465 - DNA, 20 bp, synthetic construct
  source 1..20: mol_type = other DNA
gcccccacctcacctatggt

SEQ ID NO: 28466 - DNA, 20 bp, synthetic construct
  source 1..20: mol_type = other DNA
acaggggccggatcttgtcc

SEQ ID NO: 28467 - DNA, 20 bp, synthetic construct
  source 1..20: mol_type = other DNA
ttcatgtgaatcagcgctct

SEQ ID NO: 28468 - DNA, 20 bp, synthetic construct
  source 1..20: mol_type = other DNA
gagcgctgattcacatgaaa

SEQ ID NO: 28469 - DNA, 20 bp, synthetic construct
  source 1..20: mol_type = other DNA
tccagatatacttacaatca

SEQ ID NO: 28470 - DNA, 20 bp, synthetic construct
  source 1..20: mol_type = other DNA
gatccatagtccccataaaa

SEQ ID NO: 28471 - DNA, 20 bp, synthetic construct
  source 1..20: mol_type = other DNA
ttatttcatagagacatcat

SEQ ID NO: 28472 - DNA, 20 bp, synthetic construct
  source 1..20: mol_type = other DNA
aagacaaaaaacttcatagt

SEQ ID NO: 28473 - DNA, 20 bp, synthetic construct
  source 1..20: mol_type = other DNA
tttatttcatagagacatca

SEQ ID NO: 28474 - DNA, 20 bp, synthetic construct
  source 1..20: mol_type = other DNA
tgggggtcagacttccacag

SEQ ID NO: 28475 - DNA, 20 bp, synthetic construct
  source 1..20: mol_type = other DNA
gggagggcgtggatgatggt

SEQ ID NO: 28476 - DNA, 20 bp, synthetic construct
  source 1..20: mol_type = other DNA
gggaaggtggggcgatgtgg

SEQ ID NO: 28477 - DNA, 20 bp, synthetic construct
  source 1..20: mol_type = other DNA
ccatcatccacgccctccca

SEQ ID NO: 28478 - DNA, 20 bp, synthetic construct
  source 1..20: mol_type = other DNA
gggggtcagacttccacagt

SEQ ID NO: 28479 - DNA, 20 bp, synthetic construct
  source 1..20: mol_type = other DNA
ggtgatggaaatgaagactg

SEQ ID NO: 28480 - DNA, 20 bp, synthetic construct
  source 1..20: mol_type = other DNA
aatgaagactggggaaggtg

SEQ ID NO: 28481 - DNA, 20 bp, synthetic construct
  source 1..20: mol_type = other DNA
ggggtcagacttccacagtg

SEQ ID NO: 28482 - DNA, 20 bp, synthetic construct
  source 1..20: mol_type = other DNA
tggtgagagggctccctggg

SEQ ID NO: 28483 - DNA, 20 bp, synthetic construct
  source 1..20: mol_type = other DNA
atggaaatgaagactgggga

SEQ ID NO: 28484 - DNA, 20 bp, synthetic construct
  source 1..20: mol_type = other DNA
ggggaaggtggggcgatgtg

SEQ ID NO: 28485 - DNA, 20 bp, synthetic construct
  source 1..20: mol_type = other DNA
tgggagggcgtggatgatgg

SEQ ID NO: 28486 - DNA, 20 bp, synthetic construct
  source 1..20: mol_type = other DNA
accatcatccacgccctccc

SEQ ID NO: 28487 - DNA, 20 bp, synthetic construct
  source 1..20: mol_type = other DNA
ggtgagagggctccctggga

SEQ ID NO: 28488 - DNA, 20 bp, synthetic construct
  source 1..20: mol_type = other DNA
ccctgggagggcgtggatga

SEQ ID NO: 28489 - DNA, 20 bp, synthetic construct
  source 1..20: mol_type = other DNA
gcagacccgttgactaccga

SEQ ID NO: 28490 - DNA, 20 bp, synthetic construct
  source 1..20: mol_type = other DNA
gtgatatgccaattgaaagg

SEQ ID NO: 28491 - DNA, 20 bp, synthetic construct
  source 1..20: mol_type = other DNA
gttgttgcaaaagtccccac

SEQ ID NO: 28492 - DNA, 20 bp, synthetic construct
  source 1..20: mol_type = other DNA
taagaaagattccaacccaa

SEQ ID NO: 28493 - DNA, 20 bp, synthetic construct
  source 1..20: mol_type = other DNA
ctggaagagttgatcccgag

SEQ ID NO: 28494 - DNA, 20 bp, synthetic construct
  source 1..20: mol_type = other DNA
gtcaaggcgaagctcgcggg

SEQ ID NO: 28495 - DNA, 20 bp, synthetic construct
  source 1..20: mol_type = other DNA
gatcatgcggacgcccgggt

SEQ ID NO: 28496 - DNA, 20 bp, synthetic construct
  source 1..20: mol_type = other DNA
gcgcccaggggcaacaccgc

SEQ ID NO: 28497 - DNA, 20 bp, synthetic construct
  source 1..20: mol_type = other DNA
caggaagtgcacgttgcagg

SEQ ID NO: 28498 - DNA, 20 bp, synthetic construct
  source 1..20: mol_type = other DNA
gatcccagagctcagcgcgc

SEQ ID NO: 28499 - DNA, 20 bp, synthetic construct
  source 1..20: mol_type = other DNA
gtcctcctcgtacttcacgg

SEQ ID NO: 28500 - DNA, 20 bp, synthetic construct
  source 1..20: mol_type = other DNA
aggaccaccaaaaataactt

SEQ ID NO: 28501 - DNA, 20 bp, synthetic construct
  source 1..20: mol_type = other DNA
cccatcgtcccaggaactag

SEQ ID NO: 28502 - DNA, 20 bp, synthetic construct
  source 1..20: mol_type = other DNA
gtcttcaaagaagcgtacct

SEQ ID NO: 28503 - DNA, 20 bp, synthetic construct
  source 1..20: mol_type = other DNA
cgtgcaggacgggttccttg

SEQ ID NO: 28504 - DNA, 20 bp, synthetic construct
  source 1..20: mol_type = other DNA
tgtgtgacgggaacccacgt

SEQ ID NO: 28505 - DNA, 20 bp, synthetic construct
  source 1..20: mol_type = other DNA
ccgaggctacacgtcaggcg

SEQ ID NO: 28506 - DNA, 20 bp, synthetic construct
  source 1..20: mol_type = other DNA
ggtgccagtgacgctcaaag

SEQ ID NO: 28507 - DNA, 20 bp, synthetic construct
  source 1..20: mol_type = other DNA
gcctcaagacgacgtcctgg

SEQ ID NO: 28508 - DNA, 20 bp, synthetic construct
  source 1..20: mol_type = other DNA
aagccatgctggagtcaccc

SEQ ID NO: 28509 - DNA, 20 bp, synthetic construct
  source 1..20: mol_type = other DNA
tacaacgtcaacctcagcaa

SEQ ID NO: 28510 - DNA, 20 bp, synthetic construct
  source 1..20: mol_type = other DNA
ctgccagcagagcgcgacca

SEQ ID NO: 28511 - DNA, 20 bp, synthetic construct
  source 1..20: mol_type = other DNA
cctgtatcgggccagagagt

SEQ ID NO: 28512 - DNA, 20 bp, synthetic construct
  source 1..20: mol_type = other DNA
ggccaccatcagcatccgag

SEQ ID NO: 28513 - DNA, 20 bp, synthetic construct
  source 1..20: mol_type = other DNA
gaggtgagagcccccccgtg

SEQ ID NO: 28514 - DNA, 20 bp, synthetic construct
  source 1..20: mol_type = other DNA
gtccaggccatcgtaactgc

SEQ ID NO: 28515 - DNA, 20 bp, synthetic construct
  source 1..20: mol_type = other DNA
ctggtaccacttccactatg

SEQ ID NO: 28516 - DNA, 20 bp, synthetic construct
  source 1..20: mol_type = other DNA
gtctgaaccccactctgacc

SEQ ID NO: 28517 - DNA, 20 bp, synthetic construct
  source 1..20: mol_type = other DNA
cagcgccccggcatcaccca

SEQ ID NO: 28518 - DNA, 20 bp, synthetic construct
  source 1..20: mol_type = other DNA
caccaccaccacccaaggag

SEQ ID NO: 28519 - DNA, 20 bp, synthetic construct
  source 1..20: mol_type = other DNA
gggcgctaagcctcagacag

SEQ ID NO: 28520 - DNA, 20 bp, synthetic construct
  source 1..20: mol_type = other DNA
ccaggagggccaactccgca

SEQ ID NO: 28521 - DNA, 20 bp, synthetic construct
  source 1..20: mol_type = other DNA
gtctgaggcttagcgccctg

SEQ ID NO: 28522 - DNA, 20 bp, synthetic construct
  source 1..20: mol_type = other DNA
gcagctttccataggagggt

SEQ ID NO: 28523 - DNA, 20 bp, synthetic construct
  source 1..20: mol_type = other DNA
ggagggtcggggctctcgca

SEQ ID NO: 28524 - DNA, 20 bp, synthetic construct
  source 1..20: mol_type = other DNA
tcctgcagctttccatagga

SEQ ID NO: 28525 - DNA, 20 bp, synthetic construct
  source 1..20: mol_type = other DNA
caagagaagtccaggtccca

SEQ ID NO: 28526 - DNA, 20 bp, synthetic construct
  source 1..20: mol_type = other DNA
aggtcccagggcctcgagag

SEQ ID NO: 28527 - DNA, 20 bp, synthetic construct
  source 1..20: mol_type = other DNA
ggaaagctgcaggagccctg

SEQ ID NO: 28528 - DNA, 20 bp, synthetic construct
  source 1..20: mol_type = other DNA
ctgcggagttggccctcctg

SEQ ID NO: 28529 - DNA, 20 bp, synthetic construct
  source 1..20: mol_type = other DNA
gggctcctgcagctttccat

SEQ ID NO: 28530 - DNA, 20 bp, synthetic construct
  source 1..20: mol_type = other DNA
tcagctgctctgtgtccccc

SEQ ID NO: 28531 - DNA, 20 bp, synthetic construct
  source 1..20: mol_type = other DNA
gacaggggcaagagaagtcc

SEQ ID NO: 28532 - DNA, 20 bp, synthetic construct
  source 1..20: mol_type = other DNA
gcgggtgccggggagcctgg

SEQ ID NO: 28533 - DNA, 20 bp, synthetic construct
  source 1..20: mol_type = other DNA
cagatgccactgcccaggag

SEQ ID NO: 28534 - DNA, 20 bp, synthetic construct
  source 1..20: mol_type = other DNA
atactactgaaatctattcg

SEQ ID NO: 28535 - DNA, 20 bp, synthetic construct
  source 1..20: mol_type = other DNA
gaaggaacgcaatccacccc

SEQ ID NO: 28536 - DNA, 20 bp, synthetic construct
  source 1..20: mol_type = other DNA
ggaaaacatgacaatagcta

SEQ ID NO: 28537 - DNA, 20 bp, synthetic construct
  source 1..20: mol_type = other DNA
tggattgcgttccttcagca

SEQ ID NO: 28538 - DNA, 20 bp, synthetic construct
  source 1..20: mol_type = other DNA
cataagaagccaatgatctg

SEQ ID NO: 28539 - DNA, 20 bp, synthetic construct
  source 1..20: mol_type = other DNA
gacgtcacctgagtcaacaa

SEQ ID NO: 28540 - DNA, 20 bp, synthetic construct
  source 1..20: mol_type = other DNA
tcagcaaggacagctcatgc

SEQ ID NO: 28541 - DNA, 20 bp, synthetic construct
  source 1..20: mol_type = other DNA
ttacttgggaactgcactgg

SEQ ID NO: 28542 - DNA, 20 bp, synthetic construct
  source 1..20: mol_type = other DNA
gctcgaagtcggcgtcgacc

SEQ ID NO: 28543 - DNA, 20 bp, synthetic construct
  source 1..20: mol_type = other DNA
actcgagctcgcacagcgcg

SEQ ID NO: 28544 - DNA, 20 bp, synthetic construct
  source 1..20: mol_type = other DNA
gctggattgtccaagccctg

SEQ ID NO: 28545 - DNA, 20 bp, synthetic construct
  source 1..20: mol_type = other DNA
cagcaacatatctcggagca

SEQ ID NO: 28546 - DNA, 20 bp, synthetic construct
  source 1..20: mol_type = other DNA
ttacaggcaacagaacattg

SEQ ID NO: 28547 - DNA, 20 bp, synthetic construct
  source 1..20: mol_type = other DNA
gcgtacctggctctcggctg

SEQ ID NO: 28548 - DNA, 20 bp, synthetic construct
  source 1..20: mol_type = other DNA
tatttctccaggagatgagt

SEQ ID NO: 28549 - DNA, 20 bp, synthetic construct
  source 1..20: mol_type = other DNA
gtaacaatgtctgaactcag

SEQ ID NO: 28550 - DNA, 20 bp, synthetic construct
  source 1..20: mol_type = other DNA
acactgattacacttaaagg

SEQ ID NO: 28551 - DNA, 20 bp, synthetic construct
  source 1..20: mol_type = other DNA
ttacaacataggatgcacaa

SEQ ID NO: 28552 - DNA, 20 bp, synthetic construct
  source 1..20: mol_type = other DNA
aggaagaagaggatacaacc

SEQ ID NO: 28553 - DNA, 20 bp, synthetic construct
  source 1..20: mol_type = other DNA
tacagcaacctagtcacagt

SEQ ID NO: 28554 - DNA, 20 bp, synthetic construct
  source 1..20: mol_type = other DNA
accggatgtgatattcaagt

SEQ ID NO: 28555 - DNA, 20 bp, synthetic construct
  source 1..20: mol_type = other DNA
tcaagagtctgccctttccg

SEQ ID NO: 28556 - DNA, 20 bp, synthetic construct
  source 1..20: mol_type = other DNA
tgtggctgttgaccttaccc

SEQ ID NO: 28557 - DNA, 20 bp, synthetic construct
  source 1..20: mol_type = other DNA
acatatgagaagtcacacag

SEQ ID NO: 28558 - DNA, 20 bp, synthetic construct
  source 1..20: mol_type = other DNA
agaggagccctgggtgatgg

SEQ ID NO: 28559 - DNA, 20 bp, synthetic construct
  source 1..20: mol_type = other DNA
gaattcgctcatgtctaatg

SEQ ID NO: 28560 - DNA, 20 bp, synthetic construct
  source 1..20: mol_type = other DNA
gcacgagaaaattcatactg

SEQ ID NO: 28561 - DNA, 20 bp, synthetic construct
  source 1..20: mol_type = other DNA
acaccacagaattcatactg

SEQ ID NO: 28562 - DNA, 20 bp, synthetic construct
  source 1..20: mol_type = other DNA
atacatatgagaagtcacac

SEQ ID NO: 28563 - DNA, 20 bp, synthetic construct
  source 1..20: mol_type = other DNA
agcaacaggaaacacttgtg

SEQ ID NO: 28564 - DNA, 20 bp, synthetic construct
  source 1..20: mol_type = other DNA
gattgatcgaactgaaccca

SEQ ID NO: 28565 - DNA, 20 bp, synthetic construct
  source 1..20: mol_type = other DNA
cagttcgatcaatccccacg

SEQ ID NO: 28566 - DNA, 20 bp, synthetic construct
  source 1..20: mol_type = other DNA
tgttccggatggctttacac

SEQ ID NO: 28567 - DNA, 20 bp, synthetic construct
  source 1..20: mol_type = other DNA
gtagagatagtgcaaagcac

SEQ ID NO: 28568 - DNA, 20 bp, synthetic construct
  source 1..20: mol_type = other DNA
acctcctcaaagacaaccga

SEQ ID NO: 28569 - DNA, 20 bp, synthetic construct
  source 1..20: mol_type = other DNA
aaaatccaaaacgatagtgt

SEQ ID NO: 28570 - DNA, 20 bp, synthetic construct
  source 1..20: mol_type = other DNA
gctgtgtgttacaatgtcga

SEQ ID NO: 28571 - DNA, 20 bp, synthetic construct
  source 1..20: mol_type = other DNA
ccacaatatacactataggg

SEQ ID NO: 28572 - DNA, 20 bp, synthetic construct
  source 1..20: mol_type = other DNA
caggtgactgcaattacaca

SEQ ID NO: 28573 - DNA, 20 bp, synthetic construct
  source 1..20: mol_type = other DNA
tgactgtcatcacctacgtg

SEQ ID NO: 28574 - DNA, 20 bp, synthetic construct
  source 1..20: mol_type = other DNA
agaatatgagataaaggcaa

SEQ ID NO: 28575 - DNA, 20 bp, synthetic construct
  source 1..20: mol_type = other DNA
ttccacatcccggagaatag

SEQ ID NO: 28576 - DNA, 20 bp, synthetic construct
  source 1..20: mol_type = other DNA
atcatccagggagacacaca

SEQ ID NO: 28577 - DNA, 20 bp, synthetic construct
  source 1..20: mol_type = other DNA
tgtgtctactggaagagcac

SEQ ID NO: 28578 - DNA, 20 bp, synthetic construct
  source 1..20: mol_type = other DNA
gcagggcagccagtggtcca

SEQ ID NO: 28579 - DNA, 20 bp, synthetic construct
  source 1..20: mol_type = other DNA
gatcccgaagtattgaccgg

SEQ ID NO: 28580 - DNA, 20 bp, synthetic construct
  source 1..20: mol_type = other DNA
gtaaggcgacgacaggatgt

SEQ ID NO: 28581 - DNA, 20 bp, synthetic construct
  source 1..20: mol_type = other DNA
tctgtaggacctagatgtga

SEQ ID NO: 28582 - DNA, 20 bp, synthetic construct
  source 1..20: mol_type = other DNA
gttaactcgaaagcaagtga

SEQ ID NO: 28583 - DNA, 20 bp, synthetic construct
  source 1..20: mol_type = other DNA
aggtcacgcacgttgaacca

SEQ ID NO: 28584 - DNA, 20 bp, synthetic construct
  source 1..20: mol_type = other DNA
cgagctcaagacctaccacg

SEQ ID NO: 28585 - DNA, 20 bp, synthetic construct
  source 1..20: mol_type = other DNA
agtagaagtcatcatcggga

SEQ ID NO: 28586 - DNA, 20 bp, synthetic construct
  source 1..20: mol_type = other DNA
ccagtcccacagatctgtag

SEQ ID NO: 28587 - DNA, 20 bp, synthetic construct
  source 1..20: mol_type = other DNA
ccagacagggatgtgcggag

SEQ ID NO: 28588 - DNA, 20 bp, synthetic construct
  source 1..20: mol_type = other DNA
ggaggctgtgtaatgaccat

SEQ ID NO: 28589 - DNA, 20 bp, synthetic construct
  source 1..20: mol_type = other DNA
tagagctgtactttgaagta

SEQ ID NO: 28590 - DNA, 20 bp, synthetic construct
  source 1..20: mol_type = other DNA
acgcaggcgcagcagaagta

SEQ ID NO: 28591 - DNA, 20 bp, synthetic construct
  source 1..20: mol_type = other DNA
ggcaatgtgctcccgctctg

SEQ ID NO: 28592 - DNA, 20 bp, synthetic construct
  source 1..20: mol_type = other DNA
agtcgaagtcgtgataggaa

SEQ ID NO: 28593 - DNA, 20 bp, synthetic construct
  source 1..20: mol_type = other DNA
cggcggcgctaccaagccgg

SEQ ID NO: 28594 - DNA, 20 bp, synthetic construct
  source 1..20: mol_type = other DNA
tcctacagctccgtaatggg

SEQ ID NO: 28595 - DNA, 20 bp, synthetic construct
  source 1..20: mol_type = other DNA
tcagggccatatcttaacaa

SEQ ID NO: 28596 - DNA, 20 bp, synthetic construct
  source 1..20: mol_type = other DNA
tctgctcacaccacccaatg

SEQ ID NO: 28597 - DNA, 20 bp, synthetic construct
  source 1..20: mol_type = other DNA
atagacagatacctcgtgct

SEQ ID NO: 28598 - DNA, 20 bp, synthetic construct
  source 1..20: mol_type = other DNA
gtgtgccacgccgacagtcc

SEQ ID NO: 28599 - DNA, 20 bp, synthetic construct
  source 1..20: mol_type = other DNA
ctgcattgataagtaaagtg

SEQ ID NO: 28600 - DNA, 20 bp, synthetic construct
  source 1..20: mol_type = other DNA
gctgactacctcaaacagtg

SEQ ID NO: 28601 - DNA, 20 bp, synthetic construct
  source 1..20: mol_type = other DNA
catagccatcatagcggaga

SEQ ID NO: 28602 - DNA, 20 bp, synthetic construct
  source 1..20: mol_type = other DNA
acacaaaggatcgccgtgcg

SEQ ID NO: 28603 - DNA, 20 bp, synthetic construct
  source 1..20: mol_type = other DNA
tcctcgaggactgtccacga

SEQ ID NO: 28604 - DNA, 20 bp, synthetic construct
  source 1..20: mol_type = other DNA
aggactacatgctcctatca

SEQ ID NO: 28605 - DNA, 20 bp, synthetic construct
  source 1..20: mol_type = other DNA
gttactgtagtagaaaacat

SEQ ID NO: 28606 - DNA, 20 bp, synthetic construct
  source 1..20: mol_type = other DNA
tgtgcttatacctgactctg

SEQ ID NO: 28607 - DNA, 20 bp, synthetic construct
  source 1..20: mol_type = other DNA
agctcccgaaggacacggct

SEQ ID NO: 28608 - DNA, 20 bp, synthetic construct
  source 1..20: mol_type = other DNA
cagtgagaggctcctacctg

SEQ ID NO: 28609 - DNA, 20 bp, synthetic construct
  source 1..20: mol_type = other DNA
ggaggtcaacttgtaatggg

SEQ ID NO: 28610 - DNA, 20 bp, synthetic construct
  source 1..20: mol_type = other DNA
ggagatcctcacatagactg

SEQ ID NO: 28611 - DNA, 20 bp, synthetic construct
  source 1..20: mol_type = other DNA
caggtctcgatactggtcaa

SEQ ID NO: 28612 - DNA, 20 bp, synthetic construct
  source 1..20: mol_type = other DNA
ctgctgggattccatccacg

SEQ ID NO: 28613 - DNA, 20 bp, synthetic construct
  source 1..20: mol_type = other DNA
aggcacgtaccaggtcgatc

SEQ ID NO: 28614 - DNA, 20 bp, synthetic construct
  source 1..20: mol_type = other DNA
gggtcatacttgttactcca

SEQ ID NO: 28615 - DNA, 20 bp, synthetic construct
  source 1..20: mol_type = other DNA
gatggatcaaagaagatcaa

SEQ ID NO: 28616 - DNA, 20 bp, synthetic construct
  source 1..20: mol_type = other DNA
tacctctgggatctggatca

SEQ ID NO: 28617 - DNA, 20 bp, synthetic construct
  source 1..20: mol_type = other DNA
ccattacaagttgacctcca

SEQ ID NO: 28618 - DNA, 20 bp, synthetic construct
  source 1..20: mol_type = other DNA
gtgatcctcataaagaaggc

SEQ ID NO: 28619 - DNA, 20 bp, synthetic construct
  source 1..20: mol_type = other DNA
ccaggtcgatcaggtcgctg

SEQ ID NO: 28620 - DNA, 20 bp, synthetic construct
  source 1..20: mol_type = other DNA
gtggctggtcaacagaagac

SEQ ID NO: 28621 - DNA, 20 bp, synthetic construct
  source 1..20: mol_type = other DNA
agccatgatccagatcccag

SEQ ID NO: 28622 - DNA, 20 bp, synthetic construct
  source 1..20: mol_type = other DNA
tccttccaggagaaatccag

SEQ ID NO: 28623 - DNA, 20 bp, synthetic construct
  source 1..20: mol_type = other DNA
catccacgtggtagaagtgc

SEQ ID NO: 28624 - DNA, 20 bp, synthetic construct
  source 1..20: mol_type = other DNA
catcgactggaatatccaag

SEQ ID NO: 28625 - DNA, 20 bp, synthetic construct
  source 1..20: mol_type = other DNA
tggccttgatcatcatgcta

SEQ ID NO: 28626 - DNA, 20 bp, synthetic construct
  source 1..20: mol_type = other DNA
ccttgtagatgctacaactg

SEQ ID NO: 28627 - DNA, 20 bp, synthetic construct
  source 1..20: mol_type = other DNA
gcatgatgctctgacagtaa

SEQ ID NO: 28628 - DNA, 20 bp, synthetic construct
  source 1..20: mol_type = other DNA
tacgggtaacaggacctggt

SEQ ID NO: 28629 - DNA, 20 bp, synthetic construct
  source 1..20: mol_type = other DNA
cagagcaaactattcatgga

SEQ ID NO: 28630 - DNA, 20 bp, synthetic construct
  source 1..20: mol_type = other DNA
ctgtcagagcatcatgcaca

SEQ ID NO: 28631 - DNA, 20 bp, synthetic construct
  source 1..20: mol_type = other DNA
aaggtggtggagaagagccc

SEQ ID NO: 28632 - DNA, 20 bp, synthetic construct
  source 1..20: mol_type = other DNA
taatggcacttctttggctg

SEQ ID NO: 28633 - DNA, 20 bp, synthetic construct
  source 1..20: mol_type = other DNA
ggaagtgaaagaagacccaa

SEQ ID NO: 28634 - DNA, 20 bp, synthetic construct
  source 1..20: mol_type = other DNA
cctaaaagaaggagaaccag

SEQ ID NO: 28635 - DNA, 20 bp, synthetic construct
  source 1..20: mol_type = other DNA
aaagaaaaccaaagggagat

SEQ ID NO: 28636 - DNA, 20 bp, synthetic construct
  source 1..20: mol_type = other DNA
ggatttagaagcctaaaaga

SEQ ID NO: 28637 - DNA, 20 bp, synthetic construct
  source 1..20: mol_type = other DNA
gcggaactggccactgtaag

SEQ ID NO: 28638 - DNA, 20 bp, synthetic construct
  source 1..20: mol_type = other DNA
atctccatgataaaccgaga

SEQ ID NO: 28639 - DNA, 20 bp, synthetic construct
  source 1..20: mol_type = other DNA
tgcaacctgctactggacgc

SEQ ID NO: 28640 - DNA, 20 bp, synthetic construct
  source 1..20: mol_type = other DNA
aatagaccctgagacacaaa

SEQ ID NO: 28641 - DNA, 20 bp, synthetic construct
  source 1..20: mol_type = other DNA
tatagctgctcgatgtcgaa

SEQ ID NO: 28642 - DNA, 20 bp, synthetic construct
  source 1..20: mol_type = other DNA
agggtctattaaccagttcc

SEQ ID NO: 28643 - DNA, 20 bp, synthetic construct
  source 1..20: mol_type = other DNA
tctgtacagctactggtgcc

SEQ ID NO: 28644 - DNA, 20 bp, synthetic construct
  source 1..20: mol_type = other DNA
ttcatcagtgcttcttatag

SEQ ID NO: 28645 - DNA, 20 bp, synthetic construct
  source 1..20: mol_type = other DNA
gccgcccgacatgaactcgc

SEQ ID NO: 28646 - DNA, 20 bp, synthetic construct
  source 1..20: mol_type = other DNA
aactcgctggagcaggcgga

SEQ ID NO: 28647 - DNA, 20 bp, synthetic construct
  source 1..20: mol_type = other DNA
gaagattgtcattgaacatg

SEQ ID NO: 28648 - DNA, 20 bp, synthetic construct
  source 1..20: mol_type = other DNA
catgaactcgctggagcagg

SEQ ID NO: 28649 - DNA, 20 bp, synthetic construct
  source 1..20: mol_type = other DNA
atctttatacctagatctca

SEQ ID NO: 28650 - DNA, 20 bp, synthetic construct
  source 1..20: mol_type = other DNA
gctggagcaggcggaaggta

SEQ ID NO: 28651 - DNA, 20 bp, synthetic construct
  source 1..20: mol_type = other DNA
tacagctaatggtgaaaaat

SEQ ID NO: 28652 - DNA, 20 bp, synthetic construct
  source 1..20: mol_type = other DNA
tgctccagcgagttcatgtc

SEQ ID NO: 28653 - DNA, 20 bp, synthetic construct
  source 1..20: mol_type = other DNA
cgacatgaactcgctggagc

SEQ ID NO: 28654 - DNA, 20 bp, synthetic construct
  source 1..20: mol_type = other DNA
tatcgaaaccagcacaaaag

SEQ ID NO: 28655 - DNA, 20 bp, synthetic construct
  source 1..20: mol_type = other DNA
gaaacccaggttctaaaatg

SEQ ID NO: 28656 - DNA, 20 bp, synthetic construct
  source 1..20: mol_type = other DNA
tttggactatcagtcatgct

SEQ ID NO: 28657 - DNA, 20 bp, synthetic construct
  source 1..20: mol_type = other DNA
gaagattcttacaacatcag

SEQ ID NO: 28658 - DNA, 20 bp, synthetic construct
  source 1..20: mol_type = other DNA
tgaaatagctgcctattgaa

SEQ ID NO: 28659 - DNA, 20 bp, synthetic construct
  source 1..20: mol_type = other DNA
gtgtggtggagccgaaaccc

SEQ ID NO: 28660 - DNA, 20 bp, synthetic construct
  source 1..20: mol_type = other DNA
aaggccccttctgattagca

SEQ ID NO: 28661 - DNA, 20 bp, synthetic construct
  source 1..20: mol_type = other DNA
cctgagaactcatgtgccaa

SEQ ID NO: 28662 - DNA, 20 bp, synthetic construct
  source 1..20: mol_type = other DNA
cgaatgtctgagtcacccaa

SEQ ID NO: 28663 - DNA, 20 bp, synthetic construct
  source 1..20: mol_type = other DNA
ataatgaaaataagcagctt

SEQ ID NO: 28664 - DNA, 20 bp, synthetic construct
  source 1..20: mol_type = other DNA
tcatgaaagaggtctgtcca

SEQ ID NO: 28665 - DNA, 20 bp, synthetic construct
  source 1..20: mol_type = other DNA
acctacttaccgggagctca

SEQ ID NO: 28666 - DNA, 20 bp, synthetic construct
  source 1..20: mol_type = other DNA
aattgttggaaagagcagaa

SEQ ID NO: 28667 - DNA, 20 bp, synthetic construct
  source 1..20: mol_type = other DNA
cataaaaggcagaaaaacct

SEQ ID NO: 28668 - DNA, 20 bp, synthetic construct
  source 1..20: mol_type = other DNA
gacttgattgtctcaggaca

SEQ ID NO: 28669 - DNA, 20 bp, synthetic construct
  source 1..20: mol_type = other DNA
gcaaacacgattgatctgcg

SEQ ID NO: 28670 - DNA, 20 bp, synthetic construct
  source 1..20: mol_type = other DNA
gaccctgccgacatcaacga

SEQ ID NO: 28671 - DNA, 20 bp, synthetic construct
  source 1..20: mol_type = other DNA
ggacagcagcacttcgtacg

SEQ ID NO: 28672 - DNA, 20 bp, synthetic construct
  source 1..20: mol_type = other DNA
gaaatccggagacattggca

SEQ ID NO: 28673 - DNA, 20 bp, synthetic construct
  source 1..20: mol_type = other DNA
acgctacccttagggtgcag

SEQ ID NO: 28674 - DNA, 20 bp, synthetic construct
  source 1..20: mol_type = other DNA
agatcctggagaccgtcatg

SEQ ID NO: 28675 - DNA, 20 bp, synthetic construct
  source 1..20: mol_type = other DNA
tgtgagcgtctacaaccgcc

SEQ ID NO: 28676 - DNA, 20 bp, synthetic construct
  source 1..20: mol_type = other DNA
ctcctcgtctatgccaaccg

SEQ ID NO: 28677 - DNA, 20 bp, synthetic construct
  source 1..20: mol_type = other DNA
ctggggccaaagttccgttg

SEQ ID NO: 28678 - DNA, 20 bp, synthetic construct
  source 1..20: mol_type = other DNA
tacacccccatatcgagtca

SEQ ID NO: 28679 - DNA, 20 bp, synthetic construct
  source 1..20: mol_type = other DNA
ttgcagagaagacgacgctc

SEQ ID NO: 28680 - DNA, 20 bp, synthetic construct
  source 1..20: mol_type = other DNA
tcacgttctcctcagtccgg

SEQ ID NO: 28681 - DNA, 20 bp, synthetic construct
  source 1..20: mol_type = other DNA
tggaagccaatgggctgtgt

SEQ ID NO: 28682 - DNA, 20 bp, synthetic construct
  source 1..20: mol_type = other DNA
tgcaccaggtcctcatcccg

SEQ ID NO: 28683 - DNA, 20 bp, synthetic construct
  source 1..20: mol_type = other DNA
ccaggagcagcccaacgtcg

SEQ ID NO: 28684 - DNA, 20 bp, synthetic construct
  source 1..20: mol_type = other DNA
tctgatttaacctacctggg

SEQ ID NO: 28685 - DNA, 20 bp, synthetic construct
  source 1..20: mol_type = other DNA
ctgggcaggtgattccgtga

SEQ ID NO: 28686 - DNA, 20 bp, synthetic construct
  source 1..20: mol_type = other DNA
ggtgatgacctaccgtgacc

SEQ ID NO: 28687 - DNA, 20 bp, synthetic construct
  source 1..20: mol_type = other DNA
ctgaatggatcagattatgg

SEQ ID NO: 28688 - DNA, 20 bp, synthetic construct
  source 1..20: mol_type = other DNA
acagcttggctacctccgtg

SEQ ID NO: 28689 - DNA, 20 bp, synthetic construct
  source 1..20: mol_type = other DNA
tcctatcattccggatctgg

SEQ ID NO: 28690 - DNA, 20 bp, synthetic construct
  source 1..20: mol_type = other DNA
agctcaacaggagtcagcgc

SEQ ID NO: 28691 - DNA, 20 bp, synthetic construct
  source 1..20: mol_type = other DNA
cgaggagcttcgctacagct

SEQ ID NO: 28692 - DNA, 20 bp, synthetic construct
  source 1..20: mol_type = other DNA
gcgctgactcctgttgagct

SEQ ID NO: 28693 - DNA, 20 bp, synthetic construct
  source 1..20: mol_type = other DNA
tcaggctctgtggtctgagg

SEQ ID NO: 28694 - DNA, 20 bp, synthetic construct
  source 1..20: mol_type = other DNA
cagcctccctgtcggcagcg

SEQ ID NO: 28695 - DNA, 20 bp, synthetic construct
  source 1..20: mol_type = other DNA
ttacctcgctgccgacaggg

SEQ ID NO: 28696 - DNA, 20 bp, synthetic construct
  source 1..20: mol_type = other DNA
acttcatgaggtcattgtcc

SEQ ID NO: 28697 - DNA, 20 bp, synthetic construct
  source 1..20: mol_type = other DNA
gcagcgaggtaatttagcag

SEQ ID NO: 28698 - DNA, 20 bp, synthetic construct
  source 1..20: mol_type = other DNA
tccggatctggaggaagtac

SEQ ID NO: 28699 - DNA, 20 bp, synthetic construct
  source 1..20: mol_type = other DNA
gccgcctcgctgatgaacgg

SEQ ID NO: 28700 - DNA, 20 bp, synthetic construct
  source 1..20: mol_type = other DNA
ccggcaataatccaggacgg

SEQ ID NO: 28701 - DNA, 20 bp, synthetic construct
  source 1..20: mol_type = other DNA
gccgccgttcatcagcgagg

SEQ ID NO: 28702 - DNA, 20 bp, synthetic construct
  source 1..20: mol_type = other DNA
tcattctcaaggcgggaagg

SEQ ID NO: 28703 - DNA, 20 bp, synthetic construct
  source 1..20: mol_type = other DNA
tccttcccgccttgagaatg

SEQ ID NO: 28704 - DNA, 20 bp, synthetic construct
  source 1..20: mol_type = other DNA
ccccgacagcgctgacaccg

SEQ ID NO: 28705 - DNA, 20 bp, synthetic construct
  source 1..20: mol_type = other DNA
ccgaggtccggcaataatcc

SEQ ID NO: 28706 - DNA, 20 bp, synthetic construct
  source 1..20: mol_type = other DNA
acagcgctgacaccgaggtc

SEQ ID NO: 28707 - DNA, 20 bp, synthetic construct
  source 1..20: mol_type = other DNA
ctgctcctcattctcaaggc

SEQ ID NO: 28708 - DNA, 20 bp, synthetic construct
  source 1..20: mol_type = other DNA
tcatcagcgaggcggccgtg

SEQ ID NO: 28709 - DNA, 20 bp, synthetic construct
  source 1..20: mol_type = other DNA
gagcagggagagcaggacgg

SEQ ID NO: 28710 - DNA, 20 bp, synthetic construct
  source 1..20: mol_type = other DNA
cctcggtgtcagcgctgtcg

SEQ ID NO: 28711 - DNA, 20 bp, synthetic construct
  source 1..20: mol_type = other DNA
tgaagccgtagaggccggtg

SEQ ID NO: 28712 - DNA, 20 bp, synthetic construct
  source 1..20: mol_type = other DNA
gaagatgaagccgtagaggc

SEQ ID NO: 28713 - DNA, 20 bp, synthetic construct
  source 1..20: mol_type = other DNA
agagcaggacggaggcgagc

SEQ ID NO: 28714 - DNA, 20 bp, synthetic construct
  source 1..20: mol_type = other DNA
acccgcacatccacgagcag

SEQ ID NO: 28715 - DNA, 20 bp, synthetic construct
  source 1..20: mol_type = other DNA
caggctcgagtagaccagga

SEQ ID NO: 28716 - DNA, 20 bp, synthetic construct
  source 1..20: mol_type = other DNA
tcctggtctactcgagcctg

SEQ ID NO: 28717 - DNA, 20 bp, synthetic construct
  source 1..20: mol_type = other DNA
gtgtatcgcaggatgtcctg

SEQ ID NO: 28718 - DNA, 20 bp, synthetic construct
  source 1..20: mol_type = other DNA
ttctacgctctcagcaacac

SEQ ID NO: 28719 - DNA, 20 bp, synthetic construct
  source 1..20: mol_type = other DNA
ggtgtccagagagactccca

SEQ ID NO: 28720 - DNA, 20 bp, synthetic construct
  source 1..20: mol_type = other DNA
agcatccagatcccgaacaa

SEQ ID NO: 28721 - DNA, 20 bp, synthetic construct
  source 1..20: mol_type = other DNA
accaaggctcaccatcctgg

SEQ ID NO: 28722 - DNA, 20 bp, synthetic construct
  source 1..20: mol_type = other DNA
gctcaacctggccctcgcca

SEQ ID NO: 28723 - DNA, 20 bp, synthetic construct
  source 1..20: mol_type = other DNA
cgagtgtccagccaggactg

SEQ ID NO: 28724 - DNA, 20 bp, synthetic construct
  source 1..20: mol_type = other DNA
cagcctaagcagcagcatgg

SEQ ID NO: 28725 - DNA, 20 bp, synthetic construct
  source 1..20: mol_type = other DNA
tgagctcctccacttccccc

SEQ ID NO: 28726 - DNA, 20 bp, synthetic construct
  source 1..20: mol_type = other DNA
gcagcgtgatggcgtgccgc

SEQ ID NO: 28727 - DNA, 20 bp, synthetic construct
  source 1..20: mol_type = other DNA
tcccttggaagccctgcccg

SEQ ID NO: 28728 - DNA, 20 bp, synthetic construct
  source 1..20: mol_type = other DNA
tgctgagagcgtagaagctg

SEQ ID NO: 28729 - DNA, 20 bp, synthetic construct
  source 1..20: mol_type = other DNA
tgaccacaagtacccgcctg

SEQ ID NO: 28730 - DNA, 20 bp, synthetic construct
  source 1..20: mol_type = other DNA
gatgctcctctatgccccgg

SEQ ID NO: 28731 - DNA, 20 bp, synthetic construct
  source 1..20: mol_type = other DNA
gagatgcaggcgatccgccg

SEQ ID NO: 28732 - DNA, 20 bp, synthetic construct
  source 1..20: mol_type = other DNA
taacgtgggtcgtaagtgcg

SEQ ID NO: 28733 - DNA, 20 bp, synthetic construct
  source 1..20: mol_type = other DNA
gggcgactggacgctaagtg

SEQ ID NO: 28734 - DNA, 20 bp, synthetic construct
  source 1..20: mol_type = other DNA
cggatctggtagccgacctg

SEQ ID NO: 28735 - DNA, 20 bp, synthetic construct
  source 1..20: mol_type = other DNA
agtccgattcggcatagagg

SEQ ID NO: 28736 - DNA, 20 bp, synthetic construct
  source 1..20: mol_type = other DNA
acagacagggcgctgtgcag

SEQ ID NO: 28737 - DNA, 20 bp, synthetic construct
  source 1..20: mol_type = other DNA
acaatcaggacctcatactg

SEQ ID NO: 28738 - DNA, 20 bp, synthetic construct
  source 1..20: mol_type = other DNA
ggagatgagctacgatccgc

SEQ ID NO: 28739 - DNA, 20 bp, synthetic construct
  source 1..20: mol_type = other DNA
ccagctgaaacgccagcacg

SEQ ID NO: 28740 - DNA, 20 bp, synthetic construct
  source 1..20: mol_type = other DNA
ggttcccatactgggcgatg

SEQ ID NO: 28741 - DNA, 20 bp, synthetic construct
  source 1..20: mol_type = other DNA
gatgcatttccggactccag

SEQ ID NO: 28742 - DNA, 20 bp, synthetic construct
  source 1..20: mol_type = other DNA
taccggaatctactacgaag

SEQ ID NO: 28743 - DNA, 20 bp, synthetic construct
  source 1..20: mol_type = other DNA
tcaccttgaactggcgccga

SEQ ID NO: 28744 - DNA, 20 bp, synthetic construct
  source 1..20: mol_type = other DNA
gaggtacatgtaatatgcag

SEQ ID NO: 28745 - DNA, 20 bp, synthetic construct
  source 1..20: mol_type = other DNA
caaaatagaccacactcttg

SEQ ID NO: 28746 - DNA, 20 bp, synthetic construct
  source 1..20: mol_type = other DNA
aacggtgccagaaaagtcac

SEQ ID NO: 28747 - DNA, 20 bp, synthetic construct
  source 1..20: mol_type = other DNA
cctcctgctcctcaagagtg

SEQ ID NO: 28748 - DNA, 20 bp, synthetic construct
  source 1..20: mol_type = other DNA
tcttctagatgtcatcacaa

SEQ ID NO: 28749 - DNA, 20 bp, synthetic construct
  source 1..20: mol_type = other DNA
cgttcttctaagcagacagc

SEQ ID NO: 28750 - DNA, 20 bp, synthetic construct
  source 1..20: mol_type = other DNA
cactcttgaggagcaggagg

SEQ ID NO: 28751 - DNA, 20 bp, synthetic construct
  source 1..20: mol_type = other DNA
atctttcctccaataaagac

SEQ ID NO: 28752 - DNA, 20 bp, synthetic construct
  source 1..20: mol_type = other DNA
ctgctgtctgcttagaagaa

SEQ ID NO: 28753 - DNA, 20 bp, synthetic construct
  source 1..20: mol_type = other DNA
ccacactcttgaggagcagg

SEQ ID NO: 28754 - DNA, 20 bp, synthetic construct
  source 1..20: mol_type = other DNA
aattgttcaaaagatgcaaa

SEQ ID NO: 28755 - DNA, 20 bp, synthetic construct
  source 1..20: mol_type = other DNA
catgaaatttagctggttaa

SEQ ID NO: 28756 - DNA, 20 bp, synthetic construct
  source 1..20: mol_type = other DNA
agaacggctttctgctgcaa

SEQ ID NO: 28757 - DNA, 20 bp, synthetic construct
  source 1..20: mol_type = other DNA
aagcagacagcaggtgatga

SEQ ID NO: 28758 - DNA, 20 bp, synthetic construct
  source 1..20: mol_type = other DNA
agaccacactcttgaggagc

SEQ ID NO: 28759 - DNA, 20 bp, synthetic construct
  source 1..20: mol_type = other DNA
ggcgacctccgccacgcagt

SEQ ID NO: 28760 - DNA, 20 bp, synthetic construct
  source 1..20: mol_type = other DNA
gtgccggcgaggatggctca

SEQ ID NO: 28761 - DNA, 20 bp, synthetic construct
  source 1..20: mol_type = other DNA
gcgcagcgcgtccgcgcacg

SEQ ID NO: 28762 - DNA, 20 bp, synthetic construct
  source 1..20: mol_type = other DNA
ggccctgcgctgcgccctag

SEQ ID NO: 28763 - DNA, 20 bp, synthetic construct
  source 1..20: mol_type = other DNA
acggccccggcagcgcgctg

SEQ ID NO: 28764 - DNA, 20 bp, synthetic construct
  source 1..20: mol_type = other DNA
ctgcagcagtcggtgacgct

SEQ ID NO: 28765 - DNA, 20 bp, synthetic construct
  source 1..20: mol_type = other DNA
gtcccctagggcgcagcgca

SEQ ID NO: 28766 - DNA, 20 bp, synthetic construct
  source 1..20: mol_type = other DNA
catcctcgccggcacggccc

SEQ ID NO: 28767 - DNA, 20 bp, synthetic construct
  source 1..20: mol_type = other DNA
gcccgcagcggcacccccgg

SEQ ID NO: 28768 - DNA, 20 bp, synthetic construct
  source 1..20: mol_type = other DNA
gccgcccgcttcggctgaga

SEQ ID NO: 28769 - DNA, 20 bp, synthetic construct
  source 1..20: mol_type = other DNA
tcggtgacgctgggcagctc

SEQ ID NO: 28770 - DNA, 20 bp, synthetic construct
  source 1..20: mol_type = other DNA
agcagcagcggcaccgccgg

SEQ ID NO: 28771 - DNA, 20 bp, synthetic construct
  source 1..20: mol_type = other DNA
ggtgggcccggcgccctctg

SEQ ID NO: 28772 - DNA, 20 bp, synthetic construct
  source 1..20: mol_type = other DNA
gcgtcaccgactgctgcagc

SEQ ID NO: 28773 - DNA, 20 bp, synthetic construct
  source 1..20: mol_type = other DNA
gccggcaccgccgcagccag

SEQ ID NO: 28774 - DNA, 20 bp, synthetic construct
  source 1..20: mol_type = other DNA
catctcctacgacctagacg

SEQ ID NO: 28775 - DNA, 20 bp, synthetic construct
  source 1..20: mol_type = other DNA
catcgaagtagccttgacac

SEQ ID NO: 28776 - DNA, 20 bp, synthetic construct
  source 1..20: mol_type = other DNA
agagctatggcaagtacctg

SEQ ID NO: 28777 - DNA, 20 bp, synthetic construct
  source 1..20: mol_type = other DNA
gcgggagtcccaccagatcg

SEQ ID NO: 28778 - DNA, 20 bp, synthetic construct
  source 1..20: mol_type = other DNA
ctagacggggaagagagcta

SEQ ID NO: 28779 - DNA, 20 bp, synthetic construct
  source 1..20: mol_type = other DNA
ccactacttcgtgcccgatg

SEQ ID NO: 28780 - DNA, 20 bp, synthetic construct
  source 1..20: mol_type = other DNA
gagtcccattggacatctct

SEQ ID NO: 28781 - DNA, 20 bp, synthetic construct
  source 1..20: mol_type = other DNA
accacaggcgctgctcccag

SEQ ID NO: 28782 - DNA, 20 bp, synthetic construct
  source 1..20: mol_type = other DNA
tggacatctctgggtagagg

SEQ ID NO: 28783 - DNA, 20 bp, synthetic construct
  source 1..20: mol_type = other DNA
tcttcagggtgagtgaccac

SEQ ID NO: 28784 - DNA, 20 bp, synthetic construct
  source 1..20: mol_type = other DNA
cacggtgaactcctcccgca

SEQ ID NO: 28785 - DNA, 20 bp, synthetic construct
  source 1..20: mol_type = other DNA
ccccatcgggcacgaagtag

SEQ ID NO: 28786 - DNA, 20 bp, synthetic construct
  source 1..20: mol_type = other DNA
agtgagggatttgtccgagt

SEQ ID NO: 28787 - DNA, 20 bp, synthetic construct
  source 1..20: mol_type = other DNA
agagcagctggcacttctcg

SEQ ID NO: 28788 - DNA, 20 bp, synthetic construct
  source 1..20: mol_type = other DNA
gccgccaggtggaggatgct

SEQ ID NO: 28789 - DNA, 20 bp, synthetic construct
  source 1..20: mol_type = other DNA
tgtttgtgtcaatcccagcg

SEQ ID NO: 28790 - DNA, 20 bp, synthetic construct
  source 1..20: mol_type = other DNA
caaagaaagttcgtaaaccc

SEQ ID NO: 28791 - DNA, 20 bp, synthetic construct
  source 1..20: mol_type = other DNA
ctgactactacagccctacg

SEQ ID NO: 28792 - DNA, 20 bp, synthetic construct
  source 1..20: mol_type = other DNA
agctcctaccaccagtacgg

SEQ ID NO: 28793 - DNA, 20 bp, synthetic construct
  source 1..20: mol_type = other DNA
aggagagcagtagccgtgcg

SEQ ID NO: 28794 - DNA, 20 bp, synthetic construct
  source 1..20: mol_type = other DNA
gctgggattgacacaaacac

SEQ ID NO: 28795 - DNA, 20 bp, synthetic construct
  source 1..20: mol_type = other DNA
gaaagaagtgaccgagcccg

SEQ ID NO: 28796 - DNA, 20 bp, synthetic construct
  source 1..20: mol_type = other DNA
atagctgcggacgtctggaa

SEQ ID NO: 28797 - DNA, 20 bp, synthetic construct
  source 1..20: mol_type = other DNA
ggagctagcgtagctatagt

SEQ ID NO: 28798 - DNA, 20 bp, synthetic construct
  source 1..20: mol_type = other DNA
agaatcggtagctgaagact

SEQ ID NO: 28799 - DNA, 20 bp, synthetic construct
  source 1..20: mol_type = other DNA
gctatagtcggcataagctt

SEQ ID NO: 28800 - DNA, 20 bp, synthetic construct
  source 1..20: mol_type = other DNA
gctgaagactcgggcaaagt

SEQ ID NO: 28801 - DNA, 20 bp, synthetic construct
  source 1..20: mol_type = other DNA
cggcgcgttccggcaaggcg

SEQ ID NO: 28802 - DNA, 20 bp, synthetic construct
  source 1..20: mol_type = other DNA
taatgcggccagctgaaagc

SEQ ID NO: 28803 - DNA, 20 bp, synthetic construct
  source 1..20: mol_type = other DNA
agctggccgcattacagaga

SEQ ID NO: 28804 - DNA, 20 bp, synthetic construct
  source 1..20: mol_type = other DNA
tcatacgcgccacgaagttg

SEQ ID NO: 28805 - DNA, 20 bp, synthetic construct
  source 1..20: mol_type = other DNA
tggaggcggccgataacgtg

SEQ ID NO: 28806 - DNA, 20 bp, synthetic construct
  source 1..20: mol_type = other DNA
gatacctaaagtggagtggt

SEQ ID NO: 28807 - DNA, 20 bp, synthetic construct
  source 1..20: mol_type = other DNA
gctgagctcgcatgtgcggg

SEQ ID NO: 28808 - DNA, 20 bp, synthetic construct
  source 1..20: mol_type = other DNA
tgccgccggcgggtacctgg

SEQ ID NO: 28809 - DNA, 20 bp, synthetic construct
  source 1..20: mol_type = other DNA
ggcgcgtatgatacctaaag

SEQ ID NO: 28810 - DNA, 20 bp, synthetic construct
  source 1..20: mol_type = other DNA
gtatgatacctaaagtggag

SEQ ID NO: 28811 - DNA, 20 bp, synthetic construct
  source 1..20: mol_type = other DNA
ggcgggtacctggaggcgca

SEQ ID NO: 28812 - DNA, 20 bp, synthetic construct
  source 1..20: mol_type = other DNA
agttggggttgaattccaca

SEQ ID NO: 28813 - DNA, 20 bp, synthetic construct
  source 1..20: mol_type = other DNA
gatccaggtgccgaaagggc

SEQ ID NO: 28814 - DNA, 20 bp, synthetic construct
  source 1..20: mol_type = other DNA
ggagtggtcggcgttcctgg

SEQ ID NO: 28815 - DNA, 20 bp, synthetic construct
  source 1..20: mol_type = other DNA
cgaggtccgtatctgccctg

SEQ ID NO: 28816 - DNA, 20 bp, synthetic construct
  source 1..20: mol_type = other DNA
ctccgccctgcaggccaccg

SEQ ID NO: 28817 - DNA, 20 bp, synthetic construct
  source 1..20: mol_type = other DNA
tcacgttatcggccgcctcc

SEQ ID NO: 28818 - DNA, 20 bp, synthetic construct
  source 1..20: mol_type = other DNA
catgcgagctcagcagattg

SEQ ID NO: 28819 - DNA, 20 bp, synthetic construct
  source 1..20: mol_type = other DNA
aaggaagcgctcgttcaccc

SEQ ID NO: 28820 - DNA, 20 bp, synthetic construct
  source 1..20: mol_type = other DNA
agtcagcagcacaacagagg

SEQ ID NO: 28821 - DNA, 20 bp, synthetic construct
  source 1..20: mol_type = other DNA
cacagtcagcagcacaacag

SEQ ID NO: 28822 - DNA, 20 bp, synthetic construct
  source 1..20: mol_type = other DNA
acgtacgatagaggccctga

SEQ ID NO: 28823 - DNA, 20 bp, synthetic construct
  source 1..20: mol_type = other DNA
tactttgaaacgtacgatag

SEQ ID NO: 28824 - DNA, 20 bp, synthetic construct
  source 1..20: mol_type = other DNA
gtcagcagcacaacagaggc

SEQ ID NO: 28825 - DNA, 20 bp, synthetic construct
  source 1..20: mol_type = other DNA
tattgctcctctgtccatca

SEQ ID NO: 28826 - DNA, 20 bp, synthetic construct
  source 1..20: mol_type = other DNA
tctgttgtgctgctgactgt

SEQ ID NO: 28827 - DNA, 20 bp, synthetic construct
  source 1..20: mol_type = other DNA
caccatgctttcaacagctg

SEQ ID NO: 28828 - DNA, 20 bp, synthetic construct
  source 1..20: mol_type = other DNA
aggagcaatagtgagggact

SEQ ID NO: 28829 - DNA, 20 bp, synthetic construct
  source 1..20: mol_type = other DNA
cgcagctgttgaaagcatgg

SEQ ID NO: 28830 - DNA, 20 bp, synthetic construct
  source 1..20: mol_type = other DNA
ggacagaggagcaatagtga

SEQ ID NO: 28831 - DNA, 20 bp, synthetic construct
  source 1..20: mol_type = other DNA
atagaggccctgatggacag

SEQ ID NO: 28832 - DNA, 20 bp, synthetic construct
  source 1..20: mol_type = other DNA
aaggtcacttacccgctgca

SEQ ID NO: 28833 - DNA, 20 bp, synthetic construct
  source 1..20: mol_type = other DNA
gtgagggacttggaaaacct

SEQ ID NO: 28834 - DNA, 20 bp, synthetic construct
  source 1..20: mol_type = other DNA
agtgcccacgtctaaaaccg

SEQ ID NO: 28835 - DNA, 20 bp, synthetic construct
  source 1..20: mol_type = other DNA
agtcagagtcccataagtcc

SEQ ID NO: 28836 - DNA, 20 bp, synthetic construct
  source 1..20: mol_type = other DNA
gactcctattatgaaaccca

SEQ ID NO: 28837 - DNA, 20 bp, synthetic construct
  source 1..20: mol_type = other DNA
ggacgaaaaatatcagcttg

SEQ ID NO: 28838 - DNA, 20 bp, synthetic construct
  source 1..20: mol_type = other DNA
tagccctgaaggagcggtgt

SEQ ID NO: 28839 - DNA, 20 bp, synthetic construct
  source 1..20: mol_type = other DNA
gtagtaaggtgctctatgca

SEQ ID NO: 28840 - DNA, 20 bp, synthetic construct
  source 1..20: mol_type = other DNA
taaaaccgggggaaatgcca

SEQ ID NO: 28841 - DNA, 20 bp, synthetic construct
  source 1..20: mol_type = other DNA
ggaaacaaattgcagatctg

SEQ ID NO: 28842 - DNA, 20 bp, synthetic construct
  source 1..20: mol_type = other DNA
tcagcctctttgtatagaag

SEQ ID NO: 28843 - DNA, 20 bp, synthetic construct
  source 1..20: mol_type = other DNA
acaggacaaaacccccagaa

SEQ ID NO: 28844 - DNA, 20 bp, synthetic construct
  source 1..20: mol_type = other DNA
cataataggagtcagcgtgg

SEQ ID NO: 28845 - DNA, 20 bp, synthetic construct
  source 1..20: mol_type = other DNA
ctgaacagcaaagatccaac

SEQ ID NO: 28846 - DNA, 20 bp, synthetic construct
  source 1..20: mol_type = other DNA
tatggtgtggactctgtctg

SEQ ID NO: 28847 - DNA, 20 bp, synthetic construct
  source 1..20: mol_type = other DNA
gtgtctggctgtgatctgta

SEQ ID NO: 28848 - DNA, 20 bp, synthetic construct
  source 1..20: mol_type = other DNA
cacttactcattcattaggg

SEQ ID NO: 28849 - DNA, 20 bp, synthetic construct
  source 1..20: mol_type = other DNA
acggcattcatgtacacctg

SEQ ID NO: 28850 - DNA, 20 bp, synthetic construct
  source 1..20: mol_type = other DNA
gctgcgagaagaaaccaacg

SEQ ID NO: 28851 - DNA, 20 bp, synthetic construct
  source 1..20: mol_type = other DNA
caggtgcatctacttaccca

SEQ ID NO: 28852 - DNA, 20 bp, synthetic construct
  source 1..20: mol_type = other DNA
tagaaataagaacaatggga

SEQ ID NO: 28853 - DNA, 20 bp, synthetic construct
  source 1..20: mol_type = other DNA
gatggcccagccatgccaca

SEQ ID NO: 28854 - DNA, 20 bp, synthetic construct
  source 1..20: mol_type = other DNA
cgtgtagacggagtaccagt

SEQ ID NO: 28855 - DNA, 20 bp, synthetic construct
  source 1..20: mol_type = other DNA
gatcacacagaagctgtatg

SEQ ID NO: 28856 - DNA, 20 bp, synthetic construct
  source 1..20: mol_type = other DNA
gatcgactgaatgagatcaa

SEQ ID NO: 28857 - DNA, 20 bp, synthetic construct
  source 1..20: mol_type = other DNA
ggtaccgcggacctcgcccc

SEQ ID NO: 28858 - DNA, 20 bp, synthetic construct
  source 1..20: mol_type = other DNA
accctccagggacttaccac

SEQ ID NO: 28859 - DNA, 20 bp, synthetic construct
  source 1..20: mol_type = other DNA
cctggcgatgaggtaattga

SEQ ID NO: 28860 - DNA, 20 bp, synthetic construct
  source 1..20: mol_type = other DNA
cgttctctcccccatagagg

SEQ ID NO: 28861 - DNA, 20 bp, synthetic construct
  source 1..20: mol_type = other DNA
aggaacccctgagcgcccgc

SEQ ID NO: 28862 - DNA, 20 bp, synthetic construct
  source 1..20: mol_type = other DNA
cgagcggtttggggagtacg

SEQ ID NO: 28863 - DNA, 20 bp, synthetic construct
  source 1..20: mol_type = other DNA
actctgtccggttaaagtcc

SEQ ID NO: 28864 - DNA, 20 bp, synthetic construct
  source 1..20: mol_type = other DNA
tacaggtccacgtctgaccg

SEQ ID NO: 28865 - DNA, 20 bp, synthetic construct
  source 1..20: mol_type = other DNA
tgggatgaacgagccgctgg

SEQ ID NO: 28866 - DNA, 20 bp, synthetic construct
  source 1..20: mol_type = other DNA
ggagatagaagcgcagatca

SEQ ID NO: 28867 - DNA, 20 bp, synthetic construct
  source 1..20: mol_type = other DNA
aaagtgaacagcatcagccc

SEQ ID NO: 28868 - DNA, 20 bp, synthetic construct
  source 1..20: mol_type = other DNA
aggcctgcagaatgatcaca

SEQ ID NO: 28869 - DNA, 20 bp, synthetic construct
  source 1..20: mol_type = other DNA
tggcggtgcggacttggtac

SEQ ID NO: 28870 - DNA, 20 bp, synthetic construct
  source 1..20: mol_type = other DNA
acatatgatgttgtgcctgg

SEQ ID NO: 28871 - DNA, 20 bp, synthetic construct
  source 1..20: mol_type = other DNA
actttggcgaaggcccgtgg

SEQ ID NO: 28872 - DNA, 20 bp, synthetic construct
  source 1..20: mol_type = other DNA
catggctgaggcccacaaag

SEQ ID NO: 28873 - DNA, 20 bp, synthetic construct
  source 1..20: mol_type = other DNA
gtcgctgacagtcacgacgc

SEQ ID NO: 28874 - DNA, 20 bp, synthetic construct
  source 1..20: mol_type = other DNA
ggagctgatgcggcgcaagg

SEQ ID NO: 28875 - DNA, 20 bp, synthetic construct
  source 1..20: mol_type = other DNA
gcgagcgtgcagctggtgca

SEQ ID NO: 28876 - DNA, 20 bp, synthetic construct
  source 1..20: mol_type = other DNA
cgtgactgtcagcgacgtcc

SEQ ID NO: 28877 - DNA, 20 bp, synthetic construct
  source 1..20: mol_type = other DNA
caaggcagtgatgaagcagg

SEQ ID NO: 28878 - DNA, 20 bp, synthetic construct
  source 1..20: mol_type = other DNA
gagccgctggtggactgtga

SEQ ID NO: 28879 - DNA, 20 bp, synthetic construct
  source 1..20: mol_type = other DNA
tggcttaccggatcatacac

SEQ ID NO: 28880 - DNA, 20 bp, synthetic construct
  source 1..20: mol_type = other DNA
agcaagcactggcaccacgg

SEQ ID NO: 28881 - DNA, 20 bp, synthetic construct
  source 1..20: mol_type = other DNA
ctgctgcagacgcagaatca

SEQ ID NO: 28882 - DNA, 20 bp, synthetic construct
  source 1..20: mol_type = other DNA
gtgcccgaggagcacgtgtg

SEQ ID NO: 28883 - DNA, 20 bp, synthetic construct
  source 1..20: mol_type = other DNA
cgacccggctgaccaagatg

SEQ ID NO: 28884 - DNA, 20 bp, synthetic construct
  source 1..20: mol_type = other DNA
ggaggcacaagggcgacgtc

SEQ ID NO: 28885 - DNA, 20 bp, synthetic construct
  source 1..20: mol_type = other DNA
cccaggcggcaagtgcgacc

SEQ ID NO: 28886 - DNA, 20 bp, synthetic construct
  source 1..20: mol_type = other DNA
gagcctcaggcccaactcgg

SEQ ID NO: 28887 - DNA, 20 bp, synthetic construct
  source 1..20: mol_type = other DNA
tgtctgtttagtttcccagg

SEQ ID NO: 28888 - DNA, 20 bp, synthetic construct
  source 1..20: mol_type = other DNA
gccgctctgctcagtgcgtg

SEQ ID NO: 28889 - DNA, 20 bp, synthetic construct
  source 1..20: mol_type = other DNA
cgcctgaccgggaggcacaa

SEQ ID NO: 28890 - DNA, 20 bp, synthetic construct
  source 1..20: mol_type = other DNA
atgtggtgcacacggccctg

SEQ ID NO: 28891 - DNA, 20 bp, synthetic construct
  source 1..20: mol_type = other DNA
acgagcaccgcggccgacgc

SEQ ID NO: 28892 - DNA, 20 bp, synthetic construct
  source 1..20: mol_type = other DNA
gggcctacaccagcaagcac

SEQ ID NO: 28893 - DNA, 20 bp, synthetic construct
  source 1..20: mol_type = other DNA
ggtccagccgcctgaccggg

SEQ ID NO: 28894 - DNA, 20 bp, synthetic construct
  source 1..20: mol_type = other DNA
gtggtatctcggctccacga

SEQ ID NO: 28895 - DNA, 20 bp, synthetic construct
  source 1..20: mol_type = other DNA
gtagatagcgtagtgtagag

SEQ ID NO: 28896 - DNA, 20 bp, synthetic construct
  source 1..20: mol_type = other DNA
gttgtcaatgacgagcacag

SEQ ID NO: 28897 - DNA, 20 bp, synthetic construct
  source 1..20: mol_type = other DNA
aagcacggaagtactcacgt

SEQ ID NO: 28898 - DNA, 20 bp, synthetic construct
  source 1..20: mol_type = other DNA
tcatgtacaccaagtagcag

SEQ ID NO: 28899 - DNA, 20 bp, synthetic construct
  source 1..20: mol_type = other DNA
acaagcaggacaagcaaaag

SEQ ID NO: 28900 - DNA, 20 bp, synthetic construct
  source 1..20: mol_type = other DNA
caccaagtagcagtggtgtg

SEQ ID NO: 28901 - DNA, 20 bp, synthetic construct
  source 1..20: mol_type = other DNA
tcttctgaaaacagcaaccc

SEQ ID NO: 28902 - DNA, 20 bp, synthetic construct
  source 1..20: mol_type = other DNA
ggatctgatcgtcatgctca

SEQ ID NO: 28903 - DNA, 20 bp, synthetic construct
  source 1..20: mol_type = other DNA
tctggcgactttaccccacc

SEQ ID NO: 28904 - DNA, 20 bp, synthetic construct
  source 1..20: mol_type = other DNA
tgcatgaaaatagtatgttg

SEQ ID NO: 28905 - DNA, 20 bp, synthetic construct
  source 1..20: mol_type = other DNA
gctcctgagtgtcttcatag

SEQ ID NO: 28906 - DNA, 20 bp, synthetic construct
  source 1..20: mol_type = other DNA
ttactagaaaacctgagtaa

SEQ ID NO: 28907 - DNA, 20 bp, synthetic construct
  source 1..20: mol_type = other DNA
acgaaagtgaagagtatcac

SEQ ID NO: 28908 - DNA, 20 bp, synthetic construct
  source 1..20: mol_type = other DNA
ggttgaaaaaatgaattctg

SEQ ID NO: 28909 - DNA, 20 bp, synthetic construct
  source 1..20: mol_type = other DNA
tgcccagagatgcgaagtgt

SEQ ID NO: 28910 - DNA, 20 bp, synthetic construct
  source 1..20: mol_type = other DNA
atgcctctaattgtaccctg

SEQ ID NO: 28911 - DNA, 20 bp, synthetic construct
  source 1..20: mol_type = other DNA
gacaccaggatgttgtatgg

SEQ ID NO: 28912 - DNA, 20 bp, synthetic construct
  source 1..20: mol_type = other DNA
tgaggggcgagaactgatcc

SEQ ID NO: 28913 - DNA, 20 bp, synthetic construct
  source 1..20: mol_type = other DNA
gtcacgctcagcacttgccg

SEQ ID NO: 28914 - DNA, 20 bp, synthetic construct
  source 1..20: mol_type = other DNA
cggccagtgcggctgatggt

SEQ ID NO: 28915 - DNA, 20 bp, synthetic construct
  source 1..20: mol_type = other DNA
cagatctgtaaataaggtgt

SEQ ID NO: 28916 - DNA, 20 bp, synthetic construct
  source 1..20: mol_type = other DNA
agaatccatattctaccctc

SEQ ID NO: 28917 - DNA, 20 bp, synthetic construct
  source 1..20: mol_type = other DNA
tgaacatctcaagccgcccc

SEQ ID NO: 28918 - DNA, 20 bp, synthetic construct
  source 1..20: mol_type = other DNA
aagggccacttaccttacac

SEQ ID NO: 28919 - DNA, 20 bp, synthetic construct
  source 1..20: mol_type = other DNA
tgttcaatggatgcaacagg

SEQ ID NO: 28920 - DNA, 20 bp, synthetic construct
  source 1..20: mol_type = other DNA
ccggcccctggagtccaacg

SEQ ID NO: 28921 - DNA, 20 bp, synthetic construct
  source 1..20: mol_type = other DNA
gacttgcccgtacagaactc

SEQ ID NO: 28922 - DNA, 20 bp, synthetic construct
  source 1..20: mol_type = other DNA
ttgctgtttgactcacccag

SEQ ID NO: 28923 - DNA, 20 bp, synthetic construct
  source 1..20: mol_type = other DNA
actcacctccaatttccgtg

SEQ ID NO: 28924 - DNA, 20 bp, synthetic construct
  source 1..20: mol_type = other DNA
ccagactcaaagataatagg

SEQ ID NO: 28925 - DNA, 20 bp, synthetic construct
  source 1..20: mol_type = other DNA
gcagcagaccctccgcaccg

SEQ ID NO: 28926 - DNA, 20 bp, synthetic construct
  source 1..20: mol_type = other DNA
gtccatattcacctaggaca

SEQ ID NO: 28927 - DNA, 20 bp, synthetic construct
  source 1..20: mol_type = other DNA
atcatgccaaactccaagga

SEQ ID NO: 28928 - DNA, 20 bp, synthetic construct
  source 1..20: mol_type = other DNA
agaggttatggtgcgtgtag

SEQ ID NO: 28929 - DNA, 20 bp, synthetic construct
  source 1..20: mol_type = other DNA
gaggaaaactaaaaatggac

SEQ ID NO: 28930 - DNA, 20 bp, synthetic construct
  source 1..20: mol_type = other DNA
gaagaaaatggtcatgccgc

SEQ ID NO: 28931 - DNA, 20 bp, synthetic construct
  source 1..20: mol_type = other DNA
ggggaggatgggcttgccag

SEQ ID NO: 28932 - DNA, 20 bp, synthetic construct
  source 1..20: mol_type = other DNA
aaaatatgtcagatgtcagt

SEQ ID NO: 28933 - DNA, 20 bp, synthetic construct
  source 1..20: mol_type = other DNA
tgcattgaaaatggcaatag

SEQ ID NO: 28934 - DNA, 20 bp, synthetic construct
  source 1..20: mol_type = other DNA
tacttacttggtcagaacaa

SEQ ID NO: 28935 - DNA, 20 bp, synthetic construct
  source 1..20: mol_type = other DNA
tcctccacctactacaaaag

SEQ ID NO: 28936 - DNA, 20 bp, synthetic construct
  source 1..20: mol_type = other DNA
aaactggcgaattggaaggt

SEQ ID NO: 28937 - DNA, 20 bp, synthetic construct
  source 1..20: mol_type = other DNA
aagaccagcatgttgagcac

SEQ ID NO: 28938 - DNA, 20 bp, synthetic construct
  source 1..20: mol_type = other DNA
catgaggatctgggtgactg

SEQ ID NO: 28939 - DNA, 20 bp, synthetic construct
  source 1..20: mol_type = other DNA
tgggtgaaaaatatatccgc

SEQ ID NO: 28940 - DNA, 20 bp, synthetic construct
  source 1..20: mol_type = other DNA
cctggataacaacgttgatg

SEQ ID NO: 28941 - DNA, 20 bp, synthetic construct
  source 1..20: mol_type = other DNA
gggtgaaaaatatatccgca

SEQ ID NO: 28942 - DNA, 20 bp, synthetic construct
  source 1..20: mol_type = other DNA
ctggtctcatccgaaccctg

SEQ ID NO: 28943 - DNA, 20 bp, synthetic construct
  source 1..20: mol_type = other DNA
gctccgggttgacaaatggt

SEQ ID NO: 28944 - DNA, 20 bp, synthetic construct
  source 1..20: mol_type = other DNA
gttatcgtgaagggccccag

SEQ ID NO: 28945 - DNA, 20 bp, synthetic construct
  source 1..20: mol_type = other DNA
ctccgggttgacaaatggtg

SEQ ID NO: 28946 - DNA, 20 bp, synthetic construct
  source 1..20: mol_type = other DNA
agctccgggttgacaaatgg

SEQ ID NO: 28947 - DNA, 20 bp, synthetic construct
  source 1..20: mol_type = other DNA
atgactacaaatagtccgaa

SEQ ID NO: 28948 - DNA, 20 bp, synthetic construct
  source 1..20: mol_type = other DNA
gaaaggaactggctaccgtt

SEQ ID NO: 28949 - DNA, 20 bp, synthetic construct
  source 1..20: mol_type = other DNA
tacagctccgggttgacaaa

SEQ ID NO: 28950 - DNA, 20 bp, synthetic construct
  source 1..20: mol_type = other DNA
agggcttccgttacaagatg

SEQ ID NO: 28951 - DNA, 20 bp, synthetic construct
  source 1..20: mol_type = other DNA
gtgattgaagtccctccgca

SEQ ID NO: 28952 - DNA, 20 bp, synthetic construct
  source 1..20: mol_type = other DNA
gggacgcacagttatcgtga

SEQ ID NO: 28953 - DNA, 20 bp, synthetic construct
  source 1..20: mol_type = other DNA
tctagtcgacattactctga

SEQ ID NO: 28954 - DNA, 20 bp, synthetic construct
  source 1..20: mol_type = other DNA
agcagggtggtggcacacgg

SEQ ID NO: 28955 - DNA, 20 bp, synthetic construct
  source 1..20: mol_type = other DNA
cacacagtcagtctacatcc

SEQ ID NO: 28956 - DNA, 20 bp, synthetic construct
  source 1..20: mol_type = other DNA
gaaggtcctgaggcagagca

SEQ ID NO: 28957 - DNA, 20 bp, synthetic construct
  source 1..20: mol_type = other DNA
gagtgacctggaggcacagt

SEQ ID NO: 28958 - DNA, 20 bp, synthetic construct
  source 1..20: mol_type = other DNA
ctcccctgtctgtagtacca

SEQ ID NO: 28959 - DNA, 20 bp, synthetic construct
  source 1..20: mol_type = other DNA
aggaggaccacggccactcc

SEQ ID NO: 28960 - DNA, 20 bp, synthetic construct
  source 1..20: mol_type = other DNA
tcatggattccagctggacc

SEQ ID NO: 28961 - DNA, 20 bp, synthetic construct
  source 1..20: mol_type = other DNA
gaagaagctgagtgacctgg

SEQ ID NO: 28962 - DNA, 20 bp, synthetic construct
  source 1..20: mol_type = other DNA
ccagctggacccggaagcct

SEQ ID NO: 28963 - DNA, 20 bp, synthetic construct
  source 1..20: mol_type = other DNA
cagcagcagcaggaggacca

SEQ ID NO: 28964 - DNA, 20 bp, synthetic construct
  source 1..20: mol_type = other DNA
gctcctgccaggagtggccg

SEQ ID NO: 28965 - DNA, 20 bp, synthetic construct
  source 1..20: mol_type = other DNA
tgctctgcagcagcagcagg

SEQ ID NO: 28966 - DNA, 20 bp, synthetic construct
  source 1..20: mol_type = other DNA
ggtggcacacggcgggcagg

SEQ ID NO: 28967 - DNA, 20 bp, synthetic construct
  source 1..20: mol_type = other DNA
ggctctgggcctgcaggcgg

SEQ ID NO: 28968 - DNA, 20 bp, synthetic construct
  source 1..20: mol_type = other DNA
tgggctgcagggctgcatca

SEQ ID NO: 28969 - DNA, 20 bp, synthetic construct
  source 1..20: mol_type = other DNA
cagctcatgacccagataag

SEQ ID NO: 28970 - DNA, 20 bp, synthetic construct
  source 1..20: mol_type = other DNA
aggatgatcaacgtcatgga

SEQ ID NO: 28971 - DNA, 20 bp, synthetic construct
  source 1..20: mol_type = other DNA
tggtgtagaaaggagaacat

SEQ ID NO: 28972 - DNA, 20 bp, synthetic construct
  source 1..20: mol_type = other DNA
tgtgatatgccacgtcagaa

SEQ ID NO: 28973 - DNA, 20 bp, synthetic construct
  source 1..20: mol_type = other DNA
agagaaatgactctctgcgc

SEQ ID NO: 28974 - DNA, 20 bp, synthetic construct
  source 1..20: mol_type = other DNA
acagttgtaatagcaatgct

SEQ ID NO: 28975 - DNA, 20 bp, synthetic construct
  source 1..20: mol_type = other DNA
gggtcttaacatctttaatg

SEQ ID NO: 28976 - DNA, 20 bp, synthetic construct
  source 1..20: mol_type = other DNA
aaaattagcaatggaaacgc

SEQ ID NO: 28977 - DNA, 20 bp, synthetic construct
  source 1..20: mol_type = other DNA
gatgagccgatcagggaacc

SEQ ID NO: 28978 - DNA, 20 bp, synthetic construct
  source 1..20: mol_type = other DNA
cttgggatcgacctctggag

SEQ ID NO: 28979 - DNA, 20 bp, synthetic construct
  source 1..20: mol_type = other DNA
atccagtggactccgacctg

SEQ ID NO: 28980 - DNA, 20 bp, synthetic construct
  source 1..20: mol_type = other DNA
gcatacatgatgcatgttag

SEQ ID NO: 28981 - DNA, 20 bp, synthetic construct
  source 1..20: mol_type = other DNA
atctcctacccagaaagaca

SEQ ID NO: 28982 - DNA, 20 bp, synthetic construct
  source 1..20: mol_type = other DNA
ccagagtcaacccacaaggt

SEQ ID NO: 28983 - DNA, 20 bp, synthetic construct
  source 1..20: mol_type = other DNA
catctcactgacagaccggt

SEQ ID NO: 28984 - DNA, 20 bp, synthetic construct
  source 1..20: mol_type = other DNA
gtacctgtacatacagtgtg

SEQ ID NO: 28985 - DNA, 20 bp, synthetic construct
  source 1..20: mol_type = other DNA
aacagagtaacgctttaatg

SEQ ID NO: 28986 - DNA, 20 bp, synthetic construct
  source 1..20: mol_type = other DNA
ggcactcccagcctctagag

SEQ ID NO: 28987 - DNA, 20 bp, synthetic construct
  source 1..20: mol_type = other DNA
gtggtggacaaaccatcaga

SEQ ID NO: 28988 - DNA, 20 bp, synthetic construct
  source 1..20: mol_type = other DNA
attaaagcgttactctgttg

SEQ ID NO: 28989 - DNA, 20 bp, synthetic construct
  source 1..20: mol_type = other DNA
acaggattggggccacacca

SEQ ID NO: 28990 - DNA, 20 bp, synthetic construct
  source 1..20: mol_type = other DNA
tctgtgtaccaggcttgtgt

SEQ ID NO: 28991 - DNA, 20 bp, synthetic construct
  source 1..20: mol_type = other DNA
ctgtggactctcttactgca

SEQ ID NO: 28992 - DNA, 20 bp, synthetic construct
  source 1..20: mol_type = other DNA
ctagatctggccgtgtgagg

SEQ ID NO: 28993 - DNA, 20 bp, synthetic construct
  source 1..20: mol_type = other DNA
tctgatgcagcacctgacaa

SEQ ID NO: 28994 - DNA, 20 bp, synthetic construct
  source 1..20: mol_type = other DNA
cccagctactttggaaacca

SEQ ID NO: 28995 - DNA, 20 bp, synthetic construct
  source 1..20: mol_type = other DNA
cctgcagtaagagagtccac

SEQ ID NO: 28996 - DNA, 20 bp, synthetic construct
  source 1..20: mol_type = other DNA
ccagtctctgagagctaatg

SEQ ID NO: 28997 - DNA, 20 bp, synthetic construct
  source 1..20: mol_type = other DNA
tttgctcaggacatctccca

SEQ ID NO: 28998 - DNA, 20 bp, synthetic construct
  source 1..20: mol_type = other DNA
cacggccagatctaggaagc

SEQ ID NO: 28999 - DNA, 20 bp, synthetic construct
  source 1..20: mol_type = other DNA
tagagaccgaattagtcaca

SEQ ID NO: 29000 - DNA, 20 bp, synthetic construct
  source 1..20: mol_type = other DNA
tgacactctagttcttgtgg

SEQ ID NO: 29001 - DNA, 20 bp, synthetic construct
  source 1..20: mol_type = other DNA
agcatgtgatgcttaggcta

SEQ ID NO: 29002 - DNA, 20 bp, synthetic construct
  source 1..20: mol_type = other DNA
tagtgctcttaagtgaccaa

SEQ ID NO: 29003 - DNA, 20 bp, synthetic construct
  source 1..20: mol_type = other DNA
gaaatgttgactagaccact

SEQ ID NO: 29004 - DNA, 20 bp, synthetic construct
  source 1..20: mol_type = other DNA
tgggaacaagaacggtcact

SEQ ID NO: 29005 - DNA, 20 bp, synthetic construct
  source 1..20: mol_type = other DNA
tcttagggtgactcttctca

SEQ ID NO: 29006 - DNA, 20 bp, synthetic construct
  source 1..20: mol_type = other DNA
gagtcaagacttgtagcaga

SEQ ID NO: 29007 - DNA, 20 bp, synthetic construct
  source 1..20: mol_type = other DNA
ggggaagtctgcttgaaagg

SEQ ID NO: 29008 - DNA, 20 bp, synthetic construct
  source 1..20: mol_type = other DNA
tcaagaacatcttcaaacca

SEQ ID NO: 29009 - DNA, 20 bp, synthetic construct
  source 1..20: mol_type = other DNA
ctctcttgcaggagtaacac

SEQ ID NO: 29010 - DNA, 20 bp, synthetic construct
  source 1..20: mol_type = other DNA
agagatgggcacagaatgat

SEQ ID NO: 29011 - DNA, 20 bp, synthetic construct
  source 1..20: mol_type = other DNA
aatgactggttgacccgaca

SEQ ID NO: 29012 - DNA, 20 bp, synthetic construct
  source 1..20: mol_type = other DNA
tcttgactccagaactctgt

SEQ ID NO: 29013 - DNA, 20 bp, synthetic construct
  source 1..20: mol_type = other DNA
agaggtctgaaagagagctg

SEQ ID NO: 29014 - DNA, 20 bp, synthetic construct
  source 1..20: mol_type = other DNA
ttggtagggtatcccgaatg

SEQ ID NO: 29015 - DNA, 20 bp, synthetic construct
  source 1..20: mol_type = other DNA
agtacattacccctgcgaag

SEQ ID NO: 29016 - DNA, 20 bp, synthetic construct
  source 1..20: mol_type = other DNA
ttacgagtctattccccaca

SEQ ID NO: 29017 - DNA, 20 bp, synthetic construct
  source 1..20: mol_type = other DNA
tgattatgcagttcatcacg

SEQ ID NO: 29018 - DNA, 20 bp, synthetic construct
  source 1..20: mol_type = other DNA
tcaaaccagaagacccaaca

SEQ ID NO: 29019 - DNA, 20 bp, synthetic construct
  source 1..20: mol_type = other DNA
gttacaatgcccgaccctcg

SEQ ID NO: 29020 - DNA, 20 bp, synthetic construct
  source 1..20: mol_type = other DNA
atctgatactcgatatctgg

SEQ ID NO: 29021 - DNA, 20 bp, synthetic construct
  source 1..20: mol_type = other DNA
atactggttcgtccttactg

SEQ ID NO: 29022 - DNA, 20 bp, synthetic construct
  source 1..20: mol_type = other DNA
gaagagaattgaagggtcag

SEQ ID NO: 29023 - DNA, 20 bp, synthetic construct
  source 1..20: mol_type = other DNA
tcagcgatatgtctgtaagc

SEQ ID NO: 29024 - DNA, 20 bp, synthetic construct
  source 1..20: mol_type = other DNA
tcctacctgatttccaactg

SEQ ID NO: 29025 - DNA, 20 bp, synthetic construct
  source 1..20: mol_type = other DNA
tcccttctcgctcacgaatg

SEQ ID NO: 29026 - DNA, 20 bp, synthetic construct
  source 1..20: mol_type = other DNA
tgagtttgcaagatcagtgt

SEQ ID NO: 29027 - DNA, 20 bp, synthetic construct
  source 1..20: mol_type = other DNA
agatccacactcttcaagga

SEQ ID NO: 29028 - DNA, 20 bp, synthetic construct
  source 1..20: mol_type = other DNA
ggtggtaaacagaagccaga

SEQ ID NO: 29029 - DNA, 20 bp, synthetic construct
  source 1..20: mol_type = other DNA
catatagaatgtactcatgg

SEQ ID NO: 29030 - DNA, 20 bp, synthetic construct
  source 1..20: mol_type = other DNA
tgaatgtgttacgtgatcca

SEQ ID NO: 29031 - DNA, 20 bp, synthetic construct
  source 1..20: mol_type = other DNA
ggtcgccagtttaacgacac

SEQ ID NO: 29032 - DNA, 20 bp, synthetic construct
  source 1..20: mol_type = other DNA
tcatgaggggttaactccag

SEQ ID NO: 29033 - DNA, 20 bp, synthetic construct
  source 1..20: mol_type = other DNA
tttgcccacaaatactacaa

SEQ ID NO: 29034 - DNA, 20 bp, synthetic construct
  source 1..20: mol_type = other DNA
atcatatgttcctccaagtg

SEQ ID NO: 29035 - DNA, 20 bp, synthetic construct
  source 1..20: mol_type = other DNA
gtggaaaatcagtacgagaa

SEQ ID NO: 29036 - DNA, 20 bp, synthetic construct
  source 1..20: mol_type = other DNA
agccacacccgtgttcacac

SEQ ID NO: 29037 - DNA, 20 bp, synthetic construct
  source 1..20: mol_type = other DNA
atgaacaggaaagtggtgat

SEQ ID NO: 29038 - DNA, 20 bp, synthetic construct
  source 1..20: mol_type = other DNA
agaaatgattctgaggaccc

SEQ ID NO: 29039 - DNA, 20 bp, synthetic construct
  source 1..20: mol_type = other DNA
agttagctctgaatgaaaag

SEQ ID NO: 29040 - DNA, 20 bp, synthetic construct
  source 1..20: mol_type = other DNA
gcttctttctgtgaacagtt

SEQ ID NO: 29041 - DNA, 20 bp, synthetic construct
  source 1..20: mol_type = other DNA
tgatgcagaagaagaacctg

SEQ ID NO: 29042 - DNA, 20 bp, synthetic construct
  source 1..20: mol_type = other DNA
tgaagaagatgagctagagg

SEQ ID NO: 29043 - DNA, 20 bp, synthetic construct
  source 1..20: mol_type = other DNA
agaagactaagagtgaaagt

SEQ ID NO: 29044 - DNA, 20 bp, synthetic construct
  source 1..20: mol_type = other DNA
gctggttatccactgggcgg

SEQ ID NO: 29045 - DNA, 20 bp, synthetic construct
  source 1..20: mol_type = other DNA
cagtagtaggtcctttgtgt

SEQ ID NO: 29046 - DNA, 20 bp, synthetic construct
  source 1..20: mol_type = other DNA
cttgttccgacccaaggacc

SEQ ID NO: 29047 - DNA, 20 bp, synthetic construct
  source 1..20: mol_type = other DNA
tgccgcgctgggcctgaccg

SEQ ID NO: 29048 - DNA, 20 bp, synthetic construct
  source 1..20: mol_type = other DNA
tcgaagtgcaccaggcggta

SEQ ID NO: 29049 - DNA, 20 bp, synthetic construct
  source 1..20: mol_type = other DNA
aacaagtctgctatttgatg

SEQ ID NO: 29050 - DNA, 20 bp, synthetic construct
  source 1..20: mol_type = other DNA
ggtgtcaccatcgcaggtca

SEQ ID NO: 29051 - DNA, 20 bp, synthetic construct
  source 1..20: mol_type = other DNA
gtgcactccgcctcgctcac

SEQ ID NO: 29052 - DNA, 20 bp, synthetic construct
  source 1..20: mol_type = other DNA
aggcggagtgcacggccatg

SEQ ID NO: 29053 - DNA, 20 bp, synthetic construct
  source 1..20: mol_type = other DNA
ctaccctgtgaaatcctgca

SEQ ID NO: 29054 - DNA, 20 bp, synthetic construct
  source 1..20: mol_type = other DNA
tggcttgtgatcaaccagga

SEQ ID NO: 29055 - DNA, 20 bp, synthetic construct
  source 1..20: mol_type = other DNA
gatcctttctgaggcgtcgc

SEQ ID NO: 29056 - DNA, 20 bp, synthetic construct
  source 1..20: mol_type = other DNA
acggcctggagatagagggc

SEQ ID NO: 29057 - DNA, 20 bp, synthetic construct
  source 1..20: mol_type = other DNA
gcggcaaccccgagccaccc

SEQ ID NO: 29058 - DNA, 20 bp, synthetic construct
  source 1..20: mol_type = other DNA
gtaggctgcactgagagtca

SEQ ID NO: 29059 - DNA, 20 bp, synthetic construct
  source 1..20: mol_type = other DNA
gatgcgagttggtacactgt

SEQ ID NO: 29060 - DNA, 20 bp, synthetic construct
  source 1..20: mol_type = other DNA
tccaagtgcggtatggacga

SEQ ID NO: 29061 - DNA, 20 bp, synthetic construct
  source 1..20: mol_type = other DNA
gggagctggtctaatgtctg

SEQ ID NO: 29062 - DNA, 20 bp, synthetic construct
  source 1..20: mol_type = other DNA
tcaaaaccacaaataaaacg

SEQ ID NO: 29063 - DNA, 20 bp, synthetic construct
  source 1..20: mol_type = other DNA
atgtgccaaagataaaacat

SEQ ID NO: 29064 - DNA, 20 bp, synthetic construct
  source 1..20: mol_type = other DNA
caaagatgatgacacaacta

SEQ ID NO: 29065 - DNA, 20 bp, synthetic construct
  source 1..20: mol_type = other DNA
gcaatctcatcactacaatc

SEQ ID NO: 29066 - DNA, 20 bp, synthetic construct
  source 1..20: mol_type = other DNA
aaagattctgatgtcgaagg

SEQ ID NO: 29067 - DNA, 20 bp, synthetic construct
  source 1..20: mol_type = other DNA
attactgcggatggaatgtg

SEQ ID NO: 29068 - DNA, 20 bp, synthetic construct
  source 1..20: mol_type = other DNA
aaacaagtctaccaagatct

SEQ ID NO: 29069 - DNA, 20 bp, synthetic construct
  source 1..20: mol_type = other DNA
tgccatctgaaattcaatgt

SEQ ID NO: 29070 - DNA, 20 bp, synthetic construct
  source 1..20: mol_type = other DNA
tctgtttccagcctttgaac

SEQ ID NO: 29071 - DNA, 20 bp, synthetic construct
  source 1..20: mol_type = other DNA
ataggaaagaaaacaaatag

SEQ ID NO: 29072 - DNA, 20 bp, synthetic construct
  source 1..20: mol_type = other DNA
agacttgtacacaaacttgg

SEQ ID NO: 29073 - DNA, 20 bp, synthetic construct
  source 1..20: mol_type = other DNA
gtggaagtgaagaatcttga

SEQ ID NO: 29074 - DNA, 20 bp, synthetic construct
  source 1..20: mol_type = other DNA
tatggattatggcagtagcg

SEQ ID NO: 29075 - DNA, 20 bp, synthetic construct
  source 1..20: mol_type = other DNA
gggtacgcactaatgaccat

SEQ ID NO: 29076 - DNA, 20 bp, synthetic construct
  source 1..20: mol_type = other DNA
ataggtgtaaacaacaactc

SEQ ID NO: 29077 - DNA, 20 bp, synthetic construct
  source 1..20: mol_type = other DNA
gaacagcacatcgctaaggc

SEQ ID NO: 29078 - DNA, 20 bp, synthetic construct
  source 1..20: mol_type = other DNA
gctggcatgaaaagtcacct

SEQ ID NO: 29079 - DNA, 20 bp, synthetic construct
  source 1..20: mol_type = other DNA
ttgtgaccaagcatgctgca

SEQ ID NO: 29080 - DNA, 20 bp, synthetic construct
  source 1..20: mol_type = other DNA
acaggccttattaggacaag

SEQ ID NO: 29081 - DNA, 20 bp, synthetic construct
  source 1..20: mol_type = other DNA
gtgcatatctaagtatgtag

SEQ ID NO: 29082 - DNA, 20 bp, synthetic construct
  source 1..20: mol_type = other DNA
tgcgaatatactaccagttg

SEQ ID NO: 29083 - DNA, 20 bp, synthetic construct
  source 1..20: mol_type = other DNA
ttgttgtgctagatatagca

SEQ ID NO: 29084 - DNA, 20 bp, synthetic construct
  source 1..20: mol_type = other DNA
tagctcaaataaattgccac

SEQ ID NO: 29085 - DNA, 20 bp, synthetic construct
  source 1..20: mol_type = other DNA
agtccaaaattatcacacgt

SEQ ID NO: 29086 - DNA, 20 bp, synthetic construct
  source 1..20: mol_type = other DNA
gtttggatgtataataacta

SEQ ID NO: 29087 - DNA, 20 bp, synthetic construct
  source 1..20: mol_type = other DNA
tattcttgagaacaggcgtg

SEQ ID NO: 29088 - DNA, 20 bp, synthetic construct
  source 1..20: mol_type = other DNA
ctttctaacaagagaaaacg

SEQ ID NO: 29089 - DNA, 20 bp, synthetic construct
  source 1..20: mol_type = other DNA
tctggctacctctcatgcac

SEQ ID NO: 29090 - DNA, 20 bp, synthetic construct
  source 1..20: mol_type = other DNA
gctatgttagcaaccatgtg

SEQ ID NO: 29091 - DNA, 20 bp, synthetic construct
  source 1..20: mol_type = other DNA
gcgggacacactgatctcgg

SEQ ID NO: 29092 - DNA, 20 bp, synthetic construct
  source 1..20: mol_type = other DNA
aacccatcatactctcacat

SEQ ID NO: 29093 - DNA, 20 bp, synthetic construct
  source 1..20: mol_type = other DNA
tctggacagtcctagccgac

SEQ ID NO: 29094 - DNA, 20 bp, synthetic construct
  source 1..20: mol_type = other DNA
cagcatagcgagctataaga

SEQ ID NO: 29095 - DNA, 20 bp, synthetic construct
  source 1..20: mol_type = other DNA
tcctggctatactgtaacct

SEQ ID NO: 29096 - DNA, 20 bp, synthetic construct
  source 1..20: mol_type = other DNA
gttcaactgatagtagatgg

SEQ ID NO: 29097 - DNA, 20 bp, synthetic construct
  source 1..20: mol_type = other DNA
agtaggagcactccacggga

SEQ ID NO: 29098 - DNA, 20 bp, synthetic construct
  source 1..20: mol_type = other DNA
tctggcagagctgatagttg

SEQ ID NO: 29099 - DNA, 20 bp, synthetic construct
  source 1..20: mol_type = other DNA
gaggtagccagacaaggcac

SEQ ID NO: 29100 - DNA, 20 bp, synthetic construct
  source 1..20: mol_type = other DNA
atacttacactatatgtgca

SEQ ID NO: 29101 - DNA, 20 bp, synthetic construct
  source 1..20: mol_type = other DNA
gtgtattaaggccattgtct

SEQ ID NO: 29102 - DNA, 20 bp, synthetic construct
  source 1..20: mol_type = other DNA
gactaatatgaatgacacca

SEQ ID NO: 29103 - DNA, 20 bp, synthetic construct
  source 1..20: mol_type = other DNA
aggagatgacagtttcgagg

SEQ ID NO: 29104 - DNA, 20 bp, synthetic construct
  source 1..20: mol_type = other DNA
aggcttacactactaccacc

SEQ ID NO: 29105 - DNA, 20 bp, synthetic construct
  source 1..20: mol_type = other DNA
agatactggacacgttgacc

SEQ ID NO: 29106 - DNA, 20 bp, synthetic construct
  source 1..20: mol_type = other DNA
gacgcttatgagaagtgccg

SEQ ID NO: 29107 - DNA, 20 bp, synthetic construct
  source 1..20: mol_type = other DNA
gcacgcttgcaaggacattg

SEQ ID NO: 29108 - DNA, 20 bp, synthetic construct
  source 1..20: mol_type = other DNA
tcccaggcagcactcgtcgg

SEQ ID NO: 29109 - DNA, 20 bp, synthetic construct
  source 1..20: mol_type = other DNA
gtagtgtaagcctgtcagcg

SEQ ID NO: 29110 - DNA, 20 bp, synthetic construct
  source 1..20: mol_type = other DNA
acgatgttcagagtgtcact

SEQ ID NO: 29111 - DNA, 20 bp, synthetic construct
  source 1..20: mol_type = other DNA
cgagatcagccgtccagagg

SEQ ID NO: 29112 - DNA, 20 bp, synthetic construct
  source 1..20: mol_type = other DNA
caggggaggcaccgtgacat

SEQ ID NO: 29113 - DNA, 20 bp, synthetic construct
  source 1..20: mol_type = other DNA
ctgtgattacgccctccacg

SEQ ID NO: 29114 - DNA, 20 bp, synthetic construct
  source 1..20: mol_type = other DNA
gcacgccactcactccatgt

SEQ ID NO: 29115 - DNA, 20 bp, synthetic construct
  source 1..20: mol_type = other DNA
cttctcataagcgtccacaa

SEQ ID NO: 29116 - DNA, 20 bp, synthetic construct
  source 1..20: mol_type = other DNA
acatcgtggcatcagatcac

SEQ ID NO: 29117 - DNA, 20 bp, synthetic construct
  source 1..20: mol_type = other DNA
gtagaagtcgtccacgcacg

SEQ ID NO: 29118 - DNA, 20 bp, synthetic construct
  source 1..20: mol_type = other DNA
ggccgcgagctcatgatccc

SEQ ID NO: 29119 - DNA, 20 bp, synthetic construct
  source 1..20: mol_type = other DNA
cagttcctcaatcccgtgca

SEQ ID NO: 29120 - DNA, 20 bp, synthetic construct
  source 1..20: mol_type = other DNA
gcccataagactgtggacca

SEQ ID NO: 29121 - DNA, 20 bp, synthetic construct
  source 1..20: mol_type = other DNA
gccagccaaccaggtacacg

SEQ ID NO: 29122 - DNA, 20 bp, synthetic construct
  source 1..20: mol_type = other DNA
gtatcgatttccgtgagaga

SEQ ID NO: 29123 - DNA, 20 bp, synthetic construct
  source 1..20: mol_type = other DNA
tctgaccaccatggtacagg

SEQ ID NO: 29124 - DNA, 20 bp, synthetic construct
  source 1..20: mol_type = other DNA
tgtgctcaatcctgccatcg

SEQ ID NO: 29125 - DNA, 20 bp, synthetic construct
  source 1..20: mol_type = other DNA
gaggaatgccatccggccag

SEQ ID NO: 29126 - DNA, 20 bp, synthetic construct
  source 1..20: mol_type = other DNA
agggcattgcagcatctcaa

SEQ ID NO: 29127 - DNA, 20 bp, synthetic construct
  source 1..20: mol_type = other DNA
tctgtggtggcctctaggga

SEQ ID NO: 29128 - DNA, 20 bp, synthetic construct
  source 1..20: mol_type = other DNA
ccagggtgctcaccgacatg

SEQ ID NO: 29129 - DNA, 20 bp, synthetic construct
  source 1..20: mol_type = other DNA
tcccaccagcaccaaaggtg

SEQ ID NO: 29130 - DNA, 20 bp, synthetic construct
  source 1..20: mol_type = other DNA
acctgtcaccacctgcaatg

SEQ ID NO: 29131 - DNA, 20 bp, synthetic construct
  source 1..20: mol_type = other DNA
tcatcagggtggcaatcttg

SEQ ID NO: 29132 - DNA, 20 bp, synthetic construct
  source 1..20: mol_type = other DNA
ttgaactccagtcttcaatg

SEQ ID NO: 29133 - DNA, 20 bp, synthetic construct
  source 1..20: mol_type = other DNA
cattccgacaagtagcagag

SEQ ID NO: 29134 - DNA, 20 bp, synthetic construct
  source 1..20: mol_type = other DNA
ttagtagttcaatggccccc

SEQ ID NO: 29135 - DNA, 20 bp, synthetic construct
  source 1..20: mol_type = other DNA
gcaatcactacacttatggc

SEQ ID NO: 29136 - DNA, 20 bp, synthetic construct
  source 1..20: mol_type = other DNA
gaagatcatgaaaaatacgg

SEQ ID NO: 29137 - DNA, 20 bp, synthetic construct
  source 1..20: mol_type = other DNA
acttacctgtagtctgcctg

SEQ ID NO: 29138 - DNA, 20 bp, synthetic construct
  source 1..20: mol_type = other DNA
aagcccttgaagttgccaca

SEQ ID NO: 29139 - DNA, 20 bp, synthetic construct
  source 1..20: mol_type = other DNA
caatcactacacttatggct

SEQ ID NO: 29140 - DNA, 20 bp, synthetic construct
  source 1..20: mol_type = other DNA
gccacaaggacttccagcag

SEQ ID NO: 29141 - DNA, 20 bp, synthetic construct
  source 1..20: mol_type = other DNA
aaagatataataaagatgct

SEQ ID NO: 29142 - DNA, 20 bp, synthetic construct
  source 1..20: mol_type = other DNA
gatattcttgtgaacttgag

SEQ ID NO: 29143 - DNA, 20 bp, synthetic construct
  source 1..20: mol_type = other DNA
ttagactgtgacaaaaggtg

SEQ ID NO: 29144 - DNA, 20 bp, synthetic construct
  source 1..20: mol_type = other DNA
aagatcatgaaaaatacggt

SEQ ID NO: 29145 - DNA, 20 bp, synthetic construct
  source 1..20: mol_type = other DNA
cttacctgtagtctgcctgg

SEQ ID NO: 29146 - DNA, 20 bp, synthetic construct
  source 1..20: mol_type = other DNA
tcctctgctggaagtccttg

SEQ ID NO: 29147 - DNA, 20 bp, synthetic construct
  source 1..20: mol_type = other DNA
agatcatgaaaaatacggtg

SEQ ID NO: 29148 - DNA, 20 bp, synthetic construct
  source 1..20: mol_type = other DNA
taacaatatgcagtttatga

SEQ ID NO: 29149 - DNA, 20 bp, synthetic construct
  source 1..20: mol_type = other DNA
tcagaagctgaaccgaactg

SEQ ID NO: 29150 - DNA, 20 bp, synthetic construct
  source 1..20: mol_type = other DNA
gtcacacactctgcagtccg

SEQ ID NO: 29151 - DNA, 20 bp, synthetic construct
  source 1..20: mol_type = other DNA
tcagatactacacaatcccg

SEQ ID NO: 29152 - DNA, 20 bp, synthetic construct
  source 1..20: mol_type = other DNA
atgcccagataccttatatg

SEQ ID NO: 29153 - DNA, 20 bp, synthetic construct
  source 1..20: mol_type = other DNA
gaacagactccaccaaatga

SEQ ID NO: 29154 - DNA, 20 bp, synthetic construct
  source 1..20: mol_type = other DNA
attgcagcatagaactcgcg

SEQ ID NO: 29155 - DNA, 20 bp, synthetic construct
  source 1..20: mol_type = other DNA
ctgaatgcctacaccacacg

SEQ ID NO: 29156 - DNA, 20 bp, synthetic construct
  source 1..20: mol_type = other DNA
catgtgacgggacccgtgtg

SEQ ID NO: 29157 - DNA, 20 bp, synthetic construct
  source 1..20: mol_type = other DNA
gactctggcactaagatgca

SEQ ID NO: 29158 - DNA, 20 bp, synthetic construct
  source 1..20: mol_type = other DNA
agcacacagtccattcggca

SEQ ID NO: 29159 - DNA, 20 bp, synthetic construct
  source 1..20: mol_type = other DNA
gtttcgtgtacaagaagtga

SEQ ID NO: 29160 - DNA, 20 bp, synthetic construct
  source 1..20: mol_type = other DNA
ttgtaggagaagatgtatca

SEQ ID NO: 29161 - DNA, 20 bp, synthetic construct
  source 1..20: mol_type = other DNA
aggtgcagtcttctcgacat

SEQ ID NO: 29162 - DNA, 20 bp, synthetic construct
  source 1..20: mol_type = other DNA
actatgcagtccgtagagca

SEQ ID NO: 29163 - DNA, 20 bp, synthetic construct
  source 1..20: mol_type = other DNA
aggctactgctcgaaagcgc

SEQ ID NO: 29164 - DNA, 20 bp, synthetic construct
  source 1..20: mol_type = other DNA
tatgcgatggatgtcaacag

SEQ ID NO: 29165 - DNA, 20 bp, synthetic construct
  source 1..20: mol_type = other DNA
acctacacctataataccag

SEQ ID NO: 29166 - DNA, 20 bp, synthetic construct
  source 1..20: mol_type = other DNA
ttaagtgatactgtgcacaa

SEQ ID NO: 29167 - DNA, 20 bp, synthetic construct
  source 1..20: mol_type = other DNA
atgtggactcactctcacta

SEQ ID NO: 29168 - DNA, 20 bp, synthetic construct
  source 1..20: mol_type = other DNA
agattctgtaaatacctcaa

SEQ ID NO: 29169 - DNA, 20 bp, synthetic construct
  source 1..20: mol_type = other DNA
gtagtatatgatacaagcaa

SEQ ID NO: 29170 - DNA, 20 bp, synthetic construct
  source 1..20: mol_type = other DNA
cttgggtgcatccgacggca

SEQ ID NO: 29171 - DNA, 20 bp, synthetic construct
  source 1..20: mol_type = other DNA
tatagtgaaatccatgagcg

SEQ ID NO: 29172 - DNA, 20 bp, synthetic construct
  source 1..20: mol_type = other DNA
atttactagaggggttgcag

SEQ ID NO: 29173 - DNA, 20 bp, synthetic construct
  source 1..20: mol_type = other DNA
aaacacaccaataggaatgt

SEQ ID NO: 29174 - DNA, 20 bp, synthetic construct
  source 1..20: mol_type = other DNA
gttgaaagattatcaatcgc

SEQ ID NO: 29175 - DNA, 20 bp, synthetic construct
  source 1..20: mol_type = other DNA
tgtagtcctgtctataaagt

SEQ ID NO: 29176 - DNA, 20 bp, synthetic construct
  source 1..20: mol_type = other DNA
gtagatttgataatatcccc

SEQ ID NO: 29177 - DNA, 20 bp, synthetic construct
  source 1..20: mol_type = other DNA
ttgggcccaaaccaagagaa

SEQ ID NO: 29178 - DNA, 20 bp, synthetic construct
  source 1..20: mol_type = other DNA
tgagagaccatcaaactctg

SEQ ID NO: 29179 - DNA, 20 bp, synthetic construct
  source 1..20: mol_type = other DNA
taccattcatgttcactgaa

SEQ ID NO: 29180 - DNA, 20 bp, synthetic construct
  source 1..20: mol_type = other DNA
tacctttcagtgaacatgaa

SEQ ID NO: 29181 - DNA, 20 bp, synthetic construct
  source 1..20: mol_type = other DNA
gaccacgaccgcatgtacgt

SEQ ID NO: 29182 - DNA, 20 bp, synthetic construct
  source 1..20: mol_type = other DNA
accccccagaacgatgacgg

SEQ ID NO: 29183 - DNA, 20 bp, synthetic construct
  source 1..20: mol_type = other DNA
acacggcctggtacatgagt

SEQ ID NO: 29184 - DNA, 20 bp, synthetic construct
  source 1..20: mol_type = other DNA
atgtgcacctatgtgaaccg

SEQ ID NO: 29185 - DNA, 20 bp, synthetic construct
  source 1..20: mol_type = other DNA
cagggccagcccttacaatg

SEQ ID NO: 29186 - DNA, 20 bp, synthetic construct
  source 1..20: mol_type = other DNA
gcacggatcagtacaactcc

SEQ ID NO: 29187 - DNA, 20 bp, synthetic construct
  source 1..20: mol_type = other DNA
gccatctatgaagtccacca

SEQ ID NO: 29188 - DNA, 20 bp, synthetic construct
  source 1..20: mol_type = other DNA
agcctgagcgactcgagtca

SEQ ID NO: 29189 - DNA, 20 bp, synthetic construct
  source 1..20: mol_type = other DNA
ccacggcaatagtggtaagg

SEQ ID NO: 29190 - DNA, 20 bp, synthetic construct
  source 1..20: mol_type = other DNA
gcacctgtgcggactaccag

SEQ ID NO: 29191 - DNA, 20 bp, synthetic construct
  source 1..20: mol_type = other DNA
agcctccccacagcgcatcg

SEQ ID NO: 29192 - DNA, 20 bp, synthetic construct
  source 1..20: mol_type = other DNA
gaccatgcgaatatcagcca

SEQ ID NO: 29193 - DNA, 20 bp, synthetic construct
  source 1..20: mol_type = other DNA
gcccacagctccgtgttccg

SEQ ID NO: 29194 - DNA, 20 bp, synthetic construct
  source 1..20: mol_type = other DNA
agctcagcatggatgaacga

SEQ ID NO: 29195 - DNA, 20 bp, synthetic construct
  source 1..20: mol_type = other DNA
cccgatgcgggcgtacaccg

SEQ ID NO: 29196 - DNA, 20 bp, synthetic construct
  source 1..20: mol_type = other DNA
tacttcacgagagaggacga

SEQ ID NO: 29197 - DNA, 20 bp, synthetic construct
  source 1..20: mol_type = other DNA
gcttcagcaccggtcgtggg

SEQ ID NO: 29198 - DNA, 20 bp, synthetic construct
  source 1..20: mol_type = other DNA
gtagggccaggccatgtcaa

SEQ ID NO: 29199 - DNA, 20 bp, synthetic construct
  source 1..20: mol_type = other DNA
acccagccgccctcacaccg

SEQ ID NO: 29200 - DNA, 20 bp, synthetic construct
  source 1..20: mol_type = other DNA
gccagtgcaacccggacctg

SEQ ID NO: 29201 - DNA, 20 bp, synthetic construct
  source 1..20: mol_type = other DNA
gtggccaggacctacagcat

SEQ ID NO: 29202 - DNA, 20 bp, synthetic construct
  source 1..20: mol_type = other DNA
gagctgcaggtccacgcagg

SEQ ID NO: 29203 - DNA, 20 bp, synthetic construct
  source 1..20: mol_type = other DNA
accctgccggcacatctgcg

SEQ ID NO: 29204 - DNA, 20 bp, synthetic construct
  source 1..20: mol_type = other DNA
cccagatggtgcgtgtgctg

SEQ ID NO: 29205 - DNA, 20 bp, synthetic construct
  source 1..20: mol_type = other DNA
ccatctgggcgtaggagtgg

SEQ ID NO: 29206 - DNA, 20 bp, synthetic construct
  source 1..20: mol_type = other DNA
gttctacaccagctcctgga

SEQ ID NO: 29207 - DNA, 20 bp, synthetic construct
  source 1..20: mol_type = other DNA
cagcaggatgtactcggagc

SEQ ID NO: 29208 - DNA, 20 bp, synthetic construct
  source 1..20: mol_type = other DNA
ggcactcactcagctcgtgc

SEQ ID NO: 29209 - DNA, 20 bp, synthetic construct
  source 1..20: mol_type = other DNA
tggctgaagcggatgaaggt

SEQ ID NO: 29210 - DNA, 20 bp, synthetic construct
  source 1..20: mol_type = other DNA
ttaccccgaagcttctccag

SEQ ID NO: 29211 - DNA, 20 bp, synthetic construct
  source 1..20: mol_type = other DNA
tagtgatatgtgtactccca

SEQ ID NO: 29212 - DNA, 20 bp, synthetic construct
  source 1..20: mol_type = other DNA
ggagcattgacagctacctt

SEQ ID NO: 29213 - DNA, 20 bp, synthetic construct
  source 1..20: mol_type = other DNA
ctcacaacctaagaagccac

SEQ ID NO: 29214 - DNA, 20 bp, synthetic construct
  source 1..20: mol_type = other DNA
ctgtaagatgacttctatag

SEQ ID NO: 29215 - DNA, 20 bp, synthetic construct
  source 1..20: mol_type = other DNA
acatatgagtatttccgagt

SEQ ID NO: 29216 - DNA, 20 bp, synthetic construct
  source 1..20: mol_type = other DNA
agaagccacaggcttgaaga

SEQ ID NO: 29217 - DNA, 20 bp, synthetic construct
  source 1..20: mol_type = other DNA
gtgtgcagacagttaagatt

SEQ ID NO: 29218 - DNA, 20 bp, synthetic construct
  source 1..20: mol_type = other DNA
tagctgtcaatgctcctact

SEQ ID NO: 29219 - DNA, 20 bp, synthetic construct
  source 1..20: mol_type = other DNA
tcactataactgcatttcac

SEQ ID NO: 29220 - DNA, 20 bp, synthetic construct
  source 1..20: mol_type = other DNA
caagctgccatcttcaacat

SEQ ID NO: 29221 - DNA, 20 bp, synthetic construct
  source 1..20: mol_type = other DNA
acaagctgccatcttcaaca

SEQ ID NO: 29222 - DNA, 20 bp, synthetic construct
  source 1..20: mol_type = other DNA
gaagatggcagagcacaaga

SEQ ID NO: 29223 - DNA, 20 bp, synthetic construct
  source 1..20: mol_type = other DNA
acacagaaaagcactgtcac

SEQ ID NO: 29224 - DNA, 20 bp, synthetic construct
  source 1..20: mol_type = other DNA
caagcagtgttaagatgttt

SEQ ID NO: 29225 - DNA, 20 bp, synthetic construct
  source 1..20: mol_type = other DNA
cactcaccccatgttgaaga

SEQ ID NO: 29226 - DNA, 20 bp, synthetic construct
  source 1..20: mol_type = other DNA
ggagaaaaaacttctaacgg

SEQ ID NO: 29227 - DNA, 20 bp, synthetic construct
  source 1..20: mol_type = other DNA
ttacctcagcaatgatactg

SEQ ID NO: 29228 - DNA, 20 bp, synthetic construct
  source 1..20: mol_type = other DNA
ctatcaagagcactgtgtag

SEQ ID NO: 29229 - DNA, 20 bp, synthetic construct
  source 1..20: mol_type = other DNA
gatgccattaaatcctactc

SEQ ID NO: 29230 - DNA, 20 bp, synthetic construct
  source 1..20: mol_type = other DNA
gagcaaagaacagaagtaca

SEQ ID NO: 29231 - DNA, 20 bp, synthetic construct
  source 1..20: mol_type = other DNA
gatataaatagtttctgtgg

SEQ ID NO: 29232 - DNA, 20 bp, synthetic construct
  source 1..20: mol_type = other DNA
atgaaggtgctgctagttgg

SEQ ID NO: 29233 - DNA, 20 bp, synthetic construct
  source 1..20: mol_type = other DNA
cctgtgtcagtcctaaagta

SEQ ID NO: 29234 - DNA, 20 bp, synthetic construct
  source 1..20: mol_type = other DNA
gtgctgctggcatagtgagg

SEQ ID NO: 29235 - DNA, 20 bp, synthetic construct
  source 1..20: mol_type = other DNA
tgccagcagcacacttggag

SEQ ID NO: 29236 - DNA, 20 bp, synthetic construct
  source 1..20: mol_type = other DNA
ctaccccagtatcattgctg

SEQ ID NO: 29237 - DNA, 20 bp, synthetic construct
  source 1..20: mol_type = other DNA
agcacttctaaaaagctcca

SEQ ID NO: 29238 - DNA, 20 bp, synthetic construct
  source 1..20: mol_type = other DNA
tgtaacctttaagacaatga

SEQ ID NO: 29239 - DNA, 20 bp, synthetic construct
  source 1..20: mol_type = other DNA
ataacaggagatgtctgcaa

SEQ ID NO: 29240 - DNA, 20 bp, synthetic construct
  source 1..20: mol_type = other DNA
atgtctgagagaaaaggcac

SEQ ID NO: 29241 - DNA, 20 bp, synthetic construct
  source 1..20: mol_type = other DNA
gactcttcggcactcaatgg

SEQ ID NO: 29242 - DNA, 20 bp, synthetic construct
  source 1..20: mol_type = other DNA
gcctgtactacgttatgccc

SEQ ID NO: 29243 - DNA, 20 bp, synthetic construct
  source 1..20: mol_type = other DNA
aacccggcaccactcaatgg

SEQ ID NO: 29244 - DNA, 20 bp, synthetic construct
  source 1..20: mol_type = other DNA
gggtaccacaaagagccgga

SEQ ID NO: 29245 - DNA, 20 bp, synthetic construct
  source 1..20: mol_type = other DNA
acacacagaccactccgtcc

SEQ ID NO: 29246 - DNA, 20 bp, synthetic construct
  source 1..20: mol_type = other DNA
aaatgtatgtgactgtacac

SEQ ID NO: 29247 - DNA, 20 bp, synthetic construct
  source 1..20: mol_type = other DNA
gagggtatcagaaacgtaca

SEQ ID NO: 29248 - DNA, 20 bp, synthetic construct
  source 1..20: mol_type = other DNA
gcgccagcccccaagaatgg

SEQ ID NO: 29249 - DNA, 20 bp, synthetic construct
  source 1..20: mol_type = other DNA
tgaagaaccagagtctagca

SEQ ID NO: 29250 - DNA, 20 bp, synthetic construct
  source 1..20: mol_type = other DNA
atagacaggtcctctgtaca

SEQ ID NO: 29251 - DNA, 20 bp, synthetic construct
  source 1..20: mol_type = other DNA
gcttggacgtaaactcagag

SEQ ID NO: 29252 - DNA, 20 bp, synthetic construct
  source 1..20: mol_type = other DNA
cgagttgaagctgccaaatg

SEQ ID NO: 29253 - DNA, 20 bp, synthetic construct
  source 1..20: mol_type = other DNA
gatgcatagtgaggacgact

SEQ ID NO: 29254 - DNA, 20 bp, synthetic construct
  source 1..20: mol_type = other DNA
tcaggctcaataaggaaatg

SEQ ID NO: 29255 - DNA, 20 bp, synthetic construct
  source 1..20: mol_type = other DNA
attcttccgatacacaaaca

SEQ ID NO: 29256 - DNA, 20 bp, synthetic construct
  source 1..20: mol_type = other DNA
tggagcagccagaatcattg

SEQ ID NO: 29257 - DNA, 20 bp, synthetic construct
  source 1..20: mol_type = other DNA
caccttctcccagtacacgg

SEQ ID NO: 29258 - DNA, 20 bp, synthetic construct
  source 1..20: mol_type = other DNA
ccaggttgccactaaccacg

SEQ ID NO: 29259 - DNA, 20 bp, synthetic construct
  source 1..20: mol_type = other DNA
tcgagaatccacagccaatg

SEQ ID NO: 29260 - DNA, 20 bp, synthetic construct
  source 1..20: mol_type = other DNA
ccaggaggttcacctgcagg

SEQ ID NO: 29261 - DNA, 20 bp, synthetic construct
  source 1..20: mol_type = other DNA
cgtgtactgggagaaggtgc

SEQ ID NO: 29262 - DNA, 20 bp, synthetic construct
  source 1..20: mol_type = other DNA
attggctgtggattctcgac

SEQ ID NO: 29263 - DNA, 20 bp, synthetic construct
  source 1..20: mol_type = other DNA
aattgatgcagcctcgcccc

SEQ ID NO: 29264 - DNA, 20 bp, synthetic construct
  source 1..20: mol_type = other DNA
gtctgcagttaacgttgcca

SEQ ID NO: 29265 - DNA, 20 bp, synthetic construct
  source 1..20: mol_type = other DNA
tacagcccataacagcagat

SEQ ID NO: 29266 - DNA, 20 bp, synthetic construct
  source 1..20: mol_type = other DNA
cgaacttcataagccttagg

SEQ ID NO: 29267 - DNA, 20 bp, synthetic construct
  source 1..20: mol_type = other DNA
ccagtctaggcaatcctcgg

SEQ ID NO: 29268 - DNA, 20 bp, synthetic construct
  source 1..20: mol_type = other DNA
cacactgaggagtaaagagc

SEQ ID NO: 29269 - DNA, 20 bp, synthetic construct
  source 1..20: mol_type = other DNA
aggtgctggtgccaaggaag

SEQ ID NO: 29270 - DNA, 20 bp, synthetic construct
  source 1..20: mol_type = other DNA
tccaacactctccacgatgc

SEQ ID NO: 29271 - DNA, 20 bp, synthetic construct
  source 1..20: mol_type = other DNA
ccagttgatccaaataacgg

SEQ ID NO: 29272 - DNA, 20 bp, synthetic construct
  source 1..20: mol_type = other DNA
tggatgtggccttactatgg

SEQ ID NO: 29273 - DNA, 20 bp, synthetic construct
  source 1..20: mol_type = other DNA
agaaagttgtgtcagaatga

SEQ ID NO: 29274 - DNA, 20 bp, synthetic construct
  source 1..20: mol_type = other DNA
gcagcctgacaacctttcca

SEQ ID NO: 29275 - DNA, 20 bp, synthetic construct
  source 1..20: mol_type = other DNA
tggattagatgaaggagcgt

SEQ ID NO: 29276 - DNA, 20 bp, synthetic construct
  source 1..20: mol_type = other DNA
gaacatcctgctgtctattg

SEQ ID NO: 29277 - DNA, 20 bp, synthetic construct
  source 1..20: mol_type = other DNA
cagaaggacatcctttacag

SEQ ID NO: 29278 - DNA, 20 bp, synthetic construct
  source 1..20: mol_type = other DNA
gccatagaaaatatcaagag

SEQ ID NO: 29279 - DNA, 20 bp, synthetic construct
  source 1..20: mol_type = other DNA
aaattgtaaagtgacctacc

SEQ ID NO: 29280 - DNA, 20 bp, synthetic construct
  source 1..20: mol_type = other DNA
ggaaaactgcaagacagcgt

SEQ ID NO: 29281 - DNA, 20 bp, synthetic construct
  source 1..20: mol_type = other DNA
gaaaatgtgaatcagcagag

SEQ ID NO: 29282 - DNA, 20 bp, synthetic construct
  source 1..20: mol_type = other DNA
gaagctaagaagttaatcct

SEQ ID NO: 29283 - DNA, 20 bp, synthetic construct
  source 1..20: mol_type = other DNA
tttcagacacagttaagctc

SEQ ID NO: 29284 - DNA, 20 bp, synthetic construct
  source 1..20: mol_type = other DNA
acgtaggatgtcttgaacaa

SEQ ID NO: 29285 - DNA, 20 bp, synthetic construct
  source 1..20: mol_type = other DNA
gtggtagccaggtggctgat

SEQ ID NO: 29286 - DNA, 20 bp, synthetic construct
  source 1..20: mol_type = other DNA
agaggcgcgttaagtccccg

SEQ ID NO: 29287 - DNA, 20 bp, synthetic construct
  source 1..20: mol_type = other DNA
tggtggttaagatcgtcccg

SEQ ID NO: 29288 - DNA, 20 bp, synthetic construct
  source 1..20: mol_type = other DNA
ctctatgaccagcacatccg

SEQ ID NO: 29289 - DNA, 20 bp, synthetic construct
  source 1..20: mol_type = other DNA
atttcatcgtggaaaccgag

SEQ ID NO: 29290 - DNA, 20 bp, synthetic construct
  source 1..20: mol_type = other DNA
gcagagtatccagctgcgac

SEQ ID NO: 29291 - DNA, 20 bp, synthetic construct
  source 1..20: mol_type = other DNA
atggaattggaggtcaacta

SEQ ID NO: 29292 - DNA, 20 bp, synthetic construct
  source 1..20: mol_type = other DNA
acagcacaaggcctcgctcc

SEQ ID NO: 29293 - DNA, 20 bp, synthetic construct
  source 1..20: mol_type = other DNA
tgggagacacatcagcggat

SEQ ID NO: 29294 - DNA, 20 bp, synthetic construct
  source 1..20: mol_type = other DNA
agccacttacattcccatcg

SEQ ID NO: 29295 - DNA, 20 bp, synthetic construct
  source 1..20: mol_type = other DNA
acagcgcaggccctcaacca

SEQ ID NO: 29296 - DNA, 20 bp, synthetic construct
  source 1..20: mol_type = other DNA
ggaacggtacaagaatccca

SEQ ID NO: 29297 - DNA, 20 bp, synthetic construct
  source 1..20: mol_type = other DNA
ctccgtgcactcccgacaca

SEQ ID NO: 29298 - DNA, 20 bp, synthetic construct
  source 1..20: mol_type = other DNA
gagagggttaaactgtgggc

SEQ ID NO: 29299 - DNA, 20 bp, synthetic construct
  source 1..20: mol_type = other DNA
gatgctgtcaacaaaaggtg

SEQ ID NO: 29300 - DNA, 20 bp, synthetic construct
  source 1..20: mol_type = other DNA
gtctgccacgctcccgtcgg

SEQ ID NO: 29301 - DNA, 20 bp, synthetic construct
  source 1..20: mol_type = other DNA
catttccaacgtgttaaacg

SEQ ID NO: 29302 - DNA, 20 bp, synthetic construct
  source 1..20: mol_type = other DNA
aagactcaggaactttcaag

SEQ ID NO: 29303 - DNA, 20 bp, synthetic construct
  source 1..20: mol_type = other DNA
aagaatgctgtaaacgactc

SEQ ID NO: 29304 - DNA, 20 bp, synthetic construct
  source 1..20: mol_type = other DNA
tctgtctagtaattcattag

SEQ ID NO: 29305 - DNA, 20 bp, synthetic construct
  source 1..20: mol_type = other DNA
tgaccaccggtttcactcgg

SEQ ID NO: 29306 - DNA, 20 bp, synthetic construct
  source 1..20: mol_type = other DNA
tttgtgctggaagaatacgt

SEQ ID NO: 29307 - DNA, 20 bp, synthetic construct
  source 1..20: mol_type = other DNA
agcggcttgctgaaaaccgg

SEQ ID NO: 29308 - DNA, 20 bp, synthetic construct
  source 1..20: mol_type = other DNA
tagaacagctttgccaaaca

SEQ ID NO: 29309 - DNA, 20 bp, synthetic construct
  source 1..20: mol_type = other DNA
tatttataagatacctgtcc

SEQ ID NO: 29310 - DNA, 20 bp, synthetic construct
  source 1..20: mol_type = other DNA
catagattggaagagtgatg

SEQ ID NO: 29311 - DNA, 20 bp, synthetic construct
  source 1..20: mol_type = other DNA
cacagatgaggatacacaag

SEQ ID NO: 29312 - DNA, 20 bp, synthetic construct
  source 1..20: mol_type = other DNA
cagcactgctgcctacatcc

SEQ ID NO: 29313 - DNA, 20 bp, synthetic construct
  source 1..20: mol_type = other DNA
agtgtcttcataaacctcca

SEQ ID NO: 29314 - DNA, 20 bp, synthetic construct
  source 1..20: mol_type = other DNA
ccctttcaaagacacagcta

SEQ ID NO: 29315 - DNA, 20 bp, synthetic construct
  source 1..20: mol_type = other DNA
gtgaccgttgtcctggcaga

SEQ ID NO: 29316 - DNA, 20 bp, synthetic construct
  source 1..20: mol_type = other DNA
gagcctaggccggcacgagg

SEQ ID NO: 29317 - DNA, 20 bp, synthetic construct
  source 1..20: mol_type = other DNA
catgcttggcactagactca

SEQ ID NO: 29318 - DNA, 20 bp, synthetic construct
  source 1..20: mol_type = other DNA
acagagagtctcactcaaag

SEQ ID NO: 29319 - DNA, 20 bp, synthetic construct
  source 1..20: mol_type = other DNA
ctgctcatggacctaagcac

SEQ ID NO: 29320 - DNA, 20 bp, synthetic construct
  source 1..20: mol_type = other DNA
acagagtggccaccaaggat

SEQ ID NO: 29321 - DNA, 20 bp, synthetic construct
  source 1..20: mol_type = other DNA
catacctaaattaaggtagg

SEQ ID NO: 29322 - DNA, 20 bp, synthetic construct
  source 1..20: mol_type = other DNA
gatgaactgaatttctacca

SEQ ID NO: 29323 - DNA, 20 bp, synthetic construct
  source 1..20: mol_type = other DNA
ttacgtaggacctctcagca

SEQ ID NO: 29324 - DNA, 20 bp, synthetic construct
  source 1..20: mol_type = other DNA
ctgggactcctgatacagga

SEQ ID NO: 29325 - DNA, 20 bp, synthetic construct
  source 1..20: mol_type = other DNA
ccggtctgctagttcctcac

SEQ ID NO: 29326 - DNA, 20 bp, synthetic construct
  source 1..20: mol_type = other DNA
ggcagatggctactcactgg

SEQ ID NO: 29327 - DNA, 20 bp, synthetic construct
  source 1..20: mol_type = other DNA
aatcctccaaatgatctgag

SEQ ID NO: 29328 - DNA, 20 bp, synthetic construct
  source 1..20: mol_type = other DNA
ctgccatctacctgaaacag

SEQ ID NO: 29329 - DNA, 20 bp, synthetic construct
  source 1..20: mol_type = other DNA
ggcctcctcgaagtacaccc

SEQ ID NO: 29330 - DNA, 20 bp, synthetic construct
  source 1..20: mol_type = other DNA
aggaccaacactcactgagc

SEQ ID NO: 29331 - DNA, 20 bp, synthetic construct
  source 1..20: mol_type = other DNA
tgcgtgcctgaacctcacaa

SEQ ID NO: 29332 - DNA, 20 bp, synthetic construct
  source 1..20: mol_type = other DNA
gaaaaacgtaaaactaccag

SEQ ID NO: 29333 - DNA, 20 bp, synthetic construct
  source 1..20: mol_type = other DNA
gttgtatgtcgagcagttca

SEQ ID NO: 29334 - DNA, 20 bp, synthetic construct
  source 1..20: mol_type = other DNA
agtaagtcggcctcgttcca

SEQ ID NO: 29335 - DNA, 20 bp, synthetic construct
  source 1..20: mol_type = other DNA
gtgaatagcacagatccaca

SEQ ID NO: 29336 - DNA, 20 bp, synthetic construct
  source 1..20: mol_type = other DNA
aattggagcccagatatcca

SEQ ID NO: 29337 - DNA, 20 bp, synthetic construct
  source 1..20: mol_type = other DNA
agataactccagtcacaagt

SEQ ID NO: 29338 - DNA, 20 bp, synthetic construct
  source 1..20: mol_type = other DNA
agaagtatccaacaggaact

SEQ ID NO: 29339 - DNA, 20 bp, synthetic construct
  source 1..20: mol_type = other DNA
gcaggcttaacacagagctg

SEQ ID NO: 29340 - DNA, 20 bp, synthetic construct
  source 1..20: mol_type = other DNA
attgtctacttgaactgacc

SEQ ID NO: 29341 - DNA, 20 bp, synthetic construct
  source 1..20: mol_type = other DNA
gatgatgatgacaccatagg

SEQ ID NO: 29342 - DNA, 20 bp, synthetic construct
  source 1..20: mol_type = other DNA
gcttcatgttaatataaaag

SEQ ID NO: 29343 - DNA, 20 bp, synthetic construct
  source 1..20: mol_type = other DNA
ttatctgtgaatctctgggc

SEQ ID NO: 29344 - DNA, 20 bp, synthetic construct
  source 1..20: mol_type = other DNA
cactgatgcttatacatggg

SEQ ID NO: 29345 - DNA, 20 bp, synthetic construct
  source 1..20: mol_type = other DNA
agcatggagttgataaacat

SEQ ID NO: 29346 - DNA, 20 bp, synthetic construct
  source 1..20: mol_type = other DNA
cggatcaatcgcgtaggtgg

SEQ ID NO: 29347 - DNA, 20 bp, synthetic construct
  source 1..20: mol_type = other DNA
ccacctacgcgattgatccg

SEQ ID NO: 29348 - DNA, 20 bp, synthetic construct
  source 1..20: mol_type = other DNA
agaaattcacgaatgcactg

SEQ ID NO: 29349 - DNA, 20 bp, synthetic construct
  source 1..20: mol_type = other DNA
gtagaatccctacctcccgg

SEQ ID NO: 29350 - DNA, 20 bp, synthetic construct
  source 1..20: mol_type = other DNA
cggaactctacgaaaaaacg

SEQ ID NO: 29351 - DNA, 20 bp, synthetic construct
  source 1..20: mol_type = other DNA
ccaattagcacctagcagga

SEQ ID NO: 29352 - DNA, 20 bp, synthetic construct
  source 1..20: mol_type = other DNA
aaagaaagaaaaactaggcg

SEQ ID NO: 29353 - DNA, 20 bp, synthetic construct
  source 1..20: mol_type = other DNA
gagcaagatggccgaacttg

SEQ ID NO: 29354 - DNA, 20 bp, synthetic construct
  source 1..20: mol_type = other DNA
atcgtgactgaattggtgct

SEQ ID NO: 29355 - DNA, 20 bp, synthetic construct
  source 1..20: mol_type = other DNA
ccttcaaggacacagagcaa

SEQ ID NO: 29356 - DNA, 20 bp, synthetic construct
  source 1..20: mol_type = other DNA
ggtgctgggtcacacagctc

SEQ ID NO: 29357 - DNA, 20 bp, synthetic construct
  source 1..20: mol_type = other DNA
tagtgcaggcgacagcgcgt

SEQ ID NO: 29358 - DNA, 20 bp, synthetic construct
  source 1..20: mol_type = other DNA
ctcagagatctagaactggt

SEQ ID NO: 29359 - DNA, 20 bp, synthetic construct
  source 1..20: mol_type = other DNA
accctcctagtttaccgtgc

SEQ ID NO: 29360 - DNA, 20 bp, synthetic construct
  source 1..20: mol_type = other DNA
aaggactgcgctctttcgca

SEQ ID NO: 29361 - DNA, 20 bp, synthetic construct
  source 1..20: mol_type = other DNA
gagcggctgaaggtggacaa

SEQ ID NO: 29362 - DNA, 20 bp, synthetic construct
  source 1..20: mol_type = other DNA
ggaccagaggcagtacattg

SEQ ID NO: 29363 - DNA, 20 bp, synthetic construct
  source 1..20: mol_type = other DNA
tccatgaggacggccgtgtg

SEQ ID NO: 29364 - DNA, 20 bp, synthetic construct
  source 1..20: mol_type = other DNA
aggagaacatccgacccgtg

SEQ ID NO: 29365 - DNA, 20 bp, synthetic construct
  source 1..20: mol_type = other DNA
ggtacccactggccgactgt

SEQ ID NO: 29366 - DNA, 20 bp, synthetic construct
  source 1..20: mol_type = other DNA
gtaggcactcttgtacaggc

SEQ ID NO: 29367 - DNA, 20 bp, synthetic construct
  source 1..20: mol_type = other DNA
tgaaccacctgagtacccta

SEQ ID NO: 29368 - DNA, 20 bp, synthetic construct
  source 1..20: mol_type = other DNA
gaagctgcactactactgtg

SEQ ID NO: 29369 - DNA, 20 bp, synthetic construct
  source 1..20: mol_type = other DNA
agagacttggaatataagac

SEQ ID NO: 29370 - DNA, 20 bp, synthetic construct
  source 1..20: mol_type = other DNA
gtcatcttcttaggtatcca

SEQ ID NO: 29371 - DNA, 20 bp, synthetic construct
  source 1..20: mol_type = other DNA
cagacgtccgccccatctca

SEQ ID NO: 29372 - DNA, 20 bp, synthetic construct
  source 1..20: mol_type = other DNA
ggctcacagtcaaactgctg

SEQ ID NO: 29373 - DNA, 20 bp, synthetic construct
  source 1..20: mol_type = other DNA
gtgaagagggcttaccctgt

SEQ ID NO: 29374 - DNA, 20 bp, synthetic construct
  source 1..20: mol_type = other DNA
gcctggtggagaacattgag

SEQ ID NO: 29375 - DNA, 20 bp, synthetic construct
  source 1..20: mol_type = other DNA
agggagaagttcaagagccg

SEQ ID NO: 29376 - DNA, 20 bp, synthetic construct
  source 1..20: mol_type = other DNA
aagacaccaagactcacgaa

SEQ ID NO: 29377 - DNA, 20 bp, synthetic construct
  source 1..20: mol_type = other DNA
ataaaccgcctcgtttccgg

SEQ ID NO: 29378 - DNA, 20 bp, synthetic construct
  source 1..20: mol_type = other DNA
ggaacggggcactccaccgg

SEQ ID NO: 29379 - DNA, 20 bp, synthetic construct
  source 1..20: mol_type = other DNA
tcccaagcccctcgaacagg

SEQ ID NO: 29380 - DNA, 20 bp, synthetic construct
  source 1..20: mol_type = other DNA
ggagggtagaagtctagagg

SEQ ID NO: 29381 - DNA, 20 bp, synthetic construct
  source 1..20: mol_type = other DNA
aggaaatccccaagcggcgc

SEQ ID NO: 29382 - DNA, 20 bp, synthetic construct
  source 1..20: mol_type = other DNA
cggggatcaaagttcattgg

SEQ ID NO: 29383 - DNA, 20 bp, synthetic construct
  source 1..20: mol_type = other DNA
ggagtaggagtagattgggc

SEQ ID NO: 29384 - DNA, 20 bp, synthetic construct
  source 1..20: mol_type = other DNA
agaatagagggacgacccac

SEQ ID NO: 29385 - DNA, 20 bp, synthetic construct
  source 1..20: mol_type = other DNA
agagtcgcacagagacccgc

SEQ ID NO: 29386 - DNA, 20 bp, synthetic construct
  source 1..20: mol_type = other DNA
agaggggtgccatctcgccg

SEQ ID NO: 29387 - DNA, 20 bp, synthetic construct
  source 1..20: mol_type = other DNA
agcaatggaggtagcaatgt

SEQ ID NO: 29388 - DNA, 20 bp, synthetic construct
  source 1..20: mol_type = other DNA
gccaattgacaggatcgtgg

SEQ ID NO: 29389 - DNA, 20 bp, synthetic construct
  source 1..20: mol_type = other DNA
agaggaaagcgagagattgg

SEQ ID NO: 29390 - DNA, 20 bp, synthetic construct
  source 1..20: mol_type = other DNA
atagtccctccgaagccttg

SEQ ID NO: 29391 - DNA, 20 bp, synthetic construct
  source 1..20: mol_type = other DNA
aggtgatattgatcacaggg

SEQ ID NO: 29392 - DNA, 20 bp, synthetic construct
  source 1..20: mol_type = other DNA
ccagctccacccgagacttg

SEQ ID NO: 29393 - DNA, 20 bp, synthetic construct
  source 1..20: mol_type = other DNA
ttcatgggtgaactggcccg

SEQ ID NO: 29394 - DNA, 20 bp, synthetic construct
  source 1..20: mol_type = other DNA
gccgtaagactggtagaagg

SEQ ID NO: 29395 - DNA, 20 bp, synthetic construct
  source 1..20: mol_type = other DNA
gggagcacggtcacccgtgg

SEQ ID NO: 29396 - DNA, 20 bp, synthetic construct
  source 1..20: mol_type = other DNA
caacggccaaactgtcactg

SEQ ID NO: 29397 - DNA, 20 bp, synthetic construct
  source 1..20: mol_type = other DNA
tttgcccgctttgacccgca

SEQ ID NO: 29398 - DNA, 20 bp, synthetic construct
  source 1..20: mol_type = other DNA
tgaggaacagctgttctctg

SEQ ID NO: 29399 - DNA, 20 bp, synthetic construct
  source 1..20: mol_type = other DNA
cccctgtgatcaatatcacc

SEQ ID NO: 29400 - DNA, 20 bp, synthetic construct
  source 1..20: mol_type = other DNA
aaccgcagcagagccatcaa

SEQ ID NO: 29401 - DNA, 20 bp, synthetic construct
  source 1..20: mol_type = other DNA
ctggtagaaggcgggtccgt

SEQ ID NO: 29402 - DNA, 20 bp, synthetic construct
  source 1..20: mol_type = other DNA
tgtggacctgaagaaaagcg

SEQ ID NO: 29403 - DNA, 20 bp, synthetic construct
  source 1..20: mol_type = other DNA
ccaaacacagctgaccacat

SEQ ID NO: 29404 - DNA, 20 bp, synthetic construct
  source 1..20: mol_type = other DNA
aaactcaggcagacgccaca

SEQ ID NO: 29405 - DNA, 20 bp, synthetic construct
  source 1..20: mol_type = other DNA
agcccatctggacatcctgg

SEQ ID NO: 29406 - DNA, 20 bp, synthetic construct
  source 1..20: mol_type = other DNA
agtgcataaactccaaatgc

SEQ ID NO: 29407 - DNA, 20 bp, synthetic construct
  source 1..20: mol_type = other DNA
ccggctctccaccccgattg

SEQ ID NO: 29408 - DNA, 20 bp, synthetic construct
  source 1..20: mol_type = other DNA
ggatccgcgaaaaccacgag

SEQ ID NO: 29409 - DNA, 20 bp, synthetic construct
  source 1..20: mol_type = other DNA
ccagagggagtatgaaatgc

SEQ ID NO: 29410 - DNA, 20 bp, synthetic construct
  source 1..20: mol_type = other DNA
agatggggtttcctgataag

SEQ ID NO: 29411 - DNA, 20 bp, synthetic construct
  source 1..20: mol_type = other DNA
gcagcacgaacttctccgtc

SEQ ID NO: 29412 - DNA, 20 bp, synthetic construct
  source 1..20: mol_type = other DNA
cgtgacaaggcgccgttcag

SEQ ID NO: 29413 - DNA, 20 bp, synthetic construct
  source 1..20: mol_type = other DNA
ctcaaacctatatcaaaagg

SEQ ID NO: 29414 - DNA, 20 bp, synthetic construct
  source 1..20: mol_type = other DNA
gaatcccagtagtggacagt

SEQ ID NO: 29415 - DNA, 20 bp, synthetic construct
  source 1..20: mol_type = other DNA
taattataaaggttatgcct

SEQ ID NO: 29416 - DNA, 20 bp, synthetic construct
  source 1..20: mol_type = other DNA
agcaactatagtagatgccc

SEQ ID NO: 29417 - DNA, 20 bp, synthetic construct
  source 1..20: mol_type = other DNA
ctcttctccagacagatagt

SEQ ID NO: 29418 - DNA, 20 bp, synthetic construct
  source 1..20: mol_type = other DNA
tgtcttgtcagacattaacc

SEQ ID NO: 29419 - DNA, 20 bp, synthetic construct
  source 1..20: mol_type = other DNA
gggcccgggcttgtggtcgg

SEQ ID NO: 29420 - DNA, 20 bp, synthetic construct
  source 1..20: mol_type = other DNA
gaaaagggcaaagatcaaag

SEQ ID NO: 29421 - DNA, 20 bp, synthetic construct
  source 1..20: mol_type = other DNA
actaacgttaggatgcactg

SEQ ID NO: 29422 - DNA, 20 bp, synthetic construct
  source 1..20: mol_type = other DNA
ggcagccaaaacgcctcccg

SEQ ID NO: 29423 - DNA, 20 bp, synthetic construct
  source 1..20: mol_type = other DNA
gtgcatcctaacgttagtca

SEQ ID NO: 29424 - DNA, 20 bp, synthetic construct
  source 1..20: mol_type = other DNA
tggcagccttgactaacgtt

SEQ ID NO: 29425 - DNA, 20 bp, synthetic construct
  source 1..20: mol_type = other DNA
ggaagccaacaaccatacta

SEQ ID NO: 29426 - DNA, 20 bp, synthetic construct
  source 1..20: mol_type = other DNA
ggagtgtgtcagtattggta

SEQ ID NO: 29427 - DNA, 20 bp, synthetic construct
  source 1..20: mol_type = other DNA
acactccatagtatggttgt

SEQ ID NO: 29428 - DNA, 20 bp, synthetic construct
  source 1..20: mol_type = other DNA
aggtcagtgaatggaatcct

SEQ ID NO: 29429 - DNA, 20 bp, synthetic construct
  source 1..20: mol_type = other DNA
tgacaattgcccagaagggt

SEQ ID NO: 29430 - DNA, 20 bp, synthetic construct
  source 1..20: mol_type = other DNA
aacgttagtcaaggctgcca

SEQ ID NO: 29431 - DNA, 20 bp, synthetic construct
  source 1..20: mol_type = other DNA
caaaagagggactgaaacac

SEQ ID NO: 29432 - DNA, 20 bp, synthetic construct
  source 1..20: mol_type = other DNA
acccttctgggcaattgtca

SEQ ID NO: 29433 - DNA, 20 bp, synthetic construct
  source 1..20: mol_type = other DNA
gcaacatgctcagattacaa

SEQ ID NO: 29434 - DNA, 20 bp, synthetic construct
  source 1..20: mol_type = other DNA
tgtctctcttcatgtccaag

SEQ ID NO: 29435 - DNA, 20 bp, synthetic construct
  source 1..20: mol_type = other DNA
acgaagaagggaaaaacatg

SEQ ID NO: 29436 - DNA, 20 bp, synthetic construct
  source 1..20: mol_type = other DNA
tggagccctaatgtatagca

SEQ ID NO: 29437 - DNA, 20 bp, synthetic construct
  source 1..20: mol_type = other DNA
taagtgcagtaaatatggtg

SEQ ID NO: 29438 - DNA, 20 bp, synthetic construct
  source 1..20: mol_type = other DNA
gtgaacgcggcggagctgtg

SEQ ID NO: 29439 - DNA, 20 bp, synthetic construct
  source 1..20: mol_type = other DNA
tagtataattagcttaactg

SEQ ID NO: 29440 - DNA, 20 bp, synthetic construct
  source 1..20: mol_type = other DNA
ctgtcctactgagacacggc

SEQ ID NO: 29441 - DNA, 20 bp, synthetic construct
  source 1..20: mol_type = other DNA
aggaagcaaactttatcaag

SEQ ID NO: 29442 - DNA, 20 bp, synthetic construct
  source 1..20: mol_type = other DNA
acattcacatacctgcacac

SEQ ID NO: 29443 - DNA, 20 bp, synthetic construct
  source 1..20: mol_type = other DNA
aagtaccaccccagacaaca

SEQ ID NO: 29444 - DNA, 20 bp, synthetic construct
  source 1..20: mol_type = other DNA
ggcatgagcaaattaactgt

SEQ ID NO: 29445 - DNA, 20 bp, synthetic construct
  source 1..20: mol_type = other DNA
gaaaacacccacgtaagagt

SEQ ID NO: 29446 - DNA, 20 bp, synthetic construct
  source 1..20: mol_type = other DNA
atataaacagtttagaaggg

SEQ ID NO: 29447 - DNA, 20 bp, synthetic construct
  source 1..20: mol_type = other DNA
ataattactatcatgaaggg

SEQ ID NO: 29448 - DNA, 20 bp, synthetic construct
  source 1..20: mol_type = other DNA
ttcatcccaagtagtctaca

SEQ ID NO: 29449 - DNA, 20 bp, synthetic construct
  source 1..20: mol_type = other DNA
aaactgggcacaggtaatgg

SEQ ID NO: 29450 - DNA, 20 bp, synthetic construct
  source 1..20: mol_type = other DNA
tactaatagaaccaccaacc

SEQ ID NO: 29451 - DNA, 20 bp, synthetic construct
  source 1..20: mol_type = other DNA
ttagcaaccctcacgaaccc

SEQ ID NO: 29452 - DNA, 20 bp, synthetic construct
  source 1..20: mol_type = other DNA
tagaggtactcactaacgga

SEQ ID NO: 29453 - DNA, 20 bp, synthetic construct
  source 1..20: mol_type = other DNA
gctgatggaactcggtccgc

SEQ ID NO: 29454 - DNA, 20 bp, synthetic construct
  source 1..20: mol_type = other DNA
agcagcgacatcgatagggt

SEQ ID NO: 29455 - DNA, 20 bp, synthetic construct
  source 1..20: mol_type = other DNA
gcagatccggagttaggtgt

SEQ ID NO: 29456 - DNA, 20 bp, synthetic construct
  source 1..20: mol_type = other DNA
aggaagttgctgtgatgagg

SEQ ID NO: 29457 - DNA, 20 bp, synthetic construct
  source 1..20: mol_type = other DNA
gatctgagctgtagtggtgt

SEQ ID NO: 29458 - DNA, 20 bp, synthetic construct
  source 1..20: mol_type = other DNA
tttactccaaaaggacccga

SEQ ID NO: 29459 - DNA, 20 bp, synthetic construct
  source 1..20: mol_type = other DNA
cccgcggtcagcactctgag

SEQ ID NO: 29460 - DNA, 20 bp, synthetic construct
  source 1..20: mol_type = other DNA
ccaccaccaacagaaagtca

SEQ ID NO: 29461 - DNA, 20 bp, synthetic construct
  source 1..20: mol_type = other DNA
ggggtgatgtgagtgtgcgg

SEQ ID NO: 29462 - DNA, 20 bp, synthetic construct
  source 1..20: mol_type = other DNA
tgctggcgtcggcatgatgg

SEQ ID NO: 29463 - DNA, 20 bp, synthetic construct
  source 1..20: mol_type = other DNA
ggagggcggctcaggaactc

SEQ ID NO: 29464 - DNA, 20 bp, synthetic construct
  source 1..20: mol_type = other DNA
gggatgcccgacactgcagg

SEQ ID NO: 29465 - DNA, 20 bp, synthetic construct
  source 1..20: mol_type = other DNA
tgacttggtgcagcgcacag

SEQ ID NO: 29466 - DNA, 20 bp, synthetic construct
  source 1..20: mol_type = other DNA
gcctgctgcaaaggaacggg

SEQ ID NO: 29467 - DNA, 20 bp, synthetic construct
  source 1..20: mol_type = other DNA
gtggtcatgagtaggcccaa

SEQ ID NO: 29468 - DNA, 20 bp, synthetic construct
  source 1..20: mol_type = other DNA
catcatactgcacccaacga

SEQ ID NO: 29469 - DNA, 20 bp, synthetic construct
  source 1..20: mol_type = other DNA
ccagactgagtagaaagatg

SEQ ID NO: 29470 - DNA, 20 bp, synthetic construct
  source 1..20: mol_type = other DNA
tccgtatacccagttgcagg

SEQ ID NO: 29471 - DNA, 20 bp, synthetic construct
  source 1..20: mol_type = other DNA
agactcaagctaacctacaa

SEQ ID NO: 29472 - DNA, 20 bp, synthetic construct
  source 1..20: mol_type = other DNA
atgggagaattccttatcca

SEQ ID NO: 29473 - DNA, 20 bp, synthetic construct
  source 1..20: mol_type = other DNA
cagactgacacagatagtgg

SEQ ID NO: 29474 - DNA, 20 bp, synthetic construct
  source 1..20: mol_type = other DNA
ctcgggtggacttaatcagt

SEQ ID NO: 29475 - DNA, 20 bp, synthetic construct
  source 1..20: mol_type = other DNA
atggagtctttactacaacc

SEQ ID NO: 29476 - DNA, 20 bp, synthetic construct
  source 1..20: mol_type = other DNA
aaactcttccaactcgagaa

SEQ ID NO: 29477 - DNA, 20 bp, synthetic construct
  source 1..20: mol_type = other DNA
tcagatgagtacctctactc

SEQ ID NO: 29478 - DNA, 20 bp, synthetic construct
  source 1..20: mol_type = other DNA
gagcatttcatccaatatgt

SEQ ID NO: 29479 - DNA, 20 bp, synthetic construct
  source 1..20: mol_type = other DNA
tcagagcactactggctcaa

SEQ ID NO: 29480 - DNA, 20 bp, synthetic construct
  source 1..20: mol_type = other DNA
aaaactcacatatatgtgtg

SEQ ID NO: 29481 - DNA, 20 bp, synthetic construct
  source 1..20: mol_type = other DNA
cagaccgcaacgcctacgtg

SEQ ID NO: 29482 - DNA, 20 bp, synthetic construct
  source 1..20: mol_type = other DNA
agtaaccgtattgtgacctg

SEQ ID NO: 29483 - DNA, 20 bp, synthetic construct
  source 1..20: mol_type = other DNA
gagcggtgccaaatggacca

SEQ ID NO: 29484 - DNA, 20 bp, synthetic construct
  source 1..20: mol_type = other DNA
gctcctgtgacttcaagtgt

SEQ ID NO: 29485 - DNA, 20 bp, synthetic construct
  source 1..20: mol_type = other DNA
catctgccccaacaaccatg

SEQ ID NO: 29486 - DNA, 20 bp, synthetic construct
  source 1..20: mol_type = other DNA
atccgcaggatgaccagcgt

SEQ ID NO: 29487 - DNA, 20 bp, synthetic construct
  source 1..20: mol_type = other DNA
tcgagcaggagaatgactgg

SEQ ID NO: 29488 - DNA, 20 bp, synthetic construct
  source 1..20: mol_type = other DNA
ggacgctgaagggccgcaca

SEQ ID NO: 29489 - DNA, 20 bp, synthetic construct
  source 1..20: mol_type = other DNA
tcacaatacggttactctcg

SEQ ID NO: 29490 - DNA, 20 bp, synthetic construct
  source 1..20: mol_type = other DNA
gtgcatatctatgaaaagag

SEQ ID NO: 29491 - DNA, 20 bp, synthetic construct
  source 1..20: mol_type = other DNA
ccagcaagcactcacgggtg

SEQ ID NO: 29492 - DNA, 20 bp, synthetic construct
  source 1..20: mol_type = other DNA
ccaggcagacggtgctgtcg

SEQ ID NO: 29493 - DNA, 20 bp, synthetic construct
  source 1..20: mol_type = other DNA
ttcgaatccagcagtagctg

SEQ ID NO: 29494 - DNA, 20 bp, synthetic construct
  source 1..20: mol_type = other DNA
atcttggagccccacggggt

SEQ ID NO: 29495 - DNA, 20 bp, synthetic construct
  source 1..20: mol_type = other DNA
ggtcatcctgcggatcaacc

SEQ ID NO: 29496 - DNA, 20 bp, synthetic construct
  source 1..20: mol_type = other DNA
gccccgcgacttgatagggg

SEQ ID NO: 29497 - DNA, 20 bp, synthetic construct
  source 1..20: mol_type = other DNA
cccgcccctatcaagtcgcg

SEQ ID NO: 29498 - DNA, 20 bp, synthetic construct
  source 1..20: mol_type = other DNA
tcccaaccgcggctccagac

SEQ ID NO: 29499 - DNA, 20 bp, synthetic construct
  source 1..20: mol_type = other DNA
accttgataaaagggaccac

SEQ ID NO: 29500 - DNA, 20 bp, synthetic construct
  source 1..20: mol_type = other DNA
gcagtgatacatcctagtga

SEQ ID NO: 29501 - DNA, 20 bp, synthetic construct
  source 1..20: mol_type = other DNA
tatacgccctatggcactgt

SEQ ID NO: 29502 - DNA, 20 bp, synthetic construct
  source 1..20: mol_type = other DNA
tccgagcctacagtgccata

SEQ ID NO: 29503 - DNA, 20 bp, synthetic construct
  source 1..20: mol_type = other DNA
tgtttgtcctgataatgtgg

SEQ ID NO: 29504 - DNA, 20 bp, synthetic construct
  source 1..20: mol_type = other DNA
gtctgtgacctcgacagtgc

SEQ ID NO: 29505 - DNA, 20 bp, synthetic construct
  source 1..20: mol_type = other DNA
atggcactgtaggctcggaa

SEQ ID NO: 29506 - DNA, 20 bp, synthetic construct
  source 1..20: mol_type = other DNA
gcagcaagggaggcgtggtg

SEQ ID NO: 29507 - DNA, 20 bp, synthetic construct
  source 1..20: mol_type = other DNA
cggcctcaccagctccacag

SEQ ID NO: 29508 - DNA, 20 bp, synthetic construct
  source 1..20: mol_type = other DNA
gacgtcgtctgcagcaaggg

SEQ ID NO: 29509 - DNA, 20 bp, synthetic construct
  source 1..20: mol_type = other DNA
ctccatttgaagatacaagg

SEQ ID NO: 29510 - DNA, 20 bp, synthetic construct
  source 1..20: mol_type = other DNA
ggagcttgtagttagtttag

SEQ ID NO: 29511 - DNA, 20 bp, synthetic construct
  source 1..20: mol_type = other DNA
ccagcacgatggctgactgg

SEQ ID NO: 29512 - DNA, 20 bp, synthetic construct
  source 1..20: mol_type = other DNA
tggacgcgagctgcgctgca

SEQ ID NO: 29513 - DNA, 20 bp, synthetic construct
  source 1..20: mol_type = other DNA
cgggcgctgtgcatccacac

SEQ ID NO: 29514 - DNA, 20 bp, synthetic construct
  source 1..20: mol_type = other DNA
acatgctcgcgctcggctag

SEQ ID NO: 29515 - DNA, 20 bp, synthetic construct
  source 1..20: mol_type = other DNA
ccagtaatgttgctgtgcga

SEQ ID NO: 29516 - DNA, 20 bp, synthetic construct
  source 1..20: mol_type = other DNA
cctatgtgcgaagccggaag

SEQ ID NO: 29517 - DNA, 20 bp, synthetic construct
  source 1..20: mol_type = other DNA
agaagacacacacataatga

SEQ ID NO: 29518 - DNA, 20 bp, synthetic construct
  source 1..20: mol_type = other DNA
accagtcagccatcgtgctg

SEQ ID NO: 29519 - DNA, 20 bp, synthetic construct
  source 1..20: mol_type = other DNA
ccgagcgcgagcatgtgtcc

SEQ ID NO: 29520 - DNA, 20 bp, synthetic construct
  source 1..20: mol_type = other DNA
gatgctttgtcagacaaaca

SEQ ID NO: 29521 - DNA, 20 bp, synthetic construct
  source 1..20: mol_type = other DNA
agtgatccttggggaaacca

SEQ ID NO: 29522 - DNA, 20 bp, synthetic construct
  source 1..20: mol_type = other DNA
gaagttcgtcttctccacgg

SEQ ID NO: 29523 - DNA, 20 bp, synthetic construct
  source 1..20: mol_type = other DNA
tggagcactcggagaggcgc

SEQ ID NO: 29524 - DNA, 20 bp, synthetic construct
  source 1..20: mol_type = other DNA
ctggtggcagtgggcgacgg

SEQ ID NO: 29525 - DNA, 20 bp, synthetic construct
  source 1..20: mol_type = other DNA
gggggctgaggtagtccggg

SEQ ID NO: 29526 - DNA, 20 bp, synthetic construct
  source 1..20: mol_type = other DNA
tccagcgacactgtagcgtg

SEQ ID NO: 29527 - DNA, 20 bp, synthetic construct
  source 1..20: mol_type = other DNA
ttgccaagataactggacgg

SEQ ID NO: 29528 - DNA, 20 bp, synthetic construct
  source 1..20: mol_type = other DNA
tctacctcgactttgcgagg

SEQ ID NO: 29529 - DNA, 20 bp, synthetic construct
  source 1..20: mol_type = other DNA
ggtggttgagcgtactcgca

SEQ ID NO: 29530 - DNA, 20 bp, synthetic construct
  source 1..20: mol_type = other DNA
taagccagtgagtgtcatag

SEQ ID NO: 29531 - DNA, 20 bp, synthetic construct
  source 1..20: mol_type = other DNA
gtgtggttaatcacaagccg

SEQ ID NO: 29532 - DNA, 20 bp, synthetic construct
  source 1..20: mol_type = other DNA
ttggcaatggtatctgaacg

SEQ ID NO: 29533 - DNA, 20 bp, synthetic construct
  source 1..20: mol_type = other DNA
aaggggaccatctccaattg

SEQ ID NO: 29534 - DNA, 20 bp, synthetic construct
  source 1..20: mol_type = other DNA
tgtgtggcctcaaataatgt

SEQ ID NO: 29535 - DNA, 20 bp, synthetic construct
  source 1..20: mol_type = other DNA
acactgggactatatggccc

SEQ ID NO: 29536 - DNA, 20 bp, synthetic construct
  source 1..20: mol_type = other DNA
gtgatattaacgcttccgcc

SEQ ID NO: 29537 - DNA, 20 bp, synthetic construct
  source 1..20: mol_type = other DNA
ccaggtggtacaccaataag

SEQ ID NO: 29538 - DNA, 20 bp, synthetic construct
  source 1..20: mol_type = other DNA
gacatataaattggcaggag

SEQ ID NO: 29539 - DNA, 20 bp, synthetic construct
  source 1..20: mol_type = other DNA
tacaagcatcacactgacgt

SEQ ID NO: 29540 - DNA, 20 bp, synthetic construct
  source 1..20: mol_type = other DNA
acaaacaagcaactccaaag

SEQ ID NO: 29541 - DNA, 20 bp, synthetic construct
  source 1..20: mol_type = other DNA
cttgggctacagtaccattg

SEQ ID NO: 29542 - DNA, 20 bp, synthetic construct
  source 1..20: mol_type = other DNA
gtacatactctccttagccc

SEQ ID NO: 29543 - DNA, 20 bp, synthetic construct
  source 1..20: mol_type = other DNA
accaaggtggatctcaagag

SEQ ID NO: 29544 - DNA, 20 bp, synthetic construct
  source 1..20: mol_type = other DNA
acgtgagtgcagctttctgt

SEQ ID NO: 29545 - DNA, 20 bp, synthetic construct
  source 1..20: mol_type = other DNA
acttacatctccctaatact

SEQ ID NO: 29546 - DNA, 20 bp, synthetic construct
  source 1..20: mol_type = other DNA
tctgctactgggagctaatg

SEQ ID NO: 29547 - DNA, 20 bp, synthetic construct
  source 1..20: mol_type = other DNA
aagcaccttcacgtaactgc

SEQ ID NO: 29548 - DNA, 20 bp, synthetic construct
  source 1..20: mol_type = other DNA
caaagagagtaaatggtcca

SEQ ID NO: 29549 - DNA, 20 bp, synthetic construct
  source 1..20: mol_type = other DNA
agctgcactcacgtttgtgc

SEQ ID NO: 29550 - DNA, 20 bp, synthetic construct
  source 1..20: mol_type = other DNA
tccctggagcaactgagtga

SEQ ID NO: 29551 - DNA, 20 bp, synthetic construct
  source 1..20: mol_type = other DNA
ggtttgtaaagcgtccttca

SEQ ID NO: 29552 - DNA, 20 bp, synthetic construct
  source 1..20: mol_type = other DNA
tatcacatgatgcaaagtga

SEQ ID NO: 29553 - DNA, 20 bp, synthetic construct
  source 1..20: mol_type = other DNA
gcccgaatagagttgctgaa

SEQ ID NO: 29554 - DNA, 20 bp, synthetic construct
  source 1..20: mol_type = other DNA
gagcaacaggacatccagaa

SEQ ID NO: 29555 - DNA, 20 bp, synthetic construct
  source 1..20: mol_type = other DNA
gtaagtatgaaaagctaaga

SEQ ID NO: 29556 - DNA, 20 bp, synthetic construct
  source 1..20: mol_type = other DNA
gaacgactacggctgaacca

SEQ ID NO: 29557 - DNA, 20 bp, synthetic construct
  source 1..20: mol_type = other DNA
tcaggccatccgttgcacac

SEQ ID NO: 29558 - DNA, 20 bp, synthetic construct
  source 1..20: mol_type = other DNA
agccagggaagattaacctg

SEQ ID NO: 29559 - DNA, 20 bp, synthetic construct
  source 1..20: mol_type = other DNA
gctgatgtcaaacacgacgt

SEQ ID NO: 29560 - DNA, 20 bp, synthetic construct
  source 1..20: mol_type = other DNA
gtgctgctctatggtaccac

SEQ ID NO: 29561 - DNA, 20 bp, synthetic construct
  source 1..20: mol_type = other DNA
gtggcgattacgacttcgga

SEQ ID NO: 29562 - DNA, 20 bp, synthetic construct
  source 1..20: mol_type = other DNA
ctgcgtgctgagcttatcca

SEQ ID NO: 29563 - DNA, 20 bp, synthetic construct
  source 1..20: mol_type = other DNA
gggagtggtaaaacccattg

SEQ ID NO: 29564 - DNA, 20 bp, synthetic construct
  source 1..20: mol_type = other DNA
tccttagcataggcatgtga

SEQ ID NO: 29565 - DNA, 20 bp, synthetic construct
  source 1..20: mol_type = other DNA
tggagaaaccaaatccattg

SEQ ID NO: 29566 - DNA, 20 bp, synthetic construct
  source 1..20: mol_type = other DNA
ggctactgttagagcaacca

SEQ ID NO: 29567 - DNA, 20 bp, synthetic construct
  source 1..20: mol_type = other DNA
tgttctctaagtgagcaagg

SEQ ID NO: 29568 - DNA, 20 bp, synthetic construct
  source 1..20: mol_type = other DNA
cgaggatacatccttcaggt

SEQ ID NO: 29569 - DNA, 20 bp, synthetic construct
  source 1..20: mol_type = other DNA
cctgaccagcattactaatg

SEQ ID NO: 29570 - DNA, 20 bp, synthetic construct
  source 1..20: mol_type = other DNA
tttggaggcaaccctagcag

SEQ ID NO: 29571 - DNA, 20 bp, synthetic construct
  source 1..20: mol_type = other DNA
ggatatgtgtctcagtgaag

SEQ ID NO: 29572 - DNA, 20 bp, synthetic construct
  source 1..20: mol_type = other DNA
gctgtcaggtctgagtgaga

SEQ ID NO: 29573 - DNA, 20 bp, synthetic construct
  source 1..20: mol_type = other DNA
agatggagcacaccagtgaa

SEQ ID NO: 29574 - DNA, 20 bp, synthetic construct
  source 1..20: mol_type = other DNA
gggtgaacttaacctttcac

SEQ ID NO: 29575 - DNA, 20 bp, synthetic construct
  source 1..20: mol_type = other DNA
aagtggagcacatcagtgaa

SEQ ID NO: 29576 - DNA, 20 bp, synthetic construct
  source 1..20: mol_type = other DNA
agtggagcacatcagtgaaa

SEQ ID NO: 29577 - DNA, 20 bp, synthetic construct
  source 1..20: mol_type = other DNA
tgccatcgtaggcgtacccg

SEQ ID NO: 29578 - DNA, 20 bp, synthetic construct
  source 1..20: mol_type = other DNA
cactaccagtggaagcgcgt

SEQ ID NO: 29579 - DNA, 20 bp, synthetic construct
  source 1..20: mol_type = other DNA
gtagcccacggtgagaatcc

SEQ ID NO: 29580 - DNA, 20 bp, synthetic construct
  source 1..20: mol_type = other DNA
aactacacggaccacacgct

SEQ ID NO: 29581 - DNA, 20 bp, synthetic construct
  source 1..20: mol_type = other DNA
gccagcagatcaggatacac

SEQ ID NO: 29582 - DNA, 20 bp, synthetic construct
  source 1..20: mol_type = other DNA
ggtgggagagtacaacgctg

SEQ ID NO: 29583 - DNA, 20 bp, synthetic construct
  source 1..20: mol_type = other DNA
gactggagttctgtatggcg

SEQ ID NO: 29584 - DNA, 20 bp, synthetic construct
  source 1..20: mol_type = other DNA
gaccgtcccatcagacaatg

SEQ ID NO: 29585 - DNA, 20 bp, synthetic construct
  source 1..20: mol_type = other DNA
gcatacgaggagaacatgta

SEQ ID NO: 29586 - DNA, 20 bp, synthetic construct
  source 1..20: mol_type = other DNA
cttatcggctagaacaggcg

SEQ ID NO: 29587 - DNA, 20 bp, synthetic construct
  source 1..20: mol_type = other DNA
catggagggctacattggcg

SEQ ID NO: 29588 - DNA, 20 bp, synthetic construct
  source 1..20: mol_type = other DNA
cctgcggctctatgacacgg

SEQ ID NO: 29589 - DNA, 20 bp, synthetic construct
  source 1..20: mol_type = other DNA
ggccatgatcatcccgagga

SEQ ID NO: 29590 - DNA, 20 bp, synthetic construct
  source 1..20: mol_type = other DNA
gagtacaacaacaagcggtc

SEQ ID NO: 29591 - DNA, 20 bp, synthetic construct
  source 1..20: mol_type = other DNA
cagagacaaaggatccatca

SEQ ID NO: 29592 - DNA, 20 bp, synthetic construct
  source 1..20: mol_type = other DNA
gtttggacagcatctagcca

SEQ ID NO: 29593 - DNA, 20 bp, synthetic construct
  source 1..20: mol_type = other DNA
gagatggataaattgcaccc

SEQ ID NO: 29594 - DNA, 20 bp, synthetic construct
  source 1..20: mol_type = other DNA
cagttacagaagtggatccg

SEQ ID NO: 29595 - DNA, 20 bp, synthetic construct
  source 1..20: mol_type = other DNA
gcgttcgagcccatcaccgt

SEQ ID NO: 29596 - DNA, 20 bp, synthetic construct
  source 1..20: mol_type = other DNA
gcagagtcgatacaaacagg

SEQ ID NO: 29597 - DNA, 20 bp, synthetic construct
  source 1..20: mol_type = other DNA
gccgctcaacgcttcgggta

SEQ ID NO: 29598 - DNA, 20 bp, synthetic construct
  source 1..20: mol_type = other DNA
cttcgccgagtgctgccgcg

SEQ ID NO: 29599 - DNA, 20 bp, synthetic construct
  source 1..20: mol_type = other DNA
tgtgccagcccagccgtgta

SEQ ID NO: 29600 - DNA, 20 bp, synthetic construct
  source 1..20: mol_type = other DNA
gtttctagactactacgagc

SEQ ID NO: 29601 - DNA, 20 bp, synthetic construct
  source 1..20: mol_type = other DNA
atcaccgtgggcctagccat

SEQ ID NO: 29602 - DNA, 20 bp, synthetic construct
  source 1..20: mol_type = other DNA
gcagaagataaaactgtacc

SEQ ID NO: 29603 - DNA, 20 bp, synthetic construct
  source 1..20: mol_type = other DNA
gtaggacaggtagccggtga

SEQ ID NO: 29604 - DNA, 20 bp, synthetic construct
  source 1..20: mol_type = other DNA
caaactcagcaatgcaggcg

SEQ ID NO: 29605 - DNA, 20 bp, synthetic construct
  source 1..20: mol_type = other DNA
cgcggcagcactcggcgaag

SEQ ID NO: 29606 - DNA, 20 bp, synthetic construct
  source 1..20: mol_type = other DNA
ctcgaacgccgccaccactc

SEQ ID NO: 29607 - DNA, 20 bp, synthetic construct
  source 1..20: mol_type = other DNA
ccggtccccagcgtcacgcg

SEQ ID NO: 29608 - DNA, 20 bp, synthetic construct
  source 1..20: mol_type = other DNA
aaacacagttaacccaatgg

SEQ ID NO: 29609 - DNA, 20 bp, synthetic construct
  source 1..20: mol_type = other DNA
tgccaggaagcctggaacgg

SEQ ID NO: 29610 - DNA, 20 bp, synthetic construct
  source 1..20: mol_type = other DNA
cagtaggaaggatgtcctcg

SEQ ID NO: 29611 - DNA, 20 bp, synthetic construct
  source 1..20: mol_type = other DNA
agacatagtagtggacacgg

SEQ ID NO: 29612 - DNA, 20 bp, synthetic construct
  source 1..20: mol_type = other DNA
agccaaaggtgctgacaccg

SEQ ID NO: 29613 - DNA, 20 bp, synthetic construct
  source 1..20: mol_type = other DNA
atggagttccgcgaccacgt

SEQ ID NO: 29614 - DNA, 20 bp, synthetic construct
  source 1..20: mol_type = other DNA
gggtgcagggtgccgaacag

SEQ ID NO: 29615 - DNA, 20 bp, synthetic construct
  source 1..20: mol_type = other DNA
ccaggtaatccacctcgctg

SEQ ID NO: 29616 - DNA, 20 bp, synthetic construct
  source 1..20: mol_type = other DNA
gcggagaagcacttcatggt

SEQ ID NO: 29617 - DNA, 20 bp, synthetic construct
  source 1..20: mol_type = other DNA
ggagcctgaactgctcgttg

SEQ ID NO: 29618 - DNA, 20 bp, synthetic construct
  source 1..20: mol_type = other DNA
ccgcctgccttgcagatacg

SEQ ID NO: 29619 - DNA, 20 bp, synthetic construct
  source 1..20: mol_type = other DNA
ggtgtcagcacctttggctg

SEQ ID NO: 29620 - DNA, 20 bp, synthetic construct
  source 1..20: mol_type = other DNA
ggacgtgtccatgcgccgca

SEQ ID NO: 29621 - DNA, 20 bp, synthetic construct
  source 1..20: mol_type = other DNA
agccccagaagtctaatgcc

SEQ ID NO: 29622 - DNA, 20 bp, synthetic construct
  source 1..20: mol_type = other DNA
gacccatggaagtaactacg

SEQ ID NO: 29623 - DNA, 20 bp, synthetic construct
  source 1..20: mol_type = other DNA
caaatcatcggtggaaagcg

SEQ ID NO: 29624 - DNA, 20 bp, synthetic construct
  source 1..20: mol_type = other DNA
gcatgtggaaccatgacatg

SEQ ID NO: 29625 - DNA, 20 bp, synthetic construct
  source 1..20: mol_type = other DNA
ggtgaggactgggaatctag

SEQ ID NO: 29626 - DNA, 20 bp, synthetic construct
  source 1..20: mol_type = other DNA
atgttgtcataacattgaca

SEQ ID NO: 29627 - DNA, 20 bp, synthetic construct
  source 1..20: mol_type = other DNA
gtagtgttgagacaaccaaa

SEQ ID NO: 29628 - DNA, 20 bp, synthetic construct
  source 1..20: mol_type = other DNA
tcaggccacaaacacgttgg

SEQ ID NO: 29629 - DNA, 20 bp, synthetic construct
  source 1..20: mol_type = other DNA
gcacacacgcagcgacttag

SEQ ID NO: 29630 - DNA, 20 bp, synthetic construct
  source 1..20: mol_type = other DNA
gtgtcttcagcattaggtag

SEQ ID NO: 29631 - DNA, 20 bp, synthetic construct
  source 1..20: mol_type = other DNA
ctccagcccgtaggaagaca

SEQ ID NO: 29632 - DNA, 20 bp, synthetic construct
  source 1..20: mol_type = other DNA
aggcaacttccaacaaagag

SEQ ID NO: 29633 - DNA, 20 bp, synthetic construct
  source 1..20: mol_type = other DNA
caggctggaactctatgctt

SEQ ID NO: 29634 - DNA, 20 bp, synthetic construct
  source 1..20: mol_type = other DNA
tactgcacagaacacagtgt

SEQ ID NO: 29635 - DNA, 20 bp, synthetic construct
  source 1..20: mol_type = other DNA
tggggtaacttctctacagg

SEQ ID NO: 29636 - DNA, 20 bp, synthetic construct
  source 1..20: mol_type = other DNA
gcaggtccctgcatgaagca

SEQ ID NO: 29637 - DNA, 20 bp, synthetic construct
  source 1..20: mol_type = other DNA
cacgtacattacactcagca

SEQ ID NO: 29638 - DNA, 20 bp, synthetic construct
  source 1..20: mol_type = other DNA
atattgcattaccaaaccag

SEQ ID NO: 29639 - DNA, 20 bp, synthetic construct
  source 1..20: mol_type = other DNA
cctgctgagtgtaatgtacg

SEQ ID NO: 29640 - DNA, 20 bp, synthetic construct
  source 1..20: mol_type = other DNA
attctatcaagaaaaatacg

SEQ ID NO: 29641 - DNA, 20 bp, synthetic construct
  source 1..20: mol_type = other DNA
cttgcaaaccacctctggtt

SEQ ID NO: 29642 - DNA, 20 bp, synthetic construct
  source 1..20: mol_type = other DNA
tatttattaactcacctagg

SEQ ID NO: 29643 - DNA, 20 bp, synthetic construct
  source 1..20: mol_type = other DNA
tccaacttgcaaaccacctc

SEQ ID NO: 29644 - DNA, 20 bp, synthetic construct
  source 1..20: mol_type = other DNA
gtaatagaagctcctttgta

SEQ ID NO: 29645 - DNA, 20 bp, synthetic construct
  source 1..20: mol_type = other DNA
acctaggtggctctgacttg

SEQ ID NO: 29646 - DNA, 20 bp, synthetic construct
  source 1..20: mol_type = other DNA
ttgcattaccaaaccagagg

SEQ ID NO: 29647 - DNA, 20 bp, synthetic construct
  source 1..20: mol_type = other DNA
acaggtgctgtggatattag

(The sequence listing continues in the following parts.)
